United States Patent Application Publication US 2026/0337666 A1 - sequence listing, part 18

SEQ ID NO: 29779 - protein, 714 aa, Homo sapiens
  REGION 1..714: note = ENSP00000270112
MPAAAGDGLLGEPAAPGGGGGAEDAARPAAACEGSFLPAWVSGVPRERLRDFQHHKRVGNYLIGSRKLGEGSFAKVREGLHVLTGEKVAIKVIDKKRAKKDTYVTKNLRREGQIQQMIRHPNITQLLDILETENSYYLVMELCPGGNLMHKIYEKKRLEESEARRYIRQLISAVEHLHRAGVVHRDLKIENLLLDEDNNIKLIDFGLSNCAGILGYSDPFSTQCGSPAYAAPELLARKKYGPKIDVWSIGVNMYAMLTGTLPFTVEPFSLRALYQKMVDKEMNPLPTQLSTGAISFLRSLLEPDPVKRPNIQQALANRWLNENYTGKVPCNVTYPNRISLEDLSPSVVLHMTEKLGYKNSDVINTVLSNRACHILAIYFLLNKKLERYLSGKSDIQDSLCYKTRLYQIEKYRAPKESYEASLDTWTRDLEFHAVQDKKPKEQEKRGDFLHRPFSKKLDKNLPSHKQPSGSLMTQIQNTKALLKDRKASKSSFPDKDSFGCRNIFRKTSDSNCVASSSMEFIPVPPPRTPRIVKKPEPHQPGPGSTGIPHKEDPLMLDMVRSFESVDRDDHVEVLSPSHHYRILNSPVSLARRNSSERTLSPGLPSGSMSPLHTPLHPTLVSFAHEDKNSPPKEEGLCCPPPVPSNGPMQPLGSPNCVKSRGRFPMMGIGQMLRKRHQSLQPSADRPLEASLPPLQPLAPVNLAFDMADGVKTQC

SEQ ID NO: 29780 - protein, 162 aa, Homo sapiens
  REGION 1..162: note = ENSP00000411860
QMIRHPNITQLLDILETENSYYLVMELCPGGNLMHKIYEKKRLEESEARRYIRQLISAVEHLHRAGVVHRDLKIENLLLDEDNNIKLIDFGLSNCAGILGYSDPFSTQCGSPAYAAPELLARKKYGPKIDVWSMCHQFPALSPGTGSCEEAKYSAGTGESLA

SEQ ID NO: 29781 - protein, 112 aa, Homo sapiens
  REGION 1..112: note = ENSP00000408219
RYLSGKSDIQDSLCYKTRLYQIEKYRAPKESYEASLDTWTRDLEFHAVQDKKPKEQEKRGDFLHRPFSKKLDKNLPSHKQPSGSLMTQIQNTKALLKDRKASKSSFPDKGLS

SEQ ID NO: 29782 - protein, 924 aa, Homo sapiens
  REGION 1..924: note = ENSP00000221980
MPGPSPGLRRALLGLWAALGLGLFGLSAVSQEPFWADLQPRVAFVERGGSLWLNCSTNCPRPERGGLETSLRRNGTQRGLRWLARQLVDIREPETQPVCFFRCARRTLQARGLIRTFQRPDRVELMPLPPWQPVGENFTLSCRVPGAGPRASLTLTLLRGAQELIRRSFAGEPPRARGAVLTATVLARREDHGANFSCRAELDLRPHGLGLFENSSAPRELRTFSLSPDAPRLAAPRLLEVGSERPVSCTLDGLFPASEARVYLALGDQNLSPDVTLEGDAFVATATATASAEQEGARQLVCNVTLGGENRETRENVTIYSFPAPLLTLSEPSVSEGQMVTVTCAAGAQALVTLEGVPAAVPGQPAQLQLNATENDDRRSFFCDATLDVDGETLIKNRSAELRVLYAPRLDDSDCPRSWTWPEGPEQTLRCEARGNPEPSVHCARSDGGAVLALGLLGPVTRALSGTYRCKAANDQGEAVKDVTLTVEYAPALDSVGCPERITWLEGTEASLSCVAHGVPPPDVICVRSGELGAVIEGLLRVAREHAGTYRCEATNPRGSAAKNVAVTVEYGPRFEEPSCPSNWTWVEGSGRLFSCEVDGKPQPSVKCVGSGGATEGVLLPLAPPDPSPRAPRIPRVLAPGIYVCNATNRHGSVAKTVVVSAESPPEMDESTCPSHQTWLEGAEASALACAARGRPSPGVRCSREGIPWPEQQRVSREDAGTYHCVATNAHGTDSRTVTVGVEYRPVVAELAASPPGGVRPGGNFTLTCRAEAWPPAQISWRAPPGALNIGLSSNNSTLSVAGAMGSHGGEYECAATNAHGRHARRITVRVAGPWLWVAVGGAAGGAALLAAGAGLAFYVQSTACKKGEYNVQEAESSGEAVCLNGAGGGAGGAAGAEGGPEAAGGAAESPAEGEVFAIQLTSA

SEQ ID NO: 29783 - protein, 78 aa, Homo sapiens
  REGION 1..78: note = ENSP00000464796
MPLPPWQPVGENFTLSCRVPGAGPRASLTLTLLRGAQELIRRSFAGEPPRARGAVLTATVLARREDHGANFSCRAELD

SEQ ID NO: 29784 - protein, 284 aa, Homo sapiens
  REGION 1..284: note = ENSP00000343552
MAGCAARAPPGSEARLSLATFLLGASVLALPLLTRAGLQGRTGLALYVAGLNALLLLLYRPPRYQIAIRACFLGFVFGCGTLLSFSQSSWSHFGWYMCSLSLFHYSEYLVTAVNNPKSLSLDSFLLNHSLEYTVAALSSWLEFTLENIFWPELKQITWLSVTGLLMVVFGECLRKAAMFTAGSNFNHVVQNEKSDTHTLVTSGVYAWFRHPSYVGWFYWSIGTQVMLCNPICGVSYALTVWRFFRDRTEEEEISLIHFFGEEYLEYKKRVPTGLPFIKGVKVDL

SEQ ID NO: 29785 - protein, 116 aa, Homo sapiens
  REGION 1..116: note = ENSP00000466222
MAGCAARAPPGSEARLSLATFLLGASVLALPLLTRAGLQGRTGLALYVAGLNALLLLLYRPPRYQIAIRACFLGFVFGCGTLLSFSQSSWSHFGWSHLVHPHSHCRIFPYTMISVP

SEQ ID NO: 29786 - protein, 94 aa, Homo sapiens
  REGION 1..94: note = ENSP00000467999
MAGCAARAPPGSEARLSLATFLLGASVLALPLLTRAGLQGRTGLALYVAGLNALLLLLYRPPRYQIAIRACFLGFVFGCGTLLSFSQSSWSHFG

SEQ ID NO: 29787 - protein, 309 aa, Homo sapiens
  REGION 1..309: note = ENSP00000339477
MRLGSPGLLFLLFSSLRADTQEKEVRAMVGSDVELSCACPEGSRFDLNDVYVYWQTSESKTVVTYHIPQNSSLENVDSRYRNRALMSPAGMLRGDFSLRLFNVTPQDEQKFHCLVLSQSLGFQEVLSVEVTLHVAANFSVPVVSAPHSPSQDELTFTCTSINGYPRPNVYWINKTDNSLLDQALQNDTVFLNMRGLYDVVSVLRIARTPSVNIGCCIENVLLQQNLTVGSQTGNDIGERDKITENPVSTGEKNAATWSILAVLCLLVVVAVAIGWVCRDRCLQHSYAGAWAVSPETELTESWNLLLLLS

SEQ ID NO: 29788 - protein, 302 aa, Homo sapiens
  REGION 1..302: note = ENSP00000384432
MRLGSPGLLFLLFSSLRADTQEKEVRAMVGSDVELSCACPEGSRFDLNDVYVYWQTSESKTVVTYHIPQNSSLENVDSRYRNRALMSPAGMLRGDFSLRLFNVTPQDEQKFHCLVLSQSLGFQEVLSVEVTLHVAANFSVPVVSAPHSPSQDELTFTCTSINGYPRPNVYWINKTDNSLLDQALQNDTVFLNMRGLYDVVSVLRIARTPSVNIGCCIENVLLQQNLTVGSQTGNDIGERDKITENPVSTGEKNAATWSILAVLCLLVVVAVAIGWVCRDRCLQHSYAGAWAVSPETELTGHV

SEQ ID NO: 29789 - protein, 473 aa, Homo sapiens
  REGION 1..473: note = ENSP00000383230
MRLGSPGLLFLLFSSLRADTQEKEVRAMVGSDVELSCACPEGSRFDLNDVYVYWQTSESKTVVTYHIPQNSSLENVDSRYRNRALMSPAGMLRGDFSLRLFNVTPQDEQKFHCLVLSQSLGFQEVLSVEVTLHVAANFSVPVVSAPHSPSQDELTFTCTSINGYPRPNVYWINKTDNSLLDQALQNDTVFLNMRGLYDVVSVLRIARTPSVNIGCCIENVLLQQNLTVGSQTGNDIGERDKITENPVSTGEKNAATWSILAVLCLLVVVAVAIGWVCRDRCLQHSYAGAWAVSPETELTGEFAVGSSRFWGAQGRLGCQLSFRVSKNFQKAKVPCLEQLLFLETQRSPRWCAWHFLQPPLGMGWHPGVHFVTLRWDFPNMHRSRETSARPPRSPVPSPDQGVQGGSRHRRPAPMGCPEWVQAPAPSPRGVSRAGPGTGAQPLWGVRSGSGHRQLLSVAATPAALVCPSVPGAT

SEQ ID NO: 29790 - protein, 185 aa, Homo sapiens
  REGION 1..185: note = ENSP00000383228
MRLGSPGLLFLLFSSLRAANFSVPVVSAPHSPSQDELTFTCTSINGYPRPNVYWINKTDNSLLDQALQNDTVFLNMRGLYDVVSVLRIARTPSVNIGCCIENVLLQQNLTVGSQTGNDIGERDKITENPVSTGEKNAATWSILAVLCLLVVVAVAIGWVCRDRCLQHSYAGAWAVSPETELTGHV

SEQ ID NO: 29791 - protein, 134 aa, Homo sapiens
  REGION 1..134: note = ENSP00000234091
MKAFSPVRSVRKNSLSDHSLGISRSKTPVDDPMSLLYNMNDCYSKLKELVPSIPQNKKVSKMEILQHVIDYILDLQIALDSHPTIVSLHHQRPGQNQASRTPLTTLNTDISILSLQASEFPSELMSNDSKALCG

SEQ ID NO: 29792 - protein, 134 aa, Homo sapiens; identical to SEQ ID NO: 29791
  REGION 1..134: note = ENSP00000385465

SEQ ID NO: 29793 - protein, 134 aa, Homo sapiens; identical to SEQ ID NO: 29791
  REGION 1..134: note = ENSP00000379585

SEQ ID NO: 29794 - protein, 161 aa, Homo sapiens
  REGION 1..161: note = ENSP00000367972
MKAVSPVRPSGRKAPSGCGGGELALRCLAEHGHSLGGSAAAAAAAAAARCKAAEAAADEPALCLQCDMNDCYSRLRRLVPTIPPNKKVSKVEILQHVIDYILDLQLALETHPALLRQPPPPAPPHHPAGTCPAAPPRTPLTALNTDPAGAVNKQGDSILCR

SEQ ID NO: 29795 - protein, 284 aa, Homo sapiens
  REGION 1..284: note = ENSP00000370748
MWRGLALARAIGCAARGRGQWAVRAADCAQSGRHPGPAVVCGRRLISVLEQIRHFVMMPEINTNHLDKQQVQLLAEMCILIDENDNKIGAETKKNCHLNENIEKGLLHRAFSVFLFNTENKLLLQQRSDAKITFPGCFTNTCCSHPLSNPAELEESDALGVRRAAQRRLKAELGIPLEEVPPEEINYLTRIHYKAQSDGIWGEHEIDYILLVRKNVTLNPDPNEIKSYCYVSKEELKELLKKAASGEIKITPWFKIIAATFLFKWWDNLNHLNQFVDHEKIYRM

SEQ ID NO: 29796 - protein, 120 aa, Homo sapiens
  REGION 1..120: note = ENSP00000404771
MELDLFLGLDDVFPRLLHGLLHRAFSVFLFNTENKLLLQQRSDAKITFPGCFTNTCCSHPLSNPAELEESDALGVRRAAQRRLKAELGIPLEEVTSSPTQPYKLKPKHTIKRFLIKFLNS

SEQ ID NO: 29797 - protein, 122 aa, Homo sapiens
  REGION 1..122: note = ENSP00000401879
MPEINTNHLDKQQVQLLAEMCILIDENDNKIGAETKKNCHLNENIEKGLLHRAFSVFLFNTENKLLLQQRSDAKITFPGCFTNTCCSHPLSNPAELEESDALGVRRAAQRRLKAELGIPLEE

SEQ ID NO: 29798 - protein, 255 aa, Homo sapiens
  REGION 1..255: note = ENSP00000436261
MSNNLSELDTKIQEKAMKVDMDICRRIDITAKLCDVAQQRNCEDMIQMFQKKLVPSMGGRKRERKAAVEEDTSLSESEGPRQPDGDEEESTALSINEEMQRMLNQLREYDFEDDCDSLTWEETEETLLLWEDFSGYAMAAAEAQGEQEDSLEKVIKDTESLFKTREKEYQETIDQIELELATAKNDMNRHLHEYMEMCSMKRGLDVQMETCRRLITQSGDRKSPAFTAVPLSDPPPPPSEAEDSDRDVSSDSSMR

SEQ ID NO: 29799 - protein, 562 aa, Homo sapiens
  REGION 1..562: note = ENSP00000337593
MNPLFGPNLFLLQQEQQGLAGPLGDSLGGDHFAGGGDLPPAPLSPAGPAAYSPPGPGPAPPAAMALRNDLGSNINVLKTLNLRFRCFLAKVHELERRNRLLEKQLQQALEEGKQGRRGLGRRDQAVQTGFVSPIRPLGLQLGARPAAVCSPSARVLGSPARSPAGPLAPSAASLSSSSTSTSTTYSSSARFMPGTIWSFSHARRLGPGLEPTLVQGPGLSWVHPDGVGVQIDTITPEIRALYNVLAKVKRERDEYKRRWEEEYTVRIQLQDRVNELQEEAQEADACQEELALKVEQLKAELVVFKGLMSNNLSELDTKIQEKAMKVDMDICRRIDITAKLCDVAQQRNCEDMIQMFQKKLVPSMGGRKRERKAAVEEDTSLSESEGPRQPDGDEEESTALSINEEMQRMLNQLREYDFEDDCDSLTWEETEETLLLWEDFSGYAMAAAEAQGEQEDSLEKVIKDTESLFKTREKEYQETIDQIELELATAKNDMNRHLHEYMEMCSMKRGLDVQMETCRRLITQSGDRKSPAFTAVPLSDPPPPPSEAEDSDRDVSSDSSMR

SEQ ID NO: 29800 - protein, 264 aa, Homo sapiens
  REGION 1..264: note = ENSP00000432493
MNPLFGPNLFLLQQEQQGLAGPLGDSLGGDHFAGGGDLPPAPLSPAGPAAYSPPGPGPAPPAAMALRNDLGSNINVLKTLNLRFRCFLAKVHELERRNRLLEKQLQQALEEGKQGRRGLGRRDQAVQTGFVSPIRPLGLQLGARPAAVCSPSARVLGSPARSPAGPLAPSAASLSSSSTSTSTTYSSSARFMPGTIWSFSHARRLGPGLEPTLVQGPGLSWVHPDGVGVQIDTITPEIRALYNVLAKVKRERDEYKRRCFYRVK

SEQ ID NO: 29801 - protein, 559 aa, Homo sapiens
  REGION 1..559: note = ENSP00000380052
MNPLFGPNLFLLQQEQQGLAGPLGDSLGGDHFAGGGDLPPAPLSPAGPAAYSPPGPGPAPPAAMALRNDLGSNINVLKTLNLRFRCFLAKVHELERRNRLLEKQLQQALEEGKQGRRGLGRRDQAVQTGFVSPIRPLGLQLGARPAAVCSPSARVLGSPARSPAGPLAPSAASLSSSSTSTSTTYSSSARFMPGTIWSFSHARRLGPGLEPTLVQGPGLSWVHPDGVGVQIDTITPEIRALYNVLAKVKRERDEYKRRWEEEYTVRIQLQDRVNELQEEAQEADACQEELALKVEQLKAELVVFKGLMSNNLSELDTKIQEKAMKVDMDICRRIDITAKLCDVAQQRNCEDMIQMFQVPSMGGRKRERKAAVEEDTSLSESEGPRQPDGDEEESTALSINEEMQRMLNQLREYDFEDDCDSLTWEETEETLLLWEDFSGYAMAAAEAQGEQEDSLEKVIKDTESLFKTREKEYQETIDQIELELATAKNDMNRHLHEYMEMCSMKRGLDVQMETCRRLITQSGDRKSPAFTAVPLSDPPPPPSEAEDSDRDVSSDSSMR

SEQ ID NO: 29802 - protein, 563 aa, Homo sapiens
  REGION 1..563: note = ENSP00000349364
MNPLFGPNLFLLQQEQQGLAGPLGDSLGGDHFAGGGDLPPAPLSPAGPAAYSPPGPGPAPPAAMALRNDLGSNINVLKTLNLRFRCFLAKVHELERRNRLLEKQLQQALEEGKQGRRGLGRRDQAVQTGFVSPIRPLGLQLGARPAAVCSPSARVLGSPARSPAGPLAPSAASLSSSSTSTSTTYSSSARFMPGTIWSFSHARRLGPGLEPTLVQGPGLSWVHPDGVGVQIDTITPEIRALYNVLAKVKRERDEYKRRWEEEYTVRIQLQDRVNELQEEAQEADACQEELALKVEQLKAELVVFKGLMSNNLSELDTKIQEKAMKVDMDICRRIDITAKLCDVAQQRNCEDMIQMFQKKLVPSMGGRKRERKAAVEEDTSLSESEGPRQPDGDEEESTALSINEEMQRMLNQLREYDFEDDCDSLTWEETEETLLLWEDFSGYAMAAAEAQGEQQEDSLEKVIKDTESLFKTREKEYQETIDQIELELATAKNDMNRHLHEYMEMCSMKRGLDVQMETCRRLITQSGDRKSPAFTAVPLSDPPPPPSEAEDSDRDVSSDSSMR

SEQ ID NO: 29803 - protein, 571 aa, Homo sapiens
  REGION 1..571: note = ENSP00000482285
MNPLFGPNLFLLQQEQQGLAGPLGDSLGGDHFAGGGDLPPAPLSPAGPAAYSPPGPGPAPPAAMALRNDLGSNINVLKTLNLRFRCFLAKVHELERRNRLLEKQLQQALEEGKQGRRGLGRRDQAVQTGFVSPIRPLGLQLGARPAAVCSPSARVLGSPARSPAGPLAPSAASLSSSSTSTSTTYSSSARFMPGTIWSFSHARRLGPGLEPTLVQGPGLSWVHPDGVGVQIDTITPEIRALYNVLAKVKRERDEYKRRWEEEYTVRIQLQDRVNELQEEAQEADACQEELALKVEQLKAELVVFKGLMSNNLSELDTKIQEKAMKVDMDICRRIDITAKLCDVAQQRNCEDMIQMFQKKLSLHLSPIKVPSMGGRKRERKAAVEEDTSLSESEGPRQPDGDEEESTALSINEEMQRMLNQLREYDFEDDCDSLTWEETEETLLLWEDFSGYAMAAAEAQGEQQEDSLEKVIKDTESLFKTREKEYQETIDQIELELATAKNDMNRHLHEYMEMCSMKRGLDVQMETCRRLITQSGDRKSPAFTAVPLSDPPPPPSEAEDSDRDVSSDSSMR

SEQ ID NO: 29804 - protein, 256 aa, Homo sapiens
  REGION 1..256: note = ENSP00000390721
MSNNLSELDTKIQEKAMKVDMDICRRIDITAKLCDVAQQRNCEDMIQMFQKKLVPSMGGRKRERKAAVEEDTSLSESEGPRQPDGDEEESTALSINEEMQRMLNQLREYDFEDDCDSLTWEETEETLLLWEDFSGYAMAAAEAQGEQQEDSLEKVIKDTESLFKTREKEYQETIDQIELELATAKNDMNRHLHEYMEMCSMKRGLDVQMETCRRLITQSGDRKSPAFTAVPLSDPPPPPSEAEDSDRDVSSDSSMR

SEQ ID NO: 29805 - protein, 256 aa, Homo sapiens; identical to SEQ ID NO: 29804
  REGION 1..256: note = ENSP00000482340

SEQ ID NO: 29806 - protein, 520 aa, Homo sapiens
  REGION 1..520: note = ENSP00000327824
MAGPERWGPLLLCLLQAAPGRPRLAPPQNVTLLSQNFSVYLTWLPGLGNPQDVTYFVAYQSSPTRRRWREVEECAGTKELLCSMMCLKKQDLYNKFKGRVRTVSPSSKSPWVESEYLDYLFEVEPAPPVLVLTQTEEILSANATYQLPPCMPPLDLKYEVAFWKEGAGNKTLFPVTPHGQPVQITLQPAASEHHCLSARTIYTFSVPKYSKFSKPTCFLLEVPEANWAFLVLPSLLILLLVIAAGGVIWKTLMGNPWFQRAKMPRALDFSGHTHPVATFQPSRPESVNDLFLCPQKELTRGVRPTPRVRAPATQQTRWKKDLAEDEEEEDEEDTEDGVSFQPYIEPPSFLGQEHQAPGHSEAGGVDSGRPRAPLVPSEGSSAWDSSDRSWASTVDSSWDRAGSSGYLAEKGPGQGPGGDGHQESLPPPEFSKDSGFLEELPEDNLSSWATWGTLPPEPNLVPGGPPVSLQTLTFCWESSPEEEEEARESEIEDSDAGSWGAESTQRTEDRGRTLGHYMAR

SEQ ID NO: 29807 - protein, 244 aa, Homo sapiens
  REGION 1..244: note = ENSP00000328994
MAGPERWGPLLLCLLQAAPGRPRLAPPQNVTLLSQNFSVYLTWLPGLGNPQDVTYFVAYQSSPTRRRWREVEECAGTKELLCSMMCLKKQDLYNKFKGRVRTVSPSSKSPWVESEYLDYLFEVEPAPPVLVLTQTEEILSANATYQLPPCMPPLDLKYEVAFWKEGAGNKTLFPVTPHGQPVQITLQPAASEHHCLSARTIYTFSVPKYSKFSKPTCFLLEVPGLFWTHTPCGNLSAQQTRVRE

SEQ ID NO: 29808 - protein, 491 aa, Homo sapiens
  REGION 1..491: note = ENSP00000363542
MAGPERWGPLLLCLLQAAPGRPRLAPPQNVTLLSQNFSVYLTWLPGLGNPQDVTYFVAYQSSPTRRRWREVEECAGTKELLCSMMCLKKQDLYNKFKGRVRTVSPSSKSPWVESEYLDYLFEVEPAPPVLVLTQTEEILSANATYQLPPCMPPLDLKYEVAFWKEGAGNKTLFPVTPHGQPVQITLQPAASEHHCLSARTIYTFSVPKYSKFSKPTCFLLEVPEANWAFLVLPSLLILLLVIAAGGVIWKTLMGNPWFQRAKMPRALELTRGVRPTPRVRAPATQQTRWKKDLAEDEEEEDEEDTEDGVSFQPYIEPPSFLGQEHQAPGHSEAGGVDSGRPRAPLVPSEGSSAWDSSDRSWASTVDSSWDRAGSSGYLAEKGPGQGPGGDGHQESLPPPEFSKDSGFLEELPEDNLSSWATWGTLPPEPNLVPGGPPVSLQTLTFCWESSPEEEEEARESEIEDSDAGSWGAESTQRTEDRGRTLGHYMAR

SEQ ID NO: 29809 - protein, 185 aa, Homo sapiens
  REGION 1..185: note = ENSP00000363540
MMCLKKQDLYNKFKGRVRTVSPSSKSPWVESEYLDYLFEVEPAPPVLVLTQTEEILSANATYQLPPCMPPLDLKYEVAFWKEGAGNKTLFPVTPHGQPVQITLQPAASEHHCLSARTIYTFSVPKYSKFSKPTCFLLEVPEANWAFLVLPSLLILLLVIAAGGVIWKTLMGNPWFQRAKMPRALV

SEQ ID NO: 29810 - protein, 211 aa, Homo sapiens
  REGION 1..211: note = ENSP00000363539
MAGPERWGPLLLCLLQAAPGRPRLAPPQNVTLLSQNFSVYLTWLPGLGNPQDVTYFVAYQSSPTRRRWREVEECAGTKELLCSMMCLKKQDLYNKFKGRVRTVSPSSKSPWVESEYLDYLFEVEPAPPVLVLTQTEEILSANATYQLPPCMPPLDLKYEVAFWKEGAGNKVGSSFPAPRLGPLLHPFLLRFFSPSQPAPAPLLQEVFPVHS

SEQ ID NO: 29811 - protein, 30 aa, Homo sapiens
  REGION 1..30: note = ENSP00000391379
MPKNKKRNTPHRGSSAGGGGSGAAAATAAT

SEQ ID NO: 29812 - protein, 451 aa, Homo sapiens
  REGION 1..451: note = ENSP00000005558
MPKNKKRNTPHRGSSAGGGGSGAAAATAATAGGQHRNVQPFSDEDASIETMSHCSGYSDPSSFAEDGPEVLDEEGTQEDLEYKLKGLIDLTLDKSAKTRQAALEGIKNALASKMLYEFILERRMTLTDSIERCLKKGKSDEQRAAAALASVLCIQLGPGIESEEILKTLGPILKKIICDGSASMQARQTCATCFGVCCFIATDDITELYSTLECLENIFTKSYLKEKDTTVICSTPNTVLHISSLLAWTLLLTICPINEVKKKLEMHFHKLPSLLSCDDVNMRIAAGESLALLFELARGIESDFFYEDMESLTQMLRALATDGNKHRAKVDKRKQRSVFRDVLRAVEERDFPTETIKFGPERMYIDCWVKKHTYDTFKEVLGSGMQYHLQSNEFLRNVFELGPPVMLDAATLKTMKISRFERHLYNSAAFKARTKARSKCRDKRADVGEFF

SEQ ID NO: 29813 - protein, 40 aa, Homo sapiens
  REGION 1..40: note = ENSP00000397592
MSHCSGYSDPSSFAEDGPEVLDEEGTQEDLEYKLKGLIDL

SEQ ID NO: 29814 - protein, 62 aa, Homo sapiens
  REGION 1..62: note = ENSP00000402453
MPKNKKRNTPHRGSSAGGGGSGAAAATAATAGGQHRNVQPFSDEDASIETMSHCSGYSDPSS

SEQ ID NO: 29815 - protein, 17 aa, Homo sapiens
  REGION 1..17: note = ENSP00000413893
MPKNKKRNTPHRGSSAG

SEQ ID NO: 29816 - protein, 451 aa, Homo sapiens; identical to SEQ ID NO: 29812
  REGION 1..451: note = ENSP00000384477

SEQ ID NO: 29817 - protein, 148 aa, Homo sapiens
  REGION 1..148: note = ENSP00000397314
MPKNKKRNTPHRGSSAGGGGSGAAAATAATAGGQHRNVQPFSDEDASIETMSHCSGYSDPSSFAEDGPEVLDEEGTQEDLEYKLKGLIDLTLDKSAKTRQAALEGIKNALASKMLYEFILERRMTLTDSIERCLKKGNALIFESQTYN

SEQ ID NO: 29818 - protein, 103 aa, Homo sapiens
  REGION 1..103: note = ENSP00000437250
MSHCSGYSDPSSFAEDGPEVLDEEGTQEDLEYKLKGLIDLTLDKSAKTRQAALEGIKNALASKMLYEFILERRMTLTDSIERCLKKGKSDEQRAAAALASVLC

SEQ ID NO: 29819 - protein, 127 aa, Homo sapiens
  REGION 1..127: note = ENSP00000402177
MSHCSGYSDPSSFAEDGPEVLDEEGTQEDLEYKLKGLIDLTLDKSAKTRQAALEGIKNALASKMLYEFILERRMTLTDSIERCLKKGKSDEQRAAAALASVLCIQLGPGIESEEILKTLGPILKKII

SEQ ID NO: 29820 - protein, 90 aa, Homo sapiens
  REGION 1..90: note = ENSP00000403203
MHFHKLPSLLSCDDVNMRIAAGESLALLFELARGIESDFFYEDMESLTQMLRALATDGNKHRAKVDKRKQRSVFRDVLRAVEERDFPTET

SEQ ID NO: 29821 - protein, 98 aa, Homo sapiens
  REGION 1..98: note = ENSP00000435635
VFRDVLRAVEERDFPTETIKFGPERMYIDCWVKKHTYDTFKEVLGSGMQYHLQSNEFLRNVFELGPPVMLDAATLKTMKISRFERFSGLSGVFASQSS

SEQ ID NO: 29822 - protein, 401 aa, Homo sapiens
  REGION 1..401: note = ENSP00000483255
MSHCSGYSDPSSFAEDGPEVLDEEGTQEDLEYKLKGLIDLTLDKSAKTRQAALEGIKNALASKMLYEFILERRMTLTDSIERCLKKGKSDEQRAAAALASVLCIQLGPGIESEEILKTLGPILKKIICDGSASMQARQTCATCFGVCCFIATDDITELYSTLECLENIFTKSYLKEKDTTVICSTPNTVLHISSLLAWTLLLTICPINEVKKKLEMHFHKLPSLLSCDDVNMRIAAGESLALLFELARGIESDFFYEDMESLTQMLRALATDGNKHRAKVDKRKQRSVFRDVLRAVEERDFPTETIKFGPERMYIDCWVKKHTYDTFKEVLGSGMQYHLQSNEFLRNVFELGPPVMLDAATLKTMKISRFERHLYNSAAFKARTKARSKCRDKRADVGEFF

SEQ ID NO: 29823 - protein, 401 aa, Homo sapiens; identical to SEQ ID NO: 29822
  REGION 1..401: note = ENSP00000439188

SEQ ID NO: 29824 - protein, 30 aa, Homo sapiens; identical to SEQ ID NO: 29811
  REGION 1..30: note = ENSP00000391379

SEQ ID NO: 29825 - protein, 451 aa, Homo sapiens; identical to SEQ ID NO: 29812
  REGION 1..451: note = ENSP00000005558

SEQ ID NO: 29826 - protein, 40 aa, Homo sapiens; identical to SEQ ID NO: 29813
  REGION 1..40: note = ENSP00000397592

SEQ ID NO: 29827 - protein, 62 aa, Homo sapiens; identical to SEQ ID NO: 29814
  REGION 1..62: note = ENSP00000402453

SEQ ID NO: 29828 - protein, 17 aa, Homo sapiens
  REGION 1..17: note = ENSP00000413893
MPKNKKRNTPHRGSSAG

SEQ ID NO: 29829 - protein, 451 aa, Homo sapiens; identical to SEQ ID NO: 29812
  REGION 1..451: note = ENSP00000384477

SEQ ID NO: 29830 - protein, 148 aa, Homo sapiens; identical to SEQ ID NO: 29817
  REGION 1..148: note = ENSP00000397314

SEQ ID NO: 29831 - protein, 103 aa, Homo sapiens; identical to SEQ ID NO: 29818
  REGION 1..103: note = ENSP00000437250

SEQ ID NO: 29832 - protein, 127 aa, Homo sapiens; identical to SEQ ID NO: 29819
  REGION 1..127: note = ENSP00000402177

SEQ ID NO: 29833 - protein, 90 aa, Homo sapiens; identical to SEQ ID NO: 29820
  REGION 1..90: note = ENSP00000403203

SEQ ID NO: 29834 - protein, 98 aa, Homo sapiens; identical to SEQ ID NO: 29821
  REGION 1..98: note = ENSP00000435635

SEQ ID NO: 29835 - protein, 401 aa, Homo sapiens; identical to SEQ ID NO: 29822
  REGION 1..401: note = ENSP00000483255

SEQ ID NO: 29836 - protein, 401 aa, Homo sapiens; identical to SEQ ID NO: 29822
  REGION 1..401: note = ENSP00000439188

SEQ ID NO: 29837 - protein, 32 aa, Homo sapiens
  REGION 1..32: note = ENSP00000452051
MEDLLDLDEELRYSLATSSPECELPQNRSITG

SEQ ID NO: 29838 - protein, 213 aa, Homo sapiens
  REGION 1..213: note = ENSP00000238628
MEDLLDLDEELRYSLATSRAKMGRRAQQESAQAENHLNGKNSSLTLTGETSSAKLPRCRQGGWAGDSVKASNGTQTGKQQLDLNACYHKTHHRDLGLASLEEADIPIIPDLEEVQEEDFVLQVAAPPSIQIKRVMTYRDLDNDLMKYSAIQTLDGEIDLKLLTKVLAPEHEVREDDVGWDWDHLFTEVSSEVLTEWDPLQTEKEDPAGQARHT

SEQ ID NO: 29839 - protein, 113 aa, Homo sapiens
  REGION 1..113: note = ENSP00000451096
MEDLLDLDEELRYSLATSRAKMGRRAQQESAQAENHLNGKNSSLTLTGETSSAKLPRCRQGGWAGDSVKASKFRRKASEEIEEYVSSILILMVSYVDLGQQCSLGGHDLFHLC

SEQ ID NO: 29840 - protein, 208 aa, Homo sapiens
  REGION 1..208: note = ENSP00000324177
MEDLLDLDEELRYSLATSRAKMGRRAQQESAQAENHLNGKNSSLTLTGETSSAKLPRCRQGGWAGDSVKASKFRRKASEEIEDFRLRPQSLNGSDYGGDIPIIPDLEEVQEEDFVLQVAAPPSIQIKRVMTYRDLDNDLMKYSAIQTLDGEIDLKLLTKVLAPEHEVREDDVGWDWDHLFTEVSSEVLTEWDPLQTEKEDPAGQARHT

SEQ ID NO: 29841 - protein, 208 aa, Homo sapiens; identical to SEQ ID NO: 29840
  REGION 1..208: note = ENSP00000440064

SEQ ID NO: 29842 - protein, 814 aa, Homo sapiens
  REGION 1..814: note = ENSP00000332773
MAVQRAASPRRPPAPLWPRLLLPLLLLLLPAPSEGLGHSAELAFAVEPSDDVAVPGQPIVLDCRVEGTPPVRITWRKNGVELPESTHSTLLANGSLMIRHFRLEPGGSPSDEGDYECVAQNRFGLVVSRKARIQAATMSDFHVHPQATVGEEGGVARFQCQIHGLPKPLITWEKNRVPIDTDNERYTLLPKGVLQITGLRAEDGGIFHCVASNIASIRISHGARLTVSGSGSGAYKEPAILVGPENLTLTVHQTAVLECVATGNPRPIVSWSRLDGRPIGVEGIQVLGTGNLIISDVTVQHSGVYVCAANRPGTRVRRTAQGRLVVQAPAEFVQHPQSISRPAGTTAMFTCQAQGEPPPHVTWLKNGQVLGPGGHVRLKNNNSTLTISGIGPEDEAIYQCVAENSAGSSQASARLTVLWAEGLPGPPRNVRAVSVSSTEVRVSWSEPLANTKEIIGYVLHIRKAADPPELEYQEAVSKSTFQHLVSDLEPSTAYSFYIKAYTPRGASSASVPTLASTLGEAPAPPPLSVRVLGSSSLQLLWEPWPRLAQHEGGFKLFYRPASKTSFTGPILLPGTVSSYNLSQLDPTAVYEVKLLAYNQHGDGNATVRFVSLRGASERTALSPPCDCRKEEAANQTSTTGIVIGIHIGVTCIIFCVLFLLFGQRGRVLLCKDVENQLSPPQGPRSQRDPGILALNGARRGQRGQLGRDEKRVDMKELEQLFPPASAAGQPDPRPTQDPAAPAPCEETQLSVLPLQGCGLMEGKTTEAKTTEATAPCAGLAAAPPPPDGGPGLLSEGQASRPAAARVTQPAHSEQ

SEQ ID NO: 29843 - protein, 535 aa, Homo sapiens
  REGION 1..535: note = ENSP00000454105
MSDFHVHPQATVGEEGGVARFQCQIHGLPKPLITWEKNRVPIDTDNERYTLLPKGVLQITGLRAEDGGIFHCVASNIASIRISHGARLTVSGSGSGAYKEPAILVGPENLTLTVHQTAVLECVATGNPRPIVSWSRLDGRPIGVEGIQVLGTGNLIISDVTVQHSGVYVCAANRPGTRVRRTAQGRLVVQAPAEFVQHPQSISRPAGTTAMFTCQAQGEPPPHVTWLKNGQVLGPGGHVRLKNNNSTLTISGIGPEDEAIYQCVAENSAGSSQASARLTVLWAEGLPGPPRNVRAVSVSSTEVRVSWSEPLANTKEIIGYVLHIRKAADPPELEYQEAVSKSTFQHLVSDLEPSTAYSFYIKAYTPRGASSASVPTLASTLGEAPAPPPLSVRVLGSSSLQLLWEPWPRLAQHEGGFKLFYRPASKTSFTGPILLPGTVSSYNLSQLDPTAVYEVKLLAYNQHGDGNATVRFVSLRGASERTALSPPCDCRKEEAANQTSTTGIVIGIHIGVTCIIFCVLFLLFGQRGRVLLCKD

SEQ ID NO: 29844 - protein, 137 aa, Homo sapiens
  REGION 1..137: note = ENSP00000452838
MPDSLIHPRWCERAMSDFHVHPQATVGEEGGVARFQCQIHGLPKPLITWEKNRVPIDTDNERYTLLPKGVLQITGLRAEDGGIFHCVASNIASIRISHGARLTVSGSGSGAYKEPAILVGPENLTLTVHQTAVLECV

SEQ ID NO: 29845 - protein, 1250 aa, Homo sapiens
  REGION 1..1250: note = ENSP00000319623
MARGDAGRGRGLLALTFCLLAARGELLLPQETTVELSCGVGPLQVILGPEQAAVLNCSLGAAAAGPPTRVTWSKDGDTLLEHDHLHLLPNGSLWLSQPLAPNGSDESVPEAVGVIEGNYSCLAHGPLGVLASQTAVVKLATLADFSLHPESQTVEENGTARFECHIEGLPAPIITWEKDQVTLPEEPRLIVLPNGVLQILDVQESDAGPYRCVATNSARQHFSQEALLSVAHRGSLASTRGQDVVIVAAPENTTVVSGQSVVMECVASADPTPFVSWVRQDGKPISTDVIVLGRTNLLIANAQPWHSGVYVCRANKPRTRDFATAAAELRVLAAPAITQAPEALSRTRASTARFVCRASGEPRPALRWLHNGAPLRPNGRVKVQGGGGSLVITQIGLQDAGYYQCVAENSAGMACAAASLAVVVREGLPSAPTRVTATPLSSSAVLVAWERPEMHSEQIIGFSLHYQKARGMDNVEYQFAVNNDTTELQVRDLEPNTDYEFYVVAYSQLGASRTSTPALVHTLDDVPSAAPQLSLSSPNPSDIRVAWLPLPPSLSNGQVVKYKIEYGLGKEDQIFSTEVRGNETQLMLNSLQPNKVYRVRISAGTAAGFGAPSQWMHHRTPSMHNQSHVPFAPAELKVQAKMESLVVSWQPPPHPTQISGYKLYWREVGAEEEANGDRLPGGRGDQAWDVGPVRLKKKVKQYELTQLVPGRLYEVKLVAFNKHEDGYAAVWKGKTEKAPAPDMPIQRGPPLPPAHVHAESNSSTSIWLRWKKPDFTTVKIVNYTVRFSPWGLRNASLVTYYTSSGEDILIGGLKPFTKYEFAVQSHGVDMDGPFGSVVERSTLPDRPSTPPSDLRLSPLTPSTVRLHWCPPTEPNGEIVEYLILYSSNHTQPEHQWTLLTTQGNIFSAEVHGLESDTRYFFKMGARTEVGPGPFSRLQDVITLQEKLSDSLDMHSVTGIIVGVCLGLLCLLACMCAGLRRSPHRESLPGLSSTATPGNPALYSRARLGPPSPPAAHELESLVHPHPQDWSPPPSDVEDRAEVHSLMGGGVSEGRSHSKRKISWAQPSGLSWAGSWAGCELPQAGPRPALTRALLPPAGTGQTLLLQALVYDAIKGNGRKKSPPACRNQVEAEVIVHSDFSASNGNPDLHLQDLEPEDPLPPEAPDLISGVGDPGQGAAWLDRELGGCELAAPGPDRLTCLPEAASASCSYPDLQPGEVLEETPGDSCQLKSPCPLGASPGLPRSPVSSSA

SEQ ID NO: 29846 - protein, 180 aa, Homo sapiens
  REGION 1..180: note = ENSP00000414497
MGIPMGKSMLVLLTFLAFASCCIAAYRPSETLCGGELVDTLQFVCGDRGFYFSRPASRVSRRSRGIVEECCFRSCDLALLETYCATPAKSERDVSTPPTVLPDNFPRYPVGKFFQYDTWKQSTQRLRRGLPALLRARRGHVLAKELEAFREAKRHRPLIALPTQDPAHGGAPPEMASNRK

SEQ ID NO: 29847 - protein, 236 aa, Homo sapiens
  REGION 1..236: note = ENSP00000391826
MVSPDPQIIVVAPETELASMQVQRTEDGVTIIQIFWVGRKGELLRRTPVSSAMQTPMGIPMGKSMLVLLTFLAFASCCIAAYRPSETLCGGELVDTLQFVCGDRGFYFSRPASRVSRRSRGIVEECCFRSCDLALLETYCATPAKSERDVSTPPTVLPDNFPRYPVGKFFQYDTWKQSTQRLRRGLPALLRARRGHVLAKELEAFREAKRHRPLIALPTQDPAHGGAPPEMASNRK

SEQ ID NO: 29848 - protein, 183 aa, Homo sapiens
  REGION 1..183: note = ENSP00000370799
MGIPMGKSMLVLLTFLAFASCCIAAYRPSETLCGGELVDTLQFVCGDRGFYFRLPGRPASRVSRRSRGIVEECCFRSCDLALLETYCATPAKSERDVSTPPTVLPDNFPRYPVGKFFQYDTWKQSTQRLRRGLPALLRARRGHVLAKELEAFREAKRHRPLIALPTQDPAHGGAPPEMASNRK

SEQ ID NO: 29849 - protein, 180 aa, Homo sapiens; identical to SEQ ID NO: 29846
  REGION 1..180: note = ENSP00000370796

SEQ ID NO: 29850 - protein, 180 aa, Homo sapiens; identical to SEQ ID NO: 29846
  REGION 1..180: note = ENSP00000402047

SEQ ID NO: 29851 - protein, 180 aa, Homo sapiens; identical to SEQ ID NO: 29846
  REGION 1..180: note = ENSP00000370802

SEQ ID NO: 29852 - protein, 183 aa, Homo sapiens; identical to SEQ ID NO: 29848
  REGION 1..183: note = ENSP00000370813

SEQ ID NO: 29853 - protein, 194 aa, Homo sapiens
  REGION 1..194: note = ENSP00000370476
MQRARPLQALLDGRGLCVNASAVSRLRAYLLPAPPAPGNASESEEDRSAGSVESPSVSSTHRVSDPKFHPLHSKIIIIKKGHAKDSQRYKVDYESQSTDTQNFSSESKRETEYGPCRREMEDTLNHLKFLNVLSPRGVHIPNCDKKGFYKKKQCRPSKGRKRGFCWCVDKYGQPLPGYTTKGKEDVHCYSMQSK

SEQ ID NO: 29854 - protein, 291 aa, Homo sapiens
  REGION 1..291: note = ENSP00000275521
MQRARPTLWAAALTLLVLLRGPPVARAGASSAGLGPVVRCEPCDARALAQCAPPPAVCAELVREPGCGCCLTCALSEGQPCGIYTERCGSGLRCQPSPDEARPLQALLDGRGLCVNASAVSRLRAYLLPAPPAPGNASESEEDRSAGSVESPSVSSTHRVSDPKFHPLHSKIIIIKKGHAKDSQRYKVDYESQSTDTQNFSSESKRETEYGPCRREMEDTLNHLKFLNVLSPRGVHIPNCDKKGFYKKKQCRPSKGRKRGFCWCVDKYGQPLPGYTTKGKEDVHCYSMQSK

SEQ ID NO: 29855 - protein, 297 aa, Homo sapiens
  REGION 1..297: note = ENSP00000370473
MQRARPTLWAAALTLLVLLRGPPVARAGASSAGLGPVVRCEPCDARALAQCAPPPAVCAELVREPGCGCCLTCALSEGQPCGIYTERCGSGLRCQPSPDEARPLQALLDGRGLCVNASAVSRLRAYLLPAPPAPGEPPAPGNASESEEDRSAGSVESPSVSSTHRVSDPKFHPLHSKIIIIKKGHAKDSQRYKVDYESQSTDTQNFSSESKRETEYGPCRREMEDTLNHLKFLNVLSPRGVHIPNCDKKGFYKKKQCRPSKGRKRGFCWCVDKYGQPLPGYTTKGKEDVHCYSMQSK

SEQ ID NO: 29856 - protein, 143 aa, Homo sapiens
  REGION 1..143: note = ENSP00000390298
  VARIANT 1: note = Any amino acid
XESPSVSSTHRVSDPKFHPLHSKIIIIKKGHAKDSQRYKVDYESQSTDTQNFSSESKRETEYGPCRREMEDTLNHLKFLNVLSPRGVHIPNCDKKGFYKKKQCRPSKGRKRGFCWCVDKYGQPLPGYTTKGKEDVHCYSMQSK

SEQ ID NO: 29857 - protein, 153 aa, Homo sapiens
  REGION 1..153: note = ENSP00000399116
  VARIANT 1: note = Any amino acid
XSEEDRSAGSVESPSVSSTHRVSDPKFHPLHSKIIIIKKGHAKDSQRYKVDYESQSTDTQNFSSESKRETEYGPCRREMEDTLNHLKFLNVLSPRGVHIPNCDKKGFYKKKQCRPSKGRKRGFCWCVDKYGQPLPGYTTKGKEDVHCYSMQSK

SEQ ID NO: 29858 - protein, 132 aa, Homo sapiens
  REGION 1..132: note = ENSP00000389668
MRSAVCQFPRHRLAAGRPHPESGRGNASESEEDRSAGSVESPSVSSTHRVSDPKFHPLHSKIIIIKKGHAKDSQRYKVDYESQSTDTQNFSSESKRETEYGPCRREMEDTLNHLKFLNVLSPRGVHIPNCDK

SEQ ID NO: 29859 - protein, 270 aa, Homo sapiens
  REGION 1..270: note = ENSP00000477772
MQRARPTLWAAALTLLVRCEPCDARALAQCAPPPAVCAELVREPGCGCCLTCALSEGQPCGIYTERCGSGLRCQPSPDEARPLQALLDGRGLCVNASAVSRLRAYLLPAPPAPGNASESEEDRSAGSVESPSVSSTHRVSDPKFHPLHSKIIIIKKGHAKDSQRYKVDYESQSTDTQNFSSESKRETEYGPCRREMEDTLNHLKFLNVLSPRGVHIPNCDKKGFYKKKQCRPSKGRKRGFCWCVDKYGQPLPGYTTKGKEDVHCYSMQSK

SEQ ID NO: 29860 - protein, 263 aa, Homo sapiens
  REGION 1..263: note = ENSP00000480717
MQRARPTLWAACEPCDARALAQCAPPPAVCAELVREPGCGCCLTCALSEGQPCGIYTERCGSGLRCQPSPDEARPLQALLDGRGLCVNASAVSRLRAYLLPAPPAPGNASESEEDRSAGSVESPSVSSTHRVSDPKFHPLHSKIIIIKKGHAKDSQRYKVDYESQSTDTQNFSSESKRETEYGPCRREMEDTLNHLKFLNVLSPRGVHIPNCDKKGFYKKKQCRPSKGRKRGFCWCVDKYGQPLPGYTTKGKEDVHCYSMQSK

SEQ ID NO: 29861 - protein, 272 aa, Homo sapiens
  REGION 1..272: note = ENSP00000233813
MVLLTAVLLLLAAYAGPAQSLGSFVHCEPCDEKALSMCPPSPLGCELVKEPGCGCCMTCALAEGQSCGVYTERCAQGLRCLPRQDEEKPLHALLHGRGVCLNEKSYREQVKIERDSREHEEPTTSEMAEETYSPKIFRPKHTRISELKAEAVKKDRRKKLTQSKFVGGAENTAHPRIISAPEMRQESEQGPCRRHMEASLQELKASPRMVPRAVYLPNCDRKGFYKRKQCKPSRGRKRGICWCVDKYGMKLPGMEYVDGDFQCHTFDSSNVE

SEQ ID NO: 29862 - protein, 233 aa, Homo sapiens
  REGION 1..233: note = ENSP00000413474
MVLLTAVLLLLAAYAGPAQSLGSFVHCEPCDEKALSMCPPSPLGCELVKEPGCGCCMTCALAEGQSCGVYTERCAQGLRCLPRQDEEKPLHALLHGRGVCLNEKSYREQVKIGCAPGGQRHICFSLYYSPHPKLPSPGLWPCAPWPTGADPPAPSPAERDSREHEEPTTSEMAEETYSPKIFRPKHTRISELKAEAVKKDRRKKLTQSKFVGGAENTAHPRIISAPEMRQESE

SEQ ID NO: 29863 - protein, 430 aa, Homo sapiens
  REGION 1..430: note = ENSP00000406092
MSLVELLLWWNCFSRTGVAASLEVSESPGSIQVARGQPAVLPCTFTTSAALINLNVIWMVTPLSNANQPEQVILYQGGQMFDGAPRFHGRVGFTGTMPATNVSIFINNTQLSDTGTYQCLVNNLPDIGGRNIGVTGLTVLVPPSAPHCQIQGSQDIGSDVILLCSSEEGIPRPTYLWEKLDNTLKLPPTATQDQVQGTVTIRNISALSSGLYQCVASNAIGTSTCLLDLQVISPQPRNIGLIAGAIGTGAVIIIFCIALILGAFFYWRSKNKEEEEEEIPNEIREDDLPPKCSSAKAFHTEISSSDNNTLTSSNAYNSRYWSNNPKVHRNTESVSHFSDLGQSFSFHSGNANIPSIYANGTHLVPGQHKTLVVTANRGSSPQVMSRSNGSVSRKPRPPHTHSYTISHATLERIGAVPVMVPAQSRAGSLV

SEQ ID NO: 29864 - protein, 431 aa, Homo sapiens
  REGION 1..431: note = ENSP00000377370
MTSQRSPLAPLLLLSLHGVAASLEVSESPGSIQVARGQPAVLPCTFTTSAALINLNVIWMVTPLSNANQPEQVILYQGGQMFDGAPRFHGRVGFTGTMPATNVSIFINNTQLSDTGTYQCLVNNLPDIGGRNIGVTGLTVLVPPSAPHCQIQGSQDIGSDVILLCSSEEGIPRPTYLWEKLDNTLKLPPTATQDQVQGTVTIRNISALSSGLYQCVASNAIGTSTCLLDLQVISPQPRNIGLIAGAIGTGAVIIIFCIALILGAFFYWRSKNKEEEEEEIPNEIREDDLPPKCSSAKAFHTEISSSDNNTLTSSNAYNSRYWSNNPKVHRNTESVSHFSDLGQSFSFHSGNANIPSIYANGTHLVPGQHKTLVVTANRGSSPQVMSRSNGSVSRKPRPPHTHSYTISHATLERIGAVPVMVPAQSRAGSLV

SEQ ID NO: 29865 - protein, 407 aa, Homo sapiens
  REGION 1..407: note = ENSP00000420486
MTSQRSPLAPLLLLSLHGVAASLEVSESPGSIQVARGQPAVLPCTFTTSAALINLNVIWMVTPLSNANQPEQVILYQGGQMFDGAPRFHGRVGFTGTMPATNVSIFINNTQLSDTGTYQCLVNNLPDIGGRNIGVTGLTVLVPPSAPHCQIQGSQDIGSDVILLCSSEEGIPRPTYLWEKLDNTLKLPPTATQDQVQGTVTIRNISALSSAQPRNIGLIAGAIGTGAVIIIFCIALILGAFFYWRSKNKEEEEEEIPNEIREDDLPPKCSSAKAFHTEISSSDNNTLTSSNAYNSRYWSNNPKVHRNTESVSHFSDLGQSFSFHSGNANIPSIYANGTHLVPGQHKTLVVTANRGSSPQVMSRSNGSVSRKPRPPHTHSYTISHATLERIGAVPVMVPAQSRAGSLV

SEQ ID NO: 29866 - protein, 406 aa, Homo sapiens
  REGION 1..406: note = ENSP00000401240
MSLVELLLWWNCFSRTGVAASLEVSESPGSIQVARGQPAVLPCTFTTSAALINLNVIWMVTPLSNANQPEQVILYQGGQMFDGAPRFHGRVGFTGTMPATNVSIFINNTQLSDTGTYQCLVNNLPDIGGRNIGVTGLTVLVPPSAPHCQIQGSQDIGSDVILLCSSEEGIPRPTYLWEKLDNTLKLPPTATQDQVQGTVTIRNISALSSAQPRNIGLIAGAIGTGAVIIIFCIALILGAFFYWRSKNKEEEEEEIPNEIREDDLPPKCSSAKAFHTEISSSDNNTLTSSNAYNSRYWSNNPKVHRNTESVSHFSDLGQSFSFHSGNANIPSIYANGTHLVPGQHKTLVVTANRGSSPQVMSRSNGSVSRKPRPPHTHSYTISHATLERIGAVPVMVPAQSRAGSLV

SEQ ID NO: 29867 - protein, 403 aa, Homo sapiens
  REGION 1..403: note = ENSP00000417413
MTSQRSPLAPLLLLSLHGVAASLEVSESPGSIQVARGQPAVLPCTFTTSAALINLNVIWMVTPLSNANQPEQVILYQGGQMFDGAPRFHGRVGFTGTMPATNVSIFINNTQLSDTGTYQCLVNNLPDIGGRNIGVTGLTVLVPPSAPHCQIQGSQDIGSDVILLCSSEEGIPRPTYLWEKLDNTLKLPPTATQDQVQGTVTIRNISALSSGLYQCVASNAIGTSTCLLDLQVISRAFFYWRSKNKEEEEEEIPNEIREDDLPPKCSSAKAFHTEISSSDNNTLTSSNAYNSRYWSNNPKVHRNTESVSHFSDLGQSFSFHSGNANIPSIYANGTHLVPGQHKTLVVTANRGSSPQVMSRSNGSVSRKPRPPHTHSYTISHATLERIGAVPVMVPAQSRAGSLV

SEQ ID NO: 29868 - protein, 59 aa, Homo sapiens
  REGION 1..59: note = ENSP00000418976
MVTPLSNANQPEQVILYQGGQMFDGAPRFHGRVGFTGTMPATNVSIFINNTQLSDTGTY

SEQ ID NO: 29869 - protein, 32 aa, Homo sapiens
  REGION 1..32: note = ENSP00000418047
MVTPLSNANQPEQVILYQGGQMFDGAPRFHGR

SEQ ID NO: 29870 - protein, 430 aa, Homo sapiens; identical to SEQ ID NO: 29863
  REGION 1..430: note = ENSP00000346700

SEQ ID NO: 29871 - protein, 1194 aa, Homo sapiens
  REGION 1..1194: note = ENSP00000358498
MKCFFPVLSCLAVLGVVSAQRQVTVQEGPLYRTEGSHITIWCNVSGYQGPSEQNFQWSIYLPSSPEREVQIVSTMDSSFPYAIYTQRVRGGKIFIERVQGNSTLLHITDLQARDAGEYECHTPSTDKQYFGSYSAKMNLVVIPDSLQTTAMPQTLHRVEQDPLELTCEVASETIQHSHLSVAWLRQKVGEKPVEVISLSRDFMLHSSSEYAQRQSLGEVRLDKLGRTTFRLTIFHLQPSDQGEFYCEAAEWIQDPDGSWYAMTRKRSEGAVVNVQPTDKEFTVRLETEKRLHTVGEPVEFRCILEAQNVPDRYFAVSWAFNSSLIATMGPNAVPVLNSEFAHREARGQLKVAKESDSVFVLKIYHLRQEDSGKYNCRVTEREKTVTGEFIDKESKRPKNIPIIVLPLKSSISVEVASNASVILEGEDLRFSCSVRTAGRPQGRFSVIWQLVDRQNRRSNIMWLDRDGTVQPGSSYWERSSFGGVQMEQVQPNSFSLGIFNSRKEDEGQYECHVTEWVRAVDGEWQIVGERRASTPISITALEMGFAVTAISRTPGVTYSDSFDLQCIIKPHYPAWVPVSVTWRFQPVGTVEFHDLVTFTRDGGVQWGDRSSSFRTRTAIEKAESSNNVRLSISRASDTEAGKYQCVAELWRKNYNNTWTRLAERTSNLLEIRVLQPVTKLQVSKSKRTLTLVENKPIQLNCSVKSQTSQNSHFAVLWYVHKPSDADGKLILKTTHNSAFEYGTYAEEEGLRARLQFERHVSGGLFSLTVQRAEVSDSGSYYCHVEEWLLSPNYAWYKLAEEVSGRTEVTVKQPDSRLRLSQAQGNLSVLETRQVQLECVVLNRTSITSQLMVEWFVWKPNHPERETVARLSRDATFHYGEQAAKNNLKGRLHLESPSPGVYRLFIQNVAVQDSGTYSCHVEEWLPSPSGMWYKRAEDTAGQTALTVMRPDASLQVDTVVPNATVSEKAAFQLDCSIVSRSSQDSRFAVAWYSLRTKAGGKRSSPGLEEQEEEREEEEEEDDDDDDDPTERTALLSVGPDAVFGPEGSPWEGRLRFQRLSPVLYRLTVLQASPQDTGNYSCHVEEWLPSPQKEWYRLTEEESAPIGIRVLDTSPTLQSIICSNDALFYFVFFYPFPIFGILIITILLVRFKSRNSSKNSDGKNGVPLLWIKEPHLNYSPTCLEPPVLSIHPGAID

SEQ ID NO: 29872 - protein, 1214 aa, Homo sapiens
  REGION 1..1214: note = ENSP00000321184
MKCFFPVLSCLAVLGVVSAQRQVTVQEGPLYRTEGSHITIWCNVSGYQGPSEQNFQWSIYLPSSPEREVQIVSTMDSSFPYAIYTQRVRGGKIFIERVQGNSTLLHITDLQARDAGEYECHTPSTDKQYFGSYSAKMNLVVIPDSLQTTAMPQTLHRVEQDPLELTCEVASETIQHSHLSVAWLRQKVGEKPVEVISLSRDFMLHSSSEYAQRQSLGEVRLDKLGRTTFRLTIFHLQPSDQGEFYCEAAEWIQDPDGSWYAMTRKRSEGAVVNVQPTDKEFTVRLETEKRLHTVGEPVEFRCILEAQNVPDRYFAVSWAFNSSLIATMGPNAVPVLNSEFAHREARGQLKVAKESDSVFVLKIYHLRQEDSGKYNCRVTEREKTVTGEFIDKESKRPKNIPIIVLPLTDNWVVKVPQHHQLLSQGHLESSISVEVASNASVILEGEDLRFSCSVRTAGRPQGRFSVIWQLVDRQNRRSNIMWLDRDGTVQPGSSYWERSSFGGVQMEQVQPNSFSLGIFNSRKEDEGQYECHVTEWVRAVDGEWQIVGERRASTPISITALEMGFAVTAISRTPGVTYSDSFDLQCIIKPHYPAWVPVSVTWRFQPVGTVEFHDLVTFTRDGGVQWGDRSSSFRTRTAIEKAESSNNVRLSISRASDTEAGKYQCVAELWRKNYNNTWTRLAERTSNLLEIRVLQPVTKLQVSKSKRTLTLVENKPIQLNCSVKSQTSQNSHFAVLWYVHKPSDADGKLILKTTHNSAFEYGTYAEEEGLRARLQFERHVSGGLFSLTVQRAEVSDSGSYYCHVEEWLLSPNYAWYKLAEEVSGRTEVTVKQPDSRLRLSQAQGNLSVLETRQVQLECVVLNRTSITSQLMVEWFVWKPNHPERETVARLSRDATFHYGEQAAKNNLKGRLHLESPSPGVYRLFIQNVAVQDSGTYSCHVEEWLPSPSGMWYKRAEDTAGQTALTVMRPDASLQVDTVVPNATVSEKAAFQLDCSIVSRSSQDSRFAVAWYSLRTKAGGKRSSPGLEEQEEEREEEEEEDDDDDDDPTERTALLSVGPDAVFGPEGSPWEGRLRFQRLSPVLYRLTVLQASPQDTGNYSCHVEEWLPSPQKEWYRLTEEESAPIGIRVLDTSPTLQSIICSNDALFYFVFFYPFPIFGILIITILLVRFKSRNSSKNSDGKNGVPLLWIKEPHLNYSPTCLEPPVLSIHPGAID

SEQ ID NO: 29873 - protein, 5 aa, Homo sapiens
  REGION 1..5: note = ENSP00000474657
MDSSF

SEQ ID NO: 29874 - protein, 1214 aa, Homo sapiens; identical to SEQ ID NO: 29872
  REGION 1..1214: note = ENSP00000358495

SEQ ID NO: 29875 - protein, 346 aa, Homo sapiens
  REGION 1..346: note = ENSP00000433514
  VARIANT 1: note = Any amino acid
XPEYFPECLNLIKDKNLYNEALKLYSPSSQQYQDISIAYGEHLMQEHMYEPAGLMFARCGAHEKALSAFLTCGNWKQALCVAAQLNFTKDQLVGLGRTLAGKLVEQRKHIDAAMVLEECAQDYEEAVLLLLEGAAWEEALRLVYKYNRLDIIETNVKPSILEAQKNYMAFLDSQTATFSRHKKRLLVVRELKEQAQQAGLDDEVPHGQESDLFSETSSVVSGSEMSGKYSHSNSRISARSSKNRRKAERKKHSLKEGSPLEDLALLEALSEVVQNTENLKDEVYHILKVLFLFEFDEQGRELQKAFEDTLQLMERSLPEIWTLTYQQNSATPTWGEGVLLCCPSWS

SEQ ID NO: 29876 - protein, 1332 aa, Homo sapiens
  REGION 1..1332: note = ENSP00000363779
MRNLKLFRTLEFRDIQGPGNPQCFSLRTEQGTVLIGSEHGLIEVDPVSREVKNEVSLVAEGFLPEDGSGRIVGVQDLLDQESVCVATASGDVILCSLSTQQLECVGSVASGISVMSWSPDQELVLLATGQQTLIMMTKDFEPILEQQIHQDDFGESKFITVGWGRKETQFHGSEGRQAAFQMQMHESALPWDDHRPQVTWRGDGQFFAVSVVCPETGARKVRVWNREFALQSTSEPVAGLGPALAWKPSGSLIASTQDKPNQQDIVFFEKNGLLHGHFTLPFLKDEVKVNDLLWNADSSVLAVWLEDLQREESSIPKTCVQLWTVGNYHWYLKQSLSFSTCGKSKIVSLMWDPVTPYRLHVLCQGWHYLAYDWHWTTDRSVGDNSSDLSNVAVIDGNRVLVTVFRQTVVPPPMCTYQLLFPHPVNQVTFLAHPQKSNDLAVLDASNQISVYKCGDCPSADPTVKLGAVGGSGFKVCLRTPHLEKRYKIQFENNEDQDVNPLKLGLLTWIEEDVFLAVSHSEFSPRSVIHHLTAASSEMDEEHGQLNVSSSAAVDGVIISLCCNSKTKSVVLQLADGQIFKYLWESPSLAIKPWKNSGGFPVRFPYPCTQTELAMIGEEECVLGLTDRCRFFINDIEVASNITSFAVYDEFLLLTTHSHTCQCFCLRDASFKTLQAGLSSNHVSHGEVLRKVERGSRIVTVVPQDTKLVLQMPRGNLEVVHHRALVLAQIRKWLDKLMFKEAFECMRKLRINLNLIYDHNPKVFLGNVETFIKQIDSVNHINLFFTELKEEDVTKTMYPAPVTSSVYLSRDPDGNKIDLVCDAMRAVMESINPHKYCLSILTSHVKKTTPELEIVLQKVHELQGNAPSDPDAVSAEEALKYLLHLVDVNELYDHSLGTYDFDLVLMVAEKSQKDPKEYLPFLNTLKKMETNYQRFTIDKYLKRYEKAIGHLSKCGPEYFPECLNLIKDKNLYNEALKLYSPSSQQYQDISIAYGEHLMQEHMYEPAGLMFARCGAHEKALSAFLTCGNWKQALCVAAQLNFTKDQLVGLGRTLAGKLVEQRKHIDAAMVLEECAQDYEEAVLLLLEGAAWEEALRLVYKYNRLDIIETNVKPSILEAQKNYMAFLDSQTATFSRHKKRLLVVRELKEQAQQAGLDDEVPHGQESDLFSETSSVVSGSEMSGKYSHSNSRISARSSKNRRKAERKKHSLKEGSPLEDLALLEALSEVVQNTENLKDEVYHILKVLFLFEFDEQGRELQKAFEDTLQLMERSLPEIWTLTYQQNSATPVLGPNSTANSIMASYQQQKTSVPVLDAELFIPPKINRRTQWKLSLLD

SEQ ID NO: 29877 - protein, 983 aa, Homo sapiens
  REGION 1..983: note = ENSP00000439367
MWDPVTPYRLHVLCQGWHYLAYDWHWTTDRSVGDNSSDLSNVAVIDGNRVLVTVFRQTVVPPPMCTYQLLFPHPVNQVTFLAHPQKSNDLAVLDASNQISVYKCGDCPSADPTVKLGAVGGSGFKVCLRTPHLEKRYKIQFENNEDQDVNPLKLGLLTWIEEDVFLAVSHSEFSPRSVIHHLTAASSEMDEEHGQLNVSSSAAVDGVIISLCCNSKTKSVVLQLADGQIFKYLWESPSLAIKPWKNSGGFPVRFPYPCTQTELAMIGEEECVLGLTDRCRFFINDIEVASNITSFAVYDEFLLLTTHSHTCQCFCLRDASFKTLQAGLSSNHVSHGEVLRKVERGSRIVTVVPQDTKLVLQMPRGNLEVVHHRALVLAQIRKWLDKLMFKEAFECMRKLRINLNLIYDHNPKVFLGNVETFIKQIDSVNHINLFFTELKEEDVTKTMYPAPVTSSVYLSRDPDGNKIDLVCDAMRAVMESINPHKYCLSILTSHVKKTTPELEIVLQKVHELQGNAPSDPDAVSAEEALKYLLHLVDVNELYDHSLGTYDFDLVLMVAEKSQKDPKEYLPFLNTLKKMETNYQRFTIDKYLKRYEKAIGHLSKCGPEYFPECLNLIKDKNLYNEALKLYSPSSQQYQDISIAYGEHLMQEHMYEPAGLMFARCGAHEKALSAFLTCGNWKQALCVAAQLNFTKDQLVGLGRTLAGKLVEQRKHIDAAMVLEECAQDYEEAVLLLLEGAAWEEALRLVYKYNRLDIIETNVKPSILEAQKNYMAFLDSQTATFSRHKKRLLVVRELKEQAQQAGLDDEVPHGQESDLFSETSSVVSGSEMSGKYSHSNSRISARSSKNRRKAERKKHSLKEGSPLEDLALLEALSEVVQNTENLKDEVYHILKVLFLFEFDEQGRELQKAFEDTLQLMERSLPEIWTLTYQQNSATPVLGPNSTANSIMASYQQQKTSVPVLDAELFIPPKINRRTQWKLSLLD

SEQ ID NO: 29878 - protein, 162 aa, Homo sapiens
  REGION 1..162: note = ENSP00000323505
MRISKPHLRSISIQCYLCLLLNSHFLTEAGIHVFILGCFSAGLPKTEANWVNVISDLKKIEDLIQSMHIDATLYTESDVHPSCKVTAMKCFLLELQVISLESGDASIHDTVENLIILANNSLSSNGNVTESGCKECEELEEKNIKEFLQSFVHIVQMFINTS

SEQ ID NO: 29879 - protein, 162 aa, Homo sapiens; identical to SEQ ID NO: 29878
  REGION 1..162: note = ENSP00000296545

SEQ ID NO: 29880 - protein, 135 aa, Homo sapiens
  REGION 1..135: note = ENSP00000422271
MVLGTIDLCSCFSAGLPKTEANWVNVISDLKKIEDLIQSMHIDATLYTESDVHPSCKVTAMKCFLLELQVISLESGDASIHDTVENLIILANNSLSSNGNVTESGCKECEELEEKNIKEFLQSFVHIVQMFINTS

SEQ ID NO: 29881 - protein, 162 aa, Homo sapiens; identical to SEQ ID NO: 29878
  REGION 1..162: note = ENSP00000435462

SEQ ID NO: 29882 - protein, 135 aa, Homo sapiens; identical to SEQ ID NO: 29880
  REGION 1..135: note = ENSP00000436914

SEQ ID NO: 29883 - protein, 135 aa, Homo sapiens; identical to SEQ ID NO: 29880
  REGION 1..135: note = ENSP00000377714

SEQ ID NO: 29884 - protein, 454 aa, Homo sapiens
  REGION 1..454: note = ENSP00000452738
MESHSRAGKSRKSAKFRSISRSLMLCNAKTSDDGSSPDEKYPDPFEISLAQGKEGIFHSSVQLADTSEAGPSSVPDLALASEAAQLQAAGNDRGKTCRRIFFMKESSTASSREKPGKLEAQSSNFLFPKACHQRARSNSTSVNPYCTREIDFPMTKKSAAPTDRQPYSLCSNRKSLSQQLDCPAGKAAGTSRPTRSLSTAQLVQPSGGLQASVISNIVLMKGQAKGLGFSIVGGKDSIYGPIGIYVKTIFAGGAAAADGRLQEGDEILELNGESMAGLTHQDALQKFKQAKKGLLTLTVRTRLTAPPSLCSHLSPPLCRSLSSSTCITKDSSSFALESPSAPISTAKPNYRIMVEVSLQKEAGVGLGIGLCSVPYFQCISGIFVHTLSPGSVAHLDGRLRCGDEIVEISDSPVHCLTLNEVYTILSHCDPGPVPIIVSRHPDPQKEEMEAQEVK

SEQ ID NO: 29885 - protein, 484 aa, Homo sapiens
  REGION 1..484: note = ENSP00000456972
MESHSRAGKSRKSAKFRSISRSLMLCNAKTSDDGSSPDEKYPDPFEISLAQGKEGIFHSSVQLADTSEAGPSSVPDLALASEAAQLQAAGNDRGKTCRRIFFMKESSTASSREKPGKLEAQSSNFLFPKACHQRARSNSTSVNPYCTREIDFPMTKKSAAPTDRQPYSLCSNRKSLSQQLDCPAGKAAGTSRPTRSLSTAQLVQPSGGLQASVISNIVLMKGQAKGLGFSIVGGKDSIYGPIGIYVKTIFAGGAAAADGRLQEGDEILELNGESMAGLTHQDALQKFKQAKKGLLTLTVRTRLTAPPSLCSHLSPPLCRSLSSSTCITKDSSSFALESPSAPISTAKPNYRIMVEVSLQKEAGVGLGIGLCSVPYFQCISGIFVHTLSPGSVAHLDGRLRCGDEIVEISDSPVHCLTLNEVYTILSHCDPGPVPIIVSRHPDPQVSEQQLKEAVAQAVENTKFGKERHQWSLEDAEMELGPPGS

SEQ ID NO: 29886 - protein, 594 aa, Homo sapiens
  REGION 1..594: note = ENSP00000453250
MESHSRAGKSRKSAKFRSISRSLMLCNAKTSDDGSSPDEKYPDPFEISLAQGKEGIFHSSVQLADTSEAGPSSVPDLALASEAAQLQAAGNDRGKTCRRIFFMKESSTASSREKPGKLEAQSSNFLFPKACHQRARSNSTSVNPYCTREIDFPMTKKSAAPTDRQPYSLCSNRKSLSQQLDCPAGKAAGTSRPTRSLSTAQLVQPSGGLQASVISNIVLMKGQAKGLGFSIVGGKDSIYGPIGIYVKTIFAGGAAAADGRLQEGDEILELNGESMAGLTHQDALQKFKQAKKGLLTLTVRTRLTAPPSLCSHLSPPLCRSLSSSTCITKDSSSFALESPSAPISTAKPNYRIMVEVSLQKEAGVGLGIGLCSVPYFQCISGIFVHTLSPGSVAHLDGRLRCGDEIVEISDSPVHCLTLNEVYTILSHCDPGPVPIIVSRHPDPQVSEQQLKEAVAQAVENTKFGKERHQWSLEGVKRLESSWHGRPTLEKEREKNSAPPHRRAQKVMIRSSSDSSYMSGSPGGSPGSGSAEKPSSDVDISTHSPSLPLAREPVVLSIASSRLPQESPPLPESRDSHPPLRLKKSFEILVRKPMS

SEQ ID NO: 29887 - protein, 1331 aa, Homo sapiens
  REGION 1..1331: note = ENSP00000378155
MESHSRAGKSRKSAKFRSISRSLMLCNAKTSDDGSSPDEKYPDPFEISLAQGKEGIFHSSVQLADTSEAGPSSVPDLALASEAAQLQAAGNDRGKTCRRIFFMKESSTASSREKPGKLEAQSSNFLFPKACHQRARSNSTSVNPYCTREIDFPMTKKSAAPTDRQPYSLCSNRKSLSQQLDCPAGKAAGTSRPTRSLSTAQLVQPSGGLQASVISNIVLMKGQAKGLGFSIVGGKDSIYGPIGIYVKTIFAGGAAAADGRLQEGDEILELNGESMAGLTHQDALQKFKQAKKGLLTLTVRTRLTAPPSLCSHLSPPLCRSLSSSTCITKDSSSFALESPSAPISTAKPNYRIMVEVSLQKEAGVGLGIGLCSVPYFQCISGIFVHTLSPGSVAHLDGRLRCGDEIVEISDSPVHCLTLNEVYTILSHCDPGPVPIIVSRHPDPQVSEQQLKEAVAQAVENTKFGKERHQWSLEGVKRLESSWHGRPTLEKEREKNSAPPHRRAQKVMIRSSSDSSYMSGSPGGSPGSGSAEKPSSDVDISTHSPSLPLAREPVVLSIASSRLPQESPPLPESRDSHPPLRLKKSFEILVRKPMSSKPKPPPRKYFKSDSDPQKSLEERENSSCSSGHTPPTCGQEARELLPLLLPQEDTAGRSPSASAGCPGPGIGPQTKSSTEGEPGWRRASPVTQTSPIKHPLLKRQARMDYSFDTTAEDPWVRISDCIKNLFSPIMSENHGHMPLQPNASLNEEEGTQGHPDGTPPKLDTANGTPKVYKSADSSTVKKGPPVAPKPAWFRQSLKGLRNRASDPRGLPDPALSTQPAPASREHLGSHIRASSSSSSIRQRISSFETFGSSQLPDKGAQRLSLQPSSGEAAKPLGKHEEGRFSGLLGRGAAPTLVPQQPEQVLSSGSPAASEARDPGVSESPPPGRQPNQKTLPPGPDPLLRLLSTQAEESQGPVLKMPSQRARSFPLTRSQSCETKLLDEKTSKLYSISSQVSSAVMKSLLCLPSSISCAQTPCIPKEGASPTSSSNEDSAANGSAETSALDTGFSLNLSELREYTEGLTEAKEDDDGDHSSLQSGQSVISLLSSEELKKLIEEVKVLDEATLKQLDGIHVTILHKEEGAGLGFSLAGGADLENKVITVHRVFPNGLASQEGTIQKGNEVLSINGKSLKGTTHHDALAILRQAREPRQAVIVTRKLTPEAMPDLNSSTDSAASASAASDVSVESTEATVCTVTLEKMSAGLGFSLEGGKGSLHGDKPLTINRIFKGAASEQSETVQPGDEILQLGGTAMQGLTRFEAWNIIKALPDGPVTIVIRRKSLQSKETTAAGDS

SEQ ID NO: 29888 - protein, 1332 aa, Homo sapiens
  REGION 1..1332: note = ENSP00000302935
MESHSRAGKSRKSAKFRSISRSLMLCNAKTSDDGSSPDEKYPDPFEISLAQGKEGIFHSSVQLADTSEAGPSSVPDLALASEAAQLQAAGNDRGKTCRRIFFMKESSTASSREKPGKLEAQSSNFLFPKACHQRARSNSTSVNPYCTREIDFPMTKKSAAPTDRQPYSLCSNRKSLSQQLDCPAGKAAGTSRPTRSLSTAQLVQPSGGLQASVISNIVLMKGQAKGLGFSIVGGKDSIYGPIGIYVKTIFAGGAAAADGRLQEGDEILELNGESMAGLTHQDALQKFKQAKKGLLTLTVRTRLTAPPSLCSHLSPPLCRSLSSSTCITKDSSSFALESPSAPISTAKPNYRIMVEVSLQKEAGVGLGIGLCSVPYFQCISGIFVHTLSPGSVAHLDGRLRCGDEIVEISDSPVHCLTLNEVYTILSHCDPGPVPIIVSRHPDPQVSEQQLKEAVAQAVENTKFGKERHQWSLEGVKRLESSWHGRPTLEKEREKNSAPPHRRAQKVMIRSSSDSSYMSGSPGGSPGSGSAEKPSSDVDISTHSPSLPLAREPVVLSIASSRLPQESPPLPESRDSHPPLRLKKSFEILVRKPMSSKPKPPPRKYFKSDSDPQKSLEERENSSCSSGHTPPTCGQEARELLPLLLPQEDTAGRSPSASAGCPGPGIGPQTKSSTEGEPGWRRASPVTQTSPIKHPLLKRQARMDYSFDTTAEDPWVRISDCIKNLFSPIMSENHGHMPLQPNASLNEEEGTQGHPDGTPPKLDTANGTPKVYKSADSSTVKKGPPVAPKPAWFRQSLKGLRNRASDPRGLPDPALSTQPAPASREHLGSHIRASSSSSSIRQRISSFETFGSSQLPDKGAQRLSLQPSSGEAAKPLGKHEEGRFSGLLGRGAAPTLVPQQPEQVLSSGSPAASEARDPGVSESPPPGRQPNQKTLPPGPDPLLRLLSTQAEESQGPVLKMPSQRARSFPLTRSQSCETKLLDEKTSKLYSISSQVSSAVMKSLLCLPSSISCAQTPCIPKEGASPTSSSNEDSAANGSAETSALDTGFSLNLSELREYTEGLTEAKEDDDGDHSSLQSGQSVISLLSSEELKKLIEEVKVLDEATLKQLDGIHVTILHKEEGAGLGFSLAGGADLENKVITVHRVFPNGLASQEGTIQKGNEVLSINGKSLKGTTHHDALAILRQAREPRQAVIVTRKLTPEAMPDLNSSTDSAASASAASDVSVESTAEATVCTVTLEKMSAGLGFSLEGGKGSLHGDKPLTINRIFKGAASEQSETVQPGDEILQLGGTAMQGLTRFEAWNIIKALPDGPVTIVIRRKSLQSKETTAAGDS

SEQ ID NO: 29889 - protein, 201 aa, Homo sapiens
  REGION 1..201: note = ENSP00000454636
  VARIANT 1: note = Any amino acid
XQKFKQAKKGLLTLTVRTRLTAPPSLCSHLSPPLCRSLSSSTCITKDSSSFALESPSAPISTAKPNYRIMVEVSLQKEAGVGLGIGLCSVPYFQCISGIFVHTLSPGSVAHLDGRLRCGDEIVEISDSPVHCLTLNEVYTILSHCDPGPVPIIVSRHPDPQVSEQQLKEAVAQAVENTKFGKERHQWSLEDAEMELGPPGS

SEQ ID NO: 29890 - protein, 631 aa, Homo sapiens
  REGION 1..631: note = ENSP00000378147
MDYSFDTTAEDPWVRISDCIKNLFSPIMSENHGHMPLQPNASLNEEEGTQGHPDGTPPKLDTANGTPKVYKSADSSTVKKGPPVAPKPAWFRQSLKGLRNRASDPRGLPDPALSTQPAPASREHLGSHIRASSSSSSIRQRISSFETFGSSQLPDKGAQRLSLQPSSGEAAKPLGKHEEGRFSGLLGRGAAPTLVPQQPEQVLSSGSPAASEARDPGVSESPPPGRQPNQKTLPPGPDPLLRLLSTQAEESQGPVLKMPSQRARSFPLTRSQSCETKLLDEKTSKLYSISSQVSSAVMKSLLCLPSSISCAQTPCIPKEGASPTSSSNEDSAANGSAETSALDTGFSLNLSELREYTEGLTEAKEDDDGDHSSLQSGQSVISLLSSEELKKLIEEVKVLDEATLKQLDGIHVTILHKEEGAGLGFSLAGGADLENKVITVHRVFPNGLASQEGTIQKGNEVLSINGKSLKGTTHHDALAILRQAREPRQAVIVTRKLTPEAMPDLNSSTDSAASASAASDVSVESTAEATVCTVTLEKMSAGLGFSLEGGKGSLHGDKPLTINRIFKGAASEQSETVQPGDEILQLGGTAMQGLTRFEAWNIIKALPDGPVTIVIRRKSLQSKETTAAGDS

SEQ ID NO: 29891 - protein, 44 aa, Homo sapiens
  REGION 1..44: note = ENSP00000453131
SASAGCPGPGIGPQTKSSTEGEPGWRRASPAWKLEFRKKSHCMM

SEQ ID NO: 29892 - protein, 611 aa, Homo sapiens
  REGION 1..611: note = ENSP00000453214
  VARIANT 1: note = Any amino acid
XRQARMDYSFDTTAEDPWVRISDCIKNLFSPIMSENHGHMPLQPNASLNEEEGTQGHPDGTPPKLDTANGTPKVYKSADSSTVKKGPPVAPKPAWFRQSLKGLRNRASDPRGLPDPALSTQPAPASREHLGSHIRASSSSSSIRQRISSFETFGSSQLPDKGAQRLSLQPSSGEAAKPLGKHEEGRFSGLLGRGAAPTLVPQQPEQVLSSGSPAASEARDPGVSESPPPGRQPNQKTLPPGPDPLLRLLSTQAEESQGPVLKMPSQRARSFPLTRSQSCETKLLDEKTSKLYSISSQVSSAVMKSLLCLPSSISCAQTPCIPKEGASPTSSSNEDSAANGSAETSALDTGFSLNLSELREYTEGLTEAKEDDDGDHSSLQSGQSVISLLSSEELKKLIEEVKVLDEATLKQLDGIHVTILHKEEGAGLGFSLAGGADLENKVITVHRVFPNGLASQEGTIQKGNEVLSINGKSLKGTTHHDALAILRQAREPRQAVIVTRKLTPEAMPDLNSSTDSAASASAASDVSVESTEATVCTVTLEKMSAGLGFSLEGGKGSLHGDKPLTINRIFKGVGCVWFFACSPVVGMWPGPQKASGHFLGYVVSHNSMSSS

SEQ ID NO: 29893 - protein, 193 aa, Homo sapiens
  REGION 1..193: note = ENSP00000280357
MAAEPVEDNCINFVAMKFIDNTLYFIAEDDENLESDYFGKLESKLSVIRNLNDQVLFIDQGNRPLFEDMTDSDCRDNAPRTIFIISMYKDSQPRGMAVTISVKCEKISTLSCENKIISFKEMNPPDNIKDTKSDIIFFQRSVPGHDNKMQFESSSYEGYFLACEKERDLFKLILKKEDELGDRSIMFTVQNED

SEQ ID NO: 29894 - protein, 189 aa, Homo sapiens
  REGION 1..189: note = ENSP00000434561
MAAEPVEDNCINFVAMKFIDNTLYFIENLESDYFGKLESKLSVIRNLNDQVLFIDQGNRPLFEDMTDSDCRDNAPRTIFIISMYKDSQPRGMAVTISVKCEKISTLSCENKIISFKEMNPPDNIKDTKSDIIFFQRSVPGHDNKMQFESSSYEGYFLACEKERDLFKLILKKEDELGDRSIMFTVQNED

SEQ ID NO: 29895 - protein, 193 aa, Homo sapiens; identical to SEQ ID NO: 29893
  REGION 1..193: note = ENSP00000434161

SEQ ID NO: 29896 - protein, 311 aa, Homo sapiens
  REGION 1..311: note = ENSP00000328133
MQTFTMVLEEIWTSLFMWFFYALIPCLLTDEVAILPAPQNLSVLSTNMKHLLMWSPVIAPGETVYYSVEYQGEYESLYTSHIWIPSSWCSLTEGPECDVTDDITATVPYNLRVRATLGSQTSAWSILKHPFNRNSTILTRPGMEITKDGFHLVIELEDLGPQFEFLVAYWRREPGAEEHVKMVRSGGIPVHLETMEPGAAYCVKAQTFVKAIGRYSAFSQTECVEVQGEAIPLVLALFAFVGFMLILVVVPLFVWKMGRLLQYSCCPVVVLPDTLKITNSPQKLISCRREEVDACATAVMSPEELLRAWIS

SEQ ID NO: 29897 - protein, 49 aa, Homo sapiens
  REGION 1..49: note = ENSP00000418637
MQTFTMVLEEIWTSLFMWFFYALIPCLLTGWSAVVQSQLTATSASEALH

SEQ ID NO: 29898 - protein, 55 aa, Homo sapiens
  REGION 1..55: note = ENSP00000417437
MAGAPSPASLPPCSLISDCCASNQRDSVGVGPSEPGWSAVVQSQLTATSASEALH

SEQ ID NO: 29899 - protein, 120 aa, Homo sapiens
  REGION 1..120: note = ENSP00000420725
AILPAPQNLSVLSTNMKHLLMWSPVIAPGETVYYSVEYQGEYESLYTSHIWIPSSWCSLTEGPECDVTDDITATVPYNLRVRATLGSQTSAWSILKHPFNRNSRTAFLLSVHLCPELVGS

SEQ ID NO: 29900 - protein, 179 aa, Homo sapiens
  REGION 1..179: note = ENSP00000442424
MAALQKSVSSFLMGTLATSCLLLLALLVQGGAAAPISSHCRLDKSNFQQPYITNRTFMLAKEASLADNNTDVRLIGEKLFHGVSMSERCYLMKQVLNFTLEEVLFPQSDRFQPYMQEVVPFLARLSNRLSTCHIEGDDLHIQRNVQKLKDTVKKLGESGEIKAIGELDLLFMSLRNACI

SEQ ID NO: 29901 - protein, 179 aa, Homo sapiens; identical to SEQ ID NO: 29900
  REGION 1..179: note = ENSP00000329384

SEQ ID NO: 29902 - protein, 179 aa, Homo sapiens; identical to SEQ ID NO: 29900
  REGION 1..179: note = ENSP00000442424

SEQ ID NO: 29903 - protein, 179 aa, Homo sapiens; identical to SEQ ID NO: 29900
  REGION 1..179: note = ENSP00000329384

SEQ ID NO: 29904 - protein, 270 aa, Homo sapiens
  REGION 1..270: note = ENSP00000370842
MKPKMKYSTNKISTAKWKNTASKALCFKLGKSQQKAKEVCPMYFMKLRSGLMIKKEACYFRRETTKRPSLKTGRKHKRHLVLAACQQQSTVECFAFGISGVQKYTRALHDSSITGISPITEYLASLSTYNDQSITFALEDESYEIYVEDLKKDEKKDKVLLSYYESQHPSNESGDGVDGKMLMVTLSPTKDFWLHANNKEHSVELHKCEKPLPDQAFFVLHNMHSNCVSFECKTDPGVFIGVKDNHLALIKVDSSENLCTENILFKLSET

SEQ ID NO: 29905 - protein, 144 aa, Homo sapiens
  REGION 1..144: note = ENSP00000394039
MKPKMKYSTNKISTAKWKNTASKALCFKLGNKVLLSYYESQHPSNESGDGVDGKMLMVTLSPTKDFWLHANNKEHSVELHKCEKPLPDQAFFVLHNMHSNCVSFECKTDPGVFIGVKDNHLALIKVDSSENLCTENILFKLSET

SEQ ID NO: 29906 - protein, 228 aa, Homo sapiens
  REGION 1..228: note = ENSP00000478858
MKPKMKYSTNKISTAKWKNTASKALCFKLGKSQQKAKEVCPMYFMKLRSGLMIKKEACYFRRETTKRPSLKTGISPITEYLASLSTYNDQSITFALEDESYEIYVEDLKKDEKKDKVLLSYYESQHPSNESGDGVDGKMLMVTLSPTKDFWLHANNKEHSVELHKCEKPLPDQAFFVLHNMHSNCVSFECKTDPGVFIGVKDNHLALIKVDSSENLCTENILFKLSET

SEQ ID NO: 29907 - protein, 228 aa, Homo sapiens
  REGION 1..228: note = ENSP00000414238
MKPKMKYSTNKISTAKWKNTASKALCFKLGKSQQKAKEVCPMYFMKLRSGLMIKKEACYFRRETTKRPSLKTGRKHKRHLVLAACQQQSTVECFAFGISGVQKYTRALHDSSITDKVLLSYYESQHPSNESGDGVDGKMLMVTLSPTKDFWLHANNKEHSVELHKCEKPLPDQAFFVLHNMHSNCVSFECKTDPGVFIGVKDNHLALIKVDSSENLCTENILFKLSET

SEQ ID NO: 29908 - protein, 639 aa, Homo sapiens
  REGION 1..639: note = ENSP00000271417
MDRVLLRWISLFWLTAMVEGLQVTVPDKKKVAMLFQPTVLRCHFSTSSHQPAVVQWKFKSYCQDRMGESLGMSSTRAQSLSKRNLEWDPYLDCLDSRRTVRVVASKQGSTVTLGDFYRGREITIVHDADLQIGKLMWGDSGLYYCIITTPDDLEGKNEDSVELLVLGRTGLLADLLPSFAVEIMPEWVFVGLVLLGVFLFFVLVGICWCQCCPHSCCCYVRCPCCPDSCCCPQALYEAGKAAKAGYPPSVSGVPGPYSIPSVPLGGAPSSGMLMDKPHPPPLAPSDSTGGSHSVRKGYRIQADKERDSMKVLYYVEKELAQFDPARRMRGRYNNTISELSSLHEEDSNFRQSFHQMRSKQFPVSGDLESNPDYWSGVMGGSSGASRGPSAMEYNKEDRESFRHSQPRSKSEMLSRKNFATGVPAVSMDELAAFADSYGQRPRRADGNSHEARGGSRFERSESRAHSGFYQDDSLEEYYGQRSRSREPLTDADRGWAFSPARRRPAEDAHLPRLVSRTPGTAPKYDHSYLGSARERQARPEGASRGGSLETPSKRSAQLGPRSASYYAWSPPGTYKAGSSQDDQEDASDDALPPYSELELTRGPSYRGRDLPYHSNSEKKRKKEPAKKTNDFPTRMSLVV

SEQ ID NO: 29909 - protein, 580 aa, Homo sapiens
  REGION 1..580: note = ENSP00000432750
MDRVLLRWISLFWLTAMVEGLQVTVPDKKKVAMLFQPTVLRCHFSTSSHQPAVVQWKFKSYCQDRMGESLGMSSTRAQSLSKRNLEWDPYLDCLDSRRTVRVVASKQGSTVTLGDFYRGREITIVHDADLQIGKLMWGDSGLYYCIITTPDDLEGKNEDSVELLVLGRTGLLADLLPSFAVEIMPEWVFVGLVLLGVFLFFVLVGICWCQCCPHSCCCYVRCPCCPDSCCCPQAFRKGYRIQADKERDSMKVLYYVEKELAQFDPARRMRGRYNNTISELSSLHEEDSNFRQSFHQMRSKQFPVSGDLESNPDYWSGVMGGSSGASRGPSAMEYNKEDRESFRHSQPRSKSEMLSRKNFATGVPAVSMDELAAFADSYGQRPRRADGNSHEARGGSRFERSESRAHSGFYQDDSLEEYYGQRSRSREPLTDADRGWAFSPARRRPAEDAHLPRLVSRTPGTAPKYDHSYLGSARERQARPEGASRGGSLETPSKRSAQLGPRSASYYAWSPPGTYKAGSSQDDQEDASDDALPPYSELELTRGPSYRGRDLPYHSNSEKKRKKEPAKKTNDFPTRMSLVV

SEQ ID NO: 29910 - protein, 512 aa, Homo sapiens
  REGION 1..512: note = ENSP00000436120
MDRVLLRWISLFWLTAMVEGLQVTVPDKKKVAMLFQPTVLRCHFSTSSHQPAVVQWKFKSYCQDRMGESLGMSSTRAQSLSKRNLEWDPYLDCLDSRRTVRVVASKQGSTVTLGDFYRGREITIVHDADLQIGKLMWGDSGLYYCIITTPDDLEGKNEDSVELLVLVRKGYRIQADKERDSMKVLYYVEKELAQFDPARRMRGRYNNTISELSSLHEEDSNFRQSFHQMRSKQFPVSGDLESNPDYWSGVMGGSSGASRGPSAMEYNKEDRESFRHSQPRSKSEMLSRKNFATGVPAVSMDELAAFADSYGQRPRRADGNSHEARGGSRFERSESRAHSGFYQDDSLEEYYGQRSRSREPLTDADRGWAFSPARRRPAEDAHLPRLVSRTPGTAPKYDHSYLGSARERQARPEGASRGGSLETPSKRSAQLGPRSASYYAWSPPGTYKAGSSQDDQEDASDDALPPYSELELTRGPSYRGRDLPYHSNSEKKRKKEPAKKTNDFPTRMSLVV

SEQ ID NO: 29911 - protein, 167 aa, Homo sapiens
  REGION 1..167: note = ENSP00000431316
MDRVLLRWISLFWLTAMVEGLQVTVPDKKKVAMLFQPTVLRCHFSTSSHQPAVVQWKFKSYCQDRMGESLGMSSTRAQSLSKRNLEWDPYLDCLDSRRTVRVVASKQGSTVTLGDFYRGREITIVHDADLQIGKLMWGDSGLYYCIITTPDDLEGKNEDSVELLVLE

SEQ ID NO: 29912 - protein, 437 aa, Homo sapiens
  REGION 1..437: note = ENSP00000437008
MDRVLLRWISLFWLTAMVEGLQVTVPDKKKVAMLFQPTVLRCHFSTSSHQPAVVQWKFKSYCQDRMGESLGMSSTRAQSLSKRNLEWDPYLDCLDSRRTVRVVASKQGSTVTLGDFYRGREITIVHDADLQIGKLMWGDSGLYYCIITTPDDLEGKNEDSVELLVLGRTGLLADLLPSFAVEIMPEWVFVGLVLLGVFLFFVLVGICWCQCCPHSCCCYVRCPCCPDSCCCPQALYEAGKAAKAGYPPSVSGVPGPYSIPSVPLGGAPSSGMLMDKPHPPPLAPSDSTGGSHSVRKGYRIQADKERDSMKVLYYVEKELAQFDPARRMRGRYNNTISELSSLHEEDSNFRQSFHQMRSKQFPVSGDLESNPDYWSGVMGGSSGASRGPSAMEYNKEDRESFRHRMTFQPGCPLWSDVVNISLDNEKSDMDYGDKTQI

SEQ ID NO: 29913 - protein, 620 aa, Homo sapiens
  REGION 1..620: note = ENSP00000436882
MDRVLLRWISLFWLTAMVEGLQVTVPDKKKVAMLFQPTVLRCHFSTSSHQPAVVQWKFKSYCQDRMGESLGMSSTRAQSLSKRNLEWDPYLDCLDSRRTVRVVASKQGSTVTLGDFYRGREITIVHDADLQIGKLMWGDSGLYYCIITTPDDLEGKNEDSVELLVLEWVFVGLVLLGVFLFFVLVGICWCQCCPHSCCCYVRCPCCPDSCCCPQALYEAGKAAKAGYPPSVSGVPGPYSIPSVPLGGAPSSGMLMDKPHPPPLAPSDSTGGSHSVRKGYRIQADKERDSMKVLYYVEKELAQFDPARRMRGRYNNTISELSSLHEEDSNFRQSFHQMRSKQFPVSGDLESNPDYWSGVMGGSSGASRGPSAMEYNKEDRESFRHSQPRSKSEMLSRKNFATGVPAVSMDELAAFADSYGQRPRRADGNSHEARGGSRFERSESRAHSGFYQDDSLEEYYGQRSRSREPLTDADRGWAFSPARRRPAEDAHLPRLVSRTPGTAPKYDHSYLGSARERQARPEGASRGGSLETPSKRSAQLGPRSASYYAWSPPGTYKAGSSQDDQEDASDDALPPYSELELTRGPSYRGRDLPYHSNSEKKRKKEPAKKTNDFPTRMSLVV

SEQ ID NO: 29914 - protein, 531 aa, Homo sapiens
  REGION 1..531: note = ENSP00000434273
MDRVLLRWISLFWLTAMVEGLQVTVPDKKKVAMLFQPTVLRCHFSTSSHQPAVVQWKFKSYCQDRMGESLGMSSTRAQSLSKRNLEWDPYLDCLDSRRTVRVVASKQGSTVTLGDFYRGREITIVHDADLQIGKLMWGDSGLYYCIITTPDDLEGKNEDSVELLVLGRTGLLADLLPSFAVEIMPVRKGYRIQADKERDSMKVLYYVEKELAQFDPARRMRGRYNNTISELSSLHEEDSNFRQSFHQMRSKQFPVSGDLESNPDYWSGVMGGSSGASRGPSAMEYNKEDRESFRHSQPRSKSEMLSRKNFATGVPAVSMDELAAFADSYGQRPRRADGNSHEARGGSRFERSESRAHSGFYQDDSLEEYYGQRSRSREPLTDADRGWAFSPARRRPAEDAHLPRLVSRTPGTAPKYDHSYLGSARERQARPEGASRGGSLETPSKRSAQLGPRSASYYAWSPPGTYKAGSSQDDQEDASDDALPPYSELELTRGPSYRGRDLPYHSNSEKKRKKEPAKKTNDFPTRMSLVV

SEQ ID NO: 29915 - protein, 99 aa, Homo sapiens
  REGION 1..99: note = ENSP00000465416
MERLLHAKAHGVRVIGSSTLALCHLASGAADAYYQFGLHCWDLAAATVIIREAGGIVIDTSGGPLDLMACRVVAASTREMAMLIAQALQTINYGRDDEK

SEQ ID NO: 29916 - protein, 288 aa, Homo sapiens
  REGION 1..288: note = ENSP00000269159
MKPSGEDQAALAAGPWEECFQAAVQLALRAGQIIRKALTEEKRVSTKTSAADLVTETDHLVEDLIISELRERFPSHRFIAEEAAASGAKCVLTHSPTWIIDPIDGTCNFVHRFPTVAVSIGFAVRQELEFGVIYHCTEERLYTGRRGRGAFCNGQRLRVSGETDLSKALVLTEIGPKRDPATLKLFLSNMERLLHAKAHGVRVIGSSTLALCHLASGAADAYYQFGLHCWDLAAATVIIREAGGIVIDTSGGPLDLMACRVVAASTREMAMLIAQALQTINYGRDDEK

SEQ ID NO: 29917 - protein, 163 aa, Homo sapiens
  REGION 1..163: note = ENSP00000466059
MKPSGEDQAALAAGPWEECFQAAVQLALRAGQIIRKALTEEKRVSTKTSAADLVTETDHLVEDLIISELRERFPSHRFIAEEAAASGAKCVLTHSPTWIIDPIDGTCNFVHRFPTVAVSIGFAVRQEVRVWPRSPGPLPGLPLAILPFWLQPLCAWFAVCPVP

SEQ ID NO: 29918 - protein, 85 aa, Homo sapiens
  REGION 1..85: note = ENSP00000372867
MKPSGEDQAALAAGPWEECFQAAVQLALRAGQIIRKALTEEKRVSTKTSAADLVTETDHLVEDLIISELRERFPSHRSPFSLVHM

SEQ ID NO: 29919 - protein, 116 aa, Homo sapiens
  REGION 1..116: note = ENSP00000465938
MKPSGEDQAALAAGPWEECFQAAVQLALRAGQIIRKALTEEKRVSTKTSAADLVTETDHLVEDLIISELRERFPSHRFIAEEAAASGAKCVLTHSPTWIIDPIDGTCNFVHSLNSE

SEQ ID NO: 29920 - protein, 99 aa, Homo sapiens; identical to SEQ ID NO: 29915
  REGION 1..99: note = ENSP00000464767

SEQ ID NO: 29921 - protein, 126 aa, Homo sapiens
  REGION 1..126: note = ENSP00000464754
  VARIANT 1: note = Any amino acid
XHSPTWIIDPIDGTCNFVHRFPTVAVSIGFAVRQELEFGVIYHCTEERLYTGRRGRGAFCNGQRLRVSGETEMGLRHAAQAGLEVLTSKRSAHLSLAKCWDYRHEPPRPAHESLKGLGSDRNWPQT

SEQ ID NO: 29922 - protein, 85 aa, Homo sapiens; identical to SEQ ID NO: 29918
  REGION 1..85: note = ENSP00000486461

SEQ ID NO: 29923 - protein, 797 aa, Homo sapiens
  REGION 1..797: note = ENSP00000358966
MYLETRRAIFVFWIFLQVQGTKDISINIYHSETKDIDNPPRNETTESTEKMYKMSTMRRIFDLAKHRTKRSAFFPTGVKVCPQESMKQILDSLQAYYRLRVCQEAVWEAYRIFLDRIPDTGEYQDWVSICQQETFCLFDIGKNFSNSQEHLDLLQQRIKQRSFPDRKDEISAEKTLGEPGETIVISTDVANVSLGPFPLTPDDTLLNEILDNTLNDTKMPTTERETEFAVLEEQRVELSVSLVNQKFKAELADSQSPYYQELAGKSQLQMQKIFKKLPGFKKIHVLGFRPKKEKDGSSSTEMQLTAIFKRHSAEAKSPASDLLSFDSNKIESEEVYHGTMEEDKQPEIYLTATDLKRLISKALEEEQSLDVGTIQFTDEIAGSLPAFGPDTQSELPTSFAVITEDATLSPELPPVEPQLETVDGAEHGLPDTSWSPPAMASTSLSEAPPFFMASSIFSLTDQGTTDTMATDQTMLVPGLTIPTSDYSAISQLALGISHPPASSDDSRSSAGGEDMVRHLDEMDLSDTPAPSEVPELSEYVSVPDHFLEDTTPVSALQYITTSSMTIAPKGRELVVFFSLRVANMAFSNDLFNKSSLEYRALEQQFTQLLVPYLRSNLTGFKQLEILNFRNGSVIVNSKMKFAKSVPYNLTKAVHGVLEDFRSAAAQQLHLEIDSYSLNIEPADQADPCKFLACGEFAQCVKNERTEEAECRCKPGYDSQGSLDGLEPGLCGPGTKECEVLQGKGAPCRLPDHSENQAYKTSVKKFQNQQNNKVISKRNSELLTVEYEEFNHQDWEGN

SEQ ID NO: 29924 - protein, 158 aa, Homo sapiens
  REGION 1..158: note = ENSP00000358968
ERPNGTSAQPAQVKPEFYRQAELKPCPWTGSNQRRCITFCPTPDQADPCKFLACGEFAQCVKNERTEEAECRCKPGYDSQGSLDGLEPGLCGPGTKECEVLQGKGAPCRLPDHSENQAYKTSVKKFQNQQNNKVISKRNSELLTVEYEEFNHQDWEGN

SEQ ID NO: 29925 - protein, 719 aa, Homo sapiens
  REGION 1..719: note = ENSP00000481913
MYLETRRAIFVFWIFLQVQGTKVCQEAVWEAYRIFLDRIPDTGEYQDWVSICQQETFCLFDIGKNFSNSQEHLDLLQQRIKQRSFPDRKDEISAEKTLGEPGETIVISTDVANVSLGPFPLTPDDTLLNEILDNTLNDTKMPTTERETEFAVLEEQRVELSVSLVNQKFKAELADSQSPYYQELAGKSQLQMQKIFKKLPGFKKIHVLGFRPKKEKDGSSSTEMQLTAIFKRHSAEAKSPASDLLSFDSNKIESEEVYHGTMEEDKQPEIYLTATDLKRLISKALEEEQSLDVGTIQFTDEIAGSLPAFGPDTQSELPTSFAVITEDATLSPELPPVEPQLETVDGAEHGLPDTSWSPPAMASTSLSEAPPFFMASSIFSLTDQGTTDTMATDQTMLVPGLTIPTSDYSAISQLALGISHPPASSDDSRSSAGGEDMVRHLDEMDLSDTPAPSEVPELSEYVSVPDHFLEDTTPVSALQYITTSSMTIAPKGRELVVFFSLRVANMAFSNDLFNKSSLEYRALEQQFTQLLVPYLRSNLTGFKQLEILNFRNGSVIVNSKMKFAKSVPYNLTKAVHGVLEDFRSAAAQQLHLEIDSYSLNIEPADQADPCKFLACGEFAQCVKNERTEEAECRCKPGYDSQGSLDGLEPGLCGPGTKECEVLQGKGAPCRLPDHSENQAYKTSVKKFQNQQNNKVISKRNSELLTVEYEEFNHQDWEGN

SEQ ID NO: 29926 - protein, 140 aa, Homo sapiens
  REGION 1..140: note = ENSP00000358980
MKQILDSLQAYYRLRVCQEAVWEAYRIFLDRIPDTGEYQDWVSICQQETFCLFDIGKNFSNSQEHLDLLQQRIKQRSFPDRKDEISAEKTLGEPGETIVISTEKNKGKTKPFNILQFGNNHHEHLLPIFCLLSSIIYTYY

SEQ ID NO: 29927 - protein, 40 aa, Homo sapiens
  REGION 1..40: note = ENSP00000431682
MESKDEVSDTDSGIILQSGPDSPVSPMKELTHAVHKQQRA

SEQ ID NO: 29928 - protein, 123 aa, Homo sapiens
  REGION 1..123: note = ENSP00000397255
MESKDEVSDTDSGIILQSGPDSPVSPMKELTHAVHKQQRALEARLEACLEELRRLCLREAELTGTLPAEYPLKPGEKAPKVRRRIGAAYKLDDWALHREDPLSSLERQLALQLQITEAARRLC

SEQ ID NO: 29929 - protein, 663 aa, Homo sapiens
  REGION 1..663: note = ENSP00000356311
MLQMPKLNEIPPGRAGRREARGEGRWPGQTGPEAARLEWRAQGQAGGARAPWDSWGSSRLPTQPGPGWSRCPPSLLCALSFQKSTMESKDEVSDTDSGIILQSGPDSPVSPMKELTHAVHKQQRALEARLEACLEELRRLCLREAELTGTLPAEYPLKPGEKAPKVRRRIGAAYKLDDWALHREDPLSSLERQLALQLQITEAARRLCLEENLSRQARRQRKHSMLQEEKKLQELQRCLVERRRNSEPPPAAALPLGRELSASDDSSLSDGLLLEEEESQVPKPPPESPAPPSRPLPPQTLEGLQPTGPEAGSPERAPVQNSPWKETSLDHPYEKPRKSSEPWSESSSPATTPQDGPSASSLWLLEPASYHVVPIRGVPGQWQGRTSAPATPEIQGRRGQSQSLRVDSFRAGPEGRGRSAFPRRRPTHYTVTVPDSCFPATKPPLPHAACHSCSEDSGSDVSSISHPTSPGSSSPDISFLQPLSPPKTHRHRGAWVPAGSRELVAHHPKLLLPPGYFPAGRYVVVAESPLPPGEWELRRAAPGPAYEEEGTPLRYQRLVPSRSRIVRTPSLKDSPAGRGLSKAAVSEELKWWHERARLRSTRPHSLDRQGAFRVRSLPLGREGFGRALGPRAQVPTVCVLRRSPDGAPVQVFVPEKGEIISQV

SEQ ID NO: 29930 - protein, 578 aa, Homo sapiens
  REGION 1..578: note = ENSP00000392105
MESKDEVSDTDSGIILQSGPDSPVSPMKELTHAVHKQQRALEARLEACLEELRRLCLREAELTGTLPAEYPLKPGEKAPKVRRRIGAAYKLDDWALHREDPLSSLERQLALQLQITEAARRLCLEENLSRQARRQRKHSMLQEEKKLQELQRCLVERRRNSEPPPAAALPLGRELSASDDSSLSDGLLLEEEESQVPKPPPESPAPPSRPLPPQTLEGLQPTGPEAGSPERAPVQNSPWKETSLDHPYEKPRKSSEPWSESSSPATTPQDGPSASSLWLLEPASYHVVPIRGVPGQWQGRTSAPATPEIQGRRGQSQSLRVDSFRAGPEGRGRSAFPRRRPTHYTVTVPDSCFPATKPPLPHAACHSCSEDSGSDVSSISHPTSPGSSSPDISFLQPLSPPKTHRHRGAWVPAGSRELVAHHPKLLLPPGYFPAGRYVVVAESPLPPGEWELRRAAPGPAYEEEGTPLRYQRLVPSRSRIVRTPSLKDSPAGRGLSKAAVSEELKWWHERARLRSTRPHSLDRQGAFRVRSLPLGREGFGRALGPRAQVPTVCVLRRSPDGAPVQVFVPEKGEIISQV

SEQ ID NO: 29931 - protein, 40 aa, Homo sapiens; identical to SEQ ID NO: 29927
  REGION 1..40: note = ENSP00000431682

SEQ ID NO: 29932 - protein, 123 aa, Homo sapiens; identical to SEQ ID NO: 29928
  REGION 1..123: note = ENSP00000397255

SEQ ID NO: 29933 - protein, 663 aa, Homo sapiens; identical to SEQ ID NO: 29929
  REGION 1..663: note = ENSP00000356311

SEQ ID NO: 29934 - protein, 578 aa, Homo sapiens; identical to SEQ ID NO: 29930
  REGION 1..578: note = ENSP00000392105

SEQ ID NO: 29935 - protein, 1240 aa, Homo sapiens
  REGION 1..1240: note = ENSP00000376406
MSVKEGAQRKWAALKEKLGPQDSDPTEANLESADPELCIRLLQMPSVVNYSGLRKRLEGSDGGWMVQFLEQSGLDLLLEALARLSGRGVARISDALLQLTCVSCVRAVMNSRQGIEYILSNQGYVRQLSQALDTSNVMVKKQVFELLAALCIYSPEGHVLTLDALDHYKTVCSQQYRFSIVMNELSGSDNVPYVVTLLSVINAVILGPEDLRARTQLRNEFIGLQLLDVLARLRDLEDADLLIQLEAFEEAKAEDEEELLRVSGGVDMSSHQEVFASLFHKVSCSPVSAQLLSVLQGLLHLEPTLRSSQLLWEALESLVNRAVLLASDAQECTLEEVVERLLSVKGRPRPSPLVKAHKSVQANLDQSQRGSSPQNTTTPKPSVEGQQPAAAAACEPVDHAQSESILKVSQPRALEQQASTPPPPPPPPLLPGSSAEPPPPPPPPPLPSVGAKALPTAPPPPPLPGLGAMAPPAPPLPPPLPGSCEFLPPPPPPLPGLGCPPPPPPLLPGMGWGPPPPPPPLLPCTCSPPVAGGMEEVIVAQVDHGLGSAWVPSHRRVNPPTLRMKKLNWQKLPSNVAREHNSMWASLSSPDAEAVEPDFSSIERLFSFPAAKPKEPTMVAPRARKEPKEITFLDAKKSLNLNIFLKQFKCSNEEVAAMIRAGDTTKFDVEVLKQLLKLLPEKHEIENLRAFTEERAKLASADHFYLLLLAIPCYQLRIECMLLCEGAAAVLDMVRPKAQLVLAACESLLTSRQLPIFCQLILRIGNFLNYGSHTGDADGFKISTLLKLTETKSQQNRVTLLHHVLEEAEKSHPDLLQLPRDLEQPSQAAGINLEIIRSEASSNLKKLLETERKVSASVAEVQEQYTERLQASISAFRALDELFEAIEQKQRELADYLCEDAQQLSLEDTFSTMKAFRDLFLRALKENKDRKEQAAKAERRKQQLAEEEARRPRGEDGKPVRKGPGKQEEVCVIDALLADIRKGFQLRKTARGRGDTDGGSKAASMDPPRATEPVATSNPAGDPVGSTRCPASEPGLDATTASESRGWDLVDAVTPGPQPTLEQLEEGGPRPLERRSSWYVDASDVLTTEDPQCPQPLEGAWPVTLGDAQALKPLKFSSNQPPAAGSSRQDAKDPTSLLGVLQAEADSTSEGLEDAVHSRGARPPAAGPGGDEDEDEEDTAPESALDTSLDKSFSEDAVTDSSGSGTLPRARGRASKGTGKRRKKRPSRSQEGLRPRPKAK

SEQ ID NO: 29936 - protein, 234 aa, Homo sapiens
  REGION 1..234: note = ENSP00000381380
MSVKEGAQRKWAALKEKLGPQDSDPTEANLESADPELCIRLLQMPSVVNYSGLRKRLEGSDGGWMVQFLEQSGLDLLLEALARLSGRGVARISDALLQLTCVSCVRAVMNSRQGIEYILSNQGYVRQLSQALDTSNVMVKKQVFELLAALCIYSPEGHVLTLDALDHYKTVCSQQYRFSIVMNELSGSDNVPYVVTLLSVINAVILGPEDLRARTQLRNEFIGLQLLDVLARLR

SEQ ID NO: 29937 - protein, 1249 aa, Homo sapiens
  REGION 1..1249: note = ENSP00000376410
MSVKEGAQRKWAALKEKLGPQDSDPTEANLESADPELCIRLLQMPSVVNYSGLRKRLEGSDGGWMVQFLEQSGLDLLLEALARLSGRGVARISDALLQLTCVSCVRAVMNSRQGIEYILSNQGYVRQLSQALDTSNVMVKKQVFELLAALCIYSPEGHVLTLDALDHYKTVCSQQYRFSIVMNELSGSDNVPYVVTLLSVINAVILGPEDLRARTQLRNEFIGLQLLDVLARLRDLEDADLLIQLEAFEEAKAEDEEELLRVSGGVDMSSHQEVFASLFHKVSCSPVSAQLLSVLQGLLHLEPTLRSSQLLWEALESLVNRAVLLASDAQECTLEEVVERLLSVKGRPRPSPLVKAHKSVQANLDQSQRGSSPQNTTTPKPSVEGQQPAAAAACEPVDHAQSESILKVSQPRALEQQASTPPPPPPPPLLPGSSAEPPPPPPPPPLPSVGAKALPTAPPPPPLPGLGAMAPPAPPLPPPLPGSCEFLPPPPPPLPGLGCPPPPPPLLPGMGWGPPPPPPPLLPCTCSPPVAGGMEEVIVAQVDHGLGSAWVPSHRRVNPPTLRMKKLNWQKLPSNVAREHNSMWASLSSPDAEAVEPDFSSIERLFSFPAAKPKEPTMVAPRARKEPKEITFLDAKKSLNLNIFLKQFKCSNEEVAAMIRAGDTTKFDVEVLKQLLKLLPEKHEIENLRAFTEERAKLASADHFYLLLLAIPCYQLRIECMLLCEGAAAVLDMVRPKAQLVLAACESLLTSRQLPIFCQLILRIGNFLNYGSHTGDADGFKISTLLKLTETKSQQNRVTLLHHVLEEAEKSHPDLLQLPRDLEQPSQAAGINLEIIRSEASSNLKKLLETERKVSASVAEVQEQYTERLQASISAFRALDELFEAIEQKQRELADYLCEDAQQLSLEDTFSTMKAFRDLFLRALKENKDRKEQAAKAERRKQQLAEEEARRPRGEDGKPVRKGPGKQEEVCVIDALLADIRKGFQLRKTARGRGDTDGGSKAASMDPPRATEPVATSNPAGDPVGSTRCPASEPGLDATTASESRGWDLVDAVTPGPQPTLEQLEEGGPRPLERRSSWYVDASDVLTTEDPQCPQPLEGAWPVTLGDAQALKPLKFSSNQPPAAGSSRQDAKDPTSLLGVLQAEADSTSEGLEDAVHSRGARPPAAGPGGDEDEDEEDTAPESALDTSLDKSFSEDAVTDSSGSGTLPRARGRASKGTGKRRKKRPSRSQEEVPPDSDDNKTKKLCVIQ

SEQ ID NO: 29938 - protein, 717 aa, Homo sapiens
  REGION 1..717: note = ENSP00000252527
GMEEVIVAQVDHGLGSAWVPSHRRVNPPTLRMKKLNWQKLPSNVAREHNSMWASLSSPDAEAVEPDFSSIERLFSFPAAKPKEPTMVAPRARKEPKEITFLDAKKSLNLNIFLKQFKCSNEEVAAMIRAGDTTKFDVEVLKQLLKLLPEKHEIENLRAFTEERAKLASADHFYLLLLAIPCYQLRIECMLLCEGAAAVLDMVRPKAQLVLAACESLLTSRQLPIFCQLILRIGNFLNYGSHTGDADGFKISTLLKLTETKSQQNRVTLLHHVLEEAEKSHPDLLQLPRDLEQPSQAAGINLEIIRSEASSNLKKLLETERKVSASVAEVQEQYTERLQASISAFRALDELFEAIEQKQRELADYLCEDAQQLSLEDTFSTMKAFRDLFLRALKENKDRKEQAAKAERRKQQLAEEEARRPRGEDGKPVRKGPGKQEEVCVIDALLADIRKGFQLRKTARGRGDTDGGSKAASMDPPRATEPVATSNPAGDPVGSTRCPASEPGLDATTASESRGWDLVDAVTPGPQPTLEQLEEGGPRPLERRSSWYVDASDVLTTEDPQCPQPLEGAWPVTLGDAQALKPLKFSSNQPPAAGSSRQDAKDPTSLLGVLQAEADSTSEGLEDAVHSRGARPPAAGPGGDEDEDEEDTAPESALDTSLDKSFSEDAVTDSSGSGTLPRARGRASKGTGKRRKKRPSRSQEEVPPDSDDNKTKKLCVIQ

SEQ ID NO: 29939 - protein, 142 aa, Homo sapiens
  REGION 1..142: note = ENSP00000483829
MQCFASLYCLEVAELGALGRGKLAGSAMAGQGPLPWGLAPVPACPAPEVGVGGGLPLLPLPGLCPAAETWPSHQQKTPPSASCPAWAGPGDNTGPPEGLQGDTQQPLPPHCPPSEGSLPEPAPCQVCALRLAAGCVANKKQT

SEQ ID NO: 29940 - protein, 426 aa, Homo sapiens
  REGION 1..426: note = ENSP00000242208
MPLLWLRGFLLASCWIIVRSSPTPGSEGHSAAPDCPSCALAALPKDVPNSQPEMVEAVKKHILNMLHLKKRPDVTQPVPKAALLNAIRKLHVGKVGENGYVEIEDDIGRRAEMNELMEQTSEIITFAESGTARKTLHFEISKEGSDLSVVERAEVWLFLKVPKANRTRTKVTIRLFQQQKHPQGSLDTGEEAEEVGLKGERSELLLSEKVVDARKSTWHVFPVSSSIQRLLDQGKSSLDVRIACEQCQESGASLVLLGKKKKKEEEGEGKKKGGGEGGAGADEEKEQSHRPFLMLQARQSEDHPHRRRRRGLECDGKVNICCKKQFFVSFKDIGWNDWIIAPSGYHANYCEGECPSHIAGTSGSSLSFHSTVINHYRMRGHSPFANLKSCCVPTKLRPMSMLYYDDGQNIIKKDIQNMIVEECGCS

SEQ ID NO: 29941 - protein, 426 aa, Homo sapiens; identical to SEQ ID NO: 29940
  REGION 1..426: note = ENSP00000397197

SEQ ID NO: 29942 - protein, 426 aa, Homo sapiens; identical to SEQ ID NO: 29940
  REGION 1..426: note = ENSP00000490646

SEQ ID NO: 29943 - protein, 399 aa, Homo sapiens
  REGION 1..399: note = ENSP00000325423
MSDILRELLCVSEKAANIARACRQQEALFQLLIEEKKEGEKNKKFAVDFKTLADVLVQEVIKQNMENKFPGLEKNIFGEESNEFTNDWGEKITLRLCSTEEETAELLSKVLNGNKVASEALARVVHQDVAFTDPTLDSTEINVPQDILGIWVDPIDSTYQYIKGSADIKSNQGIFPCGLQCVTILIGVYDIQTGVPLMGVINQPFVSRDPNTLRWKGQCYWGLSYMGTNMHSLQLTISRRNGSETHTGNTGSEAAFSPSFSAVISTSEKETIKAALSRVCGDRIFGAAGAGYKSLCVVQGLVDIYIFSEDTTFKWDSCAAHAILRAMGGGIVDLKECLERNPETGLDLPQLVYHVENEGAAGVDRWANKGGLIAYRSRKRLETFLSLLVQNLAPAETHT

SEQ ID NO: 29944 - protein, 9 aa, Homo sapiens
  REGION 1..9: note = ENSP00000415014
MSDILRELL

SEQ ID NO: 29945 - protein, 88 aa, Homo sapiens
  REGION 1..88: note = ENSP00000391415
MSDILRELLCVSEKAANIARACRQQEALFQLLIEEKKEGEKNKKFAVDFKTLADVLVQEVIKQNMENKFPGLEKNIFGEESNEFTNDW

SEQ ID NO: 29946 - protein, 213 aa, Homo sapiens
  REGION 1..213: note = ENSP00000409786
MSDILRELLCVSEKAANIARACRQQEALFQLLIEEKKEGEKNKKFAVDFKTLADVLVQEVIKQNMENKFPGLEKNIFGEESNEFTNDWGEKITLRLCSTEEETAELLSKVLNGNKVASEALARVVHQDVAFTDPTLDSTEINVPQDILGIWVDPIDSTYQYIKGSADIKSNQGIFPCGLQCVTILIGVYDIQTGVPLMGVINQPFVSRDPNTL

SEQ ID NO: 29947 - protein, 190 aa, Homo sapiens
  REGION 1..190: note = ENSP00000404732
MSDILRELLCVSEKAANIARACRQQEALFQLLIEEKKEGEKNKKFAVDFKTLADVLVQEVIKQNMENKFPGLEKNIFGEESNEFTNDWGEKITLRLCSTEEETAELLSKVLNGNKVASEALARVVHQDVAFTDPTLDSTEINVPQDILGIWVDPIDSTYQYIKGSADIKSNQGIFPCGLQCVTILIGVYD

SEQ ID NO: 29948 - protein, 143 aa, Homo sapiens
  REGION 1..143: note = ENSP00000392814
MSDILRELLCVSEKAANIARACRQQEALFQLLIEEKKEGEKNKKFAVDFKTLADVLVQEVIKQNMENKFPGLEKNIFGEESNEFTNDWGEKITLRLCSTEEETAELLSKVLNGNKVASEALARVVHQDVAFTDPTLDSTEINV

SEQ ID NO: 29949 - protein, 212 aa, Homo sapiens
  REGION 1..212: note = ENSP00000395424
MSDILRELLCVSEKAANIARACRQQEALFQLLIEEKKEGEKNKKFAVDFKTLADVLVQEVIKQNMENKFPGLEKNIFGEESNEFTNDWGEKITLRLCSTEEETAELLSKVLNGNKVASEALARVVHQDVAFTDPTLDSTEINVPQDILGIWVDPIDSTYQYIKGSADIKSNQGIFPCGLQCVTILIGVYDIQTGVPLMGVINQPFVSRDPNT

SEQ ID NO: 29950 - protein, 30 aa, Homo sapiens
  REGION 1..30: note = ENSP00000410662
MSDILRELLCVSEKAANIARACRQQEALFQ

SEQ ID NO: 29951 - protein, 155 aa, Homo sapiens
  REGION 1..155: note = ENSP00000387079
MSDILRELLCVSEKAANIARACRQQEALFQLLIEEKKEGEKNKKFAVDFKTLADVLVQEVIKQNMENKFPGLEKNIFGEESNEFTNDWGEKITLRLCSTEEETAELLSKVLNGNKVASEALARVVHQDVAFTDPTLDSTEINVPQDILGIWVDPI

SEQ ID NO: 29952 - protein, 68 aa, Homo sapiens
  REGION 1..68: note = ENSP00000412119
MSDILRELLCVSEKAANIARACRQQEALFQLLIEEKKEGEKNKKFAVDFKTLADVLVQEVIKQNMENK

SEQ ID NO: 29953 - protein, 399 aa, Homo sapiens; identical to SEQ ID NO: 29943
  REGION 1..399: note = ENSP00000376142

SEQ ID NO: 29954 - protein, 924 aa, Homo sapiens
  REGION 1..924: note = ENSP00000425487
MEIKEEGASEEGQHFLPTAQANDPGDCQFTSIQKTPNEPQLEFILACKDLVAPVRDRKLNTLVQISVIHPVEQSLTRYSSTEIVEGTRDPLFLTGVTFPSEYPIYEETKIKLTVYDVKDKSHDTVRTSVLPEHKDPPPEVGRSFLGYASFKVGELLKSKEQLLVLSLRTSDGGKVVGTIEVSVVKMGEIEDGEADHITTDVQGQKCALVCECTAPESVSGKDNLPFLNSVLKNPVCKLYRFPTSDNKWMRIREQMSESILSFHIPKELISLHIKEDLCRNQEIKELGELSPHWDNLRKNVLTHCDQMVNMYQDILTELSKETGSSFKSSSSKGEKTLEFVPINLHLQRMQVHSPHLKDALYDVITVGAPAAHFQGFKNGGLRKLLHRFETERRNTGYQFIYYSPENTAKAKEVLSNINQLQPLIATHADLLLNSASQHSPDSLKNSLKMLSEKTELFVHAFKDQLVRSALLALYTARPGGILKKPPSPKSSTEESSPQDQPPVMRGQDSIPHHSDYDEEEWDRVWANVGKSLNCIIAMVDKLIERDGGSEGSGGNNDGEKEPSLTDAIPSHPREDWYEQLYPLILTLKDCMGEVVNRAKQSLTFVLLQELAYSLPQCLMLTLRRDIVFSQALAGLVCGFIIKLQTSLYDPGFLQQLHTVGLIVQYEGLLSTYSDEIGMLEDMAVGISDLKKVAFKIIEAKSNDVLPVITGRREHYVVEVKLPARMFESLPLQIKEGQLLHVYPVLFNVGINEQQTLAERFGDVSLQESINQENFELLQEYYKIFMEKMPPDYISHFQEQNDLKALLENLLQNIQSKKRKNVEIMWLAATICRKLNGIRFTCCKSAKDRTSMSVTLEQCSILRDEHQLHKDFFIRALDCMRREGCRIENVLKNIKCRKYAFNMLQLMAFPKYYRPPEGTYGKADT

SEQ ID NO: 29955 - protein, 924 aa, Homo sapiens; identical to SEQ ID NO: 29954
  REGION 1..924: note = ENSP00000423954

SEQ ID NO: 29956 - protein, 938 aa, Homo sapiens
  REGION 1..938: note = ENSP00000422793
MEIKEEGASEEGQHFLPTAQANDPGDCQFTSIQKTPNEPQLEFILACKDLVAPVRDRKLNTLVQISVIHPVEQSLTRYSSTEIVEGTRDPLFLTGVTFPSEYPIYEETKIKLTVYDVKDKSHDTVRTSVLPEHKDPPPEVGRSFLGYASFKVGELLKSKEQLLVLSLRTSDGGKVVGTIEVSVVKMGEIEDGEADHITTDVQGQKCALVCECTAPESVSGKDNLPFLNSVLKNPVCKLYRFPTSDNKWMRIREQMSESILSFHIPKELISLHIKEDLCRNQEIKELGELSPHWDNLRKNVLTHCDQMVNMYQDILTELSKETGSSFKSSSSKGEKTLEFVPINLHLQRMQVHSPHLKDALYDVITVGAPAAHFQGFKNGGLRKLLHRFETERRNTGYQFIYYSPENTAKAKEVLSNINQLQPLIATHADLLLNSASQHSPDSLKNSLKMLSEKTELFVHAFKDQLVRSALLALYTARPGGILKKPPSPKSSTEESSPQDQPPVMRGQDSIPHHSDYDEEEWDRVWANVGKSLNCIIAMVDKLIERDGGSEGSGGNNDGEKEPSLTDAIPSHPREDWYEQLYPLILTLKDCMGEVVNRAKQSLTFVLLQELAYSLPQCLMLTLRRDIVFSQALAGLVCGFIIKLQTSLYDPGFLQQLHTVGLIVQYEGLLSTYSDEIGMLEDMAVGISDLKKVAFKIIEAKSNDVLPVITGRREHYVVEVKLPARMFESLPLQIKEGQLLHVYPVLFNVGINEQQTLAERFGDVSLQESINQENFELLQEYYKIFMEKMPPDYISHFQEQNDLKALLENLLQNIQSKKRKNVEIMWLAATICRKLNGIRFTCCKSAKDRTSMSVTLEQCSILRDEHQLHKDFFIRALDCMRSRQTQGALNESDDPETGCLTDNKPTSRHFYPVALLLVSSHLLVVWLILSLALLLAKYQ

SEQ ID NO: 29957 - protein, 688 aa, Homo sapiens
  REGION 1..688: note = ENSP00000426207
MGEIEDGEADHITTDVQGQKCALVCECTAPESVSGKDNLPFLNSVLKNPVCKLYRFPTSDNKWMRIREQMSESILSFHIPKELISLHIKEDLCRNQEIKELGELSPHWDNLRKNVLTHCDQMVNMYQDILTELSKETGSSFKSSSSKGEKTLEFVPINLHLQRMQVHSPHLKDALYDVITVGAPAAHFQGFKNGGLRKLLHRFETERRNTGYQFIYYSPENTAKAKEVLSNINQLQPLIATHADLLLNSASQHSPDSLKNSLKMLSEKTELFVHAFKDQLVRSALLALYTARPGGILKKPPSPKSSTEESSPQDQPPVMRGQDSIPHHSDYDEEEWDRVWANVGKSLNCIIAMVDKLIERDGGSEGSGGNNDGEKEPSLTDAIPSHPREDWYEQLYPLILTLKDCMGEVVNRAKQSLTFVLLQELAYSLPQCLMLTLRRDIVFSQALAGLVCGFIIKLQTSLYDPGFLQQLHTVGLIVQYEGLLSTYSDEIGMLEDMAVGISDLKKVAFKIIEAKSNDVLPVITGRREHYVVEVKLPARMFESLPLQIKEGQLLHVYPVLFNVGINEQQTLAERFGDVSLQESINQENFELLQEYYKIFMEKMPPDYISHFQEQNDLKALLENLLQNIQSKKRKNVEIMWLAATICRKLNGIRFTCCKSAKDRTSMSVTLEQCSILRDEHQLHKDFFI

SEQ ID NO: 29958 - protein, 416 aa, Homo sapiens
  REGION 1..416: note = ENSP00000423771
MEIKEEGASEEGQHFLPTAQANDPGDCQFTSIQKTPNEPQLEFILACKDLVAPVRDRKLNTLVQISVIHPVEQSLTRYSSTEIVEGTRDPLFLTGVTFPSEYPIYEETKIKLTVYDVKDKSHDTVRTSVLPEHKDPPPEVGRSFLGYASFKVGELLKSKEQLLVLSLRTSDGGKVVGTIEVSVVKMGEIEDGEADHITTDVQGQKCALVCECTAPESVSGKDNLPFLNSVLKNPVCKLYRFPTSDNKWMRIREQMSESILSFHIPKELISLHIKEDLCRNQEIKELGELSPHWDNLRKNVLTHCDQMVNMYQDILTELSKETGSSFKSSSSKGEKTLEFVPINLHLQRMQMLSTMSSLWEPQLPIFRDLRMVVFGSYSIDLKQKEEIPDTSLFTIHLKTQPKQRKFSATSINYNLL

SEQ ID NO: 29959 - protein, 817 aa, Homo sapiens
  REGION 1..817: note = ENSP00000427250
MEIKEEGASEEGQHFLPTAQANDPGDCQFTSIQKTPNEPQLEFILACKDLVAPVRDRKLNTLVQISVIHPVEQSLTRYSSTEIVEGTRDPLFLTGVTFPSEYPIYEETKIKLTVYDVKDKSHDTVRTSVLPEHKDPPPEVGRSFLGYASFKVGELLKSKEQLLVLSLRTSDGGKVVGTIEVSVVKMGEIEDGEADHITTDVQGQKCALVCECTAPESVSGKDNLPFLNSVLKNPVCKLYRFPTSDNKWMRIREQMSESILSFHIPKELISLHIKEDLCRNQEIKELGELSPHWDNLRKNVLTHCDQMVNMYQDILTELSKETGSSFKSSSSKGEKTLEFVPINLHLQRMQVHSPHLKDALYDVITVGAPAAHFQGFKNGGLRKLLHRFETERRNTGYQFIYYSPENTAKAKEVLSNINQLQPLIATHADLLLNSASQHSPDSLKNSLKMLSEKTELFVHAFKDQLVRSALLALYTARPGGILKKPPSPKSSTEESSPQDQPPVMRGQDSIPHHSDYDEEEWDRVWANVGKSLNCIIAMVDKLIERDGGSEGSGGNNDGEKEPSLTDAIPSHPREDWYEQLYPLILTLKDCMGEVVNRAKQSLTFVLLQELAYSLPQCLMLTLRRDIVFSQALAGLVCGFIIKLQTSLYDPGFLQQLHTVGLIVQYEGLLSTYSDEIGMLEDMAVGISDLKKVAFKIIEAKSNDVLPVITGRREHYVVEVKLPARMFESLPLQIKEGQLLHVYPVLFNVGINEQQTLAERFGDVSLQESINQENFELLQEYYKIFMEKMPPDYISHFQEQNDLKALLENLLQNIQSKK

SEQ ID NO: 29960 - protein, 686 aa, Homo sapiens
  REGION 1..686: note = ENSP00000421065
MIHFHPLILPHERSFLGYASFKVGELLKSKEQLLVLSLRTSDGGKVVGTIEVSVVKMGEIEDGEADHITTDVQGQKCALVCECTAPESVSGKDNLPFLNSVLKNPVCKLYRFPTSDNKWMRIREQMSESILSFHIPKELISLHIKEDLCRNQEIKELGELSPHWDNLRKNVLTHCDQMVNMYQDILTELSKETGSSFKSSSSKGEKTLEFVPINLHLQRMQVHSPHLKDALYDVITVGAPAAHFQGFKNGGLRKLLHRFETERRNTGYQFIYYSPENTAKAKEVLSNINQLQPLIATHADLLLNSASQHSPDSLKNSLKMLSEKTELFVHAFKDQLVRSALLALYTARPGGILKKPPSPKSSTEESSPQDQPPVMRGQDSIPHHSDYDEEEWDRVWANVGKSLNCIIAMVDKLIERDGGSEGSGGNNDGEKEPSLTDAIPSHPREDWYEQLYPLILTLKDCMGEVVNRAKQSLTFVLLQELAYSLPQCLMLTLRRDIVFSQALAGLVCGFIIKLQTSLYDPGFLQQLHTVGLIVQYEGLLSTYSDEIGMLEDMAVGISDLKKVAFKIIEAKSNDVLPVITGRREHYVVEVKLPARMFESLPLQIKEGQLLHVYPVLFNVGINEQQTLAERFGDVSLQESINQENFELLQEYYKIFMEKMPPDYISHFQEQNDLKALLENLLQNIQS

SEQ ID NO: 29961 - protein, 33 aa, Homo sapiens
  REGION 1..33: note = ENSP00000424731
EYPIYEETKIKLTVYDVKDKSHDTFRINRLTSL

SEQ ID NO: 29962 - protein, 65 aa, Homo sapiens
  REGION 1..65: note = ENSP00000425764
  VARIANT 1: note = Any amino acid
XIHPVEQSLTRYSSTEIVEGTRDPLFLTGVTFPSEYPIYEETKIKLTVYDVKDKSHDTIANSSRI

SEQ ID NO: 29963 - protein, 131 aa, Homo sapiens
  REGION 1..131: note = ENSP00000424057
MEIKEEGASEEGQHFLPTAQANDPGDCQFTSIQKTPNEPQLEFILACKDLVAPVRDRKLNTLVQISVIHPVEQSLTRYSSTEIVEGTRDPLFLTGVTFPSEYPIYEETKIKLTVYDVKDKSHDTIANSSRI

SEQ ID NO: 29964 - protein, 84 aa, Homo sapiens
  REGION 1..84: note = ENSP00000426957
MEIKEEGASEEGQHFLPTAQANDPGDCQFTSIQKTPNEPQLEFILACKDLVAPVRDRKLNTLVQISVIHPVEQSLTRYSSTEIV

SEQ ID NO: 29965 - protein, 47 aa, Homo sapiens
  REGION 1..47: note = ENSP00000420888
MEIKEEGASEEGQHFLPTAQANDPGDCQFTSIQKTPNEPQLEFILGN

SEQ ID NO: 29966 - protein, 53 aa, Homo sapiens
  REGION 1..53: note = ENSP00000426897
MEIKEEGASEEGQHFLPTAQANDPGDCQFTSIQKTPNEPQLEFILDLNQELRD

SEQ ID NO: 29967 - protein, 39 aa, Homo sapiens
  REGION 1..39: note = ENSP00000422052
MEIKEEGASEEGQHFLPTAQANDPGDCQFTSIQKTPNEP

SEQ ID NO: 29968 - protein, 924 aa, Homo sapiens; identical to SEQ ID NO: 29954
  REGION 1..924: note = ENSP00000262992

SEQ ID NO: 29969 - protein, 53 aa, Homo sapiens; identical to SEQ ID NO: 29966
  REGION 1..53: note = ENSP00000486368

SEQ ID NO: 29970 - protein, 412 aa, Homo sapiens
  REGION 1..412: note = ENSP00000357583
MAGKAAAPGTAVLLVTANVGSLFDDPENLQKNWLREFYQVVHTHKPHFMALHCQEFGGKNYEASMSHVDKFVKELLSSDAMKEYNRARVYLDENYKSQEHFTALGSFYFLHESLKNIYQFDFKAKKYRKVAGKEIYSDTLESTPMLEKEKFPQDYFPECKWSRKGFIRTRWCIADCAFDLVNIHLFHDASNLVAWETSPSVYSGIRHKALGYVLDRIIDQRFEKVSYFVFGDFNFRLDSKSVVETLCTKATMQTVRAADTNEVVKLIFRESDNDRKVMLQLEKKLFDYFNQEVFRDNNGTALLEFDKELSVFKDRLYELDISFPPSYPYSEDARQGEQYMNTRCPAWCDRILMSPSAKELVLRSESEEKVVTYDHIGPNVCMGDHKPVFLAFRIMPGAGKPHAHVHKCCVVQ

SEQ ID NO: 29971 - protein, 387 aa, Homo sapiens
  REGION 1..387: note = ENSP00000357582
MAGKAAAPGTAVLLVTANVGSLFDDPENLQKNWLREFYQVVHTHKPHFMALHCQEFGGKNYEASMSHVDKFVKELLSSDAMKEYNRARVYLDENYKSQEHFTALGSFYFLHESLKNIYQFDFKAKKYRKVAGKEIYSDTLESTPMLEKEKFPQDYFPECKWSRKGFIRTRWCIADCAFDLVNIHLFHDASNLVAWETSPSVYSGIRHKALGYVLDRIIDQRFEKVSYFVFGDFNFRLDSKSVVETLCTKATMQTVRAADTNEVVKLIFRESDNDRKVMLQLEKKLFDYFNQEVFRDNNGTALLEFDKELSVFKDRLYELDISFPPSYPYSEDARQGEQYMNTRCPAWCDRILMSPSAKELVLRVSVCCPSPGHRGMWSAGSGLAQPW

SEQ ID NO: 29972 - protein, 138 aa, Homo sapiens
  REGION 1..138: note = ENSP00000390936
VTANVGSLFDDPENLQKNWLREFYQALGSFYFLHESLKNIYQFDFKAKKYRKVAGKEIYSDTLESTPMLEKEKFPQDYFPECKWSRKGFIRTRWCIADCAFDLVNIHLFHDASNLVAWETSPSVYSGIRHKALGYVLD

SEQ ID NO: 29973 - protein, 278 aa, Homo sapiens
  REGION 1..278: note = ENSP00000340707
  VARIANT 1: note = Any amino acid
XQKNWLREFYQVVHTHKPHFMALHCQEFGGKNYEASMSHVDKFVKELLSSDAMKEYNRARVYLDENYKSQEHFTALGSFYFLHESLKNIYQFDFKAKKYRKVAGKEIYSDTLESTPMLEKEKFPQDYFPECKWSRKGFIRTRWCIADCAFDLVNIHLFHDASNLVAWETSPSVYSGIRHKALGYVLDRIIDQRFEKVSYFVFGDFNFRLDSKSVVELLEFDKELSVFKDRLYELDISFPPSYPYSEDARQGEQYMNTRCPAWCDRILMSPSAKELVLR

SEQ ID NO: 29974 - protein, 104 aa, Homo sapiens
  REGION 1..104: note = ENSP00000390749
LDISFPPSYPYSEDARQGEQYMNTRCPAWCDRILMSPSAKELVLRSESEEKVVTYDHIGPNVCMGDHKPVFLAFRIMPGAGKRCQRHERTLREPPCSRGPNTHS

SEQ ID NO: 29975 - protein, 1188 aa, Homo sapiens
  REGION 1..1188: note = ENSP00000486669
MVPCWNHGNITRSKAEELLSRTGKDGSFLVRASESISRAYALCVLYRNCVYTYRILPNEDDKFTVQASEGVSMRFFTKLDQLIEFYKKENMGLVTHLQYPVPLEEEDTGDDPEEDTESVVSPPELPPRNIPLTASSCEAKEVPFSNENPRATETSRPSLSETLFQRLQSMDTSGLPEEHLKAIQDYLSTQLAQDSEFVKTGSSSLPHLKKLTTLLCKELYGEVIRTLPSLESLQRLFDQQLSPGLRPRPQVPGEANPINMVSKLSQLTSLLSSIEDKVKALLHEGPESPHRPSLIPPVTFEVKAESLGIPQKMQLKVDVESGKLIIKKSKDGSEDKFYSHKKILQLIKSQKFLNKLVILVETEKEKILRKEYVFADSKKREGFCQLLQQMKNKHSEQPEPDMITIFIGTWNMGNAPPPKKITSWFLSKGQGKTRDDSADYIPHDIYVIGTQEDPLSEKEWLEILKHSLQEITSVTFKTVAIHTLWNIRIVVLAKPEHENRISHICTDNVKTGIANTLGNKGAVGVSFMFNGTSLGFVNSHLTSGSEKKLRRNQNYMNILRFLALGDKKLSPFNITHRFTHLFWFGDLNYRVDLPTWEAETIIQKIKQQQYADLLSHDQLLTERREQKVFLHFEEEEITFAPTYRFERLTRDKYAYTKQKATGMKYNLPSWCDRVLWKSYPLVHVVCQSYGSTSDIMTSDHSPVFATFEAGVTSQFVSKNGPGTVDSQGQIEFLRCYATLKTKSQTKFYLEFHSSCLESFVKSQEGENEEGSEGELVVKFGETLPKLKPIISDPEYLLDQHILISIKSSDSDESYGEGCIALRLEATETQLPIYTPLTHHGELTGHFQGEIKLQTSQGKTREKLYDFVKTERDESSGPKTLKSLTSHDPMKQWEVTSRAPPCSGSSITEIINPNYMGVGPFGPPMPLHVKQTLSPDQQPTAWSYDQPPKDSPLGPCRGESPPTPPGQPPISPKKFLPSTANRGLPPRTQESRPSDLGKNAGDTLPQEDLPLTKPEMFENPLYGSLSSFPKPAPRKDQESPKMPRKEPPPCPEPGILSPSIVLTKAQEADRGEGPGKQVPAPRLRSFTCSSSAEGRAAGGDKSQGKPKTPVSSQAPVPAKRPIKPSRSEINQQTPPTPTPRPPLPVKSPAVLHLQHSKGRDYRDNTELPHHGKHRPEEGPPGPLGRTAMQ

SEQ ID NO: 29976 - protein, 1189 aa, Homo sapiens
  REGION 1..1189: note = ENSP00000487191
MVPCWNHGNITRSKAEELLSRTGKDGSFLVRASESISRAYALCVLYRNCVYTYRILPNEDDKFTVQASEGVSMRFFTKLDQLIEFYKKENMGLVTHLQYPVPLEEEDTGDDPEEDTVESVVSPPELPPRNIPLTASSCEAKEVPFSNENPRATETSRPSLSETLFQRLQSMDTSGLPEEHLKAIQDYLSTQLAQDSEFVKTGSSSLPHLKKLTTLLCKELYGEVIRTLPSLESLQRLFDQQLSPGLRPRPQVPGEANPINMVSKLSQLTSLLSSIEDKVKALLHEGPESPHRPSLIPPVTFEVKAESLGIPQKMQLKVDVESGKLIIKKSKDGSEDKFYSHKKILQLIKSQKFLNKLVILVETEKEKILRKEYVFADSKKREGFCQLLQQMKNKHSEQPEPDMITIFIGTWNMGNAPPPKKITSWFLSKGQGKTRDDSADYIPHDIYVIGTQEDPLSEKEWLEILKHSLQEITSVTFKTVAIHTLWNIRIVVLAKPEHENRISHICTDNVKTGIANTLGNKGAVGVSFMFNGTSLGFVNSHLTSGSEKKLRRNQNYMNILRFLALGDKKLSPFNITHRFTHLFWFGDLNYRVDLPTWEAETIIQKIKQQQYADLLSHDQLLTERREQKVFLHFEEEEITFAPTYRFERLTRDKYAYTKQKATGMKYNLPSWCDRVLWKSYPLVHVVCQSYGSTSDIMTSDHSPVFATFEAGVTSQFVSKNGPGTVDSQGQIEFLRCYATLKTKSQTKFYLEFHSSCLESFVKSQEGENEEGSEGELVVKFGETLPKLKPIISDPEYLLDQHILISIKSSDSDESYGEGCIALRLEATETQLPIYTPLTHHGELTGHFQGEIKLQTSQGKTREKLYDFVKTERDESSGPKTLKSLTSHDPMKQWEVTSRAPPCSGSSITEIINPNYMGVGPFGPPMPLHVKQTLSPDQQPTAWSYDQPPKDSPLGPCRGESPPTPPGQPPISPKKFLPSTANRGLPPRTQESRPSDLGKNAGDTLPQEDLPLTKPEMFENPLYGSLSSFPKPAPRKDQESPKMPRKEPPPCPEPGILSPSIVLTKAQEADRGEGPGKQVPAPRLRSFTCSSSAEGRAAGGDKSQGKPKTPVSSQAPVPAKRPIKPSRSEINQQTPPTPTPRPPLPVKSPAVLHLQHSKGRDYRDNTELPHHGKHRPEEGPPGPLGRTAMQ

SEQ ID NO: 29977 - protein, 810 aa, Homo sapiens
  REGION 1..810: note = ENSP00000487535
KREGFCQLLQQMKNKHSEQPEPDMITIFIGTWNMGNAPPPKKITSWFLSKGQGKTRDDSADYIPHDIYVIGTQEDPLSEKEWLEILKHSLQEITSVTFKTVAIHTLWNIRIVVLAKPEHENRISHICTDNVKTGIANTLGNKGAVGVSFMFNGTSLGFVNSHLTSGSEKKLRRNQNYMNILRFLALGDKKLSPFNITHRFTHLFWFGDLNYRVDLPTWEAETIIQKIKQQQYADLLSHDQLLTERREQKVFLHFEEEEITFAPTYRFERLTRDKYAYTKQKATGMKYNLPSWCDRVLWKSYPLVHVVCQSYGSTSDIMTSDHSPVFATFEAGVTSQFVSKNGPGTVDSQGQIEFLRCYATLKTKSQTKFYLEFHSSCLESFVKSQEGENEEGSEGELVVKFGETLPKLKPIISDPEYLLDQHILISIKSSDSDESYGEGCIALRLEATETQLPIYTPLTHHGELTGHFQGEIKLQTSQGKTREKLYDFVKTERDESSGPKTLKSLTSHDPMKQWEVTSRAPPCSGSSITEIINPNYMGVGPFGPPMPLHVKQTLSPDQQPTAWSYDQPPKDSPLGPCRGESPPTPPGQPPISPKKFLPSTANRGLPPRTQESRPSDLGKNAGDTLPQEDLPLTKPEMFENPLYGSLSSFPKPAPRKDQESPKMPRKEPPPCPEPGILSPSIVLTKAQEADRGEGPGKQVPAPRLRSFTCSSSAEGRAAGGDKSQGKPKTPVSSQAPVPAKRPIKPSRSEINQQTPPTPTPRPPLPVKSPAVLHLQHSKGRDYRDNTELPHHGKHRPEEGPPGPLGRTAMQ

SEQ ID NO: 29978 - protein, 130 aa, Homo sapiens
  REGION 1..130: note = ENSP00000487335
KTLKSLTSHDPMKQWEVTSRAPPCSGSSITEIINPNYMGVGPFGPPMPLHVKQTLSPDQQPTAWSYDQPPKDSPLGPCRGESPPTPPGQPPISPKKFLPSTANRGLPPRTQESSEALSELPLSREPRGTA

SEQ ID NO: 29979 - protein, 43 aa, Homo sapiens
  REGION 1..43: note = ENSP00000486018
  VARIANT 1: note = Any amino acid
XTELPHHGKHRPEEGPPGPLGRTAMQVRCATRGFVCICVCVHA

SEQ ID NO: 29980 - protein, 1188 aa, Homo sapiens; identical to SEQ ID NO: 29975
  REGION 1..1188: note = ENSP00000352575

SEQ ID NO: 29981 - protein, 1189 aa, Homo sapiens; identical to SEQ ID NO: 29976
  REGION 1..1189: note = ENSP00000405338

SEQ ID NO: 29982 - protein, 810 aa, Homo sapiens; identical to SEQ ID NO: 29977
  REGION 1..810: note = ENSP00000397421

SEQ ID NO: 29983 - protein, 130 aa, Homo sapiens; identical to SEQ ID NO: 29978
  REGION 1..130: note = ENSP00000414835

SEQ ID NO: 29984 - protein, 43 aa, Homo sapiens; identical to SEQ ID NO: 29979
  REGION 1..43: note = ENSP00000473280
  VARIANT 1: note = Any amino acid

SEQ ID NO: 29985 - protein, 579 aa, Homo sapiens
  REGION 1..579: note = ENSP00000368872
MRRPPGNGEAASEGPGGWGLWGVQESRRLCCAGHDRCKQALLQIGINMMALPGGRHLDSVTLPGQRLHLMQVDSVQRWMEDLKLMTECECMCVLQAKPISLEEDAQGDLILAGGPGPGDPLQLLLKRGWVISTELRRIGQKLAQDRWARVHSMSVRLTCHARSMVSEYSAVSRNSLKEMGEIEKLLMEKCSELSAVTERCLQVENEHVLKSMKACVSETLSMLGQHFGQLLELALTREVQALVRKIDASDNIYTTESTTGNLFSLTQEGAPLCRIIAKEGGVVALFKVCRQDSFRCLYPQALRTLASICCVEEGVHQLEKVDGVLCLADILTDNSHSEATRAEAAAVVAQVTSPHLPVTQHLSSFLESMEEIVTALVKLCQEASSGEVFLLASAALANITFFDTMACEMLLQLNAIRVLLEACSDKQRVDTPYTRDQIVTILANMSVLEQCASDIIQENGVQLIMGMLSEKPRSGTPAEVAACERVQQKAAVTLARLSRDPDVAREAVRLSCMSRLIELCRSPSERNSSDAVLVACLAALRRLAGVCPEGLQDSDFQQLVQPRLVDSFLLCSNMEESFV

SEQ ID NO: 29986 - protein, 532 aa, Homo sapiens
  REGION 1..532: note = ENSP00000368874
MMALPGGRHLDSVTLPGQRLHLMQVDSVQRWMEDLKLMTECECMCVLQAKPISLEEDAQGDLILAGGPGPGDPLQLLLKRGWVISTELRRIGQKLAQDRWARVHSMSVRLTCHARSMVSEYSAVSRNSLKEMGEIEKLLMEKCSELSAVTERCLQVENEHVLKSMKACVSETLSMLGQHFGQLLELALTREVQALVRKIDASDNIYTTESTTGNLFSLTQEGAPLCRIIAKEGGVVALFKVCRQDSFRCLYPQALRTLASICCVEEGVHQLEKVDGVLCLADILTDNSHSEATRAEAAAVVAQVTSPHLPVTQHLSSFLESMEEIVTALVKLCQEASSGEVFLLASAALANITFFDTMACEMLLQLNAIRVLLEACSDKQRVDTPYTRDQIVTILANMSVLEQCASDIIQENGVQLIMGMLSEKPRSGTPAEVAACERVQQKAAVTLARLSRDPDVAREAVRLSCMSRLIELCRSPSERNSSDAVLVACLAALRRLAGVCPEGLQDSDFQQLVQPRLVDSFLLCSNMEESFV

SEQ ID NO: 29987 - protein, 520 aa, Homo sapiens
  REGION 1..520: note = ENSP00000435022
MMALPGGRHLDSVTLPGQRLHLMQVDSVQRWMEDLKLMTECECMCVLQAKPISLEEDAQGDLILAGGPGPGDPLQLLLKRGWVISTELRRIGQKLAQDRWARVHSMSVRLTCHARSMVSEYSAVSRNSLKEMGEIEKLLMEKCSELSAVTERCLQVENEHVLKSMKACVSETLSMLGQHFGQLLELALTREVQALVRKIDASDNIYTTESTTGNLFSLTQEGAPLCRIIAKEGGVVALFKVCRQDSFRCLYPQALRTLASICCVEEGVHQLEKVDGVLCLADILTDNSHSEATRAEAAAVVAQVTSPHLPVTQHLSSFLESMEEIVTALVKLCQEASSGEVFLLASAALANITFFDTMACEMLLQLNAIRVLLEACSDKQRVDTPYTRDQIVTILANMSVLEQCASDIIQENGVQLIMGMLSEKPRSGTPAEVAACERVQQKAAVTLARLSRDPDVAREAVRLSCMSRLIELCRSPSERNSSDAVLVACLAMGIQLQVKKTNISALLLWFLFWHIQGCSA

SEQ ID NO: 29988 - protein, 532 aa, Homo sapiens; identical to SEQ ID NO: 29986
  REGION 1..532: note = ENSP00000436194

SEQ ID NO: 29989 - protein, 490 aa, Homo sapiens
  REGION 1..490: note = ENSP00000436113
MMALPGGRHLDSVTLPGQRLHLMQVDSVQRWMEDLKLMTECECMCVLQAKPISLEEDAQGDLILAGGPGPGDPLQLLLKRGWVISTELRRIGQKLAQDRWARVHSMSVRLTCHARSMVSEYSAVSRNSLKEMGEIEKLLMEKCSELSAVTERCLQVENEHVLKSMKACVSETLSMLGQHFGQLLELALTREVQALVRKIDASDNIYTTESTTGNLFSLTQEGAPLCRIIAKVDGVLCLADILTDNSHSEATRAEAAAVVAQVTSPHLPVTQHLSSFLESMEEIVTALVKLCQEASSGEVFLLASAALANITFFDTMACEMLLQLNAIRVLLEACSDKQRVDTPYTRDQIVTILANMSVLEQCASDIIQENGVQLIMGMLSEKPRSGTPAEVAACERVQQKAAVTLARLSRDPDVAREAVRLSCMSRLIELCRSPSERNSSDAVLVACLAALRRLAGVCPEGLQDSDFQQLVQPRLVDSFLLCSNMEESFV

SEQ ID NO: 29990 - protein, 566 aa, Homo sapiens
  REGION 1..566: note = ENSP00000389161
MALPGGRHLDSVTLPGQRLHLMQVDSVQRWMEDLKLMTECECMCVLQAKPISLEEDAQGDLILAGGPGPGDPLQLLLKRGWVISTELRRIGQKLAQDRWARVHSMSVRLTCHARSMVSEYSAVSRNSLKEMGEIEKLLMEKCSELSAVTERCLQVENEHVLKSMKACVSETLSMLGQHFGQLLELALTREVQVESHSVTRLECSGAISAQCNLRLLGSSDSPASASQALVRKIDASDNIYTTESTTGNLFSLTQEGAPLCRIIAKEGGVVALFKVCRQDSFRCLYPQALRTLASICCVEEGVHQLEKVDGVLCLADILTDNSHSEATRAEAAAVVAQVTSPHLPVTQHLSSFLESMEEIVTALVKLCQEASSGEVFLLASAALANITFFDTMACEMLLQLNAIRVLLEACSDKQRVDTPYTRDQIVTILANMSVLEQCASDIIQENGVQLIMGMLSEKPRSGTPAEVAACERVQQKAAVTLARLSRDPDVAREAVRLSCMSRLIELCRSPSERNSSDAVLVACLAALRRLAGVCPEGLQDSDFQQLVQPRLVDSFLLCSNMEESFV

SEQ ID NO: 29991 - protein, 277 aa, Homo sapiens
  REGION 1..277: note = ENSP00000344741
MPRLHDHFWSCSCAHSARRRGPPRASAAGLAAKVGEMINVSVSGPSLLAAHGAPDADPAPRGRSAAMSGPEPGSPYPNTWHHRLLQRSLVLFSVGVVLALVLNLLQIQRNVTLFPEEVIATIFSSAWWVPPCCGTAAAVVGLLYPCIDSHLGEPHKFKREWASVMRCIAVFVGINHASAKLDFANNVQLSLTLAALSLGLWWTFDRSRSGLGLGITIAFLATLITQFLVYNGVYQYTSPDFLYIRSWLPCIFFSGGVTVGNIGRQLAMGVPEKPHSD

SEQ ID NO: 29992 - protein, 123 aa, Homo sapiens
  REGION 1..123: note = ENSP00000414691
MPRLHDHFWSCSCAHSARRRGPPRASAAGLAAKVGEMINVSVSGPSLLAAHGAPDADPAPRGRSAAMSGPEPGSPYPNTWHHRLLQRSLVLFSVGVVLALVLNLLQIQRNVTLFPEEVIATIF

SEQ ID NO: 29993 - protein, 164 aa, Homo sapiens
  REGION 1..164: note = ENSP00000344035
MPRLHDHFWSCSCAHSARRRGPPRASAAGLAAKVGEMINVSVSGPSLLAAHGAPDADPAPRGRSAAMSGPEPGSPYPNTWHHRLLQRSLVLFSVGVVLALVLNLLQIQRNVTLFPEEVIATIFSSAWWVPPCCGTAAGIHPQISSIFVLGSLVYFSQEASRWGT

SEQ ID NO: 29994 - protein, 239 aa, Homo sapiens
  REGION 1..239: note = ENSP00000420198
  VARIANT 1: note = Any amino acid
XSVGVVLALVLNLLQIQRNVTLFPEEVIATIFSSAWWVPPCCGTAAAVVGLLYPCIDSHLGEPHKFKREWASVMRCIAVFVGINHASAKLDFANNVQLSLTLAALSLGLWWTFDRSRSGLGLGITIAFLATLITQFLVYNGVYQYTSPDFLYIRSWLPCIFFSGGVTVGNIGRQLAMLIPFCEELNLKTTWLFHKTRSNYRVFLKSPIVIESSKPPILRARKILEENLTVDYDKDYLFS

SEQ ID NO: 29995 - protein, 178 aa, Homo sapiens
  REGION 1..178: note = ENSP00000340010
MPRLHDHFWSCSCAHSARRRGPPRASAKLDFANNVQLSLTLAALSLGLWWTFDRSRSGLGLGITIAFLATLITQFLVYNGVYQYTSPDFLYIRSWLPCIFFSGGVTVGNIGRQLAMLIPFCEELNLKTTWLFHKTRSNYRVFLKSPIVIESSKPPILRARKILEENLTVDYDKDYLFS

SEQ ID NO: 29996 - protein, 437 aa, Homo sapiens
  REGION 1..437: note = ENSP00000265198
MTSYMAIDGSALVPLRQKPRRKTQGFLTMSRRRISCKDLGHADCQGWLYKKKEKGSFLSNKWKKFWVILKGSSLYWYSNQMAEKADGFVNLPDFTVERASECKKKHAFKISHPQIKTFYFAAENVQEMNVWLNKLGSAVIHQESTTKDEECYSESEQEDPEIAAETPPPPHASQTQSLTAQQASSSSPSLSGTSYSFSSLENTVKTPSSFPSSLSKERQSLPDTVNSLSAAEDEGQPITFAVQVHSPVPSEAGIHKALENSFVTSESGFLNSLSSDDTSSLSSNHDHLTVPDKPAGSKIMDKEETKVSEDDEMEKLYKSLEQASLSPLGDRRPSTKKELRKSFVKRCKNPSINEKLHKIRTLNSTLKCKEHDLAMINQLLDDPKLTARKYREWKVMNTLLIQDIYQQQRASPAPDDTDDTPQELKKSPSSPSVENSI

SEQ ID NO: 29997 - protein, 438 aa, Homo sapiens
  REGION 1..438: note = ENSP00000394751
MTSYMAIDGSALQVPLRQKPRRKTQGFLTMSRRRISCKDLGHADCQGWLYKKKEKGSFLSNKWKKFWVILKGSSLYWYSNQMAEKADGFVNLPDFTVERASECKKKHAFKISHPQIKTFYFAAENVQEMNVWLNKLGSAVIHQESTTKDEECYSESEQEDPEIAAETPPPPHASQTQSLTAQQASSSSPSLSGTSYSFSSLENTVKTPSSFPSSLSKERQSLPDTVNSLSAAEDEGQPITFAVQVHSPVPSEAGIHKALENSFVTSESGFLNSLSSDDTSSLSSNHDHLTVPDKPAGSKIMDKEETKVSEDDEMEKLYKSLEQASLSPLGDRRPSTKKELRKSFVKRCKNPSINEKLHKIRTLNSTLKCKEHDLAMINQLLDDPKLTARKYREWKVMNTLLIQDIYQQQRASPAPDDTDDTPQELKKSPSSPSVENSI

SEQ ID NO: 29998 - protein, 438 aa, Homo sapiens; identical to SEQ ID NO: 29997
  REGION 1..438: note = ENSP00000356189

SEQ ID NO: 29999 - protein, 409 aa, Homo sapiens
  REGION 1..409: note = ENSP00000430287
MSRRRISCKDLGHADCQGWLYKKKEKGSFLSNKWKKFWVILKGSSLYWYSNQMAEKADGFVNLPDFTVERASECKKKHAFKISHPQIKTFYFAAENVQEMNVWLNKLGSAVIHQESTTKDEECYSESEQEDPEIAAETPPPPHASQTQSLTAQQASSSSPSLSGTSYSFSSLENTVKTPSSFPSSLSKERQSLPDTVNSLSAAEDEGQPITFAVQVHSPVPSEAGIHKALENSFVTSESGFLNSLSSDDTSSLSSNHDHLTVPDKPAGSKIMDKEETKVSEDDEMEKLYKSLEQASLSPLGDRRPSTKKELRKSFVKRCKNPSINEKLHKIRTLNSTLKCKEHDLAMINQLLDDPKLTARKYREWKVMNTLLIQDIYQQQRASPAPDDTDDTPQELKKSPSSPSVENSI

SEQ ID NO: 30000 - protein, 157 aa, Homo sapiens
  REGION 1..157: note = ENSP00000431092
MSRRRISCKDLGHADCQGWLYKKKEKGSFLSNKWKKFWVILKGSSLYWYSNQMAEKADGFVNLPDFTVERASECKKKHAFKISHPQIKTFYFAAENVQEMNVWLNKLGSAVIHQESTTKDEECYSESEQEDPEIAAETPPPPHASQTQSLTAQQASS

SEQ ID NO: 30001 - protein, 128 aa, Homo sapiens
  REGION 1..128: note = ENSP00000428767
MSRRRISCKDLGHADCQGWLYKKKEKGSFLSNKWKKFWVILKGSSLYWYSNQMAEKADGFVNLPDFTVERASECKKKHAFKISHPQIKTFYFAAENVQEMNVWLNKLGSAVIHQESTTKDEECYSESE

SEQ ID NO: 30002 - protein, 108 aa, Homo sapiens
  REGION 1..108: note = ENSP00000429972
MSRRRISCKDLGHADCQGWLYKKKEKGSFLSNKWKKFWVILKGSSLYWYSNQMAEKADGFVNLPDFTVERASECKKKHAFKISHPQIKTFYFAAENVQEMNVWLNKLG

SEQ ID NO: 30003 - protein, 78 aa, Homo sapiens
  REGION 1..78: note = ENSP00000431004
MTSYMAIDGSALVPLRQKPRRKTQGFLTMSRRRISCKDLGHADCQGWLYKKKEKGSFLSNKWKKFWVILKGSSLYWYS

SEQ ID NO: 30004 - protein, 2710 aa, Homo sapiens
  REGION 1..2710: note = ENSP00000349597
MSDKMSSFLHIGDICSLYAEGSTNGFISTLGLVDDRCVVQPETGDLNNPPKKFRDCLFKLCPMNRYSAQKQFWKAAKPGANSTTDAVLLNKLHHAADLEKKQNETENRKLLGTVIQYGNVIQLLHLKSNKYLTVNKRLPALLEKNAMRVTLDEAGNEGSWFYIQPFYKLRSIGDSVVIGDKVVLNPVNAGQPLHASSHQLVDNPGCNEVNSVNCNTSWKIVLFMKWSDNKDDILKGGDVVRLFHAEQEKFLTCDEHRKKQHVFLRTTGRQSATSATSSKALWEVEVVQHDPCRGGAGYWNSLFRFKHLATGHYLAAEVDPDFEEECLEFQPSVDPDQDASRSRLRNAQEKMVYSLVSVPEGNDISSIFELDPTTLRGGDSLVPRNSYVRLRHLCTNTWVHSTNIPIDKEEEKPVMLKIGTSPVKEDKEAFAIVPVSPAEVRDLDFANDASKVLGSIAGKLEKGTITQNERRSVTKLLEDLVYFVTGGTNSGQDVLEVVFSKPNRERQKLMREQNILKQIFKLLQAPFTDCGDGPMLRLEELGDQRHAPFRHICRLCYRVLRHSQQDYRKNQEYIAKQFGFMQKQIGYDVLAEDTITALLHNNRKLLEKHITAAEIDTFVSLVRKNREPRFLDYLSDLCVSMNKSIPVTQELICKAVLNPTNADILIETKLVLSRFEFEGVSSTGENALEAGEDEEEVWLFWRDSNKEIRSKSVRELAQDAKEGQKEDRDVLSYYRYQLNLFARMCLDRQYLAINEISGQLDVDLILRCMSDENLPYDLRASFCRLMLHMHVDRDPQEQVTPVKYARLWSEIPSEIAIDDYDSSGASKDEIKERFAQTMEFVEEYLRDVVCQRFPFSDKEKNKLTFEVVNLARNLIYFGFYNFSDLLRLTKILLAILDCVHVTTIFPISKMAKGEENKGSNVMRSIHGVGELMTQVVLRGGGFLPMTPMAAAPEGNVKQAEPEKEDIMVMDTKLKIIEILQFILNVRLDYRISCLLCIFKREFDESNSQTSETSSGNSSQEGPSNVPGALDFEHIEEQAEGIFGGSEENTPLDLDDHGGRTFLRVLLHLTMHDYPPLVSGALQLLFRHFSQRQEVLQAFKQVQLLVTSQDVDNYKQIKQDLDQLRSIVEKSELWVYKGQGPDETMDGASGENEHKKTEEGNNKPQKHESTSSYNYRVVKEILIRLSKLCVQESASVRKSRKQQQRLLRNMGAHAVVLELLQIPYEKAEDTKMQEIMRLAHEFLQNFCAGNQQNQALLHKHINLFLNPGILEAVTMQHIFMNNFQLCSEINERVVQHFVHCIETHGRNVQYIKFLQTIVKAEGKFIKKCQDMVMAELVNSGEDVLVFYNDRASFQTLIQMMRSERDRMDENSPLMYHIHLVELLAVCTEGKNVYTEIKCNSLLPLDDIVRVVTHEDCIPEVKIAYINFLNHCYVDTEVEMKEIYTSNHMWKLFENFLVDICRACNNTSDRKHADSILEKYVTEIVMSIVTTFFSSPFSDQSTTLQTRQPVFVQLLQGVFRVYHCNWLMPSQKASVESCIRVLSDVAKSRAIAIPVDLDSQVNNLFLKSHSIVQKTAMNWRLSARNAARRDSVLAASRDYRNIIERLQDIVSALEDRLRPLVQAELSVLVDVLHRPELLFPENTDARRKCESGGFICKLIKHTKQLLEENEEKLCIKVLQTLREMMTKDRGYGEKGEALRQVLVNRYYGNVRPSGRRESLTSFGNGPLSAGGPGKPGGGGGGSGSSSMSRGEMSLAEVQCHLDKEGASNLVIDLIMNASSDRVFHESILLAIALLEGGNTTIQHSFFCRLTEDKKSEKFFKVFYDRMKVAQQEIKATVTVNTSDLGNKKKDDEVDRDAPSRKKAKEPTTQITEEVRDQLLEASAATRKAFTTFRREADPDDHYQPGEGTQATADKAKDDLEMSAVITIMQPILRFLQLLCENHNRDLQNFLRCQNNKTNYNLVCETLQFLDCICGSTTGGLGLLGLYINEKNVALINQTLESLTEYCQGPCHENQNCIATHESNGIDIITALILNDINPLGKKRMDLVLELKNNASKLLLAIMESRHDSENAERILYNMRPKELVEVIKKAYMQGEVEFEDGENGEDGAASPRNVGHNIYILAHQLARHNKELQSMLKPGGQVDGDEALEFYAKHTAQIEIVRLDRTMEQIVFPVPSICEFLTKESKLRIYYTTERDEQGSKINDFFLRSEDLFNEMNWQKKLRAQPVLYWCARNMSFWSSISFNLAVLMNLLVAFFYPFKGVRGGTLEPHWSGLLWTAMLISLAIVIALPKPHGIRALIASTILRLIFSVGLQPTLFLLGAFNVCNKIIFLMSFVGNCGTFTRGYRAMVLDVEFLYHLLYLVICAMGLFVHEFFYSLLLFDLVYREETLLNVIKSVTRNGRSIILTAVLALILVYLFSIVGYLFFKDDFILEVDRLPNETAVPETGESLASEFLFSDVCRVESGENCSSPAPREELVPAEETEQDKEHTCETLLMCIVTVLSHGLRSGGGVGDVLRKPSKEEPLFAARVIYDLLFFFMVIIIVLNLIFGVIIDTFADLRSEKQKKEEILKTTCFICGLERDKFDNKTVTFEEHIKEEHNMWHYLCFIVLVKVKDSTEYTGPESYVAEMIKERNLDWFPRMRAMSLVSSDSEGEQNELRNLQEKLESTMKLVTNLSGQLSELKDQMTEQRKQKQRIGLLGHPPHMNVNPQQPA

SEQ ID NO: 30005 - protein, 2695 aa, Homo sapiens
  REGION 1..2695: note = ENSP00000397885
MSDKMSSFLHIGDICSLYAEGSTNGFISTLGLVDDRCVVQPETGDLNNPPKKFRDCLFKLCPMNRYSAQKQFWKAAKPGANSTTDAVLLNKLHHAADLEKKQNETENRKLLGTVIQYGNVIQLLHLKSNKYLTVNKRLPALLEKNAMRVTLDEAGNEGSWFYIQPFYKLRSIGDSVVIGDKVVLNPVNAGQPLHASSHQLVDNPGCNEVNSVNCNTSWKIVLFMKWSDNKDDILKGGDVVRLFHAEQEKFLTCDEHRKKQHVFLRTTGRQSATSATSSKALWEVEVVQHDPCRGGAGYWNSLFRFKHLATGHYLAAEVDPDQDASRSRLRNAQEKMVYSLVSVPEGNDISSIFELDPTTLRGGDSLVPRNSYVRLRHLCTNTWVHSTNIPIDKEEEKPVMLKIGTSPVKEDKEAFAIVPVSPAEVRDLDFANDASKVLGSIAGKLEKGTITQNERRSVTKLLEDLVYFVTGGTNSGQDVLEVVFSKPNRERQKLMREQNILKQIFKLLQAPFTDCGDGPMLRLEELGDQRHAPFRHICRLCYRVLRHSQQDYRKNQEYIAKQFGFMQKQIGYDVLAEDTITALLHNNRKLLEKHITAAEIDTFVSLVRKNREPRFLDYLSDLCVSMNKSIPVTQELICKAVLNPTNADILIETKLVLSRFEFEGVSSTGENALEAGEDEEEVWLFWRDSNKEIRSKSVRELAQDAKEGQKEDRDVLSYYRYQLNLFARMCLDRQYLAINEISGQLDVDLILRCMSDENLPYDLRASFCRLMLHMHVDRDPQEQVTPVKYARLWSEIPSEIAIDDYDSSGASKDEIKERFAQTMEFVEEYLRDVVCQRFPFSDKEKNKLTFEVVNLARNLIYFGFYNFSDLLRLTKILLAILDCVHVTTIFPISKMAKGEENKGSNVMRSIHGVGELMTQVVLRGGGFLPMTPMAAAPEGNVKQAEPEKEDIMVMDTKLKIIEILQFILNVRLDYRISCLLCIFKREFDESNSQTSETSSGNSSQEGPSNVPGALDFEHIEEQAEGIFGGSEENTPLDLDDHGGRTFLRVLLHLTMHDYPPLVSGALQLLFRHFSQRQEVLQAFKQVQLLVTSQDVDNYKQIKQDLDQLRSIVEKSELWVYKGQGPDETMDGASGENEHKKTEEGNNKPQKHESTSSYNYRVVKEILIRLSKLCVQESASVRKSRKQQQRLLRNMGAHAVVLELLQIPYEKAEDTKMQEIMRLAHEFLQNFCAGNQQNQALLHKHINLFLNPGILEAVTMQHIFMNNFQLCSEINERVVQHFVHCIETHGRNVQYIKFLQTIVKAEGKFIKKCQDMVMAELVNSGEDVLVFYNDRASFQTLIQMMRSERDRMDENSPLMYHIHLVELLAVCTEGKNVYTEIKCNSLLPLDDIVRVVTHEDCIPEVKIAYINFLNHCYVDTEVEMKEIYTSNHMWKLFENFLVDICRACNNTSDRKHADSILEKYVTEIVMSIVTTFFSSPFSDQSTTLQTRQPVFVQLLQGVFRVYHCNWLMPSQKASVESCIRVLSDVAKSRAIAIPVDLDSQVNNLFLKSHSIVQKTAMNWRLSARNAARRDSVLAASRDYRNIIERLQDIVSALEDRLRPLVQAELSVLVDVLHRPELLFPENTDARRKCESGGFICKLIKHTKQLLEENEEKLCIKVLQTLREMMTKDRGYGEKGEALRQVLVNRYYGNVRPSGRRESLTSFGNGPLSAGGPGKPGGGGGGSGSSSMSRGEMSLAEVQCHLDKEGASNLVIDLIMNASSDRVFHESILLAIALLEGGNTTIQHSFFCRLTEDKKSEKFFKVFYDRMKVAQQEIKATVTVNTSDLGNKKKDDEVDRDAPSRKKAKEPTTQITEEVRDQLLEASAATRKAFTTFRREADPDDHYQPGEGTQATADKAKDDLEMSAVITIMQPILRFLQLLCENHNRDLQNFLRCQNNKTNYNLVCETLQFLDCICGSTTGGLGLLGLYINEKNVALINQTLESLTEYCQGPCHENQNCIATHESNGIDIITALILNDINPLGKKRMDLVLELKNNASKLLLAIMESRHDSENAERILYNMRPKELVEVIKKAYMQGEVEFEDGENGEDGAASPRNVGHNIYILAHQLARHNKELQSMLKPGGQVDGDEALEFYAKHTAQIEIVRLDRTMEQIVFPVPSICEFLTKESKLRIYYTTERDEQGSKINDFFLRSEDLFNEMNWQKKLRAQPVLYWCARNMSFWSSISFNLAVLMNLLVAFFYPFKGVRGGTLEPHWSGLLWTAMLISLAIVIALPKPHGIRALIASTILRLIFSVGLQPTLFLLGAFNVCNKIIFLMSFVGNCGTFTRGYRAMVLDVEFLYHLLYLVICAMGLFVHEFFYSLLLFDLVYREETLLNVIKSVTRNGRSIILTAVLALILVYLFSIVGYLFFKDDFILEVDRLPNETAVPETGESLASEFLFSDVCRVESGENCSSPAPREELVPAEETEQDKEHTCETLLMCIVTVLSHGLRSGGGVGDVLRKPSKEEPLFAARVIYDLLFFFMVIIIVLNLIFGVIIDTFADLRSEKQKKEEILKTTCFICGLERDKFDNKTVTFEEHIKEEHNMWHYLCFIVLVKVKDSTEYTGPESYVAEMIKERNLDWFPRMRAMSLVSSDSEGEQNELRNLQEKLESTMKLVTNLSGQLSELKDQMTEQRKQKQRIGLLGHPPHMNVNPQQPA

SEQ ID NO: 30006 - protein, 2743 aa, Homo sapiens
  REGION 1..2743: note = ENSP00000401671
MSDKMSSFLHIGDICSLYAEGSTNGFISTLGLVDDRCVVQPETGDLNNPPKKFRDCLFKLCPMNRYSAQKQFWKAAKPGANSTTDAVLLNKLHHAADLEKKQNETENRKLLGTVIQYGNVIQLLHLKSNKYLTVNKRLPALLEKNAMRVTLDEAGNEGSWFYIQPFYKLRSIGDSVVIGDKVVLNPVNAGQPLHASSHQLVDNPGCNEVNSVNCNTSWKIVLFMKWSDNKDDILKGGDVVRLFHAEQEKFLTCDEHRKKQHVFLRTTGRQSATSATSSKALWEVEVVQHDPCRGGAGYWNSLFRFKHLATGHYLAAEVDPDQDASRSRLRNAQEKMVYSLVSVPEGNDISSIFELDPTTLRGGDSLVPRNSYVRLRHLCTNTWVHSTNIPIDKEEEKPVMLKIGTSPVKEDKEAFAIVPVSPAEVRDLDFANDASKVLGSIAGKLEKGTITQNERRSVTKLLEDLVYFVTGGTNSGQDVLEVVFSKPNRERQKLMREQNILKQIFKLLQAPFTDCGDGPMLRLEELGDQRHAPFRHICRLCYRVLRHSQQDYRKNQEYIAKQFGFMQKQIGYDVLAEDTITALLHNNRKLLEKHITAAEIDTFVSLVRKNREPRFLDYLSDLCVSMNKSIPVTQELICKAVLNPTNADILIETKLVLSRFEFEGVSSTGENALEAGEDEEEVWLFWRDSNKEIRSKSVRELAQDAKEGQKEDRDVLSYYRYQLNLFARMCLDRQYLAINEISGQLDVDLILRCMSDENLPYDLRASFCRLMLHMHVDRDPQEQVTPVKYARLWSEIPSEIAIDDYDSSGASKDEIKERFAQTMEFVEEYLRDVVCQRFPFSDKEKNKLTFEVVNLARNLIYFGFYNFSDLLRLTKILLAILDCVHVTTIFPISKMAKGEENKGNNDVEKLKSSNVMRSIHGVGELMTQVVLRGGGFLPMTPMAAAPEGNVKQAEPEKEDIMVMDTKLKIIEILQFILNVRLDYRISCLLCIFKREFDESNSQTSETSSGNSSQEGPSNVPGALDFEHIEEQAEGIFGGSEENTPLDLDDHGGRTFLRVLLHLTMHDYPPLVSGALQLLFRHFSQRQEVLQAFKQVQLLVTSQDVDNYKQIKQDLDQLRSIVEKSELWVYKGQGPDETMDGASGENEHKKTEEGNNKPQKHESTSSYNYRVVKEILIRLSKLCVQESASVRKSRKQQQRLLRNMGAHAVVLELLQIPYEKAEDTKMQEIMRLAHEFLQNFCAGNQQNQALLHKHINLFLNPGILEAVTMQHIFMNNFQLCSEINERVVQHFVHCIETHGRNVQYIKFLQTIVKAEGKFIKKCQDMVMAELVNSGEDVLVFYNDRASFQTLIQMMRSERDRMDENSPLMYHIHLVELLAVCTEGKNVYTEIKCNSLLPLDDIVRVVTHEDCIPEVKIAYINFLNHCYVDTEVEMKEIYTSNHMWKLFENFLVDICRACNNTSDRKHADSILEKYVTEIVMSIVTTFFSSPFSDQSTTLQTRQPVFVQLLQGVFRVYHCNWLMPSQKASVESCIRVLSDVAKSRAIAIPVDLDSQVNNLFLKSHSIVQKTAMNWRLSARNAARRDSVLAASRDYRNIIERLQDIVSALEDRLRPLVQAELSVLVDVLHRPELLFPENTDARRKCESGGFICKLIKHTKQLLEENEEKLCIKVLQTLREMMTKDRGYGEKLISIDELDNAELPPAPDSENATEELEPSPPLRQLEDHKRGEALRQVLVNRYYGNVRPSGRRESLTSFGNGPLSAGGPGKPGGGGGGSGSSSMSRGEMSLAEVQCHLDKEGASNLVIDLIMNASSDRVFHESILLAIALLEGGNTTIQHSFFCRLTEDKKSEKFFKVFYDRMKVAQQEIKATVTVNTSDLGNKKKDDEVDRDAPSRKKAKEPTTQITEEVRDQLLEASAATRKAFTTFRREADPDDHYQPGEGTQATADKAKDDLEMSAVITIMQPILRFLQLLCENHNRDLQNFLRCQNNKTNYNLVCETLQFLDCICGSTTGGLGLLGLYINEKNVALINQTLESLTEYCQGPCHENQNCIATHESNGIDIITALILNDINPLGKKRMDLVLELKNNASKLLLAIMESRHDSENAERILYNMRPKELVEVIKKAYMQGEVEFEDGENGEDGAASPRNVGHNIYILAHQLARHNKELQSMLKPGGQVDGDEALEFYAKHTAQIEIVRLDRTMEQIVFPVPSICEFLTKESKLRIYYTTERDEQGSKINDFFLRSEDLFNEMNWQKKLRAQPVLYWCARNMSFWSSISFNLAVLMNLLVAFFYPFKGVRGGTLEPHWSGLLWTAMLISLAIVIALPKPHGIRALIASTILRLIFSVGLQPTLFLLGAFNVCNKIIFLMSFVGNCGTFTRGYRAMVLDVEFLYHLLYLVICAMGLFVHEFFYSLLLFDLVYREETLLNVIKSVTRNGRSIILTAVLALILVYLFSIVGYLFFKDDFILEVDRLPNETAVPETGESLASEFLFSDVCRVESGENCSSPAPREELVPAEETEQDKEHTCETLLMCIVTVLSHGLRSGGGVGDVLRKPSKEEPLFAARVIYDLLFFFMVIIIVLNLIFGVIIDTFADLRSEKQKKEEILKTTCFICGLERDKFDNKTVTFEEHIKEEHNMWHYLCFIVLVKVKDSTEYTGPESYVAEMIKERNLDWFPRMRAMSLVSSDSEGEQNELRNLQEKLESTMKLVTNLSGQLSELKDQMTEQRKQKQRIGLLGHPPHMNVNPQQPA

SEQ ID NO: 30007 - protein, 2743 aa, Homo sapiens; identical to SEQ ID NO: 30006
  REGION 1..2743: note = ENSP00000306253

SEQ ID NO: 30008 - protein, 2758 aa, Homo sapiens
  REGION 1..2758: note = ENSP00000346595
MSDKMSSFLHIGDICSLYAEGSTNGFISTLGLVDDRCVVQPETGDLNNPPKKFRDCLFKLCPMNRYSAQKQFWKAAKPGANSTTDAVLLNKLHHAADLEKKQNETENRKLLGTVIQYGNVIQLLHLKSNKYLTVNKRLPALLEKNAMRVTLDEAGNEGSWFYIQPFYKLRSIGDSVVIGDKVVLNPVNAGQPLHASSHQLVDNPGCNEVNSVNCNTSWKIVLFMKWSDNKDDILKGGDVVRLFHAEQEKFLTCDEHRKKQHVFLRTTGRQSATSATSSKALWEVEVVQHDPCRGGAGYWNSLFRFKHLATGHYLAAEVDPDFEEECLEFQPSVDPDQDASRSRLRNAQEKMVYSLVSVPEGNDISSIFELDPTTLRGGDSLVPRNSYVRLRHLCTNTWVHSTNIPIDKEEEKPVMLKIGTSPVKEDKEAFAIVPVSPAEVRDLDFANDASKVLGSIAGKLEKGTITQNERRSVTKLLEDLVYFVTGGTNSGQDVLEVVFSKPNRERQKLMREQNILKQIFKLLQAPFTDCGDGPMLRLEELGDQRHAPFRHICRLCYRVLRHSQQDYRKNQEYIAKQFGFMQKQIGYDVLAEDTITALLHNNRKLLEKHITAAEIDTFVSLVRKNREPRFLDYLSDLCVSMNKSIPVTQELICKAVLNPTNADILIETKLVLSRFEFEGVSSTGENALEAGEDEEEVWLFWRDSNKEIRSKSVRELAQDAKEGQKEDRDVLSYYRYQLNLFARMCLDRQYLAINEISGQLDVDLILRCMSDENLPYDLRASFCRLMLHMHVDRDPQEQVTPVKYARLWSEIPSEIAIDDYDSSGASKDEIKERFAQTMEFVEEYLRDVVCQRFPFSDKEKNKLTFEVVNLARNLIYFGFYNFSDLLRLTKILLAILDCVHVTTIFPISKMAKGEENKGNNDVEKLKSSNVMRSIHGVGELMTQVVLRGGGFLPMTPMAAAPEGNVKQAEPEKEDIMVMDTKLKIIEILQFILNVRLDYRISCLLCIFKREFDESNSQTSETSSGNSSQEGPSNVPGALDFEHIEEQAEGIFGGSEENTPLDLDDHGGRTFLRVLLHLTMHDYPPLVSGALQLLFRHFSQRQEVLQAFKQVQLLVTSQDVDNYKQIKQDLDQLRSIVEKSELWVYKGQGPDETMDGASGENEHKKTEEGNNKPQKHESTSSYNYRVVKEILIRLSKLCVQESASVRKSRKQQQRLLRNMGAHAVVLELLQIPYEKAEDTKMQEIMRLAHEFLQNFCAGNQQNQALLHKHINLFLNPGILEAVTMQHIFMNNFQLCSEINERVVQHFVHCIETHGRNVQYIKFLQTIVKAEGKFIKKCQDMVMAELVNSGEDVLVFYNDRASFQTLIQMMRSERDRMDENSPLMYHIHLVELLAVCTEGKNVYTEIKCNSLLPLDDIVRVVTHEDCIPEVKIAYINFLNHCYVDTEVEMKEIYTSNHMWKLFENFLVDICRACNNTSDRKHADSILEKYVTEIVMSIVTTFFSSPFSDQSTTLQTRQPVFVQLLQGVFRVYHCNWLMPSQKASVESCIRVLSDVAKSRAIAIPVDLDSQVNNLFLKSHSIVQKTAMNWRLSARNAARRDSVLAASRDYRNIIERLQDIVSALEDRLRPLVQAELSVLVDVLHRPELLFPENTDARRKCESGGFICKLIKHTKQLLEENEEKLCIKVLQTLREMMTKDRGYGEKLISIDELDNAELPPAPDSENATEELEPSPPLRQLEDHKRGEALRQVLVNRYYGNVRPSGRRESLTSFGNGPLSAGGPGKPGGGGGGSGSSSMSRGEMSLAEVQCHLDKEGASNLVIDLIMNASSDRVFHESILLAIALLEGGNTTIQHSFFCRLTEDKKSEKFFKVFYDRMKVAQQEIKATVTVNTSDLGNKKKDDEVDRDAPSRKKAKEPTTQITEEVRDQLLEASAATRKAFTTFRREADPDDHYQPGEGTQATADKAKDDLEMSAVITIMQPILRFLQLLCENHNRDLQNFLRCQNNKTNYNLVCETLQFLDCICGSTTGGLGLLGLYINEKNVALINQTLESLTEYCQGPCHENQNCIATHESNGIDIITALILNDINPLGKKRMDLVLELKNNASKLLLAIMESRHDSENAERILYNMRPKELVEVIKKAYMQGEVEFEDGENGEDGAASPRNVGHNIYILAHQLARHNKELQSMLKPGGQVDGDEALEFYAKHTAQIEIVRLDRTMEQIVFPVPSICEFLTKESKLRIYYTTERDEQGSKINDFFLRSEDLFNEMNWQKKLRAQPVLYWCARNMSFWSSISFNLAVLMNLLVAFFYPFKGVRGGTLEPHWSGLLWTAMLISLAIVIALPKPHGIRALIASTILRLIFSVGLQPTLFLLGAFNVCNKIIFLMSFVGNCGTFTRGYRAMVLDVEFLYHLLYLVICAMGLFVHEFFYSLLLFDLVYREETLLNVIKSVTRNGRSIILTAVLALILVYLFSIVGYLFFKDDFILEVDRLPNETAVPETGESLASEFLFSDVCRVESGENCSSPAPREELVPAEETEQDKEHTCETLLMCIVTVLSHGLRSGGGVGDVLRKPSKEEPLFAARVIYDLLFFFMVIIIVLNLIFGVIIDTFADLRSEKQKKEEILKTTCFICGLERDKFDNKTVTFEEHIKEEHNMWHYLCFIVLVKVKDSTEYTGPESYVAEMIKERNLDWFPRMRAMSLVSSDSEGEQNELRNLQEKLESTMKLVTNLSGQLSELKDQMTEQRKQKQRIGLLGHPPHMNVNPQQPA

SEQ ID NO: 30009 - protein, 721 aa, Homo sapiens
  REGION 1..721: note = ENSP00000440564
MSDKMSSFLHIGDICSLYAEGSTNGFISTLGLVDDRCVVQPETGDLNNPPKKFRDCLFKLCPMNRYSAQKQFWKAAKPGANSTTDAVLLNKLHHAADLEKKQNETENRKLLGTVIQYGNVIQLLHLKSNKYLTVNKRLPALLEKNAMRVTLDEAGNEGSWFYIQPFYKLRSIGDSVVIGDKVVLNPVNAGQPLHASSHQLVDNPGCNEVNSVNCNTSWKIVLFMKWSDNKDDILKGGDVVRLFHAEQEKFLTCDEHRKKQHVFLRTTGRQSATSATSSKALWEVEVVQHDPCRGGAGYWNSLFRFKHLATGHYLAAEVDPDFEEECLEFQPSVCNKIIFLMSFVGNCGTFTRGYRAMVLDVEFLYHLLYLVICAMGLFVHEFFYSLLLFDLVYREETLLNVIKSVTRNGRSIILTAVLALILVYLFSIVGYLFFKDDFILEVDRLPNETAVPETGESLASEFLFSDVCRVESGENCSSPAPREELVPAEETEQDKEHTCETLLMCIVTVLSHGLRSGGGVGDVLRKPSKEEPLFAARVIYDLLFFFMVIIIVLNLIFGVIIDTFADLRSEKQKKEEILKTTCFICGLERDKFDNKTVTFEEHIKEEHNMWHYLCFIVLVKVKDSTEYTGPESYVAEMIKERNLDWFPRMRAMSLVSSDSEGEQNELRNLQEKLESTMKLVTNLSGQLSELKDQMTEQRKQKQRIGLLGHPPHMNVNPQQPA

SEQ ID NO: 30010 - protein, 2710 aa, Homo sapiens; identical to SEQ ID NO: 30004
  REGION 1..2710: note = ENSP00000349597

SEQ ID NO: 30011 - protein, 2695 aa, Homo sapiens; identical to SEQ ID NO: 30005
  REGION 1..2695: note = ENSP00000397885

SEQ ID NO: 30012 - protein, 2743 aa, Homo sapiens; identical to SEQ ID NO: 30006
  REGION 1..2743: note = ENSP00000401671

SEQ ID NO: 30013 - protein, 2743 aa, Homo sapiens; identical to SEQ ID NO: 30006
  REGION 1..2743: note = ENSP00000306253

SEQ ID NO: 30014 - protein, 2758 aa, Homo sapiens; identical to SEQ ID NO: 30008
  REGION 1..2758: note = ENSP00000346595

SEQ ID NO: 30015 - protein, 721 aa, Homo sapiens; identical to SEQ ID NO: 30009
  REGION 1..721: note = ENSP00000440564

SEQ ID NO: 30016 - protein, 168 aa, Homo sapiens
  REGION 1..168: note = ENSP00000427323
MAQNTENHDPVGSILIQIHEDLYQLKEKLTKFSPEEKGETLDIQSLETAIKRTEVGLRIHIEKYLNVVNQNVLTTSVNDESLYTPQASKWLLPTVIDQKSFIFPQESEGTFWQPQRQHSSSLPVFPRAKRKIGLNVKILQDPENIHHRAAVNANYGISLPYINQRKAC

SEQ ID NO: 30017 - protein, 60 aa, Homo sapiens
  REGION 1..60: note = ENSP00000421223
MAQNTENHDPVGSILIQIHEDLYQLKEKLTKFSPEEKGETLDIQSLETAIKRTEVGLRGF

SEQ ID NO: 30018 - protein, 1027 aa, Homo sapiens
  REGION 1..1027: note = ENSP00000336861
MAQNTENHDPVGSILIQIHEDLYQLKEKLTKFSPEEKGETLDIQSLETAIKRTEVGLRIHIEKYLNVVNQNVLTTSVNDESLYTPQASKWLLPTVIDQKSFIFPQESEGTFWQPQRQHSSSLPVFPRAKIKVSKLIKGSNISSLTVLPSSHCTDPYFTPIPVLQADAHKGILSMIERGLIPPTARITFQNPPITPRAAPLHSFDEARKIPTVATFTIPREPPPSPAEVKFFPKKQRSKGKSRRSRGHHDRKAMKVKTPLRALKSLWDYDFLIYDGVIDNTAPDFLAFKEHFSLAWGGIFSLLEHVEKFLRNYAIPEVKIKGNNLVALLPEFELTNKLTRYDLLSVLEDPAHVQMLINLPGQRYKGQDGNSEAAMKIQATWKCYKARKFFLFYRQQKWASGVIAIAWLLYCHKTRLKKILKESRQRHLENFRIRAKHLAANWNRIRTSRRTIIHIPSLGYSQPVREHIADFNTQQNMQLGRLCDILDANVNVIYICSHHMNDELVLYYKKILSLHAAVKSGNLEDRSDLQDRFKIITPEAVNIFPKHHMCLATHLMYSPKAIKRIKNLIRGTEAYIVSGLLHRDDLAVADMLDIPILGSEPELAHLYSTKSGGKRVFDSANVAVPPGIYDIYSQQQMIEQLSQLITDHLQIQRWLFKMDSEFRGNGTAFCDIPSYLKCYKWVLKESSRYGLEDWRKKWAQEPALVKISEELAGILAQHAQPVNEKRFPTWRKFLQTFLSQGGVIEAFPPADNVTNLTVDMLIEPNGKISVLSTGDQLHAESPFISSGTTVPQTSVDPQVLTYLCLQIGKACRMRDVVGYFSIDLVTFIDPSTLEQQVWATGLNLAYSDQLALTQLTLYLTNGHLDCSLSTLEVPRFVPKERKKTKCMSALSMPMLATSRYAVMTTQLRHSNLSLVFHYVFLQICRAHGIGYDVEERQGTVFILYEHLKRHKLGMLTIGEDLQGVLMTFARHLFIIHQEISAPNMQGETNFKTTIADIETILRVTKENKMRFEEEQQSKDDKNLSKPKK

SEQ ID NO: 30019 - protein, 170 aa, Homo sapiens
  REGION 1..170: note = ENSP00000441306
MAQNTENHDPVGSILIQIHEDLYQLKEKLTKFSPEEKGETLDIQSLETAIKRTEVGLRIHIEKYLNVVNQNVLTTSVNDESLYTPQASKWLLPTVIDQKSFIFPQESEGTFWQPQRQHSSSLPVFPRAKRKIGLNVKILQDPENIHHRAAVNANYGISLPYINQRKACGF

SEQ ID NO: 30020 - protein, 19 aa, Homo sapiens
  REGION 1..19: note = ENSP00000453749
MAQNTENHDPVGSILIQGF

SEQ ID NO: 30021 - protein, 46 aa, Homo sapiens
  REGION 1..46: note = ENSP00000454387
KLTKFSPEEKGETLDIQSLETAIKRTEVGLRPLSLYLGNHLHLQQK

SEQ ID NO: 30022 - protein, 194 aa, Homo sapiens
  REGION 1..194: note = ENSP00000457425
  VARIANT 1: note = Any amino acid
XFLFYRQQKWASGVIAIAWLLYCHKTRLKKILKESRQRHLENFRIRAKHLAANWNRIRTSRRTIIHIPSLGYSQPVREHIADFNTQQNMQLGRLCDILDANVNVIYICSHHMNDELVLYYKKILSLHAAVKSGNLEDRSDLQDRFKIITPEAVNIFPMIEQLSQLITDHLQIQRWLFKMDSEFRGNGTAFCDIP

SEQ ID NO: 30023 - protein, 90 aa, Homo sapiens
  REGION 1..90: note = ENSP00000456293
TVFILYEHLKRHKLGMLTIGEDLQGVLMTFARHLFIIHQEISAPNMQGETNFKTTIADIETILRVTKENKMRFEEEQQSKDDKNLSKPKK

SEQ ID NO: 30024 - protein, 684 aa, Homo sapiens
  REGION 1..684: note = ENSP00000444118
MKVKTPLRALKSLWDYDFLIYDGVIDNTAPDFLAFKEHFSLAWGGIFSLLEHVEKFLRNYAIPEVKIKGNNLVALLPEFELTNKLTRYDLLSVLEDPAHVQMLINLPGQRYKGQDGNSEAAMKIQATWKCYKARKFFLFYRQQKWASGVIAIAWLLYCHKTRLKKILKESRQRHLENFRIRAKHLAANWNRIRTSRRTIIHIPSLGYSQPVREHIADFNTQQNMQLGRLCDILDANVNVIYICSHHMNDELVLYYKKILSLHAAVKSGNLEDRSDLQDRFKIITPEAVNIFPMIEQLSQLITDHLQIQRWLFKMDSEFRGNGTAFCDIPSYLKCYKWVLKESSRYGLEDWRKKWAQEPALVKISEELAGILAQHAQPVNEKRFPTWRKFLQTFLSQGGVIEAFPPADNVTNLTVDMLIEPNGKISVLSTGDQLHAESPFISSGTTVPQTSVDPQVLTYLCLQIGKACRMRDVVGYFSIDLVTFIDPSTLEQQVWATGLNLAYSDQLALTQLTLYLTNGHLDCSLSTLEVPRFVPKERKKTKCMSALSMPMLATSRYAVMTTQLRHSNLSLVFHYVFLQICRAHGIGYDVEERQGTVFILYEHLKRHKLGMLTIGEDLQGVLMTFARHLFIIHQEISAPNMQGETNFKTTIADIETILRVTKENKMRFEEEQQSKDDKNLSKPKK

SEQ ID NO: 30025 - protein, 621 aa, Homo sapiens
  REGION 1..621: note = ENSP00000351617
MTKAMKVKTPLRALKSLWDYDFLIYDGVIDNTAPDFLAFKEHFSLAWGGIFSLLEHVEKFLRNYAIPEVKIKGNNLVALLPEFELTNKLTRYDLLSVLEDPAHVQMLINLPGQRYKGQDGNSEAAMKIQATWKCYKARKFFLFYRQQKWASGVIAIAWLLYCHKTRLKKILKESRQRHLENFRIRAKHLAANWNRIRTSRRTIIHIPSLGYSQPVREHIADFNTQQNMQLGRLCDILDANVNVIYICSHHMNDELVLYYKKILSLHAAVKSGNLEDRSDLQDRFKIITPEAVNIFPMIEQLSQLITDHLQIQRWLFKMDSEFRGNGTAFCDIPSYLKCYKWVLKESSRYGLEDWRKKWAQEPALVKISEELAGILAQHAQPVNEKRFPTWRKFLQTFLSQGGVIEAFPPADNVTNLTVDMLIEPNGKISVLSTGDQLHAESPFISSGTTVPQTSVDPQVLTYLCLQIGKACRMRDVVGYFSIDLVTFIDPSTLEQQVWATGLNLAYSDQLALTQLTLYLTNGHLDCSLSTLEVPRFVPKERKKTKCMSALSMPMLATSRYAVMTTQLRHSNLSLVFHYVFLQICRAHGIGYDVENNRRGSPGGPHDLCSPSLHHPSRNIST

SEQ ID NO: 30026 - protein, 305 aa, Homo sapiens
  REGION 1..305: note = ENSP00000486970
MIERGLIPPTARITFQNPPITPRAAPLHSFDEARKIPTVATFTIPREPPPSPAEVKFFPKKQRSKGKSRRSRGHHDRKAMKVKTPLRALKSLWDYDFLIYDGVIDNTAPDFLAFKEHFSLAWGGIFSLLEHVEKFLRNYAIPEVKIKGNNLVALLPEFELTNKLTRYDLLSVLEDPAHVQMLINLPGQRYKGQDGNSEAAMKIQATWKCYKARKFFLFYRQQKWASGVIAIAWLLYCHKTRLKKILKESRQRHLENFRIRAKHLAANWNRIRTSRRTIIHIPSLGITLLPANLSATSITHHIMAP

SEQ ID NO: 30027 - protein, 1657 aa, Homo sapiens
  REGION 1..1657: note = ENSP00000268182
MSAADEVDGLGVARPHYGSVLDNERLTAEEMDERRRQNVAYEYLCHLEEAKRWMEACLGEDLPPTTELEEGLRNGVYLAKLGNFFSPKVVSLKKIYDREQTRYKATGLHFRHTDNVIQWLNAMDEIGLPKIFYPETTDIYDRKNMPRCIYCIHALSLYLFKLGLAPQIQDLYGKVDFTEEEINNMKTELEKYGIQMPAFSKIGGILANELSVDEAALHAAVIAINEAIDRRIPADTFAALKNPNAMLVNLEEPLASTYQDILYQAKQDKMTNAKNRTENSERERDVYEELLTQAEIQGNINKVNTFSALANIDLALEQGDALALFRALQSPALGLRGLQQQNSDWYLKQLLSDKQQKRQSGQTDPLQKEELQSGVDAANSAAQQYQRRLAAVALINAAIQKGVAEKTVLELMNPEAQLPQVYPFAADLYQKELATLQRQSPEHNLTHPELSVAVEMLSSVALINRALESGDVNTVWKQLSSSVTGLTNIEEENCQRYLDELMKLKAQAHAENNEFITWNDIQACVDHVNLVVQEEHERILAIGLINEALDEGDAQKTLQALQIPAAKLEGVLAEVAQHYQDTLIRAKREKAQEIQDESAVLWLDEIQGGIWQSNKDTQEAQKFALGIFAINEAVESGDVGKTLSALRSPDVGLYGVIPECGETYHSDLAEAKKKKLAVGDNNSKWVKHWVKGGYYYYHNLETQEGGWDEPPNFVQNSMQLSREEIQSSISGVTAAYNREQLWLANEGLITRLQARCRGYLVRQEFRSRMNFLKKQIPAITCIQSQWRGYKQKKAYQDRLAYLRSHKDEVVKIQSLARMHQARKRYRDRLQYFRDHINDIIKIQAFIRANKARDDYKTLINAEDPPMVVVRKFVHLLDQSDQDFQEELDLMKMREEVITLIRSNQQLENDLNLMDIKIGLLVKNKITLQDVVSHSKKLTKKNKEQLSDMMMINKQKGGLKALSKEKREKLEAYQHLFYLLQTNPTYLAKLIFQMPQNKSTKFMDSVIFTLYNYASNQREEYLLLRLFKTALQEEIKSKVDQIQEIVTGNPTVIKMVVSFNRGARGQNALRQILAPVVKEIMDDKSLNIKTDPVDIYKSWVNQMESQTGEASKLPYDVTPEQALAHEEVKTRLDSSIRNMRAVTDKFLSAIVSSVDKIPYGMRFIAKVLKDSLHEKFPDAGEDELLKIIGNLLYYRYMNPAIVAPDAFDIIDLSAGGQLTTDQRRNLGSIAKMLQHAASNKMFLGDNAHLSIINEYLSQSYQKFRRFFQTACDVPELQDKFNVDEYSDLVTLTKPVIYISIGEIINTHTLLLDHQDAIAPEHNDPIHELLDDLGEVPTIESLIGESSGNLNDPNKEALAKTEVSLTLTNKFDVPGDENAEMDARTILLNTKRLIVDVIRFQPGETLTEILETPATSEQEAEHQRAMQRRAIRDAKTPDKMKKSKSVKEDSNLTLQEKKEKIQTGLKKLTELGTVDPKNKYQELINDIARDIRNQRRYRQRRKAELVKLQQTYAALNSKATFYGEQVDYYKSYIKTCLDNLASKGKVSKKPREMKGKKSKKISLKYTAARLHEKGVLLEIEDLQVNQFKNVIFEISPTEEVGDFEVKAKFMGVQMETFMLHYQDLLQLQYEGVAVMKLFDRAKVNVNLLIFLLNKKFYGK

SEQ ID NO: 30028 - protein, 1191 aa, Homo sapiens
  REGION 1..1191: note = ENSP00000488618
MSAADEVDGLGVARPHYGSVLDNERLTAEEMDERRRQNVAYEYLCHLEEAKRWMEACLGEDLPPTTELEEGLRNGVYLAKLGNFFSPKVVSLKKIYDREQTRYKATGLHFRHTDNVIQWLNAMDEIGLPKIFYPETTDIYDRKNMPRCIYCIHALSLYLFKLGLAPQIQDLYGKVDFTEEEINNMKTELEKYGIQMPAFSKIGGILANELSVDEAALHAAVIAINEAIDRRIPADTFAALKNPNAMLVNLEEPLASTYQDILYQAKQDKMTNAKNRTENSERERDVYEELLTQAEIQGNINKVNTFSALANIDLALEQGDALALFRALQSPALGLRGLQQQNSDWYLKQLLSDKQQKRQSGQTDPLQKEELQSGVDAANSAAQQYQRRLAAVALINAAIQKGVAEKTVLELMNPEAQLPQVYPFAADLYQKELATLQRQSPEHNLTHPELSVAVEMLSSVALINRALESGDVNTVWKQLSSSVTGLTNIEEENCQRYLDELMKLKAQAHAENNEFITWNDIQACVDHVNLVVQEEHERILAIGLINEALDEGDAQKTLQALQIPAAKLEGVLAEVAQHYQDTLIRAKREKAQEIQDESAVLWLDEIQGGIWQSNKDTQEAQKFALGIFAINEAVESGDVGKTLSALRSPDVGLYGVIPECGETYHSDLAEAKKKKLAVGDNNSKWVKHWVKGGYYYYHNLETQEGGWDEPPNFVQNSMQLSREEIQSSISGVTAAYNREQLWLANEGLITRLQARCRGYLVRQEFRSRMNFLKKQIPAITCIQSQWRGYKQKKAYQDRLAYLRSHKDEVVKIQSLARMHQARKRYRDRLQYFRDHINDIIKIQAFIRANKARDDYKTLINAEDPPMVVVRKFVHLLDQSDQDFQEELDLMKMREEVITLIRSNQQLENDLNLMDIKIGLLVKNKITLQDVVSHSKKLTKKNKEQLSDMMMINKQKGGLKALSKEKREKLEAYQHLFYLLQTNPTYLAKLIFQMPQNKSTKFMDSVIFTLYNYASNQREEYLLLRLFKTALQEEIKSKVDQIQEIVTGNPTVIKMVVSFNRGARGQNALRQILAPVVKEIMDDKSLNIKTDPVDIYKSWVNQMESQTGEASKLPYDVTPEQALAHEEVKTRLDSSIRNMRAVTDKFLSAIVSSVDKIPYGMRFIAKVLKDSLHEKFPDAGEDELLKFCAFLQ

SEQ ID NO: 30029 - protein, 1085 aa, Homo sapiens
  REGION 1..1085: note = ENSP00000453181
MSAADEVDGLGVARPHYGSVLDNERLTAEEMDERRRGIWQSNKDTQEAQKFALGIFAINEAVESGDVGKTLSALRSPDVGLYGVIPECGETYHSDLAEAKKKKLAVGDNNSKWVKHWVKGGYYYYHNLETQEGGWDEPPNFVQNSMQLSREEIQSSISGVTAAYNREQLWLANEGLITRLQARCRGYLVRQEFRSRMNFLKKQIPAITCIQSQWRGYKQKKAYQDRLAYLRSHKDEVVKIQSLARMHQARKRYRDRLQYFRDHINDIIKIQAFIRANKARDDYKTLINAEDPPMVVVRKFVHLLDQSDQDFQEELDLMKMREEVITLIRSNQQLENDLNLMDIKIGLLVKNKITLQDVVSHSKKLTKKNKEQLSDMMMINKQKGGLKALSKEKREKLEAYQHLFYLLQTNPTYLAKLIFQMPQNKSTKFMDSVIFTLYNYASNQREEYLLLRLFKTALQEEIKSKVDQIQEIVTGNPTVIKMVVSFNRGARGQNALRQILAPVVKEIMDDKSLNIKTDPVDIYKSWVNQMESQTGEASKLPYDVTPEQALAHEEVKTRLDSSIRNMRAVTDKFLSAIVSSVDKIPYGMRFIAKVLKDSLHEKFPDAGEDELLKIIGNLLYYRYMNPAIVAPDAFDIIDLSAGGQLTTDQRRNLGSIAKMLQHAASNKMFLGDNAHLSIINEYLSQSYQKFRRFFQTACDVPELQDKFNVDEYSDLVTLTKPVIYISIGEIINTHTLLLDHQDAIAPEHNDPIHELLDDLGEVPTIESLIGESSGNLNDPNKEALAKTEVSLTLTNKFDVPGDENAEMDARTILLNTKRLIVDVIRFQPGETLTEILETPATSEQEAEHQRAMQRRAIRDAKTPDKMKKSKSVKEDSNLTLQEKKEKIQTGLKKLTELGTVDPKNKYQELINDIARDIRNQRRYRQRRKAELVKLQQTYAALNSKATFYGEQVDYYKSYIKTCLDNLASKGKVSKKPREMKGKKSKKISLKYTAARLHEKGVLLEIEDLQVNQFKNVIFEISPTEEVGDFEVKAKFMGVQMETFMLHYQDLLQLQYEGVAVMKLFDRAKVNVNLLIFLLNKKFYGK

SEQ ID NO: 30030 - protein, 43 aa, Homo sapiens
  REGION 1..43: note = ENSP00000452723
MPRCIYCIHALSLYLFKLGLAPQIQDLYGKVDFTEEEINNMKT

SEQ ID NO: 30031 - protein, 48 aa, Homo sapiens
  REGION 1..48: note = ENSP00000484647
  VARIANT 1: note = Any amino acid
XEVDGLGVARPHYGSVLDNERLTAEEMDERRRQNVAYEYLCHLEEAKR

SEQ ID NO: 30032 - protein, 107 aa, Homo sapiens
  REGION 1..107: note = ENSP00000480393
VKGGYYYYHNLETQEGGWDEPPNFVQNSMQLSREEIQSSISGVTAAYNREQLWLANEGLITRLQARCRGYLVRQEFRSRMNFLKKQIPAITCIQVFQNLSHRQQAGI

SEQ ID NO: 30033 - protein, 963 aa, Homo sapiens
  REGION 1..963: note = ENSP00000273221
MWCLHCNSERTQSLLELELDSGVEGEAPSSETGTSLDSPSAYPQGPLVPGSSLSPDHYEHTSVGAYGLYSGPPGQQQRTRRPKLQHSTSILRKQAEEEAIKRSRSLSESYELSSDLQDKQVEMLERKYGGRLVTRHAARTIQTAFRQYQMNKNFERLRSSMSENRMSRRIVLSNMRMQFSFEGPEKVHSSYFEGKQVSVTNDGSQLGALVSPECGDLSEPTTLKSPAPSSDFADAITELEDAFSRQVKSLAESIDDALNCRSLHTEEAPALDAARARDTEPQTALHGMDHRKLDEMTASYSDVTLYIDEEELSPPLPLSQAGDRPSSTESDLRLRAGGAAPDYWALAHKEDKADTDTSCRSTPSLERQEQRLRVEHLPLLTIEPPSDSSVDLSDRSERGSLKRQSAYERSLGGQQGSPKHGPHSGAPKSLPREEPELRPRPPRPLDSHLAINGSANRQSKSESDYSDGDNDSINSTSNSNDTINCSSESSSRDSLREQTLSKQTYHKEARNSWDSPAFSNDVIRKRHYRIGLNLFNKKPEKGVQYLIERGFVPDTPVGVAHFLLQRKGLSRQMIGEFLGNRQKQFNRDVLDCVVDEMDFSTMELDEALRKFQAHIRVQGEAQKVERLIEAFSQRYCICNPGVVRQFRNPDTIFILAFAIILLNTDMYSPNVKPERKMKLEDFIKNLRGVDDGEDIPREMLMGIYERIRKRELKTNEDHVSQVQKVEKLIVGKKPIGSLHPGLGCVLSLPHRRLVCYCRLFEVPDPNKPQKLGLHQREIFLFNDLLVVTKIFQKKKNSVTYSFRQSFSLYGMQVLLFENQYYPNGIRLTSSVPGADIKVLINFNAPNPQDRKKFTDDLRESIAEVQEMEKHRIESELEKQKGVVRPSMSQCSSLKKESGNGTLSRACLDDSYASGEGLKRSALSSSLRDLSEAGKRGRRSSAGSLESNVEFQPFEPLQPSVLCS

SEQ ID NO: 30034 - protein, 814 aa, Homo sapiens
  REGION 1..814: note = ENSP00000478001
MLERKYGGRLVTRHAARTIQTAFRQYQMNKNFERLRSSMSENRMSRRIVLSNMRMQFSFEGPEKVHSSYFEGKQVSVTNDGSQLGALVSPECGDLSEPTTLKSPAPSSDFADAITELEDAFSRQVKSLAESIDDALNCRSLHTEEAPALDAARARDTEPQTALHGMDHRKLDEMTASYSDVTLYIDEEELSPPLPLSQAGDRPSSTESDLRLRAGGAAPDYWALAHKEDKADTDTSCRSTPSLERQEQRLRVEHLPLLTIEPPSDSSVDLSDRSERGSLKRQSAYERSLGGQQGSPKHGPHSGAPKSLPREEPELRPRPPRPLDSHLAINGSANRQSKSESDYSDGDNDSINSTSNSNDTINCSSESSSRDSLREQTLSKQTYHKEARNSWDSPAFSNDVIRKRHYRIGLNLFNKKPEKGVQYLIERGFVPDTPVGVAHFLLQRKGLSRQMIGEFLGNRQKQFNRDVLDCVVDEMDFSTMELDEALRKFQAHIRVQGEAQKVERLIEAFSQRYCICNPGVVRQFRNPDTIFILAFAIILLNTDMYSPNVKPERKMKLEDFIKNLRGVDDGEDIPREMLMGIYERIRKRELKTNEDHVSQVQKVEKLIVGKKPIGSLHPGLGCVLSLPHRRLVCYCRLFEVPDPNKPQKLGLHQREIFLFNDLLVVTKIFQKKKNSVTYSFRQSFSLYGMQVLLFENQYYPNGIRLTSSVPGADIKVLINFNAPNPQDRKKFTDDLRESIAEVQEMEKHRIESELEKQKGVVRPSMSQCSSLKKESGNGTLSRACLDDSYASGEGLKRSALSSSLRDLSEAGVHH

SEQ ID NO: 30035 - protein, 1114 aa, Homo sapiens
  REGION 1..1114: note = ENSP00000480301
MACRRRYFVEGEAPSSETGTSLDSPSAYPQGPLVPGSSLSPDHYEHTSVGAYGLYSGPPGQQQRTRRPKLQHSTSILRKQAEEEAIKRSRSLSESYELSSDLQDKQVEMLERKYGGRLVTRHAARTIQTAFRQYQMNKNFERLRSSMSENRMSRRIVLSNMRMQFSFEGPEKVHSSYFEGKQVSVTNDGSQLGALVSPECGDLSEPTTLKSPAPSSDFADAITELEDAFSRQVKSLAESIDDALNCRSLHTEEAPALDAARARDTEPQTALHGMDHRKLDEMTASYSDVTLYIDEEELSPPLPLSQAGDRPSSTESDLRLRAGGAAPDYWALAHKEDKADTDTSCRSTPSLERQEQRLRVEHLPLLTIEPPSDSSVDLSDRSERGSLKRQSAYERSLGGQQGSPKHGPHSGAPKSLPREEPELRPRPPRPLDSHLAINGSANRQSKSESDYSDGDNDSINSTSNSNDTINCSSESSSRDSLREQTLSKQTYHKEARNSWDSPAFSNDVIRKRHYRIGLNLFNKKPEKGVQYLIERGFVPDTPVGVAHFLLQRKGLSRQMIGEFLGNRQKQFNRDVLDCVVDEMDFSTMELDEALRKFQAHIRVQGEAQKVERLIEAFSQRYCICNPGVVRQFRNPDTIFILAFAIILLNTDMYSPNVKPERKMKLEDFIKNLRGVDDGEDIPREMLMGIYERIRKRELKTNEDHVSQVQKVEKLIVGKKPIGSLHPGLGCVLSLPHRRLVCYCRLFEVPDPNKPQKLGLHQREIFLFNDLLVVTKIFQKKKNSVTYSFRQSFSLYGMQVLLFENQYYPNGIRLTSSVPGADIKVLINFNAPNPQDRKKFTDDLRESIAEVQEMEKHRIESELEKQKGVVRPSMSQCSSLKKESGNGTLSRACLDDSYASGEGLKRSALSSSLRDLSEAGKRGRRSSAGSLESNVEGSIISSPHMRRRATSTRECPSRPHQTMPNSSSLLGSLFGSKRGKPPPQAHLPSAPALPPPHPPVVLPHLQHSVAGHHLGPPEGLPQAAMHGHHTQYCHMQNPPPYHHHHHHHPPQHIQHAHQYHHGPHGGHPAYGAHAHGHPPLPSAHVGHTVHHHGQPPAPPPPTSSKAKPSGISTIV

SEQ ID NO: 30036 - protein, 1182 aa, Homo sapiens
  REGION 1..1182: note = ENSP00000437554
MESLLENPVRAVLYLKELTAIVQNQQSLIHTQRERIDELERRLDELSAENRSLWEHQQLLQAQPPPGLVPPSSAPLPAAPATAPAAAARAQEPLQDQGQRSAAAPHPAPDRPPRQHHGQLLEQPQRGPGSRAHTPQSPHKHLGTQGAVTDKEKERPPSCCAAAGALLQHKSPSALGKGVLSRRPENETVLHQFCCPAADACSDLASQSDGSCTQAGGGMEDSVVAAAAVAAGRPSAHAPKAQAQELQEEEERPGAGAASPRAGPQHKASPGRQQPALATALCPHAPAASDYELSLDLKNKQIEMLEHKYGGHLVSRRAACTIQTAFRQYQLSKNFEKIRNSLLESRLPRRISLRKVRSPTAESLAAEKALMEGYGLVGLPLVRSPSLPPTFAGTLTELEDSFTEQVQSLAKSIDDALSTWSLKTMCSLRESGAYQLHQALQAAAGPPGLEAEGRAPESAGPGPGDDAAETPGLPPAHSGTLMMAFRDVTVQIANQNISVSSSTALSVANCLGAQTVQAPAEPAAGKAEQGETSGREAPEAPAVGREDASAEDSCAEAAASGAADGATAPKTEEEEEEEETAEVGRGAEAEAGDLEQLSSSSTSTKSAKSGSEASASASKDALQAMILSLPRYHCENPASCKSPTLSTDTLRKRLYRIGLNLFNINPDKGIQFLISRGFIPDTPIGVAHFLLQRKGLSRQMIGEFLGNSKKQFNRDVLDCVVDEMDFSSMELDEALRKFQAHIRVQGEAQKVERLIEAFSQRYCMCNPEVVQQFHNPDTIFILAFAIILLNTDMYSPNIKPDRKMMLEDFIRNLRGVDDGADIPRELVVGIYERIQQKELKSNEDHVTYVTKVEKSIVGMKTVLSVPHRRLVCCSRLFEVTDVNKLQKQAAHQREVFLFNDLLVILKLCPKKKSSSTYTFCKSVGLLGMQFQLFENEYYSHGITLVTPLSGSEKKQVLHFCALGSDEMQKFVEDLKESIAEVTELEQIRIEWELEKQQGTKTLSFKPCGAQGDPQSKQGSPTAKREAALRERPAESTVEVSIHNRLQTSQHNSGLGAERGAPVPPPDLQPSPPRQQTPPLPPPPPTPPGTLVQCQQIVKVIVLDKPCLARMEPLLSQALSCYTSSSSDSCGSTPLGGPGSPVKVTHQPPLPPPPPPYNHPHQFCPPGSLLHGHRYSSGSRSLV

SEQ ID NO: 30037 - protein, 759 aa, Homo sapiens
  REGION 1..759: note = ENSP00000372292
MLEHKYGGHLVSRRAACTIQTAFRQYQLSKNFEKIRNSLLESRLPRRISLRKVRSPTAESLAAEKALMEGYGLVGLPLVRSPSLPPTFAGTLTELEDSFTEQVQSLAKSIDDALSTWSLKTMCSLRESGAYQLHQALQAAAGPPGLEAEGRAPESAGPGPGDDAAETPGLPPAHSGTLMMAFRDVTVQIANQNISVSSSTALSVANCLGAQTVQAPAEPAAGKAEQGETSGREAPEAPAVGREDASAEDSCAEAAASGAADGATAPKTEEEEEEEETAEVGRGAEAEAGDLEQLSSSSTSTKSAKSGSEASASASKDALQAMILSLPRYHCENPASCKSPTLSTDTLRKRLYRIGLNLFNINPDKGIQFLISRGFIPDTPIGVAHFLLQRKGLSRQMIGEFLGNSKKQFNRDVLDCVVDEMDFSSMELDEALRKFQAHIRVQGEAQKVERLIEAFSQRYCMCNPEVVQQFHNPDTIFILAFAIILLNTDMYSPNIKPDRKMMLEDFIRNLRGVDDGADIPRELVVGIYERIQQKELKSNEDHVTYVTKVEKSIVGMKTVLSVPHRRLVCCSRLFEVTDVNKLQKQAAHQREVFLFNDLLVILKLCPKKKSSSTYTFCKSVGLLGMQFQLFENEYYSHGITLVTPLSGSEKKQVLHFCALGSDEMQKFVEDLKESIAEVTELEQIRIEWELEKQQGTKTLSFKPCGAQGDPQSKQGSPTAKREAALRERPAESTVEVLINASPARLTILPISRDTIKSYC

SEQ ID NO: 30038 - protein, 1038 aa, Homo sapiens
  REGION 1..1038: note = ENSP00000461496
MESLLENPVRAVLYLKELTAIVQNQQSLIHTQRERIDELERRLDELSAENRSLWEHQQLLQAQPPPGLVPPSSAPLPAAPATAPAAAARAQEPLQDQGQRSAAAPHPAPDRPPRQHHGQLLEQPQRGPGSRAHTPQSPHKHLGTQGAVTDKEKERPPSCCAAAGALLQHKSPSALGKGVLSRRPENETVLHQFCCPAADACSDLASQSDGSCTQAGGGMEDSVVAAAAVAAGRPSAHAPKAQAQELQEEEERPGAGAASPRAGPQHKASPGRQQPALATALCPHAPAASDYELSLDLKNKQIEMLEHKYGGHLVSRRAACTIQTAFRQYQLSKNFEKIRNSLLESRLPRRISLRKVRSPTAESLAAEKALMEGYGLVGLPLVRSPSLPPTFAGTLTELEDSFTEQVQSLAKSIDDALSTWSLKTMCSLRESGAYQLHQALQAAAGPPGLEAEGRAPESAGPGPGDDAAETPGLPPAHSGTLMMAFRDVTVQIANQNISVSSSTALSVANCLGAQTVQAPAEPAAGKAEQGETSGREAPEAPAVGREDASAEDSCAEAAASGAADGATAPKTEEEEEEEETAEVGRGAEAEAGDLEQLSSSSTSTKSAKSGSEASASASKDALQAMILSLPRYHCENPASCKSPTLSTDTLRKRLYRIGLNLFNINPDKGIQFLISRGFIPDTPIGVAHFLLQRKGLSRQMIGEFLGNSKKQFNRDVLDCVVDEMDFSSMELDEALRKFQAHIRVQGEAQKVERLIEAFSQRYCMCNPEVVQQFHNPDTIFILAFAIILLNTDMYSPNIKPDRKMMLEDFIRNLRGVDDGADIPRELVVGIYERIQQKELKSNEDHVTYVTKVEKSIVGMKTVLSVPHRRLVCCSRLFEVTDVNKLQKQAAHQREVFLFNDLLVILKLCPKKKSSSTYTFCKSVGLLGMQFQLFENEYYSHGITLVTPLSGSEKKQVLHFCALGSDEMQKFVEDLKESIAEVTELEQIRIEWELEKQQGTKTLSFKPCGAQGDPQSKQGSPTAKREAALRERPAESTVE

SEQ ID NO: 30039 - protein, 759 aa, Homo sapiens; identical to SEQ ID NO: 30037
  REGION 1..759: note = ENSP00000461043

SEQ ID NO: 30040 - protein, 625 aa, Homo sapiens
  REGION 1..625: note = ENSP00000256458
MACYIYQLPSWVLDDLCRNMDALSEWDWMEFASYVITDLTQLRKIKSMERVQGVSITRELLWWWGMRQATVQQLVDLLCRLELYRAAQIILNWKPAPEIRCPIPAFPDSVKPEKPLAASVRKAEDEQEEGQPVRMATFPGPGSSPARAHQPAFLQPPEEDAPHSLRSDLPTSSDSKDFSTSIPKQEKLLSLAGDSLFWSEADVVQATDDFNQNRKISQGTFADVYRGHRHGKPFVFKKLRETACSSPGSIERFFQAELQICLRCCHPNVLPVLGFCAARQFHSFIYPYMANGSLQDRLQGQGGSDPLPWPQRVSICSGLLCAVEYLHGLEIIHSNVKSSNVLLDQNLTPKLAHPMAHLCPVNKRSKYTMMKTHLLRTSAAYLPEDFIRVGQLTKRVDIFSCGIVLAEVLTGIPAMDNNRSPVYLKDLLLSDIPSSTASLCSRKTGVENVMAKEICQKYLEKGAGRLPEDCAEALATAACLCLRRRNTSLQEVCGSVAAVEERLRGRETLLPWSGLSEGTGSSSNTPEETDDVDNSSLDASSSMSVAPWAGAATPLLPTENGEGRLRVIVGREADSSSEACVGLEPPQDVTETSWQIEINEAKRKLMENILLYKEEKVDSIELFGP

SEQ ID NO: 30041 - protein, 480 aa, Homo sapiens
  REGION 1..480: note = ENSP00000305244
MSFPQLGYPQYLSAAGPGAYGGERPGVLAAAAAAAAAASSGRPGAAELGGGAGAAAVTSVLGMYAAAGPYAGAPNYSAFLPYAADLSLFSQMGSQYELKDNPGVHPATFAAHTAPAYYPYGQFQYGDPGRPKNATRESTSTLKAWLNEHRKNPYPTKGEKIMLAIITKMTLTQVSTWFANARRRLKKENKVTWGARSKDQEDGALFGSDTEGDPEKAEDDEEIDLESIDIDKIDEHDGDQSNEDDEDKAEAPHAPAAPSALARDQGSPLAAADVLKPQDSPLGLAKEAPEPGSTRLLSPGAAAGGLQGAPHGKPKIWSLAETATSPDGAPKASPPPPAGHPGAHGPSAGAPLQHPAFLPSHGLYTCHIGKFSNWTNSAFLAQGSLLNMRSFLGVGAPHAAPHGPHLPAPPPPQPPVAIAPGALNGDKASVRSSPTLPERDLVPRPDSPAQQLKSPFQPVRDNSLAPQEGTPRILAALPSA

SEQ ID NO: 30042 - protein, 471 aa, Homo sapiens
  REGION 1..471: note = ENSP00000372056
MSYPQGYLYQAPGSLALYSCPAYGASALAAPRSEELARSASGSAFSPYPGSAAFTAQAATGFGSPLQYSADAAAAAAGFPSYMGAPYDAHTTGMTGAISYHPYGSAAYPYQLNDPAYRKNATRDATATLKAWLNEHRKNPYPTKGEKIMLAIITKMTLTQVSTWFANARRRLKKENKMTWAPRNKSEDEDEDEGDATRSKDESPDKAQEGTETSAEDEGISLHVDSLTDHSCSAESDGEKLPCRAGDPLCESGSECKDKYDDLEDDEDDDEEGERGLAPPKPVTSSPLTGLEAPLLSPPPEAAPRGGRKTPQGSRTSPGAPPPASKPKLWSLAEIATSDLKQPSLGPGCGPPGLPAAAAPASTGAPPGGSPYPASPLLGRPLYYTSPFYGNYTNYGNLNAALQGQGLLRYNSAAAAPGEALHTAPKAASDAGKAGAHPLESHYRSPGGGYEPKKDASEGCTVVGGGVQPYL

SEQ ID NO: 30043 - protein, 471 aa, Homo sapiens; identical to SEQ ID NO: 30042
  REGION 1..471: note = ENSP00000307006

SEQ ID NO: 30044 - protein, 483 aa, Homo sapiens
  REGION 1..483: note = ENSP00000378132
MSYPQGYLYQPSASLALYSCPAYSTSVISGPRTDELGRSSSGSAFSPYAGSTAFTAPSPGYNSHLQYGADPAAAAAAAFSSYVGSPYDHTPGMAGSLGYHPYAAPLGSYPYGDPAYRKNATRDATATLKAWLNEHRKNPYPTKGEKIMLAIITKMTLTQVSTWFANARRRLKKENKMTWTPRNRSEDEEEEENIDLEKNDEDEPQKPEDKGDPEGPEAGGAEQKAASGCERLQGPPTPAGKETEGSLSDSDFKEPPSEGRLDALQGPPRTGGPSPAGPAAARLAEDPAPHYPAGAPAPGPHPAAGEVPPGPGGPSVIHSPPPPPPPAVLAKPKLWSLAEIATSSDKVKDGGGGNEGSPCPPCPGPIAGQALGGSRASPAPAPSRSPSAQCPFPGGTVLSRPLYYTAPFYPGYTNYGSFGHLHGHPGPGPGPTTGPGSHFNGLNQTVLNRADALAKDPKMLRSQSQLDLCKDSPYELKKGMSDI

SEQ ID NO: 30045 - protein, 263 aa, Homo sapiens
  REGION 1..263: note = ENSP00000453660
MSYPQGYLYQPSASLALYSCPAYSTSVISGPRTDELGRSSSGSAFSPYAGSTAFTAPSPGYNSHLQYGADPAAAAAAAFSSYVLLKKEKKSLDFPCFPPLRPTCVRSPAERGVASVAQASICMEGRAAVARSAHGGSPCPPCPGPIAGQALGGSRASPAPAPSRSPSAQCPFPGGTVLSRPLYYTAPFYPGYTNYGSFGHLHGHPGPGPGPTTGPGSHFNGLNQTVLNRADALAKDPKMLRSQSQLDLCKDSPYELKKGMSDI

SEQ ID NO: 30046 - protein, 482 aa, Homo sapiens
  REGION 1..482: note = ENSP00000316250
MSYPQGYLYQPSASLALYSCPAYSTSVISGPRTDELGRSSSGSAFSPYAGSTAFTAPSPGYNSHLQYGADPAAAAAAAFSSYVGSPYDHTPGMAGSLGYHPYAAPLGSYPYGDPAYRKNATRDATATLKAWLNEHRKNPYPTKGEKIMLAIITKMTLTQVSTWFANARRRLKKENKMTWTPRNRSEDEEEEENIDLEKNDEDEPQKPEDKGDPEGPEAGAEQKAASGCERLQGPPTPAGKETEGSLSDSDFKEPPSEGRLDALQGPPRTGGPSPAGPAAARLAEDPAPHYPAGAPAPGPHPAAGEVPPGPGGPSVIHSPPPPPPPAVLAKPKLWSLAEIATSSDKVKDGGGGNEGSPCPPCPGPIAGQALGGSRASPAPAPSRSPSAQCPFPGGTVLSRPLYYTAPFYPGYTNYGSFGHLHGHPGPGPGPTTGPGSHFNGLNQTVLNRADALAKDPKMLRSQSQLDLCKDSPYELKKGMSDI

SEQ ID NO: 30047 - protein, 146 aa, Homo sapiens [sequence omitted]

SEQ ID NO: 30048 - protein, 46 aa, Homo sapiens
  REGION 1..46: note = ENSP00000463628
MEAAAQFFVESPDVVYGPEAIEAQYEYRTTRVSREGGVLKAGTSRR

SEQ ID NO: 30049 - protein, 558 aa, Homo sapiens
  REGION 1..558: note = ENSP00000337746
MEAAAQFFVESPDVVYGPEAIEAQYEYRTTRVSREGGVLKVHPTSTRFTFRTARQVPRLGVMLVGWGGNNGSTLTAAVLANRLRLSWPTRSGRKEANYYGSLTQAGTVSLGLDAEGQEVFVPFSAVLPMVAPNDLVFDGWDISSLNLAEAMRRAKVLDWGLQEQLWPHMEALRPRPSVYIPEFIAANQSARADNLIPGSRAQQLEQIRRDIRDFRSSAGLDKVIVLWTANTERFCEVIPGLNDTAENLLRTIELGLEVSPSTLFAVASILEGCAFLNGSPQNTLVPGALELAWQHRVFVGGDDFKSGQTKVKSVLVDFLIGSGLKTMSIVSYNHLGNNDGENLSAPLQFRSKEVSKSNVVDDMVQSNPVLYTPGEEPDHCVVIKYVPYVGDSKRALDEYTSELMLGGTNTLVLHNTCEDSLLAAPIMLDLALLTELCQRVSFCTDMDPEPQTFHPVLSLLSFLFKAPLVPPGSPVVNALFRQRSCIENILRACVGLPPQNHMLLEHKMERPGPSLKRVGPVAATYPMLNKKGPVPAATNGCTGDANGHLQEEPPMPTT

SEQ ID NO: 30050 - protein, 504 aa, Homo sapiens
  REGION 1..504: note = ENSP00000415458
MEAAAQFFVESPDVVYGPEAIEAQYEYRTTRVSREGGVLKEANYYGSLTQAGTVSLGLDAEGQEVFVPFSAVLPMVAPNDLVFDGWDISSLNLAEAMRRAKVLDWGLQEQLWPHMEALRPRPSVYIPEFIAANQSARADNLIPGSRAQQLEQIRRDIRDFRSSAGLDKVIVLWTANTERFCEVIPGLNDTAENLLRTIELGLEVSPSTLFAVASILEGCAFLNGSPQNTLVPGALELAWQHRVFVGGDDFKSGQTKVKSVLVDFLIGSGLKTMSIVSYNHLGNNDGENLSAPLQFRSKEVSKSNVVDDMVQSNPVLYTPGEEPDHCVVIKYVPYVGDSKRALDEYTSELMLGGTNTLVLHNTCEDSLLAAPIMLDLALLTELCQRVSFCTDMDPEPQTFHPVLSLLSFLFKAPLVPPGSPVVNALFRQRSCIENILRACVGLPPQNHMLLEHKMERPGPSLKRVGPVAATYPMLNKKGPVPAATNGCTGDANGHLQEEPPMPTT

SEQ ID NO: 30051 - protein, 233 aa, Homo sapiens
  REGION 1..233: note = ENSP00000464528
  VARIANT 1: note = Any amino acid
XNHLGNNDGENLSAPLQFRSKEVSKSNVVDDMVQSNPVLYTPGEEPDHCVVIKYVPYVGDSKRALDEYTSELMLGGTNTLVLHNTCEDSLLAAPIMLDLALLTELCQRVSFCTDMDPEPQTFHPVLSLLSFLFKAPLVPPGSPVVNALFRQRSCIENILRCTPASRACVGLPPQNHMLLEHKMERPGPSLKRVGPVAATYPMLNKKGPVPAATNGCTGDANGHLQEEPPMPTT

SEQ ID NO: 30052 - protein, 430 aa, Homo sapiens
  REGION 1..430: note = ENSP00000475677
MVAPNDLVFDGWDISSLNLAEAMRRAKVLDWGLQEQLWPHMEALRPRPSVYIPEFIAANQSARADNLIPGSRAQQLEQIRRDIRDFRSSAGLDKVIVLWTANTERFCEVIPGLNDTAENLLRTIELGLEVSPSTLFAVASILEGCAFLNGSPQNTLVPGALELAWQHRVFVGGDDFKSGQTKVKSVLVDFLIGSGLKTMSIVSYNHLGNNDGENLSAPLQFRSKEVSKSNVVDDMVQSNPVLYTPGEEPDHCVVIKYVPYVGDSKRALDEYTSELMLGGTNTLVLHNTCEDSLLAAPIMLDLALLTELCQRVSFCTDMDPEPQTFHPVLSLLSFLFKAPLVPPGSPVVNALFRQRSCIENILRACVGLPPQNHMLLEHKMERPGPSLKRVGPVAATYPMLNKKGPVPAATNGCTGDANGHLQEEPPMPTT

SEQ ID NO: 30053 - protein, 151 aa, Homo sapiens
  REGION 1..151: note = ENSP00000464209
MEAAAQFFVESPDVVYGPEAIEAQYEYRTTRVSREGGVLKVHPTSTRFTFRTARQVPRLGVMLVGWGGNNGSTLTAAVLANRLRLSWPTRSGRKEANYYGSLTQAGTVSLGLDAEGQEVFVPFSAVLPMVAPNDLVFDAGADPQGHPRLPV

SEQ ID NO: 30054 - protein, 46 aa, Homo sapiens; identical to SEQ ID NO: 30048
  REGION 1..46: note = ENSP00000463271

SEQ ID NO: 30055 - protein, 177 aa, Homo sapiens
  REGION 1..177: note = ENSP00000462001
MEAAAQFFVESPDVVYGPEAIEAQYEYRTTRVSREGGVLKVHPTSTRFTFRTARQVPRLGVMLVGWGGNNGSTLTAAVLANRLRLSWPTRSGRKLEQIRRDIRDFRSSAGLDKVIVLWTANTERFCEVIPGLNDTAENLLRTIELGLEVSPSTLFAVASILEGCAFLNGSPQNTLVP

SEQ ID NO: 30056 - protein, 182 aa, Homo sapiens
  REGION 1..182: note = ENSP00000463500
MEAAAQFFVESPDVVYGPEAIEAQYEYRTTRVSREGGVLKVDQGAEEGGVLGRAGRLGEKGTGPGIHCAACLQVHPTSTRFTFRTARQVPRLGVMLVGWGGNNGSTLTAAVLANRLRLSWPTRSGRKEANYYGSLTQAGTVSLGLDAEGQEVFVPFSAVLPMVAPNDLVFDGWDISSLNLAE

SEQ ID NO: 30057 - protein, 148 aa, Homo sapiens
  REGION 1..148: note = ENSP00000464430
MEAAAQFFVESPDVVYGPEAIEAQYEYRTTRVSREGGVLKVHPTSTRFTFRTARQVPRLGVMLVGWGGNNGSTLTAAVLANRLRLSWPTRSGRKEANYYGSLTQAGTVSLGLDAEGQEVFVPFSAVLPMVAPNDLVFDGWDISSLNLA

SEQ ID NO: 30058 - protein, 1189 aa, Homo sapiens
  REGION 1..1189: note = ENSP00000403392
MDLPRGLVVAWALSLWPGFTDTFNMDTRKPRVIPGSRTAFFGYTVQQHDISGNKWLVVGAPLETNGYQKTGDVYKCPVIHGNCTKLNLGRVTLSNVSERKDNMRLGLSLATNPKDNSFLACSPLWSHECGSSYYTTGMCSRVNSNFRFSKTVAPALQRCQTYMDIVIVLDGSNSIYPWVEVQHFLINILKKFYIGPGQIQVGVVQYGEDVVHEFHLNDYRSVKDVVEAASHIEQRGGTETRTAFGIEFARSEAFQKGGRKGAKKVMIVITDGESHDSPDLEKVIQQSERDNVTRYAVAVLGYYNRRGINPETFLNEIKYIASDPDDKHFFNVTDEAALKDIVDALGDRIFSLEGTNKNETSFGLEMSQTGFSSHVVEDGVLLGAVGAYDWNGAVLKETSAGKVIPLRESYLKEFPEELKNHGAYLGYTVTSVVSSRQGRVYVAGAPRFNHTGKVILFTMHNNRSLTIHQAMRGQQIGSYFGSEITSVDIDGDGVTDVLLVGAPMYFNEGRERGKVYVYELRQNLFVYNGTLKDSHSYQNARFGSSIASVRDLNQDSYNDVVVGAPLEDNHAGAIYIFHGFRGSILKTPKQRITASELATGLQYFGCSIHGQLDLNEDGLIDLAVGALGNAVILWSRPVVQINASLHFEPSKINIFHRDCKRSGRDATCLAAFLCFTPIFLAPHFQTTTVGIRYNATMDERRYTPRAHLDEGGDRFTNRAVLLSSGQELCERINFHVLDTADYVKPVTFSVEYSLEDPDHGPMLDDGWPTTLRVSVPFWNGCNEDEHCVPDLVLDARSDLPTAMEYCQRVLRKPAQDCSAYTLSFDTTVFIIESTRQRVAVEATLENRGENAYSTVLNISQSANLQFASLIQKEDSDGSIECVNEERRLQKQVCNVSYPFFRAKAKVAFRLDFEFSKSIFLHHLEIELAAGSDSNERDSTKEDNVAPLRFHLKYEADVLFTRSSSLSHYEVKPNSSLERYDGIGPPFSCIFRIQNLGLFPIHGMMMKITIPIATRSGNRLLKLRDFLTDEVANTSCNIWGNSTEYRPTPVEEDLRRAPQLNHSNSDVVSINCNIRLVPNQEINFHLLGNLWLRSLKALKYKSMKIMVNAALQRQFHSPFIFREEDPSRQIVFEISKQEDWQVPIWIIVGSTLGGLLLLALLVLALWKLGFFRSARRRREPGLDPTPKVLE

SEQ ID NO: 30059 - protein, 1188 aa, Homo sapiens
  REGION 1..1188: note = ENSP00000327290
MDLPRGLVVAWALSLWPGFTDTFNMDTRKPRVIPGSRTAFFGYTVQQHDISGNKWLVVGAPLETNGYQKTGDVYKCPVIHGNCTKLNLGRVTLSNVSERKDNMRLGLSLATNPKDNSFLACSPLWSHECGSSYYTTGMCSRVNSNFRFSKTVAPALQRCQTYMDIVIVLDGSNSIYPWVEVQHFLINILKKFYIGPGQIQVGVVQYGEDVVHEFHLNDYRSVKDVVEAASHIEQRGGTETRTAFGIEFARSEAFQKGGRKGAKKVMIVITDGESHDSPDLEKVIQQSERDNVTRYAVAVLGYYNRRGINPETFLNEIKYIASDPDDKHFFNVTDEAALKDIVDALGDRIFSLEGTNKNETSFGLEMSQTGFSSHVVEDGVLLGAVGAYDWNGAVLKETSAGKVIPLRESYLKEFPEELKNHGAYLGYTVTSVVSSRQGRVYVAGAPRFNHTGKVILFTMHNNRSLTIHQAMRGQQIGSYFGSEITSVDIDGDGVTDVLLVGAPMYFNEGRERGKVYVYELRQNLFVYNGTLKDSHSYQNARFGSSIASVRDLNQDSYNDVVVGAPLEDNHAGAIYIFHGFRGSILKTPKQRITASELATGLQYFGCSIHGQLDLNEDGLIDLAVGALGNAVILWSRPVVQINASLHFEPSKINIFHRDCKRSGRDATCLAAFLCFTPIFLAPHFQTTTVGIRYNATMDERRYTPRAHLDEGGDRFTNRAVLLSSGQELCERINFHVLDTADYVKPVTFSVEYSLEDPDHGPMLDDGWPTTLRVSVPFWNGCNEDEHCVPDLVLDARSDLPTAMEYCQRVLRKPAQDCSAYTLSFDTTVFIIESTRQRVAVEATLENRGENAYSTVLNISQSANLQFASLIQKEDSDGSIECVNEERRLQKQVCNVSYPFFRAKAKVAFRLDFEFSKSIFLHHLEIELAAGSDSNERDSTKEDNVAPLRFHLKYEADVLFTRSSSLSHYEVKPNSSLERYDGIGPPFSCIFRIQNLGLFPIHGMMMKITIPIATRSGNRLLKLRDFLTDEANTSCNIWGNSTEYRPTPVEEDLRRAPQLNHSNSDVVSINCNIRLVPNQEINFHLLGNLWLRSLKALKYKSMKIMVNAALQRQFHSPFIFREEDPSRQIVFEISKQEDWQVPIWIIVGSTLGGLLLLALLVLALWKLGFFRSARRRREPGLDPTPKVLE

SEQ ID NO: 30060 - protein, 1181 aa, Homo sapiens
  REGION 1..1181: note = ENSP00000296585
MGPERTGAAPLPLLLVLALSQGILNCCLAYNVGLPEAKIFSGPSSEQFGYAVQQFINPKGNWLLVGSPWSGFPENRMGDVYKCPVDLSTATCEKLNLQTSTSIPNVTEMKTNMSLGLILTRNMGTGGFLTCGPLWAQQCGNQYYTTGVCSDISPDFQLSASFSPATQPCPSLIDVVVVCDESNSIYPWDAVKNFLEKFVQGLDIGPTKTQVGLIQYANNPRVVFNLNTYKTKEEMIVATSQTSQYGGDLTNTFGAIQYARKYAYSAASGGRRSATKVMVVVTDGESHDGSMLKAVIDQCNHDNILRFGIAVLGYLNRNALDTKNLIKEIKAIASIPTERYFFNVSDEAALLEKAGTLGEQIFSIEGTVQGGDNFQMEMSQVGFSADYSSQNDILMLGAVGAFGWSGTIVQKTSHGHLIFPKQAFDQILQDRNHSSYLGYSVAAISTGESTHFVAGAPRANYTGQIVLYSVNENGNITVIQAHRGDQIGSYFGSVLCSVDVDKDTITDVLLVGAPMYMSDLKKEEGRVYLFTIKEGILGQHQFLEGPEGIENTRFGSAIAALSDINMDGFNDVIVGSPLENQNSGAVYIYNGHQGTIRTKYSQKILGSDGAFRSHLQYFGRSLDGYGDLNGDSITDVSIGAFGQVVQLWSQSIADVAIEASFTPEKITLVNKNAQIILKLCFSAKFRPTKQNNQVAIVYNITLDADGFSSRVTSRGLFKENNERCLQKNMVVNQAQSCPEHIIYIQEPSDVVNSLDLRVDISLENPGTSPALEAYSETAKVFSIPFHKDCGEDGLCISDLVLDVRQIPAAQEQPFIVSNQNKRLTFSVTLKNKRESAYNTGIVVDFSENLFFASFSLPVDGTEVTCQVAASQKSVACDVGYPALKREQQVTFTINFDFNLQNLQNQASLSFQALSESQEENKADNLVNLKIPLLYDAEIHLTRSTNINFYEISSDGNVPSIVHSFEDVGPKFIFSLKVTTGSVPVSMATVIIHIPQYTKEKNPLMYLTGVQTDKAGDISCNADINPLKIGQTSSSVSFKSENFRHTKELNCRTASCSNVTCWLKDVHMKGEYFVNVTTRIWNGTFASSTFQTVQLTAAAEINTYNPEIYVIEDNTVTIPLMIMKPDEKAEVPTGVIIGSIIAGILLLLALVAILWKLGFFKRKYEKMTKNPDEIDETTELSS

SEQ ID NO: 30061 - protein, 175 aa, Homo sapiens
  REGION 1..175: note = ENSP00000426489
MGPERTGAAPLPLLLVLALSQGILNCCLAYNVGLPEAKIFSGPSSEQFGYAVQQFINPKGNWLLVGSPWSGFPENRMGDVYKCPVDLSTATCEKLNLQTSTSIPNVTEMKTNMSLGLILTRNMGTGGFLTCGPLWAQQCGNQYYTTGVCSDISPDFQLSASFSPATQRGVNSVCQ

SEQ ID NO: 30062 - protein, 54 aa, Homo sapiens
  REGION 1..54: note = ENSP00000422095
MGPERTGAAPLPLLLVLALSQGYWLVHPGVAFLRTEWEMCINVLLTYPLPHVKN

SEQ ID NO: 30063 - protein, 815 aa, Homo sapiens
  REGION 1..815: note = ENSP00000424397
MGPERTGAAPLPLLLVLALSQGILNCCLAYNVGLPEAKIFSGPSSEQFGYAVQQFINPKGNWLLVGSPWSGFPENRMGDVYKCPVDLSTATCEKLNLQTSTSIPNVTEMKTNMSLGLILTRNMGTGGFLTCGPLWAQQCGNQYYTTGVCSDISPDFQLSASFSPATQPCPSLIDVVVVCDESNSIYPWDAVKNFLEKFVQGLDIGPTKTQVGLIQYANNPRVVFNLNTYKTKEEMIVATSQTSQYGGDLTNTFGAIQYARKYAYSAASGGRRSATKVMVVVTDGESHDGSMLKAVIDQCNHDNILRFGIAVLGYLNRNALDTKNLIKEIKAIASIPTERYFFNVSDEAALLEKAGTLGEQIFSIEGTVQGGDNFQMEMSQVGFSADYSSQNDILMLGAVGAFGWSGTIVQKTSHGHLIFPKQAFDQILQDRNHSSYLGYSVAAISTGESTHFVAGAPRANYTGQIVLYSVNENGNITVIQAHRGDQIGSYFGSVLCSVDVDKDTITDVLLVGAPMYMSDLKKEEGRVYLFTIKEGILGQHQFLEGPEGIENTRFGSAIAALSDINMDGFNDVIVGSPLENQNSGAVYIYNGHQGTIRTKYSQKILGSDGAFRSHLQYFGRSLDGYGDLNGDSITDVSIGAFGQVVQLWSQSIADVAIEASFTPEKITLVNKNAQIILKLCFSAKFRPTKQNNQVAIVYNITLDADGFSSRVTSRGLFKENNERCLQKNMVVNQAQSCPEHIIYIQEPSDVVNSLDLRVDISLENPGTSPALEAYSETAKVFSIPFHKDCGEDGLCISDLVLDVRQIPAAQLMGQK

SEQ ID NO: 30064 - protein, 641 aa, Homo sapiens
  REGION 1..641: note = ENSP00000424642
MGPERTGAAPLPLLLVLALSQGILNCCLAYNVGLPEAKIFSGPSSEQFGYAVQQFINPKGNWLLVGSPWSGFPENRMGDVYKCPVDLSTATCEKLNLQTSTSIPNVTEMKTNMSLGLILTRNMGTGGFLTCGPLWAQQCGNQYYTTGVCSDISPDFQLSASFSPATQPCPSLIDVVVVCDESNSIYPWDAVKNFLEKFVQGLDIGPTKTQVGLIQYANNPRVVFNLNTYKTKEEMIVATSQTSQYGGDLTNTFGAIQYARKYAYSAASGGRRSATKVMVVVTDGESHDGSMLKAVIDQCNHDNILRFGIAVLGYLNRNALDTKNLIKEIKAIASIPTERYFFNVSDEAALLEKAGTLGEQIFSIEGTVQGGDNFQMEMSQVGFSADYSSQNDILMLGAVGAFGWSGTIVQKTSHGHLIFPKQAFDQILQDRNHSSYLGYSVAAISTGESTHFVAGAPRANYTGQIVLYSVNENGNITVIQAHRGDQIGSYFGSVLCSVDVDKDTITDVLLVGAPMYMSDLKKEEGRVYLFTIKEGILGQHQFLEGPEGIENTRFGSAIAALSDINMDGFNDVIVGSPLENQNSGAVYIYNGHQGTIRTKYSQLLCTIISCQTCSFRKSWDPMEPLGAISSTLGGPWMAMEI

SEQ ID NO: 30065 - protein, 942 aa, Homo sapiens
  REGION 1..942: note = ENSP00000422145
MGPERTGAAPLPLLLVLALSQGILNCCLAYNVGLPEAKIFSGPSSEQFGYAVQQFINPKGNWLLVGSPWSGFPENRMGDVYKCPVDLSTATCEKLNLQTSTSIPNVTEMKTNMSLGLILTRNMGTGGFLTCGPLWAQQCGNQYYTTGVCSDISPDFQLSASFSPATQPCPSLIDVVVVCDESNSIYPWDAVKNFLEKFVQGLDIGPTKTQVGLIQYANNPRVVFNLNTYKTKEEMIVATSQTSQYGGDLTNTFGAIQYARKYAYSAASGGRRSATKVMVVVTDGESHDGSMLKAVIDQCNHDNILRFGIAVLGYLNRNALDTKNLIKEIKAIASIPTERYFFNVSDEAALLEKAGTLGEQIFSIEGTVQGGDNFQMEMSQVGFSADYSSQNDILMLGAVGAFGWSGTIVQKTSHGHLIFPKQAFDQILQDRNHSSYLGYSVAAISTGESTHFVAGAPRANYTGQIVLYSVNENGNITVIQAHRGDQIGSYFGSVLCSVDVDKDTITDVLLVGAPMYMSDLKKEEGRVYLFTIKEGILGQHQFLEGPEGIENTRFGSAIAALSDINMDGFNDVIVGSPLENQNSGAVYIYNGHQGTIRTKYSQKILGSDGAFRSHLQYFGRSLDGYGDLNGDSITDVSIGAFGQVVQLWSQSIADVAIEASFTPEKITLVNKNAQIILKLCFSAKFRPTKQNNQVAIVYNITLDADGFSSRVTSRGLFKENNERCLQKNMVVNQAQSCPEHIIYIQEPSDVVNSLDLRVDISLENPGTSPALEAYSETAKVFSIPFHKDCGEDGLCISDLVLDVRQIPAAQEQPFIVSNQNKRLTFSVTLKNKRESAYNTGIVVDFSENLFFASFSLPVDGTEVTCQVAASQKSVACDVGYPALKREQQVTFTINFDFNLQNLQNQASLSFQALSESQEENKADNLVNLKIPLLYDAEIHLTR

SEQ ID NO: 30066 - protein, 195 aa, Homo sapiens
  REGION 1..195: note = ENSP00000340149
MAWEARREPGPRRAAVRETVMLLLCLGVPTGRPYNVDTESALLYQGPHNTLFGYSVVLHSHGANRWLLVGAPTANWLANASVINPGAIYRCRIGKNPGQTCEQLQLGSPNGEPCGKTCLEERDNQWLGVTLSRQPGENGSIVTCGHRWKNIFYIKNENKLPTGGCYGVPPDLRTELSKRIAPCYQGSISKYRART

SEQ ID NO: 30067 - protein, 1032 aa, Homo sapiens [sequence omitted]

SEQ ID NO: 30068 - protein, 614 aa, Homo sapiens
  REGION 1..614: note = ENSP00000233573
MAWEARREPGPRRAAVRETVMLLLCLGVPTGRPYNVDTESALLYQGPHNTLFGYSVVLHSHGANRWLLVGAPTANWLANASVINPGAIYRCRIGKNPGQTCEQLQLGSPNGEPCGKTCLEERDNQWLGVTLSRQPGENGSIVTCGHRWKNIFYIKNENKLPTGGCYGVPPDLRTELSKRIAPCYQDYVKKFGENFASCQAGISSFYTKDLIVMGAPGSSYWTGSLFVYNITTNKYKAFLDKQNQVKFGSYLGYSVGAGHFRSQHTTEVVGGAPQHEQIGKAYIFSIDEKELNILHEMKGKKLGSYFGASVCAVDLNADGFSDLLVGAPMQSTIREEGRVFVYINSGSGAVMNAMETNLVGSDKYAARFGESIVNLGDIDNDGFEDVAIGAPQEDDLQGAIYIYNGRADGISSTFSQRIEGLQISKSLSMFGQSISGQIDADNNGYVDVAVGAFRSDSAVLLRTRPVVIVDASLSHPESVNRTKFDCVENGWPSVCIDLTLCFSYKGKEVPGYIVLFYNMSLDVNRKAESPPRFYFSSNGTSDVITGSIQVSSREANCRTHQAFMRKDVRDILTPIQIEAAYHLGPHVISKRSTEEFPPLQPILQQKKEKDIMKK

SEQ ID NO: 30069 - protein, 1049 aa, Homo sapiens
  REGION 1..1049: note = ENSP00000293379
MGSRTPESPLHAVQLRWGPRRRPPLLPLLLLLLPPPPRVGGFNLDAEAPAVLSGPPGSFFGFSVEFYRPGTDGVSVLVGAPKANTSQPGVLQGGAVYLCPWGASPTQCTPIEFDSKGSRLLESSLSSSEGEEPVEYKSLQWFGATVRAHGSSILACAPLYSWRTEKEPLSDPVGTCYLSTDNFTRILEYAPCRSDFSWAAGQGYCQGGFSAEFTKTGRVVLGGPGSYFWQGQILSATQEQIAESYYPEYLINLVQGQLQTRQASSIYDDSYLGYSVAVGEFSGDDTEDFVAGVPKGNLTYGYVTILNGSDIRSLYNFSGEQMASYFGYAVAATDVNGDGLDDLLVGAPLLMDRTPDGRPQEVGRVYVYLQHPAGIEPTPTLTLTGHDEFGRFGSSLTPLGDLDQDGYNDVAIGAPFGGETQQGVVFVFPGGPGGLGSKPSQVLQPLWAASHTPDFFGSALRGGRDLDGNGYPDLIVGSFGVDKAVVYRGRPIVSASASLTIFPAMFNPEERSCSLEGNPVACINLSFCLNASGKHVADSIGFTVELQLDWQKQKGGVRRALFLASRQATLTQTLLIQNGAREDCREMKIYLRNESEFRDKLSPIHIALNFSLDPQAPVDSHGLRPALHYQSKSRIEDKAQILLDCGEDNICVPDLQLEVFGEQNHVYLGDKNALNLTFHAQNVGEGGAYEAELRVTAPPEAEYSGLVRHPGNFSSLSCDYFAVNQSRLLVCDLGNPMKAGASLWGGLRFTVPHLRDTKKTIQFDFQILSKNLNNSQSDVVSFRLSVEAQAQVTLNGVSKPEAVLFPVSDWHPRDQPQKEEDLGPAVHHVYELINQGPSSISQGVLELSCPQALEGQQLLYVTRVTGLNCTTNHPINPKGLELDPEGSLHHQQKREAPSRSSASSGPQILKCPEAECFRLRCELGPLHQQESQSLQLHFRVWAKTFLQREHQPFSLQCEAVYKALKMPYRILPRQLPQKERQVATAVQWTKAEGSYGVPLWIIILAILFGLLLLGLLIYILYKLGFFKRSLPYGTAMEKAQLKPPATSDA

SEQ ID NO: 30070 - protein, 119 aa, Homo sapiens
  REGION 1..119: note = ENSP00000450267
  VARIANT 1: note = Any amino acid
XREAPSRSSASSGPQILREHQPFSLQCEAVYKALKMPYRILPRQLPQKERQVATAVQWTKAEGSYGVPLWIIILAILFGLLLLGLLIYILYKLGFFKRSLPYGTAMEKAQLKPPATSDA

SEQ ID NO: 30071 - protein, 137 aa, Homo sapiens
  REGION 1..137: note = ENSP00000405865
MGSRTPESPLHAVQLRWGPRRRPPLLPLLLLLLPPPPRVGGFNLDAEAPAVLSGPPGSFFGFSVEFYRPGTDGLSAPGVLTVQLRGRGACGVQVLAVVRGNSSSPWLLHLGMRSTVQLAHREGATERPRGHLLPLHR

SEQ ID NO: 30072 - protein, 120 aa, Homo sapiens
  REGION 1..120: note = ENSP00000447347
  VARIANT 1: note = Any amino acid
XLLPLLLLLLPPPPRVGGFNLDAEAPAVLSGPPGSFFGFSVEFYRPGTDGVSVLVGAPKANTSQPGVLQGGAVYLCPWGASPTQCTPIEFDSKGMRSTVQLAHREGATERPRGHLLPLHR

SEQ ID NO: 30073 - protein, 1141 aa, Homo sapiens
  REGION 1..1141: note = ENSP00000452120
MAGARSRDPWGASGICYLFGSLLVELLFSRAVAFNLDVMGALRKEGEPGSLFGFSVALHRQLQPRPQSWLLVGAPQALALPGQQANRTGGLFACPLSLEETDCYRVDIDQGADMQKESKENQWLGVSVRSQGPGGKIVTCAHRYEARQRVDQILETRDMIGRCFVLSQDLAIRDELDGGEWKFCEGRPQGHEQFGFCQQGTAAAFSPDSHYLLFGAPGTYNWKGTARVELCAQGSADLAHLDDGPYEAGGEKEQDPRLIPVPANSYFGFSIDSGKGLVRAEELSFVAGAPRANHKGAVVILRKDSASRLVPEVMLSGERLTSGFGYSLAVADLNSDGWPDLIVGAPYFFERQEELGGAVYVYLNQGGHWAGISPLRLCGSPDSMFGISLAVLGDLNQDGFPDIAVGAPFDGDGKVFIYHGSSLGVVAKPSQVLEGEAVGIKSFGYSLSGSLDMDGNQYPDLLVGSLADTAVLFRARPILHVSHEVSIAPRSIDLEQPNCAGGHSVCVDLRVCFSYIAVPSSYSPTVALDYVLDADTDRRLRGQVPRVTFLSRNLEEPKHQASGTVWLKHQHDRVCGDAMFQLQENVKDKLRAIVVTLSYSLQTPRLRRQAPGQGLPPVAPILNAHQPSTQRAEIHFLKQGCGEDKICQSNLQLVRARFCTRVSDTEFQPLPMDVDGTTALFALSGQPVIGLELMVTNLPSDPAQPQADGDDAHEAQLLVMLPDSLHYSGVRALDPAEKPLCLSNENASHVECELGNPMKRGAQVTFYLILSTSGISIETTELEVELLLATISEQELHPVSARARVFIELPLSIAGMAIPQQLFFSGVVRGERAMQSERDVGSKVKYEVTVSNQGQSLRTLGSAFLNIMWPHEIANGKWLLYPMQVELEGGQGPGQKGLCSPRPNILHLDVDSRDRRRRELEPPEQQEPGERQEPSMSWWPVSSAEKKKNITLDCARGTANCVVFSCPLYSFDRAAVLHVWGRLWNSTFLEEYSAVKSLEVIVRANITVKSSIKNLMLRDASTVIPVMVYLDPMAVVAEGVPWWVILLAVLAGLLVLALLVLLLWKMGFFKRAKHPEATVPQYHAVKIPREDRQQFKEEKTGTILRNNWGSPRREGPDAHPILAADGHPELGPDGHPGPGTA

SEQ ID NO: 30074 - protein, 1137 aa, Homo sapiens
  REGION 1..1137: note = ENSP00000257879
MAGARSRDPWGASGICYLFGSLLVELLFSRAVAFNLDVMGALRKEGEPGSLFGFSVALHRQLQPRPQSWLLVGAPQALALPGQQANRTGGLFACPLSLEETDCYRVDIDQGADMQKESKENQWLGVSVRSQGPGGKIVTCAHRYEARQRVDQILETRDMIGRCFVLSQDLAIRDELDGGEWKFCEGRPQGHEQFGFCQQGTAAAFSPDSHYLLFGAPGTYNWKGLLFVTNIDSSDPDQLVYKTLDPADRLPGPAGDLALNSYLGFSIDSGKGLVRAEELSFVAGAPRANHKGAVVILRKDSASRLVPEVMLSGERLTSGFGYSLAVADLNSDGWPDLIVGAPYFFERQEELGGAVYVYLNQGGHWAGISPLRLCGSPDSMFGISLAVLGDLNQDGFPDIAVGAPFDGDGKVFIYHGSSLGVVAKPSQVLEGEAVGIKSFGYSLSGSLDMDGNQYPDLLVGSLADTAVLFRARPILHVSHEVSIAPRSIDLEQPNCAGGHSVCVDLRVCFSYIAVPSSYSPTVALDYVLDADTDRRLRGQVPRVTFLSRNLEEPKHQASGTVWLKHQHDRVCGDAMFQLQENVKDKLRAIVVTLSYSLQTPRLRRQAPGQGLPPVAPILNAHQPSTQRAEIHFLKQGCGEDKICQSNLQLVRARFCTRVSDTEFQPLPMDVDGTTALFALSGQPVIGLELMVTNLPSDPAQPQADGDDAHEAQLLVMLPDSLHYSGVRALDPAEKPLCLSNENASHVECELGNPMKRGAQVTFYLILSTSGISIETTELEVELLLATISEQELHPVSARARVFIELPLSIAGMAIPQQLFFSGVVRGERAMQSERDVGSKVKYEVTVSNQGQSLRTLGSAFLNIMWPHEIANGKWLLYPMQVELEGGQGPGQKGLCSPRPNILHLDVDSRDRRRRELEPPEQQEPGERQEPSMSWWPVSSAEKKKNITLDCARGTANCVVFSCPLYSFDRAAVLHVWGRLWNSTFLEEYSAVKSLEVIVRANITVKSSIKNLMLRDASTVIPVMVYLDPMAVVAEGVPWWVILLAVLAGLLVLALLVLLLWKMGFFKRAKHPEATVPQYHAVKIPREDRQQFKEEKTGTILRNNWGSPRREGPDAHPILAADGHPELGPDGHPGPGTA

SEQ ID NO: 30075 - protein, 109 aa, Homo sapiens
  REGION 1..109: note = ENSP00000450693
  VARIANT 1: note = Any amino acid
XVKDKLRAIVVTLSYSLQTPRLRRQAPGQGLPPVAPILNAHQPSTQRAEIHFLKQGCGEDKICQSNLQLVRARFCTRVSDTEFQPLPMRSHSACPMRMPPMLSVSWGTP

SEQ ID NO: 30076 - protein, 1131 aa, Homo sapiens
  REGION 1..1131: note = ENSP00000343009
MAGARSRDPWGASGICYLFGSLLVELLFSRAVAFNLDVMGALRKEGEPGSLFGFSVALHRQLQPRPQSWLLVGAPQALALPGQQANRTGGLFACPLSLEETDCYRVDIDQGADMQKESKENQWLGVSVRSQGPGGKIVTCAHRYEARQRVDQILETRDMIGRCFVLSQDLAIRDELDGGEWKFCEGRPQGHEQFGFCQQGTAAAFSPDSHYLLFGAPGTYNWKGLLFVTNIDSSDPDQLVYKTLDPADRLPGPAGDLALNSYLGFSIDSGKGLVRAEELSFVAGAPRANHKGAVVILRKDSASRLVPEVMLSGERLTSGFGYSLAVADLNSDGWPDLIVGAPYFFERQEELGGAVYVYLNQGGHWAGISPLRLCGSPDSMFGISLAVLGDLNQDGFPDIAVGAPFDGDGKVFIYHGSSLGVVAKPSQVLEGEAVGIKSFGYSLSGSLDMDGNQYPDLLVGSLADTAVLFRARPILHVSHEVSIAPRSIDLEQPNCAGGHSVCVDLRVCFSYIAVPSSYSPTVDADTDRRLRGQVPRVTFLSRNLEEPKHQASGTVWLKHQHDRVCGDAMFQLQENVKDKLRAIVVTLSYSLQTPRLRRQAPGQGLPPVAPILNAHQPSTQRAEIHFLKQGCGEDKICQSNLQLVRARFCTRVSDTEFQPLPMDVDGTTALFALSGQPVIGLELMVTNLPSDPAQPQADGDDAHEAQLLVMLPDSLHYSGVRALDPAEKPLCLSNENASHVECELGNPMKRGAQVTFYLILSTSGISIETTELEVELLLATISEQELHPVSARARVFIELPLSIAGMAIPQQLFFSGVVRGERAMQSERDVGSKVKYEVTVSNQGQSLRTLGSAFLNIMWPHEIANGKWLLYPMQVELEGGQGPGQKGLCSPRPNILHLDVDSRDRRRRELEPPEQQEPGERQEPSMSWWPVSSAEKKKNITLDCARGTANCVVFSCPLYSFDRAAVLHVWGRLWNSTFLEEYSAVKSLEVIVRANITVKSSIKNLMLRDASTVIPVMVYLDPMAVVAEGVPWWVILLAVLAGLLVLALLVLLLWKMGFFKRAKHPEATVPQYHAVKIPREDRQQFKEEKTGTILRNNWGSPRREGPDAHPILAADGHPELGPDGHPGPGTA

SEQ ID NO: 30077 - protein, 1044 aa, Homo sapiens
  REGION 1..1044: note = ENSP00000393844
MAPFATPMVQALTTTRIQRQAEGFQCWRECGTRRSPFEGKETCAHRYEARQRVDQILETRDMIGRCFVLSQDLAIRDELDGGEWKFCEGRPQGHEQFGFCQQGTAAAFSPDSHYLLFGAPGTYNWKGTARVELCAQGSADLAHLDDGPYEAGGEKEQDPRLIPVPANSYFGFSIDSGKGLVRAEELSFVAGAPRANHKGAVVILRKDSASRLVPEVMLSGERLTSGFGYSLAVADLNSDGWPDLIVGAPYFFERQEELGGAVYVYLNQGGHWAGISPLRLCGSPDSMFGISLAVLGDLNQDGFPDIAVGAPFDGDGKVFIYHGSSLGVVAKPSQVLEGEAVGIKSFGYSLSGSLDMDGNQYPDLLVGSLADTAVLFRARPILHVSHEVSIAPRSIDLEQPNCAGGHSVCVDLRVCFSYIAVPSSYSPTVALDYVLDADTDRRLRGQVPRVTFLSRNLEEPKHQASGTVWLKHQHDRVCGDAMFQLQENVKDKLRAIVVTLSYSLQTPRLRRQAPGQGLPPVAPILNAHQPSTQRAEIHFLKQGCGEDKICQSNLQLVRARFCTRVSDTEFQPLPMDVDGTTALFALSGQPVIGLELMVTNLPSDPAQPQADGDDAHEAQLLVMLPDSLHYSGVRALDPAEKPLCLSNENASHVECELGNPMKRGAQVTFYLILSTSGISIETTELEVELLLATISEQELHPVSARARVFIELPLSIAGMAIPQQLFFSGVVRGERAMQSERDVGSKVKYEVTVSNQGQSLRTLGSAFLNIMWPHEIANGKWLLYPMQVELEGGQGPGQKGLCSPRPNILHLDVDSRDRRRRELEPPEQQEPGERQEPSMSWWPVSSAEKKKNITLDCARGTANCVVFSCPLYSFDRAAVLHVWGRLWNSTFLEEYSAVKSLEVIVRANITVKSSIKNLMLRDASTVIPVMVYLDPMAVVAEGVPWWVILLAVLAGLLVLALLVLLLWKMGFFKRAKHPEATVPQYHAVKIPREDRQQFKEEKTGTILRNNWGSPRREGPDAHPILAADGHPELGPDGHPGPGTA

SEQ ID NO: 30078 - protein, 1181 aa, Homo sapiens
  REGION 1..1181: note = ENSP00000452387
MAGARSRDPWGASGICYLFGSLLVELLFSRAVAFNLDVMGALRKEGEPGSLFGFSVALHRQLQPRPQSWLLVGAPQALALPGQQANRTGGLFACPLSLEETDCYRVDIDQGADMQKESKENQWLGVSVRSQGPGGKIVTCAHRYEARQRVDQILETRDMIGRCFVLSQDLAIRDELDGGEWKFCEGRPQGHEQFGFCQQGTAAAFSPDSHYLLFGAPGTYNWKGTARVELCAQGSADLAHLDDGPYEAGGEKEQDPRLIPVPANSYFGLLFVTNIDSSDPDQLVYKTLDPADRLPGPAGDLALNSYLGFSIDSGKGLVRAEELSFVAGAPRANHKGAVVILRKDSASRLVPEVMLSGERLTSGFGYSLAVADLNSDGWPDLIVGAPYFFERQEELGGAVYVYLNQGGHWAGISPLRLCGSPDSMFGISLAVLGDLNQDGFPDIAVGAPFDGDGKVFIYHGSSLGVVAKPSQVLEGEAVGIKSFGYSLSGSLDMDGNQYPDLLVGSLADTAVLFRARPILHVSHEVSIAPRSIDLEQPNCAGGHSVCVDLRVCFSYIAVPSSYSPTVALDYVLDADTDRRLRGQVPRVTFLSRNLEEPKHQASGTVWLKHQHDRVCGDAMFQLQENVKDKLRAIVVTLSYSLQTPRLRRQAPGQGLPPVAPILNAHQPSTQRAEIHFLKQGCGEDKICQSNLQLVRARFCTRVSDTEFQPLPMDVDGTTALFALSGQPVIGLELMVTNLPSDPAQPQADGDDAHEAQLLVMLPDSLHYSGVRALDPAEKPLCLSNENASHVECELGNPMKRGAQVTFYLILSTSGISIETTELEVELLLATISEQELHPVSARARVFIELPLSIAGMAIPQQLFFSGVVRGERAMQSERDVGSKVKYEVTVSNQGQSLRTLGSAFLNIMWPHEIANGKWLLYPMQVELEGGQGPGQKGLCSPRPNILHLDVDSRDRRRRELEPPEQQEPGERQEPSMSWWPVSSAEKKKNITLDCARGTANCVVFSCPLYSFDRAAVLHVWGRLWNSTFLEEYSAVKSLEVIVRANITVKSSIKNLMLRDASTVIPVMVYLDPMAVVAEGVPWWVILLAVLAGLLVLALLVLLLWKMGFFKRAKHPEATVPQYHAVKIPREDRQQFKEEKTGTILRNNWGSPRREGPDAHPILAADGHPELGPDGHPGPGTA

SEQ ID NO: 30079 - protein, 205 aa, Homo sapiens
  REGION 1..205: note = ENSP00000451039
  VARIANT 1: note = Any amino acid
XCAACLGPSLEQHLSGGVLSCEVPGSDCPGQHHSEVLHKELDAPRCLHSDPSDGILGPHGCGGRRSALVGHPPGCTGWAAGASTAGAAPVEVWLLPSEQPELIFSHQLSPGLSGCAAFSHGSWGSRDCGMGFFKRAKHPEATVPQYHAVKIPREDRQQFKEEKTGTILRNNWGSPRREGPDAHPILAADGHPELGPDGHPGPGTA

SEQ ID NO: 30080 - protein, 98 aa, Homo sapiens
  REGION 1..98: note = ENSP00000450679
MVQALTTTRIQRQAEGFQCWRGFSIDSGKGLVRAEELSFVAGAPRANHKGAVVILRKDSASRLVPEVMLSGERLTSGFGYSLAVADLNSDGYCSGCPL

SEQ ID NO: 30081 - protein, 153 aa, Homo sapiens
  REGION 1..153: note = ENSP00000450578
MIGRCFVLSQDLAIRDELDGGEWKFCEGRPQGHEQFGFCQQGTAAAFSPDSHYLLFGAPGTYNWKGLLFVTNIDSSDPDQLVYKTLDPADRLPGPAGDLALNSYLGFSIDSGKGLVRAEELSFVAGAPRANHKGAVVILRKDSASRLVPEVML

SEQ ID NO: 30082 - protein, 55 aa, Homo sapiens
  REGION 1..55: note = ENSP00000451311
MAPFATPMVQALTTTRIQRQAEGFQCWRGCWWVLPRPWLFLGSRRIALEASSLAR

SEQ ID NO: 30083 - protein, 35 aa, Homo sapiens
  REGION 1..35: note = ENSP00000452043
  VARIANT 1: note = Any amino acid
XEGFQCWRGCWWVLPRPWLFLGSRRIALEASSLAR

SEQ ID NO: 30084 - protein, 48 aa, Homo sapiens
  REGION 1..48: note = ENSP00000452467
MVQALTTTRIQRQAEGFQCWRGCWWVLPRPWLFLGSRRIALEASSLAR

SEQ ID NO: 30085 - protein, 48 aa, Homo sapiens; identical to SEQ ID NO: 30084
  REGION 1..48: note = ENSP00000450798

SEQ ID NO: 30086 - protein, 1063 aa, Homo sapiens
  REGION 1..1063: note = ENSP00000367316
MSPGASRGPRGSQAPLIAPLCCAAAALGMLLWSPACQAFNLDVEKLTVYSGPKGSYFGYAVDFHIPDARTASVLVGAPKANTSQPDIVEGGAVYYCPWPAEGSAQCRQIPFDTTNNRKIRVNGTKEPIEFKSNQWFGATVKAHKGKVVACAPLYHWRTLKPTPEKDPVGTCYVAIQNFSAYAEFSPCRNSNADPEGQGYCQAGFSLDFYKNGDLIVGGPGSFYWQGQVITASVADIIANYSFKDILRKLAGEKQTEVAPASYDDSYLGYSVAAGEFTGDSQQELVAGIPRGAQNFGYVSIINSTDMTFIQNFTGEQMASYFGYTVVVSDVNSDGLDDVLVGAPLFMEREFESNPREVGQIYLYLQVSSLLFRDPQILTGTETFGRFGSAMAHLGDLNQDGYNDIAIGVPFAGKDQRGKVLIYNGNKDGLNTKPSQVLQGVWASHAVPSGFGFTLRGDSDIDKNDYPDLIVGAFGTGKVAVYRARPVVTVDAQLLLHPMIINLENKTCQVPDSMTSAACFSLRVCASVTGQSIANTIVLMAEVQLDSLKQKGAIKRTLFLDNHQAHRVFPLVIKRQKSHQCQDFIVYLRDETEFRDKLSPINISLNYSLDESTFKEGLEVKPILNYYRENIVSEQAHILVDCGEDNLCVPDLKLSARPDKHQVIIGDENHLMLIINARNEGEGAYEAELFVMIPEEADYVGIERNNKGFRPLSCEYKMENVTRMVVCDLGNPMVSGTNYSLGLRFAVPRLEKTNMSINFDLQIRSSNKDNPDSNFVSLQINITAVAQVEIRGVSHPPQIVLPIHNWEPEEEPHKEEEVGPLVEHIYELHNIGPSTISDTILEVGWPFSARDEFLLYIFHIQTLGPLQCQPNPNINPQDIKPAASPEDTPELSAFLRNSTIPHLVRKRDVHVVEFHRQSPAKILNCTNIECLQISCAVGRLEGGESAVLKVRSRLWAHTFLQRKNDPYALASLVSFEVKKMPYTDQPAKLPEGSIVIKTSVIWATPNVSFSIPLWVIILAILLGLLVLAILTLALWKCGFFDRARPPQEDMTDREQLTNDKTPEA

SEQ ID NO: 30087 - protein, 632 aa, Homo sapiens
  REGION 1..632: note = ENSP00000397258
MGGPAAPRGAGRLRALLLALVVAGIPAGAYNLDPQRPVHFQGPADSFFGYAVLEHFHDNTRWVLVGAPKADSKYSPSVKSPGAVFKCRVHTNPDRRCTELDMARGKNRGTSCGKTCREDRDDEWMGVSLARQPKADGRVLACAHRWKNIYYEADHILPHGFCYIIPSNLQAKGRTLIPCYEEYKKKYGEEHGSCQAGIAGFFTEELVVMGAPGSFYWAGTIKVLNLTDNTYLKLNDEVIMNRRYTYLGYAVTAGHFSHPSTIDVVGGAPQDKGIGKVYIFRADRRSGTLIKIFQASGKKMGSYFGSSLCAVDLNGDGLSDLLVGAPMFSEIRDEGQVTVYINRGNGALEEQLALTGDGAYNAHFGESIASLDDLDNDGFPDVAIGAPKEDDFAGAVYIYHGDAGGIVPQYSMKLSGQKINPVLRMFGQSISGGIDMDGNGYPDVTVGAFMSDSVVLLRARPVITVDVSIFLPGSINITAPQCHDGQQPVNCLNVTTCFSFHGKHVPGEIGLNYVLMADVAKKEKGQMPRVYFVLLGETMGQVTEKLQLTYMEETCRHYVAHVKRRVQDVISPIVFEAAYSLSEHVTGEEERELPPLTPVLRWKKGQKIAQKNQVRTLKLILSTQGGSCTEQK

SEQ ID NO: 30088 - protein, 1035 aa, Homo sapiens
  REGION 1..1035: note = ENSP00000264741
MGGPAAPRGAGRLRALLLALVVAGIPAGAYNLDPQRPVHFQGPADSFFGYAVLEHFHDNTRWVLVGAPKADSKYSPSVKSPGAVFKCRVHTNPDRRCTELDMARGKNRGTSCGKTCREDRDDEWMGVSLARQPKADGRVLACAHRWKNIYYEADHILPHGFCYIIPSNLQAKGRTLIPCYEEYKKKYGEEHGSCQAGIAGFFTEELVVMGAPGSFYWAGTIKVLNLTDNTYLKLNDEVIMNRRYTYLGYAVTAGHFSHPSTIDVVGGAPQDKGIGKVYIFRADRRSGTLIKIFQASGKKMGSYFGSSLCAVDLNGDGLSDLLVGAPMFSEIRDEGQVTVYINRGNGALEEQLALTGDGAYNAHFGESIASLDDLDNDGFPDVAIGAPKEDDFAGAVYIYHGDAGGIVPQYSMKLSGQKINPVLRMFGQSISGGIDMDGNGYPDVTVGAFMSDSVVLLRARPVITVDVSIFLPGSINITAPQCHDGQQPVNCLNVTTCFSFHGKHVPGEIGLNYVLMADVAKKEKGQMPRVYFVLLGETMGQVTEKLQLTYMEETCRHYVAHVKRRVQDVISPIVFEAAYSLSEHVTGEEERELPPLTPVLRWKKGQKIAQKNQTVFERNCRSEDCAADLQLQGKLLLSSMDEKTLYLALGAVKNISLNISISNLGDDAYDANVSFNVSRELFFINMWQKEEMGISCELLESDFLKCSVGFPFMRSKSKYEFSVIFDTSHLSGEEEVLSFIVTAQSGNTERSESLHDNTLVLMVPLMHEVDTSITGIMSPTSFVYGESVDAANFIQLDDLECHFQPINITLQVYNTGPSTLPGSSVSISFPNRLSSGGAEMFHVQEMVVGQEKGNCSFQKNPTPCIIPQEQENIFHTIFAFFTKSGRKVLDCEKPGISCLTAHCNFSALAKEESRTIDIYMLLNTEILKKDSSSVIQFMSRAKVKVDPALRVVEIAHGNPEEVTVVFEALHNLEPRGYVVGWIIAISLLVGILIFLLLAVLLWKMGFFRRRYKEIIEAEKNRKENEDSWDWVQKNQ

SEQ ID NO: 30089 - protein, 69 aa, Homo sapiens
  REGION 1..69: note = ENSP00000406533
  VARIANT 1: note = Any amino acid
XKKDSSSVIQFMSRAKVKVDPALRVVEIAHGNPEEVTMGFFRRRYKEIIEAEKNRKENEDSWDWVQKNQ

SEQ ID NO: 30090 - protein, 1048 aa, Homo sapiens
  REGION 1..1048: note = ENSP00000261023
MAFPPRRRLRLGPRGLPLLLSGLLLPLCRAFNLDVDSPAEYSGPEGSYFGFAVDFFVPSASSRMFLLVGAPKANTTQPGIVEGGQVLKCDWSSTRRCQPIEFDATGNRDYAKDDPLEFKSHQWFGASVRSKQDKILACAPLYHWRTEMKQEREPVGTCFLQDGTKTVEYAPCRSQDIDADGQGFCQGGFSIDFTKADRVLLGGPGSFYWQGQLISDQVAEIVSKYDPNVYSIKYNNQLATRTAQAIFDDSYLGYSVAVGDFNGDGIDDFVSGVPRAARTLGMVYIYDGKNMSSLYNFTGEQMAAYFGFSVAATDINGDDYADVFIGAPLFMDRGSDGKLQEVGQVSVSLQRASGDFQTTKLNGFEVFARFGSAIAPLGDLDQDGFNDIAIAAPYGGEDKKGIVYIFNGRSTGLNAVPSQILEGQWAARSMPPSFGYSMKGATDIDKNGYPDLIVGAFGVDRAILYRARPVITVNAGLEVYPSILNQDNKTCSLPGTALKVSCFNVRFCLKADGKGVLPRKLNFQVELLLDKLKQKGAIRRALFLYSRSPSHSKNMTISRGGLMQCEELIAYLRDESEFRDKLTPITIFMEYRLDYRTAADTTGLQPILNQFTPANISRQAHILLDCGEDNVCKPKLEVSVDSDQKKIYIGDDNPLTLIVKAQNQGEGAYEAELIVSIPLQADFIGVVRNNEALARLSCAFKTENQTRQVVCDLGNPMKAGTQLLAGLRFSVHQQSEMDTSVKFDLQIQSSNLFDKVSPVVSHKVDLAVLAAVEIRGVSSPDHVFLPIPNWEHKENPETEEDVGPVVQHIYELRNNGPSSFSKAMLHLQWPYKYNNNTLLYILHYDIDGPMNCTSDMEINPLRIKISSLQTTEKNDTVAGQGERDHLITKRDLALSEGDIHTLGCGVAQCLKIVCQVGRLDRGKSAILYVKSLLWTETFMNKENQNHSYSLKSSASFNVIEFPYKNLPIEDITNSTLVTTNVTWGIQPAPMPVPVWVIILAVLAGLLLLAVLVFVMYRMGFFKRVRPPQEEQEREQLQPHENGEGNSET

SEQ ID NO: 30091 - protein, 1012 aa, Homo sapiens
  REGION 1..1012: note = ENSP00000364042
MAFPPRRRLRLGPRGLPLLLSGLLLPLCRAFNLDVDSPAEYSGPEGSYFGFAVDFFVPSASSRMFLLVGAPKANTTQPGIVEGGQVLKCDWSSTRRCQPIEFDATGNRDYAKDDPLEFKSHQWFGASVRSKQDKILACAPLYHWRTEMKQEREPVGTCFLQDGTKTVEYAPCRSRQLISDQVAEIVSKYDPNVYSIKYNNQLATRTAQAIFDDSYLGYSVAVGDFNGDGIDDFVSGVPRAARTLGMVYIYDGKNMSSLYNFTGEQMAAYFGFSVAATDINGDDYADVFIGAPLFMDRGSDGKLQEVGQVSVSLQRASGDFQTTKLNGFEVFARFGSAIAPLGDLDQDGFNDIAIAAPYGGEDKKGIVYIFNGRSTGLNAVPSQILEGQWAARSMPPSFGYSMKGATDIDKNGYPDLIVGAFGVDRAILYRARPVITVNAGLEVYPSILNQDNKTCSLPGTALKVSCFNVRFCLKADGKGVLPRKLNFQVELLLDKLKQKGAIRRALFLYSRSPSHSKNMTISRGGLMQCEELIAYLRDESEFRDKLTPITIFMEYRLDYRTAADTTGLQPILNQFTPANISRQAHILLDCGEDNVCKPKLEVSVDSDQKKIYIGDDNPLTLIVKAQNQGEGAYEAELIVSIPLQADFIGVVRNNEALARLSCAFKTENQTRQVVCDLGNPMKAGTQLLAGLRFSVHQQSEMDTSVKFDLQIQSSNLFDKVSPVVSHKVDLAVLAAVEIRGVSSPDHVFLPIPNWEHKENPETEEDVGPVVQHIYELRNNGPSSFSKAMLHLQWPYKYNNNTLLYILHYDIDGPMNCTSDMEINPLRIKISSLQTTEKNDTVAGQGERDHLITKRDLALSEGDIHTLGCGVAQCLKIVCQVGRLDRGKSAILYVKSLLWTETFMNKENQNHSYSLKSSASFNVIEFPYKNLPIEDITNSTLVTTNVTWGIQPAPMPVPVWVIILAVLAGLLLLAVLVFVMYRMGFFKRVRPPQEEQEREQLQPHENGEGNSET

SEQ ID NO: 30092 - protein, 1002 aa, Homo sapiens
  REGION 1..1002: note = ENSP00000404291
MLLGTLLLILYILMLCRMFLLVGAPKANTTQPGIVEGGQVLKCDWSSTRRCQPIEFDATGNRDYAKDDPLEFKSHQWFGASVRSKQDKILACAPLYHWRTEMKQEREPVGTCFLQDGTKTVEYAPCRSQDIDADGQGFCQGGFSIDFTKADRVLLGGPGSFYWQGQLISDQVAEIVSKYDPNVYSIKYNNQLATRTAQAIFDDSYLGYSVAVGDFNGDGIDDFVSGVPRAARTLGMVYIYDGKNMSSLYNFTGEQMAAYFGFSVAATDINGDDYADVFIGAPLFMDRGSDGKLQEVGQVSVSLQRASGDFQTTKLNGFEVFARFGSAIAPLGDLDQDGFNDIAIAAPYGGEDKKGIVYIFNGRSTGLNAVPSQILEGQWAARSMPPSFGYSMKGATDIDKNGYPDLIVGAFGVDRAILYRARPVITVNAGLEVYPSILNQDNKTCSLPGTALKVSCFNVRFCLKADGKGVLPRKLNFQVELLLDKLKQKGAIRRALFLYSRSPSHSKNMTISRGGLMQCEELIAYLRDESEFRDKLTPITIFMEYRLDYRTAADTTGLQPILNQFTPANISRQAHILLDCGEDNVCKPKLEVSVDSDQKKIYIGDDNPLTLIVKAQNQGEGAYEAELIVSIPLQADFIGVVRNNEALARLSCAFKTENQTRQVVCDLGNPMKAGTQLLAGLRFSVHQQSEMDTSVKFDLQIQSSNLFDKVSPVVSHKVDLAVLAAVEIRGVSSPDHVFLPIPNWEHKENPETEEDVGPVVQHIYELRNNGPSSFSKAMLHLQWPYKYNNNTLLYILHYDIDGPMNCTSDMEINPLRIKISSLQTTEKNDTVAGQGERDHLITKRDLALSEGDIHTLGCGVAQCLKIVCQVGRLDRGKSAILYVKSLLWTETFMNKENQNHSYSLKSSASFNVIEFPYKNLPIEDITNSTLVTTNVTWGIQPAPMPVPVWVIILAVLAGLLLLAVLVFVMYRMGFFKRVRPPQEEQEREQLQPHENGEGNSET

SEQ ID NO: 30093 - protein, 136 aa, Homo sapiens
  REGION 1..136: note = ENSP00000389442
  VARIANT 1: note = Any amino acid
XNCTSDMEINPLRIKISSLQTTEKNDTVAGQGERDHLITKRDLALSEGDIHTLGCGVAQCLKIVCQVGRLDRGKSAILYVKSLLWTETFMNKENQNHSYSLKSSASFNVIEFPYKNLPIEDITNSTLVSHWFRQIE

SEQ ID NO: 30094 - protein, 1752 aa, Homo sapiens
  REGION 1..1752: note = ENSP00000463651
MAGPRPSPWARLLLAALISVSLSGTLANRCKKAPVKSCTECVRVDKDCAYCTDEMFRDRRCNTQAELLAAGCQRESIVVMESSFQITEETQIDTTLRRSQMSPQGLRVRLRPGEERHFELEVFEPLESPVDLYILMDFSNSMSDDLDNLKKMGQNLARVLSQLTSDYTIGFGKFVDKVSVPQTDMRPEKLKEPWPNSDPPFSFKNVISLTEDVDEFRNKLQGERISGNLDAPEGGFDAILQTAVCTRDIGWRPDSTHLLVFSTESAFHYEADGANVLAGIMSRNDERCHLDTTGTYTQYRTQDYPSVPTLVRLLAKHNIIPIFAVTNYSYSYYEKLHTYFPVSSLGVLQEDSSNIVELLEEAFNRIRSNLDIRALDSPRGLRTEVTSKMFQKTRTGSFHIRRGEVGIYQVQLRALEHVDGTHVCQLPEDQKGNIHLKPSFSDGLKMDAGIICDVCTCELQKEVRSARCSFNGDFVCGQCVCSEGWSGQTCNCSTGSLSDIQPCLREGEDKPCSGRGECQCGHCVCYGEGRYEGQFCEYDNFQCPRTSGFLCNDRGRCSMGQCVCEPGWTGPSCDCPLSNATCIDSNGGICNGRGHCECGRCHCHQQSLYTDTICEINYSAIHPGLCEDLRSCVQCQAWGTGEKKGRTCEECNFKVKMVDELKRAEEVVVRCSFRDEDDDCTYSYTMEGDGAPGPNSTVLVHKKKDCPPGSFWWLIPLLLLLLPLLALLLLLCWKYCACCKACLALLPCCNRGHMVGFKEDHYMLRENLMASDHLDTPMLRSGNLKGRDVVRWKVTNNMQRPGFATHAASINPTELVPYGLSLRLARLCTENLLKPDTRECAQLRQEVEENLNEVYRQISGVHKLQQTKFRQQPNAGKKQDHTIVDTVLMAPRSAKPALLKLTEKQVEQRAFHDLKVAPGYYTLTADQDARGMVEFQEGVELVDVRVPLFIRPEDDDEKQLLVEAIDVPAGTATLGRRLVNITIIKEQARDVVSFEQPEFSVSRGDQVARIPVIRRVLDGGKSQVSYRTQDGTAQGNRDYIPVEGELLFQPGEAWKELQVKLLELQEVDSLLRGRQVRRFHVQLSNPKFGAHLGQPHSTTIIIRDPDELDRSFTSQMLSSQPPPHGDLGAPQNPNAKAAGSRKIHFNWLPPSGKPMGYRVKYWIQGDSESEAHLLDSKVPSVELTNLYPYCDYEMKVCAYGAQGEGPYSSLVSCRTHQEVPSEPGRLAFNVVSSTVTQLSWAEPAETNGEITAYEVCYGLVNDDNRPIGPMKKVLVDNPKNRMLLIENLRESQPYRYTVKARNGAGWGPEREAIINLATQPKRPMSIPIIPDIPIVDAQSGEDYDSFLMYSDDVLRSPSGSQRPSVSDDTEHLVNGRMDFAFPGSTNSLHRMTTTSAAAYGTHLSPHVPHRVLSTSSTLTRDYNSLTRSEHSHSTTLPRDYSTLTSVSSHDSRLTAGVPDTPTRLVFSALGPTSLRVSWQEPRCERPLQGYSVEYQLLNGGELHRLNIPNPAQTSVVVEDLLPNHSYVFRVRAQSQEGWGREREGVITIESQVHPQSPLCPLPGSAFTLSTPSAPGPLVFTALSPDSLQLSWERPRRPNGDIVGYLVTCEMAQGGGPATAFRVDGDSPESRLTVPGLSENVPYKFKVQARTTEGFGPEREGIITIESQDGGPFPQLGSRAGLFQHPLQSEYSSITTTHTSATEPFLVDGLTLGAQHLEAGGSLTRHVTQEFVSRTLTTSGTLSTHMDQQFFQT

SEQ ID NO: 30095 - protein, 1822 aa, Homo sapiens
  REGION 1..1822: note = ENSP00000200181
MAGPRPSPWARLLLAALISVSLSGTLANRCKKAPVKSCTECVRVDKDCAYCTDEMFRDRRCNTQAELLAAGCQRESIVVMESSFQITEETQIDTTLRRSQMSPQGLRVRLRPGEERHFELEVFEPLESPVDLYILMDFSNSMSDDLDNLKKMGQNLARVLSQLTSDYTIGFGKFVDKVSVPQTDMRPEKLKEPWPNSDPPFSFKNVISLTEDVDEFRNKLQGERISGNLDAPEGGFDAILQTAVCTRDIGWRPDSTHLLVFSTESAFHYEADGANVLAGIMSRNDERCHLDTTGTYTQYRTQDYPSVPTLVRLLAKHNIIPIFAVTNYSYSYYEKLHTYFPVSSLGVLQEDSSNIVELLEEAFNRIRSNLDIRALDSPRGLRTEVTSKMFQKTRTGSFHIRRGEVGIYQVQLRALEHVDGTHVCQLPEDQKGNIHLKPSFSDGLKMDAGIICDVCTCELQKEVRSARCSFNGDFVCGQCVCSEGWSGQTCNCSTGSLSDIQPCLREGEDKPCSGRGECQCGHCVCYGEGRYEGQFCEYDNFQCPRTSGFLCNDRGRCSMGQCVCEPGWTGPSCDCPLSNATCIDSNGGICNGRGHCECGRCHCHQQSLYTDTICEINYSAIHPGLCEDLRSCVQCQAWGTGEKKGRTCEECNFKVKMVDELKRAEEVVVRCSFRDEDDDCTYSYTMEGDGAPGPNSTVLVHKKKDCPPGSFWWLIPLLLLLLPLLALLLLLCWKYCACCKACLALLPCCNRGHMVGFKEDHYMLRENLMASDHLDTPMLRSGNLKGRDVVRWKVTNNMQRPGFATHAASINPTELVPYGLSLRLARLCTENLLKPDTRECAQLRQEVEENLNEVYRQISGVHKLQQTKFRQQPNAGKKQDHTIVDTVLMAPRSAKPALLKLTEKQVEQRAFHDLKVAPGYYTLTADQDARGMVEFQEGVELVDVRVPLFIRPEDDDEKQLLVEAIDVPAGTATLGRRLVNITIIKEQARDVVSFEQPEFSVSRGDQVARIPVIRRVLDGGKSQVSYRTQDGTAQGNRDYIPVEGELLFQPGEAWKELQVKLLELQEVDSLLRGRQVRRFHVQLSNPKFGAHLGQPHSTTIIIRDPDELDRSFTSQMLSSQPPPHGDLGAPQNPNAKAAGSRKIHFNWLPPSGKPMGYRVKYWIQGDSESEAHLLDSKVPSVELTNLYPYCDYEMKVCAYGAQGEGPYSSLVSCRTHQEVPSEPGRLAFNVVSSTVTQLSWAEPAETNGEITAYEVCYGLVNDDNRPIGPMKKVLVDNPKNRMLLIENLRESQPYRYTVKARNGAGWGPEREAIINLATQPKRPMSIPIIPDIPIVDAQSGEDYDSFLMYSDDVLRSPSGSQRPSVSDDTGCGWKFEPLLGEELDLRRVTWRLPPELIPRLSASSGRSSDAEAPHGPPDDGGAGGKGGSLPRSATPGPPGEHLVNGRMDFAFPGSTNSLHRMTTTSAAAYGTHLSPHVPHRVLSTSSTLTRDYNSLTRSEHSHSTTLPRDYSTLTSVSSHDSRLTAGVPDTPTRLVFSALGPTSLRVSWQEPRCERPLQGYSVEYQLLNGGELHRLNIPNPAQTSVVVEDLLPNHSYVFRVRAQSQEGWGREREGVITIESQVHPQSPLCPLPGSAFTLSTPSAPGPLVFTALSPDSLQLSWERPRRPNGDIVGYLVTCEMAQGGGPATAFRVDGDSPESRLTVPGLSENVPYKFKVQARTTEGFGPEREGIITIESQDGGPFPQLGSRAGLFQHPLQSEYSSITTTHTSATEPFLVDGLTLGAQHLEAGGSLTRHVTQEFVSRTLTTSGTLSTHMDQQFFQT

SEQ ID NO: 30096 - protein, 1752 aa, Homo sapiens; identical to SEQ ID NO: 30094
  REGION 1..1752: note = ENSP00000405536

SEQ ID NO: 30097 - protein, 1805 aa, Homo sapiens
  REGION 1..1805: note = ENSP00000400217
MAGPRPSPWARLLLAALISVSLSGTLANRCKKAPVKSCTECVRVDKDCAYCTDEMFRDRRCNTQAELLAAGCQRESIVVMESSFQITEETQIDTTLRRSQMSPQGLRVRLRPGEERHFELEVFEPLESPVDLYILMDFSNSMSDDLDNLKKMGQNLARVLSQLTSDYTIGFGKFVDKVSVPQTDMRPEKLKEPWPNSDPPFSFKNVISLTEDVDEFRNKLQGERISGNLDAPEGGFDAILQTAVCTRDIGWRPDSTHLLVFSTESAFHYEADGANVLAGIMSRNDERCHLDTTGTYTQYRTQDYPSVPTLVRLLAKHNIIPIFAVTNYSYSYYEKLHTYFPVSSLGVLQEDSSNIVELLEEAFNRIRSNLDIRALDSPRGLRTEVTSKMFQKTRTGSFHIRRGEVGIYQVQLRALEHVDGTHVCQLPEDQKGNIHLKPSFSDGLKMDAGIICDVCTCELQKEVRSARCSFNGDFVCGQCVCSEGWSGQTCNCSTGSLSDIQPCLREGEDKPCSGRGECQCGHCVCYGEGRYEGQFCEYDNFQCPRTSGFLCNDRGRCSMGQCVCEPGWTGPSCDCPLSNATCIDSNGGICNGRGHCECGRCHCHQQSLYTDTICEINYSAIHPGLCEDLRSCVQCQAWGTGEKKGRTCEECNFKVKMVDELKRAEEVVVRCSFRDEDDDCTYSYTMEGDGAPGPNSTVLVHKKKDCPPGSFWWLIPLLLLLLPLLALLLLLCWKYCACCKACLALLPCCNRGHMVGFKEDHYMLRENLMASDHLDTPMLRSGNLKGRDVVRWKVTNNMQRPGFATHAASINPTELVPYGLSLRLARLCTENLLKPDTRECAQLRQEVEENLNEVYRQISGVHKLQQTKFRQQPNAGKKQDHTIVDTVLMAPRSAKPALLKLTEKQVEQRAFHDLKVAPGYYTLTADQDARGMVEFQEGVELVDVRVPLFIRPEDDDEKQLLVEAIDVPAGTATLGRRLVNITIIKEQARDVVSFEQPEFSVSRGDQVARIPVIRRVLDGGKSQVSYRTQDGTAQGNRDYIPVEGELLFQPGEAWKELQVKLLELQEVDSLLRGRQVRRFHVQLSNPKFGAHLGQPHSTTIIIRDPDELDRSFTSQMLSSQPPPHGDLGAPQNPNAKAAGSRKIHFNWLPPSGKPMGYRVKYWIQGDSESEAHLLDSKVPSVELTNLYPYCDYEMKVCAYGAQGEGPYSSLVSCRTHQEVPSEPGRLAFNVVSSTVTQLSWAEPAETNGEITAYEVCYGLVNDDNRPIGPMKKVLVDNPKNRMLLIENLRESQPYRYTVKARNGAGWGPEREAIINLATQPKRPMSIPIIPDIPIVDAQSGEDYDSFLMYSDDVLRSPSGSQRPSVSDDTEHLVNGRMDFAFPGSTNSLHRMTTTSAAAYGTHLSPHVPHRVLSTSSTLTRDYNSLTRSEHSHSTTLPRDYSTLTSVSSHGLPPIWEHGRSRLPLSWALGSRSRAQMKGFPPSRGPRDSIILAGRPAAPSWGPDSRLTAGVPDTPTRLVFSALGPTSLRVSWQEPRCERPLQGYSVEYQLLNGGELHRLNIPNPAQTSVVVEDLLPNHSYVFRVRAQSQEGWGREREGVITIESQVHPQSPLCPLPGSAFTLSTPSAPGPLVFTALSPDSLQLSWERPRRPNGDIVGYLVTCEMAQGGGPATAFRVDGDSPESRLTVPGLSENVPYKFKVQARTTEGFGPEREGIITIESQDGGPFPQLGSRAGLFQHPLQSEYSSITTTHTSATEPFLVDGLTLGAQHLEAGGSLTRHVTQEFVSRTLTTSGTLSTHMDQQFFQT

SEQ ID NO: 30098 - protein, 114 aa, Homo sapiens
  REGION 1..114: note = ENSP00000463788
SNSMSDDLDNLKKMGQNLARVLSQLTSDYTIGFGKFVDKVSVPQTDMRPEKLKEPWPNSDPPFSFKNVISLTEDVDEFRNKLQGERISATPSLHPWGPSPPACTEQGLGVSWEA

SEQ ID NO: 30099 - protein, 201 aa, Homo sapiens
  REGION 1..201: note = ENSP00000464259
  VARIANT 1: note = Any amino acid
XTNSLHRMTTTSAAAYGTHLSPHVPHRVLSTSSTLTRDYNSLTRSEHSHSTTLPRDYSTLTSVSSHGELHRLNIPNPAQTSVVVEDLLPNHSYVFRVRAQSQEGWGREREGVITIESQVHPQSPLCPLPGSAFTLSTPSAPGPLVFTALSPDSLQLSWERPRRPNGDIVGYLVTCEMAQGGGPATAFRVDGDSPESRLTVP

SEQ ID NO: 30100 - protein, 63 aa, Homo sapiens
  REGION 1..63: note = ENSP00000462494
  VARIANT 1: note = Any amino acid
XARTTEGFGPEREGIITIESQDGGPFPQLGSRAGLFQHPLQSEYSSITTTHTSATEPFLVGEH

SEQ ID NO: 30101 - protein, 799 aa, Homo sapiens
  REGION 1..799: note = ENSP00000296181
MPRAPAPLYACLLGLCALLPRLAGLNICTSGSATSCEECLLIHPKCAWCSKEDFGSPRSITSRCDLRANLVKNGCGGEIESPASSFHVLRSLPLSSKGSGSAGWDVIQMTPQEIAVNLRPGDKTTFQLQVRQVEDYPVDLYYLMDLSLSMKDDLDNIRSLGTKLAEEMRKLTSNFRLGFGSFVDKDISPFSYTAPRYQTNPCIGYKLFPNCVPSFGFRHLLPLTDRVDSFNEEVRKQRVSRNRDAPEGGFDAVLQAAVCKEKIGWRKDALHLLVFTTDDVPHIALDGKLGGLVQPHDGQCHLNEANEYTASNQMDYPSLALLGEKLAENNINLIFAVTKNHYMLYKNFTALIPGTTVEILDGDSKNIIQLIINAYNSIRSKVELSVWDQPEDLNLFFTATCQDGVSYPGQRKCEGLKIGDTASFEVSLEARSCPSRHTEHVFALRPVGFRDSLEVGVTYNCTCGCSVGLEPNSARCNGSGTYVCGLCECSPGYLGTRCECQDGENQSVYQNLCREAEGKPLCSGRGDCSCNQCSCFESEFGKIYGPFCECDNFSCARNKGVLCSGHGECHCGECKCHAGYIGDNCNCSTDISTCRGRDGQICSERGHCLCGQCQCTEPGAFGEMCEKCPTCPDACSTKRDCVECLLLHSGKPDNQTCHSLCRDEVITWVDTIVKDDQEAVLCFYKTAKDCVMMFTYVELPSGKSNLTVLREPECGNTPNAMTILLAVVGSILLVGLALLAIWKLLVTIHDRREFAKFQSERSRARYEMASNPLYRKPISTHTVDFTFNKFNKSYNGTVD

SEQ ID NO: 30102 - protein, 401 aa, Homo sapiens
  REGION 1..401: note = ENSP00000420814
  VARIANT 1: note = Any amino acid
XKDALHLLVFTTDDVPHIALDGKLGGLVQPHDGQCHLNEANEYTASNQMDYPSLALLGEKLAENNINLIFAVTKNHYMLYKNFTALIPGTTVEILDGDSKNIIQLIINAYNASFEVSLEARSCPSRHTEHVFALRPVGFRDSLEVGVTYNCTCGCSVGLEPNSARCNGSGTYVCGLCECSPGYLGTRCECQDGENQSVYQNLCREAEGKPLCSGRGDCSCNQCSCFESEFGKIYGPFCECDNFSCARNKGVLCSGHGECHCGECKCHAGYIGDNCNCSTDISTCRGRDGQICSERGHCLCGQCQCTEPGAFGEMCEKCPTCPDACSTKRDCVECLLLHSGKPDNQTCHSLCRDEVITWVDTIVKDDQEAVLCFYKTAKDCVMMFTYVELPSGKSNLTVLRE

SEQ ID NO: 30103 - protein, 323 aa, Homo sapiens
  REGION 1..323: note = ENSP00000477446
IRSLGTKLAEEMRKLTSNFRLGFGSFVDKDISPFSYTAPRYQTNPCIGYKLFPNCVPSFGFRHLLPLTDRVDSFNEEVRKQRVSRNRDAPEGGFDAVLQAAVCKSIRSKVELSVWDQPEDLNLFFTATCQDGVSYPGQRKCEGLKIGDTASFEVSLEARSCPSRHTEHVFALRPVGFRDSLEVGVTYNCTCGCSVGLEPNSARCNGSGTYVCGLCECSPGYLGTRCECQDGENQSVYQNLCREAEGKPLCSGRGDCSCNQCSCFESEFGKIYGPFCECDNFSCARNKGVLCSGHGECHCGECKCHAGYIGDNCNCSTDISTCR

SEQ ID NO: 30104 - protein, 263 aa, Homo sapiens
  REGION 1..263: note = ENSP00000418367
  VARIANT 1: note = Any amino acid
XYKLFPNCVPSFGFRHLLPLTDRVDSFNEEVRKQRVSRNRDAPEGGFDAVLQAAVCKEKIGWRKDALHLLVFTTDDVPHIALDGKLGGLVQPHDGQCHLNEANEYTASNQMDYPSLALLGEKLAENNINLIFAVTKNHYMLYKSIRSKVELSVWDQPEDLNLFFTATCQDGVSYPGQRKCEGLKIGDTASFEVSLEARSCPSRHTEHVFALRPVGFRDSLEVGVTYNCTCGCSVGLEPNSARCNGSGTYVCGLCECSPGYLGT

SEQ ID NO: 30105 - protein, 40 aa, Homo sapiens
  REGION 1..40: note = ENSP00000418079
MTPQEIAVNLRPEQWPRVPDGGLTRDAQCLGNGLTQCCMW

SEQ ID NO: 30106 - protein, 139 aa, Homo sapiens
  REGION 1..139: note = ENSP00000477230
MTPQEIAVNLRPGDKTTFQLQVRQVEDYPVDLYYLMDLSLSMKDDLDNIRSLGTKLAEEMRKLTSNFRLGFGSFVDKDISPFSYTAPRYQTNPCIGYKLFPNCVPSFGFRHLLPLTDRVDSFNEEVRKQRVSRNRDAPE

SEQ ID NO: 30107 - protein, 79 aa, Homo sapiens
  REGION 1..79: note = ENSP00000419198
MTPQEIAVNLRPGDKTTFQLQVRQVEDYPVDLYYLMDLSLSMKDDLDNIRSLGTKLAEEMRKLTSNFRLGFGSFVDKDI

SEQ ID NO: 30108 - protein, 59 aa, Homo sapiens
  REGION 1..59: note = ENSP00000476655
MTPQEIAVNLRPGDKTTFQLQVRQVEDYPVDLYYLMDLSLSMKDDLDNIRSLGTKLAEE

SEQ ID NO: 30109 - protein, 634 aa, Homo sapiens
  REGION 1..634: note = ENSP00000441561
MLKVHPLKKYPVDLYYLVDVSASMHNNIEKLNSVGNDLSRKMAFFSRDFRLGFGSYVDKTVSPYISIHPERIHNQCSDYNLDCMPPHGYIHVLSLTENITEFEKAVHRQKISGNIDTPEGGFDAMLQAAVCESHIGWRKEAKRLLLVMTDQTSHLALDSKLAGIVVPNDGNCHLKNNVYVKSTTMEHPSLGQLSEKLIDNNINVIFAVQGKQFHWYKDLLPLLPGTIAGEIESKAANLNNLVVEAYQKLISEVKVQVENQVQGIYFNITAICPDGSRKPGMEGCRNVTSNDEVLFNVTVTMKKCDVTGGKNYAIIKPIGFNETAKIHIHRNCSCQCEDNRGPKGKCVDETFLDSKCFQCDENKCHFDEDQFSSESCKSHKDQPVCSGRGVCVCGKCSCHKIKLGKVYGKYCEKDDFSCPYHHGNLCAGHGECEAGRCQCFSGWEGDRCQCPSAAAQHCVNSKGQVCSGRGTCVCGRCECTDPRSIGRFCEHCPTCYTACKENWNCMQCLHPHNLSQAILDQCKTSCALMEQQHYVDQTSECFSSPSYLRIFFIIFIVTFLIGLLKVLIIRQVILQWNSNKIKSSSDYRVSASKKDKLILQSVCTRAVTYRREKPEEIKMDISKLNAHETFRCNF

SEQ ID NO: 30110 - protein, 769 aa, Homo sapiens
  REGION 1..769: note = ENSP00000222573
MCGSALAFFTAAFVCLQNDRRGPASFLWAAWVFSLVLGLGQGEDNRCASSNAASCARCLALGPECGWCVQEDFISGGSRSERCDIVSNLISKGCSVDSIEYPSVHVIIPTENEINTQVTPGEVSIQLRPGAEANFMLKVHPLKKYPVDLYYLVDVSASMHNNIEKLNSVGNDLSRKMAFFSRDFRLGFGSYVDKTVSPYISIHPERIHNQCSDYNLDCMPPHGYIHVLSLTENITEFEKAVHRQKISGNIDTPEGGFDAMLQAAVCESHIGWRKEAKRLLLVMTDQTSHLALDSKLAGIVVPNDGNCHLKNNVYVKSTTMEHPSLGQLSEKLIDNNINVIFAVQGKQFHWYKDLLPLLPGTIAGEIESKAANLNNLVVEAYQKLISEVKVQVENQVQGIYFNITAICPDGSRKPGMEGCRNVTSNDEVLFNVTVTMKKCDVTGGKNYAIIKPIGFNETAKIHIHRNCSCQCEDNRGPKGKCVDETFLDSKCFQCDENKCHFDEDQFSSESCKSHKDQPVCSGRGVCVCGKCSCHKIKLGKVYGKYCEKDDFSCPYHHGNLCAGHGECEAGRCQCFSGWEGDRCQCPSAAAQHCVNSKGQVCSGRGTCVCGRCECTDPRSIGRFCEHCPTCYTACKENWNCMQCLHPHNLSQAILDQCKTSCALMEQQHYVDQTSECFSSPSYLRIFFIIFIVTFLIGLLKVLIIRQVILQWNSNKIKSSSDYRVSASKKDKLILQSVCTRAVTYRREKPEEIKMDISKLNAHETFRCNF

SEQ ID NO: 30111 - protein, 698 aa, Homo sapiens
  REGION 1..698: note = ENSP00000413922
MAFAWWPCLILALLSSLAASGFPRSPFRLLGKRSLPEGVANGIEVYSTKINSKVTSRFAHNVVTMRAVNRADTAKEVSFDVELPKTAFITNFTLTIDGVTYPGNVKEKEVAKKQYEKAVSQGKTAGLVKASGRKLEKFTVSVNVAAGSKVTFELTYEELLKRHKGKYEMYLKVQPKQLVKHFEIEVDIFEPQGISMLDAEASFITNDLLGSALTKSFSGKKGHVSFKPSLDQQRSCPTCTDSLLNGDFTITYDVNRESPGNVQIVNGYFVHFFAPQGLPVVPKNVAFVIDISGSMAGRKLEQTKEALLRILEDMQEEDYLNFILFSGDVSTWKEHLVQATPENLQEARTFVKSMEDKGMTNINDGLLRGISMLNKAREEHRIPERSTSIVIMLTDGDANVGESRPEKIQENVRNAIGGKFPLYNLGFGNNLNYNFLENMALENHGFARRIYEDSDADLQLQGFYEEVANPLLTGVEMEYPENAILDLTQNTYQHFYDGSEIVVAGRLVDEDMNSFKADVKGHGATNDLTFTEEVTTEKITLWNRAVPSTFSWLDTVTVTQDGLSMMINRKNMVVSFGDGVTFVVVLHQVWKKHPVHRDFLGFYVVDSHRMSAQTHGLLGQFFQPFDFKVSDIRPGSDPTKPDATLVVKNHQLIVTRGSQKDYRKDASIGTKVVCWFVHNNGEGLIDGVHTDYIVPNLF

SEQ ID NO: 30112 - protein, 890 aa, Homo sapiens
  REGION 1..890: note = ENSP00000415769
MAFAWWPCLILALLSSLAASGFPRSPFRLLGKRSLPEGVANGIEVYSTKINSKVTSRFAHNVVTMRAVNRADTAKEVSFDVELPKTAFITNFTLTIDGVTYPGNVKEKEVAKKQYEKAVSQGKTAGLVKASGRKLEKFTVSVNVAAGSKVTFELTYEELLKRHKGKYEMYLKVQPKQLVKHFEIEVDIFEPQGISMLDAEASFITNDLLGSALTKSFSGKKGHVSFKPSLDQQRSCPTCTDSLLNGDFTITYDVNRESPGNVQIVNGYFVHFFAPQGLPVVPKNVAFVIDISGSMAGRKLEQTKEALLRILEDMQEEDYLNFILFSGDVSTWKEHLVQATPENLQEARTFVKSMEDKGMTNINDGLLRGISMLNKAREEHRIPERSTSIVIMLTDGDANVGESRPEKIQENVRNAIGGKFPLYNLGFGNNLNYNFLENMALENHGFARRIYEDSDADLQLQGFYEEVANPLLTGVEMEYPENAILDLTQNTYQHFYDGSEIVVAGRLVDEDMNSFKADVKGHGATNDLTFTEEVDMKEMEKALQERDYIFGNYIERLWAYLTIEQLLEKRKNAHGEEKENLTARALDLSLKYHFVTPLTSMVVTKPEDNEDERAIADKPGEDAEATPVSPAMSYLTSYQPPQNPYYYVDGDPHFIIQIPEKDDALCFNIDEAPGTVLRLIQDAVTGLTVNGQITGDKRGSPDSKTRKTYFGKLGIANAQMDFQVEVTTEKITLWNRAVPSTFSWLDTVTVTQDGLSMMINRKNMVVSFGDGVTFVVVLHQVWKKHPVHRDFLGFYVVDSHRMSAQTHGLLGQFFQPFDFKVSDIRPGSDPTKPDATLVVKNHQLIVTRGSQKDYRKDASIGTKVVCWFVHNNGEGLIDGVHTDYIVPNLF

SEQ ID NO: 30113 - protein, 670 aa, Homo sapiens [sequence omitted]

SEQ ID NO: 30114 - protein, 263 aa, Homo sapiens
  REGION 1..263: note = ENSP00000362395
MVKIAFNTPTAVQKEEARQDVEALLSRTVRTQILTGKELRVATQEKEGSSGRCMLTLLGLSFILAGLIVGGACIYKYFMPKSTIYRGEMCFFDSEDPANSLRGGEPNFLPVTEEADIREDDNIAIIDVPVPSFSDSDPAAIIHDFEKGMTAYLDLLLGNCYLMPLNTSIVMPPKNLVELFGKLASGRYLPQTYVVREDLVAVEEIRDVSNLGIFIYQLCNNRKSFRLRRRDLLLGFNKRAIDKCWKIRHFPNEFIVETKICQE

SEQ ID NO: 30115 - protein, 219 aa, Homo sapiens
  REGION 1..219: note = ENSP00000415533
MVKIAFNTPTAVQKEEARQDVEALLSRTVRTQILTGKSTIYRGEMCFFDSEDPANSLRGGEPNFLPVTEEADIREDDNIAIIDVPVPSFSDSDPAAIIHDFEKGMTAYLDLLLGNCYLMPLNTSIVMPPKNLVELFGKLASGRYLPQTYVVREDLVAVEEIRDVSNLGIFIYQLCNNRKSFRLRRRDLLLGFNKRAIDKCWKIRHFPNEFIVETKICQE

SEQ ID NO: 30116 - protein, 260 aa, Homo sapiens
  REGION 1..260: note = ENSP00000396560
MNTQRNPRNGQPRRLSTSSVSSTGSSSLLEDSEDDLLSDSESRSRGNVQLEAGEDVGQKNHWQKIRTMVNLPVISPFKKRYAWVQLAGHTGSFKAAGTSGLILKRCSEPERYCLARLMADALRGCVPAFHGVVERDGESYLQLQDLLDGFDGPCVLDCKMGVRTYLEEELTKARERPKLRKDMYKKMLAVDPEAPTEEEHAQRAVTKPRYMQWREGISSSTTLGFRIEGIKKADGSCSTDFKTTRSREQVLRVFEEFVQG

SEQ ID NO: 30117 - protein, 461 aa, Homo sapiens
  REGION 1..461: note = ENSP00000260386
MTLPGGPTGMARPGGARPCSPGLERAPRRSVGELRLLFEARCAAVAAAAAAGEPRARGAKRRGGQVPNGLPRAPPAPVIPQLTVTAEEPDVPPTSPGPPERERDCLPAAGSSHLQQPRRLSTSSVSSTGSSSLLEDSEDDLLSDSESRSRGNVQLEAGEDVGQKNHWQKIRTMVNLPVISPFKKRYAWVQLAGHTGSFKAAGTSGLILKRCSEPERYCLARLMADALRGCVPAFHGVVERDGESYLQLQDLLDGFDGPCVLDCKMGVRTYLEEELTKARERPKLRKDMYKKMLAVDPEAPTEEEHAQRAVTKPRYMQWREGISSSTTLGFRIEGIKKADGSCSTDFKTTRSREQVLRVFEEFVQGDEEVLRRYLNRLQQIRDTLEVSEFFRRHEVIGSSLLFVHDHCHRAGVWLIDFGKTTPLPDGQILDHRRPWEEGNREDGYLLGLDNLIGILASLAER

SEQ ID NO: 30118 - protein, 946 aa, Homo sapiens
  REGION 1..946: note = ENSP00000272117
MAVYCYALNSLVIMNSANEMKSGGGPGPSGSETPPPPRRAVLSPGSVFSPGRGASFLFPPAESLSPEEPRSPGGWRSGRRRLNSSSGSGSGSSGSSVSSPSWAGRLRGDRQQVVAAGTLSPPGPEEAKRKLRILQRELQNVQVNQKVGMFEAHIQAQSSAIQAPRSPRLGRARSPSPCPFRSSSQPPGRVLVQGARSEERRTKSWGEQCPETSGTDSGRKGGPSLCSSQVKKGMPPLPGRAAPTGSEAQGPSAFVRMEKGIPASPRCGSPTAMEIDKRGSPTPGTRSCLAPSLGLFGASLTMATEVAARVTSTGPHRPQDLALTEPSGRARELEDLQPPEALVERQGQFLGSETSPAPERGGPRDGEPPGKMGKGYLPCGMPGSGEPEVGKRPEETTVSVQSAESSDSLSWSRLPRALASVGPEEARSGAPVGGGRWQLSDRVEGGSPTLGLLGGSPSAQPGTGNVEAGIPSGRMLEPLPCWDAAKDLKEPQCPPGDRVGVQPGNSRVWQGTMEKAGLAWTRGTGVQSEGTWESQRQDSDALPSPELLPQDPDKPFLRKACSPSNIPAVIITDMGTQEDGALEETQGSPRGNLPLRKLSSSSASSTGFSSSYEDSEEDISSDPERTLDPNSAFLHTLDQQKPRVSKSWRKIKNMVHWSPFVMSFKKKYPWIQLAGHAGSFKAAANGRILKKHCESEQRCLDRLMVDVLRPFVPAYHGDVVKDGERYNQMDDLLADFDSPCVMDCKMGIRTYLEEELTKARKKPSLRKDMYQKMIEVDPEAPTEEEKAQRAVTKPRYMQWRETISSTATLGFRIEGIKKEDGTVNRDFKKTKTREQVTEAFREFTKGNHNILIAYRDRLKAIRTTLEVSPFFKCHEVIGSSLLFIHDKKEQAKVWMIDFGKTTPLPEGQTLQHDVPWQEGNREDGYLSGLNNLVDILTEMSQDAPLA

SEQ ID NO: 30119 - protein, 644 aa, Homo sapiens
  REGION 1..644: note = ENSP00000355748
MAVYCYALNSLVIMNSANEMKSGGGPGPSGSETPPPPRRAVLSPGSVFSPGRGASFLFPPAESLSPEEPRSPGGWRSGRRRLNSSSGSGSGSSGSSVSSPSWAGRLRGDRQQVVAAGTLSPPGPEEAKRKLRILQRELQNVQVNQKVGMFEAHIQAQSSAIQAPRSPRLGRARSPSPCPFRSSSQPPGRVLVQGARSEERRTKSWGEQCPETSGTDSGRKGGPSLCSSQVKKGMPPLPGRAAPTGSEAQGPSAFVRMEKGIPASPRCGSPTAMEIDKRGSPTPGTRSCLAPSLGLFGASLTMATEVAARVTSTGPHRPQDLALTEPSGRARELEDLQPPEALVERQGQFLGSETSPAPERGGPRDGEPPGKMGKGYLPCGMPGSGEPEVGKRPEETTVSVQSAESSDSLSWSRLPRALASVGPEEARSGAPVGGGRWQLSDRVEGGSPTLGLLGGSPSAQPGTGNVEAGIPSGRMLEPLPCWDAAKDLKEPQCPPGDRVGVQPGNSRVWQGTMEKAGLAWTRGTGVQSEGTWESQRQDSDALPSPELLPQDPDKPFLRKACSPSNIPAVIITDMGTQEDGALEETQGSPRGNLPLRKLSSSSASSTGFSSSYEDSEEDISSDPERTLDPNSAFLHTLDQQKPRV

SEQ ID NO: 30120 - protein, 946 aa, Homo sapiens; identical to SEQ ID NO: 30118
  REGION 1..946: note = ENSP00000411152

SEQ ID NO: 30121 - protein, 127 aa, Homo sapiens
  REGION 1..127: note = ENSP00000455257
VALRRRPGRGPTRLASSTLGSRLRHFLPASWRGLASPSEEETPGVRVTGSGAERSGGRARRAAQAMSSCAVATLSGSASCPGLPVWRVTPPSPRDTSESRASASCWRVTTSMRCACLRTCWATARRT

SEQ ID NO: 30122 - protein, 535 aa, Homo sapiens
  REGION 1..535: note = ENSP00000370849
MSVHYTLNLRVFWPLVTGLCTALVCLYHVLRGSGGARAEPADGVDGGFPLLKVAVLLLLSYVLLRCRHAVRQRFLPGSPRLEGHAAFSSRHFREPGLSILLESYYEHEVRLSPHVLGHSKAHVSRIVGELVRAGRARGSPGLIPGGALALAFRGDFIQVGSAYEQHKIRRPDSFDVLVPLRLPPLVALEPRSLGEEPALAPAFRGCFLCALKAPPSPSGASGGHWLRDCKPFADAFCVDVRGRRHLSATLVLRWFQSHLQRSLATVRYSLEGRCRVTLTPGGLEQPPTLHILPCRTDYGCCRLSMAVRLIPAVHLGDGVFLVAPPPPPLPSAPLLELPEGLRAEALWGVNTARQEQKLLSWLQERAAPGACYLKCLQLLKALRDLGARGLDSAAATQWGRILSSYVLKTVLLAVLLRKGAPGQGWDEEHLGRCLEELVQFLRDCLLRRHTLFHCVLGPGGAAAEVGPLPKALREAAPVDLLAAFDGHARELAAARLLSTWQRLPQLLRAYGGPRYLARCPPPRSQRTQGFLEGEP

SEQ ID NO: 30123 - protein, 1670 aa, Homo sapiens
  REGION 1..1670: note = ENSP00000354561
MMAQFPTAMNGGPNMWAITSEERTKHDRQFDNLKPSGGYITGDQARNFFLQSGLPAPVLAEIWALSDLNKDGKMDQQEFSIAMKLIKLKLQGQQLPVVLPPIMKQPPMFSPLISARFGMGSMPNLSIPQPLPPAAPITSLSSATSGTNLPPLMMPTPLVPSVSTSSLPNGTASLIQPLPIPYSSSTLPHGSSYSLMMGGFGGASIQKAQSLIDLGSSSSTSSTASLSGNSPKTGTSEWAVPQPTRLKYRQKFNTLDKSMSGYLSGFQARNALLQSNLSQTQLATIWTLADVDGDGQLKAEEFILAMHLTDMAKAGQPLPLTLPPELVPPSFRGGKQIDSINGTLPSYQKMQEEEPQKKLPVTFEDKRKANYERGNMELEKRRQALMEQQQREAERKAQKEKEEWERKQRELQEQEWKKQLELEKRLEKQRELERQREEERRKDIERREAAKQELERQRRLEWERIRRQELLNQKNREQEEIVRLNSKKKNLHLELEALNGKHQQISGRLQDVRLKKQTQKTELEVLDKQCDLEIMEIKQLQQELQEYQNKLIYLVPEKQLLNERIKNMQFSNTPDSGVSLLHKKSLEKEELCQRLKEQLDALEKETASKLSEMDSFNNQLKELRETYNTQQLALEQLYKIKRDKLKEIERKRLELMQKKKLEDEAARKAKQGKENLWKENLRKEEEEKQKRLQEEKTQEKIQEEERKAEEKQRKDKDTLKAEEKKRETASVLVNYRALYPFEARNHDEMSFNSGDIIQVDEKTVGEPGWLYGSFQGNFGWFPCNYVEKMPSSENEKAVSPKKALLPPTVSLSATSTSSEPLSSNQPASVTDYQNVSFSNLTVNTSWQKKSAFTRTVSPGSVSPIHGQGQVVENLKAQALCSWTAKKDNHLNFSKHDIITVLEQQENWWFGEVHGGRGWFPKSYVKIIPGSEVKREEPEALYAAVNKKPTSAAYSVGEEYIALYPYSSVEPGDLTFTEGEEILVTQKDGEWWTGSIGDRSGIFPSNYVKPKDQESFGSASKSGASNKKPEIAQVTSAYVASGSEQLSLAPGQLILILKKNTSGWWQGELQARGKKRQKGWFPASHVKLLGPSSERATPAFHPVCQVIAMYDYAANNEDELSFSKGQLINVMNKDDPDWWQGEINGVTGLFPSNYVKMTTDSDPSQQWCADLQTLDTMQPIERKRQGYIHELIQTEERYMADLQLVVEVFQKRMAESGFLTEGEMALIFVNWKELIMSNTKLLKALRVRKKTGGEKMPVQMIGDILAAELSHMQAYIRFCSCQLNGAALLQQKTDEDTDFKEFLKKLASDPRCKGMPLSSFLLKPMQRITRYPLLIRSILENTPESHADHSSLKLALERAEELCSQVNEGVREKENSDRLEWIQAHVQCEGLAEQLIFNSLTNCLGPRKLLHSGKLYKTKSNKELHGFLFNDFLLLTYMVKQFAVSSGSEKLFSSKSNAQFKMYKTPIFLNEVLVKLPTDPSSDEPVFHISHIDRVYTLRTDNINERTAWVQKIKAASEQYIDTEKKKREKAYQARSQKTSGIGRLMVHVIEATELKACKPNGKSNPYCEISMGSQSYTTRTIQDTLNPKWNFNCQFFIKDLYQDVLCLTLFDRDQFSPDDFLGRTEIPVAKIRTEQESKGPMTRRLLLHEVPTGEVWVRFDLQLFEQKTLL

SEQ ID NO: 30124 - protein, 1697 aa, Homo sapiens
  REGION 1..1697: note = ENSP00000347244
MMAQFPTAMNGGPNMWAITSEERTKHDRQFDNLKPSGGYITGDQARNFFLQSGLPAPVLAEIWALSDLNKDGKMDQQEFSIAMKLIKLKLQGQQLPVVLPPIMKQPPMFSPLISARFGMGSMPNLSIPQPLPPAAPITSLSSATSGTNLPPLMMPTPLVPSVSTSSLPNGTASLIQPLPIPYSSSTLPHGSSYSLMMGGFGGASIQKAQSLIDLGSSSSTSSTASLSGNSPKTGTSEWAVPQPTRLKYRQKFNTLDKSMSGYLSGFQARNALLQSNLSQTQLATIWTLADVDGDGQLKAEEFILAMHLTDMAKAGQPLPLTLPPELVPPSFRGGKQIDSINGTLPSYQKMQEEEPQKKLPVTFEDKRKANYERGNMELEKRRQALMEQQQREAERKAQKEKEEWERKQRELQEQEWKKQLELEKRLEKQRELERQREEERRKDIERREAAKQELERQRRLEWERIRRQELLNQKNREQEEIVRLNSKKKNLHLELEALNGKHQQISGRLQDVRLKKQTQKTELEVLDKQCDLEIMEIKQLQQELQEYQNKLIYLVPEKQLLNERIKNMQFSNTPDSGVSLLHKKSLEKEELCQRLKEQLDALEKETASKLSEMDSFNNQLKCGNMDDSVLQCLLSLLSCLNNLFLLLKELRETYNTQQLALEQLYKIKRDKLKEIERKRLELMQKKKLEDEAARKAKQGKENLWKENLRKEEEEKQKRLQEEKTQEKIQEEERKAEEKQRKDKDTLKAEEKKRETASVLVNYRALYPFEARNHDEMSFNSGDIIQVDEKTVGEPGWLYGSFQGNFGWFPCNYVEKMPSSENEKAVSPKKALLPPTVSLSATSTSSEPLSSNQPASVTDYQNVSFSNLTVNTSWQKKSAFTRTVSPGSVSPIHGQGQVVENLKAQALCSWTAKKDNHLNFSKHDIITVLEQQENWWFGEVHGGRGWFPKSYVKIIPGSEVKREEPEALYAAVNKKPTSAAYSVGEEYIALYPYSSVEPGDLTFTEGEEILVTQKDGEWWTGSIGDRSGIFPSNYVKPKDQESFGSASKSGASNKKPEIAQVTSAYVASGSEQLSLAPGQLILILKKNTSGWWQGELQARGKKRQKGWFPASHVKLLGPSSERATPAFHPVCQVIAMYDYAANNEDELSFSKGQLINVMNKDDPDWWQGEINGVTGLFPSNYVKMTTDSDPSQQWCADLQTLDTMQPIERKRQGYIHELIQTEERYMADLQLVVEVFQKRMAESGFLTEGEMALIFVNWKELIMSNTKLLKALRVRKKTGGEKMPVQMIGDILAAELSHMQAYIRFCSCQLNGAALLQQKTDEDTDFKEFLKKLASDPRCKGMPLSSFLLKPMQRITRYPLLIRSILENTPESHADHSSLKLALERAEELCSQVNEGVREKENSDRLEWIQAHVQCEGLAEQLIFNSLTNCLGPRKLLHSGKLYKTKSNKELHGFLFNDFLLLTYMVKQFAVSSGSEKLFSSKSNAQFKMYKTPIFLNEVLVKLPTDPSSDEPVFHISHIDRVYTLRTDNINERTAWVQKIKAASEQYIDTEKKKREKAYQARSQKTSGIGRLMVHVIEATELKACKPNGKSNPYCEISMGSQSYTTRTIQDTLNPKWNFNCQFFIKDLYQDVLCLTLFDRDQFSPDDFLGRTEIPVAKIRTEQESKGPMTRRLLLHEVPTGEVWVRFDLQLFEQKTLL

SEQ ID NO: 30125 - protein, 55 aa, Homo sapiens
  REGION 1..55: note = ENSP00000395682
  VARIANT 1: note = Any amino acid
XELHGFLFNDFLLLTYMVKQFAVSSGSEKLFSSKSNAQFKMYKTDRLGAEDQGGV

SEQ ID NO: 30126 - protein, 36 aa, Homo sapiens
  REGION 1..36: note = ENSP00000411319
  VARIANT 1: note = Any amino acid
XAWVQKIKAASEQYIDTEKKKREKAYQGFPHFVIYS

SEQ ID NO: 30127 - protein, 1249 aa, Homo sapiens
  REGION 1..1249: note = ENSP00000384499
MMAQFPTAMNGGPNMWAITSEERTKHDRQFDNLKPSGGYITGDQARNFFLQSGLPAPVLAEIWALSDLNKDGKMDQQEFSIAMKLIKLKLQGQQLPVVLPPIMKQPPMFSPLISARFGMGSMPNLSIPQPLPPAAPITSLSSATSGTNLPPLMMPTPLVPSVSTSSLPNGTASLIQPLPIPYSSSTLPHGSSYSLMMGGFGGASIQKAQSLIDLGSSSSTSSTASLSGNSPKTGTSEWAVPQPTRLKYRQKFNTLDKSMSGYLSGFQARNALLQSNLSQTQLATIWTLADVDGDGQLKAEEFILAMHLTDMAKAGQPLPLTLPPELVPPSFRGGKQIDSINGTLPSYQKMQEEEPQKKLPVTFEDKRKANYERGNMELEKRRQALMEQQQREAERKAQKEKEEWERKQRELQEQEWKKQLELEKRLEKQRELERQREEERRKDIERREAAKQELERQRRLEWERIRRQELLNQKNREQEEIVRLNSKKKNLHLELEALNGKHQQISGRLQDVRLKKQTQKTELEVLDKQCDLEIMEIKQLQQELQEYQNKLIYLVPEKQLLNERIKNMQFSNTPDSGVSLLHKKSLEKEELCQRLKEQLDALEKETASKLSEMDSFNNQLKCGNMDDSVLQCLLSLLSCLNNLFLLLKELRETYNTQQLALEQLYKIKRDKLKEIERKRLELMQKKKLEDEAARKAKQGKENLWKENLRKEEEEKQKRLQEEKTQEKIQEEERKAEEKQRKDKDTLKAEEKKRETASVLVNYRALYPFEARNHDEMSFNSGDIIQVDEKTVGEPGWLYGSFQGNFGWFPCNYVEKMPSSENEKAVSPKKALLPPTVSLSATSTSSEPLSSNQPASVTDYQNVSFSNLTVNTSWQKKSAFTRTVSPGSVSPIHGQGQVVENLKAQALCSWTAKKDNHLNFSKHDIITVLEQQENWWFGEVHGGRGWFPKSYVKIIPGSEVKREEPEALYAAVNKKPTSAAYSVGEEYIALYPYSSVEPGDLTFTEGEEILVTQKDGEWWTGSIGDRSGIFPSNYVKPKDQESFGSASKSGASNKKPEIAQVTSAYVASGSEQLSLAPGQLILILKKNTSGWWQGELQARGKKRQKGWFPASHVKLLGPSSERATPAFHPVCQVIAMYDYAANNEDELSFSKGQLINVMNKDDPDWWQGEINGVTGLFPSNYVKMTTDSDPSQQWCADLQTLDTMQPIERKRQGYIHELIQTEERYMADLQLVVEVRRLLLASSRGICCLS

SEQ ID NO: 30128 - protein, 120 aa, Homo sapiens
  REGION 1..120: note = ENSP00000389013
  VARIANT 1: note = Any amino acid
XLAPGQLILILKKNTSGWWQGELQARGKKRQKGWFPASHVKLLGPSSERATPAFHPVCQVIAMYDYAANNEDELSFSKGQLINVMNKDDPDWWQGEINGVTGLFPSNYVKMTTDSDPSQQ

SEQ ID NO: 30129 - protein, 609 aa, Homo sapiens
  REGION 1..609: note = ENSP00000391224
MMAQFPTAMNGGPNMWAITSEERTKHDRQFDNLKPSGGYITGDQARNFFLQSGLPAPVLAEIWALSDLNKDGKMDQQEFSIAMKLIKLKLQGQQLPVVLPPIMKQPPMFSPLISARFGMGSMPNLSIPQPLPPAAPITSLSSATSGTNLPPLMMPTPLVPSVSTSSLPNGTASLIQPLPIPYSSSTLPHGSSYSLMMGGFGGASIQKAQSLIDLGSSRSWSSGSSAHSPATHRAPLSSPVPNSSTSSTASLSGNSPKTGTSEWAVPQPTRLKYRQKFNTLDKSMSGYLSGFQARNALLQSNLSQTQLATIWTLADVDGDGQLKAEEFILAMHLTDMAKAGQPLPLTLPPELVPPSFRGGKQIDSINGTLPSYQKMQEEEPQKKLPVTFEDKRKANYERGNMELEKRRQALMEQQQREAERKAQKEKEEWERKQRELQEQEWKKQLELEKRLEKQRELERQREEERRKDIERREAAKQELERQRRLEWERIRRQELLNQKNREQEEIVRLNSKKKNLHLELEALNGKHQQISGRLQDVRLKKQTQKTELEVLDKQCDLEIMEIKQLQQELQEYQNKLIYLVPEKQLLNERIKNMQFSNTPDSGVSLLHKK

SEQ ID NO: 30130 - protein, 183 aa, Homo sapiens
  REGION 1..183: note = ENSP00000391715
MWAITSEERTKHDRQFDNLKPSGGYITGDQARNFFLQSGLPAPVLAEIWALSDLNKDGKMDQQEFSIAMKLIKLKLQGQQLPVVLPPIMKQPPMFSPLISARFGMGSMPNLSIPQPLPPAAPITSLSSATSGTNLPPLMMPTPLVPSVSTSSLPNGTASLIQPLPIPYSSSTLPHGSSYSLMM

SEQ ID NO: 30131 - protein, 1680 aa, Homo sapiens
  REGION 1..1680: note = ENSP00000479408
MAESQGKLRTMMAQFPTAMNGGPNMWAITSEERTKHDRQFDNLKPSGGYITGDQARNFFLQSGLPAPVLAEIWALSDLNKDGKMDQQEFSIAMKLIKLKLQGQQLPVVLPPIMKQPPMFSPLISARFGMGSMPNLSIPQPLPPAAPITSLSSATSGTNLPPLMMPTPLVPSVSTSSLPNGTASLIQPLPIPYSSSTLPHGSSYSLMMGGFGGASIQKAQSLIDLGSSSSTSSTASLSGNSPKTGTSEWAVPQPTRLKYRQKFNTLDKSMSGYLSGFQARNALLQSNLSQTQLATIWTLADVDGDGQLKAEEFILAMHLTDMAKAGQPLPLTLPPELVPPSFRGGKQIDSINGTLPSYQKMQEEEPQKKLPVTFEDKRKANYERGNMELEKRRQALMEQQQREAERKAQKEKEEWERKQRELQEQEWKKQLELEKRLEKQRELERQREEERRKDIERREAAKQELERQRRLEWERIRRQELLNQKNREQEEIVRLNSKKKNLHLELEALNGKHQQISGRLQDVRLKKQTQKTELEVLDKQCDLEIMEIKQLQQELQEYQNKLIYLVPEKQLLNERIKNMQFSNTPDSGVSLLHKKSLEKEELCQRLKEQLDALEKETASKLSEMDSFNNQLKELRETYNTQQLALEQLYKIKRDKLKEIERKRLELMQKKKLEDEAARKAKQGKENLWKENLRKEEEEKQKRLQEEKTQEKIQEEERKAEEKQRKDKDTLKAEEKKRETASVLVNYRALYPFEARNHDEMSFNSGDIIQVDEKTVGEPGWLYGSFQGNFGWFPCNYVEKMPSSENEKAVSPKKALLPPTVSLSATSTSSEPLSSNQPASVTDYQNVSFSNLTVNTSWQKKSAFTRTVSPGSVSPIHGQGQVVENLKAQALCSWTAKKDNHLNFSKHDIITVLEQQENWWFGEVHGGRGWFPKSYVKIIPGSEVKREEPEALYAAVNKKPTSAAYSVGEEYIALYPYSSVEPGDLTFTEGEEILVTQKDGEWWTGSIGDRSGIFPSNYVKPKDQESFGSASKSGASNKKPEIAQVTSAYVASGSEQLSLAPGQLILILKKNTSGWWQGELQARGKKRQKGWFPASHVKLLGPSSERATPAFHPVCQVIAMYDYAANNEDELSFSKGQLINVMNKDDPDWWQGEINGVTGLFPSNYVKMTTDSDPSQQWCADLQTLDTMQPIERKRQGYIHELIQTEERYMADLQLVVEVFQKRMAESGFLTEGEMALIFVNWKELIMSNTKLLKALRVRKKTGGEKMPVQMIGDILAAELSHMQAYIRFCSCQLNGAALLQQKTDEDTDFKEFLKKLASDPRCKGMPLSSFLLKPMQRITRYPLLIRSILENTPESHADHSSLKLALERAEELCSQVNEGVREKENSDRLEWIQAHVQCEGLAEQLIFNSLTNCLGPRKLLHSGKLYKTKSNKELHGFLFNDFLLLTYMVKQFAVSSGSEKLFSSKSNAQFKMYKTPIFLNEVLVKLPTDPSSDEPVFHISHIDRVYTLRTDNINERTAWVQKIKAASEQYIDTEKKKREKAYQARSQKTSGIGRLMVHVIEATELKACKPNGKSNPYCEISMGSQSYTTRTIQDTLNPKWNFNCQFFIKDLYQDVLCLTLFDRDQFSPDDFLGRTEIPVAKIRTEQESKGPMTRRLLLHEVPTGEVWVRFDLQLFEQKTLL

SEQ ID NO: 30132 - protein, 1218 aa, Homo sapiens
  REGION 1..1218: note = ENSP00000254958
MRSPRTRGRSGRPLSLLLALLCALRAKVCGASGQFELEILSMQNVNGELQNGNCCGGARNPGDRKCTRDECDTYFKVCLKEYQSRVTAGGPCSFGSGSTPVIGGNTFNLKASRGNDRNRIVLPFSFAWPRSYTLLVEAWDSSNDTVQPDSIIEKASHSGMINPSRQWQTLKQNTGVAHFEYQIRVTCDDYYYGFGCNKFCRPRDDFFGHYACDQNGNKTCMEGWMGPECNRAICRQGCSPKHGSCKLPGDCRCQYGWQGLYCDKCIPHPGCVHGICNEPWQCLCETNWGGQLCDKDLNYCGTHQPCLNGGTCSNTGPDKYQCSCPEGYSGPNCEIAEHACLSDPCHNRGSCKETSLGFECECSPGWTGPTCSTNIDDCSPNNCSHGGTCQDLVNGFKCVCPPQWTGKTCQLDANECEAKPCVNAKSCKNLIASYYCDCLPGWMGQNCDININDCLGQCQNDASCRDLVNGYRCICPPGYAGDHCERDIDECASNPCLNGGHCQNEINRFQCLCPTGFSGNLCQLDIDYCEPNPCQNGAQCYNRASDYFCKCPEDYEGKNCSHLKDHCRTTPCEVIDSCTVAMASNDTPEGVRYISSNVCGPHGKCKSQSGGKFTCDCNKGFTGTYCHENINDCESNPCRNGGTCIDGVNSYKCICSDGWEGAYCETNINDCSQNPCHNGGTCRDLVNDFYCDCKNGWKGKTCHSRDSQCDEATCNNGGTCYDEGDAFKCMCPGGWEGTTCNIARNSSCLPNPCHNGGTCVVNGESFTCVCKEGWEGPICAQNTNDCSPHPCYNSGTCVDGDNWYRCECAPGFAGPDCRININECQSSPCAFGATCVDEINGYRCVCPPGHSGAKCQEVSGRPCITMGSVIPDGAKWDDDCNTCQCLNGRIACSKVWCGPRPCLLHKGHSECPSGQSCIPILDDQCFVHPCTGVGECRSSSLQPVKTKCTSDSYYQDNCANITFTFNKEMMSPGLTTEHICSELRNLNILKNVSAEYSIYIACEPSPSANNEIHVAISAEDIRDDGNPIKEITDKIIDLVSKRDGNSSLIAAVAEVRVQRRPLKNRTDFLVPLLSSVLTVAWICCLVTAFYWCLRKRRKPGSHTHSASEDNTTNNVREQLNQIKNPIEKHGANTVPIKDYENKNSKMSKIRTHNSEVEEDDMDKHQQKARFAKQPAYTLVDREEKPPNGTPTKHPNWTNKQDNRDLESAQSLNRMEYIV

SEQ ID NO: 30133 - protein, 172 aa, Homo sapiens
  REGION 1..172: note = ENSP00000481034
  VARIANT 1: note = Any amino acid
XPEDYEGKNCSHLKDHCRTTPCEVIDSCTVAMASNDTPEGVRYISSNVCGPHGKCKSQSGGKFTCDCNKGFTGTYCHENINDCESNPCRNGGTCIDGVNSYKCICSDGWEGAYCETSESATLWGALGCMGHVGGIPLQRGKTFFVLEISGSKTAVISALGQYHLCLICIYES

SEQ ID NO: 30134 - protein, 74 aa, Homo sapiens
  REGION 1..74: note = ENSP00000484139
  VARIANT 1: note = Any amino acid
XCQLDANECEAKPCVNAKSCKNLIASYYCDCLPGWMGQNCDININDCLGQCQNDASCRAITVRETSMNVPATPV

SEQ ID NO: 30135 - protein, 312 aa, Homo sapiens
  REGION 1..312: note = ENSP00000383376
MARRSRHRLLLLLLRYLVVALGYHKAYGFSAPKDQQVVTAVEYQEAILACKTPKKTVSSRLEWKKLGRSVSFVYYQQTLQGDFKNRAEMIDFNIRIKNVTRSDAGKYRCEVSAPSEQGQNLEEDTVTLEVLVAPAVPSCEVPSSALSGTVVELRCQDKEGNPAPEYTWFKDGIRLLENPRLGSQSTNSSYTMNTKTGTLQFNTVSKLDTGEYSCEARNSVGYRRCPGKRMQVDDLNISGIIAAVVVVALVISVCGLGVCYAQRKGYFSKETSFQKSNSSSKATTMSENVQWLTPVIPALWKAAAGGSRGQEF

SEQ ID NO: 30136 - protein, 298 aa, Homo sapiens
  REGION 1..298: note = ENSP00000420419
MARRSRHRLLLLLLRYLVVALGYHKAYGFSAPKDQQVVTAVEYQEAILACKTPKKTVSSRLEWKKLGRSVSFVYYQQTLQGDFKNRAEMIDFNIRIKNVTRSDAGKYRCEVSAPSEQGQNLEEDTVTLEVLVAPAVPSCEVPSSALSGTVVELRCQDKEGNPAPEYTWFKDGIRLLENPRLGSQSTNSSYTMNTKTGTLQFNTVSKLDTGEYSCEARNSVGYRRCPGKRMQVDDLNISGIIAAVVVVALVISVCGLGVCYAQRKGYFSKETSFQKSNSSSKATTMSENDFKHTKSFII

SEQ ID NO: 30137 - protein, 261 aa, Homo sapiens
  REGION 1..261: note = ENSP00000436801
  VARIANT 1: note = Any amino acid
XAILACKTPKKTVSSRLEWKKLGRSVSFVYYQQTLQGDFKNRAEMIDFNIRIKNVTRSDAGKYRCEVSAPSEQGQNLEEDTVTLEVLVAPAVPSCEVPSSALSGTVVELRCQDKEGNPAPEYTWFKDGIRLLENPRLGSQSTNSSYTMNTKTGTLQFNTVSKLDTGEYSCEARNSVGYRRCPGKRMQVDDLNISGIIAAVVVVALVISVCGLGVCYAQRKGYFSKETSFQSGRPNFGSMGVERRWMTNYLRLWQLGVEKIY

SEQ ID NO: 30138 - protein, 262 aa, Homo sapiens
  REGION 1..262: note = ENSP00000318416
MARRSRHRLLLLLLRYLVVALGYHKAYGFSAPKDQQVVTAVEYQGDFKNRAEMIDFNIRIKNVTRSDAGKYRCEVSAPSEQGQNLEEDTVTLEVLVAPAVPSCEVPSSALSGTVVELRCQDKEGNPAPEYTWFKDGIRLLENPRLGSQSTNSSYTMNTKTGTLQFNTVSKLDTGEYSCEARNSVGYRRCPGKRMQVDDLNISGIIAAVVVVALVISVCGLGVCYAQRKGYFSKETSFQKSNSSSKATTMSENDFKHTKSFII

SEQ ID NO: 30139 - protein, 310 aa, Homo sapiens
  REGION 1..310: note = ENSP00000299106
MALRRPPRLRLCARLPDFFLLLLFRGCLIGAVNLKSSNRTPVVQEFESVELSCIITDSQTSDPRIEWKKIQDEQTTYVFFDNKIQGDLAGRAEILGKTSLKIWNVTRRDSALYRCEVVARNDRKEIDEIVIELTVQVKPVTPVCRVPKAVPVGKMATLHCQESEGHPRPHYSWYRNDVPLPTDSRANPRFRNSSFHLNSETGTLVFTAVHKDDSGQYYCIASNDAGSARCEEQEMEVYDLNIGGIIGGVLVVLAVLALITLGICCAYRRGYFINNKQDGESYKNPGKPDGVNYIRTDEEGDFRHKSSFVI

SEQ ID NO: 30140 - protein, 38 aa, Homo sapiens
  REGION 1..38: note = ENSP00000432455
MALRRPPRLRLCARLPDFFLLLLFRESSLVCFPRLHSK

SEQ ID NO: 30141 - protein, 124 aa, Homo sapiens
  REGION 1..124: note = ENSP00000433206
MALRRPPRLRLCARLPDFFLLLLFRGDLAGRAEILGKTSLKIWNVTRRDSALYRCEVVARNDRKEIDEIVIELTVQVKPVTPVCRVPKAVPVGKMATLHCQESEGHPRPHYSWYRNDVPLPTDS

SEQ ID NO: 30142 - protein, 259 aa, Homo sapiens
  REGION 1..259: note = ENSP00000395742
MALRRPPRLRLCARLPDFFLLLLFRGCLIGAVNLKSSNRTPVVQEFESVELSCIITDSQTSDPRIEWKKIQDEQTTYVFFDNKIQVKPVTPVCRVPKAVPVGKMATLHCQESEGHPRPHYSWYRNDVPLPTDSRANPRFRNSSFHLNSETGTLVFTAVHKDDSGQYYCIASNDAGSARCEEQEMEVYDLNIGGIIGGVLVVLAVLALITLGICCAYRRGYFINNKQDGESYKNPGKPDGVNYIRTDEEGDFRHKSSFVI

SEQ ID NO: 30143 - protein, 120 aa, Homo sapiens
  REGION 1..120: note = ENSP00000432769
MGCVFQSTEDKCIFKIDWTLSPGEHAKDEYVLYYYSNLSVPIGRFQNRVHLMGDILCNDGSLLLQDVQEADQGTYICEIRLKGESQVFKKAVVLHVLPEEPKELMVHVGGLIQMGCVFQS

SEQ ID NO: 30144 - protein, 66 aa, Homo sapiens
  REGION 1..66: note = ENSP00000435145
MFCPLKLILLPVLLEHRRQMYIQDRLDSVTRRARQGRICAILLLQSQCAYWALPEPRTLDGGHLMQ

SEQ ID NO: 30145 - protein, 155 aa, Homo sapiens
  REGION 1..155: note = ENSP00000431791
MFCPLKLILLPVLLDYSLGLNDLNVSPPELTVHVGDSALMGCVFQSTEDKCIFKIDWTLSPGEHAKDEYVLYYYSNLSVPIGRFQNRVHLMGDILCNDGSLLLQDVQEADQGTYICEIRLKGESQVFKKAVVLHVLPEEPKELMVHVGGLIQMGC

SEQ ID NO: 30146 - protein, 220 aa, Homo sapiens
  REGION 1..220: note = ENSP00000492467
MGCVFQSTEDKCIFKIDWTLSPGEHAKDEYVLYYYSNLSVPIGRFQNRVHLMGDILCNDGSLLLQDVQEADQGTYICEIRLKGESQVFKKAVVLHVLPEEPKELMVHVGGLIQMGCVFQSTEVKHVTKVEWIFSGRRAKEEIVFRYYHKLRMSVEYSQSWGHFQNRVNLVGDIFRNDGSIMLQGVRESDGGNYTCSIHLGNLVFKKTIVLHVSPEEPRKW

SEQ ID NO: 30147 - protein, 355 aa, Homo sapiens
  REGION 1..355: note = ENSP00000431218
MGCVFQSTEDKCIFKIDWTLSPGEHAKDEYVLYYYSNLSVPIGRFQNRVHLMGDILCNDGSLLLQDVQEADQGTYICEIRLKGESQVFKKAVVLHVLPEEPKELMVHVGGLIQMGCVFQSTEVKHVTKVEWIFSGRRAKEEIVFRYYHKLRMSVEYSQSWGHFQNRVNLVGDIFRNDGSIMLQGVRESDGGNYTCSIHLGNLVFKKTIVLHVSPEEPRTLVTPAALRPLVLGGNQLVIIVGIVCATILLLPVLILIVKKTCGNKSSVNSTVLVKNTKKTNPEIKEKPCHFERCEGEKHIYSPIIVREVIEEEEPSEKSEATYMTMHPVWPSLRSDRNNSLEKKSGGGMPKTQQAF

SEQ ID NO: 30148 - protein, 305 aa, Homo sapiens
  REGION 1..305: note = ENSP00000431614
MGCVFQSTEDKCIFKIDWTLSPGEHAKDEYVLYYYSNLSVPIGRFQNRVHLMGDILCNDGSLLLQDVQEADQGTYICEIRLKGESQVFKKAVVLHVLPEEPKELMVHVGGLIQMGCVFQSTEVKHVTKVEWIFSGRRAKEEIVFRYYHKLRMSVEYSQSWGHFQNRVNLVGDIFRNDGSIMLQGVRESDGGNYTCSIHLGNLVFKKTIVLHVSPEEPRTLVTPAALRPLVLGGNQLVIIVGIVCATILLLPVLILIVKKTCGNKSSVNSTVLVKNTKKTNPEIKEKPCHFERCEGEVNTRFSLKH

SEQ ID NO: 30149 - protein, 394 aa, Homo sapiens
  REGION 1..394: note = ENSP00000348635
MFCPLKLILLPVLLDYSLGLNDLNVSPPELTVHVGDSALMGCVFQSTEDKCIFKIDWTLSPGEHAKDEYVLYYYSNLSVPIGRFQNRVHLMGDILCNDGSLLLQDVQEADQGTYICEIRLKGESQVFKKAVVLHVLPEEPKELMVHVGGLIQMGCVFQSTEVKHVTKVEWIFSGRRAKEEIVFRYYHKLRMSVEYSQSWGHFQNRVNLVGDIFRNDGSIMLQGVRESDGGNYTCSIHLGNLVFKKTIVLHVSPEEPRTLVTPAALRPLVLGGNQLVIIVGIVCATILLLPVLILIVKKTCGNKSSVNSTVLVKNTKKTNPEIKEKPCHFERCEGEKHIYSPIIVREVIEEEEPSEKSEATYMTMHPVWPSLRSDRNNSLEKKSGGGMPKTQQAF

SEQ ID NO: 30150 - protein, 384 aa, Homo sapiens
  REGION 1..384: note = ENSP00000292067
MVSGDYSLGLNDLNVSPPELTVHVGDSALMGCVFQSTEDKCIFKIDWTLSPGEHAKDEYVLYYYSNLSVPIGRFQNRVHLMGDILCNDGSLLLQDVQEADQGTYICEIRLKGESQVFKKAVVLHVLPEEPKELMVHVGGLIQMGCVFQSTEVKHVTKVEWIFSGRRAKEEIVFRYYHKLRMSVEYSQSWGHFQNRVNLVGDIFRNDGSIMLQGVRESDGGNYTCSIHLGNLVFKKTIVLHVSPEEPRTLVTPAALRPLVLGGNQLVIIVGIVCATILLLPVLILIVKKTCGNKSSVNSTVLVKNTKKTNPEIKEKPCHFERCEGEKHIYSPIIVREVIEEEEPSEKSEATYMTMHPVWPSLRSDRNNSLEKKSGGGMPKTQQAF

SEQ ID NO: 30151 - protein, 383 aa, Homo sapiens
  REGION 1..383: note = ENSP00000436117
MFCPLKLILLPVLLDYSLGLNDLNVSPPELTVHVGDSALMGCVFQSTEDKCIFKIDWTLSPGEHAKDEYVLYYYSNLSVPIGRFQNRVHLMGDILCNDGSLLLQDVQEADQGTYICEIRLKGESQVFKKAVVLHVLPEEPKELMVHVGGLIQMGCVFQSTEVKHVTKEEIVFRYYHKLRMSVEYSQSWGHFQNRVNLVGDIFRNDGSIMLQGVRESDGGNYTCSIHLGNLVFKKTIVLHVSPEEPRTLVTPAALRPLVLGGNQLVIIVGIVCATILLLPVLILIVKKTCGNKSSVNSTVLVKNTKKTNPEIKEKPCHFERCEGEKHIYSPIIVREVIEEEEPSEKSEATYMTMHPVWPSLRSDRNNSLEKKSGGGMPKTQQAF

SEQ ID NO: 30152 - protein, 230 aa, Homo sapiens
  REGION 1..230: note = ENSP00000388302
  VARIANT 1: note = Any amino acid
XYFVLGSLIYSDAKSKKNRNCVFITDTDPRVLEKQELQQPTYVALSYINRFMTDAARREQESLKKKIQPKLSLTLSSSVSRGNVSTPPRHSSGSLTPPVTPPITPSSSFRSSTPTGSEYDEEEVDYEESDSDESWTTESAISSEAILSSMCMNGGEEKPFACPVPGCKKRYKNVNGIKYHAKNGHRTQIRVRKPFKCRCGKSYKTAQGLRHHTINFHPPVSAEIIRKMQQ

SEQ ID NO: 30153 - protein, 243 aa, Homo sapiens
  REGION 1..243: note = ENSP00000283928
MTGIAAASFFSNTCRFGGCGLHFPTLADLIEHIEDNHIDTDPRVLEKQELQQPTYVALSYINRFMTDAARREQESLKKKIQPKLSLTLSSSVSRGNVSTPPRHSSGSLTPPVTPPITPSSSFRSSTPTGSEYDEEEVDYEESDSDESWTTESAISSEAILSSMCMNGGEEKPFACPVPGCKKRYKNVNGIKYHAKNGHRTQIRVRKPFKCRCGKSYKTAQGLRHHTINFHPPVSAEIIRKMQQ

SEQ ID NO: 30154 - protein, 173 aa, Homo sapiens
  REGION 1..173: note = ENSP00000387976
MWVANDTDPRVLEKQELQQPTYVALSYINRFMTDAARREQESLKKKIQPKLSLTLSSSVSRGNVSTPPRHSSGSLTPPVTPPITPSSSFRSSTPTGSEYDEEEVDYEESDSDESWTTESAISSEAILSSMCMNGGEEKPFACPVPGCKKRYKNVNGIKYHAKNGHRTQIRVRK

SEQ ID NO: 30155 - protein, 181 aa, Homo sapiens
  REGION 1..181: note = ENSP00000415096
MDILSLLMFGIPLKNTDPRVLEKQELQQPTYVALSYINRFMTDAARREQESLKKKIQPKLSLTLSSSVSRGNVSTPPRHSSGSLTPPVTPPITPSSSFRSSTPTGSEYDEEEVDYEESDSDESWTTESAISSEAILSSMCMNGGEEKPFACPVPGCKKRYKNVNGIKYHAKNGHRTQIRVR

SEQ ID NO: 30156 - protein, 80 aa, Homo sapiens
  REGION 1..80: note = ENSP00000415984
MTGIAAASFFSNTCRFGGCGLHFPTLADLIEHIEDNHIDTDPRVLEKQELQQPTYVALSYINRDIGHQMESRLNRSTVAS

SEQ ID NO: 30157 - protein, 66 aa, Homo sapiens
  REGION 1..66: note = ENSP00000399083
MTGIAAASFFSNTCRFGGCGLHFPTLADLIEHIEDNHIDTDPRVLEKQELQQPTYVALSYINRQRR

SEQ ID NO: 30158 - protein, 163 aa, Homo sapiens
  REGION 1..163: note = ENSP00000415558
MMPGQIPDPSVTTGSLPGLGPLTGLPSSALTVEELKYADIRNLGAMIAPLHFLEVKLGKRPQPVKSELDEEEERRKRRREKNKVAAARCRNKKKERTEFLQRESERLELMNAELKTQIEELKQERQQLILMLNRHRPTCIVRTDSVKTPESEGNPLLEQLEKK

SEQ ID NO: 30159 - protein, 133 aa, Homo sapiens
  REGION 1..133: note = ENSP00000452769
MMPGQIPDPSVTTGSLPGLGPLTGLPSSALTVEELKYADIRNLGAMIAPLHFLEVKLGKRPQPVKSELDEEEERRKRRREKNKVAAARCRNKKKERTEFLQRESERLELMNAELKTQIEELKQERQQLILMLN

SEQ ID NO: 30160 - protein, 163 aa, Homo sapiens; identical to SEQ ID NO: 30158
  REGION 1..163: note = ENSP00000399587

SEQ ID NO: 30161 - protein, 174 aa, Homo sapiens
  REGION 1..174: note = ENSP00000267569
MVAGWPATPPAMMPGQIPDPSVTTGSLPGLGPLTGLPSSALTVEELKYADIRNLGAMIAPLHFLEVKLGKRPQPVKSELDEEEERRKRRREKNKVAAARCRNKKKERTEFLQRESERLELMNAELKTQIEELKQERQQLILMLNRHRPTCIVRTDSVKTPESEGNPLLEQLEKK

SEQ ID NO: 30162 - protein, 163 aa, Homo sapiens; identical to SEQ ID NO: 30158
  REGION 1..163: note = ENSP00000409787

SEQ ID NO: 30163 - protein, 311 aa, Homo sapiens
  REGION 1..311: note = ENSP00000261247
MAVDIQPACLGLYCGKTLLFKNGSTEIYGECGVCPRGQRTNAQKYCQPCTESPELYDWLYLGFMAMLPLVLHWFFIEWYSGKKSSSALFQHITALFECSMAAIITLLVSDPVGVLYIRSCRVLMLSDWYTMLYNPSPDYVTTVHCTHEAVYPLYTIVFIYYAFCLVLMMLLRPLLVKKIACGLGKSDRFKSIYAALYFFPILTVLQAVGGGLLYYAFPYIILVLSLVTLAVYMSASEIENCYDLLVRKKRLIVLFSHWLLHAYGIISISRVDKLEQDLPLLALVPTPALFYLFTAKFTEPSRILSEGANGH

SEQ ID NO: 30164 - protein, 305 aa, Homo sapiens
  REGION 1..305: note = ENSP00000389699
MACLGLYCGKTLLFKNGSTEIYGECGVCPRGQRTNAQKYCQPCTESPELYDWLYLGFMAMLPLVLHWFFIEWYSGKKSSSALFQHITALFECSMAAIITLLVSDPVGVLYIRSCRVLMLSDWYTMLYNPSPDYVTTVHCTHEAVYPLYTIVFIYYAFCLVLMMLLRPLLVKKIACGLGKSDRFKSIYAALYFFPILTVLQAVGGGLLYYAFPYIILVLSLVTLAVYMSASEIENCYDLLVRKKRLIVLFSHWLLHAYGIISISRVDKLEQDLPLLALVPTPALFYLFTAKFTEPSRILSEGANGH

SEQ ID NO: 30165 - protein, 140 aa, Homo sapiens
  REGION 1..140: note = ENSP00000451723
MAVDIQPACLGLYCGKTLLFKNGSTEIYGECGVCPRGQRTNAQKYCQPCTESPELYDWLYLGFMAMLPLVLHWFFIEWYSGKKSSSALFQHITALFECSMAAIITLLIYHCIYLLRILLGINDAAPTSSGEEDCMWVREI

SEQ ID NO: 30166 - protein, 153 aa, Homo sapiens
  REGION 1..153: note = ENSP00000451076
MAVDIQPACLGLYCGKTLLFKNGSTEIYGECGVCPRGQRTNAQKYCQPCTESPELYDWLYLGFMAMLPLVLHWFFIEWYSGKKSSSALFQHITALFECSMAAIITLLVSDPVGVLYIRSCRVLMLSDWYTMLYNPSPDYVTTVHCTHEAVYPL

SEQ ID NO: 30167 - protein, 325 aa, Homo sapiens
  REGION 1..325: note = ENSP00000450749
MKGEIQQSLGAWVLLTVDIQPACLGLYCGKTLLFKNGSTEIYGECGVCPRGQRTNAQKYCQPCTESPELYDWLYLGFMAMLPLVLHWFFIEWYSGKKSSSALFQHITALFECSMAAIITLLVSDPVGVLYIRSCRVLMLSDWYTMLYNPSPDYVTTVHCTHEAVYPLYTIVFIYYAFCLVLMMLLRPLLVKKIACGLGKSDRFKSIYAALYFFPILTVLQAVGGGLLYYAFPYIILVLSLVTLAVYMSASEIENCYDLLVRKKRLIVLFSHWLLHAYGIISISRVDKLEQDLPLLALVPTPALFYLFTAKFTEPSRILSEGANGH

SEQ ID NO: 30168 - protein, 247 aa, Homo sapiens
  REGION 1..247: note = ENSP00000450813
MKGEIQQSLGAWVLLTCLGLYCGKTLLFKNGSTEIYGECGVCPRGQRTNAQKYCQPCTESPELYDWLYLGFMAMLPLVLHWFFIEWYSGKKSSSALFQHITALFECSMAAIITLLVSDPVGVLYIRSCRVLMLSDWYTMLYNPSPDYVTTVHCTHEAVYPLYTIVFIYYAFCLVLMMLLRPLLVKKIACGLGKSDRFKSIYAALYFFPILTVLQAVGGGLLYYAFPYIILVLSLVTLAVYMSASEIE

SEQ ID NO: 30169 - protein, 319 aa, Homo sapiens
  REGION 1..319: note = ENSP00000348351
MKGEIQQSLGAWVLLTCLGLYCGKTLLFKNGSTEIYGECGVCPRGQRTNAQKYCQPCTESPELYDWLYLGFMAMLPLVLHWFFIEWYSGKKSSSALFQHITALFECSMAAIITLLVSDPVGVLYIRSCRVLMLSDWYTMLYNPSPDYVTTVHCTHEAVYPLYTIVFIYYAFCLVLMMLLRPLLVKKIACGLGKSDRFKSIYAALYFFPILTVLQAVGGGLLYYAFPYIILVLSLVTLAVYMSASEIENCYDLLVRKKRLIVLFSHWLLHAYGIISISRVDKLEQDLPLLALVPTPALFYLFTAKFTEPSRILSEGANGH

SEQ ID NO: 30170 - protein, 213 aa, Homo sapiens
  REGION 1..213: note = ENSP00000479775
MAVDIQPACLGLYCGKTLLFKNGSTEIYGECGVCPRGQRTNAQKYCQPCTESPELYDWLYLGFMAMLPLVLHWFFIEWYSGKKSSSALFQHITALFECSMAAIITLLVSDPVGVLYIRSCRVLMLSDWYTMLYNPSPDYVTTVHCTHEAVYPLYTIVFIYYAFCLVLMMLLRPLLVKKIACGLGKSDRFKSIYAALYFFPILTVLQAVGGGLL

SEQ ID NO: 30171 - protein, 988 aa, Homo sapiens
  REGION 1..988: note = ENSP00000379441
MSFALEETLESDWVAVRPHVFDEREKHKFVFIVAWNEIEGKFAITCHNRTAQRQRSGSREQAGARGGAEAGGAASDGSRGPGSPAGRGRPEATASATLVRSPGPRRSSAWAEGGSPRSTRSLLGDPRLRSPGSKGAESRLRSPVRAKPIPGQKTSEADDAAGAAAAAARPAPREAQVSSVRIVSASGTVSEEIEVLEMVKEDEAPLALSDAEQPPPATELESPAEECSWAGLFSFQDLRAVHQQLCSVNSQLEPCLPVFPEEPSGMWTVLFGGAPEMTEQEIDTLCYQLQVYLGHGLDTCGWKILSQVLFTETDDPEEYYESLSELRQKGYEEVLQRARKRIQELLDKHKNTESMVELLDLYQMEDEAYSSLAEATTELYQYLLQPFRDMRELAMLRRQQIKISMENDYLGPRRIESLQKEDADWQRKAHMAVLSIQDLTVKYFEITAKAQKAVYDRMRADQKKFGKASWAAAAERMEKLQYAVSKETLQMMRAKEICLEQRKHALKEEMQSLRGGTEAIARLDQLEADYYDLQLQLYEVQFEILKCEELLLTAQLESIKRLISEKRDEVVYYDTYESMEAMLEKEEMAASAYLQREELQKLQQKARQLEARRGRVSAKKSYLRNKKEICIAKHNEKIQQRTRIEDEYRTHHTVQLKREKLHDEEERKSAWVSQERQRTLDRLRTFKQRYPGQVILKSTRLRLAHARRKGAASPVLQEDHCDSLPSVLQVEEKTEEVGEGRVKRGPSQTTEPQSLVQLEDTSLTQLEATSLPLSGVTSELPPTISLPLLNNNLEPCSVTINPLPSPLPPTPPPPPPPPPPPPPPPLPVAKDSGPETLEKDLPRKEGNEKRIPKSASAPSAHLFDSSQLVSARKKLRKTAEGLQRRRVSSPMDEVLASLKRGSFHLKKVEQRTLPPFPDEDDSNNILAQIRKGVKLKKVQKDVLRESFTLLPDTDPLTRSIHEALRRIKEASPESEDEEEALPCTDWEN

SEQ ID NO: 30172 - protein, 202 aa, Homo sapiens
  REGION 1..202: note = ENSP00000216039
MSCVPWKGDKAKSESLELPQAAPPQIYHEKQRRELCALHALNNVFQDSNAFTRDTLQEIFQRLSPNTMVTPHKKSMLGNGNYDVNVIMAALQTKGYEAVWWDKRRDVGVIALTNVMGFIMNLPSSLCWGPLKLPLKRQHWICVREVGGAYYNLDSKLKMPEWIGGESELRKFLKHHLRGKNCELLLVVPEEVEAHQSWRTDV

SEQ ID NO: 30173 - protein, 154 aa, Homo sapiens
  REGION 1..154: note = ENSP00000444798
  VARIANT 1: note = Any amino acid
XKGDKAKSESLELPQAAPPQIYHEKQRRELCALHALNNVFQDSNAFTRDTLQEIFQRDVGVIALTNVMGFIMNLPSSLCWGPLKLPLKRQHWICVREVGGAYYNLDSKLKMPEWIGGESELRKFLKHHLRGKNCELLLVVPEEVEAHQSWRTDV

SEQ ID NO: 30174 - protein, 123 aa, Homo sapiens
  REGION 1..123: note = ENSP00000410010
MSCVPWKGDKAKSESLELPQAAPPQIYHEKQRRELCALHALNNVFQDSNAFTRDTLQEIFQRLSPNTMVTPHKKSMLGNGNYDVNVIMAALQTKGYEAVWWDKRRDVGVIALTNVMGFIMNLP

SEQ ID NO: 30175 - protein, 104 aa, Homo sapiens
  REGION 1..104: note = ENSP00000415189
MSCVPWKGDKAKSESLELPQAAPPQIYHEKQRRELCALHALNNVFQDSNAFTRDTLQEIFQRLSPNTMVTPHKKSMLGNGNYDVNVIMAALQTKGYEAVWWDKR

SEQ ID NO: 30176 - protein, 62 aa, Homo sapiens
  REGION 1..62: note = ENSP00000393131
MSCVPWKGDKAKSESLELPQAAPPQIYHEKQRRELCALHALNNVFQDSNAFTRDTLQEIFQR

SEQ ID NO: 30177 - protein, 61 aa, Homo sapiens
  REGION 1..61: note = ENSP00000405182
MSCVPWKGDKAKSESLELPQAAPPQIYHEKQRRELCALHALNNVFQDSNAFTRDTLQEIFQ

SEQ ID NO: 30178 - protein, 661 aa, Homo sapiens
  REGION 1..661: note = ENSP00000344488
MTGGRFDFDDGGTYCGGWEEGKAHGHGICTGPKGQGEYSGSWSHGFEVVGGYTWPSGNTYQGYWAQGKRHGLGVETKGKWMYRGEWSHGFKGRYGVRQSLCTPARYEGTWSNGLQDGYGVETYGDGGTYQGQWAGGMRHGYGVRQSVPYGMATVIRSPLRTSLASLRSEQSNGSVLHDAAAAADSPAGTRGGFVLNFHADAELAGKKKGGLFRRGSLLGSMKLRKSESKSSISSKRSSVRSDAAMSRISSSDANSTISFGDVDCDFCPVEDHVDATTTETYMGEWKNDKRNGFGVSERSNGMKYEGEWANNKRHGYGCTVFPDGSKEEGKYKNNILVRGIRKQLIPIRHTKTREKVDRAIEGAQRAAAMARTKVEIANSRTAHARAKADAADQAALAARQECDIARAVARELSPDFYQPGPDYVKQRFQEGVDAKENPEEKVPEKPPTPKESPHFYRKGTTPPRSPEASPKHSHSPASSPKPLKKQNPSSGARLNQDKRSVADEQVTAIVNKPLMSKAPTKEAGAVVPQSKYSGRHHIPNPSNGELHSQYHGYYVKLNAPQHPPVDVEDGDGSSQSSSALVHKPSANKWSPSKSVTKPVAKESKAEPKAKKSELAIPKNPASNDSCPALEKEANSGPNSIMIVLVMLLNIGLAILFVHFLT

SEQ ID NO: 30179 - protein, 79 aa, Homo sapiens
  REGION 1..79: note = ENSP00000429652
MTGGRYLPGPVGRRHAAWLRRAPERALRHGHGDPLTAAYLAGLAAQRAEQWQRAPRRRSRRRQPGRHPRRFRAQLPRRR

SEQ ID NO: 30180 - protein, 748 aa, Homo sapiens
  REGION 1..748: note = ENSP00000284262
MSSGGRFNFDDGGSYCGGWEDGKAHGHGVCTGPKGQGEYTGSWSHGFEVLGVYTWPSGNTYQGTWAQGKRHGIGLESKGKWVYKGEWTHGFKGRYGVRECAGNGAKYEGTWSNGLQDGYGTETYSDGGTYQGQWVGGMRQGYGVRQSVPYGMAAVIRSPLRTSINSLRSEHTNGTALHPDASPAVAGSPAVSRGGFVLVAHSDSEILKSKKKGLFRRSLLSGLKLRKSESKSSLASQRSKQSSFRSEAGMSTVSSTASDIHSTISLGEAEAELAVIEDDIDATTTETYVGEWKNDKRSGFGVSQRSDGLKYEGEWASNRRHGYGCMTFPDGTKEEGKYKQNILVGGKRKNLIPLRASKIREKVDRAVEAAERAATIAKQKAEIAASRTSHSRAKAEAALTAAQKAQEEARIARITAKEFSPSFQHRENGLEYQRPKRQTSCDDIEVLSTGTPLQQESPELYRKGTTPSDLTPDDSPLQSFPTSPAATPPPAPAARNKVAHFSRQVSVDEERGGDIQMLLEGRAGDCARSSWGEEQAGGSRGVRSGALRGGLLVDDFRTRGSGRKQPGNPKPRERRTESPPVFTWTSHHRASNHSPGGSRLLELQEEKLSNYRMEMKPLLRMETHPQKRRYSKGGACRGLGDDHRPEDRGFGVQRLRSKAQNKENFRPASSAEPAVQKLASLRLGGAEPRLLRWDLTFSPPQKSLPVALESDEENGDELKSSTGSAPILVVMVILLNIGVAILFINFFI

SEQ ID NO: 30181 - protein, 331 aa, Homo sapiens
  REGION 1..331: note = ENSP00000360266
MTAKMETTFYDDALNASFLPSESGPYGYSNPKILKQSMTLNLADPVGSLKPHLRAKNSDLLTSPDVGLLKLASPELERLIIQSSNGHITTTPTPTQFLCPKNVTDEQEGFAEGFVRALAELHSQNTLPSVTSAAQPVNGAGMVAPAVASVAGGSGSGGFSASLHSEPPVYANLSNFNPGALSSGGGAPSYGAAGLAFPAQPQQQQQPPHHLPQQMPVQHPRLQALKEEPQTVPEMPGETPPLSPIDMESQERIKAERKRMRNRIAASKCRKRKLERIARLEEKVKTLKAQNSELASTANMLREQVAQLKQKVMNHVNSGCQLMLTQQLQTF

SEQ ID NO: 30182 - protein, 347 aa, Homo sapiens
  REGION 1..347: note = ENSP00000303315
MCTKMEQPFYHDDSYTATGYGRAPGGLSLHDYKLLKPSLAVNLADPYRSLKAPGARGPGPEGGGGGSYFSGQGSDTGASLKLASSELERLIVPNSNGVITTTPTPPGQYFYPRGGGSGGGAGGAGGGVTEEQEGFADGFVKALDDLHKMNHVTPPNVSLGATGGPPAGPGGVYAGPEPPPVYTNLSSYSPASASSGGAGAAVGTGSSYPTTTISYLPHAPPFAGGHPAQLGLGRGASTFKEEPQTVPEARSRDATPPVSPINMEDQERIKVERKRLRNRLAATKCRKRKLERIARLEDKVKTLKAENAGLSSTAGLLREQVAQLKQKVMTHVSNGCQLLLGVKGHAF

SEQ ID NO: 30183 - protein, 347 aa, Homo sapiens
  REGION 1..347: note = ENSP00000252818
METPFYGDEALSGLGGGASGSGGSFASPGRLFPGAPPTAAAGSMMKKDALTLSLSEQVAAALKPAAAPPPTPLRADGAPSAAPPDGLLASPDLGLLKLASPELERLIIQSNGLVTTTPTSSQFLYPKVAASEEQEFAEGFVKALEDLHKQNQLGAGAAAAAAAAAAGGPSGTATGSAPPGELAPAAAAPEAPVYANLSSYAGGAGGAGGAATVAFAAEPVPFPPPPPPGALGPPRLAALKDEPQTVPDVPSFGESPPLSPIDMDTQERIKAERKRLRNRIAASKCRKRKLERISRLEEKVKTLKSQNTELASTASLLREQVAQLKQKVLSHVNSGCQLLPQHQVPAY

SEQ ID NO: 30184 - protein, 166 aa, Homo sapiens
  REGION 1..166: note = ENSP00000475153
AAAPEAPVYANLSSYAGGAGGAGGAATVAFAAEPVPFPPPPPPGALGPPRLAALKDEPQTVPDVPSFGESPPLSPIDMDTQERIKAERKRLRNRIAASKCRKRKLERISRLEEKVKTLKSQNTELASTASLLREQVAQLKQKVLSHVNSGCQLLPQHQREEQSVRF

SEQ ID NO: 30185 - protein, 1352 aa, Homo sapiens
  REGION 1..1352: note = ENSP00000371740
MAHTTKVNGSASGKAGDILSGDQDKEQKDPYFVETPYGYQLDLDFLKYVDDIQKGNTIKRLNIQKRRKPSVPCPEPRTTSGQQGIWTSTESLSSSNSDDNKQCPNFLIARSQVTSTPISKPPPPLETSLPFLTIPENRQLPPPSPQLPKHNLHVTKTLMETRRRLEQERATMQMTPGEFRRPRLASFGGMGTTSSLPSFVGSGNHNPAKHQLQNGYQGNGDYGSYAPAAPTTSSMGSSIRHSPLSSGISTPVTNVSPMHLQHIREQMAIALKRLKELEEQVRTIPVLQVKISVLQEEKRQLVSQLKNQRAASQINVCGVRKRSYSAGNASQLEQLSRARRSGGELYIDYEEEEMETVEQSTQRIKEFRQLTADMQALEQKIQDSSCEASSELRENGECRSVAVGAEENMNDIVVYHRGSRSCKDAAVGTLVEMRNCGVSVTEAMLGVMTEADKEIELQQQTIESLKEKIYRLEVQLRETTHDREMTKLKQELQAAGSRKKVDKATMAQPLVFSKVVEAVVQTRDQMVGSHMDLVDTCVGTSVETNSVGISCQPECKNKVVGPELPMNWWIVKERVEMHDRCAGRSVEMCDKSVSVEVSVCETGSNTEESVNDLTLLKTNLNLKEVRSIGCGDCSVDVTVCSPKECASRGVNTEAVSQVEAAVMAVPRTADQDTSTDLEQVHQFTNTETATLIESCTNTCLSTLDKQTSTQTVETRTVAVGEGRVKDINSSTKTRSIGVGTLLSGHSGFDRPSAVKTKESGVGQININDNYLVGLKMRTIACGPPQLTVGLTASRRSVGVGDDPVGESLENPQPQAPLGMMTGLDHYIERIQKLLAEQQTLLAENYSELAEAFGEPHSQMGSLNSQLISTLSSINSVMKSASTEELRNPDFQKTSLGKITGNYLGYTCKCGGLQSGSPLSSQTSQPEQEVGTSEGKPISSLDAFPTQEGTLSPVNLTDDQIAAGLYACTNNESTLKSIMKKKDGNKDSNGAKKNLQFVGINGGYETTSSDDSSSDESSSSESDDECDVIEYPLEEEEEEEDEDTRGMAEGHHAVNIEGLKSARVEDEMQVQECEPEKVEIRERYELSEKMLSACNLLKNTINDPKALTSKDMRFCLNTLQHEWFRVSSQKSAIPAMVGDYIAAFEAISPDVLRYVINLADGNGNTALHYSVSHSNFEIVKLLLDADVCNVDHQNKAGYTPIMLAALAAVEAEKDMRIVEELFGCGDVNAKASQAGQTALMLAVSHGRIDMVKGLLACGADVNIQDDEGSTALMCASEHGHVEIVKLLLAQPGCNGHLEDNDGSTALSIALEAGHKDIAVLLYAHVNFAKAQSPGTPRLGRKTSPGPTHRGSFD

SEQ ID NO: 30186 - protein, 1352 aa, Homo sapiens; identical to SEQ ID NO: 30185
  REGION 1..1352: note = ENSP00000371734

SEQ ID NO: 30187 - protein, 1194 aa, Homo sapiens
  REGION 1..1194: note = ENSP00000371730
METRRRLEQERATMQMTPGEFRRPRLASFGGMGTTSSLPSFVGSGNHNPAKHQLQNGYQGNGDYGSYAPAAPTTSSMGSSIRHSPLSSGISTPVTNVSPMHLQHIREQMAIALKRLKELEEQVRTIPVLQVKISVLQEEKRQLVSQLKNQRAASQINVCGVRKRSYSAGNASQLEQLSRARRSGGELYIDYEEEEMETVEQSTQRIKEFRQLTADMQALEQKIQDSSCEASSELRENGECRSVAVGAEENMNDIVVYHRGSRSCKDAAVGTLVEMRNCGVSVTEAMLGVMTEADKEIELQQQTIESLKEKIYRLEVQLRETTHDREMTKLKQELQAAGSRKKVDKATMAQPLVFSKVVEAVVQTRDQMVGSHMDLVDTCVGTSVETNSVGISCQPECKNKVVGPELPMNWWIVKERVEMHDRCAGRSVEMCDKSVSVEVSVCETGSNTEESVNDLTLLKTNLNLKEVRSIGCGDCSVDVTVCSPKECASRGVNTEAVSQVEAAVMAVPRTADQDTSTDLEQVHQFTNTETATLIESCTNTCLSTLDKQTSTQTVETRTVAVGEGRVKDINSSTKTRSIGVGTLLSGHSGFDRPSAVKTKESGVGQININDNYLVGLKMRTIACGPPQLTVGLTASRRSVGVGDDPVGESLENPQPQAPLGMMTGLDHYIERIQKLLAEQQTLLAENYSELAEAFGEPHSQMGSLNSQLISTLSSINSVMKSASTEELRNPDFQKTSLGKITGNYLGYTCKCGGLQSGSPLSSQTSQPEQEVGTSEGKPISSLDAFPTQEGTLSPVNLTDDQIAAGLYACTNNESTLKSIMKKKDGNKDSNGAKKNLQFVGINGGYETTSSDDSSSDESSSSESDDECDVIEYPLEEEEEEEDEDTRGMAEGHHAVNIEGLKSARVEDEMQVQECEPEKVEIRERYELSEKMLSACNLLKNTINDPKALTSKDMRFCLNTLQHEWFRVSSQKSAIPAMVGDYIAAFEAISPDVLRYVINLADGNGNTALHYSVSHSNFEIVKLLLDADVCNVDHQNKAGYTPIMLAALAAVEAEKDMRIVEELFGCGDVNAKASQAGQTALMLAVSHGRIDMVKGLLACGADVNIQDDEGSTALMCASEHGHVEIVKLLLAQPGCNGHLEDNDGSTALSIALEAGHKDIAVLLYAHVNFAKAQSPGTPRLGRKTSPGPTHRGSFD

SEQ ID NO: 30188 - protein, 352 aa, Homo sapiens
  REGION 1..352: note = ENSP00000371726
ECDVIEYPLEEEEEEEDEDTRGMAEGHHAVNIEGLKSARVEDEMQVQECEPEKVEIRERYELSEKMLSACNLLKNTINDPKALTSKDMGQVQWLTPMIPTLREADAGGSHERFCLNTLQHEWFRVSSQKSAIPAMVGDYIAAFEAISPDVLRYVINLADGNGNTALHYSVSHSNFEIVKLLLDADVCNVDHQNKAGYTPIMLAALAAVEAEKDMRIVEELFGCGDVNAKASQAGQTALMLAVSHGRIDMVKGLLACGADVNIQDDEGSTALMCASEHGHVEIVKLLLAQPGCNGHLEDNDGSTALSIALEAGHKDIAVLLYAHVNFAKAQSPGTPRLGRKTSPGPTHRGSFD

SEQ ID NO: 30189 - protein, 283 aa, Homo sapiens
  REGION 1..283: note = ENSP00000371723
  VARIANT 1: note = Any amino acid
XYELSEKMLSACNLLKNTINDPKALTSKDMRFCLNTLQHEWFRVSSQKSAIPAMVGDYIAAFEAISPDVLRYVINLADGNGNTALHYSVSHSNFEIVKLLLDADVCNVDHQNKAGYTPIMLAALAAVEAEKDMRIVEELFGCGDVNAKASQAGQTALMLAVSHGRIDMVKGLLACGADVNIQDDEGSTALMCASEHGHVEIVKLLLAQPGCNGHLEDNDGSTALSIALEAGHKDIAVLLYAHVNFAKAQSPVSVVHLAFVNRLKSTRLVDPLPPGIDGRQILC

SEQ ID NO: 30190 - protein, 1352 aa, Homo sapiens; identical to SEQ ID NO: 30185
  REGION 1..1352: note = ENSP00000477725

SEQ ID NO: 30191 - protein, 851 aa, Homo sapiens
  REGION 1..851: note = ENSP00000465650
MAQVLHVPAPFPGTPGPASPPAFPAKDPDPPYSVETPYGYRLDLDFLKYVDDIEKGHTLRRVAVQRRPRLSSLPRGPGSWWTSTESLCSNASGDSRHSAYSYCGRGFYPQYGALETRGGFNPRVERTLLDARRRLEDQAATPTGLGSLTPSAAGSTASLVGVGLPPPTPRSSGLSTPVPPSAGHLAHVREQMAGALRKLRQLEEQVKLIPVLQVKLSVLQEEKRQLTVQLKSQKFLGHPTAGRGRSELCLDLPDPPEDPVALETRSVGTWVRERDLGMPDGEAALAAKVAVLETQLKKALQELQAAQARQADPQPQAWPPPDSPVRVDTVRVVEGPREVEVVASTAAGAPAQRAQSLEPYGTGLRALAMPGRPESPPVFRSQEVVETMCPVPAAATSNVHMVKKISITERSCDGAAGLPEVPAESSSSPPGSEVASLTQPEKSTGRVPTQEPTHREPTRQAASQESEEAGGTGGPPAGVRSIMKRKEEVADPTAHRRSLQFVGVNGGYESSSEDSSTAENISDNDSTENEAPEPRERVPSVAEAPQLRPAGTAAAKTSRQECQLSRESQHIPTAEGASGSNTEEEIRMELSPDLISACLALEKYLDNPNALTERELKVAYTTVLQEWLRLACRSDAHPELVRRHLVTFRAMSARLLDYVVNIADSNGNTALHYSVSHANFPVVQQLLDSGVCKVDKQNRAGYSPIMLTALATLKTQDDIETVLQLFRLGNINAKASQAGQTALMLAVSHGRVDVVKALLACEADVNVQDDDGSTALMCACEHGHKEIAGLLLAVPSCDISLTDRDGSTALMVALDAGQSEIASMLYSRMNIKCSFAPMSDDESPTSSSAEE

SEQ ID NO: 30192 - protein, 221 aa, Homo sapiens
  REGION 1..221: note = ENSP00000464896
  VARIANT 1: note = Any amino acid
XEKYLDNPNALTERELKVAYTTVLQEWLRLACRSDAHPELVRRHLVTFRAMSARLLDYVVNIADSNGNTALHYSVSHANFPVVQQLLDSGVCKVDKQNRAGYSPIMLTALATLKTQDDIETVLQLFRLGNINAKASQAGQTALMLAVSHGRVDVVKALLACEADVNVQDDDGSTALMCACEHGHKEIAGLLLAVPSCDISLTDRFAPMSDDESPTSSSAEE

SEQ ID NO: 30193 - protein, 859 aa, Homo sapiens
  REGION 1..859: note = ENSP00000468002
MAQVLHVPAPFPGTPGPASPPAFPAKDPDPPYSVETPYGYRLDLDFLKYVDDIEKGHTLRRVAVQRRPRLSSLPRGPGSWWTSTESLCSNASGDSRHSAYSYCGRGFYPQYGALETRGGFNPRVERTLLDARRRLEDQAATPTGLGSLTPSAAGSTASLVGVGLPPPTPRSSGLSTPVPPSAGHLAHVREQMAGALRKLRQLEEQVKLIPVLQVKLSVLQEEKRQLTVQLKSQKFLGHPTAGRGRSELCLDLPDPPEDPVALETRSVGTWVRERDLGMPDGEAALAAKVAVLETQLKKALQELQAAQARQADPQPQAWPPPDSPVRVDTVRVVEGPREVEVVASTAAGAPAQRAQSLEPYGTGLRALAMPGRPESPPVFRSQEVVETMCPVPAAATSNVHMVKKISITERSCDGAAGLPEVPAESSSSPPGSEVASLTQPEKSTGRVPTQEPTHREPTRQAASQESEEAGGTAPPLSSPPGGPPAGVRSIMKRKEEVADPTAHRRSLQFVGVNGGYESSSEDSSTAENISDNDSTENEAPEPRERVPSVAEAPQLRPAGTAAAKTSRQECQLSRESQHIPTAEGASGSNTEEEIRMELSPDLISACLALEKYLDNPNALTERELKVAYTTVLQEWLRLACRSDAHPELVRRHLVTFRAMSARLLDYVVNIADSNGNTALHYSVSHANFPVVQQLLDSGVCKVDKQNRAGYSPIMLTALATLKTQDDIETVLQLFRLGNINAKASQAGQTALMLAVSHGRVDVVKALLACEADVNVQDDDGSTALMCACEHGHKEIAGLLLAVPSCDISLTDRDGSTALMVALDAGQSEIASMLYSRMNIKCSFAPMSDDESPTSSSAEE

SEQ ID NO: 30194 - protein, 841 aa, Homo sapiens
  REGION 1..841: note = ENSP00000467029
MAQVLHVPAPFPGTPGPASPPAFPAKDPDPPYSVETPYGYRLDLDFLKYVDDIEKGHTLRRVAVQRRPRLSSLPRGPGSWWTSTESLCSNASGDSRHSAYSYCGRGFYPQYGALETRGGFNPRVERTLLDARRRLEDQAATPTGLGSLTPSAAGSTASLVGVGLPPPTPRSSGLSTPVPPSAGHLAHVREQMAGALRKLRQLEEQVKLIPVLQVKLSVLQEEKRQLTVQLKSQKFLGHPTAGRGRSELCLDLPDPPEDPVALETRSVGTWVRERDLGMPDGEAALAAKVAVLETQLKKALQELQAAQARQADPQPQAWPPPDSPVRVDTVRVVEGPREVEVVASTAAGAPAQRAQSLEPYGTGLRALAMPGRPESPPVFRSQEVVETMCPVPAAATSNVHMVKKISITERSCDGAAGLPEVPAESSSSPPGSEVASLTQPEKSTGRVPTQEPTHREPTRQAASQESEEAGGTGGPPAGVRSIMKRKEEVADPTAHRRSLQFVGVNGGYESSSEDSSTAENISDNDSTENEAPEPRERVPSVAEAPQLRPAGTAAAKTSRQECQLSRESQHIPTAEGASGSNTEEEIRMELSPDLISACLALEKYLDNPNALTERELKVAYTTVLQEWLRLACRSDAHPELVRRHLVTFRAMSARLLDYVVNIADSNGNTALHYSVSHANFPVVQQLLDSGVCKVDKQNRAGYSPIMLTALATLKTQDDIETVLQLFRLGNINAKASQAGQTALMLAVSHGRVDVVKALLACEADVNVQDDDGSTALMCACEHGHKEIAGLLLAVPSCDISLTDRDGSTALMVALDAGQSEIASMLYSRMNIKCSVSLNPAG

SEQ ID NO: 30195 - protein, 122 aa, Homo sapiens
  REGION 1..122: note = ENSP00000468409
MPDGEAALAAKVAVLETQLKKALQELQAAQARQADPQPQAWPPPDSPVRVDTVRVVEGPREVEVVASTAAGAPAQRAQSLEPYGTGLRALAMPGRPESPPVFRSQEVVETMCPVPAAATSNV

SEQ ID NO: 30196 - protein, 147 aa, Homo sapiens
  REGION 1..147: note = ENSP00000468490
MAQVLHVPAPFPGTPGPASPPAFPAKDPDPPYSVETPYGYRLDLDFLKYVDDIEKGHTLRRVAVQRRPRLSSLPRGPGSWWTSTESLCSNASGDSRHSAYSYCGRGFYPQYGALETRGGFNPRVERTLLDARRRLEDQAATPTGLGS

SEQ ID NO: 30197 - protein, 44 aa, Homo sapiens
  REGION 1..44: note = ENSP00000465914
MAQVLHVPAPFPGTPGPASPPAFPAKDPDPPYSVETPYGYRLDL

SEQ ID NO: 30198 - skipped

SEQ ID NO: 30199 - protein, 133 aa, Homo sapiens
  REGION 1..133: note = ENSP00000321161
MITPLASAETNEDMAVVWKLLREGNVNIQATQGGQTALMLGVSHDREDMVQALLSCQADVNLQDHDGSSALMVACHHGNVDLVRLLLAHPACDSSLTDKAGRTALSIALKSPTHMEIAGLLRAHAEQGRSLGL

SEQ ID NO: 30200 - protein, 995 aa, Homo sapiens
  REGION 1..995: note = ENSP00000360195
MEKTDAKDQSSQGDEEKDPPKSHPYSVETPYGFHLDLDFLKYVDDIEKGNTIKRIPIHRRAKQAKFSTLPRNFSLPDSGARPPAAPPLQNWSPVVPREASLGTQEQNQSPPLGNAPQASTSRSEVSYHRKALLAEATRQLEAAEPEDAELTFGSGRPQLLRASSMPATLLHSRASEEPGLSLGPPAPPALPPLQGEGSVCDGTFEPAEGLAGFHSSSPRASTRIPELVQEGAEPPEGVVKVPNHLPLPGPPFSFQNVLVVLEDKEDEHNAREAEVLFTPGSPTPSPPPLPSPIPENELLLEEIELNISEIPPPPPVEVDMRSIGIRVTEESLGLARVDPGSISSLKQQVSALEGELSGRTEELAQVRTALQQQEEEIKAREQRIRELEFTVAQLEGQFHQENAKDTQGQTDVMVNTDPVHGLLTRESCDKGIEVNLLGSMESESWGHRGEENGLLWGPDGHKQGNQSPAERVLLPQLSLPQGPEQVLTSSVHSFLSTELRIEEAGTEQEGGPQGGTRGAGGFLWGSDRKTPPAGREETSSNLPGKEHPGRPPSSPTDATIGQYVKKIQELLQEQWNCLEHGYPELASAIKQPASKLSSIQSQLLSSLNLLLSAYSAQAHPPKEPPASSSSPPVEISPSTSLKSIMKKKDYGFRAGGNGTKKNLQFVGVNGGYETTSSEETSGEDSTPEDLSDSEAEKKCDGPDHKHVKDAHLTCEAGQGIPEGTCHAAQESGPGEEVPHSKAERYKPSEEFLNACRALSQHLPETGTTTDQLLRQSLNTISQEWFRVSSRKSSSPAVVASYLHEVQPHSPHFLKLLVNLADHNGNTALHYSVSHSNFSIVKLLLETGVCNVDHQNKAGYTAVMITPLASAETNEDMAVVWKLLREGNVNIQATQGGQTALMLGVSHDREDMVQALLSCQADVNLQDHDGSSALMVACHHGNVDLVRLLLAHPACDSSLTDKAGRTALSIALKSPTHMEIAGLLRAHAEQGRSLGL

SEQ ID NO: 30201 - protein, 351 aa, Homo sapiens
  REGION 1..351: note = ENSP00000360192
MKKKDYGFRAGGNGTKKNLQFVGVNGGYETTSSEETSGEDSTPEDLSDSEAEKKCDGPDHKHVKDAHLTCEAGQGIPEGTCHAAQESGPGEEVPHSKAERYKPSEEFLNACRALSQHLPETGTTTDQLLRQSLNTISQEWFRVSSRKSSSPAVVASYLHEVQPHSPHFLKLLVNLADHNGNTALHYSVSHSNFSIVKLLLETGVCNVDHQNKAGYTAVMITPLASAETNEDMAVVWKLLREGNVNIQATQGGQTALMLGVSHDREDMVQALLSCQADVNLQDHDGSSALMVACHHGNVDLVRLLLAHPACDSSLTDKAGRTALSIALKSPTHMEIAGLLRAHAEQGRSLGL

SEQ ID NO: 30202 - protein, 367 aa, Homo sapiens
  REGION 1..367: note = ENSP00000346352
MEKTDEISPSTSLKSIMKKKDYGFRAGGNGTKKNLQFVGVNGGYETTSSEETSGEDSTPEDLSDSEAEKKCDGPDHKHVKDAHLTCEAGQGIPEGTCHAAQESGPGEEVPHSKAERYKPSEEFLNACRALSQHLPETGTTTDQLLRQSLNTISQEWFRVSSRKSSSPAVVASYLHEVQPHSPHFLKLLVNLADHNGNTALHYSVSHSNFSIVKLLLETGVCNVDHQNKAGYTAVMITPLASAETNEDMAVVWKLLREGNVNIQATQGGQTALMLGVSHDREDMVQALLSCQADVNLQDHDGSSALMVACHHGNVDLVRLLLAHPACDSSLTDKAGRTALSIALKSPTHMEIAGLLRAHAEQGRSLGL

SEQ ID NO: 30203 - protein, 495 aa, Homo sapiens
  REGION 1..495: note = ENSP00000371985
MTVMSGENVDEASAAPGHPQDGSYPRQADHDDHECCERVVINISGLRFETQLKTLAQFPNTLLGNPKKRMRYFDPLRNEYFFDRNRPSFDAILYYYQSGGRLRRPVNVPLDMFSEEIKFYELGEEAMEKFREDEGFIKEEERPLPEKEYQRQVWLLFEYPESSGPARVIAIVSVMVILISIVIFCLETLPELKDDKDFTGTVHRIDNTTVIYNSNIFTDPFFIVETLCIIWFSFELVVRFFACPSKTDFFKNIMNFIDIVAIIPYFITLGTEIAEQEGNQKGEQATSLAILRVIRLVRVFRIFKLSRHSKGLQILGQTLKASMRELGLLIFFLFIGVILFSSAVYFAEAEEAESHFSSIPDAFWWAVVSMTTVGYGDMYPVTIGGKIVGSLCAIAGVLTIALPVPVIVSNFNYFYHRETEGEEQAQLLHVSSPNLASDSDLSRRSSSTMSKSEYMEIEEDMNNSIAHYRQVNIRTANCTTANQNCVNKSKLLTDV

SEQ ID NO: 30204 - protein, 441 aa, Homo sapiens
  REGION 1..441: note = ENSP00000492506
LAQFPNTLLGNPKKRMRYFDPLRNEYFFDRNRPSFDAILYYYQSGGRLRRPVNVPLDMFSEEIKFYELGEEAMEKFREDEGFIKEEERPLPEKEYQRQVWLLFEYPESSGPARVIAIVSVMVILISIVIFCLETLPELKDDKDFTGTVHRIDNTTVIYNSNIFTDPFFIVETLCIIWFSFELVVRFFACPSKTDFFKNIMNFIDIVAIIPYFITLGTEIAEQEGNQKGEQATSLAILRVIRLVRVFRIFKLSRHSKGLQILGQTLKASMRELGLLIFFLFIGVILFSSAVYFAEAEEAESHFSSIPDAFWWAVVSMTTVGYGDMYPVTIGGKIVGSLCAIAGVLTIALPVPVIVSNFNYFYHRETEGEEQAQLLHVSSPNLASDSDLSRRSSSTMSKSEYMEIEEDMNNSIAHYRQVNIRTANCTTANQNCVNKSKLLTDV

SEQ ID NO: 30205 - protein, 38 aa, Homo sapiens
  REGION 1..38: note = ENSP00000492218
  VARIANT 1: note = Any amino acid
XEIAEQEGNQKGEQATSLAILRVIRLACTPTPGFQNWM

SEQ ID NO: 30206 - protein, 499 aa, Homo sapiens
  REGION 1..499: note = ENSP00000487785
MTVATGDPADEAAALPGHPQDTYDPEADHECCERVVINISGLRFETQLKTLAQFPETLLGDPKKRMRYFDPLRNEYFFDRNRPSFDAILYYYQSGGRLRRPVNVPLDIFSEEIRFYELGEEAMEMFREDEGYIKEEERPLPENEFQRQVWLLFEYPESSGPARIIAIVSVMVILISIVSFCLETLPIFRDENEDMHGSGVTFHTYSNSTIGYQQSTSFTDPFFIVETLCIIWFSFEFLVRFFACPSKAGFFTNIMNIIDIVAIIPYFITLGTELAEKPEDAQQGQQAMSLAILRVIRLVRVFRIFKLSRHSKGLQILGQTLKASMRELGLLIFFLFIGVILFSSAVYFAEADERESQFPSIPDAFWWAVVSMTTVGYGDMVPTTIGGKIVGSLCAIAGVLTIALPVPVIVSNFNYFYHRETEGEEQAQYLQVTSCPKIPSSPDLKKSRSASTISKSDYMEIQEGVNNSNEDFREENLKTANCTLANTNYVNITKMLTDV

SEQ ID NO: 30207 - protein, 356 aa, Homo sapiens
  REGION 1..356: note = ENSP00000358785
MTVATGDPADEAAALPGHPQDTYDPEADHECCERVVINISGLRFETQLKTLAQFPETLLGDPKKRMRYFDPLRNEYFFDRNRPSFDAILYYYQSGGRLRRPVNVPLDIFSEEIRFYELGEEAMEMFREDEGYIKEEERPLPENEFQRQVWLLFEYPESSGPARIIAIVSVMVILISIVSFCLETLPIFRDENEDMHGSGVTFHTYSNSTIGYQQSTSFTDPFFIVETLCIIWFSFEFLVRFFACPSKAGFFTNIMNIIDIVAIIPYFITLGTELAEKPEDAQQGQQAMSLAILRVIRLERRPLQSQKSKRGRQHLNTSHDCTLGINLVAGMTVQWTRASGPDDRQTPAVTTLHRMY

SEQ ID NO: 30208 - protein, 245 aa, Homo sapiens
  REGION 1..245: note = ENSP00000491627
MNIIDIVAIIPYFITLGTELAEKPEDAQQGQQAMSLAILRVIRLVRVFRIFKLSRHSKGLQILGQTLKASMRELGLLIFFLFIGVILFSSAVYFAEADERESQFPSIPDAFWWAVVSMTTVGYGDMVPTTIGGKIVGSLCAIAGVLTIALPVPVIVSNFNYFYHRETEGEEQAQYLQVTSCPKIPSSPDLKKSRSASTISKSDYMEIQEGVNNSNEDFREENLKTANCTLANTNYVNITKMLTDV

SEQ ID NO: 30209 - protein, 113 aa, Homo sapiens
  REGION 1..113: note = ENSP00000492008
MNIIDIVAIIPYFITLGTELAEKPEDAQQGQQAMSLAILRVIRLERRPLQSQKSKRGRQHLNTSHDCTLGINLVAGMTVQWTRASGPDDRQVCGSSVYKYISSISLSRVPLPS

SEQ ID NO: 30210 - protein, 305 aa, Homo sapiens
  REGION 1..305: note = ENSP00000492716
MHGSGVTFHTYSNSTIGYQQSTSFTDPFFIVETLCIIWFSFEFLVRFFACPSKAGFFTNIMNIIDIVAIIPYFITLGTELAEKPEDAQQGQQAMSLAILRVIRLVRVFRIFKLSRHSKGLQILGQTLKASMRELGLLIFFLFIGVILFSSAVYFAEADERESQFPSIPDAFWWAVVSMTTVGYGDMVPTTIGGKIVGSLCAIAGVLTIALPVPVIVSNFNYFYHRETEGEEQAQYLQVTSCPKIPSSPDLKKSRSASTISKSDYMEIQEGVNNSNEDFREENLKTANCTLANTNYVNITKMLTDV

SEQ ID NO: 30211 - protein, 59 aa, Homo sapiens
  REGION 1..59: note = ENSP00000491354
MNIIDIVAIIPYFITLGTELAEKPEDAQQGQQAMSLAILRVIRNADLCKARRVSGEGSI

SEQ ID NO: 30212 - protein, 499 aa, Homo sapiens; identical to SEQ ID NO: 30206
  REGION 1..499: note = ENSP00000491977

SEQ ID NO: 30213 - protein, 499 aa, Homo sapiens; identical to SEQ ID NO: 30206
  REGION 1..499: note = ENSP00000314520

SEQ ID NO: 30214 - protein, 499 aa, Homo sapiens; identical to SEQ ID NO: 30206
  REGION 1..499: note = ENSP00000491613

SEQ ID NO: 30215 - protein, 499 aa, Homo sapiens; identical to SEQ ID NO: 30206
  REGION 1..499: note = ENSP00000433109

SEQ ID NO: 30216 - protein, 377 aa, Homo sapiens
  REGION 1..377: note = ENSP00000491647
MEMFREDEGYIKEEERPLPENEFQRQVWLLFEYPESSGPARIIAIVSVMVILISIVSFCLETLPIFRDENEDMHGSGVTFHTYSNSTIGYQQSTSFTDPFFIVETLCIIWFSFEFLVRFFACPSKAGFFTNIMNIIDIVAIIPYFITLGTELAEKPEDAQQGQQAMSLAILRVIRLVRVFRIFKLSRHSKGLQILGQTLKASMRELGLLIFFLFIGVILFSSAVYFAEADERESQFPSIPDAFWWAVVSMTTVGYGDMVPTTIGGKIVGSLCAIAGVLTIALPVPVIVSNFNYFYHRETEGEEQAQYLQVTSCPKIPSSPDLKKSRSASTISKSDYMEIQEGVNNSNEDFREENLKTANCTLANTNYVNITKMLTDV

SEQ ID NO: 30217 - protein, 575 aa, Homo sapiens
  REGION 1..575: note = ENSP00000358784
MDERLSLLRSPPPPSARHRAHPPQRPASSGGAHTLVNHGYAEPAAGRELPPDMTVVPGDHLLEPEVADGGGAPPQGGCGGGGCDRYEPLPPSLPAAGEQDCCGERVVINISGLRFETQLKTLCQFPETLLGDPKRRMRYFDPLRNEYFFDRNRPSFDAILYYYQSGGRIRRPVNVPIDIFSEEIRFYQLGEEAMEKFREDEGFLREEERPLPRRDFQRQVWLLFEYPESSGPARGIAIVSVLVILISIVIFCLETLPEFRDEKDYPASTSQDSFEAAGNSTSGSRAGASSFSDPFFVVETLCIIWFSFELLVRFFACPSKATFSRNIMNLIDIVAIIPYFITLGTELAERQGNGQQAMSLAILRVIRLVRVFRIFKLSRHSKGLQILGQTLKASMRELGLLIFFLFIGVILFSSAVYFAEADDPTSGFSSIPDAFWWAVVTMTTVGYGDMHPVTIGGKIVGSLCAIAGVLTIALPVPVIVSNFNYFYHRETEGEEQSQYMHVGSCQHLSSSAEELRKARSNSTLSKSEYMVIEEGGMNHSAFPQTPFKTGNSTATCTTNNNPNSCVNIKKIFTDV

SEQ ID NO: 30218 - protein, 653 aa, Homo sapiens
  REGION 1..653: note = ENSP00000328511
MEVAMVSAESSGCNSHMPYGYAAQARARERERLAHSRAAAAAAVAAATAAVEGSGGSGGGSHHHHQSRGACTSHDPQSSRGSRRRRRQRSEKKKAHYRQSSFPHCSDLMPSGSEEKILRELSEEEEDEEEEEEEEEEGRFYYSEDDHGDECSYTDLLPQDEGGGGYSSVRYSDCCERVVINVSGLRFETQMKTLAQFPETLLGDPEKRTQYFDPLRNEYFFDRNRPSFDAILYYYQSGGRLKRPVNVPFDIFTEEVKFYQLGEEALLKFREDEGFVREEEDRALPENEFKKQIWLLFEYPESSSPARGIAIVSVLVILISIVIFCLETLPEFRDDRDLVMALSAGGHGGLLNDTSAPHLENSGHTIFNDPFFIVETVCIVWFSFEFVVRCFACPSQALFFKNIMNIIDIVSILPYFITLGTDLAQQQGGGNGQQQQAMSFAILRIIRLVRVFRIFKLSRHSKGLQILGHTLRASMRELGLLIFFLFIGVILFSSAVYFAEADEPTTHFQSIPDAFWWAVVTMTTVGYGDMKPITVGGKIVGSLCAIAGVLTIALPVPVIVSNFNYFYHRETENEEQTQLTQNAVSCPYLPSNLLKKFRSSTSSSLGDKSEYLEMEEGVKESLCAKEEKCQGKGDDSETDKNNCSNAKAVETDV

SEQ ID NO: 30219 - protein, 128 aa, Homo sapiens
  REGION 1..128: note = ENSP00000420755
MWLSSKAMLRNLGKSGLRVSCLGLGTWVTFGGQISDEVAERLMTIAYESGVNLFDTAEVYAAGKAEVILGSIIKKKGWRRSSLVITTKLYWGGKAETERGLSRKHIIEEIVRAMTHVINQGMAMYWGT

SEQ ID NO: 30220 - protein, 419 aa, Homo sapiens
  REGION 1..419: note = ENSP00000419952
MLAARTGAAGSQISEENTKLRRQSGFSVAGKDKSPKKASENAKDSSLSPSGESQLRARQLALLREVEMNWYLKLCDLSSEHTTVCTTGMPHRNLGKSGLRVSCLGLGTWVTFGGQISDEVAERLMTIAYESGVNLFDTAEVYAAGKAEVILGSIIKKKGWRRSSLVITTKLYWGGKAETERGLSRKHIIEGLKGSLQRLQLEYVDVVFANRPDSNTPMEEIVRAMTHVINQGMAMYWGTSRWSAMEIMEAYSVARQFNMIPPVCEQAEYHLFQREKVEVQLPELYHKIGVGAMTWSPLACGIISGKYGNGVPESSRASLKCYQWLKERIVSEEGRKQQNKLKDLSPIAERLGCTLPQLAVAWCLRNEGVSSVLLGSSTPEQLIENLGAIQVLPKMTSHVVNEIDNILRNKPYSKKDYRS

SEQ ID NO: 30221 - protein, 390 aa, Homo sapiens
  REGION 1..390: note = ENSP00000374287
MLAARTGAAGSQISEENTKLRRQSGFSVAGKDKSPKKASENAKDSSLSPSGESQLRARQLALLREVEMNWYLKLCDLSSEHTTVCTTGMPHRNLGKSGLRVSCLGLGTWVTFGGQISDEVAERLMTIAYESGVNLFDTAEVYAAGKAEVILGSIIKKKGWRRSSLVITTKLYWGGKAETERGLSRKHIIEEIVRAMTHVINQGMAMYWGTSRWSAMEIMEAYSVARQFNMIPPVCEQAEYHLFQREKVEVQLPELYHKIGVGAMTWSPLACGIISGKYGNGVPESSRASLKCYQWLKERIVSEEGRKQQNKLKDLSPIAERLGCTLPQLAVAWCLRNEGVSSVLLGSSTPEQLIENLGAIQVLPKMTSHVVNEIDNILRNKPYSKKDYRS

SEQ ID NO: 30222 - protein, 408 aa, Homo sapiens
  REGION 1..408: note = ENSP00000418956
MHLYKPACADIPSPKLGLPKSSESALKCRWHLAVTKTQPQAACKPVRPSGAAEQKYVEKFLRVHGISLQETTRAETGMAYRNLGKSGLRVSCLGLGTWVTFGGQISDEVAERLMTIAYESGVNLFDTAEVYAAGKAEVILGSIIKKKGWRRSSLVITTKLYWGGKAETERGLSRKHIIEGLKGSLQRLQLEYVDVVFANRPDSNTPMEEIVRAMTHVINQGMAMYWGTSRWSAMEIMEAYSVARQFNMIPPVCEQAEYHLFQREKVEVQLPELYHKIGVGAMTWSPLACGIISGKYGNGVPESSRASLKCYQWLKERIVSEEGRKQQNKLKDLSPIAERLGCTLPQLAVAWCLRNEGVSSVLLGSSTPEQLIENLGAIQVLPKMTSHVVNEIDNILRNKPYSKKDYRS

SEQ ID NO: 30223 - protein, 177 aa, Homo sapiens
  REGION 1..177: note = ENSP00000420221
MQLLLWGGRRVASAIHRCLSYSLHCLFQRYEVKTRNLGKSGLRVSCLGLGTWVTFGGQISDEVAERLMTIAYESGVNLFDTAEVYAAGKAEVILGSIIKKKGWRRSSLVITTKLYWGGKAETERGLSRKHIIEGLKGSLQRLQLEYVDVVFANRPDSNTPMEEIVRAMTHVINQGMA

SEQ ID NO: 30224 - protein, 401 aa, Homo sapiens
  REGION 1..401: note = ENSP00000305858
MQVSIACTEHNLKSRNGEDRLLSKQSSTAPNVVNAARAKFRTVAIIARSLGTFTPQHHISLKESTAKQTGMKYRNLGKSGLRVSCLGLGTWVTFGGQISDEVAERLMTIAYESGVNLFDTAEVYAAGKAEVILGSIIKKKGWRRSSLVITTKLYWGGKAETERGLSRKHIIEGLKGSLQRLQLEYVDVVFANRPDSNTPMEEIVRAMTHVINQGMAMYWGTSRWSAMEIMEAYSVARQFNMIPPVCEQAEYHLFQREKVEVQLPELYHKIGVGAMTWSPLACGIISGKYGNGVPESSRASLKCYQWLKERIVSEEGRKQQNKLKDLSPIAERLGCTLPQLAVAWCLRNEGVSSVLLGSSTPEQLIENLGAIQVLPKMTSHVVNEIDNILRNKPYSKKDYRS

SEQ ID NO: 30225 - protein, 372 aa, Homo sapiens
  REGION 1..372: note = ENSP00000374285
MQVSIACTEHNLKSRNGEDRLLSKQSSTAPNVVNAARAKFRTVAIIARSLGTFTPQHHISLKESTAKQTGMKYRNLGKSGLRVSCLGLGTWVTFGGQISDEVAERLMTIAYESGVNLFDTAEVYAAGKAEVILGSIIKKKGWRRSSLVITTKLYWGGKAETERGLSRKHIIEEIVRAMTHVINQGMAMYWGTSRWSAMEIMEAYSVARQFNMIPPVCEQAEYHLFQREKVEVQLPELYHKIGVGAMTWSPLACGIISGKYGNGVPESSRASLKCYQWLKERIVSEEGRKQQNKLKDLSPIAERLGCTLPQLAVAWCLRNEGVSSVLLGSSTPEQLIENLGAIQVLPKMTSHVVNEIDNILRNKPYSKKDYRS

SEQ ID NO: 30226 - protein, 81 aa, Homo sapiens
  REGION 1..81: note = ENSP00000418048
IACTEHNLKSRNGEDRLLSKQSSTAPNVVNAARAKFRTVAIIARSLGTFTPQHHISLKESTAKQTGMKYRNMGDIWRSNFR

SEQ ID NO: 30227 - protein, 304 aa, Homo sapiens [sequence omitted]

SEQ ID NO: 30228 - protein, 173 aa, Homo sapiens
  REGION 1..173: note = ENSP00000367351
MYPESTTGSPARLSLRQTGSPGMIYSTRYGSPKRQLQFYRNLGKSGLRVSCLGLGTWVTFGGQITDEMAEQLMTLAYDNGINLFDTAEVYAAGKAEVVLGNIIKKKGWRQRGERAGQARVTPPCSLGRRARDASKSAGAGCHLQAQACVPSSTQALQTTRGRAPLKPPPPLAS

SEQ ID NO: 30229 - protein, 367 aa, Homo sapiens
  REGION 1..367: note = ENSP00000367337
MYPESTTGSPARLSLRQTGSPGMIYSTRYGSPKRQLQFYRNLGKSGLRVSCLGLGTWVTFGGQITDEMAEQLMTLAYDNGINLFDTAEVYAAGKAEVVLGNIIKKKGWRRSSLVITTKIFWGGKAETERGLSRKHIIEGLKASLERLQLEYVDVVFANRPDPNTPMEETVRAMTHVINQGMAMYWGTSRWSSMEIMEAYSVARQFNLTPPICEQAEYHMFQREKVEVQLPELFHKIGVGAMTWSPLACGIVSGKYDSGIPPYSRASLKGYQWLKDKILSEEGRRQQAKLKELQAIAERLGCTLPQLAIAWCLRNEGVSSVLLGASNADQLMENIGAIQVLPKLSSSIIHEIDSILGNKPYSKKDYRS

SEQ ID NO: 30230 - protein, 353 aa, Homo sapiens
  REGION 1..353: note = ENSP00000367332
MYPESTTGSPARLSLRQTGSPGMIYRNLGKSGLRVSCLGLGTWVTFGGQITDEMAEQLMTLAYDNGINLFDTAEVYAAGKAEVVLGNIIKKKGWRRSSLVITTKIFWGGKAETERGLSRKHIIEGLKASLERLQLEYVDVVFANRPDPNTPMEETVRAMTHVINQGMAMYWGTSRWSSMEIMEAYSVARQFNLTPPICEQAEYHMFQREKVEVQLPELFHKIGVGAMTWSPLACGIVSGKYDSGIPPYSRASLKGYQWLKDKILSEEGRRQQAKLKELQAIAERLGCTLPQLAIAWCLRNEGVSSVLLGASNADQLMENIGAIQVLPKLSSSIIHEIDSILGNKPYSKKDYRS

SEQ ID NO: 30231 - protein, 51 aa, Homo sapiens
  REGION 1..51: note = ENSP00000398395
MYPESTTGSPARLSLRQTGSPGMIYSTRYGSPKRQLQFYRNLGKSGLRVSC

SEQ ID NO: 30232 - protein, 253 aa, Homo sapiens
  REGION 1..253: note = ENSP00000374283
MYPESTTGSPARLSLRQTGSPGMIYSTRYGSPKRQLQFYRNLGKSGLRVSCLGLGTWVTFGGQITDEMAEQLMTLAYDNGINLFDTAEVYAAGKAEVVLGNIIKKKGWRRSSLVITTKIFWGGKAETERGLSRKHIIEGLKASLERLQLEYVDVVFANRPDPNTPMEETVRAMTHVINQGMAMYWGTSRWSSMEIMEAYSVARQFNLTPPICEQAEYHMFQREKVEVQLPELFHKIGVGAMTWSPLACGIVSG

SEQ ID NO: 30233 - protein, 254 aa, Homo sapiens
  REGION 1..254: note = ENSP00000400285
MYPESTTGSPARLSLRQTGSPGMIYRNLGKSGLRVSCLGLGTWVTFGGQITDEMAEQLMTLAYDNGINLFDTAEVYAAGKAEVVLGNIIKKKGWRRSSLVITTKIFWGGKAETERGLSRKHIIEGLKASLERLQLEYVDVVFANRPDPNTPMEETVRAMTHVINQGMAMYWGTSRWSSMEIMEAYSVARQFNLTPPICEQAEYHMFQREKVEVQLPELFHKIGVGAMTWSPLACGIVSGKYDSGIPPYSRASLK

SEQ ID NO: 30234 - protein, 395 aa, Homo sapiens
  REGION 1..395: note = ENSP00000473602
MYPESTTGSPARLSLRQTGSPGMIYSTRYGSPKRQLQFYRNLGKSGLRVSCLGLGTWVTFGGQITDEMAEQLMTLAYDNGINLFDTAEVYAAGKAEVVLGNIIKKKGWRRSSLVITTKIFWGGKAETERGLSRKHIIEGLKASLERLQLEYVDVVFANRPDPNTPMEETVRAMTHVINQGMAMYWGTSRWSSMEIMEAYSVARQFNLTPPICEQAEYHMFQREKVEVQLPELFHKIGVGAMTWSPLACGIVSGKYDSGIPPYSRASLKGYQWLKDKILSEEGRRQQAKLKELQAIAERLGCTLPQLAIAWCLRNEGVSSVLLGASNADQLMENIGAIQVRVRGPAGQRAHPSPSPVQCILPGSSCVPGSVLGTQDAPVNHQSCAPGELAFQQEQT

SEQ ID NO: 30235 - protein, 367 aa, Homo sapiens; identical to SEQ ID NO: 30229
  REGION 1..367: note = ENSP00000164247

SEQ ID NO: 30236 - protein, 162 aa, Homo sapiens
  REGION 1..162: note = ENSP00000464860
  VARIANT 1: note = Any amino acid
XTGSPGMIYSTRYGSPKRQLQFYRNLGKSGLRVSCLGLGTWVTFGGQITDEMAEQLMTLAYDNGINLFDTAEVYAAGKAEVVLGNIIKKKGWRIFAASQPLRSSLFPSVRGNIRSSYKVGPPSSLPSKCHSESQCQGEPPPPPPWIPDTPSSCPIKFVFWQL

SEQ ID NO: 30237 - protein, 415 aa, Homo sapiens
  REGION 1..415: note = ENSP00000367323
MLSMTYSESLRSVSSRCHSEWALHPVRQTDTLELQRLREVRAAAQARNMESFLRMHGLSLDGCTAQRTGMKYRNLGKSGLRVSCLGLGTWVTFGGQITDEMAEQLMTLAYDNGINLFDTAEVYAAGKAEVVLGNIIKKKGWRRSSLVITTKIFWGGKAETERGLSRKHIIEGLKASLERLQLEYVDVVFANRPDPNTPMEGDPFSSSKSRTFIIEETVRAMTHVINQGMAMYWGTSRWSSMEIMEAYSVARQFNLTPPICEQAEYHMFQREKVEVQLPELFHKIGVGAMTWSPLACGIVSGKYDSGIPPYSRASLKGYQWLKDKILSEEGRRQQAKLKELQAIAERLGCTLPQLAIAWCLRNEGVSSVLLGASNADQLMENIGAIQVLPKLSSSIIHEIDSILGNKPYSKKDYRS

SEQ ID NO: 30238 - protein, 300 aa, Homo sapiens
  REGION 1..300: note = ENSP00000396167
MAEQLMTLAYDNGINLFDTAEVYAAGKAEVVLGNIIKKKGWRRSSLVITTKIFWGGKAETERGLSRKHIIEGLKASLERLQLEYVDVVFANRPDPNTPMEETVRAMTHVINQGMAMYWGTSRWSSMEIMEAYSVARQFNLTPPICEQAEYHMFQREKVEVQLPELFHKIGVGAMTWSPLACGIVSGKYDSGIPPYSRASLKGYQWLKDKILSEEGRRQQAKLKELQAIAERLGCTLPQLAIAWCLRNEGVSSVLLGASNADQLMENIGAIQVLPKLSSSIIHEIDSILGNKPYSKKDYRS

SEQ ID NO: 30239 - protein, 122 aa, Homo sapiens
  REGION 1..122: note = ENSP00000465785
YAAGKAEVVLGNIIKKKGWRIFAASQPLRSSLFPSVRGCVWDRSGRAILRVSGPKSVNHPPSSGRDVSHSSGKWSPPAQTGERSPGVMEPKGRRSGAIHPSLPGAYGPFPGQGPHPPWDQLG

SEQ ID NO: 30240 - protein, 353 aa, Homo sapiens; identical to SEQ ID NO: 30230
  REGION 1..353: note = ENSP00000318772

SEQ ID NO: 30241 - protein, 367 aa, Homo sapiens; identical to SEQ ID NO: 30229
  REGION 1..367: note = ENSP00000340824

SEQ ID NO: 30242 - protein, 404 aa, Homo sapiens
  REGION 1..404: note = ENSP00000302719
MQVSIACTEQNLRSRSSEDRLCGPRPGPGGGNGGPAGGGHGNPPGGGGSGPKARAALVPRPPAPAGALRESTGRGTGMKYRNLGKSGLRVSCLGLGTWVTFGSQISDETAEDVLTVAYEHGVNLFDTAEVYAAGKAERTLGNILKSKGWRRSSYVITTKIFWGGQAETERGLSRKHIIEGLRGSLERLQLGYVDIVFANRSDPNCPMEEIVRAMTYVINQGLALYWGTSRWGAAEIMEAYSMARQFNLIPPVCEQAEHHLFQREKVEMQLPELYHKIGVGSVTWYPLACGLITSKYDGRVPDTCRASIKGYQWLKDKVQSEDGKKQQAKVMDLLPVAHQLGCTVAQLAIAWCLRSEGVSSVLLGVSSAEQLIEHLGALQVLSQLTPQTVMEIDGLLGNKPHSKK

SEQ ID NO: 30243 - protein, 42 aa, Homo sapiens
  REGION 1..42: note = ENSP00000458237
MQVSIACTEQNLRSRSSEDRLCGPRPGPGGGPQSAFPPGPSA

SEQ ID NO: 30244 - protein, 101 aa, Homo sapiens
  REGION 1..101: note = ENSP00000461290
MQVSIACTEQNLRSRSSEDRLCGPRPGPGGGNGGPAGGGHGNPPGGGGSGPKARAALVPRPPAPAGALRESTGRGTGMKYRYGGGRAAHPFRFPFGTPETA

SEQ ID NO: 30245 - protein, 511 aa, Homo sapiens
  REGION 1..511: note = ENSP00000368785
MGQGDESERIVINVGGTRHQTYRSTLRTLPGTRLAWLAEPDAHSHFDYDPRADEFFFDRHPGVFAHILNYYRTGKLHCPADVCGPLYEEELAFWGIDETDVEPCCWMTYRQHRDAEEALDSFGGAPLDNSADDADADGPGDSGDGEDELEMTKRLALSDSPDGRPGGFWRRWQPRIWALFEDPYSSRYARYVAFASLFFILVSITTFCLETHERFNPIVNKTEIENVRNGTQVRYYREAETEAFLTYIEGVCVVWFTFEFLMRVIFCPNKVEFIKNSLNIIDFVAILPFYLEVGLSGLSSKAAKDVLGFLRVVRFVRILRIFKLTRHFVGLRVLGHTLRASTNEFLLLIIFLALGVLIFATMIYYAERIGAQPNDPSASEHTHFKNIPIGFWWAVVTMTTLGYGDMYPQTWSGMLVGALCALAGVLTIAMPVPVIVNNFGMYYSLAMAKQKLPKKKKKHIPRPPQLGSPNYCKSVVNSPHHSTQSDTCPLAQEEILEINRAGRKPLRGMSI

SEQ ID NO: 30246 - protein, 585 aa, Homo sapiens
  REGION 1..585: note = ENSP00000265969
MGQGDESERIVINVGGTRHQTYRSTLRTLPGTRLAWLAEPDAHSHFDYDPRADEFFFDRHPGVFAHILNYYRTGKLHCPADVCGPLYEEELAFWGIDETDVEPCCWMTYRQHRDAEEALDSFGGAPLDNSADDADADGPGDSGDGEDELEMTKRLALSDSPDGRPGGFWRRWQPRIWALFEDPYSSRYARYVAFASLFFILVSITTFCLETHERFNPIVNKTEIENVRNGTQVRYYREAETEAFLTYIEGVCVVWFTFEFLMRVIFCPNKVEFIKNSLNIIDFVAILPFYLEVGLSGLSSKAAKDVLGFLRVVRFVRILRIFKLTRHFVGLRVLGHTLRASTNEFLLLIIFLALGVLIFATMIYYAERIGAQPNDPSASEHTHFKNIPIGFWWAVVTMTTLGYGDMYPQTWSGMLVGALCALAGVLTIAMPVPVIVNNFGMYYSLAMAKQKLPKKKKKHIPRPPQLGSPNYCKSVVNSPHHSTQSDTCPLAQEEILEINRADSKLNGEVAKAALANEDCPHIDQALTPDEGLPFTRSGTRERYGPCFLLSTGEYACPPGGGMRKDLCKESPVIAKYMPTEAVRVT

SEQ ID NO: 30247 - protein, 504 aa, Homo sapiens
  REGION 1..504: note = ENSP00000491189
  VARIANT 1: note = Any amino acid
XGGAPLDNSADDADADGPGDSGDGEDELEMTKRLALSDSPDGRPGGFWRRWQPRIWALFEDPYSSRYARYVAFASLFFILVSITTFCLETHERFNPIVNKTEIENVRNGTQVRYYREAETEAFLTYIEGVCVVWFTFEFLMRVIFCPNKVEFIKNSLNIIDFVAILPFYLEVGLSGLSSKAAKDVLGFLRVVRFVRILRIFKLTRHFVGLRVLGHTLRASTNEFLLLIIFLALGVLIFATMIYYAERIGAQPNDPSASEHTHFKNIPIGFWWAVVTMTTLGYGDMYPQTWSGMLVGALCALAGVLTIAMPVPVIVNNFGMYYSLAMAKQKLPKKKKKHIPRPPQLGSPNYCKSVVNSPHHSTQSDTCPLAQEEILEINRADSKLNGEVAKAALANEDCPHIDQALTPDEGLPFTRSGTRERYGPCFLLSTGEYACPPGGGMRKGHSAEMDNSIWFFLRETEPSHVSTYGVPIEDSTFAIASWNLESLLSNRRIVYTSWTHWTKR

SEQ ID NO: 30248 - protein, 304 aa, Homo sapiens
  REGION 1..304: note = ENSP00000491644
DFVAILPFYLEVGLSGLSSKAAKDVLGFLRVVRFVRILRIFKLTRHFVGLRVLGHTLRASTNEFLLLIIFLALGVLIFATMIYYAERIGAQPNDPSASEHTHFKNIPIGFWWAVVTMTTLGYGDMYPQTWSGMLVGALCALAGVLTIAMPVPVIVNNFGMYYSLAMAKQKLPKKKKKHIPRPPQLGSPNYCKSVVNSPHHSTQSDTCPLAQEEILEINRADSKLNGEVAKAALANEDCPHIDQALTPDEGLPFTRSGTRERYGPCFLLSTGEYACPPGGGMRKDLCKESPVIAKYMPTEAVRVT

SEQ ID NO: 30249 - protein, 182 aa, Homo sapiens
  REGION 1..182: note = ENSP00000491700
  VARIANT 1: note = Any amino acid
XERIGAQPNDPSASEHTHFKNIPIGFWWAVVTMTTLGYGDMYPQTWSGMLVGALCALAGVLTIAMPVPVIVNNFGMYYSLAMAKQKLPKKKKKHIPRPPQLGSPNYCKSVVNSPHHSTQSDTCPLAQEEILEINRAGHSAEMDNSIWFFLRETEPSHVSTYGVPIEDSTFAIASWNLESLLR

SEQ ID NO: 30250 - protein, 77 aa, Homo sapiens
  REGION 1..77: note = ENSP00000491016
KQKLPKKKKKHIPRPPQLGSPNYCKSVVNSPHHSTQSDTCPLAQEEILEINRAGISKEQMTQRRMTALSKKECQIPN

SEQ ID NO: 30251 - protein, 103 aa, Homo sapiens
  REGION 1..103: note = ENSP00000492663
IPRPPQLGSPNYCKSVVNSPHHSTQSDTCPLAQEEILEINRAGHSAEMDNSIWFFLRETEPSHVSTYGVPIEDSTFAIASWNLESLLSNRRIVYTSWTHWTKR

SEQ ID NO: 30252 - protein, 70 aa, Homo sapiens
  REGION 1..70: note = ENSP00000491345
  VARIANT 1: note = Any amino acid
XPHHSTQSDTCPLAQEEILEINRAGHSAEMDNSIWFFLRETEPSHVSTYGVPIEDSTFAIASWNLESLLR

SEQ ID NO: 30253 - protein, 79 aa, Homo sapiens
  REGION 1..79: note = ENSP00000491247
  VARIANT 1: note = Any amino acid
XPLAQEEILEINRADSKLNGEVAKAALANEDCPHIDQALTPDEGLPFTRSGTRERYGPCFLLSTGEYACPPGGGMRKGM

SEQ ID NO: 30254 - protein, 629 aa, Homo sapiens
  REGION 1..629: note = ENSP00000448301
MGKIENNERVILNVGGTRHETYRSTLKTLPGTRLALLASSEPPGDCLTTAGDKLQPSPPPLSPPPRAPPLSPGPGGCFEGGAGNCSSRGGRASDHPGGGREFFFDRHPGVFAYVLNYYRTGKLHCPADVCGPLFEEELAFWGIDETDVEPCCWMTYRQHRDAEEALDIFETPDLIGGDPGDDEDLAAKRLGIEDAAGLGGPDGKSGRWRRLQPRMWALFEDPYSSRAARFIAFASLFFILVSITTFCLETHEAFNIVKNKTEPVINGTSVVLQYEIETDPALTYVEGVCVVWFTFEFLVRIVFSPNKLEFIKNLLNIIDFVAILPFYLEVGLSGLSSKAAKDVLGFLRVVRFVRILRIFKLTRHFVGLRVLGHTLRASTNEFLLLIIFLALGVLIFATMIYYAERVGAQPNDPSASEHTQFKNIPIGFWWAVVTMTTLGYGDMYPQTWSGMLVGALCALAGVLTIAMPVPVIVNNFGMYYSLAMAKQKLPRKRKKHIPPAPQASSPTFCKTELNMACNSTQSDTCLGKDNRLLEHNRSVLSGDDSTGSEPPLSPPERLPIRRSSTRDKNRRGETCFLLTTGDYTCASDGGIRKVLYRIYHGLLTAEKGTVEFSHTKDYTGNRLLLLNVP

SEQ ID NO: 30255 - protein, 613 aa, Homo sapiens
  REGION 1..613: note = ENSP00000449941
MGKIENNERVILNVGGTRHETYRSTLKTLPGTRLALLASSEPPGDCLTTAGDKLQPSPPPLSPPPRAPPLSPGPGGCFEGGAGNCSSRGGRASDHPGGGREFFFDRHPGVFAYVLNYYRTGKLHCPADVCGPLFEEELAFWGIDETDVEPCCWMTYRQHRDAEEALDIFETPDLIGGDPGDDEDLAAKRLGIEDAAGLGGPDGKSGRWRRLQPRMWALFEDPYSSRAARFIAFASLFFILVSITTFCLETHEAFNIVKNKTEPVINGTSVVLQYEIETDPALTYVEGVCVVWFTFEFLVRIVFSPNKLEFIKNLLNIIDFVAILPFYLEVGLSGLSSKAAKDVLGFLRVVRFVRILRIFKLTRHFVGLRVLGHTLRASTNEFLLLIIFLALGVLIFATMIYYAERVGAQPNDPSASEHTQFKNIPIGFWWAVVTMTTLGYGDMYPQTWSGMLVGALCALAGVLTIAMPVPVIVNNFGMYYSLAMAKQKLPRKRKKHIPPAPQASSPTFCKTELNMACNSTQSDTCLGKDNRLLEHNRSVLSGDDSTGSEPPLSPPERLPIRRSSTRDKNRRGETCFLLTTGDYTCASDGGIRKDNCKEVVITGYTQAEARSLT

SEQ ID NO: 30256 - protein, 638 aa, Homo sapiens
  REGION 1..638: note = ENSP00000449253
MGKIENNERVILNVGGTRHETYRSTLKTLPGTRLALLASSEPPGDCLTTAGDKLQPSPPPLSPPPRAPPLSPGPGGCFEGGAGNCSSRGGRASDHPGGGREFFFDRHPGVFAYVLNYYRTGKLHCPADVCGPLFEEELAFWGIDETDVEPCCWMTYRQHRDAEEALDIFETPDLIGGDPGDDEDLAAKRLGIEDAAGLGGPDGKSGRWRRLQPRMWALFEDPYSSRAARFIAFASLFFILVSITTFCLETHEAFNIVKNKTEPVINGTSVVLQYEIETDPALTYVEGVCVVWFTFEFLVRIVFSPNKLEFIKNLLNIIDFVAILPFYLEVGLSGLSSKAAKDVLGFLRVVRFVRILRIFKLTRHFVGLRVLGHTLRASTNEFLLLIIFLALGVLIFATMIYYAERVGAQPNDPSASEHTQFKNIPIGFWWAVVTMTTLGYGDMYPQTWSGMLVGALCALAGVLTIAMPVPVIVNNFGMYYSLAMAKQKLPRKRKKHIPPAPQASSPTFCKTELNMACNSTQSDTCLGKDNRLLEHNRSVLSGDDSTGSEPPLSPPERLPIRRSSTRDKNRRGETCFLLTTGDYTCASDGGIRKGYEKSRSLNNIAGLAGNALRLSPVTSPYNSPCPLRRSRSPIPSIL

SEQ ID NO: 30257 - protein, 558 aa, Homo sapiens
  REGION 1..558: note = ENSP00000319877
MGKIENNERVILNVGGTRHETYRSTLKTLPGTRLALLASSEPPGDCLTTAGDKLQPSPPPLSPPPRAPPLSPGPGGCFEGGAGNCSSRGGRASDHPGGGREFFFDRHPGVFAYVLNYYRTGKLHCPADVCGPLFEEELAFWGIDETDVEPCCWMTYRQHRDAEEALDIFETPDLIGGDPGDDEDLAAKRLGIEDAAGLGGPDGKSGRWRRLQPRMWALFEDPYSSRAARFIAFASLFFILVSITTFCLETHEAFNIVKNKTEPVINGTSVVLQYEIETDPALTYVEGVCVVWFTFEFLVRIVFSPNKLEFIKNLLNIIDFVAILPFYLEVGLSGLSSKAAKDVLGFLRVVRFVRILRIFKLTRHFVGLRVLGHTLRASTNEFLLLIIFLALGVLIFATMIYYAERVGAQPNDPSASEHTQFKNIPIGFWWAVVTMTTLGYGDMYPQTWSGMLVGALCALAGVLTIAMPVPVIVNNFGMYYSLAMAKQKLPRKRKKHIPPAPQASSPTFCKTELNMACNSTQSDTCLGKDNRLLEHNRSDNCKEVVITGYTQAEARSLT

SEQ ID NO: 30258 - protein, 583 aa, Homo sapiens
  REGION 1..583: note = ENSP00000438423
MGKIENNERVILNVGGTRHETYRSTLKTLPGTRLALLASSEPPGDCLTTAGDKLQPSPPPLSPPPRAPPLSPGPGGCFEGGAGNCSSRGGRASDHPGGGREFFFDRHPGVFAYVLNYYRTGKLHCPADVCGPLFEEELAFWGIDETDVEPCCWMTYRQHRDAEEALDIFETPDLIGGDPGDDEDLAAKRLGIEDAAGLGGPDGKSGRWRRLQPRMWALFEDPYSSRAARFIAFASLFFILVSITTFCLETHEAFNIVKNKTEPVINGTSVVLQYEIETDPALTYVEGVCVVWFTFEFLVRIVFSPNKLEFIKNLLNIIDFVAILPFYLEVGLSGLSSKAAKDVLGFLRVVRFVRILRIFKLTRHFVGLRVLGHTLRASTNEFLLLIIFLALGVLIFATMIYYAERVGAQPNDPSASEHTQFKNIPIGFWWAVVTMTTLGYGDMYPQTWSGMLVGALCALAGVLTIAMPVPVIVNNFGMYYSLAMAKQKLPRKRKKHIPPAPQASSPTFCKTELNMACNSTQSDTCLGKDNRLLEHNRSGYEKSRSLNNIAGLAGNALRLSPVTSPYNSPCPLRRSRSPIPSIL

SEQ ID NO: 30259 - protein, 618 aa, Homo sapiens
  REGION 1..618: note = ENSP00000376966
MGKIENNERVILNVGGTRHETYRSTLKTLPGTRLALLASSEPPGDCLTTAGDKLQPSPPPLSPPPRAPPLSPGPGGCFEGGAGNCSSRGGRASDHPGGGREFFFDRHPGVFAYVLNYYRTGKLHCPADVCGPLFEEELAFWGIDETDVEPCCWMTYRQHRDAEEALDIFETPDLIGGDPGDDEDLAAKRLGIEDAAGLGGPDGKSGRWRRLQPRMWALFEDPYSSRAARFIAFASLFFILVSITTFCLETHEAFNIVKNKTEPVINGTSVVLQYEIETDPALTYVEGVCVVWFTFEFLVRIVFSPNKLEFIKNLLNIIDFVAILPFYLEVGLSGLSSKAAKDVLGFLRVVRFVRILRIFKLTRHFVGLRVLGHTLRASTNEFLLLIIFLALGVLIFATMIYYAERVGAQPNDPSASEHTQFKNIPIGFWWAVVTMTTLGYGDMYPQTWSGMLVGALCALAGVLTIAMPVPVIVNNFGMYYSLAMAKQKLPRKRKKHIPPAPQASSPTFCKTELNMACNSTQSDTCLGKDNRLLEHNRSVLSGDDSTGSEPPLSPPERLPIRRSSTRDKNRRGETCFLLTTGDYTCASDGGIRKGIRNGHSILHHLDNGTKCHYLRIIF

SEQ ID NO: 30260 - protein, 613 aa, Homo sapiens; identical to SEQ ID NO: 30255
  REGION 1..613: note = ENSP00000298972

SEQ ID NO: 30261 - protein, 728 aa, Homo sapiens
  REGION 1..728: note = ENSP00000366158
MLSSVCVSSFRGRQGASKQQPAPPPQPPESPPPPPLPPQQQQPAQPGPAASPAGPPAPRGPGDRRAEPCPGLPAAAMGRHGGGGGDSGKIVINVGGVRHETYRSTLRTLPGTRLAGLTEPEAAARFDYDPGADEFFFDRHPGVFAYVLNYYRTGKLHCPADVCGPLFEEELGFWGIDETDVEACCWMTYRQHRDAEEALDSFEAPDPAGAANAANAAGAHDGGLDDEAGAGGGGLDGAGGELKRLCFQDAGGGAGGPPGGAGGAGGTWWRRWQPRVWALFEDPYSSRAARYVAFASLFFILISITTFCLETHEGFIHISNKTVTQASPIPGAPPENITNVEVETEPFLTYVEGVCVVWFTFEFLMRITFCPDKVEFLKSSLNIIDCVAILPFYLEVGLSGLSSKAAKDVLGFLRVVRFVRILRIFKLTRHFVGLRVLGHTLRASTNEFLLLIIFLALGVLIFATMIYYAERIGADPDDILGSNHTYFKNIPIGFWWAVVTMTTLGYGDMYPKTWSGMLVGALCALAGVLTIAMPVPVIVNNFGMYYSLAMAKQKLPKKKNKHIPRPPQPGSPNYCKPDPPPPPPPHPHHGSGGISPPPPITPPSMGVTVAGAYPAGPHTHPGLLRGGAGGLGIMGLPPLPAPGEPCPLAQEEVIEINRADPRPNGDPAAAALAHEDCPAIDQPAMSPEDKSPITPGSRGRYSRDRACFLLTDYAPSPDGSIRKALVTA

SEQ ID NO: 30262 - protein, 44 aa, Homo sapiens
  REGION 1..44: note = ENSP00000432438
MSPEDKSPITPGSRGRYSRDRACFLLTDYAPSPDGSIRKALVTA

SEQ ID NO: 30263 - protein, 757 aa, Homo sapiens
  REGION 1..757: note = ENSP00000434241
MLSSVCVSSFRGRQGASKQQPAPPPQPPESPPPPPLPPQQQQPAQPGPAASPAGPPAPRGPGDRRAEPCPGLPAAAMGRHGGGGGDSGKIVINVGGVRHETYRSTLRTLPGTRLAGLTEPEAAARFDYDPGADEFFFDRHPGVFAYVLNYYRTGKLHCPADVCGPLFEEELGFWGIDETDVEACCWMTYRQHRDAEEALDSFEAPDPAGAANAANAAGAHDGGLDDEAGAGGGGLDGAGGELKRLCFQDAGGGAGGPPGGAGGAGGTWWRRWQPRVWALFEDPYSSRAARYVAFASLFFILISITTFCLETHEGFIHISNKTVTQASPIPGAPPENITNVEVETEPFLTYVEGVCVVWFTFEFLMRITFCPDKVEFLKSSLNIIDCVAILPFYLEVGLSGLSSKAAKDVLGFLRVVRFVRILRIFKLTRHFVGLRVLGHTLRASTNEFLLLIIFLALGVLIFATMIYYAERIGADPDDILGSNHTYFKNIPIGFWWAVVTMTTLGYGDMYPKTWSGMLVGALCALAGVLTIAMPVPVIVNNFGMYYSLAMAKQKLPKKKNKHIPRPPQPGSPNYCKPDPPPPPPPHPHHGSGGISPPPPITPPSMGVTVAGAYPAGPHTHPGLLRGGAGGLGIMGLPPLPAPGEPCPLAQEEVIEINRADPRPNGDPAAAALAHEDCPAIDQPAMSPEDKSPITPGSRGRYSRDRACFLLTDYAPSPDGSIRKATGAPPLPPQDWRKPGPPSFLPDLNANAAAWISP

SEQ ID NO: 30264 - protein, 636 aa, Homo sapiens
  REGION 1..636: note = ENSP00000358711
MAAGVAAWLPFARAAAIGWMPVANCPMPLAPADKNKRQDELIVLNVSGRRFQTWRTTLERYPDTLLGSTEKEFFFNEDTKEYFFDRDPEVFRCVLNFYRTGKLHYPRYECISAYDDELAFYGILPEIIGDCCYEEYKDRKRENAERLMDDNDSENNQESMPSLSFRQTMWRAFENPHTSTLALVFYYVTGFFIAVSVITNVVETVPCGTVPGSKELPCGERYSVAFFCLDTACVMIFTVEYLLRLFAAPSRYRFIRSVMSIIDVVAIMPYYIGLVMTNNEDVSGAFVTLRVFRVFRIFKFSRHSQGLRILGYTLKSCASELGFLLFSLTMAIIIFATVMFYAEKGSSASKFTSIPASFWYTIVTMTTLGYGDMVPKTIAGKIFGSICSLSGVLVIALPVPVIVSNFSRIYHQNQRADKRRAQKKARLARIRVAKTGSSNAYLHSKRNGLLNEALELTGTPEEEHMGKTTSLIESQHHHLLHCLEKTTNHEFIDEQMFEQNCMESSMQNYPSTRSPSLSSHPGLTTTCCSRRSKKTTHLPNSNLPATRLRSMQELSTIHIQGSEQPSLTTSRSSLNLKADDGLRPNCKTSQITTAIISIPTPPALTPEGESRPPPASPGPNTNIPSIASNVVKVSAL

SEQ ID NO: 30265 - protein, 655 aa, Homo sapiens
  REGION 1..655: note = ENSP00000319591
MAAGVAAWLPFARAAAIGWMPVANCPMPLAPADKNKRQDELIVLNVSGRRFQTWRTTLERYPDTLLGSTEKEFFFNEDTKEYFFDRDPEVFRCVLNFYRTGKLHYPRYECISAYDDELAFYGILPEIIGDCCYEEYKDRKRENAERLMDDNDSENNQESMPSLSFRQTMWRAFENPHTSTLALVFYYVTGFFIAVSVITNVVETVPCGTVPGSKELPCGERYSVAFFCLDTACVMIFTVEYLLRLFAAPSRYRFIRSVMSIIDVVAIMPYYIGLVMTNNEDVSGAFVTLRVFRVFRIFKFSRHSQGLRILGYTLKSCASELGFLLFSLTMAIIIFATVMFYAEKGSSASKFTSIPASFWYTIVTMTTLGYGDMVPKTIAGKIFGSICSLSGVLVIALPVPVIVSNFSRIYHQNQRADKRRAQKKARLARIRVAKTGSSNAYLHSKRNGLLNEALELTGTPEEEHMGKTTSLIESQHHHLLHCLEKTTGLSYLVDDPLLSVRTSTIKNHEFIDEQMFEQNCMESSMQNYPSTRSPSLSSHPGLTTTCCSRRSKKTTHLPNSNLPATRLRSMQELSTIHIQGSEQPSLTTSRSSLNLKADDGLRPNCKTSQITTAIISIPTPPALTPEGESRPPPASPGPNTNIPSIASNVVKVSAL

SEQ ID NO: 30266 - protein, 636 aa, Homo sapiens; identical to SEQ ID NO: 30264
  REGION 1..636: note = ENSP00000306923

SEQ ID NO: 30267 - protein, 494 aa, Homo sapiens
  REGION 1..494: note = ENSP00000295082
MDGSGERSLPEPGSQSSAASDDIEIVVNVGGVRQVLYGDLLSQYPETRLAELINCLAGGYDTIFSLCDDYDPGKREFYFDRDPDAFKCVIEVYYFGEVHMKKGICPICFKNEMDFWKVDLKFLDDCCKSHLSEKREELEEIARRVQLILDDLGVDAAEGRWRRCQKCVWKFLEKPESSCPARVVAVLSFLLILVSSVVMCMGTIPELQVLDAEGNRVEHPTLENVETACIGWFTLEYLLRLFSSPNKLHFALSFMNIVDVLAILPFYVSLTLTHLGARMMELTNVQQAVQALRIMRIARIFKLARHSSGLQTLTYALKRSFKELGLLLMYLAVGIFVFSALGYTMEQSHPETLFKSIPQSFWWAIITMTTVGYGDIYPKTTLGKLNAAISFLCGVIAIALPIHPIINNFVRYYNKQRVLETAAKHELELMELNSSSGGEGKTGGSRSDLDNLPPEPAGKEAPSCSSRLKLSHSDTFIPLLTEEKHHRTRLQSCK

SEQ ID NO: 30268 - protein, 519 aa, Homo sapiens
  REGION 1..519: note = ENSP00000312129
MPMPSRDGGLHPRHHHYGSHSPWSQLLSSPMETPSIKGLYYRRVRKVGALDASPVDLKKEILINVGGRRYLLPWSTLDRFPLSRLSKLRLCRSYEEIVQLCDDYDEDSQEFFFDRSPSAFGVIVSFLAAGKLVLLQEMCALSFQEELAYWGIEEAHLERCCLRKLLRKLEELEELAKLHREDVLRQQRETRRPASHSSRWGLCMNRLREMVENPQSGLPGKVFACLSILFVATTAVSLCVSTMPDLRAEEDQGECSRKCYYIFIVETICVAWFSLEFCLRFVQAQDKCQFFQGPLNIIDILAISPYYVSLAVSEEPPEDGERPSGSSYLEKVGLVLRVLRALRILYVMRLARHSLGLQTLGLTVRRCTREFGLLLLFLAVAITLFSPLVYVAEKESGRVLEFTSIPASYWWAIISMTTVGYGDMVPRSVPGQMVALSSILSGILIMAFPATSIFHTFSHSYLELKKEQEQLQARLRHLQNTGPASECELLDPHVASEHELMNDVNDLILEGPALPIMHM

SEQ ID NO: 30269 - protein, 256 aa, Homo sapiens
  REGION 1..256: note = ENSP00000457897
MPMPSRDGGLHPRHHHYGSHSPWSQLLSSPMETPSIKGLYYRRVRKVGALDASPVDLKKEILINVGGRRYLLPWSTLDRFPLSRLSKLRLCRSYEEIVQLCDDYDEDSQEFFFDRSPSAFGVIVSFLAAGKLVLLQEMCALSFQEELAYWGIEEAHLERCCLRKLLRKLEELEELAKLHREDVLRQQRETRRPASHSSRWGLCMNRLREMVENPQSGLPGKVFACLSILFVATTAVSLCVSTMPDLRAEEDQVSGL

SEQ ID NO: 30270 - protein, 913 aa, Homo sapiens
  REGION 1..913: note = ENSP00000355974
MTMAGGRRGLVAPQNTFLENIVRRSNDTNFVLGNAQIVDWPIVYSNDGFCKLSGYHRAEVMQKSSTCSFMYGELTDKDTIEKVRQTFENYEMNSFEILMYKKNRTPVWFFVKIAPIRNEQDKVVLFLCTFSDITAFKQPIEDDSCKGWGKFARLTRALTSSRGVLQQLAPSVQKGENVHKHSRLAEVLQLGSDILPQYKQEAPKTPPHIILHYCVFKTTWDWIILILTFYTAILVPYNVSFKTRQNNVAWLVVDSIVDVIFLVDIVLNFHTTFVGPAGEVISDPKLIRMNYLKTWFVIDLLSCLPYDVINAFENVDEGISSLFSSLKVVRLLRLGRVARKLDHYIEYGAAVLVLLVCVFGLAAHWMACIWYSIGDYEIFDEDTKTIRNNSWLYQLAMDIGTPYQFNGSGSGKWEGGPSKNSVYISSLYFTMTSLTSVGFGNIAPSTDIEKIFAVAIMMIGSLLYATIFGNVTTIFQQMYANTNRYHEMLNSVRDFLKLYQVPKGLSERVMDYIVSTWSMSRGIDTEKVLQICPKDMRADICVHLNRKVFKEHPAFRLASDGCLRALAMEFQTVHCAPGDLIYHAGESVDSLCFVVSGSLEVIQDDEVVAILGKGDVFGDVFWKEATLAQSCANVRALTYCDLHVIKRDALQKVLEFYTAFSHSFSRNLILTYNLRKRIVFRKISDVKREEEERMKRKNEAPLILPPDHPVRRLFQRFRQQKEARLAAERGGRDLDDLDVEKGNVLTEHASANHSLVKASVVTVRESPATPVSFQAASTSGVPDHAKLQAPGSECLGPKGGGGDCAKRKSWARFKDACGKSEDWNKVSKAESMETLPERTKASGEATLKKTDSCDSGITKSDLRLDNVGEARSPQDRSPILAEVKHSFYPIPEQTLQATVLEGLTLLPRLVSNS

SEQ ID NO: 30271 - protein, 940 aa, Homo sapiens
  REGION 1..940: note = ENSP00000490983
MTMAGGRRGLVAPQNTFLENIVRRSNDTNFVLGNAQIVDWPIVYSNDGFCKLSGYHRAEVMQKSSTCSFMYGELTDKDTIEKVRQTFENYEMNSFEILMYKKNRTPVWFFVKIAPIRNEQDKVVLFLCTFSDITAFKQPIEDDSCKGWGKFARLTRALTSSRGVLQQLAPSVQKGENVHKHSRLAEVLQLGSDILPQYKQEAPKTPPHIILHYCVFKTTWDWIILILTFYTAILVPYNVSFKTRQNNVAWLVVDSIVDVIFLVDIVLNFHTTFVGPAGEVISDPKLIRMNYLKTWFVIDLLSCLPYDVINAFENVDEVSAFMGDPGKIGFADQIPPPLEGRESQGISSLFSSLKVVRLLRLGRVARKLDHYIEYGAAVLVLLVCVFGLAAHWMACIWYSIGDYEIFDEDTKTIRNNSWLYQLAMDIGTPYQFNGSGSGKWEGGPSKNSVYISSLYFTMTSLTSVGFGNIAPSTDIEKIFAVAIMMIGSLLYATIFGNVTTIFQQMYANTNRYHEMLNSVRDFLKLYQVPKGLSERVMDYIVSTWSMSRGIDTEKVLQICPKDMRADICVHLNRKVFKEHPAFRLASDGCLRALAMEFQTVHCAPGDLIYHAGESVDSLCFVVSGSLEVIQDDEVVAILGKGDVFGDVFWKEATLAQSCANVRALTYCDLHVIKRDALQKVLEFYTAFSHSFSRNLILTYNLRKRIVFRKISDVKREEEERMKRKNEAPLILPPDHPVRRLFQRFRQQKEARLAAERGGRDLDDLDVEKGNVLTEHASANHSLVKASVVTVRESPATPVSFQAASTSGVPDHAKLQAPGSECLGPKGGGGDCAKRKSWARFKDACGKSEDWNKVSKAESMETLPERTKASGEATLKKTDSCDSGITKSDLRLDNVGEARSPQDRSPILAEVKHSFYPIPEQTLQATVLEGLTLLPRLVSNS

SEQ ID NO: 30272 - protein, 962 aa, Homo sapiens
  REGION 1..962: note = ENSP00000492513
MTMAGGRRGLVAPQNTFLENIVRRSNDTNFVLGNAQIVDWPIVYSNDGFCKLSGYHRAEVMQKSSTCSFMYGELTDKDTIEKVRQTFENYEMNSFEILMYKKNRTPVWFFVKIAPIRNEQDKVVLFLCTFSDITAFKQPIEDDSCKGWGKFARLTRALTSSRGVLQQLAPSVQKGENVHKHSRLAEVLQLGSDILPQYKQEAPKTPPHIILHYCVFKTTWDWIILILTFYTAILVPYNVSFKTRQNNVAWLVVDSIVDVIFLVDIVLNFHTTFVGPAGEVISDPKLIRMNYLKTWFVIDLLSCLPYDVINAFENVDEGISSLFSSLKVVRLLRLGRVARKLDHYIEYGAAVLVLLVCVFGLAAHWMACIWYSIGDYEIFDEDTKTIRNNSWLYQLAMDIGTPYQFNGSGSGKWEGGPSKNSVYISSLYFTMTSLTSVGFGNIAPSTDIEKIFAVAIMMIGSLLYATIFGNVTTIFQQMYANTNRYHEMLNSVRDFLKLYQVPKGLSERVMDYIVSTWSMSRGIDTEKVLQICPKDMRADICVHLNRKVFKEHPAFRLASDGCLRALAMEFQTVHCAPGDLIYHAGESVDSLCFVVSGSLEVIQDDEVVAILGKGDVFGDVFWKEATLAQSCANVRALTYCDLHVIKRDALQKVLEFYTAFSHSFSRNLILTYNLRKRIVFRKISDVKREEEERMKRKNEAPLILPPDHPVRRLFQRFRQQKEARLAAERGGRDLDDLDVEKGNVLTEHASANHSLVKASVVTVRESPATPVSFQAASTSGVPDHAKLQAPGSECLGPKGGGGDCAKRKSWARFKDACGKSEDWNKVSKAESMETLPERTKASGEATLKKTDSCDSGITKSDLRLDNVGEARSPQDRSPILAEVKHSFYPIPEQTLQATVLEVRHELKEDIKALNAKMTNIEKQLSEILRILTSRRSSQSPQELFEISRPQSPESERDIFGAS

SEQ ID NO: 30273 - protein, 989 aa, Homo sapiens
  REGION 1..989: note = ENSP00000271751
MTMAGGRRGLVAPQNTFLENIVRRSNDTNFVLGNAQIVDWPIVYSNDGFCKLSGYHRAEVMQKSSTCSFMYGELTDKDTIEKVRQTFENYEMNSFEILMYKKNRTPVWFFVKIAPIRNEQDKVVLFLCTFSDITAFKQPIEDDSCKGWGKFARLTRALTSSRGVLQQLAPSVQKGENVHKHSRLAEVLQLGSDILPQYKQEAPKTPPHIILHYCVFKTTWDWIILILTFYTAILVPYNVSFKTRQNNVAWLVVDSIVDVIFLVDIVLNFHTTFVGPAGEVISDPKLIRMNYLKTWFVIDLLSCLPYDVINAFENVDEVSAFMGDPGKIGFADQIPPPLEGRESQGISSLFSSLKVVRLLRLGRVARKLDHYIEYGAAVLVLLVCVFGLAAHWMACIWYSIGDYEIFDEDTKTIRNNSWLYQLAMDIGTPYQFNGSGSGKWEGGPSKNSVYISSLYFTMTSLTSVGFGNIAPSTDIEKIFAVAIMMIGSLLYATIFGNVTTIFQQMYANTNRYHEMLNSVRDFLKLYQVPKGLSERVMDYIVSTWSMSRGIDTEKVLQICPKDMRADICVHLNRKVFKEHPAFRLASDGCLRALAMEFQTVHCAPGDLIYHAGESVDSLCFVVSGSLEVIQDDEVVAILGKGDVFGDVFWKEATLAQSCANVRALTYCDLHVIKRDALQKVLEFYTAFSHSFSRNLILTYNLRKRIVFRKISDVKREEEERMKRKNEAPLILPPDHPVRRLFQRFRQQKEARLAAERGGRDLDDLDVEKGNVLTEHASANHSLVKASVVTVRESPATPVSFQAASTSGVPDHAKLQAPGSECLGPKGGGGDCAKRKSWARFKDACGKSEDWNKVSKAESMETLPERTKASGEATLKKTDSCDSGITKSDLRLDNVGEARSPQDRSPILAEVKHSFYPIPEQTLQATVLEVRHELKEDIKALNAKMTNIEKQLSEILRILTSRRSSQSPQELFEISRPQSPESERDIFGAS

SEQ ID NO: 30274 - protein, 962 aa, Homo sapiens; identical to SEQ ID NO: 30272
  REGION 1..962: note = ENSP00000492697

SEQ ID NO: 30275 - protein, 962 aa, Homo sapiens; identical to SEQ ID NO: 30272
  REGION 1..962: note = ENSP00000491725

SEQ ID NO: 30276 - protein, 962 aa, Homo sapiens; identical to SEQ ID NO: 30272
  REGION 1..962: note = ENSP00000492302

SEQ ID NO: 30277 - protein, 208 aa, Homo sapiens
  REGION 1..208: note = ENSP00000492609
  VARIANT 1: note = Any amino acid
XHASANHSLVKASVVTVRESPATPVSFQAASTSGVPDHAKLQAPGSECLGPKGGGGDCAKRKSWARFKDACGKSEDWNKVSKAESMETLPERTKASGEATLKKTDSCDSGITKSDLRLDNVGEARSPQDRSPILAEVKHSFYPIPEQTLQATVLELLCPPPGGDFMILSALTANIREKNIFSPKVFMLRSFNFYPLQLKRINVNLSAA

SEQ ID NO: 30278 - protein, 427 aa, Homo sapiens
  REGION 1..427: note = ENSP00000492865
  VARIANT 1: note = Any amino acid
XQYKQEAPKTPPHIILHYCVFKTTWDWIILILTFYTAILVPYNVSFKTRQNNVAWLVVDSIVDVIFLVDIVLNFHTTFVGPAGEVISDPKLIRMNYLKTWFVIDLLSCLPYDVINAFENVDEGISSLFSSLKVVRLLRLGRVARKLDHYIEYGAAVLVLLVCVFGLAAHWMACIWYSIGDYEIFDEDTKTIRNNSWLYQLAMDIGTPYQFNGSGSGKWEGGPSKNSVYISSLYFTMTSLTSVGFGNIAPSTDIEKIFAVAIMMIGSLLYATIFGNVTTIFQQMYANTNRYHEMLNSVRDFLKLYQVPKGLSERVMDYIVSTWSMSRGIDTEKVLQICPKDMRADICVHLNRKVFKEHPAFRLASDGCLRALAMEFQTVHCAPGDLIYHAGESVDSLCFVVSGSLEVIQDDEVVAILDCVPEDQRCET

SEQ ID NO: 30279 - protein, 327 aa, Homo sapiens
  REGION 1..327: note = ENSP00000492803
MTMAGGRRGLVAPQNTFLENIVRRSNDTNFVLGNAQIVDWPIVYSNDGFCKLSGYHRAEVMQKSSTCSFMYGELTDKDTIEKVRQTFENYEMNSFEILMYKKNRTPVWFFVKIAPIRNEQDKVVLFLCTFSDITAFKQPIEDDSCKGWGKFARLTRALTSSRGVLQQLAPSVQKGENVHKHSRLAEVLQLGSDILPQYKQEAPKTPPHIILHYCVFKTTWDWIILILTFYTAILVPYNVSFKTRQNNVAWLVVDSIVDVIFLVDIVLNFHTTFVGPAGEVISDPKLIRMNYLKTWFVIDLLSCLPYDVINAFENVDEHFSMPPSSGM

SEQ ID NO: 30280 - protein, 605 aa, Homo sapiens
  REGION 1..605: note = ENSP00000491434
MTMAGGRRGLVAPQNTFLENIVRRSNDTNFVLGNAQIVDWPIVYSNDGFCKLSGYHRAEVMQKSSTCSFMYGELTDKDTIEKVRQTFENYEMNSFEILMYKKNTLLYATIFGNVTTIFQQMYANTNRYHEMLNSVRDFLKLYQVPKGLSERVMDYIVSTWSMSRGIDTEKVLQICPKDMRADICVHLNRKVFKEHPAFRLASDGCLRALAMEFQTVHCAPGDLIYHAGESVDSLCFVVSGSLEVIQDDEVVAILGKGDVFGDVFWKEATLAQSCANVRALTYCDLHVIKRDALQKVLEFYTAFSHSFSRNLILTYNLRKRIVFRKISDVKREEEERMKRKNEAPLILPPDHPVRRLFQRFRQQKEARLAAERGGRDLDDLDVEKGNVLTEHASANHSLVKASVVTVRESPATPVSFQAASTSGVPDHAKLQAPGSECLGPKGGGGDCAKRKSWARFKDACGKSEDWNKVSKAESMETLPERTKASGEATLKKTDSCDSGITKSDLRLDNVGEARSPQDRSPILAEVKHSFYPIPEQTLQATVLEVRHELKEDIKALNAKMTNIEKQLSEILRILTSRRSSQSPQELFEISRPQSPESERDIFGAS

SEQ ID NO: 30281 - protein, 454 aa, Homo sapiens
  REGION 1..454: note = ENSP00000491302
MTMAGGRRGLVAPQNTFLENIVRRSNDTNFVLGNAQIVDWPIVYSNDGFCKLSGYHRAEVMQKSSTCSFMYGELTDKDTIEKVRQTFENYEMNSFEILMYKKNRKGDVFGDVFWKEATLAQSCANVRALTYCDLHVIKRDALQKVLEFYTAFSHSFSRNLILTYNLRKRIVFRKISDVKREEEERMKRKNEAPLILPPDHPVRRLFQRFRQQKEARLAAERGGRDLDDLDVEKGNVLTEHASANHSLVKASVVTVRESPATPVSFQAASTSGVPDHAKLQAPGSECLGPKGGGGDCAKRKSWARFKDACGKSEDWNKVSKAESMETLPERTKASGEATLKKTDSCDSGITKSDLRLDNVGEARSPQDRSPILAEVKHSFYPIPEQTLQATVLEVRHELKEDIKALNAKMTNIEKQLSEILRILTSRRSSQSPQELFEISRPQSPESERDIFGAS

SEQ ID NO: 30282 - protein, 354 aa, Homo sapiens
  REGION 1..354: note = ENSP00000491019
MTMAGGRRGLVAPQNTFLENIVRRSNDTNFVLGNAQIVDWPIVYSNDGFCKLSGYHRAEVMQKSSTCSFMYGELTDKDTIEKVRQTFENYEMNSFEILMYKKNRTPVWFFVKIAPIRNEQDKVVLFLCTFSDITAFKQPIEDDSCKGWGKFARLTRALTSSRGVLQQLAPSVQKGENVHKHSRLAEVLQLGSDILPQYKQEAPKTPPHIILHYCVFKTTWDWIILILTFYTAILVPYNVSFKTRQNNVAWLVVDSIVDVIFLVDIVLNFHTTFVGPAGEVISDPKLIRMNYLKTWFVIDLLSCLPYDVINAFENVDEVSAFMGDPGKIGFADQIPPPLEGRESQHFSMPPSSGM

SEQ ID NO: 30283 - protein, 913 aa, Homo sapiens; identical to SEQ ID NO: 30270
  REGION 1..913: note = ENSP00000491565

SEQ ID NO: 30284 - protein, 940 aa, Homo sapiens; identical to SEQ ID NO: 30271
  REGION 1..940: note = ENSP00000492724

SEQ ID NO: 30285 - protein, 962 aa, Homo sapiens; identical to SEQ ID NO: 30272
  REGION 1..962: note = ENSP00000492350

SEQ ID NO: 30286 - protein, 989 aa, Homo sapiens; identical to SEQ ID NO: 30273
  REGION 1..989: note = ENSP00000492550

SEQ ID NO: 30287 - protein, 962 aa, Homo sapiens; identical to SEQ ID NO: 30272
  REGION 1..962: note = ENSP00000491986

SEQ ID NO: 30288 - protein, 962 aa, Homo sapiens; identical to SEQ ID NO: 30272
  REGION 1..962: note = ENSP00000491804

SEQ ID NO: 30289 - protein, 962 aa, Homo sapiens; identical to SEQ ID NO: 30272
  REGION 1..962: note = ENSP00000491578

SEQ ID NO: 30290 - protein, 208 aa, Homo sapiens; identical to SEQ ID NO: 30277
  REGION 1..208: note = ENSP00000492255
  VARIANT 1: note = Any amino acid

SEQ ID NO: 30291 - protein, 427 aa, Homo sapiens; identical to SEQ ID NO: 30278
  REGION 1..427: note = ENSP00000491426
  VARIANT 1: note = Any amino acid

SEQ ID NO: 30292 - protein, 327 aa, Homo sapiens; identical to SEQ ID NO: 30279
  REGION 1..327: note = ENSP00000491522

SEQ ID NO: 30293 - protein, 605 aa, Homo sapiens; identical to SEQ ID NO: 30280
  REGION 1..605: note = ENSP00000492387

SEQ ID NO: 30294 - protein, 454 aa, Homo sapiens; identical to SEQ ID NO: 30281
  REGION 1..454: note = ENSP00000492092

SEQ ID NO: 30295 - protein, 354 aa, Homo sapiens; identical to SEQ ID NO: 30282
  REGION 1..354: note = ENSP00000491901

SEQ ID NO: 30296 - protein, 988 aa, Homo sapiens
  REGION 1..988: note = ENSP00000321427
MPGGKRGLVAPQNTFLENIVRRSSESSFLLGNAQIVDWPVVYSNDGFCKLSGYHRADVMQKSSTCSFMYGELTDKKTIEKVRQTFDNYESNCFEVLLYKKNRTPVWFYMQIAPIRNEHEKVVLFLCTFKDITLFKQPIEDDSTKGWTKFARLTRALTNSRSVLQQLTPMNKTEVVHKHSRLAEVLQLGSDILPQYKQEAPKTPPHIILHYCAFKTTWDWVILILTFYTAIMVPYNVSFKTKQNNIAWLVLDSVVDVIFLVDIVLNFHTTFVGPGGEVISDPKLIRMNYLKTWFVIDLLSCLPYDIINAFENVDEGISSLFSSLKVVRLLRLGRVARKLDHYLEYGAAVLVLLVCVFGLVAHWLACIWYSIGDYEVIDEVTNTIQIDSWLYQLALSIGTPYRYNTSAGIWEGGPSKDSLYVSSLYFTMTSLTTIGFGNIAPTTDVEKMFSVAMMMVGSLLYATIFGNVTTIFQQMYANTNRYHEMLNNVRDFLKLYQVPKGLSERVMDYIVSTWSMSKGIDTEKVLSICPKDMRADICVHLNRKVFNEHPAFRLASDGCLRALAVEFQTIHCAPGDLIYHAGESVDALCFVVSGSLEVIQDDEVVAILGKGDVFGDIFWKETTLAHACANVRALTYCDLHIIKREALLKVLDFYTAFANSFSRNLTLTCNLRKRIIFRKISDVKKEEEERLRQKNEVTLSIPVDHPVRKLFQKFKQQKELRNQGSTQGDPERNQLQVESRSLQNGASITGTSVVTVSQITPIQTSLAYVKTSESLKQNNRDAMELKPNGGADQKCLKVNSPIRMKNGNGKGWLRLKNNMGAHEEKKEDWNNVTKAESMGLLSEDPKSSDSENSVTKNPLRKTDSCDSGITKSDLRLDKAGEARSPLEHSPIQADAKHPFYPIPEQALQTTLQEVKHELKEDIQLLSCRMTALEKQVAEILKILSEKSVPQASSPKSQMPLQVPPQIPCQDIFSVSRPESPESDKDEIHF

SEQ ID NO: 30297 - protein, 611 aa, Homo sapiens
  REGION 1..611: note = ENSP00000395439
MPGGKRGLVAPQNTFLENIVRRSSESSFLLGNAQIVDWPVVYSNDGFCKLSGYHRADVMQKSSTCSFMYGELTDKKTIEKVRQTFDNYESNCFEVLLYKKNRTPVWFYMQIAPIRNEHEKVVLFLCTFKDITLFKQPIEDDSTKGWTKFARLTRALTNSRSVLQQLTPMNKTEVVHKHSRLAEVLQLGSDILPQYKQEAPKTPPHIILHYCAFKTTWDWVILILTFYTAIMVPYNVSFKTKQNNIAWLVLDSVVDVIFLVDIVLNFHTTFVGPGGEVISDPKLIRMNYLKTWFVIDLLSCLPYDIINAFENVDEGISSLFSSLKVVRLLRLGRVARKLDHYLEYGAAVLVLLVCVFGLVAHWLACIWYSIGDYEVIDEVTNTIQIDSWLYQLALSIGTPYRYNTSAGIWEGGPSKDSLYVSSLYFTMTSLTTIGFGNIAPTTDVEKMFSVAMMMVGSLLYATIFGNVTTIFQQMYANTNRYHEMLNNVRDFLKLYQVPKGLSERVMDYIVSTWSMSKGIDTEKVLSICPKDMRADICVHLNRKVFNEHPAFRLASDGCLRALAVEFQTIHCAPGDLIYHAGESVDALCFVVSGSLEVIQDDEVVAILDHLS

SEQ ID NO: 30298 - protein, 624 aa, Homo sapiens
  REGION 1..624: note = ENSP00000378419
MQKSSTCSFMYGELTDKKTIEKVRQTFDNYESNCFEVLLYKKNRTPVWFYMQIAPIRNEHEKVVLFLCTFKDITLFKQPIEDDSTKGWTKFARLTRALTNSRSVLQQLTPMNKTEVVHKHSRLAEVLQLGSDILPQYKQEAPKTPPHIILHYCAFKTTWDWVILILTFYTAIMVPYNVSFKTKQNNIAWLVLDSVVDVIFLVDIVLNFHTTFVGPGGEVISDPKLIRMNYLKTWFVIDLLSCLPYDIINAFENVDEGISSLFSSLKVVRLLRLGRVARKLDHYLEYGAAVLVLLVCVFGLVAHWLACIWYSIGDYEVIDEVTNTIQIDSWLYQLALSIGTPYRYNTSAGIWEGGPSKDSLYVSSLYFTMTSLTTIGFGNIAPTTDVEKMFSVAMMMVGSLLYATIFGNVTTIFQQMYANTNRYHEMLNNVRDFLKLYQVPKGLSERVMDYIVSTWSMSKGIDTEKVLSICPKDMRADICVHLNRKVFNEHPAFRLASDGCLRALAVEFQTIHCAPGDLIYHAGESVDALCFVVSGSLEVIQDDEVVAILGKGDVFGDIFWKETTLAHACANVRALTYCDLHIIKREALLKVLDFYTAFANSFSRNLTLTCNLRKRGWFSMANAL

SEQ ID NO: 30299 - protein, 1196 aa, Homo sapiens
  REGION 1..1196: note = ENSP00000331727
MPVRRGHVAPQNTFLGTIIRKFEGQNKKFIIANARVQNCAIIYCNDGFCEMTGFSRPDVMQKPCTCDFLHGPETKRHDIAQIAQALLGSEERKVEVTYYHKNGSTFICNTHIIPVKNQEGVAMMFIINFEYVTDNENAATPERVNPILPIKTVNRKFFGFKFPGLRVLTYRKQSLPQEDPDVVVIDSSKHSDDSVAMKHFKSPTKESCSPSEADDTKALIQPSKCSPLVNISGPLDHSSPKRQWDRLYPDMLQSSSQLSHSRSRESLCSIRRASSVHDIEGFGVHPKNIFRDRHASEDNGRNVKGPFNHIKSSLLGSTSDSNLNKYSTINKIPQLTLNFSEVKTEKKNSSPPSSDKTIIAPKVKDRTHNVTEKVTQVLSLGADVLPEYKLQTPRINKFTILHYSPFKAVWDWLILLLVIYTAIFTPYSAAFLLNDREEQKRRECGYSCSPLNVVDLIVDIMFIIDILINFRTTYVNQNEEVVSDPAKIAIHYFKGWFLIDMVAAIPFDLLIFGSGSDETTTLIGLLKTARLLRLVRVARKLDRYSEYGAAVLMLLMCIFALIAHWLACIWYAIGNVERPYLTDKIGWLDSLGQQIGKRYNDSDSSSGPSIKDKYVTALYFTFSSLTSVGFGNVSPNTNSEKIFSICVMLIGSLMYASIFGNVSAIIQRLYSGTARYHMQMLRVKEFIRFHQIPNPLRQRLEEYFQHAWTYTNGIDMNMVLKGFPECLQADICLHLNQTLLQNCKAFRGASKGCLRALAMKFKTTHAPPGDTLVHCGDVLTALYFLSRGSIEILKDDIVVAILGKNDIFGEMVHLYAKPGKSNADVRALTYCDLHKIQREDLLEVLDMYPEFSDHFLTNLELTFNLRHESAKADLLRSQSMNDSEGDNCKLRRRKLSFESEGEKENSTNDPEDSADTIRHYQSSKRHFEEKKSRSSSFISSIDDEQKPLFSGIVDSSPGIGKASGLDFEETVPTSGRMHIDKRSHSCKDITDMRSWERENAHPQPEDSSPSALQRAAWGISETESDLTYGEVEQRLDLLQEQLNRLESQMTTDIQTILQLLQKQTTVVPPAYSMVTAGSEYQRPIIQLMRTSQPEASIKTDRSFSPSSQCPEFLDLEKSKLKSKESLSSGVHLNTASEDNLTSLLKQDSDLSLELHLRQRKTYVHPIRHPSLPDSSLSTVGIVGLHRHVSDPGLPGK

SEQ ID NO: 30300 - protein, 732 aa, Homo sapiens
  REGION 1..732: note = ENSP00000333781
MPVRRGHVAPQNTFLGTIIRKFEGQNKKFIIANARVQNCAIIYCNDGFCEMTGFSRPDVMQKPCTCDFLHGPETKRHDIAQIAQALLGSEERKVEVTYYHKNGSTFICNTHIIPVKNQEGVAMMFIINFEYVTDNENAATPERVNPILPIKTVNRKFFGFKFPGLRVLTYRKQSLPQEDPDVVVIDSSKHSDDSVAMKHFKSPTKESCSPSEADDTKALIQPSKCSPLVNISGPLDHSSPKRQWDRLYPDMLQSSSQLSHSRSRESLCSIRRASSVHDIEGFGVHPKNIFRDRHASEGPFNHIKSSLLGSTSDSNLNKYSTINKIPQLTLNFSEVKTEKKNSSPPSSDKTIIAPKVKDRTHNVTEKVTQVLSLGADVLPEYKLQTPRINKFTILHYSPFKAVWDWLILLLVIYTAIFTPYSAAFLLNDREEQKRRECGYSCSPLNVVDLIVDIMFIIDILINFRTTYVNQNEEVVSDPAKIAIHYFKGWFLIDMVAAIPFDLLIFGSGSDETTTLIGLLKTARLLRLVRVARKLDRYSEYGAAVLMLLMCIFALIAHWLACIWYAIGNVERPYLTDKIGWLDSLGQQIGKRYNDSDSSSGPSIKDKYVTALYFTFSSLTSVGFGNVSPNTNSEKIFSICVMLIGSLMYASIFGNVSAIIQRLYSGTARYHMQMLRVKEFIRFHQIPNPLRQRLEEYFQHAWTYTNGIDMNMVCMSVFQNESAAGIIVIAKME

SEQ ID NO: 30301 - protein, 630 aa, Homo sapiens
  REGION 1..630: note = ENSP00000483158
GSTFICNTHIIPVKNQEGVAMMFIINFEYVTDNENAATPERVNPILPIKTVNRKFFGFKFPGLRVLTYRKQSLPQEDPDVVVIDSSKHSDDSVAMKHFKSPTKESCSPSEADDTKALIQPSKCSPLVNISGPLDHSSPKRQWDRLYPDMLQSSSQLSHSRSRESLCSIRRASSVHDIEGFGVHPKNIFRDRHASEGPFNHIKSSLLGSTSDSNLNKYSTINKIPQLTLNFSEVKTEKKNSSPPSSDKTIIAPKVKDRTHNVTEKVTQVLSLGADVLPEYKLQTPRINKFTILHYSPFKAVWDWLILLLVIYTAIFTPYSAAFLLNDREEQKRRECGYSCSPLNVVDLIVDIMFIIDILINFRTTYVNQNEEVVSDPAKIAIHYFKGWFLIDMVAAIPFDLLIFGSGSDETTTLIGLLKTARLLRLVRVARKLDRYSEYGAAVLMLLMCIFALIAHWLACIWYAIGNVERPYLTDKIGWLDSLGQQIGKRYNDSDSSSGPSIKDKYVTALYFTFSSLTSVGFGNVSPNTNSEKIFSICVMLIGSLMYASIFGNVSAIIQRLYSGTARYHMQMLRVKEFIRFHQIPNPLRQRLEEYFQHAWTYTNGIDMNMVCMSVFQNESAAGIIVIAKME

SEQ ID NO: 30302 - protein, 1096 aa, Homo sapiens [sequence omitted]

SEQ ID NO: 30303 - protein, 1107 aa, Homo sapiens
  REGION 1..1107: note = ENSP00000328813
MPVMKGLLAPQNTFLDTIATRFDGTHSNFILANAQVAKGFPIVYCSDGFCELAGFARTEVMQKSCSCKFLFGVETNEQLMLQIEKSLEEKTEFKGEIMFYKKNGSPFWCLLDIVPIKNEKGDVVLFLASFKDITDTKVKITPEDKKEDKVKGRSRAGTHFDSARRRSRAVLYHISGHLQRREKNKLKINNNVFVDKPAFPEYKVSDAKKSKFILLHFSTFKAGWDWLILLATFYVAVTVPYNVCFIGNDDLSTTRSTTVSDIAVEILFIIDIILNFRTTYVSKSGQVIFEARSICIHYVTTWFIIDLIAALPFDLLYAFNVTVVSLVHLLKTVRLLRLLRLLQKLDRYSQHSTIVLTLLMSMFALLAHWMACIWYVIGKMEREDNSLLKWEVGWLHELGKRLESPYYGNNTLGGPSIRSAYIAALYFTLSSLTSVGFGNVSANTDAEKIFSICTMLIGALMHALVFGNVTAIIQRMYSRWSLYHTRTKDLKDFIRVHHLPQQLKQRMLEYFQTTWSVNNGIDSNELLKDFPDELRSDITMHLNKEILQLSLFECASRGCLRSLSLHIKTSFCAPGEYLLRQGDALQAIYFVCSGSMEVLKDSMVLAILGKGDLIGANLSIKDQVIKTNADVKALTYCDLQCIILKGLFEVLDLYPEYAHKFVEDIQHDLTYNLREGHESDVISRLSNKSMVSQSEPKGNGNINKRLPSIVEDEEEEEEGEEEEAVSLSPICTRGSSSRNKKVGSNKAYLGLSLKQLASGTVPFHSPIRVSRSNSPKTKQEIDPPNHNKRKEKNLKLQLSTLNNAGPPDLSPRIVDGIEDGNSSEESQTFDFGSERIRSEPRISPPLGDPEIGAAVLFIKAEETKQQINKLNSEVTTLTQEVSQLGKDMRNVIQLLENVLSPQQPSRFCSLHSTSVCPSRESLQTRTSWSAHQPCLHLQTGGAAYTQAQLCSSNITSDIWSVDPSSVGSSPQRTGAHEQNPADSELYHSPSLDYSPSHYQVVQEGHLQFLRCISPHSDSTLTPLQSISATLSSSVCSSSETSLHLVLPSRSEEGSFSQGTVSSFSLENLPGSWNQEGMASASTKPLENLPLEVVTSTAEVKDNKAINV

SEQ ID NO: 30304 - protein, 195 aa, Homo sapiens
  REGION 1..195: note = ENSP00000412141
MPVMKGLLAPQNTFLDTIATRFDGTHSNFILANAQVAKGFPIVYCSDGFCELAGFARTEVMQKSCSCKFLFGVETNEQLMLQIEKSLEEKTEFKGEIMFYKKNGSPFWCLLDIVPIKNEKGDVVLFLASFKDITDTKVKITPEDKKEDKVKGRSRAGTHFDSARRRSRAVLYHISGHLQRREKNKLKINNVLQDP

SEQ ID NO: 30305 - protein, 225 aa, Homo sapiens
  REGION 1..225: note = ENSP00000366577
MSGCSKRCKLGFVKFAQTIFKLITGTLSKDKIEDELEMTMVCHRPEGLEQLEAQTNFTKRELQVLYRGFKNECPSGVVNEDTFKQIYAQFFPHGDASTYAHYLFNAFDTTQTGSVKFEDFVTALSILLRGTVHEKLRWTFNLYDINKDGYINKEEMMDIVKAIYDMMGKYTYPVLKEDTPRQHVDVFFQKMDKNKDGIVTLDEFLESCQEDDNIMRSLQLFQNVM

SEQ ID NO: 30306 - protein, 42 aa, Homo sapiens
  REGION 1..42: note = ENSP00000431053
MSGCSKRCKLGFVKFAQTIFKLITGTLSKDGVKSGTGARRAG

SEQ ID NO: 30307 - protein, 216 aa, Homo sapiens
  REGION 1..216: note = ENSP00000329686
MGAVMGTFSSLQTKQRRPSKDKIEDELEMTMVCHRPEGLEQLEAQTNFTKRELQVLYRGFKNECPSGVVNEDTFKQIYAQFFPHGDASTYAHYLFNAFDTTQTGSVKFEDFVTALSILLRGTVHEKLRWTFNLYDINKDGYINKEEMMDIVKAIYDMMGKYTYPVLKEDTPRQHVDVFFQKMDKNKDGIVTLDEFLESCQEDDNIMRSLQLFQNVM

SEQ ID NO: 30308 - protein, 188 aa, Homo sapiens
  REGION 1..188: note = ENSP00000431102
MTMVCHRPEGLEQLEAQTNFTKRELQVLYRGFKNECPSGVVNEDTFKQIYAQFFPHGDASTYAHYLFNAFDTTQTGSVKFEDFVTALSILLRGTVHEKLRWTFNLYDINKDGYINKEEMMDIVKAIYDMMGKYTYPVLKEDTPRQHVDVFFQKMDKNKDGIVTLDEFLESCQEDDNIMRSLQLFQNVM

SEQ ID NO: 30309 - protein, 241 aa, Homo sapiens
  REGION 1..241: note = ENSP00000414886
MGAVMGTFSSLQTKQRRPSKDKIEDELEMTMVCHRPEGLEQLEAQTNFTKRELQVLYRGFKNECPSGVVNEDTFKQIYAQFFPHGALPCLEGSPCVEFLPPSPALLFCLVDASTYAHYLFNAFDTTQTGSVKFEDFVTALSILLRGTVHEKLRWTFNLYDINKDGYINKEEMMDIVKAIYDMMGKYTYPVLKEDTPRQHVDVFFQKMDKNKDGIVTLDEFLESCQEDDNIMRSLQLFQNVM

SEQ ID NO: 30310 - protein, 227 aa, Homo sapiens
  REGION 1..227: note = ENSP00000395323
MGAVMGTFSSLQTKQRRPSKDIAWWYYQYQRDKIEDELEMTMVCHRPEGLEQLEAQTNFTKRELQVLYRGFKNECPSGVVNEDTFKQIYAQFFPHGDASTYAHYLFNAFDTTQTGSVKFEDFVTALSILLRGTVHEKLRWTFNLYDINKDGYINKEEMMDIVKAIYDMMGKYTYPVLKEDTPRQHVDVFFQKMDKNKDGIVTLDEFLESCQEDDNIMRSLQLFQNVM

SEQ ID NO: 30311 - protein, 232 aa, Homo sapiens
  REGION 1..232: note = ENSP00000489903
MWAEGESEGLQTLGIVVVVCSSLKLLHYLGLIDLSDDKIEDELEMTMVCHRPEGLEQLEAQTNFTKRELQVLYRGFKNECPSGVVNEDTFKQIYAQFFPHGDASTYAHYLFNAFDTTQTGSVKFEDFVTALSILLRGTVHEKLRWTFNLYDINKDGYINKEEMMDIVKAIYDMMGKYTYPVLKEDTPRQHVDVFFQKMDKNKDGIVTLDEFLESCQEDDNIMRSLQLFQNVM

SEQ ID NO: 30312 - protein, 220 aa, Homo sapiens
  REGION 1..220: note = ENSP00000375071
KIEDELEMTMVCHRPEGLEQLEAQTNFTKRELQVLYRGFKNECPSGVVNEDTFKQIYAQFFPHGALPCLEGSPCVEFLPPSPALLFCLVDASTYAHYLFNAFDTTQTGSVKFEDFVTALSILLRGTVHEKLRWTFNLYDINKDGYINKEEMMDIVKAIYDMMGKYTYPVLKEDTPRQHVDVFFQKMDKNKDGIVTLDEFLESCQEDDNIMRSLQLFQNVM

SEQ ID NO: 30313 - protein, 207 aa, Homo sapiens
  REGION 1..207: note = ENSP00000478151
DIAWWYYQYQRDKIEDELEMTMVCHRPEGLEQLEAQTNFTKRELQVLYRGFKNECPSGVVNEDTFKQIYAQFFPHGDASTYAHYLFNAFDTTQTGSVKFEDFVTALSILLRGTVHEKLRWTFNLYDINKDGYINKEEMMDIVKAIYDMMGKYTYPVLKEDTPRQHVDVFFQKMDKNKDGIVTLDEFLESCQEDDNIMRSLQLFQNVM

SEQ ID NO: 30314 - protein, 225 aa, Homo sapiens
  REGION 1..225: note = ENSP00000239118
MNRCPRRCRSPLGQAARSLYQLVTGSLSPDSVDDEFELSTVCHRPEGLEQLQEQTKFTRKELQVLYRGFKNECPSGIVNEENFKQIYSQFFPQGDSSTYATFLFNAFDTNHDGSVSFEDFVAGLSVILRGTVDDRLNWAFNLYDLNKDGCITKEEMLDIMKSIYDMMGKYTYPALREEAPREHVESFFQKMDRNKDGVVTIEEFIESCQKDENIMRSMQLFDNVI

SEQ ID NO: 30315 - protein, 270 aa, Homo sapiens
  REGION 1..270: note = ENSP00000349055
MRGQGRKESLSDSRDLDGSYDQLTGHPPGPTKKALKQRFLKLLPCCGPQALPSVSETLAAPASLRPHRPRLLDPDSVDDEFELSTVCHRPEGLEQLQEQTKFTRKELQVLYRGFKNECPSGIVNEENFKQIYSQFFPQGDSSTYATFLFNAFDTNHDGSVSFEDFVAGLSVILRGTVDDRLNWAFNLYDLNKDGCITKEEMLDIMKSIYDMMGKYTYPALREEAPREHVESFFQKMDRNKDGVVTIEEFIESCQKDENIMRSMQLFDNVI

SEQ ID NO: 30316 - protein, 184 aa, Homo sapiens
  REGION 1..184: note = ENSP00000359063
MRGQGRKESLSDSRDLDGSYDQLTDSVDDEFELSTVCHRPEGLEQLQEQTKFTRKELQVLYRGFKNECPSGIVNEENFKQIYSQFFPQGDSSTYATFLFNAFDTNHDGSVSFEEMLDIMKSIYDMMGKYTYPALREEAPREHVESFFQKMDRNKDGVVTIEEFIESCQKDENIMRSMQLFDNVI

SEQ ID NO: 30317 - protein, 177 aa, Homo sapiens
  REGION 1..177: note = ENSP00000411679
MWLSWTAWTMNLNCPPCVTGLRVWSSCRSKPNSRARSCRSCTGASRTNVPAELSMRRTSSRFTPSSFLKEDFVAGLSVILRGTVDDRLNWAFNLYDLNKDGCITKEEMLDIMKSIYDMMGKYTYPALREEAPREHVESFFQKMDRNKDGVVTIEEFIESCQKDENIMRSMQLFDNVI

SEQ ID NO: 30318 - protein, 227 aa, Homo sapiens
  REGION 1..227: note = ENSP00000341624
MRGQGRKESLSDSRDLDGSYDQLTDSVDDEFELSTVCHRPEGLEQLQEQTKFTRKELQVLYRGFKNPGALSFQECPSGIVNEENFKQIYSQFFPQGDSSTYATFLFNAFDTNHDGSVSFEDFVAGLSVILRGTVDDRLNWAFNLYDLNKDGCITKEEMLDIMKSIYDMMGKYTYPALREEAPREHVESFFQKMDRNKDGVVTIEEFIESCQKDENIMRSMQLFDNVI

SEQ ID NO: 30319 - protein, 285 aa, Homo sapiens
  REGION 1..285: note = ENSP00000420040
MRGQGRKESLSDSRDLDGSYDQLTGHPPGPTKKALKQRFLKLLPCCGPQALPSVSEIGRVFRFLGDSSLPSALAAPASLRPHRPRLLDPDSVDDEFELSTVCHRPEGLEQLQEQTKFTRKELQVLYRGFKNECPSGIVNEENFKQIYSQFFPQGDSSTYATFLFNAFDTNHDGSVSFEDFVAGLSVILRGTVDDRLNWAFNLYDLNKDGCITKEEMLDIMKSIYDMMGKYTYPALREEAPREHVESFFQKMDRNKDGVVTIEEFIESCQKDENIMRSMQLFDNVI

SEQ ID NO: 30320 - protein, 220 aa, Homo sapiens
  REGION 1..220: note = ENSP00000344169
MRGQGRKESLSDSRDLDGSYDQLTDSVDDEFELSTVCHRPEGLEQLQEQTKFTRKELQVLYRGFKNECPSGIVNEENFKQIYSQFFPQGDSSTYATFLFNAFDTNHDGSVSFEDFVAGLSVILRGTVDDRLNWAFNLYDLNKDGCITKEEMLDIMKSIYDMMGKYTYPALREEAPREHVESFFQKMDRNKDGVVTIEEFIESCQKDENIMRSMQLFDNVI

SEQ ID NO: 30321 - protein, 184 aa, Homo sapiens
  REGION 1..184: note = ENSP00000239117
MRGQGRKESLSDSRDLDGSYDQLTDSVDDEFELSTVCHRPEGLEQLQEQTKFTRKELQVLYRGFKNECPSGIVNEENFKQIYSQFFPQGDSSTYATFLFNAFDTNHDGSVSFEEMLDIMKSIYDMMGKYTYPALREEAPREHVESFFQKMDRNKDGVVTIEEFIESCQKVQLPALYITLTWTQA

SEQ ID NO: 30322 - protein, 252 aa, Homo sapiens
  REGION 1..252: note = ENSP00000350733
MRGQGRKESLSDSRDLDGSYDQLTGHPPGPTKKALKQRFLKLLPCCGPQALPSVSENSVDDEFELSTVCHRPEGLEQLQEQTKFTRKELQVLYRGFKNECPSGIVNEENFKQIYSQFFPQGDSSTYATFLFNAFDTNHDGSVSFEDFVAGLSVILRGTVDDRLNWAFNLYDLNKDGCITKEEMLDIMKSIYDMMGKYTYPALREEAPREHVESFFQKMDRNKDGVVTIEEFIESCQKDENIMRSMQLFDNVI

SEQ ID NO: 30323 - protein, 225 aa, Homo sapiens
  REGION 1..225: note = ENSP00000371583
MSGCRKRCKREILKFAQYLLRLLTGSLHTDSVEDELEMATVRHRPEALELLEAQSKFTKKELQILYRGFKNECPSGVVNEETFKEIYSQFFPQGDSTTYAHFLFNAFDTDHNGAVSFEDFIKGLSILLRGTVQEKLNWAFNLYDINKDGYITKEEMLDIMKAIYDMMGKCTYPVLKEDAPRQHVETFFQKMDKNKDGVVTIDEFIESCQKDENIMRSMQLFENVI

SEQ ID NO: 30324 - protein, 216 aa, Homo sapiens
  REGION 1..216: note = ENSP00000399080
MNVRRVESISAQLEEASSTGDSVEDELEMATVRHRPEALELLEAQSKFTKKELQILYRGFKNECPSGVVNEETFKEIYSQFFPQGDSTTYAHFLFNAFDTDHNGAVSFEDFIKGLSILLRGTVQEKLNWAFNLYDINKDGYITKEEMLDIMKAIYDMMGKCTYPVLKEDAPRQHVETFFQKMDKNKDGVVTIDEFIESCQKDENIMRSMQLFENVI

SEQ ID NO: 30325 - protein, 229 aa, Homo sapiens
  REGION 1..229: note = ENSP00000371585
MNLEGLEMIAVLIVIVLFVKLLEQFGLIEAGLEDSVEDELEMATVRHRPEALELLEAQSKFTKKELQILYRGFKNECPSGVVNEETFKEIYSQFFPQGDSTTYAHFLFNAFDTDHNGAVSFEDFIKGLSILLRGTVQEKLNWAFNLYDINKDGYITKEEMLDIMKAIYDMMGKCTYPVLKEDAPRQHVETFFQKMDKNKDGVVTIDEFIESCQKDENIMRSMQLFENVI

SEQ ID NO: 30326 - protein, 250 aa, Homo sapiens
  REGION 1..250: note = ENSP00000371587
MNVRRVESISAQLEEASSTGGFLYAQNSTKRSIKERLMKLLPCSAAKTSSPAIQNSVEDELEMATVRHRPEALELLEAQSKFTKKELQILYRGFKNECPSGVVNEETFKEIYSQFFPQGDSTTYAHFLFNAFDTDHNGAVSFEDFIKGLSILLRGTVQEKLNWAFNLYDINKDGYITKEEMLDIMKAIYDMMGKCTYPVLKEDAPRQHVETFFQKMDKNKDGVVTIDEFIESCQKDENIMRSMQLFENVI

SEQ ID NO: 30327 - protein, 188 aa, Homo sapiens
  REGION 1..188: note = ENSP00000423257
MATVRHRPEALELLEAQSKFTKKELQILYRGFKNECPSGVVNEETFKEIYSQFFPQGDSTTYAHFLFNAFDTDHNGAVSFEDFIKGLSILLRGTVQEKLNWAFNLYDINKDGYITKEEMLDIMKAIYDMMGKCTYPVLKEDAPRQHVETFFQKMDKNKDGVVTIDEFIESCQKDENIMRSMQLFENVI

SEQ ID NO: 30328 - protein, 34 aa, Homo sapiens
  REGION 1..34: note = ENSP00000445321
MNVRRVESISAQLEEASSTGEAVIEHSLCTKCCP

SEQ ID NO: 30329 - protein, 188 aa, Homo sapiens; identical to SEQ ID NO: 30327
  REGION 1..188: note = ENSP00000351892

SEQ ID NO: 30330 - protein, 29 aa, Homo sapiens
  REGION 1..29: note = ENSP00000486886
MSGCRKRCKREILKFAQYLLRLLTGSLHT

SEQ ID NO: 30331 - protein, 207 aa, Homo sapiens
  REGION 1..207: note = ENSP00000491635
MTSVAKVYYSQTTQTESRPLMGPGIRRRRVLTKDGRSNVRMEHIADKRFLYLKDLWTTFIDMQWRYKLLLFSATFAGTWFLFGVVWYLVAVAHGDLLELDPPANHTPCVVQVHTLTGAFLFSLESQTTIGYGFRYISEECPLAIVLLIAQLVLTTILEIFITGSPEKICFPVSCEWKDPSQYVPLKRVQYPGPMERAWKEEVGLTEQ

SEQ ID NO: 30332 - protein, 170 aa, Homo sapiens
  REGION 1..170: note = ENSP00000490282
MTSVAKVYYSQTTQTESRPLMGPGIRRRRVLTKDGRSNVRMEHIADKRFLYLKDLWTTFIDMQWRYKLLLFSATFAGTWFLFGVVWYLVAVAHGDLLELDPPANHTPCVVQVHTLTGAFLFSLESQTTIGYGFRYISEECPLAIVLLIAQLVLTTILEIFITGHGKRRWD

SEQ ID NO: 30333 - protein, 64 aa, Homo sapiens
  REGION 1..64: note = ENSP00000491175
  VARIANT 1: note = Any amino acid
XKPCLMIRVANMRKSLLIGCQVTGKLLQTHQTKEGENIRLNQAAQRRSVSLCPVNGRTQANMFL

SEQ ID NO: 30334 - protein, 248 aa, Homo sapiens
  REGION 1..248: note = ENSP00000491416
  VARIANT 1: note = Any amino acid
XQTTQTESRPLMGPGIRRRRVLTKDGRSNVRMEHIADKRFLYLKDLWTTFIDMQWRYKLLLFSATFAGTWFLFGVVWYLVAVAHGDLLELDPPANHTPCVVQVHTLTGAFLFSLESQTTIGYGFRYISEECPLAIVLLIAQLVLTTILEIFITGTFLAKIARPKKRAETIRFSQHAVVASHNGKPCLMIRVANMRKSLLIGCQVTGKLLQTHQTKEGENIRLNQGMERGGGTNRAVNHSTQNSKTGGN

SEQ ID NO: 30335 - protein, 379 aa, Homo sapiens
  REGION 1..379: note = ENSP00000357068
MTSVAKVYYSQTTQTESRPLMGPGIRRRRVLTKDGRSNVRMEHIADKRFLYLKDLWTTFIDMQWRYKLLLFSATFAGTWFLFGVVWYLVAVAHGDLLELDPPANHTPCVVQVHTLTGAFLFSLESQTTIGYGFRYISEECPLAIVLLIAQLVLTTILEIFITGTFLAKIARPKKRAETIRFSQHAVVASHNGKPCLMIRVANMRKSLLIGCQVTGKLLQTHQTKEGENIRLNQVNVTFQVDTASDSPFLILPLTFYHVVDETSPLKDLPLRSGEGDFELVLILSGTVESTSATCQVRTSYLPEEILWGYEFTPAISLSASGKYIADFSLFDQVVKVASPSGLRDSTVRYGDPEKLKLEESLREQAEKEGSALSVRISNV

SEQ ID NO: 30336 - protein, 287 aa, Homo sapiens
  REGION 1..287: note = ENSP00000492249
  VARIANT 1: note = Any amino acid
XGDLLELDPPANHTPCVVQVHTLTGAFLFSLESQTTIGYGFRYISEECPLAIVLLIAQLVLTTILEIFITGTFLAKIARPKKRAETIRFSQHAVVASHNGKPCLMIRVANMRKSLLIGCQVTGKLLQTHQTKEGENIRLNQVNVTFQVDTASDSPFLILPLTFYHVVDETSPLKDLPLRSGEGDFELVLILSGTVESTSATCQVRTSYLPEEILWGYEFTPAISLSASGKYIADFSLFDQVVKVASPSGLRDSTVRYGDPEKLKLEESLREQAEKEGSALSVRISNV

SEQ ID NO: 30337 - protein, 245 aa, Homo sapiens
  REGION 1..245: note = ENSP00000491337
QTTQTESRPLMGPGIRRRRVLTKDGRSNVRMEHIADKRFLYLKDLWTTFIDMQWRYKLLLFSATFAGTWFLFGVVWYLVAVAHGDLLELDPPANHTPCVVQVHTLTGAFLFSLESQTTIGYGFRYISEECPLAIVLLIAQLVLTTILEIFITGTFLAKIARPKKRAETIRFSQHAVVASHNGKPCLMIRVANMRKSLLIGCQVTGKLLQTHQTKEGENIRLNQAAQRRSVSLCPVNGRTQANMFL

SEQ ID NO: 30338 - protein, 379 aa, Homo sapiens; identical to SEQ ID NO: 30335
  REGION 1..379: note = ENSP00000492619

SEQ ID NO: 30339 - protein, 379 aa, Homo sapiens; identical to SEQ ID NO: 30335
  REGION 1..379: note = ENSP00000491250

SEQ ID NO: 30340 - protein, 433 aa, Homo sapiens
  REGION 1..433: note = ENSP00000463778
MTAASRANPYSIVSSEEDGLHLVTMSGANGFGNGKVHTRRRCRNRFVKKNGQCNIEFANMDEKSQRYLADMFTTCVDIRWRYMLLIFSLAFLASWLLFGIIFWVIAVAHGDLEPAEGRGRTPCVMQVHGFMAAFLFSIETQTTIGYGLRCVTEECPVAVFMVVAQSIVGCIIDSFMIGAIMAKMARPKKRAQTLLFSHNAVVALRDGKLCLMWRVGNLRKSHIVEAHVRAQLIKPRVTEEGEYIPLDQIDIDVGFDKGLDRIFLVSPITILHEIDEASPLFGISRQDLETDDFEIVVILEGMVEATAMTTQARSSYLANEILWGHRFEPVLFEEKNQYKIDYSHFHKTYEVPSTPRCSAKDLVENKFLLPSANSFCYENELAFLSRDEEDEADGDQDGRSRDGLSPQARHDFDRLQAGGGVLEQRPYRRESEI

SEQ ID NO: 30341 - protein, 433 aa, Homo sapiens; identical to SEQ ID NO: 30340
  REGION 1..433: note = ENSP00000328150

SEQ ID NO: 30342 - protein, 35 aa, Homo sapiens
  REGION 1..35: note = ENSP00000465646
MSYYGSSYHIINADAKYPGYPPEHIIAEKRRARRR

SEQ ID NO: 30343 - protein, 418 aa, Homo sapiens
  REGION 1..418: note = ENSP00000465967
MSYYGSSYHIINADAKYPGYPPEHIIAEKRRARRRLLHKDGSCNVYFKHIFGEWGSYVVDIFTTLVDTKWRHMFVIFSLSYILSWLIFGSVFWLIAFHHGDLLNDPDITPCVDNVHSFTGAFLFSLETQTTIGYGYRCVTEECSVAVLMVILQSILSCIINTFIIGAALAKMATARKRAQTIRFSYFALIGMRDGKLCLMWRIGDFRPNHVVEGTVRAQLLRYTEDSEGRMTMAFKDLKLVNDQIILVTPVTIVHEIDHESPLYALDRKAVAKDNFEILVTFIYTGDSTGTSHQSRSSYVPREILWGHRFNDVLEVKRKYYKVNCLQFEGSVEVYAPFCSAKQLDWKDQQLHIEKAPPVRESCTSDTKARRRSFSAVAIVSSCENPEETTTSATHEYRETPYQKALLTLNRISVESQM

SEQ ID NO: 30344 - protein, 457 aa, Homo sapiens
  REGION 1..457: note = ENSP00000467568
MILQKCRKVLTENPNQEIATSLEFLLLQNSPGSLRAQQRMSYYGSSYHIINADAKYPGYPPEHIIAEKRRARRRLLHKDGSCNVYFKHIFGEWGSYVVDIFTTLVDTKWRHMFVIFSLSYILSWLIFGSVFWLIAFHHGDLLNDPDITPCVDNVHSFTGAFLFSLETQTTIGYGYRCVTEECSVAVLMVILQSILSCIINTFIIGAALAKMATARKRAQTIRFSYFALIGMRDGKLCLMWRIGDFRPNHVVEGTVRAQLLRYTEDSEGRMTMAFKDLKLVNDQIILVTPVTIVHEIDHESPLYALDRKAVAKDNFEILVTFIYTGDSTGTSHQSRSSYVPREILWGHRFNDVLEVKRKYYKVNCLQFEGSVEVYAPFCSAKQLDWKDQQLHIEKAPPVRESCTSDTKARRRSFSAVAIVSSCENPEETTTSATHEYRETPYQKALLTLNRISVESQM

SEQ ID NO: 30345 - protein, 453 aa, Homo sapiens
  REGION 1..453: note = ENSP00000465295
MLKMVLTENPNQEIATSLEFLLLQNSPGSLRAQQRMSYYGSSYHIINADAKYPGYPPEHIIAEKRRARRRLLHKDGSCNVYFKHIFGEWGSYVVDIFTTLVDTKWRHMFVIFSLSYILSWLIFGSVFWLIAFHHGDLLNDPDITPCVDNVHSFTGAFLFSLETQTTIGYGYRCVTEECSVAVLMVILQSILSCIINTFIIGAALAKMATARKRAQTIRFSYFALIGMRDGKLCLMWRIGDFRPNHVVEGTVRAQLLRYTEDSEGRMTMAFKDLKLVNDQIILVTPVTIVHEIDHESPLYALDRKAVAKDNFEILVTFIYTGDSTGTSHQSRSSYVPREILWGHRFNDVLEVKRKYYKVNCLQFEGSVEVYAPFCSAKQLDWKDQQLHIEKAPPVRESCTSDTKARRRSFSAVAIVSSCENPEETTTSATHEYRETPYQKALLTLNRISVESQM

SEQ ID NO: 30346 - protein, 64 aa, Homo sapiens
  REGION 1..64: note = ENSP00000466132
MSYYGSSYHIINADAKYPGYPPEHIIAEKRRARRRLLHKDGSCNVYFKHIFGEWGSYVVDIFTT

SEQ ID NO: 30347 - protein, 35 aa, Homo sapiens; identical to SEQ ID NO: 30342
  REGION 1..35: note = ENSP00000465163

SEQ ID NO: 30348 - protein, 418 aa, Homo sapiens; identical to SEQ ID NO: 30343
  REGION 1..418: note = ENSP00000283936

SEQ ID NO: 30349 - protein, 418 aa, Homo sapiens; identical to SEQ ID NO: 30343
  REGION 1..418: note = ENSP00000376438

SEQ ID NO: 30350 - protein, 418 aa, Homo sapiens; identical to SEQ ID NO: 30343
  REGION 1..418: note = ENSP00000376439

SEQ ID NO: 30351 - protein, 418 aa, Homo sapiens; identical to SEQ ID NO: 30343
  REGION 1..418: note = ENSP00000479817

SEQ ID NO: 30352 - protein, 501 aa, Homo sapiens
  REGION 1..501: note = ENSP00000295101
MSALRRKFGDDYQVVTTSSSGSGLQPQGPGQDPQQQLVPKKKRQRFVDKNGRCNVQHGNLGSETSRYLSDLFTTLVDLKWRWNLFIFILTYTVAWLFMASMWWVIAYTRGDLNKAHVGNYTPCVANVYNFPSAFLFFIETEATIGYGYRYITDKCPEGIILFLFQSILGSIVDAFLIGCMFIKMSQPKKRAETLMFSEHAVISMRDGKLTLMFRVGNLRNSHMVSAQIRCKLLKSRQTPEGEFLPLDQLELDVGFSTGADQLFLVSPLTICHVIDAKSPFYDLSQRSMQTEQFEIVVILEGIVETTGMTCQARTSYTEDEVLWGHRFFPVISLEEGFFKVDYSQFHATFEVPTPPYSVKEQEEMLLMSSPLIAPAITNSKERHNSVECLDGLDDITTKLPSKLQKITGREDFPKKLLRMSSTTSEKAYSLGDLPMKLQRISSVPGNSEEKLVSKTTKMLSDPMSQSVADLPPKLQKMAGGAARMEGNLPAKLRKMNSDRFT

SEQ ID NO: 30353 - protein, 235 aa, Homo sapiens
  REGION 1..235: note = ENSP00000438410
MSALRRKFGDDYQVVTTSSSGSGLQPQGPGQDPQQQLVPKKKRQRFVDKNGRCNVQHGNLGSETSRYLSDLFTTLVDLKWRWNLFIFILTYTVAWLFMASMWWVIAYTRGDLNKAHVGNYTPCVANVYNFPSAFLFFIETEATIGYGYRYITDKCPEGIILFLFQSILGSIVDAFLIGCMFIKMSQPKKRAETLMFSEHAVISMRDGKLTLMFRVGNLRNSHMVSAQIRCKLLKG

SEQ ID NO: 30354 - protein, 445 aa, Homo sapiens
  REGION 1..445: note = ENSP00000306497
MHGHSRNGQAHVPRRKRRNRFVKKNGQCNVYFANLSNKSQRYMADIFTTCVDTRWRYMLMIFSAAFLVSWLFFGLLFWCIAFFHGDLEASPGVPAAGGPAAGGGGAAPVAPKPCIMHVNGFLGAFLFSVETQTTIGYGFRCVTEECPLAVIAVVVQSIVGCVIDSFMIGTIMAKMARPKKRAQTLLFSHHAVISVRDGKLCLMWRVGNLRKSHIVEAHVRAQLIKPYMTQEGEYLPLDQRDLNVGYDIGLDRIFLVSPIIIVHEIDEDSPLYGMGKEELESEDFEIVVILEGMVEATAMTTQARSSYLASEILWGHRFEPVVFEEKSHYKVDYSRFHKTYEVAGTPCCSARELQESKITVLPAPPPPPSAFCYENELALMSQEEEEMEEEAAAAAAVAAGLGLEAGSKEEAGIIRMLEFGSHLDLERMQASLPLDNISYRRESAI

SEQ ID NO: 30355 - protein, 423 aa, Homo sapiens
  REGION 1..423: note = ENSP00000477437
MAKLTESMTNVLEGDSMDQDVESPVAIHQPKLPKQARDDLPRHISRDRTKRKIQRYVRKDGKCNVHHGNVRETYRYLTDIFTTLVDLKWRFNLLIFVMVYTVTWLFFGMIWWLIAYIRGDMDHIEDPSWTPCVTNLNGFVSAFLFSIETETTIGYGYRVITDKCPEGIILLLIQSVLGSIVNAFMVGCMFVKISQPKKRAETLVFSTHAVISMRDGKLCLMFRVGDLRNSHIVEASIRAKLIKSKQTSEGEFIPLNQTDINVGYYTGDDRLFLVSPLIISHEINQQSPFWEISKAQLPKEELEIVVILEGMVEATGMTCQARSSYITSEILWGYRFTPVLTLEDGFYEVDYNSFHETYETSTPSLSAKELAELASRAELPLSWSVSSKLNQHAELETEEEEKNLEEQTERNGDVANLENESKV

SEQ ID NO: 30356 - protein, 336 aa, Homo sapiens
  REGION 1..336: note = ENSP00000355580
MLQSLAGSSCVRLVERHRSAWCFGFLVLGYLLYLVFGAVVFSSVELPYEDLLRQELRKLKRRFLEEHECLSEQQLEQFLGRVLEASNYGVSVLSNASGNWNWDFTSALFFASTVLSTTGYGHTVPLSDGGKAFCIIYSVIGIPFTLLFLTAVVQRITVHVTRRPVLYFHIRWGFSKQVVAIVHAVLLGFVTVSCFFFIPAAVFSVLEDDWNFLESFYFCFISLSTIGLGDYVPGEGYNQKFRELYKIGITCYLLLGLIAMLVVLETFCELHELKKFRKMFYVKKDKDEDQVHIIEHDQLSFSSITDQAAGMKEDQKQNEPFVATQSSACVDGPANH

SEQ ID NO: 30357 - protein, 242 aa, Homo sapiens
  REGION 1..242: note = ENSP00000409626
VLRVLSPDLVRRLLNLAVRAFQVPKGESLNFPESTPGYGHTVPLSDGGKAFCIIYSVIGIPFTLLFLTAVVQRITVHVTRRPVLYFHIRWGFSKQVVAIVHAVLLGFVTVSCFFFIPAAVFSVLEDDWNFLESFYFCFISLSTIGLGDYVPGEGYNQKFRELYKIGITCYLLLGLIAMLVVLETFCELHELKKFRKMFYVKKDKDEDQVHIIEHDQLSFSSITDQAAGMKEDQKQNEPFVAT

SEQ ID NO: 30358 - protein, 538 aa, Homo sapiens
  REGION 1..538: note = ENSP00000343104
MFFLYTDFFLSLVAVPAAAPVCQPKSATNGQPPAPAPTPTPRLSISSRATVVARMEGTSQGGLQTVMKWKTVVAIFVVVVVYLVTGGLVFRALEQPFESSQKNTIALEKAEFLRDHVCVSPQELETLIQHALDADNAGVSPIGNSSNNSSHWDLGSAFFFAGTVITTIGYGNIAPSTEGGKIFCILYAIFGIPLFGFLLAGIGDQLGTIFGKSIARVEKVFRKKQVSQTKIRVISTILFILAGCIVFVTIPAVIFKYIEGWTALESIYFVVVTLTTVGFGDFVAGGNAGINYREWYKPLVWFWILVGLAYFAAVLSMIGDWLRVLSKKTKEEVGEIKAHAAEWKANVTAEFRETRRRLSVEIHDKLQRAATIRSMERRRLGLDQRAHSLDMLSPEKRSVFAALDTGRFKASSQESINNRPNNLRLKGPEQLNKHGQGASEDNIINKFGSTSRLTKRKNKDLKKTLPEDVQKIYKTFRNYSLDEEKKEEETEKMCNSDNSSTAMLTDCIQQHAELENGMIPTDTKDREPENNSLLEDRN

SEQ ID NO: 30359 - protein, 543 aa, Homo sapiens
  REGION 1..543: note = ENSP00000310568
MEDGFKGDRTEGCRSDSVAVPAAAPVCQPKSATNGQPPAPAPTPTPRLSISSRATVVARMEGTSQGGLQTVMKWKTVVAIFVVVVVYLVTGGLVFRALEQPFESSQKNTIALEKAEFLRDHVCVSPQELETLIQHALDADNAGVSPIGNSSNNSSHWDLGSAFFFAGTVITTIGYGNIAPSTEGGKIFCILYAIFGIPLFGFLLAGIGDQLGTIFGKSIARVEKVFRKKQVSQTKIRVISTILFILAGCIVFVTIPAVIFKYIEGWTALESIYFVVVTLTTVGFGDFVAGGNAGINYREWYKPLVWFWILVGLAYFAAVLSMIGDWLRVLSKKTKEEVGEIKAHAAEWKANVTAEFRETRRRLSVEIHDKLQRAATIRSMERRRLGLDQRAHSLDMLSPEKRSVFAALDTGRFKASSQESINNRPNNLRLKGPEQLNKHGQGASEDNIINKFGSTSRLTKRKNKDLKKTLPEDVQKIYKTFRNYSLDEEKKEEETEKMCNSDNSSTAMLTDCIQQHAELENGMIPTDTKDREPENNSLLEDRN

SEQ ID NO: 30360 - protein, 543 aa, Homo sapiens
  REGION 1..543: note = ENSP00000312811
MKFPIETPRKQVNWDPKVAVPAAAPVCQPKSATNGQPPAPAPTPTPRLSISSRATVVARMEGTSQGGLQTVMKWKTVVAIFVVVVVYLVTGGLVFRALEQPFESSQKNTIALEKAEFLRDHVCVSPQELETLIQHALDADNAGVSPIGNSSNNSSHWDLGSAFFFAGTVITTIGYGNIAPSTEGGKIFCILYAIFGIPLFGFLLAGIGDQLGTIFGKSIARVEKVFRKKQVSQTKIRVISTILFILAGCIVFVTIPAVIFKYIEGWTALESIYFVVVTLTTVGFGDFVAGGNAGINYREWYKPLVWFWILVGLAYFAAVLSMIGDWLRVLSKKTKEEVGEIKAHAAEWKANVTAEFRETRRRLSVEIHDKLQRAATIRSMERRRLGLDQRAHSLDMLSPEKRSVFAALDTGRFKASSQESINNRPNNLRLKGPEQLNKHGQGASEDNIINKFGSTSRLTKRKNKDLKKTLPEDVQKIYKTFRNYSLDEEKKEEETEKMCNSDNSSTAMLTDCIQQHAELENGMIPTDTKDREPENNSLLEDRN

SEQ ID NO: 30361 - protein, 156 aa, Homo sapiens
  REGION 1..156: note = ENSP00000452587
MAVPAAAPVCQPKSATNGQPPAPAPTPTPRLSISSRATVVARMEGTSQGGLQTVMKWKTVVAIFVVVVVYLVTGGLVFRALEQPFESSQKNTIALEKAEFLRDHVCVSPQELETLIQHALDADNAGVSPIGNSSNNSSHWDLGSAFFFAGTVITTI

SEQ ID NO: 30362 - protein, 430 aa, Homo sapiens
  REGION 1..430: note = ENSP00000327611
MSSRSPRPPPRRSRRRLPRPSCCCCCCRRSHLNEDTGRFVLLAALIGLYLVAGATVFSALESPGEAEARARWGATLRNFSAAHGVAEPELRAFLRHYEAALAAGVRADALRPRWDFPGAFYFVGTVVSTIGFGMTTPATVGGKAFLIAYGLFGCAGTILFFNLFLERIISLLAFIMRACRERQLRRSGLLPATFRRGSALSEADSLAGWKPSVYHVLLILGLFAVLLSCCASAMYTSVEGWDYVDSLYFCFVTFSTIGFGDLVSSQHAAYRNQGLYRLGNFLFILLGVCCIYSLFNVISILIKQVLNWMLRKLSCRCCARCCPAPGAPLARRNAITPGSRLRRRLAALGADPAARDSDAEGRRLSGELISMRDLTASNKVSLALLQKQLSETANGYPRSVCVNTRQNGFSGGVGALGIMNNRLAETSASR

SEQ ID NO: 30363 - protein, 408 aa, Homo sapiens
  REGION 1..408: note = ENSP00000282146
MAGRGFSWGPGHLNEDNARFLLLAALIVLYLLGGAAVFSALELAHERQAKQRWEERLANFSRGHNLSRDELRGFLRHYEEATRAGIRVDNVRPRWDFTGAFYFVGTVVSTIGFGMTTPATVGGKIFLIFYGLVGCSSTILFFNLFLERLITIIAYIMKSCHQRQLRRRGALPQESLKDAGQCEVDSLAGWKPSVYYVMLILCTASILISCCASAMYTPIEGWSYFDSLYFCFVAFSTIGFGDLVSSQNAHYESQGLYRFANFVFILMGVCCIYSLFNVISILIKQSLNWILRKMDSGCCPQCQRGLLRSRRNVVMPGSVRNRCNISIETDGVAESDTDGRRLSGEMISMKDLLAANKASLAILQKQLSEMANGCPHQTSTLARDNEFSGGVGAFAIMNNRLAETSGDR

SEQ ID NO: 30364 - protein, 394 aa, Homo sapiens
  REGION 1..394: note = ENSP00000306275
MKRQNVRTLALIVCTFTYLLVGAAVFDALESEPELIERQRLELRQQELRARYNLSQGGYEELERVVLRLKPHKAGVQWRFAGSFYFAITVITTIGYGHAAPSTDGGKVFCMFYALLGIPLTLVMFQSLGERINTLVRYLLHRAKKGLGMRRADVSMANMVLIGFFSCISTLCIGAAAFSHYEHWTFFQAYYYCFITLTTIGFGDYVALQKDQALQTQPQYVAFSFVYILTGLTVIGAFLNLVVLRFMTMNAEDEKRDAEHRALLTRNGQAGGGGGGGSAHTTDTASSTAAAGGGGFRNVYAEVLHFQSMCSCLWYKSREKLQYSIPMIIPRDLSTSDTCVEQSHSSPGGGGRYSDTPSRRCLCSGAPRSAISSVSTGLHSLSTFRGLMKRRSSV

SEQ ID NO: 30365 - protein, 271 aa, Homo sapiens
  REGION 1..271: note = ENSP00000483136
MFQSLGERINTLVRYLLHRAKKGLGMRRADVSMANMVLIGFFSCISTLCIGAAAFSHYEHWTFFQAYYYCFITLTTIGFGDYVALQKDQALQTQPQYVAFSFVYILTGLTVIGAFLNLVVLRFMTMNAEDEKRDAEHRALLTRNGQAGGGGGGGSAHTTDTASSTAAAGGGGFRNVYAEVLHFQSMCSCLWYKSREKLQYSIPMIIPRDLSTSDTCVEQSHSSPGGGGRYSDTPSRRCLCSGAPRSAISSVSTGLHSLSTFRGLMKRRSSV

SEQ ID NO: 30366 - protein, 1043 aa, Homo sapiens
  REGION 1..1043: note = ENSP00000473714
GTLKPVDEKEEAVAAEVGWMTSVKDWAGVMISAQTLTGRVLVVLVFALSIGALVIYFIDSSNPIESCQNFYKDFTLQIDMAFNVFFLLYFGLRFIAANDKLWFWLEVNSVVDFFTVPPVFVSVYLNRSWLGLRFLRALRLIQFSEILQFLNILKTSNSIKLVNLLSIFISTWLTAAGFIHLVENSGDPWENFQNNQALTYWECVYLLMVTMSTVGYGDVYAKTTLGRLFMVFFILGGLAMFASYVPEIIELIGNRKKYGGSYSAVSGRKHIVVCGHITLESVSNFLKDFLHKDRDDVNVEIVFLHNISPNLELEALFKRHFTQVEFYQGSVLNPHDLARVKIESADACLILANKYCADPDAEDASNIMRVISIKNYHPKIRIITQMLQYHNKAHLLNIPSWNWKEGDDAICLAELKLGFIAQSCLAQGLSTMLANLFSMRSFIKIEEDTWQKYYLEGVSNEMYTEYLSSAFVGLSFPTVCELCFVKLKLLMIAIEYKSANRESRSRKRILINPGNHLKIQEGTLGFFIASDAKEVKRAFFYCKACHDDITDPKRIKKCGCKRLEDEQPSTLSPKKKQRNGGMRNSPNTSPKLMRHDPLLIPGNDQIDNMDSNVKKYDSTGMFHWCAPKEIEKVILTRSEAAMTVLSGHVVVCIFGDVSSALIGLRNLVMPLRASNFHYHELKHIVFVGSIEYLKREWETLHNFPKVSILPGTPLSRADLRAVNINLCDMCVILSANQNNIDDTSLQDKECILASLNIKSMQFDDSIGVLQANSQGFTPPGMDRSSPDNSPVHGMLRQPSITTGVNIPIITELVNDTNVQFLDQDDDDDPDTELYLTQPFACGTAFAVSVLDSLMSATYFNDNILTLIRTLVTGGATPELEALIAEENALRGGYSTPQTLANRDRCRVAQLALLDGPFADLGDGGCYGDLFCKALKTYNMLCFGIYRLRDAHLSTPSQCTKRYVITNPPYEFELVPTDLIFCLMQFDHNAGQSRASLSHSSHSSQSSSKKSSSVHSIPSTANRQNRPKSRESRDKQNRKEMVYR

SEQ ID NO: 30367 - protein, 1178 aa, Homo sapiens
  REGION 1..1178: note = ENSP00000492806
MANGGGGGGGSSGGGGGGGGSSLRMSSNIHANHLSLDASSSSSSSSSSSSSSSSSSSSSSVHEPKMDALIIPVTMEVPCDSRGQRMWWAFLASSMVTFFGGLFIILLWRTLKYLWTVCCHCGGKTKEAQKINNGSSQADGTLKPVDEKEEAVAAEVGWMTSVKDWAGVMISAQTLTGRVLVVLVFALSIGALVIYFIDSSNPIESCQNFYKDFTLQIDMAFNVFFLLYFGLRFIAANDKLWFWLEVNSVVDFFTVPPVFVSVYLNRSWLGLRFLRALRLIQFSEILQFLNILKTSNSIKLVNLLSIFISTWLTAAGFIHLVENSGDPWENFQNNQALTYWECVYLLMVTMSTVGYGDVYAKTTLGRLFMVFFILGGLAMFASYVPEIIELIGNRKKYGGSYSAVSGRKHIVVCGHITLESVSNFLKDFLHKDRDDVNVEIVFLHNISPNLELEALFKRHFTQVEFYQGSVLNPHDLARVKIESADACLILANKYCADPDAEDASNIMRVISIKNYHPKIRIITQMLQYHNKAHLLNIPSWNWKEGDDAICLAELKLGFIAQSCLAQGLSTMLANLFSMRSFIKIEEDTWQKYYLEGVSNEMYTEYLSSAFVGLSFPTVCELCFVKLKLLMIAIEYKSANRESRILINPGNHLKIQEGTLGFFIASDAKEVKRAFFYCKACHDDITDPKRIKKCGCKRLEDEQPSTLSPKKKQRNGGMRNSPNTSPKLMRHDPLLIPGNDQIDNMDSNVKKYDSTGMFHWCAPKEIEKVILTRSEAAMTVLSGHVVVCIFGDVSSALIGLRNLVMPLRASNFHYHELKHIVFVGSIEYLKREWETLHNFPKVSILPGTPLSRADLRAVNINLCDMCVILSANQNNIDDTSLQDKECILASLNIKSMQFDDSIGVLQANSQGFTPPGMDRSSPDNSPVHGMLRQPSITTGVNIPIITELVNDTNVQFLDQDDDDDPDTELYLTQPFACGTAFAVSVLDSLMSATYFNDNILTLIRTLVTGGATPELEALIAEENALRGGYSTPQTLANRDRCRVAQLALLDGPFADLGDGGCYGDLFCKALKTYNMLCFGIYRLRDAHLSTPSQCTKRYVITNPPYEFELVPTDLIFCLMQFDHNAGQSRASLSHSSHSSQSSSKKSSSVHSIPSTANRQNRPKSRESRDKQNRKEMVYR

SEQ ID NO: 30368 - protein, 1181 aa, Homo sapiens
  REGION 1..1181: note = ENSP00000490978
MANGGGGGGGSSGGGGGGGGSSLRMSSNIHANHLSLDASSSSSSSSSSSSSSSSSSSSSSVHEPKMDALIIPVTMEVPCDSRGQRMWWAFLASSMVTFFGGLFIILLWRTLKYLWTVCCHCGGKTKEAQKINNGSSQADGTLKPVDEKEEAVAAEVGWMTSVKDWAGVMISAQTLTGRVLVVLVFALSIGALVIYFIDSSNPIESCQNFYKDFTLQIDMAFNVFFLLYFGLRFIAANDKLWFWLEVNSVVDFFTVPPVFVSVYLNRSWLGLRFLRALRLIQFSEILQFLNILKTSNSIKLVNLLSIFISTWLTAAGFIHLVENSGDPWENFQNNQALTYWECVYLLMVTMSTVGYGDVYAKTTLGRLFMVFFILGGLAMFASYVPEIIELIGNRKKYGGSYSAVSGRKHIVVCGHITLESVSNFLKDFLHKDRDDVNVEIVFLHNISPNLELEALFKRHFTQVEFYQGSVLNPHDLARVKIESADACLILANKYCADPDAEDASNIMRVISIKNYHPKIRIITQMLQYHNKAHLLNIPSWNWKEGDDAICLAELKLGFIAQSCLAQGLSTMLANLFSMRSFIKIEEDTWQKYYLEGVSNEMYTEYLSSAFVGLSFPTVCELCFVKLKLLMIAIEYKSANRESRILINPGNHLKIQEGTLGFFIASDAKEVKRAFFYCKACHDDITDPKRIKKCGCKRLIYFEDEQPSTLSPKKKQRNGGMRNSPNTSPKLMRHDPLLIPGNDQIDNMDSNVKKYDSTGMFHWCAPKEIEKVILTRSEAAMTVLSGHVVVCIFGDVSSALIGLRNLVMPLRASNFHYHELKHIVFVGSIEYLKREWETLHNFPKVSILPGTPLSRADLRAVNINLCDMCVILSANQNNIDDTSLQDKECILASLNIKSMQFDDSIGVLQANSQGFTPPGMDRSSPDNSPVHGMLRQPSITTGVNIPIITELVNDTNVQFLDQDDDDDPDTELYLTQPFACGTAFAVSVLDSLMSATYFNDNILTLIRTLVTGGATPELEALIAEENALRGGYSTPQTLANRDRCRVAQLALLDGPFADLGDGGCYGDLFCKALKTYNMLCFGIYRLRDAHLSTPSQCTKRYVITNPPYEFELVPTDLIFCLMQFDHNAGQSRASLSHSSHSSQSSSKKSSSVHSIPSTANRQNRPKSRESRDKQNRKEMVYR

SEQ ID NO: 30369 - protein, 1208 aa, Homo sapiens
  REGION 1..1208: note = ENSP00000492241
MANGGGGGGGSSGGGGGGGGSSLRMSSNIHANHLSLDASSSSSSSSSSSSSSSSSSSSSSVHEPKMDALIIPVTMEVPCDSRGQRMWWAFLASSMVTFFGGLFIILLWRTLKYLWTVCCHCGGKTKEAQKINNGSSQADGTLKPVDEKEEAVAAEVGWMTSVKDWAGVMISAQTLTGRVLVVLVFALSIGALVIYFIDSSNPIESCQNFYKDFTLQIDMAFNVFFLLYFGLRFIAANDKLWFWLEVNSVVDFFTVPPVFVSVYLNRSWLGLRFLRALRLIQFSEILQFLNILKTSNSIKLVNLLSIFISTWLTAAGFIHLVENSGDPWENFQNNQALTYWECVYLLMVTMSTVGYGDVYAKTTLGRLFMVFFILGGLAMFASYVPEIIELIGNRKKYGGSYSAVSGRKHIVVCGHITLESVSNFLKDFLHKDRDDVNVEIVFLHNISPNLELEALFKRHFTQVEFYQGSVLNPHDLARVKIESADACLILANKYCADPDAEDASNIMRVISIKNYHPKIRIITQMLQYHNKAHLLNIPSWNWKEGDDAICLAELKLGFIAQSCLAQGLSTMLANLFSMRSFIKIEEDTWQKYYLEGVSNEMYTEYLSSAFVGLSFPTVCELCFVKLKLLMIAIEYKSANRESRILINPGNHLKIQEGTLGFFIASDAKEVKRAFFYCKACHDDITDPKRIKKCGCKRLIYFEDEQPSTLSPKKKQRNGGMRNSPNTSPKLMRHDPLLIPGNDQIDNMDSNVKKYDSTGMFHWCAPKEIEKVILTRSEAAMTVLSGHVVVCIFGDVSSALIGLRNLVMPLRASNFHYHELKHIVFVGSIEYLKREWETLHNFPKVSILPGTPLSRADLRAVNINLCDMCVILSANQNNIDDTSLQDKECILASLNIKSMQFDDSIGVLQANSQGFTPPGMDRSSPDNSPVHGMLRQPSITTGVNIPIITELAKPGKLPLVSVNQEKNSGTHILMITELVNDTNVQFLDQDDDDDPDTELYLTQPFACGTAFAVSVLDSLMSATYFNDNILTLIRTLVTGGATPELEALIAEENALRGGYSTPQTLANRDRCRVAQLALLDGPFADLGDGGCYGDLFCKALKTYNMLCFGIYRLRDAHLSTPSQCTKRYVITNPPYEFELVPTDLIFCLMQFDHNAGQSRASLSHSSHSSQSSSKKSSSVHSIPSTANRQNRPKSRESRDKQNRKEMVYR

SEQ ID NO: 30370 - protein, 1142 aa, Homo sapiens
  REGION 1..1142: note = ENSP00000492718
MDALIIPVTMEVPCDSRGQRMWWAFLASSMVTFFGGLFIILLWRTLKYLWTVCCHCGGKTKEAQKINNGSSQADGTLKPVDEKEEAVAAEVGWMTSVKDWAGVMISAQTLTGRVLVVLVFALSIGALVIYFIDSSNPIESCQNFYKDFTLQIDMAFNVFFLLYFGLRFIAANDKLWFWLEVNSVVDFFTVPPVFVSVYLNRSWLGLRFLRALRLIQFSEILQFLNILKTSNSIKLVNLLSIFISTWLTAAGFIHLVENSGDPWENFQNNQALTYWECVYLLMVTMSTVGYGDVYAKTTLGRLFMVFFILGGLAMFASYVPEIIELIGNRKKYGGSYSAVSGRKHIVVCGHITLESVSNFLKDFLHKDRDDVNVEIVFLHNISPNLELEALFKRHFTQVEFYQGSVLNPHDLARVKIESADACLILANKYCADPDAEDASNIMRVISIKNYHPKIRIITQMLQYHNKAHLLNIPSWNWKEGDDAICLAELKLGFIAQSCLAQGLSTMLANLFSMRSFIKIEEDTWQKYYLEGVSNEMYTEYLSSAFVGLSFPTVCELCFVKLKLLMIAIEYKSANRESRILINPGNHLKIQEGTLGFFIASDAKEVKRAFFYCKACHDDITDPKRIKKCGCKRLIYFEDEQPSTLSPKKKQRNGGMRNSPNTSPKLMRHDPLLIPGNDQIDNMDSNVKKYDSTGMFHWCAPKEIEKVILTRSEAAMTVLSGHVVVCIFGDVSSALIGLRNLVMPLRASNFHYHELKHIVFVGSIEYLKREWETLHNFPKVSILPGTPLSRADLRAVNINLCDMCVILSANQNNIDDTSLQDKECILASLNIKSMQFDDSIGVLQANSQGFTPPGMDRSSPDNSPVHGMLRQPSITTGVNIPIITELAKPGKLPLVSVNQEKNSGTHILMITELVNDTNVQFLDQDDDDDPDTELYLTQPFACGTAFAVSVLDSLMSATYFNDNILTLIRTLVTGGATPELEALIAEENALRGGYSTPQTLANRDRCRVAQLALLDGPFADLGDGGCYGDLFCKALKTYNMLCFGIYRLRDAHLSTPSQCTKRYVITNPPYEFELVPTDLIFCLMQFDHNAGQSRASLSHSSHSSQSSSKKSSSVHSIPSTANRQNRPKSRESRDKQKKEMVYR

SEQ ID NO: 30371 - protein, 1177 aa, Homo sapiens
  REGION 1..1177: note = ENSP00000492005
MANGGGGGGGSSGGGGGGGGSSLRMSSNIHANHLSLDASSSSSSSSSSSSSSSSSSSSSSVHEPKMDALIIPVTMEVPCDSRGQRMWWAFLASSMVTFFGGLFIILLWRTLKYLWTVCCHCGGKTKEAQKINNGSSQADGTLKPVDEKEEAVAAEVGWMTSVKDWAGVMISAQTLTGRVLVVLVFALSIGALVIYFIDSSNPIESCQNFYKDFTLQIDMAFNVFFLLYFGLRFIAANDKLWFWLEVNSVVDFFTVPPVFVSVYLNRSWLGLRFLRALRLIQFSEILQFLNILKTSNSIKLVNLLSIFISTWLTAAGFIHLVENSGDPWENFQNNQALTYWECVYLLMVTMSTVGYGDVYAKTTLGRLFMVFFILGGLAMFASYVPEIIELIGNRKKYGGSYSAVSGRKHIVVCGHITLESVSNFLKDFLHKDRDDVNVEIVFLHNISPNLELEALFKRHFTQVEFYQGSVLNPHDLARVKIESADACLILANKYCADPDAEDASNIMRVISIKNYHPKIRIITQMLQYHNKAHLLNIPSWNWKEGDDAICLAELKLGFIAQSCLAQGLSTMLANLFSMRSFIKIEEDTWQKYYLEGVSNEMYTEYLSSAFVGLSFPTVCELCFVKLKLLMIAIEYKSANRESRILINPGNHLKIQEGTLGFFIASDAKEVKRAFFYCKACHDDITDPKRIKKCGCKRLEDEQPSTLSPKKKQRNGGMRNSPNTSPKLMRHDPLLIPGNDQIDNMDSNVKKYDSTGMFHWCAPKEIEKVILTRSEAAMTVLSGHVVVCIFGDVSSALIGLRNLVMPLRASNFHYHELKHIVFVGSIEYLKREWETLHNFPKVSILPGTPLSRADLRAVNINLCDMCVILSANQNNIDDTSLQDKECILASLNIKSMQFDDSIGVLQANSQGFTPPGMDRSSPDNSPVHGMLRQPSITTGVNIPIITELVNDTNVQFLDQDDDDDPDTELYLTQPFACGTAFAVSVLDSLMSATYFNDNILTLIRTLVTGGATPELEALIAEENALRGGYSTPQTLANRDRCRVAQLALLDGPFADLGDGGCYGDLFCKALKTYNMLCFGIYRLRDAHLSTPSQCTKRYVITNPPYEFELVPTDLIFCLMQFDHNAGQSRASLSHSSHSSQSSSKKSSSVHSIPSTANRQNRPKSRESRDKQKKEMVYR

SEQ ID NO: 30372 - protein, 1196 aa, Homo sapiens
  REGION 1..1196: note = ENSP00000492835
MDALIIPVTMEVPCDSRGQRMWWAFLASSMVTFFGGLFIILLWRTLKYLWTVCCHCGGKTKEAQKINNGSSQADGTLKPVDEKEEAVAAEVGWMTSVKDWAGVMISAQTLTGRVLVVLVFALSIGALVIYFIDSSNPIESCQNFYKDFTLQIDMAFNVFFLLYFGLRFIAANDKLWFWLEVNSVVDFFTVPPVFVSVYLNRSWLGLRFLRALRLIQFSEILQFLNILKTSNSIKLVNLLSIFISTWLTAAGFIHLVENSGDPWENFQNNQALTYWECVYLLMVTMSTVGYGDVYAKTTLGRLFMVFFILGGLAMFASYVPEIIELIGNRKKYGGSYSAVSGRKHIVVCGHITLESVSNFLKDFLHKDRDDVNVEIVFLHNISPNLELEALFKRHFTQVEFYQGSVLNPHDLARVKIESADACLILANKYCADPDAEDASNIMRVISIKNYHPKIRIITQMLQYHNKAHLLNIPSWNWKEGDDAICLAELKLGFIAQSCLAQGLSTMLANLFSMRSFIKIEEDTWQKYYLEGVSNEMYTEYLSSAFVGLSFPTVCELCFVKLKLLMIAIEYKSANRESRILINPGNHLKIQEGTLGFFIASDAKEVKRAFFYCKACHDDITDPKRIKKCGCKRLIYFEDEQPSTLSPKKKQRNGGMRNSPNTSPKLMRHDPLLIPGNDQIDNMDSNVKKYDSTGMFHWCAPKEIEKVILTRSEAAMTVLSGHVVVCIFGDVSSALIGLRNLVMPLRASNFHYHELKHIVFVGSIEYLKREWETLHNFPKVSILPGTPLSRADLRAVNINLCDMCVILSANQNNIDDTSLQDKECILASLNIKSMQFDDSIGVLQANSQGFTPPGMDRSSPDNSPVHGMLRQPSITTGVNIPIITELAKPGKLPLVSVNQEKNSGTHILMITELVNDTNVQFLDQDDDDDPDTELYLTQPFACGTAFAVSVLDSLMSATYFNDNILTLIRTLVTGGATPELEALIAEENALRGGYSTPQTLANRDRCRVAQLALLDGPFADLGDGGCYGDLFCKALKTYNMLCFGIYRLRDAHLSTPSQCTKRYVITNPPYEFELVPTDLIFCLMQFDHNAGQSRASLSHSSHSSQSSSKKSSSVHSIPSTANRQNRPKSRESRDKQNATRMNRMGQAEKKWFTDEPDNAYPRNIQIKPMSTHMANQINQYKSTSSLIPPIREVEDEC

SEQ ID NO: 30373 - protein, 1242 aa, Homo sapiens
  REGION 1..1242: note = ENSP00000491795
MANGGGGGGGSSGGGGGGGGSSLRMSSNIHANHLSLDASSSSSSSSSSSSSSSSSSSSSSVHEPKMDALIIPVTMEVPCDSRGQRMWWAFLASSMVTFFGGLFIILLWRTLKYLWTVCCHCGGKTKEAQKINNGSSQADGTLKPVDEKEEAVAAEVGWMTSVKDWAGVMISAQTLTGRVLVVLVFALSIGALVIYFIDSSNPIESCQNFYKDFTLQIDMAFNVFFLLYFGLRFIAANDKLWFWLEVNSVVDFFTVPPVFVSVYLNRSWLGLRFLRALRLIQFSEILQFLNILKTSNSIKLVNLLSIFISTWLTAAGFIHLVENSGDPWENFQNNQALTYWECVYLLMVTMSTVGYGDVYAKTTLGRLFMVFFILGGLAMFASYVPEIIELIGNRKKYGGSYSAVSGRKHIVVCGHITLESVSNFLKDFLHKDRDDVNVEIVFLHNISPNLELEALFKRHFTQVEFYQGSVLNPHDLARVKIESADACLILANKYCADPDAEDASNIMRVISIKNYHPKIRIITQMLQYHNKAHLLNIPSWNWKEGDDAICLAELKLGFIAQSCLAQGLSTMLANLFSMRSFIKIEEDTWQKYYLEGVSNEMYTEYLSSAFVGLSFPTVCELCFVKLKLLMIAIEYKSANRESRSRKRILINPGNHLKIQEGTLGFFIASDAKEVKRAFFYCKACHDDITDPKRIKKCGCKRLIYSKMSIYKRMRRACCFDCGRSERDCSCMSGRVRGNVDTLERAFPLSSVSVNDCSTSFRAFEDEQPSTLSPKKKQRNGGMRNSPNTSPKLMRHDPLLIPGNDQIDNMDSNVKKYDSTGMFHWCAPKEIEKVILTRSEAAMTVLSGHVVVCIFGDVSSALIGLRNLVMPLRASNFHYHELKHIVFVGSIEYLKREWETLHNFPKVSILPGTPLSRADLRAVNINLCDMCVILSANQNNIDDTSLQDKECILASLNIKSMQFDDSIGVLQANSQGFTPPGMDRSSPDNSPVHGMLRQPSITTGVNIPIITELVNDTNVQFLDQDDDDDPDTELYLTQPFACGTAFAVSVLDSLMSATYFNDNILTLIRTLVTGGATPELEALIAEENALRGGYSTPQTLANRDRCRVAQLALLDGPFADLGDGGCYGDLFCKALKTYNMLCFGIYRLRDAHLSTPSQCTKRYVITNPPYEFELVPTDLIFCLMQFDHNAGQSRASLSHSSHSSQSSSKKSSSVHSIPSTANRQNRPKSRESRDKQKKEMVYR

SEQ ID NO: 30374 - protein, 1209 aa, Homo sapiens
  REGION 1..1209: note = ENSP00000361520
MANGGGGGGGSSGGGGGGGGSSLRMSSNIHANHLSLDASSSSSSSSSSSSSSSSSSSSSSVHEPKMDALIIPVTMEVPCDSRGQRMWWAFLASSMVTFFGGLFIILLWRTLKYLWTVCCHCGGKTKEAQKINNGSSQADGTLKPVDEKEEAVAAEVGWMTSVKDWAGVMISAQTLTGRVLVVLVFALSIGALVIYFIDSSNPIESCQNFYKDFTLQIDMAFNVFFLLYFGLRFIAANDKLWFWLEVNSVVDFFTVPPVFVSVYLNRSWLGLRFLRALRLIQFSEILQFLNILKTSNSIKLVNLLSIFISTWLTAAGFIHLVENSGDPWENFQNNQALTYWECVYLLMVTMSTVGYGDVYAKTTLGRLFMVFFILGGLAMFASYVPEIIELIGNRKKYGGSYSAVSGRKHIVVCGHITLESVSNFLKDFLHKDRDDVNVEIVFLHNISPNLELEALFKRHFTQVEFYQGSVLNPHDLARVKIESADACLILANKYCADPDAEDASNIMRVISIKNYHPKIRIITQMLQYHNKAHLLNIPSWNWKEGDDAICLAELKLGFIAQSCLAQGLSTMLANLFSMRSFIKIEEDTWQKYYLEGVSNEMYTEYLSSAFVGLSFPTVCELCFVKLKLLMIAIEYKSANRESRSRKRILINPGNHLKIQEGTLGFFIASDAKEVKRAFFYCKACHDDITDPKRIKKCGCKRLEDEQPSTLSPKKKQRNGGMRNSPNTSPKLMRHDPLLIPGNDQIDNMDSNVKKYDSTGMFHWCAPKEIEKVILTRSEAAMTVLSGHVVVCIFGDVSSALIGLRNLVMPLRASNFHYHELKHIVFVGSIEYLKREWETLHNFPKVSILPGTPLSRADLRAVNINLCDMCVILSANQNNIDDTSLQDKECILASLNIKSMQFDDSIGVLQANSQGFTPPGMDRSSPDNSPVHGMLRQPSITTGVNIPIITELAKPGKLPLVSVNQEKNSGTHILMITELVNDTNVQFLDQDDDDDPDTELYLTQPFACGTAFAVSVLDSLMSATYFNDNILTLIRTLVTGGATPELEALIAEENALRGGYSTPQTLANRDRCRVAQLALLDGPFADLGDGGCYGDLFCKALKTYNMLCFGIYRLRDAHLSTPSQCTKRYVITNPPYEFELVPTDLIFCLMQFDHNAGQSRASLSHSSHSSQSSSKKSSSVHSIPSTANRQNRPKSRESRDKQNRKEMVYR

SEQ ID NO: 30375 - protein, 1212 aa, Homo sapiens
  REGION 1..1212: note = ENSP00000492492
MANGGGGGGGSSGGGGGGGGSSLRMSSNIHANHLSLDASSSSSSSSSSSSSSSSSSSSSSVHEPKMDALIIPVTMEVPCDSRGQRMWWAFLASSMVTFFGGLFIILLWRTLKYLWTVCCHCGGKTKEAQKINNGSSQADGTLKPVDEKEEAVAAEVGWMTSVKDWAGVMISAQTLTGRVLVVLVFALSIGALVIYFIDSSNPIESCQNFYKDFTLQIDMAFNVFFLLYFGLRFIAANDKLWFWLEVNSVVDFFTVPPVFVSVYLNRSWLGLRFLRALRLIQFSEILQFLNILKTSNSIKLVNLLSIFISTWLTAAGFIHLVENSGDPWENFQNNQALTYWECVYLLMVTMSTVGYGDVYAKTTLGRLFMVFFILGGLAMFASYVPEIIELIGNRKKYGGSYSAVSGRKHIVVCGHITLESVSNFLKDFLHKDRDDVNVEIVFLHNISPNLELEALFKRHFTQVEFYQGSVLNPHDLARVKIESADACLILANKYCADPDAEDASNIMRVISIKNYHPKIRIITQMLQYHNKAHLLNIPSWNWKEGDDAICLAELKLGFIAQSCLAQGLSTMLANLFSMRSFIKIEEDTWQKYYLEGVSNEMYTEYLSSAFVGLSFPTVCELCFVKLKLLMIAIEYKSANRESRSRKRILINPGNHLKIQEGTLGFFIASDAKEVKRAFFYCKACHDDITDPKRIKKCGCKRLIYFEDEQPSTLSPKKKQRNGGMRNSPNTSPKLMRHDPLLIPGNDQIDNMDSNVKKYDSTGMFHWCAPKEIEKVILTRSEAAMTVLSGHVVVCIFGDVSSALIGLRNLVMPLRASNFHYHELKHIVFVGSIEYLKREWETLHNFPKVSILPGTPLSRADLRAVNINLCDMCVILSANQNNIDDTSLQDKECILASLNIKSMQFDDSIGVLQANSQGFTPPGMDRSSPDNSPVHGMLRQPSITTGVNIPIITELAKPGKLPLVSVNQEKNSGTHILMITELVNDTNVQFLDQDDDDDPDTELYLTQPFACGTAFAVSVLDSLMSATYFNDNILTLIRTLVTGGATPELEALIAEENALRGGYSTPQTLANRDRCRVAQLALLDGPFADLGDGGCYGDLFCKALKTYNMLCFGIYRLRDAHLSTPSQCTKRYVITNPPYEFELVPTDLIFCLMQFDHNAGQSRASLSHSSHSSQSSSKKSSSVHSIPSTANRQNRPKSRESRDKQNRKEMVYR

SEQ ID NO: 30376 - protein, 1185 aa, Homo sapiens
  REGION 1..1185: note = ENSP00000492559
  VARIANT 1: note = Any amino acid
XSSSSSSSSSSVHEPKMDALIIPVTMEVPCDSRGQRMWWAFLASSMVTFFGGLFIILLWRTLKYLWTVCCHCGGKTKEAQKINNGSSQADGTLKPVDEKEEAVAAEVGWMTSVKDWAGVMISAQTLTGRVLVVLVFALSIGALVIYFIDSSNPIESCQNFYKDFTLQIDMAFNVFFLLYFGLRFIAANDKLWFWLEVNSVVDFFTVPPVFVSVYLNRSWLGLRFLRALRLIQFSEILQFLNILKTSNSIKLVNLLSIFISTWLTAAGFIHLVENSGDPWENFQNNQALTYWECVYLLMVTMSTVGYGDVYAKTTLGRLFMVFFILGGLAMFASYVPEIIELIGNRKKYGGSYSAVSGRKHIVVCGHITLESVSNFLKDFLHKDRDDVNVEIVFLHNISPNLELEALFKRHFTQVEFYQGSVLNPHDLARVKIESADACLILANKYCADPDAEDASNIMRVISIKNYHPKIRIITQMLQYHNKAHLLNIPSWNWKEGDDAICLAELKLGFIAQSCLAQGLSTMLANLFSMRSFIKIEEDTWQKYYLEGVSNEMYTEYLSSAFVGLSFPTVCELCFVKLKLLMIAIEYKSANRESRILINPGNHLKIQEGTLGFFIASDAKEVKRAFFYCKACHDDITDPKRIKKCGCKRLIYFEDEQPSTLSPKKKQRNGGMRNSPNTSPKLMRHDPLLIPGNDQIDNMDSNVKKYDSTGMFHWCAPKEIEKVILTRSEAAMTVLSGHVVVCIFGDVSSALIGLRNLVMPLRASNFHYHELKHIVFVGSIEYLKREWETLHNFPKVSILPGTPLSRADLRAVNINLCDMCVILSANQNNIDDTSLQDKECILASLNIKSMQFDDSIGVLQANSQGFTPPGMDRSSPDNSPVHGMLRQPSITTGVNIPIITELVNDTNVQFLDQDDDDDPDTELYLTQPFACGTAFAVSVLDSLMSATYFNDNILTLIRTLVTGGATPELEALIAEENALRGGYSTPQTLANRDRCRVAQLALLDGPFADLGDGGCYGDLFCKALKTYNMLCFGIYRLRDAHLSTPSQCTKRYVITNPPYEFELVPTDLIFCLMQFDHNAGQSRASLSHSSHSSQSSSKKSSSVHSIPSTANRQNRPKSRESRDKQNATRMNRMGQAEKKWFTDEPDNAYPRNIQIKPMSTHMANQINQYKSTSSLIPPIREVEDEC

SEQ ID NO: 30377 - protein, 1239 aa, Homo sapiens
  REGION 1..1239: note = ENSP00000492414
MANGGGGGGGSSGGGGGGGGSSLRMSSNIHANHLSLDASSSSSSSSSSSSSSSSSSSSSSVHEPKMDALIIPVTMEVPCDSRGQRMWWAFLASSMVTFFGGLFIILLWRTLKYLWTVCCHCGGKTKEAQKINNGSSQADGTLKPVDEKEEAVAAEVGWMTSVKDWAGVMISAQTLTGRVLVVLVFALSIGALVIYFIDSSNPIESCQNFYKDFTLQIDMAFNVFFLLYFGLRFIAANDKLWFWLEVNSVVDFFTVPPVFVSVYLNRSWLGLRFLRALRLIQFSEILQFLNILKTSNSIKLVNLLSIFISTWLTAAGFIHLVENSGDPWENFQNNQALTYWECVYLLMVTMSTVGYGDVYAKTTLGRLFMVFFILGGLAMFASYVPEIIELIGNRKKYGGSYSAVSGRKHIVVCGHITLESVSNFLKDFLHKDRDDVNVEIVFLHNISPNLELEALFKRHFTQVEFYQGSVLNPHDLARVKIESADACLILANKYCADPDAEDASNIMRVISIKNYHPKIRIITQMLQYHNKAHLLNIPSWNWKEGDDAICLAELKLGFIAQSCLAQGLSTMLANLFSMRSFIKIEEDTWQKYYLEGVSNEMYTEYLSSAFVGLSFPTVCELCFVKLKLLMIAIEYKSANRESRSRKRILINPGNHLKIQEGTLGFFIASDAKEVKRAFFYCKACHDDITDPKRIKKCGCKRPKMSIYKRMRRACCFDCGRSERDCSCMSGRVRGNVDTLERAFPLSSVSVNDCSTSFRAFEDEQPSTLSPKKKQRNGGMRNSPNTSPKLMRHDPLLIPGNDQIDNMDSNVKKYDSTGMFHWCAPKEIEKVILTRSEAAMTVLSGHVVVCIFGDVSSALIGLRNLVMPLRASNFHYHELKHIVFVGSIEYLKREWETLHNFPKVSILPGTPLSRADLRAVNINLCDMCVILSANQNNIDDTSLQDKECILASLNIKSMQFDDSIGVLQANSQGFTPPGMDRSSPDNSPVHGMLRQPSITTGVNIPIITELVNDTNVQFLDQDDDDDPDTELYLTQPFACGTAFAVSVLDSLMSATYFNDNILTLIRTLVTGGATPELEALIAEENALRGGYSTPQTLANRDRCRVAQLALLDGPFADLGDGGCYGDLFCKALKTYNMLCFGIYRLRDAHLSTPSQCTKRYVITNPPYEFELVPTDLIFCLMQFDHNAGQSRASLSHSSHSSQSSSKKSSSVHSIPSTANRQNRPKSRESRDKQKKEMVYR

SEQ ID NO: 30378 - protein, 1230 aa, Homo sapiens
  REGION 1..1230: note = ENSP00000491673
MANGGGGGGGSSGGGGGGGGSSLRMSSNIHANHLSLDASSSSSSSSSSSSSSSSSSSSSSVHEPKMDALIIPVTMEVPCDSRGQRMWWAFLASSMVTFFGGLFIILLWRTLKYLWTVCCHCGGKTKEAQKINNGSSQADGTLKPVDEKEEAVAAEVGWMTSVKDWAGVMISAQTLTGRVLVVLVFALSIGALVIYFIDSSNPIESCQNFYKDFTLQIDMAFNVFFLLYFGLRFIAANDKLWFWLEVNSVVDFFTVPPVFVSVYLNRSWLGLRFLRALRLIQFSEILQFLNILKTSNSIKLVNLLSIFISTWLTAAGFIHLVENSGDPWENFQNNQALTYWECVYLLMVTMSTVGYGDVYAKTTLGRLFMVFFILGGLAMFASYVPEIIELIGNRKKYGGSYSAVSGRKHIVVCGHITLESVSNFLKDFLHKDRDDVNVEIVFLHNISPNLELEALFKRHFTQVEFYQGSVLNPHDLARVKIESADACLILANKYCADPDAEDASNIMRVISIKNYHPKIRIITQMLQYHNKAHLLNIPSWNWKEGDDAICLAELKLGFIAQSCLAQGLSTMLANLFSMRSFIKIEEDTWQKYYLEGVSNEMYTEYLSSAFVGLSFPTVCELCFVKLKLLMIAIEYKSANRESRILINPGNHLKIQEGTLGFFIASDAKEVKRAFFYCKACHDDITDPKRIKKCGCKRLEDEQPSTLSPKKKQRNGGMRNSPNTSPKLMRHDPLLIPGNDQIDNMDSNVKKYDSTGMFHWCAPKEIEKVILTRSEAAMTVLSGHVVVCIFGDVSSALIGLRNLVMPLRASNFHYHELKHIVFVGSIEYLKREWETLHNFPKVSILPGTPLSRADLRAVNINLCDMCVILSANQNNIDDTSLQDKECILASLNIKSMQFDDSIGVLQANSQGFTPPGMDRSSPDNSPVHGMLRQPSITTGVNIPIITELVNDTNVQFLDQDDDDDPDTELYLTQPFACGTAFAVSVLDSLMSATYFNDNILTLIRTLVTGGATPELEALIAEENALRGGYSTPQTLANRDRCRVAQLALLDGPFADLGDGGCYGDLFCKALKTYNMLCFGIYRLRDAHLSTPSQCTKRYVITNPPYEFELVPTDLIFCLMQFDHNAGQSRASLSHSSHSSQSSSKKSSSVHSIPSTANRQNRPKSRESRDKQNATRMNRMGQEKKWFTDEPDNAYPRNIQIKPMSTHMANQINQYKSTSSLIPPIREVEDEC

SEQ ID NO: 30379 - protein, 1181 aa, Homo sapiens
  REGION 1..1181: note = ENSP00000491927
MANGGGGGGGSSGGGGGGGGSSLRMSSNIHANHLSLDASSSSSSSSSSSSSSSSSSSSSSVHEPKMDALIIPVTMEVPCDSRGQRMWWAFLASSMVTFFGGLFIILLWRTLKYLWTVCCHCGGKTKEAQKINNGSSQADGTLKPVDEKEEAVAAEVGWMTSVKDWAGVMISAQTLTGRVLVVLVFALSIGALVIYFIDSSNPIESCQNFYKDFTLQIDMAFNVFFLLYFGLRFIAANDKLWFWLEVNSVVDFFTVPPVFVSVYLNRSWLGLRFLRALRLIQFSEILQFLNILKTSNSIKLVNLLSIFISTWLTAAGFIHLVENSGDPWENFQNNQALTYWECVYLLMVTMSTVGYGDVYAKTTLGRLFMVFFILGGLAMFASYVPEIIELIGNRKKYGGSYSAVSGRKHIVVCGHITLESVSNFLKDFLHKDRDDVNVEIVFLHNISPNLELEALFKRHFTQVEFYQGSVLNPHDLARVKIESADACLILANKYCADPDAEDASNIMRVISIKNYHPKIRIITQMLQYHNKAHLLNIPSWNWKEGDDAICLAELKLGFIAQSCLAQGLSTMLANLFSMRSFIKIEEDTWQKYYLEGVSNEMYTEYLSSAFVGLSFPTVCELCFVKLKLLMIAIEYKSANRESRSRKRILINPGNHLKIQEGTLGFFIASDAKEVKRAFFYCKACHDDITDPKRIKKCGCKRLEDEQPSTLSPKKKQRNGGMRNSPNTSPKLMRHDPLLIPGNDQIDNMDSNVKKYDSTGMFHWCAPKEIEKVILTRSEAAMTVLSGHVVVCIFGDVSSALIGLRNLVMPLRASNFHYHELKHIVFVGSIEYLKREWETLHNFPKVSILPGTPLSRADLRAVNINLCDMCVILSANQNNIDDTSLQDKECILASLNIKSMQFDDSIGVLQANSQGFTPPGMDRSSPDNSPVHGMLRQPSITTGVNIPIITELVNDTNVQFLDQDDDDDPDTELYLTQPFACGTAFAVSVLDSLMSATYFNDNILTLIRTLVTGGATPELEALIAEENALRGGYSTPQTLANRDRCRVAQLALLDGPFADLGDGGCYGDLFCKALKTYNMLCFGIYRLRDAHLSTPSQCTKRYVITNPPYEFELVPTDLIFCLMQFDHNAGQSRASLSHSSHSSQSSSKKSSSVHSIPSTANRQNRPKSRESRDKQKKEMVYR

SEQ ID NO: 30380 - protein, 1195 aa, Homo sapiens
  REGION 1..1195: note = ENSP00000361485
MDALIIPVTMEVPCDSRGQRMWWAFLASSMVTFFGGLFIILLWRTLKYLWTVCCHCGGKTKEAQKINNGSSQADGTLKPVDEKEEAVAAEVGWMTSVKDWAGVMISAQTLTGRVLVVLVFALSIGALVIYFIDSSNPIESCQNFYKDFTLQIDMAFNVFFLLYFGLRFIAANDKLWFWLEVNSVVDFFTVPPVFVSVYLNRSWLGLRFLRALRLIQFSEILQFLNILKTSNSIKLVNLLSIFISTWLTAAGFIHLVENSGDPWENFQNNQALTYWECVYLLMVTMSTVGYGDVYAKTTLGRLFMVFFILGGLAMFASYVPEIIELIGNRKKYGGSYSAVSGRKHIVVCGHITLESVSNFLKDFLHKDRDDVNVEIVFLHNISPNLELEALFKRHFTQVEFYQGSVLNPHDLARVKIESADACLILANKYCADPDAEDASNIMRVISIKNYHPKIRIITQMLQYHNKAHLLNIPSWNWKEGDDAICLAELKLGFIAQSCLAQGLSTMLANLFSMRSFIKIEEDTWQKYYLEGVSNEMYTEYLSSAFVGLSFPTVCELCFVKLKLLMIAIEYKSANRESRILINPGNHLKIQEGTLGFFIASDAKEVKRAFFYCKACHDDITDPKRIKKCGCKRLIYFEDEQPSTLSPKKKQRNGGMRNSPNTSPKLMRHDPLLIPGNDQIDNMDSNVKKYDSTGMFHWCAPKEIEKVILTRSEAAMTVLSGHVVVCIFGDVSSALIGLRNLVMPLRASNFHYHELKHIVFVGSIEYLKREWETLHNFPKVSILPGTPLSRADLRAVNINLCDMCVILSANQNNIDDTSLQDKECILASLNIKSMQFDDSIGVLQANSQGFTPPGMDRSSPDNSPVHGMLRQPSITTGVNIPIITELAKPGKLPLVSVNQEKNSGTHILMITELVNDTNVQFLDQDDDDDPDTELYLTQPFACGTAFAVSVLDSLMSATYFNDNILTLIRTLVTGGATPELEALIAEENALRGGYSTPQTLANRDRCRVAQLALLDGPFADLGDGGCYGDLFCKALKTYNMLCFGIYRLRDAHLSTPSQCTKRYVITNPPYEFELVPTDLIFCLMQFDHNAGQSRASLSHSSHSSQSSSKKSSSVHSIPSTANRQNRPKSRESRDKQNATRMNRMGQEKKWFTDEPDNAYPRNIQIKPMSTHMANQINQYKSTSSLIPPIREVEDEC

SEQ ID NO: 30381 - protein, 583 aa, Homo sapiens
  REGION 1..583: note = ENSP00000491902
VHEPKMDALIIPVTMEVPCDSRGQRMWWAFLASSMVTFFGGLFIILLWRTLKYLWTVCCHCGGKTKEAQKINNGSSQADGTLKPVDEKEEAVAAEVGWMTSVKDWAGVMISAQTLTGRVLVVLVFALSIGALVIYFIDSSNPIESCQNFYKDFTLQIDMAFNVFFLLYFGLRFIAANDKLWFWLEVNSVVDFFTVPPVFVSVYLNRSWLGLRFLRALRLIQFSEILQFLNILKTSNSIKLVNLLSIFISTWLTAAGFIHLVENSGDPWENFQNNQALTYWECVYLLMVTMSTVGYGDVYAKTTLGRLFMVFFILGGLAMFASYVPEIIELIGNRKKYGGSYSAVSGRKHIVVCGHITLESVSNFLKDFLHKDRDDVNVEIVFLHNISPNLELEALFKRHFTQVEFYQGSVLNPHDLARVKIESADACLILANKYCADPDAEDASNIMRVISIKNYHPKIRIITQMLQYHNKAHLLNIPSWNWKEGDDAICLAELKLGFIAQSCLAQGLSTMLANLFSMRSFIKIEEDTWQKYYLEGVSNEMYTEYLSSAFVGLSFPTVCELCFVKLKLLMIAIEYKSANRESR

SEQ ID NO: 30382 - protein, 403 aa, Homo sapiens
  REGION 1..403: note = ENSP00000492406
MANGGGGGGGSSGGGGGGGGSSLRMSSNIHANHLSLDASSSSSSSSSSSSSSSSSSSSSSVHEPKMDALIIPVTMEVPCDSRGQRMWWAFLASSMVTFFGGLFIILLWRTLKYLWTVCCHCGGKTKEAQKINNGSSQADGTLKPVDEKEEAVAAEVGWMTSVKDWAGVMISAQTLTGRVLVVLVFALSIGALVIYFIDSSNPIESCQNFYKDFTLQIDMAFNVFFLLYFGLRFIAANDKLWFWLEVNSVVDFFTVPPVFVSVYLNRSWLGLRFLRALRLIQFSEILQFLNILKTSNSIKLVNLLSIFISTWLTAAGFIHLVENSGDPWENFQNNQALTYWECVYLLMVTMSTVGYGDVYAKTTLGRLFMVFFILGGLAHCGLRTHHSGECFQLPEGLSAQGPG

SEQ ID NO: 30383 - protein, 154 aa, Homo sapiens
  REGION 1..154: note = ENSP00000491040
  VARIANT 1: note = Any amino acid
XDFFTVPPVFVSVYLNRSWLGLRFLRALRLIQFSEILQFLNILKTSNSIKLVNLLSIFISTWLTAAGFIHLVENSGDPWENFQNNQALTYWECVYLLMVTMSTVGYGDVYAKTTLGRLFMVFFILGGLAHCGLRTHHSGECFQLPEGLSAQGPG

SEQ ID NO: 30384 - protein, 1182 aa, Homo sapiens
  REGION 1..1182: note = ENSP00000361498
  VARIANT 1: note = Any amino acid
XNIHANHLSLDASSSSSSSSSSSSSSSSSSSSSSVHEPKMDALIIPVTMEVPCDSRGQRMWWAFLASSMVTFFGGLFIILLWRTLKYLWTVCCHCGGKTKEAQKINNGSSQADGTLKPVDEKEEAVAAEVGWMTSVKDWAGVMISAQTLTGRVLVVLVFALSIGALVIYFIDSSNPIESCQNFYKDFTLQIDMAFNVFFLLYFGLRFIAANDKLWFWLEVNSVVDFFTVPPVFVSVYLNRSWLGLRFLRALRLIQFSEILQFLNILKTSNSIKLVNLLSIFISTWLTAAGFIHLVENSGDPWENFQNNQALTYWECVYLLMVTMSTVGYGDVYAKTTLGRLFMVFFILGGLAMFASYVPEIIELIGNRKKYGGSYSAVSGRKHIVVCGHITLESVSNFLKDFLHKDRDDVNVEIVFLHNISPNLELEALFKRHFTQVEFYQGSVLNPHDLARVKIESADACLILANKYCADPDAEDASNIMRVISIKNYHPKIRIITQMLQYHNKAHLLNIPSWNWKEGDDAICLAELKLGFIAQSCLAQGLSTMLANLFSMRSFIKIEEDTWQKYYLEGVSNEMYTEYLSSAFVGLSFPTVCELCFVKLKLLMIAIEYKSANRESRSRKRILINPGNHLKIQEGTLGFFIASDAKEVKRAFFYCKACHDDITDPKRIKKCGCKRLEDEQPSTLSPKKKQRNGGMRNSPNTSPKLMRHDPLLIPGNDQIDNMDSNVKKYDSTGMFHWCAPKEIEKVILTRSEAAMTVLSGHVVVCIFGDVSSALIGLRNLVMPLRASNFHYHELKHIVFVGSIEYLKREWETLHNFPKVSILPGTPLSRADLRAVNINLCDMCVILSANQNNIDDTSLQDKECILASLNIKSMQFDDSIGVLQANSQGFTPPGMDRSSPDNSPVHGMLRQPSITTGVNIPIITELAKPGKLPLVSVNQEKNSGTHILMITELVNDTNVQFLDQDDDDDPDTELYLTQPFACGTAFAVSVLDSLMSATYFNDNILTLIRTLVTGGATPELEALIAEENALRGGYSTPQTLANRDRCRVAQLALLDGPFADLGDGGCYGDLFCKALKTYNMLCFGIYRLRDAHLSTPSQCTKRYVITNPPYEFELVPTDLIFCLMQFDHNAGQSRASLSHSSHSSQSSSKKSSSVHSIPSTANRQNRPKSRESRDKQKKEMVYR

SEQ ID NO: 30385 - protein, 1232 aa, Homo sapiens
  REGION 1..1232: note = ENSP00000361514
PKMDALIIPVTMEVPCDSRGQRMWWAFLASSMVTFFGGLFIILLWRTLKYLWTVCCHCGGKTKEAQKINNGSSQADGTLKPVDEKEEAVAAEVGWMTSVKDWAGVMISAQTLTGRVLVVLVFALSIGALVIYFIDSSNPIESCQNFYKDFTLQIDMAFNVFFLLYFGLRFIAANDKLWFWLEVNSVVDFFTVPPVFVSVYLNRSWLGLRFLRALRLIQFSEILQFLNILKTSNSIKLVNLLSIFISTWLTAAGFIHLVENSGDPWENFQNNQALTYWECVYLLMVTMSTVGYGDVYAKTTLGRLFMVFFILGGLAMFASYVPEIIELIGNRKKYGGSYSAVSGRKHIVVCGHITLESVSNFLKDFLHKDRDDVNVEIVFLHNISPNLELEALFKRHFTQVEFYQGSVLNPHDLARVKIESADACLILANKYCADPDAEDASNIMRVISIKNYHPKIRIITQMLQYHNKAHLLNIPSWNWKEGDDAICLAELKLGFIAQSCLAQGLSTMLANLFSMRSFIKIEEDTWQKYYLEGVSNEMYTEYLSSAFVGLSFPTVCELCFVKLKLLMIAIEYKSANRESRSRKRILINPGNHLKIQEGTLGFFIASDAKEVKRAFFYCKACHDDITDPKRIKKCGCKRLIYSKMSIYKRMRRACCFDCGRSERDCSCMSGRVRGNVDTLERAFPLSSVSVNDCSTSFRAFEDEQPSTLSPKKKQRNGGMRNSPNTSPKLMRHDPLLIPGNDQIDNMDSNVKKYDSTGMFHWCAPKEIEKVILTRSEAAMTVLSGHVVVCIFGDVSSALIGLRNLVMPLRASNFHYHELKHIVFVGSIEYLKREWETLHNFPKVSILPGTPLSRADLRAVNINLCDMCVILSANQNNIDDTSLQDKECILASLNIKSMQFDDSIGVLQANSQGFTPPGMDRSSPDNSPVHGMLRQPSITTGVNIPIITELVNDTNVQFLDQDDDDDPDTELYLTQPFACGTAFAVSVLDSLMSATYFNDNILTLIRTLVTGGATPELEALIAEENALRGGYSTPQTLANRDRCRVAQLALLDGPFADLGDGGCYGDLFCKALKTYNMLCFGIYRLRDAHLSTPSQCTKRYVITNPPYEFELVPTDLIFCLMQFDHNAGQSRASLSHSSHSSQSSSKKSSSVHSIPSTANRQNRPKSRESRDKQNATRMNRMGQEKKWFTDEPDNAYPRNIQIKPMSTHMANQINQYKSTSSLIPPIREVEDEC

SEQ ID NO: 30386 - protein, 1223 aa, Homo sapiens
  REGION 1..1223: note = ENSP00000491207
  VARIANT 1: note = Any amino acid
XGGGGGSSLRMSSNIHANHLSLDASSSSSSSSSSSSSSSSSSSSSSVHEPKMDALIIPVTMEVPCDSRGQRMWWAFLASSMVTFFGGLFIILLWRTLKYLWTVCCHCGGKTKEAQKINNGSSQADGTLKPVDEKEEAVAAEVGWMTSVKDWAGVMISAQTLTGRVLVVLVFALSIGALVIYFIDSSNPIESCQNFYKDFTLQIDMAFNVFFLLYFGLRFIAANDKLWFWLEVNSVVDFFTVPPVFVSVYLNRSWLGLRFLRALRLIQFSEILQFLNILKTSNSIKLVNLLSIFISTWLTAAGFIHLVENSGDPWENFQNNQALTYWECVYLLMVTMSTVGYGDVYAKTTLGRLFMVFFILGGLAMFARYVPEIAALILSRNKFGGTFNKHGGRKHIVVCGHITLESVSNFLKDFLHKDRDDVNVEIVFLHNISPNLELEALFKRHFTQVEFYQGSVLNPHDLARVKIESADACLILANKYCADPDAEDASNIMRVISIKNYHPKIRIITQMLQYHNKAHLLNIPSWNWKEGDDAICLAELKLGFIAQSCLAQGLSTMLANLFSMRSFIKIEEDTWQKYYLEGVSNEMYTEYLSSAFVGLSFPTVCELCFVKLKLLMIAIEYKSANRESRSRKRILINPGNHLKIQEGTLGFFIASDAKEVKRAFFYCKACHDDITDPKRIKKCGCKRLIYFEDEQPSTLSPKKKQRNGGMRNSPNTSPKLMRHDPLLIPGNDQIDNMDSNVKKYDSTGMFHWCAPKEIEKVILTRSEAAMTVLSGHVVVCIFGDVSSALIGLRNLVMPLRASNFHYHELKHIVFVGSIEYLKREWETLHNFPKVSILPGTPLSRADLRAVNINLCDMCVILSANQNNIDDTSLQDKECILASLNIKSMQFDDSIGVLQANSQGFTPPGMDRSSPDNSPVHGMLRQPSITTGVNIPIITELVNDTNVQFLDQDDDDDPDTELYLTQPFACGTAFAVSVLDSLMSATYFNDNILTLIRTLVTGGATPELEALIAEENALRGGYSTPQTLANRDRCRVAQLALLDGPFADLGDGGCYGDLFCKALKTYNMLCFGIYRLRDAHLSTPSQCTKRYVITNPPYEFELVPTDLIFCLMQFDHNAGQSRASLSHSSHSSQSSSKKSSSVHSIPSTANRQNRPKSRESRDKQNATRMNRMGQEKKWFTDEPDNAYPRNIQIKPMSTHMANQINQYKSTSSLIPPIREVEDEC

SEQ ID NO: 30387 - protein, 1235 aa, Homo sapiens
  REGION 1..1235: note = ENSP00000396608
MANGGGGGGGSSGGGGGGGGSSLRMSSNIHANHLSLDASSSSSSSSSSSSSSSSSSSSSSVHEPKMDALIIPVTMEVPCDSRGQRMWWAFLASSMVTFFGGLFIILLWRTLKYLWTVCCHCGGKTKEAQKINNGSSQADGTLKPVDEKEEAVAAEVGWMTSVKDWAGVMISAQTLTGRVLVVLVFALSIGALVIYFIDSSNPIESCQNFYKDFTLQIDMAFNVFFLLYFGLRFIAANDKLWFWLEVNSVVDFFTVPPVFVSVYLNRSWLGLRFLRALRLIQFSEILQFLNILKTSNSIKLVNLLSIFISTWLTAAGFIHLVENSGDPWENFQNNQALTYWECVYLLMVTMSTVGYGDVYAKTTLGRLFMVFFILGGLAMFASYVPEIIELIGNRKKYGGSYSAVSGRKHIVVCGHITLESVSNFLKDFLHKDRDDVNVEIVFLHNISPNLELEALFKRHFTQVEFYQGSVLNPHDLARVKIESADACLILANKYCADPDAEDASNIMRVISIKNYHPKIRIITQMLQYHNKAHLLNIPSWNWKEGDDAICLAELKLGFIAQSCLAQGLSTMLANLFSMRSFIKIEEDTWQKYYLEGVSNEMYTEYLSSAFVGLSFPTVCELCFVKLKLLMIAIEYKSANRESRILINPGNHLKIQEGTLGFFIASDAKEVKRAFFYCKACHDDITDPKRIKKCGCKRPKMSIYKRMRRACCFDCGRSERDCSCMSGRVRGNVDTLERAFPLSSVSVNDCSTSFRAFEDEQPSTLSPKKKQRNGGMRNSPNTSPKLMRHDPLLIPGNDQIDNMDSNVKKYDSTGMFHWCAPKEIEKVILTRSEAAMTVLSGHVVVCIFGDVSSALIGLRNLVMPLRASNFHYHELKHIVFVGSIEYLKREWETLHNFPKVSILPGTPLSRADLRAVNINLCDMCVILSANQNNIDDTSLQDKECILASLNIKSMQFDDSIGVLQANSQGFTPPGMDRSSPDNSPVHGMLRQPSITTGVNIPIITELVNDTNVQFLDQDDDDDPDTELYLTQPFACGTAFAVSVLDSLMSATYFNDNILTLIRTLVTGGATPELEALIAEENALRGGYSTPQTLANRDRCRVAQLALLDGPFADLGDGGCYGDLFCKALKTYNMLCFGIYRLRDAHLSTPSQCTKRYVITNPPYEFELVPTDLIFCLMQFDHNAGQSRASLSHSSHSSQSSSKKSSSVHSIPSTANRQNRPKSRESRDKQKKEMVYR

SEQ ID NO: 30388 - protein, 1288 aa, Homo sapiens
  REGION 1..1288: note = ENSP00000385717
MANGGGGGGGSSGGGGGGGGSSLRMSSNIHANHLSLDASSSSSSSSSSSSSSSSSSSSSSVHEPKMDALIIPVTMEVPCDSRGQRMWWAFLASSMVTFFGGLFIILLWRTLKYLWTVCCHCGGKTKEAQKINNGSSQADGTLKPVDEKEEAVAAEVGWMTSVKDWAGVMISAQTLTGRVLVVLVFALSIGALVIYFIDSSNPIESCQNFYKDFTLQIDMAFNVFFLLYFGLRFIAANDKLWFWLEVNSVVDFFTVPPVFVSVYLNRSWLGLRFLRALRLIQFSEILQFLNILKTSNSIKLVNLLSIFISTWLTAAGFIHLVENSGDPWENFQNNQALTYWECVYLLMVTMSTVGYGDVYAKTTLGRLFMVFFILGGLAMFASYVPEIIELIGNRKKYGGSYSAVSGRKHIVVCGHITLESVSNFLKDFLHKDRDDVNVEIVFLHNISPNLELEALFKRHFTQVEFYQGSVLNPHDLARVKIESADACLILANKYCADPDAEDASNIMRVISIKNYHPKIRIITQMLQYHNKAHLLNIPSWNWKEGDDAICLAELKLGFIAQSCLAQGLSTMLANLFSMRSFIKIEEDTWQKYYLEGVSNEMYTEYLSSAFVGLSFPTVCELCFVKLKLLMIAIEYKSANRESRILINPGNHLKIQEGTLGFFIASDAKEVKRAFFYCKACHDDITDPKRIKKCGCKRPKMSIYKRMRRACCFDCGRSERDCSCMSGRVRGNVDTLERAFPLSSVSVNDCSTSFRAFEDEQPSTLSPKKKQRNGGMRNSPNTSPKLMRHDPLLIPGNDQIDNMDSNVKKYDSTGMFHWCAPKEIEKVILTRSEAAMTVLSGHVVVCIFGDVSSALIGLRNLVMPLRASNFHYHELKHIVFVGSIEYLKREWETLHNFPKVSILPGTPLSRADLRAVNINLCDMCVILSANQNNIDDTSLQDKECILASLNIKSMQFDDSIGVLQANSQGFTPPGMDRSSPDNSPVHGMLRQPSITTGVNIPIITELVNDTNVQFLDQDDDDDPDTELYLTQPFACGTAFAVSVLDSLMSATYFNDNILTLIRTLVTGGATPELEALIAEENALRGGYSTPQTLANRDRCRVAQLALLDGPFADLGDGGCYGDLFCKALKTYNMLCFGIYRLRDAHLSTPSQCTKRYVITNPPYEFELVPTDLIFCLMQFDHNAGQSRASLSHSSHSSQSSSKKSSSVHSIPSTANRQNRPKSRESRDKQNATRMNRMGQEKKWFTDEPDNAYPRNIQIKPMSTHMANQINQYKSTSSLIPPIREVEDEC

SEQ ID NO: 30389 - protein, 1233 aa, Homo sapiens
  REGION 1..1233: note = ENSP00000491156
MANGGGGGGGSSGGGGGGGGSSLRMSSNIHANHLSLDASSSSSSSSSSSSSSSSSSSSSSVHEPKMDALIIPVTMEVPCDSRGQRMWWAFLASSMVTFFGGLFIILLWRTLKYLWTVCCHCGGKTKEAQKINNGSSQADGTLKPVDEKEEAVAAEVGWMTSVKDWAGVMISAQTLTGRVLVVLVFALSIGALVIYFIDSSNPIESCQNFYKDFTLQIDMAFNVFFLLYFGLRFIAANDKLWFWLEVNSVVDFFTVPPVFVSVYLNRSWLGLRFLRALRLIQFSEILQFLNILKTSNSIKLVNLLSIFISTWLTAAGFIHLVENSGDPWENFQNNQALTYWECVYLLMVTMSTVGYGDVYAKTTLGRLFMVFFILGGLAMFARYVPEIAALILSRNKFGGTFNKHGGRKHIVVCGHITLESVSNFLKDFLHKDRDDVNVEIVFLHNISPNLELEALFKRHFTQVEFYQGSVLNPHDLARVKIESADACLILANKYCADPDAEDASNIMRVISIKNYHPKIRIITQMLQYHNKAHLLNIPSWNWKEGDDAICLAELKLGFIAQSCLAQGLSTMLANLFSMRSFIKIEEDTWQKYYLEGVSNEMYTEYLSSAFVGLSFPTVCELCFVKLKLLMIAIEYKSANRESRILINPGNHLKIQEGTLGFFIASDAKEVKRAFFYCKACHDDITDPKRIKKCGCKRLIYFEDEQPSTLSPKKKQRNGGMRNSPNTSPKLMRHDPLLIPGNDQIDNMDSNVKKYDSTGMFHWCAPKEIEKVILTRSEAAMTVLSGHVVVCIFGDVSSALIGLRNLVMPLRASNFHYHELKHIVFVGSIEYLKREWETLHNFPKVSILPGTPLSRADLRAVNINLCDMCVILSANQNNIDDTSLQDKECILASLNIKSMQFDDSIGVLQANSQGFTPPGMDRSSPDNSPVHGMLRQPSITTGVNIPIITELVNDTNVQFLDQDDDDDPDTELYLTQPFACGTAFAVSVLDSLMSATYFNDNILTLIRTLVTGGATPELEALIAEENALRGGYSTPQTLANRDRCRVAQLALLDGPFADLGDGGCYGDLFCKALKTYNMLCFGIYRLRDAHLSTPSQCTKRYVITNPPYEFELVPTDLIFCLMQFDHNAGQSRASLSHSSHSSQSSSKKSSSVHSIPSTANRQNRPKSRESRDKQNATRMNRMGQEKKWFTDEPDNAYPRNIQIKPMSTHMANQINQYKSTSSLIPPIREVEDEC

SEQ ID NO: 30390 - protein, 1233 aa, Homo sapiens
  REGION 1..1233: note = ENSP00000361517
MANGGGGGGGSSGGGGGGGGSSLRMSSNIHANHLSLDASSSSSSSSSSSSSSSSSSSSSSVHEPKMDALIIPVTMEVPCDSRGQRMWWAFLASSMVTFFGGLFIILLWRTLKYLWTVCCHCGGKTKEAQKINNGSSQADGTLKPVDEKEEAVAAEVGWMTSVKDWAGVMISAQTLTGRVLVVLVFALSIGALVIYFIDSSNPIESCQNFYKDFTLQIDMAFNVFFLLYFGLRFIAANDKLWFWLEVNSVVDFFTVPPVFVSVYLNRSWLGLRFLRALRLIQFSEILQFLNILKTSNSIKLVNLLSIFISTWLTAAGFIHLVENSGDPWENFQNNQALTYWECVYLLMVTMSTVGYGDVYAKTTLGRLFMVFFILGGLAMFASYVPEIIELIGNRKKYGGSYSAVSGRKHIVVCGHITLESVSNFLKDFLHKDRDDVNVEIVFLHNISPNLELEALFKRHFTQVEFYQGSVLNPHDLARVKIESADACLILANKYCADPDAEDASNIMRVISIKNYHPKIRIITQMLQYHNKAHLLNIPSWNWKEGDDAICLAELKLGFIAQSCLAQGLSTMLANLFSMRSFIKIEEDTWQKYYLEGVSNEMYTEYLSSAFVGLSFPTVCELCFVKLKLLMIAIEYKSANRESRILINPGNHLKIQEGTLGFFIASDAKEVKRAFFYCKACHDDITDPKRIKKCGCKRLIYFEDEQPSTLSPKKKQRNGGMRNSPNTSPKLMRHDPLLIPGNDQIDNMDSNVKKYDSTGMFHWCAPKEIEKVILTRSEAAMTVLSGHVVVCIFGDVSSALIGLRNLVMPLRASNFHYHELKHIVFVGSIEYLKREWETLHNFPKVSILPGTPLSRADLRAVNINLCDMCVILSANQNNIDDTSLQDKECILASLNIKSMQFDDSIGVLQANSQGFTPPGMDRSSPDNSPVHGMLRQPSITTGVNIPIITELVNDTNVQFLDQDDDDDPDTELYLTQPFACGTAFAVSVLDSLMSATYFNDNILTLIRTLVTGGATPELEALIAEENALRGGYSTPQTLANRDRCRVAQLALLDGPFADLGDGGCYGDLFCKALKTYNMLCFGIYRLRDAHLSTPSQCTKRYVITNPPYEFELVPTDLIFCLMQFDHNAGQSRASLSHSSHSSQSSSKKSSSVHSIPSTANRQNRPKSRESRDKQNATRMNRMGQEKKWFTDEPDNAYPRNIQIKPMSTHMANQINQYKSTSSLIPPIREVEDEC

SEQ ID NO: 30391 - protein, 1177 aa, Homo sapiens
  REGION 1..1177: note = ENSP00000491008
MANGGGGGGGSSGGGGGGGGSSLRMSSNIHANHLSLDASSSSSSSSSSSSSSSSSSSSSSVHEPKMDALIIPVTMEVPCDSRGQRMWWAFLASSMVTFFGGLFIILLWRTLKYLWTVCCHCGGKTKEAQKINNGSSQADGTLKPVDEKEEAVAAEVGWMTSVKDWAGVMISAQTLTGRVLVVLVFALSIGALVIYFIDSSNPIESCQNFYKDFTLQIDMAFNVFFLLYFGLRFIAANDKLWFWLEVNSVVDFFTVPPVFVSVYLNRSWLGLRFLRALRLIQFSEILQFLNILKTSNSIKLVNLLSIFISTWLTAAGFIHLVENSGDPWENFQNNQALTYWECVYLLMVTMSTVGYGDVYAKTTLGRLFMVFFILGGLAMFARYVPEIAALILSRNKFGGTFNKHGGRKHIVVCGHITLESVSNFLKDFLHKDRDDVNVEIVFLHNISPNLELEALFKRHFTQVEFYQGSVLNPHDLARVKIESADACLILANKYCADPDAEDASNIMRVISIKNYHPKIRIITQMLQYHNKAHLLNIPSWNWKEGDDAICLAELKLGFIAQSCLAQGLSTMLANLFSMRSFIKIEEDTWQKYYLEGVSNEMYTEYLSSAFVGLSFPTVCELCFVKLKLLMIAIEYKSANRESRILINPGNHLKIQEGTLGFFIASDAKEVKRAFFYCKACHDDITDPKRIKKCGCKRLEDEQPSTLSPKKKQRNGGMRNSPNTSPKLMRHDPLLIPGNDQIDNMDSNVKKYDSTGMFHWCAPKEIEKVILTRSEAAMTVLSGHVVVCIFGDVSSALIGLRNLVMPLRASNFHYHELKHIVFVGSIEYLKREWETLHNFPKVSILPGTPLSRADLRAVNINLCDMCVILSANQNNIDDTSLQDKECILASLNIKSMQFDDSIGVLQANSQGFTPPGMDRSSPDNSPVHGMLRQPSITTGVNIPIITELVNDTNVQFLDQDDDDDPDTELYLTQPFACGTAFAVSVLDSLMSATYFNDNILTLIRTLVTGGATPELEALIAEENALRGGYSTPQTLANRDRCRVAQLALLDGPFADLGDGGCYGDLFCKALKTYNMLCFGIYRLRDAHLSTPSQCTKRYVITNPPYEFELVPTDLIFCLMQFDHNAGQSRASLSHSSHSSQSSSKKSSSVHSIPSTANRQNRPKSRESRDKQKKEMVYR

SEQ ID NO: 30392 - protein, 1234 aa, Homo sapiens
  REGION 1..1234: note = ENSP00000492510
MANGGGGGGGSSGGGGGGGGSSLRMSSNIHANHLSLDASSSSSSSSSSSSSSSSSSSSSSVHEPKMDALIIPVTMEVPCDSRGQRMWWAFLASSMVTFFGGLFIILLWRTLKYLWTVCCHCGGKTKEAQKINNGSSQADGTLKPVDEKEEAVAAEVGWMTSVKDWAGVMISAQTLTGRVLVVLVFALSIGALVIYFIDSSNPIESCQNFYKDFTLQIDMAFNVFFLLYFGLRFIAANDKLWFWLEVNSVVDFFTVPPVFVSVYLNRSWLGLRFLRALRLIQFSEILQFLNILKTSNSIKLVNLLSIFISTWLTAAGFIHLVENSGDPWENFQNNQALTYWECVYLLMVTMSTVGYGDVYAKTTLGRLFMVFFILGGLAMFASYVPEIIELIGNRKKYGGSYSAVSGRKHIVVCGHITLESVSNFLKDFLHKDRDDVNVEIVFLHNISPNLELEALFKRHFTQVEFYQGSVLNPHDLARVKIESADACLILANKYCADPDAEDASNIMRVISIKNYHPKIRIITQMLQYHNKAHLLNIPSWNWKEGDDAICLAELKLGFIAQSCLAQGLSTMLANLFSMRSFIKIEEDTWQKYYLEGVSNEMYTEYLSSAFVGLSFPTVCELCFVKLKLLMIAIEYKSANRESRSRKRILINPGNHLKIQEGTLGFFIASDAKEVKRAFFYCKACHDDITDPKRIKKCGCKRLEDEQPSTLSPKKKQRNGGMRNSPNTSPKLMRHDPLLIPGNDQIDNMDSNVKKYDSTGMFHWCAPKEIEKVILTRSEAAMTVLSGHVVVCIFGDVSSALIGLRNLVMPLRASNFHYHELKHIVFVGSIEYLKREWETLHNFPKVSILPGTPLSRADLRAVNINLCDMCVILSANQNNIDDTSLQDKECILASLNIKSMQFDDSIGVLQANSQGFTPPGMDRSSPDNSPVHGMLRQPSITTGVNIPIITELVNDTNVQFLDQDDDDDPDTELYLTQPFACGTAFAVSVLDSLMSATYFNDNILTLIRTLVTGGATPELEALIAEENALRGGYSTPQTLANRDRCRVAQLALLDGPFADLGDGGCYGDLFCKALKTYNMLCFGIYRLRDAHLSTPSQCTKRYVITNPPYEFELVPTDLIFCLMQFDHNAGQSRASLSHSSHSSQSSSKKSSSVHSIPSTANRQNRPKSRESRDKQNATRMNRMGQEKKWFTDEPDNAYPRNIQIKPMSTHMANQINQYKSTSSLIPPIREVEDEC

SEQ ID NO: 30393 - protein, 1234 aa, Homo sapiens
  REGION 1..1234: note = ENSP00000491981
MANGGGGGGGSSGGGGGGGGSSLRMSSNIHANHLSLDASSSSSSSSSSSSSSSSSSSSSSVHEPKMDALIIPVTMEVPCDSRGQRMWWAFLASSMVTFFGGLFIILLWRTLKYLWTVCCHCGGKTKEAQKINNGSSQADGTLKPVDEKEEAVAAEVGWMTSVKDWAGVMISAQTLTGRVLVVLVFALSIGALVIYFIDSSNPIESCQNFYKDFTLQIDMAFNVFFLLYFGLRFIAANDKLWFWLEVNSVVDFFTVPPVFVSVYLNRSWLGLRFLRALRLIQFSEILQFLNILKTSNSIKLVNLLSIFISTWLTAAGFIHLVENSGDPWENFQNNQALTYWECVYLLMVTMSTVGYGDVYAKTTLGRLFMVFFILGGLAMFARYVPEIAALILSRNKFGGTFNKHGGRKHIVVCGHITLESVSNFLKDFLHKDRDDVNVEIVFLHNISPNLELEALFKRHFTQVEFYQGSVLNPHDLARVKIESADACLILANKYCADPDAEDASNIMRVISIKNYHPKIRIITQMLQYHNKAHLLNIPSWNWKEGDDAICLAELKLGFIAQSCLAQGLSTMLANLFSMRSFIKIEEDTWQKYYLEGVSNEMYTEYLSSAFVGLSFPTVCELCFVKLKLLMIAIEYKSANRESRSRKRILINPGNHLKIQEGTLGFFIASDAKEVKRAFFYCKACHDDITDPKRIKKCGCKRLEDEQPSTLSPKKKQRNGGMRNSPNTSPKLMRHDPLLIPGNDQIDNMDSNVKKYDSTGMFHWCAPKEIEKVILTRSEAAMTVLSGHVVVCIFGDVSSALIGLRNLVMPLRASNFHYHELKHIVFVGSIEYLKREWETLHNFPKVSILPGTPLSRADLRAVNINLCDMCVILSANQNNIDDTSLQDKECILASLNIKSMQFDDSIGVLQANSQGFTPPGMDRSSPDNSPVHGMLRQPSITTGVNIPIITELVNDTNVQFLDQDDDDDPDTELYLTQPFACGTAFAVSVLDSLMSATYFNDNILTLIRTLVTGGATPELEALIAEENALRGGYSTPQTLANRDRCRVAQLALLDGPFADLGDGGCYGDLFCKALKTYNMLCFGIYRLRDAHLSTPSQCTKRYVITNPPYEFELVPTDLIFCLMQFDHNAGQSRASLSHSSHSSQSSSKKSSSVHSIPSTANRQNRPKSRESRDKQNATRMNRMGQEKKWFTDEPDNAYPRNIQIKPMSTHMANQINQYKSTSSLIPPIREVEDEC

SEQ ID NO: 30394 - protein, 1246 aa, Homo sapiens
  REGION 1..1246: note = ENSP00000492793
MANGGGGGGGSSGGGGGGGGSSLRMSSNIHANHLSLDASSSSSSSSSSSSSSSSSSSSSSVHEPKMDALIIPVTMEVPCDSRGQRMWWAFLASSMVTFFGGLFIILLWRTLKYLWTVCCHCGGKTKEAQKINNGSSQADGTLKPVDEKEEAVAAEVGWMTSVKDWAGVMISAQTLTGRVLVVLVFALSIGALVIYFIDSSNPIESCQNFYKDFTLQIDMAFNVFFLLYFGLRFIAANDKLWFWLEVNSVVDFFTVPPVFVSVYLNRSWLGLRFLRALRLIQFSEILQFLNILKTSNSIKLVNLLSIFISTWLTAAGFIHLVENSGDPWENFQNNQALTYWECVYLLMVTMSTVGYGDVYAKTTLGRLFMVFFILGGLAMFASYVPEIIELIGNRKKYGGSYSAVSGRKHIVVCGHITLESVSNFLKDFLHKDRDDVNVEIVFLHNISPNLELEALFKRHFTQVEFYQGSVLNPHDLARVKIESADACLILANKYCADPDAEDASNIMRVISIKNYHPKIRIITQMLQYHNKAHLLNIPSWNWKEGDDAICLAELKLGFIAQSCLAQGLSTMLANLFSMRSFIKIEEDTWQKYYLEGVSNEMYTEYLSSAFVGLSFPTVCELCFVKLKLLMIAIEYKSANRESRILINPGNHLKIQEGTLGFFIASDAKEVKRAFFYCKACHDDITDPKRIKKCGCKRLIYSKMSIYKRMRRACCFDCGRSERDCSCMSGRVRGNVDTLERAFPLSSVSVNDCSTSFRAFEDEQPSTLSPKKKQRNGGMRNSPNTSPKLMRHDPLLIPGNDQIDNMDSNVKKYDSTGMFHWCAPKEIEKVILTRSEAAMTVLSGHVVVCIFGDVSSALIGLRNLVMPLRASNFHYHELKHIVFVGSIEYLKREWETLHNFPKVSILPGTPLSRADLRAVNINLCDMCVILSANQNNIDDTSLQDKECILASLNIKSMQFDDSIGVLQANSQGFTPPGMDRSSPDNSPVHGMLRQPSITTGVNIPIITELVNDTNVQFLDQDDDDDPDTELYLTQPFACGTAFAVSVLDSLMSATYFNDNILTLIRTLVTGGATPELEALIAEENALRGGYSTPQTLANRDRCRVAQLALLDGPFADLGDGGCYGDLFCKALKTYNMLCFGIYRLRDAHLSTPSQCTKSKKSSSVHSIPSTANRQNRPKSRESRDKQNATRMNRMGQAEKKWFTDEPDNAYPRNIQIKPMSTHMANQINQYKSTSSLIPPIREVEDEC

SEQ ID NO: 30395 - protein, 1238 aa, Homo sapiens
  REGION 1..1238: note = ENSP00000491435
MANGGGGGGGSSGGGGGGGGSSLRMSSNIHANHLSLDASSSSSSSSSSSSSSSSSSSSSSVHEPKMDALIIPVTMEVPCDSRGQRMWWAFLASSMVTFFGGLFIILLWRTLKYLWTVCCHCGGKTKEAQKINNGSSQADGTLKPVDEKEEAVAAEVGWMTSVKDWAGVMISAQTLTGRVLVVLVFALSIGALVIYFIDSSNPIESCQNFYKDFTLQIDMAFNVFFLLYFGLRFIAANDKLWFWLEVNSVVDFFTVPPVFVSVYLNRSWLGLRFLRALRLIQFSEILQFLNILKTSNSIKLVNLLSIFISTWLTAAGFIHLVENSGDPWENFQNNQALTYWECVYLLMVTMSTVGYGDVYAKTTLGRLFMVFFILGGLAMFASYVPEIIELIGNRKKYGGSYSAVSGRKHIVVCGHITLESVSNFLKDFLHKDRDDVNVEIVFLHNISPNLELEALFKRHFTQVEFYQGSVLNPHDLARVKIESADACLILANKYCADPDAEDASNIMRVISIKNYHPKIRIITQMLQYHNKAHLLNIPSWNWKEGDDAICLAELKLGFIAQSCLAQGLSTMLANLFSMRSFIKIEEDTWQKYYLEGVSNEMYTEYLSSAFVGLSFPTVCELCFVKLKLLMIAIEYKSANRESRSRKRILINPGNHLKIQEGTLGFFIASDAKEVKRAFFYCKACHDDITDPKRIKKCGCKRLIYFEDEQPSTLSPKKKQRNGGMRNSPNTSPKLMRHDPLLIPGNDQIDNMDSNVKKYDSTGMFHWCAPKEIEKVILTRSEAAMTVLSGHVVVCIFGDVSSALIGLRNLVMPLRASNFHYHELKHIVFVGSIEYLKREWETLHNFPKVSILPGTPLSRADLRAVNINLCDMCVILSANQNNIDDTSLQDKECILASLNIKSMQFDDSIGVLQANSQGFTPPGMDRSSPDNSPVHGMLRQPSITTGVNIPIITELVNDTNVQFLDQDDDDDPDTELYLTQPFACGTAFAVSVLDSLMSATYFNDNILTLIRTLVTGGATPELEALIAEENALRGGYSTPQTLANRDRCRVAQLALLDGPFADLGDGGCYGDLFCKALKTYNMLCFGIYRLRDAHLSTPSQCTKRYVITNPPYEFELVPTDLIFCLMQFDHNAGQSRASLSHSSHSSQSSSKKSSSVHSIPSTANRQNRPKSRESRDKQNATRMNRMGQAEKKWFTDEPDNAYPRNIQIKPMSTHMANQINQYKSTSSLIPPIREVEDEC

SEQ ID NO: 30396 - protein, 1230 aa, Homo sapiens
  REGION 1..1230: note = ENSP00000491123
MANGGGGGGGSSGGGGGGGGSSLRMSSNIHANHLSLDASSSSSSSSSSSSSSSSSSSSSSVHEPKMDALIIPVTMEVPCDSRGQRMWWAFLASSMVTFFGGLFIILLWRTLKYLWTVCCHCGGKTKEAQKINNGSSQADGTLKPVDEKEEAVAAEVGWMTSVKDWAGVMISAQTLTGRVLVVLVFALSIGALVIYFIDSSNPIESCQNFYKDFTLQIDMAFNVFFLLYFGLRFIAANDKLWFWLEVNSVVDFFTVPPVFVSVYLNRSWLGLRFLRALRLIQFSEILQFLNILKTSNSIKLVNLLSIFISTWLTAAGFIHLVENSGDPWENFQNNQALTYWECVYLLMVTMSTVGYGDVYAKTTLGRLFMVFFILGGLAMFARYVPEIAALILSRNKFGGTFNKHGGRKHIVVCGHITLESVSNFLKDFLHKDRDDVNVEIVFLHNISPNLELEALFKRHFTQVEFYQGSVLNPHDLARVKIESADACLILANKYCADPDAEDASNIMRVISIKNYHPKIRIITQMLQYHNKAHLLNIPSWNWKEGDDAICLAELKLGFIAQSCLAQGLSTMLANLFSMRSFIKIEEDTWQKYYLEGVSNEMYTEYLSSAFVGLSFPTVCELCFVKLKLLMIAIEYKSANRESRILINPGNHLKIQEGTLGFFIASDAKEVKRAFFYCKACHDDITDPKRIKKCGCKRLEDEQPSTLSPKKKQRNGGMRNSPNTSPKLMRHDPLLIPGNDQIDNMDSNVKKYDSTGMFHWCAPKEIEKVILTRSEAAMTVLSGHVVVCIFGDVSSALIGLRNLVMPLRASNFHYHELKHIVFVGSIEYLKREWETLHNFPKVSILPGTPLSRADLRAVNINLCDMCVILSANQNNIDDTSLQDKECILASLNIKSMQFDDSIGVLQANSQGFTPPGMDRSSPDNSPVHGMLRQPSITTGVNIPIITELVNDTNVQFLDQDDDDDPDTELYLTQPFACGTAFAVSVLDSLMSATYFNDNILTLIRTLVTGGATPELEALIAEENALRGGYSTPQTLANRDRCRVAQLALLDGPFADLGDGGCYGDLFCKALKTYNMLCFGIYRLRDAHLSTPSQCTKRYVITNPPYEFELVPTDLIFCLMQFDHNAGQSRASLSHSSHSSQSSSKKSSSVHSIPSTANRQNRPKSRESRDKQNATRMNRMGQEKKWFTDEPDNAYPRNIQIKPMSTHMANQINQYKSTSSLIPPIREVEDEC

SEQ ID NO: 30397 - protein, 422 aa, Homo sapiens
  REGION 1..422: note = ENSP00000491723
MANGGGGGGGSSGGGGGGGGSSLRMSSNIHANHLSLDASSSSSSSSSSSSSSSSSSSSSSVHEPKMDALIIPVTMEVPCDSRGQRMWWAFLASSMVTFFGGLFIILLWRTLKYLWTVCCHCGGKTKEAQKINNGSSQADGTLKPVDEKEEAVAAEVGWMTSVKDWAGVMISAQTLTGRVLVVLVFALSIGALVIYFIDSSNPIESCQNFYKDFTLQIDMAFNVFFLLYFGLRFIAANDKLWFWLEVNSVVDFFTVPPVFVSVYLNRSWLGLRFLRALRLIQFSEILQFLNILKTSNSIKLVNLLSIFISTWLTAAGFIHLVENSGDPWENFQNNQALTYWECVYLLMVTMSTVGYGDVYAKTTLGRLFMVFFILGGLAMFASYVPEIIELIGNRKKYGGSYSAVSGRKQCLPATCPKLLLSS

SEQ ID NO: 30398 - protein, 1192 aa, Homo sapiens
  REGION 1..1192: note = ENSP00000361480
MDALIIPVTMEVPCDSRGQRMWWAFLASSMVTFFGGLFIILLWRTLKYLWTVCCHCGGKTKEAQKINNGSSQADGTLKPVDEKEEAVAAEVGWMTSVKDWAGVMISAQTLTGRVLVVLVFALSIGALVIYFIDSSNPIESCQNFYKDFTLQIDMAFNVFFLLYFGLRFIAANDKLWFWLEVNSVVDFFTVPPVFVSVYLNRSWLGLRFLRALRLIQFSEILQFLNILKTSNSIKLVNLLSIFISTWLTAAGFIHLVENSGDPWENFQNNQALTYWECVYLLMVTMSTVGYGDVYAKTTLGRLFMVFFILGGLAMFASYVPEIIELIGNRKKYGGSYSAVSGRKHIVVCGHITLESVSNFLKDFLHKDRDDVNVEIVFLHNISPNLELEALFKRHFTQVEFYQGSVLNPHDLARVKIESADACLILANKYCADPDAEDASNIMRVISIKNYHPKIRIITQMLQYHNKAHLLNIPSWNWKEGDDAICLAELKLGFIAQSCLAQGLSTMLANLFSMRSFIKIEEDTWQKYYLEGVSNEMYTEYLSSAFVGLSFPTVCELCFVKLKLLMIAIEYKSANRESRILINPGNHLKIQEGTLGFFIASDAKEVKRAFFYCKACHDDITDPKRIKKCGCKRLEDEQPSTLSPKKKQRNGGMRNSPNTSPKLMRHDPLLIPGNDQIDNMDSNVKKYDSTGMFHWCAPKEIEKVILTRSEAAMTVLSGHVVVCIFGDVSSALIGLRNLVMPLRASNFHYHELKHIVFVGSIEYLKREWETLHNFPKVSILPGTPLSRADLRAVNINLCDMCVILSANQNNIDDTSLQDKECILASLNIKSMQFDDSIGVLQANSQGFTPPGMDRSSPDNSPVHGMLRQPSITTGVNIPIITELAKPGKLPLVSVNQEKNSGTHILMITELVNDTNVQFLDQDDDDDPDTELYLTQPFACGTAFAVSVLDSLMSATYFNDNILTLIRTLVTGGATPELEALIAEENALRGGYSTPQTLANRDRCRVAQLALLDGPFADLGDGGCYGDLFCKALKTYNMLCFGIYRLRDAHLSTPSQCTKRYVITNPPYEFELVPTDLIFCLMQFDHNAGQSRASLSHSSHSSQSSSKKSSSVHSIPSTANRQNRPKSRESRDKQNATRMNRMGQEKKWFTDEPDNAYPRNIQIKPMSTHMANQINQYKSTSSLIPPIREVEDEC

SEQ ID NO: 30399 - protein, 1115 aa, Homo sapiens
  REGION 1..1115: note = ENSP00000491545
MDALIIPVTMEVPCDSRGQRMWWAFLASSMVTFFGGLFIILLWRTLKYLWTVCCHCGGKTKVVLVFALSIGALVIYFIDSSNPIESCQNFYKDFTLQIDMAFNVFFLLYFGLRFIAANDKLWFWLEVNSVVDFFTVPPVFVSVYLNRSWLGLRFLRALRLIQFSEILQFLNILKTSNSIKLVNLLSIFISTWLTAAGFIHLVENSGDPWENFQNNQALTYWECVYLLMVTMSTVGYGDVYAKTTLGRLFMVFFILGGLAMFASYVPEIIELIGNRKKYGGSYSAVSGRKHIVVCGHITLESVSNFLKDFLHKDRDDVNVEIVFLHNISPNLELEALFKRHFTQVEFYQGSVLNPHDLARVKIESADACLILANKYCADPDAEDASNIMRVISIKNYHPKIRIITQMLQYHNKAHLLNIPSWNWKEGDDAICLAELKLGFIAQSCLAQGLSTMLANLFSMRSFIKIEEDTWQKYYLEGVSNEMYTEYLSSAFVGLSFPTVCELCFVKLKLLMIAIEYKSANRESRILINPGNHLKIQEGTLGFFIASDAKEVKRAFFYCKACHDDITDPKRIKKCGCKRLIYFEDEQPSTLSPKKKQRNGGMRNSPNTSPKLMRHDPLLIPGNDQIDNMDSNVKKYDSTGMFHWCAPKEIEKVILTRSEAAMTVLSGHVVVCIFGDVSSALIGLRNLVMPLRASNFHYHELKHIVFVGSIEYLKREWETLHNFPKVSILPGTPLSRADLRAVNINLCDMCVILSANQNNIDDTSLQDKECILASLNIKSMQFDDSIGVLQANSQGFTPPGMDRSSPDNSPVHGMLRQPSITTGVNIPIITELVNDTNVQFLDQDDDDDPDTELYLTQPFACGTAFAVSVLDSLMSATYFNDNILTLIRTLVTGGATPELEALIAEENALRGGYSTPQTLANRDRCRVAQLALLDGPFADLGDGGCYGDLFCKALKTYNMLCFGIYRLRDAHLSTPSQCTKRYVITNPPYEFELVPTDLIFCLMQFDHNAGQSRASLSHSSHSSQSSSKKSSSVHSIPSTANRQNRPKSRESRDKQNATRMNRMGQAEKKWFTDEPDNAYPRNIQIKPMSTHMANQINQYKSTSSLIPPIREVEDEC

SEQ ID NO: 30400 - protein, 1175 aa, Homo sapiens
  REGION 1..1175: note = ENSP00000491539
MDALIIPVTMEVPCDSRGQRMWWAFLASSMVTFFGGLFIILLWRTLKYLWTVCCHCGGKTKEAQKINNGSSQADGTLKPVDEKEEAVAAEVGWMTSVKDWAGVMISAQTLTGRVLVVLVFALSIGALVIYFIDSSNPIESCQNFYKDFTLQIDMAFNVFFLLYFGLRFIAANDKLWFWLEVNSVVDFFTVPPVFVSVYLNRSWLGLRFLRALRLIQFSEILQFLNILKTSNSIKLVNLLSIFISTWLTAAGFIHLVENSGDPWENFQNNQALTYWECVYLLMVTMSTVGYGDVYAKTTLGRLFMVFFILGGLAMFASYVPEIIELIGNRKKYGGSYSAVSGRKHIVVCGHITLESVSNFLKDFLHKDRDDVNVEIVFLHNISPNLELEALFKRHFTQVEFYQGSVLNPHDLARVKIESADACLILANKYCADPDAEDASNIMRVISIKNYHPKIRIITQMLQYHNKAHLLNIPSWNWKEGDDAICLAELKLGFIAQSCLAQGLSTMLANLFSMRSFIKIEEDTWQKYYLEGVSNEMYTEYLSSAFVGLSFPTVCELCFVKLKLLMIAIEYKSANRESRSRKRILINPGNHLKIQEGTLGFFIASDAKEVKRAFFYCKACHDDITDPKRIKKCGCKRPKMSIYKRMRRACCFDCGRSERDCSCMSGRVRGNVDTLERAFPLSSVSVNDCSTSFRAFEDEQPSTLSPKKKQRNGGMRNSPNTSPKLMRHDPLLIPGNDQIDNMDSNVKKYDSTGMFHWCAPKEIEKVILTRSEAAMTVLSGHVVVCIFGDVSSALIGLRNLVMPLRASNFHYHELKHIVFVGSIEYLKREWETLHNFPKVSILPGTPLSRADLRAVNINLCDMCVILSANQNNIDDTSLQDKECILASLNIKSMQFDDSIGVLQANSQGFTPPGMDRSSPDNSPVHGMLRQPSITTGVNIPIITELVNDTNVQFLDQDDDDDPDTELYLTQPFACGTAFAVSVLDSLMSATYFNDNILTLIRTLVTGGATPELEALIAEENALRGGYSTPQTLANRDRCRVAQLALLDGPFADLGDGGCYGDLFCKALKTYNMLCFGIYRLRDAHLSTPSQCTKRYVITNPPYEFELVPTDLIFCLMQFDHNAGQSRASLSHSSHSSQSSSKKSSSVHSIPSTANRQNRPKSRESRDKQNRKEMVYR

SEQ ID NO: 30401 - protein, 1178 aa, Homo sapiens
  REGION 1..1178: note = ENSP00000491463
MDALIIPVTMEVPCDSRGQRMWWAFLASSMVTFFGGLFIILLWRTLKYLWTVCCHCGGKTKEAQKINNGSSQADGTLKPVDEKEEAVAAEVGWMTSVKDWAGVMISAQTLTGRVLVVLVFALSIGALVIYFIDSSNPIESCQNFYKDFTLQIDMAFNVFFLLYFGLRFIAANDKLWFWLEVNSVVDFFTVPPVFVSVYLNRSWLGLRFLRALRLIQFSEILQFLNILKTSNSIKLVNLLSIFISTWLTAAGFIHLVENSGDPWENFQNNQALTYWECVYLLMVTMSTVGYGDVYAKTTLGRLFMVFFILGGLAMFASYVPEIIELIGNRKKYGGSYSAVSGRKHIVVCGHITLESVSNFLKDFLHKDRDDVNVEIVFLHNISPNLELEALFKRHFTQVEFYQGSVLNPHDLARVKIESADACLILANKYCADPDAEDASNIMRVISIKNYHPKIRIITQMLQYHNKAHLLNIPSWNWKEGDDAICLAELKLGFIAQSCLAQGLSTMLANLFSMRSFIKIEEDTWQKYYLEGVSNEMYTEYLSSAFVGLSFPTVCELCFVKLKLLMIAIEYKSANRESRSRKRILINPGNHLKIQEGTLGFFIASDAKEVKRAFFYCKACHDDITDPKRIKKCGCKRLIYSKMSIYKRMRRACCFDCGRSERDCSCMSGRVRGNVDTLERAFPLSSVSVNDCSTSFRAFEDEQPSTLSPKKKQRNGGMRNSPNTSPKLMRHDPLLIPGNDQIDNMDSNVKKYDSTGMFHWCAPKEIEKVILTRSEAAMTVLSGHVVVCIFGDVSSALIGLRNLVMPLRASNFHYHELKHIVFVGSIEYLKREWETLHNFPKVSILPGTPLSRADLRAVNINLCDMCVILSANQNNIDDTSLQDKECILASLNIKSMQFDDSIGVLQANSQGFTPPGMDRSSPDNSPVHGMLRQPSITTGVNIPIITELVNDTNVQFLDQDDDDDPDTELYLTQPFACGTAFAVSVLDSLMSATYFNDNILTLIRTLVTGGATPELEALIAEENALRGGYSTPQTLANRDRCRVAQLALLDGPFADLGDGGCYGDLFCKALKTYNMLCFGIYRLRDAHLSTPSQCTKRYVITNPPYEFELVPTDLIFCLMQFDHNAGQSRASLSHSSHSSQSSSKKSSSVHSIPSTANRQNRPKSRESRDKQNRKEMVYR

SEQ ID NO: 30402 - protein, 1142 aa, Homo sapiens
  REGION 1..1142: note = ENSP00000385806
MDALIIPVTMEVPCDSRGQRMWWAFLASSMVTFFGGLFIILLWRTLKYLWTVCCHCGGKTKEAQKINNGSSQADGTLKPVDEKEEAVAAEVGWMTSVKDWAGVMISAQTLTGRVLVVLVFALSIGALVIYFIDSSNPIESCQNFYKDFTLQIDMAFNVFFLLYFGLRFIAANDKLWFWLEVNSVVDFFTVPPVFVSVYLNRSWLGLRFLRALRLIQFSEILQFLNILKTSNSIKLVNLLSIFISTWLTAAGFIHLVENSGDPWENFQNNQALTYWECVYLLMVTMSTVGYGDVYAKTTLGRLFMVFFILGGLAMFASYVPEIIELIGNRKKYGGSYSAVSGRKHIVVCGHITLESVSNFLKDFLHKDRDDVNVEIVFLHNISPNLELEALFKRHFTQVEFYQGSVLNPHDLARVKIESADACLILANKYCADPDAEDASNIMRVISIKNYHPKIRIITQMLQYHNKAHLLNIPSWNWKEGDDAICLAELKLGFIAQSCLAQGLSTMLANLFSMRSFIKIEEDTWQKYYLEGVSNEMYTEYLSSAFVGLSFPTVCELCFVKLKLLMIAIEYKSANRESRILINPGNHLKIQEGTLGFFIASDAKEVKRAFFYCKACHDDITDPKRIKKCGCKRLKVAARSRYSKDPFEFKKETPNSRLVTEPVEDEQPSTLSPKKKQRNGGMRNSPNTSPKLMRHDPLLIPGNDQIDNMDSNVKKYDSTGMFHWCAPKEIEKVILTRSEAAMTVLSGHVVVCIFGDVSSALIGLRNLVMPLRASNFHYHELKHIVFVGSIEYLKREWETLHNFPKVSILPGTPLSRADLRAVNINLCDMCVILSANQNNIDDTSLQDKECILASLNIKSMQFDDSIGVLQANSQGFTPPGMDRSSPDNSPVHGMLRQPSITTGVNIPIITELVNDTNVQFLDQDDDDDPDTELYLTQPFACGTAFAVSVLDSLMSATYFNDNILTLIRTLVTGGATPELEALIAEENALRGGYSTPQTLANRDRCRVAQLALLDGPFADLGDGGCYGDLFCKALKTYNMLCFGIYRLRDAHLSTPSQCTKRYVITNPPYEFELVPTDLIFCLMQFDHNAGQSRASLSHSSHSSQSSSKKSSSVHSIPSTANRQNRPKSRESRDKQNRKEMVYR

SEQ ID NO: 30403 - protein, 357 aa, Homo sapiens
  REGION 1..357: note = ENSP00000492224
MDALIIPVTMEVPCDSRGQRMWWAFLASSMVTFFGGLFIILLWRTLKYLWTVCCHCGGKTKEAQKINNGSSQADGTLKPVDEKEEAVAAEVGWMTSVKDWAGVMISAQTLTGRVLVVLVFALSIGALVIYFIDSSNPIESCQNFYKDFTLQIDMAFNVFFLLYFGLRFIAANDKLWFWLEVNSVVDFFTVPPVFVSVYLNRSWLGLRFLRALRLIQFSEILQFLNILKTSNSIKLVNLLSIFISTWLTAAGFIHLVENSGDPWENFQNNQALTYWECVYLLMVTMSTVGYGDVYAKTTLGRLFMVFFILGGLAMFASYVPEIIELIGNRKKYGGSYSAVSGRKQCLPATCPKLLLSS

SEQ ID NO: 30404 - protein, 1119 aa, Homo sapiens
  REGION 1..1119: note = ENSP00000492178
MDALIIPVTMEVPCDSRGQRMWWAFLASSMVTFFGGLFIILLWRTLKYLWTVCCHCGGKTKEAQKINNGSSQADGTLKPVDEKEEAVAAEVGWMTSVKDWAGVMISAQTLTGRVLVVLVFALSIGALVIYFIDSSNPIESCQNFYKDFTLQIDMAFNVFFLLYFGLRFIAANDKLWFWLEVNSVVDFFTVPPVFVSVYLNRSWLGLRFLRALRLIQFSEILQFLNILKTSNSIKLVNLLSIFISTWLTAAGFIHLVENSGDPWENFQNNQALTYWECVYLLMVTMSTVGYGDVYAKTTLGRLFMVFFILGGLAMFASYVPEIIELIGNRKKYGGSYSAVSGRKHIVVCGHITLESVSNFLKDFLHKDRDDVNVEIVFLHNISPNLELEALFKRHFTQVEFYQGSVLNPHDLARVKIESADACLILANKYCADPDAEDASNIMRVISIKNYHPKIRIITQMLQYHNKIEEDTWQKYYLEGVSNEMYTEYLSSAFVGLSFPTVCELCFVKLKLLMIAIEYKSANRESRILINPGNHLKIQEGTLGFFIASDAKEVKRAFFYCKACHDDITDPKRIKKCGCKRPKMSIYKRMRRACCFDCGRSERDCSCMSGRVRGNVDTLERAFPLSSVSVNDCSTSFRAFEDEQPSTLSPKKKQRNGGMRNSPNTSPKLMRHDPLLIPGNDQIDNMDSNVKKYDSTGMFHWCAPKEIEKVILTRSEAAMTVLSGHVVVCIFGDVSSALIGLRNLVMPLRASNFHYHELKHIVFVGSIEYLKREWETLHNFPKVSILPGTPLSRADLRAVNINLCDMCVILSANQNNIDDTSLQDKECILASLNIKSMQFDDSIGVLQANSQGFTPPGMDRSSPDNSPVHGMLRQPSITTGVNIPIITELVNDTNVQFLDQDDDDDPDTELYLTQPFACGTAFAVSVLDSLMSATYFNDNILTLIRTLVTGGATPELEALIAEENALRGGYSTPQTLANRDRCRVAQLALLDGPFADLGDGGCYGDLFCKALKTYNMLCFGIYRLRDAHLSTPSQCTKRYVITNPPYEFELVPTDLIFCLMQFDHNAGQSRASLSHSSHSSQSSSKKSSSVHSIPSTANRQNRPKSRESRDKQNRKEMVYR

SEQ ID NO: 30405 - protein, 1236 aa, Homo sapiens
  REGION 1..1236: note = ENSP00000492075
MANGGGGGGGSSGGGGGGGGSSLRMSSNIHANHLSLDASSSSSSSSSSSSSSSSSSSSSSVHEPKMDALIIPVTMEVPCDSRGQRMWWAFLASSMVTFFGGLFIILLWRTLKYLWTVCCHCGGKTKEAQKINNGSSQADGTLKPVDEKEEAVAAEVGWMTSVKDWAGVMISAQTLTGRVLVVLVFALSIGALVIYFIDSSNPIESCQNFYKDFTLQIDMAFNVFFLLYFGLRFIAANDKLWFWLEVNSVVDFFTVPPVFVSVYLNRSWLGLRFLRALRLIQFSEILQFLNILKTSNSIKLVNLLSIFISTWLTAAGFIHLVENSGDPWENFQNNQALTYWECVYLLMVTMSTVGYGDVYAKTTLGRLFMVFFILGGLAMFASYVPEIIELIGNRKKYGGSYSAVSGRKHIVVCGHITLESVSNFLKDFLHKDRDDVNVEIVFLHNISPNLELEALFKRHFTQVEFYQGSVLNPHDLARVKIESADACLILANKYCADPDAEDASNIMRVISIKNYHPKIRIITQMLQYHNKAHLLNIPSWNWKEGDDAICLAELKLGFIAQSCLAQGLSTMLANLFSMRSFIKIEEDTWQKYYLEGVSNEMYTEYLSSAFVGLSFPTVCELCFVKLKLLMIAIEYKSANRESRILINPGNHLKIQEGTLGFFIASDAKEVKRAFFYCKACHDDITDPKRIKKCGCKRPKMSIYKRMRRACCFDCGRSERDCSCMSGRVRGNVDTLERAFPLSSVSVNDCSTSFRAFEDEQPSTLSPKKKQRNGGMRNSPNTSPKLMRHDPLLIPGNDQIDNMDSNVKKYDSTGMFHWCAPKEIEKVILTRSEAAMTVLSGHVVVCIFGDVSSALIGLRNLVMPLRASNFHYHELKHIVFVGSIEYLKREWETLHNFPKVSILPGTPLSRADLRAVNINLCDMCVILSANQNNIDDTSLQDKECILASLNIKSMQFDDSIGVLQANSQGFTPPGMDRSSPDNSPVHGMLRQPSITTGVNIPIITELVNDTNVQFLDQDDDDDPDTELYLTQPFACGTAFAVSVLDSLMSATYFNDNILTLIRTLVTGGATPELEALIAEENALRGGYSTPQTLANRDRCRVAQLALLDGPFADLGDGGCYGDLFCKALKTYNMLCFGIYRLRDAHLSTPSQCTKRYVITNPPYEFELVPTDLIFCLMQFDHNAGQSRASLSHSSHSSQSSSKKSSSVHSIPSTANRQNRPKSRESRDKQNRKEMVYR

SEQ ID NO: 30406 - protein, 1128 aa, Homo sapiens
  REGION 1..1128: note = ENSP00000491555
MANGGGGGGGSSGGGGGGGGSSLRMSSNIHANHLSLDASSSSSSSSSSSSSSSSSSSSSSVHEPKMDALIIPVTMEVPCDSRGQRMWWAFLASSMVTFFGGLFIILLWRTLKYLWTVCCHCGGKTKVVLVFALSIGALVIYFIDSSNPIESCQNFYKDFTLQIDMAFNVFFLLYFGLRFIAANDKLWFWLEVNSVVDFFTVPPVFVSVYLNRSWLGLRFLRALRLIQFSEILQFLNILKTSNSIKLVNLLSIFISTWLTAAGFIHLVENSGDPWENFQNNQALTYWECVYLLMVTMSTVGYGDVYAKTTLGRLFMVFFILGGLAMFASYVPEIIELIGNRKKYGGSYSAVSGRKHIVVCGHITLESVSNFLKDFLHKDRDDVNVEIVFLHNISPNLELEALFKRHFTQVEFYQGSVLNPHDLARVKIESADACLILANKYCADPDAEDASNIMRVISIKNYHPKIRIITQMLQYHNKAHLLNIPSWNWKEGDDAICLAELKLGFIAQSCLAQGLSTMLANLFSMRSFIKIEEDTWQKYYLEGVSNEMYTEYLSSAFVGLSFPTVCELCFVKLKLLMIAIEYKSANRESRSRKRILINPGNHLKIQEGTLGFFIASDAKEVKRAFFYCKACHDDITDPKRIKKCGCKRLEDEQPSTLSPKKKQRNGGMRNSPNTSPKLMRHDPLLIPGNDQIDNMDSNVKKYDSTGMFHWCAPKEIEKVILTRSEAAMTVLSGHVVVCIFGDVSSALIGLRNLVMPLRASNFHYHELKHIVFVGSIEYLKREWETLHNFPKVSILPGTPLSRADLRAVNINLCDMCVILSANQNNIDDTSLQDKECILASLNIKSMQFDDSIGVLQANSQGFTPPGMDRSSPDNSPVHGMLRQPSITTGVNIPIITELVNDTNVQFLDQDDDDDPDTELYLTQPFACGTAFAVSVLDSLMSATYFNDNILTLIRTLVTGGATPELEALIAEENALRGGYSTPQTLANRDRCRVAQLALLDGPFADLGDGGCYGDLFCKALKTYNMLCFGIYRLRDAHLSTPSQCTKRYVITNPPYEFELVPTDLIFCLMQFDHNAGQSRASLSHSSHSSQSSSKKSSSVHSIPSTANRQNRPKSRESRDKQNRKEMVYR

SEQ ID NO: 30407 - protein, 1207 aa, Homo sapiens
  REGION 1..1207: note = ENSP00000402150
MANGGGGGGGSSGGGGGGGGSSLRMSSNIHANHLSLDASSSSSSSSSSSSSSSSSSSSSSVHEPKMDALIIPVTMEVPCDSRGQRMWWAFLASSMVTFFGGLFIILLWRTLKYLWTVCCHCGGKTKEAQKINNGSSQADGTLKPVDEKEEAVAAEVGWMTSVKDWAGVMISAQTLTGRVLVVLVFALSIGALVIYFIDSSNPIESCQNFYKDFTLQIDMAFNVFFLLYFGLRFIAANDKLWFWLEVNSVVDFFTVPPVFVSVYLNRSWLGLRFLRALRLIQFSEILQFLNILKTSNSIKLVNLLSIFISTWLTAAGFIHLVENSGDPWENFQNNQALTYWECVYLLMVTMSTVGYGDVYAKTTLGRLFMVFFILGGLAMFASYVPEIIELIGNRKKYGGSYSAVSGRKHIVVCGHITLESVSNFLKDFLHKDRDDVNVEIVFLHNISPNLELEALFKRHFTQVEFYQGSVLNPHDLARVKIESADACLILANKYCADPDAEDASNIMRVISIKNYHPKIRIITQMLQYHNKAHLLNIPSWNWKEGDDAICLAELKLGFIAQSCLAQGLSTMLANLFSMRSFIKIEEDTWQKYYLEGVSNEMYTEYLSSAFVGLSFPTVCELCFVKLKLLMIAIEYKSANRESRILINPGNHLKIQEGTLGFFIASDAKEVKRAFFYCKACHDDITDPKRIKKCGCKRLKVAARSRYSKDPFEFKKETPNSRLVTEPVEDEQPSTLSPKKKQRNGGMRNSPNTSPKLMRHDPLLIPGNDQIDNMDSNVKKYDSTGMFHWCAPKEIEKVILTRSEAAMTVLSGHVVVCIFGDVSSALIGLRNLVMPLRASNFHYHELKHIVFVGSIEYLKREWETLHNFPKVSILPGTPLSRADLRAVNINLCDMCVILSANQNNIDDTSLQDKECILASLNIKSMQFDDSIGVLQANSQGFTPPGMDRSSPDNSPVHGMLRQPSITTGVNIPIITELVNDTNVQFLDQDDDDDPDTELYLTQPFACGTAFAVSVLDSLMSATYFNDNILTLIRTLVTGGATPELEALIAEENALRGGYSTPQTLANRDRCRVAQLALLDGPFADLGDGGCYGDLFCKALKTYNMLCFGIYRLRDAHLSTPSQCTKRYVITNPPYEFELVPTDLIFCLMQFDHNAGQSRASLSHSSHSSQSSSKKSSSVHSIPSTANRQNRPKSRESRDKQKYVQEERL

SEQ ID NO: 30408 - protein, 1178 aa, Homo sapiens
  REGION 1..1178: note = ENSP00000286627
MANGGGGGGGSSGGGGGGGGSSLRMSSNIHANHLSLDASSSSSSSSSSSSSSSSSSSSSSVHEPKMDALIIPVTMEVPCDSRGQRMWWAFLASSMVTFFGGLFIILLWRTLKYLWTVCCHCGGKTKEAQKINNGSSQADGTLKPVDEKEEAVAAEVGWMTSVKDWAGVMISAQTLTGRVLVVLVFALSIGALVIYFIDSSNPIESCQNFYKDFTLQIDMAFNVFFLLYFGLRFIAANDKLWFWLEVNSVVDFFTVPPVFVSVYLNRSWLGLRFLRALRLIQFSEILQFLNILKTSNSIKLVNLLSIFISTWLTAAGFIHLVENSGDPWENFQNNQALTYWECVYLLMVTMSTVGYGDVYAKTTLGRLFMVFFILGGLAMFASYVPEIIELIGNRKKYGGSYSAVSGRKHIVVCGHITLESVSNFLKDFLHKDRDDVNVEIVFLHNISPNLELEALFKRHFTQVEFYQGSVLNPHDLARVKIESADACLILANKYCADPDAEDASNIMRVISIKNYHPKIRIITQMLQYHNKAHLLNIPSWNWKEGDDAICLAELKLGFIAQSCLAQGLSTMLANLFSMRSFIKIEEDTWQKYYLEGVSNEMYTEYLSSAFVGLSFPTVCELCFVKLKLLMIAIEYKSANRESRILINPGNHLKIQEGTLGFFIASDAKEVKRAFFYCKACHDDITDPKRIKKCGCKRLEDEQPSTLSPKKKQRNGGMRNSPNTSPKLMRHDPLLIPGNDQIDNMDSNVKKYDSTGMFHWCAPKEIEKVILTRSEAAMTVLSGHVVVCIFGDVSSALIGLRNLVMPLRASNFHYHELKHIVFVGSIEYLKREWETLHNFPKVSILPGTPLSRADLRAVNINLCDMCVILSANQNNIDDTSLQDKECILASLNIKSMQFDDSIGVLQANSQGFTPPGMDRSSPDNSPVHGMLRQPSITTGVNIPIITELVNDTNVQFLDQDDDDDPDTELYLTQPFACGTAFAVSVLDSLMSATYFNDNILTLIRTLVTGGATPELEALIAEENALRGGYSTPQTLANRDRCRVAQLALLDGPFADLGDGGCYGDLFCKALKTYNMLCFGIYRLRDAHLSTPSQCTKRYVITNPPYEFELVPTDLIFCLMQFDHNAGQSRASLSHSSHSSQSSSKKSSSVHSIPSTANRQNRPKSRESRDKQKYVQEERL

SEQ ID NO: 30409 - protein, 1236 aa, Homo sapiens
  REGION 1..1236: note = ENSP00000286628
MANGGGGGGGSSGGGGGGGGSSLRMSSNIHANHLSLDASSSSSSSSSSSSSSSSSSSSSSVHEPKMDALIIPVTMEVPCDSRGQRMWWAFLASSMVTFFGGLFIILLWRTLKYLWTVCCHCGGKTKEAQKINNGSSQADGTLKPVDEKEEAVAAEVGWMTSVKDWAGVMISAQTLTGRVLVVLVFALSIGALVIYFIDSSNPIESCQNFYKDFTLQIDMAFNVFFLLYFGLRFIAANDKLWFWLEVNSVVDFFTVPPVFVSVYLNRSWLGLRFLRALRLIQFSEILQFLNILKTSNSIKLVNLLSIFISTWLTAAGFIHLVENSGDPWENFQNNQALTYWECVYLLMVTMSTVGYGDVYAKTTLGRLFMVFFILGGLAMFASYVPEIIELIGNRKKYGGSYSAVSGRKHIVVCGHITLESVSNFLKDFLHKDRDDVNVEIVFLHNISPNLELEALFKRHFTQVEFYQGSVLNPHDLARVKIESADACLILANKYCADPDAEDASNIMRVISIKNYHPKIRIITQMLQYHNKAHLLNIPSWNWKEGDDAICLAELKLGFIAQSCLAQGLSTMLANLFSMRSFIKIEEDTWQKYYLEGVSNEMYTEYLSSAFVGLSFPTVCELCFVKLKLLMIAIEYKSANRESRILINPGNHLKIQEGTLGFFIASDAKEVKRAFFYCKACHDDITDPKRIKKCGCKRPKMSIYKRMRRACCFDCGRSERDCSCMSGRVRGNVDTLERAFPLSSVSVNDCSTSFRAFEDEQPSTLSPKKKQRNGGMRNSPNTSPKLMRHDPLLIPGNDQIDNMDSNVKKYDSTGMFHWCAPKEIEKVILTRSEAAMTVLSGHVVVCIFGDVSSALIGLRNLVMPLRASNFHYHELKHIVFVGSIEYLKREWETLHNFPKVSILPGTPLSRADLRAVNINLCDMCVILSANQNNIDDTSLQDKECILASLNIKSMQFDDSIGVLQANSQGFTPPGMDRSSPDNSPVHGMLRQPSITTGVNIPIITELVNDTNVQFLDQDDDDDPDTELYLTQPFACGTAFAVSVLDSLMSATYFNDNILTLIRTLVTGGATPELEALIAEENALRGGYSTPQTLANRDRCRVAQLALLDGPFADLGDGGCYGDLFCKALKTYNMLCFGIYRLRDAHLSTPSQCTKRYVITNPPYEFELVPTDLIFCLMQFDHNAGQSRASLSHSSHSSQSSSKKSSSVHSIPSTANRQNRPKSRESRDKQKYVQEERL

SEQ ID NO: 30410 - protein, 1122 aa, Homo sapiens
  REGION 1..1122: note = ENSP00000491300
EAQKINNGSSQADGTLKPVDEKEEAVAAEVGWMTSVKDWAGVMISAQTLTGRVLVVLVFALSIGALVIYFIDSSNPIESCQNFYKDFTLQIDMAFNVFFLLYFGLRFIAANDKLWFWLEVNSVVDFFTVPPVFVSVYLNRSWLGLRFLRALRLIQFSEILQFLNILKTSNSIKLVNLLSIFISTWLTAAGFIHLVENSGDPWENFQNNQALTYWECVYLLMVTMSTVGYGDVYAKTTLGRLFMVFFILGGLAMFASYVPEIIELIGNRKKYGGSYSAVSGRKHIVVCGHITLESVSNFLKDFLHKDRDDVNVEIVFLHNISPNLELEALFKRHFTQVEFYQGSVLNPHDLARVKIESADACLILANKYCADPDAEDASNIMRVISIKNYHPKIRIITQMLQYHNKAHLLNIPSWNWKEGDDAICLAELKLGFIAQSCLAQGLSTMLANLFSMRSFIKIEEDTWQKYYLEGVSNEMYTEYLSSAFVGLSFPTVCELCFVKLKLLMIAIEYKSANRESRSRKRILINPGNHLKIQEGTLGFFIASDAKEVKRAFFYCKACHDDITDPKRIKKCGCKRLKVAARSRYSKDPFEFKKETPNSRLVTEPVEDEQPSTLSPKKKQRNGGMRNSPNTSPKLMRHDPLLIPGNDQIDNMDSNVKKYDSTGMFHWCAPKEIEKVILTRSEAAMTVLSGHVVVCIFGDVSSALIGLRNLVMPLRASNFHYHELKHIVFVGSIEYLKREWETLHNFPKVSILPGTPLSRADLRAVNINLCDMCVILSANQNNIDDTSLQDKECILASLNIKSMQFDDSIGVLQANSQGFTPPGMDRSSPDNSPVHGMLRQPSITTGVNIPIITELAKPGKLPLVSVNQEKNSGTHILMITELVNDTNVQFLDQDDDDDPDTELYLTQPFACGTAFAVSVLDSLMSATYFNDNILTLIRTLVTGGATPELEALIAEENALRGGYSTPQTLANRDRCRVAQLALLDGPFADLGDGGCYGDLFCKALKTYNMLCFGIYRLRDAHLSTPSQCTKRYVITNPPYEFELVPTDLIFCLMQFDHNAGQSRASLSHSSHSSQSSSKKSSSVHSIPSTANRQNRPKSRESRDKQNATRMNRMGQGMTINGSA

SEQ ID NO: 30411 - protein, 977 aa, Homo sapiens
  REGION 1..977: note = ENSP00000492519
  VARIANT 1: note = Any amino acid
XQIDMAFNVFFLLYFGLRFIAANDKLWFWLEVNSVVDFFTVPPVFVSVYLNRSWLGLRFLRALRLIQFSEILQFLNILKTSNSIKLVNLLSIFISTWLTAAGFIHLVENSGDPWENFQNNQALTYWECVYLLMVTMSTVGYGDVYAKTTLGRLFMVFFILGGLAMFASYVPEIIELIGNRKKYGGSYSAVSGRKHIVVCGHITLESVSNFLKDFLHKDRDDVNVEIVFLHNISPNLELEALFKRHFTQVEFYQGSVLNPHDLARVKIESADACLILANKYCADPDAEDASNIMRVISIKNYHPKIRIITQMLQYHNKAHLLNIPSWNWKEGDDAICLAELKLGFIAQSCLAQGLSTMLANLFSMRSFIKIEEDTWQKYYLEGVSNEMYTEYLSSAFVGLSFPTVCELCFVKLKLLMIAIEYKSANRESRILINPGNHLKIQEGTLGFFIASDAKEVKRAFFYCKACHDDITDPKRIKKCGCKRLIYFEDEQPSTLSPKKKQRNGGMRNSPNTSPKLMRHDPLLIPGNDQIDNMDSNVKKYDSTGMFHWCAPKEIEKVILTRSEAAMTVLSGHVVVCIFGDVSSALIGLRNLVMPLRASNFHYHELKHIVFVGSIEYLKREWETLHNFPKVSILPGTPLSRADLRAVNINLCDMCVILSANQNNIDDTSLQDKECILASLNIKSMQFDDSIGVLQANSQGFTPPGMDRSSPDNSPVHGMLRQPSITTGVNIPIITELVNDTNVQFLDQDDDDDPDTELYLTQPFACGTAFAVSVLDSLMSATYFNDNILTLIRTLVTGGATPELEALIAEENALRGGYSTPQTLANRDRCRVAQLALLDGPFADLGDGGCYGDLFCKALKTYNMLCFGIYRLRDAHLSTPSQCTKRYVITNPPYEFELVPTDLIFCLMQFDHNAGQSRASLSHSSHSSQSSSKKSSSVHSIPSTANRQNRPKSRESRDKQNATRMNRMGQGMTINGSA

SEQ ID NO: 30412 - protein, 1198 aa, Homo sapiens
  REGION 1..1198: note = ENSP00000491277
  VARIANT 1: note = Any amino acid
XSSNIHANHLSLDASSSSSSSSSSSSSSSSSSSSSSVHEPKMDALIIPVTMEVPCDSRGQRMWWAFLASSMVTFFGGLFIILLWRTLKYLWTVCCHCGGKTKEAQKINNGSSQADGTLKPVDEKEEAVAAEVGWMTSVKDWAGVMISAQTLTGRVLVVLVFALSIGALVIYFIDSSNPIESCQNFYKDFTLQIDMAFNVFFLLYFGLRFIAANDKLWFWLEVNSVVDFFTVPPVFVSVYLNRSWLGLRFLRALRLIQFSEILQFLNILKTSNSIKLVNLLSIFISTWLTAAGFIHLVENSGDPWENFQNNQALTYWECVYLLMVTMSTVGYGDVYAKTTLGRLFMVFFILGGLAMFASYVPEIIELIGNRKKYGGSYSAVSGRKHIVVCGHITLESVSNFLKDFLHKDRDDVNVEIVFLHNISPNLELEALFKRHFTQVEFYQGSVLNPHDLARVKIESADACLILANKYCADPDAEDASNIMRVISIKNYHPKIRIITQMLQYHNKAHLLNIPSWNWKEGDDAICLAELKLGFIAQSCLAQGLSTMLANLFSMRSFIKIEEDTWQKYYLEGVSNEMYTEYLSSAFVGLSFPTVCELCFVKLKLLMIAIEYKSANRESRSRKRILINPGNHLKIQEGTLGFFIASDAKEVKRAFFYCKACHDDITDPKRIKKCGCKRLIYFEDEQPSTLSPKKKQRNGGMRNSPNTSPKLMRHDPLLIPGNDQIDNMDSNVKKYDSTGMFHWCAPKEIEKVILTRSEAAMTVLSGHVVVCIFGDVSSALIGLRNLVMPLRASNFHYHELKHIVFVGSIEYLKREWETLHNFPKVSILPGTPLSRADLRAVNINLCDMCVILSANQNNIDDTSLQDKECILASLNIKSMQFDDSIGVLQANSQGFTPPGMDRSSPDNSPVHGMLRQPSITTGVNIPIITELAKPGKLPLVSVNQEKNSGTHILMITELVNDTNVQFLDQDDDDDPDTELYLTQPFACGTAFAVSVLDSLMSATYFNDNILTLIRTLVTGGATPELEALIAEENALRGGYSTPQTLANRDRCRVAQLALLDGPFADLGDGGCYGDLFCKALKTYNMLCFGIYRLRDAHLSTPSQCTKRYVITNPPYEFELVPTDLIFCLMQFDHNAGQSRASLSHSSHSSQSSSKKSSSVHSIPSTANRQNRPKSRESRDKQNATRMNRMGQGMTINGSA

SEQ ID NO: 30413 - protein, 575 aa, Homo sapiens
  REGION 1..575: note = ENSP00000491131
TVCELCFVKLKLLMIAIEYKSANRESRILINPGNHLKIQEGTLGFFIASDAKEVKRPPQLCLPLAAQKRAFFYCKACHDDITDPKRIKKCGCKRLEDEQPSTLSPKKKQRNGGMRNSPNTSPKLMRHDPLLIPGNDQIDNMDSNVKKYDSTGMFHWCAPKEIEKVILTRSEAAMTVLSGHVVVCIFGDVSSALIGLRNLVMPLRASNFHYHELKHIVFVGSIEYLKREWETLHNFPKVSILPGTPLSRADLRAVNINLCDMCVILSANQNNIDDTSLQDKECILASLNIKSMQFDDSIGVLQANSQGFTPPGMDRSSPDNSPVHGMLRQPSITTGVNIPIITELVNDTNVQFLDQDDDDDPDTELYLTQPFACGTAFAVSVLDSLMSATYFNDNILTLIRTLVTGGATPELEALIAEENALRGGYSTPQTLANRDRCRVAQLALLDGPFADLGDGGCYGDLFCKALKTYNMLCFGIYRLRDAHLSTPSQCTKRYVITNPPYEFELVPTDLIFCLMQFDHNAGQSRASLSHSSHSSQSSSKKSSSVHSIPSTANRQNRPKSRESRDKQKYVQEERL

SEQ ID NO: 30414 - protein, 1181 aa, Homo sapiens
  REGION 1..1181: note = ENSP00000491418
MANGGGGGGGSSGGGGGGGGSSLRMSSNIHANHLSLDASSSSSSSSSSSSSSSSSSSSSSVHEPKMDALIIPVTMEVPCDSRGQRMWWAFLASSMVTFFGGLFIILLWRTLKYLWTVCCHCGGKTKEAQKINNGSSQADGTLKPVDEKEEAVAAEVGWMTSVKDWAGVMISAQTLTGRVLVVLVFALSIGALVIYFIDSSNPIESCQNFYKDFTLQIDMAFNVFFLLYFGLRFIAANDKLWFWLEVNSVVDFFTVPPVFVSVYLNRSWLGLRFLRALRLIQFSEILQFLNILKTSNSIKLVNLLSIFISTWLTAAGFIHLVENSGDPWENFQNNQALTYWECVYLLMVTMSTVGYGDVYAKTTLGRLFMVFFILGGLAMFASYVPEIIELIGNRKKYGGSYSAVSGRKHIVVCGHITLESVSNFLKDFLHKDRDDVNVEIVFLHNISPNLELEALFKRHFTQVEFYQGSVLNPHDLARVKIESADACLILANKYCADPDAEDASNIMRVISIKNYHPKIRIITQMLQYHNKAHLLNIPSWNWKEGDDAICLAELKLGFIAQSCLAQGLSTMLANLFSMRSFIKIEEDTWQKYYLEGVSNEMYTEYLSSAFVGLSFPTVCELCFVKLKLLMIAIEYKSANRESRILINPGNHLKIQEGTLGFFIASDAKEVKRAFFYCKACHDDITDPKRIKKCGCKRLIYFEDEQPSTLSPKKKQRNGGMRNSPNTSPKLMRHDPLLIPGNDQIDNMDSNVKKYDSTGMFHWCAPKEIEKVILTRSEAAMTVLSGHVVVCIFGDVSSALIGLRNLVMPLRASNFHYHELKHIVFVGSIEYLKREWETLHNFPKVSILPGTPLSRADLRAVNINLCDMCVILSANQNNIDDTSLQDKECILASLNIKSMQFDDSIGVLQANSQGFTPPGMDRSSPDNSPVHGMLRQPSITTGVNIPIITELVNDTNVQFLDQDDDDDPDTELYLTQPFACGTAFAVSVLDSLMSATYFNDNILTLIRTLVTGGATPELEALIAEENALRGGYSTPQTLANRDRCRVAQLALLDGPFADLGDGGCYGDLFCKALKTYNMLCFGIYRLRDAHLSTPSQCTKRYVITNPPYEFELVPTDLIFCLMQFDHNAGQSRASLSHSSHSSQSSSKKSSSVHSIPSTANRQNRPKSRESRDKQKYVQEERL

SEQ ID NO: 30415 - protein, 1020 aa, Homo sapiens
  REGION 1..1020: note = ENSP00000491166
EAQKINNGSSQADGTLKPVDEKEEAVAAEVGWMTSVKDWAGVMISAQTLTGRVLVVLVFALSIGALVIYFIDSSNPIESCQNFYKDFTLQIDMAFNVFFLLYFGLRFIAANDKLWFWLEVNSVVDFFTVPPVFVSVYLNRSWLGLRFLRALRLIQFSEILQFLNILKTSNSIKLVNLLSIFISTWLTAAGFIHLVENSGDPWENFQNNQALTYWECVYLLMVTMSTVGYGDVYAKTTLGRLFMVFFILGGLAMFASYVPEIIELIGNRKKYGGSYSAVSGRKHIVVCGHITLESVSNFLKDFLHKDRDDVNVEIVFLHKVISIKNYHPKIRIITQMLQYHNKAHLLNIPSWNWKEGDDAICLAELKLGFIAQSCLAQGLSTMLANLFSMRSFIKIEEDTWQKYYLEGVSNEMYTEYLSSAFVGLSFPTVCELCFVKLKLLMIAIEYKSANRESRSRKRILINPGNHLKIQEGTLGFFIASDAKEVKRAFFYCKACHDDITDPKRIKKCGCKRLEDEQPSTLSPKKKQRNGGMRNSPNTSPKLMRHDPLLIPGNDQIDNMDSNVKKYDSTGMFHWCAPKEIEKVILTRSEAAMTVLSGHVVVCIFGDVSSALIGLRNLVMPLRASNFHYHELKHIVFVGSIEYLKREWETLHNFPKVSILPGTPLSRADLRAVNINLCDMCVILSANQNNIDDTSLQDKECILASLNIKSMQFDDSIGVLQANSQGFTPPGMDRSSPDNSPVHGMLRQPSITTGVNIPIITELAKPGKLPLVSVNQEKNSGTHILMITELVNDTNVQFLDQDDDDDPDTELYLTQPFACGTAFAVSVLDSLMSATYFNDNILTLIRTLVTGGATPELEALIAEENALRGGYSTPQTLANRDRCRVAQLALLDGPFADLGDGGCYGDLFCKALKTYNMLCFGIYRLRDAHLSTPSQCTKRYVITNPPYEFELVPTDLIFCLMQFDHNAGQSRASLSHSSHSSQSSSKKSSSVHSIPSTANRQNRPKSRESRDKQKYVQEERL

SEQ ID NO: 30416 - protein, 1207 aa, Homo sapiens; identical to SEQ ID NO: 30407
  REGION 1..1207: note = ENSP00000492200

SEQ ID NO: 30417 - protein, 97 aa, Homo sapiens
  REGION 1..97: note = ENSP00000492172
EAQKINNGSSQADGTLKPVDEKEEAVAAEVGWMTSVKDWAGVMISAQTLTGRVLVVLVFALSIGALVIYFIDSSKFEIFKSSETDTVFRNFAVSEYS

SEQ ID NO: 30418 - protein, 1208 aa, Homo sapiens
  REGION 1..1208: note = ENSP00000491732
MANGGGGGGGSSGGGGGGGGSSLRMSSNIHANHLSLDASSSSSSSSSSSSSSSSSSSSSSVHEPKMDALIIPVTMEVPCDSRGQRMWWAFLASSMVTFFGGLFIILLWRTLKYLWTVCCHCGGKTKEAQKINNGSSQADGTLKPVDEKEEAVAAEVGWMTSVKDWAGVMISAQTLTGRVLVVLVFALSIGALVIYFIDSSNPIESCQNFYKDFTLQIDMAFNVFFLLYFGLRFIAANDKLWFWLEVNSVVDFFTVPPVFVSVYLNRSWLGLRFLRALRLIQFSEILQFLNILKTSNSIKLVNLLSIFISTWLTAAGFIHLVENSGDPWENFQNNQALTYWECVYLLMVTMSTVGYGDVYAKTTLGRLFMVFFILGGLAMFASYVPEIIELIGNRKKYGGSYSAVSGRKHIVVCGHITLESVSNFLKDFLHKDRDDVNVEIVFLHNISPNLELEALFKRHFTQVEFYQGSVLNPHDLARVKIESADACLILANKYCADPDAEDASNIMRVISIKNYHPKIRIITQMLQYHNKAHLLNIPSWNWKEGDDAICLAELKLGFIAQSCLAQGLSTMLANLFSMRSFIKIEEDTWQKYYLEGVSNEMYTEYLSSAFVGLSFPTVCELCFVKLKLLMIAIEYKSANRESRILINPGNHLKIQEGTLGFFIASDAKEVKRAFFYCKACHDDITDPKRIKKCGCKRLIYFEDEQPSTLSPKKKQRNGGMRNSPNTSPKLMRHDPLLIPGNDQIDNMDSNVKKYDSTGMFHWCAPKEIEKVILTRSEAAMTVLSGHVVVCIFGDVSSALIGLRNLVMPLRASNFHYHELKHIVFVGSIEYLKREWETLHNFPKVSILPGTPLSRADLRAVNINLCDMCVILSANQNNIDDTSLQDKECILASLNIKSMQFDDSIGVLQANSQGFTPPGMDRSSPDNSPVHGMLRQPSITTGVNIPIITELAKPGKLPLVSVNQEKNSGTHILMITELVNDTNVQFLDQDDDDDPDTELYLTQPFACGTAFAVSVLDSLMSATYFNDNILTLIRTLVTGGATPELEALIAEENALRGGYSTPQTLANRDRCRVAQLALLDGPFADLGDGGCYGDLFCKALKTYNMLCFGIYRLRDAHLSTPSQCTKRYVITNPPYEFELVPTDLIFCLMQFDHNAGQSRASLSHSSHSSQSSSKKSSSVHSIPSTANRQNRPKSRESRDKQKYVQEERL

SEQ ID NO: 30419 - protein, 1146 aa, Homo sapiens
  REGION 1..1146: note = ENSP00000490982
MDALIIPVTMEVPCDSRGQRMWWAFLASSMVTFFGGLFIILLWRTLKYLWTVCCHCGGKTKEAQKINNGSSQADGTLKPVDEKEEAVAAEVGWMTSVKDWAGVMISAQTLTGRVLVVLVFALSIGALVIYFIDSSNPIESCQNFYKDFTLQIDMAFNVFFLLYFGLRFIAANDKLWFWLEVNSVVDFFTVPPVFVSVYLNRSWLGLRFLRALRLIQFSEILQFLNILKTSNSIKLVNLLSIFISTWLTAAGFIHLVENSGDPWENFQNNQALTYWECVYLLMVTMSTVGYGDVYAKTTLGRLFMVFFILGGLAMFASYVPEIIELIGNRKKYGGSYSAVSGRKHIVVCGHITLESVSNFLKDFLHKDRDDVNVEIVFLHNISPNLELEALFKRHFTQVEFYQGSVLNPHDLARVKIESADACLILANKYCADPDAEDASNIMRVISIKNYHPKIRIITQMLQYHNKAHLLNIPSWNWKEGDDAICLAELKLGFIAQSCLAQGLSTMLANLFSMRSFIKIEEDTWQKYYLEGVSNEMYTEYLSSAFVGLSFPTVCELCFVKLKLLMIAIEYKSANRESRSRKRILINPGNHLKIQEGTLGFFIASDAKEVKRAFFYCKACHDDITDPKRIKKCGCKRLKVAARSRYSKDPFEFKKETPNSRLVTEPVEDEQPSTLSPKKKQRNGGMRNSPNTSPKLMRHDPLLIPGNDQIDNMDSNVKKYDSTGMFHWCAPKEIEKVILTRSEAAMTVLSGHVVVCIFGDVSSALIGLRNLVMPLRASNFHYHELKHIVFVGSIEYLKREWETLHNFPKVSILPGTPLSRADLRAVNINLCDMCVILSANQNNIDDTSLQDKECILASLNIKSMQFDDSIGVLQANSQGFTPPGMDRSSPDNSPVHGMLRQPSITTGVNIPIITELVNDTNVQFLDQDDDDDPDTELYLTQPFACGTAFAVSVLDSLMSATYFNDNILTLIRTLVTGGATPELEALIAEENALRGGYSTPQTLANRDRCRVAQLALLDGPFADLGDGGCYGDLFCKALKTYNMLCFGIYRLRDAHLSTPSQCTKRYVITNPPYEFELVPTDLIFCLMQFDHNAGQSRASLSHSSHSSQSSSKKSSSVHSIPSTANRQNRPKSRESRDKQKYVQEERL

SEQ ID NO: 30420 - protein, 1178 aa, Homo sapiens
  REGION 1..1178: note = ENSP00000491920
MANGGGGGGGSSGGGGGGGGSSLRMSSNIHANHLSLDASSSSSSSSSSSSSSSSSSSSSSVHEPKMDALIIPVTMEVPCDSRGQRMWWAFLASSMVTFFGGLFIILLWRTLKYLWTVCCHCGGKTKEAQKINNGSSQADGTLKPVDEKEEAVAAEVGWMTSVKDWAGVMISAQTLTGRVLVVLVFALSIGALVIYFIDSSNPIESCQNFYKDFTLQIDMAFNVFFLLYFGLRFIAANDKLWFWLEVNSVVDFFTVPPVFVSVYLNRSWLGLRFLRALRLIQFSEILQFLNILKTSNSIKLVNLLSIFISTWLTAAGFIHLVENSGDPWENFQNNQALTYWECVYLLMVTMSTVGYGDVYAKTTLGRLFMVFFILGGLAMFARYVPEIAALILSRNKFGGTFNKHGGRKHIVVCGHITLESVSNFLKDFLHKDRDDVNVEIVFLHNISPNLELEALFKRHFTQVEFYQGSVLNPHDLARVKIESADACLILANKYCADPDAEDASNIMRVISIKNYHPKIRIITQMLQYHNKAHLLNIPSWNWKEGDDAICLAELKLGFIAQSCLAQGLSTMLANLFSMRSFIKIEEDTWQKYYLEGVSNEMYTEYLSSAFVGLSFPTVCELCFVKLKLLMIAIEYKSANRESRILINPGNHLKIQEGTLGFFIASDAKEVKRAFFYCKACHDDITDPKRIKKCGCKRLEDEQPSTLSPKKKQRNGGMRNSPNTSPKLMRHDPLLIPGNDQIDNMDSNVKKYDSTGMFHWCAPKEIEKVILTRSEAAMTVLSGHVVVCIFGDVSSALIGLRNLVMPLRASNFHYHELKHIVFVGSIEYLKREWETLHNFPKVSILPGTPLSRADLRAVNINLCDMCVILSANQNNIDDTSLQDKECILASLNIKSMQFDDSIGVLQANSQGFTPPGMDRSSPDNSPVHGMLRQPSITTGVNIPIITELVNDTNVQFLDQDDDDDPDTELYLTQPFACGTAFAVSVLDSLMSATYFNDNILTLIRTLVTGGATPELEALIAEENALRGGYSTPQTLANRDRCRVAQLALLDGPFADLGDGGCYGDLFCKALKTYNMLCFGIYRLRDAHLSTPSQCTKRYVITNPPYEFELVPTDLIFCLMQFDHNAGQSRASLSHSSHSSQSSSKKSSSVHSIPSTANRQNRPKSRESRDKQKYVQEERL

SEQ ID NO: 30421 - protein, 1219 aa, Homo sapiens
  REGION 1..1219: note = ENSP00000485867
MANGGGGGGGSSGGGGGGGGSSLRMSSNIHANHLSLDASSSSSSSSSSSSSSSSSSSSSSVHEPKMDALIIPVTMEVPCDSRGQRMWWAFLASSMVTFFGGLFIILLWRTLKYLWTVCCHCGGKTKEAQKINNGSSQADGTLKPVDEKEEAVAAEVGWMTSVKDWAGVMISAQTLTGRVLVVLVFALSIGALVIYFIDSSNPIESCQNFYKDFTLQIDMAFNVFFLLYFGLRFIAANDKLWFWLEVNSVVDFFTVPPVFVSVYLNRSWLGLRFLRALRLIQFSEILQFLNILKTSNSIKLVNLLSIFISTWLTAAGFIHLVENSGDPWENFQNNQALTYWECVYLLMVTMSTVGYGDVYAKTTLGRLFMVFFILGGLAMFASYVPEIIELIGNRKKYGGSYSAVSGRKHIVVCGHITLESVSNFLKDFLHKDRDDVNVEIVFLHNISPNLELEALFKRHFTQVEFYQGSVLNPHDLARVKIESADACLILANKYCADPDAEDASNIMRVISIKNYHPKIRIITQMLQYHNKAHLLNIPSWNWKEGDDAICLAELKLGFIAQSCLAQGLSTMLANLFSMRSFIKIEEDTWQKYYLEGVSNEMYTEYLSSAFVGLSFPTVCELCFVKLKLLMIAIEYKSANRESRILINPGNHLKIQEGTLGFFIASDAKEVKRAFFYCKACHDDITDPKRIKKCGCKRLEDEQPSTLSPKKKQRNGGMRNSPNTSPKLMRHDPLLIPGNDQIDNMDSNVKKYDSTGMFHWCAPKEIEKVILVTGWMPYLGPRVLMTCLDIGVVCMPTDIQSTSPASIKKFKETRSEAAMTVLSGHVVVCIFGDVSSALIGLRNLVMPLRASNFHYHELKHIVFVGSIEYLKREWETLHNFPKVSILPGTPLSRADLRAVNINLCDMCVILSANQNNIDDTSLQDKECILASLNIKSMQFDDSIGVLQANSQGFTPPGMDRSSPDNSPVHGMLRQPSITTGVNIPIITELVNDTNVQFLDQDDDDDPDTELYLTQPFACGTAFAVSVLDSLMSATYFNDNILTLIRTLVTGGATPELEALIAEENALRGGYSTPQTLANRDRCRVAQLALLDGPFADLGDGGCYGDLFCKALKTYNMLCFGIYRLRDAHLSTPSQCTKRYVITNPPYEFELVPTDLIFCLMQFDHNAGQSRASLSHSSHSSQSSSKKSSSVHSIPSTANRQNRPKSRESRDKQKYVQEERL

SEQ ID NO: 30422 - protein, 1240 aa, Homo sapiens
  REGION 1..1240: note = ENSP00000492632
MANGGGGGGGSSGGGGGGGGSSLRMSSNIHANHLSLDASSSSSSSSSSSSSSSSSSSSSSVHEPKMDALIIPVTMEVPCDSRGQRMWWAFLASSMVTFFGGLFIILLWRTLKYLWTVCCHCGGKTKEAQKINNGSSQADGTLKPVDEKEEAVAAEVGWMTSVKDWAGVMISAQTLTGRVLVVLVFALSIGALVIYFIDSSNPIESCQNFYKDFTLQIDMAFNVFFLLYFGLRFIAANDKLWFWLEVNSVVDFFTVPPVFVSVYLNRSWLGLRFLRALRLIQFSEILQFLNILKTSNSIKLVNLLSIFISTWLTAAGFIHLVENSGDPWENFQNNQALTYWECVYLLMVTMSTVGYGDVYAKTTLGRLFMVFFILGGLAMFASYVPEIIELIGNRKKYGGSYSAVSGRKHIVVCGHITLESVSNFLKDFLHKDRDDVNVEIVFLHNISPNLELEALFKRHFTQVEFYQGSVLNPHDLARVKIESADACLILANKYCADPDAEDASNIMRVISIKNYHPKIRIITQMLQYHNKAHLLNIPSWNWKEGDDAICLAELKLGFIAQSCLAQGLSTMLANLFSMRSFIKIEEDTWQKYYLEGVSNEMYTEYLSSAFVGLSFPTVCELCFVKLKLLMIAIEYKSANRESRSRKRILINPGNHLKIQEGTLGFFIASDAKEVKRAFFYCKACHDDITDPKRIKKCGCKRPKMSIYKRMRRACCFDCGRSERDCSCMSGRVRGNVDTLERAFPLSSVSVNDCSTSFRAFEDEQPSTLSPKKKQRNGGMRNSPNTSPKLMRHDPLLIPGNDQIDNMDSNVKKYDSTGMFHWCAPKEIEKVILTRSEAAMTVLSGHVVVCIFGDVSSALIGLRNLVMPLRASNFHYHELKHIVFVGSIEYLKREWETLHNFPKVSILPGTPLSRADLRAVNINLCDMCVILSANQNNIDDTSLQDKECILASLNIKSMQFDDSIGVLQANSQGFTPPGMDRSSPDNSPVHGMLRQPSITTGVNIPIITELVNDTNVQFLDQDDDDDPDTELYLTQPFACGTAFAVSVLDSLMSATYFNDNILTLIRTLVTGGATPELEALIAEENALRGGYSTPQTLANRDRCRVAQLALLDGPFADLGDGGCYGDLFCKALKTYNMLCFGIYRLRDAHLSTPSQCTKRYVITNPPYEFELVPTDLIFCLMQFDHNAGQSRASLSHSSHSSQSSSKKSSSVHSIPSTANRQNRPKSRESRDKQKYVQEERL

SEQ ID NO: 30423 - protein, 1239 aa, Homo sapiens
  REGION 1..1239: note = ENSP00000492049
MANGGGGGGGSSGGGGGGGGSSLRMSSNIHANHLSLDASSSSSSSSSSSSSSSSSSSSSSVHEPKMDALIIPVTMEVPCDSRGQRMWWAFLASSMVTFFGGLFIILLWRTLKYLWTVCCHCGGKTKEAQKINNGSSQADGTLKPVDEKEEAVAAEVGWMTSVKDWAGVMISAQTLTGRVLVVLVFALSIGALVIYFIDSSNPIESCQNFYKDFTLQIDMAFNVFFLLYFGLRFIAANDKLWFWLEVNSVVDFFTVPPVFVSVYLNRSWLGLRFLRALRLIQFSEILQFLNILKTSNSIKLVNLLSIFISTWLTAAGFIHLVENSGDPWENFQNNQALTYWECVYLLMVTMSTVGYGDVYAKTTLGRLFMVFFILGGLAMFASYVPEIIELIGNRKKYGGSYSAVSGRKHIVVCGHITLESVSNFLKDFLHKDRDDVNVEIVFLHNISPNLELEALFKRHFTQVEFYQGSVLNPHDLARVKIESADACLILANKYCADPDAEDASNIMRVISIKNYHPKIRIITQMLQYHNKAHLLNIPSWNWKEGDDAICLAELKLGFIAQSCLAQGLSTMLANLFSMRSFIKIEEDTWQKYYLEGVSNEMYTEYLSSAFVGLSFPTVCELCFVKLKLLMIAIEYKSANRESRILINPGNHLKIQEGTLGFFIASDAKEVKRAFFYCKACHDDITDPKRIKKCGCKRRWEEHCSLWRLESKGNVRRLNYCRGQQTFSVKVKVAARSRYSKDPFEFKKETPNSRLVTEPVEDEQPSTLSPKKKQRNGGMRNSPNTSPKLMRHDPLLIPGNDQIDNMDSNVKKYDSTGMFHWCAPKEIEKVILTRSEAAMTVLSGHVVVCIFGDVSSALIGLRNLVMPLRASNFHYHELKHIVFVGSIEYLKREWETLHNFPKVSILPGTPLSRADLRAVNINLCDMCVILSANQNNIDDTSLQDKECILASLNIKSMQFDDSIGVLQANSQGFTPPGMDRSSPDNSPVHGMLRQPSITTGVNIPIITELVNDTNVQFLDQDDDDDPDTELYLTQPFACGTAFAVSVLDSLMSATYFNDNILTLIRTLVTGGATPELEALIAEENALRGGYSTPQTLANRDRCRVAQLALLDGPFADLGDGGCYGDLFCKALKTYNMLCFGIYRLRDAHLSTPSQCTKRYVITNPPYEFELVPTDLIFCLMQFDHNAGQSRASLSHSSHSSQSSSKKSSSVHSIPSTANRQNRPKSRESRDKQKYVQEERL

SEQ ID NO: 30424 - protein, 1197 aa, Homo sapiens
  REGION 1..1197: note = ENSP00000491840
MANGGGGGGGSSGGGGGGGGSSLRMSSNIHANHLSLDASSSSSSSSSSSSSSSSSSSSSSVHEPKMDALIIPVTMEVPCDSRGQRMWWAFLASSMVTFFGGLFIILLWRTLKYLWTVCCHCGGKTKGRKPRLQGGVIGCMFHLQPREAQKSSSALEVHKKYGDSTGTTLEEAQKINNGSSQADGTLKPVDEKEEAVAAEVGWMTSVKDWAGVMISAQTLTGRVLVVLVFALSIGALVIYFIDSSNPIESCQNFYKDFTLQIDMAFNVFFLLYFGLRFIAANDKLWFWLEVNSVVDFFTVPPVFVSVYLNRSWLGLRFLRALRLIQFSEILQFLNILKTSNSIKLVNLLSIFISTWLTAAGFIHLVENSGDPWENFQNNQALTYWECVYLLMVTMSTVGYGDVYAKTTLGRLFMVFFILGGLAMFASYVPEIIELIGNRKKYGGSYSAVSGRKHIVVCGHITLESVSNFLKDFLHKDRDDVNVEIVFLHNISPNLELEALFKRHFTQVEFYQGSVLNPHDLARVKIESADACLILANKYCADPDAEDASNIMRVISIKNYHPKIRIITQMLQYHNKAHLLNIPSWNWKEGDDAICLAELKLGFIAQSCLAQGLSTMLANLFSMRSFIKIEEDTWQKYYLEGVSNEMYTEYLSSAFVGLSFPTVCELCFVKLKLLMIAIEYKSANRESRILINPGNHLKIQEGTLGFFIASDAKEVKRAFFYCKACHDDITDPKRIKKCGCKRLEDEQPSTLSPKKKQRNGGMRNSPNTSPKLMRHDPLLIPGNDQIDNMDSNVKKYDSTGMFHWCAPKEIEKVILTRSEAAMTVLSGHVVVCIFGDVSSALIGLRNLVMPLRASNFHYHELKHIVFVGSIEYLKREWETLHNFPKVSILPGTPLSRADLRAVNINLCDMCVILSANQNNIDDTSLQDKECILASLNIKSMQFDDSIGVLQANSQGFTPPGMDRSSPDNSPVHGMLRQPSITTGVNIPIITELVNDTNVQFLDQDDDDDPDTELYLTQPFACGTAFAVSVLDSLMSATYFNDNILTLIRTLVTGGATPELEALIAEENALRGGYSTPQTLANRDRCRVAQLALLDGPFADLGDGGCYGDLFCKALKTYNMLCFGIYRLRDAHLSTPSQCTKRYVITNPPYEFELVPTDLIFCLMQFDHNAGQSRASLSHSSHSSQSSSKKSSSVHSIPS

SEQ ID NO: 30425 - protein, 964 aa, Homo sapiens
  REGION 1..964: note = ENSP00000492153
  VARIANT 1: note = Any amino acid
XAQKINNGSSQADGTLKPVDEKEEAVAAEVGWMTSVKDWAGVMISAQTLTGRVLVVLVFALSIGALVIYFIDSSNPIESCQNFYKDFTLQIDMAFNVFFLLYFGLRFIAANDKLWFWLEVNSVVDFFTVPPVFVSVYLNRSWLGLRFLRALRLIQFSEILQFLNILKTSNSIKLVNLLSIFISTWLTAAGFIHLVENSGDPWENFQNNQALTYWECVYLLMVTMSTVGYGDVYAKTTLGRLFMVFFILGGLAMFASYVPEIIELIGNRKKYGGSYSAVSGRKHIVVCGHITLESVSNFLKDFLHKDRDDVNVEIVFLHKVISIKNYHPKIRIITQMLQYHNKAHLLNIPSWNWKEGDDAICLAELKLGFIAQSCLAQGLSTMLANLFSMRSFIKIEEDTWQKYYLEGVSNEMYTEYLSSAFVGLSFPTVCELCFVKLKLLMIAIEYKSANRESRILINPGNHLKIQEGTLGFFIASDAKEVKRAFFYCKACHDDITDPKRIKKCGCKRLEDEQPSTLSPKKKQRNGGMRNSPNTSPKLMRHDPLLIPGNDQIDNMDSNVKKYDSTGMFHWCAPKEIEKVILTRSEAAMTVLSGHVVVCIFGDVSSALIGLRNLVMPLRASNFHYHELKHIVFVGSIEYLKREWETLHNFPKVSILPGTPLSRADLRAVNINLCDMCVILSANQNNIDDTSLQDKECILASLNIKSMQFDDSIGVLQANSQGFTPPGMDRSSPDNSPVHGMLRQPSITTGVNIPIITELVNDTNVQFLDQDDDDDPDTELYLTQPFACGTAFAVSVLDSLMSATYFNDNILTLIRTLVTGGATPELEALIAEENALRGGYSTPQTLANRDRCRVAQLALLDGPFADLGDGGCYGDLFCKALKTYNMLCFGIYRLRDAHLSTPSQCTKRYVITNPPYEFELVPTDLIFCLMQFDHNAGQSRASLSHSSHSSQSSSKKSSSVHSIPS

SEQ ID NO: 30426 - protein, 1161 aa, Homo sapiens
  REGION 1..1161: note = ENSP00000491173
  VARIANT 1: note = Any amino acid
XSSNIHANHLSLDASSSSSSSSSSSSSSSSSSSSSSVHEPKMDALIIPVTMEVPCDSRGQRMWWAFLASSMVTFFGGLFIILLWRTLKYLWTVCCHCGGKTKEAQKINNGSSQADGTLKPVDEKEEAVAAEVGWMTSVKDWAGVMISAQTLTGRVLVVLVFALSIGALVIYFIDSSNPIESCQNFYKDFTLQIDMAFNVFFLLYFGLRFIAANDKLWFWLEVNSVVDFFTVPPVFVSVYLNRSWLGLRFLRALRLIQFSEILQFLNILKTSNSIKLVNLLSIFISTWLTAAGFIHLVENSGDPWENFQNNQALTYWECVYLLMVTMSTVGYGDVYAKTTLGRLFMVFFILGGLAMFASYVPEIIELIGNRKKYGGSYSAVSGRKHIVVCGHITLESVSNFLKDFLHKDRDDVNVEIVFLHNISPNLELEALFKRHFTQVEFYQGSVLNPHDLARVKIESADACLILANKYCADPDAEDASNIMRVISIKNYHPKIRIITQMLQYHNKAHLLNIPSWNWKEGDDAICLAELKLGFIAQSCLAQGLSTMLANLFSMRSFIKIEEDTWQKYYLEGVSNEMYTEYLSSAFVGLSFPTVCELCFVKLKLLMIAIEYKSANRESRILINPGNHLKIQEGTLGFFIASDAKEVKRAFFYCKACHDDITDPKRIKKCGCKRLIYFKVAARSRYSKDPFEFKKETPNSRLVTEPVEDEQPSTLSPKKKQRNGGMRNSPNTSPKLMRHDPLLIPGNDQIDNMDSNVKKYDSTGMFHWCAPKEIEKVILTRSEAAMTVLSGHVVVCIFGDVSSALIGLRNLVMPLRASNFHYHELKHIVFVGSIEYLKREWETLHNFPKVSILPGTPLSRADLRAVNINLCDMCVILSANQNNIDDTSLQDKECILASLNIKSMQFDDSIGVLQANSQGFTPPGMDRSSPDNSPVHGMLRQPSITTGVNIPIITELVNDTNVQFLDQDDDDDPDTELYLTQPFACGTAFAVSVLDSLMSATYFNDNILTLIRTLVTGGATPELEALIAEENALRGGYSTPQTLANRDRCRVAQLALLDGPFADLGDGGCYGDLFCKALKTYNMLCFGIYRLRDAHLSTPSQCTKRYVITNPPYEFELVPTDLIFCLMQFDHNAGQSRASLSHSSHSSQSSSKKSSSVHSIPS

SEQ ID NO: 30427 - protein, 459 aa, Homo sapiens
  REGION 1..459: note = ENSP00000490881
MIPSKILVYRHPSSRTGTELYRPGRRRKKSLGDLFHNGYRVKSGPAAPEKEEPPNFRQSLVSCCGVCASWGLRFLRALRLIQFSEILQFLNILKTSNSIKLVNLLSIFISTWLTAAGFIHLVENSGDPWENFQNNQALTYWECVYLLMVTMSTVGYGDVYAKTTLGRLFMVFFILGGLAMFASYVPEIIELIGNRKKYGGSYSAVSGRKHIVVCGHITLESVSNFLKDFLHKDRDDVNVEIVFLHNISPNLELEALFKRHFTQVEFYQGSVLNPHDLARVKIESADACLILANKYCADPDAEDASNIMRVISIKNYHPKIRIITQMLQYHNKIEEDTWQKYYLEGVSNEMYTEYLSSAFVGLSFPTVCELCFVKLKLLMIAIEYKSANRESRILINPGNHLKIQEGTLGFFIASDAKEVKRAFFYCKACHDDITDPKRIKKCGCKRLIYFEDEQPSTLS

SEQ ID NO: 30428 - protein, 100 aa, Homo sapiens
  REGION 1..100: note = ENSP00000491045
  VARIANT 1: note = Any amino acid
XEGTLGFFIASDAKEVKRAFFYCKACHDDITDPKRIKKCGCKRLKVAARSRYSKDPFEFKKETPNSRLVTEPGEGRLGPIPIFNNYPAALNILLYHAELS

SEQ ID NO: 30429 - protein, 208 aa, Homo sapiens
  REGION 1..208: note = ENSP00000388370
  VARIANT 1: note = Any amino acid
XVISIKNYHPKIRIITQMLQYHNKAHLLNIPSWNWKEGDDAICLAELKLGFIAQSCLAQGLSTMLANLFSMRSFIKIEEDTWQKYYLEGVSNEMYTEYLSSAFVGLSFPTVCELCFVKLKLLMIAIEYKSANRESRILINPGNHLKIQEGTLGFFIASDAKEVKRAFFYCKACHDDITDPKRIKKCGCKRRQWPVLRILILTASTTRQ

SEQ ID NO: 30430 - protein, 383 aa, Homo sapiens
  REGION 1..383: note = ENSP00000492837
  VARIANT 1: note = Any amino acid
XIILLWRTLKYLWTVCCHCGGKTKEAQKINNGSSQADGTLKPVDEKEEAVAAEVGWMTSVKDWAGVMISAQTLTGRVLVVLVFALSIGALVIYFIDSSNPIESCQNFYKDFTLQIDMAFNVFFLLYFGLRFIAANDKLWFWLEVNSVVDFFTVPPVFVSVYLNRSWLGLRFLRALRLIQFSEILQFLNILKTSNSIKLVNLLSIFISTWLTAAGFIHLVENSGDPWENFQNNQALTYWECVYLLMVTMSTVGYGDVYAKTTLGRLFMVFFILGGLAMFASYVPEIIELIGNRKKYGGSYSAVSGRKHIVVCGHITLESVSNFLKDFLHKDRDDVNVEIVFLHKLRKTHGRNTTWKESQMKCTQNISPVPSWVCPSLLFVSCVL

SEQ ID NO: 30431 - protein, 99 aa, Homo sapiens
  REGION 1..99: note = ENSP00000491313
EAQKINNGSSQADGTLKPVDEKEEAVAAEVGWMTSVKDWAGVMISAQTLTGRVLVVLVFALSIGALVIYFIDSSKGVLTCRGVQTLPTSMLRLRKEVWA

SEQ ID NO: 30432 - protein, 190 aa, Homo sapiens
  REGION 1..190: note = ENSP00000492854
MRVISIKNYHPKIRIITQMLQYHNKAHLLNIPSWNWKEGDDAICLAELKLGFIAQSCLAQGLSTMLANLFSMRSFIKIEEDTWQKYYLEGVSNEMYTEYLSSAFVGLSFPTVCELCFVKLKLLMIAIEYKSANRESRILINPGNHLKIQEGTLGFFIASDAKEVKRPPQLCLPLAAQKRCFQSDKLDIFI

SEQ ID NO: 30433 - protein, 78 aa, Homo sapiens
  REGION 1..78: note = ENSP00000492740
SSSSSSSVHEPKMDALIIPVTMEVPCDSRGQRMWWAFLASSMVTFFGGLFIILLWRTLKYLWTVCCHCGGKTKSGTYI

SEQ ID NO: 30434 - protein, 584 aa, Homo sapiens
  REGION 1..584: note = ENSP00000492236
MANGGGGGGGSSGGGGGGGGSSLRMSSNIHANHLSLDASSSSSSSSSSSSSSSSSSSSSSVHEPKMDALIIPVTMEVPCDSRGQRMWWAFLASSMVTFFGGLFIILLWRTLKYLWTVCCHCGGKTKEAQKINNGSSQADGTLKPVDEKEEAVAAEVGWMTSVKDWAGVMISAQTLTGRVLVVLVFALSIGALVIYFIDSSNPIESCQNFYKDFTLQIDMAFNVFFLLYFGLRFIAANDKLWFWLEVNSVVDFFTVPPVFVSVYLNRSWLGLRFLRALRLIQFSEILQFLNILKTSNSIKLVNLLSIFISTWLTAAGFIHLVENSGDPWENFQNNQALTYWECVYLLMVTMSTVGYGDVYAKTTLGRLFMVFFILGGLAMFASYVPEIIELIGNRKKYGGSYSAVSGRKHIVVCGHITLESVSNFLKDFLHKDRDDVNVEIVFLHNISPNLELEALFKRHFTQVEFYQGSVLNPHDLARVKIESADACLILANKYCADPDAEDASNIMRVISIKNYHPKIRIITQMLQYHNKAHLLNIPSWNWKEGDDAICLAELKLGFIAQSCLAQGLSTMLANLFSMRSFIKL

SEQ ID NO: 30435 - protein, 91 aa, Homo sapiens
  REGION 1..91: note = ENSP00000492283
  VARIANT 1: note = Any amino acid
XVISIKNYHPKIRIITQMLQYHNKAHLLNIPSWNWKEGDDAICLAELKLGFIAQSCLAQGLSTMLANLFSMRSFIKVSSLIQAALILHGWN

SEQ ID NO: 30436 - protein, 30 aa, Homo sapiens
  REGION 1..30: note = ENSP00000491374
MRVISIKNYHPKIRIITQMLQYHNKAHLLN

SEQ ID NO: 30437 - protein, 168 aa, Homo sapiens
  REGION 1..168: note = ENSP00000474686
MANGGGGGGGSSGGGGGGGGSSLRMSSNIHANHLSLDASSSSSSSSSSSSSSSSSSSSSSVHEPKMDALIIPVTMEVPCDSRGQRMWWAFLASSMVTFFGGLFIILLWRTLKYLWTVCCHCGGKTKATHFGSPEMPPAARSWSGSPPEAAVLRGASSLALEVARCRRL

SEQ ID NO: 30438 - protein, 213 aa, Homo sapiens
  REGION 1..213: note = ENSP00000482747
MANGGGGGGGSSGGGGGGGGSSLRMSSNIHANHLSLDASSSSSSSSSSSSSSSSSSSSSSVHEPKMDALIIPVTMEVPCDSRGQRMWWAFLASSMVTFFGGLFIILLWRTLKYLWTVCCHCGGKTKGCWRLRLGPGSGTHRLGCRGAGWGQPTQRGRRKLGAAGCVFCTAHLPGLGSWRWARGSTSAHTLGTCWGDEFVGSERREKSFGQGRE

SEQ ID NO: 30439 - protein, 128 aa, Homo sapiens
  REGION 1..128: note = ENSP00000475086
MANGGGGGGGSSGGGGGGGGSSLRMSSNIHANHLSLDASSSSSSSSSSSSSSSSSSSSSSVHEPKMDALIIPVTMEVPCDSRGQRMWWAFLASSMVTFFGGLFIILLWRTLKYLWTVCCHCGGKTKVL

SEQ ID NO: 30440 - protein, 1040 aa, Homo sapiens
  REGION 1..1040: note = ENSP00000385552
MISAQTLTGRVLVVLVFALSIGALVIYFIDSSNPIESCQNFYKDFTLQIDMAFNVFFLLYFGLRFIAANDKLWFWLEVNSVVDFFTVPPVFVSVYLNRSWLGLRFLRALRLIQFSEILQFLNILKTSNSIKLVNLLSIFISTWLTAAGFIHLVENSGDPWENFQNNQALTYWECVYLLMVTMSTVGYGDVYAKTTLGRLFMVFFILGGLAMFASYVPEIIELIGNRKKYGGSYSAVSGRKHIVVCGHITLESVSNFLKDFLHKDRDDVNVEIVFLHNISPNLELEALFKRHFTQVEFYQGSVLNPHDLARVKIESADACLILANKYCADPDAEDASNIMRVISIKNYHPKIRIITQMLQYHNKAHLLNIPSWNWKEGDDAICLAELKLGFIAQSCLAQGLSTMLANLFSMRSFIKIEEDTWQKYYLEGVSNEMYTEYLSSAFVGLSFPTVCELCFVKLKLLMIAIEYKSANRESRILINPGNHLKIQEGTLGFFIASDAKEVKRAFFYCKACHDDITDPKRIKKCGCKRLIYFEDEQPSTLSPKKKQRNGGMRNSPNTSPKLMRHDPLLIPGNDQIDNMDSNVKKYDSTGMFHWCAPKEIEKVILTRSEAAMTVLSGHVVVCIFGDVSSALIGLRNLVMPLRASNFHYHELKHIVFVGSIEYLKREWETLHNFPKVSILPGTPLSRADLRAVNINLCDMCVILSANQNNIDDTSLQDKECILASLNIKSMQFDDSIGVLQANSQGFTPPGMDRSSPDNSPVHGMLRQPSITTGVNIPIITELAKPGKLPLVSVNQEKNSGTHILMITELVNDTNVQFLDQDDDDDPDTELYLTQPFACGTAFAVSVLDSLMSATYFNDNILTLIRTLVTGGATPELEALIAEENALRGGYSTPQTLANRDRCRVAQLALLDGPFADLGDGGCYGDLFCKALKTYNMLCFGIYRLRDAHLSTPSQCTKRYVITNPPYEFELVPTDLIFCLMQFDHNAGQSRASLSHSSHSSQSSSKKSSSVHSIPSTANRQNRPKSRESRDKQKYVQEERL

SEQ ID NO: 30441 - protein, 1071 aa, Homo sapiens
  REGION 1..1071: note = ENSP00000346321
MISAQTLTGRVLVVLVFALSIGALVIYFIDSSNPIESCQNFYKDFTLQIDMAFNVFFLLYFGLRFIAANDKLWFWLEVNSVVDFFTVPPVFVSVYLNRSWLGLRFLRALRLIQFSEILQFLNILKTSNSIKLVNLLSIFISTWLTAAGFIHLVENSGDPWENFQNNQALTYWECVYLLMVTMSTVGYGDVYAKTTLGRLFMVFFILGGLAMFASYVPEIIELIGNRKKYGGSYSAVSGRKHIVVCGHITLESVSNFLKDFLHKDRDDVNVEIVFLHNISPNLELEALFKRHFTQVEFYQGSVLNPHDLARVKIESADACLILANKYCADPDAEDASNIMRVISIKNYHPKIRIITQMLQYHNKAHLLNIPSWNWKEGDDAICLAELKLGFIAQSCLAQGLSTMLANLFSMRSFIKIEEDTWQKYYLEGVSNEMYTEYLSSAFVGLSFPTVCELCFVKLKLLMIAIEYKSANRESRILINPGNHLKIQEGTLGFFIASDAKEVKRAFFYCKACHDDITDPKRIKKCGCKRRWEEHCSLWRLESKGNVRRLNYCRGQQTFSVKVKVAARSRYSKDPFEFKKETPNSRLVTEPVEDEQPSTLSPKKKQRNGGMRNSPNTSPKLMRHDPLLIPGNDQIDNMDSNVKKYDSTGMFHWCAPKEIEKVILTRSEAAMTVLSGHVVVCIFGDVSSALIGLRNLVMPLRASNFHYHELKHIVFVGSIEYLKREWETLHNFPKVSILPGTPLSRADLRAVNINLCDMCVILSANQNNIDDTSLQDKECILASLNIKSMQFDDSIGVLQANSQGFTPPGMDRSSPDNSPVHGMLRQPSITTGVNIPIITELVNDTNVQFLDQDDDDDPDTELYLTQPFACGTAFAVSVLDSLMSATYFNDNILTLIRTLVTGGATPELEALIAEENALRGGYSTPQTLANRDRCRVAQLALLDGPFADLGDGGCYGDLFCKALKTYNMLCFGIYRLRDAHLSTPSQCTKRYVITNPPYEFELVPTDLIFCLMQFDHNAGQSRASLSHSSHSSQSSSKKSSSVHSIPSTANRQNRPKSRESRDKQKYVQEERL

SEQ ID NO: 30442 - protein, 731 aa, Homo sapiens
  REGION 1..731: note = ENSP00000271915
MDTSGHFHDSGVGDLDEDPKCPCPSSGDEQQQQQQQQQQQQPPPPAPPAAPQQPLGPSLQPQPPQLQQQQQQQQQQQQQQPPHPLSQLAQLQSQPVHPGLLHSSPTAFRAPPSSNSTAILHPSSRQGSQLNLNDHLLGHSPSSTATSGPGGGSRHRQASPLVHRRDSNPFTEIAMSSCKYSGGVMKPLSRLSASRRNLIEAETEGQPLQLFSPSNPPEIVISSREDNHAHQTLLHHPNATHNHQHAGTTASSTTFPKANKRKNQNIGYKLGHRRALFEKRKRLSDYALIFGMFGIVVMVIETELSWGLYSKDSMFSLALKCLISLSTIILLGLIIAYHTREVQLFVIDNGADDWRIAMTYERILYISLEMLVCAIHPIPGEYKFFWTARLAFSYTPSRAEADVDIILSIPMFLRLYLIARVMLLHSKLFTDASSRSIGALNKINFNTRFVMKTLMTICPGTVLLVFSISLWIIAAWTVRVCERYHDQQDVTSNFLGAMWLISITFLSIGYGDMVPHTYCGKGVCLLTGIMGAGCTALVVAVVARKLELTKAEKHVHNFMMDTQLTKRIKNAAANVLRETWLIYKHTKLLKKIDHAKVRKHQRKFLQAIHQLRSVKMEQRKLSDQANTLVDLSKMQNVMYDLITELNDRSEDLEKQIGSLESKLEHLTASFNSLPLLIADTLRQQQQQLLSAIIEARGVSVAVGTTHTPISDSPIGVSSTSFPTPYTSSSSC

SEQ ID NO: 30443 - protein, 426 aa, Homo sapiens
  REGION 1..426: note = ENSP00000354764
MERPIKDSMFSLALKCLISLSTIILLGLIIAYHTREVQLFVIDNGADDWRIAMTYERILYISLEMLVCAIHPIPGEYKFFWTARLAFSYTPSRAEADVDIILSIPMFLRLYLIARVMLLHSKLFTDASSRSIGALNKINFNTRFVMKTLMTICPGTVLLVFSISLWIIAAWTVRVCERYHDQQDVTSNFLGAMWLISITFLSIGYGDMVPHTYCGKGVCLLTGIMGAGCTALVVAVVARKLELTKAEKHVHNFMMDTQLTKRIKNAAANVLRETWLIYKHTKLLKKIDHAKVRKHQRKFLQAIHQLRSVKMEQRKLSDQANTLVDLSKMQNVMYDLITELNDRSEDLEKQIGSLESKLEHLTASFNSLPLLIADTLRQQQQQLLSAIIEARGVSVAVGTTHTPISDSPIGVSSTSFPTPYTSSSSC

SEQ ID NO: 30444 - protein, 418 aa, Homo sapiens
  REGION 1..418: note = ENSP00000351295
MFSLALKCLISLSTIILLGLIIAYHTREVQLFVIDNGADDWRIAMTYERILYISLEMLVCAIHPIPGEYKFFWTARLAFSYTPSRAEADVDIILSIPMFLRLYLIARVMLLHSKLFTDASSRSIGALNKINFNTRFVMKTLMTICPGTVLLVFSISLWIIAAWTVRVCERYHDQQDVTSNFLGAMWLISITFLSIGYGDMVPHTYCGKGVCLLTGIMGAGCTALVVAVVARKLELTKAEKHVHNFMMDTQLTKRIKNAAANVLRETWLIYKHTKLLKKIDHAKVRKHQRKFLQAIHQLRSVKMEQRKLSDQANTLVDLSKMQNVMYDLITELNDRSEDLEKQIGSLESKLEHLTASFNSLPLLIADTLRQQQQQLLSAIIEARGVSVAVGTTHTPISDSPIGVSSTSFPTPYTSSSSC

SEQ ID NO: 30445 - protein, 746 aa, Homo sapiens
  REGION 1..746: note = ENSP00000481848
MDTSGHFHDSGVGDLDEDPKCPCPSSGDEQQQQQQQQQQQQPPPPAPPAAPQQPLGPSLQPQPPQLQQQQQQQQQQQQQQPPHPLSQLAQLQSQPVHPGLLHSSPTAFRAPPSSNSTAILHPSSRQGSQLNLNDHLLGHSPSSTATSGPGGGSRHRQASPLVHRRDSNPFTEIAMSSCKYSGGVMKPLSRLSASRRNLIEAETEGQPLQLFSPSNPPEIVISSREDNHAHQTLLHHPNATHNHQHAGTTASSTTFPKANKRKNQNIGYKLGHRRALFEKRKRLSDYALIFGMFGIVVMVIETELSWGLYSKDSMFSLALKCLISLSTIILLGLIIAYHTREVQLFVIDNGADDWRIAMTYERILYISLEMLVCAIHPIPGEYKFFWTARLAFSYTPSRAEADVDIILSIPMFLRLYLIARVMLLHSKLFTDASSRSIGALNKINFNTRFVMKTLMTICPGTVLLVFSISLWIIAAWTVRVCESPESPAQPSGSSLPAWYHDQQDVTSNFLGAMWLISITFLSIGYGDMVPHTYCGKGVCLLTGIMGAGCTALVVAVVARKLELTKAEKHVHNFMMDTQLTKRIKNAAANVLRETWLIYKHTKLLKKIDHAKVRKHQRKFLQAIHQLRSVKMEQRKLSDQANTLVDLSKMQNVMYDLITELNDRSEDLEKQIGSLESKLEHLTASFNSLPLLIADTLRQQQQQLLSAIIEARGVSVAVGTTHTPISDSPIGVSSTSFPTPYTSSSSC

SEQ ID NO: 30446 - protein, 872 aa, Homo sapiens
  REGION 1..872: note = ENSP00000373648
MGLKARRAAGAAGGGGDGGGGGGGAANPAGGDAAAAGDEERKVGLAPGDVEQVTLALGAGADKDGTLLLEGGGRDEGQRRTPQGIGLLAKTPLSRPVKRNNAKYRRIQTLIYDALERPRGWALLYHALVFLIVLGCLILAVLTTFKEYETVSGDWLLLLETFAIFIFGAEFALRIWAAGCCCRYKGWRGRLKFARKPLCMLDIFVLIASVPVVAVGNQGNVLATSLRSLRFLQILRMLRMDRRGGTWKLLGSAICAHSKELITAWYIGFLTLILSSFLVYLVEKDVPEVDAQGEEMKEEFETYADALWWGLITLATIGYGDKTPKTWEGRLIAATFSLIGVSFFALPAGILGSGLALKVQEQHRQKHFEKRRKPAAELIQAAWRYYATNPNRIDLVATWRFYESVVSFPFFRKEQLEAASSQKLGLLDRVRLSNPRGSNTKGKLFTPLNVDAIEESPSKEPKPVGLNNKERFRTAFRMKAYAFWQSSEDAGTGDPMAEDRGYGNDFPIEDMIPTLKAAIRAVRILQFRLYKKKFKETLRPYDVKDVIEQYSAGHLDMLSRIKYLQTRIDMIFTPGPPSTPKHKKSQKGSAFTFPSQQSPRNEPYVARPSTSEIEDQSMMGKFVKVERQVQDMGKKLDFLVDMHMQHMERLQVQVTEYYPTKGTSSPAEAEKKEDNRYSDLKTIICNYSETGPPEPPYSFHQVTIDKVSPYGFFAHDPVNLPRGGPSSGKVQATPPSSATTYVERPTVLPILTLLDSRVSCHSQADLQGPYSDRISPRQRRSITRDSDTPLSLMSVNHEELERSPSGFSISQDRDDYVFGPNGGSSWMREKRYLAEGETDTDTDPFTPSGSMPLSSTGDGISDSVWTPSNKPI

SEQ ID NO: 30447 - protein, 319 aa, Homo sapiens
  REGION 1..319: note = ENSP00000491165
MVAQAWRTSMRKQREEACFRFLIVLGCLILAVLTTFKEYETVSGDWLLLLETFAIFIFGAEFALRIWAAGCCCRYKGWRGRLKFARKPLCMLDIFVLIASVPVVAVGNQGNVLATSLRSLRFLQILRMLRMDRRGGTWKLLGSAICAHSKELITAWYIGFLTLILSSFLVYLVEKDVPEVDAQGEEMKEEFETYADALWWGLITLATIGYGDKTPKTWEGRLIAATFSLIGVSFFALPAGILGSGLALKVQEQHRQKHFEKRRKPAAELIQAAWRYYATNPNRIDLVATWRFYESVVSFPFFRKEQLEAASRCHRRKSF

SEQ ID NO: 30448 - protein, 752 aa, Homo sapiens
  REGION 1..752: note = ENSP00000429799
MKPAEHATMFLIVLGCLILAVLTTFKEYETVSGDWLLLLETFAIFIFGAEFALRIWAAGCCCRYKGWRGRLKFARKPLCMLDIFVLIASVPVVAVGNQGNVLATSLRSLRFLQILRMLRMDRRGGTWKLLGSAICAHSKELITAWYIGFLTLILSSFLVYLVEKDVPEVDAQGEEMKEEFETYADALWWGLITLATIGYGDKTPKTWEGRLIAATFSLIGVSFFALPAGILGSGLALKVQEQHRQKHFEKRRKPAAELIQAAWRYYATNPNRIDLVATWRFYESVVSFPFFRKEQLEAASSQKLGLLDRVRLSNPRGSNTKGKLFTPLNVDAIEESPSKEPKPVGLNNKERFRTAFRMKAYAFWQSSEDAGTGDPMAEDRGYGNDFPIEDMIPTLKAAIRAVRILQFRLYKKKFKETLRPYDVKDVIEQYSAGHLDMLSRIKYLQTRIDMIFTPGPPSTPKHKKSQKGSAFTFPSQQSPRNEPYVARPSTSEIEDQSMMGKFVKVERQVQDMGKKLDFLVDMHMQHMERLQVQVTEYYPTKGTSSPAEAEKKEDNRYSDLKTIICNYSETGPPEPPYSFHQVTIDKVSPYGFFAHDPVNLPRGGPSSGKVQATPPSSATTYVERPTVLPILTLLDSRVSCHSQADLQGPYSDRISPRQRRSITRDSDTPLSLMSVNHEELERSPSGFSISQDRDDYVFGPNGGSSWMREKRYLAEGETDTDTDPFTPSGSMPLSSTGDGISDSVWTPSNKPI

SEQ ID NO: 30449 - protein, 860 aa, Homo sapiens
  REGION 1..860: note = ENSP00000428790
MGLKARRAAGAAGGGGDGGGGGGGAANPAGGDAAAAGDEERKVGLAPGDVEQVTLALGAGADKDGTLLLEGGGRDEGQRRTPQGIGLLAKTPLSRPVKRNNAKYRRIQTLIYDALERPRGWALLYHALVFLIVLGCLILAVLTTFKEYETVSGDWLLLLETFAIFIFGAEFALRIWAAGCCCRYKGWRGRLKFARKPLCMLDIFVLIASVPVVAVGNQGNVLATSLRSLRFLQILRMLRMDRRGGTWKLLGSAICAHSKELITAWYIGFLTLILSSFLVYLVEKDVPEVDAQGEEMKEEFETYADALWWGLITLATIGYGDKTPKTWEGRLIAATFSLIGVSFFALPAGILGSGLALKVQEQHRQKHFEKRRKPAAELIQAAWRYYATNPNRIDLVATWRFYESVVSFPFFRKEQLEAASSQKLGLLDRVRLSNPRGSNTKGKLFTPLNVDAIEESPSKEPKPVGLNNKERFRTAFRMKAYAFWQSSEDAGTGDPMAEDRGYGNDFPIEDMIPTLKAAIRAVRILQFRLYKKKFKETLRPYDVKDVIEQYSAGHLDMLSRIKYLQTRIDMIFTPGPPSTPKHKKSQKGNEPYVARPSTSEIEDQSMMGKFVKVERQVQDMGKKLDFLVDMHMQHMERLQVQVTEYYPTKGTSSPAEAEKKEDNRYSDLKTIICNYSETGPPEPPYSFHQVTIDKVSPYGFFAHDPVNLPRGGPSSGKVQATPPSSATTYVERPTVLPILTLLDSRVSCHSQADLQGPYSDRISPRQRRSITRDSDTPLSLMSVNHEELERSPSGFSISQDRDDYVFGPNGGSSWMREKRYLAEGETDTDTDPFTPSGSMPLSSTGDGISDSVWTPSNKPI

SEQ ID NO: 30450 - protein, 716 aa, Homo sapiens
  REGION 1..716: note = ENSP00000491940
MVAQAWRTSMRKQREEACFRFLIVLGCLILAVLTTFKEYETVSGDWLLLLETFAIFIFGAEFALRIWAAGCCCRYKGWRGRLKFARKPLCMLDIFVLIASVPVVAVGNQGNVLATSLRSLRFLQILRMLRMDRRGGTWKLLGSAICAHSKELITAWYIGFLTLILSSFLVYLVEKDVPEVDAQGEEMKEEFETYADALWWGLITLATIGYGDKTPKTWEGRLIAATFSLIGVSFFALPAGILGSGLALKVQEQHRQKHFEKRRKPAAELIQAAWRYYATNPNRIDLVATWRFYESVVSFPFFRKEQLEAASSQKLGLLDRVRLSNPRGSNTKGKLFTPLNVDAIEESPSKEPKPVGLNNKERFRTAFRMKAYAFWQSSEDAGTGDPMAEDRGYGNDFPIEDMIPTLKAAIRAVRILQFRLYKKKFKETLRPYDVKDVIEQYSAGHLDMLSRIKYLQTRIDMIFTPGPPSTPKHKKSQKGSAFTFPSQQSPRNEPYVARPSTSEIEDQSMMGKFVKVERQVQDMGKKLDFLVDMHMQHMERLQVQVTEYYPTKGTSSPAEAEKKEDNRYSDLKTIICNYSETGPPEPPYSFHQVTIDKVSPYGFFAHDPVNLPRGGPSSGKVQATPPSSATTYVERPTVLPILTLLDSRVSCHSQADLQGPYSDRISPRQRRSITRDSDTPLSLMSVNHEELERSPSGFSISQDRDDYVFGPNGGSS

SEQ ID NO: 30451 - protein, 89 aa, Homo sapiens
  REGION 1..89: note = ENSP00000492691
  VARIANT 1: note = Any amino acid
XEGQRRTPQGIGLLAKTPLSRPVKRNNAKYRRIQTLIYDALERPRGWALLYHALVFLIVLGCLILAVLTTFKEYETVSGDWLLLLTSLC

SEQ ID NO: 30452 - protein, 751 aa, Homo sapiens [sequence omitted]

SEQ ID NO: 30453 - protein, 951 aa, Homo sapiens
  REGION 1..951: note = ENSP00000345055
MPRHHAGGEEGGAAGLWVKSGAAAAAAGGGRLGSGMKDVESGRGRVLLNSAAARGDGLLLLGTRAATLGGGGGGLRESRRGKQGARMSLLGKPLSYTSSQSCRRNVKYRRVQNYLYNVLERPRGWAFIYHAFVFLLVFGCLILSVFSTIPEHTKLASSCLLILEFVMIVVFGLEFIIRIWSAGCCCRYRGWQGRLRFARKPFCVIDTIVLIASIAVVSAKTQGNIFATSALRSLRFLQILRMVRMDRRGGTWKLLGSVVYAHSKELITAWYIGFLVLIFSSFLVYLVEKDANKEFSTYADALWWGTITLTTIGYGDKTPLTWLGRLLSAGFALLGISFFALPAGILGSGFALKVQEQHRQKHFEKRRNPAANLIQCVWRSYAADEKSVSIATWKPHLKALHTCSPTKKEQGEASSSKFCSNKQKLFRMYTSRKQSQKLSFKERVRMASPRGQSIKSRQASVGDRRSPSTDITAEGSPTKVQKSWSFNDRTRFRPSLRLKSSQPKPVIDADTALGTDDVYDEKGCQCDVSVEDLTPPLKTVIRAIRIMKFHVAKRKFKETLRPYDVKDVIEQYSAGHLDMLCRIKSLQTRVDQILGKGQITSDKKSREKITAEHETTDDLSMLGRVVKVEKQVQSIESKLDCLLDIYQQVLRKGSASALALASFQIPPFECEQTSDYQSPVDSKDLSGSAQNSGCLSRSTSANISRGLQFILTPNEFSAQTFYALSPTMHSQATQVPISQSDGSAVAATNTIANQINTAPKPAAPTTLQIPPPLPAIKHLPRPETLHPNPAGLQESISDVTTCLVASKENVQVAQSNLTKDRSMRKSFDMGGETLLSVCPMVPKDLGKSLSVQNLIRSTEELNIQLSGSESSGSRGSQDFYPKWRESKLFITDEEVGPEETETDTFDAAPQPAREAAFASDSLRTGRSRSSQSICKAGESTDALSLPHVKLK

SEQ ID NO: 30454 - protein, 822 aa, Homo sapiens
  REGION 1..822: note = ENSP00000486187
MPRHHAGGEEGGAAGLWVKSGAAAAAAGGGRLGSGMKDVESGRGRVLLNSAAARGDGLLLLGTRAATLGGGGGGLRESRRGKQGARMSLLGKPLSYTSSQSCRRNVKYRRVQNYLYNVLERPRGWAFIYHAFVFLLVFGCLILSVFSTIPEHTKLASSCLLILEFVMIVVFGLEFIIRIWSAGCCCRYRGWQGRLRFARKPFCVIDTIVLIASIAVVSAKTQGNIFATSALRSLRFLQILRMVRMDRRGGTWKLLGSVVYAHSKELITAWYIGFLVLIFSSFLVYLVEKDANKEFSTYADALWWGTITLTTIGYGDKTPLTWLGRLLSAGFALLGISFFALPAGILGSGFALKVQEQHRQKHFEKRRNPAANLIQCVWRSYAADEKSVSIATWKPHLKALHTCSPTKKEQGEASSRIMKFHVAKRKFKETLRPYDVKDVIEQYSAGHLDMLCRIKSLQTRVDQILGKGQITSDKKSREKITAEHETTDDLSMLGRVVKVEKQVQSIESKLDCLLDIYQQVLRKGSASALALASFQIPPFECEQTSDYQSPVDSKDLSGSAQNSGCLSRSTSANISRGLQFILTPNEFSAQTFYALSPTMHSQATQVPISQSDGSAVAATNTIANQINTAPKPAAPTTLQIPPPLPAIKHLPRPETLHPNPAGLQESISDVTTCLVASKENVQVAQSNLTKDRSMRKSFDMGGETLLSVCPMVPKDLGKSLSVQNLIRSTEELNIQLSGSESSGSRGSQDFYPKWRESKLFITDEEVGPEETETDTFDAAPQPAREAAFASDSLRTGRSRSSQSICKAGESTDALSLPHVKLK

SEQ ID NO: 30455 - protein, 932 aa, Homo sapiens
  REGION 1..932: note = ENSP00000359425
MPRHHAGGEEGGAAGLWVKSGAAAAAAGGGRLGSGMKDVESGRGRVLLNSAAARGDGLLLLGTRAATLGGGGGGLRESRRGKQGARMSLLGKPLSYTSSQSCRRNVKYRRVQNYLYNVLERPRGWAFIYHAFVFLLVFGCLILSVFSTIPEHTKLASSCLLILEFVMIVVFGLEFIIRIWSAGCCCRYRGWQGRLRFARKPFCVIDTIVLIASIAVVSAKTQGNIFATSALRSLRFLQILRMVRMDRRGGTWKLLGSVVYAHSKELITAWYIGFLVLIFSSFLVYLVEKDANKEFSTYADALWWGTITLTTIGYGDKTPLTWLGRLLSAGFALLGISFFALPAGILGSGFALKVQEQHRQKHFEKRRNPAANLIQCVWRSYAADEKSVSIATWKPHLKALHTCSPTKKEQGEASSSQKLSFKERVRMASPRGQSIKSRQASVGDRRSPSTDITAEGSPTKVQKSWSFNDRTRFRPSLRLKSSQPKPVIDADTALGTDDVYDEKGCQCDVSVEDLTPPLKTVIRAIRIMKFHVAKRKFKETLRPYDVKDVIEQYSAGHLDMLCRIKSLQTRVDQILGKGQITSDKKSREKITAEHETTDDLSMLGRVVKVEKQVQSIESKLDCLLDIYQQVLRKGSASALALASFQIPPFECEQTSDYQSPVDSKDLSGSAQNSGCLSRSTSANISRGLQFILTPNEFSAQTFYALSPTMHSQATQVPISQSDGSAVAATNTIANQINTAPKPAAPTTLQIPPPLPAIKHLPRPETLHPNPAGLQESISDVTTCLVASKENVQVAQSNLTKDRSMRKSFDMGGETLLSVCPMVPKDLGKSLSVQNLIRSTEELNIQLSGSESSGSRGSQDFYPKWRESKLFITDEEVGPEETETDTFDAAPQPAREAAFASDSLRTGRSRSSQSICKAGESTDALSLPHVKLK

SEQ ID NO: 30456 - protein, 427 aa, Homo sapiens
  REGION 1..427: note = ENSP00000359419
MPRHHAGGEEGGAAGLWVKSGAAAAAAGGGRLGSGMKDVESGRGRVLLNSAAARGDGLLLLGTRAATLGGGGGGLRESRRGKQGARMSLLGKPLSYTSSQSCRRNVKYRRVQNYLYNVLERPRGWAFIYHAFVFLLVFGCLILSVFSTIPEHTKLASSCLLILEFVMIVVFGLEFIIRIWSAGCCCRYRGWQGRLRFARKPFCVIDTIVLIASIAVVSAKTQGNIFATSALRSLRFLQILRMVRMDRRGGTWKLLGSVVYAHSKELITAWYIGFLVLIFSSFLVYLVEKDANKEFSTYADALWWGTITLTTIGYGDKTPLTWLGRLLSAGFALLGISFFALPAGILGSGFALKVQEQHRQKHFEKRRNPAANLIQCVWRSYAADEKSVSIATWKPHLKALHTCSPTKKEQGEASSRFVISLLLHVCL

SEQ ID NO: 30457 - protein, 923 aa, Homo sapiens
  REGION 1..923: note = ENSP00000485743
MPRHHAGGEEGGAAGLWVKSGAAAAAAGGGRLGSGMKDVESGRGRVLLNSAAARGDGLLLLGTRAATLGGGGGGLRESRRGKQGARMSLLGKPLSYTSSQSCRRNVKYRRVQNYLYNVLERPRGWAFIYHAFVFLLVFGCLILSVFSTIPEHTKLASSCLLILEFVMIVVFGLEFIIRIWSAGCCCRYRGWQGRLRFARKPFCVIDTIVLIASIAVVSAKTQGNIFATSALRSLRFLQILRMVRMDRRGGTWKLLGSVVYAHSKELITAWYIGFLVLIFSSFLVYLVEKDANKEFSTYADALWWGTITLTTIGYGDKTPLTWLGRLLSAGFALLGISFFALPAGILGSGFALKVQEQHRQKHFEKRRNPAANLIQCVWRSYAADEKSVSIATWKPHLKALHTCSPTNQKLSFKERVRMASPRGQSIKSRQASVGDRRSPSTDITAEGSPTKVQKSWSFNDRTRFRPSLRLKSSQPKPVIDADTALGTDDVYDEKGCQCDVSVEDLTPPLKTVIRAIRIMKFHVAKRKFKETLRPYDVKDVIEQYSAGHLDMLCRIKSLQTRVDQILGKGQITSDKKSREKITAEHETTDDLSMLGRVVKVEKQVQSIESKLDCLLDIYQQVLRKGSASALALASFQIPPFECEQTSDYQSPVDSKDLSGSAQNSGCLSRSTSANISRGLQFILTPNEFSAQTFYALSPTMHSQATQVPISQSDGSAVAATNTIANQINTAPKPAAPTTLQIPPPLPAIKHLPRPETLHPNPAGLQESISDVTTCLVASKENVQVAQSNLTKDRSMRKSFDMGGETLLSVCPMVPKDLGKSLSVQNLIRSTEELNIQLSGSESSGSRGSQDFYPKWRESKLFITDEEVGPEETETDTFDAAPQPAREAAFASDSLRTGRSRSSQSICKAGESTDALSLPHVKLK

SEQ ID NO: 30458 - protein, 68 aa, Homo sapiens
  REGION 1..68: note = ENSP00000414829
LEFVMIVVFGLEFIIRIWSAGCCCRYRGWQGRLRFARKPFCVIGEYQSLRYLDYDTNILVFYLLFCNI

SEQ ID NO: 30459 - protein, 90 aa, Homo sapiens
  REGION 1..90: note = ENSP00000391971
EFVMIVVFGLEFIIRIWSAGCCCRYRGWQGRLRFARKPFCVIGVRNCCVIFSVSSLTPVPYGGGRVDLRKKVYHHPWALLRRILYSILLS

SEQ ID NO: 30460 - protein, 97 aa, Homo sapiens
  REGION 1..97: note = ENSP00000388098
  VARIANT 1: note = Any amino acid
XHTCSPTNQKLSFKERVRMASPRGQSIKSRQASVGDRRSPSTDITAEGSPTKVQKSWSFNDRTRFRPSLRLKSSQPKPVIDDKGHIKINGTVILMYL

SEQ ID NO: 30461 - protein, 923 aa, Homo sapiens [sequence omitted]

SEQ ID NO: 30462 - protein, 822 aa, Homo sapiens [sequence omitted]

SEQ ID NO: 30463 - protein, 932 aa, Homo sapiens [sequence omitted]

SEQ ID NO: 30464 - protein, 942 aa, Homo sapiens [sequence omitted]

SEQ ID NO: 30465 - protein, 951 aa, Homo sapiens [sequence omitted]

SEQ ID NO: 30466 - protein, 1111 aa, Homo sapiens
  REGION 1..1111: note = ENSP00000356403
MVDLESEVPPLPPRYRFRDLLLGDQGWQNDDRVQVEFYMNENTFKERLKLFFIKNQRSSLRIRLFNFSLKLLSCLLYIIRVLLENPSQGNEWSHIFWVNRSLPLWGLQVSVALISLFETILLGYLSYKGNIWEQILRIPFILEIINAVPFIISIFWPSLRNLFVPVFLNCWLAKHALENMINDLHRAIQRTQSAMFNQVLILISTLLCLIFTCICGIQHLERIGKKLNLFDSLYFCIVTFSTVGFGDVTPETWSSKLFVVAMICVALVVLPIQFEQLAYLWMERQKSGGNYSRHRAQTEKHVVLCVSSLKIDLLMDFLNEFYAHPRLQDYYVVILCPTEMDVQVRRVLQIPMWSQRVIYLQGSALKDQDLLRAKMDDAEACFILSSRCEVDRTSSDHQTILRAWAVKDFAPNCPLYVQILKPENKFHIKFADHVVCEEEFKYAMLALNCICPATSTLITLLVHTSRGQEGQQSPEQWQKMYGRCSGNEVYHIVLEESTFFAEYEGKSFTYASFHAHKKFGVCLIGVRREDNKNILLNPGPRYIMNSTDICFYINITKEENSAFKNQDQQRKSNVSRSFYHGPSRLPVHSIIASMGTVAIDLQDTSCRSASGPTLSLPTEGSKEIRRPSIAPVLEVADTSSIQTCDLLSDQSEDETTPDEEMSSNLEYAKGYPPYSPYIGSSPTFCHLLHEKVPFCCLRLDKSCQHNYYEDAKAYGFKNKLIIVAAETAGNGLYNFIVPLRAYYRPKKELNPIVLLLDNPLDDLLRCGVTFAANMVVVDKESTMSAEEDYMADAKTIVNVQTLFRLFSSLSIITELTHPANMRFMQFRAKDCYSLALSKLEKKERERGSNLAFMFRLPFAAGRVFSISMLDTLLYQSFVKDYMISITRLLLGLDTTPGSGFLCSMKITADDLWIRTYARLYQKLCSSTGDVPIGIYRTESQKLTTSESQISISVEEWEDTKDSKEQGHHRSNHRNSTSSDQSDHPLLRRKSMQWARRLSRKGPKHSGKTAEKITQQRLNLYRRSERQELAELVKNRMKHLGLSTVGYDEMNDHQSTLSYILINPSPDTRIELNDVVYLIRPDPLAYLPNSEPSRRNSICNVTGQDSREETQL

SEQ ID NO: 30467 - protein, 1068 aa, Homo sapiens
  REGION 1..1068: note = ENSP00000476657
MVDLESEVPPLPPRYRFRDLLLGDQGWQNDDRVQVEFYMNENTFKERLKLFFIKNQRSSLRIRLFNFSLKLLSCLLYIIRVLLENPSQGNEWSHIFWVNRSLPLWGLQVSVALISLFETILLGYLSYKGNIWEQILRIPFILEIINAVPFIISIFWPSLRNLFVPVFLNCWLAKHALENMINDLHRAIQRTQSAMFNQVLILISTLLCLIFTCICGIQHLERIGKKLNLFDSLYFCIVTFSTVGFGDVTPETWSSKLFVVAMICVALVVLPIQFEQLAYLWMERQKSGGNYSRHRAQTEKHVVLCVSSLKIDLLMDFLNEFYAHPRLQDYYVVILCPTEMDVQVRRVLQIPMWSQRVIYLQGSALKDQDLLRAKMDDAEACFILSSRCEVDRTSSDHQTILRAWAVKDFAPNCPLYVQILKPENKFHIKFADHVVCEEEFKYAMLALNCICPATSTLITLLVHTSRGQFGVCLIGVRREDNKNILLNPGPRYIMNSTDICFYINITKEENSAFKNQDQQRKSNVSRSFYHGPSRLPVHSIIASMGTVAIDLQDTSCRSASGPTLSLPTEGSKEIRRPSIAPVLEVADTSSIQTCDLLSDQSEDETTPDEEMSSNLEYAKGYPPYSPYIGSSPTFCHLLHEKVPFCCLRLDKSCQHNYYEDAKAYGFKNKLIIVAAETAGNGLYNFIVPLRAYYRPKKELNPIVLLLDNPLDDLLRCGVTFAANMVVVDKESTMSAEEDYMADAKTIVNVQTLFRLFSSLSIITELTHPANMRFMQFRAKDCYSLALSKLEKKERERGSNLAFMFRLPFAAGRVFSISMLDTLLYQSFVKDYMISITRLLLGLDTTPGSGFLCSMKITADDLWIRTYARLYQKLCSSTGDVPIGIYRTESQKLTTSESRKIASQSQISISVEEWEDTKDSKEQGHHRSNHRNSTSSDQSDHPLLRRKSMQWARRLSRKGPKHSGKTAEKITQQRLNLYRRSERQELAELVKNRMKHLGLSTVGYDEMNDHQSTLSYILINPSPDTRIELNDVVYLIRPDPLAYLPNSEPSRRNSICNVTGQDSREETQL

SEQ ID NO: 30468 - protein, 1135 aa, Homo sapiens
  REGION 1..1135: note = ENSP00000294725
MVDLESEVPPLPPRYRFRDLLLGDQGWQNDDRVQVEFYMNENTFKERLKLFFIKNQRSSLRIRLFNFSLKLLSCLLYIIRVLLENPSQGNEWSHIFWVNRSLPLWGLQVSVALISLFETILLGYLSYKGNIWEQILRIPFILEIINAVPFIISIFWPSLRNLFVPVFLNCWLAKHALENMINDLHRAIQRTQSAMFNQVLILISTLLCLIFTCICGIQHLERIGKKLNLFDSLYFCIVTFSTVGFGDVTPETWSSKLFVVAMICVALVVLPIQFEQLAYLWMERQKSGGNYSRHRAQTEKHVVLCVSSLKIDLLMDFLNEFYAHPRLQDYYVVILCPTEMDVQVRRVLQIPMWSQRVIYLQGSALKDQDLLRAKMDDAEACFILSSRCEVDRTSSDHQTILRAWAVKDFAPNCPLYVQILKPENKFHIKFADHVVCEEEFKYAMLALNCICPATSTLITLLVHTSRGQEGQQSPEQWQKMYGRCSGNEVYHIVLEESTFFAEYEGKSFTYASFHAHKKFGVCLIGVRREDNKNILLNPGPRYIMNSTDICFYINITKEENSAFKNQDQQRKSNVSRSFYHGPSRLPVHSIIASMGTVAIDLQDTSCRSASGPTLSLPTEGSKEIRRPSIAPVLEVADTSSIQTCDLLSDQSEDETTPDEEMSSNLEYAKGYPPYSPYIGSSPTFCHLLHEKVPFCCLRLDKSCQHNYYEDAKAYGFKNKLIIVAAETAGNGLYNFIVPLRAYYRPKKELNPIVLLLDNPPDMHFLDAICWFPMVYYMVGSIDNLDDLLRCGVTFAANMVVVDKESTMSAEEDYMADAKTIVNVQTLFRLFSSLSIITELTHPANMRFMQFRAKDCYSLALSKLEKKERERGSNLAFMFRLPFAAGRVFSISMLDTLLYQSFVKDYMISITRLLLGLDTTPGSGFLCSMKITADDLWIRTYARLYQKLCSSTGDVPIGIYRTESQKLTTSESQISISVEEWEDTKDSKEQGHHRSNHRNSTSSDQSDHPLLRRKSMQWARRLSRKGPKHSGKTAEKITQQRLNLYRRSERQELAELVKNRMKHLGLSTVGYDEMNDHQSTLSYILINPSPDTRIELNDVVYLIRPDPLAYLPNSEPSRRNSICNVTGQDSREETQL

SEQ ID NO: 30469 - protein, 169 aa, Homo sapiens
  REGION 1..169: note = ENSP00000477456
  VARIANT 1: note = Any amino acid
XRAQTEKHVVLCVSSLKIDLLMDFLNEFYAHPRLQDYYVVILCPTEMDVQVRRVLQIPMWSQRVIYLQGSALKDQDLLRAKMDDAEACFILSSRCEVDRTSSDHQTILRAWAVKDFAPNCPLYVQILKPENKFHIKFAVLKAGNPRSRCQHDPVLRRPAIARTMAEDVR

SEQ ID NO: 30470 - protein, 370 aa, Homo sapiens
  REGION 1..370: note = ENSP00000405474
MPYLHLDHQTILRAWAVKDFAPNCPLYVQILKPENKFHIKFADHVVCEEEFKYAMLALNCICPATSTLITLLVHTSRGQEGQQSPEQWQKMYGRCSGNEVYHIVLEESTFFAEYEGKSFTYASFHAHKKFGVCLIGVRREDNKNILLNPGPRYIMNSTDICFYINITKEENSAFKNQDQQRKSNVSRSFYHGPSRLPVHSIIASMGTVAIDLQDTSCRSASGPTLSLPTEGSKEIRRPSIAPVLEVADTSSIQTCDLLSDQSEDETTPDEEMSSNLEYAKGYPPYSPYIGSSPTFCHLLHEKVPFCCLRLDKSCQHNYYEDAKAYGFKNKLIIVAAETAGNGLYNFIVPLRAYYRPKKELNPIVLLLDNP

SEQ ID NO: 30471 - protein, 500 aa, Homo sapiens
  REGION 1..500: note = ENSP00000435954
MPSSGRALLDSPLDSGSLTSLDSSVFCSEGEGEPLALGDCFTVNVGGSRFVLSQQALSCFPHTRLGKLAVVVASYRRPGALAAVPSPLELCDDANPVDNEYFFDRSSQAFRYVLHYYRTGRLHVMEQLCALSFLQEIQYWGIDELSIDSCCRDRYFRRKELSETLDFKKDTEDQESQHESEQDFSQGPCPTVRQKLWNILEKPGSSTAARIFGVISIIFVVVSIINMALMSAELSWLDLQLLEILEYVCISWFTGEFVLRFLCVRDRCRFLRKVPNIIDLLAILPFYITLLVESLSGSQTTQELENVGRIVQVLRLLRALRMLKLGRHSTGLRSLGMTITQCYEEVGLLLLFLSVGISIFSTVEYFAEQSIPDTTFTSVPCAWWWATTSMTTVGYGDIRPDTTTGKIVAFMCILSGILVLALPIAIINDRFSACYFTLKLKEAAVRQREALKKLTKNIATDSYISVNLRDVYARSIMEMLRLKGRERASTRSSGGDDFWF

SEQ ID NO: 30472 - protein, 500 aa, Homo sapiens; identical to SEQ ID NO: 30471
  REGION 1..500: note = ENSP00000297404

SEQ ID NO: 30473 - protein, 329 aa, Homo sapiens
  REGION 1..329: note = ENSP00000311202
MSAEASGPAAAAAPSLEAPKPSGLEPGPAAYGLKPLTPNSKYVKLNVGGSLHYTTLRTLTGQDTMLKAMFSGRVEVLTDAGGWVLIDRSGRHFGTILNYLRDGSVPLPESTRELGELLGEARYYLVQGLIEDCQLALQQKRETLSPLCLIPMVTSPREEQQLLASTSKPVVKLLHNRSNNKYSYTSTSDDNLLKNIELFDKLALRFHGRLLFLKDVLGDEICCWSFYGQGRKIAEVCCTSIVYATEKKQTKVEFPEARIFEETLNILIYETPRGPDPALLEATGGAAGAGGAGRGEDEENREHRVRRIHVRRHITHDERPHGQQIVFKD

SEQ ID NO: 30474 - protein, 329 aa, Homo sapiens; identical to SEQ ID NO: 30473
  REGION 1..329: note = ENSP00000455785

SEQ ID NO: 30475 - protein, 120 aa, Homo sapiens
  REGION 1..120: note = ENSP00000459104
KAMFSGRVEVLTDAGGWVLIDRSGRHFGTILNYLRDGSVPLPESTRELGELLGEARYYLVQGLIEDCQLALQQKRETLSPLCLIPMVTSPREEQQLLASTSKPVVKLLHNRSNNKYSYTR

SEQ ID NO: 30476 - protein, 140 aa, Homo sapiens
  REGION 1..140: note = ENSP00000454282
YYLVQGLIEDCQLALQQKRETLSPLCLIPMVTSPREEQQLLASTSKPVVKLLHNRSNNKYSYTSTSDDNLLKNIELFDKLALRFHGRLLFLKDVLGDEICCWSFYGQGRKIAEVCCTSIVYATEKKQTKCIVHAKVCGPS

SEQ ID NO: 30477 - protein, 81 aa, Homo sapiens
  REGION 1..81: note = ENSP00000460526
  VARIANT 1: note = Any amino acid
XILNYLRDGSVPLPESTRELGELLGEARYYLVQGLIEDCQLALQSRAYSGFSSCSRNVFLQLVHQTRVQSRSSRCIWLSAS

SEQ ID NO: 30478 - protein, 209 aa, Homo sapiens
  REGION 1..209: note = ENSP00000458486
MSAEASGPAAAAAPSLEAPKPSGLEPGPAAYGLKPLTPNSKYVKLNVGGSLHYTTLRTLTGQDTMLKAMFSGRVEVLTDAGGWVLIDRSGRHFGTILNYLRDGSVPLPESTRELGELLGEARYYLVQGLIEDCQLALQVRAFGVPMPMFLGELPKQVLEQKKGDMGYGLESLALAGHNPREFEVPSSASLPPQAAPPPQPHARTFAMVK

SEQ ID NO: 30479 - protein, 815 aa, Homo sapiens
  REGION 1..815: note = ENSP00000259154
MAGGHCGSFPAAAAGSGEIVQLNVGGTRFSTSRQTLMWIPDSFFSSLLSGRISTLRDETGAIFIDRDPAAFAPILNFLRTKELDLRGVSINVLRHEAEFYGITPLVRRLLLCEELERSSCGSVLFHGYLPPPGIPSRKINNTVRSADSRNGLNSTEGEARGNGTQPVLSGTGEETVRLGFPVDPRKVLIVAGHHNWIVAAYAHFAVCYRIKESSGWQQVFTSPYLDWTIERVALNAKVVGGPHGDKDKMVAVASESSIILWSVQDGGSGSEIGVFSLGVPVDALFFIGNQLVATSHTGKVGVWNAVTQHWQVQDVVPITSYDTAGSFLLLGCNNGSIYYIDMQKFPLRMKDNDLLVTELYHDPSNDAITALSVYLTPKTSVSGNWIEIAYGTSSGAVRVIVQHPETVGSGPQLFQTFTVHRSPVTKIMLSEKHLVSVCADNNHVRTWTVTRFRGMISTQPGSTPLASFKILSLEETESHGSYSSGNDIGPFGERDDQQVFIQKVVPITNKLFVRLSSTGKRICEIQAVDCTTISSFTVRECEGSSRMGSRPRRYLFTGHTNGSIQMWDLTTAMDMVNKSEDKDVGGPTEEELLKLLDQCDLSTSRCATPNISPATSVVQHSHLRESNSSLQLQHHDTTHEAATYGSMRPYRESPLLARARRTESFHSYRDFQTINLNRNVERAVPENGNLGPIQAEVKGATGECNISERKSPGVEIKSLRELDSGLEVHKIAEGFSESKKRSSEDENENKIEFRKKGGFEGGGFLGRKKVPYLASSPSTSDGGTDSPGTASPSPTKTTPSPRHKKSDSSGQEYSL

SEQ ID NO: 30480 - protein, 213 aa, Homo sapiens
  REGION 1..213: note = ENSP00000396726
  VARIANT 1: note = Any amino acid
XFSTSRQTLMWIPDSFFSSLLSGRISTLRDETGAIFIDRDPAAFAPILNFLRTKELDLRGVSINVLRHEAEFYGITPLVRRLLLCEELERSSCGSVLFHGYLPPPGIPSRKINNTVRSADSRNGLNSTEGEARGNGTQPVLSGTGEETVRLGFPVDPRKVLIVAGHHNWIVAAYAHFAVCYRVFWLGTVGHACNPSTLGGRDGWSSRSARPTW

SEQ ID NO: 30481 - protein, 168 aa, Homo sapiens
  REGION 1..168: note = ENSP00000399962
  VARIANT 1: note = Any amino acid
XALSVYLTPKTSVSGNWIEIAYGTSSGAVRVIVQHPETVGSGPQLFQTFTVHRSPVTKIMLSEKHLVSVCADNNHVRTWTVTRFRGMISTQPGSTPLASFKILSLEETESHGSYSSGNDIGPFGERDDQQVFIQKVVPITNKLFVRLSSTGKSLCGVSLVSRSSQEPT

SEQ ID NO: 30482 - protein, 214 aa, Homo sapiens
  REGION 1..214: note = ENSP00000216014
MNVFRILGDLSHLLAMILLLGKIWRSKCCKGISGKSQILFALVFTTRYLDLFTNFISIYNTVMKVVFLLCAYVTVYMIYGKFRKTFDSENDTFRLEFLLVPVIGLSFLENYSFTLLEILWTFSIYLESVAILPQLFMISKTGEAETITTHYLFFLGLYRALYLANWIRRYQTENFYDQIAVVSGVVQTIFYCDFFYLYVTKVLKGKKLSLPMPI

SEQ ID NO: 30483 - protein, 220 aa, Homo sapiens
  REGION 1..220: note = ENSP00000386918
MNVFRILGDLSHLLAMILLLGKIWRSKCCKGISGKSQILFALVFTTRYLDLFTNFISIYNTVMKVVFLLCAYVTVYMIYGKFRKTFDSENDTFRLEFLLVPVIGLSFLENYSFTLLEILWTFSIYLESVAILPQLFMISKTGEAETITTHYLFFLGLYRALYLANWIRRYQTENFYDQIAVVSGVVQTIFYCDFFYLYVTKGRSWDDSNADTGLRSYSSI

SEQ ID NO: 30484 - protein, 1560 aa, Homo sapiens
  REGION 1..1560: note = ENSP00000364550
MEPGSDDFLPPPECPVFEPSWAEFRDPLGYIAKIRPIAEKSGICKIRPPADWQPPFAVEVDNFRFTPRIQRLNELEAQTRVKLNYLDQIAKFWEIQGSSLKIPNVERRILDLYSLSKIVVEEGGYEAICKDRRWARVAQRLNYPPGKNIGSLLRSHYERIVYPYEMYQSGANLVQCNTRPFDNEEKDKEYKPHSIPLRQSVQPSKFNSYGRRAKRLQPDPEPTEEDIEKNPELKKLQIYGAGPKMMGLGLMAKDKTLRKKDKEGPECPPTVVVKEELGGDVKVESTSPKTFLESKEELSHSPEPCTKMTMRLRRNHSNAQFIESYVCRMCSRGDEDDKLLLCDGCDDNYHIFCLLPPLPEIPKGVWRCPKCVMAECKRPPEAFGFEQATREYTLQSFGEMADSFKADYFNMPVHMVPTELVEKEFWRLVNSIEEDVTVEYGADIHSKEFGSGFPVSDSKRHLTPEEEEYATSGWNLNVMPVLEQSVLCHINADISGMKVPWLYVGMVFSAFCWHIEDHWSYSINYLHWGEPKTWYGVPSLAAEHLEEVMKKLTPELFDSQPDLLHQLVTLMNPNTLMSHGVPVVRTNQCAGEFVITFPRAYHSGFNQGYNFAEAVNFCTADWLPAGRQCIEHYRRLRRYCVFSHEELICKMAACPEKLDLNLAAAVHKEMFIMVQEERRLRKALLEKGITEAEREAFELLPDDERQCIKCKTTCFLSALACYDCPDGLVCLSHINDLCKCSSSRQYLRYRYTLDELPAMLHKLKVRAESFDTWANKVRVALEVEDGRKRSLEELRALESEARERRFPNSELLQQLKNCLSEAEACVSRALGLVSGQEAGPHRVAGLQMTLTELRAFLDQMNNLPCAMHQIGDVKGVLEQVEAYQAEAREALASLPSSPGLLQSLLERGRQLGVEVPEAQQLQRQVEQARWLDEVKRTLAPSARRGTLAVMRGLLVAGASVAPSPAVDKAQAELQELLTIAERWEEKAHLCLEARQKHPPATLEAIIREAENIPVHLPNIQALKEALAKARAWIADVDEIQNGDHYPCLDDLEGLVAVGRDLPVGLEELRQLELQVLTAHSWREKASKTFLKKNSCYTLLEVLCPCADAGSDSTKRSRWMEKELGLYKSDTELLGLSAQDLRDPGSVIVAFKEGEQKEKEGILQLRRTNSAKPSPLASSSTASSTTSICVCGQVLAGAGALQCDLCQDWFHGRCVSVPRLLSSPRPNPTSSPLLAWWEWDTKFLCPLCMRSRRPRLETILALLVALQRLPVRLPEGEALQCLTERAISWQGRARQALASEDVTALLGRLAELRQRLQAEPRPEEPPNYPAAPASDPLREGSGKDMPKVQGLLENGDSVTSPEKVAPEEGSGKRDLELLSSLLPQLTGPVLELPEATRAPLEELMMEGDLLEVTLDENHSIWQLLQAGQPPDLERIRTLLELEKAERHGSRARGRALERRRRRKVDRGGEGDDPAREELEPKRVRSSGPEAEEVQEEEELEEETGGEGPPAPIPTTGSPSTQENQNGLEPAEGTTSGPSAPFSTLTPRLHLPCPQQPPQQQL

SEQ ID NO: 30485 - protein, 1559 aa, Homo sapiens
  REGION 1..1559: note = ENSP00000385394
MEPGSDDFLPPPECPVFEPSWAEFRDPLGYIAKIRPIAEKSGICKIRPPADWQPPFAVEVDNFRFTPRIQRLNELEAQTRVKLNYLDQIAKFWEIQGSSLKIPNVERRILDLYSLSKIVVEEGGYEAICKDRRWARVAQRLNYPPGKNIGSLLRSHYERIVYPYEMYQSGANLVCNTRPFDNEEKDKEYKPHSIPLRQSVQPSKFNSYGRRAKRLQPDPEPTEEDIEKNPELKKLQIYGAGPKMMGLGLMAKDKTLRKKDKEGPECPPTVVVKEELGGDVKVESTSPKTFLESKEELSHSPEPCTKMTMRLRRNHSNAQFIESYVCRMCSRGDEDDKLLLCDGCDDNYHIFCLLPPLPEIPKGVWRCPKCVMAECKRPPEAFGFEQATREYTLQSFGEMADSFKADYFNMPVHMVPTELVEKEFWRLVNSIEEDVTVEYGADIHSKEFGSGFPVSDSKRHLTPEEEEYATSGWNLNVMPVLEQSVLCHINADISGMKVPWLYVGMVFSAFCWHIEDHWSYSINYLHWGEPKTWYGVPSLAAEHLEEVMKKLTPELFDSQPDLLHQLVTLMNPNTLMSHGVPVVRTNQCAGEFVITFPRAYHSGFNQGYNFAEAVNFCTADWLPAGRQCIEHYRRLRRYCVFSHEELICKMAACPEKLDLNLAAAVHKEMFIMVQEERRLRKALLEKGITEAEREAFELLPDDERQCIKCKTTCFLSALACYDCPDGLVCLSHINDLCKCSSSRQYLRYRYTLDELPAMLHKLKVRAESFDTWANKVRVALEVEDGRKRSLEELRALESEARERRFPNSELLQQLKNCLSEAEACVSRALGLVSGQEAGPHRVAGLQMTLTELRAFLDQMNNLPCAMHQIGDVKGVLEQVEAYQAEAREALASLPSSPGLLQSLLERGRQLGVEVPEAQQLQRQVEQARWLDEVKRTLAPSARRGTLAVMRGLLVAGASVAPSPAVDKAQAELQELLTIAERWEEKAHLCLEARQKHPPATLEAIIREAENIPVHLPNIQALKEALAKARAWIADVDEIQNGDHYPCLDDLEGLVAVGRDLPVGLEELRQLELQVLTAHSWREKASKTFLKKNSCYTLLEVLCPCADAGSDSTKRSRWMEKELGLYKSDTELLGLSAQDLRDPGSVIVAFKEGEQKEKEGILQLRRTNSAKPSPLASSSTASSTTSICVCGQVLAGAGALQCDLCQDWFHGRCVSVPRLLSSPRPNPTSSPLLAWWEWDTKFLCPLCMRSRRPRLETILALLVALQRLPVRLPEGEALQCLTERAISWQGRARQALASEDVTALLGRLAELRQRLQAEPRPEEPPNYPAAPASDPLREGSGKDMPKVQGLLENGDSVTSPEKVAPEEGSGKRDLELLSSLLPQLTGPVLELPEATRAPLEELMMEGDLLEVTLDENHSIWQLLQAGQPPDLERIRTLLELEKAERHGSRARGRALERRRRRKVDRGGEGDDPAREELEPKRVRSSGPEAEEVQEEEELEEETGGEGPPAPIPTTGSPSTQENQNGLEPAEGTTSGPSAPFSTLTPRLHLPCPQQPPQQQL

SEQ ID NO: 30486 - protein, 1557 aa, Homo sapiens
  REGION 1..1557: note = ENSP00000364528
MEPGSDDFLPPPECPVFEPSWAEFRDPLGYIAKIRPIAEKSGICKIRPPADWQPPFAVEVDNFRFTPRIQRLNELEAQTRVKLNYLDQIAKFWEIQGSSLKIPNVERRILDLYSLSKIVVEEGGYEAICKDRRWARVAQRLNYPPGKNIGSLLRSHYERIVYPYEMYQSGANLVQCNTRPFDNEEKDKEYKPHSIPLRQSVQPSKFNSYGRRAKRLQPDPEPTEEDIEKNPELKKLQIYGAGPKMMGLGLMAKDKTLRKKDKEGPECPPTVVVKEELGGDVKVESTSPKTFLESKEELSHSPEPCTKMTMRLRRNHSNAQFIESYVCRMCSRGDEDDKLLLCDGCDDNYHIFCLLPPLPEIPKGVWRCPKCVMAECKRPPEAFGFEQATREYTLQSFGEMADSFKADYFNMPVHMVPTELVEKEFWRLVNSIEEDVTVEYGADIHSKEFGSGFPVSDSKRHLTPEEEEYATSGWNLNVMPVLEQSVLCHINADISGMKVPWLYVGMVFSAFCWHIEDHWSYSINYLHWGEPKTWYGVPSLAAEHLEEVMKKLTPELFDSQPDLLHQLVTLMNPNTLMSHGVPVVRTNQCAGEFVITFPRAYHSGFNQGYNFAEAVNFCTADWLPAGRQCIEHYRRLRRYCVFSHEELICKMAACPEKLDLNLAAAVHKEMFIMVQEERRLRKALLEKGITEAEREAFELLPDDERQCIKCKTTCFLSALACYDCPDGLVCLSHINDLCKCSSSRQYLRYRYTLDELPAMLHKLKVRAESFDTWANKVRVALEVEDGRKRSLEELRALESEARERRFPNSELLQQLKNCLSEAEACVSRALGLVSGQEAGPHRVAGLQMTLTELRAFLDQMNNLPCAMHQIGDVKGVLEQVEAYQAEAREALASLPSSPGLLQSLLERGRQLGVEVPEAQQLQRQVEQARWLDEVKRTLAPSARRGTLAVMRGLLVAGASVAPSPAVDKAQAELQELLTIAERWEEKAHLCLEARQKHPPATLEAIIREAENIPVHLPNIQALKEALAKARAWIADVDEIQNGDHYPCLDDLEGLVAVGRDLPVGLEELRQLELQVLTAHSWREKASKTFLKKNSCYTLLEVLCPCADAGSDSTKRSRWMEKELGLYKSDTELLGLSAQDLRDPGSVIVAFKEGEQKEKEGILQLRRTNSAKPSPLASSSTASSTTSICVCGQVLAGAGALQCDLCQDWFHGRCVSVPRLLSSPRPNPTSSPLLAWWEWDTKFLCPLCMRSRRPRLETILALLVALQRLPVRLPEGEALQCLTERAISWQGRARQALASEDVTALLGRLAELRQRLQAEPRPEEPPNYPAAPASDPLREGSGKDMPKVQGLLENGDSVTSPEKVAPEEGSDLELLSSLLPQLTGPVLELPEATRAPLEELMMEGDLLEVTLDENHSIWQLLQAGQPPDLERIRTLLELEKAERHGSRARGRALERRRRRKVDRGGEGDDPAREELEPKRVRSSGPEAEEVQEEEELEEETGGEGPPAPIPTTGSPSTQENQNGLEPAEGTTSGPSAPFSTLTPRLHLPCPQQPPQQQL

SEQ ID NO: 30487 - protein, 1516 aa, Homo sapiens
  REGION 1..1516: note = ENSP00000364532
MEPGSDDFLPPPECPVFEPSWAEFRDPLGYIAKIRPIAEKSGICKIRPPADWQPPFAVEVDNFRFTPRIQRLNELEIVVEEGGYEAICKDRRWARVAQRLNYPPGKNIGSLLRSHYERIVYPYEMYQSGANLVQCNTRPFDNEEKDKEYKPHSIPLRQSVQPSKFNSYGRRAKRLQPDPEPTEEDIEKNPELKKLQIYGAGPKMMGLGLMAKDKTLRKKDKEGPECPPTVVVKEELGGDVKVESTSPKTFLESKEELSHSPEPCTKMTMRLRRNHSNAQFIESYVCRMCSRGDEDDKLLLCDGCDDNYHIFCLLPPLPEIPKGVWRCPKCVMAECKRPPEAFGFEQATREYTLQSFGEMADSFKADYFNMPVHMVPTELVEKEFWRLVNSIEEDVTVEYGADIHSKEFGSGFPVSDSKRHLTPEEEEYATSGWNLNVMPVLEQSVLCHINADISGMKVPWLYVGMVFSAFCWHIEDHWSYSINYLHWGEPKTWYGVPSLAAEHLEEVMKKLTPELFDSQPDLLHQLVTLMNPNTLMSHGVPVVRTNQCAGEFVITFPRAYHSGFNQGYNFAEAVNFCTADWLPAGRQCIEHYRRLRRYCVFSHEELICKMAACPEKLDLNLAAAVHKEMFIMVQEERRLRKALLEKGITEAEREAFELLPDDERQCIKCKTTCFLSALACYDCPDGLVCLSHINDLCKCSSSRQYLRYRYTLDELPAMLHKLKVRAESFDTWANKVRVALEVEDGRKRSLEELRALESEARERRFPNSELLQQLKNCLSEAEACVSRALGLVSGQEAGPHRVAGLQMTLTELRAFLDQMNNLPCAMHQIGDVKGVLEQVEAYQAEAREALASLPSSPGLLQSLLERGRQLGVEVPEAQQLQRQVEQARWLDEVKRTLAPSARRGTLAVMRGLLVAGASVAPSPAVDKAQAELQELLTIAERWEEKAHLCLEARQKHPPATLEAIIREAENIPVHLPNIQALKEALAKARAWIADVDEIQNGDHYPCLDDLEGLVAVGRDLPVGLEELRQLELQVLTAHSWREKASKTFLKKNSCYTLLEVLCPCADAGSDSTKRSRWMEKELGLYKSDTELLGLSAQDLRDPGSVIVAFKEGEQKEKEGILQLRRTNSAKPSPLASSSTASSTTSICVCGQVLAGAGALQCDLCQDWFHGRCVSVPRLLSSPRPNPTSSPLLAWWEWDTKFLCPLCMRSRRPRLETILALLVALQRLPVRLPEGEALQCLTERAISWQGRARQALASEDVTALLGRLAELRQRLQAEPRPEEPPNYPAAPASDPLREGSGKDMPKVQGLLENGDSVTSPEKVAPEEGSDLELLSSLLPQLTGPVLELPEATRAPLEELMMEGDLLEVTLDENHSIWQLLQAGQPPDLERIRTLLELEKAERHGSRARGRALERRRRRKVDRGGEGDDPAREELEPKRVRSSGPEAEEVQEEEELEEETGGEGPPAPIPTTGSPSTQENQNGLEPAEGTTSGPSAPFSTLTPRLHLPCPQQPPQQQL

SEQ ID NO: 30488 - protein, 53 aa, Homo sapiens
  REGION 1..53: note = ENSP00000409757
MEPGSDDFLPPPECPVFEPSWAEFRDPLGYIAKIRPIAEKSGICKIRPPAAGV

SEQ ID NO: 30489 - protein, 99 aa, Homo sapiens
  REGION 1..99: note = ENSP00000407277
MEPGSDDFLPPPECPVFEPSWAEFRDPLGYIAKIRPIAEKSGICKIRPPADWQPPFAVEVDNFRFTPRIQRLNELEFQLLRRLRQEDHLSPGGQVYSQP

SEQ ID NO: 30490 - protein, 74 aa, Homo sapiens
  REGION 1..74: note = ENSP00000344004
MEPGSDDFLPPPECPVFEPSWAEFRDPLGYIAKIRPIAEKSGICKIRPPASGIPALTPTPWGFLPCLFLYQAGV

SEQ ID NO: 30491 - protein, 1379 aa, Homo sapiens
  REGION 1..1379: note = ENSP00000445176
MEPGSDDFLPPPECPVFEPSWAEFRDPLGYIAKIRPIAEKSGICKIRPPAIVVEEGGYEAICKDRRWARVAQRLNYPPGKNIGSLLRSHYERIVYPYEMYQSGANLVQCNTRPFDNEEKDKEYKPHSIPLRQSVQPSKFNSYGRRAKRLQPDPEPTEEDIEKNPELKKLQIYGAGPKMMGLGLMAKDKTLRKKDKEGPECPPTVVVKEELGGDVKVESTSPKTFLESKEELSHSPEPCTKMTMRLRRNHSNAQFIESYVCRMCSRGDEDDKLLLCDGCDDNYHIFCLLPPLPEIPKGVWRCPKCVMAECKRPPEAFGFEQATREYTLQSFGEMADSFKADYFNMPVHMVPTELVEKEFWRLVNSIEEDVTVEYGADIHSKEFGSGFPVSDSKRHLTPEEEEYATSGWNLNVMPVLEQSVLCHINADISGMKVPWLYVGMVFSAFCWHIEDHWSYSINYLHWGEPKTWYGVPSLAAEHLEEVMKKLTPELFDSQPDLLHQLVTLMNPNTLMSHGVPVVRTNQCAGEFVITFPRAYHSGFNQGYNFAEAVNFCTADWLPAGRQCIEHYRRLRRYCVFSHEELICKMAACPEKLDLNLAAAVHKEMFIMVQEERRLRKALLEKGITEAEREAFELLPDDERQCIKCKTTCFLSALACYDCPDGLVCLSHINDLCKCSSSRQYLRYRYTLDELPAMLHKLKVRAESFDTWANKVRVALEVEDGRKRSLEELRALESEARERRFPNSELLQQLKNCLSEAEACVSRALGLVSGQEAGPHRVAGLQMTLTELRAFLDQMNNLPCAMHQIGDVKGVLEQVEAYQAEAREALASLPSSPGLLQSLLERGRQLGVEVPEAQQLQRQVEQARWLDEVKRTLAPSARRGTLAVMRGLLVAGASVAPSPAVDKAQAELQELLTIAERWEEKAHLCLEARQKHPPATLEAIIREAENIPVHLPNIQALKEALAKARAWIADVDEIQNGDHYPCLDDLEGLVAVGRDLPVGLEELRQLELQVLTAHSWREKASKTFLKKNSCYTLLEVLCPCADAGSDSTKRSRWMEKELGLYKSDTELLGLSAQDLRDPGSVIVAFKEGEQKEKEGILQLRRTNSAKPSPLASSSTASSTTSICVCGQVLAGAGALQCDLCQDWFHGRCVSVPRLLSSPRPNPTSSPLLAWWEWDTKFLCPLCMRSRRPRLETILALLVALQRLPVRLPEGEALQCLTERAISWQGRARQALASEDVTALLGRLAELRQRLQAEPRPEEPPNYPAAPASDPLREGSGKDMPKVQGLLENGDSVTSPEKVAPEEGSDLELLSSLLPQLTGPVLELPEATRAPLEELMMEGDLLEVTLDENHSIPESLDFCILTPRYCSDLSSWGPAPGVFPPW

SEQ ID NO: 30492 - protein, 1539 aa, Homo sapiens
  REGION 1..1539: note = ENSP00000322408
MEPGCDEFLPPPECPVFEPSWAEFQDPLGYIAKIRPIAEKSGICKIRPPADWQPPFAVEVDNFRFTPRVQRLNELEAQTRVKLNYLDQIAKFWEIQGSSLKIPNVERKILDLYSLSKIVIEEGGYEAICKDRRWARVAQRLHYPPGKNIGSLLRSHYERIIYPYEMFQSGANHVQCNTHPFDNEVKDKEYKPHSIPLRQSVQPSKFSSYSRRAKRLQPDPEPTEEDIEKHPELKKLQIYGPGPKMMGLGLMAKDKDKTVHKKVTCPPTVTVKDEQSGGGNVSSTLLKQHLSLEPCTKTTMQLRKNHSSAQFIDSYICQVCSRGDEDDKLLFCDGCDDNYHIFCLLPPLPEIPRGIWRCPKCILAECKQPPEAFGFEQATQEYSLQSFGEMADSFKSDYFNMPVHMVPTELVEKEFWRLVSSIEEDVTVEYGADIHSKEFGSGFPVSNSKQNLSPEEKEYATSGWNLNVMPVLDQSVLCHINADISGMKVPWLYVGMVFSAFCWHIEDHWSYSINYLHWGEPKTWYGVPSLAAEHLEEVMKMLTPELFDSQPDLLHQLVTLMNPNTLMSHGVPVVRTNQCAGEFVITFPRAYHSGFNQGYNFAEAVNFCTADWLPAGRQCIEHYRRLRRYCVFSHEELICKMAAFPETLDLNLAVAVHKEMFIMVQEERRLRKALLEKGVTEAEREAFELLPDDERQCIKCKTTCFLSALACYDCPDGLVCLSHINDLCKCSSSRQYLRYRYTLDELPTMLHKLKIRAESFDTWANKVRVALEVEDGRKRSFEELRALESEARERRFPNSELLQRLKNCLSEVEACIAQVLGLVSGQVARMDTPQLTLTELRVLLEQMGSLPCAMHQIGDVKDVLEQVEAYQAEAREALATLPSSPGLLRSLLERGQQLGVEVPEAHQLQQQVEQAQWLDEVKQALAPSAHRGSLVIMQGLLVMGAKIASSPSVDKARAELQELLTIAERWEEKAHFCLEARQKHPPATLEAIIRETENIPVHLPNIQALKEALTKAQAWIADVDEIQNGDHYPCLDDLEGLVAVGRDLPVGLEELRQLELQVLTAHSWREKASKTFLKKNSCYTLLEVLCPCADAGSDSTKRSRWMEKALGLYQCDTELLGLSAQDLRDPGSVIVAFKEGEQKEKEGILQLRRTNSAKPSPLAPSLMASSPTSICVCGQVPAGVGVLQCDLCQDWFHGQCVSVPHLLTSPKPSLTSSPLLAWWEWDTKFLCPLCMRSRRPRLETILALLVALQRLPVRLPEGEALQCLTERAIGWQDRARKALASEDVTALLRQLAELRQQLQAKPRPEEASVYTSATACDPIREGSGNNISKVQGLLENGDSVTSPENMAPGKGSDLELLSSLLPQLTGPVLELPEAIRAPLEELMMEGDLLEVTLDENHSIWQLLQAGQPPDLDRIRTLLELEKFEHQGSRTRSRALERRRRRQKVDQGRNVENLVQQELQSKRARSSGIMSQVGREEEHYQEKADRENMFLTPSTDHSPFLKGNQNSLQHKDSGSSAACPSLMPLLQLSYSDEQQL

SEQ ID NO: 30493 - protein, 1482 aa, Homo sapiens
  REGION 1..1482: note = ENSP00000372256
MEPGCDEFLPPPECPVFEPSWAEFQDPLGYIAKIRPIAEKSGICKIRPPADWQPPFAVEVDNFRFTPRVQRLNELEAQTRVKLNYLDQIAKFWEIQGSSLKIPNVERKILDLYSLSKQCNTHPFDNEVKDKEYKPHSIPLRQSVQPSKFSSYSRRAKRLQPDPEPTEEDIEKHPELKKLQIYGPGPKMMGLGLMAKDKDKTVHKKVTCPPTVTVKDEQSGGGNVSSTLLKQHLSLEPCTKTTMQLRKNHSSAQFIDSYICQVCSRGDEDDKLLFCDGCDDNYHIFCLLPPLPEIPRGIWRCPKCILAECKQPPEAFGFEQATQEYSLQSFGEMADSFKSDYFNMPVHMVPTELVEKEFWRLVSSIEEDVTVEYGADIHSKEFGSGFPVSNSKQNLSPEEKEYATSGWNLNVMPVLDQSVLCHINADISGMKVPWLYVGMVFSAFCWHIEDHWSYSINYLHWGEPKTWYGVPSLAAEHLEEVMKMLTPELFDSQPDLLHQLVTLMNPNTLMSHGVPVVRTNQCAGEFVITFPRAYHSGFNQGYNFAEAVNFCTADWLPAGRQCIEHYRRLRRYCVFSHEELICKMAAFPETLDLNLAVAVHKEMFIMVQEERRLRKALLEKGVTEAEREAFELLPDDERQCIKCKTTCFLSALACYDCPDGLVCLSHINDLCKCSSSRQYLRYRYTLDELPTMLHKLKIRAESFDTWANKVRVALEVEDGRKRSFEELRALESEARERRFPNSELLQRLKNCLSEVEACIAQVLGLVSGQVARMDTPQLTLTELRVLLEQMGSLPCAMHQIGDVKDVLEQVEAYQAEAREALATLPSSPGLLRSLLERGQQLGVEVPEAHQLQQQVEQAQWLDEVKQALAPSAHRGSLVIMQGLLVMGAKIASSPSVDKARAELQELLTIAERWEEKAHFCLEARQKHPPATLEAIIRETENIPVHLPNIQALKEALTKAQAWIADVDEIQNGDHYPCLDDLEGLVAVGRDLPVGLEELRQLELQVLTAHSWREKASKTFLKKNSCYTLLEVLCPCADAGSDSTKRSRWMEKALGLYQCDTELLGLSAQDLRDPGSVIVAFKEGEQKEKEGILQLRRTNSAKPSPLAPSLMASSPTSICVCGQVPAGVGVLQCDLCQDWFHGQCVSVPHLLTSPKPSLTSSPLLAWWEWDTKFLCPLCMRSRRPRLETILALLVALQRLPVRLPEGEALQCLTERAIGWQDRARKALASEDVTALLRQLAELRQQLQAKPRPEEASVYTSATACDPIREGSGNNISKVQGLLENGDSVTSPENMAPGKGSDLELLSSLLPQLTGPVLELPEAIRAPLEELMMEGDLLEVTLDENHSIWQLLQAGQPPDLDRIRTLLELEKFEHQGSRTRSRALERRRRRQKVDQGRNVENLVQQELQSKRARSSGIMSQVGREEEHYQEKADRENMFLTPSTDHSPFLKGNQNSLQHKDSGSSAACPSLMPLLQLSYSDEQQL

SEQ ID NO: 30494 - protein, 1476 aa, Homo sapiens
  REGION 1..1476: note = ENSP00000398543
MEPGCDEFLPPPECPVFEPSWAEFQDPLGYIAKIRPIAEKSGICKIRPPADWQPPFAVEVDNFRFTPRVQRLNELEIVIEEGGYEAICKDRRWARVAQRLHYPPGKNIGSLLRSHYERIIYPYEMFQSGANHVQCNTHPFDNEVKDKEYKPHSIPLRQSVQPSKFSSYSRRAKRLQPDPEPTEEDIEKHPELKKLQIYGPGPKMMGLGLMAKDKDKTVHKKVTCPPTVTVKDEQSGGGNVSSTLLKQHLSLEPCTKTTMQLRKNHSSAQFIDSYICQVCSRGDEDDKLLFCDGCDDNYHIFCLLPPLPEIPRGIWRCPKCILAECKQPPEAFGFEQATQEYSLQSFGEMADSFKSDYFNMPVHMVPTELVEKEFWRLVSSIEEDVTVEYGADIHSKEFGSGFPVSNSKQNLSPEEKEYATSGWNLNVMPVLDQSVLCHINADISGMKVPWLYVGMVFSAFCWHIEDHWSYSINYLHWGEPKTWYGVPSLAAEHLEEVMKMLTPELFDSQPDLLHQLVTLMNPNTLMSHGVPVVRTNQCAGEFVITFPRAYHSGFNQGYNFAEAVNFCTADWLPAGRQCIEHYRRLRRYCVFSHEELICKMAAFPETLDLNLAVAVHKEMFIMVQEERRLRKALLEKGVTEAEREAFELLPDDERQCIKCKTTCFLSALACYDCPDGLVCLSHINDLCKCSSSRQYLRYRYTLDELPTMLHKLKIRAESFDTWANKVRVALEVEDGRKRSFEELRALESEARERRFPNSELLQRLKNCLSEVEACIAQVLGLVSGQVARMDTPQLTLTELRVLLEQMGSLPCAMHQIGDVKDVLEQVEAYQAEAREALATLPSSPGLLRSLLERGQQLGVEVPEAHQLQQQVEQAQWLDEVKQALAPSAHRGSLVIMQGLLVMGAKIASSPSVDKARAELQELLTIAERWEEKAHFCLEARQKHPPATLEAIIRETENIPVHLPNIQALKEALTKAQAWIADVDEIQNGDHYPCLDDLEGLVAVGRDLPVGLEELRQLELQVLTAHSWREKASKTFLKKNSCYTLLEVLCPCADAGSDSTKRSRWMEKALGLYQCDTELLGLSAQDLRDPGSVIVAFKEGEQKEKEGILQLRRTNSAKPSPLAPSLMASSPTSICVCGQVPAGVGVLQCDLCQDWFHGQCVSVPHLLTSPKPSLTSSPLLAWWEWDTKFLCPLCMRSRRPRLETILALLVALQRLPVRLPEGEALQCLTERAIGWQDRARKALASEDVTALLRQLAELRQQLQAKPRPEEASVYTSATACDPIREGSGNNISKVQGLLENGDSVTSPENMAPGKGSDLELLSSLLPQLTGPVLELPEAIRAPLEELMMEGDLLEVTLDENHSIWQLLQAGQPPDLDRIRTLLELEKFEHQGSRTRSRALERRRRRQKVDQGRNVENLVQQELQSKRARSSGIMSQVGREEEHYQEKADRENMFLTPSTDHSPFLKGNQNSLQHKDSG

SEQ ID NO: 30495 - protein, 293 aa, Homo sapiens
  REGION 1..293: note = ENSP00000389433
LPNIQALKEALTKAQAWIADVDEIQNGDHYPCLDDLEGLVAVGRDLPVGLEELRQLELQVLCPCADAGSDSTKRSRWMEKALGLYQCDTELLGLSAQDLRDPGSVIVAFKEGEQKEKEGILQLRRTNSAKPSPLAPSLMASSPTSICVCGQVPAGVGVLQCDLCQDWFHGQCVSVPHLLTSPKPSLTSSPLLAWWEWDTKFLCPLCMRSRRPRLETILALLVALQRLPVRLPEGEALQCLTERAIGWQDRARKALASEDVTALLRQLAELRQQLQAKPRPEEASVYTSATACD

SEQ ID NO: 30496 - protein, 425 aa, Homo sapiens
  REGION 1..425: note = ENSP00000416377
MEPGCDEFLPPPECPVFEPSWAEFQDPLGYIAKIRPIAEKSGICKIRPPADWQPPFAVEVDNFRFTPRVQRLNELEAQTRVKLNYLDQIAKFWEIQGSSLKIPNVERKILDLYSLSKIVIEEGGYEAICKDRRWARVAQRLHYPPGKNIGSLLRSHYERIIYPYEMFQSGANHVPEPTEEDIEKHPELKKLQIYGPGPKMMGLGLMAKDKDKTVHKKVTCPPTVTVKDEQSGGGNVSSTLLKQHLSLEPCTKTTMQLRKNHSSAQFIDSYICQVCSRGDEDDKLLFCDGCDDNYHIFCLLPPLPEIPRGIWRCPKCILAECKQPPEAFGFEQATQEYSLQSFGEMADSFKSDYFNMPVHMVPTELVEKEFWRLVSSIEEDVTVEYGADIHSKEFGSGFPVSNSKQNLSPEEKEYATSGWNLNVMP

SEQ ID NO: 30497 - protein, 1570 aa, Homo sapiens
  REGION 1..1570: note = ENSP00000444293
MEPGCDEFLPPPECPVFEPSWAEFQDPLGYIAKIRPIAEKSGICKIRPPADWQPPFAVEVDNFRFTPRVQRLNELEAQTRVKLNYLDQIAKFWEIQGSSLKIPNVERKILDLYSLSKIVIEEGGYEAICKDRRWARVAQRLHYPPGKNIGSLLRSHYERIIYPYEMFQSGANHVQCNTHPFDNEVKDKEYKPHSIPLRQSVQPSKFSSYSRRAKRLQPDPEPTEEDIEKHPELKKLQIYGPGPKMMGLGLMAKDKDKTVHKKVTCPPTVTVKDEQSGGGNVSSTLLKQHLSLEPCTKTTMQLRKNHSSAQFIDSYICQVCSRGDEDDKLLFCDGCDDNYHIFCLLPPLPEIPRGIWRCPKCILAECKQPPEAFGFEQATQEYSLQSFGEMADSFKSDYFNMPVHMVPTELVEKEFWRLVSSIEEDVTVEYGADIHSKEFGSGFPVSNSKQNLSPEEKRQSLTVLTRLISSFWAQAVLPPWPPKVLGLQEYATSGWNLNVMPVLDQSVLCHINADISGMKVPWLYVGMVFSAFCWHIEDHWSYSINYLHWGEPKTWYGVPSLAAEHLEEVMKMLTPELFDSQPDLLHQLVTLMNPNTLMSHGVPVVRTNQCAGEFVITFPRAYHSGFNQGYNFAEAVNFCTADWLPAGRQCIEHYRRLRRYCVFSHEELICKMAAFPETLDLNLAVAVHKEMFIMVQEERRLRKALLEKGVTEAEREAFELLPDDERQCIKCKTTCFLSALACYDCPDGLVCLSHINDLCKCSSSRQYLRYRYTLDELPTMLHKLKIRAESFDTWANKVRVALEVEDGRKRSFEELRALESEARERRFPNSELLQRLKNCLSEVEACIAQVLGLVSGQVARMDTPQLTLTELRVLLEQMGSLPCAMHQIGDVKDVLEQVEAYQAEAREALATLPSSPGLLRSLLERGQQLGVEVPEAHQLQQQVEQAQWLDEVKQALAPSAHRGSLVIMQGLLVMGAKIASSPSVDKARAELQELLTIAERWEEKAHFCLEARQKHPPATLEAIIRETENIPVHLPNIQALKEALTKAQAWIADVDEIQNGDHYPCLDDLEGLVAVGRDLPVGLEELRQLELQVLTAHSWREKASKTFLKKNSCYTLLEVLCPCADAGSDSTKRSRWMEKALGLYQCDTELLGLSAQDLRDPGSVIVAFKEGEQKEKEGILQLRRTNSAKPSPLAPSLMASSPTSICVCGQVPAGVGVLQCDLCQDWFHGQCVSVPHLLTSPKPSLTSSPLLAWWEWDTKFLCPLCMRSRRPRLETILALLVALQRLPVRLPEGEALQCLTERAIGWQDRARKALASEDVTALLRQLAELRQQLQAKPRPEEASVYTSATACDPIREGSGNNISKVQGLLENGDSVTSPENMAPGKGSDLELLSSLLPQLTGPVLELPEAIRAPLEELMMEGDLLEVTLDENHSIWQLLQAGQPPDLDRIRTLLELEKFEHQGSRTRSRALERRRRRQKVDQGRNVENLVQQELQSKRARSSGIMSQVGREEEHYQEKADRENMFLTPSTDHSPFLKGNQNSLQHKDSGSSAACPSLMPLLQLSYSDEQQL

SEQ ID NO: 30498 - protein, 732 aa, Homo sapiens
  REGION 1..732: note = ENSP00000347409
MEGGDQSEEEPRERSQAGGMGTLWSQESTPEERLPVEGSRPWAVARRVLTAILILGLLLCFSVLLFYNFQNCGPRPCETSVCLDLRDHYLASGNTSVAPCTDFFSFACGRAKETNNSFQELATKNKNRLRRILEVQNSWHPGSGEEKAFQFYNSCMDTLAIEAAGTGPLRQVIEELGGWRISGKWTSLNFNRTLRLLMSQYGHFPFFRAYLGPHPASPHTPVIQIDQPEFDVPLKQDQEQKIYAQIFREYLTYLNQLGTLLGGDPSKVQEHSSLSISITSRLFQFLRPLEQRRAQGKLFQMVTIDQLKEMAPAIDWLSCLQATFTPMSLSPSQSLVVHDVEYLKNMSQLVEEMLLKQRDFLQSHMILGLVVTLSPALDSQFQEARRKLSQKLRELTEQPPMPARPRWMKCVEETGTFFEPTLAALFVREAFGPSTRSAAMKLFTAIRDALITRLRNLPWMNEETQNMAQDKVAQLQVEMGASEWALKPELARQEYNDIQLGSSFLQSVLSCVRSLRARIVQSFLQPHPQHRWKVSPWDVNAYYSVSDHVVVFPAGLLQPPFFHPGYPRAVNFGAAGSIMAHELLHIFYQLLLPGGCLACDNHALQEAHLCLKRHYAAFPLPSRTSFNDSLTFLENAADVGGLAIALQAYSKRLLRHHGETVLPSLDLSPQQIFFRSYAQVMCRKPSPQDSHDTHSPPHLRVHGPLSSTPAFARYFRCARGALLNPSSRCQLW

SEQ ID NO: 30499 - protein, 184 aa, Homo sapiens
  REGION 1..184: note = ENSP00000419889
MEGGDQSEEEPRERSQAGGMGTLWSQESTPEERLPVEGSRPWAVARRVLTAILILGLLLCFSVLLFYNFQNCGPRPCETSVCLDLRDHYLASGNTSVAPCTDFFSFACGRAKETNNSFQELATKNKNRLRRILEVQNSWHPGSGEEKAFQFYNSCMDTLAIEAAGTGPLRQVIEEIFREYLTYL

SEQ ID NO: 30500 - protein, 204 aa, Homo sapiens
  REGION 1..204: note = ENSP00000420011
MGTLWSQESTPEERLPVEGSRPWAVARRVLTAILILGLLLCFSVLLFYNFQNCGPRPCETSVCLDLRDHYLASGNTSVAPCTDFFSFACGRAKETNNSFQELATKNKNRLRRILEVQNSWHPGSGEEKAFQFYNSCMDTLAIEAAGTGPLRQVIEELGGWRISGKWTSLNFNRTLRLLMSQYGHFPFFRAYLGPHPASPHTPVI

SEQ ID NO: 30501 - protein, 186 aa, Homo sapiens
  REGION 1..186: note = ENSP00000418886
  VARIANT 1: note = Any amino acid
XQKSCPHWRGGNEGGDQSEEEPRERSQAGGMGTLWSQESTPEERLPVEGSRPWAVARRVLTAILILGLLLCFSVLLFYNFQNCGPRPCETSVCLDLRDHYLASGNTSVAPCTDFFSFACGRAKETNNSFQELATKNKNRLRRILEVQNSWHPGSGEEKAFQFYNSCMDTLAIEAAGTGPLRQVIEE

SEQ ID NO: 30502 - protein, 732 aa, Homo sapiens; identical to SEQ ID NO: 30498
  REGION 1..732: note = ENSP00000477793

SEQ ID NO: 30503 - protein, 184 aa, Homo sapiens; identical to SEQ ID NO: 30499
  REGION 1..184: note = ENSP00000488896

SEQ ID NO: 30504 - protein, 204 aa, Homo sapiens; identical to SEQ ID NO: 30500
  REGION 1..204: note = ENSP00000488564

SEQ ID NO: 30505 - protein, 186 aa, Homo sapiens; identical to SEQ ID NO: 30501
  REGION 1..186: note = ENSP00000488333
  VARIANT 1: note = Any amino acid

SEQ ID NO: 30506 - protein, 59 aa, Homo sapiens
  REGION 1..59: note = ENSP00000428643
  VARIANT 1: note = Any amino acid
XNSYSTPAQSGADYYDYGHGLSEETYDSYGQEEWTNSRHKAPSARTAKGVYRDQPYGRY

SEQ ID NO: 30507 - protein, 195 aa, Homo sapiens
  REGION 1..195: note = ENSP00000427841
  VARIANT 1: note = Any amino acid
XLQEETLTKMSILGKGSMRDKAKEEELRKSGEAKYFHLNDDLHVLIEVFAPPAEAYARMGHALEEIKKFLIPDYNDEIRQAQLQELTYLNGGSENADVPVVRGKPTLRTRGVPAPAITRGRGGVTARPVGVVVPRGTPTPRGVLSTRGPVSRGRGLLTPRARGVPPTGYRPPPPPPTQETYGEYGKKSGLTQDTR

SEQ ID NO: 30508 - protein, 196 aa, Homo sapiens
  REGION 1..196: note = ENSP00000427851
  VARIANT 1: note = Any amino acid
XLGPRGNSLKRLQEETLTKMSILGKGSMRDKAKEEELRKSGEAKYFHLNDDLHVLIEVFAPPAEAYARMGHALEEIKKFLIPDYNDEIRQAQLQELTYLNGGSENADVPVVRGKPTLRTRGVPAPAITRGRGGVTARPVGVVVPRGTPTPRGVLSTRGPVSRGRGLLTPRARGVPPTGYRPPPPPPTQETYGEYWC

SEQ ID NO: 30509 - protein, 160 aa, Homo sapiens
  REGION 1..160: note = ENSP00000430284
MHEIEKFQKGEGKDEEKYIDVVINKNMKLGQKVLIPVKQFPKFNFVGKLLGPRGNSLKRLQEETLTKMSILGKGSMRDKAKEEELRKSGEAKYFHLNDDLHVLIEVFAPPAEAYARMGHALEEIKKFLIPDYNDEIRQAQLQELTYLNGGSENADVPVVR

SEQ ID NO: 30510 - protein, 119 aa, Homo sapiens
  REGION 1..119: note = ENSP00000428607
MHEIEKFQKGEGKDEEKYIDVVINKNMKLGQKVLIPVKQFPKDYDDGYGTAYDEQSYDSYDNSYSTPAQSGADYYDYGHGLSEETYDSYGQEEWTNSRHKAPSARTAKGVYRDQPYGRY

SEQ ID NO: 30511 - protein, 265 aa, Homo sapiens
  REGION 1..265: note = ENSP00000431022
MEIEKFQKGEGKDEEKYIDVVINKNMKLGQKVLIPVKQFPKFNFVGKLLGPRGNSLKRLQEETLTKMSILGKGSMRDKAKEEELRKSGEAKYFHLNDDLHVLIEVFAPPAEAYARMGHALEEIKKFLIPDYNDEIRQAQLQELTYLNGGSENADVPVVRGKPTLRTRGVPAPAITRGRGGVTARPVGVVVPRGTPTPRGVLSTRGPVSRGRGLLTPRARGVPPTGYRPPPPPPTQETYGEYDYDDGYGTAYDEQSYDSYDNSYST

SEQ ID NO: 30512 - protein, 346 aa, Homo sapiens
  REGION 1..346: note = ENSP00000348108
MEEKYLPELMAEKDSLDPSFTHALRLVNQEIEKFQKGEGKDEEKYIDVVINKNMKLGQKVLIPVKQFPKFNFVGKLLGPRGNSLKRLQEETLTKMSILGKGSMRDKAKEEELRKSGEAKYFHLNDDLHVLIEVFAPPAEAYARMGHALEEIKKFLIPDYNDEIRQAQLQELTYLNGGSENADVPVVRGKPTLRTRGVPAPAITRGRGGVTARPVGVVVPRGTPTPRGVLSTRGPVSRGRGLLTPRARGVPPTGYRPPPPPPTQETYGEYDYDDGYGTAYDEQSYDSYDNSYSTPAQSGADYYDYGHGLSEETYDSYGQEEWTNSRHKAPSARTAKGVYRDQPYGRY

SEQ ID NO: 30513 - protein, 520 aa, Homo sapiens
  REGION 1..520: note = ENSP00000297063
MAGCTRKLTHLRKRIHRPRRRTTRRWKRWFKFRKRKGEKRPRPNHKAVARRAKLKFSTSEKLHWPEQELAKKSILNAEDSLIIDNKRSISHLSSGVLKDIFTTGTSSYNVLLQSKEEKKYHSQKQSSSTYSKRCRKPSKSPNTSRSKDPRRMKALVPVTSSGTWYCLERRPAVFVTSSVSSPVKFTHDISVTGNGIVLPPKPKSKVKWCHFSTLPKPKPQLSRSFEKGDDFSGKKFCILTAIKPTNLEKEKLRFFKSDYTYNPQFEYANPALPSVLAKHSHASDRFLKQIVVHLTEDLLSRASMTVVNGCPTLTINVSTAREHWLEGMLRHEIGTHYFRGINNLQQPWNSWTGRKKHELKPNNPTEEGLASIHSVLFRKDPFLWRAALLYYTVYQASQMSFCELFKDIGRFVKDPNTRWDYCVRAKRGWTDTSQPGCFSKDQVYLDGILQILRYRDTIDFHLLTALGKVSYEDVDRLKGLAVTENMRVPHFLQDHGRYMEHLEKIMEVNELTDRELKDLI

SEQ ID NO: 30514 - protein, 507 aa, Homo sapiens
  REGION 1..507: note = ENSP00000344805
MVATGWARRSGLHPAPRPLRGAQEALAKNLWREERNRPLILSSLIIKKLHWPEQELAKKSILNAEDSLIIDNKRSISHLSSGVLKDIFTTGTSSYNVLLQSKEEKKYHSQKQSSSTYSKRCRKPSKSPNTSRSKDPRRMKALVPVTSSGTWYCLERRPAVFVTSSVSSPVKFTHDISVTGNGIVLPPKPKSKVKWCHFSTLPKPKPQLSRSFEKGDDFSGKKFCILTAIKPTNLEKEKLRFFKSDYTYNPQFEYANPALPSVLAKHSHASDRFLKQIVVHLTEDLLSRASMTVVNGCPTLTINVSTAREHWLEGMLRHEIGTHYFRGINNLQQPWNSWTGRKKHELKPNNPTEEGLASIHSVLFRKDPFLWRAALLYYTVYQASQMSFCELFKDIGRFVKDPNTRWDYCVRAKRGWTDTSQPGCFSKDQVYLDGILQILRYRDTIDFHLLTALGKVSYEDVDRLKGLAVTENMRVPHFLQDHGRYMEHLEKIMEVNELTDRELKDLI

SEQ ID NO: 30515 - protein, 469 aa, Homo sapiens
  REGION 1..469: note = ENSP00000319251
MLESIRVTEKLHWPEQELAKKSILNAEDSLIIDNKRSISHLSSGVLKDIFTTGTSSYNVLLQSKEEKKYHSQKQSSSTYSKRCRKPSKSPNTSRSKDPRRMKALVPVTSSGTWYCLERRPAVFVTSSVSSPVKFTHDISVTGNGIVLPPKPKSKVKWCHFSTLPKPKPQLSRSFEKGDDFSGKKFCILTAIKPTNLEKEKLRFFKSDYTYNPQFEYANPALPSVLAKHSHASDRFLKQIVVHLTEDLLSRASMTVVNGCPTLTINVSTAREHWLEGMLRHEIGTHYFRGINNLQQPWNSWTGRKKHELKPNNPTEEGLASIHSVLFRKDPFLWRAALLYYTVYQASQMSFCELFKDIGRFVKDPNTRWDYCVRAKRGWTDTSQPGCFSKDQVYLDGILQILRYRDTIDFHLLTALGKVSYEDVDRLKGLAVTENMRVPHFLQDHGRYMEHLEKIMEVNELTDRELKDLI

SEQ ID NO: 30516 - protein, 517 aa, Homo sapiens
  REGION 1..517: note = ENSP00000390837
MLESIRVTEKLHWPEQELAKKSILNAEDSLIIDNKRSISHLSSGVLKDIFTTGTSSYNVLLQSKEEKKYHSQKQSSSTYSKRCRKPSKSPNTSRSKDPRRMKALVPVTSSGTWYCLERRPAVFVTSSVSSPVKFTHDISVTGNGIVLPPKPKSKVKWCHFSTLPKPKPQLSRSFEKGDDFSGKKFCILTAIKPTNLEKEKLRFFKSDYTYNPQFEYANPALPSVLAKHSHASDRFLKQSINIMELTLQKYGSYEKFEQATGGSLLSKTRIWSHVRKYMMKEGCLGEIVVHLTEDLLSRASMTVVNGCPTLTINVSTAREHWLEGMLRHEIGTHYFRGINNLQQPWNSWTGRKKHELKPNNPTEEGLASIHSVLFRKDPFLWRAALLYYTVYQASQMSFCELFKDIGRFVKDPNTRWDYCVRAKRGWTDTSQPGCFSKDQVYLDGILQILRYRDTIDFHLLTALGKVSYEDVDRLKGLAVTENMRVPHFLQDHGRYMEHLEKIMEVNELTDRELKDLI

SEQ ID NO: 30517 - protein, 417 aa, Homo sapiens
  REGION 1..417: note = ENSP00000389985
MKALVPVTSSGTWYCLERRPAVFVTSSVSSPVKFTHDISVTGNGIVLPPKPKSKVKWCHFSTLPKPKPQLSRSFEKGDDFSGKKFCILTAIKPTNLEKEKLRFFKSDYTYNPQFEYANPALPSVLAKHSHASDRFLKQSINIMELTLQKYGSYEKFEQATGGSLLSKTRIWSHVRKYMMKEGCLGEIVVHLTEDLLSRASMTVVNGCPTLTINVSTAREHWLEGMLRHEIGTHYFRGINNLQQPWNSWTGRKKHELKPNNPTEEGLASIHSVLFRKDPFLWRAALLYYTVYQASQMSFCELFKDIGRFVKDPNTRWDYCVRAKRGWTDTSQPGCFSKDQVYLDGILQILRYRDTIDFHLLTALGKVSYEDVDRLKGLAVTENMRVPHFLQDHGRYMEHLEKIMEVNELTDRELKDLI

SEQ ID NO: 30518 - protein, 275 aa, Homo sapiens
  REGION 1..275: note = ENSP00000390183
MELTLQKYGSYEKFEQATGGSLLSKTRIWSHVRKYMMKEGCLGEIVVHLTEDLLSRASMTVVNGCPTLTINVSTAREHWLEGMLRHEIGTHYFRGINNLQQPWNSWTGRKKHELKPNNPTEEGLASIHSVLFRKDPFLWRAALLYYTVYQASQMSFCELFKDIGRFVKDPNTRWDYCVRAKRGWTDTSQPGCFSKDQVYLDGILQILRYRDTIDFHLLTALGKVSYEDVDRLKGLAVTENMRVPHFLQDHGRYMEHLEKIMEVNELTDRELKDLI

SEQ ID NO: 30519 - protein, 97 aa, Homo sapiens
  REGION 1..97: note = ENSP00000399935
MELTLQKYGSYEKFEQATGGSLLSKTRIWSHVRKYMMKEGCLGEIVVHLTEDLLSRASMTVVNGCPTLTINVSTAREHWLEGMLRHEIGTHYFRGIN

SEQ ID NO: 30520 - protein, 304 aa, Homo sapiens
  REGION 1..304: note = ENSP00000400749
MVATGWARRSGLHPAPRPLRGAQEALAKNLWREERNRPLILSSLIIKKLHWPEQELAKKSILNAEDSLIIDNKRSISHLSSGVLKDIFTTGTSSYNVLLQSKEEKKYHSQKQSSSTYSKRCRKPSKSPNTSRSKDPRRMKALVPVTSSGTWYCLERRPAVFVTSSVSSPVKFTHDISVTGNGIVLPPKPKSKVKWCHFSTLPKPKPQLSRSFEKGDDFSGKKFCILTAIKPTNLEKEKLRFFKSDYTYNPQFEYANPALPSVLAKHSHASDRFLKQVKCHFNSGSSFLCTKTIICDLISKNKDI

SEQ ID NO: 30521 - protein, 141 aa, Homo sapiens
  REGION 1..141: note = ENSP00000390527
MAGCTRKLTHLRKRIHRPRRRTTRRWKRWFKFRKRKGEKRPRPNHKAVARRAKLKFSTSGNGIVLPPKPKSKVKWCHFSTLPKPKPQLSRSFEKGDDFSGKKFCILTAIKPTNLEKEKLRFFKSDYTYNPQFEYANPALPS

SEQ ID NO: 30522 - protein, 205 aa, Homo sapiens
  REGION 1..205: note = ENSP00000459322
  VARIANT 1: note = Any amino acid
XSGQFIHQAVGIIEAVLEKFGTYEHFEAATGGQLLTKCQIWSIVRKYMQKEGCAGEVVVQLSEDLLSQAVMMVENSRPTLAINLTGARQYWLEGMLRHEIGTHYLRGVNNARQPWHNAEGRLRYGLRPANPTEEGLASLHSVLFRKQPFLWRAALLYYTIHRAARMSFRQLFQDLERYVQDADVRWEYCVRAKRGQTDTSLPGVL

SEQ ID NO: 30523 - protein, 408 aa, Homo sapiens
  REGION 1..408: note = ENSP00000457099
MVLDSGAQAYDQAPPSPPTSPPSLRHRLKPSDRDGPPLYPWSQSLALPLALAVPPALQPQPEQQPFSQMLLGHRGHMRRSESTYSVNSTGRRGRGTLGRPPPGRGRNPGGGTLRPAASLPHIAKTQRDAGHIASKSPCMLVALRPTNMDRERDKFFQSHYTYNPQFEYQEPMPTAVLEKYCEASGQFIHQAVGIIEAVLEKFGTYEHFEAATGGQLLTKCQIWSIVRKYMQKEGCAGEVVVQLSEDLLSQAVMMVENSRPTLAINLTGARQYWLEGMLRHEIGTHYLRGVNNARQPWHNAEGRLRYGLRPANPTEEGLASLHSVLFRKQPFLWRAALLYYTIHRAARMSFRQLFQDLERYVQDADVRWEYCVRAKRGQTDTSLPARTRCTWTASCAFCDIARPSISRC

SEQ ID NO: 30524 - protein, 471 aa, Homo sapiens
  REGION 1..471: note = ENSP00000290881
MVLDSGAQAYDQAPPSPPTSPPSLRHRLKPSDRDGPPLYPWSQSLALPLALAVPPALQPQPEQQPFSQMLLGHRGHMRRSESTYSVNSTGRRGRGTLGRPPPGRGRNPGGGTLRPAASLPHIAKTQRDAGHIASKSPCMLVALRPTNMDRERDKFFQSHYTYNPQFEYQEPMPTAVLEKYCEASGQFIHQAVGIIEAVLEKFGTYEHFEAATGGQLLTKCQIWSIVRKYMQKEGCAGEVVVQLSEDLLSQAVMMVENSRPTLAINLTGARQYWLEGMLRHEIGTHYLRGVNNARQPWHNAEGRLRYGLRPANPTEEGLASLHSVLFRKQPFLWRAALLYYTIHRAARMSFRQLFQDLERYVQDADVRWEYCVRAKRGQTDTSLPGCFSKDQVYLDGIVRILRHRQTIDFPLLTSLGKVSYEDVDHLRPHGVLDNTRVPHFMQDLARYRQQLEHIMATNRLDEAELGRLLPD

SEQ ID NO: 30525 - protein, 471 aa, Homo sapiens; identical to SEQ ID NO: 30524
  REGION 1..471: note = ENSP00000456838

SEQ ID NO: 30526 - protein, 196 aa, Homo sapiens
  REGION 1..196: note = ENSP00000443288
MDHEAAQLEKQHVHNVYESTAPYFSDLQSKAWPRVRQFLQEQKPGSLIADIGCGTGKYLKVNSQVHTVGCDYCGPLVEIARNRGCEAMGLEHPWIWYPRASWNQPPTDIEGPQYFYPPCHPIPDLQKQTIICHFKGPTLNEQQKSSPTHHRLHACFQHCREEESRPWLMALSSWDQVAMEGHVSASLTSCIVRLLL

SEQ ID NO: 30527 - protein, 454 aa, Homo sapiens
  REGION 1..454: note = ENSP00000432695
MDHEAAQLEKQHVHNVYESTAPYFSDLQSKAWPRVRQFLQEQKPGSLIADIGCGTGKYLKVNSQVHTVGCDYCGPLVEIARNRGCEAMVCDNLNLPFRDEGFDAIISIGVIHHFSTKQRRIRAIKEMARVLVPGGQLMIYVWAMEQKNRHFEKQDVLVPWNRALCSQLFSESSQSGRKRQCGYPERGHPYHPPCSECSCSVCFKEQCGSKRSHSVGYEPAMARTCFANISKEGEEEYGFYSTLGKSFRSWFFSRSLDESTLRKQIERVRPLKNTEVWASSTVTVQPSRHSSLDFDHQEPFSTKGQSLDEEVFVESSSGKHLEWLRAPGTLKHLNGDHQGEMRRNGGGNFLDSTNTGVNCVDAGNIEDDNPSASKILRRISAVDSTDFNPDDTMSVEDPQTDVLDSTAFMRYYHVFREGELCSLLKENVSELRILSSGNDHGNWCIIAEKKRGCD

SEQ ID NO: 30528 - protein, 60 aa, Homo sapiens
  REGION 1..60: note = ENSP00000468715
MDHEAAQLEKQHVHNVYESTAPYFSDLQSKAWPRVRQFLQEQKPGSLIADIGNQAASSLT

SEQ ID NO: 30529 - protein, 60 aa, Homo sapiens; identical to SEQ ID NO: 30528
  REGION 1..60: note = ENSP00000466330

SEQ ID NO: 30530 - protein, 54 aa, Homo sapiens
  REGION 1..54: note = ENSP00000431717
MDHEAAQLEKQHVHNVYESTAPYFSDLQSKAWPRVRQFLQEQKPGSLIADIGCG

SEQ ID NO: 30531 - protein, 199 aa, Homo sapiens
  REGION 1..199: note = ENSP00000370568
MTSCGQQSLNVLAVLFSLLFSAVLSAHFRVCEPYTDHKGRYHFGFHCPRLSDNKTFILCCHHNNTVFKYCCNETEFQAVMQANLTASSEGYMHNNYTALLGVWIYGFFVLMLLVLDLLYYSAMNYDICKVYLARWGIQGRWMKQDPRRWGNPARAPRPGQRAPQPQPPPGPLPQAPQAVHTLRGDAHSPPLMTFQSSSA

SEQ ID NO: 30532 - protein, 199 aa, Homo sapiens; identical to SEQ ID NO: 30531
  REGION 1..199: note = ENSP00000370568

SEQ ID NO: 30533 - protein, 1749 aa, Homo sapiens
  REGION 1..1749: note = ENSP00000368091
MSDTKVKVAVRVRPMNRRELELNTKCVVEMEGNQTVLHPPPSNTKQGERKPPKVFAFDYCFWSMDESNTTKYAGQEVVFKCLGEGILEKAFQGYNACIFAYGQTGSGKSFSMMGHAEQLGLIPRLCCALFKRISLEQNESQTFKVEVSYMEIYNEKVRDLLDPKGSRQSLKVREHKVLGPYVDGLSQLAVTSFEDIESLMSEGNKSRTVAATNMNEESSRSHAVFNIIITQTLYDLQSGNSGEKVSKVSLVDLAGSERVSKTGAAGERLKEGSNINKSLTTLGLVISSLADQAAGKGKSKFVPYRDSVLTWLLKDNLGGNSQTSMIATISPAADNYEETLSTLRYADRAKRIVNHAVVNEDPNAKVIRELREEVEKLREQLSQAEAMKAPELKEKLEESEKLIKELTVTWEEKLRKTEEIAQERQRQLESMGISLEMSGIKVGDDKCYLVNLNADPALNELLVYYLKDHTRVGADTSQDIQLFGIGIQPQHCEIDIASDGDVTLTPKENARSCVNGTLVCSTTQLWHGDRILWGNNHFFRINLPKRKRRDWLKDFEKETGPPEHDLDAASEASSEPDYNYEFAQMEVIMKTLNSNDPVQNVVQVLEKQYLEEKRSALEEQRLMYERELEQLRQQLSPDRQPQSSGPDRLAYSSQTAQQKVTQWAEERDELFRQSLAKLREQLVKANTLVREANFLAEEMSKLTDYQVTLQIPAANLSANRKRGAIVSEPAIQVRRKGKSTQVWTIEKLENKLIDMRDLYQEWKEKVPEAKRLYGKRGDPFYEAQENHNLIGVANVFLECLFCDVKLQYAVPIISQQGEVAGRLHVEVMRVTGAVPERVVEDDSSENSSESGSLEVVDSSGEIIHRVKKLTCRVKIKEATGLPLNLSNFVFCQYTFWDQCESTVAAPVVDPEVPSPQSKDAQYTVTFSHCKDYVVNVTEEFLEFISDGALAIEVWGHRCAGNGSSIWEVDSLHAKTRTLHDRWNEVTRRIEMWISILELNELGEYAAVELHQAKDVNTGGIFQLRQGHSRRVQVTVKPVQHSGTLPLMVEAILSVSIGCVTARSTKLQRGLDSYQEEDLNCVRERWSDALIKRREYLDEQIKKVSNKTEKTEDDVEREAQLVEQWVGLTEERNAVLVPAPGSGIPGAPADWIPPPGMETHIPVLFLDLNADDLSANEQLVGPHASGVNSILPKEHGSQFFYLPIIKHSDDEVSATASWDSSVHDSVHLNRVTPQNERIYLIVKTTVQLSHPAAMELVLRKRIAANIYNKQSFTQSLKRRISLKNIFYSCGVTYEIVSNIPKATEEIEDRETLALLAARSENEGTSDGETYIEKYTRGVLQVENILSLERLRQAVTVKEALSTKARHIRRSLSTPNVHNVSSSRPDLSGFDEDDKGWPENQLDMSDYSSSYQDVACYGTLPRDSPRRNKEGCTSETPHALTVSPFKAFSPQPPKFFKPLMPVKEEHKKRIALEARPLLSQEDSEEEENELEAINRKLISSQPYVPVEFADFSVYNASLENREWFSSKVDLSNSRVLEKEVSRSPTTSSITSGYFSHSASNATLSDMVVPSSDSSDQLAIQTKDADSTEHSTPSLVHDFRPSSNKELTEVEKGLVKDKIIVVPLKENSALAKGSPSSQSIPEKNSKSLCRTGSCSELDACPSKISQPARGFCPREVTVEHTTNILEDHSFTEFMGVSEGKDFDGLTDSSAGELSSRRSLPNKTGGKTVSDGLHHPSQLHSKLENDQGGTTSR

SEQ ID NO: 30534 - protein, 801 aa, Homo sapiens
  REGION 1..801: note = ENSP00000425616
EVTRRIEMWISILELNELGEYAAVELHQAKDVNTGGIFQLRQGHSRRVQVTVKPVQHSGTLPLMVEAILSVSIGCVTARSTKLQRGLDSYQEEDLNCVRERWSDALIKRREYLDEQIKKVSNKTEKTEDDVEREAQLVEQWVGLTEERNAVLVPAPGSGIPGAPADWIPPPGMETHIPVLFLDLNADDLSANEQLVGPHASGVNSILPKEHGSQFFYLPIIKHSDDEVSATASWDSSVHDSVHLNRVTPQNERIYLIVKTTVQLSHPAAMELVLRKRIAANIYNKQSFTQSLKRRISLKNIFYSCGVTYEIVSNIPKATEEIEDRETLALLAARSENEGTSDGETYIEKYTRGVLQVENILSLERLRQAVTVKEALSTKARHIRRSLSTPNVHNVSSSRPDLSGFDEDDKGWPENQLDMSDYSSSYQDVACYGTLPRDSPRRNKEGCTSETPHALTVSPFKAFSPQPPKFFKPLMPVKEEHKKRIALEARPLLSQESMPPPQAHNPGCIVPSGSNGSSMPVEHNSKREKKIDSEEEENELEAINRKLISSQPYVPVEFADFSVYNASLENREWFSSKVDLSNSRVLEKEVSRSPTTSSITSGYFSHSASNATLSDMVVPSSDSSDQLAIQTKDADSTEHSTPSLVHDFRPSSNKELTEVEKGLVKDKIIVVPLKENSALAKGSPSSQSIPEKNSKSLCRTGSCSELDACPSKISQPARGFCPREVTVEHTTNILEDHSFTEFMGVSEGKDFDGLTDSSAGELSSRRSLPNKTGGKTVSDGLHHPSQLHSKLENDQGGTTSR

SEQ ID NO: 30535 - protein, 1805 aa, Homo sapiens
  REGION 1..1805: note = ENSP00000259711
MSDTKVKVAVRVRPMNRRELELNTKCVVEMEGNQTVLHPPPSNTKQGERKPPKVFAFDYCFWSMDESNTTKYAGQEVVFKCLGEGILEKAFQGYNACIFAYGQTGSGKSFSMMGHAEQLGLIPRLCCALFKRISLEQNESQTFKVEVSYMEIYNEKVRDLLDPKGSRQSLKVREHKVLGPYVDGLSQLAVTSFEDIESLMSEGNKSRTVAATNMNEESSRSHAVFNIIITQTLYDLQSGNSGEKVSKVSLVDLAGSERVSKTGAAGERLKEGSNINKSLTTLGLVISSLADQAAGKGKSKFVPYRDSVLTWLLKDNLGGNSQTSMIATISPAADNYEETLSTLRYADRAKRIVNHAVVNEDPNAKVIRELREEVEKLREQLSQAEAMKAPELKEKLEESEKLIKELTVTWEEKLRKTEEIAQERQRQLESMGISLEMSGIKVGDDKCYLVNLNADPALNELLVYYLKDHTRVGADTSQDIQLFGIGIQPQHCEIDIASDGDVTLTPKENARSCVNGTLVCSTTQLWHGDRILWGNNHFFRINLPKRKRRDWLKDFEKETGPPEHDLDAASEASSEPDYNYEFAQMEVIMKTLNSNDPVQNVVQVLEKQYLEEKRSALEEQRLMYERELEQLRQQLSPDRQPQSSGPDRLAYSSQTAQQKVTQWAEERDELFRQSLAKLREQLVKANTLVREANFLAEEMSKLTDYQVTLQIPAANLSANRKRGAIVSEPAIQVRRKGKSTQVWTIEKLENKLIDMRDLYQEWKEKVPEAKRLYGKRGDPFYEAQENHNLIGVANVFLECLFCDVKLQYAVPIISQQGEVAGRLHVEVMRVTGAVPERVVEDDSSENSSESGSLEVVDSSGEIIHRVKKLTCRVKIKEATGLPLNLSNFVFCQYTFWDQCESTVAAPVVDPEVPSPQSKDAQYTVTFSHCKDYVVNVTEEFLEFISDGALAIEVWGHRCAGNGSSIWEVDSLHAKTRTLHDRWNEVTRRIEMWISILELNELGEYAAVELHQAKDVNTGGIFQLRQGHSRRVQVTVKPVQHSGTLPLMVEAILSVSIGCVTARSTKLQRGLDSYQRDDEDGDDMDSYQEEDLNCVRERWSDALIKRREYLDEQIKKVSNKTEKTEDDVEREAQLVEQWVGLTEERNAVLVPAPGSGIPGAPADWIPPPGMETHIPVLFLDLNADDLSANEQLVGPHASGVNSILPKEHGSQFFYLPIIKHSDDEVSATASWDSSVHDSVHLNRVTPQNERIYLIVKTTVQLSHPAAMELVLRKRIAANIYNKQSFTQSLKRRISLKNIFYSCGVTYEIVSNIPKATEEIEDRETLALLAARSENEGTSDGETYIEKYTRGVLQVENILSLERLRQAVTVKEALSTKARHIRRSLSTPNVHNVSSSRPDLSGFDEDDKGWPENQLDMSDYSSSYQDVACYGTLPRDSPRRNKEGCTSETPHALTVSPFKAFSPQPPKFFKPLMPVKEEHKKRIALEARPLLSQESMPPPQAHNPGCIVPSGSNGSSMPVEHNSKREKKIDSEEEENELEAINRKLISSQPYVPVEFADFSVYNASLENREWFSSKVDLSNSRVLEKEVSRSPTTSSITSGYFSHSASNATLSDMVVPSSDSSDQLAIQTKDADSTEHSTPSLVHDFRPSSNKELTEVEKGLVKDKIIVVPLKENSALAKGSPSSQSIPEKNSKSLCRTGSCSELDACPSKISQPARGFCPREVTVEHTTNILEDHSFTEFMGVSEGKDFDGLTDSSAGELSSRRSLPNKTGGKTVSDGLHHPSQLHSKLENDQVIIPEAAFWVLCCQ

SEQ ID NO: 30536 - protein, 1757 aa, Homo sapiens
  REGION 1..1757: note = ENSP00000368120
MSDTKVKVAVRVRPMNRRELELNTKCVVEMEGNQTVLHPPPSNTKQGERKPPKVFAFDYCFWSMDESNTTKYAGQEVVFKCLGEGILEKAFQGYNACIFAYGQTGSGKSFSMMGHAEQLGLIPRLCCALFKRISLEQNESQTFKVEVSYMEIYNEKVRDLLDPKGSRQSLKVREHKVLGPYVDGLSQLAVTSFEDIESLMSEGNKSRTVAATNMNEESSRSHAVFNIIITQTLYDLQSGNSGEKVSKVSLVDLAGSERVSKTGAAGERLKEGSNINKSLTTLGLVISSLADQAAGKGKSKFVPYRDSVLTWLLKDNLGGNSQTSMIATISPAADNYEETLSTLRYADRAKRIVNHAVVNEDPNAKVIRELREEVEKLREQLSQAEAMKAPELKEKLEESEKLIKELTVTWEEKLRKTEEIAQERQRQLESMGISLEMSGIKVGDDKCYLVNLNADPALNELLVYYLKDHTRVGADTSQDIQLFGIGIQPQHCEIDIASDGDVTLTPKENARSCVNGTLVCSTTQLWHGDRILWGNNHFFRINLPKRKRRDWLKDFEKETGPPEHDLDAASEASSEPDYNYEFAQMEVIMKTLNSNDPVQNVVQVLEKQYLEEKRSALEEQRLMYERELEQLRQQLSPDRQPQSSGPDRLAYSSQTAQQKVTQWAEERDELFRQSLAKLREQLVKANTLVREANFLAEEMSKLTDYQVTLQIPAANLSANRKRGAIVSEPAIQVRRKGKSTQVWTIEKLENKLIDMRDLYQEWKEKVPEAKRLYGKRGDPFYEAQENHNLIGVANVFLECLFCDVKLQYAVPIISQQGEVAGRLHVEVMRVTGAVPERVVEDDSSENSSESGSLEVVDSSGEIIHRVKKLTCRVKIKEATGLPLNLSNFVFCQYTFWDQCESTVAAPVVDPEVPSPQSKDAQYTVTFSHCKDYVVNVTEEFLEFISDGALAIEVWGHRCAGNGSSIWEVDSLHAKTRTLHDRWNEVTRRIEMWISILELNELGEYAAVELHQAKDVNTGGIFQLRQGHSRRVQVTVKPVQHSGTLPLMVEAILSVSIGCVTARSTKLQRGLDSYQEEDLNCVRERWSDALIKRREYLDEQIKKVSNKTEKTEDDVEREAQLVEQWVGLTEERNAVLVPAPGSGIPGAPADWIPPPGMETHIPVLFLDLNADDLSANEQLVGPHASGVNSILPKEHGSQFFYLPIIKHSDDEVSATASWDSSVHDSVHLNRVTPQNERIYLIVKTTVQLSHPAAMELVLRKRIAANIYNKQSFTQSLKRRISLKNIFYSCGVTYEIVSNIPKATEEIEDRETLALLAARSENEGTSDGETYIEKYTRGVLQVENILSLERLRQAVTVKEALSTKARHIRRSLSTPNVHNVSSSRPDLSGFDEDDKGWPENQLDMSDYSSSYQDVACYGTLPRDSPRRNKEGCTSETPHALTVSPFKAFSPQPPKFFKPLMPVKEEHKKRIALEARPLLSQEDSEEEENELEAINRKLISSQPYVPVEFADFSVYNASLENREWFSSKVDLSNSRVLEKEVSRSPTTSSITSGYFSHSASNATLSDMVVPSSDSSDQLAIQTKDADSTEHSTPSLVHDFRPSSNKELTEVEKGLVKDKIIVVPLKENSALAKGSPSSQSIPEKNSKSLCRTGSCSELDACPSKISQPARGFCPREVTVEHTTNILEDHSFTEFMGVSEGKDFDGLTDSSAGELSSRRSLPNKTGGKTVSDGLHHPSQLHSKLENDQVIIPEAAFWVLCCQ

SEQ ID NO: 30537 - protein, 1770 aa, Homo sapiens
  REGION 1..1770: note = ENSP00000368103
MSDTKVKVAVRVRPMNRRELELNTKCVVEMEGNQTVLHPPPSNTKQGERKPPKVFAFDYCFWSMDESNTTKYAGQEVVFKCLGEGILEKAFQGYNACIFAYGQTGSGKSFSMMGHAEQLGLIPRLCCALFKRISLEQNESQTFKVEVSYMEIYNEKVRDLLDPKGSRQSLKVREHKVLGPYVDGLSQLAVTSFEDIESLMSEGNKSRTVAATNMNEESSRSHAVFNIIITQTLYDLQSGNSGEKVSKVSLVDLAGSERVSKTGAAGERLKEGSNINKSLTTLGLVISSLADQAAGKGKSKFVPYRDSVLTWLLKDNLGGNSQTSMIATISPAADNYEETLSTLRYADRAKRIVNHAVVNEDPNAKVIRELREEVEKLREQLSQAEAMKAPELKEKLEESEKLIKELTVTWEEKLRKTEEIAQERQRQLESMGISLEMSGIKVGDDKCYLVNLNADPALNELLVYYLKDHTRVGADTSQDIQLFGIGIQPQHCEIDIASDGDVTLTPKENARSCVNGTLVCSTTQLWHGDRILWGNNHFFRINLPKRKRRDWLKDFEKETGPPEHDLDAASEASSEPDYNYEFAQMEVIMKTLNSNDPVQNVVQVLEKQYLEEKRSALEEQRLMYERELEQLRQQLSPDRQPQSSGPDRLAYSSQTAQQKVTQWAEERDELFRQSLAKLREQLVKANTLVREANFLAEEMSKLTDYQVTLQIPAANLSANRKRGAIVSEPAIQVRRKGKSTQVWTIEKLENKLIDMRDLYQEWKEKVPEAKRLYGKRGDPFYEAQENHNLIGVANVFLECLFCDVKLQYAVPIISQQGEVAGRLHVEVMRVTGAVPERVVEDDSSENSSESGSLEVVDSSGEIIHRVKKLTCRVKIKEATGLPLNLSNFVFCQYTFWDQCESTVAAPVVDPEVPSPQSKDAQYTVTFSHCKDYVVNVTEEFLEFISDGALAIEVWGHRCAGNGSSIWEVDSLHAKTRTLHDRWNEVTRRIEMWISILELNELGEYAAVELHQAKDVNTGGIFQLRQGHSRRVQVTVKPVQHSGTLPLMVEAILSVSIGCVTARSTKLQRGLDSYQRDDEDGDDMDSYQEEDLNCVRERWSDALIKRREYLDEQIKKVSNKTEKTEDDVEREAQLVEQWVGLTEERNAVLVPAPGSGIPGAPADWIPPPGMETHIPVLFLDLNADDLSANEQLVGPHASGVNSILPKEHGSQFFYLPIIKHSDDEVSATASWDSSVHDSVHLNRVTPQNERIYLIVKTTVQLSHPAAMELVLRKRIAANIYNKQSFTQSLKRRISLKNIFYSCGVTYEIVSNIPKATEEIEDRETLALLAARSENEGTSDGETYIEKYTRGVLQVENILSLERLRQAVTVKEALSTKARHIRRSLSTPNVHNVSSSRPDLSGFDEDDKGWPENQLDMSDYSSSYQDVACYGTLPRDSPRRNKEGCTSETPHALTVSPFKAFSPQPPKFFKPLMPVKEEHKKRIALEARPLLSQEDSEEEENELEAINRKLISSQPYVPVEFADFSVYNASLENREWFSSKVDLSNSRVLEKEVSRSPTTSSITSGYFSHSASNATLSDMVVPSSDSSDQLAIQTKDADSTEHSTPSLVHDFRPSSNKELTEVEKGLVKDKIIVVPLKENSALAKGSPSSQSIPEKNSKSLCRTGSCSELDACPSKISQPARGFCPREVTVEHTTNILEDHSFTEFMGVSEGKDFDGLTDSSAGELSSRRSLPNKTGGKTVSDGLHHPSQLHSKLENDQVIIPEAAFWVLCCQ

SEQ ID NO: 30538 - protein, 1845 aa, Homo sapiens
  REGION 1..1845: note = ENSP00000490031
MSDTKVKVAVRVRPMNRRELELNTKCVVEMEGNQTVLHPPPSNTKQGERKPPKVFAFDYCFWSMDESNTTKYAGQEVVFKCLGEGILEKAFQGYNACIFAYGQTGSGKSFSMMGHAEQLGLIPRLCCALFKRISLEQNESQTFKVEVSYMEIYNEKVRDLLDPKGSRQSLKVREHKVLGPYVDGLSQLAVTSFEDIESLMSEGNKSRTVAATNMNEESSRSHAVFNIIITQTLYDLQSGNSGEKVSKVSLVDLAGSERVSKTGAAGERLKEGSNINKSLTTLGLVISSLADQAAGKGKSKFVPYRDSVLTWLLKDNLGGNSQTSMIATISPAADNYEETLSTLRYADRAKRIVNHAVVNEDPNAKVIRELREEVEKLREQLSQAEAMKAPELKEKLEESEKLIKELTVTWEEKLRKTEEIAQERQRQLESMGISLEMSGIKVGDDKCYLVNLNADPALNELLVYYLKDHTRVGADTSQDIQLFGIGIQPQHCEIDIASDGDVTLTPKENARSCVNGTLVCSTTQLWHGDRILWGNNHFFRINLPKRKRRDWLKDFEKETGPPEHDLDAASEASSEPDYNYEFAQMEVIMKTLNSNGGFPIISLSAWWSSPWWSYLKILFPLMWFQTKLLHKHWDKDPVQNVVQVLEKQYLEEKRSALEEQRLMYERELEQLRQQLSPDRQPQSSGPDRLAYSSQTAQQKVTQWAEERDELFRQSLAKLREQLVKANTLVREANFLAEEMSKLTDYQVTLQIPAANLSANRKRGAIVSEPAIQVRRKGKSTQVWTIEKLENKLIDMRDLYQEWKEKVPEAKRLYGKRGDPFYEAQENHNLIGVANVFLECLFCDVKLQYAVPIISQQGEVAGRLHVEVMRVTGAVPERVVEDDSSENSSESGSLEVVDSSGEIIHRVKKLTCRVKIKEATGLPLNLSNFVFCQYTFWDQCESTVAAPVVDPEVPSPQSKDAQYTVTFSHCKDYVVNVTEEFLEFISDGALAIEVWGHRCAGNGSSIWEVDSLHAKTRTLHDRWNEVTRRIEMWISILELNELGEYAAVELHQAKDVNTGGIFQLRQGHSRRVQVTVKPVQHSGTLPLMVEAILSVSIGCVTARSTKLQRGLDSYQRDDEDGDDMDSYQEEDLNCVRERWSDALIKRREYLDEQIKKVSNKTEKTEDDVEREAQLVEQWVGLTEERNAVLVPAPGSGIPGAPADWIPPPGMETHIPVLFLDLNADDLSANEQLVGPHASGVNSILPKEHGSQFFYLPIIKHSDDEVSATASWDSSVHDSVHLNRVTPQNERIYLIVKTTVQLSHPAAMELVLRKRIAANIYNKQSFTQSLKRRISLKNIFYSCGVTYEIVSNIPKATEEIEDRETLALLAARSENEGTSDGETYIEKYTRGVLQVENILSLERLRQAVTVKEALSTKARHIRRSLSTPNVHNVSSSRPDLSGFDEDDKGWPENQLDMSDYSSSYQDVACYGTLPRDSPRRNKEGCTSETPHALTVSPFKAFSPQPPKFFKPLMPVKEEHKKRIALEARPLLSQESMPPPQAHNPGCIVPSGSNGSSMPVEHNSKREKKIDSEEEENELEAINRKLISSQPYVPVEFADFSVYNASLENREWFSSKVDLSNSRVLEKEVSRSPTTSSITSGYFSHSASNATLSDMVVPSSDSSDQLAIQTKDADSTEHSTPSLVHDFRPSSNKELTEVEKGLVKDKIIVVPLKENSALAKGSPSSQSIPEKNSKSLCRTGSCSELDACPSKISQPARGFCPREVTVEHTTNILEDHSFTEFMGVSEGKDFDGLTDSSAGELSSRRSLPNKTGGKTVSDGLHHPSQLHSKLENDQVIIPEAAFWVLCCQ

SEQ ID NO: 30539 - protein, 889 aa, Homo sapiens
  REGION 1..889: note = ENSP00000351150
  VARIANT 1: note = Any amino acid
XQYLEEKRSALEEQRLMYERELEQLRQQLSPDRQPQSSGPDRLAYSSQTAQQKVTQWAEERDELFRQSLAKLREQLVKANTLVREANFLAEEMSKLTDYQVTLQIPAANLSANRKRGAIVSEPAIQVRRKGKSTQVWTIEKLENKLIDMRDLYQEWKEKVPEAKRLYGKRGDPFYEAQENHNLIGVANVFLECLFCDVKLQYAVPIISQQGEVAGRLHVEVMRVTGAVPERVVEDDSSENSSESGSLEVVDSSGEIIHRVKKLTCRVKIKEATGLPLNLSNFVFCQYTFWDQCESTVAAPVVDPEVPSPQSKDAQYTVTFSHCKDYVVNVTEEFLEFISDGALAIEVWGHRCAGNGSSIWEVDSLHAKTRTLHDRWNEVTRRIEMWISILELNELGEYAAVELHQAKDVNTGGIFQLRQGHSRRVQVTVKPVQHSGTLPLMVEAILSVSIGCVTARSTKLQRGLDSYQRDDEDGDDMDSYQEEDLNCVRERWSDALIKRREYLDEQIKKVSNKTEKTEDDVEREAQLVEQWVGLTEERNAVLVPAPGSGIPGAPADWIPPPGMETHIPVLFLDLNADDLSANEQLVGPHASGVNSILPKEHGSQFFYLPIIKHSDDEVSATASWDSSVHDSVHLNRVTPQNERIYLIVKTTVQLSHPAAMELVLRKRIAANIYNKQSFTQSLKRRISLKNIFYSCGVTYEIVSNIPKATEEIEDRETLALLAARSENEGTSDGETYIEKYTRGVLQVENILSLERLRQAVTVKEALSTKARHIRRSLSTPNVHNVSSSRPDLSGFDEDDKGWPENQLDMSDYSSSYQDVACYGTLPRDSPRRNKEGCTSETPHALTVSPFKAFSPQPPKFFKPLMPVKEEHKKRIALEARPLLSQEVNA

SEQ ID NO: 30540 - protein, 270 aa, Homo sapiens
  REGION 1..270: note = ENSP00000422808
LEFISDGALAIEVWGHRCAGNGSSIWEVDSLHAKTRTLHDRWNEVTRRIEMWISILELNELGEYAAVELHQAKDVNTGGIFQLRQEEDLNCVRERWSDALIKRREYLDEQIKKVSNKTEKTEDDVEREAQLVEQWVGLTEERNAVLVPAPGSGIPGAPADWIPPPGMETHIPVLFLDLNADDLSANEQLVGPHASGVNSILPKEHGSQFFYLPIIKHSDDEVSATASWDSSVHDSVHLNRVTPQNERIYLIVKTTVQLSHPAAMELVLRK

SEQ ID NO: 30541 - protein, 70 aa, Homo sapiens
  REGION 1..70: note = ENSP00000425453
MSDTKVKVAVRVRPMNRRELELNTKCVVEMEGNQTVLHPPPSNTKQGERLVTVAHISNSSTLGGQGKRIT

SEQ ID NO: 30542 - protein, 1826 aa, Homo sapiens
  REGION 1..1826: note = ENSP00000427900
MGDSKVKVAVRIRPMNRRETDLHTKCVVDVDANKVILNPVNTNLSKGDARGQPKVFAYDHCFWSMDESVKEKYAGQDIVFKCLGENILQNAFDGYNACIFAYGQTGSGKSYTMMGTADQPGLIPRLCSGLFERTQKEENEEQSFKVEVSYMEIYNEKVRDLLDPKGSRQTLKVREHSVLGPYVDGLSKLAVTSYKDIESLMSEGNKSRTVAATNMNEESSRSHAVFKITLTHTLYDVKSGTSGEKVGKLSLVDLAGSERATKTGAAGDRLKEGSNINKSLTTLGLVISALADQSAGKNKNKFVPYRDSVLTWLLKDSLGGNSKTAMVATVSPAADNYDETLSTLRYADRAKHIVNHAVVNEDPNARIIRDLREEVEKLREQLTKAEAMKSPELKDRLEESEKLIQEMTVTWEEKLRKTEEIAQERQKQLESLGISLQSSGIKVGDDKCFLVNLNADPALNELLVYYLKEHTLIGSANSQDIQLCGMGILPEHCIIDITSEGQVMLTPQKNTRTFVNGSSVSSPIQLHHGDRILWGNNHFFRLNLPKKKKKAEREDEDQDPSMKNENSSEQLDVDGDSSSEVSSEVNFNYEYAQMEVTMKALGSNDPMQSILNSLEQQHEEEKRSALERQRLMYEHELEQLRRRLSPEKQNCRSMDRFSFHSPSAQQRLRQWAEEREATLNNSLMRLREQIVKANLLVREANYIAEELDKRTEYKVTLQIPASSLDANRKRGSLLSEPAIQVRRKGKGKQIWSLEKLDNRLLDMRDLYQEWKECEEDNPVIRSYFKRADPFYDEQENHSLIGVANVFLESLFYDVKLQYAVPIINQKGEVAGRLHVEVMRLSGDVGERIAGGDEVAEVSFEKETQENKLVCMVKILQATGLPQHLSHFVFCKYSFWDQQEPVIVAPEVDTSSSSVSKEPHCMVVFDHCNEFSVNITEDFIEHLSEGALAIEVYGHKINDPRKNPALWDLGIIQAKTRSLRDRWSEVTRKLEFWVQILEQNENGEYCPVEVISAKDVPTGGIFQLRQGQSRRVQVEVKSVQESGTLPLMEECILSVGIGCVKVRPLRAPRTHETFHEEEEDMDSYQDRDLERLRRKWLNALTKRQEYLDQQLQKLVSKRDKTEDDADREAQLLEMRLTLTEERNAVMVPSAGSGIPGAPAEWTPVPGMETHIPVIFLDLNADDFSSQDNLDDPEAGGWDATLTGEEEEEFFELQIVKQHDGEVKAEASWDSAVHGCPQLSRGTPVDERLFLIVRVTVQLSHPADMQLVLRKRICVNVHGRQGFAQSLLKKMSHRSSIPGCGVTFEIVSNIPEDAQGVEEREALARMAANVENPASADSEAYIEKYLRSVLAVENLLTLDRLRQEVAVKEQLTGKGKLSRRSISSPNVNRLSGSRQDLIPSYSLGSNKGRWESQQDVSQTTVSRGIAPAPALSVSPQNNHSPDPGLSNLAASYLNPVKSFVPQMPKLLKSLFPVRDEKRGKRPSPLAHQPVPRIMVQSASPDIRVTRMEEAQPEMGPDVLVQTMGAPALKICDKPAKVPSPPPVIAVTAVTPAPEAQDGPPSPLSEASSGYFSHSVSTATLSDALGPGLDAAAPPGSMPTAPEAEPEAPISHPPPPTAVPAEEPPGPQQLVSPGRERPDLEAPAPGSPFRVRRVRASELRSFSRMLAGDPGCSPGAEGNAPAPGAGGQALASDSEEADEVPEWLREGEFVTVGAHKTGVVRYVGPADFQEGTWVGVELDLPSGKNDGSIGGKQYFRCNPGYGLLVRPSRVRRATGPVRRRSTGLRLGAPEARRSATLSGSATNLASLTAALAKADRSHKNPENRKSWAS

SEQ ID NO: 30543 - protein, 418 aa, Homo sapiens
  REGION 1..418: note = ENSP00000429106
LSGSRQDLIPSYSLGSNKGRWESQQDVSQTTVSRGIAPAPALSVSPQNNHSPDPGLSNLAASYLNPVKSFVPQMPKLLKSLFPVRDEKRGKRPSPLAHQAQPEMGPDVLVQTMGAPALKICDKPAKVPSPPPVIAVTAVTPAPEAQDGPPSPLSEASSGYFSHSVSTATLSDALGPGLDAAAPPGSMPTAPEAEPEAPISHPPPPTAVPAEEPPGPQQLVSPGRERPDLEAPAPGSPFRVRRVRASELRSFSRMLAGDPGCSPGAEGNAPAPGAGGQALASDSEEADEVPEWLREGEFVTVGAHKTGVVRYVGPADFQEGTWVGVELDLPSGKNDGSIGGKQYFRCNPGYGLLVRPSRVRRATGPVRRRSTGLRLGAPEARRSATLSGSATNLASLTAALAKADRSHKNPENRKSWAS

SEQ ID NO: 30544 - protein, 61 aa, Homo sapiens
  REGION 1..61: note = ENSP00000429027
MGDSKVKVAVRIRPMNRRETDLHTKCVVDVDANKVILNPVNTNLSKGDARLWKILYHDGHS

SEQ ID NO: 30545 - protein, 743 aa, Homo sapiens
  REGION 1..743: note = ENSP00000429201
MGDSKVKVAVRIRPMNRRETDLHTKCVVDVDANKVILNPVNTNLSKGDARGQPKVFAYDHCFWSMDESVKEKYAGQDIVFKCLGENILQNAFDGYNACIFAYGQTGSGKSYTMMGTADQPGLIPRLCSGLFERTQKEENEEQSFKVEVSYMEIYNEKVRDLLDPKGSRQTLKVREHSVLGPYVDGLSKLAVTSYKDIESLMSEGNKSRTVAATNMNEESSRSHAVFKITLTHTLYDVKSGTSGEKVGKLSLVDLAGSERATKTGAAGDRLKEGSNINKSLTTLGLVISALADQSAGKNKNKFVPYRDSVLTWLLKDSLGGNSKTAMVATVSPAADNYDETLSTLRYADRAKHIVNHAVVNEDPNARIIRDLREEVEKLREQLTKAEAMKSPELKDRLEESEKLIQEMTVTWEEKLRKTEEIAQERQKQLESLGISLQSSGIKVGDDKCFLVNLNADPALNELLVYYLKEHTLIGSANSQDIQLCGMGILPEHCIIDITSEGQVMLTPQKNTRTFVNGSSVSSPIQLHHGDRILWGNNHFFRLNLPKKKKKAEREDEDQDPSMKNENSSEQLDVDGDSSSEVSSEVNFNYEYAQMEVTMKALGSNDPMQSILNSLEQQHEEEKRSALERQRLMYEHELEQLRRRLSPEKQNCRSMDRFSFHSPSAQQRLRQWAEEREATLNNSLMRLREQIVKANLLVREANYIAEELDKRTEYKVTLQIPASSLDANRKVRLPFLEKNKDLIG

SEQ ID NO: 30546 - protein, 53 aa, Homo sapiens
  REGION 1..53: note = ENSP00000431006
MGDSKVKVAVRIRPMNRRDLTVRSQLIQYGQIPLSSGFKKLSWTSGPEEVKRD

SEQ ID NO: 30547 - protein, 613 aa, Homo sapiens
  REGION 1..613: note = ENSP00000449134
MKDSGDSKDQQLMVALRVRPISVAELEEGATLIAHKVDEQMVVLMDPMEDPDDILRAHRSREKSYLFDVAFDFTATQEMVYQATTKSLIEGVISGYNATVFAYGPTGCGKTYTMLGTDQEPGIYVQTLNDLFRAIEETSNDMEYEVSMSYLEIMQLLMKGNRQRTQEPTAANQTSSRSHAVLQVTVRQRSRVKNILQEVRQGRLFMIDLAGSERASQTQNRGQRMKEGAHINRSLLALGNCINALSDKGSNKYINYRDSKLTRLLKDSLGGNSRTVMIAHISPASSAFEESRNTLTYAGRAKNIKTRVKQNLLNVSYHIAQYTSIIADLRGEIQRLKRKIDEQTGRGQARGRQDRGDIRHIQAEVQLHSGQGEKAGMGQLREQLASAFQEQMDVRRRLLELENRAMEVQIDTSRHLLTIAGWKHEKSRRALKWREEQRKECYAKDDSEKDSDTGDDQPDILEPPEVAAARESIAALVDEQKQLRKQKLALEQRCRELRARGRRLEETLPRRIGSEEQREVLSLLCRVHELEVENTEMQSHALLRDGALRHRHEAVRRLEQHRSLCDEIIQGQRQIIDDYNLAVPQRLEELYEVYLRELEEGSLEQATIMDQVA

SEQ ID NO: 30548 - protein, 998 aa, Homo sapiens
  REGION 1..998: note = ENSP00000374566
MKDSGDSKDQQLMVALRVRPISVAELEEGATLIAHKVDEQMVVLMDPMEDPDDILRAHRSREKSYLFDVAFDFTATQEMVYQATTKSLIEGVISGYNATVFAYGPTGCGKTYTMLGTDQEPGIYVQTLNDLFRAIEETSNDMEYEVSMSYLEIYNEMIRDLLNPSLGYLELREDSKGVIQVAGITEVSTINAKEIMQLLMKGNRQRTQEPTAANQTSSRSHAVLQVTVRQRSRVKNILQEVRQGRLFMIDLAGSERASQTQNRGQRMKEGAHINRSLLALGNCINALSDKGSNKYINYRDSKLTRLLKDSLGGNSRTVMIAHISPASSAFEESRNTLTYAGRAKNIKTRVKQNLLNVSYHIAQYTSIIADLRGEIQRLKRKIDEQTGRGQARGRQDRGDIRHIQAEVQLHSGQGEKAGMGQLREQLASAFQEQMDVRRRLLELENRAMEVQIDTSRHLLTIAGWKHEKSRRALKWREEQRKECYAKDDSEKDSDTGDDQPDILEPPEVAAARESIAALVDEQKQLRKQKLALEQRCRELRARGRRLEETLPRRIGSEEQREVLSLLCRVHELEVENTEMQSHALLRDGALRHRHEAVRRLEQHRSLCDEIIQGQRQIIDDYNLAVPQRLEELYEVYLRELEEGSLEQATIMDQVASRALQDSSLPKITPAGTSLTPDSDLESVKTLSSDAQHLQNSALPPLSTESEGHHVFKAGTGAWQAKSSSVPTPPPIQLGSLVTQEAPAQDSLGSWINSSPDSSENLSEIPLSHKERKEILTGTKCIWVKAARRRSRALGTEGRHLLAPATERSSLSLHSLSEGDDARPPGPLACKRPPSPTLQHAASEDNLSSSTGEAPSRAVGHHGDGPRPWLRGQKKSLGKKREESLEAKRRKRRSRSFEVTGQGLSHPKTHLLGPHQAERISDHRMPVCRHPAPGIRHLGKVTLPLAKVKLPPSQNTGPGDSSPLAVPPNPGGGSRRATRGPRLPHGTSTHGKDGCSRHN

SEQ ID NO: 30549 - protein, 613 aa, Homo sapiens; identical to SEQ ID NO: 30547
  REGION 1..613: note = ENSP00000449134

SEQ ID NO: 30550 - protein, 998 aa, Homo sapiens; identical to SEQ ID NO: 30548
  REGION 1..998: note = ENSP00000374566

SEQ ID NO: 30551 - protein, 1624 aa, Homo sapiens
  REGION 1..1624: note = ENSP00000328494
MAGQGDCCVKVAVRIRPQLSKEKIEGCHICTSVTPGEPQVLLGKDKAFTYDFVFDLDTWQEQIYSTCVSKLIEGCFEGYNATVLAYGQTGAGKTYTMGTGFDMATSEEEQGIIPRAIAHLFGGIAERKRRAQEQGVAGPEFKVSAQFLELYNEEILDLFDSTRDPDTRHRRSNIKIHEDANGGIYTTGVTSRLIHSQEELIQCLKQGALSRTTASTQMNVQSSRSHAIFTIHLCQMRMCTQPDLVNEAVTGLPDGTPPSSEYETLTAKFHFVDLAGSERLKRTGATGERAKEGISINCGLLALGNVISALGDQSKKVVHVPYRDSKLTRLLQDSLGGNSQTIMIACVSPSDRDFMETLNTLKYANRARNIKNKVVVNQDKTSQQISALRAEIARLQMELMEYKAGKRVIGEDGAEGYSDLFRENAMLQKENGALRLRVKAMQEAIDAINNRVTQLMSQEANLLLAKAGDGNEAIGALIQNYIREIEELRTKLLESEAMNESLRRSLSRASARSPYSLGASPAAPAFGGSPASSMEDASEVIRRAKQDLERLKKKEVRQRRKSPEKEAFKKRAKLQQENSEETDENEAEEEEEERDESGCEEEEGREDEDEDSGSEESLVDSDSDPEEKEVNFQADLADLTCEIEIKQKLIDELENSQRRLQTLKHQYEEKLILLQNKIRDTQLERDRVLQNLSTMECYTEEKANKIKADYEKRLREMNRDLQKLQAAQKEHARLLKNQSRYERELKKLQAEVAEMKKAKVALMKQMREEQQRRRLVETKRNREIAQLKKEQRRQEFQIRALESQKRQQEMVLRRKTQEVSALRRLAKPMSERVAGRAGLKPPMLDSGAEVSASTTSSEAESGARSVSSIVRQWNRKINHFLGDHPAPTVNGTRPARKKFQKKGASQSFSKAARLKWQSLERRIIDIVMQRMTIVNLEADMERLIKKREELFLLQEALRRKRERLQAESPEEEKGLQELAEEIEVLAANIDYINDGITDCQATIVQLEETKEELDSTDTSVVISSCSLAEARLLLDNFLKASIDKGLQVAQKEAQIRLLEGRLRQTDMAGSSQNHLLLDALREKAEAHPELQALIYNVQQENGYASTDEEISEFSEGSFSQSFTMKGSTSHDDFKFKSEPKLSAQMKAVSAECLGPPLDISTKNITKSLASLVEIKEDGVGFSVRDPYYRDRVSRTVSLPTRGSTFPRQSRATETSPLTRRKSYDRGQPIRSTDVGFTPPSSPPTRPRNDRNVFSRLTSNQSQGSALDKGIISPVGGAKGARTAPLQCVSMAEGHTKPILCLDATDELLFTGSKDRSCKMWNLVTGQEIAALKGHPNNVVSIKYCSHSGLVFSVSTSYIKVWDIRDSAKCIRTLTSSGQVISGDACAATSTRAITSAQGEHQINQIALSPSGTMLYAASGNAVRIWELSRFQPVGKLTGHIGPVMCLTVTQTASQHDLVVTGSKDHYVKMFELGECVTGTIGPTHNFEPPHYDGIECLAIQGDILFSGSRDNGIKKWDLDQQELIQQIPNAHKDWVCALAFIPGRPMLLSACRAGVIKVWNVDNFTPIGEIKGHDSPINAICTNAKHIFTASSDCRVKLWNYVPGLTPCLPRRVLAIKGRATTLP

SEQ ID NO: 30552 - protein, 1623 aa, Homo sapiens
  REGION 1..1623: note = ENSP00000433808
MAGQGDCCVKVAVRIRPQLSKEKIEGCHICTSVTPGEPQVLLGKDKAFTYDFVFDLDTWQEQIYSTCVSKLIEGCFEGYNATVLAYGQTGAGKTYTMGTGFDMATSEEEQGIIPRAIAHLFGGIAERKRRAQEQGVAGPEFKVSAQFLELYNEEILDLFDSTRDPDTRHRRSNIKIHEDANGGIYTTGVTSRLIHSQEELIQCLKQGALSRTTASTQMNVQSSRSHAIFTIHLCQMRMCTQPDLVNEAVTGLPDGTPPSSEYETLTAKFHFVDLAGSERLKRTGATGERAKEGISINCGLLALGNVISALGDQSKKVVHVPYRDSKLTRLLQDSLGGNSQTIMIACVSPSDRDFMETLNTLKYANRARNIKNKVVVNQDKTSQQISALRAEIARLQMELMEYKAGKRVIGEDGAEGYSDLFRENAMLQKENGALRLRVKAMQEAIDAINNRVTQLMSQEANLLLAKAGDGNEAIGALIQNYIREIEELRTKLLESEAMNESLRRSLSRASARSPYSLGASPAAPAFGGSPASSMEDASEVIRRAKQDLERLKKKEVRQRRKSPEKEAFKKRAKLQQENSEETDENEAEEEEEERDESGCEEEEGREDEDEDSGSEESLVDSDSDPEEKEVNFQADLADLTCEIEIKQKLIDELENSQRRLQTLKHQYEEKLILLQNKIRDTQLERDRVLQNLSTMECYTEEKANKIKADYEKRLREMNRDLQKLQAAQKEHARLLKNQSRYERELKKLQAEVAEMKKAKVALMKQMREEQQRRRLVETKRNREIAQLKKEQRRQEFQIRALESQKRQQEMVLRRKTQEVSALRRLAKPMSERVAGRAGLKPPMLDSGAEVSASTTSSEAESGARSVSSIVRQWNRKINHFLGDHPAPTVNGTRPARKKFQKKGASQSFSKAARLKWQSLERRIIDIVMQRMTIVNLEADMERLIKKREELFLLQEALRRKRERLQAESPEEEKGLQELAEEIEVLAANIDYINDGITDCQATIVQLEETKEELDSTDTSVVISSCSLAEARLLLDNFLKASIDKGLQVAQKEAQIRLLEGRLRQTDMAGSSQNHLLLDALREKAEAHPELQALIYNVQQENGYASTDEEISEFSEGSFSQSFTMKGSTSHDDFKFKSEPKLSAQMKAVSAECLGPPLDISTKNITKSLASLVEIKEDGVGFSVRDPYYRDRVSRTVSLPTRGSTFPRQSRATETSPLTRRKSYDRGQPIRSTDVGFTPPSSPPTRPRNDRNVFSRLTSNQSQGSALDKSDDSDSSLSEVLRGIISPVGGAKGARTAPLQCVSMAEGHTKPILCLDATDELLFTGSKDRSCKMWNLVTGQEIAALKGHPNNVVSIKYCSHSGLVFSVSTSYIKVWDIRDSAKCIRTLTSSGQVISGDACAATSTRAITSAQGEHQINQIALSPSGTMLYAASGNAVRIWELSRFQPVGKLTGHIGPVMCLTVTQTASQHDLVVTGSKDHYVKMFELGECVTGTIGPTHNFEPPHYDGIECLAIQGDILFSGSRDNGIKKWDLDQQELIQQIPNAHKDWVCALAFIPGRPMLLSACRAGVIKVWNVDNFTPIGEIKGHDSPINAICTNAKHIFTASSDLTVKFWSVRRLPHSGPP

SEQ ID NO: 30553 - protein, 1610 aa, Homo sapiens
  REGION 1..1610: note = ENSP00000353724
MAGQGDCCVKVAVRIRPQLSKEKIEGCHICTSVTPGEPQVLLGKDKAFTYDFVFDLDTWQEQIYSTCVSKLIEGCFEGYNATVLAYGQTGAGKTYTMGTGFDMATSEEEQGIIPRAIAHLFGGIAERKRRAQEQGVAGPEFKVSAQFLELYNEEILDLFDSTRDPDTRHRRSNIKIHEDANGGIYTTGVTSRLIHSQEELIQCLKQGALSRTTASTQMNVQSSRSHAIFTIHLCQMRMCTQPDLVNEAVTGLPDGTPPSSEYETLTAKFHFVDLAGSERLKRTGATGERAKEGISINCGLLALGNVISALGDQSKKVVHVPYRDSKLTRLLQDSLGGNSQTIMIACVSPSDRDFMETLNTLKYANRARNIKNKVVVNQDKTSQQISALRAEIARLQMELMEYKAGKRVIGEDGAEGYSDLFRENAMLQKENGALRLRVKAMQEAIDAINNRVTQLMSQEANLLLAKAGDGNEAIGALIQNYIREIEELRTKLLESEAMNESLRRSLSRASARSPYSLGASPAAPAFGGSPASSMEDASEVIRRAKQDLERLKKKEVRQRRKSPEKEAFKKRAKLQQENSEETDENEAEEEEEERDESGCEEEEGREDEDEDSGSEESLVDSDSDPEEKEVNFQADLADLTCEIEIKQKLIDELENSQRRLQTLKHQYEEKLILLQNKIRDTQLERDRVLQNLSTMECYTEEKANKIKADYEKRLREMNRDLQKLQAAQKEHARLLKNQSRYERELKKLQAEVAEMKKAKVALMKQMREEQQRRRLVETKRNREIAQLKKEQRRQEFQIRALESQKRQQEMVLRRKTQEVSALRRLAKPMSERVAGRAGLKPPMLDSGAEVSASTTSSEAESGARSVSSIVRQWNRKINHFLGDHPAPTVNGTRPARKKFQKKGASQSFSKAARLKWQSLERRIIDIVMQRMTIVNLEADMERLIKKREELFLLQEALRRKRERLQAESPEEEKGLQELAEEIEVLAANIDYINDGITDCQATIVQLEETKEELDSTDTSVVISSCSLAEARLLLDNFLKASIDKGLQVAQKEAQIRLLEGRLRQTDMAGSSQNHLLLDALREKAEAHPELQALIYNVQQENGYASTDEEISEFSEGSFSQSFTMKGSTSHDDFKFKSEPKLSAQMKAVSAECLGPPLDISTKNITKSLASLVEIKEDGVGFSVRDPYYRDRVSRTVSLPTRGSTFPRQSRATETSPLTRRKSYDRGQPIRSTDVGFTPPSSPPTRPRNDRNVFSRLTSNQSQGSALDKGIISPVGGAKGARTAPLQCVSMAEGHTKPILCLDATDELLFTGSKDRSCKMWNLVTGQEIAALKGHPNNVVSIKYCSHSGLVFSVSTSYIKVWDIRDSAKCIRTLTSSGQVISGDACAATSTRAITSAQGEHQINQIALSPSGTMLYAASGNAVRIWELSRFQPVGKLTGHIGPVMCLTVTQTASQHDLVVTGSKDHYVKMFELGECVTGTIGPTHNFEPPHYDGIECLAIQGDILFSGSRDNGIKKWDLDQQELIQQIPNAHKDWVCALAFIPGRPMLLSACRAGVIKVWNVDNFTPIGEIKGHDSPINAICTNAKHIFTASSDLTVKFWSVRRLPHSGPP

SEQ ID NO: 30554 - protein, 1637 aa, Homo sapiens
  REGION 1..1637: note = ENSP00000411831
MAGQGDCCVKVAVRIRPQLSKEKIEGCHICTSVTPGEPQVLLGKDKAFTYDFVFDLDTWQEQIYSTCVSKLIEGCFEGYNATVLAYGQTGAGKTYTMGTGFDMATSEEEQGIIPRAIAHLFGGIAERKRRAQEQGVAGPEFKVSAQFLELYNEEILDLFDSTRDPDTRHRRSNIKIHEDANGGIYTTGVTSRLIHSQEELIQCLKQGALSRTTASTQMNVQSSRSHAIFTIHLCQMRMCTQPDLVNEAVTGLPDGTPPSSEYETLTAKFHFVDLAGSERLKRTGATGERAKEGISINCGLLALGNVISALGDQSKKVVHVPYRDSKLTRLLQDSLGGNSQTIMIACVSPSDRDFMETLNTLKYANRARNIKNKVVVNQDKTSQQISALRAEIARLQMELMEYKAGKRVIGEDGAEGYSDLFRENAMLQKENGALRLRVKAMQEAIDAINNRVTQLMSQEANLLLAKAGDGNEAIGALIQNYIREIEELRTKLLESEAMNESLRRSLSRASARSPYSLGASPAAPAFGGSPASSMEDASEVIRRAKQDLERLKKKEVRQRRKSPEKEAFKKRAKLQQENSEETDENEAEEEEEERDESGCEEEEGREDEDEDSGSEESLVDSDSDPEEKEVNFQADLADLTCEIEIKQKLIDELENSQRRLQTLKHQYEEKLILLQNKIRDTQLERDRVLQNLSTMECYTEEKANKIKADYEKRLREMNRDLQKLQAAQKEHARLLKNQSRYERELKKLQAEVAEMKKAKVALMKQMREEQQRRRLVETKRNREIAQLKKEQRRQEFQIRALESQKRQQEMVLRRKTQEVSALRRLAKPMSERVAGRAGLKPPMLDSGAEVSASTTSSEAESGARSVSSIVRQWNRKINHFLGDHPAPTVNGTRPARKKFQKKGASQSFSKAARLKWQSLERRIIDIVMQRMTIVNLEADMERLIKKREELFLLQEALRRKRERLQAESPEEEKGLQELAEEIEVLAANIDYINDGITDCQATIVQLEETKEELDSTDTSVVISSCSLAEARLLLDNFLKASIDKGLQVAQKEAQIRLLEGRLRQTDMAGSSQNHLLLDALREKAEAHPELQALIYNVQQENGYASTDEEISEFSEGSFSQSFTMKGSTSHDDFKFKSEPKLSAQMKAVSAECLGPPLDISTKNITKSLASLVEIKEDGVGFSVRDPYYRDRVSRTVSLPTRGSTFPRQSRATETSPLTRRKSYDRGQPIRSTDVGFTPPSSPPTRPRNDRNVFSRLTSNQSQGSALDKSDDSDSSLSEVLRGIISPVGGAKGARTAPLQCVSMAEGHTKPILCLDATDELLFTGSKDRSCKMWNLVTGQEIAALKGHPNNVVSIKYCSHSGLVFSVSTSYIKVWDIRDSAKCIRTLTSSGQVISGDACAATSTRAITSAQGEHQINQIALSPSGTMLYAASGNAVRIWELSRFQPVGKLTGHIGPVMCLTVTQTASQHDLVVTGSKDHYVKMFELGECVTGTIGPTHNFEPPHYDGIECLAIQGDILFSGSRDNGIKKWDLDQQELIQQIPNAHKDWVCALAFIPGRPMLLSACRAGVIKVWNVDNFTPIGEIKGHDSPINAICTNAKHIFTASSDCRVKLWNYVPGLTPCLPRRVLAIKGRATTLP

SEQ ID NO: 30555 - protein, 2108 aa, Homo sapiens
  REGION 1..2108: note = ENSP00000385545
MNSVAGNKERLAVSTRGKKYGVNEVCSPTKPAAPFSPESWYRKAYEESRAGSRPTPEGAGSALGSSGTPSPGSGTSSPSSFTGSPGPASPGIGTSSPGSLGGSPGFGTGSPGSGSGGGSSPGSDRGVWCENCNARLVELKRQALRLLLPGPFPGKDPAFSAVIHDKLQVPNTIRKAWNDRDNRCDICATHLNQLKQEAIQMVLTLEQAAGSEHYDASPCSPPPLSNIPTLVGSRHVGGLQQPRDWAFVPAPCATSNYTGFANKHGSKPSSLGVSNGAEKKSGSPTHQAKVSLQMATSPSNGNILNSVAIQAHQYLDGTWSLSRTNGVTLYPYQISQLMTESSREGLTEAVLNRYNADKPSACSVPASQGSCVASETSTGTSVAASFFARAAQKLNLSSKKKKHRPSTSSAAEPPLFATSFSGILQTSPPPAPPCLLRAVNKVKDTPGLGKVKVMLRICSTLARDTSESSSFLKVDPRKKQITLYDPLTCGGQNAFQKRGNQVPPKMFAFDAVFPQDASQAEVCAGTVAEVIQSVVNGADGCVFCFGHAKLGKSYTMIGKDDSMQNLGIIPCAISWLFKLINERKEKTGARFSVRVSAVEVWGKEENLRDLLSEVATGSLQDGQSPGVYLCEDPICGTQLQNQSELRAPTAEKAAFFLDAAIASRRSHQQDCDEDDHRNSHVFFTLHIYQYRMEKSGKGGMSGGRSRLHLIDLGSCVKALSKNREGGSGLCLSLSALGNVILALVNGSKHIPYKESKLAMLLRESLGNMNCRTTMIAHISAAVGSYAETLSTIQIASRVLRMKKKKTKYTSSSSGGESSCEEGRMRRPTQLRPFHTRATVDPDFPIAHLSSDPDYSSSSEQSCDTVIYIGPNGTALSDKELTDNEGPPDFVPIVPALQKTRGDSRPAEAGEAAAGKSERDCLKCNTFAELQERLDCIDGSEEPSSFPFEELPAQFGPEQASRGPRLSQAAGASPLSESDKEDNGSEGQLTNREGPELPASKMQRSHSPVPAAAPAHSPSPASPRSVPGSSSQHSASPLVQSPSLQSSRESLNSCGFVEGKPRPMGSPRLGIASLSKTSEYKPPSSPSQRCKVYTQKGVLPSPAPLPPSSKDSGVASRESLLQPEVRTPPVGMSPQVLKKSMSAGSEGFPETPVDDEQQAATPSESKKEILSTTMVTVQQPLELNGEDELVFTLVEELTISGVLDSGRPTSIISFNSDCSARALASGSRPVSIISSISEDLECYSSTAPVSEVSITQFLPLPKMSLDEKAQDAGSRRSSISSWLSEMSAGSEGEQSCHSFIAQTCFGHGEAMAEPVASEFVSSLQNTAVVCREKPKASPDNLLILSEMGDDSFNKAAPIKGCKISTVSKAMVTISNTANLSSCEGYIPMKTNITVYPCIAMSPRNIQEPEAPTATPKAGPTLAQSRESKENSAKKEMKFEDPWLKREEEVKKETAHPNEEGMMRCETATGPSNAETRAEQEQDGKPSPGDRLSSSSGEVSASPVTDNFRRVVDGCEMALPGLATQSPVHPNKSVKSSSLPRAFQKASRQEEPDSLSYYCAAETNGVGAASGTPPSKATLEGKVASPKHCVLARPKGTPPLPPVRKSSLDQKNRASPQHSASGSGTSSPLNQPAAFPAGLPDEPSGKTKDASSSSKLFSAKLEQLASRSNSLGRATVSHYECLSLERAESLSSVSSRLHAGKDGTMPRAGRSLGRSAGTSPPSSGASPKAGQSKISAVSRLLLASPRARGPSASTTKTLSFSTKSLPQAVGQGSSSPPGGKHTPWSTQSLSRNRSSGLASKLPLRAVSGRISELLQGGAGARGLQLRAGPEAEARGGALAEDEPAAAHLLPSPYSKITPPRRPHRCSSGHGSDNSSVLSGELPPAMGKTALFYHSGGSSGYESVMRDSEATGSASSAQDSTSENSSSVGGRCRSLKTPKKRSNPGSQRRRLIPALSLDTSSPVRKPPNSTGVRWVDGPLRSSPRGLGEPFEIKVYEIDDVERLQRRRGGASKEAMCFNAKLKILEHRQQRIAEVRAKYEWLMKELEATKQYLMLDPNKWLSEFDLEQVWELDSLEYLEALECVTERLESRVNFCKAHLMMITCFDITSRRR

SEQ ID NO: 30556 - protein, 1727 aa, Homo sapiens
  REGION 1..1727: note = ENSP00000355475
MMMDWKAVAAQKLNLSSKKKKHRPSTSSAAEPPLFATSFSGILQTSPPPAPPCLLRAVNKVKDTPGLGKVKVMLRICSTLARDTSESSSFLKVDPRKKQITLYDPLTCGGQNAFQKRGNQVPPKMFAFDAVFPQDASQAEVCAGTVAEVIQSVVNGADGCVFCFGHAKLGKSYTMIGKDDSMQNLGIIPCAISWLFKLINERKEKTGARFSVRVSAVEVWGKEENLRDLLSEVATGSLQDGQSPGVYLCEDPICGTQLQNQSELRAPTAEKAAFFLDAAIASRRSHQQDCDEDDHRNSHVFFTLHIYQYRMEKSGKGGMSGGRSRLHLIDLGSCVKALSKNREGGSGLCLSLSALGNVILALVNGSKHIPYKESKLAMLLRESLGNMNCRTTMIAHISAAVGSYAETLSTIQIASRVLRMKKKKTKYTSSSSGGESSCEEGRMRRPTQLRPFHTRATVDPDFPIAHLSSDPDYSSSSEQSCDTVIYIGPNGTALSDKELTDNEGPPDFVPIVPALQKTRGDSRPAEAGEAAAGKSERDCLKCNTFAELQERLDCIDGSEEPSSFPFEELPAQFGPEQASRGPRLSQAAGASPLSESDKEDNGSEGQLTNREGPELPASKMQRSHSPVPAAAPAHSPSPASPRSVPGSSSQHSASPLVQSPSLQSSRESLNSCGFVEGKPRPMGSPRLGIASLSKTSEYKPPSSPSQRCKVYTQKGVLPSPAPLPPSSKDSGVASRESLLQPEVRTPPVGMSPQVLKKSMSAGSEGFPETPVDDEQQAATPSESKKEILSTTMVTVQQPLELNGEDELVFTLVEELTISGVLDSGRPTSIISFNSDCSARALASGSRPVSIISSISEDLECYSSTAPVSEVSITQFLPLPKMSLDEKAQDAGSRRSSISSWLSEMSAGSEGEQSCHSFIAQTCFGHGEAMAEPVASEFVSSLQNTAVVCREKPKASPDNLLILSEMGDDSFNKAAPIKGCKISTVSKAMVTISNTANLSSCEGYIPMKTNITVYPCIAMSPRNIQEPEAPTATPKAGPTLAQSRESKENSAKKEMKFEDPWLKREEEVKKETAHPNEEGMMRCETATGPSNAETRAEQEQDGKPSPGDRLSSSSGEVSASPVTDNFRRVVDGCEMALPGLATQSPVHPNKSVKSSSLPRAFQKASRQEEPDSLSYYCAAETNGVGAASGTPPSKATLEGKVASPKHCVLARPKGTPPLPPVRKSSLDQKNRASPQHSASGSGTSSPLNQPAAFPAGLPDEPSGKTKDASSSSKLFSAKLEQLASRSNSLGRATVSHYECLSLERAESLSSVSSRLHAGKDGTMPRAGRSLGRSAGTSPPSSGASPKAGQSKISAVSRLLLASPRARGPSASTTKTLSFSTKSLPQAVGQGSSSPPGGKHTPWSTQSLSRNRSSGLASKLPLRAVSGRISELLQGGAGARGLQLRAGPEAEARGGALAEDEPAAAHLLPSPYSKITPPRRPHRCSSGHGSDNSSVLSGELPPAMGKTALFYHSGGSSGYESVMRDSEATGSASSAQDSTSENSSSVGGRCRSLKTPKKRSNPGSQRRRLIPALSLDTSSPVRKPPNSTGVRWVDGPLRSSPRGLGEPFEIKVYEIDDVERLQRRRGGASKEAMCFNAKLKILEHRQQRIAEVRAKYEWLMKELEATKQYLMLDPNKWLSEFDLEQVWELDSLEYLEALECVTERLESRVNFCKAHLMMITCFDITSRRR

SEQ ID NO: 30557 - protein, 1954 aa, Homo sapiens
  REGION 1..1954: note = ENSP00000486478
  VARIANT 1: note = Any amino acid
XDPAFSAVIHDKLQVPNTIRKAWNDRDNRCDICATHLNQLKQEAIQMVLTLEQAAGSEHYDASPCSPPPLSNIPTLVGSRHVGGLQQPRDWAFVPAPCATSNYTGFANKHGSKPSSLGVSNGAEKKSGSPTHQAKVSLQMATSPSNGNILNSVAIQAHQYLDGTWSLSRTNGVTLYPYQISQLMTESSREGLTEAVLNRYNADKPSACSVPASQGSCVASETSTGTSVAASFFARAAQKLNLSSKKKKHRPSTSSAAEPPLFATSFSGILQTSPPPAPPCLLRAVNKVKDTPGLGKVKVMLRICSTLARDTSESSSFLKVDPRKKQITLYDPLTCGGQNAFQKRGNQVPPKMFAFDAVFPQDASQAEVCAGTVAEVIQSVVNGADGCVFCFGHAKLGKSYTMIGKDDSMQNLGIIPCAISWLFKLINERKEKTGARFSVRVSAVEVWGKEENLRDLLSEVATGSLQDGQSPGVYLCEDPICGTQLQNQSELRAPTAEKAAFFLDAAIASRRSHQQDCDEDDHRNSHVFFTLHIYQYRMEKSGKGGMSGGRSRLHLIDLGSCVKALSKNREGGSGLCLSLSALGNVILALVNGSKHIPYKESKLAMLLRESLGNMNCRTTMIAHISAAVGSYAETLSTIQIASRVLRMKKKKTKYTSSSSGGESSCEEGRMRRPTQLRPFHTRATVDPDFPIAHLSSDPDYSSSSEQSCDTVIYIGPNGTALSDKELTDNEGPPDFVPIVPALQKTRGDSRPAEAGEAAAGKSERDCLKCNTFAELQERLDCIDGSEEPSSFPFEELPAQFGPEQASRGPRLSQAAGASPLSESDKEDNGSEGQLTNREGPELPASKMQRSHSPVPAAAPAHSPSPASPRSVPGSSSQHSASPLVQSPSLQSSRESLNSCGFVEGKPRPMGSPRLGIASLSKTSEYKPPSSPSQRCKVYTQKGVLPSPAPLPPSSKDSGVASRESLLQPEVRTPPVGMSPQVLKKSMSAGSEGFPETPVDDEQQAATPSESKKEILSTTMVTVQQPLELNGEDELVFTLVEELTISGVLDSGRPTSIISFNSDCSARALASGSRPVSIISSISEDLECYSSTAPVSEVSITQFLPLPKMSLDEKAQDAGSRRSSISSWLSEMSAGSEGEQSCHSFIAQTCFGHGEAMAEPVASEFVSSLQNTAVVCREKPKASPDNLLILSEMGDDSFNKAAPIKGCKISTVSKAMVTISNTANLSSCEGYIPMKTNITVYPCIAMSPRNIQEPEAPTATPKAGPTLAQSRESKENSAKKEMKFEDPWLKREEEVKKETAHPNEEGMMRCETATGPSNAETRAEQEQDGKPSPGDRLSSSSGEVSASPVTDNFRRVVDGCEMALPGLATQSPVHPNKSVKSSSLPRAFQKASRQEEPDSLSYYCAAETNGVGAASGTPPSKATLEGKVASPKHCVLARPKGTPPLPPVRKSSLDQKNRASPQHSASGSGTSSPLNQPAAFPAGLPDEPSGKTKDASSSSKLFSAKLEQLASRSNSLGRATVSHYECLSLERAESLSSVSSRLHAGKDGTMPRAGRSLGRSAGTSPPSSGASPKAGQSKISAVSRLLLASPRARGPSASTTKTLSFSTKSLPQAVGQGSSSPPGGKHTPWSTQSLSRNRSSGLASKLPLRAVSGRISELLQGGAGARGLQLRAGPEAEARGGALAEDEPAAAHLLPSPYSKITPPRRPHRCSSGHGSDNSSVLSGELPPAMGKTALFYHSGGSSGYESVMRDSEATGSASSAQDSTSENSSSVGGRCRSLKTPKKRSNPGSQRRRLIPALSLDTSSPVRKPPNSTGVRWVDGPLRSSPRGLGEPFEIKVYEIDDVERLQRRRGGASKEAMCFNAKLKILEHRQQRIAEVRAKYEWLMKELEATKQYLMLDPNKWLSEFDLEQVWELDSLEYLEALECVTERLESRVNFCKAHLMMITCFDITSRRR

SEQ ID NO: 30558 - protein, 747 aa, Homo sapiens
  REGION 1..747: note = ENSP00000364864
MSKLKSSESVRVVVRCRPMNGKEKAASYDKVVDVDVKLGQVSVKNPKGTAHEMPKTFTFDAVYDWNAKQFELYDETFRPLVDSVLQGFNGTIFAYGQTGTGKTYTMEGIRGDPEKRGVIPNSFDHIFTHISRSQNQQYLVRASYLEIYQEEIRDLLSKDQTKRLELKERPDTGVYVKDLSSFVTKSVKEIEHVMNVGNQNRSVGATNMNEHSSRSHAIFVITIECSEVGLDGENHIRVGKLNLVDLAGSERQAKTGAQGERLKEATKINLSLSALGNVISALVDGKSTHIPYRDSKLTRLLQDSLGGNAKTVMVANVGPASYNVEETLTTLRYANRAKNIKNKPRVNEDPKDALLREFQEEIARLKAQLEKRSIGRRKRREKRREGGGSGGGGEEEEEEGEEGEEEGDDKDDYWREQQEKLEIEKRAIVEDHSLVAEEKMRLLKEKEKKMEDLRREKDAAEMLGAKIKAMESKLLVGGKNIVDHTNEQQKILEQKRQEIAEQKRREREIQQQMESRDEETLELKETYSSLQQEVDIKTKKLKKLFSKLQAVKAEIHDLQEEHIKERQELEQTQNELTRELKLKHLIIENFIPLEEKSKIMNRAFFDEEEDHWKLHPITRLENQQMMKRPVSAVGYKRPLSQHARMSMMIRPEARYRAENIVLLELDMPSRTTRDYEGPAIAPKVQAALDAALQDEDEIQVDASSFESTANKKSKARPKSGRKSGSSSSSSGTPASQLYPQSRGLVPK

SEQ ID NO: 30559 - protein, 689 aa, Homo sapiens
  REGION 1..689: note = ENSP00000409417
  VARIANT 1: note = Any amino acid
XGAERYSDRGIIPRTLSYIFEQLQKDSSKIYTTHISYLEIYNECGYDLLDPRHEASSLEDLPKVTILEDPDQNIHLKNLTLHQATTEEEALNLLFLGDTNRMIAETPMNQASTRSHCIFTIHLSSKEPGSATVRHAKLHLVDLAGSERVAKTGVGGHLLTEAKYINLSLHYLEQVIIALSEKHRSHIPYRNSMMTSVLRDSLGGNCMTTMIATLSLEKRNLDESISTCRFAQRVALIKNEAVLNEEINPRLVIKRLQKEIQELKDELAMVTGEQRTEALTEAELLQLEKLITSFLEDQDSDSRLEVGADMRKVHHCFHHLKKLLNDKKILENNTVSSESKDQDCQEPLKEEEYRKLRDILKQRDNEINILVNMLKKEKKKAQEALHLAGMDRREFRQSQSPPFRLGNPEEGQRMRLSSAPSQAQDFSILGKRSSLLHKKIGMREEMSLGCQEAFEIFKRDHADSVTIDDNKQILKQRFSEAKALGESINEARSKIGHLKEEITQRHIQQVALGISENMAVPLMPDQQEEKLRSQLEEEKRRYKTMFTRLKALKVEIEHLQLLMDKAKVKLQKEFEVWWAEEATNLQVNSPAVNSLDHTKPFLQTSDSQHEWSQLLSNKSDVNARKILPSPCPSPHSQKQSSTSTPLEDSIPKRPVSSIPLTGDSQTDSDIIAFIKARQSILQKQCLGSN

SEQ ID NO: 30560 - protein, 814 aa, Homo sapiens
  REGION 1..814: note = ENSP00000287152
MVKQTIQIFARVKPPVRKHQQGIYSIDEDEKLIPSLEIILPRDLADGFVNNKRESYKFKFQRIFDQDANQETVFENIAKPVAGSVLAGYNGTIFAYGQTGSGKTFTITGGAERYSDRGIIPRTLSYIFEQLQKDSSKIYTTHISYLEIYNECGYDLLDPRHEASSLEDLPKVTILEDPDQNIHLKNLTLHQATTEEEALNLLFLGDTNRMIAETPMNQASTRSHCIFTIHLSSKEPGSATVRHAKLHLVDLAGSERVAKTGVGGHLLTEAKYINLSLHYLEQVIIALSEKHRSHIPYRNSMMTSVLRDSLGGNCMTTMIATLSLEKRNLDESISTCRFAQRVALIKNEAVLNEEINPRLVIKRLQKEIQELKDELAMVTGEQRTEALTEAELLQLEKLITSFLEDQDSDSRLEVGADMRKVHHCFHHLKKLLNDKKILENNTVSSESKDQDCQEPLKEEEYRKLRDILKQRDNEINILVNMLKKEKKKAQEALHLAGMDRREFRQSQSPPFRLGNPEEGQRMRLSSAPSQAQDFSILGKRSSLLHKKIGMREEMSLGCQEAFEIFKRDHADSVTIDDNKQILKQRFSEAKALGESINEARSKIGHLKEEITQRHIQQVALGISENMAVPLMPDQQEEKLRSQLEEEKRRYKTMFTRLKALKVEIEHLQLLMDKAKVKLQKEFEVWWAEEATNLQVNSPAVNSLDHTKPFLQTSDSQHEWSQLLSNKSSGGWEVQDQGTGRFDVCDVNARKILPSPCPSPHSQKQSSTSTPLEDSIPKRPVSSIPLTGDSQTDSDIIAFIKARQSILQKQCLGSN

SEQ ID NO: 30561 - protein, 248 aa, Homo sapiens
  REGION 1..248: note = ENSP00000377889
MREEMSLGCQEAFEIFKRDHADSVTIDDNKQILKQRFSEAKALGESINEARSKIGHLKEEITQRHIQQVALGISENMAVPLMPDQQEEKLRSQLEEEKRRYKTMFTRLKALKVEIEHLQLLMDKAKVKLQKEFEVWWAEEATNLQVNSPAVNSLDHTKPFLQTSDSQHEWSQLLSNKSDVNARKILPSPCPSPHSQKQSSTSTPLEDSIPKRPVSSIPLTGDSQTDSDIIAFIKARQSILQKQCLGSN

SEQ ID NO: 30562 - protein, 265 aa, Homo sapiens
  REGION 1..265: note = ENSP00000229913
MREEMSLGCQEAFEIFKRDHADSVTIDDNKQILKQRFSEAKALGESINEARSKIGHLKEEITQRHIQQVALGISENMAVPLMPDQQEEKLRSQLEEEKRRYKTMFTRLKALKVEIEHLQLLMDKAKVKLQKEFEVWWAEEATNLQVNSPAVNSLDHTKPFLQTSDSQHEWSQLLSNKSSGGWEVQDQGTGRFDVCDVNARKILPSPCPSPHSQKQSSTSTPLEDSIPKRPVSSIPLTGDSQTDSDIIAFIKARQSILQKQCLGSN

SEQ ID NO: 30563 - protein, 161 aa, Homo sapiens
  REGION 1..161: note = ENSP00000404856
TPMNQASTRSHCIFTIHLSSKEPGSATVRHAKLHLVDLAGSERVAKTGVGGHLLTEAKYINLSLHYLEQVIIALSEKHRSHIPYRNSMMTSVLRDSLGGNCMTTMIATLSLEKRNLDESISTCRFAQRVALIKNEAVLNEEINPRLKAPSSSDGVLFCRNQ

SEQ ID NO: 30564 - protein, 293 aa, Homo sapiens
  REGION 1..293: note = ENSP00000441435
MREEMSLGCQEAFEIFKRDHADSVTIDDNKQILKQRFSEAKALGESINEARSKIGHLKEEITQRHIQQVALGISENMAVPLMPDQQEEKLRSQLEEEKRRYKTMFTRLKALKVEIEHLQLLMDKAKVKLQKEFEVWWAEEATNLQVNSPAVNSLDHTKPFLQTSDSQHEWSQLLSNKSSGGWEVQDQGTGRFDVCDVNARKILPSPCPSPHSQKQSSTSTPLEDSIPKRPVSSIPLTGDSQTDSDIIAFIKARQSILQKQYLQLLCSLFPKSAVSSAQASTNRKGLSDVLVTR

SEQ ID NO: 30565 - protein, 593 aa, Homo sapiens
  REGION 1..593: note = ENSP00000353202
MGQGLKAWPRYRVVGSADAGQYNLEITDAELSDDASYECQATEAALRSRRAKLTVLNPPTVTLSIEPQTVQEGERVVFTCQATANPEILGYRWAKGGFLIEDAHESRYETNVDYSFFTEPVSCEVHNKVGSTNVSTLVNVHFAPRIVVDPKPTTTDIGSDVTLTCVWVGNPPLTLTWTKKDSNMVLSNSNQLLLKSVTQADAGTYTCRAIVPRIGVAEREVPLYVNGPPIISSEAVQYAVRGDGGKVECFIGSTPPPDRIAWAWKENFLEVGTLERYTVERTNSGSGVLSTLTINNVMEADFQTHYNCTAWNSFGPGTAIIQLEEREVLPVGIIAGATIGASILLIFFFIALVFFLYRRRKGSRKDVTLRKLDIKVETVNREPLTMHSDREDDTASVSTATRVMKAIYSSFKDDVDLKQDLRCDTIDTREEYEMKDPTNGYYNVRAHEDRPSSRAVLYADYRAPGPARFDGRPSSRLSHSSGYAQLNTYSRGPASDYGPEPTPPGPAAPAGTDTTSQLSYENYEKFNSHPFPGAAGYPTYRLGYPQAPPSGLERTPYEAYDPIGKYATATRFSYTSQHSDYGQRFQQRMQTHV

SEQ ID NO: 30566 - protein, 757 aa, Homo sapiens
  REGION 1..757: note = ENSP00000352138
MLSLLVWILTLSDTFSQGTQTRFSQEPADQTVVAGQRAVLPCVLLNYSGIVQWTKDGLALGMGQGLKAWPRYRVVGSADAGQYNLEITDAELSDDASYECQATEAALRSRRAKLTVLIPPEDTRIDGGPVILLQAGTPHNLTCRAFNAKPAATIIWFRDGTQQEGAVASTELLKDGKRETTVSQLLINPTDLDIGRVFTCRSMNEAIPSGKETSIELDVHHPPTVTLSIEPQTVQEGERVVFTCQATANPEILGYRWAKGGFLIEDAHESRYETNVDYSFFTEPVSCEVHNKVGSTNVSTLVNVHFAPRIVVDPKPTTTDIGSDVTLTCVWVGNPPLTLTWTKKDSNMVLSNSNQLLLKSVTQADAGTYTCRAIVPRIGVAEREVPLYVNGPPIISSEAVQYAVRGDGGKVECFIGSTPPPDRIAWAWKENFLEVGTLERYTVERTNSGSGVLSTLTINNVMEADFQTHYNCTAWNSFGPGTAIIQLEEREVLPVGIIAGATIGASILLIFFFIALVFFLYRRRKGSRKDVTLRKLDIKVETVNREPLTMHSDREDDTASVSTATRVMKAIYSSFKDDVDLKQDLRCDTIDTREEYEMKDPTNGYYNVRAHEDRPSSRAVLYADYRAPGPARFDGRPSSRLSHSSGYAQLNTYSRGPASDYGPEPTPPGPAAPAGTDTTSQLSYENYEKFNSHPFPGAAGYPTYRLGYPQAPPSGLERTPYEAYDPIGKYATATRFSYTSQHSDYGQRFQQRMQTHV

SEQ ID NO: 30567 - protein, 571 aa, Homo sapiens
  REGION 1..571: note = ENSP00000357154
MNEAIPSGKETSIELDVHHPPTVTLSIEPQTVQEGERVVFTCQATANPEILGYRWAKGGFLIEDAHESRYETNVDYSFFTEPVSCEVHNKVGSTNVSTLVNVHFAPRIVVDPKPTTTDIGSDVTLTCVWVGNPPLTLTWTKKDSNMGPRPPGSPPEAALSAQVLSNSNQLLLKSVTQADAGTYTCRAIVPRIGVAEREVPLYVNGPPIISSEAVQYAVRGDGGKVECFIGSTPPPDRIAWAWKENFLEVGTLERYTVERTNSGSGVLSTLTINNVMEADFQTHYNCTAWNSFGPGTAIIQLEEREVLPVGIIAGATIGASILLIFFFIALVFFLYRRRKGSRKDVTLRKLDIKVETVNREPLTMHSDREDDTASVSTATRVMKAIYSSFKDDVDLKQDLRCDTIDTREEYEMKDPTNGYYNVRAHEDRPSSRAVLYADYRAPGPARFDGRPSSRLSHSSGYAQLNTYSRGPASDYGPEPTPPGPAAPAGTDTTSQLSYENYEKFNSHPFPGAAGYPTYRLGYPQAPPSGLERTPYEAYDPIGKYATATRFSYTSQHSDYGQRFQQRMQTHV

SEQ ID NO: 30568 - protein, 657 aa, Homo sapiens
  REGION 1..657: note = ENSP00000357155
MLSLLVWILTLSDTFSQVPPEDTRIDGGPVILLQAGTPHNLTCRAFNAKPAATIIWFRDGTQQEGAVASTELLKDGKRETTVSQLLINPTDLDIGRVFTCRSMNEAIPSGKETSIELDVHHPPTVTLSIEPQTVQEGERVVFTCQATANPEILGYRWAKGGFLIEDAHESRYETNVDYSFFTEPVSCEVHNKVGSTNVSTLVNVHFAPRIVVDPKPTTTDIGSDVTLTCVWVGNPPLTLTWTKKDSNMVLSNSNQLLLKSVTQADAGTYTCRAIVPRIGVAEREVPLYVNGPPIISSEAVQYAVRGDGGKVECFIGSTPPPDRIAWAWKENFLEVGTLERYTVERTNSGSGVLSTLTINNVMEADFQTHYNCTAWNSFGPGTAIIQLEEREVLPVGIIAGATIGASILLIFFFIALVFFLYRRRKGSRKDVTLRKLDIKVETVNREPLTMHSDREDDTASVSTATRVMKAIYSSFKDDVDLKQDLRCDTIDTREEYEMKDPTNGYYNVRAHEDRPSSRAVLYADYRAPGPARFDGRPSSRLSHSSGYAQLNTYSRGPASDYGPEPTPPGPAAPAGTDTTSQLSYENYEKFNSHPFPGAAGYPTYRLGYPQAPPSGLERTPYEAYDPIGKYATATRFSYTSQHSDYGQRFQQRMQTHV

SEQ ID NO: 30569 - protein, 972 aa, Homo sapiens
  REGION 1..972: note = ENSP00000390987
MRGARGAWDFLCVLLLLLRVQTGSSQPSVSPGEPSPPSIHPGKSDLIVRVGDEIRLLCTDPGFVKWTFEILDETNENKQNEWITEKAEATNTGKYTCTNKHGLSNSIYVFVRDPAKLFLVDRSLYGKEDNDTLVRCPLTDPEVTNYSLKGCQGKPLPKDLRFIPDPKAGIMIKSVKRAYHRLCLHCSVDQEGKSVLSEKFILKVRPAFKAVPVVSVSKASYLLREGEEFTVTCTIKDVSSSVYSTWKRENSQTKLQEKYNSWHHGDFNYERQATLTISSARVNDSGVFMCYANNTFGSANVTTTLEVVDKGFINIFPMINTTVFVNDGENVDLIVEYEAFPKPEHQQWIYMNRTFTDKWEDYPKSENESNIRYVSELHLTRLKGTEGGTYTFLVSNSDVNAAIAFNVYVNTKPEILTYDRLVNGMLQCVAAGFPEPTIDWYFCPGTEQRCSASVLPVDVQTLNSSGPPFGKLVVQSSIDSSAFKHNGTVECKAYNDVGKTSAYFNFAFKEQIHPHTLFTPLLIGFVIVAGMMCIIVMILTYKYLQKPMYEVQWKVVEEINGNNYVYIDPTQLPYDHKWEFPRNRLSFGKTLGAGAFGKVVEATAYGLIKSDAAMTVAVKMLKPSAHLTEREALMSELKVLSYLGNHMNIVNLLGACTIGGPTLVITEYCCYGDLLNFLRRKRDSFICSKQEDHAEAALYKNLLHSKESSCSDSTNEYMDMKPGVSYVVPTKADKRRSVRIGSYIERDVTPAIMEDDELALDLEDLLSFSYQVAKGMAFLASKNCIHRDLAARNILLTHGRITKICDFGLARDIKNDSNYVVKGNARLPVKWMAPESIFNCVYTFESDVWSYGIFLWELFSLGSSPYPGMPVDSKFYKMIKEGFRMLSPEHAPAEMYDIMKTCWDADPLKRPTFKQIVQLIEKQISESTNHIYSNLANCSPNRQKPVVDHSVRINSVGSTASSSQPLLVHDDV

SEQ ID NO: 30570 - protein, 976 aa, Homo sapiens [sequence omitted]

SEQ ID NO: 30571 - protein, 273 aa, Homo sapiens
  REGION 1..273: note = ENSP00000228280
MKKTQTWILTCIYLQLLLFNPLVKTEGICRNRVTNNVKDVTKLVANLPKDYMITLKYVPGMDVLPSHCWISEMVVQLSDSLTDLLDKFSNISEGLSNYSIIDKLVNIVDDLVECVKENSSKDLKKSFKSPEPRLFTPEEFFRIFNRSIDAFKDFVVASETSDCVVSSTLSPEKDSRVSVTKPFMLPPVAASSLRNDSSSSNRKAKNPPGDSSLHWAAMALPALFSLIIGFAFGALYWKKRQPSLTRAVENIQINEEDNEISMLQEKEREFQEV

SEQ ID NO: 30572 - protein, 245 aa, Homo sapiens
  REGION 1..245: note = ENSP00000054216
MKKTQTWILTCIYLQLLLFNPLVKTEGICRNRVTNNVKDVTKLVANLPKDYMITLKYVPGMDVLPSHCWISEMVVQLSDSLTDLLDKFSNISEGLSNYSIIDKLVNIVDDLVECVKENSSKDLKKSFKSPEPRLFTPEEFFRIFNRSIDAFKDFVVASETSDCVVSSTLSPEKGKAKNPPGDSSLHWAAMALPALFSLIIGFAFGALYWKKRQPSLTRAVENIQINEEDNEISMLQEKEREFQEV

SEQ ID NO: 30573 - protein, 56 aa, Homo sapiens
  REGION 1..56: note = ENSP00000474021
MALPALFSLIIGFAFGALYWKKRQPSLTRAVENIQINEEDNEISMLQEKEREFQEV

SEQ ID NO: 30574 - protein, 24 aa, Homo sapiens
  REGION 1..24: note = ENSP00000475042
MITLKYVPGMDVLPSHCWISEMVV

SEQ ID NO: 30575 - protein, 273 aa, Homo sapiens; identical to SEQ ID NO: 30571
  REGION 1..273: note = ENSP00000228280

SEQ ID NO: 30576 - protein, 245 aa, Homo sapiens; identical to SEQ ID NO: 30572
  REGION 1..245: note = ENSP00000054216

SEQ ID NO: 30577 - protein, 56 aa, Homo sapiens; identical to SEQ ID NO: 30573
  REGION 1..56: note = ENSP00000474021

SEQ ID NO: 30578 - protein, 24 aa, Homo sapiens
  REGION 1..24: note = ENSP00000475042
MITLKYVPGMDVLPSHCWISEMVV

SEQ ID NO: 30579 - protein, 520 aa, Homo sapiens
  REGION 1..520: note = ENSP00000457570
MGKKGKKEKKGRGAEKTAAKMEKKVSKRSRKEEEDLEALIAHFQTLDAKRTQTVELPCPPPSPRLNASLSVHPEKDELILFGGEYFNGQKTFLYNELYVYNTRKDTWTKVDIPSPPPRRCAHQAVVVPQGGGQLWVFGGEFASPNGEQFYHYKDLWVLHLATKTWEQVKSTGGPSGRSGHRMVAWKRQLILFGGFHESTRDYIYYNDVYAFNLDTFTWSKLSPSGTGPTPRSGCQMSVTPQGGIVVYGGYSKQRVKKDVDKGTRHSDMFLLKPEDGREDKWVWTRMNPSGVKPTPRSGFSVAMAPNHQTLFFGGVCDEEEEESLSGEFFNDLYFYDATRNRWFEGQLKGPKSEKKKRRRGRKEEPEGGSRPACGGAGTQGPVQLVKEVVAEDGTVVTIKQVLTAPGSAGQPRSEDEDSLEEAGSPAPGPCPRSNAMLAVKHGVLYVYGGMFEAGDRQVTLSDLHCLDLHRMEAWKALVEMDPETQEWLEETDSEEDSEEVEGAEGGVDDEDSGEESGAED

SEQ ID NO: 30580 - protein, 463 aa, Homo sapiens
  REGION 1..463: note = ENSP00000262530
MGKKGKKEKKGRGAEKTAAKMEKKVSKRSRKEETFLYNELYVYNTRKDTWTKVDIPSPPPRRCAHQAVVVPQGGGQLWVFGGEFASPNGEQFYHYKDLWVLHLATKTWEQVKSTGGPSGRSGHRMVAWKRQLILFGGFHESTRDYIYYNDVYAFNLDTFTWSKLSPSGTGPTPRSGCQMSVTPQGGIVVYGGYSKQRVKKDVDKGTRHSDMFLLKPEDGREDKWVWTRMNPSGVKPTPRSGFSVAMAPNHQTLFFGGVCDEEEEESLSGEFFNDLYFYDATRNRWFEGQLKGPKSEKKKRRRGRKEEPEGGSRPACGGAGTQGPVQLVKEVVAEDGTVVTIKQVLTAPGSAGQPRSEDEDSLEEAGSPAPGPCPRSNAMLAVKHGVLYVYGGMFEAGDRQVTLSDLHCLDLHRMEAWKALVEMDPETQEWLEETDSEEDSEEVEGAEGGVDDEDSGEESGAED

SEQ ID NO: 30581 - protein, 489 aa, Homo sapiens
  REGION 1..489: note = ENSP00000325717
MGKKGKKEKKGRGAEKTAAKMEKKVSKRSRKEEEDLEALIAHFQTLDAKRTQTVELPCPPPSPRLNASLSVHPEKDELILFGGEYFNGQKTFLYNELYVYNTRKDTWTKVDIPSPPPRRCAHQAVVVPQGGGQLWVFGGEFASPNGEQFYHYKDLWVLHLATKTWEQVKDYIYYNDVYAFNLDTFTWSKLSPSGTGPTPRSGCQMSVTPQGGIVVYGGYSKQRVKKDVDKGTRHSDMFLLKPEDGREDKWVWTRMNPSGVKPTPRSGFSVAMAPNHQTLFFGGVCDEEEEESLSGEFFNDLYFYDATRNRWFEGQLKGPKSEKKKRRRGRKEEPEGGSRPACGGAGTQGPVQLVKEVVAEDGTVVTIKQVLTAPGSAGQPRSEDEDSLEEAGSPAPGPCPRSNAMLAVKHGVLYVYGGMFEAGDRQVTLSDLHCLDLHRMEAWKALVEMDPETQEWLEETDSEEDSEEVEGAEGGVDDEDSGEESGAED

SEQ ID NO: 30582 - protein, 520 aa, Homo sapiens; identical to SEQ ID NO: 30579
  REGION 1..520: note = ENSP00000270583

SEQ ID NO: 30583 - protein, 99 aa, Homo sapiens
  REGION 1..99: note = ENSP00000455824
MGKKGKKEKKGRGAEKTAAKMEKKVSKRSRKEEEDLEALIAHFQTLDAKRTQTVELPCPPPSPRLFCITSSMSTIPERTPGPKLTSPVHLRGAVLTRRW

SEQ ID NO: 30584 - protein, 334 aa, Homo sapiens
  REGION 1..334: note = ENSP00000455780
MGKKGKKEKKGRGAEKTAAKMEKKVSKRSRKEEAVVVPQGGGQLWVFGGEFASPNGEQFYHYKDLWVLHLATKTWEQVKSTGGPSGRSGHRMVAWKRQLILFGGFHESTRDYIYYNDVYAFNLDTFTWSKLSPSGTGPTPRSGCQMSVTPQGGIVVYGGYSKQRVKKDVDKGTRHSDMFLLKPEDGREDKWVWTRMNPSGVKPTPRSGFSVAMAPNHQTLFFGGVCDEEEEESLSGEFFNDLYFYDATRNRWFEGQLKGPKSEKKKRRRGRKEEPEGGSRPACGGAGTQGPVQLVKEVVAEDGTVVTIKQVLTAPGSAGQPRSEDEDSLEEAGS

SEQ ID NO: 30585 - protein, 105 aa, Homo sapiens
  REGION 1..105: note = ENSP00000455666
MGKKGKKEKKGRGAEKTAAKMEKKVSKRSRKEEEDLEALIAHFQTLDAKRTQTVELPCPPPSPRLNASLSVHPEKDELILFGERTPGPKLTSPVHLRGAVLTRRW

SEQ ID NO: 30586 - protein, 86 aa, Homo sapiens
  REGION 1..86: note = ENSP00000455214
MGKKGKKEKKGRGAEKTAAKMEKKVSKRSRKEEEDLEALIAHFQTLDAKRTQTVELPCPPPSPRLNASLSVHPEKDELILFGDFFV

SEQ ID NO: 30587 - protein, 173 aa, Homo sapiens
  REGION 1..173: note = ENSP00000457990
MGKKGKKEKKGRGAEKTAAKMEKKVSKRSRKEEPGVCRRIRPDLGVECSAAAAHGFPNRGQFYGLPCARHSSLGFTPHEQEDLEALIAHFQTLDAKRTQTVELPCPPPSPRLNASLSVHPEKDELILFGGEYFNGQKTFLYNELYVYNTRKDTWTKVDIPSPPPRRCAHQAVV

SEQ ID NO: 30588 - protein, 38 aa, Homo sapiens
  REGION 1..38: note = ENSP00000457098
MGKKGKKEKKGRGAEKTAAKMEKKVSKRSRKEETWKRS

SEQ ID NO: 30589 - protein, 44 aa, Homo sapiens
  REGION 1..44: note = ENSP00000454681
MGKKGKKEKKGRGAEKTAAKMEKKVSKRSRKEERANNHHSSPEQ

SEQ ID NO: 30590 - protein, 44 aa, Homo sapiens; identical to SEQ ID NO: 30589
  REGION 1..44: note = ENSP00000457857

SEQ ID NO: 30591 - protein, 258 aa, Homo sapiens
  REGION 1..258: note = ENSP00000482433
MVAWKRQLILFGGFHESTRDYIYYNDVYAFNLDTFTWSKLSPSGTGPTPRSGCQMSVTPQGGIVVYGGYSKQRVKKDVDKGTRHSDMFLLKPEDGREDKWVWTRMNPSGVKPTPRSGFSVAMAPNHQTLFFGGVCDEEEEESLSGEFFNDLYFYDATRNRWFEGQLKKLRSGWRRRTRKRTVRRLRAPRVGSTTKTAERRAVRRTESPCQGRLASAVPTSAQDPAVLSEALGASVRPDAQERAEGGWPRPGCELSPMV

SEQ ID NO: 30592 - protein, 291 aa, Homo sapiens
  REGION 1..291: note = ENSP00000392909
MPGKLLPEKCALMWLHLGTRAPQRPKRESRGFPGWGCRTGQALPCRARPPAPAPSHPSSSLSLTPGPGSPRQTGPPCQTVAALYGLGAWQSHCGGGVGCHGQGRQPLGCQGWWSTLNPYLLESPGLFHTRSCGKLWDPKAVLISGVTSSHSSLGSPGTRPGVSLCKELPGCWAELCCRPRKMTKKDRAEPHLPLLGGPEGARAQQSPILHSLGSKRLPRCGWQLLTSSGGAAGGLCPMGHRREKDGGRVCTLGRTGGRHRPEQVAWAHEKGVSETGCLSQMPGVDEADEWQ

SEQ ID NO: 30593 - protein, 604 aa, Homo sapiens
  REGION 1..604: note = ENSP00000360949
MGLSSHLQSSKAGPTRIFTSNTHSSVVLQGFDQLRLEGLLCDVTLMPGDTDDAFPVHRVMMASASDYFKAMFTGGMKEQDLMCIKLHGVSKVGLRKIIDFIYTAKLSLNMDNLQDTLEAASFLQILPVLDFCKVFLISGVTLDNCVEVGRIANTYNLTEVDKYVNSFVLKNFPALLSTGEFLKLPFERLAFVLSSNSLKHCTELELFKATCRWLRLEEPRMDFAAKLMKNIRFPLMTPQELINYVQTVDFMRTDNTCVNLLLEASNYQMMPYMQPVMQSDRTAIRSDTTHLVTLGGVLRQQLVVSKELRMYDEKAHEWKSLAPMDAPRYQHGIAVIGNFLYVVGGQSNYDTKGKTAVDTVFRFDPRYNKWMQVASLNEKRTFFHLSALKGYLYAVGGRNAAGELPTVECYNPRTNEWTYVAKMSEPHYGHAGTVYGGVMYISGGITHDTFQKELMCFDPDTDKWIQKAPMTTVRGLHCMCTVGERLYVIGGNHFRGTSDYDDVLSCEYYSPILDQWTPIAAMLRGQSDVGVAVFENKIYVVGGYSWNNRCMVEIVQKYDPDKDEWHKVFDLPESLGGIRACTLTVFPPEETTPSPSRESPLSAP

SEQ ID NO: 30594 - protein, 604 aa, Homo sapiens; identical to SEQ ID NO: 30593
  REGION 1..604: note = ENSP00000360943

SEQ ID NO: 30595 - protein, 604 aa, Homo sapiens; identical to SEQ ID NO: 30593
  REGION 1..604: note = ENSP00000360945

SEQ ID NO: 30596 - protein, 655 aa, Homo sapiens
  REGION 1..655: note = ENSP00000262820
MPLKWKTSSPAIWKFPVPVLKTSRSTPLSPAYISLVEEEDQHMKLSLGGSEMGLSSHLQSSKAGPTRIFTSNTHSSVVLQGFDQLRLEGLLCDVTLMPGDTDDAFPVHRVMMASASDYFKAMFTGGMKEQDLMCIKLHGVSKVGLRKIIDFIYTAKLSLNMDNLQDTLEAASFLQILPVLDFCKVFLISGVTLDNCVEVGRIANTYNLTEVDKYVNSFVLKNFPALLSTGEFLKLPFERLAFVLSSNSLKHCTELELFKATCRWLRLEEPRMDFAAKLMKNIRFPLMTPQELINYVQTVDFMRTDNTCVNLLLEASNYQMMPYMQPVMQSDRTAIRSDTTHLVTLGGVLRQQLVVSKELRMYDEKAHEWKSLAPMDAPRYQHGIAVIGNFLYVVGGQSNYDTKGKTAVDTVFRFDPRYNKWMQVASLNEKRTFFHLSALKGYLYAVGGRNAAGELPTVECYNPRTNEWTYVAKMSEPHYGHAGTVYGGVMYISGGITHDTFQKELMCFDPDTDKWIQKAPMTTVRGLHCMCTVGERLYVIGGNHFRGTSDYDDVLSCEYYSPILDQWTPIAAMLRGQSDVGVAVFENKIYVVGGYSWNNRCMVEIVQKYDPDKDEWHKVFDLPESLGGIRACTLTVFPPEETTPSPSRESPLSAP

SEQ ID NO: 30597 - protein, 658 aa, Homo sapiens
  REGION 1..658: note = ENSP00000419803
MMRVQTLREKWAYWRRRQLSLKQADFKDIFKKSTSGSLVEEEDQHMKLSLGGSEMGLSSHLQSSKAGPTRIFTSNTHSSVVLQGFDQLRLEGLLCDVTLMPGDTDDAFPVHRVMMASASDYFKAMFTGGMKEQDLMCIKLHGVSKVGLRKIIDFIYTAKLSLNMDNLQDTLEAASFLQILPVLDFCKVFLISGVTLDNCVEVGRIANTYNLTEVDKYVNSFVLKNFPALLSTGEFLKLPFERLAFVLSSNSLKHCTELELFKATCRWLRLEEPRMDFAAKLMKNIRFPLMTPQELINYVQTVDFMRTDNTCVNLLLEASNYQMMPYMQPVMQSDRTAIRSDTTHLVTLGGVLRQQLVVSKELRMYDEKAHEWKSLAPMDAPRYQHGIAVIGNFLYVVGGQSNYDTKGKTAVDTVFRFDPRYNKWMQVASLNEKRTFFHLSALKGYLYAVGGRNAAGELPTVECYNPRTNEWTYVAKMSEPHYGHAGTVYGGVMYISGGITHDTFQKELMCFDPDTDKWIQKAPMTTVRGLHCMCTVGERLYVIGGNHFRGTSDYDDVLSCEYYSPILDQWTPIAAMLRGQSDVGVAVFENKIYVVGGYSWNNRCMVEIVQKYDPDKDEWHKVFDLPESLGGIRACTLTVFPPEETTPSPSRESPLSAP

SEQ ID NO: 30598 - protein, 94 aa, Homo sapiens
  REGION 1..94: note = ENSP00000393807
MDHLHRGELVAAILRNRRRRQLSLKQADFKDIFKKSTSGSLVEEEDQHMKLSLGGSEMGLSSHLQSSKAGPTRIFTSNTHSSVVLQGFDQLRLE

SEQ ID NO: 30599 - protein, 613 aa, Homo sapiens
  REGION 1..613: note = ENSP00000440707
MKLSLGGSEMGLSSHLQSSKAGPTRIFTSNTHSSVVLQGFDQLRLEGLLCDVTLMPGDTDDAFPVHRVMMASASDYFKAMFTGGMKEQDLMCIKLHGVSKVGLRKIIDFIYTAKLSLNMDNLQDTLEAASFLQILPVLDFCKVFLISGVTLDNCVEVGRIANTYNLTEVDKYVNSFVLKNFPALLSTGEFLKLPFERLAFVLSSNSLKHCTELELFKATCRWLRLEEPRMDFAAKLMKNIRFPLMTPQELINYVQTVDFMRTDNTCVNLLLEASNYQMMPYMQPVMQSDRTAIRSDTTHLVTLGGVLRQQLVVSKELRMYDEKAHEWKSLAPMDAPRYQHGIAVIGNFLYVVGGQSNYDTKGKTAVDTVFRFDPRYNKWMQVASLNEKRTFFHLSALKGYLYAVGGRNAAGELPTVECYNPRTNEWTYVAKMSEPHYGHAGTVYGGVMYISGGITHDTFQKELMCFDPDTDKWIQKAPMTTVRGLHCMCTVGERLYVIGGNHFRGTSDYDDVLSCEYYSPILDQWTPIAAMLRGQSDVGVAVFENKIYVVGGYSWNNRCMVEIVQKYDPDKDEWHKVFDLPESLGGIRACTLTVFPPEETTPSPSRESPLSAP

SEQ ID NO: 30600 - protein, 639 aa, Homo sapiens
  REGION 1..639: note = ENSP00000441029
MDHLHRGELVAAILRNRSLVEEEDQHMKLSLGGSEMGLSSHLQSSKAGPTRIFTSNTHSSVVLQGFDQLRLEGLLCDVTLMPGDTDDAFPVHRVMMASASDYFKAMFTGGMKEQDLMCIKLHGVSKVGLRKIIDFIYTAKLSLNMDNLQDTLEAASFLQILPVLDFCKVFLISGVTLDNCVEVGRIANTYNLTEVDKYVNSFVLKNFPALLSTGEFLKLPFERLAFVLSSNSLKHCTELELFKATCRWLRLEEPRMDFAAKLMKNIRFPLMTPQELINYVQTVDFMRTDNTCVNLLLEASNYQMMPYMQPVMQSDRTAIRSDTTHLVTLGGVLRQQLVVSKELRMYDEKAHEWKSLAPMDAPRYQHGIAVIGNFLYVVGGQSNYDTKGKTAVDTVFRFDPRYNKWMQVASLNEKRTFFHLSALKGYLYAVGGRNAAGELPTVECYNPRTNEWTYVAKMSEPHYGHAGTVYGGVMYISGGITHDTFQKELMCFDPDTDKWIQKAPMTTVRGLHCMCTVGERLYVIGGNHFRGTSDYDDVLSCEYYSPILDQWTPIAAMLRGQSDVGVAVFENKIYVVGGYSWNNRCMVEIVQKYDPDKDEWHKVFDLPESLGGIRACTLTVFPPEETTPSPSRESPLSAP

SEQ ID NO: 30601 - protein, 639 aa, Homo sapiens; identical to SEQ ID NO: 30600
  REGION 1..639: note = ENSP00000444450

SEQ ID NO: 30602 - protein, 604 aa, Homo sapiens
  REGION 1..604: note = ENSP00000332791
MAGDVEGFCSSIHDTSVSAGFRALYEEGLLLDVTLVIEDHQFQAHKALLATQSDYFRIMFTADMRERDQDKIHLKGLTATGFSHVLQFMYYGTIELSMNTVHEILQAAMYVQLIEVVKFCCSFLLAKICLENCAEIMRLLDDFGVNIEGVREKLDTFLLDNFVPLMSRPDFLSYLSFEKLMSYLDNDHLSRFPEIELYEAVQSWLRHDRRRWRHTDTIIQNIRFCLMTPTSVFEKVKTSEFYRYSRQLRYEVDQALNYFQNVHQQPLLDMKSSRIRSAKPQTTVFRGMIGHSMVNSKILLLKKPRVWWELEGPQVPLRPDCLAIVNNFVFLLGGEELGPDGEFHASSKVFRYDPRQNSWLQMADMSVPRSEFAVGVIGKFIYAVAGRTRDETFYSTERYDITNDKWEFVDPYPVNKYGHEGTVLNNKLFITGGITSSSTSKQVCVFDPSKEGTIEQRTRRTQVVTNCWENKSKMNYARCFHKMISYNGKLYVFGGVCVILRASFESQGCPSTEVYNPETDQWTILASMPIGRSGHGVTVLDKQIMVLGGLCYNGHYSDSILTFDPDENKWKEDEYPRMPCKLDGLQVCNLHFPDYVLDEVRRCN

SEQ ID NO: 30603 - protein, 634 aa, Homo sapiens
  REGION 1..634: note = ENSP00000331682
MAEEQEFTQLCKLPAQPSHPHCVNNTYRSAQHSQALLRGLLALRDSGILFDVVLVVEGRHIEAHRILLAASCDYFRGMFAGGLKEMEQEEVLIHGVSYNAMCQILHFIYTSELELSLSNVQETLVAACQLQIPEIIHFCCDFLMSWVDEENILDVYRLAELFDLSRLTEQLDTYILKNFVAFSRTDKYRQLPLEKVYSLLSSNRLEVSCETEVYEGALLYHYSLEQVQADQISLHEPPKLLETVRFPLMEAEVLQRLHDKLDPSPLRDTVASALMYHRNESLQPSLQSPQTELRSDFQCVVGFGGIHSTPSTVLSDQAKYLNPLLGEWKHFTASLAPRMSNQGIAVLNNFVYLIGGDNNVQGFRAESRCWRYDPRHNRWFQIQSLQQEHADLSVCVVGRYIYAVAGRDYHNDLNAVERYDPATNSWAYVAPLKREVYAHAGATLEGKMYITCGRRGEDYLKETHCYDPGSNTWHTLADGPVRRAWHGMATLLNKLYVIGGSNNDAGYRRDVHQVACYSCTSGQWSSVCPLPAGHGEPGIAVLDNRIYVLGGRSHNRGSRTGYVHIYDVEKDCWEEGPQLDNSISGLAACVLTLPRSLLLEPPRGTPDRSQADPDFASEVMSVSDWEEFDNSSED

SEQ ID NO: 30604 - protein, 225 aa, Homo sapiens
  REGION 1..225: note = ENSP00000400095
MFAGGLKEMEQEEVLIHGVSYNAMCQILHFIYTSELELSLSNVQETLVAACQLQIPEIIHFCCDFLMSWVDEENILDVYRLAELFDLSRLTEQLDTYILKNFVAFSRTDKYRQLPLEKVYSLLSSNRLEVSCETEVYEGALLYHYSLEQVQADQISLHEPPKLLETVRFPLMEAEVLQRLHDKLDPSPLRDTVASALMYHRNESLQPSLQSPQTELRSDFQCVVG

SEQ ID NO: 30605 - protein, 295 aa, Homo sapiens
  REGION 1..295: note = ENSP00000403999
MPPPWHPPPRLLAVCLLTTTQATVVRDLVAVRMAEEQEFTQLCKLPAQPSHPHCVNNTYRSAQHSQALLRGLLALRDSGILFDVVLVVEGRHIEAHRILLAASCDYFRGMFAGGLKEMEQEEVLIHGVSYNAMCQILHFIYTSELELSLSNVQETLVAACQLQIPEIIHFCCDFLMSWVDEENILDVYRLAELFDLSRLTEQLDTYILKNFVAFSRTDKYRQLPLEKVYSLLSSNRLEVSCETEVYEGALLYHYSLEQVQADQISLHEPPKLLETVRFPLMEAEVLQRLHDKLDP

SEQ ID NO: 30606 - protein, 235 aa, Homo sapiens
  REGION 1..235: note = ENSP00000398616
MAEEQEFTQLCKLPAQPSHPHCVNNTYRSAQHSQALLRGLLALRDSGILFDVVLVVEGRHIEAHRILLAASCDYFRGMFAGGLKEMEQEEVLIHGVSYNAMCQILHFIYTSELELSLSNVQETLVAACQLQIPEIIHFCCDFLMSWVDEENILDVYRLAELFDLSRLTEQLDTYILKNFVAFSRTDKYRQLPLEKVYSLLSSNRLEVSCETEVYEGALLYHYSLEQVQADQISLH

SEQ ID NO: 30607 - protein, 251 aa, Homo sapiens
  REGION 1..251: note = ENSP00000397882
MGLGSSCHLSLPKRAEALLCSRKATVVRDLVAVRMAEEQEFTQLCKLPAQPSHPHCVNNTYRSAQHSQALLRGLLALRDSGILFDVVLVVEGRHIEAHRILLAASCDYFRGMFAGGLKEMEQEEVLIHGVSYNAMCQILHFIYTSELELSLSNVQETLVAACQLQIPEIIHFCCDFLMSWVDEENILDVYRLAELFDLSRLTEQLDTYILKNFVAFSRTDKYRQLPLEKVYSLLSSNRLEVSCETEVYEGA

SEQ ID NO: 30608 - protein, 158 aa, Homo sapiens
  REGION 1..158: note = ENSP00000409092
MAEEQEFTQLCKLPAQPSHPHCVNNTYRSAQHSQALLRGLLALRDSGILFDVVLVVEGRHIEAHRILLAASCDYFRGMFAGGLKEMEQEEVLIHGVSYNAMCQILHFIYTSELELSLSNVQETLVAACQLQMLFTSPGLNGCHSLCRSQKLSISAVIS

SEQ ID NO: 30609 - protein, 107 aa, Homo sapiens
  REGION 1..107: note = ENSP00000402746
MPPPWHPPPRLLAVCLLTTTQATVVRDLVAVRMAEEQEFTQLCKLPAQPSHPHCVNNTYRSAQHSQALLRGLLALRDSGILFDVVLVVEGRHIEAHRILLAASCDYF

SEQ ID NO: 30610 - protein, 709 aa, Homo sapiens
  REGION 1..709: note = ENSP00000261425
MSGSRKEFDVKQILKIRWRWFGHQASSPNSTVDSQQGEFWNRGQTGANGGRKFLDPCSLQLPLASIGYRRSSQLDFQNSPSWPMASTSEVPAFEFTAEDCGGAHWLDRPEVDDGTSEEENESDSSSCRTSNSSQTLSSCHTMEPCTSDEFFQALNHAEQTFKKMENYLRHKQLCDVILVAGDRRIPAHRLVLSSVSDYFAAMFTNDVREARQEEIKMEGVEPNSLWSLIQYAYTGRLELKEDNIECLLSTACLLQLSQVVEACCKFLMKQLHPSNCLGIRSFADAQGCTDLHKVAHNYTMEHFMEVIRNQEFVLLPASEIAKLLASDDMNIPNEETILNALLTWVRHDLEQRRKDLSKLLAYIRLPLLAPQFLADMENNVLFRDDIECQKLIMEAMKYHLLPERRPMLQSPRTKPRKSTVGTLFAVGGMDSTKGATSIEKYDLRTNMWTPVANMNGRRLQFGVAVLDDKLYVVGGRDGLKTLNTVECYNPKTKTWSVMPPMSTHRHGLGVAVLEGPMYAVGGHDGWSYLNTVERWDPQARQWNFVATMSTPRSTVGVAVLSGKLYAVGGRDGSSCLKSVECFDPHTNKWTLCAQMSKRRGGVGVTTWNGLLYAIGGHDAPASNLTSRLSDCVERYDPKTDMWTAVASMSISRDAVGVCLLGDKLYAVGGYDGQAYLNTVEAYDPQTNEWTQVAPLCLGRAGACVVTVKL

SEQ ID NO: 30611 - protein, 568 aa, Homo sapiens
  REGION 1..568: note = ENSP00000423080
MEPCTSDEFFQALNHAEQTFKKMENYLRHKQLCDVILVAGDRRIPAHRLVLSSVSDYFAAMFTNDVREARQEEIKMEGVEPNSLWSLIQYAYTGRLELKEDNIECLLSTACLLQLSQVVEACCKFLMKQLHPSNCLGIRSFADAQGCTDLHKVAHNYTMEHFMEVIRNQEFVLLPASEIAKLLASDDMNIPNEETILNALLTWVRHDLEQRRKDLSKLLAYIRLPLLAPQFLADMENNVLFRDDIECQKLIMEAMKYHLLPERRPMLQSPRTKPRKSTVGTLFAVGGMDSTKGATSIEKYDLRTNMWTPVANMNGRRLQFGVAVLDDKLYVVGGRDGLKTLNTVECYNPKTKTWSVMPPMSTHRHGLGVAVLEGPMYAVGGHDGWSYLNTVERWDPQARQWNFVATMSTPRSTVGVAVLSGKLYAVGGRDGSSCLKSVECFDPHTNKWTLCAQMSKRRGGVGVTTWNGLLYAIGGHDAPASNLTSRLSDCVERYDPKTDMWTAVASMSISRDAVGVCLLGDKLYAVGGYDGQAYLNTVEAYDPQTNEWTQVAPLCLGRAGACVVTVKL

SEQ ID NO: 30612 - protein, 755 aa, Homo sapiens
  REGION 1..755: note = ENSP00000423897
MNVIYFPLHIFVVYSRAYTSLVLVGCTNLCAVLFARCLDDHLVSLRMSGSRKEFDVKQILKIRWRWFGHQASSPNSTVDSQQGEFWNRGQTGANGGRKFLDPCSLQLPLASIGYRRSSQLDFQNSPSWPMASTSEVPAFEFTAEDCGGAHWLDRPEVDDGTSEEENESDSSSCRTSNSSQTLSSCHTMEPCTSDEFFQALNHAEQTFKKMENYLRHKQLCDVILVAGDRRIPAHRLVLSSVSDYFAAMFTNDVREARQEEIKMEGVEPNSLWSLIQYAYTGRLELKEDNIECLLSTACLLQLSQVVEACCKFLMKQLHPSNCLGIRSFADAQGCTDLHKVAHNYTMEHFMEVIRNQEFVLLPASEIAKLLASDDMNIPNEETILNALLTWVRHDLEQRRKDLSKLLAYIRLPLLAPQFLADMENNVLFRDDIECQKLIMEAMKYHLLPERRPMLQSPRTKPRKSTVGTLFAVGGMDSTKGATSIEKYDLRTNMWTPVANMNGRRLQFGVAVLDDKLYVVGGRDGLKTLNTVECYNPKTKTWSVMPPMSTHRHGLGVAVLEGPMYAVGGHDGWSYLNTVERWDPQARQWNFVATMSTPRSTVGVAVLSGKLYAVGGRDGSSCLKSVECFDPHTNKWTLCAQMSKRRGGVGVTTWNGLLYAIGGHDAPASNLTSRLSDCVERYDPKTDMWTAVASMSISRDAVGVCLLGDKLYAVGGYDGQAYLNTVEAYDPQTNEWTQVAPLCLGRAGACVVTVKL

SEQ ID NO: 30613 - protein, 757 aa, Homo sapiens
  REGION 1..757: note = ENSP00000371355
MNVIYFPLHIFVVYSRAYTSLVLVGCTNLCAVLFARCLDDHLVSLRMSGSRKEFDVKQILKIRWRWFGHQASSPNSTVDSQQGEFWNRGQTGANGGRKFLDPCSLQLPLASIGYRRSSQLDFQNSPSWPMASTSEVPAFEFTAEDCGGAHWLDRPEVDDGTSEEENESDSSSCRTSNSSQTLSSCHTMEPCTSDEFFQALNHAEQTFKKMENYLRHKQLCDVILVAGDRRIPAHRLVLSSVSDYFAAMFTNDVREARQEEIKMEGVEPNSLWSLIQYAYTGRLELKEDNIECLLSTACLLQLSQVVEACCKFLMKQLHPSNCLGIRSFADAQGCTDLHKVAHNYTMEHFMEVIRNQEFVLLPASEIAKLLASDDMNIPNEETILNALLTWVRHDLEQRRKDLSKLLAYIRLPLLAPQFLADMENNVLFRDDIECQKLIMEAMKYHLLPERRPMLQSPRTKPRKSTVGTLFAVGGMDSTKGATSIEKYDLRTNMWTPVANMNGRRLQFGVAVLDDKLYVVGGRDGLKTLNTVECYNPKTKTWSVMPPMSTHRHGLGVAVLEGPMYAVGGHDGWSYLNTVERWDPQARQWNFVATMSTPRSTVGVAVLSGKLYAVGGRDGSSCLKSVECFDPHTNKWTLCAQMSKRRGGVGVTTWNGLLYAIGGHDAPASNLTSRLSDCVERYDPKTDMWTAVASMSISRDAVGVCLLGDKLYAVGGYDGQAYLNTVEAYDPQTNEWTQVWHSCFIITLTLFLLKQFLW

SEQ ID NO: 30614 - protein, 694 aa, Homo sapiens
  REGION 1..694: note = ENSP00000261426
MNVIYFPLHIFVVYSRAYTSLVLVGCTNLCAVLFARCLDDHLVSLRMSGSRKEFDVKQILKIRWRWFGHQASSPNSTVDSQQGEFWNRGQTGANGGRKFLDPCSLQLPLASIGYRRSSQLDFQNSPSWPMASTSEVPAFEFTAEDCGGAHWLDRPEVDDGTSEEENESDSSSCRLVLSSVSDYFAAMFTNDVREARQEEIKMEGVEPNSLWSLIQYAYTGRLELKEDNIECLLSTACLLQLSQVVEACCKFLMKQLHPSNCLGIRSFADAQGCTDLHKVAHNYTMEHFMEVIRNQEFVLLPASEIAKLLASDDMNIPNEETILNALLTWVRHDLEQRRKDLSKLLAYIRLPLLAPQFLADMENNVLFRDDIECQKLIMEAMKYHLLPERRPMLQSPRTKPRKSTVGTLFAVGGMDSTKGATSIEKYDLRTNMWTPVANMNGRRLQFGVAVLDDKLYVVGGRDGLKTLNTVECYNPKTKTWSVMPPMSTHRHGLGVAVLEGPMYAVGGHDGWSYLNTVERWDPQARQWNFVATMSTPRSTVGVAVLSGKLYAVGGRDGSSCLKSVECFDPHTNKWTLCAQMSKRRGGVGVTTWNGLLYAIGGHDAPASNLTSRLSDCVERYDPKTDMWTAVASMSISRDAVGVCLLGDKLYAVGGYDGQAYLNTVEAYDPQTNEWTQVAPLCLGRAGACVVTVKL

SEQ ID NO: 30615 - protein, 36 aa, Homo sapiens
  REGION 1..36: note = ENSP00000426949
  VARIANT 1: note = Any amino acid
XAEDCGGAHWLDRPEVDDGTSEEENESDSSSCSSPD

SEQ ID NO: 30616 - protein, 282 aa, Homo sapiens
  REGION 1..282: note = ENSP00000425512
  VARIANT 1: note = Any amino acid
XRTNMWTPVANMNGRRLQFGVAVLDDKLYVVGGRDGLKTLNTVECYNPKTKTWSVMPPMSTHRHGLGVAVLEGPMYAVGGHDGWSYLNTVERWDPQARQWNFVATMSTPRSTVGVAVLSGKLYAVGGRDGSSCLKSVECFDPHTNKWTLCAQMSKRRGGVGVTTWNGLLYAIGGHDAPASNLTSRLSDCVERYDPKTDMWTAVASMSISRDAVGVCLLGDKLYAVGGYDGQAYLNTVEAYDPQTNEWTQVFSHTFEDSKDHLVAIKQTIWRQNSLSEEFRSH

SEQ ID NO: 30617 - protein, 244 aa, Homo sapiens
  REGION 1..244: note = ENSP00000366047
MKKLMVVLSLIAAAWAEEQNKLVHGGPCDKTSHPYQAALYTSGHLLCGGVLIHPLWVLTAAHCKKPNLQVFLGKHNLRQRESSQEQSSVVRAVIHPDYDAASHDQDIMLLRLARPAKLSELIQPLPLERDCSANTTSCHILGWGKTADGDFPDTIQCAYIHLVSREECEHAYPGQITQNMLCAGDEKYGKDSCQGDSGGPLVCGDHLRGLVSWGNIPCGSKEKPGVYTNVCRYTNWIQKTIQAK

SEQ ID NO: 30618 - protein, 244 aa, Homo sapiens; identical to SEQ ID NO: 30617
  REGION 1..244: note = ENSP00000309148

SEQ ID NO: 30619 - protein, 40 aa, Homo sapiens
  REGION 1..40: note = ENSP00000469630
MKKLMVVLSLIAAGIFRSSWGSITFGKGRVPRSRVLLSGL

SEQ ID NO: 30620 - protein, 244 aa, Homo sapiens; identical to SEQ ID NO: 30617
  REGION 1..244: note = ENSP00000470482

SEQ ID NO: 30621 - protein, 40 aa, Homo sapiens; identical to SEQ ID NO: 30619
  REGION 1..40: note = ENSP00000471948

SEQ ID NO: 30622 - protein, 69 aa, Homo sapiens
  REGION 1..69: note = ENSP00000469702
MADPATRHLTPTKLPSTPRATCSVVGSLSIHCGSSQLPTAKNRIFRSSWGSITFGKGRVPRSRVLLSGL

SEQ ID NO: 30623 - protein, 137 aa, Homo sapiens
  REGION 1..137: note = ENSP00000375684
MLLRLARPAKLSELIQPLPLERDCSANTTSCHILGWGKTADGDFPDTIQCAYIHLVSREECEHAYPGQITQNMLCAGDEKYGKDSCQGDSGGPLVCGDHLRGLVSWGNIPCGSKEKPGVYTNVCRYTNWIQKTIQAK

SEQ ID NO: 30624 - protein, 1749 aa, Homo sapiens
  REGION 1..1749: note = ENSP00000304437
MQAMDPAAADLYEEDGKDLDFYDFEPLPTLPEDEENVSLADILSLRDRGLSEQEAWAVCLECSLSMRSVAHAAIFQSLCITPDTLAFNTSGNVCFMEQLSDDPEGAFVPPEFDVTGNTFEAHIYSLGATLKAALEYVAEPTLEPRLSQDLEALLSRMQAEDPGDRPDLESIIALCEEKLQLTSSCRVCRSLSAVGRRVLSIESFGALQDVSESSWRERPAPGNAGPRRPPGDPSTDPEVLPTPEGPESETSRGPRASPTKALLSTPVRNGESHSREGLAGLVLDAERTLGELDRDALRRSRLRKVQTFPRLLSDSPEATLCLPLTRGKSQLPISELFSPDPRKAFLDRKNGLSSFQAQPKCRLWPEQEPEHQLGRVPCAGRSTDRGPGVPGSPGQPETSHPSQGPAEAPADPRDASGEAQTPRDDERIPEGARQLESAAAEQWVSLQDLLSQLGRPFREYELWALCLACLRALQTRPEHPAYLCLDSVLVAEDGAVLFQPPPANGSYDSFFLAPELAEERLVTEKASVYCVAAVLWTAAKFSVPRNHKLALPRRLKTLLLDMARRSAPERPSAAEAIKVCGSYLLQRGMDSRKILAHLRASICQVYQEEETISLQNAFSVVELKPSVAPAPEPSPGFLPVNSDTGLVAVPGPVPGQHPCGEEATQLPAAFTSEATHFKPIVLAQNASVARDQPALAQEESEERGGQREGEGEEKLSLEAHAGSPSLKTPDGPVPGPGPQGAAPEPLGASVQRDSAQGRPCPPPQAPANQPEGASSAAPGSPVPAPPTKASALPVEQGPAEPIPPGVASGGLRPDALGPTTAHHGPRHPPKPPRSKATERPGQEPEGPGATPAGERDDQSPDSVPERPRPADRRLCLPCVDASPLPGRTACPSLQEATRLIQEEFAFDGYLDNGLEALIMGEYIFALKDLTFATFCGAISEKFCDLYWDEKLLQNLFKVVNGQASPSPSTAEEAGSQLEGSQSPRSPSSKRPSLHRLGKEKPAMARTSSRAPCSPTSVSDVDSDALSRGNFEVGFRPQRSVKAERAQQPEAGEDRRPAGGASDVEAVTRLARSKGVGPALSPGPAGFQSCSPGWCSAFYEADCFGADVHNYVKDLGRQQADGALPDAQSPELEQQLMMEKRNYRKTLKFYQKLLQKEKRNKGSDVKTMLSKLKGQLEEMKSRVQFLSLVKKYLQVMYAERWGLEPCTLPVIVNIAAAPCDTLDFSPLDESSSLIFYNVNKHPGGRQKARILQAGTPLGLMAYLYSSDAFLEGYVQQFLYTFRYFCTPHDFLHFLLDRINSTLTRAHQDPTSTFTKIYRRSLCVLQAWVEDCYAVDFPRNSGLLGKLEDFISSKILPLDGSAKHLLGLLEVGMDRRAEGNPRGTDLENPREAEEDARPFNALCKRLSEDGISRKSFPWRLPRGNGLVLPPHKERPYTIAAALPKPCFLEDFYGPCAKTSEKGPYFLTEYSTHQLFSQLTLLQQELFQKCHPVHFLNSRALGVMDKSTAIPKASSSESLSAKTCSLFLPNYVQDKYLLQLLRNADDVSTWVAAEIVTSHTSKLQVNLLSKFLLIAKSCYEQRNFATAMQILSGLEHLAVRQSPAWRILPAKIAEVMEELKAVEVFLKSDSLCLMEGRRFRAQPTLPSAHLLAMHIQQLETGGFTMTNGAHRWSKLRNIAKVVSQVHAFQENPYTFSPDPKLQSYLKQRIARFSGADISTLAADSRANFHQVSSEKHSRKIQDKLRRMKATFQ

SEQ ID NO: 30625 - protein, 1141 aa, Homo sapiens
  REGION 1..1141: note = ENSP00000357560
MRSVAHAAIFQSLCITPDTLAFNTSGNVCFMEQLSDDPEGAFVPPEFDVTGNTFEAHIYSLGATLKAALEYVAEPTLEPRLSQDLEALLSRMQAEDPGDRPDLESIIALCEEKLQLTSSCRVCRSLSAVGRRVLSIESFGALQDVSESSWRERPAPGNAGPRRPPGDPSTDPEVLPTPEGPESETSRGPRASPTKALLSTPVRNGESHSREGLAGLVLDAERTLGELDRDALRRSRLRKVQTFPRLLSDSPEATLCLPLTRGKSQLPISELFSPDPRKAFLDRKNGLSSFQAQPKCRLWPEQEPEHQLGRVPCAGRSTDRGPGVPGSPGQPETSHPSQGPAEAPADPRDASGEAQTPRDDERIPEGARQLESAAAEQWVSLQDLLSQLGRPFREYELWALCLACLRALQTRPEHPAYLCLDSVLVAEDGAVLFQPPPANGSYDSFFLAPELAEERLVTEKASVYCVAAVLWTAAKFSVPRNHKLALPRRLKTLLLDMARRSAPERPSAAEAIKVCGSYLLQRGMDSRKILAHLRASICQVYQEEETISLQNAFSVVELKPSVAPAPEPSPGFLPVNSDTGLVAVPGPVPGQHPCGEEATQLPAAFTSEATHFKPIVLAQNASVARDQPALAQEESEERGGQREGEGEEKLSLEAHAGSPSLKTPDGPVPGPGPQGAAPEPLGASVQRDSAQGRPCPPPQAPANQPEGASSAAPGSPVPAPPTKASALPVEQGPAEPIPPGVASGGLRPDALGPTTAHHGPRHPPKPPRSKATERPGQEPEGPGATPAGERDDQSPDSVPERPRPADRRLCLPCVDASPLPGRTACPSLQEATRLIQEEFAFDGYLDNGLEALIMGEYIFALKDLTFATFCGAISEKFCDLYWDEKLLQNLFKVVNGQASPSPSTAEEAGSQLEGSQSPRSPSSKRPSLHRLGKEKPAMARTSSRAPCSPTSVSDVDSDALSRGNFEVGFRPQRSVKAERAQQPEAGEDRRPAGGASDVEAVTRLARSKGVGPALSPGPAGFQSCSPGWCSAFYEADCFGADVHNYVKDLGRQQADGALPDAQSPELEQQLMMEKRNYRKTLKFYQKLLQKEKRNKGSDVKTMLSKLKGQLEEMKSRVQFLSLVKKYLQASGLRAPLCPVRQ

SEQ ID NO: 30626 - protein, 458 aa, Homo sapiens
  REGION 1..458: note = ENSP00000219837
MITKTHKVDLGLPEKKKKKKVVKEPETRYSVLNNDDYFADVSPLRATSPSKSVAHGQAPEMPLVKKKKKKKKGVSTLCEEHVEPETTLPARRTEKSPSLRKQVFGHLEFLSGEKKNKKSPLAMSHASGVKTSPDPRQGEEETRVGKKLKKHKKEKKGAQDPTAFSVQDPWFCEAREARDVGDTCSVGKKDEEQAALGQKRKRKSPREHNGKVKKKKKIHQEGDALPGHSKPSRSMESSPRKGSKKKPVKVEAPEYIPISDDPKASAKKKMKSKKKVEQPVIEEPALKRKKKKKRKESGVAGDPWKEETDTDLEVVLEKKGNMDEAHIDQVRRKALQEEIDRESGKTEASETRKWTGTQFGQWDTAGFENEDQKLKFLRLMGGFKNLSPSFSRPASTIARPNMALGKKAADSLQQNLQRDYDRAMSWKYSRGAGLGFSTAPNKIFYIDRNASKSVKLED

SEQ ID NO: 30627 - protein, 137 aa, Homo sapiens
  REGION 1..137: note = ENSP00000455015
MDEAHIDQVRRKALQEEIDRESGKTEASETRKWTGTQFGQWDTAGFENEDQKLKFLRLMGGFKNLSPSFSRPASTIARPNMALGKKAADSLQQNLQRDYDRAMSWKYSRGAGLGFSTAPNKIFYIDRNASKSVKLED

SEQ ID NO: 30628 - protein, 199 aa, Homo sapiens
  REGION 1..199: note = ENSP00000455369
  VARIANT 1: note = Any amino acid
XEKKGAQDPTAFSVQDPWFCEAREARDVGDTCSVGKKDEEQAALGQKRKRKSPREHNGKVKKKKKIHQEGDALPGHSKPSRSMESSPRKGSKKKPVKVEAPEYIPISDDPKASAKKKMKSKKKVEQPVIEEPALKRKKKKKRKESGVAGDPWKEVRRKALQEEIDRESGKTEASETRKWTGTQFGQWDTAGFENEDQKL

SEQ ID NO: 30629 - protein, 79 aa, Homo sapiens
  REGION 1..79: note = ENSP00000454329
MITKTHKVDLGLPEKKKKKKVVKEPETRYSVLNNDDYFADVSPLRATSPSKSVAHGQAPEMPLVKKKKKKKKGVSTLCE

SEQ ID NO: 30630 - protein, 1134 aa, Homo sapiens
  REGION 1..1134: note = ENSP00000397992
MWNDIELLTNDDTGSGYLSVGSRKEHGTALYQVDLLVKISSEKASLNPKIQACSLSDGFIIVADQSVILLDSICRSLQLHLVFDTEVDVVGLCQEGKFLLVGERSGNLHLIHVTSKQTLLTNAFVQKANDENRRTYQNLVIEKDGSNEGTYYMLLLTYSGFFCITNLQLLKIQQAIENVDFSTAKKGTGNCAFSKWEPDSSKKGMTVKNLIDAEIIKGAKKFQLIDNLLFVLDTDNVLSLWDIYTLTPVWNWPSLHVEEFLLTTEADSPSSVTWQGITNLKLIALTASANKKMKNLMVYSLPTMEILYSLEVSSVSSLVQTGISTDTIYLLEGVCKNDPKLSEDSVSVLVLRCLTEALPENRLSRLLHKHRFAEAESFAIQFGLDVELVYKVKSNHILEKLALSSVDASEQTEWQQLVDDAKENLHKIQDDEFVVNYCLKAQWITYETTQEMLNYAKTRLLKKEDKTALIYSDGLKEVLRAHAKLTTFYGAFGPEKFSGSSWIEFLNNEDDLKDIFLQLKEGNLVCAQYLWLRHRANFESRFDVKMLESLLNSMSASVSLQKLCPWFKNDVIPFVRRTVPEGQIILAKWLEQAARNLELTDKANWPENGLQLAEIFFTAEKTDELGLASSWHWISLKDYQNTEEVCQLRTLVNNLRELITLHRKYNCKLALSDFEKENTTTIVFRMFDKVLAPELIPSILEKFIRVYMREHDLQEEELLLLYIEDLLNRCSSKSTSLFETAWEAKAMAVIACLSDTDKPSELFELQEDEALRRVQYLLLSRPIDYSSRMLFVFATSTTTTLGMHQLTFAHRTRALQCLFYLADKETIESLFKKPIEEVKSYLRCITFLASFETLNIPITYELFCSSPKEGMIKGLWKNHSHESMAVRLVTELCLEYKIYDLQLWNGLLQKLLGFNMIPYLRKVLKAISSIHSLWQVPYFSKAWQRVIQIPLLSASCPLSPDQLSDCSESLIAVLECPVSGDLDLIGVARQYIQLELPAFALACLMLMPHSEKRHQQIKNFLGSCDPQVILKQLEEHMNTGQLAGFSHQIRSLILNNIINKKEFGILAKTKYFQMLKMHAMNTNNITELVNYLANDLSLDEASVLITEYSKHCGKPVPPDTAPCEILKMFLSGLS

SEQ ID NO: 30631 - protein, 2209 aa, Homo sapiens
  REGION 1..2209: note = ENSP00000328236
MWNDIELLTNDDTGSGYLSVGSRKEHGTALYQVDLLVKISSEKASLNPKIQACSLSDGFIIVADQSVILLDSICRSLQLHLVFDTEVDVVGLCQEGKFLLVGERSGNLHLIHVTSKQTLLTNAFVQKANDENRRTYQNLVIEKDGSNEGTYYMLLLTYSGFFCITNLQLLKIQQAIENVDFSTAKKLQGQIKSSFISTENYHTLGCLSLVAGDLASEVPVIIGGTGNCAFSKWEPDSSKKGMTVKNLIDAEIIKGAKKFQLIDNLLFVLDTDNVLSLWDIYTLTPVWNWPSLHVEEFLLTTEADSPSSVTWQGITNLKLIALTASANKKMKNLMVYSLPTMEILYSLEVSSVSSLVQTGISTDTIYLLEGVCKNDPKLSEDSVSVLVLRCLTEALPENRLSRLLHKHRFAEAESFAIQFGLDVELVYKVKSNHILEKLALSSVDASEQTEWQQLVDDAKENLHKIQDDEFVVNYCLKAQWITYETTQEMLNYAKTRLLKKEDKTALIYSDGLKEVLRAHAKLTTFYGAFGPEKFSGSSWIEFLNNEDDLKDIFLQLKEGNLVCAQYLWLRHRANFESRFDVKMLESLLNSMSASVSLQKLCPWFKNDVIPFVRRTVPEGQIILAKWLEQAARNLELTDKANWPENGLQLAEIFFTAEKTDELGLASSWHWISLKDYQNTEEVCQLRTLVNNLRELITLHRKYNCKLALSDFEKENTTTIVFRMFDKVLAPELIPSILEKFIRVYMREHDLQEEELLLLYIEDLLNRCSSKSTSLFETAWEAKAMAVIACLSDTDLIFDAVLKIMYAAVVPWSAAVEQLVKQHLEMDHPKVKLLQESYKLMEMKKLLRGYGIREVNLLNKEIMRVVRYILKQDVPSSLEDALKVAQAFMLSDDEIYSLRIIDLIDREQGEDCLLLLKSLPPAEAEKTAERVIIWARLALQEEPDHSKEGKAWRMSVAKTSVDILKILCDIQKDNLQKKDECEEMLKLFKEVASLQENFEVFLSFEDYSNSSLVADLREQHIKAHEVAQAKHKPGSTPEPIAAEVRSPSMESKLHRQALALQMSKQELEAELTLRALKDGNIKTALKKCSDLFKYHCNADTGKLLFLTCQKLCQMLADNVPVTVPVGLNLPSMIHDLASQAATICSPDFLLDALELCKHTLMAVELSRQCQMDDCGILMKASFGTHKDPYEEWSYSDFFSEDGIVLESQMVLPVIYELISSLVPLAESKRYPLESTSLPYCSLNEGDGLVLPVINSISALLQNLQESSQWELALRFVVGSFGTCLQHSVSNFMNATLSEKLFGETTLVKSRHVVMELKEKAVIFIRENATTLLHKVFNCRLVDLDLALGYCTLLPQKDVFENLWKLIDKAWQNYDKILAISLVGSELASLYQEIEMGLKFRELSTDAQWGIRLGKLGISFQPVFRQHFLTKKDLIKALVENIDMDTSLILEYCSTFQLDCDAVLQLFIETLLHNTNAGQGQGDASMDSAKRRHPKLLAKALEMVPLLTSTKDLVISLSGILHKLDPYDYEMIEVVLKVIERADEKITNININQALSILKHLKSYRRISPPVDLEYQYMLEHVITLPSAAQTRLPFHLIFFGTAQNFWKILSTELSEESFPTLLLISKLMKFSLDTLYVSTAKHVFEKKLKPKLLKLTQAKSSTLINKEITKITQTIESCLLSIVNPEWAVAIAISLAQDIPEGSFKISALKFCLYLAERWLQNIPSQDEKREKAEALLKKLHIQYRRSGTEAVLIAHKLNTEEYLRVIGKPAHLIVSLYEHPSINQRIQNSSGTDYPDIHAAAKEIAEVNEINLEKVWDMLLEKWLCPSTKPGEKPSELFELQEDEALRRVQYLLLSRPIDYSSRMLFVFATSTTTTLGMHQLTFAHRTRALQCLFYLADKETIESLFKKPIEEVKSYLRCITFLASFETLNIPITYELFCSSPKEGMIKGLWKNHSHESMAVRLVTELCLEYKIYDLQLWNGLLQKLLGFNMIPYLRKVLKAISSIHSLWQVPYFSKAWQRVIQIPLLSASCPLSPDQLSDCSESLIAVLECPVSGDLDLIGVARQYIQLELPAFALACLMLMPHSEKRHQQIKNFLGSCDPQVILKQLEEHMNTGQLAGFSHQIRSLILNNIINKKEFGILAKTKYFQMLKMHAMNTNNITELVNYLANDLSLDEASVLITEYSKHCGKPVPPDTAPCEILKMFLSGLS

SEQ ID NO: 30632 - protein, 104 aa, Homo sapiens
  REGION 1..104: note = ENSP00000397140
MDTSLILEYCSTFQLDCDAVLQLFIETLLHNTNAGQGQGDASMDSAKRRHPKLLAKALEMVPLLTSTKDLVISLSGILHKLDPYDYEMIEVVLKVIERADEKIT

SEQ ID NO: 30633 - protein, 130 aa, Homo sapiens
  REGION 1..130: note = ENSP00000408760
MLMPHSEKRHQQIKNFLGSCDPQVILKQLEEHMNTGQLAGFSHQIRSLILNNIINKKEFGILAKTKYFQMLKMHAMNTNNITELVNYLANDLSLDEASVLITEYSKHCGKPVPPDTAPCEILKMFLSGLS

SEQ ID NO: 30634 - protein, 208 aa, Homo sapiens
  REGION 1..208: note = ENSP00000439119
KVWDMLLEKWLCPSTKPGEKPSELFELQEDEALRRVQYLLLSRPIDYSSRMLFVFATSTTTTLGMHQLTFAHRTRALQCLFYLADKETIESLFKKPIEEVNSPKEGMIKGLWKNHSHESMAVRLVTELCLEYKIYDLQLWNGLLQKLLGFNMIPYLRKVLKAISSIHSLWQVPYFSKAWQRVIQIPLLSASCPLSPDQLSDCSESLIA

SEQ ID NO: 30635 - protein, 130 aa, Homo sapiens; identical to SEQ ID NO: 30633
  REGION 1..130: note = ENSP00000437344

SEQ ID NO: 30636 - protein, 58 aa, Homo sapiens
  REGION 1..58: note = ENSP00000377613
MELSQLLNEIRANYEKILTRNQIETVLSTRIQVMISYRQAPSRIRRQSMSTQFLSRPL

SEQ ID NO: 30637 - protein, 295 aa, Homo sapiens
  REGION 1..295: note = ENSP00000377616
MELSQLLNEIRANYEKILTRNQIETVLSTRIQLEEDISKKMDKDEEALKAAQAELKEARRQWHHLQVEIESLHAVERGLENSLHASEQHYQMQLQDLETVIEGLEKELQEVRRGIEKQLQEHEMLLNTKMRLEQEIATYRHLLEKEEIRYYGCIQGGKKDKKPTTSRVGFVLPSAIINEISFTTKVPQKYENENVETVTKQAILNGSIVKESTEAHGTIQTEKVDEVIKEWEGSFFKDNPRLRKKSVSLRFDLHLAATDEGCLETKQDNLPDIEVRLIMRRSCSIPSIKPPSTAN

SEQ ID NO: 30638 - protein, 58 aa, Homo sapiens; identical to SEQ ID NO: 30636
  REGION 1..58: note = ENSP00000463865

SEQ ID NO: 30639 - protein, 58 aa, Homo sapiens; identical to SEQ ID NO: 30636
  REGION 1..58: note = ENSP00000464647

SEQ ID NO: 30640 - protein, 525 aa, Homo sapiens
  REGION 1..525: note = ENSP00000264651
MSCSSRASSSRAGGSSSARVSAGGSSFSSGSRCGLGGSSAQGFRGGASSCSLSGGSSGAFGGSFGGGFGSCSVGGGFGGASGSGTGFGGGSSFGGVSGFGRGSGFCGSSRFSSGATGGFYSYGGGMGGGVGDGGLFSGGEKQTMQNLNDRLANYLDKVRALEEANTDLENKIKEWYDKYGPGSGDGGSGRDYSKYYSIIEDLRNQIIAATVENAGIILHIDNARLAADDFRLKYENELCLRQSVEADINGLRKVLDDLTMTRSDLEMQIESFTEELAYLRKNHEEEMKNMQGSSGGEVTVEMNAAPGTDLTKLLNDMRAQYEELAEQNRREAEERFNKQSASLQAQISTDAGAATSAKNEITELKRTLQALEIELQSQLAMKSSLEGTLADTEAGYVAQLSEIQTQISALEEEICQIWGETKCQNAEYKQLLDIKTRLEVEIETYRRLLDGEGGGSSFAEFGGRNSGSVNMGSRDLVSGDSRSGSCSGQGRDSSKTRVTKTIVEELVDGKVVSSQVSSISEVKVK

SEQ ID NO: 30641 - protein, 146 aa, Homo sapiens
  REGION 1..146: note = ENSP00000354001
MCHTSCSSGCQPACCAPSPCQPACCVPSSCQASCCVPVGCQSSVCVPVSFKPAVCLPVSCQSSVCVPMSFKSAVCVPVSCQSSVCVPVSCRPIVCAAPSCQSSLCVPVSCRPVVYAAPSCQSSGCCQPSCTSVLCRPISYSISSCC

SEQ ID NO: 30642 - protein, 950 aa, Homo sapiens [sequence omitted]

SEQ ID NO: 30643 - protein, 921 aa, Homo sapiens
  REGION 1..921: note = ENSP00000389715
MIDLSISNLEGLRTKCATSNDLTQKEIRTLESKLVKYFSRQLSCKKKVALQERNAELDGFPQLRHWFRIVDVRKEVLEEISPGQLSLEDLLEMTDEQVCETVEKYGANREECARLNASLSCLRNVHMSGGNLSKQDWTIQWPTTETGKENNPVCPPEPTPWIRTHLSQSPRVPSKCVQHYCHTSPTPGAPVYTHVDRLTVDAYPGLCPPPPLESGHRSLPPSPRQRHAVRTPPRTPNIVTTVTPPGTPPMRKKNKLKPPGTPPPSSRKLIHLIPGFTALHRSKSHEFQLGHRVDEAHTPKAKKKSKPLNLKIHSSVGSCENIPSQQRSPLLSERSLRSFFVGHAPFLPSTPPVHTEANFSANTLSVPRWSPQIPRRDLGNSIKHRFSTKYWMSQTCTVCGKGMLFGLKCKNCKLKCHNKCTKEAPPCHLLIIHRGDPARLVRTESVPCDINNPLRKPPRYSDLHISQTLPKTNKINKDHIPVPYQPDSSSNPSSTTSSTPSSPAPPLPPSATPPSPLHPSPQCTRQQKNFNLPASHYYKYKQQFIFPDVVPVPETPTRAPQVILHPVTSNPILEGNPLLQIEVEPTSENEEVHDEAEESEDDFEEMNLSLLSARSFPRKASQTSIFLQEWDIPFEQLEIGELIGKGRFGQVYHGRWHGEVAIRLIDIERDNEDQLKAFKREVMAYRQTRHENVVLFMGACMSPPHLAIITSLCKGRTLYSVVRDAKIVLDVNKTRQIAQEIVKGMGYLHAKGILHKDLKSKNVFYDNGKVVITDFGLFSISGVLQAGRREDKLRIQNGWLCHLAPEIIRQLSPDTEEDKLPFSKHSDVFALGTIWYELHAREWPFKTQPAEAIIWQMGTGMKPNLSQIGMGKEISDILLFCWAFEQEERPTFTKLMDMLEKLPKRNRRLSHPGHFWKSAEL

SEQ ID NO: 30644 - protein, 1257 aa, Homo sapiens
  REGION 1..1257: note = ENSP00000359077
MVVALRYVWPLLLCSPCLLIQIPEEYEGHHVMEPPVITEQSPRRLVVFPTDDISLKCEASGKPEVQFRWTRDGVHFKPKEELGVTVYQSPHSGSFTITGNNSNFAQRFQGIYRCFASNKLGTAMSHEIRLMAEGAPKWPKETVKPVEVEEGESVVLPCNPPPSAEPLRIYWMNSKILHIKQDERVTMGQNGNLYFANVLTSDNHSDYICHAHFPGTRTIIQKEPIDLRVKATNSMIDRKPRLLFPTNSSSHLVALQGQPLVLECIAEGFPTPTIKWLRPSGPMPADRVTYQNHNKTLQLLKVGEEDDGEYRCLAENSLGSARHAYYVTVEAAPYWLHKPQSHLYGPGETARLDCQVQGRPQPEVTWRINGIPVEELAKDQKYRIQRGALILSNVQPSDTMVTQCEARNRHGLLLANAYIYVVQLPAKILTADNQTYMAVQGSTAYLLCKAFGAPVPSVQWLDEDGTTVLQDERFFPYANGTLGIRDLQANDTGRYFCLAANDQNNVTIMANLKVKDATQITQGPRSTIEKKGSRVTFTCQASFDPSLQPSITWRGDGRDLQELGDSDKYFIEDGRLVIHSLDYSDQGNYSCVASTELDVVESRAQLLVVGSPGPVPRLVLSDLHLLTQSQVRVSWSPAEDHNAPIEKYDIEFEDKEMAPEKWYSLGKVPGNQTSTTLKLSPYVHYTFRVTAINKYGPGEPSPVSETVVTPEAAPEKNPVDVKGEGNETTNMVITWKPLRWMDWNAPQVQYRVQWRPQGTRGPWQEQIVSDPFLVVSNTSTFVPYEIKVQAVNSQGKGPEPQVTIGYSGEDYPQAIPELEGIEILNSSAVLVKWRPVDLAQVKGHLRGYNVTYWREGSQRKHSKRHIHKDHVVVPANTTSVILSGLRPYSSYHLEVQAFNGRGSGPASEFTFSTPEGVPGHPEALHLECQSNTSLLLRWQPPLSHNGVLTGYVLSYHPLDEGGKGQLSFNLRDPELRTHNLTDLSPHLRYRFQLQATTKEGPGEAIVREGGTMALSGISDFGNISATAGENYSVVSWVPKEGQCNFRFHILFKALGEEKGGASLSPQYVSYNQSSYTQWDLQPDTDYEIHLFKERMFRHQMAVKTNGTGRVRLPPAGFATEGWFIGFVSAIILLLLVLLILCFIKRSKGGKYSVKDKEDTQVDSEARPMKDETFGEYRSLESDNEEKAFGSSQPSLNGDIKPLGSDDSLADYGGSVDVQFNEDGSFIGQYSGKKEKEAAGGNDSSGATSPINPAVALE

SEQ ID NO: 30645 - protein, 1248 aa, Homo sapiens
  REGION 1..1248: note = ENSP00000359072
MVVALRYVWPLLLCSPCLLIQIPEELMEPPVITEQSPRRLVVFPTDDISLKCEASGKPEVQFRWTRDGVHFKPKEELGVTVYQSPHSGSFTITGNNSNFAQRFQGIYRCFASNKLGTAMSHEIRLMAEGAPKWPKETVKPVEVEEGESVVLPCNPPPSAEPLRIYWMNSKILHIKQDERVTMGQNGNLYFANVLTSDNHSDYICHAHFPGTRTIIQKEPIDLRVKATNSMIDRKPRLLFPTNSSSHLVALQGQPLVLECIAEGFPTPTIKWLRPSGPMPADRVTYQNHNKTLQLLKVGEEDDGEYRCLAENSLGSARHAYYVTVEAAPYWLHKPQSHLYGPGETARLDCQVQGRPQPEVTWRINGIPVEELAKDQKYRIQRGALILSNVQPSDTMVTQCEARNRHGLLLANAYIYVVQLPAKILTADNQTYMAVQGSTAYLLCKAFGAPVPSVQWLDEDGTTVLQDERFFPYANGTLGIRDLQANDTGRYFCLAANDQNNVTIMANLKVKDATQITQGPRSTIEKKGSRVTFTCQASFDPSLQPSITWRGDGRDLQELGDSDKYFIEDGRLVIHSLDYSDQGNYSCVASTELDVVESRAQLLVVGSPGPVPRLVLSDLHLLTQSQVRVSWSPAEDHNAPIEKYDIEFEDKEMAPEKWYSLGKVPGNQTSTTLKLSPYVHYTFRVTAINKYGPGEPSPVSETVVTPEAAPEKNPVDVKGEGNETTNMVITWKPLRWMDWNAPQVQYRVQWRPQGTRGPWQEQIVSDPFLVVSNTSTFVPYEIKVQAVNSQGKGPEPQVTIGYSGEDYPQAIPELEGIEILNSSAVLVKWRPVDLAQVKGHLRGYNVTYWREGSQRKHSKRHIHKDHVVVPANTTSVILSGLRPYSSYHLEVQAFNGRGSGPASEFTFSTPEGVPGHPEALHLECQSNTSLLLRWQPPLSHNGVLTGYVLSYHPLDEGGKGQLSFNLRDPELRTHNLTDLSPHLRYRFQLQATTKEGPGEAIVREGGTMALSGISDFGNISATAGENYSVVSWVPKEGQCNFRFHILFKALGEEKGGASLSPQYVSYNQSSYTQWDLQPDTDYEIHLFKERMFRHQMAVKTNGTGRVRLPPAGFATEGWFIGFVSAIILLLLVLLILCFIKRSKGGKYSVKDKEDTQVDSEARPMKDETFGEYSDNEEKAFGSSQPSLNGDIKPLGSDDSLADYGGSVDVQFNEDGSFIGQYSGKKEKEAAGGNDSSGATSPINPAVALE

SEQ ID NO: 30646 - protein, 153 aa, Homo sapiens
  REGION 1..153: note = ENSP00000359075
EEKGGASLSPQYVSYNQSSYTQWDLQPDTDYEIHLFKERMFRHQMAVKTNGTVKDKEDTQVDSEARPMKDETFGEYSDNEEKAFGSSQPSLNGDIKPLGSDDSLADYGGSVDVQFNEDGSFIGQYSGKKEKEAAGGNDSSGATSPINPAVALE

SEQ ID NO: 30647 - protein, 1253 aa, Homo sapiens
  REGION 1..1253: note = ENSP00000355380
MVVALRYVWPLLLCSPCLLIQIPEEYEGHHVMEPPVITEQSPRRLVVFPTDDISLKCEASGKPEVQFRWTRDGVHFKPKEELGVTVYQSPHSGSFTITGNNSNFAQRFQGIYRCFASNKLGTAMSHEIRLMAEGAPKWPKETVKPVEVEEGESVVLPCNPPPSAEPLRIYWMNSKILHIKQDERVTMGQNGNLYFANVLTSDNHSDYICHAHFPGTRTIIQKEPIDLRVKATNSMIDRKPRLLFPTNSSSHLVALQGQPLVLECIAEGFPTPTIKWLRPSGPMPADRVTYQNHNKTLQLLKVGEEDDGEYRCLAENSLGSARHAYYVTVEAAPYWLHKPQSHLYGPGETARLDCQVQGRPQPEVTWRINGIPVEELAKDQKYRIQRGALILSNVQPSDTMVTQCEARNRHGLLLANAYIYVVQLPAKILTADNQTYMAVQGSTAYLLCKAFGAPVPSVQWLDEDGTTVLQDERFFPYANGTLGIRDLQANDTGRYFCLAANDQNNVTIMANLKVKDATQITQGPRSTIEKKGSRVTFTCQASFDPSLQPSITWRGDGRDLQELGDSDKYFIEDGRLVIHSLDYSDQGNYSCVASTELDVVESRAQLLVVGSPGPVPRLVLSDLHLLTQSQVRVSWSPAEDHNAPIEKYDIEFEDKEMAPEKWYSLGKVPGNQTSTTLKLSPYVHYTFRVTAINKYGPGEPSPVSETVVTPEAAPEKNPVDVKGEGNETTNMVITWKPLRWMDWNAPQVQYRVQWRPQGTRGPWQEQIVSDPFLVVSNTSTFVPYEIKVQAVNSQGKGPEPQVTIGYSGEDYPQAIPELEGIEILNSSAVLVKWRPVDLAQVKGHLRGYNVTYWREGSQRKHSKRHIHKDHVVVPANTTSVILSGLRPYSSYHLEVQAFNGRGSGPASEFTFSTPEGVPGHPEALHLECQSNTSLLLRWQPPLSHNGVLTGYVLSYHPLDEGGKGQLSFNLRDPELRTHNLTDLSPHLRYRFQLQATTKEGPGEAIVREGGTMALSGISDFGNISATAGENYSVVSWVPKEGQCNFRFHILFKALGEEKGGASLSPQYVSYNQSSYTQWDLQPDTDYEIHLFKERMFRHQMAVKTNGTGRVRLPPAGFATEGWFIGFVSAIILLLLVLLILCFIKRSKGGKYSVKDKEDTQVDSEARPMKDETFGEYSDNEEKAFGSSQPSLNGDIKPLGSDDSLADYGGSVDVQFNEDGSFIGQYSGKKEKEAAGGNDSSGATSPINPAVALE

SEQ ID NO: 30648 - protein, 190 aa, Homo sapiens
  REGION 1..190: note = ENSP00000397792
  VARIANT 1: note = Any amino acid
XDPSLQPSITWRGDGRDLQELGDSDKYFIEDGRLVIHSLDYSDQGNYSCVASTELDVVESRAQLLVVEYDIEFEDKEMAPEKWYSLGKVPGNQTSTTLKLSPYVHYTFRVTAINKYGPGEPSPVSETVVTPEAAPEKNPVDVKGEGNETTNMVITWKPLRWMDWNAPQVQYRVQWRPQGTRGPWQEQIVS

SEQ ID NO: 30649 - protein, 150 aa, Homo sapiens
  REGION 1..150: note = ENSP00000402407
MVVALRYVWPLLLCSPCLLIQIPEEYEGHHVMEPPVITEQSPRRLVVFPTDDISLKCEASGKPEVQFRWTRDGVHFKPKEELGVTVYQSPHSGSFTITGNNSNFAQRFQGIYRCFASNKLGTAMSHEIRLMAEGAPKWPKETVKPVEVEE

SEQ ID NO: 30650 - protein, 128 aa, Homo sapiens
  REGION 1..128: note = ENSP00000384902
MVVALRYVWPLLLCSPCLLIQIPEELMEPPVITEQSPRRLVVFPTDDISLKCEASGKPEVQFRWTRDGVHFKPKEELGVTVYQSPHSGSFTITGNNSNFAQRFQGIYRCFASNKLGTAMSHEIRLMAE

SEQ ID NO: 30651 - protein, 90 aa, Homo sapiens
  REGION 1..90: note = ENSP00000392524
MVVALRYVWPLLLCSPCLLIQIPEELMEPPVITEQSPRRLVVFPTDDISLKCEASGKPEVQFRWTRDGVHFKPKEELGVTVYQSPHSGSF

SEQ ID NO: 30652 - protein, 83 aa, Homo sapiens
  REGION 1..83: note = ENSP00000396079
MVVALRYVWPLLLCSPCLLIQIPEEYEGHHVMEPPVITEQSPRRLVVFPTDDISLKCEASGKPEVQFRWTRDGVHFKPKEELG

SEQ ID NO: 30653 - protein, 1248 aa, Homo sapiens; identical to SEQ ID NO: 30645
  REGION 1..1248: note = ENSP00000354712

SEQ ID NO: 30654 - protein, 354 aa, Homo sapiens
  REGION 1..354: note = ENSP00000247194
MESALAVPRLPPHDPGTPVLSVVDMHTGGEPLRIVLAGCPEVSGPTLLAKRRYMRQHLDHVRRRLMFEPRGHRDMYGAVLVPSELPDAHLGVLFLHNEGYSSMCGHAVLALGRFALDFGLVPAPPAGTREARVNIHCPCGLVTAFVACEDGRSHGPVRFHSVPAFVLATDLMVDVPGHGKVMVDIAYGGAFYAFVTAEKLGLDICSAKTRDLVDAASAVTEAVKAQFKINHPDSEDLAFLYGTILTDGKDAYTKEPTTNICVFADEQVDRSPTGSGVTARIALQYHKGLLELNQMRAFKSSATGSVFTGKAVREAKCGDFKAVIVEVSGQAHYTGTASFIIEDDDPLRDGFLLK

SEQ ID NO: 30655 - protein, 145 aa, Homo sapiens
  REGION 1..145: note = ENSP00000431608
MVDVPGHGKVMVDIAYGGAFYAFVTAEKLGLDICSAKTRDLVDAASAVTEAVKAQFKINHPDSEDLAFLYGTILTDGKDAYTKEPTTNICVFADEQVDRSPTGSGVTARIALQYHKGLLELNQMRAFKSSATGSVFTGKAVRELL

SEQ ID NO: 30656 - protein, 142 aa, Homo sapiens
  REGION 1..142: note = ENSP00000423874
MVDVPGHGKVMVDIAYGGAFYAFVTAEKLGLDICSAKTRDLVDAASAVTEAVKAQFKINHPDSEDLAFLYGTILTDGKDAYTKEPTTNICVFADEQVDRSPTGSGVTARIALQYHKGLLELNQMRAFKSSATGSVFTGKAVR

SEQ ID NO: 30657 - protein, 705 aa, Homo sapiens
  REGION 1..705: note = ENSP00000216237
MEKPRSIEETPSSEPMEEEEDDDLELFGGYDSFRSYNSSVGSESSSYLEESSEAENEDREAGELPTSPLHLLSPGTPRSLDGSGSEPAVCEMCGIVGTREAFFSKTKRFCSVSCSRSYSSNSKKASILARLQGKPPTKKAKVLHKAAWSAKIGAFLHSQGTGQLADGTPTGQDALVLGFDWGKFLKDHSYKAAPVSCFKHVPLYDQWEDVMKGMKVEVLNSDAVLPSRVYWIASVIQTAGYRVLLRYEGFENDASHDFWCNLGTVDVHPIGWCAINSKILVPPRTIHAKFTDWKGYLMKRLVGSRTLPVDFHIKMVESMKYPFRQGMRLEVVDKSQVSRTRMAVVDTVIGGRLRLLYEDGDSDDDFWCHMWSPLIHPVGWSRRVGHGIKMSERRSDMAHHPTFRKIYCDAVPYLFKKVRAVYTEGGWFEEGMKLEAIDPLNLGNICVATVCKVLLDGYLMICVDGGPSTDGLDWFCYHASSHAIFPATFCQKNDIELTPPKGYEAQTFNWENYLEKTKSKAAPSRLFNMDCPNHGFKVGMKLEAVDLMEPRLICVATVKRVVHRLLSIHFDGWDSEYDQWVDCESPDIYPVGWCELTGYQLQPPVAAEPATPLKAKEATKKKKKQFGKKRKRIPPTKTRPLRQGSKKPLLEDDPQGARKISSEPVPGEIIAVRVKEEHLDVASPDKASSPELPVSVENIKQETDD

SEQ ID NO: 30658 - protein, 40 aa, Homo sapiens
  REGION 1..40: note = ENSP00000405849
MEKPRSIERWGVAVLPRLVSNSWVQAIHLPQPPKVLGLQM

SEQ ID NO: 30659 - protein, 614 aa, Homo sapiens
  REGION 1..614: note = ENSP00000414423
MEKPRSIEETPSSEPMEEEEDDDLELFGGYDSFRSYNSSVGSESSSYLEESSEAENEDREAGELPTSPLHLLSPGTPRSLDGSGSEPAVCEMCGIVGTREAFFSKTKRFCSVSCSRSYSSNSKKASILARLQGKPPTKKAKVLHKAAWSAKIGAFLHSQGTGQLADGTPTGQDALVLGFDWGKFLKDHSYKAAPVSCFKHVPLYDQWEDVMKGMKVEVLNSDAVLPSRVYWIASVIQTAGYRVLLRYEGFENDASHDFWCNLGTVDVHPIGWCAINSKILVPPRTIHAKFTDWKGYLMKRLVGSRTLPVDFHIKMVESMKYPFRQGMRLEVVDKSQVSRTRMAVVDTVIGGRLRLLYEDGDSDDDFWCHMWSPLIHPVGWSRRVGHGIKMSERRSDMAHHPTFRKIYCDAVPYLFKKVRAVYTEGGWFEEGMKLEAIDPLNLGNICVATVCKVLLDGYLMICVDGGPSTDGLDWFCYHASSHAIFPATFCQKNDIELTPPKGYEAQTFNWENYLEKTKSKAAPSRLFNMDCPNHGFKVGMKLEAVDLMEPRLICVATVKRVVHRLLSIHFDGWDSEYDQWVDCESPDIYPVGWCELTGYQLQPPVAAGKLPRSL

SEQ ID NO: 30660 - protein, 288 aa, Homo sapiens
  REGION 1..288: note = ENSP00000399405
  VARIANT 1: note = Any amino acid
XRPHLQNQWRKRKMTTWSCLVAMIVSGVITAVWAVRAAPIWRSQVKQKMRIGKQGNCRPPRCICSALGLLAPWMAVVLSQGKPPTKKAKVLHKAAWSAKIGAFLHSQGTGQLADGTPTGQDALVLGFDWGKFLKDHSYKAAPVSCFKHVPLYDQWEDVMKGMKVEVLNSDAVLPSRVYWIASVIQTAGYRVLLRYEGFENDASHDFWCNLGTVDVHPIGWCAINSKILVPPRTIHAKFTDWKGYLMKRLVGSRTLPVDFHIKVGSEPLTDVPPSALPFFCILHATHWS

SEQ ID NO: 30661 - protein, 232 aa, Homo sapiens
  REGION 1..232: note = ENSP00000403767
ETPSSEPMEEEEDDDLELFGGYDSFRSYNSSVGSESSSYLEESSEAENEDREAGELPTSPLHLLSPGTPRSLDGSGSEPAVCEMCGIVGTREAFFSKTKRFCSVSCSRSYSSNSKKASILARLQGKPPTKKAKVLHKAAWSAKIGAFLHSQGTGQLADGTPTGQDALVLGFDWGKFLKDHSYKAAPVSCFKHGIGCCFGMKALKMTPAMTSGATWEQWMSTPLAGVPSTARS

SEQ ID NO: 30662 - protein, 3075 aa, Homo sapiens
  REGION 1..3075: note = ENSP00000374309
MRGGVLLVLLLCVAAQCRQRGLFPAILNLASNAHISTNATCGEKGPEMFCKLVEHVPGRPVRNPQCRICDGNSANPRERHPISHAIDGTNNWWQSPSIQNGREYHWVTITLDLRQVFQVAYVIIKAANAPRPGNWILERSLDGTTFSPWQYYAVSDSECLSRYNITPRRGPPTYRADDEVICTSYYSRLVPLEHGEIHTSLINGRPSADDLSPKLLEFTSARYIRLRLQRIRTLNADLMTLSHREPKELDPIVTRRYYYSIKDISVGGMCICYGHASSCPWDETTKKLQCQCEHNTCGESCNRCCPGYHQQPWRPGTVSSGNTCEACNCHNKAKDCYYDESVAKQKKSLNTAGQFRGGGVCINCLQNTMGINCETCIDGYYRPHKVSPYEDEPCRPCNCDPVGSLSSVCIKDDLHSDLHNGKQPGQCPCKEGYTGEKCDRCQLGYKDYPTCVSCGCNPVGSASDEPCTGPCVCKENVEGKACDRCKPGFYNLKEKNPRGCSECFCFGVSDVCSSLSWPVGQVNSMSGWLVTDLISPRKIPSQQDALGGRHQVSINNTAVMQRLAPKYYWAAPEAYLGNKLTAFGGFLKYTVSYDIPVETVDSNLMSHADVIIKGNGLTLSTQAEGLSLQPYEEYLNVVRLVPENFQDFHSKRQIDRDQLMTVLANVTHLLIRANYNSAKMALYRLESVSLDIASSNAIDLVVAADVEHCECPQGYTGTSCESCLSGYYRVDGILFGGICQPCECHGHAAECNVHGVCIACAHNTTGVHCEQCLPGFYGEPSRGTPGDCQPCACPLTIASNNFSPTCHLNDGDEVVCDWCAPGYSGAWCERCADGYYGNPTVPGESCVPCDCSGNVDPSEAGHCDSVTGECLKCLGNTDGAHCERCADGFYGDAVTAKNCRACECHVKGSHSAVCHLETGLCDCKPNVTGQQCDQCLHGYYGLDSGHGCRPCNCSVAGSVSDGCTDEGQCHCVPGVAGKRCDRCAHGFYAYQDGSCTPCDCPHTQNTCDPETGECVCPPHTQGVKCEECEDGHWGYDAEVGCQACNCSLVGSTHHRCDVVTGHCQCKSKFGGRACDQCSLGYRDFPDCVPCDCDLRGTSGDACNLEQGLCGCVEETGACPCKENVFGPQCNECREGTFALRADNPLGCSPCFCSGLSHLCSELEDYVRTPVTLGSDQPLLRVVSQSNLRGTTEGVYYQAPDFLLDAATVRQHIRAEPFYWRLPQQFQGDQLMAYGGKLKYSVAFYSLDGVGTSNFEPQVLIKGGRIRKQVIYMDAPAPENGVRQEQEVAMRENFWKYFNSVSEKPVTREDFMSVLSDIEYILIKASYGQGLQQSRISDISMEVGRKAEKLHPEEEVASLLENCVCPPGTVGFSCQDCAPGYHRGKLPAGSDRGPRPLVAPCVPCSCNNHSDTCDPNTGKCLNCGDNTAGDHCDVCTSGYYGKVTGSASDCALCACPHSPPASFSPTCVLEGDHDFRCDACLLGYEGKHCERCSSSYYGNPQTPGGSCQKCDCNPHGSVHGDCDRTSGQCVCRLGASGLRCDECEPRHILMETDCVSCDDECVGVLLNDLDEIGDAVLSLNLTGIIPVPYGILSNLENTTKYLQESLLKENMQKDLGKIKLEGVAEETDNLQKKLTRMLASTQKVNRATERIFKESQDLAIAIERLQMSITEIMEKTTLNQTLDEDFLLPNSTLQNMQQNGTSLLEIMQIRDFTQLHQNATLELKAAEDLLSQIQENYQKPLEELEVLKEAASHVLSKHNNELKAAEALVREAEAKMQESNHLLLMVNANLREFSDKKLHVQEEQNLTSELIVQGRGLIDAAAAQTDAVQDALEHLEDHQDKLLLWSAKIRHHIDDLVMHMSQRNAVDLVYRAEDHAAEFQRLADVLYSGLENIRNVSLNATSAAYVHYNIQSLIEESEELARDAHRTVTETSLLSESLVSNGKAAVQRSSRFLKEGNNLSRKLPGIALELSELRNKTNRFQENAVEITRQTNESLLILRAIPKGIRDKGAKTKELATSASQSAVSTLRDVAGLSQELLNTSASLSRVNTTLRETHQLLQDSTMATLLAGRKVKDVEIQANLLFDRLKPLKMLEENLSRNLSEIKLLISQARKQAASIKVAVSADRDCIRAYQPQISSTNYNTLTLNVKTQEPDNLLFYLGSSTASDFLAVEMRRGRVAFLWDLGSGSTRLEFPDFPIDDNRWHSIHVARFGNIGSLSVKEMSSNQKSPTKTSKSPGTANVLDVNNSTLMFVGGLGGQIKKSPAVKVTHFKGCLGEAFLNGKSIGLWNYIEREGKCRGCFGSSQNEDPSFHFDGSGYSVVEKSLPATVTQIIMLFNTFSPNGLLLYLGSYGTKDFLSIELFRGRVKVMTDLGSGPITLLTDRRYNNGTWYKIAFQRNRKQGVLAVIDAYNTSNKETKQGETPGASSDLNRLDKDPIYVGGLPRSRVVRRGVTTKSFVGCIKNLEISRSTFDLLRNSYGVRKGCLLEPIRSVSFLKGGYIELPPKSLSPESEWLVTFATTNSSGIILAALGGDVEKRGDREEAHVPFFSVMLIGGNIEVHVNPGDGTGLRKALLHAPTGTCSDGQAHSISLVRNRRIITVQLDENNPVEMKLGTLVESRTINVSNLYVGGIPEGEGTSLLTMRRSFHGCIKNLIFNLELLDFNSAVGHEQVDLDTCWLSERPKLAPDAEDSKLLPEPRAFPEQCVVDAALEYVPGAHQFGLTQNSHFILPFNQSAVRKKLSVELSIRTFASSGLIYYMAHQNQADYAVLQLHGGRLHFMFDLGKGRTKVSHPALLSDGKWHTVKTDYVKRKGFITVDGRESPMVTVVGDGTMLDVEGLFYLGGLPSQYQARKIGNITHSIPACIGDVTVNSKQLDKDSPVSAFTVNRCYAVAQEGTYFDGSGYAALVKEGYKVQSDVNITLEFRTSSQNGVLLGISTAKVDAIGLELVDGKVLFHVNNGAGRITAAYEPKTATVLCDGKWHTLQANKSKHRITLIVDGNAVGAESPHTQSTSVDTNNPIYVGGYPAGVKQKCLRSQTSFRGCLRKLALIKSPQVQSFDFSRAFELHGVFLHSCPGTES

SEQ ID NO: 30663 - protein, 217 aa, Homo sapiens
  REGION 1..217: note = ENSP00000491821
MLIGGNIEVHVNPGDGTGLRKALLHAPTGTCSDGQAHSISLVRNRRIITVQLDENNPVEMKLGTLVESRTINVSNLYVGGIPEGEGTSLLTMRRSFHGCIKNLIFNLELLDFNSAVGMSKSTWTPAGCQKGLSWLPMQRTKLLPEPRAFPVGAASFTISQVQSAKEGLGQRELKWGLAVKVPAKAGAGAGAGAVLKIRAGTGRERVPQATQMTRPNP

SEQ ID NO: 30664 - protein, 3122 aa, Homo sapiens
  REGION 1..3122: note = ENSP00000400365
MPGAAGVLLLLLLSGGLGGVQAQRPQQQRQSQAHQQRGLFPAVLNLASNALITTNATCGEKGPEMYCKLVEHVPGQPVRNPQCRICNQNSSNPNQRHPITNAIDGKNTWWQSPSIKNGIEYHYVTITLDLQQVFQIAYVIVKAANSPRPGNWILERSLDDVEYKPWQYHAVTDTECLTLYNIYPRTGPPSYAKDDEVICTSFYSKIHPLENGEIHISLINGRPSADDPSPELLEFTSARYIRLRFQRIRTLNADLMMFAHKDPREIDPIVTRRYYYSVKDISVGGMCICYGHARACPLDPATNKSRCECEHNTCGDSCDQCCPGFHQKPWRAGTFLTKTECEACNCHGKAEECYYDENVARRNLSLNIRGKYIGGGVCINCTQNTAGINCETCTDGFFRPKGVSPNYPRPCQPCHCDPIGSLNEVCVKDEKHARRGLAPGSCHCKTGFGGVSCDRCARGYTGYPDCKACNCSGLGSKNEDPCFGPCICKENVEGGDCSRCKSGFFNLQEDNWKGCDECFCSGVSNRCQSSYWTYGKIQDMSGWYLTDLPGRIRVAPQQDDLDSPQQISISNAEARQALPHSYYWSAPAPYLGNKLPAVGGQLTFTISYDLEEEEEDTERVLQLMIILEGNDLSISTAQDEVYLHPSEEHTNVLLLKEESFTIHGTHFPVRRKEFMTVLANLKRVLLQITYSFGMDAIFRLSSVNLESAVSYPTDGSIAAAVEVCQCPPGYTGSSCESCWPRHRRVNGTIFGGICEPCQCFGHAESCDDVTGECLNCKDHTGGPYCDKCLPGFYGEPTKGTSEDCQPCACPLNIPSNNFSPTCHLDRSLGLICDGCPVGYTGPRCERCAEGYFGQPSVPGGSCQPCQCNDNLDFSIPGSCDSLSGSCLICKPGTTGRYCELCADGYFGDAVDAKNCQPCRCNAGGSFSEVCHSQTGQCECRANVQGQRCDKCKAGTFGLQSARGCVPCNCNSFGSKSFDCEESGQCWCQPGVTGKKCDRCAHGYFNFQEGGCTACECSHLGNNCDPKTGRCICPPNTIGEKCSKCAPNTWGHSITTGCKACNCSTVGSLDFQCNVNTGQCNCHPKFSGAKCTECSRGHWNYPRCNLCDCFLPGTDATTCDSETKKCSCSDQTGQCTCKVNVEGIHCDRCRPGKFGLDAKNPLGCSSCYCFGTTTQCSEAKGLIRTWVTLKAEQTILPLVDEALQHTTTKGIVFQHPEIVAHMDLMREDLHLEPFYWKLPEQFEGKKLMAYGGKLKYAIYFEAREETGFSTYNPQVIIRGGTPTHARIIVRHMAAPLIGQLTRHEIEMTEKEWKYYGDDPRVHRTVTREDFLDILYDIHYILIKATYGNFMRQSRISEISMEVAEQGRGTTMTPPADLIEKCDCPLGYSGLSCEACLPGFYRLRSQPGGRTPGPTLGTCVPCQCNGHSSLCDPETSICQNCQHHTAGDFCERCALGYYGIVKGLPNDCQQCACPLISSSNNFSPSCVAEGLDDYRCTACPRGYEGQYCERCAPGYTGSPGNPGGSCQECECDPYGSLPVPCDPVTGFCTCRPGATGRKCDGCKHWHAREGWECVFCGDECTGLLLGDLARLEQMVMSINLTGPLPAPYKMLYGLENMTQELKHLLSPQRAPERLIQLAEGNLNTLVTEMNELLTRATKVTADGEQTGQDAERTNTRAKSLGEFIKELARDAEAVNEKAIKLNETLGTRDEAFERNLEGLQKEIDQMIKELRRKNLETQKEIAEDELVAAEALLKKVKKLFGESRGENEEMEKDLREKLADYKNKVDDAWDLLREATDKIREANRLFAVNQKNMTALEKKKEAVESGKRQIENTLKEGNDILDEANRLADEINSIIDYVEDIQTKLPPMSEELNDKIDDLSQEIKDRKLAEKVSQAESHAAQLNDSSAVLDGILDEAKNISFNATAAFKAYSNIKDYIDEAEKVAKEAKDLAHEATKLATGPRGLLKEDAKGCLQKSFRILNEAKKLANDVKENEDHLNGLKTRIENADARNGDLLRTLNDTLGKLSAIPNDTAAKLQAVKDKARQANDTAKDVLAQITELHQNLDGLKKNYNKLADSVAKTNAVVKDPSKNKIIADADATVKNLEQEADRLIDKLKPIKELEDNLKKNISEIKELINQARKQANSIKVSVSSGGDCIRTYKPEIKKGSYNNIVVNVKTAVADNLLFYLGSAKFIDFLAIEMRKGKVSFLWDVGSGVGRVEYPDLTIDDSYWYRIVASRTGRNGTISVRALDGPKASIVPSTHHSTSPPGYTILDVDANAMLFVGGLTGKLKKADAVRVITFTGCMGETYFDNKPIGLWNFREKEGDCKGCTVSPQVEDSEGTIQFDGEGYALVSRPIRWYPNISTVMFKFRTFSSSALLMYLATRDLRDFMSVELTDGHIKVSYDLGSGMASVVSNQNHNDGKWKSFTLSRIQKQANISIVDIDTNQEENIATSSSGNNFGLDLKADDKIYFGGLPTLRNLSMKARPEVNLKKYSGCLKDIEISRTPYNILSSPDYVGVTKGCSLENVYTVSFPKPGFVELSPVPIDVGTEINLSFSTKNESGIILLGSGGTPAPPRRKRRQTGQAYYAILLNRGRLEVHLSTGARTMRKIVIRPEPNLFHDGREHSVHVERTRGIFTVQVDENRRYMQNLTVEQPIEVKKLFVGGAPPEFQPSPLRNIPPFEGCIWNLVINSVPMDFARPVSFKNADIGRCAHQKLREDEDGAAPAEIVIQPEPVPTPAFPTPTPVLTHGPCAAESEPALLIGSKQFGLSRNSHIAIAFDDTKVKNRLTIELEVRTEAESGLLFYMARINHADFATVQLRNGLPYFSYDLGSGDTHTMIPTKINDGQWHKIKIMRSKQEGILYVDGASNRTISPKKADILDVVGMLYVGGLPINYTTRRIGPVTYSIDGCVRNLHMAEAPADLEQPTSSFHVGTCFANAQRGTYFDGTGFAKAVGGFKVGLDLLVEFEFRTTTTTGVLLGISSQKMDGMGIEMIDEKLMFHVDNGAGRFTAVYDAGVPGHLCDGQWHKVTANKIKHRIELTVDGNQVEAQSPNPASTSADTNDPVFVGGFPDDLKQFGLTTSIPFRGCIRSLKLTKGTGKPLEVNFAKALELRGVQPVSCPAN

SEQ ID NO: 30665 - protein, 3121 aa, Homo sapiens
  REGION 1..3121: note = ENSP00000480802
MPGAAGVLLLLLLSGGLGGVQAQRPQQQRQSQAHQQRGLFPAVLNLASNALITTNATCGEKGPEMYCKLVEHVPGQPVRNPQCRICNQNSSNPNQRHPITNAIDGKNTWWQSPSIKNGIEYHYVTITLDLQQVFQIAYVIVKAANSPRPGNWILERSLDDVEYKPWQYHAVTDTECLTLYNIYPRTGPPSYAKDDEVICTSFYSKIHPLENGEIHISLINGRPSADDPSPELLEFTSARYIRLRFQRIRTLNADLMMFAHKDPREIDPIVTRRYYYSVKDISVGGMCICYGHARACPLDPATNKSRCECEHNTCGDSCDQCCPGFHQKPWRAGTFLTKTECEACNCHGKAEECYYDENVARRNLSLNIRGKYIGGGVCINCTQNTAGINCETCTDGFFRPKGVSPNYPRPCQPCHCDPIGSLNEVCVKDEKHARRGLAPGSCHCKTGFGGVSCDRCARGYTGYPDCKACNCSGLGSKNEDPCFGPCICKENVEGGDCSRCKSGFFNLQEDNWKGCDECFCSGVSNRCQSSYWTYGKIQDMSGWYLTDLPGRIRVAPQQDDLDSPQQISISNAEARQALPHSYYWSAPAPYLGNKLPAVGGQLTFTISYDLEEEEEDTERVLQLMIILEGNDLSISTAQDEVYLHPSEEHTNVLLLKEESFTIHGTHFPVRRKEFMTVLANLKRVLLQITYSFGMDAIFRLSSVNLESAVSYPTDGSIAAAVEVCQCPPGYTGSSCESCWPRHRRVNGTIFGGICEPCQCFGHAESCDDVTGECLNCKDHTGGPYCDKCLPGFYGEPTKGTSEDCQPCACPLNIPSNNFSPTCHLDRSLGLICDGCPVGYTGPRCERCAEGYFGQPSVPGGSCQPCQCNDNLDFSIPGSCDSLSGSCLICKPGTTGRYCELCADGYFGDAVDAKNCQPCRCNAGGSFSEVCHSQTGQCECRANVQGQRCDKCKAGTFGLQSARGCVPCNCNSFGSKSFDCEESGQCWCQPGVTGKKCDRCAHGYFNFQEGGCTACECSHLGNNCDPKTGRCICPPNTIGEKCSKCAPNTWGHSITTGCKACNCSTVGSLDFQCNVNTGQCNCHPKFSGAKCTECSRGHWNYPRCNLCDCFLPGTDATTCDSETKKCSCSDQTGQCTCKVNVEGIHCDRCRPGKFGLDAKNPLGCSSCYCFGTTTQCSEAKGLIRTWVTLKAEQTILPLVDEALQHTTTKGIVFQHPEIVAHMDLMREDLHLEPFYWKLPEQFEGKKLMAYGGKLKYAIYFEAREETGFSTYNPQVIIRGGTPTHARIIVRHMAAPLIGQLTRHEIEMTEKEWKYYGDDPRVHRTVTREDFLDILYDIHYILIKATYGNFMRQSRISEISMEVAEQGRGTTMTPPADLIEKCDCPLGYSGLSCEACLPGFYRLRSQPGGRTPGPTLGTCVPCQCNGHSSLCDPETSICQNCQHHTAGDFCERCALGYYGIVKGLPNDCQQCACPLISSSNNFSPSCVAEGLDDYRCTACPRGYEGQYCERCAPGYTGSPGNPGGSCQECECDPYGSLPVPCDPVTGFCTCRPGATGRKCDGCKHWHAREGWECVFCGDECTGLLLGDLARLEQMVMSINLTGPLPAPYKMLYGLENMTQELKHLLSPQRAPERLIQLAEGNLNTLVTEMNELLTRATKVTADGEQTGQDAERTNTRAKSLGEFIKELARDAEAVNEKAIKLNETLGTRDEAFERNLEGLQKEIDQMIKELRRKNLETQKEIAEDELVAAEALLKKVKKLFGESRGENEEMEKDLREKLADYKNKVDDAWDLLREATDKIREANRLFAVNQKNMTALEKKKEAVESGKRQIENTLKEGNDILDEANRLADEINSIIDYVEDIQTKLPPMSEELNDKIDDLSQEIKDRKLAEKVSQAESHAAQLNDSSAVLDGILDEAKNISFNATAAFKAYSNIKDYIDEAEKVAKEAKDLAHEATKLATGPRGLLKEDAKGCLQKSFRILNEAKKLANDVKENEDHLNGLKTRIENADARNGDLLRTLNDTLGKLSAIPNDTAAKLQAVKDKARQANDTAKDVLAQITELHQNLDGLKKNYNKLADSVAKTNAVVKDPSKNTVADADATVKNLEQEADRLIDKLKPIKELEDNLKKNISEIKELINQARKQANSIKVSVSSGGDCIRTYKPEIKKGSYNNIVVNVKTAVADNLLFYLGSAKFIDFLAIEMRKGKVSFLWDVGSGVGRVEYPDLTIDDSYWYRIVASRTGRNGTISVRALDGPKASIVPSTHHSTSPPGYTILDVDANAMLFVGGLTGKLKKADAVRVITFTGCMGETYFDNKPIGLWNFREKEGDCKGCTVSPQVEDSEGTIQFDGEGYALVSRPIRWYPNISTVMFKFRTFSSSALLMYLATRDLRDFMSVELTDGHIKVSYDLGSGMASVVSNQNHNDGKWKSFTLSRIQKQANISIVDIDTNQEENIATSSSGNNFGLDLKADDKIYFGGLPTLRNLSMKARPEVNLKKYSGCLKDIEISRTPYNILSSPDYVGVTKGCSLENVYTVSFPKPGFVELSPVPIDVGTEINLSFSTKNESGIILLGSGGTPAPPRRKRRQTGQAYYAILLNRGRLEVHLSTGARTMRKIVIRPEPNLFHDGREHSVHVERTRGIFTVQVDENRRYMQNLTVEQPIEVKKLFVGGAPPEFQPSPLRNIPPFEGCIWNLVINSVPMDFARPVSFKNADIGRCAHQKLREDEDGAAPAEIVIQPEPVPTPAFPTPTPVLTHGPCAAESEPALLIGSKQFGLSRNSHIAIAFDDTKVKNRLTIELEVRTEAESGLLFYMARINHADFATVQLRNGLPYFSYDLGSGDTHTMIPTKINDGQWHKIKIMRSKQEGILYVDGASNRTISPKKADILDVVGMLYVGGLPINYTTRRIGPVTYSIDGCVRNLHMAEAPADLEQPTSSFHVGTCFANAQRGTYFDGTGFAKAVGGFKVGLDLLVEFEFRTTTTTGVLLGISSQKMDGMGIEMIDEKLMFHVDNGAGRFTAVYDAGVPGHLCDGQWHKVTANKIKHRIELTVDGNQVEAQSPNPASTSADTNDPVFVGGFPDDLKQFGLTTSIPFRGCIRSLKLTKGTGKPLEVNFAKALELRGVQPVSCPAN

SEQ ID NO: 30666 - protein, 3118 aa, Homo sapiens
  REGION 1..3118: note = ENSP00000481744
MPGAAGVLLLLLLSGGLGGVQAQRPQQQRQSQAHQQRGLFPAVLNLASNALITTNATCGEKGPEMYCKLVEHVPGQPVRNPQCRICNQNSSNPNQRHPITNAIDGKNTWWQSPSIKNGIEYHYVTITLDLQQVFQIAYVIVKAANSPRPGNWILERSLDDVEYKPWQYHAVTDTECLTLYNIYPRTGPPSYAKDDEVICTSFYSKIHPLENGEIHISLINGRPSADDPSPELLEFTSARYIRLRFQRIRTLNADLMMFAHKDPREIDPIVTRRYYYSVKDISVGGMCICYGHARACPLDPATNKSRCECEHNTCGDSCDQCCPGFHQKPWRAGTFLTKTECEACNCHGKAEECYYDENVARRNLSLNIRGKYIGGGVCINCTQNTAGINCETCTDGFFRPKGVSPNYPRPCQPCHCDPIGSLNEVCVKDEKHARRGLAPGSCHCKTGFGGVSCDRCARGYTGYPDCKACNCSGLGSKNEDPCFGPCICKENVEGGDCSRCKSGFFNLQEDNWKGCDECFCSGVSNRCQSSYWTYGKIQDMSGWYLTDLPGRIRVAPQQDDLDSPQQISISNAEARQALPHSYYWSAPAPYLGNKLPAVGGQLTFTISYDLEEEEEDTERVLQLMIILEGNDLSISTAQDEVYLHPSEEHTNVLLLKEESFTIHGTHFPVRRKEFMTVLANLKRVLLQITYSFGMDAIFRLSSVNLESAVSYPTDGSIAAAVEVCQCPPGYTGSSCESCWPRHRRVNGTIFGGICEPCQCFGHAESCDDVTGECLNCKDHTGGPYCDKCLPGFYGEPTKGTSEDCQPCACPLNIPSNNFSPTCHLDRSLGLICDGCPVGYTGPRCERCAEGYFGQPSVPGGSCQPCQCNDNLDFSIPGSCDSLSGSCLICKPGTTGRYCELCADGYFGDAVDAKNCQPCRCNAGGSFSEVCHSQTGQCECRANVQGQRCDKCKAGTFGLQSARGCVPCNCNSFGSKSFDCEESGQCWCQPGVTGKKCDRCAHGYFNFQEGGCTACECSHLGNNCDPKTGRCICPPNTIGEKCSKCAPNTWGHSITTGCKACNCSTVGSLDFQCNVNTGQCNCHPKFSGAKCTECSRGHWNYPRCNLCDCFLPGTDATTCDSETKKCSCSDQTGQCTCKVNVEGIHCDRCRPGKFGLDAKNPLGCSSCYCFGTTTQCSEAKGLIRTWVTLKAEQTILPLVDEALQHTTTKGIVFQHPEIVAHMDLMREDLHLEPFYWKLPEQFEGKKLMAYGGKLKYAIYFEAREETGFSTYNPQVIIRGGTPTHARIIVRHMAAPLIGQLTRHEIEMTEKEWKYYGDDPRVHRTVTREDFLDILYDIHYILIKATYGNFMRQSRISEISMEVAEQGRGTTMTPPADLIEKCDCPLGYSGLSCEACLPGFYRLRSQPGGRTPGPTLGTCVPCQCNGHSSLCDPETSICQNCQHHTAGDFCERCALGYYGIVKGLPNDCQQCACPLISSSNNFSPSCVAEGLDDYRCTACPRGYEGQYCERCAPGYTGSPGNPGGSCQECECDPYGSLPVPCDPVTGFCTCRPGATGRKCDGCKHWHAREGWECVFCGDECTGLLLGDLARLEQMVMSINLTGPLPAPYKMLYGLENMTQELKHLLSPQRAPERLIQLAEGNLNTLVTEMNELLTRATKVTADGEQTGQDAERTNTRAKSLGEFIKELARDAEAVNEKAIKLNETLGTRDEAFERNLEGLQKEIDQMIKELRRKNLETQKEIAEDELVAAEALLKKVKKLFGESRGENEEMEKDLREKLADYKNKVDDAWDLLREATDKIREANRLFAVNQKNMTALEKKKEAVESGKRQIENTLKEGNDILDEANRLADEINSIIDYVEDIQTKLPPMSEELNDKIDDLSQEIKDRKLAEKVSQAESHAAQLNDSSAVLDGILDEAKNISFNATAAFKAYSNIKDYIDEAEKVAKEAKDLAHEATKLATGPRGLLKEDAKGCLQKSFRILNEAKKLANDVKENEDHLNGLKTRIENADARNGDLLRTLNDTLGKLSAIPNDTAAKLQAVKDKARQANDTAKDVLAQITELHQNLDGLKKNYNKLADSVAKTNAVVKDPSKNNAVADADATVKNLEQEADRLIDKLKPIKELEDNLKKNISEIKELINQARKQANSIKVSVSSGGDCIRTYKPEIKKGSYNNIVVNVKTAVADNLLFYLGSAKFIDFLAIEMRKGKVSFLWDVGSGVGRVEYPDLTIDDSYWYRIVASRTGRNGTISVRALDGPKASIVPSTHHSTSPPGYTILDVDANAMLFVGGLTGKLKKADAVRVITFTGCMGETYFDNKPIGLWNFREKEGDCKGCTVSPQVEDSEGTIQFDGEGYALVSRPIRWYPNISTVMFKFRTFSSSALLMYLATRDLRDFMSVELTDGHIKVSYDLGSGMASVVSNQNHNDGKWKSFTLSRIQKQANISIVDIDTNQEENIATSSSGNNFGLDLKADDKIYFGGLPTLRNLRPEVNLKKYSGCLKDIEISRTPYNILSSPDYVGVTKGCSLENVYTVSFPKPGFVELSPVPIDVGTEINLSFSTKNESGIILLGSGGTPAPPRRKRRQTGQAYYAILLNRGRLEVHLSTGARTMRKIVIRPEPNLFHDGREHSVHVERTRGIFTVQVDENRRYMQNLTVEQPIEVKKLFVGGAPPEFQPSPLRNIPPFEGCIWNLVINSVPMDFARPVSFKNADIGRCAHQKLREDEDGAAPAEIVIQPEPVPTPAFPTPTPVLTHGPCAAESEPALLIGSKQFGLSRNSHIAIAFDDTKVKNRLTIELEVRTEAESGLLFYMARINHADFATVQLRNGLPYFSYDLGSGDTHTMIPTKINDGQWHKIKIMRSKQEGILYVDGASNRTISPKKADILDVVGMLYVGGLPINYTTRRIGPVTYSIDGCVRNLHMAEAPADLEQPTSSFHVGTCFANAQRGTYFDGTGFAKAVGGFKVGLDLLVEFEFRTTTTTGVLLGISSQKMDGMGIEMIDEKLMFHVDNGAGRFTAVYDAGVPGHLCDGQWHKVTANKIKHRIELTVDGNQVEAQSPNPASTSADTNDPVFVGGFPDDLKQFGLTTSIPFRGCIRSLKLTKGTGKPLEVNFAKALELRGVQPVSCPAN

SEQ ID NO: 30667 - protein, 3333 aa, Homo sapiens
  REGION 1..3333: note = ENSP00000324532
MAAAARPRGRALGPVLPPTPLLLLVLRVLPACGATARDPGAAAGLSLHPTYFNLAEAARIWATATCGERGPGEGRPQPELYCKLVGGPTAPGSGHTIQGQFCDYCNSEDPRKAHPVTNAIDGSERWWQSPPLSSGTQYNRVNLTLDLGQLFHVAYILIKFANSPRPDLWVLERSVDFGSTYSPWQYFAHSKVDCLKEFGREANMAVTRDDDVLCVTEYSRIVPLENGEVVVSLINGRPGAKNFTFSHTLREFTKATNIRLRFLRTNTLLGHLISKAQRDPTVTRRYYYSIKDISIGGQCVCNGHAEVCNINNPEKLFRCECQHHTCGETCDRCCTGYNQRRWRPAAWEQSHECEACNCHGHASNCYYDPDVERQQASLNTQGIYAGGGVCINCQHNTAGVNCEQCAKGYYRPYGVPVDAPDGCIPCSCDPEHADGCEQGSGRCHCKPNFHGDNCEKCAIGYYNFPFCLRIPIFPVSTPSSEDPVAGDIKGCDCNLEGVLPEICDAHGRCLCRPGVEGPRCDTCRSGFYSFPICQACWCSALGSYQMPCSSVTGQCECRPGVTGQRCDRCLSGAYDFPHCQGSSSACDPAGTINSNLGYCQCKLHVEGPTCSRCKLLYWNLDKENPSGCSECKCHKAGTVSGTGECRQGDGDCHCKSHVGGDSCDTCEDGYFALEKSNYFGCQGCQCDIGGALSSMCSGPSGVCQCREHVVGKVCQRPENNYYFPDLHHMKYEIEDGSTPNGRDLRFGFDPLAFPEFSWRGYAQMTSVQNDVRITLNVGKSSGSLFRVILRYVNPGTEAVSGHITIYPSWGAAQSKEIIFLPSKEPAFVTVPGNGFADPFSITPGIWVACIKAEGVLLDYLVLLPRDYYEASVLQLPVTEPCAYAGPPQENCLLYQHLPVTRFPCTLACEARHFLLDGEPRPVAVRQPTPAHPVMVDLSGREVELHLRLRIPQVGHYVVVVEYSTEAAQLFVVDVNVKSSGSVLAGQVNIYSCNYSVLCRSAVIDHMSRIAMYELLADADIQLKGHMARFLLHQVCIIPIEEFSAEYVRPQVHCIASYGRFVNQSATCVSLAHETPPTALILDVLSGRPFPHLPQQSSPSVDVLPGVTLKAPQNQVTLRGRVPHLGRYVFVIHFYQAAHPTFPAQVSVDGGWPRAGSFHASFCPHVLGCRDQVIAEGQIEFDISEPEVAATVKVPEGKSLVLVRVLVVPAENYDYQILHKKSMDKSLEFITNCGKNSFYLDPQTASRFCKNSARSLVAFYHKGALPCECHPTGATGPHCSPEGGQCPCQPNVIGRQCTRCATGHYGFPRCKPCSCGRRLCEEMTGQCRCPPRTVRPQCEVCETHSFSFHPMAGCEGCNCSRRGTIEAAMPECDRDSGQCRCKPRITGRQCDRCASGFYRFPECVPCNCNRDGTEPGVCDPGTGACLCKENVEGTECNVCREGSFHLDPANLKGCTSCFCFGVNNQCHSSHKRRTKFVDMLGWHLETADRVDIPVSFNPGSNSMVADLQELPATIHSASWVAPTSYLGDKVSSYGGYLTYQAKSFGLPGDMVLLEKKPDVQLTGQHMSIIYEETNTPRPDRLHHGRVHVVEGNFRHASSRAPVSREELMTVLSRLADVRIQGLYFTETQRLTLSEVGLEEASDTGSGRIALAVEICACPPAYAGDSCQGCSPGYYRDHKGLYTGRCVPCNCNGHSNQCQDGSGICVNCQHNTAGEHCERCQEGYYGNAVHGSCRACPCPHTNSFATGCVVNGGDVRCSCKAGYTGTQCERCAPGYFGNPQKFGGSCQPCSCNSNGQLGSCHPLTGDCINQEPKDSSPAEECDDCDSCVMTLLNDLATMGEQLRLVKSQLQGLSASAGLLEQMRHMETQAKDLRNQLLNYRSAISNHGSKIEGLERELTDLNQEFETLQEKAQVNSRKAQTLNNNVNRATQSAKELDVKIKNVIRNVHILLKQISGTDGEGNNVPSGDFSREWAEAQRMMRELRNRNFGKHLREAEADKRESQLLLNRIRTWQKTHQGENNGLANSIRDSLNEYEAKLSDLRARLQEAAAQAKQANGLNQENERALGAIQRQVKEINSLQSDFTKYLTTADSSLLQTNIALQLMEKSQKEYEKLAASLNEARQELSDKVRELSRSAGKTSLVEEAEKHARSLQELAKQLEEIKRNASGDELVRCAVDAATAYENILNAIKAAEDAANRAASASESALQTVIKEDLPRKAKTLSSNSDKLLNEAKMTQKKLKQEVSPALNNLQQTLNIVTVQKEVIDTNLTTLRDGLHGIQRGDIDAMISSAKSMVRKANDITDEVLDGLNPIQTDVERIKDTYGRTQNEDFKKALTDADNSVNKLTNKLPDLWRKIESINQQLLPLGNISDNMDRIRELIQQARDAASKVAVPMRFNGKSGVEVRLPNDLEDLKGYTSLSLFLQRPNSRENGGTENMFVMYLGNKDASRDYIGMAVVDGQLTCVYNLGDREAELQVDQILTKSETKEAVMDRVKFQRIYQFARLNYTKGATSSKPETPGVYDMDGRNSNTLLNLDPENVVFYVGGYPPDFKLPSRLSFPPYKGCIELDDLNENVLSLYNFKKTFNLNTTEVEPCRRRKEESDKNYFEGTGYARVPTQPHAPIPTFGQTIQTTVDRGLLFFAENGDRFISLNIEDGKLMVRYKLNSELPKERGVGDAINNGRDHSIQIKIGKLQKRMWINVDVQNTIIDGEVFDFSTYYLGGIPIAIRERFNISTPAFRGCMKNLKKTSGVVRLNDTVGVTKKCSEDWKLVRSASFSRGGQLSFTDLGLPPTDHLQASFGFQTFQPSGILLDHQTWTRNLQVTLEDGYIELSTSDSGGPIFKSPQTYMDGLLHYVSVISDNSGLRLLIDDQLLRNSKRLKHISSSRQSLRLGGSNFEGCISNVFVQRLSLSPEVLDLTSNSLKRDVSLGGCSLNKPPFLMLLKGSTRFNKTKTFRINQLLQDTPVASPRSVKVWQDACSPLPKTQANHGALQFGDIPTSHLLFKLPQELLKPRSQFAVDMQTTSSRGLVFHTGTKNSFMALYLSKGRLVFALGTDGKKLRIKSKEKCNDGKWHTVVFGHDGEKGRLVVDGLRAREGSLPGNSTISIRAPVYLGSPPSGKPKSLPTNSFVGCLKNFQLDSKPLYTPSSSFGVSSCLGGPLEKGIYFSEEGGHVVLAHSVLLGPEFKLVFSIRPRSLTGILIHIGSQPGKHLCVYLEAGKVTASMDSGAGGTSTSVTPKQSLCDGQWHSVAVTIKQHILHLELDTDSSYTAGQIPFPPASTQEPLHLGGAPANLTTLRIPVWKSFFGCLRNIHVNHIPVPVTEALEVQGPVSLNGCPDQ

SEQ ID NO: 30668 - protein, 576 aa, Homo sapiens
  REGION 1..576: note = ENSP00000468316
MAAAARPRGRALGPVLPPTPLLLLVLRVLPACGATARDPGAAAGLSLHPTYFNLAEAARIWATATCGERGPGEGRPQPELYCKLVGGPTAPGSGHTIQGQFCDYCNSEDPRKAHPVTNAIDGSERWWQSPPLSSGTQYNRVNLTLDLGQLFHVAYILIKFANSPRPDLWVLERSVDFGSTYSPWQYFAHSKVDCLKEFGREANMAVTRDDDVLCVTEYSRIVPLENGEVVVSLINGRPGAKNFTFSHTLREFTKATNIRLRFLRTNTLLGHLISKAQRDPTVTRRYYYSIKDISIGGQCVCNGHAEVCNINNPEKLFRCECQHHTCGETCDRCCTGYNQRRWRPAAWEQSHECEACNCHGHASNCYYDPDVERQQASLNTQGIYAGGGVCINCQHNTAGVNCEQCAKGYYRPYGVPVDAPDGCIPCSCDPEHADGCEQGSGRCHCKPNFHGDNCEKCAIGYYNFPFCLRIPIFPVSTPSSEDPVAGDIKGCDCNLEGVLPEICDAHGRCLCRPGVEGPRCDTCRSGFYSFPICQGPSEKVAIYKPESRPSAETEPASTWILDFPASRTGEINFYCL

SEQ ID NO: 30669 - protein, 3277 aa, Homo sapiens
  REGION 1..3277: note = ENSP00000382432
MAAAARPRGRALGPVLPPTPLLLLVLRVLPACGATARDPGAAAGLSLHPTYFNLAEAARIWATATCGERGPGEGRPQPELYCKLVGGPTAPGSGHTIQGQFCDYCNSEDPRKAHPVTNAIDGSERWWQSPPLSSGTQYNRVNLTLDLGQLFHVAYILIKFANSPRPDLWVLERSVDFGSTYSPWQYFAHSKVDCLKEFGREANMAVTRDDDVLCVTEYSRIVPLENGEVVVSLINGRPGAKNFTFSHTLREFTKATNIRLRFLRTNTLLGHLISKAQRDPTVTRRYYYSIKDISIGGQCVCNGHAEVCNINNPEKLFRCECQHHTCGETCDRCCTGYNQRRWRPAAWEQSHECEACNCHGHASNCYYDPDVERQQASLNTQGIYAGGGVCINCQHNTAGVNCEQCAKGYYRPYGVPVDAPDGCIPCSCDPEHADGCEQGSGRCHCKPNFHGDNCEKCAIGYYNFPFCLRIPIFPVSTPSSEDPVAGDIKGCDCNLEGVLPEICDAHGRCLCRPGVEGPRCDTCRSGFYSFPICQACWCSALGSYQMPCSSVTGQCECRPGVTGQRCDRCLSGAYDFPHCQGSSSACDPAGTINSNLGYCQCKLHVEGPTCSRCKLLYWNLDKENPSGCSECKCHKAGTVSGTGECRQGDGDCHCKSHVGGDSCDTCEDGYFALEKSNYFGCQGCQCDIGGALSSMCSGPSGVCQCREHVVGKVCQRPENNYYFPDLHHMKYEIEDGSTPNGRDLRFGFDPLAFPEFSWRGYAQMTSVQNDVRITLNVGKSSGSLFRVILRYVNPGTEAVSGHITIYPSWGAAQSKEIIFLPSKEPAFVTVPGNGFADPFSITPGIWVACIKAEGVLLDYLVLLPRDYYEASVLQLPVTEPCAYAGPPQENCLLYQHLPVTRFPCTLACEARHFLLDGEPRPVAVRQPTPAHPVMVDLSGREVELHLRLRIPQVGHYVVVVEYSTEAAQLFVVDVNVKSSGSVLAGQVNIYSCNYSVLCRSAVIDHMSRIAMYELLADADIQLKGHMARFLLHQVCIIPIEEFSAEYVRPQVHCIASYGRFVNQSATCVSLAHETPPTALILDVLSGRPFPHLPQQSSPSVDVLPGVTLKAPQNQVTLRGRVPHLGRYVFVIHFYQAAHPTFPAQVSVDGGWPRAGSFHASFCPHVLGCRDQVIAEGQIEFDISEPEVAATVKVPEGKSLVLVRVLVVPAENYDYQILHKKSMDKSLEFITNCGKNSFYLDPQTASRFCKNSARSLVAFYHKGALPCECHPTGATGPHCSPEGGQCPCQPNVIGRQCTRCATGHYGFPRCKPCSCGRRLCEEMTGQCRCPPRTVRPQCEVCETHSFSFHPMAGCEGCNCSRRGTIEAAMPECDRDSGQCRCKPRITGRQCDRCASGFYRFPECVPCNCNRDGTEPGVCDPGTGACLCKENVEGTECNVCREGSFHLDPANLKGCTSCFCFGVNNQCHSSHKRRTKFVDMLGWHLETADRVDIPVSFNPGSNSMVADLQELPATIHSASWVAPTSYLGDKVSSYGGYLTYQAKSFGLPGDMVLLEKKPDVQLTGQHMSIIYEETNTPRPDRLHHGRVHVVEGNFRHASSRAPVSREELMTVLSRLADVRIQGLYFTETQRLTLSEVGLEEASDTGSGRIALAVEICACPPAYAGDSCQGCSPGYYRDHKGLYTGRCVPCNCNGHSNQCQDGSGICVNCQHNTAGEHCERCQEGYYGNAVHGSCRACPCPHTNSFATGCVVNGGDVRCSCKAGYTGTQCERCAPGYFGNPQKFGGSCQPCSCNSNGQLGSCHPLTGDCINQEPKDSSPAEECDDCDSCVMTLLNDLATMGEQLRLVKSQLQGLSASAGLLEQMRHMETQAKDLRNQLLNYRSAISNHGSKIEGLERELTDLNQEFETLQEKAQVNSRKAQTLNNNVNRATQSAKELDVKIKNVIRNVHMLNRIRTWQKTHQGENNGLANSIRDSLNEYEAKLSDLRARLQEAAAQAKQANGLNQENERALGAIQRQVKEINSLQSDFTKYLTTADSSLLQTNIALQLMEKSQKEYEKLAASLNEARQELSDKVRELSRSAGKTSLVEEAEKHARSLQELAKQLEEIKRNASGDELVRCAVDAATAYENILNAIKAAEDAANRAASASESALQTVIKEDLPRKAKTLSSNSDKLLNEAKMTQKKLKQEVSPALNNLQQTLNIVTVQKEVIDTNLTTLRDGLHGIQRGDIDAMISSAKSMVRKANDITDEVLDGLNPIQTDVERIKDTYGRTQNEDFKKALTDADNSVNKLTNKLPDLWRKIESINQQLLPLGNISDNMDRIRELIQQARDAASKVAVPMRFNGKSGVEVRLPNDLEDLKGYTSLSLFLQRPNSRENGGTENMFVMYLGNKDASRDYIGMAVVDGQLTCVYNLGDREAELQVDQILTKSETKEAVMDRVKFQRIYQFARLNYTKGATSSKPETPGVYDMDGRNSNTLLNLDPENVVFYVGGYPPDFKLPSRLSFPPYKGCIELDDLNENVLSLYNFKKTFNLNTTEVEPCRRRKEESDKNYFEGTGYARVPTQPHAPIPTFGQTIQTTVDRGLLFFAENGDRFISLNIEDGKLMVRYKLNSELPKERGVGDAINNGRDHSIQIKIGKLQKRMWINVDVQNTIIDGEVFDFSTYYLGGIPIAIRERFNISTPAFRGCMKNLKKTSGVVRLNDTVGVTKKCSEDWKLVRSASFSRGGQLSFTDLGLPPTDHLQASFGFQTFQPSGILLDHQTWTRNLQVTLEDGYIELSTSDSGGPIFKSPQTYMDGLLHYVSVISDNSGLRLLIDDQLLRNSKRLKHISSSRQSLRLGGSNFEGCISNVFVQRLSLSPEVLDLTSNSLKRDVSLGGCSLNKPPFLMLLKGSTRFNKTKTFRINQLLQDTPVASPRSVKVWQDACSPLPKTQANHGALQFGDIPTSHLLFKLPQELLKPRSQFAVDMQTTSSRGLVFHTGTKNSFMALYLSKGRLVFALGTDGKKLRIKSKEKCNDGKWHTVVFGHDGEKGRLVVDGLRAREGSLPGNSTISIRAPVYLGSPPSGKPKSLPTNSFVGCLKNFQLDSKPLYTPSSSFGVSSCLGGPLEKGIYFSEEGGHVVLAHSVLLGPEFKLVFSIRPRSLTGILIHIGSQPGKHLCVYLEAGKVTASMDSGAGGTSTSVTPKQSLCDGQWHSVAVTIKQHILHLELDTDSSYTAGQIPFPPASTQEPLHLGGAPANLTTLRIPVWKSFFGCLRNIHVNHIPVPVTEALEVQGPVSLNGCPDQ

SEQ ID NO: 30670 - protein, 59 aa, Homo sapiens
  REGION 1..59: note = ENSP00000467662
  VARIANT 1: note = Any amino acid
XAGQVNIYSCNYRCDAMNSLLSPQRLCQVPGCIAQGKRLILSNVRGCTPTFATHLQNWG

SEQ ID NO: 30671 - protein, 1724 aa, Homo sapiens
  REGION 1..1724: note = ENSP00000269217
MPPAVRRSACSMGWLWIFGAALGQCLGYSSQQQRVPFLQPPGQSQLQASYVEFRPSQGCSPGYYRDHKGLYTGRCVPCNCNGHSNQCQDGSGICVNCQHNTAGEHCERCQEGYYGNAVHGSCRACPCPHTNSFATGCVVNGGDVRCSCKAGYTGTQCERCAPGYFGNPQKFGGSCQPCSCNSNGQLGSCHPLTGDCINQEPKDSSPAEECDDCDSCVMTLLNDLATMGEQLRLVKSQLQGLSASAGLLEQMRHMETQAKDLRNQLLNYRSAISNHGSKIEGLERELTDLNQEFETLQEKAQVNSRKAQTLNNNVNRATQSAKELDVKIKNVIRNVHILLKQISGTDGEGNNVPSGDFSREWAEAQRMMRELRNRNFGKHLREAEADKRESQLLLNRIRTWQKTHQGENNGLANSIRDSLNEYEAKLSDLRARLQEAAAQAKQANGLNQENERALGAIQRQVKEINSLQSDFTKYLTTADSSLLQTNIALQLMEKSQKEYEKLAASLNEARQELSDKVRELSRSAGKTSLVEEAEKHARSLQELAKQLEEIKRNASGDELVRCAVDAATAYENILNAIKAAEDAANRAASASESALQTVIKEDLPRKAKTLSSNSDKLLNEAKMTQKKLKQEVSPALNNLQQTLNIVTVQKEVIDTNLTTLRDGLHGIQRGDIDAMISSAKSMVRKANDITDEVLDGLNPIQTDVERIKDTYGRTQNEDFKKALTDADNSVNKLTNKLPDLWRKIESINQQLLPLGNISDNMDRIRELIQQARDAASKVAVPMRFNGKSGVEVRLPNDLEDLKGYTSLSLFLQRPNSRENGGTENMFVMYLGNKDASRDYIGMAVVDGQLTCVYNLGDREAELQVDQILTKSETKEAVMDRVKFQRIYQFARLNYTKGATSSKPETPGVYDMDGRNSNTLLNLDPENVVFYVGGYPPDFKLPSRLSFPPYKGCIELDDLNENVLSLYNFKKTFNLNTTEVEPCRRRKEESDKNYFEGTGYARVPTQPHAPIPTFGQTIQTTVDRGLLFFAENGDRFISLNIEDGKLMVRYKLNSELPKERGVGDAINNGRDHSIQIKIGKLQKRMWINVDVQNTIIDGEVFDFSTYYLGGIPIAIRERFNISTPAFRGCMKNLKKTSGVVRLNDTVGVTKKCSEDWKLVRSASFSRGGQLSFTDLGLPPTDHLQASFGFQTFQPSGILLDHQTWTRNLQVTLEDGYIELSTSDSGGPIFKSPQTYMDGLLHYVSVISDNSGLRLLIDDQLLRNSKRLKHISSSRQSLRLGGSNFEGCISNVFVQRLSLSPEVLDLTSNSLKRDVSLGGCSLNKPPFLMLLKGSTRFNKTKTFRINQLLQDTPVASPRSVKVWQDACSPLPKTQANHGALQFGDIPTSHLLFKLPQELLKPRSQFAVDMQTTSSRGLVFHTGTKNSFMALYLSKGRLVFALGTDGKKLRIKSKEKCNDGKWHTVVFGHDGEKGRLVVDGLRAREGSLPGNSTISIRAPVYLGSPPSGKPKSLPTNSFVGCLKNFQLDSKPLYTPSSSFGVSSCLGGPLEKGIYFSEEGGHVVLAHSVLLGPEFKLVFSIRPRSLTGILIHIGSQPGKHLCVYLEAGKVTASMDSGAGGTSTSVTPKQSLCDGQWHSVAVTIKQHILHLELDTDSSYTAGQIPFPPASTQEPLHLGGAPANLTTLRIPVWKSFFGCLRNIHVNHIPVPVTEALEVQGPVSLNGCPDQ

SEQ ID NO: 30672 - protein, 1668 aa, Homo sapiens
  REGION 1..1668: note = ENSP00000466557
MPPAVRRSACSMGWLWIFGAALGQCLGYSSQQQRVPFLQPPGQSQLQASYVEFRPSQGCSPGYYRDHKGLYTGRCVPCNCNGHSNQCQDGSGICVNCQHNTAGEHCERCQEGYYGNAVHGSCRACPCPHTNSFATGCVVNGGDVRCSCKAGYTGTQCERCAPGYFGNPQKFGGSCQPCSCNSNGQLGSCHPLTGDCINQEPKDSSPAEECDDCDSCVMTLLNDLATMGEQLRLVKSQLQGLSASAGLLEQMRHMETQAKDLRNQLLNYRSAISNHGSKIEGLERELTDLNQEFETLQEKAQVNSRKAQTLNNNVNRATQSAKELDVKIKNVIRNVHMLNRIRTWQKTHQGENNGLANSIRDSLNEYEAKLSDLRARLQEAAAQAKQANGLNQENERALGAIQRQVKEINSLQSDFTKYLTTADSSLLQTNIALQLMEKSQKEYEKLAASLNEARQELSDKVRELSRSAGKTSLVEEAEKHARSLQELAKQLEEIKRNASGDELVRCAVDAATAYENILNAIKAAEDAANRAASASESALQTVIKEDLPRKAKTLSSNSDKLLNEAKMTQKKLKQEVSPALNNLQQTLNIVTVQKEVIDTNLTTLRDGLHGIQRGDIDAMISSAKSMVRKANDITDEVLDGLNPIQTDVERIKDTYGRTQNEDFKKALTDADNSVNKLTNKLPDLWRKIESINQQLLPLGNISDNMDRIRELIQQARDAASKVAVPMRFNGKSGVEVRLPNDLEDLKGYTSLSLFLQRPNSRENGGTENMFVMYLGNKDASRDYIGMAVVDGQLTCVYNLGDREAELQVDQILTKSETKEAVMDRVKFQRIYQFARLNYTKGATSSKPETPGVYDMDGRNSNTLLNLDPENVVFYVGGYPPDFKLPSRLSFPPYKGCIELDDLNENVLSLYNFKKTFNLNTTEVEPCRRRKEESDKNYFEGTGYARVPTQPHAPIPTFGQTIQTTVDRGLLFFAENGDRFISLNIEDGKLMVRYKLNSELPKERGVGDAINNGRDHSIQIKIGKLQKRMWINVDVQNTIIDGEVFDFSTYYLGGIPIAIRERFNISTPAFRGCMKNLKKTSGVVRLNDTVGVTKKCSEDWKLVRSASFSRGGQLSFTDLGLPPTDHLQASFGFQTFQPSGILLDHQTWTRNLQVTLEDGYIELSTSDSGGPIFKSPQTYMDGLLHYVSVISDNSGLRLLIDDQLLRNSKRLKHISSSRQSLRLGGSNFEGCISNVFVQRLSLSPEVLDLTSNSLKRDVSLGGCSLNKPPFLMLLKGSTRFNKTKTFRINQLLQDTPVASPRSVKVWQDACSPLPKTQANHGALQFGDIPTSHLLFKLPQELLKPRSQFAVDMQTTSSRGLVFHTGTKNSFMALYLSKGRLVFALGTDGKKLRIKSKEKCNDGKWHTVVFGHDGEKGRLVVDGLRAREGSLPGNSTISIRAPVYLGSPPSGKPKSLPTNSFVGCLKNFQLDSKPLYTPSSSFGVSSCLGGPLEKGIYFSEEGGHVVLAHSVLLGPEFKLVFSIRPRSLTGILIHIGSQPGKHLCVYLEAGKVTASMDSGAGGTSTSVTPKQSLCDGQWHSVAVTIKQHILHLELDTDSSYTAGQIPFPPASTQEPLHLGGAPANLTTLRIPVWKSFFGCLRNIHVNHIPVPVTEALEVQGPVSLNGCPDQ

SEQ ID NO: 30673 - protein, 1147 aa, Homo sapiens
  REGION 1..1147: note = ENSP00000464836
  VARIANT 1: note = Any amino acid
XFATGCVVNGGDVRCSCKAGYTGTQCERCAPGYFGNPQKFGGSCQPCSCNSNGQLGSCHPLTGDCINQEPKDSSPAEECDDCDSCVMTLLNDLATMGEQLRLVKSQLQGLSASAGLLEQMRHMETQAKDLRNQLLNYRSAISNHGSKIEGLERELTDLNQEFETLQEKAQVNSRKAQTLNNNVNRATQSAKELDVKIKNVIRNVHILLKQISGTDGEGNNVPSGDFSREWAEAQRMMRELRNRNFGKHLREAEADKRESQLLLNRIRTWQKTHQGENNGLANSIRDSLNEYEAKLSDLRARLQEAAAQAKQANGLNQENERALGAIQRQVKEINSLQSDFTKYLTTADSSLLQTNIALQLMEKSQKEYEKLAASLNEARQELSDKVRELSRSAGKTSLVEEAEKHARSLQELAKQLEEIKRNASGDELVRCAVDAATAYENILNAIKAAEDAANRAASASESALQTVIKEDLPRKAKTLSSNSDKLLNEAKMTQKKLKQEVSPALNNLQQTLNIVTVQKEVIDTNLTTLRDGLHGIQRGDIDAMISSAKSMVRKANDITDEVLDGLNPIQTDVERIKDTYGRTQNEDFKKALTDADNSVNKLTNKLPDLWRKIESINQQLLPLGNISDNMDRIRELIQQARDAASKVAVPMRFNGKSGVEVRLPNDLEDLKGYTSLSLFLQRPNSRENGGTENMFVMYLGNKDASRDYIGMAVVDGQLTCVYNLGDREAELQVDQILTKSETKEAVMDRVKFQRIYQFARLNYTKGATSSKPETPGVYDMDGRNSNTLLNLDPENVVFYVGGYPPDFKLPSRLSFPPYKGCIELDDLNENVLSLYNFKKTFNLNTTEVEPCRRRKEESDKNYFEGTGYARVPTQPHAPIPTFGQTIQTTVDRGLLFFAENGDRFISLNIEDGKLMVRYKLNSELPKERGVGDAINNGRDHSIQIKIGKLQKRMWINVDVQNTIIDGEVFDFSTYYLGGIPIAIRERFNISTPAFRGCMKNLKKTSGVVRLNDTVGVTKKCSEDWKLVRSASFSRGGQLSFTDLGLPPTDHLQASFGFQTFQPSGILLDHQTWTRNLQVTLEDGYIELSTSDSGGPIFKSPQTYMDGLLHYVSVISDNSGLRQEGCLRPRVRDQSWKHSETMSLRKLK

SEQ ID NO: 30674 - protein, 94 aa, Homo sapiens
  REGION 1..94: note = ENSP00000467473
LVRSASFSRGGQLSFTDLGLPPTDHLQASFGFQTFQPSGILLDHQTWTRNLQVTLEDGYIELSTSDSGGPIFKSPQTYMDGLLHYVSVISDNSG

SEQ ID NO: 30675 - protein, 37 aa, Homo sapiens
  REGION 1..37: note = ENSP00000466658
  VARIANT 1: note = Any amino acid
XGWTEGPGGKFAWKLHHQHQSASLPGITSIRETKGAG

SEQ ID NO: 30676 - protein, 134 aa, Homo sapiens
  REGION 1..134: note = ENSP00000468315
  VARIANT 1: note = Any amino acid
XFSEEGGHVVLAHSVLLGPEFKLVFSIRPRSLTGILIHIGSQPGKHLCVYLEAGKVTASMDSGAGGTSTSVTPKQSLCDGQWHSVAANLTTLRIPVWKSFFGCLRNIHVNHIPVPVTEALEVQGPVSLNGCPDQ

SEQ ID NO: 30677 - protein, 1823 aa, Homo sapiens
  REGION 1..1823: note = ENSP00000230538
MALSSAWRSVLPLWLLWSAACSRAASGDDNAFPFDIEGSSAVGRQDPPETSEPRVALGRLPPAAEKCNAGFFHTLSGECVPCDCNGNSNECLDGSGYCVHCQRNTTGEHCEKCLDGYIGDSIRGAPQFCQPCPCPLPHLANFAESCYRKNGAVRCICNENYAGPNCERCAPGYYGNPLLIGSTCKKCDCSGNSDPNLIFEDCDEVTGQCRNCLRNTTGFKCERCAPGYYGDARIAKNCAVCNCGGGPCDSVTGECLEEGFEPPTGMDCPTISCDKCVWDLTDDLRLAALSIEEGKSGVLSVSSGAAAHRHVNEINATIYLLKTKLSERENQYALRKIQINNAENTMKSLLSDVEELVEKENQASRKGQLVQKESMDTINHASQLVEQAHDMRDKIQEINNKMLYYGEEHELSPKEISEKLVLAQKMLEEIRSRQPFFTQRELVDEEADEAYELLSQAESWQRLHNETRTLFPVVLEQLDDYNAKLSDLQEALDQALNYVRDAEDMNRATAARQRDHEKQQERVREQMEVVNMSLSTSADSLTTPRLTLSELDDIIKNASGIYAEIDGAKSELQVKLSNLSNLSHDLVQEAIDHAQDLQQEANELSRKLHSSDMNGLVQKALDASNVYENIVNYVSEANETAEFALNTTDRIYDAVSGIDTQIIYHKDESENLLNQARELQAKAESSSDEAVADTSRRVGGALARKSALKTRLSDAVKQLQAAERGDAQQRLGQSRLITEEANRTTMEVQQATAPMANNLTNWSQNLQHFDSSAYNTAVNSARDAVRNLTEVVPQLLDQLRTVEQKRPASNVSASIQRIRELIAQTRSVASKIQVSMMFDGQSAVEVHSRTSMDDLKAFTSLSLYMKPPVKRPELTETADQFILYLGSKNAKKEYMGLAIKNDNLVYVYNLGTKDVEIPLDSKPVSSWPAYFSIVKIERVGKHGKVFLTVPSLSSTAEEKFIKKGEFSGDDSLLDLDPEDTVFYVGGVPSNFKLPTSLNLPGFVGCLELATLNNDVISLYNFKHIYNMDPSTSVPCARDKLAFTQSRAASYFFDGSGYAVVRDITRRGKFGQVTRFDIEVRTPADNGLILLMVNGSMFFRLEMRNGYLHVFYDFGFSGGPVHLEDTLKKAQINDAKYHEISIIYHNDKKMILVVDRRHVKSMDNEKMKIPFTDIYIGGAPPEILQSRALRAHLPLDINFRGCMKGFQFQKKDFNLLEQTETLGVGYGCPEDSLISRRAYFNGQSFIASIQKISFFDGFEGGFNFRTLQPNGLLFYYASGSDVFSISLDNGTVIMDVKGIKVQSVDKQYNDGLSHFVISSVSPTRYELIVDKSRVGSKNPTKGKIEQTQASEKKFYFGGSPISAQYANFTGCISNAYFTRVDRDVEVEDFQRYTEKVHTSLYECPIESSPLFLLHKKGKNLSKPKASQNKKGGKSKDAPSWDPVALKLPERNTPRNSHCHLSNSPRAIEHAYQYGGTANSRQEFEHLKGDFGAKSQFSIRLRTRSSHGMIFYVSDQEENDFMTLFLAHGRLVYMFNVGHKKLKIRSQEKYNDGLWHDVIFIRERSSGRLVIDGLRVLEESLPPTEATWKIKGPIYLGGVAPGKAVKNVQINSIYSFSGCLSNLQLNGASITSASQTFSVTPCFEGPMETGTYFSTEGGYVVLDESFNIGLKFEIAFEVRPRSSSGTLVHGHSVNGEYLNVHMKNGQVIVKVNNGIRDFSTSVTPKQSLCDGRWHRITVIRDSNVVQLDVDSEVNHVVGPLNPKPIDHREPVFVGGVPESLLTPRLAPSKPFTGCIRHFVIDGHPVSFSKAALVSGAVSINSCPAA

SEQ ID NO: 30678 - protein, 1816 aa, Homo sapiens
  REGION 1..1816: note = ENSP00000429488
MALSSAWRSVLPLWLLWSAACSRAASGDDNAFPFDIEGSSAVGRQDPPETSEPRVALGRLPPAAEKCNAGFFHTLSGECVPCDCNGNSNECLDGSGYCVHCQRNTTGEHCEKCLDGYIGDSIRGAPQFCQPCPCPLPHLANFAESCYRKNGAVRCICNENYAGPNCERCAPGYYGNPLLIGSTCKKCDCSGNSDPNLIFEDCDEVTGQCRNCLRNTTGFKCERCAPGYYGDARIAKNCAVCNCGGGPCDSVTGECLEEGFEPPTGCDKCVWDLTDDLRLAALSIEEGKSGVLSVSSGAAAHRHVNEINATIYLLKTKLSERENQYALRKIQINNAENTMKSLLSDVEELVEKENQASRKGQLVQKESMDTINHASQLVEQAHDMRDKIQEINNKMLYYGEEHELSPKEISEKLVLAQKMLEEIRSRQPFFTQRELVDEEADEAYELLSQAESWQRLHNETRTLFPVVLEQLDDYNAKLSDLQEALDQALNYVRDAEDMNRATAARQRDHEKQQERVREQMEVVNMSLSTSADSLTTPRLTLSELDDIIKNASGIYAEIDGAKSELQVKLSNLSNLSHDLVQEAIDHAQDLQQEANELSRKLHSSDMNGLVQKALDASNVYENIVNYVSEANETAEFALNTTDRIYDAVSGIDTQIIYHKDESENLLNQARELQAKAESSSDEAVADTSRRVGGALARKSALKTRLSDAVKQLQAAERGDAQQRLGQSRLITEEANRTTMEVQQATAPMANNLTNWSQNLQHFDSSAYNTAVNSARDAVRNLTEVVPQLLDQLRTVEQKRPASNVSASIQRIRELIAQTRSVASKIQVSMMFDGQSAVEVHSRTSMDDLKAFTSLSLYMKPPVKRPELTETADQFILYLGSKNAKKEYMGLAIKNDNLVYVYNLGTKDVEIPLDSKPVSSWPAYFSIVKIERVGKHGKVFLTVPSLSSTAEEKFIKKGEFSGDDSLLDLDPEDTVFYVGGVPSNFKLPTSLNLPGFVGCLELATLNNDVISLYNFKHIYNMDPSTSVPCARDKLAFTQSRAASYFFDGSGYAVVRDITRRGKFGQVTRFDIEVRTPADNGLILLMVNGSMFFRLEMRNGYLHVFYDFGFSGGPVHLEDTLKKAQINDAKYHEISIIYHNDKKMILVVDRRHVKSMDNEKMKIPFTDIYIGGAPPEILQSRALRAHLPLDINFRGCMKGFQFQKKDFNLLEQTETLGVGYGCPEDSLISRRAYFNGQSFIASIQKISFFDGFEGGFNFRTLQPNGLLFYYASGSDVFSISLDNGTVIMDVKGIKVQSVDKQYNDGLSHFVISSVSPTRYELIVDKSRVGSKNPTKGKIEQTQASEKKFYFGGSPISAQYANFTGCISNAYFTRVDRDVEVEDFQRYTEKVHTSLYECPIESSPLFLLHKKGKNLSKPKASQNKKGGKSKDAPSWDPVALKLPERNTPRNSHCHLSNSPRAIEHAYQYGGTANSRQEFEHLKGDFGAKSQFSIRLRTRSSHGMIFYVSDQEENDFMTLFLAHGRLVYMFNVGHKKLKIRSQEKYNDGLWHDVIFIRERSSGRLVIDGLRVLEESLPPTEATWKIKGPIYLGGVAPGKAVKNVQINSIYSFSGCLSNLQLNGASITSASQTFSVTPCFEGPMETGTYFSTEGGYVVLDESFNIGLKFEIAFEVRPRSSSGTLVHGHSVNGEYLNVHMKNGQVIVKVNNGIRDFSTSVTPKQSLCDGRWHRITVIRDSNVVQLDVDSEVNHVVGPLNPKPIDHREPVFVGGVPESLLTPRLAPSKPFTGCIRHFVIDGHPVSFSKAALVSGAVSINSCPAA

SEQ ID NO: 30679 - protein, 1816 aa, Homo sapiens; identical to SEQ ID NO: 30678
  REGION 1..1816: note = ENSP00000374114

SEQ ID NO: 30680 - protein, 1816 aa, Homo sapiens; identical to SEQ ID NO: 30678
  REGION 1..1816: note = ENSP00000416470

SEQ ID NO: 30681 - protein, 188 aa, Homo sapiens
  REGION 1..188: note = ENSP00000427837
  VARIANT 1: note = Any amino acid
XKNASGIYAEIDGAKSELQVKLSNLSNLSHDLVQEAIDHAQDLQQEANELSRKLHSSDMNGLVQKALDASNVYENIVNYVSEANETAEFALNTTDRIYDAVSGIDTQIIYHKDESENLLNQARELQAKAESSSDEAVADTSRRVGGALARKSALKTRLSDAVKQLQAAERGKHQRELKSHLLIHWSVR

SEQ ID NO: 30682 - protein, 187 aa, Homo sapiens
  REGION 1..187: note = ENSP00000427865
  VARIANT 1: note = Any amino acid
XSTCKKCDCSGNSDPNLIFEDCDEVTGQCRNCLRNTTGFKCERCAPGYYGDARIAKNCAVCNCGGGPCDSVTGECLEEGFEPPTGCDKCVWDLTDDLRLAALSIEEGKSGVLSVSSGAAAHRHVNEINATIYLLKTKLSERENQYALRKIQINNAENTMKSLLSDVEELVEKHWNKPRRRLELQEGV

SEQ ID NO: 30683 - protein, 178 aa, Homo sapiens
  REGION 1..178: note = ENSP00000357629
  VARIANT 1: note = Any amino acid
XIFEDCDEVTGQCRNCLRNTTGFKCERCAPGYYGDARIAKNCAVCNCGGGPCDSVTGECLEEGFEPPTGMDCPTISCDKCVWDLTDDLRLAALSIEEGKSGVLSVSSGAAAHRHVNEINATIYLLKTKLSERENQYALRKIQINNAENTMKSLLSDVEELVEKHWNKPRRRLELQEGV

SEQ ID NO: 30684 - protein, 331 aa, Homo sapiens
  REGION 1..331: note = ENSP00000430336
MALSSAWRSVLPLWLLWSAACSRAASGDDNAFPFDIEGSSAVGRQDPPETSEPRVALGRLPPAAEKCNAGFFHTLSGECVPCDCNGNSNECLDGSGYCVHCQRNTTGEHCEKCLDGYIGDSIRGAPQFCQPCPCPLPHLANFAESCYRKNGAVRCICNENYAGPNCERCAPGYYGNPLLIGSTCKKCDCSGNSDPNLIFEDCDEVTGQCRNCLRNTTGFKCERCAPGYYGDARIAKNCAVCNCGGGPCDSVTGECLEEGFEPPTGMDCPTISCDKCVWDLTDDLRLAALSIEEGKSGVLSVSSGAAAHRHVNEINATIYLLKTKLSERENQ

SEQ ID NO: 30685 - protein, 106 aa, Homo sapiens
  REGION 1..106: note = ENSP00000428583
MALSSAWRSVLPLWLLWSAACSRAASGDDNAFPFDIEGSSAVGRQDPPETSEPRVALGRLPPAAEKCNAGFFHTLSGECVPCDCNGNSNECLDGSGYCVHCQRNTT

SEQ ID NO: 30686 - protein, 129 aa, Homo sapiens
  REGION 1..129: note = ENSP00000412136
MALSSAWRSVLPLWLLWSAACSRAASGDDNAFPFDIEGSSAVGRQDPPETSEPRVALGRLPPAAEKCNAGFFHTLSGECVPCDCNGNSNECLDGSGYCVTTDGEDPGFSASALSFILSSQGAREARAPT

SEQ ID NO: 30687 - protein, 87 aa, Homo sapiens
  REGION 1..87: note = ENSP00000243219
MALSSAWRSVLPLWLLWSAACSRAASGDDNAFPFDIEGSSAVGRQDPPETSEPRVALGRLPPAAEKCNAGFFHTLSGECVPCDCNGN

SEQ ID NO: 30688 - protein, 81 aa, Homo sapiens
  REGION 1..81: note = ENSP00000430415
MALSSAWRSVLPLWLLWSAACSRAASGDDNAFPFDIEGSSAVGRQDPPETSEPRVALGRLPPAAEKCNAGFFHTLSGECVP

SEQ ID NO: 30689 - protein, 120 aa, Homo sapiens
  REGION 1..120: note = ENSP00000357627
MALSSAWRSVLPLWLLWSAACSRAASGDDNAFPFDIEGSSAVGRQDPPETSEPRVALGRLPPAAEVQCPCHCHPAGAPAPPRAVPHSSFSLSPPLSSPQCLESFTWARSVRKLEIKSFPL

SEQ ID NO: 30690 - protein, 120 aa, Homo sapiens; identical to SEQ ID NO: 30689
  REGION 1..120: note = ENSP00000398226

SEQ ID NO: 30691 - protein, 120 aa, Homo sapiens; identical to SEQ ID NO: 30689
  REGION 1..120: note = ENSP00000408604

SEQ ID NO: 30692 - protein, 1810 aa, Homo sapiens
  REGION 1..1810: note = ENSP00000377191
MDCPLSAPTPPPPLVRFFRAPLPACVPPTLLPVLPAALCRARVRAQEPEFSYGCAEGSCYPATGDLLIGRAQKLSVTSTCGLHKPEPYCIVSHLQEDKKCFICNSQDPYHETLNPDSHLIENVVTTFAPNRLKIWWQSENGVENVTIQLDLEAEFHFTHLIMTFKTFRPAAMLIERSSDFGKTWGVYRYFAYDCEASFPGISTGPMKKVDDIICDSRYSDIEPSTEGEVIFRALDPAFKIEDPYSPRIQNLLKITNLRIKFVKLHTLGDNLLDSRMEIREKYYYAVYDMVVRGNCFCYGHASECAPVDGFNEEVEGMVHGHCMCRHNTKGLNCELCMDFYHDLPWRPAEGRNSNACKKCNCNEHSISCHFDMAVYLATGNVSGGVCDDCQHNTMGRNCEQCKPFYYQHPERDIRDPNFCERCTCDPAGSQNEGICDSYTDFSTGLIAGQCRCKLNVEGEHCDVCKEGFYDLSSEDPFGCKSCACNPLGTIPGGNPCDSETGHCYCKRLVTGQHCDQCLPEHWGLSNDLDGCRPCDCDLGGALNNSCFAESGQCSCRPHMIGRQCNEVEPGYYFATLDHYLYEAEEANLGPGVSIVERQYIQDRIPSWTGAGFVRVPEGAYLEFFIDNIPYSMEYDILIRYEPQLPDHWEKAVITVQRPGRIPTSSRCGNTIPDDDNQVVSLSPGSRYVVLPRPVCFEKGTNYTVRLELPQYTSSDSDVESPYTLIDSLVLMPYCKSLDIFTVGGSGDGVVTNSAWETFQRYRCLENSRSVVKTPMTDVCRNIIFSISALLHQTGLACECDPQGSLSSVCDPNGGQCQCRPNVVGRTCNRCAPGTFGFGPSGCKPCECHLQGSVNAFCNPVTGQCHCFQGVYARQCDRCLPGHWGFPSCQPCQCNGHADDCDPVTGECLNCQDYTMGHNCERCLAGYYGDPIIGSGDHCRPCPCPDGPDSGRQFARSCYQDPVTLQLACVCDPGYIGSRCDDCASGYFGNPSEVGGSCQPCQCHNNIDTTDPEACDKETGRCLKCLYHTEGEHCQFCRFGYYGDALQQDCRKCVCNYLGTVQEHCNGSDCQCDKATGQCLCLPNVIGQNCDRCAPNTWQLASGTGCDPCNCNAAHSFGPSCNEFTGQCQCMPGFGGRTCSECQELFWGDPDVECRACDCDPRGIETPQCDQSTGQCVCVEGVEGPRCDKCTRGYSGVFPDCTPCHQCFALWDVIIAELTNRTHRFLEKAKALKISGVIGPYRETVDSVERKVSEIKDILAQSPAAEPLKNIGNLFEEAEKLIKDVTEMMAQVEVKLSDTTSQSNSTAKELDSLQTEAESLDNTVKELAEQLEFIKNSDIRGALDSITKYFQMSLEAEERVNASTTEPNSTVEQSALMRDRVEDVMMERESQFKEKQEEQARLLDELAGKLQSLDLSAAAEMTCGTPPGASCSETECGGPNCRTDEGERKCGGPGCGGLVTVAHNAWQKAMDLDQDVLSALAEVEQLSKMVSEAKLRADEAKQSAEDILLKTNATKEKMDKSNEELRNLIKQIRNFLTQDSADLDSIEAVANEVLKMEMPSTPQQLQNLTEDIRERVESLSQVEVILQHSAADIARAEMLLEEAKRASKSATDVKVTADMVKEALEEAEKAQVAAEKAIKQADEDIQGTQNLLTSIESETAASEETLFNASQRISELERNVEELKRKAAQNSGEAEYIEKVVYTVKQSAEDVKKTLDGELDEKYKKVENLIAKKTEESADARRKAEMLQNEAKTLLAQANSKLQLLKDLERKYEDNQRYLEDKAQELARLEGEVRSLLKDISQKVAVYSTCL

SEQ ID NO: 30693 - protein, 1786 aa, Homo sapiens
  REGION 1..1786: note = ENSP00000222399
MGLLQLLAFSFLALCRARVRAQEPEFSYGCAEGSCYPATGDLLIGRAQKLSVTSTCGLHKPEPYCIVSHLQEDKKCFICNSQDPYHETLNPDSHLIENVVTTFAPNRLKIWWQSENGVENVTIQLDLEAEFHFTHLIMTFKTFRPAAMLIERSSDFGKTWGVYRYFAYDCEASFPGISTGPMKKVDDIICDSRYSDIEPSTEGEVIFRALDPAFKIEDPYSPRIQNLLKITNLRIKFVKLHTLGDNLLDSRMEIREKYYYAVYDMVVRGNCFCYGHASECAPVDGFNEEVEGMVHGHCMCRHNTKGLNCELCMDFYHDLPWRPAEGRNSNACKKCNCNEHSISCHFDMAVYLATGNVSGGVCDDCQHNTMGRNCEQCKPFYYQHPERDIRDPNFCERCTCDPAGSQNEGICDSYTDFSTGLIAGQCRCKLNVEGEHCDVCKEGFYDLSSEDPFGCKSCACNPLGTIPGGNPCDSETGHCYCKRLVTGQHCDQCLPEHWGLSNDLDGCRPCDCDLGGALNNSCFAESGQCSCRPHMIGRQCNEVEPGYYFATLDHYLYEAEEANLGPGVSIVERQYIQDRIPSWTGAGFVRVPEGAYLEFFIDNIPYSMEYDILIRYEPQLPDHWEKAVITVQRPGRIPTSSRCGNTIPDDDNQVVSLSPGSRYVVLPRPVCFEKGTNYTVRLELPQYTSSDSDVESPYTLIDSLVLMPYCKSLDIFTVGGSGDGVVTNSAWETFQRYRCLENSRSVVKTPMTDVCRNIIFSISALLHQTGLACECDPQGSLSSVCDPNGGQCQCRPNVVGRTCNRCAPGTFGFGPSGCKPCECHLQGSVNAFCNPVTGQCHCFQGVYARQCDRCLPGHWGFPSCQPCQCNGHADDCDPVTGECLNCQDYTMGHNCERCLAGYYGDPIIGSGDHCRPCPCPDGPDSGRQFARSCYQDPVTLQLACVCDPGYIGSRCDDCASGYFGNPSEVGGSCQPCQCHNNIDTTDPEACDKETGRCLKCLYHTEGEHCQFCRFGYYGDALQQDCRKCVCNYLGTVQEHCNGSDCQCDKATGQCLCLPNVIGQNCDRCAPNTWQLASGTGCDPCNCNAAHSFGPSCNEFTGQCQCMPGFGGRTCSECQELFWGDPDVECRACDCDPRGIETPQCDQSTGQCVCVEGVEGPRCDKCTRGYSGVFPDCTPCHQCFALWDVIIAELTNRTHRFLEKAKALKISGVIGPYRETVDSVERKVSEIKDILAQSPAAEPLKNIGNLFEEAEKLIKDVTEMMAQVEVKLSDTTSQSNSTAKELDSLQTEAESLDNTVKELAEQLEFIKNSDIRGALDSITKYFQMSLEAEERVNASTTEPNSTVEQSALMRDRVEDVMMERESQFKEKQEEQARLLDELAGKLQSLDLSAAAEMTCGTPPGASCSETECGGPNCRTDEGERKCGGPGCGGLVTVAHNAWQKAMDLDQDVLSALAEVEQLSKMVSEAKLRADEAKQSAEDILLKTNATKEKMDKSNEELRNLIKQIRNFLTQDSADLDSIEAVANEVLKMEMPSTPQQLQNLTEDIRERVESLSQVEVILQHSAADIARAEMLLEEAKRASKSATDVKVTADMVKEALEEAEKAQVAAEKAIKQADEDIQGTQNLLTSIESETAASEETLFNASQRISELERNVEELKRKAAQNSGEAEYIEKVVYTVKQSAEDVKKTLDGELDEKYKKVENLIAKKTEESADARRKAEMLQNEAKTLLAQANSKLQLLKDLERKYEDNQRYLEDKAQELARLEGEVRSLLKDISQKVAVYSTCL

SEQ ID NO: 30694 - protein, 850 aa, Homo sapiens
  REGION 1..850: note = ENSP00000377190
MGLLQLLAFSFLALCRARVRAQEPEFSYGCAEGSCYPATGDLLIGRAQKLSVTSTCGLHKPEPYCIVSHLQEDKKCFICNSQDPYHETLNPDSHLIENVVTTFAPNRLKIWWQSENGVENVTIQLDLEAEFHFTHLIMTFKTFRPAAMLIERSSDFGKTWGVYRYFAYDCEASFPGISTGPMKKVDDIICDSRYSDIEPSTEGEVIFRALDPAFKIEDPYSPRIQNLLKITNLRIKFVKLHTLGDNLLDSRMEIREKYYYAVYDMVVRGNCFCYGHASECAPVDGFNEEVEGMVHGHCMCRHNTKGLNCELCMDFYHDLPWRPAEGRNSNACKKCNCNEHSISCHFDMAVYLATGNVSGGVCDDCQHNTMGRNCEQCKPFYYQHPERDIRDPNFCERCTCDPAGSQNEGICDSYTDFSTGLIAGQCRCKLNVEGEHCDVCKEGFYDLSSEDPFGCKSCACNPLGTIPGGNPCDSETGHCYCKRLVTGQHCDQCLPEHWGLSNDLDGCRPCDCDLGGALNNSCFAESGQCSCRPHMIGRQCNEVEPGYYFATLDHYLYEAEEANLGPGVSIVERQYIQDRIPSWTGAGFVRVPEGAYLEFFIDNIPYSMEYDILIRYEPQLPDHWEKAVITVQRPGRIPTSSRCGNTIPDDDNQVVSLSPGSRYVVLPRPVCFEKGTNYTVRLELPQYTSSDSDVESPYTLIDSLVLMPYCKSLDIFTVGGSGDGVVTNSAWETFQRYRCLENSRSVVKTPMTDVCRNIIFSISALLHQTGLACECDPQGSLSSVCDPNGGQCQCRPNVVGRTCNRCAPGTFGFGPSGCKRRFLKSIVMHSFRLTQPLWQGSIAAEPMLPS

SEQ ID NO: 30695 - protein, 183 aa, Homo sapiens
  REGION 1..183: note = ENSP00000412686
MGLLQLLAFSFLETAGPGASLEWRSLETTPEPQGLSMGSPSSGKRRPPRAPAPRPQRSAGDPRACTHTHSRFPSSQISTRTLTPRMRGLPRARGFTCVALCRARVRAQEPEFSYGCAEGSCYPATGDLLIGRAQKLSVTSTCGLHKPEPYCIVSHLQEDKKCFICNSQDPYHETLNPDSHLIE

SEQ ID NO: 30696 - protein, 91 aa, Homo sapiens
  REGION 1..91: note = ENSP00000377189
MGLLQLLAFSFLALCRARVRAQEPEFSYGCAEGSCYPATGDLLIGRAQKLSVTSTCGLHKPEPYCIVSHLQEDKKCFICNSQDPYHETLNP

SEQ ID NO: 30697 - protein, 1798 aa, Homo sapiens
  REGION 1..1798: note = ENSP00000388325
MELTSRERGRGQPLPWELRLGLLLSVLAATLAQAPAPDVPGCSRGSCYPATGDLLVGRADRLTASSTCGLNGPQPYCIVSHLQDEKKCFLCDSRRPFSARDNPHSHRIQNVVTSFAPQRRAAWWQSENGIPAVTIQLDLEAEFHFTHLIMTFKTFRPAAMLVERSADFGRTWHVYRYFSYDCGADFPGVPLAPPRHWDDVVCESRYSEIEPSTEGEVIYRVLDPAIPIPDPYSSRIQNLLKITNLRVNLTRLHTLGDNLLDPRREIREKYYYALYELVVRGNCFCYGHASECAPAPGAPAHAEGMVHGACICKHNTRGLNCEQCQDFYRDLPWRPAEDGHSHACRKCECHGHTHSCHFDMAVYLASGNVSGGVCDGCQHNTAGRHCELCRPFFYRDPTKDLRDPAVCRSCDCDPMGSQDGGRCDSHDDPALGLVSGQCRCKEHVVGTRCQQCRDGFFGLSISDRLGCRRCQCNARGTVPGSTPCDPNSGSCYCKRLVTGRGCDRCLPGHWGLSHDLLGCRPCDCDVGGALDPQCDEGTGQCHCRQHMVGRRCEQVQPGYFRPFLDHLIWEAEDTRGQVLDVVERLVTPGETPSWTGSGFVRLQEGQTLEFLVASVPKAMDYDLLLRLEPQVPEQWAELELIVQRPGPVPAHSLCGHLVPKDDRIQGTLQPHARYLIFPNPVCLEPGISYKLHLKLVRTGGSAQPETPYSGPGLLIDSLVLLPRVLVLEMFSGGDAAALERQATFERYQCHEEGLVPSKTSPSEACAPLLISLSTLIYNGALPCQCNPQGSLSSECNPHGGQCLCKPGVVGRRCDLCAPGYYGFGPTGCQACQCSHEGALSSLCEKTSGQCLCRTGAFGLRCDRCQRGQWGFPSCRPCVCNGHADECNTHTGACLGCRDHTGGEHCERCIAGFHGDPRLPYGGQCRPCPCPEGPGSQRHFATSCHQDEYSQQIVCHCRAGYTGLRCEACAPGHFGDPSRPGGRCQLCECSGNIDPMDPDACDPHTGQCLRCLHHTEGPHCAHCKPGFHGQAARQSCHRCTCNLLGTNPQQCPSPDQCHCDPSSGQCPCLPNVQGPSCDRCAPNFWNLTSGHGCQPCACHPSRARGPTCNEFTGQCHCRAGFGGRTCSECQELHWGDPGLQCHACDCDSRGIDTPQCHRFTGHCSCRPGVSGVRCDQCARGFSGIFPACHPCHACFGDWDRVVQDLAARTQRLEQRAQELQQTGVLGAFESSFWHMQEKLGIVQGIVGARNTSAASTAQLVEATEELRREIGEATEHLTQLEADLTDVQDENFNANHALSGLERDRLALNLTLRQLDQHLDLLKHSNFLGAYDSIRHAHSQSAEAERRANTSALAVPSPVSNSASARHRTEALMDAQKEDFNSKHMANQRALGKLSAHTHTLSLTDINELVCGAPGDAPCATSPCGGAGCRDEDGQPRCGGLSCNGAAATADLALGRARHTQAELQRALAEGGSILSRVAETRRQASEAQQRAQAALDKANASRGQVEQANQELQELIQSVKDFLNQEGADPDSIEMVATRVLELSIPASAEQIQHLAGAIAERVRSLADVDAILARTVGDVRRAEQLLQDARRARSWAEDEKQKAETVQAALEEAQRAQGIAQGAIRGAVADTRDTEQTLYQVQERMAGAERALSSAGERARQLDALLEALKLKRAGNSLAASTAEETAGSAQGRAQEAEQLLRGPLGDQYQTVKALAERKAQGVLAAQARAEQLRDEARDLLQAAQDKLQRLQELEGTYEENERALESKAAQLDGLEARMRSVLQAINLQVQIYNTCQ

SEQ ID NO: 30698 - protein, 1798 aa, Homo sapiens; identical to SEQ ID NO: 30697
  REGION 1..1798: note = ENSP00000307156

SEQ ID NO: 30699 - protein, 151 aa, Homo sapiens
  REGION 1..151: note = ENSP00000444751
MTFKTFRPAAMLVERSADFGRTWHVYRYFSYDCGADFPGVPLAPPRHWDDVVCESRYSEIEPSTEGEVIYRVLDPAIPIPDPYSSRIQNLLKITNLRVNLTRLHTLGDNLLDPRREIREKYYYALYELVVRGNCFCYGHASECAPAPGAPA

SEQ ID NO: 30700 - protein, 236 aa, Homo sapiens
  REGION 1..236: note = ENSP00000406360
MDLQGRGVPSIDRLRVLLMLFHTMAQIMAEQEVENLSGLSTNPEKDIFVVRENGTTCLMAEFAAKFIVPYDVWASNYVDESHNMSKGPEATWRLSKVQFVYDSSEKTHFKDAVSAGKHTANSHHLSALVTPAGKSYECQAQQTISLASSDPQKTVTMILSAVHIQPFDIISDFVFSEEHKCPVDEREQLEETLPLILGLILGLVIMVTLAIYHVHHKMTANQVQIPRDRSQYKHMG

SEQ ID NO: 30701 - protein, 280 aa, Homo sapiens
  REGION 1..280: note = ENSP00000246070
MDLQGRGVPSIDRLRVLLMLFHTMAQIMAEQEVENLSGLSTNPEKDIFVVRENGTTCLMAEFAAKFIVPYDVWASNYVDLITEQADIALTRGAEVKGRCGHSQSELQVFWVDRAYALKMLFVKESHNMSKGPEATWRLSKVQFVYDSSEKTHFKDAVSAGKHTANSHHLSALVTPAGKSYECQAQQTISLASSDPQKTVTMILSAVHIQPFDIISDFVFSEEHKCPVDEREQLEETLPLILGLILGLVIMVTLAIYHVHHKMTANQVQIPRDRSQYKHMG

SEQ ID NO: 30702 - protein, 317 aa, Homo sapiens
  REGION 1..317: note = ENSP00000402301
MTSRTRVTWPSPPRPLPVPAAAAVAFGAKGTDPAEARSSRGIEEAGPRAHGRAGREPERRRSRQQRRGGLQARRSTLLKTCARARATAPGAMKMVAPWTRFYSNSCCLCCHVRTGTILLGVWYLIINAVVLLILLSALADPDQYNFSSSELGGDFEFMDDANMCIAIAISLLMILICAMATYGAYKQRAAWIIPFFCYQIFDFALNMLVAITVLIYPNSIQEYIRQLPPNFPYRDDVMSVNPTCLVLIILLFISIILTFKGYLISCVWNCYRYINGRNSSDVLVYVTSNDTTVLLPPYDDATVNGAAKEPPPPYVSA

SEQ ID NO: 30703 - protein, 226 aa, Homo sapiens
  REGION 1..226: note = ENSP00000428409
MKMVAPWTRFYSNSCCLCCHVRTGTILLGVWYLIINAVVLLILLSALADPDQYNFSSSELGGDFEFMDDANMCIAIAISLLMILICAMATYGAYKQRAAWIIPFFCYQIFDFALNMLVAITVLIYPNSIQEYIRQLPPNFPYRDDVMSVNPTCLVLIILLFISIILTFKGYLISCVWNCYRYINGRNSSDVLVYVTSNDTTVLLPPYDDATVNGAAKEPPPPYVSA

SEQ ID NO: 30704 - protein, 152 aa, Homo sapiens
  REGION 1..152: note = ENSP00000429868
MKMVAPWTRFYSNSCCLCCHVRTGTILLGVWYLIINAVVLLILLSALADPDQYNFSSSELGGDFEFMDDAKILFNLSADMCIAIAISLLMILICAMATYGAYKQRAAWIIPFFCYQIFDFALNMLVAITVLIYPNSIQEYIRQLPPNFPYRD

SEQ ID NO: 30705 - protein, 317 aa, Homo sapiens; identical to SEQ ID NO: 30702
  REGION 1..317: note = ENSP00000482533

SEQ ID NO: 30706 - protein, 491 aa, Homo sapiens
  REGION 1..491: note = ENSP00000299213
MAQSGGEARPGPKTAVQIRVAIQEAEDVDELEDEEEGAETRGAGDPARYLSPGWGSASEEEPSRGHSGTTASGGENEREDLEQEWKPPDEELIKKLVDQIEFYFSDENLEKDAFLLKHVRRNKLGYVSVKLLTSFKKVKHLTRDWRTTAHALKYSVVLELNEDHRKVRRTTPVPLFPNENLPSKMLLVYDLYLSPKLWALATPQKNGRVQEKVMEHLLKLFGTFGVISSVRILKPGRELPPDIRRISSRYSQVGTQECAIVEFEEVEAAIKAHEFMITESQGKENMKAVLIGMKPPKKKPAKDKNHDEEPTASIHLNKSLNKRVEELQYMGDESSANSSSDPESNPTSPMAGRRHAATNKLSPSGHQNLFLSPNASPCTSPWSSPLAQRKGVSRKSPLAEEGRLNCSTSPEIFRKCMDYSSDSSVTPSGSPWVRRRRQAEMGTQEKSPGTSPLLSRKMQTADGLPVGVLRLPRGPDNTRGFHGHERSRACV

SEQ ID NO: 30707 - protein, 31 aa, Homo sapiens
  REGION 1..31: note = ENSP00000467334
MLLVYDLYLSPKLWALATPQKNGRVQEKVME

SEQ ID NO: 30708 - protein, 93 aa, Homo sapiens
  REGION 1..93: note = ENSP00000343869
MAQSGGEARPGPKTAVQIRVAIQEAEDVDELEDEEEGAETRGAGDPARYLSPGWGSASEEEPSRGHRNRSSVNSRTMLASFIVSSAPSTAPST

SEQ ID NO: 30709 - protein, 78 aa, Homo sapiens
  REGION 1..78: note = ENSP00000453551
  VARIANT 1: note = Any amino acid
XVDELEDEEEGAETRGAGDPARYLSPGWGSASEEEPSRGHRTAQLPWLESQQVFSLKPFLLPTGIELTPENPWGSSVS

SEQ ID NO: 30710 - protein, 903 aa, Homo sapiens
  REGION 1..903: note = ENSP00000265537
MASVWQRLGFYASLLKRQLNGGPDVIKWERRVIPGCTRSIYSATGKWTKEYTLQTRKDVEKWWHQRIKEQASKISEADKSKPKFYVLSMFPYPSGKLHMGHVRVYTISDTIARFQKMRGMQVINPMGWDAFGLPAENAAVERNLHPQSWTQSNIKHMRKQLDRLGLCFSWDREITTCLPDYYKWTQYLFIKLYEAGLAYQKEALVNWDPVDQTVLANEQVDEHGCSWRSGAKVEQKYLRQWFIKTTAYAKAMQDALADLPEWYGIKGMQAHWIGDCVGCHLDFTLKVHGQATGEKLTAYTATPEAIYGTSHVAISPSHRLLHGHSSLKEALRMALVPGKDCLTPVMAVNMLTQQEVPVVILAKADLEGSLDSKIGIPSTSSEDTILAQTLGLAYSEVIETLPDGTERLSSSAEFTGMTRQDAFLALTQKARGKRVGGDVTSDKLKDWLISRQRYWGTPIPIVHCPVCGPTPVPLEDLPVTLPNIASFTGKGGPPLAMASEWVNCSCPRCKGAAKRETDTMDTFVDSAWYYFRYTDPHNPHSPFNTAVADYWMPVDLYIGGKEHAVMHLFYARFFSHFCHDQKMVKHREPFHKLLAQGLIKGQTFRLPSGQYLQREEVDLTGSVPVHAKTKEKLEVTWEKMSKSKHNGVDPEEVVEQYGIDTIRLYILFAAPPEKDILWDVKTDALPGVLRWQQRLWTLTTRFIEARASGKSPQPQLLSNKEKAEARKLWEYKNSVISQVTTHFTEDFSLNSAISQLMGLSNALSQASQSVILHSPEFEDALCALMVMAAPLAPHVTSEIWAGLALVPRKLCAHYTWDASVLLQAWPAVDPEFLQQPEVVQMAVLINNKACGKIPVPQQVARDQDKVHEFVLQSELGVRLLQGRSIKKSFLSPRTALINFLVQD

SEQ ID NO: 30711 - protein, 903 aa, Homo sapiens; identical to SEQ ID NO: 30710
  REGION 1..903: note = ENSP00000408576

SEQ ID NO: 30712 - protein, 144 aa, Homo sapiens
  REGION 1..144: note = ENSP00000406611
MASVWQRLGFYASLLKRQLNGGPDVIKWERRVIPGCTRSIYSATGKWTKEYTLQTRKDVEKWWHQRIKEQASKISEADVINPMGWDAFGLPAENAAVERNLHPQSWTQSNIKHMRKQLDRLGLCFSWDREITTCLPDYYKWTQY

SEQ ID NO: 30713 - protein, 860 aa, Homo sapiens
  REGION 1..860: note = ENSP00000412893
MASVWQRLGFYASLLKRQLNGGPDVIKWERRVIPGCTRSIYSATGKWTKEYTLQTRKDVEKWWHQRIKEQASKISEADVINPMGWDAFGLPAENAAVERNLHPQSWTQSNIKHMRKQLDRLGLCFSWDREITTCLPDYYKWTQYLFIKLYEAGLAYQKEALVNWDPVDQTVLANEQVDEHGCSWRSGAKVEQKYLRQWFIKTTAYAKAMQDALADLPEWYGIKGMQAHWIGDCVGCHLDFTLKVHGQATGEKLTAYTATPEAIYGTSHVAISPSHRLLHGHSSLKEALRMALVPGKDCLTPVMAVNMLTQQEVPVVILAKADLEGSLDSKIGIPSTSSEDTILAQTLGLAYSEVIETLPDGTERLSSSAEFTGMTRQDAFLALTQKARGKRVGGDVTSDKLKDWLISRQRYWGTPIPIVHCPVCGPTPVPLEDLPVTLPNIASFTGKGGPPLAMASEWVNCSCPRCKGAAKRETDTMDTFVDSAWYYFRYTDPHNPHSPFNTAVADYWMPVDLYIGGKEHAVMHLFYARFFSHFCHDQKMVKHREPFHKLLAQGLIKGQTFRLPSGQYLQREEVDLTGSVPVHAKTKEKLEVTWEKMSKSKHNGVDPEEVVEQYGIDTIRLYILFAAPPEKDILWDVKTDALPGVLRWQQRLWTLTTRFIEARASGKSPQPQLLSNKEKAEARKLWEYKNSVISQVTTHFTEDFSLNSAISQLMGLSNALSQASQSVILHSPEFEDALCALMVMAAPLAPHVTSEIWAGLALVPRKLCAHYTWDASVLLQAWPAVDPEFLQQPEVVQMAVLINNKACGKIPVPQQVARDQDKVHEFVLQSELGVRLLQGRSIKKSFLSPRTALINFLVQD

SEQ ID NO: 30714 - protein, 114 aa, Homo sapiens
  REGION 1..114: note = ENSP00000401388
MASVWQRLGFYASLLKRQLNGGPDVIKWERRVIPGCTRSIYSATGKWTKEYTLQTRKDVEKWWHQRIKEQASKISEADKSKPKFYVLSMFPYPSGKLHMGHVRVYTISDTIARF

SEQ ID NO: 30715 - protein, 105 aa, Homo sapiens
  REGION 1..105: note = ENSP00000378733
MSIYFPIHCPDYLRSAKMTEVMMNTQPMEEIGLSPRKDGLSYQIFPDPSDFDRCCKLKDRLPSIVVEPTEGEVESGELRWPPEEFLVQEDEQDNCEETAKENKEQ

SEQ ID NO: 30716 - protein, 43 aa, Homo sapiens
  REGION 1..43: note = ENSP00000392167
MSIYFPIHCPDYLRSAKMTEVMMNTQPMEEIGLSPRKDGLSYQ

SEQ ID NO: 30717 - protein, 52 aa, Homo sapiens
  REGION 1..52: note = ENSP00000385409
MSIYFPIHCPDYLRSAKMTEVMMNTQPMEEIGLSPRKDGLSYQVNLPRPVRF

SEQ ID NO: 30718 - protein, 48 aa, Homo sapiens
  REGION 1..48: note = ENSP00000384443
MSIYFPIHCPDYLRSAKMTEVMMNTQPMEEIGLSPRKDGLSYQDCEEP

SEQ ID NO: 30719 - protein, 111 aa, Homo sapiens
  REGION 1..111: note = ENSP00000385703
MQVSTSRPAAAGLSCPDYLRSAKMTEVMMNTQPMEEIGLSPRKDGLSYQIFPDPSDFDRCCKLKDRLPSIVVEPTEGEVESGELRWPPEEFLVQEDEQDNCEETAKENKEQ

SEQ ID NO: 30720 - protein, 88 aa, Homo sapiens
  REGION 1..88: note = ENSP00000386106
MTEVMMNTQPMEEIGLSPRKDGLSYQIFPDPSDFDRCCKLKDRLPSIVVEPTEGEVESGELRWPPEEFLVQEDEQDNCEETAKENKEQ

SEQ ID NO: 30721 - protein, 281 aa, Homo sapiens
  REGION 1..281: note = ENSP00000359212
MTSKEDGKAAPGEERRRSPLDHLPPPANSNKPLTPFSIEDILNKPSVRRSYSLCGAAHLLAAADKHAQGGLPLAGRALLSQTSPLCALEELASKTFKGLEVSVLQAAEGRDGMTIFGQRQTPKKRRKSRTAFTNHQIYELEKRFLYQKYLSPADRDQIAQQLGLTNAQVITWFQNRRAKLKRDLEEMKADVESAKKLGPSGQMDIVALAELEQNSEATAGGGGGCGRAKSRPGSPVLPPGAPKAPGAGALQLSPASPLTDQPASSQDCSEDEEDEEIDVDD

SEQ ID NO: 30722 - protein, 440 aa, Homo sapiens
  REGION 1..440: note = ENSP00000264005
MGPPGSPWQWVTLLLGLLLPPAAPFWLLNVLFPPHTTPKAELSNHTRPVILVPGCLGNQLEAKLDKPDVVNWMCYRKTEDFFTIWLDLNMFLPLGVDCWIDNTRVVYNRSSGLVSNAPGVQIRVPGFGKTYSVEYLDSSKLAGYLHTLVQNLVNNGYVRDETVRAAPYDWRLEPGQQEEYYRKLAGLVEEMHAAYGKPVFLIGHSLGCLHLLYFLLRQPQAWKDRFIDGFISLGAPWGGSIKPMLVLASGDNQGIPIMSSIKLKEEQRITTTSPWMFPSRMAWPEDHVFISTPSFNYTGRDFQRFFADLHFEEGWYMWLQSRDLLAGLPAPGVEVYCLYGVGLPTPRTYIYDHGFPYTDPVGVLYEDGDDTVATRSTELCGLWQGRQPQPVHLLPLHGIQHLNMVFSNLTLEHINAILLGAYRQGPPASPTASPEPPPPE

SEQ ID NO: 30723 - protein, 138 aa, Homo sapiens
  REGION 1..138: note = ENSP00000463220
VQIRVPGFGKTYSVEYLDSSKLAGYLHTLVQNLVNNGYVRDETVRAAPYDWRLEPGQQEEYYRKLAGLVEEMHAAYGKPVFLIGHSLGCLHLLYFLLRQPQAWKDRFIDGFISLGAPWGGSIKPMLVLASETGSHCIA

SEQ ID NO: 30724 - protein, 107 aa, Homo sapiens
  REGION 1..107: note = ENSP00000459014
  VARIANT 1: note = Any amino acid
XLPLGVDCWIDNTRVVYNRSSGLVSNAPGVQIRVPGFGKTYSVEYLDSSKLAGPPATACAPAAPARDTASQHGLQQPDPGAHQCHPAGCLPPGSPCIPDCQPRAPAS

SEQ ID NO: 30725 - protein, 255 aa, Homo sapiens
  REGION 1..255: note = ENSP00000464651
MCYRKTEDFFTIWLDLNMFLPLGVDCWIDNTRVVYNRSSGLVSNAPGVQIRVPGFGKTYSVEYLDSSKLAGYLHTLVQNLVNNGYVRDETVRAAPYDWRLEPGQQEEYYRKLAGLVEEMHAAYGKPVFLIGHSLGCLHLLYFLLRQPQAWKDRFIDGFISLGAPWGGSIKPMLVLASGDNQGIPIMSSIKLKEEQRITTTSPWMFPSRMAWPEDHVFISTPSFNYTGRDFQRFFADLHFEEGWYMWLQSRDLLAG

SEQ ID NO: 30726 - protein, 93 aa, Homo sapiens
  REGION 1..93: note = ENSP00000460653
MGPPGSPWQWVTLLLGLLLPPAAPFWLLNVLFPPHTTPKAELSNHTRPVILARSQAGQTRCGELDVLPQDRGLLHHLAGSQHVPTPWGRLLDR

SEQ ID NO: 30727 - protein, 80 aa, Homo sapiens
  REGION 1..80: note = ENSP00000458141
  VARIANT 1: note = Any amino acid
XEYYRKLAGLVEEMHAAYGKPVFLIGHSLGCLHLLYFLLRQPQAWKDRFIDGFISLGAPWGGSIKPMLVLASGSGTRAQH

SEQ ID NO: 30728 - protein, 61 aa, Homo sapiens
  REGION 1..61: note = ENSP00000459291
SPRPGRTALLMASSLLGLPGVAPSSPCWSWPQECLCPGMCFTEDGSARARARPPEAPPALP

SEQ ID NO: 30729 - protein, 152 aa, Homo sapiens
  REGION 1..152: note = ENSP00000360753
MEELDRQKIGGFWREVGVASDQSLVLTAPKRVEGLFLTLSGSNLTVKVAYNSSGSCEIEKIVGSEIDSTGKFAFPGHREIHVLDTDYEGYAILRVSLMWRGRNFRVLKYFTRSLEDKDRLGFWKFRELTADTGLYLAARPGRCAELLKEELI

SEQ ID NO: 30730 - protein, 175 aa, Homo sapiens
  REGION 1..175: note = ENSP00000482512
MPGAAEALPTVTVTLVAGAVPPASGALTAHCIGGFWREVGVASDQSLVLTAPKRVEGLFLTLSGSNLTVKVAYNSSGSCEIEKIVGSEIDSTGKFAFPGHREIHVLDTDYEGYAILRVSLMWRGRNFRVLKYFTRSLEDKDRLGFWKFRELTADTGLYLAARPGRCAELLKEELI

SEQ ID NO: 30731 - protein, 1871 aa, Homo sapiens
  REGION 1..1871: note = ENSP00000490600
MDKGRERMAAAAAAAAAAAAAAQCRSPRCAAERRGFRRELDSWRHRLMHCVGFESILEGLYGPRLRRDLSLFEDCEPEELTDWSMDEKCSFCNLQREAVSDCIPSLDSSQSTPTEELSSQGQSNTDKIECQAENYLNALFRKKDLPQNCDPNIPLVAQELMKKMIRQFAIEYISKSGKTQENRNGSIGPSIVCKSIQMNQAENSLQEEQEGPLDLTVNRMQEQNTQQGDGVLDLSTKKTSIKSEESSICDPSSENSVAGSTVDAKSEEATKMEKRKSALNKVLESLCIHHQQQVLAMLKFLVQEQNAASLCCCNTSCVVSSESQKPLIEDDLCGLFCSCEYRLAERGCLQNEKQSPGLEPLPVCIKDLHCLSCQTVTVEHVKPVVNRGIADSYNSHRCCSGLLPNIHSTKSAFRSPLLSKEVCDLSVTLKDACRSRSPSPPPLSPIETEGFEKLKDVISEISALENNKLEANINQPPSLTPAEISSNKSDHQDKILKTKKSSNSYSLLSNDSNNSTTNHEKGETAVIFQDLMDRINEKLKSIETTDMTSLVKLSSSDYNTYNDLKLGDFITSLLHNAKASDYSFMELLSQHDKKVENKIIQTRFRKRQETLFAMRNSSDSPMFRRQSLQIKRELASLDENFTRKKYTEKSSRKLTQNNEISSSDKGEFYHDQGPSLQNSKRLQGKNHAETSFSPNYALQSLQLPLHSSETNLSFNEFSESFKTTSPEKMSIRKPQEKSADGKQFLQNDRKNPKLGNTQTLLRNDVSGLLSRTKRNIVPPGWYSVYVTNNYVFKKSPKAKKVSESTTKNDPVKNIHIESSHNIDLNKIAMNSNLQVVVKRLEDTISIAKKSWNNQPLSEGYKASKKLIEIDGKDQHADRNMTLTLNRMTCKEQSLSKSVVASGNIINSHCMPTVDLNNKRLENLKKSSILDMGRLISSVENVPAKYEGTESSSVSNYSSPIKLMFLSEVKSSEGVKYTLTSVGTSHSNVVLPSEKPTTHHVTEEKTETNEDISNANSENYHSSHYDTDTFQRELNKFSHAKETAGSSTMFIGDINSDKPQEEPKDNSSSATDPSFKRKPGRPKKIGPQVVKQIKRPIGRPPKPKIDQTNITVCQNEPFSAGRKSPECLISEVKEGIYKKSITVTVIYGRSRRTKRHVSEGRVNISNLMSLNNNAGDFPTEYNSPRNISEDKIDLGERISAVASLTTESEILGSGFEYVRPIKNKSVIPQPSKNIIRPNQKPLAISRKPGRPAKVKISGISVTINRTSPQEREVSISSCLPPLEQDNTSGKNLPEEKYDQQCTQMDKIRHTEADIFKNGSKRMIATVPLRHSIRDRKPSLHFLHSLASSSSLIYRNALLHKSYKLHLQKNKSQKEKHRHSKMKIAYKDTPRNRLSRNAKKCLEDNKLVPISEVSLDPIISSNPLLRWWATSASNDSLLEELNNRFEQITNAWVQVSGDEAENCIHKKREHIENDHFKVASPLETCLLELEVSPVKMLFQKKYDLNELCTWFMQTTETQSLSLVRKANARNPLEVINTRGIKLGTKYSDFNASPFRKHFKKFALSSPSKSAEKLHILHKVANSPLLNVKSNLAIARLKRTEFKRLHHERWKREGKLHNHGTVDWNSKRRNLRFFCQNQFLNKTEGETNADIPLQGKSIVDNQCVLPPEIRGDLQQRVVMPDFKIHASFENKFKSEAKENGTNCSQKDFQKGPRLENVCPNSWRSKTLKDCRIFLRKLNCLEHRNTFKLNTIIYSPESTDSGNTHQTHMEESKRFTLRSHSARQNSFKKQSKEIENANTNNPSADEFADHLGNSKLSKCVNFDKNPDSFEVLSNLNKRKRPPWKITEMSTKRHKRQSCNSGQMANYFSKSLACYK

SEQ ID NO: 30732 - protein, 318 aa, Homo sapiens
  REGION 1..318: note = ENSP00000317566
MDKGRERMAAAAAAAAAAAAAAQCRSPRCAAERRGFRRELDSWRHRLMHCVGFESILEGLYGPRLRRDLSLFEDCEPEELTDWSMDEKCSFCNLQREAVSDCIPSLDSSQSTPTEELSSQGQSNTDKIECQAENYLNALFRKKDLPQNCDPNIPLVAQELMKKMIRQFAIEYISKSGKTQENRNGSIGPSIVCKSIQMNQAENSLQEEQEGPLDLTVNRMQEQNTQQGDGVLDLSTKKTSIKSEESSICDPSSENSVAGMLQVKTDEKLNVSDENTASCPLSPIKMCLNRPIEWNLNLTTASLTSCTVHNQNLKSEEK

SEQ ID NO: 30733 - protein, 77 aa, Homo sapiens
  REGION 1..77: note = ENSP00000490873
  VARIANT 1: note = Any amino acid
XGRERMAAAAAAAAAAAAAAQCRSPRCAAERRGFRRELDSWRHRLMHCVGFESILEGLYGPRLRRDLSLFEGLYTIS

SEQ ID NO: 30734 - protein, 79 aa, Homo sapiens
  REGION 1..79: note = ENSP00000423489
MDKGRERMAAAAAAAAAAAAAAQCRSPRCAAERRGFRRELDSWRHRLMHCVGFESILEGLYGPRLRRDLSLFEGLYTIS

SEQ ID NO: 30735 - protein, 518 aa, Homo sapiens
  REGION 1..518: note = ENSP00000371659
MDEKCSFCNLQREAVSDCIPSLDSSQSTPTEELSSQGQSNTDKIECQAENYLNALFRKKDLPQNCDPNIPLVAQELMKKMIRQFAIEYISKSGKTQENRNGSIGPSIVCKSIQMNQAENSLQEEQEGPLDLTVNRMQEQNTQQGDGVLDLSTKKTSIKSEESSICDPSSENSVAGRLHRNREDYVERSAEFADGLLSKALKDIQSGALDINKAGILYGIPQKTLLLHLEALPAGKPASFKNKTRDFHDSYSYKDSKETCAVLQKVALWARAQAERTEKSKLNLLETSEIKFPTASTYLHQLTLQKMVTQFKEKNESLQYETSNPTVQLKIPQLRVSSVSKSQPDGSGLLDVMYQVSKTSSVLEGSALQKLKNILPKQNKIECSGPVTHSSVDSYFLHGDLSPLCLNSKNGTVDGTSENTEDGLDRKDSKQPRKKRGRYRQYDHEIMEEAIAMVMSGKMSVSKAQGIYGVPHSTLEYKVKERSGTLKTPPKKKLRLPDTGLYNMTDSGTGSCKNSSKPV

SEQ ID NO: 30736 - protein, 602 aa, Homo sapiens
  REGION 1..602: note = ENSP00000371661
MDKGRERMAAAAAAAAAAAAAAQCRSPRCAAERRGFRRELDSWRHRLMHCVGFESILEGLYGPRLRRDLSLFEDCEPEELTDWSMDEKCSFCNLQREAVSDCIPSLDSSQSTPTEELSSQGQSNTDKIECQAENYLNALFRKKDLPQNCDPNIPLVAQELMKKMIRQFAIEYISKSGKTQENRNGSIGPSIVCKSIQMNQAENSLQEEQEGPLDLTVNRMQEQNTQQGDGVLDLSTKKTSIKSEESSICDPSSENSVAGRLHRNREDYVERSAEFADGLLSKALKDIQSGALDINKAGILYGIPQKTLLLHLEALPAGKPASFKNKTRDFHDSYSYKDSKETCAVLQKVALWARAQAERTEKSKLNLLETSEIKFPTASTYLHQLTLQKMVTQFKEKNESLQYETSNPTVQLKIPQLRVSSVSKSQPDGSGLLDVMYQVSKTSSVLEGSALQKLKNILPKQNKIECSGPVTHSSVDSYFLHGDLSPLCLNSKNGTVDGTSENTEDGLDRKDSKQPRKKRGRYRQYDHEIMEEAIAMVMSGKMSVSKAQGIYGVPHSTLEYKVKERSGTLKTPPKKKLRLPDTGLYNMTDSGTGSCKNSSKPV

SEQ ID NO: 30737 - protein, 240 aa, Homo sapiens
  REGION 1..240: note = ENSP00000384267
MKLVLIGHSIGSYFTLQMLKRVPELPVIRAFLLFPTIERMSESPNGRIATPLLCWFRYVLYVTGYLLLKPCPETIKSLLIRRGLQVMNLENEFSPLNILEPFCLANAAYLGGQEMMEVVKRDDETIKEHLCKLTFYYGTIDPWCPKEYYEDIKKDFPEGDIRLCEKNIPHAFITHFNQEMADMIADSLKDDLSKIGNPSWHYHSLRTMRCPSAQILKPPDERFGSDLLPTYWWKNQISRD

SEQ ID NO: 30738 - protein, 370 aa, Homo sapiens
  REGION 1..370: note = ENSP00000370480
MDSELKEEIPVHEEFILCGGAETQVLKCGPWTDLFHDQSVKRPKLLIFIIPGNPGFSAFYVPFAKALYSLTNRRFPVWTISHAGHALAPKDKKILTTSEDSNAQEIKDIYGLNGQIEHKLAFLRTHVPKDMKLVLIGHSIGSYFTLQMLKRVPELPVIRAFLLFPTIERMSESPNGRIATPLLCWFRYVLYVTGYLLLKPCPETIKSLLIRRGLQVMNLENEFSPLNILEPFCLANAAYLGGQEMMEVVKRDDETIKEHLCKLTFYYGTIDPWCPKEYYEDIKKDFPEGDIRLCEKNIPHAFITHFNQEMADMIADSLKDDLSKIGNPSWHYHSLRTMRCPSAQILKPPDERFGSDLLPTYWWKNQISRD

SEQ ID NO: 30739 - protein, 325 aa, Homo sapiens
  REGION 1..325: note = ENSP00000237822
MDSELKEEIPVHEEFILCGGAETQVLKCGPWTDLFHDQSVKRPKLLIFIIPGNPGFSAFYVPFAKALYSLTNRRFPVWTISHAGHALAPKDKKILTTSEDSNAQEIKDIYGLNGQIEHKLAFLRTHVPKDMKLVLIGHSIGSYFTLQMLKRVPELPVIRAFLLFPTIERMSESPNGRIATPLLCWFRYVLYVTGYLLLKPCPETIKSLLIRRGLQVMNLENEFSPLNILEPFCLANAAYLGGQEMMEVVKRDDETIKEHLCKLTFYYGTIDPWCPKEYYEDIKKDFPEGDIRLCEKNIPHAFITHFNQEMADMIADSLKDDLSKM

SEQ ID NO: 30740 - protein, 277 aa, Homo sapiens
  REGION 1..277: note = ENSP00000487592
MDSELKEEIPVHEEFILCGGAETQVLKCGPWTDLFHDQSVKRPKLLIFIIPDSNAQEIKDIYGLNGQIEHKLAFLRTHVPKDMKLVLIGHSIGSYFTLQMLKRVPELPVIRAFLLFPTIERMSESPNGRIATPLLCWFRYVLYVTGYLLLKPCPETIKSLLIRRGLQVMNLENEFSPLNILEPFCLANAAYLGGQEMMEVVKRDDETIKEHLCKLTFYYGTIDPWCPKEYYEDIKKDFPEGDIRLCEKNIPHAFITHFNQEMADMIADSLKDDLSKM

SEQ ID NO: 30741 - protein, 130 aa, Homo sapiens
  REGION 1..130: note = ENSP00000396911
MKLVLIGHSIGSYFTLQMLKRVPELPVIRAFLLFPTIERMSESPNGRIATPLLCWFRYVLYVTGYLLLKPCPETIKSLLIRRGLQVMNLENEFSPLNILEPFCLANAAYLGGQEMMEVVKRDDETIKEHL

SEQ ID NO: 30742 - protein, 159 aa, Homo sapiens
  REGION 1..159: note = ENSP00000400910
MDSELKEEIPVHEEFILCGGAETQVLKCGPWTDLFHDQSVKRPKLLIFIIPDSNAQEIKDIYGLNGQIEHKLAFLRTHVPKDMKLVLIGHSIGSYFTLQMLKRVPELPVIRAFLLFPTIERMSESPNGRIATPLLCWFRYVLYVTGYLLLKPCPETIKS

SEQ ID NO: 30743 - protein, 146 aa, Homo sapiens
  REGION 1..146: note = ENSP00000385951
MDSELKEEIPVHEEFILCGGAETQVLKCGPWTDLFHDQSVKRPKLLIFIIPGERKSLGNPGFSAFYVPFAKALYSLTNRRFPVWTISHAGHALAPKDKKILTTSEDSNAQEIKDIYGLNGQIEHKLAFLRTHVPKDMKLVLIGHSI

SEQ ID NO: 30744 - protein, 156 aa, Homo sapiens
  REGION 1..156: note = ENSP00000414710
MDSELKEEIPVHEEFILCGGAETQVLKCGPWTDLFHDQSVKRPKLLIFIIPGNPGFSAFYVPFAKALYSLTNRRFPVWTISHAGHALAPKDKKILTTSEGGILAVLSWWTQEASPLGTLAGSTLMTPSDPNYFPKTPLHLLIAFGHRVSPMDLGAI

SEQ ID NO: 30745 - protein, 195 aa, Homo sapiens
  REGION 1..195: note = ENSP00000483067
MKLVLIGHSIGSYFTLQMLKRVPELPVIRAFLLFPTIERMSESPNGRIATPLLCWFRYVLYVTGYLLLKPCPETIKSLLIRRGLQVMNLENEFSPLNILEPFCLANAAYLGGQEMMEVVKRDDETIKEHLCKLTFYYGTIDPWCPKEYYEDIKKDFPEGDIRLCEKNIPHAFITHFNQEMADMIADSLKDDLSKM

SEQ ID NO: 30746 - protein, 195 aa, Homo sapiens; identical to SEQ ID NO: 30745
  REGION 1..195: note = ENSP00000440570

SEQ ID NO: 30747 - protein, 166 aa, Homo sapiens
  REGION 1..166: note = ENSP00000400340
MDSELKEEIPVHEEFILCGGAETQVLKCGPWTDLFHDQSVKRPKLLIFIIPGNPGFSAFYVPFAKALYSLTNRRFPVWTISHAGHALAPKDKKILTTSEDSNAQEIKDIYGLNGQIEHKLAFLRTHVPKDMKLVLIGHSIGSYFTLQMLKRVPELPLMLPTLGAKK

SEQ ID NO: 30748 - protein, 283 aa, Homo sapiens
  REGION 1..283: note = ENSP00000388635
MDSELKEEIPVHEEFILCGGAETQVLKCGPWTDLFHDQSVKRPKLLIFIIPGERKSLDSNAQEIKDIYGLNGQIEHKLAFLRTHVPKDMKLVLIGHSIGSYFTLQMLKRVPELPVIRAFLLFPTIERMSESPNGRIATPLLCWFRYVLYVTGYLLLKPCPETIKSLLIRRGLQVMNLENEFSPLNILEPFCLANAAYLGGQEMMEVVKRDDETIKEHLCKLTFYYGTIDPWCPKEYYEDIKKDFPEGDIRLCEKNIPHAFITHFNQEMADMIADSLKDDLSKM

SEQ ID NO: 30749 - protein, 371 aa, Homo sapiens
  REGION 1..371: note = ENSP00000422552
MSSTPHDPFYSSPFGPFYRRHTPYMVQPEYRIYEMNKRLQSRTEDSDNLWWDAFATEFFEDDATLTLSFCLEDGPKRYTIGRTLIPRYFSTVFEGGVTDLYYILKHSKESYHNSSITVDCDQCTMVTQHGKPMFTKVCTEGRLILEFTFDDLMRIKTWHFTIRQYRELVPRSILAMHAQDPQVLDQLSKNITRMGLTNFTLNYLRLCVILEPMQELMSRHKTYNLSPRDCLKTCLFQKWQRMVAPPAEPTRQPTTKRRKRKNSTSSTSNSSAGNNANSTGSKKKTTAANLSLSSQDVMVVGEPTLMGGEFGDEDERLITRLENTQYDAANGMDDEEDFNNSPALGNNSPWNSKPPATQETKSENPPPQASQ

SEQ ID NO: 30750 - protein, 331 aa, Homo sapiens
  REGION 1..331: note = ENSP00000392089
MSSTPHDPFYSSPFGPFYRRHTPYMVQPEYRIYEMNKRLQSRTEDSDNLWWDAFATEFFEDDATLTLSFCLEDGPKRYTIGRTLIPRYFSTVFEGGVTDLYYILKHSKESYHNSSITVDCDQCTMVTQHGKPMFTKVCTEGRLILEFTFDDLMRIKTWHFTIRQYRELVPRSILAMHAQDPQVLDQLSKNITRMGLTNFTLNYLRLCVILEPMQELMSRHKTYNLSPRDCLKTCLFQKWQRMVAPPAEPTRQPTTKRRKRKNSTSSTSNSSAGNNANSTGSKKKTTAANLSLSSQVPGLGAIPNCSLNPGRDGDLCHSTAVTPSGQFKEKH

SEQ ID NO: 30751 - protein, 373 aa, Homo sapiens
  REGION 1..373: note = ENSP00000306772
MSSTPHDPFYSSPFGPFYRRHTPYMVQPEYRIYEMNKRLQSRTEDSDNLWWDAFATEFFEDDATLTLSFCLEDGPKRYTIGRTLIPRYFSTVFEGGVTDLYYILKHSKESYHNSSITVDCDQCTMVTQHGKPMFTKVCTEGRLILEFTFDDLMRIKTWHFTIRQYRELVPRSILAMHAQDPQVLDQLSKNITRMGLTNFTLNYLRLCVILEPMQELMSRHKTYNLSPRDCLKTCLFQKWQRMVAPPAEPTRQPTTKRRKRKNSTSSTSNSSAGNNANSTGSKKKTTAANLSLSSQVPDVMVVGEPTLMGGEFGDEDERLITRLENTQYDAANGMDDEEDFNNSPALGNNSPWNSKPPATQETKSENPPPQASQ

SEQ ID NO: 30752 - protein, 313 aa, Homo sapiens
  REGION 1..313: note = ENSP00000423963
MSSTPHDPFYSSPFGPFYRRHTPYMVQPEYRIYEMNKRLQSRTEDSDNLWWDAFATEFFEDDATLTLSFCLEDGPKRYTIGRTLIPRYFSTVFEGGVTDLYYILKHSKESYHNSSITVDCDQCTMVTQHGKPMFTKVCTEGRLILEFTFDDLMRIKTWHFTIRQYRELVPRSILAMHAQDPQVLDQLSKNITRMGLTNFTLNYLRLCVILEPMQELMSRHKTYNLSPRDCLKTCLFQKWQRMVAPPAEPTRQPTTKRRKRKNSTSSTSNSSAGNNANSTGSKKKTTAANLSLSSQVPIASIARSPVSGCALRT

SEQ ID NO: 30753 - protein, 294 aa, Homo sapiens
  REGION 1..294: note = ENSP00000425754
  VARIANT 1: note = Any amino acid
XIGRTLIPRYFSTVFEGGVTDLYYILKHSKESYHNSSITVDCDQCTMVTQHGKPMFTKVCTEGRLILEFTFDDLMRIKTWHFTIRQYRELVPRSILAMHAQDPQVLDQLSKNITRMGLTNFTLNYLRLCVILEPMQELMSRHKTYNLSPRDCLKTCLFQKWQRMVAPPEPTRQPTTKRRKRKNSTSSTSNSSAGNNANSTGSKKKTTAANLSLSSQVPDVMVVGEPTLMGGEFGDEDERLITRLENTQYDAANGMDDEEDFNNSPALGNNSPWNSKPPATQETKSENPPPQASQ

SEQ ID NO: 30754 - protein, 110 aa, Homo sapiens
  REGION 1..110: note = ENSP00000424770
MSSTPHDPFYSSPFGPFYRRHTPYMVQPEYRIYEMNKRLQSRTEDSDNLWWDAFATEFFEDDATLTLSFCLEDGPKRYIVHSAADARGNCNQLGDSEPDACDGLLQFPIM

SEQ ID NO: 30755 - protein, 106 aa, Homo sapiens
  REGION 1..106: note = ENSP00000424676
MSSTPHDPFYSSPFGPFYRRHTPYMVQPEYRIYEMNKRLQSRTEDSDNLWWDAFATEFFEDDATLTLSFCLEDGPKRYRTKNLRPIGEKMNINGKCYRQDPHPPLL

SEQ ID NO: 30756 - protein, 164 aa, Homo sapiens
  REGION 1..164: note = ENSP00000421767
MVQPEYRIYEMNKRLQSRTEDSDNLWWDAFATEFFEDDATLTLSFCLEDGPKRYTIGRTLIPRYFSTVFEGGVTDLYYILKHSKESYHNSSITVDCDQCTMVTQHGKPMFTKVCTEGRLILEFTFDDLMRIKTWHFTIRQYRELVPRSILAMHAQDPQVLDQLS

SEQ ID NO: 30757 - protein, 732 aa, Homo sapiens
  REGION 1..732: note = ENSP00000485500
MSYSVTLTGPGPWGFRLQGGKDFNMPLTISRITPGSKAAQSQLSQGDLVVAIDGVNTDTMTHLEAQNKIKSASYNLSLTLQKSKRPIPISTTAPPVQTPLPVIPHQKDPALDTNGSLVAPSPSPEARASPGTPGTPELRPTFSPAFSRPSAFSSLAEASDPGPPRASLRAKTSPEGARDLLGPKALPGSSQPRQYNNPIGLYSAETLREMAQMYQMSLRGKASGVGLPGGADYQERFNPSALKDSALSTHKPIEVKGLGGKATIIHAQYNTPISMYSQDAIMDAIAGQAQAQGSDFSGSLPIKDLAVDSASPVYQAVIKSQNKPEDEADEWARRSSNLQSRSFRILAQMTGTEFMQDPDEEALRRSRPQASSYSPAVAASSAPATHTSYSEGPAAPAPKPRVVTTASIRPSVYQPVPASTYSPSPGANYSPTPYTPSPAPAYTPSPAPAYTPSPVPTYTPSPAPAYTPSPAPNYNPAPSVAYSGGPAEPASRPPWVTDDSFSQKFAPGKSTTSISKQTLPRGGPAYTPAGPQVPPLARGTVQRAERFPASSRTPLCGHCNNVIRGPFLVAMGRSWHPEEFTCAYCKTSLADVCFVEEQNNVYCERCYEQFFAPLCAKCNTKIMGEVMHALRQTWHTTCFVCAACKKPFGNSLFHMEDGEPYCEKDYINLFSTKCHGCDFPVEAGDKFIEALGHTWHDTCFICAVCHVNLEGQPFYSKKDRPLCKKHAHTINL

SEQ ID NO: 30758 - protein, 283 aa, Homo sapiens
  REGION 1..283: note = ENSP00000361136
MSYSVTLTGPGPWGFRLQGGKDFNMPLTISRITPGSKAAQSQLSQGDLVVAIDGVNTDTMTHLEAQNKIKSASYNLSLTLQKSKRPIPISTTAPPVQTPLPVIPHQKVVVNSPANADYQERFNPSALKDSALSTHKPIEVKGLGGKATIIHAQYNTPISMYSQDAIMDAIAGQAQAQGSDFSGSLPIKDLAVDSASPVYQAVIKSQNKPEDEADEWARRSSNLQSRSFRILAQMTGTEFMQDPDEEALRRSRERFETERNSPRFAKLRNWHHGLSAQILNVKS

SEQ ID NO: 30759 - protein, 727 aa, Homo sapiens
  REGION 1..727: note = ENSP00000355296
MSYSVTLTGPGPWGFRLQGGKDFNMPLTISRITPGSKAAQSQLSQGDLVVAIDGVNTDTMTHLEAQNKIKSASYNLSLTLQKSKRPIPISTTAPPVQTPLPVIPHQKDPALDTNGSLVAPSPSPEARASPGTPGTPELRPTFSPAFSRPSAFSSLAEASDPGPPRASLRAKTSPEGARDLLGPKALPGSSQPRQYNNPIGLYSAETLREMAQMYQMSLRGKASGVGLPGGSLPIKDLAVDSASPVYQAVIKSQNKPEDEADEWARRSSNLQSRSFRILAQMTGTEFMQDPDEEALRRSSTPIEHAPVCTSQATTPLLPASAQPPAAASPSAASPPLATAAAHTAIASASTTAPASSPADSPRPQASSYSPAVAASSAPATHTSYSEGPAAPAPKPRVVTTASIRPSVYQPVPASTYSPSPGANYSPTPYTPSPAPAYTPSPAPAYTPSPVPTYTPSPAPAYTPSPAPNYNPAPSVAYSGGPAEPASRPPWVTDDSFSQKFAPGKSTTSISKQTLPRGGPAYTPAGPQVPPLARGTVQRAERFPASSRTPLCGHCNNVIRGPFLVAMGRSWHPEEFTCAYCKTSLADVCFVEEQNNVYCERCYEQFFAPLCAKCNTKIMGEVMHALRQTWHTTCFVCAACKKPFGNSLFHMEDGEPYCEKDYINLFSTKCHGCDFPVEAGDKFIEALGHTWHDTCFICAVCHVNLEGQPFYSKKDRPLCKKHAHTINL

SEQ ID NO: 30760 - protein, 330 aa, Homo sapiens
  REGION 1..330: note = ENSP00000485389
MSYSVTLTGPGPWGFRLQGGKDFNMPLTISRITPGSKAAQSQLSQGDLVVAIDGVNTDTMTHLEAQNKIKSASYNLSLTLQKSKRPIPISTTAPPVQTPLPVIPHQKDPALDTNGSLVAPSPSPEARASPGTPGTPELRPTFSPAFSRPSAFSSLAEASDPGPPRASLRAKTSPEGARDLLGPKALPGSSQPRQYNNPIGLYSAETLREMAQMYQMSLRGKASGVGLPGGSLPIKDLAVDSASPVYQAVIKSQNKPEDEADEWARRSSNLQSRSFRILAQMTGTEFMQDPDEEALRRSRERFETERNSPRFAKLRNWHHGLSAQILNVKS

SEQ ID NO: 30761 - protein, 398 aa, Homo sapiens
  REGION 1..398: note = ENSP00000361126
MSYSVTLTGPGPWGFRLQGGKDFNMPLTISRITPGSKAAQSQLSQGDLVVAIDGVNTDTMTHLEAQNKIKSASYNLSLTLQKSKRPIPISTTAPPVQTPLPVIPHQKDPALDTNGSLVAPSPSPEARASPGTPGTPELRPTFSPAFSRPSAFSSLAEASDPGPPRASLRAKTSPEGARDLLGPKALPGSSQPRQYNNPIGLYSAETLREMAQMYQMSLRGKASGVGLPGGADYQERFNPSALKDSALSTHKPIEVKGLGGKATIIHAQYNTPISMYSQDAIMDAIAGQAQAQGSDFSGSLPIKDLAVDSASPVYQAVIKSQNKPEDEADEWARRSSNLQSRSFRILAQMTGTEFMQDPDEEALRRSRERFETERNSPRFAKLRNWHHGLSAQILNVKS

SEQ ID NO: 30762 - protein, 617 aa, Homo sapiens
  REGION 1..617: note = ENSP00000263066
MSYSVTLTGPGPWGFRLQGGKDFNMPLTISRITPGSKAAQSQLSQGDLVVAIDGVNTDTMTHLEAQNKIKSASYNLSLTLQKSKRPIPISTTAPPVQTPLPVIPHQKVVVNSPANADYQERFNPSALKDSALSTHKPIEVKGLGGKATIIHAQYNTPISMYSQDAIMDAIAGQAQAQGSDFSGSLPIKDLAVDSASPVYQAVIKSQNKPEDEADEWARRSSNLQSRSFRILAQMTGTEFMQDPDEEALRRSRPQASSYSPAVAASSAPATHTSYSEGPAAPAPKPRVVTTASIRPSVYQPVPASTYSPSPGANYSPTPYTPSPAPAYTPSPAPAYTPSPVPTYTPSPAPAYTPSPAPNYNPAPSVAYSGGPAEPASRPPWVTDDSFSQKFAPGKSTTSISKQTLPRGGPAYTPAGPQVPPLARGTVQRAERFPASSRTPLCGHCNNVIRGPFLVAMGRSWHPEEFTCAYCKTSLADVCFVEEQNNVYCERCYEQFFAPLCAKCNTKIMGEVMHALRQTWHTTCFVCAACKKPFGNSLFHMEDGEPYCEKDYINLFSTKCHGCDFPVEAGDKFIEALGHTWHDTCFICAVCHVNLEGQPFYSKKDRPLCKKHAHTINL

SEQ ID NO: 30763 - protein, 81 aa, Homo sapiens
  REGION 1..81: note = ENSP00000485538
VMHALRQTWHTTCFVCAACKKPFGNSLFHMEDGEPYCEKDYINLFSTKCHGCDFPVEAGDKFIEALGHTWHDTCFICAVCL

SEQ ID NO: 30764 - protein, 732 aa, Homo sapiens; identical to SEQ ID NO: 30757
  REGION 1..732: note = ENSP00000401437

SEQ ID NO: 30765 - protein, 231 aa, Homo sapiens
  REGION 1..231: note = ENSP00000438866
MSYSVTLTGPGPWGFRLQGGKDFNMPLTISRITPGSKAAQSQLSQGDLVVAIDGVNTDTMTHLEAQNKIKSASYNLSLTLQKSKRPIPISTTAPPVQTPLPVIPHQKDPALDTNGSLVAPSPSPEARASPGTPGTPELRPTFSPAFSRPSAFSSLAEASDPGPPRASLRAKTSPEGARDLLGPKALPGSSQPRQYNNPIGLYSAETLREMAQMYQMSLRGKASGVGLPGGW

SEQ ID NO: 30766 - protein, 333 aa, Homo sapiens
  REGION 1..333: note = ENSP00000388576
MTENSDKVPIALVGPDDVEFCSPPAYATLTVKPSSPARLLKVGAVVLISGAVLLLFGAIGAFYFWKGSDSHIYNVHYTMSINGKLQDGSMEIDAGNNLETFKMGSGAEEAIAVNDFQNGITGIRFAGGEKCYIKAQVKARIPEVGAVTKQSISSKLEGKIMPVKYEENSLIWVAVDQPVKDNSFLSSKVLELCGDLPIFWLKPTYPKEIQRERREVVRKIVPTTTKRPHSGPRSNPGAGRLNNETRPSVQEDSQAFNPDNPYHQEGESMTFDPRLDHEGICCIECRRSYTHCQKICEPLGGYYPWPYNYQGCRSACRVIMPCSWWVARILGMV

SEQ ID NO: 30767 - protein, 334 aa, Homo sapiens
  REGION 1..334: note = ENSP00000367198
MTENSDKVPIALVGPDDVEFCSPPAYATLTVKPSSPARLLKVGAVVLISGAVLLLFGAIGAFYFWKGSDSHIYNVHYTMSINGKLQDGSMEIDAGNNLETFKMGSGAEEAIAVNDFQNGITGIRFAGGEKCYIKAQVKARIPEVGAVTKQSISSKLEGKIMPVKYEENSLIWVAVDQPVKDNSFLSSKVLELCGDLPIFWLKPTYPKEIQRERREVVRKIVPTTTKRPHSGPRSNPGAGRLNNETRPSVQEDSQAFNPDNPYHQQEGESMTFDPRLDHEGICCIECRRSYTHCQKICEPLGGYYPWPYNYQGCRSACRVIMPCSWWVARILGMV

SEQ ID NO: 30768 - protein, 129 aa, Homo sapiens
  REGION 1..129: note = ENSP00000396035
MSINGKLQDGSMEIDAGNNLETFKMGSGAEEAIAVNDFQNGITGIRFAGGEKCYIKAQVKARIPEVGAVTKQSISSKLEGKIMPVKYEENSLIWVAVDQPVKDNSFLSSKVLELCGDLPIFWLKPTYPK

SEQ ID NO: 30769 - protein, 131 aa, Homo sapiens
  REGION 1..131: note = ENSP00000429618
MFSTKALLLAGLISTALAGPWANICAGKSSNEIRTCDRHGCGQYSAQRSQRPHQGVDILCSAGSTVYAPFTGMIVGQEKPYQNKNAINNGVRISGREITTDTPIFNNYYPDQSAAVNIKTRSSTSKKMMTH

SEQ ID NO: 30770 - protein, 151 aa, Homo sapiens
  REGION 1..151: note = ENSP00000274507
MFSTKALLLAGLISTALAGPWANICAGKSSNEIRTCDRHGCGQYSAQRSQRPHQGVDILCSAGSTVYAPFTGMIVGQEKPYQNKNAINNGVRISGRGFCVKMFYIKPIKYKGPIKKGEKLGTLLPLQKVYPGIQSHVHIENCDSSDPTAYL

SEQ ID NO: 30771 - protein, 79 aa, Homo sapiens
  REGION 1..79: note = ENSP00000427012
MIVGQEKPYQNKNAINNGVRISGRGFCVKMFYIKPIKYKGPIKKGEKLGTLLPLQKVYPGIQSHVHIENCDSSDPTAYL

SEQ ID NO: 30772 - protein, 111 aa, Homo sapiens
  REGION 1..111: note = ENSP00000421123
MFSTKALLLAGLISTALAGPWANICAGKSSNEIRTCDRHGCGQYSAQRSQRPHQGVDILCSAGSTVYAPFTGMIVGQEKPYQNKNAINNGVRISGRGKRGGVYTWGASWRC

SEQ ID NO: 30773 - protein, 501 aa, Homo sapiens
  REGION 1..501: note = ENSP00000483600
MGSRPPCGATSSARRACQFPAPMAAAREPELPQEAPATEPAPPPACRFFLEGRCRFGARCRQPHPGAPAPPGREAQPEAGAKKPPLRTAADVIQRIRWDPRLDPADFSVGYVDRFLGVREEPFSAFCWDQPLAALGPGVLAVPQHRVRFFRFHGRLVWDRASRTDLVFGSGSAAGRGPTILDAPNTEGAHGAEGAEWTLAGTGQEAQAAPKRGSTRPLCTGHQEPGVEEPGELEAAQERALGTAADLGTLAPRGRLAGVTEEALKPTAATRTTLLGGKEAQALGVPGGSAETTEAEWGPAAWPEDKRARLSVAAPCQPRPTHFVALMVTEPGLQAEVTKAQEYLVHVAPHCANFLVPSQNLHLTLALLRLAGAGEEAAAIGALRRALLAPGLNAPPRLSFRKLVLLGPHVLCAPPSPTLESMAQVLSQRLEAEGLSTLQSPGQLHPHLTVAKVPHGSQVHLPKLEFTLSQEVGCQPLQTLWLCRIGRTGGPFQPLAEIRLE

SEQ ID NO: 30774 - protein, 478 aa, Homo sapiens
  REGION 1..478: note = ENSP00000479355
MAAAREPELPQEAPATEPAPPPACRFFLEGRCRFGARCRQPHPGAPAPPGREAQPEAGAKKPPLRTAADVIQRIRWDPRLDPADFSVGYVDRFLGVREEPFSAFCWDQPLAALGPGVLAVPQHRVRFFRFRGRLVWDRASRTDLVFGSGSAAGRGPTILDAPNTEGAHGAEGAEWTLAGTGQEAQAAPKRGSTRPLCTGHQEPGVEEPGELEAAQERALGTAADLGTLAPRGRLAGVTEALKPTAATRTTLLGGKEAQALGVPGGSAETTEAEWGPAAWPEDKRARLSVAAPCQPRPTHFVALMVTEPGLQAEVTKAQEYLVHVAPHCANFLVPSQNLHLTLALLRLAGAGEEAAAIGALRRALLAPGLNAPPRLSFRKLVLLGPHVLCAPPSPTLESMAQVLSQRLEAEGLSTLQSPGQLHPHLTVAKVPHGSQVHLPKLEFTLSQEVGCQPLQTLWLCRIGRTGGPFQPLAEIPLE

SEQ ID NO: 30775 - protein, 501 aa, Homo sapiens; identical to SEQ ID NO: 30773
  REGION 1..501: note = ENSP00000477636

SEQ ID NO: 30776 - protein, 478 aa, Homo sapiens; identical to SEQ ID NO: 30774
  REGION 1..478: note = ENSP00000478498

SEQ ID NO: 30777 - protein, 308 aa, Homo sapiens
  REGION 1..308: note = ENSP00000385764
MDEQTGRLRLDTYCMSAKQIWAWSKCSGRLWDEHMKWMEGWTDRWTDGWMDGWMDEWSPTPALRSYGGGLSQQTFIFTDGEDEALARHTGNVVITNCSAAHSRQALSCKMAVEYDRFIESGRKWFCHVDDDNYVNLRALLRLLASYPHTRDVYVGKPSLDRPIQAMERVSENKVRPVHFWFATGGAGFCISRGLALKMSPWASGGHFMNTAERIRLPDDCTIGYIVEALLGVPLIRSGLFHSHLENLQQVPTSELHEQVTLSYGMFENKRNAVHVKGPFSVEADPSRFRSIHCHLYPDTPWCPRTAIF

SEQ ID NO: 30778 - protein, 250 aa, Homo sapiens
  REGION 1..250: note = ENSP00000384786
MTPGRCCLAADIQVETFIFTDGEDEALARHTGNVVITNCSAAHSRQALSCKMAVEYDRFIESGRKWFCHVDDDNYVNLRALLRLLASYPHTRDVYVGKPSLDRPIQAMERVSENKVRPVHFWFATGGAGFCISRGLALKMSPWASGGHFMNTAERIRLPDDCTIGYIVEALLGVPLIRSGLFHSHLENLQQVPTSELHEQVTLSYGMFENKRNAVHVKGPFSVEADPSRFRSIHCHLYPDTPWCPRTAIF

SEQ ID NO: 30779 - protein, 379 aa, Homo sapiens
  REGION 1..379: note = ENSP00000222725
MLKRCGRRLLLALAGALLACLLVLTADPPPPPLPAERGRRALRSLAGPAGAAPAPGLGAAAAAPGALVRDVHSLSEYFSLLTRARRDAGPPPGAAPRPADGHPRPLAEPLAPRDVFIAVKTTKKFHRARLDLLLETWISRHKEMTFIFTDGEDEALARHTGNVVITNCSAAHSRQALSCKMAVEYDRFIESGRKWFCHVDDDNYVNLRALLRLLASYPHTRDVYVGKPSLDRPIQAMERVSENKVRPVHFWFATGGAGFCISRGLALKMSPWASGGHFMNTAERIRLPDDCTIGYIVEALLGVPLIRSGLFHSHLENLQQVPTSELHEQVTLSYGMFENKRNAVHVKGPFSVEADPSRFRSIHCHLYPDTPWCPRTAIF

SEQ ID NO: 30780 - protein, 361 aa, Homo sapiens
  REGION 1..361: note = ENSP00000352579
MLKRCGRRLLLALAGALLACLLVLTADPPPPPLPAERGRRALRSLAGPAGAAPAPGLGAAAAAPGALVRDVHSLSEYFSLLTRARRDAGPPPGAAPRPADGHPRPLAEPLAPRDVFIAVKTTKKFHRARLDLLLETWISRHKEMTFIFTDGEDEALARHTGNVVITNCSAAHSRQALSCKMAVEYDRFIESGRKWFCHVDDDNYVNLRALLRLLASYPHTRDVYVGKPSLDRPIQAMERVSENKVRPVHFWFATGGAGFCISRGLALKMSPWASGGHFMNTAERIRLPDDCTIGYIVEALLGVPLIRSGLFHSHLENLQQVPTSELHEQVTLSYGMFENKRNAVHVKGPFSVEADPSRWGN

SEQ ID NO: 30781 - protein, 250 aa, Homo sapiens; identical to SEQ ID NO: 30778
  REGION 1..250: note = ENSP00000343095

SEQ ID NO: 30782 - protein, 248 aa, Homo sapiens
  REGION 1..248: note = ENSP00000483986
MKGCLLKADFLLQTFIFTDGEDEALARHTGNVVITNCSAAHSRQALSCKMAVEYDRFIESGRKWFCHVDDDNYVNLRALLRLLASYPHTRDVYVGKPSLDRPIQAMERVSENKVRPVHFWFATGGAGFCISRGLALKMSPWASGGHFMNTAERIRLPDDCTIGYIVEALLGVPLIRSGLFHSHLENLQQVPTSELHEQVTLSYGMFENKRNAVHVKGPFSVEADPSRFRSIHCHLYPDTPWCPRTAIF

SEQ ID NO: 30783 - protein, 88 aa, Homo sapiens
  REGION 1..88: note = ENSP00000451526
MADNFSLHDALSGSGNPNPQGWPGAWGNQPAGAGGYPGASYPGAYPGQAPPGAYPGQAPPGAYPGAPGAYPGAPAPGVYPGPPSGPGA

SEQ ID NO: 30784 - protein, 250 aa, Homo sapiens [sequence omitted]

SEQ ID NO: 30785 - protein, 233 aa, Homo sapiens
  REGION 1..233: note = ENSP00000451381
MADNFSLHDALSGSGNPNPQGWPGAWGNQPAGAGGYPGASYPGAYPGQAPPGAYPGQAPPGAYPGAPGAYPGAPAPGVYPGPPSGPGAYPSSGQPSATGAYPATGPYGAPAGPLIVPYNLPLPGGVVPRMLITILGTVKPNANRIALDFQRGNDVAFHFNPRFNENNRRVIVCNTKLDNNWGREERQSVFPFESGKPFKSLALSPGWSTVARSWLTTTSASWVQAMLLPQPPK

SEQ ID NO: 30786 - protein, 545 aa, Homo sapiens
  REGION 1..545: note = ENSP00000371548
MALRRGGCGALGLLLLLLGAACLIPRSAQVRRLARCPATCSCTKESIICVGSSWVPRIVPGDISSLSLVNGTFSEIKDRMFSHLPSLQLLLLNSNSFTIIRDDAFAGLFHLEYLFIEGNKIETISRNAFRGLRDLTHLSLANNHIKALPRDVFSDLDSLIELDLRGNKFECDCKAKWLYLWLKMTNSTVSDVLCIGPPEYQEKKLNDVTSFDYECTTTDFVVHQTLPYQSVSVDTFNSKNDVYVAIAQPSMENCMVLEWDHIEMNFRSYDNITGQSIVGCKAILIDDQVFVVVAQLFGGSHIYKYDESWTKFVKFQDIEVSRISKPNDIELFQIDDETFFVIADSSKAGLSTVYKWNSKGFYSYQSLHEWFRDTDAEFVDIDGKSHLILSSRSQVPIILQWNKSSKKFVPHGDIPNMEDVLAVKSFRMQNTLYLSLTRFIGDSRVMRWNSKQFVEIQALPSRGAMTLQPFSFKDNHYLALGSDYTFSQIYQWDKEKQLFKKFKEIYVQAPRSFTAVSTDRRDFFFASSFKGKTKIFEHIIVDLSL

SEQ ID NO: 30787 - protein, 256 aa, Homo sapiens
  REGION 1..256: note = ENSP00000426254
  VARIANT 1: note = Any amino acid
XLGLLLLLLGAACLIPRSAQVRRLARCPATCSCTKESIICVGSSWVPRIVPGDISSLSLVNGTFSEIKDRMFSHLPSLQLLLLNSNSFTIIRDDAFAGLFHLEYLFIEGNKIETISRNAFRGLRDLTHLSLANNHIKALPRDVFSDLDSLIELDLRGNKFECDCKAKWLYLWLKMTNSTVSDVLCIGPPEYQEKKLNDVTSFDYECTTTDKQEEICEGKIQNLNARVVMNCSRPSSAFRKHTGNGRVAFFLPHGVR

SEQ ID NO: 30788 - protein, 537 aa, Homo sapiens
  REGION 1..537: note = ENSP00000312273
MGGAGILLLLLAGAGVVVAWRPPKGKCPLRCSCSKDSALCEGSPDLPVSFSPTLLSLSLVRTGVTQLKAGSFLRIPSLHLLLFTSNSFSVIEDDAFAGLSHLQYLFIEDNEIGSISKNALRGLRSLTHLSLANNHLETLPRFLFRGLDTLTHVDLRGNPFQCDCRVLWLLQWMPTVNASVGTGACAGPASLSHMQLHHLDPKTFKCRAIELSWFQTVGESALSVEPFSYQGEPHIVLAQPFAGRCLILSWDYSLQRFRPEEELPAASVVSCKPLVLGPSLFVLAARLWGGSQLWARPSPGLRLAPTQTLAPRRLLRPNDAELLWLEGQPCFVVADASKAGSTTLLCRDGPGFYPHQSLHAWHRDTDAEALELDGRPHLLLASASQRPVLFHWTGGRFERRTDIPEAEDVYATRHFQAGGDVFLCLTRYIGDSMVMRWDGSMFRLLQQLPSRGAHVFQPLLIARDQLAILGSDFAFSQVLRLEPDKGLLEPLQELGPPALVAPRAFAHITMAGRRFLFAACFKGPTQIYQHHEIDLSA

SEQ ID NO: 30789 - protein, 494 aa, Homo sapiens
  REGION 1..494: note = ENSP00000376059
MGGAGILLLLLAGAGVVVAWRPPKGKCPLRCSCSKDSALCEGSPDLPVSFSPTLLSLSLVRTGVTQLKAGSFLRIPSLHLLLFTSNSFSVIEDDAFAGLSHLQYLFIEDNEIGSISKNALRGLRSLTHLSLANNHLETLPRFLFRGLDTLTHVDLRGNPFQCDCRVLWLLQWMPTVNASVGTGACAGPASLSHMQLHHLDPKTFKCRAIELSWFQTVGESALSVEPFSYQGEPHIVLAQPFAGRCLILSWDYSLQRFRPEEELPGEPPPRPSACPAACLAGLTCLPTSPQRPPWCPASHWCWARASSCWLPACGGAHSCGPGPVPACAWPQRRPWPRGGCCGPMTPSSCGWKGNPASWWPMPPRRAAPRCCAATGPAFTRTRACTPGTGTRTLRPWSWTAGPTCCWPRLPSGPCSSTGPVAASRDAQTSPRPRMSMPHATSRLVGTCSCASHATLGTPWSCAGTAPCFVCCSNFPRAVPTSSSHCSSPGTSWPS

SEQ ID NO: 30790 - protein, 378 aa, Homo sapiens
  REGION 1..378: note = ENSP00000467044
  VARIANT 1: note = Any amino acid
XVIEDDAFAGLSHLQYLFIEDNEIGSISKNALRGLRSLTHLSLANNHLETLPRFLFRGLDTLTHVDLRGNPFQCDCRVLWLLQWMPTVNASVGTGACAGPASLSHMQLHHLDPKTFKCRAIELSWFQTVGESALSVEPFSYQGEPHIVLAQPFAGRCLILSWDYSLQRFRPEEELPAASVVSCKPLVLGPSLFVLAARLWGGSQLWARPSPGLRLAPTQTLAPRRLLRPNDAELLWLEGQPCFVVADASKAGSTTLLCRDGPGFYPHQSLHAWHRDTDAEALELDGRPHLLLASASQRPVLFHWTGGRFERRTDIPEAEDVYATRHFQAGGDVFLCLTRYIGDSMVRLGLGAGGWLFSTDPILHTKPLNSDLPSHADL

SEQ ID NO: 30791 - protein, 261 aa, Homo sapiens
  REGION 1..261: note = ENSP00000467784
MGGAGILLLLLAGAGVVVAWRPPKGKCPLRCSCSKDSALCEGSPDLPVSFSPTLLSLSLVRTGVTQLKAGSFLRIPSLHLLLFTSNSFSVIEDDAFAGLSHLQYLFIEDNEIGSISKNALRGLRSLTHLSLANNHLETLPRFLFRGLDTLTHVDLRGNPFQCDCRVLWLLQWMPTVNASVGTGACAGPASLSHMQLHHLDPKTFKCRAIGGGLSRWGGRREIWGKGCQGQEARLTPCPAISRSGKTLSKQHCLPEPQFSHL

SEQ ID NO: 30792 - protein, 907 aa, Homo sapiens
  REGION 1..907: note = ENSP00000266674
MDTSRLGVLLSLPVLLQLATGGSSPRSGVLLRGCPTHCHCEPDGRMLLRVDCSDLGLSELPSNLSVFTSYLDLSMNNISQLLPNPLPSLRFLEELRLAGNALTYIPKGAFTGLYSLKVLMLQNNQLRHVPTEALQNLRSLQSLRLDANHISYVPPSCFSGLHSLRHLWLDDNALTEIPVQAFRSLSALQAMTLALNKIHHIPDYAFGNLSSLVVLHLHNNRIHSLGKKCFDGLHSLETLDLNYNNLDEFPTAIRTLSNLKELGFHSNNIRSIPEKAFVGNPSLITIHFYDNPIQFVGRSAFQHLPELRTLTLNGASQITEFPDLTGTANLESLTLTGAQISSLPQTVCNQLPNLQVLDLSYNLLEDLPSFSVCQKLQKIDLRHNEIYEIKVDTFQQLLSLRSLNLAWNKIAIIHPNAFSTLPSLIKLDLSSNLLSSFPITGLHGLTHLKLTGNHALQSLISSENFPELKVIEMPYAYQCCAFGVCENAYKISNQWNKGDNSSMDDLHKKDAGMFQAQDERDLEDFLLDFEEDLKALHSVQCSPSPGPFKPCEHLLDGWLIRIGVWTIAVLALTCNALVTSTVFRSPLYISPIKLLIGVIAAVNMLTGVSSAVLAGVDAFTFGSFARHGAWWENGVGCHVIGFLSIFASESSVFLLTLAALERGFSVKYSAKFETKAPFSSLKVIILLCALLALTMAAVPLLGGSKYGASPLCLPLPFGEPSTMGYMVALILLNSLCFLMMTIAYTKLYCNLDKGDLENIWDCSMVKHIALLLFTNCILNCPVAFLSFSSLINLTFISPEVIKFILLVVVPLPACLNPLLYILFNPHFKEDLVSLRKQTYVWTRSKHPSLMSINSDDVEKQSCDSTQALVTFTSSSITYDLPPSSVPSPAYPVTESCHLSSVAFVPCL

SEQ ID NO: 30793 - protein, 835 aa, Homo sapiens
  REGION 1..835: note = ENSP00000443033
MDTSRLGVLLSLPVLLQLATGGSSPRSGVLLRGCPTHCHCEPDGRMLLRVDCSDLGLSELPSNLSVFTSYLDLSMNNISQLLPNPLPSLRFLEELRLAGNALTYIPKGAFTGLYSLKVLMLQNNQLRHVPTEALQNLRSLQSLHLHNNRIHSLGKKCFDGLHSLETLDLNYNNLDEFPTAIRTLSNLKELGFHSNNIRSIPEKAFVGNPSLITIHFYDNPIQFVGRSAFQHLPELRTLTLNGASQITEFPDLTGTANLESLTLTGAQISSLPQTVCNQLPNLQVLDLSYNLLEDLPSFSVCQKLQKIDLRHNEIYEIKVDTFQQLLSLRSLNLAWNKIAIIHPNAFSTLPSLIKLDLSSNLLSSFPITGLHGLTHLKLTGNHALQSLISSENFPELKVIEMPYAYQCCAFGVCENAYKISNQWNKGDNSSMDDLHKKDAGMFQAQDERDLEDFLLDFEEDLKALHSVQCSPSPGPFKPCEHLLDGWLIRIGVWTIAVLALTCNALVTSTVFRSPLYISPIKLLIGVIAAVNMLTGVSSAVLAGVDAFTFGSFARHGAWWENGVGCHVIGFLSIFASESSVFLLTLAALERGFSVKYSAKFETKAPFSSLKVIILLCALLALTMAAVPLLGGSKYGASPLCLPLPFGEPSTMGYMVALILLNSLCFLMMTIAYTKLYCNLDKGDLENIWDCSMVKHIALLLFTNCILNCPVAFLSFSSLINLTFISPEVIKFILLVVVPLPACLNPLLYILFNPHFKEDLVSLRKQTYVWTRSKHPSLMSINSDDVEKQSCDSTQALVTFTSSSITYDLPPSSVPSPAYPVTESCHLSSVAFVPCL

SEQ ID NO: 30794 - protein, 883 aa, Homo sapiens
  REGION 1..883: note = ENSP00000441035
MDTSRLGVLLSLPVLLQLATGGSSPRSGVLLRGCPTHCHCEPDGRMLLRVDCSDLGLSELPSNLSVFTSYLDLSMNNISQLLPNPLPSLRFLEELRLAGNALTYIPKGAFTGLYSLKVLMLQNNQLRHVPTEALQNLRSLQSLRLDANHISYVPPSCFSGLHSLRHLWLDDNALTEIPVQAFRSLSALQAMTLALNKIHHIPDYAFGNLSSLVVLHLHNNRIHSLGKKCFDGLHSLETLDLNYNNLDEFPTAIRTLSNLKELHFYDNPIQFVGRSAFQHLPELRTLTLNGASQITEFPDLTGTANLESLTLTGAQISSLPQTVCNQLPNLQVLDLSYNLLEDLPSFSVCQKLQKIDLRHNEIYEIKVDTFQQLLSLRSLNLAWNKIAIIHPNAFSTLPSLIKLDLSSNLLSSFPITGLHGLTHLKLTGNHALQSLISSENFPELKVIEMPYAYQCCAFGVCENAYKISNQWNKGDNSSMDDLHKKDAGMFQAQDERDLEDFLLDFEEDLKALHSVQCSPSPGPFKPCEHLLDGWLIRIGVWTIAVLALTCNALVTSTVFRSPLYISPIKLLIGVIAAVNMLTGVSSAVLAGVDAFTFGSFARHGAWWENGVGCHVIGFLSIFASESSVFLLTLAALERGFSVKYSAKFETKAPFSSLKVIILLCALLALTMAAVPLLGGSKYGASPLCLPLPFGEPSTMGYMVALILLNSLCFLMMTIAYTKLYCNLDKGDLENIWDCSMVKHIALLLFTNCILNCPVAFLSFSSLINLTFISPEVIKFILLVVVPLPACLNPLLYILFNPHFKEDLVSLRKQTYVWTRSKHPSLMSINSDDVEKQSCDSTQALVTFTSSSITYDLPPSSVPSPAYPVTESCHLSSVAFVPCL

SEQ ID NO: 30795 - protein, 967 aa, Homo sapiens
  REGION 1..967: note = ENSP00000356247
MPSPPGLRALWLCAALCASRRAGGAPQPGPGPTACPAPCHCQEDGIMLSADCSELGLSAVPGDLDPLTAYLDLSMNNLTELQPGLFHHLRFLEELRLSGNHLSHIPGQAFSGLYSLKILMLQNNQLGGIPAEALWELPSLQSLRLDANLISLVPERSFEGLSSLRHLWLDDNALTEIPVRALNNLPALQAMTLALNRISHIPDYAFQNLTSLVVLHLHNNRIQHLGTHSFEGLHNLETLDLNYNKLQEFPVAIRTLGRLQELGFHNNNIKAIPEKAFMGNPLLQTIHFYDNPIQFVGRSAFQYLPKLHTLSLNGAMDIQEFPDLKGTTSLEILTLTRAGIRLLPSGMCQQLPRLRVLELSHNQIEELPSLHRCQKLEEIGLQHNRIWEIGADTFSQLSSLQALDLSWNAIRSIHPEAFSTLHSLVKLDLTDNQLTTLPLAGLGGLMHLKLKGNLALSQAFSKDSFPKLRILEVPYAYQCCPYGMCASFFKASGQWEAEDLHLDDEESSKRPLGLLARQAENHYDQDLDELQLEMEDSKPHPSVQCSPTPGPFKPCEYLFESWGIRLAVWAIVLLSVLCNGLVLLTVFAGGPVPLPPVKFVVGAIAGANTLTGISCGLLASVDALTFGQFSEYGARWETGLGCRATGFLAVLGSEASVLLLTLAAVQCSVSVSCVRAYGKSPSLGSVRAGVLGCLALAGLAAALPLASVGEYGASPLCLPYAPPEGQPAALGFTVALVMMNSFCFLVVAGAYIKLYCDLPRGDFEAVWDCAMVRHVAWLIFADGLLYCPVAFLSFASMLGLFPVTPEAVKSVLLVVLPLPACLNPLLYLLFNPHFRDDLRRLRPRAGDSGPLAYAAAGELEKSSCDSTQALVAFSDVDLILEASEAGRPPGLETYGFPSVTLISCQQPGAPRLEGSHCVEPEGNHFGNPQPSMDGELLLRAEGSTPAGGGLSGGGGFQPSGLAFASHV

SEQ ID NO: 30796 - protein, 915 aa, Homo sapiens
  REGION 1..915: note = ENSP00000255432
MGRPRLTLVCQVSIIISARDLSMNNLTELQPGLFHHLRFLEELRLSGNHLSHIPGQAFSGLYSLKILMLQNNQLGGIPAEALWELPSLQSLRLDANLISLVPERSFEGLSSLRHLWLDDNALTEIPVRALNNLPALQAMTLALNRISHIPDYAFQNLTSLVVLHLHNNRIQHLGTHSFEGLHNLETLDLNYNKLQEFPVAIRTLGRLQELGFHNNNIKAIPEKAFMGNPLLQTIHFYDNPIQFVGRSAFQYLPKLHTLSLNGAMDIQEFPDLKGTTSLEILTLTRAGIRLLPSGMCQQLPRLRVLELSHNQIEELPSLHRCQKLEEIGLQHNRIWEIGADTFSQLSSLQALDLSWNAIRSIHPEAFSTLHSLVKLDLTDNQLTTLPLAGLGGLMHLKLKGNLALSQAFSKDSFPKLRILEVPYAYQCCPYGMCASFFKASGQWEAEDLHLDDEESSKRPLGLLARQAENHYDQDLDELQLEMEDSKPHPSVQCSPTPGPFKPCEYLFESWGIRLAVWAIVLLSVLCNGLVLLTVFAGGPVPLPPVKFVVGAIAGANTLTGISCGLLASVDALTFGQFSEYGARWETGLGCRATGFLAVLGSEASVLLLTLAAVQCSVSVSCVRAYGKSPSLGSVRAGVLGCLALAGLAAALPLASVGEYGASPLCLPYAPPEGQPAALGFTVALVMMNSFCFLVVAGAYIKLYCDLPRGDFEAVWDCAMVRHVAWLIFADGLLYCPVAFLSFASMLGLFPVTPEAVKSVLLVVLPLPACLNPLLYLLFNPHFRDDLRRLRPRAGDSGPLAYAAAGELEKSSCDSTQALVAFSDVDLILEASEAGRPPGLETYGFPSVTLISCQQPGAPRLEGSHCVEPEGNHFGNPQPSMDGELLLRAEGSTPAGGGLSGGGGFQPSGLAFASHV

SEQ ID NO: 30797 - protein, 348 aa, Homo sapiens
  REGION 1..348: note = ENSP00000422143
MGRPRLTLVCQVSIIISARDLSMNNLTELQPGLFHHLRFLEELRLSGNHLSHIPGQAFSGLYSLKILMLQNNQLGGIPAEALWELPSLQSLRLDANLISLVPERSFEGLSSLRHLWLDDNALTEIPVRALNNLPALQAMTLALNRISHIPDYAFQNLTSLVVLHLHNNRIQHLGTHSFEGLHNLETLDLNYNKLQEFPVAIRTLGRLQELGFHNNNIKAIPEKAFMGNPLLQTIHFYDNPIQFVGRSAFQYLPKLHTLSLNGAMDIQEFPDLKGTTSLEILTLTRAGIRLLPSGMCQQLPRLRVLELSHNQIEELPSLHRCQKLEEMRSGGLYFLPPSARGAWSGARV

SEQ ID NO: 30798 - protein, 232 aa, Homo sapiens
  REGION 1..232: note = ENSP00000402284
MNNLTELQPGLFHHLRFLEELRLSGNHLSHIPGQAFSGLYSLKILMLQNNQLGGIPAEALWELPSLQSLRLDANLISLVPERSFEGLSSLRHLWLDDNALTEIPVRALNNLPALQAMTLALNRISHIPDYAFQNLTSLVVLDLNYNKLQEFPVAIRTLGRLQELSLNGAMDIQEFPDLKGTTSLEILTLTRAGIRLLPSGMCQQLPRLRVLELSHNQIEELPSLHRCQKLEE

SEQ ID NO: 30799 - protein, 828 aa, Homo sapiens
  REGION 1..828: note = ENSP00000387869
MRLEGEGRSARAGQNLSRAGSARRGAPRDLSMNNLTELQPGLFHHLRFLEELRLSGNHLSHIPGQAFSGLYSLKILMLQNNQLGGIPAEALWELPSLQSLDLNYNKLQEFPVAIRTLGRLQELGFHNNNIKAIPEKAFMGNPLLQTIHFYDNPIQFVGRSAFQYLPKLHTLSLNGAMDIQEFPDLKGTTSLEILTLTRAGIRLLPSGMCQQLPRLRVLELSHNQIEELPSLHRCQKLEEIGLQHNRIWEIGADTFSQLSSLQALDLSWNAIRSIHPEAFSTLHSLVKLDLTDNQLTTLPLAGLGGLMHLKLKGNLALSQAFSKDSFPKLRILEVPYAYQCCPYGMCASFFKASGQWEAEDLHLDDEESSKRPLGLLARQAENHYDQDLDELQLEMEDSKPHPSVQCSPTPGPFKPCEYLFESWGIRLAVWAIVLLSVLCNGLVLLTVFAGGPVPLPPVKFVVGAIAGANTLTGISCGLLASVDALTFGQFSEYGARWETGLGCRATGFLAVLGSEASVLLLTLAAVQCSVSVSCVRAYGKSPSLGSVRAGVLGCLALAGLAAALPLASVGEYGASPLCLPYAPPEGQPAALGFTVALVMMNSFCFLVVAGAYIKLYCDLPRGDFEAVWDCAMVRHVAWLIFADGLLYCPVAFLSFASMLGLFPVTPEAVKSVLLVVLPLPACLNPLLYLLFNPHFRDDLRRLRPRAGDSGPLAYAAAGELEKSSCDSTQALVAFSDVDLILEASEAGRPPGLETYGFPSVTLISCQQPGAPRLEGSHCVEPEGNHFGNPQPSMDGELLLRAEGSTPAGGGLSGGGGFQPSGLAFASHV

SEQ ID NO: 30800 - protein, 200 aa, Homo sapiens
  REGION 1..200: note = ENSP00000368908
MASSLTCTGVIWALLSFLCAATSCVGFFMPYWLWGSQLGKPVSFGTFRRCSYPVHDESRQMMVMVEECGRYASFQGIPSAEWRICTIVTGLGCGLLLLVALTALMGCCVSDLISRTVGRVAGGIQFLGGLLIGAGCALYPLGWDSEEVRQTCGYTSGQFDLGKCEIGWAYYCTGAGATAAMLLCTWLACFSGKKQKHYPY

SEQ ID NO: 30801 - protein, 228 aa, Homo sapiens
  REGION 1..228: note = ENSP00000425906
MCHVIVTCRSMLWTLLSIVVAFAELIAFMSADWLIGKARSRGGVEPAGPGGGSPEPYHPTLGIYARCIRNPGVQHFQRDTLCGPYAESFGEIASGFWQATAIFLAVGIFILCMVALVSVFTMCVQSIMKKSIFNVCGLLQGIAGLFLILGLILYPAGWGCQKAIDYCGHYASAYKPGDCSLGWAFYTAIGGTVLTFICAVFSAQAEIATSSDKVQEEIEEGKNLICLL

SEQ ID NO: 30802 - protein, 228 aa, Homo sapiens; identical to SEQ ID NO: 30801
  REGION 1..228: note = ENSP00000369702

SEQ ID NO: 30803 - protein, 222 aa, Homo sapiens
  REGION 1..222: note = ENSP00000393128
MLPAQEAAKLYHTNYVRNSRAIGVLWAIFTICFAIVNVVCFIQPYWIGDGVDTPQAGYFGLFHYCIGNGFSRELTCRGSFTDFSTLPSGAFKAASFFIGLSMMLIIACIICFTLFFFCNTATVYKICAWMQLTSAACLVLGCMIFPDGWDSDEVKRMCGEKTDKYTLGACSVRWAYILAIIGILDALILSFLAFVLGNRQDSLMAEELKAENKVLLSQYSLE

SEQ ID NO: 30804 - protein, 218 aa, Homo sapiens
  REGION 1..218: note = ENSP00000385374
MLPAQEAAKLYHTNYVRNSRAIGVLWAIFTICFAIVNVVCFIQPYWIGDGVDTPQAGYFGLFHYCIGNGFSRELTCRGSFTDFSTLPSGAFKAASFFIGLSMMLIIACIICFTLFFFCNTATVYKICAWMQLTSAACLVLGCMIFPDGWDSDEVKRMCGEKTDKYTLGACSVRWAYILAIIGILDALILSFLAFVLGNRQDSLMAEELKAENKDDGNA

SEQ ID NO: 30805 - protein, 406 aa, Homo sapiens
  REGION 1..406: note = ENSP00000484449
MVHCAGCKRPILDRFLLNVLDRAWHVKCVQCCECKCNLTEKCFSREGKLYCKNDFFRCFGTKCAGCAQGISPSDLVRRARSKVFHLNCFTCMMCNKQLSTGEELYIIDENKFVCKEDYLSNSSVAKENSLHSATTGSDPSLSPDSQDPSQDDAKDSESANVSDKEAGSNENDDQNLGAKRRGPRTTIKAKQLETLKAAFAATPKPTRHIREQLAQETGLNMRVIQVWFQNRRSKERRMKQLSALGARRHAFFRSPRRMRPLVDRLEPGELIPNGPFSFYGDYQSEYYGPGGNYDFFPQGPPSSQAQTPVDLPFVPSSGPSGTPLGGLEHPLPGHHPSSEAQRFTDILAHPPGDSPSPEPSLPGPLHSMSAEVFGPSPPFSSLSVNGGASYGNHLSHPPEMNEAAVW

SEQ ID NO: 30806 - protein, 141 aa, Homo sapiens
  REGION 1..141: note = ENSP00000488248
  VARIANT 1: note = Any amino acid
XRPLVDRLEPGELIPNGPFSFYGASRTILLLGRPDGKGGHEIGSKSASRWDWDPRTGCRRAELGLPKGNADLSPTPTWTRIRRQTPRACAPGRRAAKRRPGQPRVRTAVGDARSRGEGGREHSRVKEVKRPRALPGQPGGF

SEQ ID NO: 30807 - protein, 406 aa, Homo sapiens; identical to SEQ ID NO: 30805
  REGION 1..406: note = ENSP00000477829

SEQ ID NO: 30808 - protein, 141 aa, Homo sapiens; identical to SEQ ID NO: 30806
  REGION 1..141: note = ENSP00000481496
  VARIANT 1: note = Any amino acid

SEQ ID NO: 30809 - protein, 402 aa, Homo sapiens
  REGION 1..402: note = ENSP00000261731
MMVHCAGCERPILDRFLLNVLDRAWHIKCVQCCECKTNLSEKCFSREGKLYCKNDFFRRFGTKCAGCAQGISPSDLVRKARSKVFHLNCFTCMVCNKQLSTGEELYVIDENKFVCKDDYLSSSSLKEGSLNSVSSCTDRSLSPDLQDALQDDPKETDNSTSSDKETANNENEEQNSGTKRRGPRTTIKAKQLETLKAAFAATPKPTRHIREQLAQETGLNMRVIQVWFQNRRSKERRMKQLSALGARRHAFFRSPRRMRPLGGRLDESEMLGSTPYTYYGDYQGDYYAPGSNYDFFAHGPPSQAQSPADSSFLAASGPGSTPLGALEPPLAGPHAADNPRFTDMISHPDTPSPEPGLPGTLHPMPGEVFSGGPSPPFPMSGTSGYSGPLSHPNPELNEAAVW

SEQ ID NO: 30810 - protein, 620 aa, Homo sapiens
  REGION 1..620: note = ENSP00000394537
MDKYDDLGLEASKFIEDLNMYEASKDGLFRVDKGAGNNPEFEETRRVFATKMAKIHLQQQQQQLLQEETLPRGSRGPVNGGGRLGPQARWEVVGSKLTVDGAAKPPLAASTGAPGAVTTLAAGQPPYPPQEQRSRPYLHGTRHGSQDCGSRESLATSEMSAFHQPGPCEDPSCLTHGDYYDNLSLASPKWGDKPGVSPSIGLSVGSGWPSSPGSDPPLPKPCGDHPLNHRQLSLSSSRSSEGSLGGQNSGIGGRSSEKPTGLWSTASSQRVSPGLPSPNLENGAPAVGPVQPRTPSVSAPLALSCPRQGGLPRSNSGLGGEVSGVMSKPNVDPQPWFQDGPKSYLSSSAPSSSPAGLDGSQQGAVPGLGPKPGCTDLGTGPKLSPTSLVHPVMSTLPELSCKEGPLGWSSDGSLGSVLLDSPSSPRVRLPCQPLVPGPELRPSAAELKLEALTQRLEREMDAHPKADYFGACVKCSKGVFGAGQACQAMGNLYHDTCFTCAACSRKLRGKAFYFVNGKVFCEEDFLYSGFQQSADRCFLCGHLIMDMILQALGKSYHPGCFRCVICNECLDGVPFTVDSENKIYCVRDYHKVLAPKCAACGLPILPPEVRCPSRHAPRGF

SEQ ID NO: 30811 - protein, 676 aa, Homo sapiens
  REGION 1..676: note = ENSP00000273317
MDKYDDLGLEASKFIEDLNMYEASKDGLFRVDKGAGNNPEFEETRRVFATKMAKIHLQQQQQQLLQEETLPRGSRGPVNGGGRLGPQARWEVVGSKLTVDGAAKPPLAASTGAPGAVTTLAAGQPPYPPQEQRSRPYLHGTRHGSQDCGSRESLATSEMSAFHQPGPCEDPSCLTHGDYYDNLSLASPKWGDKPGVSPSIGLSVGSGWPSSPGSDPPLPKPCGDHPLNHRQLSLSSSRSSEGSLGGQNSGIGGRSSEKPTGLWSTASSQRVSPGLPSPNLENGAPAVGPVQPRTPSVSAPLALSCPRQGGLPRSNSGLGGEVSGVMSKPNVDPQPWFQDGPKSYLSSSAPSSSPAGLDGSQQGAVPGLGPKPGCTDLGTGPKLSPTSLVHPVMSTLPELSCKEGPLGWSSDGSLGSVLLDSPSSPRVRLPCQPLVPGPELRPSAAELKLEALTQRLEREMDAHPKADYFGACVKCSKGVFGAGQACQAMGNLYHDTCFTCAACSRKLRGKAFYFVNGKVFCEEDFLYSGFQQSADRCFLCGHLIMDMILQALGKSYHPGCFRCVICNECLDGVPFTVDSENKIYCVRDYHKVLAPKCAACGLPILPPEGSDETIRVVSMDRDYHVECYHCEDCGLELNDEDGHRCYPLEDHLFCHSCHVKRLEKRPSSTALHQHHF

SEQ ID NO: 30812 - protein, 169 aa, Homo sapiens
  REGION 1..169: note = ENSP00000397253
  VARIANT 1: note = Any amino acid
XGVPICGACRRPIEGRVVNALGKQWHVEVSQAGGHVASGWGVPQLRVMHFVCAKCEKPFLGHRHYEKKGLAYCETHYNQLFGDVCYNCSHVIEGDVVSALNKAWCVSCFSCSTCNSKLTLKNKFVEFDMKPVCKRCYEKFPLELKKRLKKLSELTSRKAQPKATDLNSA

SEQ ID NO: 30813 - protein, 189 aa, Homo sapiens
  REGION 1..189: note = ENSP00000386252
MFRSDAYHPDHFNCTHCGKELTAEARELKGELYCLPCHDKMGVPICGACRRPIEGRVVNALGKQWHVEHFVCAKCEKPFLGHRHYEKKGLAYCETHYNQLFGDVCYNCSHVIEGDVVSALNKAWCVSCFSCSTCNSKLTLKNKFVEFDMKPVCKRCYEKFPLELKKRLKKLSELTSRKAQPKATDLNSA

SEQ ID NO: 30814 - protein, 189 aa, Homo sapiens; identical to SEQ ID NO: 30813
  REGION 1..189: note = ENSP00000386345

SEQ ID NO: 30815 - protein, 365 aa, Homo sapiens
  REGION 1..365: note = ENSP00000326888
MAARLGALAASGLYRRRQHRQSPPPATGNMSDALANAVCQRCQARFSPAERIVNSNGELYHEHCFVCAQCFRPFPEGLFYEFEGRKYCEHDFQMLFAPCCGSCGEFIIGRVIKAMNNNWHPGCFRCELCDVELADLGFVKNAGRHLCRPCHNREKAKGLGKYICQRCHLVIDEQPLMFRSDAYHPDHFNCTHCGKELTAEARELKGELYCLPCHDKMGVPICGACRRPIEGRVVNALGKQWHVEHFVCAKCEKPFLGHRHYEKKGLAYCETHYNQLFGDVCYNCSHVIEGDVVSALNKAWCVSCFSCSTCNSKLTLKNKFVEFDMKPVCKRCYEKFPLELKKRLKKLSELTSRKAQPKATDLNSA

SEQ ID NO: 30816 - protein, 336 aa, Homo sapiens
  REGION 1..336: note = ENSP00000386383
MSDALANAVCQRCQARFSPAERIVNSNGELYHEHCFVCAQCFRPFPEGLFYEFEGRKYCEHDFQMLFAPCCGSCGEFIIGRVIKAMNNNWHPGCFRCELCDVELADLGFVKNAGRHLCRPCHNREKAKGLGKYICQRCHLVIDEQPLMFRSDAYHPDHFNCTHCGKELTAEARELKGELYCLPCHDKMGVPICGACRRPIEGRVVNALGKQWHVEHFVCAKCEKPFLGHRHYEKKGLAYCETHYNQLFGDVCYNCSHVIEGDVVSALNKAWCVSCFSCSTCNSKLTLKNKFVEFDMKPVCKRCYEKFPLELKKRLKKLSELTSRKAQPKATDLNSA

SEQ ID NO: 30817 - protein, 341 aa, Homo sapiens
  REGION 1..341: note = ENSP00000347240
MTGSNMSDALANAVCQRCQARFSPAERIVNSNGELYHEHCFVCAQCFRPFPEGLFYEFEGRKYCEHDFQMLFAPCCGSCGEFIIGRVIKAMNNNWHPGCFRCELCDVELADLGFVKNAGRHLCRPCHNREKAKGLGKYICQRCHLVIDEQPLMFRSDAYHPDHFNCTHCGKELTAEARELKGELYCLPCHDKMGVPICGACRRPIEGRVVNALGKQWHVEHFVCAKCEKPFLGHRHYEKKGLAYCETHYNQLFGDVCYNCSHVIEGDVVSALNKAWCVSCFSCSTCNSKLTLKNKFVEFDMKPVCKRCYEKFPLELKKRLKKLSELTSRKAQPKATDLNSA

SEQ ID NO: 30818 - protein, 336 aa, Homo sapiens; identical to SEQ ID NO: 30816
  REGION 1..336: note = ENSP00000386637

SEQ ID NO: 30819 - protein, 336 aa, Homo sapiens; identical to SEQ ID NO: 30816
  REGION 1..336: note = ENSP00000387002

SEQ ID NO: 30820 - protein, 189 aa, Homo sapiens; identical to SEQ ID NO: 30813
  REGION 1..189: note = ENSP00000386570

SEQ ID NO: 30821 - protein, 363 aa, Homo sapiens
  REGION 1..363: note = ENSP00000443794
MTGRKRKWGETGTGSGAAPAAALRWSNMSDALANAVCQRCQARFSPAERIVNSNGELYHEHCFVCAQCFRPFPEGLFYEFEGRKYCEHDFQMLFAPCCGSCGEFIIGRVIKAMNNNWHPGCFRCELCDVELADLGFVKNAGRHLCRPCHNREKAKGLGKYICQRCHLVIDEQPLMFRSDAYHPDHFNCTHCGKELTAEARELKGELYCLPCHDKMGVPICGACRRPIEGRVVNALGKQWHVEHFVCAKCEKPFLGHRHYEKKGLAYCETHYNQLFGDVCYNCSHVIEGDVVSALNKAWCVSCFSCSTCNSKLTLKNKFVEFDMKPVCKRCYEKFPLELKKRLKKLSELTSRKAQPKATDLNSA

SEQ ID NO: 30822 - protein, 60 aa, Homo sapiens
  REGION 1..60: note = ENSP00000388611
MFRSDAYHPDHFNCTHCGTLSVPSVRSHSWGTGTMRRRAWPTARLTTTSSSGTSATTAAM

SEQ ID NO: 30823 - protein, 189 aa, Homo sapiens; identical to SEQ ID NO: 30813
  REGION 1..189: note = ENSP00000386907

SEQ ID NO: 30824 - protein, 250 aa, Homo sapiens
  REGION 1..250: note = ENSP00000344401
MAEGGASKGGGEEPGKLPEPAEEESQVLRGTGHCKWFNVRMGFGFISMINREGSPLDIPVDVFVHQSKLFMEGFRSLKEGEPVEFTFKKSSKGLESIRVTGPGGSPCLGSERRPKGKTLQKRKPKGDRCYNCGGLDHHAKECSLPPQPKKCHYCQSIMHMVANCPHKNVAQPPASSQGRQEAESQPCTSTLPREVGGGHGCTSPPFPQEARAEISERSGRSPQEASSTKSSIAPEEQSKKGPSVQKRKKT

SEQ ID NO: 30825 - protein, 258 aa, Homo sapiens
  REGION 1..258: note = ENSP00000490468
MRSFNQVSSAPGGASKGGGEEPGKLPEPAEEESQVLRGTGHCKWFNVRMGFGFISMINREGSPLDIPVDVFVHQSKLFMEGFRSLKEGEPVEFTFKKSSKGLESIRVTGPGGSPCLGSERRPKGKTLQKRKPKGDRCYNCGGLDHHAKECSLPPQPKKCHYCQSIMHMVANCPHKNVAQPPASSQGRQEAESQPCTSTLPREVGGGHGCTSPPFPQEARAEISERSGRSPQEASSTKSSIAPEEQSKKGPSVQKRKKT

SEQ ID NO: 30826 - protein, 209 aa, Homo sapiens
  REGION 1..209: note = ENSP00000489735
MSHRRQVLQKRMRSFNQVSSAPGGASKGGGEEPGKLPEPAEEESQVLRGTGHCKWFNVRMGFGFISMINREGSPLDIPVDVFVHQSKLFMEGFRSLKEGEPVEFTFKKSSKGLESIRVTGPGGSPCLGSERRPKGKTLQKRKPKGDRCYNCGGLDHHAKECSLPPQPKKCHYCQSIMHMVANCPHKNVAQPPASSQGRQEAESQPCTST

SEQ ID NO: 30827 - protein, 233 aa, Homo sapiens
  REGION 1..233: note = ENSP00000447488
MLKPSVTSAPTADMATLTVVQPLTLDRDVARAIELLEKLQESGEVPVHKLQSLKKVLQSEFCTAIREVYQYMHETITVNGCPEFRARATAKATVAAFAASEGHSHPRVVELPKTDEGLGFNVMGGKEQNSPIYISRIIPGGVAERHGGLKRGDQLLSVNGVSVEGEHHEKAVELLKAAKDSVKLVVRYTPKVLEEMEARFEKLRTARRRQQQQLLIQQQQQQQQQQTQQNHMS

SEQ ID NO: 30828 - protein, 101 aa, Homo sapiens
  REGION 1..101: note = ENSP00000261203
MLKPSVTSAPTADMATLTVVQPLTLDRDVARAIELLEKLQESGEVPVHKLQSLKKVLQSEFCTAIREVYQYMHETITVNGCPEFRARATAKVFSCVHCKRI

SEQ ID NO: 30829 - protein, 180 aa, Homo sapiens
  REGION 1..180: note = ENSP00000448975
TSAPTADMATLTVVQPLTLDRDVARAIELLEKLQESGEVPVHKLQSLKKVLQSEFCTAIREVYQYMHETITVNGCPEFRARATAKATVAAFAASEGHSHPRVVELPKTDEGLGFNVMGGKEQNSPIYISRIIPGGVAERHGGLKRGDQLLSVNGVLLRSQKQMETHVSSAIIGRENFFYP

SEQ ID NO: 30830 - protein, 130 aa, Homo sapiens
  REGION 1..130: note = ENSP00000448891
  VARIANT 1: note = Any amino acid
XLEKLQESGEVPVHKLQSLKKVLQSEFCTAIREVYQYMHETITVNGCPEFRARATAKATVAAFAASEGHSHPRVVELPKTDEGLGFNVMGGKEQNSPIYISRIIPGGVAERHGGLKRGDQLLSVNGVVCL

SEQ ID NO: 30831 - protein, 620 aa, Homo sapiens
  REGION 1..620: note = ENSP00000347451
MQVSKRMLAGGVRSMPSPLLACWQPILLLVLGSVLSGSATGCPPRCECSAQDRAVLCHRKRFVAVPEGIPTETRLLDLGKNRIKTLNQDEFASFPHLEELELNENIVSAVEPGAFNNLFNLRTLGLRSNRLKLIPLGVFTGLSNLTKLDISENKIVILLDYMFQDLYNLKSLEVGDNDLVYISHRAFSGLNSLEQLTLEKCNLTSIPTEALSHLHGLIVLRLRHLNINAIRDYSFKRLYRLKVLEISHWPYLDTMTPNCLYGLNLTSLSITHCNLTAVPYLAVRHLVYLRFLNLSYNPISTIEGSMLHELLRLQEIQLVGGQLAVVEPYAFRGLNYLRVLNVSGNQLTTLEESVFHSVGNLETLILDSNPLACDCRLLWVFRRRWRLNFNRQQPTCATPEFVQGKEFKDFPDVLLPNYFTCRRARIRDRKAQQVFVDEGHTVQFVCRADGDPPPAILWLSPRKHLVSAKSNGRLTVFPDGTLEVRYAQVQDNGTYLCIAANAGGNDSMPAHLHVRSYSPDWPHQPNKTFAFISNQPGEGEANSTRATVPFPFDIKTLIIATTMGFISFLGVVLFCLVLLFLWSRGKGNTKHNIEIEYVPRKSDAGISSADAPRKFNMKMI

SEQ ID NO: 30832 - protein, 614 aa, Homo sapiens
  REGION 1..614: note = ENSP00000453853
MLAGGVRSMPSPLLACWQPILLLVLGSVLSGSATGCPPRCECSAQDRAVLCHRKRFVAVPEGIPTETRLLDLGKNRIKTLNQDEFASFPHLEELELNENIVSAVEPGAFNNLFNLRTLGLRSNRLKLIPLGVFTGLSNLTKLDISENKIVILLDYMFQDLYNLKSLEVGDNDLVYISHRAFSGLNSLEQLTLEKCNLTSIPTEALSHLHGLIVLRLRHLNINAIRDYSFKRLYRLKVLEISHWPYLDTMTPNCLYGLNLTSLSITHCNLTAVPYLAVRHLVYLRFLNLSYNPISTIEGSMLHELLRLQEIQLVGGQLAVVEPYAFRGLNYLRVLNVSGNQLTTLEESVFHSVGNLETLILDSNPLACDCRLLWVFRRRWRLNFNRQQPTCATPEFVQGKEFKDFPDVLLPNYFTCRRARIRDRKAQQVFVDEGHTVQFVCRADGDPPPAILWLSPRKHLVSAKSNGRLTVFPDGTLEVRYAQVQDNGTYLCIAANAGGNDSMPAHLHVRSYSPDWPHQPNKTFAFISNQPGEGEANSTRATVPFPFDIKTLIIATTMGFISFLGVVLFCLVLLFLWSRGKGNTKHNIEIEYVPRKSDAGISSADAPRKFNMKMI

SEQ ID NO: 30833 - protein, 326 aa, Homo sapiens
  REGION 1..326: note = ENSP00000453780
MVQLEQKVSKRMLAGGVRSMPSPLLACWQPILLLVLGSVLSGSATGCPPRCECSAQDRAVLCHRKRFVAVPEGIPTETRLLDLGKNRIKTLNQDEFASFPHLEELELNENIVSAVEPGAFNNLFNLRTLGLRSNRLKLIPLGVFTGLSNLTKLDISENKIVILLDYMFQDLYNLKSLEVGDNDLVYISHRAFSGLNSLEQLTLEKCNLTSIPTEALSHLHGLIVLRLRHLNINAIRDYSFKRLYRLKVLEISHWPYLDTMTPNCLYGLNLTSLSITHCNLTAVPYLAVRHLVYLRFLNLSYNPISTIEGSMLHELLRLQEIQLVGG

SEQ ID NO: 30834 - protein, 178 aa, Homo sapiens
  REGION 1..178: note = ENSP00000455605
MLAGGVRSMPSPLLACWQPILLLVLGSVLSGSATGCPPRCECSAQDRAVLCHRKRFVAVPEGIPTETRLLDLGKNRIKTLNQDEFASFPHLEELELNENIVSAVEPGAFNNLFNLRTLGLRSNRLKLIPLGVFTGLSNLTKLDISENKIVILLDYMFQDLYNLKSLEVGDNDLVYISH

SEQ ID NO: 30835 - protein, 125 aa, Homo sapiens
  REGION 1..125: note = ENSP00000454465
MLAGGVRSMPSPLLACWQPILLLVLGSVLSGSATGCPPRCECSAQDRAVLCHRKRFVAVPEGIPTETRLLDLGKNRIKTLNQDEFASFPHLEELELNENIVSAVEPGAFNNLFNLRTLGLRSNRL

SEQ ID NO: 30836 - protein, 72 aa, Homo sapiens
  REGION 1..72: note = ENSP00000454687
MLAGGVRSMPSPLLACWQPILLLVLGSVLSGSATGCPPRCECSAQDRAVLCHRKRFVAVPEGIPTETRLLDL

SEQ ID NO: 30837 - protein, 55 aa, Homo sapiens
  REGION 1..55: note = ENSP00000454051
MLAGGVRSMPSPLLACWQPILLLVLGSVLSGSATGCPPRCECSAQDRAVLCHRKR

SEQ ID NO: 30838 - protein, 35 aa, Homo sapiens
  REGION 1..35: note = ENSP00000454245
MLAGGVRSMPSPLLACWQPILLLVLGSVLSGSATG

SEQ ID NO: 30839 - protein, 18 aa, Homo sapiens
  REGION 1..18: note = ENSP00000454577
MLAGGVRSMPSPLLACWQ

SEQ ID NO: 30840 - protein, 11 aa, Homo sapiens
  REGION 1..11: note = ENSP00000456516
MLAGGVRSMPS

SEQ ID NO: 30841 - protein, 4 aa, Homo sapiens
  REGION 1..4: note = ENSP00000457101
MLAG

SEQ ID NO: 30842 - protein, 606 aa, Homo sapiens
  REGION 1..606: note = ENSP00000369328
MLHTAISCWQPFLGLAVVLIFMGSTIGCPARCECSAQNKSVSCHRRRLIAIPEGIPIETKILDLSKNRLKSVNPEEFISYPLLEEIDLSDNIIANVEPGAFNNLFNLRSLRLKGNRLKLVPLGVFTGLSNLTKLDISENKIVILLDYMFQDLHNLKSLEVGDNDLVYISHRAFSGLLSLEQLTLEKCNLTAVPTEALSHLRSLISLHLKHLNINNMPVYAFKRLFHLKHLEIDYWPLLDMMPANSLYGLNLTSLSVTNTNLSTVPFLAFKHLVYLTHLNLSYNPISTIEAGMFSDLIRLQELHIVGAQLRTIEPHSFQGLRFLRVLNVSQNLLETLEENVFSSPRALEVLSINNNPLACDCRLLWILQRQPTLQFGGQQPMCAGPDTIRERSFKDFHSTALSFYFTCKKPKIREKKLQHLLVDEGQTVQLECSADGDPQPVISWVTPRRRFITTKSNGRATVLGDGTLEIRFAQDQDSGMYVCIASNAAGNDTFTASLTVKGFASDRFLYANRTPMYMTDSNDTISNGTNANTFSLDLKTILVSTAMGCFTFLGVVLFCFLLLFVWSRGKGKHKNSIDLEYVPRKNNGAVVEGEVAGPRRFNMKMI

SEQ ID NO: 30843 - protein, 606 aa, Homo sapiens; identical to SEQ ID NO: 30842
  REGION 1..606: note = ENSP00000479634

SEQ ID NO: 30844 - protein, 606 aa, Homo sapiens; identical to SEQ ID NO: 30842
  REGION 1..606: note = ENSP00000310126

SEQ ID NO: 30845 - protein, 390 aa, Homo sapiens
  REGION 1..390: note = ENSP00000463835
MLSFSRDRLPSGRRVSGKCPPPPLGMAVGRGGSGCPEEGSGRKLELLESQLPAERAREEAGPSVRRPRDKLHKPKATQTEVKPSVRFNLRTSKDPEHEGCYLSVGHSQPLEDCSFNMTAKTFFIIHGWTMSGIFENWLHKLVSALHTREKDANVVVVDWLPLAHQLYTDAVNNTRVVGHSIARMLDWLQEKDDFSLGNVHLIGYSLGAHVAGYAGNFVKGTVGRITGLDPAGPMFEGADIHKRLSPDDADFVDVLHTYTRSFGLSIGIQMPVGHIDIYPNGGDFQPGCGLNDVLGSIAYGTITEVVKCEHERAVHLFVDSLVNQDKPSFAFQCTDSNRFKKGICLSCRKNRCNSIGYNAKKMRNKRNSKMYLKTRAGMPFRGNLQSLECP

SEQ ID NO: 30846 - protein, 24 aa, Homo sapiens
  REGION 1..24: note = ENSP00000463077
MTAKTFFIIHGWTMSGIFENWLHK

SEQ ID NO: 30847 - protein, 500 aa, Homo sapiens
  REGION 1..500: note = ENSP00000261292
MSNSVPLLCFWSLCYCFAAGSPVPFGPEGRLEDKLHKPKATQTEVKPSVRFNLRTSKDPEHEGCYLSVGHSQPLEDCSFNMTAKTFFIIHGWTMSGIFENWLHKLVSALHTREKDANVVVVDWLPLAHQLYTDAVNNTRVVGHSIARMLDWLQEKDDFSLGNVHLIGYSLGAHVAGYAGNFVKGTVGRITGLDPAGPMFEGADIHKRLSPDDADFVDVLHTYTRSFGLSIGIQMPVGHIDIYPNGGDFQPGCGLNDVLGSIAYGTITEVVKCEHERAVHLFVDSLVNQDKPSFAFQCTDSNRFKKGICLSCRKNRCNSIGYNAKKMRNKRNSKMYLKTRAGMPFRVYHYQMKIHVFSYKNMGEIEPTFYVTLYGTNADSQTLPLEIVERIEQNATNTFLVYTEEDLGDLLKIQLTWEGASQSWYNLWKEFRSYLSQPRNPGRELNIRRIRVKSGETQRKLTFCTEDPENTSISPGRELWFRKCRDGWRMKNETSPTVELP

SEQ ID NO: 30848 - protein, 426 aa, Homo sapiens
  REGION 1..426: note = ENSP00000387978
MSNSVPLLCFWSLCYCFAAGSPVPFGPEGRLEDKLHKPKATQTEVKPSVRFNLRTSKDPEHEGCYLSVGHSQPLEDCSFNMTAKTFFIIHGWTMSGIFENWLHKLVSALHTREKDANVVVVDWLPLAHQLYTDAVNNTRVVGHSIARMLDWLQEKDDFSLGNVHLIGYSLGAHVAGYAGNFVKGTVGRITAITEVVKCEHERAVHLFVDSLVNQDKPSFAFQCTDSNRFKKGICLSCRKNRCNSIGYNAKKMRNKRNSKMYLKTRAGMPFRVYHYQMKIHVFSYKNMGEIEPTFYVTLYGTNADSQTLPLEIVERIEQNATNTFLVYTEEDLGDLLKIQLTWEGASQSWYNLWKEFRSYLSQPRNPGRELNIRRIRVKSGETQRKLTFCTEDPENTSISPGRELWFRKCRDGWRMKNETSPTVELP

SEQ ID NO: 30849 - protein, 354 aa, Homo sapiens
  REGION 1..354: note = ENSP00000462420
MSNSVPLLCFWSLCYCFAAGSPVPFGPEGRLEDKLHKPKATQTEVKPSVRFNLRTSKDPEHEGCYLSVGHSQPLEDCSFNMTAKTFFIIHGWTMSGIFENWLHKLVSALHTREKDANVVVVDWLPLAHQLYTDAVNNTRVVGHSIARMLDWLQEKDDFSLGNVHLIGYSLGAHVAGYAGNFVKGTVGRITGLDPAGPMFEGADIHKRLSPDDADFVDVLHTYTRSFGLSIGIQMPVGHIDIYPNGGDFQPGCGLNDVLGSIAYGTITEVVKCEHERAVHLFVDSLVNQDKPSFAFQCTDSNRFKKGICLSCRKNRCNSIGYNAKKMRNKRNSKMYLKTRAGMPFRGNLQSLECP

SEQ ID NO: 30850 - protein, 188 aa, Homo sapiens
  REGION 1..188: note = ENSP00000462480
LCYCFAAGSPVPFGPEGRLEDKLHKPKATQTEVKPSVRFNLRTSKDPEHEGCYLSVGHSQPLEDCSFNMTAKTFFIIHGWTMSGIFENWLHKLVSALHTREKDANVVVVDWLPLAHQLYTDAVNNTRVVGHSIARMLDWLQVLGDERESPVTSRISNPIFLRNAGHASVAMNFWSLIKIFEIKSFIEL

SEQ ID NO: 30851 - protein, 161 aa, Homo sapiens
  REGION 1..161: note = ENSP00000459533
MSVPGPYQAATGPSSAPSAPPSYEETVAVNSYYPTPPAPMPGPTTGLVTGPDGKGMNPPSYYTQPAPIPNNNPITVQTVYVQHPITFLDRPIQMCCPSCNKMIVSQLSYNAGALTWLSCGSLCLLGCIAGCCFIPFCVDALQDVDHYCPNCRALLGTYKRL

SEQ ID NO: 30852 - protein, 152 aa, Homo sapiens
  REGION 1..152: note = ENSP00000397958
MSVPGPYQAATGPSSAPSAPPSYEETVAVNSYYPTPPAPMPGPTTGLVTGPDGKGMNPPSYYTQPAPIPNNNPITVQTVYVQHPITFLDRPIQMCCPSCNKMIVSQLSYNAGALTWLSCGSLCLLGQECSGTIVALRSFDLLGSCNPPSSAS

SEQ ID NO: 30853 - protein, 161 aa, Homo sapiens; identical to SEQ ID NO: 30851
  REGION 1..161: note = ENSP00000340118

SEQ ID NO: 30854 - protein, 161 aa, Homo sapiens; identical to SEQ ID NO: 30851
  REGION 1..161: note = ENSP00000459138

SEQ ID NO: 30855 - protein, 75 aa, Homo sapiens
  REGION 1..75: note = ENSP00000459603
MSVPGPYQAATGPSSAPSAPPSYEETVAVNSYYPTPPAPMPGPTTGLVTGPDGKGMNPPSYYTQPAPIPNNNPSA

SEQ ID NO: 30856 - protein, 10 aa, Homo sapiens
  REGION 1..10: note = ENSP00000459094
  VARIANT 1: note = Any amino acid
XRSDSAKESK

SEQ ID NO: 30857 - protein, 81 aa, Homo sapiens
  REGION 1..81: note = ENSP00000460873
MSVPGPYQAATGPSSAPSAPPSYEETVAVNSYYPTPPAPMPGPTTGLVTGPDGKGMNPPSYYTQPAPIPNNNPMNAIGLVS

SEQ ID NO: 30858 - protein, 68 aa, Homo sapiens
  REGION 1..68: note = ENSP00000458836
MCCPSCNKMIVSQLSYNAGALTWLSCGSLCLLGCIAGCCFIPFCVDALQDVDHYCPNCRALLGTYKRL

SEQ ID NO: 30859 - protein, 161 aa, Homo sapiens; identical to SEQ ID NO: 30851
  REGION 1..161: note = ENSP00000461667

SEQ ID NO: 30860 - protein, 161 aa, Homo sapiens; identical to SEQ ID NO: 30851
  REGION 1..161: note = ENSP00000461813

SEQ ID NO: 30861 - protein, 153 aa, Homo sapiens
  REGION 1..153: note = ENSP00000460743
MSVPGPYQAATGPSSAPSAPPSYEETVAVNSYYPTPPAPMPGPTTGLVTGPDGKGMNPPSYYTQPAPIPNNNPITVQTVYVQHPITFLDRPIQMCCPSCNKMIVSQLSYNAGALTWLSCGSLCLLGCIAGCCFIPFCVDALQDVDHYCPNCRA

SEQ ID NO: 30862 - protein, 137 aa, Homo sapiens
  REGION 1..137: note = ENSP00000458871
MSVPGPYQAATGPSSAPSAPPSYEETVAVNSYYPTPPAPMPGPTTGLVTGPDGKGMNPPSYYTQPAPIPNNNPITVQTVYVQHPITFLDRPIQMCCPSCNKMIVSQLSYNAGALTWLSCGSLCLLGCIAGCCFIPFC

SEQ ID NO: 30863 - protein, 136 aa, Homo sapiens
  REGION 1..136: note = ENSP00000458981
MSVPGPYQAATGPSSAPSAPPSYEETVAVNSYYPTPPAPMPGPTTGLVTGPDGKGMNPPSYYTQPAPIPNNNPITVQTVYVQHPITFLDRPIQMCCPSCNKMIVSQLSYNAGALTWLSCGSLCLLGQECSGTIVAL

SEQ ID NO: 30864 - protein, 126 aa, Homo sapiens
  REGION 1..126: note = ENSP00000460133
MSVPGPYQAATGPSSAPSAPPSYEETVAVNSYYPTPPAPMPGPTTGLVTGPDGKGMNPPSYYTQPAPIPNNNPITVQTVYVQHPITFLDRPIQMCCPSCNKMIVSQLSYNAGALTWLSCGSLCLLG

SEQ ID NO: 30865 - protein, 105 aa, Homo sapiens
  REGION 1..105: note = ENSP00000459913
MSVPGPYQAATGPSSAPSAPPSYEETVAVNSYYPTPPAPMPGPTTGLVTGPDGKGMNPPSYYTQPAPIPNNNPSTCGLPGPPYHSLALHPGNQESDRSDSAKESK

SEQ ID NO: 30866 - protein, 88 aa, Homo sapiens
  REGION 1..88: note = ENSP00000459898
MTFVNCHGAGGSVAVRKTRVRPRRRLGFGKMSVPGPYQAATGPSSAPSAPPSYEETVAVNSYYPTPPAPMPGPTTGLVTGPDGKGMNP

SEQ ID NO: 30867 - protein, 39 aa, Homo sapiens
  REGION 1..39: note = ENSP00000459026
MSVPGPYQAATGPSSAPSAPPSYEETVAVNSYYPTPPAP

SEQ ID NO: 30868 - protein, 33 aa, Homo sapiens
  REGION 1..33: note = ENSP00000458538
MTFVNCHGAGGSVAVRKTRVRPRRRLGFGKMSV

SEQ ID NO: 30869 - protein, 152 aa, Homo sapiens; identical to SEQ ID NO: 30852
  REGION 1..152: note = ENSP00000481589

SEQ ID NO: 30870 - protein, 161 aa, Homo sapiens; identical to SEQ ID NO: 30851
  REGION 1..161: note = ENSP00000483114

SEQ ID NO: 30871 - protein, 228 aa, Homo sapiens
  REGION 1..228: note = ENSP00000371231
MSVPGPYQAATGPSSAPSAPPSYEETVAVNSYYPTPPAPMPGPTTGLVTGPDGKGMNPPSYYTQPAPIPNNNPITVQTVYVQHPITFLDRPIQMCCPSCNKMIVSQLSYNAGALTWLSCGSLCLLGVHSGLLLHPLLRGCPAGRGPLLSQLQSSPGHLQAFVGLSQTWREPGAAGSPFHLSSSFTPGGGSALVVSPLQGAHLHVFFWGEYVAKLTNLQTPEIAAWSRA

SEQ ID NO: 30872 - protein, 365 aa, Homo sapiens
  REGION 1..365: note = ENSP00000157600
MAKVAKDLNPGVKKMSLGQLQSARGVACLGCKGTCSGFEPHSWRKICKSCKCSQEDHCLTSDLEDDRKIGRLLMDSKYSTLTARVKGGDGIRIYKRNRMIMTNPIATGKDPTFDTITYEWAPPGVTQKLGLQYMELIPKEKQPVTGTEGAFYRRRQLMHQLPIYDQDPSRCRGLLENELKLMEEFVKQYKSEALGVGEVALPGQGGLPKEEGKQQEKPEGAETTAATTNGSLSDPSKEVEYVCELCKGAAPPDSPVVYSDRAGYNKQWHPTCFVCAKCSEPLVDLIYFWKDGAPWCGRHYCESLRPRCSGCDEIIFAEDYQRVEDLAWHRKHFVCEGCEQLLSGRAYIVTKGQLLCPTCSKSKRS

SEQ ID NO: 30873 - protein, 247 aa, Homo sapiens
  REGION 1..247: note = ENSP00000411222
MAKVAKDLNPGVKKMSLGQLQSARGVACLGCKGTCSGFEPHSWRKICKSCKCSQEDHCLTSDLEDDRKIGRLLMDSKYSTLTARVKGGDGIRIYKRNRMIMTNPIATGKDPTFDTITYEWAPPGVTQKLGLQYMELIPKEKQPVTGTEGAFYRRRQLMHQLPIYDQDPSRCRGLLENELKLMEEFVKQYKSEALGVGEVALPGQGGLPKEEGKQQEKPEGAETTAATTNGSLSDPSKEVEYKPVPLV

SEQ ID NO: 30874 - protein, 233 aa, Homo sapiens
  REGION 1..233: note = ENSP00000400555
MGYTYKVIERILEIGAFRPHMSLGQLQSARGVACLGCKGTCSGFEPHSWRKICKSCKCSQEDHCLTSDLEDDRKIGRLLMDSKYSTLTARVKGGDGIRIYKRNRMIMTNPIATGKDPTFDTITYEWAPPGVTQKLGLQYMELIPKEKQPVTGTEGAFYRRRQLMHQLPIYDQDPSRCRGLLENELKLMEEFVKQYKSEALGVGEVALPGQGGLPKEEGKQQEKPEGAETTAAT

SEQ ID NO: 30875 - protein, 292 aa, Homo sapiens
  REGION 1..292: note = ENSP00000396515
MDSKYSTLTARVKGGDGIRIYKRNRMIMTNPIATGKDPTFDTITYEWAPPGVTQKLGLQYMELIPKEKQPVTGTEGAFYRRRQLMHQLPIYDQDPSRCRGLLENELKLMEEFVKQYKSEALGVGEVALPGQGGLPKEEGKQQEKPEGAETTAATTNGSLSDPSKEVEYVCELCKGAAPPDSPVVYSDRAGYNKQWHPTCFVCAKCSEPLVDLIYFWKDGAPWCGRHYCESLRPRCSGCDEIIFAEDYQRVEDLAWHRKHFVCEGCEQLLSGRAYIVTKGQLLCPTCSKSKRS

SEQ ID NO: 30876 - protein, 58 aa, Homo sapiens
  REGION 1..58: note = ENSP00000405049
MAKVAKDLNPGVKKMSLGQLQSARGVACLGCKGTCSGFEPHSWRDCSTWSSSPRRSSQ

SEQ ID NO: 30877 - protein, 253 aa, Homo sapiens
  REGION 1..253: note = ENSP00000380542
MFGMQGDVFGLRATFMEGLQYMELIPKEKQPVTGTEGAFYRRRQLMHQLPIYDQDPSRCRGLLENELKLMEEFVKQYKSEALGVGEVALPGQGGLPKEEGKQQEKPEGAETTAATTNGSLSDPSKEVEYVCELCKGAAPPDSPVVYSDRAGYNKQWHPTCFVCAKCSEPLVDLIYFWKDGAPWCGRHYCESLRPRCSGCDEIIFAEDYQRVEDLAWHRKHFVCEGCEQLLSGRAYIVTKGQLLCPTCSKSKRS

SEQ ID NO: 30878 - protein, 634 aa, Homo sapiens
  REGION 1..634: note = ENSP00000478197
MRWLRPAGRRREQESVSGHLGPPAGAPAAPETPTCLPDTTPHPTPVVCSADPQLALESLDPRTLRLLWRQRELEIQALRWAIQNGEDARLCHILEEVAGLPPKRSSHSQEKLLQNQVQKLIQELKEQKERAQWEKEHLEERLLQTTRTLQEMEAELQNLQKSCLLQLARSSWVGRMLRSQTGSVEVVTAETLMDPSDLSENIQAPTGEGFRLEDVDWNSVARRYPNLFTNMEPSSKQKQPRPWPQLDTGSPESSGKHSERHHKTVEWGSLPCLNTSSSGGADSDSSSCRPGLPSFVQVIGHPPRDHRASSEQALVQAGSYSRDSEDLQKTHSPRHGEPVLSPQPCTDPDHWSPELLQSPTGLKIVAVSCREKFVRIFNPSQESTADLSGMVLKQLVRGFPERLYRFPPGTLLAPRHHVTVWGEATRSAKKPLRASSSREPVPLLSIRGCATLLLSPKGEVLSEHRIPRRETPAPRVFADGTDLSIDRFPLPEAGPGADTRKPPRPPRPLRKGRVREPRVSRRRPGTRGLLPPVSSGKLFHAREGPARPENPEIPAPQHLPAIPGDPTLPSPPAEAGLGLEDCRLQKEHRVRVCRKSVDRSCPLVALSVQNTAESRFGFRFLSCLPVTADTCRGA

SEQ ID NO: 30879 - protein, 302 aa, Homo sapiens
  REGION 1..302: note = ENSP00000488238
MATVYSPSLPGLLGGRASEQESVSGHLGPPAGAPAAPETPTCLPDTTPHPTPVVCSADPQLALESLDPRTLRLLWRQRELEIQALRWAIQNGEDARLCHILEEVAGLPPKRSSHSQEKLLQNQVQKLIQELKEQKERAQWEKEHLEERLLQTTRTLQEMEAELQNLQKSCLLQLARSSWVGRMLRSQTGSVEVVTAETLMDPSDLSENIQAPTGEGFRLEDVDWNSVARRYPNLFTNMEPSSKQKQPRPWPQLDTGSPESSGKHSERHHKTVEWGSLPCLNTSSSGGADSDSSSCRPGLPSF

SEQ ID NO: 30880 - protein, 247 aa, Homo sapiens
  REGION 1..247: note = ENSP00000488391
MAPKSGQEVKETEEEALLSPTEQESVSGHLGPPAGAPAAPETPTCLPDTTPHPTPVVCSADPQLALESLDPRTLRLLWRQRELEIQALRWAIQNGEDARLCHILEEVAGLPPKRSSHSQEKLLQNQVQKLIQELKEQKERAQWEKEHLEERLLQTTRTLQEMEAELQNLQKSCLLQLARSSWVGRMLRSQTGSVEVVTAETLMDPSDLSENIQAPTGEGFRLEDVDWNSVARRYPNLFTNMEPSSKQ

SEQ ID NO: 30881 - protein, 634 aa, Homo sapiens
  REGION 1..634: note = ENSP00000331167
MRWLRPAGRRREQESVSGHLGPPAGAPAAPETPTCLPDTTPHPAPVVCSADPQLALESLDPRTLRLLWRQRELEIQALRWAIQNGEDARLCHILEEVAGLPPKRSSHSQEKLLQNQVQKLIQELKEQKERAQWEKEHLEERLLQTTRTLQEMEAELQNLQKSCLLQLARSSWVGRMLRSQTGSVEVVTAETLMDPSDLSENIQAPTGEGFRLEDVDWNSVARRYPNLFTNMEPSSKQKQPRPWPQLDTGSPESSGKHSERHHKTVEWGSLPCLNTSSSGGADSDSSSCRPGLPSFVQVIGHPPRDHRASSEQALVQAGSYSRDSEDLQKTHSPRHGEPVLSPQPCTDPDHWSPELLQSPTGLKIVAVSCREKFVRIFNPSQESTADLSGMVLKQLVRGFPERLYRFPPGTLLAPRHHVTVWGEATRSAKKPLRASSSREPVPLLSIRGCATLLLSPKGEVLSEHRIPRRETPAPRVFADGTDLSIDRFPLPEAGPGADTRKPPRPPRPLRKGRVREPRVSRRRPGTRGLLPPVSSGKLFHAREGPARPENPEIPAPQHLPAIPGDPTLPSPPAEAGLGLEDCRLQKEHRVRVCRKSVDRSCPLVALSVQNTAESRFGFRFLSCLPVTADTCRGA

SEQ ID NO: 30882 - protein, 302 aa, Homo sapiens
  REGION 1..302: note = ENSP00000393529
MATVYSPSLPGLLGGRASEQESVSGHLGPPAGAPAAPETPTCLPDTTPHPAPVVCSADPQLALESLDPRTLRLLWRQRELEIQALRWAIQNGEDARLCHILEEVAGLPPKRSSHSQEKLLQNQVQKLIQELKEQKERAQWEKEHLEERLLQTTRTLQEMEAELQNLQKSCLLQLARSSWVGRMLRSQTGSVEVVTAETLMDPSDLSENIQAPTGEGFRLEDVDWNSVARRYPNLFTNMEPSSKQKQPRPWPQLDTGSPESSGKHSERHHKTVEWGSLPCLNTSSSGGADSDSSSCRPGLPSF

SEQ ID NO: 30883 - protein, 247 aa, Homo sapiens
  REGION 1..247: note = ENSP00000435529
MAPKSGQEVEETEEEALLSPTEQESVSGHLGPPAGAPAAPETPTCLPDTTPHPAPVVCSADPQLALESLDPRTLRLLWRQRELEIQALRWAIQNGEDARLCHILEEVAGLPPKRSSHSQEKLLQNQVQKLIQELKEQKERAQWEKEHLEERLLQTTRTLQEMEAELQNLQKSCLLQLARSSWVGRMLRSQTGSVEVVTAETLMDPSDLSENIQAPTGEGFRLEDVDWNSVARRYPNLFTNMEPSSKQ

SEQ ID NO: 30884 - protein, 55 aa, Homo sapiens
  REGION 1..55: note = ENSP00000401967
MSSAIERKSLDPSESLKGSQVRCPVWPKTISDPRCWSHSGEAVPDAWPSLQGTSG

SEQ ID NO: 30885 - protein, 158 aa, Homo sapiens
  REGION 1..158: note = ENSP00000379175
MSSAIERKSLDPSEEPVDEVLQIPPSLLTCGGCQQNIGDRYFLKAIDQYWHEDCLSCDLCGCRLGEVGRRLYYKLGRKLCRRDYLRLFGQDGLCASCDKRIRAYEMTMRVKDKVYHLECFKCAACQKHFCVGDRYLLINSDIVCEQDIYEWTKINGMI

SEQ ID NO: 30886 - protein, 227 aa, Homo sapiens
  REGION 1..227: note = ENSP00000257818
MEGSAVTVLERGGASSPAERRSKRRRRSGGDGGGGGGARAPEGVRAPAAGQPRATKGAPPPPGTPPPSPMSSAIERKSLDPSEEPVDEVLQIPPSLLTCGGCQQNIGDRYFLKAIDQYWHEDCLSCDLCGCRLGEVGRRLYYKLGRKLCRRDYLRLFGQDGLCASCDKRIRAYEMTMRVKDKVYHLECFKCAACQKHFCVGDRYLLINSDIVCEQDIYEWTKINGMI

SEQ ID NO: 30887 - protein, 211 aa, Homo sapiens [sequence omitted]

SEQ ID NO: 30888 - protein, 54 aa, Homo sapiens
  REGION 1..54: note = ENSP00000457686
MPVRNVYKKEKARVITEEEKNFKAFASLRMARANARLFGIRAKRAKEAAEQDVE

SEQ ID NO: 30889 - protein, 211 aa, Homo sapiens [sequence omitted]

SEQ ID NO: 30890 - protein, 63 aa, Homo sapiens
  REGION 1..63: note = ENSP00000457174
MAPSRNGMVLKPHFHKDWQRRVATWFNQPARKIRRRWPGPSAFLWIRGGGTSPRSPCRPTCSG

SEQ ID NO: 30891 - protein, 164 aa, Homo sapiens
  REGION 1..164: note = ENSP00000438959
MAPSRNGMVLKPHFHKDWQRRVATWFNQPARKIRRRKARQAKARRIAPRPASGPIRPIVRCPTVRYHTKVRAGRGFSLEELRVAGIHKKGDSSAEELKLATQLTGPVMPVRNVYKKEKARVITEEEKNFKAFASLRMARANARLFGIRAKRAKEAAEQDVEKKK

SEQ ID NO: 30892 - protein, 126 aa, Homo sapiens
  REGION 1..126: note = ENSP00000464612
MAPSRNGMVLKPHFHKDWQRRVATWFNQPARKIRRRKARQAKARRIAPRPASGPIRPIVRCPTVRYHTKVRAGRGFSLEELRVAGIHKKVARTIGISVDPRRRNKSTESLQANVQRLKEYRSKLIL

SEQ ID NO: 30893 - protein, 211 aa, Homo sapiens [sequence omitted]

SEQ ID NO: 30894 - protein, 78 aa, Homo sapiens
  REGION 1..78: note = ENSP00000462380
  VARIANT 1: note = Any amino acid
XPVMPVRNVSEHLLKSRLQTRSVGEHVYKKEKARVITEEEKNFKAFASLRMARANARLFGIRAKRAKEAAEQDVEKKK

SEQ ID NO: 30895 - protein, 305 aa, Homo sapiens
  REGION 1..305: note = ENSP00000489863
MASNRQRSLRGPSHPSHMEEPFLQMVQASESLPPSQTWAQREFFLPSESWEFPGFTRQAYHQLALKLPPCTDMKSKVRQRLIHPWKGGAQHTWGFHTWLDVCRLPATFPTQPDRPYDSNVWRWLTDSNAHRCPPTEHPIPPPSWMGQNSFLTFIHCYPTFVDMKRKKQVIFRTVKELKEVEKLKLRSEARAPPLDAQGNIQPPASFKKYRHISAGGRFEPQGLQLMPNPFPNNFARSWPCPNPLPHYQEKVLKLALLPSAPLSQDLIRDFQTLIKDRTALPLHHLSKAQASKSPARKRKRRPGHF

SEQ ID NO: 30896 - protein, 305 aa, Homo sapiens; identical to SEQ ID NO: 30895
  REGION 1..305: note = ENSP00000489863

SEQ ID NO: 30897 - protein, 220 aa, Homo sapiens
  REGION 1..220: note = ENSP00000490515
MFQLLIPLLLALKGHAQDNPENVQCGHRPAFPNSSWLPFHERLQVQNGECPWQVSIQMSRKHLCGGSILHWWWVLTAAHCFRRTLLDMAVVNVTVVMGTRTFSNIHSERKQVQKEEERTWDWCWMAQWVTTNGYDQYDDLNMHLEKLRVVQISRKECAKRINQLSRNMICAWNEPGTNGIFKVLTPAQPPPPSRETVGHLWFVLFMEPRDSSKWVSSVGA

SEQ ID NO: 30898 - protein, 133 aa, Homo sapiens
  REGION 1..133: note = ENSP00000490582
MAVVNVTVVMGTRTFSNIHSERKQVQKEEERTWDWCWMAQWVTTNGYDQYDDLNMHLEKLRVVQISRKECAKRINQLSRNMICAWNEPGTNGIFKVLTPAQPPPPSRETVGHLWFVLFMEPRDSSKWVSSVGA

SEQ ID NO: 30899 - protein, 79 aa, Homo sapiens
  REGION 1..79: note = ENSP00000421046
  VARIANT 1: note = Any amino acid
XSDDTTTWNSCLPPPVNQGRHYQKEMNPPSPSNPRDWLNMLSPPIVPPSQQPAEQRPDSCESLSVQEEMSGSATAILQL

SEQ ID NO: 30900 - protein, 26 aa, Homo sapiens
  REGION 1..26: note = ENSP00000419245
  VARIANT 1: note = Any amino acid
XPPIVPPSQQPAEQRPDSCESLSVQG

SEQ ID NO: 30901 - protein, 186 aa, Homo sapiens
  REGION 1..186: note = ENSP00000419949
NNFEMSLLPTTCLSPTGRRCGSCQKTPEPVIKAKDLSAQQVPASLNKTSLKEISGERLSSIPEASEYDWRNYQPSQMSESELQMLASLRWQQNEELEDAGTSHGLSASQVDNCNVSISTSSDDTTTWNSCLPPPVNQGRHYQKEMNPPSPSNPRDWLNMLSPPIVPPSQQPAEQRPDSCESLSVQG

SEQ ID NO: 30902 - protein, 44 aa, Homo sapiens
  REGION 1..44: note = ENSP00000417917
  VARIANT 1: note = Any amino acid
XDWLNMLSPPIVPPSQQPAEQRPDSCESLSVQDISHTPDQAVTR

SEQ ID NO: 30903 - protein, 563 aa, Homo sapiens
  REGION 1..563: note = ENSP00000295966
MIKRKIWCNLCIDLVAFTSEIFKGAVFQSLDGIVVSANCKLRKIFTLKSKPQDTADKDAVYGVPFSTDEPTDIIPRSCQLMTDVPHVTQLLNMTKLRQTEIKFGGHPLRSAESDQFINRGTSITRNSKNQDVCHIAFGSKVLGPPPLSGRRNNMKISSETVRSVGSKNNRSCQPSTVEKCVNGTEMSALLIPESEEQGNKENIHQIKQTVPIHAANLHIMHPHPPQEPSADKNNNRRRLRLKSTSRERTETPSGSSSGNNRIEDKASTILTTVSQQGAELLNSGTLGPQSPDQSDEWIFPENADHISYLASSRQSLLLGDDSCNPSHLWLEASKESEHDQQAEESQSVPKDIFTFSSRPRSAPHGKTQTMSPEELSFILDLKEDNSVTSRDTQSEDDFYGGDSSEEEYDWRNYQPSQMSESELQMLASLRWQQNEELEDAGTSHGLSASQVDNCNVSISTSSDDTTTWNSCLPPPVNQGRHYQKEMNPPSPSNPRDWLNMLSPPIVPPSQQPAEQRPDSCESLSVQGEEDLSVEEDEEVLTLLYDPCLNCYFDPQTGKYYELV

SEQ ID NO: 30904 - protein, 689 aa, Homo sapiens
  REGION 1..689: note = ENSP00000417122
MIKRKIWCNLCIDLVAFTSEIFKGAVFQSLDGIVVSANCKLRKIFTLKSKPQDTADKDAVYGVPFSTDEPTDIIPRSCQLMTDVPHVTQLLNMTKLRQTEIKFGGHPLRSAESDQFINRGTSITRNSKNQDVCHIAFGSKVLGPPPLSGRRNNMKISSETVRSVGSKNNRSCQPSTVEKCVNGTEMSALLIPESEEQGNKENIHQIKQTVPIHAANLHIMHPHPPQEPSADKNNNRRRLRLKSTSRERTETPSGSSSGNNRIEDKASTILTTVSQQGAELLNSGTLGPQSPDQSDEWIFPENADHISYLASSRQSLLLGDDSCNPSHLWLEASKESEHDQQAEESQSVPKDIFTFSSRPRSAPHGKTQTMSPEELSFILDLKEDNSVTSRDTQSEDDFYGGDSSEEGNHSIQGSRGPTTGPSELTQLTLESLLGKAAKRTSKEYLRSAYTEAGATESQDSSMEQIDRNNFEMSLLPTTCLSPTGRRCGSCQKTPEPVIKAKDLSAQQVPASLNKTSLKEISGERLSSIPEASEYDWRNYQPSQMSESELQMLASLRWQQNEELEDAGTSHGLSASQVDNCNVSISTSSDDTTTWNSCLPPPVNQGRHYQKEMNPPSPSNPRDWLNMLSPPIVPPSQQPAEQRPDSCESLSVQGEEDLSVEEDEEVLTLLYDPCLNCYFDPQTGKYYELV

SEQ ID NO: 30905 - protein, 196 aa, Homo sapiens
  REGION 1..196: note = ENSP00000419142
MFKNEYQGGAFVEIFSAQGKNPGAKWKILGSPSVIWKEFDKEVKSFVFVLEGSSQTNKIQLPKENKQSLGLIQRFLVLQIYVPLGQDFSTELLITDLGNIKRRLYLSTVHKELSSTPLHAKIPLFMIKRKIWCNLCIDLVAFTSEIFKGAVFQSLDGIVVSANCKLRKIFTLKSKPQDTADKDGMFSCLWCSLFNR

SEQ ID NO: 30906 - protein, 40 aa, Homo sapiens
  REGION 1..40: note = ENSP00000417881
SISTSSDDTTTWNSCLPPPVNQGRHYQKEMNPPSPSNPRL

SEQ ID NO: 30907 - protein, 334 aa, Homo sapiens
  REGION 1..334: note = ENSP00000417271
MTDVPHVTQLLNMTKLRQTEIKFGGHPLRSAESDQFINRGTSITRNSKNQDVCHIAFGSKVLGPPPLSGRRNNMKISSETVRSVGSKNNRSCQPSTVEKCVNGTEMSALLIPESEEQGNKENIHQIKQTVPIHEPSADKNNNRRRLRLKSTSRERTETPSGSSSGNNRIEDKASTILTTVSQQGAELLNSGTLGPQSPDQSDEWIFPENADHISYLASSRQSLLLGDDSCNPSHLWLEASKESEHDQQAEESQSVPKDIFTFSSRPRSAPHGKTQTMSPEELSFILDLKEDNSVTSRDTQSEDDFYGGDSSEEVHCLISEVVLKHSCFLSSNKH

SEQ ID NO: 30908 - protein, 191 aa, Homo sapiens
  REGION 1..191: note = ENSP00000419028
MFKNEYQGGAFVEIFSAQGKNPGAKWKILGSPSVIWKEFDKEVKSFVFVLEGSSQTNKIQLPKENKQSLGLIQRFLVLQIYVPLGQDFSTELLITDLGNIKRRLYLSTVHKELSSTPLHAKIPLFMIKRKIWCNLCIDLVAFTSEIFKGAVFQSLDGIVVSANCKLRKIFTLKSKPQDTADKDGNSAPWNS

SEQ ID NO: 30909 - protein, 74 aa, Homo sapiens
  REGION 1..74: note = ENSP00000418832
MIKRKIWCNLCIDLVAFTSEIFKGAVFQSLDGIVVSANCKLRKIFTLKSKPQDTADKDGMFRLLSRFFNSLMYF

SEQ ID NO: 30910 - protein, 166 aa, Homo sapiens
  REGION 1..166: note = ENSP00000417639
MFKNEYQGGAFVEIFSAQGKNPGAKWKILGSPSVIWKEFDKEVKSFVFVLEGSSQTNKIQLPKENKQSLGLIQRFLVLQIYVPLGQDFSTELLITDLGNIKRRLYLSTVHKELSSTPLHAKIPLFMIKRKIWCNLCIDLVAFTSEIFKGAVFQSLDGIVVSANCKL

SEQ ID NO: 30911 - protein, 282 aa, Homo sapiens
  REGION 1..282: note = ENSP00000383226
MAASTMSVCSSACSDSWQVDACPESCCEPHCCALSCCAPAPCLTLVCTPVSRVSSPCCQAACEPSPCQSGCTSSCTPSCCQQSSCQPACCTSSPCQQACCVPVCCKPVCCLPTCSKDSSSCCQQSSCQPTCCASSSSQQSCCVPVCCKPVCYVPTCSEDSSSCCQQSSCHPACCTSSPCQQACCVPVRCKPVCCKPICCVPVCSGASTSCCQQSSCQPACCTTSCCRPSSSVSLLCRPVCRPACCMPVSSCCAPASSCQASCCRPASCVSLLCRPACSRPAC

SEQ ID NO: 30912 - protein, 251 aa, Homo sapiens
  REGION 1..251: note = ENSP00000369438
MAASTMSICSSACTDSWRVVDCPESCCEPCCCAPAPSLTLVCTPVSCVSSPCCQTACEPSACQSGYTSSCTTPCYQQSSCQPDCCTSSPCQQACCVPVCCVPVCCVPVCNKPVCFVPTCSESSPSCCQQSSCQPTCCTSSPCQQACCVPVCSKSVCYVPVCSGASTSCCQQSSCQPACCTASCCRPSSSVSLLCHPVCKSTCCVPVPSCGASASSCQPSCCRTASCVSLLCRPVCSRPACYSLCSGQKSSC

SEQ ID NO: 30913 - protein, 298 aa, Homo sapiens
  REGION 1..298: note = ENSP00000334197
MAASTMSVCSSAYSDSWQVDDCPESCCEPPCSAPSCCAPAPSLSLVCTPVSCVSSPCCQAACEPSACQSGCTSSCTPSCCQQSSCQPACCTSSPCQQACCVPVCCKTVCCKPVCCVPVCCGAASSCCRQSSCQPACCASSSCQPACCVPVCCKPVCCVSTCSEDSSSCCQQSSCQPACCTSSSYQQACCVPVCCKTVYCKPICCVPVCSRASSSRCQQPSCQPACCTTSCCRPSSSVSLLCHPVCRSTCCVPVSSCCAPTSSCQSSCCRPASCVSLLCRPASSRLACYSLCSGKKSSC

SEQ ID NO: 30914 - protein, 245 aa, Homo sapiens
  REGION 1..245: note = ENSP00000383216
MSVCSSDLSYGSRVCLPGSCDSCSDSWQVDDCPESCCEPPCCAPAPCLSLVCTPVSRVSSPCCRVTCEPSPCQSGCTSSCTPSCCQQSSCQPACCTSSPCQQACCVPVCCKTVCCKPVCCMPVCCGPSSSCCQQSSCQPACCISSPCQQSCCVPVCCKPICCVPVCSGASSLCCQQSSCQPACCTTSCCRPSSSVSLLCRPVCRPARRVPVPSCCVPTSSCQPSCGRLASCGSLLCRPTCSRLAC

SEQ ID NO: 30915 - protein, 94 aa, Homo sapiens
  REGION 1..94: note = ENSP00000482575
CTSSCTPSCCQQSSCQPACCTSSPCQQACCVPVCCKTVCCKPSSCQPACCISSPCQQSCCVPVCCKPICCVPPACCTTSCCRPSSSVSLLCRPV

SEQ ID NO: 30916 - protein, 255 aa, Homo sapiens
  REGION 1..255: note = ENSP00000375479
MAASTMSICSSACTNSWQVDDCPESCCELPCGTPSCCAPAPCLTLVCTPVSCVSSPCCQAACEPSACQSGCTSSCTPSCCQQSSCQPACCTSSPCQQACCVPVCCKPVCCVPVCCGASSCCQQSSCQPACCASSSCQQSCRVPVCCKAVCCVPTCSESSSSCCQQSSCQPACCTSSPCQQSCCVSVCCKPVCCKSICCVPVCSGASSPCCQQSSCQPACCTSSCCRPSSSVSLLCRPVCSRPASCSFSSGQKSSC

SEQ ID NO: 30917 - protein, 221 aa, Homo sapiens
  REGION 1..221: note = ENSP00000375478
MATSTMSVCSSAYSDSWQVDACPESCCEPPCCATSCCAPAPCLTLVCTPVSCVSSPCCQAACEPSPCQSGCTSSCTPSCCQQSSCQPACCTSSPCQQACCVPVCCKPVCCVPVCCKPVCCKPICCVPVCSGASSSCCQQSSRQPACCTTSCCRPSSSVSLLCRPVCRSTCCVPIPSCCAPASTCQPSCCRPASCVSLLCRPTCSRLSSACCGLSSGQKSSC

SEQ ID NO: 30918 - protein, 401 aa, Homo sapiens
  REGION 1..401: note = ENSP00000383225
MSVCSSDLSYSSRVCLPGSCDSCSDSWQVDDCPESCCEPPCCAPSCCAPAPCLSLVCTPVSRVSSPCCPVTCEPSPCQSGCTSSCTPSCCQQSSCQLACCASSPCQQACCVPVCCKTVCCKPVCCVPVCCGDSSCCQQSSCQSACCTSSPCQQACCVPICCKPVCSGISSSCCQQSSCVSCVSSPCCQAVCEPSPCQSGCISSCTPSCCQQSSCQPACCTSSSCQQACCVPVCCKTVCCKPVCSEDSSSCCQQSSCQPACCTSSPCQQACCVPVCCKPVCCKPVCSVPICSGASSLCCQQSSCQPACCTSSQSQQGCCVPVCCKPVSCVPVCSGASSSCCQQSSCQPACCTTSCCRPSSSVSLLCRPVCRPACCVPVPSCCAPTSSCQPSCCRPASCVSLL

SEQ ID NO: 30919 - protein, 370 aa, Homo sapiens
  REGION 1..370: note = ENSP00000484068
TAASTMSVCSSDLSYSSRVCLPGSCDSCSDSWQVDDCPESCCEPPCCAPSCCAPAPCLSLVCTPVSRVSSPCCPVTCEPSPCQSGCTSSCTPSCCQQSSCQLACCASSPCQQACCVPVCCKTVCCKPVCCVPVCCGDSSCCQQSSCQSACCTSSPCQQACCVPICCKPVCSGISSSCCQQSSCVSCVSSPCCQAVCEPSPCQSGCISSCTPSCCQQSSCQPACCTSSSCQQACCVPVCCLPVCCAPTCSEDSYSCCQQSSCQPACCTSSPCQQACCVPVCSGASTSCCQQSSCQPACCTASCCRPSSSVSLLCHPVCKSTCCVPVPSCGASASSCQPSCCRTASCVSLLCRPVCSRPACYSLCSGQKSSC

SEQ ID NO: 30920 - protein, 198 aa, Homo sapiens
  REGION 1..198: note = ENSP00000481165
AASTMSVCSSSCSDSWQVDDCPESCCEPPCCAPSCCAPAPCLSLVCTPVSRVSSPCCPVTCEPSPCQSGCTSSCTPSCCQQSSCQPACCTSSPCQQACCVPVCCKPVCCKPVCCCVPVCCKPVSCVPVCSGASSSCCQQSSCQPACCTTSCCRPSSSVSLLCRPVCRPACCVPVPSCCAPTSSCQPSCCRPASCVSLL

SEQ ID NO: 30921 - protein, 271 aa, Homo sapiens
  REGION 1..271: note = ENSP00000383223
MAACTMSVCSSACSDSWRVDDCPESCCEPPCGTAPCLTLVCTPVSCVSSPCCQAACEPSPCQSGCTSSCTPSCCQPACCASSPCQQACCVPVCCKPVCCLPTCSKDSSSCCQQSSCQPTCCASSSCQQSCCVPVCCKPVCCVPTCSEDSSSCCQHSSCQPTCCTSSPCQQSCYVPVCCKPVCCKPICCVPVCSGASTSCCQQSSCQPACCTTSCCRPSSSVSLLCRPICRPACCLPISSCCAPASSYQASCCRPASCVSLLCRPACSPLAC

SEQ ID NO: 30922 - protein, 365 aa, Homo sapiens
  REGION 1..365: note = ENSP00000383219
MAASTMSVCSSDLSYGSRVCLPGSCDSCSDSWQVDDCPESCCEPPCCAPAPCLSLVCTPVSRVSSPCCPVTCEPSPCQSGCTSSCTPSCCQQSSCQLACCASSPCQQACCVPVCCKTVCCKPVCCVSVCCGDSSCCQQSSCQSACCTSSPCQQACCVPVCCKPVCSGISSSCCQQSSCVSCVSSPCCQAVCEPSPCQSGCTSSCTPSCCQQSSCQPTCCTSSPCQQACCVPVCCVPVCCVPTCSEDSSSCCQQSSCQPACCTSSPCQHACCVPVCSGASTSCCQQSSCQPACCTASCCRSSSSVSLLCHPVCKSTCCVPVPSCGASASSCQPSCCRTASCVSLLCRPMCSRPACYSLCSGQKSSC

SEQ ID NO: 30923 - protein, 370 aa, Homo sapiens
  REGION 1..370: note = ENSP00000476821
MAASTMSVCSSDLSYGSRVCLPGSCDSCSDSWQVDDCPESCCEPPCCAPAPCLSLVCTPVSYVSSPCCRVTCEPSPCQSGCTSSCTPSCCQQSSCQLACCASSPCQQACCVPVCCKTVCCKPVYCVPVCSGDSSCCQQSSCQSACCTSSPCQQACCVPICCKPVCSGISSSCCQQSSCVSCVSSPCCQAVCEPSPCQSGCISSCTPSCCQQSSCKPACCTSSPCQQACCVPVCCKPVCCVPTCSDDSGSCCQPACCTSSQSQQGCCVPVCCKPVCCVPVCSGASTSCCQQSSCQPACCTTSCCRPSSSVSLLCRPVCRPACCVPVPSCCAPTSSCQASCCRPASCVSLLCRPACSRPACCGPTSTQKSSC

SEQ ID NO: 30924 - protein, 259 aa, Homo sapiens
  REGION 1..259: note = ENSP00000335565
MADACCTRTYVIAASTMSVCSSDVGHVSRVSSPSTCTGSSWQVDNCQESCCEPRSCASSCCTPSCCAPAPCLALVCAPVSCEPSPCQSGCTDSCTPSCCQQSSCQPACCTSSPCQQACCVPVCCKSNCCKPVCCVSICSGASSPCCQQSSCQSACCTFSPCQQACCVPICCKPICCVPVCSGASSLCCQKSSCQPACCTTSCCRPSSSVSLLCRPVCRPACCVPVPSCCVPASSCQPSCCHPASCLSFLCRPACSRLAC

SEQ ID NO: 30925 - protein, 292 aa, Homo sapiens
  REGION 1..292: note = ENSP00000381009
MAASTMSIRSSAYSDSWQVDDCPESCCEPPCCATSCCAPAPCLTLVCTPVSRVSSPCCQVTCEPSPCQSGCTSSCTPSCCQQSSCQPAYCTSSPCQQACCVPVCCKPVCCVPVCCGASSCCQQSSYQPACCASSSCQPACCVPVCCKPVCCAPTCSEDSYSCCQQSSCQPACCTSSPCQQSYCVPVCCKPVCCKPICCVPVCSGASSLCCQQSGCQPACCTTSCCRPSSSVSLLCRPVCRPACCVPVSSCCAPTSSRQPSYCRQASCVSLLCRPVCSRPACYSFSSGQKSSC

SEQ ID NO: 30926 - protein, 192 aa, Homo sapiens [sequence omitted]

SEQ ID NO: 30927 - protein, 754 aa, Homo sapiens
  REGION 1..754: note = ENSP00000377086
MSPEPVPPPPPPQCPGCDRAEPIAQRLEEGDEAFRAGDYEMAAELFRSMLAGLAQPDRGLCLRLGDALARAGRLPEALGAFRGAARLGALRPEELEELAGGLVRAVGLRDRPLSAENPGGEPEAPGEGGPAPEPRAPRDLLGCPRCRRLLHKPVTLPCGLTVCKRCVEPGPARPQVRRVNVVLSGLLEKCFPAECRLRRLAGQARSLQRQQQPEAALLRCDQALELAPDDNSLLLLRAELYLTMKNYEQALQDASAACQNEPLLIKGHQVKAQALSGLGRSKEVLKEFLYCLALNPECNSVKKEAQKVMCEVLFSATANVHENLTSSIQSRLKAQGHSHMNAQALLEEGDAGSSENSSEKSDMLGNTNSSVLYFILGLHFEEDKKALESILPTAPSAGLKRQFPDDVEDAPDLNAPGKIPKKDLSLQRSPNSETEESQGLSLDVTDFECALCMRLLFEPVTTPCGHTFCLKCLERCLDHAPHCPLCKDKLSELLASRNFNITVLAEELIFRYLPDELSDRKRIYDEEMSELSNLTRDVPIFVCAMAFPTVPCPLHVFEPRYRLMIRRCMETGTKRFGMCLSAEHAGLSEYGCMLEIKDVRTFPDGSSVVDAIGISRFRVLSHRHRDGYNTADIEYLEDEKVEGPEYEELAALHDSVHQQSVSWFASLQDRMKEQILSHFGVMPDREPEPQSNPSGPAWSWWILAVLPLERKAQLAILGMTSLKERLLAIRRILVIITRKMNSRQELANARERNN

SEQ ID NO: 30928 - protein, 511 aa, Homo sapiens
  REGION 1..511: note = ENSP00000386823
MKNYEQALQDASAACQNEPLLIKGHQVKAQALSGLGRSKEVLKEFLYCLALNPECNSVKKEAQKVMCEVLFSATANVHENLTSSIQSRLKAQGHSHMNAQALLEEGDAGSSENSSEKSDMLGNTNSSVLYFILGLHFEEDKKALESILPTAPSAGLKRQFPDDVEDAPDLNAPGKIPKKDLSLQRSPNSETEESQGLSLDVTDFECALCMRLLFEPVTTPCGHTFCLKCLERCLDHAPHCPLCKDKLSELLASRNFNITVLAEELIFRYLPDELSDRKRIYDEEMSELSNLTRDVPIFVCAMAFPTVPCPLHVFEPRYRLMIRRCMETGTKRFGMCLSAEHAGLSEYGCMLEIKDVRTFPDGSSVVDAIGISRFRVLSHRHRDGYNTADIEYLEDEKVEGPEYEELAALHDSVHQQSVSWFASLQDRMKEQILSHFGVMPDREPEPQSNPSGPAWSWWILAVLPLERKAQLAILGMTSLKERLLAIRRILVIITRKMNSRQELANARERNN

SEQ ID NO: 30929 - protein, 774 aa, Homo sapiens
  REGION 1..774: note = ENSP00000373783
MERPLCSHLCSCLAMLALLSPLSLAQYDSWPHYPEYFQQPAPEYHQPQAPANVAKIQLRLAGQKRKHSEGRVEVYYDGQWGTVCDDDFSIHAAHVVCRELGYVEAKSWTASSSYGKGEGPIWLDNLHCTGNEATLAACTSNGWGVTDCKHTEDVGVVCSDKRIPGFKFDNSLINQIENLNIQVEDIRIRAILSTYRKRTPVMEGYVEVKEGKTWKQICDKHWTAKNSRVVCGMFGFPGERTYNTKVYKMFASRRKQRYWPFSMDCTGTEAHISSCKLGPQVSLDPMKNVTCENGLPAVVSCVPGQVFSPDGPSRFRKAYKPEQPLVRLRGGAYIGEGRVEVLKNGEWGTVCDDKWDLVSASVVCRELGFGSAKEAVTGSRLGQGIGPIHLNEIQCTGNEKSIIDCKFNAESQGCNHEEDAGVRCNTPAMGLQKKLRLNGGRNPYEGRVEVLVERNGSLVWGMVCGQNWGIVEAMVVCRQLGLGFASNAFQETWYWHGDVNSNKVVMSGVKCSGTELSLAHCRHDGEDVACPQGGVQYGAGVACSETAPDLVLNAEMVQQTTYLEDRPMFMLQCAMEENCLSASAAQTDPTTGYRRLLRFSSQIHNNGQSDFRPKNGRHAWIWHDCHRHYHSMEVFTHYDLLNLNGTKVAEGHKASFCLEDTECEGDIQKNYECANFGDQGITMGCWDMYRHDIDCQWVDITDVPPGDYLFQVVINPNFEVAESDYSNNIMKCRSRYDGHRIWMYNCHIGGSFSEETEKKFEHFSGLLNNQLSPQ

SEQ ID NO: 30930 - protein, 101 aa, Homo sapiens
  REGION 1..101: note = ENSP00000473322
MERPLCSHLCSCLAMLALLSPLSLAQYDSWPHYPEYFQQPAPEYHQPQAPANVAKIQLHLVLARRCQQQQSGHEWSEVLGNGAVPGALPPRRGGRGLPPGR

SEQ ID NO: 30931 - protein, 207 aa, Homo sapiens
  REGION 1..207: note = ENSP00000427907
  VARIANT 1: note = Any amino acid
XENGLPAVVSCVPGQVFSPDGPSRFRKAYKPEQDRVSLQQPLVRLRGGAYIGEGRVEVLKNGEWGTVCDDKWDLVSASVVCRELGFGSAKEAVTGSRLGQGIGPIHLNEIQCTGNEKSIIDCKFNAESQGCNHEEDAGVRCNTPAMGLQKKLRLNGGRNPYEGRVEVLVERNGSLVWGMVCGQNWGIVEAMVVCRQLGLGFASNAFQ

SEQ ID NO: 30932 - protein, 67 aa, Homo sapiens
  REGION 1..67: note = ENSP00000427826
RIRAILSTYRKRTPVMEGYVEVKEGKTWKQICDKHWTAKNSRVVCGMFGFPGERTYNTKVYNNPWCD

SEQ ID NO: 30933 - protein, 258 aa, Homo sapiens
  REGION 1..258: note = ENSP00000427883
MEASKVLDKSKAAAIGDQSRPLCSRKGLSGGGSGGGPPWRARSQPGHCGSLKPKSSCCFCTPPVPPSCAGPLRGIISPKTGMERPLCSHLCSCLAMLALLSPLSLAQYDSWPHYPEYFQQPAPEYHQPQAPANVAKIQLRLAGQKRKHSEGRVEVYYDGQWGTVCDDDFSIHAAHVVCRELGYVEAKSWTASSSYGKGEGPIWLDNLHCTGNEATLAACTSNGWGVTDCKHTEDVGVVCSDKRIPGFKFDNSLINQIE

SEQ ID NO: 30934 - protein, 218 aa, Homo sapiens
  REGION 1..218: note = ENSP00000429778
MEASKVLDKSKAAESSCCFCTPPVPPSCAGPLRGIISPKTGMERPLCSHLCSCLAMLALLSPLSLAQYDSWPHYPEYFQQPAPEYHQPQAPANVAKIQLRLAGQKRKHSEGRVEVYYDGQWGTVCDDDFSIHAAHVVCRELGYVEAKSWTASSSYGKGEGPIWLDNLHCTGNEATLAACTSNGWGVTDCKHTEDVGVVCSDKRIPGFKFDNSLINQIE

SEQ ID NO: 30935 - protein, 151 aa, Homo sapiens
  REGION 1..151: note = ENSP00000430519
MERPLCSHLCSCLAMLALLSPLSLAQYDSWPHYPEYFQQPAPEYHQPQAPANVAKIQLRLAGQKRKHSEGRVEVYYDGQWGTVCDDDFSIHAAHVVCRELGYVEAKSWTASSSYGKGEGPIWLDNLHCTGNEATLAACTSNGWGVTDCKHT

SEQ ID NO: 30936 - protein, 139 aa, Homo sapiens
  REGION 1..139: note = ENSP00000428497
MERPLCSHLCSCLAMLALLSPLSLAQYDSWPHYPEYFQQPAPEYHQPQAPANVAKIQLRLAGQKRKHSEGRVEVYYDGQWGTVCDDDFSIHAAHVVCRELGYVEAKSWTASSSYGKGEGPIWLDNLHCTGNEATLAACT

SEQ ID NO: 30937 - protein, 95 aa, Homo sapiens
  REGION 1..95: note = ENSP00000428933
MERPLCSHLCSCLAMLALLSPLSLAQYDSWPHYPEYFQQPAPEYHQPQAPANVAKIQLRLAGQKRKHSEGRVEVYYDGQWGTVCDDDFSIHAAHV

SEQ ID NO: 30938 - protein, 364 aa, Homo sapiens
  REGION 1..364: note = ENSP00000363553
MAAISTSIPVISQPQFTAMNEPQCFYNESIAFFYNRSGKHLATEWNTVSKLVMGLGITVCIFIMLANLLVMVAIYVNRRFHFPIYYLMANLAAADFFAGLAYFYLMFNTGPNTRRLTVSTWLLRQGLIDTSLTASVANLLAIAIERHITVFRMQLHTRMSNRRVVVVIVVIWTMAIVMGAIPSVGWNCICDIENCSNMAPLYSDSYLVFWAIFNLVTFVVMVVLYAHIFGYVRQRTMRMSRHSSGPRRNRDTMMSLLKTVVIVLGAFIICWTPGLVLLLLDVCCPQCDVLAYEKFFLLLAEFNSAMNPIIYSYRDKEMSATFRQILCCQRSENPTGPTEGSDRSASSLNHTILAGVHSNDHSVV

SEQ ID NO: 30939 - protein, 364 aa, Homo sapiens; identical to SEQ ID NO: 30938
  REGION 1..364: note = ENSP00000363552

SEQ ID NO: 30940 - protein, 364 aa, Homo sapiens; identical to SEQ ID NO: 30938
  REGION 1..364: note = ENSP00000351755

SEQ ID NO: 30941 - protein, 182 aa, Homo sapiens
  REGION 1..182: note = ENSP00000401810
MAAISTSIPVISQPQFTAMNEPQCFYNESIAFFYNRSGKHLATEWNTVSKLVMGLGITVCIFIMLANLLVMVAIYVNRRFHFPIYYLMANLAAADFFAGLAYFYLMFNTGPNTRRLTVSTWLLRQGLIDTSLTASVANLLAIAIERHITVFRMQLHTRMSNRRVVVVIVVIWTMAIVMGAIP

SEQ ID NO: 30942 - protein, 346 aa, Homo sapiens
  REGION 1..346: note = ENSP00000445697
MNEPQCFYNESIAFFYNRSGKHLATEWNTVSKLVMGLGITVCIFIMLANLLVMVAIYVNRRFHFPIYYLMANLAAADFFAGLAYFYLMFNTGPNTRRLTVSTWLLRQGLIDTSLTASVANLLAIAIERHITVFRMQLHTRMSNRRVVVVIVVIWTMAIVMGAIPSVGWNCICDIENCSNMAPLYSDSYLVFWAIFNLVTFVVMVVLYAHIFGYVRQRTMRMSRHSSGPRRNRDTMMSLLKTVVIVLGAFIICWTPGLVLLLLDVCCPQCDVLAYEKFFLLLAEFNSAMNPIIYSYRDKEMSATFRQILCCQRSENPTGPTEGSDRSASSLNHTILAGVHSNDHSVV

SEQ ID NO: 30943 - protein, 544 aa, Homo sapiens
  REGION 1..544: note = ENSP00000262134
MSRCAQAAEVAATVPGAGVGNVGLRPPMVPRQASFFPPPVPNPFVQQTQIGSARRVQIVLLGIILLPIRVLLVALILLLAWPFAAISTVCCPEKLTHPITGWRRKITQTALKFLGRAMFFSMGFIVAVKGKIASPLEAPVFVAAPHSTFFDGIACVVAGLPSMVSRNENAQVPLIGRLLRAVQPVLVSRVDPDSRKNTINEIIKRTTSGGEWPQILVFPEGTCTNRSCLITFKPGAFIPGVPVQPVLLRYPNKLDTVTWTWQGYTFIQLCMLTFCQLFTKVEVEFMPVQVPNDEEKNDPVLFANKVRNLMAEALGIPVTDHTYEDCRLMISAGQLTLPMEAGLVEFTKISRKLKLDWDGVRKHLDEYASIASSSKGGRIGIEEFAKYLKLPVSDVLRQLFALFDRNHDGSIDFREYVIGLAVLCNPSNTEEIIQVAFKLFDVDEDGYITEEEFSTILQASLGVPDLDVSGLFKEIAQGDSISYEEFKSFALKHPEYAKIFTTYLDLQTCHVFSLPKEVQTTPSTASNKVSPEKHEESTSDKKDD

SEQ ID NO: 30944 - protein, 188 aa, Homo sapiens
  REGION 1..188: note = ENSP00000457496
  VARIANT 1: note = Any amino acid
XAPHSTFFDGIACVVAGLPSMVSRNENAQVPLIGRLLRAVQPVLVSRVDPDSRKNTINEIIKRTTSGGEWPQILVFPEGTCTNRSCLITFKPGAFIPGVPVQPVLLRYPNKLDTVTWTWQGYTFIQLCMLTFCQLFTKVEVEMFLFFWEGSSKHCLKISSFFCIFSLRRFKRRITQRTRTAHLLRLSF

SEQ ID NO: 30945 - protein, 524 aa, Homo sapiens
  REGION 1..524: note = ENSP00000317300
MSQGSPGDWAPLDPTPGPPASPNPFVHELHLSRLQRVKFCLLGALLAPIRVLLAFIVLFLLWPFAWLQVAGLSEEQLQEPITGWRKTVCHNGVLGLSRLLFFLLGFLRIRVRGQRASRLQAPVLVAAPHSTFFDPIVLLPCDLPKVVSRAENLSVPVIGALLRFNQAILVSRHDPASRRRVVEEVRRRATSGGKWPQVLFFPEGTCSNKKALLKFKPGAFIAGVPVQPVLIRYPNSLDTTSWAWRGPGVLKVLWLTASQPCSIVDVEFLPVYHPSPEESRDPTLYANNVQRVMAQALGIPATECEFVGSLPVIVVGRLKVALEPQLWELGKVLRKAGLSAGYVDAGAEPGRSRMISQEEFARQLQLSDPQTVAGAFGYFQQDTKGLVDFRDVALALAALDGGRSLEELTRLAFELFAEEQAEGPNRLLYKDGFSTILHLLLGSPHPAATALHAELCQAGSSQGLSLCQFQNFSLHDPLYGKLFSTYLRPPHTSRGTSQTPNASSPGNPTALANGTVQAPKQKGD

SEQ ID NO: 30946 - protein, 84 aa, Homo sapiens
  REGION 1..84: note = ENSP00000454422
FLPVYHPSPEESRDPTLYANNVQRVMAQALGIPATECEFVGSLPVIVVGRLKVALEPQLWELGKVLRKAGIPRVWWTSEMWPLH

SEQ ID NO: 30947 - protein, 351 aa, Homo sapiens
  REGION 1..351: note = ENSP00000478003
MTRLLDAEWWRRSEAGHLRRQVAAVLFFPEGTCSNKKALLKFKPGAFIAGVPVQPVLIRYPNSLDTTSWAWRGPGVLKVLWLTASQPCSIVDVEFLPVYHPSPEESRDPTLYANNVQRVMAQALGIPATECEFVGSLPVIVVGRLKVALEPQLWELGKVLRKAGLSAGYVDAGAEPGRSRMISQEEFARQLQLSDPQTVAGAFGYFQQDTKGLVDFRDVALALAALDGGRSLEELTRLAFELFAEEQAEGPNRLLYKDGFSTILHLLLGSPHPAATALHAELCQAGSSQGLSLCQFQNFSLHDPLYGKLFSTYLRPPHTSRGTSQTPNASSPGNPTALANGTVQAPKQKGD

SEQ ID NO: 30948 - protein, 115 aa, Homo sapiens
  REGION 1..115: note = ENSP00000428496
MVIHGWTVTGMYESWVPKLVAALYKREPDSNVIVVDWLSRAQEHYPVSAGYTKLVGQDVARFINWMEEEFNYPLDNVHLLGYSLGAHAAGIAGSLTNKKVNRITGLDPAGPNFEY

SEQ ID NO: 30949 - protein, 129 aa, Homo sapiens
  REGION 1..129: note = ENSP00000428237
MESKALLVLTLAVWLQSLTASRGGVAAADQRRDFIDIESKFALRTPEDTAEDTCHLIPGVAESVATCHFNHSSKTFMVIHGWTVTGMYESWVPKLVAALYKREPDSNVIVVDWLSRAQEHYPVSAGYTK

SEQ ID NO: 30950 - protein, 105 aa, Homo sapiens
  REGION 1..105: note = ENSP00000428557
MESKALLVLTLAVWLQSLTASRGGVAAADQRRDFIDIESKFALRTPEDTAEDTCHLIPGVAESVATCHFNHSSKTFMVIHGWTVTGMYESWVPKLVAALYKREPD

SEQ ID NO: 30951 - protein, 475 aa, Homo sapiens
  REGION 1..475: note = ENSP00000309757
MESKALLVLTLAVWLQSLTASRGGVAAADQRRDFIDIESKFALRTPEDTAEDTCHLIPGVAESVATCHFNHSSKTFMVIHGWTVTGMYESWVPKLVAALYKREPDSNVIVVDWLSRAQEHYPVSAGYTKLVGQDVARFINWMEEEFNYPLDNVHLLGYSLGAHAAGIAGSLTNKKVNRITGLDPAGPNFEYAEAPSRLSPDDADFVDVLHTFTRGSPGRSIGIQKPVGHVDIYPNGGTFQPGCNIGEAIRVIAERGLGDVDQLVKCSHERSIHLFIDSLLNEENPSKAYRCSSKEAFEKGLCLSCRKNRCNNLGYEINKVRAKRSSKMYLKTRSQMPYKVFHYQVKIHFSGTESETHTNQAFEISLYGTVAESENIPFTLPEVSTNKTYSFLIYTEVDIGELLMLKLKWKSDSYFSWSDWWSSPGFAIQKIRVKAGETQKKVIFCSREKVSHLQKGKAPAVFVKCHDKSLNKKSG

SEQ ID NO: 30952 - protein, 39 aa, Homo sapiens
  REGION 1..39: note = ENSP00000431028
MESKALLVLTLAVWLQSLTASRGGVAAADLILKLQIFKF

SEQ ID NO: 30953 - protein, 428 aa, Homo sapiens
  REGION 1..428: note = ENSP00000393602
MSHPSWLPPKSTGEPLGHVPARMETTHSFGNPSISVSTQQPPKKFAPVVAPKPKYNPYKQPGGEGDFLPPPPPPLDDSSALPSISGNFPPPPPLDEEAFKVQGNPGGKTLEERRSSLDAEIDSLTSILADLECSSPYKPRPPQSSTGSTASPPVSTPVTGHKRMVIPNQPPLTATKKSTLKPQPAPQAGPIPVAPIGTLKPQPQPVPASYTTASTSSRPTFNVQVKSAQPSPHYMAAPSSGQIYGSGPQGYNTQPVPVSGQCPPPSTRGGMDYAYIPPPGLQPEPGYGYAPNQGRYYEGYYAAGPGYGGRNDSDPTYGQQGHPNTWKREPGYTPPGAGNQNPPGMYPVTGPKKTYITDPVSAPCAPPLQPKGGHSGQLGPSSVAPSFRPEDELEHLTKKMLYDMENPPADEYFGEWGLELTSEVTILL

SEQ ID NO: 30954 - protein, 151 aa, Homo sapiens
  REGION 1..151: note = ENSP00000410340
MSHPSWLPPKSTGEPLGHVPARMETTHSFGNPSISVSTQQPPKKFAPVVAPKPKYNPYKQPGGEGDFLPPPPPPLDDSSALPSISGNFPPPPPLDEEAFKVQGNPGGKTLEERRSSLDAEIDSLTSILADLECSSPYKPRPPQSSTGSTAS

SEQ ID NO: 30955 - protein, 52 aa, Homo sapiens
  REGION 1..52: note = ENSP00000397166
MSHPSWLPPKSTGEPLGHVPARMETTHSFGNPSISVSTQQPPKKFAPVVAPK

SEQ ID NO: 30956 - protein, 93 aa, Homo sapiens
  REGION 1..93: note = ENSP00000392667
MSHPSWLPPKSTGEPLGHVPARMETTHSFGNPSISVSTQQPPKKFAPVVAPKPKYNPYKQPGGEGDFLPPPPPPLDDSSALPSISGNFPPPPP

SEQ ID NO: 30957 - protein, 65 aa, Homo sapiens
  REGION 1..65: note = ENSP00000394257
MSHPSWLPPKSTGEPLGHVPARMETTHSFGNPSISVSTQQPPKKFAPVVAPKPKYNPYKQPGGEG

SEQ ID NO: 30958 - protein, 66 aa, Homo sapiens
  REGION 1..66: note = ENSP00000397017
MSHPSWLPPKSTGEPLGHVPARMETTHSFGNPSISVSTQQPPKKFAPVVAPKPKYNPYKQPGGEGD

SEQ ID NO: 30959 - protein, 111 aa, Homo sapiens
  REGION 1..111: note = ENSP00000405138
MSHPSWLPPKSTGEPLGHVPARMETTHSFGNPSISVSTQQPPKKFAPVVAPKPKYNPYKQPGGEGDFLPPPPPPLDDSSALPSISGNFPPPPPLDEEAFKVQGNPGGKTLE

SEQ ID NO: 30960 - protein, 46 aa, Homo sapiens
  REGION 1..46: note = ENSP00000404679
MSHPSWLPPKSTGEPLGHVPARMETTHSFGNPSISVSTQQPPKKFA

SEQ ID NO: 30961 - protein, 590 aa, Homo sapiens
  REGION 1..590: note = ENSP00000482617
METTHSFGNPSISVSTQQPPKKFAPVVAPKPKYNPYKQPGGEGDFLPPPPPPLDDSSALPSISGNFPPPPPLDEEAFKVQGNPGGKTLEERRSSLDAEIDSLTSILADLECSSPYKPRPPQSSTGSTASPPVSTPVTGHKRMVIPNQPPLTATKKSTLKPQPAPQAGPIPVAPIGTLKPQPQPVPASYTTASTSSRPTFNVQVKSAQPSPHYMAAPSSGQIYGSGPQGYNTQPVPVSGQCPPPSTRGGMDYAYIPPPGLQPEPGYGYAPNQGRYYEGYYAAGPGYGGRNDSDPTYGQQGHPNTWKREPGYTPPGAGNQNPPGMYPVTGPKKTYITDPVSAPCAPPLQPKGGHSGQLGPSSVAPSFRPEDELEHLTKKMLYDMENPPADEYFGRCARCGENVVGEGTGCTAMDQVFHVDCFTCIICNNKLRGQPFYAVEKKAYCEPCYINTLEQCNVCSKPIMERILRATGKAYHPHCFTCVMCHRSLDGIPFTVDAGGLIHCIEDFHKKFAPRCSVCKEPIMPAPGQEETVRIVALDRDFHVHCYRCEDCGGLLSEGDNQGCYPLDGHILCKTCNSARIRVLTAKASTDL

SEQ ID NO: 30962 - protein, 57 aa, Homo sapiens
  REGION 1..57: note = ENSP00000403825
MSHPSWLPPKSTGEPLGHVPARMETTHSFGNPSISVSTQQPPKKFAPVVAPKPKYNP

SEQ ID NO: 30963 - protein, 252 aa, Homo sapiens
  REGION 1..252: note = ENSP00000393008
MVIPNQPPLTATKKSTLKPQPAPQAGPIPVAPIGTLKPQPQPVPASYTTASTSSRPTFNVQVKSAQPSPHYMAAPSSGQIYGSGPQGYNTQPVPVSGQCPPPSTRGGMDYAYIPPPGLQPEPGYGYAPNQGRYYEGYYAAGPGYGGRNDSDPTYGQQGHPNTWKREPGYTPPGAGNQNPPGMYPVTGPKKTYITDPVSAPCAPPLQPKGGHSGQLGPSSVAPSFRPEDELEHLTKKMLYDMENPPADEYFEC

SEQ ID NO: 30964 - protein, 612 aa, Homo sapiens
  REGION 1..612: note = ENSP00000491657
MSHPSWLPPKSTGEPLGHVPARMETTHSFGNPSISVSTQQPPKKFAPVVAPKPKYNPYKQPGGEGDFLPPPPPPLDDSSALPSISGNFPPPPPLDEEAFKVQGNPGGKTLEERRSSLDAEIDSLTSILADLECSSPYKPRPPQSSTGSTASPPVSTPVTGHKRMVIPNQPPLTATKKSTLKPQPAPQAGPIPVAPIGTLKPQPQPVPASYTTASTSSRPTFNVQVKSAQPSPHYMAAPSSGQIYGSGPQGYNTQPVPVSGQCPPPSTRGGMDYAYIPPPGLQPEPGYGYAPNQGRYYEGYYAAGPGYGGRNDSDPTYGQQGHPNTWKREPGYTPPGAGNQNPPGMYPVTGPKKTYITDPVSAPCAPPLQPKGGHSGQLGPSSVAPSFRPEDELEHLTKKMLYDMENPPADEYFGRCARCGENVVGEGTGCTAMDQVFHVDCFTCIICNNKLRGQPFYAVEKKAYCEPCYINTLEQCNVCSKPIMERILRATGKAYHPHCFTCVMCHRSLDGIPFTVDAGGLIHCIEDFHKKFAPRCSVCKEPIMPAPGQEETVRIVALDRDFHVHCYRCEDCGGLLSEGDNQGCYPLDGHILCKTCNSARIRVLTAKASTDL

SEQ ID NO: 30965 - protein, 612 aa, Homo sapiens; identical to SEQ ID NO: 30964
  REGION 1..612: note = ENSP00000478901

SEQ ID NO: 30966 - protein, 696 aa, Homo sapiens
  REGION 1..696: note = ENSP00000308493
MATPGSEPQPFVPALSVATLHPLHHPHHHHHHHQHHGGTGAPGGAGGGGGGSGGFNLPLNRGLERALEEAANSGGLNLSARKLKEFPRTAAPGHDLSDTVQADLSKNRLVEVPMELCHFVSLEILNLYHNCIRVIPEAIVNLQMLTYLNLSRNQLSALPACLCGLPLKVLIASNNKLGSLPEEIGQLKQLMELDVSCNEITALPQQIGQLKSLRELNVRRNYLKVLPQELVDLSLVKFDFSCNKVLVIPICFREMKQLQVLLLENNPLQSPPAQICTKGKVHIFKYLSIQACQIKTADSLYLHTMERPHLHQHVEDGKKDSDSGVGSDNGDKRLSATEPSDEDTVSLNVPMSNIMEEEQIIKEDSCHRLSPVKGEFHQEFQPEPSLLGDSTNSGEERDQFTDRADGLHSEFMNYKARAEDCEELLRIEEDVHWQTEGIISSSKDQDMDIAMIEQLREAVDLLQDPNGLSTDITERSVLNLYPMGSAEALELQDSALNGQIQLETSPVCEVQSDLTLQSNGSQYSPNEIRENSPAVSPTTNSTAPFGLKPRSVFLRPQRNLESIDPQFTIRRKMEQMREEKELVEQLRESIEMRLKVSLHEDLGAALMDGVVLCHLVNHIRPRSVASIHVPSPAVPKLSMAKCRRNVENFLEACRKLGVPEEKLCLPHHILEEKGLVKVGITIQALLDITVTKALFT

SEQ ID NO: 30967 - protein, 728 aa, Homo sapiens
  REGION 1..728: note = ENSP00000374448
MATPGSEPQPFVPALSVATLHPLHHPHHHHHHHQHHGGTGAPGGAGGGGGGSGGFNLPLNRGLERALEEAANSGGLNLSARKLKEFPRTAAPGHDLSDTVQADLSKNRLVEVPMELCHFVSLEILNLYHNCIRVIPEAIVNLQMLTYLNLSRNQLSALPACLCGLPLKVLIASNNKLGSLPEEIGQLKQLMELDVSCNEITALPQQIGQLKSLRELNVRRNYLKVLPQELVDLSLVKFDFSCNKVLVIPICFREMKQLQVLLLENNPLQSPPAQICTKGKVHIFKYLSIQACQIKTADSLYLHTMERPHLHQHVEDGKKDSDSGVGSDNGDKRLSATEPSDEDTVSLNVPMSNIMEEEQIIKEDSCHRLSPVKGEFHQEFQPEPSLLGDSTNSGEERDQFTDRADGLHSEFMNYKARAEDCEELLRIEEDVHWQTEGIISSSKDQDMDIAMIEQLREAVDLLQDPNGLSTDITERSVLNLYPMGSAEALELQDSALNGQIQLETSPVCEVQSDLTLQSNGSQYSPNEIRENSPAVSPTTNSTAPFGLKPRSVFLRPQRNLESIDPQFTIRRKMEQMREEKELVEQLRESIEMRLKVSLHEDLGAALMDGVVLCHLVNHIRPRSVASIHVPSPAVPKLSMAKCRRNVENFLEACRKLGVPEADLCSPCDILQLDFRHIRKTVDTLLALGEKAPPPTSALRSRDLIGFCLVHILFIVLVYITYHWNALSA

SEQ ID NO: 30968 - protein, 763 aa, Homo sapiens
  REGION 1..763: note = ENSP00000374447
MATPGSEPQPFVPALSVATLHPLHHPHHHHHHHQHHGGTGAPGGAGGGGGGSGGFNLPLNRGLERALEEAANSGGLNLSARKLKEFPRTAAPGHDLSDTVQADLSKNRLVEVPMELCHFVSLEILNLYHNCIRVIPEAIVNLQMLTYLNLSRNQLSALPACLCGLPLKVLIASNNKLGSLPEEIGQLKQLMELDVSCNEITALPQQIGQLKSLRELNVRRNYLKVLPQELVDLSLVKFDFSCNKVLVIPICFREMKQLQVLLLENNPLQSPPAQICTKGKVHIFKYLSIQACQIKTADSLYLHTMERPHLHQHVEDGKKDSDSGVGSDNGDKRLSATEPSDEDTVSLNVPMSNIMEEEQIIKEDSCHRLSPVKGEFHQEFQPEPSLLGDSTNSGEERDQFTDRADGLHSEFMNYKARAEDCEELLRIEEDVHWQTEGIISSSKDQDMDIAMIEQLREAVDLLQDPNGLSTDITERSVLNLYPMGSAEALELQDSALNGQIQLETSPVCEVQSDLTLQSNGSQYSPNEIRENSPAVSPTTNSTAPFGLKPRSDPALILPPISFNTLTQAQTWDSSSYSVPSEGDSDNVFLRPQRNLESIDPQFTIRRKMEQMREEKELVEQLRESIEMRLKVSLHEDLGAALMDGVVLCHLVNHIRPRSVASIHVPSPAVPKLSMAKCRRNVENFLEACRKLGVPEADLCSPCDILQLDFRHIRKTVDTLLALGEKAPPPTSALRSRDLIGFCLVHILFIVLVYITYHWNALSA

SEQ ID NO: 30969 - protein, 98 aa, Homo sapiens
  REGION 1..98: note = ENSP00000417121
MKQLQVLLLENNPLQSPPAQICTKGKVHIFKYLSIQACQIKTADSLYLHTMERPHLHQHVEDGKKDSDSGVGSDNGDKRLSATEPSDEDTVSLNVPMS

SEQ ID NO: 30970 - protein, 72 aa, Homo sapiens
  REGION 1..72: note = ENSP00000419256
MKQLQVLLLENNPLQSPPAQICTKGKVHIFKYLSIQACQIKTADSLYLHTMERPHLHQHVEDGKKDSDSGVG

SEQ ID NO: 30971 - protein, 1093 aa, Homo sapiens
  REGION 1..1093: note = ENSP00000273261
MARPVRGGLGAPRRSPCLLLLWLLLLRLEPVTAAAGPRAPCAAACTCAGDSLDCGGRGLAALPGDLPSWTRSLNLSYNKLSEIDPAGFEDLPNLQEVYLNNNELTAVPSLGAASSHVVSLFLQHNKIRSVEGSQLKAYLSLEVLDLSLNNITEVRNTCFPHGPPIKELNLAGNRIGTLELGAFDGLSRSLLTLRLSKNRITQLPVRAFKLPRLTQLDLNRNRIRLIEGLTFQGLNSLEVLKLQRNNISKLTDGAFWGLSKMHVLHLEYNSLVEVNSGSLYGLTALHQLHLSNNSIARIHRKGWSFCQKLHELVLSFNNLTRLDEESLAELSSLSVLRLSHNSISHIAEGAFKGLRSLRVLDLDHNEISGTIEDTSGAFSGLDSLSKLTLFGNKIKSVAKRAFSGLEGLEHLNLGGNAIRSVQFDAFVKMKNLKELHISSDSFLCDCQLKWLPPWLIGRMLQAFVTATCAHPESLKGQSIFSVPPESFVCDDFLKPQIITQPETTMAMVGKDIRFTCSAASSSSSPMTFAWKKDNEVLTNADMENFVHVHAQDGEVMEYTTILHLRQVTFGHEGRYQCVITNHFGSTYSHKARLTVNVLPSFTKTPHDITIRTTTMARLECAATGHPNPQIAWQKDGGTDFPAARERRMHVMPDDDVFFITDVKIDDAGVYSCTAQNSAGSISANATLTVLETPSLVVPLEDRVVSVGETVALQCKATGNPPPRITWFKGDRPLSLTERHHLTPDNQLLVVQNVVAEDAGRYTCEMSNTLGTERAHSQLSVLPAAGCRKDGTTVGIFTIAVVSSIVLTSLVWVCIIYQTRKKSEEYSVTNTDETVVPPDVPSYLSSQGTLSDRQETVVRTEGGPQANGHIESNGVCPRDASHFPEPDTHSVACRQPKLCAGSAYHKEPWKAMEKAEGTPGPHKMEHGGRVVCSDCNTEVDCYSRGQAFHPQPVSRDSAQPSAPNGPEPGGSDQEHSPHHQCSRTAAGSCPECQGSLYPSNHDRMLTAVKKKPMASLDGKGDSSWTLARLYHPDSTELQPASSLTSGSPERAEAQYLLVSNGHLPKACDASPESTPLTGQLPGKQRVPLLLAPKS

SEQ ID NO: 30972 - protein, 1070 aa, Homo sapiens
  REGION 1..1070: note = ENSP00000373208
MARPVRGGLGAPRRSPCLLLLWLLLLRLEPVTAAAGPRAPCAAACTCAGDSLDCGGRGLAALPGDLPSWTRSLNLSYNKLSEIDPAGFEDLPNLQEVYLNNNELTAVPSLGAASSHVVSLFLQHNKIRSVEGSQLKAYLSLEVLDLSLNNITEVRNTCFPHGPPIKELNLAGNRIGTLELGAFDGLSRSLLTLRLSKNRITQLPVRAFKLPRLTQLDLNRNRIRLIEGLTFQGLNSLEVLKLQRNNISKLTDGAFWGLSKMHVLHLEYNSLVEVNSGSLYGLTALHQLHLSNNSIARIHRKGWSFCQKLHELVLSFNNLTRLDEESLAELSSLSVLRLSHNSISHIAEGAFKGLRSLRVLDLDHNEISGTIEDTSGAFSGLDSLSKLLLLEPSQSAGCSSPSQPHMSAGGRTLFGNKIKSVAKRAFSGLEGLEHLNLGGNAIRSVQFDAFVKMKNLKELHISSDSFLCDCQLKWLPPWLIGRMLQAFVTATCAHPESLKGQSIFSVPPESFVCDDFLKPQIITQPETTMAMVGKDIRFTCSAASSSSSPMTFAWKKDNEVLTNADMENFVHVHAQDGEVMEYTTILHLRQVTFGHEGRYQCVITNHFGSTYSHKARLTVNVLPSFTKTPHDITIRTTTMARLECAATGHPNPQIAWQKDGGTDFPAAQTPSLVVPLEDRVVSVGETVALQCKATGNPPPRITWFKGDRPLSLTERHHLTPDNQLLVVQNVVAEDAGRYTCEMSNTLGTERAHSQLSVLPAAGCRKDGTTVGIFTIAVVSSIVLTSLVWVCIIYQTRKKSEEYSVTNTDETVVPPDVPSYLSSQGTLSDRQETVVRTEGGPQANGHIESNGVCPRDASHFPEPDTHSVACRQPKLCAGSAYHKEPWKAMEKAEGTPGPHKMEHGGRVVCSDCNTEVDCYSRGQAFHPQPVSRDSAQPSAPNGPEPGGSDQEHSPHHQCSRTAAGSCPECQGSLYPSNHDRMLTAVKKKPMASLDGKGDSSWTLARLYHPDSTELQPASSLTSGSPERAEAQYLLVSNGHLPKACDASPESTPLTGQLPGKQRVPLLLAPKS

SEQ ID NO: 30973 - protein, 1093 aa, Homo sapiens; identical to SEQ ID NO: 30971
  REGION 1..1093: note = ENSP00000488729

SEQ ID NO: 30974 - protein, 1070 aa, Homo sapiens; identical to SEQ ID NO: 30972
  REGION 1..1070: note = ENSP00000488182

SEQ ID NO: 30975 - protein, 296 aa, Homo sapiens
  REGION 1..296: note = ENSP00000451449
MLTPPLLLLLPLLSALVAAAIDAPKTCSPKQFACRDQITCISKGWRCDGERDCPDGSDEAPEICPQSKAQRCQPNEHNCLGTELCVPMSRLCNGVQDCMDGSDEGPHCRELQGNCSRLGCQHHCVPTLDGPTCYCNSSFQLQADGKTCKDFDECSVYGTCSQLCTNTDGSFICGCVEGYLLQPDNRSCKAKNEPVDRPPVLLIANSQNILATYLSGAQVSTITPTSTRQTTAMDFSYANETVCWVHVGDSAAQTQLKCARMPGLKGFVDEHTINISLSLHRRSRKRAQENEVTQHG

SEQ ID NO: 30976 - protein, 4544 aa, Homo sapiens
  REGION 1..4544: note = ENSP00000243077
MLTPPLLLLLPLLSALVAAAIDAPKTCSPKQFACRDQITCISKGWRCDGERDCPDGSDEAPEICPQSKAQRCQPNEHNCLGTELCVPMSRLCNGVQDCMDGSDEGPHCRELQGNCSRLGCQHHCVPTLDGPTCYCNSSFQLQADGKTCKDFDECSVYGTCSQLCTNTDGSFICGCVEGYLLQPDNRSCKAKNEPVDRPPVLLIANSQNILATYLSGAQVSTITPTSTRQTTAMDFSYANETVCWVHVGDSAAQTQLKCARMPGLKGFVDEHTINISLSLHHVEQMAIDWLTGNFYFVDDIDDRIFVCNRNGDTCVTLLDLELYNPKGIALDPAMGKVFFTDYGQIPKVERCDMDGQNRTKLVDSKIVFPHGITLDLVSRLVYWADAYLDYIEVVDYEGKGRQTIIQGILIEHLYGLTVFENYLYATNSDNANAQQKTSVIRVNRFNSTEYQVVTRVDKGGALHIYHQRRQPRVRSHACENDQYGKPGGCSDICLLANSHKARTCRCRSGFSLGSDGKSCKKPEHELFLVYGKGRPGIIRGMDMGAKVPDEHMIPIENLMNPRALDFHAETGFIYFADTTSYLIGRQKIDGTERETILKDGIHNVEGVAVDWMGDNLYWTDDGPKKTISVARLEKAAQTRKTLIEGKMTHPRAIVVDPLNGWMYWTDWEEDPKDSRRGRLERAWMDGSHRDIFVTSKTVLWPNGLSLDIPAGRLYWVDAFYDRIETILLNGTDRKIVYEGPELNHAFGLCHHGNYLFWTEYRSGSVYRLERGVGGAPPTVTLLRSERPPIFEIRMYDAQQQQVGTNKCRVNNGGCSSLCLATPGSRQCACAEDQVLDADGVTCLANPSYVPPPQCQPGEFACANSRCIQERWKCDGDNDCLDNSDEAPALCHQHTCPSDRFKCENNRCIPNRWLCDGDNDCGNSEDESNATCSARTCPPNQFSCASGRCIPISWTCDLDDDCGDRSDESASCAYPTCFPLTQFTCNNGRCININWRCDNDNDCGDNSDEAGCSHSCSSTQFKCNSGRCIPEHWTCDGDNDCGDYSDETHANCTNQATRPPGGCHTDEFQCRLDGLCIPLRWRCDGDTDCMDSSDEKSCEGVTHVCDPSVKFGCKDSARCISKAWVCDGDNDCEDNSDEENCESLACRPPSHPCANNTSVCLPPDKLCDGNDDCGDGSDEGELCDQCSLNNGGCSHNCSVAPGEGIVCSCPLGMELGPDNHTCQIQSYCAKHLKCSQKCDQNKFSVKCSCYEGWVLEPDGESCRSLDPFKPFIIFSNRHEIRRIDLHKGDYSVLVPGLRNTIALDFHLSQSALYWTDVVEDKIYRGKLLDNGALTSFEVVIQYGLATPEGLAVDWIAGNIYWVESNLDQIEVAKLDGTLRTTLLAGDIEHPRAIALDPRDGILFWTDWDASLPRIEAASMSGAGRRTVHRETGSGGWPNGLTVDYLEKRILWIDARSDAIYSARYDGSGHMEVLRGHEFLSHPFAVTLYGGEVYWTDWRTNTLAKANKWTGHNVTVVQRTNTQPFDLQVYHPSRQPMAPNPCEANGGQGPCSHLCLINYNRTVSCACPHLMKLHKDNTTCYEFKKFLLYARQMEIRGVDLDAPYYNYIISFTVPDIDNVTVLDYDAREQRVYWSDVRTQAIKRAFINGTGVETVVSADLPNAHGLAVDWVSRNLFWTSYDTNKKQINVARLDGSFKNAVVQGLEQPHGLVVHPLRGKLYWTDGDNISMANMDGSNRTLLFSGQKGPVGLAIDFPESKLYWISSGNHTINRCNLDGSGLEVIDAMRSQLGKATALAIMGDKLWWADQVSEKMGTCSKADGSGSVVLRNSTTLVMHMKVYDESIQLDHKGTNPCSVNNGDCSQLCLPTSETTRSCMCTAGYSLRSGQQACEGVGSFLLYSVHEGIRGIPLDPNDKSDALVPVSGTSLAVGIDFHAENDTIYWVDMGLSTISRAKRDQTWREDVVTNGIGRVEGIAVDWIAGNIYWTDQGFDVIEVARLNGSFRYVVISQGLDKPRAITVHPEKGYLFWTEWGQYPRIERSRLDGTERVVLVNVSISWPNGISVDYQDGKLYWCDARTDKIERIDLETGENREVVLSSNNMDMFSVSVFEDFIYWSDRTHANGSIKRGSKDNATDSVPLRTGIGVQLKDIKVFNRDRQKGTNVCAVANGGCQQLCLYRGRGQRACACAHGMLAEDGASCREYAGYLLYSERTILKSIHLSDERNLNAPVQPFEDPEHMKNVIALAFDYRAGTSPGTPNRIFFSDIHFGNIQQINDDGSRRITIVENVGSVEGLAYHRGWDTLYWTSYTTSTITRHTVDQTRPGAFERETVITMSGDDHPRAFVLDECQNLMFWTNWNEQHPSIMRAALSGANVLTLIEKDIRTPNGLAIDHRAEKLYFSDATLDKIERCEYDGSHRYVILKSEPVHPFGLAVYGEHIFWTDWVRRAVQRANKHVGSNMKLLRVDIPQQPMGIIAVANDTNSCELSPCRINNGGCQDLCLLTHQGHVNCSCRGGRILQDDLTCRAVNSSCRAQDEFECANGECINFSLTCDGVPHCKDKSDEKPSYCNSRRCKKTFRQCSNGRCVSNMLWCNGADDCGDGSDEIPCNKTACGVGEFRCRDGTCIGNSSRCNQFVDCEDASDEMNCSATDCSSYFRLGVKGVLFQPCERTSLCYAPSWVCDGANDCGDYSDERDCPGVKRPRCPLNYFACPSGRCIPMSWTCDKEDDCEHGEDETHCNKFCSEAQFECQNHRCISKQWLCDGSDDCGDGSDEAAHCEGKTCGPSSFSCPGTHVCVPERWLCDGDKDCADGADESIAAGCLYNSTCDDREFMCQNRQCIPKHFVCDHDRDCADGSDESPECEYPTCGPSEFRCANGRCLSSRQWECDGENDCHDQSDEAPKNPHCTSQEHKCNASSQFLCSSGRCVAEALLCNGQDDCGDSSDERGCHINECLSRKLSGCSQDCEDLKIGFKCRCRPGFRLKDDGRTCADVDECSTTFPCSQRCINTHGSYKCLCVEGYAPRGGDPHSCKAVTDEEPFLIFANRYYLRKLNLDGSNYTLLKQGLNNAVALDFDYREQMIYWTDVTTQGSMIRRMHLNGSNVQVLHRTGLSNPDGLAVDWVGGNLYWCDKGRDTIEVSKLNGAYRTVLVSSGLREPRALVVDVQNGYLYWTDWGDHSLIGRIGMDGSSRSVIVDTKITWPNGLTLDYVTERIYWADAREDYIEFASLDGSNRHVVLSQDIPHIFALTLFEDYVYWTDWETKSINRAHKTTGTNKTLLISTLHRPMDLHVFHALRQPDVPNHPCKVNNGGCSNLCLLSPGGGHKCACPTNFYLGSDGRTCVSNCTASQFVCKNDKCIPFWWKCDTEDDCGDHSDEPPDCPEFKCRPGQFQCSTGICTNPAFICDGDNDCQDNSDEANCDIHVCLPSQFKCTNTNRCIPGIFRCNGQDNCGDGEDERDCPEVTCAPNQFQCSITKRCIPRVWVCDRDNDCVDGSDEPANCTQMTCGVDEFRCKDSGRCIPARWKCDGEDDCGDGSDEPKEECDERTCEPYQFRCKNNRCVPGRWQCDYDNDCGDNSDEESCTPRPCSESEFSCANGRCIAGRWKCDGDHDCADGSDEKDCTPRCDMDQFQCKSGHCIPLRWRCDADADCMDGSDEEACGTGVRTCPLDEFQCNNTLCKPLAWKCDGEDDCGDNSDENPEECARFVCPPNRPFRCKNDRVCLWIGRQCDGTDNCGDGTDEEDCEPPTAHTTHCKDKKEFLCRNQRCLSSSLRCNMFDDCGDGSDEEDCSIDPKLTSCATNASICGDEARCVRTEKAAYCACRSGFHTVPGQPGCQDINECLRFGTCSQLCNNTKGGHLCSCARNFMKTHNTCKAEGSEYQVLYIADDNEIRSLFPGHPHSAYEQAFQGDESVRIDAMDVHVKAGRVYWTNWHTGTISYRSLPPAAPPTTSNRHRRQIDRGVTHLNISGLKMPRGIAIDWVAGNVYWTDSGRDVIEVAQMKGENRKTLISGMIDEPHAIVVDPLRGTMYWSDWGNHPKIETAAMDGTLRETLVQDNIQWPTGLAVDYHNERLYWADAKLSVIGSIRLNGTDPIVAADSKRGLSHPFSIDVFEDYIYGVTYINNRVFKIHKFGHSPLVNLTGGLSHASDVVLYHQHKQPEVTNPCDRKKCEWLCLLSPSGPVCTCPNGKRLDNGTCVPVPSPTPPPDAPRPGTCNLQCFNGGSCFLNARRQPKCRCQPRYTGDKCELDQCWEHCRNGGTCAASPSGMPTCRCPTGFTGPKCTQQVCAGYCANNSTCTVNQGNQPQCRCLPGFLGDRCQYRQCSGYCENFGTCQMAADGSRQCRCTAYFEGSRCEVNKCSRCLEGACVVNKQSGDVTCNCTDGRVAPSCLTCVGHCSNGGSCTMNSKMMPECQCPPHMTGPRCEEHVFSQQQPGHIASILIPLLLLLLLVLVAGVVFWYKRRVQGAKGFQHQRMTNGAMNVEIGNPTYKMYEGGEPDDVGGLLDADFALDPDKPTNFTNPVYATLYMGGHGSRHSLASTDEKRELLGRGPEDEIGDPLA

SEQ ID NO: 30977 - protein, 292 aa, Homo sapiens
  REGION 1..292: note = ENSP00000341264
MLTPPLLLLLPLLSALVAAAIDAPKTCSPKQFACRDQITCISKGWRCDGERDCPDGSDEAPEICPQSKAQRCQPNEHNCLGTELCVPMSRLCNGVQDCMDGSDEGPHCRELQGNCSRLGCQHHCVPTLDGPTCYCNSSFQLQADGKTCKDFDECSVYGTCSQLCTNTDGSFICGCVEGYLLQPDNRSCKAKNEPVDRPPVLLIANSQNILATYLSGAQVSTITPTSTRQTTAMDFSYANETVCWVHVGDSAAQTQLKCARMPGLKGFVDEHTINISLSLHLCVFSKSQQEMG

SEQ ID NO: 30978 - protein, 439 aa, Homo sapiens
  REGION 1..439: note = ENSP00000451737
MLTPPLLLLLPLLSALVAAAIDAPKTCSPKQFACRDQITCISKGWRCDGERDCPDGSDEAPEICPQSKAQRCQPNEHNCLGTELCVPMSRLCNGVQDCMDGSDEGPHCRELQGNCSRLGCQHHCVPTLDGPTCYCNSSFQLQADGKTCKDFDECSVYGTCSQLCTNTDGSFICGCVEGYLLQPDNRSCKAKNEPVDRPPVLLIANSQNILATYLSGAQVSTITPTSTRQTTAMDFSYANETVCWVHVGDSAAQTQLKCARMPGLKGFVDEHTINISLSLHHVEQMAIDWLTGNFYFVDDIDDRIFVCNRNGDTCVTLLDLELYNPKGIALDPAMGKVFFTDYGQIPKVERCDMDGQNRTKLVDSKIVFPHGITLDLVSRLVYWADAYLDYIEVVDYEGKGRQTIIQGILVRELLSEVLWGNHDPGPSGEGGSLCRGTVL

SEQ ID NO: 30979 - protein, 139 aa, Homo sapiens
  REGION 1..139: note = ENSP00000451622
  VARIANT 1: note = Any amino acid
XRPGAFERETVITMSGDDHPRAFVLDECQNLMFWTNWNEQHPSIMRAALSGANVLTLIEKDIRTPNGLAIDHRAEKLYFSDATLDKIERCEYDGSHRYVNSLHAESTTVAARTCVCSLTRAMSTAHAEGAESSRMTSPA

SEQ ID NO: 30980 - protein, 183 aa, Homo sapiens
  REGION 1..183: note = ENSP00000451012
NGQDNCGDGEDERDCPEVTCAPNQFQCSITKRCIPRVWVCDRDNDCVDGSDEPANCTQMTCGVDEFRCKDSGRCIPARWKCDGEDDCGDGSDEPKEECGEPRPHSRRKTVYLDERTCEPYQFRCKNNRCVPGRWQCDYDNDCGDNSDEESCTPRPCSESEFSCANGRCIAGRWKCDGDHDCAD

SEQ ID NO: 30981 - protein, 4599 aa, Homo sapiens
  REGION 1..4599: note = ENSP00000374135
MSEFLLALLTLSGLLPIARVLTVGADRDQQLCDPGEFLCHDHVTCVSQSWLCDGDPDCPDDSDESLDTCPEEVEIKCPLNHIACLGTNKCVHLSQLCNGVLDCPDGYDEGVHCQELLSNCQQLNCQYKCTMVRNSTRCYCEDGFEITEDGRSCKDQDECAVYGTCSQTCRNTHGSYTCSCVEGYLMQPDNRSCKAKIEPTDRPPILLIANFETIEVFYLNGSKMATLSSVNGNEIHTLDFIYNEDMICWIESRESSNQLKCIQITKAGGLTDEWTINILQSFHNVQQMAIDWLTRNLYFVDHVGDRIFVCNSNGSVCVTLIDLELHNPKAIAVDPIAGKLFFTDYGNVAKVERCDMDGMNRTRIIDSKTEQPAALALDLVNKLVYWVDLYLDYVGVVDYQGKNRHTVIQGRQVRHLYGITVFEDYLYATNSDNYNIVRINRFNGTDIHSLIKIENAWGIRIYQKRTQPTVRSHACEVDPYGMPGGCSHICLLSSSYKTRTCRCRTGFNLGSDGRSCKRPKNELFLFYGKGRPGIVRGMDLNTKIADEYMIPIENLVNPRALDFHAETNYIYFADTTSFLIGRQKIDGTERETILKDDLDNVEGIAVDWIGNNLYWTNDGHRKTINVARLEKASQSRKTLLEGEMSHPRGIVVDPVNGWMYWTDWEEDEIDDSVGRIEKAWMDGFNRQIFVTSKMLWPNGLTLDFHTNTLYWCDAYYDHIEKVFLNGTHRKIVYSGRELNHPFGLSHHGNYVFWTDYMNGSIFQLDLITSEVTLLRHERPPLFGLQIYDPRKQQGDNMCRVNNGGCSTLCLAIPGGRVCACADNQLLDENGTTCTFNPGEALPHICKAGEFRCKNRHCIQARWKCDGDDDCLDGSDEDSVNCFNHSCPDDQFKCQNNRCIPKRWLCDGANDCGSNEDESNQTCTARTCQVDQFSCGNGRCIPRAWLCDREDDCGDQTDEMASCEFPTCEPLTQFVCKSGRCISSKWHCDSDDDCGDGSDEVGCVHSCFDNQFRCSSGRCIPGHWACDGDNDCGDFSDEAQINCTKEEIHSPAGCNGNEFQCHPDGNCVPDLWRCDGEKDCEDGSDEKGCNGTIRLCDHKTKFSCWSTGRCINKAWVCDGDIDCEDQSDEDDCDSFLCGPPKHPCANDTSVCLQPEKLCNGKKDCPDGSDEGYLCDECSLNNGGCSNHCSVVPGRGIVCSCPEGLQLNKDNKTCEIVDYCSNHLKCSQVCEQHKHTVKCSCYEGWKLDVDGESCTSVDPFEAFIIFSIRHEIRRIDLHKRDYSLLVPGLRNTIALDFHFNQSLLYWTDVVEDRIYRGKLSESGGVSAIEVVVEHGLATPEGLTVDWIAGNIYWIDSNLDQIEVAKLDGSLRTTLIAGAMEHPRAIALDPRYGILFWTDWDANFPRIESASMSGAGRKTIYKDMKTGAWPNGLTVDHFEKRIVWTDARSDAIYSALYDGTNMIEIIRGHEYLSHPFAVSLYGSEVYWTDWRTNTLSKANKWTGQNVSVIQKTSAQPFDLQIYHPSRQPQAPNPCAANDGKGPCSHMCLINHNRSAACACPHLMKLSSDKKTCYEMKKFLLYARRSEIRGVDIDNPYFNFITAFTVPDIDDVTVIDFDASEERLYWTDIKTQTIKRAFINGTGLETVISRDIQSIRGLAVDWVSRNLYWISSEFDETQINVARLDGSLKTSIIHGIDKPQCLAAHPVRGKLYWTDGNTINMANMDGSNSKILFQNQKEPVGLSIDYVENKLYWISSGNGTINRCNLDGGNLEVIESMKEELTKATALTIMDKKLWWADQNLAQLGTCSKRDGRNPTILRNKTSGVVHMKVYDKEAQQGSNSCQLNNGGCSQLCLPTSETTRTCMCTVGYYLQKNRMSCQGIESFLMYSVHEGIRGIPLEPSDKMDALMPISGTSFAVGIDFHAENDTIYWTDMGFNKISRAKRDQTWKEDIITNGLGRVEGIAVDWIAGNIYWTDHGFNLIEVARLNGSFRYVIISQGLDQPRSIAVHPEKGLLFWTEWGQMPCIGKARLDGSEKVVLVSMGIAWPNGISIDYEENKLYWCDARTDKIERIDLETGGNREMVLSGSNVDMFSVAVFGAYIYWSDRAHANGSVRRGHKNDATETITMRTGLGVNLKEVKIFNRVREKGTNVCARDNGGCKQLCLYRGNSRRTCACAHGYLAEDGVTCLRHEGYLLYSGRTILKSIHLSDETNLNSPIRPYENPRYFKNVIALAFDYNQRRKGTNRIFYSDAHFGNIQLIKDNWEDRQVIVENVGSVEGLAYHRAWDTLYWTSSTTSSITRHTVDQTRPGAFDREAVITMSEDDHPHVLALDECQNLMFWTNWNEQHPSIMRSTLTGKNAQVVVSTDILTPNGLTIDYRAEKLYFSDGSLGKIERCEYDGSQRHVIVKSGPGTFLSLAVYDNYIFWSDWGRRAILRSNKYTGGDTKILRSDIPHQPMGIIAVANDTNSCELSPCALLNGGCHDLCLLTPNGRVNCSCRGDRILLEDNRCVTKNSSCNAYSEFECGNGECIDYQLTCDGIPHCKDKSDEKLLYCENRSCRRGFKPCYNRRCIPHGKLCDGENDCGDNSDELDCKVSTCATVEFRCADGTCIPRSARCNQNIDCADASDEKNCNNTDCTHFYKLGVKTTGFIRCNSTSLCVLPTWICDGSNDCGDYSDELKCPVQNKHKCEENYFSCPSGRCILNTWICDGQKDCEDGRDEFHCDSSCSWNQFACSAQKCISKHWICDGEDDCGDGLDESDSICGAITCAADMFSCQGSRACVPRHWLCDGERDCPDGSDELSTAGCAPNNTCDENAFMCHNKVCIPKQFVCDHDDDCGDGSDESPQCGYRQCGTEEFSCADGRCLLNTQWQCDGDFDCPDHSDEAPLNPKCKSAEQSCNSSFFMCKNGRCIPSGGLCDNKDDCGDGSDERNCHINECLSKKVSGCSQDCQDLPVSYKCKCWPGFQLKDDGKTCVDIDECSSGFPCSQQCINTYGTYKCLCTDGYEIQPDNPNGCKSLSDEEPFLILADHHEIRKISTDGSNYTLLKQGLNNVIAIDFDYREEFIYWIDSSRPNGSRINRMCLNGSDIKVVHNTAVPNALAVDWIGKNLYWSDTEKRIIEVSKLNGLYPTILVSKRLKFPRDLSLDPQAGYLYWIDCCEYPHIGRVGMDGTNQSVVIETKISRPMALTIDYVNRRLYWADENHIEFSNMDGSHRHKVPNQDIPGVIALTLFEDYIYWTDGKTKSLSRAHKTSGADRLSLIYSWHAITDIQVYHSYRQPDVSKHLCMINNGGCSHLCLLAPGKTHTCACPTNFYLAADNRTCLSNCTASQFRCKTDKCIPFWWKCDTVDDCGDGSDEPDDCPEFRCQPGRFQCGTGLCALPAFICDGENDCGDNSDELNCDTHVCLSGQFKCTKNQKCIPVNLRCNGQDDCGDEEDERDCPENSCSPDYFQCKTTKHCISKLWVCDEDPDCADASDEANCDKKTCGPHEFQCKNNNCIPDHWRCDSQNDCSDNSDEENCKPQTCTLKDFLCANGDCVSSRFWCDGDFDCADGSDERNCETSCSKDQFRCSNGQCIPAKWKCDGHEDCKYGEDEKSCEPASPTCSSREYICASDGCISASLKCNGEYDCADGSDEMDCVTECKEDQFRCKNKAHCIPIRWLCDGIHDCVDGSDEENCERGGNICRADEFLCNNSLCKLHFWVCDGEDDCGDNSDEAPDMCVKFLCPSTRPHRCRNNRICLQSEQMCNGIDECGDNSDEDHCGGKLTYKARPCKKDEFACSNKKCIPMDLQCDRLDDCGDGSDEQGCRIAPTEYTCEDNVNPCGDDAYCNQIKTSVFCRCKPGFQRNMKNRQCEDLNECLVFGTCSHQCINVEGSYKCVCDQNFQERNNTCIAEGSEDQVLYIANDTDILGFIYPFNYSGDHQQISHIEHNSRITGMDVYYQRDMIIWSTQFNPGGIFYKRIHGREKRQANSGLICPEFKRPRDIAVDWVAGNIYWTDHSRMHWFSYYTTHWTSLRYSINVGQLNGPNCTRLLTNMAGEPYAIAVNPKRGMMYWTVVGDHSHIEEAAMDGTLRRILVQKNLQRPTGLAVDYFSERIYWADFELSIIGSVLYDGSNSVVSVSSKQGLLHPHRIDIFEDYIYGAGPKNGVFRVQKFGHGSVEYLALNIDKTKGVLISHRYKQLDLPNPCLDLACEFLCLLNPSGATCVCPEGKYLINGTCNDDSLLDDSCKLTCENGGRCILNEKGDLRCHCWPSYSGERCEVNHCSNYCQNGGTCVPSVLGRPTCSCALGFTGPNCGKTVCEDFCQNGGTCIVTAGNQPYCHCQPEYTGDRCQYYVCHHYCVNSESCTIGDDGSVECVCPTRYEGPKCEVDKCVRCHGGHCIINKDSEDIFCNCTNGKIASSCQLCDGYCYNGGTCQLDPETNVPVCLCSTNWSGTQCERPAPKSSKSDHISTRSIAIIVPLVLLVTLITTLVIGLVLCKRKRRTKTIRRQPIINGGINVEIGNPSYNMYEVDHDHNDGGLLDPGFMIDPTKARYIGGGPSAFKLPHTAPPIYLNSDLKGPLTAGPTNYSNPVYAKLYMDGQNCRNSLGSVDERKELLPKKIEIGIRETVA

SEQ ID NO: 30982 - protein, 798 aa, Homo sapiens
  REGION 1..798: note = ENSP00000415052
  VARIANT 1: note = Any amino acid
XSNKKCIPMDLQCDRLDDCGDGSDEQGCRIAPTEYTCEDNVNPCGDDAYCNQIKTSVFCRCKPGFQRNMKNRQCEDLNECLVFGTCSHQCINVEGSYKCVCDQNFQERNNTCIAEGSEDQVLYIANDTDILGFIYPFNYSGDHQQISHIEHNSRITGMDVYYQRDMIIWSTQFNPGGIFYKRIHGREKRQANSGLICPEFKRPRDIAVDWVAGNIYWTDHSRMHWFSYYTTHWTSLRYSINVGQLNGPNCTRLLTNMAGEPYAIAVNPKRGMMYWTVVGDHSHIEEAAMDGTLRRILVQKNLQRPTGLAVDYFSERIYWADFELSIIGSVLYDGSNSVVSVSSKQGLLHPHRIDIFEDYIYGAGPKNGVFRVQKFGHGSVEYLALNIDKTKGVLISHRYKQLDLPNPCLDLACEFLCLLNPSGATCVCPEGKYLINGTCNDDSLLDDSCKLTCENGGRCILNEKGDLRCHCWPSYSGERCEVNHCSNYCQNGGTCVPSVLGRPTCSCALGFTGPNCGKTVCEDFCQNGGTCIVTAGNQPYCHCQPEYTGDRCQYYVCHHYCVNSESCTIGDDGSVECVCPTRYEGPKCEVDKCVRCHGGHCIINKDSEDIFCNCTNGKIASSCQLCDGYCYNGGTCQLDPETNVPVCLCSTNWSGTQCERPAPKSSKSDHISTRSIAIIVPLVLLVTLITTLVIGLVLCKRKRRTKTIRRQPIINGGINVEIGNPSYNMYEVDHDHNDGGLLDPGFMIDPTKPTNYSNPVYAKLYMDGQNCRNSLGSVDERKELLPKKIEIGIRETVA

SEQ ID NO: 30983 - protein, 280 aa, Homo sapiens
  REGION 1..280: note = ENSP00000393859
  VARIANT 1: note = Any amino acid
XRPTCSCALGFTGPNCGKTVCEDFCQNGGTCIVTAGNQPYCHCQPEYTGDRCQYYVCHHYCVNSESCTIGDDGSVECVCPTRYEGPKCEVDKCVRCHGGHCIINKDSEDIFCNCTNGKIASSCQLCDGYCYNGGTCQLDPETNVPVCLCSVGFKSQRCDQKENPCDHYCQNEGICTLTAFNEPRCKCSTNWSGTQCERPAPKSSKSDHISTRSIAIIVPLVLLVTLITTLVIGLVLCKRKRRTKTIRRQPIINGGINVEIGNPSYNMYEVDHDHNDGGLL

SEQ ID NO: 30984 - protein, 781 aa, Homo sapiens
  REGION 1..781: note = ENSP00000413239
MSEFLLALLTLSGLLPIARVLTVGADRDQQLCDPGEFLCHDHVTCVSQSWLCDGDPDCPDDSDESLDTSRTCQVDQFSCGNGRCIPRAWLCDREDDCGDQTDEMASCEFPTCEPLTQFVCKSGRCISSKWHCDSDDDCGDGSDEVGCVHSCFDNQFRCSSGRCIPGHWACDGDNDCGDFSDEAQINCTKEEIHSPAGCNGNEFQCHPDGNCVPDLWRCDGEKDCEDGSDEKGCNGTIRLCDHKTKFSCWSTGRCINKAWVCDGDIDCEDQSDEDDCDSFLCGPPKHPCANDTSVCLQPEKLCNGKKDCPDGSDEGYLCDECSLNNGGCSNHCSVVPGRGIVCSCPEGLQLNKDNKTCEIVDYCSNHLKCSQVCEQHKHTVKCSCYEGWKLDVDGESCTSVDPFEAFIIFSIRHEIRRIDLHKRDYSLLVPGLRNTIALDFHFNQSLLYWTDVVEDRIYRGKLSESGGVSAIEVVVEHGLATPEGLTVDWIAGNIYWIDSNLDQIEVAKLDGSLRTTLIAGAMEHPRAIALDPRYGILFWTDWDANFPRIESASMSGAGRKTIYKDMKTGAWPNGLTVDHFEKRIVWTDARSDAIYSALYDGTNMIEIIRGHEYLSHPFAVSLYGSEVYWTDWRTNTLSKANKWTGQNVSVIQKTSAQPFDLQIYHPSRQPQAPNPCAANDGKGPCSHMCLINHNRSAACACPHLMKLSSDKKTCYEMKKFLLYARRSEIRGVDIDNPYFNFITAFTVPDIDDVTVIDFDASEERLYWTDIKTQTIKRAFIN

SEQ ID NO: 30985 - protein, 4655 aa, Homo sapiens
  REGION 1..4655: note = ENSP00000263816
MDRGPAAVACTLLLALVACLAPASGQECDSAHFRCGSGHCIPADWRCDGTKDCSDDADEIGCAVVTCQQGYFKCQSEGQCIPNSWVCDQDQDCDDGSDERQDCSQSTCSSHQITCSNGQCIPSEYRCDHVRDCPDGADENDCQYPTCEQLTCDNGACYNTSQKCDWKVDCRDSSDEINCTEICLHNEFSCGNGECIPRAYVCDHDNDCQDGSDEHACNYPTCGGYQFTCPSGRCIYQNWVCDGEDDCKDNGDEDGCESGPHDVHKCSPREWSCPESGRCISIYKVCDGILDCPGREDENNTSTGKYCSMTLCSALNCQYQCHETPYGGACFCPPGYIINHNDSRTCVEFDDCQIWGICDQKCESRPGRHLCHCEEGYILERGQYCKANDSFGEASIIFSNGRDLLIGDIHGRSFRILVESQNRGVAVGVAFHYHLQRVFWTDTVQNKVFSVDINGLNIQEVLNVSVETPENLAVDWVNNKIYLVETKVNRIDMVNLDGSYRVTLITENLGHPRGIAVDPTVGYLFFSDWESLSGEPKLERAFMDGSNRKDLVKTKLGWPAGVTLDMISKRVYWVDSRFDYIETVTYDGIQRKTVVHGGSLIPHPFGVSLFEGQVFFTDWTKMAVLKANKFTETNPQVYYQASLRPYGVTVYHSLRQPYATNPCKDNNGGCEQVCVLSHRTDNDGLGFRCKCTFGFQLDTDERHCIAVQNFLIFSSQVAIRGIPFTLSTQEDVMVPVSGNPSFFVGIDFDAQDSTIFFSDMSKHMIFKQKIDGTGREILAANRVENVESLAFDWISKNLYWTDSHYKSISVMRLADKTRRTVVQYLNNPRSVVVHPFAGYLFFTDWFRPAKIMRAWSDGSHLLPVINTTLGWPNGLAIDWAASRLYWVDAYFDKIEHSTFDGLDRRRLGHIEQMTHPFGLAIFGEHLFFTDWRLGAIIRVRKADGGEMTVIRSGIAYILHLKSYDVNIQTGSNACNQPTHPNGDCSHFCFPVPNFQRVCGCPYGMRLASNHLTCEGDPTNEPPTEQCGLFSFPCKNGRCVPNYYLCDGVDDCHDNSDEQLCGTLNNTCSSSAFTCGHGECIPAHWRCDKRNDCVDGSDEHNCPTHAPASCLDTQYTCDNHQCISKNWVCDTDNDCGDGSDEKNCNSTETCQPSQFNCPNHRCIDLSFVCDGDKDCVDGSDEVGCVLNCTASQFKCASGDKCIGVTNRCDGVFDCSDNSDEAGCPTRPPGMCHSDEFQCQEDGICIPNFWECDGHPDCLYGSDEHNACVPKTCPSSYFHCDNGNCIHRAWLCDRDNDCGDMSDEKDCPTQPFRCPSWQWQCLGHNICVNLSVVCDGIFDCPNGTDESPLCNGNSCSDFNGGCTHECVQEPFGAKCLCPLGFLLANDSKTCEDIDECDILGSCSQHCYNMRGSFRCSCDTGYMLESDGRTCKVTASESLLLLVASQNKIIADSVTSQVHNIYSLVENGSYIVAVDFDSISGRIFWSDATQGKTWSAFQNGTDRRVVFDSSIILTETIAIDWVGRNLYWTDYALETIEVSKIDGSHRTVLISKNLTNPRGLALDPRMNEHLLFWSDWGHHPRIERASMDGSMRTVIVQDKIFWPCGLTIDYPNRLLYFMDSYLDYMDFCDYNGHHRRQVIASDLIIRHPYALTLFEDSVYWTDRATRRVMRANKWHGGNQSVVMYNIQWPLGIVAVHPSKQPNSVNPCAFSRCSHLCLLSSQGPHFYSCVCPSGWSLSPDLLNCLRDDQPFLITVRQHIIFGISLNPEVKSNDAMVPIAGIQNGLDVEFDDAEQYIYWVENPGEIHRVKTDGTNRTVFASISMVGPSMNLALDWISRNLYSTNPRTQSIEVLTLHGDIRYRKTLIANDGTALGVGFPIGITVDPARGKLYWSDQGTDSGVPAKIASANMDGTSVKTLFTGNLEHLECVTLDIEEQKLYWAVTGRGVIERGNVDGTDRMILVHQLSHPWGIAVHDSFLYYTDEQYEVIERVDKATGANKIVLRDNVPNLRGLQVYHRRNAAESSNGCSNNMNACQQICLPVPGGLFSCACATGFKLNPDNRSCSPYNSFIVVSMLSAIRGFSLELSDHSETMVPVAGQGRNALHVDVDVSSGFIYWCDFSSSVASDNAIRRIKPDGSSLMNIVTHGIGENGVRGIAVDWVAGNLYFTNAFVSETLIEVLRINTTYRRVLLKVTVDMPRHIVVDPKNRYLFWADYGQRPKIERSFLDCTNRTVLVSEGIVTPRGLAVDRSDGYVYWVDDSLDIIARIRINGENSEVIRYGSRYPTPYGITVFENSIIWVDRNLKKIFQASKEPENTEPPTVIRDNINWLRDVTIFDKQVQPRSPAEVNNNPCLENNGGCSHLCFALPGLHTPKCDCAFGTLQSDGKNCAISTENFLIFALSNSLRSLHLDPENHSPPFQTINVERTVMSLDYDSVSDRIYFTQNLASGVGQISYATLSSGIHTPTVIASGIGTADGIAFDWITRRIYYSDYLNQMINSMAEDGSNRTVIARVPKPRAIVLDPCQGYLYWADWDTHAKIERATLGGNFRVPIVNSSLVMPSGLTLDYEEDLLYWVDASLQRIERSTLTGVDREVIVNAAVHAFGLTLYGQYIYWTDLYTQRIYRANKYDGSGQIAMTTNLLSQPRGINTVVKNQKQQCNNPCEQFNGGCSHICAPGPNGAECQCPHEGNWYLANNRKHCIVDNGERCGASSFTCSNGRCISEEWKCDNDNDCGDGSDEMESVCALHTCSPTAFTCANGRCVQYSYRCDYYNDCGDGSDEAGCLFRDCNATTEFMCNNRRCIPREFICNGVDNCHDNNTSDEKNCPDRTCQSGYTKCHNSNICIPRVYLCDGDNDCGDNSDENPTYCTTHTCSSSEFQCASGRCIPQHWYCDQETDCFDASDEPASCGHSERTCLADEFKCDGGRCIPSEWICDGDNDCGDMSDEDKRHQCQNQNCSDSEFLCVNDRPPDRRCIPQSWVCDGDVDCTDGYDENQNCTRRTCSENEFTCGYGLCIPKIFRCDRHNDCGDYSDERGCLYQTCQQNQFTCQNGRCISKTFVCDEDNDCGDGSDELMHLCHTPEPTCPPHEFKCDNGRCIEMMKLCNHLDDCLDNSDEKGCGINECHDPSISGCDHNCTDTLTSFYCSCRPGYKLMSDKRTCVDIDECTEMPFVCSQKCENVIGSYICKCAPGYLREPDGKTCRQNSNIEPYLIFSNRYYLRNLTIDGYFYSLILEGLDNVVALDFDRVEKRLYWIDTQRQVIERMFLNKTNKETIINHRLPAAESLAVDWVSRKLYWLDARLDGLFVSDLNGGHRRMLAQHCVDANNTFCFDNPRGLALHPQYGYLYWADWGHRAYIGRVGMDGTNKSVIISTKLEWPNGITIDYTNDLLYWADAHLGYIEYSDLEGHHRHTVYDGALPHPFAITIFEDTIYWTDWNTRTVEKGNKYDGSNRQTLVNTTHRPFDIHVYHPYRQPIVSNPCGTNNGGCSHLCLIKPGGKGFTCECPDDFRTLQLSGSTYCMPMCSSTQFLCANNEKCIPIWWKCDGQKDCSDGSDELALCPQRFCRLGQFQCSDGNCTSPQTLCNAHQNCPDGSDEDRLLCENHHCDSNEWQCANKRCIPESWQCDTFNDCEDNSDEDSSHCASRTCRPGQFRCANGRCIPQAWKCDVDNDCGDHSDEPIEECMSSAHLCDNFTEFSCKTNYRCIPKWAVCNGVDDCRDNSDEQGCEERTCHPVGDFRCKNHHCIPLRWQCDGQNDCGDNSDEENCAPRECTESEFRCVNQQCIPSRWICDHYNDCGDNSDERDCEMRTCHPEYFQCTSGHCVHSELKCDGSADCLDASDEADCPTRFPDGAYCQATMFECKNHVCIPPYWKCDGDDDCGDGSDEELHLCLDVPCNSPNRFRCDNNRCIYSHEVCNGVDDCGDGTDETEEHCRKPTPKPCTEYEYKCGNGHCIPHDNVCDDADDCGDWSDELGCNKGKERTCAENICEQNCTQLNEGGFICSCTAGFETNVFDRTSCLDINECEQFGTCPQHCRNTKGSYECVCADGFTSMSDRPGKRCAAEGSSPLLLLPDNVRIRKYNLSSERFSEYLQDEEYIQAVDYDWDPKDIGLSVVYYTVRGEGSRFGAIKRAYIPNFESGRNNLVQEVDLKLKYVMQPDGIAVDWVGRHIYWSDVKNKRIEVAKLDGRYRKWLISTDLDQPAAIAVNPKLGLMFWTDWGKEPKIESAWMNGEDRNILVFEDLGWPTGLSIDYLNNDRIYWSDFKEDVIETIKYDGTDRRVIAKEAMNPYSLDIFEDQLYWISKEKGEVWKQNKFGQGKKEKTLVVNPWLTQVRIFHQLRYNKSVPNLCKQICSHLCLLRPGGYSCACPQGSSFIEGSTTECDAAIELPINLPPPCRCMHGGNCYFDETDLPKCKCPSGYTGKYCEMAFSKGISPGTTAVAVLLTILLIVVIGALAIAGFFHYRRTGSLLPALPKLPSLSSLVKPSENGNGVTFRSGADLNMDIGVSGFGPETAIDRSMAMSEDFVMEMGKQPIIFENPMYSARDSAVKVVQPIQVTVSENVDNKNYGSPINPSEIVPETNPTSPAADGTQVTKWNLFKRKSKQTTNFENPIYAQMENEQKESVAATPPPSPSLPAKPKPPSRRDPTPTYSATEDTFKDTANLVKEDSEV

SEQ ID NO: 30986 - protein, 1225 aa, Homo sapiens
  REGION 1..1225: note = ENSP00000409813
MDRGPAAVACTLLLALVACLAPASGQECDSAHFRCGSGHCIPADWRCDGTKDCSDDADEIGCAVVTCQQGYFKCQSEGQCIPNSWVCDQDQDCDDGSDERQDCSQSTCSSHQITCSNGQCIPSEYRCDHVRDCPDGADENDCQYPTCEQLTCDNGACYNTSQKCDWKVDCRDSSDEINCTEICLHNEFSCGNGECIPRAYVCDHDNDCQDGSDEHACNYPTCGGYQFTCPSGRCIYQNWVCDGEDDCKDNGDEDGCESGPHDVHKCSPREWSCPESGRCISIYKVCDGILDCPGREDENNTSTGKYCSMTLCSALNCQYQCHETPYGGACFCPPGYIINHNDSRTCVEFDDCQIWGICDQKCESRPGRHLCHCEEGYILERGQYCKANDSFGEASIIFSNGRDLLIGDIHGRSFRILVESQNRGVAVGVAFHYHLQRVFWTDTVQNKVFSVDINGLNIQEVLNVSVETPENLAVDWVNNKIYLVETKVNRIDMVNLDGSYRVTLITENLGHPRGIAVDPTVGKTVVHGGSLIPHPFGVSLFEGQVFFTDWTKMAVLKANKFTETNPQVYYQASLRPYGVTVYHSLRQPYATNPCKDNNGGCEQVCVLSHRTDNDGLGFRCKCTFGFQLDTDERHCIGREILAANRVENVESLAFDWISKNLYWTDSHYKSISVMRLADKTRRTVVQYLNNPRSVVVHPFAGYLFFTDWFRPAKIMRAWSDGSHLLPVINTTLGWPNGLAIDWAASRLYWVDAYFDKIEHSTFDGLDRRRLGHIEQMTHPFGLAIFGEHLFFTDWRLGAIIRVRKADGGEMTVIRSGIAYILHLKSYDVNIQTGSNACNQPTHPNGDCSHFCFPVPNFQRVCGCPYGMRLASNHLTCEGDPTNEPPTEQCGLFSFPCKNGRCVPNYYLCDGVDDCHDNSDEQLCGTLNNTCSSSAFTCGHGECIPAHWRCDKRNDCVDGSDEHNCPTHAPASCLDTQYTCDNHQCISKNWVCDTDNDCGDGSDEKNCNSTETCQPSQFNCPNHRCIDLSFVCDGDKDCVDGSDEVGCVLNCTASQFKCASGDKCIGVTNRCDGVFDCSDNSDEAGCPTRPPGMCHSDEFQCQEDGICIPNFWECDGHPDCLYGSDEHNACVPKTCPSSYFHCDNGNCIHRAWLCDRDNDCGDMSDEKDCPTQPFRCPSWQWQCLGHNICVNLSVVCDGIFDCPNGTDESPLCSKFPDHSLLAINSF

SEQ ID NO: 30987 - protein, 357 aa, Homo sapiens
  REGION 1..357: note = ENSP00000421922
MAPRRVRSFLRGLPALLLLLLFLGPWPAASHGGKYSREKNQPKPSPKRESGEEFRMEKLNQLWEKAQRLHLPPVRLAELHADLKIQERDELAWKKLKLDGLDEDGEKEARLIRNLNVILAKYGLDGKKDARQVTSNSLSGTQEDGLDDPRLEKLWHKAKTSGKFSGEELDKLWREFLHHKEKVHEYNVLLETLSRTEEIHENVISPSDLSDIKGSVLHSRHTELKEKLRSINQGLDRLRRVSHQGYSTEAEFEEPRVIDLWDLAQSANLTDKELEAFREELKHFEAKIEKHNHYQKQLEIAHEKLRHAESVGDGERVSRSREKHALLEGRTKELGYTVKKHLQDLSGRISRARHNEL

SEQ ID NO: 30988 - protein, 105 aa, Homo sapiens
  REGION 1..105: note = ENSP00000421648
MAPRRVRSFLRGLPALLLLLLFLGPWPAASHGGKYSREKNQPKPSPKRESGEEFRMEKLNQLWEKAQRNLPVASLLRGQFLAVSWSVLLVAHRLLPFVRSCIFLP

SEQ ID NO: 30989 - protein, 197 aa, Homo sapiens
  REGION 1..197: note = ENSP00000435217
MFHCIPLWRCNRHVESIDKRHCSLVYVPEEIYRYARSLEELLLDANQLRELPEQFFQLVKLRKLGLSDNEIQRLPPEIANFMQLVELDVSRNEIPEIPESISFCKALQVADFSGNPLTRLPESFPELQNLTCLSVNDISLQSLPENIGNLYNLASLELRENLLTYLPDSLTQLRRLEELDLGNNEIYNLNQLEPSYI

SEQ ID NO: 30990 - protein, 524 aa, Homo sapiens
  REGION 1..524: note = ENSP00000359925
MFHCIPLWRCNRHVESIDKRHCSLVYVPEEIYRYARSLEELLLDANQLRELPEQFFQLVKLRKLGLSDNEIQRLPPEIANFMQLVELDVSRNEIPEIPESISFCKALQVADFSGNPLTRLPESFPELQNLTCLSVNDISLQSLPENIGNLYNLASLELRENLLTYLPDSLTQLRRLEELDLGNNEIYNLPESIGALLHLKDLWLDGNQLSELPQEIGNLKNLLCLDVSENRLERLPEEISGLTSLTDLVISQNLLETIPDGIGKLKKLSILKVDQNRLTQLPEAVGECESLTELVLTENQLLTLPKSIGKLKKLSNLNADRNKLVSLPKEIGGCCSLTVFCVRDNRLTRIPAEVSQATELHVLDVAGNRLLHLPLSLTALKLKALWLSDNQSQPLLTFQTDTDYTTGEKILTCVLLPQLPSEPTCQENLPRCGALENLVNDVSDEAWNERAVNRVSAIRFVEDEKDEEDNETRTLLRRATPHPGELKHMKKTVENLRNDMNAAKGLDSNKNEVNHAIDRVTTSV

SEQ ID NO: 30991 - protein, 154 aa, Homo sapiens
  REGION 1..154: note = ENSP00000359919
MFHCIPLWRCNRHVESIDKRHCSLVYVPEEIYRYARSLEELLLDANQLRELPEQFFQLVKLRKLGLSDNEIQRLPPEIANFMQLVELDVSRNEIPEIPESISFCKALQVADFSGNPLTRLPESFPELQNLTCLSVNDISLQSLPENIGKQKTTS

SEQ ID NO: 30992 - protein, 371 aa, Homo sapiens
  REGION 1..371: note = ENSP00000379241
MGHKVVVFDISVIRALWETRVKKHKAWQKKEVERLEKSALEKIKEEWNFVAECRRKGIPQAVYCKNGFIDTSVRLLDKIERNTLTRQSSLPKDRGKRSSAFVFELSGEHWTELPDSLKEQTHLREWYISNTLIQIIPTYIQLFQAMRILDLPKNQISHLPAEIGCLKNLKELNVGFNYLKSIPPELGDCENLERLDCSGNLELMELPFELSNLKQVTFVDISANKFSSVPICVLRMSNLQWLDISSNNLTDLPQDIDRLEELQSFLLYKNKLTYLPYSMLNLKKLTLLVVSGDHLVELPTALCDSSTPLKFVSLMDNPIDNAQCEDGNEIMESERDRQHFDKEVMKAYIEDLKERESVPSYTTKVSFSLQL

SEQ ID NO: 30993 - protein, 371 aa, Homo sapiens; identical to SEQ ID NO: 30992
  REGION 1..371: note = ENSP00000296144

SEQ ID NO: 30994 - protein, 184 aa, Homo sapiens
  REGION 1..184: note = ENSP00000348043
MLKKMGEAVARVARKVNETVESGSDTLDLAECKLVSFPIGIYKVLRNVSGQIHLITLANNELKSLTSKFMTTFSQLRELHLEGNFLHRLPSEVSALQHLKAIDLSRNQFQDFPEQLTALPALETINLEENEIVDVPVEKLAAMPALRSINLRFNPLNAEVRVIAPPLIKFDMLMSPEGARAPLP

SEQ ID NO: 30995 - protein, 184 aa, Homo sapiens; identical to SEQ ID NO: 30994
  REGION 1..184: note = ENSP00000362321

SEQ ID NO: 30996 - protein, 134 aa, Homo sapiens
  REGION 1..134: note = ENSP00000350860
MLKKMGEAVARVARKVNETVESGSDTLELHLEGNFLHRLPSEVSALQHLKAIDLSRNQFQDFPEQLTALPALETINLEENEIVDVPVEKLAAMPALRSINLRFNPLNAEVRVIAPPLIKFDMLMSPEGARAPLP

SEQ ID NO: 30997 - protein, 128 aa, Homo sapiens
  REGION 1..128: note = ENSP00000350255
MLKKMGEAVARVARKVNETVESGSDTLDLAECKLVSFPIGIYKVLRNVSGQIHLITLANNELKSLTSKFMTTFSQLRDVPVEKLAAMPALRSINLRFNPLNAEVRVIAPPLIKFDMLMSPEGARAPLP

SEQ ID NO: 30998 - protein, 174 aa, Homo sapiens
  REGION 1..174: note = ENSP00000413745
MLKKMGEAVARVARKVNETVESGSDTLDLAECKLVSFPIGIYKVLRNVSGQIHLITLANNELKSLTSKFMTTFSQLRELHLEGNFLHRLPSEVSALQHLKAIDLSRNQFQDFPEQLTALPALETINLEENEIVDVPVEKLAAMPALRSINLRFNPLNAEVRVIAPPLIKFDMLM

SEQ ID NO: 30999 - protein, 134 aa, Homo sapiens; identical to SEQ ID NO: 30996
  REGION 1..134: note = ENSP00000378458

SEQ ID NO: 31000 - protein, 115 aa, Homo sapiens
  REGION 1..115: note = ENSP00000378457
MTTFSQLRELHLEGNFLHRLPSEVSALQHLKAIDLSRNQFQDFPEQLTALPALETINLEENEIVDVPVEKLAAMPALRSINLRFNPLNAEVRVIAPPLIKFDMLMSPEGARAPLP

SEQ ID NO: 31001 - protein, 294 aa, Homo sapiens
  REGION 1..294: note = ENSP00000365253
MRPRAPACAAAALGLCSLLLLLAPGHACPAGCACTDPHTVDCRDRGLPSVPDPFPLDVRKLLVAGNRIQRIPEDFFIFYGDLVYLDFRNNSLRSLEEGTFSGSAKLVFLDLSYNNLTQLGAGAFRSAGRLVKLSLANNNLVGVHEDAFETLESLQVLELNDNNLRSLSVAALAALPALRSLRLDGNPWLCDCDFAHLFSWIQENASKLPKGLDEIQCSLPMESRRISLRELSEASFSECRFSLSLTDLCIIIFSGVAVSIAAIISSFFLATVVQCLQRCAPNKDAEDEDEDKDD

SEQ ID NO: 31002 - protein, 259 aa, Homo sapiens
  REGION 1..259: note = ENSP00000379880
MNLVDLWLTRSLSMCLLLQSFVLMILCFHSASMCPKGCLCSSSGGLNVTCSNANLKEIPRDLPPETVLLYLDSNQITSIPNEIFKDLHQLRVLNLSKNGIEFIDEHAFKGVAETLQTLDLSDNRIQSVHKNAFNNLKARARIANNPWHCDCTLQQVLRSMASNHETAHNVICKTSVLDEHAGRPFLNAANDADLCNLPKKTTDYAMLVTMFGWFTMVISYVVYYVRQNQEDARRHLEYLKSLPSRQKKADEPDDISTVV

SEQ ID NO: 31003 - protein, 54 aa, Homo sapiens
  REGION 1..54: note = ENSP00000389764
MNLVDLWLTRSLSMCLLLQSFVLMILCFHSASMCPKGCLCSSSGGLNVTCSNAN

SEQ ID NO: 31004 - protein, 163 aa, Homo sapiens
  REGION 1..163: note = ENSP00000398184
MNLVDLWLTRSLSMCLLLQSFVLMILCFHSASMCPKGCLCSSSGGLNVTCSNANLKEIPRDLPPETVLLYLDSNQITSIPNEIFKDLHQLRVLNLSKNGIEFIDEHAFKGVAETLQTLDLSDNRIQSVHKNAFNNLKARARIANNPWHCDCTLQQVLRSMASN

SEQ ID NO: 31005 - protein, 259 aa, Homo sapiens; identical to SEQ ID NO: 31002
  REGION 1..259: note = ENSP00000406370

SEQ ID NO: 31006 - protein, 259 aa, Homo sapiens; identical to SEQ ID NO: 31002
  REGION 1..259: note = ENSP00000394940

SEQ ID NO: 31007 - protein, 640 aa, Homo sapiens
  REGION 1..640: note = ENSP00000278198
MLNKMTLHPQQIMIGPRFNRALFDPLLVVLLALQLLVVAGLVRAQTCPSVCSCSNQFSKVICVRKNLREVPDGISTNTRLLNLHENQIQIIKVNSFKHLRHLEILQLSRNHIRTIEIGAFNGLANLNTLELFDNRLTTIPNGAFVYLSKLKELWLRNNPIESIPSYAFNRIPSLRRLDLGELKRLSYISEGAFEGLSNLRYLNLAMCNLREIPNLTPLIKLDELDLSGNHLSAIRPGSFQGLMHLQKLWMIQSQIQVIERNAFDNLQSLVEINLAHNNLTLLPHDLFTPLHHLERIHLHHNPWNCNCDILWLSWWIKDMAPSNTACCARCNTPPNLKGRYIGELDQNYFTCYAPVIVEPPADLNVTEGMAAELKCRASTSLTSVSWITPNGTVMTHGAYKVRIAVLSDGTLNFTNVTVQDTGMYTCMVSNSVGNTTASATLNVTAATTTPFSYFSTVTVETMEPSQDEARTTDNNVGPTPVVDWETTNVTTSLTPQSTRSTEKTFTIPVTDINSGIPGIDEVMKTTKIIIGCFVAITLMAAVMLVIFYKMRKQHHRQNHHAPTRTVEIINVDDEITGDTPMESHLPMPAIEHEHLNHYNSYKSPFNHTTTVNTINSIHSSVHEPLLIRMNSKDNVQETQI

SEQ ID NO: 31008 - protein, 640 aa, Homo sapiens; identical to SEQ ID NO: 31007
  REGION 1..640: note = ENSP00000436976

SEQ ID NO: 31009 - protein, 640 aa, Homo sapiens; identical to SEQ ID NO: 31007
  REGION 1..640: note = ENSP00000437132

SEQ ID NO: 31010 - protein, 640 aa, Homo sapiens; identical to SEQ ID NO: 31007
  REGION 1..640: note = ENSP00000434761

SEQ ID NO: 31011 - protein, 41 aa, Homo sapiens
  REGION 1..41: note = ENSP00000431363
MLNKMTLHPQQIMIGPRFNRALFDPLLVVLLALQLLVVAGL

SEQ ID NO: 31012 - protein, 640 aa, Homo sapiens; identical to SEQ ID NO: 31007
  REGION 1..640: note = ENSP00000480903

SEQ ID NO: 31013 - protein, 50 aa, Homo sapiens
  REGION 1..50: note = ENSP00000428285
MTERLLIKALSGGKNTKIITLNGKKMTKMPSALGKLPGLKTLVLQNNLIP

SEQ ID NO: 31014 - protein, 69 aa, Homo sapiens
  REGION 1..69: note = ENSP00000428537
MTERLLIKALSGGKNTKIITLNGKKMTKMPSALGKLPGLKTLVLQNNLIPKVCPELCNLTQAGCGGSCL

SEQ ID NO: 31015 - protein, 191 aa, Homo sapiens
  REGION 1..191: note = ENSP00000343221
MTERLLIKALSGGKNTKIITLNGKKMTKMPSALGKLPGLKTLVLQNNLIPKVCPELCNLTQFQDLKLREFYCEGNPLFLQQPVISTQQENVWSLQEITSRFVMNQLAENNPFLMDDIERYPQVRSMISQGKTCAICGQYFITVWLECVRFVPPPKDWKISKNLKLVPLQVLICSYKCFTQRDPNLFGIAQV

SEQ ID NO: 31016 - protein, 347 aa, Homo sapiens
  REGION 1..347: note = ENSP00000400803
MTERLLIKALSGGKNTKIITLNGKKMTKMPSALGKLPGLKTLVLQNNLIPKVCPELCNLTQLTTLNLGNNLLEEVPEEMKYLTSLKNLHLSGNRICRFAPGACDGLQNLILLNLNNNHLTQLPQEVSRLKSLTYMSINYNQLASIPRELCFLENLVELQLNYNQLICIPEEIKFLKKLQKLLLARNNIGVLPEELCDLKKLRILDIAGNIIQIFPSGFQDLKLREFYCEGNPLFLQQPVISTQQENVWSLQEITSRFVMNQLAENNPFLMDDIERYPQVRSMISQGKTCAICGQYFITVWLECVRFVPPPKDWKISKNLKLVPLQVLICSYKCFTQRDPNLFGIAQV

SEQ ID NO: 31017 - protein, 1495 aa, Homo sapiens
  REGION 1..1495: note = ENSP00000309245
MQCLEMTTKRKIIGRLVPCRCFRGEEEIISVLDYSHCSLQQVPKEVFNFERTLEELYLDANQIEELPKQLFNCQALRKLSIPDNDLSNLPTTIASLVNLKELDISKNGVQEFPENIKCCKCLTIIEASVNPISKLPDGFTQLLNLTQLYLNDAFLEFLPANFGRLVKLRILELRENHLKTLPKSMHKLAQLERLDLGNNEFGELPEVLDQIQNLRELWMDNNALQVLPGSIGKLKMLVYLDMSKNRIETVDMDISGCEALEDLLLSSNMLQQLPDSIGLLKKLTTLKVDDNQLTMLPNTIGNLSLLEEFDCSCNELESLPSTIGYLHSLRTLAVDENFLPELPREIGSCKNVTVMSLRSNKLEFLPEEIGQMQKLRVLNLSDNRLKNLPFSFTKLKELAALWLSDNQSKALIPLQTEAHPETKQRVLTNYMFPQQPRGDEDFQSDSDSFNPTLWEEQRQQRMTVAFEFEDKKEDDENAGKVKDLSCQAPWERGQRGITLQPARLSGDCCTPWARCDQQIQDMPVPQNDPQLAWGCISGLQQERSMCTPLPVAAQSTTLPSLSGRQVEINLKRYPTPYPEDLKNMVKSVQNLVGKPSHGVRVENSNPTANTEQTVKEKYEHKWPVAPKEITVEDSFVHPANEMRIGELHPSLAETPLYPPKLVLLGKDKKESTDESEVDKTHCLNNSVSSGTYSDYSPSQASSGSSNTRVKVGSLQTTAKDAVHNSLWGNRIAPSFPQPLDSKPLLSQREAVPPGNIPQRPDRLPMSDTFTDNWTDGSHYDNTGFVAEETTAENANSNPLLSSKSRSTSSHGRRPLIRQDRIVGVPLELEQSTHRHTPETEVPPSNPWQNWTRTPSPFEDRTAFPSKLETTPTTSPLPERKEHIKESTEIPSPFSPGVPWEYHDSNPNRSLSNVFSQIHCRPESSKGVISISKSTERLSPLMKDIKSNKFKKSQSIDEIDIGTYKVYNIPLENYASGSDHLGSHERPDKMLGPEHGMSSMSRSQSVPMLDDEMLTYGSSKGPQQQKASMTKKVYQFDQSFNPQGSVEVKAEKRIPPPFQHNPEYVQQASKNIAKDLISPRAYRGYPPMEQMFSFSQPSVNEDAVVNAQFASQGARAGFLRRADSLVSATEMAMFRRVNEPHELPPTDRYGRPPYRGGLDRQSSVTVTESQFLKRNGRYEDEHPSYQEVKAQAGSFPVKNLTQRRPLSARSYSTESYGASQTRPVSARPTMAALLEKIPSDYNLGNYGDKPSDNSDLKTRPTPVKGEESCGKMPADWRQQLLRHIEARRLDRTPSQQSNILDNGQEDVSPSGQWNPYPLGRRDVPPDTITKKAGSHIQTLMGSQSLQHRSREQQPYEGNINKVTIQQFQSPLPIQIPSSQATRGPQPGRCLIQTKGQRSMDGYPEQFCVRIEKNPGLGFSISGGISGQGNPFKPSDKGIFVTRVQPDGPASNLLQPGDKILQANGHSFVHMEHEKAVLLLKSFQNTVDLVIQRELTV

SEQ ID NO: 31018 - protein, 217 aa, Homo sapiens
  REGION 1..217: note = ENSP00000359997
MMENLIRGRNPPQYQRSPCKEVRAALRKRPEEELQCLEMTTKRKIIGRLVPCRCFRGEEEIISVLDYSHCSLQQVPKEVFNFERTLEELYLDANQIEELPKQLFNCQALRKLSIPDNDLSNLPTTIASLVNLKELDISKNGVQEFPENIKCCKCLTIIEASVNPISKLPDGFTQLLNLTQLYLNDAFLEFLPANFGRLVKLRILELRENHLKTLPNI

SEQ ID NO: 31019 - protein, 1537 aa, Homo sapiens
  REGION 1..1537: note = ENSP00000035383
MTTKRKIIGRLVPCRCFRGEEEIISVLDYSHCSLQQVPKEVFNFERTLEELYLDANQIEELPKQLFNCQALRKLSIPDNDLSNLPTTIASLVNLKELDISKNGVQEFPENIKCCKCLTIIEASVNPISKLPDGFTQLLNLTQLYLNDAFLEFLPANFGRLVKLRILELRENHLKTLPKSMHKLAQLERLDLGNNEFGELPEVLDQIQNLRELWMDNNALQVLPGSIGKLKMLVYLDMSKNRIETVDMDISGCEALEDLLLSSNMLQQLPDSIGLLKKLTTLKVDDNQLTMLPNTIGNLSLLEEFDCSCNELESLPSTIGYLHSLRTLAVDENFLPELPREIGSCKNVTVMSLRSNKLEFLPEEIGQMQKLRVLNLSDNRLKNLPFSFTKLKELAALWLSDNQSKALIPLQTEAHPETKQRVLTNYMFPQQPRGDEDFQSDSDSFNPTLWEEQRQQRMTVAFEFEDKKEDDENAGKVKDLSCQAPWERGQRGITLQPARLSGDCCTPWARCDQQIQDMPVPQNDPQLAWGCISGLQQERSMCTPLPVAAQSTTLPSLSGRQVEINLKRYPTPYPEDLKNMVKSVQNLVGKPSHGVRVENSNPTANTEQTVKEKYEHKWPVAPKEITVEDSFVHPANEMRIGELHPSLAETPLYPPKLVLLGKDKKESTDESEVDKTHCLNNSVSSGTYSDYSPSQASSGSSNTRVKVGSLQTTAKDAVHNSLWGNRIAPSFPQPLDSKPLLSQREAVPPGNIPQRPDRLPMSDTFTDNWTDGSHYDNTGFVAEETTAENANSNPLLSSKSRSTSSHGRRPLIRQDRIVGVPLELEQSTHRHTPETEVPPSNPWQNWTRTPSPFEDRTAFPSKLETTPTTSPLPERKEHIKESTEIPSPFSPGVPWEYHDSNPNRSLSNVFSQIHCRPESSKGVISISKSTERLSPLMKDIKSNKFKKSQSIDEIDIGTYKVYNIPLENYASGSDHLGSHERPDKMLGPEHGMSSMSRSQSVPMLDDEMLTYGSSKGPQQQKASMTKKVYQFDQSFNPQGSVEVKAEKRIPPPFQHNPEYVQQASKNIAKDLISPRAYRGYPPMEQMFSFSQPSVNEDAVVNAQFASQGARAGFLRRADSLVSATEMAMFRRVNEPHELPPTDRYGRPPYRGGLDRQSSVTVTESQFLKRNGRYEDEHPSYQEVKAQAGSFPVKNLTQRRPLSARSYSTESYGASQTRPVSARPTMAALLEKIPSDYNLGNYGDKPSDNSDLKTRPTPVKGEESCGKMPADWRQQLLRHIEARRLDRNAAYKHNTVNLGMLPYGGISAMHAGRSMTLNLQTKSKFDHQELPLQKTPSQQSNILDNGQEDVSPSGQWNPYPLGRRDVPPDTITKKAGSHIQTLMGSQSLQHRSREQQPYEGNINKVTIQQFQSPLPIQIPSSQATRGPQPGRCLIQTKGQRSMDGYPEQFCVRIEKNPGLGFSISGGISGQGNPFKPSDKGIFVTRVQPDGPASNLLQPGDKILQANGHSFVHMEHEKAVLLLKSFQNTVDLVIQRELTV

SEQ ID NO: 31020 - protein, 61 aa, Homo sapiens
  REGION 1..61: note = ENSP00000466082
  VARIANT 1: note = Any amino acid
XGIFVTRVQPDGPASNLLQPGDKILQANGHSFVHMEHEKAVLLLKSFQNTVDLVIQRKHLL

SEQ ID NO: 31021 - protein, 36 aa, Homo sapiens
  REGION 1..36: note = ENSP00000476660
  VARIANT 1: note = Any amino acid
XANGHSFVHMEHEKAVLLLKSFQNTVDLVIQRKHLL

SEQ ID NO: 31022 - protein, 32 aa, Homo sapiens
  REGION 1..32: note = ENSP00000476307
  VARIANT 1: note = Any amino acid
XSFVHMEHEKAVLLLKSFQNTVDLVIQRKHLL

SEQ ID NO: 31023 - protein, 25 aa, Homo sapiens
  REGION 1..25: note = ENSP00000477399
  VARIANT 1: note = Any amino acid
XEKAVLLLKSFQNTVDLVIQRKHLL

SEQ ID NO: 31024 - protein, 821 aa, Homo sapiens
  REGION 1..821: note = ENSP00000394867
MTKMLGKLRIAPSFPQPLDSKPLLSQREAVPPGNIPQRPDRLPMSDTFTDNWTDGSHYDNTGFVAEETTAENANSNPLLSSKSRSTSSHGRRPLIRQDRIVGVPLELEQSTHRHTPETEVPPSNPWQNWTRTPSPFEDRTAFPSKLETTPTTSPLPERKEHIKESTEIPSPFSPGVPWEYHDSNPNRSLSNVFSQIHCRPESSKGVISISKSTERLSPLMKDIKSNKFKKSQSIDEIDIGTYKVYNIPLENYASGSDHLGSHERPDKMLGPEHGMSSMSRSQSVPMLDDEMLTYGSSKGPQQQKASMTKKVYQFDQSFNPQGSVEVKAEKRIPPPFQHNPEYVQQASKNIAKDLISPRAYRGYPPMEQMFSFSQPSVNEDAVVNAQFASQGARAGFLRRADSLVSATEMAMFRRVNEPHELPPTDRYGRPPYRGGLDRQSSVTVTESQFLKRNGRYEDEHPSYQEVKAQAGSFPVKNLTQRRPLSARSYSTESYGASQTRPVSARPTMAALLEKIPSDYNLGNYGDKPSDNSDLKTRPTPVKGEESCGKMPADWRQQLLRHIEARRLDRNAAYKHNTVNLGMLPYGGISAMHAGRSMTLNLQTKSKFDHQELPLQKTPSQQSNILDNGQEDVSPSGQWNPYPLGRRDVPPDTITKKAGSHIQTLMGSQSLQHRSREQQPYEGNINKVTIQQFQSPLPIQIPSSQATRGPQPGRCLIQTKGQRSMDGYPEQFCVRIEKNPGLGFSISGGISGQGNPFKPSDKGIFVTRVQPDGPASNLLQPGDKILQANGHSFVHMEHEKAVLLLKSFQNTVDLVIQRELTV

SEQ ID NO: 31025 - protein, 521 aa, Homo sapiens
  REGION 1..521: note = ENSP00000398726
MRVASVQQVGWSLLCKLIEVCPGTMQSLMGPQDVGNDWEVLGVHQLILKMLTVHNASVNLSVIGLKTLDLLLTSGKITLLILDEESDIFMLIFDAMHSFPANDEVQKLGCKALHVLFERGNNVEVLMSGNVRCYNIVVEAMKAFPMSERIQEVSCCLLHRLTLGNFFNILVLNEVHEFVVKAVQQYPENAALQISALSCLALLRSFPGICECIVNSLRTKCNTSLDIMAAVVPKILTVMKRHETSLPVQLEALRAILHFIVPGMPEESREDTEFHHKLNMVKKQCFKNDIHKLVLAALNRFIGNPGIQKCGLKVISSIVHFPDALEMLSLEGAMDSVLHTLQMYPDDQEIQCLGLSLIGYLITKKNVFIGTGHLLAKILVSSLYRFKDVAEIQTKGFQTILAILKLSASFSKLLVHHSFDLVIFHQMSSNIMEQKDQQFLNLCCKCFAKVAMDDYLKNVMLERACDQNNSIMVECLLLLGADANQAKEGSSLICQVCEKESSPKLVELLLNSGSREQDVRK

SEQ ID NO: 31026 - protein, 1271 aa, Homo sapiens
  REGION 1..1271: note = ENSP00000341930
MASGSCQGCEEDEETLKKLIVRLNNVQEGKQIETLVQILEDLLVFTYSERASKLFQGKNIHVPLLIVLDSYMRVASVQQVGWSLLCKLIEVCPGTMQSLMGPQDVGNDWEVLGVHQLILKMLTVHNASVNLSVIGLKTLDLLLTSGKITLLILDEESDIFMLIFDAMHSFPANDEVQKLGCKALHVLFERVSEEQLTEFVENKDYMILLSALTNFKDEEEIVLHVLHCLHSLAIPCNNVEVLMSGNVRCYNIVVEAMKAFPMSERIQEVSCCLLHRLTLGNFFNILVLNEVHEFVVKAVQQYPENAALQISALSCLALLTETIFLNQDLEEKNENQENDDEGEEDKLFWLEACYKALTWHRKNKHVQEAACWALNNLLMYQNSLHEKIGDEDGHFPAHREVMLSMLMHSSSKEVFQASANALSTLLEQNVNFRKILLSKGIHLNVLELMQKHIHSPEVAESGCKMLNHLFEGSNTSLDIMAAVVPKILTVMKRHETSLPVQLEALRAILHFIVPGMPEESREDTEFHHKLNMVKKQCFKNDIHKLVLAALNRFIGNPGIQKCGLKVISSIVHFPDALEMLSLEGAMDSVLHTLQMYPDDQEIQCLGLSLIGYLITKKNVFIGTGHLLAKILVSSLYRFKDVAEIQTKGFQTILAILKLSASFSKLLVHHSFDLVIFHQMSSNIMEQKDQQFLNLCCKCFAKVAMDDYLKNVMLERACDQNNSIMVECLLLLGADANQAKEGSSLICQVCEKESSPKLVELLLNSGSREQDVRKALTISIGKGDSQIISLLLRRLALDVANNSICLGGFCIGKVEPSWLGPLFPDKTSNLRKQTNIASTLARMVIRYQMKSAVEEGTASGSDGNFSEDVLSKFDEWTFIPDSSMDSVFAQSDDLDSEGSEGSFLVKKKSNSISVGEFYRDAVLQRCSPNLQRHSNSLGPIFDHEDLLKRKRKILSSDDSLRSSKLQSHMRHSDSISSLASEREYITSLDLSANELRDIDALSQKCCISVHLEHLEKLELHQNALTSFPQQLCETLKSLTHLDLHSNKFTSFPSYLLKMSCIANLDVSRNDIGPSVVLDPTVKCPTLKQFNLSYNQLSFVPENLTDVVEKLEQLILEGNKISGICSPLRLKELKILNLSKNHISSLSENFLEACPKVESFSARMNFLAAMPFLPPSMTILKLSQNKFSCIPEAILNLPHLRSLDMSSNDIQYLPGPAHWKSLNLRELLFSHNQISILDLSEKAYLWSRVEKLHLSHNKLKEVRRLLPLKKYTL

SEQ ID NO: 31027 - protein, 2527 aa, Homo sapiens
  REGION 1..2527: note = ENSP00000298910
MASGSCQGCEEDEETLKKLIVRLNNVQEGKQIETLVQILEDLLVFTYSERASKLFQGKNIHVPLLIVLDSYMRVASVQQVGWSLLCKLIEVCPGTMQSLMGPQDVGNDWEVLGVHQLILKMLTVHNASVNLSVIGLKTLDLLLTSGKITLLILDEESDIFMLIFDAMHSFPANDEVQKLGCKALHVLFERVSEEQLTEFVENKDYMILLSALTNFKDEEEIVLHVLHCLHSLAIPCNNVEVLMSGNVRCYNIVVEAMKAFPMSERIQEVSCCLLHRLTLGNFFNILVLNEVHEFVVKAVQQYPENAALQISALSCLALLTETIFLNQDLEEKNENQENDDEGEEDKLFWLEACYKALTWHRKNKHVQEAACWALNNLLMYQNSLHEKIGDEDGHFPAHREVMLSMLMHSSSKEVFQASANALSTLLEQNVNFRKILLSKGIHLNVLELMQKHIHSPEVAESGCKMLNHLFEGSNTSLDIMAAVVPKILTVMKRHETSLPVQLEALRAILHFIVPGMPEESREDTEFHHKLNMVKKQCFKNDIHKLVLAALNRFIGNPGIQKCGLKVISSIVHFPDALEMLSLEGAMDSVLHTLQMYPDDQEIQCLGLSLIGYLITKKNVFIGTGHLLAKILVSSLYRFKDVAEIQTKGFQTILAILKLSASFSKLLVHHSFDLVIFHQMSSNIMEQKDQQFLNLCCKCFAKVAMDDYLKNVMLERACDQNNSIMVECLLLLGADANQAKEGSSLICQVCEKESSPKLVELLLNSGSREQDVRKALTISIGKGDSQIISLLLRRLALDVANNSICLGGFCIGKVEPSWLGPLFPDKTSNLRKQTNIASTLARMVIRYQMKSAVEEGTASGSDGNFSEDVLSKFDEWTFIPDSSMDSVFAQSDDLDSEGSEGSFLVKKKSNSISVGEFYRDAVLQRCSPNLQRHSNSLGPIFDHEDLLKRKRKILSSDDSLRSSKLQSHMRHSDSISSLASEREYITSLDLSANELRDIDALSQKCCISVHLEHLEKLELHQNALTSFPQQLCETLKSLTHLDLHSNKFTSFPSYLLKMSCIANLDVSRNDIGPSVVLDPTVKCPTLKQFNLSYNQLSFVPENLTDVVEKLEQLILEGNKISGICSPLRLKELKILNLSKNHISSLSENFLEACPKVESFSARMNFLAAMPFLPPSMTILKLSQNKFSCIPEAILNLPHLRSLDMSSNDIQYLPGPAHWKSLNLRELLFSHNQISILDLSEKAYLWSRVEKLHLSHNKLKEIPPEIGCLENLTSLDVSYNLELRSFPNEMGKLSKIWDLPLDELHLNFDFKHIGCKAKDIIRFLQQRLKKAVPYNRMKLMIVGNTGSGKTTLLQQLMKTKKSDLGMQSATVGIDVKDWPIQIRDKRKRDLVLNVWDFAGREEFYSTHPHFMTQRALYLAVYDLSKGQAEVDAMKPWLFNIKARASSSPVILVGTHLDVSDEKQRKACMSKITKELLNKRGFPAIRDYHFVNATEESDALAKLRKTIINESLNFKIRDQLVVGQLIPDCYVELEKIILSERKNVPIEFPVIDRKRLLQLVRENQLQLDENELPHAVHFLNESGVLLHFQDPALQLSDLYFVEPKWLCKIMAQILTVKVEGCPKHPKGIISRRDVEKFLSKKRKFPKNYMSQYFKLLEKFQIALPIGEEYLLVPSSLSDHRPVIELPHCENSEIIIRLYEMPYFPMGFWSRLINRLLEISPYMLSGRERALRPNRMYWRQGIYLNWSPEAYCLVGSEVLDNHPESFLKITVPSCRKGCILLGQVVDHIDSLMEEWFPGLLEIDICGEGETLLKKWALYSFNDGEEHQKILLDDLMKKAEEGDLLVNPDQPRLTIPISQIAPDLILADLPRNIMLNNDELEFEQAPEFLLGDGSFGSVYRAAYEGEEVAVKIFNKHTSLRLLRQELVVLCHLHHPSLISLLAAGIRPRMLVMELASKGSLDRLLQQDKASLTRTLQHRIALHVADGLRYLHSAMIIYRDLKPHNVLLFTLYPNAAIIAKIADYGIAQYCCRMGIKTSEGTPGFRAPEVARGNVIYNQQADVYSFGLLLYDILTTGGRIVEGLKFPNEFDELEIQGKLPDPVKEYGCAPWPMVEKLIKQCLKENPQERPTSAQVFDILNSAELVCLTRRILLPKNVIVECMVATHHNSRNASIWLGCGHTDRGQLSFLDLNTEGYTSEEVADSRILCLALVHLPVEKESWIVSGTQSGTLLVINTEDGKKRHTLEKMTDSVTCLYCNSFSKQSKQKNFLLVGTADGKLAIFEDKTVKLKGAAPLKILNIGNVSTPLMCLSESTNSTERNVMWGGCGTKIFSFSNDFTIQKLIETRTSQLFSYAAFSDSNIITVVVDTALYIAKQNSPVVEVWDKKTEKLCGLIDCVHFLREVMVKENKESKHKMSYSGRVKTLCLQKNTALWIGTGGGHILLLDLSTRRLIRVIYNFCNSVRVMMTAQLGSLKNVMLVLGYNRKNTEGTQKQKEIQSCLTVWDINLPHEVQNLEKHIEVRKELAEKMRRTSVE

SEQ ID NO: 31028 - protein, 207 aa, Homo sapiens
  REGION 1..207: note = ENSP00000410821
  VARIANT 1: note = Any amino acid
XLDLSANELRDIDALSQKCCISVHLEHLEKLELHQNALTSFPQQLCETLKSLTHLDLHSNKFTSFPSYLLKMSCIANLDVSRNDIGPSVVLDPTVKCPTLKQFNLSYNQLSFVPENLTDVVEKLEQLILEGNKISGICSPLRLKELKILNLSKNHISSLSENFLEACPKVESFSARMNFLVSGCSVVPQGNLIQTVESGKHFCACDI

SEQ ID NO: 31029 - protein, 454 aa, Homo sapiens
  REGION 1..454: note = ENSP00000490200
  VARIANT 1: note = Any amino acid
XTGGRIVEGLKFPNEFDELEIQGKLPDPVKEYGCAPWPMVEKLIKQCLKENPQERPTSAQVFDILNSAELVCLTRRILLPKNVIVECMVATHHNSRNASIWLGCGHTDRGQLSFLDLNTEGYTSEEVADSRILCLALVHLPVEKESWIVSGTQSGTLLVINTEDGKKRHTLEKMTDSVTCLYCNSFSKQSKQKNFLLVGTADGKLAIFEDKTVKLKGAAPLKILNIGNVSTPLMCLSESTNSTERNVMWGGCGTKIFSFSNDFTIQKLIETRTSQLFSYAAFSDSNIITVVVDTALYIAKQNSPVVEVWDKKTEKLCGLIDCVHFLREVMVKENKESKHKMSYSGRVKTLCLQKNTALWIGTGGGHILLLDLSTRRLIRVIYNFCNSVRVMMTAQLGSLKNVMLVLGYNRKNTEEIQSCLTVWDINLPHEVQNLEKHIEVRKELAEKMRRTSVE

SEQ ID NO: 31030 - protein, 591 aa, Homo sapiens
  REGION 1..591: note = ENSP00000387228
MPGFHLITQLKGMSVVLVLLPTLLLVMLTGAQRACPKNCRCDGKIVYCESHAFADIPENISGGSQGLSLRFNSIQKLKSNQFAGLNQLIWLYLDHNYISSVDEDAFQGIRRLKELILSSNKITYLHNKTFHPVPNLRNLDLSYNKLQTLQSEQFKGLRKLIILHLRSNSLKTVPIRVFQDCRNLDFLDLGYNRLRSLSRNAFAGLLKLKELHLEHNQFSKINFAHFPRLFNLRSIYLQWNRIRSISQGLTWTWSSLHNLDLSGNDIQGIEPGTFKCLPNLQKLNLDSNKLTNISQETVNAWISLISITLSGNMWECSRSICPLFYWLKNFKGNKESTMICAGPKHIQGEKVSDAVETYNICSEVQVVNTERSHLVPQTPQKPLIIPRPTIFKPDVTQSTFETPSPSPGFQIPGAEQEYEHVSFHKIIAGSVALFLSVAMILLVIYVSWKRYPASMKQLQQHSLMKRRRKKARESERQMNSPLQEYYVDYKPTNSETMDISVNGSGPCTYTISGSRECEMPHHMKPLPYYSYDQPVIGYCQAHQPLHVTKGYETVSPEQDESPGLELGRDHSFIATIARSAAPAIYLERIAN

SEQ ID NO: 31031 - protein, 590 aa, Homo sapiens
  REGION 1..590: note = ENSP00000387297
MGFHLITQLKGMSVVLVLLPTLLLVMLTGAQRACPKNCRCDGKIVYCESHAFADIPENISGGSQGLSLRFNSIQKLKSNQFAGLNQLIWLYLDHNYISSVDEDAFQGIRRLKELILSSNKITYLHNKTFHPVPNLRNLDLSYNKLQTLQSEQFKGLRKLIILHLRSNSLKTVPIRVFQDCRNLDFLDLGYNRLRSLSRNAFAGLLKLKELHLEHNQFSKINFAHFPRLFNLRSIYLQWNRIRSISQGLTWTWSSLHNLDLSGNDIQGIEPGTFKCLPNLQKLNLDSNKLTNISQETVNAWISLISITLSGNMWECSRSICPLFYWLKNFKGNKESTMICAGPKHIQGEKVSDAVETYNICSEVQVVNTERSHLVPQTPQKPLIIPRPTIFKPDVTQSTFETPSPSPGFQIPGAEQEYEHVSFHKIIAGSVALFLSVAMILLVIYVSWKRYPASMKQLQQHSLMKRRRKKARESERQMNSPLQEYYVDYKPTNSETMDISVNGSGPCTYTISGSRECEMPHHMKPLPYYSYDQPVIGYCQAHQPLHVTKGYETVSPEQDESPGLELGRDHSFIATIARSAAPAIYLERIAN

SEQ ID NO: 31032 - protein, 590 aa, Homo sapiens; identical to SEQ ID NO: 31031
  REGION 1..590: note = ENSP00000386357

SEQ ID NO: 31033 - protein, 518 aa, Homo sapiens
  REGION 1..518: note = ENSP00000386236
MGFHLITQLKGMSVVLVLLPTLLLVMLTGAQRACPKNCRCDGKIVYCESHAFADIPENISGGSQGLSLRFNSIQKLKSNQFAGLNQLIWLYLDHNYISSVDEDAFQGIRRLKELILSSNKITYLHNKTFHPVPNLRNLDLSYNKLQTLQSEQFKGLRKLIILHLRSNSLKTVPIRVFQDCRNLDFLDLGYNRLRSLSRNAFAGLLKLKELHLEHNQFSKINFAHFPRLFNLRSIYLQWNRIRSISQGLTWTWSSLHNLDLSGNDIQGIEPGTFKCLPNLQKLNLDSNKLTNISQETVNAWISLISITLSGNMWECSRSICPLFYWLKNFKGNKESTMICAGPKHIQGEKVSDAVETYNICSEVQVVNTERSHLVPQTPQKPLIIPRPTIFKPDVTQSTFETPSPSPGFQIPGAEQEYEHVSFHKIIAGSVALFLSVAMILLVIYVSWKRYPASMKQLQQHSLMKRRRKKARESERQMNSPLQEYYVDYKPTNSETMDISVNGSGPCTYTISGSRECEV

SEQ ID NO: 31034 - protein, 519 aa, Homo sapiens
  REGION 1..519: note = ENSP00000386286
MPGFHLITQLKGMSVVLVLLPTLLLVMLTGAQRACPKNCRCDGKIVYCESHAFADIPENISGGSQGLSLRFNSIQKLKSNQFAGLNQLIWLYLDHNYISSVDEDAFQGIRRLKELILSSNKITYLHNKTFHPVPNLRNLDLSYNKLQTLQSEQFKGLRKLIILHLRSNSLKTVPIRVFQDCRNLDFLDLGYNRLRSLSRNAFAGLLKLKELHLEHNQFSKINFAHFPRLFNLRSIYLQWNRIRSISQGLTWTWSSLHNLDLSGNDIQGIEPGTFKCLPNLQKLNLDSNKLTNISQETVNAWISLISITLSGNMWECSRSICPLFYWLKNFKGNKESTMICAGPKHIQGEKVSDAVETYNICSEVQVVNTERSHLVPQTPQKPLIIPRPTIFKPDVTQSTFETPSPSPGFQIPGAEQEYEHVSFHKIIAGSVALFLSVAMILLVIYVSWKRYPASMKQLQQHSLMKRRRKKARESERQMNSPLQEYYVDYKPTNSETMDISVNGSGPCTYTISGSRECEV

SEQ ID NO: 31035 - protein, 24 aa, Homo sapiens
  REGION 1..24: note = ENSP00000408722
MSVVLVLLPTLLLVMLTGAQRACP

SEQ ID NO: 31036 - protein, 345 aa, Homo sapiens
  REGION 1..345: note = ENSP00000273286
MKGELLLFSSVIVLLQVVCSCPDKCYCQSSTNFVDCSQQGLAEIPSHLPPQTRTLHLQDNQIHHLPAFAFRSVPWLMTLNLSNNSLSNLAPGAFHGLQHLQVLNLTQNSLLSLESRLFHSLPQLRELDLSSNNISHLPTSLGETWENLTILAVQQNQLQQLDRALLESMPSVRLLLLKDNLWKCNCHLLGLKLWLEKFVYKGGLTDGIICESPDTWKGKDLLRIPHELYQPCPLPAPDPVSSQAQWPGSAHGVVLRPPENHNAGERELLECELKPKPRPANLRHAIATVIITGVVCGIVCLMMLAAAIYGCTYAAITAQYHGGPLAQTNDPGKVEEKERFDSSPA

SEQ ID NO: 31037 - protein, 269 aa, Homo sapiens
  REGION 1..269: note = ENSP00000419772
MTLNLSNNSLSNLAPGAFHGLQHLQVLNLTQNSLLSLESRLFHSLPQLRELDLSSNNISHLPTSLGETWENLTILAVQQNQLQQLDRALLESMPSVRLLLLKDNLWKCNCHLLGLKLWLEKFVYKGGLTDGIICESPDTWKGKDLLRIPHELYQPCPLPAPDPVSSQAQWPGSAHGVVLRPPENHNAGERELLECELKPKPRPANLRHAIATVIITGVVCGIVCLMMLAAAIYGCTYAAITAQYHGGPLAQTNDPGKVEEKERFDSSPA

SEQ ID NO: 31038 - protein, 91 aa, Homo sapiens
  REGION 1..91: note = ENSP00000410758
MAANATTNPSQLLPLELVDKCIGSRIHIVMKSDKEIVGTLLGFDDFVNMVLEDVTEFEITPEGRRITKLDQILLNGNNITMLVPGGEGPEV

SEQ ID NO: 31039 - protein, 62 aa, Homo sapiens
  REGION 1..62: note = ENSP00000386363
MKSDKEIVGTLLGFDDFVNMVLEDVTEFEITPEGRRITKLDQILLNGNNITMLVPGGEGPEV

SEQ ID NO: 31040 - protein, 62 aa, Homo sapiens; identical to SEQ ID NO: 31039
  REGION 1..62: note = ENSP00000386814

SEQ ID NO: 31041 - protein, 62 aa, Homo sapiens; identical to SEQ ID NO: 31039
  REGION 1..62: note = ENSP00000386707

SEQ ID NO: 31042 - protein, 64 aa, Homo sapiens
  REGION 1..64: note = ENSP00000386275
MAANATTNPSQLLPLELVDKCIGSRIHIVMKSDKEIVGTLLGFDDFVSILLKVKSHQKEEGLLN

SEQ ID NO: 31043 - protein, 71 aa, Homo sapiens
  REGION 1..71: note = ENSP00000223084
MAANATTNPSQLLPLGNRRPLGSRNRELTFRIGGRGAVPRQALAECGEMYKTKCGSTLSSKSSRQQAAPAL

SEQ ID NO: 31044 - protein, 62 aa, Homo sapiens; identical to SEQ ID NO: 31039
  REGION 1..62: note = ENSP00000387109

SEQ ID NO: 31045 - protein, 62 aa, Homo sapiens; identical to SEQ ID NO: 31039
  REGION 1..62: note = ENSP00000387126

SEQ ID NO: 31046 - protein, 1821 aa, Homo sapiens
  REGION 1..1821: note = ENSP00000261978
MRPRTKARSPGRALRNPWRGFLPLTLALFVGAGHAQRDPVGRYEPAGGDANRLRRPGGSYPAAAAAKVYSLFREQDAPVAGLQPVERAQPGWGSPRRPTEAEARRPSRAQQSRRVQPPAQTRRSTPLGQQQPAPRTRAAPALPRLGTPQRSGAAPPTPPRGRLTGRNVCGGQCCPGWTTANSTNHCIKPVCEPPCQNRGSCSRPQLCVCRSGFRGARCEEVIPDEEFDPQNSRLAPRRWAERSPNLRRSSAAGEGTLARAQPPAPQSPPAPQSPPAGTLSGLSQTHPSQQHVGLSRTVRLHPTATASSQLSSNALPPGPGLEQRDGTQQAVPLEHPSSPWGLNLTEKIKKIKIVFTPTICKQTCARGHCANSCERGDTTTLYSQGGHGHDPKSGFRIYFCQIPCLNGGRCIGRDECWCPANSTGKFCHLPIPQPDREPPGRGSRPRALLEAPLKQSTFTLPLSNQLASVNPSLVKVHIHHPPEASVQIHQVAQVRGGVEEALVENSVETRPPPWLPASPGHSLWDSNNIPARSGEPPRPLPPAAPRPRGLLGRCYLNTVNGQCANPLLELTTQEDCCGSVGAFWGVTLCAPCPPRPASPVIENGQLECPQGYKRLNLTHCQDINECLTLGLCKDAECVNTRGSYLCTCRPGLMLDPSRSRCVSDKAISMLQGLCYRSLGPGTCTLPLAQRITKQICCCSRVGKAWGSECEKCPLPGTEAFREICPAGHGYTYASSDIRLSMRKAEEEELARPPREQGQRSSGALPGPAERQPLRVVTDTWLEAGTIPDKGDSQAGQVTTSVTHAPAWVTGNATTPPMPEQGIAEIQEEQVTPSTDVLVTLSTPGIDRCAAGATNVCGPGTCVNLPDGYRCVCSPGYQLHPSQAYCTDDNECLRDPCKGKGRCINRVGSYSCFCYPGYTLATSGATQECQDINECEQPGVCSGGQCTNTEGSYHCECDQGYIMVRKGHCQDINECRHPGTCPDGRCVNSPGSYTCLACEEGYRGQSGSCVDVNECLTPGVCAHGKCTNLEGSFRCSCEQGYEVTSDEKGCQDVDECASRASCPTGLCLNTEGSFACSACENGYWVNEDGTACEDLDECAFPGVCPSGVCTNTAGSFSCKDCDGGYRPSPLGDSCEDVDECEDPQSSCLGGECKNTVGSYQCLCPQGFQLANGTVCEDVNECMGEEHCAPHGECLNSHGSFFCLCAPGFVSAEGGTSCQDVDECATTDPCVGGHCVNTEGSFNCLCETGFQPSPESGECVDIDECEDYGDPVCGTWKCENSPGSYRCVLGCQPGFHMAPNGDCIDIDECANDTMCGSHGFCDNTDGSFRCLCDQGFEISPSGWDCVDVNECELMLAVCGAALCENVEGSFLCLCASDLEEYDAQEGHCRPRGAGGQSMSEAPTGDHAPAPTRMDCYSGQKGHAPCSSVLGRNTTQAECCCTQGASWGDACDLCPSEDSAEFSEICPSGKGYIPVEGAWTFGQTMYTDADECVIFGPGLCPNGRCLNTVPGYVCLCNPGFHYDASHKKCEDHDECQDLACENGECVNTEGSFHCFCSPPLTLDLSQQRCMNSTSSTEDLPDHDIHMDICWKKVTNDVCSEPLRGHRTTYTECCCQDGEAWSQQCALCPPRSSEVYAQLCNVARIEAEREAGVHFRPGYEYGPGPDDLHYSIYGPDGAPFYNYLGPEDTVPEPAFPNTAGHSADRTPILESPLQPSELQPHYVASHPEPPAGFEGLQAEECGILNGCENGRCVRVREGYTCDCFEGFQLDAAHMACVDVNECDDLNGPAVLCVHGYCENTEGSYRCHCSPGYVAEAGPPHCTAKE

SEQ ID NO: 31047 - protein, 1769 aa, Homo sapiens
  REGION 1..1769: note = ENSP00000452110
MRPRTKARSPGRALRNPWRGFLPLTLALFVGAGHAQRDPVGRYEPAGGDANRLRRPGGSYPAAAAAKVYSLFREQDAPVAGLQPVERAQPGWGSPRRPTEAEARRPSRAQQSRRVQPPAQTRRSTPLGQQQPAPRTRAAPALPRLGTPQRSGAAPPTPPRGRLTGRNVCGGQCCPGWTTANSTNHCIKPVCEPPCQNRGSCSRPQLCVCRSGFRGARCEEVIPDEEFDPQNSRLAPRRWAERSPNLRRSSAAGEGTLARAQPPAPQSPPAPQSPPAGTLSGLSQTHPSQQHVGLSRTVRLHPTATASSQLSSNALPPGPGLEQRDGTQQAVPLEHPSSPWGLNLTEKIKKIKIVFTPTICKQTCARGHCANSCERGDTTTLYSQGGHGHDPKSGFRIYFCQIPCLNGGRCIGRDECWCPANSTGKFCHLPIPQPDREPPGRGSRPRALLEAPLKQSTFTLPLSNQLASVNPSLVKVHIHHPPEASVQIHQVAQVRGGVEEALVENSVETRPPPWLPASPGHSLWDSNNIPARSGEPPRPLPPAAPRPRGLLGRCYLNTVNGQCANPLLELTTQEDCCGSVGAFWGVTLCAPCPPRPASPVIENGQLECPQGYKRLNLTHCQDINECLTLGLCKDAECVNTRGSYLCTCRPGLMLDPSRSRCVSDKAISMLQGLCYRSLGPGTCTLPLAQRITKQICCCSRVGKAWGSECEKCPLPGTEAFREICPAGHGYTYASSDIRLSMRKAEEEELARPPREQGQRSSGALPGPAERQPLRVVTDTWLEAGTIPDKGDSQAGQVTTSVTHAPAWVTGNATTPPMPEQGIAEIQEEQVTPSTDVLVTLSTPGIDRCAAGATNVCGPGTCVNLPDGYRCVCSPGYQLHPSQAYCTDDNECLRDPCKGKGRCINRVGSYSCFCYPGYTLATSGATQECQDINECEQPGVCSGGQCTNTEGSYHCECDQGYIMVRKGHCQDINECRHPGTCPDGRCVNSPGSYTCLACEEGYRGQSGSCVDVNECLTPGVCAHGKCTNLEGSFRCSCEQGYEVTSDEKGCQDVDECASRASCPTGLCLNTEGSFACSACENGYWVNEDGTACEDLDECAFPGVCPSGVCTNTAGSFSCKDCDGGYRPSPLGDSCEDVDECEDPQSSCLGGECKNTVGSYQCLCPQGFQLANGTVCEDVNECMGEEHCAPHGECLNSHGSFFCLCAPGFVSAEGGTSCQDVDECATTDPCVGGHCVNTEGSFNCLCETGFQPSPESGECVDIDECEDYGDPVCGTWKCENSPGSYRCVLGCQPGFHMAPNGDCIDIDECANDTMCGSHGFCDNTDGSFRCLCDQGFEISPSGWDCVDVNECELMLAVCGAALCENVEGSFLCLCASDLEEYDAQEGHCRPRGAGGQSMSEAPTGDHAPAPTRMDCYSGQKGHAPCSSVLGRNTTQAECCCTQGASWGDACDLCPSEDSAEFSEICPSGKGYIPVEGAWTFGQTMYTDADECVIFGPGLCPNGRCLNTVPGYVCLCNPGFHYDASHKKCEDHDECQDLACENGECVNTEGSFHCFCSPPLTLDLSQQRCMNSTSSTEDLPDHDIHMDICWKKVTNDVCSEPLRGHRTTYTECCCQDGEAWSQQCALCPPRSSEVYAQLCNVARIEAEREAGVHFRPGYEYGPGPDDLHYSIYGPDGAPFYNYLGPEDTVPEPAFPNTAGHSADRTPILESPLQPSELQPHYVASHPGLCCCKTGEEVGTKAVSLPSPPPASHIASRSPQPASKGFRRRSAAS

SEQ ID NO: 31048 - protein, 1777 aa, Homo sapiens
  REGION 1..1777: note = ENSP00000451477
MRPRTKARSPGRALRNPWRGFLPLTLALFVGAGHAQRDPVGRYEPAGGDANRLRRPGGSYPAAAAAKVYSLFREQDAPVAGLQPVERAQPGWGSPRRPTEAEARRPSRAQQSRRVQPPAQTRRSTPLGQQQPAPRTRAAPALPRLGTPQRSGAAPPTPPRGRLTGRNVCGGQCCPGWTTANSTNHCIKPVCEPPCQNRGSCSRPQLCVCRSGFRGARCEEVIPDEEFDPQNSRLAPRRWAERSPNLRRSSAAGEGTLARAQPPAPQSPPAPQSPPAGTLSGLSQTHPSQQHVGLSRTVRLHPTATASSQLSSNALPPGPGLEQRDGTQQAVPLEHPSSPWGLNLTEKIKKIKIVFTPTICKQTCARGHCANSCERGDTTTLYSQGGHGHDPKSGFRIYFCQIPCLNGGRCIGRDECWCPANSTGKFCHLPIPQPDREPPGRGSRPRALLEAPLKQSTFTLPLSNQLASVNPSLVKVHIHHPPEASVQIHQVAQVRGGVEEALVENSVETRPPPWLPASPGHSLWDSNNIPARSGEPPRPLPPAAPRPRGLLGRCYLNTVNGQCANPLLELTTQEDCCGSVGAFWGVTLCAPCPPRPASPVIENGQLECPQGYKRLNLTHCQDINECLTLGLCKDAECVNTRGSYLCTCRPGLMLDPSRSRCVSDKAISMLQGLCYRSLGPGTCTLPLAQRITKQICCCSRVGKAWGSECEKCPLPGTEAFREICPAGHGYTYASSDIRLSMRKAEEEELARPPREQGQRSSGALPGPAERQPLRVVTDTWLEAGTIPDKGDSQAGQVTTSVTHAPAWVTGNATTPPMPEQGIAEIQEEQVTPSTDVLVTLSTPGIDRCAAGATNVCGPGTCVNLPDGYRCVCSPGYQLHPSQAYCTDDNECLRDPCKGKGRCINRVGSYSCFCYPGYTLATSGATQECQDINECEQPGVCSGGQCTNTEGSYHCECDQGYIMVRKGHCQDINECRHPGTCPDGRCVNSPGSYTCLACEEGYRGQSGSCVDVNECLTPGVCAHGKCTNLEGSFRCSCEQGYEVTSDEKGCQDVDECASRASCPTGLCLNTEGSFACSACENGYWVNEDGTACEDLDECAFPGVCPSGVCTNTAGSFSCKDCDGGYRPSPLGDSCEDVDECEDPQSSCLGGECKNTVGSYQCLCPQGFQLANGTVCEDVNECMGEEHCAPHGECLNSHGSFFCLCAPGFVSAEGGTSCQDVDECATTDPCVGGHCVNTEGSFNCLCETGFQPSPESGECVDIDECANDTMCGSHGFCDNTDGSFRCLCDQGFEISPSGWDCVDVNECELMLAVCGAALCENVEGSFLCLCASDLEEYDAQEGHCRPRGAGGQSMSEAPTGDHAPAPTRMDCYSGQKGHAPCSSVLGRNTTQAECCCTQGASWGDACDLCPSEDSAEFSEICPSGKGYIPVEGAWTFGQTMYTDADECVIFGPGLCPNGRCLNTVPGYVCLCNPGFHYDASHKKCEDHDECQDLACENGECVNTEGSFHCFCSPPLTLDLSQQRCMNSTSSTEDLPDHDIHMDICWKKVTNDVCSEPLRGHRTTYTECCCQDGEAWSQQCALCPPRSSEVYAQLCNVARIEAEREAGVHFRPGYEYGPGPDDLHYSIYGPDGAPFYNYLGPEDTVPEPAFPNTAGHSADRTPILESPLQPSELQPHYVASHPEPPAGFEGLQAEECGILNGCENGRCVRVREGYTCDCFEGFQLDAAHMACVDVNECDDLNGPAVLCVHGYCENTEGSYRCHCSPGYVAEAGPPHCTAKE

SEQ ID NO: 31049 - protein, 233 aa, Homo sapiens
  REGION 1..233: note = ENSP00000450668
  VARIANT 1: note = Any amino acid
XTEGSFACSACENGYWVNEDGTACEDLDECAFPGVCPSGVCTNTAGSFSCKDCDGGYRPSPLGDSCEDVDECEDPQSSCLGGECKNTVGSYQCLCPQGFQLANGTVCEDVNECMGEEHCAPHGECLNSHGSFFCLCAPGFVSAEGGTSCQDIDECEDYGDPVCGTWKCENSPGSYRCVLGCQPGFHMAPNGDCIDIDECANDTMCGSHGFCDNTDGSFRCLCDQGFEISPSGW

SEQ ID NO: 31050 - protein, 803 aa, Homo sapiens
  REGION 1..803: note = ENSP00000347293
MGCWGQLLVWFGAAGAILCSSPGSQETFLRSSPLPLASPSPRDPKVSAPPSILEPASPLNSPGTEGSWLFSTCGASGRHGPTQTQCDGAYAGTSVVVTVGAAGQLRGVQLWRVPGPGQYLISAYGAAGGKGAKNHLSRAHGVFVSAIFSLGLGESLYILVGQQGEDACPGGSPESQLVCLGESRAVEEHAAMDGSEGVPGSRRWAGGGGGGGGATYVFRVRAGELEPLLVAAGGGGRAYLRPRDRGRTQASPEKLENRSEAPGSGGRGGAAGGDASETDNLWADGEDGVSFIHPSSELFLQPLAVTENHGEVEIRRHLNCSHCPLRDCQWQAELQLAECLCPEGMELAVDNVTCMDLHKPPGPLVLMVAVVATSTLSLLMVCGVLILVKQKKWQGLQEMRLPSPELELSKLRTSAIRTAPNPYYCQVGLGPAQSWPLPPGVTEVSPANVTLLRALGHGAFGEVYEGLVIGLPGDSSPLQVAIKTLPELCSPQDELDFLMEALIISKFRHQNIVRCVGLSLRATPRLILLELMSGGDMKSFLRHSRPHLGQPSPLVMRDLLQLAQDIAQGCHYLEENHFIHRDIAARNCLLSCAGPSRVAKIGDFGMARDIYRASYYRRGDRALLPVKWMPPEAFLEGIFTSKTDSWSFGVLLWEIFSLGYMPYPGRTNQEVLDFVVGGGRMDPPRGCPGPVYRIMTQCWQHEPELRPSFASILERLQYCTQDPDVLNSLLPMELGPTPEEEGTSGLGNRSLECLRPPQPQELSPEKLKSWGGSPLGPWLSSGLKPLKSRGLQPQNLWNPTYRS

SEQ ID NO: 31051 - protein, 864 aa, Homo sapiens
  REGION 1..864: note = ENSP00000263800
MGCWGQLLVWFGAAGAILCSSPGSQETFLRSSPLPLASPSPRDPKVSAPPSILEPASPLNSPGTEGSWLFSTCGASGRHGPTQTQCDGAYAGTSVVVTVGAAGQLRGVQLWRVPGPGQYLISAYGAAGGKGAKNHLSRAHGVFVSAIFSLGLGESLYILVGQQGEDACPGGSPESQLVCLGESRAVEEHAAMDGSEGVPGSRRWAGGGGGGGGATYVFRVRAGELEPLLVAAGGGGRAYLRPRDRGRTQASPEKLENRSEAPGSGGRGGAAGGGGGWTSRAPSPQAGRSLQEGAEGGQGCSEAWATLGWAAAGGFGGGGGACTAGGGGGGYRGGDASETDNLWADGEDGVSFIHPSSELFLQPLAVTENHGEVEIRRHLNCSHCPLRDCQWQAELQLAECLCPEGMELAVDNVTCMDLHKPPGPLVLMVAVVATSTLSLLMVCGVLILVKQKKWQGLQEMRLPSPELELSKLRTSAIRTAPNPYYCQVGLGPAQSWPLPPGVTEVSPANVTLLRALGHGAFGEVYEGLVIGLPGDSSPLQVAIKTLPELCSPQDELDFLMEALIISKFRHQNIVRCVGLSLRATPRLILLELMSGGDMKSFLRHSRPHLGQPSPLVMRDLLQLAQDIAQGCHYLEENHFIHRDIAARNCLLSCAGPSRVAKIGDFGMARDIYRASYYRRGDRALLPVKWMPPEAFLEGIFTSKTDSWSFGVLLWEIFSLGYMPYPGRTNQEVLDFVVGGGRMDPPRGCPGPVYRIMTQCWQHEPELRPSFASILERLQYCTQDPDVLNSLLPMELGPTPEEEGTSGLGNRSLECLRPPQPQELSPEKLKSWGGSPLGPWLSSGLKPLKSRGLQPQNLWNPTYRS

SEQ ID NO: 31052 - protein, 562 aa, Homo sapiens
  REGION 1..562: note = ENSP00000458111
MGCWGQLLVWFGAAGGDASETDNLWADGEDGVSFIHPSSELFLQPLAVTENHGEVEIRRHLNCSHCPLRDCQWQAELQLAECLCPEGMELAVDNVTCMDLHKPPGPLVLMVAVVATSTLSLLMVCGVLILGTKRLAGTVDSRLLLSMKQKKWQGLQEMRLPSPELELSKLRTSAIRTAPNPYYCQVGLGPAQSWPLPPGVTEVSPANVTLLRALGHGAFGEVYEGLVIGLPGDSSPLQVAIKTLPELCSPQDELDFLMEALIISKFRHQNIVRCVGLSLRATPRLILLELMSGGDMKSFLRHSRPHLGQPSPLVMRDLLQLAQDIAQGCHYLEENHFIHRDIAARNCLLSCAGPSRVAKIGDFGMARDIYRASYYRRGDRALLPVKWMPPEAFLEGIFTSKTDSWSFGVLLWEIFSLGYMPYPGRTNQEVLDFVVGGGRMDPPRGCPGPVYRIMTQCWQHEPELRPSFASILERLQYCTQDPDVLNSLLPMELGPTPEEEGTSGLGNRSLECLRPPQPQELSPEKLKSWGGSPLGPWLSSGLKPLKSRGLQPQNLWNPTYRS

SEQ ID NO: 31053 - protein, 734 aa, Homo sapiens
  REGION 1..734: note = ENSP00000392196
MGCWGQLLVWFGAAGAILCSSPGSQETFLRSSPLPLASPSPRDPKVSAPPSILEPASPLNSPGTEGSWLFSTCGASGRHGPTQTQCDGAYAGTSVVVTVGAAGQLRGVQLWRVPGPGQYLISAYGAAGGKGAKNHLSRAHGVFVSAIFSLGLGESLYILVGQQGEDACPGGSPESQLVCLGESRAVEEHAAMDGSEGVPGSRRWAGGGGGGGGATYVFRVRAGELEPLLVAAGGGGRAYLRPRDRGRTQASPEKLENRSEAPGSGGRGGAAGGDASETDNLWADGEDGVSFIHPSSELFLQPLAVTENHGEVEIRRHLNCSHCPLRDCQWQAELQLAECLCPEGMELAVDNVTCMDLHKPPGPLVLMVAVVATSTLSLLMVCGVLILGGAWPGPVLASATRCHRGFPSQCYSAQTLPELCSPQDELDFLMEALIISKFRHQNIVRCVGLSLRATPRLILLELMSGGDMKSFLRHSRPHLGQPSPLVMRDLLQLAQDIAQGCHYLEENHFIHRDIAARNCLLSCAGPSRVAKIGDFGMARDIYRASYYRRGDRALLPVKWMPPEAFLEGIFTSKTDSWSFGVLLWEIFSLGYMPYPGRTNQEVLDFVVGGGRMDPPRGCPGPVYRIMTQCWQHEPELRPSFASILERLQYCTQDPDVLNSLLPMELGPTPEEEGTSGLGNRSLECLRPPQPQELSPEKLKSWGGSPLGPWLSSGLKPLKSRGLQPQNLWNPTYRS

SEQ ID NO: 31054 - protein, 239 aa, Homo sapiens
  REGION 1..239: note = ENSP00000361048
MEGTVESQTPDLRDVEGKVGRKTPEGLLRGLRGECELGTSGALLLPGASSTGHDLGDKIMALKMELAYLRAIDVKILQQLVTLNEGIEAVRWLLEERGTLTSHCSSLTSSQYSLTGGSPGRSRRGSWDSLPDTSTTDRLDSVSIGSFLDTVAPSELDEQGPPGAPRSEMDWAKVIAGGERARTEVDVAATRLGSLRAVWKPPGERLQGGPPESPEDESAKLGFEAHWFWEQCQDDVTFL

SEQ ID NO: 31055 - protein, 228 aa, Homo sapiens
  REGION 1..228: note = ENSP00000321026
MEDSPLPDLRDIELKLGRKVPESLVRSLRGEEPVPRERDRDPCGGSGGGGGGGGGCSSSSSYCSFPPSLSSSSSSSPTSGSPRGSHSSALERLETKLHLLRQEMVNLRATDVRLMRQLLVINESIESIKWMIEEKATITSRGSSLSGSLCSLLESQSTSLRGSYNSLHDGSDGLDGISVGSYLDTLADDVPGHQTPSDLDQFSDSSLIEDSQALHKRPKLDSEYYCFG

SEQ ID NO: 31056 - protein, 147 aa, Homo sapiens
  REGION 1..147: note = ENSP00000428427
MTSGIPGCGGACVLPSRAPLRRRDPQHCSPTLSEAPLLRAHTQTRLLTRGLPTPNTTRTVQVSVTVTPTWSPVRPRQDRLLWFVTSRQDGHPLQNEDLLASAAGCPSGCGASQLADVLLLLEPEEQSVLPEADHLLRPGQLLRDCVC

SEQ ID NO: 31057 - protein, 131 aa, Homo sapiens
  REGION 1..131: note = ENSP00000292494
MKIFLPVLLAALLGVERASSLMCFSCLNQKSNLYCLKPTICSDQDNYCVTVSASAGIGNLVTFGHSLSKTCSPACPIPEGVNVGVASMGISCCQSFLCNFSAADGGLRASVTLLGAGLLLSLLPALLRFGP

SEQ ID NO: 31058 - protein, 131 aa, Homo sapiens; identical to SEQ ID NO: 31057
  REGION 1..131: note = ENSP00000414307

SEQ ID NO: 31059 - protein, 131 aa, Homo sapiens; identical to SEQ ID NO: 31057
  REGION 1..131: note = ENSP00000427915

SEQ ID NO: 31060 - protein, 73 aa, Homo sapiens
  REGION 1..73: note = ENSP00000430131
MKIFLPVLLAALLGVERASSLMCFSCLNQKSNLYCLKPTICSDQDNYCVTVSASAGIGECQASDRAFLPWPSP

SEQ ID NO: 31061 - protein, 131 aa, Homo sapiens; identical to SEQ ID NO: 31057
  REGION 1..131: note = ENSP00000428572

SEQ ID NO: 31062 - protein, 131 aa, Homo sapiens; identical to SEQ ID NO: 31057
  REGION 1..131: note = ENSP00000428169

SEQ ID NO: 31063 - protein, 41 aa, Homo sapiens
  REGION 1..41: note = ENSP00000428365
MKIFLPVLLAALLGVEREEQSVLPEADHLLRPGQLLRDCVC

SEQ ID NO: 31064 - protein, 131 aa, Homo sapiens; identical to SEQ ID NO: 31057
  REGION 1..131: note = ENSP00000428159

SEQ ID NO: 31065 - protein, 66 aa, Homo sapiens
  REGION 1..66: note = ENSP00000430796
MKIFLPVLLAALLGVERASSLMCFSCLNQKSNLYCLKPTICSDQDNYCVTVSASAGIASFPMQGIS

SEQ ID NO: 31066 - protein, 41 aa, Homo sapiens; identical to SEQ ID NO: 31063
  REGION 1..41: note = ENSP00000430770

SEQ ID NO: 31067 - protein, 66 aa, Homo sapiens; identical to SEQ ID NO: 31065
  REGION 1..66: note = ENSP00000428467

SEQ ID NO: 31068 - protein, 66 aa, Homo sapiens
  REGION 1..66: note = ENSP00000430700
MKIFLPVLLAALLGVERASSLMCFSCLNQKSNLYCLKPTICSDQDNYCVTVSASAGIGGFAGGTDS

SEQ ID NO: 31069 - protein, 131 aa, Homo sapiens; identical to SEQ ID NO: 31057
  REGION 1..131: note = ENSP00000428442

SEQ ID NO: 31070 - protein, 147 aa, Homo sapiens; identical to SEQ ID NO: 31056
  REGION 1..147: note = ENSP00000488311

SEQ ID NO: 31071 - protein, 131 aa, Homo sapiens; identical to SEQ ID NO: 31057
  REGION 1..131: note = ENSP00000482517

SEQ ID NO: 31072 - protein, 131 aa, Homo sapiens; identical to SEQ ID NO: 31057
  REGION 1..131: note = ENSP00000488421

SEQ ID NO: 31073 - protein, 131 aa, Homo sapiens; identical to SEQ ID NO: 31057
  REGION 1..131: note = ENSP00000488443

SEQ ID NO: 31074 - protein, 73 aa, Homo sapiens; identical to SEQ ID NO: 31060
  REGION 1..73: note = ENSP00000488115

SEQ ID NO: 31075 - protein, 131 aa, Homo sapiens; identical to SEQ ID NO: 31057
  REGION 1..131: note = ENSP00000488556

SEQ ID NO: 31076 - protein, 131 aa, Homo sapiens; identical to SEQ ID NO: 31057
  REGION 1..131: note = ENSP00000487664

SEQ ID NO: 31077 - protein, 41 aa, Homo sapiens; identical to SEQ ID NO: 31063
  REGION 1..41: note = ENSP00000488743

SEQ ID NO: 31078 - protein, 131 aa, Homo sapiens; identical to SEQ ID NO: 31057
  REGION 1..131: note = ENSP00000488891

SEQ ID NO: 31079 - protein, 66 aa, Homo sapiens; identical to SEQ ID NO: 31065
  REGION 1..66: note = ENSP00000488121

SEQ ID NO: 31080 - protein, 41 aa, Homo sapiens; identical to SEQ ID NO: 31063
  REGION 1..41: note = ENSP00000488414

SEQ ID NO: 31081 - protein, 66 aa, Homo sapiens; identical to SEQ ID NO: 31065
  REGION 1..66: note = ENSP00000487700

SEQ ID NO: 31082 - protein, 66 aa, Homo sapiens; identical to SEQ ID NO: 31068
  REGION 1..66: note = ENSP00000488627

SEQ ID NO: 31083 - protein, 131 aa, Homo sapiens; identical to SEQ ID NO: 31057
  REGION 1..131: note = ENSP00000488559

SEQ ID NO: 31084 - protein, 141 aa, Homo sapiens
  REGION 1..141: note = ENSP00000380605
MWVLGIAATFCGLFLLPGFALQIQCYQCEEFQLNNDCSSPEFIVNCTVNVQDMCQKEVMEQSAGIMYRKSCASSAACLIASAGYQSFCSPGKLNSVCISCCNTPLCNGPRPKKRGSSASALRPGLRTTILFLKLALFSAHC

SEQ ID NO: 31085 - protein, 89 aa, Homo sapiens
  REGION 1..89: note = ENSP00000340563
MCQKEVMEQSAGIMYRKSCASSAACLIASAGYQSFCSPGKLNSVCISCCNTPLCNGPRPKKRGSSASALRPGLRTTILFLKLALFSAHC

SEQ ID NO: 31086 - protein, 39 aa, Homo sapiens
  REGION 1..39: note = ENSP00000396651
MWVLGIAATFCGLFLLPGENTQRPAAEARLCAANPVLPV

SEQ ID NO: 31087 - protein, 171 aa, Homo sapiens
  REGION 1..171: note = ENSP00000334463
MEPGPALAWLLLLSLLADCLKAAQSRDFTVKDIIYLHPSTTPYPGGFKCFTCEKAADNYECNRWAPDIYCPRETRYCYTQHTMEVTGNSISVTKRCVPLEECLSTGCRDSEHEGHKVCTSCCEGNICNLPLPRNETDATFATTSPINQTNGHPRCMSVIVSCLWLWLGLML

SEQ ID NO: 31088 - protein, 76 aa, Homo sapiens
  REGION 1..76: note = ENSP00000396855
MEPGPALAWLLLLSLLADCLKAAQSRDFTVKDIIYLHPSTTPYPGGFKCFTCEKAADNYECNRWAPDIYCPRGTMI

SEQ ID NO: 31089 - protein, 53 aa, Homo sapiens
  REGION 1..53: note = ENSP00000392286
MEPGPALAWLLLLSLLADCLKAAQSRDFTVKDIIYLHPSTTPYPGGFKCFTCE

SEQ ID NO: 31090 - protein, 76 aa, Homo sapiens; identical to SEQ ID NO: 31088
  REGION 1..76: note = ENSP00000376594

SEQ ID NO: 31091 - protein, 171 aa, Homo sapiens; identical to SEQ ID NO: 31087
  REGION 1..171: note = ENSP00000386413

SEQ ID NO: 31092 - protein, 207 aa, Homo sapiens
  REGION 1..207: note = ENSP00000387077
MLLITLSANLFTVPERSLTTTFSFSRYKSSDRPAHKVSMLLLCHALAIAVVQIVIFSESWAFAKNINFYNVRPPLDPTPFPNSFKCFTCENAGDNYNCNRWAEDKWCPQNTQYCLTVHHFTSHGRSTSITKKCASRSECHFVGCHHSRDSEHTECRSCCEGMICNVELPTNHTNAVFAVMHAQRTSGSSAPTLYLPVLAWVFVLPLL

SEQ ID NO: 31093 - protein, 183 aa, Homo sapiens
  REGION 1..183: note = ENSP00000386479
MLYKSSDRPAHKVSMLLLCHALAIAVVQIVIFSESWAFAKNINFYNVRPPLDPTPFPNSFKCFTCENAGDNYNCNRWAEDKWCPQNTQYCLTVHHFTSHGRSTSITKKCASRSECHFVGCHHSRDSEHTECRSCCEGMICNVELPTNHTNAVFAVMHAQRTSGSSAPTLYLPVLAWVFVLPLL

SEQ ID NO: 31094 - protein, 183 aa, Homo sapiens; identical to SEQ ID NO: 31093
  REGION 1..183: note = ENSP00000386650

SEQ ID NO: 31095 - protein, 50 aa, Homo sapiens
  REGION 1..50: note = ENSP00000388361
MLCERHCTEEDENHSKPNKGNAEEIFSAEYWKVRFPASRISGNVNEQHEA

SEQ ID NO: 31096 - protein, 74 aa, Homo sapiens
  REGION 1..74: note = ENSP00000412070
MLLITLSANLFTVPERSLTTTFSFSRCERHCTEEDENHSKPNKGNAEEIFSAEYWKVRFPASRISGNVNEQHEA

SEQ ID NO: 31097 - protein, 54 aa, Homo sapiens
  REGION 1..54: note = ENSP00000410840
MLYKSSDRPAHKVSMLLLCHALAIAVVQIVIFSESWAFAKNINFYNVRPPLDHK

SEQ ID NO: 31098 - protein, 183 aa, Homo sapiens
  REGION 1..183: note = ENSP00000280115
MRYKSSDRPAHKVSMLLLCHALAIAVVQIVIFSESWAFAKNINFYNVRPPLDPTPFPNSFKCFTCENAGDNYNCNRWAEDKWCPQNTQYCLTVHHFTSHGRSTSITKKCASRSECHFVGCHHSRDSEHTECRSCCEGMICNVELPTNHTNAVFAVMHAQRTSGSSAPTLYLPVLAWVFVLPLL

SEQ ID NO: 31099 - protein, 122 aa, Homo sapiens
  REGION 1..122: note = ENSP00000454826
MTTATRQEVLGLYRSIFRLARKWQATSGQMEDTIKEKQYILNEARTLFRKNKNLTDTDLIKQCIDECTARIEIGLHYKIPYPRPIHLPPMGLTPLRGRGLRSQEKLRKLSKPVYLRSHDEVS

SEQ ID NO: 31100 - protein, 33 aa, Homo sapiens
  REGION 1..33: note = ENSP00000396868
MGLTPLRGRGLRSQEKLRKLSKPVYLRSHDEVS

SEQ ID NO: 31101 - protein, 107 aa, Homo sapiens
  REGION 1..107: note = ENSP00000457743
MTTATRQEVLGLYRSIFRLARKWQATSGQMEDTIKEKQYILNEARTLFRKNKNLTDTDLIKQCIDECTARIEIGLHYKIPYPRPVSVTPVNKCWVLTLINLVISKNV

SEQ ID NO: 31102 - protein, 122 aa, Homo sapiens; identical to SEQ ID NO: 31099
  REGION 1..122: note = ENSP00000454551

SEQ ID NO: 31103 - protein, 107 aa, Homo sapiens; identical to SEQ ID NO: 31101
  REGION 1..107: note = ENSP00000454890

SEQ ID NO: 31104 - protein, 33 aa, Homo sapiens; identical to SEQ ID NO: 31100
  REGION 1..33: note = ENSP00000454759

SEQ ID NO: 31105 - protein, 122 aa, Homo sapiens; identical to SEQ ID NO: 31099
  REGION 1..122: note = ENSP00000457333

SEQ ID NO: 31106 - protein, 122 aa, Homo sapiens; identical to SEQ ID NO: 31099
  REGION 1..122: note = ENSP00000379367

SEQ ID NO: 31107 - protein, 122 aa, Homo sapiens; identical to SEQ ID NO: 31099
  REGION 1..122: note = ENSP00000407883

SEQ ID NO: 31108 - protein, 122 aa, Homo sapiens; identical to SEQ ID NO: 31099
  REGION 1..122: note = ENSP00000219168

SEQ ID NO: 31109 - protein, 146 aa, Homo sapiens
  REGION 1..146: note = ENSP00000287748
MKASVVLSLLGYLVVPSGAYILGRCTVAKKLHDGGLDYFEGYSLENWVCLAYFESKFNPMAIYENTREGYTGFGLFQMRGSDWCGDHGRNRCHMSCSALLNPNLEKTIKCAKTIVKGKEGMGAWPTWSRYCQYSDTLARWLDGCKL

SEQ ID NO: 31110 - protein, 146 aa, Homo sapiens; identical to SEQ ID NO: 31109
  REGION 1..146: note = ENSP00000387897

SEQ ID NO: 31111 - protein, 767 aa, Homo sapiens
  REGION 1..767: note = ENSP00000273390
MSHAVTIEEPQAQPQVSQTRYRERSRAGSHISSNRAYDFLYDPLFIVSSEKDHTQANIQATLIRSRLRKVPRFKTMFSNLIHYPRYSLYWSKSDPVPPFISREWKGHKEKHREALRQLTTTDASFQMPKEVYEDPEVTGKNRYKYFERPFLPFFQQMPFNVVYAVSKAEPYTFPPTSTKHLSIPSKSTVGTQTDYRDADVQTDPYSAEYVVCQDSIPELLTLATLTWGRGLPAGQAEVEMIERAREKRAWEASLPALSDTSQFEKRRKMMNEMERKEWAFREQEIEKLQEIRLEVLKELLRKREENQNEVNMKHLNARWSKLQEGKEAKMAKIQRTHVSTIRKLVGKRKNIEGKLERRNIIKDYSDYASQVYGPLSRLGCFPDNNSEDFVVKNYYLNTYEGLVELESCLPDFVTQPQIRAPKPKVITTKAGFLKRAARLDYELAEVHKALLDKKNKVLEVKKPPRFLQRNPIPQPRLPTPTLEMTSNEEEEMEMAVIYLQKLLRGRVVQNMMFEGKEKRLELIQELRTCHALQEDEKLVKKAEKQVTLALQRQRNLHEHKVSLVENHLAGLEGRALADMFDFLSKELVRLQEERRIHAFVMLAERQRRVREAEESGRRQVEKQRLREEDEIFKEVVKVHHSTISSYLEDIILNTEANTAEEQARAEIEKMAEKINDIAYEMESRRTYLQSEEIVAELVYSFLIPEVQKYFVKEKVRNAQRKHILAAHQIIHSYTESMVQKKLTEGEQDEASNAAMLLEKETQNENNS

SEQ ID NO: 31112 - protein, 47 aa, Homo sapiens
  REGION 1..47: note = ENSP00000419520
MSHAVTIEEPQAQPQVSQTRYRERSRAGSHISSNRAYDFLYEKSSQV

SEQ ID NO: 31113 - protein, 238 aa, Homo sapiens
  REGION 1..238: note = ENSP00000419489
MSHAVTIEEPQAQPQVSQTRYRERSRAGSHISSNRAYDFLYDPLFIVSSEKDHTQANIQATLIRSRLRKVPRFKTMFSNLIHYPRYSLYWSKSDPVPPFISREWKGHKEKHREALRQLTTTDASFQMPKEVYEDPEVTGKNRYKYFERPFLPFFQQMPFNVVYAVSKAEPYTFPPTSTKHLSIPSKSTVGTQTDYRDADVQTDPYSAEYVVCQDSIPELLTLATLTWGELVNLLTIGR

SEQ ID NO: 31114 - protein, 55 aa, Homo sapiens
  REGION 1..55: note = ENSP00000418601
MSHAVTIEEPQAQPQVSQTRYRERSRAGSHISSNRAYDFLYGKDRRRPSSASVAS

SEQ ID NO: 31115 - protein, 131 aa, Homo sapiens
  REGION 1..131: note = ENSP00000419972
MSHAVTIEEPQAQPQVSQTRYRERSRAGSHISSNRAYDFLYELTLLFRCLKKFMKILKLLERIAINTLKGLFSHFFSRCHSMLFMPYPRQNHTLFLLLLLSTYPSLQSLLWALRLIIGMLTFKQIHTLQNM

SEQ ID NO: 31116 - protein, 101 aa, Homo sapiens
  REGION 1..101: note = ENSP00000419554
EWKGHKEKHREALRQLTTCLKKFMKILKLLERIAINTLKGLFSHFFSRCHSMLFMPYPRQNHTLFLLLLLSTYPSLQSLLWALRLIIGMLTFKQIHTLQNM

SEQ ID NO: 31117 - protein, 383 aa, Homo sapiens
  REGION 1..383: note = ENSP00000455097
MASELAMSNSDLPTSPLAMEYVNDFDLMKFEVKKEPVETDRIISQCGRLIAGGSLSSTPMSTPCSSVPPSPSFSAPSPGSGSEQKAHLEDYYWMTGYPQQLNPEALGFSPEDAVEALISNSHQLQGGFDGYARGAQQLAAAAGAGAGASLGGSGEEMGPAAAVVSAVIAAAAAQSGAGPHYHHHHHHAAGHHHHPTAGAPGAAGSAAASAGGAGGAGGGGPASAGGGGGGGGGGGGGGAAGAGGALHPHHAAGGLHFDDRFSDEQLVTMSVRELNRQLRGVSKEEVIRLKQKRRTLKNRGYAQSCRFKRVQQRHVLESEKNQLLQQVDHLKQEISRLVRERDAYKEKYEKLVSSGFRENGSSSDNPSSPEFFMYPRESSTSVM

SEQ ID NO: 31118 - protein, 403 aa, Homo sapiens
  REGION 1..403: note = ENSP00000327048
MASELAMSNSDLPTSPLAMEYVNDFDLMKFEVKKEPVETDRIISQCGRLIAGGSLSSTPMSTPCSSVPPSPSFSAPSPGSGSEQKAHLEDYYWMTGYPQQLNPEALGFSPEDAVEALISNSHQLQGGFDGYARGAQQLAAAAGAGAGASLGGSGEEMGPAAAVVSAVIAAAAAQSGAGPHYHHHHHHAAGHHHHPTAGAPGAAGSAAASAGGAGGAGGGGPASAGGGGGGGGGGGGGGAAGAGGALHPHHAAGGLHFDDRFSDEQLVTMSVRELNRQLRGVSKEEVIRLKQKRRTLKNRGYAQSCRFKRVQQRHVLESEKNQLLQQVDHLKQEISRLVRERDAYKEKYEKLVSSGFRENGSSSDNPSSPEFFITEPTRKLEPSVGYATFWKPQHRVLTSVFTK

SEQ ID NO: 31119 - protein, 373 aa, Homo sapiens
  REGION 1..373: note = ENSP00000377019
MASELAMSNSDLPTSPLAMEYVNDFDLMKFEVKKEPVETDRIISQCGRLIAGGSLSSTPMSTPCSSVPPSPSFSAPSPGSGSEQKAHLEDYYWMTGYPQQLNPEALGFSPEDAVEALISNSHQLQGGFDGYARGAQQLAAAAGAGAGASLGGSGEEMGPAAAVVSAVIAAAAAQSGAGPHYHHHHHHAAGHHHHPTAGAPGAAGSAAASAGGAGGAGGGGPASAGGGGGGGGGGGGGGAAGAGGALHPHHAAGGLHFDDRFSDEQLVTMSVRELNRQLRGVSKEEVIRLKQKRRTLKNRGYAQSCRFKRVQQRHVLESEKNQLLQQVDHLKQEISRLVRERDAYKEKYEKLVSSGFRENGSSSDNPSSPEFFM

SEQ ID NO: 31120 - protein, 164 aa, Homo sapiens
  REGION 1..164: note = ENSP00000345393
MSVDPLSSKALKIKRELSENTPHLSDEALMGLSVRELNRHLRGLSAEEVTRLKQRRRTLKNRGYAASCRVKRVCQKEELQKQKSELEREVDKLARENAAMRLELDALRGKCEALQGFARSVAAARGPATLVAPASVITIVKSTPGSGSGPAHGPDPAHGPASCS

SEQ ID NO: 31121 - protein, 93 aa, Homo sapiens
  REGION 1..93: note = ENSP00000391589
MGLSVRELNRHLRGLSAEEVTRLKQRRRTLKNRGYAASCRVKRVCQKEELQKQKSELEREVDKLARENAAMRLELDALRGKCEALQGFARSVA

SEQ ID NO: 31122 - protein, 125 aa, Homo sapiens
  REGION 1..125: note = ENSP00000416493
MSVDPLSSKALKIKRELSENTPHLSDEALMGLSVRELNRHLRGLSAEEVTRLKQRRRTLKNRGYAASCRVKRVCQKEELQKQKSELEREVDKLARENAAMRLELDALRGKCEALQGFARSVAAAR

SEQ ID NO: 31123 - protein, 164 aa, Homo sapiens; identical to SEQ ID NO: 31120
  REGION 1..164: note = ENSP00000384094

SEQ ID NO: 31124 - protein, 135 aa, Homo sapiens
  REGION 1..135: note = ENSP00000441482
MGLSVRELNRHLRGLSAEEVTRLKQRRRTLKNRGYAASCRVKRVCQKEELQKQKSELEREVDKLARENAAMRLELDALRGKCEALQGFARSVAAARGPATLVAPASVITIVKSTPGSGSGPAHGPDPAHGPASCS

SEQ ID NO: 31125 - protein, 164 aa, Homo sapiens; identical to SEQ ID NO: 31120
  REGION 1..164: note = ENSP00000388882

SEQ ID NO: 31126 - protein, 164 aa, Homo sapiens; identical to SEQ ID NO: 31120
  REGION 1..164: note = ENSP00000442060

SEQ ID NO: 31127 - protein, 131 aa, Homo sapiens
  REGION 1..131: note = ENSP00000470772
MPSSISAFEGTCVSIPCRFDFPDELRPAVVHGVWYFNSPYPKNYPPVVFKSRTQVVHESFQGRSRLLGDLGLRNCTLLLSNVSPELGGKYYFRGDLGGYNQYTFSEHSVLDIVNTPNIVVPPEVVAGTEVE

SEQ ID NO: 31128 - protein, 626 aa, Homo sapiens
  REGION 1..626: note = ENSP00000376048
MIFLTALPLFWIMISASRGGHWGAWMPSSISAFEGTCVSIPCRFDFPDELRPAVVHGVWYFNSPYPKNYPPVVFKSRTQVVHESFQGRSRLLGDLGLRNCTLLLSNVSPELGGKYYFRGDLGGYNQYTFSEHSVLDIVNTPNIVVPPEVVAGTEVEVSCMVPDNCPELRPELSWLGHEGLGEPAVLGRLREDEGTWVQVSLLHFVPTREANGHRLGCQASFPNTTLQFEGYASMDVKYPPVIVEMNSSVEAIEGSHVSLLCGADSNPPPLLTWMRDGTVLREAVAESLLLELEEVTPAEDGVYACLAENAYGQDNRTVGLSVMYAPWKPTVNGTMVAVEGETVSILCSTQSNPDPILTIFKEKQILSTVIYESELQLELPAVSPEDDGEYWCVAENQYGQRATAFNLSVEFAPVLLLESHCAAARDTVQCLCVVKSNPEPSVAFELPSRNVTVNESEREFVYSERSGLVLTSILTLRGQAQAPPRVICTARNLYGAKSLELPFQGAHRLMWAKIGPVGAVVAFAILIAIVCYITQTRRKKNVTESPSFSAGDNPPVLFSSDFRISGAPEKYESERRLGSERRLLGLRGEPPELDLSYSHSDLGKRPTKDSYTLTEELAEYAEIRVK

SEQ ID NO: 31129 - protein, 582 aa, Homo sapiens
  REGION 1..582: note = ENSP00000355234
MIFLTALPLFWIMISASRGGHWGAWMPSSISAFEGTCVSIPCRFDFPDELRPAVVHGVWYFNSPYPKNYPPVVFKSRTQVVHESFQGRSRLLGDLGLRNCTLLLSNVSPELGGKYYFRGDLGGYNQYTFSEHSVLDIVNTPNIVVPPEVVAGTEVEVSCMVPDNCPELRPELSWLGHEGLGEPAVLGRLREDEGTWVQVSLLHFVPTREANGHRLGCQASFPNTTLQFEGYASMDVKYPPVIVEMNSSVEAIEGSHVSLLCGADSNPPPLLTWMRDGTVLREAVAESLLLELEEVTPAEDGVYACLAENAYGQDNRTVGLSVMYAPWKPTVNGTMVAVEGETVSILCSTQSNPDPILTIFKEKQILSTVIYESELQLELPAVSPEDDGEYWCVAENQYGQRATAFNLSVEFAPVLLLESHCAAARDTVQCLCVVKSNPEPSVAFELPSRNVTVNESEREFVYSERSGLVLTSILTLRGQAQAPPRVICTARNLYGAKSLELPFQGAHRLMWAKIGPVGAVVAFAILIAIVCYITQTRRKKNVTESPSFSAGDNPPVLFSSDFRISGAPEKYESKEVSTLESH

SEQ ID NO: 31130 - protein, 158 aa, Homo sapiens
  REGION 1..158: note = ENSP00000473125
MIFLTALPLFWIMISASRGGHWGAWMPSSISAFEGTCVSIPCRFDFPDELRPAVVHGVWYFNSPYPKNYPPVVFKSRTQVVHESFQGRSRLLGDLGLRNCTLLLSNVSPELGGKYYFRGDLGGYNQYTFSEHSVLDIVNTPNIVVPPEVVAGTEVEVS

SEQ ID NO: 31131 - protein, 58 aa, Homo sapiens
  REGION 1..58: note = ENSP00000473245
MIFLTALPLFWIMISASRGGHWGAWMPSSISAFEGTCVSIPCRFDFPDELRPAVVHGV

SEQ ID NO: 31132 - protein, 601 aa, Homo sapiens
  REGION 1..601: note = ENSP00000440695
MPSSISAFEGTCVSIPCRFDFPDELRPAVVHGVWYFNSPYPKNYPPVVFKSRTQVVHESFQGRSRLLGDLGLRNCTLLLSNVSPELGGKYYFRGDLGGYNQYTFSEHSVLDIVNTPNIVVPPEVVAGTEVEVSCMVPDNCPELRPELSWLGHEGLGEPAVLGRLREDEGTWVQVSLLHFVPTREANGHRLGCQASFPNTTLQFEGYASMDVKYPPVIVEMNSSVEAIEGSHVSLLCGADSNPPPLLTWMRDGTVLREAVAESLLLELEEVTPAEDGVYACLAENAYGQDNRTVGLSVMYAPWKPTVNGTMVAVEGETVSILCSTQSNPDPILTIFKEKQILSTVIYESELQLELPAVSPEDDGEYWCVAENQYGQRATAFNLSVEFAPVLLLESHCAAARDTVQCLCVVKSNPEPSVAFELPSRNVTVNESEREFVYSERSGLVLTSILTLRGQAQAPPRVICTARNLYGAKSLELPFQGAHRLMWAKIGPVGAVVAFAILIAIVCYITQTRRKKNVTESPSFSAGDNPPVLFSSDFRISGAPEKYESERRLGSERRLLGLRGEPPELDLSYSHSDLGKRPTKDSYTLTEELAEYAEIRVK

SEQ ID NO: 31133 - protein, 131 aa, Homo sapiens; identical to SEQ ID NO: 31127
  REGION 1..131: note = ENSP00000470772

SEQ ID NO: 31134 - protein, 626 aa, Homo sapiens; identical to SEQ ID NO: 31128
  REGION 1..626: note = ENSP00000376048

SEQ ID NO: 31135 - protein, 582 aa, Homo sapiens; identical to SEQ ID NO: 31129
  REGION 1..582: note = ENSP00000355234

SEQ ID NO: 31136 - protein, 158 aa, Homo sapiens; identical to SEQ ID NO: 31130
  REGION 1..158: note = ENSP00000473125

SEQ ID NO: 31137 - protein, 58 aa, Homo sapiens; identical to SEQ ID NO: 31131
  REGION 1..58: note = ENSP00000473245

SEQ ID NO: 31138 - protein, 601 aa, Homo sapiens; identical to SEQ ID NO: 31132
  REGION 1..601: note = ENSP00000440695

SEQ ID NO: 31139 - protein, 1150 aa, Homo sapiens
  REGION 1..1150: note = ENSP00000358630
MSKTLKKKKHWLSKVQECAVSWAGPPGDFGAEIRGGAERGEFPYLGRLREEPGGGTCCVVSGKAPSPGDVLLEVNGTPVSGLTNRDTLAVIRHFREPIRLKTVKPGKVINKDLRHYLSLQFQKGSIDHKLQQVIRDNLYLRTIPCTTRAPRDGEVPGVDYNFISVEQFKALEESGALLESGTYDGNFYGTPKPPAEPSPFQPDPVDQVLFDNEFDAESQRKRTTSVSKMERMDSSLPEEEEDEDKEAINGSGNAENRERHSESSDWMKTVPSYNQTNSSMDFRNYMMRDETLEPLPKNWEMAYTDTGMIYFIDHNTKTTTWLDPRLCKKAKAPEDCEDGELPYGWEKIEDPQYGTYYVDFTLVAQAGVQWHDLGSLQPPPPGFNHLNQKTQFENPVEEAKRKKQLGQVEIGSSKPDMEKSHFTRDPSQLKGVLVRASLKKSTMGFGFTIIGGDRPDEFLQVKNVLKDGPAAQDGKIAPGDVIVDINGNCVLGHTHADVVQMFQLVPVNQYVNLTLCRGYPLPDDSEDPVVDIVAATPVINGQSLTKGETCMNPQDFKPGAMVLEQNGKSGHTLTGDGLNGPSDASEQRVSMASSGSSQPELVTIPLIKGPKGFGFAIADSPTGQKVKMILDSQWCQGLQKGDIIKEIYHQNVQNLTHLQVVEVLKQFPVGADVPLLILRGGPPSPTKTAKMKTDKKENAGSLEAINEPIPQPMPFPPSIIRSGSPKLDPSEVYLKSKTLYEDKPPNTKDLDVFLRKQESGFGFRVLGGDGPDQSIYIGAIIPLGAAEKDGRLRAADELMCIDGIPVKGKSHKQVLDLMTTAARNGHVLLTVRRKIFYGEKQPEDDSSQAFISTQNGSPRLNRAEVPARPAPQEPYDVVLQRKENEGFGFVILTSKNKPPPGVIPHKIGRVIEGSPADRCGKLKVGDHISAVNGQSIVELSHDNIVQLIKDAGVTVTLTVIAEEEHHGPPSGTNSARQSPALQHRPMGQSQANHIPGDRSALEGEIGKDVSTSYRHSWSDHKHLAQPDTAVISVVGSRHNQNLGCYPVELERGPRGFGFSLRGGKEYNMGLFILRLAEDGPAIKDGRIHVGDQIVEINGEPTQGITHTRAIELIQAGGNKVLLLLRPGTGLIPDHGLAPSGLCSYVKPEQH

SEQ ID NO: 31140 - protein, 1481 aa, Homo sapiens
  REGION 1..1481: note = ENSP00000304604
MSKTLKKKKHWLSKVQECAVSWAGPPGDFGAEIRGGAERGEFPYLGRLREEPGGGTCCVVSGKAPSPGDVLLEVNGTPVSGLTNRDTLAVIRHFREPIRLKTVKPGKVINKDLRHYLSLQFQKGSIDHKLQQVIRDNLYLRTIPCTTRAPRDGEVPGVDYNFISVEQFKALEESGALLESGTYDGNFYGTPKPPAEPSPFQPDPVDQVLFDNEFDAESQRKRTTSVSKMERMDSSLPEEEEDEDKEAINGSGNAENRERHSESSDWMKTVPSYNQTNSSMDFRNYMMRDETLEPLPKNWEMAYTDTGMIYFIDHNTKTTTWLDPRLCKKAKAPEDCEDGELPYGWEKIEDPQYGTYYVDHLNQKTQFENPVEEAKRKKQLGQVEIGSSKPDMEKSHFTRDPSQLKGVLVRASLKKSTMGFGFTIIGGDRPDEFLQVKNVLKDGPAAQDGKIAPGDVIVDINGNCVLGHTHADVVQMFQLVPVNQYVNLTLCRGYPLPDDSEDPVVDIVAATPVINGQSLTKGETCMNPQDFKPGAMVLEQNGKSGHTLTGDGLNGPSDASEQRVSMASSGSSQPELVTIPLIKGPKGFGFAIADSPTGQKVKMILDSQWCQGLQKGDIIKEIYHQNVQNLTHLQVVEVLKQFPVGADVPLLILRGGPPSPTKTAKMKTDKKENAGSLEAINEPIPQPMPFPPSIIRSGSPKLDPSEVYLKSKTLYEDKPPNTKDLDVFLRKQESGFGFRVLGGDGPDQSIYIGAIIPLGAAEKDGRLRAADELMCIDGIPVKGKSHKQVLDLMTTAARNGHVLLTVRRKIFYGEKQPEDDSSQAFISTQNGSPRLNRAEVPARPAPQEPYDVVLQRKENEGFGFVILTSKNKPPPGVIPHKIGRVIEGSPADRCGKLKVGDHISAVNGQSIVELSHDNIVQLIKDAGVTVTLTVIAEEEHHGPPSGTNSARQSPALQHRPMGQSQANHIPGDRSALEGEIGKDVSTSYRHSWSDHKHLAQPDTAVISVVGSRHNQNLGCYPVELERGPRGFGFSLRGGKEYNMGLFILRLAEDGPAIKDGRIHVGDQIVEINGEPTQGITHTRAIELIQAGGNKVLLLLRPGTGLIPDHGDWDINNPSSSNVIYDEQSPLPPSSHFASIFEESHVPVIEESLRVQICEKAEELKDIVPEKKSTLNENQPEIKHQSLLQKNVSKRDPPSSHGHSNKKNLLKVENGVTRRGRSVSPKKPASQHSEEHLDKIPSPLKNNPKRRPRDQSLSPSKGENKSCQVSTRAGSGQDQCRKSRGRSASPKKQQKIEGSKAPSNAEAKLLEGKSRRIAGYTGSNAEQIPDGKEKSDVIRKDAKQNQLEKSRTRSPEKKIKRMVEKSLPSKMTNKTTSKEVSENEKGKKVTTGETSSSNDKIGENVQLSEKRLKQEPEEKVVSNKTEDHKGKELEAADKNKETGRFKPESSSPVKKTLITPGPWKVPSGNKVTGTIGMAEKRQ

SEQ ID NO: 31141 - protein, 1125 aa, Homo sapiens
  REGION 1..1125: note = ENSP00000358628
MSKTLKKKKHWLSKVQECAVSWAGPPGDFGAEIRGGAERGEFPYLGRLREEPGGGTCCVVSGKAPSPGDVLLEVNGTPVSGLTNRDTLAVIRHFREPIRLKTVKPGKVINKDLRHYLSLQFQKGSIDHKLQQVIRDNLYLRTIPCTTRAPRDGEVPGVDYNFISVEQFKALEESGALLESGTYDGNFYGTPKPPAEPSPFQPDPVDQVLFDNEFDAESQRKRTTSVSKMERMDSSLPEEEEDEDKEAINGSGNAENRERHSESSDWMKTVPSYNQTNSSMDFRNYMMRDETLEPLPKNWEMAYTDTGMIYFIDHNTKTTTWLDPRLCKKAKAPEDCEDGELPYGWEKIEDPQYGTYYVDHLNQKTQFENPVEEAKRKKQLGQVEIGSSKPDMEKSHFTRDPSQLKGVLVRASLKKSTMGFGFTIIGGDRPDEFLQVKNVLKDGPAAQDGKIAPGDVIVDINGNCVLGHTHADVVQMFQLVPVNQYVNLTLCRGYPLPDDSEDPVVDIVAATPVINGQSLTKGETCMNPQDFKPGAMVLEQNGKSGHTLTGDGLNGPSDASEQRVSMASSGSSQPELVTIPLIKGPKGFGFAIADSPTGQKVKMILDSQWCQGLQKGDIIKEIYHQNVQNLTHLQVVEVLKQFPVGADVPLLILRGGPPSPTKTAKMKTDKKENAGSLEAINEPIPQPMPFPPSIIRSGSPKLDPSEVYLKSKTLYEDKPPNTKDLDVFLRKQESGFGFRVLGGDGPDQSIYIGAIIPLGAAEKDGRLRAADELMCIDGIPVKGKSHKQVLDLMTTAARNGHVLLTVRRKIFYGEKQPEDDSSQAFISTQNGSPRLNRAEVPARPAPQEPYDVVLQRKENEGFGFVILTSKNKPPPGVIPHKIGRVIEGSPADRCGKLKVGDHISAVNGQSIVELSHDNIVQLIKDAGVTVTLTVIAEEEHHGPPSGTNSARQSPALQHRPMGQSQANHIPGDRSALEGEIGKDVSTSYRHSWSDHKHLAQPDTAVISVVGSRHNQNLGCYPVELERGPRGFGFSLRGGKEYNMGLFILRLAEDGPAIKDGRIHVGDQIVEINGEPTQGITHTRAIELIQAGGNKVLLLLRPGTGLIPDHGLAPSGLCSYVKPEQH

SEQ ID NO: 31142 - protein, 1125 aa, Homo sapiens; identical to SEQ ID NO: 31141
  REGION 1..1125: note = ENSP00000358624

SEQ ID NO: 31143 - protein, 367 aa, Homo sapiens
  REGION 1..367: note = ENSP00000354649
MRKGKGPICLFSRPTLRPSRSKVSLIEGRGANMAARWRFWCVSVTMVVALLIVCDVPSASAQRKKEMVLSEKVSQLMEWTNKRPVIRMNGDKFRRLVKAPPRNYSVIVMFTALQLHRQCVVCKQADEEFQILANSWRYSSAFTNRIFFAMVDFDEGSDVFQMLNMNSAPTFINFPAKGKPKRGDTYELQVRGFSAEQIARWIADRTDVNIRVIRPPNYAGPLMLGLLLAVIGGLVYLRRSNMEFLFNKTGWAFAALCFVLAMTSGQMWNHIRGPPYAHKNPHTGHVNYIHGSSQAQFVAETHIVLLFNGGVTLGMVLLCEAATSDMDIGKRKIMCVAGIGLVVLFFSWMLSIFRSKYHGYPYSFLMS

SEQ ID NO: 31144 - protein, 335 aa, Homo sapiens
  REGION 1..335: note = ENSP00000480732
MAARWRFWCVSVTMVVALLIVCDVPSASAQRKKEMVLSEKVSQLMEWTNKRPVIRMNGDKFRRLVKAPPRNYSVIVMFTALQLHRQCVVCKQADEEFQILANSWRYSSAFTNRIFFAMVDFDEGSDVFQMLNMNSAPTFINFPAKGKPKRGDTYELQVRGFSAEQIARWIADRTDVNIRVIRPPNYAGPLMLGLLLAVIGGLVYLRRSNMEFLFNKTGWAFAALCFVLAMTSGQMWNHIRGPPYAHKNPHTGHVNYIHGSSQAQFVAETHIVLLFNGGVTLGMVLLCEAATSDMDIGKRKIMCVAGIGLVVLFFSWMLSIFRSKYHGYPYSFLMS

SEQ ID NO: 31145 - protein, 134 aa, Homo sapiens
  REGION 1..134: note = ENSP00000362433
MAARWRFWCVSVTMVVALLIVCDVPSASAQRKKEMVLSEKVSQLMEWTNKRPVIRMNGDKFRRLVKAPPRNYSVIVMFTALQLHRQCVVCKQADEEFQILANSWRYSSAFTNRIFFAMVDFDEGSDVFQMFQVF

SEQ ID NO: 31146 - protein, 367 aa, Homo sapiens; identical to SEQ ID NO: 31143
  REGION 1..367: note = ENSP00000478379

SEQ ID NO: 31147 - protein, 623 aa, Homo sapiens
  REGION 1..623: note = ENSP00000313021
MNRYTTMRQLGDGTYGSVLMGKSNESGELVAIKRMKRKFYSWDECMNLREVKSLKKLNHANVIKLKEVIRENDHLYFIFEYMKENLYQLMKDRNKLFPESVIRNIMYQILQGLAFIHKHGFFHRDMKPENLLCMGPELVKIADFGLARELRSQPPYTDYVSTRWYRAPEVLLRSSVYSSPIDVWAVGSIMAELYMLRPLFPGTSEVDEIFKICQVLGTPKKSDWPEGYQLASSMNFRFPQCVPINLKTLIPNASNEAIQLMTEMLNWDPKKRPTASQALKHPYFQVGQVLGPSSNHLESKQSLNKQLQPLESKPSLVEVEPKPLPDIIDQVVGQPQPKTSQQPLQPIQPPQNLSVQQPPKQQSQEKPPQTLFPSIVKNMPTKPNGTLSHKSGRRRWGQTIFKSGDSWEELEDYDFGASHSKKPSMGVFKEKRKKDSPFRLPEPVPSGSNHSTGENKSLPAVTSLKSDSELSTAPTSKQYYLKQSRYLPGVNPKKVSLIASGKEINPHTWSNQLFPKSLGPVGAELAFKRSNAGNLGSYATYNQSGYIPSFLKKEVQSAGQRIHLAPLNATASEYTWNTKTGRGQFSGRTYNPTAKNLNIVNRAQPIPSVHGRTDWVAKYGGHR

SEQ ID NO: 31148 - protein, 623 aa, Homo sapiens; identical to SEQ ID NO: 31147
  REGION 1..623: note = ENSP00000476067

SEQ ID NO: 31149 - protein, 648 aa, Homo sapiens
  REGION 1..648: note = ENSP00000346484
MNRYTTMRQLGDGTYGSVLMGKSNESGELVAIKRMKRKFYSWDECMNLREVKSLKKLNHANVIKLKEVIRENDHLYFIFEYMKENLYQLMKDRNKLFPESVIRNIMYQILQGLAFIHKHGFFHRDMKPENLLCMGPELVKIADFGLARELRSQPPYTDYVSTRWYRAPEVLLRSSVYSSPIDVWAVGSIMAELYMLRPLFPGTSEVDEIFKICQVLGTPKKSDWPEGYQLASSMNFRFPQCVPINLKTLIPNASNEAIQLMTEMLNWDPKKRPTASQALKHPYFQVGQVLGPSSNHLESKQSLNKQLQPLESKPSLVEVEPKPLPDIIDQVVGQPQPKTSQQPLQPIQPPQNLSVQQPPKQQSQEKPPQTLFPSIVKNMPTKPNGTLSHKSGRRRWGQTIFKSGDSWEELEDYDFGASHSKKPSMGVFKEKRKKDSPFRLPEPVPSGSNHSTGENKSLPAVTSLKSDSELSTAPTSKQYYLKQSRYLPGVNPKKVSLIASGKEINPHTWSNQLFPKSLGPVGAELAFKRSNAEESIIKPIEKLSCNETFPEKLEDPQGNLGSYATYNQSGYIPSFLKKEVQSAGQRIHLAPLNATASEYTWNTKTGRGQFSGRTYNPTAKNLNIVNRAQPIPSVHGRTDWVAKYGGHR

SEQ ID NO: 31150 - protein, 583 aa, Homo sapiens
  REGION 1..583: note = ENSP00000442221
MNRYTTMRQLGDGTYGSVLMGKSNESGELVAIKRMKRKFYSWDECMNLREVKSLKKLNHANVIKLKEVIRENDHLYFIFEYMKENLYQLMKDRNKLFPESVIRNIMYQILQGLAFIHKHGFFHRDMKPENLLCMGPELVKIADFGLARELRSQPPYTDYVSTRWYRAPEVLLRSSVYSSPIDVWAVGSIMAELYMLRPLFPGTSEVDEIFKICQVLGTPKKSDWPEGYQLASSMNFRFPQCVPINLKTLIPNASNEAIQLMTEMLNWDPKKRPTASQALKHPYFQVGQVLGPSSNHLESKQSLNKQLQPLESKPSLVEVEPKPLPDIIDQVVGQPQPKTSQQPLQPIQPPQNLSVQQPPKQQSQEKPPQTLFPSIVKNMPTKPNGTLSHKSGRRRWGQTIFKSGDSWEELEDYDFGASHSKKPSMGVFKEKRKKDSPFRLPEPVPSGSNHSTGENKSLPAVTSLKSDSELSTAPTSKQYYLKQSRYLPGVNPKKVSLIASGKEINPHTWSNQLFPKSLGPVGAELAFKRSNAEYTWNTKTGRGQFSGRTYNPTAKNLNIVNRAQPIPSVHGRTDWVAKYGGHR

SEQ ID NO: 31151 - protein, 457 aa, Homo sapiens
  REGION 1..457: note = ENSP00000442250
MNRYTTMRQLGDGTYGSVLMGKSNESGELVAIKRMKRKFYSWDECMNLREVKSLKKLNHANVIKLKEVIRENDHLYFIFEYMKENLYQLMKDRNKLFPESVIRNIMYQILQGLAFIHKHGFFHRDMKPENLLCMGPELVKIADFGLARELRSQPPYTDYVSTRWYRAPEVLLRSSVYSSPIDVWAVGSIMAELYMLRPLFPGTSEVDEIFKICQVLGTPKKSDWPEGYQLASSMNFRFPQCVPINLKTLIPNASNEAIQLMTEMLNWDPKKRPTASQALKHPYFQVGQVLGPSSNHLESKQSLNKQLQPLESKPSLVEVEPKPLPDIIDQVVGQPQPKTSQQPLQPIQPPQNLSVQQPPKQQSQEKPPQTLFPSIVKNMPTKPNGTLSHKSGRRRWGQTIFKSGDSWEELEDYDFGASHSKKPSMGVFKEKRKKDSPFRQQVKMAVISLSAHQFPTL

SEQ ID NO: 31152 - protein, 153 aa, Homo sapiens
  REGION 1..153: note = ENSP00000310880
MAPAAATGGSTLPSGFSVFTTLPDLLFIFEFIFGGLVWILVASSLVPWPLVQGWVMFVSVFCFVATTTLIILYIIGAHGGETSWVTLDAAYHCTAALFYLSASVLEALATITMQDGFTYRHYHENIAAVVFSYIATLLYVVHAVFSLIRWKSS

SEQ ID NO: 31153 - protein, 111 aa, Homo sapiens
  REGION 1..111: note = ENSP00000306568
MAPAAATGGSTLPSGFSVFTTLPDLLFIFEFIFGGLVWILVASSLVPWPLVQGWVMFVSVFCFVATTTLIILYIIGAHGGETSWVTLVFSYIATLLYVVHAVFSLIRWKSS

SEQ ID NO: 31154 - protein, 97 aa, Homo sapiens
  REGION 1..97: note = ENSP00000304924
MAPAAATGGSTLPSGFSVFTTLPDLLFIFEFDAAYHCTAALFYLSASVLEALATITMQDGFTYRHYHENIAAVVFSYIATLLYVVHAVFSLIRWKSS

SEQ ID NO: 31155 - protein, 55 aa, Homo sapiens
  REGION 1..55: note = ENSP00000322860
MAPAAATGGSTLPSGFSVFTTLPDLLFIFEFVFSYIATLLYVVHAVFSLIRWKSS

SEQ ID NO: 31156 - protein, 108 aa, Homo sapiens
  REGION 1..108: note = ENSP00000483044
MFVSVTAFFFSLLFLGMFLSGMVAQIDANWNFLDFAYHFTVFVFYFGAFLLEAAATSLHDLHCNTTITGQPLLSDNQYNINVAASIFAFMTTACYGCSLGLALRRWRP

SEQ ID NO: 31157 - protein, 108 aa, Homo sapiens; identical to SEQ ID NO: 31156
  REGION 1..108: note = ENSP00000482729

SEQ ID NO: 31158 - protein, 176 aa, Homo sapiens
  REGION 1..176: note = ENSP00000479708
MSAGGASVPPPPNPAVSFPPPRVTLPAGPDILRTYSGAFVCLEILFGGLVWILVASSNVPLPLLQGWVMFVSVTAFFFSLLFLGMFLSGMVAQIDANWNFLDFAYHFTVFVFYFGAFLLEAAATSLHDLHCNTTITGQPLLSDNQYNINVAASIFAFMTTACYGCSLGLALRRWRP

SEQ ID NO: 31159 - protein, 108 aa, Homo sapiens; identical to SEQ ID NO: 31156
  REGION 1..108: note = ENSP00000484544

SEQ ID NO: 31160 - protein, 415 aa, Homo sapiens
  REGION 1..415: note = ENSP00000324175
MTLAASSQRSQIIRSKFRSVLQLRIHRRNQEQISDPDPWISASDPPLAPALPSGTAPFLFSPGVLLPEPEYCPPWRSPKKESPKISQRWRESKPRGNLTYHQYMPPEPRQGSRADPQAEGSALGPPGPSLWEGTDSQQPHPRMKPSPLTPCPPGVPSPSPPPHKLELQTLKLEELTVSELRQQLRLRGLPVSGTKSMLLERMRGGAPPRERPKPRREDSPAGAPWPRLKPKALAAARRQGSVKPSAASHRPPLPRAADTPGTAPAPTPTPAPAAAPALTPSSGPGSAALTLEEELQEAIRRAQLLPNRGIDDILEDQVEPDDPLPPIPLDFPGSFDVLSPSPDSEGLSSVFSSSLPSPTNSSSPSPRDPTDSLDWLEALSGGPPLGSGPPPPSIFSADLSDSSSSRLWDLLEDPW

SEQ ID NO: 31161 - protein, 312 aa, Homo sapiens
  REGION 1..312: note = ENSP00000349192
MPPEPRQGSRADPQAEGSALGPPGPSLWEGTDSQQPHPRMKPSPLTPCPPGVPSPSPPPHKLELQTLKLEELTVSELRQQLRLRGLPVSGTKSMLLERMRGGAPPRERPKPRREDSPAGAPWPRLKPKALAAARRQGSVKPSAASHRPPLPRAADTPGTAPAPTPTPAPAAAPALTPSSGPGSAALTLEEELQEAIRRAQLLPNRGIDDILEDQVEPDDPLPPIPLDFPGSFDVLSPSPDSEGLSSVFSSSLPSPTNSSSPSPRDPTDSLDWLEALSGGPPLGSGPPPPSIFSADLSDSSSSRLWDLLEDPW

SEQ ID NO: 31162 - protein, 247 aa, Homo sapiens
  REGION 1..247: note = ENSP00000471590
MPPEPRQGSRADPQAEGSALGPPGPSLWEGTDSQQPHPRMKPSPLTPCPPGVPSPSPPPHKLELQTLKLEELTVKPSAASHRPPLPRAADTPGTAPAPTPTPAPAAAPALTPSSGPGSAALTLEEELQEAIRRAQLLPNRGIDDILEDQVEPDDPLPPIPLDFPGSFDVLSPSPDSEGLSSVFSSSLPSPTNSSSPSPRDPTDSLDWLEALSGGPPLGSGPPPPSIFSADLSDSSSSRLWDLLEDPW

SEQ ID NO: 31163 - protein, 219 aa, Homo sapiens
  REGION 1..219: note = ENSP00000469544
MTLAASSQRSQIIRSKFRSVLQLRIHRRNQEQNPVQAPISQQSSLAPWPALRHPGAPLSTQPCSSRPGLLPAGLSGSFTVSPVSDPDPWISASDPPLAPALPSGTAPFLFSPGVLLPEPEYCPPWRSPKKESPKISQRWRESKPRGNLTYHQYMPPEPRQGSRADPQAEGSALGPPGPSLWEGTDSQQPHPRMKPSPLTPCPPGVPSPSPPPHKLELQT

SEQ ID NO: 31164 - protein, 11 aa, Homo sapiens
  REGION 1..11: note = ENSP00000469127
MPPEPRQGSRA

SEQ ID NO: 31165 - protein, 653 aa, Homo sapiens
  REGION 1..653: note = ENSP00000357453
MPVGGLLPLFSSPAGGVLGGGLGGGGGRKGSGPAALRLTEKFVLLLVFSAFITLCFGAIFFLPDSSKLLSGVLFHSSPALQPAADHKPGPGARAEDAAEGRARRREEGAPGDPEAALEDNLARIRENHERALREAKETLQKLPEEIQRDILLEKKKVAQDQLRDKAPFRGLPPVDFVPPIGVESREPADAAIREKRAKIKEMMKHAWNNYKGYAWGLNELKPISKGGHSSSLFGNIKGATIVDALDTLFIMEMKHEFEEAKSWVEENLDFNVNAEISVFEVNIRFVGGLLSAYYLSGEEIFRKKAVELGVKLLPAFHTPSGIPWALLNMKSGIGRNWPWASGGSSILAEFGTLHLEFMHLSHLSGNPIFAEKVMNIRTVLNKLEKPQGLYPNYLNPSSGQWGQHHVSVGGLGDSFYEYLLKAWLMSDKTDLEAKKMYFDAVQAIETHLIRKSSSGLTYIAEWKGGLLEHKMGHLTCFAGGMFALGADAAPEGMAQHYLELGAEIARTCHESYNRTFMKLGPEAFRFDGGVEAIATRQNEKYYILRPEVMETYMYMWRLTHDPKYRKWAWEAVEALENHCRVNGGYSGLRDVYLLHESYDDVQQSFFLAETLKYLYLIFSDDDLLPLEHWIFNSEAHLLPILPKDKKEVEIREE

SEQ ID NO: 31166 - protein, 630 aa, Homo sapiens
  REGION 1..630: note = ENSP00000363452
MLMRKVPGFVPASPWGLRLPQKFLFLLFLSGLVTLCFGALFLLPHSSRLKRLFLAPRTQQPGLEVVAEIAGHAPAREQEPPPNPAPAAPAPGEDDPSSWASPRRRKGGLRRTRPTGPREEATAARGNSIPASRPGDEGVPFRFDFNAFRSRLRHPVLGTRADESQEPQSQVRAQREKIKEMMQFAWQSYKRYAMGKNELRPLTKDGYEGNMFGGLSGATVIDSLDTLYLMELKEEFQEAKAWVGESFHLNVSGEASLFEVNIRYIGGLLSAFYLTGEEVFRIKAIRLGEKLLPAFNTPTGIPKGVVSFKSGNWGWATAGSSSILAEFGSLHLEFLHLTELSGNQVFAEKVRNIRKVLRKIEKPFGLYPNFLSPVSGNWVQHHVSVGGLGDSFYEYLIKSWLMSGKTDMEAKNMYYEALEAIETYLLNVSPGGLTYIAEWRGGILDHKMGHLACFSGGMIALGAEDAKEEKRAHYRELAAQITKTCHESYARSDTKLGPEAFWFNSGREAVATQLSESYYILRPEVVESYMYLWRQTHNPIYREWGWEVVLALEKYCRTEAGFSGIQDVYSSTPNHDNKQQSFFLAETLKYLYLLFSEDDLLSLEDWVFNTEAHPLPVNHSDSSGRAWGRH

SEQ ID NO: 31167 - protein, 450 aa, Homo sapiens
  REGION 1..450: note = ENSP00000263979
MMQFAWQSYKRYAMGKNELRPLTKDGYEGNMFGGLSGATVIDSLDTLYLMELKEEFQEAKAWVGESFHLNVSGEASLFEVNIRYIGGLLSAFYLTGEEVFRIKAIRLGEKLLPAFNTPTGIPKGVVSFKSGNWGWATAGSSSILAEFGSLHLEFLHLTELSGNQVFAEKVRNIRKVLRKIEKPFGLYPNFLSPVSGNWVQHHVSVGGLGDSFYEYLIKSWLMSGKTDMEAKNMYYEALEAIETYLLNVSPGGLTYIAEWRGGILDHKMGHLACFSGGMIALGAEDAKEEKRAHYRELAAQITKTCHESYARSDTKLGPEAFWFNSGREAVATQLSESYYILRPEVVESYMYLWRQTHNPIYREWGWEVVLALEKYCRTEAGFSGIQDVYSSTPNHDNKQQSFFLAETLKYLYLLFSEDDLLSLEDWVFNTEAHPLPVNHSDSSGRAWGRH

SEQ ID NO: 31168 - protein, 401 aa, Homo sapiens
  REGION 1..401: note = ENSP00000363449
MELKEEFQEAKAWVGESFHLNVSGEASLFEVNIRYIGGLLSAFYLTGEEVFRIKAIRLGEKLLPAFNTPTGIPKGVVSFKSGNWGWATAGSSSILAEFGSLHLEFLHLTELSGNQVFAEKVRNIRKVLRKIEKPFGLYPNFLSPVSGNWVQHHVSVGGLGDSFYEYLIKSWLMSGKTDMEAKNMYYEALEAIETYLLNVSPGGLTYIAEWRGGILDHKMGHLACFSGGMIALGAEDAKEEKRAHYRELAAQITKTCHESYARSDTKLGPEAFWFNSGREAVATQLSESYYILRPEVVESYMYLWRQTHNPIYREWGWEVVLALEKYCRTEAGFSGIQDVYSSTPNHDNKQQSFFLAETLKYLYLLFSEDDLLSLEDWVFNTEAHPLPVNHSDSSGRAWGRH

SEQ ID NO: 31169 - protein, 362 aa, Homo sapiens [sequence omitted]

SEQ ID NO: 31170 - protein, 1144 aa, Homo sapiens
  REGION 1..1144: note = ENSP00000261483
MKLSRQFTVFGSAIFCVVIFSLYLMLDRGHLDYPRNPRREGSFPQGQLSMLQEKIDHLERLLAENNEIISNIRDSVINLSESVEDGPKSSQSNFSQGAGSHLLPSQLSLSVDTADCLFASQSGSHNSDVQMLDVYSLISFDNPDGGVWKQGFDITYESNEWDTEPLQVFVVPHSHNDPGWLKTFNDYFRDKTQYIFNNMVLKLKEDSRRKFIWSEISYLSKWWDIIDIQKKDAVKSLIENGQLEIVTGGWVMPDEATPHYFALIDQLIEGHQWLENNIGVKPRSGWAIDPFGHSPTMAYLLNRAGLSHMLIQRVHYAVKKHFALHKTLEFFWRQNWDLGSVTDILCHMMPFYSYDIPHTCGPDPKICCQFDFKRLPGGRFGCPWGVPPETIHPGNVQSRARMLLDQYRKKSKLFRTKVLLAPLGDDFRYCEYTEWDLQFKNYQQLFDYMNSQSKFKVKIQFGTLSDFFDALDKADETQRDKGQSMFPVLSGDFFTYADRDDHYWSGYFTSRPFYKRMDRIMESHLRAAEILYYFALRQAHKYKINKFLSSSLYTALTEARRNLGLFQHHDAITGTAKDWVVVDYGTRLFHSLMVLEKIIGNSAFLLILKDKLTYDSYSPDTFLEMDLKQKSQDSLPQKNIIRLSAEPRYLVVYNPLEQDRISLVSVYVSSPTVQVFSASGKPVEVQVSAVWDTANTISETAYEISFRAHIPPLGLKVYKILESASSNSHLADYVLYKNKVEDSGIFTIKNMINTEEGITLENSFVLLRFDQTGLMKQMMTKEDGKHHEVNVQFSWYGTTIKRDKSGAYLFLPDGNAKPYVYTTPPFVRVTHGRIYSEVTCFFDHVTHRVRLYHIQGIEGQSVEVSNIVDIRKVYNREIAMKISSDIKSQNRFYTDLNGYQIQPRMTLSKLPLQANVYPMTTMAYIQDAKHRLTLLSAQSLGVSSLNSGQIEVIMDRRLMQDDNRGLEQGIQDNKITANLFRILLEKRSAVNTEEEKKSVSYPSLLSHITSSLMNHPVIPMANKFSSPTLELQGEFSPLQSSLPCDIHLVNLRTIQSKVGNGHSNEAALILHRKGFDCRFSSKGTGLFCSTTQGKILVQKLLNKFIVESLTPSSLSLMHSPPGTQNISEINLSPMEISTFRIQLR

SEQ ID NO: 31171 - protein, 334 aa, Homo sapiens
  REGION 1..334: note = ENSP00000468348
MSQSKGKKRNPGLKIPKEAFEQPQTSSTPPRDLDSKACISIGNQNFEVKADDLEPIMELGRGAYGVVEKMRHVPSGQIMAVKRIRATVNSQEQKRLLMDLDISMRTVDCPFTVTFYGALFREGDVWICMELMDTSLDKFYKQVIDKGQTIPEDILGKIAVSIVKALEHLHSKLSVIHRDVKPSNVLINALGQVKMCDFGISGYLVDSVAKTIDAGCKPYMAPERINPELNQKGYSVKSDIWSLGITMIELAILRFPYDSWGTPFQQLKQVVEEPSPQLPADKFSAEFVDFTSQCLKKNSKERPTYPELMQHPFFTLHESKGTDVASFVKLILGD

SEQ ID NO: 31172 - protein, 68 aa, Homo sapiens
  REGION 1..68: note = ENSP00000351997
MSQSKGKKRNPGLKIPKEAFEQPQTSSTPPRDLDSKACISIGNQNFEVKADDLEPIMELGRADPSHSK

SEQ ID NO: 31173 - protein, 84 aa, Homo sapiens
  REGION 1..84: note = ENSP00000466143
MELGRGAYGVVEKMRHVPSGQIMAVKRIRATVNSQEQKRLLMDLDISMRTVDCPFTVTFYGALFREGDVWICMELMDTSLDKFY

SEQ ID NO: 31174 - protein, 128 aa, Homo sapiens
  REGION 1..128: note = ENSP00000464916
MSHRAWAEGKKRNPGLKIPKEAFEQPQTSSTPPRDLDSKACISIGNQNFEVKADDLEPIMELGRGAYGVVEKMRHVPSGQIMAVKRIRATVNSQEQKRLLMDLDISMRTVDCPFTVTFYGALFREGDV

SEQ ID NO: 31175 - protein, 278 aa, Homo sapiens
  REGION 1..278: note = ENSP00000467213
MELGRGAYGVVEKMRHVPSGQIMAVKRIRATVNSQEQKRLLMDLDISMRTVDCPFTVTFYGALFREGDVWICMELMDTSLDKFYKQVIDKGQTIPEDILGKIAVSIVKALEHLHSKLSVIHRDVKPSNVLINALGQVKMCDFGISGYLVDSVAKTIDAGCKPYMAPERINPELNQKGYSVKSDIWSLGITMIELAILRFPYDSWGTPFQQLKQVVEEPSPQLPADKFSAEFVDFTSQCLKKNSKERPTYPELMQHPFFTLHESKGTDVASFVKLILGD

SEQ ID NO: 31176 - protein, 278 aa, Homo sapiens; identical to SEQ ID NO: 31175
  REGION 1..278: note = ENSP00000477701

SEQ ID NO: 31177 - protein, 199 aa, Homo sapiens
  REGION 1..199: note = ENSP00000314560
MAWPCISRLCCLARRWNQLDRSDVAVPLTLHGYSDLDSEEPGTGGAASRRGQPPAGARDSGRDVPLTQYQRDFGLWTTPAGPKDPPPGRGPGAGGRRGKSSAQSSAPPAPGARGVYVLPIGDADAAAAVTTSYRQEFQAWTGVKPSRSTKTKPARVITTHTSGWDSSPGAGFQVPEVRKKFTPNPSAIFQASAPRILNV

SEQ ID NO: 31178 - protein, 182 aa, Homo sapiens
  REGION 1..182: note = ENSP00000388945
MAWPCISRLCCLARRWNQLDRSDVAVPLTLHGYSDLDSEEPGTGGAASRRGQPPAGARDSGRDVPLTQYQRDFGLWTTPAGPKDPPPGRGPGAGGRRGKSSAQSSAPPAPGARGVYVLPIGDADAAAAVTTSYRQEFQAWTGVKPSRSTKTKPARVITTHTSGWDSSPGAGFQASAPRILNV

SEQ ID NO: 31179 - protein, 133 aa, Homo sapiens
  REGION 1..133: note = ENSP00000390816
  VARIANT 1: note = Any amino acid
XCCLARRWNQLDRSDVAVPLTLHGYSDLDSEEPGTGGAASRRGQPPAGARDSGRDVPLTQYQRDFGLWTTPAGPKDPPPGRGPGAGGRRGKSSAQSSAPPAPGARGVYVLPIGDADAAAAVTTSYRNSRLGLE

SEQ ID NO: 31180 - protein, 749 aa, Homo sapiens
  REGION 1..749: note = ENSP00000346581
MAELGAGGDGHRGGDGAVRSETAPDSYKVQDKKNASSRPASAISGQNNNHSGNKPDPPPVLRVDDRQRLARERREEREKQLAAREIVWLEREERARQHYEKHLEERKKRLEEQRQKEERRRAAVEEKRRQRLEEDKERHEAVVRRTMERSQKPKQKHNRWSWGGSLHGSPSIHSADPDRRSVSTMNLSKYVDPVISKRLSSSSATLLNSPDRARRLQLSPWESSVVNRLLTPTHSFLARSKSTAALSGEAASCSPIIMPYKAAHSRNSMDRPKLFVTPPEGSSRRRIIHGTASYKKERERENVLFLTSGTRRAVSPSNPKARQPARSRLWLPSKSLPHLPGTPRPTSSLPPGSVKAAPAQVRPPSPGNIRPVKREVKVEPEKKDPEKEPQKVANEPSLKGRAPLVKVEEATVEERTPAEPEVGPAAPAMAPAPASAPAPASAPAPAPVPTPAMVSAPSSTVNASASVKTSAGTTDPEEATRLLAEKRRLAREQREKEERERREQEELERQKREELAQRVAEERTTRREEESRRLEAEQAREKEEQLQRQAEERALREREEAERAQRQKEEEARVREEAERVRQEREKHFQREEQERLERKKRLEEIMKRTRRTEATDKKTSDQRNGDIAKGALTGGTEVSALPCTTNAPGNGKPVGSPHVVTSHQSKVTVESTPDLEKQPNENGVSVQNENFEEIINLPIGSKPSRLDVTNSESPEIPLNPILAFDDEGTLGPLPQVDGVQTQQTAEVI

SEQ ID NO: 31181 - protein, 771 aa, Homo sapiens
  REGION 1..771: note = ENSP00000414712
MPGSATALRHERLKKTNARPIPLGLFTINEEDEQQKNGNSRRPKAPDSYKVQDKKNASSRPASAISGQNNNHSGNKPDPPPVLRVDDRQRLARERREEREKQLAAREIVWLEREERARQHYEKHLEERKKRLEEQRQKEERRRAAVEEKRRQRLEEDKERHEAVVRRTMERSQKPKQKHNRWSWGGSLHGSPSIHSADPDRRSVSTMNLSKYVDPVISKRLSSSSATLLNSPDRARRLQLSPWESSVVNRLLTPTHSFLARSKSTAALSGEAASCSPIIMPYKAAHSRNSMDRPKLFVTPPEGSSRRRIIHGTASYKKERERENVLFLTSGTRRAVSPSNPKARQPARSRLWLPSKSLPHLPGTPRPTSSLPPGSVKAAPAQVRPPSPGNIRPVKREVKVEPEKKDPEKEPQKVANEPSLKGRAPLVKVEEATVEERTPAEPEVGPAAPAMAPAPASAPAPASAPAPAPVPTPAMVSAPSSTVNASASVKTSAGTTDPEEATRLLAEKRRLAREQREKEERERREQEELERQKREELAQRVAEERTTRREEESRRLEAEQAREKEEQLQRQAEERALREREEAERAQRQKEEEARVREEAERVRQEREKHFQREEQERLERKKRLEEIMKRTRRTEATDKKTSDQRNGDIAKGALTGGTEVSALPCTTNAPGNGKPVGSPHVVTSHQSKVTVESTPDLEKQPNENGVSVQNENFEEIINLPIGSKPSRLDVTNSESPEIPLNPILAFDDEGTLGPLPQVDGVQTQQTAEVI

SEQ ID NO: 31182 - protein, 734 aa, Homo sapiens
  REGION 1..734: note = ENSP00000445737
MEDTKLYSPDSYKVQDKKNASSRPASAISGQNNNHSGNKPDPPPVLRVDDRQRLARERREEREKQLAAREIVWLEREERARQHYEKHLEERKKRLEEQRQKEERRRAAVEEKRRQRLEEDKERHEAVVRRTMERSQKPKQKHNRWSWGGSLHGSPSIHSADPDRRSVSTMNLSKYVDPVISKRLSSSSATLLNSPDRARRLQLSPWESSVVNRLLTPTHSFLARSKSTAALSGEAASCSPIIMPYKAAHSRNSMDRPKLFVTPPEGSSRRRIIHGTASYKKERERENVLFLTSGTRRAVSPSNPKARQPARSRLWLPSKSLPHLPGTPRPTSSLPPGSVKAAPAQVRPPSPGNIRPVKREVKVEPEKKDPEKEPQKVANEPSLKGRAPLVKVEEATVEERTPAEPEVGPAAPAMAPAPASAPAPASAPAPAPVPTPAMVSAPSSTVNASASVKTSAGTTDPEEATRLLAEKRRLAREQREKEERERREQEELERQKREELAQRVAEERTTRREEESRRLEAEQAREKEEQLQRQAEERALREREEAERAQRQKEEEARVREEAERVRQEREKHFQREEQERLERKKRLEEIMKRTRRTEATDKKTSDQRNGDIAKGALTGGTEVSALPCTTNAPGNGKPVGSPHVVTSHQSKVTVESTPDLEKQPNENGVSVQNENFEEIINLPIGSKPSRLDVTNSESPEIPLNPILAFDDEGTLGPLPQVDGVQTQQTAEVI

SEQ ID NO: 31183 - protein, 734 aa, Homo sapiens
  REGION 1..734: note = ENSP00000400790
MPGSATALRHERLKKTNARPIPLGLFTINEEDEQQKNGNSRRPKAPDSYKVQDKKNASSRPASAISGQNNNHSGNKPDPPPVLRVDDRQRLARERREEREKQLAAREIVWLEREERARQHYEKHLEERKKRLEEQRQKEERRRAAVEEKRRQRLEEDKERHEAVVRRTMERSQKPKQKHNRWSWGGSLHGSPSIHSAARRLQLSPWESSVVNRLLTPTHSFLARSKSTAALSGEAASCSPIIMPYKAAHSRNSMDRPKLFVTPPEGSSRRRIIHGTASYKKERERENVLFLTSGTRRAVSPSNPKARQPARSRLWLPSKSLPHLPGTPRPTSSLPPGSVKAAPAQVRPPSPGNIRPVKREVKVEPEKKDPEKEPQKVANEPSLKGRAPLVKVEEATVEERTPAEPEVGPAAPAMAPAPASAPAPASAPAPAPVPTPAMVSAPSSTVNASASVKTSAGTTDPEEATRLLAEKRRLAREQREKEERERREQEELERQKREELAQRVAEERTTRREEESRRLEAEQAREKEEQLQRQAEERALREREEAERAQRQKEEEARVREEAERVRQEREKHFQREEQERLERKKRLEEIMKRTRRTEATDKKTSDQRNGDIAKGALTGGTEVSALPCTTNAPGNGKPVGSPHVVTSHQSKVTVESTPDLEKQPNENGVSVQNENFEEIINLPIGSKPSRLDVTNSESPEIPLNPILAFDDEGTLGPLPQVDGVQTQQTAEVI

SEQ ID NO: 31184 - protein, 603 aa, Homo sapiens
  REGION 1..603: note = ENSP00000482998
MERSQKPKQKHNRWSWGGSLHGSPSIHSADPDRRSVSTMNLSKYVDPVISKRLSSSSATLLNSPDRARRLQLSPWESSVVNRLLTPTHSFLARSKSTAALSGEAASCSPIIMPYKAAHSRNSMDRPKLFVTPPEGSSRRRIIHGTASYKKERERENVLFLTSGTRRAVSPSNPKARQPARSRLWLPSKSLPHLPGTPRPTSSLPPGSVKAAPAQVRPPSPGNIRPVKREVKVEPEKKDPEKEPQKVANEPSLKGRAPLVKVEEATVEERTPAEPEVGPAAPAMAPAPASAPAPASAPAPAPVPTPAMVSAPSSTVNASASVKTSAGTTDPEEATRLLAEKRRLAREQREKEERERREQEELERQKREELAQRVAEERTTRREEESRRLEAEQAREKEEQLQRQAEERALREREEAERAQRQKEEEARVREEAERVRQEREKHFQREEQERLERKKRLEEIMKRTRRTEATDKKTSDQRNGDIAKGALTGGTEVSALPCTTNAPGNGKPVGSPHVVTSHQSKVTVESTPDLEKQPNENGVSVQNENFEEIINLPIGSKPSRLDVTNSESPEIPLNPILAFDDEGTLGPLPQVDGVQTQQTAEVI

SEQ ID NO: 31185 - protein, 655 aa, Homo sapiens
  REGION 1..655: note = ENSP00000483511
MAELGAGGDGHRGGDGAVRSETAPDSYKVQDKKNASSRPASAISGQNNNHSGNKPDPPPVLRVDDRQRLARERREEREKQLDPDRRSVSTMNLSKYVDPVISKRLSSSSATLLNSPDRARRLQLSPWESSVVNRLLTPTHSFLARSKSTAALSGEAASCSPIIMPYKAAHSRNSMDRPKLFVTPPEGSSRRRIIHGTASYKKERERENVLFLTSGTRRAVSPSNPKARQPARSRLWLPSKSLPHLPGTPRPTSSLPPGSVKAAPAQVRPPSPGNIRPVKREVKVEPEKKDPEKEPQKVANEPSLKGRAPLVKVEEATVEERTPAEPEVGPAAPAMAPAPASAPAPASAPAPAPVPTPAMVSAPSSTVNASASVKTSAGTTDPEEATRLLAEKRRLAREQREKEERERREQEELERQKREELAQRVAEERTTRREEESRRLEAEQAREKEEQLQRQAEERALREREEAERAQRQKEEEARVREEAERVRQEREKHFQREEQERLERKKRLEEIMKRTRRTEATDKKTSDQRNGDIAKGALTGGTEVSALPCTTNAPGNGKPVGSPHVVTSHQSKVTVESTPDLEKQPNENGVSVQNENFEEIINLPIGSKPSRLDVTNSESPEIPLNPILAFDDEGTLGPLPQVDGVQTQQTAEVI

SEQ ID NO: 31186 - protein, 603 aa, Homo sapiens; identical to SEQ ID NO: 31184
  REGION 1..603: note = ENSP00000414879

SEQ ID NO: 31187 - protein, 779 aa, Homo sapiens
  REGION 1..779: note = ENSP00000482335
MPGSATALRHERLKKTNARPIPLGLFTINEEDEQQKNGNSRRPKAPDSYKVQDKKNASSRPASAISGQNNNHSGNKPDPPPVLRVDDRQRLARERREEREKQLAAREIVWLEREERARQHYEKHLEERKKRLEEQRQKEERRRAAVEEKRRQRLEEDKERHEAVVRRTMERSQKPKQKHNRWSWGGSLHGSPSIHSADPDRRSVSTMNLSKYVDPVISKRLSSSSATLLNSPDRARRLQLSPWESSVVNRLLTPTHSFLARSKSTAALSGEAVIPICPRSASCSPIIMPYKAAHSRNSMDRPKLFVTPPEGSSRRRIIHGTASYKKERERENVLFLTSGTRRAVSPSNPKARQPARSRLWLPSKSLPHLPGTPRPTSSLPPGSVKAAPAQVRPPSPGNIRPVKREVKVEPEKKDPEKEPQKVANEPSLKGRAPLVKVEEATVEERTPAEPEVGPAAPAMAPAPASAPAPASAPAPAPVPTPAMVSAPSSTVNASASVKTSAGTTDPEEATRLLAEKRRLAREQREKEERERREQEELERQKREELAQRVAEERTTRREEESRRLEAEQAREKEEQLQRQAEERALREREEAERAQRQKEEEARVREEAERVRQEREKHFQREEQERLERKKRLEEIMKRTRRTEATDKKTSDQRNGDIAKGALTGGTEVSALPCTTNAPGNGKPVGSPHVVTSHQSKVTVESTPDLEKQPNENGVSVQNENFEEIINLPIGSKPSRLDVTNSESPEIPLNPILAFDDEGTLGPLPQVDGVQTQQTAEVI

SEQ ID NO: 31188 - protein, 712 aa, Homo sapiens
  REGION 1..712: note = ENSP00000482356
MAELGAGGDGHRGGDGAVRSETAPDSYKVQDKKNASSRPASAISGQNNNHSGNKPDPPPVLRVDDRQRLARERREEREKQLAAREIVWLEREERARQHYEKHLEERKKRLEEQRQKEERRRAAVEEKRRQRLEEDKERHEAVVRRTMERSQKPKQKHNRWSWGGSLHGSPSIHSAARRLQLSPWESSVVNRLLTPTHSFLARSKSTAALSGEAASCSPIIMPYKAAHSRNSMDRPKLFVTPPEGSSRRRIIHGTASYKKERERENVLFLTSGTRRAVSPSNPKARQPARSRLWLPSKSLPHLPGTPRPTSSLPPGSVKAAPAQVRPPSPGNIRPVKREVKVEPEKKDPEKEPQKVANEPSLKGRAPLVKVEEATVEERTPAEPEVGPAAPAMAPAPASAPAPASAPAPAPVPTPAMVSAPSSTVNASASVKTSAGTTDPEEATRLLAEKRRLAREQREKEERERREQEELERQKREELAQRVAEERTTRREEESRRLEAEQAREKEEQLQRQAEERALREREEAERAQRQKEEEARVREEAERVRQEREKHFQREEQERLERKKRLEEIMKRTRRTEATDKKTSDQRNGDIAKGALTGGTEVSALPCTTNAPGNGKPVGSPHVVTSHQSKVTVESTPDLEKQPNENGVSVQNENFEEIINLPIGSKPSRLDVTNSESPEIPLNPILAFDDEGTLGPLPQVDGVQTQQTAEVI

SEQ ID NO: 31189 - protein, 277 aa, Homo sapiens
  REGION 1..277: note = ENSP00000379126
MRHENVIGLLDVFTPDETLDDFTDFYLVMPFMGTDLGKLMKHEKLGEDRIQFLVYQMLKGLRDLKPGNLAVNEDCELKILDFGLARQADSEMTGYVVTRWYRAPEVILNWMRYTQTVDIWSVGCIMAEMITGKTLFKGSDHLDQLKEIMKVTGTPPAEFVQRLQSDEAKNYMKGLPELEKKDFASILTNASPLAVNLLEKMLVLDAEQRVTAGEALAHPYFESLHDTEDEPQVQKYDDSFDDVDRTLDEWKRVTYKEVLSFKPPRQLGARVSKETPL

SEQ ID NO: 31190 - protein, 367 aa, Homo sapiens
  REGION 1..367: note = ENSP00000215659
MSSPPPARSGFYRQEVTKTAWEVRAVYRDLQPVGSGAYGAVCSAVDGRTGAKVAIKKLYRPFQSELFAKRAYRELRLLKHMRHENVIGLLDVFTPDETLDDFTDFYLVMPFMGTDLGKLMKHEKLGEDRIQFLVYQMLKGLRYIHAAGIIHRDLKPGNLAVNEDCELKILDFGLARQADSEMTGYVVTRWYRAPEVILNWMRYTQTVDIWSVGCIMAEMITGKTLFKGSDHLDQLKEIMKVTGTPPAEFVQRLQSDEAKNYMKGLPELEKKDFASILTNASPLAVNLLEKMLVLDAEQRVTAGEALAHPYFESLHDTEDEPQVQKYDDSFDDVDRTLDEWKRVTYKEVLSFKPPRQLGARVSKETPL

SEQ ID NO: 31191 - protein, 119 aa, Homo sapiens
  REGION 1..119: note = ENSP00000379124
MSSPPPARSGFYRQEVTKTAWEVRAVYRDLQPVGSGAYGAVCSAVDGRTGAKVAIKKLYRPFQSELFAKRAYRELRLLKHMRHENVIGLLDVFTPDETLDDFTDLKVPCSGPWHQVCGR

SEQ ID NO: 31192 - protein, 357 aa, Homo sapiens
  REGION 1..357: note = ENSP00000479972
MSSPPPARSGFYRQEVTKTAWEVRAVYRDLQPVGSGAYGAVCSAVDGRTGAKVAIKKLYRPFQSELFAKRAYRELRLLKHMRHENVIGLLDVFTPDETLDDFTDFYLVMPFMGTDLGKLMKHEKLGEDRIQFLVYQMLKGLRDLKPGNLAVNEDCELKILDFGLARQADSEMTGYVVTRWYRAPEVILNWMRYTQTVDIWSVGCIMAEMITGKTLFKGSDHLDQLKEIMKVTGTPPAEFVQRLQSDEAKNYMKGLPELEKKDFASILTNASPLAVNLLEKMLVLDAEQRVTAGEALAHPYFESLHDTEDEPQVQKYDDSFDDVDRTLDEWKRVTYKEVLSFKPPRQLGARVSKETPL

SEQ ID NO: 31193 - protein, 281 aa, Homo sapiens
  REGION 1..281: note = ENSP00000465661
MAEKGDCIASVYGYDLGGRFVDFQPLGFGVNGLVLSAVDSRACRKVAVKKIALSDARSMKHALREIKIIRRLDHDNIVKVYEVLGPKGTDLQGELFKFSVAYIVQEYMETDLARLLEQGTLAEEHAKLFMYQLLRGLKYIHSANVLHRDLKPANIFISTEDLVLKIGDFGLARIVDQHYSHKSTDCITSIVGHIPEPSEKGEVREVPFVLLSVLCKSNWGEFQSCGVGAAVKRLESEGTLGPGGLMEDSVMLDYVVSLPSLPLHPLLWSRDNDSSHPGRAS

SEQ ID NO: 31194 - protein, 376 aa, Homo sapiens
  REGION 1..376: note = ENSP00000439231
MWAAGCILAEMLTGRMLFAGAHELEQMQLILETIPVIREEDKDELLRVMPSFVSSTWEVKRPLRKLLPEVNSEAIDFLEKILTFNPMDRLTAEMGLQHPYMSPYSCPEDEPTSQHPFRIEDEIDDIVLMAANQSQLSNWDTCSSRYPVSLSSDLEWRPDRCQDASEVQRDPRAGSAPLAEDVQVDPRKDSHSSSERFLEQSHSSMERAFEADYGRSCDYKVGSPSYLDKLLWRDNKPHHYSEPKLILDLSHWKQAAGAPPTATGLADTGAREDEPASLFLEIAQWVKSTQGGPEHASPPADDPERRLSASPPGRPAPVDGGASPQFDLDVFISRALKLCTKPEDLPDNKLGDLNGACIPEHPGDLVQTEAFSKERW

SEQ ID NO: 31195 - protein, 233 aa, Homo sapiens
  REGION 1..233: note = ENSP00000466233
MAEKGDCIASVYGYDLGGRFVDFQPLGFGVNGLVLSAVDSRACRKVAVKKIALSDARSMKHALREIKIIRRLDHDNIVKVYEVLGPKGTDLQGELFKFSVAYIVQEYMETDLARLLEQGTLAEEHAKLFMYQLLRGLKYIHSANVLHRDLKPANIFISTEDLVLKIGDFGLARIVDQHYSHKGYLSEGLVTKWYRSPRLLLSPNNYTKAIDMWAAGCILAEMLTGRMLFAGTL

SEQ ID NO: 31196 - protein, 587 aa, Homo sapiens
  REGION 1..587: note = ENSP00000383234
MAEKGDCIASVYGYDLGGRFVDFQPLGFGVNGLVLSAVDSRACRKVAVKKIALSDARSMKHALREIKIIRRLDHDNIVKVYEVLGPKGTDLQGELFKFSVAYIVQEYMETDLARLLEQGTLAEEHAKLFMYQLLRGLKYIHSANVLHRDLKPANIFISTEDLVLKIGDFGLARIVDQHYSHKGYLSEGLVTKWYRSPRLLLSPNNYTKAIDMWAAGCILAEMLTGRMLFAGAHELEQMQLILETIPVIREEDKDELLRVMPSFVSSTWEVKRPLRKLLPEVNSEAIDFLEKILTFNPMDRLTAEMGLQHPYMSPYSCPEDEPTSQHPFRIEDEIDDIVLMAANQSQLSNWDTCSSRYPVSLSSDLEWRPDRCQDASEVQRDPRAGSAPLAEDVQVDPRKDSHSSSERFLEQSHSSMERAFEADYGRSCDYKVGSPSYLDKLLWRDNKPHHYSEPKLILDLSHWKQAAGAPPTATGLADTGAREDEPASLFLEIAQWVKSTQGGPEHASPPADDPERRLSASPPGRPAPVDGGASPQFDLDVFISRALKLCTKPEDLPDNKLGDLNGACIPEHPGDLVQTEAFSKERW

SEQ ID NO: 31197 - protein, 194 aa, Homo sapiens
  REGION 1..194: note = ENSP00000468216
MAVNVYSTSITQETMSRHDIIAWVNDIVSLNYTKVEQLCSGAAYCQFMDMLFPGCISLKKVKFQAKLEHEYIHNFKLLQASFKRMNVDKVIPVEKLVKGRFQDNLDFIQWFKKFYDANYDGKEYDPVEARQGQDAIPPPDPGEQIFNLPKKSHHANSPTAGAAKSSPAAKPGSTPSRPSSAKRASSSGSASKSD

SEQ ID NO: 31198 - protein, 134 aa, Homo sapiens
  REGION 1..134: note = ENSP00000465939
MTSLHGLKKVKFQAKLEHEYIHNFKLLQASFKRMNVDKVIPVEKLVKGRFQDNLDFIQWFKKFYDANYDGKEYDPVEARQGQDAIPPPDPGEQIFNLPKKSHHANSPTAGAAKSSPAAKPGSTPSRPSSAKRAS

SEQ ID NO: 31199 - protein, 78 aa, Homo sapiens
  REGION 1..78: note = ENSP00000466871
MAVNVYSTSITQETMSRHDIIAWVNDIVSLNYTKVEQLCSGAAYCQFMDMLFPGCISLKKVKFQAKLEHEYIHNFKLL

SEQ ID NO: 31200 - protein, 315 aa, Homo sapiens
  REGION 1..315: note = ENSP00000407723
MKQNRDQKCPVSQRNSSFQQPGRKPGCSSWGMAVNVYSTSITQETMSRHDIIAWVNDIVSLNYTKVEQLCSGAAYCQFMDMLFPGCISLKKVKFQAKLEHEYIHNFKLLQASFKRMNVDKVIPVEKLVKGRFQDNLDFIQWFKKFYDANYDGKEYDPVEARQGQDAIPPPDPGEQIFNLPKKSHHANSPTAGAAKSSPAAKPGSTPSRPSSAKRASSSGSASKSDKDLETQVIQLNEQVHSLKLALEGVEKERDFYFGKLREIELLCQEHGQENDDLVQRLMDILYASEEHEGHTEEPEAEEQAHEQQPPQQEEY

SEQ ID NO: 31201 - protein, 127 aa, Homo sapiens
  REGION 1..127: note = ENSP00000468904
MAVNVYSTSITQETMSRHDIIAWVNDIVSLNYTKVEQLCSGAAYCQFMDMLFPGCISLKKVKFQAKLEHEYIHNFKLLQASFKRMNVDKVIPVEKLVKGRFQDNLDFIQWFKKFYDANYDGKEYDPV

SEQ ID NO: 31202 - protein, 327 aa, Homo sapiens
  REGION 1..327: note = ENSP00000300249
MPGPTQTLSPNGENNNDIIQDNNGTIIPFRKHTVRGERSYSWGMAVNVYSTSITQETMSRHDIIAWVNDIVSLNYTKVEQLCSGAAYCQFMDMLFPGCISLKKVKFQAKLEHEYIHNFKLLQASFKRMNVDKVIPVEKLVKGRFQDNLDFIQWFKKFYDANYDGKEYDPVEARQGQDAIPPPDPGEQIFNLPKKSHHANSPTAGAAKSSPAAKPGSTPSRPSSAKRASSSGSASKSDKDLETQVIQLNEQVHSLKLALEGVEKERDFYFGKLREIELLCQEHGQENDDLVQRLMDILYASEEHEGHTEEPEAEEQAHEQQPPQQEEY

SEQ ID NO: 31203 - protein, 274 aa, Homo sapiens
  REGION 1..274: note = ENSP00000446343
MARTTTTSSRIITGPSFLSGSTQCAGSVPTGAAYCQFMDMLFPGCISLKKVKFQAKLEHEYIHNFKLLQASFKRMNVDKVIPVEKLVKGRFQDNLDFIQWFKKFYDANYDGKEYDPVEARQGQDAIPPPDPGEQIFNLPKKSHHANSPTAGAAKSSPAAKPGSTPSRPSSAKRASSSGSASKSDKDLETQVIQLNEQVHSLKLALEGVEKERDFYFGKLREIELLCQEHGQENDDLVQRLMDILYASEEHEGHTEEPEAEEQAHEQQPPQQEEY

SEQ ID NO: 31204 - protein, 259 aa, Homo sapiens
  REGION 1..259: note = ENSP00000468588
MPGPTQTLSPNGENNNDIIQDNNGTIIPFRKHTVRGERSYSWGMAVNVYSTSITQETMSRHDIIAWVNDIVSLNYTKVEQLCSGAAYCQFMDMLFPGCISLKKVKFQAKLEHEYIHNFKLLQASFKRMNVDKVIPVEKLVKGRFQDNLDFIQWFKKFYDANYDGKEYDPVEARQGQDAIPPPDPGEQIFNLPKKSHHANSPTAGAAKSSPAAKPGSTPSRPSSAKRASSSGSASKSDKDLETQVIQLNEQVMHQLWPRL

SEQ ID NO: 31205 - protein, 284 aa, Homo sapiens
  REGION 1..284: note = ENSP00000464921
MAVNVYSTSITQETMSRHDIIAWVNDIVSLNYTKVEQLCSGAAYCQFMDMLFPGCISLKKVKFQAKLEHEYIHNFKLLQASFKRMNVDKVIPVEKLVKGRFQDNLDFIQWFKKFYDANYDGKEYDPVEARQGQDAIPPPDPGEQIFNLPKKSHHANSPTAGAAKSSPAAKPGSTPSRPSSAKRASSSGSASKSDKDLETQVIQLNEQVHSLKLALEGVEKERDFYFGKLREIELLCQEHGQENDDLVQRLMDILYASEEHEGHTEEPEAEEQAHEQQPPQQEEY

SEQ ID NO: 31206 - protein, 284 aa, Homo sapiens; identical to SEQ ID NO: 31205
  REGION 1..284: note = ENSP00000396074

SEQ ID NO: 31207 - protein, 94 aa, Homo sapiens
  REGION 1..94: note = ENSP00000435450
MGASSSSALARLGLPARPWPRWLGVAALGLAAVALGTVAWRRAWPRRRRRLQQVGTVAKLWIYPVKSCKGVPVSEAECTAMGLRSGNLRDRMCA

SEQ ID NO: 31208 - protein, 257 aa, Homo sapiens
  REGION 1..257: note = ENSP00000352266
MGASSSSALARLGLPARPWPRWLGVAALGLAAVALGTVAWRRAWPRRRRRLQQVGTVAKLWIYPVKSCKGVPVSEAECTAMGLRSGNLRDRFWLVIKEDGHMVTARQEPRLVLISIIYENNCLIFRAPDMDQLVLPSKQPSSNKLHNCRIFGLDIKGRDCGNEAAKWFTNFLKTEAYRLVQFETNMKGRTSRKLLPTLDQNFQVAYPDYCPLLIMTDASLVDLNTRMEKKMKMENFRPNIVVTGCDAFEEASATRRD

SEQ ID NO: 31209 - protein, 335 aa, Homo sapiens
  REGION 1..335: note = ENSP00000355880
MGASSSSALARLGLPARPWPRWLGVAALGLAAVALGTVAWRRAWPRRRRRLQQVGTVAKLWIYPVKSCKGVPVSEAECTAMGLRSGNLRDRFWLVIKEDGHMVTARQEPRLVLISIIYENNCLIFRAPDMDQLVLPSKQPSSNKLHNCRIFGLDIKGRDCGNEAAKWFTNFLKTEAYRLVQFETNMKGRTSRKLLPTLDQNFQVAYPDYCPLLIMTDASLVDLNTRMEKKMKMENFRPNIVVTGCDAFEEDTWDELLIGSVEVKKVMACPRCILTTVDPDTGVIDRKQPLDTLKSYRLCDPSERELYKLSPLFGIYYSVEKIGSLRVGDPVYRMV

SEQ ID NO: 31210 - protein, 172 aa, Homo sapiens
  REGION 1..172: note = ENSP00000416442
GHMVTARQEPRLVLISIIYENNCLIFRAPDMDQLVLPSKQPSSNKLHNCRIFGLDIKGRDCGNEAAKWFTNFLKTEAYRLVQFETNMKGRTSRKLLPTLDQNFQVAYPDYCPLLIMTDASLVDLNTRMEKKMKMENFRPNIVVTGCDAFEEDTWDELLIGSVEVKKVMACPR

SEQ ID NO: 31211 - protein, 289 aa, Homo sapiens
  REGION 1..289: note = ENSP00000427223
MLGWCEAIARNPHRIPNNTRTPEISGDLADASQTSTLNEKSPGRSASRSSNISKASSPTTGTAPRSQSRLSVCPSTQDICRICHCEGDEESPLITPCRCTGTLRFVHQSCLHQWIKSSDTRCCELCKYDFIMETKLKPLRKWEKLQMTTSERRKIFCSVTFHVIAITCVVWSLYVLIDRTAEEIKQGNDNGVLEWPFWTKLVVVAIGFTGGLVFMYVQCKVYVQLWRRLKAYNRVIFVQNCPDTAKKLEKNFSCNVNTDIKDAVVVPVPQTGANSLPSAEGGPPEVVSV

SEQ ID NO: 31212 - protein, 545 aa, Homo sapiens
  REGION 1..545: note = ENSP00000421322
MLGWCEAIARNPHRIPNNTRTPEISGDLADASQTSTLNEKSPGRSASRSSNISKASSPTTGTAPRSQSRLSVCPSTQDICRSAILHDMSEESFEYCTPVMVLSPARKESGKKSVIQRPRRRRKASERYEHAAEEQIRGRKNDFHLQISSPRWRELYTDSSDSSSTDESHWIQAKRRAQVKFRLSRRRRRNNNKPCENLAGSSTPNGIELVDLGSKGKEQQELIECESCSLNLHRGKHTRYQECNPSLTQGSSEIKRSSRNHEKSKGRYHHRDPQLLQSLRKNEIMKKTFSETDSSTEILGVPEGSKDMNDAGLQVNNPVQKPPATYDDGSDNLEVCRICHCEGDEESPLITPCRCTGTLRFVHQSCLHQWIKSSDTRCCELCKYDFIMETKLKPLRKWEKLQMTTSERRKIFCSVTFHVIAITCVVWSLYVLIDRTAEEIKQGNDNGVLEWPFWTKLVVVAIGFTGGLVFMYVQCKVYVQLWRRLKAYNRVIFVQNCPDTAKKLEKNFSCNVNTDIKDAVVVPVPQTGANSLPSAEGGPPEVVSV

SEQ ID NO: 31213 - protein, 272 aa, Homo sapiens
  REGION 1..272: note = ENSP00000345676
MTSSHVCCNFLNMWKKSKISTMYYLNQDAKLSNLFLQASSPTTGTAPRSQSRLSVCPSTQDICRICHCEGDEESPLITPCRCTGTLRFVHQSCLHQWIKSSDTRCCELCKYDFIMETKLKPLRKWEKLQMTTSERRKIFCSVTFHVIAITCVVWSLYVLIDRTAEEIKQGNDNGVLEWPFWTKLVVVAIGFTGGLVFMYVQCKVYVQLWRRLKAYNRVIFVQNCPDTAKKLEKNFSCNVNTDIKDAVVVPVPQTGANSLPSAEGGPPEVVSV

SEQ ID NO: 31214 - protein, 144 aa, Homo sapiens
  REGION 1..144: note = ENSP00000424089
MTSSHVCCNFLNMWKKSKISTMYYLNQDAKLSNLFLQASSPTTGTAPRSQSRLSVCPSTQDICRICHCEGDEESPLITPCRCTGTLRFVHQSCLHQWIKSSDTRCCELCKYDFIMETKLKPLRKCLCFCLVHEHCLLNGKAMIT

SEQ ID NO: 31215 - protein, 141 aa, Homo sapiens
  REGION 1..141: note = ENSP00000426731
MLGWCEAIARNPHRIPNNTRTPEISGDLADASQTSTLNEKSPGRSASRSSNISKASSPTTGTAPRSQSRLSVCPSTQDICRICHCEGDEESPLITPCRCTGTLRFVHQSCLHQWIKSSDTRCCELCKYDFIMETKLKPLRK

SEQ ID NO: 31216 - protein, 289 aa, Homo sapiens; identical to SEQ ID NO: 31211
  REGION 1..289: note = ENSP00000274056

SEQ ID NO: 31217 - protein, 402 aa, Homo sapiens
  REGION 1..402: note = ENSP00000333181
MSFEGGHGGSRCRGAESGDAEPPPQPPPPPPPTPPPGEPAPVPAAPRYLPPLPASPETPERAAGPSEPLGEVAPRCRGADELPPPPLPLQPAGQEVAAAGDSGEGPRRLPEAAAAKGGPGESEAGAGGERERRGAGDQPETRSVCSSRSSSSGGGDQRAGHQHQHHQPICKICFQGAEQGELLNPCRCDGSVRYTHQLCLLKWISERGSWTCELCCYRYHVIAIKMKQPCQWQSISITLVEKVQMIAVILGSLFLIASVTWLLWSAFSPYAVWQRKDILFQICYGMYGFMDLVCIGLIVHEGAAVYRVFKRWRAVNLHWDVLNYDKATDIEESSRGESSTSRTLWLPLTALRNRNLVHPTQLTSPRFQCGYVLLHLFNRMRPHEDLSEDNSSGEVVMRVTSV

SEQ ID NO: 31218 - protein, 54 aa, Homo sapiens
  REGION 1..54: note = ENSP00000424425
  VARIANT 1: note = Any amino acid
XLCLLKWISERGSWTCELCCYRYHVIAIKMKQPCQVSLFMKELQFTECLSAGEL

SEQ ID NO: 31219 - protein, 332 aa, Homo sapiens
  REGION 1..332: note = ENSP00000478061
MGAQFSKTAAKGEAAAERPGEAAVASSPSKANGQENGHVKVNGDASPAAAESGAKEELQANGSAPAADKEEPAAAGSGAASPSAAEKGEPAAAAAPEAGASPVEKEAPAEGEAAEPGSPTAAEGEAASAASSTSSPKAEDGATPSPSNETPKKKKKRFSFKKSFKLSGFSFKKNKKEAGEGGEAEAPAAEGGKDEAAGGAAAAAAEAGAASGEQAAAPGEEAAAGEEGAAGGDPQEAKPQEAAVAPEKPPASDETKAAEEPSKVEEKKAEEAGASAAACEAPSAAGPGAPPEQEAAPAEEPAAAAASSACAAPSQEAQPECSPEAPPAEAAE

SEQ ID NO: 31220 - protein, 195 aa, Homo sapiens
  REGION 1..195: note = ENSP00000362638
MGSQSSKAPRGDVTAEEAAGASPAKANGQENGHVKSNGDLSPKGEGESPPVNGTDEAAGATGDAIEPAPPSQGAEAKGEVPPKETPKKKKKFSFKKPFKLSGLSFKRNRKEGGGDSSASSPTEEEQEQGEIGACSDEGTAQEGKAAATPESQEPQAKGAEASAASEEEAGPQATEPSTPSGPESGPTPASAEQNE

SEQ ID NO: 31221 - protein, 558 aa, Homo sapiens
  REGION 1..558: note = ENSP00000480068
MSNDGRSRNRDRRYDEVPSDLPYQDTTIRTHPILHDSERAVSADPLPPPPLPLQPPFGPDFYSSDTEEPAIAPDLKPVRRFVPDSWKNFFRGKKKDPEWDKPVSDIRYISDGVECSPPASPARPNHRSPLNSCKDPYGGSEGTFSSRKEADAVFPRDPYGSLDRHTQTVRTYSEKVEEYNLRYSYMKSWAGLLRILGVVELLLGAGVFACVTAYIHKDSEWYNLFGYSQPYGMGGVGGLGSMYGGYYYTGPKTPFVLVVAGLAWITTIIILVLGMSMYYRTILLDSNWWPLTEFGINVALFILYMAAAIVYVNDTNRGGLCYYPLFNTPVNAVFCRVEGGQIAAMIFLFVTMIVYLISALVCLKLWRHEAARRHREYMEQQEINEPSLSSKRKMCEMATSGDRQRDSEVNFKELRTAKMKPELLSGHIPPGHIPKPIVMPDYVAKYPVIQTDDERERYKAVFQDQFSEYKELSAEVQAVLRKFDELDAVMSRLPHHSESRQEHERISRIHEEFKKKKNDPTFLEKKERCDYLKNKLSHIKQRIQEYDKVMNWDVQGYS

SEQ ID NO: 31222 - protein, 546 aa, Homo sapiens
  REGION 1..546: note = ENSP00000480044
MSNDGRSRNRDRRYDEVPSDLPYQDTTIRTHPILHDSERAVSADPLPPPPLPLQPPFGPDFYSSDTEEPAIAPDLKPVRRFVPDSWKNFFRGKKKDPEWDKPVSDIRYISDGVECSPPASPARPNHRSPLNSCKDPYGGSEGTFSSRKEADAVFPRDPYGSLDRHTQTVRTYSEKVEEYNLRYSYMKSWAGLLRILGVVELLLGAGVFACVTAYIHKDSEWYNLFGYSQPYGMGGVGGLGSMYGGYYYTGPKTPFVLVVAGLAWITTIIILVLGMSMYYRTILLDSNWWPLTEFGINVALFILYMAAAIVYVNDTNRGGLCYYPLFNTPVNAVFCRVEGGQIAAMIFLFVTMIVYLISALVCLKLWRHEAARRHREYMEQQECEMATSGDRQRDSEVNFKELRTAKMKPELLSGHIPPGHIPKPIVMPDYVAKYPVIQTDDERERYKAVFQDQFSEYKELSAEVQAVLRKFDELDAVMSRLPHHSESRQEHERISRIHEEFKKKKNDPTFLEKKERCDYLKNKLSHIKQRIQEYDKVMNWDVQGYS

SEQ ID NO: 31223 - protein, 145 aa, Homo sapiens
  REGION 1..145: note = ENSP00000480310
MSNDGRSRNRDRRYDEVPSDLPYQDTTIRTHPILHDSERAVSADPLPPPPLPLQPPFGPDFYSSDTEEPAIAPDLKPVRRFVPDSWKNFFRGKKKDPEWDKPVSDIRYISDGVECSPPASPARPNHRSPLNSCKDPYGGSEGTFS

SEQ ID NO: 31224 - protein, 516 aa, Homo sapiens
  REGION 1..516: note = ENSP00000480479
MSNDGRSRNRDRRYDEVPSDLPYQDTTIRTHPILHDSERAVSADPLPPPPLPLQPPFGPDFYSSDTEEPAIAPDLKPVRRFVPDSWKNFFRGKKKDPEWDKPVSDIRYISDGVECSPPASPARPNHRSPLNSCKDPYGGSEGTFSSRKEADAVFPRDPYGSLDRHTQTVRTYSEKVEEYNLRYSYMKSWAGLLRILGVVELLLGAGVFACVTAYIHKDSEWYNLFGYSQPYGMGGVGGLGSMYGGYYYTGPKTPFVLVVAGLAWITTIIILVLGMSMYYRTILLDSNWWPLTEFGINVALFILYMAAAIVYVNDTNRGGLCYYPLFNTPVNAVFCRVEGGQIAAMIFLFVTMIVYLISALVCLKLWRHEAARRHREYMEQQEINEPSLSSKRKMCEMATSGDRQRDSEVNFKELRTAKMKPELLSGHIPPGHIPKPIVMPDYVAKYPVIQTDDERERYKAVFQDQFSEYKELSAEVQAVLRKFDELDAVMSRLPHHSESRQEHERISRIHEEFKKK

SEQ ID NO: 31225 - protein, 442 aa, Homo sapiens
  REGION 1..442: note = ENSP00000477520
MSNDGRSRNRDRRYDEVPSDLPYQDTTIRTHPILHDSERAVSADPLPPPPLPLQPPFGPDFYSSDTEEPAIAPDLKPVRRFVPDSWKNFFRGKKKDPEWDKPVSDIRYISDGVECSPPASPARPNHRSPLNSCKDPYGGSEGTFSSRKEADAVFPRDPYGSLDRHTQTVRTYSEKVEEYNLRYSYMKSWAGLLRILGVVELLLGAGVFACVTAYIHKDSEWYNLFGYSQPYGMGGVGGLGSIALVCLKLWRHEAARRHREYMEQQEINEPSLSSKRKMCEMATSGDRQRDSEVNFKELRTAKMKPELLSGHIPPGHIPKPIVMPDYVAKYPVIQTDDERERYKAVFQDQFSEYKELSAEVQAVLRKFDELDAVMSRLPHHSESRQEHERISRIHEEFKKKKNDPTFLEKKERCDYLKNKLSHIKQRIQEYDKVMNWDVQGYS

SEQ ID NO: 31226 - protein, 442 aa, Homo sapiens; identical to SEQ ID NO: 31225
  REGION 1..442: note = ENSP00000484889

SEQ ID NO: 31227 - protein, 558 aa, Homo sapiens
  REGION 1..558: note = ENSP00000323264
MSNDGRSRNRDRRYDEVPSDLPYQDTTIRTHPTLHDSERAVSADPLPPPPLPLQPPFGPDFYSSDTEEPAIAPDLKPVRRFVPDSWKNFFRGKKKDPEWDKPVSDIRYISDGVECSPPASPARPNHRSPLNSCKDPYGGSEGTFSSRKEADAVFPRDPYGSLDRHTQTVRTYSEKVEEYNLRYSYMKSWAGLLRILGVVELLLGAGVFACVTAYIHKDSEWYNLFGYSQPYGMGGVGGLGSMYGGYYYTGPKTPFVLVVAGLAWITTIIILVLGMSMYYRTILLDSNWWPLTEFGINVALFILYMAAAIVYVNDTNRGGLCYYPLFNTPVNAVFCRVEGGQIAAMIFLFVTMIVYLISALVCLKLWRHEAARRHREYMEQQEINEPSLSSKRKMCEMATSGDRQRDSEVNFKELRTAKMKPELLSGHIPPGHIPKPIVMPDYVAKYPVIQTDDERERYKAVFQDQFSEYKELSAEVQAVLRKFDELDAVMSRLPHHSESRQEHERISRIHEEFKKKKNDPTFLEKKERCDYLKNKLSHIKQRIQEYDKVMNWDVQGYS

SEQ ID NO: 31228 - protein, 546 aa, Homo sapiens
  REGION 1..546: note = ENSP00000396244
MSNDGRSRNRDRRYDEVPSDLPYQDTTIRTHPTLHDSERAVSADPLPPPPLPLQPPFGPDFYSSDTEEPAIAPDLKPVRRFVPDSWKNFFRGKKKDPEWDKPVSDIRYISDGVECSPPASPARPNHRSPLNSCKDPYGGSEGTFSSRKEADAVFPRDPYGSLDRHTQTVRTYSEKVEEYNLRYSYMKSWAGLLRILGVVELLLGAGVFACVTAYIHKDSEWYNLFGYSQPYGMGGVGGLGSMYGGYYYTGPKTPFVLVVAGLAWITTIIILVLGMSMYYRTILLDSNWWPLTEFGINVALFILYMAAAIVYVNDTNRGGLCYYPLFNTPVNAVFCRVEGGQIAAMIFLFVTMIVYLISALVCLKLWRHEAARRHREYMEQQECEMATSGDRQRDSEVNFKELRTAKMKPELLSGHIPPGHIPKPIVMPDYVAKYPVIQTDDERERYKAVFQDQFSEYKELSAEVQAVLRKFDELDAVMSRLPHHSESRQEHERISRIHEEFKKKKNDPTFLEKKERCDYLKNKLSHIKQRIQEYDKVMNWDVQGYS

SEQ ID NO: 31229 - protein, 145 aa, Homo sapiens
  REGION 1..145: note = ENSP00000421902
MSNDGRSRNRDRRYDEVPSDLPYQDTTIRTHPTLHDSERAVSADPLPPPPLPLQPPFGPDFYSSDTEEPAIAPDLKPVRRFVPDSWKNFFRGKKKDPEWDKPVSDIRYISDGVECSPPASPARPNHRSPLNSCKDPYGGSEGTFS

SEQ ID NO: 31230 - protein, 516 aa, Homo sapiens
  REGION 1..516: note = ENSP00000423490
MSNDGRSRNRDRRYDEVPSDLPYQDTTIRTHPTLHDSERAVSADPLPPPPLPLQPPFGPDFYSSDTEEPAIAPDLKPVRRFVPDSWKNFFRGKKKDPEWDKPVSDIRYISDGVECSPPASPARPNHRSPLNSCKDPYGGSEGTFSSRKEADAVFPRDPYGSLDRHTQTVRTYSEKVEEYNLRYSYMKSWAGLLRILGVVELLLGAGVFACVTAYIHKDSEWYNLFGYSQPYGMGGVGGLGSMYGGYYYTGPKTPFVLVVAGLAWITTIIILVLGMSMYYRTILLDSNWWPLTEFGINVALFILYMAAAIVYVNDTNRGGLCYYPLFNTPVNAVFCRVEGGQIAAMIFLFVTMIVYLISALVCLKLWRHEAARRHREYMEQQEINEPSLSSKRKMCEMATSGDRQRDSEVNFKELRTAKMKPELLSGHIPPGHIPKPIVMPDYVAKYPVIQTDDERERYKAVFQDQFSEYKELSAEVQAVLRKFDELDAVMSRLPHHSESRQEHERISRIHEEFKKK

SEQ ID NO: 31231 - protein, 442 aa, Homo sapiens
  REGION 1..442: note = ENSP00000414776
MSNDGRSRNRDRRYDEVPSDLPYQDTTIRTHPTLHDSERAVSADPLPPPPLPLQPPFGPDFYSSDTEEPAIAPDLKPVRRFVPDSWKNFFRGKKKDPEWDKPVSDIRYISDGVECSPPASPARPNHRSPLNSCKDPYGGSEGTFSSRKEADAVFPRDPYGSLDRHTQTVRTYSEKVEEYNLRYSYMKSWAGLLRILGVVELLLGAGVFACVTAYIHKDSEWYNLFGYSQPYGMGGVGGLGSIALVCLKLWRHEAARRHREYMEQQEINEPSLSSKRKMCEMATSGDRQRDSEVNFKELRTAKMKPELLSGHIPPGHIPKPIVMPDYVAKYPVIQTDDERERYKAVFQDQFSEYKELSAEVQAVLRKFDELDAVMSRLPHHSESRQEHERISRIHEEFKKKKNDPTFLEKKERCDYLKNKLSHIKQRIQEYDKVMNWDVQGYS

SEQ ID NO: 31232 - protein, 442 aa, Homo sapiens; identical to SEQ ID NO: 31231
  REGION 1..442: note = ENSP00000398922

SEQ ID NO: 31233 - protein, 699 aa, Homo sapiens
  REGION 1..699: note = ENSP00000336792
MRWLLLYYALCFSLSKASAHTVELNNMFGQIQSPGYPDSYPSDSEVTWNITVPDGFRIKLYFMHFNLESSYLCEYDYVKVETEDQVLATFCGRETTDTEQTPGQEVVLSPGSFMSITFRSDFSNEERFTGFDAHYMAVDVDECKEREDEELSCDHYCHNYIGGYYCSCRFGYILHTDNRTCRVECSDNLFTQRTGVITSPDFPNPYPKSSECLYTIELEEGFMVNLQFEDIFDIEDHPEVPCPYDYIKIKVGPKVLGPFCGEKAPEPISTQSHSVLILFHSDNSGENRGWRLSYRAAGNECPELQPPVHGKIEPSQAKYFFKDQVLVSCDTGYKVLKDNVEMDTFQIECLKDGTWSNKIPTCKIVDCRAPGELEHGLITFSTRNNLTTYKSEIKYSCQEPYYKMLNNNTGIYTCSAQGVWMNKVLGRSLPTCLPVCGLPKFSRKLMARIFNGRPAQKGTTPWIAMLSHLNGQPFCGGSLLGSSWIVTAAHCLHQSLDPEDPTLRDSDLLSPSDFKIILGKHWRLRSDENEQHLGVKHTTLHPQYDPNTFENDVALVELLESPVLNAFVMPICLPEGPQQEGAMVIVSGWGKQFLQRFPETLMEIEIPIVDHSTCQKAYAPLKKKVTRDMICAGEKEGGKDACAGDSGGPMVTLNRERGQWYLVGTVSWGDDCGKKDRYGVYSYIHHNKDWIQRVTGVRN

SEQ ID NO: 31234 - protein, 728 aa, Homo sapiens
  REGION 1..728: note = ENSP00000296280
MRWLLLYYALCFSLSKASAHTVELNNMFGQIQSPGYPDSYPSDSEVTWNITVPDGFRIKLYFMHFNLESSYLCEYDYVKVETEDQVLATFCGRETTDTEQTPGQEVVLSPGSFMSITFRSDFSNEERFTGFDAHYMAVDVDECKEREDEELSCDHYCHNYIGGYYCSCRFGYILHTDNRTCRVECSDNLFTQRTGVITSPDFPNPYPKSSECLYTIELEEGFMVNLQFEDIFDIEDHPEVPCPYDYIKIKVGPKVLGPFCGEKAPEPISTQSHSVLILFHSDNSGENRGWRLSYRAAGNECPELQPPVHGKIEPSQAKYFFKDQVLVSCDTGYKVLKDNVEMDTFQIECLKDGTWSNKIPTCKIVDCRAPGELEHGLITFSTRNNLTTYKSEIKYSCQEPYYKMLNNNTGIYTCSAQGVWMNKVLGRSLPTCLPECGQPSRSLPSLVKRIIGGRNAEPGLFPWQALIVVEDTSRVPNDKWFGSGALLSASWILTAAHVLRSQRRDTTVIPVSKEHVTVYLGLHDVRDKSGAVNSSAARVVLHPDFNIQNYNHDIALVQLQEPVPLGPHVMPVCLPRLEPEGPAPHMLGLVAGWGISNPNVTVDEIISSGTRTLSDVLQYVKLPVVPHAECKTSYESRSGNYSVTENMFCAGYYEGGKDTCLGDSGGAFVIFDDLSQRWVVQGLVSWGGPEECGSKQVYGVYTKVSNYVDWVWEQMGLPQSVVEPQVER

SEQ ID NO: 31235 - protein, 615 aa, Homo sapiens
  REGION 1..615: note = ENSP00000376264
MSITFRSDFSNEERFTGFDAHYMAVDVDECKEREDEELSCDHYCHNYIGGYYCSCRFGYILHTDNRTCRVECSDNLFTQRTGVITSPDFPNPYPKSSECLYTIELEEGFMVNLQFEDIFDIEDHPEVPCPYDYIKIKVGPKVLGPFCGEKAPEPISTQSHSVLILFHSDNSGENRGWRLSYRAAGNECPELQPPVHGKIEPSQAKYFFKDQVLVSCDTGYKVLKDNVEMDTFQIECLKDGTWSNKIPTCKIVDCRAPGELEHGLITFSTRNNLTTYKSEIKYSCQEPYYKMLNNNTGIYTCSAQGVWMNKVLGRSLPTCLPECGQPSRSLPSLVKRIIGGRNAEPGLFPWQALIVVEDTSRVPNDKWFGSGALLSASWILTAAHVLRSQRRDTTVIPVSKEHVTVYLGLHDVRDKSGAVNSSAARVVLHPDFNIQNYNHDIALVQLQEPVPLGPHVMPVCLPRLEPEGPAPHMLGLVAGWGISNPNVTVDEIISSGTRTLSDVLQYVKLPVVPHAECKTSYESRSGNYSVTENMFCAGYYEGGKDTCLGDSGGAFVIFDDLSQRWVVQGLVSWGGPEECGSKQVYGVYTKVSNYVDWVWEQMGLPQSVVEPQVER

SEQ ID NO: 31236 - protein, 380 aa, Homo sapiens
  REGION 1..380: note = ENSP00000169293
MRWLLLYYALCFSLSKASAHTVELNNMFGQIQSPGYPDSYPSDSEVTWNITVPDGFRIKLYFMHFNLESSYLCEYDYVKVETEDQVLATFCGRETTDTEQTPGQEVVLSPGSFMSITFRSDFSNEERFTGFDAHYMAVDVDECKEREDEELSCDHYCHNYIGGYYCSCRFGYILHTDNRTCRVECSDNLFTQRTGVITSPDFPNPYPKSSECLYTIELEEGFMVNLQFEDIFDIEDHPEVPCPYDYIKIKVGPKVLGPFCGEKAPEPISTQSHSVLILFHSDNSGENRGWRLSYRAAGNECPELQPPVHGKIEPSQAKYFFKDQVLVSCDTGYKVLKDNVEMDTFQIECLKDGTWSNKIPTCKKNEIDLESELKSEQVTE

SEQ ID NO: 31237 - protein, 354 aa, Homo sapiens
  REGION 1..354: note = ENSP00000376262
MFGQIQSPGYPDSYPSDSEVTWNITVPDGFRIKLYFMHFNLESSYLCEYDYVKVETEDQVLATFCGRETTDTEQTPGQEVVLSPGSFMSITFRSDFSNEERFTGFDAHYMAVDVDECKEREDEELSCDHYCHNYIGGYYCSCRFGYILHTDNRTCRVECSDNLFTQRTGVITSPDFPNPYPKSSECLYTIELEEGFMVNLQFEDIFDIEDHPEVPCPYDYIKIKVGPKVLGPFCGEKAPEPISTQSHSVLILFHSDNSGENRGWRLSYRAAGNECPELQPPVHGKIEPSQAKYFFKDQVLVSCDTGYKVLKDNVEMDTFQIECLKDGTWSNKIPTCKKNEIDLESELKSEQVTE

SEQ ID NO: 31238 - protein, 204 aa, Homo sapiens
  REGION 1..204: note = ENSP00000376267
MRPTFMSFRWLLLYYALCFSLSKASAHTVELNNMFGQIQSPGYPDSYPSDSEVTWNITVPDGFRIKLYFMHFNLESSYLCEYDYVKVETEDQVLATFCGRETTDTEQTPGQEVVLSPGSFMSITFRSDFSNEERFTGFDAHYMAVDVDECKEREDEELSCDHYCHNYIGGYYCSCRFGYILHTDNRTCRVECSDNLFTQRTGVI

SEQ ID NO: 31239 - protein, 118 aa, Homo sapiens
  REGION 1..118: note = ENSP00000412021
MPANSRDTQGPQNKDKASRTPHRARAHRWLLLYYALCFSLSKASAHTVELNNMFGQIQSPGYPDSYPSDSEVTWNITVPDGFRIKLYFMHFNLESSYLCEYDYVKVETEDQVLATFCG

SEQ ID NO: 31240 - protein, 55 aa, Homo sapiens
  REGION 1..55: note = ENSP00000409047
MFGQIQSPGYPDSYPSDSEVTWNITVPDGFRIKLYFMHFNLESSYLCEYDYVKVE

SEQ ID NO: 31241 - protein, 496 aa, Homo sapiens
  REGION 1..496: note = ENSP00000362870
MRVLSGTSLMLCSLLLLLQALCSPGLAPQSRGHLCRTRPTDLVFVVDSSRSVRPVEFEKVKVFLSQVIESLDVGPNATRVGMVNYASTVKQEFSLRAHVSKAALLQAVRRIQPLSTGTMTGLAIQFAITKAFGDAEGGRSRSPDISKVVIVVTDGRPQDSVQDVSARARASGVELFAIGVGSVDKATLRQIASEPQDEHVDYVESYSVIEKLSRKFQEAFCVVSDLCATGDHDCEQVCISSPGSYTCACHEGFTLNSDGKTCNVCSGGGGSSATDLVFLIDGSKSVRPENFELVKKFISQIVDTLDVSDKLAQVGLVQYSSSVRQEFPLGRFHTKKDIKAAVRNMSYMEKGTMTGAALKYLIDNSFTVSSGARPGAQKVGIVFTDGRSQDYINDAAKKAKDLGFKMFAVGVGNAVEDELREIASEPVAEHYFYTADFKTINQIGKKLQKKICVEEDPCACESLVKFQAKVEGLLQALTRKLEAVSKRLAILENTVV

SEQ ID NO: 31242 - protein, 581 aa, Homo sapiens
  REGION 1..581: note = ENSP00000361842
MRGLLCWPVLLLLLQPWETQLQLTGPRCHTGPLDLVFVIDSSRSVRPFEFETMRQFLMGLLRGLNVGPNATRVGVIQYSSQVQSVFPLRAFSRREDMERAIRDLVPLAQGTMTGLAIQYAMNVAFSVAEGARPPEERVPRVAVIVTDGRPQDRVAEVAAQARARGIEIYAVGVQRADVGSLRAMASPPLDEHVFLVESFDLIQEFGLQFQSRLCAIDLCAEGTHGCEHHCVNSPGSYFCHCQVGFVLQQDQRSCRAIDYCSFGNHSCQHECVSTPGGPRCHCREGHDLQPDGRSCQVRDLCNGVDHGCEFQCVSEGLSYRCLCPEGRQLQADGKSCNRCREGHVDLVLLVDGSKSVRPQNFELVKRFVNQIVDFLDVSPEGTRVGLVQFSSRVRTEFPLGRYGTAAEVKQAVLAVEYMERGTMTGLALRHMVEHSFSEAQGARPRALNVPRVGLVFTDGRSQDDISVWAARAKEEGIVMYAVGVGKAVEAELREIASEPAELHVSYAPDFGTMTHLLENLRGSICPEEGISAGTELRSPCECESLVEFQGRTLGALESLTLNLAQLTARLEDLENQLANQK

SEQ ID NO: 31243 - protein, 622 aa, Homo sapiens
  REGION 1..622: note = ENSP00000361840
MRGLLCWPVLLLLLQPWETQLQLTGPRCHTGPLDLVFVIDSSRSVRPFEFETMRQFLMGLLRGLNVGPNATRVGVIQYSSQVQSVFPLRAFSRREDMERAIRDLVPLAQGTMTGLAIQYAMNVAFSVAEGARPPEERVPRVAVIVTDGRPQDRVAEVAAQARARGIEIYAVGVQRADVGSLRAMASPPLDEHVFLVESFDLIQEFGLQFQSRLCGKDQCAEGGHGCQHQCVNAWAMFHCTCNPGYKLAADNKSCLAIDLCAEGTHGCEHHCVNSPGSYFCHCQVGFVLQQDQRSCRAIDYCSFGNHSCQHECVSTPGGPRCHCREGHDLQPDGRSCQVRDLCNGVDHGCEFQCVSEGLSYRCLCPEGRQLQADGKSCNRCREGHVDLVLLVDGSKSVRPQNFELVKRFVNQIVDFLDVSPEGTRVGLVQFSSRVRTEFPLGRYGTAAEVKQAVLAVEYMERGTMTGLALRHMVEHSFSEAQGARPRALNVPRVGLVFTDGRSQDDISVWAARAKEEGIVMYAVGVGKAVEAELREIASEPAELHVSYAPDFGTMTHLLENLRGSICPEEGISAGTELRSPCECESLVEFQGRTLGALESLTLNLAQLTARLEDLENQLANQK

SEQ ID NO: 31244 - protein, 540 aa, Homo sapiens
  REGION 1..540: note = ENSP00000353819
MRGLLCWPVLLLLLQPWETQLQLTGPRCHTGPLDLVFVIDSSRSVRPFEFETMRQFLMGLLRGLNVGPNATRVGVIQYSSQVQSVFPLRAFSRREDMERAIRDLVPLAQGTMTGLAIQYAMNVAFSVAEGARPPEERVPRVAVIVTDGRPQDRVAEVAAQARARGIEIYAVGVQRADVGSLRAMASPPLDEHVFLVESFDLIQEFGLQFQSRLCAIDYCSFGNHSCQHECVSTPGGPRCHCREGHDLQPDGRSCQVRDLCNGVDHGCEFQCVSEGLSYRCLCPEGRQLQADGKSCNRCREGHVDLVLLVDGSKSVRPQNFELVKRFVNQIVDFLDVSPEGTRVGLVQFSSRVRTEFPLGRYGTAAEVKQAVLAVEYMERGTMTGLALRHMVEHSFSEAQGARPRALNVPRVGLVFTDGRSQDDISVWAARAKEEGIVMYAVGVGKAVEAELREIASEPAELHVSYAPDFGTMTHLLENLRGSICPEEGISAGTELRSPCECESLVEFQGRTLGALESLTLNLAQLTARLEDLENQLANQK

SEQ ID NO: 31245 - protein, 499 aa, Homo sapiens
  REGION 1..499: note = ENSP00000243983
MRGLLCWPVLLLLLQPWETQLQLTGPRCHTGPLDLVFVIDSSRSVRPFEFETMRQFLMGLLRGLNVGPNATRVGVIQYSSQVQSVFPLRAFSRREDMERAIRDLVPLAQGTMTGLAIQYAMNVAFSVAEGARPPEERVPRVAVIVTDGRPQDRVAEVAAQARARGIEIYAVGVQRADVGSLRAMASPPLDEHVFLVESFDLIQEFGLQFQSRLCVRDLCNGVDHGCEFQCVSEGLSYRCLCPEGRQLQADGKSCNRCREGHVDLVLLVDGSKSVRPQNFELVKRFVNQIVDFLDVSPEGTRVGLVQFSSRVRTEFPLGRYGTAAEVKQAVLAVEYMERGTMTGLALRHMVEHSFSEAQGARPRALNVPRVGLVFTDGRSQDDISVWAARAKEEGIVMYAVGVGKAVEAELREIASEPAELHVSYAPDFGTMTHLLENLRGSICPEEGISAGTELRSPCECESLVEFQGRTLGALESLTLNLAQLTARLEDLENQLANQK

SEQ ID NO: 31246 - protein, 581 aa, Homo sapiens; identical to SEQ ID NO: 31242
  REGION 1..581: note = ENSP00000440328

SEQ ID NO: 31247 - protein, 495 aa, Homo sapiens
  REGION 1..495: note = ENSP00000324944
MAAEPQPSSLSYRTTGSTYLHPLSELLGIPLDQVNFVVCQLVALFAAFWFRIYLRPGTTSSDVRHAVATIFGIYFVIFCFGWYSVHLFVLVLMCYAIMVTASVSNIHRYSFFVAMGYLTICHISRIYIFHYGILTTDFSGPLMIVTQKITTLAFQVHDGLGRRAEDLSAEQHRLAIKVKPSFLEYLSYLLNFMSVIAGPCNNFKDYIAFIEGKHIHMKLLEVNWKRKGFHSLPEPSPTGAVIHKLGITLVSLLLFLTLTKTFPVTCLVDDWFVHKASFPARLCYLYVVMQASKPKYYFAWTLADAVNNAAGFGFSGVDKNGNFCWDLLSNLNIWKIETATSFKMYLENWNIQTATWLKCVCYQRVPWYPTVLTFILSALWHGVYPGYYFTFLTGILVTLAARAVRNNYRHYFLSSRALKAVYDAGTWAVTQLAVSYTVAPFVMLAVEPTISLYKSMYFYLHIISLLIILFLPMKPQAHTQRRPQTLNSINKRKTD

SEQ ID NO: 31248 - protein, 520 aa, Homo sapiens
  REGION 1..520: note = ENSP00000302177
MATTSTTGSTLLQPLSNAVQLPIDQVNFVVCQLFALLAAIWFRTYLHSSKTSSFIRHVVATLLGLYLALFCFGWYALHFLVQSGISYCIMIIIGVENMHNYCFVFALGYLTVCQVTRVYIFDYGQYSADFSGPMMIITQKITSLACEIHDGMFRKDEELTSSQRDLAVRRMPSLLEYLSYNCNFMGILAGPLCSYKDYITFIEGRSYHITQSGENGKEETQYERTEPSPNTAVVQKLLVCGLSLLFHLTICTTLPVEYNIDEHFQATASWPTKIIYLYISLLAARPKYYFAWTLADAINNAAGFGFRGYDENGAARWDLISNLRIQQIEMSTSFKMFLDNWNIQTALWLKRVCYERTSFSPTIQTFILSAIWHGVYPGYYLTFLTGVLMTLAARAMRNNFRHYFIEPSQLKLFYDVITWIVTQVAISYTVVPFVLLSIKPSLTFYSSWYYCLHILGILVLLLLPVKKTQRRKNTHENIQLSQSKKFDEGENSLGQNSFSTTNNVCNQNQEIASRHSSLKQ

SEQ ID NO: 31249 - protein, 158 aa, Homo sapiens
  REGION 1..158: note = ENSP00000419573
KDYITFIEGRSYHITQSGENGKEETQYERTEPSPNTAVVQKLLVCGLSLLFHLTICTTLPVEYNIDEHFQATASWPTKIIYLYISLLAARPKYYFAWTLADAINNAAGFGFRGYDENGAARWDLISNLRIQQIEMSTSFKMFLDNWNIQTALWLKRIF

SEQ ID NO: 31250 - protein, 46 aa, Homo sapiens
  REGION 1..46: note = ENSP00000420114
MATTSTTGSTLLQPLSNAVQLPIDQLLLCVCSGIPHSVPSYSSLYL

SEQ ID NO: 31251 - protein, 176 aa, Homo sapiens
  REGION 1..176: note = ENSP00000417409
MATTSTTGSTLLQPLSNAVQLPIDQAARHMIPGCLSPSVCLTYLAESTGEKYALHFLVQSGISYCIMIIIGVENMHNYCFVFALGYLTVCQVTRVYIFDYGQYSADFSGPMMIITQKITSLACEIHDGMFRKDEELTSSQRDLAVRRMPSLLEYLSYNCNFMGILAGPLCSYKDYI

SEQ ID NO: 31252 - protein, 472 aa, Homo sapiens
  REGION 1..472: note = ENSP00000482625
MSPEEWTYLVVLLISIPIGFLFKKAGPGLKRWGAAAVGLGLTLFTCGPHTLHSLVTILGTWALIQAQPCSCHALALAWTFSYLLFFRALSLLGLPTPTPFTNAVQLLLTLKLVSLASEVQDLHLAQRKEMASGFSKGPTLGLLPDVPSLMETLSYSYCYVGIMTGPFFRYRTYLDWLEQPFPGAVPSLRPLLRRAWPAPLFGLLFLLSSHLFPLEAVREDAFYARPLPARLFYMIPVFFAFRMRFYVAWIAAECGCIAAGFGAYPVAAKARAGGGPTLQCPPPSSPEKAASLEYDYETIRNIDCYSTDFCVRVRDGMRYWNMTVQWWLAQYIYKSAPARSYVLRSAWTMLLSAYWHGLHPGYYLSFLTIPLCLAAEGRLESALRGRLSPGGQKAWDWVHWFLKMRAYDYMCMGFVLLSLADTLRYWASIYFCIHFLALAALGLGLALGGGSPSRRKAASQPTSLAPEKLREE

SEQ ID NO: 31253 - protein, 399 aa, Homo sapiens
  REGION 1..399: note = ENSP00000477891
MGSSRCGPGAHPVHLWPPHFAFSGHHPRDLGPHSGPALLVSLASEVQDLHLAQRKEMASGFSKGPTLGLLPDVPSLMETLSYSYCYVGIMTGPFFRYRTYLDWLEQPFPGAVPSLRPLLRRAWPAPLFGLLFLLSSHLFPLEAVREDAFYARPLPARLFYMIPVFFAFRMRFYVAWIAAECGCIAAGFGAYPVAAKARAGGGPTLQCPPPSSPEKAASLEYDYETIRNIDCYSTDFCVRVRDGMRYWNMTVQWWLAQYIYKSAPARSYVLRSAWTMLLSAYWHGLHPGYYLSFLTIPLCLAAEGRLESALRGRLSPGGQKAWDWVHWFLKMRAYDYMCMGFVLLSLADTLRYWASIYFCIHFLALAALGLGLALGGGSPSRRKAASQPTSLAPEKLREE

SEQ ID NO: 31254 - protein, 399 aa, Homo sapiens; identical to SEQ ID NO: 31253
  REGION 1..399: note = ENSP00000482884

SEQ ID NO: 31255 - protein, 472 aa, Homo sapiens; identical to SEQ ID NO: 31252
  REGION 1..472: note = ENSP00000478088

SEQ ID NO: 31256 - protein, 399 aa, Homo sapiens; identical to SEQ ID NO: 31253
  REGION 1..399: note = ENSP00000482369

SEQ ID NO: 31257 - protein, 399 aa, Homo sapiens; identical to SEQ ID NO: 31253
  REGION 1..399: note = ENSP00000482742

SEQ ID NO: 31258 - protein, 472 aa, Homo sapiens; identical to SEQ ID NO: 31252
  REGION 1..472: note = ENSP00000478041

SEQ ID NO: 31259 - protein, 399 aa, Homo sapiens; identical to SEQ ID NO: 31253
  REGION 1..399: note = ENSP00000481758

SEQ ID NO: 31260 - protein, 399 aa, Homo sapiens; identical to SEQ ID NO: 31253
  REGION 1..399: note = ENSP00000483526

SEQ ID NO: 31261 - protein, 472 aa, Homo sapiens; identical to SEQ ID NO: 31252
  REGION 1..472: note = ENSP00000484199

SEQ ID NO: 31262 - protein, 344 aa, Homo sapiens
  REGION 1..344: note = ENSP00000481119
MSPEEWTYLVVLLISIPIGFLFKKAGPGLKRWGAAAVGLGLTLFTCGPHTLHSLVTILGTWALIQAQPCSCHALALAWTFSYLLFFRALSLLGLPTPTPFTNAVQLLLTLKLVSLASEVQDLHLAQRKEMASGFSKGPTLGLLPDVPSLMETLSYSYCYVGIMTGPFFRYRTYLDWLEQPFPGAVPSLRPLLRRAWPAPLFGLLFLLSSHLFPLEAVREDAFYARPLPARLFYMIPVFFAFRMRFYVAWIAAECGCIAAGFGAYPVAAKARAGGGPTLQCPPPSSPEKAASLEYDYETIRNIDCYSTDFCVRVRDGMRYWNMTVQWWLAQYIYKSAPARSYVLR

SEQ ID NO: 31263 - protein, 172 aa, Homo sapiens
  REGION 1..172: note = ENSP00000484102
MSPEEWTYLVVLLISIPIGFLFKKAGPGLKRWGAAAVGLGLTLFTCGPHTLHSLVTILGTWALIQAQPCSCHALALAWTFSYLLFFRALSLLGLPTPTPFTNAVQLLLTLKLVSLASEVQDLHLAQRKEMASGFSKGPTLGLLPDVPSLMETLSYSYCYVGIMTGPFFRYRT

SEQ ID NO: 31264 - protein, 256 aa, Homo sapiens
  REGION 1..256: note = ENSP00000477618
MSPEEWTYLVVLLISIPIGFLFKKAGPGLKRWGAAAVGLGLTLFTCGPHTLHSLVTILGTWALIQAQPCSCHALALAWTFSYLLFFRALSLLGLPTPTPFTNAVQLLLTLKLVSLASEVQDLHLAQRKEMASGFSKGPTLGLLPDVPSLMETLSYSYCYVGIMTGPFFRYRTYLDWLEQPFPGAVPSLRPLLRRAWPAPLFGLLFLLSSHLFPLEAVREDAFYARPLPARLFYMIPVFFAFRMRFYVAWIAAECGC

SEQ ID NO: 31265 - protein, 399 aa, Homo sapiens; identical to SEQ ID NO: 31253
  REGION 1..399: note = ENSP00000480894

SEQ ID NO: 31266 - protein, 70 aa, Homo sapiens
  REGION 1..70: note = ENSP00000404915
MSPEEWTYLVVLLISIPIGFLFKKAGPGLKRWGAAAVGLGLTLFTCGPHTLHSLVTILGTWALIQAQPCW

SEQ ID NO: 31267 - protein, 399 aa, Homo sapiens; identical to SEQ ID NO: 31253
  REGION 1..399: note = ENSP00000344377

SEQ ID NO: 31268 - protein, 472 aa, Homo sapiens; identical to SEQ ID NO: 31252
  REGION 1..472: note = ENSP00000245615

SEQ ID NO: 31269 - protein, 123 aa, Homo sapiens
  REGION 1..123: note = ENSP00000406794
HTLHSLVTILGTWALIQAQPCSCHALALAWTFSYLLFFRALSLLGLPTPTPFTNAVQLLLTLKLVSLASEVQDLHLAQRKEMASGFSKGPTLGLLPDVPSLMETLSYSYCYVGIMTGAPGPCC

SEQ ID NO: 31270 - protein, 344 aa, Homo sapiens; identical to SEQ ID NO: 31262
  REGION 1..344: note = ENSP00000375634

SEQ ID NO: 31271 - protein, 181 aa, Homo sapiens
  REGION 1..181: note = ENSP00000472209
  VARIANT 1: note = Any amino acid
XKEMASGFSKGPTLGLLPDVPSLMETLSYSYCYVGIMTGPFFRYRTYLDWLEQPFPGAVPSLRPLLRRAWPAPLFGLLFLLSSHLFPLEAVREDAFYARPLPARLFYMIPVFFAFRMRFYVAWIAAECGCIAAGFGAYPVAAKARAGGGPTLQCPPPSRSGGAREASQDPAAPTSKGWLCP

SEQ ID NO: 31272 - protein, 256 aa, Homo sapiens; identical to SEQ ID NO: 31264
  REGION 1..256: note = ENSP00000388250

SEQ ID NO: 31273 - protein, 170 aa, Homo sapiens
  REGION 1..170: note = ENSP00000410320
MSPEEWTYLVVLLISIPIGFLFKKAGPGLKRWGAAAVGLGLTLFTCGPHTLHSLVTILGTWALIQAQPCSCHALALAWTFSYLLFFRALSLLGLPTPTPFTNAVQLLLTLKLVSLASEVQDLHLAQRKEMASGFSKGPTLGLLPDVPSLMETLSYSYCYVGIMTGPFFRY

SEQ ID NO: 31274 - protein, 399 aa, Homo sapiens; identical to SEQ ID NO: 31253
  REGION 1..399: note = ENSP00000410503

SEQ ID NO: 31275 - protein, 472 aa, Homo sapiens; identical to SEQ ID NO: 31252
  REGION 1..472: note = ENSP00000484954

SEQ ID NO: 31276 - protein, 344 aa, Homo sapiens; identical to SEQ ID NO: 31262
  REGION 1..344: note = ENSP00000480531

SEQ ID NO: 31277 - protein, 256 aa, Homo sapiens; identical to SEQ ID NO: 31264
  REGION 1..256: note = ENSP00000478623

SEQ ID NO: 31278 - protein, 172 aa, Homo sapiens; identical to SEQ ID NO: 31263
  REGION 1..172: note = ENSP00000482316

SEQ ID NO: 31279 - protein, 399 aa, Homo sapiens; identical to SEQ ID NO: 31253
  REGION 1..399: note = ENSP00000479760

SEQ ID NO: 31280 - protein, 70 aa, Homo sapiens; identical to SEQ ID NO: 31266
  REGION 1..70: note = ENSP00000481141

SEQ ID NO: 31281 - protein, 399 aa, Homo sapiens; identical to SEQ ID NO: 31253
  REGION 1..399: note = ENSP00000483987

SEQ ID NO: 31282 - protein, 472 aa, Homo sapiens; identical to SEQ ID NO: 31252
  REGION 1..472: note = ENSP00000484933

SEQ ID NO: 31283 - protein, 123 aa, Homo sapiens; identical to SEQ ID NO: 31269
  REGION 1..123: note = ENSP00000483561

SEQ ID NO: 31284 - protein, 344 aa, Homo sapiens; identical to SEQ ID NO: 31262
  REGION 1..344: note = ENSP00000479750

SEQ ID NO: 31285 - protein, 181 aa, Homo sapiens; identical to SEQ ID NO: 31271
  REGION 1..181: note = ENSP00000482357
  VARIANT 1: note = Any amino acid

SEQ ID NO: 31286 - protein, 256 aa, Homo sapiens; identical to SEQ ID NO: 31264
  REGION 1..256: note = ENSP00000480282

SEQ ID NO: 31287 - protein, 170 aa, Homo sapiens; identical to SEQ ID NO: 31273
  REGION 1..170: note = ENSP00000479717

SEQ ID NO: 31288 - protein, 472 aa, Homo sapiens; identical to SEQ ID NO: 31252
  REGION 1..472: note = ENSP00000478965

SEQ ID NO: 31289 - protein, 399 aa, Homo sapiens; identical to SEQ ID NO: 31253
  REGION 1..399: note = ENSP00000481864

SEQ ID NO: 31290 - protein, 399 aa, Homo sapiens; identical to SEQ ID NO: 31253
  REGION 1..399: note = ENSP00000480575

SEQ ID NO: 31291 - protein, 472 aa, Homo sapiens; identical to SEQ ID NO: 31252
  REGION 1..472: note = ENSP00000482252

SEQ ID NO: 31292 - protein, 399 aa, Homo sapiens; identical to SEQ ID NO: 31253
  REGION 1..399: note = ENSP00000481544

SEQ ID NO: 31293 - protein, 399 aa, Homo sapiens; identical to SEQ ID NO: 31253
  REGION 1..399: note = ENSP00000481947

SEQ ID NO: 31294 - protein, 472 aa, Homo sapiens; identical to SEQ ID NO: 31252
  REGION 1..472: note = ENSP00000481455

SEQ ID NO: 31295 - protein, 399 aa, Homo sapiens; identical to SEQ ID NO: 31253
  REGION 1..399: note = ENSP00000483839

SEQ ID NO: 31296 - protein, 399 aa, Homo sapiens; identical to SEQ ID NO: 31253
  REGION 1..399: note = ENSP00000478522

SEQ ID NO: 31297 - protein, 197 aa, Homo sapiens
  REGION 1..197: note = ENSP00000372025
MASQKRPSQRHGSKYLATASTMDHARHGFLPRHRDTGILDSIGRFFGGDRGAPKRGSGKVPWLKPGRSPLPSHARSQPGLCNMYKDSHHPARTAHYGSLPQKSHGRTQDENPVVHFFKNIVTPRTPPPSQGKGRGLSLSRFSWGAEGQRPGFGYGGRASDYKSAHKGFKGVDAQGTLSKIFKLGGRDSRSGSPMARR

SEQ ID NO: 31298 - protein, 180 aa, Homo sapiens
  REGION 1..180: note = ENSP00000462734
  VARIANT 1: note = Any amino acid
XLPQKSHGRTQDENPVVHFFKNIVTPRTPPPSQGKGRGLSLSRFSWVGDERTSIGFLFRPSPHSPATFVFCSVSVASWPPFLSSRDLSAHSWDRAALSSTGEMKRGLPFRKVWSLASVPGTQPCKARSSSPRGFPGDVTGLPPREGATPRPRKCLTSSNTTSARSPRNPHVEVGLAGPSQ

SEQ ID NO: 31299 - protein, 181 aa, Homo sapiens
  REGION 1..181: note = ENSP00000380973
MASQKRPSQRHGSKYLATASTMDHARHGFLPRHRDTGILDSIGRFFGGDRGAPKRGSGKDSHHPARTAHYGSLPQKSHGRTQDENPVVHFFKNICSPRFSVSFQVTPRTPPPSQGKGRGLSLSRFSWGAEGQRPGFGYGGRASDYKSAHKGFKGVDAQGTLSKIFKLGGRDSRSGSPMARR

SEQ ID NO: 31300 - protein, 171 aa, Homo sapiens
  REGION 1..171: note = ENSP00000380964
MASQKRPSQRHGSKYLATASTMDHARHGFLPRHRDTGILDSIGRFFGGDRGAPKRGSGKDSHHPARTAHYGSLPQKSHGRTQDENPVVHFFKNIVTPRTPPPSQGKGRGLSLSRFSWGAEGQRPGFGYGGRASDYKSAHKGFKGVDAQGTLSKIFKLGGRDSRSGSPMARR

SEQ ID NO: 31301 - protein, 160 aa, Homo sapiens
  REGION 1..160: note = ENSP00000380963
MASQKRPSQRHGSKYLATASTMDHARHGFLPRHRDTGILDSIGRFFGGDRGAPKRGSGKDSHHPARTAHYGSLPQKSHGRTQDENPVVHFFKNIVTPRTPPPSQGKGAEGQRPGFGYGGRASDYKSAHKGFKGVDAQGTLSKIFKLGGRDSRSGSPMARR

SEQ ID NO: 31302 - protein, 108 aa, Homo sapiens
  REGION 1..108: note = ENSP00000435243
MASQKRPSQRHGSKYLATASTMDHARHGFLPRHRDTGILDSIGRFFGGDRGAPKRGSGKDSHHPARTAHYGSLPQKHTAAETERTWAAERTVDIQASFVFFSCPSLTS

SEQ ID NO: 31303 - protein, 186 aa, Homo sapiens
  REGION 1..186: note = ENSP00000352667
MASQKRPSQRHGSKYLATASTMDHARHGFLPRHRDTGILDSIGRFFGGDRGAPKRGSGKVPWLKPGRSPLPSHARSQPGLCNMYKDSHHPARTAHYGSLPQKSHGRTQDENPVVHFFKNIVTPRTPPPSQGKGAEGQRPGFGYGGRASDYKSAHKGFKGVDAQGTLSKIFKLGGRDSRSGSPMARR

SEQ ID NO: 31304 - protein, 68 aa, Homo sapiens
  REGION 1..68: note = ENSP00000436830
MASQKRPSQRHGSKYLATASTMDHARHGFLPRARFPKFLSWEEEIVALDHPWLDAENPPGSGILSSAS

SEQ ID NO: 31305 - protein, 60 aa, Homo sapiens
  REGION 1..60: note = ENSP00000462780
  VARIANT 1: note = Any amino acid
XQKRPSQRHGSKYLATASTMDHARHGFLPRHRDTGILDSIGRFFGGDRGAPKRGSGKDCP

SEQ ID NO: 31306 - protein, 32 aa, Homo sapiens
  REGION 1..32: note = ENSP00000431267
MASQKRPSQRHGSKYLATASTMDHARHGFLPR

SEQ ID NO: 31307 - protein, 236 aa, Homo sapiens
  REGION 1..236: note = ENSP00000380967
MASQKRPSQRHGSKYLATASTMDHARHGFLPRHRDTGILDSIGRFFGGDRGAPKRGSGKDSHHPARTAHYGSLPQKSHGRTQDENPVVHFFKNIVTPRTPPPSQGKGRGLSLSRFSWVGDERTSIGFLFRPSPHSPATFVFCSVSVASWPPFLSSRDLSAHSWDRAALSSTGEMKRGLPFRKGAEGQRPGFGYGGRASDYKSAHKGFKGVDAQGTLSKIFKLGGRDSRSGSPMARR

SEQ ID NO: 31308 - protein, 73 aa, Homo sapiens
  REGION 1..73: note = ENSP00000346545
MASQKRPSQRHGSKYLATASTMDHARHGFLPRHRDTGILDSIGRFFGGDRGAPKRGSGKGGRDSRSGSPMARR

SEQ ID NO: 31309 - protein, 59 aa, Homo sapiens
  REGION 1..59: note = ENSP00000431335
MASQKRPSQRHGSKYLATASTMDHARHGFLPRTHTTRQELLTTAPCPRSHTAGPKMKTP

SEQ ID NO: 31310 - protein, 59 aa, Homo sapiens; identical to SEQ ID NO: 31309
  REGION 1..59: note = ENSP00000462758

SEQ ID NO: 31311 - protein, 64 aa, Homo sapiens
  REGION 1..64: note = ENSP00000434011
MASQKRPSQRHGSKYLATASTMDHARHGFLPSGALARTHTTRQELLTTAPCPRSHTAGPKMKTP

SEQ ID NO: 31312 - protein, 149 aa, Homo sapiens
  REGION 1..149: note = ENSP00000435641
MASQKRPSQRHRDTGILDSIGRFFGGDRGAPKRGSGKDSHHPARTAHYGSLPQKSHGRTQDENPVVHFFKNIVTPRTPPPSQGKGRGLSLSRFSWGAEGQRPGFGYGGRASDYKSAHKGFKGVDAQGTLSKIFKLGGRDSRSGSPMARR

SEQ ID NO: 31313 - protein, 304 aa, Homo sapiens
  REGION 1..304: note = ENSP00000462223
MGNHAGKRELNAEKASTNSETNRGESEKKRNLGELSRTTSEDNEVFGEADANQNNGTSSQDTAVTDSKRTADPKNAWQDAHPADPGSRPHLIRLFSRDAPGREDNTFKDRPSESDELQTIQEDSAATSESLDVMASQKRPSQRHGSKYLATASTMDHARHGFLPRHRDTGILDSIGRFFGGDRGAPKRGSGKDSHHPARTAHYGSLPQKSHGRTQDENPVVHFFKNIVTPRTPPPSQGKGRGLSLSRFSWGAEGQRPGFGYGGRASDYKSAHKGFKGVDAQGTLSKIFKLGGRDSRSGSPMARR

SEQ ID NO: 31314 - protein, 253 aa, Homo sapiens
  REGION 1..253: note = ENSP00000463780
MGNHAGKRELNAEKASTNSETNRGESEKKRNLGELSRTTSEDNEVFGEADANQNNGTSSQDTAVTDSKRTADPKNAWQDAHPADPGSRPHLIRLFSRDAPGREDNTFKDRPSESDELQTIQEDSAATSESLDVMASQKRPSQRHGSKYLATASTMDHARHGFLPRHRDTGILDSIGRFFGGDRGAPKRGSGKDSHHPARTAHYGSLPQKSHGRTQDENPVVHFFKNIVTPRTPPPSQGKGGRDSRSGSPMARR

SEQ ID NO: 31315 - protein, 157 aa, Homo sapiens
  REGION 1..157: note = ENSP00000463403
MASQKRPSQRHGSKYLATASTMDHARHGFLPRHRDTGILDSIGRFFGGDRGAPKRGSGKDSHHPARTAHYGSLPQKSHGRTQDENPVVHFFKNIVTPRTPPPSQGKGRGLSLSRFSWGAEGQRPGFGYGGRASDYKSAHKGFKGVDAQGTLSKIFKL

SEQ ID NO: 31316 - protein, 101 aa, Homo sapiens
  REGION 1..101: note = ENSP00000405882
MYKDSHHPARTAHYGSLPQKSHGRTQDENPVVHFFKNIVTPRTPPPSQGKGRGLSLSRFSWGAEGQRPGFGYGGRASDYKSAHKGFKGVDAQGTLSKIFKL

SEQ ID NO: 31317 - protein, 98 aa, Homo sapiens
  REGION 1..98: note = ENSP00000432988
MASQKRPSQRHGSKYLATASTMDHARHGFLPRHRDTGILDSIGRFFGGDRGAPKRGSGKDSHHPARTAHYGSLPQKSHGRTQDENPVVHFFKNIAGAR

SEQ ID NO: 31318 - protein, 66 aa, Homo sapiens
  REGION 1..66: note = ENSP00000442393
MASQKRPSQRHGSKYLATASTMDHARHGFLPRHRDTGILDSIGRFFGGDRGAPKRGSGKESRTLSR

SEQ ID NO: 31319 - protein, 108 aa, Homo sapiens
  REGION 1..108: note = ENSP00000436951
MASQKRPSQRHGSKYLATASTMDHARHGFLPRHRDTGILDSIGRFFGGDRGAPKRGSGKDSHHPARTAHYGSLPQKSHGRTQDENPVVHFFKNIDRSGEAGHPGASGS

SEQ ID NO: 31320 - protein, 171 aa, Homo sapiens
  REGION 1..171: note = ENSP00000463137
MASQKRPSQRHGSKYLATASTMDHARHGFLPRHRDTGILDSIGRFFGGDRGAPKRGSGKVPWLKPGRSPLPSHARSQPGLCNMYKDSHHPARTAHYGSLPQKSHGRTQDENPVVHFFKNIVTPRTPPPSQGKGRGLSLSRFSWVGDERTSIGFLFRPSPHSPATFVFCSVS

SEQ ID NO: 31321 - protein, 119 aa, Homo sapiens
  REGION 1..119: note = ENSP00000435322
MASQKRPSQRHGSKYLATASTMDHARHGFLPRHRDTGILDSIGRFFGGDRGAPKRGSGKDSHHPARTAHYGSLPQKSHGRTQDENPVVHFFKNIVYTSSPTRTEVGRLGTRVLLAADGC

SEQ ID NO: 31322 - protein, 86 aa, Homo sapiens
  REGION 1..86: note = ENSP00000437063
MASQKRPSQRHGSKYLATASTMDHARHGFLPRHRDTGILDSIGRFFGGDRGAPKRGSGKDSHHPARTAHYGSLPQKSHGRTQDENP

SEQ ID NO: 31323 - protein, 197 aa, Homo sapiens
  REGION 1..197: note = ENSP00000380961
MGNHAGKRELNAEKASTNSETNRGESEKKRNLGELSRTTSEDNEVFGEADANQNNGTSSQDTAVTDSKRTADPKNAWQDAHPADPGSRPHLIRLFSRDAPGREDNTFKDRPSESDELQTIQEDSAATSESLDVMASQKRPSQRHGSKYLATASTMDHARHGFLPRHRDTGILDSIGRFFGGDRGAPKRGSGKVSSEE

SEQ ID NO: 31324 - protein, 197 aa, Homo sapiens; identical to SEQ ID NO: 31323
  REGION 1..197: note = ENSP00000380958

SEQ ID NO: 31325 - protein, 159 aa, Homo sapiens
  REGION 1..159: note = ENSP00000462374
MGNHAGKRELNAEKASTNSETNRGESEKKRNLGELSRTTSEDNEVFGEADANQNNGTSSQDTAVTDSKRTADPKNAWQDAHPADPGSRPHLIRLFSRDAPGREDNTFKDRPSESDELQTIQEDSAATSESLDVMASQKRPSQRHGSKYLATASTMDHAR

SEQ ID NO: 31326 - protein, 41 aa, Homo sapiens
  REGION 1..41: note = ENSP00000463164
MGNHAGKRELNAEKASTNSETNRGESEKKRNLGELSRTTSE

SEQ ID NO: 31327 - protein, 304 aa, Homo sapiens; identical to SEQ ID NO: 31313
  REGION 1..304: note = ENSP00000348273

SEQ ID NO: 31328 - protein, 646 aa, Homo sapiens
  REGION 1..646: note = ENSP00000264036
MGLPRLVCAFLLAACCCCPRVAGVPGEAEQPAPELVEVEVGSTALLKCGLSQSQGNLSHVDWFSVHKEKRTLIFRVRQGQGQSEPGEYEQRLSLQDRGATLALTQVTPQDERIFLCQGKRPRSQEYRIQLRVYKAPEEPNIQVNPLGIPVNSKEPEEVATCVGRNGYPIPQVIWYKNGRPLKEEKNRVHIQSSQTVESSGLYTLQSILKAQLVKEDKDAQFYCELNYRLPSGNHMKESREVTVPVFYPTEKVWLEVEPVGMLKEGDRVEIRCLADGNPPPHFSISKQNPSTREAEEETTNDNGVLVLEPARKEHSGRYECQGLDLDTMISLLSEPQELLVNYVSDVRVSPAAPERQEGSSLTLTCEAESSQDLEFQWLREETGQVLERGPVLQLHDLKREAGGGYRCVASVPSIPGLNRTQLVNVAIFGPPWMAFKERKVWVKENMVLNLSCEASGHPRPTISWNVNGTASEQDQDPQRVLSTLNVLVTPELLETGVECTASNDLGKNTSILFLELVNLTTLTPDSNTTTGLSTSTASPHTRANSTSTERKLPEPESRGVVIVAVIVCILVLAVLGAVLYFLYKKGKLPCRRSGKQEITLPPSRKSELVVEVKSDKLPEEMGLLQGSSGDKRAPGDQGEKYIDLRH

SEQ ID NO: 31329 - protein, 829 aa, Homo sapiens
  REGION 1..829: note = ENSP00000305617
MNSGVAMKYGNDSSAELSELHSAALASLKGDIVELNKRLQQTERERDLLEKKLAKAQCEQSHLMREHEDVQERTTLRYEERITELHSVIAELNKKIDRLQGTTIREEDEYSELRSELSQSQHEVNEDSRSMDQDQTSVSIPENQSTMVTADMDNCSDLNSELQRVLTGLENVVCGRKKSSCSLSVAEVDKHIEQLTTASEHCDLAIKTVEEIEGVLGRDLYPNLAEERSRWEKELAGLREENESLTAMLCSKEEELNRTKATMNAIREERDRLRRRVRELQTRLQSVQATGPSSPGRLTSTNRPINPSTGELSTSSSSNDIPIAKIAERVKLSKTRSESSSSDRPVLGSEISSIGVSSSVAEHLAHSLQDCSNIQEIFQTLYSHGSAISESKIREFEVETERLNSRIEHLKSQNDLLTITLEECKSNAERMSMLVGKYESNATALRLALQYSEQCIEAYELLLALAESEQSLILGQFRAAGVGSSPGDQSGDENITQMLKRAHDCRKTAENAAKALLMKLDGSCGGAFAVAGCSVQPWESLSSNSHTSTTSSTASSCDTEFTKEDEQRLKDYIQQLKNDRAAVKLTMLELESIHIDPLSYDVKPRGDSQRLDLENAVLMQELMAMKEEMAELKAQLYLLEKEKKALELKLSTREAQEQAYLVHIEHLKSEVEEQKEQRMRSLSSTSSGSKDKPGKECADAASPALSLAELRTTCSENELAAEFTNAIRREKKLKARVQELVSALERLTKSSEIRHQQSAEFVNDLKRANSNLVAAYEKAKKKHQNKLKKLESQMMAMVERHETQVRMLKQRIALLEEENSRPHTNETSL

SEQ ID NO: 31330 - protein, 766 aa, Homo sapiens
  REGION 1..766: note = ENSP00000421615
MREHEDVQERTTLRYEERITELHSVIAELNKKIDRLQGTTIREEDEYSELRSELSQSQHEVNEDSRSMDQDQTSVSIPENQSTMVTADMDNCSDLNSELQRVLTGLENVVCGRKKSSCSLSVAEVDKHIEQLTTASEHCDLAIKTVEEIEGVLGRDLYPNLAEERSRWEKELAGLREENESLTAMLCSKEEELNRTKATMNAIREERDRLRRRVRELQTRLQSVQATGPSSPGRLTSTNRPINPSTGELSTSSSSNDIPIAKIAERVKLSKTRSESSSSDRPVLGSEISSIGVSSSVAEHLAHSLQDCSNIQEIFQTLYSHGSAISESKIREFEVETERLNSRIEHLKSQNDLLTITLEECKSNAERMSMLVGKYESNATALRLALQYSEQCIEAYELLLALAESEQSLILGQFRAAGVGSSPGDQSGDENITQMLKRAHDCRKTAENAAKALLMKLDGSCGGAFAVAGCSVQPWESLSSNSHTSTTSSTASSCDTEFTKEDEQRLKDYIQQLKNDRAAVKLTMLELESIHIDPLSYDVKPRGDSQRLDLENAVLMQELMAMKEEMAELKAQLYLLEKEKKALELKLSTREAQEQAYLVHIEHLKSEVEEQKEQRMRSLSSTSSGSKDKPGKECADAASPALSLAELRTTCSENELAAEFTNAIRREKKLKARVQELVSALERLTKSSEIRHQQSAEFVNDLKRANSNLVAAYEKAKKKHQNKLKKLESQMMAMVERHETQVRMLKQRIALLEEENSRPHTNETSL

SEQ ID NO: 31331 - protein, 1019 aa, Homo sapiens
  REGION 1..1019: note = ENSP00000386227
MMAAAAAAAAGSSSSGGGGGGSGSSSSSSDTSSTGEEERMRRLFQTCDGDGDGYISRNDLLMVCRQLNMEESVAEIMNQLGADENGKISFQDFTRCRMQLVREIRKEEVDLSAKSDNSCTKKLRDRIASWPTSSDNSLGALSAARESWEYDSGARDLQSPDVQSQSALQKLLEYGGSSLHQQAALHKLLTQSPHIGNSVGGSYLELANTLHSAALASLKGDIVELNKRLQQTERERDLLEKKLAKAQCEQSHLMREHEDVQERTTLRYEERITELHSVIAELNKKIDRLQGTTIREEDEYSELRSELSQSQHEVNEDSRSMDQDQTSVSIPENQSTMVTADMDNCSDLNSELQRVLTGLENVVCGRKKSSCSLSVAEVDKHIEQLTTASEHCDLAIKTVEEIEGVLGRDLYPNLAEERSRWEKELAGLREENESLTAMLCSKEEELNRTKATMNAIREERDRLRRRVRELQTRLQSVQATGPSSPGRLTSTNRPINPSTGELSTSSSSNDIPIAKIAERVKLSKTRSESSSSDRPVLGSEISSIGVSSSVAEHLAHSLQDCSNIQEIFQTLYSHGSAISESKIREFEVETERLNSRIEHLKSQNDLLTITLEECKSNAERMSMLVGKYESNATALRLALQYSEQCIEAYELLLALAESEQSLILGQFRAAGVGSSPGDQSGDENITQMLKRAHDCRKTAENAAKALLMKLDGSCGGAFAVAGCSVQPWESLSSNSHTSTTSSTASSCDTEFTKEDEQRLKDYIQQLKNDRAAVKLTMLELESIHIDPLSYDVKPRGDSQRLDLENAVLMQELMAMKEEMAELKAQLYLLEKEKKALELKLSTREAQEQAYLVHIEHLKSEVEEQKEQRMRSLSSTSSGSKDKPGKECADAASPALSLAELRTTCSENELAAEFTNAIRREKKLKARVQELVSALERLTKSSEIRHQQSAEFVNDLKRANSNLVAAYEKAKKKHQNKLKKLESQMMAMVERHETQVRMLKQRIALLEEENSRPHTNETSL

SEQ ID NO: 31332 - protein, 169 aa, Homo sapiens
  REGION 1..169: note = ENSP00000485492
  VARIANT 1: note = Any amino acid
XVAGCSVQPWESLSSNSHTSTTSSTASSCDTEFTKEDEQRLKDYIQQLKNDRAAVKLTMLELESIHIDPLSYDVKPRGDSQRLDLENAVLMQELMAMKEEMAELKAQLYLLEKEKKALELKLSTREAQEQAYLVHIEHLKSEVEEQKEQRMRSLSSTSSGSKDKPGKVI

SEQ ID NO: 31333 - protein, 715 aa, Homo sapiens
  REGION 1..715: note = ENSP00000485220
MNSGVAMKYGNDSSAELSELHSAALASLKGDIVELNKRLQQTERERDLLEKKLAKAQCEQSHLMREHEDVQERTTLRYEERITELHSVIAELNKKIDRLQGTTIREEDEYSELRSELSQSQHEVNEDSRSMDQDQTSVSIPENQSTMVTADMDNCSDLNSELQRVLTGLENVVCGRKKSSCSLSVAEVDKHIEQLTTASEHCDLAIKTVEEIEGVLGRDLYPNLAEERSRWEKELAGLREENESLTAMLCSKEEELNRTKATMNAIREERDRLRRRVRELQTRLQSVQATGPSSPGRLTSTNRPINPSTGELSTSSSSNDIPIAKIAERVKLSKTRSESSSSDRPVLGSEISSIGVSSSVAEHLAHSLQDCSNIQEIFQTLYSHGSAISESKIREFEVETERLNSRIEHLKSQNDLLTITLEECKSNAERMSMLVGKYESNATALRLALQYSEQCIEAYELLLALAESEQSLILGQFRAAGVGSSPGDQSGDENITQMLKRAHDCRKTAENAAKALLMKLDGSCGGAFAVAGCSVQPWESLSSNSHTSTTSSTASSCDTEFTKEDEQRLKDYIQQLKNDRAAVKLTMLELESIHIDPLSYDVKPRGDSQRLDLENAVLMQELMAMKEEMAELKAQLYLLEKEKKALELKLSTREAQEQAYLVHIEHLKSEVEEQKEQRMRSLSSTSSGSKDKPGKVGPEWLGDTLRLSDCPVTAQ

SEQ ID NO: 31334 - protein, 350 aa, Homo sapiens
  REGION 1..350: note = ENSP00000358022
MFGLKRNAVIGLNLYCGGAGLGAGSGGATRPGGRLLATEKEASARREIGGGEAGAVIGGSAGASPPSTLTPDSRRVARPPPIGAEVPDVTATPARLLFFAPTRRAAPLEEMEAPAADAIMSPEEELDGYEPEPLGKRPAVLPLLELVGESGNNTSTDGSLPSTPPPAEEEEDELYRQSLEIISRYLREQATGAKDTKPMGRSGATSRKALETLRRVGDGVQRNHETAFQGMLRKLDIKNEDDVKSLSRVMIHVFSDGVTNWGRIVTLISFGAFVAKHLKTINQESCIEPLAESITDVLVRTKRDWLVKQRGWDGFVEFFHVEDLEGGIRNVLLAFAGVAGVGAGLAYLIR

SEQ ID NO: 31335 - protein, 271 aa, Homo sapiens
  REGION 1..271: note = ENSP00000309973
MFGLKRNAVIGLNLYCGGAGLGAGSGGATRPGGRLLATEKEASARREIGGGEAGAVIGGSAGASPPSTLTPDSRRVARPPPIGAEVPDVTATPARLLFFAPTRRAAPLEEMEAPAADAIMSPEEELDGYEPEPLGKRPAVLPLLELVGESGNNTSTDGSLPSTPPPAEEEEDELYRQSLEIISRYLREQATGAKDTKPMGRSGATSRKALETLRRVGDGVQRNHETAFQGWVCGVLPCRGPRRWHQECAAGFCRCCWSRSWFGISNKIALL

SEQ ID NO: 31336 - protein, 197 aa, Homo sapiens
  REGION 1..197: note = ENSP00000477624
MFGLKRNAVIGLNLYCGGAGLGAGSGGATRPGGRLLATGAKDTKPMGRSGATSRKALETLRRVGDGVQRNHETAFQGMLRKLDIKNEDDVKSLSRVMIHVFSDGVTNWGRIVTLISFGAFVAKHLKTINQESCIEPLAESITDVLVRTKRDWLVKQRGWDGFVEFFHVEDLEGGIRNVLLAFAGVAGVGAGLAYLIR

SEQ ID NO: 31337 - protein, 999 aa, Homo sapiens
  REGION 1..999: note = ENSP00000424126
MEPRAAAAGEPEPPAASSSFQARLWKNLQLGVGRSKGGGGGRAGGPERRTADTPSPSPPPPVGTGNAPARGSGAGSRWSGFKKRKQVLDRVFSSSQPNLCCSSPEPLEPGGAGRAEQGSTLRRRIREHLLPAVKGPAAASGAAGGTPPGGRSPDSAPSSSSASSSLSSSPQPPPRGDRARDEGARRQGPGAHLCHQKSSSLPGTACLEQLLEPPPPPAEPARSPAESRAPETGEEHGSSQKIINTAGTSNAEVPLADPGMYQLDITLRRGQSLAARDRGGTSDPYVKFKIGGKEVFRSKIIHKNLNPVWEEKACILVDHLREPLYIKVFDYDFGLQDDFMGSAFLDLTQLELNRPTDVTLTLKDPHYPDHDLGIILLSVILTPKEGESRDVTMLMRKSWKRSSKELSENEVVGSYFSVKSLFWRTCGRPALPVLGFCRAELQNPYCKNVQFQTQSLRLSDLHRKSHLWRGIVSITLIEGRDLKAMDSNGLSDPYVKFRLGHQKYKSKIMPKTLNPQWREQFDFHLYEERGGVIDITAWDKDAGKRDDFIGRCQVDLSALSREQTHKLELQLEEGEGHLVLLVTLTASATVSISDLSVNSLEDQKEREEILKRYSPLRIFHNLKDVGFLQVKVIRAEGLMAADVTGKSDPFCVVELNNDRLLTHTVYKNLNPEWNKVFTFNIKDIHSVLEVTVYDEDRDRSADFLGKVAIPLLSIQNGEQKAYVLKNKQLTGPTKGVIYLEIDVIFNAVKASLRTLIPKEQKYIEEENRLSKQLLLRNFIRMKRCVMVLVNAAYYVNSCFDWDSPPRSLAAFVLFLFVVWNFELYMIPLVLLLLLTWNYFLIISGKDNRQRDTVVEDMLEDEEEEDDKDDKDSEKKGFINKIYAIQEVCVSVQNILDEVASFGERIKNTFNWTVPFLSWLAIVALCVFTAILYCIPLRYIVLVWGINKFTKKLRSPYAIDNNELLDFLSRVPSDVQVVQYQELKPDPSHSPYKRKKNNLG

SEQ ID NO: 31338 - protein, 692 aa, Homo sapiens
  REGION 1..692: note = ENSP00000391639
MLDSCKLKSACNLPFICNKKIINTAGTSNAEVPLADPGMYQLDITLRRGQSLAARDRGGTSDPYVKFKIGGKEVFRSKIIHKNLNPVWEEKACILVDHLREPLYIKVFDYDFGLQDDFMGSAFLDLTQLELNRPTDVTLTLKDPHYPDHDLGIILLSVILTPKEGESRDVTMLMRKSWKRSSKFQTQSLRLSDLHRKSHLWRGIVSITLIEGRDLKAMDSNGLSDPYVKFRLGHQKYKSKIMPKTLNPQWREQFDFHLYEERGGVIDITAWDKDAGKRDDFIGRCQVDLSALSREQTHKLELQLEEGEGHLVLLVTLTASATVSISDLSVNSLEDQKEREEILKRYSPLRIFHNLKDVGFLQVKVIRAEGLMAADVTGKSDPFCVVELNNDRLLTHTVYKNLNPEWNKVFTFNIKDIHSVLEVTVYDEDRDRSADFLGKVAIPLLSIQNGEQKAYVLKNKQLTGPTKGVIYLEIDVIFNAVKASLRTLIPKEQKYIEEENRLSKQLLLRNFIRMKRCVMVLVNAAYYVNSCFDWDSPPRSLAAFVVVEDMLEDEEEEDDKDDKDSEKKGFINKIYAIQEVCVSVQNILDEVASFGERIKNTFNWTVPFLSWLAIVALCVFTAILYCIPLRYIVLVWGINKFTKKLRSPYAIDNNELLDFLSRVPSDVQVVQYQELKPDPSHSPYKRKKNNLG

SEQ ID NO: 31339 - protein, 515 aa, Homo sapiens
  REGION 1..515: note = ENSP00000426417
MDSNGLSDPYVKFRLGHQKYKSKIMPKTLNPQWREQFDFHLYEERGGVIDITAWDKDAGKRDDFIGRCQVDLSALSREQTHKLELQLEEGEGHLVLLVTLTASATVSISDLSVNSLEDQKEREEILKRYSPLRIFHNLKDVGFLQVKVIRAEGLMAADVTGKSDPFCVVELNNDRLLTHTVYKNLNPEWNKVFTFNIKDIHSVLEVTVYDEDRDRSADFLGKVAIPLLSIQNGEQKAYVLKNKQLTGPTKGVIYLEIDVIFNAVKASLRTLIPKEQKYIEEENRLSKQLLLRNFIRMKRCVMVLVNAAYYVNSCFDWDSPPRSLAAFVLFLFVVWNFELYMIPLVLLLLLTWNYFLIISGKDNRQRDTVVEDMLEDEEEEDDKDDKDSEKKGFINKIYAIQEVCVSVQNILDEVASFGERIKNTFNWTVPFLSWLAIVALCVFTAILYCIPLRYIVLVWGINKFTKKLRSPYAIDNNELLDFLSRVPSDVQVVQYQELKPDPSHSPYKRKKNNLG

SEQ ID NO: 31340 - protein, 778 aa, Homo sapiens
  REGION 1..778: note = ENSP00000308957
MLDSCKLKSACNLPFICNKKIINTAGTSNAEVPLADPGMYQLDITLRRGQSLAARDRGGTSDPYVKFKIGGKEVFRSKIIHKNLNPVWEEKACILVDHLREPLYIKVFDYDFGLQDDFMGSAFLDLTQLELNRPTDVTLTLKDPHYPDHDLGIILLSVILTPKEGESRDVTMLMRKSWKRSSKELSENEVVGSYFSVKSLFWRTCGRPALPVLGFCRAELQNPYCKNVQFQTQSLRLSDLHRKSHLWRGIVSITLIEGRDLKAMDSNGLSDPYVKFRLGHQKYKSKIMPKTLNPQWREQFDFHLYEERGGVIDITAWDKDAGKRDDFIGRCQVDLSALSREQTHKLELQLEEGEGHLVLLVTLTASATVSISDLSVNSLEDQKEREEILKRYSPLRIFHNLKDVGFLQVKVIRAEGLMAADVTGKSDPFCVVELNNDRLLTHTVYKNLNPEWNKVFTFNIKDIHSVLEVTVYDEDRDRSADFLGKVAIPLLSIQNGEQKAYVLKNKQLTGPTKGVIYLEIDVIFNAVKASLRTLIPKEQKYIEEENRLSKQLLLRNFIRMKRCVMVLVNAAYYVNSCFDWDSPPRSLAAFVLFLFVVWNFELYMIPLVLLLLLTWNYFLIISGKDNRQRDTVVEDMLEDEEEEDDKDDKDSEKKGFINKIYAIQEVCVSVQNILDEVASFGERIKNTFNWTVPFLSWLAIVALCVFTAILYCIPLRYIVLVWGINKFTKKLRSPYAIDNNELLDFLSRVPSDVQVVQYQELKPDPSHSPYKRKKNNLG

SEQ ID NO: 31341 - protein, 683 aa, Homo sapiens
  REGION 1..683: note = ENSP00000423410
MLDSCKLKSACNLPFICNKKIINTAGTSNAEVPLADPGMYQLDITLRRGQSLAARDRGGTSDPYVKFKIGGKEVFRSKIIHKNLNPVWEEKACILVDHLREPLYIKVFDYDFGLQDDFMGSAFLDLTQLELNRPTDVTLTLKDPHYPDHDLGIILLSVILTPKEGESRDVFQTQSLRLSDLHRKSHLWRGIVSITLIEGRDLKAMDSNGLSDPYVKFRLGHQKYKSKIMPKTLNPQWREQFDFHLYEERGGVIDITAWDKDAGKRDDFIGRCQVDLSALSREQTHKLELQLEEGEGHLVLLVTLTASATVSISDLSVNSLEDQKEREEILKRYSPLRIFHNLKDVGFLQVKVIRAEGLMAADVTGKSDPFCVVELNNDRLLTHTVYKNLNPEWNKVFTFNIKDIHSVLEVTVYDEDRDRSADFLGKVAIPLLSIQNGEQKAYVLKNKQLTGPTKGVIYLEIDVIFNAVKASLRTLIPKEQKYIEEENRLSKQLLLRNFIRMKRCVMVLVNAAYYVNSCFDWDSPPRSLAAFVLFLFVVWNFELYMIPLVLLLLLTWNYFLIISGKDNRQRDTVVEDMLEDEEEEDDKDDKDSEKKGFINKIYAIQEVCVSVQNILDEVASFGERIKNTFNWTVPFLSWLAIVALCVFTAILYCIPLRYIVLVWGINKFTKKLRSPYAIDNNEL

SEQ ID NO: 31342 - protein, 489 aa, Homo sapiens
  REGION 1..489: note = ENSP00000431075
MGSAFLDLTQLELNRPTDVTLTLKDPHYPDHDLGIILLSVILTPKEGESRDVTMLMRKSWKRSSKELSENEVVGSYFSVKSLFWRTCGRPALPVLGFCRAELQNPYCKNVQFQTQSLRLSDLHRKSHLWRGIVSITLIEGRDLKAMDSNGLSDPYVKFRLGHQKYKSKIMPKTLNPQWREQFDFHLYEERGGVIDITAWDKDAGKRDDFIGRCQVDLSALSREQTHKLELQLEEGEGHLVLLVTLTASATVSISDLSVNSLEDQKEREEILKRYSPLRIFHNLKDVGFLQVKVIRAEGLMAADVTGKSDPFCVVELNNDRLLTHTVYKNLNPEWNKVFTFNIKDIHSVLEVTVYDEDRDRSADFLGKVAIPLLSIQNGEQKAYVLKNKQLTGPTKGVIYLEIDVIFNAVKASLRTLIPKEQKYIEEENRLSKQLLLRNFIRMKRCVMVLVNAAYYVNSCFDWDSPPRSLAAFVLFLFVVWNFELYMIPL

SEQ ID NO: 31343 - protein, 600 aa, Homo sapiens
  REGION 1..600: note = ENSP00000426438
MLDSCKLKSACNLPFICNKKIINTAGTSNAEVPLADPGMYQLDITLRRGQSLAARDRGGTSDPYVKFKIGGKEVFRSKIIHKNLNPVWEEKACILVDHLREPLYIKVFDYDFGLQDDFMGSAFLDLTQLELNRPTDVTLTLKDPHYPDHDLGIILLSVILTPKEGESRDVTMLMRKSWKRSSKELSENEVVGSYFSVKSLFWRTCGRPALPVLGFCRAELQNPYCKNVQFQTQSLRLSDLHRKSHLWRGIVSITLIEGRDLKAMDSNGLSDPYVKFRLGHQKYKSKIMPKTLNPQWREQFDFHLYEERGGVIDITAWDKDAGKRDDFIGRCQVDLSALSREQTHKLELQLEEGEGHLVLLVTLTASATVSISDLSVNSLEDQKEREEILKRYSPLRIFHNLKDVGFLQVKVIRAEGLMAADVTGKSDPFCVVELNNDRLLTHTVYKNLNPEWNKVFTFNIKDIHSVLEVTVYDEDRDRSADFLGKVAIPLLSIQNGEQKAYVLKNKQLTGPTKGVIYLEIDVIFNAVKASLRTLIPKEQKYIEEENRLSKQLLLRNFIRMKRCVMVLVNAAYYVNSCFDWDSPPRSLAAFVALYGTFINV

SEQ ID NO: 31344 - protein, 414 aa, Homo sapiens
  REGION 1..414: note = ENSP00000426294
TLKDPHYPDHDLGIILLSVILTPKEGESRDVELSENEVVGSYFSVKSLFWRFQTQSLRLSDLHRKSHLWRGIVSITLIEGRDLKAMDSNGLSDPYVKFRLGHQKYKSKIMPKTLNPQWREQFDFHLYEERGGVIDITAWDKDAGKRDDFIGRCQVDLSALSREQTHKLELQLEEGEGHLVLLVTLTASATVSISDLSVNSLEDQKEREEILKRYSPLRIFHNLKDVGFLQVKVIRAEGLMAADVTGKSDPFCVVELNNDRLLTHTVYKNLNPEWNKVFTFNIKDIHSVLEVTVYDEDRDRSADFLGKVAIPLLSIQNGEQKAYVLKNKQLTGPTKGVIYLEIDVIFNAVKASLRTLIPKEQKYIEEENRLSKQLLLRNFIRMKRCVMVLVNAAYYVNSCFDWDSPPRSLAAFVV

SEQ ID NO: 31345 - protein, 292 aa, Homo sapiens
  REGION 1..292: note = ENSP00000425515
  VARIANT 1: note = Any amino acid
XLCHQKSSSLPGTACLEQLLEPPPPPAEPARSPAESRAPETGEEHGSSQKIINTAGTSNAEVPLADPGMYQLDITLRRGQSLAARDRGGTSDPYVKFKIGGKEVFRSKIIHKNLNPVWEEKACILVDHLREPLYIKVFDYDFGLQDDFMGSAFLDLTQLELNRPTDVTLTLKDPHYPDHDLGIILLSVILTPKEGESRDVTMLMRKSWKRSSKFQTQSLRLSDLHRKSHLWRGIVSITLIEGRDLKAMDSNGLSDPYVKFRLGHQKYKSKIMPKTLNPQWREQFDFHLYEER

SEQ ID NO: 31346 - protein, 191 aa, Homo sapiens
  REGION 1..191: note = ENSP00000424936
QKIINTAGTSNAEVPLADPGMYQLDITLRRGQSLAARDRGGTSDPYVKFKIGGKEVFRSKIIHKNLNPVWEEKACILVDHLREPLYIKVFDYDFGLQDDFMGSAFLDLTQLELNRPTDVTLTLKDPHYPDHDLGIILLSVILTPKEGESRDVFQTQSLRLSDLHRKSHLWRGIVSITLIEGRDLKAMDSNG

SEQ ID NO: 31347 - protein, 169 aa, Homo sapiens
  REGION 1..169: note = ENSP00000421543
KIINTAGTSNAEVPLADPGMYQLDITLRRGQSLAARDRGGTSDPYVKFKIGGKEVFRSKIIHKNLNPVWEEKACILVDHLREPLYIKVFDYDFGLQDDFMGSAFLDLTQLELNRPTDVTLTLKDPHYPDHDLGIILLSVILTPKEGESRDVTMLMRKSWKRSSKVILSL

SEQ ID NO: 31348 - protein, 135 aa, Homo sapiens
  REGION 1..135: note = ENSP00000422219
MLDSCKLKSACNLPFICNKTLYGKIGKDRLNAVNKIINTAGTSNAEVPLADPGMYQLDITLRRGQSLAARDRGGTSDPYVKFKIGGKEVFRSKIIHKNLNPVWEEKACILVDHLREPLYIKVFDYDFGLQDDFMG

SEQ ID NO: 31349 - protein, 81 aa, Homo sapiens
  REGION 1..81: note = ENSP00000422317
MLDSCKLKSACNLPFICNKKIINTAGTSNAEVPLADPGMYQLDITLRRGQSLAARDRGGTSDPYVKFKIGGKEVFRSKIIH

SEQ ID NO: 31350 - protein, 213 aa, Homo sapiens
  REGION 1..213: note = ENSP00000413226
MYQVSGQRPSGCDAPYGAPSAAPGPAQTLSLLPGLEVVTGSTHPAEAAPEEGSLEEAATPMPQGNGPGIPQGLDSTDLDVPTEAVTCQPQGNPLGCTPLLPNDSGHPSELGGTRRAGNGALGGPKAHRKLQTHPSLASQGSKKSKSSSKSTTSQIPLQAQEDCCVHCILSCLFCEFLTLCNIVLDCATCGSCSSEDSCLCCCCCGSGECADCD

SEQ ID NO: 31351 - protein, 231 aa, Homo sapiens
  REGION 1..231: note = ENSP00000393881
MYQVSGQRPSGCDAPYGAPSAAPGPAQTLSLLPGLEVVTGSTHPAEAAPEEGSLEEAATPMPQGNGPGIPQGLDSTDLDVPTEAVTCQPQGNPLGCTPLLPNDSGHPSELGGTRRAGNGALGGPKAHRKLQTHPSLASQGSKKSKSSSKSTTSQIPLQAQEDCCVHCILSCLFCEFLTLCNIVLDCATCGSCSSEDSCLCCCCCGSGECADCDLPCDLDCGILDACCESAD

SEQ ID NO: 31352 - protein, 246 aa, Homo sapiens
  REGION 1..246: note = ENSP00000362142
MYQVSGQRPSGCDAPYGAPSAAPGPAQTLSLLPGLEVVTGSTHPAEAAPEEGSLEEAATPMPQGNGPGIPQGLDSTDLDVPTEAVTCQPQGNPLGCTPLLPNDSGHPSELGGTRRAGNGALGGPKAHRKLQTHPSLASQGSKKSKSSSKSTTSQIPLQAQEDCCVHCILSCLFCEFLTLCNIVLDCATCGSCSSEDSCLCCCCCGSGECADCDLPCDLDCGILDACCESADCLEICMECCGLCFSS

SEQ ID NO: 31353 - protein, 98 aa, Homo sapiens
  REGION 1..98: note = ENSP00000406600
MYQVSGQRPSGCDAPYGAPSAAPGPAQTLSLLPGLEVVTGSTHPAEAAPEEGSLEEAATPMPQGNGPGIPQGLDSTDLDVPTEAVTCQPQGNPLGCTP

SEQ ID NO: 31354 - protein, 246 aa, Homo sapiens; identical to SEQ ID NO: 31352
  REGION 1..246: note = ENSP00000230321

SEQ ID NO: 31355 - protein, 185 aa, Homo sapiens
  REGION 1..185: note = ENSP00000362141
MYQVSGQRPSGCDAPYGAPSAAPGPGQPQGNPLGCTPLLPNDSGHPSELGGTRRAGNGALGGPKAHRKLQTHPSLASQGSKKSKSSSKSTTSQIPLQAQEDCCVHCILSCLFCEFLTLCNIVLDCATCGSCSSEDSCLCCCCCGSGECADCDLPCDLDCGILDACCESADCLEICMECCGLCFSS

SEQ ID NO: 31356 - protein, 128 aa, Homo sapiens
  REGION 1..128: note = ENSP00000411829
MYQVSGQRPSGCDAPYGAPSAAPGPAQTLSLLPGLEVVTGSTHPAEAAPEEGSLEEAATPMPQGNGPGIPQGLDSTDLDVPTEAVTCQPQGNPLGCTPLLPNDSGHPSELGGTRRAGNGALGGPKAHR

SEQ ID NO: 31357 - protein, 142 aa, Homo sapiens
  REGION 1..142: note = ENSP00000403587
MYQVSGQRPSGCDAPYGAPSAAPGPGQPQGNPLGCTPLLPNDSGHPSELGGTRRAGNGALGGPKAHRKLQTHPSLASQGSKKSKSSSKSTTSQIPLQAQEDCCVHCILSCLFCEFLTLCNIVLDCATCGSCSSEDSCLCCCC

SEQ ID NO: 31358 - protein, 955 aa, Homo sapiens
  REGION 1..955: note = ENSP00000402584
MEVTCLLLLALIPFHCRGQGVYAPAQAQIVHAGQACVVKEDNISERVYTIREGDTLMLQCLVTGHPRPQVRWTKTAGSASDKFQETSVFNETLRIERIARTQGGRYYCKAENGVGVPAIKSIRVDVQYLDEPMLTVHQTVSDVRGNFYQEKTVFLRCTVNSNPPARFIWKRGSDTLSHSQDNGVDIYEPLYTQGETKVLKLKNLRPQDYASYTCQVSVRNVCGIPDKAITFRLTNTTAPPALKLSVNETLVVNPGENVTVQCLLTGGDPLPQLQWSHGPGPLPLGALAQGGTLSIPSVQARDSGYYNCTATNNVGNPAKKTVNLLVRSMKNATFQITPDVIKESENIQLGQDLKLSCHVDAVPQEKVTYQWFKNGKPARMSKRLLVTRNDPELPAVTSSLELIDLHFSDYGTYLCMASFPGAPVPDLSVEVNISSETVPPTISVPKGRAVVTVREGSPAELQCEVRGKPRPPVLWSRVDKEAALLPSGLPLEETPDGKLRLERVSRDMSGTYRCQTARYNGFNVRPREAQVQLNVQFPPEVEPSSQDVRQALGRPVLLRCSLLRGSPQRIASAVWRFKGQLLPPPPVVPAAAEAPDHAELRLDAVTRDSSGSYECSVSNDVGSAACLFQVSAKAYSPEFYFDTPNPTRSHKLSKNYSYVLQWTQREPDAVDPVLNYRLSIRQLNQHNAVVKAIPVRRVEKGQLLEYILTDLRVPHSYEVRLTPYTTFGAGDMASRIIHYTEPINSPNLSDNTCHFEDEKICGYTQDLTDNFDWTRQNALTQNPKRSPNTGPPTDISGTPEGYYMFIETSRPRELGDRARLVSPLYNASAKFYCVSFFYHMYGKHIGSLNLLVRSRNKGALDTHAWSLSGNKGNVWQQAHVPISPSGPFQIIFEGVRGPGYLGDIAIDDVTLKKGECPRKQTDPNKVVVMPGSGAPCQSSPQLWGPMAIFLLALQR

SEQ ID NO: 31359 - protein, 973 aa, Homo sapiens
  REGION 1..973: note = ENSP00000422042
MEVTCLLLLALIPFHCRGQGVYAPAQAQIVHAGQACVVKEDNISERVYTIREGDTLMLQCLVTGHPRPQVRWTKTAGSASDKFQETSVFNETLRIERIARTQGGRYYCKAENGVGVPAIKSIRVDVQYLDEPMLTVHQTVSDVRGNFYQEKTVFLRCTVNSNPPARFIWKRGSDTLSHSQDNGVDIYEPLYTQGETKVLKLKNLRPQDYASYTCQVSVRNVCGIPDKAITFRLTNTTAPPALKLSVNETLVVNPGENVTVQCLLTGGDPLPQLQWSHGPGPLPLGALAQGGTLSIPSVQARDSGYYNCTATNNVGNPAKKTVNLLVRSMKNATFQITPDVIKESENIQLGQDLKLSCHVDAVPQEKVTYQWFKNGKPARMSKRLLVTRNDPELPAVTSSLELIDLHFSDYGTYLCMASFPGAPVPDLSVEVNISSETVPPTISVPKGRAVVTVREGSPAELQCEVRGKPRPPVLWSRVDKEAALLPSGLPLEETPDGKLRLERVSRDMSGTYRCQTARYNGFNVRPREAQVQLNVQFPPEVEPSSQDVRQALGRPVLLRCSLLRGSPQRIASAVWRFKGQLLPPPPVVPAAAEAPDHAELRLDAVTRDSSGSYECSVSNDVGSAACLFQVSAKAYSPEFYFDTPNPTRSHKLSKNYSYVLQWTQREPDAVDPVLNYRLSIRQLNQHNAVVKAIPVRRVEKGQLLEYILTDLRVPHSYEVRLTPYTTFGAGDMASRIIHYTEPINSPNLSDNTCHFEDEKICGYTQDLTDNFDWTRQNALTQNPKRSPNTGPPTDISGTPEGYYMFIETSRPRELGDRARLVSPLYNASAKFYCVSFFYHMYGKHIGSLNLLVRSRNKGALDTHAWSLSGNKGNVWQQAHVPISPSGPFQIIFEGVRGPGYLGDIAIDDVTLKKGECPRKQTDPNKGARREGGGGAESGGSCAWRGFLSVEGGCLGLNRGSECLSDGNHVALTV

SEQ ID NO: 31360 - protein, 159 aa, Homo sapiens
  REGION 1..159: note = ENSP00000393330
  VARIANT 1: note = Any amino acid
XNQHNAVVKAIPVRRVEKGQLLEYILTDLRVPHSYEVRLTPYTTFGAGDMASRIIHYTEHNTCHFEDEKICGYTQDLTDNFDWTRQNALTQNPKRSPNTGPPTDISGTPEGYYMFIETSRPRELGDRARLVSPLYNASAKFYCVSFFYHMYGKHIGSLN

SEQ ID NO: 31361 - protein, 87 aa, Homo sapiens
  REGION 1..87: note = ENSP00000425911
  VARIANT 1: note = Any amino acid
XHKLSKNYSYVLQWTQREPDAVDPVLNYRLSIRQLNQHNAVVKAIPVRRVEKGQLLEYILTDLRVPHSYETTPATLRMRRSVAIPRT

SEQ ID NO: 31362 - protein, 129 aa, Homo sapiens
  REGION 1..129: note = ENSP00000421510
MLQCLVTGHPRPQVRWTKTAGSASDKFQETSVFNETLRIERIARTQGGRYYCKAENGVGVPAIKSIRVDVQYLDEPMLTVHQTVSDVRGNFYQEKTVFLRCTVNSNPPARFIWKRGSDTLSHSQDNGVD

SEQ ID NO: 31363 - protein, 77 aa, Homo sapiens
  REGION 1..77: note = ENSP00000427645
MLQCLVTGHPRPQVRWTKTAGSASDKFQETSVFNETLRIERIARTQGGRYYCKAENGVGVPAIKSIRVDVQYLDEPM

SEQ ID NO: 31364 - protein, 1025 aa, Homo sapiens
  REGION 1..1025: note = ENSP00000382178
MSVWSAGLLRSARRRRRGRTDGRRFLLRRAVPGHLGLARARVERAWLAAGLLKVPLRTPWAGYVHVHVKMDLLYGLVWLLTVLLEGISGQGVYAPPTVRIVHSGLACNIEEERYSERVYTIREGETLELTCLVTGHPRPQIRWTKTAGSASDRFQDSSVFNETLRITNIQRHQGGRYYCKAENGLGSPAIKSIRVDVYYLDDPVVTVHQSIGEAKEQFYYERTVFLRCVANSNPPVRYSWRRGQEVLLQGSDKGVEIYEPFFTQGETKILKLKNLRPQDYANYSCIASVRNVCNIPDKMVSFRLSNKTASPSIKLLVDDPIVVNPGEAITLVCVTTGGEPAPSLTWVRSFGTLPEKTVLNGGTLTIPAITSDDAGTYSCIANNNVGNPAKKSTNIIVRALKKGRFWITPDPYHKDDNIQIGREVKISCQVEAVPSEELTFSWFKNGRPLRSSERMVITQTDPDVSPGTTNLDIIDLKFTDFGTYTCVASLKGGGISDISIDVNISSSTVPPNLTVPQEKSPLVTREGDTIELQCQVTGKPKPIILWSRADKEVAMPDGSMQMESYDGTLRIVNVSREMSGMYRCQTSQYNGFNVKPREALVQLIVQYPPAVEPAFLEIRQGQDRSVTMSCRVLRAYPIRVLTYEWRLGNKLLRTGQFDSQEYTEYAVKSLSNENYGVYNCSIINEAGAGRCSFLVTGKAYAPEFYYDTYNPVWQNRHRVYSYSLQWTQMNPDAVDRIVAYRLGIRQAGQQRWWEQEIKINGNIQKGELITYNLTELIKPEAYEVRLTPLTKFGEGDSTIRVIKYSAPVNPHLREFHCGFEDGNICLFTQDDTDNFDWTKQSTATRNTKYTPNTGPNADRSGSKEGFYMYIETSRPRLEGEKARLLSPVFSIAPKNPYGPTNTAYCFSFFYHMYGQHIGVLNVYLRLKGQTTIENPLWSSSGNKGQRWNEAHVNIYPITSFQLIFEGIRGPGIEGDIAIDDVSIAEGECAKQDLATKNSVDGAVGILVHIWLFPIIVLISILSPRR

SEQ ID NO: 31365 - protein, 727 aa, Homo sapiens
  REGION 1..727: note = ENSP00000349925
MVSFRLSNKTASPSIKLLVDDPIVVNPGEAITLVCVTTGGEPAPSLTWVRSFGTLPEKTVLNGGTLTIPAITSDDAGTYSCIANNNVGNPAKKSTNIIVRALKKGRFWITPDPYHKDDNIQIGREVKISCQVEAVPSEELTFSWFKNGRPLRSSERMVITQTDPDVSPGTTNLDIIDLKFTDFGTYTCVASLKGGGISDISIDVNISSSTVPPNLTVPQEKSPLVTREGDTIELQCQVTGKPKPIILWSRADKEVAMPDGSMQMESYDGTLRIVNVSREMSGMYRCQTSQYNGFNVKPREALVQLIVQYPPAVEPAFLEIRQGQDRSVTMSCRVLRAYPIRVLTYEWRLGNKLLRTGQFDSQEYTEYAVKSLSNENYGVYNCSIINEAGAGRCSFLVTGKAYAPEFYYDTYNPVWQNRHRVYSYSLQWTQMNPDAVDRIVAYRLGIRQAGQQRWWEQEIKINGNIQKGELITYNLTELIKPEAYEVRLTPLTKFGEGDSTIRVIKYSAPVNPHLREFHCGFEDGNICLFTQDDTDNFDWTKQSTATRNTKYTPNTGPNADRSGSKEGFYMYIETSRPRLEGEKARLLSPVFSIAPKNPYGPTNTAYCFSFFYHMYGQHIGVLNVYLRLKGQTTIENPLWSSSGNKGQRWNEAHVNIYPITSFQLIFEGIRGPGIEGDIAIDDVSIAEGECAKQDLATKNSVDGAVGILVHIWLFPIIVLISILSPRR

SEQ ID NO: 31366 - protein, 233 aa, Homo sapiens
  REGION 1..233: note = ENSP00000452593
MVSFRLSNKTASPSIKLLVDDPIVVNPGEAITLVCVTTGGEPAPSLTWVRSFGTLPEKTVLNGGTLTIPAITSDDAGTYSCIANNNVGNPAKKSTNIIVRALKKGRFWITPDPYHKDDNIQIGREVKISCQVEAVPSEELTFSWFKNGRPLRSSERMVITQTDPDVSPGTTNLDIIDLKFTDFGTYTCVASLKGGGISDISIDVNISSSTGKITIGHQRRRHNRTAMSSNWQT

SEQ ID NO: 31367 - protein, 253 aa, Homo sapiens
  REGION 1..253: note = ENSP00000450827
  VARIANT 1: note = Any amino acid
XKILKLKNLRPQDYANYSCIASVRNVCNIPDKMVSFRLSNKTGGEPAPSLTWVRSFGTLPEKTVLNGGTLTIPAITSDDAGTYSCIANNNVGNPAKKSTNIIVRALKKGRFWITPDPYHKDDNIQIGREVKISCQVEAVPSEELTFSWFKNGRPLRSSERMVITQTDPDVSPGTTNLDIIDLKFTDFGTYTCVASLKGGGISDISIDVNISSSTVPPNLTVPQEKSPLVTREGDTIELQCQVTGKPKPIILWS

SEQ ID NO: 31368 - protein, 250 aa, Homo sapiens
  REGION 1..250: note = ENSP00000434991
MVSFRLSNKTASPSIKLLVDDPIVVNPGEAITLVCVTTGGEPAPSLTWVRSFGTLPEKTVLNGGTLTIPAITSDDAGTYSCIANNNVGNPAKKSTNIIVRALKKGRFWITPDPYHKDDNIQIGREVKISCQVEAVPSEELTFSWFKNGRPLRSSERMVITQTDPDVSPGTTNLDIIDLKFTDFGTYTCVASLKGGGISDISIDVNISSSTGNTIGDKRNILTSSKTLPLESTHLTTDRCGFSIEWKLYKV

SEQ ID NO: 31369 - protein, 142 aa, Homo sapiens
  REGION 1..142: note = ENSP00000452515
MFKYESLGICRRTHGSAACFSHSVADSPEVAFCQAKLPFLPPTTVTSEAPPTVRIVHSGLACNIEEERYSERVYTIREGETLELTCLVTGHPRPQIRWTKTAGSASDRFQDSSVFNETLRITNIQRHQGGRYYCKAENGLGS

SEQ ID NO: 31370 - protein, 956 aa, Homo sapiens
  REGION 1..956: note = ENSP00000405456
MDLLYGLVWLLTVLLEGISGQGVYAPPTVRIVHSGLACNIEEERYSERVYTIREGETLELTCLVTGHPRPQIRWTKTAGSASDRFQDSSVFNETLRITNIQRHQGGRYYCKAENGLGSPAIKSIRVDVYYLDDPVVTVHQSIGEAKEQFYYERTVFLRCVANSNPPVRYSWRRGQEVLLQGSDKGVEIYEPFFTQGETKILKLKNLRPQDYANYSCIASVRNVCNIPDKMVSFRLSNKTASPSIKLLVDDPIVVNPGEAITLVCVTTGGEPAPSLTWVRSFGTLPEKTVLNGGTLTIPAITSDDAGTYSCIANNNVGNPAKKSTNIIVRALKKGRFWITPDPYHKDDNIQIGREVKISCQVEAVPSEELTFSWFKNGRPLRSSERMVITQTDPDVSPGTTNLDIIDLKFTDFGTYTCVASLKGGGISDISIDVNISSSTVPPNLTVPQEKSPLVTREGDTIELQCQVTGKPKPIILWSRADKEVAMPDGSMQMESYDGTLRIVNVSREMSGMYRCQTSQYNGFNVKPREALVQLIVQYPPAVEPAFLEIRQGQDRSVTMSCRVLRAYPIRVLTYEWRLGNKLLRTGQFDSQEYTEYAVKSLSNENYGVYNCSIINEAGAGRCSFLVTGKAYAPEFYYDTYNPVWQNRHRVYSYSLQWTQMNPDAVDRIVAYRLGIRQAGQQRWWEQEIKINGNIQKGELITYNLTELIKPEAYEVRLTPLTKFGEGDSTIRVIKYSAPVNPHLREFHCGFEDGNICLFTQDDTDNFDWTKQSTATRNTKYTPNTGPNADRSGSKEGFYMYIETSRPRLEGEKARLLSPVFSIAPKNPYGPTNTAYCFSFFYHMYGQHIGVLNVYLRLKGQTTIENPLWSSSGNKGQRWNEAHVNIYPITSFQLIFEGIRGPGIEGDIAIDDVSIAEGECAKQDLATKNSVDGAVGILVHIWLFPIIVLISILSPRR

SEQ ID NO: 31371 - protein, 721 aa, Homo sapiens
  REGION 1..721: note = ENSP00000403308
MAAFGLLSYEQRPLKRPRLGPPDVYPQDPKQKEDELTAVNVKQGFNNQPAFTGDEHGSARNIVINPSKIGAYFSSILAEKLKLNTFQDTGKKKPQVNAKDNYWLVTARSQSAIHSWFSDLAGNKPLSILAKKVPILSKKEDVFAYLAKYSVPMVRATWLIKMTCAYYSAISEAKIKKRQAPDPNLEWTQISTRYLREQLAKISDFYHMASSTGDGPVPVPPEVEQAMKQWEYNEKLAFHMFQEGMLEKHEYLTWILDVLEKIRPMDDDLLKLLLPLMLQYSDEFVQSAYLSRRLAYFCARRLSLLLSDSPNLLAAHSPHMMIGPNNSSIGAPSPGPPGPGMSPVQLAFSDFLSCAQHGPLVYGLSCMLQTVTLCCPSALVWNYSTNENKSANPGSPLDLLQVAPSSLPMPGGNTAFNQQVRARIYEVEQQIKQRGRAVEVRWSFDKCQESTAGVTISRVLHTLEVLDRHCFDRTDSSNSMETLYHKIFWANQNKDNQEVAPNDEAVVTLLCEWAVSCKRSGKHRAMAVAKLLEKRQAEIEAERCGESEVLDEKESISSSSLAGSSLPVFQNVLLRFLDTQAPSLSDPNSECEKVEFVNLVLLFCEFIRHDVFSHDAYMCTLISRGDLSVTASTRPRSPVGENADEHYSKDHDVKMEIFSPMPGESCENANTSLGRRMSVNCEKLVKREKPRELIFPSNYDLLRHLQYATHFPIPLVSHCFS

SEQ ID NO: 31372 - protein, 756 aa, Homo sapiens
  REGION 1..756: note = ENSP00000310760
MAAFGLLSYEQRPLKRPRLGPPDVYPQDPKQKEDELTAVNVKQGFNNQPAFTGDEHGSARNIVINPSKIGAYFSSILAEKLKLNTFQDTGKKKPQVNAKDNYWLVTARSQSAIHSWFSDLAGNKPLSILAKKVPILSKKEDVFAYLAKYSVPMVRATWLIKMTCAYYSAISEAKIKKRQAPDPNLEWTQISTRYLREQLAKISDFYHMASSTGDGPVPVPPEVEQAMKQWEYNEKLAFHMFQEGMLEKHEYLTWILDVLEKIRPMDDDLLKLLLPLMLQYSDEFVQSAYLSRRLAYFCARRLSLLLSDSPNLLAAHSPHMMIGPNNSSIGAPSPGPPGPGMSPVQLAFSDFLSCAQHGPLVYGLSCMLQTVTLCCPSALVWNYSTNENKSANPGSPLDLLQVAPSSLPMPGGNTAFNQQVRARIYEVEQQIKQRGRAVEVRWSFDKCQESTAGVTISRVLHTLEVLDRHCFDRTDSSNSMETLYHKIFWANQNKDNQEVAPNDEAVVTLLCEWAVSCKRSGKHRAMAVAKLLEKRQAEIEAERCGESEVLDEKESISSSSLAGSSLPVFQNVLLRFLDTQAPSLSDPNSECEKVEFVNLVLLFCEFIRHDVFSHDAYMCTLISRGDLSVTASTRPRSPVGENADEHYSKDHDVKMEEQSIMAHMGIDSGTTNIFDEVDKSDFKTDFGSEFPIFSPMPGESCENANTSLGRRMSVNCEKLVKREKPRELIFPSNYDLLRHLQYATHFPIPLVSHCFS

SEQ ID NO: 31373 - protein, 2145 aa, Homo sapiens
  REGION 1..2145: note = ENSP00000417235
MAAFGLLSYEQRPLKRPRLGPPDVYPQDPKQKEDELTAVNVKQGFNNQPAFTGDEHGSARNIVINPSKIGAYFSSILAEKLKLNTFQDTGKKKPQVNAKDNYWLVTARSQSAIHSWFSDLAGNKPLSILAKKVPILSKKEDVFAYLAKYSVPMVRATWLIKMTCAYYSAISEAKIKKRQAPDPNLEWTQISTRYLREQLAKISDFYHMASSTGDGPVPVPPEVEQAMKQWEYNEKLAFHMFQEGMLEKHEYLTWILDVLEKIRPMDDDLLKLLLPLMLQYSDEFVQSAYLSRRLAYFCARRLSLLLSDSPNLLAAHSPHMMIGPNNSSIGAPSPGPPGPGMSPVQLAFSDFLSCAQHGPLVYGLSCMLQTVTLCCPSALVWNYSTNENKSANPGSPLDLLQVAPSSLPMPGGNTAFNQQVRARIYEVEQQIKQRGRAVEVRWSFDKCQESTAGVTISRVLHTLEVLDRHCFDRTDSSNSMETLYHKIFWANQNKDNQEVAPNDEAVVTLLCEWAVSCKRSGKHRAMAVAKLLEKRQAEIEAERCGESEVLDEKESISSSSLAGSSLPVFQNVLLRFLDTQAPSLSDPNSECEKVEFVNLVLLFCEFIRHDVFSHDAYMCTLISRGDLSVTASTRPRSPVGENADEHYSKDHDVKMEIFSPMPGESCENANTSLGRRMSVNCEKLVKREKPRELIFPSNYDLLRHLQYATHFPIPLDESSSHECNQRTILLYGVGKERDEARHQLKKITKDILKILNKKSTTETGVGDEGQKARKNKQETFPTLETVFTKLQLLSYFDQHQVTSQISNNVLEQITSFASGTSYHLPLAHHIQLIFDLMEPALNINGLIDFAIQLLNELSVVEAELLLKSSSLAGSYTTGLCVCIVAVLRRYHSCLILNPDQTAQVFEGLCGVVKHVVNPSECSSPERCILAYLYDLYVSCSHLRSKFGDLFSSACSKVKQTIYNNVMPANSNLRWDPDFMMDFIENPSARSINYSMLGKILSDNAANRYSFVCNTLMNVCMGHQDAGRINDIANFSSELTACCTVLSSEWLGVLKALCCSSNHVWGFNDVLCTVDVSDLSFHDSLATFIAILIARQCFSLEDVVQHVALPSLLAAACGDADAEPGARMTCRLLLHLFRAPQACFLPQATGKPFPGIRSSCDRHLLAAAHNSIEVGAVFAVLKAIMMLGDAKIGNNSVSSLKNDDFTMRGLRCDGNADDIWTASQNPKSCGKSISIETANLREYARYVLRTICQQEWVGEHCLKEPERLCTDKELILDPVLSNMQAQKLLQLICYPHGIKECTEGDNLQRQHIKRILQNLEQWTLRQSWLELQLMIKQCLKDPGSGSVAEMNNLLDNIAKATIEVFQQSADLNNSSNSGMSLFNPNSIGSADTSSTRQNGIKTFLSSSERRGVWLVAPLIARLPTSVQGRVLKAAGEELEKGQHLGSSSKKERDRQKQKSMSLLSQQPFLSLVLTCLKGQDEQREGLLTSLQNQVNQILSNWREERYQDDIKARQMMHEALQLRLNLVGGMFDTVQRSTQWTTDWALLLLQIITSGTVDMHTNNELFTTVLDMLGVLINGTLASDLSNASPGGSEENKRAYMNLVKKLKKELGDKRSESIDKVRQLLPLPKQTCDVITCEPMGSLIDTKGNKIAGFDSIDKKQGLQVSTKQKVSPWDLFEGQKNPAPLSWAWFGTVRVDRRVIKYEEQHHLLLYHTHPMPKPRSYYLQPLPLPPEEEEEEPTSPVSQEPERKSAELSDQGKTTTDEEKKTKGRKRKTKSSSRVDEYPQSNIYRVPPNYSPISSQMMHHPQSTLWGYNLVGQPQQPGFFLQNQSLTPGGSRLDPAGSFVPTNTKQALSNMLQRRSGAMMQPPSLHAITSQQQLIQMKLLQQQQQQRLLRQAQTRPFQQGQPGDQAALFAAQARPSPQLPQYPGLQQAQTMPQGYTMYGTQMPLQQTSQQQAGSVVLSPSYNSRAYPAAHSNPVLMERLRQIQQQPSGYVQQQASPYLQPLTGSQRLNHQALQQSPLVGGGIDAVLTSAHPNLPSVPLPQDPMRPRQPQVRQQQRLLQMQQPQQPQPQQPPQPQQSSQSQSQTLGLQAMQPQQPLFPRQGLQQTQQQQQTAALVRQLQKQLSSNQPQQGVTPYGHPSHF

SEQ ID NO: 31374 - protein, 1809 aa, Homo sapiens
  REGION 1..1809: note = ENSP00000273432
MAAFGLLSYEQRPLKRPRLGPPDVYPQDPKQKEDELTAVNVKQGFNNQPAFTGDEHGSARNIVINPSKIGAYFSSILAEKLKLNTFQDTGKKKPQVNAKDNYWLVTARSQSAIHSWFSDLAGNKPLSILAKKVPILSKKEDVFAYLAKYSVPMVRATWLIKMTCAYYSAISEAKIKKRQAPDPNLEWTQISTRYLREQLAKISDFYHMASSTGDGPVPVPPEVEQAMKQWEYNEKLAFHMFQEGMLEKHEYLTWILDVLEKIRPMDDDLLKLLLPLMLQVRARIYEVEQQIKQRGRAVEVRWSFDKCQESTAGVTISRVLHTLEVLDRHCFDRTDSSNSMETLYHKIFWANQNKDNQEVAPNDEAVVTLLCEWAVSCKRSGKHRAMAVAKLLEKRQAEIEAERCGESEVLDEKESISSSSLAGSSLPVFQNVLLRFLDTQAPSLSDPNSECEKVEFVNLVLLFCEFIRHDVFSHDAYMCTLISRGDLSVTASTRPRSPVGENADEHYSKDHDVKMEIFSPMPGESCENANTSLGRRMSVNCEKLVKREKPRELIFPSNYDLLRHLQYATHFPIPLDESSSHECNQRTILLYGVGKERDEARHQLKKITKDILKILNKKSTTETGVGDEGQKARKNKQETFPTLETVFTKLQLLSYFDQHQVTSQISNNVLEQITSFASGTSYHLPLAHHIQLIFDLMEPALNINGLIDFAIQLLNELSVVEAELLLKSSSLAGSYTTGLCVCIVAVLRRYHSCLILNPDQTAQVFEGLCGVVKHVVNPSECSSPERCILAYLYDLYVSCSHLRSKFGDLFSSACSKVKQTIYNNVMPANSNLRWDPDFMMDFIENPSARSINYSMLGKILSDNAANRYSFVCNTLMNVCMGHQDAGRINDIANFSSELTACCTVLSSEWLGVLKALCCSSNHVWGFNDVLCTVDVSDLSFHDSLATFIAILIARQCFSLEDVVQHVALPSLLAAACGDADAEPGARMTCRLLLHLFRAPQACFLPQATGKPFPGIRSSCDRHLLAAAHNSIEVGAVFAVLKAIMMLGDAKIGNNSVSSLKNDDFTMRGLRCDGNADDIWTASQNPKSCGKSISIETANLREYARYVLRTICQQEWVGEHCLKEPERLCTDKELILDPVLSNMQAQKLLQLICYPHGIKECTEGDNLQRQHIKRILQNLEQWTLRQSWLELQLMIKQCLKDPGSGSVAEMNNLLDNIAKATIEVFQQSADLNNSSNSGMSLFNPNSIGSADTSSTRQNGIKTFLSSSERRGVWLVAPLIARLPTSVQGRVLKAAGEELEKGQHLGSSSKKERDRQKQKSMSLLSQQPFLSLVLTCLKGQDEQREGLLTSLQNQVNQILSNWREERYQDDIKARQMMHEALQLRLNLVGGMFDTVQRSTQWTTDWALLLLQIITSGTVDMHTNNELFTTVLDMLGVLINGTLASDLSNASPGGSEENKRAYMNLVKKLKKELGDKRSESIDKVRQLLPLPKQTCDVITCEPMGSLIDTKGNKIAGFDSIDKKQGLQVSTKQKVSPWDLFEGQKNPAPLSWAWFGTVRVDRRVIKYEEQHHLLLYHTHPMPKPRSYYLQPLPLPPEEEEEEPTSPVSQEPERKSAELSDQGKTTTDEEKKTKGRKRKTKSSSRVDEYPQSNIYRVPPNYSPISSQMMHHPQSTLWGYNLVGQPQQPGFFLQNQSLTPGGSRLDPAGSFVPTNTKQALSNMLQRRSGAMMQPPSLHAITSQQQLIQMKLLQQQQQQRLLRQAQTRPFQQFPRQGLQQTQQQQQTAALVRQLQKQLSSNQPQQGVTPYGHPSHF

SEQ ID NO: 31375 - protein, 74 aa, Homo sapiens
  REGION 1..74: note = ENSP00000417420
  VARIANT 1: note = Any amino acid
XDVKMEIFSPMPGESCENANTSLGRRMSVNCEKLVKREKPRELIFPSNYDLLRHLQYATHFPIPLVLMSVPPSV

SEQ ID NO: 31376 - protein, 473 aa, Homo sapiens
  REGION 1..473: note = ENSP00000421925
MGRKKIQITRIMDERNRQVTFTKRKFGLMKKAYELSVLCDCEIALIIFNSTNKLFQYASTDMDKVLLKYTEYNEPHESRTNSDIVETLRKKGLNGCDSPDPDADDSVGHSPESEDKYRKINEDIDLMISRQRLCAVPPPNFEMPVSIPVSSHNSLVYSNPVSSLGNPNLLPLAHPSLQRNSMSPGVTHRPPSAGNTGGLMGGDLTSGAGTSAGNGYGNPRNSPGLLVSPGNLNKNMQAKSPPPMNLGMNNRKPDLRVLIPPGSKNTMPSVSEDVDLLLNQRINNSQSAQSLATPVVSVATPTLPGQGMGGYPSAISTTYGTEYSLSSADLSSLSGFNTASALHLGSVTGWQQQHLHNMPPSALSQLGACTSTHLSQSSNLSLPSTQSLNIKSEPVSPPRDRTTTPSRYPQHTRHEAGRSPVDSLSSCSSSYDGSDREDHRNEFHSPIGLTRPSPDERESPSVKRMRLSEGWAT

SEQ ID NO: 31377 - protein, 483 aa, Homo sapiens
  REGION 1..483: note = ENSP00000340874
MGRKKIQITRIMDERNRQVTFTKRKFGLMKKAYELSVLCDCEIALIIFNSTNKLFQYASTDMDKVLLKYTEYNEPHESRTNSDIVETLRKKGLNGCDSPDPDADDSALNKKENKGCESPDPDSSYALTPRTEEKYKKINEEFDNMIKSHKIPAVPPPNFEMPVSIPVSSHNSLVYSNPVSSLGNPNLLPLAHPSLQRNSMSPGVTHRPPSAGNTGGLMGGDLTSGAGTSAGNGYGNPRNSPGLLVSPGNLNKNMQAKSPPPMNLGMNNRKPDLRVLIPPGSKNTMPSVNQRINNSQSAQSLATPVVSVATPTLPGQGMGGYPSAISTTYGTEYSLSSADLSSLSGFNTASALHLGSVTGWQQQHLHNMPPSALSQLGACTSTHLSQSSNLSLPSTQSLNIKSEPVSPPRDRTTTPSRYPQHTRHEAGRSPVDSLSSCSSSYDGSDREDHRNEFHSPIGLTRPSPDERESPSVKRMRLSEGWAT

SEQ ID NO: 31378 - protein, 463 aa, Homo sapiens
  REGION 1..463: note = ENSP00000389610
MGRKKIQITRIMDERNRQVTFTKRKFGLMKKAYELSVLCDCEIALIIFNSTNKLFQYASTDMDKVLLKYTEYNEPHESRTNSDIVEALNKKENKGCESPDPDSSYALTPRTEEKYKKINEEFDNMIKSHKIPAVPPPNFEMPVSIPVSSHNSLVYSNPVSSLGNPNLLPLAHPSLQRNSMSPGVTHRPPSAGNTGGLMGGDLTSGAGTSAGNGYGNPRNSPGLLVSPGNLNKNMQAKSPPPMNLGMNNRKPDLRVLIPPGSKNTMPSVNQRINNSQSAQSLATPVVSVATPTLPGQGMGGYPSAISTTYGTEYSLSSADLSSLSGFNTASALHLGSVTGWQQQHLHNMPPSALSQLGACTSTHLSQSSNLSLPSTQSLNIKSEPVSPPRDRTTTPSRYPQHTRHEAGRSPVDSLSSCSSSYDGSDREDHRNEFHSPIGLTRPSPDERESPSVKRMRLSEGWAT

SEQ ID NO: 31379 - protein, 462 aa, Homo sapiens
  REGION 1..462: note = ENSP00000490354
MGRKKIQITRIMDERNRQVTFTKRKFGLMKKAYELSVLCDCEIALIIFNSTNKLFQYASTDMDKVLLKYTEYNEPHESRTNSDIVETLRKKGLNGCDSPDPDADDSVGHSPESEDKYRKINEDIDLMISRQRLCAVPPPNFEMPVSIPVSSHNSLVYSNPVSSLGNPNLLPLAHPSLQRNSMSPGVTHRPPSAGGLMGGDLTSGAGTSAGNGYGNPRNSPGLLVSPGNLNKNMQAKSPPPMNLGMNNRKPDLRVLIPPGSKNTMPSVNQRINNSQSAQSLATPVVSVATPTLPGQGMGGYPSAISTTYGTEYSLSSADLSSLSGFNTASALHLGSVTGWQQQHLHNMPPSALSQLGACTSTHLSQSSNLSLPSTQSLNIKSEPVSPPRDRTTTPSRYPQHTRHEAGRSPVDSLSSCSSSYDGSDREDHRNEFHSPIGLTRPSPDERESPSVKRMRLSEGWAT

SEQ ID NO: 31380 - protein, 441 aa, Homo sapiens
  REGION 1..441: note = ENSP00000490630
MGRKKIQITRIMDERNRQVTFTKRKFGLMKKAYELSVLCDCEIALIIFNSTNKLFQYASTDMDKVLLKYTEYNEPHESRTNSDIVETLRKKGLNGCDSPDPDADDSVGHSPESEDKYRKINEDIDLMISRQRLCAVPPPNFEMPVSIPVSSHNSLVYSNPVSSLGNPNLLPLAHPSLQRNSMSPGVTHRPPSAGNTGGLMGGDLTSGAGTSAGNGYGNPRNSPGLLVSPGNLNKNMQAKSPPPMNLGMNNRKPDLRVLIPPGSKNTMPSVSEDVDLLLNQRINNSQSAQSLATPVVSVATPTLPGQGMGGYPSAISTTYGTEYSLSSADLSSLSGFNTASALHLGSVTGWQQQHLHNMPPSALSQLGDRTTTPSRYPQHTRHEAGRSPVDSLSSCSSSYDGSDREDHRNEFHSPIGLTRPSPDERESPSVKRMRLSEGWAT

SEQ ID NO: 31381 - protein, 463 aa, Homo sapiens; identical to SEQ ID NO: 31378
  REGION 1..463: note = ENSP00000487430

SEQ ID NO: 31382 - protein, 473 aa, Homo sapiens; identical to SEQ ID NO: 31376
  REGION 1..473: note = ENSP00000396219

SEQ ID NO: 31383 - protein, 471 aa, Homo sapiens
  REGION 1..471: note = ENSP00000487538
MGRKKIQITRIMDERNRQVTFTKRKFGLMKKAYELSVLCDCEIALIIFNSTNKLFQYASTDMDKVLLKYTEYNEPHESRTNSDIVEALNKKENKGCESPDPDSSYALTPRTEEKYKKINEEFDNMIKSHKIPAVPPPNFEMPVSIPVSSHNSLVYSNPVSSLGNPNLLPLAHPSLQRNSMSPGVTHRPPSAGNTGGLMGGDLTSGAGTSAGNGYGNPRNSPGLLVSPGNLNKNMQAKSPPPMNLGMNNRKPDLRVLIPPGSKNTMPSVSEDVDLLLNQRINNSQSAQSLATPVVSVATPTLPGQGMGGYPSAISTTYGTEYSLSSADLSSLSGFNTASALHLGSVTGWQQQHLHNMPPSALSQLGACTSTHLSQSSNLSLPSTQSLNIKSEPVSPPRDRTTTPSRYPQHTRHEAGRSPVDSLSSCSSSYDGSDREDHRNEFHSPIGLTRPSPDERESPSVKRMRLSEGWAT

SEQ ID NO: 31384 - protein, 441 aa, Homo sapiens; identical to SEQ ID NO: 31380
  REGION 1..441: note = ENSP00000426665

SEQ ID NO: 31385 - protein, 433 aa, Homo sapiens
  REGION 1..433: note = ENSP00000422390
MGRKKIQITRIMDERNRQVTFTKRKFGLMKKAYELSVLCDCEIALIIFNSTNKLFQYASTDMDKVLLKYTEYNEPHESRTNSDIVETLRKKGLNGCDSPDPDADDSVGHSPESEDKYRKINEDIDLMISRQRLCAVPPPNFEMPVSIPVSSHNSLVYSNPVSSLGNPNLLPLAHPSLQRNSMSPGVTHRPPSAGNTGGLMGGDLTSGAGTSAGNGYGNPRNSPGLLVSPGNLNKNMQAKSPPPMNLGMNNRKPDLRVLIPPGSKNTMPSVNQRINNSQSAQSLATPVVSVATPTLPGQGMGGYPSAISTTYGTEYSLSSADLSSLSGFNTASALHLGSVTGWQQQHLHNMPPSALSQLGDRTTTPSRYPQHTRHEAGRSPVDSLSSCSSSYDGSDREDHRNEFHSPIGLTRPSPDERESPSVKRMRLSEGWAT

SEQ ID NO: 31386 - protein, 399 aa, Homo sapiens
  REGION 1..399: note = ENSP00000425636
MGRKKIQITRIMDERNRQVTFTKRKFGLMKKAYELSVLCDCEIALIIFNSTNKLFQYASTDMDKVLLKYTEYNEPHESRTNSDIVETLRKKGLNGCDSPDPDADDSVGHSPESEDKYRKINEDIDLMISRQRLCAVPPPNFEMPVSIPVSSHNSLVYSNPVSSLGNPNLLPLAHPSLQRNSMSPGVTHRPPSAGNTGGLMGGDLTSGAGTSAGNGYGNPRNSPGLLVSPGNLNKNMQAKSPPPMNLGMNNRKPDLRVLIPPGSKNTMPSVSEDVDLLLNQRINNSQSAQSLATPVVSVATPTLPGQGMGGYPSAISTTYGTEYSLSSADLSSLSGFNTASALHLGSVTGWQQQHLHNMPPSALSQLGQNLFLLLETVPPPLRDTHNTRATRRGDLLLTA

SEQ ID NO: 31387 - protein, 441 aa, Homo sapiens; identical to SEQ ID NO: 31380
  REGION 1..441: note = ENSP00000490241

SEQ ID NO: 31388 - protein, 441 aa, Homo sapiens; identical to SEQ ID NO: 31380
  REGION 1..441: note = ENSP00000424606

SEQ ID NO: 31389 - protein, 465 aa, Homo sapiens
  REGION 1..465: note = ENSP00000486554
MGRKKIQITRIMDERNRQVTFTKRKFGLMKKAYELSVLCDCEIALIIFNSTNKLFQYASTDMDKVLLKYTEYNEPHESRTNSDIVETLRKKGLNGCDSPDPDADDSVGHSPESEDKYRKINEDIDLMISRQRLCAVPPPNFEMPVSIPVSSHNSLVYSNPVSSLGNPNLLPLAHPSLQRNSMSPGVTHRPPSAGNTGGLMGGDLTSGAGTSAGNGYGNPRNSPGLLVSPGNLNKNMQAKSPPPMNLGMNNRKPDLRVLIPPGSKNTMPSVNQRINNSQSAQSLATPVVSVATPTLPGQGMGGYPSAISTTYGTEYSLSSADLSSLSGFNTASALHLGSVTGWQQQHLHNMPPSALSQLGACTSTHLSQSSNLSLPSTQSLNIKSEPVSPPRDRTTTPSRYPQHTRHEAGRSPVDSLSSCSSSYDGSDREDHRNEFHSPIGLTRPSPDERESPSVKRMRLSEGWAT

SEQ ID NO: 31390 - protein, 473 aa, Homo sapiens; identical to SEQ ID NO: 31376
  REGION 1..473: note = ENSP00000490473

SEQ ID NO: 31391 - protein, 431 aa, Homo sapiens
  REGION 1..431: note = ENSP00000486490
MGRKKIQITRIMDERNRQVTFTKRKFGLMKKAYELSVLCDCEIALIIFNSTNKLFQYASTDMDKVLLKYTEYNEPHESRTNSDIVEALNKKENKGCESPDPDSSYALTPRTEEKYKKINEEFDNMIKSHKIPAVPPPNFEMPVSIPVSSHNSLVYSNPVSSLGNPNLLPLAHPSLQRNSMSPGVTHRPPSAGNTGGLMGGDLTSGAGTSAGNGYGNPRNSPGLLVSPGNLNKNMQAKSPPPMNLGMNNRKPDLRVLIPPGSKNTMPSVNQRINNSQSAQSLATPVVSVATPTLPGQGMGGYPSAISTTYGTEYSLSSADLSSLSGFNTASALHLGSVTGWQQQHLHNMPPSALSQLGDRTTTPSRYPQHTRHEAGRSPVDSLSSCSSSYDGSDREDHRNEFHSPIGLTRPSPDERESPSVKRMRLSEGWAT

SEQ ID NO: 31392 - protein, 465 aa, Homo sapiens; identical to SEQ ID NO: 31389
  REGION 1..465: note = ENSP00000423597

SEQ ID NO: 31393 - protein, 151 aa, Homo sapiens
  REGION 1..151: note = ENSP00000487157
AKSPPPMNLGMNNRKPDLRVLIPPGSKNTMPSVSEDVDLLLNQRINNSQSAQSLATPVVSVATPTLPGQGMGGYPSAISTTYGTEYSLSSADLSSLSGFNTASALHLGSVTGWQQQHLHNMPPSALSQLGPYHHPFEIPTTHAPRGGEISC

SEQ ID NO: 31394 - protein, 183 aa, Homo sapiens
  REGION 1..183: note = ENSP00000486932
GLMGGDLTSGAGTSAGNGYGNPRNSPGLLVSPGNLNKNMQAKSPPPMNLGMNNRKPDLRVLIPPGSKNTMPSVNQRINNSQSAQSLATPVVSVATPTLPGQGMGGYPSAISTTYGTEYSLSSADLSSLSGFNTASALHLGSVTGWQQQHLHNMPPSALSQLGPYHHPFEIPTTHAPRGGEISC

SEQ ID NO: 31395 - protein, 327 aa, Homo sapiens
  REGION 1..327: note = ENSP00000487437
MISRQRLCAVPPPNFEMPVSIPVSSHNSLVYSNPVSSLGNPNLLPLAHPSLQRNSMSPGVTHRPPSAGNTGGLMGGDLTSGAGTSAGNGYGNPRNSPGLLVSPGNLNKNMQAKSPPPMNLGMNNRKPDLRVLIPPGSKNTMPSVSEDVDLLLNQRINNSQSAQSLATPVVSVATPTLPGQGMGGYPSAISTTYGTEYSLSSADLSSLSGFNTASALHLGSVTGWQQQHLHNMPPSALSQLGLNIKSEPVSPPRDRTTTPSRYPQHTRHEAGRSPVDSLSSCSSSYDGSDREDHRNEFHSPIGLTRPSPDERESPSVKRMRLSEGWAT

SEQ ID NO: 31396 - protein, 393 aa, Homo sapiens
  REGION 1..393: note = ENSP00000487184
MGRKKIQITRIMDERNRQVTFTKRKFGLMKKAYELSVLCDCEIALIIFNSTNKLFQYASTDMDKVLLKYTEYNEPHESRTNSDIVEAVPPPNFEMPVSIPVSSHNSLVYSNPVSSLGNPNLLPLAHPSLQRNSMSPGVTHRPPSAGNTGGLMGGDLTSGAGTSAGNGYGNPRNSPGLLVSPGNLNKNMQAKSPPPMNLGMNNRKPDLRVLIPPGSKNTMPSVSEDVDLLLNQRINNSQSAQSLATPVVSVATPTLPGQGMGGYPSAISTTYGTEYSLSSADLSSLSGFNTASALHLGSVTGWQQQHLHNMPPSALSQLGDRTTTPSRYPQHTRHEAGRSPVDSLSSCSSSYDGSDREDHRNEFHSPIGLTRPSPDERESPSVKRMRLSEGWAT

SEQ ID NO: 31397 - protein, 417 aa, Homo sapiens
  REGION 1..417: note = ENSP00000487311
MGRKKIQITRIMDERNRQVTFTKRKFGLMKKAYELSVLCDCEIALIIFNSTNKLFQYASTDMDKVLLKYTEYNEPHESRTNSDIVEAVPPPNFEMPVSIPVSSHNSLVYSNPVSSLGNPNLLPLAHPSLQRNSMSPGVTHRPPSAGNTGGLMGGDLTSGAGTSAGNGYGNPRNSPGLLVSPGNLNKNMQAKSPPPMNLGMNNRKPDLRVLIPPGSKNTMPSVNQRINNSQSAQSLATPVVSVATPTLPGQGMGGYPSAISTTYGTEYSLSSADLSSLSGFNTASALHLGSVTGWQQQHLHNMPPSALSQLGACTSTHLSQSSNLSLPSTQSLNIKSEPVSPPRDRTTTPSRYPQHTRHEAGRSPVDSLSSCSSSYDGSDREDHRNEFHSPIGLTRPSPDERESPSVKRMRLSEGWAT

SEQ ID NO: 31398 - protein, 242 aa, Homo sapiens
  REGION 1..242: note = ENSP00000423826
MGRKKIQITRIMDERNRQVTFTKRKFGLMKKAYELSVLCDCEIALIIFNSTNKLFQYASTDMDKVLLKYTEYNEPHESRTNSDIVEALNKKENKGCESPDPDSSYALTPRTEEKYKKINEEFDNMIKSHKIPAVPPPNFEMPVSIPVSSHNSLVYSNPVSSLGNPNLLPLAHPSLQRNSMSPGVTHRPPSAGNTGGLMGGDLTSGAGTSAGNGYGNPRNSPGLLVSPGNLNKNMQAKSPPPM

SEQ ID NO: 31399 - protein, 227 aa, Homo sapiens
  REGION 1..227: note = ENSP00000423656
MGRKKIQITRIMDERNRQVTFTKRKFGLMKKAYELSVLCDCEIALIIFNSTNKLFQYASTDMDKVLLKYTEYNEPHESRTNSDIVEALNKKENKGCESPDPDSSYALTPRTEEKYKKINEEFDNMIKSHKIPAVPPPNFEMPVSIPVSSHNSLVYSNPVSSLGNPNLLPLAHPSLQRNSMSPGVTHRPPSAGNTGGLMGGDLTSGAGTSAGNGYGNPRNSPGLLVSP

SEQ ID NO: 31400 - protein, 205 aa, Homo sapiens
  REGION 1..205: note = ENSP00000485972
MGRKKIQITRIMDERNRQVTFTKRKFGLMKKAYELSVLCDCEIALIIFNSTNKLFQYASTDMDKVLLKYTEYNEPHESRTNSDIVEALNKKENKGCESPDPDSSYALTPRTEEKYKKINEEFDNMIKSHKIPAVPPPNFEMPVSIPVSSHNSLVYSNPVSSLGNPNLLPLAHPSLQRNSMSPGVTHRPPSAGNTGGLMGGDLTSG

SEQ ID NO: 31401 - protein, 194 aa, Homo sapiens
  REGION 1..194: note = ENSP00000427286
MGRKKIQITRIMDERNRQVTFTKRKFGLMKKAYELSVLCDCEIALIIFNSTNKLFQYASTDMDKVLLKYTEYNEPHESRTNSDIVETLRKKGLNGCDSPDPDADDSVGHSPESEDKYRKINEDIDLMISRQRLCAVPPPNFEMPVSIPVSSHNSLVYSNPVSSLGNPNLLPLAHPSLQRNSMSPGVTHRPPSAG

SEQ ID NO: 31402 - protein, 120 aa, Homo sapiens
  REGION 1..120: note = ENSP00000424331
MGRKKIQITRIMDERNRQVTFTKRKFGLMKKAYELSVLCDCEIALIIFNSTNKLFQYASTDMDKVLLKYTEYNEPHESRTNSDIVEALNKKENKGCESPDPDSSYALTPRTEEKYKKINE

SEQ ID NO: 31403 - protein, 129 aa, Homo sapiens
  REGION 1..129: note = ENSP00000427163
MGRKKIQITRIMDERNRQVTFTKRKFGLMKKAYELSVLCDCEIALIIFNSTNKLFQYASTDMDKVLLKYTEYNEPHESRTNSDIVETLRKKGLNGCDSPDPDADDSVGHSPESEDKYRKINEDIDLMIS

SEQ ID NO: 31404 - protein, 126 aa, Homo sapiens
  REGION 1..126: note = ENSP00000426442
MGRKKIQITRIMDERNRQVTFTKRKFGLMKKAYELSVLCDCEIALIIFNSTNKLFQYASTDMDKVLLKYTEYNEPHESRTNSDIVETLRKKGLNGCDSPDPDADDSVGHSPESEDKYRKINEDIDL

SEQ ID NO: 31405 - protein, 123 aa, Homo sapiens
  REGION 1..123: note = ENSP00000489865
MGRKKIQITRIMDERNRQVTFTKRKFGLMKKAYELSVLCDCEIALIIFNSTNKLFQYASTDMDKVLLKYTEYNEPHESRTNSDIVETLRKKGLNGCDSPDPDADDSVGHSPESEDKYRKINED

SEQ ID NO: 31406 - protein, 87 aa, Homo sapiens
  REGION 1..87: note = ENSP00000426465
MGRKKIQITRIMDERNRQVTFTKRKFGLMKKAYELSVLCDCEIALIIFNSTNKLFQYASTDMDKVLLKYTEYNEPHESRTNSDIVET

SEQ ID NO: 31407 - protein, 42 aa, Homo sapiens
  REGION 1..42: note = ENSP00000490525
  VARIANT 1: note = Any amino acid
XRKKIQITRIMDERNRQLSYFERIGEVTFTKRKFGLMKKAYE

SEQ ID NO: 31408 - protein, 28 aa, Homo sapiens
  REGION 1..28: note = ENSP00000427309
MGRKKIQITRIMDERNRQVTFTKRKFGL

SEQ ID NO: 31409 - protein, 1140 aa, Homo sapiens
  REGION 1..1140: note = ENSP00000423354
MVISLNSCLSFICLLLCHWIGTASPLNLEDPNVCSHWESYSVTVQESYPHPFDQIYYTSCTDILNWFKCTRHRVSYRTAYRHGEKTMYRRKSQCCPGFYESGEMCVPHCADKCVHGRCIAPNTCQCEPGWGGTNCSSACDGDHWGPHCTSRCQCKNGALCNPITGACHCAAGFRGWRCEDRCEQGTYGNDCHQRCQCQNGATCDHVTGECRCPPGYTGAFCEDLCPPGKHGPQCEQRCPCQNGGVCHHVTGECSCPSGWMGTVCGQPCPEGRFGKNCSQECQCHNGGTCDAATGQCHCSPGYTGERCQDECPVGTYGVLCAETCQCVNGGKCYHVSGACLCEAGFAGERCEARLCPEGLYGIKCDKRCPCHLENTHSCHPMSGECACKPGWSGLYCNETCSPGFYGEACQQICSCQNGADCDSVTGKCTCAPGFKGIDCSTPCPLGTYGINCSSRCGCKNDAVCSPVDGSCTCKAGWHGVDCSIRCPSGTWGFGCNLTCQCLNGGACNTLDGTCTCAPGWRGEKCELPCQDGTYGLNCAERCDCSHADGCHPTTGHCRCLPGWSGVHCDSVCAEGRWGPNCSLPCYCKNGASCSPDDGICECAPGFRGTTCQRICSPGFYGHRCSQTCPQCVHSSGPCHHITGLCDCLPGFTGALCNEVCPSGRFGKNCAGICTCTNNGTCNPIDRSCQCYPGWIGSDCSQPCPPAHWGPNCIHTCNCHNGAFCSAYDGECKCTPGWTGLYCTQRCPLGFYGKDCALICQCQNGADCDHISGQCTCRTGFMGRHCEQKCPSGTYGYGCRQICDCLNNSTCDHITGTCYCSPGWKGARCDQAGVIIVGNLNSLSRTSTALPADSYQIGAIAGIIILVLVVLFLLALFIIYRHKQKGKESSMPAVTYTPAMRVVNADYTISGTLPHSNGGNANSHYFTNPSYHTLTQCATSPHVNNRDRMTVTKSKNNQLFVNLKNVNPGKRGPVGDCTGTLPADWKHGGYLNELGAFGLDRSYMGKSLKDLGKNSEYNSSNCSLSSSENPYATIKDPPVLIPKSSECGYVEMKSPARRDSPYAEINNSTSANRNVYEVEPTVSVVQGVFSNNGRLSQDPYDLPKNSHIPCHYDLLPVRDSSSSPKQEDSGGSSSNSSSSSE

SEQ ID NO: 31410 - protein, 567 aa, Homo sapiens
  REGION 1..567: note = ENSP00000423195
MVISLNSCLSFICLLLCHWIGTASPLNLEDPNVCSHWESYSVTVQESYPHPFDQIYYTSCTDILNWFKCTRHRVSYRTAYRHGEKTMYRRKSQCCPGFYESGEMCVPHCADKCVHGRCIAPNTCQCEPGWGGTNCSSACDGDHWGPHCTSRCQCKNGALCNPITGACHCAAGFRGWRCEDRCEQGTYGNDCHQRCQCQNGATCDHVTGECRCPPGYTGAFCEDLCPPGKHGPQCEQRCPCQNGGVCHHVTGECSCPSGWMGTVCGQPCPEGRFGKNCSQECQCHNGGTCDAATGQCHCSPGYTGERCQDECPVGTYGVLCAETCQCVNGGKCYHVSGACLCEAGFAGERCEARLCPEGLYGIKCDKRCPCHLENTHSCHPMSGECACKPGWSGLYCNETCSPGFYGEACQQICSCQNGADCDSVTGKCTCAPGFKGIDCSTPCPLGTYGINCSSRCGCKNDAVCSPVDGSCTCKAGWHGVDCSIRCPSGTWGFGCNLTCQCLNGGACNTLDGTCTCAPGWRGEKCELPCQDGTYGLNCAERCDCSHADGCHPTTGHCRCLPGWSGLF

SEQ ID NO: 31411 - protein, 567 aa, Homo sapiens; identical to SEQ ID NO: 31410
  REGION 1..567: note = ENSP00000416284

SEQ ID NO: 31412 - protein, 1140 aa, Homo sapiens; identical to SEQ ID NO: 31409
  REGION 1..1140: note = ENSP00000274473

SEQ ID NO: 31413 - protein, 1044 aa, Homo sapiens
  REGION 1..1044: note = ENSP00000386908
MVLSLTGLIAFSFLQATLALNPEDPNVCSHWESYAVTVQESYAHPFDQIYYTRCTDILNWFKCTRHRISYKTAYRRGLRTMYRRRSQCCPGYYESGDFCIPLCTEECVHGRCVSPDTCHCEPGWGGPDCSSGCDSDHWGPHCSNRCQCQNGALCNPITGACVCAAGFRGWRCEELCAPGTHGKGCQLPCQCRHGASCDPRAGECLCAPGYTGVYCEELCPPGSHGAHCELRCPCQNGGTCHHITGECACPPGWTGAVCAQPCPPGTFGQNCSQDCPCHHGGQCDHVTGQCHCTAGYMGDRCQEECPFGSFGFQCSQHCDCHNGGQCSPTTGACECEPGYKGPRCQERLCPEGLHGPGCTLPCPCDADNTISCHPVTGACTCQPGWSGHHCNESCPVGYYGDGCQLPCTCQNGADCHSITGGCTCAPGFMGEVCAVSCAAGTYGPNCSSICSCNNGGTCSPVDGSCTCKEGWQGLDCTLPCPSGTWGLNCNESCTCANGAACSPIDGSCSCTPGWLGDTCELPCPDGTFGLNCSEHCDCSHADGCDPVTGHCCCLAGWTGIRCDSTCPPGRWGPNCSVSCSCENGGSCSPEDGSCECAPGFRGPLCQRICPPGFYGHGCAQPCPLCVHSSRPCHHISGICECLPGFSGALCNQVCAGGYFGQDCAQLCSCANNGTCSPIDGSCQCFPGWIGKDCSQACPPGFWGPACFHACSCHNGASCSAEDGACHCTPGWTGLFCTQRCPAAFFGKDCGRVCQCQNGASCDHISGKCTCRTGFTGQHCEQRCAPGTFGYGCQQLCECMNNSTCDHVTGTCYCSPGFKGIRCDQAALMMEELNPYTKISPALGAERHSVGAVTGIMLLLFLIVVLLGLFAWHRRRQKEKGRDLAPRVSYTPAMRMTSTDYSLSGACGMDRRQNTYIMDKGFKDYMKESVCSSSTCSLNSSENPYATIKDPPILTCKLPESSYVEMKSPVHMGSPYTDVPSLSTSNKNIYEVEPTVSVVQEGCGHNSSYIQNAYDLPRNSHIPGHYDLLPVRQSPANGPSQDKQS

SEQ ID NO: 31414 - protein, 969 aa, Homo sapiens
  REGION 1..969: note = ENSP00000288745
MHTPSIRSITHDAQTSSTGSSAPGTALCTEECVHGRCVSPDTCHCEPGWGGPDCSSGCDSDHWGPHCSNRCQCQNGALCNPITGACVCAAGFRGWRCEELCAPGTHGKGCQLPCQCRHGASCDPRAGECLCAPGYTGVYCEELCPPGSHGAHCELRCPCQNGGTCHHITGECACPPGWTGAVCAQPCPPGTFGQNCSQDCPCHHGGQCDHVTGQCHCTAGYMGDRCQEECPFGSFGFQCSQHCDCHNGGQCSPTTGACECEPGYKGPRCQERLCPEGLHGPGCTLPCPCDADNTISCHPVTGACTCQPGWSGHHCNESCPVGYYGDGCQLPCTCQNGADCHSITGGCTCAPGFMGEVCAVSCAAGTYGPNCSSICSCNNGGTCSPVDGSCTCKEGWQGLDCTLPCPSGTWGLNCNESCTCANGAACSPIDGSCSCTPGWLGDTCELPCPDGTFGLNCSEHCDCSHADGCDPVTGHCCCLAGWTGIRCDSTCPPGRWGPNCSVSCSCENGGSCSPEDGSCECAPGFRGPLCQRICPPGFYGHGCAQPCPLCVHSSRPCHHISGICECLPGFSGALCNQVCAGGYFGQDCAQLCSCANNGTCSPIDGSCQCFPGWIGKDCSQACPPGFWGPACFHACSCHNGASCSAEDGACHCTPGWTGLFCTQRCPAAFFGKDCGRVCQCQNGASCDHISGKCTCRTGFTGQHCEQRCAPGTFGYGCQQLCECMNNSTCDHVTGTCYCSPGFKGIRCDQAALMMEELNPYTKISPALGAERHSVGAVTGIMLLLFLIVVLLGLFAWHRRRQKEKGRDLAPRVSYTPAMRMTSTDYSLSGACGMDRRQNTYIMDKGFKDYMKESVCSSSTCSLNSSENPYATIKDPPILTCKLPESSYVEMKSPVHMGSPYTDVPSLSTSNKNIYEVEPTVSVVQEGCGHNSSYIQNAYDLPRNSHIPGHYDLLPVRQSPANGPSQDKQS

SEQ ID NO: 31415 - protein, 1140 aa, Homo sapiens
  REGION 1..1140: note = ENSP00000378976
MVLSLTGLIAFSFLQATLALNPEDPNVCSHWESYAVTVQESYAHPFDQIYYTRCTDILNWFKCTRHRISYKTAYRRGLRTMYRRRSQCCPGYYESGDFCIPLCTEECVHGRCVSPDTCHCEPGWGGPDCSSGCDSDHWGPHCSNRCQCQNGALCNPITGACVCAAGFRGWRCEELCAPGTHGKGCQLPCQCRHGASCDPRAGECLCAPGYTGVYCEELCPPGSHGAHCELRCPCQNGGTCHHITGECACPPGWTGAVCAQPCPPGTFGQNCSQDCPCHHGGQCDHVTGQCHCTAGYMGDRCQEECPFGSFGFQCSQHCDCHNGGQCSPTTGACECEPGYKGPRCQERLCPEGLHGPGCTLPCPCDADNTISCHPVTGACTCQPGWSGHHCNESCPVGYYGDGCQLPCTCQNGADCHSITGGCTCAPGFMGEVCAVSCAAGTYGPNCSSICSCNNGGTCSPVDGSCTCKEGWQGLDCTLPCPSGTWGLNCNESCTCANGAACSPIDGSCSCTPGWLGDTCELPCPDGTFGLNCSEHCDCSHADGCDPVTGHCCCLAGWTGIRCDSTCPPGRWGPNCSVSCSCENGGSCSPEDGSCECAPGFRGPLCQRICPPGFYGHGCAQPCPLCVHSSRPCHHISGICECLPGFSGALCNQVCAGGYFGQDCAQLCSCANNGTCSPIDGSCQCFPGWIGKDCSQACPPGFWGPACFHACSCHNGASCSAEDGACHCTPGWTGLFCTQRCPAAFFGKDCGRVCQCQNGASCDHISGKCTCRTGFTGQHCEQRCAPGTFGYGCQQLCECMNNSTCDHVTGTCYCSPGFKGIRCDQAALMMEELNPYTKISPALGAERHSVGAVTGIMLLLFLIVVLLGLFAWHRRRQKEKGRDLAPRVSYTPAMRMTSTDYSLSDLSQSSSHAHCFSNSSYHALACGGPATSQASTLDRNSPTKLSNKSLDRDTAGWTPYSYVNVLDSHFQISALEARYPPEDFYIELRHLSRPAEPHSPGACGMDRRQNTYIMDKGFKDYMKESVCSSSTCSLNSSENPYATIKDPPILTCKLPESSYVEMKSPVHMGSPYTDVPSLSTSNKNIYEVEPTVSVVQEGCGHNSSYIQNAYDLPRNSHIPGHYDLLPVRQSPANGPSQDKQS

SEQ ID NO: 31416 - protein, 579 aa, Homo sapiens
  REGION 1..579: note = ENSP00000456118
MGDRCQEECPFGSFGFQCSQHCDCHNGGQCSPTTGACECEPGYKGPRCQERLCPEGLHGPGCTLPCPCDADNTISCHPVTGACTCQPGWSGHHCNESCPVGYYGDGCQLPCTCQNGADCHSITGGCTCAPGFMGEVCAVSCAAGTYGPNCSSICSCNNGGTCSPVDGSCTCKEGWQGLDCTLPCPSGTWGLNCNESCTCANGAACSPIDGSCSCTPGWLGDTCELPCPDGTFGLNCSEHCDCSHADGCDPVTGHCCCLAGWTGIRCDSTCPPGRWGPNCSVSCSCENGGSCSPEDGSCECAPGFRGPLCQRICPPGFYGHGCAQPCPLCVHSSRPCHHISGICECLPGFSGALCNQVCAGGYFGQDCAQLCSCANNGTCSPIDGSCQCFPGWIGKDCSQACPPGFWGPACFHACSCHNGASCSAEDGACHCTPGWTGLFCTQRKPHLLASQPLRIPCCGLLATVGIVQTSREGGMQAAPGLVVPDSCPTRTEELCRGSSRPDWIQGIDKPKVLEGQGCKAAQQHFLGRTVGAYASVRMAPAVTTSVASAPAAQASPGNTVSRDVPQEPLAMGVSSYVSA

SEQ ID NO: 31417 - protein, 117 aa, Homo sapiens
  REGION 1..117: note = ENSP00000478311
  VARIANT 1: note = Any amino acid
XLSQSSSHAHCFSNSSYHALACGGPATSQASTLDRNSPTKLSNKSLDRDTAGWTPYSYVNVLDSHFQISALEARYPPEDFYIELRHLSRPAEPHSPDKPWIQERTDRTRAERCLWNG

SEQ ID NO: 31418 - protein, 26 aa, Homo sapiens
  REGION 1..26: note = ENSP00000483007
  VARIANT 1: note = Any amino acid
XWTPYSYVNVLDQCPGGQVPARGLLH

SEQ ID NO: 31419 - protein, 30 aa, Homo sapiens
  REGION 1..30: note = ENSP00000477691
  VARIANT 1: note = Any amino acid
XCLPGFSGALCNQASKWQKQILIPTCMLKG

SEQ ID NO: 31420 - protein, 227 aa, Homo sapiens
  REGION 1..227: note = ENSP00000401400
MGDRCQEECPFGSFGFQCSQHCDCHNGGQCSPTTGACECEPGYKGPRCQERLCPEGLHGPGCTLPCPCDADNTISCHPVTGACTCQPGWSGHHCNESCPVGYYGDGCQLPCTCQNGADCHSITGGCTCAPGFMGEVCAVSCAAGTYGPNCSSICSCNNGGTCSPVDGSCTCKEGWQGLDCTLPCPSGTWGLNCNESCTCANGAACSPIDGSCSCTPGWLGDTCELPC

SEQ ID NO: 31421 - protein, 1044 aa, Homo sapiens; identical to SEQ ID NO: 31413
  REGION 1..1044: note = ENSP00000414475

SEQ ID NO: 31422 - protein, 621 aa, Homo sapiens
  REGION 1..621: note = ENSP00000480105
GAVCAQPCPPGTFGQNCSQDCPCHHGGQCDHVTGQCHCTAGYMGDRCQEECPFGSFGFQCSQHCDCHNGGQCSPTTGACECEPGYKGPRCQERLCPEGLHGPGCTLPCPCDADNTISCHPVTGACTCQPGWSGHHCNESCPVGYYGDGCQLPCTCQNGADCHSITGGCTCAPGFMGEVCAVSCAAGTYGPNCSSICSCNNGGTCSPVDGSCTCKEGWQGLDCTLPCPSGTWGLNCNESCTCANGAACSPIDGSCSCTPGWLGDTCELPCPDGTFGLNCSEHCDCSHADGCDPVTGHCCCLAGWTGIRCDSTCPPGRWGPNCSVSCSCENGGSCSPEDGSCECAPGFRGPLCQRICPPGFYGHGCAQPCPLCVHSSRPCHHISGICECLPGFSGALCNQVCAGGYFGQDCAQLCSCANNGTCSPIDGSCQCFPGWIGKDCSQACPPGFWGPACFHACSCHNGASCSAEDGACHCTPGWTGLFCTQRKPHLLASQPLRIPCCGLLATVGIVQTSREGGMQAAPGLVVPDSCPTRTEELCRGSSRPDWIQGIDKPKVLEGQGCKAAQQHFLGRTVGAYASVRMAPAVTTSVASAPAAQASPGNTVSRDVPQEPLAMGVSSYVSA

SEQ ID NO: 31423 - protein, 828 aa, Homo sapiens
  REGION 1..828: note = ENSP00000478094
MHTPSIRSITHDAQTSSTGSSAPGTALCTEECVHGRCVSPDTCHCEPGWGGPDCSSGCDSDHWGPHCSNRCQCQNGALCNPITGACVCAAGFRGWRCEELCAPGTHGKGCQLPCQCRHGASCDPRAGECLCAPGYTGVYCEELCPPGSHGAHCELRCPCQNGGTCHHITGECACPPGWTGAVCAQPCPPGTFGQNCSQDCPCHHGGQCDHVTGQCHCTAGYMGDRCQEECPFGSFGFQCSQHCDCHNGGQCSPTTGACECEPGYKGPRCQERLCPEGLHGPGCTLPCPCDADNTISCHPVTGACTCQPGWSGHHCNESCPVGYYGDGCQLPCTCQNGADCHSITGGCTCAPGFMGEVCAVSCAAGTYGPNCSSICSCNNGGTCSPVDGSCTCKEGWQGLDCTLPCPSGTWGLNCNESCTCANGAACSPIDGSCSCTPGWLGDTCELPCPDGTFGLNCSEHCDCSHADGCDPVTGHCCCLAGWTGIRCDSTCPPGRWGPNCSVSCSCENGGSCSPEDGSCECAPGFRGPLCQRICPPGFYGHGCAQPCPLCVHSSRPCHHISGICECLPGFSGALCNQVCAGGYFGQDCAQLCSCANNGTCSPIDGSCQCFPGWIGKDCSQACPPGFWGPACFHACSCHNGASCSAEDGACHCTPGWTGLFCTQRCPAAFFGKDCGRVCQCQNGASCDHISGKCTCRTGFTGQHCEQRCAPGTFGYGCQQLCECMNNSTCDHVTGTCYCSPGFKGIRCDQAALMMEELNPYTKISPALGAERHSVGAVTGIMLLLFLIVVLLGLFAWHRRRQKEKGRDLAPRVSYTPAMRMTSTDYSLS

SEQ ID NO: 31424 - protein, 903 aa, Homo sapiens
  REGION 1..903: note = ENSP00000480614
MVLSLTGLIAFSFLQATLALNPEDPNVCSHWESYAVTVQESYAHPFDQIYYTRCTDILNWFKCTRHRISYKTAYRRGLRTMYRRRSQCCPGYYESGDFCIPLCTEECVHGRCVSPDTCHCEPGWGGPDCSSGCDSDHWGPHCSNRCQCQNGALCNPITGACVCAAGFRGWRCEELCAPGTHGKGCQLPCQCRHGASCDPRAGECLCAPGYTGVYCEELCPPGSHGAHCELRCPCQNGGTCHHITGECACPPGWTGAVCAQPCPPGTFGQNCSQDCPCHHGGQCDHVTGQCHCTAGYMGDRCQEECPFGSFGFQCSQHCDCHNGGQCSPTTGACECEPGYKGPRCQERLCPEGLHGPGCTLPCPCDADNTISCHPVTGACTCQPGWSGHHCNESCPVGYYGDGCQLPCTCQNGADCHSITGGCTCAPGFMGEVCAVSCAAGTYGPNCSSICSCNNGGTCSPVDGSCTCKEGWQGLDCTLPCPSGTWGLNCNESCTCANGAACSPIDGSCSCTPGWLGDTCELPCPDGTFGLNCSEHCDCSHADGCDPVTGHCCCLAGWTGIRCDSTCPPGRWGPNCSVSCSCENGGSCSPEDGSCECAPGFRGPLCQRICPPGFYGHGCAQPCPLCVHSSRPCHHISGICECLPGFSGALCNQVCAGGYFGQDCAQLCSCANNGTCSPIDGSCQCFPGWIGKDCSQACPPGFWGPACFHACSCHNGASCSAEDGACHCTPGWTGLFCTQRCPAAFFGKDCGRVCQCQNGASCDHISGKCTCRTGFTGQHCEQRCAPGTFGYGCQQLCECMNNSTCDHVTGTCYCSPGFKGIRCDQAALMMEELNPYTKISPALGAERHSVGAVTGIMLLLFLIVVLLGLFAWHRRRQKEKGRDLAPRVSYTPAMRMTSTDYSLS

SEQ ID NO: 31425 - protein, 30 aa, Homo sapiens; identical to SEQ ID NO: 31419
  REGION 1..30: note = ENSP00000488336
  VARIANT 1: note = Any amino acid

SEQ ID NO: 31426 - protein, 385 aa, Homo sapiens
  REGION 1..385: note = ENSP00000473370
MDVQKWYLRTSKLALALAIIRSKPADKSSREYTEHLAMLLSEEQSKWRSKVEILEAEVMQLRQKLLVSRLCSGSFKSGYVSSQLEAQEPKSSESTLTSMEDSGCDLSNEQRTESSDLSQHFVESCTPTHFPPLPLVKRPCAILQNPLSSHMQFLQYLLELKNLTESGNLKRDLTHFEKDSSTVSDSVFQLLDGLITFYRNPKLPFSRFWTEAVGTLASLISDYNLSSHILKKCSKKLEEFEKTLLHAILGNNHINQFQVQHYVSQSLVTLGNCSLLRKSIISLLLSEVNGFADDLGAINQEQASYDVSRYENIFYLFWVLEQLLQKETEEGNTSSIGHDDQEIKKFLQKHDETIFQLSDAFPLFTFYLWRVGILLSSAQIETLRK

SEQ ID NO: 31427 - protein, 370 aa, Homo sapiens
  REGION 1..370: note = ENSP00000454209
MAQRYDDLPHYGGMDGVGIPSTMYGDPHAARSMQPVHHLNHGPPLHSHQYPHTAHTNAMAPSMGSSVNDALKRDKDAIYGHPLFPLLALIFEKCELATCTPREPGVAGGDVCSSESFNEDIAVFAKQIRAEKPLFSSNPELDNLMIQAIQVLRFHLLELEKVHELCDNFCHRYISCLKGKMPIDLVIDDREGGSKSDSEDITRSANLTDQPSWNRDHDDTASTRSGGTPGPSSGGHTSHSGDNSSEQGDGLDNSVASPSTGDDDDPDKDKKRHKKRGIFPKVATNIMRAWLFQHLTHPYPSEEQKKQLAQDTGLTILQVNNWFINARRRIVQPMIDQSNRAGKSPIVTVFKSRKRKPSSSHSPGGPLPGK

SEQ ID NO: 31428 - protein, 390 aa, Homo sapiens
  REGION 1..390: note = ENSP00000272369
MAQRYDDLPHYGGMDGVGIPSTMYGDPHAARSMQPVHHLNHGPPLHSHQYPHTAHTNAMAPSMGSSVNDALKRDKDAIYGHPLFPLLALIFEKCELATCTPREPGVAGGDVCSSESFNEDIAVFAKQIRAEKPLFSSNPELDNLMIQAIQVLRFHLLELEKVHELCDNFCHRYISCLKGKMPIDLVIDDREGGSKSDSEDITRSANLTDQPSWNRDHDDTASTRSGGTPGPSSGGHTSHSGDNSSEQGDGLDNSVASPSTGDDDDPDKDKKRHKKRGIFPKVATNIMRAWLFQHLTHPYPSEEQKKQLAQDTGLTILQVNNWFINARRRIVQPMIDQSNRAVSQGTPYNPDGQPMGGFVMDGQQHMGIRAPGPMSGMGMNMGMEGQWHYM

SEQ ID NO: 31429 - protein, 378 aa, Homo sapiens
  REGION 1..378: note = ENSP00000475161
MAQRYDDLPHYGGMDGVGIPSTMYGDPHAARSMQPVHHLNHGPPLHSHQYPHTAHTNAMAPSMGSSVNDALKRDKDAIYGHPLFPLLALIFEKCELATCTPREPGVAGGDVCSSESFNEDIAVFAKQIRAEKPLFSSNPELDNLMIQAIQVLRFHLLELEKVHELCDNFCHRYISCLKGKMPIDLVIDDREGGSKSDSEDITRSANLTDQPSWNRDHDDTASTRSGGTPGPSSGGHTSHSGDNSSEQGDGLDNSVASPSTGDDDDPDKDKKRHKKRGIFPKVATNIMRAWLFQHLTHPYPSEEQKKQLAQDTGLTILQVNNWFINARRRIVQPMIDQSNRAVSQGTPYNPDGQPMGGFVMDGQQHMGIRAPGKTLFLW

SEQ ID NO: 31430 - protein, 463 aa, Homo sapiens
  REGION 1..463: note = ENSP00000381518
MQYDDLPHYGGMDGVGIPSTMYGDPHAARSMQPVHHLNHGPPLHSHQYPHTAHTNAMAPSMGSSVNDALKRDKDAIYGHPLFPLLALIFEKCELATCTPREPGVAGGDVCSSESFNEDIAVFAKQIRAEKPLFSSNPELDNLMIQAIQVLRFHLLELEKVHELCDNFCHRYISCLKGKMPIDLVIDDREGGSKSDSEDITRSANLTDQPSWNRDHDDTASTRSGGTPGPSSGGHTSHSGDNSSEQGDGLDNSVASPSTGDDDDPDKDKKRHKKRGIFPKVATNIMRAWLFQHLTHPYPSEEQKKQLAQDTGLTILQVNNWFINARRRIVQPMIDQSNRAVSQGTPYNPDGQPMGGFVMDGQQHMGIRAPGLQSMPGEYVARGGPMGVSMGQPSYTQPQMPPHPAQLRHGPPMHTYIPGHPHHPTVMMHGGPPHPGMPMSASSPTVLNTGDPTMSGQVMDIHAQ

SEQ ID NO: 31431 - protein, 325 aa, Homo sapiens
  REGION 1..325: note = ENSP00000440571
MAQGLRLQGSRRKGRHPLFPLLALIFEKCELATCTPREPGVAGGDVCSSESFNEDIAVFAKQIRAEKPLFSSNPELDNLMIQAIQVLRFHLLELEKVHELCDNFCHRYISCLKGKMPIDLVIDDREGGSKSDSEDITRSANLTDQPSWNRDHDDTASTRSGGTPGPSSGGHTSHSGDNSSEQGDGLDNSVASPSTGDDDDPDKDKKRHKKRGIFPKVATNIMRAWLFQHLTHPYPSEEQKKQLAQDTGLTILQVNNWFINARRRIVQPMIDQSNRAVSQGTPYNPDGQPMGGFVMDGQQHMGIRAPGPMSGMGMNMGMEGQWHYM

SEQ ID NO: 31432 - protein, 121 aa, Homo sapiens
  REGION 1..121: note = ENSP00000397418
  VARIANT 1: note = Any amino acid
XLCFESPEISRPVFPCLQMIQAIQVLRFHLLELEKVHELCDNFCHRYISCLKGKMPIDLVIDDREGGSKSDSEDITRSANLTDQPSWNRDHDDTASTRSGGTPGPSSGGHTSHSGDNSSEQ

SEQ ID NO: 31433 - protein, 477 aa, Homo sapiens
  REGION 1..477: note = ENSP00000453793
MAQRYDELPHYGGMDGVGVPASMYGDPHAPRPIPPVHHLNHGPPLHATQHYGAHAPHPNVMPASMGSAVNDALKRDKDAIYGHPLFPLLALVFEKCELATCTPREPGVAGGDVCSSDSFNEDIAVFAKQVRAEKPLFSSNPELDNLMIQAIQVLRFHLLELEKVHELCDNFCHRYISCLKGKMPIDLVIDERDGSSKSDHEELSGSSTNLADHNPSSWRDHDDATSTHSAGTPGPSSGGHASQSGDNSSEQGDGLDNSVASPGTGDDDDPDKDKKRQKKRGIFPKVATNIMRAWLFQHLTHPYPSEEQKKQLAQDTGLTILQVNNWFINARRRIVQPMIDQSNRAGFLLDPSVSQGAAYSPEGQPMGSFVLDGQQHMGIRPAGLQSMPGDYVSQGGPMGMSMAQPSYTPPQMTPHPTQLRHGPPMHSYLPSHPHHPAMMMHGGPPTHPGMTMSAQSPTMLNSVDPNVGGQVMDIHAQ

SEQ ID NO: 31434 - protein, 470 aa, Homo sapiens
  REGION 1..470: note = ENSP00000341400
MAQRYDELPHYGGMDGVGVPASMYGDPHAPRPIPPVHHLNHGPPLHATQHYGAHAPHPNVMPASMGSAVNDALKRDKDAIYGHPLFPLLALVFEKCELATCTPREPGVAGGDVCSSDSFNEDIAVFAKQVRAEKPLFSSNPELDNLMIQAIQVLRFHLLELEKVHELCDNFCHRYISCLKGKMPIDLVIDERDGSSKSDHEELSGSSTNLADHNPSSWRDHDDATSTHSAGTPGPSSGGHASQSGDNSSEQGDGLDNSVASPGTGDDDDPDKDKKRQKKRGIFPKVATNIMRAWLFQHLTHPYPSEEQKKQLAQDTGLTILQVNNWFINARRRIVQPMIDQSNRAVSQGAAYSPEGQPMGSFVLDGQQHMGIRPAGLQSMPGDYVSQGGPMGMSMAQPSYTPPQMTPHPTQLRHGPPMHSYLPSHPHHPAMMMHGGPPTHPGMTMSAQSPTMLNSVDPNVGGQVMDIHAQ

SEQ ID NO: 31435 - protein, 306 aa, Homo sapiens
  REGION 1..306: note = ENSP00000380749
MALVFEKCELATCTPREPGVAGGDVCSSDSFNEDIAVFAKQVRAEKPLFSSNPELDNLMIQAIQVLRFHLLELEKVHELCDNFCHRYISCLKGKMPIDLVIDERDGSSKSDHEELSGSSTNLADHNPSSWRDHDDATSTHSAGTPGPSSGGHASQSGDNSSEQGDGLDNSVASPGTGDDDDPDKDKKRQKKRGIFPKVATNIMRAWLFQHLTHPYPSEEQKKQLAQDTGLTILQVNNWFINARRRIVQPMIDQSNRAVSQGAAYSPEGQPMGSFVLDGQQHMGIRPAGPMSGMGMNMGMDGQWHYM

SEQ ID NO: 31436 - protein, 302 aa, Homo sapiens
  REGION 1..302: note = ENSP00000326296
MAQRYDELPHYGGMDGVGVPASMYGDPHAPRPIPPVHHLNHGPPLHATQHYGAHAPHPNVMPASMGSAVNDALKRDKDAIYGHPLFPLLALVFEKCELATCTPREPGVAGGDVCSSDSFNEDIAVFAKQVRAEKPLFSSNPELDNLMIQAIQVLRFHLLELEKVHELCDNFCHRYISCLKGKMPIDLVIDERDGSSKSDHEELSGSSTNLADHNPSSWRDHDDATSTHSAGTPGPSSGGHASQSGDNSSEQGDGLDNSVASPGTGDDDDPDKDKKRQKKRGIFPKVATNIMRAWLFQHLTVY

SEQ ID NO: 31437 - protein, 388 aa, Homo sapiens
  REGION 1..388: note = ENSP00000453390
MDGVGVPASMYGDPHAPRPIPPVHHLNHGPPLHATQHYGAHAPHPNVMPASMGSAVNDALKRDKDAIYGHPLFPLLALVFEKCELATCTPREPGVAGGDVCSSDSFNEDIAVFAKQVRAEKPLFSSNPELDNLMIQAIQVLRFHLLELEKVHELCDNFCHRYISCLKGKMPIDLVIDERDGSSKSDHEELSGSSTNLADHNPSSWRDHDDATSTHSAGTPGPSSGGHASQSGDNSSEQGDGLDNSVASPGTGDDDDPDKDKKRQKKRGIFPKVATNIMRAWLFQHLTHPYPSEEQKKQLAQDTGLTILQVNNWFINARRRIVQPMIDQSNRAGFLLDPSVSQGAAYSPEGQPMGSFVLDGQQHMGIRPAGPMSGMGMNMGMDGQWHYM

SEQ ID NO: 31438 - protein, 98 aa, Homo sapiens
  REGION 1..98: note = ENSP00000453481
MAQRYDELPHYGGMDGVGVPASMYGDPHAPRPIPPVHHLNHGPPLHATQHYGAHAPHPNVMPASMGSAVNDALKRDKDAIYGFAPKSHFFPQIQSWTI

SEQ ID NO: 31439 - protein, 381 aa, Homo sapiens
  REGION 1..381: note = ENSP00000452693
MDGVGVPASMYGDPHAPRPIPPVHHLNHGPPLHATQHYGAHAPHPNVMPASMGSAVNDALKRDKDAIYGHPLFPLLALVFEKCELATCTPREPGVAGGDVCSSDSFNEDIAVFAKQVRAEKPLFSSNPELDNLMIQAIQVLRFHLLELEKVHELCDNFCHRYISCLKGKMPIDLVIDERDGSSKSDHEELSGSSTNLADHNPSSWRDHDDATSTHSAGTPGPSSGGHASQSGDNSSEQGDGLDNSVASPGTGDDDDPDKDKKRQKKRGIFPKVATNIMRAWLFQHLTHPYPSEEQKKQLAQDTGLTILQVNNWFINARRRIVQPMIDQSNRAVSQGAAYSPEGQPMGSFVLDGQQHMGIRPAGPMSGMGMNMGMDGQWHYM

SEQ ID NO: 31440 - protein, 306 aa, Homo sapiens; identical to SEQ ID NO: 31435
  REGION 1..306: note = ENSP00000380745

SEQ ID NO: 31441 - protein, 401 aa, Homo sapiens
  REGION 1..401: note = ENSP00000404185
MAQRYDELPHYGGMDGVGVPASMYGDPHAPRPIPPVHHLNHGPPLHATQHYGAHAPHPNVMPASMGSAVNDALKRDKDAIYGHPLFPLLALVFEKCELATCTPREPGVAGGDVCSSDSFNEDIAVFAKQVRAEKPLFSSNPELDNLMIQAIQVLRFHLLELEKVHELCDNFCHRYISCLKGKMPIDLVIDERDGSSKSDHEELSGSSTNLADHNPSSWRDHDDATSTHSAGTPGPSSGGHASQSGDNSSEQGDGLDNSVASPGTGDDDDPDKDKKRQKKRGIFPKVATNIMRAWLFQHLTHPYPSEEQKKQLAQDTGLTILQVNNWFINARRRIVQPMIDQSNRAGFLLDPSVSQGAAYSPEGQPMGSFVLDGQQHMGIRPAGPMSGMGMNMGMDGQWHYM

SEQ ID NO: 31442 - protein, 394 aa, Homo sapiens
  REGION 1..394: note = ENSP00000453497
MAQRYDELPHYGGMDGVGVPASMYGDPHAPRPIPPVHHLNHGPPLHATQHYGAHAPHPNVMPASMGSAVNDALKRDKDAIYGHPLFPLLALVFEKCELATCTPREPGVAGGDVCSSDSFNEDIAVFAKQVRAEKPLFSSNPELDNLMIQAIQVLRFHLLELEKVHELCDNFCHRYISCLKGKMPIDLVIDERDGSSKSDHEELSGSSTNLADHNPSSWRDHDDATSTHSAGTPGPSSGGHASQSGDNSSEQGDGLDNSVASPGTGDDDDPDKDKKRQKKRGIFPKVATNIMRAWLFQHLTHPYPSEEQKKQLAQDTGLTILQVNNWFINARRRIVQPMIDQSNRAVSQGAAYSPEGQPMGSFVLDGQQHMGIRPAGPMSGMGMNMGMDGQWHYM

SEQ ID NO: 31443 - protein, 235 aa, Homo sapiens
  REGION 1..235: note = ENSP00000475899
EGFRWMIQAIQVLRFHLLELEKVHELCDNFCHRYISCLKGKMPIDLVIDERDGSSKSDHEELSGSSTNLADHNPSSWRDHDDATSTHSAGTPGPSSGGHASQSGDNSSEQGDGLDNSVASPGTGDDDDPDKDKKRQKKRGIFPKVATNIMRAWLFQHLTHPYPSEEQKKQLAQDTGLTILQVNNWFINARRRIVQPMIDQSNRAVSQGAAYSPEGQPMGSFVLDGQQHMGIRPAG

SEQ ID NO: 31444 - protein, 139 aa, Homo sapiens
  REGION 1..139: note = ENSP00000475660
IQVLRFHLLELEKVHELCDNFCHRYISCLKGKMPIDLVIDERDGSSKSDHEELSGSSTNLADHNPSSWRDHDDATSTHSAGTPGPSSGGHASQSGDNSSEQEFFRFIPIFQMKWLGLGEGQLLDCHDRKRKQKNEDKAI

SEQ ID NO: 31445 - protein, 105 aa, Homo sapiens
  REGION 1..105: note = ENSP00000452874
MIQAIQVLRFHLLELEKVHELCDNFCHRYISCLKGKMPIDLVIDERDGSSKSDHEELSGSSTNLADHNPSSWRDHDDATSTHSAGTPGPSSGGHASQSGDNSSEQ

SEQ ID NO: 31446 - protein, 157 aa, Homo sapiens
  REGION 1..157: note = ENSP00000453782
MALVFEKCELATCTPREPGVAGGDVCSSDSFNEDIAVFAKQVRAEKPLFSSNPELDNLMIQAIQVLRFHLLELEKVHELCDNFCHRYISCLKGKMPIDLVIDERDGSSKSDHEELSGSSTNLADHNPSSWRDHDDATSTHSAGTPGPSSGGHASQSG

SEQ ID NO: 31447 - protein, 94 aa, Homo sapiens
  REGION 1..94: note = ENSP00000452770
MIQAIQVLRFHLLELEKVHELCDNFCHRYISCLKGKMPIDLVIDERDGSSKSDHEELSGSSTNLADHNPSSWRDHDDATSTHSAGTPGPSSGGH

SEQ ID NO: 31448 - protein, 381 aa, Homo sapiens; identical to SEQ ID NO: 31439
  REGION 1..381: note = ENSP00000339549

SEQ ID NO: 31449 - protein, 358 aa, Homo sapiens
  REGION 1..358: note = ENSP00000388667
MARRYDELPHYPGIVDGPAALASFPETVPAVPGPYGPHRPPQPLPPGLDSDGLKREKDEIYGHPLFPLLALVFEKCELATCSPRDGAGAGLGTPPGGDVCSSDSFNEDIAAFAKQVRSERPLFSSNPELDNLMIQAIQVLRFHLLELEKGKMPIDLVIEDRDGGCREDFEDYPASCPSLPDQNNMWIRDHEDSGSVHLGTPGPSSGGLASQSGDNSSDQGDGLDTSVASPSSGGEDEDLDQERRRNKKRGIFPKVATNIMRAWLFQHLSHPYPSEEQKKQLAQDTGLTILQVNNWFINARRRIVQPMIDQSNRTGQGAAFSPEGQPIGGYTETQPHVAVRPPGSVGMSLNLEGEWHYL

SEQ ID NO: 31450 - protein, 404 aa, Homo sapiens
  REGION 1..404: note = ENSP00000333552
MARRYDELPHYPGIVDGPAALASFPETVPAVPGPYGPHRPPQPLPPGLDSDGLKREKDEIYGHPLFPLLALVFEKCELATCSPRDGAGAGLGTPPGGDVCSSDSFNEDIAAFAKQVRSERPLFSSNPELDNLMIQAIQVLRFHLLELEKGKMPIDLVIEDRDGGCREDFEDYPASCPSLPDQNNMWIRDHEDSGSVHLGTPGPSSGGLASQSGDNSSDQGDGLDTSVASPSSGGEDEDLDQERRRNKKRGIFPKVATNIMRAWLFQHLSRRSEAPVLPDVCLGLGSPSPGPRWARPWGSDCGRPGRQSDSCWWLQHPYPSEEQKKQLAQDTGLTILQVNNWFINARRRIVQPMIDQSNRTGQGAAFSPEGQPIGGYTETQPHVAVRPPGSVGMSLNLEGEWHYL

SEQ ID NO: 31451 - protein, 250 aa, Homo sapiens
  REGION 1..250: note = ENSP00000453757
PPPSLSTPALPPWVAPPSTPVPPQVHDLCDNFCHRYITCLKGKMPIDLVIEDRDGGCREDFEDYPASCPSLPDQNNMWIRDHEDSGSVHLGTPGPSSGGLASQSGDNSSDQGDGLDTSVASPSSGGEDEDLDQERRRNKKRGIFPKVATNIMRAWLFQHLSHPYPSEEQKKQLAQDTGLTILQVNNWFINARRRIVQPMIDQSNRTGQGAAFSPEGQPIGGYTETQPHVAVRPPGSVGMSLNLEGEWHYL

SEQ ID NO: 31452 - protein, 463 aa, Homo sapiens
  REGION 1..463: note = ENSP00000453934
MCTLCTTMRGSYRRCPWISLSVCLSLCLCHCLLTPLSPSLFPPSQTLPSLPLGPPAHMSGISAWTGSSLPTEAAPGDLEGFKLGGSDTWGPQYDELPHYPGIVDGPAALASFPETVPAVPGPYGPHRPPQPLPPGLDSDGLKREKDEIYGHPLFPLLALVFEKCELATCSPRDGAGAGLGTPPGGDVCSSDSFNEDIAAFAKQVRSERPLFSSNPELDNLMIQAIQVLRFHLLELEKVHDLCDNFCHRYITCLKGKMPIDLVIEDRDGGCREDFEDYPASCPSLPDQNNMWIRDHEDSGSVHLGTPGPSSGGLASQSGDNSSDQGDGLDTSVASPSSGGEDEDLDQERRRNKKRGIFPKVATNIMRAWLFQHLSHPYPSEEQKKQLAQDTGLTILQVNNWFINARRRIVQPMIDQSNRTGQGAAFSPEGQPIGGYTETQPHVAVRPPGSVGMSLNLEGEWHYL

SEQ ID NO: 31453 - protein, 421 aa, Homo sapiens
  REGION 1..421: note = ENSP00000453307
MARRYDELPHYPGIVDGPAALASFPETVPAVPGPYGPHRPPQPLPPGLDSDGLKREKDEIYGHPLFPLLALVFEKCELATCSPRDGAGAGLGTPPGGDVCSSDSFNEDIAAFAKQVRSERPLFSSNPELDNLMIQAIQVLRFHLLELEKVHDLCDNFCHRYITCLKGKMPIDLVIEDRDGGCREDFEDYPASCPSLPDQNNMWIRDHEDSGSVHLGTPGPSSGGLASQSGDNSSDQGDGLDTSVASPSSGGEDEDLDQERRRNKKRGIFPKVATNIMRAWLFQHLSRRSEAPVLPDVCLGLGSPSPGPRWARPWGSDCGRPGRQSDSCWWLQHPYPSEEQKKQLAQDTGLTILQVNNWFINARRRIVQPMIDQSNRTGQGAAFSPEGQPIGGYTETQPHVAVRPPGSVGMSLNLEGEWHYL

SEQ ID NO: 31454 - protein, 375 aa, Homo sapiens
  REGION 1..375: note = ENSP00000454073
MARRYDELPHYPGIVDGPAALASFPETVPAVPGPYGPHRPPQPLPPGLDSDGLKREKDEIYGHPLFPLLALVFEKCELATCSPRDGAGAGLGTPPGGDVCSSDSFNEDIAAFAKQVRSERPLFSSNPELDNLMIQAIQVLRFHLLELEKVHDLCDNFCHRYITCLKGKMPIDLVIEDRDGGCREDFEDYPASCPSLPDQNNMWIRDHEDSGSVHLGTPGPSSGGLASQSGDNSSDQGDGLDTSVASPSSGGEDEDLDQERRRNKKRGIFPKVATNIMRAWLFQHLSHPYPSEEQKKQLAQDTGLTILQVNNWFINARRRIVQPMIDQSNRTGQGAAFSPEGQPIGGYTETQPHVAVRPPGSVGMSLNLEGEWHYL

SEQ ID NO: 31455 - protein, 421 aa, Homo sapiens; identical to SEQ ID NO: 31453
  REGION 1..421: note = ENSP00000452854

SEQ ID NO: 31456 - protein, 126 aa, Homo sapiens
  REGION 1..126: note = ENSP00000475941
FPKVATNIMRAWLFQHLSAGAGRHVIAPSLRLPWSPSWGAQRRSEAPVLPDVCLGLGSPSPGPRWARPWGSDCGRPGRQSDSCWWLQHPYPSEEQKKQLAQDTGLTILQVNNWFINARRRIVQPMI

SEQ ID NO: 31457 - protein, 177 aa, Homo sapiens
  REGION 1..177: note = ENSP00000453249
  VARIANT 1: note = Any amino acid
XGLSLPSQVRSERPLFSSNPELDNLGKMPIDLVIEDRDGGCREDFEDYPASCPSLPDQNNMWIRDHEDSGSVHLGTPGPSSGGLASQSGDNSSDQGDGLDTSVASPSSGGEDEDLDQERRRNKKRGIFPKVATNIMRAWLFQHLSRRSEAPVLPDVCLGLGSPSPGPRWARPWGSDC

SEQ ID NO: 31458 - protein, 220 aa, Homo sapiens
  REGION 1..220: note = ENSP00000476248
MARRYDELPHYPGIVDGPAALASFPETVPAVPGPYGPHRPPQPLPPGLDSDGLKREKDEIYGHPLFPLLALVFEKCELATCSPRDGAGAGLGTPPGGDVCSSDSFNEDIAAFAKQVRSERPLFSSNPELDNLMIQAIQVLRFHLLELEKVSASHLPTPSLAPVIPPPLVASAPHLPALSPPELKQNAAPVPEHPRPAPVGGPPQYPGAPPGPRPVRQLLS

SEQ ID NO: 31459 - protein, 999 aa, Homo sapiens
  REGION 1..999: note = ENSP00000295408
MGPAPLPLLLGLFLPALWRRAITEAREEAKPYPLFPGPFPGSLQTDHTPLLSLPHASGYQPALMFSPTQPGRPHTGNVAIPQVTSVESKPLPPLAFKHTVGHIILSEHKGVKFNCSISVPNIYQDTTISWWKDGKELLGAHHAITQFYPDDEVTAIIASFSITSVQRSDNGSYICKMKINNEEIVSDPIYIEVQGLPHFTKQPESMNVTRNTAFNLTCQAVGPPEPVNIFWVQNSSRVNEQPEKSPSVLTVPGLTEMAVFSCEAHNDKGLTVSKGVQINIKAIPSPPTEVSIRNSTAHSILISWVPGFDGYSPFRNCSIQVKEADPLSNGSVMIFNTSALPHLYQIKQLQALANYSIGVSCMNEIGWSAVSPWILASTTEGAPSVAPLNVTVFLNESSDNVDIRWMKPPTKQQDGELVGYRISHVWQSAGISKELLEEVGQNGSRARISVQVHNATCTVRIAAVTRGGVGPFSDPVKIFIPAHGWVDYAPSSTPAPGNADPVLIIFGCFCGFILIGLILYISLAIRKRVQETKFGNAFTEEDSELVVNYIAKKSFCRRAIELTLHSLGVSEELQNKLEDVVIDRNLLILGKILGEGEFGSVMEGNLKQEDGTSLKVAVKTMKLDNSSQREIEEFLSEAACMKDFSHPNVIRLLGVCIEMSSQGIPKPMVILPFMKYGDLHTYLLYSRLETGPKHIPLQTLLKFMVDIALGMEYLSNRNFLHRDLAARNCMLRDDMTVCVADFGLSKKIYSGDYYRQGRIAKMPVKWIAIESLADRVYTSKSDVWAFGVTMWEIATRGMTPYPGVQNHEMYDYLLHGHRLKQPEDCLDELYEIMYSCWRTDPLDRPTFSVLRLQLEKLLESLPDVRNQADVIYVNTQLLESSEGLAQGSTLAPLDLNIDPDSIIASCTPRAAISVVTAEVHDSKPHEGRYILNGGSEEWEDLTSAPSAAVTAEKNSVLPGERLVRNGVSWSHSSMLPLGSSLPDELLFADDSSEGSEVLM

SEQ ID NO: 31460 - protein, 823 aa, Homo sapiens
  REGION 1..823: note = ENSP00000387277
MKINNEEIVSDPIYIEVQGLPHFTKQPESMNVTRNTAFNLTCQAVGPPEPVNIFWVQNSSRVNEQPEKSPSVLTVPGLTEMAVFSCEAHNDKGLTVSKGVQINIKAIPSPPTEVSIRNSTAHSILISWVPGFDGYSPFRNCSIQVKEADPLSNGSVMIFNTSALPHLYQIKQLQALANYSIGVSCMNEIGWSAVSPWILASTTEGAPSVAPLNVTVFLNESSDNVDIRWMKPPTKQQDGELVGYRISHVWQSAGISKELLEEVGQNGSRARISVQVHNATCTVRIAAVTRGGVGPFSDPVKIFIPAHGWVDYAPSSTPAPGNADPVLIIFGCFCGFILIGLILYISLAIRKRVQETKFGNAFTEEDSELVVNYIAKKSFCRRAIELTLHSLGVSEELQNKLEDVVIDRNLLILGKILGEGEFGSVMEGNLKQEDGTSLKVAVKTMKLDNSSQREIEEFLSEAACMKDFSHPNVIRLLGVCIEMSSQGIPKPMVILPFMKYGDLHTYLLYSRLETGPKHIPLQTLLKFMVDIALGMEYLSNRNFLHRDLAARNCMLRDDMTVCVADFGLSKKIYSGDYYRQGRIAKMPVKWIAIESLADRVYTSKSDVWAFGVTMWEIATRGMTPYPGVQNHEMYDYLLHGHRLKQPEDCLDELYEIMYSCWRTDPLDRPTFSVLRLQLEKLLESLPDVRNQADVIYVNTQLLESSEGLAQGSTLAPLDLNIDPDSIIASCTPRAAISVVTAEVHDSKPHEGRYILNGGSEEWEDLTSAPSAAVTAEKNSVLPGERLVRNGVSWSHSSMLPLGSSLPDELLFADDSSEGSEVLM

SEQ ID NO: 31461 - protein, 96 aa, Homo sapiens
  REGION 1..96: note = ENSP00000402129
MGPAPLPLLLGLFLPALWRRAITEAREEAKPYPLFPGPFPGSLQTDHTPLLSLPHASGYQPALMFSPTQPGRPHTGNVAIPQHNQCAAFRQWVVYL

SEQ ID NO: 31462 - protein, 257 aa, Homo sapiens
  REGION 1..257: note = ENSP00000412660
HIPLQTLLKFMVDIALGMEYLSNRNFLHRDLAARNCITHLAILARSPASCSYCRLRDDMTVCVADFGLSKKIYSGDYYRQGRIAKMPVKWIAIESLADRVYTSKSDVWAFGVTMWEIATRGMTPYPGVQNHEMYDYLLHGHRLKQPEDCLDELYEIMYSCWRTDPLDRPTFSVLRLQLEKLLESLPDVRNQADVIYVNTQLLESSEGLAQGSTLAPLDLNIDPDSIIASCTPRAAISVVTAEVHDSKPHEGRYILNG

SEQ ID NO: 31463 - protein, 999 aa, Homo sapiens; identical to SEQ ID NO: 31459
  REGION 1..999: note = ENSP00000389152

SEQ ID NO: 31464 - protein, 588 aa, Homo sapiens [sequence omitted]

SEQ ID NO: 31465 - protein, 293 aa, Homo sapiens
  REGION 1..293: note = ENSP00000455068
MGFPAAALLCALCCGLLAPAARAGYSEERCSWRGSGLTQEPGSVGQLALACAEGAVEWLYPAGALRLTLGGPDPRARPGIACLRPVRPFAGAQVFAERAGGALELLLAEGPGPAGGRCVRWGPRERRALFLQATPHQDISRRVAAFRFELREDGRPELPPQAHGLGVDGACRPCSDAELLLAACTSDFVIHGIIHGVTHDVELQESVITVVAARVLRQTPPLFQAGRSGDQGLTSIRTPLRCGVHPGPGTFLFMGWSRFGEARLGCAPRFQEFRRAYEAARAAHLHPCEVALH

SEQ ID NO: 31466 - protein, 69 aa, Homo sapiens
  REGION 1..69: note = ENSP00000456647
MGFPAAALLCALCCGLLAPAARAGYSEERCSWRGRPRRTRTSAAAWPPSALSCARTGAPSCPRRPTVSA

SEQ ID NO: 31467 - protein, 187 aa, Homo sapiens
  REGION 1..187: note = ENSP00000219542
LAPAARAGYSEERCSWRGSGLTQEPGSVGQLALACAEGAVEWLYPAGALRLTLGGPDPRARPGIACLRPVRPFAGAQVFAERAGGALELLLAEGPGPAGGRCVRWGPRERRALFLQATPHQDISRRVAAFRFELREDGRPELPPQAHGLGVDGACRPCSDAELLLAACTSDFGECPRHGGSLEPAFP

SEQ ID NO: 31468 - protein, 175 aa, Homo sapiens
  REGION 1..175: note = ENSP00000459900
  VARIANT 1: note = Any amino acid
XAVEWLYPAGALRLTLGGPDPRARPGIACLRPVRPFAGAQVFAERAGGALELLLAEGPGPAGGRCVRWGPRERRALFLQATPHQDISRRVAAFRFELREDGRPELPPQAHGLGVDGACRPCSDAELLLAACTSDFVIHGIIHGVTHDVELQESVITVGGPTALEVMGLSIRTLFT

SEQ ID NO: 31469 - protein, 160 aa, Homo sapiens
  REGION 1..160: note = ENSP00000457702
MLGCICQMGVQEGGPGQLIARHGPQAHVCVHSCLGGACRPCSDAELLLAACTSDFVIHGIIHGVTHDVELQESVITVVAARVLRQTPPLFQAGRSGDQGLTSIRTPLRCGVHPGPGTFLFMGWSRFGEARLGCAPRFQEFRRAYEAARAAHLHPCEVALH

SEQ ID NO: 31470 - protein, 244 aa, Homo sapiens
  REGION 1..244: note = ENSP00000448785
MELTIFILRLAIYILTFPLYLLNFLGLWSWICKKWFPYFLVRFTVIYNEQMASKKRELFSNLQEFAGPSGKLSLLEVGCGTGANFKFYPPGCRVTCIDPNPNFEKFLIKSIAENRHLQFERFVVAAGENMHQVADGSVDVVVCTLVLCSVKNQERILREVCRVLRPGGAFYFMEHVAAECSTWNYFWQQVLDPAWHLLFDGCNLTRESWKALERASFSKLKLQHIQAPLSWELVRPHIYGYAVK

SEQ ID NO: 31471 - protein, 180 aa, Homo sapiens
  REGION 1..180: note = ENSP00000450239
MELTIFILRLAIYILTFPLYLLNFLGLWSWICKKWFPYFLVRFTVIYNEQMASKKRELFSNLQEFAGPSGKLSLLEVGCGTGANFKFYPPGCRVTCIDPNPNFEKFLIKSIAENRHLQFERFVVAAGENMHQVADGSVDVVVCTLVLCSVKNQERILREVCRVLRPGGAFYFMEHVAAEC

SEQ ID NO: 31472 - protein, 244 aa, Homo sapiens; identical to SEQ ID NO: 31470
  REGION 1..244: note = ENSP00000447542

SEQ ID NO: 31473 - protein, 244 aa, Homo sapiens
  REGION 1..244: note = ENSP00000448286
  VARIANT 1: note = Any amino acid
XELTIFILRLAIYILTFPLYLLNFLGLWSWICKKWFPYFLVRFTVIYNEQMASKKRELFSNLQEFAGPSGKLSLLEVGCGTGANFKFYPPGCRVTCIDPNPNFEKFLIKSIAENRHLQFERFVVAAGENMHQVADGSVDVVVCTLVLCSVKNQERILREVCRVLRPGGAFYFMEHVAAECSTWNYFWQQVLDPAWHLLFDGCNLTRESWKALERASFSKLKLQHIQAPLSWELVRPHIYGYAVK

SEQ ID NO: 31474 - protein, 244 aa, Homo sapiens; identical to SEQ ID NO: 31470
  REGION 1..244: note = ENSP00000331787

SEQ ID NO: 31475 - protein, 243 aa, Homo sapiens
  REGION 1..243: note = ENSP00000454733
MDRKTTSWDTKFYEKWYVCNREKLCESLQAVFVQSYLDQGTQIFLNNSIEKSGWLFIQLYHSFVSSVFSLFMSRTSINGLLGRGSMFVFSPDQFQRLLKINPDWKTHRLLDLGAGDGEVTKIMSPHFEEIYATELSETMIWQLQKKKYRVLGINEWQNTGFQYDVISCLNLLDRCDQPLTLLKDIRSVLEPTRGRVILALVLPFHPYVENVGGKWEKPSEILEIKGQNWEEQVNSLPEVFRKA

SEQ ID NO: 31476 - protein, 318 aa, Homo sapiens
  REGION 1..318: note = ENSP00000350874
MRLLAGWLCLSLASVWLARRMWTLRSPLTRSLYVNMTSGPGGPAAAAGGRKENHQWYVCNREKLCESLQAVFVQSYLDQGTQIFLNNSIEKSGWLFIQLYHSFVSSVFSLFMSRTSINGLLGRGSMFVFSPDQFQRLLKINPDWKTHRLLDLGAGDGEVTKIMSPHFEEIYATELSETMIWQLQKKKYRVLGINEWQNTGFQYDVISCLNLLDRCDQPLTLLKDIRSVLEPTRGRVILALVLPFHPYVENVGGKWEKPSEILEIKGQNWEEQVNSLPEVFRKAGFVIEAFTRLPYLCEGDMYNDYYVLDDAVFVLKPV

SEQ ID NO: 31477 - protein, 317 aa, Homo sapiens
  REGION 1..317: note = ENSP00000379335
MRLLAGWLCLSLASVWLARRMWTLRSPLTRSLYVNMTSGPGGPAAAAGGRKENHQWYVCNREKLCESLQAVFVQSYLDQGTQIFLNNSIEKSGWLFIQLYHSFVSSVFSLFMSRTSINGLLGRGSMFVFSPDQFQRLLKINPDWKTHRLLDLGAGDGEVTKIMSPHFEEIYATELSETMIWQLQKKKYRVLGINEWQNTGFQYDVISCLNLLDRCDQPLTLLKDIRSVLEPTRGRVILALVLPFHPYVENGGKWEKPSEILEIKGQNWEEQVNSLPEVFRKAGFVIEAFTRLPYLCEGDMYNDYYVLDDAVFVLKPV

SEQ ID NO: 31478 - protein, 74 aa, Homo sapiens
  REGION 1..74: note = ENSP00000457311
MRLLAGWLCLSLASVWLARRMWTLRSPLTRSLYVNMTSGPGGPAAAAGGRKENHQVARKRLNVCVFTRSVSETA

SEQ ID NO: 31479 - protein, 61 aa, Homo sapiens
  REGION 1..61: note = ENSP00000456345
MRLLAGWLCLSLASVWLARRMWTLRSPLTRSLGMCATERNYANHSRLSLFRVTLIKEHRSS

SEQ ID NO: 31480 - protein, 139 aa, Homo sapiens
  REGION 1..139: note = ENSP00000454239
MSRTSINGLLGRGSMFVFSPDQFQRLLKINPDWKTHRLLDLGAGDGEVTKIMSPHFEEIYATELSETMIWQLQKKKYRVLGINEWQNTGFQYDVISCLNLLDRCDQPLTLLKDIRSVLEPTRGRVILALVLPFHPYVEN

SEQ ID NO: 31481 - protein, 125 aa, Homo sapiens
  REGION 1..125: note = ENSP00000455285
  VARIANT 1: note = Any amino acid
XSYLDQGTQIFLNNSIEKSGWLFIQLYHSFVSSVFSLFMSRTSINGVLGINEWQNTGFQYDVISCLNLLDRCDQPLTLLKDIRSVLEPTRGRVILALVLPFHPYVENVGGKWEKPSEILEIKGQN

SEQ ID NO: 31482 - protein, 128 aa, Homo sapiens
  REGION 1..128: note = ENSP00000455720
  VARIANT 1: note = Any amino acid
XPDQFQRLLKINPDWKTHRLLDLGAGDGEVTKIMSPHFEEIYATELSETMIWQLQKKKYRVLGINEWQNTGFQYDVISCLNLLDRCDQPLTLLKDIRSVLEPTRGRVILALVLPFHPYVENGKCGQSG

SEQ ID NO: 31483 - protein, 282 aa, Homo sapiens
  REGION 1..282: note = ENSP00000480710
MWTLRSPLTRSLYVKENHQWYVCNREKLCESLQAVFVQSYLDQGTQIFLNNSIEKSGWLFIQLYHSFVSSVFSLFMSRTSINGLLGRGSMFVFSPDQFQRLLKINPDWKTHRLLDLGAGDGEVTKIMSPHFEEIYATELSETMIWQLQKKKYRVLGINEWQNTGFQYDVISCLNLLDRCDQPLTLLKDIRSVLEPTRGRVILALVLPFHPYVENVGGKWEKPSEILEIKGQNWEEQVNSLPEVFRKAGFVIEAFTRLPYLCEGDMYNDYYVLDDAVFVLKPV

SEQ ID NO: 31484 - protein, 318 aa, Homo sapiens; identical to SEQ ID NO: 31476
  REGION 1..318: note = ENSP00000491241

SEQ ID NO: 31485 - protein, 282 aa, Homo sapiens; identical to SEQ ID NO: 31483
  REGION 1..282: note = ENSP00000492687

SEQ ID NO: 31486 - protein, 317 aa, Homo sapiens; identical to SEQ ID NO: 31477
  REGION 1..317: note = ENSP00000491526

SEQ ID NO: 31487 - protein, 243 aa, Homo sapiens; identical to SEQ ID NO: 31475
  REGION 1..243: note = ENSP00000492407

SEQ ID NO: 31488 - protein, 125 aa, Homo sapiens; identical to SEQ ID NO: 31481
  REGION 1..125: note = ENSP00000491618
  VARIANT 1: note = Any amino acid

SEQ ID NO: 31489 - protein, 128 aa, Homo sapiens; identical to SEQ ID NO: 31482
  REGION 1..128: note = ENSP00000491636
  VARIANT 1: note = Any amino acid

SEQ ID NO: 31490 - protein, 139 aa, Homo sapiens; identical to SEQ ID NO: 31480
  REGION 1..139: note = ENSP00000492878

SEQ ID NO: 31491 - protein, 74 aa, Homo sapiens; identical to SEQ ID NO: 31478
  REGION 1..74: note = ENSP00000492569

SEQ ID NO: 31492 - protein, 61 aa, Homo sapiens; identical to SEQ ID NO: 31479
  REGION 1..61: note = ENSP00000492256

SEQ ID NO: 31493 - protein, 306 aa, Homo sapiens
  REGION 1..306: note = ENSP00000377307
MHDSGLLNITKVSFSDRGKYTCVASNIYGTVNNTVTLRVIFTSGDMGVYYMVVCLVAFTIVMVLNITRLCMMSSHLKKTEKAINEFFRTEGAEKLQKAFEIAKRIPIITSAKTLELAKVTQFKTMEFARYIEELARSVPLPPLIMNCRTIMEEIMEVVGLEEQGQNFVRHTPEGQEAADRDEVYTIPNSLKRSDSPAADSDASSLHEQPQQIAIKVSVHPQSKKEHADDQEGGQFEVKDVEETELSAEHSPETAEPSTDVTSTELTSEEPTPVEVPDKVLPPAYLEATEPAVTHDKNTCIIYESHV

SEQ ID NO: 31494 - protein, 409 aa, Homo sapiens
  REGION 1..409: note = ENSP00000354583
MDRLKSHLTVCFLPSVPFLILVSTLATAKSVTNSTLNGTNVVLGSVPVIIARTDHIIVKEGNSALINCSVYGIPDPQFKWYNSIGKLLKEEEDEKERGGGKWQMHDSGLLNITKVSFSDRGKYTCVASNIYGTVNNTVTLRVIFTSGDMGVYYMVVCLVAFTIVMVLNITRLCMMSSHLKKTEKAINEFFRTEGAEKLQKAFEIAKRIPIITSAKTLELAKVTQFKTMEFARYIEELARSVPLPPLIMNCRTIMEEIMEVVGLEEQGQNFVRHTPEGQEAADRDEVYTIPNSLKRSDSPAADSDASSLHEQPQQIAIKVSVHPQSKKEHADDQEGGQFEVKDVEETELSAEHSPETAEPSTDVTSTELTSEEPTPVEVPDKVLPPAYLEATEPAVTHDKNTCIIYESHV

SEQ ID NO: 31495 - protein, 156 aa, Homo sapiens
  REGION 1..156: note = ENSP00000422791
MHDSGLLNITKVSFSDRGKYTCVASNIYGTVNNTVTLRVIFTSGDMGVYYMVVCLVAFTIVMVLNITRLCMMSSHLKKTEKAINEFFRTEGAEKLQKAFEIAKRIPIITSAKTLELAKVTQFKTMEFARYIEELARSVPLPPLIMNCRTIMEEIME

SEQ ID NO: 31496 - protein, 63 aa, Homo sapiens
  REGION 1..63: note = ENSP00000423722
MHDSGLLNITKVSFSDRGKYTCVASNIYGTVNNTVTLRVIFTSGDMGVYYMVVCLVAFTIVMV

SEQ ID NO: 31497 - protein, 44 aa, Homo sapiens
  REGION 1..44: note = ENSP00000423802
MHDSGLLNITKVSFSDRGKYTCVASNIYGTVNNTVTLRVIFTSG

SEQ ID NO: 31498 - protein, 102 aa, Homo sapiens
  REGION 1..102: note = ENSP00000377305
MDRLKSHLTVCFLPSVPFLILVSTLATAKSVTNSTLNGTNVVLGSVPVIIARTDHIIVKEGNSALINCSVYGIPDPQFKWYNSIGKLLKEEEDEKERGGGRL

SEQ ID NO: 31499 - protein, 102 aa, Homo sapiens; identical to SEQ ID NO: 31498
  REGION 1..102: note = ENSP00000422571

SEQ ID NO: 31500 - protein, 98 aa, Homo sapiens
  REGION 1..98: note = ENSP00000425303
MDRLKSHLTVCFLPSVPFLILVSTLATAKSVTNSTLNGTNVVLGSVPVIIARTDHIIVKEGNSALINCSVYGIPDPQFKWYNSIGKLLKEEEDEKERG

SEQ ID NO: 31501 - protein, 90 aa, Homo sapiens
  REGION 1..90: note = ENSP00000426247
MDRLKSHLTVCFLPSVPFLILVSTLATAKSVTNSTLNGTNVVLGSVPVIIARTDHIIVKEGNSALINCSVYGIPDPQFKWYNSIGKLLKE

SEQ ID NO: 31502 - protein, 73 aa, Homo sapiens
  REGION 1..73: note = ENSP00000423549
MDRLKSHLTVCFLPSVPFLILVSTLATAKSVTNSTLNGTNVVLGSVPVIIARTDHIIVKEGNSALINCSVYGI

SEQ ID NO: 31503 - protein, 32 aa, Homo sapiens
  REGION 1..32: note = ENSP00000390165
MAEISRIQYEMEYTEGISQRMRVPEKLKVAPP

SEQ ID NO: 31504 - protein, 291 aa, Homo sapiens
  REGION 1..291: note = ENSP00000304898
MAEISRIQYEMEYTEGISQRMRVPEKLKVAPPNADLEQGFQEGVPNASVIMQVPERIVVAGNNEDVSFSRPADLDLIQSTPFKPLALKTPPRVLTLSERPLDFLDLERPPTTPQNEEIRAVGRLKRERSMSENAVRQNGQLVRNDSLVTPSPQQARVCPPHMLPEDGANLSSARGILSLIQSSTRRAYQQILDVLDENRRPVLRGGSAAATSNPHHDNVRYGISNIDTTIEGTSDDLTVVDAASLRRQIIKLNRRLQLLEEENKERAKREMVMYSITVAFWLLNSWLWFRR

SEQ ID NO: 31505 - protein, 342 aa, Homo sapiens
  REGION 1..342: note = ENSP00000302037
MSKGTSSDTSLGRVSRAAFPSPTAAEMAEISRIQYEMEYTEGISQRMRVPEKLKVAPPNADLEQGFQEGVPNASVIMQVPERIVVAGNNEDVSFSRPADLDLIQSTPFKPLALKTPPRVLTLSERPLDFLDLERPPTTPQNEEIRAVGRLKRERSMSENAVRQNGQLVRNDSLWHRSDSAPRNKISRFQAPISAPEYTVTPSPQQARVCPPHMLPEDGANLSSARGILSLIQSSTRRAYQQILDVLDENRRPVLRGGSAAATSNPHHDNVRYGISNIDTTIEGTSDDLTVVDAASLRRQIIKLNRRLQLLEEENKERAKREMVMYSITVAFWLLNSWLWFRR

SEQ ID NO: 31506 - protein, 218 aa, Homo sapiens
  REGION 1..218: note = ENSP00000346498
MAEISRIQYEMEYTEGISQRMRVPEKLKVAPPNADLEQGFQEGVPNASVIMQVPERIVVAGNNEDVSFSRPADLDLIQSTPFKPLALKTPPRVLTLSERPLDFLDLERPPTTPQNEEIRAVGRLKRERSMSENAVRQNGQLVRNDSLYGISNIDTTIEGTSDDLTVVDAASLRRQIIKLNRRLQLLEEENKERAKREMVMYSITVAFWLLNSWLWFRR

SEQ ID NO: 31507 - protein, 59 aa, Homo sapiens
  REGION 1..59: note = ENSP00000431725
MSENAVRQNGQLVRNDSLWHRSDSAPRNKISRFQAPISAPEYTVTPSPQQARVCPPHML

SEQ ID NO: 31508 - protein, 69 aa, Homo sapiens
  REGION 1..69: note = ENSP00000432447
MSENAVRQNGQLVRNDSLVTPSPQQARVCPPHMLPEDGANLSSARGILSLIQSSTRRAYQQILDVLDEN

SEQ ID NO: 31509 - protein, 218 aa, Homo sapiens; identical to SEQ ID NO: 31506
  REGION 1..218: note = ENSP00000386964

SEQ ID NO: 31510 - protein, 138 aa, Homo sapiens
  REGION 1..138: note = ENSP00000415996
MAEISRIQYEMEYTEGISQRMRVPEKLKVAPPNADLEQGFQEGVPNASVIMQVPERIVVAGNNEDVSFSRPADLDLIQSTPFKPLALKTPPRVLTLSERPLDFLDLERPPTTPQNEEIRAVGRLKRERSMSENAVRQN

SEQ ID NO: 31511 - protein, 238 aa, Homo sapiens
  REGION 1..238: note = ENSP00000386641
MAEISRIQYEMEYTEGISQRMRVPEKLKVAPPNADLEQGFQEGVPNASVIMQVPERIVVAGNNEDVSFSRPADLDLIQSTPFKPLALKTPPRVLTLSERPLDFLDLERPPTTPQNEEIRAVGRLKRERSMSENAVRQNGQLVRNDSLPVLRGGSAAATSNPHHDNVRYGISNIDTTIEGTSDDLTVVDAASLRRQIIKLNRRLQLLEEENKERAKREMVMYSITVAFWLLNSWLWFRR

SEQ ID NO: 31512 - protein, 243 aa, Homo sapiens
  REGION 1..243: note = ENSP00000338412
MAEISRIQYEMEYTEGISQRMRVPEKLKVAPPNADLEQGFQEGVPNASVIMQVPERIVVAGNNEDVSFSRPADLDLIQSTPFKPLALKTPPRVLTLSERPLDFLDLERPPTTPQNEEIRAVGRLKRERSMSENAVRQNGQLVRNDSLWHRSDSAPRNKISRFQAPISAPEYTYGISNIDTTIEGTSDDLTVVDAASLRRQIIKLNRRLQLLEEENKERAKREMVMYSITVAFWLLNSWLWFRR

SEQ ID NO: 31513 - protein, 52 aa, Homo sapiens
  REGION 1..52: note = ENSP00000436920
MAEISRIQYEMEYTEGISQRMRVPEKLKVAPPNADLEQGFQEGVPNASVIMQ

SEQ ID NO: 31514 - protein, 71 aa, Homo sapiens
  REGION 1..71: note = ENSP00000435354
MSENAVRQNGQLVRNDSLWHRSDSAPRNKISRFQAPISAPEYTYGISNIDTTIEGTSDDLTVVDAASLRRQ

SEQ ID NO: 31515 - protein, 89 aa, Homo sapiens
  REGION 1..89: note = ENSP00000436289
MSENAVRQNGQLVRNDSLYGISNIDTTIEGTSDDLTVVDAASLRRQIIKLNRRLQLLEEENKERAKREMVMYSITVAFWLLNSWLWFRR

SEQ ID NO: 31516 - protein, 238 aa, Homo sapiens; identical to SEQ ID NO: 31511
  REGION 1..238: note = ENSP00000304134

SEQ ID NO: 31517 - protein, 34 aa, Homo sapiens
  REGION 1..34: note = ENSP00000411386
MSKGTSSDTSLGRVSRAAFPSPTAAEMAEISRIQ

SEQ ID NO: 31518 - protein, 71 aa, Homo sapiens
  REGION 1..71: note = ENSP00000391829
MSKGTSSDTSLGRVSRAAFPSPTAAEMAEISRIQYEMEYTEGISQRMRVPEKLKVAPPNADLEQGFQEGVP

SEQ ID NO: 31519 - protein, 60 aa, Homo sapiens
  REGION 1..60: note = ENSP00000407547
MAEISRIQYEMEYTEGISQRMRVPEKLKVAPPNADLEQGFQEGVPNASVIMQVPERIVVA

SEQ ID NO: 31520 - protein, 154 aa, Homo sapiens
  REGION 1..154: note = ENSP00000415313
IRAVGRLKRERSMSENAVRQNGQLVRNDSLVTPSPQQARVCPPHMLPEDGANLSSARGILSLIQSSTRRAYQQILDVLDENRRYGISNIDTTIEGTSDDLTVVDAASLRRQIIKLNRRLQLLEEENKERAKREMVMYSITVAFWLLNSWLWFRR

SEQ ID NO: 31521 - protein, 221 aa, Homo sapiens
  REGION 1..221: note = ENSP00000375912
MQVPERIVVAGNNEDVSFSRPADLDLIQSTPFKPLALKTPPRVLTLSERPLDFLDLERPPTTPQNEEIRAVGRLKRERSMSENAVRQNGQLVRNDSLVTPSPQQARVCPPHMLPEDGANLSSARGILSLIQSSTRRAYQQILDVLDENRRYGISNIDTTIEGTSDDLTVVDAASLRRQIIKLNRRLQLLEEENKERAKREMVMYSITVAFWLLNSWLWFRR

SEQ ID NO: 31522 - protein, 25 aa, Homo sapiens
  REGION 1..25: note = ENSP00000452734
MPRPRLLAALCGALLCAPSLLVALG

SEQ ID NO: 31523 - protein, 335 aa, Homo sapiens
  REGION 1..335: note = ENSP00000268151
MPRPRLLAALCGALLCAPSLLVALDICSKNPCHNGGLCEEISQEVRGDVFPSYTCTCLKGYAGNHCETKCVEPLGLENGNIANSQIAASSVRVTFLGLQHWVPELARLNRAGMVNAWTPSSNDDNPWIQVNLLRRMWVTGVVTQGASRLASHEYLKAFKVAYSLNGHEFDFIHDVNKKHKEFVGNWNKNAVHVNLFETPVEAQYVRLYPTSCHTACTLRFELLGCELNGCANPLGLKNNSIPDKQITASSSYKTWGLHLFSWNPSYARLDKQGNFNAWVAGSYGNDQWLQIFPGNWDNHSHKKNLFETPILARYVRILPVAWHNRIALRLELLGC

SEQ ID NO: 31524 - protein, 387 aa, Homo sapiens
  REGION 1..387: note = ENSP00000268150
MPRPRLLAALCGALLCAPSLLVALDICSKNPCHNGGLCEEISQEVRGDVFPSYTCTCLKGYAGNHCETKCVEPLGLENGNIANSQIAASSVRVTFLGLQHWVPELARLNRAGMVNAWTPSSNDDNPWIQVNLLRRMWVTGVVTQGASRLASHEYLKAFKVAYSLNGHEFDFIHDVNKKHKEFVGNWNKNAVHVNLFETPVEAQYVRLYPTSCHTACTLRFELLGCELNGCANPLGLKNNSIPDKQITASSSYKTWGLHLFSWNPSYARLDKQGNFNAWVAGSYGNDQWLQVDLGSSKEVTGIITQGARNFGSVQFVASYKVAYSNDSANWTEYQDPRTGSSKIFPGNWDNHSHKKNLFETPILARYVRILPVAWHNRIALRLELLGC

SEQ ID NO: 31525 - protein, 387 aa, Homo sapiens; identical to SEQ ID NO: 31524
  REGION 1..387: note = ENSP00000456281

SEQ ID NO: 31526 - protein, 343 aa, Homo sapiens
  REGION 1..343: note = ENSP00000444332
MPRPRLLAALCGALLCAPSLLVALECVEPLGLENGNIANSQIAASSVRVTFLGLQHWVPELARLNRAGMVNAWTPSSNDDNPWIQVNLLRRMWVTGVVTQGASRLASHEYLKAFKVAYSLNGHEFDFIHDVNKKHKEFVGNWNKNAVHVNLFETPVEAQYVRLYPTSCHTACTLRFELLGCELNGCANPLGLKNNSIPDKQITASSSYKTWGLHLFSWNPSYARLDKQGNFNAWVAGSYGNDQWLQVDLGSSKEVTGIITQGARNFGSVQFVASYKVAYSNDSANWTEYQDPRTGSSKIFPGNWDNHSHKKNLFETPILARYVRILPVAWHNRIALRLELLGC

SEQ ID NO: 31527 - protein, 268 aa, Homo sapiens
  REGION 1..268: note = ENSP00000452926
MPRPRLLAALCGALLCAPSLLVALDICSKNPCHNGGLCEEISQEVRGDVFPSYTCTCLKGYAGNHCETKCVEPLGLENGNIANSQIAASSVRVTFLGLQHWVPELARLNRAGMVNAWTPSSNDDNPWIQVNLLRRMWVTGVVTQGASRLASHEYLKAFKVAYSLNGHEFDFIHDVNKKHKEFVGNWNKNAVHVNLFETPVEAQYVRLYPTSCHTACTLRFELLGCELNAATRPGACISSAGTPPMHGWTSRATSTPGLRGATVTISGC

SEQ ID NO: 31528 - protein, 75 aa, Homo sapiens
  REGION 1..75: note = ENSP00000478952
FDFIHDVNKKHKEFVGNWNKNAVHVNLFETPVEAQYVRLYPTSCHTACTLRFELLGCELNARKADLRRGADDREQ

SEQ ID NO: 31529 - protein, 1052 aa, Homo sapiens
  REGION 1..1052: note = ENSP00000276282
MAGMDSGNLKTARLWRDAALRARKLRSNLRQLTLTAAGACPGAGADALESPASPQLVLPANLGDIEALNLGNNGLEEVPEGLGSALGSLRVLVLRRNRFARLPPAVAELGHHLTELDVSHNRLTALGAEVVSALRELRKLNLSHNQLPALPAQLGALAHLEELDVSFNRLAHLPDSLSCLSRLRTLDVDHNQLTAFPRQLLQLVALEELDVSSNRLRGLPEDISALRALKILWLSGAELGTLPAGFCELASLESLMLDNNGLQALPAQFSCLQRLKMLNLSSNLFEEFPAALLPLAGLEELYLSRNQLTSVPSLISGLGRLLTLWLDNNRIRYLPDSIVELTGLEELVLQGNQIAVLPDHFGQLSRVGLWKIKDNPLIQPPYEVCMKGIPYIAAYQKELAHSQPAVQPRLKLLLMGHKAAGKTLLRHCLTEERVEGCPGGGDKEKCYPPSPPPVSKGIEVTSWTADASRGLRFIVYDLAGDESYEVIQPFFLSPGALYVLVVNLATYEPRHFPTTVGSFLHRVGARVPHAVVCIVGTHADLCGERELEEKCLDIHRQIALQEKHDAEGLSRLAKVVDEALARDFELRSASPHAAYYGVSDKNLRRRKAHFQYLLNHRLQILSPVLPVSCRDPRHLRRLRDKLLSVAEHREIFPNLHRVLPRSWQVLEELHFQPPQAQRLWLSWWDSARLGLQAGLTEDRLQSALSYLHESGKLLYFEDSPALKEHVFHNLTRLIDILNVFFQRDPSLLLHKLLLGTSGEGKAEGESSPPMARSTPSQELLRATQLHQYVEGFLLHGLLPAHVIRLLLKPHVQAQQDLQLLLELLEKMGLCYCLNKPKGKPLNGSTAWYKFPCYVQNEVPHAEAWINGTNLAGQSFVAEQLQIEYSFPFTFPLGLFARYSVQINSHVVHRSDGKFQIFAYRGKVPVVVSYRPARGVLQPDTLSIASHASLPNIWTAWQAITPLVEELNVLLQEWPGLHYTVHILCSKCLKRGSPNPHAFPGELLSQPRPEGVAEIICPKNGSERVNVALVYPPTPTVISPCSKKNVGEKHRNQ

SEQ ID NO: 31530 - protein, 530 aa, Homo sapiens
  REGION 1..530: note = ENSP00000361898
MAKGEGAESGSAAGLLPTSILQSTERPAQVKKEPKKKKQQLSVCNKLCYALGGAPYQVTGCALGFFLQIYLLDVAQVGPFSASIILFVGRAWDAITDPLVGLCISKSPWTCLGRLMPWIIFSTPLAVIAYFLIWFVPDFPHGQTYWYLLFYCLFETMVTCFHVPYSALTMFISTEQTERDSATAYRMTVEVLGTVLGTAIQGQIVGQADTPCFQDLNSSTVASQSANHTHGTTSHRETQKAYLLAAGVIVCIYIICAVILILGVREQREPYEAQQSEPIAYFRGLRLVMSHGPYIKLITGFLFTSLAFMLVEGNFVLFCTYTLGFRNEFQNLLLAIMLSATLTIPIWQWFLTRFGKKTAVYVGISSAVPFLILVALMESNLIITYAVAVAAGISVAAAFLLPWSMLPDVIDDFHLKQPHFHGTEPIFFSFYVFFTKFASGVSLGISTLSLDFAGYQTRGCSQPERVKFTLNMLVTMAPIVLILLGLLLFKMYPIDEERRRQNKKALQALRDEASSSGCSETDSTELASIL

SEQ ID NO: 31531 - protein, 266 aa, Homo sapiens
  REGION 1..266: note = ENSP00000407606
MAKGEGAESGSAAGLLPTSILQSTERPAQKEPKKKKQQLSVCNKLCYALGGAPYQVTGCALGFFLQIYLLDVAQVGPFSASIILFVGRAWDAITDPLVGLCISKSPWTCLGRLMPWIIFSTPLAVIAYFLIWFVPDFPHGQTYWYLLFYCLFETMVTCFHVPYSALTMFISTEQTERDSATAYRMTVEVLGTVLGTAIQGQIVGQADTPCFQDLNSSTVASQSANHTHGTTSHRETQKAYLLAAGVIVCIYIICAVILILGVREQR

SEQ ID NO: 31532 - protein, 543 aa, Homo sapiens
  REGION 1..543: note = ENSP00000361895
MAKGEGAESGSAAGLLPTSILQSTERPAQVKKEPKKKKQQLSVCNKLCYALGGAPYQVTGCALGFFLQIYLLDVAQKDEEVVFCFSSFQVGPFSASIILFVGRAWDAITDPLVGLCISKSPWTCLGRLMPWIIFSTPLAVIAYFLIWFVPDFPHGQTYWYLLFYCLFETMVTCFHVPYSALTMFISTEQTERDSATAYRMTVEVLGTVLGTAIQGQIVGQADTPCFQDLNSSTVASQSANHTHGTTSHRETQKAYLLAAGVIVCIYIICAVILILGVREQREPYEAQQSEPIAYFRGLRLVMSHGPYIKLITGFLFTSLAFMLVEGNFVLFCTYTLGFRNEFQNLLLAIMLSATLTIPIWQWFLTRFGKKTAVYVGISSAVPFLILVALMESNLIITYAVAVAAGISVAAAFLLPWSMLPDVIDDFHLKQPHFHGTEPIFFSFYVFFTKFASGVSLGISTLSLDFAGYQTRGCSQPERVKFTLNMLVTMAPIVLILLGLLLFKMYPIDEERRRQNKKALQALRDEASSSGCSETDSTELASIL

SEQ ID NO: 31533 - protein, 374 aa, Homo sapiens
  REGION 1..374: note = ENSP00000391261
MVTCFHVPYSALTMFISTEQTERDSATAYRMTVEVLGTVLGTAIQGQIVGQADTPCFQDLNSSTVASQSANHTHGTTSHRETQKAYLLAAGVIVCIYIICAVILILGVREQREPYEAQQSEPIAYFRGLRLVMSHGPYIKLITGFLFTSLAFMLVEGNFVLFCTYTLGFRNEFQNLLLAIMLSATLTIPIWQWFLTRFGKKTAVYVGISSAVPFLILVALMESNLIITYAVAVAAGISVAAAFLLPWSMLPDVIDDFHLKQPHFHGTEPIFFSFYVFFTKFASGVSLGISTLSLDFAGYQTRGCSQPERVKFTLNMLVTMAPIVLILLGLLLFKMYPIDEERRRQNKKALQALRDEASSSGCSETDSTELASIL

SEQ ID NO: 31534 - protein, 474 aa, Homo sapiens
  REGION 1..474: note = ENSP00000258436
MELGGHWDMNSAPRLVSETAERKQEQKTGTEAEAADSGAVGARRFLLCLYLVGFLDLFGVSMVVPLLSLHVKSLGASPTVAGIVGSSYGILQLFSSTLVGCWSDVVGRRSSLLACILLSALGYLLLGAATNVFLFVLARVPAGIFKHTLSISRALLSDVVPEKERPLVIGHFNTASGVGFILGPVVGGYLTELEDGFYLTAFICFLVFILNAGLVWFFPWREAKPGSTEKGLPLRKTHVLLGRSHDTVQEAATSRRARASKKTAQPWVEVVLALRNMKNLLFSEMWDIFLVRLLMAMAVMLYYSNFVLALEERFGVRPKVTGYLISYSSMLGAVAGLALGPILRLYKHNSQALLLHSSILTCTLLLLYSLAPTMGAVVLSSTLLSFSTAIGRTCITDLQLTVGGAQASGTLIGVGQSVTAVGRIIAPLLSGVAQEVSPCGPPSLGAVLALVAIFIMSLNKRHSSGDGNSKLKSE

SEQ ID NO: 31535 - protein, 92 aa, Homo sapiens
  REGION 1..92: note = ENSP00000408630
MELGGHWDMNSAPRLVSETAERKQEQKTGTEAEAADSGAVGARRFLLCLYLVGFLDLFGVSMVVPLLSLHVKSLGASPTVAGIVDDVCSKRF

SEQ ID NO: 31536 - protein, 98 aa, Homo sapiens
  REGION 1..98: note = ENSP00000414870
MELGGHWDMNSAPRLVSETAERKQEQKTGTEAEAADSGAVGARRFLLCLYLVGFLHGCAFIEPSCQVPWSKSNSCWNSRRRMFKEILRFEHYNQVPCH

SEQ ID NO: 31537 - protein, 92 aa, Homo sapiens; identical to SEQ ID NO: 31535
  REGION 1..92: note = ENSP00000392605

SEQ ID NO: 31538 - protein, 79 aa, Homo sapiens
  REGION 1..79: note = ENSP00000413641
TVAGIVGSSYGILQLFSSTLVGCWSDVVGRRSSLLACILLSALGYLLLGAATNVFLFVLARVPAGLYFLMWFQRRNGRL

SEQ ID NO: 31539 - protein, 66 aa, Homo sapiens
  REGION 1..66: note = ENSP00000402411
MELGGHWDMNSAPRLVSETAERKQEQKTGTEAEAADSGAVGARRFLLCLYLVGFLVSASVGAGSKC

SEQ ID NO: 31540 - protein, 533 aa, Homo sapiens
  REGION 1..533: note = ENSP00000345270
MKMRRYKLFLMFCMAGLCLISFLHFFKTLSYVTFPRELASLSPNLVSSFFWNNAPVTPQASPEPGGPDLLRTPLYSHSPLLQPLPPSKAAEELHRVDLVLPEDTTEYFVRTKAGGVCFKPGTKMLERPPPGRPEEKPEGANGSSARRPPRYLLSARERTGGRGARRKWVECVCLPGWHGPSCGVPTVVQYSNLPTKERLVPREVPRRVINAINVNHEFDLLDVRFHELGDVVDAFVVCESNFTAYGEPRPLKFREMLTNGTFEYIRHKVLYVFLDHFPPGGRQDGWIADDYLRTFLTQDGVSRLRNLRPDDVFIIDDADEIPARDGVLFLKLYDGWTEPFAFHMRKSLYGFFWKQPGTLEVVSGCTVDMLQAVYGLDGIRLRRRQYYTMPNFRQYENRTGHILVQWSLGSPLHFAGWHCSWCFTPEGIYFKLVSAQNGDFPRWGDYEDKRDLNYIRGLIRTGGWFDGTQQEYPPADPSEHMYAPKYLLKNYDRFHYLLDNPYQEPRSTAAGGWRHRGPEGRPPARGKLDEAEV

SEQ ID NO: 31541 - protein, 161 aa, Homo sapiens
  REGION 1..161: note = ENSP00000416226
MKMRRYKLFLMFCMAGLCLISFLHFFKTLSYVTFPRELASLSPNLVSSFFWNNAPVTPQASPEPGGPDLLRTPLYSHSPLLQPLPPSKAAEELHRVDLVLPEDTTEYFVRTKAGGVCFKPGTKMLERPPPGRPEEKPEGANGSSARRPPRYLLSARERTGG

SEQ ID NO: 31542 - protein, 108 aa, Homo sapiens
  REGION 1..108: note = ENSP00000408075
MESCSCHPGSGVQWRDHGSLQLPPPGFKMKMRRYKLFLMFCMAGLCLISFLHFFKTLSYVTFPRELASLSPNLVSSFFWNNAPVTPQASPEPGGPDLLRTPLYSHSPL

SEQ ID NO: 31543 - protein, 478 aa, Homo sapiens
  REGION 1..478: note = ENSP00000481096
MFKFHQMKHIFEILDKMRCLRKRSTVSFLGVLVIFLLFMNLYIEDSYVLEGDKQLIRETSTHQLNSERYVHTFKDLSNFSGAINVTYRYLAATPLQRKRYLTIGLSSVKRKKGNYLLETIKSIFEQSSYEELKEISVVVHLADFNSSWRDAMVQDITQKFAHHIIAGRLMVIHAPEEYYPILDGLKRNYNDPEDRVKFRSKQNVDYAFLLNFCANTSDYYVMLEDDVRCSKNFLTAIKKVIASLEGTYWVTLEFSKLGYIGKLYHSHDLPRLAHFLLMFYQEMPCDWLLTHFRGLLAQKNVIRFKPSLFQHMGYYSSYKGTENKLKDDDFEEESFDIPDNPPASLYTNMNVFENYEASKAYSSVDEYFWGKPPSTGDVFVIVFENPIIIKKIKVNTGTEDRQNDILHHGALDVGENVMPSKQRRQCSTYLRLGEFKNGNFEMSGVNQKIPFDIHCMRIYVTKTQKEWLIIRSISIWTS

SEQ ID NO: 31544 - protein, 478 aa, Homo sapiens; identical to SEQ ID NO: 31543
  REGION 1..478: note = ENSP00000477650

SEQ ID NO: 31545 - protein, 478 aa, Homo sapiens; identical to SEQ ID NO: 31543
  REGION 1..478: note = ENSP00000478300

SEQ ID NO: 31546 - protein, 478 aa, Homo sapiens; identical to SEQ ID NO: 31543
  REGION 1..478: note = ENSP00000446647

SEQ ID NO: 31547 - protein, 397 aa, Homo sapiens
  REGION 1..397: note = ENSP00000449172
MFKFHQMKHIFEILDKMRCLRKRSTVSFLGVLVIFLLFMNLYIEDSYVLEGDKQLIRETSTHQLNSERYVHTFKDLSNFSGAINVTYRYLAATPLQRKRYLTIGLSSVKRKKGNYLLETIKSIFEQSSYEELKEISVVVHLADFNSSWRDAMVQDITQKFAHHIIAGRLMVIHAPEEYYPILDGLKRNYNDPEDRVKFRSKQNVDYAFLLNFCANTSDYYVMLEDDVRCSKNFLTAIKKVIASLEGTYWVTLEFSKLGYIGKLYHSHDLPRLAHFLLMFYQEMPCDWLLTHFRGLLAQKNVIRFKPSLFQHMGYYSSYKGTENKLKDDDFEEESFDIPDNPPASLYTNMNVFENYEASKAYSSVDEYFWGKPPSTGDVFVIVFENPIIIKKIKVNTG

SEQ ID NO: 31548 - protein, 111 aa, Homo sapiens
  REGION 1..111: note = ENSP00000448093
MFKFHQMKHIFEILDKMRCLRKRSTVSFLGVLVIFLLFMNLYIEDSYVLEGDKQLIRETSTHQLNSERYVHTFKDLSNFSGAINVTYRYLAATPLQRKPHGLLFIIQRDGE

SEQ ID NO: 31549 - protein, 478 aa, Homo sapiens; identical to SEQ ID NO: 31543
  REGION 1..478: note = ENSP00000447253

SEQ ID NO: 31550 - protein, 478 aa, Homo sapiens; identical to SEQ ID NO: 31543
  REGION 1..478: note = ENSP00000490547

SEQ ID NO: 31551 - protein, 478 aa, Homo sapiens; identical to SEQ ID NO: 31543
  REGION 1..478: note = ENSP00000489751

SEQ ID NO: 31552 - protein, 478 aa, Homo sapiens; identical to SEQ ID NO: 31543
  REGION 1..478: note = ENSP00000490784

SEQ ID NO: 31553 - protein, 478 aa, Homo sapiens; identical to SEQ ID NO: 31543
  REGION 1..478: note = ENSP00000490416

SEQ ID NO: 31554 - protein, 478 aa, Homo sapiens; identical to SEQ ID NO: 31543
  REGION 1..478: note = ENSP00000489618

SEQ ID NO: 31555 - protein, 397 aa, Homo sapiens; identical to SEQ ID NO: 31547
  REGION 1..397: note = ENSP00000489858

SEQ ID NO: 31556 - protein, 111 aa, Homo sapiens; identical to SEQ ID NO: 31548
  REGION 1..111: note = ENSP00000490212

SEQ ID NO: 31557 - protein, 790 aa, Homo sapiens
  REGION 1..790: note = ENSP00000301618
MITVNPDGKIMVRRCLVTLRPFRLFVLGIGFFTLCFLMTSLGGQFSARRLGDSPFTIRTEVMGGPESRGVLRKMSDLLELMVKRMDALARLENSSELHRAGGDLHFPADRMPPGAGLMERIQAIAQNVSDIAVKVDQILRHSLLLHSKVSEGRRDQCEAPSDPKFPDCSGKVEWMRARWTSDPCYAFFGVDGTECSFLIYLSEVEWFCPPLPWRNQTAAQRAPKPLPKVQAVFRSNLSHLLDLMGSGKESLIFMKKRTKRLTAQWALAAQRLAQKLGATQRDQKQILVHIGFLTEESGDVFSPRVLKGGPLGEMVQWADILTALYVLGHGLRVTVSLKELQSNLGVPPGRGSCPLTMPLPFDLIYTDYHGLQQMKRHMGLSFKKYRCRIRVIDTFGTEPAYNHEEYATLHGYRTNWGYWNLNPKQFMTMFPHTPDNSFMGFVSEELNETEKRLIKGGKASNMAVVYGKEASIWKGKEKFLGILNKYMEIHGTVYYESQRPPEVPAFVKNHGLLPQPEFQQLLRKAKLFIGFGFPYEGPAPLEAIANGCIFLQSRFSPPHSSLNHEFFRGKPTSREVFSQHPYAENFIGKPHVWTVDYNNSEEFEAAIKAIMRTQVDPYLPYEYTCEGMLERIHAYIQHQDFCRAPDPALPEAHAPQSPFVLAPNATHLEWARNTSLAPGAWPPAHALRAWLAVPGRACTDTCLDHGLICEPSFFPFLNSQDAFLKLQVPCDSTESEMNHLYPAFAQPGQECYLQKEPLLFSCAGSNTKYRRLCPCRDFRKGQVALCQGCL

SEQ ID NO: 31558 - protein, 792 aa, Homo sapiens
  REGION 1..792: note = ENSP00000456037
MITVNPDGKIMVRRCLVTLRPFRLFVLGIGFFTLCFLMTSLGGQFSARRLGDSPFTIRTEVMGGPESRGVLRKMSDLLELMVKRMDALARLENSSELHRAGGDLHFPADRMPPGAGLMERIQAIAQNVSDIAVKVDQILRHSLLLHSKVSEGRRDQCEAPSDPKFPDCSGKVEWMRARWTSDPCYAFFGVDGTECSFLIYLSEVEWFCPPLPWRNQTAAQRAPKPLPKVQAVFRSNLSHLLDLMGSGKESLIFMKKRTKRLTAQWALAAQRLAQKLGATQRDQKQILVHIGFLTEESGDVFSPRVLKGGPLGEMVQWADILTALYVLGHGLRVTVSLKELQSNLGVPPGRGSCPLTMPLPFDLIYTDYHGLQQMKRHMGLSFKKYRCRIRVIDTFGTEPAYNHEEYATLHGYRTNWGYWNLNPKQFMTMFPHTPDNSFMGFVSEELNETEKRLIKGGKASNMAVVYGKEASIWKLQGKEKFLGILNKYMEIHGTVYYESQRPPEVPAFVKNHGLLPQPEFQQLLRKAKLFIGFGFPYEGPAPLEAIANGCIFLQSRFSPPHSSLNHEFFRGKPTSREVFSQHPYAENFIGKPHVWTVDYNNSEEFEAAIKAIMRTQVDPYLPYEYTCEGMLERIHAYIQHQDFCRAPDPALPEAHAPQSPFVLAPNATHLEWARNTSLAPGAWPPAHALRAWLAVPGRACTDTCLDHGLICEPSFFPFLNSQDAFLKLQVPCDSTESEMNHLYPAFAQPGQECYLQKEPLLFSCAGSNTKYRRLCPCRDFRKGQVALCQGCL

SEQ ID NO: 31559 - protein, 110 aa, Homo sapiens
  REGION 1..110: note = ENSP00000457614
MITVNPDGKIMVRRCLVTLRPFRLFVLGIGFFTLCFLMTSLGGQFSARRLGDSPFTIRTEVMGGPESRGVLRKMSDLLELMVKRMDALARLENSSELHRAGGDLHFPADR

SEQ ID NO: 31560 - protein, 801 aa, Homo sapiens
  REGION 1..801: note = ENSP00000391227
MHSFVKHLCSRYVVERQGTMALPALLTRLLPLRRLFVLGIGFFTLCFLMTSLGGQFSARRLGDSPFTIRTEVMGGPESRGVLRKMSDLLELMVKRMDALARLENSSELHRAGGDLHFPADRMPPGAGLMERIQAIAQNVSDIAVKVDQILRHSLLLHSKVSEGRRDQCEAPSDPKFPDCSGKVEWMRARWTSDPCYAFFGVDGTECSFLIYLSEVEWFCPPLPWRNQTAAQRAPKPLPKVQAVFRSNLSHLLDLMGSGKESLIFMKKRTKRLTAQWALAAQRLAQKLGATQRDQKQILVHIGFLTEESGDVFSPRVLKGGPLGEMVQWADILTALYVLGHGLRVTVSLKELQSNLGVPPGRGSCPLTMPLPFDLIYTDYHGLQQMKRHMGLSFKKYRCRIRVIDTFGTEPAYNHEEYATLHGYRTNWGYWNLNPKQFMTMFPHTPDNSFMGFVSEELNETEKRLIKGGKASNMAVVYGKEASIWKGKEKFLGILNKYMEIHGTVYYESQRPPEVPAFVKNHGLLPQPEFQQLLRKAKLFIGFGFPYEGPAPLEAIANGCIFLQSRFSPPHSSLNHEFFRGKPTSREVFSQHPYAENFIGKPHVWTVDYNNSEEFEAAIKAIMRTQVDPYLPYEYTCEGMLERIHAYIQHQDFCRAPDPALPEAHAPQSPFVLAPNATHLEWARNTSLAPGAWPPAHALRAWLAVPGRACTDTCLDHGLICEPSFFPFLNSQDAFLKLQVPCDSTESEMNHLYPAFAQPGQECYLQKEPLLFSCAGSNTKYRRLCPCRDFRKGQVALCQGCL

SEQ ID NO: 31561 - protein, 483 aa, Homo sapiens
  REGION 1..483: note = ENSP00000455631
MHSFVKHLCSRYVVERQGTMALPALLTRLLPLRRLFVLGIGFFTLCFLMTSLGGQFSARRLGDSPFTIRTEVMGGPESRGVLRKMSDLLELMVKRMDALARLENSSELHRAGGDLHFPADRMPPGAGLMERIQAIAQNVSDIAVKVDQILRHSLLLHSKVSEGRRDQCEAPSDPKFPDCSGKVEWMRARWTSDPCYAFFGVDGTECSFLIYLSEVEWFCPPLPWRNQTAAQRAPKPLPKVQAVFRSNLSHLLDLMGSGKESLIFMKKRTKRLTAQWALAAQRLAQKLGATQRDQKQILVHIGFLTEESGDVFSPRVLKGGPLGEMVQWADILTALYVLGHGLRVTVSLKELQSNLGVPPGRGSCPLTMPLPFDLIYTDYHGLQQMKRHMGLSFKKYRCRIRVIDTFGTEPAYNHEEYATLHGYRTNWGYWNLNPKQFMTMFREGEVPGHPEQIHGDPWHRVLREPAAPRGASLCEEPRPLTAA

SEQ ID NO: 31562 - protein, 303 aa, Homo sapiens
  REGION 1..303: note = ENSP00000402798
MPEESSPRRTPQSIPYQDLPHLVNADGQYLFCRYWKPTGTPKALIFVSHGAGEHSGRYEELARMLMGLDLLVFAHDHVGHGQSEGERMVVSDFHVFVRDVLQHVDSMQKDYPGLPVFLLGHSMGGAIAILTAAERPGHFAGMVLISPLVLANPESATTFKVLAAKVLNLVLPNLSLGPIDSSVLSRNKTEVDIYNSDPLICRAGLKVCFGIQLLNAVSRVERALPKLTVPFLLLQGSADRLCDSKGAYLLMELAKSQDKTLKIYEGAYHVLHKELPEVTNSVFHEINMWVSQRTATAGTASPP

SEQ ID NO: 31563 - protein, 209 aa, Homo sapiens
  REGION 1..209: note = ENSP00000417060
  VARIANT 1: note = Any amino acid
XLQGGAIAILTAAERPGHFAGMVLISPLVLANPESATTFKDYSRILKHLMEKASRMLKFWIPRPFWVLAAKVLNLVLPNLSLGPIDSSVLSRNKTEVDIYNSDPLICRAGLKVCFGIQLLNAVSRVERALPKLTVPFLLLQGSADRLCDSKGAYLLMELAKSQDKTLKIYEGAYHVLHKELPEVTNSVFHEINMWVSQRTATAGTASPP

SEQ ID NO: 31564 - protein, 155 aa, Homo sapiens [sequence omitted]

SEQ ID NO: 31565 - protein, 277 aa, Homo sapiens
  REGION 1..277: note = ENSP00000381173
MQTRFRRIFPWKDASTKRMPEFIHFSPLKPYKGREWEKAGSEHVLETHLLPVGHGQSEGERMVVSDFHVFVRDVLQHVDSMQKDYPGLPVFLLGHSMGGAIAILTAAERPGHFAGMVLISPLVLANPESATTFKVLAAKVLNLVLPNLSLGPIDSSVLSRNKTEVDIYNSDPLICRAGLKVCFGIQLLNAVSRVERALPKLTVPFLLLQGSADRLCDSKGAYLLMELAKSQDKTLKIYEGAYHVLHKELPEVTNSVFHEINMWVSQRTATAGTASPP

SEQ ID NO: 31566 - protein, 197 aa, Homo sapiens
  REGION 1..197: note = ENSP00000419340
PVGHGQSEGERMVVSDFHVFVRDVLQHVDSMQKDYPGLPVFLLGHSMGGAIAILTAAERPGHFAGMVLISPLVLANPESATTFKVDIYNSDPLICRAGLKVCFGIQLLNAVSRVERALPKLTVPFLLLQGSADRLCDSKGAYLLMELAKSQDKTLKIYEGAYHVLHKELPEVTNSVFHEINMWVSQRTATAGTASPP

SEQ ID NO: 31567 - protein, 89 aa, Homo sapiens
  REGION 1..89: note = ENSP00000417689
MLMGLDLLVFAHDHVGHGQSEGERMVVSDFHVFVRDVLQHVDSMQKDYPGLPVFLLGHSMGGAIAILTAAERPGHFAGMVLISPLVLAN

SEQ ID NO: 31568 - protein, 77 aa, Homo sapiens
  REGION 1..77: note = ENSP00000417489
MPEESSPRRTPQSIPYQDLPHLVNADGQYLFCRYWKPTGTPKALIFVSHGAGEHSGRYEELARMLMGLDLLVFAHDH

SEQ ID NO: 31569 - protein, 313 aa, Homo sapiens
  REGION 1..313: note = ENSP00000265052
METGPEDPSSMPEESSPRRTPQSIPYQDLPHLVNADGQYLFCRYWKPTGTPKALIFVSHGAGEHSGRYEELARMLMGLDLLVFAHDHVGHGQSEGERMVVSDFHVFVRDVLQHVDSMQKDYPGLPVFLLGHSMGGAIAILTAAERPGHFAGMVLISPLVLANPESATTFKVLAAKVLNLVLPNLSLGPIDSSVLSRNKTEVDIYNSDPLICRAGLKVCFGIQLLNAVSRVERALPKLTVPFLLLQGSADRLCDSKGAYLLMELAKSQDKTLKIYEGAYHVLHKELPEVTNSVFHEINMWVSQRTATAGTASPP

SEQ ID NO: 31570 - protein, 303 aa, Homo sapiens; identical to SEQ ID NO: 31562
  REGION 1..303: note = ENSP00000381176

SEQ ID NO: 31571 - protein, 283 aa, Homo sapiens
  REGION 1..283: note = ENSP00000404146
METGPEDPSSMPEESSPRRTPQSIPYQDLPHLVNADGQYLFCRYWKPTGTPKALIFVSHGAGEHSGRYEELARMLMGLDLLVFAHDHVGHGQSEGERMVVSDFHVFVRDVLQHVDSMQKDYPGLPVFLLGHSMGGAIAILTAAERPGHFAGMVLISPLVLANPESATTFKVDIYNSDPLICRAGLKVCFGIQLLNAVSRVERALPKLTVPFLLLQGSADRLCDSKGAYLLMELAKSQDKTLKIYEGAYHVLHKELPEVTNSVFHEINMWVSQRTATAGTASPP

SEQ ID NO: 31572 - protein, 103 aa, Homo sapiens
  REGION 1..103: note = ENSP00000445907
MKSLILLAILAALAVVTLCYESHESMESYELNPFINRRNANTFISPQQRWRAKVQERIRERSKPVHELNREACDDYRLCERYAMVYGYNAAYNRYFRKRRGTK

SEQ ID NO: 31573 - protein, 74 aa, Homo sapiens
  REGION 1..74: note = ENSP00000445436
  VARIANT 1: note = Any amino acid
XSHESMESYELRSENALSLSTSSIGKPVMTTDFANATPWFMDTMLPIIATSGSAEGPNETEGRKKISFFLEAGT

SEQ ID NO: 31574 - protein, 128 aa, Homo sapiens
  REGION 1..128: note = ENSP00000228938
MKSLILLAILAALAVVTLCYGEWQKEENFGFDIVSVLSLNWHRAQESHESMESYELNPFINRRNANTFISPQQRWRAKVQERIRERSKPVHELNREACDDYRLCERYAMVYGYNAAYNRYFRKRRGTK

SEQ ID NO: 31575 - protein, 77 aa, Homo sapiens
  REGION 1..77: note = ENSP00000442557
MVDLTQVMDDEVFMAFASYATIILSKMMLMSTATAFYRLTRKVFANPEDCVAFGKGENAKKYLRTDDRVERVRRAHL

SEQ ID NO: 31576 - protein, 106 aa, Homo sapiens
  REGION 1..106: note = ENSP00000442767
MVDLTQVFANPEDCVAFGKGENAKKYLRTDDRVERVRRAHLNDLENIIPFLGIGLLYSLSGPDPSTAILHFRLFVGARIYHTIAYLTPLPQPNRALSFFVGYGVTL

SEQ ID NO: 31577 - protein, 155 aa, Homo sapiens
  REGION 1..155: note = ENSP00000379513
MVDLTQVMDDEVFMAFASYATIILSKMMLMSTATAFYRLTRKVFANPEDCVAFGKGENAKKYLRTDDRVERVRRAHLNDLENIIPFLGIGLLYSLSGPDPSTAILHFRLFVGARIYHTIAYLTPLPQPNRALSFFVGYGVTLSMAYRLLKSKLYL

SEQ ID NO: 31578 - protein, 87 aa, Homo sapiens
  REGION 1..87: note = ENSP00000438308
MVDLTQVMDDEVFMAFASYATIILSKMMLMSTATAFYRLTRKVFANPEDCVAFGKGENAKKYLRTDDRVERVRRIKQTLSIYLASSI

SEQ ID NO: 31579 - protein, 46 aa, Homo sapiens
  REGION 1..46: note = ENSP00000437988
MVDLTQVMDDEVFMAFASYATIILSKMMLMSTATAFYRLTRKSPPE

SEQ ID NO: 31580 - protein, 80 aa, Homo sapiens
  REGION 1..80: note = ENSP00000442970
MVDLTQVMDDEVFMAFASYATIILSKMMLMSTATAFYRLTRKVFANPEDCVAFGKGENAKKYLRTDDRVERVRRAHLNDL

SEQ ID NO: 31581 - protein, 42 aa, Homo sapiens
  REGION 1..42: note = ENSP00000440443
MVDLTQVMDDEVFMAFASYATIILSKMMLMSTATAFYRLTRK

SEQ ID NO: 31582 - protein, 155 aa, Homo sapiens; identical to SEQ ID NO: 31577
  REGION 1..155: note = ENSP00000379510

SEQ ID NO: 31583 - protein, 155 aa, Homo sapiens; identical to SEQ ID NO: 31577
  REGION 1..155: note = ENSP00000010404

SEQ ID NO: 31584 - protein, 155 aa, Homo sapiens; identical to SEQ ID NO: 31577
  REGION 1..155: note = ENSP00000379512

SEQ ID NO: 31585 - protein, 98 aa, Homo sapiens
  REGION 1..98: note = ENSP00000434209
MGENEDEKQAQAGQVFENFVQASTCKGTLQAFNILTRHLDLDPLDHRNFYSKLKSKVTTWKAKALWYKLDKRGSHKEYKRGKSCTNTKCLIVGGGPCG

SEQ ID NO: 31586 - protein, 88 aa, Homo sapiens
  REGION 1..88: note = ENSP00000435270
MGENEDEKQAQAGQVFENFVQASTCKGTLQAFNILTRHLDLDPLDHRNFYSKLKSKVTTWKAKALWYKLDKRGSHKEYKRGKSCTNTK

SEQ ID NO: 31587 - protein, 1124 aa, Homo sapiens
  REGION 1..1124: note = ENSP00000256194
MGENEDEKQAQAGQVFENFVQASTCKGTLQAFNILTRHLDLDPLDHRNFYSKLKSKVTTWKAKALWYKLDKRGSHKEYKRGKSCTNTKCLIVGGGPCGLRTAIELAYLGAKVVVVEKRDSFSRNNVLHLWPFTIHDLRGLGAKKFYGKFCAGSIDHISIRQLQLILFKVALMLGVEIHVNVEFVKVLEPPEDQENQKIGWRAEFLPTDHSLSEFEFDVIIGADGRRNTLEGFRRKEFRGKLAIAITANFINRNSTAEAKVEEISGVAFIFNQKFFQDLKEETGIDLENIVYYKDCTHYFVMTAKKQSLLDKGVIINDYIDTEMLLCAENVNQDNLLSYAREAADFATNYQLPSLDFAMNHYGQPDVAMFDFTCMYASENAALVRERQAHQLLVALVGDSLLEPFWPMGTGCARGFLAAFDTAWMVKSWNQGTPPLELLAERESLYRLLPQTTPENINKNFEQYTLDPGTRYPNLNSHCVRPHQVKHLYITKELEHYPLERLGSVRRSVNLSRKESDIRPSKLLTWCQQQTEGYQHVNVTDLTTSWRSGLALCAIIHRFRPELINFDSLNEDDAVENNQLAFDVAEREFGIPPVTTGKEMASAQEPDKLSMVMYLSKFYELFRGTPLRPVDSWRKNYGENADLSLAKSSISNNYLNLTFPRKRTPRVDGQTGENDMNKRRRKGFTNLDEPSNFSSRSLGSNQECGSSKEGGNQNKVKSMANQLLAKFEESTRNPSLMKQERRVSGIGKPVLCSSSGPPVHSCCPKPEEATPSPSPPLKRQFPSVVVTGHVLRELKQVSAGSECLSRPWRARAKSDLQLGGTENFATLPSTRPRAQALSGVLWRLQQVEEKILQKRAQNLANREFHTKNIKEKAAHLASMFGHGDFPQNKLLSKGLSHTHPPSPPSRLPSPDPAASSSPSTVDSASPARKEKKSPSGFHFHPSHLRTVHPQLTVGKVSSGIGAAAEVLVNLYMNDHRPKAQATSPDLESMRKSFPLNLGGSDTCYFCKKRVYVMERLSAEGHFFHRECFRCSICATTLRLAAYTFDCDEGKFYCKPHFIHCKTNSKQRKRRAELKQQREEEATWQEQEAPRRDTPTESSCAVAAIGTLEGSPPVHFSLPVLHPLLG

SEQ ID NO: 31588 - skipped

SEQ ID NO: 31589 - protein, 88 aa, Homo sapiens; identical to SEQ ID NO: 31586
  REGION 1..88: note = ENSP00000433818

SEQ ID NO: 31590 - protein, 934 aa, Homo sapiens
  REGION 1..934: note = ENSP00000433965
MGENEDEKQAQAGQVFENFVQASTCKGTLQAFNILTRHLDLDPLDHRNFYSKLKSKVTTWKAKALWYKLDKRGSHKEYKRGKSCTNTKCLIVGGGPCGLRTAIELAYLGAKVVVVEKRDSFSRNNVLHLWPFTIHDLRGLGAKKFYGKFCAGSIDHISIRQLQLILFKVALMLGVEIHVNVEFVKVLEPPEDQENQKIGWRAEFLPTDHSLSEFEFDVIIGADGRRNTLEGFRRKEFRGKLAIAITANFINRNSTAEAKVEEISGVAFIFNQKFFQDLKEETGIDLENIVYYKDCTHYFVMTAKKQSLLDKGVIINDYIDTEMLLCAENVNQDNLLSYAREAADFATNYQLPSLDFAMNHYGQPDVAMFDFTCMYASENAALVRERQAHQLLVALVGDSLLEPFWPMGTGCARGFLAAFDTAWMVKSWNQGTPPLELLAERESLYRLLPQTTPENINKNFEQYTLDPGTRYPNLNSHCVRPHQVKHLYITKELEHYPLERLGSVRRSVNLSRKESDIRPSKLLTWCQQQTEGYQHVNVTDLTTSWRSGLALCAIIHRFRPELINFDSLNEDDAVENNQLAFDVAEREFGIPPVTTGKEMASAQEPDKLSMVMYLSKFYELFRGTPLRPVDSWRKNYGENADLSLAKSSISNNYLNLTFPRKRTPRVDGQTGENDMNKRRRKGFTNLDEPSNFSSRSLGSNQECGSSKEGGNQNKVKSMANQLLAKFEESTRNPSLMKQEKKSPSGFHFHPSHLRTVHPQLTVGKVSSGIGAAAEVLVNLYMNDHRPKAQATSPDLESMRKSFPLNLGGSDTCYFCKKRVYVMERLSAEGHFFHRECFRCSICATTLRLAAYTFDCDEGKFYCKPHFIHCKTNSKQRKRRAELKQQREEEATWQEQEAPRRDTPTESSCAVAAIGTLEGSPPVHFSLPVLHPLLG

SEQ ID NO: 31591 - protein, 120 aa, Homo sapiens
  REGION 1..120: note = ENSP00000437229
MGENEDEKQAQAGQVFENFVQASTCKGTLQAFNILTRHLDLDPLDHRNFYSKLKSKVTTWKAKALWYKLDKRGSHKEYKRGKSCTNTKCLIVGGGPCGLRTAIELAYLGAKVVVVEKRDS

SEQ ID NO: 31592 - protein, 134 aa, Homo sapiens
  REGION 1..134: note = ENSP00000433509
MGENEDEKQAQAGQVFENFVQASTCKGTLQAFNILTRHLDLDPLDHRNFYSKLKSKVTTWKAKALWYKLDKRGSHKEYKRGKSCTNTKCLIVGGGPCGLRTAIELAYLGAKVVVVEKRDSFSRNNVLHLWPFTI

SEQ ID NO: 31593 - protein, 101 aa, Homo sapiens
  REGION 1..101: note = ENSP00000433357
MGENEDEKQAQAGQVFENFVQASTCKGTLQAFNILTRHLDLDPLDHRNFYSKLKSKVTTWKAKALWYKLDKRGSHKEYKRGKSCTNTKCLIVGGGPCGLRT

SEQ ID NO: 31594 - protein, 976 aa, Homo sapiens
  REGION 1..976: note = ENSP00000368932
MGENEDEKQAQAGQVFENFVQASTCKGTLQAFNILTRHLDLDPLDHRNFYSKLKSKVTTWKAKALWYKLDKRGSHKEYKRGKSCTNTKCLIVGGGPCGLRTAIELAYLGAKVVVVEKRDSFSRNNVLHLWPFTIHDLRGLGAKKFYGKFCAGSIDHISIRQLQLILFKVALMLGVEIHVNVEFVKVLEPPEDQENQKIGWRAEFLPTDHSLSEFEFDVIIGADGRRNTLEGFRRKEFRGKLAIAITANFINRNSTAEAKVEEISGVAFIFNQKFFQDLKEETGIDLENIVYYKDCTHYFVMTAKKQSLLDKGVIINDYIDTEMLLCAENVNQDNLLSYAREAADFATNYQLPSLDFAMNHYGQPDVAMFDFTCMYASENAALVRERQAHQLLVALVGDSLLEPFWPMGTGCARGFLAAFDTAWMVKSWNQGTPPLELLAERESLYRLLPQTTPENINKNFEQYTLDPGTRYPNLNSHCVRPHQVKHLYITKELEHYPLERLGSVRRSVNLSRKESDIRPSKLLTWCQQQTEGYQHVNVTDLTTSWRSGLALCAIIHRFRPELINFDSLNEDDAVENNQLAFDVAEREFGIPPVTTGKEMASAQEPDKLSMVMYLSKFYELFRGTPLRPVDSWRKNYGENADLSLAKSSISNNYLNLTFPRKRTPRVDGQTGENDMNKRRRKGFTNLDEPSNFSSRSLGSNQECGSSKEGGNQNKVKSMANQLLAKFEESTRNPSLMKQEKKSPSGFHFHPSHLRTVHPQESMRKSFPLNLGGSDTCYFCKKRVYVMERLSAEGHFFHRECFRCSICATTLRLAAYTFDCDEGKFYCKPHFIHCKTNSKQRKRRAELKQQREEEATWQEQEAPRRDTPTESSCAVAAIGTLEGSPPGISTSFFRKVLGWPLRLPRDLCNWMQGLLQAAGLHIRDNAYNYCYMYELLSLGLPLLWAFSEVLAAMYRESEGSLESICNWVLRCFPVKLR

SEQ ID NO: 31595 - protein, 1103 aa, Homo sapiens
  REGION 1..1103: note = ENSP00000344894
MGENEDEKQAQAGQVFENFVQASTCKGTLQAFNILTRHLDLDPLDHRNFYSKLKSKVTTWKAKALWYKLDKRGSHKEYKRGKSCTNTKCLIVGGGPCGLRTAIELAYLGAKVVVVEKRDSFSRNNVLHLWPFTIHDLRGLGAKKFYGKFCAGSIDHISIRQLQLILFKVALMLGVEIHVNVEFVKVLEPPEDQENQKIGWRAEFLPTDHSLSEFEFDVIIGADGRRNTLEGFRRKEFRGKLAIAITANFINRNSTAEAKVEEISGVAFIFNQKFFQDLKEETGIDLENIVYYKDCTHYFVMTAKKQSLLDKGVIINDYIDTEMLLCAENVNQDNLLSYAREAADFATNYQLPSLDFAMNHYGQPDVAMFDFTCMYASENAALVRERQAHQLLVALVGDSLLEPFWPMGTGCARGFLAAFDTAWMVKSWNQGTPPLELLAERESLYRLLPQTTPENINKNFEQYTLDPGTRYPNLNSHCVRPHQVKHLYITKELEHYPLERLGSVRRSVNLSRKESDIRPSKLLTWCQQQTEGYQHVNVTDLTTSWRSGLALCAIIHRFRPELINFDSLNEDDAVENNQLAFDVAEREFGIPPVTTGKEMASAQEPDKLSMVMYLSKFYELFRGTPLRPVDSWRKNYGENADLSLAKSSISNNYLNLTFPRKRTPRVDGQTGENDMNKRRRKGFTNLDEPSNFSSRSLGSNQECGSSKEGGNQNKVKSMANQLLAKFEESTRNPSLMKQERRVSGIGKPVLCSSSGPPVHSCCPKPEEATPSPSPPLKRQFPSVVVTGHVLRELKQVSAGSECLSRPWRARAKSDLQLGGTENFATLPSTRPRAQALSGVLWRLQQVEEKILQKRAQNLANREFHTKNIKEKAAHLASMFGHGDFPQNKLLSKGLSHTHPPSPPSRLPSPDPAASSSPSTVDSASPARKLTVGKVSSGIGAAAEVLVNLYMNDHRPKAQATSPDLESMRKSFPLNLGGSDTCYFCKKRVYVMERLSAEGHFFHRECFRCSICATTLRLAAYTFDCDEGKFYCKPHFIHCKTNSKQRKRRAELKQQREEEATWQEQEAPRRDTPTESSCAVAAIGTLEGSPPVHFSLPVLHPLLG

SEQ ID NO: 31596 - protein, 1124 aa, Homo sapiens; identical to SEQ ID NO: 31587
  REGION 1..1124: note = ENSP00000441689

SEQ ID NO: 31597 - protein, 29 aa, Homo sapiens
  REGION 1..29: note = ENSP00000432324
MSPPKDPSPSLPLPSSSSHSSSPPSSSST

SEQ ID NO: 31598 - protein, 695 aa, Homo sapiens
  REGION 1..695: note = ENSP00000256186
MSPPKDPSPSLPLPSSSSHSSSPPSSSSTSVSGNAPDGSSPPQMTASEPLSQVSRGHPSPPTPNFRRRAVAQGAPREIPLYLPHHPKPEWAEYCLVSPGEDGLSDPAEMTSDECQPAEAPLGDIGSNHRDPHPIWGKDRSWTGQELSPLAGEDREKGSTGARKEEEGGPVLVKEKLGLKKLVLTQEQKTMLLDWNDSIPESVHLKAGERISQKSAENGRGGRVLKPVRPLLLPRAAGEPLPTQRGAQEKMGTPAEQAQGERNVPPPKSPLRLIANAIRRSLEPLLSNSEGGKKAWAKQESKTLPAQACTRSFSLRKTNSNKDGDQHSPGRNQSSAFSPPDPALRTHSLPNRPSKVFPALRSPPCSKIEDVPTLLEKVSLQENFPDASKPPKKRISLFSSLRLKDKSFESFLQESRQRKDIRDLFGSPKRKVLPEDSAQALEKLLQPFKSTSLRQAAPPPPPPPPPPPPPPTAGGADSKNFPLRAQVTEASSSASSTSSSSADEEFDPQLSLQLKEKKTLRRRKKLEKAMKQLVKQEELKRLYKAQAIQRQLEEVEERQRASEIQGVRLEKALRGEADSGTQDEAQLLQEWFKLVLEKNKLMRYESELLIMAQELELEDHQSRLEQKLREKMLKEESQKDEKDLNEEQEVFTELMQVIEQRDKLVDSLEEQRIREKAEDQHFESFVFSRGCQLSRT

SEQ ID NO: 31599 - protein, 667 aa, Homo sapiens
  REGION 1..667: note = ENSP00000370156
METLESELTCPICLELFEDPLLLPCAHSLCFNCAHRILVSHCATNESVESITAFQCPTCRHVITLSQRGLDGLKRNVTLQNIIDRFQKASVSGPNSPSETRRERAFDANTMTSAEKVLCQFCDQDPAQDAVKTCVTCEVSYCDECLKATHPNKKPFTGHRLIEPIPDSHIRGLMCLEHEDEKVNMYCVTDDQLICALCKLVGRHRDHQVAALSERYDKLKQNLESNLTNLIKRNTELETLLAKLIQTCQHVEVNASRQEAKLTEECDLLIEIIQQRRQIIGTKIKEGKVMRLRKLAQQIANCKQCIERSASLISQAEHSLKENDHARFLQTAKNITERVSMATASSQVLIPEINLNDTFDTFALDFSREKKLLECLDYLTAPNPPTIREELCTASYDTITVHWTSDDEFSVVSYELQYTIFTGQANVVSLCNSADSWMIVPNIKQNHYTVHGLQSGTKYIFMVKAINQAGSRSSEPGKLKTNSQPFKLDPKSAHRKLKVSHDNLTVERDESSSKKSHTPERFTSQGSYGVAGNVFIDSGRHYWEVVISGSTWYAIGLAYKSAPKHEWIGKNSASWALCRCNNNWVVRHNSKEIPIEPAPHLRRVGILLDYDNGSIAFYDALNSIHLYTFDVAFAQPVCPTFTVWNKCLTIITGLPIPDHLDCTEQLP

SEQ ID NO: 31600 - protein, 667 aa, Homo sapiens; identical to SEQ ID NO: 31599
  REGION 1..667: note = ENSP00000370157

SEQ ID NO: 31601 - protein, 667 aa, Homo sapiens; identical to SEQ ID NO: 31599
  REGION 1..667: note = ENSP00000370162

SEQ ID NO: 31602 - protein, 667 aa, Homo sapiens; identical to SEQ ID NO: 31599
  REGION 1..667: note = ENSP00000370164

SEQ ID NO: 31603 - protein, 552 aa, Homo sapiens
  REGION 1..552: note = ENSP00000370159
METLESELTCPICLELFEDPLLLPCAHSLCFNCAHRILVSHCATNESVESITAFQCPTCRHVITLSQRGLDGLKRNVTLQNIIDRFQKASVSGPNSPSETRRERAFDANTMTSAEKVLCQFCDQDPAQDAVKTCVTCEVSYCDECLKATHPNKKPFTGHRLIEPIPDSHIRGLMCLEHEDEKVNMYCVTDDQLICALCKLVGRHRDHQVAALSERYDKLKQNLESNLTNLIKRNTELETLLAKLIQTCQHVEVNASRQEAKLTEECDLLIEIIQQRRQIIGTKIKEGKVMRLRKLAQQIANCKQCIERSASLISQAEHSLKENDHARFLQTAKNITERVSMATASSQVLIPEINLNDTFDTFALDFSREKKLLECLDYLTAPNPPTIREELCTASYDTITVHWTSDDEFSVVSYELQYTIFTGQANVVSLCNSADSWMIVPNIKQNHYTVHGLQSGTKYIFMVKAINQAGSRSSEPGKLKTNSQPFKLDPKSAHRKLKVSHDNLTVERDESSSKKSHTPERFTSQGSYGVAGNVFIDSGRHYWEVVISGSTW

SEQ ID NO: 31604 - protein, 483 aa, Homo sapiens
  REGION 1..483: note = ENSP00000391154
METLESELTCPICLELFEDPLLLPCAHSLCFNCAHRILVSHCATNESVESITAFQCPTCRHVITLSQRGLDGLKRNVTLQNIIDRFQKASVSGPNSPSETRRERAFDANTMTSAEKVLCQFCDQDPAQDAVKTCVTCEVSYCDECLKATHPNKKPFTGHRLIEPIPDSHIRGLMCLEHEDEKVNMYCVTDDQLICALCKLVGRHRDHQVAALSERYDKLKQNLESNLTNLIKRNTELETLLAKLIQTCQHVEVNASRQEAKLTEECDLLIEIIQQRRQIIGTKIKEGKVMRLRKLAQQIANCKQCIERSASLISQAEHSLKENDHARFLQTAKNITERVSMATASSQVLIPEINLNDTFDTFALDFSREKKLLECLDYLTAPNPPTIREELCTASYDTITVHWTSDDEFSVVSYELQYTIFTGQANVVSLCNSADSWMIVPNIKQNHYTVHGLQSGTKYIFMVKAINQAGSRSSEPGKLKTNS

SEQ ID NO: 31605 - protein, 197 aa, Homo sapiens
  REGION 1..197: note = ENSP00000387771
METLESELTCPICLELFEDPLLLPCAHSLCFNCAHRILVSHCATNESVESITAFQCPTCRHVITLSQRGLDGLKRNVTLQNIIDRFQKASVSGPNSPSETRRERAFDANTMTSAEKVLCQFCDQDPAQDAVKTCVTCEVSYCDECLKATHPNKKPFTGHRLIEPIPDSHIRGLMCLEHEDEKVNMYCVTDDQLICAL

SEQ ID NO: 31606 - protein, 667 aa, Homo sapiens; identical to SEQ ID NO: 31599
  REGION 1..667: note = ENSP00000414521

SEQ ID NO: 31607 - protein, 228 aa, Homo sapiens
  REGION 1..228: note = ENSP00000483707
METLESELTCPICLELFEDPLLLPCAHSLCFNCAHRILVSHCATNESVESITAFQCPTCRHVITLSQRGLDGLKRNVTLQNIIDRFQKASVSGPNSPSETRRERAFDANTMTSAEKVLCQFCDQDPAQDAVKTCVTCEVSYCDECLKATHPNKKPFTGHRLIEPIPDSHIRGLMCLEHEDEKQNLESNLTNLIKRNTELETLLAKLIQTCQHVELECSVLFPRVAQWG

SEQ ID NO: 31608 - protein, 540 aa, Homo sapiens
  REGION 1..540: note = ENSP00000484712
METLESELTCPICLELFEDPLLLPCAHSLCFNCAHRILVSHCATNESVESITAFQCPTCRHVITLSQRGLDGLKRNVTLQNIIDRFQKASVSGPNSPSETRRERAFDANTMTSAEKVLCQFCDQDPAQDAVKTCVTCEVSYCDECLKATHPNKKPFTGHRLIEPIPDSHIRGLMCLEHEDEKVNMYCVTDDQLICALCKLVGRHRDHQVAALSERYDKLKQNLESNLTNLIKRNTELETLLAKLIQTCQHVETVKDQKVIGREKQQYYPRNRRKWVSNSLQARLMGRRCISRRERKLTLDVEKVNASRQEAKLTEECDLLIEIIQQRRQIIGTKIKEGKVMRLRKLAQQIANCKQCIERSASLISQAEHSLKENDHARFLQTAKNITERVSMATASSQVLIPEINLNDTFDTFALDFSREKKLLECLDYLTAPNPPTIREELCTASYDTITVHWTSDDEFSVVSYELQYTIFTGQANVVSEYLMAYLFLSLVAFFRLIAFLNLNFKGRQGRKEHTIFIDLSFLNKKVIALTCTTLVKTAG

SEQ ID NO: 31609 - protein, 667 aa, Homo sapiens; identical to SEQ ID NO: 31599
  REGION 1..667: note = ENSP00000312678

SEQ ID NO: 31610 - protein, 218 aa, Homo sapiens
  REGION 1..218: note = ENSP00000410730
METLESELTCPICLELFEDPLLLPCAHSLCFSCAHRILVSSCSSGESIEPITAFQCPTCRYVISLNHRGLDGLKRNVTLQNIIDRFQKASVSGPNSPSESRRERTYRPTTAMSSERIACQFCEQDPPRDAVKTCITCEVSYCDRCLRATHPNKKPFTSHRLVEPVPDTHLRGITCLDHENEKVNMYCVSDDQLICALCKLVGRHRDHQVASLNDRFEK

SEQ ID NO: 31611 - protein, 735 aa, Homo sapiens
  REGION 1..735: note = ENSP00000262843
MGESPASVVLNASGGLFSLKMETLESELTCPICLELFEDPLLLPCAHSLCFSCAHRILVSSCSSGESIEPITAFQCPTCRYVISLNHRGLDGLKRNVTLQNIIDRFQKASVSGPNSPSESRRERTYRPTTAMSSERIACQFCEQDPPRDAVKTCITCEVSYCDRCLRATHPNKKPFTSHRLVEPVPDTHLRGITCLDHENEKVNMYCVSDDQLICALCKLVGRHRDHQVASLNDRFEKLKQTLEMNLTNLVKRNSELENQMAKLIQICQQVEVNTAMHEAKLMEECDELVEIIQQRKQMIAVKIKETKVMKLRKLAQQVANCRQCLERSTVLINQAEHILKENDQARFLQSAKNIAERVAMATASSQVLIPDINFNDAFENFALDFSREKKLLEGLDYLTAPNPPSIREELCTASHDTITVHWISDDEFSISSYELQYTIFTGQANFISKSWCSWGLWPEIRKCKEAVSCSRLAGAPRGLYNSVDSWMIVPNIKQNHYTVHGLQSGTRYIFIVKAINQAGSRNSEPTRLKTNSQPFKLDPKMTHKKLKISNDGLQMEKDESSLKKSHTPERFSGTGCYGAAGNIFIDSGCHYWEVVMGSSTWYAIGIAYKSAPKNEWIGKNASSWVFSRCNSNFVVRHNNKEMLVDVPPHLKRLGVLLDYDNNMLSFYDPANSLHLHTFDVTFILPVCPTFTIWNKSLMILSGLPAPDFIDYPERQECNCRPQESPYVSGMKTCH

SEQ ID NO: 31612 - protein, 705 aa, Homo sapiens
  REGION 1..705: note = ENSP00000413976
MGESPASVVLNASGGLFSLKMETLESELTCPICLELFEDPLLLPCAHSLCFSCAHRILVSSCSSGESIEPITAFQCPTCRYVISLNHRGLDGLKRNVTLQNIIDRFQKASVSGPNSPSESRRERTYRPTTAMSSERIACQFCEQDPPRDAVKTCITCEVSYCDRCLRATHPNKKPFTSHRLVEPVPDTHLRGITCLDHENEKVNMYCVSDDQLICALCKLVGRHRDHQVASLNDRFEKLKQTLEMNLTNLVKRNSELENQMAKLIQICQQVEVNTAMHEAKLMEECDELVEIIQQRKQMIAVKIKETKVMKLRKLAQQVANCRQCLERSTVLINQAEHILKENDQARFLQSAKNIAERVAMATASSQVLIPDINFNDAFENFALDFSREKKLLEGLDYLTAPNPPSIREELCTASHDTITVHWISDDEFSISSYELQYTIFTGQANFISLYNSVDSWMIVPNIKQNHYTVHGLQSGTRYIFIVKAINQAGSRNSEPTRLKTNSQPFKLDPKMTHKKLKISNDGLQMEKDESSLKKSHTPERFSGTGCYGAAGNIFIDSGCHYWEVVMGSSTWYAIGIAYKSAPKNEWIGKNASSWVFSRCNSNFVVRHNNKEMLVDVPPHLKRLGVLLDYDNNMLSFYDPANSLHLHTFDVTFILPVCPTFTIWNKSLMILSGLPAPDFIDYPERQECNCRPQESPYVSGMKTCH

SEQ ID NO: 31613 - protein, 216 aa, Homo sapiens
  REGION 1..216: note = ENSP00000466895
MEPQPGGARSCRRGAPGGACELGPAAEAAPMSLAIHSTTGTRYDLAVPPDETVEGLRKRLSQRLKVPKERLALLHKDTRLSSGKLQEFGVGDGSKLTLVPTVEAGLMSQASRPEQSVMQALESLTETQVSDFLSGRSPLTLALRVGDHMMFVQLQLAAQHAPLQHRHVLAAAAAAAAARGDPSIASPVSSPCRPVSSAARVPPVPTSPSPASPSPI

SEQ ID NO: 31614 - protein, 468 aa, Homo sapiens
  REGION 1..468: note = ENSP00000467679
MEPQPGGARSCRRGAPGGACELGPAAEAAPMSLAIHSTTGTRYDLAVPPDETVEGLRKRLSQRLKVPKERLALLHKDTRLSSGKLQEFGVGDGSKLTLVPTVEAGLMSQASRPEQSVMQALESLTETQVSDFLSGRSPLTLALRVGDHMMFVQLQLAAQHAPLQHRHVLAAAAAAAAARGDPSIASPVSSPCRPVSSAARVPPVPTSPSPASPSPITAGSFRSHAASTTCPEQMDCSPTASSSASPGASTTSTPGASPAPRSRKPGAVIESFVNHAPGVFSGTFSGTLHPNCQDSSGRPRRDIGTILQILNDLLSATRHYQGMPPSLAQLRCHAQCSPASPAPDLAPRTTSCEKLTAAPSASLLQGQSQIRMCKPPGDRLRQTENRATRCKVERLQLLLQQKRLRRKARRDARGPYHWSPSRKAGRSDSSSSGGGGSPSEASGLGLDFEDSVWKPEVNPDIKSEFVVA

SEQ ID NO: 31615 - protein, 139 aa, Homo sapiens
  REGION 1..139: note = ENSP00000466835
  VARIANT 1: note = Any amino acid
XRLSSGKLQEFGVGDGSKLTLVPTVEAGLMSQASRPEQSVMQALESLTETQPPAAPGPGRAGGGGFRKYRFILFKRPWHRQGPQSPERGGERPQVSDFLSGRSPLTLALRVGDHMMFVQLQLAAQHAPLQHRHVLAAAA

SEQ ID NO: 31616 - protein, 468 aa, Homo sapiens; identical to SEQ ID NO: 31614
  REGION 1..468: note = ENSP00000300952

SEQ ID NO: 31617 - protein, 352 aa, Homo sapiens
  REGION 1..352: note = ENSP00000364946
MNTIVFNKLSGAVLFEDGGASERERGGRPYSGVLDSPHARPEVGIPDGPPLKDNLGLRHRRTGARQNGGKVRHKRQALQDMARPLKQWLYKHRDNPYPTKTEKILLALGSQMTLVQVSNWFANARRRLKNTVRQPDLSWALRIKLYNKYVQGNAERLSVSSDDSCSEDGENPPRTHMNEGGYNTPVHHPVIKSENSVIKAGVRPESRASEDYVAPPKYKSSLLNRYLNDSLRHVMATNTTMMGKTRQRNHSGSFSSNEFEEELVSPSSSETEGNFVYRTDTLENGSNKGESAANRKGPSKDDTYWKEINAAMALTNLAQGKDKLQGTTSCIIQKSSHIAEVKTVKVPLVQQF

SEQ ID NO: 31618 - protein, 290 aa, Homo sapiens
  REGION 1..290: note = ENSP00000452751
MNTIVFNKLSGAVLFEDGGASERERGGRPYSGVLDSPHARPEVGIPDGPPLKDNLGLRHRRTGARQNGGKVRHKRQALQDMARPLKQWLYKHRDNPYPTKTEKILLALGSQMTLVQVSNWFANARRRLKNTVRQPDLSWALRIKLYNKYVQGNAERLSVSSDDSCSEDGENPPRTHMNEGGYNTPVHHPVIKSENSVIKAGVRPESRASEDYVAPPKYKSSLLNRYLNDSLRHVMATNTTMMGKTRQRNHSGSFSSNEFEEELVSPSSSETEGNFVYRTVENLGSLSEDS

SEQ ID NO: 31619 - protein, 58 aa, Homo sapiens
  REGION 1..58: note = ENSP00000453746
MNTIVFNKLSGAVLFEDGGASERERGGRPYSGVLDSPHARPEVGIPDGPPLKDNLGLR

SEQ ID NO: 31620 - protein, 352 aa, Homo sapiens; identical to SEQ ID NO: 31617
  REGION 1..352: note = ENSP00000400896

SEQ ID NO: 31621 - protein, 377 aa, Homo sapiens
  REGION 1..377: note = ENSP00000379216
MTQEPFREELAYDRMPTLERGRQDPASYAPDAKPSDLQLSKRLPPCFSHKTWVFSVLMGSCLLVTSGFSLYLGNVFPAEMDYLRCAAGSCIPSAIVSFTVSRRNANVIPNFQILFVSTFAVTTTCLIWFGCKLVLNPSAININFNLILLLLLELLMAATVIIAARSSEEDCKKKKGSMSDSANILDEVPFPARVLKSYSVVEVIAGISAVLGGIIALNVDDSVSGPHLSVTFFWILVACFPSAIASHVAAECPSKCLVEVLIAISSLTSPLLFTASGYLSFSIMRIVEMFKDYPPAIKPSYDVLLLLLLLVLLLQAGLNTGTAIQCVRFKVSARLQGASWDTQNGPQERLAGEVARSPLKEFDKEKAWRAVVVQMAQ

SEQ ID NO: 31622 - protein, 377 aa, Homo sapiens; identical to SEQ ID NO: 31621
  REGION 1..377: note = ENSP00000310375

SEQ ID NO: 31623 - protein, 223 aa, Homo sapiens
  REGION 1..223: note = ENSP00000401385
MTQEPFREELAYDRMPTLERGRQDPASYAPDAKPSDLQLSKRLPPCFSHKTWVFSVLMGCIPSAIVSFTVSRRNANVIPNFQILFVSTFAVTTTCLIWFGCKLVLNPSAININFNLILLLLLELLMAATVIIAARSSEEDCKKKKGSMSDSANILDEVPFPARVLKSYSVVEVIAGISAVLGGIIALNVDDSVSGPHLSVTFFWILVACFPSAIASHVAAECP

SEQ ID NO: 31624 - protein, 90 aa, Homo sapiens
  REGION 1..90: note = ENSP00000357917
MRDPVSSQYSSFLFWRMPIPELDLSELEGLGLSDTATYKVKDSSVGKMIGQATAADQEKNPEGDGLLEYSTFNFWRAPIASIHSFELDLL

SEQ ID NO: 31625 - protein, 493 aa, Homo sapiens
  REGION 1..493: note = ENSP00000262430
MRGFGPGLTARRLLPLRLPPRPPGPRLASGQAAGALERAMDELLRRAVPPTPAYELREKTPAPAEGQCADFVSFYGGLAETAQRAELLGRLARGFGVDHGQVAEQSAGVLHLRQQQREAAVLLQAEDRLRYALVPRYRGLFHHISKLDGGVRFLVQLRADLLEAQALKLVEGPDVREMNGVLKGMLSEWFSSGFLNLERVTWHSPCEVLQKISEAEAVHPVKNWMDMKRRVGPYRRCYFFSHCSTPGEPLVVLHVALTGDISSNIQAIVKEHPPSETEEKNKITAAIFYSISLTQQGLQGVELGTFLIKRVVKELQREFPHLGVFSSLSPIPGFTKWLLGLLNSQTKEHGRNELFTDSECKEISEITGGPINETLKLLLSSSEWVQSEKLVRALQTPLMRLCAWYLYGEKHRGYALNPVANFHLQNGAVLWRINWMADVSLRGITGSCGLMANYRYFLEETGPNSTSYLGSKIIKASEQVLSLVAQFQKNSKL

SEQ ID NO: 31626 - protein, 193 aa, Homo sapiens
  REGION 1..193: note = ENSP00000385963
MFAPRLLDFQKTKYARFMNHRVPAHKRYQPTEYEHAANCATHAFWIIPSILGSSNLYFLSDDDWETISAWIYGLGLCGLFVVSTVFHTISWKKSHLRMVEHCLHMFDRMVIYFFIAASYAPWLNLRELGPWASHMRWLVWIMASVGTIYVFFFHERYKLVELLCYVVMGFFPALVILSMAGKLRPGMTCLKRQ

SEQ ID NO: 31627 - protein, 270 aa, Homo sapiens
  REGION 1..270: note = ENSP00000384690
MFAPRLLDFQKTKYARFMNHRVPAHKRYQPTEYEHAANCATHAFWIIPSILGSSNLYFLSDDDWETISAWIYGLGLCGLFVVSTVFHTISWKKSHLRMVEHCLHMFDRMVIYFFIAASYAPWLNLRELGPWASHMRWLVWIMASVGTIYVFFFHERTGSCVQFLRGEACPKAGTACLPARYKLVELLCYVVMGFFPALVILSMPNTEGIWELVTGGVFYCLGMVFFKSDGRIPFAHAIWHLFVAFGAGTHYYAIWRYLYLPSTLQTKVSK

SEQ ID NO: 31628 - protein, 246 aa, Homo sapiens
  REGION 1..246: note = ENSP00000384141
MFAPRLLDFQKTKYARFMNHRVPAHKRYQPTEYEHAANCATHAFWIIPSILGSSNLYFLSDDDWETISAWIYGLGLCGLFVVSTVFHTISWKKSHLRMVEHCLHMFDRMVIYFFIAASYAPWLNLRELGPWASHMRWLVWIMASVGTIYVFFFHERYKLVELLCYVVMGFFPALVILSMPNTEGIWELVTGGVFYCLGMVFFKSDGRIPFAHAIWHLFVAFGAGTHYYAIWRYLYLPSTLQTKVSK

SEQ ID NO: 31629 - protein, 193 aa, Homo sapiens; identical to SEQ ID NO: 31626
  REGION 1..193: note = ENSP00000484193

SEQ ID NO: 31630 - protein, 71 aa, Homo sapiens
  REGION 1..71: note = ENSP00000450323
MSPAPRPPRCLLLPLLTLGTALASLGSAQSSSFSPESLEELYNWGELPLPRFPWALLSALEPPDKHLDSAQ

SEQ ID NO: 31631 - protein, 194 aa, Homo sapiens
  REGION 1..194: note = ENSP00000446989
MRESLLFLRLPSSPALSRRRALRWALRPPRVAQAFSGRVCGQAWLQQYGYLPPGDLRTHTQRSPQSLSAAIAAMQKFYGLQVTGKADADTMKAMRRPRCGVPDKFGAEIKANVRRKRYAIQGLKWQHNEITFCIQNYTPKVGEYATYEAIRKAFRVWESATPLRFREVPYAYIREGHEKQADIMIFFAEGFHGD

SEQ ID NO: 31632 - protein, 582 aa, Homo sapiens
  REGION 1..582: note = ENSP00000308208
MSPAPRPPRCLLLPLLTLGTALASLGSAQSSSFSPEAWLQQYGYLPPGDLRTHTQRSPQSLSAAIAAMQKFYGLQVTGKADADTMKAMRRPRCGVPDKFGAEIKANVRRKRYAIQGLKWQHNEITFCIQNYTPKVGEYATYEAIRKAFRVWESATPLRFREVPYAYIREGHEKQADIMIFFAEGFHGDSTPFDGEGGFLAHAYFPGPNIGGDTHFDSAEPWTVRNEDLNGNDIFLVAVHELGHALGLEHSSDPSAIMAPFYQWMDTENFVLPDDDRRGIQQLYGGESGFPTKMPPQPRTTSRPSVPDKPKNPTYGPNICDGNFDTVAMLRGEMFVFKERWFWRVRNNQVMDGYPMPIGQFWRGLPASINTAYERKDGKFVFFKGDKHWVFDEASLEPGYPKHIKELGRGLPTDKIDAALFWMPNGKTYFFRGNKYYRFNEELRAVDSEYPKNIKVWEGIPESPRGSFMGSDEVFTYFYKGNKYWKFNNQKLKVEPGYPKSALRDWMGCPSGGRPDEGTEEETEVIIIEVDEEGGGAVSAAAVVLPVLLLLLVLAVGLAVFFFRRHGTPRRLLYCQRSLLDKV

SEQ ID NO: 31633 - protein, 669 aa, Homo sapiens
  REGION 1..669: note = ENSP00000219271
MGSDPSAPGRPGWTGSLLGDREEAARPRLLPLLLVLLGCLGLGVAAEDAEVHAENWLRLYGYLPQPSRHMSTMRSAQILASALAEMQRFYGIPVTGVLDEETKEWMKRPRCGVPDQFGVRVKANLRRRRKRYALTGRKWNNHHLTFSIQNYTEKLGWYHSMEAVRRAFRVWEQATPLVFQEVPYEDIRLRRQKEADIMVLFASGFHGDSSPFDGTGGFLAHAYFPGPGLGGDTHFDADEPWTFSSTDLHGNNLFLVAVHELGHALGLEHSSNPNAIMAPFYQWKDVDNFKLPEDDLRGIQQLYGTPDGQPQPTQPLPTVTPRRPGRPDHRPPRPPQPPPPGGKPERPPKPGPPVQPRATERPDQYGPNICDGDFDTVAMLRGEMFVFKGRWFWRVRHNRVLDNYPMPIGHFWRGLPGDISAAYERQDGRFVFFKGDRYWLFREANLEPGYPQPLTSYGLGIPYDRIDTAIWWEPTGHTFFFQEDRYWRFNEETQRGDPGYPKPISVWQGIPASPKGAFLSNDAAYTYFYKGTKYWKFDNERLRMEPGYPKSILRDFMGCQEHVEPGPRWPDVARPPFNPHGGAEPGADSAEGDVGDGDGDFGAGVNKDGGSRVVVQMEEVARTVNVVMVLVPLLLLLCVLGLTYALVQMQRKGAPRVLLYCKRSLQEWV

SEQ ID NO: 31634 - protein, 97 aa, Homo sapiens
  REGION 1..97: note = ENSP00000457084
  VARIANT 1: note = Any amino acid
XSTDLHGNNLFLVAVHELGHALGLEHSSNPNAIMAPFYQWKDVDNFKLPEDDLRGIQQLYGAWAVTSGLCMPLSSPWPMRSRHCCHPHFVDEEPKAQ

SEQ ID NO: 31635 - protein, 607 aa, Homo sapiens
  REGION 1..607: note = ENSP00000286614
MILLTFSTGRRLDFVHHSGVFFLQTLLWILCATVCGTEQYFNVEVWLQKYGYLPPTDPRMSVLRSAETMQSALAAMQQFYGINMTGKVDRNTIDWMKKPRCGVPDQTRGSSKFHIRRKRYALTGQKWQHKHITYSIKNVTPKVGDPETRKAIRRAFDVWQNVTPLTFEEVPYSELENGKRDVDITIIFASGFHGDSSPFDGEGGFLAHAYFPGPGIGGDTHFDSDEPWTLGNPNHDGNDLFLVAVHELGHALGLEHSNDPTAIMAPFYQYMETDNFKLPNDDLQGIQKIYGPPDKIPPPTRPLPTVPPHRSIPPADPRKNDRPKPPRPPTGRPSYPGAKPNICDGNFNTLAILRREMFVFKDQWFWRVRNNRVMDGYPMQITYFWRGLPPSIDAVYENSDGNFVFFKGNKYWVFKDTTLQPGYPHDLITLGSGIPPHGIDSAIWWEDVGKTYFFKGDRYWRYSEEMKTMDPGYPKPITVWKGIPESPQGAFVHKENGFTYFYKGKEYWKFNNQILKVEPGYPRSILKDFMGCDGPTDRVKEGHSPPDDVDIVIKLDNTASTVKAIAIVIPCILALCLLVLVYTVFQFKRKGTPRHILYCKRSMQEWV

SEQ ID NO: 31636 - protein, 168 aa, Homo sapiens
  REGION 1..168: note = ENSP00000429147
MRDGRYCRRAVLKPGPLSRAGYLRTGRRLDFVHHSGVFFLQTLLWILCATVCGTEQYFNVEVWLQKYGYLPPTDPRMSVLRSAETMQSALAAMQQFYGINMTGKVDRNTIDWMKKPRCGVPDQTRGSSKFHIRRKRYALTGQKWQHKHITYSIKNVTPKVGDPETRKA

SEQ ID NO: 31637 - protein, 584 aa, Homo sapiens
  REGION 1..584: note = ENSP00000461421
MQKFFGLPQTGDLDQNTIETMRKPRCGNPDVANYNFFPRKPKWDKNQITYRIIGYTPDLDPETVDDAFARAFQVWSDVTPLRFSRIHDGEADIMINFGRWEHGDGYPFDGKDGLLAHAFAPGTGVGGDSHFDDDELWTLGEGQVVRVKYGNADGEYCKFPFLFNGKEYNSCTDTGRSDGFLWCSTTYNFEKDGKYGFCPHEALFTMGGNAEGQPCKFPFRFQGTSYDSCTTEGRTDGYRWCGTTEDYDRDKKYGFCPETAMSTVGGNSEGAPCVFPFTFLGNKYESCTSAGRSDGKMWCATTANYDDDRKWGFCPDQGYSLFLVAAHEFGHAMGLEHSQDPGALMAPIYTYTKNFRLSQDDIKGIQELYGASPDIDLGTGPTPTLGPVTPEICKQDIVFDGIAQIRGEIFFFKDRFIWRTVTPRDKPMGPLLVATFWPELPEKIDAVYEAPQEEKAVFFAGNEYWIYSASTLERGYPKPLTSLGLPPDVQRVDAAFNWSKNKKTYIFAGDKFWRYNEVKKKMDPGFPKLIADAWNAIPDNLDAVVDLQGGGHSYFFKGAYYLKLENQSLKSVKFGSIKSDWLGC

SEQ ID NO: 31638 - protein, 118 aa, Homo sapiens
  REGION 1..118: note = ENSP00000457949
MQKFFGLPQTGDLDQNTIETMRKPRCGNPDVANYNFFPRKPKWDKNQITYRIIGYTPDLDPETVDDAFARAFQVWSDVTPLRFSRIHDGEADIMINFGRWEHGDGYPFDGKDGLLAHA

SEQ ID NO: 31639 - protein, 660 aa, Homo sapiens
  REGION 1..660: note = ENSP00000219070
MEALMARGALTGPLRALCLLGCLLSHAAAAPSPIIKFPGDVAPKTDKELAVQYLNTFYGCPKESCNLFVLKDTLKKMQKFFGLPQTGDLDQNTIETMRKPRCGNPDVANYNFFPRKPKWDKNQITYRIIGYTPDLDPETVDDAFARAFQVWSDVTPLRFSRIHDGEADIMINFGRWEHGDGYPFDGKDGLLAHAFAPGTGVGGDSHFDDDELWTLGEGQVVRVKYGNADGEYCKFPFLFNGKEYNSCTDTGRSDGFLWCSTTYNFEKDGKYGFCPHEALFTMGGNAEGQPCKFPFRFQGTSYDSCTTEGRTDGYRWCGTTEDYDRDKKYGFCPETAMSTVGGNSEGAPCVFPFTFLGNKYESCTSAGRSDGKMWCATTANYDDDRKWGFCPDQGYSLFLVAAHEFGHAMGLEHSQDPGALMAPIYTYTKNFRLSQDDIKGIQELYGASPDIDLGTGPTPTLGPVTPEICKQDIVFDGIAQIRGEIFFFKDRFIWRTVTPRDKPMGPLLVATFWPELPEKIDAVYEAPQEEKAVFFAGNEYWIYSASTLERGYPKPLTSLGLPPDVQRVDAAFNWSKNKKTYIFAGDKFWRYNEVKKKMDPGFPKLIADAWNAIPDNLDAVVDLQGGGHSYFFKGAYYLKLENQSLKSVKFGSIKSDWLGC

SEQ ID NO: 31640 - protein, 201 aa, Homo sapiens
  REGION 1..201: note = ENSP00000456096
MQKFFGLPQTGDLDQNTIETMRKPRCGNPDVANYNFFPRKPKWDKNQITYRIIGYTPDLDPETVDDAFARAFQVWSDVTPLRFSRIHDGEADIMINFGRWEHGDGYPFDGKDGLLAHAFAPGTGVGGDSHFDDDELWTLGEGQVVRVKYGNADGEYCKFPFLFNGKEYNSCTDTGRSDGFLWCSTTYNFEKDGKYGFCPHE

SEQ ID NO: 31641 - protein, 584 aa, Homo sapiens; identical to SEQ ID NO: 31637
  REGION 1..584: note = ENSP00000444143

SEQ ID NO: 31642 - protein, 610 aa, Homo sapiens
  REGION 1..610: note = ENSP00000394237
MQYLNTFYGCPKESCNLFVLKDTLKKMQKFFGLPQTGDLDQNTIETMRKPRCGNPDVANYNFFPRKPKWDKNQITYRIIGYTPDLDPETVDDAFARAFQVWSDVTPLRFSRIHDGEADIMINFGRWEHGDGYPFDGKDGLLAHAFAPGTGVGGDSHFDDDELWTLGEGQVVRVKYGNADGEYCKFPFLFNGKEYNSCTDTGRSDGFLWCSTTYNFEKDGKYGFCPHEALFTMGGNAEGQPCKFPFRFQGTSYDSCTTEGRTDGYRWCGTTEDYDRDKKYGFCPETAMSTVGGNSEGAPCVFPFTFLGNKYESCTSAGRSDGKMWCATTANYDDDRKWGFCPDQGYSLFLVAAHEFGHAMGLEHSQDPGALMAPIYTYTKNFRLSQDDIKGIQELYGASPDIDLGTGPTPTLGPVTPEICKQDIVFDGIAQIRGEIFFFKDRFIWRTVTPRDKPMGPLLVATFWPELPEKIDAVYEAPQEEKAVFFAGNEYWIYSASTLERGYPKPLTSLGLPPDVQRVDAAFNWSKNKKTYIFAGDKFWRYNEVKKKMDPGFPKLIADAWNAIPDNLDAVVDLQGGGHSYFFKGAYYLKLENQSLKSVKFGSIKSDWLGC

SEQ ID NO: 31643 - protein, 251 aa, Homo sapiens
  REGION 1..251: note = ENSP00000456518
GTTEDYDRDKKYGFCPETGYSLFLVAAHEFGHAMGLEHSQDPGALMAPIYTYTKNFRLSQDDIKGIQELYGASPDIDLGTGPTPTLGPVTPEICKQDIVFDGIAQIRGEIFFFKDRFIWRTVTPRDKPMGPLLVATFWPELPEKIDAVYEAPQEEKAVFFAGNEYWIYSASTLERGYPKPLTSLGLPPDVQRVDAAFNWSKNKKTYIFAGDKFWRYNEVKKKMDPGFPKLIADAWNAIPDNLDAVVDLQGG

SEQ ID NO: 31644 - protein, 22 aa, Homo sapiens
  REGION 1..22: note = ENSP00000461915
  VARIANT 1: note = Any amino acid
XLENQSLKSVKFGSIKSDWLGC

SEQ ID NO: 31645 - protein, 645 aa, Homo sapiens
  REGION 1..645: note = ENSP00000246186
MPRSRGGRAAPGPPPPPPPPGQAPRWSRWRVPGRLLLLLLPALCCLPGAARAAAAAAGAGNRAAVAVAVARADEAEAPFAGQNWLKSYGYLLPYDSRASALHSAKALQSAVSTMQQFYGIPVTGVLDQTTIEWMKKPRCGVPDHPHLSRRRRNKRYALTGQKWRQKHITYSIHNYTPKVGELDTRKAIRQAFDVWQKVTPLTFEEVPYHEIKSDRKEADIMIFFASGFHGDSSPFDGEGGFLAHAYFPGPGIGGDTHFDSDEPWTLGNANHDGNDLFLVAVHELGHALGLEHSSDPSAIMAPFYQYMETHNFKLPQDDLQGIQKIYGPPAEPLEPTRPLPTLPVRRIHSPSERKHERQPRPPRPPLGDRPSTPGTKPNICDGNFNTVALFRGEMFVFKDRWFWRLRNNRVQEGYPMQIEQFWKGLPARIDAAYERADGRFVFFKGDKYWVFKEVTVEPGYPHSLGELGSCLPREGIDTALRWEPVGKTYFFKGERYWRYSEERRATDPGYPKPITVWKGIPQAPQGAFISKEGYYTYFYKGRDYWKFDNQKLSVEPGYPRNILRDWMGCNQKEVERRKERRLPQDDVDIMVTINDVPGSVNAVAVVIPCILSLCILVLVYTIFQFKNKTGPQPVTYYKRPVQEWV

SEQ ID NO: 31646 - protein, 495 aa, Homo sapiens
  REGION 1..495: note = ENSP00000260453
MGSKRRNLSCSERHQKLVDENYCKKLHVQALKNVNSQIRNQMVQNENDNRVQRKQFLRLLQNEQFELDMEEAIQKAEENKRLKELQLKQEEKLAMELAKLKHESLKDEKMRQQVRENSIELRELEKKLKAAYMNKERAAQIAEKDAIKYEQMKRDAEIAKTMMEEHKRIIKEENAAEDKRNKAKAQYYLDLEKQLEEQEKKKQEAYEQLLKEKLMIDEIVRKIYEEDQLEKQQKLEKMNAMRRYIEEFQKEQALWRKKKREEMEEENRKIIEFANMQQQREEDRMAKVQENEEKRLQLQNALTQKLEEMLRQREDLEQVRQELYQEEQAEIYKSKLKEEAEKKLRKQKEMKQDFEEQMALKELVLQAAKEEEENFRKTMLAKFAEDDRIELMNAQKQRMKQLEHRRAVEKLIEERRQQFLADKQRELEEWQLQQRRQGFINAIIEEERLKLLKEHATNLLGYLPKGVFKKEDDIDLLGEEFRKVYQQRSEICEEK

SEQ ID NO: 31647 - protein, 58 aa, Homo sapiens
  REGION 1..58: note = ENSP00000410720
MSQKPAKEGPRLSKNQKYSEHFSIHCCPPFTFLNSKKEIVDRKYSICKSGCFYQKKEE

SEQ ID NO: 31648 - protein, 81 aa, Homo sapiens
  REGION 1..81: note = ENSP00000401312
MSQKPAKEGPRLSKNQKYSEHFSIHCCPPFTFLNSKKEIVDRKYSICKSGCFYQKKEEDWICCACQKTRLKRKIRPTPKKK

SEQ ID NO: 31649 - protein, 183 aa, Homo sapiens
  REGION 1..183: note = ENSP00000400491
MSQKPAKEGPRLSKNQKYSEHFSIHCCPPFTFLNSKKEIVDRKYSICKSGCFYQKKEEDWICCACQKTRTSRRAKSPQRPKQQPAAPPAVVRAPAKPRSPPRSERQPRSPPRSERQPRSPPRSERQPRSPPRSERQPRPRPEVRPPPAKQRPPQKSKQQPRSSPLRGPGASRGGSPVKASRFW

SEQ ID NO: 31650 - protein, 81 aa, Homo sapiens; identical to SEQ ID NO: 31648
  REGION 1..81: note = ENSP00000388148

SEQ ID NO: 31651 - protein, 81 aa, Homo sapiens; identical to SEQ ID NO: 31648
  REGION 1..81: note = ENSP00000409730

SEQ ID NO: 31652 - protein, 81 aa, Homo sapiens; identical to SEQ ID NO: 31648
  REGION 1..81: note = ENSP00000373261

SEQ ID NO: 31653 - protein, 62 aa, Homo sapiens
  REGION 1..62: note = ENSP00000409071
MSVDIPLPTSEMSQKPAKEGPRLSKNQKYSEHFSIHCCPPFTFLNSKKEIVDRKYSICKSGC

SEQ ID NO: 31654 - protein, 183 aa, Homo sapiens; identical to SEQ ID NO: 31649
  REGION 1..183: note = ENSP00000388827

SEQ ID NO: 31655 - protein, 206 aa, Homo sapiens
  REGION 1..206: note = ENSP00000312293
MSQKPAKEGPRLSKNQKYSEHFSIHCCPPFTFLNSKKEIVDRKYSICKSGCFYQKKEEDWICCACQKTSSCQRRLSSRGEPWLPPPASFGPLRTSRRAKSPQRPKQQPAAPPAVVRAPAKPRSPPRSERQPRSPPRSERQPRSPPRSERQPRSPPRSERQPRPRPEVRPPPAKQRPPQKSKQQPRSSPLRGPGASRGGSPVKASRF

SEQ ID NO: 31656 - protein, 81 aa, Homo sapiens; identical to SEQ ID NO: 31648
  REGION 1..81: note = ENSP00000405549

SEQ ID NO: 31657 - protein, 183 aa, Homo sapiens; identical to SEQ ID NO: 31649
  REGION 1..183: note = ENSP00000389055

SEQ ID NO: 31658 - protein, 182 aa, Homo sapiens
  REGION 1..182: note = ENSP00000413771
MSQKPAKEGPRLSKNQKYSEHFSIHCCPPFTFLNSKKEIVDRKYSICKSGCFYQKKEEDWICCACQKTRTSRRAKSPQRPKQQPAAPPAVVRAPAKPRSPPRSERQPRSPPRSERQPRSPPRSERQPRSPPRSERQPRPRPEVRPPPAKQRPPQKSKQQPRSSPLRGPGASRGGSPVKASRF

SEQ ID NO: 31659 - protein, 247 aa, Homo sapiens
  REGION 1..247: note = ENSP00000401609
MASLSRPSLPSCLCSFLLLLLLQVSSSYAGQFRVIGPRHPIRALVGDEVELPCRISPGKNATGMEVGWYRPPFSRVVHLYRNGKDQDGDQAPEYRGRTELLKDAIGEGKVTLRIRNVRFSDEGGFTCFFRDHSYQEEAAMELKVEDPFYWVSPGVLVLLAVLPVLLLQITVGLVFLCLQYRLRGKLRAEIENLHRTFDPHFLRVPCWKITLFVIVPVLGPLVALIICYNWLHRRLAGQFLEELRNPF

SEQ ID NO: 31660 - protein, 295 aa, Homo sapiens [sequence omitted]

SEQ ID NO: 31661 - protein, 179 aa, Homo sapiens
  REGION 1..179: note = ENSP00000408039
  VARIANT 1: note = Any amino acid
XQFRVIGPRHPIRALVGDEVELPCRISPGKNATGMEVGWYRPPFSRVVHLYRNGKDQDGDQAPEYRGRTELLKDAIGEGKVTLRIRNVRFSDEGGFTCFFRDHSYQEEAAMELKVEDPFYWVSPGVLVLLAVLPVLLLQITVGLVFLCLQYRLRGKLRAEIENLHRTFGQFLEELRNPF

SEQ ID NO: 31662 - protein, 252 aa, Homo sapiens
  REGION 1..252: note = ENSP00000402363
MASLSRPSLPSCLCSFLLLLLLQVSSSYAGQFRVIGPRHPIRALVGDEVELPCRISPGKNATGMEVGWYRPPFSRVVHLYRNGKDQDGDQAPEYRGRTELLKDAIGEGKVTLRIRNVRFSDEGGFTCFFRDHSYQEEAAMELKVEDPFYWVSPGVLVLLAVLPVLLLQITVGLVFLCLQYRLRGKLRAEIENLHRTFDPHFLRVPCWKITLFVIVPVLGPLVALIICYNWLHRRLAGQFLEELLFHLEALSG

SEQ ID NO: 31663 - protein, 229 aa, Homo sapiens [sequence omitted]

SEQ ID NO: 31664 - protein, 213 aa, Homo sapiens
  REGION 1..213: note = ENSP00000391516
MASLSRPSLPSCLCSFLLLLLLQVSSSYAGQFRVIGPRHPIRALVGDEVELPCRISPGKNATGMEVGWYRPPFSRVVHLYRNGKDQDGDQAPEYRGRTELLKDAIGEGKVTLRIRNVRFSDEGGFTCFFRDHSYQEEAAMELKVEDPFYWVSPGVLVLLAVLPVLLLQITVGLVFLCLQYRLRGKLRAEIENLHRTFGQFLEELLFHLEALSG

SEQ ID NO: 31665 - protein, 204 aa, Homo sapiens
  REGION 1..204: note = ENSP00000415883
SLSRPSLPSCLCSFLLLLLLQVSSSYAGQFRVIGPRHPIRALVGDEVELPCRISPGKNATGMEVGWYRPPFSRVVHLYRNGKDQDGDQAPEYRGRTELLKDAIGEGKVTLRIRNVRFSDEGGFTCFFRDHSYQEEAAMELKVEDPFYWVSPGVLVLLAVLPVLLLQITVGLVFLCLQYRLRGKLRAEIENLHRTFVFHLEALSG

SEQ ID NO: 31666 - protein, 131 aa, Homo sapiens [sequence omitted]

SEQ ID NO: 31667 - protein, 224 aa, Homo sapiens [sequence omitted]

SEQ ID NO: 31668 - protein, 208 aa, Homo sapiens [sequence omitted]

SEQ ID NO: 31669 - protein, 247 aa, Homo sapiens
  REGION 1..247: note = ENSP00000366115
MASLSRPSLPSCLCSFLLLLLLQVSSSYAGQFRVIGPRHPIRALVGDEVELPCRISPGKNATGMEVGWYRPPFSRVVHLYRNGKDQDGDQAPEYRGRTELLKDAIGEGKVTLRIRNVRFSDEGGFTCFFRDHSYQEEAAMELKVEDPFYWVSPGVLVLLAVLPVLLLQITVGLIFLCLQYRLRGKLRAEIENLHRTFDPHFLRVPCWKITLFVIVPVLGPLVALIICYNWLHRRLAGQFLEELRNPF

SEQ ID NO: 31670 - protein, 45 aa, Homo sapiens
  REGION 1..45: note = ENSP00000366101
MASLSRPSLPSCLCSFLLLLLLQVSSSYAVQSDRTKTPYPGSGRG

SEQ ID NO: 31671 - protein, 131 aa, Homo sapiens
  REGION 1..131: note = ENSP00000366085
MASLSRPSLPSCLCSFLLLLLLQVSSSYADPFYWVSPGVLVLLAVLPVLLLQITVGLIFLCLQYRLRGKLRAEIENLHRTFDPHFLRVPCWKITLFVIVPVLGPLVALIICYNWLHRRLAGQFLEELRNPF

SEQ ID NO: 31672 - protein, 295 aa, Homo sapiens
  REGION 1..295: note = ENSP00000366091
MASLSRPSLPSCLCSFLLLLLLQVSSSYAGQFRVIGPRHPIRALVGDEVELPCRISPGKNATGMEVGWYRPPFSRVVHLYRNGKDQDGDQAPEYRGRTELLKDAIGEGKVTLRIRNVRFSDEGGFTCFFRDHSYQEEAAMELKVEDPFYWVSPGVLVLLAVLPVLLLQITVGLIFLCLQYRLRGKLRAEIENLHRTFDPHFLRVPCWKITLFVIVPVLGPLVALIICYNWLHRRLAGQFLEELRKFSSLCYKQRIKSQERETEATRGRGGLLRDHIPRGKEELESLGGGKTPPGR

SEQ ID NO: 31673 - protein, 224 aa, Homo sapiens
  REGION 1..224: note = ENSP00000379932
MASLSRPSLPSCLCSFLLLLLLQVSSSYAGQFRVIGPRHPIRALVGDEVELPCRISPGKNATGMEVGWYRPPFSRVVHLYRNGKDQDGDQAPEYRGRTELLKDAIGEGKVTLRIRNVRFSDEGGFTCFFRDHSYQEEAAMELKVEDPFYWVSPGVLVLLAVLPVLLLQITVGLIFLCLQYRLRGKLRAEIENLHRTFESFGVLGPQVKEPKKTGQFLEELRNPF

SEQ ID NO: 31674 - protein, 92 aa, Homo sapiens
  REGION 1..92: note = ENSP00000418090
MASLSRPSLPSCLCSFLLLLLLQVSSSYADPFYWVSPGVLVLLAVLPVLLLQITVGLIFLCLQYRLRGKLRAEIENLHRTFGQFLEELRNPF

SEQ ID NO: 31675 - protein, 108 aa, Homo sapiens
  REGION 1..108: note = ENSP00000420350
MASLSRPSLPSCLCSFLLLLLLQVSSSYADPFYWVSPGVLVLLAVLPVLLLQITVGLIFLCLQYRLRGKLRAEIENLHRTFESFGVLGPQVKEPKKTGQFLEELRNPF

SEQ ID NO: 31676 - protein, 209 aa, Homo sapiens
  REGION 1..209: note = ENSP00000409394
MASLSRPSLPSCLCSFLLLLLLQVSSSYAGQFRVIGPRHPIRALVGDEVELPCRISPGKNATGMEVGWYRPPFSRVVHLYRNGKDQDGDQAPEYRGRTELLKDAIGEGKVTLRIRNVRFSDEGGFTCFFRDHSYQEEAAMELKVEGKLRAEIENLHRTFDPHFLRVPCWKITLFVIVPVLGPLVALIICYNWLHRRLAGQFLEELRNPF

SEQ ID NO: 31677 - protein, 206 aa, Homo sapiens
  REGION 1..206: note = ENSP00000366088
MASLSRPSLPSCLCSFLLLLLLQVSSSYAGQFRVIGPRHPIRALVGDEVELPCRISPGKNATGMEVGWYRPPFSRVVHLYRNGKDQDGDQAPEYRGRTELLKDAIGEGKVTLRIRNVRFSDEGGFTCFFRDHSYQEEAAMELKVEDPFYWVSPGVLVLLAVLPVLLLQITVGLIFLCLQYRLRGKLRAEIENLHRTFVFHLEALSG

SEQ ID NO: 31678 - protein, 252 aa, Homo sapiens
  REGION 1..252: note = ENSP00000366095
MASLSRPSLPSCLCSFLLLLLLQVSSSYAGQFRVIGPRHPIRALVGDEVELPCRISPGKNATGMEVGWYRPPFSRVVHLYRNGKDQDGDQAPEYRGRTELLKDAIGEGKVTLRIRNVRFSDEGGFTCFFRDHSYQEEAAMELKVEDPFYWVSPGVLVLLAVLPVLLLQITVGLIFLCLQYRLRGKLRAEIENLHRTFDPHFLRVPCWKITLFVIVPVLGPLVALIICYNWLHRRLAGQFLEELLFHLEALSG

SEQ ID NO: 31679 - protein, 213 aa, Homo sapiens
  REGION 1..213: note = ENSP00000379929
MASLSRPSLPSCLCSFLLLLLLQVSSSYAGQFRVIGPRHPIRALVGDEVELPCRISPGKNATGMEVGWYRPPFSRVVHLYRNGKDQDGDQAPEYRGRTELLKDAIGEGKVTLRIRNVRFSDEGGFTCFFRDHSYQEEAAMELKVEDPFYWVSPGVLVLLAVLPVLLLQITVGLIFLCLQYRLRGKLRAEIENLHRTFGQFLEELLFHLEALSG

SEQ ID NO: 31680 - protein, 229 aa, Homo sapiens
  REGION 1..229: note = ENSP00000417405
MASLSRPSLPSCLCSFLLLLLLQVSSSYAGQFRVIGPRHPIRALVGDEVELPCRISPGKNATGMEVGWYRPPFSRVVHLYRNGKDQDGDQAPEYRGRTELLKDAIGEGKVTLRIRNVRFSDEGGFTCFFRDHSYQEEAAMELKVEDPFYWVSPGVLVLLAVLPVLLLQITVGLIFLCLQYRLRGKLRAEIENLHRTFESFGVLGPQVKEPKKTGQFLEELLFHLEALSG

SEQ ID NO: 31681 - protein, 208 aa, Homo sapiens
  REGION 1..208: note = ENSP00000410866
MASLSRPSLPSCLCSFLLLLLLQVSSSYAGQFRVIGPRHPIRALVGDEVELPCRISPGKNATGMEVGWYRPPFSRVVHLYRNGKDQDGDQAPEYRGRTELLKDAIGEGKVTLRIRNVRFSDEGGFTCFFRDHSYQEEAAMELKVEDPFYWVSPGVLVLLAVLPVLLLQITVGLIFLCLQYRLRGKLRAEIENLHRTFGQFLEELRNPF

SEQ ID NO: 31682 - protein, 142 aa, Homo sapiens
  REGION 1..142: note = ENSP00000418872
  VARIANT 1: note = Any amino acid
XQFRVIGPRHPIRALVGDEVELPCRISPGKNATGMEVGWYRPPFSRVVHLYRNGKDQDGDQAPEYRGRTELLKDAIGEGKVTLRIRNVRFSDEGGFTCFFRDHSYQEEAAMELKVEVSHSVTQDWLQWHDHGSLQPPPPRLK

SEQ ID NO: 31683 - protein, 142 aa, Homo sapiens; identical to SEQ ID NO: 31682
  REGION 1..142: note = ENSP00000366086
  VARIANT 1: note = Any amino acid

SEQ ID NO: 31684 - protein, 247 aa, Homo sapiens; identical to SEQ ID NO: 31659
  REGION 1..247: note = ENSP00000389221

SEQ ID NO: 31685 - protein, 295 aa, Homo sapiens [sequence omitted]

SEQ ID NO: 31686 - protein, 131 aa, Homo sapiens [sequence omitted]

SEQ ID NO: 31687 - protein, 252 aa, Homo sapiens; identical to SEQ ID NO: 31662
  REGION 1..252: note = ENSP00000395304

SEQ ID NO: 31688 - protein, 213 aa, Homo sapiens; identical to SEQ ID NO: 31664
  REGION 1..213: note = ENSP00000398197

SEQ ID NO: 31689 - protein, 229 aa, Homo sapiens [sequence omitted]

SEQ ID NO: 31690 - protein, 224 aa, Homo sapiens [sequence omitted]

SEQ ID NO: 31691 - protein, 204 aa, Homo sapiens; identical to SEQ ID NO: 31665
  REGION 1..204: note = ENSP00000399240

SEQ ID NO: 31692 - protein, 179 aa, Homo sapiens; identical to SEQ ID NO: 31661
  REGION 1..179: note = ENSP00000401457
  VARIANT 1: note = Any amino acid

SEQ ID NO: 31693 - protein, 208 aa, Homo sapiens [sequence omitted]

SEQ ID NO: 31694 - protein, 131 aa, Homo sapiens [sequence omitted]

SEQ ID NO: 31695 - protein, 204 aa, Homo sapiens; identical to SEQ ID NO: 31665
  REGION 1..204: note = ENSP00000397723

SEQ ID NO: 31696 - protein, 252 aa, Homo sapiens; identical to SEQ ID NO: 31662
  REGION 1..252: note = ENSP00000396344

SEQ ID NO: 31697 - protein, 179 aa, Homo sapiens; identical to SEQ ID NO: 31661
  REGION 1..179: note = ENSP00000392661
  VARIANT 1: note = Any amino acid

SEQ ID NO: 31698 - protein, 213 aa, Homo sapiens; identical to SEQ ID NO: 31664
  REGION 1..213: note = ENSP00000390682

SEQ ID NO: 31699 - protein, 229 aa, Homo sapiens [sequence omitted]

SEQ ID NO: 31700 - protein, 247 aa, Homo sapiens; identical to SEQ ID NO: 31659
  REGION 1..247: note = ENSP00000404537

SEQ ID NO: 31701 - protein, 224 aa, Homo sapiens [sequence omitted]

SEQ ID NO: 31702 - protein, 295 aa, Homo sapiens [sequence omitted]

SEQ ID NO: 31703 - protein, 208 aa, Homo sapiens [sequence omitted]

SEQ ID NO: 31704 - protein, 247 aa, Homo sapiens; identical to SEQ ID NO: 31659
  REGION 1..247: note = ENSP00000373017

SEQ ID NO: 31705 - protein, 295 aa, Homo sapiens [sequence omitted]

SEQ ID NO: 31706 - protein, 131 aa, Homo sapiens [sequence omitted]

SEQ ID NO: 31707 - protein, 213 aa, Homo sapiens; identical to SEQ ID NO: 31664
  REGION 1..213: note = ENSP00000383512

SEQ ID NO: 31708 - protein, 252 aa, Homo sapiens; identical to SEQ ID NO: 31662
  REGION 1..252: note = ENSP00000400564

SEQ ID NO: 31709 - protein, 229 aa, Homo sapiens [sequence omitted]

SEQ ID NO: 31710 - protein, 224 aa, Homo sapiens [sequence omitted]

SEQ ID NO: 31711 - protein, 204 aa, Homo sapiens; identical to SEQ ID NO: 31665
  REGION 1..204: note = ENSP00000397837

SEQ ID NO: 31712 - protein, 179 aa, Homo sapiens; identical to SEQ ID NO: 31661
  REGION 1..179: note = ENSP00000403235
  VARIANT 1: note = Any amino acid

SEQ ID NO: 31713 - protein, 208 aa, Homo sapiens [sequence omitted]

SEQ ID NO: 31714 - protein, 247 aa, Homo sapiens; identical to SEQ ID NO: 31659
  REGION 1..247: note = ENSP00000414489

SEQ ID NO: 31715 - protein, 295 aa, Homo sapiens [sequence omitted]

SEQ ID NO: 31716 - protein, 131 aa, Homo sapiens [sequence omitted]

SEQ ID NO: 31717 - protein, 252 aa, Homo sapiens; identical to SEQ ID NO: 31662
  REGION 1..252: note = ENSP00000404362

SEQ ID NO: 31718 - protein, 213 aa, Homo sapiens; identical to SEQ ID NO: 31664
  REGION 1..213: note = ENSP00000409534

SEQ ID NO: 31719 - protein, 229 aa, Homo sapiens [sequence omitted]

SEQ ID NO: 31720 - protein, 224 aa, Homo sapiens [sequence omitted]

SEQ ID NO: 31721 - protein, 204 aa, Homo sapiens; identical to SEQ ID NO: 31665
  REGION 1..204: note = ENSP00000413370

SEQ ID NO: 31722 - protein, 179 aa, Homo sapiens; identical to SEQ ID NO: 31661
  REGION 1..179: note = ENSP00000407143
  VARIANT 1: note = Any amino acid

SEQ ID NO: 31723 - protein, 208 aa, Homo sapiens [sequence omitted]

SEQ ID NO: 31724 - protein, 131 aa, Homo sapiens
  REGION 1..131: note = ENSP00000387448
MASLSRPSLPSCLCSFLLLLLLQVSSSYADPFYWVSPGVLVLLAVLPVLLLQITLGLVFLCLQYRLRGKLRAEIENLHRTFDPHFLRVPCWKITLFVIVPVLGPLVALIICYNWLHRRLAGQFLEELRNPF

SEQ ID NO: 31725 - protein, 204 aa, Homo sapiens
  REGION 1..204: note = ENSP00000395146
SLSRPSLPSCLCSFLLLLLLQVSSSYAGQFRVIGPRHPIRALVGDEVELPCRISPGKNATGMEVGWYRPPFSRVVHLYRNGKDQDGDQAPEYRGRTELLKDAIGEGKVTLRIRNVRFSDEGGFTCFFRDHSYQEEAAMELKVEDPFYWVSPGVLVLLAVLPVLLLQITLGLVFLCLQYRLRGKLRAEIENLHRTFVFHLEALSG

SEQ ID NO: 31726 - protein, 252 aa, Homo sapiens
  REGION 1..252: note = ENSP00000400681
MASLSRPSLPSCLCSFLLLLLLQVSSSYAGQFRVIGPRHPIRALVGDEVELPCRISPGKNATGMEVGWYRPPFSRVVHLYRNGKDQDGDQAPEYRGRTELLKDAIGEGKVTLRIRNVRFSDEGGFTCFFRDHSYQEEAAMELKVEDPFYWVSPGVLVLLAVLPVLLLQITLGLVFLCLQYRLRGKLRAEIENLHRTFDPHFLRVPCWKITLFVIVPVLGPLVALIICYNWLHRRLAGQFLEELLFHLEALSG

SEQ ID NO: 31727 - protein, 179 aa, Homo sapiens
  REGION 1..179: note = ENSP00000406627
  VARIANT 1: note = Any amino acid
XQFRVIGPRHPIRALVGDEVELPCRISPGKNATGMEVGWYRPPFSRVVHLYRNGKDQDGDQAPEYRGRTELLKDAIGEGKVTLRIRNVRFSDEGGFTCFFRDHSYQEEAAMELKVEDPFYWVSPGVLVLLAVLPVLLLQITLGLVFLCLQYRLRGKLRAEIENLHRTFGQFLEELRNPF

SEQ ID NO: 31728 - protein, 213 aa, Homo sapiens
  REGION 1..213: note = ENSP00000402247
MASLSRPSLPSCLCSFLLLLLLQVSSSYAGQFRVIGPRHPIRALVGDEVELPCRISPGKNATGMEVGWYRPPFSRVVHLYRNGKDQDGDQAPEYRGRTELLKDAIGEGKVTLRIRNVRFSDEGGFTCFFRDHSYQEEAAMELKVEDPFYWVSPGVLVLLAVLPVLLLQITLGLVFLCLQYRLRGKLRAEIENLHRTFGQFLEELLFHLEALSG

SEQ ID NO: 31729 - protein, 229 aa, Homo sapiens
  REGION 1..229: note = ENSP00000420250
MASLSRPSLPSCLCSFLLLLLLQVSSSYAGQFRVIGPRHPIRALVGDEVELPCRISPGKNATGMEVGWYRPPFSRVVHLYRNGKDQDGDQAPEYRGRTELLKDAIGEGKVTLRIRNVRFSDEGGFTCFFRDHSYQEEAAMELKVEDPFYWVSPGVLVLLAVLPVLLLQITLGLVFLCLQYRLRGKLRAEIENLHRTFESFGVLGPQVKEPKKTGQFLEELLFHLEALSG

SEQ ID NO: 31730 - protein, 247 aa, Homo sapiens
  REGION 1..247: note = ENSP00000389022
MASLSRPSLPSCLCSFLLLLLLQVSSSYAGQFRVIGPRHPIRALVGDEVELPCRISPGKNATGMEVGWYRPPFSRVVHLYRNGKDQDGDQAPEYRGRTELLKDAIGEGKVTLRIRNVRFSDEGGFTCFFRDHSYQEEAAMELKVEDPFYWVSPGVLVLLAVLPVLLLQITLGLVFLCLQYRLRGKLRAEIENLHRTFDPHFLRVPCWKITLFVIVPVLGPLVALIICYNWLHRRLAGQFLEELRNPF

SEQ ID NO: 31731 - protein, 224 aa, Homo sapiens
  REGION 1..224: note = ENSP00000383509
MASLSRPSLPSCLCSFLLLLLLQVSSSYAGQFRVIGPRHPIRALVGDEVELPCRISPGKNATGMEVGWYRPPFSRVVHLYRNGKDQDGDQAPEYRGRTELLKDAIGEGKVTLRIRNVRFSDEGGFTCFFRDHSYQEEAAMELKVEDPFYWVSPGVLVLLAVLPVLLLQITLGLVFLCLQYRLRGKLRAEIENLHRTFESFGVLGPQVKEPKKTGQFLEELRNPF

SEQ ID NO: 31732 - protein, 295 aa, Homo sapiens
  REGION 1..295: note = ENSP00000390785
MASLSRPSLPSCLCSFLLLLLLQVSSSYAGQFRVIGPRHPIRALVGDEVELPCRISPGKNATGMEVGWYRPPFSRVVHLYRNGKDQDGDQAPEYRGRTELLKDAIGEGKVTLRIRNVRFSDEGGFTCFFRDHSYQEEAAMELKVEDPFYWVSPGVLVLLAVLPVLLLQITLGLVFLCLQYRLRGKLRAEIENLHRTFDPHFLRVPCWKITLFVIVPVLGPLVALIICYNWLHRRLAGQFLEELRKFSSLCYKQRIKSQERETEATRGRGGLLRDHIPRGKEELESLGGGKTPPGR

SEQ ID NO: 31733 - protein, 130 aa, Homo sapiens
  REGION 1..130: note = ENSP00000491870
MASLSRPSLPSCLCSFLLLLLLQVSSSYADPFYWVSPGVLVLLAVLPVLLLQITLGLVFLCLQYRLRGKLRAEIENLHRTFDPHFLRVPCWKITLFVIVPVLGPLVALIICYNWLHRRLAGQFLEELRKF

SEQ ID NO: 31734 - protein, 204 aa, Homo sapiens; identical to SEQ ID NO: 31665
  REGION 1..204: note = ENSP00000383528

SEQ ID NO: 31735 - protein, 229 aa, Homo sapiens [sequence omitted]

SEQ ID NO: 31736 - protein, 213 aa, Homo sapiens; identical to SEQ ID NO: 31664
  REGION 1..213: note = ENSP00000352534

SEQ ID NO: 31737 - protein, 179 aa, Homo sapiens; identical to SEQ ID NO: 31661
  REGION 1..179: note = ENSP00000383525
  VARIANT 1: note = Any amino acid

SEQ ID NO: 31738 - protein, 131 aa, Homo sapiens [sequence omitted]

SEQ ID NO: 31739 - protein, 247 aa, Homo sapiens; identical to SEQ ID NO: 31659
  REGION 1..247: note = ENSP00000373126

SEQ ID NO: 31740 - protein, 295 aa, Homo sapiens [sequence omitted]

SEQ ID NO: 31741 - protein, 252 aa, Homo sapiens; identical to SEQ ID NO: 31662
  REGION 1..252: note = ENSP00000394156

SEQ ID NO: 31742 - protein, 224 aa, Homo sapiens [sequence omitted]

SEQ ID NO: 31743 - protein, 208 aa, Homo sapiens [sequence omitted]

SEQ ID NO: 31744 - protein, 288 aa, Homo sapiens
  REGION 1..288: note = ENSP00000353643
MSSRKQGSQPRGQQSAEEENFKKPTRSNMQRSKMRGASSGKKTAGPQQKNLEPALPGRWGGRSAENPPSGSVRKTRKNKQKTPGNGDGGSTSEAPQPPRKKRARADPTVESEEAFKNRMEVKVKIPEELKPWLVEDWDLVTRQKQLFQLPAKKNVDAILEEYANCKKSQGNVDNKEYAVNEVVAGIKEYFNVMLGTQLLYKFERPQYAEILLAHPDAPMSQVYGAPHLLRLFVRIGAMLAYTPLDEKSLALLLGYLHDFLKYLAKNSASLFTASDYKVASAEYHRKAL

SEQ ID NO: 31745 - protein, 288 aa, Homo sapiens; identical to SEQ ID NO: 31744
  REGION 1..288: note = ENSP00000391969

SEQ ID NO: 31746 - protein, 177 aa, Homo sapiens
  REGION 1..177: note = ENSP00000413664
MSSRKQGSQPRGQQSAEEENFKKPTRSNMQRSKMRGASSGKKTAGPQQKNLEPALPGRWGGRSAENPPSGSVRKTRKNKQKTPGNGDGGSTSEAPQPPRKKRARADPTVESEEAFKNRMEVKVKIPEELKPWLVEDWDLVTRQKQLFQLPAKKNVDAILEEYANCKKSQGNVDNKEY

SEQ ID NO: 31747 - protein, 177 aa, Homo sapiens; identical to SEQ ID NO: 31746
  REGION 1..177: note = ENSP00000393283

SEQ ID NO: 31748 - protein, 158 aa, Homo sapiens
  REGION 1..158: note = ENSP00000400938
MSSRKQGSQPRGQQSAEEENFKKPTRSNMQRSKMRGASSGKKTAGPQQKNLEPALPGRWGGRSAENPPSGSVRKTRKNKQKTPGNGDGGSTSEAPQPPRKKRARADPTVESEEAFKNRMEVKVKIPEELKPWLVEDWDLVTRQKQLFQLPAKKNVDAI

SEQ ID NO: 31749 - protein, 67 aa, Homo sapiens
  REGION 1..67: note = ENSP00000408607
MSSRKQGSQPRGQQSAEEENFKKPTRSNMQRSKMRGASSGKKTAGPQQKNLEPALPGRWGGRSAENP

SEQ ID NO: 31750 - protein, 288 aa, Homo sapiens; identical to SEQ ID NO: 31744
  REGION 1..288: note = ENSP00000394417

SEQ ID NO: 31751 - protein, 288 aa, Homo sapiens; identical to SEQ ID NO: 31744
  REGION 1..288: note = ENSP00000415476

SEQ ID NO: 31752 - protein, 288 aa, Homo sapiens; identical to SEQ ID NO: 31744
  REGION 1..288: note = ENSP00000410532

SEQ ID NO: 31753 - protein, 237 aa, Homo sapiens
  REGION 1..237: note = ENSP00000416120
MRGASSGKKTAGPQQKNLESVRKTRKNKQKTPGNGDGGSTSEAPQPPRKKRARADPTVESEEAFKNRMEVKVKIPEELKPWLVEDWDLVTRQKQLFQLPAKKNVDAILEEYANCKKSQGNVDNKEYAVNEVVAGIKEYFNVMLGTQLLYKFERPQYAEILLAHPDAPMSQVYGAPHLLRLFVRIGAMLAYTPLDEKSLALLLGYLHDFLKYLAKNSASLFTASDYKVASAEYHRKAL

SEQ ID NO: 31754 - protein, 471 aa, Homo sapiens
  REGION 1..471: note = ENSP00000262966
MAAPEPLSPAGGAGEEAPEEDEDEAEAEDPERPNAGAGGGRSGGGGSSVSGGGGGGGAGAGGCGGPGGALTRRAVTLRVLLKDALLEPGAGVLSIYYLGKKFLGDLQPDGRIMWQETGQTFNSPSAWATHCKKLVNPAKKSGCGWASVKYKGQKLDKYKATWLRLHQLHTPATAADESPASEGEEEELLMEEEEEDVLAGVSAEDKSRRPLGKSPSEPAHPEATTPGKRVDSKIRVPVRYCMLGSRDLARNPHTLVEVTSFAAINKFQPFNVAVSSNVLFLLDFHSHLTRSEVVGYLGGRWDVNSQMLTVLRAFPCRSRLGDAETAAAIEEEIYQSLFLRGLSLVGWYHSHPHSPALPSLQDIDAQMDYQLRLQGSSNGFQPCLALLCSPYYSGNPGPESKISPFWVMPPPEMLLVEFYKGSPDLVRLQEPWSQEHTYLDKLKISLASRTPKDQSLCHVLEQVCGVLKQGS

SEQ ID NO: 31755 - protein, 451 aa, Homo sapiens
  REGION 1..451: note = ENSP00000353015
MAAPEPLSPAGGAGEEAPEEDEDEAEAEDPERPNAGAGGGRSGGGGSSVSGGGGGGGAGAGGCGGPGGALTRRAVTLRVLLKDALLEPGAGVLSIYYLGKKFLGDLQPDGRIMWQETGQTFNSPSAWATHCKKLVNPAKKSGCGWASVKYKGQKLDKYKATWLRLHQLHTPATAADESPASEGEEEELLMEEEEEDVLAGVSAEDKSRRPLGKSPSEPAHPEATTPGKRVDSKIRVPVRYCMLGSRDLARNPHTLVEVTSFAAINKFQPFNVAVSSNVLFLLIYQSLFLRGLSLVGWYHSHPHSPALPSLQDIDAQMDYQLRLQGSSNGFQPCLALLCSPYYSGNPGPESKISPFWVMPPPEQRPSDYGIPMDVEMAYVQDSFLTNDILHEMMLLVEFYKGSPDLVRLQEPWSQEHTYLDKLKISLASRTPKDQSLCHVLEQVCGVLKQGS

SEQ ID NO: 31756 - protein, 501 aa, Homo sapiens
  REGION 1..501: note = ENSP00000471735
MAAPEPLSPAGGAGEEAPEEDEDEAEAEDPERPNAGAGGGRSGGGGSSVSGGGGGGGAGAGGCGGPGGALTRRAVTLRVLLKDALLEPGAGVLSIYYLGKKFLGDLQPDGRIMWQETGQTFNSPSAWATHCKKLVNPAKKSGCGWASVKYKGQKLDKYKATWLRLHQLHTPATAADESPASEGEEEELLMEEEEEDVLAGVSAEDKSRRPLGKSPSEPAHPEATTPGKRVDSKIRVPVRYCMLGSRDLARNPHTLVEVTSFAAINKFQPFNVAVSSNVLFLLDFHSHLTRSEVVGYLGGRWDVNSQMLTVLRAFPCRSRLGDAETAAAIEEEIYQSLFLRGLSLVGWYHSHPHSPALPSLQDIDAQMDYQLRLQGSSNGFQPCLALLCSPYYSGNPGPESKISPFWVMPPPEQRPSDYGIPMDVEMAYVQDSFLTNDILHEMMLLVEFYKGSPDLVRLQEPWSQEHTYLDKLKISLASRTPKDQSLCHVLEQVCGVLKQGS

SEQ ID NO: 31757 - protein, 419 aa, Homo sapiens
  REGION 1..419: note = ENSP00000470987
MAAPEPLSPAGGAGEEAPEEDEDEAEAEDPERPNAGAGGGRSGGGGSSVSGGGGGGGAGAGGCGGPGGALTRRAVTLRVLLKDALLEPGAGVLSIYYLGKKFLGDLQPDGRIMWQETGQTFNSPSAWATHCKKLVNPAKKSGCGWASVKYKGQKLDKYKATWLRLHQLHTPATAADESPASEGEEEELLMEEEEEDVLAGVSAEDKSRRPLGKSPSEPAHPEATTPGKRVDSKIRVPVRYCMLGSRDLARNPHTLVEVTSFAAINKFQPFNVAVSSNVLFLLDFHSHLTRSEVVGYLGGRWDVNSQMLTVLRAFPCRSRLGDAETAAAIEEEIYQSLFLRGLSLVGWYHSHPHSPALPSLQDIDAQMDYQLRLQGSSNGFQPCLALLCSPYYSGNPGPESKISPFWVMPPPEVPIPVQS

SEQ ID NO: 31758 - protein, 503 aa, Homo sapiens
  REGION 1..503: note = ENSP00000471715
GGPSGAEARGAGLQGRGAAEPWGERPPCSLSLSAAPEPLSPAGGAGEEAPEEDEDEAEAEDPERPNAGAGGGRSGGGGSSVSGGGGGGGAGAGGCGGPGGALTRRAVTLRVLLKDALLEPGAGVLSIYYLGKKFLGDLQPDGRIMWQETGQTFNSPSAWATHCKKLVNPAKKSGCGWASVKYKGQKLDKYKATWLRLHQLHTPATAADESPASEGEEEELLMEEEEEDVLAGVSAEDKSRRPLGKSPSEPAHPEATTPGKRVDSKIRVPVRYCMLGSRDLARNPHTLVEVTSFAAINKFQPFNVAVSSNVLFLLDFHSHLTRSEVVGYLGGRWDVNSQMLTVLRAFPCRSRLGDAETAAAIEEEIYQSLFLRGLSLVGWYHSHPHSPALPSLQDIDAQMDYQLRLQGSSNGFQPCLALLCSPYYSGNPGPESKISPFWVMPPPEMLLVEFYKGSPDLVRLQEPWSQEHTYLDKLKISLASRTPKDQSLCHVLEQVCGVLKQGS

SEQ ID NO: 31759 - protein, 469 aa, Homo sapiens
  REGION 1..469: note = ENSP00000471189
  VARIANT 1: note = Any amino acid
XEPLSPAGGAGEEAPEEDEDEAEAEDPERPNAGAGGGRSGGGGSSVSGGGGGGGAGAGGCGGPGGALTRRAVTLRVLLKDALLEPGAGVLSIYYLGKKFLGDLQPDGRIMWQETGQTFNSPSAWATHCKKLVNPAKKSGCGWASVKYKGQKLDKYKATWLRLHQLHTPATAADESPASEGEEEELLMEEEEEDVLAGVSAEDKSRRPLGKSPSEPAHPEATTPGKRVDSKIRVPVRYCMLGSRDLARNPHTLVEVTSFAAINKFQPFNVAVSSNVLFLLDFHSHLTRSEVVGYLGGRWDVNSQMLTVLRAFPCRSRLGDAETAAAIEEEDIDAQMDYQLRLQGSSNGFQPCLALLCSPYYSGNPGPESKISPFWVMPPPEQRPSDYGIPMDVEMAYVQDSFLTNDILHEMMLLVEFYKGSPDLVRLQEPWSQEHTYLDKLKISLASRTPKDQSLCHVLEQVCGVLKQGS

SEQ ID NO: 31760 - protein, 121 aa, Homo sapiens
  REGION 1..121: note = ENSP00000469230
RPLGKSPSEPAHPEATTPGKRVDSKIRVPVRYCMLGSRDLARNPHTLVEVTSFAAINKFQPFNVAVSSNVLFLLVCGPPCLGARGSGAQSVGSGRGSPAYQLHESWGLVCFVCYWYTVGAQ

SEQ ID NO: 31761 - protein, 109 aa, Homo sapiens
  REGION 1..109: note = ENSP00000469057
DFHSHLTRSEVVGYLGGRWDVNSQMLTVLRAFPCRSRLGDAETAAAIEEEMLLVEFYKGSPDLVRLQEPWSQEHTYLDKLKISLASRTPKDQSLCHVLEQVCGVLKQGS

SEQ ID NO: 31762 - protein, 217 aa, Homo sapiens
  REGION 1..217: note = ENSP00000395859
MQQVLENLTELPSSTGAEEIDLIFLKGIMENPIVKSLAKAHERLEDSKLEAVSDNNLELVNEILEDITPLINVDENVAELVGILKEPHFQSLLEAHDIVASKCYDSPPSSPEMNNSSINNQLLPVDAIRILGIHKRAGEPLGVTFRVENNDLVIARILHGGMIDRQGLLHVGDIIKEVNGHEVGNNPKELQELLKNISGSVTLKILPSYRDTITPQQ

SEQ ID NO: 31763 - protein, 540 aa, Homo sapiens
  REGION 1..540: note = ENSP00000222644
MQQVLENLTELPSSTGAEEIDLIFLKGIMENPIVKSLAKAHERLEDSKLEAVSDNNLELVNEILEDITPLINVDENVAELVGILKEPHFQSLLEAHDIVASKCYDSPPSSPEMNNSSINNQLLPVDAIRILGIHKRAGEPLGVTFRVENNDLVIARILHGGMIDRQGLLHVGDIIKEVNGHEVGNNPKELQELLKNISGSVTLKILPSYRDTITPQQVFVKCHFDYNPYNDNLIPCKEAGLKFSKGEILQIVNREDPNWWQASHVKEGGSAGLIPSQFLEEKRKAFVRRDWDNSGPFCGTISSKKKKKMMYLTTRNAEFDRHEIQIYEEVAKMPPFQRKTLVLIGAQGVGRRSLKNRFIVLNPTRFGTTVPFTSRKPREDEKDGQAYKFVSRSEMEADIKAGKYLEHGEYEGNLYGTKIDSILEVVQTGRTCILDVNPQALKVLRTSEFMPYVVFIAAPELETLRAMHKAVVDAGITTKLLTDSDLKKTVDESARIQRAYNHYFDLIIINDNLDKAFEKLQTAIEKLRMEPQWVPISWVY

SEQ ID NO: 31764 - protein, 428 aa, Homo sapiens
  REGION 1..428: note = ENSP00000386262
MNNSSINNQLLPVDAIRILGIHKRAGEPLGVTFRVENNDLVIARILHGGMIDRQGLLHVGDIIKEVNGHEVGNNPKELQELLKNISGSVTLKILPSYRDTITPQQVFVKCHFDYNPYNDNLIPCKEAGLKFSKGEILQIVNREDPNWWQASHVKEGGSAGLIPSQFLEEKRKAFVRRDWDNSGPFCGTISSKKKKKMMYLTTRNAEFDRHEIQIYEEVAKMPPFQRKTLVLIGAQGVGRRSLKNRFIVLNPTRFGTTVPFTSRKPREDEKDGQAYKFVSRSEMEADIKAGKYLEHGEYEGNLYGTKIDSILEVVQTGRTCILDVNPQALKVLRTSEFMPYVVFIAAPELETLRAMHKAVVDAGITTKLLTDSDLKKTVDESARIQRAYNHYFDLIIINDNLDKAFEKLQTAIEKLRMEPQWVPISWVY

SEQ ID NO: 31765 - protein, 540 aa, Homo sapiens; identical to SEQ ID NO: 31763
  REGION 1..540: note = ENSP00000379737

SEQ ID NO: 31766 - protein, 307 aa, Homo sapiens
  REGION 1..307: note = ENSP00000391020
MQQVLENLTELPSSTGAEEIDLIFLKGIMENPIVKSLAKAHERLEDSKLEAVSDNNLELVNEILEDITPLINVDENVAELVGILKEPHFQSLLEAHDIVASKCYDSPPSSPEMNNSSINNQLLPVDAIRILGIHKRAGEPLGVTFRVENNDLVIARILHGGMIDRQGLLHVGDIIKEVNGHEVGNNPKELQELLKNISGSVTLKILPSYRDTITPQQVFVKCHFDYNPYNDNLIPCKEAGLKFSKGEILQIVNREDPNWWQASHVKEGGSAGLIPSQFLEEKRKAFVRRDWDNSGPFCGTISSKKKK

SEQ ID NO: 31767 - protein, 41 aa, Homo sapiens
  REGION 1..41: note = ENSP00000400515
MQQVLENLTELPSSTGAEEIDLIFLKGIMENPIVKSLAKGL

SEQ ID NO: 31768 - protein, 64 aa, Homo sapiens
  REGION 1..64: note = ENSP00000473560
  VARIANT 1: note = Any amino acid
XSGPFCGTISSKKKKKMMYLTTRNAVAEDDRNKKQLYESEISGGLIKGVGNFKSTFLTSELPLC

SEQ ID NO: 31769 - protein, 41 aa, Homo sapiens; identical to SEQ ID NO: 31767
  REGION 1..41: note = ENSP00000487215

SEQ ID NO: 31770 - protein, 576 aa, Homo sapiens
  REGION 1..576: note = ENSP00000364884
MPALSTGSGSDTGLYELLAALPAQLQPHVDSQEDLTFLWDMFGEKSLHSLVKIHEKLHYYEKQSPVPILHGAAALADDLAEELQNKPLNSEIRELLKLLSKPNVKALLSVHDTVAQKNYDPVLPPMPEDIDDEEDSVKIIRLVKNREPLGATIKKDEQTGAIIVARIMRGGAADRSGLIHVGDELREVNGIPVEDKRPEEIIQILAQSQGAITFKIIPGSKEETPSKEGKMFIKALFDYNPNEDKAIPCKEAGLSFKKGDILQIMSQDDATWWQAKHEADANPRAGLIPSKHFQERRLALRRPEILVQPLKVSNRKSSGFRKSFRLSRKDKKTNKSMYECKKSDQYDTADVPTYEEVTPYRRQTNEKYRLVVLVGPVGVGLNELKRKLLISDTQHYGVTVPHTTRARRSQESDGVEYIFISKHLFETDVQNNKFIEYGEYKNNYYGTSIDSVRSVLAKNKVCLLDVQPHTVKHLRTLEFKPYVIFIKPPSIERLRETRKNAKIISSRDDQGAAKPFTEEDFQEMIKSAQIMESQYGHLFDKIIINDDLTVAFNELKTTFDKLETETHWVPVSWLHS

SEQ ID NO: 31771 - protein, 454 aa, Homo sapiens
  REGION 1..454: note = ENSP00000473899
MPALSTGSGSDTGLYELLAALPAQLQPHVDSQEDLTFLWDMFGEKSLHSLVKIHEKLHYYEKQSPVPILHGAAALADDLAEELQNKPLNSEIRELLKLLSKPNVKALLSVHDTVAQKNYDPVLPPMPEDIDDEEDSVKIIRLVKNREPLGATIKKDEQTGAIIVARIMRGGAADRSGLIHVGDELREVNGIPVEDKRPEEIIQILAQSQGAITFKIIPGSKEETPSKEGKMFIKALFDYNPNEDKAIPCKEAGLSFKKGDILQIMSQDDATWWQAKHEADANPRAGLIPSKHFQERRLALRRPEILVQPLKVSNRKSSGFRKSFRLSRKDKKTNKSMYECKKSDQYDTADVPTYEEVTPYRRQTNEKYRLVVLVGPVGVGLNELKRKLLISDTQHYGVTVPHTTRARRSQESDGVEYIFISKHLFETDVQNNKYVDIFENFHVTVFYKHMPVPF

SEQ ID NO: 31772 - protein, 576 aa, Homo sapiens; identical to SEQ ID NO: 31770
  REGION 1..576: note = ENSP00000364871

SEQ ID NO: 31773 - protein, 312 aa, Homo sapiens
  REGION 1..312: note = ENSP00000398319
MPALSTGSGSDTGLYELLAALPAQLQPHVDSQEDLTFLWDMFGEKSLHSLVKHFQERRLALRRPEILVQPLKVSNRKSSGFRKSFRLSRKDKKTNKSMYECKKSDQYDTADVPTYEEVTPYRRQTNEKYRLVVLVGPVGVGLNELKRKLLISDTQHYGVTVPHTTRARRSQESDGVEYIFISKHLFETDVQNNKFIEYGEYKNNYYGTSIDSVRSVLAKNKVCLLDVQPHTVKHLRTLEFKPYVIFIKPPSIERLRETRKNAKIISSRDDQGAAKPFTEEDFQEMIKSAQIMESQYGHLFDKIIINDDLTVA

SEQ ID NO: 31774 - protein, 576 aa, Homo sapiens; identical to SEQ ID NO: 31770
  REGION 1..576: note = ENSP00000337907

SEQ ID NO: 31775 - protein, 326 aa, Homo sapiens
  REGION 1..326: note = ENSP00000388137
MWRSRWDASVLKAEALALLPCGLGMAFSQSHVMAARRHQHSRLIIEVDEYSSNPTQAFTFYNINQGRFQPPHVQMVDPVPHDAPKPPGYTRFVCVSDTHSRTDPIQMPYGDVLIHAGDFTELGLPSEVKKFNEWLGSLPYEYKIVIAGNHELTFDQEFMADLIKQDFYYFPSVSKLKPENYENVQSLLTNCIYLQDSEVTVRGFRIYGSPWQPWFYGWGFNLPRGQALLEKWNLIPEGVDILITHGPPLGFLDWVPKKMQRVGCVELLNTVQRRVQPRLHVFGHIHEGYGVMADGTTTYVNASVCTVNYQPVNPPIVIDLPTPRNS

SEQ ID NO: 31776 - protein, 119 aa, Homo sapiens
  REGION 1..119: note = ENSP00000335568
MWRSRWDASVLKAEALALLPCGLGMAFSQSHVMAARRHQHSRLIIEVDEYSSNPTQAFTFYNINQGRFQPPHVQMVDPVPHDAPKPPGYTRFVCVSDTHSRTDPIQMPYGDVLIHAGDF

SEQ ID NO: 31777 - protein, 74 aa, Homo sapiens
  REGION 1..74: note = ENSP00000401378
MWRSRWDASVLKAEALALLPCGLGMAFSQSHVMAARRHQHSRLIIEVDEYSSNPTQAFTFYNINQGRFQPPHVQ

SEQ ID NO: 31778 - protein, 326 aa, Homo sapiens; identical to SEQ ID NO: 31775
  REGION 1..326: note = ENSP00000400686

SEQ ID NO: 31779 - protein, 248 aa, Homo sapiens
  REGION 1..248: note = ENSP00000431538
MAPGAPSSSPSPILAVLLFSSLVLSPAQAIVVYTDREVHGAVGSRVTLHCSFWSSEWVSDDISFTWRYQPEGGRDAISIFHYAKGQPYIDEVGTFKERIQWVGDPRWKDGSIVIHNLDYSDNGTFTCDVKNPPDIVGKTSQVTLYVFEKVPTRYGVVLGAVIGGVLGVVLLLLLLFYVVRYCWLRRQAALQRRLSAMEKGKLHKPGKDASKRGRQTPVLYAMLDHSRSTKAVSEKKAKGLGESRKDKK

SEQ ID NO: 31780 - protein, 248 aa, Homo sapiens; identical to SEQ ID NO: 31779
  REGION 1..248: note = ENSP00000432943

SEQ ID NO: 31781 - protein, 52 aa, Homo sapiens
  REGION 1..52: note = ENSP00000431441
MEKGKLHKPGKDASKRGRQTPVLYAMLDHSRSTKAVSEKKAKGLGESRKDKK

SEQ ID NO: 31782 - protein, 136 aa, Homo sapiens
  REGION 1..136: note = ENSP00000488104
  VARIANT 1: note = Any amino acid
XPYIDEVGTFKERIQWVGDPRWKDGSIVIHNLDYSDNVPTRYGVVLGAVIGGVLGVVLLLLLLFYVVRYCWLRRQAALQRRLSAMEKGKLHKPGKDASKRGRQTPVLYAMLDHSRSTKAVSEKKAKGLGESRKDKK

SEQ ID NO: 31783 - protein, 205 aa, Homo sapiens
  REGION 1..205: note = ENSP00000257776
MSAQRLISNRTSQQSASNSDYTWEYEYYEIGPVSFEGLKAHKYSIVIGFWVGLAVFVIFMFFVLTLLTKTGAPHQDNAESSEKRFRMNSFVSDFGRPLEPDKVFSRQGNEESRSLFHCYINEVERLDRAKACHQTTALDSDVQLQEAIRSSGQPEEELNRLMKFDIPNFVNTDQNYFGEDDLLISEPPIVLETKPLSQTSHKDLD

SEQ ID NO: 31784 - protein, 343 aa, Homo sapiens
  REGION 1..343: note = ENSP00000309782
MAGNCSWEAHPGNRNKMCPGLSEAPELYSRGFLTIEQIAMLPPPAVMNYIFLLLCLCGLVGNGLVLWFFGFSIKRNPFSIYFLHLASADVGYLFSKAVFSILNTGGFLGTFADYIRSVCRVLGLCMFLTGVSLLPAVSAERCASVIFPAWYWRRRPKRLSAVVCALLWVLSLLVTCLHNYFCVFLGRGAPGAACRHMDIFLGILLFLLCCPLMVLPCLALILHVECRARRRQRSAKLNHVILAMVSVFLVSSIYLGIDWFLFWVFQIPAPFPEYVTDLCICINSSAKPIVYFLAGRDKSQRLWEPLRVVFQRALRDGAELGEAGGSTPNTVTMEMQCPPGNAS

SEQ ID NO: 31785 - protein, 104 aa, Homo sapiens
  REGION 1..104: note = ENSP00000323414
MAGNCSWEAHPGNRNKVSATGGGPWSCPDGCGWEGQTQPSISSPIPPFLAPLSSSGPTVGSGLLWAMWPGTSSLDPPTLLSSSVRQAPGLDLKVPRCADTVVAL

SEQ ID NO: 31786 - protein, 343 aa, Homo sapiens; identical to SEQ ID NO: 31784
  REGION 1..343: note = ENSP00000403660

SEQ ID NO: 31787 - protein, 46 aa, Homo sapiens
  REGION 1..46: note = ENSP00000488429
MTGKNWILISTTTPKSLEDEIVGRLLKILFVIFVDLISIIYVVITS

SEQ ID NO: 31788 - protein, 46 aa, Homo sapiens; identical to SEQ ID NO: 31787
  REGION 1..46: note = ENSP00000488299

SEQ ID NO: 31789 - protein, 46 aa, Homo sapiens; identical to SEQ ID NO: 31787
  REGION 1..46: note = ENSP00000488748

SEQ ID NO: 31790 - protein, 46 aa, Homo sapiens; identical to SEQ ID NO: 31787
  REGION 1..46: note = ENSP00000488584

SEQ ID NO: 31791-31792 - skipped (2 entries)

SEQ ID NO: 31793 - protein, 246 aa, Homo sapiens
  REGION 1..246: note = ENSP00000242257
MAGYLKLVCVSFQRQGFHTVGSRCKNRTGAEHLWLTRHLRDPFVKAAKVESYRCRSAFKLLEVNERHQILRPGLRVLDCGAAPGAWSQVAVQKVNAAGTDPSSPVGFVLGVDLLHIFPLEGATFLCPADVTDPRTSQRILEVLPGRRADVILSDMAPNATGFRDLDHDRLISLCLTLLSVTPDILQPGGTFLCKTWAGSQSRRLQRRLTEEFQNVRIIKPEASRKESSEVYFLATQYHGRKGTVKQ

SEQ ID NO: 31794 - protein, 152 aa, Homo sapiens
  REGION 1..152: note = ENSP00000384423
MRPPADPSSPVGFVLGVDLLHIFPLEGATFLCPADVTDPRTSQRILEVLPGRRADVILSDMAPNATGFRDLDHDRLISLCLTLLSVTPDILQPGGTFLCKTWAGSQSRRLQRRLTEEFQNVRIIKPEASRKESSEVYFLATQYHGRKGTVKQ

SEQ ID NO: 31795 - protein, 246 aa, Homo sapiens; identical to SEQ ID NO: 31793
  REGION 1..246: note = ENSP00000392343

SEQ ID NO: 31796 - protein, 180 aa, Homo sapiens [sequence omitted]

SEQ ID NO: 31797 - protein, 362 aa, Homo sapiens
  REGION 1..362: note = ENSP00000257552
METDAPQPGLASPDSPHDPCKMFIGGLSWQTTQEGLREYFGQFGEVKECLVMRDPLTKRSRGFGFVTFMDQAGVDKVLAQSRHELDSKTIDPKVAFPRRAQPKMVTRTKKIFVGGLSVNTTVEDVKQYFEQFGKVDDAMLMFDKTTNRHRGFGFVTFESEDIVEKVCEIHFHEINNKMVECKKAQPKEVMSPTGSARGRSRVMPYGMDAFMLGIGMLGYPGFQATTYASRSYTGLAPGYTYQFPEFRVERTPLPSAPVLPELTAIPLTAYGPMAAAAAAAAVVRGTGSHPWTMAPPPGSTPSRTGGFLGTTSPGPMAELYGAANQDSGVSSYISAASPAPSTGFGHSLGGPLIATAFTNGYH

SEQ ID NO: 31798 - protein, 233 aa, Homo sapiens
  REGION 1..233: note = ENSP00000446710
  VARIANT 1: note = Any amino acid
XDQAGVDKVLAQSRHELDSKTIDPKVAFPRRAQPKMVTRTKKIFVGGLSVNTTVEDVKQYFEQFGKVDDAMLMFDKTTNRHRGFGFVTFESEDIVEKVCEIHFHEINNKMVECKKAQPKEVMSPTGSARGRSRVMPYGMDAFMLGIGMLGYPGFQATTYASRSYTGLAPGYTYQFPAIPLTAYGPMAAAAAAAAVVRGTGSHPWTMAPPPGSTPSRTGGFLGTTSPGPMAELY

SEQ ID NO: 31799 - protein, 293 aa, Homo sapiens
  REGION 1..293: note = ENSP00000261507
MATNESVSIFSSASLAVEYVDSLLPENPLQEPFKNAWNYMLNNYTKFQIATWGSLIVHEALYFLFCLPGFLFQFIPYMKKYKIQKDKPETWENQWKCFKVLLFNHFCIQLPLICGTYYFTEYFNIPYDWERMPRWYFLLARCFGCAVIEDTWHYFLHRLLHHKRIYKYIHKVHHEFQAPFGMEAEYAHPLETLILGTGFFIGIVLLCDHVILLWAWVTIRLLETIDVHSGYDIPLNPLNLIPFYAGSRHHDFHHMNFIGNYASTFTWWDRIFGTDSQYNAYNEKRKKFEKKTE

SEQ ID NO: 31800 - protein, 220 aa, Homo sapiens
  REGION 1..220: note = ENSP00000425241
MATNESVSIFSSASLAVEYVDSLLPENPLQEPFKNAWNYMLNNYTKFQIATWGSLIVHEALYFLFCLPGFLFQFIPYMKKYKIQKDKPETWENQWKCFKVLLFNHFCIQLPLICGTYYFTEYFNIPYDWERMPRWYFLLARCFGCAVIEDTWHYFLHRLLHHKRIYKYIHKVHHEFQAPFGMEAEYAHPLETLILGTGFFIGIVLLCDHVILLWAWVTIR

SEQ ID NO: 31801 - protein, 162 aa, Homo sapiens
  REGION 1..162: note = ENSP00000377361
MPRWYFLLARCFGCAVIEDTWHYFLHRLLHHKRIYKYIHKVHHEFQAPFGMEAEYAHPLETLILGTGFFIGIVLLCDHVILLWAWVTIRLLETIDVHSGYDIPLNPLNLIPFYAGSRHHDFHHMNFIGNYASTFTWWDRIFGTDSQYNAYNEKRKKFEKKTE

SEQ ID NO: 31802 - protein, 229 aa, Homo sapiens
  REGION 1..229: note = ENSP00000423633
MATNESVSIFSSASLAVEYVDSLLPENPLQEPFKNAWNYMLNNYTKFQIATWGSLIVHEALYFLFCLPGFLFQFIPYMKKYKIQKDKPETWENQWKCFKVLLFNHFCIQLPLICGTYYFTEYFNIPYDWERMPRWYFLLARCFGCAVIEDTWHYFLHRLLHHKRIYKYIHKVHHEFQAPFGMEAEYAHPLETLILGTGFFIGIVLLCDHVILLWAWVTIRLLETIDVHR

SEQ ID NO: 31803 - protein, 85 aa, Homo sapiens
  REGION 1..85: note = ENSP00000425112
MATNESVSIFSSASLAVEYVDSLLPENPLQEPFKNAWNYMLNNYTKFQIATWGSLIVHEALYFLFCLPGFLFQFIPYMKKYKIQK

SEQ ID NO: 31804 - protein, 235 aa, Homo sapiens
  REGION 1..235: note = ENSP00000313921
MLSATRRACQLLLLHSLFPVPRMGNSASNIVSPQEALPGRKEQTPVAAKHHVNGNRTVEPFPEGTQMAVFGMGCFWGAERKFWVLKGVYSTQVGFAGGYTSNPTYKEVCSEKTGHAEVVRVVYQPEHMSFEELLKVFWENHDPTQGMRQGNDHGTQYRSAIYPTSAKQMEAALSSKENYQKVLSEHGFGPITTDIREGQTFYYAEDYHQQYLSKNPNGYCGLGGTGVSCPVGIKK

SEQ ID NO: 31805 - protein, 195 aa, Homo sapiens
  REGION 1..195: note = ENSP00000410912
MLSATRRACQLLLLHSLFPVPRMGNSASNIVSPQEALPGRKEQTPVAAKHHVNGNRTVEPFPEGTQMAVFEKTGHAEVVRVVYQPEHMSFEELLKVFWENHDPTQGMRQGNDHGTQYRSAIYPTSAKQMEAALSSKENYQKVLSEHGFGPITTDIREGQTFYYAEDYHQQYLSKNPNGYCGLGGTGVSCPVGIKK

SEQ ID NO: 31806 - protein, 213 aa, Homo sapiens
  REGION 1..213: note = ENSP00000429461
MLSATRRACQLLLLHSLFPVPRMGNSASNIVSPQEALPGRKEQTPVAAKHHVNGNRTVEPFPEGTQMAVFGMGCFWGAERKFWVLKGVYSTQVGFAGGYTSNPTYKEVCSEKTGHAEVVRVVYQPEHMSFEELLKVFWENHDPTQGMRQGNDHGTQYRSAIYPTSAKQMEAALSSKENYQKLVLPCSSSAMLGLTAASSAQLAWVQPSSRKHY

SEQ ID NO: 31807 - protein, 59 aa, Homo sapiens
  REGION 1..59: note = ENSP00000435644
MAVFGMGCFWGAERKFWVLKGVYSTQVGFAGGYTSNPTYKEVCSDVQNNSMFISLFKSF

SEQ ID NO: 31808 - protein, 82 aa, Homo sapiens
  REGION 1..82: note = ENSP00000428214
MAVFGMGCFWGAERKFWVLKGVYSTQVGFAGGYTSNPTYKEVCSEKTGHAEVVRVVYQPEHMSFEELLKVFWENHDPTQGMR

SEQ ID NO: 31809 - protein, 169 aa, Homo sapiens
  REGION 1..169: note = ENSP00000436839
MAVFGMGCFWGAERKFWVLKGVYSTQVGFAGGYTSNPTYKEVCSEKTGHAEVVRVVYQPEHMSFEELLKVFWENHDPTQGMRQGNDHGTQYRSAIYPTSAKQMEAALSSKENYQKVLSEHGFGPITTDIREGQTFYYAEDYHQQYLSKNPNGYCGLGGTGVSCPVGIKK

SEQ ID NO: 31810 - protein, 192 aa, Homo sapiens
  REGION 1..192: note = ENSP00000371930
MCSEPKHHVNGNRTVEPFPEGTQMAVFGMGCFWGAERKFWVLKGVYSTQVGFAGGYTSNPTYKEVCSEKTGHAEVVRVVYQPEHMSFEELLKVFWENHDPTQGMRQGNDHGTQYRSAIYPTSAKQMEAALSSKENYQKVLSEHGFGPITTDIREGQTFYYAEDYHQQYLSKNPNGYCGLGGTGVSCPVGIKK

SEQ ID NO: 31811 - protein, 91 aa, Homo sapiens
  REGION 1..91: note = ENSP00000427725
  VARIANT 1: note = Any amino acid
XKTGHAEVVRVVYQPEHMSFEELLKVFWENHDPTQGMRQGNDHGTQYRSAIYPTSAKQMEAALSSKENYQKVPKHVHWKKRTQTGLQTEGR

SEQ ID NO: 31812 - protein, 267 aa, Homo sapiens
  REGION 1..267: note = ENSP00000239243
MASPSKGNDLFSPDEEGPAVVAGPGPGPGGAEGAAEERRVKVSSLPFSVEALMSDKKPPKEASPLPAESASAGATLRPLLLSGHGAREAHSPGPLVKPFETASVKSENSEDGAAWMQEPGRYSPPPRHMSPTTCTLRKHKTNRKPRTPFTTSQLLALERKFRQKQYLSIAERAEFSSSLNLTETQVKIWFQNRRAKAKRLQEAELEKLKMAAKPMLPSSFSLPFPISSPLQAASIYGASYPFHRPVLPIPPVGLYATPVGYGMYHLS

SEQ ID NO: 31813 - protein, 134 aa, Homo sapiens
  REGION 1..134: note = ENSP00000427425
MASPSKGNDLFSPDEEGPAVVAGPGPGPGGAEGAAEERRVKVSSLPFSVEALMSDKKPPKEASPLPAESASAGATLRPLLLSGHGAREAHSPGPLVKPFETASVKSENSEDGAAWMQEPGRYSPPPSECAPGQE

SEQ ID NO: 31814 - protein, 513 aa, Homo sapiens
  REGION 1..513: note = ENSP00000354499
MFADRWLFSTNHKDIGTLYLLFGAWAGVLGTALSLLIRAELGQPGNLLGNDHIYNVIVTAHAFVMIFFMVMPIMIGGFGNWLVPLMIGAPDMAFPRMNNMSFWLLPPSLLLLLASAMVEAGAGTGWTVYPPLAGNYSHPGASVDLTIFSLHLAGVSSILGAINFITTIINMKPPAMTQYQTPLFVWSVLITAVLLLLSLPVLAAGITMLLTDRNLNTTFFDPAGGGDPILYQHLFWFFGHPEVYILILPGFGMISHIVTYYSGKKEPFGYMGMVWAMMSIGFLGFIVWAHHMFTVGMDVDTRAYFTSATMIIAIPTGVKVFSWLATLHGSNMKWSAAVLWALGFIFLFTVGGLTGIVLANSSLDIVLHDTYYVVAHFHYVLSMGAVFAIMGGFIHWFPLFSGYTLDQTYAKIHFTIMFIGVNLTFFPQHFLGLSGMPRRYSDYPDAYTTWNILSSVGSFISLTAVMLMIFMIWEAFASKRKVLMVEEPSMNLEWLYGCPPPYHTFEEPVYMKS

SEQ ID NO: 31815 - protein, 459 aa, Homo sapiens
  REGION 1..459: note = ENSP00000354961
MLKLIVPTIMLLPLTWLSKKHMIWINTTTHSLIISIIPLLFFNQINNNLFSCSPTFSSDPLTTPLLMLTTWLLPLTIMASQRHLSSEPLSRKKLYLSMLISLQISLIMTFTATELIMFYIFFETTLIPTLAIITRWGNQPERLNAGTYFLFYTLVGSLPLLIALIYTHNTLGSLNILLLTLTAQELSNSWANNLMWLAYTMAFMVKMPLYGLHLWLPKAHVEAPIAGSMVLAAVLLKLGGYGMMRLTLILNPLTKHMAYPFLVLSLWGMIMTSSICLRQTDLKSLIAYSSISHMALVVTAILIQTPWSFTGAVILMIAHGLTSSLLFCLANSNYERTHSRIMILSQGLQTLLPLMAFWWLLASLANLALPPTINLLGELSVLVTTFSWSNITLLLTGLNMLVTALYSLYMFTTTQWGSLTHHINNMKPSFTRENTLMFMHLSPILLLSLNPDIITGFSS

SEQ ID NO: 31816 - protein, 73 aa, Homo sapiens
  REGION 1..73: note = ENSP00000456804
MDPNCSCAAGDSCTCAGSCKCKECKCTSCKKSKWDPLFPLPLPCPPACPLSTILRGIKAVWGCPIARKLLPPQ

SEQ ID NO: 31817 - protein, 61 aa, Homo sapiens
  REGION 1..61: note = ENSP00000245185
MDPNCSCAAGDSCTCAGSCKCKECKCTSCKKSCCSCCPVGCAKCAQGCICKGASDKCSCCA

SEQ ID NO: 31818 - protein, 113 aa, Homo sapiens
  REGION 1..113: note = ENSP00000455353
MKGKRGREELGNTQSAFFSTFGDAKPRVQLLGEARSPPPAAALLDMDPETCPCPSGGSCTCADSCKCEGCKCTSCKKSCCSCCPAECEKCAKDCVCKGGEAAEAEAEKCSCCQ

SEQ ID NO: 31819 - protein, 81 aa, Homo sapiens
  REGION 1..81: note = ENSP00000455980
MKGKRGREELGNTQSAFFSTFGDGGSCTCADSCKCEGCKCTSCKKSCCSCCPAECEKCAKDCVCKGGEAAEAEAEKCSCCQ

SEQ ID NO: 31820 - protein, 68 aa, Homo sapiens
  REGION 1..68: note = ENSP00000200691
MDPETCPCPSGGSCTCADSCKCEGCKCTSCKKSCCSCCPAECEKCAKDCVCKGGEAAEAEAEKCSCCQ

SEQ ID NO: 31821 - protein, 92 aa, Homo sapiens
  REGION 1..92: note = ENSP00000457164
MDPETCPCPSGGSCTCADSCKCEGCKCTSCKKSECGDPSPLPPPPLLCGVGVSPRRMWRDSQAPIPWFLTLAGIEPPGQTLKYRCPCPTPRN

SEQ ID NO: 31822 - protein, 372 aa, Homo sapiens
  REGION 1..372: note = ENSP00000362718
MGASDPEVAPWARGGAAGMAGAGAGAGARGGAAAGVEARARDPPPAHRAHPRHPRPAAQPSARRMDGGSGGLGSGDNAPTTEALFVALGAGVTALSHPLLYVKLLIQVGHEPMPPTLGTNVLGRKVLYLPSFFTYAKYIVQVDGKIGLFRGLSPRLMSNALSTVTRGSMKKVFPPDEIEQVSNKDDMKTSLKKVVKETSYEMMMQCVSRMLAHPLHVISMRCMVQFVGREAKYSGVLSSIGKIFKEEGLLGFFVGLIPHLLGDVVFLWGCNLLAHFINAYLVDDSFSQALAIRSYTKFVMGIAVSMLTYPFLLVGDLMAVNNCGLQAGLPPYSPVFKSWIHCWKYLSVQGQLFRGSSLLFRRVSSGSCFALE

SEQ ID NO: 31823 - protein, 389 aa, Homo sapiens
  REGION 1..389: note = ENSP00000362730
MGASDPEVAPWARGGAAGMAGAGAGAGARGGAAAGVEARARDPPPAHRAHPRHPRPAAQPSARRMDGGSGGLGSGDNAPTTEALFVALGAGVTALSHPLLYVKLLIQVGHEPMPPTLGTNVLGRKVLYLPSFFTYAKYIVQVDGKIGLFRGLSPRLMSNALSTVTRGSMKKVFPPDEIEQVSNKDDMKTSLKKVVKETSYEMMMQCVSRMLAHPLHVISMRCMVQFVGREAKYSGVLSSIGKIFKEEGLLGFFVGLIPHLLGDVVFLWGCNLLAHFINAYLVDDSVSDTPGGLGNDQNPGSQFSQALAIRSYTKFVMGIAVSMLTYPFLLVGDLMAVNNCGLQAGLPPYSPVFKSWIHCWKYLSVQGQLFRGSSLLFRRVSSGSCFALE

SEQ ID NO: 31824 - protein, 201 aa, Homo sapiens
  REGION 1..201: note = ENSP00000399187
  VARIANT 1: note = Any amino acid
XAVCVPHVGPPPACHLNALHGPVCGTGGQVQLSCGATIPGSSAAMVPHFGVINGKLAHSPRLIMSGVLSSIGKIFKEEGLLGFFVGLIPHLLGDVVFLWGCNLLAHFINAYLVDDSFSQALAIRSYTKFVMGIAVSMLTYPFLLVGDLMAVNNCGLQAGLPPYSPVFKSWIHCWKYLSVQGQLFRGSSLLFRRVSSGSCFA

SEQ ID NO: 31825 - protein, 394 aa, Homo sapiens
  REGION 1..394: note = ENSP00000419739
AGMAGAGAGAGARGGAAAGVEARARDPPPAHRAHPRHPRPAAQPSARRMDGGSGGLGSGDNAPTTEALFVALGAGVTALSHPLLYVKLLIQVGHEPMPPTLGTNVLGRKVLYLPSFFTYAKYIVQVDGKIGLFRGLSPRLMSNALSTVTRGSMKKVFPPDEIEQVSNKDDMKTSLKKVVKETSYEMMMQCVSRMLAHPLHVISMRCMVQFVGREAKYSGVLSSIGKIFKEEGLLGFFVGLIPHLLGDVVFLWGCNLLAHFINAYLVDDSFSQALAIRSYTKFVMGIAVSMLTYPFLLVGDLMAVNNCGLQAGLPPYSPVFKSWIHCWKYLSVQVSKHWTAEAFPVLCYILQLKWFCGCFIACKDKWFHGIQYCEEILGIYKAFKFSSYIISERI

SEQ ID NO: 31826 - protein, 303 aa, Homo sapiens
  REGION 1..303: note = ENSP00000303222
MADAASQVLLGSGLTILSQPLMYVKVLIQVGYEPLPPTIGRNIFGRQVCQLPGLFSYAQHIASIDGRRGLFTGLTPRLCSGVLGTVVHGKVLQHYQESDKGEELGPGNVQKEVSSSFDHVIKETTREMIARSAATLITHPFHVITLRSMVQFIGRESKYCGLCDSIITIYREEGILGFFAGLVPRLLGDILSLWLCNSLAYLVNTYALDSGVSTMNEMKSYSQAVTGFFASMLTYPFVLVSNLMAVNNCGLAGGCPPYSPIYTSWIDCWCMLQKEGNMSRGNSLFFRKVPFGKTYCCDLKMLI

SEQ ID NO: 31827 - protein, 262 aa, Homo sapiens
  REGION 1..262: note = ENSP00000432043
MADAASQVLLGSGLTILSQPLMYVKVLIQVGYEPLPPTIGRNIFGRQVCQLPGLFSYAQHIASIDGRRGLFTGLTPRLCSGVLGTVVHGKVLQELGPGNVQKEVSSSFDHVIKETTREMIARSAATLITHPFHVITLRSMVQFIGRESKYCGLCDSIITIYREEGILGFFAGLVPRLLGDILSLWLCNSLAYLVNTYALDSGVSTMNEMKSYSQAVTGFFASMLTYPFVLVSNLMAVNNCGLAGGCPPYSPIYTSWIDCWCM

SEQ ID NO: 31828 - protein, 166 aa, Homo sapiens
  REGION 1..166: note = ENSP00000266263
MSEPQPRGAERDLYRDTWVRYLGYANEVGEAFRSLVPAAVVWLSYGVASSYVLADAIDKGKKAGEVPSPEAGRSARVTVAVVDTFVWQALASVAIPGFTINRVCAASLYVLGTATRWPLAVRKWTTTALGLLTIPIIIHPIDRSVDFLLDSSLRKLYPTVGKPSSS

SEQ ID NO: 31829 - protein, 135 aa, Homo sapiens
  REGION 1..135: note = ENSP00000347267
MSEPQPRGAERDLYRDTWVRYLGYANEVGEAFRSLVPAAVVWLSYGVASSYVLADAIDKGKKAGEVGGFPPGLQPAQALPNSGEAQLLLIILWYLACASASCFMSTSYSCQGMWTPGSLVSKDPGTWVGLSWTEA

SEQ ID NO: 31830 - protein, 74 aa, Homo sapiens
  REGION 1..74: note = ENSP00000393954
MSEPQPRGAERDLYRDTWVRYLGYANEVGEAFRSLVPAAVVWLSYGVASSYVLADAIDKGKKAGEDFLPLPQLD

SEQ ID NO: 31831 - protein, 143 aa, Homo sapiens
  REGION 1..143: note = ENSP00000383926
MSEPQPRGAERDLYRDTWVRYLGYANEVGEAFRSLVPAAVVWLSYGVASSYVLADAIDKGKKAGEALASVAIPGFTINRVCAASLYVLGTATRWPLAVRKWTTTALGLLTIPIIIHPIDRSVDFLLDSSLRKLYPTVGKPSSS

SEQ ID NO: 31832 - protein, 74 aa, Homo sapiens; identical to SEQ ID NO: 31830
  REGION 1..74: note = ENSP00000487369

SEQ ID NO: 31833 - protein, 978 aa, Homo sapiens
  REGION 1..978: note = ENSP00000356290
MGTRLPLVLRQLRRPPQPPGPPRRLRVPCRASSGGGGGGGGGREGLLGQRRPQDGQARSSCSPGGRTPAARDSIVREVIQNSKEVLSLLQEKNPAFKPVLAIIQAGDDNLMQEINQNLAEEAGLNITHICLPPDSSEAEIIDEILKINEDTRVHGLALQISENLFSNKVLNALKPEKDVDGVTDINLGKLVRGDAHECFVSPVAKAVIELLEKSGVNLDGKKILVVGAHGSLEAALQCLFQRKGSMTMSIQWKTRQLQSKLHEADIVVLGSPKPEEIPLTWIQPGTTVLNCSHDFLSGKVGCGSPRIHFGGLIEEDDVILLAAALRIQNMVSSGRRWLREQQHRRWRLHCLKLQPLSPVPSDIEISRGQTPKAVDVLAKEIGLLADEIEIYGKSKAKVRLSVLERLKDQADGKYVLVAGITPTPLGEGKSTVTIGLVQALTAHLNVNSFACLRQPSQGPTFGVKGGAAGGGYAQVIPMEEFNLHLTGDIHAITAANNLLAAAIDTRILHENTQTDKALYNRLVPLVNGVREFSEIQLARLKKLGINKTDPSTLTEEEVSKFARLDIDPSTITWQRVLDTNDRFLRKITIGQGNTEKGHYRQAQFDIAVASEIMAVLALTDSLADMKARLGRMVVASDKSGQPVTADDLGVTGALTVLMKDAIKPNLMQTLEGTPVFVHAGPFANIAHGNSSVLADKIALKLVGEEGFVVTEAGFGADIGMEKFFNIKCRASGLVPNVVVLVATVRALKMHGGGPSVTAGVPLKKEYTEENIQLVADGCCNLQKQIQITQLFGVPVVVALNVFKTDTRAEIDLVCELAKRAGAFDAVPCYHWSVGGKGSVDLARAVREAASKRSRFQFLYDVQVPIVDKIRTIAQAVYGAKDIELSPEAQAKIDRYTQQGFGNLPICMAKTHLSLSHQPDKKGVPRDFILPISDVRASIGAGFIYPLVGTMSTMPGLPTRPCFYDIDLDTETEQVKGLF

SEQ ID NO: 31834 - protein, 275 aa, Homo sapiens
  REGION 1..275: note = ENSP00000356276
MGTRLPLVLRQLRRPPQPPGPPRRLRVPCRASSGGGGGGGGGREGLLGQRRPQDGQARSSCSPGGRTPAARDSIVREVIQNSKEVLSLLQEKNPAFKPVLAIIQAGDDNLMQEINQNLAEEAGLNITHICLPPDSSEAEIIDEILKINEDTRVHGLALQISENLFSNKVLNALKPEKDVDGVTDINLGKLVRGDAHECFVSPVAKAVIELLEKSGVNLDGKKILVVGAHGSLEAALQCLFQRKGSMTMSIQWKTRQLQSKTESRSVTRLECRRVI

SEQ ID NO: 31835 - protein, 332 aa, Homo sapiens
  REGION 1..332: note = ENSP00000356277
  VARIANT 1: note = Any amino acid
XGREGLLGQRRPQDGQARSSCSPGGRTPAARDSIVREVIQNSKEVLSLLQEKNPAFKPVLAIIQAGDDNLMQEINQNLAEEAGLNITHICLPPDSSEAEIIDEILKINEDTRVHGLALQISENLFSNKVLNALKPEKDVDGVTDINLGKLVRGDAHECFVSPVAKAVIELLEKSVGVNLDGKKILVVGAHGSLEAALQCLFQRKGSMTMSIQWKTRQLQSKLHEADIVVLGSPKPEEIPLTWIQPGTTVLNCSHDFLSGKVGCGSPRIHFGGLIEEDDVILLAAALRIQNMVSSGRRWLREQQHRRWRLHCLKLQPLSPVPSDIEISRGQTP

SEQ ID NO: 31836 - protein, 108 aa, Homo sapiens
  REGION 1..108: note = ENSP00000407070
MQEINQNLAEEAGLNITHICLPPDSSEAEIIDEILKINEDTRVHGLALQISENLFSNKVLNALKPEKDVDGVTDINLGKLVRGDAHECFVSPVAKAVIELLEKSASRG

SEQ ID NO: 31837 - protein, 114 aa, Homo sapiens
  REGION 1..114: note = ENSP00000400776
MQEINQNLAEEAGLNITHICLPPDSSEAEIIDEILKINEDTRVHGLALQISENLFSNKVLNALKPEKDVDGVTDINLGKLVRGDAHECFVSPVAKAVIELLEKSGVNLDGKKIL

SEQ ID NO: 31838 - protein, 96 aa, Homo sapiens
  REGION 1..96: note = ENSP00000395158
NIQLVADGCCNLQKQIQITQLFGVPVVVALNVFKTDTRAEIDLVCELAKRAGAFDAVPCYHWSVGGKGSVDLARAVREAASKRSRFQFLYDVQPFS

SEQ ID NO: 31839 - protein, 92 aa, Homo sapiens
  REGION 1..92: note = ENSP00000391022
VYGAKDIELSPEAQAKIDRYTQQGFGNLPICMAKTHLSLSHQPDKKGVPRDFILPISDVRASIGAGFIYPLVGTRSSPLALVGESQPKQVHP

SEQ ID NO: 31840 - protein, 57 aa, Homo sapiens
  REGION 1..57: note = ENSP00000399804
NLPICMAKTHLSLSHQPDKKGVPRDFILPISDVRASIGAGFIYPLVGTGGREAPLWL

SEQ ID NO: 31841 - protein, 913 aa, Homo sapiens
  REGION 1..913: note = ENSP00000479539
MQSRRARPRREVIQNSKEVLSLLQEKNPAFKPVLAIIQAGDDNLMQEINQNLAEEAGLNITHICLPPDSSEAEIIDEILKINEDTRVHGLALQISENLFSNKVLNALKPEKDVDGVTDINLGKLVRGDAHECFVSPVAKAVIELLEKSVGVNLDGKKILVVGAHGSLEAALQCLFQRKGSMTMSIQWKTRQLQSKLHEADIVVLGSPKPEEIPLTWIQPGTTVLNCSHDFLSGKVGCGSPRIHFGGLIEEDDVILLAAALRIQNMVSSGRRWLREQQHRRWRLHCLKLQPLSPVPSDIEISRGQTPKAVDVLAKEIGLLADEIEIYGKSKAKVRLSVLERLKDQADGKYVLVAGITPTPLGEGKSTVTIGLVQALTAHLNVNSFACLRQPSQGPTFGVKGGAAGGGYAQVIPMEEFNLHLTGDIHAITAANNLLAAAIDTRILHENTQTDKALYNRLVPLVNGVREFSEIQLARLKKLGINKTDPSTLTEEEVSKFARLDIDPSTITWQRVLDTNDRFLRKITIGQGNTEKGHYRQAQFDIAVASEIMAVLALTDSLADMKARLGRMVVASDKSGQPVTADDLGVTGALTVLMKDAIKPNLMQTLEGTPVFVHAGPFANIAHGNSSVLADKIALKLVGEEGFVVTEAGFGADIGMEKFFNIKCRASGLVPNVVVLVATVRALKMHGGGPSVTAGVPLKKEYTEENIQLVADGCCNLQKQIQITQLFGVPVVVALNVFKTDTRAEIDLVCELAKRAGAFDAVPCYHWSVGGKGSVDLARAVREAASKRSRFQFLYDVQVPIVDKIRTIAQAVYGAKDIELSPEAQAKIDRYTQQGFGNLPICMAKTHLSLSHQPDKKGVPRDFILPISDVRASIGAGFIYPLVGTMSTMPGLPTRPCFYDIDLDTETEQVKGLF

SEQ ID NO: 31842 - protein, 979 aa, Homo sapiens
  REGION 1..979: note = ENSP00000478253
MGTRLPLVLRQLRRPPQPPGPPRRLRVPCRASSGGGGGGGGGREGLLGQRRPQDGQARSSCSPGGRTPAARDSIVREVIQNSKEVLSLLQEKNPAFKPVLAIIQAGDDNLMQEINQNLAEEAGLNITHICLPPDSSEAEIIDEILKINEDTRVHGLALQISENLFSNKVLNALKPEKDVDGVTDINLGKLVRGDAHECFVSPVAKAVIELLEKSVGVNLDGKKILVVGAHGSLEAALQCLFQRKGSMTMSIQWKTRQLQSKLHEADIVVLGSPKPEEIPLTWIQPGTTVLNCSHDFLSGKVGCGSPRIHFGGLIEEDDVILLAAALRIQNMVSSGRRWLREQQHRRWRLHCLKLQPLSPVPSDIEISRGQTPKAVDVLAKEIGLLADEIEIYGKSKAKVRLSVLERLKDQADGKYVLVAGITPTPLGEGKSTVTIGLVQALTAHLNVNSFACLRQPSQGPTFGVKGGAAGGGYAQVIPMEEFNLHLTGDIHAITAANNLLAAAIDTRILHENTQTDKALYNRLVPLVNGVREFSEIQLARLKKLGINKTDPSTLTEEEVSKFARLDIDPSTITWQRVLDTNDRFLRKITIGQGNTEKGHYRQAQFDIAVASEIMAVLALTDSLADMKARLGRMVVASDKSGQPVTADDLGVTGALTVLMKDAIKPNLMQTLEGTPVFVHAGPFANIAHGNSSVLADKIALKLVGEEGFVVTEAGFGADIGMEKFFNIKCRASGLVPNVVVLVATVRALKMHGGGPSVTAGVPLKKEYTEENIQLVADGCCNLQKQIQITQLFGVPVVVALNVFKTDTRAEIDLVCELAKRAGAFDAVPCYHWSVGGKGSVDLARAVREAASKRSRFQFLYDVQVPIVDKIRTIAQAVYGAKDIELSPEAQAKIDRYTQQGFGNLPICMAKTHLSLSHQPDKKGVPRDFILPISDVRASIGAGFIYPLVGTMSTMPGLPTRPCFYDIDLDTETEQVKGLF

SEQ ID NO: 31843 - protein, 223 aa, Homo sapiens
  REGION 1..223: note = ENSP00000391327
MAKHIQKEIQRGVESWVSLGNRRPHLSIILVGDNPASHTYVRNKIRAASAVGICSELILKPKDVSQEELLDVTDQLNMDPRVSGILVQLPLPDHVDERTICNGIAPEKDVDGFHIINIGRLCLDQHSLIPATASAVWEIIKRTGIQTFGKNVVVAGRSKNVGMPIAMLLHTDGEHERPGGDATVTIAHRYTPKEQLKIHTQLADIIIVAAERFHHFAQDLSNS

SEQ ID NO: 31844 - protein, 106 aa, Homo sapiens
  REGION 1..106: note = ENSP00000409391
MAKHIQKEIQRGVESWVSLGNRRPHLSIILVGDNPASHTYVRNKIRAASAVGICSELILKPKDVSQEELLDVTDQLNMDPRVSGILVQLPLPEAVQLCSGFEMLGI

SEQ ID NO: 31845 - protein, 106 aa, Homo sapiens; identical to SEQ ID NO: 31844
  REGION 1..106: note = ENSP00000387614

SEQ ID NO: 31846 - protein, 252 aa, Homo sapiens
  REGION 1..252: note = ENSP00000352012
MAKHIQKEIQRGVESWVSLGNRRPHLSIILVGDNPASHTYVRNKIRAASAVGICSELILKPKDVSQEELLDVTDQLNMDPRVSGILVQLPLPDHVDERTICNGIAPEKDVDGFHIINIGRLCLDQHSLIPATASAVWEIIKRTGIQTFGKNVVVAGRSKNVGMPIAMLLHTDGEHERPGGDATVTIAHRYTPKEQLKIHTQLADIIIVAAGIPKLITSDMVKEGAAVIDVGINYVHDPVTGKTKLVGDVDFE

SEQ ID NO: 31847 - protein, 289 aa, Homo sapiens
  REGION 1..289: note = ENSP00000321984
MAKHIQKEIQRGVESWVSLGNRRPHLSIILVGDNPASHTYVRNKIRAASAVGICSELILKPKDVSQEELLDVTDQLNMDPRVSGILVQLPLPDHVDERTICNGIAPEKDVDGFHIINIGRLCLDQHSLIPATASAVWEIIKRTGIQTFGKNVVVAGRSKNVGMPIAMLLHTDGEHERPGGDATVTIAHRYTPKEQLKIHTQLADIIIVAAGIPKLITSDMVKEGAAVIDVGINYVHDPVTGKTKLVGDVDFEAVKKKAGFITPVPGGVGPMTVAMLLKNTLLAAKKIIY

SEQ ID NO: 31848 - protein, 347 aa, Homo sapiens
  REGION 1..347: note = ENSP00000379108
MTVPVRGFSLLRGRLGRAPALGRSTAPSVRAPGEPGSAFRGFRSSGVRHEAIIISGTEMAKHIQKEIQRGVESWVSLGNRRPHLSIILVGDNPASHTYVRNKIRAASAVGICSELILKPKDVSQEELLDVTDQLNMDPRVSGILVQLPLPDHVDERTICNGIAPEKDVDGFHIINIGRLCLDQHSLIPATASAVWEIIKRTGIQTFGKNVVVAGRSKNVGMPIAMLLHTDGEHERPGGDATVTIAHRYTPKEQLKIHTQLADIIIVAAGIPKLITSDMVKEGAAVIDVGINYVHDPVTGKTKLVGDVDFEAVKKKAGFITPVPGGVGPMTVAMLLKNTLLAAKKIIY

SEQ ID NO: 31849 - protein, 146 aa, Homo sapiens
  REGION 1..146: note = ENSP00000405692
MDPRVSGILVQLPLPDHVDERTICNGIAPEKDVDGFHIINIGRLCLDQHSLIPATASAVWEIIKRTGIQTFGKNVVVAGRSKNVGMPIAMLLHTDGEHERPGGDATVTIAHRYTPKEQLKIHTQLADIIIVAAERFHHFAQDLSNS

SEQ ID NO: 31850 - protein, 383 aa, Homo sapiens
  REGION 1..383: note = ENSP00000354152
MEPRAVGVSKQDIREQIWGYMESQNLADFPRPVHHRIPNFKGSYLACQNIKDLDVFARTQEVKVDPDKPLEGVRLLVLQSKKTLLVPTPRLRTGLFNKITPPPGATKDILRKCATSQGVRNYSVPIGLDSRVLVDLVVVGSVAVSEKGWRIGKGEGYADLEYAMMVSMGAVSKETPVVTIVHDCQVVDIPEELVEEHDITVDYILTPTRVIATGCKRPKPMGITWFKISLEMMEKIPILRSLRAREQQAGKDVTLQGEHQHLPEPGCQQTVPLSVGRRPPDTPGPETNSMEAAPGSPPGEGAPLAADVYVGNLPGDARVSDLKRALRELGSVPLRLTWQGPRRRAFLHYPDSAAAQQAVSCLQGLRLGTDTLRVALARQQRDK

SEQ ID NO: 31851 - protein, 220 aa, Homo sapiens
  REGION 1..220: note = ENSP00000438761
MMVSMGAVSKETPVVTIVHDCQVVDIPEELVEEHDITVDYILTPTRVIATGCKRPKPMGITWFKISLEMMEKIPILRSLRAREQQAGKDVTLQGEHQHLPEPGCQQTVPLSVGRRPPDTPGPETNSMEAAPGSPPGEGAPLAADVYVGNLPGDARVSDLKRALRELGSVPLRLTWQGPRRRAFLHYPDSAAAQQAVSCLQGLRLGTDTLRVALARQQRDK

SEQ ID NO: 31852 - protein, 382 aa, Homo sapiens
  REGION 1..382: note = ENSP00000489295
MEPRAGVSKQDIREQIWGYMESQNLADFPRPVHHRIPNFKGSYLACQNIKDLDVFARTQEVKVDPDKPLEGVRLLVLQSKKTLLVPTPRLRTGLFNKITPPPGATKDILRKCATSQGVRNYSVPIGLDSRVLVDLVVVGSVAVSEKGWRIGKGEGYADLEYAMMVSMGAVSKETPVVTIVHDCQVVDIPEELVEEHDITVDYILTPTRVIATGCKRPKPMGITWFKISLEMMEKIPILRSLRAREQQAGKDVTLQGEHQHLPEPGCQQTVPLSVGRRPPDTPGPETNSMEAAPGSPPGEGAPLAADVYVGNLPGDARVSDLKRALRELGSVPLRLTWQGPRRRAFLHYPDSAAAQQAVSCLQGLRLGTDTLRVALARQQRDK

SEQ ID NO: 31853 - protein, 382 aa, Homo sapiens
  REGION 1..382: note = ENSP00000444003
MEPRAGVSKQDIREQIWGYMESQNLADFPRPVHHRIPNFKGASHAAEQLPRLQAFKTARTIKVNPDAPQKSARFFVLESKKTLLVPTPRLRTGLFNKITPPPGATKDILRKCATSQGVRNYSVPIGLDSRVLVDLVVVGSVAVSEKGWRIGKGEGYADLEYAMMVSMGAVSKETPVVTIVHDCQVVDIPEELVEEHDITVDYILTPTRVIATGCKRPKPMGITWFKISLEMMEKIPILRSLRAREQQAGKDVTLQGEHQHLPEPGCQQTVPLSVGRRPPDTPGPETNSMEAAPGSPPGEGAPLAADVYVGNLPGDARVSDLKRALRELGSVPLRLTWQGPRRRAFLHYPDSAAAQQAVSCLQGLRLGTDTLRVALARQQRDK

SEQ ID NO: 31854 - protein, 383 aa, Homo sapiens
  REGION 1..383: note = ENSP00000370612
MEPRAVGVSKQDIREQIWGYMESQNLADFPRPVHHRIPNFKGASHAAEQLPRLQAFKTARTIKVNPDAPQKSARFFVLESKKTLLVPTPRLRTGLFNKITPPPGATKDILRKCATSQGVRNYSVPIGLDSRVLVDLVVVGSVAVSEKGWRIGKGEGYADLEYAMMVSMGAVSKETPVVTIVHDCQVVDIPEELVEEHDITVDYILTPTRVIATGCKRPKPMGITWFKISLEMMEKIPILRSLRAREQQAGKDVTLQGEHQHLPEPGCQQTVPLSVGRRPPDTPGPETNSMEAAPGSPPGEGAPLAADVYVGNLPGDARVSDLKRALRELGSVPLRLTWQGPRRRAFLHYPDSAAAQQAVSCLQGLRLGTDTLRVALARQQRDK

SEQ ID NO: 31855 - protein, 84 aa, Homo sapiens
  REGION 1..84: note = ENSP00000456910
MEPRAVGVSKQDIREQIWGYMESQNLADFPRPVHHRIPNFKGSYLACQNIKDLDVFARTQEVKVDPDKPLEGVRLLVLQVIPLP

SEQ ID NO: 31856 - protein, 56 aa, Homo sapiens
  REGION 1..56: note = ENSP00000454593
MEPRAGVSKQDIREQIWGYMESQNLADFPRPVHHRIPNFKAGESGREKATPIWNMP

SEQ ID NO: 31857 - protein, 223 aa, Homo sapiens
  REGION 1..223: note = ENSP00000456652
GVSKQDIREQIWGYMESQNLADFPRPVHHRIPNFKGSYLACQNIKDLDVFARTQEVKVDPDKPLEGVRLLVLQSKKTLLVPTPRLRTGLFNKITPPPGATKDILRKCATSQGVRNYSVPIGLDSRVLVDLVVVGSVAVSEKGWRIGKGEGYADLEYAMMVSMGAVSKETPVVTIVHDCQVVDIPEELVEEHDITVDYILTPTRVIATGCKRPKPMGITWFKIR

SEQ ID NO: 31858 - protein, 233 aa, Homo sapiens
  REGION 1..233: note = ENSP00000455940
  VARIANT 1: note = Any amino acid
XVSKQDIREQIWGYMESQNLADFPRPVHHRIPNFKGSYLACQNIKDLDVFARTQEVKVDPDKPLEGVRLLVLQSKKTLLVPTPRLRTGLFNKITPPPGATKDILRKCATSQGVRNYSVPIGLDSRVLVDLVVVGSVAVSEKGWRIGKGEGYADLEYAMMVSMGAVSKETPVVTIVHDCQVVDIPEELVEEHDITVDYILTPTRVIATGCKRPKPMGITWFKVGHGSGQLWPVA

SEQ ID NO: 31859 - protein, 174 aa, Homo sapiens
  REGION 1..174: note = ENSP00000454807
MEPRAGVSKQDIREQIWGYMESQNLADFPRPVHHRIPNFKSKKTLLVPTPRLRTGLFNKITPPPGATKDILRKCATSQGVRNYSVPIGLDSRVLVDLVVVGSVAVSEKGWRIGKGEGYADLEYAMMVSMGAVSKETPVVTIVHDCQVVDIPEELVEEHDITVDYILTPTRVIAT

SEQ ID NO: 31860 - protein, 106 aa, Homo sapiens
  REGION 1..106: note = ENSP00000455262
MEPRAVGVSKQDIREQIWGYMESQNLADFPRPVHHRIPNFKSKKTLLVPTPRLRTGLFNKITPPPGATKDILRKCATSQVPPERLGRQDRISKTCSIGNCLTSSKV

SEQ ID NO: 31861 - protein, 18 aa, Homo sapiens
  REGION 1..18: note = ENSP00000456628
MMVSMGAVSKETPVVTIV

SEQ ID NO: 31862 - protein, 16 aa, Homo sapiens
  REGION 1..16: note = ENSP00000454429
MMVSMGAVSKETPVVT

SEQ ID NO: 31863 - protein, 112 aa, Homo sapiens
  REGION 1..112: note = ENSP00000458104
MESQNLADFPRPVHHRIPNFKGASHAAEQLPRLQAFKTARTIKVNPDAPQKSARFFVLESKKTLLVPTPRLRTGLFNKITPPPGATKDILRKCATSQGVRNYSVPIGLDSRV

SEQ ID NO: 31864 - protein, 152 aa, Homo sapiens
  REGION 1..152: note = ENSP00000480673
PRAVGVSKQDIREQIWGYMESQNLADFPRPVHHRIPNFKGASHAAEQLPRLQAFKTARTIKVNPDAPQKSARFFVLESKKTLLVPTPRLRTGLFNKITPPPGATKDILRKCATSQVPPERLGRQDRISKTCSIGNCLTSSNWSVPAPVDPAR

SEQ ID NO: 31865 - protein, 112 aa, Homo sapiens
  REGION 1..112: note = ENSP00000455208
MESQNLADFPRPVHHRIPNFKGSYLACQNIKDLDVFARTQEVKVDPDKPLEGVRLLVLQSKKTLLVPTPRLRTGLFNKITPPPGATKDILRKCATSQVPPERLGRQDRISKT

SEQ ID NO: 31866 - protein, 89 aa, Homo sapiens
  REGION 1..89: note = ENSP00000457794
MESQNLADFPRPVHHRIPNFKGSYLACQNIKDLDVFARTQEVKVDPDKPLEGVRLLVLQSKKTLLVPTPRLRTGLFNKITPPPGATKDI

SEQ ID NO: 31867 - protein, 445 aa, Homo sapiens
  REGION 1..445: note = ENSP00000368793
MNRHLCVWLFRHPSLNGYLQCHIQLHSHQFRQIHLDTRLQVFRQNRNCILHLLSKNWSRRYCHQDTKMLWKHKALQKYMENLSKEYQTLEQCLQHIPVNEENRRSLNRRHAELAPLAAIYQEIQETEQAIEELESMCKSLNKQDEKQLQELALEERQTIDQKINMLYNELFQSLVPKEKYDKNDVILEVTAGRTTGGDICQQFTREIFDMYQNYSCYKHWQFELLNYTPADYGGLHHAAARISGDGVYKHLKYEGGIHRVQRIPEVGLSSRMQRIHTGTMSVIVLPQPDEVDVKLDPKDLRIDTFRAKGAGGQHVNKTDSAVRLVHIPTGLVVECQQERSQIKNKEIAFRVLRARLYQQIIEKDKRQQQSARKLQVGTRAQSERIRTYNFTQDRVSDHRIAYEVRDIKEFLCGGKGLDQLIQRLLQSADEEAIAELLDEHLKSAK

SEQ ID NO: 31868 - protein, 445 aa, Homo sapiens; identical to SEQ ID NO: 31867
  REGION 1..445: note = ENSP00000368790

SEQ ID NO: 31869 - protein, 151 aa, Homo sapiens
  REGION 1..151: note = ENSP00000481161
MNRHLCVWLFRHPSLNGYLQCHIQLHSHQFRQIHLDTRLQVFRQNRNCILHLLSKNWSRRYCHQDTKMLWKHKALQKYMENLSKEYQTLEQCLQHIPVNEENRRSLNRRHAELAPLAAIYQEIQETEQAIEELESMCKKTESCSVAQAGMQ

SEQ ID NO: 31870 - protein, 137 aa, Homo sapiens
  REGION 1..137: note = ENSP00000482339
RRHAELAPLAAIYQEIQETEQAIEELESMCKSLNKQDEKQLQELALEERQTIDQKINMLYNELFQSLVPKEKYDKNDVILEVTAGRTTGGDICQQFTREIFDMYQNYSCYKHWQFELLNYTPADYGRHIEEFACRRY

SEQ ID NO: 31871 - protein, 226 aa, Homo sapiens
  REGION 1..226: note = ENSP00000399279
MNRHLCVWLFRHPSLNGYLQCHIQLHSHQFRQIHLDTRLQVFRQNRNCILHLLSKNWSRRYCHQDTKMLWKHKALQKYMENLSKEYQTLEQCLQHIPVNEENRRSLNRRHAELAPLAAIYQEIQETEQAIEELESMCKSLNKQDEKQLQELALEERQTIDQKINMLYNELFQSLVPKEKYDKNDVILEVTAGRTTGGDICQQFTREIFDMYQNYSCYKHWQFELLN

SEQ ID NO: 31872 - protein, 153 aa, Homo sapiens
  REGION 1..153: note = ENSP00000484414
MNRHLCVWLFRHPSLNGYLQCHIQLHSHQFRQIHLDTRLQVFRQNRNCILHLLSKNWSRRYCHQDTKMLWKHKALQKYMENLSKEYQTLEQCLQHIPVNEENRRSLNRRHAELAPLAAIYQEIQETEQAIEELESMCKRDRVLLCGPGWNAVV

SEQ ID NO: 31873 - protein, 151 aa, Homo sapiens; identical to SEQ ID NO: 31869
  REGION 1..151: note = ENSP00000400031

SEQ ID NO: 31874 - protein, 24 aa, Homo sapiens
  REGION 1..24: note = ENSP00000488809
MTPRGFSCLLLPTSETDLPVKRRT

SEQ ID NO: 31875 - protein, 24 aa, Homo sapiens
  REGION 1..24: note = ENSP00000473686
MTPRGFSCLLLPTSETDLPVKRRT

SEQ ID NO: 31876 - protein, 24 aa, Homo sapiens
  REGION 1..24: note = ENSP00000439666
MAPRGFSCLLLSTSEIDLPVKRRA

SEQ ID NO: 31877 - protein, 730 aa, Homo sapiens
  REGION 1..730: note = ENSP00000367256
MEAVIEKECSALGGLFQTIISDMKGSYPVWEDFINKAGKLQSQLRTTVVAAAAFLDAFQKVADMATNTRGGTREIGSALTRMCMRHRSIEAKLRQFSSALIDCLINPLQEQMEEWKKVANQLDKDHAKEYKKARQEIKKKSSDTLKLQKKAKKGRGDIQPQLDSALQDVNDKYLLLEETEKQAVRKALIEERGRFCTFISMLRPVIEEEISMLGEITHLQTISEDLKSLTMDPHKLPSSSEQVILDLKGSDYSWSYQTPPSSPSTTMSRKSSVCSSLNSVNSSDSRSSGSHSHSPSSHYRYRSSNLAQQAPVRLSSVSSHDSGFISQDAFQSKSPSPMPPEAPNQNSSSSASSEASETCQSVSECSSPTSVSSGSTMGAWVSTEKDWAKPGPYDQPLVNTLQRRKEKREPDPNGGGPTTASGPPAAAEEAQRPRSMTVSAATRPGEEMEACEELALALSRGLQLDTQRSSRDSLQCSSGYSTQTTTPCCSEDTIPSQVSDYDYFSVSGDQEADQQEFDKSSTIPRNSDISQSYRRMFQAKRPASTAGLPTTLGPAMVTPGVATIRRTPSTKPSVRRGTIGAGPIPIKTPVIPVKTPTVPDLPGVLPAPPDGPEERGEHSPESPSVGEGPQGVTSMPSSMWSGQASVNPPLPGPKPSIPEEHRQAIPESEAEDQEREPPSATVSPGQIPESDPADLSPRDTPQGEDMLNAIRRGVKLKKTTTNDRSAPRFS

SEQ ID NO: 31878 - protein, 755 aa, Homo sapiens
  REGION 1..755: note = ENSP00000429064
MEAVIEKECSALGGLFQTIISDMKGSYPVWEDFINKAGKLQSQLRTTVVAAAAFLDAFQKVADMATNTRGGTREIGSALTRMCMRHRSIEAKLRQFSSALIDCLINPLQEQMEEWKKVANQLDKDHAKEYKKARQEIKKKSSDTLKLQKKAKKGRGDIQPQLDSALQDVNDKYLLLEETEKQAVRKALIEERGRFCTFISMLRPVIEEEISMLGEITHLQTISEDLKSLTMDPHKLPSSSEQVILDLKGSDYSWSYQTPPSSPSTTMSRKSSVCSSLNSVNSSDSRSSGSHSHSPSSHYRYRSSNLAQQAPVRLSSVSSHDSGFISQDAFQSKSPSPMPPEAPNQLSNGFSHYSLSSESHVGPTGAGLFPHCLPASRLLPRVTSVHLPDYAHYYTIGPGMFPSSQIPSWKDWAKPGPYDQPLVNTLQRRKEKREPDPNGGGPTTASGPPAAAEEAQRPRSMTVSAATRPGEEMEACEELALALSRGLQLDTQRSSRDSLQCSSGYSTQTTTPCCSEDTIPSQVSDYDYFSVSGDQEADQQEFDKSSTIPRNSDISQSYRRMFQAKRPASTAGLPTTLGPAMVTPGVATIRRTPSTKPSVRRGTIGAGPIPIKTPVIPVKTPTVPDLPGVLPAPPDGPEERGEHSPESPSVGEGPQGVTSMPSSMWSGQASVNPPLPGPKPSIPEEHRQAIPESEAEDQEREPPSATVSPGQIPESDPADLSPRDTPQGEDMLNAIRRGVKLKKTTTNDRSAPRFS

SEQ ID NO: 31879 - protein, 543 aa, Homo sapiens
  REGION 1..543: note = ENSP00000428685
  VARIANT 1: note = Any amino acid
XWSYQTPPSSPSTTMSRKSSVCSSLNSVNSSDSRSSGSHSHSPSSHYRYRSSNLAQQAPVRLSSVSSHDSGFISQDAFQSKSPSPMPPEAPNQNSSSSASSEASETCQSVSECSSPTSVSSGSTMGAWVSTEKLSNGFSHYSLSSESHVGPTGAGLFPHCLPASRLLPRVTSVHLPDYAHYYTIGPGMFPSSQIPSWKDWAKPGPYDQPLVNTLQRRKEKREPDPNGGGPTTASGPPAAAEEAQRPRSMTVSAATRPGEEMEACEELALALSRGLQLDTQRSSRDSLQCSSGYSTQTTTPCCSEDTIPSQVSDYDYFSVSGDQEADQQEFDKSSTIPRNSDISQSYRRMFQAKRPASTAGLPTTLGPAMVTPGVATIRRTPSTKPSVRRGTIGAGPIPIKTPVIPVKTPTVPDLPGVLPAPPDGPEERGEHSPESPSVGEGPQGVTSMPSSMWSGQASVNPPLPGPKPSIPEEHRQAIPESEAEDQEREPPSATVSPGQIPESDPADLSPRDTPQGEDMLNAIRRGVKLKKTTTNDRSAPRFS

SEQ ID NO: 31880 - protein, 759 aa, Homo sapiens
  REGION 1..759: note = ENSP00000322804
MEAVIEKECSALGGLFQTIISDMKGSYPVWEDFINKAGKLQSQLRTTVVAAAAFLDAFQKVADMATNTRGGTREIGSALTRMCMRHRSIEAKLRQFSSALIDCLINPLQEQMEEWKKVANQLDKDHAKEYKKARQEIKKKSSDTLKLQKKAKKVDTLGRGDIQPQLDSALQDVNDKYLLLEETEKQAVRKALIEERGRFCTFISMLRPVIEEEISMLGEITHLQTISEDLKSLTMDPHKLPSSSEQVILDLKGSDYSWSYQTPPSSPSTTMSRKSSVCSSLNSVNSSDSRSSGSHSHSPSSHYRYRSSNLAQQAPVRLSSVSSHDSGFISQDAFQSKSPSPMPPEAPNQLSNGFSHYSLSSESHVGPTGAGLFPHCLPASRLLPRVTSVHLPDYAHYYTIGPGMFPSSQIPSWKDWAKPGPYDQPLVNTLQRRKEKREPDPNGGGPTTASGPPAAAEEAQRPRSMTVSAATRPGEEMEACEELALALSRGLQLDTQRSSRDSLQCSSGYSTQTTTPCCSEDTIPSQVSDYDYFSVSGDQEADQQEFDKSSTIPRNSDISQSYRRMFQAKRPASTAGLPTTLGPAMVTPGVATIRRTPSTKPSVRRGTIGAGPIPIKTPVIPVKTPTVPDLPGVLPAPPDGPEERGEHSPESPSVGEGPQGVTSMPSSMWSGQASVNPPLPGPKPSIPEEHRQAIPESEAEDQEREPPSATVSPGQIPESDPADLSPRDTPQGEDMLNAIRRGVKLKKTTTNDRSAPRFS

SEQ ID NO: 31881 - protein, 473 aa, Homo sapiens
  REGION 1..473: note = ENSP00000393606
MLRPVIEEEISMLGEITHLQTISEDLKSLTMDPHKLPSSSEQVILDLKGSDYSWSYQTPPSSPSTTMSRKSSVCSSLNSVNSSDSRSSGSHSHSPSSHYRYRSSNLAQQAPVRLSSVSSHDSGFISQDAFQSKSPSPMPPEAPNQRRKEKREPDPNGGGPTTASGPPAAAEEAQRPRSMTVSAATRPGEEMEACEELALALSRGLQLDTQRSSRDSLQCSSGYSTQTTTPCCSEDTIPSQVSDYDYFSVSGDQEADQQEFDKSSTIPRNSDISQSYRRMFQAKRPASTAGLPTTLGPAMVTPGVATIRRTPSTKPSVRRGTIGAGPIPIKTPVIPVKTPTVPDLPGVLPAPPDGPEERGEHSPESPSVGEGPQGVTSMPSSMWSGQASVNPPLPGPKPSIPEEHRQAIPESEAEDQEREPPSATVSPGQIPESDPADLSPRDTPQGEDMLNAIRRGVKLKKTTTNDRSAPRFS

SEQ ID NO: 31882 - protein, 645 aa, Homo sapiens
  REGION 1..645: note = ENSP00000428319
MNKYFFYILENCGFDSSKDPREEGHLFQKLVFQQAVLGSLFFAGRGDIQPQLDSALQDVNDKYLLLEETEKQAVRKALIEERGRFCTFISMLRPVIEEEISMLGEITHLQTISEDLKSLTMDPHKLPSSSEQVILDLKGSDYSWSYQTPPSSPSTTMSRKSSVCSSLNSVNSSDSRSSGSHSHSPSSHYRYRSSNLAQQAPVRLSSVSSHDSGFISQDAFQSKSPSPMPPEAPNQLSNGFSHYSLSSESHVGPTGAGLFPHCLPASRLLPRVTSVHLPDYAHYYTIGPGMFPSSQIPSWKDWAKPGPYDQPLVNTLQRRKEKREPDPNGGGPTTASGPPAAAEEAQRPRSMTVSAATRPGEEMEACEELALALSRGLQLDTQRSSRDSLQCSSGYSTQTTTPCCSEDTIPSQVSDYDYFSVSGDQEADQQEFDKSSTIPRNSDISQSYRRMFQAKRPASTAGLPTTLGPAMVTPGVATIRRTPSTKPSVRRGTIGAGPIPIKTPVIPVKTPTVPDLPGVLPAPPDGPEERGEHSPESPSVGEGPQGVTSMPSSMWSGQASVNPPLPGPKPSIPEEHRQAIPESEAEDQEREPPSATVSPGQIPESDPADLSPRDTPQGEDMLNAIRRGVKLKKTTTNDRSAPRFS

SEQ ID NO: 31883 - protein, 286 aa, Homo sapiens
  REGION 1..286: note = ENSP00000428348
  VARIANT 1: note = Any amino acid
XGRGDIQPQLDSALQDVNDKYLLLEETEKQAVRKALIEERGRFCTFISMLRPVIEEEISMLGEITHLQTISEDLKSLTMDPHKLPSSSEQVILDLKGSDYSWSYQTPPSSPSTTMSRKSSVCSSLNSVNSSDSRSSGSHSHSPSSHYRYRSSNLAQQAPVRLSSVSSHDSGFISQDAFQSKSPSPMPPEAPNQDWAKPGPYDQPLVNTLQRRKEKREPDPNGGGPTTASGPPAAAEEAQRPRSMTVSAATRPGEEMEACEELALALSRGLQLDTQRSSRDSLQCSS

SEQ ID NO: 31884 - protein, 207 aa, Homo sapiens
  REGION 1..207: note = ENSP00000428145
MLRPVIEEEISMLGEITHLQTISEDLKSLTMDPHKLPSSSEQVILDLKGSDYSWSYQTPPSSPSTTMSRKSSVCSSLNSVNSSDSRSSGSHSHSPSSHYRYRSSNLAQQAPVRLSSVSSHDSGFISQDAFQSKSPSPMPPEAPNQLSNGFSHYSLSSESHVGPTGAGLFPHCLPASRLLPRVTSVHLPDYAHYYTIGPGMFPSSQIP

SEQ ID NO: 31885 - protein, 184 aa, Homo sapiens
  REGION 1..184: note = ENSP00000429752
  VARIANT 1: note = Any amino acid
XSLGGSRHWLQVFPLSVPEGSYPVWEDFINKAGKLQSQLRTTVVAAAAFLDAFQKVADMATNTRGGTREIGSALTRMCMRHRSIEAKLRQFSSALIDCLINPLQEQMEEWKKVANQLDKDHAKEYKKARQEIKKKSSDTLKLQKKAKKGRGDIQPQLDSALQDVNDKYLLLEETEKQAVRKALI

SEQ ID NO: 31886 - protein, 42 aa, Homo sapiens
  REGION 1..42: note = ENSP00000424972
MARAPLRPENTIVRGSANQCQDTYRAEELTGSEEGHSLTGCH

SEQ ID NO: 31887 - protein, 55 aa, Homo sapiens
  REGION 1..55: note = ENSP00000425987
MARAPLRPENTIVRGSANQCQDTYRAEELTGRPSIITRIHKTEEGDRRDGQSDMK

SEQ ID NO: 31888 - protein, 178 aa, Homo sapiens
  REGION 1..178: note = ENSP00000426755
MARAPLRPENTIVRGSANQCQDTYRAEELTGHTTGLSLNNDRLYKLTYSTEVLLDRGKGKLQDSVGYRISSNVDVALLWRNPDGDDDQLIQITMKDVNVENVNQQRGEKSIFKGKSPSKIMGKENLEALQRPTLLHLIHGKVKEFYSYQNEAVAIENIKRGLASLFQTQLSSGTTNEV

SEQ ID NO: 31889 - protein, 59 aa, Homo sapiens
  REGION 1..59: note = ENSP00000425642
MEERGGVYAGRGLELVFWEWEVVTVMSVFSRSRIKCVPADVYSFIYSCSEEGHSLTGCH

SEQ ID NO: 31890 - protein, 56 aa, Homo sapiens
  REGION 1..56: note = ENSP00000422667
MEERGGVYAGRGLELVFWEWEVVTVMSVFSRSRIKCVPADVYSFIYSCEYWMKELR

SEQ ID NO: 31891 - protein, 72 aa, Homo sapiens
  REGION 1..72: note = ENSP00000422178
MEERGGVYAGRGLELVFWEWEVVTVMSVFSRSRIKCVPADVYSFIYSCRPSIITRIHKTEEGDRRDGQSDMK

SEQ ID NO: 31892 - protein, 50 aa, Homo sapiens
  REGION 1..50: note = ENSP00000422782
MEERGGVYAGRGLELVFWEWEVVTVMSVFSRSRIKCVPADVYSFIYSCPV

SEQ ID NO: 31893 - protein, 921 aa, Homo sapiens
  REGION 1..921: note = ENSP00000427679
MEERGGVYAGRGLELVFWEWEVVTVMSVFSRSRIKCVPADVYSFIYSCHTTGLSLNNDRLYKLTYSTEVLLDRGKGKLQDSVGYRISSNVDVALLWRNPDGDDDQLIQITMKDVNVENVNQQRGEKSIFKGKSPSKIMGKENLEALQRPTLLHLIHGKVKEFYSYQNEAVAIENIKRGLASLFQTQLSSGTTNEVDISGNCKVTYQAHQDKVIKIKALDSCKIARSGFTTPNQVLGVSSKATSVTTYKIEDSFVIAVLAEETHNFGLNFLQTIKGKIVSKQKLELKTTEAGPRLMSGKQAAAIIKAVDSKYTAIPIVGQVFQSHCKGCPSLSELWRSTRKYLQPDNLSKAEAVRNFLAFIQHLRTAKKEEILQILKMENKEVLPQLVDAVTSAQTSDSLEAILDFLDFKSDSSIILQERFLYACGFASHPNEELLRALISKFKGSIGSSDIRETVMIITGTLVRKLCQNEGCKLKAVVEAKKLILGGLEKAEKKEDTRMYLLALKNALLPEGIPSLLKYAEAGEGPISHLATTALQRYDLPFITDEVKKTLNRIYHQNRKVHEKTVRTAAAAIILNNNPSYMDVKNILLSIGELPQEMNKYMLAIVQDILRFEMPASKIVRRVLKEMVAHNYDRFSRSGSSSAYTGYIERSPRSASTYSLDILYSGSGILRRSNLNIFQYIGKAGLHGSQVVIEAQGLEALIAATPDEGEENLDSYAGMSAILFDVQLRPVTFFNGYSDLMSKMLSASGDPISVVKGLILLIDHSQELQLQSGLKANIEVQGGLAIDISGAMEFSLWYRESKTRVKNRVTVVITTDITVDSSFVKAGLETSTETEAGLEFISTVQFSQYPFLVCMQMDKDEAPFRQFEKKYERLSTGRGYVSQKRKESVLAGCEFPLHQENSEMCKVVFAPQPDSTSSGWF

SEQ ID NO: 31894 - protein, 894 aa, Homo sapiens
  REGION 1..894: note = ENSP00000265517
MILLAVLFLCFISSYSASVKGHTTGLSLNNDRLYKLTYSTEVLLDRGKGKLQDSVGYRISSNVDVALLWRNPDGDDDQLIQITMKDVNVENVNQQRGEKSIFKGKSPSKIMGKENLEALQRPTLLHLIHGKVKEFYSYQNEAVAIENIKRGLASLFQTQLSSGTTNEVDISGNCKVTYQAHQDKVIKIKALDSCKIARSGFTTPNQVLGVSSKATSVTTYKIEDSFVIAVLAEETHNFGLNFLQTIKGKIVSKQKLELKTTEAGPRLMSGKQAAAIIKAVDSKYTAIPIVGQVFQSHCKGCPSLSELWRSTRKYLQPDNLSKAEAVRNFLAFIQHLRTAKKEEILQILKMENKEVLPQLVDAVTSAQTSDSLEAILDFLDFKSDSSIILQERFLYACGFASHPNEELLRALISKFKGSIGSSDIRETVMIITGTLVRKLCQNEGCKLKAVVEAKKLILGGLEKAEKKEDTRMYLLALKNALLPEGIPSLLKYAEAGEGPISHLATTALQRYDLPFITDEVKKTLNRIYHQNRKVHEKTVRTAAAAIILNNNPSYMDVKNILLSIGELPQEMNKYMLAIVQDILRFEMPASKIVRRVLKEMVAHNYDRFSRSGSSSAYTGYIERSPRSASTYSLDILYSGSGILRRSNLNIFQYIGKAGLHGSQVVIEAQGLEALIAATPDEGEENLDSYAGMSAILFDVQLRPVTFFNGYSDLMSKMLSASGDPISVVKGLILLIDHSQELQLQSGLKANIEVQGGLAIDISGAMEFSLWYRESKTRVKNRVTVVITTDITVDSSFVKAGLETSTETEAGLEFISTVQFSQYPFLVCMQMDKDEAPFRQFEKKYERLSTGRGYVSQKRKESVLAGCEFPLHQENSEMCKVVFAPQPDSTSSGWF

SEQ ID NO: 31895 - protein, 151 aa, Homo sapiens
  REGION 1..151: note = ENSP00000407350
MILLAVLFLCFISSYSASVKGHTTGLSLNNDRLYKLTYSTEVLLDRGKGKLQDSVGYRISSNVDVALLWRNPDGDDDQLIQITMKDVNVENVNQQRGEKSIFKGKSPSKIMGKENLEALQRPTLLHLIHGKVKGRLDSTTFSPTSYFSSLQ

SEQ ID NO: 31896 - protein, 894 aa, Homo sapiens; identical to SEQ ID NO: 31894
  REGION 1..894: note = ENSP00000400821

SEQ ID NO: 31897 - protein, 220 aa, Homo sapiens
  REGION 1..220: note = ENSP00000455819
MATEEFIIRIPPYHYIHVLDQNSNVSRVEVGPKTYIRQDNERVLFAPMRMVTVPPRHYCTVANPVSRDAQGLVLFDVTGQVRLRHADLEIRLAQDPFPLYPGEVLEKDITPLQVVLPNTALHLKALLDFEDKDGDKVVAGDEWLFEGPGTYIPRKEVEVVEIIQATIIRQNQALRLRARKECWDRDGKERVTGEEWLVTTVGAYLPAVFEEVLDLVDAVI

SEQ ID NO: 31898 - protein, 893 aa, Homo sapiens
  REGION 1..893: note = ENSP00000349977
MATEEFIIRIPPYHYIHVLDQNSNVSRVEVGPKTYIRQDNERVLFAPMRMVTVPPRHYCTVANPVSRDAQGLVLFDVTGQVRLRHADLEIRLAQDPFPLYPGEVLEKDITPLQVVLPNTALHLKALLDFEDKDGDKVVAGDEWLFEGPGTYIPRKEVEVVEIIQATIIRQNQALRLRARKECWDRDGKERVTGEEWLVTTVGAYLPAVFEEVLDLVDAVILTEKTALHLRARRNFRDFRGVSRRTGEEWLVTVQDTEAHVPDVHEEVLGVVPITTLGPHNYCVILDPVGPDGKNQLGQKRVVKGEKSFFLQPGEQLEQGIQDVYVLSEQQGLLLRALQPLEEGEDEEKVSHQAGDHWLIRGPLEYVPSAKVEVVEERQAIPLDENEGIYVQDVKTGKVRAVIGSTYMLTQDEVLWEKELPPGVEELLNKGQDPLADRGEKDTAKSLQPLAPRNKTRVVSYRVPHNAAVQVYDYREKRARVVFGPELVSLGPEEQFTVLSLSAGRPKRPHARRALCLLLGPDFFTDVITIETADHARLQLQLAYNWHFEVNDRKDPQETAKLFSVPDFVGDACKAIASRVRGAVASVTFDDFHKNSARIIRTAVFGFETSEAKGPDGMALPRPRDQAVFPQNGLVVSSVDVQSVEPVDQRTRDALQRSVQLAIEITTNSQEAAAKHEAQRLEQEARGRLERQKILDQSEAEKARKELLELEALSMAVESTGTAKAEAESRAEAARIEGEGSVLQAKLKAQALAIETEAELQRVQKVRELELVYARAQLELEVSKAQQLAEVEVKKFKQMTEAIGPSTIRDLAVAGPEMQVKLLQSLGLKSTLITDGSTPINLFNTAFGLLGMGPEGQPLGRRVASGPSPGEGISPQSAQAPQAPGDNHVVPVLR

SEQ ID NO: 31899 - protein, 81 aa, Homo sapiens
  REGION 1..81: note = ENSP00000455741
MATEEFIIRIPPYHYIHVLDQNSNVSRVEVGPKTYIRQDNERFWIWWTPSSLRKRQPCTSGLGGTSGTSGECPAALGRSGW

SEQ ID NO: 31900 - protein, 94 aa, Homo sapiens
  REGION 1..94: note = ENSP00000455186
MATEEFIIRIPPYHYIHVLDQNSNVSRVEVGPKTYIRQDNERVLFAPMRMVTVPPRHYCTVANPVSRDAQGLVLFDVTGQVRLRHADLEIRLAQ

SEQ ID NO: 31901 - protein, 57 aa, Homo sapiens
  REGION 1..57: note = ENSP00000457734
MATEEFIIRIPPYHYIHVLDQNSNVSRVEVGPKTYIRQDNERTSHPCRWFCPTLPSI

SEQ ID NO: 31902 - protein, 144 aa, Homo sapiens
  REGION 1..144: note = ENSP00000454825
MATEEFIIRIPPYHYIHVLDQNSNVSRVEVGPKTYIRQDNERVLFAPMRMVTVPPRHYCTVANPVSRDAQGLVLFDVTGQVRLRHADLEIRLAQDPFPLYPGEVLEKAIPLDENEGIYVQDVKTGKVRAVIGSTYMLTQDEVLW

SEQ ID NO: 31903 - protein, 39 aa, Homo sapiens
  REGION 1..39: note = ENSP00000455532
MATEEFIIRIPPYHYIHVLDQNSNVSRVECPAALGRSGW

SEQ ID NO: 31904 - protein, 42 aa, Homo sapiens
  REGION 1..42: note = ENSP00000454819
MATEEFIIRIPPYHYIHVLDQNSNVSRVEVGPKTYIRQDNER

SEQ ID NO: 31905 - protein, 148 aa, Homo sapiens
  REGION 1..148: note = ENSP00000456291
MATEEFIIRIPPYHYIHVLDQNSNVSRVEVGPKTYIRQDNERVLFAPMRMVTVPPRHYCTVANPVSRDAQGLVLFDVTGQVRLRHADLEIRLAQDPFPLYPGEVLEKDITPLQVVLPNTALHLKALLDFEDKDGDKVVAGDEWLFEGP

SEQ ID NO: 31906 - protein, 107 aa, Homo sapiens
  REGION 1..107: note = ENSP00000457685
MATEEFIIRIPPYHYIHVLDQNSNVSRVEVGPKTYIRQDNERVLFAPMRMVTVPPRHYCTVANPVSRDAQGLVLFDVTGQVRLRHADLEIRLAQDPFPLYPGEVLEK

SEQ ID NO: 31907 - protein, 61 aa, Homo sapiens
  REGION 1..61: note = ENSP00000458583
  VARIANT 1: note = Any amino acid
XGDEWLFEGPGTYIPRKEVEVVEIIQATIIRQNQALRLRARKECWDRDGKERVTGGVTKGR

SEQ ID NO: 31908 - protein, 893 aa, Homo sapiens; identical to SEQ ID NO: 31898
  REGION 1..893: note = ENSP00000378760

SEQ ID NO: 31909 - protein, 39 aa, Homo sapiens; identical to SEQ ID NO: 31903
  REGION 1..39: note = ENSP00000486166

SEQ ID NO: 31910 - protein, 181 aa, Homo sapiens
  REGION 1..181: note = ENSP00000410672
MLPYNNKDRDALKRRNKSKKNNSSSRSTHNEMEKNRRAHLRLCLEKLKGLVPLGPESSRHTTLSLLTKAKLHIKKLEDCDRKAVHQIDQLQREQRHLKRQLEKLGIERIRMDSIGSTVSSERSDSDREEIDVDVESTDYLTGDLDWSSSSVSDSDERGSMQSLGSDEGYSSTSIKRIKLQD

SEQ ID NO: 31911 - protein, 221 aa, Homo sapiens
  REGION 1..221: note = ENSP00000264444
MAAAVRMNIQMLLEAADYLERREREAEHGYASMLPYNNKDRDALKRRNKSKKNNSSSRSTHNEMEKNRRAHLRLCLEKLKGLVPLGPESSRHTTLSLLTKAKLHIKKLEDCDRKAVHQIDQLQREQRHLKRQLEKLGIERIRMDSIGSTVSSERSDSDREEIDVDVESTDYLTGDLDWSSSSVSDSDERGSMQSLGSDEGYSSTSIKRIKLQDSHKACLGL

SEQ ID NO: 31912 - protein, 73 aa, Homo sapiens
  REGION 1..73: note = ENSP00000386523
MLPYNNKDRDALKRRNKSKKNNSSSRRAHLRLCLEKLKGLVPLGPESSRHTTLSLLTKAKLHIKDKYPQHWRC

SEQ ID NO: 31913 - protein, 211 aa, Homo sapiens
  REGION 1..211: note = ENSP00000443935
MAAAVRMNIQMLLEAADYLERREREAEHGYASMLPYNNKDRDALKRRNKSKKNNSSSRRAHLRLCLEKLKGLVPLGPESSRHTTLSLLTKAKLHIKKLEDCDRKAVHQIDQLQREQRHLKRQLEKLGIERIRMDSIGSTVSSERSDSDREEIDVDVESTDYLTGDLDWSSSSVSDSDERGSMQSLGSDEGYSSTSIKRIKLQDSHKACLGL

SEQ ID NO: 31914 - protein, 209 aa, Homo sapiens
  REGION 1..209: note = ENSP00000337889
MELNSLLILLEAAEYLERRDREAEHGYASVLPFDGDFAREKTKAAGLVRKAPNNRSSHNELEKHRRAKLRLYLEQLKQLVPLGPDSTRHTTLSLLKRAKVHIKKLEEQDRRALSIKEQLQQEHRFLKRRLEQLSVQSVERVRTDSTGSAVSTDDSEQEVDIEGMEFGPGELDSVGSSSDADDHYSLQSGTGGDSGFGPHCRRLGRPALS

SEQ ID NO: 31915 - protein, 82 aa, Homo sapiens
  REGION 1..82: note = ENSP00000422660
  VARIANT 1: note = Any amino acid
XLPFDGDFAREKTKAAGLVRKAPNNRSSHNELEKHRCSVISKAVCSRTSPAPHPRDRIPGTQRLSHILHCSPRALTLPMRLG

SEQ ID NO: 31916 - protein, 107 aa, Homo sapiens
  REGION 1..107: note = ENSP00000421209
MELNSLLILLEAAEYLERRDREAEHGYASVLPFDGDFAREKTKAAGLVRKAPNNSGILGGPGALAGLWGPAWTRKVAWSWERGPPASLSSRQMLWHTLWCWELCARV

SEQ ID NO: 31917 - protein, 442 aa, Homo sapiens
  REGION 1..442: note = ENSP00000307887
MALPSRILLWKLVLLQSSAVLLHSGSSVPAAAGSSVVSESAVSWEAGARAVLRCQSPRMVWTQDRLHDRQRVLHWDLRGPGGGPARRLLDLYSAGEQRVYEARDRGRLELSASAFDDGNFSLLIRAVEETDAGLYTCNLHHHYCHLYESLAVRLEVTDGPPATPAYWDGEKEVLAVARGAPALLTCVNRGHVWTDRHVEEAQQVVHWDRQPPGVPHDRADRLLDLYASGERRAYGPLFLRDRVAVGADAFERGDFSLRIEPLEVADEGTYSCHLHHHYCGLHERRVFHLTVAEPHAEPPPRGSPGNGSSHSGAPGPDPTLARGHNVINVIVPESRAHFFQQLGYVLATLLLFILLLVTVLLAARRRRGGYEYSDQKSGKSKGKDVNLAEFAVAAGDQMLYRSEDIQLDYKNNILKERAELAHSPLPAKYIDLDKGFRKENCK

SEQ ID NO: 31918 - protein, 450 aa, Homo sapiens
  REGION 1..450: note = ENSP00000399229
MALPSRILLWKLVLLQSSAVLLHSGSSVPAAAGSSVVSESAVSWEAGARAVLRCQSPRMVWTQDRLHDRQRVLHWDLRGPGGGPARRLLDLYSAGEQRVYEARDRGRLELSASAFDDGNFSLLIRAVEETDAGLYTCNLHHHYCHLYESLAVRLEVTDGPPATPAYWDGEKEVLAVARGAPALLTCVNRGHVWTDRHVEEAQQVVHWDRQPPGVPHDRADRLLDLYASGERRAYGPLFLRDRVAVGADAFERGDFSLRIEPLEVADEGTYSCHLHHHYCGLHERRVFHLTVAEPHAEPPPRGSPGNGSSHSGAPGPDPTLARGHNVINVIVPESRAHFFQQLGYVLATLLLFILLLVTVLLAARRRRGGYEYSDQKSGKSKGKDVNLAEFAVAAGDQMLYRSEDIQLASSPPTDYKNNILKERAELAHSPLPAKYIDLDKDPSGLCPLGA

SEQ ID NO: 31919 - protein, 433 aa, Homo sapiens
  REGION 1..433: note = ENSP00000436135
MIRCAATGSAVLLHSGSSVPAAAGSSVVSESAVSWEAGARAVLRCQSPRMVWTQDRLHDRQRVLHWDLRGPGGGPARRLLDLYSAGEQRVYEARDRGRLELSASAFDDGNFSLLIRAVEETDAGLYTCNLHHHYCHLYESLAVRLEVTDGPPATPAYWDGEKEVLAVARGAPALLTCVNRGHVWTDRHVEEAQQVVHWDRQPPGVPHDRADRLLDLYASGERRAYGPLFLRDRVAVGADAFERGDFSLRIEPLEVADEGTYSCHLHHHYCGLHERRVFHLTVAEPHAEPPPRGSPGNGSSHSGAPGPDPTLARGHNVINVIVPESRAHFFQQLGYVLATLLLFILLLVTVLLAARRRRGGYEYSDQKSGKSKGKDVNLAEFAVAAGDQMLYRSEDIQLDYKNNILKERAELAHSPLPAKYIDLDKGFRKENCK

SEQ ID NO: 31920 - protein, 341 aa, Homo sapiens
  REGION 1..341: note = ENSP00000344998
MALPSRILLWKLVLLQSSAVLLHSAVEETDAGLYTCNLHHHYCHLYESLAVRLEVTDGPPATPAYWDGEKEVLAVARGAPALLTCVNRGHVWTDRHVEEAQQVVHWDRQPPGVPHDRADRLLDLYASGERRAYGPLFLRDRVAVGADAFERGDFSLRIEPLEVADEGTYSCHLHHHYCGLHERRVFHLTVAEPHAEPPPRGSPGNGSSHSGAPGPDPTLARGHNVINVIVPESRAHFFQQLGYVLATLLLFILLLVTVLLAARRRRGGYEYSDQKSGKSKGKDVNLAEFAVAAGDQMLYRSEDIQLDYKNNILKERAELAHSPLPAKYIDLDKGFRKENCK

SEQ ID NO: 31921 - protein, 1120 aa, Homo sapiens
  REGION 1..1120: note = ENSP00000448175
MPEPTKKEDWTLVETPPGEEQAKQNANSQLSILFIEKPQGGTVKVGEDITFIAKVKAEDLLRKPTIKWFKGKWMDLASKAGKHLQLKETFERHSRVYTFEMQIIKAKDNFAGNYRCEVTYKDKFDSCSFDLEVHESTGTTPNIDIRSAFKRSGEGQEDAGELDFSGLLKRREVKQQEEEPQVDVWELLKNAKPSEYEKIAFQYGITDLRGMLKRLKRMRREEKKSAAFAKILDPAYQVDKGGRVRFVVELADPKLEVKWYKNGQEIRPSTKYIFEHKGCQRILFINNCQMTDDSEYYVTAGDEKCSTELFVREPPIMVTKQLEDTTAYCGERVELECEVSEDDANVKWFKNGEEIIPGPKSRYRIRVEGKKHILIIEGATKADAAEYSVMTTGGQSSAKLSVDLKPLKILTPLTDQTVNLGKEICLKCEISENIPGKWTKNGLPVQESDRLKVVHKGRIHKLVIANALTEDEGDYVFAPDAYNVTLPAKVHVIDPPKIILDGLDADNTVTVIAGNKLRLEIPISGEPPPKAMWSRGDKAIMEGSGRIRTESYPDSSTLVIDIAERDDSGVYHINLKNEAGEAHASIKVKVVDFPDPPVAPTVTEVGDDWCIMNWEPPAYDGGSPILGYFIERKKKQSSRWMRLNFDLCKETTFEPKKMIEGVAYEVRIFAVNAIGISKPSMPSRPFVPLAVTSPPTLLTVDSVTDTTVTMRWRPPDHIGAAGLDGYVLEYCFEGTEDWIVANKDLIDKTKFTITGLPTDAKIFVRVKAVNAAGASEPKYYSQPILVKEIIEPPKIRIPRHLKQTYIRRVGEAVNLVIPFQGKPRPELTWKKDGAEIDKNQINIRNSETDTIIFIRKAERSHSGKYDLQVKVDKFVETASIDIQIIDRPGPPQIVKIEDVWGENVALTWTPPKDDGNAAITGYTIQKADKKSMEWFTVIEHYHRTSATITELVIGNEYYFRVFSENMCGLSEDATMTKESAVIARDGKIYKNPVYEDFDFSEAPMFTQPLVNTYAIAGYNATLNCSVRGNPKPKITWMKNKVAIVDDPRYRMFSNQGVCTLEIRKPSPYDGGTYCCKAVNDLGTVEIECKLEVKVIYQGVNTPGQPVFLEGQQQSLHNKDF

SEQ ID NO: 31922 - protein, 1173 aa, Homo sapiens
  REGION 1..1173: note = ENSP00000400908
MPEPTKKEENEVPAPAPPPEEPSKEKEAGTTPAKDWTLVETPPGEEQAKQNANSQLSILFIEKPQGGTVKVGEDITFIAKVKAEDLLRKPTIKWFKGKWMDLASKAGKHLQLKETFERHSRVYTFEMQIIKAKDNFAGNYRCEVTYKDKFDSCSFDLEVHESTGTTPNIDIRSAFKRSGEGQEDAGELDFSGLLKRREVKQQEEEPQVDVWELLKNAKPSEYEKIAFQYGITDLRGMLKRLKRMRREEKKSAAFAKILDPAYQVDKGGRVRFVVELADPKLEVKWYKNGQEIRPSTKYIFEHKGCQRILFINNCQMTDDSEYYVTAGDEKCSTELFVREPPIMVTKQLEDTTAYCGERVELECEVSEDDANVKWFKNGEEIIPGPKSRYRIRVEGKKHILIIEGATKADAAEYSVMTTGGQSSAKLSVDLKPLKILTPLTDQTVNLGKEICLKCEISENIPGKWTKNGLPVQESDRLKVVHKGRIHKLVIANALTEDEGDYVFAPDAYNVTLPAKVHVIDPPKIILDGLDADNTVTVIAGNKLRLEIPISGEPPPKAMWSRGDKAIMEGSGRIRTESYPDSSTLVIDIAERDDSGVYHINLKNEAGEAHASIKVKVVDFPDPPVAPTVTEVGDDWCIMNWEPPAYDGGSPILGYFIERKKKQSSRWMRLNFDLCKETTFEPKKMIEGVAYEVRIFAVNAIGISKPSMPSRPFVPLAVTSPPTLLTVDSVTDTTVTMRWRPPDHIGAAGLDGYVLEYCFEGSTSAKQSDENGEAAYDLPAEDWIVANKDLIDKTKFTITGLPTDAKIFVRVKAVNAAGASEPKYYSQPILVKEIIEPPKIRIPRHLKQTYIRRVGEAVNLVIPFQGKPRPELTWKKDGAEIDKNQINIRNSETDTIIFIRKAERSHSGKYDLQVKVDKFVETASIDIQIIDRPGPPQIVKIEDVWGENVALTWTPPKDDGNAAITGYTIQKADKKSMEWFTVIEHYHRTSATITELVIGNEYYFRVFSENMCGLSEDATMTKESAVIARDGKIYKNPVYEDFDFSEAPMFTQPLVNTYAIAGYNATLNCSVRGNPKPKITWMKNKVAIVDDPRYRMFSNQGVCTLEIRKPSPYDGGTYCCKAVNDLGTVEIECKLEVKVIYQGVNTPGQPVFLEGQQQVGSPSADSSCKAYLQT

SEQ ID NO: 31923 - protein, 1139 aa, Homo sapiens
  REGION 1..1139: note = ENSP00000376665
MPEPTKKEDEEEVSPPSALPPDWTLVETPPGEEQAKQNANSQLSILFIEKPQGGTVKVGEDITFIAKVKAEDLLRKPTIKWFKGKWMDLASKAGKHLQLKETFERHSRVYTFEMQIIKAKDNFAGNYRCEVTYKDKFDSCSFDLEVHESTGTTPNIDIRSAFKRSGEGQEDAGELDFSGLLKRREVKQQEEEPQVDVWELLKNAKPSEYEKIAFQYGITDLRGMLKRLKRMRREEKKSAAFAKILDPAYQVDKGGRVRFVVELADPKLEVKWYKNGQEIRPSTKYIFEHKGCQRILFINNCQMTDDSEYYVTAGDEKCSTELFVREPPIMVTKQLEDTTAYCGERVELECEVSEDDANVKWFKNGEEIIPGPKSRYRIRVEGKKHILIIEGATKADAAEYSVMTTGGQSSAKLSVDLKPLKILTPLTDQTVNLGKEICLKCEISENIPGKWTKNGLPVQESDRLKVVHKGRIHKLVIANALTEDEGDYVFAPDAYNVTLPAKVHVIDPPKIILDGLDADNTVTVIAGNKLRLEIPISGEPPPKAMWSRGDKAIMEGSGRIRTESYPDSSTLVIDIAERDDSGVYHINLKNEAGEAHASIKVKVVDFPDPPVAPTVTEVGDDWCIMNWEPPAYDGGSPILGYFIERKKKQSSRWMRLNFDLCKETTFEPKKMIEGVAYEVRIFAVNAIGISKPSMPSRPFVPLAVTSPPTLLTVDSVTDTTVTMRWRPPDHIGAAGLDGYVLEYCFEGTEDWIVANKDLIDKTKFTITGLPTDAKIFVRVKAVNAAGASEPKYYSQPILVKEIIEPPKIRIPRHLKQTYIRRVGEAVNLVIPFQGKPRPELTWKKDGAEIDKNQINIRNSETDTIIFIRKAERSHSGKYDLQVKVDKFVETASIDIQIIDRPGPPQIVKIEDVWGENVALTWTPPKDDGNAAITGYTIQKADKKSMEWFTVIEHYHRTSATITELVIGNEYYFRVFSENMCGLSEDATMTKESAVIARDGKIYKNPVYEDFDFSEAPMFTQPLVNTYAIAGYNATLNCSVRGNPKPKITWMKNKVAIVDDPRYRMFSNQGVCTLEIRKPSPYDGGTYCCKAVNDLGTVEIECKLEVKGGLSFCRLLLQGVPPNIIDSYLRDLHSSNPEEY

SEQ ID NO: 31924 - protein, 1132 aa, Homo sapiens
  REGION 1..1132: note = ENSP00000447362
MPEPTKKEENEVPAPAPPPEDWTLVETPPGEEQAKQNANSQLSILFIEKPQGGTVKVGEDITFIAKVKAEDLLRKPTIKWFKGKWMDLASKAGKHLQLKETFERHSRVYTFEMQIIKAKDNFAGNYRCEVTYKDKFDSCSFDLEVHESTGTTPNIDIRSAFKRSGEGQEDAGELDFSGLLKRREVKQQEEEPQVDVWELLKNAKPSEYEKIAFQYGITDLRGMLKRLKRMRREEKKSAAFAKILDPAYQVDKGGRVRFVVELADPKLEVKWYKNGQEIRPSTKYIFEHKGCQRILFINNCQMTDDSEYYVTAGDEKCSTELFVREPPIMVTKQLEDTTAYCGERVELECEVSEDDANVKWFKNGEEIIPGPKSRYRIRVEGKKHILIIEGATKADAAEYSVMTTGGQSSAKLSVDLKPLKILTPLTDQTVNLGKEICLKCEISENIPGKWTKNGLPVQESDRLKVVHKGRIHKLVIANALTEDEGDYVFAPDAYNVTLPAKVHVIDPPKIILDGLDADNTVTVIAGNKLRLEIPISGEPPPKAMWSRGDKAIMEGSGRIRTESYPDSSTLVIDIAERDDSGVYHINLKNEAGEAHASIKVKVVDFPDPPVAPTVTEVGDDWCIMNWEPPAYDGGSPILGYFIERKKKQSSRWMRLNFDLCKETTFEPKKMIEGVAYEVRIFAVNAIGISKPSMPSRPFVPLAVTSPPTLLTVDSVTDTTVTMRWRPPDHIGAAGLDGYVLEYCFEGTEDWIVANKDLIDKTKFTITGLPTDAKIFVRVKAVNAAGASEPKYYSQPILVKEIIEPPKIRIPRHLKQTYIRRVGEAVNLVIPFQGKPRPELTWKKDGAEIDKNQINIRNSETDTIIFIRKAERSHSGKYDLQVKVDKFVETASIDIQIIDRPGPPQIVKIEDVWGENVALTWTPPKDDGNAAITGYTIQKADKKSMEWFTVIEHYHRTSATITELVIGNEYYFRVFSENMCGLSEDATMTKESAVIARDGKIYKNPVYEDFDFSEAPMFTQPLVNTYAIAGYNATLNCSVRGNPKPKITWMKNKVAIVDDPRYRMFSNQGVCTLEIRKPSPYDGGTYCCKAVNDLGTVEIECKLEVKVIYQGVNTPGQPVFLEGQQQSLHNKDF

SEQ ID NO: 31925 - protein, 1148 aa, Homo sapiens
  REGION 1..1148: note = ENSP00000354845
MPEPTKKEENEVPAPAPPPEEPSKEKEAGTTPAKDEEEVSPPSALPPGLGSRALERKDSDWTLVETPPGEEQAKQNANSQLSILFIEKPQGGTVKVGEDITFIAKVKAEDLLRKPTIKWFKGKWMDLASKAGKHLQLKETFERHSRVYTFEMQIIKAKDNFAGNYRCEVTYKDKFDSCSFDLEVHESTGTTPNIDIRSAFKRSGEGQEDAGELDFSGLLKRREVKQQEEEPQVDVWELLKNAKPSEYEKIAFQYGITDLRGMLKRLKRMRREEKKSAAFAKILDPAYQVDKGGRVRFVVELADPKLEVKWYKNGQEIRPSTKYIFEHKGCQRILFINNCQMTDDSEYYVTAGDEKCSTELFVREPPIMVTKQLEDTTAYCGERVELECEVSEDDANVKWFKNGEEIIPGPKSRYRIRVEGKKHILIIEGATKADAAEYSVMTTGGQSSAKLSVDLKPLKILTPLTDQTVNLGKEICLKCEISENIPGKWTKNGLPVQESDRLKVVHKGRIHKLVIANALTEDEGDYVFAPDAYNVTLPAKVHVIDPPKIILDGLDADNTVTVIAGNKLRLEIPISGEPPPKAMWSRGDKAIMEGSGRIRTESYPDSSTLVIDIAERDDSGVYHINLKNEAGEAHASIKVKVVDFPDPPVAPTVTEVGDDWCIMNWEPPAYDGGSPILGYFIERKKKQSSRWMRLNFDLCKETTFEPKKMIEGVAYEVRIFAVNAIGISKPSMPSRPFVPLAVTSPPTLLTVDSVTDTTVTMRWRPPDHIGAAGLDGYVLEYCFEGTEDWIVANKDLIDKTKFTITGLPTDAKIFVRVKAVNAAGASEPKYYSQPILVKEIIEPPKIRIPRHLKQTYIRRVGEAVNLVIPFQGKPRPELTWKKDGAEIDKNQINIRNSETDTIIFIRKAERSHSGKYDLQVKVDKFVETASIDIQIIDRPGPPQIVKIEDVWGENVALTWTPPKDDGNAAITGYTIQKADKKSMEWFTVIEHYHRTSATITELVIGNEYYFRVFSENMCGLSEDATMTKESAVIARDGKIYKNPVYEDFDFSEAPMFTQPLVNTYAIAGYNATLNCSVRGNPKPKITWMKNKVAIVDDPRYRMFSNQGVCTLEIRKPSPYDGGTYCCKAVNDLGTVEIECKLEVKVIAQ

SEQ ID NO: 31926 - protein, 1154 aa, Homo sapiens
  REGION 1..1154: note = ENSP00000447660
MPEPTKKEENEVPAPAPPPEEPSKEKEAGTTPAKDEEEVSPPSALPPDWTLVETPPGEEQAKQNANSQLSILFIEKPQGGTVKVGEDITFIAKVKAEDLLRKPTIKWFKGKWMDLASKAGKHLQLKETFERHSRVYTFEMQIIKAKDNFAGNYRCEVTYKDKFDSCSFDLEVHESTGTTPNIDIRSAFKRSGEGQEDAGELDFSGLLKRREVKQQEEEPQVDVWELLKNAKPSEYEKIAFQYGITDLRGMLKRLKRMRREEKKSAAFAKILDPAYQVDKGGRVRFVVELADPKLEVKWYKNGQEIRPSTKYIFEHKGCQRILFINNCQMTDDSEYYVTAGDEKCSTELFVREPPIMVTKQLEDTTAYCGERVELECEVSEDDANVKWFKNGEEIIPGPKSRYRIRVEGKKHILIIEGATKADAAEYSVMTTGGQSSAKLSVDLKPLKILTPLTDQTVNLGKEICLKCEISENIPGKWTKNGLPVQESDRLKVVHKGRIHKLVIANALTEDEGDYVFAPDAYNVTLPAKVHVIDPPKIILDGLDADNTVTVIAGNKLRLEIPISGEPPPKAMWSRGDKAIMEGSGRIRTESYPDSSTLVIDIAERDDSGVYHINLKNEAGEAHASIKVKVVDFPDPPVAPTVTEVGDDWCIMNWEPPAYDGGSPILGYFIERKKKQSSRWMRLNFDLCKETTFEPKKMIEGVAYEVRIFAVNAIGISKPSMPSRPFVPLAVTSPPTLLTVDSVTDTTVTMRWRPPDHIGAAGLDGYVLEYCFEGSTSAKQSDENGEAAYDLPAEDWIVANKDLIDKTKFTITGLPTDAKIFVRVKAVNAAGASEPKYYSQPILVKEIIEPPKIRIPRHLKQTYIRRVGEAVNLVIPFQGKPRPELTWKKDGAEIDKNQINIRNSETDTIIFIRKAERSHSGKYDLQVKVDKFVETASIDIQIIDRPGPPQIVKIEDVWGENVALTWTPPKDDGNAAITGYTIQKADKKSMEWFTVIEHYHRTSATITELVIGNEYYFRVFSENMCGLSEDATMTKESAVIARDGKIYKNPVYEDFDFSEAPMFTQPLVNTYAIAGYNATLNCSVRGNPKPKITWMKNKVAIVDDPRYRMFSNQGVCTLEIRKPSPYDGGTYCCKAVNDLGTVEIECKLEVKVIAQ

SEQ ID NO: 31927 - protein, 1123 aa, Homo sapiens
  REGION 1..1123: note = ENSP00000447900
MPEPTKKEENEVPAPAPPPEEPSKEKEAGTTPAKDWTLVETPPGEEQAKQNANSQLSILFIEKPQGGTVKVGEDITFIAKVKAEDLLRKPTIKWFKGKWMDLASKAGKHLQLKETFERHSRVYTFEMQIIKAKDNFAGNYRCEVTYKDKFDSCSFDLEVHESTGTTPNIDIRSAFKRSGEGQEDAGELDFSGLLKRREVKQQEEEPQVDVWELLKNAKPSEYEKIAFQYGITDLRGMLKRLKRMRREEKKSAAFAKILDPAYQVDKGGRVRFVVELADPKLEVKWYKNGQEIRPSTKYIFEHKGCQRILFINNCQMTDDSEYYVTAGDEKCSTELFVREPPIMVTKQLEDTTAYCGERVELECEVSEDDANVKWFKNGEEIIPGPKSRYRIRVEGKKHILIIEGATKADAAEYSVMTTGGQSSAKLSVDLKPLKILTPLTDQTVNLGKEICLKCEISENIPGKWTKNGLPVQESDRLKVVHKGRIHKLVIANALTEDEGDYVFAPDAYNVTLPAKVHVIDPPKIILDGLDADNTVTVIAGNKLRLEIPISGEPPPKAMWSRGDKAIMEGSGRIRTESYPDSSTLVIDIAERDDSGVYHINLKNEAGEAHASIKVKVVDFPDPPVAPTVTEVGDDWCIMNWEPPAYDGGSPILGYFIERKKKQSSRWMRLNFDLCKETTFEPKKMIEGVAYEVRIFAVNAIGISKPSMPSRPFVPLAVTSPPTLLTVDSVTDTTVTMRWRPPDHIGAAGLDGYVLEYCFEGTEDWIVANKDLIDKTKFTITGLPTDAKIFVRVKAVNAAGASEPKYYSQPILVKEIIEPPKIRIPRHLKQTYIRRVGEAVNLVIPFQGKPRPELTWKKDGAEIDKNQINIRNSETDTIIFIRKAERSHSGKYDLQVKVDKFVETASIDIQIIDRPGPPQIVKIEDVWGENVALTWTPPKDDGNAAITGYTIQKADKKSMEWFTVIEHYHRTSATITELVIGNEYYFRVFSENMCGLSEDATMTKESAVIARDGKIYKNPVYEDFDFSEAPMFTQPLVNTYAIAGYNATLNCSVRGNPKPKITWMKNKVAIVDDPRYRMFSNQGVCTLEIRKPSPYDGGTYCCKAVNDLGTVEIECKLEVKVIAQ

SEQ ID NO: 31928 - protein, 1146 aa, Homo sapiens
  REGION 1..1146: note = ENSP00000440034
MPEPTKKEENEVPAPAPPPEEPSKEKEAGTTPAKDWTLVETPPGEEQAKQNANSQLSILFIEKPQGGTVKVGEDITFIAKVKAEDLLRKPTIKWFKGKWMDLASKAGKHLQLKETFERHSRVYTFEMQIIKAKDNFAGNYRCEVTYKDKFDSCSFDLEVHESTGTTPNIDIRSAFKRSGEGQEDAGELDFSGLLKRREVKQQEEEPQVDVWELLKNAKPSEYEKIAFQYGITDLRGMLKRLKRMRREEKKSAAFAKILDPAYQVDKGGRVRFVVELADPKLEVKWYKNGQEIRPSTKYIFEHKGCQRILFINNCQMTDDSEYYVTAGDEKCSTELFVREPPIMVTKQLEDTTAYCGERVELECEVSEDDANVKWFKNGEEIIPGPKSRYRIRVEGKKHILIIEGATKADAAEYSVMTTGGQSSAKLSVDLKPLKILTPLTDQTVNLGKEICLKCEISENIPGKWTKNGLPVQESDRLKVVHKGRIHKLVIANALTEDEGDYVFAPDAYNVTLPAKVHVIDPPKIILDGLDADNTVTVIAGNKLRLEIPISGEPPPKAMWSRGDKAIMEGSGRIRTESYPDSSTLVIDIAERDDSGVYHINLKNEAGEAHASIKVKVVDFPDPPVAPTVTEVGDDWCIMNWEPPAYDGGSPILGYFIERKKKQSSRWMRLNFDLCKETTFEPKKMIEGVAYEVRIFAVNAIGISKPSMPSRPFVPLAVTSPPTLLTVDSVTDTTVTMRWRPPDHIGAAGLDGYVLEYCFEGTEDWIVANKDLIDKTKFTITGLPTDAKIFVRVKAVNAAGASEPKYYSQPILVKEIIEPPKIRIPRHLKQTYIRRVGEAVNLVIPFQGKPRPELTWKKDGAEIDKNQINIRNSETDTIIFIRKAERSHSGKYDLQVKVDKFVETASIDIQIIDRPGPPQIVKIEDVWGENVALTWTPPKDDGNAAITGYTIQKADKKSMEWFTVIEHYHRTSATITELVIGNEYYFRVFSENMCGLSEDATMTKESAVIARDGKIYKNPVYEDFDFSEAPMFTQPLVNTYAIAGYNATLNCSVRGNPKPKITWMKNKVAIVDDPRYRMFSNQGVCTLEIRKPSPYDGGTYCCKAVNDLGTVEIECKLEVKVIYQGVNTPGQPVFLEGQQQSLHNKDF

SEQ ID NO: 31929 - protein, 1127 aa, Homo sapiens
  REGION 1..1127: note = ENSP00000446128
MPEPTKKEENEVPAPAPPPEEPSKEKEAGTTPAKDWTLVETPPGEEQAKQNANSQLSILFIEKPQGGTVKVGEDITFIAKVKAEDLLRKPTIKWFKGKWMDLASKAGKHLQLKETFERHSRVYTFEMQIIKAKDNFAGNYRCEVTYKDKFDSCSFDLEVHESTGTTPNIDIRSAFKRREVKQQEEEPQVDVWELLKNAKPSEYEKIAFQYGITDLRGMLKRLKRMRREEKKSAAFAKILDPAYQVDKGGRVRFVVELADPKLEVKWYKNGQEIRPSTKYIFEHKGCQRILFINNCQMTDDSEYYVTAGDEKCSTELFVREPPIMVTKQLEDTTAYCGERVELECEVSEDDANVKWFKNGEEIIPGPKSRYRIRVEGKKHILIIEGATKADAAEYSVMTTGGQSSAKLSVDLKPLKILTPLTDQTVNLGKEICLKCEISENIPGKWTKNGLPVQESDRLKVVHKGRIHKLVIANALTEDEGDYVFAPDAYNVTLPAKVHVIDPPKIILDGLDADNTVTVIAGNKLRLEIPISGEPPPKAMWSRGDKAIMEGSGRIRTESYPDSSTLVIDIAERDDSGVYHINLKNEAGEAHASIKVKVVDFPDPPVAPTVTEVGDDWCIMNWEPPAYDGGSPILGYFIERKKKQSSRWMRLNFDLCKETTFEPKKMIEGVAYEVRIFAVNAIGISKPSMPSRPFVPLAVTSPPTLLTVDSVTDTTVTMRWRPPDHIGAAGLDGYVLEYCFEGTEDWIVANKDLIDKTKFTITGLPTDAKIFVRVKAVNAAGASEPKYYSQPILVKEIIEPPKIRIPRHLKQTYIRRVGEAVNLVIPFQGKPRPELTWKKDGAEIDKNQINIRNSETDTIIFIRKAERSHSGKYDLQVKVDKFVETASIDIQIIDRPGPPQIVKIEDVWGENVALTWTPPKDDGNAAITGYTIQKADKKSMEWFTVIEHYHRTSATITELVIGNEYYFRVFSENMCGLSEDATMTKESAVIARDGKIYKNPVYEDFDFSEAPMFTQPLVNTYAIAGYNATLNCSVRGNPKPKITWMKNKVAIVDDPRYRMFSNQGVCTLEIRKPSPYDGGTYCCKAVNDLGTVEIECKLEVKVIYQGVNTPGQPVFLEGQQQSLHNKDF

SEQ ID NO: 31930 - protein, 1134 aa, Homo sapiens
  REGION 1..1134: note = ENSP00000442847
MPEPTKKEEPSKEKEAGTTPAKDWTLVETPPGEEQAKQNANSQLSILFIEKPQGGTVKVGEDITFIAKVKAEDLLRKPTIKWFKGKWMDLASKAGKHLQLKETFERHSRVYTFEMQIIKAKDNFAGNYRCEVTYKDKFDSCSFDLEVHESTGTTPNIDIRSAFKRSGEGQEDAGELDFSGLLKRREVKQQEEEPQVDVWELLKNAKPSEYEKIAFQYGITDLRGMLKRLKRMRREEKKSAAFAKILDPAYQVDKGGRVRFVVELADPKLEVKWYKNGQEIRPSTKYIFEHKGCQRILFINNCQMTDDSEYYVTAGDEKCSTELFVREPPIMVTKQLEDTTAYCGERVELECEVSEDDANVKWFKNGEEIIPGPKSRYRIRVEGKKHILIIEGATKADAAEYSVMTTGGQSSAKLSVDLKPLKILTPLTDQTVNLGKEICLKCEISENIPGKWTKNGLPVQESDRLKVVHKGRIHKLVIANALTEDEGDYVFAPDAYNVTLPAKVHVIDPPKIILDGLDADNTVTVIAGNKLRLEIPISGEPPPKAMWSRGDKAIMEGSGRIRTESYPDSSTLVIDIAERDDSGVYHINLKNEAGEAHASIKVKVVDFPDPPVAPTVTEVGDDWCIMNWEPPAYDGGSPILGYFIERKKKQSSRWMRLNFDLCKETTFEPKKMIEGVAYEVRIFAVNAIGISKPSMPSRPFVPLAVTSPPTLLTVDSVTDTTVTMRWRPPDHIGAAGLDGYVLEYCFEGTEDWIVANKDLIDKTKFTITGLPTDAKIFVRVKAVNAAGASEPKYYSQPILVKEIIEPPKIRIPRHLKQTYIRRVGEAVNLVIPFQGKPRPELTWKKDGAEIDKNQINIRNSETDTIIFIRKAERSHSGKYDLQVKVDKFVETASIDIQIIDRPGPPQIVKIEDVWGENVALTWTPPKDDGNAAITGYTIQKADKKSMEWFTVIEHYHRTSATITELVIGNEYYFRVFSENMCGLSEDATMTKESAVIARDGKIYKNPVYEDFDFSEAPMFTQPLVNTYAIAGYNATLNCSVRGNPKPKITWMKNKVAIVDDPRYRMFSNQGVCTLEIRKPSPYDGGTYCCKAVNDLGTVEIECKLEVKVIYQGVNTPGQPVFLEGQQQSLHNKDF

SEQ ID NO: 31931 - protein, 1171 aa, Homo sapiens
  REGION 1..1171: note = ENSP00000354849
MPEPTKKEENEVPAPAPPPEEPSKEKEAGTTPAKDEEEVSPPSALPPGLGSRALERKDSDWTLVETPPGEEQAKQNANSQLSILFIEKPQGGTVKVGEDITFIAKVKAEDLLRKPTIKWFKGKWMDLASKAGKHLQLKETFERHSRVYTFEMQIIKAKDNFAGNYRCEVTYKDKFDSCSFDLEVHESTGTTPNIDIRSAFKRSGEGQEDAGELDFSGLLKRREVKQQEEEPQVDVWELLKNAKPSEYEKIAFQYGITDLRGMLKRLKRMRREEKKSAAFAKILDPAYQVDKGGRVRFVVELADPKLEVKWYKNGQEIRPSTKYIFEHKGCQRILFINNCQMTDDSEYYVTAGDEKCSTELFVREPPIMVTKQLEDTTAYCGERVELECEVSEDDANVKWFKNGEEIIPGPKSRYRIRVEGKKHILIIEGATKADAAEYSVMTTGGQSSAKLSVDLKPLKILTPLTDQTVNLGKEICLKCEISENIPGKWTKNGLPVQESDRLKVVHKGRIHKLVIANALTEDEGDYVFAPDAYNVTLPAKVHVIDPPKIILDGLDADNTVTVIAGNKLRLEIPISGEPPPKAMWSRGDKAIMEGSGRIRTESYPDSSTLVIDIAERDDSGVYHINLKNEAGEAHASIKVKVVDFPDPPVAPTVTEVGDDWCIMNWEPPAYDGGSPILGYFIERKKKQSSRWMRLNFDLCKETTFEPKKMIEGVAYEVRIFAVNAIGISKPSMPSRPFVPLAVTSPPTLLTVDSVTDTTVTMRWRPPDHIGAAGLDGYVLEYCFEGTEDWIVANKDLIDKTKFTITGLPTDAKIFVRVKAVNAAGASEPKYYSQPILVKEIIEPPKIRIPRHLKQTYIRRVGEAVNLVIPFQGKPRPELTWKKDGAEIDKNQINIRNSETDTIIFIRKAERSHSGKYDLQVKVDKFVETASIDIQIIDRPGPPQIVKIEDVWGENVALTWTPPKDDGNAAITGYTIQKADKKSMEWFTVIEHYHRTSATITELVIGNEYYFRVFSENMCGLSEDATMTKESAVIARDGKIYKNPVYEDFDFSEAPMFTQPLVNTYAIAGYNATLNCSVRGNPKPKITWMKNKVAIVDDPRYRMFSNQGVCTLEIRKPSPYDGGTYCCKAVNDLGTVEIECKLEVKVIYQGVNTPGQPVFLEGQQQSLHNKDF

SEQ ID NO: 31932 - protein, 1024 aa, Homo sapiens
  REGION 1..1024: note = ENSP00000447116
MDLASKAGKHLQLKETFERHSRVYTFEMQIIKAKDNFAGNYRCEVTYKDKFDSCSFDLEVHESTGTTPNIDIRSAFKRSGEGQEDAGELDFSGLLKRREVKQQEEEPQVDVWELLKNAKPSEYEKIAFQYGITDLRGMLKRLKRMRREEKKSAAFAKILDPAYQVDKGGRVRFVVELADPKLEVKWYKNGQEIRPSTKYIFEHKGCQRILFINNCQMTDDSEYYVTAGDEKCSTELFVREPPIMVTKQLEDTTAYCGERVELECEVSEDDANVKWFKNGEEIIPGPKSRYRIRVEGKKHILIIEGATKADAAEYSVMTTGGQSSAKLSVDLKPLKILTPLTDQTVNLGKEICLKCEISENIPGKWTKNGLPVQESDRLKVVHKGRIHKLVIANALTEDEGDYVFAPDAYNVTLPAKVHVIDPPKIILDGLDADNTVTVIAGNKLRLEIPISGEPPPKAMWSRGDKAIMEGSGRIRTESYPDSSTLVIDIAERDDSGVYHINLKNEAGEAHASIKVKVVDFPDPPVAPTVTEVGDDWCIMNWEPPAYDGGSPILGYFIERKKKQSSRWMRLNFDLCKETTFEPKKMIEGVAYEVRIFAVNAIGISKPSMPSRPFVPLAVTSPPTLLTVDSVTDTTVTMRWRPPDHIGAAGLDGYVLEYCFEGTEDWIVANKDLIDKTKFTITGLPTDAKIFVRVKAVNAAGASEPKYYSQPILVKEIIEPPKIRIPRHLKQTYIRRVGEAVNLVIPFQGKPRPELTWKKDGAEIDKNQINIRNSETDTIIFIRKAERSHSGKYDLQVKVDKFVETASIDIQIIDRPGPPQIVKIEDVWGENVALTWTPPKDDGNAAITGYTIQKADKKSMEWFTVIEHYHRTSATITELVIGNEYYFRVFSENMCGLSEDATMTKESAVIARDGKIYKNPVYEDFDFSEAPMFTQPLVNTYAIAGYNATLNCSVRGNPKPKITWMKNKVAIVDDPRYRMFSNQGVCTLEIRKPSPYDGGTYCCKAVNDLGTVEIECKLEVKVIAQ

SEQ ID NO: 31933 - protein, 1141 aa, Homo sapiens
  REGION 1..1141: note = ENSP00000449702
MPEPTKKEENEVPAPAPPPEEPSKEKEAGTTPAKDWTLVETPPGEEQAKQNANSQLSILFIEKPQGGTVKVGEDITFIAKVKAEDLLRKPTIKWFKGKWMDLASKAGKHLQLKETFERHSRVYTFEMQIIKAKDNFAGNYRCEVTYKDKFDSCSFDLEVHESTGTTPNIDIRSAFKRSGEGQEDAGELDFSGLLKRREVKQQEEEPQVDVWELLKNAKPSEYEKIAFQYGITDLRGMLKRLKRMRREEKKSAAFAKILDPAYQVDKGGRVRFVVELADPKLEVKWYKNGQEIRPSTKYIFEHKGCQRILFINNCQMTDDSEYYVTAGDEKCSTELFVREPPIMVTKQLEDTTAYCGERVELECEVSEDDANVKWFKNGEEIIPGPKSRYRIRVEGKKHILIIEGATKADAAEYSVMTTGGQSSAKLSVDLKPLKILTPLTDQTVNLGKEICLKCEISENIPGKWTKNGLPVQESDRLKVVHKGRIHKLVIANALTEDEGDYVFAPDAYNVTLPAKVHVIDPPKIILDGLDADNTVTVIAGNKLRLEIPISGEPPPKAMWSRGDKAIMEGSGRIRTESYPDSSTLVIDIAERDDSGVYHINLKNEAGEAHASIKVKVVDFPDPPVAPTVTEVGDDWCIMNWEPPAYDGGSPILGYFIERKKKQSSRWMRLNFDLCKETTFEPKKMIEGVAYEVRIFAVNAIGISKPSMPSRPFVPLAVTSPPTLLTVDSVTDTTVTMRWRPPDHIGAAGLDGYVLEYCFEGSTSAKQSDENGEAAYDLPAEDWIVANKDLIDKTKFTITGLPTDAKIFVRVKAVNAAGASEPKYYSQPILVKEIIEPPKIRIPRHLKQTYIRRVGEAVNLVIPFQGKPRPELTWKKDGAEIDKNQINIRNSETDTIIFIRKAERSHSGKYDLQVKVDKFVETASIDIQIIDRPGPPQIVKIEDVWGENVALTWTPPKDDGNAAITGYTIQKADKKSMEWFTVIEHYHRTSATITELVIGNEYYFRVFSENMCGLSEDATMTKESAVIARDGKIYKNPVYEDFDFSEAPMFTQPLVNTYAIAGYNATLNCSVRGNPKPKITWMKNKVAIVDDPRYRMFSNQGVCTLEIRKPSPYDGGTYCCKAVNDLGTVEIECKLEVKVIAQ

SEQ ID NO: 31934 - protein, 104 aa, Homo sapiens
  REGION 1..104: note = ENSP00000447404
MDLASKAGKHLQLKETFERHSRVYTFEMQIIKAKDNFAGNYRCEVTYKDKFDSCSFDLEVHESTGTTPNIDIRSAFKRSGEGQEDAGELDFSGLLKRREVKQQE

SEQ ID NO: 31935 - protein, 394 aa, Homo sapiens
  REGION 1..394: note = ENSP00000380494
MCVCAGCRAAPSRRGAGPLQVAGGWSEGADMDYDSYQHYFYDYDCGEDFYRSTAPSEDIWKKFELVPSPPTSPPWGLGPGAGDPAPGIGPPEPWPGGCTGDEAESRGHSKGWGRNYASIIRRDCMWSGFSARERLERAVSDRLAPGAPRGNPPKASAAPDCTPSLEAGNPAPAAPCPLGEPKTQACSGSESPSDSENEEIDVVTVEKRQSLGIRKPVTITVRADPLDPCMKHFHISIHQQQHNYAARFPPESCSQEEASERGPQEEVLERDAAGEKEDEEDEEIVSPPPVESEAAQSCHPKPVSSDTEDVTKRKNHNFLERKRRNDLRSRFLALRDQVPTLASCSKAPKVVILSKALEYLQALVGAEKRMATEKRQLRCRQQQLQKRIAYLTGY

SEQ ID NO: 31936 - protein, 364 aa, Homo sapiens
  REGION 1..364: note = ENSP00000361903
MDYDSYQHYFYDYDCGEDFYRSTAPSEDIWKKFELVPSPPTSPPWGLGPGAGDPAPGIGPPEPWPGGCTGDEAESRGHSKGWGRNYASIIRRDCMWSGFSARERLERAVSDRLAPGAPRGNPPKASAAPDCTPSLEAGNPAPAAPCPLGEPKTQACSGSESPSDSENEEIDVVTVEKRQSLGIRKPVTITVRADPLDPCMKHFHISIHQQQHNYAARFPPESCSQEEASERGPQEEVLERDAAGEKEDEEDEEIVSPPPVESEAAQSCHPKPVSSDTEDVTKRKNHNFLERKRRNDLRSRFLALRDQVPTLASCSKAPKVVILSKALEYLQALVGAEKRMATEKRQLRCRQQQLQKRIAYLTGY

SEQ ID NO: 31937 - protein, 236 aa, Homo sapiens
  REGION 1..236: note = ENSP00000361902
MCVCAGCRAAPSRRGAGPLQVAGGWSEGADMDYDSYQHYFYDYDCGEDFYRSTAPSEDIWKKFELVPSPPTSPPWGLGPGAGDPAPGIGPPEPWPGGCTGDEAESRGHSKGWGRNYASIIRRDCMWSGFSARERLERAVSDRLAPGAPRGNPPKASAAPDCTPSLEAGNPAPAAPCPLGEPKTQACSGSESPSDSGKDLPEPSKRGPPHGWPKLCPCLRSGIGSSQALGPSPPLFG

SEQ ID NO: 31938 - protein, 100 aa, Homo sapiens
  REGION 1..100: note = ENSP00000434375
MDYDSYQHYFYDYDCGEDFYRSTAPSEDIWKKFELVPSPPTSPPWGLGPGAGDPAPGIGPPEPWPGGCTGDEAESRGHSKGWGRNYASIIRRDCMWSGFS

SEQ ID NO: 31939 - protein, 1945 aa, Homo sapiens
  REGION 1..1945: note = ENSP00000478092
MAQKGQLSDDEKFLFVDKNFINSPVAQADWAAKRLVWVPSEKQGFEAASIKEEKGDEVVVELVENGKKVTVGKDDIQKMNPPKFSKVEDMAELTCLNEASVLHNLRERYFSGLIYTYSGLFCVVVNPYKHLPIYSEKIVDMYKGKKRHEMPPHIYAIADTAYRSMLQDREDQSILCTGESGAGKTENTKKVIQYLAVVASSHKGKKDTSITQGPSFAYGELEKQLLQANPILEAFGNAKTVKNDNSSRFGKFIRINFDVTGYIVGANIETYLLEKSRAIRQARDERTFHIFYYMIAGAKEKMRSDLLLEGFNNYTFLSNGFVPIPAAQDDEMFQETVEAMAIMGFSEEEQLSILKVVSSVLQLGNIVFKKERNTDQASMPDNTAAQKVCHLMGINVTDFTRSILTPRIKVGRDVVQKAQTKEQADFAVEALAKATYERLFRWILTRVNKALDKTHRQGASFLGILDIAGFEIFEVNSFEQLCINYTNEKLQQLFNHTMFILEQEEYQREGIEWNFIDFGLDLQPCIELIERPNNPPGVLALLDEECWFPKATDKSFVEKLCTEQGSHPKFQKPKQLKDKTEFSIIHYAGKVDYNASAWLTKNMDPLNDNVTSLLNASSDKFVADLWKDVDRIVGLDQMAKMTESSLPSASKTKKGMFRTVGQLYKEQLGKLMTTLRNTTPNFVRCIIPNHEKRSGKLDAFLVLEQLRCNGVLEGIRICRQGFPNRIVFQEFRQRYEILAANAIPKGFMDGKQACILMIKALELDPNLYRIGQSKIFFRTGVLAHLEEERDLKITDVIMAFQAMCRGYLARKAFAKRQQQLTAMKVIQRNCAAYLKLRNWQWWRLFTKVKPLLQVTRQEEEMQAKEDELQKTKERQQKAENELKELEQKHSQLTEEKNLLQEQLQAETELYAEAEEMRVRLAAKKQELEEILHEMEARLEEEEDRGQQLQAERKKMAQQMLDLEEQLEEEEAARQKLQLEKVTAEAKIKKLEDEILVMDDQNNKLSKERKLLEERISDLTTNLAEEEEKAKNLTKLKNKHESMISELEVRLKKEEKSRQELEKLKRKLEGDASDFHEQIADLQAQIAELKMQLAKKEEELQAALARLDDEIAQKNNALKKIRELEGHISDLQEDLDSERAARNKAEKQKRDLGEELEALKTELEDTLDSTATQQELRAKREQEVTVLKKALDEETRSHEAQVQEMRQKHAQAVEELTEQLEQFKRAKANLDKNKQTLEKENADLAGELRVLGQAKQEVEHKKKKLEAQVQELQSKCSDGERARAELNDKVHKLQNEVESVTGMLNEAEGKAIKLAKDVASLSSQLQDTQELLQEETRQKLNVSTKLRQLEEERNSLQDQLDEEMEAKQNLERHISTLNIQLSDSKKKLQDFASTVEALEEGKKRFQKEIENLTQQYEEKAAAYDKLEKTKNRLQQELDDLVVDLDNQRQLVSNLEKKQRKFDQLLAEEKNISSKYADERDRAEAEAREKETKALSLARALEEALEAKEELERTNKMLKAEMEDLVSSKDDVGKNVHELEKSKRALETQMEEMKTQLEELEDELQATEDAKLRLEVNMQALKGQFERDLQARDEQNEEKRRQLQRQLHEYETELEDERKQRALAAAAKKKLEGDLKDLELQADSAIKGREEAIKQLRKLQAQMKDFQRELEDARASRDEIFATAKENEKKAKSLEADLMQLQEDLAAAERARKQADLEKEELAEELASSLSGRNALQDEKRRLEARIAQLEEELEEEQGNMEAMSDRVRKATQQAEQLSNELATERSTAQKNESARQQLERQNKELRSKLHEMEGAVKSKFKSTIAALEAKIAQLEEQVEQEAREKQAATKSLKQKDKKLKEILLQVEDERKMAEQYKEQAEKGNARVKQLKRQLEEAEEESQRINANRRKLQRELDEATESNEAMGREVNALKSKLRGPPPQETSQ

SEQ ID NO: 31940 - protein, 1979 aa, Homo sapiens
  REGION 1..1979: note = ENSP00000478109
MAQKGQLSDDEKFLFVDKNFINSPVAQADWAAKRLVWVPSEKQGFEAASIKEEKGDEVVVELVENGKKVTVGKDDIQKMNPPKFSKVEDMAELTCLNEASVLHNLRERYFSGLIYTYSGLFCVVVNPYKHLPIYSEKIVDMYKGKKRHEMPPHIYAIADTAYRSMLQDREDQSILCTGESGAGKTENTKKVIQYLAVVASSHKGKKDTSITQGPSFAYGELEKQLLQANPILEAFGNAKTVKNDNSSRFGKFIRINFDVTGYIVGANIETYLLEKSRAIRQARDERTFHIFYYMIAGAKEKMRSDLLLEGFNNYTFLSNGFVPIPAAQDDEMFQETVEAMAIMGFSEEEQLSILKVVSSVLQLGNIVFKKERNTDQASMPDNTAAQKVCHLMGINVTDFTRSILTPRIKVGRDVVQKAQTKEQADFAVEALAKATYERLFRWILTRVNKALDKTHRQGASFLGILDIAGFEIFEVNSFEQLCINYTNEKLQQLFNHTMFILEQEEYQREGIEWNFIDFGLDLQPCIELIERPNNPPGVLALLDEECWFPKATDKSFVEKLCTEQGSHPKFQKPKQLKDKTEFSIIHYAGKVDYNASAWLTKNMDPLNDNVTSLLNASSDKFVADLWKDVDRIVGLDQMAKMTESSLPSASKTKKGMFRTVGQLYKEQLGKLMTTLRNTTPNFVRCIIPNHEKRSGKLDAFLVLEQLRCNGVLEGIRICRQGFPNRIVFQEFRQRYEILAANAIPKGFMDGKQACILMIKALELDPNLYRIGQSKIFFRTGVLAHLEEERDLKITDVIMAFQAMCRGYLARKAFAKRQQQLTAMKVIQRNCAAYLKLRNWQWWRLFTKVKPLLQVTRQEEEMQAKEDELQKTKERQQKAENELKELEQKHSQLTEEKNLLQEQLQAETELYAEAEEMRVRLAAKKQELEEILHEMEARLEEEEDRGQQLQAERKKMAQQMLDLEEQLEEEEAARQKLQLEKVTAEAKIKKLEDEILVMDDQNNKLSKERKLLEERISDLTTNLAEEEEKAKNLTKLKNKHESMISELEVRLKKEEKSRQELEKLKRKLEGDASDFHEQIADLQAQIAELKMQLAKKEEELQAALARLDDEIAQKNNALKKIRELEGHISDLQEDLDSERAARNKAEKQKRDLGEELEALKTELEDTLDSTATQQELRAKREQEVTVLKKALDEETRSHEAQVQEMRQKHAQAVEELTEQLEQFKRAKANLDKNKQTLEKENADLAGELRVLGQAKQEVEHKKKKLEAQVQELQSKCSDGERARAELNDKVHKLQNEVESVTGMLNEAEGKAIKLAKDVASLSSQLQDTQELLQEETRQKLNVSTKLRQLEEERNSLQDQLDEEMEAKQNLERHISTLNIQLSDSKKKLQDFASTVEALEEGKKRFQKEIENLTQQYEEKAAAYDKLEKTKNRLQQELDDLVVDLDNQRQLVSNLEKKQRKFDQLLAEEKNISSKYADERDRAEAEAREKETKALSLARALEEALEAKEELERTNKMLKAEMEDLVSSKDDVGKNVHELEKSKRALETQMEEMKTQLEELEDELQATEDAKLRLEVNMQALKGQFERDLQARDEQNEEKRRQLQRQLHEYETELEDERKQRALAAAAKKKLEGDLKDLELQADSAIKGREEAIKQLRKLQAQMKDFQRELEDARASRDEIFATAKENEKKAKSLEADLMQLQEDLAAAERARKQADLEKEELAEELASSLSGRNALQDEKRRLEARIAQLEEELEEEQGNMEAMSDRVRKATQQAEQLSNELATERSTAQKNESARQQLERQNKELRSKLHEMEGAVKSKFKSTIAALEAKIAQLEEQVEQEAREKQAATKSLKQKDKKLKEILLQVEDERKMAEQYKEQAEKGNARVKQLKRQLEEAEEESQRINANRRKLQRELDEATESNEAMGREVNALKSKLRRGNETSFVPSRRSGGRRVIENADGSEEETDTRDADFNGTKASE

SEQ ID NO: 31941 - protein, 1938 aa, Homo sapiens
  REGION 1..1938: note = ENSP00000478816
MAQKGQLSDDEKFLFVDKNFINSPVAQADWAAKRLVWVPSEKQGFEAASIKEEKGDEVVVELVENGKKVTVGKDDIQKMNPPKFSKVEDMAELTCLNEASVLHNLRERYFSGLIYTYSGLFCVVVNPYKHLPIYSEKIVDMYKGKKRHEMPPHIYAIADTAYRSMLQDREDQSILCTGESGAGKTENTKKVIQYLAVVASSHKGKKDTSITGELEKQLLQANPILEAFGNAKTVKNDNSSRFGKFIRINFDVTGYIVGANIETYLLEKSRAIRQARDERTFHIFYYMIAGAKEKMRSDLLLEGFNNYTFLSNGFVPIPAAQDDEMFQETVEAMAIMGFSEEEQLSILKVVSSVLQLGNIVFKKERNTDQASMPDNTAAQKVCHLMGINVTDFTRSILTPRIKVGRDVVQKAQTKEQADFAVEALAKATYERLFRWILTRVNKALDKTHRQGASFLGILDIAGFEIFEVNSFEQLCINYTNEKLQQLFNHTMFILEQEEYQREGIEWNFIDFGLDLQPCIELIERPNNPPGVLALLDEECWFPKATDKSFVEKLCTEQGSHPKFQKPKQLKDKTEFSIIHYAGKVDYNASAWLTKNMDPLNDNVTSLLNASSDKFVADLWKDVDRIVGLDQMAKMTESSLPSASKTKKGMFRTVGQLYKEQLGKLMTTLRNTTPNFVRCIIPNHEKRSGKLDAFLVLEQLRCNGVLEGIRICRQGFPNRIVFQEFRQRYEILAANAIPKGFMDGKQACILMIKALELDPNLYRIGQSKIFFRTGVLAHLEEERDLKITDVIMAFQAMCRGYLARKAFAKRQQQLTAMKVIQRNCAAYLKLRNWQWWRLFTKVKPLLQVTRQEEEMQAKEDELQKTKERQQKAENELKELEQKHSQLTEEKNLLQEQLQAETELYAEAEEMRVRLAAKKQELEEILHEMEARLEEEEDRGQQLQAERKKMAQQMLDLEEQLEEEEAARQKLQLEKVTAEAKIKKLEDEILVMDDQNNKLSKERKLLEERISDLTTNLAEEEEKAKNLTKLKNKHESMISELEVRLKKEEKSRQELEKLKRKLEGDASDFHEQIADLQAQIAELKMQLAKKEEELQAALARLDDEIAQKNNALKKIRELEGHISDLQEDLDSERAARNKAEKQKRDLGEELEALKTELEDTLDSTATQQELRAKREQEVTVLKKALDEETRSHEAQVQEMRQKHAQAVEELTEQLEQFKRAKANLDKNKQTLEKENADLAGELRVLGQAKQEVEHKKKKLEAQVQELQSKCSDGERARAELNDKVHKLQNEVESVTGMLNEAEGKAIKLAKDVASLSSQLQDTQELLQEETRQKLNVSTKLRQLEEERNSLQDQLDEEMEAKQNLERHISTLNIQLSDSKKKLQDFASTVEALEEGKKRFQKEIENLTQQYEEKAAAYDKLEKTKNRLQQELDDLVVDLDNQRQLVSNLEKKQRKFDQLLAEEKNISSKYADERDRAEAEAREKETKALSLARALEEALEAKEELERTNKMLKAEMEDLVSSKDDVGKNVHELEKSKRALETQMEEMKTQLEELEDELQATEDAKLRLEVNMQALKGQFERDLQARDEQNEEKRRQLQRQLHEYETELEDERKQRALAAAAKKKLEGDLKDLELQADSAIKGREEAIKQLRKLQAQMKDFQRELEDARASRDEIFATAKENEKKAKSLEADLMQLQEDLAAAERARKQADLEKEELAEELASSLSGRNALQDEKRRLEARIAQLEEELEEEQGNMEAMSDRVRKATQQAEQLSNELATERSTAQKNESARQQLERQNKELRSKLHEMEGAVKSKFKSTIAALEAKIAQLEEQVEQEAREKQAATKSLKQKDKKLKEILLQVEDERKMAEQYKEQAEKGNARVKQLKRQLEEAEEESQRINANRRKLQRELDEATESNEAMGREVNALKSKLRGPPPQETSQ

SEQ ID NO: 31942 - protein, 1972 aa, Homo sapiens
  REGION 1..1972: note = ENSP00000488461
MAQKGQLSDDEKFLFVDKNFINSPVAQADWAAKRLVWVPSEKQGFEAASIKEEKGDEVVVELVENGKKVTVGKDDIQKMNPPKFSKVEDMAELTCLNEASVLHNLRERYFSGLIYTYSGLFCVVVNPYKHLPIYSEKIVDMYKGKKRHEMPPHIYAIADTAYRSMLQDREDQSILCTGESGAGKTENTKKVIQYLAVVASSHKGKKDTSITGELEKQLLQANPILEAFGNAKTVKNDNSSRFGKFIRINFDVTGYIVGANIETYLLEKSRAIRQARDERTFHIFYYMIAGAKEKMRSDLLLEGFNNYTFLSNGFVPIPAAQDDEMFQETVEAMAIMGFSEEEQLSILKVVSSVLQLGNIVFKKERNTDQASMPDNTAAQKVCHLMGINVTDFTRSILTPRIKVGRDVVQKAQTKEQADFAVEALAKATYERLFRWILTRVNKALDKTHRQGASFLGILDIAGFEIFEVNSFEQLCINYTNEKLQQLFNHTMFILEQEEYQREGIEWNFIDFGLDLQPCIELIERPNNPPGVLALLDEECWFPKATDKSFVEKLCTEQGSHPKFQKPKQLKDKTEFSIIHYAGKVDYNASAWLTKNMDPLNDNVTSLLNASSDKFVADLWKDVDRIVGLDQMAKMTESSLPSASKTKKGMFRTVGQLYKEQLGKLMTTLRNTTPNFVRCIIPNHEKRSGKLDAFLVLEQLRCNGVLEGIRICRQGFPNRIVFQEFRQRYEILAANAIPKGFMDGKQACILMIKALELDPNLYRIGQSKIFFRTGVLAHLEEERDLKITDVIMAFQAMCRGYLARKAFAKRQQQLTAMKVIQRNCAAYLKLRNWQWWRLFTKVKPLLQVTRQEEEMQAKEDELQKTKERQQKAENELKELEQKHSQLTEEKNLLQEQLQAETELYAEAEEMRVRLAAKKQELEEILHEMEARLEEEEDRGQQLQAERKKMAQQMLDLEEQLEEEEAARQKLQLEKVTAEAKIKKLEDEILVMDDQNNKLSKERKLLEERISDLTTNLAEEEEKAKNLTKLKNKHESMISELEVRLKKEEKSRQELEKLKRKLEGDASDFHEQIADLQAQIAELKMQLAKKEEELQAALARLDDEIAQKNNALKKIRELEGHISDLQEDLDSERAARNKAEKQKRDLGEELEALKTELEDTLDSTATQQELRAKREQEVTVLKKALDEETRSHEAQVQEMRQKHAQAVEELTEQLEQFKRAKANLDKNKQTLEKENADLAGELRVLGQAKQEVEHKKKKLEAQVQELQSKCSDGERARAELNDKVHKLQNEVESVTGMLNEAEGKAIKLAKDVASLSSQLQDTQELLQEETRQKLNVSTKLRQLEEERNSLQDQLDEEMEAKQNLERHISTLNIQLSDSKKKLQDFASTVEALEEGKKRFQKEIENLTQQYEEKAAAYDKLEKTKNRLQQELDDLVVDLDNQRQLVSNLEKKQRKFDQLLAEEKNISSKYADERDRAEAEAREKETKALSLARALEEALEAKEELERTNKMLKAEMEDLVSSKDDVGKNVHELEKSKRALETQMEEMKTQLEELEDELQATEDAKLRLEVNMQALKGQFERDLQARDEQNEEKRRQLQRQLHEYETELEDERKQRALAAAAKKKLEGDLKDLELQADSAIKGREEAIKQLRKLQAQMKDFQRELEDARASRDEIFATAKENEKKAKSLEADLMQLQEDLAAAERARKQADLEKEELAEELASSLSGRNALQDEKRRLEARIAQLEEELEEEQGNMEAMSDRVRKATQQAEQLSNELATERSTAQKNESARQQLERQNKELRSKLHEMEGAVKSKFKSTIAALEAKIAQLEEQVEQEAREKQAATKSLKQKDKKLKEILLQVEDERKMAEQYKEQAEKGNARVKQLKRQLEEAEEESQRINANRRKLQRELDEATESNEAMGREVNALKSKLRRGNETSFVPSRRSGGRRVIENADGSEEETDTRDADFNGTKASE

SEQ ID NO: 31943 - protein, 1979 aa, Homo sapiens; identical to SEQ ID NO: 31940
  REGION 1..1979: note = ENSP00000379616

SEQ ID NO: 31944 - protein, 1945 aa, Homo sapiens; identical to SEQ ID NO: 31939
  REGION 1..1945: note = ENSP00000407821

SEQ ID NO: 31945 - protein, 1938 aa, Homo sapiens; identical to SEQ ID NO: 31941
  REGION 1..1938: note = ENSP00000458731

SEQ ID NO: 31946 - protein, 1972 aa, Homo sapiens; identical to SEQ ID NO: 31942
  REGION 1..1972: note = ENSP00000300036

SEQ ID NO: 31947 - protein, 2003 aa, Homo sapiens
  REGION 1..2003: note = ENSP00000472543
MAAVTMSVPGRKAPPRPGPVPEAAQPFLFTPRGPSAGGGPGSGTSPQVEWTARRLVWVPSELHGFEAAALRDEGEEEAEVELAESGRRLRLPRDQIQRMNPPKFSKAEDMAELTCLNEASVLHNLRERYYSGLIYTYSGLFCVVINPYKQLPIYTEAIVEMYRGKKRHEVPPHVYAVTEGAYRSMLQDREDQSILCTGESGAGKTENTKKVIQYLAHVASSPKGRKEPGVPASVSTVSYGELERQLLQANPILEAFGNAKTVKNDNSSRFGKFIRINFDVAGYIVGANIETYLLEKSRAIRQAKDECSFHIFYQLLGGAGEQLKADLLLEPCSHYRFLTNGPSSSPGQERELFQETLESLRVLGFSHEEIISMLRMVSAVLQFGNIALKRERNTDQATMPDNTAAQKLCRLLGLGVTDFSRALLTPRIKVGRDYVQKAQTKEQADFALEALAKATYERLFRWLVLRLNRALDRSPRQGASFLGILDIAGFEIFQLNSFEQLCINYTNEKLQQLFNHTMFVLEQEEYQREGIPWTFLDFGLDLQPCIDLIERPANPPGLLALLDEECWFPKATDKSFVEKVAQEQGGHPKFQRPRHLRDQADFSVLHYAGKVDYKANEWLMKNMDPLNDNVAALLHQSTDRLTAEIWKDVEGIVGLEQVSSLGDGPPGGRPRRGMFRTVGQLYKESLSRLMATLSNTNPSFVRCIVPNHEKRAGKLEPRLVLDQLRCNGVLEGIRICRQGFPNRILFQEFRQRYEILTPNAIPKGFMDGKQACEKMIQALELDPNLYRVGQSKIFFRAGVLAQLEEERDLKVTDIIVSFQAAARGYLARRAFQKRQQQQSALRVMQRNCAAYLKLRHWQWWRLFTKVKPLLQVTRQDEVLQARAQELQKVQELQQQSAREVGELQGRVAQLEEERARLAEQLRAEAELCAEAEETRGRLAARKQELELVVSELEARVGEEEECSRQMQTEKKRLQQHIQELEAHLEAEEGARQKLQLEKVTTEAKMKKFEEDLLLLEDQNSKLSKERKLLEDRLAEFSSQAAEEEEKVKSLNKLRLKYEATIADMEDRLRKEEKGRQELEKLKRRLDGESSELQEQMVEQQQRAEELRAQLGRKEEELQAALARAEDEGGARAQLLKSLREAQAALAEAQEDLESERVARTKAEKQRRDLGEELEALRGELEDTLDSTNAQQELRSKREQEVTELKKTLEEETRIHEAAVQELRQRHGQALGELAEQLEQARRGKGAWEKTRLALEAEVSELRAELSSLQTARQEGEQRRRRLELQLQEVQGRAGDGERARAEAAEKLQRAQAELENVSGALNEAESKTIRLSKELSSTEAQLHDAQELLQEETRAKLALGSRVRAMEAEAAGLREQLEEEAAARERAGRELQTAQAQLSEWRRRQEEEAGALEAGEEARRRAAREAEALTQRLAEKTETVDRLERGRRRLQQELDDATMDLEQQRQLVSTLEKKQRKFDQLLAEEKAAVLRAVEERERAEAEGREREARALSLTRALEEEQEAREELERQNRALRAELEALLSSKDDVGKSVHELERACRVAEQAANDLRAQVTELEDELTAAEDAKLRLEVTVQALKTQHERDLQGRDEAGEERRRQLAKQLRDAEVERDEERKQRTLAVAARKKLEGELEELKAQMASAGQGKEEAVKQLRKMQAQMKELWREVEETRTSREEIFSQNRESEKRLKGLEAEVLRLQEELAASDRARRQAQQDRDEMADEVANGNLSKAAILEEKRQLEGRLGQLEEELEEEQSNSELLNDRYRKLLLQVESLTTELSAERSFSAKAESGRQQLERQIQELRGRLGEEDAGARARHKMTIAALESKLAQAEEQLEQETRERILSGKLVRRAEKRLKEVVLQVEEERRVADQLRDQLEKGNLRVKQLKRQLEEAEEEASRAQAGRRRLQRELEDVTESAESMNREVTTLRNRLRRGPLTFTTRTVRQVFRLEEGVASDEEAEEAQPGSGPSPEPEGSPPAHPQ

SEQ ID NO: 31948 - protein, 1002 aa, Homo sapiens
  REGION 1..1002: note = ENSP00000469573
MAAVTMSVPGRKAPPRPGPVPEAAQPFLFTPRGPSAGGGPGSGTSPQVEWTARRLVWVPSELHGFEAAALRDEGEEEAEVELAESGRRLRLPRDQIQRMNPPKFSKAEDMAELTCLNEASVLHNLRERYYSGLIYTYSGLFCVVINPYKQLPIYTEAIVEMYRGKKRHEVPPHVYAVTEGAYRSMLQDREDQSILCTGESGAGKTENTKKVIQYLAHVASSPKGRKEPGVPASVSTVSYGELERQLLQANPILEAFGNAKTVKNDNSSRFGKFIRINFDVAGYIVGANIETYLLEKSRAIRQAKDECSFHIFYQLLGGAGEQLKADLLLEPCSHYRFLTNGPSSSPGQERELFQETLESLRVLGFSHEEIISMLRMVSAVLQFGNIALKRERNTDQATMPDNTAAQKLCRLLGLGVTDFSRALLTPRIKVGRDYVQKAQTKEQADFALEALAKATYERLFRWLVLRLNRALDRSPRQGASFLGILDIAGFEIFQLNSFEQLCINYTNEKLQQLFNHTMFVLEQEEYQREGIPWTFLDFGLDLQPCIDLIERPANPPGLLALLDEECWFPKATDKSFVEKVAQEQGGHPKFQRPRHLRDQADFSVLHYAGKVDYKANEWLMKNMDPLNDNVAALLHQSTDRLTAEIWKDVEGIVGLEQVSSLGDGPPGGRPRRGMFRTVGQLYKESLSRLMATLSNTNPSFVRCIVPNHEKRAGKLEPRLVLDQLRCNGVLEGIRICRQGFPNRILFQEFRQRYEILTPNAIPKGFMDGKQACEKMIQALELDPNLYRVGQSKIFFRAGVLAQLEEERDLKVTDIIVSFQAAARGYLARRAFQKRQQQQSALRVMQRNCAAYLKLRHWQWWRLFTKVKPLLQVTRQDEVLQARAQELQKVQELQQQSAREVGELQGRVAQLEEERARLAEQLRAEAELCAEAEETRGRLAARKQELELVVSELEARVGEEEECSRQMQTEKKRLQQHIQELEAHLEAEEGARQKLQLEKVTTE

SEQ ID NO: 31949 - protein, 2036 aa, Homo sapiens
  REGION 1..2036: note = ENSP00000470298
MAAVTMSVPGRKAPPRPGPVPEAAQPFLFTPRGPSAGGGPGSGTSPQVEWTARRLVWVPSELHGFEAAALRDEGEEEAEVELAESGRRLRLPRDQIQRMNPPKFSKAEDMAELTCLNEASVLHNLRERYYSGLIYTYSGLFCVVINPYKQLPIYTEAIVEMYRGKKRHEVPPHVYAVTEGAYRSMLQDREDQSILCTGESGAGKTENTKKVIQYLAHVASSPKGRKEPGVPASVSTVSYGELERQLLQANPILEAFGNAKTVKNDNSSRFGKFIRINFDVAGYIVGANIETYLLEKSRAIRQAKDECSFHIFYQLLGGAGEQLKADLLLEPCSHYRFLTNGPSSSPGQERELFQETLESLRVLGFSHEEIISMLRMVSAVLQFGNIALKRERNTDQATMPDNTAAQKLCRLLGLGVTDFSRALLTPRIKVGRDYVQKAQTKEQADFALEALAKATYERLFRWLVLRLNRALDRSPRQGASFLGILDIAGFEIFQLNSFEQLCINYTNEKLQQLFNHTMFVLEQEEYQREGIPWTFLDFGLDLQPCIDLIERPANPPGLLALLDEECWFPKATDKSFVEKVAQEQGGHPKFQRPRHLRDQADFSVLHYAGKVDYKANEWLMKNMDPLNDNVAALLHQSTDRLTAEIWKDEHGGFQQFSFLGSFPPSPPGSAERCSSAISPPGVEGIVGLEQVSSLGDGPPGGRPRRGMFRTVGQLYKESLSRLMATLSNTNPSFVRCIVPNHEKRAGKLEPRLVLDQLRCNGVLEGIRICRQGFPNRILFQEFRQRYEILTPNAIPKGFMDGKQACEKMIQALELDPNLYRVGQSKIFFRAGVLAQLEEERDLKVTDIIVSFQAAARGYLARRAFQKRQQQQSALRVMQRNCAAYLKLRHWQWWRLFTKVKPLLQVTRQDEVLQARAQELQKVQELQQQSAREVGELQGRVAQLEEERARLAEQLRAEAELCAEAEETRGRLAARKQELELVVSELEARVGEEEECSRQMQTEKKRLQQHIQELEAHLEAEEGARQKLQLEKVTTEAKMKKFEEDLLLLEDQNSKLSKERKLLEDRLAEFSSQAAEEEEKVKSLNKLRLKYEATIADMEDRLRKEEKGRQELEKLKRRLDGESSELQEQMVEQQQRAEELRAQLGRKEEELQAALARAEDEGGARAQLLKSLREAQAALAEAQEDLESERVARTKAEKQRRDLGEELEALRGELEDTLDSTNAQQELRSKREQEVTELKKTLEEETRIHEAAVQELRQRHGQALGELAEQLEQARRGKGAWEKTRLALEAEVSELRAELSSLQTARQEGEQRRRRLELQLQEVQGRAGDGERARAEAAEKLQRAQAELENVSGALNEAESKTIRLSKELSSTEAQLHDAQELLQEETRAKLALGSRVRAMEAEAAGLREQLEEEAAARERAGRELQTAQAQLSEWRRRQEEEAGALEAGEEARRRAAREAEALTQRLAEKTETVDRLERGRRRLQQELDDATMDLEQQRQLVSTLEKKQRKFDQLLAEEKAAVLRAVEERERAEAEGREREARALSLTRALEEEQEAREELERQNRALRAELEALLSSKDDVGKSVHELERACRVAEQAANDLRAQVTELEDELTAAEDAKLRLEVTVQALKTQHERDLQGRDEAGEERRRQLAKQLRDAEVERDEERKQRTLAVAARKKLEGELEELKAQMASAGQGKEEAVKQLRKMQAQMKELWREVEETRTSREEIFSQNRESEKRLKGLEAEVLRLQEELAASDRARRQAQQDRDEMADEVANGNLSKAAILEEKRQLEGRLGQLEEELEEEQSNSELLNDRYRKLLLQVESLTTELSAERSFSAKAESGRQQLERQIQELRGRLGEEDAGARARHKMTIAALESKLAQAEEQLEQETRERILSGKLVRRAEKRLKEVVLQVEEERRVADQLRDQLEKGNLRVKQLKRQLEEAEEEASRAQAGRRRLQRELEDVTESAESMNREVTTLRNRLRRGPLTFTTRTVRQVFRLEEGVASDEEAEEAQPGSGPSPEPEGSPPAHPQ

SEQ ID NO: 31950 - protein, 1995 aa, Homo sapiens
  REGION 1..1995: note = ENSP00000472819
MAAVTMSVPGRKAPPRPGPVPEAAQPFLFTPRGPSAGGGPGSGTSPQVEWTARRLVWVPSELHGFEAAALRDEGEEEAEVELAESGRRLRLPRDQIQRMNPPKFSKAEDMAELTCLNEASVLHNLRERYYSGLIYTYSGLFCVVINPYKQLPIYTEAIVEMYRGKKRHEVPPHVYAVTEGAYRSMLQDREDQSILCTGESGAGKTENTKKVIQYLAHVASSPKGRKEPGVPGELERQLLQANPILEAFGNAKTVKNDNSSRFGKFIRINFDVAGYIVGANIETYLLEKSRAIRQAKDECSFHIFYQLLGGAGEQLKADLLLEPCSHYRFLTNGPSSSPGQERELFQETLESLRVLGFSHEEIISMLRMVSAVLQFGNIALKRERNTDQATMPDNTAAQKLCRLLGLGVTDFSRALLTPRIKVGRDYVQKAQTKEQADFALEALAKATYERLFRWLVLRLNRALDRSPRQGASFLGILDIAGFEIFQLNSFEQLCINYTNEKLQQLFNHTMFVLEQEEYQREGIPWTFLDFGLDLQPCIDLIERPANPPGLLALLDEECWFPKATDKSFVEKVAQEQGGHPKFQRPRHLRDQADFSVLHYAGKVDYKANEWLMKNMDPLNDNVAALLHQSTDRLTAEIWKDVEGIVGLEQVSSLGDGPPGGRPRRGMFRTVGQLYKESLSRLMATLSNTNPSFVRCIVPNHEKRAGKLEPRLVLDQLRCNGVLEGIRICRQGFPNRILFQEFRQRYEILTPNAIPKGFMDGKQACEKMIQALELDPNLYRVGQSKIFFRAGVLAQLEEERDLKVTDIIVSFQAAARGYLARRAFQKRQQQQSALRVMQRNCAAYLKLRHWQWWRLFTKVKPLLQVTRQDEVLQARAQELQKVQELQQQSAREVGELQGRVAQLEEERARLAEQLRAEAELCAEAEETRGRLAARKQELELVVSELEARVGEEEECSRQMQTEKKRLQQHIQELEAHLEAEEGARQKLQLEKVTTEAKMKKFEEDLLLLEDQNSKLSKERKLLEDRLAEFSSQAAEEEEKVKSLNKLRLKYEATIADMEDRLRKEEKGRQELEKLKRRLDGESSELQEQMVEQQQRAEELRAQLGRKEEELQAALARAEDEGGARAQLLKSLREAQAALAEAQEDLESERVARTKAEKQRRDLGEELEALRGELEDTLDSTNAQQELRSKREQEVTELKKTLEEETRIHEAAVQELRQRHGQALGELAEQLEQARRGKGAWEKTRLALEAEVSELRAELSSLQTARQEGEQRRRRLELQLQEVQGRAGDGERARAEAAEKLQRAQAELENVSGALNEAESKTIRLSKELSSTEAQLHDAQELLQEETRAKLALGSRVRAMEAEAAGLREQLEEEAAARERAGRELQTAQAQLSEWRRRQEEEAGALEAGEEARRRAAREAEALTQRLAEKTETVDRLERGRRRLQQELDDATMDLEQQRQLVSTLEKKQRKFDQLLAEEKAAVLRAVEERERAEAEGREREARALSLTRALEEEQEAREELERQNRALRAELEALLSSKDDVGKSVHELERACRVAEQAANDLRAQVTELEDELTAAEDAKLRLEVTVQALKTQHERDLQGRDEAGEERRRQLAKQLRDAEVERDEERKQRTLAVAARKKLEGELEELKAQMASAGQGKEEAVKQLRKMQAQMKELWREVEETRTSREEIFSQNRESEKRLKGLEAEVLRLQEELAASDRARRQAQQDRDEMADEVANGNLSKAAILEEKRQLEGRLGQLEEELEEEQSNSELLNDRYRKLLLQVESLTTELSAERSFSAKAESGRQQLERQIQELRGRLGEEDAGARARHKMTIAALESKLAQAEEQLEQETRERILSGKLVRRAEKRLKEVVLQVEEERRVADQLRDQLEKGNLRVKQLKRQLEEAEEEASRAQAGRRRLQRELEDVTESAESMNREVTTLRNRLRRGPLTFTTRTVRQVFRLEEGVASDEEAEEAQPGSGPSPEPEGSPPAHPQ

SEQ ID NO: 31951 - protein, 2003 aa, Homo sapiens; identical to SEQ ID NO: 31947
  REGION 1..2003: note = ENSP00000407879

SEQ ID NO: 31952 - protein, 1995 aa, Homo sapiens; identical to SEQ ID NO: 31950
  REGION 1..1995: note = ENSP00000366169

SEQ ID NO: 31953 - protein, 508 aa, Homo sapiens
  REGION 1..508: note = ENSP00000262269
MKKFEEDLLLLEDQNSKLSKERKLLEDRLAEFSSQAAEEEEKVKSLNKLRLKYEATIADMEDRLRKEEKGRQELEKLKRRLDGESSELQEQMVEQQQRAEELRAQLGRKEEELQAALARAEDEGGARAQLLKSLREAQAALAEAQEDLESERVARTKAEKQRRDLGEELEALRGELEDTLDSTNAQQELRSKREQEVTELKKTLEEETRIHEAAVQELRQRHGQALGELAEQLEQARRGKGAWEKTRLALEAEVSELRAELSSLQTARQEGEQRRRRLELQLQEVQGRAGDGERARAEAAEKLQRAQAELENVSGALNEAESKTIRLSKELSSTEAQLHDAQELLQEETRAKLALGSRVRAMEAEAAGLREQLEEEAAARERAGRELQTAQAQLSEWRRRQEEEAGALEAGEEARRRAAREAEALTQRLAEKTETVDRLERGRRRLQQELDDATMDLEQQRQLVSTLEKKQRKFDQLLAEEKAAVLRAVEERERPRQRAGSVRLGPCH

SEQ ID NO: 31954 - protein, 638 aa, Homo sapiens
  REGION 1..638: note = ENSP00000406273
MEAEAAGLREQLEEEAAARERAGRELQTAQAQLSEWRRRQEEEAGALEAGEEARRRAAREAEALTQRLAEKTETVDRLERGRRRLQQELDDATMDLEQQRQLVSTLEKKQRKFDQLLAEEKAAVLRAVEERERAEAEGREREARALSLTRALEEEQEAREELERQNRALRAELEALLSSKDDVGKSVHELERACRVAEQAANDLRAQVTELEDELTAAEDAKLRLEVTVQALKTQHERDLQGRDEAGEERRRQLAKQLRDAEVERDEERKQRTLAVAARKKLEGELEELKAQMASAGQGKEEAVKQLRKMQAQMKELWREVEETRTSREEIFSQNRESEKRLKGLEAEVLRLQEELAASDRARRQAQQDRDEMADEVANGNLSKAAILEEKRQLEGRLGQLEEELEEEQSNSELLNDRYRKLLLQVESLTTELSAERSFSAKAESGRQQLERQIQELRGRLGEEDAGARARHKMTIAALESKLAQAEEQLEQETRERILSGKLVRRAEKRLKEVVLQVEEERRVADQLRDQLEKGNLRVKQLKRQLEEAEEEASRAQAGRRRLQRELEDVTESAESMNREVTTLRNRLRRGPLTFTTRTVRQVFRLEEGVASDEEAEEAQPGSGPSPEPEGSPPAHPQ

SEQ ID NO: 31955 - protein, 1939 aa, Homo sapiens
  REGION 1..1939: note = ENSP00000348634
MTDAQMADFGAAAQYLRKSEKERLEAQTRPFDIRTECFVPDDKEEFVKAKILSREGGKVIAETENGKTVTVKEDQVLQQNPPKFDKIEDMAMLTFLHEPAVLFNLKERYAAWMIYTYSGLFCVTVNPYKWLPVYNAEVVAAYRGKKRSEAPPHIFSISDNAYQYMLTDRENQSILITGESGAGKTVNTKRVIQYFASIAAIGDRGKKDNANANKGTLEDQIIQANPALEAFGNAKTVRNDNSSRFGKFIRIHFGATGKLASADIETYLLEKSRVIFQLKAERNYHIFYQILSNKKPELLDMLLVTNNPYDYAFVSQGEVSVASIDDSEELMATDSAFDVLGFTSEEKAGVYKLTGAIMHYGNMKFKQKQREEQAEPDGTEDADKSAYLMGLNSADLLKGLCHPRVKVGNEYVTKGQSVQQVYYSIGALAKAVYEKMFNWMVTRINATLETKQPRQYFIGVLDIAGFEIFDFNSFEQLCINFTNEKLQQFFNHHMFVLEQEEYKKEGIEWTFIDFGMDLQACIDLIEKPMGIMSILEEECMFPKATDMTFKAKLYDNHLGKSNNFQKPRNIKGKQEAHFSLIHYAGTVDYNILGWLEKNKDPLNETVVALYQKSSLKLMATLFSSYATADTGDSGKSKGGKKKGSSFQTVSALHRENLNKLMTNLRTTHPHFVRCIIPNERKAPGVMDNPLVMHQLRCNGVLEGIRICRKGFPNRILYGDFRQRYRILNPVAIPEGQFIDSRKGTEKLLSSLDIDHNQYKFGHTKVFFKAGLLGLLEEMRDERLSRIITRMQAQARGQLMRIEFKKIVERRDALLVIQWNIRAFMGVKNWPWMKLYFKIKPLLKSAETEKEMATMKEEFGRIKETLEKSEARRKELEEKMVSLLQEKNDLQLQVQAEQDNLNDAEERCDQLIKNKIQLEAKVKEMNERLEDEEEMNAELTAKKRKLEDECSELKKDIDDLELTLAKVEKEKHATENKVKNLTEEMAGLDEIIAKLTKEKKALQEAHQQALDDLQVEEDKVNSLSKSKVKLEQQVDDLEGSLEQEKKVRMDLERAKRKLEGDLKLTQESIMDLENDKLQLEEKLKKKEFDINQQNSKIEDEQVLALQLQKKLKENQARIEELEEELEAERTARAKVEKLRSDLSRELEEISERLEEAGGATSVQIEMNKKREAEFQKMRRDLEEATLQHEATAAALRKKHADSVAELGEQIDNLQRVKQKLEKEKSEFKLELDDVTSNMEQIIKAKANLEKVSRTLEDQANEYRVKLEEAQRSLNDFTTQRAKLQTENGELARQLEEKEALISQLTRGKLSYTQQMEDLKRQLEEEGKAKNALAHALQSARHDCDLLREQYEEETEAKAELQRVLSKANSEVAQWRTKYETDAIQRTEELEEAKKKLAQRLQDAEEAVEAVNAKCSSLEKTKHRLQNEIEDLMVDVERSNAAAAALDKKQRNFDKILAEWKQKYEESQSELESSQKEARSLSTELFKLKNAYEESLEHLETFKRENKNLQEEISDLTEQLGEGGKNVHELEKVRKQLEVEKLELQSALEEAEASLEHEEGKILRAQLEFNQIKAEIERKLAEKDEEMEQAKRNHQRVVDSLQTSLDAETRSRNEVLRVKKKMEGDLNEMEIQLSHANRMAAEAQKQVKSLQSLLKDTQIQLDDAVRANDDLKENIAIVERRNNLLQAELEELRAVVEQTERSRKLAEQELIETSERVQLLHSQNTSLINQKKKMESDLTQLQSEVEEAVQECRNAEEKAKKAITDAAMMAEELKKEQDTSAHLERMKKNMEQTIKDLQHRLDEAEQIALKGGKKQLQKLEARVRELEGELEAEQKRNAESVKGMRKSERRIKELTYQTEEDKKNLLRLQDLVDKLQLKVKAYKRQAEEAEEQANTNLSKFRKVQHELDEAEERADIAESQVNKLRAKSRDIGAKQKMHDEE

SEQ ID NO: 31956 - protein, 1939 aa, Homo sapiens; identical to SEQ ID NO: 31955
  REGION 1..1939: note = ENSP00000386041

SEQ ID NO: 31957 - protein, 445 aa, Homo sapiens
  REGION 1..445: note = ENSP00000349298
MLCYVTRPDAVLMEVEVEAKANGEDCLNQVCRRLGIIEVDYFGLQFTGSKGESLWLNLRNRISQQMDGLAPYRLKLRVKFFVEPHLILQEQTRHIFFLHIKEALLAGHLLCSPEQAVELSALLAQTKFGDYNQNTAKYNYEELCAKELSSATLNSIVAKHKELEGTSQASAEYQVLQIVSAMENYGIEWHSVRDSEGQKLLIGVGPEGISICKDDFSPINRIAYPVVQMATQSGKNVYLTVTKESGNSIVLLFKMISTRAASGLYRAITETHAFYRCDTVTSAVMMQYSRDLKGHLASLFLNENINLGKKYVFDIKRTSKEVYDHARRALYNAGVVDLVSRNNQSPSHSPLKSSESSMNCSSCEGLSCQQTRVLQEKLRKLKEAMLCMVCCEEEINSTFCPCGHTVCCESCAAQLQSCPVCRSRVEHVQHVYLPTHTSLLNLTVI

SEQ ID NO: 31958 - protein, 264 aa, Homo sapiens
  REGION 1..264: note = ENSP00000008686
MENYGIEWHSVRDSEGQKLLIGVGPEGISICKDDFSPINRIAYPVVQMATQSGKNVYLTVTKESGNSIVLLFKMISTRAASGLYRAITETHAFYRCDTVTSAVMMQYSRDLKGHLASLFLNENINLGKKYVFDIKRTSKEVYDHARRALYNAGVVDLVSRNNQSPSHSPLKSSESSMNCSSCEGLSCQQTRVLQEKLRKLKEAMLCMVCCEEEINSTFCPCGHTVCCESCAAQLQSCPVCRSRVEHVQHVYLPTHTSLLNLTVI

SEQ ID NO: 31959 - protein, 2058 aa, Homo sapiens
  REGION 1..2058: note = ENSP00000421280
MDNFFTEGTRVWLRENGQHFPSTVNSCAEGIVVFRTDYGQVFTYKQSTITHQKVTAMHPTNEEGVDDMASLTELHGGSIMYNLFQRYKRNQIYTYIGSILASVNPYQPIAGLYEPATMEQYSRRHLGELPPHIFAIANECYRCLWKRHDNQCILISGESGAGKTESTKLILKFLSVISQQSLELSLKEKTSCVERAILESSPIMEAFGNAKTVYNNNSSRFGKFVQLNICQKGNIQGGRIVDYLLEKNRVVRQNPGERNYHIFYALLAGLEHEEREEFYLSTPENYHYLNQSGCVEDKTISDQESFREVITAMDVMQFSKEEVREVSRLLAGILHLGNIEFITAGGAQVSFKTALGRSAELLGLDPTQLTDALTQRSMFLRGEEILTPLNVQQAVDSRDSLAMALYACCFEWVIKKINSRIKGNEDFKSIGILDIFGFENFEVNHFEQFNINYANEKLQEYFNKHIFSLEQLEYSREGLVWEDIDWIDNGECLDLIEKKLGLLALINEESHFPQATDSTLLEKLHSQHANNHFYVKPRVAVNNFGVKHYAGEVQYDVRGILEKNRDTFRDDLLNLLRESRFDFIYDLFEHVSSRNNQDTLKCGSKHRRPTVSSQFKDSLHSLMATLSSSNPFFVRCIKPNMQKMPDQFDQAVVLNQLRYSGMLETVRIRKAGYAVRRPFQDFYKRYKVLMRNLALPEDVRGKCTSLLQLYDASNSEWQLGKTKVFLRESLEQKLEKRREEEVSHAAMVIRAHVLGFLARKQYRKVLYCVVIIQKNYRAFLLRRRFLHLKKAAIVFQKQLRGQIARRVYRQLLAEKREQEEKKKQEEEEKKKREEEERERERERREAELRAQQEEETRKQQELEALQKSQKEAELTRELEKQKENKQVEEILRLEKEIEDLQRMKEQQELSLTEASLQKLQERRDQELRRLEEEACRAAQEFLESLNFDEIDECVRNIERSLSVGSEFSSELAESACEEKPNFNFSQPYPEEEVDEGFEADDDAFKDSPNPSEHGHSDQRTSGIRTSDDSSEEDPYMNDTVVPTSPSADSTVLLAPSVQDSGSLHNSSSGESTYCMPQNAGDLPSPDGDYDYDQDDYEDGAITSGSSVTFSNSYGSQWSPDYRCSVGTYNSSGAYRFSSEGAQSSFEDSEEDFDSRFDTDDELSYRRDSVYSCVTLPYFHSFLYMKGGLMNSWKRRWCVLKDETFLWFRSKQEALKQGWLHKKGGGSSTLSRRNWKKRWFVLRQSKLMYFENDSEEKLKGTVEVRTAKEIIDNTTKENGIDIIMADRTFHLIAESPEDASQWFSVLSQVHASTDQEIQEMHDEQANPQNAVGTLDVGLIDSVCASDSPDRPNSFVIITANRVLHCNADTPEEMHHWITLLQRSKGDTRVEGQEFIVRGWLHKEVKNSPKMSSLKLKKRWFVLTHNSLDYYKSSEKNALKLGTLVLNSLCSVVPPDEKIFKETGYWNVTVYGRKHCYRLYTKLLNEATRWSSAIQNVTDTKAPIDTPTQQLIQDIKENCLNSDVVEQIYKRNPILRYTHHPLHSPLLPLPYGDINLNLLKDKGYTTLQDEAIKIFNSLQQLESMSDPIPIIQGILQTGHDLRPLRDELYCQLIKQTNKVPHPGSVGNLYSWQILTCLSCTFLPSRGILKYLKFHLKRIREQFPGSEMEKYALFTYESLKKTKCREFVPSRDEIEALIHRQEMTSTVYCHGGGSCKITINSHTTAGEVVEKLIRGLAMEDSRNMFALFEYNGHVDKAIESRTVVADVLAKFEKLAATSEVGDLPWKFYFKLYCFLDTDNVPKDSVEFAFMFEQAHEAVIHGHHPAPEENLQVLAALRLQYLQGDYTLHAAIPPLEEVYSLQRLKARISQSTKTFTPCERLEKRRTSFLEGTLRRSFRTGSVVRQKVEEEQMLDMWIKEEVSSARASIIDKWRKFQGMNQEQAMAKYMALIKEWPGYGSTLFDVECKEGGFPQELWLGVSADAVSVYKRGEGRPLEVFQYEHILSFGAPLANTYKIVVDERELLFETSEVVDVAKLMKAYISMIVKKRYSTTRSASSQGSSR

SEQ ID NO: 31960 - protein, 1397 aa, Homo sapiens
  REGION 1..1397: note = ENSP00000425051
MLETVRIRKAGYAVRRPFQDFYKRYKVLMRNLALPEDVRGKCTSLLQLYDASNSEWQLGKTKVFLRESLEQKLEKRREEEVSHAAMVIRAHVLGFLARKQYRKVLYCVVIIQKNYRAFLLRRRFLHLKKAAIVFQKQLRGQIARRVYRQLLAEKREQEEKKKQEEEEKKKREEEERERERERREAELRAQQEEETRKQQELEALQKSQKEAELTRELEKQKENKQVEEILRLEKEIEDLQRMKEQQELSLTEASLQKLQERRDQELRRLEEEACRAAQEFLESLNFDEIDECVRNIERSLSVGSEFSSELAESACEEKPNFNFSQPYPEEEVDEGFEADDDAFKDSPNPSEHGHSDQRTSGIRTSDDSSEEDPYMNDTVVPTSPSADSTVLLAPSVQDSGSLHNSSSGESTYCMPQNAGDLPSPDGDYDYDQDDYEDGAITSGSSVTFSNSYGSQWSPDYRCSVGTYNSSGAYRFSSEGAQSSFEDSEEDFDSRFDTDDELSYRRDSVYSCVTLPYFHSFLYMKGGLMNSWKRRWCVLKDETFLWFRSKQEALKQGWLHKKGGGSSTLSRRNWKKRWFVLRQSKLMYFENDSEEKLKGTVEVRTAKEIIDNTTKENGIDIIMADRTFHLIAESPEDASQWFSVLSQVHASTDQEIQEMHDEQANPQNAVGTLDVGLIDSVCASDSPDRPNSFVIITANRVLHCNADTPEEMHHWITLLQRSKGDTRVEGQEFIVRGWLHKEVKNSPKMSSLKLKKRWFVLTHNSLDYYKSSEKNALKLGTLVLNSLCSVVPPDEKIFKETGYWNVTVYGRKHCYRLYTKLLNEATRWSSAIQNVTDTKAPIDTPTQQLIQDIKENCLNSDVVEQIYKRNPILRYTHHPLHSPLLPLPYGDINLNLLKDKGYTTLQDEAIKIFNSLQQLESMSDPIPIIQGILQTGHDLRPLRDELYCQLIKQTNKVPHPGSVGNLYSWQILTCLSCTFLPSRGILKYLKFHLKRIREQFPGSEMEKYALFTYESLKKTKCREFVPSRDEIEALIHRQEMTSTVYCHGGGSCKITINSHTTAGEVVEKLIRGLAMEDSRNMFALFEYNGHVDKAIESRTVVADVLAKFEKLAATSEVGDLPWKFYFKLYCFLDTDNVPKDSVEFAFMFEQAHEAVIHGHHPAPEENLQVLAALRLQYLQGDYTLHAAIPPLEEVYSLQRLKARISQSTKTFTPCERLEKRRTSFLEGTLRRSFRTGSVVRQKVEEEQMLDMWIKEEVSSARASIIDKWRKFQGMNQEQAMAKYMALIKEWPGYGSTLFDVECKEGGFPQELWLGVSADAVSVYKRGEGRPLEVFQYEHILSFGAPLANTYKIVVDERELLFETSEVVDVAKLMKAYISMIVKKRYSTTRSASSQGSSR

SEQ ID NO: 31961 - protein, 1397 aa, Homo sapiens; identical to SEQ ID NO: 31960
  REGION 1..1397: note = ENSP00000421170

SEQ ID NO: 31962 - protein, 830 aa, Homo sapiens
  REGION 1..830: note = ENSP00000421309
MTSLPRLRLNTRDQAIQLGTRVWLRENGQHFPSTVNSCAEGIVVFRTDYGQVFTYKQSTITHQKVTAMHPTNEEGVDDMASLTELHGGSIMYNLFQRYKRNQIYTYIGSILASVNPYQPIAGLYEPATMEQYSRRHLGELPPHIFAIANECYRCLWKRHDNQCILISGESGAGKTESTKLILKFLSVISQQSLELSLKEKTSCVERAILESSPIMEAFGNAKTVYNNNSSRFGKFVQLNICQKGNIQGGRIVDYLLEKNRVVRQNPGERNYHIFYALLAGLEHEEREEFYLSTPENYHYLNQSGCVEDKTISDQESFREVITAMDVMQFSKEEVREVSRLLAGILHLGNIEFITAGGAQVSFKTALGRSAELLGLDPTQLTDALTQRSMFLRGEEILTPLNVQQAVDSRDSLAMALYACCFEWVIKKINSRIKGNEDFKSIGILDIFGFENFEVNHFEQFNINYANEKLQEYFNKHIFSLEQLEYSREGLVWEDIDWIDNGECLDLIEKKLGLLALINEESHFPQATDSTLLEKLHSQHANNHFYVKPRVAVNNFGVKHYAGEVQYDVRGILEKNRDTFRDDLLNLLRESRFDFIYDLFEHVSSRNNQDTLKCGSKHRRPTVSSQFKDSLHSLMATLSSSNPFFVRCIKPNMQKMPDQFDQAVVLNQLRYSGMLETVRIRKAGYAVRRPFQDFYKRYKVLMRNLALPEDVRGKCTSLLQLYDASNSEWQLGKTKVFLRESLEQKLEKRREEEVSHAAMVIRAHVLGFLARKQYRKVLYCVVIIQKNYRAFLLRRRFLHLKKAAIVFQKQLRGQIARRVYRQLLAEKREQE

SEQ ID NO: 31963 - protein, 212 aa, Homo sapiens
  REGION 1..212: note = ENSP00000426783
MDNFFTEVFTYKQSTITHQKVTAMHPTNEEGVDDMASLTELHGGSIMYNLFQRYKRNQIYTYIGSILASVNPYQPIAGLYEPATMEQYSRRHLGELPPHIFAIANECYRCLWKRHDNQCILISGESGAGKTESTKLILKFLSVISQQSLELSLKEKTSCVERAILESSPIMEAFGNAKTVYNNNSSRFGKFVQLNICQKGNIQGGRIVDYLL

SEQ ID NO: 31964 - protein, 97 aa, Homo sapiens
  REGION 1..97: note = ENSP00000426664
MDNFFTEGTRVWLRENGQHFPSTVNSCAEGIVVFRTDYGQVFTYKQSTITHQKVTAMHPTNEEGVDDMASLTELHGGSIMYNLFQRYKRNQIYVQIG

SEQ ID NO: 31965 - protein, 2069 aa, Homo sapiens
  REGION 1..2069: note = ENSP00000274203
MDNFFTEGTRVWLRENGQHFPSTVNSCAEGIVVFRTDYGQVFTYKQSTITHQKVTAMHPTNEEGVDDMASLTELHGGSIMYNLFQRYKRNQIYTYIGSILASVNPYQPIAGLYEPATMEQYSRRHLGELPPHIFAIANECYRCLWKRHDNQCILISGESGAGKTESTKLILKFLSVISQQSLELSLKEKTSCVERAILESSPIMEAFGNAKTVYNNNSSRFGKFVQLNICQKGNIQGGRIVDYLLEKNRVVRQNPGERNYHIFYALLAGLEHEEREEFYLSTPENYHYLNQSGCVEDKTISDQESFREVITAMDVMQFSKEEVREVSRLLAGILHLGNIEFITAGGAQVSFKTALGRSAELLGLDPTQLTDALTQRSMFLRGEEILTPLNVQQAVDSRDSLAMALYACCFEWVIKKINSRIKGNEDFKSIGILDIFGFENFEVNHFEQFNINYANEKLQEYFNKHIFSLEQLEYSREGLVWEDIDWIDNGECLDLIEKKLGLLALINEESHFPQATDSTLLEKLHSQHANNHFYVKPRVAVNNFGVKHYAGEVQYDVRGILEKNRDTFRDDLLNLLRESRFDFIYDLFEHVSSRNNQDTLKCGSKHRRPTVSSQFKDSLHSLMATLSSSNPFFVRCIKPNMQKMPDQFDQAVVLNQLRYSGMLETVRIRKAGYAVRRPFQDFYKRQEGAELDSLSFQRVLMRNLALPEDVRGKCTSLLQLYDASNSEWQLGKTKVFLRESLEQKLEKRREEEVSHAAMVIRAHVLGFLARKQYRKVLYCVVIIQKNYRAFLLRRRFLHLKKAAIVFQKQLRGQIARRVYRQLLAEKREQEEKKKQEEEEKKKREEEERERERERREAELRAQQEEETRKQQELEALQKSQKEAELTRELEKQKENKQVEEILRLEKEIEDLQRMKEQQELSLTEASLQKLQERRDQELRRLEEEACRAAQEFLESLNFDEIDECVRNIERSLSVGSEFSSELAESACEEKPNFNFSQPYPEEEVDEGFEADDDAFKDSPNPSEHGHSDQRTSGIRTSDDSSEEDPYMNDTVVPTSPSADSTVLLAPSVQDSGSLHNSSSGESTYCMPQNAGDLPSPDGDYDYDQDDYEDGAITSGSSVTFSNSYGSQWSPDYRCSVGTYNSSGAYRFSSEGAQSSFEDSEEDFDSRFDTDDELSYRRDSVYSCVTLPYFHSFLYMKGGLMNSWKRRWCVLKDETFLWFRSKQEALKQGWLHKKGGGSSTLSRRNWKKRWFVLRQSKLMYFENDSEEKLKGTVEVRTAKEIIDNTTKENGIDIIMADRTFHLIAESPEDASQWFSVLSQVHASTDQEIQEMHDEQANPQNAVGTLDVGLIDSVCASDSPDRPNSFVIITANRVLHCNADTPEEMHHWITLLQRSKGDTRVEGQEFIVRGWLHKEVKNSPKMSSLKLKKRWFVLTHNSLDYYKSSEKNALKLGTLVLNSLCSVVPPDEKIFKETGYWNVTVYGRKHCYRLYTKLLNEATRWSSAIQNVTDTKAPIDTPTQQLIQDIKENCLNSDVVEQIYKRNPILRYTHHPLHSPLLPLPYGDINLNLLKDKGYTTLQDEAIKIFNSLQQLESMSDPIPIIQGILQTGHDLRPLRDELYCQLIKQTNKVPHPGSVGNLYSWQILTCLSCTFLPSRGILKYLKFHLKRIREQFPGSEMEKYALFTYESLKKTKCREFVPSRDEIEALIHRQEMTSTVYCHGGGSCKITINSHTTAGEVVEKLIRGLAMEDSRNMFALFEYNGHVDKAIESRTVVADVLAKFEKLAATSEVGDLPWKFYFKLYCFLDTDNVPKDSVEFAFMFEQAHEAVIHGHHPAPEENLQVLAALRLQYLQGDYTLHAAIPPLEEVYSLQRLKARISQSTKTFTPCERLEKRRTSFLEGTLRRSFRTGSVVRQKVEEEQMLDMWIKEEVSSARASIIDKWRKFQGMNQEQAMAKYMALIKEWPGYGSTLFDVECKEGGFPQELWLGVSADAVSVYKRGEGRPLEVFQYEHILSFGAPLANTYKIVVDERELLFETSEVVDVAKLMKAYISMIVKKRYSTTRSASSQGSSR

SEQ ID NO: 31966 - protein, 940 aa, Homo sapiens
  REGION 1..940: note = ENSP00000251041
MEIDQCLLESLPLGQRQRLVKRMRCEQIKAYYEREKAFQKQEGFLKRLKHAKNPKVHFNLTDMLQDAIIHHNDKEVLRLLKEGADPHTLVSSGGSLLHLCARYDNAFIAEILIDRGVNVNHQDEDFWTPMHIACACDNPDIVLLLVLAGANVLLQDVNGNIPLDYAVEGTESSSILLTYLDENGVDLTSLRQMKLQRPMSMLTDVKHFLSSGGNVNEKNDEGVTLLHMACASGYKEVVSLILEHGGDLNIVDDQYWTPLHLAAKYGQTNLVKLLLMHQANPHLVNCNEEKASDIAASEFIEEMLLKAEIAWEEKMKEPLSASTLAQEEPYEEIIHDLPVLSSKLSPLVLPIAKQDSLLEKDIMFKDATKGLCKQQSQDSIPENPMMSGSTKPEQVKLMPPAPNDDLATLSELNDGSLLYEIQKRFGNNQIYTFIGDILLLVNPYKELPIYSSMVSQLYFSSSGKLCSSLPPHLFSCVERAFHQLFREQRPQCFILSGERGSGKSEASKQIIRHLTCRAGASRATLDSRFKHVVCILEAFGHAKTTLNDLSSCFIKYFELQFCERKQQLTGARIYTYLLEKSRLVSQPLGQSNFLIFYLLMDGLSAEEKYGLHLNNLCAHRYLNQTIQDDASTGERSLNREKLAVLKRALNVVGFSSLEVENLFVILAAILHLGDIRFTALNEGNSAFVSDLQLLEQVAGMLQVSTDELASALTTDIQYFKGDMIIRRHTIQIAEFFRDLLAKSLYSRLFSFLVNTMNSCLHSQDEQKSMQTLDIGILDIFGFEEFQKNEFEQLCVNMTNEKMHHYINEVLFLHEQVECVQEGVTMETAYSPGNQNGVLDFFFQKPSGFLTLLDEESQMIWSVESNFPKKLQSLLESSNTNAVYSPMKDGNGNVALKDHGTAFTIMHYAGRVMYDVVGAIEKNKDSLSQNLLFVMKRGRCF

SEQ ID NO: 31967 - protein, 1858 aa, Homo sapiens
  REGION 1..1858: note = ENSP00000350160
MEIDQCLLESLPLGQRQRLVKRMRCEQIKAYYEREKAFQKQEGFLKRLKHAKNPKVHFNLTDMLQDAIIHHNDKEVLRLLKEGADPHTLVSSGGSLLHLCARYDNAFIAEILIDRGVNVNHQDEDFWTPMHIACACDNPDIVLLLVLAGANVLLQDVNGNIPLDYAVEGTESSSILLTYLDENGVDLTSLRQMKLQRPMSMLTDVKHFLSSGGNVNEKNDEGVTLLHMACASGYKEVVSLILEHGGDLNIVDDQYWTPLHLAAKYGQTNLVKLLLMHQANPHLVNCNEEKASDIAASEFIEEMLLKAEIAWEEKMKEPLSASTLAQEEPYEEIIHDLPVLSSKLSPLVLPIAKQDSLLEKDIMFKDATKGLCKQQSQDSIPENPMMSGSTKPEQVKLMPPAPNDDLATLSELNDGSLLYEIQKRFGNNQIYTFIGDILLLVNPYKELPIYSSMVSQLYFSSSGKLCSSLPPHLFSCVERAFHQLFREQRPQCFILSGERGSGKSEASKQIIRHLTCRAGASRATLDSRFKHVVCILEAFGHAKTTLNDLSSCFIKYFELQFCERKQQLTGARIYTYLLEKSRLVSQPLGQSNFLIFYLLMDGLSAEEKYGLHLNNLCAHRYLNQTIQDDASTGERSLNREKLAVLKRALNVVGFSSLEVENLFVILAAILHLGDIRFTALNEGNSAFVSDLQLLEQVAGMLQVSTDELASALTTDIQYFKGDMIIRRHTIQIAEFFRDLLAKSLYSRLFSFLVNTMNSCLHSQDEQKSMQTLDIGILDIFGFEEFQKNEFEQLCVNMTNEKMHHYINEVLFLHEQVECVQEGVTMETAYSPGNQNGVLDFFFQKPSGFLTLLDEESQMIWSVESNFPKKLQSLLESSNTNAVYSPMKDGNGNVALKDHGTAFTIMHYAGRVMYDVVGAIEKNKDSLSQNLLFVMKTSENVVINHLFQSKLSQTGSLVSAYPSFKFRGHKSALLSKKMTASSIIGENKNYLELSKLLKKKGTSTFLQRLERGDPVTIASQLRKSLMDIIGKLQKCTPHFIHCIRPNNSKLPDTFDNFYVSAQLQYIGVLEMVKIFRYGYPVRLSFSDFLSRYKPLADTFLREKKEQSAAERCRLVLQQCKLQGWQMGVRKVFLKYWHADQLNDLCLQLQRKIITCQKVIRGFLARQHLLQRISIRQQEVTSINSFLQNTEDMGLKTYDALVIQNASDIARENDRLRSEMNAPYHKEKLEVRNMQEEGSKRTDDKSGPRHFHPSSMSVCAAVDGLGQCLVGPSIWSPSLHSVFSMDDSSSLPSPRKQPPPKPKRDPNTRLSASYEAVSACLSAAREAANEALARPRPHSDDYSTMKKIPPRKPKRSPNTKLSGSYEEISGSRPGDARPAGAPGAAARVLTPGTPQCALPPAAPPGDEDDSEPVYIEMLGHAARPDSPDPGESVYEEMKCCLPDDGGPGAGSFLLHGASPPLLHRAPEDEAAGPPGDACDIPPPFPNLLPHRPPLLVFPPTPVTCSPASDESPLTPLEVKKLPVLETNLKYPVQPEGSSPLSPQYSKSQKGDGDRPASPGLALFNGSGRASPPSTPPPPPPPPGPPPAPYRPCAHLAFPPEPAPVNAGKAGPSAEAPKVHPKPNSAPVAGPCSSFPKIPYSPVKATRADARKAGSSASPPAPYSPPSSRPLSSPLDELASLFNSGRSVLRKSAAGRKIREAEGFETNMNISSRDDPSTSEITSETQDRNANNHGIQLSNSLSSAITAENGNSISNGLPEEDGYSRLSISGTGTSTFQRHRDSHTTQVIHQLRLSENESVALQELLDWRRKLCEEGQDWQQILHHAEPRVPPPPPCKKPSLLKKPEGASCNRLPSELWDTTI

SEQ ID NO: 31968 - protein, 1858 aa, Homo sapiens; identical to SEQ ID NO: 31967
  REGION 1..1858: note = ENSP00000349145

SEQ ID NO: 31969 - protein, 1880 aa, Homo sapiens
  REGION 1..1880: note = ENSP00000401633
MSHYHFIKCCCFQLCNVFRSHEMEIDQCLLESLPLGQRQRLVKRMRCEQIKAYYEREKAFQKQEGFLKRLKHAKNPKVHFNLTDMLQDAIIHHNDKEVLRLLKEGADPHTLVSSGGSLLHLCARYDNAFIAEILIDRGVNVNHQDEDFWTPMHIACACDNPDIVLLLVLAGANVLLQDVNGNIPLDYAVEGTESSSILLTYLDENGVDLTSLRQMKLQRPMSMLTDVKHFLSSGGNVNEKNDEGVTLLHMACASGYKEVVSLILEHGGDLNIVDDQYWTPLHLAAKYGQTNLVKLLLMHQANPHLVNCNEEKASDIAASEFIEEMLLKAEIAWEEKMKEPLSASTLAQEEPYEEIIHDLPVLSSKLSPLVLPIAKQDSLLEKDIMFKDATKGLCKQQSQDSIPENPMMSGSTKPEQVKLMPPAPNDDLATLSELNDGSLLYEIQKRFGNNQIYTFIGDILLLVNPYKELPIYSSMVSQLYFSSSGKLCSSLPPHLFSCVERAFHQLFREQRPQCFILSGERGSGKSEASKQIIRHLTCRAGASRATLDSRFKHVVCILEAFGHAKTTLNDLSSCFIKYFELQFCERKQQLTGARIYTYLLEKSRLVSQPLGQSNFLIFYLLMDGLSAEEKYGLHLNNLCAHRYLNQTIQDDASTGERSLNREKLAVLKRALNVVGFSSLEVENLFVILAAILHLGDIRFTALNEGNSAFVSDLQLLEQVAGMLQVSTDELASALTTDIQYFKGDMIIRRHTIQIAEFFRDLLAKSLYSRLFSFLVNTMNSCLHSQDEQKSMQTLDIGILDIFGFEEFQKNEFEQLCVNMTNEKMHHYINEVLFLHEQVECVQEGVTMETAYSPGNQNGVLDFFFQKPSGFLTLLDEESQMIWSVESNFPKKLQSLLESSNTNAVYSPMKDGNGNVALKDHGTAFTIMHYAGRVMYDVVGAIEKNKDSLSQNLLFVMKTSENVVINHLFQSKLSQTGSLVSAYPSFKFRGHKSALLSKKMTASSIIGENKNYLELSKLLKKKGTSTFLQRLERGDPVTIASQLRKSLMDIIGKLQKCTPHFIHCIRPNNSKLPDTFDNFYVSAQLQYIGVLEMVKIFRYGYPVRLSFSDFLSRYKPLADTFLREKKEQSAAERCRLVLQQCKLQGWQMGVRKVFLKYWHADQLNDLCLQLQRKIITCQKVIRGFLARQHLLQRISIRQQEVTSINSFLQNTEDMGLKTYDALVIQNASDIARENDRLRSEMNAPYHKEKLEVRNMQEEGSKRTDDKSGPRHFHPSSMSVCAAVDGLGQCLVGPSIWSPSLHSVFSMDDSSSLPSPRKQPPPKPKRDPNTRLSASYEAVSACLSAAREAANEALARPRPHSDDYSTMKKIPPRKPKRSPNTKLSGSYEEISGSRPGDARPAGAPGAAARVLTPGTPQCALPPAAPPGDEDDSEPVYIEMLGHAARPDSPDPGESVYEEMKCCLPDDGGPGAGSFLLHGASPPLLHRAPEDEAAGPPGDACDIPPPFPNLLPHRPPLLVFPPTPVTCSPASDESPLTPLEVKKLPVLETNLKYPVQPEGSSPLSPQYSKSQKGDGDRPASPGLALFNGSGRASPPSTPPPPPPPPGPPPAPYRPCAHLAFPPEPAPVNAGKAGPSAEAPKVHPKPNSAPVAGPCSSFPKIPYSPVKATRADARKAGSSASPPAPYSPPSSRPLSSPLDELASLFNSGRSVLRKSAAGRKIREAEGFETNMNISSRDDPSTSEITSETQDRNANNHGIQLSNSLSSAITAENGNSISNGLPEEDGYSRLSISGTGTSTFQRHRDSHTTQVIHQLRLSENESVALQELLDWRRKLCEEGQDWQQILHHAEPRVPPPPPCKKPSLLKKPEGASCNRLPSELWDTTI

SEQ ID NO: 31970 - protein, 1858 aa, Homo sapiens; identical to SEQ ID NO: 31967
  REGION 1..1858: note = ENSP00000489329

SEQ ID NO: 31971 - protein, 1880 aa, Homo sapiens; identical to SEQ ID NO: 31969
  REGION 1..1880: note = ENSP00000488923

SEQ ID NO: 31972 - protein, 940 aa, Homo sapiens; identical to SEQ ID NO: 31966
  REGION 1..940: note = ENSP00000489279

SEQ ID NO: 31973 - protein, 1858 aa, Homo sapiens; identical to SEQ ID NO: 31967
  REGION 1..1858: note = ENSP00000488918

SEQ ID NO: 31974 - protein, 1006 aa, Homo sapiens
  REGION 1..1006: note = ENSP00000324527
MAEQESLEFGKADFVLMDTVSMPEFMANLRLRFEKGRIYTFIGEVVVSVNPYKLLNIYGRDTIEQYKGRELYERPPHLFAIADAAYKAMKRRSKDTCIVISGESGAGKTEASKYIMQYIAAITNPSQRAEVERVKNMLLKSNCVLEAFGNAKTNRNDNSSRFGKYMDINFDFKGDPIGGHINNYLLEKSRVIVQQPGERSFHSFYQLLQGGSEQMLRSLHLQKSLSSYNYIHVGAQLKSSINDAAEFRVVADAMKVIGFKPEEIQTVYKILAAILHLGNLKFVVDGDTPLIENGKVVSIIAELLSTKTDMVEKALLYRTVATGRDIIDKQHTEQEASYGRDAFAKAIYERLFCWIVTRINDIIEVKNYDTTIHGKNTVIGVLDIYGFEIFDNNSFEQFCINYCNEKLQQLFIQLVLKQEQEEYQREGIPWKHIDYFNNQIIVDLVEQQHKGIIAILDDACMNVGKVTDEMFLEALNSKLGKHAHFSSRKLCASDKILEFDRDFRIRHYAGDVVYSVIGFIDKNKDTLFQDFKRLMYNSSNPVLKNMWPEGKLSITEVTKRPLTAATLFKNSMIALVDNLASKEPYYVRCIKPNDKKSPQIFDDERCRHQVEYLGLLENVRVRRAGFAFRQTYEKFLHRYKMISEFTWPNHDLPSDKEAVKKLIERCGFQDDVAYGKTKIFIRTPRTLFTLEELRAQMLIRIVLFLQKVWRGTLARMRYKRTKAALTIIRYYRRYKVKSYIHEVARRFHGVKTMRDYGKHVKWPSPPKVLRRFEEALQTIFNRWRASQLIKSIPASDLPQVRAKVAAVEMLKGQRADLGLQRAWEGNYLASKPDTPQTSGTFVPVANELKRKDKYMNVLFSCHVRKVNRFSKVEDRAIFVTDRHLYKMDPTKQYKVMKTIPLYNLTGLSVSNGKDQLVVFHTKDNKDLIVCLFSKQPTHESRIGELVGVLVNHFKSEKRHLQVNVTNPVQCSLHGKKCTVSVETRLNQPQPDFTKNRSGFILSVPGN

SEQ ID NO: 31975 - protein, 918 aa, Homo sapiens
  REGION 1..918: note = ENSP00000464741
MKRRSKDTCIVISGESGAGKTEASKYIMQYIAAITNPSQRAEVERVKNMLLKSNCVLEAFGNAKTNRNDNSSRFGKYMDINFDFKGDPIGGHINNYLLEKSRVIVQQPGERSFHSFYQLLQGGSEQMLRSLHLQKSLSSYNYIHVGAQLKSSINDAAEFRVVADAMKVIGFKPEEIQTVYKILAAILHLGNLKFVVDGDTPLIENGKVVSIIAELLSTKTDMVEKALLYRTVATGRDIIDKQHTEQEASYGRDAFAKAIYERLFCWIVTRINDIIEVKNYDTTIHGKNTVIGVLDIYGFEIFDNNSFEQFCINYCNEKLQQLFIQLVLKQEQEEYQREGIPWKHIDYFNNQIIVDLVEQQHKGIIAILDDACMNVGKVTDEMFLEALNSKLGKHAHFSSRKLCASDKILEFDRDFRIRHYAGDVVYSVIGFIDKNKDTLFQDFKRLMYNSSNPVLKNMWPEGKLSITEVTKRPLTAATLFKNSMIALVDNLASKEPYYVRCIKPNDKKSPQIFDDERCRHQVEYLGLLENVRVRRAGFAFRQTYEKFLHRYKMISEFTWPNHDLPSDKEAVKKLIERCGFQDDVAYGKTKIFIRTPRTLFTLEELRAQMLIRIVLFLQKVWRGTLARMRYKRTKAALTIIRYYRRYKVKSYIHEVARRFHGVKTMRDYGKHVKWPSPPKVLRRFEEALQTIFNRWRASQLIKSIPASDLPQVRAKVAAVEMLKGQRADLGLQRAWEGNYLASKPDTPQTSGTFVPVANELKRKDKYMNVLFSCHVRKVNRFSKVEDRAIFVTDRHLYKMDPTKQYKVMKTIPLYNLTGLSVSNGKDQLVVFHTKDNKDLIVCLFSKQPTHESRIGELVGVLVNHFKSEKRHLQVNVTNPVQCSLHGKKCTVSVETRLNQPQPDFTKNRSGFILSVPGN

SEQ ID NO: 31976 - protein, 961 aa, Homo sapiens
  REGION 1..961: note = ENSP00000464305
MAEQESLEFGKADFVLMDTVSMPEFMANLRLRFEKGRIYTFIGEVVVSVNPYKLLNIYGRDTIEQYKGRELYERPPHLFAIADAAYKAMKRRSKDTCIVISGESGAGKTEASKYIMQYIAAITNPSQRAEVERVKNMLLKSNCVLEAFGNAKTNRNDNSSRFGKYMDINFDFKGDPIGGHINNYLLEKSRVIVQQPGERSFHSFYQLLQGGSEQMLRSLHLQKSLSSYNYIHVGAQLKSSINDAAEFRVVADAMKVIGFKPEEIQTVYKILAAILHLGNLKFVVDGDTPLIENGKVVSIIAELLSTKTDMVEKALLYRTVATGRDIIDKQHTEQEASYGRDAFAKAIYERLFCWIVTRINDIIEVKNYDTTIHGKNTVIGVLDIYGFEIFDNNSFEQFCINYCNEKLQQLFIQLVLKQEQEEYQREGIPWKHIDYFNNQIIVDLVEQQHKGIIAILDDACMNVGKVTDEMFLEALNSKLGKHAHFSSRKLCASDKILEFDRDFRIRHYAGDVVYSVIGFIDKNKDTLFQDFKRLMYNSSNPVLKNMWPEGKLSITEVTKRPLTAATLFKNSMIALVDNLASKEPYYVRCIKPNDKKSPQIFDDERCRHQVEYLGLLENVRVRRAGFAFRQTYEKFLHRYKMISEFTWPNHDLPSDKEAVKKLIERCGFQDDVAYGKTKIFIRTPRTLFTLEELRAQMLIRIVLFLQKVWRGTLARMRYKRTKAALTIIRYYRRYKVKSYIHEVARRFHGVKTMRDYGKHVKWPSPPKVLRRFEEALQTIFNRWRASQLIKSIPASDLPQVRAKVAAVEMLKGQRADLGLQRAWEGNYLASKPDTPQTSGTFVPVANELKRKDKYMNVLFSCHVRKVNRFSKVEDRAIFVTDRHLYKMDPTKQYKVMKTIPLYNLTGLSVSNGKDQLVVFHTKDNKDLIVCLFSKQPTHESRIGELVGVLVNHFKRNHLLIL

SEQ ID NO: 31977 - protein, 44 aa, Homo sapiens
  REGION 1..44: note = ENSP00000464346
KHAHFSSRKLCASDKILEFDRDFRIRHYAGDVVSSWNLLSYPQH

SEQ ID NO: 31978 - protein, 436 aa, Homo sapiens
  REGION 1..436: note = ENSP00000462055
MAEQESLEFGKADFVLMDTVSMPEFMANLRLRFEKGRIYTFIGEVVVSVNPYKLLNIYGRDTIEQYKGRELYERPPHLFAIADAAYKAMKRRSKDTCIVISGESGAGKTEASKYIMQYIAAITNPSQRAEVERVKNMLLKSNCVLEAFGNAKTNRNDNSSRFGKYMDINFDFKGDPIGGHINNYLLEKSRVIVQQPGERSFHSFYQLLQGGSEQMLRSLHLQKSLSSYNYIHVGAQLKSSINDAAEFRVVADAMKVIGFKPEEIQTVYKILAAILHLGNLKFVVDGDTPLIENGKVVSIIAELLSTKTDMVEKALLYRTVATGRDIIDKQHTEQEASYGRDAFAKAIYERLFCWIVTRINDIIEVKNYDTTIHGKNTVIGVLDIYGFEIFDNNSFEQFCINYCNEKLQQLFIQLVLKQEQEEYQREGIPWKHVGLL

SEQ ID NO: 31979 - protein, 2215 aa, Homo sapiens
  REGION 1..2215: note = ENSP00000386331
MVILQQGDHVWMDLRLGQEFDVPIGAVVKLCDSGQVQVVDDEDNEHWISPQNATHIKPMHPTSVHGVEDMIRLGDLNEAGILRNLLIRYRDHLIYTYTGSILVAVNPYQLLSIYSPEHIRQYTNKKIGEMPPHIFAIADNCYFNMKRNSRDQCCIISGESGAGKTESTKLILQFLAAISGQHSWIEQQVLEATPILEAFGNAKTIRNDNSSRFGKYIDIHFNKRGAIEGAKIEQYLLEKSRVCRQALDERNYHVFYCMLEGMSEDQKKKLGLGQASDYNYLAMGNCITCEGRVDSQEYANIRSAMKVLMFTDTENWEISKLLAAILHLGNLQYEARTFENLDACEVLFSPSLATAASLLEVNPPDLMSCLTSRTLITRGETVSTPLSREQALDVRDAFVKGIYGRLFVWIVDKINAAIYKPPSQDVKNSRRSIGLLDIFGFENFAVNSFEQLCINFANEHLQQFFVRHVFKLEQEEYDLESIDWLHIEFTDNQDALDMIANKPMNIISLIDEESKFPKGTDTTMLHKLNSQHKLNANYIPPKNNHETQFGINHFAGIVYYETQGFLEKNRDTLHGDIIQLVHSSRNKFIKQIFQADVAMGAETRKRSPTLSSQFKRSLELLMRTLGACQPFFVRCIKPNEFKKPMLFDRHLCVRQLRYSGMMETIRIRRAGYPIRYSFVEFVERYRVLLPGVKPAYKQGDLRGTCQRMAEAVLGTHDDWQIGKTKIFLKDHHDMLLEVERDKAITDRVILLQKVIRGFKDRSNFLKLKNAATLIQRHWRGHNCRKNYGLMRLGFLRLQALHRSRKLHQQYRLARQRIIQFQARCRAYLVRKAFRHRLWAVLTVQAYARGMIARRLHQRLRAEYLWRLEAEKMRLAEEEKLRKEMSAKKAKEEAERKHQERLAQLAREDAERELKEKEAARRKKELLEQMERARHEPVNHSDMVDKMFGFLGTSGGLPGQEGQAPSGFEDLERGRREMVEEDLDAALPLPDEDEEDLSEYKFAKFAATYFQGTTTHSYTRRPLKQPLLYHDDEGDQLAALAVWITILRFMGDLPEPKYHTAMSDGSEKIPVMTKIYETLGKKTYKRELQALQGEGEAQLPEGQKKSSVRHKLVHLTLKKKSKLTEEVTKRLHDGESTVQGNSMLEDRPTSNLEKLHFIIGNGILRPALRDEIYCQISKQLTHNPSKSSYARGWILVSLCVGCFAPSEKFVKYLRNFIHGGPPGYAPYCEERLRRTFVNGTRTQPPSWLELQATKSKKPIMLPVTFMDGTTKTLLTDSATTAKELCNALADKISLKDRFGFSLYIALFDKVSSLGSGSDHVMDAISQCEQYAKEQGAQERNAPWRLFFRKEVFTPWHSPSEDNVATNLIYQQVVRGVKFGEYRCEKEDDLAELASQQYFVDYGSEMILERLLNLVPTYIPDREITPLKTLEKWAQLAIAAHKKGIYAQRRTDAQKVKEDVVSYARFKWPLLFSRFYEAYKFSGPSLPKNDVIVAVNWTGVYFVDEQEQVLLELSFPEIMAVSSSRECRVWLSLGCSDLGCAAPHSGWAGLTPAGPCSPCWSCRGAKTTAPSFTLATIKGDEYTFTSSNAEDIRDLVVTFLEGLRKRSKYVVALQDNPNPAGEESGFLSFAKGDLIILDHDTGEQVMNSGWANGINERTKQRGDFPTDSVYVMPTVTMPPREIVALVTMTPDQRQDVVRLLQLRTAEPEVRAKPYTLEEFSYDYFRPPPKHTLSRVMVSKARGKDRLWSHTREPLKQALLKKLLGSEELSQEACLAFIAVLKYMGDYPSKRTRSVNELTDQIFEGPLKAEPLKDEAYVQILKQLTDNHIRYSEERGWELLWLCTGLFPPSNILLPHVQRFLQSRKHCPLAIDCLQRLQKALRNGSRKYPPHLVEVEAIQHKTTQIFHKVYFPDDTDEAFEVESSTKAKDFCQNIATRLLLKSSEGFSLFVKIADKVLSVPENDFFFDFVRHLTDWIKKARPIKDGIVPSLTYQVFFMKKLWTTTVPGKDPMADSIFHYYQELPKYLRGYHKCTREEVLQLGALIYRVKFEEDKSYFPSIPKLLRELVPQDLIRQVSPDDWKRSIVAYFNKHAGKSKEEAKLAFLKLIFKWPTFGSAFFEVKQTTEPNFPEILLIAINKYGVSLIDPKTKDILTTHPFTKISNWSSGNTYFHITIGNLVRGSKLLCETSLGYKMDDLLTSYISQMLTAMSKQRGSRSGK

SEQ ID NO: 31980 - protein, 1178 aa, Homo sapiens
  REGION 1..1178: note = ENSP00000386689
MVILQQGDHVWMDLRLGQEFDVPIGAVVKLCDSGQVQVVDDEDNEHWISPQNATHIKPMHPTSVHGVEDMIRLGDLNEAGILRNLLIRYRDHLIYTYTGSILVAVNPYQLLSIYSPEHIRQYTNKKIGEMPPHIFAIADNCYFNMKRNSRDQCCIISGESGAGKTESTKLILQFLAAISGQHSWIEQQVLEATPILEAFGNAKTIRNDNSSRFGKYIDIHFNKRGAIEGAKIEQYLLEKSRVCRQALDERNYHVFYCMLEGMSEDQKKKLGLGQASDYNYLAMGNCITCEGRVDSQEYANIRSAMKVLMFTDTENWEISKLLAAILHLGNLQYEARTFENLDACEVLFSPSLATAASLLEVNPPDLMSCLTSRTLITRGETVSTPLSREQALDVRDAFVKGIYGRLFVWIVDKINAAIYKPPSQDVKNSRRSIGLLDIFGFENFAVNSFEQLCINFANEHLQQFFVRHVFKLEQEEYDLESIDWLHIEFTDNQDALDMIANKPMNIISLIDEESKFPKGTDTTMLHKLNSQHKLNANYIPPKNNHETQFGINHFAGIVYYETQGFLEKNRDTLHGDIIQLVHSSRNKFIKQIFQADVAMGAETRKRSPTLSSQFKRSLELLMRTLGACQPFFVRCIKPNEFKKPMLFDRHLCVRQLRYSGMMETIRIRRAGYPIRYSFVEFVERYRVLLPGVKPAYKQGDLRGTCQRMAEAVLGTHDDWQIGKTKIFLKDHHDMLLEVERDKAITDRVILLQKVIRGFKDRSNFLKLKNAATLIQRHWRGHNCRKNYGLMRLGFLRLQALHRSRKLHQQYRLARQRIIQFQARCRAYLVRKAFRHRLWAVLTVQAYARGMIARRLHQRLRAEYLWRLEAEKMRLAEEEKLRKEMSAKKAKEEAERKHQERLAQLAREDAERELKEKEAARRKKELLEQMERARHEPVNHSDMVDKMFGFLGTSGGLPGQEGQAPSGFEDLERGRREMVEEDLDAALPLPDEDEEDLSEYKFAKFAATYFQGTTTHSYTRRPLKQPLLYHDDEGDQLAALAVWITILRFMGDLPEPKYHTAMSDGSEKIPVMTKIYETLGKKTYKRELQALQGEGEAQLPEGQKKSSVRHKLVHLTLKKKSKLTEEVTKRLHDGESTVQGNSMLEDRPTSNLEKLHFIIGNGILRPALRSVPGGGDTRA

SEQ ID NO: 31981 - protein, 2175 aa, Homo sapiens
  REGION 1..2175: note = ENSP00000392185
MVILQQGDHVWMDLRLGQEFDVPIGAVVKLCDSGQVQVVDDEDNEHWISPQNATHIKPMHPTSVHGVEDMIRLGDLNEAGILRNLLIRYRDHLIYTYTGSILVAVNPYQLLSIYSPEHIRQYTNKKIGEMPPHIFAIADNCYFNMKRNSRDQCCIISGESGAGKTESTKLILQFLAAISGQHSWIEQQVLEATPILEAFGNAKTIRNDNSSRFGKYIDIHFNKRGAIEGAKIEQYLLEKSRVCRQALDERNYHVFYCMLEGMSEDQKKKLGLGQASDYNYLAMGNCITCEGRVDSQEYANIRSAMKVLMFTDTENWEISKLLAAILHLGNLQYEARTFENLDACEVLFSPSLATAASLLEVNPPDLMSCLTSRTLITRGETVSTPLSREQALDVRDAFVKGIYGRLFVWIVDKINAAIYKPPSQDVKNSRRSIGLLDIFGFENFAVNSFEQLCINFANEHLQQFFVRHVFKLEQEEYDLESIDWLHIEFTDNQDALDMIANKPMNIISLIDEESKFPKGTDTTMLHKLNSQHKLNANYIPPKNNHETQFGINHFAGIVYYETQGFLEKNRDTLHGDIIQLVHSSRNKFIKQIFQADVAMGAETRKRSPTLSSQFKRSLELLMRTLGACQPFFVRCIKPNEFKKPMLFDRHLCVRQLRYSGMMETIRIRRAGYPIRYSFVEFVERYRVLLPGVKPAYKQGDLRGTCQRMAEAVLGTHDDWQIGKTKIFLKDHHDMLLEVERDKAITDRVILLQKVIRGFKDRSNFLKLKNAATLIQRHWRGHNCRKNYGLMRLGFLRLQALHRSRKLHQQYRLARQRIIQFQARCRAYLVRKAFRHRLWAVLTVQAYARGMIARRLHQRLRAEYLWRLEAEKMRLAEEEKLRKEMSAKKAKEEAERKHQERLAQLAREDAERELKEKEAARRKKELLEQMERARHEPVNHSDMVDKMFGFLGTSGGLPGQEGQAPSGFEDLERGRREMVEEDLDAALPLPDEDEEDLSEYKFAKFAATYFQGTTTHSYTRRPLKQPLLYHDDEGDQLAALAVWITILRFMGDLPEPKYHTAMSDGSEKIPVMTKIYETLGKKTYKRELQALQGEGEAQLPEGQKKSSVRHKLVHLTLKKKSKLTEEVTKRLHDGESTVQGNSMLEDRPTSNLEKLHFIIGNGILRPALRDEIYCQISKQLTHNPSKSSYARGWILVSLCVGCFAPSEKFVKYLRNFIHGGPPGYAPYCEERLRRTFVNGTRTQPPSWLELQATKSKKPIMLPVTFMDGTTKTLLTDSATTAKELCNALADKISLKDRFGFSLYIALFDKVSSLGSGSDHVMDAISQCEQYAKEQGAQERNAPWRLFFRKEVFTPWHSPSEDNVATNLIYQQVVRGVKFGEYRCEKEDDLAELASQQYFVDYGSEMILERLLNLVPTYIPDREITPLKTLEKWAQLAIAAHKKGIYAQRRTDAQKVKEDVVSYARFKWPLLFSRFYEAYKFSGPSLPKNDVIVAVNWTGVYFVDEQEQVLLELSFPEIMAVSSSRGAKTTAPSFTLATIKGDEYTFTSSNAEDIRDLVVTFLEGLRKRSKYVVALQDNPNPAGEESGFLSFAKGDLIILDHDTGEQVMNSGWANGINERTKQRGDFPTDSVYVMPTVTMPPREIVALVTMTPDQRQDVVRLLQLRTAEPEVRAKPYTLEEFSYDYFRPPPKHTLSRVMVSKARGKDRLWSHTREPLKQALLKKLLGSEELSQEACLAFIAVLKYMGDYPSKRTRSVNELTDQIFEGPLKAEPLKDEAYVQILKQLTDNHIRYSEERGWELLWLCTGLFPPSNILLPHVQRFLQSRKHCPLAIDCLQRLQKALRNGSRKYPPHLVEVEAIQHKTTQIFHKVYFPDDTDEAFEVESSTKAKDFCQNIATRLLLKSSEGFSLFVKIADKVLSVPENDFFFDFVRHLTDWIKKARPIKDGIVPSLTYQVFFMKKLWTTTVPGKDPMADSIFHYYQELPKYLRGYHKCTREEVLQLGALIYRVKFEEDKSYFPSIPKLLRELVPQDLIRQVSPDDWKRSIVAYFNKHAGKSKEEAKLAFLKLIFKWPTFGSAFFEQTTEPNFPEILLIAINKYGVSLIDPKTKDILTTHPFTKISNWSSGNTYFHITIGNLVRGSKLLCETSLGYKMDDLLTSYISQMLTAMSKQRGSRSGK

SEQ ID NO: 31982 - protein, 2166 aa, Homo sapiens
  REGION 1..2166: note = ENSP00000386635
MDLRLGQEFDVPIGAVVKLCDSGQVQVVDDEDNEHWISPQNATHIKPMHPTSVHGVEDMIRLGDLNEAGILRNLLIRYRDHLIYTYTGSILVAVNPYQLLSIYSPEHIRQYTNKKIGEMPPHIFAIADNCYFNMKRNSRDQCCIISGESGAGKTESTKLILQFLAAISGQHSWIEQQVLEATPILEAFGNAKTIRNDNSSRFGKYIDIHFNKRGAIEGAKIEQYLLEKSRVCRQALDERNYHVFYCMLEGMSEDQKKKLGLGQASDYNYLAMGNCITCEGRVDSQEYANIRSAMKVLMFTDTENWEISKLLAAILHLGNLQYEARTFENLDACEVLFSPSLATAASLLEVNPPDLMSCLTSRTLITRGETVSTPLSREQALDVRDAFVKGIYGRLFVWIVDKINAAIYKPPSQDVKNSRRSIGLLDIFGFENFAVNSFEQLCINFANEHLQQFFVRHVFKLEQEEYDLESIDWLHIEFTDNQDALDMIANKPMNIISLIDEESKFPKGTDTTMLHKLNSQHKLNANYIPPKNNHETQFGINHFAGIVYYETQGFLEKNRDTLHGDIIQLVHSSRNKFIKQIFQADVAMGAETRKRSPTLSSQFKRSLELLMRTLGACQPFFVRCIKPNEFKKPMLFDRHLCVRQLRYSGMMETIRIRRAGYPIRYSFVEFVERYRVLLPGVKPAYKQGDLRGTCQRMAEAVLGTHDDWQIGKTKIFLKDHHDMLLEVERDKAITDRVILLQKVIRGFKDRSNFLKLKNAATLIQRHWRGHNCRKNYGLMRLGFLRLQALHRSRKLHQQYRLARQRIIQFQARCRAYLVRKAFRHRLWAVLTVQAYARGMIARRLHQRLRAEYLWRLEAEKMRLAEEEKLRKEMSAKKAKEEAERKHQERLAQLAREDAERELKEKEAARRKKELLEQMERARHEPVNHSDMVDKMFGFLGTSGGLPGQEGQAPSGFEDLERGRREMVEEDLDAALPLPDEDEEDLSEYKFAKFAATYFQGTTTHSYTRRPLKQPLLYHDDEGDQLAALAVWITILRFMGDLPEPKYHTAMSDGSEKIPVMTKIYETLGKKTYKRELQALQGEGEAQLPEGQKKSSVRHKLVHLTLKKKSKLTEEVTKRLHDGESTVQGNSMLEDRPTSNLEKLHFIIGNGILRPALRDEIYCQISKQLTHNPSKSSYARGWILVSLCVGCFAPSEKFVKYLRNFIHGGPPGYAPYCEERLRRTFVNGTRTQPPSWLELQATKSKKPIMLPVTFMDGTTKTLLTDSATTAKELCNALADKISLKDRFGFSLYIALFDKVSSLGSGSDHVMDAISQCEQYAKEQGAQERNAPWRLFFRKEVFTPWHSPSEDNVATNLIYQQVVRGVKFGEYRCEKEDDLAELASQQYFVDYGSEMILERLLNLVPTYIPDREITPLKTLEKWAQLAIAAHKKGIYAQRRTDAQKVKEDVVSYARFKWPLLFSRFYEAYKFSGPSLPKNDVIVAVNWTGVYFVDEQEQVLLELSFPEIMAVSSSRGAKTTAPSFTLATIKGDEYTFTSSNAEDIRDLVVTFLEGLRKRSKYVVALQDNPNPAGEESGFLSFAKGDLIILDHDTGEQVMNSGWANGINERTKQRGDFPTDSVYVMPTVTMPPREIVALVTMTPDQRQDVVRLLQLRTAEPEVRAKPYTLEEFSYDYFRPPPKHTLSRVMVSKARGKDRLWSHTREPLKQALLKKLLGSEELSQEACLAFIAVLKYMGDYPSKRTRSVNELTDQIFEGPLKAEPLKDEAYVQILKQLTDNHIRYSEERGWELLWLCTGLFPPSNILLPHVQRFLQSRKHCPLAIDCLQRLQKALRNGSRKYPPHLVEVEAIQHKTTQIFHKVYFPDDTDEAFEVESSTKAKDFCQNIATRLLLKSSEGFSLFVKIADKVLSVPENDFFFDFVRHLTDWIKKARPIKDGIVPSLTYQVFFMKKLWTTTVPGKDPMADSIFHYYQELPKYLRGYHKCTREEVLQLGALIYRVKFEEDKSYFPSIPKLLRELVPQDLIRQVSPDDWKRSIVAYFNKHAGKSKEEAKLAFLKLIFKWPTFGSAFFEVKQTTEPNFPEILLIAINKYGVSLIDPKTKDILTTHPFTKISNWSSGNTYFHITIGNLVRGSKLLCETSLGYKMDDLLTSYISQMLTAMSKQRGSRSGK

SEQ ID NO: 31983 - protein, 1357 aa, Homo sapiens
  REGION 1..1357: note = ENSP00000417017
FQARCRAYLVRKAFRHRLWAVLTVQAYARGMIARRLHQRLRAEYLWRLEAEKMRLAEEEKLRKEMSAKKAKEEAERKHQERLAQLAREDAERELKEKEAARRKKELLEQMERARHEPVNHSDMVDKMFGFLGTSGGLPGQEGQAPSGFEDLERGRREMVEEDLDAALPLPDEDEEDLSEYKFAKFAATYFQGTTTHSYTRRPLKQPLLYHDDEGDQLAALAVWITILRFMGDLPEPKYHTAMSDGSEKIPVMTKIYETLGKKTYKRELQALQGEGEAQLPEGQKKSSVRHKLVHLTLKKKSKLTEEVTKRLHDGESTVQGNSMLEDRPTSNLEKLHFIIGNGILRPALRDEIYCQISKQLTHNPSKSSYARGWILVSLCVGCFAPSEKFVKYLRNFIHGGPPGYAPYCEERLRRTFVNGTRTQPPSWLELQATKSKKPIMLPVTFMDGTTKTLLTDSATTAKELCNALADKISLKDRFGFSLYIALFDKVSSLGSGSDHVMDAISQCEQYAKEQGAQERNAPWRLFFRKEVFTPWHSPSEDNVATNLIYQQVVRGVKFGEYRCEKEDDLAELASQQYFVDYGSEMILERLLNLVPTYIPDREITPLKTLEKWAQLAIAAHKKGIYAQRRTDAQKVKEDVVSYARFKWPLLFSRFYEAYKFSGPSLPKNDVIVAVNWTGVYFVDEQEQVLLELSFPEIMAVSSSRGAKTTAPSFTLATIKGDEYTFTSSNAEDIRDLVVTFLEGLRKRSKYVVALQDNPNPGEESGFLSFAKGDLIILDHDTGEQVMNSGWANGINERTKQRGDFPTDSVYVMPTVTMPPREIVALVTMTPDQRQDVVRLLQLRTAEPEVRAKPYTLEEFSYDYFRPPPKHTLSRVMVSKARGKDRLWSHTREPLKQALLKKLLGSEELSQEACLAFIAVLKYMGDYPSKRTRSVNELTDQIFEGPLKAEPLKDEAYVQILKQLTDNHIRYSEERGWELLWLCTGLFPPSNILLPHVQRFLQSRKHCPLAIDCLQRLQKALRNGSRKYPPHLVEVEAIQHKTTQIFHKVYFPDDTDEAFEVESSTKAKDFCQNIATRLLLKSSEGFSLFVKIADKVLSVPENDFFFDFVRHLTDWIKKARPIKDGIVPSLTYQVFFMKKLWTTTVPGKDPMADSIFHYYQELPKYLRGYHKCTREEVLQLGALIYRVKFEEDKSYFPSIPKLLRELVPQDLIRQVSPDDWKRSIVAYFNKHAGKSKEEAKLAFLKLIFKWPTFGSAFFEVKQTTEPNFPEILLIAINKYGVSLIDPKTKDILTTHPFTKISNWSSGNTYFHITIGNLVRGSKLLCETSLGYKMDDLLTSYISQMLTAMSKQRGSRSGK

SEQ ID NO: 31984 - protein, 1198 aa, Homo sapiens
  REGION 1..1198: note = ENSP00000477640
MVILQQGDHVWMDLRLGQEFDVPIGAVVKLCDSGQVQVVDDEDNEHWISPQNATHIKPMHPTSVHGVEDMIRLGDLNEAGILRNLLIRYRDHLIYTYTGSILVAVNPYQLLSIYSPEHIRQYTNKKIGEMPPHIFAIADNCYFNMKRNSRDQCCIISGESGAGKTESTKLILQFLAAISGQHSWIEQQVLEATPILEAFGNAKTIRNDNSSRFGKYIDIHFNKRGAIEGAKIEQYLLEKSRVCRQALDERNYHVFYCMLEGMSEDQKKKLGLGQASDYNYLAMGNCITCEGRVDSQEYANIRSAMKVLMFTDTENWEISKLLAAILHLGNLQYEARTFENLDACEVLFSPSLATAASLLEVNPPDLMSCLTSRTLITRGETVSTPLSREQALDVRDAFVKGIYGRLFVWIVDKINAAIYKPPSQDVKNSRRSIGLLDIFGFENFAVNSFEQLCINFANEHLQQFFVRHVFKLEQEEYDLESIDWLHIEFTDNQDALDMIANKPMNIISLIDEESKFPKGTDTTMLHKLNSQHKLNANYIPPKNNHETQFGINHFAGIVYYETQGFLEKNRDTLHGDIIQLVHSSRNKFIKQIFQADVAMGAETRKRSPTLSSQFKRSLELLMRTLGACQPFFVRCIKPNEFKKPMLFDRHLCVRQLRYSGMMETIRIRRAGYPIRYSFVEFVERYRVLLPGVKPAYKQGDLRGTCQRMAEAVLGTHDDWQIGKTKIFLKDHHDMLLEVERDKAITDRVILLQKVIRGFKDRSNFLKLKNAATLIQRHWRGHNCRKNYGLMRLGFLRLQALHRSRKLHQQYRLARQRIIQFQARCRAYLVRKAFRHRLWAVLTVQAYARGMIARRLHQRLRAEYLWRLEAEKMRLAEEEKLRKEMSAKKAKEEAERKHQERLAQLAREDAERELKEKEAARRKKELLEQMERARHEPVNHSDMVDKMFGFLGTSGGLPGQEGQAPSGFEDLERGRREMVEEDLDAALPLPDEDEEDLSEYKFAKFAATYFQGTTTHSYTRRPLKQPLLYHDDEGDQLAALAVWITILRFMGDLPEPKYHTAMSDGSEKIPVMTKIYETLGKKTYKRELQALQGEGEVLQAQLPEGQKKSSVRHKLVHLTLKKKSKLTEEVTKRLHDGESTVQGNSMLEDRPTSNLEKLHFIIGNGILRTPGPESLLVAEWCLCQPSKRLSRPGFGFAAS

SEQ ID NO: 31985 - protein, 498 aa, Homo sapiens
  REGION 1..498: note = ENSP00000239926
MFNYERPKHFIQSQNPCGSRLQPPGPETSSFSSQTKQSSIIIQPRQCTEQRFSASSTLSSHITMSSSAFPASPQQHAGSNPGQRVTTTYNQSPASFLSSILPSQPDYNSSKIPSAMDSNYQQSSAGQPINAKPSQTANAKPIPRTPDHEIQGSKEALIQDLERKLKCKDTLLHNGNQRLTYEEKMARRLLGPQNAAAVFQAQDDSGAQDSQQHNSEHARLQVPTSQVRSRSTSRGDVNDQDAIQEKFYPPRFIQVPENMSIDEGRFCRMDFKVSGLPAPDVSWYLNGRTVQSDDLHKMIVSEKGLHSLIFEVVRASDAGAYACVAKNRAGEATFTVQLDVLAKEHKRAPMFIYKPQSKKVLEGDSVKLECQISAIPPPKLFWKRNNEMVQFNTDRISLYQDNTGRVTLLIKDVNKKDAGWYTVSAVNEAGVTTCNTRLDVTARPNQTLPAPKQLRVRPTFSKYLALNGKGLNVKQAFNPEGEFQRLAAQSGLYESEEL

SEQ ID NO: 31986 - protein, 314 aa, Homo sapiens
  REGION 1..314: note = ENSP00000391185
MARRLLGPQNAAAVFQAQDDSGAQDSQQHNSEHARLQVPTSQVRSRSTSRGDVNDQDAIQEKFYPPRFIQVPENMSIDEGRFCRMDFKVSGLPAPDVSWYLNGRTVQSDDLHKMIVSEKGLHSLIFEVVRASDAGAYACVAKNRAGEATFTVQLDVLAKEHKRAPMFIYKPQSKKVLEGDSVKLECQISAIPPPKLFWKRNNEMVQFNTDRISLYQDNTGRVTLLIKDVNKKDAGWYTVSAVNEAGVTTCNTRLDVTARPNQTLPAPKQLRVRPTFSKYLALNGKGLNVKQAFNPEGEFQRLAAQSGLYESEEL

SEQ ID NO: 31987 - protein, 383 aa, Homo sapiens
  REGION 1..383: note = ENSP00000426281
MDSNYQQSSAGQPINAKPSQTANAKPIPRTPDHEIQGSKEALIQDLERKLKCKDTLLHNGNQRLTYEEKMARRLLGPQNAAAVFQAQDDSGAQDSQQHNSEHARLQVPTSQVRSRSTSRGDVNDQDAIQEKFYPPRFIQVPENMSIDEGRFCRMDFKVSGLPAPDVSWYLNGRTVQSDDLHKMIVSEKGLHSLIFEVVRASDAGAYACVAKNRAGEATFTVQLDVLAKEHKRAPMFIYKPQSKKVLEGDSVKLECQISAIPPPKLFWKRNNEMVQFNTDRISLYQDNTGRVTLLIKDVNKKDAGWYTVSAVNEAGVTTCNTRLDVTARPNQTLPAPKQLRVRPTFSKYLALNGKGLNVKQAFNPEGEFQRLAAQSGLYESEEL

SEQ ID NO: 31988 - protein, 1151 aa, Homo sapiens
  REGION 1..1151: note = ENSP00000278836
MEVVDETEALQRFFEGHDINGALEPSNIDTSILEEYISKEDASDLCFPDISAPASSASYSHGQPAMPGSSGVHHLSPPGGGPSPGRHGPLPPPGYGTPLNCNNNNGMGAAPKPFPGGTGPPIKAEPKAPYAPGTLPDSPPDSGSEAYSPQQVNEPHLLRTITPETLCHVGVPSRLEHPPPPPAHLPGPPPPPPPPPHYPVLQRDLYMKAEPPIPHYAAMGQGLVPTDLHHTQQSQMLHQLLQQHGAELPTHPSKKRKHSESPPSTLNAQMLNGMIKQEPGTVTALPLHPTRAPSPPWPPQGPLSPGPGSLPLSIARVQTPPWHPPGAPSPGLLQDSDSLSGSYLDPNYQSIKWQPHQQNKWATLYDANYKELPMLTYRVDADKGFNFSVGDDAFVCQKKNHFQVTVYIGMLGEPKYVKTPEGLKPLDCFYLKLHGVKLEALNQSINIEQSQSDRSKRPFNPVTVNLPPEQVTKVTVGRLHFSETTANNMRKKGKPNPDQRYFMLVVALQAHAQNQNYTLAAQISERIIVRASNPGQFESDSDVLWQRAQVPDTVFHHGRVGINTDRPDEALVVHGNVKVMGSLMHPSDLRAKEHVQEVDTTEQLKRISRMRLVHYRYKPEFAASAGIEATAPETGVIAQEVKEILPEAVKDTGDMVFANGKTIENFLVVNKERIFMENVGAVKELCKLTDNLETRIDELERWSHKLAKLRRLDSLKSTGSSGAFSHAGSQFSRAGSVPHKKRPPKVASKSSSVVPDQACISQRFLQGTIIALVVVMAFSVVSMSTLYVLSLRTEEDLVDTDGSFAVSTSCLLALLRPQPPGGSEALCPWSSQSFGTTQLRQSPLTTGLPGIQPSLLLVTTSLTSSAPGSAVRTLDMCSSHPCPVICCSSPTTNPTTGPSLGPSFNPGHVLSPSPSPSTNRSGPSQMALLPVTNIRAKSWGLSVNGIGHSKHHKSLEPLASPAVPFPGGQGKAKNSPSLGFHGRARRGALQSSVGPAEPTWAQGQSASLLAEPVPSLTSIQVLENSMSITSQYCAPGDACRPGNFTYHIPVSSGTPLHLSLTLQMNSSSPVSVVLCSLRSKEEPCEEGSLPQSLHTHQDTQGTSHRWPITILSFREFTYHFRVALLGQANCSSEALAQPATDYHFHFYRLCD

SEQ ID NO: 31989 - protein, 1111 aa, Homo sapiens
  REGION 1..1111: note = ENSP00000265460
MHWLPAGHDINGALEPSNIDTSILEEYISKEDASDLCFPDISAPASSASYSHGQPAMPGSSGVHHLSPPGGGPSPGRHGPLPPPGYGTPLNCNNNNGMGAAPKPFPGGTGPPIKAEPKAPYAPGTLPDSPPDSGSEAYSPQQVNEPHLLRTITPETLCHVGVPSRLEHPPPPPAHLPGPPPPPPPPPHYPVLQRDLYMKAEPPIPHYAAMGQGLVPTDLHHTQQSQMLHQLLQQHGAELPTHPSKKRKHSESPPSTLNAQMLNGMIKQEPGTVTALPLHPTRAPSPPWPPQGPLSPGPGSLPLSIARVQTPPWHPPGAPSPGLLQDSDSLSGSYLDPNYQSIKWQPHQQNKWATLYDANYKELPMLTYRVDADKGFNFSVGDDAFVCQKKNHFQVTVYIGMLGEPKYVKTPEGLKPLDCFYLKLHGVKLEALNQSINIEQSQSDRSKRPFNPVTVNLPPEQVTKVTVGRLHFSETTANNMRKKGKPNPDQRYFMLVVALQAHAQNQNYTLAAQISERIIVRASNPGQFESDSDVLWQRAQVPDTVFHHGRVGINTDRPDEALVVHGNVKVMGSLMHPSDLRAKEHVQEVDTTEQLKRISRMRLVHYRYKPEFAASAGIEATAPETGVIAQEVKEILPEAVKDTGDMVFANGKTIENFLVVNKERIFMENVGAVKELCKLTDNLETRIDELERWSHKLAKLRRLDSLKSTGSSGAFSHAGSQFSRAGSVPHKKRPPKVASKSSSVVPDQACISQRFLQGTIIALVVVMAFSVVSMSTLYVLSLRTEEDLVDTDGRSSQSFGTTQLRQSPLTTGLPGIQPSLLLVTTSLTSSAPGSAVRTLDMCSSHPCPVICCSSPTTNPTTGPSLGPSFNPGHVLSPSPSPSTNRSGPSQMALLPVTNIRAKSWGLSVNGIGHSKHHKSLEPLASPAVPFPGGQGKAKNSPSLGFHGRARRGALQSSVGPAEPTWAQGQSEPVPSLTSIQVLENSMSITSQYCAPGDACRPGNFTYHIPVSSGTPLHLSLTLQMNSSSPVSVVLCSLRSKEEPCEEGSLPQSLHTHQDTQGTSHRWPITILSFREFTYHFRVALLGQANCSSEALAQPATDYHFHFYRLCD

SEQ ID NO: 31990 - protein, 537 aa, Homo sapiens
  REGION 1..537: note = ENSP00000374253
MRLVHYRYKPEFAASAGIEATAPETGVIAQEVKEILPEAVKDTGDMVFANGKTIENFLVVNKERIFMENVGAVKELCKLTDNLETRIDELERWSHKLAKLRRLDSLKSTGSSGAFSHAGSQFSRAGSVPHKKRPPKVASKSSSVVPDQACISQRFLQGTIIALVVVMAFSVVSMSTLYVLSLRTEEDLVDTDGSFAVSTSCLLALLRPQPPGGSEALCPWSSQSFGTTQLRQSPLTTGLPGIQPSLLLVTTSLTSSAPGSAVRTLDMCSSHPCPVICCSSPTTNPTTGPSLGPSFNPGHVLSPSPSPSTNRSGPSQMALLPVTNIRAKSWGLSVNGIGHSKHHKSLEPLASPAVPFPGGQGKAKNSPSLGFHGRARRGALQSSVGPAEPTWAQGQSEPVPSLTSIQVLENSMSITSQYCAPGDACRPGNFTYHIPVSSGTPLHLSLTLQMNSSSPVSVVLCSLRSKEEPCEEGSLPQSLHTHQDTQGTSHRWPITILSFREFTYHFRVALLGQANCSSEALAQPATDYHFHFYRLCD

SEQ ID NO: 31991 - protein, 859 aa, Homo sapiens
  REGION 1..859: note = ENSP00000398665
MGRKLDLSGLTDDETEHVLQVVQRDFNLRKKEEERLSELKQKLDEEGSKCSILSKHQQFVEHCCMRCCSPFTFLVNTKRQCGDCKFNVCKSCCSYQKHEKAWVCCVCQQARLLRAQSLEWFYNNVKSRFKRFGSAKVLKNLYRKHRLESGACFDILGGSLFESNLENEGSISGSDSTFYRQSEGHSVMDTLAVALRVAEEAIEEAISKAEAYGDSLDKQNEASYLRDHKEELTEELATTILQKIIRKQKSKSEQQVEEEPGWPHPQSCSTKVADEGTSASPGGYRAPAALWRSQSAFSITGEEALKTPPVEAPSRQPRDQGQHPRAESALPSWKSVDRLDETNLAPVLQSPDGNWVALKDGAPPPTRLLAKPKSGTFQALEVASSVASAYDEMGSDSEEDFDWSEALSKLCPRSRALPRNPQPQPTQAQSSDQGPIAASPSSALSPNPEAMCSDSETSSAGSSREVGHQARLSWLQRKAPRNPAAEKMRLHGELDVNFNPQLASRETSDSSEPEEAPHTTDRRARRWRRARLGSEEPSKEPSSPSAQLRDLDTHQVSDDLSETDISNEARDPQTLTDTTEEKRRNRLYELAMKMSEKETSSGEDQESEPKTESENQKESLSSEDNSQSVQEELKKKFSAVSLCNISTEVLKVINATEELIAGSTGPWESPQVPPDRQKGMFPRGTDQVRLDEQLTSLEENVYLAAGTVYGLETQLTELEDAARCIHSGTDETHLADLEDQVATAAAQVHHAELQISDIESRISALTIAGLNIAPCVRFTRRRDQKQRTQVQTIDTSRQQRRKLPAPPVKAEKIETSSVTTIKTFNHNFILQGSSTNRTKERKGTTKDLMEPALESAVMY

SEQ ID NO: 31992 - protein, 859 aa, Homo sapiens; identical to SEQ ID NO: 31991
  REGION 1..859: note = ENSP00000301972

SEQ ID NO: 31993 - protein, 794 aa, Homo sapiens
  REGION 1..794: note = ENSP00000389323
MGRKLDLSGLTDDETEHVLQVVQRDFNLRKKEEERLSELKQKLDEEGSKCSILSKHQQFVEHCCMRCCSPFTFLVNTKRQCGDCKFNVCKSCCSYQKHEKAWVCCVCQQARLLRAQSLEWFYNNVKSRFKRFGSAKVLKNLYRKHRLESGACFDILGGSLFESNLENEGSISGSDSTFYRQSEGHSVMDTLAVALRVAEEAIEEAISKAEAYGDSLDKQNEASYLRDHKEELTEELATTILQKIIRKQKSKSEQQVEEEPGWPHPQSCSTKVADEGTSASPGGYRAPAALWRSQSAFSITGEEALKTPPVEAPSRQPRDQGQHPRAESALPSWKSVDRLDETNLAPVLQSPDGNWVALKDGAPPPTRLLAKPKSGTFQALEVASSVASAYDEMGSDSEEDFDWSEALSKLCPRSRALPRNPQPQPTQAQSSDQGPIAASPSSALSPNPEAMCSDSETSSAGSSREVGHQARLSWLQRKAPRNPAAEKMRLHGELDVNFNPQLASRETSDSSEPEEAPHTTDRRARRWRRARLGSEEPSKEPSSPSAQLRDLDTHQVSDDLSETDISNEARDPQTLTDTTEEKRRNRLYELAMKMSEKETSSGEDQESEPKTESENQKESLSSEDNSQSVQEELKKVYLAAGTVYGLETQLTELEDAARCIHSGTDETHLADLEDQVATAAAQVHHAELQISDIESRISALTIAGLNIAPCVRFTRRRDQKQRTQVQTIDTSRQQRRKLPAPPVKAEKIETSSVTTIKTFNHNFILQGSSTNRTKERKGTTKDLMEPALESAVMY

SEQ ID NO: 31994 - protein, 115 aa, Homo sapiens
  REGION 1..115: note = ENSP00000400916
MGRKLDLSGLTDDETEHVLQVVQRDFNLRKKEEERLSELKQKLDEEGSKCSILSKHQQFVEHCCMRCCSPFTFLVNTKRQCGDCKFNVCKSCCSYQKHEKAWVCCVCQQARRKPF

SEQ ID NO: 31995 - protein, 637 aa, Homo sapiens
  REGION 1..637: note = ENSP00000413392
MGRKLDLSGLTDDETEHVLQVVQRDFNLRKKEEERLSELKQKLDEEGSKCSILSKHQQFVEHCCMRCCSPFTFLVNTKRQCGDCKFNVCKSCCSYQKHEKAWVCCVCQQARLLRAQSLEWFYNNVKSRFKRFGSAKVLKNLYRKHRLESGACFDILGGSLFESNLENEGSISGSDSTFYRQSEGHSVMDTLAVALRVAEEAIEEAISKAEAYGDSLDKQNEASYLRDHKEELTEELATTILQKIIRKQKSKSEQQVEEEPGWPHPQSCSTKVADEGTSASPGGYRAPAALWRSQSAFSITGEEALKTPPVEAPSRQPRDQGQHPRAESALPSWKSVDRLDETNLAPVLQSPDGNWVALKDGAPPPTRLLAKPKSGTFQALEVASSVASAYDEMGSDSEEDFDWSEALSKLCPRSRALPRNPQPQPTQAQSSDQGPIAASPSSALSPNPEAMCSDSETSSAGSSREVGHQARLSWLQRKAPRNPAAEKMRLHGELDVNFNPQLASRETSDSSEPEEAPHTTDRRARRWRRARLGSEEPSKEPSSPSAQLRDLDTHQVSDDLSETDISNEARDPQTLTDTTEEKRRNRLYELAMKMSEKETSSGEDQESEPKTESENQKESLSSEDNSQSVQEELKKKS

SEQ ID NO: 31996 - protein, 770 aa, Homo sapiens
  REGION 1..770: note = ENSP00000379519
MRKAASAASSRSTSSLWSTAACAAARPSPSSSTPSASVEIANSMSARAAAPTRSTKRPGSAASASKRGGSLFESNLENEGSISGSDSTFYRQSEGHSVMDTLAVALRVAEEAIEEAISKAEAYGDSLDKQNEASYLRDHKEELTEELATTILQKIIRKQKSKSEQQVEEEPGWPHPQSCSTKVADEGTSASPGGYRAPAALWRSQSAFSITGEEALKTPPVEAPSRQPRDQGQHPRAESALPSWKSVDRLDETNLAPVLQSPDGNWVALKDGAPPPTRLLAKPKSGTFQALEVASSVASAYDEMGSDSEEDFDWSEALSKLCPRSRALPRNPQPQPTQAQSSDQGPIAASPSSALSPNPEAMCSDSETSSAGSSREVGHQARLSWLQRKAPRNPAAEKMRLHGELDVNFNPQLASRETSDSSEPEEAPHTTDRRARRWRRARLGSEEPSKEPSSPSAQLRDLDTHQVSDDLSETDISNEARDPQTLTDTTEEKRRNRLYELAMKMSEKETSSGEDQESEPKTESENQKESLSSEDNSQSVQEELKKKFSAVSLCNISTEVLKVINATEELIAGSTGPWESPQVPPDRQKGMFPRGTDQVRLDEQLTSLEENVYLAAGTVYGLETQLTELEDAARCIHSGTDETHLADLEDQVATAAAQVHHAELQISDIESRISALTIAGLNIAPCVRFTRRRDQKQRTQVQTIDTSRQQRRKLPAPPVKAEKIETSSVTTIKTFNHNFILQGSSTNRTKERKGTTKDLMEPALESAVMY

SEQ ID NO: 31997 - protein, 672 aa, Homo sapiens
  REGION 1..672: note = ENSP00000438297
MDTLAVALRVAEEAIEEAISKAEAYGDSLDKQNEASYLRDHKEELTEELATTILQKIIRKQKSKSEQQVEEEPGWPHPQSCSTKVADEGTSASPGGYRAPAALWRSQSAFSITGEEALKTPPVEAPSRQPRDQGQHPRAESALPSWKSVDRLDETNLAPVLQSPDGNWVALKDGAPPPTRLLAKPKSGTFQALEVASSVASAYDEMGSDSEEDFDWSEALSKLCPRSRALPRNPQPQPTQAQSSDQGPIAASPSSALSPNPEAMCSDSETSSAGSSREVGHQARLSWLQRKAPRNPAAEKMRLHGELDVNFNPQLASRETSDSSEPEEAPHTTDRRARRWRRARLGSEEPSKEPSSPSAQLRDLDTHQVSDDLSETDISNEARDPQTLTDTTEEKRRNRLYELAMKMSEKETSSGEDQESEPKTESENQKESLSSEDNSQSVQEELKKKFSAVSLCNISTEVLKVINATEELIAGSTGPWESPQVPPDRQKGMFPRGTDQVRLDEQLTSLEENVYLAAGTVYGLETQLTELEDAARCIHSGTDETHLADLEDQVATAAAQVHHAELQISDIESRISALTIAGLNIAPCVRFTRRRDQKQRTQVQTIDTSRQQRRKLPAPPVKAEKIETSSVTTIKTFNHNFILQGSSTNRTKERKGTTKDLMEPALESAVMY

SEQ ID NO: 31998 - protein, 591 aa, Homo sapiens
  REGION 1..591: note = ENSP00000353269
MSLENEDKRARTRSKALRGPPETTAADLSCPTPGCTGSGHVRGKYSRHRSLQSCPLAKKRKLEGAEAEHLVSKRKSHPLKLALDEGYGVDSDGSEDTEVKDASVSDESEGTLEGAEAETSGQDEIHRPETAEDPSRAEKREIKCPTPGCDGTGHVTGLYPHHRSLSGCPHKDRIPPEILAMHENVLKCPTPGCTGQGHVNSNRNTHRSLSGCPIAAAEKLAKSHEKQQPQTGDPSKSSSNSDRILRPMCFVKQLEVPPYGSYRPNVAPATPRANLAKELEKFSKVTFDYASFDAQVFGKRMLAPKIQTSETSPKAFQCFDYSQDAEAAHMAATAILNLSTRCWEMPENLSTKPQDLPSKSVDIEVDENGTLDLSMHKHRKRENAFPSSSSCSSSPGVKSPDASQRHSSTSAPSSSMTSPQSSQASRQDEWDRPLDYTKPSRLREEEPEESEPAAHSFASSEADDQEVSEENFEERKYPGEVTLTNFKLKFLSKDIKKELLTCPTPGCDGSGHITGNYASHRRCPTPGCDGSGHITGNYASHRSLSGCPRAKKSGVKVAPTKDDKEDPELMKYVGPCWLFHCIAELRFSCVL

SEQ ID NO: 31999 - protein, 1121 aa, Homo sapiens
  REGION 1..1121: note = ENSP00000327465
MSLENEDKRARTRSKALRGPPETTAADLSCPTPGCTGSGHVRGKYSRHRSLQSCPLAKKRKLEGAEAEHLVSKRKSHPLKLALDEGYGVDSDGSEDTEVKDASVSDESEGTLEGAEAETSGQDEIHRPETAEGRSPVKSHFGSNPIGSATASSKGSYSSYQGIIATSLLNLGQIAEETLVEEDLGQAAKPGPGIVHLLQEAAEGAASEEGEKGLFIQPEDAEEVVEVTTERSQDLCPQSLEDAASEESSKQKGILSHEEEDEEEEEEEEEEEEDEEEEEEEEEEEEEEEEEEEEEEEEEEEEEEEEAAPDVIFQEDTSHTSAQKAPELRGPESPSPKPEYSVIVEVRSDDDKDEDTHSRKSTVTDESEMQDMMTRGNLGLLEQAIALKAEQVRTVCEPGCPPAEQSQLGLGEPGKAAKPLDTVRKSYYSKDPSRAEKREIKCPTPGCDGTGHVTGLYPHHRSLSGCPHKDRIPPEILAMHENVLKCPTPGCTGQGHVNSNRNTHRSLSGCPIAAAEKLAKSHEKQQPQTGDPSKSSSNSDRILRPMCFVKQLEVPPYGSYRPNVAPATPRANLAKELEKFSKVTFDYASFDAQVFGKRMLAPKIQTSETSPKAFQCFDYSQDAEAAHMAATAILNLSTRCWEMPENLSTKPQDLPSKSVDIEVDENGTLDLSMHKHRKRENAFPSSSSCSSSPGVKSPDASQRHSSTSAPSSSMTSPQSSQASRQDEWDRPLDYTKPSRLREEEPEESEPAAHSFASSEADDQEVSEENFEERKYPGEVTLTNFKLKFLSKDIKKELLTCPTPGCDGSGHITGNYASHRSLSGCPLADKSLRNLMAAHSADLKCPTPGCDGSGHITGNYASHRSLSGCPRAKKSGVKVAPTKDDKEDPELMKCPVPGCVGLGHISGKYASHRSASGCPLAARRQKEGSLNGSSFSWKSLKNEGPTCPTPGCDGSGHANGSFLTHRSLSGCPRATFAGKKGKLSGDEVLSPKFKTSDVLENDEEIKQLNQEIRDLNESNSEMEAAMVQLQSQISSMEKNLKNIEEENKLIEEQNEALFLELSGLSQALIQSLANIRLPHMEPICEQNFDAYVSTLTDMYSNQDPENKDLLESIKQAVRGIQV

SEQ ID NO: 32000 - protein, 591 aa, Homo sapiens; identical to SEQ ID NO: 31998
  REGION 1..591: note = ENSP00000480510

SEQ ID NO: 32001 - protein, 1148 aa, Homo sapiens
  REGION 1..1148: note = ENSP00000442412
MSLENEDKRARTRSKALRGPPETTAADLSCPTPGCTGSGHVRGKYSRHRSLQSCPLAKKRKLEGAEAEHLVSKRKSHPLKLALDEGYGVDSDGSEDTEVKDASVSDESEGTLEGAEAETSGQDEIHRPETAEGRSPVKSHFGSNPIGSATASSKGSYSSYQGIIATSLLNLGQIAEETLVEEDLGQAAKPGPGIVHLLQEAAEGAASEEGEKGLFIQPEDAEEVVEVTTERSQDLCPQSLEDAASEESSKQKGILSHEEEDEEEEEEEEEEEEDEEEEEEEEEEEEEEEEEEEEEEEEEEEEEEEEAAPDVIFQEDTSHTSAQKAPELRGPESPSPKPEYSVIVEVRSDDDKDEDTHSRKSTVTDESEMQDMMTRGNLGLLEQAIALKAEQVRTVCEPGCPPAEQSQLGLGEPGKAAKPLDTVRKSYYSKDPSRAEKREIKCPTPGCDGTGHVTGLYPHHRSLSGCPHKDRIPPEILAMHENVLKCPTPGCTGQGHVNSNRNTHRSLSGCPIAAAEKLAKSHEKQQPQTGDPSKSSSNSDRILRPMCFVKQLEVPPYGSYRPNVAPATPRANLAKELEKFSKVTFDYASFDAQVFGKRMLAPKIQTSETSPKAFQSKPFPKASSPRHSPSSSYVRSTSSSSAGFDYSQDAEAAHMAATAILNLSTRCWEMPENLSTKPQDLPSKSVDIEVDENGTLDLSMHKHRKRENAFPSSSSCSSSPGVKSPDASQRHSSTSAPSSSMTSPQSSQASRQDEWDRPLDYTKPSRLREEEPEESEPAAHSFASSEADDQEVSEENFEERKYPGEVTLTNFKLKFLSKDIKKELLTCPTPGCDGSGHITGNYASHRSLSGCPLADKSLRNLMAAHSADLKCPTPGCDGSGHITGNYASHRSLSGCPRAKKSGVKVAPTKDDKEDPELMKCPVPGCVGLGHISGKYASHRSASGCPLAARRQKEGSLNGSSFSWKSLKNEGPTCPTPGCDGSGHANGSFLTHRSLSGCPRATFAGKKGKLSGDEVLSPKFKTSDVLENDEEIKQLNQEIRDLNESNSEMEAAMVQLQSQISSMEKNLKNIEEENKLIEEQNEALFLELSGLSQALIQSLANIRLPHMEPICEQNFDAYVSTLTDMYSNQDPENKDLLESIKQAVRGIQV

SEQ ID NO: 32002 - protein, 591 aa, Homo sapiens; identical to SEQ ID NO: 31998
  REGION 1..591: note = ENSP00000481863

SEQ ID NO: 32003 - protein, 1121 aa, Homo sapiens; identical to SEQ ID NO: 31999
  REGION 1..1121: note = ENSP00000477771

SEQ ID NO: 32004 - protein, 591 aa, Homo sapiens; identical to SEQ ID NO: 31998
  REGION 1..591: note = ENSP00000478819

SEQ ID NO: 32005 - protein, 1148 aa, Homo sapiens; identical to SEQ ID NO: 32001
  REGION 1..1148: note = ENSP00000483021

SEQ ID NO: 32006 - protein, 1186 aa, Homo sapiens
  REGION 1..1186: note = ENSP00000382114
MEVDTEEKRHRTRSKGVRVPVEPAIQELFSCPTPGCDGSGHVSGKYARHRSVYGCPLAKKRKTQDKQPQEPAPKRKPFAVKADSSSVDECDDSDGTEDMDEKEEDEGEEYSEDNDEPGDEDEEDEEGDREEEEEIEEEDEDDDEDGEDVEDEEEEEEEEEEEEEEEENEDHQMNCHNTRIMQDTEKDDNNNDEYDNYDELVAKSLLNLGKIAEDAAYRARTESEMNSNTSNSLEDDSDKNENLGRKSELSLDLDSDVVRETVDSLKLLAQGHGVVLSENMNDRNYADSMSQQDSRNMNYVMLGKPMNNGLMEKMVEESDEEVCLSSLECLRNQCFDLARKLSETNPQERNPQQNMNIRQHVRPEEDFPGRTPDRNYSDMLNLMRLEEQLSPRSRVFASCAKEDGCHERDDDTTSVNSDRSEEVFDMTKGNLTLLEKAIALETERAKAMREKMAMEAGRRDNMRSYEDQSPRQLPGEDRKPKSSDSHVKKPYYGKDPSRTEKKESKCPTPGCDGTGHVTGLYPHHRSLSGCPHKDRVPPEILAMHESVLKCPTPGCTGRGHVNSNRNSHRSLSGCPIAAAEKLAKAQEKHQSCDVSKSSQASDRVLRPMCFVKQLEIPQYGYRNNVPTTTPRSNLAKELEKYSKTSFEYNSYDNHTYGKRAIAPKVQTRDISPKGYDDAKRYCKDPSPSSSSTSSYAPSSSSNLSCGGGSSASSTCSKSSFDYTHDMEAAHMAATAILNLSTRCREMPQNLSTKPQDLCATRNPDMEVDENGTLDLSMNKQRPRDSCCPILTPLEPMSPQQQAVMNNRCFQLGEGDCWDLPVDYTKMKPRRIDEDESKDITPEDLDPFQEALEERRYPGEVTIPSPKPKYPQCKESKKDLITLSGCPLADKSIRSMLATSSQELKCPTPGCDGSGHITGNYASHRSLSGCPRAKKSGIRIAQSKEDKEDQEPIRCPVPGCDGQGHITGKYASHRSASGCPLAAKRQKDGYLNGSQFSWKSVKTEGMSCPTPGCDGSGHVSGSFLTHRSLSGCPRATSAMKKAKLSGEQMLTIKQRASNGIENDEEIKQLDEEIKELNESNSQMEADMIKLRTQITTMESNLKTIEEENKVIEQQNESLLHELANLSQSLIHSLANIQLPHMDPINEQNFDAYVTTLTEMYTNQDRYQSPENKALLENIKQAVRGIQV

SEQ ID NO: 32007 - protein, 184 aa, Homo sapiens
  REGION 1..184: note = ENSP00000384219
MSCPTPGCDGSGHVSGSFLTHRSLSGCPRATSAMKKAKLSGEQMLTIKQRASNGIENDEEIKQLDEEIKELNESNSQMEADMIKLRTQVTITTMESNLKTIEEENKVIEQQNESLLHELANLSQSLIHSLANIQLPHMDPINEQNFDAYVTTLTEMYTNQDRYQSPENKALLENIKQAVRGIQV

SEQ ID NO: 32008 - protein, 202 aa, Homo sapiens
  REGION 1..202: note = ENSP00000382111
EDQEPIRCPVPGCDGQGHITGKYASHRSASGCPLAAKRQKDGYLNGSQFSWKSVKTEGMSCPTPGCDGSGHVSGSFLTHRSLSGCPRATSAMKKAKLSGEQMLTIKQRASNGIENDEEIKQLDEEIKELNESNSQMEADMIKLRTQITTMESNLKTIEEENKVIEQQNESLLHELANLSQSLIHSLANIQLPHMEDGVWWGQ

SEQ ID NO: 32009 - protein, 1184 aa, Homo sapiens
  REGION 1..1184: note = ENSP00000396103
MEVDTEEKRHRTRSKGVRVPVEPAIQELFSCPTPGCDGSGHVSGKYARHRSVYGCPLAKKRKTQDKQPQEPAPKRKPFAVKADSSSVDECDDSDGTEDMDEKEEDEGEEYSEDNDEPGDEDEEDEEGDREEEEEIEEEDEDDDEDGEDVEDEEEEEEEEEEEEEEEENEDHQMNCHNTRIMQDTEKDDNNNDEYDNYDELVAKSLLNLGKIAEDAAYRARTESEMNSNTSNSLEDDSDKNENLGRKSELSLDLDSDVVRETVDSLKLLAQGHGVVLSENMNDRNYADSMSQQDSRNMNYVMLGKPMNNGLMEKMVEESDEEVCLSSLECLRNQCFDLARKLSETNPQERNPQQNMNIRQHVRPEEDFPGRTPDRNYSDMLNLMRLEEQLSPRSRVFASCAKEDGCHERDDDTTSVNSDRSEEVFDMTKGNLTLLEKAIALETERAKAMREKMAMEAGRRDNMRSYEDQSPRQLPGEDRKPKSSDSHVKKPYYDPSRTEKKESKCPTPGCDGTGHVTGLYPHHRSLSGCPHKDRVPPEILAMHESVLKCPTPGCTGRGHVNSNRNSHRSLSGCPIAAAEKLAKAQEKHQSCDVSKSSQASDRVLRPMCFVKQLEIPQYGYRNNVPTTTPRSNLAKELEKYSKTSFEYNSYDNHTYGKRAIAPKVQTRDISPKGYDDAKRYCKDPSPSSSSTSSYAPSSSSNLSCGGGSSASSTCSKSSFDYTHDMEAAHMAATAILNLSTRCREMPQNLSTKPQDLCATRNPDMEVDENGTLDLSMNKQRPRDSCCPILTPLEPMSPQQQAVMNNRCFQLGEGDCWDLPVDYTKMKPRRIDEDESKDITPEDLDPFQEALEERRYPGEVTIPSPKPKYPQCKESKKDLITLSGCPLADKSIRSMLATSSQELKCPTPGCDGSGHITGNYASHRSLSGCPRAKKSGIRIAQSKEDKEDQEPIRCPVPGCDGQGHITGKYASHRSASGCPLAAKRQKDGYLNGSQFSWKSVKTEGMSCPTPGCDGSGHVSGSFLTHRSLSGCPRATSAMKKAKLSGEQMLTIKQRASNGIENDEEIKQLDEEIKELNESNSQMEADMIKLRTQITTMESNLKTIEEENKVIEQQNESLLHELANLSQSLIHSLANIQLPHMDPINEQNFDAYVTTLTEMYTNQDRYQSPENKALLENIKQAVRGIQV

SEQ ID NO: 32010 - protein, 343 aa, Homo sapiens
  REGION 1..343: note = ENSP00000473409
QERNPQQNMNIRQHVRPEEDFPGRTPDRNYSDMLNLMRLEEQLSPRSRVFASCAKEDGCHERDDDTTSVNSDRSEEVFDMTKGNLTLLEKAIALETERAKAMREKMAMEAGRRDNMRSYEDQSPRQLPGEDRKPKSSDSHVKKPYYGKDPSRTEKKESKCPTPGCDGTGHVTGLYPHHRSLSGCPHKDRVPPEILAMHESVLKCPTPGCTGRGHVNSNRNSHRSLSGCPIAAAEKLAKAQEKHQSCDVSKSSQASDRVLRPMCFVKQLEIPQYGYRNNVPTTTPRSNLAKELEKYSKTSFEYNSYDNHTYGKRAIAPKRSGTARTPAPAAAAPAATRPAAAAT

SEQ ID NO: 32011 - protein, 178 aa, Homo sapiens
  REGION 1..178: note = ENSP00000335636
MTTLRAFTCDDLFRFNNINLDPLTETYGIPFYLQYLAHWPEYFIVAEAPGGELMGYIMGKAEGSVAREEWHGHVTALSVAPEFRRLGLAAKLMELLEEISERKGGFFVDLFVRVSNQVAVNMYKQLGYSVYRTVIEYYSASNGEPDEDAYDMRKALSRDTEKKSIIPLPHPVRPEDIE

SEQ ID NO: 32012 - protein, 111 aa, Homo sapiens
  REGION 1..111: note = ENSP00000311027
MTTLRAFTCDDLFRFNNINLDPLTETYGIPFYLQYLAHWPEYFIVAEAPGGELMGYIMGKAEGSVAREEWHGHVTALSVAPEFRRLGLAAKLMELLEEISERYEESTFQGY

SEQ ID NO: 32013 - protein, 166 aa, Homo sapiens
  REGION 1..166: note = ENSP00000381603
MLSQSCNLDPLTETYGIPFYLQYLAHWPEYFIVAEAPGGELMGYIMGKAEGSVAREEWHGHVTALSVAPEFRRLGLAAKLMELLEEISERKGGFFVDLFVRVSNQVAVNMYKQLGYSVYRTVIEYYSASNGEPDEDAYDMRKALSRDTEKKSIIPLPHPVRPEDIE

SEQ ID NO: 32014 - protein, 525 aa, Homo sapiens
  REGION 1..525: note = ENSP00000300131
MHRAPSPTAEQPPGGGDSARRTLQPRLKPSARAMALPRTLGELQLYRVLQRANLLSYYETFIQQGGDDVQQLCEAGEEEFLEIMALVGMATKPLHVRRLQKALREWATNPGLFSQPVPAVPVSSIPLFKISETAGTRKGSMSNGHGSPGEKAGSARSFSPKSPLELGEKLSPLPGGPGAGDPRIWPGRSTPESDVGAGGEEEAGSPPFSPPAGGGVPEGTGAGGLAAGGTGGGPDRLEPEMVRMVVESVERIFRSFPRGDAGEVTSLLKLNKKLARSVGHIFEMDDNDSQKEEEIRKYSIIYGRFDSKRREGKQLSLHELTINEAAAQFCMRDNTLLLRRVELFSLSRQVARESTYLSSLKGSRLHPEELGGPPLKKLKQEVGEQSHPEIQQPPPGPESYVPPYRPSLEEDSASLSGESLDGHLQAVGSCPRLTPPPADLPLALPAHGLWSRHILQQTLMDEGLRLARLVSHDRVGRLSPCVPAKPPLAEFEEGLLDRCPAPGPHPALVEGRRSSVKVEAEASRQ

SEQ ID NO: 32015 - protein, 461 aa, Homo sapiens
  REGION 1..461: note = ENSP00000341491
MHRAPSPTAEQPPGGGDSARRTLQPRLKPSARAMALPRTLGELQLYRVLQRANLLSYYETFIQQGGDDVQQLCEAGEEEFLEIMALVGMATKPLHVRRLQKALREWATNPGLFSQPVPAVPVSSIPLFKISETAGTRKGSMSNGHGSPGEKAGSARSFSPKSPLELGEKLSPLPGGPGAGDPRIWPGRSTPESDVGAGGEEEAGSPPFSPPAGGGVPEGTGAGGLAAGGTGGGPDRLEPEMVRMVVESVERIFRSFPRGDAGEVTSLLKLNKKLARSVGHIFEMDDNDSQKEEEIRKYSIIYGRFDSKRREGKQLSLHELTINEAAAQFCMRDNTLLLRRVELFSLSRQVARESTYLSSLKGSRLHPEELGGPPLKKLKQEVGEQSHPEIQQPPPGPESYVPPYRPSLEEDSASLSGESLDGHLQEFEEGLLDRCPAPGPHPALVEGRRSSVKVEAEASRQ

SEQ ID NO: 32016 - protein, 42 aa, Homo sapiens
  REGION 1..42: note = ENSP00000427518
MYFAPSMKDFTQYIFTEKLKQDKGSDASWKNDQEPPPETMVD

SEQ ID NO: 32017 - protein, 389 aa, Homo sapiens
  REGION 1..389: note = ENSP00000408963
MEVVEAAAAQLETLKFNGTDFGVGEGPAAPSPGSAPVPGTQPPLQSFEGSPDAGQTVEVKPAGEQPLQPVLNAVAAGTPAPQPQPPAESPACGDCVTSPGAAEPARAPDSLETSDSDSDSDSETDSDSSSSSSSSSSSSSSSSSSCISLPPVLSDGDDDLQIEKENKNFPLKTKDELLLNELPSVEELTIILPEDIELKPLGMVSSIIEQLVIIESMTNLPPVNEETVIFKSDRQAAGKIFEIFGPVAHPFYVLRFNSSDHIESKGIKIKETMYFAPSMKDFTQYIFTEKLKQDKGSDASWKNDQEPPPEALDFSDDEKEKEAKQRKKSQIQGRKKLKSEFNEPGTGISHRYCGLGSRPLQSSESHKLFGFQMHIKVTFTCYFSLLSMQ

SEQ ID NO: 32018 - protein, 494 aa, Homo sapiens
  REGION 1..494: note = ENSP00000274054
MEVVEAAAAQLETLKFNGTDFGVGEGPAAPSPGSAPVPGTQPPLQSFEGSPDAGQTVEVKPAGEQPLQPVLNAVAAGTPAPQPQPPAESPACGDCVTSPGAAEPARAPDSLETSDSDSDSDSETDSDSSSSSSSSSSSSSSSSSSCISLPPVLSDGDDDLQIEKENKNFPLKTKDELLLNELPSVEELTIILPEDIELKPLGMVSSIIEQLVIIESMTNLPPVNEETVIFKSDRQAAGKIFEIFGPVAHPFYVLRFNSSDHIESKGIKIKETMYFAPSMKDFTQYIFTEKLKQDKGSDASWKNDQEPPPEALDFSDDEKEKEAKQRKKSQIQGRKKLKSEFNEPGEDFTEVHQNWNAHSSASEHAKGYRNREFTRGFSRARYPRSCHGRPPPQHFYNSEHMVSQETSGFPSQRQNNPIMPQYPFPLPVFDMHNFPLRPPPPPPPPPVNMGWATPNMAAHPLLNLPYSLPPPPPPPPLPPPPSSGDSNSHFGPYY

SEQ ID NO: 32019 - protein, 491 aa, Homo sapiens [sequence omitted]

SEQ ID NO: 32020 - protein, 368 aa, Homo sapiens
  REGION 1..368: note = ENSP00000346242
MNPAAEAEFNILLATDSYKVTHYKQYPPNTSKVYSYFECREKKTENSKLRKVKYEETVFYGLQYILNKYLKGKVVTKEKIQEAKDVYKEHFQDDVFNEKGWNYILEKYDGHLPIEIKAVPEGFVIPRGNVLFTVENTDPECYWLTNWIETILVQSWYPITVATNSREQKKILAKYLLETSGNLDGLEYKLHDFGYRGVSSQETAGIGASAHLVNFKGTDTVAGLALIKKYYGTKDPVPGYSVPAAEHSTITAWGKDHEKDAFEHIVTQFSSVPVSVVSDSYDIYNACEKIWGEDLRHLIVSRSTQAPLIIRPDSGNPLDTVLKVLEILGKKFPVTENSKGYKLLPPYLRVIQGDGVDINTLQEVCVLY

SEQ ID NO: 32021 - protein, 88 aa, Homo sapiens
  REGION 1..88: note = ENSP00000390591
MNPAAEAEFNILLATDSYKVTHYKQYPPNTSKVYSYFECREKKTENSKLRKVKYEETVFYGLQYILNKYLKGKVVTKEKIQEAKDVYK

SEQ ID NO: 32022 - protein, 60 aa, Homo sapiens
  REGION 1..60: note = ENSP00000390896
MNPAAEAEFNILLATDSYKVTHYKQYPPNTSKVYSYFECREKKTENSKLRKVKYEETVFY

SEQ ID NO: 32023 - protein, 295 aa, Homo sapiens
  REGION 1..295: note = ENSP00000263354
MDNSGKEAEAMALLAEAERKVKNSQSFFSGLFGGSSKIEEACEIYARAANMFKMAKNWSAAGNAFCQAAQLHLQLQSKHDAATCFVDAGNAFKKADPQEAINCLMRAIEIYTDMGRFTIAAKHHISIAEIYETELVDIEKAIAHYEQSADYYKGEESNSSANKCLLKVAGYAALLEQYQKAIDIYEQVGTNAMDSPLLKYSAKDYFFKAALCHFCIDMLNAKLAVQKYEELFPAFSDSRECKLMKKLLEAHEEQNVDSYTESVKEYDSISRLDQWLTTMLLRIKKTIQGDEEDLR

SEQ ID NO: 32024 - protein, 83 aa, Homo sapiens
  REGION 1..83: note = ENSP00000472235
HFCIDMLNAKLAVQKYEELFPAFSDSRECKLMKKLLEAHEEQNVDSYTESVKEYDSISRLDQWLTTMLLRIKKTIQGDEEDLR

SEQ ID NO: 32025 - protein, 256 aa, Homo sapiens
  REGION 1..256: note = ENSP00000471520
MDNSGKEAEAMALLAEAERKVKNSQSFFSGLFGGSSKIEEACEIYARAANMFKMAKNWSEAINCLMRAIEIYTDMGRFTIAAKHHISIAEIYETELVDIEKAIAHYEQSADYYKGEESNSSANKCLLKVAGYAALLEQYQKAIDIYEQVGTNAMDSPLLKYSAKDYFFKAALCHFCIDMLNAKLAVQKYEELFPAFSDSRECKLMKKLLEAHEEQNVDSYTESVKEYDSISRLDQWLTTMLLRIKKTIQGDEEDLR

SEQ ID NO: 32026 - protein, 35 aa, Homo sapiens
  REGION 1..35: note = ENSP00000470654
MDNSGKEAEAMALLAEAERKVKNSQSFFSGLFGGH

SEQ ID NO: 32027 - protein, 268 aa, Homo sapiens
  REGION 1..268: note = ENSP00000472667
MDNSGKEAEAMALLAEAERKVKNSQSFFSGLFGGSSKIEEACEIYARAANMFKMAKNWSGMSSPLELLQAAGNAFCQAAQLHLQLQSKHDAATCFVDAGNAFKKADPQEAINCLMRAIEIYTDMGRFTIAAKHHISIAEIYETELVDIEKAIAHYEQSADYYKGEESNSSANKCLLKVAGYAALLEQYQKAIDIYEQVGTNAMDSPLLKYSAKDYFFKAALCHFCIDMLNAKLAVQKYEELFPAFSDSRECKLMKKLLEAHEEQNVDS

SEQ ID NO: 32028 - protein, 139 aa, Homo sapiens
  REGION 1..139: note = ENSP00000471261
  VARIANT 1: note = Any amino acid
XAGNAFCQAAQLHLQLQSKHDAATCFVDAGNAFKKADPQEAINCLMRAIEIYTDMGRFTIAAKHHISIAEIYETELVDIEKVGTNAMDSPLLKYSAKDYFFKAALCHFCIDMLNAKLAVQKYEELFPAFSDSRECKLMK

SEQ ID NO: 32029 - protein, 60 aa, Homo sapiens
  REGION 1..60: note = ENSP00000470665
MDNSGKEAEAMALLAEAERKVKNSQSFFSGLFGPHPDPTERIPKCVAVGLWFDEMSTSCG

SEQ ID NO: 32030 - protein, 102 aa, Homo sapiens
  REGION 1..102: note = ENSP00000470946
MRAIEIYTDMGRFTIAAKHHISIAEIYETELVDIEKAIAHYEQSADYYKGEESNSSANKCLLKVAGYAALLEQYQKAIDIYEQVGTNAMDSPLLKYSAKDYF

SEQ ID NO: 32031 - protein, 137 aa, Homo sapiens
  REGION 1..137: note = ENSP00000471018
MFKMAKNWSAAGNAFCQAAQLHLQLQSKHDAATCFVDAGNAFKKADPQEAINCLMRAIEIYTDMGRFTIAAKHHISIAEIYETELVDIEKAIAHYEQSADYYKGEESNSSANKCLLKVAGYAALLEQYQKAIDIYEQ

SEQ ID NO: 32032 - protein, 74 aa, Homo sapiens
  REGION 1..74: note = ENSP00000470954
MDNSGKEAEAMALLAEAERKVKNSQSFFSGLFGCWKRVLPGCTAAPAAPEQARRSHLLCGRWQRIQESRPPRGH

SEQ ID NO: 32033 - protein, 477 aa, Homo sapiens
  REGION 1..477: note = ENSP00000281038
MLGVRCLLRSVRFCSSAPFPKHKPSAKLSVRDALGAQNASGERIKIQGWIRSVRSQKEVLFLHVNDGSSLESLQVVADSGLDSRELNFGSSVEVQGQLIKSPSKRQNVELKAEKIKVIGNCDAKDFPIKYKERHPLEYLRQYPHFRCRTNVLGSILRIRSEATAAIHSFFKDSGFVHIHTPIITSNDSEGAGELFQLEPSGKLKVPEENFFNVPAFLTVSGQLHLEVMSGAFTQVFTFGPTFRAENSQSRRHLAEFYMIEAEISFVDSLQDLMQVIEELFKATTMMVLSKCPEDVELCHKFIAPGQKDRLEHMLKNNFLIISYTEAVEILKQASQNFTFTPEWGADLRTEHEKYLVKHCGNIPVFVINYPLTLKPFYMRDNEDGPQHTVAAVDLLVPGVGELFGGGLREERYHFLEERLARSGLTEVYQWYLDLRRFGSVPHGGFGMGFERYLQCILGVDNIKDVIPFPRFPHSCLL

SEQ ID NO: 32034 - protein, 81 aa, Homo sapiens
  REGION 1..81: note = ENSP00000435298
  VARIANT 1: note = Any amino acid
XVAAVDLLVPGVGELFGGGLREERYHFLEERLARYLDLRRFGSVPHGGFGMGFERYLQCILGVDNIKDVIPFPRFPHSCLL

SEQ ID NO: 32035 - protein, 250 aa, Homo sapiens
  REGION 1..250: note = ENSP00000432635
MSGAFTQVFTFGPTFRAENSQSRRHLAEFYMIEAEISFVDSLQDLMQVIEELFKATTMMVLSKCPEDVELCHKFIAPGQKDRLEHMLKNNFLIISYTEAVEILKQASQNFTFTPEWGADLRTEHEKYLVKHCGNIPVFVINYPLTLKPFYMRDNEDGPQHTVAAVDLLVPGVGELFGGGLREERYHFLEERLARSGLTEVYQWYLDLRRFGSVPHGGFGMGFERYLQCILGVDNIKDVIPFPRFPHSCLL

SEQ ID NO: 32036 - protein, 106 aa, Homo sapiens
  REGION 1..106: note = ENSP00000436114
  VARIANT 1: note = Any amino acid
XPIKYKERHPLEYLRQYPHFRCRTNVLGSILRIRSEATAAIHSFFKDSGFVHIHTPIITSNDSEGAGELFQLEPSGKLKVPEENFFNVPAFLTVSGQLHLEVMSGL

SEQ ID NO: 32037 - protein, 241 aa, Homo sapiens
  REGION 1..241: note = ENSP00000432240
MLGVRCLLRSVRFCSSAPFPKHKPSAKLSVRDALGAQNASGERIKIQGWIRSVRSQKEVLFLHVNDGSSLESLQVVADSGLDSRELNFGSSVEVQGQLIKSPSKRQNVELKAEKIKVIGNCDAKDFPIKYKERHPLEYLRQYPHFRCRTNVLGSILRIRSEATAAIHSFFKDSGFVHIHTPIITSNDSEGAGELFQLEWGADLRTEHEKYLVKHCGNIPVFVINYPLTLKPFYMRDNEDGP

SEQ ID NO: 32038 - skipped

SEQ ID NO: 32039 - protein, 2365 aa, Homo sapiens
  REGION 1..2365: note = ENSP00000353871
MESVSESSQQQKRKPVIHGLEDQKRIYTDWANHYLAKSGHKRLIRDLQQDVTDGVLLAQIIQVVANEKIEDINGCPKNRSQMIENIDACLNFLAAKGINIQGLSAEEIRNGNLKAILGLFFSLSRYKQQQQQPQKQHLSSPLPPAVSQVAGAPSQCQAGTPQQQVPVTPQAPCQPHQPAPHQQSKAQAEMQSRLPGPTARVSAAGSEAKTRGGSTTANNRRSQSFNNYDKSKPVTSPPPPPSSHEKEPLASSASSHPGMSDNAPASLESGSSSTPTNCSTSSAIPQPGAATKPWRSKSLSVKHSATVSMLSVKPPGPEAPRPTPEAMKPAPNNQKSMLEKLKLFNSKGGSKAGEGPGSRDTSCERLETLPSFEESEELEAASRMLTTVGPASSSPKIALKGIAQRTFSRALTNKKSSLKGNEKEKEKQQREKDKEKSKDLAKRASVTERLDLKEEPKEDPSGAAVPEMPKKSSKIASFIPKGGKLNSAKKEPMAPSHSGIPKPGMKSMPGKSPSAPAPSKEGERSRSGKLSSGLPQQKPQLDGRHSSSSSSLASSEGKGPGGTTLNHSISSQTVSGSVGTTQTTGSNTVSVQLPQPQQQYNHPNTATVAPFLYRSQTDTEGNVTAESSSTGVSVEPSHFTKTGQPALEELTGEDPEARRLRTVKNIADLRQNLEETMSSLRGTQVTHSTLETTFDTNVTTEMSGRSILSLTGRPTPLSWRLGQSSPRLQAGDAPSMGNGYPPRANASRFINTESGRYVYSAPLRRQLASRGSSVCHVDVSDKAGDEMDLEGISMDAPGYMSDGDVLSKNIRTDDITSGYMTDGGLGLYTRRLNRLPDGMAVVRETLQRNTSLGLGDADSWDDSSSVSSGISDTIDNLSTDDINTSSSISSYANTPASSRKNLDVQTDAEKHSQVERNSLWSGDDVKKSDGGSDSGIKMEPGSKWRRNPSDVSDESDKSTSGKKNPVISQTGSWRRGMTAQVGITMPRTKPSAPAGALKTPGTGKTDDAKVSEKGRLSPKASQVKRSPSDAGRSSGDESKKPLPSSSRTPTANANSFGFKKQSGSAAGLAMITASGVTVTSRSATLGKIPKSSALVSRSAGRKSSMDGAQNQDDGYLALSSRTNLQYRSLPRPSKSNSRNGAGNRSSTSSIDSNISSKSAGLPVPKLREPSKTALGSSLPGLVNQTDKEKGISSDNESVASCNSVKVNPAAQPVSSPAQTSLQPGAKYPDVASPTLRRLFGGKPTKQVPIATAENMKNSVVISNPHATMTQQGNLDSPSGSGVLSSGSSSPLYSKNVDLNQSPLASSPSSAHSAPSNSLTWGTNASSSSAVSKDGLGFQSVSSLHTSCESIDISLSSGGVPSHNSSTGLIASSKDDSLTPFVRTNSVKTTLSESPLSSPAASPKFCRSTLPRKQDSDPHLDRNTLPKKGLRYTPTSQLRTQEDAKEWLRSHSAGGLQDTAANSPFSSGSSVTSPSGTRFNFSQLASPTTVTQMSLSNPTMLRTHSLSNADGQYDPYTDSRFRNSSMSLDEKSRTMSRSGSFRDGFEEVHGSSLSLVSSTSSVYSTPEEKCQSEIRKLRRELDASQEKVSALTTQLTANAHLVAAFEQSLGNMTIRLQSLTMTAEQKDSELNELRKTIELLKKQNAAAQAAINGVINTPELNCKGNGTAQSADLRIRRQHSSDSVSSINSATSHSSVGSNIESDSKKKKRKNWLRSSFKQAFGKKKSPKSASSHSDIEEMTDSSLPSSPKLPHNGSTGSTPLLRNSHSNSLISECMDSEAETVMQLRNELRDKEMKLTDIRLEALSSAHQLDQLREAMNRMQSEIEKLKAENDRLKSESQGSGCSRAPSQVSISASPRQSMGLSQHSLNLTESTSLDMLLDDTGECSARKEGGRHVKIVVSFQEEMKWKEDSRPHLFLIGCIGVSGKTKWDVLDGVVRRLFKEYIIHVDPVSQLGLNSDSVLGYSIGEIKRSNTSETPELLPCGYLVGENTTISVTVKGLAENSLDSLVFESLIPKPILQRYVSLLIEHRRIILSGPSGTGKTYLANRLSEYIVLREGRELTDGVIATFNVDHKSSKELRQYLSNLADQCNSENNAVDMPLVIILDNLHHVSSLGEIFNGLLNCKYHKCPYIIGTMNQATSSTPNLQLHHNFRWVLCANHTEPVKGFLGRFLRRKLMETEISGRVRNMELVKIIDWIPKVWHHLNRFLEAHSSSDVTIGPRLFLSCPIDVDGSRVWFTDLWNYSIIPYLLEAVREGLQLYGRRAPWEDPAKWVMDTYPWAASPQQHEWPPLLQLRPEDVGFDGYSMPREGSTSKQMPPSDAEGDPLMNMLMRLQEAANYSSPQSYDSDSNSNSHHDDILDSSLESTL

SEQ ID NO: 32040 - protein, 2432 aa, Homo sapiens
  REGION 1..2432: note = ENSP00000379394
MPAILVASKMKSGLPKPVHSAAPILHVPPARAGPQPCYLKLGSKVEVSKTTYPSQIPLKSQVLQGLQEPAGEGLPLRKSGSVENGFDTQIYTDWANHYLAKSGHKRLIRDLQQDVTDGVLLAQIIQVVANEKIEDINGCPKNRSQMIENIDACLNFLAAKGINIQGLSAEEIRNGNLKAILGLFFSLSRYKQQQQQPQKQHLSSPLPPAVSQVAGAPSQCQAGTPQQQVPVTPQAPCQPHQPAPHQQSKAQAEMQSRLPGPTARVSAAGSEAKTRGGSTTANNRRSQSFNNYDKSKPVTSPPPPPSSHEKEPLASSASSHPGMSDNAPASLESGSSSTPTNCSTSSAIPQPGAATKPWRSKSLSVKHSATVSMLSVKPPGPEAPRPTPEAMKPAPNNQKSMLEKLKLFNSKGGSKAGEGPGSRDTSCERLETLPSFEESEELEAASRMLTTVGPASSSPKIALKGIAQRTFSRALTNKKSSLKGNEKEKEKQQREKDKEKSKDLAKRASVTERLDLKEEPKEDPSGAAVPEMPKKSSKIASFIPKGGKLNSAKKEPMAPSHSGIPKPGMKSMPGKSPSAPAPSKEGERSRSGKLSSGLPQQKPQLDGRHSSSSSSLASSEGKGPGGTTLNHSISSQTVSGSVGTTQTTGSNTVSVQLPQPQQQYNHPNTATVAPFLYRSQTDTEGNVTAESSSTGVSVEPSHFTKTGQPALEELTGEDPEARRLRTVKNIADLRQNLEETMSSLRGTQVTHSTLETTFDTNVTTEMSGRSILSLTGRPTPLSWRLGQSSPRLQAGDAPSMGNGYPPRANASRFINTESGRYVYSAPLRRQLASRGSSVCHVDVSDKAGDEMDLEGISMDAPGYMSDGDVLSKNIRTDDITSGYMTDGGLGLYTRRLNRLPDGMAVVRETLQRNTSLGLGDADSWDDSSSVSSGISDTIDNLSTDDINTSSSISSYANTPASSRKNLDVQTDAEKHSQVERNSLWSGDDVKKSDGGSDSGIKMEPGSKWRRNPSDVSDESDKSTSGKKNPVISQTGSWRRGMTAQVGITMPRTKPSAPAGALKTPGTGKTDDAKVSEKGRLSPKASQVKRSPSDAGRSSGDESKKPLPSSSRTPTANANSFGFKKQSGSAAGLAMITASGVTVTSRSATLGKIPKSSALVSRSAGRKSSMDGAQNQDDGYLALSSRTNLQYRSLPRPSKSNSRNGAGNRSSTSSIDSNISSKSAGLPVPKLREPSKTALGSSLPGLVNQTDKEKGISSDNESVASCNSVKVNPAAQPVSSPAQTSLQPGAKYPDVASPTLRRLFGGKPTKQVPIATAENMKNSVVISNPHATMTQQGNLDSPSGSGVLSSGSSSPLYSKNVDLNQSPLASSPSSAHSAPSNSLTWGTNASSSSAVSKDGLGFQSVSSLHTSCESIDISLSSGGVPSHNSSTGLIASSKDDSLTPFVRTNSVKTTLSESPLSSPAASPKFCRSTLPRKQDSDPHLDRNTLPKKGLRYTPTSQLRTQEDAKEWLRSHSAGGLQDTAANSPFSSGSSVTSPSGTRFNFSQLASPTTVTQMSLSNPTMLRTHSLSNADGQYDPYTDSRFRNSSMSLDEKSRTMSRSGSFRDGFEEVHGSSLSLVSSTSSVYSTPEEKCQSEIRKLRRELDASQEKVSALTTQLTANAHLVAAFEQSLGNMTIRLQSLTMTAEQKDSELNELRKTIELLKKQNAAAQAAINGVINTPELNCKGNGTAQSADLRIRRQHSSDSVSSINSATSHSSVGSNIESDSKKKKRKNWVNELRSSFKQAFGKKKSPKSASSHSDIEEMTDSSLPSSPKLPHNGSTGSTPLLRNSHSNSLISECMDSEAETVMQLRNELRDKEMKLTDIRLEALSSAHQLDQLREAMNRMQSEIEKLKAENDRLKSESQGSGCSRAPSQVSISASPRQSMGLSQHSLNLTESTSLDMLLDDTGECSARKEGGRHVKIVVSFQEEMKWKEDSRPHLFLIGCIGVSGKTKWDVLDGVVRRLFKEYIIHVDPVSQLGLNSDSVLGYSIGEIKRSNTSETPELLPCGYLVGENTTISVTVKGLAENSLDSLVFESLIPKPILQRYVSLLIEHRRIILSGPSGTGKTYLANRLSEYIVLREGRELTDGVIATFNVDHKSSKELRQYLSNLADQCNSENNAVDMPLVIILDNLHHVSSLGEIFNGLLNCKYHKCPYIIGTMNQATSSTPNLQLHHNFRWVLCANHTEPVKGFLGRFLRRKLMETEISGRVRNMELVKIIDWIPKVWHHLNRFLEAHSSSDVTIGPRLFLSCPIDVDGSRVWFTDLWNYSIIPYLLEAVREGLQLYGRRAPWEDPAKWVMDTYPWAASPQQHEWPPLLQLRPEDVGFDGYSMPREGSTSKQMPPSDAEGDPLMNMLMRLQEAANYSSPQSYDSDSNSNSHHDDILDSSLESTL

SEQ ID NO: 32041 - protein, 2429 aa, Homo sapiens
  REGION 1..2429: note = ENSP00000309577
MPAILVASKMKSGLPKPVHSAAPILHVPPARAGPQPCYLKLGSKVEVSKTTYPSQIPLKSQVLQGLQEPAGEGLPLRKSGSVENGFDTQIYTDWANHYLAKSGHKRLIRDLQQDVTDGVLLAQIIQVVANEKIEDINGCPKNRSQMIENIDACLNFLAAKGINIQGLSAEEIRNGNLKAILGLFFSLSRYKQQQQQPQKQHLSSPLPPAVSQVAGAPSQCQAGTPQQQVPVTPQAPCQPHQPAPHQQSKAQAEMQSRLPGPTARVSAAGSEAKTRGGSTTANNRRSQSFNNYDKSKPVTSPPPPPSSHEKEPLASSASSHPGMSDNAPASLESGSSSTPTNCSTSSAIPQPGAATKPWRSKSLSVKHSATVSMLSVKPPGPEAPRPTPEAMKPAPNNQKSMLEKLKLFNSKGGSKAGEGPGSRDTSCERLETLPSFEESEELEAASRMLTTVGPASSSPKIALKGIAQRTFSRALTNKKSSLKGNEKEKEKQQREKDKEKSKDLAKRASVTERLDLKEEPKEDPSGAAVPEMPKKSSKIASFIPKGGKLNSAKKEPMAPSHSGIPKPGMKSMPGKSPSAPAPSKEGERSRSGKLSSGLPQQKPQLDGRHSSSSSSLASSEGKGPGGTTLNHSISSQTVSGSVGTTQTTGSNTVSVQLPQPQQQYNHPNTATVAPFLYRSQTDTEGNVTAESSSTGVSVEPSHFTKTGQPALEELTGEDPEARRLRTVKNIADLRQNLEETMSSLRGTQVTHSTLETTFDTNVTTEMSGRSILSLTGRPTPLSWRLGQSSPRLQAGDAPSMGNGYPPRANASRFINTESGRYVYSAPLRRQLASRGSSVCHVDVSDKAGDEMDLEGISMDAPGYMSDGDVLSKNIRTDDITSGYMTDGGLGLYTRRLNRLPDGMAVVRETLQRNTSLGLGDADSWDDSSSVSSGISDTIDNLSTDDINTSSSISSYANTPASSRKNLDVQTDAEKHSQVERNSLWSGDDVKKSDGGSDSGIKMEPGSKWRRNPSDVSDESDKSTSGKKNPVISQTGSWRRGMTAQVGITMPRTKPSAPAGALKTPGTGKTDDAKVSEKGRLSPKASQVKRSPSDAGRSSGDESKKPLPSSSRTPTANANSFGFKKQSGSAAGLAMITASGVTVTSRSATLGKIPKSSALVSRSAGRKSSMDGAQNQDDGYLALSSRTNLQYRSLPRPSKSNSRNGAGNRSSTSSIDSNISSKSAGLPVPKLREPSKTALGSSLPGLVNQTDKEKGISSDNESVASCNSVKVNPAAQPVSSPAQTSLQPGAKYPDVASPTLRRLFGGKPTKQVPIATAENMKNSVVISNPHATMTQQGNLDSPSGSGVLSSGSSSPLYSKNVDLNQSPLASSPSSAHSAPSNSLTWGTNASSSSAVSKDGLGFQSVSSLHTSCESIDISLSSGGVPSHNSSTGLIASSKDDSLTPFVRTNSVKTTLSESPLSSPAASPKFCRSTLPRKQDSDPHLDRNTLPKKGLRYTPTSQLRTQEDAKEWLRSHSAGGLQDTAANSPFSSGSSVTSPSGTRFNFSQLASPTTVTQMSLSNPTMLRTHSLSNADGQYDPYTDSRFRNSSMSLDEKSRTMSRSGSFRDGFEEVHGSSLSLVSSTSSVYSTPEEKCQSEIRKLRRELDASQEKVSALTTQLTANAHLVAAFEQSLGNMTIRLQSLTMTAEQKDSELNELRKTIELLKKQNAAAQAAINGVINTPELNCKGNGTAQSADLRIRRQHSSDSVSSINSATSHSSVGSNIESDSKKKKRKNWLRSSFKQAFGKKKSPKSASSHSDIEEMTDSSLPSSPKLPHNGSTGSTPLLRNSHSNSLISECMDSEAETVMQLRNELRDKEMKLTDIRLEALSSAHQLDQLREAMNRMQSEIEKLKAENDRLKSESQGSGCSRAPSQVSISASPRQSMGLSQHSLNLTESTSLDMLLDDTGECSARKEGGRHVKIVVSFQEEMKWKEDSRPHLFLIGCIGVSGKTKWDVLDGVVRRLFKEYIIHVDPVSQLGLNSDSVLGYSIGEIKRSNTSETPELLPCGYLVGENTTISVTVKGLAENSLDSLVFESLIPKPILQRYVSLLIEHRRIILSGPSGTGKTYLANRLSEYIVLREGRELTDGVIATFNVDHKSSKELRQYLSNLADQCNSENNAVDMPLVIILDNLHHVSSLGEIFNGLLNCKYHKCPYIIGTMNQATSSTPNLQLHHNFRWVLCANHTEPVKGFLGRFLRRKLMETEISGRVRNMELVKIIDWIPKVWHHLNRFLEAHSSSDVTIGPRLFLSCPIDVDGSRVWFTDLWNYSIIPYLLEAVREGLQLYGRRAPWEDPAKWVMDTYPWAASPQQHEWPPLLQLRPEDVGFDGYSMPREGSTSKQMPPSDAEGDPLMNMLMRLQEAANYSSPQSYDSDSNSNSHHDDILDSSLESTL

SEQ ID NO: 32042 - protein, 2488 aa, Homo sapiens
  REGION 1..2488: note = ENSP00000379396
MPAILVASKMKSGLPKPVHSAAPILHVPPARAGPQPCYLKLGSKVEVSKTTYPSQIPLKSQVLQGLQEPAGEGLPLRKSGSVENGFDTQIYTDWANHYLAKSGHKRLIRDLQQDVTDGVLLAQIIQVVANEKIEDINGCPKNRSQMIENIDACLNFLAAKGINIQGLSAEEIRNGNLKAILGLFFSLSRYKQQQQQPQKQHLSSPLPPAVSQVAGAPSQCQAGTPQQQVPVTPQAPCQPHQPAPHQQSKAQAEMQSSASSKDSSQSKIIRFTLGQKKISRLPGPTARVSAAGSEAKTRGGSTTANNRRSQSFNNYDKSKPVTSPPPPPSSHEKEPLASSASSHPGMSDNAPASLESGSSSTPTNCSTSSAIPQPGAATKPWRSKSLSVKHSATVSMLSVKPPGPEAPRPTPEAMKPAPNNQKSMLEKLKLFNSKGGSKAGEGPGSRDTSCERLETLPSFEESEELEAASRMLTTVGPASSSPKIALKGIAQRTFSRALTNKKSSLKGNEKEKEKQQREKDKEKSKDLAKRASVTERLDLKEEPKEDPSGAAVPEMPKKSSKIASFIPKGGKLNSAKKEPMAPSHSGIPKPGMKSMPGKSPSAPAPSKEGERSRSGKLSSGLPQQKPQLDGRHSSSSSSLASSEGKGPGGTTLNHSISSQTVSGSVGTTQTTGSNTVSVQLPQPQQQYNHPNTATVAPFLYRSQTDTEGNVTAESSSTGVSVEPSHFTKTGQPALEELTGEDPEARRLRTVKNIADLRQNLEETMSSLRGTQVTHSTLETTFDTNVTTEMSGRSILSLTGRPTPLSWRLGQSSPRLQAGDAPSMGNGYPPRANASRFINTESGRYVYSAPLRRQLASRGSSVCHVDVSDKAGDEMDLEGISMDAPGYMSDGDVLSKNIRTDDITSGYMTDGGLGLYTRRLNRLPDGMAVVRETLQRNTSLGLGDADSWDDSSSVSSGISDTIDNLSTDDINTSSSISSYANTPASSRKNLDVQTDAEKHSQVERNSLWSGDDVKKSDGGSDSGIKMEPGSKWRRNPSDVSDESDKSTSGKKNPVISQTGSWRRGMTAQVGITMPRTKPSAPAGALKTPGTGKTDDAKVSEKGRLSPKASQVKRSPSDAGRSSGDESKKPLPSSSRTPTANANSFGFKKQSGSAAGLAMITASGVTVTSRSATLGKIPKSSALVSRSAGRKSSMDGAQNQDDGYLALSSRTNLQYRSLPRPSKSNSRNGAGNRSSTSSIDSNISSKSAGLPVPKLREPSKTALGSSLPGLVNQTDKEKGISSDNESVASCNSVKVNPAAQPVSSPAQTSLQPGAKYPDVASPTLRRLFGGKPTKQVPIATAENMKNSVVISNPHATMTQQGNLDSPSGSGVLSSGSSSPLYSKNVDLNQSPLASSPSSAHSAPSNSLTWGTNASSSSAVSKDGLGFQSVSSLHTSCESIDISLSSGGVPSHNSSTGLIASSKDDSLTPFVRTNSVKTTLSESPLSSPAASPKFCRSTLPRKQDSDPHLDRNTLPKKGLRYTPTSQLRTQEDAKEWLRSHSAGGLQDTAANSPFSSGSSVTSPSGTRFNFSQLASPTTVTQMSLSNPTMLRTHSLSNADGQYDPYTDSRFRNSSMSLDEKSRTMSRSGSFRDGFEEESWEKSSVDNFVSRLHSSLHFSLPLFHHARYELVHGSSLSLVSSTSSVYSTPEEKCQSEIRKLRRELDASQEKVSALTTQLTANAHLVAAFEQSLGNMTIRLQSLTMTAEQKDSELNELRKTIELLKKQNAAAQAAINGVINTPELNCKGNGTAQSADLRIRRQHSSDSVSSINSATSHSSVGSNIESDSKKKKRKNWVNELRSSFKQAFGKKKSPKSASSHSDIEEMTDSSLPSSPKLPHNGSTGSTPLLRNSHSNSLISECMDSEAETVMQLRNELRDKEMKLTDIRLEALSSAHQLDQLREAMNRMQSEIEKLKAENDRLKSESQGSGCSRAPSQVSISASPRQSMGLSQHSLNLTESTSLDMLLDDTGECSARKEGGRHVKIVVSFQEEMKWKEDSRPHLFLIGCIGVSGKTKWDVLDGVVRRLFKEYIIHVDPVSQLGLNSDSVLGYSIGEIKRSNTSETPELLPCGYLVGENTTISVTVKGLAENSLDSLVFESLIPKPILQRYVSLLIEHRRIILSGPSGTGKTYLANRLSEYIVLREGRELTDGVIATFNVDHKSSKELRQYLSNLADQCNSENNAVDMPLVIILDNLHHVSSLGEIFNGLLNCKYHKCPYIIGTMNQATSSTPNLQLHHNFRWVLCANHTEPVKGFLGRFLRRKLMETEISGRVRNMELVKIIDWIPKVWHHLNRFLEAHSSSDVTIGPRLFLSCPIDVDGSRVWFTDLWNYSIIPYLLEAVREGLQLYGRRAPWEDPAKWVMDTYPWAASPQQHEWPPLLQLRPEDVGFDGYSMPREGSTSKQMPPSDAEGDPLMNMLMRLQEAANYSSPQSYDSDSNSNSHHDDILDSSLESTL

SEQ ID NO: 32043 - protein, 1493 aa, Homo sapiens
  REGION 1..1493: note = ENSP00000437316
MLWPRNLTSWDDSSSVSSGISDTIDNLSTDDINTSSSISSYANTPASSRKNLDVQTDAEKHSQVERNSLWSGDDVKKSDGGSDSGIKMEPGSKWRRNPSDVSDESDKSTSGKKNPVISQTGSWRRGMTAQVGITMPRTKPSAPAGALKTPGTGKTDDAKVSEKGRLSPKASQVKRSPSDAGRSSGDESKKPLPSSSRTPTANANSFGFKKQSGSAAGLAMITASGVTVTSRSATLGKIPKSSALVSRSAGRKSSMDGAQNQDDGYLALSSRTNLQYRSLPRPSKSNSRNGAGNRSSTSSIDSNISSKSAGLPVPKLREPSKTALGSSLPGLVNQTDKEKGISSDNESVASCNSVKVNPAAQPVSSPAQTSLQPGAKYPDVASPTLRRLFGGKPTKQVPIATAENMKNSVVISNPHATMTQQGNLDSPSGSGVLSSGSSSPLYSKNVDLNQSPLASSPSSAHSAPSNSLTWGTNASSSSAVSKDGLGFQSVSSLHTSCESIDISLSSGGVPSHNSSTGLIASSKDDSLTPFVRTNSVKTTLSESDPHLDRNTLPKKGLRYTPTSQLRTQEDAKEWLRSHSAGGLQDTAANSPFSSGSSVTSPSGTRFNFSQLASPTTVTQMSLSNPTMLRTHSLSNADGQYDPYTDSRFRNSSMSLDEKSRTMSRSGSFRDGFEEVHGSSLSLVSSTSSVYSTPEEKCQSEIRKLRRELDASQEKVSALTTQLTANAHLVAAFEQSLGNMTIRLQSLTMTAEQKDSELNELRKTIELLKKQNAAAQAAINGVINTPELNCKGNGTAQSADLRIRRQHSSDSVSSINSATSHSSVGSNIESDSKKKKRKNWLRSSFKQAFGKKKSPKSASSHSDIEEMTDSSLPSSPKLPHNGSTGSTPLLRNSHSNSLISECMDSEAETVMQLRNELRDKEMKLTDIRLEALSSAHQLDQLREAMNRMQSEIEKLKAENDRLKSESQGSGCSRAPSQVSISASPRQSMGLSQHSLNLTESTSLDMLLDDTGECSARKEGGRHVKIVVSFQEEMKWKEDSRPHLFLIGCIGVSGKTKWDVLDGVVRRLFKEYIIHVDPVSQLGLNSDSVLGYSIGEIKRSNTSETPELLPCGYLVGENTTISVTVKGLAENSLDSLVFESLIPKPILQRYVSLLIEHRRIILSGPSGTGKTYLANRLSEYIVLREGRELTDGVIATFNVDHKSSKELRQYLSNLADQCNSENNAVDMPLVIILDNLHHVSSLGEIFNGLLNCKYHKCPYIIGTMNQATSSTPNLQLHHNFRWVLCANHTEPVKGFLGRFLRRKLMETEISGRVRNMELVKIIDWIPKVWHHLNRFLEAHSSSDVTIGPRLFLSCPIDVDGSRVWFTDLWNYSIIPYLLEAVREGLQLYGRRAPWEDPAKWVMDTYPWAASPQQHEWPPLLQLRPEDVGFDGYSMPREGSTSKQMPPSDAEGDPLMNMLMRLQEAANYSSPQSYDSDSNSNSHHDDILDSSLESTL

SEQ ID NO: 32044 - protein, 815 aa, Homo sapiens
  REGION 1..815: note = ENSP00000437136
MLWPRNLTSWDDSSSVSSGISDTIDNLSTDDINTSSSISSYANTPASSRKNLDVQTDAEKHSQVERNSLWSGDDVKKSDGGSDSGIKMEPGSKWRRNPSDVSDESDKSTSGKKNPVISQTGSWRRGMTAQVGITMPRTKPSAPAGALKTPGTGKTDDAKVSEKGRLSPKASQVKRSPSDAGRSSGDESKKPLPSSSRTPTANANSFGFKKQSGSAAGLAMITASGVTVTSRSATLGKIPKSSALVSRSAGRKSSMDGAQNQDDGYLALSSRTNLQYRSLPRPSKSNSRNGAGNRSSTSSIDSNISSKSAGLPVPKLREPSKTALGSSLPGLVNQTDKEKGISSDNESVASCNSVKVNPAAQPVSSPAQTSLQPGAKYPDVASPTLRRLFGGKPTKQVPIATAENMKNSVVISNPHATMTQQGNLDSPSGSGVLSSGSSSPLYSKNVDLNQSPLASSPSSAHSAPSNSLTWGTNASSSSAVSKDGLGFQSVSSLHTSCESIDISLSSGGVPSHNSSTGLIASSKDDSLTPFVRTNSVKTTLSERYTPTSQLRTQEDAKEWLRSHSAGGLQDTAANSPFSSGSSVTSPSGTRFNFSQLASPTTVTQMSLSNPTMLRTHSLSNADGQYDPYTDSRFRNSSMSLDEKSRTMSRSGSFRDGFEEVHGSSLSLVSSTSSVYSTPEEKCQSEIRKLRRELDASQEKVSALTTQLTANAHLVAAFEQSLGNMTIRLQSLTMTAEQKDSELNELRKTIELLKKQNAAAQAAINGVINTPELNCKGNGTAQSADLRIRRQHSSDSVSSINSATSHSSVGSNIESD

SEQ ID NO: 32045 - protein, 160 aa, Homo sapiens
  REGION 1..160: note = ENSP00000431276
MLWPRNLTSWDDSSSVSSGISDTIDNLSTDDINTSSSISSYANTPASSRKNLDVQTDAEKHSQVERNSLWSGDDVKKSDGGSDSGIKMEPGSKWRRNPSDVSDESDKSTSGKKNPVISQTGSWRRGMTAQVGITMPRTKPSAPAGALKTPGTGKTDDAKV

SEQ ID NO: 32046 - protein, 2433 aa, Homo sapiens
  REGION 1..2433: note = ENSP00000443489
MPAILVASKMKSGLPKPVHSAAPILHVPPARAGPQPCYLKLGSKVEVSKTTYPSQIPLKSQVLQGLQEPAGEGLPLRKSGSVENGFDTQIYTDWANHYLAKSGHKRLIRDLQQDVTDGVLLAQIIQVVANEKIEDINGCPKNRSQMIENIDACLNFLAAKGINIQGLSAEEIRNGNLKAILGLFFSLSRYKQQQQQPQKQHLSSPLPPAVSQVAGAPSQCQAGTPQQQVPVTPQAPCQPHQPAPHQQSKAQAEMQSRLPGPTARVSAAGSEAKTRGGSTTANNRRSQSFNNYDKSKPVTSPPPPPSSHEKEPLASSASSHPGMSDNAPASLESGSSSTPTNCSTSSAIPQPGAATKPWRSKSLSVKHSATVSMLSVKPPGPEAPRPTPEAMKPAPNNQKSMLEKLKLFNSKGGSKAGEGPGSRDTSCERLETLPSFEESEELEAASRMLTTVGPASSSPKIALKGIAQRTFSRALTNKKSSLKGNEKEKEKQQREKDKEKSKDLAKRASVTERLDLKEEPKEDPSGAAVPEMPKKSSKIASFIPKGGKLNSAKKEPMAPSHSGIPKPGMKSMPGKSPSAPAPSKEGERSRSGKLSSGLPQQKPQLDGRHSSSSSSLASSEGKGPGGTTLNHSISSQTVSGSVGTTQTTGSNTVSVQLPQPQQQYNHPNTATVAPFLYRSQTDTEGNVTAESSSTGVSVEPSHFTKTGQPALEELTGEDPEARRLRTVKNIADLRQNLEETMSSLRGTQVTHSTLETTFDTNVTTEMSGRSILSLTGRPTPLSWRLGQSSPRLQAGDAPSMGNGYPPRANASRFINTESGRYVYSAPLRRQLASRGSSVCHVDVSDKAGDEMDLEGISMDAPGYMSDGDVLSKNIRTDDITSGYMTDGGLGLYTRRLNRLPDGMAVVRETLQRNTSLGLGDADSWDDSSSVSSGISDTIDNLSTDDINTSSSISSYANTPASSRKNLDVQTDAEKHSQVERNSLWSGDDVKKSDGGSDSGIKMEPGSKWRRNPSDVSDESDKSTSGKKNPVISQTGSWRRGMTAQVGITMPRTKPSAPAGALKTPGTGKTDDAKVSEKGRLSPKASQVKRSPSDAGRSSGDESKKPLPSSSRTPTANANSFGFKKQSGSAAGLAMITASGVTVTSRSATLGKIPKSSALVSRSAGRKSSMDGAQNQDDGYLALSSRTNLQYRSLPRPSKSNSRNGAGNRSSTSSIDSNISSKSAGLPVPKLREPSKTALGSSLPGLVNQTDKEKGISSDNESVASCNSVKVNPAAQPVSSPAQTSLQPGAKYPDVASPTLRRLFGGKPTKQVPIATAENMKNSVVISNPHATMTQQGNLDSPSGSGVLSSGSSSPLYSKNVDLNQSPLASSPSSAHSAPSNSLTWGTNASSSSAVSKDGLGFQSVSSLHTSCESIDISLSSGGVPSHNSSTGLIASSKDDSLTPFVRTNSVKTTLSESPLSSPAASPKFCRSTLPRKQDSDPHLDRNTLPKKGLRYTPTSQLRTQEDAKEWLRSHSAGGLQDTAANSPFSSGSSVTSPSGTRFNFSQLASPTTVTQMSLSNPTMLRTHSLSNADGQYDPYTDSRFRNSSMSLDEKSRTMSRSGSFRDGFEEVHGSSLSLVSSTSSVYSTPEEKCQSEIRKLRRELDASQEKVSALTTQLTANAHLVAAFEQSLGNMTIRLQSLTMTAEQKDSELNELRKTIELLKKQNAAAQAAINGVINTPELNCKGNGTAQSADLRIRRQHSSDSVSSINSATSHSSVGSNIESDSKKKKRKNWVNIQLRSSFKQAFGKKKSPKSASSHSDIEEMTDSSLPSSPKLPHNGSTGSTPLLRNSHSNSLISECMDSEAETVMQLRNELRDKEMKLTDIRLEALSSAHQLDQLREAMNRMQSEIEKLKAENDRLKSESQGSGCSRAPSQVSISASPRQSMGLSQHSLNLTESTSLDMLLDDTGECSARKEGGRHVKIVVSFQEEMKWKEDSRPHLFLIGCIGVSGKTKWDVLDGVVRRLFKEYIIHVDPVSQLGLNSDSVLGYSIGEIKRSNTSETPELLPCGYLVGENTTISVTVKGLAENSLDSLVFESLIPKPILQRYVSLLIEHRRIILSGPSGTGKTYLANRLSEYIVLREGRELTDGVIATFNVDHKSSKELRQYLSNLADQCNSENNAVDMPLVIILDNLHHVSSLGEIFNGLLNCKYHKCPYIIGTMNQATSSTPNLQLHHNFRWVLCANHTEPVKGFLGRFLRRKLMETEISGRVRNMELVKIIDWIPKVWHHLNRFLEAHSSSDVTIGPRLFLSCPIDVDGSRVWFTDLWNYSIIPYLLEAVREGLQLYGRRAPWEDPAKWVMDTYPWAASPQQHEWPPLLQLRPEDVGFDGYSMPREGSTSKQMPPSDAEGDPLMNMLMRLQEAANYSSPQSYDSDSNSNSHHDDILDSSLESTL

SEQ ID NO: 32047 - protein, 2489 aa, Homo sapiens
  REGION 1..2489: note = ENSP00000435395
MPAILVASKMKSGLPKPVHSAAPILHVPPARAGPQPCYLKLGSKVEVSKTTYPSQIPLKSQVLQGLQEPAGEGLPLRKSGSVENGFDTQIYTDWANHYLAKSGHKRLIRDLQQDVTDGVLLAQIIQVVANEKIEDINGCPKNRSQMIENIDACLNFLAAKGINIQGLSAEEIRNGNLKAILGLFFSLSRYKQQQQQPQKQHLSSPLPPAVSQVAGAPSQCQAGTPQQQVPVTPQAPCQPHQPAPHQQSKAQAEMQSSASSKDSSQSKIIRFTLGQKKISRLPGPTARVSAAGSEAKTRGGSTTANNRRSQSFNNYDKSKPVTSPPPPPSSHEKEPLASSASSHPGMSDNAPASLESGSSSTPTNCSTSSAIPQPGAATKPWRSKSLSVKHSATVSMLSVKPPGPEAPRPTPEAMKPAPNNQKSMLEKLKLFNSKGGSKAGEGPGSRDTSCERLETLPSFEESEELEAASRMLTTVGPASSSPKIALKGIAQRTFSRALTNKKSSLKGNEKEKEKQQREKDKEKSKDLAKRASVTERLDLKEEPKEDPSGAAVPEMPKKSSKIASFIPKGGKLNSAKKEPMAPSHSGIPKPGMKSMPGKSPSAPAPSKEGERSRSGKLSSGLPQQKPQLDGRHSSSSSSLASSEGKGPGGTTLNHSISSQTVSGSVGTTQTTGSNTVSVQLPQPQQQYNHPNTATVAPFLYRSQTDTEGNVTAESSSTGVSVEPSHFTKTGQPALEELTGEDPEARRLRTVKNIADLRQNLEETMSSLRGTQVTHSTLETTFDTNVTTEMSGRSILSLTGRPTPLSWRLGQSSPRLQAGDAPSMGNGYPPRANASRFINTESGRYVYSAPLRRQLASRGSSVCHVDVSDKAGDEMDLEGISMDAPGYMSDGDVLSKNIRTDDITSGYMTDGGLGLYTRRLNRLPDGMAVVRETLQRNTSLGLGDADSWDDSSSVSSGISDTIDNLSTDDINTSSSISSYANTPASSRKNLDVQTDAEKHSQVERNSLWSGDDVKKSDGGSDSGIKMEPGSKWRRNPSDVSDESDKSTSGKKNPVISQTGSWRRGMTAQVGITMPRTKPSAPAGALKTPGTGKTDDAKVSEKGRLSPKASQVKRSPSDAGRSSGDESKKPLPSSSRTPTANANSFGFKKQSGSAAGLAMITASGVTVTSRSATLGKIPKSSALVSRSAGRKSSMDGAQNQDDGYLALSSRTNLQYRSLPRPSKSNSRNGAGNRSSTSSIDSNISSKSAGLPVPKLREPSKTALGSSLPGLVNQTDKEKGISSDNESVASCNSVKVNPAAQPVSSPAQTSLQPGAKYPDVASPTLRRLFGGKPTKQVPIATAENMKNSVVISNPHATMTQQGNLDSPSGSGVLSSGSSSPLYSKNVDLNQSPLASSPSSAHSAPSNSLTWGTNASSSSAVSKDGLGFQSVSSLHTSCESIDISLSSGGVPSHNSSTGLIASSKDDSLTPFVRTNSVKTTLSESPLSSPAASPKFCRSTLPRKQDSDPHLDRNTLPKKGLRYTPTSQLRTQEDAKEWLRSHSAGGLQDTAANSPFSSGSSVTSPSGTRFNFSQLASPTTVTQMSLSNPTMLRTHSLSNADGQYDPYTDSRFRNSSMSLDEKSRTMSRSGSFRDGFEEESWEKSSVDNFVSRLHSSLHFSLPLFHHARYELVHGSSLSLVSSTSSVYSTPEEKCQSEIRKLRRELDASQEKVSALTTQLTANAHLVAAFEQSLGNMTIRLQSLTMTAEQKDSELNELRKTIELLKKQNAAAQAAINGVINTPELNCKGNGTAQSADLRIRRQHSSDSVSSINSATSHSSVGSNIESDSKKKKRKNWVNIQLRSSFKQAFGKKKSPKSASSHSDIEEMTDSSLPSSPKLPHNGSTGSTPLLRNSHSNSLISECMDSEAETVMQLRNELRDKEMKLTDIRLEALSSAHQLDQLREAMNRMQSEIEKLKAENDRLKSESQGSGCSRAPSQVSISASPRQSMGLSQHSLNLTESTSLDMLLDDTGECSARKEGGRHVKIVVSFQEEMKWKEDSRPHLFLIGCIGVSGKTKWDVLDGVVRRLFKEYIIHVDPVSQLGLNSDSVLGYSIGEIKRSNTSETPELLPCGYLVGENTTISVTVKGLAENSLDSLVFESLIPKPILQRYVSLLIEHRRIILSGPSGTGKTYLANRLSEYIVLREGRELTDGVIATFNVDHKSSKELRQYLSNLADQCNSENNAVDMPLVIILDNLHHVSSLGEIFNGLLNCKYHKCPYIIGTMNQATSSTPNLQLHHNFRWVLCANHTEPVKGFLGRFLRRKLMETEISGRVRNMELVKIIDWIPKVWHHLNRFLEAHSSSDVTIGPRLFLSCPIDVDGSRVWFTDLWNYSIIPYLLEAVREGLQLYGRRAPWEDPAKWVMDTYPWAASPQQHEWPPLLQLRPEDVGFDGYSMPREGSTSKQMPPSDAEGDPLMNMLMRLQEAANYSSPQSYDSDSNSNSHHDDILDSSLESTL

SEQ ID NO: 32048 - protein, 193 aa, Homo sapiens [sequence omitted]

SEQ ID NO: 32049 - protein, 193 aa, Homo sapiens [sequence omitted]

SEQ ID NO: 32050 - protein, 193 aa, Homo sapiens [sequence omitted]

SEQ ID NO: 32051 - protein, 194 aa, Homo sapiens
  REGION 1..194: note = ENSP00000428781
MGKQNSKLRPEVMQDLLESTDFTEHEIQEWYKGFLRDCPSGHLSMEEFKKIYGNFFPYGDASKFAEHVFRTFDANGDGTIDFREFIIALSVTSRGKLEQKLKWAFSMYDLDGNGYISKAEMLEIVQAIYKMVSSVMKMPEDESTPEKRTEKIFRQMDTNRDASFVVDASWECPEPQCACGEHGQTSWCSLFDDF

SEQ ID NO: 32052 - protein, 152 aa, Homo sapiens
  REGION 1..152: note = ENSP00000429466
MGKQNSKLRPEVMQDLLESTDFTEHEIQEWYKGFLRDCPSGHLSMEEFKKIYGNFFPYGDASKFAEHVFRTFDANGDGTIDFREFIIALSVTSRGKLEQKLKWAFSMYDLDGNGYISKAEMLEIVQERKKMAQLFFHRFTLVELICVSLEIK

SEQ ID NO: 32053 - protein, 136 aa, Homo sapiens
  REGION 1..136: note = ENSP00000429255
MGKQNSKLRPEVMQDLLESTDFTEHEIQEWYKGFLRDCPSGHLSMEEFKKIYGNFFPYGDASKFAEHVFRTFDANGDGTIDFREFIIALSVTSRGKLEQKLKWAFSMYDLDGNGYISKAEMLEIVQAIYKMVSSVM

SEQ ID NO: 32054 - protein, 121 aa, Homo sapiens
  REGION 1..121: note = ENSP00000430731
MGKQNSKLRPEVMQDLLESTDFTEHEIQEWYKGFLRDCPSGHLSMEEFKKIYGNFFPYGDASKFAEHVFRTFDANGDGTIDFREFIIALSVTSRGKLEQKLKWAFSMYDLDGNGYISKAEM

SEQ ID NO: 32055 - protein, 120 aa, Homo sapiens
  REGION 1..120: note = ENSP00000430925
MGKQNSKLRPEVMQDLLESTDFTEHEIQEWYKGFLRDCPSGHLSMEEFKKIYGNFFPYGDASKFAEHVFRTFDANGDGTIDFREFIIALSVTSRGKLEQKLKWAFSMYDLDGNGYISKAE

SEQ ID NO: 32056 - protein, 116 aa, Homo sapiens
  REGION 1..116: note = ENSP00000429522
MGKQNSKLRPEVMQDLLESTDFTEHEIQEWYKGFLRDCPSGHLSMEEFKKIYGNFFPYGDASKFAEHVFRTFDANGDGTIDFREFIIALSVTSRGKLEQKLKWAFSMYDLDGNGYI

SEQ ID NO: 32057 - protein, 112 aa, Homo sapiens
  REGION 1..112: note = ENSP00000428598
MGKQNSKLRPEVMQDLLESTDFTEHEIQEWYKGFLRDCPSGHLSMEEFKKIYGNFFPYGDASKFAEHVFRTFDANGDGTIDFREFIIALSVTSRGKLEQKLKWAFSMYDLDG

SEQ ID NO: 32058 - protein, 111 aa, Homo sapiens
  REGION 1..111: note = ENSP00000428312
MGKQNSKLRPEVMQDLLESTDFTEHEIQEWYKGFLRDCPSGHLSMEEFKKIYGNFFPYGDASKFAEHVFRTFDANGDGTIDFREFIIALSVTSRGKLEQKLKWAFSMYDLD

SEQ ID NO: 32059 - protein, 105 aa, Homo sapiens
  REGION 1..105: note = ENSP00000429493
MGKQNSKLRPEVMQDLLESTDFTEHEIQEWYKGFLRDCPSGHLSMEEFKKIYGNFFPYGDASKFAEHVFRTFDANGDGTIDFREFIIALSVTSRGKLEQKLKWAF

SEQ ID NO: 32060 - protein, 105 aa, Homo sapiens; identical to SEQ ID NO: 32059
  REGION 1..105: note = ENSP00000429245

SEQ ID NO: 32061 - protein, 87 aa, Homo sapiens
  REGION 1..87: note = ENSP00000430064
MGKQNSKLRPEVMQDLLESTDFTEHEIQEWYKGFLRDCPSGHLSMEEFKKIYGNFFPYGDASKFAEHVFRTFDANGDGTIDFREFII

SEQ ID NO: 32062 - protein, 85 aa, Homo sapiens
  REGION 1..85: note = ENSP00000430534
MGKQNSKLRPEVMQDLLESTDFTEHEIQEWYKGFLRDCPSGHLSMEEFKKIYGNFFPYGDASKFAEHVFRTFDANGDGTIDFREF

SEQ ID NO: 32063 - protein, 81 aa, Homo sapiens
  REGION 1..81: note = ENSP00000428193
MGKQNSKLRPEVMQDLLESTDFTEHEIQEWYKGFLRDCPSGHLSMEEFKKIYGNFFPYGDASKFAEHVFRTFDANGDGTID

SEQ ID NO: 32064 - protein, 77 aa, Homo sapiens
  REGION 1..77: note = ENSP00000430365
MGKQNSKLRPEVMQDLLESTDFTEHEIQEWYKGFLRDCPSGHLSMEEFKKIYGNFFPYGDASKFAEHVFRTFDANGD

SEQ ID NO: 32065 - protein, 74 aa, Homo sapiens
  REGION 1..74: note = ENSP00000428093
MGKQNSKLRPEVMQDLLESTDFTEHEIQEWYKGFLRDCPSGHLSMEEFKKIYGNFFPYGDASKFAEHVFRTFDA

SEQ ID NO: 32066 - protein, 52 aa, Homo sapiens
  REGION 1..52: note = ENSP00000429296
MGKQNSKLRPEVMQDLLESTDFTEHEIQEWYKGFLRDCPSGHLSMEEFKKIY

SEQ ID NO: 32067 - protein, 15 aa, Homo sapiens
  REGION 1..15: note = ENSP00000430578
MGKQNSKLRPEVMQD

SEQ ID NO: 32068 - protein, 14 aa, Homo sapiens
  REGION 1..14: note = ENSP00000429162
MGKQNSKLRPEVMQ

SEQ ID NO: 32069 - skipped

SEQ ID NO: 32070 - protein, 193 aa, Homo sapiens [sequence omitted]

SEQ ID NO: 32071 - protein, 193 aa, Homo sapiens [sequence omitted]

SEQ ID NO: 32072 - protein, 837 aa, Homo sapiens
  REGION 1..837: note = ENSP00000383392
MSLLLSFYLLGLLVSSGQALLQVTISLSKVELSVGESKFFTCTAIGEPESIDWYNPQGEKIISTQRVVVQKEGVRSRLTIYNANIEDAGIYRCQATDAKGQTQEATVVLEIYQKLTFREVVSPQEFKQGEDAEVVCRVSSSPAPAVSWLYHNEEVTTISDNRFAMLANNNLQILNINKSDEGIYRCEGRVEARGEIDFRDIIVIVNVPPAISMPQKSFNATAERGEEMTFSCRASGSPEPAISWFRNGKLIEENEKYILKGSNTELTVRNIINSDGGPYVCRATNKAGEDEKQAFLQVFVQPHIIQLKNETTYENGQVTLVCDAEGEPIPEITWKRAVDGFTFTEGDKSLDGRIEVKGQHGSSSLHIKDVKLSDSGRYDCEAASRIGGHQKSMYLDIEYAPKFISNQTIYYSWEGNPINISCDVKSNPPASIHWRRDKLVLPAKNTTNLKTYSTGRKMILEIAPTSDNDFGRYNCTATNHIGTRFQEYILALADVPSSPYGVKIIELSQTTAKVSFNKPDSHGGVPIHHYQVDVKEVASEIWKIVRSHGVQTMVVLNNLEPNTTYEIRVAAVNGKGQGDYSKIEIFQTLPVREPSPPSIHGQPSSGKSFKLSITKQDDGGAPILEYIVKYRSKDKEDQWLEKKVQGNKDHIILEHLQWTMGYEVQITAANRLGYSEPTVYEFSMPPKPNIIKDTLFNGLGLGAVIGLGVAALLLILVVTDVSCFFIRQCGLLMCITRRMCGKKSGSSGKSKELEEGKAAYLKDGSKEPIVEMRTEDERVTNHEDGSPVNEPNETTPLTEPEKLPLKEEDGKEALNPETIEIKVSNDIIQSKEDDSKA

SEQ ID NO: 32073 - protein, 819 aa, Homo sapiens
  REGION 1..819: note = ENSP00000284894
ALLQVTISLSKVELSVGESKFFTCTAIGEPESIDWYNPQGEKIISTQRVVVQKEGVRSRLTIYNANIEDAGIYRCQATDAKGQTQEATVVLEIYQKLTFREVVSPQEFKQGEDAEVVCRVSSSPAPAVSWLYHNEEVTTISDNRFAMLANNNLQILNINKSDEGIYRCEGRVEARGEIDFRDIIVIVNVPPAISMPQKSFNATAERGEEMTFSCRASGSPEPAISWFRNGKLIEENEKYILKGSNTELTVRNIINSDGGPYVCRATNKAGEDEKQAFLQVFVQPHIIQLKNETTYENGQVTLVCDAEGEPIPEITWKRAVDGFTFTEGDKSLDGRIEVKGQHGSSSLHIKDVKLSDSGRYDCEAASRIGGHQKSMYLDIEYAPKFISNQTIYYSWEGNPINISCDVKSNPPASIHWRRDKLVLPAKNTTNLKTYSTGRKMILEIAPTSDNDFGRYNCTATNHIGTRFQEYILALADVPSSPYGVKIIELSQTTAKVSFNKPDSHGGVPIHHYQVDVKEVASEIWKIVRSHGVQTMVVLNNLEPNTTYEIRVAAVNGKGQGDYSKIEIFQTLPVREPSPPSIHGQPSSGKSFKLSITKQDDGGAPILEYIVKYRSKDKEDQWLEKKVQGNKDHIILEHLQWTMGYEVQITAANRLGYSEPTVYEFSMPPKPNIIKDTLFNGLGLGAVIGLGVAALLLILVVTDVSCFFIRQCGLLMCITRRMCGKKSGSSGKSKELEEGKAAYLKDGSKEPIVEMRTEDERVTNHEDGSPVNEPNETTPLTEPEKLPLKEEDGKEALNPETIEIKVSNDIIQSKEDDSKA

SEQ ID NO: 32074 - protein, 1321 aa, Homo sapiens
  REGION 1..1321: note = ENSP00000252575
MGAPFVWALGLLMLQMLLFVAGEQGTQDITDASERGLHMQKLGSGSVQAALAELVALPCLFTLQPRPSAARDAPRIKWTKVRTASGQRQDLPILVAKDNVVRVAKSWQGRVSLPSYPRRRANATLLLGPLRASDSGLYRCQVVRGIEDEQDLVPLEVTGVVFHYRSARDRYALTFAEAQEACRLSSAIIAAPRHLQAAFEDGFDNCDAGWLSDRTVRYPITQSRPGCYGDRSSLPGVRSYGRRNPQELYDVYCFARELGGEVFYVGPARRLTLAGARAQCRRQGAALASVGQLHLAWHEGLDQCDPGWLADGSVRYPIQTPRRRCGGPAPGVRTVYRFANRTGFPSPAERFDAYCFRAHHPTSQHGDLETPSSGDEGEILSAEGPPVRELEPTLEEEEVVTPDFQEPLVSSGEEETLILEEKQESQQTLSPTPGDPMLASWPTGEVWLSTVAPSPSDMGAGTAASSHTEVAPTDPMPRRRGRFKGLNGRYFQQQEPEPGLQGGMEASAQPPTSEAAVNQMEPPLAMAVTEMLGSGQSRSPWADLTNEVDMPGAGSAGGKSSPEPWLWPPTMVPPSISGHSRAPVLELEKAEGPSARPATPDLFWSPLEATVSAPSPAPWEAFPVATSPDLPMMAMLRGPKEWMLPHPTPISTEANRVEAHGEATATAPPSPAAETKVYSLPLSLTPTGQGGEAMPTTPESPRADFRETGETSPAQVNKAEHSSSSPWPSVNRNVAVGFVPTETATEPTGLRGIPGSESGVFDTAESPTSGLQATVDEVQDPWPSVYSKGLDASSPSAPLGSPGVFLVPKVTPNLEPWVATDEGPTVNPMDSTVTPAPSDASGIWEPGSQVFEEAESTTLSPQVALDTSIVTPLTTLEQGDKVGVPAMSTLGSSSSQPHPEPEDQVETQGTSGASVPPHQSSPLGKPAVPPGTPTAASVGESASVSSGEPTVPWDPSSTLLPVTLGIEDFELEVLAGSPGVESFWEEVASGEEPALPGTPMNAGAEEVHSDPCENNPCLHGGTCNANGTMYGCSCDQGFAGENCEIDIDDCLCSPCENGGTCIDEVNGFVCLCLPSYGGSFCEKDTEGCDRGWHKFQGHCYRYFAHRRAWEDAEKDCRRRSGHLTSVHSPEEHSFINSFGHENTWIGLNDRIVERDFQWTDNTGLQFENWRENQPDNFFAGGEDCVVMVAHESGRWNDVPCNYNLPYVCKKGTVLCGPPPAVENASLIGARKAKYNVHATVRYQCNEGFAQHHVATIRCRSNGKWDRPQIVCTKPRRSHRMRRHHHHHQHHHQHHHHKSRKERRKHKKHPTEDWEKDEGNFC

SEQ ID NO: 32075 - protein, 175 aa, Homo sapiens
  REGION 1..175: note = ENSP00000465599
  VARIANT 1: note = Any amino acid
XGCDRGWHKFQGHCYRYFAHRRAWEDAEKDCRRRSGHLTSVHSPEEHSFINSFGHENTWIGLNDRIVERDFQWTDNTGLQFENWRENQPDNFFAGGEDCVVMVAHESGRWNDVPCNYNLPYVCKKGTARRSHRMRRHHHHHQHHHQHHHHKSRKERRKHKKHPTEDWEKDEGNFC

SEQ ID NO: 32076 - protein, 440 aa, Homo sapiens
  REGION 1..440: note = ENSP00000418571
MSSCRGQKVAGGLRVVSPFPLCQPAGEPSQGKMRSSCVLLTALVALAAYYVYIPLPGSVSDPWKLMLLDATFRGAQQVSNLIHYLGLSHHLLALNFIIVSFGKKSAWSSAQVKVTDTDFDGVEVRVFEGPPKPEEPLKRSVVYIHGGGWALASAKIRYYDELCTAMAEELNAVIVSIEYRLVPKVYFPEQIHDVVRATKYFLKPEVLQKYMVDPGRICISGDSAGGNLAAALGQQFTQDASLKNKLKLQALIYPVLQALDFNTPSYQQNVNTPILPRYVMVKYWVDYFKGNYDFVQAMIVNNHTSLDVEEAAAVRARLNWTSLLPASFTKNYKPVVQTTGNARIVQELPQLLDARSAPLIADQAVLQLLPKTYILTCEHDVLRDDGIMYAKRLESAGVEVTLDHFEDGFHGCMIFTSWPTNFSVGIRTRNSYIKWLDQNL

SEQ ID NO: 32077 - protein, 307 aa, Homo sapiens
  REGION 1..307: note = ENSP00000392934
  VARIANT 1: note = Any amino acid
XGGLRVVSPFPLCQPAGEPSQGKMRSSCVLLTALVALAAYYVYIPLPGSVSDPWKLMLLDATFRGAQQVSNLIHYLGLSHHLLALNFIIVSFGKKSAWSSAQVKVTDTDFDGVEVRVFEGPPKPEEPLKRSVVYIHGGGWALASASASWSPSDEIRYYDELCTAMAEELNAVIVSIEYRLVPKVYFPEQIHDVVRATKYFLKPEVLQKYMVDPGRICISGDSAGGNLAAALGQQFTQDASLKNKLKLQALIYPVLQALDFNTPSYQQNVNTPILPRYVMVKYWVDYFKGNYDFVQAMIVNNHTSLDV

SEQ ID NO: 32078 - protein, 93 aa, Homo sapiens
  REGION 1..93: note = ENSP00000402196
MSSCRGQKVAGGLRVVSPFPLCQPAGEPSQGKMRSSCVLLTALVALAAYYVYIPLPGSVSDPWKLMLLDATFRGAQQVKSGIMMSCVQQWLRN

SEQ ID NO: 32079 - protein, 448 aa, Homo sapiens
  REGION 1..448: note = ENSP00000442464
MSSCRGQKVAGGLRVVSPFPLCQPAGEPSQGKMRSSCVLLTALVALAAYYVYIPLPGSVSDPWKLMLLDATFRGAQQVSNLIHYLGLSHHLLALNFIIVSFGKKSAWSSAQVKVTDTDFDGVEVRVFEGPPKPEEPLKRSVVYIHGGGWALASASASWSPSDEIRYYDELCTAMAEELNAVIVSIEYRLVPKVYFPEQIHDVVRATKYFLKPEVLQKYMVDPGRICISGDSAGGNLAAALGQQFTQDASLKNKLKLQALIYPVLQALDFNTPSYQQNVNTPILPRYVMVKYWVDYFKGNYDFVQAMIVNNHTSLDVEEAAAVRARLNWTSLLPASFTKNYKPVVQTTGNARIVQELPQLLDARSAPLIADQAVLQLLPKTYILTCEHDVLRDDGIMYAKRLESAGVEVTLDHFEDGFHGCMIFTSWPTNFSVGIRTRNSYIKWLDQNL

SEQ ID NO: 32080 - protein, 275 aa, Homo sapiens
  REGION 1..275: note = ENSP00000443227
MAEELNAVIVSIEYRLVPKVYFPEQIHDVVRATKYFLKPEVLQKYMVDPGRICISGDSAGGNLAAALGQQFTQDASLKNKLKLQALIYPVLQALDFNTPSYQQNVNTPILPRYVMVKYWVDYFKGNYDFVQAMIVNNHTSLDVEEAAAVRARLNWTSLLPASFTKNYKPVVQTTGNARIVQELPQLLDARSAPLIADQAVLQLLPKTYILTCEHDVLRDDGIMYAKRLESAGVEVTLDHFEDGFHGCMIFTSWPTNFSVGIRTRNSYIKWLDQNL

SEQ ID NO: 32081 - protein, 244 aa, Homo sapiens
  REGION 1..244: note = ENSP00000490966
  VARIANT 1: note = Any amino acid
XSNCQMRTLDSGIGTFPLPDSGNRSTGRYLCQPDSPEDAEPLLPLQSALSAVSSMRAQTLEREVPSSTDGQRPADSAIVHSTSDPIMTARGMRPLQSRLPKPASSGKVSSQKQNEAEPRPQTCSSFGYAEDPMASQPLPDWGSEVAATGTQKLRQLEETKDDPENRLSKISLESFNKFNSNTVILLEKEKNSLNKVEGQKEEKEKNEETSLSSSDRPGVDNLESLSDSLYDSFSSCASQGSNDV

SEQ ID NO: 32082 - protein, 1909 aa, Homo sapiens
  REGION 1..1909: note = ENSP00000387128
MEGKRQLEKRDFGKRLSLDSSLVEYMDSNKYIEHLLTQLEEQHRSLWREKLAVARLQREVAQRTSEGAMHEKLIHELEEERHLRLQSEKRLQEVTLESERNRIQMRSLQQQFSRMEETVRNLLQSQGSPEQKKEETVNIMVYQEKLSEEERKHKEALEDLHMVVDEDSRSESSSTDEGKEKTKLLLERLKALEAENSALALENENQREQYERCLDEVANQVVQALLTQKDLREECVKLKTRVFDLEQQNRTLSILFQQRVRPTSDLLLQKLHSRLLDLSSGDLLSEVERNRSLTQSRTDAEVHEHQLNTKSALKCPGLGAVIPGHLCPRNSYSSSSELSLSSTCSEYSSGSSYTWHDGKNLRKRQSSQNWDKRLSIDSSLPSGFASPTNELPPTRIKESHILEGLRKLQKRKVLLEPPSVITKWGYKDCMNSNEGIYSPGIKSSSLKEYPPCKTADLGSPCKEPHKTFVYDLDSHVDADDDPSTLALLQAVPNQSCRPHGSKLTHSVSDSLFGWETNRKHFLEGTSSVYPKERPEKLTSCASSCPLEMKLCPSVQTPQVQRERGPQGQGHGRMALNLQLSDTDDNETFDELHIESSDEKSPSDVSLAADTDKSVENLDVLVGFGKSLCGSPEEEEKQVPIPSETRPKTFSFIKQQRVVKRTSSEECVTVIFDAEDGEPIEFSSHQTGVVTVTRNEISINSTPAGPKAEHTELLPQGIACLQPRAAARDYTFFKRSEEDTEKNIPKDNVDNVPRVSTESFSSRTVTQNPQQQKLVKPTHNISCQSNSRSSAPMGIYQKQNLTKIPPRGKSSPQKSKLMEPEATTLLPSSGLVTLEKSPALAPGKLSRFMKTESSGPLFELRSDPHIPKHSAQLPHSSRMPSRRDWVQCPKSQTPGSRSRPAIESSDSGEPPTRDEHCGSGPEAGVKSPSPPPPPGRSVSLLARPSYDYSPAPSSTKSETRVPSETARTPFKSPLLKGISAPVISSNPATTEVQRKKPSVAFKKPIFTHPMPSPEAVIQTRCPAHAPSSSFTVMALGPPKVSPKRGVPKTSPRQTLGTPQRDIGLQTPRISPSTHEPLEMTSSKSVSPGRKGQLNDSASTPPKPSFLGVNESPSSQVSSSSSSSSPAKSHNSPHGCQSAHEKGLKTRLPVGLKVLMKSPQLLRKSSTVPGKHEKDSLNEASKSSVAVNKSKPEDSKNPASMEITAGERNVTLPDSQAQGSLADGLPLETALQEPLESSIPGSDGRDGVDNRSMRRSLSSSKPHLKPALGMNGAKARSHSFSTHSGDKPSTPPIEGSGKVRTQIITNTAERGNSLTRQNSSTESSPNKAPSAPMLESLPSVGRPSGHPSSGKGSLGSSGSFSSQHGSPSKLPLRIPPKSEGLLIPPGKEDQQAFTQGECPSANVAVLGEPGSDRRSCPPTPTDCPEALQSPGRTQHPSTFETSSTSKLETSGRHPDASATATDAVSSEAPLSPTIEEKVMLCIQENVEKGQVQTKPTSVEAKQKPGPSFASWFGFRKSRLPALSSRKMDISKTKVEKKDAKVLGFGNRQLKSERKKEKKKPELQCETENELIKDTKSADNPDGGLQSKNNRRTPQDIYNQLKIEPRNRHSPVACSTKDTFMTELLNRVDKKAAPQTESGSSNASCRNVLKGSSQGSCLIGSSISTQGNHKKNMKIKADMEVPKDSLVKEANENLQEDEDDAVADSVFQSHIIESNCQMRTLDSGIGTFPLPDSGNRSTGRYLCQPDSPEDAEPLLPLQSALSAVSSMRAQTLEREVPSSTDGQRPADSAIVHSTSDPIMTARGMRPLQSRLPKPASSGKVSSQKQNEAEPRPQTCSSFGYAEDPMASQPLPDWGSEVAATGTQDKAPRMCTYSASGGSNSDSDLDYGDNGFGAGRGQLVKALKSAAPEIETT

SEQ ID NO: 32083 - protein, 110 aa, Homo sapiens
  REGION 1..110: note = ENSP00000492746
  VARIANT 1: note = Any amino acid
XSNCQMRTLDSGIGTFPLPDSGNRSTGRYLCQPDSPEDAEPLLPLQSALSAVSSMRAQTLEREVPSSTDGQRPADSAIVHSTSDPIMTARGMRPLQSRLPKPASSEIETT

SEQ ID NO: 32084 - protein, 590 aa, Homo sapiens
  REGION 1..590: note = ENSP00000386952
MEGKRQLEKRDFGKRLSLDSSLVEYMDSNKYIEHLLTQLEEQHRSLWREKLAVARLQREVAQRTSEGAMHEKLIHELEEERHLRLQSEKRLQEVTLESERNRIQMRSLQQQFSRMEETVRNLLQSQGSPEQKKEETVNIMVYQEKLSEEERKHKEALEDLHMVVDEDSRSESSSTDEGKEKTKLLLERLKALEAENSALALENENQREQYERCLDEVANQVVQALLTQKDLREECVKLKTRVFDLEQQNRTLSILFQQRVRPTSDLLLQKLHSRLLDLSSGDLLSEVERNRSLTQSRTDAEVHEHQLNTKSALKCPGLGAVIPGHLCPRNSYSSSSELSLSSTCSEYSSGSSYTWHDGKNLRKRVKEANENLQEDEDDAVADSVFQSHIIESNCQMRTLDSGIGTFPLPDSGNRSTGRYLCQPDSPEDAEPLLPLQSALSAVSSMRAQTLEREVPSSTDGQRPADSAIVHSTSDPIMTARGMRPLQSRLPKPASSGKVSSQKQNEAEPRPQTCSSFGYAEDPMASQPLPDWGSEVAATGTQDKAPRMCTYSASGGSNSDSDLDYGDNGFGAGRGQLVKALKSAAPEIETT

SEQ ID NO: 32085 - protein, 114 aa, Homo sapiens
  REGION 1..114: note = ENSP00000399070
  VARIANT 1: note = Any amino acid
XQLEKRDFGKRLSLDSSLVEYMDSNKYIEHLLTQLEEQHRSLWREKLAVARLQREVAQRTSEGAMHEKLIHELEEERHLRLQSEKRLQEVTLESERNRIQMRSLQQQFSRRRKM

SEQ ID NO: 32086 - protein, 69 aa, Homo sapiens
  REGION 1..69: note = ENSP00000351882
MEGKRQLEKRDFGKRLSLDSSLVEYMDSNKYIEHLLTQLEEQHRSLWREKLAVARLQREVAQRTSEGAM

SEQ ID NO: 32087 - protein, 1909 aa, Homo sapiens [sequence omitted]

SEQ ID NO: 32088 - protein, 590 aa, Homo sapiens [sequence omitted]

SEQ ID NO: 32089 - protein, 145 aa, Homo sapiens
  REGION 1..145: note = ENSP00000462052
MDGEDIPDFSSLKEETAYWKELSLKYKQSFQEARDELVEFQEGSRELEAELEAQLVQAEQRNRDLQADNQRLKYEVEALKEKLEHQYAQSYKQVSVLEDDLSQTRAIKEQLHKYVRELEQANDDLERAKRATIVSLEDFEQRLNQ

SEQ ID NO: 32090 - protein, 76 aa, Homo sapiens
  REGION 1..76: note = ENSP00000464154
MDGEDIPDFSSLKEETAYWKELSLKYKQSRRGHLWPVLHALILPHHFGHLEILISCLGLHRTDFTFSSASRKLGMS

SEQ ID NO: 32091 - protein, 158 aa, Homo sapiens
  REGION 1..158: note = ENSP00000463430
MDGEDIPDFSSLKEETAYWKELSLKYKQSFQEARDELVEFQEGSRELEAELEAQLVQAEQRNRDLQADNQRLKYEVEALKEKLEHQYAQSYKQVSVLEDDLSQTRAIKEQLHKYVRELEQANDDLERAKRATIVSLEDFEQRLNQAIERNAFLESELD

SEQ ID NO: 32092 - protein, 345 aa, Homo sapiens
  REGION 1..345: note = ENSP00000333982
MDGEDIPDFSSLKEETAYWKELSLKYKQSFQEARDELVEFQEGSRELEAELEAQLVQAEQRNRDLQADNQRLKYEVEALKEKLEHQYAQSYKQVSVLEDDLSQTRAIKEQLHKYVRELEQANDDLERAKRATIVSLEDFEQRLNQAIERNAFLESELDEKESLLVSVQRLKDEARDLRQELAVRERQQEVTRKSAPSSPTLDCEKMDSAVQASLSLPATPVGKGTENTFPSPKAIPNGFGTSPLTPSARISALNIVGDLLRKVGALESKLAACRNFAKDQASRKSYISGNVNCGVLNGNGTKFSRSGHTSFFDKGAVNGFDPAPPPPGLGSSRPSSAPGMLPLSV

SEQ ID NO: 32093 - protein, 85 aa, Homo sapiens
  REGION 1..85: note = ENSP00000463492
MDGEDIPDFSSLKEETAYWKELSLKYKQSFQEARDELVEFQEGSRELEAELEAQLVQAACSGGYWALPSPGTLRDINTGYFLFSP

SEQ ID NO: 32094 - protein, 269 aa, Homo sapiens
  REGION 1..269: note = ENSP00000369364
MDGEDIPDFSSLKEETAYWKELSLKYKQSFQEARDELVEFQEGSRELEAELEAQLVQAEQRNRDLQADNQRLKYEVEALKEKLEHQYAQSYKQVSVLEDDLSQTRAIKEQLHKYVRELEQANDDLERAKRATIVSLEDFEQRLNQAIERNAFLESELDEKESLLVSVQRLKDEARDLRQELAVRERQQEVTRKSAPSSPTLDCEKMDSAVQASLSLPATPVGKGTENTFPSPKAIPNGFGTSPLTPSARISALNIVGDLLRKVGGSKRL

SEQ ID NO: 32095 - protein, 328 aa, Homo sapiens
  REGION 1..328: note = ENSP00000384963
MDGEDIPDFSSLKEETAYWKELSLKYKQSFQEARDELVEFQEGSRELEAELEAQLVQAEQRNRDLQADNQRLKYEVEALKEKLEHQYAQSYKQVSVLEDDLSQTRAIKEQLHKYVRELEQANDDLERAKRATIVSLEDFEQRLNQAIERNAFLESELDEKESLLVSVQRLKDEARDLRQELAVRERQQEVTRKSAPSSPTLDCEKMDSAVQASLSLPATPVGKGTENTFPSPKAIPNGFGTSPLTPSARISALNIVGDLLRKVGALESKLAACRNFAKDQASRKSYISGNVNCGVLNGNGTKFSRSGHTSFFDKGQEKVIFPTLFMGQ

SEQ ID NO: 32096 - protein, 33 aa, Homo sapiens
  REGION 1..33: note = ENSP00000462458
MDGEDIPDFSSLKEETAYWKELSLKYKQSFQEA

SEQ ID NO: 32097 - protein, 72 aa, Homo sapiens
  REGION 1..72: note = ENSP00000462759
MDGEDIPDFSSLKEETAYWKELSLKYKQSFQEARDELVEFQEGSRELEAELEAQLVQAEQRNRDLQADNQRL

SEQ ID NO: 32098 - protein, 59 aa, Homo sapiens
  REGION 1..59: note = ENSP00000463351
MDGEDIPDFSSLKEETAYWKELSLKYKQSFQEARDELVEFQEGSRELEAELEAQLVQAE

SEQ ID NO: 32099 - protein, 196 aa, Homo sapiens
  REGION 1..196: note = ENSP00000464441
  VARIANT 1: note = Any amino acid
XRNAFLESELDEKESLLVSVQRLKDEARDLRQELAVRERQQEVTRKSAPSSPTLDCEKMDSAVQASLSLPATPVGKGTENTFPSPKAIPNGFGTSPLTPSARISALNIVGDLLRKVGALESKLAACRNFAKDQASRKSYISGNVNCGVLNGNGTKFSRSGHTSFFDKGRAGTTLETLTISESSWDFLPSSIIMAHV

SEQ ID NO: 32100 - protein, 194 aa, Homo sapiens
  REGION 1..194: note = ENSP00000464634
  VARIANT 1: note = Any amino acid
XLRQELAVRERQQEVTRKSAPSSPTLDCEKMDSAVQASLSLPATPVGKGTENTFPSPKAIPNGFGTSPLTPSARISALNIVGDLLRKVGALESKLAACRNFAKDQASRKSYISGNVNCGVLNGNGTKFSRSGHTSFFDKGCVLTRMNRILTQSWALRACTPCCGGRTLCPTCLISSRFFSSFCSSLVCRSLSNC

SEQ ID NO: 32101 - protein, 568 aa, Homo sapiens
  REGION 1..568: note = ENSP00000369014
MVLLHWCLLWLLFPLSSRTQKLPTRDEELFQMQIRDKAFFHDSSVIPDGAEISSYLFRDTPKRYFFVVEEDNTPLSVTVTPCDAPLEWKLSLQELPEDRSGEGSGDLEPLEQQKQQIINEEGTELFSYKGNDVEYFISSSSPSGLYQLDLLSTEKDTHFKVYATTTPESDQPYPELPYDPRVDVTSLGRTTVTLAWKPSPTASLLKQPIQYCVVINKEHNFKSLCAVEAKLSADDAFMMAPKPGLDFSPFDFAHFGFPSDNSGKERSFQAKPSPKLGRHVYSRPKVDIQKICIGNKNIFTVSDLKPDTQYYFDVFVVNINSNMSTAYVGTFARTKEEAKQKTVELKDGKITDVFVKRKGAKFLRFAPVSSHQKVTFFIHSCLDAVQIQVRRDGKLLLSQNVEGIQQFQLRGKPKAKYLVRLKGNKKGASMLKILATTRPTKQSFPSLPEDTRIKAFDKLRTCSSATVAWLGTQERNKFCIYKKEVDDNYNEDQKKREQNQCLGPDIRKKSEKVLCKYFHSQNLQKAVTTETIKGLQPGKSYLLDVYVIGHGGHSVKYQSKVVKTRKFC

SEQ ID NO: 32102 - protein, 145 aa, Homo sapiens
  REGION 1..145: note = ENSP00000423352
MVLLHWCLLWLLFPLSSRTQKLPTRDEELFQMQIRDKAFFHDSSVIPDGAEISSYLFRDTPKRYFFVVEEDNTPLSVTVTPCDAPLEWKLSLQELPEDRSGEGSGDLEPLEQQKQQIINEEGTELFSYKGNDVEYFISSSSPSGL

SEQ ID NO: 32103 - protein, 116 aa, Homo sapiens
  REGION 1..116: note = ENSP00000426723
MVLLHWCLLWLLFPLSSRTQKLPTRDEELFQMQIRDKAFFHDSSVIPDGAEISSYLFRDTPKRYFFVVEEDNTPLSVTVTPCDAPLEWKLSLQELPEDRSGEGSGDLEPLEQQKQQ

SEQ ID NO: 32104 - protein, 394 aa, Homo sapiens
  REGION 1..394: note = ENSP00000319977
MSREMQDVDLAEVKPLVEKGETITGLLQEFDVQEQDIETLHGSVHVTLCGTPKGNRPVILTYHDIGMNHKTCYNPLFNYEDMQEITQHFAVCHVDAPGQQDGAASFPAGYMYPSMDQLAEMLPGVLQQFGLKSIIGMGTGAGAYILTRFALNNPEMVEGLVLINVNPCAEGWMDWAASKISGWTQALPDMVVSHLFGKEEMQSNVEVVHTYRQHIVNDMNPGNLHLFINAYNSRRDLEIERPMPGTHTVTLQCPALLVVGDSSPAVDAVVECNSKLDPTKTTLLKMADCGGLPQISQPAKLAEAFKYFVQGMGYMPSASMTRLMRSRTASGSSVTSLDGTRSRSHTSEGTRSRSHTSEGTRSRSHTSEGAHLDITPNSGAAGNSAGPKSMEVSC

SEQ ID NO: 32105 - protein, 95 aa, Homo sapiens
  REGION 1..95: note = ENSP00000429172
MSREMQDVDLAEVKPLVEKGETITGLLQEFDVQTKPATTPSSTTRTCRRSPSTLPSATWTPLASRTAQPPSPQGTCTPPWISWLKCFLESFNSLG

SEQ ID NO: 32106 - protein, 394 aa, Homo sapiens; identical to SEQ ID NO: 32104
  REGION 1..394: note = ENSP00000404854

SEQ ID NO: 32107 - protein, 141 aa, Homo sapiens
  REGION 1..141: note = ENSP00000429007
MSREMQDVDLAEVKPLVECNSKLDPTKTTLLKMADCGGLPQISQPAKLAEAFKYFVQGMGYMPSASMTRLMRSRTASGSSVTSLDGTRSRSHTSEGTRSRSHTSEGTRSRSHTSEGAHLDITPNSGAAGNSAGPKSMEVSC

SEQ ID NO: 32108 - protein, 328 aa, Homo sapiens
  REGION 1..328: note = ENSP00000427894
MNHKTCYNPLFNYEDMQEITQHFAVCHVDAPGQQDGAASFPAGYMYPSMDQLAEMLPGVLQQFGLKSIIGMGTGAGAYILTRFALNNPEMVEGLVLINVNPCAEGWMDWAASKISGWTQALPDMVVSHLFGKEEMQSNVEVVHTYRQHIVNDMNPGNLHLFINAYNSRRDLEIERPMPGTHTVTLQCPALLVVGDSSPAVDAVVECNSKLDPTKTTLLKMADCGGLPQISQPAKLAEAFKYFVQGMGYMPSASMTRLMRSRTASGSSVTSLDGTRSRSHTSEGTRSRSHTSEGTRSRSHTSEGAHLDITPNSGAAGNSAGPKSMEVSC

SEQ ID NO: 32109 - protein, 103 aa, Homo sapiens
  REGION 1..103: note = ENSP00000431057
MSREMQDVDLAEAFKYFVQGMGYMPSASMTRLMRSRTASGSSVTSLDGTRSRSHTSEGTRSRSHTSEGTRSRSHTSEGAHLDITPNSGAAGNSAGPKSMEVSC

SEQ ID NO: 32110 - protein, 216 aa, Homo sapiens
  REGION 1..216: note = ENSP00000429380
MSREMQDVDLAEVKPLVEKGETITGLLQEFDVQEQDIETLHGSVHVTLCGTPKGNRPVILTYHDIGMNHKTCYNPLFNYEDMQEITQHFAVCHVDAPGQQDGAASFPAGYMYPSMDQLAEMLPGVLQQFGLKSIIGMGTGAGAYILTRFALNNPEMVEGLVLINVNPCAEGWMDWAASKPFDYQALVLDTVMCAVTSCSPSLDLVALKFLALPVPD

SEQ ID NO: 32111 - protein, 193 aa, Homo sapiens
  REGION 1..193: note = ENSP00000428345
MAVPPPGIMKQAGDSRDMSREMQDVDLAEVKPLVEKGETITGLLQEFDVQEQDIETLHGSVHVTLCGTPKGNRPVILTYHDIGMNHKTCYNPLFNYEDMQEITQHFAVCHVDAPGQQDGAASFPAGYMYPSMDQLAEMLPGVLQQFGLKSIIGMGTGAGAYILTRFALNNPEMVEGLVLINVNPCAEGWMDWA

SEQ ID NO: 32112 - protein, 100 aa, Homo sapiens
  REGION 1..100: note = ENSP00000428802
MNHKTCYNPLFNYEDMQEITQHFAVCHVDAPGQQDGAASFPAGYMYPSMDQLAEMLPGVLQQFGLKSIIGMGTGAGAYILTRFALNNPEMVEGLVLINVN

SEQ ID NO: 32113 - protein, 165 aa, Homo sapiens
  REGION 1..165: note = ENSP00000429994
MSREMQDVDLAEVKPLVEKGETITGLLQEFDVQEQDIETLHGSVHVTLCGTPKGNRPVILTYHDIGMNHKTCYNPLFNYEDMQEITQHFAVCHVDAPGQQDGAASFPAGYMYPSMDQLAEMLPGVLQQFGLKSIIGMGTGAGAYILTRFALNNPEMVEGLVLINV

SEQ ID NO: 32114 - protein, 158 aa, Homo sapiens
  REGION 1..158: note = ENSP00000429272
MSREMQDVDLAEVKPLVEKGETITGLLQEFDVQEQDIETLHGSVHVTLCGTPKGNRPVILTYHDIGMNHKTCYNPLFNYEDMQEITQHFAVCHVDAPGQQDGAASFPAGYMYPSMDQLAEMLPGVLQQFGLKSIIGMGTGAGAYILTRFALNNPEMVE

SEQ ID NO: 32115 - protein, 158 aa, Homo sapiens; identical to SEQ ID NO: 32114
  REGION 1..158: note = ENSP00000428384

SEQ ID NO: 32116 - protein, 156 aa, Homo sapiens
  REGION 1..156: note = ENSP00000429840
MTVPAAGDSRDMSREMQDVDLAEVKPLVEKGETITGLLQEFDVQEQDIETLHGSVHVTLCGTPKGNRPVILTYHDIGMNHKTCYNPLFNYEDMQEITQHFAVCHVDAPGQQDGAASFPAGYMYPSMDQLAEMLPGVLQQFGLKSIIGMGTGAGAYI

SEQ ID NO: 32117 - protein, 133 aa, Homo sapiens
  REGION 1..133: note = ENSP00000429524
MSREMQDVDLAEVKPLVEKGETITGLLQEFDVQEQDIETLHGSVHVTLCGTPKGNRPVILTYHDIGMNHKTCYNPLFNYEDMQEITQHFAVCHVDAPGQQDGAASFPAGYMYPSMDQLAEMLPGVLQQFGLKS

SEQ ID NO: 32118 - protein, 167 aa, Homo sapiens
  REGION 1..167: note = ENSP00000428991
MSGSRESCTVGCVCVFTRMRVPVCLCVCITNLLLGLTVRLKLALCLYVAGDSRDMSREMQDVDLAEVKPLVEKGETITGLLQEFDVQEQDIETLHGSVHVTLCGTPKGNRPVILTYHDIGMNHKTCYNPLFNYEDMQEITQHFAVCHVDAPGQQDGAASFPAGYMYP

SEQ ID NO: 32119 - protein, 42 aa, Homo sapiens
  REGION 1..42: note = ENSP00000430171
MNHKTCYNPLFNYEDMQEITQHFAVCHVDAPGQQDGAASFPA

SEQ ID NO: 32120 - protein, 313 aa, Homo sapiens
  REGION 1..313: note = ENSP00000437443
MQEITQHFAVCHVDAPGQQDGAASFPAGYMYPSMDQLAEMLPGVLQQFGLKSIIGMGTGAGAYILTRFALNNPEMVEGLVLINVNPCAEGWMDWAASKISGWTQALPDMVVSHLFGKEEMQSNVEVVHTYRQHIVNDMNPGNLHLFINAYNSRRDLEIERPMPGTHTVTLQCPALLVVGDSSPAVDAVVECNSKLDPTKTTLLKMADCGGLPQISQPAKLAEAFKYFVQGMGYMPSASMTRLMRSRTASGSSVTSLDGTRSRSHTSEGTRSRSHTSEGTRSRSHTSEGAHLDITPNSGAAGNSAGPKSMEVSC

SEQ ID NO: 32121 - protein, 371 aa, Homo sapiens
  REGION 1..371: note = ENSP00000298687
MAELQEVQITEEKPLLPGQTPEAAKEAELAARILLDQGQTHSVETPYGSVTFTVYGTPKPKRPAILTYHDVGLNYKSCFQPLFQFEDMQEIIQNFVRVHVDAPGMEEGAPVFPLGYQYPSLDQLADMIPCVLQYLNFSTIIGVGVGAGAYILARYALNHPDTVEGLVLINIDPNAKGWMDWAAHKLTGLTSSIPEMILGHLFSQEELSGNSELIQKYRNIITHAPNLDNIELYWNSYNNRRDLNFERGGDITLRCPVMLVVGDQAPHEDAVVECNSKLDPTQTSFLKMADSGGQPQLTQPGKLTEAFKYFLQGMGYMASSCMTRLSRSRTASLTSAASVDGNRSRSRTLSQSSESGTLSSGPPGHTMEVSC

SEQ ID NO: 32122 - protein, 357 aa, Homo sapiens
  REGION 1..357: note = ENSP00000344620
MAELQEVQITEEKPLLPGQTPEAAKTHSVETPYGSVTFTVYGTPKPKRPAILTYHDVGLNYKSCFQPLFQFEDMQEIIQNFVRVHVDAPGMEEGAPVFPLGYQYPSLDQLADMIPCVLQYLNFSTIIGVGVGAGAYILARYALNHPDTVEGLVLINIDPNAKGWMDWAAHKLTGLTSSIPEMILGHLFSQEELSGNSELIQKYRNIITHAPNLDNIELYWNSYNNRRDLNFERGGDITLRCPVMLVVGDQAPHEDAVVECNSKLDPTQTSFLKMADSGGQPQLTQPGKLTEAFKYFLQGMGYMASSCMTRLSRSRTASLTSAASVDGNRSRSRTLSQSSESGTLSSGPPGHTMEVSC

SEQ ID NO: 32123 - protein, 139 aa, Homo sapiens
  REGION 1..139: note = ENSP00000450835
PKPKRPAILTYHDVGLNYKSCFQPLFQFEDMQEIIQNFVRVHVDAPGMEEGAPVFPLGYQYPSLDQLADMIPCVLQYLNFSTIIGVGVGAGAYILARYALNHPDTVEGLVLINIDPNAKGWMDWAAHKLSLGWAAWGLA

SEQ ID NO: 32124 - protein, 284 aa, Homo sapiens
  REGION 1..284: note = ENSP00000452216
MQEIIQNFVRVHVDAPGMEEGAPVFPLGYQYPSLDQLADMIPCVLQYLNFSTIIGVGVGAGAYILARYALNHPDTVEGLVLINIDPNAKGWMDWAAHKLTGLTSSIPEMILGHLFSQEELSGNSELIQKYRNIITHAPNLDNIELYWNSYNNRRDLNFERGGDITLRCPVMLVVGDQAPHEDAVVECNSKLDPTQTSFLKMADSGGQPQLTQPGKLTEAFKYFLQGMGYMASSCMTRLSRSRTASLTSAASVDGNRSRSRTLSQSSESGTLSSGPPGHTMEVSC

SEQ ID NO: 32125 - protein, 357 aa, Homo sapiens; identical to SEQ ID NO: 32122
  REGION 1..357: note = ENSP00000452038

SEQ ID NO: 32126 - protein, 357 aa, Homo sapiens; identical to SEQ ID NO: 32122
  REGION 1..357: note = ENSP00000452306

SEQ ID NO: 32127 - protein, 371 aa, Homo sapiens; identical to SEQ ID NO: 32121
  REGION 1..371: note = ENSP00000380951

SEQ ID NO: 32128 - protein, 357 aa, Homo sapiens; identical to SEQ ID NO: 32122
  REGION 1..357: note = ENSP00000353649

SEQ ID NO: 32129 - protein, 371 aa, Homo sapiens; identical to SEQ ID NO: 32121
  REGION 1..371: note = ENSP00000451712

SEQ ID NO: 32130 - protein, 137 aa, Homo sapiens
  REGION 1..137: note = ENSP00000450446
MAELQEVQITEEKPLLPGQTPEAAKTHSVETPYGSVTFTVYGTPKPKRPAILTYHDVGLNSTVSVRGHAGNHSELCAGSCGCPWNGRGSPCVPFGISVPISGPACRHDPLRPAVPKFLYNNWSWCWSWSLHPGEICS

SEQ ID NO: 32131 - protein, 357 aa, Homo sapiens; identical to SEQ ID NO: 32122
  REGION 1..357: note = ENSP00000452006

SEQ ID NO: 32132 - protein, 371 aa, Homo sapiens; identical to SEQ ID NO: 32121
  REGION 1..371: note = ENSP00000380949

SEQ ID NO: 32133 - protein, 360 aa, Homo sapiens
  REGION 1..360: note = ENSP00000380945
MAELQEVQITEEKPLLPGQTPEAAKEAELAARILLDQGQTHSVETPYGSVTFTVYGTPKPKRPAILTYHDVGLNYKSCFQPLFQFEDMQEIIQNFVRVHVDAPGMEEGAPVFPLGYQYPSLDQLADMIPCVLQYLNFSTIIGVGVGAGAYILARYALNHPDTVEGLVLINIDPNAKGWMDWAAHKLTGLTSSIPEMILGHLFSQEELSGNSELIQKYRNIITHAPNLDNIELYWNSYNNRRDLNFERGGDITLRCPVMLVVECNSKLDPTQTSFLKMADSGGQPQLTQPGKLTEAFKYFLQGMGYMASSCMTRLSRSRTASLTSAASVDGNRSRSRTLSQSSESGTLSSGPPGHTMEVSC

SEQ ID NO: 32134 - protein, 328 aa, Homo sapiens
  REGION 1..328: note = ENSP00000298684
MAELQEVQITEEKPLLPGQTPEAAKTHSVETPYGSVTFTVYGTPKPKRPAILTYHDVGLNYKSCFQPLFQFEDMQEIIQNFVRVHVDAPGMEEGAPVFPLGYQYPSLDQLADMIPCVLQYLNFSTIIGVGVGAGAYILARYALTGLTSSIPEMILGHLFSQEELSGNSELIQKYRNIITHAPNLDNIELYWNSYNNRRDLNFERGGDITLRCPVMLVVGDQAPHEDAVVECNSKLDPTQTSFLKMADSGGQPQLTQPGKLTEAFKYFLQGMGYMASSCMTRLSRSRTASLTSAASVDGNRSRSRTLSQSSESGTLSSGPPGHTMEVSC

SEQ ID NO: 32135 - protein, 341 aa, Homo sapiens
  REGION 1..341: note = ENSP00000380943
MAELQEVQITEEKPLLPGQTPEAAKTHSVETPYGSVTFTVYGTPKPKRPAILTYHDVGLNYKSCFQPLFQFEDMQEIIQNFVRVHVDAPGMEEGAPVFPLGYQYPSLDQLADMIPCVLQYLNFSTIIGVGVGAGAYILARYALNHPDTVEGLVLINIDPNAKGWMDWAAHKLTGLTSSIPEMILGHLFSQEELSGNSELIQKYRNIITHAPNLDNIELYWNSYNNRRDLNFERGGDITLRCPVMLVVGDQAPHEDAVMADSGGQPQLTQPGKLTEAFKYFLQGMGYMASSCMTRLSRSRTASLTSAASVDGNRSRSRTLSQSSESGTLSSGPPGHTMEVSC

SEQ ID NO: 32136 - protein, 367 aa, Homo sapiens
  REGION 1..367: note = ENSP00000385889
MENGGSMQATMAELQEVQITEEKPLLPGQTPEAAKTHSVETPYGSVTFTVYGTPKPKRPAILTYHDVGLNYKSCFQPLFQFEDMQEIIQNFVRVHVDAPGMEEGAPVFPLGYQYPSLDQLADMIPCVLQYLNFSTIIGVGVGAGAYILARYALNHPDTVEGLVLINIDPNAKGWMDWAAHKLTGLTSSIPEMILGHLFSQEELSGNSELIQKYRNIITHAPNLDNIELYWNSYNNRRDLNFERGGDITLRCPVMLVVGDQAPHEDAVVECNSKLDPTQTSFLKMADSGGQPQLTQPGKLTEAFKYFLQGMGYMASSCMTRLSRSRTASLTSAASVDGNRSRSRTLSQSSESGTLSSGPPGHTMEVSC

SEQ ID NO: 32137 - protein, 287 aa, Homo sapiens
  REGION 1..287: note = ENSP00000452117
  VARIANT 1: note = Any amino acid
XTVCWLAGGWVFVFKTLALQQKAGDRLQVSTLTTRANLWLLGPFFFASSKESFSTIIGVGVGAGAYILARYALNHPDTVEGLVLINIDPNAKGWMDWAAHKLTGLTSSIPEMILGHLFSQEELSGNSELIQKYRNIITHAPNLDNIELYWNSYNNRRDLNFERGGDITLRCPVMLVVGDQAPHEDAVVECNSKLDPTQTSFLKMADSGGQPQLTQPGKLTEAFKYFLQGMGYMASSCMTRLSRSRTASLTSAASVDGNRSRSRTLSQSSESGTLSSGPPGHTMEVSC

SEQ ID NO: 32138 - protein, 300 aa, Homo sapiens
  REGION 1..300: note = ENSP00000451966
MAELQEVQITEEKPLLPGQTPEAAKTHSVETPYGSVTFTVYGTPKPKRPAILTYHDVGLNYKSCFQPLFQFEDMQEIIQNFVRVHVDAPGMEEGAPVFPLGYQYPSLDQLADMIPCVLQYLNFSTIIGVGVGAGAYILARYALNHPDTVEGLVLINIDPNAKGWMDWAAHKLTGLTSSIPEMILGHLFSQEELSGNSELIQKYRNIITHAPNLDNIELYWNSYNNRRDLNFERGGDITLRCPVMLVVGDQAPHEDAVVECNSKLDPTQTSFLKMADSGGQPQLTQPGKLTEAFKYFLQGM

SEQ ID NO: 32139 - protein, 224 aa, Homo sapiens
  REGION 1..224: note = ENSP00000489341
  VARIANT 1: note = Any amino acid
XKSCFQPLFQFEDMQEIIQNFVRVHVDAPGMEEGAPVFPLGYQYPSLDQLADMIPCVLQYLNFSTIIGVGVGAGAYILARYALNHPDTVEGLVLINIDPNAKGWMDWAAHKLTGLTSSIPEMILGHLFSQEELSGNSELIQKYRNIITHAPNLDNIELYWNSYNNRRDLNFERGGDITLRCPVMLVVGDQAPHEDAVTSFLKMADSGGQPQLTQPGKLTEAFKY

SEQ ID NO: 32140 - protein, 218 aa, Homo sapiens
  REGION 1..218: note = ENSP00000452413
MQEIIQNFVRVHVDAPGMEEGAPVFPLGYQYPSLDQLADMIPCVLQYLNFSTIIGVGVGAGAYILARYALNHPDTVEGLVLINIDPNAKGWMDWAAHKLTGLTSSIPEMILGHLFSQEELSGNSELIQKYRNIITHAPNLDNIELYWNSYNNRRDLNFERGGDITLRCPVMLVVGDQAPHEDAVVECNSKLDPTQTSFLKMADSGGQPQLTQPGKLTE

SEQ ID NO: 32141 - protein, 273 aa, Homo sapiens
  REGION 1..273: note = ENSP00000452362
MAELQEVQITEEKPLLPGQTPEAAKTHSVETPYGSVTFTVYGTPKPKRPAILTYHDVGLNYKSCFQPLFQFEDMQEIIQNFVRVHVDAPGMEEGAPVFPLGYQYPSLDQLADMIPCVLQYLNFSTIIGVGVGAGAYILARYALNHPDTVEGLVLINIDPNAKGWMDWAAHKLTGLTSSIPEMILGHLFSQEELSGNSELIQKYRNIITHAPNLDNIELYWNSYNNRRDLNFERGGDITLRCPVMLVVGDQAPHEDAVVECNSKLDPTQTSFLK

SEQ ID NO: 32142 - protein, 273 aa, Homo sapiens; identical to SEQ ID NO: 32141
  REGION 1..273: note = ENSP00000451274

SEQ ID NO: 32143 - protein, 252 aa, Homo sapiens
  REGION 1..252: note = ENSP00000450691
MAELQEVQITEEKPLLPGQTPEAAKEAELAARILLDQGQTHSVETPYGSVTFTVYGTPKPKRPAILTYHDVGLNYKSCFQPLFQFEDMQEIIQNFVRVHVDAPGMEEGAPVFPLGYQYPSLDQLADMIPCVLQYLNFSTIIGVGVGAGAYILARYALNHPDTVEGLVLINIDPNAKGWMDWAAHKLTGLTSSIPEMILGHLFSQEELSGNSELIQKYRNIITHAPNLDNIELYWNSYNNRRDLNFERGGDIT

SEQ ID NO: 32144 - protein, 181 aa, Homo sapiens
  REGION 1..181: note = ENSP00000397250
THSVETPYGSVTFTVYGTPKPKRPAILTYHDVGLNYKSCFQPLFQFEDMQEIIQNFVRVHVDAPGMEEGAPVFPLGYQYPSLDQLADMIPCVLQYLNFSTIIGVGVGAGAYILARYALNHPDTVEGLTSSIPEMILGHLFSQEELSGNSELIQKYRNIITHAPNLDNIELYWNSYNNRRDL

SEQ ID NO: 32145 - protein, 224 aa, Homo sapiens
  REGION 1..224: note = ENSP00000452334
MAELQEVQITEEKPLLPGQTPEAAKTHSVETPYGSVTFTVYGTPKPKRPAILTYHDVGLNYKSCFQPLFQFEDMQEIIQNFVRVHVDAPGMEEGAPVFPLGYQYPSLDQLADMIPCVLQYLNFSTIIGVGVGAGAYILARYALNHPDTVEGLVLINIDPNAKGWMDWAAHKLTGLTSSIPEMILGHLFSQEELSGNSELIQKYRNIITHAPNLDNIELYWNSYN

SEQ ID NO: 32146 - protein, 136 aa, Homo sapiens
  REGION 1..136: note = ENSP00000451353
MAELQEVQITEEKPLLPGQTPEAAKEAELAARILLDQGQTHSVETPYGSVTFTVYGTPKPKRPAILTYHDVGLNYKSCFQPLFQFEDMQEIIQNFVRVHVDAPGMEEGAPVFPLGYQYPSLDQLADMIPCVLQYLK

SEQ ID NO: 32147 - protein, 221 aa, Homo sapiens
  REGION 1..221: note = ENSP00000451105
MAELQEVQITEEKPLLPGQTPEAAKTHSVETPYGSVTFTVYGTPKPKRPAILTYHDVGLNYKSCFQPLFQFEDMQEIIQNFVRVHVDAPGMEEGAPVFPLGYQYPSLDQLADMIPCVLQYLNFSTIIGVGVGAGAYILARYALNHPDTVEGLVLINIDPNAKGWMDWAAHKLTGLTSSIPEMILGHLFSQEELSGNSELIQKYRNIITHAPNLDNIELYWN

SEQ ID NO: 32148 - protein, 173 aa, Homo sapiens
  REGION 1..173: note = ENSP00000450545
MAELQEVQITEEKPLLPGQTPEAAKPLFQFEDMQEIIQNFVRVHVDAPGMEEGAPVFPLGYQYPSLDQLADMIPCVLQYLNFSTIIGVGVGAGAYILARYALNHPDTVEGLVLINIDPNAKGWMDWAAHKLTGLTSSIPEMILGHLFSQEELSGNSELIQKYRNIITHAPNLD

SEQ ID NO: 32149 - protein, 219 aa, Homo sapiens
  REGION 1..219: note = ENSP00000452482
MAELQEVQITEEKPLLPGQTPEAAKEAELAARILLDQGQTHSVETPYGSVTFTVYGTPKPKRPAILTYHDVGLNYKSCFQPLFQFEDMQEIIQNFVRVHVDAPGMEEGAPVFPLGYQYPSLDQLADMIPCVLQYLNFSTIIGVGVGAGAYILARYALNHPDTVEGLVLINIDPNAKGWMDWAAHKLTGLTSSIPEMILGHLFSQEELSGNSELIQKYRN

SEQ ID NO: 32150 - protein, 194 aa, Homo sapiens
  REGION 1..194: note = ENSP00000451094
MAELQEVQITEEKPLLPGQTPEAAKEAELAARILLDQGQTHSVETPYGSVTFTVYGTPKPKRPAILTYHDVGLNYKSCFQPLFQFEDMQEIIQNFVRVHVDAPGMEEGAPVFPLGYQYPSLDQLADMIPCVLQYLNFSTIIGVGVGAGAYILARYALNHPDTVEGLVLINIDPNAKGWMDWAAHKLTGLTSSIP

SEQ ID NO: 32151 - protein, 174 aa, Homo sapiens
  REGION 1..174: note = ENSP00000452278
MAELQEVQITEEKPLLPGQTPEAAKTHSVETPYGSVTFTVYGTPKPKRPAILTYHDVGLNYKSCFQPLFQFEDMQEIIQNFVRVHVDAPGMEEGAPVFPLGYQYPSLDQLADMIPCVLQYLNFSTIIGVGVGAGAYILARYALNHPDTVEGLVLINIDPNAKGWMDWAAHKLTG

SEQ ID NO: 32152 - protein, 167 aa, Homo sapiens
  REGION 1..167: note = ENSP00000450493
MAELQEVQITEEKPLLPGQTPEAAKTHSVETPYGSVTFTVYGTPKPKRPAILTYHDVGLNYKSCFQPLFQFEDMQEIIQNFVRVHVDAPGMEEGAPVFPLGYQYPSLDQLADMIPCVLQYLNFSTIIGVGVGAGAYILARYALNHPDTVEGLVLINIDPNAKGWMDW

SEQ ID NO: 32153 - protein, 160 aa, Homo sapiens
  REGION 1..160: note = ENSP00000451951
MAELQEVQITEEKPLLPGQTPEAAKTHSVETPYGSVTFTVYGTPKPKRPAILTYHDVGLNYKSCFQPLFQFEDMQEIIQNFVRVHVDAPGMEEGAPVFPLGYQYPSLDQLADMIPCVLQYLNFSTIIGVGVGAGAYILARYALNHPDTVEGLVLINIDPN

SEQ ID NO: 32154 - protein, 172 aa, Homo sapiens
  REGION 1..172: note = ENSP00000451059
MAELQEVQITEEKPLLPGQTPEAAKEAELAARILLDQGQTHSVETPYGSVTFTVYGTPKPKRPAILTYHDVGLNYKSCFQPLFQFEDMQEIIQNFVRVHVDAPGMEEGAPVFPLGYQYPSLDQLADMIPCVLQYLNFSTIIGVGVGAGAYILARYALNHPDTVEGLVLINID

SEQ ID NO: 32155 - protein, 153 aa, Homo sapiens
  REGION 1..153: note = ENSP00000452592
MAELQEVQITEEKPLLPGQTPEAAKTHSVETPYGSVTFTVYGTPKPKRPAILTYHDVGLNYKSCFQPLFQFEDMQEIIQNFVRVHVDAPGMEEGAPVFPLGYQYPSLDQLADMIPCVLQYLNFSTIIGVGVGAGAYILARYALNHPDTVEGLV

SEQ ID NO: 32156 - protein, 153 aa, Homo sapiens; identical to SEQ ID NO: 32155
  REGION 1..153: note = ENSP00000450513

SEQ ID NO: 32157 - protein, 77 aa, Homo sapiens
  REGION 1..77: note = ENSP00000452053
MAELQEVQITEEKPLLPGQTPEAAKINLASSHCFSSRTCRKSFRTLCGFMWMPLEWKREPLCSLWDISTHLWTSLQT

SEQ ID NO: 32158 - protein, 154 aa, Homo sapiens
  REGION 1..154: note = ENSP00000451302
MVMCFCVNPCVSLQEAELAARILLDQGQTHSVETPYGSVTFTVYGTPKPKRPAILTYHDVGLNYKSCFQPLFQFEDMQEIIQNFVRVHVDAPGMEEGAPVFPLGYQYPSLDQLADMIPCVLQYLNFSTIIGVGVGAGAYILARYALNHPDTVEG

SEQ ID NO: 32159 - protein, 150 aa, Homo sapiens
  REGION 1..150: note = ENSP00000451471
MAELQEVQITEEKPLLPGQTPEAAKTHSVETPYGSVTFTVYGTPKPKRPAILTYHDVGLNYKSCFQPLFQFEDMQEIIQNFVRVHVDAPGMEEGAPVFPLGYQYPSLDQLADMIPCVLQYLNFSTIIGVGVGAGAYILARYALNHPDTVE

SEQ ID NO: 32160 - protein, 149 aa, Homo sapiens
  REGION 1..149: note = ENSP00000452548
MAELQEVQITEEKPLLPGQTPEAAKTHSVETPYGSVTFTVYGTPKPKRPAILTYHDVGLNYKSCFQPLFQFEDMQEIIQNFVRVHVDAPGMEEGAPVFPLGYQYPSLDQLADMIPCVLQYLNFSTIIGVGVGAGAYILARYALNHPDTV

SEQ ID NO: 32161 - protein, 144 aa, Homo sapiens
  REGION 1..144: note = ENSP00000450504
MAELQEVQITEEKPLLPGQTPEAAKTHSVETPYGSVTFTVYGTPKPKRPAILTYHDVGLNYKSCFQPLFQFEDMQEIIQNFVRVHVDAPGMEEGAPVFPLGYQYPSLDQLADMIPCVLQYLNFSTIIGVGVGAGAYILARYALN

SEQ ID NO: 32162 - protein, 142 aa, Homo sapiens
  REGION 1..142: note = ENSP00000452262
MAELQEVQITEEKPLLPGQTPEAAKTHSVETPYGSVTFTVYGTPKPKRPAILTYHDVGLNYKSCFQPLFQFEDMQEIIQNFVRVHVDAPGMEEGAPVFPLGYQYPSLDQLADMIPCVLQYLNFSTIIGVGVGAGAYILARYA

SEQ ID NO: 32163 - protein, 122 aa, Homo sapiens
  REGION 1..122: note = ENSP00000450929
MAELQEVQITEEKPLLPGQTPEAAKTHSVETPYGSVTFTVYGTPKPKRPAILTYHDVGLNYKSCFQPLFQFEDMQEIIQNFVRVHVDAPGMEEGAPVFPLGYQYPSLDQLADMIPCVLQYLK

SEQ ID NO: 32164 - protein, 149 aa, Homo sapiens
  REGION 1..149: note = ENSP00000451185
MAELQEVQITEEKPLLPGQTPEAAKEAELAARILLDQGQTHSVETPYGSVTFTVYGTPKPKRPAILTYHDVGLNYKSCFQPLFQFEDMQEIIQNFVRVHVDAPGMEEGAPVFPLGYQYPSLDQLADMIPCVLQYLNFSTIIGVGVGAGA

SEQ ID NO: 32165 - protein, 148 aa, Homo sapiens
  REGION 1..148: note = ENSP00000451348
MAELQEVQITEEKPLLPGQTPEAAKEAELAARILLDQGQTHSVETPYGSVTFTVYGTPKPKRPAILTYHDVGLNYKSCFQPLFQFEDMQEIIQNFVRVHVDAPGMEEGAPVFPLGYQYPSLDQLADMIPCVLQYLNFSTIIGVGVGAG

SEQ ID NO: 32166 - protein, 133 aa, Homo sapiens
  REGION 1..133: note = ENSP00000451472
MAELQEVQITEEKPLLPGQTPEAAKTHSVETPYGSVTFTVYGTPKPKRPAILTYHDVGLNYKSCFQPLFQFEDMQEIIQNFVRVHVDAPGMEEGAPVFPLGYQYPSLDQLADMIPCVLQYLNFSTIIGVGVGA

SEQ ID NO: 32167 - protein, 127 aa, Homo sapiens
  REGION 1..127: note = ENSP00000452247
MAELQEVQITEEKPLLPGQTPEAAKTHSVETPYGSVTFTVYGTPKPKRPAILTYHDVGLNYKSCFQPLFQFEDMQEIIQNFVRVHVDAPGMEEGAPVFPLGYQYPSLDQLADMIPCVLQYLNFSTII

SEQ ID NO: 32168 - protein, 122 aa, Homo sapiens; identical to SEQ ID NO: 32163
  REGION 1..122: note = ENSP00000451414

SEQ ID NO: 32169 - protein, 127 aa, Homo sapiens; identical to SEQ ID NO: 32167
  REGION 1..127: note = ENSP00000452344

SEQ ID NO: 32170 - protein, 141 aa, Homo sapiens
  REGION 1..141: note = ENSP00000450852
MAELQEVQITEEKPLLPGQTPEAAKEAELAARILLDQGQTHSVETPYGSVTFTVYGTPKPKRPAILTYHDVGLNYKSCFQPLFQFEDMQEIIQNFVRVHVDAPGMEEGAPVFPLGYQYPSLDQLADMIPCVLQYLNFSTII

SEQ ID NO: 32171 - protein, 140 aa, Homo sapiens
  REGION 1..140: note = ENSP00000451981
MAELQEVQITEEKPLLPGQTPEAAKEAELAARILLDQGQTHSVETPYGSVTFTVYGTPKPKRPAILTYHDVGLNYKSCFQPLFQFEDMQEIIQNFVRVHVDAPGMEEGAPVFPLGYQYPSLDQLADMIPCVLQYLNFSTI

SEQ ID NO: 32172 - protein, 120 aa, Homo sapiens
  REGION 1..120: note = ENSP00000451163
MAELQEVQITEEKPLLPGQTPEAAKTHSVETPYGSVTFTVYGTPKPKRPAILTYHDVGLNYKSCFQPLFQFEDMQEIIQNFVRVHVDAPGMEEGAPVFPLGYQYPSLDQLADMIPCVLQY

SEQ ID NO: 32173 - protein, 129 aa, Homo sapiens
  REGION 1..129: note = ENSP00000452179
MAELQEVQITEEKPLLPGQTPEAAKEAELAARILLDQGQTHSVETPYGSVTFTVYGTPKPKRPAILTYHDVGLNYKSCFQPLFQFEDMQEIIQNFVRVHVDAPGMEEGAPVFPLGYQYPSLDQLADMIP

SEQ ID NO: 32174 - protein, 108 aa, Homo sapiens
  REGION 1..108: note = ENSP00000451541
MAELQEVQITEEKPLLPGQTPEAAKTHSVETPYGSVTFTVYGTPKPKRPAILTYHDVGLNSTVSVRGHAGNHSELCAGSCGCPWNGRGSPCVPFGISVPISGPACRHD

SEQ ID NO: 32175 - protein, 108 aa, Homo sapiens
  REGION 1..108: note = ENSP00000452302
MAELQEVQITEEKPLLPGQTPEAAKTHSVETPYGSVTFTVYGTPKPKRPAILTYHDVGLNYKSCFQPLFQFEDMQEIIQNFVRVHVDAPGMEEGAPVFPLGYQYPSLD

SEQ ID NO: 32176 - protein, 118 aa, Homo sapiens
  REGION 1..118: note = ENSP00000450825
MAELQEVQITEEKPLLPGQTPEAAKEAELAARILLDQGQTHSVETPYGSVTFTVYGTPKPKRPAILTYHDVGLNYKSCFQPLFQFEDMQEIIQNFVRVHVDAPGMEEGAPVFPLGYQY

SEQ ID NO: 32177 - protein, 92 aa, Homo sapiens
  REGION 1..92: note = ENSP00000450450
MAELQEVQITEEKPLLPGQTPEAAKTHSVETPYGSVTFTVYGTPKPKRPAILTYHDVGLNYKSCFQPLFQFEDMQEIIQNFVRVHVDAPGME

SEQ ID NO: 32178 - protein, 99 aa, Homo sapiens
  REGION 1..99: note = ENSP00000452458
MAELQEVQITEEKPLLPGQTPEAAKEAELAARILLDQGQTHSVETPYGSVTFTVYGTPKPKRPAILTYHDVGLNYKSCFQPLFQFEDMQEIIQNFVRVH

SEQ ID NO: 32179 - protein, 86 aa, Homo sapiens
  REGION 1..86: note = ENSP00000452274
MAELQEVQITEEKPLLPGQTPEAAKEAELAARILLDQGQTHSVETPYGSVTFTVYGTPKPKRPAILTYHDVGLNYKSCFQPLFQFE

SEQ ID NO: 32180 - protein, 371 aa, Homo sapiens; identical to SEQ ID NO: 32121
  REGION 1..371: note = ENSP00000380956

SEQ ID NO: 32181 - protein, 356 aa, Homo sapiens [sequence omitted]

SEQ ID NO: 32182 - protein, 873 aa, Homo sapiens
  REGION 1..873: note = ENSP00000296499
MSFIMKLHRHFQRTVILLATFCMVSIIISAYYLYSGYKQENELSETASEVDCGDLQHLPYQLMEVKAMKLFDASRTDPTVLVFVESQYSSLGQDIIMILESSRFQYHIEIAPGKGDLPVLIDKMKGKYILIIYENILKYINMDSWNRSLLDKYCVEYGVGVIGFHKTSEKSVQSFQLKGFPFSIYGNLAVKDCCINPHSPLIRVTKSSKLEKGSLPGTDWTVFQINHSAYQPVIFAKVKTPENLSPSISKGAFYATIIHDLGLHDGIQRVLFGNNLNFWLHKLIFIDAISFLSGKRLTLSLDRYILVDIDDIFVGKEGTRMNTNDVKALLDTQNLLRAQITNFTFNLGFSGKFYHTGTEEEDEGDDCLLGSVDEFWWFPHMWSHMQPHLFHNESSLVEQMILNKKFALEHGIPTDMGYAVAPHHSGVYPVHVQLYEAWKKVWNIKITSTEEYPHLKPARYRRGFIHKNIMVLPRQTCGLFTHTIFYKEYPGGPKELDKSIQGGELFFTVVLNPISIFMTHLSNYGNDRLGLYTFVNLANFVKSWTNLRLQTLPPVQLAHKYFELFPDQKDPLWQNPCDDKRHRDIWSKEKTCDRLPKFLVIGPQKTGTTALYLFLVMHPSILSNSPSPKTFEEVQFFNRNNYHRGIDWYMDFFPVPSNVTTDFLFEKSANYFHSEEAPKRAASLVPKAKIITILIDPSDRAYSWYQHQRSHEDPAALKFSFYEVISAGPRAPSELRALQKRCLVPGWYASHIERWLVYFPPFQLLIIDGQQLRTDPATVMDEVQKFLGVLPHYNYSEALTFDSHKGFWCQLLEEGKTKCLGKSKGRKYPPMDSDSRTFLSSYYRDHNVELSKLLHKLGQPLPSWLRQELQKVR

SEQ ID NO: 32183 - protein, 872 aa, Homo sapiens
  REGION 1..872: note = ENSP00000264363
MNLIVKLRRSFRTLIVLLATFCLVSIVISAYFLYSGYKQEMTLIETTAEAECTDIKILPYRSMELKTVKPIDTSKTDPTVLLFVESQYSQLGQDIIAILESSRFQYHMVIAPGKGDIPPLTDNGKGKYTLVIYENILKYVSMDSWNRELLEKYCVEYSVSIIGFHKANENSLPSTQLKGFPLNLFNNLALKDCFVNPQSPLLHITKAPKVEKGPLPGEDWTIFQYNHSTYQPVLLTELQTEKSLSSLSSKTLFATVIQDLGLHDGIQRVLFGNNLNFWLHKLIFIDAISFLSGKRLTLSLDRYILVDIDDIFVGKEGTRMNVKDVKALLETQNLLRTQVANFTFNLGFSGKFYHTGTEEEDEGDDLLLRSVDEFWWFPHMWSHMQPHLFHNESSLVEQMILNKEFALEHGIPINMGYAVAPHHSGVYPVHIQLYAAWKKVWGIQVTSTEEYPHLKPARYRKGFIHNSIMVLPRQTCGLFTHTIFYKEYPGGPQELDKSIRGGELFLTILLNPISIFMTHLSNYGNDRLGLYTFVNLVNFVQSWTNLKLQTLPPVQLAHQYFELFPEQKDPLWQNPCDDKRHKDIWSREKTCDHLPKFLVIGPQKTGTTALYLFLLMHPSIISNLPSPKTFEEVQFFNGNNYHKGIDWYMDFFPTPSNTTSDFLFEKSANYFHSEEAPRRAASLVPKAKIITILIDPSDRAYSWYQHQRSHEDPAALRFNFYEVISTGHWAPSDLKTLQRRCLVPGWYAVHIERWLTYFATSQLLIIDGQQLRSDPATVMDEVQKFLGVTPRYNYSEALTFDPQKGFWCQLLEGGKTKCLGKSKGRKYPPMDPESRTFLSNYYRDHNVELSKLLHRLGQPLPSWLRQELQKVR

SEQ ID NO: 32184 - protein, 369 aa, Homo sapiens
  REGION 1..369: note = ENSP00000423218
MWSHMQPHLFHNESSLVEQMILNKEFALEHGIPINMGYAVAPHHSGVYPVHIQLYAAWKKVWGIQVTSTEEYPHLKPARYRKGFIHNSIMVLPRQTCGLFTHTIFYKEYPGGPQELDKSIRGGELFLTILLNPISIFMTHLSNYGNDRLGLYTFVNLVNFVQSWTNLKLQTLPPVQLAHQYFELFPEQKDPLWQNPCDDKRHKDIWSREKTCDHLPKFLVIGPQKTGTTALYLFLLMHPSIISNLPSPKTFEEVQFFNGNNYHKGIDWYMDFFPTPSNTTSDFLFEKSANYFHSEEAPRRAASLVPKAKIITILIDPSDRAYSWYQVGVQWRDLGSLQPSPPRFMPFSCLSLLSSWDYSTNDHMKIQLL

SEQ ID NO: 32185 - protein, 369 aa, Homo sapiens; identical to SEQ ID NO: 32184
  REGION 1..369: note = ENSP00000483949

SEQ ID NO: 32186 - protein, 351 aa, Homo sapiens
  REGION 1..351: note = ENSP00000387380
MEDSQETSPSSNNSSEELSSALHLSKGMSIFLDILRRADKNDDGKLSFEEFKAYFADGVLSGEELHELFHTIDTHNTNNLDTEELCEYFSQHLGEYENVLAALEDLNLSILKAMGKTKKDYQEASNLEQFVTRFLLKETLNQLQSLQNSLECAMETTEEQTRQERQGPAKPEVLSIQWPGKRSSRRVQRHNSFSPNSPQFNVSGPGLLEEDNQWMTQINRLQKLIDRLEKKDLKLEPPEEEIIEGNTKSHIMLVQRQMSVIEEDLEEFQLALKHYVESASSQSGCLRISIQKLSNESRYMIYEFWENSSVWNSHLQTNYSKTFQRSNVDFLETPELTSTMLVPASWWILNN

SEQ ID NO: 32187 - protein, 100 aa, Homo sapiens
  REGION 1..100: note = ENSP00000428953
MLVQRQMSVIEEDLEEFQLALKHYVESASSQSGCLRISIQKLSNESRYMIYEFWENSSVWNSHLQTNYSKTFQRSNVDFLETPELTSTMLVPASWWILNN

SEQ ID NO: 32188 - protein, 100 aa, Homo sapiens; identical to SEQ ID NO: 32187
  REGION 1..100: note = ENSP00000428632

SEQ ID NO: 32189 - protein, 17 aa, Homo sapiens
  REGION 1..17: note = ENSP00000418691
MESTTTSFPNETATIIS

SEQ ID NO: 32190 - protein, 130 aa, Homo sapiens
  REGION 1..130: note = ENSP00000418327
MACSLGGALAGPIIVEPHVTAVWGKNVSLKCLIEVNETITQISWEKIHGKSSQTVAVHHPQYGFSVQGEYQGRVLFKNYSLNDATITLHNIGFSDSGKYICKAVTFPLGNAQSSTTVTVLVEPTVSLIKG

SEQ ID NO: 32191 - protein, 549 aa, Homo sapiens
  REGION 1..549: note = ENSP00000418070
MARTLRPSPLCPGGGKAQLSSASLLGAGLLLQPPTPPPLLLLLFPLLLFSRLCGALAGPIIVEPHVTAVWGKNVSLKCLIEVNETITQISWEKIHGKSSQTVAVHHPQYGFSVQGEYQGRVLFKNYSLNDATITLHNIGFSDSGKYICKAVTFPLGNAQSSTTVTVLVEPTVSLIKGPDSLIDGGNETVAAICIAATGKPVAHIDWEGDLGEMESTTTSFPNETATIISQYKLFPTRFARGRRITCVVKHPALEKDIRYSFILDIQYAPEVSVTGYDGNWFVGRKGVNLKCNADANPPPFKSVWSRLDGQWPDGLLASDNTLHFVHPLTFNYSGVYICKVTNSLGQRSDQKVIYISDPPTTTTLQPTIQWHPSTADIEDLATEPKKLPFPLSTLATIKDDTIATIIASVVGGALFIVLVSVLAGIFCYRRRRTFRGDYFAKNYIPPSDMQKESQIDVLQQDELDSYPDSVKKENKNPVNNLIRKDYLEEPEKTQWNNVENLNRFERPMDYYEDLKMGMKFVSDEHYDENEDDLVSHVDGSVISRREWYV

SEQ ID NO: 32192 - protein, 366 aa, Homo sapiens
  REGION 1..366: note = ENSP00000321514
MARTLRPSPLCPGGGKAQLSSASLLGAGLLLQPPTPPPLLLLLFPLLLFSRLCGALAGPIIVEPHVTAVWGKNVSLKCLIEVNETITQISWEKIHGKSSQTVAVHHPQYGFSVQGEYQGRVLFKNYSLNDATITLHNIGFSDSGKYICKAVTFPLGNAQSSTTVTVLVEPTVSLIKGPDSLIDGGNETVAAICIAATGKPVAHIDWEGDLGEMESTTTSFPNETATIISQYKLFPTRFARGRRITCVVKHPALEKDIRYSFILDIQYAPEVSVTGYDGNWFVGRKGVNLKCNADANPPPFKSVWSRLDGQWPDGLLASDNTLHFVHPLTFNYSGVYICKVTNSLGQRSDQKVIYISAYNSVASLNC

SEQ ID NO: 32193 - protein, 244 aa, Homo sapiens
  REGION 1..244: note = ENSP00000417572
  VARIANT 1: note = Any amino acid
XARTLRPSPLCPGGGKAQLSSASLLGAGLLLQPPTPPPLLLLLFPLLLFSRLCGALAGPIIVEPHVTAVWGKNVSLKCLIEVNETITQISWEKIHGKSSQTVAVHHPQYGFSVQGEYQGRVLFKNYSLNDATITLHNIGFSDSGKYICKAVTFPLGNAQSSTTVTVLDAPEVSVTGYDGNWFVGRKGVNLKCNADANPPPFKSVWSRLDGQWPDGLLASDNTLHFVHPLTFNYSGVYICKVTNS

SEQ ID NO: 32194 - protein, 487 aa, Homo sapiens
  REGION 1..487: note = ENSP00000420579
MAEGWRWCFVRRTPGLLRGPLLPRSFSGNPRALAGPIIVEPHVTAVWGKNVSLKCLIEVNETITQISWEKIHGKSSQTVAVHHPQYGFSVQGEYQGRVLFKNYSLNDATITLHNIGFSDSGKYICKAVTFPLGNAQSSTTVTVLVEPTVSLIKGPDSLIDGGNETVAAICIAATGKPVAHIDWEGDLGEMESTTTSFPNETATIISQYKLFPTRFARGRRITCVVKHPALEKDIRYSFILDIQYAPEVSVTGYDGNWFVGRKGVNLKCNADANPPPFKSVWSRLDGQWPDGLLASDNTLHFVHPLTFNYSGVYICKVTNSLGQRSDQKVIYISDVPFKQTSSIAVAGAVIGAVLALFIIAIFVTVLLTPRKKRPSYLDKVIDLPPTHKPPPLYEERSPPLPQKDLFQPEHLPLQTQFKEREVGNLQHSNGLNSRSFDYEDENPVGEDGIQQMYPLYNQMCYQDRSPGKHHQNNDPKRVYIDPREHYV

SEQ ID NO: 32195 - protein, 168 aa, Homo sapiens
  REGION 1..168: note = ENSP00000420479
MEAKFSSIWHPGDCFSCKTIDCPPFILLNKLSREDLLHCALAGPIIVEPHVTAVWGKNVSLKCLIEVNETITQISWEKIHGKSSQTVAVHHPQYGFSVQGEYQGRVLFKNYSLNDATITLHNIGFSDSGKYICKAVTFPLGNAQSSTTVTVLVEPTVSLIKGPDSLID

SEQ ID NO: 32196 - protein, 31 aa, Homo sapiens
  REGION 1..31: note = ENSP00000419829
PEHLPLQTQFKEREVGNLQHSTYYNPGTKTH

SEQ ID NO: 32197 - protein, 910 aa, Homo sapiens
  REGION 1..910: note = ENSP00000422455
  VARIANT 1: note = Any amino acid
XNGDCKPEMSEIKLNSDSEYIKLMHRTSACLPSSQNVDCQININGELERPHSQMNKNHGILRRSISLGGAYPNISCLSSLKHNCSKGGPSQLLIKFASGNEGKVDNLSRDSNRDCTNELSNSCKTENPRLERPYTFKDFVLHPRSHKSRVKGYLRLKMTYLPKTSGSEDDNAEQAEELEPGWVVLDQPDAACHLQQQQEPSPLPPGWEERQDILGRTYYVNHESRRTQWKRPTPQDNLTDAENGNIQLQAQRAFTTRRQISEETESVDNRESSENWEIIREDEATMYSNQAFPSPPPSSNLDVPTHLAEELNARLTIFGNSAVSQPASSSNHSSRRGSLQAYTFEEQPTLPVLLPTSSGLPPGWEEKQDERGRSYYVDHNSRTTTWTKPTVQATVETSQLTSSQSSAGPQSQASTSDSGQQVTQPSEIEQGFLPKGWEVRHAPNGRPFFIDHNTKTTTWEDPRLKIPAHLRGKTSLDTSNDLGPLPPGWEERTHTDGRIFYINHNIKRTQWEDPRLENVAITGPAVPYSRDYKRKYEFFRRKLKKQNDIPNKFEMKLRRATVLEDSYRRIMGVKRADFLKARLWIEFDGEKGLDYGGVAREWFFLISKEMFNPYYGLFEYSATDNYTLQINPNSGLCNEDHLSYFKFIGRVAGMAVYHGKLLDGFFIRPFYKMMLHKPITLHDMESVDSEYYNSLRWILENDPTELDLRFIIDEELFGQTHQHELKNGGSEIVVTNKNKKEYIYLVIQWRFVNRIQKQMAAFKEGFFELIPQDLIKIFDENELELLMCGLGDVDVNDWREHTKYKNGYSANHQVIQWFWKAVLMMDSEKRIRLLQFVTGTSRVPMNGFAELYGSNGPQSFTVEQWGTPEKLPRAHTCFNRLDLPPYESFEELWDKLQMAIENTQGFDGVD

SEQ ID NO: 32198 - protein, 401 aa, Homo sapiens
  REGION 1..401: note = ENSP00000426051
  VARIANT 1: note = Any amino acid
XIYSSAVVDNELNAVNDGHLVSSPAICSGSLSNFSTSDNGSYSSNGSDFGSCASITSGGSYTNSVISDSSSYTFPPSDDTFLGGNLPSDSTSNRSVPNRNTTPCEIFSRSTSTDPFVQDDLEHGLEIMKLPVSRNTKIPLKRYSSLVIFPRSPSTTRPTSPTSLCTLLSKGSYQTSHQFIISPSEIAHNEDGTSAKGFLSTAVNGLRLSKTICTPGEVRDIRPLHRKGSLQKKIVLSNNTPRQTVCEKSSEGYSCVSVHFTQRKAATLDCETTNGDCKPEMSEIKLNSDSEYIKLMHRTSACLPSSQNVDCQININGELERPHSQMNKNHGILRRSISLGGAYPNISCLSSLKHNCSKGGPSQLLIKFASGNEGKVDNLSRDSNRDCTNELSNSCKSQIKS

SEQ ID NO: 32199 - protein, 1247 aa, Homo sapiens
  REGION 1..1247: note = ENSP00000345530
MAQSLRLHFAARRSNTYPLSETSGDDLDSHVHMCFKRPTRISTSNVVQMKLTPRQTALAPLIKENVQSQERSSVPSSENVNKKSSCLQISLQPTRYSGYLQSSNVLADSDDASFTCILKDGIYSSAVVDNELNAVNDGHLVSSPAICSGSLSNFSTSDNGSYSSNGSDFGSCASITSGGSYTNSVISDSSSYTFPPSDDTFLGGNLPSDSTSNRSVPNRNTTPCEIFSRSTSTDPFVQDDLEHGLEIMKLPVSRNTKIPLKRYSSLVIFPRSPSTTRPTSPTSLCTLLSKGSYQTSHQFIISPSEIAHNEDGTSAKGFLSTAVNGLRLSKTICTPGEVRDIRPLHRKGSLQKKIVLSNNTPRQTVCEKSSEGYSCVSVHFTQRKAATLDCETTNGDCKPEMSEIKLNSDSEYIKLMHRTSACLPSSQNVDCQININGELERPHSQMNKNHGILRRSISLGGAYPNISCLSSLKHNCSKGGPSQLLIKFASGNEGKVDNLSRDSNRDCTNELSNSCKPGWVVLDQPDAACHLQQQQEPSPLPPGWEERQDILGRTYYVNHESRRTQWKRPTPQDNLTDAENGNIQLQAQRAFTTRRQISEETESVDNRESSENWEIIREDEATMYSNQAFPSPPPSSNLDVPTHLAEELNARLTIFGNSAVSQPASSSNHSSRRGSLQAYTFEEQPTLPVLLPTSSGLPPGWEEKQDERGRSYYVDHNSRTTTWTKPTVQATVETSQLTSSQSSAGPQSQASTSDSGQQVTQPSEIEQGFLPKGWEVRHAPNGRPFFIDHNTKTTTWEDPRLKIPAHLRGKTSLDTSNDLGPLPPGWEERTHTDGRIFYINHNIKRTQWEDPRLENVAITGPAVPYSRDYKRKYEFFRRKLKKQNDIPNKFEMKLRRATVLEDSYRRIMGVKRADFLKARLWIEFDGEKGLDYGGVAREWFFLISKEMFNPYYGLFEYSATDNYTLQINPNSGLCNEDHLSYFKFIGRVAGMAVYHGKLLDGFFIRPFYKMMLHKPITLHDMESVDSEYYNSLRWILENDPTELDLRFIIDEELFGQTHQHELKNGGSEIVVTNKNKKEYIYLVIQWRFVNRIQKQMAAFKEGFFELIPQDLIKIFDENELELLMCGLGDVDVNDWREHTKYKNGYSANHQVIQWFWKAVLMMDSEKRIRLLQFVTGTSRVPMNGFAELYGSNGPQSFTVEQWGTPEKLPRAHTCFNRLDLPPYESFEELWDKLQMAIENTQGFDGVD

SEQ ID NO: 32200 - protein, 1319 aa, Homo sapiens
  REGION 1..1319: note = ENSP00000424827
MAQSLRLHFAARRSNTYPLSETSGDDLDSHVHMCFKRPTRISTSNVVQMKLTPRQTALAPLIKENVQSQERSSVPSSENVNKKSSCLQISLQPTRYSGYLQSSNVLADSDDASFTCILKDGIYSSAVVDNELNAVNDGHLVSSPAICSGSLSNFSTSDNGSYSSNGSDFGSCASITSGGSYTNSVISDSSSYTFPPSDDTFLGGNLPSDSTSNRSVPNRNTTPCEIFSRSTSTDPFVQDDLEHGLEIMKLPVSRNTKIPLKRYSSLVIFPRSPSTTRPTSPTSLCTLLSKGSYQTSHQFIISPSEIAHNEDGTSAKGFLSTAVNGLRLSKTICTPGEVRDIRPLHRKGSLQKKIVLSNNTPRQTVCEKSSEGYSCVSVHFTQRKAATLDCETTNGDCKPEMSEIKLNSDSEYIKLMHRTSACLPSSQNVDCQININGELERPHSQMNKNHGILRRSISLGGAYPNISCLSSLKHNCSKGGPSQLLIKFASGNEGKVDNLSRDSNRDCTNELSNSCKTRDDFLGQVDVPLYPLPTENPRLERPYTFKDFVLHPRSHKSRVKGYLRLKMTYLPKTSGSEDDNAEQAEELEPGWVVLDQPDAACHLQQQQEPSPLPPGWEERQDILGRTYYVNHESRRTQWKRPTPQDNLTDAENGNIQLQAQRAFTTRRQISEETESVDNRESSENWEIIREDEATMYSNQAFPSPPPSSNLDVPTHLAEELNARLTIFGNSAVSQPASSSNHSSRRGSLQAYTFEEQPTLPVLLPTSSGLPPGWEEKQDERGRSYYVDHNSRTTTWTKPTVQATVETSQLTSSQSSAGPQSQASTSDSGQQVTQPSEIEQGFLPKGWEVRHAPNGRPFFIDHNTKTTTWEDPRLKIPAHLRGKTSLDTSNDLGPLPPGWEERTHTDGRIFYINHNIKRTQWEDPRLENVAITGPAVPYSRDYKRKYEFFRRKLKKQNDIPNKFEMKLRRATVLEDSYRRIMGVKRADFLKARLWIEFDGEKGLDYGGVAREWFFLISKEMFNPYYGLFEYSATDNYTLQINPNSGLCNEDHLSYFKFIGRVAGMAVYHGKLLDGFFIRPFYKMMLHKPITLHDMESVDSEYYNSLRWILENDPTELDLRFIIDEELFGQTHQHELKNGGSEIVVTNKNKKEYIYLVIQWRFVNRIQKQMAAFKEGFFELIPQDLIKIFDENELELLMCGLGDVDVNDWREHTKYKNGYSANHQVIQWFWKAVLMMDSEKRIRLLQFVTGTSRVPMNGFAELYGSNGPQSFTVEQWGTPEKLPRAHTCFNRLDLPPYESFEELWDKLQMAIENTQGFDGVD

SEQ ID NO: 32201 - protein, 900 aa, Homo sapiens
  REGION 1..900: note = ENSP00000410613
MATCAVEVFGLLEDEENSRIVRVRVIAGIGLAKKDILGASDPYVRVTLYDPMNGVLTSVQTKTIKKSLNPKWNEEILFRVHPQQHRLLFEVFDENRLTRDDFLGQVDVPLYPLPTENPRLERPYTFKDFVLHPRSHKSRVKGYLRLKMTYLPKTSGSEDDNAEQAEELEPGWVVLDQPDAACHLQQQQEPSPLPPGWEERQDILGRTYYVNHESRRTQWKRPTPQDNLTDAENGNIQLQAQRAFTTRRQISEETESVDNRESSENWEIIREDEATMYSNQAFPSPPPSSNLDVPTHLAEELNARLTIFGNSAVSQPASSSNHSSRRGSLQAYTFEEQPTLPVLLPTSSGLPPGWEEKQDERGRSYYVDHNSRTTTWTKPTVQATVETSQLTSSQSSAGPQSQASTSDSGQQVTQPSEIEQGFLPKGWEVRHAPNGRPFFIDHNTKTTTWEDPRLKIPAHLRGKTSLDTSNDLGPLPPGWEERTHTDGRIFYINHNIKRTQWEDPRLENVAITGPAVPYSRDYKRKYEFFRRKLKKQNDIPNKFEMKLRRATVLEDSYRRIMGVKRADFLKARLWIEFDGEKGLDYGGVAREWFFLISKEMFNPYYGLFEYSATDNYTLQINPNSGLCNEDHLSYFKFIGRVAGMAVYHGKLLDGFFIRPFYKMMLHKPITLHDMESVDSEYYNSLRWILENDPTELDLRFIIDEELFGQTHQHELKNGGSEIVVTNKNKKEYIYLVIQWRFVNRIQKQMAAFKEGFFELIPQDLIKIFDENELELLMCGLGDVDVNDWREHTKYKNGYSANHQVIQWFWKAVLMMDSEKRIRLLQFVTGTSRVPMNGFAELYGSNGPQSFTVEQWGTPEKLPRAHTCFNRLDLPPYESFEELWDKLQMAIENTQGFDGVD

SEQ ID NO: 32202 - protein, 1303 aa, Homo sapiens
  REGION 1..1303: note = ENSP00000422705
MAQSLRLHFAARRSNTYPLSETSGDDLDSHVHMCFKRPTRISTSNVVQMKLTPRQTALAPLIKENVQSQERSSVPSSENVNKKSSCLQISLQPTRYSGYLQSSNVLADSDDASFTCILKDGIYSSAVVDNELNAVNDGHLVSSPAICSGSLSNFSTSDNGSYSSNGSDFGSCASITSGGSYTNSVISDSSSYTFPPSDDTFLGGNLPSDSTSNRSVPNRNTTPCEIFSRSTSTDPFVQDDLEHGLEIMKLPVSRNTKIPLKRYSSLVIFPRSPSTTRPTSPTSLCTLLSKGSYQTSHQFIISPSEIAHNEDGTSAKGFLSTAVNGLRLSKTICTPGEVRDIRPLHRKGSLQKKIVLSNNTPRQTVCEKSSEGYSCVSVHFTQRKAATLDCETTNGDCKPEMSEIKLNSDSEYIKLMHRTSACLPSSQNVDCQININGELERPHSQMNKNHGILRRSISLGGAYPNISCLSSLKHNCSKGGPSQLLIKFASGNEGKVDNLSRDSNRDCTNELSNSCKTRDDFLGQVDVPLYPLPTENPRLERPYTFKDFVLHPRSHKSRVKGYLRLKMTYLPKTSGSEDDNAEQAEELEQQQEPSPLPPGWEERQDILGRTYYVNHESRRTQWKRPTPQDNLTDAENGNIQLQAQRAFTTRRQISEETESVDNRESSENWEIIREDEATMYSNQAFPSPPPSSNLDVPTHLAEELNARLTIFGNSAVSQPASSSNHSSRRGSLQAYTFEEQPTLPVLLPTSSGLPPGWEEKQDERGRSYYVDHNSRTTTWTKPTVQATVETSQLTSSQSSAGPQSQASTSDSGQQVTQPSEIEQGFLPKGWEVRHAPNGRPFFIDHNTKTTTWEDPRLKIPAHLRGKTSLDTSNDLGPLPPGWEERTHTDGRIFYINHNIKRTQWEDPRLENVAITGPAVPYSRDYKRKYEFFRRKLKKQNDIPNKFEMKLRRATVLEDSYRRIMGVKRADFLKARLWIEFDGEKGLDYGGVAREWFFLISKEMFNPYYGLFEYSATDNYTLQINPNSGLCNEDHLSYFKFIGRVAGMAVYHGKLLDGFFIRPFYKMMLHKPITLHDMESVDSEYYNSLRWILENDPTELDLRFIIDEELFGQTHQHELKNGGSEIVVTNKNKKEYIYLVIQWRFVNRIQKQMAAFKEGFFELIPQDLIKIFDENELELLMCGLGDVDVNDWREHTKYKNGYSANHQVIQWFWKAVLMMDSEKRIRLLQFVTGTSRVPMNGFAELYGSNGPQSFTVEQWGTPEKLPRAHTCFNRLDLPPYESFEELWDKLQMAIENTQGFDGVD

SEQ ID NO: 32203 - protein, 39 aa, Homo sapiens
  REGION 1..39: note = ENSP00000424471
  VARIANT 1: note = Any amino acid
XCAVEVFGLLEDEENSRIVRVRVIAGIGLAKKDILGARV

SEQ ID NO: 32204 - protein, 35 aa, Homo sapiens
  REGION 1..35: note = ENSP00000421047
  VARIANT 1: note = Any amino acid
XWNEEILFRVHPQQHRLLFEVFDENRLPWLVTNQE

SEQ ID NO: 32205 - protein, 911 aa, Homo sapiens
  REGION 1..911: note = ENSP00000348847
MATGLGEPVYGLSEDEGESRILRVKVVSGIDLAKKDIFGASDPYVKLSLYVADENRELALVQTKTIKKTLNPKWNEEFYFRVNPSNHRLLFEVFDENRLTRDDFLGQVDVPLSHLPTEDPTMERPYTFKDFLLRPRSHKSRVKGFLRLKMAYMPKNGGQDEENSDQRDDMEHGWEVVDSNDSASQHQEELPPPPLPPGWEEKVDNLGRTYYVNHNNRTTQWHRPSLMDVSSESDNNIRQINQEAAHRRFRSRRHISEDLEPEPSEGGDVPEPWETISEEVNIAGDSLGLALPPPPASPGSRTSPQELSEELSRRLQITPDSNGEQFSSLIQREPSSRLRSCSVTDAVAEQGHLPPLAEDGASGSATNSNNHLIEPQIRRPRSLSSPTVTLSAPLEGAKDSPVRRAVKDTLSNPQSPQPSPYNSPKPQHKVTQSFLPPGWEMRIAPNGRPFFIDHNTKTTTWEDPRLKFPVHMRSKTSLNPNDLGPLPPGWEERIHLDGRTFYIDHNSKITQWEDPRLQNPAITGPAVPYSREFKQKYDYFRKKLKKPADIPNRFEMKLHRNNIFEESYRRIMSVKRPDVLKARLWIEFESEKGLDYGGVAREWFFLLSKEMFNPYYGLFEYSATDNYTLQINPNSGLCNEDHLSYFTFIGRVAGLAVFHGKLLDGFFIRPFYKMMLGKQITLNDMESVDSEYYNSLKWILENDPTELDLMFCIDEENFGQTYQVDLKPNGSEIMVTNENKREYIDLVIQWRFVNRVQKQMNAFLEGFTELLPIDLIKIFDENELELLMCGLGDVDVNDWRQHSIYKNGYCPNHPVIQWFWKAVLLMDAEKRIRLLQFVTGTSRVPMNGFAELYGSNGPQLFTIEQWGSPEKLPRAHTCFNRLDLPPYETFEDLREKLLMAVENAQGFEGVD

SEQ ID NO: 32206 - protein, 975 aa, Homo sapiens
  REGION 1..975: note = ENSP00000383199
MATGLGEPVYGLSEDEGESRILRVKVVSGIDLAKKDIFGASDPYVKLSLYVADENRELALVQTKTIKKTLNPKWNEEFYFRVNPSNHRLLFEVFDENRLTRDDFLGQVDVPLSHLPTEDPTMERPYTFKDFLLRPRSHKSRVKGFLRLKMAYMPKNGGQDEENSDQRDDMEHGWEVVDSNDSASQHQEELPPPPLPPGWEEKVDNLGRTYYVNHNNRTTQWHRPSLMDVSSESDNNIRQINQEAAHRRFRSRRHISEDLEPEPSEGGDVPEPWETISEEVNIAGDSLGLALPPPPASPGSRTSPQELSEELSRRLQITPDSNGEQFSSLIQREPSSRLRSCSVTDAVAEQGHLPPPSAPAGRARSSTVTGGEEPTPSVAYVHTTPGLPSGWEERKDAKGRTYYVNHNNRTTTWTRPIMQLAEDGASGSATNSNNHLIEPQIRRPRSLSSPTVTLSAPLEGAKDSPVRRAVKDTLSNPQSPQPSPYNSPKPQHKVTQSFLPPGWEMRIAPNGRPFFIDHNTKTTTWEDPRLKFPVHMRSKTSLNPNDLGPLPPGWEERIHLDGRTFYIDHNSKITQWEDPRLQNPAITGPAVPYSREFKQKYDYFRKKLKKPADIPNRFEMKLHRNNIFEESYRRIMSVKRPDVLKARLWIEFESEKGLDYGGVAREWFFLLSKEMFNPYYGLFEYSATDNYTLQINPNSGLCNEDHLSYFTFIGRVAGLAVFHGKLLDGFFIRPFYKMMLGKQITLNDMESVDSEYYNSLKWILENDPTELDLMFCIDEENFGQTYQVDLKPNGSEIMVTNENKREYIDLVIQWRFVNRVQKQMNAFLEGFTELLPIDLIKIFDENELELLMCGLGDVDVNDWRQHSIYKNGYCPNHPVIQWFWKAVLLMDAEKRIRLLQFVTGTSRVPMNGFAELYGSNGPQLFTIEQWGSPEKLPRAHTCFNRLDLPPYETFEDLREKLLMAVENAQGFEGVD

SEQ ID NO: 32207 - protein, 106 aa, Homo sapiens
  REGION 1..106: note = ENSP00000465669
MATGLGEPVYGLSEDEAVLLMDAEKRIRLLQFVTGTSRVPMNGFAELYGSNGPQLFTIEQWGSPEKLPRAHTCFNRLDLPPYETFEDLREKLLMAVENAQGFEGVD

SEQ ID NO: 32208 - protein, 20 aa, Homo sapiens
  REGION 1..20: note = ENSP00000479462
MATGLGEPVYGLSEDEPGSP

SEQ ID NO: 32209 - protein, 955 aa, Homo sapiens
  REGION 1..955: note = ENSP00000372301
MATGLGEPVYGLSEDEGESRILRVKVVSGIDLAKKDIFGASDPYVKLSLYVADENRELALVQTKTIKKTLNPKWNEEFYFRVNPSNHRLLFEVFDENRLTRDDFLGQVDVPLSHLPTEDPTMERPYTFKDFLLRPRSHKSRVKGFLRLKMAYMPKNGGQDEENSDQRDDMEHGWEVVDSNDSASQHQEELPPPPLPPGWEEKVDNLGRTYYVNHNNRTTQWHRPSLMDVSSESDNNIRQINQEAAHRRFRSRRHISEDLEPEPSEGGDVPEPWETISEEVNIAGDSLGLALPPPPASPGSRTSPQELSEELSRRLQITPDSNGEQFSSLIQREPSSRLRSCSVTDAVAEQGHLPPPSVAYVHTTPGLPSGWEERKDAKGRTYYVNHNNRTTTWTRPIMQLAEDGASGSATNSNNHLIEPQIRRPRSLSSPTVTLSAPLEGAKDSPVRRAVKDTLSNPQSPQPSPYNSPKPQHKVTQSFLPPGWEMRIAPNGRPFFIDHNTKTTTWEDPRLKFPVHMRSKTSLNPNDLGPLPPGWEERIHLDGRTFYIDHNSKITQWEDPRLQNPAITGPAVPYSREFKQKYDYFRKKLKKPADIPNRFEMKLHRNNIFEESYRRIMSVKRPDVLKARLWIEFESEKGLDYGGVAREWFFLLSKEMFNPYYGLFEYSATDNYTLQINPNSGLCNEDHLSYFTFIGRVAGLAVFHGKLLDGFFIRPFYKMMLGKQITLNDMESVDSEYYNSLKWILENDPTELDLMFCIDEENFGQTYQVDLKPNGSEIMVTNENKREYIDLVIQWRFVNRVQKQMNAFLEGFTELLPIDLIKIFDENELELLMCGLGDVDVNDWRQHSIYKNGYCPNHPVIQWFWKAVLLMDAEKRIRLLQFVTGTSRVPMNGFAELYGSNGPQLFTIEQWGSPEKLPRAHTCFNRLDLPPYETFEDLREKLLMAVENAQGFEGVD

SEQ ID NO: 32210 - protein, 871 aa, Homo sapiens
  REGION 1..871: note = ENSP00000256830
MATGLGEPVYGLSEDEGESRILRVKVVSGIDLAKKDIFGASDPYVKLSLYVADENRELALVQTKTIKKTLNPKWNEEFYFRVNPSNHRLLFEVFDENRLTRDDFLGQVDVPLSHLPTEDPTMERPYTFKDFLLRPRSHKSRVKGFLRLKMAYMPKNGGQDEENSDQRDDMEHGWEVVDSNDSASQHQEELPPPPLPPGWEEKVDNLGRTYYVNHNNRTTQWHRPSLMDVSSESDNNIRQINQEAAHRRFRSRRHISEDLEPEPSEGGDVPEPWETISEEVNIAGDSLGLALPPPPASPGSRTSPQELSEELSRRLQITPDSNGEQFSSLIQREPSSRLRSCSVTDAVAEQGHLPPGAKDSPVRRAVKDTLSNPQSPQPSPYNSPKPQHKVTQSFLPPGWEMRIAPNGRPFFIDHNTKTTTWEDPRLKFPVHMRSKTSLNPNDLGPLPPGWEERIHLDGRTFYIDHNSKITQWEDPRLQNPAITGPAVPYSREFKQKYDYFRKKLKKPADIPNRFEMKLHRNNIFEESYRRIMSVKRPDVLKARLWIEFESEKGLDYGGVAREWFFLLSKEMFNPYYGLFEYSATDNYTLQINPNSGLCNEDHLSYFTFIGRVAGLAVFHGKLLDGFFIRPFYKMMLGKQITLNDMESVDSEYYNSLKWILENDPTELDLMFCIDEENFGQTYQVDLKPNGSEIMVTNENKREYIDLVIQWRFVNRVQKQMNAFLEGFTELLPIDLIKIFDENELELLMCGLGDVDVNDWRQHSIYKNGYCPNHPVIQWFWKAVLLMDAEKRIRLLQFVTGTSRVPMNGFAELYGSNGPQLFTIEQWGSPEKLPRAHTCFNRLDLPPYETFEDLREKLLMAVENAQGFEGVD

SEQ ID NO: 32211 - protein, 10 aa, Homo sapiens
  REGION 1..10: note = ENSP00000466776
MERPYTFKDF

SEQ ID NO: 32212 - protein, 834 aa, Homo sapiens
  REGION 1..834: note = ENSP00000393395
MERPYTFKDFLLRPRSHKSRVKGFLRLKMAYMPKNGGQDEENSDQRDDMEHGWEVVDSNDSASQHQEELPPPPLPPGWEEKVDNLGRTYYVNHNNRTTQWHRPSLMDVSSESDNNIRQINQEAAHRRFRSRRHISEDLEPEPSEGGDVPEPWETISEEVNIAGDSLGLALPPPPASPGSRTSPQELSEELSRRLQITPDSNGEQFSSLIQREPSSRLRSCSVTDAVAEQGHLPPPSVAYVHTTPGLPSGWEERKDAKGRTYYVNHNNRTTTWTRPIMQLAEDGASGSATNSNNHLIEPQIRRPRSLSSPTVTLSAPLEGAKDSPVRRAVKDTLSNPQSPQPSPYNSPKPQHKVTQSFLPPGWEMRIAPNGRPFFIDHNTKTTTWEDPRLKFPVHMRSKTSLNPNDLGPLPPGWEERIHLDGRTFYIDHNSKITQWEDPRLQNPAITGPAVPYSREFKQKYDYFRKKLKKPADIPNRFEMKLHRNNIFEESYRRIMSVKRPDVLKARLWIEFESEKGLDYGGVAREWFFLLSKEMFNPYYGLFEYSATDNYTLQINPNSGLCNEDHLSYFTFIGRVAGLAVFHGKLLDGFFIRPFYKMMLGKQITLNDMESVDSEYYNSLKWILENDPTELDLMFCIDEENFGQTYQVDLKPNGSEIMVTNENKREYIDLVIQWRFVNRVQKQMNAFLEGFTELLPIDLIKIFDENELELLMCGLGDVDVNDWRQHSIYKNGYCPNHPVIQWFWKAVLLMDAEKRIRLLQFVTGTSRVPMNGFAELYGSNGPQLFTIEQWGSPEKLPRAHTCFNRLDLPPYETFEDLREKLLMAVENAQGFEGVD

SEQ ID NO: 32213 - protein, 967 aa, Homo sapiens
  REGION 1..967: note = ENSP00000350569
MRRLAFEQGESRILRVKVVSGIDLAKKDIFGASDPYVKLSLYVADENRELALVQTKTIKKTLNPKWNEEFYFRVNPSNHRLLFEVFDENRLTRDDFLGQVDVPLSHLPTEDPTMERPYTFKDFLLRPRSHKSRVKGFLRLKMAYMPKNGGQDEENSDQRDDMEHGWEVVDSNDSASQHQEELPPPPLPPGWEEKVDNLGRTYYVNHNNRTTQWHRPSLMDVSSESDNNIRQINQEAAHRRFRSRRHISEDLEPEPSEGGDVPEPWETISEEVNIAGDSLGLALPPPPASPGSRTSPQELSEELSRRLQITPDSNGEQFSSLIQREPSSRLRSCSVTDAVAEQGHLPPPSAPAGRARSSTVTGGEEPTPSVAYVHTTPGLPSGWEERKDAKGRTYYVNHNNRTTTWTRPIMQLAEDGASGSATNSNNHLIEPQIRRPRSLSSPTVTLSAPLEGAKDSPVRRAVKDTLSNPQSPQPSPYNSPKPQHKVTQSFLPPGWEMRIAPNGRPFFIDHNTKTTTWEDPRLKFPVHMRSKTSLNPNDLGPLPPGWEERIHLDGRTFYIDHNSKITQWEDPRLQNPAITGPAVPYSREFKQKYDYFRKKLKKPADIPNRFEMKLHRNNIFEESYRRIMSVKRPDVLKARLWIEFESEKGLDYGGVAREWFFLLSKEMFNPYYGLFEYSATDNYTLQINPNSGLCNEDHLSYFTFIGRVAGLAVFHGKLLDGFFIRPFYKMMLGKQITLNDMESVDSEYYNSLKWILENDPTELDLMFCIDEENFGQTYQVDLKPNGSEIMVTNENKREYIDLVIQWRFVNRVQKQMNAFLEGFTELLPIDLIKIFDENELELLMCGLGDVDVNDWRQHSIYKNGYCPNHPVIQWFWKAVLLMDAEKRIRLLQFVTGTSRVPMNGFAELYGSNGPQLFTIEQWGSPEKLPRAHTCFNRLDLPPYETFEDLREKLLMAVENAQGFEGVD

SEQ ID NO: 32214 - protein, 947 aa, Homo sapiens
  REGION 1..947: note = ENSP00000468546
MRRLAFEQGESRILRVKVVSGIDLAKKDIFGASDPYVKLSLYVADENRELALVQTKTIKKTLNPKWNEEFYFRVNPSNHRLLFEVFDENRLTRDDFLGQVDVPLSHLPTEDPTMERPYTFKDFLLRPRSHKSRVKGFLRLKMAYMPKNGGQDEENSDQRDDMEHGWEVVDSNDSASQHQEELPPPPLPPGWEEKVDNLGRTYYVNHNNRTTQWHRPSLMDVSSESDNNIRQINQEAAHRRFRSRRHISEDLEPEPSEGGDVPEPWETISEEVNIAGDSLGLALPPPPASPGSRTSPQELSEELSRRLQITPDSNGEQFSSLIQREPSSRLRSCSVTDAVAEQGHLPPPSVAYVHTTPGLPSGWEERKDAKGRTYYVNHNNRTTTWTRPIMQLAEDGASGSATNSNNHLIEPQIRRPRSLSSPTVTLSAPLEGAKDSPVRRAVKDTLSNPQSPQPSPYNSPKPQHKVTQSFLPPGWEMRIAPNGRPFFIDHNTKTTTWEDPRLKFPVHMRSKTSLNPNDLGPLPPGWEERIHLDGRTFYIDHNSKITQWEDPRLQNPAITGPAVPYSREFKQKYDYFRKKLKKPADIPNRFEMKLHRNNIFEESYRRIMSVKRPDVLKARLWIEFESEKGLDYGGVAREWFFLLSKEMFNPYYGLFEYSATDNYTLQINPNSGLCNEDHLSYFTFIGRVAGLAVFHGKLLDGFFIRPFYKMMLGKQITLNDMESVDSEYYNSLKWILENDPTELDLMFCIDEENFGQTYQVDLKPNGSEIMVTNENKREYIDLVIQWRFVNRVQKQMNAFLEGFTELLPIDLIKIFDENELELLMCGLGDVDVNDWRQHSIYKNGYCPNHPVIQWFWKAVLLMDAEKRIRLLQFVTGTSRVPMNGFAELYGSNGPQLFTIEQWGSPEKLPRAHTCFNRLDLPPYETFEDLREKLLMAVENAQGFEGVD

SEQ ID NO: 32215 - protein, 834 aa, Homo sapiens; identical to SEQ ID NO: 32212
  REGION 1..834: note = ENSP00000405440

SEQ ID NO: 32216 - protein, 35 aa, Homo sapiens
  REGION 1..35: note = ENSP00000466789
MERPYTFKDFLLRPRSHKSRVKGFLRLKMAYMPKN

SEQ ID NO: 32217 - protein, 854 aa, Homo sapiens
  REGION 1..854: note = ENSP00000389406
MERPYTFKDFLLRPRSHKSRVKGFLRLKMAYMPKNGGQDEENSDQRDDMEHGWEVVDSNDSASQHQEELPPPPLPPGWEEKVDNLGRTYYVNHNNRTTQWHRPSLMDVSSESDNNIRQINQEAAHRRFRSRRHISEDLEPEPSEGGDVPEPWETISEEVNIAGDSLGLALPPPPASPGSRTSPQELSEELSRRLQITPDSNGEQFSSLIQREPSSRLRSCSVTDAVAEQGHLPPPSAPAGRARSSTVTGGEEPTPSVAYVHTTPGLPSGWEERKDAKGRTYYVNHNNRTTTWTRPIMQLAEDGASGSATNSNNHLIEPQIRRPRSLSSPTVTLSAPLEGAKDSPVRRAVKDTLSNPQSPQPSPYNSPKPQHKVTQSFLPPGWEMRIAPNGRPFFIDHNTKTTTWEDPRLKFPVHMRSKTSLNPNDLGPLPPGWEERIHLDGRTFYIDHNSKITQWEDPRLQNPAITGPAVPYSREFKQKYDYFRKKLKKPADIPNRFEMKLHRNNIFEESYRRIMSVKRPDVLKARLWIEFESEKGLDYGGVAREWFFLLSKEMFNPYYGLFEYSATDNYTLQINPNSGLCNEDHLSYFTFIGRVAGLAVFHGKLLDGFFIRPFYKMMLGKQITLNDMESVDSEYYNSLKWILENDPTELDLMFCIDEENFGQTYQVDLKPNGSEIMVTNENKREYIDLVIQWRFVNRVQKQMNAFLEGFTELLPIDLIKIFDENELELLMCGLGDVDVNDWRQHSIYKNGYCPNHPVIQWFWKAVLLMDAEKRIRLLQFVTGTSRVPMNGFAELYGSNGPQLFTIEQWGSPEKLPRAHTCFNRLDLPPYETFEDLREKLLMAVENAQGFEGVD

SEQ ID NO: 32218 - protein, 150 aa, Homo sapiens
  REGION 1..150: note = ENSP00000467072
MERPYTFKDFLLRPRSHKSRVKGFLRLKMAYMPKNGGQDEENSDQRDDMEHGWEVVDSNDSASQHQEELPPPPLPPGWEEKVDNLGRTYYVNHNNRTTQWHRPSLMDVSSESDNNIRQINQEAAHRRFRSRRHISEDLEPEPSEGGDVPE

SEQ ID NO: 32219 - protein, 15 aa, Homo sapiens
  REGION 1..15: note = ENSP00000467768
MERPYTFKDFLLRPR

SEQ ID NO: 32220 - protein, 1254 aa, Homo sapiens
  REGION 1..1254: note = ENSP00000490696
MAHRLRFHFGSGRSNTAPESDILDQEREDDFFMAFHTLPRRSSPHPFAQNGGEDGGGGLQGGVGALKRSSSMFIPQLLTSIDARPTCSSSVQISLQRKATDGATDGCGPPEGADDGPPCATPDPRDQASATATTRASPQSGSREPSPRDTPGSSPPRAARDPGLQVNGTCGRRVRCSGPVDCAEEAAPGLRIQHRASSADVRQVRLLPLGPDGQGGPAAAEPRRWSLQHVPDASGSSGKRCFVFQLQQPQQGASGPGSDLNFGFTGTKGDRLVRYPRIRLERSTSYPTQPRSERGSPTEDRGALEASPRAGRMAPEIRRTNSAERTPQGQGCTFKIRQDQNAGQQHFRILVTRGPEEAPQNPEEKSAKSPVSTGADTTTRDDFLGQVDVPLSHLPTEDPTMERPYTFKDFLLRPRSHKSRVKGFLRLKMAYMPKNGGQDEENSDQRDDMEHGWEVVDSNDSASQHQEELPPPPLPPGWEEKVDNLGRTYYVNHNNRTTQWHRPSLMDVSSESDNNIRQINQEAAHRRFRSRRHISEDLEPEPSEGGDVPEPWETISEEVNIAGDSLGLALPPPPASPGSRTSPQELSEELSRRLQITPDSNGEQFSSLIQREPSSRLRSCSVTDAVAEQGHLPPPSAPAGRARSSTVTGGEEPTPSVAYVHTTPGLPSGWEERKDAKGRTYYVNHNNRTTTWTRPIMQLAEDGASGSATNSNNHLIEPQIRRPRSLSSPTVTLSAPLEGAKDSPVRRAVKDTLSNPQSPQPSPYNSPKPQHKVTQSFLPPGWEMRIAPNGRPFFIDHNTKTTTWEDPRLKFPVHMRSKTSLNPNDLGPLPPGWEERIHLDGRTFYIDHNSKITQWEDPRLQNPAITGPAVPYSREFKQKYDYFRKKLKKPADIPNRFEMKLHRNNIFEESYRRIMSVKRPDVLKARLWIEFESEKGLDYGGVAREWFFLLSKEMFNPYYGLFEYSATDNYTLQINPNSGLCNEDHLSYFTFIGRVAGLAVFHGKLLDGFFIRPFYKMMLGKQITLNDMESVDSEYYNSLKWILENDPTELDLMFCIDEENFGQTYQVDLKPNGSEIMVTNENKREYIDLVIQWRFVNRVQKQMNAFLEGFTELLPIDLIKIFDENELELLMCGLGDVDVNDWRQHSIYKNGYCPNHPVIQWFWKAVLLMDAEKRIRLLQFVTGTSRVPMNGFAELYGSNGPQLFTIEQWGSPEKLPRAHTCFNRLDLPPYETFEDLREKLLMAVENAQGFEGVD

SEQ ID NO: 32221 - protein, 639 aa, Homo sapiens
  REGION 1..639: note = ENSP00000468332
RDDMEHGWEVVDSNDSASQHQEELPPPPLPPGWEEKVDNLGRTYYVNHNNRTTQWHRPSLMDVSSESDNNIRQINQEAAHRRFRSRRHISEDLEPEPSEGGDVPEPWETISEEVNIAGDSLGLALPPPPASPGSRTSPQELSEELSRRLQITPDSNGEQFSSLIQREPSSRLRSCSVTDAVAEQGHLPPEDPRLKFPVHMRSKTSLNPNDLGPLPPGWEERIHLDGRTFYIDHNSKITQWEDPRLQNPAITGPAVPYSREFKQKYDYFRKKLKKPADIPNRFEMKLHRNNIFEESYRRIMSVKRPDVLKARLWIEFESEKGLDYGGVAREWFFLLSKEMFNPYYGLFEYSATDNYTLQINPNSGLCNEDHLSYFTFIGRVAGLAVFHGKLLDGFFIRPFYKMMLGKQITLNDMESVDSEYYNSLKWILENDPTELDLMFCIDEENFGQTYQVDLKPNGSEIMVTNENKREYIDLVIQWRFVNRVQKQMNAFLEGFTELLPIDLIKIFDENELELLMCGLGDVDVNDWRQHSIYKNGYCPNHPVIQWFWKAVLLMDAEKRIRLLQFVTGTSRVPMNGFAELYGSNGPQLFTIEQWGSPEKLPRAHTCFNRLDLPPYETFEDLREKLLMAVENAQGFEGVD

SEQ ID NO: 32222 - protein, 854 aa, Homo sapiens; identical to SEQ ID NO: 32217
  REGION 1..854: note = ENSP00000411947

SEQ ID NO: 32223 - protein, 1020 aa, Homo sapiens
  REGION 1..1020: note = ENSP00000311997
MMSFGGADALLGAPFAPLHGGGSLHYALARKGGAGGTRSAAGSSSGFHSWTRTSVSSVSASPSRFRGAGAASSTDSLDTLSNGPEGCMVAVATSRSEKEQLQALNDRFAGYIDKVRQLEAHNRSLEGEAAALRQQQAGRSAMGELYEREVREMRGAVLRLGAARGQLRLEQEHLLEDIAHVRQRLDDEARQREEAEAAARALARFAQEAEAARVDLQKKAQALQEECGYLRRHHQEEVGELLGQIQGSGAAQAQMQAETRDALKCDVTSALREIRAQLEGHAVQSTLQSEEWFRVRLDRLSEAAKVNTDAMRSAQEEITEYRRQLQARTTELEALKSTKDSLERQRSELEDRHQADIASYQEAIQQLDAELRNTKWEMAAQLREYQDLLNVKMALDIEIAAYRKLLEGEECRIGFGPIPFSLPEGLPKIPSVSTHIKVKSEEKIKVVEKSEKETVIVEEQTEETQVTEEVTEEEEKEAKEEEGKEEEGGEEEEAEGGEEETKSPPAEEAASPEKEAKSPVKEEAKSPAEAKSPEKEEAKSPAEVKSPEKAKSPAKEEAKSPPEAKSPEKEEAKSPAEVKSPEKAKSPAKEEAKSPAEAKSPEKAKSPVKEEAKSPAEAKSPVKEEAKSPAEVKSPEKAKSPTKEEAKSPEKAKSPEKEEAKSPEKAKSPVKAEAKSPEKAKSPVKAEAKSPEKAKSPVKEEAKSPEKAKSPVKEEAKSPEKAKSPVKEEAKTPEKAKSPVKEEAKSPEKAKSPEKAKTLDVKSPEAKTPAKEEARSPADKFPEKAKSPVKEEVKSPEKAKSPLKEDAKAPEKEIPKKEEVKSPVKEEEKPQEVKVKEPPKKAEEEKAPATPKTEEKKDSKKEEAPKKEAPKPKVEEKKEPAVEKPKESKVEAKKEEAEDKKKVPTPEKEAPAKVEVKEDAKPKEKTEVAKKEPDDAKAKEPSKPAEKKEAAPEKKDTKEEKAKKPEEKPKTEAKAKEDDKTLSKEPSKPKAEKAEKSSSTDQKDSKPPEKATEDKAAKGK

SEQ ID NO: 32224 - protein, 543 aa, Homo sapiens
  REGION 1..543: note = ENSP00000482169
MSSFSYEPYYSTSYKRRYVETPRVHISSVRSGYSTARSAYSSYSAPVSSSLSVRRSYSSSSGSLMPSLENLDLSQVAAISNDLKSIRTQEKAQLQDLNDRFASFIERVHELEQQNKVLEAELLVLRQKHSEPSRFRALYEQEIRDLRLAAEDATNEKQALQGEREGLEETLRNLQARYEEEVLSREDAEGRLMEARKGADEAALARAELEKRIDSLMDEISFLKKVHEEEIAELQAQIQYAQISVEMDVTKPDLSAALKDIRAQYEKLAAKNMQNAEEWFKSRFTVLTESAAKNTDAVRAAKDEVSESRRLLKAKTLEIEACRGMNEALEKQLQELEDKQNADISAMQDTINKLENELRTTKSEMARYLKEYQDLLNVKMALDIEIAAYRKLLEGEETRLSFTSVGSITSGYSQSSQVFGRSAYGGLQTSSYLMSTRSFPSYYTSHVQEEQIEVEETIEAAKAEEAKDEPPSEGEAEEEEKDKEEAEEEEAAEEEEAAKEESEEAKEEEEGGEGEEGEETKEAEEEEKKVEGAGEEQAAKKKD

SEQ ID NO: 32225 - protein, 284 aa, Homo sapiens
  REGION 1..284: note = ENSP00000491612
MSSFSYEPYYSTSYKRRYVETPRVHISSVRSGYSTARSAYSSYSAPVSSSLSVRRSYSSSSGSLMPSLENLDLSQVAAISNDLKSIRTQEKAQLQDLNDRFASFIERVHELEQQNKVLEAELLVLRQKHSEPSRFRALYEQEIRDLRLAAEDATNEKQALQGEREGLEETLRNLQARYEEEVLSREDAEGRLMEARKGAKNTDAVRAAKDEVSESRRLLKAKTLEIEACRGMNEALEKQLQELEDKQNADISAMQDTINKLENELRTTKSEMARYLKEYQDLLN

SEQ ID NO: 32226 - protein, 284 aa, Homo sapiens
  REGION 1..284: note = ENSP00000483690
MSSFSYEPYYSTSYKRRYVETPRVHISSVRSGYSTARSAYSSYSAPVSSSLSVRRSYSSSSGSLMPSLENLDLSQVAAISNDLKSIRTQEKAQLQDLNDRFASFIERVHELEQQNKVLEAELLVLRQKHSEPSRFRALYEQEIRDLRLAAEDATNEKQALQGEREGLEETLRNLQARYEEEVLSREDAEGRLMEARKAAKNTDAVRAAKDEVSESRRLLKAKTLEIEACRGMNEALEKQLQELEDKQNADISAMQDTINKLENELRTTKSEMARYLKEYQDLLT

SEQ ID NO: 32227 - protein, 916 aa, Homo sapiens
  REGION 1..916: note = ENSP00000221166
MSYTLDSLGNPSAYRRVTETRSSFSRVSGSPSSGFRSQSWSRGSPSTVSSSYKRSMLAPRLAYSSAMLSSAESSLDFSQSSSLLNGGSGPGGDYKLSRSNEKEQLQGLNDRFAGYIEKVHYLEQQNKEIEAEIQALRQKQASHAQLGDAYDQEIRELRATLEMVNHEKAQVQLDSDHLEEDIHRLKERFEEEARLRDDTEAAIRALRKDIEEASLVKVELDKKVQSLQDEVAFLRSNHEEEVADLLAQIQASHITVERKDYLKTDISTALKEIRSQLESHSDQNMHQAEEWFKCRYAKLTEAAEQNKEAIRSAKEEIAEYRRQLQSKSIELESVRGTKESLERQLSDIEERHNHDLSSYQDTIQQLENELRGTKWEMARHLREYQDLLNVKMALDIEIAAYRKLLEGEETRFSTFAGSITGPLYTHRPPITISSKIQKPKVEAPKLKVQHKFVEEIIEETKVEDEKSEMEEALTAITEELAVSMKEEKKEAAEEKEEEPEAEEEEVAAKKSPVKATAPEVKEEEGEKEEEEGQEEEEEEDEGAKSDQAEEGGSEKEGSSEKEEGEQEEGETEAEAEGEEAEAKEEKKVEEKSEEVATKEELVADAKVEKPEKAKSPVPKSPVEEKGKSPVPKSPVEEKGKSPVPKSPVEEKGKSPVPKSPVEEKGKSPVSKSPVEEKAKSPVPKSPVEEAKSKAEVGKGEQKEEEEKEVKEAPKEEKVEKKEEKPKDVPEKKKAESPVKEEAVAEVVTITKSVKVHLEKETKEEGKPLQQEKEKEKAGGEGGSEEEGSDKGAKGSRKEDIAVNGEVEGKEEVEQETKEKGSGREEEKGVVTNGLDLSPADEKKGGDKSEEKVVVTKTVEKITSEGGDGATKYITKSVTVTQKVEEHEETFEEKLVSTKKVEKVTSHAIVKEVTQSD

SEQ ID NO: 32228 - protein, 698 aa, Homo sapiens
  REGION 1..698: note = ENSP00000427872
MSYTLDSLGNPSAYRRVTETRSSFSRVSGSPSSGFRSQSWSRGSPSTVSSSYKRSMLAPRLAYSSAMLSSAESSLDFSQSSSLLNGGSGPGGDYKLSRSNEKEQLQGLNDRFAGYIEKVHYLEQQNKEIEAEIQALRQKQASHAQLGDAYDQEIRELRATLEMVNHEKAQVQLDSDHLEEDIHRLKERFEEEARLRDDTEAAIRALRKDIEEASLVKVELDKKVQSLQDEVAFLRSNHEEEVADLLAQIQASHITVERKDYLKTDISTALKEIRSQLESHSDQNMHQAEEWFKCRYAKLTEAAEQNKEAIRSAKEEIAEYRRQLQSKSIELESVRGTKESLERQLSDIEERHNHDLSSYQDTIQQLENELRGTKWEMARHLREYQDLLNVKMALDIEIAAYRKLLEGEETRFSTFAGSITGPLYTHRPPITISSKIQKPKVEAPKLKVQHKFVEEIIEETKVEDEKSEMEEALTAITEELAVSMKEEKKEAAEEKEEEPEAEEEEVAAKKSPVKATAPEVKEEEGEKEEEEGQEEEEEEDEGAKSDQAEEGGSEKEGSSEKEEGEQEEGETEAEAEGEEAEAKEEKKVEGKEEVEQETKEKGSGREEEKGVVTNGLDLSPADEKKGGDKSEEKVVVTKTVEKITSEGGDGATKYITKSVTVTQKVEEHEETFEEKLVSTKKVEKVTSHAIVKEVTQSD

SEQ ID NO: 32229 - protein, 540 aa, Homo sapiens
  REGION 1..540: note = ENSP00000412295
MARHLREYQDLLNVKMALDIEIAAYRKLLEGEETRFSTFAGSITGPLYTHRPPITISSKIQKPKVEAPKLKVQHKFVEEIIEETKVEDEKSEMEEALTAITEELAVSMKEEKKEAAEEKEEEPEAEEEEVAAKKSPVKATAPEVKEEEGEKEEEEGQEEEEEEDEGAKSDQAEEGGSEKEGSSEKEEGEQEEGETEAEAEGEEAEAKEEKKVEEKSEEVATKEELVADAKVEKPEKAKSPVPKSPVEEKGKSPVPKSPVEEKGKSPVPKSPVEEKGKSPVPKSPVEEKGKSPVSKSPVEEKAKSPVPKSPVEEAKSKAEVGKGEQKEEEEKEVKEAPKEEKVEKKEEKPKDVPEKKKAESPVKEEAVAEVVTITKSVKVHLEKETKEEGKPLQQEKEKEKAGGEGGSEEEGSDKGAKGSRKEDIAVNGEVEGKEEVEQETKEKGSGREEEKGVVTNGLDLSPADEKKGGDKSEEKVVVTKTVEKITSEGGDGATKYITKSVTVTQKVEEHEETFEEKLVSTKKVEKVTSHAIVKEVTQSD

SEQ ID NO: 32230 - protein, 877 aa, Homo sapiens
  REGION 1..877: note = ENSP00000410137
MSYTLDSLGNPSAYRRVTETRSSFSRVSGSPSSGFRSQSWSRGSPSTVSSSYKRSMLAPRLAYSSAMLSSAESSLDFSQSSSLLNGGSGPGGDYKLSRSNEKEQLQGLNDRFAGYIEKVHYLEQQNKEIEAEIQALRQKQASHAQLGDAYDQEIRELRATLEMVNHEKAQVQLDSDHLEEDIHRLKERFEEEARLRDDTEAAIRALRKDIEEASLVKVELDKKVQSLQDEVAFLRSNHEEEVADLLAQIQASHITVERKDYLKTDISTALKEIRSQLESHSDQNMHQAEEWFKCRYAKLTEAAEQNKEAIRSAKEEIAEYRRQLQSKSIELESVRGTKESLERQLSDIEERHNHDLSSYQDTIQQLENELRGTKWEMARHLREYQDLLNVKMALDIEIAAYRKLLEGEETRFSTFAGSITGPLYTHRPPITISSKIQKPKVEAPKLKVQHKFVEEIIEETKVEDEKSEMEEALTAITEELAVSMKEEKKEAAEEKEEEPEAEEEEVAAKKSPVKATAPEVKEEEGEKEEEEGQEEEEEEDEGAKSDQAEEGGSEKEGSSEKEEGEQEEGETEAEAEGEEAEAKEEKKVEEKSEEVATKEELVADAKVEKPEKAKSPVPKSPVEEKGKSPVSKSPVEEKAKSPVPKSPVEEAKSKAEVGKGEQKEEEEKEVKEAPKEEKVEKKEEKPKDVPEKKKAESPVKEEAVAEVVTITKSVKVHLEKETKEEGKPLQQEKEKEKAGGEGGSEEEGSDKGAKGSRKEDIAVNGEVEGKEEVEQETKEKGSGREEEKGVVTNGLDLSPADEKKGGDKSEEKVVVTKTVEKITSEGGDGATKYITKSVTVTQKVEEHEETFEEKLVSTKKVEKVTSHAIVKEVTQSD

SEQ ID NO: 32231 - protein, 354 aa, Homo sapiens
  REGION 1..354: note = ENSP00000350364
MDMMLLVQGACCSNQWLAAVLLSLCCLLPSCLPAGQSVDFPWAAVDNMMVRKGDTAVLRCYLEDGASKGAWLNRSSIIFAGGDKWSVDPRVSISTLNKRDYSLQIQNVDVTDDGPYTCSVQTQHTPRTMQVHLTVQVPPKIYDISNDMTVNEGTNVTLTCLATGKPEPSISWRHISPSAKPFENGQYLDIYGITRDQAGEYECSAENDVSFPDVRKVKVVVNFAPTIQEIKSGTVTPGRSGLIRCEGAGVPPPAFEWYKGEKKLFNGQQGIIIQNFSTRSILTVTNVTQEHFGNYTCVAANKLGTTNASLPLNPPSTAQYGITGSADVLFSCWYLVLTLSSFTSIFYLKNAILQ

SEQ ID NO: 32232 - protein, 226 aa, Homo sapiens
  REGION 1..226: note = ENSP00000305938
MQVHLTVQVPPKIYDISNDMTVNEGTNVTLTCLATGKPEPSISWRHISPSAKPFENGQYLDIYGITRDQAGEYECSAENDVSFPDVRKVKVVVNFAPTIQEIKSGTVTPGRSGLIRCEGAGVPPPAFEWYKGEKKLFNGQQGIIIQNFSTRSILTVTNVTQEHFGNYTCVAANKLGTTNASLPLNPPSTAQYGITGSADVLFSCWYLVLTLSSFTSIFYLKNAILQ

SEQ ID NO: 32233 - protein, 445 aa, Homo sapiens
  REGION 1..445: note = ENSP00000355966
MPSRAEDYEVLYTIGTGSYGRCQKIRRKSDGKILVWKELDYGSMTEAEKQMLVSEVNLLRELKHPNIVRYYDRIIDRTNTTLYIVMEYCEGGDLASVITKGTKERQYLDEEFVLRVMTQLTLALKECHRRSDGGHTVLHRDLKPANVFLDGKQNVKLGDFGLARILNHDTSFAKTFVGTPYYMSPEQMNRMSYNEKSDIWSLGCLLYELCALMPPFTAFSQKELAGKIREGKFRRIPYRYSDELNEIITRMLNLKDYHRPSVEEILENPLIADLVADEQRRNLERRGRQLGEPEKSQDSSPVLSELKLKEIQLQERERALKAREERLEQKEQELCVRERLAEDKLARAENLLKNYSLLKERKFLSLASNPELLNLPSSVIKKKVHFSGESKENIMRSENSESQLTSKSKCKDLKKRLHAAQLRAQALSDIEKNYQLKSRQILGMR

SEQ ID NO: 32234 - protein, 384 aa, Homo sapiens
  REGION 1..384: note = ENSP00000355965
MPSRAEDYEVLYTIGTGSYGRCQKIRRKSDGKILVWKELDYGSMTEAEKQMLVSEVNLLRELKHPNIVRYYDRIIDRTNTTLYIVMEYCEGGDLASVITKGTKERQYLDEEFVLRVMTQLTLALKECHRRSDGGHTVLHRDLKPANVFLDGKQNVKLGDFGLARILNHDTSFAKTFVGTPYYMSPEQMNRMSYNEKSDIWSLGCLLYELCALMPPFTAFSQKELAGKIREGKFRRIPYRYSDELNEIITRMLNLKDYHRPSVEEILENPLIADLVADEQRRNLERRGRQLGEPEKSQDSSPVLSELKLKEIQLQERERALKAREERLEQKEQELCVRERLAEDKLARAENLLKNYSLLKERKFLSLASNPGMRINLVNRSWCYK

SEQ ID NO: 32235 - protein, 388 aa, Homo sapiens
  REGION 1..388: note = ENSP00000440237
MPSRAEDYEVLYTIGTGSYGRCQKIRRKSDGKILVWKELDYGSMTEAEKQMLVSEVNLLRELKHPNIVRYYDRIIDRTNTTLYIVMEYCEGGDLASVITKGTKERQYLDEEFVLRVMTQLTLALKECHRRSDGGHTVLHRDLKPANVFLDGKQNVKLGDFGLARILNHDTSFAKTFVGTPYYMSPEQMNRMSYNEKSDIWSLGCLLYELCALMPPFTAFSQKELAGKIREGKFRRIPYRYSDELNEIITRMLNLKDYHRPSVEEILENPLIADLVADEQRRNLERRGRQLGEPEKSQDSSPVLSELKLKEIQLQERERALKAREERLEQKEQELCVRERLAEDKLARAENLLKNYSLLKERKFLSLASNPESHFVAQAGMQWCDHSSM

SEQ ID NO: 32236 - protein, 841 aa, Homo sapiens
  REGION 1..841: note = ENSP00000233027
MPLAAYCYLRVVGKGSYGEVTLVKHRRDGKQYVIKKLNLRNASSRERRAAEQEAQLLSQLKHPNIVTYKESWEGGDGLLYIVMGFCEGGDLYRKLKEQKGQLLPENQVVEWFVQIAMALQYLHEKHILHRDLKTQNVFLTRTNIIKVGDLGIARVLENHCDMASTLIGTPYYMSPELFSNKPYNYKSDVWALGCCVYEMATLKHAFNAKDMNSLVYRIIEGKLPPMPRDYSPELAELIRTMLSKRPEERPSVRSILRQPYIKRQISFFLEATKIKTSKNNIKNGDSQSKPFATVVSGEAESNHEVIHPQPLSSEGSQTYIMGEGKCLSQEKPRASGLLKSPASLKAHTCKQDLSNTTELATISSVNIDILPAKGRDSVSDGFVQENQPRYLDASNELGGICSISQVEEEMLQDNTKSSAQPENLIPMWSSDIVTGEKNEPVKPLQPLIKEQKPKDQSLALSPKLECSGTILAHSNLRLLGSSDSPASASRVAGITGVCHHAQDQVAGECIIEKQGRIHPDLQPHNSGSEPSLSRQRRQKRREQTEHRGEKRQVRRDLFAFQESPPRFLPSHPIVGKVDVTSTQKEAENQRRVVTGSVSSSRSSEMSSSKDRPLSARERRRLKQSQEEMSSSGPSVRKASLSVAGPGKPQEEDQPLPARRLSSDCSVTQERKQIHCLSEDELSSSTSSTDKSDGDYGEGKGQTNEINALVQLMTQTLKLDSKESCEDVPVANPVSEFKLHRKYRDTLILHGKVAEEAEEIHFKELPSAIMPGSEKIRRLVEVLRTDVIRGLGVQLLEQVYDLLEEEDEFDREVRLREHMGEKYTTYSVKARQLKFFEENMNF

SEQ ID NO: 32237 - protein, 781 aa, Homo sapiens
  REGION 1..781: note = ENSP00000373227
MPLAAYCYLRVVGKGSYGEVTLVKHRRDGKQYVIKKLNLRNASSRERRAAEQEAQLLSQLKHPNIVTYKESWEGGDGLLYIVMGFCEGGDLYRKLKEQKGQLLPENQVVEWFVQIAMALQYLHEKHILHRDLKTQNVFLTRTNIIKVGDLGIARVLENHCDMASTLIGTPYYMSPELFSNKPYNYKSDVWALGCCVYEMATLKHAFNAKDMNSLVYRIIEGKLPPMPRDYSPELAELIRTMLSKRPEERPSVRSILRQPYIKRQISFFLEATKIKTSKNNIKNGDSQSKPFATVVSGEAESNHEVIHPQPLSSEGSQTYIMGEGKCLSQEKPRASGLLKSPASLKAHTCKQDLSNTTELATISSVNIDILPAKGRDSVSDGFVQENQPRYLDASNELGGICSISQVEEEMLQDNTKSSAQPENLIPMWSSDIVTGEKNEPVKPLQPLIKEQKPKDQDQVAGECIIEKQGRIHPDLQPHNSGSEPSLSRQRRQKRREQTEHRGEKRQVRRDLFAFQESPPRFLPSHPIVGKVDVTSTQKEAENQRRVVTGSVSSSRSSEMSSSKDRPLSARERRRLKQSQEEMSSSGPSVRKASLSVAGPGKPQEEDQPLPARRLSSDCSVTQERKQIHCLSEDELSSSTSSTDKSDGDYGEGKGQTNEINALVQLMTQTLKLDSKESCEDVPVANPVSEFKLHRKYRDTLILHGKVAEEAEEIHFKELPSAIMPGSEKIRRLVEVLRTDVIRGLGVQLLEQVYDLLEEEDEFDREVSVSLTVSRCLCYRIF

SEQ ID NO: 32238 - protein, 722 aa, Homo sapiens
  REGION 1..722: note = ENSP00000419666
MPLAAYCYLRVVGKGSYGEVTLVKHRRDGKQYLHEKHILHRDLKTQNVFLTRTNIIKVGDLGIARVLENHCDMASTLIGTPYYMSPELFSNKPYNYKSDVWALGCCVYEMATLKHAFNAKDMNSLVYRIIEGKLPPMPRDYSPELAELIRTMLSKRPEERPSVRSILRQPYIKRQISFFLEATKIKTSKNNIKNGDSQSKPFATVVSGEAESNHEVIHPQPLSSEGSQTYIMGEGKCLSQEKPRASGLLKSPASLKAHTCKQDLSNTTELATISSVNIDILPAKGRDSVSDGFVQENQPRYLDASNELGGICSISQVEEEMLQDNTKSSAQPENLIPMWSSDIVTGEKNEPVKPLQPLIKEQKPKDQSLALSPKLECSGTILAHSNLRLLGSSDSPASASRVAGITGVCHHAQDQVAGECIIEKQGRIHPDLQPHNSGSEPSLSRQRRQKRREQTEHRGEKRQVRRDLFAFQESPPRFLPSHPIVGKVDVTSTQKEAENQRRVVTGSVSSSRSSEMSSSKDRPLSARERRRLKQSQEEMSSSGPSVRKASLSVAGPGKPQEEDQPLPARRLSSDCSVTQERKQIHCLSEDELSSSTSSTDKSDGDYGEGKGQTNEINALVQLMTQTLKLDSKESCEDVPVANPVSEFKLHRKYRDTLILHGKVAEEAEEIHFKELPSAIMPGSEKIRRLVEVLRTDVIRGLGVQLLEQVYDLLEEEDEFDRE

SEQ ID NO: 32239 - protein, 142 aa, Homo sapiens
  REGION 1..142: note = ENSP00000420231
  VARIANT 1: note = Any amino acid
XLQDNTKSSAQPENLIPMWSSDIVTGEKNEPVKPLQPLIKEQKPKDQSLALSPKLECSGTILAHSNLRLLGSSDSPASASRVAGITGVCHHAQMESHSVAQAGVQWCDLSLLQPPPPGFKQFFYLSLLSSWDYRIKLLVNVL

SEQ ID NO: 32240 - protein, 37 aa, Homo sapiens
  REGION 1..37: note = ENSP00000417119
MPLAAYCYLRVVGKGSYGEVTLVKHRRDGKQPRAASC

SEQ ID NO: 32241 - protein, 752 aa, Homo sapiens
  REGION 1..752: note = ENSP00000437703
MPLAAYCYLRVVGKGSYGEVTLVKHRRDGKQYLHEKHILHRDLKTQNVFLTRTNIIKVGDLGIARVLENHCDMASTLIGTPYYMSPELFSNKPYNYKSDVWALGCCVYEMATLKHAFNAKDMNSLVYRIIEGKLPPMPRDYSPELAELIRTMLSKRPEERPSVRSILRQPYIKRQISFFLEATKIKTSKNNIKNGDSQSKPFATVVSGEAESNHEVIHPQPLSSEGSQTYIMGEGKCLSQEKPRASGLLKSPASLKAHTCKQDLSNTTELATISSVNIDILPAKGRDSVSDGFVQENQPRYLDASNELGGICSISQVEEEMLQDNTKSSAQPENLIPMWSSDIVTGEKNEPVKPLQPLIKEQKPKDQSLALSPKLECSGTILAHSNLRLLGSSDSPASASRVAGITGVCHHAQDQVAGECIIEKQGRIHPDLQPHNSGSEPSLSRQRRQKRREQTEHRGEKRQVRRDLFAFQESPPRFLPSHPIVGKVDVTSTQKEAENQRRVVTGSVSSSRSSEMSSSKDRPLSARERRRLKQSQEEMSSSGPSVRKASLSVAGPGKPQEEDQPLPARRLSSDCSVTQERKQIHCLSEDELSSSTSSTDKSDGDYGEGKGQTNEINALVQLMTQTLKLDSKESCEDVPVANPVSEFKLHRKYRDTLILHGKVAEEAEEIHFKELPSAIMPGSEKIRRLVEVLRTDVIRGLGVQLLEQVYDLLEEEDEFDREVRLREHMGEKYTTYSVKARQLKFFEENMNF

SEQ ID NO: 32242 - protein, 838 aa, Homo sapiens
  REGION 1..838: note = ENSP00000298925
MPMDLILVVWFCVCTARTAEDMKPPVLSLIWRTRVLKSLLQQSLQGVVGFGMDPDLQMDIVTELDLVNTTLGVAQVSGMHNASKAFLFQDIEREIHAAPHVSEKLIQLFRNKSEFTILATVQQKPSTSGVILSIRELEHSYFELESSGLRDEIRYHYIHNGKPRTEALPYRMADGQWHKVALSVSASHLLLHVDCNRIYERVIDPPDTNLPPGINLWLGQRNQKHGLFKGIIQDGKIIFMPNGYITQCPNLNHTCPTCSDFLSLVQGIMDLQELLAKMTAKLNYAETRLSQLENCHCEKTCQVSGLLYRDQDSWVDGDHCRNCTCKSGAVECRRMSCPPLNCSPDSLPVHIAGQCCKVCRPKCIYGGKVLAEGQRILTKSCRECRGGVLVKITEMCPPLNCSEKDHILPENQCCRVCRGHNFCAEGPKCGENSECKNWNTKATCECKSGYISVQGDSAYCEDIDECAAKMHYCHANTVCVNLPGLYRCDCVPGYIRVDDFSCTEHDECGSGQHNCDENAICTNTVQGHSCTCKPGYVGNGTICRAFCEEGCRYGGTCVAPNKCVCPSGFTGSHCEKDIDECSEGIIECHNHSRCVNLPGWYHCECRSGFHDDGTYSLSGESCIDIDECALRTHTCWNDSACINLAGGFDCLCPSGPSCSGDCPHEGGLKHNGQVWTLKEDRCSVCSCKDGKIFCRRTACDCQNPSADLFCCPECDTRVTSQCLDQNGHKLYRSGDNWTHSCQQCRCLEGEVDCWPLTCPNLSCEYTAILEGECCPRCVSDPCLADNITYDIRKTCLDSYGVSRLSGSVWTMAGSPCTTCKCKNGRVCCSVDFECLQNN

SEQ ID NO: 32243 - protein, 810 aa, Homo sapiens
  REGION 1..810: note = ENSP00000349654
MPMDLILVVWFCVCTARTVVGFGMDPDLQMDIVTELDLVNTTLGVAQVSGMHNASKAFLFQDIEREIHAAPHVSEKLIQLFRNKSEFTILATVQQKPSTSGVILSIRELEHSYFELESSGLRDEIRYHYIHNGKPRTEALPYRMADGQWHKVALSVSASHLLLHVDCNRIYERVIDPPDTNLPPGINLWLGQRNQKHGLFKGIIQDGKIIFMPNGYITQCPNLNHTCPTCSDFLSLVQGIMDLQELLAKMTAKLNYAETRLSQLENCHCEKTCQVSGLLYRDQDSWVDGDHCRNCTCKSGAVECRRMSCPPLNCSPDSLPVHIAGQCCKVCRPKCIYGGKVLAEGQRILTKSCRECRGGVLVKITEMCPPLNCSEKDHILPENQCCRVCRGHNFCAEGPKCGENSECKNWNTKATCECKSGYISVQGDSAYCEDIDECAAKMHYCHANTVCVNLPGLYRCDCVPGYIRVDDFSCTEHDECGSGQHNCDENAICTNTVQGHSCTCKPGYVGNGTICRAFCEEGCRYGGTCVAPNKCVCPSGFTGSHCEKDIDECSEGIIECHNHSRCVNLPGWYHCECRSGFHDDGTYSLSGESCIDIDECALRTHTCWNDSACINLAGGFDCLCPSGPSCSGDCPHEGGLKHNGQVWTLKEDRCSVCSCKDGKIFCRRTACDCQNPSADLFCCPECDTRVTSQCLDQNGHKLYRSGDNWTHSCQQCRCLEGEVDCWPLTCPNLSCEYTAILEGECCPRCVSDPCLADNITYDIRKTCLDSYGVSRLSGSVWTMAGSPCTTCKCKNGRVCCSVDFECLQNN

SEQ ID NO: 32244 - protein, 763 aa, Homo sapiens
  REGION 1..763: note = ENSP00000437170
MPMDLILVVWFCVCTARTVVGFGMDPDLQMDIVTELDLVNTTLGVAQVSGMHNASKAFLFQDIEREIHAAPHVSEKLIQLFRNKSEFTILATVQQKPSTSGVILSIRELEHSYFELESSGLRDEIRYHYIHNGKPRTEALPYRMADGQWHKVALSVSASHLLLHVDCNRIYERVIDPPDTNLPPGINLWLGQRNQKHGLFKGIIQDGKIIFMPNGYITQCPNLNHTCPTCSDFLSLVQGIMDLQELLAKMTAKLNYAETRLSQLENCHCEKTCQVSGLLYRDQDSWVDGDHCRNCTCKSGAVECRRMSCPPLNCSPDSLPVHIAGQCCKVCRPKCIYGGKVLAEGQRILTKSCRECRGGVLVKITEMCPPLNCSEKDHILPENQCCRVCRGHNFCAEGPKCGENSECKNWNTKATCECKSGYISVQGDSAYCEDIDECAAKMHYCHANTVCVNLPGLYRCDCVPGYIRVDDFSCTEHDECGSGQHNCDENAICTNTVQGHSCTCKPGYVGNGTICRAFCEEGCRYGGTCVAPNKCVCPSGFTGSHCEKDIDECALRTHTCWNDSACINLAGGFDCLCPSGPSCSGDCPHEGGLKHNGQVWTLKEDRCSVCSCKDGKIFCRRTACDCQNPSADLFCCPECDTRVTSQCLDQNGHKLYRSGDNWTHSCQQCRCLEGEVDCWPLTCPNLSCEYTAILEGECCPRCVSDPCLADNITYDIRKTCLDSYGVSRLSGSVWTMAGSPCTTCKCKNGRVCCSVDFECLQNN

SEQ ID NO: 32245 - protein, 753 aa, Homo sapiens
  REGION 1..753: note = ENSP00000317837
MPMDLILVVWFCVCTARTVVGFGMDPDLQMDIVTELDLVNTTLGVAQVSGMHNASKAFLFQDIEREIHAAPHVSEKLIQLFRNKSEFTILATVQQKPSTSGVILSIRELEHRIYERVIDPPDTNLPPGINLWLGQRNQKHGLFKGIIQDGKIIFMPNGYITQCPNLNHTCPTCSDFLSLVQGIMDLQELLAKMTAKLNYAETRLSQLENCHCEKTCQVSGLLYRDQDSWVDGDHCRNCTCKSGAVECRRMSCPPLNCSPDSLPVHIAGQCCKVCRPKCIYGGKVLAEGQRILTKSCRECRGGVLVKITEMCPPLNCSEKDHILPENQCCRVCRGHNFCAEGPKCGENSECKNWNTKATCECKSGYISVQGDSAYCEDIDECAAKMHYCHANTVCVNLPGLYRCDCVPGYIRVDDFSCTEHDECGSGQHNCDENAICTNTVQGHSCTCKPGYVGNGTICRAFCEEGCRYGGTCVAPNKCVCPSGFTGSHCEKDIDECSEGIIECHNHSRCVNLPGWYHCECRSGFHDDGTYSLSGESCIDIDECALRTHTCWNDSACINLAGGFDCLCPSGPSCSGDCPHEGGLKHNGQVWTLKEDRCSVCSCKDGKIFCRRTACDCQNPSADLFCCPECDTRVTSQCLDQNGHKLYRSGDNWTHSCQQCRCLEGEVDCWPLTCPNLSCEYTAILEGECCPRCVSDPCLADNITYDIRKTCLDSYGVSRLSGSVWTMAGSPCTTCKCKNGRVCCSVDFECLQNN

SEQ ID NO: 32246 - protein, 1461 aa, Homo sapiens
  REGION 1..1461: note = ENSP00000341198
MAAERGARRLLSTPSFWLYCLLLLGRRAPGAAAARSGSAPQSPGASIRTFTPFYFLVEPVDTLSVRGSSVILNCSAYSEPSPKIEWKKDGTFLNLVSDDRRQLLPDGSLFISNVVHSKHNKPDEGYYQCVATVESLGTIISRTAKLIVAGLPRFTSQPEPSSVYAGNNAILNCEVNADLVPFVRWEQNRQPLLLDDRVIKLPSGMLVISNATEGDGGLYRCVVESGGPPKYSDEVELKVLPDPEVISDLVFLKQPSPLVRVIGQDVVLPCVASGLPTPTIKWMKNEEALDTESSERLVLLAGGSLEISDVTEDDAGTYFCIADNGNETIEAQAELTVQAQPEFLKQPTNIYAHESMDIVFECEVTGKPTPTVKWVKNGDMVIPSDYFKIVKEHNLQVLGLVKSDEGFYQCIAENDVGNAQAGAQLIILEHAPATTGPLPSAPRDVVASLVSTRFIKLTWRTPASDPHGDNLTYSVFYTKEGIARERVENTSHPGEMQVTIQNLMPATVYIFRVMAQNKHGSGESSAPLRVETQPEVQLPGPAPNLRAYAASPTSITVTWETPVSGNGEIQNYKLYYMEKGTDKEQDVDVSSHSYTINGLKKYTEYSFRVVAYNKHGPGVSTPDVAVRTLSDVPSAAPQNLSLEVRNSKSIMIHWQPPAPATQNGQITGYKIRYRKASRKSDVTETLVSGTQLSQLIEGLDRGTEYNFRVAALTINGTGPATDWLSAETFESDLDETRVPEVPSSLHVRPLVTSIVVSWTPPENQNIVVRGYAIGYGIGSPHAQTIKVDYKQRYYTIENLDPSSHYVITLKAFNNVGEGIPLYESAVTRPHTDTSEVDLFVINAPYTPVPDPTPMMPPVGVQASILSHDTIRITWADNSLPKHQKITDSRYYTVRWKTNIPANTKYKNANATTLSYLVTGLKPNTLYEFSVMVTKGRRSSTWSMTAHGTTFELVPTSPPKDVTVVSKEGKPKTIIVNWQPPSEANGKITGYIIYYSTDVNAEIHDWVIEPVVGNRLTHQIQELTLDTPYYFKIQARNSKGMGPMSEAVQFRTPKADSSDKMPNDQASGSGGKGSRLPDLGSDYKPPMSGSNSPHGSPTSPLDSNMLLVIIVSVGVITIVVVVIIAVFCTRRTTSHQKKKRAACKSVNGSHKYKGNSKDVKPPDLWIHHERLELKPIDKSPDPNPIMTDTPIPRNSQDITPVDNSMDSNIHQRRNSYRGHESEDSMSTLAGRRGMRPKMMMPFDSQPPQPVISAHPIHSLDNPHHHFHSSSLASPARSHLYHPGSPWPIGTSMSLSDRANSTESVRNTPSTDTMPASSSQTCCTDHQDPEGATSSSYLASSQEEDSGQSLPTAHVRPSHPLKSFAVPAIPPPGPPTYDPALPSTPLLSQQALNHHIHSVKTASIGTLGRSRPPMPVVVPSAPEVQETTRMLEDSESSYEPDELTKEMAHLEGLMKDLNAITTA

SEQ ID NO: 32247 - protein, 1408 aa, Homo sapiens
  REGION 1..1408: note = ENSP00000453317
MAAERGARRLLSTPSFWLYCLLLLGRRAPGAAAARSGSAPQSPGASIRTFTPFYFLVEPVDTLSVRGSSVILNCSAYSEPSPKIEWKKDGTFLNLVSDDRRQLLPDGSLFISNVVHSKHNKPDEGYYQCVATVESLGTIISRTAKLIVAGLPRFTSQPEPSSVYAGNNAILNCEVNADLVPFVRWEQNRQPLLLDDRVIKLPSGMLVISNATEGDGGLYRCVVESGGPPKYSDEVELKVLPDPEVISDLVFLKQPSPLVRVIGQDVVLPCVASGLPTPTIKWMKNEEALDTESSERLVLLAGGSLEISDVTEDDAGTYFCIADNGNETIEAQAELTVQAQPEFLKQPTNIYAHESMDIVFECEVTGKPTPTVKWVKNGDMVIPSDYFKIVKEHNLQVLGLVKSDEGFYQCIAENDVGNAQAGAQLIILEHAPATTGPLPSAPRDVVASLVSTRFIKLTWRTPASDPHGDNLTYSVFYTKEGIARERVENTSHPGEMQVTIQNLMPATVYIFRVMAQNKHGSGESSAPLRVETQPEVQLPGPAPNLRAYAASPTSITVTWETPVSGNGEIQNYKLYYMEKGTDKEQDVDVSSHSYTINGLKKYTEYSFRVVAYNKHGPGVSTPDVAVRTLSDVPSAAPQNLSLEVRNSKSIMIHWQPPAPATQNGQITGYKIRYRKASRKSDVTETLVSGTQLSQLIEGLDRGTEYNFRVAALTINGTGPATDWLSAETFESDLDETRVPEVPSSLHVRPLVTSIVVSWTPPENQNIVVRGYAIGYGIGSPHAQTIKVDYKQRYYTIENLDPSSHYVITLKAFNNVGEGIPLYESAVTRPHTDTSEVDLFVINAPYTPVPDPTPMMPPVGVQASILSHDTIRITWADNSLPKHQKITDSRYYTVRWKTNIPANTKYKNANATTLSYLVTGLKPNTLYEFSVMVTKGRRSSTWSMTAHGTTFELVPTSPPKDVTVVSKEGKPKTIIVNWQPPSEANGKITGYIIYYSTDVNAEIHDWVIEPVVGNRLTHQIQELTLDTPYYFKIQARNSKGMGPMSEAVQFRTPKADSSDKMPNDQASGSGGKGSRLPDLGSDYKPPMSGSNSPHGSPTSPLDSNMLLVIIVSVGVITIVVVVIIAVFCTRRTTSHQKKKRAACKSVNGSHKYKGNSKDVKPPDLWIHHERLELKPIDKSPDPNPIMTDTPIPRNSQDITPVDNSMDSNIHQRRNSYRGHESEDSMSTLAGRRGMRPKMMMPFDSQPPQQSVRNTPSTDTMPASSSQTCCTDHQDPEGATSSSYLASSQEEDSGQSLPTAHVRPSHPLKSFAVPAIPPPGPPTYDPALPSTPLLSQQALNHHIHSVKTASIGTLGRSRPPMPVVVPSAPEVQETTRMLEDSESSYEPDELTKEMAHLEGLMKDLNAITTA

SEQ ID NO: 32248 - protein, 1450 aa, Homo sapiens
  REGION 1..1450: note = ENSP00000453200
MAAERGARRLLSTPSFWLYCLLLLGRRAPGAAAARSGSAPQSPGASIRTFTPFYFLVEPVDTLSVRGSSVILNCSAYSEPSPKIEWKKDGTFLNLVSDDRRQLLPDGSLFISNVVHSKHNKPDEGYYQCVATVESLGTIISRTAKLIVAGLPRFTSQPEPSSVYAGNNAILNCEVNADLVPFVRWEQNRQPLLLDDRVIKLPSGMLVISNATEGDGGLYRCVVESGGPPKYSDEVELKVLPDPEVISDLVFLKQPSPLVRVIGQDVVLPCVASGLPTPTIKWMKNEEALDTESSERLVLLAGGSLEISDVTEDDAGTYFCIADNGNETIEAQAELTVQAQPEFLKQPTNIYAHESMDIVFECEVTGKPTPTVKWVKNGDMVIPSDYFKIVKEHNLQVLGLVKSDEGFYQCIAENDVGNAQAGAQLIILEHAPATTGPLPSAPRDVVASLVSTRFIKLTWRTPASDPHGDNLTYSVFYTKEGIARERVENTSHPGEMQVTIQNLMPATVYIFRVMAQNKHGSGESSAPLRVETQPEVQLPGPAPNLRAYAASPTSITVTWETPVSGNGEIQNYKLYYMEKGTDKEQDVDVSSHSYTINGLKKYTEYSFRVVAYNKHGPGVSTPDVAVRTLSDVPSAAPQNLSLEVRNSKSIMIHWQPPAPATQNGQITGYKIRYRKASRKSDVTETLVSGTQLSQLIEGLDRGTEYNFRVAALTINGTGPATDWLSAETFESDLDETRVPEVPSSLHVRPLVTSIVVSWTPPENQNIVVRGYAIGYGIGSPHAQTIKVDYKQRYYTIENLDPSSHYVITLKAFNNVGEGIPLYESAVTRPHTDTSEVDLFVINAPYTPVPDPTPMMPPVGVQASILSHDTIRITWADNSLPKHQKITDSRYYTVRWKTNIPANTKYKNANATTLSYLVTGLKPNTLYEFSVMVTKGRRSSTWSMTAHGTTFELVPTSPPKDVTVVSKEGKPKTIIVNWQPPSEANGKITGYIIYYSTDVNAEIHDWVIEPVVGNRLTHQIQELTLDTPYYFKIQARNSKGMGPMSEAVQFRTPKASGSGGKGSRLPDLGSDYKPPMSGSNSPHGSPTSPLDSNMLLVIIVSVGVITIVVVVIIAVFCTRRTTSHQKKKRAACKSVNGSHKYKGNSKDVKPPDLWIHHERLELKPIDKSPDPNPIMTDTPIPRNSQDITPVDNSMDSNIHQRRNSYRGHESEDSMSTLAGRRGMRPKMMMPFDSQPPQPVISAHPIHSLDNPHHHFHSSSLASPARSHLYHPGSPWPIGTSMSLSDRANSTESVRNTPSTDTMPASSSQTCCTDHQDPEGATSSSYLASSQEEDSGQSLPTAHVRPSHPLKSFAVPAIPPPGPPTYDPALPSTPLLSQQALNHHIHSVKTASIGTLGRSRPPMPVVVPSAPEVQETTRMLEDSESSYEPDELTKEMAHLEGLMKDLNAITTA

SEQ ID NO: 32249 - protein, 1130 aa, Homo sapiens
  REGION 1..1130: note = ENSP00000454024
GNETIEAQAELTVQAQPEFLKQPTNIYAHESMDIVFECEVTGKPTPTVKWVKNGDMVIPSDYFKIVKEHNLQVLGLVKSDEGFYQCIAENDVGNAQAGAQLIILEHDVAIPTLPPTSLTSATTDHLAPATTGPLPSAPRDVVASLVSTRFIKLTWRTPASDPHGDNLTYSVFYTKEGIARERVENTSHPGEMQVTIQNLMPATVYIFRVMAQNKHGSGESSAPLRVETQPEVQLPGPAPNLRAYAASPTSITVTWETPVSGNGEIQNYKLYYMEKGTDKEQDVDVSSHSYTINGLKKYTEYSFRVVAYNKHGPGVSTPDVAVRTLSDVPSAAPQNLSLEVRNSKSIMIHWQPPAPATQNGQITGYKIRYRKASRKSDVTETLVSGTQLSQLIEGLDRGTEYNFRVAALTINGTGPATDWLSAETFESDLDETRVPEVPSSLHVRPLVTSIVVSWTPPENQNIVVRGYAIGYGIGSPHAQTIKVDYKQRYYTIENLDPSSHYVITLKAFNNVGEGIPLYESAVTRPHTVPDPTPMMPPVGVQASILSHDTIRITWADNSLPKHQKITDSRYYTVRWKTNIPANTKYKNANATTLSYLVTGLKPNTLYEFSVMVTKGRRSSTWSMTAHGTTFELVPTSPPKDVTVVSKEGKPKTIIVNWQPPSEANGKITGYIIYYSTDVNAEIHDWVIEPVVGNRLTHQIQELTLDTPYYFKIQARNSKGMGPMSEAVQFRTPKASGSGGKGSRLPDLGSDYKPPMSGSNSPHGSPTSPLDSNMLLVIIVSVGVITIVVVVIIAVFCTRRTTSHQKKKRAACKSVNGSHKYKGNSKDVKPPDLWIHHERLELKPIDKSPDPNPIMTDTPIPRNSQDITPVDNSMDSNIHQRRNSYRGHESEDSMSTLAGRRGMRPKMMMPFDSQPPQPVISAHPIHSLDNPHHHFHSSSLASPARSHLYHPGSPWPIGTSMSLSDRANSTESVRNTPSTDTMPASSSQTCCTDHQDPEGATSSSYLASSQEEDSGQSLPTAHVRPSHPLKSFAVPAIPPPGPPTYDPALPSTPLLSQQALNHHIHSVKTASIGTLGRSRPPMPVVVPSAPEVQETTRMLEDSESSYEPDELTKEMAHLEGLMKDLNAITTA

SEQ ID NO: 32250 - protein, 1461 aa, Homo sapiens; identical to SEQ ID NO: 32246
  REGION 1..1461: note = ENSP00000261908

SEQ ID NO: 32251 - protein, 1621 aa, Homo sapiens
  REGION 1..1621: note = ENSP00000357206
MEGCMGEESFQMWELNRRLEAYLARVKALEEQNELLSAELGGLRAQSADTSWRAHADDELAALRALVDQRWREKHAAEVARDNLAEELEGVAGRCQQLRLARERTTEEVARNRRAVEAEKCARAWLSSQVAELERELEALRVAHEEERVGLNAQAACAPRCPAPPRGPPAPAPEVEELARRLGEAWRGAVRGYQERVAHMETSLGQARERLGRAVQGAREGRLELQQLQAERGGLLERRAALEQRLEGRWQERLRATEKFQLAVEALEQEKQGLQSQIAQVLEGRQQLAHLKMSLSLEVATYRTLLEAENSRLQTPGGGSKTSLSFQDPKLELQFPRTPEGRRLGSLLPVLSPTSLPSPLPATLETPVPAFLKNQEFLQARTPTLASTPIPPTPQAPSPAVDAEIRAQDAPLSLLQTQGGRKQAPEPLRAEARVAIPASVLPGPEEPGGQRQEASTGQSPEDHASLAPPLSPDHSSLEAKDGESGGSRVFSICRGEGEGQIWGLVEKETAIEGKVVSSLQQEIWEEEDLNRKEIQDSQVPLEKETLKSLGEEIQESLKTLENQSHETLERENQECPRSLEEDLETLKSLEKENKELLKDVEVVRPLEKEAVGQLKPTGKEDTQTLQSLQKENQELMKSLEGNLETFLFPGTENQELVSSLQENLESLTALEKENQEPLRSPEVGDEEALRPLTKENQEPLRSLEDENKEAFRSLEKENQEPLKTLEEEDQSIVRPLETENHKSLRSLEEQDQETLRTLEKETQQRRRSLGEQDQMTLRPPEKVDLEPLKSLDQEIARPLENENQEFLKSLKEESVEAVKSLETEILESLKSAGQENLETLKSPETQAPLWTPEEINQGAMNPLEKEIQEPLESVEVNQETFRLLEEENQESLRSLGAWNLENLRSPEEVDKESQRNLEEEENLGKGEYQESLRSLEEEGQELPQSADVQRWEDTVEKDQELAQESPPGMAGVENEDEAELNLREQDGFTGKEEVVEQGELNATEEVWIPGEGHPESPEPKEQRGLVEGASVKGGAEGLQDPEGQSQQVGAPGLQAPQGLPEAIEPLVEDDVAPGGDQASPEVMLGSEPAMGESAAGAEPGPGQGVGGLGDPGHLTREEVMEPPLEEESLEAKRVQGLEGPRKDLEEAGGLGTEFSELPGKSRDPWEPPREGREESEAEAPRGAEEAFPAETLGHTGSDAPSPWPLGSEEAEEDVPPVLVSPSPTYTPILEDAPGPQPQAEGSQEASWGVQGRAEALGKVESEQEELGSGEIPEGPQEEGEESREESEEDELGETLPDSTPLGFYLRSPTSPRWDPTGEQRPPPQGETGKEGWDPAVLASEGLEAPPSEKEEGEEGEEECGRDSDLSEEFEDLGTEAPFLPGVPGEVAEPLGQVPQLLLDPAAWDRDGESDGFADEEESGEEGEEDQEEGREPGAGRWGPGSSVGSLQALSSSQRGEFLESDSVSVSVPWDDSLRGAVAGAPKTALETESQDSAEPSGSEEESDPVSLEREDKVPGPLEIPSGMEDAGPGADIIGVNGQGPNLEGKSQHVNGGVMNGLEQSEEVGQGMPLVSEGDRGSPFQEEEGSALKTSWAGAPVHLGQGQFLKFTQREGDRESWSSGED

SEQ ID NO: 32252 - protein, 533 aa, Homo sapiens
  REGION 1..533: note = ENSP00000464312
MIHGRSVLHIVASLIILHLSGATKKGTEKQTTSETQKSVQCGTWTKHAEGGIFTSPNYPSKYPPDRECIYIIEAAPRQCIELYFDEKYSIEPSWECKFDHIEVRDGPFGFSPIIGRFCGQQNPPVIKSSGRFLWIKFFADGELESMGFSARYNFTPDPDFKDLGALKPLPACEFEMGGSEGIVESIQIMKEGKATASEAVDCKWYIRAPPRSKIYLRFLDYEMQNSNECKRNFVAVYDGSSSVEDLKAKFCSTVANDVMLRTGLGVIRMWADEGSRNSRFQMLFTSFQEPPCEGNTFFCHSNMCINNTLVCNGLQNCVYPWDENHCKEKRKTSLLDQLTNTSGTVIGVTSCIVIILIIISVIVQIKQPRKKYVQRKSDFDQTVFQEVFEPPHYELCTLRGTGATADFADVADDFENYHKLRRSSSKCIHDHHCGSQLSSTKGSRSNLSTRDASILTEMPTQPGKPLIPPMNRRNILVMKHSYSQDAADACDIDEIEEVPTTSHRLSRHDKAVQRFCLIGSLSKHESEYNTTRV

SEQ ID NO: 32253 - skipped

SEQ ID NO: 32254 - protein, 533 aa, Homo sapiens; identical to SEQ ID NO: 32252
  REGION 1..533: note = ENSP00000313088

SEQ ID NO: 32255 - protein, 156 aa, Homo sapiens
  REGION 1..156: note = ENSP00000381024
MLAEPFPKVVASLIILHLSGATKKGTEKQTTSETQKSVQCGTWTKHAEGGIFTSPNYPSKYPPDRECIYIIEAAPRQCIELYFDEKYSIEPSWECKFDHIEVRDGPFGFSPIIGRFCGQQNPPVIKSSGRFLWIKFFADGELESMGFSARYNFTPE

SEQ ID NO: 32256 - protein, 101 aa, Homo sapiens
  REGION 1..101: note = ENSP00000464188
MSLYGFVASLIILHLSGATKKGTEKQTTSETQKSVQCGTWTKHAEGGIFTSPNYPSKYPPDRECIYIIEAAPRQCIELYFDEKYSIEPSWECKFDHIEVRD

SEQ ID NO: 32257 - protein, 484 aa, Homo sapiens
  REGION 1..484: note = ENSP00000385402
MGVPRTPSRTVLFERERTGLTYRVPSLLPVPPGPTLLAFVEQRLSPDDSHAHRLVLRRGTLAGGSVRWGALHVLGTAALAEHRSMNPCPVHDAGTGTVFLFFIAVLGHTPEAVQIATGRNAARLCCVASRDAGLSWGSARDLTEEAIGGAVQDWATFAVGPGHGVQLPSGRLLVPAYTYRVDRRECFGKICRTSPHSFAFYSDDHGRTWRCGGLVPNLRSGECQLAAVDGGQAGSFLYCNARSPLGSRVQALSTDEGTSFLPAERVASLPETAWGCQGSIVGFPAPAPNRPRDDSWSVGPGSPLQPPLLGPGVHEPPEEAAVDPRGGQVPGGPFSRLQPRGDGPRQPGPRPGVSGDVGSWTLALPMPFAAPPQSPTWLLYSHPVGRRARLHMGIRLSQSPLDPRSWTEPWVIYEGPSGYSDLASIGPAPEGGLVFACLYESGARTSYDEISFCTFSLREVLENVPASPKPPNLGDKPRGCCWPS

SEQ ID NO: 32258 - protein, 214 aa, Homo sapiens
  REGION 1..214: note = ENSP00000397167
MGVPRTPSRTVLFERERTGLTYRVPSLLPVPPGPTLLAFVEQRLSPDDSHAHRLVLRRGTLAGGSVRTGPHSLWVPATVCSCPQAACWYPPTPTAWTAESVLARSAGPALTPSPSTAMTTAAPGAVEASCPTCAQASASWQRWTVGRPAASSTAMPGAHWAAVCRRSALTRAPPSCPQSAWLPCPRLPGAARAASWASQPPPPTGHGMTVGQWA

SEQ ID NO: 32259 - protein, 484 aa, Homo sapiens; identical to SEQ ID NO: 32257
  REGION 1..484: note = ENSP00000384804

SEQ ID NO: 32260 - protein, 158 aa, Homo sapiens
  REGION 1..158: note = ENSP00000394769
MGVPRTPSRTVLFERERTGLTYRVPSLLPVPPGPTLLAFVEQRLSPDDSHAHRLVLRRGTLAGGSVRWGALHVLGTAALAEHRSMNPCPVHDAGTGTVFLFFIAVLGHTPEAVQIATGRNAARLCCVASRDAGLSWGSARDLTEEAIGGAVQEEKAGR

SEQ ID NO: 32261 - protein, 188 aa, Homo sapiens
  REGION 1..188: note = ENSP00000397860
MGVPRTPSRTVLFERERTGLTYRVPSLLPVPPGPTLLAFVEQRLSPDDSHAHRLVLRRGTLAGGSVRWGALHVLGTAALAEHRSMNPCPVHDAGTGTVFLFFIAVLGHTPEAVQIATGRNAARLCCVASRDAGLSWGSARDLTEEAIGGAVQDWATFAVGPGHGVQLPSGRLLVPAYTYRVDRRECFG

SEQ ID NO: 32262 - protein, 496 aa, Homo sapiens
  REGION 1..496: note = ENSP00000385149
MMSSAAFPRWLSMGVPRTPSRTVLFERERTGLTYRVPSLLPVPPGPTLLAFVEQRLSPDDSHAHRLVLRRGTLAGGSVRWGALHVLGTAALAEHRSMNPCPVHDAGTGTVFLFFIAVLGHTPEAVQIATGRNAARLCCVASRDAGLSWGSARDLTEEAIGGAVQDWATFAVGPGHGVQLPSGRLLVPAYTYRVDRRECFGKICRTSPHSFAFYSDDHGRTWRCGGLVPNLRSGECQLAAVDGGQAGSFLYCNARSPLGSRVQALSTDEGTSFLPAERVASLPETAWGCQGSIVGFPAPAPNRPRDDSWSVGPGSPLQPPLLGPGVHEPPEEAAVDPRGGQVPGGPFSRLQPRGDGPRQPGPRPGVSGDVGSWTLALPMPFAAPPQSPTWLLYSHPVGRRARLHMGIRLSQSPLDPRSWTEPWVIYEGPSGYSDLASIGPAPEGGLVFACLYESGARTSYDEISFCTFSLREVLENVPASPKPPNLGDKPRGCCWPS

SEQ ID NO: 32263 - protein, 484 aa, Homo sapiens; identical to SEQ ID NO: 32257
  REGION 1..484: note = ENSP00000375830

SEQ ID NO: 32264 - protein, 497 aa, Homo sapiens
  REGION 1..497: note = ENSP00000320318
MMSSAAFPRWLQSMGVPRTPSRTVLFERERTGLTYRVPSLLPVPPGPTLLAFVEQRLSPDDSHAHRLVLRRGTLAGGSVRWGALHVLGTAALAEHRSMNPCPVHDAGTGTVFLFFIAVLGHTPEAVQIATGRNAARLCCVASRDAGLSWGSARDLTEEAIGGAVQDWATFAVGPGHGVQLPSGRLLVPAYTYRVDRRECFGKICRTSPHSFAFYSDDHGRTWRCGGLVPNLRSGECQLAAVDGGQAGSFLYCNARSPLGSRVQALSTDEGTSFLPAERVASLPETAWGCQGSIVGFPAPAPNRPRDDSWSVGPGSPLQPPLLGPGVHEPPEEAAVDPRGGQVPGGPFSRLQPRGDGPRQPGPRPGVSGDVGSWTLALPMPFAAPPQSPTWLLYSHPVGRRARLHMGIRLSQSPLDPRSWTEPWVIYEGPSGYSDLASIGPAPEGGLVFACLYESGARTSYDEISFCTFSLREVLENVPASPKPPNLGDKPRGCCWPS

SEQ ID NO: 32265 - protein, 52 aa, Homo sapiens
  REGION 1..52: note = ENSP00000412688
MPPHPGPALVGVAWEQTPRMAAGPHSALELLIPVGASQSMGVPRTPSRTVLF

SEQ ID NO: 32266 - protein, 77 aa, Homo sapiens
  REGION 1..77: note = ENSP00000398571
MGVPRTPSRTVLFERERTGLTYRVPSLLPVPPGPTLLAFVEQRLSPDDSHAHRLVLRRGTLAGGSVRWGALHVLGTA

SEQ ID NO: 32267 - protein, 214 aa, Homo sapiens
  REGION 1..214: note = ENSP00000406678
MMSSAAFPRWLSMGVPRTPSRTVLFERERTGLTYRVPSLLPVPPGPTLLAFVEQRLSPDDSHAHRLVLRRGTLAGGSVRTGPHSLWVPATVCSCPQAACWYPPTPTAWTAESVLARSAGPALTPSPSTAMTTAAPGAVEASCPTCAQASASWQRWTVGRPAASSTAMPGAHWAAVCRRSALTRAPPSCPQSAWLPCPRLPGAARAASWASQPPP

SEQ ID NO: 32268 - protein, 260 aa, Homo sapiens
  REGION 1..260: note = ENSP00000388707
MGVPRTPSRTVLFERERTGLTYRVPSLLPVPPGPTLLAFVEQRLSPDDSHAHRLVLRRGTLAGGSVRWGALHVLGTAALAEHRSMNPCPVHDAGTGTVFLFFIAVLGHTPEAVQIATGRNAARLCCVASRDAGLSWGSARDLTEEAIGGAVQDWATFAVGPGHGVQLPSGRLLVPAYTYRVDRRECFGKICRTSPHSFAFYSDDHGRTWRCGGLVPNLRSGECQLAAVDGGQAGSFLYCNARSPLGSRVQALSTDEGTSF

SEQ ID NO: 32269 - protein, 144 aa, Homo sapiens
  REGION 1..144: note = ENSP00000396197
MTSCWANSGMTLCPGHMAGRVPGALWPASPAPWHQPAWPRSMGVPRTPSRTVLFERERTGLTYRVPSLLPVPPGPTLLAFVEQRLSPDDSHAHRLVLRRGTLAGGSVRWGALHVLGTAALAEHRSMNPCPVHDAGTGTVFLFFI

SEQ ID NO: 32270 - protein, 484 aa, Homo sapiens; identical to SEQ ID NO: 32257
  REGION 1..484: note = ENSP00000486602

SEQ ID NO: 32271 - protein, 214 aa, Homo sapiens; identical to SEQ ID NO: 32258
  REGION 1..214: note = ENSP00000486591

SEQ ID NO: 32272 - protein, 484 aa, Homo sapiens; identical to SEQ ID NO: 32257
  REGION 1..484: note = ENSP00000478409

SEQ ID NO: 32273 - protein, 158 aa, Homo sapiens; identical to SEQ ID NO: 32260
  REGION 1..158: note = ENSP00000487192

SEQ ID NO: 32274 - protein, 188 aa, Homo sapiens; identical to SEQ ID NO: 32261
  REGION 1..188: note = ENSP00000485788

SEQ ID NO: 32275 - protein, 496 aa, Homo sapiens; identical to SEQ ID NO: 32262
  REGION 1..496: note = ENSP00000482722

SEQ ID NO: 32276 - protein, 484 aa, Homo sapiens; identical to SEQ ID NO: 32257
  REGION 1..484: note = ENSP00000483726

SEQ ID NO: 32277 - protein, 497 aa, Homo sapiens; identical to SEQ ID NO: 32264
  REGION 1..497: note = ENSP00000485701

SEQ ID NO: 32278 - protein, 52 aa, Homo sapiens; identical to SEQ ID NO: 32265
  REGION 1..52: note = ENSP00000486118

SEQ ID NO: 32279 - protein, 77 aa, Homo sapiens; identical to SEQ ID NO: 32266
  REGION 1..77: note = ENSP00000487199

SEQ ID NO: 32280 - protein, 214 aa, Homo sapiens; identical to SEQ ID NO: 32267
  REGION 1..214: note = ENSP00000485934

SEQ ID NO: 32281 - protein, 260 aa, Homo sapiens; identical to SEQ ID NO: 32268
  REGION 1..260: note = ENSP00000487103

SEQ ID NO: 32282 - protein, 144 aa, Homo sapiens; identical to SEQ ID NO: 32269
  REGION 1..144: note = ENSP00000485992

SEQ ID NO: 32283 - protein, 358 aa, Homo sapiens
  REGION 1..358: note = ENSP00000464186
MAQPYPPAQYPPPPQNGIPAEYAPPPPHPTQDYSGQTPVPTEHGMTLYTPAQTHPEQPGSEASTQPIAGTQTVPTDEAAQTDSQPLHPSDPTEKQQPKRLHVSNIPFRFRDPDLRQMFGQFGKILDVEIIFNERGSKGFGFVTFETSSDADRAREKLNGTIVEGRKIEVNNATARVMTNKKTGNPYTNGWKLNPVVGAVYGPEFYAVTGFPYPTTGTAVAYRGAHLRGRGRAVYNTFRAAPPPPPIPTYGAALEQTLVKMPVPWAGLAPCPLPPQQTPEPAYPTSPAFPPLSCPFASRVVYQDGFYGAEIYGGYAAYRYAQPAAAAAAYSDSYGRVYAAADPYHHTIGPAATYSIGTM

SEQ ID NO: 32284 - protein, 328 aa, Homo sapiens
  REGION 1..328: note = ENSP00000463964
MAQPYPPAQYPPPPQNGIPAEYAPPPPHPTQDYSGQTPVPTEHGMTLYTPAQTHPEQPGSEASTQPIAGTQTVPQTDEAAQTDSQPLHPSDPTEKQQPKRLHVSNIPFRFRDPDLRQMFGQFGKILDVEIIFNERGSKVNNATARVMTNKKTGNPYTNGWKLNPVVGAVYGPEFYAVTGFPYPTTGTAVAYRGAHLRGRGRAVYNTFRAAPPPPPIPTYGAALEQTLVKMPVPWAGLAPCPLPPQQTPEPAYPTSPAFPPLSCPFASRVVYQDGFYGAEIYGGYAAYRYAQPAAAAAAYSDSYGRVYAAADPYHHTIGPAATYSIGTM

SEQ ID NO: 32285 - protein, 312 aa, Homo sapiens
  REGION 1..312: note = ENSP00000463653
MAQPYPPAQYPPPPQNGIPAEYAPPPPHPTQDYSGQTPVPTEHGMTLYTPAQTHPEQPGSEASTQPIAGTQTVPQTDEAAQTDSQPLHPSDPTEKQQPKRLHVSNIPFRFRDPDLRQMFGQFGKILDVEIIFNERGSKGFGFVTFETSSDADRAREKLNGTIVEGRKIEVNNATARVMTNKKTGNPYTNGWKLNPVVGAVYGPEFYAVTGFPYPTTGTAVAYRGAHLRGRGRAVYNTFRAAPPPPPIPTYGAVVYQDGFYGAEIYGGYAAYRYAQPAAAAAAYSDSYGRVYAAADPYHHTIGPAATYSIGTM

SEQ ID NO: 32286 - protein, 75 aa, Homo sapiens
  REGION 1..75: note = ENSP00000465367
  VARIANT 1: note = Any amino acid
XVVYQDGFYGAEIYGGYAAYRYAQPAAAAAAYSDSYGRVYAAADPYHHTIGPAATYSIGTMASLCRGGYSRFTPY

SEQ ID NO: 32287 - protein, 131 aa, Homo sapiens
  REGION 1..131: note = ENSP00000468693
  VARIANT 1: note = Any amino acid
XVGAVYGPEFYAVTGFPYPTTGTAVAYRGAHLRGRGRAVYNTFRAAPPPPPIPTYGAVVYQDGFYGAEIYGGYAAYRYAQPAAAAAAYSDSYGRVYAAADPYHHTIGPAATYSIGTMASLCRGGYSRFTPY

SEQ ID NO: 32288 - protein, 325 aa, Homo sapiens
  REGION 1..325: note = ENSP00000462007
MAQPYPPAQYPPPPQNGIPAEYAPPPPHPTQDYSGQTPVPTEHGMTLYTPAQTHPEQPGSEASTQPIAGTQTVPQTDEAAQTDSQPLHPSDPTEKQQPKRLHVSNIPFRFRDPDLRQMFGQFGKILDVEIIFNERGSKGFGFVTFETSSDADRAREKLNGTIVEGRKIEVNNATARVMTNKKTGNPYTNGWKLNPVVGAVYGPEFYAVTGFPYPTTGTAVAYRGAHLRGRGRAVYNTFRAAPPPPPIPTYGAVVYQDGFYGAEIYGGYAAYRYAQPAAAAAAYSDSYGRVYAAADPYHHTIGPAATYSIGTMVRSPGPPSPGCQS

SEQ ID NO: 32289 - protein, 52 aa, Homo sapiens
  REGION 1..52: note = ENSP00000467872
MLCSMANSGCLLLSNSGSMLPHSVPCPPAFLYLQQSDQDATAPPEAMAQPYP

SEQ ID NO: 32290 - protein, 4 aa, Homo sapiens
  REGION 1..4: note = ENSP00000464946
MAQP

SEQ ID NO: 32291 - protein, 358 aa, Homo sapiens; identical to SEQ ID NO: 32283
  REGION 1..358: note = ENSP00000464186

SEQ ID NO: 32292 - protein, 328 aa, Homo sapiens; identical to SEQ ID NO: 32284
  REGION 1..328: note = ENSP00000463964

SEQ ID NO: 32293 - protein, 312 aa, Homo sapiens; identical to SEQ ID NO: 32285
  REGION 1..312: note = ENSP00000463653

SEQ ID NO: 32294 - protein, 75 aa, Homo sapiens; identical to SEQ ID NO: 32286
  REGION 1..75: note = ENSP00000465367
  VARIANT 1: note = Any amino acid

SEQ ID NO: 32295 - protein, 131 aa, Homo sapiens; identical to SEQ ID NO: 32287
  REGION 1..131: note = ENSP00000468693
  VARIANT 1: note = Any amino acid

SEQ ID NO: 32296 - protein, 325 aa, Homo sapiens; identical to SEQ ID NO: 32288
  REGION 1..325: note = ENSP00000462007

SEQ ID NO: 32297 - protein, 52 aa, Homo sapiens; identical to SEQ ID NO: 32289
  REGION 1..52: note = ENSP00000467872

SEQ ID NO: 32298 - protein, 4 aa, Homo sapiens
  REGION 1..4: note = ENSP00000464946
MAQP

SEQ ID NO: 32299 - protein, 574 aa, Homo sapiens
  REGION 1..574: note = ENSP00000358795
MGNNFSSIPSLPRGNPSRAPRGHPQNLKDSIGGPFPVTSHRCHHKQKHCPAVLPSGGLPATPLLFHPHTKGSQILMDLSHKAVKRQASFCNAITFSNRPVLIYEQVRLKITKKQCCWSGALRLGFTSKDPSRIHPDSLPKYACPDLVSQSGFWAKALPEEFANEGNIIAFWVDKKGRVFHRINDSAVMLFFSGVRTADPLWALVDVYGLTRGVQLLDSELVLPDCLRPRSFTALRRPSLRREADDARLSVSLCDLNVPGADGDEAAPAAGCPIPQNSLNSQHSRALPAQLDGDLRFHALRAGAHVRILDEQTVARVEHGRDERALVFTSRPVRVAETIFVKVTRSGGARPGALSFGVTTCDPGTLRPADLPFSPEALVDRKEFWAVCRVPGPLHSGDILGLVVNADGELHLSHNGAAAGMQLCVDASQPLWMLFGLHGTITQIRILGSTILAERGIPSLPCSPASTPTSPSALGSRLSDPLLSTCSSGPLGSSAGGTAPNSPVSLPESPVTPGLGQWSDECTICYEHAVDTVIYTCGHMCLCYACGLRLKKALHACCPICRRPIKDIIKTYRSS

SEQ ID NO: 32300 - protein, 199 aa, Homo sapiens
  REGION 1..199: note = ENSP00000416709
MGGQITRSTLHDSIGGPFPVTSHRCHHKQKHCPAVLPSGGLPATPLLFHPHTKGSQILMDLSHKAVKRQASFCNAITFSNRPVLIYEQVRLKITKKQCCWSGALRLGFTSKDPSRIHPDSLPKYACPDLVSQSGFWAKALPEEFANEGNIIAFWVDKKGRVFHRINDSAVMLFFSGVRTADPLWALVDVYGLTRGVQLL

SEQ ID NO: 32301 - protein, 108 aa, Homo sapiens
  REGION 1..108: note = ENSP00000387714
MDLSHKAVKRQASFCNAITFSNRPVLIYEQVRLKITKKQCCWSGALRLGFTSKDPSRIHPDSLPKYACPDLVSQSGFWAKALPEEFANEGNIIAFWVDKKGRVFHRIN

SEQ ID NO: 32302 - protein, 356 aa, Homo sapiens
  REGION 1..356: note = ENSP00000295108
MTKSYSESGLMGEPQPQGPPSWTDECLSSQDEEHEADKKEDDLETMNAEEDSLRNGGEEEDEDEDLEEEEEEEEEDDDQKPKRRGPKKKKMTKARLERFKLRRMKANARERNRMHGLNAALDNLRKVVPCYSKTQKLSKIETLRLAKNYIWALSEILRSGKSPDLVSFVQTLCKGLSQPTTNLVAGCLQLNPRTFLPEQNQDMPPHLPTASASFPVHPYSYQSPGLPSPPYGTMDSSHVFHVKPPPHAYSAALEPFFESPLTDCTSPSFDGPLSPPLSINGNFSFKHEPSAEFEKNYAFTMHYPAATLAGAQSHGSIFSGTAAPRCEIPIDNIMSFDSHSHHERVMSAQLNAIFHD

SEQ ID NO: 32303 - protein, 337 aa, Homo sapiens
  REGION 1..337: note = ENSP00000297142
MLTLPFDESVVMPESQMCRKFSRECEDQKQIKKPESFSKQIVLRGKSIKRAPGEETEKEEEEEDREEEDENGLPRRRGLRKKKTTKLRLERVKFRRQEANARERNRMHGLNDALDNLRKVVPCYSKTQKLSKIETLRLAKNYIWALSEILRIGKRPDLLTFVQNLCKGLSQPTTNLVAGCLQLNARSFLMGQGGEAAHHTRSPYSTFYPPYHSPELTTPPGHGTLDNSKSMKPYNYCSAYESFYESTSPECASPQFEGPLSPPPINYNGIFSLKQEETLDYGKNYNYGMHYCAVPPRGPLGQGAMFRLPTDSHFPYDLHLRSQSLTMQDELNAVFHN

SEQ ID NO: 32304 - protein, 321 aa, Homo sapiens
  REGION 1..321: note = ENSP00000383814
MNDISQKAEIKEMLASDDEEDVSSKVEKAYVPKLTGTVKGRFAEMEKQRQEEQRKRTEEERKRRIEQDMLEKRKIQRELAKRAEQIEDINNTGTESASEEGDDSLLITVVPVKSYKTSGKMKKNFEDLEKEREEKERIKYEEDKRIRYEEQRPSLKEAKCLSLVMDDEIESEAKKESLSPGKLKLTFEELERQRQENRKKQAEEEARKRLEEEKRAFEEARRQMVNEDEENQDTAKIFKGYRPGKLKLSFEEMERQRREDEKRKAEEEARRRIEEEKKAFAEARRNMVVDDDSPEMYKTISQEFLTPGKLEINFEELLKQK

SEQ ID NO: 32305 - protein, 675 aa, Homo sapiens
  REGION 1..675: note = ENSP00000333938
MNDISQKAEILLSSSKPVPKTYVPKLGKGDVKDKFEAMQRAREERNQRRSRDEKQRRKEQYIREREWNRRKQEIKEMLASDDEEDVSSKVEKAYVPKLTGTVKGRFAEMEKQRQEEQRKRTEEERKRRIEQDMLEKRKIQRELAKRAEQIEDINNTGTESASEEGDDSLLITVVPVKSYKTSGKMKKNFEDLEKEREEKERIKYEEDKRIRYEEQRPSLKEAKCLSLVMDDEIESEAKKESLSPGKLKLTFEELERQRQENRKKQAEEEARKRLEEEKRAFEEARRQMVNEDEENQDTAKIFKGYRPGKLKLSFEEMERQRREDEKRKAEEEARRRIEEEKKAFAEARRNMVVDDDSPEMYKTISQEFLTPGKLEINFEELLKQKMEEEKRRTEEERKHKLEMEKQEFEQLRQEMGEEEEENETFGLSREYEELIKLKRSGSIQAKNLKSKFEKIGQLSEKEIQKKIEEERARRRAIDLEIKEREAENFHEEDDVDVRPARKSEAPFTHKVNMKARFEQMAKAREEEEQRRIEEQKLLRMQFEQREIDAALQKKREEEEEEEGSIMNGSTAEDEEQTRSGAPWFKKPLKNTSVVDSEPVRFTVKVTGEPKPEITWWFEGEILQDGEDYQYIERGETYCLYLPETFPEDGGEYMCKAVNNKGSAASTCILTIESKN

SEQ ID NO: 32306 - protein, 435 aa, Homo sapiens
  REGION 1..435: note = ENSP00000411902
MNDISQKAEILLSSSKPVPKTYVPKLGKGDVKDKFEAMQRAREERNQRRSRDEKQRRKEQYIREREWNRRKQEIKEMLASDDEEDVSSKVEKAYVPKLTGTVKGRFAEMEKQRQEEQRKRTEEERKRRIEQDMLEKRKIQRELAKRAEQEGDDSLLITVVPVKSYKTSGKMKKNFEDLEKEREEKERIKYEEDKRIRYEEQRPSLKEAKCLSLVMDDEIESEAKKESLSPGKLKLTFEELERQRQENRKKQAEEEARKRLEEEKRAFEEARRQMVNEDEENQDTAKIFKGYRPGKLKLSFEEMERQRREDEKRKAEEEARRRIEEEKKAFAEARRNMVVDDDSPEMYKTISQEFLTPGKLEINFEELLKQKMEEEKRRTEEERKHKLEMEKQEFEQLRQEMGEEEEENETFGLSREYEELIKLKRSGSIQAKNLK

SEQ ID NO: 32307 - protein, 576 aa, Homo sapiens
  REGION 1..576: note = ENSP00000343928
  VARIANT 1: note = Any amino acid
XVKGRFAEMEKQRQEEQRKRTEEERKRRIEQDMLEKRKIQRELAKRAEQIEDINNTGTESASEEGDDSLLITVVPVKSYKTSGKMKKNFEDLEKEREEKERIKYEEDKRIRYEEQRPSLKEAKCLSLVMDDEIESEAKKESLSPGKLKLTFEELERQRQENRKKQAEEEARKRLEEEKRAFEEARRQMVNEDEENQDTAKIFKGYRPGKLKLSFEEMERQRREDEKRKAEEEARRRIEEEKKAFAEARRNMVVDDDSPEMYKTISQEFLTPGKLEINFEELLKQKMEEEKRRTEEERKHKLEMEKQEFEQLRQEMGEEEEENETFGLSREYEELIKLKRSGSIQAKNLKSKFEKIGQLSEKEIQKKIEEERARRRAIDLEIKEREAENFHEEDDVDVRPARKSEAPFTHKVNMKARFEQMAKAREEEEQRRIEEQKLLRMQFEQREIDAALQKKREEEEEEEGSIMNGSTAEDEEQTRSGAPWFKKPLKNTSVVDSEPVRFTVKVTGEPKPEITWWFEGEILQDGEDYQYIERGETYCLYLPETFPEDGGEYMCKAVNNKGSAASTCILTIETDDY

SEQ ID NO: 32308 - protein, 611 aa, Homo sapiens
  REGION 1..611: note = ENSP00000327363
MNDISQKAEIKEMLASDDEEDVSSKVEKAYVPKLTGTVKGRFAEMEKQRQEEQRKRTEEERKRRIEQDMLEKRKIQRELAKRAEQIEDINNTGTESASEEGDDSLLITVVPVKSYKTSGKMKKNFEDLEKEREEKERIKYEEDKRIRYEEQRPSLKEAKCLSLVMDDEIESEAKKESLSPGKLKLTFEELERQRQENRKKQAEEEARKRLEEEKRAFEEARRQMVNEDEENQDTAKIFKGYRPGKLKLSFEEMERQRREDEKRKAEEEARRRIEEEKKAFAEARRNMVVDDDSPEMYKTISQEFLTPGKLEINFEELLKQKMEEEKRRTEEERKHKLEMEKQEFEQLRQEMGEEEEENETFGLSREYEELIKLKRSGSIQAKNLKSKFEKIGQLSEKEIQKKIEEERARRRAIDLEIKEREAENFHEEDDVDVRPARKSEAPFTHKVNMKARFEQMAKAREEEEQRRIEEQKLLRMQFEQREIDAALQKKREEEEEEEGSIMNGSTAEDEEQTRSGAPWFKKPLKNTSVVDSEPVRFTVKVTGEPKPEITWWFEGEILQDGEDYQYIERGETYCLYLPETFPEDGGEYMCKAVNNKGSAASTCILTIESKN

SEQ ID NO: 32309 - protein, 270 aa, Homo sapiens
  REGION 1..270: note = ENSP00000333680
MENQPVRWRALPGLPRPPGLPAAPWLLLGVLLLPGTLRLAGGQSVTHTGLPIMASLANTAISFSCRITYPYTPQFKVFTVSYFHEDLQGQRSPKKPTNCHPGLGTENQSHTLDCQVTLVLPGASATGTYYCSVHWPHSTVRGSGTFILVRDAGYREPPQSPQKLLLFGFTGLLSVLSVVGTALLLWNKKRMRGPGKDPTRKCPDPRSASSPKQHPSESVYTALQRRETEVYACIENEDGSSPTAKQSPLSQERPHRFEDDGELNLVYENL

SEQ ID NO: 32310 - protein, 164 aa, Homo sapiens
  REGION 1..164: note = ENSP00000347650
MENQPVRWRALPGLPRPPGLPAAPWLLLGVLLLPGTLRLAGGQSVTHTGLPIMASLANTAISFSCRITYPYTPQFKVFTVSYFHEDLQGQRSPKKPTNCHPGLGTENQSHTLDCQVTLVLPGASATGTYYCSVHWPHSTVRGSGTFILVRETRFRHVGQAGLES

SEQ ID NO: 32311 - protein, 921 aa, Homo sapiens
  REGION 1..921: note = ENSP00000360619
MNAPERQPQPDGGDAPGHEPGGSPQDELDFSILFDYEYLNPNEEEPNAHKVASPPSGPAYPDDVLDYGLKPYSPLASLSGEPPGRFGEPDRVGPQKFLSAAKPAGASGLSPRIEITPSHELIQAVGPLRMRDAGLLVEQPPLAGVAASPRFTLPVPGFEGYREPLCLSPASSGSSASFISDTFSPYTSPCVSPNNGGPDDLCPQFQNIPAHYSPRTSPIMSPRTSLAEDSCLGRHSPVPRPASRSSSPGAKRRHSCAEALVALPPGASPQRSRSPSPQPSSHVAPQDHGSPAGYPPVAGSAVIMDALNSLATDSPCGIPPKMWKTSPDPSPVSAAPSKAGLPRHIYPAVEFLGPCEQGERRNSAPESILLVPPTWPKPLVPAIPICSIPVTASLPPLEWPLSSQSGSYELRIEVQPKPHHRAHYETEGSRGAVKAPTGGHPVVQLHGYMENKPLGLQIFIGTADERILKPHAFYQVHRITGKTVTTTSYEKIVGNTKVLEIPLEPKNNMRATIDCAGILKLRNADIELRKGETDIGRKNTRVRLVFRVHIPESSGRIVSLQTASNPIECSQRSAHELPMVERQDTDSCLVYGGQQMILTGQNFTSESKVVFTEKTTDGQQIWEMEATVDKDKSQPNMLFVEIPEYRNKHIRTPVKVNFYVINGKRKRSQPQHFTYHPVPAIKTEPTDEYDPTLICSPTHGGLGSQPYYPQHPMVAESPSCLVATMAPCQQFRTGLSSPDARYQQQNPAAVLYQRSKSLSPSLLGYQQPALMAAPLSLADAHRSVLVHAGSQGQSSALLHPSPTNQQASPVIHYSPTNQQLRCGSHQEFQHIMYCENFAPGTTRPGPPPVSQGQRLSPGSYPTVIQQQNATSQRAAKNGPPVSDQKEVLPAGVTIKQEQNLDQTYLDDELIDTHLSWIQNIL

SEQ ID NO: 32312 - protein, 925 aa, Homo sapiens
  REGION 1..925: note = ENSP00000379330
MNAPERQPQPDGGDAPGHEPGGSPQDELDFSILFDYEYLNPNEEEPNAHKVASPPSGPAYPDDVLDYGLKPYSPLASLSGEPPGRFGEPDRVGPQKFLSAAKPAGASGLSPRIEITPSHELIQAVGPLRMRDAGLLVEQPPLAGVAASPRFTLPVPGFEGYREPLCLSPASSGSSASFISDTFSPYTSPCVSPNNGGPDDLCPQFQNIPAHYSPRTSPIMSPRTSLAEDSCLGRHSPVPRPASRSSSPGAKRRHSCAEALVALPPGASPQRSRSPSPQPSSHVAPQDHGSPAGYPPVAGSAVIMDALNSLATDSPCGIPPKMWKTSPDPSPVSAAPSKAGLPRHIYPAVEFLGPCEQGERRNSAPESILLVPPTWPKPLVPAIPICSIPVTASLPPLEWPLSSQSGSYELRIEVQPKPHHRAHYETEGSRGAVKAPTGGHPVVQLHGYMENKPLGLQIFIGTADERILKPHAFYQVHRITGKTVTTTSYEKIVGNTKVLEIPLEPKNNMRATIDCAGILKLRNADIELRKGETDIGRKNTRVRLVFRVHIPESSGRIVSLQTASNPIECSQRSAHELPMVERQDTDSCLVYGGQQMILTGQNFTSESKVVFTEKTTDGQQIWEMEATVDKDKSQPNMLFVEIPEYRNKHIRTPVKVNFYVINGKRKRSQPQHFTYHPVPAIKTEPTDEYDPTLICSPTHGGLGSQPYYPQHPMVAESPSCLVATMAPCQQFRTGLSSPDARYQQQNPAAVLYQRSKSLSPSLLGYQQPALMAAPLSLADAHRSVLVHAGSQGQSSALLHPSPTNQQASPVIHYSPTNQQLRCGSHQEFQHIMYCENFAPGTTRPGPPPVSQGQRLSPGSYPTVIQQQNATSQRAAKNGPPVSDQKEVLPAGVTIKQEQNLDQTYLDDVNEIIRKEFSGPPARNQT

SEQ ID NO: 32313 - protein, 905 aa, Homo sapiens
  REGION 1..905: note = ENSP00000477370
MQREAAFRLGHCHPLRIMGSVDQEEPNAHKVASPPSGPAYPDDVLDYGLKPYSPLASLSGEPPGRFGEPDRVGPQKFLSAAKPAGASGLSPRIEITPSHELIQAVGPLRMRDAGLLVEQPPLAGVAASPRFTLPVPGFEGYREPLCLSPASSGSSASFISDTFSPYTSPCVSPNNGGPDDLCPQFQNIPAHYSPRTSPIMSPRTSLAEDSCLGRHSPVPRPASRSSSPGAKRRHSCAEALVALPPGASPQRSRSPSPQPSSHVAPQDHGSPAGYPPVAGSAVIMDALNSLATDSPCGIPPKMWKTSPDPSPVSAAPSKAGLPRHIYPAVEFLGPCEQGERRNSAPESILLVPPTWPKPLVPAIPICSIPVTASLPPLEWPLSSQSGSYELRIEVQPKPHHRAHYETEGSRGAVKAPTGGHPVVQLHGYMENKPLGLQIFIGTADERILKPHAFYQVHRITGKTVTTTSYEKIVGNTKVLEIPLEPKNNMRATIDCAGILKLRNADIELRKGETDIGRKNTRVRLVFRVHIPESSGRIVSLQTASNPIECSQRSAHELPMVERQDTDSCLVYGGQQMILTGQNFTSESKVVFTEKTTDGQQIWEMEATVDKDKSQPNMLFVEIPEYRNKHIRTPVKVNFYVINGKRKRSQPQHFTYHPVPAIKTEPTDEYDPTLICSPTHGGLGSQPYYPQHPMVAESPSCLVATMAPCQQFRTGLSSPDARYQQQNPAAVLYQRSKSLSPSLLGYQQPALMAAPLSLADAHRSVLVHAGSQGQSSALLHPSPTNQQASPVIHYSPTNQQLRCGSHQEFQHIMYCENFAPGTTRPGPPPVSQGQRLSPGSYPTVIQQQNATSQRAAKNGPPVSDQKEVLPAGVTIKQEQNLDQTYLDDVNEIIRKEFSGPPARNQT

SEQ ID NO: 32314 - protein, 702 aa, Homo sapiens
  REGION 1..702: note = ENSP00000477142
MSPRTSLAEDSCLGRHSPVPRPASRSSSPGAKRRHSCAEALVALPPGASPQRSRSPSPQPSSHVAPQDHGSPAGYPPVAGSAVIMDALNSLATDSPCGIPPKMWKTSPDPSPVSAAPSKAGLPRHIYPAVEFLGPCEQGERRNSAPESILLVPPTWPKPLVPAIPICSIPVTASLPPLEWPLSSQSGSYELRIEVQPKPHHRAHYETEGSRGAVKAPTGGHPVVQLHGYMENKPLGLQIFIGTADERILKPHAFYQVHRITGKTVTTTSYEKIVGNTKVLEIPLEPKNNMRATIDCAGILKLRNADIELRKGETDIGRKNTRVRLVFRVHIPESSGRIVSLQTASNPIECSQRSAHELPMVERQDTDSCLVYGGQQMILTGQNFTSESKVVFTEKTTDGQQIWEMEATVDKDKSQPNMLFVEIPEYRNKHIRTPVKVNFYVINGKRKRSQPQHFTYHPVPAIKTEPTDEYDPTLICSPTHGGLGSQPYYPQHPMVAESPSCLVATMAPCQQFRTGLSSPDARYQQQNPAAVLYQRSKSLSPSLLGYQQPALMAAPLSLADAHRSVLVHAGSQGQSSALLHPSPTNQQASPVIHYSPTNQQLRCGSHQEFQHIMYCENFAPGTTRPGPPPVSQGQRLSPGSYPTVIQQQNATSQRAAKNGPPVSDQKEVLPAGVTIKQEQNLDQTYLDDELIDTHLSWIQNIL

SEQ ID NO: 32315 - protein, 901 aa, Homo sapiens
  REGION 1..901: note = ENSP00000396471
MQREAAFRLGHCHPLRIMGSVDQEEPNAHKVASPPSGPAYPDDVLDYGLKPYSPLASLSGEPPGRFGEPDRVGPQKFLSAAKPAGASGLSPRIEITPSHELIQAVGPLRMRDAGLLVEQPPLAGVAASPRFTLPVPGFEGYREPLCLSPASSGSSASFISDTFSPYTSPCVSPNNGGPDDLCPQFQNIPAHYSPRTSPIMSPRTSLAEDSCLGRHSPVPRPASRSSSPGAKRRHSCAEALVALPPGASPQRSRSPSPQPSSHVAPQDHGSPAGYPPVAGSAVIMDALNSLATDSPCGIPPKMWKTSPDPSPVSAAPSKAGLPRHIYPAVEFLGPCEQGERRNSAPESILLVPPTWPKPLVPAIPICSIPVTASLPPLEWPLSSQSGSYELRIEVQPKPHHRAHYETEGSRGAVKAPTGGHPVVQLHGYMENKPLGLQIFIGTADERILKPHAFYQVHRITGKTVTTTSYEKIVGNTKVLEIPLEPKNNMRATIDCAGILKLRNADIELRKGETDIGRKNTRVRLVFRVHIPESSGRIVSLQTASNPIECSQRSAHELPMVERQDTDSCLVYGGQQMILTGQNFTSESKVVFTEKTTDGQQIWEMEATVDKDKSQPNMLFVEIPEYRNKHIRTPVKVNFYVINGKRKRSQPQHFTYHPVPAIKTEPTDEYDPTLICSPTHGGLGSQPYYPQHPMVAESPSCLVATMAPCQQFRTGLSSPDARYQQQNPAAVLYQRSKSLSPSLLGYQQPALMAAPLSLADAHRSVLVHAGSQGQSSALLHPSPTNQQASPVIHYSPTNQQLRCGSHQEFQHIMYCENFAPGTTRPGPPPVSQGQRLSPGSYPTVIQQQNATSQRAAKNGPPVSDQKEVLPAGVTIKQEQNLDQTYLDDELIDTHLSWIQNIL

SEQ ID NO: 32316 - protein, 702 aa, Homo sapiens; identical to SEQ ID NO: 32314
  REGION 1..702: note = ENSP00000477342

SEQ ID NO: 32317 - protein, 964 aa, Homo sapiens
  REGION 1..964: note = ENSP00000388910
MITTLPSLLPASLASISHRVTNLPSNSLSHNPGLSKPDFPGNSSPGLPSSSSPGRDLGAPAGSMGAASCEDEELEFKLVFGEEKEAPPLGAGGLGEELDSEDAPPCCRLALGEPPPYGAAPIGIPRPPPPRPGMHSPPPRPAPSPGTWESQPARSVRLGGPGGGAGGAGGGRVLECPSIRITSISPTPEPPAALEDNPDAWGDGSPRDYPPPEGFGGYREAGGQGGGAFFSPSPGSSSLSSWSFFSDASDEAALYAACDEVESELNEAASRFGLGSPLPSPRASPRPWTPEDPWSLYGPSPGGRGPEDSWLLLSAPGPTPASPRPASPCGKRRYSSSGTPSSASPALSRRGSLGEEGSEPPPPPPLPLARDPGSPGPFDYVGAPPAESIPQKTRRTSSEQAVALPRSEEPASCNGKLPLGAEESVAPPGGSRKEVAGMDYLAVPSPLAWSKARIGGHSPIFRTSALPPLDWPLPSQYEQLELRIEVQPRAHHRAHYETEGSRGAVKAAPGGHPVVKLLGYSEKPLTLQMFIGTADERNLRPHAFYQVHRITGKMVATASYEAVVSGTKVLEMTLLPENNMAANIDCAGILKLRNSDIELRKGETDIGRKNTRVRLVFRVHVPQGGGKVVSVQAASVPIECSQRSAQELPQVEAYSPSACSVRGGEELVLTGSNFLPDSKVVFIERGPDGKLQWEEEATVNRLQSNEVTLTLTVPEYSNKRVSRPVQVYFYVSNGRRKRSPTQSFRFLPVICKEEPLPDSSLRGFPSASATPFGTDMDFSPPRPPYPSYPHEDPACETPYLSEGFGYGMPPLYPQTGPPPSYRPGLRMFPETRGTTGCAQPPAVSFLPRPFPSDPYGGRGSSFSLGLPFSPPAPFRPPPLPASPPLEGPFPSQSDVHPLPAEGYNKVGPGYGPGEGAPEQEKSRGGYSSGFRDSVPIQGITLEEGGCGTGGCECECVQEIALHVC

SEQ ID NO: 32318 - protein, 857 aa, Homo sapiens
  REGION 1..857: note = ENSP00000452039
MITTLPSLLPASLASISHRVTNLPSNSLSHNPGLSKPDFPGNSSPGLPSSSSPGRDLGAPAGSMGAASCEDEELEFKLVFGEEKEAPPLGAGGLGEELDSEDAPPCCRLALGEPPPYGAAPIGIPRPPPPRPGMHSPPPRPAPSPGTWESQPARSVRLGGPGGGAGGAGGGRVLECPSIRITSISPTPEPPAALEDNPDAWGDGSPRDYPPPEGFGGYREAGGQGGGAFFSPSPGSSSLSSWSFFSDASDEAALYAACDEVESELNEAASRFGLGSPLPSPRASPRPWTPEDPWSLYGPSPGGRGPEDSWLLLSAPGPTPASPRPASPCGKRRYSSSGTPSSASPALSRRGSLGEEGSEPPPPPPLPLARDPGSPGPFDYVGAPPAESIPQKTRRTSSEQAVALPRSEEPASCNGKLPLGAEESVAPPGGSRKEVAGMDYLAVPSPLAWSKARIGGHSPIFRTSALPPLDWPLPSQYEQLELRIEVQPRAHHRAHYETEGSRGAVKAAPGGHPVVKLLGYSEKPLTLQMFIGTADERNLRPHAFYQVHRITGKMVATASYEAVVSGTKVLEMTLLPENNMAANIDCAGILKLRNSDIELRKGETDIGRKNTRVRLVFRVHVPQGGGKVVSVQAASVPIECSQRSAQELPQVEAYSPSACSVRGGEELVLTGSNFLPDSKVVFIERGPDGKLQWEEEATVNRLQSNEVTLTLTVPEYSNKRVSRPVQVYFYVSNGRRKRSPTQSFRFLPVICKEEPLPDSSLRGFPSASATPFGTDMDFSPPRPPYPSYPHEDPACETPYLSEGFGYGMPPLYPQTGPPPSYRPGLRMFPETRGTTVSEIIGRDLSGFPAPPGEEPPA

SEQ ID NO: 32319 - protein, 915 aa, Homo sapiens
  REGION 1..915: note = ENSP00000451224
MLSGRDLGAPAGSMGAASCEDEELEFKLVFGEEKEAPPLGAGGLGEELDSEDAPPCCRLALGEPPPYGAAPIGIPRPPPPRPGMHSPPPRPAPSPGTWESQPARSVRLGGPGGGAGGAGGGRVLECPSIRITSISPTPEPPAALEDNPDAWGDGSPRDYPPPEGFGGYREAGGQGGGAFFSPSPGSSSLSSWSFFSDASDEAALYAACDEVESELNEAASRFGLGSPLPSPRASPRPWTPEDPWSLYGPSPGGRGPEDSWLLLSAPGPTPASPRPASPCGKRRYSSSGTPSSASPALSRRGSLGEEGSEPPPPPPLPLARDPGSPGPFDYVGAPPAESIPQKTRRTSSEQAVALPRSEEPASCNGKLPLGAEESVAPPGGSRKEVAGMDYLAVPSPLAWSKARIGGHSPIFRTSALPPLDWPLPSQYEQLELRIEVQPRAHHRAHYETEGSRGAVKAAPGGHPVVKLLGYSEKPLTLQMFIGTADERNLRPHAFYQVHRITGKMVATASYEAVVSGTKVLEMTLLPENNMAANIDCAGILKLRNSDIELRKGETDIGRKNTRVRLVFRVHVPQGGGKVVSVQAASVPIECSQRSAQELPQVEAYSPSACSVRGGEELVLTGSNFLPDSKVVFIERGPDGKLQWEEEATVNRLQSNEVTLTLTVPEYSNKRVSRPVQVYFYVSNGRRKRSPTQSFRFLPVICKEEPLPDSSLRGFPSASATPFGTDMDFSPPRPPYPSYPHEDPACETPYLSEGFGYGMPPLYPQTGPPPSYRPGLRMFPETRGTTGCAQPPAVSFLPRPFPSDPYGGRGSSFSLGLPFSPPAPFRPPPLPASPPLEGPFPSQSDVHPLPAEGYNKVGPGYGPGEGAPEQEKSRGGYSSGFRDSVPIQGITLEEVSEIIGRDLSGFPAPPGEEPPA

SEQ ID NO: 32320 - protein, 807 aa, Homo sapiens
  REGION 1..807: note = ENSP00000450644
MLSGRDLGAPAGSMGAASCEDEELEFKLVFGEEKEAPPLGAGGLGEELDSEDAPPCCRLALGEPPPYGAAPIGIPRPPPPRPGMHSPPPRPAPSPGTWESQPARSVRLGGPGGGAGGAGGGRVLECPSIRITSISPTPEPPAALEDNPDAWGDGSPRDYPPPEGFGGYREAGGQGGGAFFSPSPGSSSLSSWSFFSDASDEAALYAACDEVESELNEAASRFGLGSPLPSPRASPRPWTPEDPWSLYGPSPGGRGPEDSWLLLSAPGPTPASPRPASPCGKRRYSSSGTPSSASPALSRRGSLGEEGSEPPPPPPLPLARDPGSPGPFDYVGAPPAESIPQKTRRTSSEQAVALPRSEEPASCNGKLPLGAEESVAPPGGSRKEVAGMDYLAVPSPLAWSKARIGGHSPIFRTSALPPLDWPLPSQYEQLELRIEVQPRAHHRAHYETEGSRGAVKAAPGGHPVVKLLGYSEKPLTLQMFIGTADERNLRPHAFYQVHRITGKMVATASYEAVVSGTKVLEMTLLPENNMAANIDCAGILKLRNSDIELRKGETDIGRKNTRVRLVFRVHVPQGGGKVVSVQAASVPIECSQRSAQELPQVEAYSPSACSVRGGEELVLTGSNFLPDSKVVFIERGPDGKLQWEEEATVNRLQSNEVTLTLTVPEYSNKRVSRPVQVYFYVSNGRRKRSPTQSFRFLPVICKEEPLPDSSLRGFPSASATPFGTDMDFSPPRPPYPSYPHEDPACETPYLSEGFGYGMPPLYPQTGPPPSYRPGLRMFPETRGTTVSEIIGRDLSGFPAPPGEEPPA

SEQ ID NO: 32321 - protein, 914 aa, Homo sapiens
  REGION 1..914: note = ENSP00000388668
MLSGRDLGAPAGSMGAASCEDEELEFKLVFGEEKEAPPLGAGGLGEELDSEDAPPCCRLALGEPPPYGAAPIGIPRPPPPRPGMHSPPPRPAPSPGTWESQPARSVRLGGPGGGAGGAGGGRVLECPSIRITSISPTPEPPAALEDNPDAWGDGSPRDYPPPEGFGGYREAGGQGGGAFFSPSPGSSSLSSWSFFSDASDEAALYAACDEVESELNEAASRFGLGSPLPSPRASPRPWTPEDPWSLYGPSPGGRGPEDSWLLLSAPGPTPASPRPASPCGKRRYSSSGTPSSASPALSRRGSLGEEGSEPPPPPPLPLARDPGSPGPFDYVGAPPAESIPQKTRRTSSEQAVALPRSEEPASCNGKLPLGAEESVAPPGGSRKEVAGMDYLAVPSPLAWSKARIGGHSPIFRTSALPPLDWPLPSQYEQLELRIEVQPRAHHRAHYETEGSRGAVKAAPGGHPVVKLLGYSEKPLTLQMFIGTADERNLRPHAFYQVHRITGKMVATASYEAVVSGTKVLEMTLLPENNMAANIDCAGILKLRNSDIELRKGETDIGRKNTRVRLVFRVHVPQGGGKVVSVQAASVPIECSQRSAQELPQVEAYSPSACSVRGGEELVLTGSNFLPDSKVVFIERGPDGKLQWEEEATVNRLQSNEVTLTLTVPEYSNKRVSRPVQVYFYVSNGRRKRSPTQSFRFLPVICKEEPLPDSSLRGFPSASATPFGTDMDFSPPRPPYPSYPHEDPACETPYLSEGFGYGMPPLYPQTGPPPSYRPGLRMFPETRGTTGCAQPPAVSFLPRPFPSDPYGGRGSSFSLGLPFSPPAPFRPPPLPASPPLEGPFPSQSDVHPLPAEGYNKVGPGYGPGEGAPEQEKSRGGYSSGFRDSVPIQGITLEEGGCGTGGCECECVQEIALHVC

SEQ ID NO: 32322 - protein, 933 aa, Homo sapiens
  REGION 1..933: note = ENSP00000439350
MADGGADSAAQRLPEGPGRVAPGRDLGAPAGSMGAASCEDEELEFKLVFGEEKEAPPLGAGGLGEELDSEDAPPCCRLALGEPPPYGAAPIGIPRPPPPRPGMHSPPPRPAPSPGTWESQPARSVRLGGPGGGAGGAGGGRVLECPSIRITSISPTPEPPAALEDNPDAWGDGSPRDYPPPEGFGGYREAGGQGGGAFFSPSPGSSSLSSWSFFSDASDEAALYAACDEVESELNEAASRFGLGSPLPSPRASPRPWTPEDPWSLYGPSPGGRGPEDSWLLLSAPGPTPASPRPASPCGKRRYSSSGTPSSASPALSRRGSLGEEGSEPPPPPPLPLARDPGSPGPFDYVGAPPAESIPQKTRRTSSEQAVALPRSEEPASCNGKLPLGAEESVAPPGGSRKEVAGMDYLAVPSPLAWSKARIGGHSPIFRTSALPPLDWPLPSQYEQLELRIEVQPRAHHRAHYETEGSRGAVKAAPGGHPVVKLLGYSEKPLTLQMFIGTADERNLRPHAFYQVHRITGKMVATASYEAVVSGTKVLEMTLLPENNMAANIDCAGILKLRNSDIELRKGETDIGRKNTRVRLVFRVHVPQGGGKVVSVQAASVPIECSQRSAQELPQVEAYSPSACSVRGGEELVLTGSNFLPDSKVVFIERGPDGKLQWEEEATVNRLQSNEVTLTLTVPEYSNKRVSRPVQVYFYVSNGRRKRSPTQSFRFLPVICKEEPLPDSSLRGFPSASATPFGTDMDFSPPRPPYPSYPHEDPACETPYLSEGFGYGMPPLYPQTGPPPSYRPGLRMFPETRGTTGCAQPPAVSFLPRPFPSDPYGGRGSSFSLGLPFSPPAPFRPPPLPASPPLEGPFPSQSDVHPLPAEGYNKVGPGYGPGEGAPEQEKSRGGYSSGFRDSVPIQGITLEEGGCGTGGCECECVQEIALHVC

SEQ ID NO: 32323 - protein, 934 aa, Homo sapiens
  REGION 1..934: note = ENSP00000452270
MADGGADSAAQRLPEGPGRVAPGRDLGAPAGSMGAASCEDEELEFKLVFGEEKEAPPLGAGGLGEELDSEDAPPCCRLALGEPPPYGAAPIGIPRPPPPRPGMHSPPPRPAPSPGTWESQPARSVRLGGPGGGAGGAGGGRVLECPSIRITSISPTPEPPAALEDNPDAWGDGSPRDYPPPEGFGGYREAGGQGGGAFFSPSPGSSSLSSWSFFSDASDEAALYAACDEVESELNEAASRFGLGSPLPSPRASPRPWTPEDPWSLYGPSPGGRGPEDSWLLLSAPGPTPASPRPASPCGKRRYSSSGTPSSASPALSRRGSLGEEGSEPPPPPPLPLARDPGSPGPFDYVGAPPAESIPQKTRRTSSEQAVALPRSEEPASCNGKLPLGAEESVAPPGGSRKEVAGMDYLAVPSPLAWSKARIGGHSPIFRTSALPPLDWPLPSQYEQLELRIEVQPRAHHRAHYETEGSRGAVKAAPGGHPVVKLLGYSEKPLTLQMFIGTADERNLRPHAFYQVHRITGKMVATASYEAVVSGTKVLEMTLLPENNMAANIDCAGILKLRNSDIELRKGETDIGRKNTRVRLVFRVHVPQGGGKVVSVQAASVPIECSQRSAQELPQVEAYSPSACSVRGGEELVLTGSNFLPDSKVVFIERGPDGKLQWEEEATVNRLQSNEVTLTLTVPEYSNKRVSRPVQVYFYVSNGRRKRSPTQSFRFLPVICKEEPLPDSSLRGFPSASATPFGTDMDFSPPRPPYPSYPHEDPACETPYLSEGFGYGMPPLYPQTGPPPSYRPGLRMFPETRGTTGCAQPPAVSFLPRPFPSDPYGGRGSSFSLGLPFSPPAPFRPPPLPASPPLEGPFPSQSDVHPLPAEGYNKVGPGYGPGEGAPEQEKSRGGYSSGFRDSVPIQGITLEEVSEIIGRDLSGFPAPPGEEPPA

SEQ ID NO: 32324 - protein, 826 aa, Homo sapiens
  REGION 1..826: note = ENSP00000451502
MADGGADSAAQRLPEGPGRVAPGRDLGAPAGSMGAASCEDEELEFKLVFGEEKEAPPLGAGGLGEELDSEDAPPCCRLALGEPPPYGAAPIGIPRPPPPRPGMHSPPPRPAPSPGTWESQPARSVRLGGPGGGAGGAGGGRVLECPSIRITSISPTPEPPAALEDNPDAWGDGSPRDYPPPEGFGGYREAGGQGGGAFFSPSPGSSSLSSWSFFSDASDEAALYAACDEVESELNEAASRFGLGSPLPSPRASPRPWTPEDPWSLYGPSPGGRGPEDSWLLLSAPGPTPASPRPASPCGKRRYSSSGTPSSASPALSRRGSLGEEGSEPPPPPPLPLARDPGSPGPFDYVGAPPAESIPQKTRRTSSEQAVALPRSEEPASCNGKLPLGAEESVAPPGGSRKEVAGMDYLAVPSPLAWSKARIGGHSPIFRTSALPPLDWPLPSQYEQLELRIEVQPRAHHRAHYETEGSRGAVKAAPGGHPVVKLLGYSEKPLTLQMFIGTADERNLRPHAFYQVHRITGKMVATASYEAVVSGTKVLEMTLLPENNMAANIDCAGILKLRNSDIELRKGETDIGRKNTRVRLVFRVHVPQGGGKVVSVQAASVPIECSQRSAQELPQVEAYSPSACSVRGGEELVLTGSNFLPDSKVVFIERGPDGKLQWEEEATVNRLQSNEVTLTLTVPEYSNKRVSRPVQVYFYVSNGRRKRSPTQSFRFLPVICKEEPLPDSSLRGFPSASATPFGTDMDFSPPRPPYPSYPHEDPACETPYLSEGFGYGMPPLYPQTGPPPSYRPGLRMFPETRGTTVSEIIGRDLSGFPAPPGEEPPA

SEQ ID NO: 32325 - protein, 794 aa, Homo sapiens
  REGION 1..794: note = ENSP00000451151
MGAASCEDEELEFKLVFGEEKEAPPLGAGGLGEELDSEDAPPCCRLALGEPPPYGAAPIGIPRPPPPRPGMHSPPPRPAPSPGTWESQPARSVRLGGPGGGAGGAGGGRVLECPSIRITSISPTPEPPAALEDNPDAWGDGSPRDYPPPEGFGGYREAGGQGGGAFFSPSPGSSSLSSWSFFSDASDEAALYAACDEVESELNEAASRFGLGSPLPSPRASPRPWTPEDPWSLYGPSPGGRGPEDSWLLLSAPGPTPASPRPASPCGKRRYSSSGTPSSASPALSRRGSLGEEGSEPPPPPPLPLARDPGSPGPFDYVGAPPAESIPQKTRRTSSEQAVALPRSEEPASCNGKLPLGAEESVAPPGGSRKEVAGMDYLAVPSPLAWSKARIGGHSPIFRTSALPPLDWPLPSQYEQLELRIEVQPRAHHRAHYETEGSRGAVKAAPGGHPVVKLLGYSEKPLTLQMFIGTADERNLRPHAFYQVHRITGKMVATASYEAVVSGTKVLEMTLLPENNMAANIDCAGILKLRNSDIELRKGETDIGRKNTRVRLVFRVHVPQGGGKVVSVQAASVPIECSQRSAQELPQVEAYSPSACSVRGGEELVLTGSNFLPDSKVVFIERGPDGKLQWEEEATVNRLQSNEVTLTLTVPEYSNKRVSRPVQVYFYVSNGRRKRSPTQSFRFLPVICKEEPLPDSSLRGFPSASATPFGTDMDFSPPRPPYPSYPHEDPACETPYLSEGFGYGMPPLYPQTGPPPSYRPGLRMFPETRGTTVSEIIGRDLSGFPAPPGEEPPA

SEQ ID NO: 32326 - protein, 143 aa, Homo sapiens
  REGION 1..143: note = ENSP00000451853
MGAASCEDEELEFKLVFGEEKEAPPLGAGGLGEELDSEDAPPCCRLALGEPPPYGAAPIGIPRPPPPRPGMHSPPPRPAPSPGTWESQPARSVRLGGPGGGAGGAGGGRVLECPSIRITSISPTPEPPAALEDNPDAWGDGSP

SEQ ID NO: 32327 - protein, 139 aa, Homo sapiens
  REGION 1..139: note = ENSP00000451992
MGAASCEDEELEFKLVFGEEKEAPPLGAGGLGEELDSEDAPPCCRLALGEPPPYGAAPIGIPRPPPPRPGMHSPPPRPAPSPGTWESQPARTSALPPLDWPLPSQYEQLELRIEVQPRAHHRAHYETEGSRGAVKAAPG

SEQ ID NO: 32328 - protein, 902 aa, Homo sapiens
  REGION 1..902: note = ENSP00000250373
MGAASCEDEELEFKLVFGEEKEAPPLGAGGLGEELDSEDAPPCCRLALGEPPPYGAAPIGIPRPPPPRPGMHSPPPRPAPSPGTWESQPARSVRLGGPGGGAGGAGGGRVLECPSIRITSISPTPEPPAALEDNPDAWGDGSPRDYPPPEGFGGYREAGGQGGGAFFSPSPGSSSLSSWSFFSDASDEAALYAACDEVESELNEAASRFGLGSPLPSPRASPRPWTPEDPWSLYGPSPGGRGPEDSWLLLSAPGPTPASPRPASPCGKRRYSSSGTPSSASPALSRRGSLGEEGSEPPPPPPLPLARDPGSPGPFDYVGAPPAESIPQKTRRTSSEQAVALPRSEEPASCNGKLPLGAEESVAPPGGSRKEVAGMDYLAVPSPLAWSKARIGGHSPIFRTSALPPLDWPLPSQYEQLELRIEVQPRAHHRAHYETEGSRGAVKAAPGGHPVVKLLGYSEKPLTLQMFIGTADERNLRPHAFYQVHRITGKMVATASYEAVVSGTKVLEMTLLPENNMAANIDCAGILKLRNSDIELRKGETDIGRKNTRVRLVFRVHVPQGGGKVVSVQAASVPIECSQRSAQELPQVEAYSPSACSVRGGEELVLTGSNFLPDSKVVFIERGPDGKLQWEEEATVNRLQSNEVTLTLTVPEYSNKRVSRPVQVYFYVSNGRRKRSPTQSFRFLPVICKEEPLPDSSLRGFPSASATPFGTDMDFSPPRPPYPSYPHEDPACETPYLSEGFGYGMPPLYPQTGPPPSYRPGLRMFPETRGTTGCAQPPAVSFLPRPFPSDPYGGRGSSFSLGLPFSPPAPFRPPPLPASPPLEGPFPSQSDVHPLPAEGYNKVGPGYGPGEGAPEQEKSRGGYSSGFRDSVPIQGITLEEVSEIIGRDLSGFPAPPGEEPPA

SEQ ID NO: 32329 - protein, 901 aa, Homo sapiens
  REGION 1..901: note = ENSP00000450590
MGAASCEDEELEFKLVFGEEKEAPPLGAGGLGEELDSEDAPPCCRLALGEPPPYGAAPIGIPRPPPPRPGMHSPPPRPAPSPGTWESQPARSVRLGGPGGGAGGAGGGRVLECPSIRITSISPTPEPPAALEDNPDAWGDGSPRDYPPPEGFGGYREAGGQGGGAFFSPSPGSSSLSSWSFFSDASDEAALYAACDEVESELNEAASRFGLGSPLPSPRASPRPWTPEDPWSLYGPSPGGRGPEDSWLLLSAPGPTPASPRPASPCGKRRYSSSGTPSSASPALSRRGSLGEEGSEPPPPPPLPLARDPGSPGPFDYVGAPPAESIPQKTRRTSSEQAVALPRSEEPASCNGKLPLGAEESVAPPGGSRKEVAGMDYLAVPSPLAWSKARIGGHSPIFRTSALPPLDWPLPSQYEQLELRIEVQPRAHHRAHYETEGSRGAVKAAPGGHPVVKLLGYSEKPLTLQMFIGTADERNLRPHAFYQVHRITGKMVATASYEAVVSGTKVLEMTLLPENNMAANIDCAGILKLRNSDIELRKGETDIGRKNTRVRLVFRVHVPQGGGKVVSVQAASVPIECSQRSAQELPQVEAYSPSACSVRGGEELVLTGSNFLPDSKVVFIERGPDGKLQWEEEATVNRLQSNEVTLTLTVPEYSNKRVSRPVQVYFYVSNGRRKRSPTQSFRFLPVICKEEPLPDSSLRGFPSASATPFGTDMDFSPPRPPYPSYPHEDPACETPYLSEGFGYGMPPLYPQTGPPPSYRPGLRMFPETRGTTGCAQPPAVSFLPRPFPSDPYGGRGSSFSLGLPFSPPAPFRPPPLPASPPLEGPFPSQSDVHPLPAEGYNKVGPGYGPGEGAPEQEKSRGGYSSGFRDSVPIQGITLEEGGCGTGGCECECVQEIALHVC

SEQ ID NO: 32330 - protein, 196 aa, Homo sapiens
  REGION 1..196: note = ENSP00000452352
MPASISSIFPELDSEDAPPCCRLALGEPPPYGAAPIGIPRPPPPRPGMHSPPPRPAPSPGTWESQPARSVRLGGPGGGAGGAGGGRVLECPSIRITSISPTPEPPAALEDNPDAWGDGSPRDYPPPEGFGGYREAGGQGGGAFFSPSPGSSSLSSWSFFSDASDEAALYAACDEVESELNEAASRFGLGSPLPSPR

SEQ ID NO: 32331 - protein, 832 aa, Homo sapiens
  REGION 1..832: note = ENSP00000452349
MHSPPPRPAPSPGTWESQPARSVRLGGPGGGAGGAGGGRVLECPSIRITSISPTPEPPAALEDNPDAWGDGSPRDYPPPEGFGGYREAGGQGGGAFFSPSPGSSSLSSWSFFSDASDEAALYAACDEVESELNEAASRFGLGSPLPSPRASPRPWTPEDPWSLYGPSPGGRGPEDSWLLLSAPGPTPASPRPASPCGKRRYSSSGTPSSASPALSRRGSLGEEGSEPPPPPPLPLARDPGSPGPFDYVGAPPAESIPQKTRRTSSEQAVALPRSEEPASCNGKLPLGAEESVAPPGGSRKEVAGMDYLAVPSPLAWSKARIGGHSPIFRTSALPPLDWPLPSQYEQLELRIEVQPRAHHRAHYETEGSRGAVKAAPGGHPVVKLLGYSEKPLTLQMFIGTADERNLRPHAFYQVHRITGKMVATASYEAVVSGTKVLEMTLLPENNMAANIDCAGILKLRNSDIELRKGETDIGRKNTRVRLVFRVHVPQGGGKVVSVQAASVPIECSQRSAQELPQVEAYSPSACSVRGGEELVLTGSNFLPDSKVVFIERGPDGKLQWEEEATVNRLQSNEVTLTLTVPEYSNKRVSRPVQVYFYVSNGRRKRSPTQSFRFLPVICKEEPLPDSSLRGFPSASATPFGTDMDFSPPRPPYPSYPHEDPACETPYLSEGFGYGMPPLYPQTGPPPSYRPGLRMFPETRGTTGCAQPPAVSFLPRPFPSDPYGGRGSSFSLGLPFSPPAPFRPPPLPASPPLEGPFPSQSDVHPLPAEGYNKVGPGYGPGEGAPEQEKSRGGYSSGFRDSVPIQGITLEEVSEIIGRDLSGFPAPPGEEPPA

SEQ ID NO: 32332 - protein, 832 aa, Homo sapiens; identical to SEQ ID NO: 32331
  REGION 1..832: note = ENSP00000450469

SEQ ID NO: 32333 - protein, 724 aa, Homo sapiens
  REGION 1..724: note = ENSP00000450733
MHSPPPRPAPSPGTWESQPARSVRLGGPGGGAGGAGGGRVLECPSIRITSISPTPEPPAALEDNPDAWGDGSPRDYPPPEGFGGYREAGGQGGGAFFSPSPGSSSLSSWSFFSDASDEAALYAACDEVESELNEAASRFGLGSPLPSPRASPRPWTPEDPWSLYGPSPGGRGPEDSWLLLSAPGPTPASPRPASPCGKRRYSSSGTPSSASPALSRRGSLGEEGSEPPPPPPLPLARDPGSPGPFDYVGAPPAESIPQKTRRTSSEQAVALPRSEEPASCNGKLPLGAEESVAPPGGSRKEVAGMDYLAVPSPLAWSKARIGGHSPIFRTSALPPLDWPLPSQYEQLELRIEVQPRAHHRAHYETEGSRGAVKAAPGGHPVVKLLGYSEKPLTLQMFIGTADERNLRPHAFYQVHRITGKMVATASYEAVVSGTKVLEMTLLPENNMAANIDCAGILKLRNSDIELRKGETDIGRKNTRVRLVFRVHVPQGGGKVVSVQAASVPIECSQRSAQELPQVEAYSPSACSVRGGEELVLTGSNFLPDSKVVFIERGPDGKLQWEEEATVNRLQSNEVTLTLTVPEYSNKRVSRPVQVYFYVSNGRRKRSPTQSFRFLPVICKEEPLPDSSLRGFPSASATPFGTDMDFSPPRPPYPSYPHEDPACETPYLSEGFGYGMPPLYPQTGPPPSYRPGLRMFPETRGTTVSEIIGRDLSGFPAPPGEEPPA

SEQ ID NO: 32334 - protein, 782 aa, Homo sapiens
  REGION 1..782: note = ENSP00000451454
MPASISSIFPGPTLLLSCGSEELDSEDAPPCCRLALGEPPPYGAAPIGIPRPPPPRPGMHSPPPRPAPSPGTWESQPARSVRLGGPGGGAGGAGGGRVLECPSIRITSISPTPEPPAALEDNPDAWGDGSPRDYPPPEGFGGYREAGGQGGGAFFSPSPGSSSLSSWSFFSDASDEAALYAACDEVESELNEAASRFGLGSPLPSPRASPRPWTPEDPWSLYGPSPGGRGPEDSWLLLSAPGPTPASPRPASPCGKRRYSSSGTPSSASPALSRRGSLGEEGSEPPPPPPLPLARDPGSPGPFDYVGAPPAESIPQKTRRTSSEQAVALPRSEEPASCNGKLPLGAEESVAPPGGSRKEVAGMDYLAVPSPLAWSKARIGGHSPIFRTSALPPLDWPLPSQYEQLELRIEVQPRAHHRAHYETEGSRGAVKAAPGGHPVVKLLGYSEKPLTLQMFIGTADERNLRPHAFYQVHRITGKMVATASYEAVVSGTKVLEMTLLPENNMAANIDCAGILKLRNSDIELRKGETDIGRKNTRVRLVFRVHVPQGGGKVVSVQAASVPIECSQRSAQELPQVEAYSPSACSVRGGEELVLTGSNFLPDSKVVFIERGPDGKLQWEEEATVNRLQSNEVTLTLTVPEYSNKRVSRPVQVYFYVSNGRRKRSPTQSFRFLPVICKEEPLPDSSLRGFPSASATPFGTDMDFSPPRPPYPSYPHEDPACETPYLSEGFGYGMPPLYPQTGPPPSYRPGLRMFPETRGTTVSEIIGRDLSGFPAPPGEEPPA

SEQ ID NO: 32335 - protein, 831 aa, Homo sapiens
  REGION 1..831: note = ENSP00000451284
MHSPPPRPAPSPGTWESQPARSVRLGGPGGGAGGAGGGRVLECPSIRITSISPTPEPPAALEDNPDAWGDGSPRDYPPPEGFGGYREAGGQGGGAFFSPSPGSSSLSSWSFFSDASDEAALYAACDEVESELNEAASRFGLGSPLPSPRASPRPWTPEDPWSLYGPSPGGRGPEDSWLLLSAPGPTPASPRPASPCGKRRYSSSGTPSSASPALSRRGSLGEEGSEPPPPPPLPLARDPGSPGPFDYVGAPPAESIPQKTRRTSSEQAVALPRSEEPASCNGKLPLGAEESVAPPGGSRKEVAGMDYLAVPSPLAWSKARIGGHSPIFRTSALPPLDWPLPSQYEQLELRIEVQPRAHHRAHYETEGSRGAVKAAPGGHPVVKLLGYSEKPLTLQMFIGTADERNLRPHAFYQVHRITGKMVATASYEAVVSGTKVLEMTLLPENNMAANIDCAGILKLRNSDIELRKGETDIGRKNTRVRLVFRVHVPQGGGKVVSVQAASVPIECSQRSAQELPQVEAYSPSACSVRGGEELVLTGSNFLPDSKVVFIERGPDGKLQWEEEATVNRLQSNEVTLTLTVPEYSNKRVSRPVQVYFYVSNGRRKRSPTQSFRFLPVICKEEPLPDSSLRGFPSASATPFGTDMDFSPPRPPYPSYPHEDPACETPYLSEGFGYGMPPLYPQTGPPPSYRPGLRMFPETRGTTGCAQPPAVSFLPRPFPSDPYGGRGSSFSLGLPFSPPAPFRPPPLPASPPLEGPFPSQSDVHPLPAEGYNKVGPGYGPGEGAPEQEKSRGGYSSGFRDSVPIQGITLEEGGCGTGGCECECVQEIALHVC

SEQ ID NO: 32336 - protein, 889 aa, Homo sapiens
  REGION 1..889: note = ENSP00000396788
MPASISSIFPGPTLLLSCGSEELDSEDAPPCCRLALGEPPPYGAAPIGIPRPPPPRPGMHSPPPRPAPSPGTWESQPARSVRLGGPGGGAGGAGGGRVLECPSIRITSISPTPEPPAALEDNPDAWGDGSPRDYPPPEGFGGYREAGGQGGGAFFSPSPGSSSLSSWSFFSDASDEAALYAACDEVESELNEAASRFGLGSPLPSPRASPRPWTPEDPWSLYGPSPGGRGPEDSWLLLSAPGPTPASPRPASPCGKRRYSSSGTPSSASPALSRRGSLGEEGSEPPPPPPLPLARDPGSPGPFDYVGAPPAESIPQKTRRTSSEQAVALPRSEEPASCNGKLPLGAEESVAPPGGSRKEVAGMDYLAVPSPLAWSKARIGGHSPIFRTSALPPLDWPLPSQYEQLELRIEVQPRAHHRAHYETEGSRGAVKAAPGGHPVVKLLGYSEKPLTLQMFIGTADERNLRPHAFYQVHRITGKMVATASYEAVVSGTKVLEMTLLPENNMAANIDCAGILKLRNSDIELRKGETDIGRKNTRVRLVFRVHVPQGGGKVVSVQAASVPIECSQRSAQELPQVEAYSPSACSVRGGEELVLTGSNFLPDSKVVFIERGPDGKLQWEEEATVNRLQSNEVTLTLTVPEYSNKRVSRPVQVYFYVSNGRRKRSPTQSFRFLPVICKEEPLPDSSLRGFPSASATPFGTDMDFSPPRPPYPSYPHEDPACETPYLSEGFGYGMPPLYPQTGPPPSYRPGLRMFPETRGTTGCAQPPAVSFLPRPFPSDPYGGRGSSFSLGLPFSPPAPFRPPPLPASPPLEGPFPSQSDVHPLPAEGYNKVGPGYGPGEGAPEQEKSRGGYSSGFRDSVPIQGITLEEGGCGTGGCECECVQEIALHVC

SEQ ID NO: 32337 - protein, 890 aa, Homo sapiens
  REGION 1..890: note = ENSP00000450686
MPASISSIFPGPTLLLSCGSEELDSEDAPPCCRLALGEPPPYGAAPIGIPRPPPPRPGMHSPPPRPAPSPGTWESQPARSVRLGGPGGGAGGAGGGRVLECPSIRITSISPTPEPPAALEDNPDAWGDGSPRDYPPPEGFGGYREAGGQGGGAFFSPSPGSSSLSSWSFFSDASDEAALYAACDEVESELNEAASRFGLGSPLPSPRASPRPWTPEDPWSLYGPSPGGRGPEDSWLLLSAPGPTPASPRPASPCGKRRYSSSGTPSSASPALSRRGSLGEEGSEPPPPPPLPLARDPGSPGPFDYVGAPPAESIPQKTRRTSSEQAVALPRSEEPASCNGKLPLGAEESVAPPGGSRKEVAGMDYLAVPSPLAWSKARIGGHSPIFRTSALPPLDWPLPSQYEQLELRIEVQPRAHHRAHYETEGSRGAVKAAPGGHPVVKLLGYSEKPLTLQMFIGTADERNLRPHAFYQVHRITGKMVATASYEAVVSGTKVLEMTLLPENNMAANIDCAGILKLRNSDIELRKGETDIGRKNTRVRLVFRVHVPQGGGKVVSVQAASVPIECSQRSAQELPQVEAYSPSACSVRGGEELVLTGSNFLPDSKVVFIERGPDGKLQWEEEATVNRLQSNEVTLTLTVPEYSNKRVSRPVQVYFYVSNGRRKRSPTQSFRFLPVICKEEPLPDSSLRGFPSASATPFGTDMDFSPPRPPYPSYPHEDPACETPYLSEGFGYGMPPLYPQTGPPPSYRPGLRMFPETRGTTGCAQPPAVSFLPRPFPSDPYGGRGSSFSLGLPFSPPAPFRPPPLPASPPLEGPFPSQSDVHPLPAEGYNKVGPGYGPGEGAPEQEKSRGGYSSGFRDSVPIQGITLEEVSEIIGRDLSGFPAPPGEEPPA

SEQ ID NO: 32338 - protein, 329 aa, Homo sapiens
  REGION 1..329: note = ENSP00000450810
MFIGTADERNLRPHAFYQVHRITGKMVATASYEAVVSGTKVLEMTLLPENNMAANIDCAGILKLRNSDIELRKGETDIGRKNTRVRLVFRVHVPQGGGKVVSVQAASVPIECSQRSAQELPQVEAYSPSACSVRGGEELVLTGSNFLPDSKVVFIERGPDGKLQWEEEATVNRLQSNEVTLTLTVPEYSNKRVSRPVQVYFYVSNGRRKRSPTQSFRFLPVICKEEPLPDSSLRGFPSASATPFGTDMDFSPPRPPYPSYPHEDPACETPYLSEGFGYGMPPLYPQTGPPPSYRPGLRMFPETRGTTVSEIIGRDLSGFPAPPGEEPPA

SEQ ID NO: 32339 - protein, 437 aa, Homo sapiens
  REGION 1..437: note = ENSP00000451183
MFIGTADERNLRPHAFYQVHRITGKMVATASYEAVVSGTKVLEMTLLPENNMAANIDCAGILKLRNSDIELRKGETDIGRKNTRVRLVFRVHVPQGGGKVVSVQAASVPIECSQRSAQELPQVEAYSPSACSVRGGEELVLTGSNFLPDSKVVFIERGPDGKLQWEEEATVNRLQSNEVTLTLTVPEYSNKRVSRPVQVYFYVSNGRRKRSPTQSFRFLPVICKEEPLPDSSLRGFPSASATPFGTDMDFSPPRPPYPSYPHEDPACETPYLSEGFGYGMPPLYPQTGPPPSYRPGLRMFPETRGTTGCAQPPAVSFLPRPFPSDPYGGRGSSFSLGLPFSPPAPFRPPPLPASPPLEGPFPSQSDVHPLPAEGYNKVGPGYGPGEGAPEQEKSRGGYSSGFRDSVPIQGITLEEVSEIIGRDLSGFPAPPGEEPPA

SEQ ID NO: 32340 - protein, 436 aa, Homo sapiens
  REGION 1..436: note = ENSP00000451395
MFIGTADERNLRPHAFYQVHRITGKMVATASYEAVVSGTKVLEMTLLPENNMAANIDCAGILKLRNSDIELRKGETDIGRKNTRVRLVFRVHVPQGGGKVVSVQAASVPIECSQRSAQELPQVEAYSPSACSVRGGEELVLTGSNFLPDSKVVFIERGPDGKLQWEEEATVNRLQSNEVTLTLTVPEYSNKRVSRPVQVYFYVSNGRRKRSPTQSFRFLPVICKEEPLPDSSLRGFPSASATPFGTDMDFSPPRPPYPSYPHEDPACETPYLSEGFGYGMPPLYPQTGPPPSYRPGLRMFPETRGTTGCAQPPAVSFLPRPFPSDPYGGRGSSFSLGLPFSPPAPFRPPPLPASPPLEGPFPSQSDVHPLPAEGYNKVGPGYGPGEGAPEQEKSRGGYSSGFRDSVPIQGITLEEGGCGTGGCECECVQEIALHVC

SEQ ID NO: 32341 - protein, 82 aa, Homo sapiens
  REGION 1..82: note = ENSP00000451496
MDFSPPRPPYPSYPHEDPACETPYLSEGFGYGMPPLYPQTGPPPSYRPGLRMFPETRGTTVSEIIGRDLSGFPAPPGEEPPA

SEQ ID NO: 32342 - protein, 189 aa, Homo sapiens
  REGION 1..189: note = ENSP00000451801
MDFSPPRPPYPSYPHEDPACETPYLSEGFGYGMPPLYPQTGPPPSYRPGLRMFPETRGTTGCAQPPAVSFLPRPFPSDPYGGRGSSFSLGLPFSPPAPFRPPPLPASPPLEGPFPSQSDVHPLPAEGYNKVGPGYGPGEGAPEQEKSRGGYSSGFRDSVPIQGITLEEGGCGTGGCECECVQEIALHVC

SEQ ID NO: 32343 - protein, 190 aa, Homo sapiens
  REGION 1..190: note = ENSP00000451590
MDFSPPRPPYPSYPHEDPACETPYLSEGFGYGMPPLYPQTGPPPSYRPGLRMFPETRGTTGCAQPPAVSFLPRPFPSDPYGGRGSSFSLGLPFSPPAPFRPPPLPASPPLEGPFPSQSDVHPLPAEGYNKVGPGYGPGEGAPEQEKSRGGYSSGFRDSVPIQGITLEEVSEIIGRDLSGFPAPPGEEPPA

SEQ ID NO: 32344 - protein, 462 aa, Homo sapiens
  REGION 1..462: note = ENSP00000297689
MQLRKMQTVKKEQASLDASSNVDKMMVLNSALTEVSEDSTTGEELLLSEGSVGKNKSSACRRKREFIPDEKKDAMYWEKRRKNNEAAKRSREKRRLNDLVLENKLIALGEENATLKAELLSLKLKFGLISSTAYAQEIQKLSNSTAVYFQDYQTSKSNVSSFVDEHEPSMVSSSCISVIKHSPQSSLSDVSEVSSVEHTQESSVQGSCRSPENKFQIIKQEPMELESYTREPRDDRGSYTASIYQNYMGNSFSGYSHSPPLLQVNRSSSNSPRTSETDDGVVGKSSDGEDEQQVPKGPIHSPVELKHVHATVVKVPEVNSSALPHKLRIKAKAMQIKVEAFDNEFEATQKLSSPIDMTSKRHFELEKHSAPSMVHSSLTPFSVQVTNIQDWSLKSEHWHQKELSGKTQNSFKTGVVEMKDSGYKVSDPENLYLKQGIANLSAEVVSLKRLIATQPISASDSG

SEQ ID NO: 32345 - protein, 65 aa, Homo sapiens
  REGION 1..65: note = ENSP00000467127
  VARIANT 1: note = Any amino acid
XSGVQVDLEARDFEGLTPLHTAILALNVAMRPSDLCPRVLSTQARDRLDCVHMLLQMGANHTSQR

SEQ ID NO: 32346 - protein, 455 aa, Homo sapiens
  REGION 1..455: note = ENSP00000493265
LAQRRGRGPGGPQSTPRNPRVSRGERSHCPTQTVKKLLEEQRRRQQQQPDAGGVQGQFLPPPEQPLTPSVNEAVTGHPPFPAHSETVGSGPSSLGFPDWDPNTHAAYTDSPYSCPASAAENFLPPDFYPPSDPGQPCPFPQGMEAGPWRVSAPPSGPPQFPAVVPGPSLEVARAHMLALGPQQLLAQDEEGDTLLHLFAARGLRWAAYAAAEVLQVYRRLDIREHKGKTPLLVAAAANQPLIVEDLLNLGAEPNAADHQGRSVLHVAATYGLPGVLLAVLNSGVQVDLEARDFEGLTPLHTAILALNVAMRPSDLCPRVLSTQARDRLDCVHMLLQMGANHTSQEIKSNKTVLHLAVQAANPTLVQLLLELPRGDLRTFVNMKAHGNTALHMAAALPPGPAQEAIVRHLLAAGADPTLRNLENEQPVHLLRPGPGPEGLRQLLKRSRVAPPGLSS

SEQ ID NO: 32347 - protein, 465 aa, Homo sapiens
  REGION 1..465: note = ENSP00000475712
MWVCLRGILDSQAFWHETLRRWECLLAEMKVSRGERSHCPTQTVKKLLEEQRRRQQQQPDAGGVQGQFLPPPEQPLTPSVNEAVTGHPPFPAHSETVGSGPSSLGFPDWDPNTHAAYTDSPYSCPASAAENFLPPDFYPPSDPGQPCPFPQGMEAGPWRVSAPPSGPPQFPAVVPGPSLEVARAHMLALGPQQLLAQDEEGDTLLHLFAARGLRWAAYAAAEVLQVYRRLDIREHKGKTPLLVAAAANQPLIVEDLLNLGAEPNAADHQGRSVLHVAATYGLPGVLLAVLNSGVQVDLEARDFEGLTPLHTAILALNVAMRPSDLCPRVLSTQARDRLDCVHMLLQMGANHTSQEIKSNKTVLHLAVQAANPTLVQLLLELPRGDLRTFVNMKAHGNTALHMAAALPPGPAQEAIVRHLLAAGADPTLRNLENEQPVHLLRPGPGPEGLRQLLKRSRVAPPGLSS

SEQ ID NO: 32348 - protein, 292 aa, Homo sapiens
  REGION 1..292: note = ENSP00000465684
LAQRRGRGPGGPQSTPRNPRVSRGERSHCPTQTVKKLLEEQRRRQQQQPDAGGVQGQFLPPPEQPLTPSVNEAVTGHPPFPAHSETVGSGPSSLGFPDWDPNTHAAYTDSPYSCPASAAENFLPPDFYPPSDPGQPCPFPQGMEDPPDTQFYVGSSLPQAGPWRVSAPPSGPPQFPAVVPGPSLEVARAHMLALGPQQLLAQDEEGDTLLHLFAARGLRWAAYAAAEVLQVYRRLDIREHKGKTPLLVAAAANQPLIVEDLLNLGAEPNAADHQGRSVLHVAATYGLPGVLL

SEQ ID NO: 32349 - protein, 313 aa, Homo sapiens
  REGION 1..313: note = ENSP00000380109
MEAGPWRVSAPPSGPPQFPAVVPGPSLEVARAHMLALGPQQLLAQDEEGDTLLHLFAARGLRWAAYAAAEVLQVYRRLDIREHKGKTPLLVAAAANQPLIVEDLLNLGAEPNAADHQGRSVLHVAATYGLPGVLLAVLNSGVQVDLEARDFEGLTPLHTAILALNVAMRPSDLCPRVLSTQARDRLDCVHMLLQMGANHTSQEIKSNKTVLHLAVQAANPTLVQLLLELPRGDLRTFVNMKAHGNTALHMAAALPPGPAQEAIVRHLLAAGADPTLRNLENEQPVHLLRPGPGPEGLRQLLKRSRVAPPGLSS

SEQ ID NO: 32350 - protein, 1630 aa, Homo sapiens
  REGION 1..1630: note = ENSP00000369400
MPFAKRIVEPQWLCRQRRPAPGPAVDASGGSAEPPPPLQPPGRRDLDEVEAPGPEEPARAVPAPSGLPPPPPPLPAPADQTQPPHGEASVAGEESTAGIPEAAPAAGEASSAAAAAAVLLMLDLCAVSNAALARVLRQLSDVARHACSLFQELESDIQLTHRRVWALQGKLGGVQRVLSTLDPKQEAVPVSNLDIESKLSVYYRAPWHQQRNIFLPATRPPCVEELHRHARQSLQALRREHRSRSDRREQRAAAPLSIAAPPLPAYPPAHSQRRREFKDRHFLTSHPPEDEDTDVMLGQRPKNPIHNIPSTLDKQTNWSKALPLPTPEEKMKQDAQVISSCIIPINVTGVGFDREASIRCSLVHSQSVLQRRRKLRRRKTISGIPRRVQQEIDSDESPVARERNVIVHTNPDPSNTVNRISGTRDSECQTEDILIAAPSRRRIRAQRGQSIAASLSHSAGNISALADKGDTMFTPAVSSRTRSRSLPREGNRGGDAEPKVGAKPSAYEEGESFVGDHERTPNDFSEAPSSPSAQDHQPTLGLACSQHLHSPQHKLSERGRSRLSRMAADSGSCDISSNSDTFGSPIHCISTAGVLLSSHMDQKDDHQSSSGNWSGSSSTCPSQTSETIPPAASPPLTGSSHCDSELSLNTAPHANEDASVFVTEQYNDHLDKVRGHRANSFTSTVADLLDDPNNSNTSDSEWNYLHHHHDASCRQDFSPERPKADSLGCPSFTSMATYDSFLEKSPSDKADTSSHFSVDTEGYYTSMHFDCGLKGNKSYVCHYAALGPENGQGVGASPGLPDCAWQDYLDHKRQGRPSISFRKPKAKPTPPKRSSSLRKSDGNADISEKKEPKISSGQHLPHSSREMKLPLDFANTPSRMENANLPTKQEPSWINQSEQGIKEPQLDASDIPPFKDEVAESTHYADLWLLNDLKTNDPYRSLSNSSTATGTTVIECIKSPESSESQTSQSESRATTPSLPSVDNEFKLASPEKLAGLASPSSGYSSQSETPTSSFPTAFFSGPLSPGGSKRKPKVPERKSSLQQPSLKDGTISLSKDLELPIIPPTHLDLSALHNVLNKPFHHRHPLHVFTHNKQNTVGETLRSNPPPSLAITPTILKSVNLRSINKSEEVKQKEENNTDLPYLEESTLTTAALSPSKIRPHTANKSVSRQYSTEDTILSFLDSSAVEMGPDKLHLEKNSTFDVKNRCDPETITSAGSSLLDSNVTKDQVRTETEPIPENTPTKNCAFPTEGFQRVSAARPNDLDGKIIQYGPGPDETLEQVQKAPSAGLEEVAQPESVDVITSQSDSPTRATDVSNQFKHQFVMSRHHDKVPGTISYESEITSVNSFPEKCSKQENIASGISAKSASDNSKAEETQGNVDEASLKESSPSDDSIISPLSEDSQAEAEGVFVSPNKPRTTEDLFAVIHRSKRKVLGRKDSGDMSVRSKSRAPLSSSSSSASSITSPSSNVTTPNSQRSPGLIYRNAKKSNTSNEEFKLLLLKKGSRSDSSYRMSATEILKSPILPKPPGELTAESPQSTDDAHQGSQGAEALSPLSPCSPRVNAEGFSSKSFATSASARVGRSRAPPAASSSRYSVRCRLYNTPMQAISEGETENSDGSPHDDRSSQSST

SEQ ID NO: 32351 - protein, 1474 aa, Homo sapiens
  REGION 1..1474: note = ENSP00000381170
MALACCMPKNAAVSNLDIESKLSVYYRAPWHQQRNIFLPATRPPCVEELHRHARQSLQALRREHRSRSDRREQRAAAPLSIAAPPLPAYPPAHSQRRREFKDRHFLTFNSTRSPSPTECCHMTPWSRKSHPPEDEDTDVMLGQRPKNPIHNIPSTLDKQTNWSKALPLPTPEEKMKQDAQVISSCIIPINVTGVGFDREASIRCSLVHSQSVLQRRRKLRRRKTISGIPRRVQQEIDSDESPVARERNVIVHTNPDPSNTVNRISGTRDSECQTEDILIAAPSRRRIRAQRGQSIAASLSHSAGNISALADKGDTMFTPAVSSRTRSRSLPREGNRGGDAEPKVGAKPSAYEEGESFVGDHERTPNDFSEAPSSPSAQDHQPTLGLACSQHLHSPQHKLSERGRSRLSRMAADSGSCDISSNSDTFGSPIHCISTAGVLLSSHMDQKDDHQSSSGNWSGSSSTCPSQTSETIPPAASPPLTGSSHCDSELSLNTAPHANEDASVFVTEQYNDHLDKVRGHRANSFTSTVADLLDDPNNSNTSDSEWNYLHHHHDASCRQDFSPERPKADSLGCPSFTSMATYDSFLEKSPSDKADTSSHFSVDTEGYYTSMHFDCGLKGNKSYVCHYAALGPENGQGVGASPGLPDCAWQDYLDHKRQGRPSISFRKPKAKPTPPKRSSSLRKSDGNADISEKKEPKISSGQHLPHSSREMKLPLDFANTPSRMENANLPTKQEPSWINQSEQGIKEPQLDASDIPPFKDEVAESTHYADLWLLNDLKTNDPYRSLSNSSTATGTTVIECIKSPESSESQTSQSESRATTPSLPSVDNEFKLASPEKLAGLASPSSGYSSQSETPTSSFPTAFFSGPLSPGGSKRKPKVPERKSSLQQPSLKDGTISLSKDLELPIIPPTHLDLSALHNVLNKPFHHRHPLHVFTHNKQNTVGETLRSNPPPSLAITPTILKSVNLRSINKSEEVKQKEENNTDLPYLEESTLTTAALSPSKIRPHTANKSVSRQYSTEDTILSFLDSSAVEMGPDKLHLEKNSTFDVKNRCDPETITSAGSSLLDSNVTKDQVRTETEPIPENTPTKNCAFPTEGFQRVSAARPNDLDGKIIQYGPGPDETLEQVQKAPSAGLEEVAQPESVDVITSQSDSPTRATDVSNQFKHQFVMSRHHDKVPGTISYESEITSVNSFPEKCSKQENIASGISAKSASDNSKAEETQGNVDEASLKESSPSDDSIISPLSEDSQAEAEGVFVSPNKPRTTEDLFAVIHRSKRKVLGRKDSGDMSVRSKSRAPLSSSSSSASSITSPSSNVTTPNSQRSPGLIYRNAKKSNTSNEEFKLLLLKKGSRSDSSYRMSATEILKSPILPKPPGELTAESPQSTDDAHQGSQGAEALSPLSPCSPRVNAEGFSSKSFATSASARVGRSRAPPAASSSRYSVRCRLYNTPMQAISEGETENSDGSPHDDRSSQSST

SEQ ID NO: 32352 - protein, 1471 aa, Homo sapiens
  REGION 1..1471: note = ENSP00000480113
MDNALFLAAVSNLDIESKLSVYYRAPWHQQRNIFLPATRPPCVEELHRHARQSLQALRREHRSRSDRREQRAAAPLSIAAPPLPAYPPAHSQRRREFKDRHFLTFNSTRSPSPTECCHMTPWSRKSHPPEDEDTDVMLGQRPKNPIHNIPSTLDKQTNWSKALPLPTPEEKMKQDAQVISSCIIPINVTGVGFDREASIRCSLVHSQSVLQRRRKLRRRKTISGIPRRVQQEIDSDESPVARERNVIVHTNPDPSNTVNRISGTRDSECQTEDILIAAPSRRRIRAQRGQSIAASLSHSAGNISALADKGDTMFTPAVSSRTRSRSLPREGNRGGDAEPKVGAKPSAYEEGESFVGDHERTPNDFSEAPSSPSAQDHQPTLGLACSQHLHSPQHKLSERGRSRLSRMAADSGSCDISSNSDTFGSPIHCISTAGVLLSSHMDQKDDHQSSSGNWSGSSSTCPSQTSETIPPAASPPLTGSSHCDSELSLNTAPHANEDASVFVTEQYNDHLDKVRGHRANSFTSTVADLLDDPNNSNTSDSEWNYLHHHHDASCRQDFSPERPKADSLGCPSFTSMATYDSFLEKSPSDKADTSSHFSVDTEGYYTSMHFDCGLKGNKSYVCHYAALGPENGQGVGASPGLPDCAWQDYLDHKRQGRPSISFRKPKAKPTPPKRSSSLRKSDGNADISEKKEPKISSGQHLPHSSREMKLPLDFANTPSRMENANLPTKQEPSWINQSEQGIKEPQLDASDIPPFKDEVAESTHYADLWLLNDLKTNDPYRSLSNSSTATGTTVIECIKSPESSESQTSQSESRATTPSLPSVDNEFKLASPEKLAGLASPSSGYSSQSETPTSSFPTAFFSGPLSPGGSKRKPKVPERKSSLQQPSLKDGTISLSKDLELPIIPPTHLDLSALHNVLNKPFHHRHPLHVFTHNKQNTVGETLRSNPPPSLAITPTILKSVNLRSINKSEEVKQKEENNTDLPYLEESTLTTAALSPSKIRPHTANKSVSRQYSTEDTILSFLDSSAVEMGPDKLHLEKNSTFDVKNRCDPETITSAGSSLLDSNVTKDQVRTETEPIPENTPTKNCAFPTEGFQRVSAARPNDLDGKIIQYGPGPDETLEQVQKAPSAGLEEVAQPESVDVITSQSDSPTRATDVSNQFKHQFVMSRHHDKVPGTISYESEITSVNSFPEKCSKQENIASGISAKSASDNSKAEETQGNVDEASLKESSPSDDSIISPLSEDSQAEAEGVFVSPNKPRTTEDLFAVIHRSKRKVLGRKDSGDMSVRSKSRAPLSSSSSSASSITSPSSNVTTPNSQRSPGLIYRNAKKSNTSNEEFKLLLLKKGSRSDSSYRMSATEILKSPILPKPPGELTAESPQSTDDAHQGSQGAEALSPLSPCSPRVNAEGFSSKSFATSASARVGRSRAPPAASSSRYSVRCRLYNTPMQAISEGETENSDGSPHDDRSSQSST

SEQ ID NO: 32353 - protein, 1447 aa, Homo sapiens
  REGION 1..1447: note = ENSP00000478433
MPKNAAVSNLDIESKLSVYYRAPWHQQRNIFLPATRPPCVEELHRHARQSLQALRREHRSRSDRREQRAAAPLSIAAPPLPAYPPAHSQRRREFKDRHFLTSHPPEDEDTDVMLGQRPKNPIHNIPSTLDKQTNWSKALPLPTPEEKMKQDAQVISSCIIPINVTGVGFDREASIRCSLVHSQSVLQRRRKLRRRKTISGIPRRVQQEIDSDESPVARERNVIVHTNPDPSNTVNRISGTRDSECQTEDILIAAPSRRRIRAQRGQSIAASLSHSAGNISALADKGDTMFTPAVSSRTRSRSLPREGNRGGDAEPKVGAKPSAYEEGESFVGDHERTPNDFSEAPSSPSAQDHQPTLGLACSQHLHSPQHKLSERGRSRLSRMAADSGSCDISSNSDTFGSPIHCISTAGVLLSSHMDQKDDHQSSSGNWSGSSSTCPSQTSETIPPAASPPLTGSSHCDSELSLNTAPHANEDASVFVTEQYNDHLDKVRGHRANSFTSTVADLLDDPNNSNTSDSEWNYLHHHHDASCRQDFSPERPKADSLGCPSFTSMATYDSFLEKSPSDKADTSSHFSVDTEGYYTSMHFDCGLKGNKSYVCHYAALGPENGQGVGASPGLPDCAWQDYLDHKRQGRPSISFRKPKAKPTPPKRSSSLRKSDGNADISEKKEPKISSGQHLPHSSREMKLPLDFANTPSRMENANLPTKQEPSWINQSEQGIKEPQLDASDIPPFKDEVAESTHYADLWLLNDLKTNDPYRSLSNSSTATGTTVIECIKSPESSESQTSQSESRATTPSLPSVDNEFKLASPEKLAGLASPSSGYSSQSETPTSSFPTAFFSGPLSPGGSKRKPKVPERKSSLQQPSLKDGTISLSKDLELPIIPPTHLDLSALHNVLNKPFHHRHPLHVFTHNKQNTVGETLRSNPPPSLAITPTILKSVNLRSINKSEEVKQKEENNTDLPYLEESTLTTAALSPSKIRPHTANKSVSRQYSTEDTILSFLDSSAVEMGPDKLHLEKNSTFDVKNRCDPETITSAGSSLLDSNVTKDQVRTETEPIPENTPTKNCAFPTEGFQRVSAARPNDLDGKIIQYGPGPDETLEQVQKAPSAGLEEVAQPESVDVITSQSDSPTRATDVSNQFKHQFVMSRHHDKVPGTISYESEITSVNSFPEKCSKQENIASGISAKSASDNSKAEETQGNVDEASLKESSPSDDSIISPLSEDSQAEAEGVFVSPNKPRTTEDLFAVIHRSKRKVLGRKDSGDMSVRSKSRAPLSSSSSSASSITSPSSNVTTPNSQRSPGLIYRNAKKSNTSNEEFKLLLLKKGSRSDSSYRMSATEILKSPILPKPPGELTAESPQSTDDAHQGSQGAEALSPLSPCSPRVNAEGFSSKSFATSASARVGRSRAPPAASSSRYSVRCRLYNTPMQAISEGETENSDGSPHDDRSSQSST

SEQ ID NO: 32354 - protein, 1610 aa, Homo sapiens
  REGION 1..1610: note = ENSP00000394546
MKKEGSSGSFRLQPNTGSLSRAVSWINFSSLSRQTKRLFRSDGELSVCGQQVEVDDENWIYRAQPRKAVSNLDEESRWTVHYTAPWHQQENVFLPTTRPPCVEDLHRQAKLNLKSVLRECDKLRHDGYRSSQYYSQGPTFAANASPFCDDYQDEDEETDQKCSLSSSEEERFISIRRPKTPASSDFSDLNTQTNWTKSLPLPTPEEKMRQQAQTVQADVVPINITASGTGQDDADGHSVYTPDHYSTLGRFNSCRSAGQRSETRDSSCQTEDVKVVPPSMRRIRAQKGQGIAAQMGHFSGSSGNMSVLSDSAGIVFPSRLDSDAGFHSLPRSGARANIQSLEPRLGALGPAGDMNGTFLYQRGHPQADENLGHLGGASGTGTLLRPKSQELRHFESENIMSPACVVSPHATYSTSIIPNATLSSSSEVIAIPTAQSAGQRESKSSGSSHARIKSRDHLISRHAVKGDPQSPGRHWNEGHATILSQDLDPHSPGEPALLSLCDSAVPLNAPANRENGSQAMPYNCRNNLAFPAHPQDVDGKSESSYSGGGGHSSSEPWEYKSSGNGRASPLKPHLATPGYSTPTSNMSSCSLDQTSNKEDAGSLYSEDHDGYCASVHTDSGHGSGNLCNSSDGFGNPRHSVINVFVGRAQKNQGDRSNYQDKSLSRNISLKKAKKPPLPPSRTDSLRRIPKKSSQCNGQVLNESLIATLQHSLQLSLPGKSGSSPSQSPCSDLEEPWLPRSRSQSTVSAGSSMTSATTPNVYSLCGATPSQSDTSSVKSEYTDPWGYYIDYTGMQEDPGNPAGGCSTSSGVPTGNGPVRHVQEGSRATMPQVPGGSVKPKIMSPEKSHRVISPSSGYSSQSNTPTALTPVPVFLKSVSPANGKGKPKPKVPERKSSLISSVSISSSSTSLSSSTSTEGSGTMKKLDPAVGSPPAPPPPPVPSPPFPCPADRSPFLPPPPPVTDCSQGSPLPHSPVFPPPPPEALIPFCSPPDWCLSPPRPALSPILPDSPVSLPLPPPLLPSSEPPPAPPLDPKFMKDTRPPFTNSGQPESSRGSLRPPSTKEETSRPPMPLITTEALQMVQLRPVRKNSGAEAAQLSERTAQEQRTPVAPQYHLKPSAFLKSRNSTNEMESESQPASVTSSLPTPAKSSSQGDHGSAAERGGPVSRSPGAPSAGEAEARPSPSTTPLPDSSPSRKPPPISKKPKLFLVVPPPQKDFAVEPAENVSEALRAVPSPTTGEEGSVHSREAKESSAAQAGSHATHPGTSVLEGGAAGSMSPSRVEANVPMVQPDVSPAPKQEEPAENSADTGGDGESCLSQQDGAAGVPETNAAGSSSEACDFLKEDGNDEVMTPSRPRTTEDLFAAIHRSKRKVLGRRDSDDDHSRNHSPSPPVTPTGAAPSLASPKQVGSIQRSIRKSSTSSDNFKALLLKKGSRSDTSARMSAAEMLKNTDPRFQRSRSEPSPDAPESPSSCSPSKNRRAQEEWAKNEGLMPRSLSFSGPRYGRSRTPPSAASSRYSMRNRIQSSPMTVISEGEGEAVEPVDSIARGALGAAEGCSLDGLAREEMDEGGLLCGEGPAASLQPQAPGPVDGTASAEGREPSPQCGGSLSEES

SEQ ID NO: 32355 - protein, 1606 aa, Homo sapiens
  REGION 1..1606: note = ENSP00000344672
MVVFINAKIKSLIKLFKKKTVSNLDEESRWTVHYTAPWHQQENVFLPTTRPPCVEDLHRQAKLNLKSVLRECDKLRHDGYRSSQYYSQGPTFAANASPFCDDYQDEDEETDQKCSLSSSEEERFISIRRPKTPASSDFSDLNTQTNWTKSLPLPTPEEKMRQQAQTVQADVVPINITGENFDRQASLRRSLIYTDTLVRRPKKVKRRKTITGVPDNIQKELASGTGQDDADGHSVYTPDHYSTLGRFNSCRSAGQRSETRDSSCQTEDVKVVPPSMRRIRAQKGQGIAAQMGHFSGSSGNMSVLSDSAGIVFPSRLDSDAGFHSLPRSGARANIQSLEPRLGALGPAGDMNGTFLYQRGHPQADENLGHLGGASGTGTLLRPKSQELRHFESENIMSPACVVSPHATYSTSIIPNATLSSSSEVIAIPTAQSAGQRESKSSGSSHARIKSRDHLISRHAVKGDPQSPGRHWNEGHATILSQDLDPHSPGEPALLSLCDSAVPLNAPANRENGSQAMPYNCRNNLAFPAHPQDVDGKSESSYSGGGGHSSSEPWEYKSSGNGRASPLKPHLATPGYSTPTSNMSSCSLDQTSNKEDAGSLYSEDHDGYCASVHTDSGHGSGNLCNSSDGFGNPRHSVINVFVGRAQKNQGDRSNYQDKSLSRNISLKKAKKPPLPPSRTDSLRRIPKKSSQCNGQVLNESLIATLQHSLQLSLPGKSGSSPSQSPCSDLEEPWLPRSRSQSTVSAGSSMTSATTPNVYSLCGATPSQSDTSSVKSEYTDPWGYYIDYTGMQEDPGNPAGGCSTSSGVPTGNGPVRHVQEGSRATMPQVPGGSVKPKIMSPEKSHRVISPSSGYSSQSNTPTALTPVPVFLKSVSPANGKGKPKPKVPERKSSLISSVSISSSSTSLSSSTSTEGSGTMKKLDPAVGSPPAPPPPPVPSPPFPCPADRSPFLPPPPPVTDCSQGSPLPHSPVFPPPPPEALIPFCSPPDWCLSPPRPALSPILPDSPVSLPLPPPLLPSSEPPPAPPLDPKFMKDTRPPFTNSGQPESSRGSLRPPSTKEETSRPPMPLITTEALQMVQLRPVRKNSGAEAAQLSERTAQEQRTPVAPQYHLKPSAFLKSRNSTNEMESESQPASVTSSLPTPAKSSSQGDHGSAAERGGPVSRSPGAPSAGEAEARPSPSTTPLPDSSPSRKPPPISKKPKLFLVVPPPQKDFAVEPAENVSEALRAVPSPTTGEEGSVHSREAKESSAAQAGSHATHPGTSVLEGGAAGSMSPSRVEANVPMVQPDVSPAPKQEEPAENSADTGGDGESCLSQQDGAAGVPETNAAGSSSEACDFLKEDGNDEVMTPSRPRTTEDLFAAIHRSKRKVLGRRDSDDDHSRNHSPSPPVTPTGAAPSLASPKQVGSIQRSIRKSSTSSDNFKALLLKKGSRSDTSARMSAAEMLKNTDPRFQRSRSEPSPDAPESPSSCSPSKNRRAQEEWAKNEGLMPRSLSFSGPRYGRSRTPPSAASSRYSMRNRIQSSPMTVISEGEGEAVEPVDSIARGALGAAEGCSLDGLAREEMDEGGLLCGEGPAASLQPQAPGPVDGTASAEGREPSPQCGGSLSEES

SEQ ID NO: 32356 - protein, 221 aa, Homo sapiens
  REGION 1..221: note = ENSP00000344582
MFCLKAVSNLDEESRWTVHYTAPWHQQENVFLPTTRPPCVEDLHRQAKLNLKSVLRECDKLRHDGYRSSQYYSQGPTFAANASPFCDDYQDEDEETDQKCSLSSSEEERFISIRRPKTPASSDFSDLNTQTNWTKSLPLPTPEEKMRQQAQTVQADVVPINITASGTGQDDADGHSVYTPDHYSTLGRFNSCRSAGQRSETRDSSCQTEDVKVVPPSMRRI

SEQ ID NO: 32357 - protein, 169 aa, Homo sapiens
  REGION 1..169: note = ENSP00000433523
  VARIANT 1: note = Any amino acid
XAALGHRTAALHRRLDALQAAAARLDHRRVKIPVSNLDEESRWTVHYTAPWHQQENVFLPTTRPPCVEDLHRQAKLNLKSVLRECDKLRHDGYRSSQYYSQGPTFAANASPFCDDYQDEDEETDQKCSLSSSEEERFISIRRPKTPASSDFSDLNTQTNWTKSLPLPTP

SEQ ID NO: 32358 - protein, 137 aa, Homo sapiens
  REGION 1..137: note = ENSP00000434958
MNVIYCLESVTDSSFPWGAVAVSNLDEESRWTVHYTAPWHQQENVFLPTTRPPCVEDLHRQAKLNLKSVLRECDKLRHDGYRSSQYYSQGPTFAANASPFCDDYQDEDEETDQKCSLSSSEEERFISIRRPKTPASS

SEQ ID NO: 32359 - protein, 709 aa, Homo sapiens
  REGION 1..709: note = ENSP00000424079
MESMGMVYSVPSSCNGPTESTFSTSWKGDAFTYMTPSATSQSNQVNENGKNPSCGNSWVSLNKVPPLVPKEAATLLVARDNPAGCSGSAGYPERLIQQRHMPERPSKIGLLTSGTSRLETGPGGASRFRERSLSVPTDSGTTDVDYDEEQKANEACALPFASTSSEGSNSADNIASLSAQQEAQHRRQRSKSISLRKAKKKPSPPTRSVSLVKDEPGLLPEGGSALPKDQRPKSLCLSLEHQGHHSSHPDAQGHPAIPNHKDPESTQFSHHWYLTDWKSGDTYQSLSSSSTATGTTVIECTQVQGSSESLASPSTSRATTPSQLSIEVEAREISSPGRPPGLMSPSSGYSSQSETPTPTVSMSLTLGHLPPPSSSVRVRPVVPERKSSLPPTSPMEKFPKSRLSFDLPLTSSPNLDLSGMSISIRSKTKVSRHHSETNFGVKLAQKTNPNQPIMPMVTQSDLRSVRLRSVSKSEPEDDIESPEYAEEPRAEEVFTLPERKTKPPVAEKPPVARRPPSLVHKPPSVPEEYALTSPTLAMPPRSSIQHARPLPQDSYTVVRKPKPSSFPDGRSPGESTAPSSLVFTPFASSSDAFFSGTQQPPQGSVEDEGPKVRVLPERISLQSQEEAEKKKGKIPPPVPKKPSVLYLPLTSPTAQMEAYVAEPRLPLSPIITLEEDTKCPATGDDLQSLGQRVTSTPQADSEREASPLG

SEQ ID NO: 32360 - protein, 1133 aa, Homo sapiens
  REGION 1..1133: note = ENSP00000492082
LAAANSGRENATATAHSRSSWRQPVNVFLSSGRPPSVEELLREAQLNLQSLLQEEYEEQYSEARLVGQTFRSSDEATKPTPNPRPQSARRLEFILMPTKRQLSEDETTTQGVRAPEASLSLSTTADKQTAWNSLFPLPILEEKRWPQLCSTQSDIVPINISGQQFDKHASLRHSLFNTETAVNPKSTLRRRRTIIGFSNFSQRDQGHSNSPAGSVAHSTTSDIRPSHSVPEGVHGRVAVGQDARFPSLTSPVLRTPSSEPDEPHQARSGPNPPGMESMGMVYSVPSSCNGPTESTFSTSWKGDAFTYMTPSATSQSNQVNENGKNPSCGNSWVSLNKVPPLVPKEAATLLVARDNPAGCSGSAGYPERLIQQRHMPERPSKIGLLTSGTSRLETGPGGASRFRERSLSVPTDSGTTDVDYDEEQKANEACALPFASTSSEGSNSADNIASLSAQQEAQHRRQRSKSISLRKAKKKPSPPTRSVSLVKDEPGLLPEGGSALPKDQRPKSLCLSLEHQGHHSSHPDAQGHPAIPNHKDPESTQFSHHWYLTDWKSGDTYQSLSSSSTATGTTVIECTQVQGSSESLASPSTSRATTPSQLSIEVEAREISSPGRPPGLMSPSSGYSSQSETPTPTVSMSLTLGHLPPPSSSVRVRPVVPERKSSLPPTSPMEKFPKSRLSFDLPLTSSPNLDLSGMSISIRSKTKVSRHHSETNFGVKLAQKTNPNQPIMPMVTQSDLRSVRLRSVSKSEPEDDIESPEYAEEPRAEEVFTLPERKTKPPVAEKPPVARRPPSLVHKPPSVPEEYALTSPTLAMPPRSSIQHARPLPQDSYTVVRKPKPSSFPDGRSPGESTAPSSLVFTPFASSSDAFFSGTQQPPQGSVEDEGPKVRVLPERISLQSQEEAEKKKGKIPPPVPKKPSVLYLPLTSPTAQMEAYVAEPRLPLSPIITLEEDTKCPATGDDLQSLGQRVTSTPQADSEREASPLGSSVEPGTEEKSLISDKTAEWIAEDDDDVFVASRTTEDLFTVIHRSKRKLLGWKEPGEAFVGGRTSSHSPIKNTAESPISESTATAGSGSSANLDAGRNDDFKALLQKKGSKATPRSRPSAAELLKTTNPLARRIIAQFSKDYETTDNPST

SEQ ID NO: 32361 - protein, 835 aa, Homo sapiens
  REGION 1..835: note = ENSP00000487835
MERTDSVTLFWIRGGHSNSPAGSVAHSTTSDIRPSHSVPEGVHGRVAVGQDARFPSLTSPVLRTPSSEPDEPHQARSGPNPPGMESMGMVYSVPSSCNGPTESTFSTSWKGDAFTYMTPSATSQSNQVNENGKNPSCGNSWVSLNKVPPLVPKEAATLLVARDNPAGCSGSAGYPERLIQQRHMPERPSKIGLLTSGTSRLETGPGGASRFRERSLSVPTDSGTTDVDYDEEQKANEACALPFASTSSEGSNSADNIASLSAQQEAQHRRQRSKSISLRKAKKKPSPPTRSVSLVKDEPGLLPEGGSALPKDQRPKSLCLSLEHQGHHSSHPDAQGHPAIPNHKDPESTQFSHHWYLTDWKSGDTYQSLSSSSTATGTTVIECTQVQGSSESLASPSTSRATTPSQLSIEVEAREISSPGRPPGLMSPSSGYSSQSETPTPTVSMSLTLGHLPPPSSSVRVRPVVPERKSSLPPTSPMEKFPKSRLSFDLPLTSSPNLDLSGMSISIRSKTKVSRHHSETNFGVKLAQKTNPNQPIMPMVTQSDLRSVRLRSVSKSEPEDDIESPEYAEEPRAEEVFTLPERKTKPPVAEKPPVARRPPSLVHKPPSVPEEYALTSPTLAMPPRSSIQHARPLPQDSYTVVRKPKPSSFPDGRSPGESTAPSSLVFTPFASSSDAFFSGTQQPPQGSVEDEGPKVRVLPERISLQSQEEAEKKKGKIPPPVPKKPSVLYLPLTSPTAQMEAYVAEPRLPLSPIITLEEDTKCPATGDDLQSLGQRVTSTPQADSEREASPLGSSVEPGTEEKSLISDKTAEWIAEDDDDVFVASRTTEDLFTVIH

SEQ ID NO: 32362 - protein, 950 aa, Homo sapiens
  REGION 1..950: note = ENSP00000488715
MMGNSHHKQPRSKSQSRMHSATGHSNSPAGSVAHSTTSDIRPSHSVPEGVHGRVAVGQDARFPSLTSPVLRTPSSEPDEPHQARSGPNPPGMESMGMVYSVPSSCNGPTESTFSTSWKGDAFTYMTPSATSQSNQVNENGKNPSCGNSWVSLNKVPPLVPKEAATLLVARDNPAGCSGSAGYPERLIQQRHMPERPSKIGLLTSGTSRLETGPGGASRFRERSLSVPTDSGTTDVDYDEEQKANEACALPFASTSSEGSNSADNIASLSAQQEAQHRRQRSKSISLRKAKKKPSPPTRSVSLVKDEPGLLPEGGSALPKDQRPKSLCLSLEHQGHHSSHPDAQGHPAIPNHKDPESTQFSHHWYLTDWKSGDTYQSLSSSSTATGTTVIECTQVQGSSESLASPSTSRATTPSQLSIEVEAREISSPGRPPGLMSPSSGYSSQSETPTPTVSMSLTLGHLPPPSSSVRVRPVVPERKSSLPPTSPMEKFPKSRLSFDLPLTSSPNLDLSGMSISIRSKTKVSRHHSETNFGVKLAQKTNPNQPIMPMVTQSDLRSVRLRSVSKSEPEDDIESPEYAEEPRAEEVFTLPERKTKPPVAEKPPVARRPPSLVHKPPSVPEEYALTSPTLAMPPRSSIQHARPLPQDSYTVVRKPKPSSFPDGRSPGESTAPSSLVFTPFASSSDAFFSGTQQPPQGSVEDEGPKVRVLPERISLQSQEEAEKKKGKIPPPVPKKPSVLYLPLTSPTAQMEAYVAEPRLPLSPIITLEEDTKCPATGDDLQSLGQRVTSTPQADSEREASPLGSSVEPGTEEKSLISDKTAEWIAEDDDDVFVASRTTEDLFTVIHRSKRKLLGWKEPGEAFVGGRTSSHSPIKNTAESPISESTATAGSGSSANLDAGRNDDFKALLQKKGSKATPRSRPSAAELLKTTNPLARRIIAQFSKDYETTDNPST

SEQ ID NO: 32363 - protein, 1225 aa, Homo sapiens
  REGION 1..1225: note = ENSP00000488668
MPFYRRTVVPQRLCPRNPPQQLAELRDVSHLAALSLLRQLADLCGHSLALLEDLEGHLLALGRRTDSLYRRTVRLRRRLPCRLLGPEEDEEELAAANSGRENATATAHSRSSWRQPVNVFLSSGRPPSVEELLREAQLNLQSLLQEEYEEQYSEARLVGQTFRSSDEATKPTPNPRPQSARRLEFILMPTKRQLSEDETTTQGVRAPEASLSLSTTADKQTAWNSLFPLPILEEKRWPQLCSTQSDIVPINISGQQFDKHASLRHSLFNTETAVNPKSTLRRRRTIIGFSNFSQRDQGHSNSPAGSVAHSTTSDIRPSHSVPEGVHGRVAVGQDARFPSLTSPVLRTPSSEPDEPHQARSGPNPPGMESMGMVYSVPSSCNGPTESTFSTSWKGDAFTYMTPSATSQSNQVNENGKNPSCGNSWVSLNKVPPLVPKEAATLLVARDNPAGCSGSAGYPERLIQQRHMPERPSKIGLLTSGTSRLETGPGGASRFRERSLSVPTDSGTTDVDYDEEQKANEACALPFASTSSEGSNSADNIASLSAQQEAQHRRQRSKSISLRKAKKKPSPPTRSVSLVKDEPGLLPEGGSALPKDQRPKSLCLSLEHQGHHSSHPDAQGHPAIPNHKDPESTQFSHHWYLTDWKSGDTYQSLSSSSTATGTTVIECTQVQGSSESLASPSTSRATTPSQLSIEVEAREISSPGRPPGLMSPSSGYSSQSETPTPTVSMSLTLGHLPPPSSSVRVRPVVPERKSSLPPTSPMEKFPKSRLSFDLPLTSSPNLDLSGMSISIRSKTKVSRHHSETNFGVKLAQKTNPNQPIMPMVTQSDLRSVRLRSVSKSEPEDDIESPEYAEEPRAEEVFTLPERKTKPPVAEKPPVARRPPSLVHKPPSVPEEYALTSPTLAMPPRSSIQHARPLPQDSYTVVRKPKPSSFPDGRSPGESTAPSSLVFTPFASSSDAFFSGTQQPPQGSVEDEGPKVRVLPERISLQSQEEAEKKKGKIPPPVPKKPSVLYLPLTSPTAQMEAYVAEPRLPLSPIITLEEDTKCPATGDDLQSLGQRVTSTPQADSEREASPLGSSVEPGTEEKSLISDKTAEWIAEDDDDVFVASRTTEDLFTVIHRSKRKLLGWKEPGEAFVGGRTSSHSPIKNTAESPISESTATAGSGSSANLDAGRNDDFKALLQKKGSKATPRSRPSAAELLKTTNPLARRIIAQFSKDYETTDNPST

SEQ ID NO: 32364 - protein, 1114 aa, Homo sapiens
  REGION 1..1114: note = ENSP00000355554
MLASSSRIRAAWTRALLLPLLLAGPVGCLSRQELFPFGPGQGDLELEDGDDFVSPALELSGALRFYDRSDIDAVYVTTNGIIATSEPPAKESHPGLFPPTFGAVAPFLADLDTTDGLGKVYYREDLSPSITQRAAECVHRGFPEISFQPSSAVVVTWESVAPYQGPSRDPDQKGKRNTFQAVLASSDSSSYAIFLYPEDGLQFHTTFSKKENNQVPAVVAFSQGSVGFLWKSNGAYNIFANDRESVENLAKSSNSGQQGVWVFEIGSPATTNGVVPADVILGTEDGAEYDDEDEDYDLATTRLGLEDVGTTPFSYKALRRGGADTYSVPSVLSPRRAATERPLGPPTERTRSFQLAVETFHQQHPQVIDVDEVEETGVVFSYNTDSRQTCANNRHQCSVHAECRDYATGFCCSCVAGYTGNGRQCVAEGSPQRVNGKVKGRIFVGSSQVPIVFENTDLHSYVVMNHGRSYTAISTIPETVGYSLLPLAPVGGIIGWMFAVEQDGFKNGFSITGGEFTRQAEVTFVGHPGNLVIKQRFSGIDEHGHLTIDTELEGRVPQIPFGSSVHIEPYTELYHYSTSVITSSSTREYTVTEPERDGASPSRIYTYQWRQTITFQECVHDDSRPALPSTQQLSVDSVFVLYNQEEKILRYALSNSIGPVREGSPDALQNPCYIGTHGCDTNAACRPGPRTQFTCECSIGFRGDGRTCYEVEKTRCQHEREHILGAAGATDPQRPIPPGLFVPECDAHGHYAPTQCHGSTGYCWCVDRDGREVEGTRTRPGMTPPCLSTVAPPIHQGPAVPTAVIPLPPGTHLLFAQTGKIERLPLEGNTMRKTEAKAFLHVPAKVIIGLAFDCVDKMVYWTDITEPSIGRASLHGGEPTTIIRQDLGSPEGIAVDHLGRNIFWTDSNLDRIEVAKLDGTQRRVLFETDLVNPRGIVTDSVRGNLYWTDWNRDNPKIETSYMDGTNRRILVQDDLGLPNGLTFDAFSSQLCWVDAGTNRAECLNPSQPSRRKALEGLQYPFAVTSYGKNLYFTDWKMNSVVALDLAISKETDAFQPHKQTRLYGITTALSQCPQGHNYCSVNNGGCTHLCLATPGSRTCRCPDNTLGVDCIEQK

SEQ ID NO: 32365 - protein, 1247 aa, Homo sapiens
  REGION 1..1247: note = ENSP00000264187
MLASSSRIRAAWTRALLLPLLLAGPVGCLSRQELFPFGPGQGDLELEDGDDFVSPALELSGALRFYDRSDIDAVYVTTNGIIATSEPPAKESHPGLFPPTFGAVAPFLADLDTTDGLGKVYYREDLSPSITQRAAECVHRGFPEISFQPSSAVVVTWESVAPYQGPSRDPDQKGKRNTFQAVLASSDSSSYAIFLYPEDGLQFHTTFSKKENNQVPAVVAFSQGSVGFLWKSNGAYNIFANDRESVENLAKSSNSGQQGVWVFEIGSPATTNGVVPADVILGTEDGAEYDDEDEDYDLATTRLGLEDVGTTPFSYKALRRGGADTYSVPSVLSPRRAATERPLGPPTERTRSFQLAVETFHQQHPQVIDVDEVEETGVVFSYNTDSRQTCANNRHQCSVHAECRDYATGFCCSCVAGYTGNGRQCVAEGSPQRVNGKVKGRIFVGSSQVPIVFENTDLHSYVVMNHGRSYTAISTIPETVGYSLLPLAPVGGIIGWMFAVEQDGFKNGFSITGGEFTRQAEVTFVGHPGNLVIKQRFSGIDEHGHLTIDTELEGRVPQIPFGSSVHIEPYTELYHYSTSVITSSSTREYTVTEPERDGASPSRIYTYQWRQTITFQECVHDDSRPALPSTQQLSVDSVFVLYNQEEKILRYALSNSIGPVREGSPDALQNPCYIGTHGCDTNAACRPGPRTQFTCECSIGFRGDGRTCYDIDECSEQPSVCGSHTICNNHPGTFRCECVEGYQFSDEGTCVAVVDQRPINYCETGLHNCDIPQRAQCIYTGGSSYTCSCLPGFSGDGQACQDVDECQPSRCHPDAFCYNTPGSFTCQCKPGYQGDGFRCVPGEVEKTRCQHEREHILGAAGATDPQRPIPPGLFVPECDAHGHYAPTQCHGSTGYCWCVDRDGREVEGTRTRPGMTPPCLSTVAPPIHQGPAVPTAVIPLPPGTHLLFAQTGKIERLPLEGNTMRKTEAKAFLHVPAKVIIGLAFDCVDKMVYWTDITEPSIGRASLHGGEPTTIIRQDLGSPEGIAVDHLGRNIFWTDSNLDRIEVAKLDGTQRRVLFETDLVNPRGIVTDSVRGNLYWTDWNRDNPKIETSYMDGTNRRILVQDDLGLPNGLTFDAFSSQLCWVDAGTNRAECLNPSQPSRRKALEGLQYPFAVTSYGKNLYFTDWKMNSVVALDLAISKETDAFQPHKQTRLYGITTALSQCPQGHNYCSVNNGGCTHLCLATPGSRTCRCPDNTLGVDCIEQK

SEQ ID NO: 32366 - protein, 188 aa, Homo sapiens
  REGION 1..188: note = ENSP00000307552
MAGLSRQLCALSHPKKAAETQTAEPGGAHAVCSRHPVRVKGLEGSEMESARENIDLQPGSSDPRSQPINLNHYATKKSVAESMLDVALFMSNAMRLKAVLEQGPSSHYYTTLVTLISLSLLLQVVIGVLLVVIARLNLNEVEKQWRLNQLNNAATILVFFTVVINVFITAFGAHKTGFLAARASRNPL

SEQ ID NO: 32367 - protein, 135 aa, Homo sapiens
  REGION 1..135: note = ENSP00000380435
MMYMPGSSDPRSQPINLNHYATKKSVAESMLDVALFMSNAMRLKAVLEQGPSSHYYTTLVTLISLSLLLQVVIGVLLVVIARLNLNEVEKQWRLNQLNNAATILVFFTVVINVFITAFGAHKTGFLAARASRNPL

SEQ ID NO: 32368 - protein, 106 aa, Homo sapiens
  REGION 1..106: note = ENSP00000438831
MLDVALFMSNAMRLKAVLEQGPSSHYYTTLVTLISLSLLLQVVIGVLLVVIARLNLNEVEKQWRLNQLNNAATILVFFTVVINVFITAFGAHKTGFLAARASRNPL

SEQ ID NO: 32369 - protein, 90 aa, Homo sapiens
  REGION 1..90: note = ENSP00000415158
MLDVALFMSNAMRLKAVLEQGPSSHYYTTLVTLISLSLLLQVVIGVLLVVIGEEPSLQSDLLPRHPWLAERPHVSPGPPCIGTGSFATTR

SEQ ID NO: 32370 - protein, 447 aa, Homo sapiens
  REGION 1..447: note = ENSP00000406456
MPGDSSPGTLPLWDASLSPPLGPDPGGFSRASHAGDKSRPPAPELGSPGAVRPRVGSCAPGPMELRVSNTSCENGSLLHLYCSSQEVLCQIVNDLSPEVPSNATFHSWQERIRQNYGFYIGLGLAFLSSFLIGSSVILKKKGLLRLVATGATRAVAAGEVANFGAYAFAPATVVTPLGALSVLISAILSSYFLRESLNLLGKLGCVICVAGSTVMVIHAPEEEKVTTIMEMASKMKDTGFIVFAVLLLVSCLILIFVIAPRYGQRNILIYIIICSVIGAFSVAAVKGLGITIKNFFQGLPVVRHPLPYILSLILALSLSTQVNFLNRALDIFNTSLVFPIYYVFFTTVVVTSSIILFKEWYSMSAVDIAGTLSGFVTIILGVFMLHAFKDLDISCASLPHMHKNPPPSPAPEPTVIRLEDKNVLVDNIELASTSSPEEKPKVFIIHS

SEQ ID NO: 32371 - protein, 466 aa, Homo sapiens
  REGION 1..466: note = ENSP00000311687
MPGDSSPGTLPLWDASLSPPLGPDPGGFSRASHAGDKSRPPAPELGSPGAVRPRVGSCAPGPMELRVSNTSCENGSLLHLYCSSQEVLCQIVNDLSPEVPSNATFHSWQERIRQNYGFYIGLGLAFLSSFLIGSSVILKKKGLLRLVATGATRAVDGGFGYLKDAMWWAGFLTMAAGEVANFGAYAFAPATVVTPLGALSVLISAILSSYFLRESLNLLGKLGCVICVAGSTVMVIHAPEEEKVTTIMEMASKMKDTGFIVFAVLLLVSCLILIFVIAPRYGQRNILIYIIICSVIGAFSVAAVKGLGITIKNFFQGLPVVRHPLPYILSLILALSLSTQVNFLNRALDIFNTSLVFPIYYVFFTTVVVTSSIILFKEWYSMSAVDIAGTLSGFVTIILGVFMLHAFKDLDISCASLPHMHKNPPPSPAPEPTVIRLEDKNVLVDNIELASTSSPEEKPKVFIIHS

SEQ ID NO: 32372 - protein, 132 aa, Homo sapiens
  REGION 1..132: note = ENSP00000430810
PAPELGSPGAVRPRVGSCAPGPMELRVSNTSCENAGMAERSQGRKVPCSTSTAPPKKSCARLSMTSALRCPAMPPFTAGRKESGRTMASTSAWAWHSCLASSSAAASSSRRKASCDSWPREPLELWMEASAT

SEQ ID NO: 32373 - protein, 188 aa, Homo sapiens
  REGION 1..188: note = ENSP00000357401
MGYCSGRCTLIFICGMQLVCVLERQIFDFLGYQWAPILANFVHIIIVILGLFGTIQYRPRYITGYAVWLVLWVTWNVFVICFYLEAGDLSKETDLILTFNISMHRSWWMENGPGCTVTSVTPAPDWAPEDHRYITVSGCLLEYQYIEVAHSSLQIVLAVSVGSQPLLLVPLGLFYFCANSVHTNGICG

SEQ ID NO: 32374 - protein, 208 aa, Homo sapiens
  REGION 1..208: note = ENSP00000357402
MGYCSGRCTLIFICGMQLVCVLERQIFDFLGYQWAPILANFVHIIIVILGLFGTIQYRPRYITGYAVWLVLWVTWNVFVICFYLEAGDLSKETDLILTFNISMHRSWWMENGPGCTVTSVTPAPDWAPEDHRYITVSGCLLEYQYIEVAHSSLQIVLALAGFIYACYVVKCITEEEDSFDFIGGFDSYGYQGPQKTSHLQLQPMYMSK

SEQ ID NO: 32375 - protein, 31 aa, Homo sapiens
  REGION 1..31: note = ENSP00000492855
  VARIANT 1: note = Any amino acid
XGFDSYGYQGPQKTSHLQLQPMYMQIPLDNN

SEQ ID NO: 32376 - protein, 49 aa, Homo sapiens
  REGION 1..49: note = ENSP00000440287
VCVLERQIFDFLGYQWAPILANFVHIIIVILGLFGTIQYRPRYITGYHV

SEQ ID NO: 32377 - protein, 207 aa, Homo sapiens
  REGION 1..207: note = ENSP00000437798
MGIIRFLLLYCPTNILTVCVLERQIFDFLGYQWAPILANFVHIIIVILGLFGTIQYRPRYITGYAVWLVLWVTWNVFVICFYLEAGDLSKETDLILTFNISMHRSWWMENGPGCTVTSVTPAPDWAPEDHRYITVSGCLLEYQYIEVAHSSLQIVLALAGFIYACYVVKCITEEEDSFDFIGGFDSYGYQGPQKTSHLQLQPMYMSK

SEQ ID NO: 32378 - protein, 197 aa, Homo sapiens
  REGION 1..197: note = ENSP00000429073
MGCCTGRCSLICLCALQLVSALERQIFDFLGFQWAPILGNFLHIIVVILGLFGTIQYRPRYIMVYTVWTALWVTWNVFIICFYLEVGGLSKDTDLMTFNISVHRSWWREHGPGCVRRVLPPSAHGMMDDYTYVSVTGCIVDFQYLEVIHSAVQILLSLVGFVYACYVISISMEEEDTYSCDLQVCKHLFIQMLQIIE

SEQ ID NO: 32379 - protein, 101 aa, Homo sapiens
  REGION 1..101: note = ENSP00000429393
MGCCTGRCSLICLCALQLVSALERQIFDFLGFQWAPILGNFLHIIVVILGLFGTIQYRPRYIMVDTDLMTFNISVHRSWWREHGPGCVRRVLPPSAHGMMD

SEQ ID NO: 32380 - protein, 119 aa, Homo sapiens
  REGION 1..119: note = ENSP00000359336
MVYTLWAAVWVTWNVFIICFYLEVGGLLKDSELLTFSLSRHRSWWRERWPGCLHEEVPAVGLGAPHGQALVSGAGCALEPSYVEALHSCLQILIALLGFVCGCQVVSVFTEEEDSCLRK

SEQ ID NO: 32381 - protein, 208 aa, Homo sapiens
  REGION 1..208: note = ENSP00000359340
MGSCSGRCALVVLCAFQLVAALERQVFDFLGYQWAPILANFVHIIIVILGLFGTIQYRLRYVMVYTLWAAVWVTWNVFIICFYLEVGGLLKDSELLTFSLSRHRSWWRERWPGCLHEEVPAVGLGAPHGQALVSGAGCALEPSYVEALHSCLQILIALLGFVCGCQVVSVFTEEEDSFDFIGGFDPFPLYHVNEKPSSLLSKQVYLPA

SEQ ID NO: 32382 - protein, 146 aa, Homo sapiens
  REGION 1..146: note = ENSP00000359330
MVYTLWAAVWVTWNVFIICFYLEVGGLLKDSELLTFSLSRHRSWWRERWPGCLHEEVPAVGLGAPHGQALVSGAGCALEPSYVEALHSCLQILIALLGFVCGCQVVSVFTEEEDSFDFIGGFDPFPLYHVNEKPSSLLSKQVYLPA

SEQ ID NO: 32383 - protein, 167 aa, Homo sapiens
  REGION 1..167: note = ENSP00000359341
VWVTWNVFIICFYLEVGGLLKDSELLTFSLSRHRSWWRERWPGCLHEEVPAVGLGAPHGQALVSGAGCALEPSYVEALHSCLQILIANPRWLAPQRRRNPWWLLAGVGWGQSFWALSVAARWSACLRRKRTALISLVDLIHFLSTMSMKSHPVSCPSRCTSPQARPH

SEQ ID NO: 32384 - protein, 470 aa, Homo sapiens
  REGION 1..470: note = ENSP00000268459
MGKLHSKPAAVCKRRESPEGDSFAVSAAWARKGIEEWIGRQRCPGGVSGPRQLRLAGTIGRSTRELVGDVLRDTLSEEEEDDFRLEVALPPEKTDGLGSGDEKKMERVSEPCPGSKKQLKFEELQCDVSMEEDSRQEWTFTLYDFDNNGKVTREDITSLLHTIYEVVDSSVNHSPTSSKMLRVKLTVAPDGSQSKRSVLVNQADLQSARPRAETKPTEDLRSWEKKQRAPLRFQGDSRLEQSGCYHHCVDENIERRNHYLDLAGIENYTSQFGPGSPSVAQKSELPPRTSNPTRSRSHEPEAIHIPHRKPQGVDPASFHFLDTPIAKVSELQQRLRGTQDGSKHFVRSPKAQGKSVGVGHVARGARNKPPLGPAIPAVSPSAHLAASPALLPSLAPLGHKKHKHRAKESQQGCRGLQAPLASGGPVLGREHLRELPALVVYESQAGQPVQRHEHHHHHEHHHHYHHFYQT

SEQ ID NO: 32385 - protein, 46 aa, Homo sapiens
  REGION 1..46: note = ENSP00000468081
MGKSCKVVVCGQASVGKTSILEQLLYGNHVVGSEMIETQEDIYVGS

SEQ ID NO: 32386 - protein, 191 aa, Homo sapiens
  REGION 1..191: note = ENSP00000303580
MGKSCKVVVCGQASVGKTSILEQLLYGNHVVGSEMIETQEDIYVGSIETDRGVREQVRFYDTRGLRDGAELPRHCFSCTDGYVLVYSTDSRESFQRVELLKKEIDKSKDKKEVTIVVLGNKCDLQEQRRVDPDVAQHWAKSEKVKLWEVSVADRRSLLEPFVYLASKMTQPQSKSAFPLSRKNKGSGSLDG

SEQ ID NO: 32387 - protein, 191 aa, Homo sapiens; identical to SEQ ID NO: 32386
  REGION 1..191: note = ENSP00000377463

SEQ ID NO: 32388 - protein, 140 aa, Homo sapiens
  REGION 1..140: note = ENSP00000468245
MIETQEDIYVGSIETDRGVREQVRFYDTRGLRDGAELPRHCFSCTDGYVLVYSTDSRESFQRVELLKKEIDKSKDKKEVTIVVLGNKCDLQEQRRVDPDVAQHWAKSEKVKLWEVSVADRRSLLEPFVYLASKMTQPQSK

SEQ ID NO: 32389 - protein, 58 aa, Homo sapiens
  REGION 1..58: note = ENSP00000466135
MGKSCKVVVCGQASVGKTSILEQLLYGNHVVGSEMIETQEDIYVGSIETDRGVREQHR

SEQ ID NO: 32390 - protein, 97 aa, Homo sapiens
  REGION 1..97: note = ENSP00000465633
MGKSCKVVVCGQASVGKTSILEQLLYGNHVVGSEMIETQEDIYVGSIETDRGVREQIAESLFSVWSCSRRRLTNPRTRRRSPSWSLATSVTYRSSGV

SEQ ID NO: 32391 - protein, 191 aa, Homo sapiens; identical to SEQ ID NO: 32386
  REGION 1..191: note = ENSP00000377458

SEQ ID NO: 32392 - protein, 191 aa, Homo sapiens; identical to SEQ ID NO: 32386
  REGION 1..191: note = ENSP00000377459

SEQ ID NO: 32393 - protein, 41 aa, Homo sapiens
  REGION 1..41: note = ENSP00000419929
MGKSCKVVVCGQASVGKTSILEQLLYGNHVVGHHRGPWQQV

SEQ ID NO: 32394 - protein, 42 aa, Homo sapiens
  REGION 1..42: note = ENSP00000465588
MGKSCKVVVCGQASVGKTSILEQLLYGNHVVDSFLILYQVRR

SEQ ID NO: 32395 - protein, 135 aa, Homo sapiens
  REGION 1..135: note = ENSP00000401976
MGKSCKVVVCGQASVGKTSILEQLLYGNHVVGSEMIETQEDIYVGSIETDRGVREQVTIVVLGNKCDLQEQRRVDPDVAQHWAKSEKVKLWEVSVADRRSLLEPFVYLASKMTQPQSKSAFPLSRKNKGSGSLDG

SEQ ID NO: 32396 - protein, 229 aa, Homo sapiens
  REGION 1..229: note = ENSP00000312773
MGKSCKVVVCGQASVGKTSILEQLLYGNHVVGSEMIETQEDIYVGSIETDRGVREQVRFYDTRGLRDGAELPRHCFSCTDGYVLVYSTDSRESFQRVELLKKEIDKSKDKKEGLTLPPRLECSGMITAHCSLNLPRLRWSSCLSPLLRLQVTIVVLGNKCDLQEQRRVDPDVAQHWAKSEKVKLWEVSVADRRSLLEPFVYLASKMTQPQSKSAFPLSRKNKGSGSLDG

SEQ ID NO: 32397 - protein, 690 aa, Homo sapiens
  REGION 1..690: note = ENSP00000360582
MEKILQMAEGIDIGEMPSYDLVLSKPSKGQKRHLSTCDGQNPPKKQAGSKFHARPRFEPVHFVASSSKDERQEDPYGPQTKEVNEQTHFASMPRDIYQDYTQDSFSIQDGNSQYCDSSGFILTKDQPVTANMYFDSGNPAPSTTSQQANSQSTPEPSPSQTFPESVVAEKQYFIEKLTATIWKNLSNPEMTSGSDKINYTYMLTRCIQACKTNPEYIYAPLKEIPPADIPKNKKLLTDGYACEVRCQNIYLTTGYAGSKNGSRDRATELAVKLLQKRIEVRVVRRKFKHTFGEDLVVCQIGMSSYEFPPALKPPEDLVVLGKDASGQPIFNASAKHWTNFVITENANDAIGILNNSASFNKMSIEYKYEMMPNRTWRCRVFLQDHCLAEGYGTKKTSKHAAADEALKILQKTQPTYPSVKSSQCHTGSSPRGSGKKKDIKDLVVYENSSNPVCTLNDTAQFNRMTVEYVYERMTGLRWKCKVILESEVIAEAVGVKKTVKYEAAGEAVKTLKKTQPTVINNLKKGAVEDVISRNEIQGRSAEEAYKQQIKEDNIGNQLLRKMGWTGGGLGKSGEGIREPISVKEQHKREGLGLDVERVNKIAKRDIEQIIRNYARSESHTDLTFSRELTNDERKQIHQIAQKYGLKSKSHGVGHDRYLVVGRKRRKEDLLDQLKQEGQVGHYELVMPQAN

SEQ ID NO: 32398 - protein, 690 aa, Homo sapiens; identical to SEQ ID NO: 32397
  REGION 1..690: note = ENSP00000304803

SEQ ID NO: 32399 - protein, 705 aa, Homo sapiens
  REGION 1..705: note = ENSP00000442308
MGFMLPLIFRYSPRLMEKILQMAEGIDIGEMPSYDLVLSKPSKGQKRHLSTCDGQNPPKKQAGSKFHARPRFEPVHFVASSSKDERQEDPYGPQTKEVNEQTHFASMPRDIYQDYTQDSFSIQDGNSQYCDSSGFILTKDQPVTANMYFDSGNPAPSTTSQQANSQSTPEPSPSQTFPESVVAEKQYFIEKLTATIWKNLSNPEMTSGSDKINYTYMLTRCIQACKTNPEYIYAPLKEIPPADIPKNKKLLTDGYACEVRCQNIYLTTGYAGSKNGSRDRATELAVKLLQKRIEVRVVRRKFKHTFGEDLVVCQIGMSSYEFPPALKPPEDLVVLGKDASGQPIFNASAKHWTNFVITENANDAIGILNNSASFNKMSIEYKYEMMPNRTWRCRVFLQDHCLAEGYGTKKTSKHAAADEALKILQKTQPTYPSVKSSQCHTGSSPRGSGKKKDIKDLVVYENSSNPVCTLNDTAQFNRMTVEYVYERMTGLRWKCKVILESEVIAEAVGVKKTVKYEAAGEAVKTLKKTQPTVINNLKKGAVEDVISRNEIQGRSAEEAYKQQIKEDNIGNQLLRKMGWTGGGLGKSGEGIREPISVKEQHKREGLGLDVERVNKIAKRDIEQIIRNYARSESHTDLTFSRELTNDERKQIHQIAQKYGLKSKSHGVGHDRYLVVGRKRRKEDLLDQLKQEGQVGHYELVMPQAN

SEQ ID NO: 32400 - protein, 273 aa, Homo sapiens
  REGION 1..273: note = ENSP00000366347
MSLTNTKTGFSVKDILDLPDTNDEEGSVAEGPEEENEGPEPAKRAGPLGQGALDAVQSLPLKNPFYDSSDNPYTRWLASTEGLQYSLHGLAAGAPPQDSSSKSPEPSADESPDNDKETPGGGGDAGKKRKRRVLFSKAQTYELERRFRQQRYLSAPEREHLASLIRLTPTQVKIWFQNHRYKMKRARAEKGMEVTPLPSPRRVAVPVLVRDGKPCHALKAQDLAAATFQAGIPFSAYSAQSLQHMQYNAQYSSASTPQYPTAHPLVQAQQWTW

SEQ ID NO: 32401 - protein, 513 aa, Homo sapiens
  REGION 1..513: note = ENSP00000379196
MWLRLGPPSLSLSPKPTVGRSLCLTLWFLSLALRASTQAPAPTVNTHFGKLRGARVPLPSEILGPVDQYLGVPYAAPPIGEKRFLPPEPPPSWSGIRNATHFPPVCPQNIHTAVPEVMLPVWFTANLDIVATYIQEPNEDCLYLNVYVPTEDDIRDSGAKPVMVYIHGGSYMEGTGNMIDGSILASYGNVIVITLNYRVGVLGFLSTGDQAAKGNYGLLDQIQALRWVSENIAFFGGDPRRITVFGSGIGASCVSLLTLSHHSEGLFQRAIIQSGSALSSWAVNYQPVKYTSLLADKVGCNVLDTVDMVDCLRQKSAKELVEQDIQPARYHVAFGPVIDGDVIPDDPEILMEQGEFLNYDIMLGVNQGEGLKFVEGVVDPEDGVSGTDFDYSVSNFVDNLYGYPEGKDTLRETIKFMYTDWADRDNPETRRKTLVALFTDHQWVEPSVVTADLHARYGSPTYFYAFYHHCQSLMKPAWSDAAHGDEVPYVFGVPMVGPTDLFPCNFSKNDVML

SEQ ID NO: 32402 - protein, 828 aa, Homo sapiens
  REGION 1..828: note = ENSP00000363163
MWLRLGPPSLSLSPKPTVGRSLCLTLWFLSLALRASTQAPAPTVNTHFGKLRGARVPLPSEILGPVDQYLGVPYAAPPIGEKRFLPPEPPPSWSGIRNATHFPPVCPQNIHTAVPEVMLPVWFTANLDIVATYIQEPNEDCLYLNVYVPTEDGSGAKKQGEDLADNDGDEDEDIRDSGAKPVMVYIHGGSYMEGTGNMIDGSILASYGNVIVITLNYRVGVLGFLSTGDQAAKGNYGLLDQIQALRWVSENIAFFGGDPRRITVFGSGIGASCVSLLTLSHHSEGLFQRAIIQSGSALSSWAVNYQPVKYTSLLADKVGCNVLDTVDMVDCLRQKSAKELVEQDIQPARYHVAFGPVIDGDVIPDDPEILMEQGEFLNYDIMLGVNQGEGLKFVEGVVDPEDGVSGTDFDYSVSNFVDNLYGYPEGKDTLRETIKFMYTDWADRDNPETRRKTLVALFTDHQWVEPSVVTADLHARYGSPTYFYAFYHHCQSLMKPAWSDAAHGDEVPYVFGVPMVGPTDLFPCNFSKNDVMLSAVVMTYWTNFAKTGDPNKPVPQDTKFIHTKANRFEEVAWSKYNPRDQLYLHIGLKPRVRDHYRATKVAFWKHLVPHLYNLHDMFHYTSTTTKVPPPDTTHSSHITRRPNGKTWSTKRPAISPAYSNENAQGSWNGDQDAGPLLVENPRDYSTELSVTIAVGASLLFLNVLAFAALYYRKDKRRQEPLRQPSPQRGAGAPELGAAPEEELAALQLGPTHHECEAGPPHDTLRLTALPDYTLTLRRSPDDIPLMTPNTITMIPNSLVGLQTLHPYNTFAAGFNSTGLPHSHSTTRV

SEQ ID NO: 32403 - protein, 848 aa, Homo sapiens
  REGION 1..848: note = ENSP00000351591
MWLRLGPPSLSLSPKPTVGRSLCLTLWFLSLALRASTQAPAPTVNTHFGKLRGARVPLPSEILGPVDQYLGVPYAAPPIGEKRFLPPEPPPSWSGIRNATHFPPVCPQNIHTAVPEVMLPVWFTANLDIVATYIQEPNEDCLYLNVYVPTEDVKRISKECARKPNKKICRKGGSGAKKQGEDLADNDGDEDEDIRDSGAKPVMVYIHGGSYMEGTGNMIDGSILASYGNVIVITLNYRVGVLGFLSTGDQAAKGNYGLLDQIQALRWVSENIAFFGGDPRRITVFGSGIGASCVSLLTLSHHSEGLFQRAIIQSGSALSSWAVNYQPVKYTSLLADKVGCNVLDTVDMVDCLRQKSAKELVEQDIQPARYHVAFGPVIDGDVIPDDPEILMEQGEFLNYDIMLGVNQGEGLKFVEGVVDPEDGVSGTDFDYSVSNFVDNLYGYPEGKDTLRETIKFMYTDWADRDNPETRRKTLVALFTDHQWVEPSVVTADLHARYGSPTYFYAFYHHCQSLMKPAWSDAAHGDEVPYVFGVPMVGPTDLFPCNFSKNDVMLSAVVMTYWTNFAKTGDPNKPVPQDTKFIHTKANRFEEVAWSKYNPRDQLYLHIGLKPRVRDHYRATKVAFWKHLVPHLYNLHDMFHYTSTTTKVPPPDTTHSSHITRRPNGKTWSTKRPAISPAYSNENAQGSWNGDQDAGPLLVENPRDYSTELSVTIAVGASLLFLNVLAFAALYYRKDKRRQEPLRQPSPQRGAGAPELGAAPEEELAALQLGPTHHECEAGPPHDTLRLTALPDYTLTLRRSPDDIPLMTPNTITMIPNSLVGLQTLHPYNTFAAGFNSTGLPHSHSTTRV

SEQ ID NO: 32404 - protein, 808 aa, Homo sapiens
  REGION 1..808: note = ENSP00000445298
MWLRLGPPSLSLSPKPTVGRSLCLTLWFLSLALRASTQAPAPTVNTHFGKLRGARVPLPSEILGPVDQYLGVPYAAPPIGEKRFLPPEPPPSWSGIRNATHFPPVCPQNIHTAVPEVMLPVWFTANLDIVATYIQEPNEDCLYLNVYVPTEDDIRDSGAKPVMVYIHGGSYMEGTGNMIDGSILASYGNVIVITLNYRVGVLGFLSTGDQAAKGNYGLLDQIQALRWVSENIAFFGGDPRRITVFGSGIGASCVSLLTLSHHSEGLFQRAIIQSGSALSSWAVNYQPVKYTSLLADKVGCNVLDTVDMVDCLRQKSAKELVEQDIQPARYHVAFGPVIDGDVIPDDPEILMEQGEFLNYDIMLGVNQGEGLKFVEGVVDPEDGVSGTDFDYSVSNFVDNLYGYPEGKDTLRETIKFMYTDWADRDNPETRRKTLVALFTDHQWVEPSVVTADLHARYGSPTYFYAFYHHCQSLMKPAWSDAAHGDEVPYVFGVPMVGPTDLFPCNFSKNDVMLSAVVMTYWTNFAKTGDPNKPVPQDTKFIHTKANRFEEVAWSKYNPRDQLYLHIGLKPRVRDHYRATKVAFWKHLVPHLYNLHDMFHYTSTTTKVPPPDTTHSSHITRRPNGKTWSTKRPAISPAYSNENAQGSWNGDQDAGPLLVENPRDYSTELSVTIAVGASLLFLNVLAFAALYYRKDKRRQEPLRQPSPQRGAGAPELGAAPEEELAALQLGPTHHECEAGPPHDTLRLTALPDYTLTLRRSPDDIPLMTPNTITMIPNSLVGLQTLHPYNTFAAGFNSTGLPHSHSTTRV

SEQ ID NO: 32405 - protein, 351 aa, Homo sapiens
  REGION 1..351: note = ENSP00000479877
MLPVWFTANLDIVATYIQEPNEDCLYLNVYVPTEDGSGAKKQGEDLADNDGDEDEDIRDSGAKPVMVYIHGGSYMEGTGNMIDGSILASYGNVIVITLNYRVGVLGFLSTGDQAAKGNYGLLDQIQALRWVSENIAFFGGDPRRITVFGSGIGASCVSLLTLSHHSEGLFQRAIIQSGSALSSWAVNYQPVKYTSLLADKVGCNVLDTVDMVDCLRQKSAKELVEQDIQPARYHVAFGPVIDGDVIPDDPEILMEQGEFLNYDIMLGVNQGEGLKFVEGVVDPEDGVSGTDFDYSVSILWTICMAILRVRTPCERPSSSCIQTGQTVTTLRPAVKHWWHSSLTTSGWSPQW

SEQ ID NO: 32406 - protein, 648 aa, Homo sapiens
  REGION 1..648: note = ENSP00000372325
MVYIHGGSYMEGTGNMIDGSILASYGNVIVITINYRLGILGFLSTGDQAAKGNYGLLDQIQALRWIEENVGAFGGDPKRVTIFGSGAGASCVSLLTLSHYSEGLFQKAIIQSGTALSSWAVNYQPAKYTRILADKVGCNMLDTTDMVECLKNKNYKELIQQTITPATYHIAFGPVIDGDVIPDDPQILMEQGEFLNYDIMLGVNQGEGLKFVDGIVDNEDGVTPNDFDFSVSNFVDNLYGYPEGKDTLRETIKFMYTDWADKENPETRRKTLVALFTDHQWVAPAVATADLHAQYGSPTYFYAFYHHCQSEMKPSWADSAHGDEVPYVFGIPMIGPTELFSCNFSKNDVMLSAVVMTYWTNFAKTGDPNQPVPQDTKFIHTKPNRFEEVAWSKYNPKDQLYLHIGLKPRVRDHYRATKVAFWLELVPHLHNLNEIFQYVSTTTKVPPPDMTSFPYGTRRSPAKIWPTTKRPAITPANNPKHSKDPHKTGPEDTTVLIETKRDYSTELSVTIAVGASLLFLNILAFAALYYKKDKRRHETHRHPSPQRNTTNDITHIQNEEIMSLQMKQLEHDHECESLQAHDTLRLTCPPDYTLTLRRSPDDIPFMTPNTITMIPNTLMGMQPLHTFKTFSGGQNSTNLPHGHSTTRV

SEQ ID NO: 32407 - protein, 816 aa, Homo sapiens
  REGION 1..816: note = ENSP00000348169
MLRPQGLLWLPLLFTSVCVMLNSNVLLWITALAIKFTLIDSQAQYPVVNTNYGKIQGLRTPLPSEILGPVEQYLGVPYASPPTGERRFQPPESPSSWTGIRNATQFSAVCPQHLDERFLLHDMLPIWFTTSLDTLMTYVQDQNEDCLYLNIYVPMEDDIHEQNSKKPVMVYIHGGSYMEGTGNMIDGSILASYGNVIVITINYRLGILGFLSTGDQAAKGNYGLLDQIQALRWIEENVGAFGGDPKRVTIFGSGAGASCVSLLTLSHYSEGLFQKAIIQSGTALSSWAVNYQPAKYTRILADKVGCNMLDTTDMVECLKNKNYKELIQQTITPATYHIAFGPVIDGDVIPDDPQILMEQGEFLNYDIMLGVNQGEGLKFVDGIVDNEDGVTPNDFDFSVSNFVDNLYGYPEGKDTLRETIKFMYTDWADKENPETRRKTLVALFTDHQWVAPAVATADLHAQYGSPTYFYAFYHHCQSEMKPSWADSAHGDEVPYVFGIPMIGPTELFSCNFSKNDVMLSAVVMTYWTNFAKTGDPNQPVPQDTKFIHTKPNRFEEVAWSKYNPKDQLYLHIGLKPRVRDHYRATKVAFWLELVPHLHNLNEIFQYVSTTTKVPPPDMTSFPYGTRRSPAKIWPTTKRPAITPANNPKHSKDPHKTGPEDTTVLIETKRDYSTELSVTIAVGASLLFLNILAFAALYYKKDKRRHETHRHPSPQRNTTNDITHIQNEEIMSLQMKQLEHDHECESLQAHDTLRLTCPPDYTLTLRRSPDDIPFMTPNTITMIPNTLMGMQPLHTFKTFSGGQNSTNLPHGHSTTRV

SEQ ID NO: 32408 - protein, 873 aa, Homo sapiens
  REGION 1..873: note = ENSP00000372320
MLRPQGLLWLPLLFTSVCVMLNSNVLLWITALAIKFTLIDSQAQYPVVNTNYGKIQGLRTPLPSEILGPVEQYLGVPYASPPTGERRFQPPESPSSWTGIRNATQFSAVCPQHLDERFLLHDMLPIWFTTSLDTLMTYVQDQNEDCLYLNIYVPMEDGTNIKRNADDITSNDHGEDKDIHEQNSKKPVMVYIHGGSYMEGTGNMIDGSILASYGNVIVITINYRLGILAQNTLAHGNCKHRCQLHLQAPRDCKSAYPFRNEDEIRGFLSTGDQAAKGNYGLLDQIQALRWIEENVGAFGGDPKRVTIFGSGAGASCVSLLTLSHYSEGLFQKAIIQSGTALSSWAVNYQPAKYTRILADKVGCNMLDTTDMVECLKNKNYKELIQQTITPATYHIAFGPVIDGDVIPDDPQILMEQGEFLNYDIMLGVNQGEGLKFVDGIVDNEDGVTPNDFDFSVSNFVDNLYGYPEGKDTLRETIKFMYTDWADKENPETRRKTLVALFTDHQWVAPAVATADLHAQYGSPTYFYAFYHHCQSEMKPSWADSAHGDEVPYVFGIPMIGPTELFSCNFSKNDVMLSAVVMTYWTNFAKTGDPNQPVPQDTKFIHTKPNRFEEVAWSKYNPKDQLYLHIGLKPRVRDHYRATKVAFWLELVPHLHNLNEIFQYVSTTTKVPPPDMTSFPYGTRRSPAKIWPTTKRPAITPANNPKHSKDPHKTGPEDTTVLIETKRDYSTELSVTIAVGASLLFLNILAFAALYYKKDKRRHETHRHPSPQRNTTNDITHIQNEEIMSLQMKQLEHDHECESLQAHDTLRLTCPPDYTLTLRRSPDDIPFMTPNTITMIPNTLMGMQPLHTFKTFSGGQNSTNLPHGHSTTRV

SEQ ID NO: 32409 - protein, 816 aa, Homo sapiens; identical to SEQ ID NO: 32407
  REGION 1..816: note = ENSP00000342535

SEQ ID NO: 32410 - protein, 236 aa, Homo sapiens
  REGION 1..236: note = ENSP00000412638
  VARIANT 1: note = Any amino acid
XNSNVLLWITALAIKFTLIDSQAQYPVVNTNYGKIQGLRTPLPSEILGPVEQYLGVPYASPPTGERRFQPPESPSSWTGIRNATQFSAVCPQHLDERFLLHDMLPIWFTTSLDTLMTYVQDQNEDCLYLNIYVPMEDGTNIKRNADDITSNDHGEDKDIHEQNSKKPVMVYIHGGSYMEGTGNMIDGSILASYGNVIVITINYRLGILGMQEARLCGSSKMFNYFKSPFTNLINFF

SEQ ID NO: 32411 - protein, 704 aa, Homo sapiens
  REGION 1..704: note = ENSP00000370372
MIARCLLAVRSLRRVGGSRILLRMTLGREVMSPLQAMSSYTVAGRNVLRWDLSPEQIKTRTEELIVQTKQVYDAVGMLGIEEVTYENCLQALADVEVKYIVERTMLDFPQHVSSDKEVRAASTEADKRLSRFDIEMSMRGDIFERIVHLQETCDLGKIKPEARRYLEKSIKMGKRNGLHLPEQVQNEIKSMKKRMSELCIDFNKNLNEDDTFLVFSKAELGALPDDFIDSLEKTDDDKYKITLKYPHYFPVMKKCCIPETRRRMEMAFNTRCKEENTIILQQLLPLRTKVAKLLGYSTHADFVLEMNTAKSTSRVTAFLDDLSQKLKPLGEAEREFILNLKKKECKDRGFEYDGKINAWDLYYYMTQTEELKYSIDQEFLKEYFPIEVVTEGLLNTYQELLGLSFEQMTDAHVWNKSVTLYTVKDKATGEVLGQFYLDLYPREGKYNHAACFGLQPGCLLPDGSRMMAVAALVVNFSQPVAGRPSLLRHDEVRTYFHEFGHVMHQICAQTDFARFSGTNVETDFVEVPSQMLENWVWDVDSLRRLSKHYKDGSPIADDLLEKLVASRLVNTGLLTLRQIVLSKVDQSLHTNTSLDAASEYAKYCSEILGVAATPGTNMPATFGHLAGGYDGQYYGYLWSEVFSMDMFYSCFKKEGIMNPEVGMKYRNLILKPGGSLDGMDMLHNFLKREPNQKAFLMSRGLHAP

SEQ ID NO: 32412 - protein, 600 aa, Homo sapiens
  REGION 1..600: note = ENSP00000423214
MLDFPQHVSSDKEVRAASTEADKRLSRFDIEMSMRGDIFERIVHLQETCDLGKIKPEARRYLEKSIKMGKRNGLHLPEQVQNEIKSMKKRMSELCIDFNKNLNEDDTFLVFSKAELGALPDDFIDSLEKTDDDKYKITLKYPHYFPVMKKCCIPETRRRMEMAFNTRCKEENTIILQQLLPLRTKVAKLLGYSTHADFVLEMNTAKSTSRVTAFLDDLSQKLKPLGEAEREFILNLKKKECKDRGFEYDGKINAWDLYYYMTQTEELKYSIDQEFLKEYFPIEVVTEGLLNTYQELLGLSFEQMTDAHVWNKSVTLYTVKDKATGEVLGQFYLDLYPREGKYNHAACFGLQPGCLLPDGSRMMAVAALVVNFSQPVAGRPSLLRHDEVRTYFHEFGHVMHQICAQTDFARFSGTNVETDFVEVPSQMLENWVWDVDSLRRLSKHYKDGSPIADDLLEKLVASRLVNTGLLTLRQIVLSKVDQSLHTNTSLDAASEYAKYCSEILGVAATPGTNMPATFGHLAGGYDGQYYGYLWSEVFSMDMFYSCFKKEGIMNPEVGMKYRNLILKPGGSLDGMDMLHNFLKREPNQKAFLMSRGLHAP

SEQ ID NO: 32413 - protein, 48 aa, Homo sapiens
  REGION 1..48: note = ENSP00000422822
MIARCLLAVRSLRRWSLALLPRLVCSGVILAHCSLCLPGSSDSPASAT

SEQ ID NO: 32414 - protein, 414 aa, Homo sapiens
  REGION 1..414: note = ENSP00000427417
KEENTIILQQLLPLRTKVAKLLGYSTHADFVLEMNTAKSTSRVTAFLDDLSQKLKPLGEAEREFILNLKKKECKDRGFEYDGKINAWDLYYYMTQTEELKYSIDQEFLKEYFPIEVVTEGLLNTYQELLGLSFEQMTDAHVWNKSVTLYTVKDKATGEVLGQFYLDLYPREGKYNHAACFGLQPGCLLPDGSRMMAVAALVVNFSQPVAGRPSLLRHDETDFARFSGTNVETDFVEVPSQMLENWVWDVDSLRRLSKHYKDGSPIADDLLEKLVASRLVNTGLLTLRQIVLSKVDQSLHTNTSLDAASEYAKYCSEILGVAATPGTNMPATFGHLAGGYDGQYYGYLWSEVFSMDMFYSCFKKEGIMNPEVGMKYRNLILKPGGSLDGMDMLHNFLKREPNQKAFLMSRGLHAP

SEQ ID NO: 32415 - protein, 283 aa, Homo sapiens
  REGION 1..283: note = ENSP00000426959
GLSFEQMTDAHVWNKSVTLYTVKDKATGEVLGQFYLDLYPREGKYNHAACFGLQPGCLLPDGSRMMAVAALVVNFSQPVAGRPSLLRHDEVRTYFHEFGHVMHQICAQTDFARFSGTNVETDFVEVPSQMLENWVWDVDSLRRLSKHYKDGSPIADDLLEKLVASRLVNTGLLTLRQIVLSKVDQSLHTNTSLDAASEYAKYCSEILGVAATPGTNMPATFGHLAGGYDGQYYGYLWSEVFSMDMFYSCFKKEGIMNPETSKHHGISLIMFHYSKGEVDLVPF

SEQ ID NO: 32416 - protein, 199 aa, Homo sapiens
  REGION 1..199: note = ENSP00000427670
MANLLKTVVTGCSCPLLSNLGSCKGLRVKKDFLRTFYTHQELWCKAPVKPGIPYKQLTVGVPKEIFQNEKRVALSPAGVQNLVKQGFNVVVESGAGEASKFSDDHYRVAGAQIQGAKEVLASDLVVKVRAPMVNPTLGVHEADLLKTSGTLISFIYPAQNPELLNKLSQRKTTVLAMDQVPRVTIAQGYDALSSMANIA

SEQ ID NO: 32417 - protein, 217 aa, Homo sapiens
  REGION 1..217: note = ENSP00000421886
MANLLKTVVTGCSCPLLSNLGSCKGLRVKKDFLRTFYTHQELWCKAPVKPGIPYKQLTVGVPKEIFQNEKRVALSPAGVQNLVKQGFNVVVESGAGEASKFSDDHYRVAGAQIQGAKEVLASDLVVKVRAPMVNPTLGVHEADLLKTSGTLISFIYPAQNPELLNKLSQRKTTVLAMDQVPRVTIAQGYDALSSMANIAGYKAVVLAANHFGRFFTG

SEQ ID NO: 32418 - protein, 1086 aa, Homo sapiens
  REGION 1..1086: note = ENSP00000264663
MANLLKTVVTGCSCPLLSNLGSCKGLRVKKDFLRTFYTHQELWCKAPVKPGIPYKQLTVGVPKEIFQNEKRVALSPAGVQNLVKQGFNVVVESGAGEASKFSDDHYRVAGAQIQGAKEVLASDLVVKVRAPMVNPTLGVHEADLLKTSGTLISFIYPAQNPELLNKLSQRKTTVLAMDQVPRVTIAQGYDALSSMANIAGYKAVVLAANHFGRFFTGQITAAGKVPPAKILIVGGGVAGLASAGAAKSMGAIVRGFDTRAAALEQFKSLGAEPLEVDLKESGEGQGGYAKEMSKEFIEAEMKLFAQQCKEVDILISTALIPGKKAPVLFNKEMIESMKEGSVVVDLAAEAGGNFETTKPGELYIHKGITHIGYTDLPSRMATQASTLYSNNITKLLKAISPDKDNFYFDVKDDFDFGTMGHVIRGTVVMKDGKVIFPAPTPKNIPQGAPVKQKTVAELEAEKAATITPFRKTMSTASAYTAGLTGILGLGIAAPNLAFSQMVTTFGLAGIVGYHTVWGVTPALHSPLMSVTNAISGLTAVGGLALMGGHLYPSTTSQGLAALAAFISSVNIAGGFLVTQRMLDMFKRPTDPPEYNYLYLLPAGTFVGGYLAALYSGYNIEQIMYLGSGLCCVGALAGLSTQGTARLGNALGMIGVAGGLAATLGVLKPGPELLAQMSGAMALGGTIGLTIAKRIQISDLPQLVAAFHSLVGLAAVLTCIAEYIIEYPHFATDAAANLTKIVAYLGTYIGGVTFSGSLIAYGKLQGLLKSAPLLLPGRHLLNAGLLAASVGGIIPFMVDPSFTTGITCLGSVSALSAVMGVTLTAAIGGADMPVVITVLNSYSGWALCAEGFLLNNNLLTIVGALIGSSGAILSYIMCVAMNRSLANVILGGYGTTSTAGGKPMEISGTHTEINLDNAIDMIREANSIIITPGYGLCAAKAQYPIADLVKMLTEQGKKVRFGIHPVAGRMPGQLNVLLAEAGVPYDIVLEMDEINHDFPDTDLVLVIGANDTVNSAAQEDPNSIIAGMPVLEVWKSKQVIVMKRSLGVGYAAVDNPIFYKPNTAMLLGDAKKTCDALQAKVRESYQK

SEQ ID NO: 32419 - protein, 1086 aa, Homo sapiens; identical to SEQ ID NO: 32418
  REGION 1..1086: note = ENSP00000343873

SEQ ID NO: 32420 - protein, 955 aa, Homo sapiens
  REGION 1..955: note = ENSP00000426343
MVNPTLGVHEADLLKTSGTLISFIYPAQNPELLNKLSQRKTTVLAMDQVPRVTIAQGYDALSSMANIAGYKAVVLAANHFGRFFTGQITAAGKVPPAKILIVGGGVAGLASAGAAKSMGAIVRGFDTRAAALEQFKSLGAEPLEVDLKESGEGQGGYAKEMSKEFIEAEMKLFAQQCKEVDILISTALIPGKKAPVLFNKEMIESMKEGSVVVDLAAEAGGNFETTKPGELYIHKGITHIGYTDLPSRMATQASTLYSNNITKLLKAISPDKDNFYFDVKDDFDFGTMGHVIRGTVVMKDGKVIFPAPTPKNIPQGAPVKQKTVAELEAEKAATITPFRKTMSTASAYTAGLTGILGLGIAAPNLAFSQMVTTFGLAGIVGYHTVWGVTPALHSPLMSVTNAISGLTAVGGLALMGGHLYPSTTSQGLAALAAFISSVNIAGGFLVTQRMLDMFKRPTDPPEYNYLYLLPAGTFVGGYLAALYSGYNIEQIMYLGSGLCCVGALAGLSTQGTARLGNALGMIGVAGGLAATLGVLKPGPELLAQMSGAMALGGTIGLTIAKRIQISDLPQLVAAFHSLVGLAAVLTCIAEYIIEYPHFATDAAANLTKIVAYLGTYIGGVTFSGSLIAYGKLQGLLKSAPLLLPGRHLLNAGLLAASVGGIIPFMVDPSFTTGITCLGSVSALSAVMGVTLTAAIGGADMPVVITVLNSYSGWALCAEGFLLNNNLLTIVGALIGSSGAILSYIMCVAMNRSLANVILGGYGTTSTAGGKPMEISGTHTEINLDNAIDMIREANSIIITPGYGLCAAKAQYPIADLVKMLTEQGKKVRFGIHPVAGRMPGQLNVLLAEAGVPYDIVLEMDEINHDFPDTDLVLVIGANDTVNSAAQEDPNSIIAGMPVLEVWKSKQVIVMKRSLGVGYAAVDNPIFYKPNTAMLLGDAKKTCDALQAKVRESYQK

SEQ ID NO: 32421 - protein, 58 aa, Homo sapiens
  REGION 1..58: note = ENSP00000425542
MVNPTLGVHEADLLKTSGTLISFIYPAQNPELLNKLSQRKTTVLAMDQVPRVTIAQGY

SEQ ID NO: 32422 - protein, 57 aa, Homo sapiens
  REGION 1..57: note = ENSP00000421674
DGKVIFPAPTPKNIPQGAPVKQKTVAELEAEKAATITPFRKTMSTASAYTADEDREG

SEQ ID NO: 32423 - protein, 11 aa, Homo sapiens
  REGION 1..11: note = ENSP00000424782
  VARIANT 1: note = Any amino acid
XLTEQGKKVRY

SEQ ID NO: 32424 - protein, 174 aa, Homo sapiens
  REGION 1..174: note = ENSP00000457732
MGNAQERPSETIDRERKRLVETLQADSGLLLDALLARGVLTGPEYEALDALPDAERRVRRLLLLVQGKGEAACQELLRCAQRTAGAPDPAWDWQHVGPGYRDRSYDPPCPGHWTPEAPGSGTTCPGLPRASDPDEAGGPEGSEAVQSGTPEEPEPELEAEASKEAEPEPEPEPE

SEQ ID NO: 32425 - protein, 138 aa, Homo sapiens
  REGION 1..138: note = ENSP00000454256
MGNAQERPSETIDRERKRLVETLQADSGLLLDALLARGVLTGPEYEALDALPDAERRVRRLLLLVQGKGEAACQELLRCAQRTAGAPDPAWDWQHVGPGYRDRSYDPPCPGHWTPEAPGSGTTCPGLPRASDPDEAGG

SEQ ID NO: 32426 - protein, 206 aa, Homo sapiens
  REGION 1..206: note = ENSP00000457720
MGNAQERPSETIDRERKRLVETLQADSGLLLDALLARGVLTGPEYEALDALPDAERRVRRLLLLVQGKGEAACQELLRCAQRTAGAPDPAWDWQHVGPGYRDRSYDPPCPGHWTPEAPGSGTTCPGLPRASDPDEAGGPEGSEAVQSGTPEEPEPELEAEASKEAEPEPEPEPELEPEAEAEPEPELEPEPDPEPEPDFEERDESE

SEQ ID NO: 32427 - protein, 270 aa, Homo sapiens
  REGION 1..270: note = ENSP00000457243
MPVLGKAGEERRATADAWGQKEEPEEETGQSVWRGRRTPSSPCWPPGPVLAEPSGGWDRAPTMGNAQERPSETIDRERKRLVETLQADSGLLLDALLARGVLTGPEYEALDALPDAERRVRRLLLLVQGKGEAACQELLRCAQRTAGAPDPAWDWQHVGPGYRDRSYDPPCPGHWTPEAPGSGTTCPGLPRASDPDEAGGPEGSEAVQSGTPEEPEPELEAEASKEAEPEPEPEPELEPEAEAEPEPELEPEPDPEPEPDFEERDESEDS

SEQ ID NO: 32428 - protein, 216 aa, Homo sapiens
  REGION 1..216: note = ENSP00000455808
  VARIANT 1: note = Any amino acid
XGQSVWRGRRTPSSPCWPPGPVLAEPSGGWDRAPTMGNAQERPSETIDRERKRLVETLQADSGLLLDALLARGVLTGPEYEALDALPDAERRATGTAAMTLHAQATGRRRHPARGPHAPGCPELQTLTRPGALRAPRRCNPGPRRSQSQSWKLRPLKRLNRSRSQSQSWNPRLKQNQSRNWSQNRTQSPSPTSRKGTSPKIPEGQSSDRRCPAHAG

SEQ ID NO: 32429 - protein, 131 aa, Homo sapiens
  REGION 1..131: note = ENSP00000463698
  VARIANT 1: note = Any amino acid
XSSPCWPPGPVLAEPSGGWDRGYRDRSYDPPCPGHWTPEAPGSGTTCPGLPRASDPDEAGGPEGSEAVQSGTPEEPEPELEAEASKEAEPEPEPEPELEPEAEAEPEPELEPEPDPEPEPDFEERDESEDS

SEQ ID NO: 32430 - protein, 219 aa, Homo sapiens
  REGION 1..219: note = ENSP00000454598
MGNAQERPSETIDRERKRLVETLQADSGLLLDALLARGVLTGPEYEALDALPDAERRVRRLLLLVQGKGEAACQELLRCAQRTAGAPDPAWDWQHATGTAAMTLHAQATGRRRHPARGPHAPGCPELQTLTRPGALRAPRRCNPGPRRSQSQSWKLRPLKRLNRSRSQSQSWNPRLKQNQSRNWSQNRTQSPSPTSRKGTSPKIPEGQSSDRRCPAHAG

SEQ ID NO: 32431 - protein, 106 aa, Homo sapiens
  REGION 1..106: note = ENSP00000463685
  VARIANT 1: note = Any amino acid
XSWNPRLKQNQSRNWSQNRTQSPSPTSRKGTSPKVFLKARALTGGAPPMLDRTWDAAGAESDATKARSSPVPLEVNKLRRVGRDLGSLHDSGCLPRNLGWVPLSPR

SEQ ID NO: 32432 - protein, 208 aa, Homo sapiens
  REGION 1..208: note = ENSP00000268605
MGNAQERPSETIDRERKRLVETLQADSGLLLDALLARGVLTGPEYEALDALPDAERRVRRLLLLVQGKGEAACQELLRCAQRTAGAPDPAWDWQHVGPGYRDRSYDPPCPGHWTPEAPGSGTTCPGLPRASDPDEAGGPEGSEAVQSGTPEEPEPELEAEASKEAEPEPEPEPELEPEAEAEPEPELEPEPDPEPEPDFEERDESEDS

SEQ ID NO: 32433 - protein, 1434 aa, Homo sapiens
  REGION 1..1434: note = ENSP00000320758
MEDHMFGVQQIQPNVISVRLFKRKVGGLGFLVKERVSKPPVIISDLIRGGAAEQSGLIQAGDIILAVNGRPLVDLSYDSALEVLRGIASETHVVLILRGPEGFTTHLETTFTGDGTPKTIRVTQPLGPPTKAVDLSHQPPAGKEQPLAVDGASGPGNGPQHAYDDGQEAGSLPHANGLAPRPPGQDPAKKATRVSLQGRGENNELLKEIEPVLSLLTSGSRGVKGGAPAKAEMKDMGIQVDRDLDGKSHKPLPLGVENDRVFNDLWGKGNVPVVLNNPYSEKEQPPTSGKQSPTKNGSPSKCPRFLKVKNWETEVVLTDTLHLKSTLETGCTEYICMGSIMHPSQHARRPEDVRTKGQLFPLAKEFIDQYYSSIKRFGSKAHMERLEEVNKEIDTTSTYQLKDTELIYGAKHAWRNASRCVGRIQWSKLQVFDARDCTTAHGMFNYICNHVKYATNKGNLRSAITIFPQRTDGKHDFRVWNSQLIRYAGYKQPDGSTLGDPANVQFTEICIQQGWKPPRGRFDVLPLLLQANGNDPELFQIPPELVLEVPIRHPKFEWFKDLGLKWYGLPAVSNMLLEIGGLEFSACPFSGWYMGTEIGVRDYCDNSRYNILEEVAKKMNLDMRKTSSLWKDQALVEINIAVLYSFQSDKVTIVDHHSATESFIKHMENEYRCRGGCPADWVWIVPPMSGSITPVFHQEMLNYRLTPSFEYQPDPWNTHVWKGTNGTPTKRRAIGFKKLAEAVKFSAKLMGQAMAKRVKATILYATETGKSQAYAKTLCEIFKHAFDAKVMSMEEYDIVHLEHETLVLVVTSTFGNGDPPENGEKFGCALMEMRHPNSVQEERKSYKVRFNSVSSYSDSQKSSGDGPDLRDNFESAGPLANVRFSVFGLGSRAYPHFCAFGHAVDTLLEELGGERILKMREGDELCGQEEAFRTWAKKVFKAACDVFCVGDDVNIEKANNSLISNDRSWKRNKFRLTFVAEAPELTQGLSNVHKKRVSAARLLSRQNLQSPKSSRSTIFVRLHTNGSQELQYQPGDHLGVFPGNHEDLVNALIERLEDAPPVNQMVKVELLEERNTALGVISNWTDELRLPPCTIFQAFKYYLDITTPPTPLQLQQFASLATSEKEKQRLLVLSKGLQEYEEWKWGKNPTIVEVLEEFPSIQMPATLLLTQLSLLQPRYYSISSSPDMYPDEVHLTVAIVSYRTRDGEGPIHHGVCSSWLNRIQADELVPCFVRGAPSFHLPRNPQVPCILVGPGTGIAPFRSFWQQRQFDIQHKGMNPCPMVLVFGCRQSKIDHIYREETLQAKNKGVFRELYTAYSREPDKPKKYVQDILQEQLAESVYRALKEQGGHIYVCGDVTMAADVLKAIQRIMTQQGKLSAEDAGVFISRMRDDNRYHEDIFGVTLRTYEVTNRLRSESIAFIEESKKDTDEVFSS

SEQ ID NO: 32434 - protein, 1468 aa, Homo sapiens
  REGION 1..1468: note = ENSP00000337459
MEDHMFGVQQIQPNVISVRLFKRKVGGLGFLVKERVSKPPVIISDLIRGGAAEQSGLIQAGDIILAVNGRPLVDLSYDSALEVLRGIASETHVVLILRGPEGFTTHLETTFTGDGTPKTIRVTQPLGPPTKAVDLSHQPPAGKEQPLAVDGASGPGNGPQHAYDDGQEAGSLPHANGLAPRPPGQDPAKKATRVSLQGRGENNELLKEIEPVLSLLTSGSRGVKGGAPAKAEMKDMGIQVDRDLDGKSHKPLPLGVENDRVFNDLWGKGNVPVVLNNPYSEKEQPPTSGKQSPTKNGSPSKCPRFLKVKNWETEVVLTDTLHLKSTLETGCTEYICMGSIMHPSQHARRPEDVRTKGQLFPLAKEFIDQYYSSIKRFGSKAHMERLEEVNKEIDTTSTYQLKDTELIYGAKHAWRNASRCVGRIQWSKLQVFDARDCTTAHGMFNYICNHVKYATNKGNLRSAITIFPQRTDGKHDFRVWNSQLIRYAGYKQPDGSTLGDPANVQFTEICIQQGWKPPRGRFDVLPLLLQANGNDPELFQIPPELVLEVPIRHPKFEWFKDLGLKWYGLPAVSNMLLEIGGLEFSACPFSGWYMGTEIGVRDYCDNSRYNILEEVAKKMNLDMRKTSSLWKDQALVEINIAVLYSFQSDKVTIVDHHSATESFIKHMENEYRCRGGCPADWVWIVPPMSGSITPVFHQEMLNYRLTPSFEYQPDPWNTHVWKGTNGTPTKRRAIGFKKLAEAVKFSAKLMGQAMAKRVKATILYATETGKSQAYAKTLCEIFKHAFDAKVMSMEEYDIVHLEHETLVLVVTSTFGNGDPPENGEKFGCALMEMRHPNSVQEERKYPEPLRFFPRKGPPLPNGDTEVHGLAAARDSQHRSYKVRFNSVSSYSDSQKSSGDGPDLRDNFESAGPLANVRFSVFGLGSRAYPHFCAFGHAVDTLLEELGGERILKMREGDELCGQEEAFRTWAKKVFKAACDVFCVGDDVNIEKANNSLISNDRSWKRNKFRLTFVAEAPELTQGLSNVHKKRVSAARLLSRQNLQSPKSSRSTIFVRLHTNGSQELQYQPGDHLGVFPGNHEDLVNALIERLEDAPPVNQMVKVELLEERNTALGVISNWTDELRLPPCTIFQAFKYYLDITTPPTPLQLQQFASLATSEKEKQRLLVLSKGLQEYEEWKWGKNPTIVEVLEEFPSIQMPATLLLTQLSLLQPRYYSISSSPDMYPDEVHLTVAIVSYRTRDGEGPIHHGVCSSWLNRIQADELVPCFVRGAPSFHLPRNPQVPCILVGPGTGIAPFRSFWQQRQFDIQHKGMNPCPMVLVFGCRQSKIDHIYREETLQAKNKGVFRELYTAYSREPDKPKKYVQDILQEQLAESVYRALKEQGGHIYVCGDVTMAADVLKAIQRIMTQQGKLSAEDAGVFISRMRDDNRYHEDIFGVTLRTYEVTNRLRSESIAFIEESKKDTDEVFSS

SEQ ID NO: 32435 - protein, 1468 aa, Homo sapiens; identical to SEQ ID NO: 32434
  REGION 1..1468: note = ENSP00000477999

SEQ ID NO: 32436 - protein, 1433 aa, Homo sapiens [sequence omitted]

SEQ ID NO: 32437 - protein, 2555 aa, Homo sapiens
  REGION 1..2555: note = ENSP00000277541
MPPLLAPLLCLALLPALAARGPRCSQPGETCLNGGKCEAANGTEACVCGGAFVGPRCQDPNPCLSTPCKNAGTCHVVDRRGVADYACSCALGFSGPLCLTPLDNACLTNPCRNGGTCDLLTLTEYKCRCPPGWSGKSCQQADPCASNPCANGGQCLPFEASYICHCPPSFHGPTCRQDVNECGQKPGLCRHGGTCHNEVGSYRCVCRATHTGPNCERPYVPCSPSPCQNGGTCRPTGDVTHECACLPGFTGQNCEENIDDCPGNNCKNGGACVDGVNTYNCRCPPEWTGQYCTEDVDECQLMPNACQNGGTCHNTHGGYNCVCVNGWTGEDCSENIDDCASAACFHGATCHDRVASFYCECPHGRTGLLCHLNDACISNPCNEGSNCDTNPVNGKAICTCPSGYTGPACSQDVDECSLGANPCEHAGKCINTLGSFECQCLQGYTGPRCEIDVNECVSNPCQNDATCLDQIGEFQCICMPGYEGVHCEVNTDECASSPCLHNGRCLDKINEFQCECPTGFTGHLCQYDVDECASTPCKNGAKCLDGPNTYTCVCTEGYTGTHCEVDIDECDPDPCHYGSCKDGVATFTCLCRPGYTGHHCETNINECSSQPCRHGGTCQDRDNAYLCFCLKGTTGPNCEINLDDCASSPCDSGTCLDKIDGYECACEPGYTGSMCNINIDECAGNPCHNGGTCEDGINGFTCRCPEGYHDPTCLSEVNECNSNPCVHGACRDSLNGYKCDCDPGWSGTNCDINNNECESNPCVNGGTCKDMTSGYVCTCREGFSGPNCQTNINECASNPCLNQGTCIDDVAGYKCNCLLPYTGATCEVVLAPCAPSPCRNGGECRQSEDYESFSCVCPTGWQGQTCEVDINECVLSPCRHGASCQNTHGGYRCHCQAGYSGRNCETDIDDCRPNPCHNGGSCTDGINTAFCDCLPGFRGTFCEEDINECASDPCRNGANCTDCVDSYTCTCPAGFSGIHCENNTPDCTESSCFNGGTCVDGINSFTCLCPPGFTGSYCQHDVNECDSQPCLHGGTCQDGCGSYRCTCPQGYTGPNCQNLVHWCDSSPCKNGGKCWQTHTQYRCECPSGWTGLYCDVPSVSCEVAAQRQGVDVARLCQHGGLCVDAGNTHHCRCQAGYTGSYCEDLVDECSPSPCQNGATCTDYLGGYSCKCVAGYHGVNCSEEIDECLSHPCQNGGTCLDLPNTYKCSCPRGTQGVHCEINVDDCNPPVDPVSRSPKCFNNGTCVDQVGGYSCTCPPGFVGERCEGDVNECLSNPCDARGTQNCVQRVNDFHCECRAGHTGRRCESVINGCKGKPCKNGGTCAVASNTARGFICKCPAGFEGATCENDARTCGSLRCLNGGTCISGPRSPTCLCLGPFTGPECQFPASSPCLGGNPCYNQGTCEPTSESPFYRCLCPAKFNGLLCHILDYSFGGGAGRDIPPPLIEEACELPECQEDAGNKVCSLQCNNHACGWDGGDCSLNFNDPWKNCTQSLQCWKYFSDGHCDSQCNSAGCLFDGFDCQRAEGQCNPLYDQYCKDHFSDGHCDQGCNSAECEWDGLDCAEHVPERLAAGTLVVVVLMPPEQLRNSSFHFLRELSRVLHTNVVFKRDAHGQQMIFPYYGREEELRKHPIKRAAEGWAAPDALLGQVKASLLPGGSEGGRRRRELDPMDVRGSIVYLEIDNRQCVQASSQCFQSATDVAAFLGALASLGSLNIPYKIEAVQSETVEPPPPAQLHFMYVAAAAFVLLFFVGCGVLLSRKRRRQHGQLWFPEGFKVSEASKKKRREPLGEDSVGLKPLKNASDGALMDDNQNEWGDEDLETKKFRFEEPVVLPDLDDQTDHRQWTQQHLDAADLRMSAMAPTPPQGEVDADCMDVNVRGPDGFTPLMIASCSGGGLETGNSEEEEDAPAVISDFIYQGASLHNQTDRTGETALHLAARYSRSDAAKRLLEASADANIQDNMGRTPLHAAVSADAQGVFQILIRNRATDLDARMHDGTTPLILAARLAVEGMLEDLINSHADVNAVDDLGKSALHWAAAVNNVDAAVVLLKNGANKDMQNNREETPLFLAAREGSYETAKVLLDHFANRDITDHMDRLPRDIAQERMHHDIVRLLDEYNLVRSPQLHGAPLGGTPTLSPPLCSPNGYLGSLKPGVQGKKVRKPSSKGLACGSKEAKDLKARRKKSQDGKGCLLDSSGMLSPVDSLESPHGYLSDVASPPLLPSPFQQSPSVPLNHLPGMPDTHLGIGHLNVAAKPEMAALGGGGRLAFETGPPRLSHLPVASGTSTVLGSSSGGALNFTVGGSTSLNGQCEWLSRLQSGMVPNQYNPLRGSVAPGPLSTQAPSLQHGMVGPLHSSLAASALSQMMSYQGLPSTRLATQPHLVQTQQVQPQNLQMQQQNLQPANIQQQQSLQPPPPPPQPHLGVSSAASGHLGRSFLSGEPSQADVQPLGPSSLAVHTILPQESPALPTSLPSSLVPPVTAAQFLTPPSQHSYSSPVDNTPSHQLQVPEHPFLTPSPESPDQWSSSSPHSNVSDWSEGVSSPPTSMQSQIARIPEAFK

SEQ ID NO: 32438 - protein, 2321 aa, Homo sapiens
  REGION 1..2321: note = ENSP00000263388
MGPGARGRRRRRRPMSPPPPPPPVRALPLLLLLAGPGAAAPPCLDGSPCANGGRCTQLPSREAACLCPPGWVGERCQLEDPCHSGPCAGRGVCQSSVVAGTARFSCRCPRGFRGPDCSLPDPCLSSPCAHGARCSVGPDGRFLCSCPPGYQGRSCRSDVDECRVGEPCRHGGTCLNTPGSFRCQCPAGYTGPLCENPAVPCAPSPCRNGGTCRQSGDLTYDCACLPGFEGQNCEVNVDDCPGHRCLNGGTCVDGVNTYNCQCPPEWTGQFCTEDVDECQLQPNACHNGGTCFNTLGGHSCVCVNGWTGESCSQNIDDCATAVCFHGATCHDRVASFYCACPMGKTGLLCHLDDACVSNPCHEDAICDTNPVNGRAICTCPPGFTGGACDQDVDECSIGANPCEHLGRCVNTQGSFLCQCGRGYTGPRCETDVNECLSGPCRNQATCLDRIGQFTCICMAGFTGTYCEVDIDECQSSPCVNGGVCKDRVNGFSCTCPSGFSGSTCQLDVDECASTPCRNGAKCVDQPDGYECRCAEGFEGTLCDRNVDDCSPDPCHHGRCVDGIASFSCACAPGYTGTRCESQVDECRSQPCRHGGKCLDLVDKYLCRCPSGTTGVNCEVNIDDCASNPCTFGVCRDGINRYDCVCQPGFTGPLCNVEINECASSPCGEGGSCVDGENGFRCLCPPGSLPPLCLPPSHPCAHEPCSHGICYDAPGGFRCVCEPGWSGPRCSQSLARDACESQPCRAGGTCSSDGMGFHCTCPPGVQGRQCELLSPCTPNPCEHGGRCESAPGQLPVCSCPQGWQGPRCQQDVDECAGPAPCGPHGICTNLAGSFSCTCHGGYTGPSCDQDINDCDPNPCLNGGSCQDGVGSFSCSCLPGFAGPRCARDVDECLSNPCGPGTCTDHVASFTCTCPPGYGGFHCEQDLPDCSPSSCFNGGTCVDGVNSFSCLCRPGYTGAHCQHEADPCLSRPCLHGGVCSAAHPGFRCTCLESFTGPQCQTLVDWCSRQPCQNGGRCVQTGAYCLCPPGWSGRLCDIRSLPCREAAAQIGVRLEQLCQAGGQCVDEDSSHYCVCPEGRTGSHCEQEVDPCLAQPCQHGGTCRGYMGGYMCECLPGYNGDNCEDDVDECASQPCQHGGSCIDLVARYLCSCPPGTLGVLCEINEDDCGPGPPLDSGPRCLHNGTCVDLVGGFRCTCPPGYTGLRCEADINECRSGACHAAHTRDCLQDPGGGFRCLCHAGFSGPRCQTVLSPCESQPCQHGGQCRPSPGPGGGLTFTCHCAQPFWGPRCERVARSCRELQCPVGVPCQQTPRGPRCACPPGLSGPSCRSFPGSPPGASNASCAAAPCLHGGSCRPAPLAPFFRCACAQGWTGPRCEAPAAAPEVSEEPRCPRAACQAKRGDQRCDRECNSPGCGWDGGDCSLSVGDPWRQCEALQCWRLFNNSRCDPACSSPACLYDNFDCHAGGRERTCNPVYEKYCADHFADGRCDQGCNTEECGWDGLDCASEVPALLARGVLVLTVLLPPEELLRSSADFLQRLSAILRTSLRFRLDAHGQAMVFPYHRPSPGSEPRARRELAPEVIGSVVMLEIDNRLCLQSPENDHCFPDAQSAADYLGALSAVERLDFPYPLRDVRGEPLEPPEPSVPLLPLLVAGAVLLLVILVLGVMVARRKREHSTLWFPEGFSLHKDVASGHKGRREPVGQDALGMKNMAKGESLMGEVATDWMDTECPEAKRLKVEEPGMGAEEAVDCRQWTQHHLVAADIRVAPAMALTPPQGDADADGMDVNVRGPDGFTPLMLASFCGGALEPMPTEEDEADDTSASIISDLICQGAQLGARTDRTGETALHLAARYARADAAKRLLDAGADTNAQDHSGRTPLHTAVTADAQGVFQILIRNRSTDLDARMADGSTALILAARLAVEGMVEELIASHADVNAVDELGKSALHWAAAVNNVEATLALLKNGANKDMQDSKEETPLFLAAREGSYEAAKLLLDHFANREITDHLDRLPRDVAQERLHQDIVRLLDQPSGPRSPPGPHGLGPLLCPPGAFLPGLKAAQSGSKKSRRPPGKAGLGPQGPRGRGKKLTLACPGPLADSSVTLSPVDSLDSPRPFGGPPASPGGFPLEGPYAAATATAVSLAQLGGPGRAGLGRQPPGGCVLSLGLLNPVAVPLDWARLPPPAPPGPSFLLPLAPGPQLLNPGTPVSPQERPPPYLAVPGHGEEYPAAGAHSSPPKARFLRVPSEHPYLTPSPESPEHWASPSPPSLSDWSESTPSPATATGAMATTTGALPAQPLPLSVPSSLAQAQTQLGPQPEVTPKRQVLA

SEQ ID NO: 32439 - protein, 117 aa, Homo sapiens
  REGION 1..117: note = ENSP00000470661
  VARIANT 1: note = Any amino acid
XLMGEVATDWMDTECPEAKRLKVEEPGMGAEEAVDCRQWTQHHLVAADIRVAPAMALTPPQGDADADGMDVNVRGPDSHPKPLYRLGCPHGRWLNGTDPGGPPGSRGHGGRAHRQPC

SEQ ID NO: 32440 - protein, 177 aa, Homo sapiens
  REGION 1..177: note = ENSP00000468879
  VARIANT 1: note = Any amino acid
XQLGARTDRTGETALHLAARYARADAAKRLLDAGADTNAQDHSGRTPLHTAVTADAQGVFQILIRNRSTDLDARMADGSTALILAARLAVEGMVEELIASHADVNAVDELGKSALHWAAAVNNVEATLALLKNGANKDMQDSKVSPSPWSTGCQQWHSAIAIQPGQQSETLSKNKTK

SEQ ID NO: 32441 - protein, 1286 aa, Homo sapiens
  REGION 1..1286: note = ENSP00000473138
GPGARGRRRRRRPMSPPPPPPPVRALPLLLLLAGPGAAAPPCLDGSPCANGGRCTQLPSREAACLCPPGWVGERCQLEDPCHSGPCAGRGVCQSSVVAGTARFSCRCPRGFRGPDCSLPDPCLSSPCAHGARCSVGPDGRFLCSCPPGYQGRSCRSDVDECRVGEPCRHGGTCLNTPGSFRCQCPAGYTGPLCENPAVPCAPSPCRNGGTCRQSGDLTYDCACLPGFEGQNCEVNVDDCPGHRCLNGGTCVDGVNTYNCQCPPEWTGQFCTEDVDECQLQPNACHNGGTCFNTLGGHSCVCVNGWTGESCSQNIDDCATAVCFHGATCHDRVASFYCACPMGKTGLLCHLDDACVSNPCHEDAICDTNPVNGRAICTCPPGFTGGACDQDVDECSIGANPCEHLGRCVNTQGSFLCQCGRGYTGPRCETDVNECLSGPCRNQATCLDRIGQFTCICMAGFTGTYCEVDIDECQSSPCVNGGVCKDRVNGFSCTCPSGFSGSTCQLDVDECASTPCRNGAKCVDQPDGYECRCAEGFEGTLCDRNVDDCSPDPCHHGRCVDGIASFSCACAPGYTGTRCESQVDECRSQPCRHGGKCLDLVDKYLCRCPSGTTGVNCEVNIDDCASNPCTFGVCRDGINRYDCVCQPGFTGPLCNVEINECASSPCGEGGSCVDGENGFRCLCPPGSLPPLCLPPSHPCAHEPCSHGICYDAPGGFRCVCEPGWSGPRCSQSLARDACESQPCRAGGTCSSDGMGFHCTCPPGVQGRQCELLSPCTPNPCEHGGRCESAPGQLPVCSCPQGWQDPCLNGGSCQDGVGSFSCSCLPGFAGPRCARDVDECLSNPCGPGTCTDHVASFTCTCPPGYGGFHCEQDLPDCSPSSCFNGGTCVDGVNSFSCLCRPGYTGAHCQHEADPCLSRPCLHGGVCSAAHPGFRCTCLESFTGPQCQTLVDWCSRQPCQNGGRCVQTGAYCLCPPGWSGRLCDIRSLPCREAAAQIGVRLEQLCQAGGQCVDEDSSHYCVCPEGRTGSHCEQEVDPCLAQPCQHGGTCRGYMGGYMCECLPGYNGDNCEDDVDECASQPCQHGGSCIDLVARYLCSCPPGTLGVLCEINEDDCGPGPPLDSGPRCLHNGTCVDLVGGFRCTCPPGYTGLRCEADINECRSGACHAAHTRDCLQDPGGGFRCLCHAGFSGPRCQTVLSPCESQPCQHGGQCRPSPGPGGGLTFTCHCAQPFWGPRCERVARSCRELQCPVGVPCQQTPRGPRCACPPGLSGPSCRSFPGSPPGASNASC

SEQ ID NO: 32442 - protein, 802 aa, Homo sapiens
  REGION 1..802: note = ENSP00000311196
MYRSTKGASKARRDQINAEIRNLKELLPLAEADKVRLSYLHIMSLACIYTRKGVFFAGGTPLAGPTGLLSAQELEDIVAALPGFLLVFTAEGKLLYLSESVSEHLGHSMVDLVAQGDSIYDIIDPADHLTVRQQLTLPSALDTDRLFRCRFNTSKSLRRQSAGNKLVLIRGRFHAHPPGAYWAGNPVFTAFCAPLEPRPRPGPGPGPGPASLFLAMFQSRHAKDLALLDISESVLIYLGFERSELLCKSWYGLLHPEDLAHASAQHYRLLAESGDIQAEMVVRLQAKTGGWAWIYCLLYSEGPEGPITANNYPISDMEAWSLRQQLNSEDTQAAYVLGTPTMLPSFPENILSQEECSSTNPLFTAALGAPRSTSFPSAPELSVVSASEELPRPSKELDFSYLTFPSGPEPSLQAELSKDLVCTPPYTPHQPGGCAFLFSLHEPFQTHLPTPSSTLQEQLTPSTATFSDQLTPSSATFPDPLTSPLQGQLTETSVRSYEDQLTPCTSTFPDQLLPSTATFPEPLGSPAHEQLTPPSTAFQAHLDSPSQTFPEQLSPNPTKTYFAQEGCSFLYEKLPPSPSSPGNGDCTLLALAQLRGPLSVDVPLVPEGLLTPEASPVKQSFFHYSEKEQNEIDRLIQQISQLAQGMDRPFSAEAGTGGLEPLGGLEPLDSNLSLSGAGPPVLSLDLKPWKCQELDFLADPDNMFLEETPVEDIFMDLSTPDPSEEWGSGDPEAEGPGGAPSPCNNLSPEDHSFLEDLATYETAFETGVSAFPYDGFTDELHQLQSQVQDSFHEDGSGGEPTF

SEQ ID NO: 32443 - protein, 234 aa, Homo sapiens
  REGION 1..234: note = ENSP00000433135
MYRSTKGASKARRDQINAEIRNLKELLPLAEADKVRLSYLHIMSLACIYTRKGVFFAGGTPLAGPTGLLSAQELEDIVAALPGFLLVFTAEGKLLYLSESVSEHLGHSMVDLVAQGDSIYDIIDPADHLTVRQQLTLPSALDTDRLFRCRFNTSKSLRRQSAGNKLVLIRGRFHAHPPGAYWAGNPVFTAFCAPLEPRPRPGPGPGPGPASLFLAMFQSRHAKDLALLDISESG

SEQ ID NO: 32444 - protein, 234 aa, Homo sapiens; identical to SEQ ID NO: 32443
  REGION 1..234: note = ENSP00000492526

SEQ ID NO: 32445 - protein, 240 aa, Homo sapiens
  REGION 1..240: note = ENSP00000356526
MAFPKKKLQGLVAATITPMTENGEINFSVIGQYVDYLVKEQGVKNIFVNGTTGEGLSLSVSERRQVAEEWVTKGKDKLDQVIIHVGALSLKESQELAQHAAEIGADGIAVIAPFFLKPWTKDILINFLKEVAAAAPALPFYYYHIPALTGVKIRAEELLDGILDKIPTFQGLKFSDTDLLDFGQCVDQNRQQQFAFLFGVDEFCIQRFINFVVKLENSKLKVSKNQRTLPLGTTNFPFLH

SEQ ID NO: 32446 - protein, 320 aa, Homo sapiens
  REGION 1..320: note = ENSP00000356524
MAFPKKKLQGLVAATITPMTENGEINFSVIGQYVDYLVKEQGVKNIFVNGTTGEGLSLSVSERRQVAEEWVTKGKDKLDQVIIHVGALSLKESQELAQHAAEIGADGIAVIAPFFLKPWTKDILINFLKEVAAAAPALPFYYYHIPALTGVKIRAEELLDGILDKIPTFQGLKFSDTDLLDFGQCVDQNRQQQFAFLFGVDEQLLSALVMGATGAVGSTYNYLGKKTNQMLEAFEQKDFSLALNYQFCIQRFINFVVKLGFGVSQTKAIMTLVSGIPMGPPRLPLQKASREFTDSAEAKLKSLDFLSFTDLKDGNLEAGS

SEQ ID NO: 32447 - protein, 240 aa, Homo sapiens; identical to SEQ ID NO: 32445
  REGION 1..240: note = ENSP00000356523

SEQ ID NO: 32448 - protein, 320 aa, Homo sapiens; identical to SEQ ID NO: 32446
  REGION 1..320: note = ENSP00000258317

SEQ ID NO: 32449 - protein, 301 aa, Homo sapiens
  REGION 1..301: note = ENSP00000356525
MSRAPGILASWRRAPSLSVQKGSQTARHTCHPEVPLGNCFLPVYKASPLTVTRLWAERLDQVIIHVGALSLKESQELAQHAAEIGADGIAVIAPFFLKPWTKDILINFLKEVAAAAPALPFYYYHIPALTGVKIRAEELLDGILDKIPTFQGLKFSDTDLLDFGQCVDQNRQQQFAFLFGVDEQLLSALVMGATGAVGSTYNYLGKKTNQMLEAFEQKDFSLALNYQFCIQRFINFVVKLGFGVSQTKAIMTLVSGIPMGPPRLPLQKASREFTDSAEAKLKSLDFLSFTDLKDGNLEAGS

SEQ ID NO: 32450 - protein, 230 aa, Homo sapiens
  REGION 1..230: note = ENSP00000482415
MAFPKKKLQGLVAATITPMTENGEINFSVIGQYVDYLVKEQGVKNIFVNGTTGEGLSLSVSERRQVAEEWVTKGKDKLDQVIIHVGALSLKESQELAQHAAEIGADGIAVIAPFFLKPWTKDILINFLKEVAAAAPALPFYYYHIPALTGVKIRAEELLDGILDKIPTFQGLKFSDTDLLDFGQCVDQNRQQQFAFLFGVDEQLLSALVMGATGAVGSFVSRDLSTLLSN

SEQ ID NO: 32451 - protein, 1061 aa, Homo sapiens
  REGION 1..1061: note = ENSP00000357669
MPGPRRPAGSRLRLLLLLLLPPLLLLLRGSHAGNLTVAVVLPLANTSYPWSWARVGPAVELALAQVKARPDLLPGWTVRTVLGSSENALGVCSDTAAPLAAVDLKWEHNPAVFLGPGCVYAAAPVGRFTAHWRVPLLTAGAPALGFGVKDEYALTTRAGPSYAKLGDFVAALHRRLGWERQALMLYAYRPGDEEHCFFLVEGLFMRVRDRLNITVDHLEFAEDDLSHYTRLLRTMPRKGRVIYICSSPDAFRTLMLLALEAGLCGEDYVFFHLDIFGQSLQGGQGPAPRRPWERGDGQDVSARQAFQAAKIITYKDPDNPEYLEFLKQLKHLAYEQFNFTMEDGLVNTIPASFHDGLLLYIQAVTETLAHGGTVTDGENITQRMWNRSFQGVTGYLKIDSSGDRETDFSLWDMDPENGAFRVVLNYNGTSQELVAVSGRKLNWPLGYPPPDIPKCGFDNEDPACNQDHLSTLEVLALVGSLSLLGILIVSFFIYRKMQLEKELASELWRVRWEDVEPSSLERHLRSAGSRLTLSGRGSNYGSLLTTEGQFQVFAKTAYYKGNLVAVKRVNRKRIELTRKVLFELKHMRDVQNEHLTRFVGACTDPPNICILTEYCPRGSLQDILENESITLDWMFRYSLTNDIVKGMLFLHNGAICSHGNLKSSNCVVDGRFVLKITDYGLESFRDLDPEQGHTVYAKKLWTAPELLRMASPPVRGSQAGDVYSFGIILQEIALRSGVFHVEGLDLSPKEIIERVTRGEQPPFRPSLALQSHLEELGLLMQRCWAEDPQERPPFQQIRLTLRKFNRENSSNILDNLLSRMEQYANNLEELVEERTQAYLEEKRKAEALLYQILPHSVAEQLKRGETVQAEAFDSVTIYFSDIVGFTALSAESTPMQVVTLLNDLYTCFDAVIDNFDVYKVETIGDAYMVVSGLPVRNGRLHACEVARMALALLDAVRSFRIRHRPQEQLRLRIGIHTGPVCAGVVGLKMPRYCLFGDTVNTASRMESNGEALKIHLSSETKAVLEEFGGFELELRGDVEMKGKGKVRTYWLLGERGSSTRG

SEQ ID NO: 32452 - protein, 252 aa, Homo sapiens
  REGION 1..252: note = ENSP00000425325
MAEGCAVYGTWPWGGMFQLFRPSALAGLCSIGLVVIMCASSDTIRSIMLVAHRHGMTSGDYAFFNIELFNSSSYGDGSWKRGDKHDFEAKQAYSSLQTVTLLRTVKPEFEKFSMEVKSSVEKQGLNMEDYVNMFVEGFHDAILLYVLALHEVLRAGYSKKDGGKIIQQTWNRTFEGIAGQVSIDANGDRYGDFSVIAMTDVEAGTQEVIGDYFGKEGRFEMRPNVKYPWGPLKLRIDENRIVEHTNSSPCKS

SEQ ID NO: 32453 - protein, 325 aa, Homo sapiens
  REGION 1..325: note = ENSP00000388408
MEPSALGPWSLFPDLAPRDQEGQVLAPRRCFRRECGQNEKVVIMCASSDTIRSIMLVAHRHGMTSGDYAFFNIELFNSSSYGDGSWKRGDKHDFEAKQAYSSLQTVTLLRTVKPEFEKFSMEVKSSVEKQGLNMEDYVNMFVEGFHDAILLYVLALHEVLRAGYSKKDGGKIIQQTWNRTFEGIAGQVSIDANGDRYGDFSVIAMTDVEAGTQEVIGDYFGKEGRFEMRPNVKYPWGPLKLRIDENRIVEHTNSSPCKSSGGLEESAVTGIVVGALLGAGLLMAFYFFRKKYRITIERRTQQEESNLGKHRELREDSIRSHFSVA

SEQ ID NO: 32454 - protein, 541 aa, Homo sapiens
  REGION 1..541: note = ENSP00000265074
MPSLLVLTFSPCVLLGWALLAGGTGGGGVGGGGGGAGIGGGRQEREALPPQKIEVLVLLPQDDSYLFSLTRVRPAIEYALRSVEGNGTGRRLLPPGTRFQVAYEDSDCGNRALFSLVDRVAAARGAKPDLILGPVCEYAAAPVARLASHWDLPMLSAGALAAGFQHKDSEYSHLTRVAPAYAKMGEMMLALFRHHHWSRAALVYSDDKLERNCYFTLEGVHEVFQEEGLHTSIYSFDETKDLDLEDIVRNIQASERVVIMCASSDTIRSIMLVAHRHGMTSGDYAFFNIELFNSSSYGDGSWKRGDKHDFEAKQAYSSLQTVTLLRTVKPEFEKFSMEVKSSVEKQGLNMEDYVNMFVEGFHDAILLYVLALHEVLRAGYSKKDGGKIIQQTWNRTFEGIAGQVSIDANGDRYGDFSVIAMTDVEAGTQEVIGDYFGKEGRFEMRPNVKYPWGPLKLRIDENRIVEHTNSSPCKSSGGLEESAVTGIVVGALLGAGLLMAFYFFRKKYRITIERRTQQEESNLGKHRELREDSIRSHFSVA

SEQ ID NO: 32455 - protein, 540 aa, Homo sapiens
  REGION 1..540: note = ENSP00000398028
MPSLLVLTFSPCVLLGWALLAGGTGGGGVGGGGGGAGIGGGRQEREALPPQKIEVLVLLPQDDSYLFSLTRVRPAIEYALRSVEGNGTGRRLLPPGTRFQVAYEDSDCGNRALFSLVDRVAAARGAKPDLILGPVCEYAAAPVARLASHWDLPMLSAGALAAGFQHKDSEYSHLTRVAPAYAKMGEMMLALFRHHHWSRAALVYSDDKLERNCYFTLEGVHEVFQEEGLHTSIYSFDETKDLDLEDIVRNIQASERVVIMCASSDTIRSIMLVAHRHGMTSGDYAFFNIELFNSSSYGDGSWKRGDKHDFEAKQAYSSLQTVTLLRTVKPEFEKFSMEVKSSVEKQGLNMEDYVNMFVEGFHDAILLYVLALHEVLRAGYSKKDGGKIIQQTWNRTFEGIAGQVSIDANGDRYGDFSVIAMTDVEAGTQEVIGDYFGKEGRFEMRPNVKYPWGPLKLRIDENRIVEHTNSSPCKSCGLEESAVTGIVVGALLGAGLLMAFYFFRKKYRITIERRTQQEESNLGKHRELREDSIRSHFSVA

SEQ ID NO: 32456 - protein, 88 aa, Homo sapiens
  REGION 1..88: note = ENSP00000423730
  VARIANT 1: note = Any amino acid
XEMMLALFRHHHWSRAALVYSDDKLERNCYFTLEGVHEVFQEEGLHTSIYSFDETKDLDLEDIVRNIQASERVLGLICWNPSGRKFSS

SEQ ID NO: 32457 - protein, 324 aa, Homo sapiens
  REGION 1..324: note = ENSP00000318340
MEPSALGPWSLFPDLAPRDQEGQVLAPRRCFRRECGQNEKVVIMCASSDTIRSIMLVAHRHGMTSGDYAFFNIELFNSSSYGDGSWKRGDKHDFEAKQAYSSLQTVTLLRTVKPEFEKFSMEVKSSVEKQGLNMEDYVNMFVEGFHDAILLYVLALHEVLRAGYSKKDGGKIIQQTWNRTFEGIAGQVSIDANGDRYGDFSVIAMTDVEAGTQEVIGDYFGKEGRFEMRPNVKYPWGPLKLRIDENRIVEHTNSSPCKSCGLEESAVTGIVVGALLGAGLLMAFYFFRKKYRITIERRTQQEESNLGKHRELREDSIRSHFSVA

SEQ ID NO: 32458 - protein, 384 aa, Homo sapiens
  REGION 1..384: note = ENSP00000354652
MNSTLFSQVENHSVHSNFSEKNAQLLAFENDDCHLPLAMIFTLALAYGAVIILGVSGNLALIIIILKQKEMRNVTNILIVNLSFSDLLVAIMCLPFTFVYTLMDHWVFGEAMCKLNPFVQCVSITVSIFSLVLIAVERHQLIINPRGWRPNNRHAYVGIAVIWVLAVASSLPFLIYQVMTDEPFQNVTLDAYKDKYVCFDQFPSDSHRLSYTTLLLVLQYFGPLCFIFICYFKIYIRLKRRNNMMDKMRDNKYRSSETKRINIMLLSIVVAFAVCWLPLTIFNTVFDWNHQIIATCNHNLLFLLCHLTAMISTCVNPIFYGFLNKNFQRDLQFFFNFCDFRSRDDDYETIAMSTMHTDVSKTSLKQASPVAFKKINNNDDNEKI

SEQ ID NO: 32459 - protein, 141 aa, Homo sapiens
  REGION 1..141: note = ENSP00000427284
MMDKMRDNKYRSSETKRINIMLLSIVVAFAVCWLPLTIFNTVFDWNHQIIATCNHNLLFLLCHLTAMISTCVNPIFYGFLNKNFQRDLQFFFNFCDFRSRDDDYETIAMSTMHTDVSKTSLKQASPVAFKKINNNDDNEKI

SEQ ID NO: 32460 - protein, 64 aa, Homo sapiens
  REGION 1..64: note = ENSP00000422963
MMDKMRDNKYRSSETKRINIMLLSIVVAFAVCWLPLTIFNTVFDWNHQIIATCNHNLLFLLCHL

SEQ ID NO: 32461 - protein, 99 aa, Homo sapiens
  REGION 1..99: note = ENSP00000421618
MTDEPFQNVTLDAYKDKYVCFDQFPSDSHRLSYTTLLLVLQYFGPLCFIFICYFKIYIRLKRRNNMMDKMRDNKYRSSETKRINIMLLSIVVAFAVCWL

SEQ ID NO: 32462 - protein, 61 aa, Homo sapiens
  REGION 1..61: note = ENSP00000427564
MNSTLFSQVENHSVHSNFSEKNAQLLAFENDDCHLPLAMIFTLALAYGAVIILGVSGNLAL

SEQ ID NO: 32463 - protein, 60 aa, Homo sapiens
  REGION 1..60: note = ENSP00000426099
MNSTLFSQVENHSVHSNFSEKNAQLLAFENDDCHLPLAMIFTLALAYGAVIILGVSGNLA

SEQ ID NO: 32464 - protein, 24 aa, Homo sapiens
  REGION 1..24: note = ENSP00000423878
MNSTLFSQVENHSVHSNFSEKNAQ

SEQ ID NO: 32465 - protein, 984 aa, Homo sapiens
  REGION 1..984: note = ENSP00000341390
METKGYHSLPEGLDMERRWGQVSQAVERSSLGPTERTDENNYMEIVNVSCVSGAIPNNSTQGSSKEKQELLPCLQQDNNRPGILTSDIKTELESKELSATVAESMGLYMDSVRDADYSYEQQNQQGSMSPAKIYQNVEQLVKFYKGNGHRPSTLSCVNTPLRSFMSDSGSSVNGGVMRAVVKSPIMCHEKSPSVCSPLNMTSSVCSPAGINSVSSTTASFGSFPVHSPITQGTPLTCSPNVENRGSRSHSPAHASNVGSPLSSPLSSMKSSISSPPSHCSVKSPVSSPNNVTLRSSVSSPANINNSRCSVSSPSNTNNRSTLSSPAASTVGSICSPVNNAFSYTASGTSAGSSTLRDVVPSPDTQEKGAQEVPFPKTEEVESAISNGVTGQLNIVQYIKPEPDGAFSSSCLGGNSKINSDSSFSVPIKQESTKHSCSGTSFKGNPTVNPFPFMDGSYFSFMDDKDYYSLSGILGPPVPGFDGNCEGSGFPVGIKQEPDDGSYYPEASIPSSAIVGVNSGGQSFHYRIGAQGTISLSRSARDQSFQHLSSFPPVNTLVESWKSHGDLSSRRSDGYPVLEYIPENVSSSTLRSVSTGSSRPSKICLVCGDEASGCHYGVVTCGSCKVFFKRAVEGQHNYLCAGRNDCIIDKIRRKNCPACRLQKCLQAGMNLGARKSKKLGKLKGIHEEQPQQQQPPPPPPPPQSPEEGTTYIAPAKEPSVNTALVPQLSTISRALTPSPVMVLENIEPEIVYAGYDSSKPDTAENLLSTLNRLAGKQMIQVVKWAKVLPGFKNLPLEDQITLIQYSWMCLSSFALSWRSYKHTNSQFLYFAPDLVFNEEKMHQSAMYELCQGMHQISLQFVRLQLTFEEYTIMKVLLLLSTIPKDGLKSQAAFEEMRTNYIKELRKMVTKCPNNSGQSWQRFYQLTKLLDSMHDLVSDLLEFCFYTFRESHALKVEFPAMLVEIISDQLPKVESGNAKPLYFHRK

SEQ ID NO: 32466 - protein, 984 aa, Homo sapiens; identical to SEQ ID NO: 32465
  REGION 1..984: note = ENSP00000350815

SEQ ID NO: 32467 - protein, 867 aa, Homo sapiens
  REGION 1..867: note = ENSP00000423510
METKGYHSLPEGLDMERRWGQVSQAVERSSLGPTERTDENNYMEIVNVSCVSGAIPNNSTQGSSKEKQELLPCLQQDNNRPGILTSDIKTELESKELSATVAESMGLYMDSVRDADYSYEQQNQQGSMSPAKIYQNVEQLVKFYKGNGHRPSTLSCVNTPLRSFMSDSGSSVNGGVMRAVVKSPIMCHEKSPSVCSPLNMTSSVCSPAGINSVSSTTASFGSFPVHSPITQGTPLTCSPNVENRGSRSHSPAHASNVGSPLSSPLSSMKSSISSPPSHCSVKSPVSSPNNVTLRSSVSSPANINNSRCSVSSPSNTNNRSTLSSPAASTVGSICSPVNNAFSYTASGTSAGSSTLRDVVPSPDTQEKGAQEVPFPKTEEVESAISNGVTGQLNIVQYIKPEPDGAFSSSCLGGNSKINSDSSFSVPIKQESTKHSCSGTSFKGNPTVNPFPFMDGSYFSFMDDKDYYSLSGILGPPVPGFDGNCEGSGFPVGIKQEPDDGSYYPEASIPSSAIVGVNSGGQSFHYRIGAQGTISLSRSARDQSFQHLSSFPPVNTLVESWKSHGDLSSRRSDGYPVLEYIPENVSSSTLRSVSTGSSRPSKICLVCGDEASGCHYGVVTCGSCKVFFKRAVEGQHNYLCAGRNDCIIDKIRRKNCPACRLQKCLQAGMNLGGFKNLPLEDQITLIQYSWMCLSSFALSWRSYKHTNSQFLYFAPDLVFNEEKMHQSAMYELCQGMHQISLQFVRLQLTFEEYTIMKVLLLLSTIPKDGLKSQAAFEEMRTNYIKELRKMVTKCPNNSGQSWQRFYQLTKLLDSMHDLVSDLLEFCFYTFRESHALKVEFPAMLVEIISDQLPKVESGNAKPLYFHRK

SEQ ID NO: 32468 - protein, 706 aa, Homo sapiens
  REGION 1..706: note = ENSP00000343907
METKGYHSLPEGLDMERRWGQVSQAVERSSLGPTERTDENNYMEIVNVSCVSGAIPNNSTQGSSKEKQELLPCLQQDNNRPGILTSDIKTELESKELSATVAESMGLYMDSVRDADYSYEQQNQQGSMSPAKIYQNVEQLVKFYKGNGHRPSTLSCVNTPLRSFMSDSGSSVNGGVMRAVVKSPIMCHEKSPSVCSPLNMTSSVCSPAGINSVSSTTASFGSFPVHSPITQGTPLTCSPNVENRGSRSHSPAHASNVGSPLSSPLSSMKSSISSPPSHCSVKSPVSSPNNVTLRSSVSSPANINNSRCSVSSPSNTNNRSTLSSPAASTVGSICSPVNNAFSYTASGTSAGSSTLRDVVPSPDTQEKGAQEVPFPKTEEVESAISNGVTGQLNIVQYIKPEPDGAFSSSCLGGNSKINSDSSFSVPIKQESTKHSCSGTSFKGNPTVNPFPFMDGSYFSFMDDKDYYSLSGILGPPVPGFDGNCEGSGFPVGIKQEPDDGSYYPEASIPSSAIVGVNSGGQSFHYRIGAQGTISLSRSARDQSFQHLSSFPPVNTLVESWKSHGDLSSRRSDGYPVLEYIPENVSSSTLRSVSTGSSRPSKICLVCGDEASGCHYGVVTCGSCKVFFKRAVEGQHNYLCAGRNDCIIDKIRRKNCPACRLQKCLQAGMNLGERRCISLPCMNYARGCTKSAFSSFDCSSPLKNTPS

SEQ ID NO: 32469 - protein, 988 aa, Homo sapiens
  REGION 1..988: note = ENSP00000421481
METKGYHSLPEGLDMERRWGQVSQAVERSSLGPTERTDENNYMEIVNVSCVSGAIPNNSTQGSSKEKQELLPCLQQDNNRPGILTSDIKTELESKELSATVAESMGLYMDSVRDADYSYEQQNQQGSMSPAKIYQNVEQLVKFYKGNGHRPSTLSCVNTPLRSFMSDSGSSVNGGVMRAVVKSPIMCHEKSPSVCSPLNMTSSVCSPAGINSVSSTTASFGSFPVHSPITQGTPLTCSPNVENRGSRSHSPAHASNVGSPLSSPLSSMKSSISSPPSHCSVKSPVSSPNNVTLRSSVSSPANINNSRCSVSSPSNTNNRSTLSSPAASTVGSICSPVNNAFSYTASGTSAGSSTLRDVVPSPDTQEKGAQEVPFPKTEEVESAISNGVTGQLNIVQYIKPEPDGAFSSSCLGGNSKINSDSSFSVPIKQESTKHSCSGTSFKGNPTVNPFPFMDGSYFSFMDDKDYYSLSGILGPPVPGFDGNCEGSGFPVGIKQEPDDGSYYPEASIPSSAIVGVNSGGQSFHYRIGAQGTISLSRSARDQSFQHLSSFPPVNTLVESWKSHGDLSSRRSDGYPVLEYIPENVSSSTLRSVSTGSSRPSKICLVCGDEASGCHYGVVTCGSCKVFFKRAVEGKCSWQHNYLCAGRNDCIIDKIRRKNCPACRLQKCLQAGMNLGARKSKKLGKLKGIHEEQPQQQQPPPPPPPPQSPEEGTTYIAPAKEPSVNTALVPQLSTISRALTPSPVMVLENIEPEIVYAGYDSSKPDTAENLLSTLNRLAGKQMIQVVKWAKVLPGFKNLPLEDQITLIQYSWMCLSSFALSWRSYKHTNSQFLYFAPDLVFNEEKMHQSAMYELCQGMHQISLQFVRLQLTFEEYTIMKVLLLLSTIPKDGLKSQAAFEEMRTNYIKELRKMVTKCPNNSGQSWQRFYQLTKLLDSMHDLVSDLLEFCFYTFRESHALKVEFPAMLVEIISDQLPKVESGNAKPLYFHRK

SEQ ID NO: 32470 - protein, 988 aa, Homo sapiens; identical to SEQ ID NO: 32469
  REGION 1..988: note = ENSP00000486719

SEQ ID NO: 32471 - protein, 119 aa, Homo sapiens
  REGION 1..119: note = ENSP00000456633
MWLAKACWSIQSEMPCIQAQYGTPAPSPGPRDHLASDPLTPEFIKPTMDLASPEAAPAAPTALPSFSTFMDGYTGEFDTFLYQLPGTVQPCSSASSSASSTSSSSATSPASASFKFEDF

SEQ ID NO: 32472 - protein, 302 aa, Homo sapiens
  REGION 1..302: note = ENSP00000457070
MWLAKACWSIQSEMPCIQAQYGTPAPSPGPRDHLASDPLTPEFIKPTMDLASPEAAPAAPTALPSFSTFMDGYTGEFDTFLYQLPGTVQPCSSASSSASSTSSSSATSPASASFKFEDFQVYGCYPGPLSGPVDEALSSSGSDYYGSPCSAPSPSTPSFQPPQLSPWDGSFGHFSPSQTYEGLRAWTEQLPKASGPPQPPAFFSFSPPTGPSPSLAQSPLKLFPSQATHQLGEGESYSMPTAFPGLAPTSPHLEGSGILDTPVTSTKARSGAPGGSEGRCAVCGDNASCQHYGVRTCEGCKG

SEQ ID NO: 32473 - protein, 78 aa, Homo sapiens
  REGION 1..78: note = ENSP00000456776
MWLAKACWSIQSGLPETTRKSPQPILGFSLRAVVWDLFPGSKQIVRRKLVSHDSGGAQAPGSATFGCGASPFHCELNS

SEQ ID NO: 32474 - protein, 652 aa, Homo sapiens
  REGION 1..652: note = ENSP00000440864
MTSAQYKIKILIEGLHHGQRPGPAPPRQPGSFCWALKADGIMWLAKACWSIQSEMPCIQAQYGTPAPSPGPRDHLASDPLTPEFIKPTMDLASPEAAPAAPTALPSFSTFMDGYTGEFDTFLYQLPGTVQPCSSASSSASSTSSSSATSPASASFKFEDFQVYGCYPGPLSGPVDEALSSSGSDYYGSPCSAPSPSTPSFQPPQLSPWDGSFGHFSPSQTYEGLRAWTEQLPKASGPPQPPAFFSFSPPTGPSPSLAQSPLKLFPSQATHQLGEGESYSMPTAFPGLAPTSPHLEGSGILDTPVTSTKARSGAPGGSEGRCAVCGDNASCQHYGVRTCEGCKGFFKRTVQKNAKYICLANKDCPVDKRRRNRCQFCRFQKCLAVGMVKEVVRTDSLKGRRGRLPSKPKQPPDASPANLLTSLVRAHLDSGPSTAKLDYSKFQELVLPHFGKEDAGDVQQFYDLLSGSLEVIRKWAEKIPGFAELSPADQDLLLESAFLELFILRLAYRSKPGEGKLIFCSGLVLHRLQCARGFGDWIDSILAFSRSLHSLLVDVPAFACLSALVLITDRHGLQEPRRVEELQNRIASCLKEHVAAVAGEPQPASCLSRLLGKLPELRTLCTQGLQRIFYLKLEDLVPPPPIIDKIFMDTLPF

SEQ ID NO: 32475 - protein, 611 aa, Homo sapiens
  REGION 1..611: note = ENSP00000449539
MWLAKACWSIQSEMPCIQAQYGTPAPSPGPRDHLASDPLTPEFIKPTMDLASPEAAPAAPTALPSFSTFMDGYTGEFDTFLYQLPGTVQPCSSASSSASSTSSSSATSPASASFKFEDFQVYGCYPGPLSGPVDEALSSSGSDYYGSPCSAPSPSTPSFQPPQLSPWDGSFGHFSPSQTYEGLRAWTEQLPKASGPPQPPAFFSFSPPTGPSPSLAQSPLKLFPSQATHQLGEGESYSMPTAFPGLAPTSPHLEGSGILDTPVTSTKARSGAPGGSEGRCAVCGDNASCQHYGVRTCEGCKGFFKRTVQKNAKYICLANKDCPVDKRRRNRCQFCRFQKCLAVGMVKEVVRTDSLKGRRGRLPSKPKQPPDASPANLLTSLVRAHLDSGPSTAKLDYSKFQELVLPHFGKEDAGDVQQFYDLLSGSLEVIRKWAEKIPGFAELSPADQDLLLESAFLELFILRLAYRSKPGEGKLIFCSGLVLHRLQCARGFGDWIDSILAFSRSLHSLLVDVPAFACLSALVLITDRHGLQEPRRVEELQNRIASCLKEHVAAVAGEPQPASCLSRLLGKLPELRTLCTQGLQRIFYLKLEDLVPPPPIIDKIFMDTLPF

SEQ ID NO: 32476 - protein, 148 aa, Homo sapiens
  REGION 1..148: note = ENSP00000449858
MPCIQAQYGTPAPSPGPRDHLASDPLTPEFIKPTMDLASPEAAPAAPTALPSFSTFMDGYTGEFDTFLYQLPGTVQPCSSASSSASSTSSSSATSPASASFKFEDFQVAQCRKTPSTSAWLTRTALWTRGGETAASSAASRSAWRWAW

SEQ ID NO: 32477 - protein, 598 aa, Homo sapiens
  REGION 1..598: note = ENSP00000378301
MPCIQAQYGTPAPSPGPRDHLASDPLTPEFIKPTMDLASPEAAPAAPTALPSFSTFMDGYTGEFDTFLYQLPGTVQPCSSASSSASSTSSSSATSPASASFKFEDFQVYGCYPGPLSGPVDEALSSSGSDYYGSPCSAPSPSTPSFQPPQLSPWDGSFGHFSPSQTYEGLRAWTEQLPKASGPPQPPAFFSFSPPTGPSPSLAQSPLKLFPSQATHQLGEGESYSMPTAFPGLAPTSPHLEGSGILDTPVTSTKARSGAPGGSEGRCAVCGDNASCQHYGVRTCEGCKGFFKRTVQKNAKYICLANKDCPVDKRRRNRCQFCRFQKCLAVGMVKEVVRTDSLKGRRGRLPSKPKQPPDASPANLLTSLVRAHLDSGPSTAKLDYSKFQELVLPHFGKEDAGDVQQFYDLLSGSLEVIRKWAEKIPGFAELSPADQDLLLESAFLELFILRLAYRSKPGEGKLIFCSGLVLHRLQCARGFGDWIDSILAFSRSLHSLLVDVPAFACLSALVLITDRHGLQEPRRVEELQNRIASCLKEHVAAVAGEPQPASCLSRLLGKLPELRTLCTQGLQRIFYLKLEDLVPPPPIIDKIFMDTLPF

SEQ ID NO: 32478 - protein, 325 aa, Homo sapiens
  REGION 1..325: note = ENSP00000449587
MPCIQAQYGTPAPSPGPRDHLASDPLTPEFIKPTMDLASPEAAPAAPTALPSFSTFMDGYTGEFDTFLYQLPGTVQPCSSASSSASSTSSSSATSPASASFKFEDFQVYGCYPGPLSGPVDEALSSSGSDYYGSPCSAPSPSTPSFQPPQLSPWDGSFGHFSPSQTYEGLRAWTEQLPKASGPPQPPAFFSFSPPTGPSPSLAQSPLKLFPSQATHQLGEGESYSMPTAFPGLAPTSPHLEGSGILDTPVTSTKARSGAPGGSEGRCAVCGDNASCQHYGVRTCEGCKGFFKVPRSPRWGLLLEMERGWPHPIGTCGLPLGSPPS

SEQ ID NO: 32479 - protein, 150 aa, Homo sapiens
  REGION 1..150: note = ENSP00000455399
MDLASPEAAPAAPTALPSFSTFMDGYTGEFDTFLYQLPGTVQPCSSASSSASSTSSSSATSPASASFKFEDFQVYGCYPGPLSGPVDEALSSSGSDYYGSPCSAPSPSTPSFQPPQLSPWDGSFGHFSPSQTYEGLRAWTEQLPKASGPP

SEQ ID NO: 32480 - protein, 120 aa, Homo sapiens
  REGION 1..120: note = ENSP00000455767
MLGMYSSSTTCSPVLWRSSASGRRRSLALLSCHRLTRTCCWSRPSWSSSSSAWRTGLSQARASSSSAQAWCYTGCSVPVASGTGLTVSWPSQGPCTACLSMSLPSPASLPLSSSPTGMGC

SEQ ID NO: 32481 - protein, 598 aa, Homo sapiens; identical to SEQ ID NO: 32477
  REGION 1..598: note = ENSP00000378302

SEQ ID NO: 32482 - protein, 611 aa, Homo sapiens; identical to SEQ ID NO: 32475
  REGION 1..611: note = ENSP00000353427

SEQ ID NO: 32483 - protein, 598 aa, Homo sapiens; identical to SEQ ID NO: 32477
  REGION 1..598: note = ENSP00000243050

SEQ ID NO: 32484 - protein, 598 aa, Homo sapiens
  REGION 1..598: note = ENSP00000344479
MPCVQAQYGSSPQGASPASQSYSYHSSGEYSSDFLTPEFVKFSMDLTNTEITATTSLPSFSTFMDNYSTGYDVKPPCLYQMPLSGQQSSIKVEDIQMHNYQQHSHLPPQSEEMMPHSGSVYYKPSSPPTPTTPGFQVQHSPMWDDPGSLHNFHQNYVATTHMIEQRKTPVSRLSLFSFKQSPPGTPVSSCQMRFDGPLHVPMNPEPAGSHHVVDGQTFAVPNPIRKPASMGFPGLQIGHASQLLDTQVPSPPSRGSPSNEGLCAVCGDNAACQHYGVRTCEGCKGFFKRTVQKNAKYVCLANKNCPVDKRRRNRCQYCRFQKCLAVGMVKEVVRTDSLKGRRGRLPSKPKSPQEPSPPSPPVSLISALVRAHVDSNPAMTSLDYSRFQANPDYQMSGDDTQHIQQFYDLLTGSMEIIRGWAEKIPGFADLPKADQDLLFESAFLELFVLRLAYRSNPVEGKLIFCNGVVLHRLQCVRGFGEWIDSIVEFSSNLQNMNIDISAFSCIAALAMVTERHGLKEPKRVEELQNKIVNCLKDHVTFNNGGLNRPNYLSKLLGKLPELRTLCTQGLQRIFYLKLEDLVPPPAIIDKLFLDTLPF

SEQ ID NO: 32485 - protein, 535 aa, Homo sapiens
  REGION 1..535: note = ENSP00000389986
MDNYSTGYDVKPPCLYQMPLSGQQSSIKVEDIQMHNYQQHSHLPPQSEEMMPHSGSVYYKPSSPPTPTTPGFQVQHSPMWDDPGSLHNFHQNYVATTHMIEQRKTPVSRLSLFSFKQSPPGTPVSSCQMRFDGPLHVPMNPEPAGSHHVVDGQTFAVPNPIRKPASMGFPGLQIGHASQLLDTQVPSPPSRGSPSNEGLCAVCGDNAACQHYGVRTCEGCKGFFKRTVQKNAKYVCLANKNCPVDKRRRNRCQYCRFQKCLAVGMVKEVVRTDSLKGRRGRLPSKPKSPQEPSPPSPPVSLISALVRAHVDSNPAMTSLDYSRFQANPDYQMSGDDTQHIQQFYDLLTGSMEIIRGWAEKIPGFADLPKADQDLLFESAFLELFVLRLAYRSNPVEGKLIFCNGVVLHRLQCVRGFGEWIDSIVEFSSNLQNMNIDISAFSCIAALAMVTERHGLKEPKRVEELQNKIVNCLKDHVTFNNGGLNRPNYLSKLLGKLPELRTLCTQGLQRIFYLKLEDLVPPPAIIDKLFLDTLPF

SEQ ID NO: 32486 - protein, 598 aa, Homo sapiens; identical to SEQ ID NO: 32484
  REGION 1..598: note = ENSP00000386747

SEQ ID NO: 32487 - protein, 392 aa, Homo sapiens
  REGION 1..392: note = ENSP00000415632
MDNYSTGYDVKPPCLYQMPLSGQQSSIKVEDIQMHNYQQHSHLPPQSEEMMPHSGSVYYKPSSPPTPTTPGFQVQHSPMWDDPGSLHNFHQNYVATTHMIEQRKTPVSRLSLFSFKQSPPGTPVSSCQMRFDGPLHVPMNPEPAGSHHVVDGQTFAVPNPIRKPASMGFPGLQIGHASQLLDTQVPSPPSRGSPSNEGLCAVCGDNAACQHYGVRTCEGCKGFFKRTVQKNAKYVCLANKNCPVDKRRRNRCQYCRFQKCLAVGMVKEVVRTDSLKGRRGRLPSKPKSPQEPSPPSPPVSLISALVRAHVDSNPAMTSLDYSRFQANPDYQMSGDDTQHIQQFYDLLTGSMEIIRGWAEKIPGFADLPKADQDLLFESAFLELFVLRLAYRI

SEQ ID NO: 32488 - protein, 392 aa, Homo sapiens; identical to SEQ ID NO: 32487
  REGION 1..392: note = ENSP00000394671

SEQ ID NO: 32489 - protein, 553 aa, Homo sapiens
  REGION 1..553: note = ENSP00000386993
MPCVQAQYGSSPQGASPASQSYSYHSSGEYSSDFLTPEFVKFSMDLTNTEITATTSLPSFSTFMDNYSTGYDVKPPCLYQMPLSGQQSSIKVEDIQMHNYQQHSHLPPQSEEMMPHSGSVYYKPSSPPTPTTPGFQVQHSPMWDDPGSLHNFHQNYVATTHMIEQRKTPVSRLSLFSFKQSPPGTPVSSCQMRFDGPLHVPMNPEPAGSHHVVDGQTFAVPNPIRKPASMGFPGLQIGHASQLLDTQVPSPPSRGSPSNEGLCAVCGDNAACQHYGVRTCEGCKGFFKRTVQKNAKYVCLANKNCPVDKRRRNRCQYCRFQKCLAVGMVKEVVRTDSLKGRRGRLPSKPKSPQEPSPPSPPVSLISALVRAHVDSNPAMTSLDYSRFQANPDYQMSGDDTQHIQQFYDLLTGSMEIIRGWAEKIPGFADLPKADQDLLFESAFLELFVLRLAYRSNPVEEYEHRHFCLLLHCCPGYGHRETRAQGTQESGRTAKQDCKLSQRPRDFQQWGVEPPQLFVQTVGEAPRTSYPLHTGATAHFLPEIGRLGATASNN

SEQ ID NO: 32490 - protein, 490 aa, Homo sapiens
  REGION 1..490: note = ENSP00000410952
MDNYSTGYDVKPPCLYQMPLSGQQSSIKVEDIQMHNYQQHSHLPPQSEEMMPHSGSVYYKPSSPPTPTTPGFQVQHSPMWDDPGSLHNFHQNYVATTHMIEQRKTPVSRLSLFSFKQSPPGTPVSSCQMRFDGPLHVPMNPEPAGSHHVVDGQTFAVPNPIRKPASMGFPGLQIGHASQLLDTQVPSPPSRGSPSNEGLCAVCGDNAACQHYGVRTCEGCKGFFKRTVQKNAKYVCLANKNCPVDKRRRNRCQYCRFQKCLAVGMVKEVVRTDSLKGRRGRLPSKPKSPQEPSPPSPPVSLISALVRAHVDSNPAMTSLDYSRFQANPDYQMSGDDTQHIQQFYDLLTGSMEIIRGWAEKIPGFADLPKADQDLLFESAFLELFVLRLAYRSNPVEEYEHRHFCLLLHCCPGYGHRETRAQGTQESGRTAKQDCKLSQRPRDFQQWGVEPPQLFVQTVGEAPRTSYPLHTGATAHFLPEIGRLGATASNN

SEQ ID NO: 32491 - protein, 150 aa, Homo sapiens
  REGION 1..150: note = ENSP00000385379
  VARIANT 1: note = Any amino acid
XSYHSSGEYSSDFLTPEFVKFSMDLTNTEITATTSLPSFSTFMDNYSTGYDVKPPCLYQMPLSGQQSSIKRTVQKNAKYVCLANKNCPVDKRRRNRCQYCRFQKCLAVGMVKEVVRTDSLKGRRGRLPSKPKSPQEPSPPSPPVSLISAL

SEQ ID NO: 32492 - protein, 258 aa, Homo sapiens
  REGION 1..258: note = ENSP00000406808
MPCVQAQYGSSPQGASPASQSYSYHSSGEYSSDFLTPEFVKFSMDLTNTEITATTSLPSFSTFMDNYSTGYDVKPPCLYQMPLSGQQSSIKVEDIQMHNYQQHSHLPPQSEEMMPHSGSVYYKPSSPPTPTTPGFQVQHSPMWDDPGSLHNFHQNYVATTHMIEQRKTPVSRLSLFSFKQSPPGTPVSSCQMRFDGPLHVPMNPEPAGSHHVVDGQTFAVPNPIRKPASMGFPGLQIGHASQLLDTQVPSPPSRGSPS

SEQ ID NO: 32493 - protein, 106 aa, Homo sapiens
  REGION 1..106: note = ENSP00000388120
MDNYSTGYDVKPPCLYQMPLSGQQSSIKVEDIQMHNYQQHSHLPPQSEEMMPHSGSVYYKPSSPPTPTTPGFQVQHSPMWDDPGSLHNFHQNYVATTHMIEQRKTP

SEQ ID NO: 32494 - protein, 443 aa, Homo sapiens
  REGION 1..443: note = ENSP00000340301
MPCVQAQYSPSPPGSSYAAQTYSSEYTTEIMNPDYTKLTMDLGSTEITATATTSLPSISTFVEGYSSNYELKPSCVYQMQRPLIKVEEGRAPSYHHHHHHHHHHHHHHQQQHQQPSIPPASSPEDEVLPSTSMYFKQSPPSTPTTPAFPPQAGALWDEALPSAPGCIAPGPLLDPPMKAVPTVAGARFPLFHFKPSPPHPPAPSPAGGHHLGYDPTAAAALSLPLGAAAAAGSQAAALESHPYGLPLAKRAAPLAFPPLGLTPSPTASSLLGESPSLPSPPSRSSSSGEGTCAVCGDNAACQHYGVRTCEGCKGFFKRTVQKNAKYVCLANKNCPVDKRRRNRCQYCRFQKCLSVGMVKEVVRTDSLKGRRGRLPSKPKSPLQQEPSQPSPPSPPICMMNALVRALTDSTPRDLDYSRVSFMISCFQMNDQGLYLWLLVIRVD

SEQ ID NO: 32495 - protein, 626 aa, Homo sapiens
  REGION 1..626: note = ENSP00000378531
MPCVQAQYSPSPPGSSYAAQTYSSEYTTEIMNPDYTKLTMDLGSTEITATATTSLPSISTFVEGYSSNYELKPSCVYQMQRPLIKVEEGRAPSYHHHHHHHHHHHHHHQQQHQQPSIPPASSPEDEVLPSTSMYFKQSPPSTPTTPAFPPQAGALWDEALPSAPGCIAPGPLLDPPMKAVPTVAGARFPLFHFKPSPPHPPAPSPAGGHHLGYDPTAAAALSLPLGAAAAAGSQAAALESHPYGLPLAKRAAPLAFPPLGLTPSPTASSLLGESPSLPSPPSRSSSSGEGTCAVCGDNAACQHYGVRTCEGCKGFFKRTVQKNAKYVCLANKNCPVDKRRRNRCQYCRFQKCLSVGMVKEVVRTDSLKGRRGRLPSKPKSPLQQEPSQPSPPSPPICMMNALVRALTDSTPRDLDYSRYCPTDQAAAGTDAEHVQQFYNLLTASIDVSRSWAEKIPGFTDLPKEDQTLLIESAFLELFVLRLSIRSNTAEDKFVFCNGLVLHRLQCLRGFGEWLDSIKDFSLNLQSLNLDIQALACLSALSMITERHGLKEPKRVEELCNKITSSLKDHQSKGQALEPTESKVLGALVELRKICTLGLQRIFYLKLEDLVSPPSIIDKLFLDTLPF

SEQ ID NO: 32496 - protein, 637 aa, Homo sapiens
  REGION 1..637: note = ENSP00000333122
MHDSIRFGNVDMPCVQAQYSPSPPGSSYAAQTYSSEYTTEIMNPDYTKLTMDLGSTEITATATTSLPSISTFVEGYSSNYELKPSCVYQMQRPLIKVEEGRAPSYHHHHHHHHHHHHHHQQQHQQPSIPPASSPEDEVLPSTSMYFKQSPPSTPTTPAFPPQAGALWDEALPSAPGCIAPGPLLDPPMKAVPTVAGARFPLFHFKPSPPHPPAPSPAGGHHLGYDPTAAAALSLPLGAAAAAGSQAAALESHPYGLPLAKRAAPLAFPPLGLTPSPTASSLLGESPSLPSPPSRSSSSGEGTCAVCGDNAACQHYGVRTCEGCKGFFKRTVQKNAKYVCLANKNCPVDKRRRNRCQYCRFQKCLSVGMVKEVVRTDSLKGRRGRLPSKPKSPLQQEPSQPSPPSPPICMMNALVRALTDSTPRDLDYSRYCPTDQAAAGTDAEHVQQFYNLLTASIDVSRSWAEKIPGFTDLPKEDQTLLIESAFLELFVLRLSIRSNTAEDKFVFCNGLVLHRLQCLRGFGEWLDSIKDFSLNLQSLNLDIQALACLSALSMITERHGLKEPKRVEELCNKITSSLKDHQSKGQALEPTESKVLGALVELRKICTLGLQRIFYLKLEDLVSPPSIIDKLFLDTLPF

SEQ ID NO: 32497 - protein, 637 aa, Homo sapiens; identical to SEQ ID NO: 32496
  REGION 1..637: note = ENSP00000482027

SEQ ID NO: 32498 - protein, 287 aa, Homo sapiens
  REGION 1..287: note = ENSP00000277746
MEVMEGPLNLAHQQSRRADRLLAAGKYEEAISCHKKAAAYLSEAMKLTQSEQAHLSLELQRDSHMKQLLLIQERWKRAQREERLKAQQNTDKDAAAHLQTSHKPSAEDAEGQSPLSQKYSPSTEKCLPEIQGIFDRDPDTLLYLLQQKSEPAEPCIGSKAPKDDKTIIEEQATKIADLKRHVEFLVAENERLRKENKQLKAEKARLLKGPIEKELDVDADFVETSELWSLPPHAETATASSTWQKFAANTGKAKDIPIPNLPPLDFPSPELPLMELSEDILKGFMNN

SEQ ID NO: 32499 - protein, 277 aa, Homo sapiens
  REGION 1..277: note = ENSP00000397502
MFPGATTPLPKAAAYPGVYGSNGRTPQPAYLSEAMKLTQSEQAHLSLELQRDSHMKQLLLIQERWKRAQREERLKAQQNTDKDAAAHLQTSHKPSAEDAEGQSPLSQKYSPSTEKCLPEIQGIFDRDPDTLLYLLQQKSEPAEPCIGSKAPKDDKTIIEEQATKIADLKRHVEFLVAENERLRKENKQLKAEKARLLKGPIEKELDVDADFVETSELWSLPPHAETATASSTWQKFAANTGKAKDIPIPNLPPLDFPSPELPLMELSEDILKGFMNN

SEQ ID NO: 32500 - protein, 1183 aa, Homo sapiens
  REGION 1..1183: note = ENSP00000325269
MQLKIMPKKKRLSAGRVPLILFLCQMISALEVPLDLVQPPTITQQSPKDYIIDPRENIVIQCEAKGKPPPSFSWTRNGTHFDIDKDPLVTMKPGTGTLIINIMSEGKAETYEGVYQCTARNERGAAVSNNIVVRPSRSPLWTKEKLEPITLQSGQSLVLPCRPPIGLPPPIIFWMDNSFQRLPQSERVSQGLNGDLYFSNVLPEDTREDYICYARFNHTQTIQQKQPISVKVISVDELNDTIAANLSDTEFYGAKSSRERPPTFLTPEGNASNKEELRGNVLSLECIAEGLPTPIIYWAKEDGMLPKNRTVYKNFEKTLQIIHVSEADSGNYQCIAKNALGAIHHTISVRVKAAPYWITAPQNLVLSPGEDGTLICRANGNPKPRISWLTNGVPIEIAPDDPSRKIDGDTIIFSNVQERSSAVYQCNASNEYGYLLANAFVNVLAEPPRILTPANTLYQVIANRPALLDCAFFGSPLPTIEWFKGAKGSALHEDIYVLHENGTLEIPVAQKDSTGTYTCVARNKLGMAKNEVHLEIKDPTWIVKQPEYAVVQRGSMVSFECKVKHDHTLSLTVLWLKDNRELPSDERFTVDKDHLVVADVSDDDSGTYTCVANTTLDSVSASAVLSVVDVPNPPFDLELTDQLDKSVQLSWTPGDDNNSPITKFIIEYEDAMHKPGLWHHQTEVSGTQTTAQLKLSPYVNYSFRVMAVNSIGKSLPSEASEQYLTKASEPDKNPTAVEGLGSEPDNLVITWKPLNGFESNGPGLQYKVSWRQKDGDDEWTSVVVANVSKYIVSGTPTFVPYLIKVQALNDMGFAPEPAVVMGHSGEDLPMVAPGNVRVNVVNSTLAEVHWDPVPLKSIRGHLQGYRIYYWKTQSSSKRNRRHIEKKILTFQGSKTHGMLPGLEPFSHYTLNVRVVNGKGEGPASPDRVFNTPEGVPSAPSSLKIVNPTLDSLTLEWDPPSHPNGILTEYTLKYQPINSTHELGPLVDLKIPANKTRWTLKNLNFSTRYKFYFYAQTSAGSGSQITEEAVTTVDEAMASRQVDIATQGWFIGLMCAVALLILILLIVCFIRRNKGGKYPVKEKEDAHADPEIQPMKEDDGTFGEYSDAEDHKPLKKGSRTPSDRTVKKEDSDDSLVDYGEGVNGQFNEDGSFIGQYSGKKEKEPAEGNESSEAPSPVNAMNSFV

SEQ ID NO: 32501 - protein, 1192 aa, Homo sapiens
  REGION 1..1192: note = ENSP00000368310
MQLKIMPKKKRLSAGRVPLILFLCQMISALEVPLDPKLLEDLVQPPTITQQSPKDYIIDPRENIVIQCEAKGKPPPSFSWTRNGTHFDIDKDPLVTMKPGTGTLIINIMSEGKAETYEGVYQCTARNERGAAVSNNIVVRPSRSPLWTKEKLEPITLQSGQSLVLPCRPPIGLPPPIIFWMDNSFQRLPQSERVSQGLNGDLYFSNVLPEDTREDYICYARFNHTQTIQQKQPISVKVISAKSSRERPPTFLTPEGNASNKEELRGNVLSLECIAEGLPTPIIYWAKEDGMLPKNRTVYKNFEKTLQIIHVSEADSGNYQCIAKNALGAIHHTISVRVKAAPYWITAPQNLVLSPGEDGTLICRANGNPKPRISWLTNGVPIEIAPDDPSRKIDGDTIIFSNVQERSSAVYQCNASNEYGYLLANAFVNVLAEPPRILTPANTLYQVIANRPALLDCAFFGSPLPTIEWFKGAKGSALHEDIYVLHENGTLEIPVAQKDSTGTYTCVARNKLGMAKNEVHLEIKDPTWIVKQPEYAVVQRGSMVSFECKVKHDHTLSLTVLWLKDNRELPSDERFTVDKDHLVVADVSDDDSGTYTCVANTTLDSVSASAVLSVVAPTPTPAPVYDVPNPPFDLELTDQLDKSVQLSWTPGDDNNSPITKFIIEYEDAMHKPGLWHHQTEVSGTQTTAQLKLSPYVNYSFRVMAVNSIGKSLPSEASEQYLTKASEPDKNPTAVEGLGSEPDNLVITWKPLNGFESNGPGLQYKVSWRQKDGDDEWTSVVVANVSKYIVSGTPTFVPYLIKVQALNDMGFAPEPAVVMGHSGEDLPMVAPGNVRVNVVNSTLAEVHWDPVPLKSIRGHLQGYRIYYWKTQSSSKRNRRHIEKKILTFQGSKTHGMLPGLEPFSHYTLNVRVVNGKGEGPASPDRVFNTPEGVPSAPSSLKIVNPTLDSLTLEWDPPSHPNGILTEYTLKYQPINSTHELGPLVDLKIPANKTRWTLKNLNFSTRYKFYFYAQTSAGSGSQITEEAVTTVDEAGILPPDVGAGKAMASRQVDIATQGWFIGLMCAVALLILILLIVCFIRRNKGGKYPVKEKEDAHADPEIQPMKEDDGTFGEYSDAEDHKPLKKGSRTPSDRTVKKEDSDDSLVDYGEGVNGQFNEDGSFIGQYSGKKEKEPAEGNESSEAPSPVNAMNSFV

SEQ ID NO: 32502 - protein, 1304 aa, Homo sapiens
  REGION 1..1304: note = ENSP00000401244
MQLKIMPKKKRLSAGRVPLILFLCQMISALEVPLDPKLLEDLVQPPTITQQSPKDYIIDPRENIVIQCEAKGKPPPSFSWTRNGTHFDIDKDPLVTMKPGTGTLIINIMSEGKAETYEGVYQCTARNERGAAVSNNIVVRPSRSPLWTKEKLEPITLQSGQSLVLPCRPPIGLPPPIIFWMDNSFQRLPQSERVSQGLNGDLYFSNVLPEDTREDYICYARFNHTQTIQQKQPISVKVISVDELNDTIAANLSDTEFYGAKSSRERPPTFLTPEGNASNKEELRGNVLSLECIAEGLPTPIIYWAKEDGMLPKNRTVYKNFEKTLQIIHVSEADSGNYQCIAKNALGAIHHTISVRVKAAPYWITAPQNLVLSPGEDGTLICRANGNPKPRISWLTNGVPIEIAPDDPSRKIDGDTIIFSNVQERSSAVYQCNASNEYGYLLANAFVNVLAEPPRILTPANTLYQVIANRPALLDCAFFGSPLPTIEWFKGAKGSALHEDIYVLHENGTLEIPVAQKDSTGTYTCVARNKLGMAKNEVHLEIKDPTWIVKQPEYAVVQRGSMVSFECKVKHDHTLSLTVLWLKDNRELPSDERFTVDKDHLVVADVSDDDSGTYTCVANTTLDSVSASAVLSVVAPTPTPAPVYDVPNPPFDLELTDQLDKSVQLSWTPGDDNNSPITKFIIEYEDAMHKPGLWHHQTEVSGTQTTAQLKLSPYVNYSFRVMAVNSIGKSLPSEASEQYLTKASEPDKNPTAVEGLGSEPDNLVITWKPLNGFESNGPGLQYKVSWRQKDGDDEWTSVVVANVSKYIVSGTPTFVPYLIKVQALNDMGFAPEPAVVMGHSGEDLPMVAPGNVRVNVVNSTLAEVHWDPVPLKSIRGHLQGYRIYYWKTQSSSKRNRRHIEKKILTFQGSKTHGMLPGLEPFSHYTLNVRVVNGKGEGPASPDRVFNTPEGVPSAPSSLKIVNPTLDSLTLEWDPPSHPNGILTEYTLKYQPINSTHELGPLVDLKIPANKTRWTLKNLNFSTRYKFYFYAQTSAGSGSQITEEAVTTVDEAGILPPDVGAGKVQAVNPRISNLTAAAAETYANISWEYEGPEHVNFYVEYGVAGSKEEWRKEIVNGSRSFFGLKGLMPGTAYKVRVGAVGDSGFVSSEDVFETGPAMASRQVDIATQGWFIGLMCAVALLILILLIVCFIRRNKGGKYPVKEKEDAHADPEIQPMKEDDGTFGEYSDAEDHKPLKKGSRTPSDRTVKKEDSDDSLVDYGEGVNGQFNEDGSFIGQYSGKKEKEPAEGNESSEAPSPVNAMNSFV

SEQ ID NO: 32503 - protein, 190 aa, Homo sapiens
  REGION 1..190: note = ENSP00000398174
  VARIANT 1: note = Any amino acid
XGILPPDVGAGKVQAVNPRISNLTAAAAETYANISWEYEGPEHVNFYVEYGVAGTMASRQVDIATQGWFIGLMCAVALLILILLIVCFIRRNKGGKYPVKEKEDAHADPEIQPMKEDDGTFGEYSDAEDHKPLKKGSRTPSDRTVKKEDSDDSLVDYGEGVNGQFNEDGSFIGQYSGKKEKEPAEGNESS

SEQ ID NO: 32504 - protein, 431 aa, Homo sapiens
  REGION 1..431: note = ENSP00000390421
MQLKIMPKKKRLSAGRVPLILFLCQMISALEVPLDLVQPPTITQQSPKDYIIDPRENIVIQCEAKGKPPPSFSWTRNGTHFDIDKDPLVTMKPGTGTLIINIMSEGKAETYEGVYQCTARNERGAAVSNNIVVRPSRSPLWTKEKLEPITLQSGQSLVLPCRPPIGLPPPIIFWMDNSFQRLPQSERVSQGLNGDLYFSNVLPEDTREDYICYARFNHTQTIQQKQPISVKVISVDELNDTIAANLSDTEFYGAKSSRERPPTFLTPEGNASNKEELRGNVLSLECIAEGLPTPIIYWAKEDGMLPKNRTVYKNFEKTLQIIHVSEADSGNYQCIAKNALGAIHHTISVRVKAAPYWITAPQNLVLSPGEDGTLICRANGNPKPRISWLTNGVPIEIAPDDPSRKIDGDTIIFSNVQERSSAVYQCNASNE

SEQ ID NO: 32505 - protein, 118 aa, Homo sapiens
  REGION 1..118: note = ENSP00000390868
MQLKIMPKKKRLSAGRVPLILFLCQMISALEVPLDPKLLEDLVQPPTITQQSPKDYIIDPRENIVIQCEAKGKPPPSFSWTRNGTHFDIDKDPLVTMKPGTGTLIINIMSEGKAETYE

SEQ ID NO: 32506 - protein, 106 aa, Homo sapiens
  REGION 1..106: note = ENSP00000397544
MQLKIMPKKKRLSAGRVPLILFLCQMISALEVPLDLVQPPTITQQSPKDYIIDPRENIVIQCEAKGKPPPSFSWTRNGTHFDIDKDPLVTMKPGTGTLIINIMSEG

SEQ ID NO: 32507 - protein, 106 aa, Homo sapiens; identical to SEQ ID NO: 32506
  REGION 1..106: note = ENSP00000408203

SEQ ID NO: 32508 - protein, 61 aa, Homo sapiens
  REGION 1..61: note = ENSP00000393663
MQLKIMPKKKRLSAGRVPLILFLCQMISALEVPLDPKLLEDLVQPPTITQQSPKDYIIDPR

SEQ ID NO: 32509 - protein, 1304 aa, Homo sapiens; identical to SEQ ID NO: 32502
  REGION 1..1304: note = ENSP00000368314

SEQ ID NO: 32510 - protein, 1211 aa, Homo sapiens
  REGION 1..1211: note = ENSP00000407858
MQLKIMPKKKRLSAGRVPLILFLCQMISALEVPLDPKLLEDLVQPPTITQQSPKDYIIDPRENIVIQCEAKGKPPPSFSWTRNGTHFDIDKDPLVTMKPGTGTLIINIMSEGKAETYEGVYQCTARNERGAAVSNNIVVRPSRSPLWTKEKLEPITLQSGQSLVLPCRPPIGLPPPIIFWMDNSFQRLPQSERVSQGLNGDLYFSNVLPEDTREDYICYARFNHTQTIQQKQPISVKVISVDELNDTIAANLSDTEFYGAKSSRERPPTFLTPEGNASNKEELRGNVLSLECIAEGLPTPIIYWAKEDGMLPKNRTVYKNFEKTLQIIHVSEADSGNYQCIAKNALGAIHHTISVRVKAAPYWITAPQNLVLSPGEDGTLICRANGNPKPRISWLTNGVPIEIAPDDPSRKIDGDTIIFSNVQERSSAVYQCNASNEYGYLLANAFVNVLAEPPRILTPANTLYQVIANRPALLDCAFFGSPLPTIEWFKGAKGSALHEDIYVLHENGTLEIPVAQKDSTGTYTCVARNKLGMAKNEVHLEIKDPTWIVKQPEYAVVQRGSMVSFECKVKHDHTLSLTVLWLKDNRELPSDERFTVDKDHLVVADVSDDDSGTYTCVANTTLDSVSASAVLSVVAPTPTPAPVYDVPNPPFDLELTDQLDKSVQLSWTPGDDNNSPITKFIIEYEDAMHKPGLWHHQTEVSGTQTTAQLKLSPYVNYSFRVMAVNSIGKSLPSEASEQYLTKASEPDKNPTAVEGLGSEPDNLVITWKPLNGFESNGPGLQYKVSWRQKDGDDEWTSVVVANVSKYIVSGTPTFVPYLIKVQALNDMGFAPEPAVVMGHSGEDLPMVAPGNVRVNVVNSTLAEVHWDPVPLKSIRGHLQGYRIYYWKTQSSSKRNRRHIEKKILTFQGSKTHGMLPGLEPFSHYTLNVRVVNGKGEGPASPDRVFNTPEGVPSAPSSLKIVNPTLDSLTLEWDPPSHPNGILTEYTLKYQPINSTHELGPLVDLKIPANKTRWTLKNLNFSTRYKFYFYAQTSAGSGSQITEEAVTTVDEAGILPPDVGAGKAMASRQVDIATQGWFIGLMCAVALLILILLIVCFIRRNKGGKYPVKEKEDAHADPEIQPMKEDDGTFGEYSDAEDHKPLKKGSRTPSDRTVKKEDSDDSLVDYGEGVNGQFNEDGSFIGQYSGKKEKEPAEGNESSEAPSPVNAMNSFV

SEQ ID NO: 32511 - protein, 1299 aa, Homo sapiens
  REGION 1..1299: note = ENSP00000368308
MPKKKRLSAGRVPLILFLCQMISALEVPLDPKLLEDLVQPPTITQQSPKDYIIDPRENIVIQCEAKGKPPPSFSWTRNGTHFDIDKDPLVTMKPGTGTLIINIMSEGKAETYEGVYQCTARNERGAAVSNNIVVRPSRSPLWTKEKLEPITLQSGQSLVLPCRPPIGLPPPIIFWMDNSFQRLPQSERVSQGLNGDLYFSNVLPEDTREDYICYARFNHTQTIQQKQPISVKVISVDELNDTIAANLSDTEFYGAKSSRERPPTFLTPEGNASNKEELRGNVLSLECIAEGLPTPIIYWAKEDGMLPKNRTVYKNFEKTLQIIHVSEADSGNYQCIAKNALGAIHHTISVRVKAAPYWITAPQNLVLSPGEDGTLICRANGNPKPRISWLTNGVPIEIAPDDPSRKIDGDTIIFSNVQERSSAVYQCNASNEYGYLLANAFVNVLAEPPRILTPANTLYQVIANRPALLDCAFFGSPLPTIEWFKGAKGSALHEDIYVLHENGTLEIPVAQKDSTGTYTCVARNKLGMAKNEVHLEIKDPTWIVKQPEYAVVQRGSMVSFECKVKHDHTLSLTVLWLKDNRELPSDERFTVDKDHLVVADVSDDDSGTYTCVANTTLDSVSASAVLSVVAPTPTPAPVYDVPNPPFDLELTDQLDKSVQLSWTPGDDNNSPITRIHHEYEDAMHKPGLWHHQTEVSGTQTTAQLKLSPYVNYSFRVMAVNSIGKSLPSEASEQYLTKASEPDKNPTAVEGLGSEPDNLVITWKPLNGFESNGPGLQYKVSWRQKDGDDEWTSVVVANVSKYIVSGTPTFVPYLIKVQALNDMGFAPEPAVVMGHSGEDLPMVAPGNVRVNVVNSTLAEVHWDPVPLKSIRGHLQGYRIYYWKTQSSSKRNRRHIEKKILTFQGSKTHGMLPGLEPFSHYTLNVRVVNGKGEGPASPDRVFNTPEGVPSAPSSLKIVNPTLDSLTLEWDPPSHPNGILTEYTLKYQPINSTHELGPLVDLKIPANKTRWTLKNLNFSTRYKFYFYAQTSAGSGSQITEEAVTTVDEAGILPPDVGAGKVQAVNPRISNLTAAAAETYANISWEYEGPEHVNFYVEYGVAGSKEEWRKEIVNGSRSFFGLKGLMPGTAYKVRVGAVGDSGFVSSEDVFETGPAMASRQVDIATQGWFIGLMCAVALLILILLIVCFIRRNKGGKYPVKEKEDAHADPEIQPMKEDDGTFGEYSDAEDHKPLKKGSRTPSDRTVKKEDSDDSLVDYGEGVNGQFNEDGSFIGQYSGKKEKEPAEGNESSEAPSPVNAMNSFV

SEQ ID NO: 32512 - protein, 771 aa, Homo sapiens [sequence omitted]

SEQ ID NO: 32513 - protein, 37 aa, Homo sapiens
  REGION 1..37: note = ENSP00000427595
MVYYPELFVWVSQEPFPNKDMEGRLPKETSLSPFMES

SEQ ID NO: 32514 - protein, 37 aa, Homo sapiens; identical to SEQ ID NO: 32513
  REGION 1..37: note = ENSP00000426834

SEQ ID NO: 32515 - protein, 68 aa, Homo sapiens
  REGION 1..68: note = ENSP00000368993
MVYYPELFVWVSQEPFPNKDMEGRLPKGRLPVPKEVNRKKNDETNAASLTPLGSSELRSPRISYLHFF

SEQ ID NO: 32516 - protein, 68 aa, Homo sapiens; identical to SEQ ID NO: 32515
  REGION 1..68: note = ENSP00000257435

SEQ ID NO: 32517 - protein, 68 aa, Homo sapiens; identical to SEQ ID NO: 32515
  REGION 1..68: note = ENSP00000402965

SEQ ID NO: 32518 - protein, 112 aa, Homo sapiens
  REGION 1..112: note = ENSP00000378996
MKGVWNYSALSRREDETRTQRSRMTDRVPCSKCFQVHCQISVLNCVYYPELFVWVSQEPFPNKDMEGRLPKGRLPVPKEVNRKKNDETNAASLTPLGSSELRSPRISYLHFF

SEQ ID NO: 32519 - protein, 35 aa, Homo sapiens
  REGION 1..35: note = ENSP00000422278
MVYYPELFVWVSQEPFPNKDMEGRLPKLRKKNRIH

SEQ ID NO: 32520 - protein, 35 aa, Homo sapiens; identical to SEQ ID NO: 32519
  REGION 1..35: note = ENSP00000423320

SEQ ID NO: 32521 - protein, 68 aa, Homo sapiens; identical to SEQ ID NO: 32515
  REGION 1..68: note = ENSP00000416617

SEQ ID NO: 32522 - protein, 68 aa, Homo sapiens; identical to SEQ ID NO: 32515
  REGION 1..68: note = ENSP00000399766

SEQ ID NO: 32523 - protein, 68 aa, Homo sapiens; identical to SEQ ID NO: 32515
  REGION 1..68: note = ENSP00000422630

SEQ ID NO: 32524 - protein, 68 aa, Homo sapiens; identical to SEQ ID NO: 32515
  REGION 1..68: note = ENSP00000403383

SEQ ID NO: 32525 - protein, 68 aa, Homo sapiens; identical to SEQ ID NO: 32515
  REGION 1..68: note = ENSP00000392559

SEQ ID NO: 32526 - protein, 68 aa, Homo sapiens; identical to SEQ ID NO: 32515
  REGION 1..68: note = ENSP00000427149

SEQ ID NO: 32527 - protein, 65 aa, Homo sapiens
  REGION 1..65: note = ENSP00000427476
MVYYPELFVWVSQEPFPNKDMEGRLPKGRLPVPKEVNRKKNDETNAASLTPLGSSELRSPRISYL

SEQ ID NO: 32528 - protein, 33 aa, Homo sapiens
  REGION 1..33: note = ENSP00000422046
MVYYPELFVWVSQEPFPNKDMEGRLPKGRLPVP

SEQ ID NO: 32529 - protein, 5 aa, Homo sapiens
  REGION 1..5: note = ENSP00000422514
MVYYP

SEQ ID NO: 32530 - protein, 68 aa, Homo sapiens; identical to SEQ ID NO: 32515
  REGION 1..68: note = ENSP00000408839

SEQ ID NO: 32531 - protein, 481 aa, Homo sapiens
  REGION 1..481: note = ENSP00000430053
MGKGRAGRVGTTALPPRLKEMKSQESAAGSKLVLRCETSSEYSSLRFKWFKNGNELNRKNKPQNIKIQKKPGKSELRINKASLADSGEYMCKVISKLGNDSASANITIVESNEIITGMPASTEGAYVSSATSTSTTGTSHLVKCAEKEKTFCVNGGECFMVKDLSNPSRYLCKCPNEFTGDRCQNYVMASFYKHLGIEFMEAEELYQKRVLTITGICIALLVVGIMCVVAYCKTKKQRKKLHDRLRQSLRSERNNMMNIANGPHHPNPPPENVQLVNQYVSKNVISSEHIVEREAETSFSTSHYTSTAHHSTTVTQTPSHSWSNGHTESILSESHSVIVMSSVENSRHSSPTGGPRGRLNGTGGPRECNSFLRHARETPDSYRDSPHSERYVSAMTTPARMSPVDFHTPSSPKSPPSEMSPPVSSMTVSMPSMAVSPFMEEERPLLLVTPPRLREKKFDHHPQQFSSFHHNPAHDSNSLPA

SEQ ID NO: 32532 - protein, 590 aa, Homo sapiens
  REGION 1..590: note = ENSP00000429582
MGKGRAGRVGTTALPPRLKEMKSQESAAGSKLVLRCETSSEYSSLRFKWFKNGNELNRKNKPQNIKIQKKPGKSELRINKASLADSGEYMCKVISKLGNDSASANITIVESNATSTSTTGTSHLVKCAEKEKTFCVNGGECFMVKDLSNPSRYLCKCPNEFTGDRCQNYVMASFYKHLGIEFMEAEELYQKRVLTITGICIALLVVGIMCVVAYCKTKKQRKKLHDRLRQSLRSERNNMMNIANGPHHPNPPPENVQLVNQYVSKNVISSEHIVEREAETSFSTSHYTSTAHHSTTVTQTPSHSWSNGHTESILSESHSVIVMSSVENSRHSSPTGGPRGRLNGTGGPRECNSFLRHARETPDSYRDSPHSERYVSAMTTPARMSPVDFHTPSSPKSPPSEMSPPVSSMTVSMPSMAVSPFMEEERPLLLVTPPRLREKKFDHHPQQFSSFHHNPAHDSNSLPASPLRIVEDEEYETTQEYEPAQEPVKKLANSRRAKRTKPNGHIANRLEVDSNTSSQSSNSESETEDERVGEDTPFLGIQNPLAASLEATPAFRLADSRTNPAGRFSTQEEIQARLSSVIANQDPIAV

SEQ ID NO: 32533 - protein, 422 aa, Homo sapiens
  REGION 1..422: note = ENSP00000434640
MRWRRAPRRSGRPGPRAQRPGSAARSSPPLPLLPLLLLLGTAALAPGAAAGNEAAPAGASVCYSSPPSVGSVQELAQRAAVVIEGKVHPQRRQQGALDRKAAAAAGEAGAWGGDREPPAAGPRALGPPAEEPLLAANGTVPSWPTAPVPSAGEPGEEAPYLVKVHQVWAVKAGGLKKDSLLTVRLGTWGHPAFPSCGRLKEDSRYIFFMEPDANSTSRAPAAFRASFPPLETGRNLKKEVSRVLCKRCALPPRLKEMKSQESAAGSKLVLRCETSSEYSSLRFKWFKNGNELNRKNKPQNIKIQKKPGKSELRINKASLADSGEYMCKVISKLGNDSASANITIVESNATSTSTTGTSHLVKCAEKEKTFCVNGGECFMVKDLSNPSRYLCKCPNEFTGDRCQNYVMASFYSTSTPFLSLPE

SEQ ID NO: 32534 - protein, 713 aa, Homo sapiens
  REGION 1..713: note = ENSP00000429067
VPSAGEPGEEAPYLVKVHQVWAVKAGGLKKDSLLTVRLGTWGHPAFPSCGRLKEDSRYIFFMEPDANSTSRAPAAFRASFPPLETGRNLKKEVSRVLCKRCALPPRLKEMKSQESAAGSKLVLRCETSSEYSSLRFKWFKNGNELNRKNKPQNIKIQKKPGKSELRINKASLADSGEYMCKVISKLGNDSASANITIVESNEIITGMPASTEGAYVSSESPIRISVSTEGANTSSSTSTSTTGTSHLVKCAEKEKTFCVNGGECFMVKDLSNPSRYLCKCPNEFTGDRCQNYVMASFYKHLGIEFMEAEELYQKRVLTITGICIALLVVGIMCVVAYCKTKKQRKKLHDRLRQSLRSERNNMMNIANGPHHPNPPPENVQLVNQYVSKNVISSEHIVEREAETSFSTSHYTSTAHHSTTVTQTPSHSWSNGHTESILSESHSVIVMSSVENSRHSSPTGGPRGRLNGTGGPRECNSFLRHARETPDSYRDSPHSERYVSAMTTPARMSPVDFHTPSSPKSPPSEMSPPVSSMTVSMPSMAVSPFMEEERPLLLVTPPRLREKKFDHHPQQFSSFHHNPAHDSNSLPASPLRIVEDEEYETTQEYEPAQEPVKKLANSRRAKRTKPNGHIANRLEVDSNTSSQSSNSESETEDERVGEDTPFLGIQNPLAASLEATPAFRLADSRTNPAGRFSTQEEIQARLSSVIANQDPIAV

SEQ ID NO: 32535 - protein, 193 aa, Homo sapiens
  REGION 1..193: note = ENSP00000486375
MKKRNEMIFLATLKNKALPPRLKEMKSQESAAGSKLVLRCETSSEYSSLRFKWFKNGNELNRKNKPQNIKIQKKPGKSELRINKASLADSGEYMCKVISKLGNDSASANITIVESNEIITGMPASTEGAYVSSESPIRISVSTEGANTSSSTSTSTTGTSHLVKCAEKEKTFCVNGGECFMVKDLSNPSRYLC

SEQ ID NO: 32536 - protein, 420 aa, Homo sapiens
  REGION 1..420: note = ENSP00000430120
MSERKEGRGKGKGKKKERGSGKKPESAAGSQSPALPPRLKEMKSQESAAGSKLVLRCETSSEYSSLRFKWFKNGNELNRKNKPQNIKIQKKPGKSELRINKASLADSGEYMCKVISKLGNDSASANITIVESNEIITGMPASTEGAYVSSESPIRISVSTEGANTSSSTSTSTTGTSHLVKCAEKEKTFCVNGGECFMVKDLSNPSRYLCKCPNEFTGDRCQNYVMASFYKAEELYQKRVLTITGICIALLVVGIMCVVAYCKTKKQRKKLHDRLRQSLRSERNNMMNIANGPHHPNPPPENVQLVNQYVSKNVISSEHIVEREAETSFSTSHYTSTAHHSTTVTQTPSHSWSNGHTESILSESHSVIVMSSVENSRHSSPTGGPRGRLNGTGGPRECNSFLRHARETPDSYRDSPHSER

SEQ ID NO: 32537 - protein, 637 aa, Homo sapiens
  REGION 1..637: note = ENSP00000349275
MSERKEGRGKGKGKKKERGSGKKPESAAGSQSPALPPRLKEMKSQESAAGSKLVLRCETSSEYSSLRFKWFKNGNELNRKNKPQNIKIQKKPGKSELRINKASLADSGEYMCKVISKLGNDSASANITIVESNEIITGMPASTEGAYVSSESPIRISVSTEGANTSSSTSTSTTGTSHLVKCAEKEKTFCVNGGECFMVKDLSNPSRYLCKCPNEFTGDRCQNYVMASFYKAEELYQKRVLTITGICIALLVVGIMCVVAYCKTKKQRKKLHDRLRQSLRSERNNMMNIANGPHHPNPPPENVQLVNQYVSKNVISSEHIVEREAETSFSTSHYTSTAHHSTTVTQTPSHSWSNGHTESILSESHSVIVMSSVENSRHSSPTGGPRGRLNGTGGPRECNSFLRHARETPDSYRDSPHSERYVSAMTTPARMSPVDFHTPSSPKSPPSEMSPPVSSMTVSMPSMAVSPFMEEERPLLLVTPPRLREKKFDHHPQQFSSFHHNPAHDSNSLPASPLRIVEDEEYETTQEYEPAQEPVKKLANSRRAKRTKPNGHIANRLEVDSNTSSQSSNSESETEDERVGEDTPFLGIQNPLAASLEATPAFRLADSRTNPAGRFSTQEEIQARLSSVIANQDPIAV

SEQ ID NO: 32538 - protein, 462 aa, Homo sapiens
  REGION 1..462: note = ENSP00000428828
MSERKEGRGKGKGKKKERGSGKKPESAAGSQSPALPPRLKEMKSQESAAGSKLVLRCETSSEYSSLRFKWFKNGNELNRKNKPQNIKIQKKPGKSELRINKASLADSGEYMCKVISKLGNDSASANITIVESNEIITGMPASTEGAYVSSESPIRISVSTEGANTSSSTSTSTTGTSHLVKCAEKEKTFCVNGGECFMVKDLSNPSRYLCKCQPGFTGARCTENVPMKVQNQEKAEELYQKRVLTITGICIALLVVGIMCVVAYCKTKKQRKKLHDRLRQSLRSERNNMMNIANGPHHPNPPPENVQLVNQYVSKNVISSEHIVEREAETSFSTSHYTSTAHHSTTVTQTPSHSWSNGHTESILSESHSVIVMSSVENSRHSSPTGGPRGRLNGTGGPRECNSFLRHARETPDSYRDSPHSERHNLIAELRRNKAHRSKCMQIQLSATHLRSSSIPHLGFIL

SEQ ID NO: 32539 - protein, 645 aa, Homo sapiens
  REGION 1..645: note = ENSP00000287842
MSERKEGRGKGKGKKKERGSGKKPESAAGSQSPALPPRLKEMKSQESAAGSKLVLRCETSSEYSSLRFKWFKNGNELNRKNKPQNIKIQKKPGKSELRINKASLADSGEYMCKVISKLGNDSASANITIVESNEIITGMPASTEGAYVSSESPIRISVSTEGANTSSSTSTSTTGTSHLVKCAEKEKTFCVNGGECFMVKDLSNPSRYLCKCPNEFTGDRCQNYVMASFYKHLGIEFMEAEELYQKRVLTITGICIALLVVGIMCVVAYCKTKKQRKKLHDRLRQSLRSERNNMMNIANGPHHPNPPPENVQLVNQYVSKNVISSEHIVEREAETSFSTSHYTSTAHHSTTVTQTPSHSWSNGHTESILSESHSVIVMSSVENSRHSSPTGGPRGRLNGTGGPRECNSFLRHARETPDSYRDSPHSERYVSAMTTPARMSPVDFHTPSSPKSPPSEMSPPVSSMTVSMPSMAVSPFMEEERPLLLVTPPRLREKKFDHHPQQFSSFHHNPAHDSNSLPASPLRIVEDEEYETTQEYEPAQEPVKKLANSRRAKRTKPNGHIANRLEVDSNTSSQSSNSESETEDERVGEDTPFLGIQNPLAASLEATPAFRLADSRTNPAGRFSTQEEIQARLSSVIANQDPIAV

SEQ ID NO: 32540 - protein, 640 aa, Homo sapiens
  REGION 1..640: note = ENSP00000384620
MSERKEGRGKGKGKKKERGSGKKPESAAGSQSPALPPRLKEMKSQESAAGSKLVLRCETSSEYSSLRFKWFKNGNELNRKNKPQNIKIQKKPGKSELRINKASLADSGEYMCKVISKLGNDSASANITIVESNEIITGMPASTEGAYVSSESPIRISVSTEGANTSSSTSTSTTGTSHLVKCAEKEKTFCVNGGECFMVKDLSNPSRYLCKCQPGFTGARCTENVPMKVQNQEKAEELYQKRVLTITGICIALLVVGIMCVVAYCKTKKQRKKLHDRLRQSLRSERNNMMNIANGPHHPNPPPENVQLVNQYVSKNVISSEHIVEREAETSFSTSHYTSTAHHSTTVTQTPSHSWSNGHTESILSESHSVIVMSSVENSRHSSPTGGPRGRLNGTGGPRECNSFLRHARETPDSYRDSPHSERYVSAMTTPARMSPVDFHTPSSPKSPPSEMSPPVSSMTVSMPSMAVSPFMEEERPLLLVTPPRLREKKFDHHPQQFSSFHHNPAHDSNSLPASPLRIVEDEEYETTQEYEPAQEPVKKLANSRRAKRTKPNGHIANRLEVDSNTSSQSSNSESETEDERVGEDTPFLGIQNPLAASLEATPAFRLADSRTNPAGRFSTQEEIQARLSSVIANQDPIAV

SEQ ID NO: 32541 - protein, 126 aa, Homo sapiens
  REGION 1..126: note = ENSP00000432052
  VARIANT 1: note = Any amino acid
XASANITIVESNEIITGMPASTEGAYVSSESPIRISVSTEGANTSSSTSTSTTGTSHLVKCAEKEKTFCVNGGECFMVKDLSNPSRYLCKCQPGFTGARCTENVPMKVQNQESAQMSLLVIAAKTT

SEQ ID NO: 32542 - protein, 296 aa, Homo sapiens
  REGION 1..296: note = ENSP00000433289
MEIYSPDMSEVAAERSSSPSTQLSADPSLDGLPAAEDMPEPQTEDGRTPGLVGLAVPCCACLEAERLRGCLNSEKICIVPILACLVSLCLCIAGLKWVFVDKIFEYDSPTHLDPGGLGQDPIISLDATAASAVWVSSEAYTSPVSRAQSESEVQVTVQGDKAVVSFEPSAAPTPKNRIFAFSFLPSTAPSFPSPTRNPEVRTPKSATQPQTTETNLQTAPKLSTSTSTTGTSHLVKCAEKEKTFCVNGGECFMVKDLSNPSRYLCKCPNEFTGDRCQNYVMASFYSTSTPFLSLPE

SEQ ID NO: 32543 - protein, 196 aa, Homo sapiens
  REGION 1..196: note = ENSP00000433350
PQTEDGRTPGLVGLAVPCCACLEAERLRGCLNSEKICIVPILACLVSLCLCIAGLKWVFVDKIFEYDSPTHLDPGGLGQDPIISLDATAASAVWVSSEAYTSPVSRAQSESEVQVTVQGDKAVVSFEPSAAPTPKNRIFAFSFLPSTAPSFPSPTRNPEVRTPKSATQPQTTETNLQTAPKLCAQMSLLVIAAKTT

SEQ ID NO: 32544 - protein, 101 aa, Homo sapiens
  REGION 1..101: note = ENSP00000428546
MQIPKHISIEDITATSTSTTGTSHLVKCAEKEKTFCVNGGECFMVKDLSNPSRYLCKCPNEFTGDRCQNYVMASFYKHLGIEFMEAEELYQKRVLTITGIC

SEQ ID NO: 32545 - protein, 128 aa, Homo sapiens
  REGION 1..128: note = ENSP00000430862
MQIPKHISIEDITATSTSTTGTSHLVKCAEKEKTFCVNGGECFMVKDLSNPSRYLCKCQPGFTGARCTENVPMKVQNQEKAEELYQKRVLTITGICIALLVVGIMCVVAYCKTKKQRKKLHDRLRQSL

SEQ ID NO: 32546 - protein, 135 aa, Homo sapiens
  REGION 1..135: note = ENSP00000428411
MQIPKHISIEDITATSTSTTGTSHLVKCAEKEKTFCVNGGECFMVKDLSNPSRYLCKCPNEFTGDRCQNYVMASFYKAEELYQKRVLTITGICIALLVVGIMCVVAYCKTKKQRKKLHDRLRQSLRSERNNMMNI

SEQ ID NO: 32547 - protein, 308 aa, Homo sapiens
  REGION 1..308: note = ENSP00000439276
MQIPKHISIEDITATSTSTTGTSHLVKCAEKEKTFCVNGGECFMVKDLSNPSRYLCKCQPGFTGARCTENVPMKVQNQEKAEELYQKRVLTITGICIALLVVGIMCVVAYCKTKKQRKKLHDRLRQSLRSERNNMMNIANGPHHPNPPPENVQLVNQYVSKNVISSEHIVEREAETSFSTSHYTSTAHHSTTVTQTPSHSWSNGHTESILSESHSVIVMSSVENSRHSSPTGGPRGRLNGTGGPRECNSFLRHARETPDSYRDSPHSERHNLIAELRRNKAHRSKCMQIQLSATHLRSSSIPHLGFIL

SEQ ID NO: 32548 - protein, 254 aa, Homo sapiens [sequence omitted]

SEQ ID NO: 32549 - protein, 858 aa, Homo sapiens
  REGION 1..858: note = ENSP00000289422
MRQVCCSALPPPPLEKGRCSSYSDSSSSSSERSSSSSSSSSESGSSSRSSSNNSSISRPAAPPEPRPQQQPQPRSPAARRAAARSRAAAAGGMRRDPAPGFSMLLFGVSLACYSPSLKSVQDQAYKAPVVVEGKVQGLVPAGGSSSNSTREPPASGRVALVKVLDKWPLRSGGLQREQVISVGSCVPLERNQRYIFFLEPTEQPLVFKTAFAPLDTNGKNLKKEVGKILCTDCATRPKLKKMKSQTGQVGEKQSLKCEAAAGNPQPSYRWFKDGKELNRSRDIRIKYGNGRKNSRLQFNKVKVEDAGEYVCEAENILGKDTVRGRLYVNSVSTTLSSWSGHARKCNETAKSYCVNGGVCYYIEGINQLSCKCPNGFFGQRCLEKLPLRLYMPDPKQKHLGFELKEAEELYQKRVLTITGICVALLVVGIVCVVAYCKTKKQRKQMHNHLRQNMCPAHQNRSLANGPSHPRLDPEEIQMADYISKNVPATDHVIRRETETTFSGSHSCSPSHHCSTATPTSSHRHESHTWSLERSESLTSDSQSGIMLSSVGTSKCNSPACVEARARRAAAYNLEERRRATAPPYHDSVDSLRDSPHSERYVSALTTPARLSPVDFHYSLATQVPTFEITSPNSAHAVSLPPAAPISYRLAEQQPLLRHPAPPGPGPGPGPGPGPGADMQRSYDSYYYPAAGPGPRRGTCALGGSLGSLPASPFRIPEDDEYETTQECAPPPPPRPRARGASRRTSAGPRRWRRSRLNGLAAQRARAARDSLSLSSGSGGGSASASDDDADDADGALAAESTPFLGLRGAHDALRSDSPPLCPAADSRTYYSLDSHSTRASSRHSRGPPPRAKQDSAPL

SEQ ID NO: 32550 - protein, 850 aa, Homo sapiens
  REGION 1..850: note = ENSP00000354910
MRQVCCSALPPPPLEKGRCSSYSDSSSSSSERSSSSSSSSSESGSSSRSSSNNSSISRPAAPPEPRPQQQPQPRSPAARRAAARSRAAAAGGMRRDPAPGFSMLLFGVSLACYSPSLKSVQDQAYKAPVVVEGKVQGLVPAGGSSSNSTREPPASGRVALVKVLDKWPLRSGGLQREQVISVGSCVPLERNQRYIFFLEPTEQPLVFKTAFAPLDTNGKNLKKEVGKILCTDCATRPKLKKMKSQTGQVGEKQSLKCEAAAGNPQPSYRWFKDGKELNRSRDIRIKYGNGRKNSRLQFNKVKVEDAGEYVCEAENILGKDTVRGRLYVNSVSTTLSSWSGHARKCNETAKSYCVNGGVCYYIEGINQLSCKCPNGFFGQRCLEKLPLRLYMPDPKQKAEELYQKRVLTITGICVALLVVGIVCVVAYCKTKKQRKQMHNHLRQNMCPAHQNRSLANGPSHPRLDPEEIQMADYISKNVPATDHVIRRETETTFSGSHSCSPSHHCSTATPTSSHRHESHTWSLERSESLTSDSQSGIMLSSVGTSKCNSPACVEARARRAAAYNLEERRRATAPPYHDSVDSLRDSPHSERYVSALTTPARLSPVDFHYSLATQVPTFEITSPNSAHAVSLPPAAPISYRLAEQQPLLRHPAPPGPGPGPGPGPGPGADMQRSYDSYYYPAAGPGPRRGTCALGGSLGSLPASPFRIPEDDEYETTQECAPPPPPRPRARGASRRTSAGPRRWRRSRLNGLAAQRARAARDSLSLSSGSGGGSASASDDDADDADGALAAESTPFLGLRGAHDALRSDSPPLCPAADSRTYYSLDSHSTRASSRHSRGPPPRAKQDSAPL

SEQ ID NO: 32551 - protein, 647 aa, Homo sapiens
  REGION 1..647: note = ENSP00000342660
MSESRRRGRGRGKKHPEGRKREREPDPGEKATRPKLKKMKSQTGQVGEKQSLKCEAAAGNPQPSYRWFKDGKELNRSRDIRIKYGNGRKNSRLQFNKVKVEDAGEYVCEAENILGKDTVRGRLYVNSVSTTLSSWSGHARKCNETAKSYCVNGGVCYYIEGINQLSCKCPNGFFGQRCLEKLPLRLYMPDPKQKAEELYQKRVLTITGICVALLVVGIVCVVAYCKTKKQRKQMHNHLRQNMCPAHQNRSLANGPSHPRLDPEEIQMADYISKNVPATDHVIRRETETTFSGSHSCSPSHHCSTATPTSSHRHESHTWSLERSESLTSDSQSGIMLSSVGTSKCNSPACVEARARRAAAYNLEERRRATAPPYHDSVDSLRDSPHSERYVSALTTPARLSPVDFHYSLATQVPTFEITSPNSAHAVSLPPAAPISYRLAEQQPLLRHPAPPGPGPGPGPGPGPGADMQRSYDSYYYPAAGPGPRRGTCALGGSLGSLPASPFRIPEDDEYETTQECAPPPPPRPRARGASRRTSAGPRRWRRSRLNGLAAQRARAARDSLSLSSGSGGGSASASDDDADDADGALAAESTPFLGLRGAHDALRSDSPPLCPAADSRTYYSLDSHSTRASSRHSRGPPPRAKQDSAPL

SEQ ID NO: 32552 - protein, 844 aa, Homo sapiens
  REGION 1..844: note = ENSP00000289409
MRQVCCSALPPPPLEKGRCSSYSDSSSSSSERSSSSSSSSSESGSSSRSSSNNSSISRPAAPPEPRPQQQPQPRSPAARRAAARSRAAAAGGMRRDPAPGFSMLLFGVSLACYSPSLKSVQDQAYKAPVVVEGKVQGLVPAGGSSSNSTREPPASGRVALVKVLDKWPLRSGGLQREQVISVGSCVPLERNQRYIFFLEPTEQPLVFKTAFAPLDTNGKNLKKEVGKILCTDCATRPKLKKMKSQTGQVGEKQSLKCEAAAGNPQPSYRWFKDGKELNRSRDIRIKYGNGRKNSRLQFNKVKVEDAGEYVCEAENILGKDTVRGRLYVNSVSTTLSSWSGHARKCNETAKSYCVNGGVCYYIEGINQLSCKCPVGYTGDRCQQFAMVNFSKAEELYQKRVLTITGICVALLVVGIVCVVAYCKTKKQRKQMHNHLRQNMCPAHQNRSLANGPSHPRLDPEEIQMADYISKNVPATDHVIRRETETTFSGSHSCSPSHHCSTATPTSSHRHESHTWSLERSESLTSDSQSGIMLSSVGTSKCNSPACVEARARRAAAYNLEERRRATAPPYHDSVDSLRDSPHSERYVSALTTPARLSPVDFHYSLATQVPTFEITSPNSAHAVSLPPAAPISYRLAEQQPLLRHPAPPGPGPGPGPGPGPGADMQRSYDSYYYPAAGPGPRRGTCALGGSLGSLPASPFRIPEDDEYETTQECAPPPPPRPRARGASRRTSAGPRRWRRSRLNGLAAQRARAARDSLSLSSGSGGGSASASDDDADDADGALAAESTPFLGLRGAHDALRSDSPPLCPAADSRTYYSLDSHSTRASSRHSRGPPPRAKQDSAPL

SEQ ID NO: 32553 - protein, 852 aa, Homo sapiens
  REGION 1..852: note = ENSP00000351323
MRQVCCSALPPPPLEKGRCSSYSDSSSSSSERSSSSSSSSSESGSSSRSSSNNSSISRPAAPPEPRPQQQPQPRSPAARRAAARSRAAAAGGMRRDPAPGFSMLLFGVSLACYSPSLKSVQDQAYKAPVVVEGKVQGLVPAGGSSSNSTREPPASGRVALVKVLDKWPLRSGGLQREQVISVGSCVPLERNQRYIFFLEPTEQPLVFKTAFAPLDTNGKNLKKEVGKILCTDCATRPKLKKMKSQTGQVGEKQSLKCEAAAGNPQPSYRWFKDGKELNRSRDIRIKYGNGRKNSRLQFNKVKVEDAGEYVCEAENILGKDTVRGRLYVNSVSTTLSSWSGHARKCNETAKSYCVNGGVCYYIEGINQLSCKCPVGYTGDRCQQFAMVNFSKHLGFELKEAEELYQKRVLTITGICVALLVVGIVCVVAYCKTKKQRKQMHNHLRQNMCPAHQNRSLANGPSHPRLDPEEIQMADYISKNVPATDHVIRRETETTFSGSHSCSPSHHCSTATPTSSHRHESHTWSLERSESLTSDSQSGIMLSSVGTSKCNSPACVEARARRAAAYNLEERRRATAPPYHDSVDSLRDSPHSERYVSALTTPARLSPVDFHYSLATQVPTFEITSPNSAHAVSLPPAAPISYRLAEQQPLLRHPAPPGPGPGPGPGPGPGADMQRSYDSYYYPAAGPGPRRGTCALGGSLGSLPASPFRIPEDDEYETTQECAPPPPPRPRARGASRRTSAGPRRWRRSRLNGLAAQRARAARDSLSLSSGSGGGSASASDDDADDADGALAAESTPFLGLRGAHDALRSDSPPLCPAADSRTYYSLDSHSTRASSRHSRGPPPRAKQDSAPL

SEQ ID NO: 32554 - protein, 426 aa, Homo sapiens
  REGION 1..426: note = ENSP00000367483
MRQVCCSALPPPPLEKGRCSSYSDSSSSSSERSSSSSSSSSESGSSSRSSSNNSSISRPAAPPEPRPQQQPQPRSPAARRAAARSRAAAAGGMRRDPAPGFSMLLFGVSLACYSPSLKSVQDQAYKAPVVVEGKVQGLVPAGGSSSNSTREPPASGRVALVKVLDKWPLRSGGLQREQVISVGSCVPLERNQRYIFFLEPTEQPLVFKTAFAPLDTNGKNLKKEVGKILCTDCATRPKLKKMKSQTGQVGEKQSLKCEAAAGNPQPSYRWFKDGKELNRSRDIRIKYGNGRKNSRLQFNKVKVEDAGEYVCEAENILGKDTVRGRLYVNSVSTTLSSWSGHARKCNETAKSYCVNGGVCYYIEGINQLSCKCPNGFFGQRCLEKLPLRLYMPDPKQSVLWDTPGTGVSSSQWSTSPKPRSCTRRGS

SEQ ID NO: 32555 - protein, 784 aa, Homo sapiens
  REGION 1..784: note = ENSP00000444235
MRQVCCSALPPPPLEKGRCSSYSDSSSSSSERSSSSSSSSSESGSSSRSSSNNSSISRPAAPPEPRPQQQPQPRSPAARRAAARSRAAAAGGMRRDPAPGFSMLLFGVSLACYSPSLKSVQDQAYKAPVVVEGKVQGLVPAGGSSSNSTREPPASGRVALVKVLDKWPLRSGGLQREQVISVGSCVPLERNQRYIFFLEPTEQPLVFKTAFAPLDTNGKNLKKEVGKILCTDCATRPKLKKMKSQTGQVGEKQSLKCEAAAGNPQPSYRWFKDGKELNRSRDIRIKYGNGRKNSRLQFNKVKVEDAGEYVCEAENILGKDTVRGRLYVNSEAEELYQKRVLTITGICVALLVVGIVCVVAYCKTKKQRKQMHNHLRQNMCPAHQNRSLANGPSHPRLDPEEIQMADYISKNVPATDHVIRRETETTFSGSHSCSPSHHCSTATPTSSHRHESHTWSLERSESLTSDSQSGIMLSSVGTSKCNSPACVEARARRAAAYNLEERRRATAPPYHDSVDSLRDSPHSERYVSALTTPARLSPVDFHYSLATQVPTFEITSPNSAHAVSLPPAAPISYRLAEQQPLLRHPAPPGPGPGPGPGPGPGADMQRSYDSYYYPAAGPGPRRGTCALGGSLGSLPASPFRIPEDDEYETTQECAPPPPPRPRARGASRRTSAGPRRWRRSRLNGLAAQRARAARDSLSLSSGSGGGSASASDDDADDADGALAAESTPFLGLRGAHDALRSDSPPLCPAADSRTYYSLDSHSTRASSRHSRGPPPRAKQDSAPL

SEQ ID NO: 32556 - protein, 696 aa, Homo sapiens
  REGION 1..696: note = ENSP00000361214
MSEGAAAASPPGAASAAAASAEEGTAAAAAAAAAGGGPDGGGEGAAEPPRELRCSDCIVWNRQQTWLCVVPLFIGFIGLGLSLMLLKWIVVGSVKEYVPTDLVDSKGMGQDPFFLSKPSSFPKAMETTTTTTSTTSPATPSAGGAASSRTPNRISTRLTTITRAPTRFPGHRVPIRASPRSTTARNTAAPATVPSTTAPFFSSSTLGSRPPVPGTPSTQAMPSWPTAAYATSSYLHDSTPSWTLSPFQDAASSSSSSSSSATTTTPETSTSPKFHTTTYSTERSEHFKPCRDKDLAYCLNDGECFVIETLTGSHKHCRCKEGYQGVRCDQFLPKTDSILSDPTDHLGIEFMESEEVYQRQVLSISCIIFGIVIVGMFCAAFYFKSKKQAKQIQEQLKVPQNGKSYSLKASSTMAKSENLVKSHVQLQNYSKVERHPVTALEKMMESSFVGPQSFPEVPSPDRGSQSVKHHRSLSSCCSPGQRSGMLHRNAFRRTPPSPRSRLGGIVGPAYQQLEESRIPDQDTIPCQGYSSSGLKTQRNTSINMQLPSRETNPYFNSLEQKDLVGYSSTRASSVPIIPSVGLEETCLQMPGISEVKSIKWCKNSYSADVVNVSIPVSDCLIAEQQEVKILLETVQEQIRILTDARRSEDYELASVETEDSASENTAFLPLSPTAKSEREAQFVLRNEIQRDSALTK

SEQ ID NO: 32557 - protein, 720 aa, Homo sapiens
  REGION 1..720: note = ENSP00000384796
MSEGAAAASPPGAASAAAASAEEGTAAAAAAAAAGGGPDGGGEGAAEPPRELRCSDCIVWNRQQTWLCVVPLFIGFIGLGLSLMLLKWIVVGSVKEYVPTDLVDSKGMGQDPFFLSKPSSFPKAMETTTTTTSTTSPATPSAGGAASSRTPNRISTRLTTITRAPTRFPGHRVPIRASPRSTTARNTAAPATVPSTTAPFFSSSTLGSRPPVPGTPSTQAMPSWPTAAYATSSYLHDSTPSWTLSPFQDAASSSSSSSSSATTTTPETSTSPKFHTTTYSTERSEHFKPCRDKDLAYCLNDGECFVIETLTGSHKHCRCKEGYQGVRCDQFLPKTDSILSDPTDHLGIEFMESEEVYQRQVLSISCIIFGIVIVGMFCAAFYFKSKKQAKQIQEQLKVPQNGKSYSLKASSTMAKSENLVKSHVQLQNYSKVERHPVTALEKMMESSFVGPQSFPEVPSPDRGSQSVKHHRSLSSCCSPGQRSGMLHRNAFRRTPPSPRSRLGGIVGPAYQQLEESRIPDQDTIPCQGIEVRKTISHLPIQLWCVERPLDLKYSSSGLKTQRNTSINMQLPSRETNPYFNSLEQKDLVGYSSTRASSVPIIPSVGLEETCLQMPGISEVKSIKWCKNSYSADVVNVSIPVSDCLIAEQQEVKILLETVQEQIRILTDARRSEDYELASVETEDSASENTAFLPLSPTAKSEREAQFVLRNEIQRDSALTK

SEQ ID NO: 32558 - protein, 499 aa, Homo sapiens
  REGION 1..499: note = ENSP00000361215
MECGIPPTLVCVGRGGGLHTINIIIWYYFPSAWRTCFNISSSVGLLLTNSYKFYTTTYSTERSEHFKPCRDKDLAYCLNDGECFVIETLTGSHKHCRCKEGYQGVRCDQFLPKTDSILSDPTDHLGIEFMESEEVYQRQVLSISCIIFGIVIVGMFCAAFYFKSKKQAKQIQEQLKVPQNGKSYSLKASSTMAKSENLVKSHVQLQNYSKVERHPVTALEKMMESSFVGPQSFPEVPSPDRGSQSVKHHRSLSSCCSPGQRSGMLHRNAFRRTPPSPRSRLGGIVGPAYQQLEESRIPDQDTIPCQGIEVRKTISHLPIQLWCVERPLDLKYSSSGLKTQRNTSINMQLPSRETNPYFNSLEQKDLVGYSSTRASSVPIIPSVGLEETCLQMPGISEVKSIKWCKNSYSADVVNVSIPVSDCLIAEQQEVKILLETVQEQIRILTDARRSEDYELASVETEDSASENTAFLPLSPTAKSEREAQFVLRNEIQRDSALTK

SEQ ID NO: 32559 - protein, 54 aa, Homo sapiens
  REGION 1..54: note = ENSP00000473669
MECGIPPTLVCVGRGGGLHTVFQRQKLLYELIATSPFWFHLRSSLQKPLSTFWN

SEQ ID NO: 32560 - protein, 76 aa, Homo sapiens
  REGION 1..76: note = ENSP00000451858
MECGIPPTLVCVGRGGGLHTVGVFHVLSQLISLCTIPEVFKEKPKIRRHIPQSDPSTSNPAETRTLHTVSMMASAL

SEQ ID NO: 32561 - protein, 500 aa, Homo sapiens
  REGION 1..500: note = ENSP00000385804
MECGIPPTLVCVGRGGGLHTVGVFHVLSQLISLCTIPEVFKEKPKINIIIWYYFPSAWRTCFNISSSVGLLLTNSYKFYTTTYSTERSEHFKPCRDKDLAYCLNDGECFVIETLTGSHKHCRCKEGYQGVRCDQFLPKTDSILSDPTDHLGIEFMESEEVYQRQVLSISCIIFGIVIVGMFCAAFYFKSKKQAKQIQEQLKVPQNGKSYSLKASSTMAKSENLVKSHVQLQNYSKVERHPVTALEKMMESSFVGPQSFPEVPSPDRGSQSVKHHRSLSSCCSPGQRSGMLHRNAFRRTPPSPRSRLGGIVGPAYQQLEESRIPDQDTIPCQGYSSSGLKTQRNTSINMQLPSRETNPYFNSLEQKDLVGYSSTRASSVPIIPSVGLEETCLQMPGISEVKSIKWCKNSYSADVVNVSIPVSDCLIAEQQEVKILLETVQEQIRILTDARRSEDYELASVETEDSASENTAFLPLSPTAKSEREAQFVLRNEIQRDSALTK

SEQ ID NO: 32562 - protein, 526 aa, Homo sapiens
  REGION 1..526: note = ENSP00000451376
MECGIPPTLVCVGRGGGLHTVGVFHVLSQLISLCTIPEVFKEKPKINIIIWYYFPSAWRTCFNISSSVGLLLTNSYKFCPRDRRHAIHGNMGKTRVVRRQKQEQDTTTYSTERSEHFKPCRDKDLAYCLNDGECFVIETLTGSHKHCRCKEGYQGVRCDQFLPKTDSILSDPTDHLGIEFMESEEVYQRQVLSISCIIFGIVIVGMFCAAFYFKSKKQAKQIQEQLKVPQNGKSYSLKASSTMAKSENLVKSHVQLQNYSKVERHPVTALEKMMESSFVGPQSFPEVPSPDRGSQSVKHHRSLSSCCSPGQRSGMLHRNAFRRTPPSPRSRLGGIVGPAYQQLEESRIPDQDTIPCQGYSSSGLKTQRNTSINMQLPSRETNPYFNSLEQKDLVGYSSTRASSVPIIPSVGLEETCLQMPGISEVKSIKWCKNSYSADVVNVSIPVSDCLIAEQQEVKILLETVQEQIRILTDARRSEDYELASVETEDSASENTAFLPLSPTAKSEREAQFVLRNEIQRDSALTK

SEQ ID NO: 32563 - protein, 346 aa, Homo sapiens
  REGION 1..346: note = ENSP00000440377
MESEEVYQRQVLSISCIIFGIVIVGMFCAAFYFKSKKQAKQIQEQLKVPQNGKSYSLKASSTMAKSENLVKSHVQLQNYSKVERHPVTALEKMMESSFVGPQSFPEVPSPDRGSQSVKHHRSLSSCCSPGQRSGMLHRNAFRRTPPSPRSRLGGIVGPAYQQLEESRIPDQDTIPCQGYSSSGLKTQRNTSINMQLPSRETNPYFNSLEQKDLVGYSSTRASSVPIIPSVGLEETCLQMPGISEVKSIKWCKNSYSADVVNVSIPVSDCLIAEQQEVKILLETVQEQIRILTDARRSEDYELASVETEDSASENTAFLPLSPTAKSEREAQFVLRNEIQRDSALTK

SEQ ID NO: 32564 - protein, 346 aa, Homo sapiens; identical to SEQ ID NO: 32563
  REGION 1..346: note = ENSP00000441201

SEQ ID NO: 32565 - protein, 78 aa, Homo sapiens
  REGION 1..78: note = ENSP00000284292
MDCCTENACSKPDDDILDIPLDDPGANAAAAKIQASFRGHMARKKIKSGERGRKGPGPGGPGGAGVARGGAGGGPSGD

SEQ ID NO: 32566 - protein, 78 aa, Homo sapiens; identical to SEQ ID NO: 32565
  REGION 1..78: note = ENSP00000399591

SEQ ID NO: 32567 - protein, 241 aa, Homo sapiens
  REGION 1..241: note = ENSP00000310205
MFYSGLLTEGGRKETDMREAASLRQQRRMKQAVQFIHKDSADLLPLDGLKKLGSSKDMQPHNILQRRLMETNLSKLRSGPRVPWASKTNKLNQAKSEGLKKSEEDDMILVSCQCAGKDVKALVDTGCLYNLISLACVDRLGLKEHVKSHKHEGEKLSLPRHLKVVGQIEHLVITLGSLRLDCPAAVVDDNEKNLSLGLQTLRSLKCIINLDKHRLIMGKTDKEEIPFVETVSLNEDNTSEA

SEQ ID NO: 32568 - protein, 55 aa, Homo sapiens
  REGION 1..55: note = ENSP00000435785
  VARIANT 1: note = Any amino acid
XLGLQTLRSLKCIINLDKHRLIMGKTDKEEIPFVETVSLNEDKSREASELSKFIY

SEQ ID NO: 32569 - protein, 65 aa, Homo sapiens
  REGION 1..65: note = ENSP00000432002
ITLGSLRLDCPAAVVDDNEKNLSLGLQTLRSLKCIINLDKHRLIMGKTDKEEIPFVETVSLNEDK

SEQ ID NO: 32570 - protein, 141 aa, Homo sapiens
  REGION 1..141: note = ENSP00000432451
MFYSGLLTEGGRKETDMREAASLRQQRRMKQAVQFIHKDSADLLPLDGLKKLGSSKDMQPHNILQRRLMETNLSKLRSGPRVPWASKTNKLNQAKSEGLKKSEEDDMILVSCQCAGKDVKALVDTGCLYNLISLACVDRLG

SEQ ID NO: 32571 - protein, 160 aa, Homo sapiens
  REGION 1..160: note = ENSP00000433845
MFYSGLLTEGGRKETDMREAASLRQQRRMKQAVQFIHKDSADLLPLDGLKKLGSSKDMRRLMETNLSKLRSGPRVPWASKTNKLNQAKSEGLKKSEEDDMILVSCQCAGKDVKALVDTGCLYNLISLACVDRLGLKEHVKSHKHEGEKLSLPRHLKVVGQ

SEQ ID NO: 32572 - protein, 1582 aa, Homo sapiens
  REGION 1..1582: note = ENSP00000434830
MAGPGGWRDREVTDLGHLPDPTGIFSLDKTIGLGTYGRIYLGLHEKTGAFTAVKVMNARKTPLPEIGRRVRVNKYQKSVGWRYSDEEEDLRTELNLLRKYSFHKNIVSFYGAFFKLSPPGQRHQLWMVMELCAAGSVTDVVRMTSNQSLKEDWIAYICREILQGLAHLHAHRVIHRDIKGQNVLLTHNAEVKLVDFGVSAQVSRTNGRRNSFIGTPYWMAPEVIDCDEDPRRSYDYRSDVWSVGITAIEMAEGAPPLCNLQPLEALFVILRESAPTVKSSGWSRKFHNFMEKCTIKNFLFRPTSANMLQHPFVRDIKNERHVVESLTRHLTGIIKKRQKKGIPLIFEREEAIKEQYTVRRFRGPSCTHELLRLPTSSRCRPLRVLHGEPSQPRWLPDREEPQVQALQQLQGAARVFMPLQALDSAPKPLKGQAQAPQRLQGAARVFMPLQAQVKAKASKPLQMQIKAPPRLRRAARVLMPLQAQVRAPRLLQVQSQVSKKQQAQTQTSEPQDLDQVPEEFQGQDQVPEQQRQGQAPEQQQRHNQVPEQELEQNQAPEQPEVQEQAAEPAQAETEAEEPESLRVNAQVFLPLLSQDHHVLLPLHLDTQVLIPVEGQTEGSPQAQAWTLEPPQAIGSVQALIEGLSRDLLRAPNSNNSKPLGPLQTLMENLSSNRFYSQPEQAREKKSKVSTLRQALAKRLSPKRFRAKSSWRPEKLELSDLEARRQRRQRRWEDIFNQHEEELRQVDKDKEDESSDNDEVFHSIQAEVQIEPLKPYISNPKKIEVQERSPSVPNNQDHAHHVKFSSSVPQRSLLEQAQKPIDIRQRSSQNRQNWLAASESSSEEESPVTGRRSQSSPPYSTIDQKLLVDIHVPDGFKVGKISPPVYLTNEWVGYNALSEIFRNDWLTPAPVIQPPEEDGDYVELYDASADTDGDDDDESNDTFEDTYDHANGNDDLDNQVDQANDVCKDHDDDNNKFVDDVNNNYYEAPSCPRASYGRDGSCKQDGYDGSRGKEEAYRGYGSHTANRSHGGSAASEDNAAIGDQEEHAANIGSERRGSEGDGGKGVVRTSEESGALGLNGEENCSETDGPGLKRPASQDFEYLQEEPGGGNEASNAIDSGAAPSAPDHESDNKDISESSTQSDFSANHSSPSKGSGMSADANFASAILYAGFVEVPEESPKQPSEVNVNPLYVSPACKKPLIHMYEKEFTSEICCGSLWGVNLLLGTRSNLYLMDRSGKADITKLIRRRPFRQIQVLEPLNLLITISGHKNRLRVYHLTWLRNKILNNDPESKRRQEEMLKTEEACKAIDKLTGCEHFSVLQHEETTYIAIALKSSIHLYAWAPKSFDESTAIKVCIDQSADSEGDYMSYQAYIRILAKIQAADPVNRFKRPDELLHLLKLKVFPTLDHKPVTVDLAIGSEKRLKIFFSSADGYHLIDAESEVMSDVTLPKNPLEIIIPQNIIILPDCLGIGMMLTFNAEALSVEANEQLFKKILEMWKDIPSSIAFECTQRTTGWGQKAIEVRSLQSRVLESELKRRSIKKLRFLCTRGDKLFFTSTLRNHHSRVYFMTLGKLEELQSNYDV

SEQ ID NO: 32573 - protein, 188 aa, Homo sapiens
  REGION 1..188: note = ENSP00000438785
MAGPGGWRDREVTDLGHLPDPTGIFSLDKTIGLGTYGRIYLGLHEKTGAFTAVKVMNARKTPLPEIGRRVRVNKYQKSVGWRYSDEEEDLRTELNLLRKYSFHKNIVSFYGAFFKLSPPGQRHQLWMVMELCAAGSVTDVVRMTSNQSLKEDWIAYICREILQPKVIFLGTGCSDSSLKKELCLKHQN

SEQ ID NO: 32574 - protein, 355 aa, Homo sapiens
  REGION 1..355: note = ENSP00000438378
MAGPGGWRDREVTDLGHLPDPTGIFSLDKTIGLGTYGRIYLGLHEKTGAFTAVKVMNARKTPLPEIGRRVRVNKYQKSVGWRYSDEEEDLRTELNLLRKYSFHKNIVSFYGAFFKLSPPGQRHQLWMVMELCAAGSVTDVVRMTSNQSLKEDWIAYICREILQGLAHLHAHRVIHRDIKGQNVLLTHNAEVKLVDFGVSAQVSRTNGRRNSFIGTPYWMAPEVIDCDEDPRRSYDYRSDVWSVGITAIEMAEGAPPLCNLQPLEALFVILRESAPTVKSSGWSRKFHNFMEKCTIKNFLFRPTSANMLQHPFVRDIKNERHVVESLTRHLTGIIKKRQKKGFAVSQDHATALQPG

SEQ ID NO: 32575 - protein, 163 aa, Homo sapiens
  REGION 1..163: note = ENSP00000438148
MQVPRERIKIAFRLWIPILVIRIVVAGTWPQAPGLSTLGLNIIILPDCLGIGMMLTFNAEALSVEANEQLFKKILEMWKDIPSSIAFECTQRTTGWGQKAIEVRSLQSRVLESELKRRSIKKLRFLCTRGDKLFFTSTLRNHHSRVYFMTLGKLEELQSNYDV

SEQ ID NO: 32576 - protein, 1496 aa, Homo sapiens
  REGION 1..1496: note = ENSP00000485887
MGTALLQRGGCFLLCLSLLLLGCWAELGSGLEFPGAEGQWTRFPKWNACCESEMSFQLKTRSARGLVLYFDDEGFCDFLELILTRGGRLQLSFSIFCAEPATLLADTPVNDGAWHSVRIRRQFRNTTLFIDQVEAKWVEVKSKRRDMTVFSGLFVGGLPPELRAAALKLTLASVREREPFKGWIRDVRVNSSQVLPVDSGEVKLDDEPPNSGGGSPCEAGEEGEGGVCLNGGVCSVVDDQAVCDCSRTGFRGKDCSQEDNNVEGLAHLMMGDQGKSKGKEEYIATFKGSEYFCYDLSQNPIQSSSDEITLSFKTLQRNGLMLHTGKSADYVNLALKNGAVSLVINLGSGAFEALVEPVNGKFNDNAWHDVKVTRNLRQVTISVDGILTTTGYTQEDYTMLGSDDFFYVGGSPSTADLPGSPVSNNFMGCLKEVVYKNNDVRLELSRLAKQGDPKMKIHGVVAFKCENVATLDPITFETPESFISLPKWNAKKTGSISFDFRTTEPNGLILFSHGKPRHQKDAKHPQMIKVDFFAIEMLDGHLYLLLDMGSGTIKIKALLKKVNDGEWYHVDFQRDGRSGTISVNTLRTPYTAPGESEILDLDDELYLGGLPENKAGLVFPTEVWTALLNYGYVGCIRDLFIDGQSKDIRQMAEVQSTAGVKPSCSKETAKPCLSNPCKNNGMCRDGWNRYVCDCSGTGYLGRSCEREATVLSYDGSMFMKIQLPVVMHTEAEDVSLRFRSQRAYGILMATTSRDSADTLRLELDAGRVKLTVNLDCIRINCNSSKGPETLFAGYNLNDNEWHTVRVVRRGKSLKLTVDDQQAMTGQMAGDHTRLEFHNIETGIITERRYLSSVPSNFIGHLQSLTFNGMAYIDLCKNGDIDYCELNARFGFRNIIADPVTFKTKSSYVALATLQAYTSMHLFFQFKTTSLDGLILYNSGDGNDFIVVELVKGYLHYVFDLGNGANLIKGSSNKPLNDNQWHNVMISRDTSNLHTVKIDTKITTQITAGARNLDLKSDLYIGGVAKETYKSLPKLVHAKEGFQGCLASVDLNGRLPDLISDALFCNGQIERGCEGPSTTCQEDSCSNQGVCLQQWDGFSCDCSMTSFSGPLCNDPGTTYIFSKGGGQITYKWPPNDRPSTRADRLAIGFSTVQKEAVLVRVDSSSGLGDYLELHIHQGKIGVKFNVGTDDIAIEESNAIINDGKYHVVRFTRSGGNATLQVDSWPVIERYPAGNNDNERLAIARQRIPYRLGRVVDEWLLDKGRQLTIFNSQATIIIGGKEQGQPFQGQLSGLYYNGLKVLNMAAENDANIAIVGNVRLVGEVPSSMTTESTATAMQSEMSTSIMETTTTLATSTARRGKPPTKEPISQTTDDILVASAECPSDDEDIDPCEPSSANPTRAGGREPYPGSAEVIRESSSTTGMVVGIVAAAALCILILLYAMYKYRNRDEGSYHVDESRNYISNSAQSNGAVVKEKQPSSAKSSNKNKKNKDKEYYV

SEQ ID NO: 32577 - protein, 1477 aa, Homo sapiens
  REGION 1..1477: note = ENSP00000384311
MGTALLQRGGCFLLCLSLLLLGCWAELGSGLEFPGAEGQWTRFPKWNACCESEMSFQLKTRSARGLVLYFDDEGFCDFLELILTRGGRLQLSFSIFCAEPATLLADTPVNDGAWHSVRIRRQFRNTTLFIDQVEAKWVEVKSKRRDMTVFSGLFVGGLPPELRAAALKLTLASVREREPFKGWIRDVRVNSSQVLPVDSGEVKLDDEPPNSGGGSPCEAGEEGEGGVCLNGGVCSVVDDQAVCDCSRTGFRGKDCSQEDNNVEGLAHLMMGDQGKSKGKEEYIATFKGSEYFCYDLSQNPIQSSSDEITLSFKTLQRNGLMLHTGKSADYVNLALKNGAVSLVINLGSGAFEALVEPVNGKFNDNAWHDVKVTRNLRQHSGIGHAMVTISVDGILTTTGYTQEDYTMLGSDDFFYVGGSPSTADLPGSPVSNNFMGCLKEVVYKNNDVRLELSRLAKQGDPKMKIHGVVAFKCENVATLDPITFETPESFISLPKWNAKKTGSISFDFRTTEPNGLILFSHGKPRHQKDAKHPQMIKVDFFAIEMLDGHLYLLLDMGSGTIKIKALLKKVNDGEWYHVDFQRDGRSGTISVNTLRTPYTAPGESEILDLDDELYLGGLPENKAGLVFPTEVWTALLNYGYVGCIRDLFIDGQSKDIRQMAEVQSTAGVKPSCSKETAKPCLSNPCKNNGMCRDGWNRYVCDCSGTGYLGRSCEREATVLSYDGSMFMKIQLPVVMHTEAEDVSLRFRSQRAYGILMATTSRDSADTLRLELDAGRVKLTVNLDCIRINCNSSKGPETLFAGYNLNDNEWHTVRVVRRGKSLKLTVDDQQAMTGQMAGDHTRLEFHNIETGIITERRYLSSVPSNFIGHLQSLTFNGMAYIDLCKNGDIDYCELNARFGFRNIIADPVTFKTKSSYVALATLQAYTSMHLFFQFKTTSLDGLILYNSGDGNDFIVVELVKGYLHYVFDLGNGANLIKGSSNKPLNDNQWHNVMISRDTSNLHTVKIDTKITTQITAGARNLDLKSDLYIGGVAKETYKSLPKLVHAKEGFQGCLASVDLNGRLPDLISDALFCNGQIERGCEGPSTTCQEDSCSNQGVCLQQWDGFSCDCSMTSFSGPLCNDPGTTYIFSKGGGQITYKWPPNDRPSTRADRLAIGFSTVQKEAVLVRVDSSSGLGDYLELHIHQGKIGVKFNVGTDDIAIEESNAIINDGKYHVVRFTRSGGNATLQVDSWPVIERYPAGRQLTIFNSQATIIIGGKEQGQPFQGQLSGLYYNGLKVLNMAAENDANIAIVGNVRLVGEVPSSMTTESTATAMQSEMSTSIMETTTTLATSTARRGKPPTKEPISQTTDDILVASAECPSDDEDIDPCEPSSGGLANPTRAGGREPYPGSAEVIRESSSTTGMVVGIVAAAALCILILLYAMYKYRNRDEGSYHVDESRNYISNSAQSNGAVVKEKQPSSAKSSNKNKKNKDKEYYV

SEQ ID NO: 32578 - protein, 143 aa, Homo sapiens
  REGION 1..143: note = ENSP00000489745
MDMRWHCENLQVTTDDILVASAECPSDDEDIDPCEPSSGGLANPTRAGGREPYPGSAEVIRESSSTTGMVVGIVAAAALCILILLYAMYKYRNRDEGSYHVDESRNYISNSAQSNGAVVKEKQPSSAKSSNKNKKNKDKEYYV

SEQ ID NO: 32579 - protein, 62 aa, Homo sapiens
  REGION 1..62: note = ENSP00000489258
MDMRWHCENLQTTDDILVASAECPSDDEDIDPCEPSSGTKQTMWKTSRDHRILPNARRERKD

SEQ ID NO: 32580 - protein, 139 aa, Homo sapiens
  REGION 1..139: note = ENSP00000396738
MDMRWHCENLQTTDDILVASAECPSDDEDIDPCEPSSANPTRAGGREPYPGSAEVIRESSSTTGMVVGIVAAAALCILILLYAMYKYRNRDEGSYHVDESRNYISNSAQSNGAVVKEKQPSSAKSSNKNKKNKDKEYYV

SEQ ID NO: 32581 - protein, 1547 aa, Homo sapiens
  REGION 1..1547: note = ENSP00000385142
MGTALLQRGGCFLLCLSLLLLGCWAELGSGLEFPGAEGQWTRFPKWNACCESEMSFQLKTRSARGLVLYFDDEGFCDFLELILTRGGRLQLSFSIFCAEPATLLADTPVNDGAWHSVRIRRQFRNTTLFIDQVEAKWVEVKSKRRDMTVFSGLFVGGLPPELRAAALKLTLASVREREPFKGWIRDVRVNSSQVLPVDSGEVKLDDEPPNSGGGSPCEAGEEGEGGVCLNGGVCSVVDDQAVCDCSRTGFRGKDCSQEIKFGLQCVLPVLLHDNDQGKYCCINTAKPLTEKDNNVEGLAHLMMGDQGKSKGKEEYIATFKGSEYFCYDLSQNPIQSSSDEITLSFKTLQRNGLMLHTGKSADYVNLALKNGAVSLVINLGSGAFEALVEPVNGKFNDNAWHDVKVTRNLRQHSGIGHAMVNKLHCSVTISVDGILTTTGYTQEDYTMLGSDDFFYVGGSPSTADLPGSPVSNNFMGCLKEVVYKNNDVRLELSRLAKQGDPKMKIHGVVAFKCENVATLDPITFETPESFISLPKWNAKKTGSISFDFRTTEPNGLILFSHGKPRHQKDAKHPQMIKVDFFAIEMLDGHLYLLLDMGSGTIKIKALLKKVNDGEWYHVDFQRDGRSGTISVNTLRTPYTAPGESEILDLDDELYLGGLPENKAGLVFPTEVWTALLNYGYVGCIRDLFIDGQSKDIRQMAEVQSTAGVKPSCSKETAKPCLSNPCKNNGMCRDGWNRYVCDCSGTGYLGRSCEREATVLSYDGSMFMKIQLPVVMHTEAEDVSLRFRSQRAYGILMATTSRDSADTLRLELDAGRVKLTVNLDCIRINCNSSKGPETLFAGYNLNDNEWHTVRVVRRGKSLKLTVDDQQAMTGQMAGDHTRLEFHNIETGIITERRYLSSVPSNFIGHLQSLTFNGMAYIDLCKNGDIDYCELNARFGFRNIIADPVTFKTKSSYVALATLQAYTSMHLFFQFKTTSLDGLILYNSGDGNDFIVVELVKGYLHYVFDLGNGANLIKGSSNKPLNDNQWHNVMISRDTSNLHTVKIDTKITTQITAGARNLDLKSDLYIGGVAKETYKSLPKLVHAKEGFQGCLASVDLNGRLPDLISDALFCNGQIERGCEGPSTTCQEDSCSNQGVCLQQWDGFSCDCSMTSFSGPLCNDPGTTYIFSKGGGQITYKWPPNDRPSTRADRLAIGFSTVQKEAVLVRVDSSSGLGDYLELHIHQGKIGVKFNVGTDDIAIEESNAIINDGKYHVVRFTRSGGNATLQVDSWPVIERYPAGNNDNERLAIARQRIPYRLGRVVDEWLLDKGRQLTIFNSQATIIIGGKEQGQPFQGQLSGLYYNGLKVLNMAAENDANIAIVGNVRLVGEVPSSMTTESTATAMQSEMSTSIMETTTTLATSTARRGKPPTKEPISQTTDDILVASAECPSDDEDIDPCEPSSGGLANPTRAGGREPYPGSAEVIRESSSTTGMVVGIVAAAALCILILLYAMYKYRNRDEGSYHVDESRNYISNSAQSNGAVVKEKQPSSAKSSNKNKKNKDKEYYV

SEQ ID NO: 32582 - protein, 442 aa, Homo sapiens
  REGION 1..442: note = ENSP00000341184
MYQRMLRCGAELGSPGGGGGGGGGGGAGGRLALLWIVPLTLSGLLGVAWGASSLGAHHIHHFHGSSKHHSVPIAIYRSPASLRGGHAGTTYIFSKGGGQITYKWPPNDRPSTRADRLAIGFSTVQKEAVLVRVDSSSGLGDYLELHIHQGKIGVKFNVGTDDIAIEESNAIINDGKYHVVRFTRSGGNATLQVDSWPVIERYPAGRQLTIFNSQATIIIGGKEQGQPFQGQLSGLYYNGLKVLNMAAENDANIAIVGNVRLVGEVPSSMTTESTATAMQSEMSTSIMETTTTLATSTARRGKPPTKEPISQTTDDILVASAECPSDDEDIDPCEPSSGGLANPTRAGGREPYPGSAEVIRESSSTTGMVVGIVAAAALCILILLYAMYKYRNRDEGSYHVDESRNYISNSAQSNGAVVKEKQPSSAKSSNKNKKNKDKEYYV

SEQ ID NO: 32583 - protein, 142 aa, Homo sapiens
  REGION 1..142: note = ENSP00000367510
MDMRWHCENLQTTDDILVASAECPSDDEDIDPCEPSSGGLANPTRAGGREPYPGSAEVIRESSSTTGMVVGIVAAAALCILILLYAMYKYRNRDEGSYHVDESRNYISNSAQSNGAVVKEKQPSSAKSSNKNKKNKDKEYYV

SEQ ID NO: 32584 - protein, 472 aa, Homo sapiens
  REGION 1..472: note = ENSP00000385580
MYQRMLRCGAELGSPGGGGGGGGGGGAGGRLALLWIVPLTLSGLLGVAWGASSLGAHHIHHFHGSSKHHSVPIAIYRSPASLRGGHAGTTYIFSKGGGQITYKWPPNDRPSTRADRLAIGFSTVQKEAVLVRVDSSSGLGDYLELHIHQGKIGVKFNVGTDDIAIEESNAIINDGKYHVVRFTRSGGNATLQVDSWPVIERYPAGNNDNERLAIARQRIPYRLGRVVDEWLLDKGRQLTIFNSQATIIIGGKEQGQPFQGQLSGLYYNGLKVLNMAAENDANIAIVGNVRLVGEVPSSMTTESTATAMQSEMSTSIMETTTTLATSTARRGKPPTKEPISQTTDDILVASAECPSDDEDIDPCEPSSGGLANPTRAGGREPYPGSAEVIRESSSTTGMVVGIVAAAALCILILLYAMYKYRNRDEGSYHVDESRNYISNSAQSNGAVVKEKQPSSAKSSNKNKKNKDKEYYV

SEQ ID NO: 32585 - protein, 123 aa, Homo sapiens
  REGION 1..123: note = ENSP00000490198
TLSGLLGVAWGASSLGAHHIHHFHGSSKHHSVPIAIYRSPASLRGGHAGTTYIFSKGGGQITYKWPPNDRPSTRADRLAIGFSTVQKEAVLVRVDSSSGLGDYLELHIAFESFTASRSSASRC

SEQ ID NO: 32586 - protein, 1507 aa, Homo sapiens
  REGION 1..1507: note = ENSP00000385017
MGTALLQRGGCFLLCLSLLLLGCWAELGSGLEFPGAEGQWTRFPKWNACCESEMSFQLKTRSARGLVLYFDDEGFCDFLELILTRGGRLQLSFSIFCAEPATLLADTPVNDGAWHSVRIRRQFRNTTLFIDQVEAKWVEVKSKRRDMTVFSGLFVGGLPPELRAAALKLTLASVREREPFKGWIRDVRVNSSQVLPVDSGEVKLDDEPPNSGGGSPCEAGEEGEGGVCLNGGVCSVVDDQAVCDCSRTGFRGKDCSQEDNNVEGLAHLMMGDQGKSKGKEEYIATFKGSEYFCYDLSQNPIQSSSDEITLSFKTLQRNGLMLHTGKSADYVNLALKNGAVSLVINLGSGAFEALVEPVNGKFNDNAWHDVKVTRNLRQHSGIGHAMVTISVDGILTTTGYTQEDYTMLGSDDFFYVGGSPSTADLPGSPVSNNFMGCLKEVVYKNNDVRLELSRLAKQGDPKMKIHGVVAFKCENVATLDPITFETPESFISLPKWNAKKTGSISFDFRTTEPNGLILFSHGKPRHQKDAKHPQMIKVDFFAIEMLDGHLYLLLDMGSGTIKIKALLKKVNDGEWYHVDFQRDGRSGTISVNTLRTPYTAPGESEILDLDDELYLGGLPENKAGLVFPTEVWTALLNYGYVGCIRDLFIDGQSKDIRQMAEVQSTAGVKPSCSKETAKPCLSNPCKNNGMCRDGWNRYVCDCSGTGYLGRSCEREATVLSYDGSMFMKIQLPVVMHTEAEDVSLRFRSQRAYGILMATTSRDSADTLRLELDAGRVKLTVNLDCIRINCNSSKGPETLFAGYNLNDNEWHTVRVVRRGKSLKLTVDDQQAMTGQMAGDHTRLEFHNIETGIITERRYLSSVPSNFIGHLQSLTFNGMAYIDLCKNGDIDYCELNARFGFRNIIADPVTFKTKSSYVALATLQAYTSMHLFFQFKTTSLDGLILYNSGDGNDFIVVELVKGYLHYVFDLGNGANLIKGSSNKPLNDNQWHNVMISRDTSNLHTVKIDTKITTQITAGARNLDLKSDLYIGGVAKETYKSLPKLVHAKEGFQGCLASVDLNGRLPDLISDALFCNGQIERGCEGPSTTCQEDSCSNQGVCLQQWDGFSCDCSMTSFSGPLCNDPGTTYIFSKGGGQITYKWPPNDRPSTRADRLAIGFSTVQKEAVLVRVDSSSGLGDYLELHIHQGKIGVKFNVGTDDIAIEESNAIINDGKYHVVRFTRSGGNATLQVDSWPVIERYPAGNNDNERLAIARQRIPYRLGRVVDEWLLDKGRQLTIFNSQATIIIGGKEQGQPFQGQLSGLYYNGLKVLNMAAENDANIAIVGNVRLVGEVPSSMTTESTATAMQSEMSTSIMETTTTLATSTARRGKPPTKEPISQTTDDILVASAECPSDDEDIDPCEPSSGGLANPTRAGGREPYPGSAEVIRESSSTTGMVVGIVAAAALCILILLYAMYKYRNRDEGSYHVDESRNYISNSAQSNGAVVKEKQPSSAKSSNKNKKNKDKEYYV

SEQ ID NO: 32587 - protein, 75 aa, Homo sapiens
  REGION 1..75: note = ENSP00000486993
MVVGIVAAAALCILILLYAMYKYRNRDEGSYHVDESRNYISNSAQSNGAVVKEKQPSSAKSSNKNKKNKDKEYYV

SEQ ID NO: 32588 - protein, 469 aa, Homo sapiens
  REGION 1..469: note = ENSP00000485815
MYQRMLRCGAELGSPGGGGGGGGGGGAGGRLALLWIVPLTLSGLLGVAWGASSLGAHHIHHFHGSSKHHSVPIAIYRSPASLRGGHAGTTYIFSKGGGQITYKWPPNDRPSTRADRLAIGFSTVQKEAVLVRVDSSSGLGDYLELHIHQGKIGVKFNVGTDDIAIEESNAIINDGKYHVVRFTRSGGNATLQVDSWPVIERYPAGNNDNERLAIARQRIPYRLGRVVDEWLLDKGRQLTIFNSQATIIIGGKEQGQPFQGQLSGLYYNGLKVLNMAAENDANIAIVGNVRLVGEVPSSMTTESTATAMQSEMSTSIMETTTTLATSTARRGKPPTKEPISQTTDDILVASAECPSDDEDIDPCEPSSANPTRAGGREPYPGSAEVIRESSSTTGMVVGIVAAAALCILILLYAMYKYRNRDEGSYHVDESRNYISNSAQSNGAVVKEKQPSSAKSSNKNKKNKDKEYYV

SEQ ID NO: 32589 - protein, 1495 aa, Homo sapiens
  REGION 1..1495: note = ENSP00000434015
MGTALLQRGGCFLLCLSLLLLGCWAELGSGLEFPGAEGQWTRFPKWNACCESEMSFQLKTRSARGLVLYFDDEGFCDFLELILTRGGRLQLSFSIFCAEPATLLADTPVNDGAWHSVRIRRQFRNTTLFIDQVEAKWVEVKSKRRDMTVFSGLFVGGLPPELRAAALKLTLASVREREPFKGWIRDVRVNSSQVLPVDSGEVKLDDEPPNSGGGSPCEAGEEGEGGVCLNGGVCSVVDDQAVCDCSRTGFRGKDCSQEDNNVEGLAHLMMGDQGKEEYIATFKGSEYFCYDLSQNPIQSSSDEITLSFKTLQRNGLMLHTGKSADYVNLALKNGAVSLVINLGSGAFEALVEPVNGKFNDNAWHDVKVTRNLRQVTISVDGILTTTGYTQEDYTMLGSDDFFYVGGSPSTADLPGSPVSNNFMGCLKEVVYKNNDVRLELSRLAKQGDPKMKIHGVVAFKCENVATLDPITFETPESFISLPKWNAKKTGSISFDFRTTEPNGLILFSHGKPRHQKDAKHPQMIKVDFFAIEMLDGHLYLLLDMGSGTIKIKALLKKVNDGEWYHVDFQRDGRSGTISVNTLRTPYTAPGESEILDLDDELYLGGLPENKAGLVFPTEVWTALLNYGYVGCIRDLFIDGQSKDIRQMAEVQSTAGVKPSCSKETAKPCLSNPCKNNGMCRDGWNRYVCDCSGTGYLGRSCEREATVLSYDGSMFMKIQLPVVMHTEAEDVSLRFRSQRAYGILMATTSRDSADTLRLELDAGRVKLTVNLDCIRINCNSSKGPETLFAGYNLNDNEWHTVRVVRRGKSLKLTVDDQQAMTGQMAGDHTRLEFHNIETGIITERRYLSSVPSNFIGHLQSLTFNGMAYIDLCKNGDIDYCELNARFGFRNIIADPVTFKTKSSYVALATLQAYTSMHLFFQFKTTSLDGLILYNSGDGNDFIVVELVKGYLHYVFDLGNGANLIKGSSNKPLNDNQWHNVMISRDTSNLHTVKIDTKITTQITAGARNLDLKSDLYIGGVAKETYKSLPKLVHAKEGFQGCLASVDLNGRLPDLISDALFCNGQIERGCEGPSTTCQEDSCSNQGVCLQQWDGFSCDCSMTSFSGPLCNDPGTTYIFSKGGGQITYKWPPNDRPSTRADRLAIGFSTVQKEAVLVRVDSSSGLGDYLELHIHQGKIGVKFNVGTDDIAIEESNAIINDGKYHVVRFTRSGGNATLQVDSWPVIERYPAGNNDNERLAIARQRIPYRLGRVVDEWLLDKGRQLTIFNSQATIIIGGKEQGQPFQGQLSGLYYNGLKVLNMAAENDANIAIVGNVRLVGEVPSSMTTESTATAMQSEMSTSIMETTTTLATSTARRGKPPTKEPISQTTDDILVASAECPSDDEDIDPCEPSSGGLANPTRAGGREPYPGSAEVIRESSSTTGMVVGIVAAAALCILILLYAMYKYRNRDEGSYHVDESRNYISNSAQSNGAVVKEKQPSSAKSSNKNKKNKDKEYYV

SEQ ID NO: 32590 - protein, 1499 aa, Homo sapiens
  REGION 1..1499: note = ENSP00000486879
MGTALLQRGGCFLLCLSLLLLGCWAELGSGLEFPGAEGQWTRFPKWNACCESEMSFQLKTRSARGLVLYFDDEGFCDFLELILTRGGRLQLSFSIFCAEPATLLADTPVNDGAWHSVRIRRQFRNTTLFIDQVEAKWVEVKSKRRDMTVFSGLFVGGLPPELRAAALKLTLASVREREPFKGWIRDVRVNSSQVLPVDSGEVKLDDEPPNSGGGSPCEAGEEGEGGVCLNGGVCSVVDDQAVCDCSRTGFRGKDCSQEDNNVEGLAHLMMGDQGKSKGKEEYIATFKGSEYFCYDLSQNPIQSSSDEITLSFKTLQRNGLMLHTGKSADYVNLALKNGAVSLVINLGSGAFEALVEPVNGKFNDNAWHDVKVTRNLRQVTISVDGILTTTGYTQEDYTMLGSDDFFYVGGSPSTADLPGSPVSNNFMGCLKEVVYKNNDVRLELSRLAKQGDPKMKIHGVVAFKCENVATLDPITFETPESFISLPKWNAKKTGSISFDFRTTEPNGLILFSHGKPRHQKDAKHPQMIKVDFFAIEMLDGHLYLLLDMGSGTIKIKALLKKVNDGEWYHVDFQRDGRSGTISVNTLRTPYTAPGESEILDLDDELYLGGLPENKAGLVFPTEVWTALLNYGYVGCIRDLFIDGQSKDIRQMAEVQSTAGVKPSCSKETAKPCLSNPCKNNGMCRDGWNRYVCDCSGTGYLGRSCEREATVLSYDGSMFMKIQLPVVMHTEAEDVSLRFRSQRAYGILMATTSRDSADTLRLELDAGRVKLTVNLDCIRINCNSSKGPETLFAGYNLNDNEWHTVRVVRRGKSLKLTVDDQQAMTGQMAGDHTRLEFHNIETGIITERRYLSSVPSNFIGHLQSLTFNGMAYIDLCKNGDIDYCELNARFGFRNIIADPVTFKTKSSYVALATLQAYTSMHLFFQFKTTSLDGLILYNSGDGNDFIVVELVKGYLHYVFDLGNGANLIKGSSNKPLNDNQWHNVMISRDTSNLHTVKIDTKITTQITAGARNLDLKSDLYIGGVAKETYKSLPKLVHAKEGFQGCLASVDLNGRLPDLISDALFCNGQIERGCEGPSTTCQEDSCSNQGVCLQQWDGFSCDCSMTSFSGPLCNDPGTTYIFSKGGGQITYKWPPNDRPSTRADRLAIGFSTVQKEAVLVRVDSSSGLGDYLELHIHQGKIGVKFNVGTDDIAIEESNAIINDGKYHVVRFTRSGGNATLQVDSWPVIERYPAGNNDNERLAIARQRIPYRLGRVVDEWLLDKGRQLTIFNSQATIIIGGKEQGQPFQGQLSGLYYNGLKVLNMAAENDANIAIVGNVRLVGEVPSSMTTESTATAMQSEMSTSIMETTTTLATSTARRGKPPTKEPISQTTDDILVASAECPSDDEDIDPCEPSSGGLANPTRAGGREPYPGSAEVIRESSSTTGMVVGIVAAAALCILILLYAMYKYRNRDEGSYHVDESRNYISNSAQSNGAVVKEKQPSSAKSSNKNKKNKDKEYYV

SEQ ID NO: 32591 - protein, 903 aa, Homo sapiens
  REGION 1..903: note = ENSP00000489573
MTSGSKCPSTDSGKEEYIATFKGSEYFCYDLSQNPIQSSSDEITLSFKTLQRNGLMLHTGKSADYVNLALKNGAVSLVINLGSGAFEALVEPVNGKFNDNAWHDVKVTRNLRQVTISVDGILTTTGYTQEDYTMLGSDDFFYVGGSPSTADLPGSPVSNNFMGCLKEVVYKNNDVRLELSRLAKQGDPKMKIHGVVAFKCENVATLDPITFETPESFISLPKWNAKKTGSISFDFRTTEPNGLILFSHGKPRHQKDAKHPQMIKVDFFAIEMLDGHLYLLLDMGSGTIKIKALLKKVNDGEWYHVDFQRDGRSGTISVNTLRTPYTAPGESEILDLDDELYLGGLPENKAGLVFPTEVWTALLNYGYVGCIRDLFIDGQSKDIRQMAEVQSTAGVKPSCSKETAKPCLSNPCKNNGMCRDGWNRYVCDCSGTGYLGRSCEREATVLSYDGSMFMKIQLPVVMHTEAEDVSLRFRSQRAYGILMATTSRDSADTLRLELDAGRVKLTVNLGKGPETLFAGYNLNDNEWHTVRVVRRGKSLKLTVDDQQAMTGQMAGDHTRLEFHNIETGIITERRYLSSVPSNFIGHLQSLTFNGMAYIDLCKNGDIDYCELNARFGFRNIIADPVTFKTKSSYVALATLQAYTSMHLFFQFKTTSLDGLILYNSGDGNDFIVVELVKGYLHYVFDLGNGANLIKGSSNKPLNDNQWHNVMISRDTSNLHTVKIDTKITTQITAGARNLDLKSDLYIGGVAKETYKSLPKLVHAKEGFQGCLASVDLNGRLPDLISDALFCNGQIERGCEGPSTTCQEDSCSNQGVCLQQWDGFSCDCSMTSFSGPLCNDPGTTYIFSKGGGQITYKWPPNDRPSTRADRLAIGFSTVQKEAVLVRVDSSSGLGDYLELHITLQ

SEQ ID NO: 32592 - protein, 213 aa, Homo sapiens
  REGION 1..213: note = ENSP00000486253
DLGNGANLIKGSSNKPLNDNQWHNVMISRDTSNLHTVKIDTKITTQITAGARNLDLKSDLYIGGVAKETYKSLPKLVHAKEGFQGCLASVDLNGRLPDLISDALFCNGQIERGCEVALMKADLQGPSTTCQEDSCSNQGVCLQQWDGFSCDCSMTSFSGPLCNDPGTTYIFSKGGGQITYKWPPNDRPSTRADRLAIGFSTVQKEAVLVRVDS

SEQ ID NO: 32593 - protein, 169 aa, Homo sapiens
  REGION 1..169: note = ENSP00000486185
  VARIANT 1: note = Any amino acid
XSNNFMGCLKEVVYKNNDVRLELSRLAKQGDPKMKIHGVVAFKCENVATLDPITFETPESFISLPKWNAKKTGSISFDFRTTEPNGLILFSHGKPRHQKDAKHPQMIKVDFFAIEMLDGHLYLLLDMGSGTIKIKALLKKVNDGEWYHVDFQRDGRSGQMAGDHTRLEF

SEQ ID NO: 32594 - protein, 33 aa, Homo sapiens
  REGION 1..33: note = ENSP00000490210
  VARIANT 1: note = Any amino acid
XFQRDGRSDFPFASSLVPPSTQNSCPGTISVNT

SEQ ID NO: 32595 - protein, 56 aa, Homo sapiens
  REGION 1..56: note = ENSP00000485723
MTSGSKCPSTDSASLLPRKSRGLMAYILPLVQLTSSVGEDCSFQISTFLFDLSSIS

SEQ ID NO: 32596 - protein, 459 aa, Homo sapiens
  REGION 1..459: note = ENSP00000486544
MGTALLQRGGCFLLCLSLLLLGCWAELGSGLEFPGAEGQWTRFPKWNACCESEMSFQLKTRSARGLVLYFDDEGFCDFLELILTRGGRLQLSFSIFCAEPATLLADTPVNDGAWHSVRIRRQFRNTTLFIDQVEAKWVEVKSKRRDMTVFSGLFVGGLPPELRAAALKLTLASVREREPFKGWIRDVRVNSSQVLPVDSGEVKLDDEPPNSGGGSPCEAGEEGEGGVCLNGGVCSVVDDQAVCDCSRTGFRGKDCSQGKEEYIATFKGSEYFCYDLSQNPIQSSSDEITLSFKTLQRNGLMLHTGKSADYVNLALKNGAVSLVINLGSGAFEALVEPVNGKFNDNAWHDVKVTRNLRQVTISVDGILTTTGYTQEDYTMLGSDDFFYVGGSPSTADLPGSPVSNNFMGCLKEVNIVAIRIIPNSWSHHFRSSMKAPLLKTRCSRVKRHNFKFNILLLFM

SEQ ID NO: 32597 - protein, 176 aa, Homo sapiens
  REGION 1..176: note = ENSP00000489108
MTSGSKCPSTDSGKEEYIATFKGSEYFCYDLSQNPIQSSSDEITLSFKTLQRNGLMLHTGKSADYVNLALKNGAVSLVINLGSGAFEALVEPVNGKFNDNAWHDVKVTRNLRQVTISVDGILTTTGYTQEDYTMLGSDDFFYVGGSPSTADLPGSPIQHESTFAEDPMFQSQTAQL

SEQ ID NO: 32598 - protein, 136 aa, Homo sapiens
  REGION 1..136: note = ENSP00000487268
SSQVLPVDSGEVKLDDEPPNSGGGSPCEAGEEGEGGVCLNGGVCSVVDDQAVCDCSRTGFRGKDCSQEIKFGLQCVLPVLLHDNDQGKYCCINTAKPLTEKDNNVEGLAHLMMGDQGKSKEKLEIFRWIRKDFTNF

SEQ ID NO: 32599 - protein, 278 aa, Homo sapiens
  REGION 1..278: note = ENSP00000385310
MGTALLQRGGCFLLCLSLLLLGCWAELGSGLEFPGAEGQWTRFPKWNACCESEMSFQLKTRSARGLVLYFDDEGFCDFLELILTRGGRLQLSFSIFCAEPATLLADTPVNDGAWHSVRIRRQFRNTTLFIDQVEAKWVEVKSKRRDMTVFSGLFVGGLPPELRAAALKLTLASVREREPFKGWIRDVRVNSSQVLPVDSGEVKLDDEPPNSGGGSPCEAGEEGEGGVCLNGGVCSVVDDQAVCDCSRTGFRGKDCSQEDNNVEGLAHLMMGDQGKSKD

SEQ ID NO: 32600 - protein, 155 aa, Homo sapiens
  REGION 1..155: note = ENSP00000490017
  VARIANT 1: note = Any amino acid
XVFSGLFVGGLPPELRAAALKLTLASVREREPFKGWIRDVRVNSSQVLPVDSGEVKLDDEPPNSGGGSPCEAGEEGEGGVCLNGGVCSVVDDQAVCDCSRTGFRGKDCSQEDNNVEGLAHLMMGDQGKSKELMLILLCSITTQGLETAKSLIMCT

SEQ ID NO: 32601 - protein, 293 aa, Homo sapiens
  REGION 1..293: note = ENSP00000490494
MGTALLQRGGCFLLCLSLLLLGCWAELGSGLEFPGAEGQWTRFPKWNACCESEMSFQLKTRSARGLVLYFDDEGFCDFLELILTRGGRLQLSFSIFCAEPATLLADTPVNDGAWHSVRIRRQFRNTTLFIDQVEAKWVEVKSKRRDMTVFSGLFVGGLPPELRAAALKLTLASVREREPFKGWIRDVRVNSSQVLPVDSGEVKLDDEPPNSGGGSPCEAGEEGEGGVCLNGGVCSVVDDQAVCDCSRTGFRGKDCSQEDNNVEGLAHLMMGDQGKSKEMNDYLNYKKVKICYT

SEQ ID NO: 32602 - protein, 277 aa, Homo sapiens
  REGION 1..277: note = ENSP00000485912
MGTALLQRGGCFLLCLSLLLLGCWAELGSGLEFPGAEGQWTRFPKWNACCESEMSFQLKTRSARGLVLYFDDEGFCDFLELILTRGGRLQLSFSIFCAEPATLLADTPVNDGAWHSVRIRRQFRNTTLFIDQVEAKWVEVKSKRRDMTVFSGLFVGGLPPELRAAALKLTLASVREREPFKGWIRDVRVNSSQVLPVDSGEVKLDDEPPNSGGGSPCEAGEEGEGGVCLNGGVCSVVDDQAVCDCSRTGFRGKDCSQDNNVEGLAHLMMGDQGKSKD

SEQ ID NO: 32603 - protein, 126 aa, Homo sapiens
  REGION 1..126: note = ENSP00000487165
  VARIANT 1: note = Any amino acid
XPELRAAALKLTLASVREREPFKGWIRDVRVNSSQVLPVDSGEVKLDDEPPNSGGGSPCEAGEEGEGGVCLNGGVCSVVDDQAVCDCSRTGFRGKDCSQGLAHLMMGDQGMGSVPFPLCFQCFLVL

SEQ ID NO: 32604 - protein, 198 aa, Homo sapiens
  REGION 1..198: note = ENSP00000483634
MAAENDANIAIVGNVRLVGEVPSSMTTESTATAMQSEMSTSIMETTTTLATSTARRGKPPTKEPISQTTDDILVASAECPSDDEDIDPCEPSSGGLANPTRAGGREPYPGSAEVIRESSSTTGMVVGIVAAAALCILILLYAMYKYRNRDEGSYHVDESRNYISNSAQSNGAVVKEKQPSSAKSSNKNKKNKDKEYYV

SEQ ID NO: 32605 - protein, 851 aa, Homo sapiens
  REGION 1..851: note = ENSP00000385681
GKEEYIATFKGSEYFCYDLSQNPIQSSSDEITLSFKTLQRNGLMLHTGKSADYVNLALKNGAVSLVINLGSGAFEALVEPVNGKFNDNAWHDVKVTRNLRQHSGIGHAMVNKLHCSVTISVDGILTTTGYTQEDYTMLGSDDFFYVGGSPSTADLPGSPVSNNFMGCLKEVVYKNNDVRLELSRLAKQGDPKMKIHGVVAFKCENVATLDPITFETPESFISLPKWNAKKTGSISFDFRTTEPNGLILFSHGKPRHQKDAKHPQMIKVDFFAIEMLDGHLYLLLDMGSGTIKIKALLKKVNDGEWYHVDFQRDGRSGTISVNTLRTPYTAPGESEILDLDDELYLGGLPENKAGLVFPTEVWTALLNYGYVGCIRDLFIDGQSKDIRQMAEVQSTAGVKPSCSKETAKPCLSNPCKNNGMCRDGWNRYVCDCSGTGYLGRSCEREATVLSYDGSMFMKIQLPVVMHTEAEDVSLRFRSQRAYGILMATTSRDSADTLRLELDAGRVKLTVNLDCIRINCNSSKGPETLFAGYNLNDNEWHTVRVVRRGKSLKLTVDDQQAMTGQMAGDHTRLEFHNIETGIITERRYLSSVPSNFIGHLQSLTFNGMAYIDLCKNGDIDYCELNARFGFRNIIADPVTFKTKSSYVALATLQAYTSMHLFFQFKTTSLDGLILYNSGDGNDFIVVELVKGYLHYVFDLGNGANLIKGSSNKPLNDNQWHNVMISRDTSNLHTVKIDTKITTQITAGARNLDLKSDLYIGGVAKETYKSLPKLVHAKEGFQGCLASVDLNGRLPDLISDALFCNGQIERGCEGPSTTCQEDSCSNQGVCLQQWDGFSCDCSMTSFSGPLCND

SEQ ID NO: 32606 - protein, 836 aa, Homo sapiens
  REGION 1..836: note = ENSP00000385434
GKEEYIATFKGSEYFCYDLSQNPIQSSSDEITLSFKTLQRNGLMLHTGKSADYVNLALKNGAVSLVINLGSGAFEALVEPVNGKFNDNAWHDVKVTRNLRQVTISVDGILTTTGYTQEDYTMLGSDDFFYVGGSPSTADLPGSPVSNNFMGCLKEVVYKNNDVRLELSRLAKQGDPKMKIHGVVAFKCENVATLDPITFETPESFISLPKWNAKKTGSISFDFRTTEPNGLILFSHGKPRHQKDAKHPQMIKVDFFAIEMLDGHLYLLLDMGSGTIKIKALLKKVNDGEWYHVDFQRDGRSGTISVNTLRTPYTAPGESEILDLDDELYLGGLPENKAGLVFPTEVWTALLNYGYVGCIRDLFIDGQSKDIRQMAEVQSTAGVKPSCSKETAKPCLSNPCKNNGMCRDGWNRYVCDCSGTGYLGRSCEREATVLSYDGSMFMKIQLPVVMHTEAEDVSLRFRSQRAYGILMATTSRDSADTLRLELDAGRVKLTVNLDCIRINCNSSKGPETLFAGYNLNDNEWHTVRVVRRGKSLKLTVDDQQAMTGQMAGDHTRLEFHNIETGIITERRYLSSVPSNFIGHLQSLTFNGMAYIDLCKNGDIDYCELNARFGFRNIIADPVTFKTKSSYVALATLQAYTSMHLFFQFKTTSLDGLILYNSGDGNDFIVVELVKGYLHYVFDLGNGANLIKGSSNKPLNDNQWHNVMISRDTSNLHTVKIDTKITTQITAGARNLDLKSDLYIGGVAKETYKSLPKLVHAKEGFQGCLASVDLNGRLPDLISDALFCNGQIERGCEGPSTTCQEDSCSNQGVCLQQWDGFSCDCSMTSFSGPLCND

SEQ ID NO: 32607 - protein, 666 aa, Homo sapiens
  REGION 1..666: note = ENSP00000301894
MPPGGSGPGGCPRRPPALAGPLPPPPPPPPPPLLPLLPLLLLLLLGAAEGARVSSSLSTTHHVHHFHSKHGTVPIAINRMPFLTRGGHAGTTYIFGKGGALITYTWPPNDRPSTRMDRLAVGFSTHQRSAVLVRVDSASGLGDYLQLHIDQGTVGVIFNVGTDDITIDEPNAIVSDGKYHVVRFTRSGGNATLQVDSWPVNERYPAGNFDNERLAIARQRIPYRLGRVVDEWLLDKGRQLTIFNSQAAIKIGGRDQGRPFQGQVSGLYYNGLKVLALAAESDPNVRTEGHLRLVGEGPSVLLSAETTATTLLADMATTIMETTTTMATTTTRRGRSPTLRDSTTQNTDDLLVASAECPSDDEDLEECEPSTGGELILPIITEDSLDPPPVATRSPFVPPPPTFYPFLTGVGATQDTLPPPAARRPPSGGPCQAERDDSDCEEPIEASGFASGEVFDSSLPPTDDEDFYTTFPLVTDRTTLLSPRKPAPRPNLRTDGATGAPGVLFAPSAPAPNLPAGKMNHRDPLQPLLENPPLGPGAPTSFEPRRPPPLRPGVTSAPGFPHLPTANPTGPGERGPPGAVEVIRESSSTTGMVVGIVAAAALCILILLYAMYKYRNRDEGSYQVDQSRNYISNSAQSNGAVVKEKAPAAPKTPSKAKKNKDKEYYV

SEQ ID NO: 32608 - protein, 1712 aa, Homo sapiens
  REGION 1..1712: note = ENSP00000366774
MASGSRWRPTPPPLLLLLLLALAARADGLEFGGGPGQWARYARWAGAASSGELSFSLRTNATRALLLYLDDGGDCDFLELLLVDGRLRLRFTLSCAEPATLQLDTPVADDRWHMVLLTRDARRTALAVDGEARAAEVRSKRREMQVASDLFVGGIPPDVRLSALTLSTVKYEPPFRGLLANLKLGERPPALLGSQGLRGATADPLCAPARNPCANGGLCTVLAPGEVGCDCSHTGFGGKFCSEEEHPMEGPAHLTLNSEVGSLLFSEGGAGRGGAGDVHQPTKGKEEFVATFKGNEFFCYDLSHNPIQSSTDEITLAFRTLQRNGLMLHTGKSADYVNLSLKSGAVWLVINLGSGAFEALVEPVNGKFNDNAWHDVRVTRNLRQHAGIGHAMVNKLHYLVTISVDGILTTTGYTQEDYTMLGSDDFFYIGGSPNTADLPGSPVSNNFMGCLKDVVYKNNDFKLELSRLAKEGDPKMKLQGDLSFRCEDVAALDPVTFESPEAFVALPRWSAKRTGSISLDFRTTEPNGLLLFSQGRRAGGGAGSHSSAQRADYFAMELLDGHLYLLLDMGSGGIKLRASSRKVNDGEWCHVDFQRDGRKGSISVNSRSTPFLATGDSEILDLESELYLGGLPEGGRVDLPLPPEVWTAALRAGYVGCVRDLFIDGRSRDLRGLAEAQGAVGVAPFCSRETLKQCASAPCRNGGVCREGWNRFICDCIGTGFLGRVCEREATVLSYDGSMYMKIMLPNAMHTEAEDVSLRFMSQRAYGLMMATTSRESADTLRLELDGGQMKLTVNLDCLRVGCAPSKGPETLFAGHKLNDNEWHTVRVVRRGKSLQLSVDNVTVEGQMAGAHMRLEFHNIETGIMTERRFISVVPSNFIGHLSGLVFNGQPYMDQCKDGDITYCELNARFGLRAIVADPVTFKSRSSYLALATLQAYASMHLFFQFKTTAPDGLLLFNSGNGNDFIVIELVKGYIHYVFDLGNGPSLMKGNSDKPVNDNQWHNVVVSRDPGNVHTLKIDSRTVTQHSNGARNLDLKGELYIGGLSKNMFSNLPKLVASRDGFQGCLASVDLNGRLPDLIADALHRIGQVERGCDGPSTTCTEESCANQGVCLQQWDGFTCDCTMTSYGGPVCNDPGTTYIFGKGGALITYTWPPNDRPSTRMDRLAVGFSTHQRSAVLVRVDSASGLGDYLQLHIDQGTVGVIFNVGTDDITIDEPNAIVSDGKYHVVRFTRSGGNATLQVDSWPVNERYPAGNFDNERLAIARQRIPYRLGRVVDEWLLDKGRQLTIFNSQAAIKIGGRDQGRPFQGQVSGLYYNGLKVLALAAESDPNVRTEGHLRLVGEGPSVLLSAETTATTLLADMATTIMETTTTMATTTTRRGRSPTLRDSTTQNTDDLLVASAECPSDDEDLEECEPSTGGELILPIITEDSLDPPPVATRSPFVPPPPTFYPFLTGVGATQDTLPPPAARRPPSGGPCQAERDDSDCEEPIEASGFASGEVFDSSLPPTDDEDFYTTFPLVTDRTTLLSPRKPAPRPNLRTDGATGAPGVLFAPSAPAPNLPAGKMNHRDPLQPLLENPPLGPGAPTSFEPRRPPPLRPGVTSAPGFPHLPTANPTGPGERGPPGAVEVIRESSSTTGMVVGIVAAAALCILILLYAMYKYRNRDEGSYQVDQSRNYISNSAQSNGAVVKEKAPAAPKTPSKAKKNKDKEYYV

SEQ ID NO: 32609 - protein, 1642 aa, Homo sapiens
  REGION 1..1642: note = ENSP00000366782
MASGSRWRPTPPPLLLLLLLALAARADGLEFGGGPGQWARYARWAGAASSGELSFSLRTNATRALLLYLDDGGDCDFLELLLVDGRLRLRFTLSCAEPATLQLDTPVADDRWHMVLLTRDARRTALAVDGEARAAEVRSKRREMQVASDLFVGGIPPDVRLSALTLSTVKYEPPFRGLLANLKLGERPPALLGSQGLRGATADPLCAPARNPCANGGLCTVLAPGEVGCDCSHTGFGGKFCSEEEHPMEGPAHLTLNSEGKEEFVATFKGNEFFCYDLSHNPIQSSTDEITLAFRTLQRNGLMLHTGKSADYVNLSLKSGAVWLVINLGSGAFEALVEPVNGKFNDNAWHDVRVTRNLRQHAGIGHAMVTISVDGILTTTGYTQEDYTMLGSDDFFYIGGSPNTADLPGSPVSNNFMGCLKDVVYKNNDFKLELSRLAKEGDPKMKLQGDLSFRCEDVAALDPVTFESPEAFVALPRWSAKRTGSISLDFRTTEPNGLLLFSQGRRAGGGAGSHSSAQRADYFAMELLDGHLYLLLDMGSGGIKLRASSRKVNDGEWCHVDFQRDGRKGSISVNSRSTPFLATGDSEILDLESELYLGGLPEGGRVDLPLPPEVWTAALRAGYVGCVRDLFIDGRSRDLRGLAEAQGAVGVAPFCSRETLKQCASAPCRNGGVCREGWNRFICDCIGTGFLGRVCEREATVLSYDGSMYMKIMLPNAMHTEAEDVSLRFMSQRAYGLMMATTSRESADTLRLELDGGQMKLTVNLGKGPETLFAGHKLNDNEWHTVRVVRRGKSLQLSVDNVTVEGQMAGAHMRLEFHNIETGIMTERRFISVVPSNFIGHLSGLVFNGQPYMDQCKDGDITYCELNARFGLRAIVADPVTFKSRSSYLALATLQAYASMHLFFQFKTTAPDGLLLFNSGNGNDFIVIELVKGYIHYVFDLGNGPSLMKGNSDKPVNDNQWHNVVVSRDPGNVHTLKIDSRTVTQHSNGARNLDLKGELYIGGLSKNMFSNLPKLVASRDGFQGCLASVDLNGRLPDLIADALHRIGQVERGCDGPSTTCTEESCANQGVCLQQWDGFTCDCTMTSYGGPVCNDPGTTYIFGKGGALITYTWPPNDRPSTRMDRLAVGFSTHQRSAVLVRVDSASGLGDYLQLHIDQGTVGVIFNVGTDDITIDEPNAIVSDGKYHVVRFTRSGGNATLQVDSWPVNERYPAGRQLTIFNSQAAIKIGGRDQGRPFQGQVSGLYYNGLKVLALAAESDPNVRTEGHLRLVGEGPSVLLSAETTATTLLADMATTIMETTTTMATTTTRRGRSPTLRDSTTQNTDDLLVASAECPSDDEDLEECEPSTGGELILPIITEDSLDPPPVATRSPFVPPPPTFYPFLTGVGATQDTLPPPAARRPPSGGPCQAERDDSDCEEPIEASGFASGEVFDSSLPPTDDEDFYTTFPLVTDRTTLLSPRKPAPRPNLRTDGATGAPGVLFAPSAPAPNLPAGKMNHRDPLQPLLENPPLGPGAPTSFEPRRPPPLRPGVTSAPGFPHLPTANPTGPGERGPPGAVEVIRESSSTTGMVVGIVAAAALCILILLYAMYKYRNRDEGSYQVDQSRNYISNSAQSNGAVVKEKAPAAPKTPSKAKKNKDKEYYV

SEQ ID NO: 32610 - protein, 1705 aa, Homo sapiens
  REGION 1..1705: note = ENSP00000386416
MASGSRWRPTPPPLLLLLLLALAARADGLEFGGGPGQWARYARWAGAASSGELSFSLRTNATRALLLYLDDGGDCDFLELLLVDGRLRLRFTLSCAEPATLQLDTPVADDRWHMVLLTRDARRTALAVDGEARAAEVRSKRREMQVASDLFVGGIPPDVRLSALTLSTVKYEPPFRGLLANLKLGERPPALLGSQGLRGATADPLCAPARNPCANGGLCTVLAPGEVGCDCSHTGFGGKFCSEEEHPMEGPAHLTLNSEVGSLLFSEGGAGRGGAGDVHQPTKGKEEFVATFKGNEFFCYDLSHNPIQSSTDEITLAFRTLQRNGLMLHTGKSADYVNLSLKSGAVWLVINLGSGAFEALVEPVNGKFNDNAWHDVRVTRNLRQHAGIGHAMVTISVDGILTTTGYTQEDYTMLGSDDFFYIGGSPNTADLPGSPVSNNFMGCLKDVVYKNNDFKLELSRLAKEGDPKMKLQGDLSFRCEDVAALDPVTFESPEAFVALPRWSAKRTGSISLDFRTTEPNGLLLFSQGRRAGGGAGSHSSAQRADYFAMELLDGHLYLLLDMGSGGIKLRASSRKVNDGEWCHVDFQRDGRKGSISVNSRSTPFLATGDSEILDLESELYLGGLPEGGRVDLPLPPEVWTAALRAGYVGCVRDLFIDGRSRDLRGLAEAQGAVGVAPFCSRETLKQCASAPCRNGGVCREGWNRFICDCIGTGFLGRVCEREATVLSYDGSMYMKIMLPNAMHTEAEDVSLRFMSQRAYGLMMATTSRESADTLRLELDGGQMKLTVNLDCLRVGCAPSKGPETLFAGHKLNDNEWHTVRVVRRGKSLQLSVDNVTVEGQMAGAHMRLEFHNIETGIMTERRFISVVPSNFIGHLSGLVFNGQPYMDQCKDGDITYCELNARFGLRAIVADPVTFKSRSSYLALATLQAYASMHLFFQFKTTAPDGLLLFNSGNGNDFIVIELVKGYIHYVFDLGNGPSLMKGNSDKPVNDNQWHNVVVSRDPGNVHTLKIDSRTVTQHSNGARNLDLKGELYIGGLSKNMFSNLPKLVASRDGFQGCLASVDLNGRLPDLIADALHRIGQVERGCDGPSTTCTEESCANQGVCLQQWDGFTCDCTMTSYGGPVCNDPGTTYIFGKGGALITYTWPPNDRPSTRMDRLAVGFSTHQRSAVLVRVDSASGLGDYLQLHIDQGTVGVIFNVGTDDITIDEPNAIVSDGKYHVVRFTRSGGNATLQVDSWPVNERYPAGNFDNERLAIARQRIPYRLGRVVDEWLLDKGRQLTIFNSQAAIKIGGRDQGRPFQGQVSGLYYNGLKVLALAAESDPNVRTEGHLRLVGEGPSVLLSAETTATTLLADMATTIMETTTTMATTTTRRGRSPTLRDSTTQNTDDLLVASAECPSDDEDLEECEPSTGGELILPIITEDSLDPPPVATRSPFVPPPPTFYPFLTGVGATQDTLPPPAARRPPSGGPCQAERDDSDCEEPIEASGFASGEVFDSSLPPTDDEDFYTTFPLVTDRTTLLSPRKPAPRPNLRTDGATGAPGVLFAPSAPAPNLPAGKMNHRDPLQPLLENPPLGPGAPTSFEPRRPPPLRPGVTSAPGFPHLPTANPTGPGERGPPGAVEVIRESSSTTGMVVGIVAAAALCILILLYAMYKYRNRDEGSYQVDQSRNYISNSAQSNGAVVKEKAPAAPKTPSKAKKNKDKEYYV

SEQ ID NO: 32611 - protein, 276 aa, Homo sapiens
  REGION 1..276: note = ENSP00000407374
LLLLLLGAAEGARVSSSLSTTHHVHHFHSKHGTVPIAINRMPFLTRGGHAGTTYIFGKGGALITYTWPPNDRPSTRMDRLAVGFSTHQRSAVLVRVDSASGLGDYLQLHIDQGTVGVIFNVGTDDITIDEPNAIVSDGKYHVVRFTRSGGNATLQVDSWPVNERYPAGRQLTIFNSQAAIKIGGRDQGRPFQGQVSGLYYNGLKVLALAAESDPNVRTEGHLRLVGEGPSVLLSAETTATTLLADMATTIMETTTTMATTTTRRGRSPTLRDSTTQ

SEQ ID NO: 32612 - protein, 292 aa, Homo sapiens
  REGION 1..292: note = ENSP00000388971
SVSPAATCGQPVWSEEHPMEGPAHLTLNSEVGSLLFSEGGAGRGGAGDVHQPTKGKEEFVATFKGNEFFCYDLSHNPIQSSTDEITLAFRTLQRNGLMLHTGKSADYVNLSLKSGAVWLVINLGSGAFEALVEPVNGKFNDNAWHDVRVTRNLRQVTISVDGILTTTGYTQEDYTMLGSDDFFYIGGSPNTADLPGSPVSNNFMGCLKDVVYKNNDFKLELSRLAKEGDPKMKLQGDLSFRCEDVAALDPVTFESPEAFVALPRWSAKRTGSISLDFRTTEPNGLLLFSQGR

SEQ ID NO: 32613 - protein, 206 aa, Homo sapiens
  REGION 1..206: note = ENSP00000411271
  VARIANT 1: note = Any amino acid
XCSEEEHPMEGPAHLTLNSEVGSLLFSEGGAGRGGAGDVHQPTKGKEEFVATFKGNEFFCYDLSHNPIQSSTDEITLAFRTLQRNGLMLHTGKSADYVNLSLKSGAVWLVINLGSGAFEALVEPVNGKFNDNAWHDVRVTRNLRQVTISVDGILTTTGYTQEDYTMLGSDDFFYIGGSPNTADLPGSPVSNNFMGCLKDVVYKNND

SEQ ID NO: 32614 - protein, 215 aa, Homo sapiens
  REGION 1..215: note = ENSP00000412211
  VARIANT 1: note = Any amino acid
XADPLCAPARNPCANGGLCTVLAPGEVGCDCSHTGFGGKFCSEEEHPMEVGSLLFSEGGAGRGGAGDVHQPTKGKEEFVATFKGNEFFCYDLSHNPIQSSTDEITLAFRTLQRNGLMLHTGKSADYVNLSLKSGAVWLVINLGSGAFEALVEPVNGKFNDNAWHDVRVTRNLRQVTISVDGILTTTGYTQEDYTMLGSDDFFYIGGSPNTADLPG

SEQ ID NO: 32615 - protein, 1712 aa, Homo sapiens; identical to SEQ ID NO: 32608
  REGION 1..1712: note = ENSP00000265459

SEQ ID NO: 32616 - protein, 1664 aa, Homo sapiens
  REGION 1..1664: note = ENSP00000488920
MSSTLHSVFFTLKVSILLGSLLGLCLGLEFMGLPNQWARYLRWDASTRSDLSFQFKTNVSTGLLLYLDDGGVCDFLCLSLVDGRVQLRFSMDCAETAVLSNKQVNDSSWHFLMVSRDRLRTVLMLDGEGQSGELQPQRPYMDVVSDLFLGGVPTDIRPSALTLDGVQAMPGFKGLILDLKYGNSEPRLLGSRGVQMDAEGPCGERPCENGGICFLLDGHPTCDCSTTGYGGKLCSEGLSHLMMSEQGRSKAREENVATFRGSEYLCYDLSQNPIQSSSDEITLSFKTWQRNGLILHTGKSADYVNLALKDGAVSLVINLGSGAFEAIVEPVNGKFNDNAWHDVKVTRNLRQVTISVDGILTTTGYTQEDYTMLGSDDFFYVGGSPSTADLPGSPVSNNFMGCLKEVVYKNNDIRLELSRLARIADTKMKIYGEVVFKCENVATLDPINFETPEAYISLPKWNTKRMGSISFDFRTTEPNGLILFTHGKPQERKDARSQKNTKVDFFAVELLDGNLYLLLDMGSGTIKVKATQKKANDGEWYHVDIQRDGRSGTISVNSRRTPFTASGESEILDLEGDMYLGGLPENRAGLILPTELWTAMLNYGYVGCIRDLFIDGRSKNIRQLAEMQNAAGVKSSCSRMSAKQCDSYPCKNNAVCKDGWNRFICDCTGTGYWGRTCEREASILSYDGSMYMKIIMPMVMHTEAEDVSFRFMSQRAYGLLVATTSRDSADTLRLELDGGRVKLMVNLGKGPETLYAGQKLNDNEWHTVRVVRRGKSLKLTVDDDVAEGTMVGDHTRLEFHNIETGIMTEKRYISVVPSSFIGHLQSLMFNGLLYIDLCKNGDIDYCELKARFGLRNIIADPVTFKTKSSYLSLATLQAYTSMHLFFQFKTTSPDGFILFNSGDGNDFIAVELVKGYIHYVFDLGNGPNVIKGNSDRPLNDNQWHNVVITRDNSNTHSLKVDTKVVTQVINGAKNLDLKGDLYMAGLAQGMYSNLPKLVASRDGFQGCLASVDLNGRLPDLINDALHRSGQIERGCEGPSTTCQEDSCANQGVCMQQWEGFTCDCSMTSYSGNQCNDPGATYIFGKSGGLILYTWPANDRPSTRSDRLAVGFSTTVKDGILVRIDSAPGLGDFLQLHIEQGKIGVVFNIGTVDISIKEERTPVNDGKYHVVRFTRNGGNATLQVDNWPVNEHYPTGNTDNERFQMVKQKIPFKYNRPVEEWLQEKGRQLTIFNTQAQIAIGGKDKGRLFQGQLSGLYYDGLKVLNMAAENNPNIKINGSVRLVGEVPSILGTTQTTSMPPEMSTTVMETTTTMATTTTRKNRSTASIQPTSDDLVSSAECSSDDEDFVECEPSTGRSGGELVIPLLVEDPLATPPIATRAPSITLPPTFRPLLTIIETTKDSLSMTSEAGLPCLSDQGSDGCDDDGLVISGYGSGETFDSNLPPTDDEDFYTTFSLVTDKSLSTSIFEGGYKAHAPKWESKDFRPNKVSETSRTTTTSLSPELIRFTASSSSGMVPKLPAGKMNNRDLKPQPDIVLLPLPTAYELDSTKLKSPLITSPMFRNVPTANPTEPGIRRVPGASEVIRESSSTTGMVVGIVAAAALCILILLYAMYKYRNRDEGSYQVDETRNYISNSAQSNGTLMKEKQQSSKSGHKKQKNKDREYYV

SEQ ID NO: 32617 - protein, 1392 aa, Homo sapiens
  REGION 1..1392: note = ENSP00000450683
MSSTLHSVFFTLKVSILLGSLLGLCLGLEFMGLPNQWARYLRWDASTRSDLSFQFKTNVSTGLLLYLDDGGVCDFLCLSLVDGRVQLRFSMDCAETAVLSNKQVNDSSWHFLMVSRDRLRTVLMLDGEGQSGELQPQRPYMDVVSDLFLGGVPTDIRPSALTLDGVQAMPGFKGLILDLKYGNSEPRLLGSRGVQMDAEGPCGERPCENGGICFLLDGHPTCDCSTTGYGGKLCSEGLSHLMMSEQGRSKAREENVATFRGSEYLCYDLSQNPIQSSSDEITLSFKTWQRNGLILHTGKSADYVNLALKDGAVSLVINLGSGAFEAIVEPVNGKFNDNAWHDVKVTRNLRQVTISVDGILTTTGYTQEDYTMLGSDDFFYVGGSPSTADLPGSPVSNNFMGCLKEVVYKNNDIRLELSRLARIADTKMKIYGEVVFKCENVATLDPINFETPEAYISLPKWNTKRMGSISFDFRTTEPNGLILFTHGKPQERKDARSQKNTKVDFFAVELLDGNLYLLLDMGSGTIKVKATQKKANDGEWYHVDIQRDGRSGTISVNSRRTPFTASGESEILDLEGDMYLGGLPENRAGLILPTELWTAMLNYGYVGCIRDLFIDGRSKNIRQLAEMQNAAGVKSSCSRMSAKQCDSYPCKNNAVCKDGWNRFICDCTGTGYWGRTCEREASILSYDGSMYMKIIMPMVMHTEAEDVSFRFMSQRAYGLLVATTSRDSADTLRLELDGGRVKLMVNLGKGPETLYAGQKLNDNEWHTVRVVRRGKSLKLTVDDDVAEGTMVGDHTRLEFHNIETGIMTEKRYISVVPSSFIGHLQSLMFNGLLYIDLCKNGDIDYCELKARFGLRNIIADPVTFKTKSSYLSLATLQAYTSMHLFFQFKTTSPDGFILFNSGDGNDFIAVELVKGYIHYVFDLGNGPNVIKGNSDRPLNDNQWHNVVITRDNSNTHSLKVDTKVVTQVINGAKNLDLKGDLYMAGLAQGMYSNLPKLVASRDGFQGCLASVDLNGRLPDLINDALHRSGQIERGCEGPSTTCQEDSCANQGVCMQQWEGFTCDCSMTSYSGNQCNDPGATYIFGKSGGLILYTWPANDRPSTRSDRLAVGFSTTVKDGILVRIDSAPGLGDFLQLHIEQGKIGVVFNIGTVDISIKEERTPVNDGKYHVVRFTRNGGNATLQVDNWPVNEHYPTGNTDNERFQMVKQKIPFKYNRPVEEWLQEKGRQLTIFNTQAQIAIGGKDKGRLFQGQLSGLYYDGLKVLNMAAENNPNIKINGSVRLVGEVPSILGTTQTTSMPPEMSTTVMETTTTMATTTTRKNRSTASIQPTSDDLVSSAECSSDDEDFVECEPSTGRSARSSNAARSLRAALTWTWRLTYTFTPIIFISCVVHS

SEQ ID NO: 32618 - protein, 1571 aa, Homo sapiens
  REGION 1..1571: note = ENSP00000489551
MSSTLHSVFFTLKVSILLGSLLGLCLGLEFMGLPNQWARYLRWDASTRSDLSFQFKTNVSTGLLLYLDDGGVCDFLCLSLVDGRVQLRFSMDCAETAVLSNKQVNDSSWHFLMVSRDRLRTVLMLDGEGQSGELQPQRPYMDVVSDLFLGGVPTDIRPSALTLDGVQAMPGFKGLILDLKYGNSEPRLLGSRGVQMDAEGPCGERPCENGGICFLLDGHPTCDCSTTGYGGKLCSEDVSQDPGLSHLMMSEQAREENVATFRGSEYLCYDLSQNPIQSSSDEITLSFKTWQRNGLILHTGKSADYVNLALKDGAVSLVINLGSGAFEAIVEPVNGKFNDNAWHDVKVTRNLRQVTISVDGILTTTGYTQEDYTMLGSDDFFYVGGSPSTADLPGSPVSNNFMGCLKEVVYKNNDIRLELSRLARIADTKMKIYGEVVFKCENVATLDPINFETPEAYISLPKWNTKRMGSISFDFRTTEPNGLILFTHGKPQERKDARSQKNTKVDFFAVELLDGNLYLLLDMGSGTIKVKATQKKANDGEWYHVDIQRDGRSGTISVNSRRTPFTASGESEILDLEGDMYLGGLPENRAGLILPTELWTAMLNYGYVGCIRDLFIDGRSKNIRQLAEMQNAAGVKSSCSRMSAKQCDSYPCKNNAVCKDGWNRFICDCTGTGYWGRTCEREASILSYDGSMYMKIIMPMVMHTEAEDVSFRFMSQRAYGLLVATTSRDSADTLRLELDGGRVKLMVNLDCIRINCNSSKGPETLYAGQKLNDNEWHTVRVVRRGKSLKLTVDDDVAEGTMVGDHTRLEFHNIETGIMTEKRYISVVPSSFIGHLQSLMFNGLLYIDLCKNGDIDYCELKARFGLRNIIADPVTFKTKSSYLSLATLQAYTSMHLFFQFKTTSPDGFILFNSGDGNDFIAVELVKGYIHYVFDLGNGPNVIKGNSDRPLNDNQWHNVVITRDNSNTHSLKVDTKVVTQVINGAKNLDLKGDLYMAGLAQGMYSNLPKLVASRDGFQGCLASVDLNGRLPDLINDALHRSGQIERGCEGPSTTCQEDSCANQGVCMQQWEGFTCDCSMTSYSGNQCNDPGATYIFGKSGGLILYTWPANDRPSTRSDRLAVGFSTTVKDGILVRIDSAPGLGDFLQLHIEQGKIGVVFNIGTVDISIKEERTPVNDGKYHVVRFTRNGGNATLQVDNWPVNEHYPTGNTDNERFQMVKQKIPFKYNRPVEEWLQEKGRQLTIFNTQAQIAIGGKDKGRLFQGQLSGLYYDGLKVLNMAAENNPNIKINGSVRLVGEVPSILGTTQTTSMPPEMSTTVMETTTTMATTTTRKNRSTASIQPTSDDLVSSAECSSDDEDFVECEPSTDKSLSTSIFEGGYKAHAPKWESKDFRPNKVSETSRTTTTSLSPELIRFTASSSSGMVPKLPAGKMNNRDLKPQPDIVLLPLPTAYELDSTKLKSPLITSPMFRNVPTANPTEPGIRRVPGASEVIRESSSTTGMVVGIVAAAALCILILLYAMYKYRNRDEGSYQVDETRNYISNSAQSNGTLMKEKQQSSKSGHKKQKNKDREYYV

SEQ ID NO: 32619 - protein, 175 aa, Homo sapiens
  REGION 1..175: note = ENSP00000451754
  VARIANT 1: note = Any amino acid
XDVSQDPGLSHLMMSEQAREENVATFRGSEYLCYDLSQNPIQSSSDEITLSFKTWQRNGLILHTGKSADYVNLALKDGAVSLVINLGSGAFEAIVEPVNGKFNDNAWHDVKVTRNLRQHSGIGHAMVTISVDGILTTTGYTQEDYTMLGSDDFFYVGGSPSTADLPGSPVSNNFM

SEQ ID NO: 32620 - protein, 75 aa, Homo sapiens
  REGION 1..75: note = ENSP00000451947
MKIYGEVVFKCENVATLDPINFETPEAYISLPKWNTKRMGSISFDFRTTEPNGLILFTHGKPQERKDARSQKNTK

SEQ ID NO: 32621 - protein, 1061 aa, Homo sapiens
  REGION 1..1061: note = ENSP00000451648
MLGSDDFFYVGGSPSTADLPGSPVSNNFMGCLKEVVYKNNDIRLELSRLARIADTKMKIYGEVVFKCENVATLDPINFETPEAYISLPKWNTKRMGSISFDFRTTEPNGLILFTHGKPQERKDARSQKNTKVDFFAVELLDGNLYLLLDMGSGTIKVKATQKKANDGEWYHVDIQRDGRSGTISVNSRRTPFTASGESEILDLEGDMYLGGLPENRAGLILPTELWTAMLNYGYVGCIRDLFIDGRSKNIRQLAEMQNAAGVKSSCSRMSAKQCDSYPCKNNAVCKDGWNRFICDCTGTGYWGRTCEREASILSYDGSMYMKIIMPMVMHTEAEDVSFRFMSQRAYGLLVATTSRDSADTLRLELDGGRVKLMVNLDCIRINCNSSKGPETLYAGQKLNDNEWHTVRVVRRGKSLKLTVDDDVAEGTMVGDHTRLEFHNIETGIMTEKRYISVVPSSFIGHLQSLMFNGLLYIDLCKNGDIDYCELKARFGLRNIIADPVTFKTKSSYLSLATLQAYTSMHLFFQFKTTSPDGFILFNSGDGNDFIAVELVKGYIHYVFDLGNGPNVIKGNSDRPLNDNQWHNVVITRDNSNTHSLKVDTKVVTQVINGAKNLDLKGDLYMAGLAQGMYSNLPKLVASRDGFQGCLASVDLNGRLPDLINDALHRSGQIERGCEGPSTTCQEDSCANQGVCMQQWEGFTCDCSMTSYSGNQCNDPGATYIFGKSGGLILYTWPANDRPSTRSDRLAVGFSTTVKDGILVRIDSAPGLGDFLQLHIEQGKIGVVFNIGTVDISIKEERTPVNDGKYHVVRFTRNGGNATLQVDNWPVNEHYPTGRQLTIFNTQAQIAIGGKDKGRLFQGQLSGLYYDGLKVLNMAAENNPNIKINGSVRLVGEVPSILGTTQTTSMPPEMSTTVMETTTTMATTTTRKNRSTASIQPTSDDLVSSAECSSDDEDFVECEPSTANPTEPGIRRVPGASEVIRESSSTTGMVVGIVAAAALCILILLYAMYKYRNRDEGSYQVDETRNYISNSAQSNGTLMKEKQQSSKSGHKKQKNKDREYYV

SEQ ID NO: 32622 - protein, 119 aa, Homo sapiens
  REGION 1..119: note = ENSP00000450462
MKIYGEVVFKCENVATLDPINFETPEAYISLPKWNTKRMGSISFDFRTTEPNGLILFTHGKPQERKDARSQKNTKVDFFAVELLDGNLYLLLDMGSGTIKVKATQKKANDGEWYHVDIQ

SEQ ID NO: 32623 - protein, 637 aa, Homo sapiens
  REGION 1..637: note = ENSP00000451672
MHLRIHARRSPPRRPAWTLGIWFLFWGCIVSSVWSSSNVASSSSTSSSPGSHSQHEHHFHGSKHHSVPISIYRSPVSLRGGHAGATYIFGKSGGLILYTWPANDRPSTRSDRLAVGFSTTVKDGILVRIDSAPGLGDFLQLHIEQGKIGVVFNIGTVDISIKEERTPVNDGKYHVVRFTRNGGNATLQVDNWPVNEHYPTGRQLTIFNTQAQIAIGGKDKGRLFQGQLSGLYYDGLKVLNMAAENNPNIKINGSVRLVGEVPSILGTTQTTSMPPEMSTTVMETTTTMATTTTRKNRSTASIQPTSDDLVSSAECSSDDEDFVECEPSTGGELVIPLLVEDPLATPPIATRAPSITLPPTFRPLLTIIETTKDSLSMTSEAGLPCLSDQGSDGCDDDGLVISGYGSGETFDSNLPPTDDEDFYTTFSLVTDKSLSTSIFEGGYKAHAPKWESKDFRPNKVSETSRTTTTSLSPELIRFTASSSSGMVPKLPAGKMNNRDLKPQPDIVLLPLPTAYELDSTKLKSPLITSPMFRNVPTANPTEPGIRRVPGASEVIRESSSTTGMVVGIVAAAALCILILLYAMYKYRNRDEGSYQVDETRNYISNSAQSNGTLMKEKQQSSKSGHKKQKNKDREYYV

SEQ ID NO: 32624 - protein, 432 aa, Homo sapiens
  REGION 1..432: note = ENSP00000281127
MHLRIHARRSPPRRPAWTLGIWFLFWGCIVSSVWSSSNVASSSSTSSSPGSHSQHEHHFHGSKHHSVPISIYRSPVSLRGGHAGATYIFGKSGGLILYTWPANDRPSTRSDRLAVGFSTTVKDGILVRIDSAPGLGDFLQLHIEQGKIGVVFNIGTVDISIKEERTPVNDGKYHVVRFTRNGGNATLQVDNWPVNEHYPTGRQLTIFNTQAQIAIGGKDKGRLFQGQLSGLYYDGLKVLNMAAENNPNIKINGSVRLVGEVPSILGTTQTTSMPPEMSTTVMETTTTMATTTTRKNRSTASIQPTSDDLVSSAECSSDDEDFVECEPSTGRSANPTEPGIRRVPGASEVIRESSSTTGMVVGIVAAAALCILILLYAMYKYRNRDEGSYQVDETRNYISNSAQSNGTLMKEKQQSSKSGHKKQKNKDREYYV

SEQ ID NO: 32625 - protein, 459 aa, Homo sapiens
  REGION 1..459: note = ENSP00000394426
MHLRIHARRSPPRRPAWTLGIWFLFWGCIVSSVWSSSNVASSSSTSSSPGSHSQHEHHFHGSKHHSVPISIYRSPVSLRGGHAGATYIFGKSGGLILYTWPANDRPSTRSDRLAVGFSTTVKDGILVRIDSAPGLGDFLQLHIEQGKIGVVFNIGTVDISIKEERTPVNDGKYHVVRFTRNGGNATLQVDNWPVNEHYPTGNTDNERFQMVKQKIPFKYNRPVEEWLQEKGRQLTIFNTQAQIAIGGKDKGRLFQGQLSGLYYDGLKVLNMAAENNPNIKINGSVRLVGEVPSILGTTQTTSMPPEMSTTVMETTTTMATTTTRKNRSTASIQPTSDDLVSSAECSSDDEDFVECEPSTANPTEPGIRRVPGASEVIRESSSTTGMVVGIVAAAALCILILLYAMYKYRNRDEGSYQVDETRNYISNSAQSNGTLMKEKQQSSKSGHKKQKNKDREYYV

SEQ ID NO: 32626 - protein, 398 aa, Homo sapiens
  REGION 1..398: note = ENSP00000451393
MHLRIHARRSPPRRPAWTLGIWFLFWGCIVSSVWSSSNVASSSSTSSSPGSHSQHEHHFHGSKHHSVPISIYRSPVSLRGGHAGATYIFGKSGGLILYTWPANDRPSTRSDRLAVGFSTTVKDGILVRIDSAPGLGDFLQLHIEQGKIGVVFNIGTVDISIKEERTPVNDGKYHVVRFTRNGGNATLQVDNWPVNEHYPTGNTDNERFQMVKQKIPFKYNRPVEEWLQEKGRQLTIFNTQAQIAIGGKDKGRLFQGQLSGLYYDGLKVLNMAAENNPNIKINGSVRLVGEVPSILGTTQTTSMPPEMSTTVMETTTTMATTTTRKNRSTASIQPTSDDLVSSAECSSDDEDFVECEPSTGRSARSSNAARSLRAALTWTWRLTYTFTPIIFISCVVHS

SEQ ID NO: 32627 - protein, 879 aa, Homo sapiens
  REGION 1..879: note = ENSP00000338349
MHPSTHFHRDLDEAREENVATFRGSEYLCYDLSQNPIQSSSDEITLSFKTWQRNGLILHTGKSADYVNLALKDGAVSLVINLGSGAFEAIVEPVNGKFNDNAWHDVKVTRNLRQVTISVDGILTTTGYTQEDYTMLGSDDFFYVGGSPSTADLPGSPVSNNFMGCLKEVVYKNNDIRLELSRLARIADTKMKIYGEVVFKCENVATLDPINFETPEAYISLPKWNTKRMGSISFDFRTTEPNGLILFTHGKPQERKDARSQKNTKVDFFAVELLDGNLYLLLDMGSGTIKVKATQKKANDGEWYHVDIQRDGRSGTISVNSRRTPFTASGESEILDLEGDMYLGGLPENRAGLILPTELWTAMLNYGYVGCIRDLFIDGRSKNIRQLAEMQNAAGVKSSCSRMSAKQCDSYPCKNNAVCKDGWNRFICDCTGTGYWGRTCEREASILSYDGSMYMKIIMPMVMHTEAEDVSFRFMSQRAYGLLVATTSRDSADTLRLELDGGRVKLMVNLDCIRINCNSSKGPETLYAGQKLNDNEWHTVRVVRRGKSLKLTVDDDVAEGTMVGDHTRLEFHNIETGIMTEKRYISVVPSSFIGHLQSLMFNGLLYIDLCKNGDIDYCELKARFGLRNIIADPVTFKTKSSYLSLATLQAYTSMHLFFQFKTTSPDGFILFNSGDGNDFIAVELVKGYIHYVFDLGNGPNVIKGNSDRPLNDNQWHNVVITRDNSNTHSLKVDTKVVTQVINGAKNLDLKGDLYMAGLAQGMYSNLPKLVASRDGFQGCLASVDLNGRLPDLINDALHRSGQIERGCEGPSTTCQEDSCANQGVCMQQWEGFTCDCSMTSYSGNQCNDRKYNNLSYWNFVKMFGDLENLKGQYVKGWLF

SEQ ID NO: 32628 - protein, 194 aa, Homo sapiens
  REGION 1..194: note = ENSP00000418780
WRQLFDVVIVQADKPSFFTDRRKPFRKLDEKGSLQWDRITRLEKGKIYRQGNLFDFLRLTEWRGPRVLYFGDHLYSDLADLMLRHGWRTGAIIPELEREIRIINTEQYMHSLTWQQALTGLLERMQTYQDAESRQVLAAWMKERQELSCLLNYRVDFTFYPRRTPLQHEAPLWMDQLCTGCMKTPFLGDMAHIR

SEQ ID NO: 32629 - protein, 520 aa, Homo sapiens
  REGION 1..520: note = ENSP00000302468
MRVESGSAQERGILLESLSTLLEKTTASHEGRAPGNRELTDLLPPEVCSLLNPAAIYANNEISLRDVEVYGFDYDYTLAQYADALHPEIFSTARDILIEHYKYPEGIRKYDYNPSFAIRGLHYDIQKSLLMKIDAFHYVQLGTAYRGLQPVPDEEVIELYGGTQHIPLYQMSGFYGKGPSIKQFMDIFSLPEMALLSCVVDYFLGHSLEFDQAHLYKDVTDAIRDVHVKGLMYQWIEQDMEKYILRGDETFAVLSRLVAHGKQLFLITNSPFSFVDKGMRHMVGPDWRQLFDVVIVQADKPSFFTDRRKPFRKLDEKGSLQWDRITRLEKGKIYRQGNLFDFLRLTEWRGPRVLYFGDHLYSDLADLMLRHGWRTGAIIPELEREIRIINTEQYMHSLTWQQALTGLLERMQTYQDAESRQVLAAWMKERQELRCITKALFNAQFGSIFRTFHNPTYFSRRLVRFSDLYMASLSCLLNYRVDFTFYPRRTPLQHEAPLWMDQLCTGCMKTPFLGDMAHIR

SEQ ID NO: 32630 - protein, 557 aa, Homo sapiens
  REGION 1..557: note = ENSP00000406933
MAGAGLRAAARRWLLCGGHGGPRAASSSPSCPGCGPPGPGAHCPGVPRSAPAQAPTSGADLSAHLWARYQDMRRLVHDLLPPEVCSLLNPAAIYANNEISLRDVEVYGFDYDYTLAQYADALHPEIFSTARDILIEHYKYPEGIRKYDYNPSFAIRGLHYDIQKSLLMKIDAFHYVQLGTAYRGLQPVPDEEVIELYGGTQHIPLYQMSGFYGKGPSIKQFMDIFSLPEMALLSCVVDYFLGHSLEFDQAHLYKDVTDAIRDVHVKGLMYQWIEQDMEKYILRGDETFAVLSRLVAHGKQLFLITNSPFSFVDKGMRHMVGPDWRQLFDVVIVQADKPSFFTDRRKPFRKLDEKGSLQWDRITRLEKGKIYRQGNLFDFLRLTEWRGPRVLYFGDHLYSDLADLMLRHGWRTGAIIPELEREIRIINTEQYMHSLTWQQALTGLLERMQTYQDAESRQVLAAWMKERQELRCITKALFNAQFGSIFRTFHNPTYFSRRLVRFSDLYMASLSCLLNYRVDFTFYPRRTPLQHEAPLWMDQLCTGCMKTPFLGDMAHIR

SEQ ID NO: 32631 - protein, 532 aa, Homo sapiens
  REGION 1..532: note = ENSP00000419547
MAGAGLRAAARRWLLCGGHGGPRAASSSPSCPGCGPPGPGAHCPGVPRSAPAQAPTSGADLSAHLWARYQDMRRLVHDLLPPEVCSLLNPAAIYANNEISLRDVEVYGFDYDYTLAQYADALHPEIFSTARDILIEHYKSLLMKIDAFHYVQLGTAYRGLQPVPDEEVIELYGGTQHIPLYQMSGFYGKGPSIKQFMDIFSLPEMALLSCVVDYFLGHSLEFDQAHLYKDVTDAIRDVHVKGLMYQWIEQDMEKYILRGDETFAVLSRLVAHGKQLFLITNSPFSFVDKGMRHMVGPDWRQLFDVVIVQADKPSFFTDRRKPFRKLDEKGSLQWDRITRLEKGKIYRQGNLFDFLRLTEWRGPRVLYFGDHLYSDLADLMLRHGWRTGAIIPELEREIRIINTEQYMHSLTWQQALTGLLERMQTYQDAESRQVLAAWMKERQELRCITKALFNAQFGSIFRTFHNPTYFSRRLVRFSDLYMASLSCLLNYRVDFTFYPRRTPLQHEAPLWMDQLCTGCMKTPFLGDMAHIR

SEQ ID NO: 32632 - protein, 111 aa, Homo sapiens
  REGION 1..111: note = ENSP00000419774
MRVESGSAQERGILLESLSTLLEKTTASHEGRAPGNRELTGQCGQLPRSEPSGRSDRGPQPCSARPSHLVSGRRLPCRPLGLPQRGPGTGKRGKGSLFVRPTSCPPRSAVS

SEQ ID NO: 32633 - protein, 258 aa, Homo sapiens
  REGION 1..258: note = ENSP00000417269
  VARIANT 1: note = Any amino acid
XQDMRRLVHDLLPPEVCSLLNPAAIYANNEISLRDVEVYGFDYDYTLAQYADALHPEIFSTARDILIEHYKSLLMKIDAFHYVQLGTAYRGLQPVPDEEGPSIKQFMDIFSLPEMALLSCVVDYFLGHSLEFDQAHLYKDVTDAIRDVHVKGLMYQWIEQDMEKYILRGDETFAVLSRLVAHGKQLFLITNSPFSFVDKGMRHMVGPDWRQLFDVVIVQADKPSFFTDRRKPFRKLDEKGSLQWDRITRLEKGKIYRQ

SEQ ID NO: 32634 - protein, 85 aa, Homo sapiens
  REGION 1..85: note = ENSP00000418583
MKIDAFHYVQLGTAYRGLQPVPDEEGPSIKQFMDIFSLPEMALLSCVVDYFLGHSLEFDQAHLYKDVTDAIRDVHVKGLMYQWIE

SEQ ID NO: 32635 - protein, 264 aa, Homo sapiens
  REGION 1..264: note = ENSP00000358660
MCPRAARAPATLLLALGAVLWPAAGAWELTILHTNDVHSRLEQTSEDSSKCVNASRCMGGVARLFTKVQQIRRAEPNVLLLDAGDQYQGTIWFTVYKGAEVAHFMNALRYDAMALGNHEFDNGVEGLIEPLLKEAKFPILSANIKAKGPLASQISGLYLPYKVLPVGDEVVGIVGYTSKETPFLSNPGTNLVFEDEITALQPEVDKLKTLNVNKIIALGHSGFEMDKLIAQKVRGVDVVVGGHSNTFLYTGNCFKRIAWARMSR

SEQ ID NO: 32636 - protein, 574 aa, Homo sapiens
  REGION 1..574: note = ENSP00000257770
MCPRAARAPATLLLALGAVLWPAAGAWELTILHTNDVHSRLEQTSEDSSKCVNASRCMGGVARLFTKVQQIRRAEPNVLLLDAGDQYQGTIWFTVYKGAEVAHFMNALRYDAMALGNHEFDNGVEGLIEPLLKEAKFPILSANIKAKGPLASQISGLYLPYKVLPVGDEVVGIVGYTSKETPFLSNPGTNLVFEDEITALQPEVDKLKTLNVNKIIALGHSGFEMDKLIAQKVRGVDVVVGGHSNTFLYTGNPPSKEVPAGKYPFIVTSDDGRKVPVVQAYAFGKYLGYLKIEFDERGNVISSHGNPILLNSSIPEDPSIKADINKWRIKLDNYSTQELGKTIVYLDGSSQSCRFRECNMGNLICDAMINNNLRHTDEMFWNHVSMCILNGGGIRSPIDERNNGTITWENLAAVLPFGGTFDLVQLKGSTLKKAFEHSVHRYGQSTGEFLQVGGIHVVYDLSRKPGDRVVKLDVLCTKCRVPSYDPLKMDEVYKVILPNFLANGGDGFQMIKDELLRHDSGDQDINVVSTYISKMKVIYPAVEGRIKFSTGSHCHGSFSLIFLSLWAVIFVLYQ

SEQ ID NO: 32637 - protein, 230 aa, Homo sapiens
  REGION 1..230: note = ENSP00000414674
  VARIANT 1: note = Any amino acid
XDVVVGGHSNTFLYTGNPPSKEVPAGKYPFIVTSDDGRKVPVVQAYAFGKYLGYLKIEFDERGNVISSHGNPILLNSSIPEDPSIKADINKWRIKLDNYSTQELGKTIVYLDGSSQSCRFRECNMGNLICDAMINNNLRHTDEMFWNHVSMCILNGGGIRSPIDERNNGIHVVYDLSRKPGDRVVKLDVLCTKCRVPSYDPLKMDEVYKVILPNFLANGGDGFQMIKDEL

SEQ ID NO: 32638 - protein, 179 aa, Homo sapiens
  REGION 1..179: note = ENSP00000387630
  VARIANT 1: note = Any amino acid
XNPILLNSSIPEDPSIKADINKWRIKLDNYSTQELGKTIVYLDGSSQSCRFRECNMGNLICDAMINNNLRHTDEMFWNHVSMCILNGGGIRSPIDERNNGTITWENLAAVLPFGGTFDLVQLKGSTLKKAFEHSVHRYGQSTGEFLQVGDLKECCPICINQDDSWKEQPTAQTYLNTWF

SEQ ID NO: 32639 - protein, 524 aa, Homo sapiens
  REGION 1..524: note = ENSP00000358665
MCPRAARAPATLLLALGAVLWPAAGAWELTILHTNDVHSRLEQTSEDSSKCVNASRCMGGVARLFTKVQQIRRAEPNVLLLDAGDQYQGTIWFTVYKGAEVAHFMNALRYDAMALGNHEFDNGVEGLIEPLLKEAKFPILSANIKAKGPLASQISGLYLPYKVLPVGDEVVGIVGYTSKETPFLSNPGTNLVFEDEITALQPEVDKLKTLNVNKIIALGHSGFEMDKLIAQKVRGVDVVVGGHSNTFLYTGNPPSKEVPAGKYPFIVTSDDGRKVPVVQAYAFGKYLGYLKIEFDERGNVISSHGNPILLNSSIPEDPSIKADINKWRIKLDNYSTQELGKTIVYLDGSSQSCRFRECNMGNLICDAMINNNLRHTDEMFWNHVSMCILNGGGIRSPIDERNNGIHVVYDLSRKPGDRVVKLDVLCTKCRVPSYDPLKMDEVYKVILPNFLANGGDGFQMIKDELLRHDSGDQDINVVSTYISKMKVIYPAVEGRIKFSTGSHCHGSFSLIFLSLWAVIFVLYQ

SEQ ID NO: 32640 - protein, 270 aa, Homo sapiens
  REGION 1..270: note = ENSP00000397297
MVTFATILQVNKVMSILFYVIFLAYLRGIQGNNMDQRSLPEDSLNSLIIKLIQADILKNKLSKQMVDVKENYQSTLPKAEAPREPERGGPAKSAFQPVIAMDTELLRQQRRYNSPRVLLSDSTPLEPPPLYLMEDYVGSPVVANRTSRRKRYAEHKSHRGEYSVCDSESLWVTDKSSAIDIRGHQVTVLGEIKTGNSPVKQYFYETRCKEARPVKNGCRGIDDKHWNSQCKTSQTYVRALTSENNKLVGWRWIRIDTSCVCALSRKIGRT

SEQ ID NO: 32641 - protein, 257 aa, Homo sapiens
  REGION 1..257: note = ENSP00000328738
MSILFYVIFLAYLRGIQGNNMDQRSLPEDSLNSLIIKLIQADILKNKLSKQMVDVKENYQSTLPKAEAPREPERGGPAKSAFQPVIAMDTELLRQQRRYNSPRVLLSDSTPLEPPPLYLMEDYVGSPVVANRTSRRKRYAEHKSHRGEYSVCDSESLWVTDKSSAIDIRGHQVTVLGEIKTGNSPVKQYFYETRCKEARPVKNGCRGIDDKHWNSQCKTSQTYVRALTSENNKLVGWRWIRIDTSCVCALSRKIGRT

SEQ ID NO: 32642 - protein, 36 aa, Homo sapiens
  REGION 1..36: note = ENSP00000409221
MNGKRNGEGGKRWKWKGTGVPVRSGDATFPKAMDNV

SEQ ID NO: 32643 - protein, 191 aa, Homo sapiens
  REGION 1..191: note = ENSP00000448104
MNGKRNGEGGKRWKWKGTGVPVRSGDATFPKAMDNVTVRQGESATLRCTIDNRVTRVAWLNRSTILYAGNDKWCLDPRVVLLSNTQTQYSIEIQNVDVYDEGPYTCSVQTDNHPKTSRVHLIVQVSPKIVEISSDISINEGNNISLTCIATGRPEPTVTWRHISPKAVGFVSEDEYLEIQGITREQSGDYE

SEQ ID NO: 32644 - protein, 18 aa, Homo sapiens
  REGION 1..18: note = ENSP00000400205
MNGKRNGEGGKRWKWKGT

SEQ ID NO: 32645 - protein, 344 aa, Homo sapiens
  REGION 1..344: note = ENSP00000363918
MGVCGYLFLPWKCLVVVSLRLLFLVPTGVPVRSGDATFPKAMDNVTVRQGESATLRCTIDNRVTRVAWLNRSTILYAGNDKWCLDPRVVLLSNTQTQYSIEIQNVDVYDEGPYTCSVQTDNHPKTSRVHLIVQVSPKIVEISSDISINEGNNISLTCIATGRPEPTVTWRHISPKAVGFVSEDEYLEIQGITREQSGDYECSASNDVAAPVVRRVKVTVNYPPYISEAKGTGVPVGQKGTLQCEASAVPSAEFQWYKDDKRLIEGKKGVKVENRPFLSKLIFFNVSEHDYGNYTCVASNKLGHTNASIMLFGPGAVSEVSNGTSRRAGCVWLLPLLVLHLLLKF

SEQ ID NO: 32646 - protein, 355 aa, Homo sapiens
  REGION 1..355: note = ENSP00000396722
MGVCGYLFLPWKCLVVVSLRLLFLVPTGVPVRSGDATFPKAMDNVTVRQGESATLRCTIDNRVTRVAWLNRSTILYAGNDKWCLDPRVVLLSNTQTQYSIEIQNVDVYDEGPYTCSVQTDNHPKTSRVHLIVQVSPKIVEISSDISINEGNNISLTCIATGRPEPTVTWRHISPKAVGFVSEDEYLEIQGITREQSGDYECSASNDVAAPVVRRVKVTVNYPPYISEAKGTGVPVGQKGTLQCEASAVPSAEFQWYKDDKRLIEGKKGVKVENRPFLSKLIFFNVSEHDYGNYTCVASNKLGHTNASIMLFEVKTTALTPWKGPGAVSEVSNGTSRRAGCVWLLPLLVLHLLLKF

SEQ ID NO: 32647 - protein, 316 aa, Homo sapiens
  REGION 1..316: note = ENSP00000363916
MGVCGYLFLPWKCLVVVSLRLLFLVPTGVPVRSGDATFPKAMDNVTVRQGESATLRCTIDNRVTRVAWLNRSTILYAGNDKWCLDPRVVLLSNTQTQYSIEIQNVDVYDEGPYTCSVQTDNHPKTSRVHLIVQVSPKIVEISSDISINEGNNISLTCIATGRPEPTVTWRHISPKAVGFVSEDEYLEIQGITREQSGDYECSASNDVAAPVVRRVKVTVNYPPYISEAKGTGVPVGQKGTLQCEASAVPSAEFQWYKDDKRLIEGKKGVKVENRPFLSKLIFFNVSEHDYGNYTCVASNKLGHTNASIMLFGETVL

SEQ ID NO: 32648 - protein, 119 aa, Homo sapiens
  REGION 1..119: note = ENSP00000387984
  VARIANT 1: note = Any amino acid
XSAEFQWYKDDKRLIEGKKGVKVENRPFLSKLIFFNVSEHDYGNYTCVASNKLGHTNASIMLFELNEPTSSTLLQEVKTTALTPWKGPGAVSEVSNGTSRRAGCVWLLPLLVLHLLLKF

SEQ ID NO: 32649 - protein, 168 aa, Homo sapiens
  REGION 1..168: note = ENSP00000437668
VGFVSEDEYLEIQGITREQSGDYECSASNDVAAPVVRRVKVTVNYPPYISEAKGTGVPVGQKGTLQCEASAVPSAEFQWYKDDKRLIEGKKGVKVENRPFLSKLIFFNVSEHDYGNYTCVASNKLGHTNASIMLFGPGAVSEVSNGTSRRAGCVWLLPLLVLHLLLKF

SEQ ID NO: 32650 - protein, 179 aa, Homo sapiens
  REGION 1..179: note = ENSP00000416320
VGFVSEDEYLEIQGITREQSGDYECSASNDVAAPVVRRVKVTVNYPPYISEAKGTGVPVGQKGTLQCEASAVPSAEFQWYKDDKRLIEGKKGVKVENRPFLSKLIFFNVSEHDYGNYTCVASNKLGHTNASIMLFEVKTTALTPWKGPGAVSEVSNGTSRRAGCVWLLPLLVLHLLLKF

SEQ ID NO: 32651 - protein, 344 aa, Homo sapiens
  REGION 1..344: note = ENSP00000363923
MKTIQPKMHNSISWAIFTGLAALCLFQGVPVRSGDATFPKAMDNVTVRQGESATLRCTIDNRVTRVAWLNRSTILYAGNDKWCLDPRVVLLSNTQTQYSIEIQNVDVYDEGPYTCSVQTDNHPKTSRVHLIVQVSPKIVEISSDISINEGNNISLTCIATGRPEPTVTWRHISPKAVGFVSEDEYLEIQGITREQSGDYECSASNDVAAPVVRRVKVTVNYPPYISEAKGTGVPVGQKGTLQCEASAVPSAEFQWYKDDKRLIEGKKGVKVENRPFLSKLIFFNVSEHDYGNYTCVASNKLGHTNASIMLFGPGAVSEVSNGTSRRAGCVWLLPLLVLHLLLKF

SEQ ID NO: 32652 - protein, 604 aa, Homo sapiens
  REGION 1..604: note = ENSP00000173229
MMRAVWEALAALAAVACLVGAVRGGPGLSMFAGQAAQPDPCSDENGHPRRCIPDFVNAAFGKDVRVSSTCGRPPARYCVVSERGEERLRSCHLCNASDPKKAHPPAFLTDLNNPHNLTCWQSENYLQFPHNVTLTLSLGKKFEVTYVSLQFCSPRPESMAIYKSMDYGRTWVPFQFYSTQCRKMYNRPHRAPITKQNEQEAVCTDSHTDMRPLSGGLIAFSTLDGRPSAHDFDNSPVLQDWVTATDIRVAFSRLHTFGDENEDDSELARDSYFYAVSDLQVGGRCKCNGHAARCVRDRDDSLVCDCRHNTAGPECDRCKPFHYDRPWQRATAREANECVACNCNLHARRCRFNMELYKLSGRKSGGVCLNCRHNTAGRHCHYCKEGYYRDMGKPITHRKACKACDCHPVGAAGKTCNQTTGQCPCKDGVTGITCNRCAKGYQQSRSPIAPCIKIPVAPPTTAASSVEEPEDCDSYCKASKGKLKINMKKYCKKDYAVQIHILKADKAGDWWKFTVNIISVYKQGTSRIRRGDQSLWIRSRDIACKCPKIKPLKKYLLLGNAEDSPDQSGIVADKSSLVIQWRDTWARRLRKFQQREKKGKCKKA

SEQ ID NO: 32653 - protein, 153 aa, Homo sapiens
  REGION 1..153: note = ENSP00000389375
HYCKEGYYRDMGKPITHRKACKACDCHPVGAAGKTCNQTTGQCPCKDGVTGITCNRCAKGYQQSRSPIAPCIKIPVAPPTTAASSVEEPEAARQPNTFQAEGLSLLPGAAEKEGARCWGYRRRLGHRVAQAECRGPRSWAWGRITSSFSFASN

SEQ ID NO: 32654 - protein, 628 aa, Homo sapiens
  REGION 1..628: note = ENSP00000340998
MGSCARLLLLWGCTVVAAGLSGVAGVSSRCEKACNPRMGNLALGRKLWADTTCGQNATELYCFYSENTDLTCRQPKCDKCNAAYPHLAHLPSAMADSSFRFPRTWWQSAEDVHREKIQLDLEAEFYFTHLIVMFKSPRPAAMVLDRSQDFGKTWKPYKYFATNCSATFGLEDDVVKKGAICTSKYSSPFPCTGGEVIFKALSPPYDTENPYSAKVQEQLKITNLRVQLLKRQSCPCQRNDLNEEPQHFTHYAIYDFIVKGSCFCNGHADQCIPVHGFRPVKAPGTFHMVHGKCMCKHNTAGSHCQHCAPLYNDRPWEAADGKTGAPNECRTCKCNGHADTCHFDVNVWEASGNRSGGVCDDCQHNTEGQYCQRCKPGFYRDLRRPFSAPDACKPCSCHPVGSAVLPANSVTFCDPSNGDCPCKPGVAGRRCDRCMVGYWGFGDYGCRPCDCAGSCDPITGDCISSHTDIDWYHEVPDFRPVHNKSEPAWEWEDAQGFSALLHSGKCECKEQTLGNAKAFCGMKYSYVLKIKILSAHDKGTHVEVNVKIKKVLKSTKLKIFRGKRTLYPESWTDRGCTCPILNPGLEYLVAGHEDIRTGKLIVNMKSFVQHWKPSLGRKVMDILKRECK

SEQ ID NO: 32655 - protein, 591 aa, Homo sapiens
  REGION 1..591: note = ENSP00000339436
MGNLALGRKLWADTTCGQNATELYCFYSENTDLTCRQPKCDKCNAAYPHLAHLPSAMADSSFRFPRTWWQSAEDVHREKIQLDLEAEFYFTHLIVMFKSPRPAAMVLDRSQDFGKTWKPYKYFATNCSATFGLEDDVVKKGAICTSKYSSPFPCTGGEVIFKALSPPYDTENPYSAKVQEQLKITNLRVQLLKRQSCPCQRNDLNEEPQHFTHYAIYDFIVKGSCFCNGHADQCIPVHGFRPVKAPGTFHMVHGKCMCKHNTAGSHCQHCAPLYNDRPWEAADGKTGAPNECRTCKCNGHADTCHFDVNVWEASGNRSGGVCDDCQHNTEGQYCQRCKPGFYRDLRRPFSAPDACKPCSCHPVGSAVLPANSVTFCDPSNGDCPCKPGVAGRRCDRCMVGYWGFGDYGCRPCDCAGSCDPITGDCISSHTDIDWYHEVPDFRPVHNKSEPAWEWEDAQGFSALLHSGKCECKEQTLGNAKAFCGMKYSYVLKIKILSAHDKGTHVEVNVKIKKVLKSTKLKIFRGKRTLYPESWTDRGCTCPILNPGLEYLVAGHEDIRTGKLIVNMKSFVQHWKPSLGRKVMDILKRECK

SEQ ID NO: 32656 - protein, 591 aa, Homo sapiens; identical to SEQ ID NO: 32655
  REGION 1..591: note = ENSP00000444432

SEQ ID NO: 32657 - protein, 605 aa, Homo sapiens
  REGION 1..605: note = ENSP00000447292
MGSCARLLLLWGCTVVAAGLSGVAGVSSRCEKACNPRMGNLALGRKLWADTTCGQNATELYCFYSENTDLTCRQPKCDKCNAAYPHLAHLPSAMADSSFRFPRTWWQSAEDVHREKIQLDLEAEFYFTHLIVMFKSPRPAAMVLDRSQDFGKTWKPYKYFATNCSATFGLEDDVVKKGAICTSKYSSPFPCTGGEVIFKALSPPYDTENPYSAKVQEQLKITNLRVQLLKRQSCPCQRNDLNEEPQHFTHYAIYDFIVKGSCFCNGHADQCIPVHGFRPVKAPGTFHMVHGKCMCKHNTAGSHCQHCAPLYNDRPWEAADGKTGAPNECRTCKCNGHADTCHFDVNVWEASGNRSGGVCDDCQHNTEGQYCQRCKPGFYRDLRRPFSAPDACKPCSCHPVGSAVLPANSVTFCDPSNGDCPCKPGVAGRRCDRCMVGYWGFGDYGCRPCDCAGSCDPITGDCISSHTDIDWYHEVPDFRPVHNKSEPAWEWEDAQGFSALLHSVLKIKILSAHDKGTHVEVNVKIKKVLKSTKLKIFRGKRTLYPESWTDRGCTCPILNPGLEYLVAGHEDIRTGKLIVNMKSFVQHWKPSLGRKVMDILKRECK

SEQ ID NO: 32658 - protein, 176 aa, Homo sapiens
  REGION 1..176: note = ENSP00000447594
MGNLALGRKLWADTTCGQNATELYCFYSENTDLTCRQPKCDKCNAAYPHLAHLPSAMADSSFRFPRTWWQSAEDVHREKIQLDLEAEFYFTHLIVMFKSPRPAAMVLDRSQDFGKTWKPYKYFATNCSATFGLEDDVVKKGAICTSKYSSPFPCTGGEVIFKALSPPYDTENPYSA

SEQ ID NO: 32659 - protein, 438 aa, Homo sapiens
  REGION 1..438: note = ENSP00000359091
MYLSRFLSIHALWVTVSSVMQPYPLVWGHYDLCKTQIYTEEGKVWDYMACQPESTDMTKYLKVKLDPPDITCGDPPETFCAMGNPYMCNNECDASTPELAHPPELMFDFEGRHPSTFWQSATWKEYPKPLQVNITLSWSKTIELTDNIVITFESGRPDQMILEKSLDYGRTWQPYQYYATDCLDAFHMDPKSVKDLSQHTVLEIICTEEYSTGYTTNSKIIHFEIKDRFAFFAGPRLRNMASLYGQLDTTKKLRDFFTVTDLRIRLLRPAVGEIFVDELHLARYFYAISDIKVRGRCKCNLHATVCVYDNSKLTCECEHNTTGPDCGKCKKNYQGRPWSPGSYLPIPKGTANTCIPSISSIGTNVCDNELLHCQNGGTCHNNVRCLCPAAYTGILCEKLRCEEAGSCGSDSGQGAPPHGSPALLLLTTLLGTASPLVF

SEQ ID NO: 32660 - protein, 539 aa, Homo sapiens
  REGION 1..539: note = ENSP00000359085
MYLSRFLSIHALWVTVSSVMQPYPLVWGHYDLCKTQIYTEEGKVWDYMACQPESTDMTKYLKVKLDPPDITCGDPPETFCAMGNPYMCNNECDASTPELAHPPELMFDFEGRHPSTFWQSATWKEYPKPLQVNITLSWSKTIELTDNIVITFESGRPDQMILEKSLDYGRTWQPYQYYATDCLDAFHMDPKSVKDLSQHTVLEIICTEEYSTGYTTNSKIIHFEIKDRFAFFAGPRLRNMASLYGQLDTTKKLRDFFTVTDLRIRLLRPAVGEIFVDELHLARYFYAISDIKVRGRCKCNLHATVCVYDNSKLTCECEHNTTGPDCGKCKKNYQGRPWSPGSYLPIPKGTANTCIPSISSIGNCECFGHSNRCSYIDLLNTVICVSCKHNTRGQHCELCRLGYFRNASAQLDDENVCIECYCNPLGSIHDRCNGSGFCECKTGTTGPKCDECLPGNSWHYGCQPNVCDNELLHCQNGGTCHNNVRCLCPAAYTGILCEKLRCEEAGSCGSDSGQGAPPHGSPALLLLTTLLGTASPLVF

SEQ ID NO: 32661 - protein, 460 aa, Homo sapiens
  REGION 1..460: note = ENSP00000359084
MYLSRFLSIHALWVTVSSVMQPYPLVWGHYDLCKTQIYTEEGKVWDYMACQPESTDMTKYLKVKLDPPDITCGDPPETFCAMGNPYMCNNECDASTPELAHPPELMFDFEGRHPSTFWQSATWKEYPKPLQVNITLSWSKTIELTDNIVITFESGRPDQMILEKSLDYGRTWQPYQYYATDCLDAFHMDPKSVKDLSQHTVLEIICTEEYSTGYTTNSKIIHFEIKDRFAFFAGPRLRNMASLYGQLDTTKKLRDFFTVTDLRIRLLRPAVGEIFVDELHLARYFYAISDIKVRGRCKCNLHATVCVYDNSKLTCECEHNTTGPDCGKCKKNYQGRPWSPGSYLPIPKGTANTCIPSISSIGNPPKFNRIWPNISSLEVSNPKQANVCDNELLHCQNGGTCHNNVRCLCPAAYTGILCEKLRCEEAGSCGSDSGQGAPPHGSPALLLLTTLLGTASPLVF

SEQ ID NO: 32662 - protein, 480 aa, Homo sapiens
  REGION 1..480: note = ENSP00000359083
MYLSRFLSIHALWVTVSSVMQPYPLVWGHYDLCKTQIYTEEGKVWDYMACQPESTDMTKYLKVKLDPPDITCGDPPETFCAMGNPYMCNNECDASTPELAHPPELMFDFEGRHPSTFWQSATWKEYPKPLQVNITLSWSKTIELTDNIVITFESGRPDQMILEKSLDYGRTWQPYQYYATDCLDAFHMDPKSVKDLSQHTVLEIICTEEYSTGYTTNSKIIHFEIKDRFAFFAGPRLRNMASLYGQLDTTKKLRDFFTVTDLRIRLLRPAVGEIFVDELHLARYFYAISDIKVRGRCKCNLHATVCVYDNSKLTCECEHNTTGPDCGKCKKNYQGRPWSPGSYLPIPKGTANTCIPSISSIGNPPKFNRIWPNISSLEVSNPKQVAPKLALSTVSSVQVANHKRANVCDNELLHCQNGGTCHNNVRCLCPAAYTGILCEKLRCEEAGSCGSDSGQGAPPHGSPALLLLTTLLGTASPLVF

SEQ ID NO: 32663 - protein, 494 aa, Homo sapiens
  REGION 1..494: note = ENSP00000359082
MYLSRFLSIHALWVTVSSVMQPYPLVWGHYDLCKTQIYTEEGKVWDYMACQPESTDMTKYLKVKLDPPDITCGDPPETFCAMGNPYMCNNECDASTPELAHPPELMFDFEGRHPSTFWQSATWKEYPKPLQVNITLSWSKTIELTDNIVITFESGRPDQMILEKSLDYGRTWQPYQYYATDCLDAFHMDPKSVKDLSQHTVLEIICTEEYSTGYTTNSKIIHFEIKDRFAFFAGPRLRNMASLYGQLDTTKKLRDFFTVTDLRIRLLRPAVGEIFVDELHLARYFYAISDIKVRGRCKCNLHATVCVYDNSKLTCECEHNTTGPDCGKCKKNYQGRPWSPGSYLPIPKGTANTCIPSISSIGNCECFGHSNRCSYIDLLNTVICVSCKHNTRGQHCELCRLGYFRNASAQLDDENVCIANVCDNELLHCQNGGTCHNNVRCLCPAAYTGILCEKLRCEEAGSCGSDSGQGAPPHGSPALLLLTTLLGTASPLVF

SEQ ID NO: 32664 - protein, 480 aa, Homo sapiens; identical to SEQ ID NO: 32662
  REGION 1..480: note = ENSP00000359088

SEQ ID NO: 32665 - protein, 539 aa, Homo sapiens; identical to SEQ ID NO: 32660
  REGION 1..539: note = ENSP00000359090

SEQ ID NO: 32666 - protein, 530 aa, Homo sapiens
  REGION 1..530: note = ENSP00000376921
MLHLLALFLHCLPLASGDYDICKSWVTTDEGPTWEFYACQPKVMRLKDYVKVKVEPSGITCGDPPERFCSHENPYLCSNECDASNPDLAHPPRLMFDKEEEGLATYWQSITWSRYPSPLEANITLSWNKTVELTDDVVMTFEYGRPTVMVLEKSLDNGRTWQPYQFYAEDCMEAFGMSARRARDMSSSSAHRVLCTEEYSRWAGSKKEKHVRFEVRDRFAIFAGPDLRNMDNLYTRLESAKGLKEFFTLTDLRMRLLRPALGGTYVQRENLYKYFYAISNIEVIGRCKCNLHANLCSMREGSLQCECEHNTTGPDCGKCKKNFRTRSWRAGSYLPLPHGSPNACATAGSFGNCECYGHSNRCSYIDFLNVVTCVSCKHNTRGQHCQHCRLGYYRNGSAELDDENVCIECNCNQIGSVHDRCNETGFCECREGAAGPKCDDCLPTHYWRQGCYPNVCDDDQLLCQNGGTCLQNQRCACPRGYTGVRCEQPRCDPADDDGGLDCDRAPGAAPRPATLLGCLLLLGLAARLGR

SEQ ID NO: 32667 - protein, 422 aa, Homo sapiens
  REGION 1..422: note = ENSP00000361252
MLHLLALFLHCLPLASGDYDICKSWVTTDEGPTWEFYACQPKVMRLKDYVKVKVEPSGITCGDPPERFCSHENPYLCSNECDASNPDLAHPPRLMFDKEEEGLATYWQSITWSRYPSPLEANITLSWNKTVELTDDVVMTFEYGRPTVMVLEKSLDNGRTWQPYQFYAEDCMEAFGMSARRARDMSSSSAHRVLCTEEYSRWAGSKKEKHVRFEVRDRFAIFAGPDLRNMDNLYTRLESAKGLKEFFTLTDLRMRLLRPALGGTYVQRENLYKYFYAISNIEVIGRCKCNLHANLCSMREGSLQCECEHNTTGPDCGKCKKNFRTRSWRAGSYLPLPHGSPNACATAGSFGTLQTPPPGRSPSALRGSRRGLANVKEPAGSRPQISEMLLGCTVTLHQGSVGPHIPPKLSLPDPGGPWLGSQ

SEQ ID NO: 32668 - protein, 418 aa, Homo sapiens
  REGION 1..418: note = ENSP00000359532
MRLNSSAPGTPGTPAADPFQRAQAGLEEALLAPGFGNASGNASERVLAAPSSELDVNTDIYSKVLVTAVYLALFVVGTVGNTVTAFTLARKKSLQSLQSTVHYHLGSLALSDLLTLLLAMPVELYNFIWVHHPWAFGDAGCRGYYFLRDACTYATALNVASLSVERYLAICHPFKAKTLMSRSRTKKFISAIWLASALLAVPMLFTMGEQNRSADGQHAGGLVCTPTIHTATVKVVIQVNTFMSFIFPMVVISVLNTIIANKLTVMVRQAAEQGQVCTVGGEHSTFSMAIEPGRVQALRHGVRVLRAVVIAFVVCWLPYHVRRLMFCYISDEQWTPFLYDFYHYFYMVTNALFYVSSTINPILYNLVSANFRHIFLATLACLCPVWRRRRKRPAFSRKADSVSSNHTLSSNATRETLY

SEQ ID NO: 32669 - protein, 410 aa, Homo sapiens
  REGION 1..410: note = ENSP00000303686
METSSPRPPRPSSNPGLSLDARLGVDTRLWAKVLFTALYALIWALGAAGNALSAHVVLKARAGRAGRLRHHVLSLALAGLLLLLVGVPVELYSFVWFHYPWVFGDLGCRGYYFVHELCAYATVLSVAGLSAERCLAVCQPLRARSLLTPRRTRWLVALSWAASLGLALPMAVIMGQKHELETADGEPEPASRVCTVLVSRTALQVFIQVNVLVSFVLPLALTAFLNGVTVSHLLALCSQVPSTSTPGSSTPSRLELLSEEGLLSFIVWKKTFIQGGQVSLVRHKDVRRIRSLQRSVQVLRAIVVMYVICWLPYHARRLMYCYVPDDAWTDPLYNFYHYFYMVTNTLFYVSSAVTPLLYNAVSSSFRKLFLEAVSSLCGEHHPMKRLPPKPQSPTLMDTASGFGDPPETRT

SEQ ID NO: 32670 - protein, 186 aa, Homo sapiens
  REGION 1..186: note = ENSP00000404020
MISNYRNGSELVCFNSGVGCFLIGCDWAFTVLVNTFFSFLRRKTDFFIGGEEGMAEKLITQTFSHHNQLAQKTRREKRARQEAERREKAERAARLAKEAKSETSGPQIKELTDEEAERLQLEIDQKKDAENHEAQLKNGSLDSPGKQDTEEDEEEDEKDKGKLKPNLGNGADLPNYRWTQTLSELD

SEQ ID NO: 32671 - protein, 331 aa, Homo sapiens
  REGION 1..331: note = ENSP00000319664
MGGEQEEERFDGMLLAMAQQHEGGVQELVNTFFSFLRRKTDFFIGGEEGMAEKLITQTFSHHNQLAQKTRREKRARQEAERREKAERAARLAKEAKSETSGPQIKELTDEEAERLQLEIDQKKDAENHEAQLKNGSLDSPGKQDTEEDEEEDEKDKGKLKPNLGNGADLPNYRWTQTLSELDLAVPFCVNFRLKGKDMVVDIQRRHLRVGLKGQPAIIDGELYNEVKVEESSWLIEDGKVVTVHLEKINKMEWWSRLVSSDPEINTKKINPENSKLSDLDSETRSMVEKMMYDQRQKSMGLPTSDEQKKQEILKKFMDQHPEMDFSKAKFN

SEQ ID NO: 32672 - protein, 133 aa, Homo sapiens
  REGION 1..133: note = ENSP00000400981
MAEKLITQTFSHHNQLAQKTRREKRARQEAERREKAERAARLAKEAKSETSGPQIKELTDEEAERLQLEIDQKKDAENHEAQLKNGSLDSPGKQDTEEDEEEDEKDKGKLKPNLGNGADLPNYRWTQTLSELD

SEQ ID NO: 32673 - protein, 361 aa, Homo sapiens
  REGION 1..361: note = ENSP00000347626
METGAAELYDQALLGILQHVGNVQDFLRVLFGFLYRKTDFYRLLRHPSDRMGFPPGAAQALVLQVFKTFDHMARQDDEKRRQELEEKIRRKEEEEAKTVSAAAAEKEPVPVPVQEIEIDSTTELDGHQEVEKVQPPGPVKEMAHGSQEAEAPGAVAGAAEVPREPPILPRIQEQFQKNPDSYNGAVRENYTWSQDYTDLEVRVPVPKHVVKGKQVSVALSSSSIRVAMLEENGERVLMEGKLTHKINTESSLWSLEPGKCVLVNLSKVGEYWWNAILEGEEPIDIDKINKERSMATVDEEEQAVLDRLTFDYHQKLQGKPQSHELKVHEMLKKGWDAEGSPFRGQRFDPAMFNISPGAVQF

SEQ ID NO: 32674 - protein, 181 aa, Homo sapiens
  REGION 1..181: note = ENSP00000338352
MMKFKPNQTRTYDREGFKKRAACLCFRSEQEDEVLLVSSSRYPDQWIVPGGGMEPEEEPGGAAVREVYEEAGVKGKLGRLLGIFEQNQDRKHRTYVYVLTVTEILEDWEDSVNIGRKREWFKVEDAIKVLQCHKPVHAEYLEKLKLGCSPANGNSTVPSLPDNNALFVTAAQTSGLPSSVR

SEQ ID NO: 32675 - protein, 180 aa, Homo sapiens
  REGION 1..180: note = ENSP00000406612
MMKFKPNQTRTYDREGFKKRAACLCFRSEQEDEVLLVSSSRYPDQWIVPGGGMEPEEEPGGAAVREVYEEAGVKGKLGRLLGIFENQDRKHRTYVYVLTVTEILEDWEDSVNIGRKREWFKVEDAIKVLQCHKPVHAEYLEKLKLGCSPANGNSTVPSLPDNNALFVTAAQTSGLPSSVR

SEQ ID NO: 32676 - protein, 95 aa, Homo sapiens
  REGION 1..95: note = ENSP00000448504
MEPEEEPGGAAVREVYEEAGVKGKLGRLLGIFENQDRKHRTYVYVLTVTEILEDWEDSVNIGRKREWFKVEDAIKVLQCHKPVHAEYLEKLKLGC

SEQ ID NO: 32677 - protein, 128 aa, Homo sapiens
  REGION 1..128: note = ENSP00000449552
MEPEEEPGGAAVREVYEEAGVKGKLGRLLGIFENQDRKHRTYVYVLTVTEILEDWEDSVNIGRKREWFKVEDAIKVLQCHKPVHAEYLEKLKLGCSPANGNSTVPSLPDNNALFVTAAQTSGLPSSVR

SEQ ID NO: 32678 - protein, 128 aa, Homo sapiens; identical to SEQ ID NO: 32677
  REGION 1..128: note = ENSP00000449724

SEQ ID NO: 32679 - protein, 129 aa, Homo sapiens
  REGION 1..129: note = ENSP00000448032
MEPEEEPGGAAVREVYEEAGVKGKLGRLLGIFEQNQDRKHRTYVYVLTVTEILEDWEDSVNIGRKREWFKVEDAIKVLQCHKPVHAEYLEKLKLGCSPANGNSTVPSLPDNNALFVTAAQTSGLPSSVR

SEQ ID NO: 32680 - protein, 112 aa, Homo sapiens
  REGION 1..112: note = ENSP00000448620
MEPEEEPGGAAVREVYEEAGVKGKLGRLLGIFENQDRKHRTYVYVLTVTEILEDWEDSVNIGRKREWFKVEDAIKVLQCHKPVHAEYLEKLKLGCSPANGNSTVPSLPDNNA

SEQ ID NO: 32681 - protein, 609 aa, Homo sapiens
  REGION 1..609: note = ENSP00000252891
MSRSAAASGGPRRPERHLPPAPCGAPGPPETCRTEPDGAGTMNKLRQSLRRRKPAYVPEASRPHQWQADEDAVRKGTCSFPVRYLGHVEVEESRGMHVCEDAVKKLKAMGRKSVKSVLWVSADGLRVVDDKTKDLLVDQTIEKVSFCAPDRNLDKAFSYICRDGTTRRWICHCFLALKDSGERLSHAVGCAFAACLERKQRREKECGVTAAFDASRTSFAREGSFRLSGGGRPAEREAPDKKKAEAAAAPTVAPGPAQPGHVSPTPATTSPGEKGEAGTPVAAGTTAAAIPRRHAPLEQLVRQGSFRGFPALSQKNSPFKRQLSLRLNELPSTLQRRTDFQVKGTVPEMEPPGAGDSDSINALCTQISSSFASAGAPAPGPPPATTGTSAWGEPSVPPAAAFQPGHKRTPSEAERWLEEVSQVAKAQQQQQQQQQQQQQQQQQQQQAASVAPVPTMPPALQPFPAPVGPFDAAPAQVAVFLPPPHMQPPFVPAYPGLGYPPMPRVPVVGITPSQMVANAFCSAAQLQPQPATLLGKAGAFPPPAIPSAPGSQARPRPNGAPWPPEPAPAPAPELDPFEAQWAALEGKATVEKPSNPFSGDLQKTFEIEL

SEQ ID NO: 32682 - protein, 568 aa, Homo sapiens
  REGION 1..568: note = ENSP00000472400
MNKLRQSLRRRKPAYVPEASRPHQWQADEDAVRKGTCSFPVRYLGHVEVEESRGMHVCEDAVKKLKAMGRKSVKSVLWVSADGLRVVDDKTKDLLVDQTIEKVSFCAPDRNLDKAFSYICRDGTTRRWICHCFLALKDSGERLSHAVGCAFAACLERKQRREKECGVTAAFDASRTSFAREGSFRLSGGGRPAEREAPDKKKAEAAAAPTVAPGPAQPGHVSPTPATTSPGEKGEAGTPVAAGTTAAAIPRRHAPLEQLVRQGSFRGFPALSQKNSPFKRQLSLRLNELPSTLQRRTDFQVKGTVPEMEPPGAGDSDSINALCTQISSSFASAGAPAPGPPPATTGTSAWGEPSVPPAAAFQPGHKRTPSEAERWLEEVSQVAKAQQQQQQQQQQQQQQQQQQQQAASVAPVPTMPPALQPFPAPVGPFDAAPAQVAVFLPPPHMQPPFVPAYPGLGYPPMPRVPVVGITPSQMVANAFCSAAQLQPQPATLLGKAGAFPPPAIPSAPGSQARPRPNGAPWPPEPAPAPAPELDPFEAQWAALEGKATVEKPSNPFSGDLQKTFEIEL

SEQ ID NO: 32683 - protein, 568 aa, Homo sapiens; identical to SEQ ID NO: 32682
  REGION 1..568: note = ENSP00000442759

SEQ ID NO: 32684 - protein, 214 aa, Homo sapiens
  REGION 1..214: note = ENSP00000469310
  VARIANT 1: note = Any amino acid
XCEDAVKKLKAMGRKSVKSVLWVSADGLRVVDDKTKDLLVDQTIEKVSFCAPDRNLDKAFSYICRDGTTRRWICHCFLALKDSGERLSHAVGCAFAACLERKQRREKECGVTAAFDASRTSFAREGSFRLSGGGRPAEREAPDKKKEAAAAPTVAPGPAQPGHVSPTPATTSPGEKGEAGTPVAAGTTAAAIPRRHAPLEQLVRQGSFRGFPAL

SEQ ID NO: 32685 - protein, 235 aa, Homo sapiens
  REGION 1..235: note = ENSP00000469736
MNKLRQSLRRRKPAYVPEASRPHQWQADEDAVRKGTCSFPVRYLGHVEVEESRGMHVCEDAVKKLKAMGRKSVKSVLWVSADGLRVVDDKTKDLLVDQTIEKVSFCAPDRNLDKAFSYICRDGTTRRWICHCFLALKDSGERLSHAVGCAFAACLERKQRREKECGVTAAFDASRTSFAREGSFRLSGGGRPAEREAPDKKKAEAAAAPTVAPGPAQPGHVSPTPATTSPGEKGE

SEQ ID NO: 32686 - protein, 115 aa, Homo sapiens
  REGION 1..115: note = ENSP00000470794
MNKLRQSLRRRKPAYVPEASRPHQWQADEDAVRKGTCSFPVRYLGHVEVEESRGMHVCEDAVKKLKAMGRKSVKSVLWVSADGLRVVDDKTKDLLVDQTIEKVSFCAPDRNLDKA

SEQ ID NO: 32687 - protein, 110 aa, Homo sapiens
  REGION 1..110: note = ENSP00000471376
MNKLRQSLRRRKPAYVPEASRPHQWQADEDAVRKGTCSFPVRYLGHVEVEESRGMHVCEDAVKKLKAMGRKSVKSVLWVSADGLRVVDDKTKDLLVDQTIEKVSFCAPDR

SEQ ID NO: 32688 - protein, 599 aa, Homo sapiens
  REGION 1..599: note = ENSP00000371155
MSTGFSFGSGTLGSTTVAAGGTSTGGVFSFGTGASSNPSVGLNFGNLGSTSTPATTSAPSSGFGTGLFGSKPATGFTLGGTNTGIATTITTGLTLGTPATTSAATTGFSLGFNKPAASATPFALPITSTSASGLTLSSALTSTPAASTGFTLNNLGGTTATTTTASTGLSLGGALAGLGGSLFQSTNTGTSGLGQNALGLTLGTTAATSTAGNEGLGGIDFSSSSDKKSDKTGTRPEDSKALKDENLPPVICQDVENLQKFVKEQKQVQEEISRMSSKAMLKVQEDIKALKQLLSLAANGIQRNTLNIDKLKIETAQELKNAEIALRTQKTPPGLQHEYAAPADYFRILVQQFEVQLQQYRQQIEELENHLATQANNSHITPQDLSMAMQKIYQTFVALAAQLQSIHENVKVLKEQYLGYRKMFLGDAVDVFETRRAEAKKWQNTPRVTTGPTPFSTMPNAAAVAMAATLTQQQQPATGPQPSLGVSFGTPFGSGIGTGLQSSGLGSSNLGGFGTSSGFGCSTTGASTFGFGTTNKPSGSLSAGFGSSSTSGFNFSNPGITASAGLTFGVSNPASAGFGTGGQLLQLKKPPAGNKRGKR

SEQ ID NO: 32689 - protein, 62 aa, Homo sapiens
  REGION 1..62: note = ENSP00000418341
MSTGFSFGSGTLGSTTVAAGGTSTGGVFSFGTGASSSTTLLRLLSFVEQIFIGQIPMCKALF

SEQ ID NO: 32690 - protein, 128 aa, Homo sapiens
  REGION 1..128: note = ENSP00000418904
MSTGFSFGSGTLGSTTVAAGGTSTGGVFSFGTGASSNPSVGLNFGNLGSTSTPATTSAPSSGFGTGLFGSKPATGFTLGGTNTGIATTITTGLTLENNTSVYQQSFGLDQLQTQERQPLHLQLQQASV

SEQ ID NO: 32691 - protein, 36 aa, Homo sapiens
  REGION 1..36: note = ENSP00000418244
MSTGFSFGSGTLGSTTVAAGGTSTGGVFSFGTGASR

SEQ ID NO: 32692 - protein, 485 aa, Homo sapiens
  REGION 1..485: note = ENSP00000418555
MSTGFSFGSGTLGSTTVAAGGTSTGGVFSFGTGASSNPSVGLNFGNLGSTSTPATTSAPSSGFGTGLFGSKPATGFTLGGTNTGIATTITTGLTLGTPATTSAATTGFSLGFNKPAASATPFALPITSTSASGLTLSSALTSTPAASTGFTLNNLGGTTATTTTASTGLSLGGALAGLGGSLFQSTNTGTSGLGQNALGLTLGTTAATSTAGNEGLGGIDFSSSSDKKSDKTGTRPEDSKALKDENLPPVICQDVENLQKFVKEQKQVQEEISRMSSKAMLKVQEDIKALKQLLSLAANGIQRNTLNIDKLKIETAQELKNAEIALRTQKTPPGLQHEYAAPADYFRILVQQFEVQLQQYRQQIEELENHLATQANNSHITPQDLSMAMQKIYQTFVALAAQLQSIHENVKVLKEQYLGYRKMFLGDAVDVFETRRAEAKKWQNTPRVTTGPTPFSTMPNAAAVAMAATLTQQQQPATGLNAFKL

SEQ ID NO: 32693 - protein, 587 aa, Homo sapiens
  REGION 1..587: note = ENSP00000371137
MSTGFSFGSGTLGSTTVAAGGTSTGGVFSFGTGASSNPSVGLNFGNLGSTSTPATTSAPSSGFGTGLFGSKPATGFTLGGTNTGTPATTSAATTGFSLGFNKPAASATPFALPITSTSASGLTLSSALTSTPAASTGFTLNNLGGTTATTTTASTGLSLGGALAGLGGSLFQSTNTGTSGLGQNALGLTLGTTAATSTAGNEGLGGIDFSSSSDKKSDKTGTRPEDSKALKDENLPPVICQDVENLQKFVKEQKQVQEEISRMSSKAMLKVQEDIKALKQLLSLAANGIQRNTLNIDKLKIETAQELKNAEIALRTQKTPPGLQHEYAAPADYFRILVQQFEVQLQQYRQQIEELENHLATQANNSHITPQDLSMAMQKIYQTFVALAAQLQSIHENVKVLKEQYLGYRKMFLGDAVDVFETRRAEAKKWQNTPRVTTGPTPFSTMPNAAAVAMAATLTQQQQPATGPQPSLGVSFGTPFGSGIGTGLQSSGLGSSNLGGFGTSSGFGCSTTGASTFGFGTTNKPSGSLSAGFGSSSTSGFNFSNPGITASAGLTFGVSNPASAGFGTGGQLLQLKKPPAGNKRGKR

SEQ ID NO: 32694 - protein, 510 aa, Homo sapiens
  REGION 1..510: note = ENSP00000371166
MSTGFSFGSGTLGSTTVAAGGTSTGGVFSFGTGASSNPSVGLNFGNLGSTSTPATTSAPSSGFGTGLFGSKPATGFTLGGTNTGIATTITTGLTLGTPATTSAATTGFSLGFNKPAASATPFALPITSTSASGLTLSSALTSTPAASTGFTLNNLGGTTATTTTASTGLSLGGALAGLGGSLFQSTNTGTSGLGQNALGLTLGTTAATSTAGNEGLGGIDFSSSSDKKSDKTGTRPEDSKALKDENLPPVICQDVENLQKFVKEQKQVQEEISRMSSKAMLKVQEDIKALKQLLSLAANGIQRNTLNIDKLKIETAQELKNAEIALRTQKTPPGLQHEYAAPADYFRILVQQFEVQLQQYRQQIEELENHLATQANNSHITPQDLSMAMQKIYQTFVALAAQLQSIHENVKVLKEQYLGYRKMFLGDAVDVFETRRAEAKKWQNTPRVTTGPTPFSTMPNAAAVAMAATLTQQQQPATGDKWCNVAELKNRTQLSLFVNKLELSCYCVID

SEQ ID NO: 32695 - protein, 463 aa, Homo sapiens
  REGION 1..463: note = ENSP00000408147
LNFGNLGSTSTPATTSAPSSGFGTGLFGSKPATGFTLGGTNTGTPATTSAATTGFSLGFNKPAASATPFALPITSTSASGLTLSSALTSTPAASTGFTLNNLGGTTATTTTASTGLSLGGALAGLGGSLFQSTNTGTSGLGQNALGLTLGTTAATSTAGNEGLGGIDFSSSSDKKSDKTGTRPEDSKALKDENLPPVICQDVENLQKFVKEQKQVQEEISRMSSKAMLKVQEDIKALKQLLSLAANGIQRNTLNIDKLKIETAQELKNAEIALRTQKTPPGLQHEYAAPADYFRILVQQFEVQLQQYRQQIEELENHLATQANNSHITPQDLSMAMQKIYQTFVALAAQLQSIHENVKVLKEQYLGYRKMFLGDAVDVFETRRAEAKKWQNTPRVTTGPTPFSTMPNAAAVAMAATLTQQQQPATGDKWCNVAELKNRTQLSLFVNKLELSCYCVIDLLYNEQ

SEQ ID NO: 32696 - protein, 184 aa, Homo sapiens
  REGION 1..184: note = ENSP00000361544
MQFTSISNSLTSTAAIGLSFTTSTTTTATFTTNTTTTITSGFTVNQNQLLSRGFENLVPYTSTVSVVATPVMTYGHLEGLINEWNLELEDQEKYFLLQATQVNAWDHTLIENGEMIRILHGEVNKVKLDQKRLEQELDFILSQQQELEFLLTYLEESTRDQSGLHYLQDADEEHVEISTRSAEF

SEQ ID NO: 32697 - protein, 72 aa, Homo sapiens
  REGION 1..72: note = ENSP00000433269
MQFTSISNSLTSTAAIGLSFTTSTTTTATFTTNTTTTITSGFTVNQNQLLSRGFENLVPYTSTVRFVFYMEK

SEQ ID NO: 32698 - protein, 198 aa, Homo sapiens
  REGION 1..198: note = ENSP00000408612
  VARIANT 1: note = Any amino acid
XPVMTYGHLEGLINEWNLELEDQEKYFLLQATQVNAWDHTLIENGEMIRILHGEVNKVKLDQKRLEQELDFILSQQQELEFLLTYLEESTRDQSGLHYLQDADEEHVEIYRLAESIDAQLKQMAQDLKDVVNHLNTFESSSDTTDPLHQICRILNAHMDSLQWIDRNSGMLRRKVEVVTRVFEDYRHEEHAHNVNTAF

SEQ ID NO: 32699 - protein, 136 aa, Homo sapiens
  REGION 1..136: note = ENSP00000405906
MQFTSISNSLTSTAAIGLSFTTSTTTTATFTTNTTTTITSGFTVNQNQLLSRGFENLVPYTSTVSVVATPVMTYGHLEGLINEWNLELEDQEKYFLLQATQVNAWDHTLIENGEMIRILHGEVNKVKLDQKRLEQE

SEQ ID NO: 32700 - protein, 819 aa, Homo sapiens
  REGION 1..819: note = ENSP00000310668
MDTEGFGELLQQAEQLAAETEGISELPHVERNLQEIQQAGERLRSRTLTRTSQETADVKASVLLGSRGLDISHISQRLESLSAATTFEPLEPVKDTDIQGFLKNEKDNALLSAIEESRKRTFGMAEEYHRESMLVEWEQVKQRILHTLLASGEDALDFTQESEPSYISDVGPPGRSSLDNIEMAYARQIYIYNEKIVNGHLQPNLVDLCASVAELDDKSISDMWTMVKQMTDVLLTPATDALKNRSSVEVRMEFVRQALAYLEQSYKNYTLVTVFGNLHQAQLGGVPGTYQLVRSFLNIKLPAPLPGLQDGEVEGHPVWALIYYCMRCGDLLAASQVVNRAQHQLGEFKTWFQEYMNSKDRRLSPATENKLRLHYRRALRNNTDPYKRAVYCIIGRCDVTDNQSEVADKTEDYLWLKLNQVCFDDDGTSSPQDRLTLSQFQKQLLEDYGESHFTVNQQPFLYFQVLFLTAQFEAAVAFLFRMERLRCHAVHVALVLFELKLLLKSSGQSAQLLSHEPGDPPCLRRLNFVRLLMLYTRKFESTDPREALQYFYFLRDEKDSQGENMFLRCVSELVIESREFDMILGKLENDGSRKPGVIDKFTSDTKPIINKVASVAENKGLFEEAAKLYDLAKNADKVLELMNKLLSPVVPQISAPQSNKERLKNMALSIAERYRAQGISANKFVDSTFYLLLDLITFFDEYHSGHIDRAFDIIERLKLVPLNQESVEERVAAFRNFSDEIRHNLSEVLLATMNILFTQFKRLKGTSPSSSSRPQRVIEDRDSQLRSQARTLITFAGMIPYRTSGDTNARLVQMEVLMN

SEQ ID NO: 32701 - protein, 229 aa, Homo sapiens
  REGION 1..229: note = ENSP00000455230
MDTEGFELDDKSISDMWTMVKQMTDVLLTPATDALKNRSSVEVRMEFVRQALAYLEQSYKNYTLVTVFGNLHQAQLGGVPGTYQLVRSFLNIKLPAPLPGLQDGEVEGHPVWALIYYCMRCGDLLAASQVVNRAQHQLGEFKTWFQEYMNSKDRRLSPATENKLRLHYRRALRNNTDPYKRAVYCIIGRCDVTDNQSEVADKTEDYLWLKLNQVCFDDDGTSSPQDRLT

SEQ ID NO: 32702 - protein, 151 aa, Homo sapiens
  REGION 1..151: note = ENSP00000456264
MDTEGFGELLQQAEQLAAETEGISELPHVERNLQEIQQAGERLRSRTLTRTSQETADVKASVLLGSRGLDISHISQRLESLSAATTFEPLEPVKDTDIQGFLKNEKDNALLSAIEESRKRTFGMAEEYHRESMLVEWEQVKQRILHTLLAS

SEQ ID NO: 32703 - protein, 880 aa, Homo sapiens
  REGION 1..880: note = ENSP00000458101
MDTEGFGELLQQAEQLAAETEGISELPHVERNLQEIQQAGERLRSRTLTRTSQETADVKASVLLGSRGLDISHISQRLESLSAATTFEPLEPVKDTDIQGFLKNEKDNALLSAIEESRKRTFGMAEEYHRESMLVEWEQVKQRILHTLLASGEDALDFTQESEPSYISDVGPPGRSSLDNIEMAYARQIYIYNEKIVNGHLQPNLVDLCASVAELDDKSISDMWTMVKQMTDVLLTPATDALKNRSSVEVRMEFVRQALAYLEQSYKNYTLVTVFGNLHQAQLGGVPGTYQLVRSFLNIKLPAPLPGLQDGEVEGHPVWALIYYCMRCGDLLAASQVVNRAQHQLGEFKTWFQEYMNSKDRRLSPATENKLRLHYRRALRNNTDPYKRAVYCIIGRCDVTDNQSEVADKTEDYLWLKLNQVCFDDDGTSSPQDRLTLSQFQKQLLEDYGESHFTVNQQPFLYFQVLFLTAQFEAAVAFLFRMERLRCHAVHVALVLFELKLLLKSSGQSAQLLSHEPGDPPCLRRLNFVRLLMLYTRKFESTDPREALQYFYFLRDEKDSQGENMFLRCVSELVIESREFDMILGKLENDGSRKPGVIDKFTSDTKPIINKVASVAENKGLFEEAAKLYDLAKNADKVLELMNKLLSPVVPQISAPQSNKERLKNMALSIAERYRAQGISANKFVDSTFYLLLDLITFFDEYHSGHIDRAFDIIERLKLVPLNQESVEERVAAFRNFSDEIRHNLSEVLLATMNILFTQFKRLKGTSPSSSSRPQRVIEDRDSGLALLPRLECNDTISAHCNLYLLGSSHPPTSPSQVAGTTATPKSSPHSDYLCWNDTIPNVWGHQCEAGADGGPHELSAMLCGSLGRHTVSTSGTWAH

SEQ ID NO: 32704 - protein, 125 aa, Homo sapiens
  REGION 1..125: note = ENSP00000454587
MAEEYHRESMLVEWEQVKQRILHTLLASGEDALDFTQESEPSYISDVGPPGRSSLDNIEMAYARQIYIYNEKIVNGHLQPNLVDLCASVAELDDKSISDMWTMVKQMTDVLLTPATDALKNRSSV

SEQ ID NO: 32705 - protein, 136 aa, Homo sapiens
  REGION 1..136: note = ENSP00000457902
MDTEGFGELLQQAEQLAAETEGISELPHVERNLQEIQQAGERLRSRTLTRTSQETADVKASVLLGSRGLDISHISQRLESLSAATTFEPLEPVKDTDIQGFLKNEKDNALLSAIEESRKRTFGMAEEYHRESMLVE

SEQ ID NO: 32706 - protein, 178 aa, Homo sapiens
  REGION 1..178: note = ENSP00000454285
MDTEGFGELLQQAEQLAAETEGISELPHVERNLQEIQQAGERLRSRTLTRTSQETADVKASVLLGSRGLDISHISQRLESLSAATTFEPLEPVKDTDIQGFLKNEKDNALLSAIEESRKRTFGMAEEYHRESMLVEWEQVKQRILHTLLASGEDALDFTQESEPSYISDVGPPGRSSL

SEQ ID NO: 32707 - protein, 132 aa, Homo sapiens
  REGION 1..132: note = ENSP00000454935
  VARIANT 1: note = Any amino acid
XEIQQAGERLRSRTLTRTSQETADVKASVLLGSRGLDISHISQRLESLSAATTFEPLEPVKDTDIQGFLKNEKDNALLSAIEESRKRTFGMAEEYHRESMLVEWEQVKQRILHTLLASGEDALDFTQESEVA

SEQ ID NO: 32708 - protein, 696 aa, Homo sapiens
  REGION 1..696: note = ENSP00000458039
MAEEYHRESMLVEWEQVKQRILHTLLASGEDALDFTQESEPSYISDVGPPGRSSLDNIEMAYARQIYIYNEKIVNGHLQPNLVDLCASVAELDDKSISDMWTMVKQMTDVLLTPATDALKNRSSVEVRMEFVRQALAYLEQSYKNYTLVTVFGNLHQAQLGGVPGTYQLVRSFLNIKLPAPLPGLQDGEVEGHPVWALIYYCMRCGDLLAASQVVNRAQHQLGEFKTWFQEYMNSKDRRLSPATENKLRLHYRRALRNNTDPYKRAVYCIIGRCDVTDNQSEVADKTEDYLWLKLNQVCFDDDGTSSPQDRLTLSQFQKQLLEDYGESHFTVNQQPFLYFQVLFLTAQFEAAVAFLFRMERLRCHAVHVALVLFELKLLLKSSGQSAQLLSHEPGDPPCLRRLNFVRLLMLYTRKFESTDPREALQYFYFLRDEKDSQGENMFLRCVSELVIESREFDMILGKLENDGSRKPGVIDKFTSDTKPIINKVASVAENKGLFEEAAKLYDLAKNADKVLELMNKLLSPVVPQISAPQSNKERLKNMALSIAERYRAQGISANKFVDSTFYLLLDLITFFDEYHSGHIDRAFDIIERLKLVPLNQESVEERVAAFRNFSDEIRHNLSEVLLATMNILFTQFKRLKGTSPSSSSRPQRVIEDRDSQLRSQARTLITFAGMIPYRTSGDTNARLVQMEVLMN

SEQ ID NO: 32709 - protein, 156 aa, Homo sapiens
  REGION 1..156: note = ENSP00000455210
MAEEYHRESMLVEWEQVKQRILHTLLASGEDALDFTQESEPSYISDVGPPGRSSLDNIEMAYARQIYIYNEKIVNGHLQPNLVDLCASVAELDDKSISDMWTMVKQMTDVLLTPATDALKNRSSVEVRMEFVRQALAYLEQSYKNYTLVTVFGNLH

SEQ ID NO: 32710 - protein, 40 aa, Homo sapiens
  REGION 1..40: note = ENSP00000454844
MAEEYHRESMLVEWEQVKQRILHTLLASGEDALDFTQESE

SEQ ID NO: 32711 - protein, 16 aa, Homo sapiens
  REGION 1..16: note = ENSP00000455181
MAEEYHRESMLVEWEQ

SEQ ID NO: 32712 - protein, 696 aa, Homo sapiens; identical to SEQ ID NO: 32708
  REGION 1..696: note = ENSP00000440235

SEQ ID NO: 32713 - protein, 117 aa, Homo sapiens
  REGION 1..117: note = ENSP00000458078
SDTKPIINKVASVAENKGLFEEAAKLYDLAKNADKVLELMNKLLSPVVPQISAPQSNKERLKNMALSIAERYRAQGISANKFVDSTFYLLLDLITFFDEYHSGHIDRAFDVSFRKGV

SEQ ID NO: 32714 - protein, 140 aa, Homo sapiens
  REGION 1..140: note = ENSP00000456196
  VARIANT 1: note = Any amino acid
XELMNKLLSPVVPQISAPQSNKERLKNMALSIAERYRAQGISANKFVDSTFYLLLDLITFFDEYHSGHIDRAFDIIERLKLVPLNQESVEERVAAFRNFSDEVSSFFLSCGIPFSPLPPKAFSFPVPNSFKNSSYSNYPD

SEQ ID NO: 32715 - protein, 84 aa, Homo sapiens
  REGION 1..84: note = ENSP00000457907
LDLITFFDEYHSGHIDRAFDIIERLKLVPLNQESVEERVAAFRNFSDEQLRSQARTLITFAGMIPYRTSGDTNARLVQMEVLMN

SEQ ID NO: 32716 - protein, 179 aa, Homo sapiens
  REGION 1..179: note = ENSP00000428224
MQRGKPCRALPTLKCQTFCQRHGLMFEVVDLRWGIRNIEATDHLTTELCLEEVDRCWKTSIGPAFVALIGDQYGPCLIPSRIDEKEWEVLRDHLTARPSDLELVARYFQRDENAFPPTYVLQAPGTGEACEPEEATLTSVLRSGAQEARRLGLITQEQWQHYHRSGEAAGTPLWRPTRN

SEQ ID NO: 32717 - protein, 1432 aa, Homo sapiens
  REGION 1..1432: note = ENSP00000428579
MQRGKPCRALPTLKCQTFCQRHGLMFEVVDLRWGIRNIEATDHLTTELCLEEVDRCWKTSIGPAFVALIGDQYGPCLIPSRIDEKEWEVLRDHLTARPSDLELVARYFQRDENAFPPTYVLQAPGTGEACEPEEATLTSVLRSGAQEARRLGLITQEQWQHYHRSVIEWEIERSLLSSEDREQGATVFLREIQDLHKHILEDCALRMVDRLADGCLDADAQNLLSSLKSHITDMHPGVLKTHRLPWSRDLVNPKNKTHACYLKELGEQFVVRANHQVLTRLRELDTAGQELAWLYQEIRHHLWQSSEVIQTFCGRQELLARLGQQLRHDDSKQHTPLVLFGPPGIGKTALMCKLAEQMPRLLGHKTVTVLRLLGTSQMSSDARGLLKSICFQVCLAYGLPLPPAQVLDAHTRVVQFFHTLLHTVSCRNFESLVLLLDAMDDLDSVRHARRVPWLPLNCPPRVHLILSACSGALGVLDTLQRVLLDPEAYWEVKPLSGNQGQQMIQLLLAAARRTLSPVHTDLLWASLPECGNPGRLRLAFEEARKWASFTVPVPLATTAEEATHQLCTRLEQTHGQLLVAHVLGYIVSSRHGLSEAELKDVLSLDDEVLQDVYRDWTPPSKELLRFPPLLWVRLRRDLGYYLARRPVDGFTLLAIAHRQLVEVVRERYLSGSERAKRHGVLADFFSGTWSQGTKKLITLPLVGKPLNLDRKVAPQPLWFSHTVANLRKLKELPYHLLHSGRLEELKQEVLGSMSWISCRGISGGIEDLLDDFDLCAPHLDSPEVGLVREALQLCRPAVELRGMERSLLYTELLARLHFFATSHPALVGQLCQQAQSWFQLCAHPVLVPLGGFLQPPGGPLRATLSGCHKGITAMAWGVEEKLLVIGTQDGIMAVWDMEEQHVIHMLTGHTGEVRCVKIFAKGTLANSASKDYTLHLWNLLSGQEKFTIWDGGSKNPAEPQIWNLHVDEAHKVVYSASGSKINAWNLETAEPVFHILGDASDPWMCMAVLASQATLLTVSRDGVVSLWSSATGKLQGKQHMSSIKEETPTCAVSVQKQGKLVTGFSNGSISLVSSKGDRLLEKLPDAVRFLVVSEDESLLAAGFGRSVRIFLADSRGFRRFMAMDLEHEDMVETAVFGTENNLIITGSLDALIQVWSLSEQGTLLDILEGVGAPVSLLARGGALVASASPQSSSFKVWDLSDAHRSRVPAPFLDRTGLTAVSHNGSYVYFPKIGDKNKVTIWDLAEGEEQDSLDTSSEIRCLEVAEQRKLLFTGLVSGVVLVFPLNSRQDVICIPPPEARKAINCMSLSKCEDRLAIAYDNIVLVLDITSGDPCPVIDGPRYTFYTQLPETLSSVAILTDYRVVYSMTNGDLFLYECATSKAFPLETHRSRVACVEVSHKEQLVVSGSEDALLCLWDLQARKWKFEMSYTAPC

SEQ ID NO: 32718 - protein, 1522 aa, Homo sapiens
  REGION 1..1522: note = ENSP00000447548
MQRGKPCRALPTLKCQTFCQRHGLMFEVVDLRWGIRNIEATDHLTTELCLEEVDRCWKTSIGPAFVALIGDQYGPCLIPSRIDEKEWEVLRDHLTARPSDLELVARYFQRDENAFPPTYVLQAPGTGEACEPEEATLTSVLRSGAQEARRLGLITQEQWQHYHRSVIEWEIERSLLSSEDREQGATVFLREIQDLHKHILEDCALRMVDRLADGCLDADAQNLLSSLKSHITDMHPGVLKTHRLPWSRDLVNPKNKTHACYLKELGEQFVVRANHQVLTRLRELDTAGQELAWLYQEIRHHLWQSSEVIQTFCGRQELLARLGQQLRHDDSKQHTPLVLFGPPGIGKTALMCKLAEQMPRLLGHKTVTVLRLLGTSQMSSDARGLLKSICFQVCLAYGLPLPPAQVLDAHTRVVQFFHTLLHTVSCRNFESLVLLLDAMDDLDSVRHARRVPWLPLNCPPRVHLILSACSGALGVLDTLQRVLLDPEAYWEVKPLSGNQGQQMIQLLLAAARRTLSPVHTDLLWASLPECGNPGRLRLAFEEARKWASFTVPVPLATTAEEATHQLCTRLEQTHGQLLVAHVLGYIVSSRHGLSEAELKDVLSLDDEVLQDVYRDWTPPSKELLRFPPLLWVRLRRDLGYYLARRPVDGFTLLAIAHRQLVEVVRERYLSGSERAKRHGVLADFFSGTWSQGTKKLITLPLVGKPLNLDRKVAPQPLWFSHTVANLRKLKELPYHLLHSGRLEELKQEVLGSMSWISCRGISGGIEDLLDDFDLCAPHLDSPEVGLVREALQLCRPAVELRGMERSLLYTELLARLHFFATSHPALVGQLCQQAQSWFQLCAHPVLVPLGGFLQPPGGPLRATLSGCHKGITAMAWGVEEKLLVIGTQDGIMAVWDMEEQHVIHMLTGHTGEVRCVKIFAKGTLANSASKDYTLHLWNLLSGQEKFTIWDGGSKNPAEPQIWNLHVDEAHKVVYSASGSKINAWNLETAEPVFHILGDASDPWMCMAVLASQATLLTVSRDGVVSLWSSATGKLQGKQHMSSIKEETPTCAVSVQKQGKLVTGFSNGSISLVSSKGDRLLEKLPDAVRFLVVSEDESLLAAGFGRSVRIFLADSRGFRRFMAMDLEHEDMVETAVFGTENNLIITGSLDALIQVWDLSDAHRSRVPAPFLDRTGLTAVSHNGSYVYFPKIGDKNKVTIWDLAEGEEQDSLDTSSEIRCLEVAEQRKLLFTGLVSGVVLVFPLNSRQDVICIPPPEARKAINCMSLSKCEDRLAIAYDNIVLVLDITSGDPCPVIDGPRYTFYTQLPETLSSVAILTDYRVVYSMTNGDLFLYECATSKAFPLETHRSRVACVEVSHKEQLVVSGSEDALLCLWDLQARKWKFEMSYTSSYCRGVQCACFSKDDKYVYVGLKDRSILVWSVLDGTLLTVQFVHAVVNRIIPTTSGFIAPTRHGYLIRENFQCLSAKASPQDPLKNFKKAMWMVKSRQREELVAAAGAPQDLESESAQGNETKSNKCSQVCLIV

SEQ ID NO: 32719 - protein, 76 aa, Homo sapiens
  REGION 1..76: note = ENSP00000400248
MQRGKPCRALPTLKCQTFCQRHGLMFEVVDLRWGIRNIEATDHLTTELCLEEVDRCWKTSIGPAFVEKCADPCPGQ

SEQ ID NO: 32720 - protein, 1564 aa, Homo sapiens
  REGION 1..1564: note = ENSP00000447224
MQRGKPCRALPTLKCQTFCQRHGLMFEVVDLRWGIRNIEATDHLTTELCLEEVDRCWKTSIGPAFVALIGDQYGPCLIPSRIDEKEWEVLRDHLTARPSDLELVARYFQRDENAFPPTYVLQAPGTGEACEPEEATLTSVLRSGAQEARRLGLITQEQWQHYHRSVIEWEIERSLLSSEDREQGATVFLREIQDLHKHILEDCALRMVDRLADGCLDADAQNLLSSLKSHITDMHPGVLKTHRLPWSRDLVNPKNKTHACYLKELGEQFVVRANHQVLTRLRELDTAGQELAWLYQEIRHHLWQSSEVIQTFCGRQELLARLGQQLRHDDSKQHTPLVLFGPPGIGKTALMCKLAEQMPRLLGHKTVTVLRLLGTSQMSSDARGLLKSICFQVCLAYGLPLPPAQVLDAHTRVVQFFHTLLHTVSCRNFESLVLLLDAMDDLDSVRHARRVPWLPLNCPPRVHLILSACSGALGVLDTLQRVLLDPEAYWEVKPLSGNQGQQMIQLLLAAARRTLSPVHTDLLWASLPECGNPGRLRLAFEEARKWASFTVPVPLATTAEEATHQLCTRLEQTHGQLLVAHVLGYIVSSRHGLSEAELKDVLSLDDEVLQDVYRDWTPPSKELLRFPPLLWVRLRRDLGYYLARRPVDGFTLLAIAHRQLVEVVRERYLSGSERAKRHGVLADFFSGTWSQGTKKLITLPLVGKPLNLDRKVAPQPLWFSHTVANLRKLKELPYHLLHSGRLEELKQEVLGSMSWISCRGISGGIEDLLDDFDLCAPHLDSPEVGLVREALQLCRPAVELRGMERSLLYTELLARLHFFATSHPALVGQLCQQAQSWFQLCAHPVLVPLGGFLQPPGGPLRATLSGCHKGITAMAWGVEEKLLVIGTQDGIMAVWDMEEQHVIHMLTGHTGEVRCVKIFAKGTLANSASKDYTLHLWNLLSGQEKFTIWDGGSKNPAEPQIWNLHVDEAHKVVYSASGSKINAWNLETAEPVFHILGDASDPWMCMAVLASQATLLTVSRDGVVSLWSSATGKLQGKQHMSSIKEETPTCAVSVQKQGKLVTGFSNGSISLVSSKGDRLLEKLPDAVRFLVVSEDESLLAAGFGRSVRIFLADSRGFRRFMAMDLEHEDMVETAVFGTENNLIITGSLDALIQVWSLSEQGTLLDILEGVGAPVSLLARGGALVASASPQSSSFKVWDLSDAHRSRVPAPFLDRTGLTAVSHNGSYVYFPKIGDKNKVTIWDLAEGEEQDSLDTSSEIRCLEVAEQRKLLFTGLVSGVVLVFPLNSRQDVICIPPPEARKAINCMSLSKCEDRLAIAYDNIVLVLDITSGDPCPVIDGPRYTFYTQLPETLSSVAILTDYRVVYSMTNGDLFLYECATSKAFPLETHRSRVACVEVSHKEQLVVSGSEDALLCLWDLQARKWKFEMSYTSSYCRGVQCACFSKDDKYVYVGLKDRSILVWSVLDGTLLTVQFVHAVVNRIIPTTSGFIAPTRHGYLIRENFQCLSAKASPQDPLKNFKKAMWMVKSRQREELVAAAGAPQDLESESAQGNETKSNKCSQVCLIV

SEQ ID NO: 32721 - protein, 1432 aa, Homo sapiens; identical to SEQ ID NO: 32717
  REGION 1..1432: note = ENSP00000369136

SEQ ID NO: 32722 - protein, 120 aa, Homo sapiens
  REGION 1..120: note = ENSP00000486232
MSGFLEELLGEKLVTGGGEEVDVHSLGARGISLLGLYFGCSLSAPCAQLSASLAAFYGRLRGDAAAGPGPGAGAGAAAEPEPRRRLEIVFVSSDQDQRQWQDFVRDMPWLALPYKEKHRK

SEQ ID NO: 32723 - protein, 327 aa, Homo sapiens
  REGION 1..327: note = ENSP00000461038
MADVSLHRNPATLKLWNKYRISNIPSLIFLDATTGKVVCRNGLLVIRDDPEGLEFPWGPKPFREVIAGPLLRNNGQSLESSSLEGSHVGVYFSAHWCPPCRSLTRVLVESYRKIKEAGQNFEIIFVSADRSEESFKQYFSEMPWLAVPYTDEARRSRLNRLYGIQGIPTLIMLDPQGEVITRQGRVEVLNDEDCREFPWHPKPVLELSDSNAAQLNEGPCLVLFVDSEDDGESEAAKQLIQPIAEKIIAKYKAKEEEAPLLFFVAGEDDMTDSLRDYTNLPEAAPLLTILDMSARAKYVMDVEEITPAIVEAFVNDFLAEKLKPEPI

SEQ ID NO: 32724 - protein, 435 aa, Homo sapiens
  REGION 1..435: note = ENSP00000337443
MSGFLEELLGEKLVTGGGEEVDVHSLGARGISLLGLYFGCSLSAPCAQLSASLAAFYGRLRGDAAAGPGPGAGAGAAAEPEPRRRLEIVFVSSDQDQRQWQDFVRDMPWLALPYKEKHRKLKLWNKYRISNIPSLIFLDATTGKVVCRNGLLVIRDDPEGLEFPWGPKPFREVIAGPLLRNNGQSLESSSLEGSHVGVYFSAHWCPPCRSLTRVLVESYRKIKEAGQNFEIIFVSADRSEESFKQYFSEMPWLAVPYTDEARRSRLNRLYGIQGIPTLIMLDPQGEVITRQGRVEVLNDEDCREFPWHPKPVLELSDSNAAQLNEGPCLVLFVDSEDDGESEAAKQLIQPIAEKIIAKYKAKEEEAPLLFFVAGEDDMTDSLRDYTNLPEAAPLLTILDMSARAKYVMDVEEITPAIVEAFVNDFLAEKLKPEPI

SEQ ID NO: 32725 - protein, 230 aa, Homo sapiens
  REGION 1..230: note = ENSP00000461562
  VARIANT 1: note = Any amino acid
XCRNGLLVIRDDPEGLEFPWGPKPFREVIAGPLLRNNGQSLESSSLEGSHVGVYFSAHWCPPCRSLTRVLVESYRKIKEAGQNFEIIFVSADRSEESFKQYFSEMPWLAVPYTDEARRSRLNRLYGIQDSEDDGESEAAKQLIQPIAEKIIAKYKAKEEEAPLLFFVAGEDDMTDSLRDYTNLPEAAPLLTILDMSARAKYVMDVEEITPAIVEAFVNDFLAEKLKPEPI

SEQ ID NO: 32726 - protein, 186 aa, Homo sapiens
  REGION 1..186: note = ENSP00000446446
MPWLAVPYTDEARRSRLNRLYGIQGIPTLIMLDPQGEVITRQGRVEVLNDEDCREFPWHPKPVLELSDSNAAQLNEGPCLVLFVDSEDDGESEAAKQLIQPIAEKIIAKYKAKEEEAPLLFFVAGEDDMTDSLRDYTNLPEAAPLLTILDMSARAKYVMDVEEITPAIVEAFVNDFLAEKLKPEPI

SEQ ID NO: 32727 - protein, 120 aa, Homo sapiens; identical to SEQ ID NO: 32722
  REGION 1..120: note = ENSP00000485936

SEQ ID NO: 32728 - protein, 135 aa, Homo sapiens
  REGION 1..135: note = ENSP00000365015
MVDILGERHLVTCKGATVEAEAALQNKVVALYFAAARCAPSRDFTPLLCDFYTALVAEARRPAPFEVVFVSADGSSQEMLDFMRELHGAWLALPFHDPYRQRSLALLPRLECSGVILAHCNLCLLGSSDSLALAS

SEQ ID NO: 32729 - protein, 156 aa, Homo sapiens
  REGION 1..156: note = ENSP00000365014
MVDILGERHLVTCKGATVEAEAALQNKVVALYFAAARCAPSRDFTPLLCDFYTALVAEARRPAPFEVVFVSADGSSQEMLDFMRELHGAWLALPFHDPYRHELRKRYNVTAIPKLVIVKQNGEVITNKGRKQIRERGLACFQDWVEAADIFQNFSV

SEQ ID NO: 32730 - protein, 135 aa, Homo sapiens [sequence omitted]

SEQ ID NO: 32731 - skipped

SEQ ID NO: 32732 - protein, 559 aa, Homo sapiens
  REGION 1..559: note = ENSP00000273347
MWTNFFKLRLFCCLLAVLMVVVLVINVTQVEYLDHETVSATFIDSSGQFVSSQVTGISRNPYCGYDQQTLSSQERMEEDSLLAALHRQVPDVGPVPFVKSTDPSSSYFVILNSAAFFKVGSQLEVLVHVQDFQRKPKKYGGDYLQARIHSLKLQAGAVGRVVDYQNGFYKVFFTLLWPGKVKVSVSLVHPSEGIRVLQRLQEDKPDRVYFKSLFRSGRISETTECNVCLPGNLPLCNFTDLYTGEPWFCFKPKKLPCSSRITHFKGGYLKGLLTAAESAFFQSGVNIKMPVNSSGPDWVTVIPRRIKETNSLELSQGSGTFPSGYYYKDQWRPRKFKMRQFNDPDNITECLQRKVVHLFGDSTIRQWFEYLTTFVPDLVEFNLGSPKNVGPFLAVDQKHNILLKYRCHGPPIRFTTVFSNELHYVANELNGIVGGKNTVVAIAVWSHFSTFPLEVYIRRLRNIRRAVVRLLDRSPKTVVVIRTANAQELGPEVSLFNSDWYNFQLDTILRRMFSGVGVYLVDAWEMTLAHYLPHKLHPDEVIVKNQLDMFLSFVCPLET

SEQ ID NO: 32733 - protein, 53 aa, Homo sapiens
  REGION 1..53: note = ENSP00000419667
MWTNFFKLRLFCCLLAVLMVVVLVINVTQVEYLDHETVSATFIDSSGQFVSSQ

SEQ ID NO: 32734 - protein, 559 aa, Homo sapiens; identical to SEQ ID NO: 32732
  REGION 1..559: note = ENSP00000417485

SEQ ID NO: 32735 - protein, 559 aa, Homo sapiens; identical to SEQ ID NO: 32732
  REGION 1..559: note = ENSP00000418369

SEQ ID NO: 32736 - protein, 89 aa, Homo sapiens
  REGION 1..89: note = ENSP00000478069
MPVNSSGPDWVTVIPRRIKETNSLELSQGSGTFPSGYYYKDQWRPRKFKMRQFNDPTTLQSAYKEKWCIYLVTQQSGNGLNTLLHLFQI

SEQ ID NO: 32737 - protein, 653 aa, Homo sapiens
  REGION 1..653: note = ENSP00000490942
MISSKMMSSNPEEDPLDTFLQYIEDMGMKAYDGLVIQNASDIARENDRLRNETNLAYLKEKNEKRRRQEEAIKRIGGEVGRGHEGSYVGKHFRMGFMTMPAPQDRLPHPCSSGFSVRSQSLHSVGGTDDDSSCGSRRQPPPKPKRDPSTKLSTSSETVSSTAASKSGKTPERTEASAKPRPHSDEYSKKIPPPKPKRNPNTQLSTSFDETYIKKHGPRRTSLPRDSSLSQMGSPAGDPEEEEPVYIEMVGNILRDFRKEDDDQSEAVYEEMKYPIFDDLGQDAKCDFDHHSCSSQCATPTVPDLDFAKASVPCPPKGLLCDIPPPFPNLLSHRPPLLVFPPAPVHCSPNSDESPLTPLEVTKLPVLENVSYMKQPAGASPSTLPSHVPGHAKLEKEQAAALGPASATPALSSSPPPPSTLYRTQSPHGYPKSHSTSPSPVSMGRSLTPLSLKRPPPYDAVHSGSLSRSSPSVPHSTPRPVSQDGAKMVNAAVNTYGAAPGGSRSRTPTSPLEELTSLFSSGRSLLRKSSSGRRSKEPAEKSTEELKVRSHSTEPLPKLDNKERGHHGASSSREPVKAQEWDGTPGTPVVTSRLGRCSVSPTLLAGNHSSEPKVSCKLGRSASTSGVPPPSVTPLRQSSDLQQSQVPSSLANRD

SEQ ID NO: 32738 - protein, 653 aa, Homo sapiens; identical to SEQ ID NO: 32737
  REGION 1..653: note = ENSP00000272907

SEQ ID NO: 32739 - protein, 481 aa, Homo sapiens
  REGION 1..481: note = ENSP00000340328
MKGRGMLVLLLHAVVLGLPSAWAVGACARACPAACACSTVERGCSVRCDRAGLLRVPAELPCEAVSIDLDRNGLRFLGERAFGTLPSLRRLSLRHNNLSFITPGAFKGLPRLAELRLAHNGDLRYLHARTFAALSRLRRLDLAACRLFSVPERLLAELPALRELAAFDNLFRRVPGALRGLANLTHAHLERGRIEAVASSSLQGLRRLRSLSLQANRVRAVHAGAFGDCGVLEHLLLNDNLLAELPADAFRGLRRLRTLNLGGNALDRVARAWFADLAELELLYLDRNSIAFVEEGAFQNLSGLLALHLNGNRLTVLAWVAFQPGFFLGRLFLFRNPWCCDCRLEWLRDWMEGSGRVTDVPCASPGSVAGLDLSQVTFGRSSDGLCVDPEELNLTTSSPGPSPEPAATTVSRFSSLLSKLLAPRVPVEEAANTTGGLANASLSDSLSSRGVGGAGRQPWFLLASCLLPSVAQHVVFGLQMD

SEQ ID NO: 32740 - protein, 481 aa, Homo sapiens; identical to SEQ ID NO: 32739
  REGION 1..481: note = ENSP00000367465

SEQ ID NO: 32741 - protein, 439 aa, Homo sapiens
  REGION 1..439: note = ENSP00000357838
MFSKLAHLQRFAVLSRGVHSSVASATSVATKKTVQGPPTSDDIFEREYKYGAHNYHPLPVALERGKGIYLWDVEGRKYFDFLSSYSAVNQGHCHPKIVNALKSQVDKLTLTSRAFYNNVLGEYEEYITKLFNYHKVLPMNTGVEAGETACKLARKWGYTVKGIQKYKAKIVFAAGNFWGRTLSAISSSTDPTSYDGFGPFMPGFDIIPYNDLPALERALQDPNVAAFMVEPIQGEAGVVVPDPGYLMGVRELCTRHQVLFIADEIQTGLARTGRWLAVDYENVRPDIVLLGKALSGGLYPVSAVLCDDDIMLTIKPGEHGSTYGGNPLGCRVAIAALEVLEEENLAENADKLGIILRNELMKLPSDVVTAVRGKGLLNAIVIKETKDWDAWKVCLRLRDNGLLAKPTHGDIIRFAPPLVIKEDELRESIEIINKTILSF

SEQ ID NO: 32742 - protein, 301 aa, Homo sapiens
  REGION 1..301: note = ENSP00000439042
MNTGVEAGETACKLARKWGYTVKGIQKYKAKIVFAAGNFWGRTLSAISSSTDPTSYDGFGPFMPGFDIIPYNDLPALERALQDPNVAAFMVEPIQGEAGVVVPDPGYLMGVRELCTRHQVLFIADEIQTGLARTGRWLAVDYENVRPDIVLLGKALSGGLYPVSAVLCDDDIMLTIKPGEHGSTYGGNPLGCRVAIAALEVLEEENLAENADKLGIILRNELMKLPSDVVTAVRGKGLLNAIVIKETKDWDAWKVCLRLRDNGLLAKPTHGDIIRFAPPLVIKEDELRESIEIINKTILSF

SEQ ID NO: 32743 - protein, 1010 aa, Homo sapiens
  REGION 1..1010: note = ENSP00000363216
MSQLRLLPSRLGVQAARLLAAHDVPVFGWRSRSSGPPATFPSSKGGGGSSYMEEMYFAWLENPQSVHKSWDSFFREASEEAFSGSAQPRPPSVVHESRSAVSSRTKTSKLVEDHLAVQSLIRAYQIRGHHVAQLDPLGILDADLDSFVPSDLITTIDKLAFYDLQEADLDKEFQLPTTTFIGGSENTLSLREIIRRLENTYCQHIGLEFMFINDVEQCQWIRQKFETPGVMQFSSEEKRTLLARLVRSMRFEDFLARKWSSEKRFGLEGCEVMIPALKTIIDKSSEMGIENVILGMPHRGRLNVLANVIRKDLEQIFCQFDPKLEAADEGSGDVKYHLGMYHERINRVTNRNITLSLVANPSHLEAVDPVVQGKTKAEQFYRGDAQGKKVMSILVHGDAAFAGQGVVYETFHLSDLPSYTTNGTVHVVVNNQIGFTTDPRMARSSPYPTDVARVVNAPIFHVNADDPEAVIYVCSVAAEWRNTFNKDVVVDLVCYRRRGHNEMDEPMFTQPLMYKQIHRQVPVLKKYADKLIAEGTVTLQEFEEEIAKYDRICEEAYGRSKDKKILHIKHWLDSPWPGFFNVDGEPKSMTCPATGIPEDMLTHIGSVASSVPLEDFKIHTGLSRILRGRADMTKNRTVDWALAEYMAFGSLLKEGIHVRLSGQDVERGTFSHRHHVLHDQEVDRRTCVPMNHLWPDQAPYTVCNSSLSEYGVLGFELGYAMASPNALVLWEAQFGDFHNTAQCIIDQFISTGQAKWVRHNGIVLLLPHGMEGMGPEHSSARPERFLQMSNDDSDAYPAFTKDFEVSQLYDCNWIVVNCSTPANYFHVLRRQILLPFRKPLIIFTPKSLLRHPEAKSSFDQMVSGTSFQRVIPEDGAAARAPEQVQRLIFCTGKVYYDLVKERSSQDLEEKVAITRLEQISPFPFDLIKQEAEKYPGAELAWCQEEHKNMGYYDYISPRFMTILRRARPIWYVGRDPAAAPATGNRNTHLVSLKKFLDTAFNLQAFEGKTF

SEQ ID NO: 32744 - protein, 953 aa, Homo sapiens
  REGION 1..953: note = ENSP00000401356
MSQLRLLPSRLGVQAARLLAAHDVPVFGWRSRSSGPPATFPSSKGGGGSSYMEEMYFAWLENPQSVHKIRGHHVAQLDPLGILDADLDSFVPSDLITTIDKLAFYDLQEADLDKEFQLPTTTFIGGSENTLSLREIIRRLENTYCQHIGLEFMFINDVEQCQWIRQKFETPGVMQFSSEEKRTLLARLVRSMRFEDFLARKWSSEKRFGLEGCEVMIPALKTIIDKSSEMGIENVILGMPHRGRLNVLANVIRKDLEQIFCQFDPKLEAADEGSGDVKYHLGMYHERINRVTNRNITLSLVANPSHLEAVDPVVQGKTKAEQFYRGDAQGKKVMSILVHGDAAFAGQGVVYETFHLSDLPSYTTNGTVHVVVNNQIGFTTDPRMARSSPYPTDVARVVNAPIFHVNADDPEAVIYVCSVAAEWRNTFNKDVVVDLVCYRRRGHNEMDEPMFTQPLMYKQIHRQVPVLKKYADKLIAEGTVTLQEFEEEIAKYDRICEEAYGRSKDKKILHIKHWLDSPWPGFFNVDGEPKSMTCPATGIPEDMLTHIGSVASSVPLEDFKIHTGLSRILRGRADMTKNRTVDWALAEYMAFGSLLKEGIHVRLSGQDVERGTFSHRHHVLHDQEVDRRTCVPMNHLWPDQAPYTVCNSSLSEYGVLGFELGYAMASPNALVLWEAQFGDFHNTAQCIIDQFISTGQAKWVRHNGIVLLLPHGMEGMGPEHSSARPERFLQMSNDDSDAYPAFTKDFEVSQLYDCNWIVVNCSTPANYFHVLRRQILLPFRKPLIIFTPKSLLRHPEAKSSFDQMVSGTSFQRVIPEDGAAARAPEQVQRLIFCTGKVYYDLVKERSSQDLEEKVAITRLEQISPFPFDLIKQEAEKYPGAELAWCQEEHKNMGYYDYISPRFMTILRRARPIWYVGRDPAAAPATGNRNTHLVSLKKFLDTAFNLQAFEGKTF

SEQ ID NO: 32745 - protein, 801 aa, Homo sapiens
  REGION 1..801: note = ENSP00000390240
MFINDVEQCQWIRQKFETPGVMQFSSEEKRTLLARLVRSMRFEDFLARKWSSEKRFGLEGCEVMIPALKTIIDKSSEMGIENVILGMPHRGRLNVLANVIRKDLEQIFCQFDPKLEAADEGSGDVKYHLGMYHERINRVTNRNITLSLVANPSHLEAVDPVVQGKTKAEQFYRGDAQGKKVMSILVHGDAAFAGQGVVYETFHLSDLPSYTTNGTVHVVVNNQIGFTTDPRMARSSPYPTDVARVVNAPIFHVNADDPEAVIYVCSVAAEWRNTFNKDVVVDLVCYRRRGHNEMDEPMFTQPLMYKQIHRQVPVLKKYADKLIAEGTVTLQEFEEEIAKYDRICEEAYGRSKDKKILHIKHWLDSPWPGFFNVDGEPKSMTCPATGIPEDMLTHIGSVASSVPLEDFKIHTGLSRILRGRADMTKNRTVDWALAEYMAFGSLLKEGIHVRLSGQDVERGTFSHRHHVLHDQEVDRRTCVPMNHLWPDQAPYTVCNSSLSEYGVLGFELGYAMASPNALVLWEAQFGDFHNTAQCIIDQFISTGQAKWVRHNGIVLLLPHGMEGMGPEHSSARPERFLQMSNDDSDAYPAFTKDFEVSQLYDCNWIVVNCSTPANYFHVLRRQILLPFRKPLIIFTPKSLLRHPEAKSSFDQMVSGTSFQRVIPEDGAAARAPEQVQRLIFCTGKVYYDLVKERSSQDLEEKVAITRLEQISPFPFDLIKQEAEKYPGAELAWCQEEHKNMGYYDYISPRFMTILRRARPIWYVGRDPAAAPATGNRNTHLVSLKKFLDTAFNLQAFEGKTF

SEQ ID NO: 32746 - protein, 167 aa, Homo sapiens
  REGION 1..167: note = ENSP00000360864
MPGRWRWQRDMHPARKLLSLLFLILMGTELTQNKRENKAEKMGGPESERKTTGEKTLNELPLFCLEAHAGSLALPRMCSPNPNPAVGLCRPAYPQSPSPGAAQTISQSLLERFCMASRRGFLGPRKAWWRVVVVHCCWTDAFIHVHTHTHTCTHRGADTCREEPTRS

SEQ ID NO: 32747 - protein, 135 aa, Homo sapiens
  REGION 1..135: note = ENSP00000277415
MPGRWRWQRDMHPARKLLSLLFLILMGTELTQVLPTNPEESWQVYSSAQDSEGRCICTVVAPQQTMCSRDARTKQLRQLLEKVQNMSQSIEVLDRRTQRDLQYVEKMENQMKGLESKFKQVEESHKQHLARQFKG

SEQ ID NO: 32748 - protein, 467 aa, Homo sapiens
  REGION 1..467: note = ENSP00000252854
MPGRWRWQRDMHPARKLLSLLFLILMGTELTQVLPTNPEESWQVYSSAQDSEGRCICTVVAPQQTMCSRDARTKQLRQLLEKVQNMSQSIEVLDRRTQRDLQYVEKMENQMKGLESKFKQVEESHKQHLARQFKAIKAKMDELRPLIPVLEEYKADAKLVLQFKEEVQNLTSVLNELQEEIGAYDYDELQSRVSNLEERLRACMQKLACGKLTGISDPVTVKTSGSRFGSWMTDPLAPEGDNRVWYMDGYHNNRFVREYKSMVDFMNTDNFTSHRLPHPWSGTGQVVYNGSIYFNKFQSHIIIRFDLKTETILKTRSLDYAGYNNMYHYAWGGHSDIDLMVDESGLWAVYATNQNAGNIVVSRLDPVSLQTLQTWNTSYPKRSAGEAFIICGTLYVTNGYSGGTKVHYAYQTNASTYEYIDIPFQNKYSHISMLDYNPKDRALYAWNNGHQILYNVTLFHVIRSDEL

SEQ ID NO: 32749 - protein, 129 aa, Homo sapiens
  REGION 1..129: note = ENSP00000360866
MPGRWRWQRDMHPARKLLSLLFLILMGTELTQDSAAPDSLLRSSKGSTRGSLAAIVIWRGKSESRIAKTPGIFRGGGTLVLPPTHTPEWLILPLGITLPLGAPETGGGDCAAETWKGSQRAGQLCALLA

SEQ ID NO: 32750 - protein, 163 aa, Homo sapiens
  REGION 1..163: note = ENSP00000340318
MEGPGGSGFHLRLEAFCKCKSPINVFDPVRPALQVGLTRVLPTNPEESWQVYSSAQDSEGRCICTVVAPQQTMCSRDARTKQLRQLLEKVQNMSQSIEVLDRRTQRDLQYVEKMENQMKGLESKFKQVEESHKQHLARQFKAIKAKMDELRPLIPVLEEYKAD

SEQ ID NO: 32751 - protein, 458 aa, Homo sapiens
  REGION 1..458: note = ENSP00000360861
MGEAPGREGRGPCPQLESPRRRRVLPTNPEESWQVYSSAQDSEGRCICTVVAPQQTMCSRDARTKQLRQLLEKVQNMSQSIEVLDRRTQRDLQYVEKMENQMKGLESKFKQVEESHKQHLARQFKAIKAKMDELRPLIPVLEEYKADAKLVLQFKEEVQNLTSVLNELQEEIGAYDYDELQSRVSNLEERLRACMQKLACGKLTGISDPVTVKTSGSRFGSWMTDPLAPEGDNRVWYMDGYHNNRFVREYKSMVDFMNTDNFTSHRLPHPWSGTGQVVYNGSIYFNKFQSHIIIRFDLKTETILKTRSLDYAGYNNMYHYAWGGHSDIDLMVDESGLWAVYATNQNAGNIVVSRLDPVSLQTLQTWNTSYPKRSAGEAFIICGTLYVTNGYSGGTKVHYAYQTNASTYEYIDIPFQNKYSHISMLDYNPKDRALYAWNNGHQILYNVTLFHVIRSDEL

SEQ ID NO: 32752 - protein, 129 aa, Homo sapiens
  REGION 1..129: note = ENSP00000444296
MCSRDARTKQLRQLLEKVQNMSQSIEVLDRRTQRDLQYVEKMENQMKGLESKFKQVEESHKQHLARQFKAIKAKMDELRPLIPVLEEYKADAKLVLQFKEEVQNLTSVLNELQEEIGAYDYDELQSRVS

SEQ ID NO: 32753 - protein, 153 aa, Homo sapiens
  REGION 1..153: note = ENSP00000376717
MSVPLLKIGVVLSTMAMITNWMSQTLPSLVGLNTTKLSAAGGGTLDRSTGVLPTNPEESWQVYSSAQDSEGRCICTVVAPQQTMCSRDARTKQLRQLLEKVQNMSQSIEVLDRRTQRDLQYVEKMENQMKGLESKFKQVEESHKQHLARQFKG

SEQ ID NO: 32754 - protein, 485 aa, Homo sapiens
  REGION 1..485: note = ENSP00000360858
MSVPLLKIGVVLSTMAMITNWMSQTLPSLVGLNTTKLSAAGGGTLDRSTGVLPTNPEESWQVYSSAQDSEGRCICTVVAPQQTMCSRDARTKQLRQLLEKVQNMSQSIEVLDRRTQRDLQYVEKMENQMKGLESKFKQVEESHKQHLARQFKAIKAKMDELRPLIPVLEEYKADAKLVLQFKEEVQNLTSVLNELQEEIGAYDYDELQSRVSNLEERLRACMQKLACGKLTGISDPVTVKTSGSRFGSWMTDPLAPEGDNRVWYMDGYHNNRFVREYKSMVDFMNTDNFTSHRLPHPWSGTGQVVYNGSIYFNKFQSHIIIRFDLKTETILKTRSLDYAGYNNMYHYAWGGHSDIDLMVDESGLWAVYATNQNAGNIVVSRLDPVSLQTLQTWNTSYPKRSAGEAFIICGTLYVTNGYSGGTKVHYAYQTNASTYEYIDIPFQNKYSHISMLDYNPKDRALYAWNNGHQILYNVTLFHVIRSDEL

SEQ ID NO: 32755 - protein, 208 aa, Homo sapiens
  REGION 1..208: note = ENSP00000443806
MSQSIEVLDRRTQRDLQYVEKMENQMKGLESKFKQVEESHKQHLARQFKAIKAKMDELRPLIPVLEEYKADAKLVLQFKEEVQNLTSVLNELQEEIGAYDYDELQSRVSNLEERLRACMQKLACGKLTGISDPVTVKTSGSRFGSWMTDPLAPEGDNRVWYMDGYHNNRFVREYKSMVDFMNTDNFTSHRLPHPWSGTGQVVYNGSIY

SEQ ID NO: 32756 - protein, 99 aa, Homo sapiens
  REGION 1..99: note = ENSP00000437906
  VARIANT 1: note = Any amino acid
XSHKQHLARQFKAIKAKMDELRPLIPVLEEYKADAKLVLQFKEEVQNLTSVLNELQEEIGAYDYDELQSRVSNLEERLRACMQKLGVVHGRLSQQPLRT

SEQ ID NO: 32757 - protein, 454 aa, Homo sapiens
  REGION 1..454: note = ENSP00000264833
MWPLTVPPPLLLLLCSGLAGQTLFQNPEEGWQLYTSAQAPDGKCICTAVIPAQSTCSRDGRSRELRQLMEKVQNVSQSMEVLELRTYRDLQYVRGMETLMRSLDARLRAADGSLSAKSFQELKDRMTELLPLSSVLEQYKADTRTIVRLREEVRNLSGSLAAIQEEMGAYGYEDLQQRVMALEARLHACAQKLGCGKLTGVSNPITVRAMGSRFGSWMTDTMAPSADSRVWYMDGYYKGRRVLEFRTLGDFIKGQNFIQHLLPQPWAGTGHVVYNGSLFYNKYQSNVVVKYHFRSRSVLVQRSLPGAGYNNTFPYSWGGFSDMDFMVDESGLWAVYTTNQNAGNIVVSRLDPHTLEVMRSWDTGYPKRSAGEAFMICGVLYVTNSHLAGAKVYFAYFTNTSSYEYTDVPFHNQYSHISMLDYNPRERALYTWNNGHQVLYNVTLFHVISTSGDP

SEQ ID NO: 32758 - protein, 376 aa, Homo sapiens
  REGION 1..376: note = ENSP00000464877
MEVLELRTYRDLQYVRGMETLMRSLDARLRAADGSLSAKSFQELKDRMTELLPLSSVLEQYKADTRTIVRLREEVRNLSGSLAAIQEEMGAYGYEDLQQRVMALEARLHACAQKLGCGKLTGVSNPITVRAMGSRFGSWMTDTMAPSADSRVWYMDGYYKGRRVLEFRTLGDFIKGQNFIQHLLPQPWAGTGHVVYNGSLFYNKYQSNVVVKYHFRSRSVLVQRSLPGAGYNNTFPYSWGGFSDMDFMVDESGLWAVYTTNQNAGNIVVSRLDPHTLEVMRSWDTGYPKRSAGEAFMICGVLYVTNSHLAGAKVYFAYFTNTSSYEYTDVPFHNQYSHISMLDYNPRERALYTWNNGHQVLYNVTLFHVISTSGDP

SEQ ID NO: 32759 - protein, 78 aa, Homo sapiens
  REGION 1..78: note = ENSP00000466018
MEVLELRTYRDLQYVRGMETLMRSLDARLRAADGSLSAKSFQELKDRMTELLPLSSVLEQYKADTRTIVRLREEAVGS

SEQ ID NO: 32760 - protein, 335 aa, Homo sapiens
  REGION 1..335: note = ENSP00000465809
MSVPLLKIGAVLSTMAMVTNWMSQTLPSLVGLNGTVSRAGASEKITLFQNPEEGWQLYTSAQAPDGKCICTAVIPAQSTCSRDGRSRELRQLMEKVQNVSQSMEVLELRTYRDLQYVRGMETLMRSLDARLRAADGSLSAKSFQELKDRMTELLPLSSVLEQYKADTRTIVRLREEVRNLSGSLAAIQEEMGAYGYEDLQQRVMALEARLHACAQKLGCGKLTGVSNPITVRAMGSRFGSWMTDTMAPSADSRVWYMDGYYKGRRVLEFRTLGDFIKGQNFIQHLLPQPWAGTGHVVYNGSLFYNKYQSNVVVKYHFRSRSVLVQRSLPGAGYNN

SEQ ID NO: 32761 - protein, 478 aa, Homo sapiens
  REGION 1..478: note = ENSP00000345192
MSPPLLKLGAVLSTMAMISNWMSQTLPSLVGLNTTRLSTPDTLTQISPKEGWQVYSSAQDPDGRCICTVVAPEQNLCSRDAKSRQLRQLLEKVQNMSQSIEVLNLRTQRDFQYVLKMETQMKGLKAKFRQIEDDRKTLMTKHFQELKEKMDELLPLIPVLEQYKTDAKLITQFKEEIRNLSAVLTGIQEEIGAYDYEELHQRVLSLETRLRDCMKKLTCGKLMKITGPVTVKTSGTRFGAWMTDPLASEKNNRVWYMDSYTNNKIVREYKSIADFVSGAESRTYNLPFKWAGTNHVVYNGSLYFNKYQSNIIIKYSFDMGRVLAQRSLEYAGFHNVYPYTWGGFSDIDLMADEIGLWAVYATNQNAGNIVISQLNQDTLEVMKSWSTGYPKRSAGESFMICGTLYVTNSHLTGAKVYYSYSTKTSTYEYTDIPFHNQYFHISMLDYNARDRALYAWNNGHQVLFNVTLFHIIKTEDDT

SEQ ID NO: 32762 - protein, 458 aa, Homo sapiens
  REGION 1..458: note = ENSP00000359121
MQATSNLLNLLLLSLFAGLDPSKTQISPKEGWQVYSSAQDPDGRCICTVVAPEQNLCSRDAKSRQLRQLLEKVQNMSQSIEVLNLRTQRDFQYVLKMETQMKGLKAKFRQIEDDRKTLMTKHFQELKEKMDELLPLIPVLEQYKTDAKLITQFKEEIRNLSAVLTGIQEEIGAYDYEELHQRVLSLETRLRDCMKKLTCGKLMKITGPVTVKTSGTRFGAWMTDPLASEKNNRVWYMDSYTNNKIVREYKSIADFVSGAESRTYNLPFKWAGTNHVVYNGSLYFNKYQSNIIIKYSFDMGRVLAQRSLEYAGFHNVYPYTWGGFSDIDLMADEIGLWAVYATNQNAGNIVISQLNQDTLEVMKSWSTGYPKRSAGESFMICGTLYVTNSHLTGAKVYYSYSTKTSTYEYTDIPFHNQYFHISMLDYNARDRALYAWNNGHQVLFNVTLFHIIKTEDDT

SEQ ID NO: 32763 - protein, 140 aa, Homo sapiens
  REGION 1..140: note = ENSP00000443471
MSQSIEVLNLRTQRDFQYVLKMETQMKGLKAKFRQIEDDRKTLMTKHFQELKEKMDELLPLIPVLEQYKTDAKLITQFKEEIRNLSAVLTGIQEEIGAYDYEELHQRVLSLETRLRDCMKKLIDLKKRKEEEKRQQKGEA

SEQ ID NO: 32764 - protein, 271 aa, Homo sapiens
  REGION 1..271: note = ENSP00000371785
MYYAVSQARVNAVPGTMLRPQRPGDLQLGASLYELVGYRQPPSSSSSSTSSTSSTSSSSTTAPLLPKAAREKPEAPAEPPGPGPGSGAHPGGSARPDAKEEQQQQLRRKINSRERKRMQDLNLAMDALREVILPYSAAHCQGAPGRKLSKIATLLLARNYILLLGSSLQELRRALGEGAGPAAPRLLLAGLPLLAAAPGSVLLAPGAVGPPDALRPAKYLSLALDEPPCGQFALPGGGAGGPGLCTCAVCKFPHLVPASLGLAAVQAQFSK

SEQ ID NO: 32765 - protein, 32 aa, Homo sapiens
  REGION 1..32: note = ENSP00000414840
  VARIANT 1: note = Any amino acid
XGPGLCTCAVCKFPHLVPASLGLAAVQAQFSK

SEQ ID NO: 32766 - protein, 323 aa, Homo sapiens
  REGION 1..323: note = ENSP00000371794
MDSDASLVSSRPSSPEPDDLFLPARSKGSSGSAFTGGTVSSSTPSDCPPELSAELRGAMGSAGAHPGDKLGGSGFKSSSSSTSSSTSSAAASSTKKDKKQMTEPELQQLRLKINSRERKRMHDLNIAMDGLREVMPYAHGPSVRKLSKIATLLLARNYILMLTNSLEEMKRLVSEIYGGHHAGFHPSACGGLAHSAPLPAATAHPAAAAHAAHHPAVHHPILPPAAAAAAAAAAAAAVSSASLPGSGLPSVGSIRPPHGLLKSPSAAAAAPLGGGGGGSGASGGFQHWGGMPCPCSMCQVPPPHHHVSAMGAGSLPRLTSDAK

SEQ ID NO: 32767 - protein, 62 aa, Homo sapiens
  REGION 1..62: note = ENSP00000391183
MDSDASLVSSRPSSPEPDDLFLPARSKGSSGSAFTGGTVSSSTPSDCPPELSAELRGAMGSA

SEQ ID NO: 32768 - protein, 323 aa, Homo sapiens; identical to SEQ ID NO: 32766
  REGION 1..323: note = ENSP00000331040

SEQ ID NO: 32769 - protein, 323 aa, Homo sapiens; identical to SEQ ID NO: 32766
  REGION 1..323: note = ENSP00000371794

SEQ ID NO: 32770 - protein, 62 aa, Homo sapiens; identical to SEQ ID NO: 32767
  REGION 1..62: note = ENSP00000391183

SEQ ID NO: 32771 - protein, 323 aa, Homo sapiens; identical to SEQ ID NO: 32766
  REGION 1..323: note = ENSP00000331040

SEQ ID NO: 32772 - protein, 465 aa, Homo sapiens
  REGION 1..465: note = ENSP00000302630
MNAQLTMEAIGELHGVSHEPVPAPADLLGGSPHARSSVAHRGSHLPPAHPRSMGMASLLDGGSGGGDYHHHHRAPEHSLAGPLHPTMTMACETPPGMSMPTTYTTLTPLQPLPPISTVSDKFPHHHHHHHHHHHPHHHQRLAGNVSGSFTLMRDERGLASMNNLYTPYHKDVAGMGQSLSPLSSSGLGSIHNSQQGLPHYAHPGAAMPTDKMLTPNGFEAHHPAMLGRHGEQHLTPTSAGMVPINGLPPHHPHAHLNAQGHGQLLGTAREPNPSVTGAQVSNGSNSGQMEEINTKEVAQRITTELKRYSIPQAIFAQRVLCRSQGTLSDLLRNPKPWSKLKSGRETFRRMWKWLQEPEFQRMSALRLAACKRKEQEHGKDRGNTPKKPRLVFTDVQRRTLHAIFKENKRPSKELQITISQQLGLELSTVSNFFMNARRRSLDKWQDEGSSNSGNSSSSSSTCTKA

SEQ ID NO: 32773 - protein, 66 aa, Homo sapiens
  REGION 1..66: note = ENSP00000453718
MESQKSFIKHAKGKNKNMGRIEATHPKSPGWSSQMSSVELYMQYSRKISVHPKNCKSPFPSSWGWS

SEQ ID NO: 32774 - protein, 182 aa, Homo sapiens
  REGION 1..182: note = ENSP00000476168
  VARIANT 1: note = Any amino acid
XLYTPYHKDVAGMGQSLSPLSSSGLGSIHNSQQGLPHYAHPGAAMPTDKMLTPNGFEAHHPAMLGRHGEQHLTPTSAGMVPINGLPPHHPHAHLNAQGHGQLLGTAREPNPSVTGAQAIFAQRVLCRSQGTLSDLLRNPKPWSKLKSGRETFRRMWKWLQEPEFQRMSALRLAGTAREARTA

SEQ ID NO: 32775 - protein, 504 aa, Homo sapiens
  REGION 1..504: note = ENSP00000419185
MKAAYTAYRCLTKDLEGCAMNPELTMESLGTLHGPAGGGSGGGGGGGGGGGGGGPGHEQELLASPSPHHAGRGAAGSLRGPPPPPTAHQELGTAAAAAAAASRSAMVTSMASILDGGDYRPELSIPLHHAMSMSCDSSPPGMGMSNTYTTLTPLQPLPPISTVSDKFHHPHPHHHPHHHHHHHHQRLSGNVSGSFTLMRDERGLPAMNNLYSPYKEMPGMSQSLSPLAATPLGNGLGGLHNAQQSLPNYGPPGHDKMLSPNFDAHHTAMLTRGEQHLSRGLGTPPAAMMSHLNGLHHPGHTQSHGPVLAPSRERPPSSSSGSQVATSGQLEEINTKEVAQRITAELKRYSIPQAIFAQRVLCRSQGTLSDLLRNPKPWSKLKSGRETFRRMWKWLQEPEFQRMSALRLAACKRKEQEPNKDRNNSQKKSRLVFTDLQRRTLFAIFKENKRPSKEMQITISQQLGLELTTVSNFFMNARRRSLEKWQDDLSTGGSSSTSSTCTKA

SEQ ID NO: 32776 - protein, 141 aa, Homo sapiens
  REGION 1..141: note = ENSP00000360214
MSFSLNFTLPANTTSSPVTGGKETDCGPSLGLAAGIPLLVATALLVALLFTLIHRRRSSIEAMEESDRPCEISEIDDNPKISENPRRSPTHEKNTMGAQEAHIYVKTVAGSEEPVHDRYRPTIEMERRRGLWWLVPRLSLE

SEQ ID NO: 32777 - protein, 131 aa, Homo sapiens
  REGION 1..131: note = ENSP00000484599
MRMTSSPVTGGKETDCGPSLGLAAGIPLLVATALLVALLFTLIHRRRSSIEAMEESDRPCEISEIDDNPKISENPRRSPTHEKNTMGAQEAHIYVKTVAGSEEPVHDRYRPTIEMERRRGLWWLVPRLSLE

SEQ ID NO: 32778 - protein, 118 aa, Homo sapiens
  REGION 1..118: note = ENSP00000377449
MDCGPSLGLAAGIPLLVATALLVALLFTLIHRRRSSIEAMEESDRPCEISEIDDNPKISENPRRSPTHEKNTMGAQEAHIYVKTVAGSEEPVHDRYRPTIEMERRRGLWWLVPRLSLE

SEQ ID NO: 32779 - protein, 79 aa, Homo sapiens
  REGION 1..79: note = ENSP00000445125
MEESDRPCEISEIDDNPKISENPRRSPTHEKNTMGAQEAHIYVKTVAGSEEPVHDRYRPTIEMERRRGLWWLVPRLSLE

SEQ ID NO: 32780 - protein, 130 aa, Homo sapiens
  REGION 1..130: note = ENSP00000398025
MSFSLNFTLPANTDCGPSLGLAAGIPLLVATALLVALLFTLIHRRRSSIEAMEESDRPCEISEIDDNPKISENPRRSPTHEKNTMGAQEAHIYVKTVAGSEEPVHDRYRPTIEMERRRGLWWLVPRLSLE

SEQ ID NO: 32781 - protein, 129 aa, Homo sapiens
  REGION 1..129: note = ENSP00000377448
MTSSPVTGGKETDCGPSLGLAAGIPLLVATALLVALLFTLIHRRRSSIEAMEESDRPCEISEIDDNPKISENPRRSPTHEKNTMGAQEAHIYVKTVAGSEEPVHDRYRPTIEMERRRGLWWLVPRLSLE

SEQ ID NO: 32782 - protein, 802 aa, Homo sapiens
  REGION 1..802: note = ENSP00000347710
MGHPPLEFSDCYLDSPDFRERLKCYEQELERTNKFIKDVIKDGNALISAMRNYSSAVQKFSQTLQSFQFDFIGDTLTDDEINIAESFKEFAELLNEVENERMMMVHNASDLLIKPLENFRKEQIGFTKERKKKFEKDGERFYSLLDRHLHLSSKKKESQLQEADLQVDKERHNFFESSLDYVYQIQEVQESKKFNIVEPVLAFLHSLFISNSLTVELTQDFLPYKQQLQLSLQNTRNHFSSTREEMEELKKRMKEAPQTCKLPGQPTIEGYLYTQEKWALGISWVKYYCQYEKETKTLTMTPMEQKPGAKQGPLDLTLKYCVRRKTESIDKRFCFDIETNERPGTITLQALSEANRRLWMEAMDGKEPIYHSPITKQQEMELNEVGFKFVRKCINIIETKGIKTEGLYRTVGSNIQVQKLLNAFFDPKCPGDVDFHNSDWDIKTITSSLKFYLRNLSEPVMTYRLHKELVSAAKSDNLDYRLGAIHSLVYKLPEKNREMLELLIRHLVNVCEHSKENLMTPSNMGVIFGPTLMRAQEDTVAAMMNIKFQNIVVEILIEHFGKIYLGPPEESAAPPVPPPRVTARRHKPITISKRLLRERTVFYTSSLDESEDEIQHQTPNGTITSSIEPPKPPQHPKLPIQRSGETDPGRKSPSRPILDGKLEPCPEVDVGKLVSRLQDGGTKITPKATNGPMPGSGPTKTPSFHIKRPAPRPLAHHKEGDADSFSKVRPPGEKPTIIRPPVRPPDPPCRAATPQKPEPKPDIVAGNAGEITSSVVASRTRFFETASRKTGSSQGRLPGDES

SEQ ID NO: 32783 - protein, 1288 aa, Homo sapiens
  REGION 1..1288: note = ENSP00000480476
MGSPEGRFHFAIDRGGTFTDVFAQCPGGHVRVLKLLSEDPANYADAPTEGIRRILEQEAGMLLPRDQPLDSSHIASIRMGTTVATNALLERKGERVALLVTRGFRDLLHIGTQARGDLFDLAVPMPEVLYEEVLEVDERVVLHRGEAGTGTPVKGRTGDLLEVQQPVDLGALRGKLEGLLSRGIRSLAVVLMHSYTWAQHEQQVGVLARELGFTHVSLSSEAMPMVRIVPRGHTACADAYLTPAIQRYVQGFCRGFQGQLKDVQVLFMRSDGGLAPMDTFSGSSAVLSGPAGGVVGYSATTYQQEGGQPVIGFDMGGTSTDVSRYAGEFEHVFEASTAGVTLQAPQLDINTVAAGGGSRLFFRSGLFVVGPESAGAHPGPACYRKGGPVTVTDANLVLGRLLPASFPCIFGPGENQPLSPEASRKALEAVATEVNSFLTNGPCPASPLSLEEVAMGFVRVANEAMCRPIRALTQARGHDPSAHVLACFGGAGGQHACAIARALGMDTVHIHRHSGLLSALGLALADVVHEAQEPCSLLYAPETFVQLDQRLSRLEEQCVDALQAQGFPRSQISTESFLHLRYQGTDCALMVSAHQHPATARSPRAGDFGAAFVERYMREFGFVIPERPVVVDDVRVRGTGRSGLRLEDAPKAQTGPPRVDKMTQCYFEGGYQETPVYLLAELGYGHKLHGPCLIIDSNSTILVEPGCQAEVTKTGDICISVGAEVPGTVGPQLDPIQLSIFSHRFMSIAEQMGRILQRTAISTNIKERLDFSCALFGPDGGLVSNAPHIPVHLGAMQETVQFQIQHLGADLHPGDVLLSNHPSAGGSHLPDLTVITPVFWPGQTRPVFYVASRGHHADIGGITPGSMPPHSTMLQQEGAVFLSFKLVQGGVFQEEAVTEALRAPGKVPNCSGTRNLHDNLSDLRAQVAANQKGIQLVGELIGQYGLDVVQAYMGHIQANAELAVRDMLRAFGTSRQARGLPLEVSSEDHMDDGSPIRLRVQISLSQGSAVFDFSGTGPEVFGNLNAPRAVTLSALIYCLRCLVGRDIPLNQGCLAPVRVVIPRGSILDPSPEAAVVGGNVLTSQRVVDVILGAFGACAASQGCMNNVTLGNAHMGYYETVAGGAGAGPSWHGRSGVHSHMTNTRITDPEILESRYPVILRRFELRRGSGGRGRFRGGDGVTRELLFREEALLSVLTERRAFRPYGLHGGEPGARGLNLLIRKNGRTVNLGGKTSVTVYPGDVFCLHTPGGGGYGDPEDPAPPPGSPPQALAFPEHGSVYEYRRAQEAV

SEQ ID NO: 32784 - protein, 253 aa, Homo sapiens
  REGION 1..253: note = ENSP00000481640
MSLLSSYEGLRQEIQRLAQENEELRRLVQLIQENQELKLVLRNRGSSLGFCSSGFLAEVAASPWLPRRRTIKFKNAERVFPGLPAEELLWDSSPTTMGSPEGRFHFAIDRGGTFTDVFAQCPGGHVRVLKLLSEDPANYADAPTEGIRRILEQEAGMLLPRDQPLDSSHIASIRMGTTVATNALLERKGERVALLVTRGFRDLLHIGTQARGDLFDLAVPMPEVLYEEVLEVDERVVLHRGEAGTGTPVKGRT

SEQ ID NO: 32785 - protein, 372 aa, Homo sapiens
  REGION 1..372: note = ENSP00000234961
MEPAPSAGAELQPPLFANASDAYPSACPSAGANASGPPGARSASSLALAIAITALYSAVCAVGLLGNVLVMFGIVRYTKMKTATNIYIFNLALADALATSTLPFQSAKYLMETWPFGELLCKAVLSIDYYNMFTSIFTLTMMSVDRYIAVCHPVKALDFRTPAKAKLINICIWVLASGVGVPIMVMAVTRPRDGAVVCMLQFPSPSWYWDTVTKICVFLFAFVVPILIITVCYGLMLLRLRSVRLLSGSKEKDRSLRRITRMVLVVVGAFVVCWAPIHIFVIVWTLVDIDRRDPLVVAALHLCIALGYANSSLNPVLYAFLDENFKRCFRQLCRKPCGRPDPSSFSRAREATARERVTACTPSDGPGGGAAA

SEQ ID NO: 32786 - protein, 324 aa, Homo sapiens
  REGION 1..324: note = ENSP00000477970
MEPAPSAGAELQPPLFANASDAYPSACPSAGANASGPPGARSASSLALAIAITALYSAVCAVGLLGNVLVMFGIVRYTKMKTATNIYIFNLALADALATSTLPFQSAKYLMETWPFGELLCKAVLSIDYYNMFTSIFTLTMMSVDRYIAVCHPVKALDFRTPAKAKLINICIWVLASGVGVPIMVMAVTRPRDGAVVCMLQFPSPSWYWDTVTKICVFLFAFVVCWAPIHIFVIVWTLVDIDRRDPLVVAALHLCIALGYANSSLNPVLYAFLDENFKRCFRQLCRKPCGRPDPSSFSRAREATARERVTACTPSDGPGGGAAA

SEQ ID NO: 32787 - protein, 332 aa, Homo sapiens
  REGION 1..332: note = ENSP00000356191
MRLLAFLSLLALVLQETGTASLPRKERKRREEQMPREGDSFEVLPLRNDVLNPDNYGEVIDLSNYEELTDYGDQLPEVKVTSLAPATSISPAKSTTAPGTPSSNPTMTRPTTAGLLLSSQPNHGLPTCLVCVCLGSSVYCDDIDLEDIPPLPRRTAYLYARFNRISRIRAEDFKGLTKLKRIDLSNNLISSIDNDAFRLLHALQDLILPENQLEALPVLPSGIEFLDVRLNRLQSSGIQPAAFRAMEKLQFLYLSDNLLDSIPGPLPLSLRSVHLQNNLIETMQRDVFCDPEEHKHTRRQLEDIRLDGNPINLSLFPSAYFCLPRLPIGRFT

SEQ ID NO: 32788 - protein, 174 aa, Homo sapiens
  REGION 1..174: note = ENSP00000399491
MRLLAFLSLLALVLQETGTASLPRKERKRREEQMPREGDSFEVLPLRNDVLNPDNYGEVIDLSNYEELTDYGDQLPEVKVTSLAPATSISPAKSTTAPGTPSSNPTMTRPTTAGLLLSSQPNHEDIPPLPRRTAYLYARFNRISRIRAEDFKGLTKLKRIDLSNNLISSIDNDA

SEQ ID NO: 32789 - protein, 807 aa, Homo sapiens
  REGION 1..807: note = ENSP00000263847
MAATELRGVVGPGPAAIAALGGGGAGPPVVGGGGGRGDAGPGSGAASGTVVAAAAGGPGPGAGGVAAAGPAPAPPTGGSGGSGAGGSGSAREGWLFKWTNYIKGYQRRWFVLSNGLLSYYRSKAEMRHTCRGTINLATANITVEDSCNFIISNGGAQTYHLKASSEVERQRWVTALELAKAKAVKMLAESDESGDEESVSQTDKTELQNTLRTLSSKVEDLSTCNDLIAKHGTALQRSLSELESLKLPAESNEKIKQVNERATLFRITSNAMINACRDFLMLAQTHSKKWQKSLQYERDQRIRLEETLEQLAKQHNHLERAFRGATVLPANTPGNVGSGKDQCCSGKGDMSDEDDENEFFDAPEIITMPENLGHKRTGSNISGASSDISLDEQYKHQLEETKKEKRTRIPYKPNYSLNLWSIMKNCIGKELSKIPMPVNFNEPLSMLQRLTEDLEYHELLDRAAKCENSLEQLCYVAAFTVSSYSTTVFRTSKPFNPLLGETFELDRLEENGYRSLCEQVSHHPPAAAHHAESKNGWTLRQEIKITSKFRGKYLSIMPLGTIHCIFHATGHHYTWKKVTTTVHNIIVGKLWIDQSGEIDIVNHKTGDKCNLKFVPYSYFSRDVARKVTGEVTDPSGKVHFALLGTWDEKMECFKVQPVIGENGGDARQRGHEAEESRVMLWKRNPLPKNAENMYYFSELALTLNAWESGTAPTDSRLRPDQRLMENGRWDEANAEKQRLEEKQRLSRKKREAEAMKATEDGTPYDPYKALWFERKKDPVTKELTHIYRGEYWECKEKQDWSSCPDIF

SEQ ID NO: 32790 - protein, 171 aa, Homo sapiens
  REGION 1..171: note = ENSP00000432399
  VARIANT 1: note = Any amino acid
XSGASSDISLDEQYKHQLEETKKEKRTRIPYKPNYSLNLWSIMKNCIGKELSKIPMPVNFNEPLSMLQRLTEDLEYHELLDRAAKCENSLEQLCYVAAFTVSSYSTTVFRTSKPFNPLLGETFELDRLEENGYRSLCEQVPFIVFSMQLGTTTLGRKLPQLYTTLLWASCG

SEQ ID NO: 32791 - protein, 764 aa, Homo sapiens
  REGION 1..764: note = ENSP00000379804
MERAVQGTDGGGGSNSSSRSSSRATSAGSSPSCSLAGRGVSSRSAAAGLGGGGSRSSPGSVAASPSGGGGRRREPALEGVLSKYTNLLQGWQNRYFVLDFEAGILQYFVNEQSKHQKPRGVLSLSGAIVSLSDEAPHMLVVYSANGEMFKLRAADAKEKQFWVTQLRACAKYHMEMNSKSAPSSRSRSLTLLPHGTPNSASPCSQRHLSVGAPGVVTITHHKSPAAARRAKSQYSGQLHEVREMMNQVEGQQKNLVHAIESLPGSGPLTALDQDLLLLKATSAATLSCLGECLNLLQQSVHQAGQPSQKPGASENILGWHGSKSHSTEQLKNGTLGSLPSASANITWAILPNSAEDEQTSQPEPEPNSGSELVLSEDEKSDNEDKEETELGVMEDQRSIILHLISQLKLGMDLTKVVLPTFILEKRSLLEMYADFMAHPDLLLAITAGATPEERVICFVEYYLTAFHEGRKGALAKKPYNPIIGETFHCSWEVPKDRVKPKRTASRSPASCHEHPMADDPSKSYKLRFVAEQVSHHPPISCFYCECEEKRLCVNTHVWTKSKFMGMSVGVSMIGEGVLRLLEHGEEYVFTLPSAYARSILTIPWVELGGKVSINCAKTGYSATVIFHTKPFYGGKVHRVTAEVKHNPTNTIVCKAHGEWNGTLEFTYNNGETKVIDTTTLPVYPKKIRPLEKQGPMESRNLWREVTRYLRLGDIDAATEQKRHLEEKQRVEERKRENLRTPWKPKYFIQEGDGWVYFNPLWKAH

SEQ ID NO: 32792 - protein, 538 aa, Homo sapiens
  REGION 1..538: note = ENSP00000416078
  VARIANT 1: note = Any amino acid
XQYSGQLHEVREMMNQVEGQQKNLVHAIESLPGSGPLTALDQDLLLLKATSAATLSCLGECLNLLQQSVHQAGQPSQKPGASENILGWHGSKSHSTEQLKNGTLGSLPSASANITWAILPNSAEDEQTSQPEPEPNSGSELVLSEDEKSDNEDKEETELGVMEDQRSIILHLISQLKLGMDLTKVVLPTFILEKRSLLEMYADFMAHPDLLLAITAGATPEERVICFVEYYLTAFHEGRKGALAKKPYNPIIGETFHCSWEVPKDRVKPKRTASRSPASCHEHPMADDPSKSYKLRFVAEQVSHHPPISCFYCECEEKRLCVNTHVWTKSKFMGMSVGVSMIGEGVLRLLEHGEEYVFTLPSAYARSILTIPWVELGGKVSINCAKTGYSATVIFHTKPFYGGKVHRVTAEVKHNPTNTIVCKAHGEWNGTLEFTYNNGETKVIDTTTLPVYPKKIRPLEKQGPMESRNLWREVTRYLRLGDIDAATEQKRHLEEKQRVEERKRENLRTPWKPKYFIQEVTLPPVIGPLPRRELVLRG

SEQ ID NO: 32793 - protein, 700 aa, Homo sapiens
  REGION 1..700: note = ENSP00000406124
MERAVQGTDGGGGSNSSSRSSSRATSAGSSPSCSLAGRGVSSRSAAAGLGGGGSRSSPGSVAASPSGGGGRRREPALEGVLSKYTNLLQGWQNRYFVLDFEAGILQYFVNEQSKHQKPRGVLSLSGAIVSLSDEAPHMLVVYSANGEMFKLRAADAKEKQFWVTQLRACAKYHMEMNSKMMNQVEGQQKNLVHAIESLPGSGPLTALDQDLLLLKATSAATLSCLGECLNLLQQSVHQAGQPSQKPGASENILGWHGSKSHSTEQLKNGTLGSLPSASANITWAILPNSAEDEQTSQPEPEPNSGSELVLSEDEKSDNEDKEETELGVMEDQRSIILHLISQLKLGMDLTKVVLPTFILEKRSLLEMYADFMAHPDLLLAITAGATPEERVICFVEYYLTAFHEGRKGALAKKPYNPIIGETFHCSWEVPKDRVKPKRTASRSPASCHEHPMADDPSKSYKLRFVAEQVSHHPPISCFYCECEEKRLCVNTHVWTKSKFMGMSVGVSMIGEGVLRLLEHGEEYVFTLPSAYARSILTIPWVELGGKVSINCAKTGYSATVIFHTKPFYGGKVHRVTAEVKHNPTNTIVCKAHGEWNGTLEFTYNNGETKVIDTTTLPVYPKKIRPLEKQGPMESRNLWREVTRYLRLGDIDAATEQKRHLEEKQRVEERKRENLRTPWKPKYFIQEGDGWVYFNPLWKAH

SEQ ID NO: 32794 - protein, 173 aa, Homo sapiens
  REGION 1..173: note = ENSP00000399200
KSPAAARRAKSQYSGQLHEVREVKACMLNNMCEVTQRVIGIVKTQTQLIFLMMNQVEGQQKNLVHAIESLPGSGPLTALDQDLLLLKATSAATLSCLGECLNLLQQSVHQAGQPSQKPGASENILGWHGSKSHSTEQLKNGTLGSLPSASANITWAILPNSAEDEQTSQPEPE

SEQ ID NO: 32795 - protein, 887 aa, Homo sapiens
  REGION 1..887: note = ENSP00000315410
MMSDEKNLGVSQKLVSPSRSTSSCSSKQGSRQDSWEVVEGLRGEMNYTQEPPVQKGFLLKKRKWPLKGWHKRFFYLDKGILKYAKSQTDIEREKLHGCIDVGLSVMSVKKSSKCIDLDTEEHIYHLKVKSEEVFDEWVSKLRHHRMYRQNEIAMFPHEVNHFFSGSTITDSSSGVFDSISSRKRSSISKQNLFQTGSNVSFSCGGETRVPLWLQSSEDMEKCSKDLAHCHAYLVEMSQLLQSMDVLHRTYSAPAINAIQGGSFESPKKEKRSHRRWRSRAIGKDAKGTLQVPKPFSGPVRLHSSNPNLSTLDFGEEKNYSDGSETSSEFSKMQEDLCHIAHKVYFTLRSAFNIMSAEREKLKQLMEQDASSSPSAQVIGLKNALSSALAQNTDLKERLRRIHAESLLLDSPAVAKSGDNLAEENSRDENRALVHQLSNESRLSITDSLSEFFDAQEVLLSPSSSENEISDDDSYVSDISDNLSLDNLSNDLDNERQTLGPVLDSGREAKSRRRTCLPAPCPSSSNISLWNILRNNIGKDLSKVAMPVELNEPLNTLQRLCEELEYSELLDKAAQIPSPLERMVYVAAFAISAYASSYYRAGSKPFNPVLGETYECIREDKGFQFFSEQVSHHPPISACHAESRNFVFWQDVRWKNKFWGKSMEIVPIGTTHVTLPVFGDHFEWNKVTSCIHNILSGQRWIEHYGEIVIKNLHDDSCYCKVNFIKAKYWSTNAHEIEGTVFDRSGKAVHRLFGKWHESIYCGGGSSSACVWRANPMPKGYEQYYSFTQFALELNEMDPSSKSLLPPTDTRFRPDQRFLEEGNLEEAEIQKQRIEQLQRERRRVLEENHVEHQPRFFRKSDDDSWVSNGTYLELRKDLGFSKLDHPVLW

SEQ ID NO: 32796 - protein, 611 aa, Homo sapiens
  REGION 1..611: note = ENSP00000386429
MMSDEKNLGVSQKLVSPSRSTSSCSSKQGSRQDSWEVVEGLRGEMNYTQEPPVQKGFLLKKRKWPLKGWHKRFFYLDKGILKYAKSQTDIEREKLHGCIDVGLSVMSVKKSSKCIDLDTEEHIYHLKVKSEEVFDEWVSKLRHHRMYRQNEIAMFPHEVNHFFSGSTITDSSSGVFDSISSRKRSSISKQNLFQTGSNVSFSCGGETRVPLWLQSSEDMEKCSKDLAHCHAYLVEMSQLLQSMDVLHRTYSAPAINAIQVPKPFSGPVRLHSSNPNLSTLDFGEEKNYSDGSETSSEFSKMQEDLCHIAHKVYFTLRSAFNIMSAEREKLKQLMEQDASSSPSAQVIGLKNALSSALAQNTDLKERLRRIHAESLLLDSPAVAKSGDNLAEENSRDENRALVHQLSNESRLSITDSLSEFFDAQEVLLSPSSSENEISDDDSYVSDISDNLSLDNLSNDLDNERQTLGPVLDSGREAKSRRRTCLPAPCPSSSNISLWNILRNNIGKDLSKVAMPVELNEPLNTLQRLCEELEYSELLDKAAQIPSPLERMVRSQPSLATVQPRSPSHEAIHGAHQRDSPCSLRFHFDCSVNRFITQSCLASSAWLFPVTL

SEQ ID NO: 32797 - protein, 856 aa, Homo sapiens
  REGION 1..856: note = ENSP00000379708
MMSDEKNLGVSQKLVSPSRSTSSCSSKQGSRQDSWEVVEGLRGEMNYTQEPPVQKGFLLKKRKWPLKGWHKRFFYLDKGILKYAKSQTDIEREKLHGCIDVGLSVMSVKKSSKCIDLDTEEHIYHLKVKSEEVFDEWVSKLRHHRMYRQNEIAMFPHEVNHFFSGSTITDSSSGVFDSISSRKRSSISKQNLFQTGSNVSFSCGGETRVPLWLQSSEDMEKCSKDLAHCHAYLVEMSQLLQSMDVLHRTYSAPAINAIQVPKPFSGPVRLHSSNPNLSTLDFGEEKNYSDGSETSSEFSKMQEDLCHIAHKVYFTLRSAFNIMSAEREKLKQLMEQDASSSPSAQVIGLKNALSSALAQNTDLKERLRRIHAESLLLDSPAVAKSGDNLAEENSRDENRALVHQLSNESRLSITDSLSEFFDAQEVLLSPSSSENEISDDDSYVSDISDNLSLDNLSNDLDNERQTLGPVLDSGREAKSRRRTCLPAPCPSSSNISLWNILRNNIGKDLSKVAMPVELNEPLNTLQRLCEELEYSELLDKAAQIPSPLERMVYVAAFAISAYASSYYRAGSKPFNPVLGETYECIREDKGFQFFSEQVSHHPPISACHAESRNFVFWQDVRWKNKFWGKSMEIVPIGTTHVTLPVFGDHFEWNKVTSCIHNILSGQRWIEHYGEIVIKNLHDDSCYCKVNFIKAKYWSTNAHEIEGTVFDRSGKAVHRLFGKWHESIYCGGGSSSACVWRANPMPKGYEQYYSFTQFALELNEMDPSSKSLLPPTDTRFRPDQRFLEEGNLEEAEIQKQRIEQLQRERRRVLEENHVEHQPRFFRKSDDDSWVSNGTYLELRKDLGFSKLDHPVLW

SEQ ID NO: 32798 - protein, 642 aa, Homo sapiens
  REGION 1..642: note = ENSP00000386801
MMSDEKNLGVSQKLVSPSRSTSSCSSKQGSRQDSWEVVEGLRGEMNYTQEPPVQKGFLLKKRKWPLKGWHKRFFYLDKGILKYAKSQTDIEREKLHGCIDVGLSVMSVKKSSKCIDLDTEEHIYHLKVKSEEVFDEWVSKLRHHRMYRQNEIAMFPHEVNHFFSGSTITDSSSGVFDSISSRKRSSISKQNLFQTGSNVSFSCGGETRVPLWLQSSEDMEKCSKDLAHCHAYLVEMSQLLQSMDVLHRTYSAPAINAIQGGSFESPKKEKRSHRRWRSRAIGKDAKGTLQVPKPFSGPVRLHSSNPNLSTLDFGEEKNYSDGSETSSEFSKMQEDLCHIAHKVYFTLRSAFNIMSAEREKLKQLMEQDASSSPSAQVIGLKNALSSALAQNTDLKERLRRIHAESLLLDSPAVAKSGDNLAEENSRDENRALVHQLSNESRLSITDSLSEFFDAQEVLLSPSSSENEISDDDSYVSDISDNLSLDNLSNDLDNERQTLGPVLDSGREAKSRRRTCLPAPCPSSSNISLWNILRNNIGKDLSKVAMPVELNEPLNTLQRLCEELEYSELLDKAAQIPSPLERMVRSQPSLATVQPRSPSHEAIHGAHQRDSPCSLRFHFDCSVNRFITQSCLASSAWLFPVTL

SEQ ID NO: 32799 - protein, 606 aa, Homo sapiens
  REGION 1..606: note = ENSP00000386325
MMSDEKNLGVSQKLVSPSRSTSSCSSKQGSRQDSWEVVEGLRGEMNYTQEPPVQKGFLLKKRKWPLKGWHKRFFYLDKGILKYAKSQTDIEREKLHGCIDVGLSVMSVKKSSKCIDLDTEEHIYHLKVKSEEVFDEWVSKLRHHRMYRQNEIAMFPHEVNHFFSGSTITDSSSGVFDSISSRKRSSISKQNLFQTGSNVSFSCGGETRVPLWLQSSEDMEKCSKDLAHCHAYLVEMSQLLQSMDVLHRTYSAPAINAIQGGSFESPKKEKRSHRRWRSRAIGKDAKGTLQVPKPFSGPVRLHSSNPNLSTLDFGEEKNYSDGSETSSEFSKMQEDLCHIAHKVYFTLRSAFNIMSAEREKLKQLMEQDASSSPSAQVIGLKNALSSENSRDENRALVHQLSNESRLSITDSLSEFFDAQEVLLSPSSSENEISDDDSYVSDISDNLSLDNLSNDLDNERQTLGPVLDSGREAKSRRRTCLPAPCPSSSNISLWNILRNNIGKDLSKVAMPVELNEPLNTLQRLCEELEYSELLDKAAQIPSPLERMVRSQPSLATVQPRSPSHEAIHGAHQRDSPCSLRFHFDCSVNRFITQSCLASSAWLFPVTL

SEQ ID NO: 32800 - protein, 575 aa, Homo sapiens
  REGION 1..575: note = ENSP00000386990
MMSDEKNLGVSQKLVSPSRSTSSCSSKQGSRQDSWEVVEGLRGEMNYTQEPPVQKGFLLKKRKWPLKGWHKRFFYLDKGILKYAKSQTDIEREKLHGCIDVGLSVMSVKKSSKCIDLDTEEHIYHLKVKSEEVFDEWVSKLRHHRMYRQNEIAMFPHEVNHFFSGSTITDSSSGVFDSISSRKRSSISKQNLFQTGSNVSFSCGGETRVPLWLQSSEDMEKCSKDLAHCHAYLVEMSQLLQSMDVLHRTYSAPAINAIQVPKPFSGPVRLHSSNPNLSTLDFGEEKNYSDGSETSSEFSKMQEDLCHIAHKVYFTLRSAFNIMSAEREKLKQLMEQDASSSPSAQVIGLKNALSSENSRDENRALVHQLSNESRLSITDSLSEFFDAQEVLLSPSSSENEISDDDSYVSDISDNLSLDNLSNDLDNERQTLGPVLDSGREAKSRRRTCLPAPCPSSSNISLWNILRNNIGKDLSKVAMPVELNEPLNTLQRLCEELEYSELLDKAAQIPSPLERMVRSQPSLATVQPRSPSHEAIHGAHQRDSPCSLRFHFDCSVNRFITQSCLASSAWLFPVTL

SEQ ID NO: 32801 - protein, 851 aa, Homo sapiens
  REGION 1..851: note = ENSP00000379706
MMSDEKNLGVSQKLVSPSRSTSSCSSKQGSRQDSWEVVEGLRGEMNYTQEPPVQKGFLLKKRKWPLKGWHKRFFYLDKGILKYAKSQTDIEREKLHGCIDVGLSVMSVKKSSKCIDLDTEEHIYHLKVKSEEVFDEWVSKLRHHRMYRQNEIAMFPHEVNHFFSGSTITDSSSGVFDSISSRKRSSISKQNLFQTGSNVSFSCGGETRVPLWLQSSEDMEKCSKDLAHCHAYLVEMSQLLQSMDVLHRTYSAPAINAIQGGSFESPKKEKRSHRRWRSRAIGKDAKGTLQVPKPFSGPVRLHSSNPNLSTLDFGEEKNYSDGSETSSEFSKMQEDLCHIAHKVYFTLRSAFNIMSAEREKLKQLMEQDASSSPSAQVIGLKNALSSENSRDENRALVHQLSNESRLSITDSLSEFFDAQEVLLSPSSSENEISDDDSYVSDISDNLSLDNLSNDLDNERQTLGPVLDSGREAKSRRRTCLPAPCPSSSNISLWNILRNNIGKDLSKVAMPVELNEPLNTLQRLCEELEYSELLDKAAQIPSPLERMVYVAAFAISAYASSYYRAGSKPFNPVLGETYECIREDKGFQFFSEQVSHHPPISACHAESRNFVFWQDVRWKNKFWGKSMEIVPIGTTHVTLPVFGDHFEWNKVTSCIHNILSGQRWIEHYGEIVIKNLHDDSCYCKVNFIKAKYWSTNAHEIEGTVFDRSGKAVHRLFGKWHESIYCGGGSSSACVWRANPMPKGYEQYYSFTQFALELNEMDPSSKSLLPPTDTRFRPDQRFLEEGNLEEAEIQKQRIEQLQRERRRVLEENHVEHQPRFFRKSDDDSWVSNGTYLELRKDLGFSKLDHPVLW

SEQ ID NO: 32802 - protein, 820 aa, Homo sapiens
  REGION 1..820: note = ENSP00000386953
MMSDEKNLGVSQKLVSPSRSTSSCSSKQGSRQDSWEVVEGLRGEMNYTQEPPVQKGFLLKKRKWPLKGWHKRFFYLDKGILKYAKSQTDIEREKLHGCIDVGLSVMSVKKSSKCIDLDTEEHIYHLKVKSEEVFDEWVSKLRHHRMYRQNEIAMFPHEVNHFFSGSTITDSSSGVFDSISSRKRSSISKQNLFQTGSNVSFSCGGETRVPLWLQSSEDMEKCSKDLAHCHAYLVEMSQLLQSMDVLHRTYSAPAINAIQVPKPFSGPVRLHSSNPNLSTLDFGEEKNYSDGSETSSEFSKMQEDLCHIAHKVYFTLRSAFNIMSAEREKLKQLMEQDASSSPSAQVIGLKNALSSENSRDENRALVHQLSNESRLSITDSLSEFFDAQEVLLSPSSSENEISDDDSYVSDISDNLSLDNLSNDLDNERQTLGPVLDSGREAKSRRRTCLPAPCPSSSNISLWNILRNNIGKDLSKVAMPVELNEPLNTLQRLCEELEYSELLDKAAQIPSPLERMVYVAAFAISAYASSYYRAGSKPFNPVLGETYECIREDKGFQFFSEQVSHHPPISACHAESRNFVFWQDVRWKNKFWGKSMEIVPIGTTHVTLPVFGDHFEWNKVTSCIHNILSGQRWIEHYGEIVIKNLHDDSCYCKVNFIKAKYWSTNAHEIEGTVFDRSGKAVHRLFGKWHESIYCGGGSSSACVWRANPMPKGYEQYYSFTQFALELNEMDPSSKSLLPPTDTRFRPDQRFLEEGNLEEAEIQKQRIEQLQRERRRVLEENHVEHQPRFFRKSDDDSWVSNGTYLELRKDLGFSKLDHPVLW

SEQ ID NO: 32803 - protein, 112 aa, Homo sapiens
  REGION 1..112: note = ENSP00000407829
MMSDEKNLGVSQKLVSPSRSTSSCSSKQGSRQDSWEVVEGLRGEMNYTQEPPVQKGFLLKKRKWPLKGWHKRFFYLDKGILKYAKSQTDIEREKLHGCIDVGLSVMSVKKSS

SEQ ID NO: 32804 - protein, 89 aa, Homo sapiens
  REGION 1..89: note = ENSP00000403374
MMSDEKNLGVSQKLVSPSRSTSSCSSKQGSRQDSWEVVEGLRGEMNYTQEPPVQKGFLLKKRKWPLKGWHKRFFYLDKGILKYAKSQTD

SEQ ID NO: 32805 - protein, 61 aa, Homo sapiens
  REGION 1..61: note = ENSP00000411249
MMSDEKNLGVSQKLVSPSRSTSSCSSKQGSRQDSWEVVEGLRGEMNYTQEPPVQKGFLLKK

SEQ ID NO: 32806 - protein, 323 aa, Homo sapiens
  REGION 1..323: note = ENSP00000285420
MEPRVRVEGWKVPTSRCRFLLARVLGYLVVMEAVLTEELDEEEQLLRRHRKEKKELQAKIQGMKNAVPKNDKKRRKQLTEDVAKLEKEMEQKHREELEQLKLTTKENKIDSVAVNISNLVLENQPPRISKAQKRREKKAALEKEREERIAEAEIENLTGARHMESEKLAQILAARQLEIKQIPSDGHCMYKAIEDQLKEKDCALTVVALRSQTAEYMQSHVEDFLPFLTNPNTGDMYTPEEFQKYCEDIVNTAAWGGQLELRALSHILQTPIEIIQADSPPIIVGEEYSKKPLILVYMRHAYGLGEHYNSVTRLVNIVTENCS

SEQ ID NO: 32807 - protein, 108 aa, Homo sapiens
  REGION 1..108: note = ENSP00000428528
MEAVLTEELDEEEQLLRRHRKEKKELQAKIQGMKNAVPKNDKKRRKQLTEDVAKLEKEMEQKHREELEQLKLTTKENKIDSVAVNISNLVLENQPPRISKAQKRRVPG

SEQ ID NO: 32808 - protein, 293 aa, Homo sapiens
  REGION 1..293: note = ENSP00000384190
MEAVLTEELDEEEQLLRRHRKEKKELQAKIQGMKNAVPKNDKKRRKQLTEDVAKLEKEMEQKHREELEQLKLTTKENKIDSVAVNISNLVLENQPPRISKAQKRREKKAALEKEREERIAEAEIENLTGARHMESEKLAQILAARQLEIKQIPSDGHCMYKAIEDQLKEKDCALTVVALRSQTAEYMQSHVEDFLPFLTNPNTGDMYTPEEFQKYCEDIVNTAAWGGQLELRALSHILQTPIEIIQADSPPIIVGEEYSKKPLILVYMRHAYGLGEHYNSVTRLVNIVTENCS

SEQ ID NO: 32809 - protein, 323 aa, Homo sapiens; identical to SEQ ID NO: 32806
  REGION 1..323: note = ENSP00000483706

SEQ ID NO: 32810 - protein, 192 aa, Homo sapiens
  REGION 1..192: note = ENSP00000481196
MISKEKKAALEKEREERIAEAEIENLTGARHMESEKLAQILAARQLEIKQIPSDGHCMYKAIEDQLKEKDCALTVVALRSQTAEYMQSHVEDFLPFLTNPNTGDMYTPEEFQKYCEDIVNTAAWGGQLELRALSHILQTPIEIIQADSPPIIVGEEYSKKPLILVYMRHAYGLGEHYNSVTRLVNIVTENCS

SEQ ID NO: 32811 - protein, 468 aa, Homo sapiens
  REGION 1..468: note = ENSP00000415851
MSEDSSALPWSINRDDYELQEVIGSGATAVVQAAYCAPKKEKVAIKRINLEKCQTSMDELLKEIQAMSQCHHPNIVSYYTSFVVKDELWLVMKLLSGGSVLDIIKHIVAKGEHKSGVLDESTIATILREVLEGLEYLHKNGQIHRDVKAGNILLGEDGSVQIADFGVSAFLATGGDITRNKVRKTFVGTPCWMAPEVMEQVRGYDFKADIWSFGITAIELATGAAPYHKYPPMKVLMLTLQNDPPSLETGVQDKEMLKKYGKSFRKMISLCLQKDPEKRPTAAELLRHKFFQKAKNKEFLQEKTLQRAPTISERAKKVRRVPGSSGRLHKTEDGGWEWSDDEFDEESEEGKAAISQLRSPRVKESISNSELFPTTDPVGTLLQVPEQISAHLPQPAGQIATQPTQVSLPPTAEPAKTAQALSSGSGSQETKIPISLVLRLRNSKKELNDIRFEFTPGRGEASNGLKTK

SEQ ID NO: 32812 - protein, 527 aa, Homo sapiens
  REGION 1..527: note = ENSP00000311713
MSEDSSALPWSINRDDYELQEVIGSGATAVVQAAYCAPKKEKVAIKRINLEKCQTSMDELLKEIQAMSQCHHPNIVSYYTSFVVKDELWLVMKLLSGGSVLDIIKHIVAKGEHKSGVLDESTIATILREVLEGLEYLHKNGQIHRDVKAGNILLGEDGSVQIADFGVSAFLATGGDITRNKVRKTFVGTPCWMAPEVMEQVRGYDFKADIWSFGITAIELATGAAPYHKYPPMKVLMLTLQNDPPSLETGVQDKEMLKKYGKSFRKMISLCLQKDPEKRPTAAELLRHKFFQKAKNKEFLQEKTLQRAPTISERAKKVRRVPGSSGRLHKTEDGGWEWSDDEFDEESEEGKAAISQLRSPRVKESISNSELFPTTDPVGTLLQVPEQISAHLPQPAGQIATQPTQVSLPPTAEPAKTAQALSSGSGSQETKIPISLVLRLRNSKKELNDIRFEFTPGRDTAEGVSQELISAGLVDGRDLVIVAANLQKIVEEPQSNRSVTFKLASGVEGSDIPDDGKLIGFAQLSIS

SEQ ID NO: 32813 - protein, 113 aa, Homo sapiens
  REGION 1..113: note = ENSP00000398356
MSEDSSALPWSINRDDYELQEVIGSGATAVVQAAYCAPKKEKVAIKRINLEKCQTSMDELLKEIQAMSQCHHPNIVSYYTSFVVKDELWLVMKLLSGVTHWRNWIALLKALFI

SEQ ID NO: 32814 - protein, 373 aa, Homo sapiens
  REGION 1..373: note = ENSP00000304767
MTEVLWPAVPNGTDAAFLAGPGSSWGNSTVASTAAVSSSFKCALTKTGFQFYYLPAVYILVFIIGFLGNSVAIWMFVFHMKPWSGISVYMFNLALADFLYVLTLPALIFYYFNKTDWIFGDAMCKLQRFIFHVNLYGSILFLTCISAHRYSGVVYPLKSLGRLKKKNAICISVLVWLIVVVAISPILFYSGTGVRKNKTITCYDTTSDEYLRSYFIYSMCTTVAMFCVPLVLILGCYGLIVRALIYKDLDNSPLRRKSIYLVIIVLTVFAVSYIPFHVMKTMNLRARLDFQTPAMCAFNDRVYATYQVTRGLASLNSCVDPILYFLAGDTFRRRLSRATRKASRRSEANLQSKSEDMTLNILPEFKQNGDTSL

SEQ ID NO: 32815 - protein, 342 aa, Homo sapiens
  REGION 1..342: note = ENSP00000307259
MQAVDNLTSAPGNTSLCTRDYKITQVLFPLLYTVLFFVGLITNGLAMRIFFQIRSKSNFIIFLKNTVISDLLMILTFPFKILSDAKLGTGPLRTFVCQVTSVIFYFTMYISISFLGLITIDRYQKTTRPFKTSNPKNLLGAKILSVVIWAFMFLLSLPNMILTNRQPRDKNVKKCSFLKSEFGLVWHEIVNYICQVIFWINFLIVIVCYTLITKELYRSYVRTRGVGKVPRKKVNVKVFIIIAVFFICFVPFHFARIPYTLSQTRDVFDCTAENTLFYVKESTLWLTSLNACLDPFIYFFLCKSFRNSLISMLKCPNSATSLSQDNRKKEQDGGDPNEETPM

SEQ ID NO: 32816 - protein, 534 aa, Homo sapiens
  REGION 1..534: note = ENSP00000307318
MIWYILIIGILLPQSLAHPGFFTSIGQMTDLIHTEKDLVTSLKDYIKAEEDKLEQIKKWAEKLDRLTSTATKDPEGFVGHPVNAFKLMKRLNTEWSELENLVLKDMSDGFISNLTIQRQYFPNDEDQVGAAKALLRLQDTYNLDTDTISKGNLPGVKHKSFLTAEDCFELGKVAYTEADYYHTELWMEQALRQLDEGEISTIDKVSVLDYLSYAVYQQGDLDKALLLTKKLLELDPEHQRANGNLKYFEYIMAKEKDVNKSASDDQSDQKTTPKKKGVAVDYLPERQKYEMLCRGEGIKMTPRRQKKLFCRYHDGNRNPKFILAPAKQEDEWDKPRIIRFHDIISDAEIEIVKDLAKPRLRRATISNPITGDLETVHYRISKSAWLSGYENPVVSRINMRIQDLTGLDVSTAEELQVANYGVGGQYEPHFDFARKDEPDAFKELGTGNRIATWLFYMSDVSAGGATVFPEVGASVWPKKGTAVFWYNLFASGEGDYSTRHAACPVLVGNKWVSNKWLHERGQEFRRPCTLSELE

SEQ ID NO: 32817 - protein, 534 aa, Homo sapiens
  REGION 1..534: note = ENSP00000362099
MIWYILIIGILLPQSLAHPGFFTSIGQMTDLIHTEKDLVTSLKDYIKAEEDKLEQIKKWAEKLDRLTSTATKDPEGFVGHPVNAFKLMKRLNTEWSELENLVLKDMSDGFISNLTIQRQYFPNDEDQVGAAKALLRLQDTYNLDTDTISKGNLPGVKHKSFLTAEDCFELGKVAYTEADYYHTELWMEQALRQLDEGEISTIDKVSVLDYLSYAVYQQGDLDKALLLTKKLLELDPEHQRANGNLKYFEYIMAKEKDVNKSASDDQSDQKTTPKKKGVAVDYLPERQKYEMLCRGEGIKMTPRRQKKLFCRYHDGNRNPKFILAPAKQEDEWDKPRIIRFHDIISDAEIEIVKDLAKPRLSRATVHDPETGKLTTAQYRVSKSAWLSGYENPVVSRINMRIQDLTGLDVSTAEELQVANYGVGGQYEPHFDFARKDEPDAFKELGTGNRIATWLFYMSDVSAGGATVFPEVGASVWPKKGTAVFWYNLFASGEGDYSTRHAACPVLVGNKWVSNKWLHERGQEFRRPCTLSELE

SEQ ID NO: 32818 - protein, 516 aa, Homo sapiens
  REGION 1..516: note = ENSP00000414464
MIWYILIIGILLPQSLAHPGFFTSIGQMTDLIHTEKDLVTSLKDYIKAEEDKLEQIKKWAEKLDRLTSTATKDPEGFVGHPVNAFKLMKRLNTEWSELENLVLKDMSDGFISNLTIQRQYFPNDEDQVGAAKALLRLQDTYNLDTDTISKGNLPGVKHKSFLTAEDCFELGKVAYTEADYYHTELWMEQALRQLDEGEISTIDKVSVLDYLSYAVYQQGDLDKALLLTKKLLELDPEHQRANGNLKYFEYIMAKEKDVNKSASDDQSDQKTTPKKKGVAVDYLPERQKYEMLCRGEGIKMTPRRQKKLFCRYHDGNRNPKFILAPAKQEDEWDKPRIIRFHDIISDAEIEIVKDLAKPRLSRATVHDPETGKLTTAQYRVSKSAWLSGYENPVVSRINMRIQDLTGLDVSTAEELQKDEPDAFKELGTGNRIATWLFYMSDVSAGGATVFPEVGASVWPKKGTAVFWYNLFASGEGDYSTRHAACPVLVGNKWVSNKWLHERGQEFRRPCTLSELE

SEQ ID NO: 32819 - protein, 534 aa, Homo sapiens; identical to SEQ ID NO: 32816
  REGION 1..534: note = ENSP00000378353

SEQ ID NO: 32820 - protein, 534 aa, Homo sapiens; identical to SEQ ID NO: 32817
  REGION 1..534: note = ENSP00000263556

SEQ ID NO: 32821 - protein, 535 aa, Homo sapiens
  REGION 1..535: note = ENSP00000384999
MKLWVSALLMAWFGVLSCVQAEFFTSIGHMTDLIYAEKELVQSLKEYILVEEAKLSKIKSWANKMEALTSKSAADAEGYLAHPVNAYKLVKRLNTDWPALEDLVLQDSAAGFIANLSVQRQFFPTDEDEIGAAKALMRLQDTYRLDPGTISRGELPGTKYQAMLSVDDCFGMGRSAYNEGDYYHTVLWMEQVLKQLDAGEEATTTKSQVLDYLSYAVFQLGDLHRALELTRRLLSLDPSHERAGGNLRYFEQLLEEEREKTLTNQTEAELATPEGIYERPVDYLPERDVYESLCRGEGVKLTPRRQKRLFCRYHHGNRAPQLLIAPFKEEDEWDSPHIVRYYDVMSDEEIERIKEIAKPKLARATVRDPKTGVLTVASYRVSKSSWLEEDDDPVVARVNRRMQHITGLTVKTAELLQVANYGVGGQYEPHFDFSRNDERDTFKHLGTGNRVATFLNYMSDVEAGGATVFPDLGAAIWPKKGTAVFWYNLLRSGEGDYRTRHAACPVLVGCKWVSNKWFHERGQEFLRPCGSTEVD

SEQ ID NO: 32822 - protein, 533 aa, Homo sapiens
  REGION 1..533: note = ENSP00000368379
MKLWVSALLMAWFGVLSCVQAEFFTSIGHMTDLIYAEKELVQSLKEYILVEEAKLSKIKSWANKMEALTSKSAADAEGYLAHPVNAYKLVKRLNTDWPALEDLVLQDSAAGFIANLSVQRQFFPTDEDEIGAAKALMRLQDTYRLDPGTISRGELPGTKYQAMLSVDDCFGMGRSAYNEGDYYHTVLWMEQVLKQLDAGEEATTTKSQVLDYLSYAVFQLGDLHRALELTRRLLSLDPSHERAGGNLRYFEQLLEEEREKTLTNQTEAELATPEGIYERPVDYLPERDVYESLCRGEGVKLTPRRQKRLFCRYHHGNRAPQLLIAPFKEEDEWDSPHIVRYYDVMSDEEIERIKEIAKPKLARATVRDPKTGVLTVASYRVSKSSWLEEDDDPVVARVNRRMQHITGLTVKTAELLQVANYGVGGQYEPHFDFSRRPFDSGLKTEGNRLATFLNYMSDVEAGGATVFPDLGAAIWPKKGTAVFWYNLLRSGEGDYRTRHAACPVLVGCKWVSNKWFHERGQEFLRPCGSTEVD

SEQ ID NO: 32823 - protein, 535 aa, Homo sapiens; identical to SEQ ID NO: 32821
  REGION 1..535: note = ENSP00000166534

SEQ ID NO: 32824 - protein, 533 aa, Homo sapiens; identical to SEQ ID NO: 32822
  REGION 1..533: note = ENSP00000353772

SEQ ID NO: 32825 - protein, 204 aa, Homo sapiens
  REGION 1..204: note = ENSP00000389523
MKLWVSALLMAWFGVLSCVQAEFFTSIGHMTDLIYAEKELVQSLKEYILVEEAKLSKIKSWANKMEALTSKSAADAEGYLAHPVNAYKLVKRLNTDWPALEDLVLQDSAAGFIANLSVQRQFFPTDEDEIGAAKALMRLQDTYRLDPGTISRGELPGTKYQAMLSVDDCFGMGRSAYNEGDYYHTVLWMEQVLKQLDAGEEATT

SEQ ID NO: 32826 - protein, 236 aa, Homo sapiens
  REGION 1..236: note = ENSP00000391257
MKRQLVTNSFLHHLLIGQKRPRNAPRTLPSVTMKLWVSALLMAWFGVLSCVQAEFFTSIGHMTDLIYAEKELVQSLKEYILVEEAKLSKIKSWANKMEALTSKSAADAEGYLAHPVNAYKLVKRLNTDWPALEDLVLQDSAAGFIANLSVQRQFFPTDEDEIGAAKALMRLQDTYRLDPGTISRGELPGTKYQAMLSVDDCFGMGRSAYNEGDYYHTVLWMEQVLKQLDAGEEATT

SEQ ID NO: 32827 - protein, 184 aa, Homo sapiens
  REGION 1..184: note = ENSP00000405406
MKLWVSALLMAWFGVLSCVQAEFFTSIGHMTDLIYAEKELVQSLKEYILVEEAKLSKIKSWANKMEALTSKSAADAEGYLAHPVNAYKLVKRLNTDWPALEDLVLQDSAAGFIANLSVQRQFFPTDEDEIGAAKALMRLQDTYRLDPGTISRGELPGTKYQAMLSVDDCFGMGRSAYNEGDYYH

SEQ ID NO: 32828 - protein, 167 aa, Homo sapiens
  REGION 1..167: note = ENSP00000378593
MKLWVSALLMAWFGVLSCVQAEFFTSIGHMTDLIYAEKELVQSLKEYILVEEAKLSKIKSWANKMEALTSKSAADAEGYLAHPVNAYKLVKRLNTDWPALEDLVLQDSAAGFIANLSVQRQFFPTDEDEIGAAKALMRLQDTYRLDPGTISRGELPGTKYQAMLSVD

SEQ ID NO: 32829 - protein, 153 aa, Homo sapiens
  REGION 1..153: note = ENSP00000413542
MKLWVSALLMAWFGVLSCVQAEFFTSIGHMTDLIYAEKELVQSLKEYILVEEAKLSKIKSWANKMEALTSKSAADAEGYLAHPVNAYKLVKRLNTDWPALEDLVLQDSAAGFIANLSVQRQFFPTDEDEIGAAKALMRLQDTYRLDPGTISRG

SEQ ID NO: 32830 - protein, 146 aa, Homo sapiens
  REGION 1..146: note = ENSP00000396495
MKLWVSALLMAWFGVLSCVQAEFFTSIGHMTDLIYAEKELVQSLKEYILVEEAKLSKIKSWANKMEALTSKSAADAEGYLAHPVNAYKLVKRLNTDWPALEDLVLQDSAAGFIANLSVQRQFFPTDEDEIGAAKALMRLQDTYRLD

SEQ ID NO: 32831 - protein, 114 aa, Homo sapiens
  REGION 1..114: note = ENSP00000403883
MKLWVSALLMAWFGVLSCVQAEFFTSIGHMTDLIYAEKELVQSLKEYILVEEAKLSKIKSWANKMEALTSKSAADAEGYLAHPVNAYKLVKRLNTDWPALEDLVLQDSAAGFIA

SEQ ID NO: 32832 - protein, 101 aa, Homo sapiens
  REGION 1..101: note = ENSP00000394953
MKLWVSALLMAWFGVLSCVQAEFFTSIGHMTDLIYAEKELVQSLKEYILVEEAKLSKIKSWANKMEALTSKSAADAEGYLAHPVNAYKLVKRLNTDWPALE

SEQ ID NO: 32833 - protein, 50 aa, Homo sapiens
  REGION 1..50: note = ENSP00000395956
MKLWVSALLMAWFGVLSCVQAEFFTSIGHMTDLIYAEKELVQSLKEYILV

SEQ ID NO: 32834 - protein, 533 aa, Homo sapiens; identical to SEQ ID NO: 32822
  REGION 1..533: note = ENSP00000368394

SEQ ID NO: 32835 - protein, 535 aa, Homo sapiens; identical to SEQ ID NO: 32821
  REGION 1..535: note = ENSP00000368398

SEQ ID NO: 32836 - protein, 814 aa, Homo sapiens
  REGION 1..814: note = ENSP00000393524
MQGSKRILRSHEIVLPPSGQVETDLALTFSLQYPHFLKREGNKLQIMLQRRKRYKNRTILGYKTLAAGSISMAEVMQHPSEGGQVLSLCSSIKEAPVKAAEIWIASLSSQPIDHEDSTMQAGPKAKSTDNYSEEEYESFSSEQEASDDAVQGQDLDEDDFDVGKPKKQRRSIQQNFKQKVVALLRRFKVSDEVLDSEQDPAEHIPEAEEDLDLLYDTLDMEHPSDSGPDMEDDDSVLSTPKPKLRPYFEGLSHSSSQTEIGSIHSARSHKEPPSPADVPEKTRSLGGRQPSDSVSDTVALGVPGPREHPGQPEDSPEAEASTLDVFTERLPPSGRITKTESLVIPSTRSEGKQAGRRGRSTSLKERQAARPQNERANSLDNERCPDARSQLQIPRKTVYDQLNHILISDDQLPENIILVNTSDWQGQFLSDVLQRHTLPVVCTCSPADVQAAFSTIVSRIQRYCNCNSQPPTPVKIAVAGAQHYLSAILRLFVEQLSHKTPDWLGYMRFLVIPLGSHPVARYLGSVDYRYNNFFQDLAWRDLFNKLEAQSAVQDTPDIVSRITQYIAGANCAHQLPIAEAMLTYKQKSPDEESSQKFIPFVGVVKVGIVEPSSATSGDSDDAAPSGSGTLSSTPPSASPAAKEASPTPPSSPSVSGGLSSPSQGVGAELMGLQVDYWTAAQPADRKRDAEKKDLPVTKNTLKCTFRSLQVSRLPSSGEAAATPTMSMTVVTKEKNKKVMFLPKKAKDKDVESKSQCIEGISRLICTARQQQNMLRVLIDGVECSDVKFFQLAAQWSSHVKHFPICIFGHSKATF

SEQ ID NO: 32837 - protein, 889 aa, Homo sapiens
  REGION 1..889: note = ENSP00000321834
MAERGRLGLPGAPGALNTPVPMNLFATWEVDGSSPSCVPRLCSLTLKKLVVFKELEKELISVVIAVKMQGSKRILRSHEIVLPPSGQVETDLALTFSLQYPHFLKREGNKLQIMLQRRKRYKNRTILGYKTLAAGSISMAEVMQHPSEGGQVLSLCSSIKEAPVKAAEIWIASLSSQPIDHEDSTMQAGPKAKSTDNYSEEEYESFSSEQEASDDAVQGQDLDEDDFDVGKPKKQRRSIVRTTSMTRQQNFKQKVVALLRRFKVSDEVLDSEQDPAEHIPEAEEDLDLLYDTLDMEHPSDSGPDMEDDDSVLSTPKPKLRPYFEGLSHSSSQTEIGSIHSARSHKEPPSPADVPEKTRSLGGRQPSDSVSDTVALGVPGPREHPGQPEDSPEAEASTLDVFTERLPPSGRITKTESLVIPSTRSEGKQAGRRGRSTSLKERQAARPQNERANSLDNERCPDARSQLQIPRKTVYDQLNHILISDDQLPENIILVNTSDWQGQFLSDVLQRHTLPVVCTCSPADVQAAFSTIVSRIQRYCNCNSQPPTPVKIAVAGAQHYLSAILRLFVEQLSHKTPDWLGYMRFLVIPLGSHPVARYLGSVDYRYNNFFQDLAWRDLFNKLEAQSAVQDTPDIVSRITQYIAGANCAHQLPIAEAMLTYKQKSPDEESSQKFIPFVGVVKVGIVEPSSATSGDSDDAAPSGSGTLSSTPPSASPAAKEASPTPPSSPSVSGGLSSPSQGVGAELMGLQVDYWTAAQPADRKRDAEKKDLPVTKNTLKCTFRSLQVSRLPSSGEAAATPTMSMTVVTKEKNKKVMFLPKKAKDKDVESKSQCIEGISRLICTARQQQNMLRVLIDGVECSDVKFFQLAAQWSSHVKHFPICIFGHSKATF

SEQ ID NO: 32838 - protein, 904 aa, Homo sapiens
  REGION 1..904: note = ENSP00000393559
MAERGRLGLPGAPGALNTPVPMNLFATWEVDGSSPSCVPRLCSLTLKKLVVFKELEKELISVVIAVKMQGSKRILRSHEIVLPPSGQVETDLALTFSLQYPHFLKREGNKLQIMLQRRKRYKNRTILGYKTLAAGSISMAEVMQHPSEGGQVLSLCSSIKEAPVKAAEIWIASLSSQPIDHEDSTMQAGPKAKSTDNYSEEEYESFSSEQEASDDAVQGQDLDEDDFDVGKPKKQRRSIVRTTSMTRQQNFKQKVVALLRRFKVSDEVLDSEQDPAEHIPEAEEDLDLLYDTLDMEHPSDSGPDMEDDDSVLSTPKPKLRPYFEGLSHSSSQTEIGSIHSARSHKEPPSPADVPEKTRSLGGRQPSDSVSDTVALGVPGPREHPGQPEDSPEAEASTLDVFTERLPPSGRITKTESLVIPSTRSEGKQAGRRGRSTSLKERQAARPQNERANSLDNERCPDARSQLQVQLQIPRKTVYDQLNHILISDDQLPENIILVNTSDWQGQFLSDVLQRHTLPVVCTCSPADVQAAFSTIVSRIQRYCNCNSQPPTPVKIAVAGAQHYLSAILRLFVEQLSHKTPDWLGYMRFLVIPLGSHPVARYLGSVDYRYNNFFQDLAWRDLFNKLEAQSAVQDTPDIVSRITQYIAGANCAHQLPIAEAMLTYKQKRKKHFHFDFTLSPDEESSQKFIPFVGVVKVGIVEPSSATSGDSDDAAPSGSGTLSSTPPSASPAAKEASPTPPSSPSVSGGLSSPSQGVGAELMGLQVDYWTAAQPADRKRDAEKKDLPVTKNTLKCTFRSLQVSRLPSSGEAAATPTMSMTVVTKEKNKKVMFLPKKAKDKDVESKSQCIEGISRLICTARQQQNMLRVLIDGVECSDVKFFQLAAQWSSHVKHFPICIFGHSKATF

SEQ ID NO: 32839 - protein, 859 aa, Homo sapiens
  REGION 1..859: note = ENSP00000449525
MAERGRLGLPGAPGALNTPVPMNLFATWEVDGSSPSCVPRLCSLTLKKLVVFKELEKELISVVIAVKMQYPHFLKREGNKLQIMLQRRKRYKNRTILGYKTLAAGSISMAEVMQHPSEGGQVLSLCSSIKEAPVKAAEIWIASLSSQPIDHEDSTMQAGPKAKSTDNYSEEEYESFSSEQEASDDAVQGQDLDEDDFDVGKPKKQRRSIVRTTSMTRQQNFKQKVVALLRRFKVSDEVLDSEQDPAEHIPEAEEDLDLLYDTLDMEHPSDSGPDMEDDDSVLSTPKPKLRPYFEGLSHSSSQTEIGSIHSARSHKEPPSPADVPEKTRSLGGRQPSDSVSDTVALGVPGPREHPGQPEDSPEAEASTLDVFTERLPPSGRITKTESLVIPSTRSEGKQAGRRGRSTSLKERQAARPQNERANSLDNERCPDARSQLQIPRKTVYDQLNHILISDDQLPENIILVNTSDWQGQFLSDVLQRHTLPVVCTCSPADVQAAFSTIVSRIQRYCNCNSQPPTPVKIAVAGAQHYLSAILRLFVEQLSHKTPDWLGYMRFLVIPLGSHPVARYLGSVDYRYNNFFQDLAWRDLFNKLEAQSAVQDTPDIVSRITQYIAGANCAHQLPIAEAMLTYKQKSPDEESSQKFIPFVGVVKVGIVEPSSATSGDSDDAAPSGSGTLSSTPPSASPAAKEASPTPPSSPSVSGGLSSPSQGVGAELMGLQVDYWTAAQPADRKRDAEKKDLPVTKNTLKCTFRSLQVSRLPSSGEAAATPTMSMTVVTKEKNKKVMFLPKKAKDKDVESKSQCIEGISRLICTARQQQNMLRVLIDGVECSDVKFFQLAAQWSSHVKHFPICIFGHSKATF

SEQ ID NO: 32840 - protein, 86 aa, Homo sapiens
  REGION 1..86: note = ENSP00000447229
MQGSKRILRSHEIVLPPSGQVETDLALTFSLQYPHFLKREGNKLQIMLQRRKRYKNRTILGYKTLAAGSISMAEVMQHPSEGGQVL

SEQ ID NO: 32841 - protein, 82 aa, Homo sapiens
  REGION 1..82: note = ENSP00000461087
MVLSQRQRDELNRAIADYLRSNGYEEAYSVFKKEAELDVNEELDKKYAGLLEKKWTSVIRLQKKVMELESKLNEAKEEFTSG

SEQ ID NO: 32842 - protein, 410 aa, Homo sapiens
  REGION 1..410: note = ENSP00000380378
MVLSQRQRDELNRAIADYLRSNGYEEAYSVFKKEAELDVNEELDKKYAGLLEKKWTSVIRLQKKVMELESKLNEAKEEFTSGGPLGQKRDPKEWIPRPPEKYALSGHRSPVTRVIFHPVFSVMVSASEDATIKVWDYETGDFERTLKGHTDSVQDISFDHSGKLLASCSADMTIKLWDFQGFECIRTMHGHDHNVSSVAIMPNGDHIVSASRDKTIKMWEVQTGYCVKTFTGHREWVRMVRPNQDGTLIASCSNDQTVRVWVVATKECKAELREHEHVVECISWAPESSYSSISEATGSETKKSGKPGPFLLSGSRDKTIKMWDVSTGMCLMTLVGHDNWVRGVLFHSGGKFILSCADDKTLRVWDYKNKRCMKTLNAHEHFVTSLDFHKTAPYVVTGSVDQTVKVWECR

SEQ ID NO: 32843 - protein, 14 aa, Homo sapiens
  REGION 1..14: note = ENSP00000460258
MVLSQRQRDELMKN

SEQ ID NO: 32844 - protein, 208 aa, Homo sapiens
  REGION 1..208: note = ENSP00000460591
SADMTIKLWDFQGFECIRTMHGHDHNVSSVAIMPNGDHIVSASRDKTIKMWEVQTGYCVKTFTGHREWVRMVRPNQDGTLIASCSNDQTVRVWVVATKECKAELREHEHVVECISWAPESSYSSISEATGSEVGHDNWVRGVLFHSGGKFILSCADDKTLRVWDYKNKRCMKTLNAHEHFVTSLDFHKTAPYVVTGSVDQTVKVWECR

SEQ ID NO: 32845 - protein, 254 aa, Homo sapiens
  REGION 1..254: note = ENSP00000326519
MSLARGHGDTAASTAAPLSEEGEVTSGLQALAVEDTGGPSASAGKAEDEGEGGREETEREGSGGEEAQGEVPSAGGEEPAEEDSEDWCVPCSDEEVELPADGQPWMPPPSEIQRLYELLAAHGTLELQAEILPRRPPTPEAQSEEERSDEEPEAKEEEEEKPHMPTEFDFDDEPVTPKDSLIDRRRTPGSSARSQKREARLDKVLSDMKRHKKLEEQILRTGRDLFSLDSEDPSPASPPLRSSGSSLFPRQRKY

SEQ ID NO: 32846 - protein, 719 aa, Homo sapiens
  REGION 1..719: note = ENSP00000367679
MFGKKKKKIEISGPSNFEHRVHTGFDPQEQKFTGLPQQWHSLLADTANRPKPMVDPSCITPIQLAPMKTIVRGNKPCKETSINGLLEDFDNISVTRSNSLRKESPPTPDQGASSHGPGHAEENGFITFSQYSSESDTTADYTTEKYREKSLYGDDLDPYYRGSHAAKQNGHVMKMKHGEAYYSEVKPLKSDFARFSADYHSHLDSLSKPSEYSDLKWEYQRASSSSPLDYSFQFTPSRTAGTSGCSKESLAYSESEWGPSLDDYDRRPKSSYLNQTSPQPTMRQRSRSGSGLQEPMMPFGASAFKTHPQGHSYNSYTYPRLSEPTMCIPKVDYDRAQMVLSPPLSGSDTYPRGPAKLPQSQSKSGYSSSSHQYPSGYHKATLYHHPSLQSSSQYISTASYLSSLSLSSSTYPPPSWGSSSDQQPSRVSHEQFRAALQLVVSPGDPREYLANFIKIGEGSTGIVCIATEKHTGKQVAVKKMDLRKQQRRELLFNEVVIMRDYHHDNVVDMYSSYLVGDELWVVMEFLEGGALTDIVTHTRMNEEQIATVCLSVLRALSYLHNQGVIHRDIKSDSILLTSDGRIKLSDFGFCAQVSKEVPKRKSLVGTPYWMAPEVISRLPYGTEVDIWSLGIMVIEMIDGEPPYFNEPPLQAMRRIRDSLPPRVKDLHKVSSVLRGFLDLMLVREPSQRATAQELLGHPFLKLAGPPSCIVPLMRQYRHH

SEQ ID NO: 32847 - protein, 719 aa, Homo sapiens; identical to SEQ ID NO: 32846
  REGION 1..719: note = ENSP00000322957

SEQ ID NO: 32848 - protein, 719 aa, Homo sapiens; identical to SEQ ID NO: 32846
  REGION 1..719: note = ENSP00000367686

SEQ ID NO: 32849 - protein, 379 aa, Homo sapiens
  REGION 1..379: note = ENSP00000363656
MEMAEAELHKERLQAIAEKRKRQTEIEGKRQQLDEQILLLQHSKSKVLREKWLLQGIPAGTAEEEEARRRQSEEDEFRVKQLEDNIQRLEQEIQTLESEESQISAKEQIILEKLKETEKSFKDFQKGFSSTDGAVYAMEINVEKDKQTGETKILSTSTIGPEGVHQKGVKVYDDGTKVVYEVRSGGTVVENGVHKLSTKDVEELIQKAGQSSLGGGHVSERTVIADGSLSHPKEHMLCKEAKLEMVHKSRKDHSSGNPGQQAQAPSAAGPEANLDQPVTMIFMGYQNIEDEEETKKVLGYDETIKAELVLIDEDDEKSLREKTVTDVSTIDGNAAELVSGRPVSDTTEPSSPEGKEESLATEPAPGTQKKKRCQCCVVM

SEQ ID NO: 32850 - protein, 377 aa, Homo sapiens
  REGION 1..377: note = ENSP00000417525
MAEAELHKERLQAIAEKRKRQTEIEGKRQQLDEQILLLQHSKSKVLREKWLLQGIPAGTAEEEEARRRQSEEDEFRVKQLEDNIQRLEQEIQTLESEESQISAKEQIILEKLKETEKSFKDFQKGFSSTDGAVYAMEINVEKDKQTGETKILSTSTIGPEGVHQKGVKVYDDGTKVVYEVRSGGTVVENGVHKLSTKDVEELIQKAGQSSLGGGHVSERTVIADGSLSHPKEHMLCKEAKLEMVHKSRKDHSSGNPGQQAQAPSAAGPEANLDQPVTMIFMGYQNIEDEEETKKVLGYDETIKAELVLIDEDDEKSLREKTVTDVSTIDGNAAELVSGRPVSDTTEPSSPEGKEESLATEPAPGTQKKKRCQCCVVM

SEQ ID NO: 32851 - protein, 411 aa, Homo sapiens
  REGION 1..411: note = ENSP00000323805
MAEAELHKERLQAIAEKRKRQTEIEGKRQQLDEQILLLQHSKSKVLREKWLLQGIPAGTAEEEEARRRQSEEDEFRVKQLEDNIQRLEQEIQTLESEESQISAKEQIILEKLKETEKSFKDFQKGFSSTDGDAVNYISSQLPDLPILCSRTAEPSPGQDGTSRAAAVYAMEINVEKDKQTGETKILSTSTIGPEGVHQKGVKVYDDGTKVVYEVRSGGTVVENGVHKLSTKDVEELIQKAGQSSLGGGHVSERTVIADGSLSHPKEHMLCKEAKLEMVHKSRKDHSSGNPGQQAQAPSAAGPEANLDQPVTMIFMGYQNIEDEEETKKVLGYDETIKAELVLIDEDDEKSLREKTVTDVSTIDGNAAELVSGRPVSDTTEPSSPEGKEESLATEPAPGTQKKKRCQCCVVM

SEQ ID NO: 32852 - protein, 180 aa, Homo sapiens
  REGION 1..180: note = ENSP00000419747
MEKRKRQTEIEGKRQQLDEQILLLQHSKSKVLREKWLLQGIPAGTAEEEEARRRQSEEDEFRVKQLEDNIQRLEQEIQTLESEESQISAKEQIILEKLKETEKSFKDFQKGFSSTDGDAVNYISSQLPDLPILCSRTAEPSPGQDGTSRAAAVYAMEINVEKDKQTGETKILSTSTIGPE

SEQ ID NO: 32853 - protein, 29 aa, Homo sapiens
  REGION 1..29: note = ENSP00000421569
MAGRVPSLLVLLVFPSSCLAFRSPLSVFK

SEQ ID NO: 32854 - protein, 25 aa, Homo sapiens
  REGION 1..25: note = ENSP00000420851
MAGRVPSLLVLLVFPSSCLAFRSPL

SEQ ID NO: 32855 - protein, 68 aa, Homo sapiens
  REGION 1..68: note = ENSP00000426448
MAGRVPSLLVLLVFPSSCLAFRSPLSVFKRFKETTRPFSNECLGTTRPVVPIDSSDFALDIRMPGVTP

SEQ ID NO: 32856 - protein, 42 aa, Homo sapiens
  REGION 1..42: note = ENSP00000421823
MAGRVPSLLVLLVFPSSCLAFRSPLSVFKRFKETTRPFSNEC

SEQ ID NO: 32857 - protein, 28 aa, Homo sapiens
  REGION 1..28: note = ENSP00000423611
MAGRVPSLLVLLVFPSSCLAFRSPLSVF

SEQ ID NO: 32858 - protein, 53 aa, Homo sapiens
  REGION 1..53: note = ENSP00000423763
MAGRVPSLLVLLVFPSSCLAFRSPLSVFKRFKETTRPFSNECLGTTRPVVPID

SEQ ID NO: 32859 - protein, 973 aa, Homo sapiens [sequence omitted]

SEQ ID NO: 32860 - protein, 887 aa, Homo sapiens
  REGION 1..887: note = ENSP00000282992
MAGRVPSLLVLLVFPSSCLAFRSPLSVFKRFKETTRPFSNECLGTTRPVVPIDSSDFALDIRMPGVTPKQSDTYFCMSMRIPVDEEAFVIDFKPRASMDTVHHMLLFGCNMPSSTGSYWFCDEGTCTDKANILYAWARNAPPTRLPKGVGFRVGGETGSKYFVLQVHYGDISAFRDNNKDCSGVSLHLTRLPQPLIAGMYLMMSVDTVIPAGEKVVNSDISCHYKNYPMHVFAYRVHTHHLGKVVSGYRVRNGQWTLIGRQSPQLPQAFYPVGHPVDVSFGDLLAARCVFTGEGRTEATHIGGTSSDEMCNLYIMYYMEAKHAVSFMTCTQNVAPDMFRTIPPEANIPIPVKSDMVMMHEHHKETEYKDKIPLLQQPKREEEEVLDQGDFYSLLSKLLGEREDVVHVHKYNPTEKAESESDLVAEIANVVQKKDLGRSDAREGAEHERGNAILVRDRIHKFHRLVSTLRPPESRVFSLQQPPPGEGTWEPEHTGDFHMEEALDWPGVYLLPGQVSGVALDPKNNLVIFHRGDHVWDGNSFDSKFVYQQIGLGPIEEDTILVIDPNNAAVLQSSGKNLFYLPHGLSIDKDGNYWVTDVALHQVFKLDPNNKEGPVLILGRSMQPGSDQNHFCQPTDVAVDPGTGAIYVSDGYCNSRIVQFSPSGKFITQWGEESSGSSPLPGQFTVPHSLALVPLLGQLCVADRENGRIQCFKTDTKEFVREIKHSSFGRNVFAISYIPGLLFAVNGKPHFGDQEPVQGFVMNFSNGEIIDIFKPVRKHFDMPHDIVASEDGTVYIGDAHTNTVWKFTLTEKLEHRSVKKAGIEVQEIKGKGSGGLNLGNFFASRKGYSRKGFDRLSTEGSDQEKEDDGSESEEEYSAPLPALAPSSS

SEQ ID NO: 32861 - protein, 175 aa, Homo sapiens
  REGION 1..175: note = ENSP00000302544
MAGRVPSLLVLLVFPSSCLAFRSPLSVFKRFKETTRPFSNECLGTTRPVVPIDSSDFALDIRMPGVTPKQLTSSLEPAWILSITCYFLDAICLHPLEVTGFVMKEPVQIKPIFCMPGREMLPLPGSPKVLDSELEERLEVNTLYYRYTMGILVLLEIITRTVLVCPYTSHVCHSL

SEQ ID NO: 32862 - protein, 866 aa, Homo sapiens
  REGION 1..866: note = ENSP00000314638
MAGRVPSLLVLLVFPSSCLAFRSPLSVFKRFKETTRPFSNECLGTTRPVVPIDSSDFALDIRMPGVTPKQSDTYFCMSMRIPVDEEAFVIDFKPRASMDTVHHMLLFGCNMPSSTGSYWFCDEGTCTDKANILYAWARNAPPTRLPKGVGFRVGGETGSKYFVLQVHYGDISAFRDNNKDCSGVSLHLTRLPQPLIAGMYLMMSVDTVIPAGEKVVNSDISCHYKNYPMHVFAYRVHTHHLGKVVSGYRVRNGQWTLIGRQSPQLPQAFYPVGHPVDVSFGDLLAARCVFTGEGRTEATHIGGTSSDEMCNLYIMYYMEAKHAVSFMTCTQNVAPDMFRTIPPEANIPIPVKSDMVMMHEHHKETEYKDKIPLLQQPKREEEEVLDQDFHMEEALDWPGVYLLPGQVSGVALDPKNNLVIFHRGDHVWDGNSFDSKFVYQQIGLGPIEEDTILVIDPNNAAVLQSSGKNLFYLPHGLSIDKDGNYWVTDVALHQVFKLDPNNKEGPVLILGRSMQPGSDQNHFCQPTDVAVDPGTGAIYVSDGYCNSRIVQFSPSGKFITQWGEESSGSSPLPGQFTVPHSLALVPLLGQLCVADRENGRIQCFKTDTKEFVREIKHSSFGRNVFAISYIPGLLFAVNGKPHFGDQEPVQGFVMNFSNGEIIDIFKPVRKHFDMPHDIVASEDGTVYIGDAHTNTVWKFTLTEKLEHRSVKKAGIEVQEIKEAEAVVETKMENKPTSSELQKMQEKQKLIKEPGSGVPVVLITTLLVIPVVVLLAIAIFIRWKKSRAFGDSEHKLETSSGRVLGRFRGKGSGGLNLGNFFASRKGYSRKGFDRLSTEGSDQEKEDDGSESEEEYSAPLPALAPSSS

SEQ ID NO: 32863 - protein, 974 aa, Homo sapiens
  REGION 1..974: note = ENSP00000306100
MAGRVPSLLVLLVFPSSCLAFRSPLSVFKRFKETTRPFSNECLGTTRPVVPIDSSDFALDIRMPGVTPKQSDTYFCMSMRIPVDEEAFVIDFKPRASMDTVHHMLLFGCNMPSSTGSYWFCDEGTCTDKANILYAWARNAPPTRLPKGVGFRVGGETGSKYFVLQVHYGDISAFRDNNKDCSGVSLHLTRLPQPLIAGMYLMMSVDTVIPAGEKVVNSDISCHYKNYPMHVFAYRVHTHHLGKVVSGYRVRNGQWTLIGRQSPQLPQAFYPVGHPVDVSFGDLLAARCVFTGEGRTEATHIGGTSSDEMCNLYIMYYMEAKHAVSFMTCTQNVAPDMFRTIPPEANIPIPVKSDMVMMHEHHKETEYKDKIPLLQQPKREEEEVLDQGDFYSLLSKLLGEREDVVHVHKYNPTEKAESESDLVAEIANVVQKKDLGRSDAREGAEHERGNAILVRDRIHKFHRLVSTLRPPESRVFSLQQPPPGEGTWEPEHTGDFHMEEALDWPGVYLLPGQVSGVALDPKNNLVIFHRGDHVWDGNSFDSKFVYQQIGLGPIEEDTILVIDPNNAAVLQSSGKNLFYLPHGLSIDKDGNYWVTDVALHQVFKLDPNNKEGPVLILGRSMQPGSDQNHFCQPTDVAVDPGTGAIYVSDGYCNSRIVQFSPSGKFITQWGEESSGSSPLPGQFTVPHSLALVPLLGQLCVADRENGRIQCFKTDTKEFVREIKHSSFGRNVFAISYIPGLLFAVNGKPHFGDQEPVQGFVMNFSNGEIIDIFKPVRKHFDMPHDIVASEDGTVYIGDAHTNTVWKFTLTEKLEHRSVKKAGIEVQEIKEAEAVVETKMENKPTSSELQKMQEKQKLIKEPGSGVPVVLITTLLVIPVVVLLAIAIFIRWKKSRAFGADSEHKLETSSGRVLGRFRGKGSGGLNLGNFFASRKGYSRKGFDRLSTEGSDQEKEDDGSESEEEYSAPLPALAPSSS

SEQ ID NO: 32864 - protein, 905 aa, Homo sapiens
  REGION 1..905: note = ENSP00000403461
MAGRVPSLLVLLVFPSSCLAFRSPLSVFKRFKETTRPFSNECLGTTRPVVPIDSSDFALDIRMPGVTPKQSDTYFCMSMRIPVDEEAFVIDFKPRASMDTVHHMLLFGCNMPSSTGSYWFCDEGTCTDKANILYAWARNAPPTRLPKGVGFRVGGETGSKYFVLQVHYGDISAFRDNNKDCSGVSLHLTRLPQPLIAGMYLMMSVDTVIPAGEKVVNSDISCHYKNYPMHVFAYRVHTHHLGKVVSGYRVRNGQWTLIGRQSPQLPQAFYPVGHPVDVSFGDLLAARCVFTGEGRTEATHIGGTSSDEMCNLYIMYYMEAKHAVSFMTCTQNVAPDMFRTIPPEANIPIPVKSDMVMMHEHHKETEYKDKIPLLQQPKREEEEVLDQGDFYSLLSKLLGEREDVVHVHKYNPTEKAESESDLVAEIANVVQKKDLGRSDAREGAEHERGNAILVRDRIHKFHRLVSTLRPPESRVFSLQQPPPGEGTWEPEHTGDFHMEEALDWPGVYLLPGQVSGVALDPKNNLVIFHRGDHVWDGNSFDSKFVYQQIGLGPIEEDTILVIDPNNAAVLQSSGKNLFYLPHGLSIDKDGNYWVTDVALHQVFKLDPNNKEGPVLILGRSMQPGSDQNHFCQPTDVAVDPGTGAIYVSDGYCNSRIVQFSPSGKFITQWGEESSGSSPLPGQFTVPHSLALVPLLGQLCVADRENGRIQCFKTDTKEFVREIKHSSFGRNVFAISYIPGLLFAVNGKPHFGDQEPVQGFVMNFSNGEIIDIFKPVRKHFDMPHDIVASEDGTVYIGDAHTNTVWKFTLTEKLEHRSVKKAGIEVQEIKDSEHKLETSSGRVLGRFRGKGSGGLNLGNFFASRKGYSRKGFDRLSTEGSDQEKEDDGSESEEEYSAPLPALAPSSS

SEQ ID NO: 32865 - protein, 679 aa, Homo sapiens
  REGION 1..679: note = ENSP00000369125
  VARIANT 1: note = Any amino acid
XMHVFAYRVHTHHLGKVVSGYRVRNGQWTLIGRQSPQLPQAFYPVGHPVDVSFGDLLAARCVFTGEGRTEATHIGGTSSDEMCNLYIMYYMEAKHAVSFMTCTQNVAPDMFRTIPPEANIPIPVKSDMVMMHEHHKETEYKDKIPLLQQPKREEEEVLDQGDFYSLLSKLLGEREDVVHVHKYNPTEKAESESDLVAEIANVVQKKDLGRSDAREGAEHERGNAILVRDRIHKFHRLVSTLRPPESRVFSLQQPPPGEGTWEPEHTGDFHMEEALDWPGVYLLPGQVSGVALDPKNNLVIFHRGDHVWDGNSFDSKFVYQQIGLGPIEEDTILVIDPNNAAVLQSSGKNLFYLPHGLSIDKDGNYWVTDVALHQVFKLDPNNKEGPVLILGRSMQPGSDQNHFCQPTDVAVDPGTGAIYVSDGYCNSRIVQFSPSGKFITQWGEESSGSSPLPGQFTVPHSLALVPLLGQLCVADRENGRIQCFKTDTKEFVREIKHSSFGRNVFAISYIPGLLFAVNGKPHFGDQEPVQGFVMNFSNGEIIDIFKPVRKHFDMPHDIVASEDGTVYIGDAHTNTVWKFTLTEKLEHRSVKKAGIEVQEIKADSEHKLETSSGRVLGRFRGKGSGGLNLGNFFASRKGYSRKGFDRLSTEGSDQEKEDDGSESEEEYSAPLPALAPSSS

SEQ ID NO: 32866 - protein, 250 aa, Homo sapiens
  REGION 1..250: note = ENSP00000424203
  VARIANT 1: note = Any amino acid
XRIQCFKTDTKEFVREIKHSSFGRNVFAISYIPGLLFAVNGKPHFGDQEPVQGFVMNFSNGEIIDIFKPVRKHFDMPHDIVASEDGTVYIGDAHTNTVWKFTLTEKLEHRSVKKAGIEVQEIKEAEAVVETKMENKPTSSELQKMQEKQKLIKEPGSGVPVVLITTLLVIPVVVLLAIAIFIRWKKSRAFGGKGSGGLNLGNFFASRKGYSRKGFDRLSTEGSDQEKEDDGSESEEEYSAPLPALAPSSS

SEQ ID NO: 32867 - protein, 643 aa, Homo sapiens
  REGION 1..643: note = ENSP00000159647
MHHLLEQSADMATALLAGEKLRELILPGAQDDKAGALAALLLQLKLELPFDRVVTIGTVLVPILLVTLVFTKNFAEEPIYCYTPHNFTRDQALYARGYCWTELRDALPGVDASLWPSLFEHKFLPYALLAFAAIMYVPALGWEFLASTRLTSELNFLLQEIDNCYHRAAEGRAPKIEKQIQSKGPGITEREKREIIENAEKEKSPEQNLFEKYLERRGRSNFLAKLYLARHVLILLLSAVPISYLCTYYATQKQNEFTCALGASPDGAAGAGPAVRVSCKLPSVQLQRIIAGVDIVLLCVMNLIILVNLIHLFIFRKSNFIFDKLHKVGIKTRRQWRRSQFCDINILAMFCNENRDHIKSLNRLDFITNESDLMYDNVVRQLLAALAQSNHDATPTVRDSGVQTVDPSANPAEPDGAAEPPVVKRPRKKMKWIPTSNPLPQPFKEPLAIMRVENSKAEKPKPARRKTATDTLIAPLLDRSAHHYKGGGGDPGPGPAPAPAPPPAPDKKHARHFSLDVHPYILGTKKAKAEAVPAALPASRSQEGGFLSQAEDCGLGLAPAPIKDAPLPEKEIPYPTEPARAGLPSGGPFHVRSPPAAPAVAPLTPASLGKAEPLTILSRNATHPLLHINTLSSSPPSTSRERS

SEQ ID NO: 32868 - protein, 677 aa, Homo sapiens
  REGION 1..677: note = ENSP00000379183
MHHLLEQSADMATALLAGEKLRELILPGAQDDKAGALAALLLQLKLELPFDRVVTIGTVLVPILLVTLVFTKNFAEEPIYCYTPHNFTRDQALYARGYCWTELRDALPGVDASLWPSLFEHKFLPYALLAFAAIMYVPALGWEFLASTRLTSELNFLLQEIDNCYHRAAEGRAPKIEKQIQSKGPGITEREKREIIENAEKEKSPEQNLFEKYLERRGRSNFLAKLYLARHVLILLLSAVPISYLCTYYATQKQNEFTCALGASPDGAAGAGPAVRVSCKLPSVQLQRIIAGVDIVLLCVMNLIILVNLIHLFIFRKSNFIFDKLHKVGIKTRRQWRRSQFCDINILAMFCNENRDHIKSLNRLDFITNESDLMYDNVVRQLLAALAQSNHDATPTVRDSGVQTVDPSANPAEPDGAAEPPVVKRPRKKMKWIPTSNPLPQPFKEPLAIMRVENSKAEKPKPARRKTATDTLIAPLLDRSAHHYKGGGGDPGPGPAPAPAPPPAPDKKHARHFSLDVHPYILGTKKAKAEAVPAALPASRSQEGGFLSQAEDCGLGLAPAPIKDAPLPEKEIPYPTEPARAGLPSGGPFHVRSPPAAPAVAPLTPASLGKAEPLTILSRNATHPLLHINTLYEAREEEDGGPRLPQDVGDLIAIPAPQQILIATFDEPRTVVSTVEF

SEQ ID NO: 32869 - protein, 77 aa, Homo sapiens
  REGION 1..77: note = ENSP00000384148
MATALLAGEKLRELILPGAQDDKAGALAALLLQLKLELPFDRVVTIGTVLVPILLVTLVFTKNFAGWTLFSGSWDWL

SEQ ID NO: 32870 - protein, 273 aa, Homo sapiens
  REGION 1..273: note = ENSP00000321804
MAFLAGPRLLDWASSPPHLQFNKFVLTGYRPASSGSGCLRSLFYLHNELGNIYTHGLALLGFLVLVPMTMPWGQLGKDGWLGGTHCVACLAPPAGSVLYHLFMCHQGGSAVYARLLALDMCGVCLVNTLGALPIIHCTLACRPWLRPAALVGYTVLSGVAGWRALTAPSTSARLRAFGWQAAARLLVFGARGVGLGSGAPGSLPCYLRMDALALLGGLVNVARLPERWGPGRFDYWGNSHQIMHLLSVGSILQLHAGVVPDLLWAAHHACPRD

SEQ ID NO: 32871 - protein, 234 aa, Homo sapiens
  REGION 1..234: note = ENSP00000293978
MAFLAGPRLLDWASSPPHLQFNKFVLTGYRPASSGSGCLRSLFYLHNELGNIYTHGSVLYHLFMCHQGGSAVYARLLALDMCGVCLVNTLGALPIIHCTLACRPWLRPAALVGYTVLSGVAGWRALTAPSTSARLRAFGWQAAARLLVFGARGVGLGSGAPGSLPCYLRMDALALLGGLVNVARLPERWGPGRFDYWGNSHQIMHLLSVGSILQLHAGVVPDLLWAAHHACPRD

SEQ ID NO: 32872 - protein, 206 aa, Homo sapiens
  REGION 1..206: note = ENSP00000460326
MTMPWGQLGKDGWLGGTHCVACLAPPAGSVLYHLFMCHQGGSAVYARLLALDMCGVCLVNTLGALPIIHCTLACRPWLRPAALVGYTVLSGVAGWRALTAPSTSARLRAFGWQAAARLLVFGARGVGLGSGAPGSLPCYLRMDALALLGGLVNVARLPERWGPGRFDYWGNSHQIMHLLSVGSILQLHAGVVPDLLWAAHHACPRD

SEQ ID NO: 32873 - protein, 199 aa, Homo sapiens
  REGION 1..199: note = ENSP00000459418
MAFLAGPRLLDWASSPPHLQFNKFVLTGYRPASSGSGCLRSLFYLHNELGNIYTHGALPIIHCTLACRPWLRPAALVGYTVLSGVAGWRALTAPSTSARLRAFGWQAAARLLVFGARGVGLGSGAPGSLPCYLRMDALALLGGLVNVARLPERWGPGRFDYWGNSHQIMHLLSVGSILQLHAGVVPDLLWAAHHACPRD

SEQ ID NO: 32874 - protein, 206 aa, Homo sapiens; identical to SEQ ID NO: 32872
  REGION 1..206: note = ENSP00000458683

SEQ ID NO: 32875 - protein, 344 aa, Homo sapiens
  REGION 1..344: note = ENSP00000292291
MLSLKLPQLLQVHQVPRVFWEDGIMSGYRRPTSSALDCVLSSFQMTNETVNIWTHFLPTWYFLWRLLALAGGPGFRAEPYHWPLLVFLLPACLYPFASCCAHTFSSMSPRMRHICYFLDYGALSLYSLGCAFPYAAYSMPASWLHGHLHQFFVPAAALNSFLCTGLSCYSRFLELESPGLSKVLRTGAFAYPFLFDNLPLFYRLGLCWGRGHGCGQEALSTSHGYHLFCALLTGFLFASHLPERLAPGRFDYIGHSHQLFHICAVLGTHFQLEAVLADMGSRRAWLATQEPALGLAGTVATLVLAAAGNLLIIAAFTATLLRAPSTCPLLQGGPLEGGTQAKQQ

SEQ ID NO: 32876 - protein, 351 aa, Homo sapiens
  REGION 1..351: note = ENSP00000338330
MSPRMRHICYFLDYGALSLYSLGCAFPYAAYSMPASWLHGHLHQFFVPAAALNSFLCTGLSCYSRFLELESPGLSKVLRTGAFAYPFLFDNLPLFYRLGLCWGRGHGCGQEALSTSHGYHLFCALLTGFLFASHLPERLAPGRFDYIGEGTPGPAREEAGADAFPEHRMNWATATSYSTSVQCWAPTSSWRQCWLIWDHAEPGWPHRNLPWAWQAQWPHWSWLQLGTYSLLLLSQPPCFGPPVHALCCRVAHWRGVPRPNNSEAPSLTLSWRGQRPGPSADEEPRFGPNQVGTHLSLEPTGAEERGHRREGREEEGCLGGLAECERDREGALDGSGRSAEGLRGEMHACPG

SEQ ID NO: 32877 - protein, 363 aa, Homo sapiens
  REGION 1..363: note = ENSP00000341926
TLPPSAWLAAALDSARGALGLLTHQLRSTHQALGVLGRWHHVWLPPPHQLGFGLCPQLLPDDQRDGQHLDSLPAHLVRGGSAPGRGLELRGGTQAGRDRPGPRAAAAVAGVRGGLSTRPPQVLPVAAPGAGGRPRLPCGAVPLAAAGLPAARLPLPLRVVLRAHLQLHVAPHAPHLLLPRLRRAQPLQSGFLELESPGLSKVLRTGAFAYPFLFDNLPLFYRLGLCWGRGHGCGQEALSTSHGYHLFCALLTGFLFASHLPERLAPGRFDYIGHSHQLFHICAVLGTHFQLEAVLADMGSRRAWLATQEPALGLAGTVATLVLAAAGNLLIIAAFTATLLRAPSTCPLLQGGPLEGGTQAKQQ

SEQ ID NO: 32878 - protein, 320 aa, Homo sapiens
  REGION 1..320: note = ENSP00000357253
MSGYRRPTSSALDCVLSSFQMTNETVNIWTHFLPTWYFLWRLLALAGGPGFRAEPYHWPLLVFLLPACLYPFASCCAHTFSSMSPRMRHICYFLDYGALSLYSLGCAFPYAAYSMPASWLHGHLHQFFVPAAALNSFLCTGLSCYSRFLELESPGLSKVLRTGAFAYPFLFDNLPLFYRLGLCWGRGHGCGQEALSTSHGYHLFCALLTGFLFASHLPERLAPGRFDYIGHSHQLFHICAVLGTHFQLEAVLADMGSRRAWLATQEPALGLAGTVATLVLAAAGNLLIIAAFTATLLRAPSTCPLLQGGPLEGGTQAKQQ

SEQ ID NO: 32879 - protein, 211 aa, Homo sapiens
  REGION 1..211: note = ENSP00000485607
MATISSARCSLASSSPPTCLKGWHQDALITSATATSYSTSVQCWAPTSSWRQCWLIWDHAEPGWPHRNLPWAWQAQWPHWSWLQLGTYSLLLLSQPPCFGPPVHALCCRVAHWRGVPRPNNSEAPSLTLSWRGQRPGPSADEEPRFGPNQVGTHLSLEPTGAEERGHRREGREEEGCLGGLAECERDREGALDGSGRSAEGLRGEMHACPG

SEQ ID NO: 32880 - protein, 211 aa, Homo sapiens; identical to SEQ ID NO: 32879
  REGION 1..211: note = ENSP00000479864

SEQ ID NO: 32881 - protein, 341 aa, Homo sapiens
  REGION 1..341: note = ENSP00000349474
MLSLKLPQLLQVHQVFWEDGIMSGYRRPTSSALDCVLSSFQMTNETVNIWTHFLPTWYFLWRLLALAGGPGFRAEPYHWPLLVFLLPACLYPFASCCAHTFSSMSPRMRHICYFLDYGALSLYSLGCAFPYAAYSMPASWLHGHLHQFFVPAAALNSFLCTGLSCYSRFLELESPGLSKVLRTGAFAYPFLFDNLPLFYRLGLCWGRGHGCGQEALSTSHGYHLFCALLTGFLFASHLPERLAPGRFDYIGHSHQLFHICAVLGTHFQLEAVLADMGSRRAWLATQEPALGLAGTVATLVLAAAGNLLIIAAFTATLLRAPSTCPLLQGGPLEGGTQAKQQ

SEQ ID NO: 32882 - protein, 211 aa, Homo sapiens; identical to SEQ ID NO: 32879
  REGION 1..211: note = ENSP00000443167

SEQ ID NO: 32883 - protein, 283 aa, Homo sapiens
  REGION 1..283: note = ENSP00000482685
MPPTPCRPPGCTATCTSSLCLPPHSTPSCAPASPATPVSWSWKALGSVRSSAQEPSPIHSCSTTSHSFIGLAPGRFDYIGEGTPGPAREEAGADAFPEHRMNWATATSYSTSVQCWAPTSSWRQCWLIWDHAEPGWPHRNLPWAWQAQWPHWSWLQLGTYSLLLLSQPPCFGPPVHALCCRVAHWRGVPRPNNSEAPSLTLSWRGQRPGPSADEEPRFGPNQVGTHLSLEPTGAEERGHRREGREEEGCLGGLAECERDREGALDGSGRSAEGLRGEMHACPG

SEQ ID NO: 32884 - protein, 1356 aa, Homo sapiens
  REGION 1..1356: note = ENSP00000363921
MKVTVCFGRTRVVVPCGDGHMKVFSLIQQAVTRYRKAIAKDPNYWIQVHRLEHGDGGILDLDDILCDVADDKDRLVAVFDEQDPHHGGDGTSASSTGTQSPEIFGSELGTNNVSAFQPYQATSEIEVTPSVLRANMPLHVRRSSDPALIGLSTSVSDSNFSSEEPSRKNPTRWSTTAGFLKQNTAGSPKTCDRKKDENYRSLPRDTSNWSNQFQRDNARSSLSASHPMVGKWLEKQEQDEDGTEEDNSRVEPVGHADTGLEHIPNFSLDDMVKLVEVPNDGGPLGIHVVPFSARGGRTLGLLVKRLEKGGKAEHENLFRENDCIVRINDGDLRNRRFEQAQHMFRQAMRTPIIWFHVVPAANKEQYEQLSQSEKNNYYSSRFSPDSQYIDNRSVNSAGLHTVQRAPRLNHPPEQIDSHSRLPHSAHPSGKPPSAPASAPQNVFSTTVSSGYNTKKIGKRLNIQLKKGTEGLGFSITSRDVTIGGSAPIYVKNILPRGAAIQDGRLKAGDRLIEVNGVDLVGKSQEEVVSLLRSTKMEGTVSLLVFRQEDAFHPRELNAEPSQMQIPKETKAEDEDIVLTPDGTREFLTFEVPLNDSGSAGLGVSVKGNRSKENHADLGIFVKSIINGGAASKDGRLRVNDQLIAVNGESLLGKTNQDAMETLRRSMSTEGNKRGMIQLIVARRISKCNELKSPGSPPGPELPIETALDDRERRISHSLYSGIEGLDESPSRNAALSRIMGESGKYQLSPTVNMPQDDTVIIEDDRLPVLPPHLSDQSSSSSHDDVGFVTADAGTWAKAAISDSADCSLSPDVDPVLAFQREGFGRQSMSEKRTKQFSDASQLDFVKTRKSKSMDLGIADETKLNTVDDQKAGSPSRDVGPSLGLKKSSSLESLQTAVAEVTLNGDIPFHRPRPRIIRGRGCNESFRAAIDKSYDKPAVDDDDEGMETLEEDTEESSRSGRESVSTASDQPSHSLERQMNGNQEKGDKTDRKKDKTGKEKKKDRDKEKDKMKAKKGMLKGLGDMFRFGKHRKDDKIEKTGKIKIQESFTSEEERIRMKQEQERIQAKTREFRERQARERDYAEIQDFHRTFGCDDELMYGGVSSYEGSMALNARPQSPREGHMMDALYAQVKKPRNSKPSPVDSNRSTPSNHDRIQRLRQEFQQAKQDEDVEDRRRTYSFEQPWPNARPATQSGRHSVSVEVQMQRQRQEERESSQQAQRQYSSLPRQSRKNASSVSQDSWEQNYSPGEGFQSAKENPRYSSYQGSRNGYLGGHGFNARVMLETQELLRQEQRRKEQQMKKQPPSEGPSNYDSYKKVQDPSYAPPKGPFRQDVPPSPSQVARLNRLQTPEKGRPFYS

SEQ ID NO: 32885 - protein, 1353 aa, Homo sapiens
  REGION 1..1353: note = ENSP00000363920
MKVTVCFGRTRVVVPCGDGHMKVFSLIQQAVTRYRKAIAKDPNYWIQVHRLEHGDGGILDLDDILCDVADDKDRLVAVFDEQDPHHGGDGTSASSTGTQSPEIFGSELGTNNVSAFQPYQATSEIEVTPSVLRANMPLHVRRSSDPALIGLSTSVSDSNFSSEEPSRKNPTRWSTTAGFLKQNTAGSPKTCDRKKDENYRSLPRDTSNWSNQFQRDNARSSLSASHPMVGKWLEKQEQDEDGTEEDNSRVEPVGHADTGLEHIPNFSLDDMVKLVEVPNDGGPLGIHVVPFSARGGRTLGLLVKRLEKGGKAEHENLFRENDCIVRINDGDLRNRRFEQAQHMFRQAMRTPIIWFHVVPAANKEQYEQLSQSEKNNYYSSRFSPDSQYIDNRSVNSAGLHTVQRAPRLNHPPEQIDSHSRLPHSAHPSGKPPSAPASAPQNVFSTTVSSGYNTKKIGKRLNIQLKKGTEGLGFSITSRDVTIGGSAPIYVKNILPRGAAIQDGRLKAGDRLIEVNGVDLVGKSQEEVVSLLRSTKMEGTVSLLVFRQEDAFHPRELNAEPSQMQIPKETKAEDEDIVLTPDGTREFLTFEVPLNDSGSAGLGVSVKGNRSKENHADLGIFVKSIINGGAASKDGRLRVNDQLIAVNGESLLGKTNQDAMETLRRSMSTEGNKRGMIQLIVARRISKCNELKSPGSPPGPELPIETALDDRERRISHSLYSGIEGLDESPSRNAALSRIMGKYQLSPTVNMPQDDTVIIEDDRLPVLPPHLSDQSSSSSHDDVGFVTADAGTWAKAAISDSADCSLSPDVDPVLAFQREGFGRQSMSEKRTKQFSDASQLDFVKTRKSKSMDLGIADETKLNTVDDQKAGSPSRDVGPSLGLKKSSSLESLQTAVAEVTLNGDIPFHRPRPRIIRGRGCNESFRAAIDKSYDKPAVDDDDEGMETLEEDTEESSRSGRESVSTASDQPSHSLERQMNGNQEKGDKTDRKKDKTGKEKKKDRDKEKDKMKAKKGMLKGLGDMFRFGKHRKDDKIEKTGKIKIQESFTSEEERIRMKQEQERIQAKTREFRERQARERDYAEIQDFHRTFGCDDELMYGGVSSYEGSMALNARPQSPREGHMMDALYAQVKKPRNSKPSPVDSNRSTPSNHDRIQRLRQEFQQAKQDEDVEDRRRTYSFEQPWPNARPATQSGRHSVSVEVQMQRQRQEERESSQQAQRQYSSLPRQSRKNASSVSQDSWEQNYSPGEGFQSAKENPRYSSYQGSRNGYLGGHGFNARVMLETQELLRQEQRRKEQQMKKQPPSEGPSNYDSYKKVQDPSYAPPKGPFRQDVPPSPSQVARLNRLQTPEKGRPFYS

SEQ ID NO: 32886 - protein, 1319 aa, Homo sapiens
  REGION 1..1319: note = ENSP00000340591
MKVTVCFGRTRVVVPCGDGHMKVFSLIQQAVTRYRKAIAKDPNYWIQVHRLEHGDGGILDLDDILCDVADDKDRLVAVFDEQDPHHGGDGTSASSTGTQSPEIFGSELGTNNVSAFQPYQATSEIEVTPSVLRANMPLHVRRSSDPALIGLSTSVSDSNFSSEEPSRKNPTRWSTTAGFLKQNTAGSPKTCDRKKDENYRSLPRDTSNWSNQFQRDNARSSLSASHPMVGKWLEKQEQDEDGTEEDNSRVEPVGHADTGLEHIPNFSLDDMVKLVEVPNDGGPLGIHVVPFSARGGRTLGLLVKRLEKGGKAEHENLFRENDCIVRINDGDLRNRRFEQAQHMFRQAMRTPIIWFHVVPAANKEQYEQLSQSEKNNYYSSRFSPDSQYIDNRSVNSAGLHTVQRAPRLNHPPEQIDSHSRLPHSAHPSGKPPSAPASAPQNVFSTTVSSGYNTKKIGKRLNIQLKKGTEGLGFSITSRDVTIGGSAPIYVKNILPRGAAIQDGRLKAGDRLIEVNGVDLVGKSQEEVVSLLRSTKMEGTVSLLVFRQEDAFHPRELNAEPSQMQIPKETKAEDEDIVLTPDGTREFLTFEVPLNDSGSAGLGVSVKGNRSKENHADLGIFVKSIINGGAASKDGRLRVNDQLIAVNGESLLGKTNQDAMETLRRSMSTEGNKRGMIQLIVARRISKCNELKSPGSPPGPELPIETALDDRERRISHSLYSGIEGLDESPSRNAALSRIMGESGKYQLSPTVNMPQDDTVIIEDDRLPVLPPHLSDQSSSSSHDDVGFVTADAGTWAKAAISDSADCSLSPDVDPVLAFQREGFGRQSMSEKRTKQFSDASQLDFVKTRKSKSMDLGIADETKLNTVDDQKAGSPSRDVGPSLGLKKSSSLESLQTAVAEVTLNGDIPFHRPRPRIIRGRGCNESFRAAIDKSYDKPAVDDDDEGMETLEEDTEESSRSGRESVSTASDQPSHSLERQMNGNQEKGDKTDRKKDKTGKEKKKDRDKEKDKMKAKKGMLKGLGDMFRIQAKTREFRERQARERDYAEIQDFHRTFGCDDELMYGGVSSYEGSMALNARPQSPREGHMMDALYAQVKKPRNSKPSPVDSNRSTPSNHDRIQRLRQEFQQAKQDEDVEDRRRTYSFEQPWPNARPATQSGRHSVSVEVQMQRQRQEERESSQQAQRQYSSLPRQSRKNASSVSQDSWEQNYSPGEGFQSAKENPRYSSYQGSRNGYLGGHGFNARVMLETQELLRQEQRRKEQQMKKQPPSEGPSNYDSYKKVQDPSYAPPKGPFRQDVPPSPSQVARLNRLQTPEKGRPFYS

SEQ ID NO: 32887 - protein, 1244 aa, Homo sapiens
  REGION 1..1244: note = ENSP00000363926
MKVTVCFGRTRVVVPCGDGHMKVFSLIQQAVTRYRKAIAKDPNYWIQVHRLEHGDGGILDLDDILCDVADDKDRLVAVFDEQDPHHGGDGTSASSTGTQSPEIFGSELGTNNVSAFQPYQATSEIEVTPSVLRANMPLHVRRSSDPALIGLSTSVSDSNFSSEEPSRKNPTRWSTTAGFLKQNTAGSPKTCDRKDEDGTEEDNSRVEPVGHADTGLEHIPNFSLDDMVKLVEVPNDGGPLGIHVVPFSARGGRTLGLLVKRLEKGGKAEHENLFRENDCIVRINDGDLRNRRFEQAQHMFRQAMRTPIIWFHVVPAANKEQYEQLSQSEKNNYYSSRFSPDSQYIDNRSVNSAGLHTVQRAPRLNHPPEQIDSHSRLPHSAHPSGKPPSAPASAPQNVFSTTVSSGYNTKKIGKRLNIQLKKGTEGLGFSITSRDVTIGGSAPIYVKNILPRGAAIQDGRLKAGDRLIEVNGVDLVGKSQEEVVSLLRSTKMEGTVSLLVFRQEDAFHPRELKAEDEDIVLTPDGTREFLTFEVPLNDSGSAGLGVSVKGNRSKENHADLGIFVKSIINGGAASKDGRLRVNDQLIAVNGESLLGKTNQDAMETLRRSMSTEGNKRGMIQLIVARRISKCNELKSPGSPPGPELPIETALDDRERRISHSLYSGIEGLDESPSRNAALSRIMGKYQLSPTVNMPQDDTVIIEDDRLPVLPPHLSDQSSSSSHDDVGFVTADAGTWAKAAISDSADCSLSPDVDPVLAFQREGFGRQSMSEKRTKQFSDASQLDFVKTRKSKSMDLGSSPSRDVGPSLGLKKSSSLESLQTAVAEVTLNGDIPFHRPRPRIIRGRGCNESFRAAIDKSYDKPAVDDDDEGMETLEEDTEESSRSGRESVSTASDQPSHSLERQMNGNQEKGDKTDRKKDKTGKEKKKDRDKEKDKMKAKKGMLKGLGDMFRIQAKTREFRERQARERDYAEIQDFHRTFGCDDELMYGGVSSYEGSMALNARPQSPREGHMMDALYAQVKKPRNSKPSPVDSNRSTPSNHDRIQRLRQEFQQAKQDEDVEDRRRTYSFEQPWPNARPATQSGRHSVSVEVQMQRQRQEERESSQQAQRQYSSLPRQSRKNASSVSQDSWEQNYSPGEGFQSAKENPRYSSYQGSRNGYLGGHGFNARVMLETQELLRQEQRRKEQQMKKQPPSEGPSNYDSYKKVQDPSYAPPKGPFRQDVPPSPSQVARLNRLQTPEKGRPFYS

SEQ ID NO: 32888 - protein, 1310 aa, Homo sapiens
  REGION 1..1310: note = ENSP00000311986
MKVTVCFGRTRVVVPCGDGHMKVFSLIQQAVTRYRKAIAKDPNYWIQVHRLEHGDGGILDLDDILCDVADDKDRLVAVFDEQDPHHGGDGTSASSTGTQSPEIFGSELGTNNVSAFQPYQATSEIEVTPSVLRANMPLHVRRSSDPALIGLSTSVSDSNFSSEEPSRKNPTRWSTTAGFLKQNTAGSPKTCDRKKDENYRSLPRDTSNWSNQFQRDNARSSLSASHPMVGKWLEKQEQDEDGTEEDNSRVEPVGHADTGLEHIPNFSLDDMVKLVEVPNDGGPLGIHVVPFSARGGRTLGLLVKRLEKGGKAEHENLFRENDCIVRINDGDLRNRRFEQAQHMFRQAMRTPIIWFHVVPAANKEQYEQLSQSEKNNYYSSRFSPDSQYIDNRSVNSAGLHTVQRAPRLNHPPEQIDSHSRLPHSAHPSGKPPSAPASAPQNVFSTTVSSGYNTKKIGKRLNIQLKKGTEGLGFSITSRDVTIGGSAPIYVKNILPRGAAIQDGRLKAGDRLIEVNGVDLVGKSQEEVVSLLRSTKMEGTVSLLVFRQEDAFHPRELKAEDEDIVLTPDGTREFLTFEVPLNDSGSAGLGVSVKGNRSKENHADLGIFVKSIINGGAASKDGRLRVNDQLIAVNGESLLGKTNQDAMETLRRSMSTEGNKRGMIQLIVARRISKCNELKSPGSPPGPELPIETALDDRERRISHSLYSGIEGLDESPSRNAALSRIMGKYQLSPTVNMPQDDTVIIEDDRLPVLPPHLSDQSSSSSHDDVGFVTADAGTWAKAAISDSADCSLSPDVDPVLAFQREGFGRQIADETKLNTVDDQKAGSPSRDVGPSLGLKKSSSLESLQTAVAEVTLNGDIPFHRPRPRIIRGRGCNESFRAAIDKSYDKPAVDDDDEGMETLEEDTEESSRSGRESVSTASDQPSHSLERQMNGNQEKGDKTDRKKDKTGKEKKKDRDKEKDKMKAKKGMLKGLGDMFRFGKHRKDDKIEKTGKIKIQESFTSEEERIRMKQEQERIQAKTREFRERQARERDYAEIQDFHRTFGCDDELMYGGVSSYEGSMALNARPQSPREGHMMDALYAQVKKPRNSKPSPVDSNRSTPSNHDRIQRLRQEFQQAKQDEDVEDRRRTYSFEQPWPNARPATQSGRHSVSVEVQMQRQRQEERESSQQAQRQYSSLPRQSRKNASSVSQDSWEQNYSPGEGFQSAKENPRYSSYQGSRNGYLGGHGFNARVMLETQELLRQEQRRKEQQMKKQPPSEGPSNYDSYKKVQDPSYAPPKGPFRQDVPPSPSQVARLNRLQTPEKGRPFYS

SEQ ID NO: 32889 - protein, 1296 aa, Homo sapiens
  REGION 1..1296: note = ENSP00000363922
MKVTVCFGRTRVVVPCGDGHMKVFSLIQQAVTRYRKAIAKDPNYWIQVHRLEHGDGGILDLDDILCDVADDKDRLVAVFDEQDPHHGGDGTSASSTGTQSPEIFGSELGTNNVSAFQPYQATSEIEVTPSVLRANMPLHVRRSSDPALIGLSTSVSDSNFSSEEPSRKNPTRWSTTAGFLKQNTAGSPKTCDRKDEDGTEEDNSRVEPVGHADTGLEHIPNFSLDDMVKLVEVPNDGGPLGIHVVPFSARGGRTLGLLVKRLEKGGKAEHENLFRENDCIVRINDGDLRNRRFEQAQHMFRQAMRTPIIWFHVVPAANKEQYEQLSQSEKNNYYSSRFSPDSQYIDNRSVNSAGLHTVQRAPRLNHPPEQIDSHSRLPHSAHPSGKPPSAPASAPQNVFSTTVSSGYNTKKIGKRLNIQLKKGTEGLGFSITSRDVTIGGSAPIYVKNILPRGAAIQDGRLKAGDRLIEVNGVDLVGKSQEEVVSLLRSTKMEGTVSLLVFRQEDAFHPRELKAEDEDIVLTPDGTREFLTFEVPLNDSGSAGLGVSVKGNRSKENHADLGIFVKSIINGGAASKDGRLRVNDQLIAVNGESLLGKTNQDAMETLRRSMSTEGNKRGMIQLIVARRISKCNELKSPGSPPGPELPIETALDDRERRISHSLYSGIEGLDESPSRNAALSRIMGKYQLSPTVNMPQDDTVIIEDDRLPVLPPHLSDQSSSSSHDDVGFVTADAGTWAKAAISDSADCSLSPDVDPVLAFQREGFGRQSMSEKRTKQFSDASQLDFVKTRKSKSMDLGIADETKLNTVDDQKAGSPSRDVGPSLGLKKSSSLESLQTAVAEVTLNGDIPFHRPRPRIIRGRGCNESFRAAIDKSYDKPAVDDDDEGMETLEEDTEESSRSGRESVSTASDQPSHSLERQMNGNQEKGDKTDRKKDKTGKEKKKDRDKEKDKMKAKKGMLKGLGDMFRFGKHRKDDKIEKTGKIKIQESFTSEEERIRMKQEQERIQAKTREFRERQARERDYAEIQDFHRTFGCDDELMYGGVSSYEGSMALNARPQSPREGHMMDALYAQVKKPRNSKPSPVDSNRSTPSNHDRIQRLRQEFQQAKQDEDVEDRRRTYSFEQPWPNARPATQSGRHSVSVEVQMQRQRQEERESSQQAQRQYSSLPRQSRKNASSVSQDSWEQNYSPGEGFQSAKENPRYSSYQGSRNGYLGGHGFNARVMLETQELLRQEQRRKEQQMKKQPPSEGPSNYDSYKKVQDPSYAPPKGPFRQDVPPSPSQVARLNRLQTPEKGRPFYS

SEQ ID NO: 32890 - protein, 988 aa, Homo sapiens
  REGION 1..988: note = ENSP00000363908
MKVTVCFGRTRVVVPCGDGHMKVFSLIQQAVTRYRKAIAKDPNYWIQVHRLEHGDGGILDLDDILCDVADDKDRLVAVFDEQDPHHGGDGTSASSTGTQSPEIFGSELGTNNVSAFQPYQATSEIEVTPSVLRANMPLHVRRSSDPALIGLSTSVSDSNFSSEEPSRKNPTRWSTTAGFLKQNTAGSPKTCDRKKDENYRSLPRDTSNWSNQFQRDNARSSLSASHPMVGKWLEKQEQDEDGTEEDNSRVEPVGHADTGLEHIPNFSLDDMVKLVEVPNDGGPLGIHVVPFSARGGRTLGLLVKRLEKGGKAEHENLFRENDCIVRINDGDLRNRRFEQAQHMFRQAMRTPIIWFHVVPAANKEQYEQLSQSEKNNYYSSRFSPDSQYIDNRSVNSAGLHTVQRAPRLNHPPEQIDSHSRLPHSAHPSGKPPSAPASAPQNVFSTTVSSGYNTKKIGKRLNIQLKKGTEGLGFSITSRDVTIGGSAPIYVKNILPRGAAIQDGRLKAGDRLIEVNGVDLVGKSQEEVVSLLRSTKMEGTVSLLVFRQEDAFHPRELKAEDEDIVLTPDGTREFLTFEVPLNDSGSAGLGVSVKGNRSKENHADLGIFVKSIINGGAASKDGRLRVNDQLIAVNGESLLGKTNQDAMETLRRSMSTEGNKRGMIQLIVARRISKCNELKSPGSPPGPELPIETALDDRERRISHSLYSGIEGLDESPSRNAALSRIMGKYQLSPTVNMPQDDTVIIEDDRLPVLPPHLSDQSSSSSHDDVGFVTADAGTWAKAAISDSADCSLSPDVDPVLAFQREGFGRQIADETKLNTVDDQKAGSPSRDVGPSLGLKKSSSLESLQTAVAEVTLNGDIPFHRPRPRIIRGRGCNESFRAAIDKSYDKPAVDDDDEGMETLEEDTEESSRSGRESVSTASDQPSHSLERQMNGNQEKGDKTDRKKDKTGKEKKKDRDKEKDKMKAKKGMLKGLGDMFSLAKLKPEKR

SEQ ID NO: 32891 - protein, 1001 aa, Homo sapiens
  REGION 1..1001: note = ENSP00000363905
MKVTVCFGRTRVVVPCGDGHMKVFSLIQQAVTRYRKAIAKDPNYWIQVHRLEHGDGGILDLDDILCDVADDKDRLVAVFDEQDPHHGGDGTSASSTGTQSPEIFGSELGTNNVSAFQPYQATSEIEVTPSVLRANMPLHVRRSSDPALIGLSTSVSDSNFSSEEPSRKNPTRWSTTAGFLKQNTAGSPKTCDRKKDENYRSLPRDTSNWSNQFQRDNARSSLSASHPMVGKWLEKQEQDEDGTEEDNSRVEPVGHADTGLEHIPNFSLDDMVKLVEVPNDGGPLGIHVVPFSARGGRTLGLLVKRLEKGGKAEHENLFRENDCIVRINDGDLRNRRFEQAQHMFRQAMRTPIIWFHVVPAANKEQYEQLSQSEKNNYYSSRFSPDSQYIDNRSVNSAGLHTVQRAPRLNHPPEQIDSHSRLPHSAHPSGKPPSAPASAPQNVFSTTVSSGYNTKKIGKRLNIQLKKGTEGLGFSITSRDVTIGGSAPIYVKNILPRGAAIQDGRLKAGDRLIEVNGVDLVGKSQEEVVSLLRSTKMEGTVSLLVFRQEDAFHPRELNAEPSQMQIPKETKAEDEDIVLTPDGTREFLTFEVPLNDSGSAGLGVSVKGNRSKENHADLGIFVKSIINGGAASKDGRLRVNDQLIAVNGESLLGKTNQDAMETLRRSMSTEGNKRGMIQLIVARRISKCNELKSPGSPPGPELPIETALDDRERRISHSLYSGIEGLDESPSRNAALSRIMGKYQLSPTVNMPQDDTVIIEDDRLPVLPPHLSDQSSSSSHDDVGFVTADAGTWAKAAISDSADCSLSPDVDPVLAFQREGFGRQIADETKLNTVDDQKAGSPSRDVGPSLGLKKSSSLESLQTAVAEVTLNGDIPFHRPRPRIIRGRGCNESFRAAIDKSYDKPAVDDDDEGMETLEEDTEESSRSGRESVSTASDQPSHSLERQMNGNQEKGDKTDRKKDKTGKEKKKDRDKEKDKMKAKKGMLKGLGDMFSLAKLKPEKR

SEQ ID NO: 32892 - protein, 179 aa, Homo sapiens
  REGION 1..179: note = ENSP00000363900
MQIPKETKAEDEDIVLTPDGTREFLTFEVPLNDSGSAGLGVSVKGNRSKENHADLGIFVKSIINGGAASKDGRLRVNDQLIAVNGESLLGKTNQDAMETLRRSMSTEGNKRGMIQLIVARRISKCNELKSPGSPPGPELPIETALDDRERRISHSLYSGIEGLDESPSRNAALSRIMGT

SEQ ID NO: 32893 - protein, 1031 aa, Homo sapiens
  REGION 1..1031: note = ENSP00000341844
MKVTVCFGRTRVVVPCGDGHMKVFSLIQQAVTRYRKAIAKDPNYWIQVHRLEHGDGGILDLDDILCDVADDKDRLVAVFDEQDPHHGGDGTSASSTGTQSPEIFGSELGTNNVSAFQPYQATSEIEVTPSVLRANMPLHVRRSSDPALIGLSTSVSDSNFSSEEPSRKNPTRWSTTAGFLKQNTAGSPKTCDRKKDENYRSLPRDTSNWSNQFQRDNARSSLSASHPMVGKWLEKQEQDEDGTEEDNSRVEPVGHADTGLEHIPNFSLDDMVKLVEVPNDGGPLGIHVVPFSARGGRTLGLLVKRLEKGGKAEHENLFRENDCIVRINDGDLRNRRFEQAQHMFRQAMRTPIIWFHVVPAANKEQYEQLSQSEKNNYYSSRFSPDSQYIDNRSVNSAGLHTVQRAPRLNHPPEQIDSHSRLPHSAHPSGKPPSAPASAPQNVFSTTVSSGYNTKKIGKRLNIQLKKGTEGLGFSITSRDVTIGGSAPIYVKNILPRGAAIQDGRLKAGDRLIEVNGVDLVGKSQEEVVSLLRSTKMEGTVSLLVFRQEDAFHPRELNAEPSQMQIPKETKAEDEDIVLTPDGTREFLTFEVPLNDSGSAGLGVSVKGNRSKENHADLGIFVKSIINGGAASKDGRLRVNDQLIAVNGESLLGKTNQDAMETLRRSMSTEGNKRGMIQLIVARRISKCNELKSPGSPPGPELPIETALDDRERRISHSLYSGIEGLDESPSRNAALSRIMGKYQLSPTVNMPQDDTVIIEDDRLPVLPPHLSDQSSSSSHDDVGFVTADAGTWAKAAISDSADCSLSPDVDPVLAFQREGFGRQSMSEKRTKQFSDASQLDFVKTRKSKSMDLGIADETKLNTVDDQKAGSPSRDVGPSLGLKKSSSLESLQTAVAEVTLNGDIPFHRPRPRIIRGRGCNESFRAAIDKSYDKPAVDDDDEGMETLEEDTEESSRSGRESVSTASDQPSHSLERQMNGNQEKGDKTDRKKDKTGKEKKKDRDKEKDKMKAKKGMLKGLGDMFSLAKLKPEKR

SEQ ID NO: 32894 - protein, 1266 aa, Homo sapiens
  REGION 1..1266: note = ENSP00000440857
MKVTVCFGRTRVVVPCGDGHMKVFSLIQQAVTRYRKAIAKDPNYWIQVHRLEHGDGGILDLDDILCDVADDKDRLVAVFDEQDPHHGGDGTSASSTGTQSPEIFGSELGTNNVSAFQPYQATSEIEVTPSVLRANMPLHVRRSSDPALIGLSTSVSDSNFSSEEPSRKNPTRWSTTAGFLKQNTAGSPKTCDRKDEDGTEEDNSRVEPVGHADTGLEHIPNFSLDDMVKLVEVPNDGGPLGIHVVPFSARGGRTLGLLVKRLEKGGKAEHENLFRENDCIVRINDGDLRNRRFEQAQHMFRQAMRTPIIWFHVVPAANKEQYEQLSQSEKNNYYSSRFSPDSQYIDNRSVNSAGLHTVQRAPRLNHPPEQIDSHSRLPHSAHPSGKPPSAPASAPQNVFSTTVSSGYNTKKIGKRLNIQLKKGTEGLGFSITSRDVTIGGSAPIYVKNILPRGAAIQDGRLKAGDRLIEVNGVDLVGKSQEEVVSLLRSTKMEGTVSLLVFRQEDAFHPRELKAEDEDIVLTPDGTREFLTFEVPLNDSGSAGLGVSVKGNRSKENHADLGIFVKSIINGGAASKDGRLRVNDQLIAVNGESLLGKTNQDAMETLRRSMSTEGNKRGMIQLIVARRISKCNELKSPGSPPGPELPIETALDDRERRISHSLYSGIEGLDESPSRNAALSRIMGKYQLSPTVNMPQDDTVIIEDDRLPVLPPHLSDQSSSSSHDDVGFVTADAGTWAKAAISDSADCSLSPDVDPVLAFQREGFGRQIADETKLNTVDDQKAGSPSRDVGPSLGLKKSSSLESLQTAVAEVTLNGDIPFHRPRPRIIRGRGCNESFRAAIDKSYDKPAVDDDDEGMETLEEDTEESSRSGRESVSTASDQPSHSLERQMNGNQEKGDKTDRKKDKTGKEKKKDRDKEKDKMKAKKGMLKGLGDMFRFGKHRKDDKIEKTGKIKIQESFTSEEERIRMKQEQERIQAKTREFRERQARERDYAEIQDFHRTFGCDDELMYGGVSSYEGSMALNARPQSPREGHMMDALYAQVKKPRNSKPSPVDSNRSTPSNHDRIQRLRQEFQQAKQDEDVEDRRRTYSFEQPWPNARPATQSGRHSVSVEVQMQRQRQEERESSQQAQRQYSSLPRQSRKNASSVSQDSWEQNYSPGEGFQSAKENPRYSSYQGSRNGYLGGHGFNARVMLETQELLRQEQRRKEQQMKKQPPSEGPSNYDSYKKVQDPSYAPPKGPFRQDVPPSPSQVARLNRLQTPEKGRPFYS

SEQ ID NO: 32895 - protein, 1340 aa, Homo sapiens
  REGION 1..1340: note = ENSP00000443147
MKVTVCFGRTRVVVPCGDGHMKVFSLIQQAVTRYRKAIAKDPNYWIQVHRLEHGDGGILDLDDILCDVADDKDRLVAVFDEQDPHHGGDGTSASSTGTQSPEIFGSELGTNNVSAFQPYQATSEIEVTPSVLRANMPLHVRRSSDPALIGLSTSVSDSNFSSEEPSRKNPTRWSTTAGFLKQNTAGSPKTCDRKKDENYRSLPRDTSNWSNQFQRDNARSSLSASHPMVGKWLEKQEQDEDGTEEDNSRVEPVGHADTGLEHIPNFSLDDMVKLVEVPNDGGPLGIHVVPFSARGGRTLGLLVKRLEKGGKAEHENLFRENDCIVRINDGDLRNRRFEQAQHMFRQAMRTPIIWFHVVPAANKEQYEQLSQSEKNNYYSSRFSPDSQYIDNRSVNSAGLHTVQRAPRLNHPPEQIDSHSRLPHSAHPSGKPPSAPASAPQNVFSTTVSSGYNTKKIGKRLNIQLKKGTEGLGFSITSRDVTIGGSAPIYVKNILPRGAAIQDGRLKAGDRLIEVNGVDLVGKSQEEVVSLLRSTKMEGTVSLLVFRQEDAFHPRELKAEDEDIVLTPDGTREFLTFEVPLNDSGSAGLGVSVKGNRSKENHADLGIFVKSIINGGAASKDGRLRVNDQLIAVNGESLLGKTNQDAMETLRRSMSTEGNKRGMIQLIVARRISKCNELKSPGSPPGPELPIETALDDRERRISHSLYSGIEGLDESPSRNAALSRIMGKYQLSPTVNMPQDDTVIIEDDRLPVLPPHLSDQSSSSSHDDVGFVTADAGTWAKAAISDSADCSLSPDVDPVLAFQREGFGRQSMSEKRTKQFSDASQLDFVKTRKSKSMDLGIADETKLNTVDDQKAGSPSRDVGPSLGLKKSSSLESLQTAVAEVTLNGDIPFHRPRPRIIRGRGCNESFRAAIDKSYDKPAVDDDDEGMETLEEDTEESSRSGRESVSTASDQPSHSLERQMNGNQEKGDKTDRKKDKTGKEKKKDRDKEKDKMKAKKGMLKGLGDMFRFGKHRKDDKIEKTGKIKIQESFTSEEERIRMKQEQERIQAKTREFRERQARERDYAEIQDFHRTFGCDDELMYGGVSSYEGSMALNARPQSPREGHMMDALYAQVKKPRNSKPSPVDSNRSTPSNHDRIQRLRQEFQQAKQDEDVEDRRRTYSFEQPWPNARPATQSGRHSVSVEVQMQRQRQEERESSQQAQRQYSSLPRQSRKNASSVSQDSWEQNYSPGEGFQSAKENPRYSSYQGSRNGYLGGHGFNARVMLETQELLRQEQRRKEQQMKKQPPSEGPSNYDSYKKVQDPSYAPPKGPFRQDVPPSPSQVARLNRLQTPEKGRPFYS

SEQ ID NO: 32896 - protein, 747 aa, Homo sapiens
  REGION 1..747: note = ENSP00000444429
MVKLVEVPNDGGPLGIHVVPFSARGGRTLGLLVKRLEKGGKAEHENLFRENDCIVRINDGDLRNRRFEQAQHMFRQAMRTPIIWFHVVPAANKEQYEQLSQSEKNNYYSSRFSPDSQYIDNRSVNSAGLHTVQRAPRLNHPPEQIDSHSRLPHSAHPSGKPPSAPASAPQNVFSTTVSSGYNTKKIGKRLNIQLKKGTEGLGFSITSRDVTIGGSAPIYVKNILPRGAAIQDGRLKAGDRLIEVNGVDLVGKSQEEVVSLLRSTKMEGTVSLLVFRQEDAFHPRELKAEDEDIVLTPDGTREFLTFEVPLNDSGSAGLGVSVKGNRSKENHADLGIFVKSIINGGAASKDGRLRVNDQLIAVNGESLLGKTNQDAMETLRRSMSTEGNKRGMIQLIVARRISKCNELKSPGSPPGPELPIETALDDRERRISHSLYSGIEGLDESPSRNAALSRIMGKYQLSPTVNMPQDDTVIIEDDRLPVLPPHLSDQSSSSSHDDVGFVTADAGTWAKAAISDSADCSLSPDVDPVLAFQREGFGRQSMSEKRTKQFSDASQLDFVKTRKSKSMDLVADETKLNTVDDQKAGSPSRDVGPSLGLKKSSSLESLQTAVAEVTLNGDIPFHRPRPRIIRGRGCNESFRAAIDKSYDKPAVDDDDEGMETLEEDTEESSRSGRESVSTASDQPSHSLERQMNGNQEKGDKTDRKKDKTGKEKKKDRDKEKDKMKAKKGMLKGLGDMFSLAKLKPEKR

SEQ ID NO: 32897 - protein, 79 aa, Homo sapiens
  REGION 1..79: note = ENSP00000407718
MKVTVCFGRTGIVVPCKEGQLRVGELTQQALQRYLKTREKVSAARRSGARLQPRHLPGSWLLGEDSSLRIYRWRNPGSR

SEQ ID NO: 32898 - protein, 1205 aa, Homo sapiens
  REGION 1..1205: note = ENSP00000385848
MKVTVCFGRTGIVVPCKEGQLRVGELTQQALQRYLKTREKGPGYWVKIHHLEYTDGGILDPDDVLADVVEDKDKLIAVFEEQEPLHKIESPSGNPADRQSPDAFETEVAAQLAAFKPIGGEIEVTPSALKLGTPLLVRRSSDPVPGPPADTQPSASHPGGQSLKLVVPDSTQNLEDREVLNGVQTELLTSPRTKDTLSDMTRTVEISGEGGPLGIHVVPFFSSLSGRILGLFIRGIEDNSRSKREGLFHENECIVKINNVDLVDKTFAQAQDVFRQAMKSPSVLLHVLPPQNREQYEKSVIGSLNIFGNNDGVLKTKVPPPVHGKSGLKTANLTGTDSPETDASASLQQNKSPRVPRLGGKPSSPSLSPLMGFGSNKNAKKIKIDLKKGPEGLGFTVVTRDSSIHGPGPIFVKNILPKGAAIKDGRLQSGDRILEVNGRDVTGRTQEELVAMLRSTKQGETASLVIARQEGHFLPRELKGEPDCCALSLETSEQLTFEIPLNDSGSAGLGVSLKGNKSRETGTDLGIFIKSIIHGGAAFKDGRLRMNDQLIAVNGESLLGKSNHEAMETLRRSMSMEGNIRGMIQLVILRRPERPMEDPAECGAFSKPCFENCQNAVTTSRRNDNSILHPLGTCSPQDKQKGLLLPNDGWAESEVPPSPTPHSALGLGLEDYSHSSGVDSAVYFPDQHINFRSVTPARQPESINLKASKSMDLVPDESKVHSLAGQKSESPSKDFGPTLGLKKSSSLESLQTAVAEVRKNDLPFHRPRPHMVRGRGCNESFRAAIDKSYDGPEEIEADGLSDKSSHSGQGALNCESAPQGNSELEDMENKARKVKKTKEKEKKKEKGKLKVKEKKRKEENEDPERKIKKKGFGAMLRFGKKKEDKGGKAEQKGTLKHGGLREEELEKMKEERERIGAKHQELREKQARGLLDYATGAIGSVYDMDDDEMDPNYARVNHFREPCTSANVFRSPSPPRAGPFGYPRDGHPLSPERDHLEGLYAKVNKPYHPLVPADSGRPTGGSTDRIQKLRKEYYQARREGFPLYEDDEGRARPSEYDLLWVPGRGPDGNAHNLRFEGMERQYASLPRGGPADPVDYLPAAPRGLYKERELPYYPGAHPMHPPKGSYPRPTELRVADLRYPQHYPPPPAPQHKGPFRQDVPPSPPQHQRMPAYQETGRPGPRGGSPDQYPYRTQDSRQKNPMTAAV

SEQ ID NO: 32899 - protein, 935 aa, Homo sapiens
  REGION 1..935: note = ENSP00000473503
MKVTVCFGRTGIVVPCKEGQLRVGELTQQALQRYLKTREKGPGYWVKIHHLEYTDGGILDPDDVLADVVEDKDKLIAVFEEQEPLHKIESPSGNPADRQSPDAFETEVAAQLAAFKPIGGEIEVTPSALKLGTPLLVRRSSDPVPGPPADTQPSASHPGGQSLKLVVPDSTQNLEDREVLNGVQTELLTSPRTKDTLSDMTRTVEISGEGGPLGIHVVPFFSSLSGRILGLFIRGIEDNSRSKREGLFHENECIVKINNVDLVDKTFAQAQDVFRQAMKSPSVLLHVLPPQNREQYEKSVIGSLNIFGNNDGVLKTKVPPPVHGKSGLKTANLTGTDSPETDASASLQQNKSPRVPRLGGKPSSPSLSPLMGFGSNKNAKKIKIDLKKGPEGLGFTVVTRDSSIHGPGPIFVKNILPKGAAIKDGRLQSGDRILEVNGRDVTGRTQEELVAMLRSTKQGETASLVIARQEGHFLPRELKGEPDCCALSLETSEQLTFEIPLNDSGSAGLGVSLKGNKSRETGTDLGIFIKSIIHGGAAFKDGRLRMNDQLIAVNGESLLGKSNHEAMETLRRSMSMEGNIRGMIQLVILRRPERPMEDPAECGAFSKPCFENCQNAVTTSRRNDNSILHPLGTCSPQDKQKGLLLPNDGWAESEVPPSPTPHSALGLGLEDYSHSSGVDSAVYFPDQHINFRSVTPARQPESINLKASKSMDLVPDESKVHSLAGQKSESPSKDFGPTLGLKKSSSLESLQTAVAEVRKNDLPFHRPRPHMVRGRGCNESFRAAIDKSYDGPEEIEADGLSDKSSHSGQGALNCESAPQGNSELEDMENKARKVKKTKEKEKKKEKGKLKVKEKKRKEENEDPERKIKKKGFGAMLRYGPALKAKLVLILSLLKKAHAFPRLQPNAYGSQFCARSLSAEAEELFGESYSDDRTLS

SEQ ID NO: 32900 - protein, 1143 aa, Homo sapiens
  REGION 1..1143: note = ENSP00000351618
MKVTVCFGRTGIVVPCKEGQLRVGELTQQALQRYLKTREKGPGYWVKIHHLEYTDGGILDPDDVLADVVEDKDKLIAVFEEQEPLHKIESPSGNPADRQSPDAFETEVAAQLAAFKPIGGEIEVTPSALKLGTPLLVRRSSDPVPGPPADTQPSASHPGGQSLKLVVPDSTQNLEDREVLNGVQTELLTSPRTKDTLSDMTRTVEISGEGGPLGIHVVPFFSSLSGRILGLFIRGIEDNSRSKREGLFHENECIVKINNVDLVDKTFAQAQDVFRQAMKSPSVLLHVLPPQNREQYEKSVIGSLNIFGNNDGVLKTKVPPPVHGKSGLKTANLTGTDSPETDASASLQQNKSPRVPRLGGKPSSPSLSPLMGFGSNKNAKKIKIDLKKGPEGLGFTVVTRDSSIHGPGPIFVKNILPKGAAIKDGRLQSGDRILEVNGRDVTGRTQEELVAMLRSTKQGETASLVIARQEGHFLPRELDGRLRMNDQLIAVNGESLLGKSNHEAMETLRRSMSMEGNIRGMIQLVILRRPERPMEDPAECGAFSKPCFENCQNAVTTSRRNDNSILHPLGTCSPQDKQKGLLLPNDGWAESEVPPSPTPHSALGLGLEDYSHSSGVDSAVYFPDQHINFRSVTPARQPESINLKASKSMDLVPDESKVHSLAGQKSESPSKDFGPTLGLKKSSSLESLQTAVAEVRKNDLPFHRPRPHMVRGRGCNESFRAAIDKSYDGPEEIEADGLSDKSSHSGQGALNCESAPQGNSELEDMENKARKVKKTKEKEKKKEKGKLKVKEKKRKEENEDPERKIKKKGFGAMLRFGKKKEDKGGKAEQKGTLKHGGLREEELEKMKEERERIGAKHQELREKQARGLLDYATGAIGSVYDMDDDEMDPNYARVNHFREPCTSANVFRSPSPPRAGPFGYPRDGHPLSPERDHLEGLYAKVNKPYHPLVPADSGRPTGGSTDRIQKLRKEYYQARREGFPLYEDDEGRARPSEYDLLWVPGRGPDGNAHNLRFEGMERQYASLPRGGPADPVDYLPAAPRGLYKERELPYYPGAHPMHPPKGSYPRPTELRVADLRYPQHYPPPPAPQHKGPFRQDVPPSPPQHQRMPAYQETGRPGPRGGSPDQYPYRTQDSRQKNPMTAAV

SEQ ID NO: 32901 - protein, 1136 aa, Homo sapiens
  REGION 1..1136: note = ENSP00000317261
MKVTVCFGRTGIVVPCKEGQLRVGELTQQALQRYLKTREKGPGYWVKIHHLEYTDGGILDPDDVLADVVEDKDKLIAVFEEQEPLHKIESPSGNPADRQSPDAFETEVAAQLAAFKPIGGEIEVTPSALKLGTPLLVRRSSDPVPGPPADTQPSASHPGGQSLKLVVPDSTQNLEDREVLNGVQTELLTSPRTKDTLSDMTRTVEISGEGGPLGIHVVPFFSSLSGRILGLFIRGIEDNSRSKREGLFHENECIVKINNVDLVDKTFAQAQDVFRQAMKSPSVLLHVLPPQNREQYEKSVIGSLNIFGNNDGVLKTKVPPPVHGKSGLKTANLTGTDSPETDASASLQQNKSPRVPRLGGKPSSPSLSPLMGFGSNKNAKKIKIDLKKGPEGLGFTVVTRDSSIHGPGPIFVKNILPKGAAIKDGRLQSGDRILEVNGRDVTGRTQEELVAMLRSTKQGETASLVIARQEGHFLPRELKGEPDCCALSLETSEQLTFEIPLNDSGSAGLGVSLKGNKSRETGTDLGIFIKSIIHGGAAFKDGRLRMNDQLIAVNGESLLGKSNHEAMETLRRSMSMEGNIRGMIQLVILRRPERPMEDPAECGAFSKPCFENCQNAVTTSRRNDNSILHPLGTCSPQDKQKGLLLPNDGWAESEVPPSPTPHSALGLGLEDYSHSSGVDSAVYFPDQHINFRSVTPARQPESINLKASKSMDLVPDESKVHSLAGQKSDGLSDKSSHSGQGALNCESAPQGNSELEDMENKARKVKKTKEKEKKKEKGKLKVKEKKRKEENEDPERKIKKKGFGAMLRFGKKKEDKGGKAEQKGTLKHGGLREEELEKMKEERERIGAKHQELREKQARGLLDYATGAIGSVYDMDDDEMDPNYARVNHFREPCTSANVFRSPSPPRAGPFGYPRDGHPLSPERDHLEGLYAKVNKPYHPLVPADSGRPTGGSTDRIQKLRKEYYQARREGFPLYEDDEGRARPSEYDLLWVPGRGPDGNAHNLRFEGMERQYASLPRGGPADPVDYLPAAPRGLYKERELPYYPGAHPMHPPKGSYPRPTELRVADLRYPQHYPPPPAPQHKGPFRQDVPPSPPQHQRMPAYQETGRPGPRGGSPDQYPYRTQDSRQKNPMTAAV

SEQ ID NO: 32902 - protein, 1104 aa, Homo sapiens
  REGION 1..1104: note = ENSP00000340280
MKVTVCFGRTGIVVPCKEGQLRVGELTQQALQRYLKTREKGPGYWVKIHHLEYTDGGILDPDDVLADVVEDKDKLIAVFEEQEPLHKIESPSGNPADRQSPDAFETEVAAQLAAFKPIGGEIEVTPSALKLGTPLLVRRSSDPVPGPPADTQPSASHPGGQSLKLVVPDSTQNLEDREVLNGVQTELLTSPRTKDTLSDMTRTVEISGEGGPLGIHVVPFFSSLSGRILGLFIRGIEDNSRSKREGLFHENECIVKINNVDLVDKTFAQAQDVFRQAMKSPSVLLHVLPPQNREQYEKSVIGSLNIFGNNDGVLKTKVPPPVHGKSGLKTANLTGTDSPETDASASLQQNKSPRVPRLGGKPSSPSLSPLMGFGSNKNAKKIKIDLKKGPEGLGFTVVTRDSSIHGPGPIFVKNILPKGAAIKDGRLQSGDRILEVNGRDVTGRTQEELVAMLRSTKQGETASLVIARQEGHFLPRELKGEPDCCALSLETSEQLTFEIPLNDSGSAGLGVSLKGNKSRETGTDLGIFIKSIIHGGAAFKDGRLRMNDQLIAVNGESLLGKSNHEAMETLRRSMSMEGNIRGMIQLVILRRPERPMEDPAECGAFSKPCFENCQNAVTTSRRNDNSILHPLGTCSPQDKQKGLLLPNDGWAESEVPPSPTPHSALGLGLEDYSHSSGVDSAVYFPDQHINFRSVTPARQPESINLKASKSMDLVPDESKVHSLAGQKSESPSKDFGPTLGLKKSSSLESLQTAVAEVRKNDLPFHRPRPHMVRGRGCNESFRAAIDKSYDGPEEIEADGLSDKSSHSGQGALNCESAPQGNSELEDMENKARKVKKTKEKEKKKEKGKLKVKEKKRKEENEDPERKIKKKGFGAMLRFGKKKEDKGGKAEQKGTLKHGGLREEELEKMKEERESGRPTGGSTDRIQKLRKEYYQARREGFPLYEDDEGRARPSEYDLLWVPGRGPDGNAHNLRFEGMERQYASLPRGGPADPVDYLPAAPRGLYKERELPYYPGAHPMHPPKGSYPRPTELRVADLRYPQHYPPPPAPQHKGPFRQDVPPSPPQHQRMPAYQETGRPGPRGGSPDQYPYRTQDSRQKNPMTAAV

SEQ ID NO: 32903 - protein, 1069 aa, Homo sapiens
  REGION 1..1069: note = ENSP00000484434
LIAVFEEQEPLHKIESPSGNPADRQSPDAFETEVAAQLAAFKPIGGEIEVTPSALKLGTPLLVRRSSDPVPGPPADTQPSASHPGGQSLKLVVPDSTQNLEDREVLNGVQTELLTSPRTKDTLSDMTRTVEISGEGGPLGIHVVPFFSSLSGRILGLFIRGIEDNSRSKREGLFHENECIVKINNVDLVDKTFAQAQDVFRQAMKSPSVLLHVLPPQNREQYEKSVIGSLNIFGNNDGVLKTKVPPPVHGKSGLKTANLTGTDSPETDASASLQQNKSPRVPRLGGKPSSPSLSPLMGFGSNKNAKKIKIDLKKGPEGLGFTVVTRDSSIHGPGPIFVKNILPKGAAIKDGRLQSGDRILEVNGRDVTGRTQEELVAMLRSTKQGETASLVIARQEGHFLPRELDGRLRMNDQLIAVNGESLLGKSNHEAMETLRRSMSMEGNIRGMIQLVILRRPERPMEDPAECGAFSKPCFENCQNAVTTSRRNDNSILHPLGTCSPQDKQKGLLLPNDGWAESEVPPSPTPHSALGLGLEDYSHSSGVDSAVYFPDQHINFRSVTPARQPESINLKASKSMDLVPDESKVHSLAGQKSESPSKDFGPTLGLKKSSSLESLQTAVAEVRKNDLPFHRPRPHMVRGRGCNESFRAAIDKSYDGPEEIEADGLSDKSSHSGQGALNCESAPQGNSELEDMENKARKVKKTKEKEKKKEKGKLKVKEKKRKEENEDPERKIKKKGFGAMLRFGKKKEDKGGKAEQKGTLKHGGLREEELEKMKEERERIGAKHQELREKQARGLLDYATGAIGSVYDMDDDEMDPNYARVNHFREPCTSANVFRSPSPPRAGPFGYPRDGHPLSPERDHLEGLYAKVNKPYHPLVPADSGRPTGGSTDRIQKLRKEYYQARREGFPLYEDDEGRARPSEYDLLWVPGRGPDGNAHNLRFEGMERQYASLPRGGPADPVDYLPAAPRGLYKERELPYYPGAHPMHPPKGSYPRPTELRVADLRYPQHYPPPPAPQHKGPFRQDVPPSPPQHQRMPAYQETGRPGPRGGSPDQYPYRTQDSRQKNPMTAAV

SEQ ID NO: 32904 - protein, 1062 aa, Homo sapiens
  REGION 1..1062: note = ENSP00000481918
LIAVFEEQEPLHKIESPSGNPADRQSPDAFETEVAAQLAAFKPIGGEIEVTPSALKLGTPLLVRRSSDPVPGPPADTQPSASHPGGQSLKLVVPDSTQNLEDREVLNGVQTELLTSPRTKDTLSDMTRTVEISGEGGPLGIHVVPFFSSLSGRILGLFIRGIEDNSRSKREGLFHENECIVKINNVDLVDKTFAQAQDVFRQAMKSPSVLLHVLPPQNREQYEKSVIGSLNIFGNNDGVLKTKVPPPVHGKSGLKTANLTGTDSPETDASASLQQNKSPRVPRLGGKPSSPSLSPLMGFGSNKNAKKIKIDLKKGPEGLGFTVVTRDSSIHGPGPIFVKNILPKGAAIKDGRLQSGDRILEVNGRDVTGRTQEELVAMLRSTKQGETASLVIARQEGHFLPRELKGEPDCCALSLETSEQLTFEIPLNDSGSAGLGVSLKGNKSRETGTDLGIFIKSIIHGGAAFKDGRLRMNDQLIAVNGESLLGKSNHEAMETLRRSMSMEGNIRGMIQLVILRRPERPMEDPAECGAFSKPCFENCQNAVTTSRRNDNSILHPLGTCSPQDKQKGLLLPNDGWAESEVPPSPTPHSALGLGLEDYSHSSGVDSAVYFPDQHINFRSVTPARQPESINLKASKSMDLVPDESKVHSLAGQKSDGLSDKSSHSGQGALNCESAPQGNSELEDMENKARKVKKTKEKEKKKEKGKLKVKEKKRKEENEDPERKIKKKGFGAMLRFGKKKEDKGGKAEQKGTLKHGGLREEELEKMKEERERIGAKHQELREKQARGLLDYATGAIGSVYDMDDDEMDPNYARVNHFREPCTSANVFRSPSPPRAGPFGYPRDGHPLSPERDHLEGLYAKVNKPYHPLVPADSGRPTGGSTDRIQKLRKEYYQARREGFPLYEDDEGRARPSEYDLLWVPGRGPDGNAHNLRFEGMERQYASLPRGGPADPVDYLPAAPRGLYKERELPYYPGAHPMHPPKGSYPRPTELRVADLRYPQHYPPPPAPQHKGPFRQDVPPSPPQHQRMPAYQETGRPGPRGGSPDQYPYRTQDSRQKNPMTAAV

SEQ ID NO: 32905 - protein, 1030 aa, Homo sapiens
  REGION 1..1030: note = ENSP00000482649
LIAVFEEQEPLHKIESPSGNPADRQSPDAFETEVAAQLAAFKPIGGEIEVTPSALKLGTPLLVRRSSDPVPGPPADTQPSASHPGGQSLKLVVPDSTQNLEDREVLNGVQTELLTSPRTKDTLSDMTRTVEISGEGGPLGIHVVPFFSSLSGRILGLFIRGIEDNSRSKREGLFHENECIVKINNVDLVDKTFAQAQDVFRQAMKSPSVLLHVLPPQNREQYEKSVIGSLNIFGNNDGVLKTKVPPPVHGKSGLKTANLTGTDSPETDASASLQQNKSPRVPRLGGKPSSPSLSPLMGFGSNKNAKKIKIDLKKGPEGLGFTVVTRDSSIHGPGPIFVKNILPKGAAIKDGRLQSGDRILEVNGRDVTGRTQEELVAMLRSTKQGETASLVIARQEGHFLPRELKGEPDCCALSLETSEQLTFEIPLNDSGSAGLGVSLKGNKSRETGTDLGIFIKSIIHGGAAFKDGRLRMNDQLIAVNGESLLGKSNHEAMETLRRSMSMEGNIRGMIQLVILRRPERPMEDPAECGAFSKPCFENCQNAVTTSRRNDNSILHPLGTCSPQDKQKGLLLPNDGWAESEVPPSPTPHSALGLGLEDYSHSSGVDSAVYFPDQHINFRSVTPARQPESINLKASKSMDLVPDESKVHSLAGQKSESPSKDFGPTLGLKKSSSLESLQTAVAEVRKNDLPFHRPRPHMVRGRGCNESFRAAIDKSYDGPEEIEADGLSDKSSHSGQGALNCESAPQGNSELEDMENKARKVKKTKEKEKKKEKGKLKVKEKKRKEENEDPERKIKKKGFGAMLRFGKKKEDKGGKAEQKGTLKHGGLREEELEKMKEERESGRPTGGSTDRIQKLRKEYYQARREGFPLYEDDEGRARPSEYDLLWVPGRGPDGNAHNLRFEGMERQYASLPRGGPADPVDYLPAAPRGLYKERELPYYPGAHPMHPPKGSYPRPTELRVADLRYPQHYPPPPAPQHKGPFRQDVPPSPPQHQRMPAYQETGRPGPRGGSPDQYPYRTQDSRQKNPMTAAV

SEQ ID NO: 32906 - protein, 376 aa, Homo sapiens
  REGION 1..376: note = ENSP00000343144
MNRSFHKSQTLRFYDCSAVEVKSKFGAEFRRFSLDRHKPGKFEDFYKLVVHTHHISNSDVTIGYADVHGDLLPINNDDNFCKAVSSANPLLRVFIQKREEAERGSLGAGSLCRRRRALGALRDEGPRRRAHLDIGLPRDFRPVSSIIDVDLVPETHRRVRLHRHGCEKPLGFYIRDGASVRVTPHGLEKVPGIFISRMVPGGLAESTGLLAVNDEVLEVNGIEVAGKTLDQVTDMMIANSHNLIVTVKPANQRNNVVRGGRALGSSGPPSDGTAGFVGPPAPRVLQNFHPDEAESDEDNDVVIEGTLEPARPPQTPGAPAGSLSRVNGAGLAQRLQRDLALDGGLQRLLSSLRADPRHSLALPPGGVEEHGPAVTL

SEQ ID NO: 32907 - protein, 107 aa, Homo sapiens
  REGION 1..107: note = ENSP00000468735
MNRSFHKSQTLRFYDCSAVEVKSKFGAEFRRFSLDRHKPGKFEDFYKLVVHTHHISNSDVTIGYADVHGDLLPINNDDNFCKAVSSANPLLRVFIQKRDDGALRPGT

SEQ ID NO: 32908 - protein, 61 aa, Homo sapiens
  REGION 1..61: note = ENSP00000466076
FEDFYKLVVHTHHISNSDVTIGYADVHGDLLPINNDDNFCKAVSSANPLLRVFIQKRGGEH

SEQ ID NO: 32909 - protein, 68 aa, Homo sapiens
  REGION 1..68: note = ENSP00000424276
MVYKTLFALCILTAGSIAAITVTVIAVVLLVFGVAAYLKIRHSSYGRLLDDHDYGSWGNYNNPLYDDS

SEQ ID NO: 32910 - protein, 310 aa, Homo sapiens
  REGION 1..310: note = ENSP00000370224
MVYKTLFALCILTAGWRVQSLPTSAPLSVSLPTNIVPPTTIWTSSPQNTDADTASPSNGTHNNSVLPVTASAPTSLLPKNISIESREEEITSPGSNWEGTNTDPSPSGFSSTSGGVHLTTTLEEHSSGTPEAGVAATLSQSAAEPPTLISPQAPASSPSSLSTSPPEVFSASVTTNHSSTVTSTQPTGAPTAPESPTEESSSDHTPTSHATAEPVPQEKTPPTTVSGKVMCELIDMETTTTFPRVIMQEVEHALSSGSIAAITVTVIAVVLLVFGVAAYLKIRHSSYGRLLDDHDYGSWGNYNNPLYDDS

SEQ ID NO: 32911 - protein, 1801 aa, Homo sapiens
  REGION 1..1801: note = ENSP00000360200
MPENPATDKLQVLQVLDRLKMKLQEKGDTSQNEKLSMFYETLKSPLFNQILTLQQSIKQLKGQLNHIPSDCSANFDFSRKGLLVFTDGSITNGNVHRPSNNSTVSGLFPWTPKLGNEDFNSVIQQMAQGRQIEYIDIERPSTGGLGFSVVALRSQNLGKVDIFVKDVQPGSVADRDQRLKENDQILAINHTPLDQNISHQQAIALLQQTTGSLRLIVAREPVHTKSSTSSSLNDTTLPETVCWGHVEEVELINDGSGLGFGIVGGKTSGVVVRTIVPGGLADRDGRLQTGDHILKIGGTNVQGMTSEQVAQVLRNCGNSVRMLVARDPAGDISVTPPAPAALPVALPTVASKGPGSDSSLFETYNVELVRKDGQSLGIRIVGYVGTSHTGEASGIYVKSIIPGSAAYHNGHIQVNDKIVAVDGVNIQGFANHDVVEVLRNAGQVVHLTLVRRKTSSSTSPLEPPSDRGTVVEPLKPPALFLTGAVETETNVDGEDEEIKERIDTLKNDNIQALEKLEKVPDSPENELKSRWENLLGPDYEVMVATLDTQIADDAELQKYSKLLPIHTLRLGVEVDSFDGHHYISSIVSGGPVDTLGLLQPEDELLEVNGMQLYGKSRREAVSFLKEVPPPFTLVCCRRLFDDEASVDEPRRTETSLPETEVDHNMDVNTEEDDDGELALWSPEVKIVELVKDCKGLGFSILDYQDPLDPTRSVIVIRSLVADGVAERSGGLLPGDRLVSVNEYCLDNTSLAEAVEILKAVPPGLVHLGICKPLVEDNEEESCYILHSSSNEDKTEFSGTIHDINSSLILEAPKGFRDEPYFKEELVDEPFLDLGKSFHSQQKEIEQSKEAWEMHEFLTPRLQEMDEEREILVDEEYELYQDPSPSMELYPLSHIQEATPVPSVNELHFGTQWLHDNEPSESQEARTGRTVYSQEAQPYGYCPENVMKENFVMESLPSVPSTEGNSQQGRFDDLENLNSLAKTSLDLGMIPNDVQGPSLLIDLPVVAQRREQEDLPLYQHQATRVISKASAYTGMLSSRYATDTCELPEREEGEGEETPNFSHWGPPRIVEIFREPNVSLGISIVGGQTVIKRLKNGEELKGIFIKQVLEDSPAGKTNALKTGDKILEVSGVDLQNASHSEAVEAIKNAGNPVVFIVQSLSSTPRVIPNVHNKANKITGNQNQDTQEKKEKRQGTAPPPMKLPPPYKALTDDSDENEEEDAFTDQKIRQRYADLPGELHIIELEKDKNGLGLSLAGNKDRSRMSIFVVGINPEGPAAADGRMRIGDELLEINNQILYGRSHQNASAIIKTAPSKVKLVFIRNEDAVNQMAVTPFPVPSSSPSSIEDQSGTEPISSEEDGSVEVGIKQLPESESFKLAVSQMKQQKYPTKVSFSSQEIPLAPASSYHSTDADFTGYGGFQAPLSVDPATCPIVPGQEMIIEISKGRSGLGLSIVGGKDTPLNAIVIHEVYEEGAAARDGRLWAGDQILEVNGVDLRNSSHEEAITALRQTPQKVRLVVYRDEAHYRDEENLEIFPVDLQKKAGRGLGLSIVGKRNGSGVFISDIVKGGAADLDGRLIQGDQILSVNGEDMRNASQETVATILKCAQGLVQLEIGRLRAGSWTSARTTSQNSQGSQQSAHSSCHPSFAPVITGLQNLVGTKRVSDPSQKNSGTDMEPRTVEINRELSDALGISIAGGRGSPLGDIPVFIAMIQASGVAARTQKLKVGDRIVSINGQPLDGLSHADVVNLLKNAYGRIILQVVADTNISAIAAQLENMSTGYHLGSPTAEHHPEDTEEQLQMTAD

SEQ ID NO: 32912 - protein, 683 aa, Homo sapiens
  REGION 1..683: note = ENSP00000489335
MPENPATDKLQVLQVLDRLKMKLQEKGDTSQNEKLSMFYETLKSPLFNQILTLQQSIKQLKGQLNHIPSDCSANFDFSRKGLLVFTDGSITNGNVHRPSNNSTVSGLFPWTPKLGNEDFNSVIQQMAQGRQIEYIDIERPSTGGLGFSVVALRSQNLGKVDIFVKDVQPGSVADRDQRLKENDQILAINHTPLDQNISHQQAIALLQQTTGSLRLIVAREPVHTKSSTSSSLNDTTLPETVCWGHVEEVELINDGSGLGFGIVGGKTSGVVVRTIVPGGLADRDGRLQTGDHILKIGGTNVQGMTSEQVAQVLRNCGNSVRMLVARDPAGDISVTPPAPAALPVALPTVASKGPGSDSSLFETYNVELVRKDGQSLGIRIVGYVGTSHTGEASGIYVKSIIPGSAAYHNGHIQVNDKIVAVDGVNIQGFANHDVVEVLRNAGQVVHLTLVRRKTSSSTSPLEPPSDRGTVVEPLKPPALFLTGAVETETNVDGEDEEIKERIDTLKNDNIQALEKLEKVPDSPENELKSRWENLLGPDYEVMVATLDTQIADDAELQKYSKLLPIHTLRLGVEVDSFDGHHYISSIVSGGPVDTLGLLQPEDELLEVNGMQLYGKSRREAVSFLKEVPPPFTLVCCRRLFDDEASVDEPRRTETSLPETENSLKYKRLTTIWMSILKKMMMGN

SEQ ID NO: 32913 - protein, 1134 aa, Homo sapiens
  REGION 1..1134: note = ENSP00000433669
MVATLDTQIADDAELQKYSKLLPIHTLRLGVEVDSFDGHHYISSIVSGGPVDTLGLLQPEDELLEVNGMQLYGKSRREAVSFLKEVPPPFTLVCCRRLFDDEASVDEPRRTETSLPETEVDHNMDVNTEEDDDGELALWSPEVKIVELVKDCKGLGFSILDYQDPLDPTRSVIVIRSLVADGVAERSGGLLPGDRLVSVNEYCLDNTSLAEAVEILKAVPPGLVHLGICKPLVEDNEEESCYILHSSSNEDKTEFSGTIHDINSSLILEAPKGFRDEPYFKEELVDEPFLDLGKSFHSQQKEIEQSKEAWEMHEFLTPRLQEMDEEREILVDEEYELYQDPSPSMELYPLSHIQEATPVPSVNELHFGTQWLHDNEPSESQEARTGRTVYSQEAQPYGYCPENVMKENFVMESLPSVPSTEGNSQQGRFDDLENLNSLAKTSLDLGMIPNDVQGPSLLIDLPVVAQRREQEDLPLYQHQATRVISKASAYTGMLSSRYATDTCELPEREEGEGEETPNFSHWGPPRIVEIFREPNVSLGISIVGGQTVIKRLKNGEELKGIFIKQVLEDSPAGKTNALKTGDKILEVSGVDLQNASHSEAVEAIKNAGNPVVFIVQSLSSTPRVIPNVHNKANKITGNQNQDTQEKKEKRQGTAPPPMKLPPPYKALTDDSDENEEEDAFTDQKIRQRYADLPGELHIIELEKDKNGLGLSLAGNKDRSRMSIFVVGINPEGPAAADGRMRIGDELLEINNQILYGRSHQNASAIIKTAPSKVKLVFIRNEDAVNQMAVTPFPVPSSSPSSIEDQSGTEPISSEEDGSVEVGIKQLPESESFKLAVSQMKQQKYPTKVSFSSQEIPLAPASSYHSTDADFTGYGGFQAPLSVDPATCPIVPGQEMIIEISKGRSGLGLSIVGGKDTPLNAIVIHEVYEEGAAARDGRLWAGDQILEVNGVDLRNSSHEEAITALRQTPQKVRLVVYRDEAHYRDEENLEIFPVDLQKKAGRGLGLSIVGKRNGSGVFISDIVKGGAADLDGRLIQGDQILSVNGEDMRNASQETVATILKCAQGLVQLEIGRLRAGSWTSARTTSQNSQSAECTQQLSSLLRSCHHWPAKPGWHKKSFRSFPEKFRHRYGTKDC

SEQ ID NO: 32914 - protein, 146 aa, Homo sapiens
  REGION 1..146: note = ENSP00000489200
  VARIANT 1: note = Any amino acid
XVQSLSSTPRVIPNVHNKANKITGNQNQDTQEKKEKRQGTAPPPMKLPPPYKALTDDSDENEEEDAFTDQKIRQRYADLPGELHIIELEKDKNGLGLSLAGNKDRSRMSIFVVGINPEGPAAADGRMRIGDELLETLTQNRIYSHP

SEQ ID NO: 32915 - protein, 111 aa, Homo sapiens
  REGION 1..111: note = ENSP00000489475
QEKKEKRQGTAPPPMKLPPPYKALTDDSDENEEEDAFTDQKIRQRYADLPGELHIIELEKDKNGLGLSLAGNKDRSRMSIFVVGINPEGPAAADGRMRIGDELLEVRSMCF

SEQ ID NO: 32916 - protein, 593 aa, Homo sapiens
  REGION 1..593: note = ENSP00000489159
MVQGGFPEKIRQRYADLPGELHIIELEKDKNGLGLSLAGNKDRSRMSIFVVGINPEGPAAADGRMRIGDELLEINNQILYGRSHQNASAIIKTAPSKVKLVFIRNEDAVNQMAVTPFPVPSSSPSSIEDQSGTEPISSEEDGSVEVGIKQLPESESFKLAVSQMKQQKYPTKVSFSSQEIPLAPASSYHSTDADFTGYGGFQAPLSVDPATCPIVPGQEMIIEISKGRSGLGLSIVGGKDTPLNAIVIHEVYEEGAAARDGRLWAGDQILEVNGVDLRNSSHEEAITALRQTPQKVRLVVYRDEAHYRDEENLEIFPVDLQKKAGRGLGLSIVGKRNGSGVFISDIVKGGAADLDGRLIQGDQILSVNGEDMRNASQETVATILKCAQGLVQLEIGRLRAGSWTSARTTSQNSQGSQQSAHSSCHPSFAPVITGLQNLVGTKRVSDPSQKNSGTDMEPRTVEINRELSDALGISIAGGRGSPLGDIPVFIAMIQASGVAARTQKLKVGDRIVSINGQPLDGLSHADVVNLLKNAYGRIILQVVADTNISAIAAQLENMSTGYHLGSPTAEHHPEDTERCCNCPMDSPCPLLLG

SEQ ID NO: 32917 - protein, 452 aa, Homo sapiens
  REGION 1..452: note = ENSP00000307496
MVQGGFPEKIRQRYADLPGELHIIELEKDKNGLGLSLAGNKDRSRMSIFVVGINPEGPAAADGRMRIGDELLEINNQILYGRSHQNASAIIKTAPSKVKLVFIRNEDAVNQMAVTPFPVPSSSPSSIEDQSGTEPISSEEDGSVEVGIKQLPESESFKLAVSQMKQQKYPTKVSFSSQEIPLAPASSYHSTDADFTGYGGFQAPLSVDPATCPIVPGQEMIIEISKGRSGLGLSIVGGKDTPLFWRLGSPRAWSQHLVRAFMLHHPVTEVEGQNAIVIHEVYEEGAAARDGRLWAGDQILEVNGVDLRNSSHEEAITALRQTPQKVRLVVYRDEAHYRDEENLEIFPVDLQKKAGRGLGLSIVGKRNGSGVFISDIVKGGAADLDGRLIQGDQILSVNGEDMRNASQETVATILKCAQGLVQLEIGRLRAGSWTSARTTSQNSQVVDGFSSD

SEQ ID NO: 32918 - protein, 139 aa, Homo sapiens
  REGION 1..139: note = ENSP00000489130
  VARIANT 1: note = Any amino acid
XAITALRQTPQKVRLVVYRDEAHYRDEENLEIFPVDLQKKAGRGLGLSIVGKRNGSGVFISDIVKGGAADLDGRLIQGDQILSVNGEDMRNASQETVATILKCAQGLVQLEIGRLRAGSWTSARTTSQNSQVVDGFSSD

SEQ ID NO: 32919 - protein, 1181 aa, Homo sapiens
  REGION 1..1181: note = ENSP00000326199
MPENPATDKLQVLQVLDRLKMKLQEKGDTSQNEKLSMFYETLKSPLFNQILTLQQSIKQLKGQLNHIPSDCSANFDFSRKGLLVFTDGSITNGNVHRPSNNSTVSGLFPWTPKLGNEDFNSVIQQMAQGRQIEYIDIERPSTGGLGFSVVALRSQNLGKVDIFVKDVQPGSVADRDQRLKENDQILAINHTPLDQNISHQQAIALLQQTTGSLRLIVAREPVHTKSSTSSSLNDTTLPETVCWGHVEEVELINDGSGLGFGIVGGKTSGVVVRTIVPGGLADRDGRLQTGDHILKIGGTNVQGMTSEQVAQVLRNCGNSVRMLVARDPAGDISVTPPAPAALPVALPTVASKGPGSDSSLFETYNVELVRKDGQSLGIRIVGYVGTSHTGEASGIYVKSIIPGSAAYHNGHIQVNDKIVAVDGVNIQGFANHDVVEVLRNAGQVVHLTLVRRKTSSSTSPLEPPSDRGTVVEPLKPPALFLTGAVETETNVDGEDEEIKERIDTLKNDNIQALEKLEKVPDSPENELKSRWENLLGPDYEVMVATLDTQIADDAELQKYSKLLPIHTLRLGVEVDSFDGHHYISSIVSGGPVDTLGLLQPEDELLEVNGMQLYGKSRREAVSFLKEVPPPFTLVCCRRLFDDEASVDEPRRTETSLPETEVDHNMDVNTEEDDDGELALWSPEVKIVELVKDCKGLGFSILDYQDPLDPTRSVIVIRSLVADGVAERSGGLLPGDRLVSVNEYCLDNTSLAEAVEILKAVPPGLVHLGICKPLVEDNEEESCYILHSSSNEDKTEFSGTIHDINSSLILEAPKGFRDEPYFKEELVDEPFLDLGKSFHSQQKEIEQSKEAWEMHEFLTPRLQEMDEEREILVDEEYELYQDPSPSMELYPLSHIQEATPVPSVNELHFGTQWLHDNEPSESQEARTGRTVYSQEAQPYGYCPENVMKENFVMESLPSVPSTEGNSQQGRFDDLENLNSLAKTSLDLGMIPNDVQGPSLLIDLPVVAQRREQEDLPLYQHQATRVISKASAYTGMLSSRYATDTCELPEREEGEGEETPNFSHWGPPRIVEIFREPNVSLGISIVGGQTVIKRLKNGEELKGIFIKQVLEDSPAGKTNALKTGDKILEVSGVDLQNASHSEAVEAIKNAGNPVVFIVQSLSSTPPWTTERDSVSKKKKRKER

SEQ ID NO: 32920 - protein, 1182 aa, Homo sapiens
  REGION 1..1182: note = ENSP00000479041
MPENPATDKLQVLQVLDRLKMKLQEKGDTSQNEKLSMFYETLKSPLFNQILTLQQSIKQLKGQLNHIPSDCSANFDFSRKGLLVFTDGSITNGNVHRPSNNSTVSGLFPWTPKLGNEDFNSVIQQMAQGRQIEYIDIERPSTGGLGFSVVALRSQNLGKVDIFVKDVQPGSVADRDQRLKENDQILAINHTPLDQNISHQQAIALLQQTTGSLRLIVAREPVHTKSSTSSSLNDTTLPETVCWGHVEEVELINDGSGLGFGIVGGKTSGVVVRTIVPGGLADRDGRLQTGDHILKIGGTNVQGMTSEQVAQVLRNCGNSVRMLVARDPAGDISVTPPAPAALPVALPTVASKGPGSDSSLFETYNVELVRKDGQSLGIRIVGYVGTSHTGEASGIYVKSIIPGSAAYHNGHIQVNDKIVAVDGVNIQGFANHDVVEVLRNAGQVVHLTLVRRKTSSSTSPLEPPSDRGTVVEPLKPPALFLTGAVETETNVDGEDEEIKERIDTLKNDNIQALEKLEKVPDSPENELKSRWENLLGPDYEVMVATLDTQIADDAELQKYSKLLPIHTLRLGVEVDSFDGHHYISSIVSGGPVDTLGLLQPEDELLEVNGMQLYGKSRREAVSFLKEVPPPFTLVCCRRLFDDEASVDEPRRTETSLPETEVDHNMDVNTEEDDDGELALWSPEVKIVELVKDCKGLGFSILDYQDPLDPTRSVIVIRSLVADGVAERSGGLLPGDRLVSVNEYCLDNTSLAEAVEILKAVPPGLVHLGICKPLVEDNEEESCYILHSSSNEDKTEFSGTIHDINSSLILEAPKGFRDEPYFKEELVDEPFLDLGKSFHSQQKEIEQSKEAWEMHEFLTPRLQEMDEEREILVDEEYELYQDPSPSMELYPLSHIQEATPVPSVNELHFGTQWLHDNEPSESQEARTGRTVYSQEAQPYGYCPENVMKENFVMESLPSVPSTEGNSQQGRFDDLENLNSLAKTSLDLGMIPNDVQGPSLLIDLPVVAQRREQEDLPLYQHQATRVISKASAYTGMLSSRYATDTCELPEREEGEGEETPNFSHWGPPRIVEIFREPNVSLGISIVGGQTVIKRLKNGEELKGIFIKQVLEDSPAGKTNALKTGDKILEASGVDKELCNQFVSPAEGRKIATWEVCSEPSSCHSTPAWVTEQDSVSKKKKNHEG

SEQ ID NO: 32921 - protein, 394 aa, Homo sapiens
  REGION 1..394: note = ENSP00000347385
MDMHCKADPFSAMHPGHGGVNQLGGVFVNGRPLPDVVRQRIVELAHQGVRPCDISRQLRVSHGCVSKILGRYYETGSIKPGVIGGSKPKVATPKVVDKIAEYKRQNPTMFAWEIRDRLLAEGICDNDTVPSVSSINRIIRTKVQQPFHPTPDGAGTGVTAPGHTIVPSTASPPVSSASNDPVGSYSINGILGIPRSNGEKRKRDEDVSEGSVPNGDSQSGVDSLRKHLRADTFTQQQLEALDRVFERPSYPDVFQASEHIKSEQGNEYSLPALTPGLDEVKSSLSASTNPELGSNVSGTQTYPVVTGRDMASTTLPGYPPHVPPTGQGSYPTSTLAGMVPGSEFSGNPYSHPQYTAYNEAWRFSNPALLSSPYYYSAAPRGSAPAAAAAAYDRH

SEQ ID NO: 32922 - protein, 396 aa, Homo sapiens
  REGION 1..396: note = ENSP00000359319
MDMHCKADPFSAMHPGHGGVNQLGGVFVNGRPLPDVVRQRIVELAHQGVRPCDISRQLRVSHGCVSKILGRYYETGSIKPGVIGGSKPKVATPKVVDKIAEYKRQNPTMFAWEIRDRLLAEGICDNDTVPSVSSINRIIRTKVQQPFHPTPDGAGTGVTAPGHTIVPSTASPPVSSASNDPVGSYSINGILGIPRSNGEKRKRDEDVSEGSVPNGDSQSGVDSLRKHLRADTFTQQQLEALDRVFERPSYPDVFQASEHIKSEQGNEYSLPALTPGLDEVKSSLSASTNPELGSNVSGTQTYPVVTGRDMASTTLPGYPPHVPPTGQGSYPTSTLAGMVPEAAVGPSSSLMSKPGRKLAEVPPCVQPTGASSPATRTATPSTRPTTRLGDSATPPY

SEQ ID NO: 32923 - protein, 393 aa, Homo sapiens
  REGION 1..393: note = ENSP00000355069
MDMHCKADPFSAMHRHGGVNQLGGVFVNGRPLPDVVRQRIVELAHQGVRPCDISRQLRVSHGCVSKILGRYYETGSIKPGVIGGSKPKVATPKVVDKIAEYKRQNPTMFAWEIRDRLLAEGICDNDTVPSVSSINRIIRTKVQQPFHPTPDGAGTGVTAPGHTIVPSTASPPVSSASNDPVGSYSINGILGIPRSNGEKRKRDEDVSEGSVPNGDSQSGVDSLRKHLRADTFTQQQLEALDRVFERPSYPDVFQASEHIKSEQGNEYSLPALTPGLDEVKSSLSASTNPELGSNVSGTQTYPVVTGRDMASTTLPGYPPHVPPTGQGSYPTSTLAGMVPGSEFSGNPYSHPQYTAYNEAWRFSNPALLSSPYYYSAAPRGSAPAAAAAAYDRH

SEQ ID NO: 32924 - protein, 214 aa, Homo sapiens
  REGION 1..214: note = ENSP00000398652
MDMHCKADPFSAMHPGHGGVNQLGGVFVNGRPLPDVVRQRIVELAHQGVRPCDISRQLRVSHGCVSKILGRYYETGSIKPGVIGGSKPKVATPKVVDKIAEYKRQNPTMFAWEIRDRLLAEGICDNDTVPSVSSINRIIRTKVQQPFHPTPDGAGTGVTAPGHTIVPSTASPPVSSASNDPVGSYSINGILGIPRSNGEKRKRDEVEVYTDPAH

SEQ ID NO: 32925 - protein, 304 aa, Homo sapiens
  REGION 1..304: note = ENSP00000452489
MAGPCCVWGVVFFSCLSPAGHGGVNQLGGVFVNGRPLPDVVRQRIVELAHQGVRPCDISRQLRVSHGCVSKILGRYYETGSIKPGVIGGSKPKVATPKVVDKIAEYKRQNPTMFAWEIRDRLLAEGICDNDTVPSVSSINRIIRTKVQQPFHPTPDGAGTGVTAPGHTIVPSTASPPVSSASNDPVGSYSINGILGIPRSNDVSEGSVPNGDSQSGVDSLRKHLRADTFTQQQLEALDRVFERPSYPDVFQASEHIKSEQGNEYSLPALTPGLDEVKSSLSASTNPELGSNVSGTQTYPVVTGR

SEQ ID NO: 32926 - protein, 417 aa, Homo sapiens
  REGION 1..417: note = ENSP00000396259
MDMHCKADPFSAMHPGHGGVNQLGGVFVNGRPLPDVVRQRIVELAHQGVRPCDISRQLRVSHGCVSKILGRYYETGSIKPGVIGGSKPKVATPKVVDKIAEYKRQNPTMFAWEIRDRLLAEGICDNDTVPSVSSINRIIRTKVQQPFHPTPDGAGTGVTAPGHTIVPSTASPPVSSASNDPVGSYSINGILGIPRSNGEKRKRDEVEVYTDPAHIRGGGGLHLVWTLRDVSEGSVPNGDSQSGVDSLRKHLRADTFTQQQLEALDRVFERPSYPDVFQASEHIKSEQGNEYSLPALTPGLDEVKSSLSASTNPELGSNVSGTQTYPVVTGRDMASTTLPGYPPHVPPTGQGSYPTSTLAGMVPGSEFSGNPYSHPQYTAYNEAWRFSNPALLSSPYYYSAAPRGSAPAAAAAAYDRH

SEQ ID NO: 32927 - protein, 505 aa, Homo sapiens
  REGION 1..505: note = ENSP00000375921
MTTLAGAVPRMMRPGPGQNYPRSGFPLEVSTPLGQGRVNQLGGVFINGRPLPNHIRHKIVEMAHHGIRPCVISRQLRVSHGCVSKILCRYQETGSIRPGAIGGSKPKQVTTPDVEKKIEEYKRENPGMFSWEIRDKLLKDAVCDRNTVPSVSSISRILRSKFGKGEEEEADLERKEAEESEKKAKHSIDGILSERASAPQSDEGSDIDSEPDLPLKRKQRRSRTTFTAEQLEELERAFERTHYPDIYTREELAQRAKLTEARVQVWFSNRRARWRKQAGANQLMAFNHLIPGGFPPTAMPTLPTYQLSETSYQPTSIPQAVSDPSSTVHRPQPLPPSTVHQSTIPSNPDSSSAYCLPSTRHGFSSYTDSFVPPSGPSNPMNPTIGNGLSPQVMGLLTNHGGVPHQPQTDYALSPLTGGLEPTTTVSASCSQRLDHMKSLDSLPTSQSYCPPTYSTTGYSMDPVTGYQYGQYGQSAFHYLKPDIAWFQILLNTFDKSSGEEEDLEQ

SEQ ID NO: 32928 - protein, 403 aa, Homo sapiens
  REGION 1..403: note = ENSP00000342092
MTTLAGAVPRMMRPGPGQNYPRSGFPLEVSTPLGQGRVNQLGGVFINGRPLPNHIRHKIVEMAHHGIRPCVISRQLRVSHGCVSKILCRYQETGSIRPGAIGGSKPKQVTTPDVEKKIEEYKRENPGMFSWEIRDKLLKDAVCDRNTVPSVSSISRILRSKFGKGEEEEADLERKEAEESEKKAKHSIDGILSERASAPQSDEGSDIDSEPDLPLKRKQRRSRTTFTAEQLEELERAFERTHYPDIYTREELAQRAKLTEARVQVWFSNRRARWRKQAGANQLMAFNHLIPGGFPPTAMPTLPTYQLSETSYQPTSIPQAVSDPSSTVHRPQPLPPSTVHQSTIPSNPDSSSAYCLPSTRHGFSSYTDSFVPPSGPSNPMNPTIGNGLSPQVPFIISSQISRK

SEQ ID NO: 32929 - protein, 479 aa, Homo sapiens
  REGION 1..479: note = ENSP00000343052
MTTLAGAVPRMMRPGPGQNYPRSGFPLEVSTPLGQGRVNQLGGVFINGRPLPNHIRHKIVEMAHHGIRPCVISRQLRVSHGCVSKILCRYQETGSIRPGAIGGSKPKQVTTPDVEKKIEEYKRENPGMFSWEIRDKLLKDAVCDRNTVPSVSSISRILRSKFGKGEEEEADLERKEAEESEKKAKHSIDGILSERASAPQSDEGSDIDSEPDLPLKRKQRRSRTTFTAEQLEELERAFERTHYPDIYTREELAQRAKLTEARVQVWFSNRRARWRKQAGANQLMAFNHLIPGGFPPTAMPTLPTYQLSETSYQPTSIPQAVSDPSSTVHRPQPLPPSTVHQSTIPSNPDSSSAYCLPSTRHGFSSYTDSFVPPSGPSNPMNPTIGNGLSPQVMGLLTNHGGVPHQPQTDYALSPLTGGLEPTTTVSASCSQRLDHMKSLDSLPTSQSYCPPTYSTTGYSMDPVTGYQYGQYGQSKPWTF

SEQ ID NO: 32930 - protein, 407 aa, Homo sapiens
  REGION 1..407: note = ENSP00000338767
MTTLAGAVPRMMRPGPGQNYPRSGFPLEVSTPLGQGRVNQLGGVFINGRPLPNHIRHKIVEMAHHGIRPCVISRQLRVSHGCVSKILCRYQETGSIRPGAIGGSKPKQVTTPDVEKKIEEYKRENPGMFSWEIRDKLLKDAVCDRNTVPSVSSISRILRSKFGKGEEEEADLERKEAEESEKKAKHSIDGILSERASAPQSDEGSDIDSEPDLPLKRKQRRSRTTFTAEQLEELERAFERTHYPDIYTREELAQRAKLTEARVQVWFSNRRARWRKQAGANQLMAFNHLIPGGFPPTAMPTLPTYQLSETSYQPTSIPQAVSDPSSTVHRPQPLPPSTVHQSTIPSNPDSSSAYCLPSTRHGFSSYTDSFVPPSGPSNPMNPTIGNGLSPQVPFIISSQISLGFKSF

SEQ ID NO: 32931 - protein, 484 aa, Homo sapiens
  REGION 1..484: note = ENSP00000375922
MTTLAGAVPRMMRPGPGQNYPRSGFPLEVSTPLGQGRVNQLGGVFINGRPLPNHIRHKIVEMAHHGIRPCVISRQLRVSHGCVSKILCRYQETGSIRPGAIGGSKPKQVTTPDVEKKIEEYKRENPGMFSWEIRDKLLKDAVCDRNTVPSVSSISRILRSKFGKGEEEEADLERKEAEESEKKAKHSIDGILSERASAPQSDEGSDIDSEPDLPLKRKQRRSRTTFTAEQLEELERAFERTHYPDIYTREELAQRAKLTEARVQVWFSNRRARWRKQAGANQLMAFNHLIPGGFPPTAMPTLPTYQLSETSYQPTSIPQAVSDPSSTVHRPQPLPPSTVHQSTIPSNPDSSSAYCLPSTRHGFSSYTDSFVPPSGPSNPMNPTIGNGLSPQVMGLLTNHGGVPHQPQTDYALSPLTGGLEPTTTVSASCSQRLDHMKSLDSLPTSQSYCPPTYSTTGYSMDPVTGYQYGQYGQSAFHYLKPDIA

SEQ ID NO: 32932 - protein, 483 aa, Homo sapiens
  REGION 1..483: note = ENSP00000386750
MTTLAGAVPRMMRPGPGQNYPRSGFPLEVSTPLGQGRVNQLGGVFINGRPLPNHIRHKIVEMAHHGIRPCVISRQLRVSHGCVSKILCRYQETGSIRPGAIGGSKPKVTTPDVEKKIEEYKRENPGMFSWEIRDKLLKDAVCDRNTVPSVSSISRILRSKFGKGEEEEADLERKEAEESEKKAKHSIDGILSERASAPQSDEGSDIDSEPDLPLKRKQRRSRTTFTAEQLEELERAFERTHYPDIYTREELAQRAKLTEARVQVWFSNRRARWRKQAGANQLMAFNHLIPGGFPPTAMPTLPTYQLSETSYQPTSIPQAVSDPSSTVHRPQPLPPSTVHQSTIPSNPDSSSAYCLPSTRHGFSSYTDSFVPPSGPSNPMNPTIGNGLSPQVMGLLTNHGGVPHQPQTDYALSPLTGGLEPTTTVSASCSQRLDHMKSLDSLPTSQSYCPPTYSTTGYSMDPVTGYQYGQYGQSAFHYLKPDIA

SEQ ID NO: 32933 - protein, 215 aa, Homo sapiens
  REGION 1..215: note = ENSP00000386817
MTTLAGAVPRMMRPGPGQNYPRSGFPLEVSTPLGQGRVNQLGGVFINGRPLPNHIRHKIVEMAHHGIRPCVISRQLRVSHGCVSKILCRYQETGSIRPGAIGGSKPKQVTTPDVEKKIEEYKRENPGMFSWEIRDKLLKDAVCDRNTVPSVSSISRILRSKFGKGEEEEADLERKEAEESEKKAKHSIDGILSERGKRWRLGRRTCWVTWRASAS

SEQ ID NO: 32934 - protein, 206 aa, Homo sapiens
  REGION 1..206: note = ENSP00000258387
MTTLAGAVPRMMRPGPGQNYPRSGFPLEVSTPLGQGRVNQLGGVFINGRPLPNHIRHKIVEMAHHGIRPCVISRQLRVSHGCVSKILCRYQETGSIRPGAIGGSKPKQVTTPDVEKKIEEYKRENPGMFSWEIRDKLLKDAVCDRNTVPSVSSISRILRSKFGKGEEEEADLERKEAEESEKKAKHSIDGILSERGKALVSGVSSH

SEQ ID NO: 32935 - protein, 436 aa, Homo sapiens
  REGION 1..436: note = ENSP00000480026
MQNSHSGVNQLGGVFVNGRPLPDSTRQKIVELAHSGARPCDISRILQTHADAKVQVLDNQNVSNGCVSKILGRYYETGSIRPRAIGGSKPRVATPEVVSKIAQYKRECPSIFAWEIRDRLLSEGVCTNDNIPSVSSINRVLRNLASEKQQMGADGMYDKLRMLNGQTGSWGTRPGWYPGTSVPGQPTQDGCQQQEGGGENTNSISSNGEDSDEAQMRLQLKRKLQRNRTSFTQEQIEALEKEFERTHYPDVFARERLAAKIDLPEARIQVWFSNRRAKWRREEKLRNQRRQASNTPSHIPISSSFSTSVYQPIPQPTTPVSSFTSGSMLGRTDTALTNTYSALPPMPSFTMANNLPMQPPVPSQTSSYSCMLPTSPSVNGRSYDTYTPPHMQTHMNSQPMGTSGTTSTGLISPGVSVPVQVPGSEPDMSQYWPRLQ

SEQ ID NO: 32936 - protein, 436 aa, Homo sapiens; identical to SEQ ID NO: 32935
  REGION 1..436: note = ENSP00000492024

SEQ ID NO: 32937 - protein, 422 aa, Homo sapiens [sequence omitted]

SEQ ID NO: 32938 - protein, 436 aa, Homo sapiens; identical to SEQ ID NO: 32935
  REGION 1..436: note = ENSP00000404100

SEQ ID NO: 32939 - protein, 422 aa, Homo sapiens [sequence omitted]

SEQ ID NO: 32940 - protein, 422 aa, Homo sapiens [sequence omitted]

SEQ ID NO: 32941 - protein, 422 aa, Homo sapiens [sequence omitted]

SEQ ID NO: 32942 - protein, 436 aa, Homo sapiens; identical to SEQ ID NO: 32935
  REGION 1..436: note = ENSP00000368424

SEQ ID NO: 32943 - protein, 422 aa, Homo sapiens [sequence omitted]

SEQ ID NO: 32944 - protein, 302 aa, Homo sapiens
  REGION 1..302: note = ENSP00000492316
MQNNGCQQQEGGGENTNSISSNGEDSDEAQMRLQLKRKLQRNRTSFTQEQIEALEKEFERTHYPDVFARERLAAKIDLPEARIQVWFSNRRAKWRREEKLRNQRRQASNTPSHIPISSSFSTSVYQPIPQPTTPVSSFTSGSMLGRTDTALTNTYSALPPMPSFTMANNLPMQDSFPLVCQFQFKFPEVNLICLNTGQDYSKKKKKKKKERKYCVNSVSDYGDTTVELSGKKEKWLLEPLQFYNCVLYCTTGEGMDLKQGPLYTEGTISVGTNLHFGIQTFIHFGVLFVNGHLYVIMKKRTM

SEQ ID NO: 32945 - protein, 436 aa, Homo sapiens; identical to SEQ ID NO: 32935
  REGION 1..436: note = ENSP00000368401

SEQ ID NO: 32946 - protein, 436 aa, Homo sapiens; identical to SEQ ID NO: 32935
  REGION 1..436: note = ENSP00000492296

SEQ ID NO: 32947 - protein, 436 aa, Homo sapiens; identical to SEQ ID NO: 32935
  REGION 1..436: note = ENSP00000492476

SEQ ID NO: 32948 - protein, 436 aa, Homo sapiens; identical to SEQ ID NO: 32935
  REGION 1..436: note = ENSP00000491872

SEQ ID NO: 32949 - protein, 473 aa, Homo sapiens
  REGION 1..473: note = ENSP00000491948
MQNSHSGVNQLGGVFVNGRPLPDSTRQKIVELAHSGARPCDISRILQVSNGCVSKILGRYYETGSIRPRAIGGSKPRVATPEVVSKIAQYKRECPSIFAWEIRDRLLSEGVCTNDNIPSVSSINRVLRNLASEKQQMGADGMYDKLRMLNGQTGSWGTRPGWYPGTSVPGQPTQDGCQQQEGGGENTNSISSNGEDSDEAQMRLQLKRKLQRNRTSFTQEQIEALEKEFERTHYPDVFARERLAAKIDLPEARIQVWFSNRRAKWRREEKLRNQRRQASNTPSHIPISSSFSTSVYQPIPQPTTPVSSFTSGSMLGRTDTALTNTYSALPPMPSFTMANNLPMQDSFPLVCQFQFKFPEVNLICLNTGQDYSKKKKKKKKERKYCVNSVSDYGDTTVELSGKKEKWLLEPLQFYNCVLYCTTGEGMDLKQGPLYTEGTISVGTNLHFGIQTFIHFGVLFVNGHLYVIMKKRTM

SEQ ID NO: 32950 - protein, 221 aa, Homo sapiens
  REGION 1..221: note = ENSP00000492769
MRLQLKRKLQRNRTSFTQEQIEALEKEFERTHYPDVFARERLAAKIDLPEARIQVWFSNRRAKWRREEKLRNQRRQASNTPSHIPISSSFSTSVYQPIPQPTTPVSSFTSGSMLGRTDTALTNTYSALPPMPSFTMANNLPMQPPVPSQTSSYSCMLPTSPSVNGRSYDTYTPPHMQTHMNSQPMGTSGTTSTGLISPGVSVPVQVPGSEPDMSQYWPRLQ

SEQ ID NO: 32951 - protein, 422 aa, Homo sapiens [sequence omitted]

SEQ ID NO: 32952 - protein, 286 aa, Homo sapiens
  REGION 1..286: note = ENSP00000490971
MGADGMYDKLRMLNGQTGSWGTRPGWYPGTSVPGQPTQDGCQQQEGGGENTNSISSNGEDSDEAQMRLQLKRKLQRNRTSFTQEQIEALEKEFERTHYPDVFARERLAAKIDLPEARIQVWFSNRRAKWRREEKLRNQRRQASNTPSHIPISSSFSTSVYQPIPQPTTPVSSFTSGSMLGRTDTALTNTYSALPPMPSFTMANNLPMQPPVPSQTSSYSCMLPTSPSVNGRSYDTYTPPHMQTHMNSQPMGTSGTTSTGLISPGVSVPVQVPGSEPDMSQYWPRLQ

SEQ ID NO: 32953 - protein, 286 aa, Homo sapiens; identical to SEQ ID NO: 32952
  REGION 1..286: note = ENSP00000491944

SEQ ID NO: 32954 - protein, 286 aa, Homo sapiens; identical to SEQ ID NO: 32952
  REGION 1..286: note = ENSP00000492166

SEQ ID NO: 32955 - protein, 286 aa, Homo sapiens; identical to SEQ ID NO: 32952
  REGION 1..286: note = ENSP00000492205

SEQ ID NO: 32956 - protein, 286 aa, Homo sapiens; identical to SEQ ID NO: 32952
  REGION 1..286: note = ENSP00000492658

SEQ ID NO: 32957 - protein, 400 aa, Homo sapiens
  REGION 1..400: note = ENSP00000492756
MQNSHSGVNQLGGVFVNGRPLPDSTRQKIVELAHSGARPCDISRILQTHADAKVQVLDNQNVSNGCVSKILGRYYETGSIRPRAIGGSKPRVATPEVVSSINRVLRNLASEKQQMGADGMYDKLRMLNGQTGSWGTRPGWYPGTSVPGQPTQDGCQQQEGGGENTNSISSNGEDSDEAQMRLQLKRKLQRNRTSFTQEQIEALEKEFERTHYPDVFARERLAAKIDLPEARIQVWFSNRRAKWRREEKLRNQRRQASNTPSHIPISSSFSTSVYQPIPQPTTPVSSFTSGSMLGRTDTALTNTYSALPPMPSFTMANNLPMQPPVPSQTSSYSCMLPTSPSVNGRSYDTYTPPHMQTHMNSQPMGTSGTTSTGLISPGVSVPVQVPGSEPDMSQYWPRLQ

SEQ ID NO: 32958 - protein, 386 aa, Homo sapiens
  REGION 1..386: note = ENSP00000492181
MQNSHSGVNQLGGVFVNGRPLPDSTRQKIVELAHSGARPCDISRILQVSNGCVSKILGRYYETGSIRPRAIGGSKPRVATPEVVSSINRVLRNLASEKQQMGADGMYDKLRMLNGQTGSWGTRPGWYPGTSVPGQPTQDGCQQQEGGGENTNSISSNGEDSDEAQMRLQLKRKLQRNRTSFTQEQIEALEKEFERTHYPDVFARERLAAKIDLPEARIQVWFSNRRAKWRREEKLRNQRRQASNTPSHIPISSSFSTSVYQPIPQPTTPVSSFTSGSMLGRTDTALTNTYSALPPMPSFTMANNLPMQPPVPSQTSSYSCMLPTSPSVNGRSYDTYTPPHMQTHMNSQPMGTSGTTSTGLISPGVSVPVQVPGSEPDMSQYWPRLQ

SEQ ID NO: 32959 - protein, 422 aa, Homo sapiens [sequence omitted]

SEQ ID NO: 32960 - protein, 368 aa, Homo sapiens
  REGION 1..368: note = ENSP00000492587
MQNSHSGVNQLGGVFVNGRPLPDSTRQKIVELAHSGARPCDISRILQTHADAKVQVLDNQNVSNGCVSSINRVLRNLASEKQQMGADGMYDKLRMLNGQTGSWGTRPGWYPGTSVPGQPTQDGCQQQEGGGENTNSISSNGEDSDEAQMRLQLKRKLQRNRTSFTQEQIEALEKEFERTHYPDVFARERLAAKIDLPEARIQVWFSNRRAKWRREEKLRNQRRQASNTPSHIPISSSFSTSVYQPIPQPTTPVSSFTSGSMLGRTDTALTNTYSALPPMPSFTMANNLPMQPPVPSQTSSYSCMLPTSPSVNGRSYDTYTPPHMQTHMNSQPMGTSGTTSTGLISPGVSVPVQVPGSEPDMSQYWPRL

SEQ ID NO: 32961 - protein, 367 aa, Homo sapiens
  REGION 1..367: note = ENSP00000388132
MQNSHSGVNQLGGVFVNGRPLPDSTRQKIVELAHSGARPCDISRILQTHADAKVQVLDNQNVSNGCVSSINRVLRNLASEKQQMGADGMYDKLRMLNGQTGSWGTRPGWYPGTSVPGQPTQDGCQQQEGGGENTNSISSNGEDSDEAQMRLQLKRKLQRNRTSFTQEQIEALEKEFERTHYPDVFARERLAAKIDLPEARIQVWFSNRRAKWRREEKLRNQRRQASNTPSHIPISSSFSTSVYQPIPQPTTPVSSFTSGSMLGRTDTALTNTYSALPPMPSFTMANNLPMQPPVPSQTSSYSCMLPTSPSVNGRSYDTYTPPHMQTHMNSQPMGTSGTTSTGLISPGVSVPVQVPGSEPDMSQYWPR

SEQ ID NO: 32962 - protein, 283 aa, Homo sapiens
  REGION 1..283: note = ENSP00000491324
MGADGMYDKLRMLNGQTGSWGTRPGWYPGTSVPGQPTQDGCQQQEGGGENTNSISSNGEDSDEAQMRLQLKRKLQRNRTSFTQEQIEALEKEFERTHYPDVFARERLAAKIDLPEARIQVWFSNRRAKWRREEKLRNQRRQASNTPSHIPISSSFSTSVYQPIPQPTTPVSSFTSGSMLGRTDTALTNTYSALPPMPSFTMANNLPMQPPVPSQTSSYSCMLPTSPSVNGRSYDTYTPPHMQTHMNSQPMGTSGTTSTGLISPGVSVPVQVPGSEPDMSQYWP

SEQ ID NO: 32963 - protein, 283 aa, Homo sapiens; identical to SEQ ID NO: 32962
  REGION 1..283: note = ENSP00000491214

SEQ ID NO: 32964 - protein, 382 aa, Homo sapiens
  REGION 1..382: note = ENSP00000492397
MQNSHSGVNQLGGVFVNGRPLPDSTRQKIVELAHSGARPCDISRILQTHADAKVQVLDNQNVSNGCVSKILGRYYETGSIRPRAIGGSKPRVATPEVVSKIAQYKRECPSIFAWEIRDRLLSEGVCTNDNIPSVSSINRVLRNLASEKQQMGADGMYDKLRMLNGQTGSWGTRPGWYPGTSVPGQPTQDGCQQQEGGGENTNSISSNGEDSDEAQMRLQLKRKLQRNRTSFTQEQIEALEKEFERTHYPDVFARERLAAKIDLPEARIQVWFSNRRAKWRREEKLRNQRRQASNTPSHIPISSSFSTSVYQPIPQPTTPVSSFTSGSMLGRTDTALTNTYSALPPMPSFTMANNLPMQDSFPLVCQFQFKFPEVNLICLNTG

SEQ ID NO: 32965 - protein, 419 aa, Homo sapiens
  REGION 1..419: note = ENSP00000368406
MQNSHSGVNQLGGVFVNGRPLPDSTRQKIVELAHSGARPCDISRILQVSNGCVSKILGRYYETGSIRPRAIGGSKPRVATPEVVSKIAQYKRECPSIFAWEIRDRLLSEGVCTNDNIPSVSSINRVLRNLASEKQQMGADGMYDKLRMLNGQTGSWGTRPGWYPGTSVPGQPTQDGCQQQEGGGENTNSISSNGEDSDEAQMRLQLKRKLQRNRTSFTQEQIEALEKEFERTHYPDVFARERLAAKIDLPEARIQVWFSNRRAKWRREEKLRNQRRQASNTPSHIPISSSFSTSVYQPIPQPTTPVSSFTSGSMLGRTDTALTNTYSALPPMPSFTMANNLPMQPPVPSQTSSYSCMLPTSPSVNGRSYDTYTPPHMQTHMNSQPMGTSGTTSTGLISPGVSVPVQVPGSEPDMSQYWP

SEQ ID NO: 32966 - protein, 419 aa, Homo sapiens; identical to SEQ ID NO: 32965
  REGION 1..419: note = ENSP00000491862

SEQ ID NO: 32967 - protein, 282 aa, Homo sapiens
  REGION 1..282: note = ENSP00000491365
MGADGMYDKLRMLNGQTGSWGTRPGWYPGTSVPGQPTQDGCQQQEGGGENTNSISSNGEDSDEAQMRLQLKRKLQRNRTSFTQEQIEALEKEFERTHYPDVFARERLAAKIDLPEARIQVWFSNRRAKWRREEKLRNQRRQASNTPSHIPISSSFSTSVYQPIPQPTTPVSSFTSGSMLGRTDTALTNTYSALPPMPSFTMANNLPMQPPVPSQTSSYSCMLPTSPSVNGRSYDTYTPPHMQTHMNSQPMGTSGTTSTGLISPGVSVPVQVPGSEPDMSQYW

SEQ ID NO: 32968 - protein, 282 aa, Homo sapiens; identical to SEQ ID NO: 32967
  REGION 1..282: note = ENSP00000368418

SEQ ID NO: 32969 - protein, 417 aa, Homo sapiens
  REGION 1..417: note = ENSP00000431585
MQNSHSGVNQLGGVFVNGRPLPDSTRQKIVELAHSGARPCDISRILQVSNGCVSKILGRYYETGSIRPRAIGGSKPRVATPEVVSKIAQYKRECPSIFAWEIRDRLLSEGVCTNDNIPSVSSINRVLRNLASEKQQMGADGMYDKLRMLNGQTGSWGTRPGWYPGTSVPGQPTQDGCQQQEGGGENTNSISSNGEDSDEAQMRLQLKRKLQRNRTSFTQEQIEALEKEFERTHYPDVFARERLAAKIDLPEARIQVWFSNRRAKWRREEKLRNQRRQASNTPSHIPISSSFSTSVYQPIPQPTTPVSSFTSGSMLGRTDTALTNTYSALPPMPSFTMANNLPMQPPVPSQTSSYSCMLPTSPSVNGRSYDTYTPPHMQTHMNSQPMGTSGTTSTGLISPGVSVPVQVPGSEPDMSQY

SEQ ID NO: 32970 - protein, 281 aa, Homo sapiens
  REGION 1..281: note = ENSP00000491065
MGADGMYDKLRMLNGQTGSWGTRPGWYPGTSVPGQPTQDGCQQQEGGGENTNSISSNGEDSDEAQMRLQLKRKLQRNRTSFTQEQIEALEKEFERTHYPDVFARERLAAKIDLPEARIQVWFSNRRAKWRREEKLRNQRRQASNTPSHIPISSSFSTSVYQPIPQPTTPVSSFTSGSMLGRTDTALTNTYSALPPMPSFTMANNLPMQPPVPSQTSSYSCMLPTSPSVNGRSYDTYTPPHMQTHMNSQPMGTSGTTSTGLISPGVSVPVQVPGSEPDMSQY

SEQ ID NO: 32971 - protein, 163 aa, Homo sapiens
  REGION 1..163: note = ENSP00000492177
MQNSHSGVNQLGGVFVNGRPLPDSTRQKIVELAHSGARPCDISRILQTHADAKVQVLDNQNVSNGCVSKILGRYYETGSIRPRAIGGSKPRVATPEVVSKIAQYKRECPSIFAWEIRDRLLSEGVCTNDNIPSVSSLRTSALPALSPMLSPLYLLPPSLSTVS

SEQ ID NO: 32972 - protein, 277 aa, Homo sapiens
  REGION 1..277: note = ENSP00000491904
MGADGMYDKLRMLNGQTGSWGTRPGWYPGTSVPGQPTQDGCQQQEGGGENTNSISSNGEDSDEAQMRLQLKRKLQRNRTSFTQEQIEALEKEFERTHYPDVFARERLAAKIDLPEARIQVWFSNRRAKWRREEKLRNQRRQASNTPSHIPISSSFSTSVYQPIPQPTTPVSSFTSGSMLGRTDTALTNTYSALPPMPSFTMANNLPMQPPVPSQTSSYSCMLPTSPSVNGRSYDTYTPPHMQTHMNSQPMGTSGTTSTGLISPGVSVPVQVPGSEPD

SEQ ID NO: 32973 - protein, 277 aa, Homo sapiens; identical to SEQ ID NO: 32972
  REGION 1..277: note = ENSP00000491280

SEQ ID NO: 32974 - protein, 413 aa, Homo sapiens
  REGION 1..413: note = ENSP00000492802
MQNSHSGVNQLGGVFVNGRPLPDSTRQKIVELAHSGARPCDISRILQVSNGCVSKILGRYYETGSIRPRAIGGSKPRVATPEVVSKIAQYKRECPSIFAWEIRDRLLSEGVCTNDNIPSVSSINRVLRNLASEKQQMGADGMYDKLRMLNGQTGSWGTRPGWYPGTSVPGQPTQDGCQQQEGGGENTNSISSNGEDSDEAQMRLQLKRKLQRNRTSFTQEQIEALEKEFERTHYPDVFARERLAAKIDLPEARIQVWFSNRRAKWRREEKLRNQRRQASNTPSHIPISSSFSTSVYQPIPQPTTPVSSFTSGSMLGRTDTALTNTYSALPPMPSFTMANNLPMQPPVPSQTSSYSCMLPTSPSVNGRSYDTYTPPHMQTHMNSQPMGTSGTTSTGLISPGVSVPVQVPGSEPD

SEQ ID NO: 32975 - protein, 263 aa, Homo sapiens
  REGION 1..263: note = ENSP00000492437
MGADGMYDKLRMLNGQTGSWGTRPGWYPGTSVPGQPTQDGCQQQEGGGENTNSISSNGEDSDEAQMRLQLKRKLQRNRTSFTQEQIEALEKEFERTHYPDVFARERLAAKIDLPEARIQVWFSNRRAKWRREEKLRNQRRQASNTPSHIPISSSFSTSVYQPIPQPTTPVSSFTSGSMLGRTDTALTNTYSALPPMPSFTMANNLPMQPPVPSQTSSYSCMLPTSPSVNGRSYDTYTPPHMQTHMNSQPMGTSGTTSTGLISP

SEQ ID NO: 32976 - protein, 260 aa, Homo sapiens
  REGION 1..260: note = ENSP00000491267
MGADGMYDKLRMLNGQTGSWGTRPGWYPGTSVPGQPTQDGCQQQEGGGENTNSISSNGEDSDEAQMRLQLKRKLQRNRTSFTQEQIEALEKEFERTHYPDVFARERLAAKIDLPEARIQVWFSNRRAKWRREEKLRNQRRQASNTPSHIPISSSFSTSVYQPIPQPTTPVSSFTSGSMLGRTDTALTNTYSALPPMPSFTMANNLPMQPPVPSQTSSYSCMLPTSPSVNGRSYDTYTPPHMQTHMNSQPMGTSGTTSTGL

SEQ ID NO: 32977 - protein, 335 aa, Homo sapiens
  REGION 1..335: note = ENSP00000368410
MQNSHSGVNQLGGVFVNGRPLPDSTRQKIVELAHSGARPCDISRILQTHADAKVQVLDNQNVSNGCVSSINRVLRNLASEKQQMGADGMYDKLRMLNGQTGSWGTRPGWYPGTSVPGQPTQDGCQQQEGGGENTNSISSNGEDSDEAQMRLQLKRKLQRNRTSFTQEQIEALEKEFERTHYPDVFARERLAAKIDLPEARIQVWFSNRRAKWRREEKLRNQRRQASNTPSHIPISSSFSTSVYQPIPQPTTPVSSFTSGSMLGRTDTALTNTYSALPPMPSFTMANNLPMQPPVPSQTSSYSCMLPTSPSVNGRSYDTYTPPHMQTHMNSQPMGT

SEQ ID NO: 32978 - protein, 249 aa, Homo sapiens
  REGION 1..249: note = ENSP00000491210
MGADGMYDKLRMLNGQTGSWGTRPGWYPGTSVPGQPTQDGCQQQEGGGENTNSISSNGEDSDEAQMRLQLKRKLQRNRTSFTQEQIEALEKEFERTHYPDVFARERLAAKIDLPEARIQVWFSNRRAKWRREEKLRNQRRQASNTPSHIPISSSFSTSVYQPIPQPTTPVSSFTSGSMLGRTDTALTNTYSALPPMPSFTMANNLPMQPPVPSQTSSYSCMLPTSPSVNGRSYDTYTPPHMQTHMNSQP

SEQ ID NO: 32979 - protein, 205 aa, Homo sapiens
  REGION 1..205: note = ENSP00000492808
MQNNGCQQQEGGGENTNSISSNGEDSDEAQMRLQLKRKLQRNRTSFTQEQIEALEKEFERTHYPDVFARERLAAKIDLPEARIQVWFSNRRAKWRREEKLRNQRRQASNTPSHIPISSSFSTSVYQPIPQPTTPVSSFTSGSMLGRTDTALTNTYSALPPMPSFTMANNLPMQPPVPSQTSSYSCMLPTSPSVNGRSYDTYTPPH

SEQ ID NO: 32980 - protein, 238 aa, Homo sapiens
  REGION 1..238: note = ENSP00000491517
MGADGMYDKLRMLNGQTGSWGTRPGWYPGTSVPGQPTQDGCQQQEGGGENTNSISSNGEDSDEAQMRLQLKRKLQRNRTSFTQEQIEALEKEFERTHYPDVFARERLAAKIDLPEARIQVWFSNRRAKWRREEKLRNQRRQASNTPSHIPISSSFSTSVYQPIPQPTTPVSSFTSGSMLGRTDTALTNTYSALPPMPSFTMANNLPMQPPVPSQTSSYSCMLPTSPSVNGRSYDTYTP

SEQ ID NO: 32981 - protein, 320 aa, Homo sapiens
  REGION 1..320: note = ENSP00000404356
MQNSHSGVNQLGGVFVNGRPLPDSTRQKIVELAHSGARPCDISRILQTHADAKVQVLDNQNVSNGCVSSINRVLRNLASEKQQMGADGMYDKLRMLNGQTGSWGTRPGWYPGTSVPGQPTQDGCQQQEGGGENTNSISSNGEDSDEAQMRLQLKRKLQRNRTSFTQEQIEALEKEFERTHYPDVFARERLAAKIDLPEARIQVWFSNRRAKWRREEKLRNQRRQASNTPSHIPISSSFSTSVYQPIPQPTTPVSSFTSGSMLGRTDTALTNTYSALPPMPSFTMANNLPMQPPVPSQTSSYSCMLPTSPSVNGRSYDTYT

SEQ ID NO: 32982 - protein, 231 aa, Homo sapiens
  REGION 1..231: note = ENSP00000492081
MGADGMYDKLRMLNGQTGSWGTRPGWYPGTSVPGQPTQDGCQQQEGGGENTNSISSNGEDSDEAQMRLQLKRKLQRNRTSFTQEQIEALEKEFERTHYPDVFARERLAAKIDLPEARIQVWFSNRRAKWRREEKLRNQRRQASNTPSHIPISSSFSTSVYQPIPQPTTPVSSFTSGSMLGRTDTALTNTYSALPPMPSFTMANNLPMQPPVPSQTSSYSCMLPTSPSVNGR

SEQ ID NO: 32983 - protein, 314 aa, Homo sapiens
  REGION 1..314: note = ENSP00000491229
MQNSHSGVNQLGGVFVNGRPLPDSTRQKIVELAHSGARPCDISRILQTHADAKVQVLDNQNVSNGCVSSINRVLRNLASEKQQMGADGMYDKLRMLNGQTGSWGTRPGWYPGTSVPGQPTQDGCQQQEGGGENTNSISSNGEDSDEAQMRLQLKRKLQRNRTSFTQEQIEALEKEFERTHYPDVFARERLAAKIDLPEARIQVWFSNRRAKWRREEKLRNQRRQASNTPSHIPISSSFSTSVYQPIPQPTTPVSSFTSGSMLGRTDTALTNTYSALPPMPSFTMANNLPMQPPVPSQTSSYSCMLPTSPSVNGR

SEQ ID NO: 32984 - protein, 370 aa, Homo sapiens
  REGION 1..370: note = ENSP00000491779
MQNSHSGVNQLGGVFVNGRPLPDSTRQKIVELAHSGARPCDISRILQTHADAKVQVLDNQNVSNGCVSKILGRYYETGSIRPRAIGGSKPRVATPEVVSKIAQYKRECPSIFAWEIRDRLLSEGVCTNDNIPSVSSINRVLRNLASEKQQMGADGMYDKLRMLNGQTGSWGTRPGWYPGTSVPGQPTQDGCQQQEGGGENTNSISSNGEDSDEAQMRLQLKRKLQRNRTSFTQEQIEALEKEFERTHYPDVFARERLAAKIDLPEARIQVWFSNRRAKWRREEKLRNQRRQASNTPSHIPISSSFSTSVYQPIPQPTTPVSSFTSGSMLGRTDTALTNTYSALPPMPSFTMANNLPMQPPVPSQTSSYSC

SEQ ID NO: 32985 - protein, 401 aa, Homo sapiens
  REGION 1..401: note = ENSP00000491679
MQNSHSGVNQLGGVFVNGRPLPDSTRQKIVELAHSGARPCDISRILQVSNGCVSKILGRYYETGSIRPRAIGGSKPRVATPEVVSKIAQYKRECPSIFAWEIRDRLLSEGVCTNDNIPSVSSINRVLRNLASEKQQMGADGMYDKLRMLNGQTGSWGTRPGWYPGTSVPGQPTQDGCQQQEGGGENTNSISSNGEDSDEAQMRLQLKRKLQRNRTSFTQEQIEALEKEFERTHYPDVFARERLAAKIDLPEARIQVWFSNRRAKWRREEKLRNQRRQASNTPSHIPISSSFSTSVYQPIPQPTTPVSSFTSGSMLGRTDTALTNTYSALPPMPSFTMANNLPMQVSAAGGGLHNPGPREVRSGSGPADLIGCVCTLESFSHYSDWLDQSSRRQSIPSLLSD

SEQ ID NO: 32986 - protein, 415 aa, Homo sapiens
  REGION 1..415: note = ENSP00000491492
MQNSHSGVNQLGGVFVNGRPLPDSTRQKIVELAHSGARPCDISRILQTHADAKVQVLDNQNVSNGCVSKILGRYYETGSIRPRAIGGSKPRVATPEVVSKIAQYKRECPSIFAWEIRDRLLSEGVCTNDNIPSVSSINRVLRNLASEKQQMGADGMYDKLRMLNGQTGSWGTRPGWYPGTSVPGQPTQDGCQQQEGGGENTNSISSNGEDSDEAQMRLQLKRKLQRNRTSFTQEQIEALEKEFERTHYPDVFARERLAAKIDLPEARIQVWFSNRRAKWRREEKLRNQRRQASNTPSHIPISSSFSTSVYQPIPQPTTPVSSFTSGSMLGRTDTALTNTYSALPPMPSFTMANNLPMQVSAAGGGLHNPGPREVRSGSGPADLIGCVCTLESFSHYSDWLDQSSRRQSIPSLLSD

SEQ ID NO: 32987 - protein, 263 aa, Homo sapiens
  REGION 1..263: note = ENSP00000492129
MGADGMYDKLRMLNGQTGSWGTRPGWYPGTSVPGQPTQDGCQQQEGGGENTNSISSNGEDSDEAQMRLQLKRKLQRNRTSFTQEQIEALEKEFERTHYPDVFARERLAAKIDLPEARIQVWFSNRRAKWRREEKLRNQRRQASNTPSHIPISSSFSTSVYQPIPQPTTPVSSFTSGSMLGRTDTALTNTYSALPPMPSFTMANNLPMQVSAAGGGLHNPGPREVRSGSGPADLIGCVCTLESFSHYSDWLDQSSRRQSIPSLL

SEQ ID NO: 32988 - protein, 341 aa, Homo sapiens
  REGION 1..341: note = ENSP00000492409
MPHKGHSGVNQLGGVFVNGRPLPDSTRQKIVELAHSGARPCDISRILQVSNGCVSKILGRYYETGSIRPRAIGGSKPRVATPEVVSKIAQYKRECPSIFAWEIRDRLLSEGVCTNDNIPSVSSINRVLRNLASEKQQMGADGMYDKLRMLNGQTGSWGTRPGWYPGTSVPGQPTQDGCQQQEGGGENTNSISSNGEDSDEAQMRLQLKRKLQRNRTSFTQEQIEALEKEFERTHYPDVFARERLAAKIDLPEARIQVWFSNRRAKWRREEKLRNQRRQASNTPSHIPISSSFSTSVYQPIPQPTTPVSSFTSGSMLGRTDTALTNTYSALPPMPSFTMANN

SEQ ID NO: 32989 - protein, 241 aa, Homo sapiens
  REGION 1..241: note = ENSP00000397384
MQNSHSGVNQLGGVFVNGRPLPDSTRQKIVELAHSGARPCDISRILQTHADAKVQVLDNQNVSNGCVSKILGRYYETGSIRPRAIGGSKPRVATPEVVSKIAQYKRECPSIFAWEIRDRLLSEGVCTNDNIPSVSSINRVLRNLASEKQQMGADGMYDKLRMLNGQTGSWGTRPGWYPGTSVPGQPTQDGCQQQEGGGENTNSISSNGEDSDEAQMRLQLKRKLQRNRTSFTQEQIEALEK

SEQ ID NO: 32990 - protein, 72 aa, Homo sapiens
  REGION 1..72: note = ENSP00000492111
MQNSHSGVNQLGGVFVNGRPLPDSTRQKIVELAHSGARPCDISRILQTHADAKVQVLDNQNVSNGCVSKILG

SEQ ID NO: 32991 - skipped

SEQ ID NO: 32992 - protein, 917 aa, Homo sapiens
  REGION 1..917: note = ENSP00000328992
MFRKARRVNVRKRNDSEEEERERDEEQEPPPLLPPPGTGEEAGPGGGDRAPGGESLLGPGPSPPSALTPGLGAEAGGGFPGGAEPGNGLKPRKRPRENKEVPRASLLSFQDEEEENEEVFKVKKSSYSKKIVKLLKKEYKEDLEKSKIKTELNSSAESEQPLDKTGHVKDTNQEDGVIISEHGEDEMDMESEKEEEKPKTGGAFSNALSSLNVLRPGEIPDAAFIHAARKKRQMARELGDFTPHDNEPGKGRLVREDENDASDDEDDDEKRRIVFSVKEKSQRQKIAEEIGIEGSDDDALVTGEQDEELSRWEQEQIRKGINIPQVQASQPAEVNMYYQNTYQTMPYGSSYGIPYSYTAYGSSDAKSQKTDNTVPFKTPSNEMTPVTIDLVKKQLKDRLDSMKELHKTNRQQHEKHLQSRVDSTRAIERLEGSSGGIGERYKFLQEMRGYVQDLLECFSEKVPLINELESAIHQLYKQRASRLVQRRQDDIKDESSEFSSHSNKALMAPNLDSFGRDRALYQEHAKRRIAEREARRTRRRQAREQTGKMADHLEGLSSDDEETSTDITNFNLEKDRISKESGKVFEDVLESFYSIDCIKSQFEAWRSKYYTSYKDAYIGLCLPKLFNPLIRLQLLTWTPLEAKCRDFENMLWFESLLFYGCEEREQEKDDVDVALLPTIVEKVILPKLTVIAENMWDPFSTTQTSRMVGITLKLINGYPSVVNAENKNTQVYLKALLLRMRRTLDDDVFMPLYPKNVLENKNSGPYLFFQRQFWSSVKLLGNFLQWYGIFSNKTLQELSIDGLLNRYILMAFQNSEYGDDSIKKAQNVINCFPKQWFMNLKGERTISQLENFCRYLVHLADTIYRNSIGCSDVEKRNARENIKQIVKLLASVRALDHAMSVASDHNVKEFKSLIEGK

SEQ ID NO: 32993 - protein, 511 aa, Homo sapiens
  REGION 1..511: note = ENSP00000393038
MFRKARRVNVRKRNDSEEEERERDEEQEPPPLLPPPGTGEEAGPGGGDRAPGGESLLGPGPSPPSALTPGLGAEAGGGFPGGAEPGNGLKPRKRPRENKEVPRASLLSFQDEEEENEEVFKVKKSSYSKKIVKLLKKEYKEDLEKSKIKTELNSSAESEQPLDKTGHVKDTNQEDGVIISEHGEDEMDMESEKEEEKPKTGGAFSNALSSLNVLRPGEIPDAAFIHAARKKRQMARELGDFTPHDNEPGKGRLVREDENDASDDEDDDEKRRIVFSVKEKSQRQKIAEEIGIEGSDDDALVTGEQDEELSRWEQEQIRKGINIPQVQASQPAEVNMYYQNTYQTMPYGSSYGIPYSYTAYGSSDAKSQKTDNTVPFKTPSNEMTPVTIDLVKKQLKDRLDSMKELHKTNRQQHEKHLQSRVDSTRAIERLEGSSGGIGERYKFLQEMRGYVQDLLECFSEKVPLINELESAIHQLYKQRASRLVQRRQDDIKDESSEFSSHSSQSILKTKL

SEQ ID NO: 32994 - protein, 815 aa, Homo sapiens
  REGION 1..815: note = ENSP00000290178
MFRKARRVNVRKRNDSEEEERERDEEQEPPPLLPPPGTGEEAGPGGGDRAPGGESLLGPGPSPPSALTPGLGAEAGGGFPGGAEPGNGLKPRKRPRENKEVPRASLLSFQDEEEENEEVFKVKKSSYSKKIVKLLKKEYKEDLEKSKIKTELNSSAESEQPLDKTGHVKDTNQEDGVIISEHGEDEMDMESEKEEEKPKTGGAFSNALSSLNVLRPGEIPDAAFIHAARKKRQMARELGDFTPHDNEPGKGRLVREDENDASDDEDDDEKRRIVFSVKEKSQRQKIAEEIGIEGSDDDALVTGEQDEELSRWEQEQIRKGINIPQVQASQPAEVNMYYQNTYQTMPYGSSYGIPYSYTAYGSSDAKSQKTDNTVPFKTPSNEMTPVTIDLVKKQLKDRLDSMKELHKTNRQQHEKHLQSRVDSTRAIERLEGSSGGIGERYKFLQEMRGYVQDLLECFSEKVPLINELESAIHQLYKQRASRLVQRRQDDIKDESSEFSSHSNKALMAPNLDSFGRDRALYQEHAKRRIAEREARRTRRRQAREQTGKMADHLEGLSSDDEETSTDITNFNLEKDRISKESGKVFEDVLESFYSIDCIKSQFEAWRSKYYTSYKDAYIGLCLPKLFNPLIRLQLLTWTPLEAKCRDFENMLWFESLLFYGCEEREQEKDDVDVALLPTIVEKVILPKLTVIAENMWDPFSTTQTSRMVGITLKLINGYPSVVNAENKNTQVYLKALLLRMRRTLDDDVFMPLYPKNVLENKNSGPYLFFQRQFWSSVKVIKPPFQRGSCPIPRRKECCSERPRRIWTDRPCVVFS

SEQ ID NO: 32995 - protein, 25 aa, Homo sapiens
  REGION 1..25: note = ENSP00000408048
QFWSSVKEKVISEFQSKVHRTQRNA

SEQ ID NO: 32996 - protein, 36 aa, Homo sapiens
  REGION 1..36: note = ENSP00000388973
YKQRASRLVQRRQDDIKDESSEFSSHSSQSILKTKL

SEQ ID NO: 32997 - protein, 157 aa, Homo sapiens
  REGION 1..157: note = ENSP00000458892
MFRKARRVNVRKRNDSEEEERERDEEQEPPPLLPPPGTGEEAGPGGGDRAPGGESLLGPGPSPPSALTPGLGAEAGGGFPGGAEPGNGLKPRKRPRENKEVPRASLLSFQDEEEENEEVFKVKKSSYSKKIVKLLKKEYKEDLEKSKIKTELNSSAE

SEQ ID NO: 32998 - protein, 157 aa, Homo sapiens; identical to SEQ ID NO: 32997
  REGION 1..157: note = ENSP00000458262

SEQ ID NO: 32999 - protein, 176 aa, Homo sapiens
  REGION 1..176: note = ENSP00000397903
  VARIANT 1: note = Any amino acid
XCFLENKSGAITCLSIRGAQEEDPPDPQLMRLDNMLLAEGVSGPEKGGGSAAAAAAAAASGGSSDNSIEHSDYRAKLTQIRQIYHTELEKYEQACNEFTTHVMNLLREQSRTRPISPKEIERMVGIIHRKFSSIQMQLKQSTCEAVMILRSRFLDARRKRRNFSKQATEILNEYFY

SEQ ID NO: 33000 - protein, 359 aa, Homo sapiens
  REGION 1..359: note = ENSP00000387456
MKPALFSVLCEIKEKTGLSIRGAQEEDPPDPQLMRLDNMLLAEGVSGPEKGGGSAAAAAAAAASGGSSDNSIEHSDYRAKLTQIRQIYHTELEKYEQACNEFTTHVMNLLREQSRTRPISPKEIERMVGIIHRKFSSIQMQLKQSTCEAVMILRSRFLDARRKRRNFSKQATEILNEYFYSHLSNPYPSEEAKEELAKKCSITVSQVSNWFGNKRIRYKKNIGKFQEEANLYAAKTAVTAAHAVAAAVQNNQTNSPTTPNSGSSGSFNLPNSGDMFMNMQSLNGDSYQGSQVGANVQSQVDTLRHVINQTGGYSDGLGGNSLYSPHNLNANGGWQDATTPSSVTSPTEGPGSVHSDTSN

SEQ ID NO: 33001 - protein, 160 aa, Homo sapiens
  REGION 1..160: note = ENSP00000475679
MKPALFSVLCEIKEKTGLSIRGAQEEDPPDPQLMRLDNMLLAEGVSGPEKGGGSAAAAAAAAASGGSSDNSIEHSDYRAKLTQIRQIYHTELEKYEQACNEFTTHVMNLLREQSRTRPISPKEIERMVGIIHRKFSSIQMQLKQSTCEAVMILRSRFLDA

SEQ ID NO: 33002 - protein, 93 aa, Homo sapiens
  REGION 1..93: note = ENSP00000362581
MDDQSRMLQTLAGVNLAGHSVQGGMALPPPPHGHEGADGDGRKQDIGDILHQIMTITDQSLDEAQAKKHALNCHRMKPALFSVLCEIKEKTGM

SEQ ID NO: 33003 - protein, 93 aa, Homo sapiens; identical to SEQ ID NO: 33002
  REGION 1..93: note = ENSP00000362591

SEQ ID NO: 33004 - protein, 434 aa, Homo sapiens
  REGION 1..434: note = ENSP00000362588
MDDQSRMLQTLAGVNLAGHSVQGGMALPPPPHGHEGADGDGRKQDIGDILHQIMTITDQSLDEAQAKKHALNCHRMKPALFSVLCEIKEKTGLSIRGAQEEDPPDPQLMRLDNMLLAEGVSGPEKGGGSAAAAAAAAASGGSSDNSIEHSDYRAKLTQIRQIYHTELEKYEQACNEFTTHVMNLLREQSRTRPISPKEIERMVGIIHRKFSSIQMQLKQSTCEAVMILRSRFLDARRKRRNFSKQATEILNEYFYSHLSNPYPSEEAKEELAKKCSITVSQVSNWFGNKRIRYKKNIGKFQEEANLYAAKTAVTAAHAVAAAVQNNQTNSPTTPNSGSSGSFNLPNSGDMFMNMQSLNGDSYQGSQVGANVQSQVDTLRHVINQTGGYSDGLGGNSLYSPHNLNANGGWQDATTPSSVTSPTEGPGSVHSDTSN

SEQ ID NO: 33005 - protein, 455 aa, Homo sapiens
  REGION 1..455: note = ENSP00000362586
MDDQSRMLQTLAGVNLAGHSVQGGMALPPPPHGHEGADGDGRKQDIGDILHQIMTITDQSLDEAQAKKHALNCHRMKPALFSVLCEIKEKTGLSIRGAQEEDPPDPQLMRLDNMLLAEGVSGPEKGGGSAAAAAAAAASGGSSDNSIEHSDYRAKLTQIRQIYHTELEKYEQACNEFTTHVMNLLREQSRTRPISPKEIERMVGIIHRKFSSIQMQLKQSTCEAVMILRSRFLDARRKRRNFSKQATEILNEYFYSHLSNPYPSEEAKEELAKKCSITVSQSLVKDPKERGSKGSDIQPTSVVSNWFGNKRIRYKKNIGKFQEEANLYAAKTAVTAAHAVAAAVQNNQTNSPTTPNSGSSGSFNLPNSGDMFMNMQSLNGDSYQGSQVGANVQSQVDTLRHVINQTGGYSDGLGGNSLYSPHNLNANGGWQDATTPSSVTSPTEGPGSVHSDTSN

SEQ ID NO: 33006 - protein, 351 aa, Homo sapiens
  REGION 1..351: note = ENSP00000341990
MDDQSRMLQTLAGVNLAGHSVQGGMALPPPPHGHEGADGDGRKQDIGDILHQIMTITDQSLDEAQAKKHALNCHRMKPALFSVLCEIKEKTGLSIRGAQEEDPPDPQLMRLDNMLLAEGVSGPEKGGGSAAAAAAAAASGGSSDNSIEHSDYRAKLTQIRQIYHTELEKYEQACNEFTTHVMNLLREQSRTRPISPKEIERMVGIIHRKFSSIQMQLKQSTCEAVMILRSRFLDARRKRRNFSKQATEILNEYFYSHLSNPYPSEEAKEELAKKCSITVSQVSNWFGNKRIRYKKNIGKFQEEANLYAAKTAVTAAHAVAAAVQNNQTNSPTTPNSGGYPPSCYQSDGRLQ

SEQ ID NO: 33007 - protein, 702 aa, Homo sapiens
  REGION 1..702: note = ENSP00000357450
MDPESERALQAPHSPSKTDGKELAGTMDGEGTLFQTESPQSGSILTEETEVKGTLEGDVCGVEPPGPGDTVVQGDLQETTVVTGLGPDTQDLEGQSPPQSLPSTPKAAWIREEGRCSSSDDDTDVDMEGLRRRRGREAGPPQPMVPLAVENQAGGEGAGGELGISLNMCLLGALVLLGLGVLLFSGGLSESETGPMEEVERQVLPDPEVLEAVGDRQDGLREQLQAPVPPDSVPSLQNMGLLLDKLAKENQDIRLLQAQLQAQKEELQSLMHQPKGLEEENAQLRGALQQGEAFQRALESELQQLRARLQGLEADCVRGPDGVCLSGGRGPQGDKAIREQGPREQEPELSFLKQKEQLEAEAQALRQELERQRRLLGSVQQDLERSLQDASRGDPAHAGLAELGHRLAQKLQGLENWGQDPGVSANASKAWHQKSHFQNSREWSGKEKWWDGQRDRKAEHWKHKKEESGRERKKNWGGQEDREPAGRWKEGRPRVEESGSKKEGKRQGPKEPPRKSGSFHSSGEKQKQPRWREGTKDSHDPLPSWAELLRPKYRAPQGCSGVDECARQEGLTFFGTELAPVRQQELASLLRTYLARLPWAGQLTKELPLSPAFFGEDGIFRHDRLRFRDFVDALEDSLEEVAVQQTGDDDEVDDFEDFIFSHFFGDKALKKRSGKKDKHSQSPRAAGPREGHSHSHHHHHRG

SEQ ID NO: 33008 - protein, 731 aa, Homo sapiens
  REGION 1..731: note = ENSP00000357448
MASCPDSDNSWVLAGSESLPVETLGPASRMDPESERALQAPHSPSKTDGKELAGTMDGEGTLFQTESPQSGSILTEETEVKGTLEGDVCGVEPPGPGDTVVQGDLQETTVVTGLGPDTQDLEGQSPPQSLPSTPKAAWIREEGRCSSSDDDTDVDMEGLRRRRGREAGPPQPMVPLAVENQAGGEGAGGELGISLNMCLLGALVLLGLGVLLFSGGLSESETGPMEEVERQVLPDPEVLEAVGDRQDGLREQLQAPVPPDSVPSLQNMGLLLDKLAKENQDIRLLQAQLQAQKEELQSLMHQPKGLEEENAQLRGALQQGEAFQRALESELQQLRARLQGLEADCVRGPDGVCLSGGRGPQGDKAIREQGPREQEPELSFLKQKEQLEAEAQALRQELERQRRLLGSVQQDLERSLQDASRGDPAHAGLAELGHRLAQKLQGLENWGQDPGVSANASKAWHQKSHFQNSREWSGKEKWWDGQRDRKAEHWKHKKEESGRERKKNWGGQEDREPAGRWKEGRPRVEESGSKKEGKRQGPKEPPRKSGSFHSSGEKQKQPRWREGTKDSHDPLPSWAELLRPKYRAPQGCSGVDECARQEGLTFFGTELAPVRQQELASLLRTYLARLPWAGQLTKELPLSPAFFGEDGIFRHDRLRFRDFVDALEDSLEEVAVQQTGDDDEVDDFEDFIFSHFFGDKALKKRSGKKDKHSQSPRAAGPREGHSHSHHHHHRG

SEQ ID NO: 33009 - protein, 315 aa, Homo sapiens
  REGION 1..315: note = ENSP00000357445
MASCPDSDNSWVLAGSESLPVETLGPASRMDPESERALQAPHSPSKTDGKELAGTMDGEGTLFQTESPQSGSILTEETEVKGTLEGDVCGVEPPGPGDTVVQGDLQETTVVTGLGPDTQDLEGQSPPQSLPSTPKAAWIREEGRCSSSDDDTDVDMEGLRRRRGREAGPPQPMVPLAVENQAGGGLSESETGPMEEVERQVLPDPEVLEAVGDRQDGLREQLQAPVPPDSVPSLQNMGLLLDKLAKENQDIRLLQAQLQVGTGRRGWARVTHLGQASVLASSPKRNVSYLPTHPDPPLSHYSQGVFPVLGSHPLC

SEQ ID NO: 33010 - protein, 147 aa, Homo sapiens
  REGION 1..147: note = ENSP00000432543
MASCPDSDNSWVLAGSESLPVETLGPASRMDPESERALQAPHSPSKTDGKELAGTMDGEGTLFQTESPQSGSILTEETEVKGTLEGDVCGVEPPGPGDTVVQGDLQETTVVTGLGPDTQDLEGQSPPQSLPSTPKAVTSLPCPCPFP

SEQ ID NO: 33011 - protein, 298 aa, Homo sapiens [sequence omitted]

SEQ ID NO: 33012 - protein, 1178 aa, Homo sapiens
  REGION 1..1178: note = ENSP00000377527
MLKFRTVHGGLRLLGIRRTSTAPAASPNVRRLEYKPIKKVMVANRGEIAIRVFRACTELGIRTVAIYSEQDTGQMHRQKADEAYLIGRGLAPVQAYLHIPDIIKVAKENNVDAVHPGYGFLSERADFAQACQDAGVRFIGPSPEVVRKMGDKVEARAIAIAAGVPVVPGTDAPITSLHEAHEFSNTYGFPIIFKAAYGGGGRGMRVVHSYEELEENYTRAYSEALAAFGNGALFVEKFIEKPRHIEVQILGDQYGNILHLYERDCSIQRRHQKVVEIAPAAHLDPQLRTRLTSDSVKLAKQVGYENAGTVEFLVDRHGKHYFIEVNSRLQVEHTVTEEITDVDLVHAQIHVAEGRSLPDLGLRQENIRINGCAIQCRVTTEDPARSFQPDTGRIEVFRSGEGMGIRLDNASAFQGAVISPHYDSLLVKVIAHGKDHPTAATKMSRALAEFRVRGVKTNIAFLQNVLNNQQFLAGTVDTQFIDENPELFQLRPAQNRAQKLLHYLGHVMVNGPTTPIPVKASPSPTDPVVPAVPIGPPPAGFRDILLREGPEGFARAVRNHPGLLLMDTTFRDAHQSLLATRVRTHDLKKIAPYVAHNFSKLFSMENWGGATFDVAMRFLYECPWRRLQELRELIPNIPFQMLLRGANAVGYTNYPDNVVFKFCEVAKENGMDVFRVFDSLNYLPNMLLGMEAAGSAGGVVEAAISYTGDVADPSRTKYSLQYYMGLAEELVRAGTHILCIKDMAGLLKPTACTMLVSSLRDRFPDLPLHIHTHDTSGAGVAAMLACAQAGADVVDVAADSMSGMTSQPSMGALVACTRGTPLDTEVPMERVFDYSEYWEGARGLYAAFDCTATMKSGNSDVYENEIPGGQYTNLHFQAHSMGLGSKFKEVKKAYVEANQMLGDLIKVTPSSKIVGDLAQFMVQNGLSRAEAEAQAEELSFPRSVVEFLQGYIGVPHGGFPEPFRSKVLKDLPRVEGRPGASLPPLDLQALEKELVDRHGEEVTPEDVLSAAMYPDVFAHFKDFTATFGPLDSLNTRLFLQGPKIAEEFEVELERGKTLHIKALAVSDLNRAGQRQVFFELNGQLRSILVKDTQAMKEMHFHPKALKDVKGQIGAPMPGKVIDIKVVAGAKVAKGQPLCVLSAMKMETVVTSPMEGTVRKVHVTKDMTLEGDDLILEIE

SEQ ID NO: 33013 - protein, 1178 aa, Homo sapiens; identical to SEQ ID NO: 33012
  REGION 1..1178: note = ENSP00000377530

SEQ ID NO: 33014 - protein, 489 aa, Homo sapiens
  REGION 1..489: note = ENSP00000434192
MVANRGEIAIRVFRACTELGIRTVAIYSEQDTGQMHRQKADEAYLIGRGLAPVQAYLHIPDIIKVAKENNVDAVHPGYGFLSERADFAQACQDAGVRFIGPSPEVVRKMGDKVEARAIAIAAGVPVVPGTDAPITSLHEAHEFSNTYGFPIIFKAAYGGGGRGMRVVHSYEELEENYTRAYSEALAAFGNGALFVEKFIEKPRHIEVQILGDQYGNILHLYERDCSIQRRHQKVVEIAPAAHLDPQLRTRLTSDSVKLAKQVGYENAGTVEFLVDRHGKHYFIEVNSRLQVEHTVTEEITDVDLVHAQIHVAEGRSLPDLGLRQENIRINGCAIQCRVTTEDPARSFQPDTGRIEVFRSGEGMGIRLDNASAFQGAVISPHYDSLLVKVIAHGKDHPTAATKMSRALAEFRVRGVKVRRHQAQPLAAALGRPCGQEARRPQAAVTAPTGPGSPTLVRVPPAARVLSSRLGGPSQTTPETSTEVSPTILL

SEQ ID NO: 33015 - protein, 1178 aa, Homo sapiens; identical to SEQ ID NO: 33012
  REGION 1..1178: note = ENSP00000377532

SEQ ID NO: 33016 - protein, 489 aa, Homo sapiens; identical to SEQ ID NO: 33014
  REGION 1..489: note = ENSP00000486373

SEQ ID NO: 33017 - protein, 298 aa, Homo sapiens [sequence omitted]

SEQ ID NO: 33018 - protein, 1178 aa, Homo sapiens; identical to SEQ ID NO: 33012
  REGION 1..1178: note = ENSP00000377527

SEQ ID NO: 33019 - protein, 1178 aa, Homo sapiens; identical to SEQ ID NO: 33012
  REGION 1..1178: note = ENSP00000377530

SEQ ID NO: 33020 - protein, 489 aa, Homo sapiens; identical to SEQ ID NO: 33014
  REGION 1..489: note = ENSP00000434192

SEQ ID NO: 33021 - protein, 1178 aa, Homo sapiens; identical to SEQ ID NO: 33012
  REGION 1..1178: note = ENSP00000377532

SEQ ID NO: 33022 - protein, 489 aa, Homo sapiens; identical to SEQ ID NO: 33014
  REGION 1..489: note = ENSP00000486373

SEQ ID NO: 33023 - protein, 4303 aa, Homo sapiens
  REGION 1..4303: note = ENSP00000262304
MPPAAPARLALALGLGLWLGALAGGPGRGCGPCEPPCLCGPAPGAACRVNCSGRGLRTLGPALRIPADATALDVSHNLLRALDVGLLANLSALAELDISNNKISTLEEGIFANLFNLSEINLSGNPFECDCGLAWLPRWAEEQQVRVVQPEAATCAGPGSLAGQPLLGIPLLDSGCGEEYVACLPDNSSGTVAAVSFSAAHEGLLQPEACSAFCFSTGQGLAALSEQGWCLCGAAQPSSASFACLSLCSGPPPPPAPTCRGPTLLQHVFPASPGATLVGPHGPLASGQLAAFHIAAPLPVTATRWDFGDGSAEVDAAGPAASHRYVLPGRYHVTAVLALGAGSALLGTDVQVEAAPAALELVCPSSVQSDESLDLSIQNRGGSGLEAAYSIVALGEEPARAVHPLCPSDTEIFPGNGHCYRLVVEKAAWLQAQEQCQAWAGAALAMVDSPAVQRFLVSRVTRSLDVWIGFSTVQGVEVGPAPQGEAFSLESCQNWLPGEPHPATAEHCVRLGPTGWCNTDLCSAPHSYVCELQPGGPVQDAENLLVGAPSGDLQGPLTPLAQQDGLSAPHEPVEVMVFPGLRLSREAFLTTAEFGTQELRRPAQLRLQVYRLLSTAGTPENGSEPESRSPDNRTQLAPACMPGGRWCPGANICLPLDASCHPQACANGCTSGPGLPGAPYALWREFLFSVPAGPPAQYSVTLHGQDVLMLPGDLVGLQHDAGPGALLHCSPAPGHPGPRAPYLSANASSWLPHLPAQLEGTWACPACALRLLAATEQLTVLLGLRPNPGLRLPGRYEVRAEVGNGVSRHNLSCSFDVVSPVAGLRVIYPAPRDGRLYVPTNGSALVLQVDSGANATATARWPGGSVSARFENVCPALVATFVPGCPWETNDTLFSVVALPWLSEGEHVVDVVVENSASRANLSLRVTAEEPICGLRATPSPEARVLQGVLVRYSPVVEAGSDMVFRWTINDKQSLTFQNVVFNVIYQSAAVFKLSLTASNHVSNVTVNYNVTVERMNRMQGLQVSTVPAVLSPNATLALTAGVLVDSAVEVAFLWTFGDGEQALHQFQPPYNESFPVPDPSVAQVLVEHNVMHTYAAPGEYLLTVLASNAFENLTQQVPVSVRASLPSVAVGVSDGVLVAGRPVTFYPHPLPSPGGVLYTWDFGDGSPVLTQSQPAANHTYASRGTYHVRLEVNNTVSGAAAQADVRVFEELRGLSVDMSLAVEQGAPVVVSAAVQTGDNITWTFDMGDGTVLSGPEATVEHVYLRAQNCTVTVGAASPAGHLARSLHVLVFVLEVLRVEPAACIPTQPDARLTAYVTGNPAHYLFDWTFGDGSSNTTVRGCPTVTHNFTRSGTFPLALVLSSRVNRAHYFTSICVEPEVGNVTLQPERQFVQLGDEAWLVACAWPPFPYRYTWDFGTEEAAPTRARGPEVTFIYRDPGSYLVTVTASNNISAANDSALVEVQEPVLVTSIKVNGSLGLELQQPYLFSAVGRGRPASYLWDLGDGGWLEGPEVTHAYNSTGDFTVRVAGWNEVSRSEAWLNVTVKRRVRGLVVNASRTVVPLNGSVSFSTSLEAGSDVRYSWVLCDRCTPIPGGPTISYTFRSVGTFNIIVTAENEVGSAQDSIFVYVLQLIEGLQVVGGGRYFPTNHTVQLQAVVRDGTNVSYSWTAWRDRGPALAGSGKGFSLTVLEAGTYHVQLRATNMLGSAWADCTMDFVEPVGWLMVAASPNPAAVNTSVTLSAELAGGSGVVYTWSLEEGLSWETSEPFTTHSFPTPGLHLVTMTAGNPLGSANATVEVDVQVPVSGLSIRASEPGGSFVAAGSSVPFWGQLATGTNVSWCWAVPGGSSKRGPHVTMVFPDAGTFSIRLNASNAVSWVSATYNLTAEEPIVGLVLWASSKVVAPGQLVHFQILLAAGSAVTFRLQVGGANPEVLPGPRFSHSFPRVGDHVVSVRGKNHVSWAQAQVRIVVLEAVSGLQVPNCCEPGIATGTERNFTARVQRGSRVAYAWYFSLQKVQGDSLVILSGRDVTYTPVAAGLLEIQVRAFNALGSENRTLVLEVQDAVQYVALQSGPCFTNRSAQFEAATSPSPRRVAYHWDFGDGSPGQDTDEPRAEHSYLRPGDYRVQVNASNLVSFFVAQATVTVQVLACREPEVDVVLPLQVLMRRSQRNYLEAHVDLRDCVTYQTEYRWEVYRTASCQRPGRPARVALPGVDVSRPRLVLPRLALPVGHYCFVFVVSFGDTPLTQSIQANVTVAPERLVPIIEGGSYRVWSDTRDLVLDGSESYDPNLEDGDQTPLSFHWACVASTQREAGGCALNFGPRGSSTVTIPRERLAAGVEYTFSLTVWKAGRKEEATNQTVLIRSGRVPIVSLECVSCKAQAVYEVSRSSYVYLEGRCLNCSSGSKRGRWAARTFSNKTLVLDETTTSTGSAGMRLVLRRGVLRDGEGYTFTLTVLGRSGEEEGCASIRLSPNRPPLGGSCRLFPLGAVHALTTKVHFECTGWHDAEDAGAPLVYALLLRRCRQGHCEEFCVYKGSLSSYGAVLPPGFRPHFEVGLAVVVQDQLGAAVVALNRSLAITLPEPNGSATGLTVWLHGLTASVLPGLLRQADPQHVIEYSLALVTVLNEYERALDVAAEPKHERQHRAQIRKNITETLVSLRVHTVDDIQQIAAALAQCMGPSRELVCRSCLKQTLHKLEAMMLILQAETTAGTVTPTAIGDSILNITGDLIHLASSDVRAPQPSELGAESPSRMVASQAYNLTSALMRILMRSRVLNEEPLTLAGEEIVAQGKRSDPRSLLCYGGAPGPGCHFSIPEAFSGALANLSDVVQLIFLVDSNPFPFGYISNYTVSTKVASMAFQTQAGAQIPIERLASERAITVKVPNNSDWAARGHRSSANSANSVVVQPQASVGAVVTLDSSNPAAGLHLQLNYTLLDGHYLSEEPEPYLAVYLHSEPRPNEHNCSASRRIRPESLQGADHRPYTFFISPGSRDPAGSYHLNLSSHFRWSALQVSVGLYTSLCQYFSEEDMVWRTEGLLPLEETSPRQAVCLTRHLTAFGASLFVPPSHVRFVFPEPTADVNYIVMLTCAVCLVTYMVMAAILHKLDQLDASRGRAIPFCGQRGRFKYEILVKTGWGRGSGTTAHVGIMLYGVDSRSGHRHLDGDRAFHRNSLDIFRIATPHSLGSVWKIRVWHDNKGLSPAWFLQHVIVRDLQTARSAFFLVNDWLSVETEANGGLVEKEVLAASDAALLRFRRLLVAELQRGFFDKHIWLSIWDRPPRSRFTRIQRATCCVLLICLFLGANAVWYGAVGDSAYSTGHVSRLSPLSVDTVAVGLVSSVVVYPVYLAILFLFRMSRSKVAGSPSPTPAGQQVLDIDSCLDSSVLDSSFLTFSGLHAEQAFVGQMKSDLFLDDSKSLVCWPSGEGTLSWPDLLSDPSIVGSNLRQLARGQAGHGLGPEEDGFSLASPYSPAKSFSASDEDLIQQVLAEGVSSPAPTQDTHMETDLLSSLSSTPGEKTETLALQRLGELGPPSPGLNWEQPQAARLSRTGLVEGLRKRLLPAWCASLAHGLSLLLVAVAVAVSGWVGASFPPGVSVAWLLSSSASFLASFLGWEPLKVLLEALYFSLVAKRLHPDEDDTLVESPAVTPVSARVPRVRPPHGFALFLAKEEARKVKRLHGMLRSLLVYMLFLLVTLLASYGDASCHGHAYRLQSAIKQELHSRAFLAITRSEELWPWMAHVLLPYVHGNQSSPELGPPRLRQVRLQEALYPDPPGPRVHTCSAAGGFSTSDYDVGWESPHNGSGTWAYSAPDLLGAWSWGSCAVYDSGGYVQELGLSLEESRDRLRFLQLHNWLDNRSRAVFLELTRYSPAVGLHAAVTLRLEFPAAGRALAALSVRPFALRRLSAGLSLPLLTSVCLLLFAVHFAVAEARTWHREGRWRVLRLGAWARWLLVALTAATALVRLAQLGAADRQWTRFVRGRPRRFTSFDQVAQLSSAARGLAASLLFLLLVKAAQQLRFVRQWSVFGKTLCRALPELLGVTLGLVVLGVAYAQLAILLVSSCVDSLWSVAQALLVLCPGTGLSTLCPAESWHLSPLLCVGLWALRLWGALRLGAVILRWRYHALRGELYRPAWEPQDYEMVELFLRRLRLWMGLSKVKEFRHKVRFEGMEPLPSRSSRGSKVSPDVPPPSAGSDASHPSTSSSQLDGLSVSLGRLGTRCEPEPSRLQAVFEALLTQFDRLNQATEDVYQLEQQLHSLQGRRSSRAPAGSSRGPSPGLRPALPSRLARASRGVDLATGPSRTPLRAKNKVHPSST

SEQ ID NO: 33024 - protein, 4302 aa, Homo sapiens
  REGION 1..4302: note = ENSP00000399501
MPPAAPARLALALGLGLWLGALAGGPGRGCGPCEPPCLCGPAPGAACRVNCSGRGLRTLGPALRIPADATALDVSHNLLRALDVGLLANLSALAELDISNNKISTLEEGIFANLFNLSEINLSGNPFECDCGLAWLPRWAEEQQVRVVQPEAATCAGPGSLAGQPLLGIPLLDSGCGEEYVACLPDNSSGTVAAVSFSAAHEGLLQPEACSAFCFSTGQGLAALSEQGWCLCGAAQPSSASFACLSLCSGPPPPPAPTCRGPTLLQHVFPASPGATLVGPHGPLASGQLAAFHIAAPLPVTATRWDFGDGSAEVDAAGPAASHRYVLPGRYHVTAVLALGAGSALLGTDVQVEAAPAALELVCPSSVQSDESLDLSIQNRGGSGLEAAYSIVALGEEPARAVHPLCPSDTEIFPGNGHCYRLVVEKAAWLQAQEQCQAWAGAALAMVDSPAVQRFLVSRVTRSLDVWIGFSTVQGVEVGPAPQGEAFSLESCQNWLPGEPHPATAEHCVRLGPTGWCNTDLCSAPHSYVCELQPGGPVQDAENLLVGAPSGDLQGPLTPLAQQDGLSAPHEPVEVMVFPGLRLSREAFLTTAEFGTQELRRPAQLRLQVYRLLSTAGTPENGSEPESRSPDNRTQLAPACMPGGRWCPGANICLPLDASCHPQACANGCTSGPGLPGAPYALWREFLFSVPAGPPAQYSVTLHGQDVLMLPGDLVGLQHDAGPGALLHCSPAPGHPGPRAPYLSANASSWLPHLPAQLEGTWACPACALRLLAATEQLTVLLGLRPNPGLRLPGRYEVRAEVGNGVSRHNLSCSFDVVSPVAGLRVIYPAPRDGRLYVPTNGSALVLQVDSGANATATARWPGGSVSARFENVCPALVATFVPGCPWETNDTLFSVVALPWLSEGEHVVDVVVENSASRANLSLRVTAEEPICGLRATPSPEARVLQGVLVRYSPVVEAGSDMVFRWTINDKQSLTFQNVVFNVIYQSAAVFKLSLTASNHVSNVTVNYNVTVERMNRMQGLQVSTVPAVLSPNATLALTAGVLVDSAVEVAFLWTFGDGEQALHQFQPPYNESFPVPDPSVAQVLVEHNVMHTYAAPGEYLLTVLASNAFENLTQQVPVSVRASLPSVAVGVSDGVLVAGRPVTFYPHPLPSPGGVLYTWDFGDGSPVLTQSQPAANHTYASRGTYHVRLEVNNTVSGAAAQADVRVFEELRGLSVDMSLAVEQGAPVVVSAAVQTGDNITWTFDMGDGTVLSGPEATVEHVYLRAQNCTVTVGAASPAGHLARSLHVLVFVLEVLRVEPAACIPTQPDARLTAYVTGNPAHYLFDWTFGDGSSNTTVRGCPTVTHNFTRSGTFPLALVLSSRVNRAHYFTSICVEPEVGNVTLQPERQFVQLGDEAWLVACAWPPFPYRYTWDFGTEEAAPTRARGPEVTFIYRDPGSYLVTVTASNNISAANDSALVEVQEPVLVTSIKVNGSLGLELQQPYLFSAVGRGRPASYLWDLGDGGWLEGPEVTHAYNSTGDFTVRVAGWNEVSRSEAWLNVTVKRRVRGLVVNASRTVVPLNGSVSFSTSLEAGSDVRYSWVLCDRCTPIPGGPTISYTFRSVGTFNIIVTAENEVGSAQDSIFVYVLQLIEGLQVVGGGRYFPTNHTVQLQAVVRDGTNVSYSWTAWRDRGPALAGSGKGFSLTVLEAGTYHVQLRATNMLGSAWADCTMDFVEPVGWLMVAASPNPAAVNTSVTLSAELAGGSGVVYTWSLEEGLSWETSEPFTTHSFPTPGLHLVTMTAGNPLGSANATVEVDVQVPVSGLSIRASEPGGSFVAAGSSVPFWGQLATGTNVSWCWAVPGGSSKRGPHVTMVFPDAGTFSIRLNASNAVSWVSATYNLTAEEPIVGLVLWASSKVVAPGQLVHFQILLAAGSAVTFRLQVGGANPEVLPGPRFSHSFPRVGDHVVSVRGKNHVSWAQAQVRIVVLEAVSGLQVPNCCEPGIATGTERNFTARVQRGSRVAYAWYFSLQKVQGDSLVILSGRDVTYTPVAAGLLEIQVRAFNALGSENRTLVLEVQDAVQYVALQSGPCFTNRSAQFEAATSPSPRRVAYHWDFGDGSPGQDTDEPRAEHSYLRPGDYRVQVNASNLVSFFVAQATVTVQVLACREPEVDVVLPLQVLMRRSQRNYLEAHVDLRDCVTYQTEYRWEVYRTASCQRPGRPARVALPGVDVSRPRLVLPRLALPVGHYCFVFVVSFGDTPLTQSIQANVTVAPERLVPIIEGGSYRVWSDTRDLVLDGSESYDPNLEDGDQTPLSFHWACVASTQREAGGCALNFGPRGSSTVTIPRERLAAGVEYTFSLTVWKAGRKEEATNQTVLIRSGRVPIVSLECVSCKAQAVYEVSRSSYVYLEGRCLNCSSGSKRGRWAARTFSNKTLVLDETTTSTGSAGMRLVLRRGVLRDGEGYTFTLTVLGRSGEEEGCASIRLSPNRPPLGGSCRLFPLGAVHALTTKVHFECTGWHDAEDAGAPLVYALLLRRCRQGHCEEFCVYKGSLSSYGAVLPPGFRPHFEVGLAVVVQDQLGAAVVALNRSLAITLPEPNGSATGLTVWLHGLTASVLPGLLRQADPQHVIEYSLALVTVLNEYERALDVAAEPKHERQHRAQIRKNITETLVSLRVHTVDDIQQIAAALAQCMGPSRELVCRSCLKQTLHKLEAMMLILQAETTAGTVTPTAIGDSILNITGDLIHLASSDVRAPQPSELGAESPSRMVASQAYNLTSALMRILMRSRVLNEEPLTLAGEEIVAQGKRSDPRSLLCYGGAPGPGCHFSIPEAFSGALANLSDVVQLIFLVDSNPFPFGYISNYTVSTKVASMAFQTQAGAQIPIERLASERAITVKVPNNSDWAARGHRSSANSANSVVVQPQASVGAVVTLDSSNPAAGLHLQLNYTLLDGHYLSEEPEPYLAVYLHSEPRPNEHNCSASRRIRPESLQGADHRPYTFFISPGSRDPAGSYHLNLSSHFRWSALQVSVGLYTSLCQYFSEEDMVWRTEGLLPLEETSPRQAVCLTRHLTAFGASLFVPPSHVRFVFPEPTADVNYIVMLTCAVCLVTYMVMAAILHKLDQLDASRGRAIPFCGQRGRFKYEILVKTGWGRGSGTTAHVGIMLYGVDSRSGHRHLDGDRAFHRNSLDIFRIATPHSLGSVWKIRVWHDNKGLSPAWFLQHVIVRDLQTARSAFFLVNDWLSVETEANGGLVEKEVLAASDAALLRFRRLLVAELQRGFFDKHIWLSIWDRPPRSRFTRIQRATCCVLLICLFLGANAVWYGAVGDSAYSTGHVSRLSPLSVDTVAVGLVSSVVVYPVYLAILFLFRMSRSKVAGSPSPTPAGQQVLDIDSCLDSSVLDSSFLTFSGLHAEAFVGQMKSDLFLDDSKSLVCWPSGEGTLSWPDLLSDPSIVGSNLRQLARGQAGHGLGPEEDGFSLASPYSPAKSFSASDEDLIQQVLAEGVSSPAPTQDTHMETDLLSSLSSTPGEKTETLALQRLGELGPPSPGLNWEQPQAARLSRTGLVEGLRKRLLPAWCASLAHGLSLLLVAVAVAVSGWVGASFPPGVSVAWLLSSSASFLASFLGWEPLKVLLEALYFSLVAKRLHPDEDDTLVESPAVTPVSARVPRVRPPHGFALFLAKEEARKVKRLHGMLRSLLVYMLFLLVTLLASYGDASCHGHAYRLQSAIKQELHSRAFLAITRSEELWPWMAHVLLPYVHGNQSSPELGPPRLRQVRLQEALYPDPPGPRVHTCSAAGGFSTSDYDVGWESPHNGSGTWAYSAPDLLGAWSWGSCAVYDSGGYVQELGLSLEESRDRLRFLQLHNWLDNRSRAVFLELTRYSPAVGLHAAVTLRLEFPAAGRALAALSVRPFALRRLSAGLSLPLLTSVCLLLFAVHFAVAEARTWHREGRWRVLRLGAWARWLLVALTAATALVRLAQLGAADRQWTRFVRGRPRRFTSFDQVAQLSSAARGLAASLLFLLLVKAAQQLRFVRQWSVFGKTLCRALPELLGVTLGLVVLGVAYAQLAILLVSSCVDSLWSVAQALLVLCPGTGLSTLCPAESWHLSPLLCVGLWALRLWGALRLGAVILRWRYHALRGELYRPAWEPQDYEMVELFLRRLRLWMGLSKVKEFRHKVRFEGMEPLPSRSSRGSKVSPDVPPPSAGSDASHPSTSSSQLDGLSVSLGRLGTRCEPEPSRLQAVFEALLTQFDRLNQATEDVYQLEQQLHSLQGRRSSRAPAGSSRGPSPGLRPALPSRLARASRGVDLATGPSRTPLRAKNKVHPSST

SEQ ID NO: 33025 - protein, 45 aa, Homo sapiens
  REGION 1..45: note = ENSP00000461391
  VARIANT 1: note = Any amino acid
XGPRVHTCSAAGGFSTSDYDVGWESPHNGSGTWAYSAPDLLGSWA

SEQ ID NO: 33026 - protein, 1122 aa, Homo sapiens
  REGION 1..1122: note = ENSP00000457132
PTPGLHLVTMTAGNPLGSANATVEVDVQVPVSGLSIRASEPGGSFVAAGSSVPFWGQLATGTNVSWCWAVPGGSSKRGPHVTMVFPDAGTFSIRLNASNAVSWVSATYNLTAEEPIVGLVLWASSKVVAPGQLVHFQILLAAGSAVTFRLQVGGANPEVLPGPRFSHSFPRVGDHVVSVRGKNHVSWAQAQVRIVVLEAVSGLQVPNCCEPGIATGTERNFTARVQRGSRVAYAWYFSLQKVQGDSLVILSGRDVTYTPVAAGLLEIQVRAFNALGSENRTLVLEVQDAVQYVALQSGPCFTNRSAQFEAATSPSPRRVAYHWDFGDGSPGQDTDEPRAEHSYLRPGDYRVQVNASNLVSFFVAQATVTVQVLACREPEVDVVLPLQVLMRRSQRNYLEAHVDLRDCVTYQTEYRWEVYRTASCQRPGRPARVALPGVDVSRPRLVLPRLALPVGHYCFVFVVSFGDTPLTQSIQANVTVAPERLVPIIEGGSYRVWSDTRDLVLDGSESYDPNLEDGDQTPLSFHWACVASTQREAGGCALNFGPRGSSTVTIPRERLAAGVEYTFSLTVWKAGRKEEATNQTVLIRSGRVPIVSLECVSCKAQAVYEVSRSSYVYLEGRCLNCSSGSKRGRWAARTFSNKTLVLDETTTSTGSAGMRLVLRRGVLRDGEGYTFTLTVLGRSGEEEGCASIRLSPNRPPLGGSCRLFPLGAVHALTTKVHFECTGWHDAEDAGAPLVYALLLRRCRQGHCEEFCVYKGSLSSYGAVLPPGFRPHFEVGLAVVVQDQLGAAVVALNRSLAITLPEPNGSATGLTVWLHGLTASVLPGLLRQADPQHVIEYSLALVTVLNEYERALDVAAEPKHERQHRAQIRKNITETLVSLRVHTVDDIQQIAAALAQCMGPSRELVCRSCLKQTLHKLEAMMLILQAETTAGTVTPTAIGDSILNITGDLIHLASSDVRAPQPSELGAESPSRMVASQAYNLTSALMRILMRSRVLNEEPLTLAGEEIVAQGKRSDPRSLLCYGGAPGPGCHFSIPEAFSGALANLSDVVQLIFLVDSNPFPFGYISNYTVSTKLRQLRQLRCGPAPGLRRCCGHPGQQQPCGRAASAAQLYAAGRPLPV

SEQ ID NO: 33027 - protein, 91 aa, Homo sapiens
  REGION 1..91: note = ENSP00000455753
  VARIANT 1: note = Any amino acid
XVSVAWLLSSSASFLASFLGWEPLKVLLEALYFSLVAKRLHPDEDDTLVESPAVTPVSARVPRVRPPHGFALFLAKEEARKVKRLHGMLRV

SEQ ID NO: 33028 - protein, 607 aa, Homo sapiens
  REGION 1..607: note = ENSP00000457984
  VARIANT 1: note = Any amino acid
XETLVSLRVHTVDDIQQIAAALAQCMGPSRELVCRSCLKQTLHKLEAMMLILQAETTAGTVTPTAIGDSILNITGDLIHLASSDVRAPQPSELGAESPSRMVASQAYNLTSALMRILMRSRVLNEEPLTLAGHYLSEEPEPYLAVYLHSEPRPNEHNCSASRRIRPESLQGADHRPYTFFISPGSRDPAGSYHLNLSSHFRWSALQVSVGLYTSLCQYFSEEDMVWRTEGLLPLEETSPRQAVCLTRHLTAFGASLFVPPSHVRFVFPEPTADVNYIVMLTCAVCLVTYMVMAAILHKLDQLDASRGRAIPFCGQRGRFKYEILVKTGWGRGSGTTAHVGIMLYGVDSRSGHRHLDGDRAFHRNSLDIFRIATPHSLGSVWKIRVWHDNKGLSPAWFLQHVIVRDLQTARSAFFLVNDWLSVETEANGGLVEKEVLAASDAALLRFRRLLVAELQRGFFDKHIWLSIWDRPPRSRFTRIQRATCCVLLICLFLGANAVWYGAVGDSAYSTGHVSRLSPLSVDTVAVGLVSSVVVYPVYLAILFLFRMSRSKVAGSPSPTPAGQQVLDIDSCLDSSVLDSSFLTFSGLHAEQAFVGQMKSDLFLDDSK

SEQ ID NO: 33029 - protein, 200 aa, Homo sapiens
  REGION 1..200: note = ENSP00000457162
LLGTDVQVEAAPAALELVCPSSVQSDESLDLSIQNRGGSGLEAAYSIVALGEEPARAVHPLCPSDTEIFPGNGHCYRLVVEKAAWLQAQEQCQAWAGAALAMVDSPAVQRFLVSRVTRGWRWAQRRRARPSAWRAARTGCPGSHTQPQPSTASGSGPPGGVTPTCAQRRTATSASCSPEAQCRMPRTSSWERPVGTCRDP

SEQ ID NO: 33030 - protein, 155 aa, Homo sapiens
  REGION 1..155: note = ENSP00000456670
  VARIANT 1: note = Any amino acid
XAGVLVDSAVEVAFLWTFGDGEQALHQFQPPYNESFPVPDPSVAQVLVEHNVMHTYAAPGEYLLTVLASNAFENLTQQVLIRSGRVPIVSLECVSCKAQAVYEVSRSSYVYLEGRCLNCSSGSKRGRWAARTFSNKTLVLDETTTSTGSAGMRLV

SEQ ID NO: 33031 - protein, 246 aa, Homo sapiens
  REGION 1..246: note = ENSP00000456672
  VARIANT 1: note = Any amino acid
XDFGDGSAEVDAAGPAASHRYVLPGRYHVTAVLALGAGSALLGTDVQVEAAPAALELVCPSSVQSDESLDLSIQNRGGSGLEAAYSIVALGEEPARAVHPLCPSDTEIFPGNGHCYRLVVEKAAWLQAQEQCQAWAGAALAMVDSPAVQRFLVSRVTRHTGPGAGWERVLRPQPGGRRPDAAQFPLGLCGFDTEGGWRVCAELWAPREQHGHHSTGAAGGWRGVHLQPDRVEGRPQGGGHQPDGAD

SEQ ID NO: 33032 - protein, 968 aa, Homo sapiens
  REGION 1..968: note = ENSP00000237596
MVNSSRVQPQQPGDAKRPPAPRAPDPGRLMAGCAAVGASLAAPGGLCEQRGLEIEMQRIRQAAARDPPAGAAASPSPPLSSCSRQAWSRDNPGFEAEEEEEEVEGEEGGMVVEMDVEWRPGSRRSAASSAVSSVGARSRGLGGYHGAGHPSGRRRRREDQGPPCPSPVGGGDPLHRHLPLEGQPPRVAWAERLVRGLRGLWGTRLMEESSTNREKYLKSVLRELVTYLLFLIVLCILTYGMMSSNVYYYTRMMSQLFLDTPVSKTEKTNFKTLSSMEDFWKFTEGSLLDGLYWKMQPSNQTEADNRSFIFYENLLLGVPRIRQLRVRNGSCSIPQDLRDEIKECYDVYSVSSEDRAPFGPRNGTAWIYTSEKDLNGSSHWGIIATYSGAGYYLDLSRTREETAAQVASLKKNVWLDRGTRATFIDFSVYNANINLFCVVRLLVEFPATGGVIPSWQFQPLKLIRYVTTFDFFLAACEIIFCFFIFYYVVEEILEIRIHKLHYFRSFWNCLDVVIVVLSVVAIGINIYRTSNVEVLLQFLEDQNTFPNFEHLAYWQIQFNNIAAVTVFFVWIKLFKFINFNRTMSQLSTTMSRCAKDLFGFAIMFFIIFLAYAQLAYLVFGTQVDDFSTFQECIFTQFRIILGDINFAEIEEANRVLGPIYFTTFVFFMFFILLNMFLAIINDTYSEVKSDLAQQKAEMELSDLIRKGYHKALVKLKLKKNTVDDISESLRQGGGKLNFDELRQDLKGKGHTDAEIEAIFTKYDQDGDQELTEHEHQQMRDDLEKEREDLDLDHSSLPRPMSSRSFPRSLDDSEEDDDEDSGHSSRRRGSISSGVSYEEFQVLVRRVDRMEHSIGSIVSKIDAVIVKLEIMERAKLKRREVLGRLLDGVAEDERLGRDSEIHREQMERLVREELERWESDDAASQISHGLGTPVGLNGQPRPRSSRPSSSQSTEGMEGAGGNGSSNVHV

SEQ ID NO: 33033 - protein, 386 aa, Homo sapiens
  REGION 1..386: note = ENSP00000427131
MSQLSTTMSRCAKDLFGFAIMFFIIFLAYAQLAYLVFGTQVDDFSTFQECIFTQFRIILGDINFAEIEEANRVLGPIYFTTFVFFMFFILLNMFLAIINDTYSEVKSDLAQQKAEMELSDLIRKGYHKALVKLKLKKNTVDDISESLRQGGGKLNFDELRQDLKGKGHTDAEIEAIFTKYDQDGDQELTEHEHQQMRDDLEKEREDLDLDHSSLPRPMSSRSFPRSLDDSEEDDDEDSGHSSRRRGSISSGVSYEEFQVLVRRVDRMEHSIGSIVSKIDAVIVKLEIMERAKLKRREVLGRLLDGVAEDERLGRDSEIHREQMERLVREELERWESDDAASQISHGLGTPVGLNGQPRPRSSRPSSSQSTEGMEGAGGNGSSNVHV

SEQ ID NO: 33034 - protein, 386 aa, Homo sapiens; identical to SEQ ID NO: 33033
  REGION 1..386: note = ENSP00000425289

SEQ ID NO: 33035 - protein, 690 aa, Homo sapiens
  REGION 1..690: note = ENSP00000365958
MGWGSRCCCPGRLDLLCVLALLGGCLLPVCRTRVYTNHWAVKIAGGFPEANRIASKYGFINIGQIGALKDYYHFYHSRTIKRSVISSRGTHSFISMEPKVEWIQQQVVKKRTKRDYDFSRAQSTYFNDPKWPSMWYMHCSDNTHPCQSDMNIEGAWKRGYTGKNIVVTILDDGIERTHPDLMQNYDALASCDVNGNDLDPMPRYDASNENKHGTRCAGEVAAAANNSHCTVGIAFNAKIGGVRMLDGDVTDMVEAKSVSFNPQHVHIYSASWGPDDDGKTVDGPAPLTRQAFENGVRMGRRGLGSVFVWASGNGGRSKDHCSCDGYTNSIYTISISSTAESGKKPWYLEECSSTLATTYSSGESYDKKIITTDLRQRCTDNHTGTSASAPMAAGIIALALEANPFLTWRDVQHVIVRTSRAGHLNANDWKTNAAGFKVSHLYGFGLMDAEAMVMEAEKWTTVPRQHVCVESTDRQIKTIRPNSAVRSIYKASGCSDNPNRHVNYLEHVVVRITITHPRRGDLAIYLTSPSGTRSQLLANRLFDHSMEGFKNWEFMTIHCWGERAAGDWVLEVYDTPSQLRNFKTPGKLKEWSLVLYGTSVQPYSPTNEFPKVERFRYSRVEDPTDDYGTEDYAGELASSGTQAKKRQLMHHPTTWENRMEWNGMKWNGMKWNGMEWNGMEWNRIESNRIE

SEQ ID NO: 33036 - protein, 913 aa, Homo sapiens
  REGION 1..913: note = ENSP00000365943
MGWGSRCCCPGRLDLLCVLALLGGCLLPVCRTRVYTNHWAVKIAGGFPEANRIASKYGFINIGQIGALKDYYHFYHSRTIKRSVISSRGTHSFISMEPKVEWIQQQVVKKRTKRDYDFSRAQSTYFNDPKWPSMWYMHCSDNTHPCQSDMNIEGAWKRGYTGKNIVVTILDDGIERTHPDLMQNYDALASCDVNGNDLDPMPRYDASNENKHGTRCAGEVAAAANNSHCTVGIAFNAKIGGVRMLDGDVTDMVEAKSVSFNPQHVHIYSASWGPDDDGKTVDGPAPLTRQAFENGVRMGRRGLGSVFVWASGNGGRSKDHCSCDGYTNSIYTISISSTAESGKKPWYLEECSSTLATTYSSGESYDKKIITTDLRQRCTDNHTGTSASAPMAAGIIALALEANPFLTWRDVQHVIVRTSRAGHLNANDWKTNAAGFKVSHLYGFGLMDAEAMVMEAEKWTTVPRQHVCVESTDRQIKTIRPNSAVRSIYKASGCSDNPNRHVNYLEHVVVRITITHPRRGDLAIYLTSPSGTRSQLLANRLFDHSMEGFKNWEFMTIHCWGERAAGDWVLEVYDTPSQLRNFKTPGKLKEWSLVLYGTSVQPYSPTNEFPKVERFRYSRVEDPTDDYGTEDYAGPCDPECSEVGCDGPGPDHCNDCLHYYYKLKNNTRICVSSCPPGHYHADKKRCRKCAPNCESCFGSHGDQCMSCKYGYFLNEETNSCVTHCPDGSYQDTKKNLCRKCSENCKTCTEFHNCTECRDGLSLQGSRCSVSCEDGRYFNGQDCQPCHRFCATCAGAGADGCINCTEGYFMEDGRCVQSCSISYYFDHSSENGYKSCKKCDISCLTCNGPGFKNCTSCPSGYLLDLGMCQMGAICKDATEESWAEGGFCMLVKKNNLCQRKVLQQLCCKTCTFQG

SEQ ID NO: 33037 - protein, 1560 aa, Homo sapiens
  REGION 1..1560: note = ENSP00000411654
NSIYTISISSTAESGKKPWYLEECSSTLATTYSSGESYDKKIITTDLRQRCTDNHTGTSASAPMAAGIIALALEANPFLTWRDVQHVIVRTSRAGHLNANDWKTNAAGFKVSHLYGFGLMDAEAMVMEAEKWTTVPRQHVCVESTDRQIKTIRPNSAVRSIYKASGCSDNPNRHVNYLEHVVVRITITHPRRGDLAIYLTSPSGTRSQLLANRLFDHSMEGFKNWEFMTIHCWGERAAGDWVLEVYDTPSQLRNFKTPGKLKEWSLVLYGTSVQPYSPTNEFPKVERFRYSRVEDPTDDYGTEDYAGPCDPECSEVGCDGPGPDHCNDCLHYYYKLKNNTRICVSSCPPGHYHADKKRCRKCAPNCESCFGSHGDQCMSCKYGYFLNEETNSCVTHCPDGSYQDTKKNLCRKCSENCKTCTEFHNCTECRDGLSLQGSRCSVSCEDGRYFNGQDCQPCHRFCATCAGAGADGCINCTEGYFMEDGRCVQSCSISYYFDHSSENGYKSCKKCDISCLTCNGPGFKNCTSCPSGYLLDLGMCQMGAICKDGEYVDEHGHCQTCEASCAKCQGPTQEDCTTCPMTRIFDDGRCVSNCPSWKFEFENQCHPCHHTCQRCQGSGPTHCTSCGADNYGREHFLYQGECGDSCPEGHYATEGNTCLPCPDNCELCHSVHVCTRCMKGYFIAPTNHTCQKLECGQGEVQDPDYEECVPCEEGCLGCSLDDPGTCTSCAMGYYRFDHHCYKTCPEKTYSEEVECKACDSNCGSCDQNGCYWCEEGFFLLGGSCVRKCGPGFYGDQEMGECESCHRACETCTGPGHDECSSCQEGLQLLRGMCVHATKTQEEGKFWNEAVSTANLSVVKSLLQERRRWKVQIKRDILRKLQPCHSSCKTCNGSATLCTSCPKGAYLLAQACVSSCPQGTWPSVRSGSCENCTEACAICSGADLCKKCQMQPGHPLFLHEGRCYSKCPEGSYAEDGICERCSSPCRTCEGNATNCHSCEGGHVLHHGVCQENCPERHVAVKGVCKHCPEMCQDCIHEKTCKECTPEFFLHDDMCHQSCPRGFYADSRHCVPCHKDCLECSGPKADDCELCLESSWVLYDGLCLEECPAGTYYEKETKECRDCHKSCLTCSSSGTCTTCQKGLIMNPRGSCMANEKCSPSEYWDEDAPGCKPCHVKCFHCMGPAEDQCQTCPMNSLLLNTTCVKDCPEGYYADEDSNRCAHCHSSCRTCEGRHSRQCHSCRPGWFQLGKECLLQCREGYYADNSTGRCERCNRSCKGCQGPRPTDCLSCDRFFFLLRSKGECHRSCPDHYYVEQSTQTCERCHPTCDQCKGKGALNCLSCVWSYHLMGGICTSDCLVGEYRVGEGEKFNCEKCHESCMECKGPGAKNCTLCPANLVLHMDDSHCLHCCNTSDPPSAQECCDCQDTTDECILRTSKVRPATEHFKTALFITSSMMLVLLLGAAVVVWKKSRGRVQPAAKAGYEKLADPNKSYSSYKSSYRESTSFEEDQVIEYRDRDYDEDDDDDIVYMGQDGTVYRKFKYGLLDDDDIDELEYDDESYSYYQ

SEQ ID NO: 33038 - protein, 101 aa, Homo sapiens
  REGION 1..101: note = ENSP00000407239
CQPCHRFCATCAGAGADGCINCTEGYFMEDGRCVQSCSISYYFDHSSENGYKSCKKCDISCLTCNGPGFKNCTSCPSGYLLDLGMCQMGAICKDVSLFRGA

SEQ ID NO: 33039 - protein, 1860 aa, Homo sapiens
  REGION 1..1860: note = ENSP00000446280
MGWGSRCCCPGRLDLLCVLALLGGCLLPVCRTRVYTNHWAVKIAGGFPEANRIASKYGFINIGQIGALKDYYHFYHSRTIKRSVISSRGTHSFISMEPKVEWIQQQVVKKRTKRDYDFSRAQSTYFNDPKWPSMWYMHCSDNTHPCQSDMNIEGAWKRGYTGKNIVVTILDDGIERTHPDLMQNYDALASCDVNGNDLDPMPRYDASNENKHGTRCAGEVAAAANNSHCTVGIAFNAKIGGVRMLDGDVTDMVEAKSVSFNPQHVHIYSASWGPDDDGKTVDGPAPLTRQAFENGVRMGRRGLGSVFVWASGNGGRSKDHCSCDGYTNSIYTISISSTAESGKKPWYLEECSSTLATTYSSGESYDKKIITTDLRQRCTDNHTGTSASAPMAAGIIALALEANPFLTWRDVQHVIVRTSRAGHLNANDWKTNAAGFKVSHLYGFGLMDAEAMVMEAEKWTTVPRQHVCVESTDRQIKTIRPNSAVRSIYKASGCSDNPNRHVNYLEHVVVRITITHPRRGDLAIYLTSPSGTRSQLLANRLFDHSMEGFKNWEFMTIHCWGERAAGDWVLEVYDTPSQLRNFKTPGKLKEWSLVLYGTSVQPYSPTNEFPKVERFRYSRVEDPTDDYGTEDYAGPCDPECSEVGCDGPGPDHCNDCLHYYYKLKNNTRICVSSCPPGHYHADKKRCRKCAPNCESCFGSHGDQCMSCKYGYFLNEETNSCVTHCPDGSYQDTKKNLCRKCSENCKTCTEFHNCTECRDGLSLQGSRCSVSCEDGRYFNGQDCQPCHRFCATCAGAGADGCINCTEGYFMEDGRCVQSCSISYYFDHSSENGYKSCKKCDISCLTCNGPGFKNCTSCPSGYLLDLGMCQMGAICKDGEYVDEHGHCQTCEASCAKCQGPTQEDCTTCPMTRIFDDGRCVSNCPSWKFEFENQCHPCHHTCQRCQGSGPTHCTSCGADNYGREHFLYQGECGDSCPEGHYATEGNTCLPCPDNCELCHSVHVCTRCMKGYFIAPTNHTCQKLECGQGEVQDPDYEECVPCEEGCLGCSLDDPGTCTSCAMGYYRFDHHCYKTCPEKTYSEEVECKACDSNCGSCDQNGCYWCEEGFFLLGGSCVRKCGPGFYGDQEMGECESCHRACETCTGPGHDECSSCQEGLQLLRGMCVHATKTQEEGKFWNDILRKLQPCHSSCKTCNGSATLCTSCPKGAYLLAQACVSSCPQGTWPSVRSGSCENCTEACAICSGADLCKKCQMQPGHPLFLHEGRCYSKCPEGSYAEDGICERCSSPCRTCEGNATNCHSCEGGHVLHHGVCQENCPERHVAVKGVCKHCPEMCQDCIHEKTCKECTPEFFLHDDMCHQSCPRGFYADSRHCVPCHKDCLECSGPKADDCELCLESSWVLYDGLCLEECPAGTYYEKETKECRDCHKSCLTCSSSGTCTTCQKGLIMNPRGSCMANEKCSPSEYWDEDAPGCKPCHVKCFHCMGPAEDQCQTCPMNSLLLNTTCVKDCPEGYYADEDSNRCAHCHSSCRTCEGRHSRQCHSCRPGWFQLGKECLLQCREGYYADNSTGRCERCNRSCKGCQGPRPTDCLSCDRFFFLLRSKGECHRSCPDHYYVEQSTQTCERCHPTCDQCKGKGALNCLSCVWSYHLMGGICTSDCLVGEYRVGEGEKFNCEKCHESCMECKGPGAKNCTLCPANLVLHMDDSHCLHCCNTSDPPSAQECCDCQDTTDECILRTSKVRPATEHFKTALFITSSMMLVLLLGAAVVVWKKSRGRVQPAAKAGYEKLADPNKSYSSYKSSYRESTSFEEDQVIEYRDRDYDEDDDDDIVYMGQDGTVYRKFKYGLLDDDDIDELEYDDESYSYYQ

SEQ ID NO: 33040 - protein, 690 aa, Homo sapiens; identical to SEQ ID NO: 33035
  REGION 1..690: note = ENSP00000365958

SEQ ID NO: 33041 - protein, 913 aa, Homo sapiens; identical to SEQ ID NO: 33036
  REGION 1..913: note = ENSP00000365943

SEQ ID NO: 33042 - protein, 1560 aa, Homo sapiens; identical to SEQ ID NO: 33037
  REGION 1..1560: note = ENSP00000411654

SEQ ID NO: 33043 - protein, 101 aa, Homo sapiens; identical to SEQ ID NO: 33038
  REGION 1..101: note = ENSP00000407239

SEQ ID NO: 33044 - protein, 1860 aa, Homo sapiens; identical to SEQ ID NO: 33039
  REGION 1..1860: note = ENSP00000446280

SEQ ID NO: 33045 - protein, 785 aa, Homo sapiens
  REGION 1..785: note = ENSP00000325917
MPKGRQKVPHLDAPLGLPTCLWLELAGLFLLVPWVMGLAGTGGPDGQGTGGPSWAVHLESLEGDGEEETLEQQADALAQAAGLVNAGRIGELQGHYLFVQPAGHRPALEVEAIRQQVEAVLAGHEAVRWHSEQRLLRRAKRSVHFNDPKYPQQWHLNNRRSPGRDINVTGVWERNVTGRGVTVVVVDDGVEHTIQDIAPNYSPEGSYDLNSNDPDPMPHPDVENGNHHGTRCAGEIAAVPNNSFCAVGVAYGSRIAGIRVLDGPLTDSMEAVAFNKHYQINDIYSCSWGPDDDGKTVDGPHQLGKAALQHGVIAGRQGFGSIFVVASGNGGQHNDNCNYDGYANSIYTVTIGAVDEEGRMPFYAEECASMLAVTFSGGDKMLRSIVTTDWDLQKGTGCTEGHTGTSAAAPLAAGMIALMLQVRPCLTWRDVQHIIVFTATRYEDRRAEWVTNEAGFSHSHQHGFGLLNAWRLVNAAKIWTSVPYLASYVSPVLKENKAIPQSPRSLEVLWNVSRMDLEMSGLKTLEHVAVTVSITHPRRGSLELKLFCPSGMMSLIGAPRSMDSDPNGFNDWTFSTVRCWGERARGTYRLVIRDVGDESFQVGILRQWQLTLYGSVWSAVDIRDRQRLLESAMSGKYLHDDFALPCPPGLKIPEEDGYTITPNTLKTLVLVGCFTVFWTVYYMLEVYLSQRNVASNQVCRSGPCHWPHRSRKAKEEGTELESVPLCSSKDPDEVETESRGPPTTSDLLAPDLLEQGDWSLSQNKSALDCPHQHLDVPHGKEEQIC

SEQ ID NO: 33046 - protein, 305 aa, Homo sapiens
  REGION 1..305: note = ENSP00000431181
MPKGRQKVPHLDAPLGLPTCLWLELAGLFLLVPWVMGLAGTGGPDGQGTGGPSWAVHLESLEGDGEEETLEQQADALAQAAGLVNAGRIGELQGHYLFVQPAGHRPALEVEAIRQQVEAVLAGHEAVRWHSEQRLLRRAKRSVHFNDPKYPQQWHLNNRRSPGRDINVTGVWERNVTGRGVTVVVVDDGVEHTIQDIAPNYSPEGSYDLNSNDPDPMPHPDVENGNHHGTRCAGEIAAVPNNSFCAVGVAYGSRIAGIRVLDGPLTDSMEAVAFNKHYQINDIYSCSWGPDDDGKTVDGPHQLGK

SEQ ID NO: 33047 - protein, 113 aa, Homo sapiens
  REGION 1..113: note = ENSP00000433841
MPKGRQKVPHLDAPLGLPTCLWLELAGLFLLVPWVMGLAGTGGPDGQGTGGPSWAVHLESLEGDGEEETLEQQADALAQAAGLVNAGRIGELQGHYLFVQPAGHRPALEVEAI

SEQ ID NO: 33048 - protein, 92 aa, Homo sapiens
  REGION 1..92: note = ENSP00000436459
MPKGRQKVPHLDAPLGLPTCLWLELAGLFLLVPWVMGLAGTGGPDGQGTGGPSWAVHLESLEGDGEEETLEQQADALAQAAGLVNAGRIGEL

SEQ ID NO: 33049 - protein, 91 aa, Homo sapiens
  REGION 1..91: note = ENSP00000433252
MPKGRQKVPHLDAPLGLPTCLWLELAGLFLLVPWVMGLAGTGGPDGQGTGGPSWAVHLESLEGDGEEETLEQQADALAQAAGLVNAGRIGE

SEQ ID NO: 33050 - protein, 591 aa, Homo sapiens
  REGION 1..591: note = ENSP00000441944
MPKGRQKVPHLDAPLGLPTCLWLELAGLFLLVPWVMGLAGTGGPDGQGTGGPSWAVHLESLEGDGEEETLEQQADALAQAAGLVNAGRIGELQGHYLFVQPAGHRPALEVEAIRQQVEAVLAGHEAVRWHSEQRLLRRAKRSVHFNDPKYPQQWHLNNRRSPGRDINVTGVWERNVTGRGVTVVVVDDGVEHTIQDIAPNYSPEGSYDLNSNDPDPMPHPDVENGNHHGTRCAGEIAAVPNNSFCAVGVAYGSRIAGIRVLDGPLTDSMEAVAFNKHYQINDIYSCSWGPDDDGKTVDGPHQLGKAALQHGVIAGRQGFGSIFVVASGNGGQHNDNCNYDGYANSIYTVTIGAVDEEGRMPFYAEECASMLAVTFSGGDKMLRSIVTTDWDLQKGTGCTEGHTGTSAAAPLAAGMIALMLQVRPCLTWRDVQHIIVFTATRYEDRRAEWVTNEAGFSHSHQHGFGLLNAWRLVNAAKIWTSVPYLASYVSPVLKENKAIPQSPRSLEVLWNVSRMDLEMSGLKTLEHVAVTVSITHPRRGSLELKLFCPSGMMSLIGAPRSMDSWLCVECSRHQGQTKAVRECHEWKIPAR

SEQ ID NO: 33051 - protein, 356 aa, Homo sapiens
  REGION 1..356: note = ENSP00000305556
MDAGVTESGLNVTLTIRLLMHGKEVGSIIGKKGESVKRIREESGARINISEGNCPERIITLTGPTNAIFKAFAMIIDKLEEDINSSMTNSTAASRPPVTLRLVVPATQCGSLIGKGGCKIKEIRESTGAQVQVAGDMLPNSTERAITIAGVPQSVTECVKQICLVMLETLSQSPQGRVMTIPYQPMPASSPVICAGGQDRCSDAAGYPHATHDLEGPPLDAYSIQGQHTISPLDLAKLNQVARQQSHFAMMHGGTGFAGIDSSSPEVKGYWASLDASTQTTHELTIPNNLIGCIIGRQGANINEIRQMSGAQIKIANPVEGSSGRQVTITGSAASISLAQYLINARLSSEKGMGCS

SEQ ID NO: 33052 - protein, 1237 aa, Homo sapiens
  REGION 1..1237: note = ENSP00000287008
MDSGAGGRRCPEAALLILGPPRMEHLRHSPGPGGQRLLLPSMLLALLLLLAPSPGHATRVVYKVPEEQPPNTLIGSLAADYGFPDVGHLYKLEVGAPYLRVDGKTGDIFTTETSIDREGLRECQNQLPGDPCILEFEVSITDLVQNGSPRLLEGQIEVQDINDNTPNFASPVITLAIPENTNIGSLFPIPLASDRDAGPNGVASYELQAGPEAQELFGLQVAEDQEEKQPQLIVMGNLDRERWDSYDLTIKVQDGGSPPRASSALLRVTVLDTNDNAPKFERPSYEAELSENSPIGHSVIQVKANDSDQGANAEIEYTFHQAPEVVRRLLRLDRNTGLITVQGPVDREDLSTLRFSVLAKDRGTNPKSARAQVVVTVKDMNDNAPTIEIRGIGLVTHQDGMANISEDVAEETAVALVQVSDRDEGENAAVTCVVAGDVPFQLRQASETGSDSKKKYFLQTTTPLDYEKVKDYTIEIVAVDSGNPPLSSTNSLKVQVVDVNDNAPVFTQSVTEVAFPENNKPGEVIAEITASDADSGSNAELVYSLEPEPAAKGLFTISPETGEIQVKTSLDREQRESYELKVVAADRGSPSLQGTATVLVNVLDCNDNDPKFMLSGYNFSVMENMPALSPVGMVTVIDGDKGENAQVQLSVEQDNGDFVIQNGTGTILSSLSFDREQQSTYTFQLKAVDGGVPPRSAYVGVTINVLDENDNAPYITAPSNTSHKLLTPQTRLGETVSQVAAEDFDSGVNAELIYSIAGGNPYGLFQIGSHSGAITLEKEIERRHHGLHRLVVKVSDRGKPPRYGTALVHLYVNETLANRTLLETLLGHSLDTPLDIDIAGDPEYERSKQRGNILFGVVAGVVAVALLIALAVLVRYCRQREAKSGYQAGKKETKDLYAPKPSGKASKGNKSKGKKSKSPKPVKPVEDEDEAGLQKSLKFNLMSDAPGDSPRIHLPLNYPPGSPDLGRHYRSNSPLPSIQLQPQSPSASKKHQVVQDLPPANTFVGTGDTTSTGSEQYSDYSYRTNPPKYPSKQLPHRRVTFSATSQAQELQDPSQHSYYDSGLEESETPSSKSSSGPRLGPLALPEDHYERTTPDGSIGEMEHPENDLRPLPDVAMTGTCTRECSEFGHSDTCWMPGQSSPSRRTKSSALKLSTFVPYQDRGGQEPAGAGSPSPPEDRNTKTAPVRLLPSYSAFSHSSHDSCKDSATLEEIPLTQTSDFPPAATPASAQTAKREIYL

SEQ ID NO: 33053 - protein, 382 aa, Homo sapiens
  REGION 1..382: note = ENSP00000424667
MDSGAGGRRCPEAALLILGPPRMEHLRHSPGPGGQRLLLPSMLLALLLLLAPSPGHATRVVYKVPEEQPPNTLIGSLAADYGFPDVGHLYKLEVGAPYLRVDGKTGDIFTTETSIDREGLRECQNQLPGDPCILEFEVSITDLVQNGSPRLLEGQIEVQDINDNTPNFASPVITLAIPENTNIGSLFPIPLASDRDAGPNGVASYELQAGPEAQELFGLQVAEDQEEKQPQLIVMGNLDRERWDSYDLTIKVQDGGSPPRASSALLRVTVLDTNDNAPKFERPSYEAELSENSPIGHSVIQLPHRRVTFSATSQAQELQDPSQHSYYDSGLEESETPSSKSSSGPRLGPLALPEDHYERTTPDGSIGEMEHPENEPAGRSRP

SEQ ID NO: 33054 - protein, 1060 aa, Homo sapiens
  REGION 1..1060: note = ENSP00000378043
MDSGAGGRRCPEAALLILGPPRMEHLRHSPGPGGQRLLLPSMLLALLLLLAPSPGHATRVVYKVPEEQPPNTLIGSLAADYGFPDVGHLYKLEVGAPYLRVDGKTGDIFTTETSIDREGLRECQNQLPGDPCILEFEVSITDLVQNGSPRLLEGQIEVQDINDNTPNFASPVITLAIPENTNIGSLFPIPLASDRDAGPNGVASYELQAGPEAQELFGLQVAEDQEEKQPQLIVMGNLDRERWDSYDLTIKVQDGGSPPRASSALLRVTVLDTNDNAPKFERPSYEAELSENSPIGHSVIQVKANDSDQGANAEIEYTFHQAPEVVRRLLRLDRNTGLITVQGPVDREDLSTLRFSVLAKDRGTNPKSARAQVVVTVKDMNDNAPTIEIRGIGLVTHQDGMANISEDVAEETAVALVQVSDRDEGENAAVTCVVAGDVPFQLRQASETGSDSKKKYFLQTTTPLDYEKVKDYTIEIVAVDSGNPPLSSTNSLKVQVVDVNDNAPVFTQSVTEVAFPENNKPGEVIAEITASDADSGSNAELVYSLEPEPAAKGLFTISPETGEIQVKTSLDREQRESYELKVVAADRGSPSLQGTATVLVNVLDCNDNDPKFMLSGYNFSVMENMPALSPVGMVTVIDGDKGENAQVQLSVEQDNGDFVIQNGTGTILSSLSFDREQQSTYTFQLKAVDGGVPPRSAYVGVTINVLDENDNAPYITAPSNTSHKLLTPQTRLGETVSQVAAEDFDSGVNAELIYSIAGGNPYGLFQIGSHSGAITLEKEIERRHHGLHRLVVKVSDRGKPPRYGTALVHLYVNETLANRTLLETLLGHSLDTPLDIDIAGDPEYERSKQRGNILFGVVAGVVAVALLIALAVLVRYCRQREAKSGYQAGKKETKDLYAPKPSGKASKGNKSKGKKSKSPKPVKPVEDEDEAGLQKSLKFNLMSDAPGDSPRIHLPLNYPPGSPDLGRHYRSNSPLPSIQLQPQSPSASKKHQVVQDLPPANTFVGTGDTTSTGSEQYSDYSYRTNPPKYPSKQVGQPFQLSTPQPLPHPYHGAIWTEVWE

SEQ ID NO: 33055 - protein, 17 aa, Homo sapiens
  REGION 1..17: note = ENSP00000424204
  VARIANT 1: note = Any amino acid
XIQVRGPLRITVRVTHH

SEQ ID NO: 33056 - protein, 126 aa, Homo sapiens
  REGION 1..126: note = ENSP00000424004
  VARIANT 1: note = Any amino acid
XGPNGVASYELQAGPEAQELFGLQVAEDQEEKQPQLIVMGNLDRERWDSYDLTIKVQDGGSPPRASSALLRVTVLDTNDNAPKFERPSYEAELSENSPIGHSVIQSLVDWDLEKRLRKKRETDSRG

SEQ ID NO: 33057 - protein, 150 aa, Homo sapiens
  REGION 1..150: note = ENSP00000424163
MEHLRHSPGPGGQRLLLPSMLLALLLLLAPSPGHATRVVYKVPEEQPPNTLIGSLAADYGFPDVGHLYKLEVGAPYLRVDGKTGDIFTTETSIDREGLRECQNQLPGDPCILEFEVSITDLVQNGSPRLLEGQIEVQDINDNTPNFASPV

SEQ ID NO: 33058 - protein, 1677 aa, Homo sapiens
  REGION 1..1677: note = ENSP00000363076
MFRQFYLWTCLASGIILGSLFEICLGQYDDDCKLARGGPPATIVAIDEESRNGTILVDNMLIKGTAGGPDPTIELSLKDNVDYWVLMDPVKQMLFLNSTGRVLDRDPPMNIHSIVVQVQCINKKVGTIIYHEVRIVVRDRNDNSPTFKHESYYATVNELTPVGTTIFTGFSGDNGATDIDDGPNGQIEYVIQYNPDDPTSNDTFEIPLMLTGNIVLRKRLNYEDKTRYFVIIQANDRAQNLNERRTTTTTLTVDVLDGDDLGPMFLPCVLVPNTRDCRPLTYQAAIPELRTPEELNPIIVTPPIQAIDQDRNIQPPSDRPGILYSILVGTPEDYPRFFHMHPRTAELSLLEPVNRDFHQKFDLVIKAEQDNGHPLPAFAGLHIEILDENNQSPYFTMPSYQGYILESAPVGATISDSLNLTSPLRIVALDKDIEDTKDPELHLFLNDYTSVFTVTQTGITRYLTLLQPVDREEQQTYTFSITAFDGVQESEPVIVNIQVMDANDNTPTFPEISYDVYVYTDMRPGDSVIQLTAVDADEGSNGEITYEILVGAQGDFIINKTTGLITIAPGVEMIVGRTYALTVQAADNAPPAERRNSICTVYIEVLPPNNQSPPRFPQLMYSLEISEAMRVGAVLLNLQATDREGDSITYAIENGDPQRVFNLSETTGILTLGKALDRESTDRYILIITASDGRPDGTSTATVNIVVTDVNDNAPVFDPYLPRNLSVVEEEANAFVGQVKATDPDAGINGQVHYSLGNFNNLFRITSNGSIYTAVKLNREVRDYYELVVVATDGAVHPRHSTLTLAIKVLDIDDNSPVFTNSTYTVLVEENLPAGTTILQIEAKDVDLGANVSYRIRSPEVKHFFALHPFTGELSLLRSLDYEAFPDQEASITFLVEAFDIYGTMPPGIATVTVIVKDMNDYPPVFSKRIYKGMVAPDAVKGTPITTVYAEDADPPGLPASRVRYRVDDVQFPYPASIFEVEEDSGRVITRVNLNEEPTTIFKLVVVAFDDGEPVMSSSATVKILVLHPGEIPRFTQEEYRPPPVSELATKGTMVGVISAAAINQSIVYSIVSGNEEDTFGINNITGVIYVNGPLDYETRTSYVLRVQADSLEVVLANLRVPSKSNTAKVYIEIQDENNHPPVFQKKFYIGGVSEDARMFTSVLRVKATDKDTGNYSVMAYRLIIPPIKEGKEGFVVETYTGLIKTAMLFHNMRRSYFKFQVIATDDYGKGLSGKADVLVSVVNQLDMQVIVSNVPPTLVEKKIEDLTEILDRYVQEQIPGAKVVVESIGARRHGDAFSLEDYTKCDLTVYAIDPQTNRAIDRNELFKFLDGKLLDINKDFQPYYGEGGRILEIRTPEAVTSIKKRGESLGYTEGALLALAFIIILCCIPAILVVLVSYRQFKVRQAECTKTARIQAALPAAKPAVPAPAPVAAPPPPPPPPPGAHLYEELGDSSMHKYEMPQYGSRRRLLPPAGQEEYGEVVGEAEEEYEEEEWARKRMIKLVVDREYETSSTGEDSAPECQRNRLHHPSIHSNINGNIYIAQNGSVVRTRRACLTDNLKVASPVRLGGPFKKLDKLAVTHEENVPLNTLSKGPFSTEKMNARPTLVTFAPCPVGTDNTAVKPLRNRLKSTVEQESMIDSKNIKEALEFHSDHTQSDDEELWMGPWNNLHIPMTKL

SEQ ID NO: 33059 - protein, 1675 aa, Homo sapiens
  REGION 1..1675: note = ENSP00000483745
MFRQFYLWTCLASGIILGSLFEICLGQYDDDCKLARGGPPATIVAIDEESRNGTILVDNMLIKGTAGGPDPTIELSLKDNVDYWVLMDPVKQMLFLNSTGRVLDRDPPMNIHSIVVQVQCINKKVGTIIYHEVRIVVRDRNDNSPTFKHESYYATVNELTPVGTTIFTGFSGDNGATDIDDGPNGQIEYVIQYNPDDPTSNDTFEIPLMLTGNIVLRKRLNYEDKTRYFVIIQANDRAQNLNERRTTTTTLTVDVLDGDDLGPMFLPCVLVPNTRDCRPLTYQAAIPELRTPEELNPIIVTPPIQAIDQDRNIQPPSDRPGILYSILVGTPEDYPRFFHMHPRTAELSLLEPVNRDFHQKFDLVIKAEQDNGHPLPAFAGLHIEILDENNQSPYFTMPSYQGYILESAPVGATISDSLNLTSPLRIVALDKDIEDTKDPELHLFLNDYTSVFTVTQTGITRYLTLLQPVDREEQQTYTFSITAFDGVQESEPVIVNIQVMDANDNTPTFPEISYDVYVYTDMRPGDSVIQLTAVDADEGSNGEITYEILVGAQGDFIINKTTGLITIAPGVEMIVGRTYALTVQAADNAPPAERRNSICTVYIEVLPPNNQSPPRFPQLMYSLEISEAMRVGAVLLNLQATDREGDSITYAIENGDPQRVFNLSETTGILTLGKALDRESTDRYILIITASDGRPDGTSTATVNIVVTDVNDNAPVFDPYLPRNLSVVEEEANAFVGQVKATDPDAGINGQVHYSLGNFNNLFRITSNGSIYTAVKLNREVRDYYELVVVATDGAVHPRHSTLTLAIKVLDIDDNSPVFTNSTYTVLVEENLPAGTTILQIEAKDVDLGANVSYRIRSPEVKHFFALHPFTGELSLLRSLDYEAFPDQEASITFLVEAFDIYGTMPPGIATVTVIVKDMNDYPPVFSKRIYKGMVAPDAVKGTPITTVYAEDADPPGLPASRVRYRVDDVQFPYPASIFEVEEDSGRVITRVNLNEEPTTIFKLVVVAFDDGEPVMSSSATVKILVLHPGEIPRFTQEEYRPPPVSELATKGTMVGVISAAAINQSIVYSIVSGNEEDTFGINNITGVIYVNGPLDYETRTSYVLRVQADSLEVVLANLRVPSKSNTAKVYIEIQDENNHPPVFQKKFYIGGVSEDARMFTSVLRVKATDKDTGNYSVMAYRLIIPPIKEGKEGFVVETYTGLIKTAMLFHNMRRSYFKFQVIATDDYGKGLSGKADVLVSVVNQLDMQVIVSNVPPTLVEKKIEDLTEILDRYVQEQIPGAKVVVESIGARRHGDAFSLEDYTKCDLTVYAIDPQTNRAIDRNELFKFLDGKLLDINKDFQPYYGEGGRILEIRTPEAVTSIKKRGESLGYTEGALLALAFIIILCCIPAILVVLVSYRQFKVRQAECTKTARIQAALPAAKPAVPAPAPVAAPPPPPPPPPGAHLYEELGDSSMYEMPQYGSRRRLLPPAGQEEYGEVVGEAEEEYEEEEWARKRMIKLVVDREYETSSTGEDSAPECQRNRLHHPSIHSNINGNIYIAQNGSVVRTRRACLTDNLKVASPVRLGGPFKKLDKLAVTHEENVPLNTLSKGPFSTEKMNARPTLVTFAPCPVGTDNTAVKPLRNRLKSTVEQESMIDSKNIKEALEFHSDHTQSDDEELWMGPWNNLHIPMTKL

SEQ ID NO: 33060 - protein, 1682 aa, Homo sapiens
  REGION 1..1682: note = ENSP00000484454
MFRQFYLWTCLASGIILGSLFEICLGQYDDDWQYEDCKLARGGPPATIVAIDEESRNGTILVDNMLIKGTAGGPDPTIELSLKDNVDYWVLMDPVKQMLFLNSTGRVLDRDPPMNIHSIVVQVQCINKKVGTIIYHEVRIVVRDRNDNSPTFKHESYYATVNELTPVGTTIFTGFSGDNGATDIDDGPNGQIEYVIQYNPDDPTSNDTFEIPLMLTGNIVLRKRLNYEDKTRYFVIIQANDRAQNLNERRTTTTTLTVDVLDGDDLGPMFLPCVLVPNTRDCRPLTYQAAIPELRTPEELNPIIVTPPIQAIDQDRNIQPPSDRPGILYSILVGTPEDYPRFFHMHPRTAELSLLEPVNRDFHQKFDLVIKAEQDNGHPLPAFAGLHIEILDENNQSPYFTMPSYQGYILESAPVGATISDSLNLTSPLRIVALDKDIEDTKDPELHLFLNDYTSVFTVTQTGITRYLTLLQPVDREEQQTYTFSITAFDGVQESEPVIVNIQVMDANDNTPTFPEISYDVYVYTDMRPGDSVIQLTAVDADEGSNGEITYEILVGAQGDFIINKTTGLITIAPGVEMIVGRTYALTVQAADNAPPAERRNSICTVYIEVLPPNNQSPPRFPQLMYSLEISEAMRVGAVLLNLQATDREGDSITYAIENGDPQRVFNLSETTGILTLGKALDRESTDRYILIITASDGRPDGTSTATVNIVVTDVNDNAPVFDPYLPRNLSVVEEEANAFVGQVKATDPDAGINGQVHYSLGNFNNLFRITSNGSIYTAVKLNREVRDYYELVVVATDGAVHPRHSTLTLAIKVLDIDDNSPVFTNSTYTVLVEENLPAGTTILQIEAKDVDLGANVSYRIRSPEVKHFFALHPFTGELSLLRSLDYEAFPDQEASITFLVEAFDIYGTMPPGIATVTVIVKDMNDYPPVFSKRIYKGMVAPDAVKGTPITTVYAEDADPPGLPASRVRYRVDDVQFPYPASIFEVEEDSGRVITRVNLNEEPTTIFKLVVVAFDDGEPVMSSSATVKILVLHPGEIPRFTQEEYRPPPVSELATKGTMVGVISAAAINQSIVYSIVSGNEEDTFGINNITGVIYVNGPLDYETRTSYVLRVQADSLEVVLANLRVPSKSNTAKVYIEIQDENNHPPVFQKKFYIGGVSEDARMFTSVLRVKATDKDTGNYSVMAYRLIIPPIKEGKEGFVVETYTGLIKTAMLFHNMRRSYFKFQVIATDDYGKGLSGKADVLVSVVNQLDMQVIVSNVPPTLVEKKIEDLTEILDRYVQEQIPGAKVVVESIGARRHGDAFSLEDYTKCDLTVYAIDPQTNRAIDRNELFKFLDGKLLDINKDFQPYYGEGGRILEIRTPEAVTSIKKRGESLGYTEGALLALAFIIILCCIPAILVVLVSYRQFKVRQAECTKTARIQAALPAAKPAVPAPAPVAAPPPPPPPPPGAHLYEELGDSSMHKYEMPQYGSRRRLLPPAGQEEYGEVVGEAEEEYEEEEWARKRMIKLVVDREYETSSTGEDSAPECQRNRLHHPSIHSNINGNIYIAQNGSVVRTRRACLTDNLKVASPVRLGGPFKKLDKLAVTHEENVPLNTLSKGPFSTEKMNARPTLVTFAPCPVGTDNTAVKPLRNRLKSTVEQESMIDSKNIKEALEFHSDHTQSDDEELWMGPWNNLHIPMTKL

SEQ ID NO: 33061 - protein, 416 aa, Homo sapiens
  REGION 1..416: note = ENSP00000480780
MQVIVSNVPPTLVEKKIEDLTEILDRYVQEQIPGAKVVVESIGARRHGDAFSLEDYTKCDLTVYAIDPQTNRAIDRNELFKFLDGKLLDINKDFQPYYGEGGRILEIRTPEAVTSIKKRGESLGYTEGALLALAFIIILCCIPAILVVLVSYRQRGYGSEQQQLLRPSLLKPEELSMESGIDPGQEYGQDYYSYEHGYEMPQYGSRRRLLPPAGQEEYGEVVGEAEEEYEEEEWARKRMIKLVVDREYETSSTGEDSAPECQRNRLHHPSIHSNINGNIYIAQNGSVVRTRRACLTDNLKVASPVRLGGPFKKLDKLAVTHEENVPLNTLSKGPFSTEKMNARPTLVTFAPCPVGTDNTAVKPLRNRLKSTVEQESMIDSKNIKEALEFHSDHTQSDDEELWMGPWNNLHIPMTKL

SEQ ID NO: 33062 - protein, 460 aa, Homo sapiens
  REGION 1..460: note = ENSP00000482780
LVEKKIEDLTEILDRYVQEQIPGAKVVVESIGARRHGDAFSLEDYTKCDLTVYAIDPQTNRAIDRNELFKFLDGKLLDINKDFQPYYGEGGRILEIRTPEAVTSIKKRGESLGYTEGALLALAFIIILCCIPAILVVLVSYRQFKVRQAECTKTARIQAALPAAKPAVPAPAPVAAPPPPPPPPPGAHLYEELGDSSMRGYGSEQQQLLRPSLLKPEELSMESGIDPGQEYGQDYYSYEHGYEMPQYGSRRRLLPPAGQEEYGEVVGEAEEEYEEEEWARKRMIKLVVDREYETSSTGEDSAPECQRNRLHHPSIHSNINGNIYIAQNGSVVRTRRACLTDNLKVASPVRLGGPFKKLDKLAVTHEENVPLNTLSKGPFSTEKMNARPTLVTFAPCPVGTDNTAVKPLRNRLKSTVEQESMIDSKNIKEALEFHSDHTQSDDEELWMGPWNNLHIPMTKL

SEQ ID NO: 33063 - protein, 650 aa, Homo sapiens
  REGION 1..650: note = ENSP00000378829
MFRQFYLWTCLASGIILGSLFEICLGQYDDDCKLARGGPPATIVAIDEESRNGTILVDNMLIKGTAGGPDPTIELSLKDNVDYWVLMDPVKQMLFLNSTGRVLDRDPPMNIHSIVVQVQCINKKVGTIIYHEVRIVVRDRNDNSPTFKHESYYATVNELTPVGTTIFTGFSGDNGATDIDDGPNGQIEYVIQYNPDDPTSNDTFEIPLMLTGNIVLRKRLNYEDKTRYFVIIQANDRAQNLNERRTTTTTLTVDVLDGDDLGPMFLPCVLVPNTRDCRPLTYQAAIPELRTPEELNPIIVTPPIQAIDQDRNIQPPSDRPGILYSILVGTPEDYPRFFHMHPRTAELSLLEPVNRDFHQKFDLVIKEEPKKIKKPKVEIREPSEEEEVVVTIEKPPAAEPTYTTWKRARIFPMIFKKVRGLADKRGIVDLEGEEWQRRLEEEDKDYLKLTLDQEEATESTVESEEESSSDYTEYSEEESEFSESETTEEESESETPSEEEESSTPESEESESTESEGEKARKNIVLARRRPMVEEVKEVKGRKEEPQEEQKEPKMEEEEHSEEEESGPAPVEESTDPEAQDIPEEGSAESASVEGGVESEEESESGSSSSSSESQSGGPWGYQVPAYDRSKNANQKKSPGANSEGYNTAL

SEQ ID NO: 33064 - protein, 719 aa, Homo sapiens
  REGION 1..719: note = ENSP00000378827
MFRQFYLWTCLASGIILGSLFEICLGQYDDDCKLARGGPPATIVAIDEESRNGTILVDNMLIKGTAGGPDPTIELSLKDNVDYWVLMDPVKQMLFLNSTGRVLDRDPPMNIHSIVVQVQCINKKVGTIIYHEVRIVVRDRNDNSPTFKHESYYATVNELTPVGTTIFTGFSGDNGATDIDDGPNGQIEYVIQYNPDDPTSNDTFEIPLMLTGNIVLRKRLNYEDKTRYFVIIQANDRAQNLNERRTTTTTLTVDVLDGDDLGPMFLPCVLVPNTRDCRPLTYQAAIPELRTPEELNPIIVTPPIQAIDQDRNIQPPSDRPGILYSILVGTPEDYPRFFHMHPRTAELSLLEPVNRDFHQKFDLVIKAEQDNGHPLPAFAGLHIEILDENNQSPYFTMPSYQGYILESAPVGATISDSLNLTSPLRIVALDKDIEDEEPKKIKKPKVEIREPSEEEEVVVTIEKPPAAEPTYTTWKRARIFPMIFKKVRGLADKRGIVDLEGEEWQRRLEEEDKDYLKLTLDQEEATESTVESEEESSSDYTEYSEEESEFSESETTEEESESETPSEEEESSTPESEESESTESEGEKARKNIVLARRRPMVEEVKEVKGRKEEPQEEQKEPKMEEEEHSEEEESGPAPVEESTDPEAQDIPEEGSAESASVEGGVESEEESESGSSSSSSESQSGGPWGYQVPAYDRSKNANQKKSPGANSEGYNTAL

SEQ ID NO: 33065 - protein, 1539 aa, Homo sapiens
  REGION 1..1539: note = ENSP00000478076
MFRQFYLWTCLASGIILGSLFEICLGQYDDDCKLARGGPPATIVAIDEESRNGTILVDNMLIKGTAGGPDPTIELSLKDNVDYWVLMDPVKQMLFLNSTGRVLDRDPPMNIHSIVVQVQCINKKVGTIIYHEVRIVVRDRNDNSPTFKHESYYATVNELTPVGTTIFTGFSGDNGATDIDDGPNGQIEYVIQYNPDDPTSNDTFEIPLMLTGNIVLRKRLNYEDKTRYFVIIQANDRAQNLNERRTTTTTLTVDVLDGDDLGPMFLPCVLVPNTRDCRPLTYQAAIPELRTPEELNPIIVTPPIQAIDQDRNIQPPSDRPGILYSILVGTPEDYPRFFHMHPRTAELSLLEPVNRDFHQKFDLVIKAEQDNGHPLPAFAGLHIEILDENNQSPYFTMPSYQGYILESAPVGATISDSLNLTSPLRIVALDKDIEDTKDPELHLFLNDYTSVFTVTQTGITRYLTLLQPVDREEQQTYTFSITAFDGVQESEPVIVNIQVMDANDNTPTFPEISYDVYVYTDMRPGDSVIQLTAVDADEGSNGEITYEILVGAQGDFIINKTTGLITIAPGVEMIVGRTYALTVQAADNAPPAERRNSICTVYIEVLPPNNQSPPRFPQLMYSLEISEAMRVGAVLLNLQATDREGDSITYAIENGDPQRVFNLSETTGILTLGKALDRESTDRYILIITASDGRPDGTSTATVNIVVTDVNDNAPVFDPYLPRNLSVVEEEANAFVGQVKATDPDAGINGQVHYSLGNFNNLFRITSNGSIYTAVKLNREVRDYYELVVVATDGAVHPRHSTLTLAIKVLDIDDNSPVFTNSTYTVLVEENLPAGTTILQIEAKDVDLGANVSYRIRSPEVKHFFALHPFTGELSLLRSLDYEAFPDQEASITFLVEAFDIYGTMPPGIATVTVIVKDMNDYPPVFSKRIYKGMVAPDAVKGTPITTVYAEDADPPGLPASRVRYRVDDVQFPYPASIFEVEEDSGRVITRVNLNEEPTTIFKLVVVAFDDGEPVMSSSATVKILVLHPGEIPRFTQEEYRPPPVSELATKGTMVGVISAAAINQSIVYSIVSGNEEDTFGINNITGVIYVNGPLDYETRTSYVLRVQADSLEVVLANLRVPSKSNTAKVYIEIQDENNHPPVFQKKFYIGGVSEDARMFTSVLRVKATDKDTGNYSVMAYRLIIPPIKEGKEGFVVETYTGLIKTAMLFHNMRRSYFKFQVIATDDYGKGLSGKADVLVSVVNQLDMQVIVSNVPPTLVEKKIEDLTEILDRYVQEQIPGAKVVVESIGARRHGDAFSLEDYTKCDLTVYAIDPQTNRAIDRNELFKFLDGKLLDINKDFQPYYGEGGRILEIRTPEAVTSIKKRGESLGYTEGALLALAFIIILCCIPAILVVLVSYRQFKVRQAECTKTARIQAALPAAKPAVPAPAPVAAPPPPPPPPPGAHLYEELGDSSMHKNYPWSLELILARNMDKIITVMSMGMKCLNMGVAVDCYHQLDRRNMVRWLVKLRKNMRRKRKSQRKLKNQRLKLESLVRRKK

SEQ ID NO: 33066 - protein, 981 aa, Homo sapiens
  REGION 1..981: note = ENSP00000378833
MFRQFYLWTCLASGIILGSLFEICLGQYDDDCKLARGGPPATIVAIDEESRNGTILVDNMLIKGTAGGPDPTIELSLKDNVDYWVLMDPVKQMLFLNSTGRVLDRDPPMNIHSIVVQVQCINKKVGTIIYHEVRIVVRDRNDNSPTFKHESYYATVNELTPVGTTIFTGFSGDNGATDIDDGPNGQIEYVIQYNPDDPTSNDTFEIPLMLTGNIVLRKRLNYEDKTRYFVIIQANDRAQNLNERRTTTTTLTVDVLDGDDLGPMFLPCVLVPNTRDCRPLTYQAAIPELRTPEELNPIIVTPPIQAIDQDRNIQPPSDRPGILYSILVGTPEDYPRFFHMHPRTAELSLLEPVNRDFHQKFDLVIKAEQDNGHPLPAFAGLHIEILDENNQSPYFTMPSYQGYILESAPVGATISDSLNLTSPLRIVALDKDIEDTKDPELHLFLNDYTSVFTVTQTGITRYLTLLQPVDREEQQTYTFSITAFDGVQESEPVIVNIQVMDANDNTPTFPEISYDVYVYTDMRPGDSVIQLTAVDADEGSNGEITYEILVGAQGDFIINKTTGLITIAPGVEMIVGRTYALTVQAADNAPPAERRNSICTVYIEVLPPNNQSPPRFPQLMYSLEISEAMRVGAVLLNLQATDREGDSITYAIENGDPQRVFNLSETTGILTLGKALDRESTDRYILIITASDGRPDGEEPKKIKKPKVEIREPSEEEEVVVTIEKPPAAEPTYTTWKRARIFPMIFKKVRGLADKRGIVDLEGEEWQRRLEEEDKDYLKLTLDQEEATESTVESEEESSSDYTEYSEEESEFSESETTEEESESETPSEEEESSTPESEESESTESEGEKARKNIVLARRRPMVEEVKEVKGRKEEPQEEQKEPKMEEEEHSEEEESGPAPVEESTDPEAQDIPEEGSAESASVEGGVESEEESESGSSSSSSESQSGGPWGYQVPAYDRSKNANQKKSPGANSEGYNTAL

SEQ ID NO: 33067 - protein, 1150 aa, Homo sapiens
  REGION 1..1150: note = ENSP00000386693
MPSYQGYILESAPVGATISDSLNLTSPLRIVALDKDIEDVPPSGVPTKDPELHLFLNDYTSVFTVTQTGITRYLTLLQPVDREEQQTYTFSITAFDGVQESEPVIVNIQVMDANDNTPTFPEISYDVYVYTDMRPGDSVIQLTAVDADEGSNGEITYEILVGAQGDFIINKTTGLITIAPGVEMIVGRTYALTVQAADNAPPAERRNSICTVYIEVLPPNNQSPPRFPQLMYSLEISEAMRVGAVLLNLQATDREGDSITYAIENGDPQRVFNLSETTGILTLGKALDRESTDRYILIITASDGRPDGTSTATVNIVVTDVNDNAPVFDPYLPRNLSVVEEEANAFVGQVKATDPDAGINGQVHYSLGNFNNLFRITSNGSIYTAVKLNREVRDYYELVVVATDGAVHPRHSTLTLAIKVLDIDDNSPVFTNSTYTVLVEENLPAGTTILQIEAKDVDLGANVSYRIRSPEVKHFFALHPFTGELSLLRSLDYEAFPDQEASITFLVEAFDIYGTMPPGIATVTVIVKDMNDYPPVFSKRIYKGMVAPDAVKGTPITTVYAEDADPPGLPASRVRYRVDDVQFPYPASIFEVEEDSGRVITRVNLNEEPTTIFKLVVVAFDDGEPVMSSSATVKILVLHPGEIPRFTQEEYRPPPVSELATKGTMVGVISAAAINQSIVYSIVSGNEEDTFGINNITGVIYVNGPLDYETRTSYVLRVQADSLEVVLANLRVPSKSNTAKVYIEIQDENNHPPVFQKKFYIGGVSEDARMFTSVLRVKATDKDTGNYSVMAYRLIIPPIKEGKEGFVVETYTGLIKTAMLFHNMRRSYFKFQVIATDDYGKGLSGKADVLVSVVNQLDMQVIVSNVPPTLVEKKIEDLTEILDRYVQEQIPGAKVVVESIGARRHGDAFSLEDYTKCDLTVYAIDPQTNRAIDRNELFKFLDGKLLDINKDFQPYYGEGGRILEIRTPEAVTSIKKRGESLGYTEGALLALAFIIILCCIPAILVVLVSYRQFKVRQAECTKTARIQAALPAAKPAVPAPAPVAAPPPPPPPPPGAHLYEELGDSSMHKNYPWSLELILARNMDKIITVMSMGMKCLNMGVAVDCYHQLDRRNMVRWLVKLRKNMRRKRKSQRKLKNQRLKLESLVRRKK

SEQ ID NO: 33068 - protein, 329 aa, Homo sapiens
  REGION 1..329: note = ENSP00000412531
MFRQFYLWTCLASGIILGSLFEICLGQYDDDCKLARGGPPATIVAIDEESRNGTILVDNMLIKGTAGGPDPTIELSLKDNVDYWVLMDPVKQMLFLNSTGRVLDRDPPMNIHSIVVQVQCINKKVGTIIYHEVRIVVRDRNDNSPTFKHESYYATVNELTPVGTTIFTGFSGDNGATDIDDGPNGQIEYVIQYNPDDPTSNDTFEIPLMLTGNIVLRKRLNYEDKTRYFVIIQANDRAQNLNERRTTTTTLTVDVLDGDDLGPMFLPCVLVPNTRDCRPLTYQAAIPELRTPDLGSLCSGTNSWCQGRSGVHWSSPAWRCLFPRRLHQM

SEQ ID NO: 33069 - protein, 1790 aa, Homo sapiens
  REGION 1..1790: note = ENSP00000482794
MFRQFYLWTCLASGIILGSLFEICLGQYDDDWQYEDCKLARGGPPATIVAIDEESRNGTILVDNMLIKGTAGGPDPTIELSLKDNVDYWVLMDPVKQMLFLNSTGRVLDRDPPMNIHSIVVQVQCINKKVGTIIYHEVRIVVRDRNDNSPTFKHESYYATVNELTPVGTTIFTGFSGDNGATDIDDGPNGQIEYVIQYNPDDPTSNDTFEIPLMLTGNIVLRKRLNYEDKTRYFVIIQANDRAQNLNERRTTTTTLTVDVLDGDDLGPMFLPCVLVPNTRDCRPLTYQAAIPELRTPEELNPIIVTPPIQAIDQDRNIQPPSDRPGILYSILVGTPEDYPRFFHMHPRTAELSLLEPVNRDFHQKFDLVIKAEQDNGHPLPAFAGLHIEILDENNQSPYFTMPSYQGYILESAPVGATISDSLNLTSPLRIVALDKDIEDVPPSGVPTKDPELHLFLNDYTSVFTVTQTGITRYLTLLQPVDREEQQTYTFSITAFDGVQESEPVIVNIQVMDANDNTPTFPEISYDVYVYTDMRPGDSVIQLTAVDADEGSNGEITYEILVGAQGDFIINKTTGLITIAPGVEMIVGRTYALTVQAADNAPPAERRNSICTVYIEVLPPNNQSPPRFPQLMYSLEISEAMRVGAVLLNLQATDREGDSITYAIENGDPQRVFNLSETTGILTLGKALDRESTDRYILIITASDGRPDGTSTATVNIVVTDVNDNAPVFDPYLPRNLSVVEEEANAFVGQVKATDPDAGINGQVHYSLGNFNNLFRITSNGSIYTAVKLNREVRDYYELVVVATDGAVHPRHSTLTLAIKVLDIDDNSPVFTNSTYTVLVEENLPAGTTILQIEAKDVDLGANVSYRIRSPEVKHFFALHPFTGELSLLRSLDYEAFPDQEASITFLVEAFDIYGTMPPGIATVTVIVKDMNDYPPVFSKRIYKGMVAPDAVKGTPITTVYAEDADPPGLPASRVRYRVDDVQFPYPASIFEVEEDSGRVITRVNLNEEPTTIFKLVVVAFDDGEPVMSSSATVKILVLHPGEIPRFTQEEYRPPPVSELATKGTMVGVISAAAINQSIVYSIVSGNEEDTFGINNITGVIYVNGPLDYETRTSYVLRVQADSLEVVLANLRVPSKSNTAKVYIEIQDENNHPPVFQKKFYIGGVSEDARMFTSVLRVKATDKDTGNYSVMAYRLIIPPIKEGKEGFVVETYTGLIKTAMLFHNMRRSYFKFQVIATDDYGKGLSGKADVLVSVVNQLDMQVIVSNVPPTLVEKKIEDLTEILDRYVQEQIPGAKVVVESIGARRHGDAFSLEDYTKCDLTVYAIDPQTNRAIDRNELFKFLDGKLLDINKDFQPYYGEGGRILEIRTPEAVTSIKKRGESLGYTEGALLALAFIIILCCIPAILVVLVSYRQFKVRQAECTKTARIQAALPAAKPAVPAPAPVAAPPPPPPPPPGAHLYEELGDSSMHKYEMPQYGSRRRLLPPAGQEEYGEVVGEAEEEYEEEEEEPKKIKKPKVEIREPSEEEEVVVTIEKPPAAEPTYTTWKRARIFPMIFKKVRGLADKRGIVDLEGEEWQRRLEEEDKDYLKLTLDQEEATESTVESEEESSSDYTEYSEEESEFSESETTEEESESETPSEEEESSTPESEESESTESEGEKARKNIVLARRRPMVEEVKEVKGRKEEPQEEQKEPKMEEEEHSEEEESGPAPVEESTDPEAQDIPEEGSAESASVEGGVESEEESESGSSSSSSESQSGGPWGYQVPAYDRSKNANQKKSPGANSEGYNTAL

SEQ ID NO: 33070 - protein, 37 aa, Homo sapiens
  REGION 1..37: note = ENSP00000478551
  VARIANT 1: note = Any amino acid
XMKCLNMGVAVDCYHQLDRRNMVRWLVKLRKNMRRKR

SEQ ID NO: 33071 - protein, 1783 aa, Homo sapiens
  REGION 1..1783: note = ENSP00000378832
MFRQFYLWTCLASGIILGSLFEICLGQYDDDCKLARGGPPATIVAIDEESRNGTILVDNMLIKGTAGGPDPTIELSLKDNVDYWVLMDPVKQMLFLNSTGRVLDRDPPMNIHSIVVQVQCINKKVGTIIYHEVRIVVRDRNDNSPTFKHESYYATVNELTPVGTTIFTGFSGDNGATDIDDGPNGQIEYVIQYNPDDPTSNDTFEIPLMLTGNIVLRKRLNYEDKTRYFVIIQANDRAQNLNERRTTTTTLTVDVLDGDDLGPMFLPCVLVPNTRDCRPLTYQAAIPELRTPEELNPIIVTPPIQAIDQDRNIQPPSDRPGILYSILVGTPEDYPRFFHMHPRTAELSLLEPVNRDFHQKFDLVIKAEQDNGHPLPAFAGLHIEILDENNQSPYFTMPSYQGYILESAPVGATISDSLNLTSPLRIVALDKDIEDVPPSGVPTKDPELHLFLNDYTSVFTVTQTGITRYLTLLQPVDREEQQTYTFSITAFDGVQESEPVIVNIQVMDANDNTPTFPEISYDVYVYTDMRPGDSVIQLTAVDADEGSNGEITYEILVGAQGDFIINKTTGLITIAPGVEMIVGRTYALTVQAADNAPPAERRNSICTVYIEVLPPNNQSPPRFPQLMYSLEISEAMRVGAVLLNLQATDREGDSITYAIENGDPQRVFNLSETTGILTLGKALDRESTDRYILIITASDGRPDGTSTATVNIVVTDVNDNAPVFDPYLPRNLSVVEEEANAFVGQVKATDPDAGINGQVHYSLGNFNNLFRITSNGSIYTAVKLNREVRDYYELVVVATDGAVHPRHSTLTLAIKVLDIDDNSPVFTNSTYTVLVEENLPAGTTILQIEAKDVDLGANVSYRIRSPEVKHFFALHPFTGELSLLRSLDYEAFPDQEASITFLVEAFDIYGTMPPGIATVTVIVKDMNDYPPVFSKRIYKGMVAPDAVKGTPITTVYAEDADPPGLPASRVRYRVDDVQFPYPASIFEVEEDSGRVITRVNLNEEPTTIFKLVVVAFDDGEPVMSSSATVKILVLHPGEIPRFTQEEYRPPPVSELATKGTMVGVISAAAINQSIVYSIVSGNEEDTFGINNITGVIYVNGPLDYETRTSYVLRVQADSLEVVLANLRVPSKSNTAKVYIEIQDENNHPPVFQKKFYIGGVSEDARMFTSVLRVKATDKDTGNYSVMAYRLIIPPIKEGKEGFVVETYTGLIKTAMLFHNMRRSYFKFQVIATDDYGKGLSGKADVLVSVVNQLDMQVIVSNVPPTLVEKKIEDLTEILDRYVQEQIPGAKVVVESIGARRHGDAFSLEDYTKCDLTVYAIDPQTNRAIDRNELFKFLDGKLLDINKDFQPYYGEGGRILEIRTPEAVTSIKKRGESLGYTEGALLALAFIIILCCIPAILVVLVSYRQFKVRQAECTKTARIQAALPAAKPAVPAPAPVAAPPPPPPPPPGAHLYEELGDSSMYEMPQYGSRRRLLPPAGQEEYGEVVGEAEEEYEEEEEEPKKIKKPKVEIREPSEEEEVVVTIEKPPAAEPTYTTWKRARIFPMIFKKVRGLADKRGIVDLEGEEWQRRLEEEDKDYLKLTLDQEEATESTVESEEESSSDYTEYSEEESEFSESETTEEESESETPSEEEESSTPESEESESTESEGEKARKNIVLARRRPMVEEVKEVKGRKEEPQEEQKEPKMEEEEHSEEEESGPAPVEESTDPEAQDIPEEGSAESASVEGGVESEEESESGSSSSSSESQSGGPWGYQVPAYDRSKNANQKKSPGANSEGYNTAL

SEQ ID NO: 33072 - protein, 1957 aa, Homo sapiens
  REGION 1..1957: note = ENSP00000354950
MFRQFYLWTCLASGIILGSLFEICLGQYDDDCKLARGGPPATIVAIDEESRNGTILVDNMLIKGTAGGPDPTIELSLKDNVDYWVLMDPVKQMLFLNSTGRVLDRDPPMNIHSIVVQVQCINKKVGTIIYHEVRIVVRDRNDNSPTFKHESYYATVNELTPVGTTIFTGFSGDNGATDIDDGPNGQIEYVIQYNPDDPTSNDTFEIPLMLTGNIVLRKRLNYEDKTRYFVIIQANDRAQNLNERRTTTTTLTVDVLDGDDLGPMFLPCVLVPNTRDCRPLTYQAAIPELRTPEELNPIIVTPPIQAIDQDRNIQPPSDRPGILYSILVGTPEDYPRFFHMHPRTAELSLLEPVNRDFHQKFDLVIKAEQDNGHPLPAFAGLHIEILDENNQSPYFTMPSYQGYILESAPVGATISDSLNLTSPLRIVALDKDIEDTKDPELHLFLNDYTSVFTVTQTGITRYLTLLQPVDREEQQTYTFSITAFDGVQESEPVIVNIQVMDANDNTPTFPEISYDVYVYTDMRPGDSVIQLTAVDADEGSNGEITYEILVGAQGDFIINKTTGLITIAPGVEMIVGRTYALTVQAADNAPPAERRNSICTVYIEVLPPNNQSPPRFPQLMYSLEISEAMRVGAVLLNLQATDREGDSITYAIENGDPQRVFNLSETTGILTLGKALDRESTDRYILIITASDGRPDGTSTATVNIVVTDVNDNAPVFDPYLPRNLSVVEEEANAFVGQVKATDPDAGINGQVHYSLGNFNNLFRITSNGSIYTAVKLNREVRDYYELVVVATDGAVHPRHSTLTLAIKVLDIDDNSPVFTNSTYTVLVEENLPAGTTILQIEAKDVDLGANVSYRIRSPEVKHFFALHPFTGELSLLRSLDYEAFPDQEASITFLVEAFDIYGTMPPGIATVTVIVKDMNDYPPVFSKRIYKGMVAPDAVKGTPITTVYAEDADPPGLPASRVRYRVDDVQFPYPASIFEVEEDSGRVITRVNLNEEPTTIFKLVVVAFDDGEPVMSSSATVKILVLHPGEIPRFTQEEYRPPPVSELATKGTMVGVISAAAINQSIVYSIVSGNEEDTFGINNITGVIYVNGPLDYETRTSYVLRVQADSLEVVLANLRVPSKSNTAKVYIEIQDENNHPPVFQKKFYIGGVSEDARMFTSVLRVKATDKDTGNYSVMAYRLIIPPIKEGKEGFVVETYTGLIKTAMLFHNMRRSYFKFQVIATDDYGKGLSGKADVLVSVVNQLDMQVIVSNVPPTLVEKKIEDLTEILDRYVQEQIPGAKVVVESIGARRHGDAFSLEDYTKCDLTVYAIDPQTNRAIDRNELFKFLDGKLLDINKDFQPYYGEGGRILEIRTPEAVTSIKKRGESLGYTEGALLALAFIIILCCIPAILVVLVSYRQFKVRQAECTKTARIQAALPAAKPAVPAPAPVAAPPPPPPPPPGAHLYEELGDSSMHNLFLLYHFQQSRGNNSVSEDRKHQQVVMPFSSNTIEAHKSAHVDGSLKSNKLKSARKFTFLSDEDDLSAHNPLYKENISQVSTNSDISQRTDFVDPFSPKIQAKSKSLRGPREKIQRLWSQSVSLPRRLMRKVPNRPEIIDLQQWQGTRQKAENENTGICTNKRGSSNPLLTTEEANLTEKEEIRQGETLMIEGTEQLKSLSSDSSFCFPRPHFSFSTLPTVSRTVELKSEPNVISSPAECSLELSPSRPCVLHSSLSRRETPICMLPIETERNIFENFAHPPNISPSACPLPPPPPISPPSPPPAPAPLAPPPDISPFSLFCPPPSPPSIPLPLPPPTFFPLSVSTSGPPTPPLLPPFPTPLPPPPPSIPCPPPPSASFLSTECVCITGVKCTTNLMPAEKIKSSMTQLSTTTVCKTDPQREPKGILRHVKNLAELEKSVANMYSQIEKNYLRTNVSELQTMCPSEVTNMEITSEQNKGSLNNIVEGTEKQSHSQSTSL

SEQ ID NO: 33073 - protein, 1952 aa, Homo sapiens
  REGION 1..1952: note = ENSP00000378818
MFRQFYLWTCLASGIILGSLFEICLGQYDDDCKLARGGPPATIVAIDEESRNGTILVDNMLIKGTAGGPDPTIELSLKDNVDYWVLMDPVKQMLFLNSTGRVLDRDPPMNIHSIVVQVQCINKKVGTIIYHEVRIVVRDRNDNSPTFKHESYYATVNELTPVGTTIFTGFSGDNGATDIDDGPNGQIEYVIQYNPDDPTSNDTFEIPLMLTGNIVLRKRLNYEDKTRYFVIIQANDRAQNLNERRTTTTTLTVDVLDGDDLGPMFLPCVLVPNTRDCRPLTYQAAIPELRTPEELNPIIVTPPIQAIDQDRNIQPPSDRPGILYSILVGTPEDYPRFFHMHPRTAELSLLEPVNRDFHQKFDLVIKAEQDNGHPLPAFAGLHIEILDENNQSPYFTMPSYQGYILESAPVGATISDSLNLTSPLRIVALDKDIEDTKDPELHLFLNDYTSVFTVTQTGITRYLTLLQPVDREEQQTYTFSITAFDGVQESEPVIVNIQVMDANDNTPTFPEISYDVYVYTDMRPGDSVIQLTAVDADEGSNGEITYEILVGAQGDFIINKTTGLITIAPGVEMIVGRTYALTVQAADNAPPAERRNSICTVYIEVLPPNNQSPPRFPQLMYSLEISEAMRVGAVLLNLQATDREGDSITYAIENGDPQRVFNLSETTGILTLGKALDRESTDRYILIITASDGRPDGTSTATVNIVVTDVNDNAPVFDPYLPRNLSVVEEEANAFVGQVKATDPDAGINGQVHYSLGNFNNLFRITSNGSIYTAVKLNREVRDYYELVVVATDGAVHPRHSTLTLAIKVLDIDDNSPVFTNSTYTVLVEENLPAGTTILQIEAKDVDLGANVSYRIRSPEVKHFFALHPFTGELSLLRSLDYEAFPDQEASITFLVEAFDIYGTMPPGIATVTVIVKDMNDYPPVFSKRIYKGMVAPDAVKGTPITTVYAEDADPPGLPASRVRYRVDDVQFPYPASIFEVEEDSGRVITRVNLNEEPTTIFKLVVVAFDDGEPVMSSSATVKILVLHPGEIPRFTQEEYRPPPVSELATKGTMVGVISAAAINQSIVYSIVSGNEEDTFGINNITGVIYVNGPLDYETRTSYVLRVQADSLEVVLANLRVPSKSNTAKVYIEIQDENNHPPVFQKKFYIGGVSEDARMFTSVLRVKATDKDTGNYSVMAYRLIIPPIKEGKEGFVVETYTGLIKTAMLFHNMRRSYFKFQVIATDDYGKGLSGKADVLVSVVNQLDMQVIVSNVPPTLVEKKIEDLTEILDRYVQEQIPGAKVVVESIGARRHGDAFSLEDYTKCDLTVYAIDPQTNRAIDRNELFKFLDGKLLDINKDFQPYYGEGGRILEIRTPEAVTSIKKRGESLGYTEGALLALAFIIILCCIPAILVVLVSYRQRQAECTKTARIQAALPAAKPAVPAPAPVAAPPPPPPPPPGAHLYEELGDSSILFLLYHFQQSRGNNSVSEDRKHQQVVMPFSSNTIEAHKSAHVDGSLKSNKLKSARKFTFLSDEDDLSAHNPLYKENISQVSTNSDISQRTDFVDPFSPKIQAKSKSLRGPREKIQRLWSQSVSLPRRLMRKVPNRPEIIDLQQWQGTRQKAENENTGICTNKRGSSNPLLTTEEANLTEKEEIRQGETLMIEGTEQLKSLSSDSSFCFPRPHFSFSTLPTVSRTVELKSEPNVISSPAECSLELSPSRPCVLHSSLSRRETPICMLPIETERNIFENFAHPPNISPSACPLPPPPPISPPSPPPAPAPLAPPPDISPFSLFCPPPSPPSIPLPLPPPTFFPLSVSTSGPPTPPLLPPFPTPLPPPPPSIPCPPPPSASFLSTECVCITGVKCTTNLMPAEKIKSSMTQLSTTTVCKTDPQREPKGILRHVKNLAELEKSVANMYSQIEKNYLRTNVSELQTMCPSEVTNMEITSEQNKGSLNNIVEGTEKQSHSQSTSL

SEQ ID NO: 33074 - protein, 1932 aa, Homo sapiens
  REGION 1..1932: note = ENSP00000378821
MFRQFYLWTCLASGIILGSLFEICLGQYDDGTILVDNMLIKGTAGGPDPTIELSLKDNVDYWVLMDPVKQMLFLNSTGRVLDRDPPMNIHSIVVQVQCINKKVGTIIYHEVRIVVRDRNDNSPTFKHESYYATVNELTPVGTTIFTGFSGDNGATDIDDGPNGQIEYVIQYNPDDPTSNDTFEIPLMLTGNIVLRKRLNYEDKTRYFVIIQANDRAQNLNERRTTTTTLTVDVLDGDDLGPMFLPCVLVPNTRDCRPLTYQAAIPELRTPEELNPIIVTPPIQAIDQDRNIQPPSDRPGILYSILVGTPEDYPRFFHMHPRTAELSLLEPVNRDFHQKFDLVIKAEQDNGHPLPAFAGLHIEILDENNQSPYFTMPSYQGYILESAPVGATISDSLNLTSPLRIVALDKDIEDTKDPELHLFLNDYTSVFTVTQTGITRYLTLLQPVDREEQQTYTFSITAFDGVQESEPVIVNIQVMDANDNTPTFPEISYDVYVYTDMRPGDSVIQLTAVDADEGSNGEITYEILVGAQGDFIINKTTGLITIAPGVEMIVGRTYALTVQAADNAPPAERRNSICTVYIEVLPPNNQSPPRFPQLMYSLEISEAMRVGAVLLNLQATDREGDSITYAIENGDPQRVFNLSETTGILTLGKALDRESTDRYILIITASDGRPDGTSTATVNIVVTDVNDNAPVFDPYLPRNLSVVEEEANAFVGQVKATDPDAGINGQVHYSLGNFNNLFRITSNGSIYTAVKLNREVRDYYELVVVATDGAVHPRHSTLTLAIKVLDIDDNSPVFTNSTYTVLVEENLPAGTTILQIEAKDVDLGANVSYRIRSPEVKHFFALHPFTGELSLLRSLDYEAFPDQEASITFLVEAFDIYGTMPPGIATVTVIVKDMNDYPPVFSKRIYKGMVAPDAVKGTPITTVYAEDADPPGLPASRVRYRVDDVQFPYPASIFEVEEDSGRVITRVNLNEEPTTIFKLVVVAFDDGEPVMSSSATVKILVLHPGEIPRFTQEEYRPPPVSELATKGTMVGVISAAAINQSIVYSIVSGNEEDTFGINNITGVIYVNGPLDYETRTSYVLRVQADSLEVVLANLRVPSKSNTAKVYIEIQDENNHPPVFQKKFYIGGVSEDARMFTSVLRVKATDKDTGNYSVMAYRLIIPPIKEGKEGFVVETYTGLIKTAMLFHNMRRSYFKFQVIATDDYGKGLSGKADVLVSVVNQLDMQVIVSNVPPTLVEKKIEDLTEILDRYVQEQIPGAKVVVESIGARRHGDAFSLEDYTKCDLTVYAIDPQTNRAIDRNELFKFLDGKLLDINKDFQPYYGEGGRILEIRTPEAVTSIKKRGESLGYTEGALLALAFIIILCCIPAILVVLVSYRQRQAECTKTARIQAALPAAKPAVPAPAPVAAPPPPPPPPPGAHLYEELGDSSMHNLFLLYHFQQSRGNNSVSEDRKHQQVVMPFSSNTIEAHKSAHVDGSLKSNKLKSARKFTFLSDEDDLSAHNPLYKENISQVSTNSDISQRTDFVDPFSPKIQAKSKSLRGPREKIQRLWSQSVSLPRRLMRKVPNRPEIIDLQQWQGTRQKAENENTGICTNKRGSSNPLLTTEEANLTEKEEIRQGETLMIEGTEQLKSLSSDSSFCFPRPHFSFSTLPTVSRTVELKSEPNVISSPAECSLELSPSRPCVLHSSLSRRETPICMLPIETERNIFENFAHPPNISPSACPLPPPPPISPPSPPPAPAPLAPPPDISPFSLFCPPPSPPSIPLPLPPPTFFPLSVSTSGPPTPPLLPPFPTPLPPPPPSIPCPPPPSASFLSTECVCITGVKCTTNLMPAEKIKSSMTQLSTTTVCKTDPQREPKGILRHVKNLAELEKSVANMYSQIEKNYLRTNVSELQTMCPSEVTNMEITSEQNKGSLNNIVEGTEKQSHSQSTSL

SEQ ID NO: 33075 - protein, 654 aa, Homo sapiens
  REGION 1..654: note = ENSP00000363067
MFRQFYLWTCLASGIILGSLFEICLGQYDDDCKLARGGPPATIVAIDEESRNGTILVDNMLIKGTAGGPDPTIELSLKDNVDYWVLMDPVKQMLFLNSTGRVLDRDPPMNIHSIVVQVQCINKKVGTIIYHEVRIVVRDRNDNSPTFKHESYYATVNELTPVGTTIFTGFSGDNGATDIDDGPNGQIEYVIQYNPDDPTSNDTFEIPLMLTGNIVLRKRLNYEDKTRYFVIIQANDRAQNLNERRTTTTTLTVDVLDGDDLGPMFLPCVLVPNTRDCRPLTYQAAIPELRTPEELNPIIVTPPIQAIDQDRNIQPPSDRPGILYSILVGTPEDYPRFFHMHPRTAELSLLEPVNRDFHQKFDLVIKAEQDNGHPLPAFAGLHIEILDENNQSPYFTMPSYQGYILESAPVGATISDSLNLTSPLRIVALDKDIEDTKDPELHLFLNDYTSVFTVTQTGITRYLTLLQPVDREEQQTYTFSITAFDGVQESEPVIVNIQVMDANDNTPTFPEISYDVYVYTDMRPGDSVIQLTAVDADEGSNGEITYEILVGAQGDFIINKTTGLITIAPGVEMIVGRTYALTVQAADNAPPAERRNSICTVYIEVLPPNNQSPPRFPQLMYSLEISEAMRVGAVLLNLQHGDSNLRESTGQGKH

SEQ ID NO: 33076 - protein, 1962 aa, Homo sapiens
  REGION 1..1962: note = ENSP00000363068
MFRQFYLWTCLASGIILGSLFEICLGQYDDDWQYEDCKLARGGPPATIVAIDEESRNGTILVDNMLIKGTAGGPDPTIELSLKDNVDYWVLMDPVKQMLFLNSTGRVLDRDPPMNIHSIVVQVQCINKKVGTIIYHEVRIVVRDRNDNSPTFKHESYYATVNELTPVGTTIFTGFSGDNGATDIDDGPNGQIEYVIQYNPDDPTSNDTFEIPLMLTGNIVLRKRLNYEDKTRYFVIIQANDRAQNLNERRTTTTTLTVDVLDGDDLGPMFLPCVLVPNTRDCRPLTYQAAIPELRTPEELNPIIVTPPIQAIDQDRNIQPPSDRPGILYSILVGTPEDYPRFFHMHPRTAELSLLEPVNRDFHQKFDLVIKAEQDNGHPLPAFAGLHIEILDENNQSPYFTMPSYQGYILESAPVGATISDSLNLTSPLRIVALDKDIEDTKDPELHLFLNDYTSVFTVTQTGITRYLTLLQPVDREEQQTYTFSITAFDGVQESEPVIVNIQVMDANDNTPTFPEISYDVYVYTDMRPGDSVIQLTAVDADEGSNGEITYEILVGAQGDFIINKTTGLITIAPGVEMIVGRTYALTVQAADNAPPAERRNSICTVYIEVLPPNNQSPPRFPQLMYSLEISEAMRVGAVLLNLQATDREGDSITYAIENGDPQRVFNLSETTGILTLGKALDRESTDRYILIITASDGRPDGTSTATVNIVVTDVNDNAPVFDPYLPRNLSVVEEEANAFVGQVKATDPDAGINGQVHYSLGNFNNLFRITSNGSIYTAVKLNREVRDYYELVVVATDGAVHPRHSTLTLAIKVLDIDDNSPVFTNSTYTVLVEENLPAGTTILQIEAKDVDLGANVSYRIRSPEVKHFFALHPFTGELSLLRSLDYEAFPDQEASITFLVEAFDIYGTMPPGIATVTVIVKDMNDYPPVFSKRIYKGMVAPDAVKGTPITTVYAEDADPPGLPASRVRYRVDDVQFPYPASIFEVEEDSGRVITRVNLNEEPTTIFKLVVVAFDDGEPVMSSSATVKILVLHPGEIPRFTQEEYRPPPVSELATKGTMVGVISAAAINQSIVYSIVSGNEEDTFGINNITGVIYVNGPLDYETRTSYVLRVQADSLEVVLANLRVPSKSNTAKVYIEIQDENNHPPVFQKKFYIGGVSEDARMFTSVLRVKATDKDTGNYSVMAYRLIIPPIKEGKEGFVVETYTGLIKTAMLFHNMRRSYFKFQVIATDDYGKGLSGKADVLVSVVNQLDMQVIVSNVPPTLVEKKIEDLTEILDRYVQEQIPGAKVVVESIGARRHGDAFSLEDYTKCDLTVYAIDPQTNRAIDRNELFKFLDGKLLDINKDFQPYYGEGGRILEIRTPEAVTSIKKRGESLGYTEGALLALAFIIILCCIPAILVVLVSYRQFKVRQAECTKTARIQAALPAAKPAVPAPAPVAAPPPPPPPPPGAHLYEELGDSSMHNLFLLYHFQQSRGNNSVSEDRKHQQVVMPFSSNTIEAHKSAHVDGSLKSNKLKSARKFTFLSDEDDLSAHNPLYKENISQVSTNSDISQRTDFVDPFSPKIQAKSKSLRGPREKIQRLWSQSVSLPRRLMRKVPNRPEIIDLQQWQGTRQKAENENTGICTNKRGSSNPLLTTEEANLTEKEEIRQGETLMIEGTEQLKSLSSDSSFCFPRPHFSFSTLPTVSRTVELKSEPNVISSPAECSLELSPSRPCVLHSSLSRRETPICMLPIETERNIFENFAHPPNISPSACPLPPPPPISPPSPPPAPAPLAPPPDISPFSLFCPPPSPPSIPLPLPPPTFFPLSVSTSGPPTPPLLPPFPTPLPPPPPSIPCPPPPSASFLSTECVCITGVKCTTNLMPAEKIKSSMTQLSTTTVCKTDPQREPKGILRHVKNLAELEKSVANMYSQIEKNYLRTNVSELQTMCPSEVTNMEITSEQNKGSLNNIVEGTEKQSHSQSTSL

SEQ ID NO: 33077 - protein, 654 aa, Homo sapiens; identical to SEQ ID NO: 33075
  REGION 1..654: note = ENSP00000412320

SEQ ID NO: 33078 - protein, 1886 aa, Homo sapiens
  REGION 1..1886: note = ENSP00000412628
MFRQFYLWTCLASGIILGSLFEICLGQYDDDCKLARGGPPATIVAIDEESRNGTILVDNMLIKGTAGGPDPTIELSLKDNVDYWVLMDPVKQMLFLNSTGRVLDRDPPMNIHSIVVQVQCINKKVGTIIYHEVRIVVRDRNDNSPTFKHESYYATVNELTPVGTTIFTGFSGDNGATDIDDGPNGQIEYVIQYNPDDPTSNDTFEIPLMLTGNIVLRKRLNYEDKTRYFVIIQANDRAQNLNERRTTTTTLTVDVLDGDDLGPMFLPCVLVPNTRDCRPLTYQAAIPELRTPEELNPIIVTPPIQAIDQDRNIQPPSDRPGILYSILVGTPEDYPRFFHMHPRTAELSLLEPVNRDFHQKFDLVIKAEQDNGHPLPAFAGLHIEILDENNQSPYFTMPSYQGYILESAPVGATISDSLNLTSPLRIVALDKDIEDTKDPELHLFLNDYTSVFTVTQTGITRYLTLLQPVDREEQQTYTFSITAFDGVQESEPVIVNIQVMDANDNTPTFPEISYDVYVYTDMRPGDSVIQLTAVDADEGSNGEITYEILVGAQGDFIINKTTGLITIAPGVEMIVGRTYALTVQAADNAPPAERSTGILTLGKALDRESTDRYILIITASDGRPDGTSTATVNIVVTDVNDNAPVFDPYLPRNLSVVEEEANAFVGQVKATDPDAGINGQVHYSLGNFNNLFRITSNGSIYTAVKLNREVRDYYELVVVATDGAVHPRHSTLTLAIKVLDIDDNSPVFTNSTYTVLVEENLPAGTTILQIEAKDVDLGANVSYRIRSPEVKHFFALHPFTGELSLLRSLDYEAFPDQEASITFLVEAFDIYGTMPPGIATVTVIVKDMNDYPPVFSKRIYKGMVAPDAVKGTPITTVYAEDADPPGLPASRVRYRVDDVQFPYPASIFEVEEDSGRVITRVNLNEEPTTIFKLVVVAFDDGEPVMSSSATVKILVLHPGEIPRFTQEEYRPPPVSELATKGTMVGVISAAAINQSIVYSIVSGNEEDTFGINNITGVIYVNGPLDYETRTSYVLRVQADSLEVVLANLRVPSKSNTAKVYIEIQDENNHPPVFQKKFYIGGVSEDARMFTSVLRVKATDKDTGNYSVMAYRLIIPPIKEGKEGFVVETYTGLIKTAMLFHNMRRSYFKFQVIATDDYGKGLSGKADVLVSVVNQLDMQVIVSNVPPTLVEKKIEDLTEILDRYVQEQIPGAKVVVESIGARRHGDAFSLEDYTKCDLTVYAIDPQTNRAIDRNELFKFLDGKLLDINKDFQPYYGEGGRILEIRTPEAVTSIKKRGESLGYTEGALLALAFIIILCCIPAILVVLVSYRQFKVRQAECTKTARIQAALPAAKPAVPAPAPVAAPPPPPPPPPGAHLYEELGDSSMHNLFLLYHFQQSRGNNSVSEDRKHQQVVMPFSSNTIEAHKSAHVDGSLKSNKLKSARKFTFLSDEDDLSAHNPLYKENISQVSTNSDISQRTDFVDPFSPKIQAKSKSLRGPREKIQRLWSQSVSLPRRLMRKVPNRPEIIDLQQWQGTRQKAENENTGICTNKRGSSNPLLTTEEANLTEKEEIRQGETLMIEGTEQLKSLSSDSSFCFPRPHFSFSTLPTVSRTVELKSEPNVISSPAECSLELSPSRPCVLHSSLSRRETPICMLPIETERNIFENFAHPPNISPSACPLPPPPPISPPSPPPAPAPLAPPPDISPFSLFCPPPSPPSIPLPLPPPTFFPLSVSTSGPPTPPLLPPFPTPLPPPPPSIPCPPPPSASFLSTECVCITGVKCTTNLMPAEKIKSSMTQLSTTTVCKTDPQREPKGILRHVKNLAELEKSVANMYSQIEKNYLRTNVSELQTMCPSEVTNMEITSEQNKGSLNNIVEGTEKQSHSQSTSL

SEQ ID NO: 33079 - protein, 1955 aa, Homo sapiens
  REGION 1..1955: note = ENSP00000322604
MFRQFYLWTCLASGIILGSLFEICLGQYDDDCKLARGGPPATIVAIDEESRNGTILVDNMLIKGTAGGPDPTIELSLKDNVDYWVLMDPVKQMLFLNSTGRVLDRDPPMNIHSIVVQVQCINKKVGTIIYHEVRIVVRDRNDNSPTFKHESYYATVNELTPVGTTIFTGFSGDNGATDIDDGPNGQIEYVIQYNPDDPTSNDTFEIPLMLTGNIVLRKRLNYEDKTRYFVIIQANDRAQNLNERRTTTTTLTVDVLDGDDLGPMFLPCVLVPNTRDCRPLTYQAAIPELRTPEELNPIIVTPPIQAIDQDRNIQPPSDRPGILYSILVGTPEDYPRFFHMHPRTAELSLLEPVNRDFHQKFDLVIKAEQDNGHPLPAFAGLHIEILDENNQSPYFTMPSYQGYILESAPVGATISDSLNLTSPLRIVALDKDIEDTKDPELHLFLNDYTSVFTVTQTGITRYLTLLQPVDREEQQTYTFSITAFDGVQESEPVIVNIQVMDANDNTPTFPEISYDVYVYTDMRPGDSVIQLTAVDADEGSNGEITYEILVGAQGDFIINKTTGLITIAPGVEMIVGRTYALTVQAADNAPPAERRNSICTVYIEVLPPNNQSPPRFPQLMYSLEISEAMRVGAVLLNLQATDREGDSITYAIENGDPQRVFNLSETTGILTLGKALDRESTDRYILIITASDGRPDGTSTATVNIVVTDVNDNAPVFDPYLPRNLSVVEEEANAFVGQVKATDPDAGINGQVHYSLGNFNNLFRITSNGSIYTAVKLNREVRDYYELVVVATDGAVHPRHSTLTLAIKVLDIDDNSPVFTNSTYTVLVEENLPAGTTILQIEAKDVDLGANVSYRIRSPEVKHFFALHPFTGELSLLRSLDYEAFPDQEASITFLVEAFDIYGTMPPGIATVTVIVKDMNDYPPVFSKRIYKGMVAPDAVKGTPITTVYAEDADPPGLPASRVRYRVDDVQFPYPASIFEVEEDSGRVITRVNLNEEPTTIFKLVVVAFDDGEPVMSSSATVKILVLHPGEIPRFTQEEYRPPPVSELATKGTMVGVISAAAINQSIVYSIVSGNEEDTFGINNITGVIYVNGPLDYETRTSYVLRVQADSLEVVLANLRVPSKSNTAKVYIEIQDENNHPPVFQKKFYIGGVSEDARMFTSVLRVKATDKDTGNYSVMAYRLIIPPIKEGKEGFVVETYTGLIKTAMLFHNMRRSYFKFQVIATDDYGKGLSGKADVLVSVVNQLDMQVIVSNVPPTLVEKKIEDLTEILDRYVQEQIPGAKVVVESIGARRHGDAFSLEDYTKCDLTVYAIDPQTNRAIDRNELFKFLDGKLLDINKDFQPYYGEGGRILEIRTPEAVTSIKKRGESLGYTEGALLALAFIIILCCIPAILVVLVSYRQFKVRQAECTKTARIQAALPAAKPAVPAPAPVAAPPPPPPPPPGAHLYEELGDSSILFLLYHFQQSRGNNSVSEDRKHQQVVMPFSSNTIEAHKSAHVDGSLKSNKLKSARKFTFLSDEDDLSAHNPLYKENISQVSTNSDISQRTDFVDPFSPKIQAKSKSLRGPREKIQRLWSQSVSLPRRLMRKVPNRPEIIDLQQWQGTRQKAENENTGICTNKRGSSNPLLTTEEANLTEKEEIRQGETLMIEGTEQLKSLSSDSSFCFPRPHFSFSTLPTVSRTVELKSEPNVISSPAECSLELSPSRPCVLHSSLSRRETPICMLPIETERNIFENFAHPPNISPSACPLPPPPPISPPSPPPAPAPLAPPPDISPFSLFCPPPSPPSIPLPLPPPTFFPLSVSTSGPPTPPLLPPFPTPLPPPPPSIPCPPPPSASFLSTECVCITGVKCTTNLMPAEKIKSSMTQLSTTTVCKTDPQREPKGILRHVKNLAELEKSVANMYSQIEKNYLRTNVSELQTMCPSEVTNMEITSEQNKGSLNNIVEGTEKQSHSQSTSL

SEQ ID NO: 33080 - protein, 961 aa, Homo sapiens
  REGION 1..961: note = ENSP00000363066
MFRQFYLWTCLASGIILGSLFEICLGQYDDDCKLARGGPPATIVAIDEESRNGTILVDNMLIKGTAGGPDPTIELSLKDNVDYWVLMDPVKQMLFLNSTGRVLDRDPPMNIHSIVVQVQCINKKVGTIIYHEVRIVVRDRNDNSPTFKHESYYATVNELTPVGTTIFTGFSGDNGATDIDDGPNGQIEYVIQYNPDDPTSNDTFEIPLMLTGNIVLRKRLNYEDKTRYFVIIQANDRAQNLNERRTTTTTLTVDVLDGDDLGPMFLPCVLVPNTRDCRPLTYQAAIPELRTPEELNPIIVTPPIQAIDQDRNIQPPSDRPGILYSILVGTPEDYPRFFHMHPRTAELSLLEPVNRDFHQKFDLVIKAEQDNGHPLPAFAGLHIEILDENNQSPYFTMPSYQGYILESAPVGATISDSLNLTSPLRIVALDKDIEDTKDPELHLFLNDYTSVFTVTQTGITRYLTLLQPVDREEQQTYTFSITAFDGVQESEPVIVNIQVMDANDNTPTFPEISYDVYVYTDMRPGDSVIQLTAVDADEGSNGEITYEILVGAQGDFIINKTTGLITIAPGVEMIVGRTYALTVQAADNAPPAERRNSICTVYIEVLPPNNQSPPRFPQLMYSLEISEAMRVGAVLLNLQATDREGDSITYAIENGDPQRVFNLSETTGILTLGKALDRESTDRYILIITASDGRPDGTSTATVNIVVTDVNDNAPVFDPYLPRNLSVVEEEANAFVGQVKATDPDAGINGQVHYSLGNFNNLFRITSNGSIYTAVKLNREVRDYYELVVVATDGAVHPRHSTLTLAIKVLDIDDNSPVFTNSTYTVLVEENLPAGTTILQIEAKDVDLGANVSYRIRSPEVKHFFALHPFTGELSLLRSLDYEAFPDQEASITFLVEAFDIYGTMPPGIATVTVIVKDMNDYPPVFSKRIYKGMVAPDAVKGTPITTVYAEDADPPVSRRH

SEQ ID NO: 33081 - protein, 72 aa, Homo sapiens
  REGION 1..72: note = ENSP00000481211
MFRQFYLWTCLASGIILGSLFEICLGQYDDGTILVDNMLIKGTAGGPDPTIELSLKDNVDYWVLMDPVKQML

SEQ ID NO: 33082 - protein, 92 aa, Homo sapiens
  REGION 1..92: note = ENSP00000394465
MFRQFYLWTCLASGIILGSLFEICLGQYDDDCKLARGGPPATIVAIDEESRNGTILVDNMLIKGTAGGPDPTIELSLKDNVDYWVLMDPVKQ

SEQ ID NO: 33083 - protein, 1915 aa, Homo sapiens
  REGION 1..1915: note = ENSP00000378820
MFRQFYLWTCLASGIILGSLFEICLGQYDDDCKLARGGPPATIVAIDEESRNGTILVDNMLIKGTAGGPDPTIELSLKDNVDYWVLMDPVKQMLFLNSTGRVLDRDPPMNIHSIVVQVQCINKKVGTIIYHEVRIVVRDRNDNSPTFKHESYYATVNELTPVGTTIFTGFSGDNGATDIDDGPNGQIEYVIQYNPDDPDRAQNLNERRTTTTTLTVDVLDGDDLGPMFLPCVLVPNTRDCRPLTYQAAIPELRTPEELNPIIVTPPIQAIDQDRNIQPPSDRPGILYSILVGTPEDYPRFFHMHPRTAELSLLEPVNRDFHQKFDLVIKAEQDNGHPLPAFAGLHIEILDENNQSPYFTMPSYQGYILESAPVGATISDSLNLTSPLRIVALDKDIEDTKDPELHLFLNDYTSVFTVTQTGITRYLTLLQPVDREEQQTYTFSITAFDGVQESEPVIVNIQVMDANDNTPTFPEISYDVYVYTDMRPGDSVIQLTAVDADEGSNGEITYEILVGAQGDFIINKTTGLITIAPGVEMIVGRTYALTVQAADNAPPAERRNSICTVYIEVLPPNNQSPPRFPQLMYSLEISEAMRVGAVLLNLQATDREGDSITYAIENGDPQRVFNLSETTGILTLGKALDRESTDRYILIITASDGRPDGTSTATVNIVVTDVNDNAPVFDPYLPRNLSVVEEEANAFVGQVKATDPDAGINGQVHYSLGNFNNLFRITSNGSIYTAVKLNREVRDYYELVVVATDGAVHPRHSTLTLAIKVLDIDDNSPVFTNSTYTVLVEENLPAGTTILQIEAKDVDLGANVSYRIRSPEVKHFFALHPFTGELSLLRSLDYEAFPDQEASITFLVEAFDIYGTMPPGIATVTVIVKDMNDYPPVFSKRIYKGMVAPDAVKGTPITTVYAEDADPPGLPASRVRYRVDDVQFPYPASIFEVEEDSGRVITRVNLNEEPTTIFKLVVVAFDDGEPVMSSSATVKILVLHPGEIPRFTQEEYRPPPVSELATKGTMVGVISAAAINQSIVYSIVSGNEEDTFGINNITGVIYVNGPLDYETRTSYVLRVQADSLEVVLANLRVPSKSNTAKVYIEIQDENNHPPVFQKKFYIGGVSEDARMFTSVLRVKATDKDTGNYSVMAYRLIIPPIKEGKEGFVVETYTGLIKTAMLFHNMRRSYFKFQVIATDDYGKGLSGKADVLVSVVNQLDMQVIVSNVPPTLVEKKIEDLTEILDRYVQEQIPGAKVVVESIGARRHGDAFSLEDYTKCDLTVYAIDPQTNRAIDRNELFKFLDGKLLDINKDFQPYYGEGGRILEIRTPEAVTSIKKRGESLGYTEGALLALAFIIILCCIPAILVVLVSYRQRQAECTKTARIQAALPAAKPAVPAPAPVAAPPPPPPPPPGAHLYEELGDSSILFLLYHFQQSRGNNSVSEDRKHQQVVMPFSSNTIEAHKSAHVDGSLKSNKLKSARKFTFLSDEDDLSAHNPLYKENISQVSTNSDISQRTDFVDPFSPKIQAKSKSLRGPREKIQRLWSQSVSLPRRLMRKVPNRPEIIDLQQWQGTRQKAENENTGICTNKRGSSNPLLTTEEANLTEKEEIRQGETLMIEGTEQLKSLSSDSSFCFPRPHFSFSTLPTVSRTVELKSEPNVISSPAECSLELSPSRPCVLHSSLSRRETPICMLPIETERNIFENFAHPPNISPSACPLPPPPPISPPSPPPAPAPLAPPPDISPFSLFCPPPSPPSIPLPLPPPTFFPLSVSTSGPPTPPLLPPFPTPLPPPPPSIPCPPPPSASFLSTECVCITGVKCTTNLMPAEKIKSSMTQLSTTTVCKTDPQREPKGILRHVKNLAELEKSVANMYSQIEKNYLRTNVSELQTMCPSEVTNMEITSEQNKGSLNNIVEGTEKQSHSQSTSL

SEQ ID NO: 33084 - protein, 1964 aa, Homo sapiens
  REGION 1..1964: note = ENSP00000484703
MFRQFYLWTCLASGIILGSLFEICLGQYDDDWQYEDCKLARGGPPATIVAIDEESRNGTILVDNMLIKGTAGGPDPTIELSLKDNVDYWVLMDPVKQMLFLNSTGRVLDRDPPMNIHSIVVQVQCINKKVGTIIYHEVRIVVRDRNDNSPTFKHESYYATVNELTPVGTTIFTGFSGDNGATDIDDGPNGQIEYVIQYNPDDPTSNDTFEIPLMLTGNIVLRKRLNYEDKTRYFVIIQANDRAQNLNERRTTTTTLTVDVLDGDDLGPMFLPCVLVPNTRDCRPLTYQAAIPELRTPEELNPIIVTPPIQAIDQDRNIQPPSDRPGILYSILVGTPEDYPRFFHMHPRTAELSLLEPVNRDFHQKFDLVIKAEQDNGHPLPAFAGLHIEILDENNQSPYFTMPSYQGYILESAPVGATISDSLNLTSPLRIVALDKDIEDTKDPELHLFLNDYTSVFTVTQTGITRYLTLLQPVDREEQQTYTFSITAFDGVQESEPVIVNIQVMDANDNTPTFPEISYDVYVYTDMRPGDSVIQLTAVDADEGSNGEITYEILVGAQGDFIINKTTGLITIAPGVEMIVGRTYALTVQAADNAPPAERRNSICTVYIEVLPPNNQSPPRFPQLMYSLEISEAMRVGAVLLNLQATDREGDSITYAIENGDPQRVFNLSETTGILTLGKALDRESTDRYILIITASDGRPDGTSTATVNIVVTDVNDNAPVFDPYLPRNLSVVEEEANAFVGQVKATDPDAGINGQVHYSLGNFNNLFRITSNGSIYTAVKLNREVRDYYELVVVATDGAVHPRHSTLTLAIKVLDIDDNSPVFTNSTYTVLVEENLPAGTTILQIEAKDVDLGANVSYRIRSPEVKHFFALHPFTGELSLLRSLDYEAFPDQEASITFLVEAFDIYGTMPPGIATVTVIVKDMNDYPPVFSKRIYKGMVAPDAVKGTPITTVYAEDADPPGLPASRVRYRVDDVQFPYPASIFEVEEDSGRVITRVNLNEEPTTIFKLVVVAFDDGEPVMSSSATVKILVLHPGEIPRFTQEEYRPPPVSELATKGTMVGVISAAAINQSIVYSIVSGNEEDTFGINNITGVIYVNGPLDYETRTSYVLRVQADSLEVVLANLRVPSKSNTAKVYIEIQDENNHPPVFQKKFYIGGVSEDARMFTSVLRVKATDKDTGNYSVMAYRLIIPPIKEGKEGFVVETYTGLIKTAMLFHNMRRSYFKFQVIATDDYGKGLSGKADVLVSVVNQLDMQVIVSNVPPTLVEKKIEDLTEILDRYVQEQIPGAKVVVESIGARRHGDAFSLEDYTKCDLTVYAIDPQTNRAIDRNELFKFLDGKLLDINKDFQPYYGEGGRILEIRTPEAVTSIKKRGESLGYTEGALLALAFIIILCCIPAILVVLVSYRQVFKGRQAECTKTARIQAALPAAKPAVPAPAPVAAPPPPPPPPPGAHLYEELGDSSILSSLFLLYHFQQSRGNNSVSEDRKHQQVVMPFSSNTIEAHKSAHVDGSLKSNKLKSARKFTFLSDEDDLSAHNPLYKENISQVSTNSDISQRTDFVDPFSPKIQAKSKSLRGPREKIQRLWSQSVSLPRRLMRKVPNRPEIIDLQQWQGTRQKAENENTGICTNKRGSSNPLLTTEEANLTEKEEIRQGETLMIEGTEQLKSLSSDSSFCFPRPHFSFSTLPTVSRTVELKSEPNVISSPAECSLELSPSRPCVLHSSLSRRETPICMLPIETERNIFENFAHPPNISPSACPLPPPPPISPPSPPPAPAPLAPPPDISPFSLFCPPPSPPSIPLPLPPPTFFPLSVSTSGPPTPPLLPPFPTPLPPPPPSIPCPPPPSASFLSTECVCITGVKCTTNLMPAEKIKSSMTQLSTTTVCKTDPQREPKGILRHVKNLAELEKSVANMYSQIEKNYLRTNVSELQTMCPSEVTNMEITSEQNKGSLNNIVEGTEKQSHSQSTSL

SEQ ID NO: 33085 - protein, 1681 aa, Homo sapiens
  REGION 1..1681: note = ENSP00000478512
MFRQFYLWTCLASGIILGSLFEICLGQYDDDWQYEDCKLARGGPPATIVAIDEESRNGTILVDNMLIKGTAGGPDPTIELSLKDNVDYWVLMDPVKQMLFLNSTGRVLDRDPPMNIHSIVVQVQCINKKVGTIIYHEVRIVVRDRNDNSPTFKHESYYATVNELTPVGTTIFTGFSGDNGATDIDDGPNGQIEYVIQYNPDDPTSNDTFEIPLMLTGNIVLRKRLNYEDKTRYFVIIQANDRAQNLNERRTTTTTLTVDVLDGDDLGPMFLPCVLVPNTRDCRPLTYQAAIPELRTPEELNPIIVTPPIQAIDQDRNIQPPSDRPGILYSILVGTPEDYPRFFHMHPRTAELSLLEPVNRDFHQKFDLVIKAEQDNGHPLPAFAGLHIEILDENNQSPYFTMPSYQGYILESAPVGATISDSLNLTSPLRIVALDKDIEDTKDPELHLFLNDYTSVFTVTQTGITRYLTLLQPVDREEQQTYTFSITAFDGVQESEPVIVNIQVMDANDNTPTFPEISYDVYVYTDMRPGDSVIQLTAVDADEGSNGEITYEILVGAQGDFIINKTTGLITIAPGVEMIVGRTYALTVQAADNAPPAERRNSICTVYIEVLPPNNQSPPRFPQLMYSLEISEAMRVGAVLLNLQATDREGDSITYAIENGDPQRVFNLSETTGILTLGKALDRESTDRYILIITASDGRPDGTSTATVNIVVTDVNDNAPVFDPYLPRNLSVVEEEANAFVGQVKATDPDAGINGQVHYSLGNFNNLFRITSNGSIYTAVKLNREVRDYYELVVVATDGAVHPRHSTLTLAIKVLDIDDNSPVFTNSTYTVLVEENLPAGTTILQIEAKDVDLGANVSYRIRSPEVKHFFALHPFTGELSLLRSLDYEAFPDQEASITFLVEAFDIYGTMPPGIATVTVIVKDMNDYPPVFSKRIYKGMVAPDAVKGTPITTVYAEDADPPGLPASRVRYRVDDVQFPYPASIFEVEEDSGRVITRVNLNEEPTTIFKLVVVAFDDGEPVMSSSATVKILVLHPGEIPRFTQEEYRPPPVSELATKGTMVGVISAAAINQSIVYSIVSGNEEDTFGINNITGVIYVNGPLDYETRTSYVLRVQADSLEVVLANLRVPSKSNTAKVYIEIQDENNHPPVFQKKFYIGGVSEDARMFTSVLRVKATDKDTGNYSVMAYRLIIPPIKEGKEGFVVETYTGLIKTAMLFHNMRRSYFKFQVIATDDYGKGLSGKADVLVSVVNQLDMQVIVSNVPPTLVEKKIEDLTEILDRYVQEQIPGAKVVVESIGARRHGDAFSLEDYTKCDLTVYAIDPQTNRAIDRNELFKFLDGKLLDINKDFQPYYGEGGRILEIRTPEAVTSIKKRGESLGYTEGALLALAFIIILCCIPAILVVLVSYRQVFKGRQAECTKTARIQAALPAAKPAVPAPAPVAAPPPPPPPPPGAHLYEELGDSSMYEMPQYGSRRRLLPPAGQEEYGEVVGEAEEEYEEEEWARKRMIKLVVDREYETSSTGEDSAPECQRNRLHHPSIHSNINGNIYIAQNGSVVRTRRACLTDNLKVASPVRLGGPFKKLDKLAVTHEENVPLNTLSKGPFSTEKMNARPTLVTFAPCPVGTDNTAVKPLRNRLKSTVEQESMIDSKNIKEALEFHSDHTQSDDEELWMGPWNNLHIPMTKL

SEQ ID NO: 33086 - protein, 1888 aa, Homo sapiens
  REGION 1..1888: note = ENSP00000482329
MFRQFYLWTCLASGIILGSLFEICLGQYDDDCKLARGGPPATIVAIDEESRNGTILVDNMLIKGTAGGPDPTIELSLKDNVDYWVLMDPVKQMLFLNSTGRVLDRDPPMNIHSIVVQVQCINKKVGTIIYHEVRIVVRDRNDNSPTFKHESYYATVNELTPVGTTIFTGFSGDNGATDIDDGPNGQIEYVIQYNPDDPTSNDTFEIPLMLTGNIVLRKRLNYEDKTRYFVIIQANDRAQNLNERRTTTTTLTVDVLDGDDLGPMFLPCVLVPNTRDCRPLTYQAAIPELRTPEELNPIIVTPPIQAIDQDRNIQPPSDRPGILYSILVGTPEDYPRFFHMHPRTAELSLLEPVNRDFHQKFDLVIKAEQDNGHPLPAFAGLHIEILDENNQSPYFTMPSYQGYILESAPVGATISDSLNLTSPLRIVALDKDIEDTKDPELHLFLNDYTSVFTVTQTGITRYLTLLQPVDREEQQTYTFSITAFDGVQESEPVIVNIQVMDANDNTPTFPEISYDVYVYTDMRPGDSVIQLTAVDADEGSNGEITYEILVGAQGDFIINKTTGLITIAPGVEMIVGRTYALTVQAADNAPPAERSTGILTLGKALDRESTDRYILIITASDGRPDGTSTATVNIVVTDVNDNAPVFDPYLPRNLSVVEEEANAFVGQVKATDPDAGINGQVHYSLGNFNNLFRITSNGSIYTAVKLNREVRDYYELVVVATDGAVHPRHSTLTLAIKVLDIDDNSPVFTNSTYTVLVEENLPAGTTILQIEAKDVDLGANVSYRIRSPEVKHFFALHPFTGELSLLRSLDYEAFPDQEASITFLVEAFDIYGTMPPGIATVTVIVKDMNDYPPVFSKRIYKGMVAPDAVKGTPITTVYAEDADPPGLPASRVRYRVDDVQFPYPASIFEVEEDSGRVITRVNLNEEPTTIFKLVVVAFDDGEPVMSSSATVKILVLHPGEIPRFTQEEYRPPPVSELATKGTMVGVISAAAINQSIVYSIVSGNEEDTFGINNITGVIYVNGPLDYETRTSYVLRVQADSLEVVLANLRVPSKSNTAKVYIEIQDENNHPPVFQKKFYIGGVSEDARMFTSVLRVKATDKDTGNYSVMAYRLIIPPIKEGKEGFVVETYTGLIKTAMLFHNMRRSYFKFQVIATDDYGKGLSGKADVLVSVVNQLDMQVIVSNVPPTLVEKKIEDLTEILDRYVQEQIPGAKVVVESIGARRHGDAFSLEDYTKCDLTVYAIDPQTNRAIDRNELFKFLDGKLLDINKDFQPYYGEGGRILEIRTPEAVTSIKKRGESLGYTEGALLALAFIIILCCIPAILVVLVSYRQVFKGRQAECTKTARIQAALPAAKPAVPAPAPVAAPPPPPPPPPGAHLYEELGDSSILSSLFLLYHFQQSRGNNSVSEDRKHQQVVMPFSSNTIEAHKSAHVDGSLKSNKLKSARKFTFLSDEDDLSAHNPLYKENISQVSTNSDISQRTDFVDPFSPKIQAKSKSLRGPREKIQRLWSQSVSLPRRLMRKVPNRPEIIDLQQWQGTRQKAENENTGICTNKRGSSNPLLTTEEANLTEKEEIRQGETLMIEGTEQLKSLSSDSSFCFPRPHFSFSTLPTVSRTVELKSEPNVISSPAECSLELSPSRPCVLHSSLSRRETPICMLPIETERNIFENFAHPPNISPSACPLPPPPPISPPSPPPAPAPLAPPPDISPFSLFCPPPSPPSIPLPLPPPTFFPLSVSTSGPPTPPLLPPFPTPLPPPPPSIPCPPPPSASFLSTECVCITGVKCTTNLMPAEKIKSSMTQLSTTTVCKTDPQREPKGILRHVKNLAELEKSVANMYSQIEKNYLRTNVSELQTMCPSEVTNMEITSEQNKGSLNNIVEGTEKQSHSQSTSL

SEQ ID NO: 33087 - protein, 1676 aa, Homo sapiens
  REGION 1..1676: note = ENSP00000410304
MFRQFYLWTCLASGIILGSLFEICLGQYDDDCKLARGGPPATIVAIDEESRNGTILVDNMLIKGTAGGPDPTIELSLKDNVDYWVLMDPVKQMLFLNSTGRVLDRDPPMNIHSIVVQVQCINKKVGTIIYHEVRIVVRDRNDNSPTFKHESYYATVNELTPVGTTIFTGFSGDNGATDIDDGPNGQIEYVIQYNPDDPTSNDTFEIPLMLTGNIVLRKRLNYEDKTRYFVIIQANDRAQNLNERRTTTTTLTVDVLDGDDLGPMFLPCVLVPNTRDCRPLTYQAAIPELRTPEELNPIIVTPPIQAIDQDRNIQPPSDRPGILYSILVGTPEDYPRFFHMHPRTAELSLLEPVNRDFHQKFDLVIKAEQDNGHPLPAFAGLHIEILDENNQSPYFTMPSYQGYILESAPVGATISDSLNLTSPLRIVALDKDIEDTKDPELHLFLNDYTSVFTVTQTGITRYLTLLQPVDREEQQTYTFSITAFDGVQESEPVIVNIQVMDANDNTPTFPEISYDVYVYTDMRPGDSVIQLTAVDADEGSNGEITYEILVGAQGDFIINKTTGLITIAPGVEMIVGRTYALTVQAADNAPPAERRNSICTVYIEVLPPNNQSPPRFPQLMYSLEISEAMRVGAVLLNLQATDREGDSITYAIENGDPQRVFNLSETTGILTLGKALDRESTDRYILIITASDGRPDGTSTATVNIVVTDVNDNAPVFDPYLPRNLSVVEEEANAFVGQVKATDPDAGINGQVHYSLGNFNNLFRITSNGSIYTAVKLNREVRDYYELVVVATDGAVHPRHSTLTLAIKVLDIDDNSPVFTNSTYTVLVEENLPAGTTILQIEAKDVDLGANVSYRIRSPEVKHFFALHPFTGELSLLRSLDYEAFPDQEASITFLVEAFDIYGTMPPGIATVTVIVKDMNDYPPVFSKRIYKGMVAPDAVKGTPITTVYAEDADPPGLPASRVRYRVDDVQFPYPASIFEVEEDSGRVITRVNLNEEPTTIFKLVVVAFDDGEPVMSSSATVKILVLHPGEIPRFTQEEYRPPPVSELATKGTMVGVISAAAINQSIVYSIVSGNEEDTFGINNITGVIYVNGPLDYETRTSYVLRVQADSLEVVLANLRVPSKSNTAKVYIEIQDENNHPPVFQKKFYIGGVSEDARMFTSVLRVKATDKDTGNYSVMAYRLIIPPIKEGKEGFVVETYTGLIKTAMLFHNMRRSYFKFQVIATDDYGKGLSGKADVLVSVVNQLDMQVIVSNVPPTLVEKKIEDLTEILDRYVQEQIPGAKVVVESIGARRHGDAFSLEDYTKCDLTVYAIDPQTNRAIDRNELFKFLDGKLLDINKDFQPYYGEGGRILEIRTPEAVTSIKKRGESLGYTEGALLALAFIIILCCIPAILVVLVSYRQVFKGRQAECTKTARIQAALPAAKPAVPAPAPVAAPPPPPPPPPGAHLYEELGDSSMYEMPQYGSRRRLLPPAGQEEYGEVVGEAEEEYEEEEWARKRMIKLVVDREYETSSTGEDSAPECQRNRLHHPSIHSNINGNIYIAQNGSVVRTRRACLTDNLKVASPVRLGGPFKKLDKLAVTHEENVPLNTLSKGPFSTEKMNARPTLVTFAPCPVGTDNTAVKPLRNRLKSTVEQESMIDSKNIKEALEFHSDHTQSDDEELWMGPWNNLHIPMTKL

SEQ ID NO: 33088 - protein, 1540 aa, Homo sapiens
  REGION 1..1540: note = ENSP00000378826
MFRQFYLWTCLASGIILGSLFEICLGQYDDDCKLARGGPPATIVAIDEESRNGTILVDNMLIKGTAGGPDPTIELSLKDNVDYWVLMDPVKQMLFLNSTGRVLDRDPPMNIHSIVVQVQCINKKVGTIIYHEVRIVVRDRNDNSPTFKHESYYATVNELTPVGTTIFTGFSGDNGATDIDDGPNGQIEYVIQYNPDDPTSNDTFEIPLMLTGNIVLRKRLNYEDKTRYFVIIQANDRAQNLNERRTTTTTLTVDVLDGDDLGPMFLPCVLVPNTRDCRPLTYQAAIPELRTPEELNPIIVTPPIQAIDQDRNIQPPSDRPGILYSILVGTPEDYPRFFHMHPRTAELSLLEPVNRDFHQKFDLVIKAEQDNGHPLPAFAGLHIEILDENNQSPYFTMPSYQGYILESAPVGATISDSLNLTSPLRIVALDKDIEDTKDPELHLFLNDYTSVFTVTQTGITRYLTLLQPVDREEQQTYTFSITAFDGVQESEPVIVNIQVMDANDNTPTFPEISYDVYVYTDMRPGDSVIQLTAVDADEGSNGEITYEILVGAQGDFIINKTTGLITIAPGVEMIVGRTYALTVQAADNAPPAERRNSICTVYIEVLPPNNQSPPRFPQLMYSLEISEAMRVGAVLLNLQATDREGDSITYAIENGDPQRVFNLSETTGILTLGKALDRESTDRYILIITASDGRPDGTSTATVNIVVTDVNDNAPVFDPYLPRNLSVVEEEANAFVGQVKATDPDAGINGQVHYSLGNFNNLFRITSNGSIYTAVKLNREVRDYYELVVVATDGAVHPRHSTLTLAIKVLDIDDNSPVFTNSTYTVLVEENLPAGTTILQIEAKDVDLGANVSYRIRSPEVKHFFALHPFTGELSLLRSLDYEAFPDQEASITFLVEAFDIYGTMPPGIATVTVIVKDMNDYPPVFSKRIYKGMVAPDAVKGTPITTVYAEDADPPGLPASRVRYRVDDVQFPYPASIFEVEEDSGRVITRVNLNEEPTTIFKLVVVAFDDGEPVMSSSATVKILVLHPGEIPRFTQEEYRPPPVSELATKGTMVGVISAAAINQSIVYSIVSGNEEDTFGINNITGVIYVNGPLDYETRTSYVLRVQADSLEVVLANLRVPSKSNTAKVYIEIQDENNHPPVFQKKFYIGGVSEDARMFTSVLRVKATDKDTGNYSVMAYRLIIPPIKEGKEGFVVETYTGLIKTAMLFHNMRRSYFKFQVIATDDYGKGLSGKADVLVSVVNQLDMQVIVSNVPPTLVEKKIEDLTEILDRYVQEQIPGAKVVVESIGARRHGDAFSLEDYTKCDLTVYAIDPQTNRAIDRNELFKFLDGKLLDINKDFQPYYGEGGRILEIRTPEAVTSIKKRGESLGYTEGALLALAFIIILCCIPAILVVLVSYRQVFKGRQAECTKTARIQAALPAAKPAVPAPAPVAAPPPPPPPPPGAHLYEELGDSSMNRNYPWSLELILARNMDKIITVMSMGMKCLNMGVAVDCYHQLDRRNMVRWLVKLRKNMRRKRKSQRKLKNQRLKLESLVRRKK

SEQ ID NO: 33089 - protein, 1789 aa, Homo sapiens
  REGION 1..1789: note = ENSP00000482921
MFRQFYLWTCLASGIILGSLFEICLGQYDDDWQYEDCKLARGGPPATIVAIDEESRNGTILVDNMLIKGTAGGPDPTIELSLKDNVDYWVLMDPVKQMLFLNSTGRVLDRDPPMNIHSIVVQVQCINKKVGTIIYHEVRIVVRDRNDNSPTFKHESYYATVNELTPVGTTIFTGFSGDNGATDIDDGPNGQIEYVIQYNPDDPTSNDTFEIPLMLTGNIVLRKRLNYEDKTRYFVIIQANDRAQNLNERRTTTTTLTVDVLDGDDLGPMFLPCVLVPNTRDCRPLTYQAAIPELRTPEELNPIIVTPPIQAIDQDRNIQPPSDRPGILYSILVGTPEDYPRFFHMHPRTAELSLLEPVNRDFHQKFDLVIKAEQDNGHPLPAFAGLHIEILDENNQSPYFTMPSYQGYILESAPVGATISDSLNLTSPLRIVALDKDIEDVPPSGVPTKDPELHLFLNDYTSVFTVTQTGITRYLTLLQPVDREEQQTYTFSITAFDGVQESEPVIVNIQVMDANDNTPTFPEISYDVYVYTDMRPGDSVIQLTAVDADEGSNGEITYEILVGAQGDFIINKTTGLITIAPGVEMIVGRTYALTVQAADNAPPAERRNSICTVYIEVLPPNNQSPPRFPQLMYSLEISEAMRVGAVLLNLQATDREGDSITYAIENGDPQRVFNLSETTGILTLGKALDRESTDRYILIITASDGRPDGTSTATVNIVVTDVNDNAPVFDPYLPRNLSVVEEEANAFVGQVKATDPDAGINGQVHYSLGNFNNLFRITSNGSIYTAVKLNREVRDYYELVVVATDGAVHPRHSTLTLAIKVLDIDDNSPVFTNSTYTVLVEENLPAGTTILQIEAKDVDLGANVSYRIRSPEVKHFFALHPFTGELSLLRSLDYEAFPDQEASITFLVEAFDIYGTMPPGIATVTVIVKDMNDYPPVFSKRIYKGMVAPDAVKGTPITTVYAEDADPPGLPASRVRYRVDDVQFPYPASIFEVEEDSGRVITRVNLNEEPTTIFKLVVVAFDDGEPVMSSSATVKILVLHPGEIPRFTQEEYRPPPVSELATKGTMVGVISAAAINQSIVYSIVSGNEEDTFGINNITGVIYVNGPLDYETRTSYVLRVQADSLEVVLANLRVPSKSNTAKVYIEIQDENNHPPVFQKKFYIGGVSEDARMFTSVLRVKATDKDTGNYSVMAYRLIIPPIKEGKEGFVVETYTGLIKTAMLFHNMRRSYFKFQVIATDDYGKGLSGKADVLVSVVNQLDMQVIVSNVPPTLVEKKIEDLTEILDRYVQEQIPGAKVVVESIGARRHGDAFSLEDYTKCDLTVYAIDPQTNRAIDRNELFKFLDGKLLDINKDFQPYYGEGGRILEIRTPEAVTSIKKRGESLGYTEGALLALAFIIILCCIPAILVVLVSYRQVFKGRQAECTKTARIQAALPAAKPAVPAPAPVAAPPPPPPPPPGAHLYEELGDSSMYEMPQYGSRRRLLPPAGQEEYGEVVGEAEEEYEEEEEEPKKIKKPKVEIREPSEEEEVVVTIEKPPAAEPTYTTWKRARIFPMIFKKVRGLADKRGIVDLEGEEWQRRLEEEDKDYLKLTLDQEEATESTVESEEESSSDYTEYSEEESEFSESETTEEESESETPSEEEESSTPESEESESTESEGEKARKNIVLARRRPMVEEVKEVKGRKEEPQEEQKEPKMEEEEHSEEEESGPAPVEESTDPEAQDIPEEGSAESASVEGGVESEEESESGSSSSSSESQSGGPWGYQVPAYDRSKNANQKKSPGANSEGYNTAL

SEQ ID NO: 33090 - protein, 889 aa, Homo sapiens
  REGION 1..889: note = ENSP00000432899
MYLSICCCFLLWAPALTLKNLNYSVPEEQGAGTVIGNIGRDARLQPGLPPAERGGGGRSKSGSYRVLENSAPHLLDVDADSGLLYTKQRIDRESLCRHNAKCQLSLEVFANDKEICMIKVEIQDINDNAPSFSSDQIEMDISENAAPGTRFPLTSAHDPDAGENGLRTYLLTRDDHGLFGLDVKSRGDGTKFPELVIQKALDREQQNHHTLVLTALDGGEPPRSATVQINVKVIDSNDNSPVFEAPSYLVELPENAPLGTVVIDLNATDADEGPNGEVLYSFSSYVPDRVRELFSIDPKTGLIRVKGNLDYEENGMLEIDVQARDLGPNPIPAHCKVTVKLIDRNDNAPSIGFVSVRQGALSEAAPPGTVIALVRVTDRDSGKNGQLQCRVLGGGGTGGGGGLGGPGGSVPFKLEENYDNFYTVVTDRPLDRETQDEYNVTIVARDGGSPPLNSTKSFAIKILDENDNPPRFTKGLYVLQVHENNIPGEYLGSVLAQDPDLGQNGTVSYSILPSHIGDVSIYTYVSVNPTNGAIYALRSFNFEQTKAFEFKVLAKDSGAPAHLESNATVRVTVLDVNDNAPVIVLPTLQNDTAELQVPRNAGLGYLVSTVRALDSDFGESGRLTYEIVDGNDDHLFEIDPSSGEIRTLHPFWEDVTPVVELVVKVTDHGKPTLSAVAKLIIRSVSGSLPEGVPRVNGEQHHWDMSLPLIVTLSTISIILLAAMITIAVKCKRENKEIRTYNCRIAEYSHPQLGGGKGKKKKINKNDIMLVQSEVEERNAMNVMNVVSSPSLATSPMYFDYQTRLPLSSPRSEVMYLKPASNNLTVPQGHAGCHTSFTGQGTNASETPATRMSIIQTDNFPAEPNYMGSRQQFVQSISVAPRLRTQKEPA

SEQ ID NO: 33091 - protein, 1159 aa, Homo sapiens
  REGION 1..1159: note = ENSP00000367151
MYLSICCCFLLWAPALTLKNLNYSVPEEQGAGTVIGNIGRDARLQPGLPPAERGGGGRSKSGSYRVLENSAPHLLDVDADSGLLYTKQRIDRESLCRHNAKCQLSLEVFANDKEICMIKVEIQDINDNAPSFSSDQIEMDISENAAPGTRFPLTSAHDPDAGENGLRTYLLTRDDHGLFGLDVKSRGDGTKFPELVIQKALDREQQNHHTLVLTALDGGEPPRSATVQINVKVIDSNDNSPVFEAPSYLVELPENAPLGTVVIDLNATDADEGPNGEVLYSFSSYVPDRVRELFSIDPKTGLIRVKGNLDYEENGMLEIDVQARDLGPNPIPAHCKVTVKLIDRNDNAPSIGFVSVRQGALSEAAPPGTVIALVRVTDRDSGKNGQLQCRVLGGGGTGGGGGLGGPGGSVPFKLEENYDNFYTVVTDRPLDRETQDEYNVTIVARDGGSPPLNSTKSFAIKILDENDNPPRFTKGLYVLQVHENNIPGEYLGSVLAQDPDLGQNGTVSYSILPSHIGDVSIYTYVSVNPTNGAIYALRSFNFEQTKAFEFKVLAKDSGAPAHLESNATVRVTVLDVNDNAPVIVLPTLQNDTAELQVPRNAGLGYLVSTVRALDSDFGESGRLTYEIVDGNDDHLFEIDPSSGEIRTLHPFWEDVTPVVELVVKVTDHGKPTLSAVAKLIIRSVSGSLPEGVPRVNGEQHHWDMSLPLIVTLSTISIILLAAMITIAVKCKRENKEIRTYNCRIAEYSHPQLGGGKGKKKKINKNDIMLVQSEVEERNAMNVMNVVSSPSLATSPMYFDYQTRLPLSSPRSEVMYLKPASNNLTVPQGHAGCHTSFTGQGTNASETPATRMSIIQTDNFPAEPNYMGSRQQFVQSSSTFKDPERASLRDSGHGDSDQADSDQDTNKGSCCDMSVREALKMKTTSTKSQPLEQEPEECVNCTDECRVLGHSDRCWMPQFPAANQAENADYRTNLFVPTVEANVETETYETVNPTGKKTFCTFGKDKREHTILIANVKPYLKAKRALSPLLQEVPSASSSPTKACIEPCTSTKGSLDGCEAKPGALAEASSQYLPTDSQYLSPSKQPRDPPFMASDQMARVFADVHSRASRDSSEMGAVLEQLDHPNRDLGRESVDAEEVVREIDKLLQDCRGNDPVAVRK

SEQ ID NO: 33092 - protein, 546 aa, Homo sapiens
  REGION 1..546: note = ENSP00000481329
LDSDFGESGRLTYEIVDGNDDHLFEIDPSSGEIRTLHPFWEDVTPVVELVVKVTDHGKPTLSAVAKLIIRSVSGSLPEGVPRVNGEQHHWDMSLPLIVTLSTISIILLAAMITIAVKCKRENKEIRTYNCRIAEYSHPQLGGGKGKKKKINKNDIMLVQSEVEERNAMNVMNVVSSPSLATSPMYFDYQTRLPLSSPRSEVMYLKPASNNLTVPQGHAGCHTSFTGQGTNASETPATRMSIIQTDNFPAEPNYMGSRQQFVQSSTFKDPERASLRDSGHGDSDQADSDQDTNKGSCCDMSVREALKMKTTSTKSQPLEQEPEECVNCTDECRVLGHSDRCWMPQFPAANQAENADYRTNLFVPTVEANVETETYETVNPTGKKTFCTFGKDKREHTILIANVKPYLKAKRALSPLLQEVPSASSSPTKACIEPCTSTKGSLDGCEAKPGALAEASSQYLPTDSQYLSPSKQPRDPPFMASDQMARVFADVHSRASRDSSEMGAVLEQLDHPNRDLGRESVDAEEVVREIDKLLQDCRGNDPVAVRK

SEQ ID NO: 33093 - protein, 184 aa, Homo sapiens
  REGION 1..184: note = ENSP00000483215
LTVPQGHAGCHTSFTGQGTNASETPATRMSIIQTDNFPAEPNYMGSRQQFVQSSSTFKDPERASLRDSGHGDSDQADSDQDTNKGSCCDMSVREALKMKTTSTKSQPLEQAFPTLLSFAILTLHTITSRLQSVDLLPPEPEECVNCTDECRVLGHSDRCWMPQFPAANQAENADYRTNLFVPTV

SEQ ID NO: 33094 - protein, 1237 aa, Homo sapiens
  REGION 1..1237: note = ENSP00000367096
MDLRDFYLLAALIACLRLDSAIAQELIYTIREELPENVPIGNIPKDLNISHINAATGTSASLVYRLVSKAGDAPLVKVSSSTGEIFTTSNRIDREKLCAGASYAEENECFFELEVVILPNDFFRLIKIKIIVKDTNDNAPMFPSPVINISIPENTLINSRFPIPSATDPDTGFNGVQHYELLNGQSVFGLDIVETPEGEKWPQLIVQQNLDREQKDTYVMKIKVEDGGTPQKSSTAILQVTVSDVNDNRPVFKEGQVEVHIPENAPVGTSVIQLHATDADIGSNAEIRYIFGAQVAPATKRLFALNNTTGLITVQRSLDREETAIHKVTVLASDGSSTPARATVTINVTDVNDNPPNIDLRYIISPINGTVYLSEKDPVNTKIALITVSDKDTDVNGKVICFIEREVPFHLKAVYDNQYLLETSSLLDYEGTKEFSFKIVASDSGKPSLNQTALVRVKLEDENDNPPIFNQPVIELSVSENNRRGLYLTTISATDEDSGKNADIVYQLGPNASFFDLDRKTGVLTASRVFDREEQERFIFTVTARDNGTPPLQSQAAVIVTVLDENDNSPKFTHNHFQFFVSENLPKYSTVGVITVTDADAGENKAVTLSILNDNDNFVLDPYSGVIKSNVSFDREQQSSYTFDVKATDGGQPPRSSTAKVTINVMDVNDNSPVVISPPSNTSFKLVPLSAIPGSVVAEVFAVDVDTGMNAELKYTIVSGNNKGLFRIDPVTGNITLEEKPAPTDVGLHRLVVNISDLGYPKSLHTLVLVFLYVNDTAGNASYIYDLIRRTMETPLDRNIGDSSQPYQNEDYLTIMIAIIAGAMVVIVVIFVTVLVRCRHASRFKAAQRSKQGAEWMSPNQENKQNKKKKRKKRKSPKSSLLNFVTIEESKPDDAVHEPINGTISLPAELEEQSIGRFDWGPAPPTTFKPNSPDLAKHYKSASPQPAFHLKPDTPVSVKKHHVIQELPLDNTFVGGCDTLSKRSSTSSDHFSASECSSQGGFKTKGPLHTRQCNSHSKSDNIPVTPQKCPSSTGFHIQENEESHYESQRRVTFHLPDGSQESCSDSGLGDHEPVGSGTLISHPLPLVQPQDEFYDQASPDKRTEADGNSDPNSDGPLGPRGLAEATEMCTQECLVLGHSDNCWMPPGLGPYQHPKSPLSTFAPQKEWVKKDKLVNGHTLTRAWKEDSNRNQFNDRKQYGSNEGHFNNGSHMTDIPLANLKSYKQAGGATESPKEHQL

SEQ ID NO: 33095 - protein, 1203 aa, Homo sapiens
  REGION 1..1203: note = ENSP00000442186
MDLRDFYLLAALIACLRLDSAIAQELIYTIREELPENVPIGNIPKDLNISHINAATGTSASLVYRLVSKAGDAPLVKVSSSTGEIFTTSNRIDREKLCAGASYAEENECFFELEVVILPNDFFRLIKIKIIVKDTNDNAPMFPSPVINISIPENTLINSRFPIPSATDPDTGFNGVQHYELLNGQSVFGLDIVETPEGEKWPQLIVQQNLDREQKDTYVMKIKVEDGGTPQKSSTAILQVTVSDVNDNRPVFKEGQVEVHIPENAPVGTSVIQLHATDADIGSNAEIRYIFGAQVAPATKRLFALNNTTGLITVQRSLDREETAIHKVTVLASDGSSTPARATVTINVTDVNDNPPNIDLRYIISPINGTVYLSEKDPVNTKIALITVSDKDTDVNGKVICFIEREVPFHLKAVYDNQYLLETSSLLDYEGTKEFSFKIVASDSGKPSLNQTALVRVKLEDENDNPPIFNQPVIELSVSENNRRGLYLTTISATDEDSGKNADIVYQLGPNASFFDLDRKTGVLTASRVFDREEQERFIFTVTARDNGTPPLQSQAAVIVTVLDENDNSPKFTHNHFQFFVSENLPKYSTVGVITVTDADAGENKAVTLSILNDNDNFVLDPYSGVIKSNVSFDREQQSSYTFDVKATDGGQPPRSSTAKVTINVMDVNDNSPVVISPPSNTSFKLVPLSAIPGSVVAEVFAVDVDTGMNAELKYTIVSGNNKGLFRIDPVTGNITLEEKPAPTDVGLHRLVVNISDLGYPKSLHTLVLVFLYVNDTAGNASYIYDLIRRTMETPLDRNIGDSSQPYQNEDYLTIMIAIIAGAMVVIVVIFVTVLVRCRHASRFKAAQRSKQGAEWMSPNQENKQNKKKKRKKRKSPKSSLLNFVTIEESKPDDAVHEPINGTISLPAELEEQSIGRFDWGPAPPTTFKPNSPDLAKHYKSASPQPAFHLKPDTPVSVKKHHVIQELPLDNTFVGGCDTLSKRSSTSSDHFSASECSSQGGFKTKGPLHTRQSQRRVTFHLPDGSQESCSDSGLGDHEPVGSGTLISHPLPLVQPQDEFYDQASPDKRTEADGNSDPNSDGPLGPRGLAEATEMCTQECLVLGHSDNCWMPPGLGPYQHPKSPLSTFAPQKEWVKKDKLVNGHTLTRAWKEDSNRNQFNDRKQYGSNEGHFNNGSHMTDIPLANLKSYKQAGGATESPKEHQL

SEQ ID NO: 33096 - protein, 1195 aa, Homo sapiens
  REGION 1..1195: note = ENSP00000401699
MDLRDFYLLAALIACLRLDSAIAQELIYTIREELPENVPIGNIPKDLNISHINAATGTSASLVYRLVSKAGDAPLVKVSSSTGEIFTTSNRIDREKLCAGASYAEENECFFELEVVILPNDFFRLIKIKIIVKDTNDNAPMFPSPVINISIPENTLINSRFPIPSATDPDTGFNGVQHYELLNGQSVFGLDIVETPEGEKWPQLIVQQNLDREQKDTYVMKIKVEDGGTPQKSSTAILQVTVSDVNDNRPVFKEGQVEVHIPENAPVGTSVIQLHATDADIGSNAEIRYIFGAQVAPATKRLFALNNTTGLITVQRSLDREETAIHKVTVLASDGSSTPARATVTINVTDVNDNPPNIDLRYIISPINGTVYLSEKDPVNTKIALITVSDKDTDVNGKVICFIEREVPFHLKAVYDNQYLLETSSLLDYEGTKEFSFKIVASDSGKPSLNQTALVRVKLEDENDNPPIFNQPVIELSVSENNRRGLYLTTISATDEDSGKNADIVYQLGPNASFFDLDRKTGVLTASRVFDREEQERFIFTVTARDNGTPPLQSQAAVIVTVLDENDNSPKFTHNHFQFFVSENLPKYSTVGVITVTDADAGENKAVTLSILNDNDNFVLDPYSGVIKSNVSFDREQQSSYTFDVKATDGGQPPRSSTAKVTINVMDVNDNSPVVISPPSNTSFKLVPLSAIPGSVVAEVFAVDVDTGMNAELKYTIVSGNNKGLFRIDPVTGNITLEEKPAPTDVGLHRLVVNISDLGYPKSLHTLVLVFLYVNDTAGNASYIYDLIRRTMETPLDRNIGDSSQPYQNEDYLTIMIAIIAGAMVVIVVIFVTVLVRCRHASRFKAAQRSKQGAEWMSPNQENKQNKKKKRKKRKSPKSSLLNFVTIEESKPDDAVHEPINGTISLPAELEEQSIGRFDWGPAPPTTFKPNSPDLAKHYKSASPQPAFHLKPDTPVSVKKHHVIQELPLDNTFVGGCDTLSKRSSTSSDHFSASECSSQGGFKTKGPLHTRQCNSHSKSDNIPVTPQKCPSSTGFHIQENEESHYEPQDEFYDQASPDKRTEADGNSDPNSDGPLGPRGLAEATEMCTQECLVLGHSDNCWMPPGLGPYQHPKSPLSTFAPQKEWVKKDKLVNGHTLTRAWKEDSNRNQFNDRKQYGSNEGHFNNGSHMTDIPLANLKSYKQAGGATESPKEHQL

SEQ ID NO: 33097 - protein, 44 aa, Homo sapiens
  REGION 1..44: note = ENSP00000482917
CNSHSKSDNIPVTPQKCPSSTGFHIQENEESHYEGTLPYLRYSL

SEQ ID NO: 33098 - protein, 1032 aa, Homo sapiens
  REGION 1..1032: note = ENSP00000367092
MDLRDFYLLAALIACLRLDSAIAQELIYTIREELPENVPIGNIPKDLNISHINAATGTSASLVYRLVSKAGDAPLVKVSSSTGEIFTTSNRIDREKLCAGASYAEENECFFELEVVILPNDFFRLIKIKIIVKDTNDNAPMFPSPVINISIPENTLINSRFPIPSATDPDTGFNGVQHYELLNGQSVFGLDIVETPEGEKWPQLIVQQNLDREQKDTYVMKIKVEDGGTPQKSSTAILQVTVSDVNDNRPVFKEGQVEVHIPENAPVGTSVIQLHATDADIGSNAEIRYIFGAQVAPATKRLFALNNTTGLITVQRSLDREETAIHKVTVLASDGSSTPARATVTINVTDVNDNPPNIDLRYIISPINGTVYLSEKDPVNTKIALITVSDKDTDVNGKVICFIEREVPFHLKAVYDNQYLLETSSLLDYEGTKEFSFKIVASDSGKPSLNQTALVRVKLEDENDNPPIFNQPVIELSVSENNRRGLYLTTISATDEDSGKNADIVYQLGPNASFFDLDRKTGVLTASRVFDREEQERFIFTVTARDNGTPPLQSQAAVIVTVLDENDNSPKFTHNHFQFFVSENLPKYSTVGVITVTDADAGENKAVTLSILNDNDNFVLDPYSGVIKSNVSFDREQQSSYTFDVKATDGGQPPRSSTAKVTINVMDVNDNSPVVISPPSNTSFKLVPLSAIPGSVVAEVFAVDVDTGMNAELKYTIVSGNNKGLFRIDPVTGNITLEEKPAPTDVGLHRLVVNISDLGYPKSLHTLVLVFLYVNDTAGNASYIYDLIRRTMETPLDRNIGDSSQPYQNEDYLTIMIAIIAGAMVVIVVIFVTVLVRCRHASRFKAAQRSKQGAEWMSPNQENKQNKKKKRKKRKSPKSSLLNFVTIEESKPDDAVHEPINGTISLPAELEEQSIGRFDWGPAPPTTFKPNSPDLAKHYKSASPQPAFHLKPDTPVSVKKHHVIQELPLDNTFVGGCDTLSKRSSTSSDHFSASECSSQGGFKTKGPLHTRQVNEHFYWSISTAYKCPVNQY

SEQ ID NO: 33099 - protein, 807 aa, Homo sapiens
  REGION 1..807: note = ENSP00000367373
MVFSRRGGLGARDLLLWLLLLAAWEVGSGQLHYSIPEEAKHGTFVGRVAQDLGLELAELVPRLFRVASKTHRDLLEVNLQNGILFVNSRIDREELCQWSAECSIHLELIADRPLQVFHVEVKVKDINDNPPVFRGREQIIFIPESRLLNSRFPIEGAADADIGANALLTYTLSPSDYFSLDVEASDELSKSLWLELRKYLDREETPELHLLLTATDGGKPELQGTVELLITVLDVNDNAPLFDQAVYRVHLLETTANGTLVTTLNASDADEGVNGEVVFSFDSGISRDIQEKFKVDSSSGEIRLIDKLDYEETKSYEIQVKAVDKGSPPMSNHCKVLVKVLDVNDNAPELAVTSLYLPIREDAPLSTVIALITVSDRDSGANGQVTCSLMPHVPFKLVSTFKNYYSLVLDSALDRESLSVYELVVTARDGGSPSLWATARVSVEVADVNDNAPAFAQPEYTVFVKENNPPGCHIFTVSARDADAQENALVSYSLVERRVGERALSNYVSVHAESGKVYALQPLDHEELELLQFQVSARDAGVPPLGSNVTLQVFVLDENDNAPALLAPRVGGTIGAVSELVPRLVGAGHVVAKVRAVDADSGYNAWLSYELQPAAGGARIPFRVGLYTGEISTTRVLDEADLSRYRLLVLVKDHGEPALTATATVLVSLVESGQAPKASSRASVGVAGPEAALVDVNVYLIIAICAVSSLLVLTLLLYTALRCSVPPTEGAYVPGKPTLVCSSALGSWSNSQQRRQRVCSSEGPPKTDLMAFSPGLSPSLNTSERNEQPEANLDLSGNVSPTFEFWL

SEQ ID NO: 33100 - protein, 686 aa, Homo sapiens
  REGION 1..686: note = ENSP00000378129
MVFSRRGGLGARDLLLWLLLLAAWEVGSGQLHYSIPEEAKHGTFVGRVAQDLGLELAELVPRLFRVASKTHRDLLEVNLQNGILFVNSRIDREELCQWSAECSIHLELIADRPLQVFHVEVKVKDINDNPPVFRGREQIIFIPESRLLNSRFPIEGAADADIGANALLTYTLSPSDYFSLDVEASDELSKSLWLELRKYLDREETPELHLLLTATDGGKPELQGTVELLITVLDVNDNAPLFDQAVYRVHLLETTANGTLVTTLNASDADEGVNGEVVFSFDSGISRDIQEKFKVDSSSGEIRLIDKLDYEETKSYEIQVKAVDKGSPPMSNHCKVLVKVLDVNDNAPELAVTSLYLPIREDAPLSTVIALITVSDRDSGANGQVTCSLMPHVPFKLVSTFKNYYSLVLDSALDRESLSVYELVVTARDGGSPSLWATARVSVEVADVNDNAPAFAQPEYTVFVKENNPPGCHIFTVSARDADAQENALVSYSLVERRVGERALSNYVSVHAESGKVYALQPLDHEELELLQFQPRQPNPDWRYSASLRAGMHSSVHLEEAGILRAGPGGPDQQWPTVSSATPEPEAGEVSPPVGAGVNSNSWTFKYGPGNPKQSGPGELPDKFIIPGSPAIISIRQEPTNSQIDKSDFITFGKKEETKKKKKKKKGNKTQEKKEKGNSTTDNSDQ

SEQ ID NO: 33101 - protein, 950 aa, Homo sapiens
  REGION 1..950: note = ENSP00000420840
MVFSRRGGLGARDLLLWLLLLAAWEVGSGQLHYSIPEEAKHGTFVGRVAQDLGLELAELVPRLFRVASKTHRDLLEVNLQNGILFVNSRIDREELCQWSAECSIHLELIADRPLQVFHVEVKVKDINDNPPVFRGREQIIFIPESRLLNSRFPIEGAADADIGANALLTYTLSPSDYFSLDVEASDELSKSLWLELRKYLDREETPELHLLLTATDGGKPELQGTVELLITVLDVNDNAPLFDQAVYRVHLLETTANGTLVTTLNASDADEGVNGEVVFSFDSGISRDIQEKFKVDSSSGEIRLIDKLDYEETKSYEIQVKAVDKGSPPMSNHCKVLVKVLDVNDNAPELAVTSLYLPIREDAPLSTVIALITVSDRDSGANGQVTCSLMPHVPFKLVSTFKNYYSLVLDSALDRESLSVYELVVTARDGGSPSLWATARVSVEVADVNDNAPAFAQPEYTVFVKENNPPGCHIFTVSARDADAQENALVSYSLVERRVGERALSNYVSVHAESGKVYALQPLDHEELELLQFQVSARDAGVPPLGSNVTLQVFVLDENDNAPALLAPRVGGTIGAVSELVPRLVGAGHVVAKVRAVDADSGYNAWLSYELQPAAGGARIPFRVGLYTGEISTTRVLDEADLSRYRLLVLVKDHGEPALTATATVLVSLVESGQAPKASSRASVGVAGPEAALVDVNVYLIIAICAVSSLLVLTLLLYTALRCSVPPTEGAYVPGKPTLVCSSALGSWSNSQQRRQRVCSSEGPPKTDLMAFSPGLSPSLNTSERNEQPEANLDLSGNPRQPNPDWRYSASLRAGMHSSVHLEEAGILRAGPGGPDQQWPTVSSATPEPEAGEVSPPVGAGVNSNSWTFKYGPGNPKQSGPGELPDKFIIPGSPAIISIRQEPTNSQIDKSDFITFGKKEETKKKKKKKKGNKTQEKKEKGNSTTDNSDQ

SEQ ID NO: 33102 - protein, 950 aa, Homo sapiens
  REGION 1..950: note = ENSP00000429808
MLFSWREDPGAQCLLLSLLLLAASEVGSGQLHYSVSEEAKHGTFVGRIAQDLGLELAELVPRLFRVASKRHGDLLEVNLQNGILFVNSRIDREELCGRSAECSIHLEVIVDRPLQVFHVEVEVKDINDNAPVFPMAVKNLFISESRQPGSRFSLEGASDADIGTNSLLTYSLDSTEYFTLDVKRNDEEIKSLGLVLKKNLNREDTPKHYLLITAIDGGKPELTGTTQLKITVLDVNDNAPAFERTIYKVRLLENAPNGTLVVTVNATDLDEGVNKDIAYSFNTDMSADILSKFHLDPVNGQISVKGNIDFEESKSYEIQVEATDKGNPPMSDHCTVLLEIVDINDNVPELVIQSLSLPVLEDSPLSTVIALISVSDRDSGVNGQVTCSLTPHVPFKLVSTFKNYYSLVLDSPLDRESVSAYELVVTARDGGSPSLWATASVSVEVADVNDNAPAFSQSEYTVFVKENNPPGCHIFTVSARDADAQENALVSYSLVERRVGERALSSYVSVHAESGKVYALQPLDHEELELLQFQVSARDAGVPPLGSNVTLQVFVLDENDNAPALLMPRVGGIGGAVSELVPRSVGAGHVVAKVRAVDADSGYNAWLSYELQPGTGGARIPFRVGLYTGEISTTRALDEVDAPRHRLLVLVKDHGEPSLTATATVLVSLVESGQAPKASSQASAGATGPEAALVDVNVYLIVAICAVSSLLVLTLLLYTALRCSAPPTEGDCGPGKPTLVCSSAVGSWSYSQQRQQRVCSGEGLPKTDLMAFSPSLPPCPISRDREEKQDVDVDLSAKPRQPNPDWRYSASLRAGMHSSVHLEEAGILRAGPGGPDQQWPTVSSATPEPEAGEVSPPVGAGVNSNSWTFKYGPGNPKQSGPGELPDKFIIPGSPAIISIRQEPTNSQIDKSDFITFGKKEETKKKKKKKKGNKTQEKKEKGNSTTDNSDQ

SEQ ID NO: 33103 - protein, 824 aa, Homo sapiens
  REGION 1..824: note = ENSP00000434086
MLFSWREDPGAQCLLLSLLLLAASEVGSGQLHYSVSEEAKHGTFVGRIAQDLGLELAELVPRLFRVASKRHGDLLEVNLQNGILFVNSRIDREELCGRSAECSIHLEVIVDRPLQVFHVEVEVKDINDNAPVFPMAVKNLFISESRQPGSRFSLEGASDADIGTNSLLTYSLDSTEYFTLDVKRNDEEIKSLGLVLKKNLNREDTPKHYLLITAIDGGKPELTGTTQLKITVLDVNDNAPAFERTIYKVRLLENAPNGTLVVTVNATDLDEGVNKDIAYSFNTDMSADILSKFHLDPVNGQISVKGNIDFEESKSYEIQVEATDKGNPPMSDHCTVLLEIVDINDNVPELVIQSLSLPVLEDSPLSTVIALISVSDRDSGVNGQVTCSLTPHVPFKLVSTFKNYYSLVLDSPLDRESVSAYELVVTARDGGSPSLWATASVSVEVADVNDNAPAFSQSEYTVFVKENNPPGCHIFTVSARDADAQENALVSYSLVERRVGERALSSYVSVHAESGKVYALQPLDHEELELLQFQVSARDAGVPPLGSNVTLQVFVLDENDNAPALLMPRVGGIGGAVSELVPRSVGAGHVVAKVRAVDADSGYNAWLSYELQPGTGGARIPFRVGLYTGEISTTRALDEVDAPRHRLLVLVKDHGEPSLTATATVLVSLVESGQAPKASSQASAGATGPEAALVDVNVYLIVAICAVSSLLVLTLLLYTALRCSAPPTEGDCGPGKPTLVCSSAVGSWSYSQQRQQRVCSGEGLPKTDLMAFSPSLPPCPISRDREEKQDVDVDLSAKVSNFYLFFPKCLCFSFLNVSTPLEIH

SEQ ID NO: 33104 - protein, 256 aa, Homo sapiens
  REGION 1..256: note = ENSP00000337500
MATQRKHLVKDFNPYITCYICKGYLIKPTTVTECLHTFCKTCIVQHFEDSNDCPRCGNQVHETNPLEMLRLDNTLEEIIFKLVPGLREQELERESEFWKKNKPQENGQDDTSKADKPKVDEEGDENEDDKDYHRSDPQIAICLDCLRNNGQSGDNVVKGLMKKFIRCSTRVTVGTIKKFLSLKLKLPSSYELDVLCNGEIMGKDHTMEFIYMTRWRLRGENFRCLNCSASQVCSQDGPLYQSYPMVLQYRPRIDFG

SEQ ID NO: 33105 - protein, 256 aa, Homo sapiens; identical to SEQ ID NO: 33104
  REGION 1..256: note = ENSP00000445704

SEQ ID NO: 33106 - protein, 256 aa, Homo sapiens; identical to SEQ ID NO: 33104
  REGION 1..256: note = ENSP00000479492

SEQ ID NO: 33107 - protein, 622 aa, Homo sapiens
  REGION 1..622: note = ENSP00000319814
MPPQLQNGLNLSAKVVQGSLDSLPQAVREFLENNAELCQPDHIHICDGSEEENGRLLGQMEEEGILRRLKKYDNCWLALTDPRDVARIESKTVIVTQEQRDTVPIPKTGLSQLGRWMSEEDFEKAFNARFPGCMKGRTMYVIPFSMGPLGSPLSKIGIELTDSPYVVASMRIMTRMGTPVLEAVGDGEFVKCLHSVGCPLPLQKPLVNNWPCNPELTLIAHLPDRREIISFGSGYGGNSLLGKKCFALRMASRLAKEEGWLAEHMLILGITNPEGEKKYLAAAFPSACGKTNLAMMNPSLPGWKVECVGDDIAWMKFDAQGHLRAINPENGFFGVAPGTSVKTNPNAIKTIQKNTIFTNVAETSDGGVYWEGIDEPLASGVTITSWKNKEWSSEDGEPCAHPNSRFCTPASQCPIIDAAWESPEGVPIEGIIFGGRRPAGVPLVYEALSWQHGVFVGAAMRSEATAAAEHKGKIIMHDPFAMRPFFGYNFGKYLAHWLSMAQHPAAKLPKIFHVNWFRKDKEGKFLWPGFGENSRVLEWMFNRIDGKASTKLTPIGYIPKEDALNLKGLGHINMMELFSISKEFWEKEVEDIEKYLEDQVNADLPCEIEREILALKQRISQM

SEQ ID NO: 33108 - protein, 120 aa, Homo sapiens
  REGION 1..120: note = ENSP00000472761
MAGSPDQEGFFNLLSHVQGDRMEGQRCSLQAGPGQTTKSQSDPTPEMDSLMDMLASTQGRRMDDQRVTVSSLPGFQPVGSKDGAQKRAGTLSPQPLLTPQDPTALGFRRNSSPQPPTQAP

SEQ ID NO: 33109 - protein, 136 aa, Homo sapiens
  REGION 1..136: note = ENSP00000310585
MMDQEEKTEEGSGPCAEAGSPDQEGFFNLLSHVQGDRMEGQRCSLQAGPGQTTKSQSDPTPEMDSLMDMLASTQGRRMDDQRVTVSSLPGFQPVGSKDGAQKRAGTLSPQPLLTPQDPTALGFRRNSSPQPPTQAP

SEQ ID NO: 33110 - protein, 62 aa, Homo sapiens
  REGION 1..62: note = ENSP00000329403
MSERQGAGATNGKDKTSGENDGQKKVQEEFDIDMDAPETERAAVAIQSQFRKFQKKKAGSQS

SEQ ID NO: 33111 - protein, 31 aa, Homo sapiens
  REGION 1..31: note = ENSP00000433172
MSERQGAGATNGKDKTSGENVGCPILFLTHS

SEQ ID NO: 33112 - protein, 77 aa, Homo sapiens
  REGION 1..77: note = ENSP00000452839
  VARIANT 1: note = Any amino acid
XGLPHKVCRRCDENCLSCAGSSRNCSRCKTGFTQLGTSCITNHTCSNGDIWQRLETFWVVTTGRMYSHPVGGGQECC

SEQ ID NO: 33113 - protein, 125 aa, Homo sapiens
  REGION 1..125: note = ENSP00000453771
AEGQWTLEIQDLPSQVRNPEKQGKLKEWSLILYGTAEHPYHTFSAHQSRSRMLELSAPELEPPKAALSPSQVEVPEDEEDYTAQSTPGSANILQTRDIWQRLETFWVVTTGRMYSHPVGGGQECC

SEQ ID NO: 33114 - protein, 969 aa, Homo sapiens
  REGION 1..969: note = ENSP00000482760
MPPRAPPAPGPRPPPRAAAATDTAAGAGGAGGAGGAGGPGFRPLAPRPWRWLLLLALPAACSAPPPRPVYTNHWAVQVLGGPAEADRVAAAHGYLNLGQIGNLEDYYHFYHSKTFKRSTLSSRGPHTFLRMDPQVKWLQQQEVKRRVKRQVRSDPQALYFNDPIWSNMWYLHCGDKNSRCRSEMNVQAAWKRGYTGKNVVVTILDDGIERNHPDLAPNYDSYASYDVNGNDYDPSPRYDASNENKHGTRCAGEVAASANNSYCIVGIAYNAKIGGIRMLDGDVTDVVEAKSLGIRPNYIDIYSASWGPDDDGKTVDGPGRLAKQAFEYGIKKGRQGLGSIFVWASGNGGREGDYCSCDGYTNSIYTISVSSATENGYKPWYLEECASTLATTYSSGAFYERKIVTTDLRQRCTDGHTGTSVSAPMVAGIIALALEANSQLTWRDVQHLLVKTSRPAHLKASDWKVNGAGHKVSHFYGFGLVDAEALVVEAKKWTAVPSQHMCVAASDKRPRSIPLVQVLRTTALTSACAEHSDQRVVYLEHVVVRTSISHPRRGDLQIYLVSPSGTKSQLLAKRLLDLSNEGFTNWEFMTVHCWGEKAEGQWTLEIQDLPSQVRNPEKQGKLKEWSLILYGTAEHPYHTFSAHQSRSRMLELSAPELEPPKAALSPSQVEVPEDEEDYTAQSTPGSANILQTSVCHPECGDKGCDGPNADQCLNCVHFSLGSVKTSRKCVSVCPLGYFGDTAARRCRRCHKGCETCSSRAATQCLSCRRGFYHHQEMNTCVTLCPAGFYADESQKNCLKCHPSCKKCVDEPEKCTVCKEGFSLARGSCIPDCEPGTYFDSELIRCGECHHTCGTCVGPGREECIHCAKNFHFHDWKCVPACGEGFYPEEMPGLPHKVCRRCDENCLSCAGSSRNCSRCKTGFTQLGTSCITNHTCSNADETFCEMVKSNRLCERKLFIQFCCRTCLLAG

SEQ ID NO: 33115 - protein, 797 aa, Homo sapiens
  REGION 1..797: note = ENSP00000381246
QIGNLEDYYHFYHSKTFKRSTLSSRGPHTFLRMDPQVKWLQQQEVKRRVKRQVRSDPQALYFNDPIWSNMWYLHCGDKNSRCRSEMNVQAAWKRGYTGKNVVVTILDDGIERNHPDLAPNYDSYASYDVNGNDYDPSPRYDASNENKHGTRCAGEVAASANNSYCIVGIAYNAKIGGIRMLDGDVTDVVEAKSLGIRPNYIDIYSASWGPDDDGKTVDGPGRLAKQAFEYGIKKGRQGLGSIFVWASGNGGREGDYCSCDGYTNSIYTISVSSATENGYKPWYLEECASTLATTYSSGAFYERKIVTTDLRQRCTDGHTGTSVSAPMVAGIIALALEAKSIPLVQVLRTTALTSACAEHSDQRVVYLEHVVVRTSISHPRRGDLQIYLVSPSGTKSQLLAKRLLDLSNEGFTNWEFMTVHCWGEKAEGQWTLEIQDLPSQVRNPEKQGKLKEWSLILYGTAEHPYHTFSAHQSRSRMLELSAPELEPPKAALSPSQVEVPEDEEDYTAQSTPGSANILQTSVCHPECGDKGCDGPNADQCLNCVHFSLGSVKTSRKCVSVCPLGYFGDTAARRCRRCHKGCETCSSRAATQCLSCRRGFYHHQEMNTCVTLCPAGFYADESQKNCLKCHPSCKKCVDEPEKCTVCKEGFSLARGSCIPDCEPGTYFDSELIRCGECHHTCGTCVGPGREECIHCAKNFHFHDWKCVPACGEGFYPEEMPGLPHKVCRRCDENCLSCAGSSRNCSRCKTGFTQLGTSCITNHTCSNADETFCEMVKSNRLCERKLFIQFCCRTCLLAG

SEQ ID NO: 33116 - protein, 956 aa, Homo sapiens
  REGION 1..956: note = ENSP00000479496
MPPRAPPAPGPRPPPRAAAATDTAAGAGGAGGAGGAGGPGFRPLAPRPWRWLLLLALPAACSAPPPRPVYTNHWAVQVLGGPAEADRVAAAHGYLNLGQIGNLEDYYHFYHSKTFKRSTLSSRGPHTFLRMDPQVKWLQQQEVKRRVKRQVRSDPQALYFNDPIWSNMWYLHCGDKNSRCRSEMNVQAAWKRGYTGKNVVVTILDDGIERNHPDLAPNYDSYASYDVNGNDYDPSPRYDASNENKHGTRCAGEVAASANNSYCIVGIAYNAKIGGIRMLDGDVTDVVEAKSLGIRPNYIDIYSASWGPDDDGKTVDGPGRLAKQAFEYGIKKGRQGLGSIFVWASGNGGREGDYCSCDGYTNSIYTISVSSATENGYKPWYLEECASTLATTYSSGAFYERKIVTTDLRQRCTDGHTGTSVSAPMVAGIIALALEANSQLTWRDVQHLLVKTSRPAHLKASDWKVNGAGHKVSHFYGFGLVDAEALVVEAKKWTAVPSQHMCVAASDKRPRSIPLVQVLRTTALTSACAEHSDQRVVYLEHVVVRTSISHPRRGDLQIYLVSPSGTKSQLLAKRLLDLSNEGFTNWEFMTVHCWGEKAEGQWTLEIQDLPSQVRNPEKQGKLKEWSLILYGTAEHPYHTFSAHQSRSRMLELSAPELEPPKAALSPSQVEVPEDEEDYTGVCHPECGDKGCDGPNADQCLNCVHFSLGSVKTSRKCVSVCPLGYFGDTAARRCRRCHKGCETCSSRAATQCLSCRRGFYHHQEMNTCVTLCPAGFYADESQKNCLKCHPSCKKCVDEPEKCTVCKEGFSLARGSCIPDCEPGTYFDSELIRCGECHHTCGTCVGPGREECIHCAKNFHFHDWKCVPACGEGFYPEEMPGLPHKVCRRCDENCLSCAGSSRNCSRCKTGFTQLGTSCITNHTCSNADETFCEMVKSNRLCERKLFIQFCCRTCLLAG

SEQ ID NO: 33117 - protein, 308 aa, Homo sapiens
  REGION 1..308: note = ENSP00000487813
MLELSAPELEPPKAALSPSQVEVPEDEEDYTGVCHPECGDKGCDGPNADQCLNCVHFSLGSVKTSRKCVSVCPLGYFGDTAARRCRRCHKGCETCSSRAATQCLSCRRGFYHHQEMNTCVTLCPAGFYADESQKNCLKCHPSCKKCVDEPEKCTVCKEGFSLARGSCIPDCEPGTYFDSELIRCGECHHTCGTCVGPGREECIHCAKNFHFHDWKCVPACGEGFYPEEMPGLPHKVCRRCDENCLSCAGSSRNCSRCKTGFTQLGTSCITNHTCSNADETFCEMVKSNRLCERKLFIQFCCRTCLLAG

SEQ ID NO: 33118 - protein, 975 aa, Homo sapiens
  REGION 1..975: note = ENSP00000481556
MPPRAPPAPGPRPPPRAAAATDTAAGAGGAGGAGGAGGPGFRPLAPRPWRWLLLLALPAACSAPPPRPVYTNHWAVQVLGGPAEADRVAAAHGYLNLGQIGNLEDYYHFYHSKTFKRSTLSSRGPHTFLRMDPQVKWLQQQEVKRRVKRQVRSDPQALYFNDPIWSNMWYLHCGDKNSRCRSEMNVQAAWKRGYTGKNVVVTILDDGIERNHPDLAPNYDSYASYDVNGNDYDPSPRYDASNENKHGTRCAGEVAASANNSYCIVGIAYNAKIGGIRMLDGDVTDVVEAKSLGIRPNYIDIYSASWGPDDDGKTVDGPGRLAKQAFEYGIKKGRQGLGSIFVWASGNGGREGDYCSCDGYTNSIYTISVSSATENGYKPWYLEECASTLATTYSSGAFYERKIVTTDLRQRCTDGHTGTSVSAPMVAGIIALALEANSQLTWRDVQHLLVKTSRPAHLKASDWKVNGAGHKVSHFYGFGLVDAEALVVEAKKWTAVPSQHMCVAASDKRPRSIPLVQVLRTTALTSACAEHSDQRVVYLEHVVVRTSISHPRRGDLQIYLVSPSGTKSQLLAKRLLDLSNEGFTNWEFMTVHCWGEKAEGQWTLEIQDLPSQVRNPEKQGKLKEWSLILYGTAEHPYHTFSAHQSRSRMLELSAPELEPPKAALSPSQVEVPEDEEDYTAQSTPGSANILQTSVCHPECGDKGCDGPNADQCLNCVHFSLGSVKTSRKCVSVCPLGYFGDTAARRCRRCHKGCETCSSRAATQCLSCRRGFYHHQEMNTCVTLCPAGFYADESQKNCLKCHPSCKKCVDEPEKCTVCKEGFSLARGSCIPDCEPGTYFDSELIRCGECHHTCGTCVGPGREECIHCAKNFHFHDWKCVPACGEGFYPEEMPGLPHKVCRRYGPPGGERQAAVSSKGVPGGQSLAASSPGAGEGMLHHPTVDRSPFTELLRGLRPFVHWMHICWVPAVGRHRAAAG

SEQ ID NO: 33119 - protein, 962 aa, Homo sapiens
  REGION 1..962: note = ENSP00000482831
MPPRAPPAPGPRPPPRAAAATDTAAGAGGAGGAGGAGGPGFRPLAPRPWRWLLLLALPAACSAPPPRPVYTNHWAVQVLGGPAEADRVAAAHGYLNLGQIGNLEDYYHFYHSKTFKRSTLSSRGPHTFLRMDPQVKWLQQQEVKRRVKRQVRSDPQALYFNDPIWSNMWYLHCGDKNSRCRSEMNVQAAWKRGYTGKNVVVTILDDGIERNHPDLAPNYDSYASYDVNGNDYDPSPRYDASNENKHGTRCAGEVAASANNSYCIVGIAYNAKIGGIRMLDGDVTDVVEAKSLGIRPNYIDIYSASWGPDDDGKTVDGPGRLAKQAFEYGIKKGRQGLGSIFVWASGNGGREGDYCSCDGYTNSIYTISVSSATENGYKPWYLEECASTLATTYSSGAFYERKIVTTDLRQRCTDGHTGTSVSAPMVAGIIALALEANSQLTWRDVQHLLVKTSRPAHLKASDWKVNGAGHKVSHFYGFGLVDAEALVVEAKKWTAVPSQHMCVAASDKRPRSIPLVQVLRTTALTSACAEHSDQRVVYLEHVVVRTSISHPRRGDLQIYLVSPSGTKSQLLAKRLLDLSNEGFTNWEFMTVHCWGEKAEGQWTLEIQDLPSQVRNPEKQGKLKEWSLILYGTAEHPYHTFSAHQSRSRMLELSAPELEPPKAALSPSQVEVPEDEEDYTGVCHPECGDKGCDGPNADQCLNCVHFSLGSVKTSRKCVSVCPLGYFGDTAARRCRRCHKGCETCSSRAATQCLSCRRGFYHHQEMNTCVTLCPAGFYADESQKNCLKCHPSCKKCVDEPEKCTVCKEGFSLARGSCIPDCEPGTYFDSELIRCGECHHTCGTCVGPGREECIHCAKNFHFHDWKCVPACGEGFYPEEMPGLPHKVCRRYGPPGGERQAAVSSKGVPGGQSLAASSPGAGEGMLHHPTVDRSPFTELLRGLRPFVHWMHICWVPAVGRHRAAAG

SEQ ID NO: 33120 - protein, 126 aa, Homo sapiens
  REGION 1..126: note = ENSP00000453155
  VARIANT 1: note = Any amino acid
XALGPAGGLLGARGGSHLHLTPTPRRPPDLPGFSLGNQVSTSGKEVEVPEDEEDYTGVCHPECGDKGCDGPNADQCLNCVHFSLGSVKTSRKCVSVCPLGYFGDTAARRCRRCHKGCETCSSRAAT

SEQ ID NO: 33121 - protein, 652 aa, Homo sapiens
  REGION 1..652: note = ENSP00000477768
MPPRAPPAPGPRPPPRAAAATDTAAGAGGAGGAGGAGGPGFRPLAPRPWRWLLLLALPAACSAPPPRPVYTNHWAVQVLGGPAEADRVAAAHGYLNLGQIGNLEDYYHFYHSKTFKRSTLSSRGPHTFLRMDPQVKWLQQQEVKRRVKRQVRSDPQALYFNDPIWSNMWYLHCGDKNSRCRSEMNVQAAWKRGYTGKNVVVTILDDGIERNHPDLAPNYDSYASYDVNGNDYDPSPRYDASNENKHGTRCAGEVAASANNSYCIVGIAYNAKIGGIRMLDGDVTDVVEAKSLGIRPNYIDIYSASWGPDDDGKTVDGPGRLAKQAFEYGIKKGRQGLGSIFVWASGNGGREGDYCSCDGYTNSIYTISVSSATENGYKPWYLEECASTLATTYSSGAFYERKIVTTDLRQRCTDGHTGTSVSAPMVAGIIALALEANSQLTWRDVQHLLVKTSRPAHLKASDWKVNGAGHKVSHFYGFGLVDAEALVVEAKKWTAVPSQHMCVAASDKRPRSIPLVQVLRTTALTSACAEHSDQRVVYLEHVVVRTSISHPRRGDLQIYLVSPSGTKSQLLAKRLLDLSNEGFTNWEFMTVHCWGEKAEGQWTLEIQDLPSQVRNPEKQGDLETPVANQLTTEEREPGLKHVFRWQIEQELW

SEQ ID NO: 33122 - protein, 623 aa, Homo sapiens
  REGION 1..623: note = ENSP00000478081
MPPRAPPAPGPRPPPRAAAATDTAAGAGGAGGAGGAGGPGFRPLAPRPWRWLLLLALPAACSAPPPRPVYTNHWAVQVLGGPAEADRVAAAHGYLNLGQIGNLEDYYHFYHSKTFKRSTLSSRGPHTFLRMDPQVKWLQQQEVKRRVKRQVRSDPQALYFNDPIWSNMWYLHCGDKNSRCRSEMNVQAAWKRGYTGKNVVVTILDDGIERNHPDLAPNYDSYASYDVNGNDYDPSPRYDASNENKHGTRCAGEVAASANNSYCIVGIAYNAKIGGIRMLDGDVTDVVEAKSLGIRPNYIDIYSASWGPDDDGKTVDGPGRLAKQAFEYGIKKGRQGLGSIFVWASGNGGREGDYCSCDGYTNSIYTISVSSATENGYKPWYLEECASTLATTYSSGAFYERKIVTTDLRQRCTDGHTGTSVSAPMVAGIIALALEANSQLTWRDVQHLLVKTSRPAHLKASDWKVNGAGHKVSHFYGFGLVDAEALVVEAKKWTAVPSQHMCVAASDKRPRSIPLVQVLRTTALTSACAEHSDQRVVYLEHVVVRTSISHPRRGDLQIYLVSPSGTKSQLLAKRLLDLSNEGFTNWEFMTVHCWGEKAEGQWTLEIQDLPSQVRNPEKQGNLD

SEQ ID NO: 33123 - protein, 142 aa, Homo sapiens
  REGION 1..142: note = ENSP00000483048
  VARIANT 1: note = Any amino acid
XLTSACAEHSDQRVVYLEHVVVRTSISHPRRGDLQIYLVSPSGTKSQLLAKRLLDLSNEGFTNWEFMTVHCWGEKAEGQWTLEIQDLPSQVRNPEKQGDLETPVANQLTTEERFVSTLSILFHWSVYLSWSQYHIVLITVAL

SEQ ID NO: 33124 - protein, 345 aa, Homo sapiens
  REGION 1..345: note = ENSP00000452997
  VARIANT 1: note = Any amino acid
XGGPAEADRVAAAHGYLNLGQIGNLEDYYHFYHSKTFKRSTLSSRGPHTFLRMDPQVKWLQQQEVKRRVKRQVRSDPQALYFNDPIWSNMWYLDSYASYDVNGNDYDPSPRYDASNENKHGTRCAGEVAASANNSYCIVGIAYNAKIGGIRMLDGDVTDVVEAKSLGIRPNYIDIYSASWGPDDDGKTVDGPGRLAKQAFEYGIKKGRQGLGSIFVWASGNGGREGDYCSCDGYTNSIYTISVSSATENGYKPWYLEECASTLATTYSSGAFYERKIVTTDLRQRCTDGHTGTSVSAPMVAGIIALALEANSQLTWRDVQHLLVKTSRPAHLKASDWKVNGAGHK

SEQ ID NO: 33125 - protein, 664 aa, Homo sapiens
  REGION 1..664: note = ENSP00000332052
MPPRAPPAPGPRPPPRAAAATDTAAGAGGAGGAGGAGGPGFRPLAPRPWRWLLLLALPAACSAPPPRPVYTNHWAVQVLGGPAEADRVAAAHGYLNLGQIGNLEDYYHFYHSKTFKRSTLSSRGPHTFLRMDPQVKWLQQQEVKRRVKRQVRSDPQALYFNDPIWSNMWYLHCGDKNSRCRSEMNVQAAWKRGYTGKNVVVTILDDGIERNHPDLAPNYDSYASYDVNGNDYDPSPRYDASNENKHGTRCAGEVAASANNSYCIVGIAYNAKIGGIRMLDGDVTDVVEAKSLGIRPNYIDIYSASWGPDDDGKTVDGPGRLAKQAFEYGIKKGRQGLGSIFVWASGNGGREGDYCSCDGYTNSIYTISVSSATENGYKPWYLEECASTLATTYSSGAFYERKIVTTDLRQRCTDGHTGTSVSAPMVAGIIALALEANSQLTWRDVQHLLVKTSRPAHLKASDWKVNGAGHKVSHFYGFGLVDAEALVVEAKKWTAVPSQHMCVAASDKRPRSIPLVQVLRTTALTSACAEHSDQRVVYLEHVVVRTSISHPRRGDLQIYLVSPSGTKSQLLAKRLLDLSNEGFTNWEFMTVHCWGEKAEGQWTLEIQDLPSQVRNPEKQGDLETPVANQLTTEERFVSTLSILFHWSVYLSWSQYHIVLITVAL

SEQ ID NO: 33126 - protein, 351 aa, Homo sapiens
  REGION 1..351: note = ENSP00000368440
MVGHQECIMEEDNRAPQLWRKTLTAPAPFADETNCQCQAPHEKLTIAQARLGTPADRPVRVYADGIFDLFHSGHARALMQAKTLFPNSYLLVGVCSDDLTHKFKGFTVMNEAERYEALRHCRYVDEVIRDAPWTLTPEFLEKHKIDFVAHDDIPYSSAGSDDVYKHIKEAGMFVPTQRTEGISTSDIITRIVRDYDVYARRNLQRGYTAKELNVSFINEKRYRFQNQVDKMKEKVKNVEERSKEFVNRVEEKSHDLIQKWEEKSREFIGNFLELFGPDGAWKQMFQERSSRMLQALSPKQSPVSSPTRSRSPSRSPSPTFSWLPLKTSPPSSPKAASASISSMSEGDEDEK

SEQ ID NO: 33127 - protein, 330 aa, Homo sapiens
  REGION 1..330: note = ENSP00000349211
MPVVTTDAESETGIPKSLSNEPPSETMEEIEHTCPQPRLTLTAPAPFADETNCQCQAPHEKLTIAQARLGTPADRPVRVYADGIFDLFHSGHARALMQAKTLFPNSYLLVGVCSDDLTHKFKGFTVMNEAERYEALRHCRYVDEVIRDAPWTLTPEFLEKHKIDFVAHDDIPYSSAGSDDVYKHIKEAGMFVPTQRTEGISTSDIITRIVRDYDVYARRNLQRGYTAKELNVSFINEKRYRFQNQVDKMKEKVKNVEERSKEFVNRVEEKSHDLIQKWEEKSREFIGNFLELFGPDGAWKQMFQERSSRMLQALSPKQSPLKSWARCRDF

SEQ ID NO: 33128 - protein, 369 aa, Homo sapiens
  REGION 1..369: note = ENSP00000368439
MPVVTTDAESETGIPKSLSNEPPSETMEEIEHTCPQPRLTLTAPAPFADETNCQCQAPHEKLTIAQARLGTPADRPVRVYADGIFDLFHSGHARALMQAKTLFPNSYLLVGVCSDDLTHKFKGFTVMNEAERYEALRHCRYVDEVIRDAPWTLTPEFLEKHKIDFVAHDDIPYSSAGSDDVYKHIKEAGMFVPTQRTEGISTSDIITRIVRDYDVYARRNLQRGYTAKELNVSFINEKRYRFQNQVDKMKEKVKNVEERSKEFVNRVEEKSHDLIQKWEEKSREFIGNFLELFGPDGAWKQMFQERSSRMLQALSPKQSPVSSPTRSRSPSRSPSPTFSWLPLKTSPPSSPKAASASISSMSEGDEDEK

SEQ ID NO: 33129 - protein, 177 aa, Homo sapiens
  REGION 1..177: note = ENSP00000436562
MEEIEHTCPQPRLTLTAPAPFADETNCQCQAPHEKLTIAQARLGTPADRPVRVYADGIFDLFHSGHARALMQAKTLFPNSYLLVGVCSDDLTHKFKGFTVMNEAERYEALRHCRYVDEVIRDAPWTLTPEFLEKHKGCSFQRREQKASQHRTSLPELFVTMMFMPDVTSREGIQPRN

SEQ ID NO: 33130 - protein, 246 aa, Homo sapiens
  REGION 1..246: note = ENSP00000375855
MEEAKSQSLEEDFEGQATHTGPKGVINDWRKFKLESQDSDSIPPSKKEILRQMSSPQSRNGKDSKERVSRKMSIQEYELIHKEKEDENCLRKYRRQCMQDMHQKLSFGPRYGFVYELETGKQFLETIEKELKITTIVVHIYEDGIKGCDALNSSLTCLAAEYPIVKFCKIKASNTGAGDRFSLDVLPTLLIYKGGELISNFISVAEQFAEEFFAGDVESFLNEYGLLPEREVHVLEHTKIEEEDVE

SEQ ID NO: 33131 - protein, 194 aa, Homo sapiens
  REGION 1..194: note = ENSP00000422775
MSSPQSRNGKDSKERVSRKMSIQEYELIHKEKEDENCLRKYRRQCMQDMHQKLSFGPRYGFVYELETGKQFLETIEKELKITTIVVHIYEDGIKGCDALNSSLTCLAAEYPIVKFCKIKASNTGAGDRFSLDVLPTLLIYKGGELISNFISVAEQFAEEFFAGDVESFLNEYGLLPEREVHVLEHTKIEEEDVE

SEQ ID NO: 33132 - protein, 545 aa, Homo sapiens
  REGION 1..545: note = ENSP00000410309
MGSSATEIEELENTTFKYLTGEQTEKMWQRLKGILRCLVKQLERGDVNVVDLKKNIEYAASVLEAVYIDETRRLLDTEDELSDIQTDSVPSEVRDWLASTFTRKMGMTKKKPEEKPKFRSIVHAVQAGIFVERMYRKTYHMVGLAYPAAVIVTLKDVDKWSFDVFALNEASGEHSLKFMIYELFTRYDLINRFKIPVSCLITFAEALEVGYSKYKNPYHNLIHAADVTQTVHYIMLHTGIMHWLTELEILAMVFAAAIHDYEHTGTTNNFHIQTRSDVAILYNDRSVLENHHVSAAYRLMQEEEMNILINLSKDDWRDLRNLVIEMVLSTDMSGHFQQIKNIRNSLQQPEGIDRAKTMSLILHAADISHPAKSWKLHYRWTMALMEEFFLQGDKEAELGLPFSPLCDRKSTMVAQSQIGFIDFIVEPTFSLLTDSTEKIVIPLIEEASKAETSSYVASSSTTIVGLHIADALRRSNTKGSMSDGSYSPDYSLAAVDLKSFKNNLVDIIQQNKERWKELAAQGESDLHKNSEDLVNAEEKHDETHS

SEQ ID NO: 33133 - protein, 529 aa, Homo sapiens
  REGION 1..529: note = ENSP00000386767
MDDHVTIRKKHLQRPIFRLRCLVKQLERGDVNVVDLKKNIEYAASVLEAVYIDETRRLLDTEDELSDIQTDSVPSEVRDWLASTFTRKMGMTKKKPEEKPKFRSIVHAVQAGIFVERMYRKTYHMVGLAYPAAVIVTLKDVDKWSFDVFALNEASGEHSLKFMIYELFTRYDLINRFKIPVSCLITFAEALEVGYSKYKNPYHNLIHAADVTQTVHYIMLHTGIMHWLTELEILAMVFAAAIHDYEHTGTTNNFHIQTRSDVAILYNDRSVLENHHVSAAYRLMQEEEMNILINLSKDDWRDLRNLVIEMVLSTDMSGHFQQIKNIRNSLQQPEGIDRAKTMSLILHAADISHPAKSWKLHYRWTMALMEEFFLQGDKEAELGLPFSPLCDRKSTMVAQSQIGFIDFIVEPTFSLLTDSTEKIVIPLIEEASKAETSSYVASSSTTIVGLHIADALRRSNTKGSMSDGSYSPDYSLAAVDLKSFKNNLVDIIQQNKERWKELAAQGESDLHKNSEDLVNAEEKHDETHS

SEQ ID NO: 33134 - protein, 535 aa, Homo sapiens
  REGION 1..535: note = ENSP00000387037
MGSSATEIEELENTTFKYLTGEQTEKMWQRLKGILRCLVKQLERGDVNVVDLKKNIEYAASVLEAVYIDETRRLLDTEDELSDIQTDSVPSEVRDWLASTFTRKMGMTKKKPEEKPKFRSIVHAVQAGIFVERMYRKTYHMVGLAYPAAVIVTLKDVDKWSFDVFALNEASGEHSLKFMIYELFTRYDLINRFKIPVSCLITFAEALEVGYSKYKNPYHNLIHAADVTQTVHYIMLHTGIMHWLTELEILAMVFAAAIHDYEHTGTTNNFHIQTRSDVAILYNDRSVLENHHVSAAYRLMQEEEMNILINLSKDDWRDLRNLVIEMVLSTDMSGHFQQIKNIRNSLQQPEGIDRAKTMSLILHAADISHPAKSWKLHYRWTMALMEEFFLQGDKEAELGLPFSPLCDRKSTMVAQSQIGFIDFIVEPTFSLLTDSTEKIVIPLIEEASKAETSSYVASSSTTIVGLHIADALRRSNTKGSMSDGSYSPDYSLAAVDLKSFKNNLVDIIQQNKERWKELAAQEARTSSQKCEFIHQ

SEQ ID NO: 33135 - protein, 519 aa, Homo sapiens
  REGION 1..519: note = ENSP00000309269
MDDHVTIRKKHLQRPIFRLRCLVKQLERGDVNVVDLKKNIEYAASVLEAVYIDETRRLLDTEDELSDIQTDSVPSEVRDWLASTFTRKMGMTKKKPEEKPKFRSIVHAVQAGIFVERMYRKTYHMVGLAYPAAVIVTLKDVDKWSFDVFALNEASGEHSLKFMIYELFTRYDLINRFKIPVSCLITFAEALEVGYSKYKNPYHNLIHAADVTQTVHYIMLHTGIMHWLTELEILAMVFAAAIHDYEHTGTTNNFHIQTRSDVAILYNDRSVLENHHVSAAYRLMQEEEMNILINLSKDDWRDLRNLVIEMVLSTDMSGHFQQIKNIRNSLQQPEGIDRAKTMSLILHAADISHPAKSWKLHYRWTMALMEEFFLQGDKEAELGLPFSPLCDRKSTMVAQSQIGFIDFIVEPTFSLLTDSTEKIVIPLIEEASKAETSSYVASSSTTIVGLHIADALRRSNTKGSMSDGSYSPDYSLAAVDLKSFKNNLVDIIQQNKERWKELAAQEARTSSQKCEFIHQ

SEQ ID NO: 33136 - protein, 501 aa, Homo sapiens
  REGION 1..501: note = ENSP00000350858
MGKKINKLFCFNFLVQCFRGKSKPSKCQIRKKVKNHIERLLDTEDELSDIQTDSVPSEVRDWLASTFTRKMGMTKKKPEEKPKFRSIVHAVQAGIFVERMYRKTYHMVGLAYPAAVIVTLKDVDKWSFDVFALNEASGEHSLKFMIYELFTRYDLINRFKIPVSCLITFAEALEVGYSKYKNPYHNLIHAADVTQTVHYIMLHTGIMHWLTELEILAMVFAAAIHDYEHTGTTNNFHIQTRSDVAILYNDRSVLENHHVSAAYRLMQEEEMNILINLSKDDWRDLRNLVIEMVLSTDMSGHFQQIKNIRNSLQQPEGIDRAKTMSLILHAADISHPAKSWKLHYRWTMALMEEFFLQGDKEAELGLPFSPLCDRKSTMVAQSQIGFIDFIVEPTFSLLTDSTEKIVIPLIEEASKAETSSYVASSSTTIVGLHIADALRRSNTKGSMSDGSYSPDYSLAAVDLKSFKNNLVDIIQQNKERWKELAAQEARTSSQKCEFIHQ

SEQ ID NO: 33137 - protein, 545 aa, Homo sapiens; identical to SEQ ID NO: 33132
  REGION 1..545: note = ENSP00000410309

SEQ ID NO: 33138 - protein, 529 aa, Homo sapiens; identical to SEQ ID NO: 33133
  REGION 1..529: note = ENSP00000386767

SEQ ID NO: 33139 - protein, 535 aa, Homo sapiens; identical to SEQ ID NO: 33134
  REGION 1..535: note = ENSP00000387037

SEQ ID NO: 33140 - protein, 519 aa, Homo sapiens; identical to SEQ ID NO: 33135
  REGION 1..519: note = ENSP00000309269

SEQ ID NO: 33141 - protein, 501 aa, Homo sapiens; identical to SEQ ID NO: 33136
  REGION 1..501: note = ENSP00000350858

SEQ ID NO: 33142 - protein, 536 aa, Homo sapiens
  REGION 1..536: note = ENSP00000243052
MELSPRSPPEMLEESDCPSPLELKSAPSKKMWIKLRSLLRYMVKQLENGEINIEELKKNLEYTASLLEAVYIDETRQILDTEDELQELRSDAVPSEVRDWLASTFTQQARAKGRRAEEKPKFRSIVHAVQAGIFVERMFRRTYTSVGPTYSTAVLNCLKNLDLWCFDVFSLNQAADDHALRTIVFELLTRHNLISRFKIPTVFLMSFLDALETGYGKYKNPYHNQIHAADVTQTVHCFLLRTGMVHCLSEIELLAIIFAAAIHDYEHTGTTNSFHIQTKSECAIVYNDRSVLENHHISSVFRLMQDDEMNIFINLTKDEFVELRALVIEMVLATDMSCHFQQVKTMKTALQQLERIDKPKALSLLLHAADISHPTKQWLVHSRWTKALMEEFFRQGDKEAELGLPFSPLCDRTSTLVAQSQIGFIDFIVEPTFSVLTDVAEKSVQPLADEDSKSKNQPSFQWRQPSLDVEVGDPNPDVVSFRSTWVKRIQENKQKWKERAASGITNQMSIDELSPCEEEAPPSPAEDEHNQNGNLD

SEQ ID NO: 33143 - protein, 50 aa, Homo sapiens
  REGION 1..50: note = ENSP00000478185
MELSPRSPPEMLEESDCPSPLELKSAPSKKMWIKLRSLPHGVIFYGSYQF

SEQ ID NO: 33144 - protein, 191 aa, Homo sapiens
  REGION 1..191: note = ENSP00000447354
MELSPRSPPEMLEESDCPSPLELKSAPSKKMWIKLRSLLRYMVKQLENGEINIEELKKNLEYTASLLEAVYIDETRVSRLWKHLLSFLCDSPSGVSGKSWTRRTSCRSCGQMPCLRRCGTGWPPPSPSRPGPKAAEQRRSPSSEALCTLCRLGSSWNGCSGEHTPLWAPLTLLRFSTVSRTWISGALMSFP

SEQ ID NO: 33145 - protein, 495 aa, Homo sapiens
  REGION 1..495: note = ENSP00000442559
MVKQLENGEINIEELKKNLEYTASLLEAVYIDETRQILDTEDELQELRSDAVPSEVRDWLASTFTQQARAKGRRAEEKPKFRSIVHAVQAGIFVERMFRRTYTSVGPTYSTAVLNCLKNLDLWCFDVFSLNQAADDHALRTIVFELLTRHNLISRFKIPTVFLMSFLDALETGYGKYKNPYHNQIHAADVTQTVHCFLLRTGMVHCLSEIELLAIIFAAAIHDYEHTGTTNSFHIQTKSECAIVYNDRSVLENHHISSVFRLMQDDEMNIFINLTKDEFVELRALVIEMVLATDMSCHFQQVKTMKTALQQLERIDKPKALSLLLHAADISHPTKQWLVHSRWTKALMEEFFRQGDKEAELGLPFSPLCDRTSTLVAQSQIGFIDFIVEPTFSVLTDVAEKSVQPLADEDSKSKNQPSFQWRQPSLDVEVGDPNPDVVSFRSTWVKRIQENKQKWKERAASGITNQMSIDELSPCEEEAPPSPAEDEHNQNGNLD

SEQ ID NO: 33146 - protein, 516 aa, Homo sapiens
  REGION 1..516: note = ENSP00000448519
MANPVPVQRSHLQGPILRLRYMVKQLENGEINIEELKKNLEYTASLLEAVYIDETRQILDTEDELQELRSDAVPSEVRDWLASTFTQQARAKGRRAEEKPKFRSIVHAVQAGIFVERMFRRTYTSVGPTYSTAVLNCLKNLDLWCFDVFSLNQAADDHALRTIVFELLTRHNLISRFKIPTVFLMSFLDALETGYGKYKNPYHNQIHAADVTQTVHCFLLRTGMVHCLSEIELLAIIFAAAIHDYEHTGTTNSFHIQTKSECAIVYNDRSVLENHHISSVFRLMQDDEMNIFINLTKDEFVELRALVIEMVLATDMSCHFQQVKTMKTALQQLERIDKPKALSLLLHAADISHPTKQWLVHSRWTKALMEEFFRQGDKEAELGLPFSPLCDRTSTLVAQSQIGFIDFIVEPTFSVLTDVAEKSVQPLADEDSKSKNQPSFQWRQPSLDVEVGDPNPDVVSFRSTWVKRIQENKQKWKERAASGITNQMSIDELSPCEEEAPPSPAEDEHNQNGNLD

SEQ ID NO: 33147 - protein, 769 aa, Homo sapiens
  REGION 1..769: note = ENSP00000379496
MTDAGNRKEGFKKCRSATFSIDGYSFTIVANEAGDKNARPLARFSRSKSQNCLWNSLIDGLTGNVKEKPRPTIVHDPRPPEEILADELPQLDSPEVLVKTSFRLRSLVKQLERGEASVVDLKKNLEYAATVLESVYIDETRRLLDTEDELSDIQSDAVPSEVRDWLASTFTRQMGMMLRRSDEKPRFKSIVHAVQAGIFVERMYRRTSNMVGLSYPPAVIEALKDVDKWSFDVFSLNEASGDHALKFIFYELLTRYDLISRFKIPISALVSFVEALEVGYSKHKNPYHNLMHAADVTQTVHYLLYKTGVANWLTELEIFAIIFSAAIHDYEHTGTTNNFHIQTRSDPAILYNDRSVLENHHLSAAYRLLQDDEEMNILINLSKDDWREFRTLVIEMVMATDMSCHFQQIKAMKTALQQPEAIEKPKALSLMLHTADISHPAKAWDLHHRWTMSLLEEFFRQGDREAELGLPFSPLCDRKSTMVAQSQVGFIDFIVEPTFTVLTDMTEKIVSPLIDETSQTGGTGQRRSSLNSISSSDAKRSGVKTSGSEGSAPINNSVISVDYKSFKATWTEVVHINRERWRAKVPKEEKAKKEAEEKARLAAEEQQKEMEAKSQAEEGASGKAEKKTSGETKNQVNGTRANKSDNPRGKNSKAEKSSGEQQQNGDFKDGKNKTDKKDHSNIGNDSKKTDGTKQRSHGSPAPSTSSTCRLTLPVIKPPLRHFKRPAYASSSYAPSVSKKTDEHPARYKMLDQRIKMKKIQNISHNWNRK

SEQ ID NO: 33148 - protein, 709 aa, Homo sapiens
  REGION 1..709: note = ENSP00000379494
MESPTKEIEEFESNSLKYLQPEQIEKIWLRLRGLRKYKKTSQRLRSLVKQLERGEASVVDLKKNLEYAATVLESVYIDETRRLLDTEDELSDIQSDAVPSEVRDWLASTFTRQMGMMLRRSDEKPRFKSIVHAVQAGIFVERMYRRTSNMVGLSYPPAVIEALKDVDKWSFDVFSLNEASGDHALKFIFYELLTRYDLISRFKIPISALVSFVEALEVGYSKHKNPYHNLMHAADVTQTVHYLLYKTGVANWLTELEIFAIIFSAAIHDYEHTGTTNNFHIQTRSDPAILYNDRSVLENHHLSAAYRLLQDDEEMNILINLSKDDWREFRTLVIEMVMATDMSCHFQQIKAMKTALQQPEAIEKPKALSLMLHTADISHPAKAWDLHHRWTMSLLEEFFRQGDREAELGLPFSPLCDRKSTMVAQSQVGFIDFIVEPTFTVLTDMTEKIVSPLIDETSQTGGTGQRRSSLNSISSSDAKRSGVKTSGSEGSAPINNSVISVDYKSFKATWTEVVHINRERWRAKVPKEEKAKKEAEEKARLAAEEQQKEMEAKSQAEEGASGKAEKKTSGETKNQVNGTRANKSDNPRGKNSKAEKSSGEQQQNGDFKDGKNKTDKKDHSNIGNDSKKTDGTKQRSHGSPAPSTSSTCRLTLPVIKPPLRHFKRPAYASSSYAPSVSKKTDEHPARYKMLDQRIKMKKIQNISHNWNRK

SEQ ID NO: 33149 - protein, 709 aa, Homo sapiens; identical to SEQ ID NO: 33148
  REGION 1..709: note = ENSP00000318105

SEQ ID NO: 33150 - protein, 634 aa, Homo sapiens
  REGION 1..634: note = ENSP00000379487
MESPTKEIEEFESNSLKYLQPEQIEKIWLRLRGLRKYKKTSQRLRSLVKQLERGEASVVDLKKNLEYAATVLESVYIDETRRLLDTEDELSDIQSDAVPSEVRDWLASTFTRQMGMMLRRSDEKPRFKSIVHAVQAGIFVERMYRRTSNMVGLSYPPAVIEALKDVDKWSFDVFSLNEASGDHALKFIFYELLTRYDLISRFKIPISALVSFVEALEVGYSKHKNPYHNLMHAADVTQTVHYLLYKTGVANWLTELEIFAIIFSAAIHDYEHTGTTNNFHIQTRSDPAILYNDRSVLENHHLSAAYRLLQDDEEMNILINLSKDDWREFRTLVIEMVMATDMSCHFQQIKAMKTALQQPEAIEKPKALSLMLHTADISHPAKAWDLHHRWTMSLLEEFFRQGDREAELGLPFSPLCDRKSTMVAQSQVGFIDFIVEPTFTVLTDMTEKIVSPLIDETSQTGGTGQRRSSLNSISSSDAKRSGVKTSGSEGSAPINNSVISVDYKSFKATWTEVVHINRERWRAKVPKEEKAKKEAEEKARLAAEEQQKEMEAKSQAEEGASGKAEKKTSGETKNQVNGTRANKSDNPRGKNSKAEKSSGEQQQNGDFKDGKNKTDKKDHSNIGNDSKKTDDSQE

SEQ ID NO: 33151 - protein, 634 aa, Homo sapiens; identical to SEQ ID NO: 33150
  REGION 1..634: note = ENSP00000379485

SEQ ID NO: 33152 - protein, 46 aa, Homo sapiens
  REGION 1..46: note = ENSP00000379492
MESPTKEIEEFESNSLKYLQPEQIEKIWLRLRGLRKYKKTSQRLRS

SEQ ID NO: 33153 - protein, 1141 aa, Homo sapiens
  REGION 1..1141: note = ENSP00000351957
MAVPGDAARVRDKPVHSGVSQAPTAGRDCHHRADPASPRDSGCRGCWGDLVLQPLRSSRKLSSALCAGSLSFLLALLVRLVRGEVGCDLEQCKEAAAAEEEEAAPGAEGGVFPGPRGGAPGGGARLSPWLQPSALLFSLLCAFFWMGLYLLRAGVRLPLAVALLAACCGGEALVQIGLGVGEDHLLSLPAAGVVLSCLAAATWLVLRLRLGVLMIALTSAVRTVSLISLERFKVAWRPYLAYLAGVLGILLARYVEQILPQSAEAAPREHLGSQLIAGTKEDIPVFKRRRRSSSVVSAEMSGCSSKSHRRTSLPCIPREQLMGHSEWDHKRGPRGSQSSGTSITVDIAVMGEAHGLITDLLADPSLPPNVCTSLRAVSNLLSTQLTFQAIHKPRVNPVTSLSENYTCSDSEESSEKDKLAIPKRLRRSLPPGLLRRVSSTWTTTTSATGLPTLEPAPVRRDRSTSIKLQEAPSSSPDSWNNPVMMTLTKSRSFTSSYAISAANHVKAKKQSRPGALAKISPLSSPCSSPLQGTPASSLVSKISAVQFPESADTTAKQSLGSHRALTYTQSAPDLSPQILTPPVICSSCGRPYSQGNPADEPLERSGVATRTPSRTDDTAQVTSDYETNNNSDSSDIVQNEDETECLREPLRKASACSTYAPETMMFLDKPILAPEPLVMDNLDSIMEQLNTWNFPIFDLVENIGRKCGRILSQVSYRLFEDMGLFEAFKIPIREFMNYFHALEIGYRDIPYHNRIHATDVLHAVWYLTTQPIPGLSTVINDHGSTSDSDSDSGFTHGHMGYVFSKTYNVTDDKYGCLSGNIPALELMALYVAAAMHDYDHPGRTNAFLVATSAPQAVLYNDRSVLENHHAAAAWNLFMSRPEYNFLINLDHVEFKHFRFLVIEAILATDLKKHFDFVAKFNGKVNDDVGIDWTNENDRLLVCQMCIKLADINGPAKCKELHLQWTDGIVNEFYEQGDEEASLGLPISPFMDRSAPQLANLQESFISHIVGPLCNSYDSAGLMPGKWVEDSDESGDTDDPEEEEEEAPAPNEEETCENNESPKKKTFKRRKIYCQITQHLLQNHKMWKKVIEEEQRLAGIENQSLDQTPQSHSSEQIQAIKEEEEEKGKPRGEEIPTQKPDQ

SEQ ID NO: 33154 - protein, 1112 aa, Homo sapiens
  REGION 1..1112: note = ENSP00000282096
MRRDERDAKAMRSLQPPDGAGSPPESLRNGYVKSCVSPLRQDPPRGFFFHLCRFCNVELRPPPASPQQPRRCSPFCRARLSLGALAAFVLALLLGAEPESWAAGAAWLRTLLSVCSHSLSPLFSIACAFFFLTCFLTRTKRGPGPGRSCGSWWLLALPACCYLGDFLVWQWWSWPWGDGDAGSAAPHTPPEAAAGRLLLVLSCVGLLLTLAHPLRLRHCVLVLLLASFVWWVSFTSLGSLPSALRPLLSGLVGGAGCLLALGLDHFFQIREAPLHPRLSSAAEEKVPVIRPRRRSSCVSLGETAASYYGSCKIFRRPSLPCISREQMILWDWDLKQWYKPHYQNSGGGNGVDLSVLNEARNMVSDLLTDPSLPPQVISSLRSISSLMGAFSGSCRPKINPLTPFPGFYPCSEIEDPAEKGDRKLNKGLNRNSLPTPQLRRSSGTSGLLPVEQSSRWDRNNGKRPHQEFGISSQGCYLNGPFNSNLLTIPKQRSSSVSLTHHVGLRRAGVLSSLSPVNSSNHGPVSTGSLTNRSPIEFPDTADFLNKPSVILQRSLGNAPNTPDFYQQLRNSDSNLCNSCGHQMLKYVSTSESDGTDCCSGKSGEEENIFSKESFKLMETQQEEETEKKDSRKLFQEGDKWLTEEAQSEQQTNIEQEVSLDLILVEEYDSLIEKMSNWNFPIFELVEKMGEKSGRILSQVMYTLFQDTGLLEIFKIPTQQFMNYFRALENGYRDIPYHNRIHATDVLHAVWYLTTRPVPGLQQIHNGCGTGNETDSDGRINHGRIAYISSKSCSNPDESYGCLSSNIPALELMALYVAAAMHDYDHPGRTNAFLVATNAPQAVLYNDRSVLENHHAASAWNLYLSRPEYNFLLHLDHVEFKRFRFLVIEAILATDLKKHFDFLAEFNAKANDVNSNGIEWSNENDRLLVCQVCIKLADINGPAKVRDLHLKWTEGIVNEFYEQGDEEANLGLPISPFMDRSSPQLAKLQESFITHIVGPLCNSYDAAGLLPGQWLEAEEDNDTESGDDEDGEELDTEDEEMENNLNPKPPRRKSRRRIFCQLMHHLTENHKIWKEIVEEEEKCKADGNKLQVENSSLPQADEIQVIEEADEEE

SEQ ID NO: 33155 - protein, 1061 aa, Homo sapiens
  REGION 1..1061: note = ENSP00000388644
MRRDERDAKAMRSLQPPDGAGSPPESLRNGYVKSCVSPLRQDPPRGFFFHLCRFCNVELRPPPASPQQPRRCSPFCRARLSLGALAAFVLALLLGAEPESWAAGAAWLRTLLSVCSHSLSPLFSIACAFFFLTCFLTRTKRGPGPGRSCGSWWLLALPACCYLGDFLVWQWWSWPWGDGDAGSAAPHTPPEAAAGRLLLVLSCVGLLLTLAHPLRLRHCVLVLLLASFVWWVSFTSLGSLPSALRPLLSGLVGGAGCLLALGLDHFFQIREAPLHPRLSSAAEEKVPVIRPRRRSSCVSLGETAASYYGSCKIFRRPSLPCISREQMILWDWDLKQWYKPHYQNSGGGNGVDLSVLNEARNMVSDLLTDPSLPPQGLNRNSLPTPQLRRSSGTSGLLPVEQSSRWDRNNGKRPHQEFGISSQGCYLNGPFNSNLLTIPKQRSSSVSLTHHVGLRRAGVLSSLSPVNSSNHGPVSTGSLTNRSPIEFPDTADFLNKPSVILQRSLGNAPNTPDFYQQLRNSDSNLCNSCGHQMLKYVSTSESDGTDCCSGKSGEEENIFSKESFKLMETQQEEETEKKDSRKLFQEGDKWLTEEAQSEQQTNIEQEVSLDLILVEEYDSLIEKMSNWNFPIFELVEKMGEKSGRILSQVMYTLFQDTGLLEIFKIPTQQFMNYFRALENGYRDIPYHNRIHATDVLHAVWYLTTRPVPGLQQIHNGCGTGNETDSDGRINHGRIAYISSKSCSNPDESYGCLSSNIPALELMALYVAAAMHDYDHPGRTNAFLVATNAPQAVLYNDRSVLENHHAASAWNLYLSRPEYNFLLHLDHVEFKRFRFLVIEAILATDLKKHFDFLAEFNAKANDVNSNGIEWSNENDRLLVCQVCIKLADINGPAKVRDLHLKWTEGIVNEFYEQGDEEANLGLPISPFMDRSSPQLAKLQESFITHIVGPLCNSYDAAGLLPGQWLEAEEDNDTESGDDEDGEELDTEDEEMENNLNPKPPRRKSRRRIFCQLMHHLTENHKIWKEIVEEEEKCKADGNKLQVENSSLPQADEIQVIEEADEEE

SEQ ID NO: 33156 - protein, 809 aa, Homo sapiens
  REGION 1..809: note = ENSP00000345502
MEAEGSSAPARAGSGEGSDSAGGATLKAPKHLWRHEQHHQYPLRQPQFRLLHPHHHLPPPPPPSPQPQPQCPLQPPPPPPLPPPPPPPGAARGRYASSGATGRVRHRGYSDTERYLYCRAMDRTSYAVETGHRPGLKKSRMSWPSSFQGLRRFDVDNGTSAGRSPLDPMTSPGSGLILQANFVHSQRRESFLYRSDSDYDLSPKSMSRNSSIASDIHGDDLIVTPFAQVLASLRTVRNNFAALTNLQDRAPSKRSPMCNQPSINKATITEEAYQKLASETLEELDWCLDQLETLQTRHSVSEMASNKFKRMLNRELTHLSEMSRSGNQVSEFISNTFLDKQHEVEIPSPTQKEKEKKKRPMSQISGVKKLMHSSSLTNSSIPRFGVKTEQEDVLAKELEDVNKWGLHVFRIAELSGNRPLTVIMHTIFQERDLLKTFKIPVDTLITYLMTLEDHYHADVAYHNNIHAADVVQSTHVLLSTPALEAVFTDLEILAAIFASAIHDVDHPGVSNQFLINTNSELALMYNDSSVLENHHLAVGFKLLQEENCDIFQNLTKKQRQSLRKMVIDIVLATDMSKHMNLLADLKTMVETKKVTSSGVLLLDNYSDRIQVLQNMVHCADLSNPTKPLQLYRQWTDRIMEEFFRQGDRERERGMEISPMCDKHNASVEKSQVGFIDYIVHPLWETWADLVHPDAQDILDTLEDNREWYQSTIPQSPSPAPDDPEEGRQGQTEKFQFELTLEEDGESDTEKDSGSQVEEDTSCSDSKTLCTQDSESTEIPLDEQVEEEAVGEEEESQPEACVIDDRSPDT

SEQ ID NO: 33157 - protein, 699 aa, Homo sapiens
  REGION 1..699: note = ENSP00000490821
MSLPSSCEYLTLGKVARFRSAYVHGSPYAINMPIDIKPQRRRFDVDNGTSAGRSPLDPMTSPGSGLILQANFVHSQRRESFLYRSDSDYDLSPKSMSRNSSIASDIHGDDLIVTPFAQVLASLRTVRNNFAALTNLQDRAPSKRSPMCNQPSINKATITEEAYQKLASETLEELDWCLDQLETLQTRHSVSEMASNKFKRMLNRELTHLSEMSRSGNQVSEFISNTFLDKQHEVEIPSPTQKEKEKKKRPMSQISGVKKLMHSSSLTNSSIPRFGVKTEQEDVLAKELEDVNKWGLHVFRIAELSGNRPLTVIMHTIFQERDLLKTFKIPVDTLITYLMTLEDHYHADVAYHNNIHAADVVQSTHVLLSTPALEAVFTDLEILAAIFASAIHDVDHPGVSNQFLINTNSELALMYNDSSVLENHHLAVGFKLLQEENCDIFQNLTKKQRQSLRKMVIDIVLATDMSKHMNLLADLKTMVETKKVTSSGVLLLDNYSDRIQVLQNMVHCADLSNPTKPLQLYRQWTDRIMEEFFRQGDRERERGMEISPMCDKHNASVEKSQVGFIDYIVHPLWETWADLVHPDAQDILDTLEDNREWYQSTIPQSPSPAPDDPEEGRQGQTEKFQFELTLEEDGESDTEKDSGSQVEEDTSCSDSKTLCTQDSESTEIPLDEQVEEEAVGEEEESQPEACVIDDRSPDT

SEQ ID NO: 33158 - protein, 673 aa, Homo sapiens
  REGION 1..673: note = ENSP00000353152
MMHVNNFPFRRHSWICFDVDNGTSAGRSPLDPMTSPGSGLILQANFVHSQRRESFLYRSDSDYDLSPKSMSRNSSIASDIHGDDLIVTPFAQVLASLRTVRNNFAALTNLQDRAPSKRSPMCNQPSINKATITEEAYQKLASETLEELDWCLDQLETLQTRHSVSEMASNKFKRMLNRELTHLSEMSRSGNQVSEFISNTFLDKQHEVEIPSPTQKEKEKKKRPMSQISGVKKLMHSSSLTNSSIPRFGVKTEQEDVLAKELEDVNKWGLHVFRIAELSGNRPLTVIMHTIFQERDLLKTFKIPVDTLITYLMTLEDHYHADVAYHNNIHAADVVQSTHVLLSTPALEAVFTDLEILAAIFASAIHDVDHPGVSNQFLINTNSELALMYNDSSVLENHHLAVGFKLLQEENCDIFQNLTKKQRQSLRKMVIDIVLATDMSKHMNLLADLKTMVETKKVTSSGVLLLDNYSDRIQVLQNMVHCADLSNPTKPLQLYRQWTDRIMEEFFRQGDRERERGMEISPMCDKHNASVEKSQVGFIDYIVHPLWETWADLVHPDAQDILDTLEDNREWYQSTIPQSPSPAPDDPEEGRQGQTEKFQFELTLEEDGESDTEKDSGSQVEEDTSCSDSKTLCTQDSESTEIPLDEQVEEEAVGEEEESQPEACVIDDRSPDT

SEQ ID NO: 33159 - protein, 745 aa, Homo sapiens
  REGION 1..745: note = ENSP00000424852
MAQQTSPDTLTVPEVDNPHCPNPWLNEDLVKSLRENLLQHEKSKTARKSVSPKLSPVISPRNSPRLLRRMLLSSNIPKQRRFTVAHTCFDVDNGTSAGRSPLDPMTSPGSGLILQANFVHSQRRESFLYRSDSDYDLSPKSMSRNSSIASDIHGDDLIVTPFAQVLASLRTVRNNFAALTNLQDRAPSKRSPMCNQPSINKATITEEAYQKLASETLEELDWCLDQLETLQTRHSVSEMASNKFKRMLNRELTHLSEMSRSGNQVSEFISNTFLDKQHEVEIPSPTQKEKEKKKRPMSQISGVKKLMHSSSLTNSSIPRFGVKTEQEDVLAKELEDVNKWGLHVFRIAELSGNRPLTVIMHTIFQERDLLKTFKIPVDTLITYLMTLEDHYHADVAYHNNIHAADVVQSTHVLLSTPALEAVFTDLEILAAIFASAIHDVDHPGVSNQFLINTNSELALMYNDSSVLENHHLAVGFKLLQEENCDIFQNLTKKQRQSLRKMVIDIVLATDMSKHMNLLADLKTMVETKKVTSSGVLLLDNYSDRIQVLQNMVHCADLSNPTKPLQLYRQWTDRIMEEFFRQGDRERERGMEISPMCDKHNASVEKSQVGFIDYIVHPLWETWADLVHPDAQDILDTLEDNREWYQSTIPQSPSPAPDDPEEGRQGQTEKFQFELTLEEDGESDTEKDSGSQVEEDTSCSDSKTLCTQDSESTEIPLDEQVEEEAVGEEEESQPEACVIDDRSPDT

SEQ ID NO: 33160 - protein, 507 aa, Homo sapiens
  REGION 1..507: note = ENSP00000351800
MASNKFKRMLNRELTHLSEMSRSGNQVSEFISNTFLDKQHEVEIPSPTQKEKEKKKRPMSQISGVKKLMHSSSLTNSSIPRFGVKTEQEDVLAKELEDVNKWGLHVFRIAELSGNRPLTVIMHTIFQERDLLKTFKIPVDTLITYLMTLEDHYHADVAYHNNIHAADVVQSTHVLLSTPALEAVFTDLEILAAIFASAIHDVDHPGVSNQFLINTNSELALMYNDSSVLENHHLAVGFKLLQEENCDIFQNLTKKQRQSLRKMVIDIVLATDMSKHMNLLADLKTMVETKKVTSSGVLLLDNYSDRIQVLQNMVHCADLSNPTKPLQLYRQWTDRIMEEFFRQGDRERERGMEISPMCDKHNASVEKSQVGFIDYIVHPLWETWADLVHPDAQDILDTLEDNREWYQSTIPQSPSPAPDDPEEGRQGQTEKFQFELTLEEDGESDTEKDSGSQVEEDTSCSDSKTLCTQDSESTEIPLDEQVEEEAVGEEEESQPEACVIDDRSPDT

SEQ ID NO: 33161 - protein, 518 aa, Homo sapiens
  REGION 1..518: note = ENSP00000321739
MPEANYLLSVSWGYIKFKRMLNRELTHLSEMSRSGNQVSEFISNTFLDKQHEVEIPSPTQKEKEKKKRPMSQISGVKKLMHSSSLTNSSIPRFGVKTEQEDVLAKELEDVNKWGLHVFRIAELSGNRPLTVIMHTIFQERDLLKTFKIPVDTLITYLMTLEDHYHADVAYHNNIHAADVVQSTHVLLSTPALEAVFTDLEILAAIFASAIHDVDHPGVSNQFLINTNSELALMYNDSSVLENHHLAVGFKLLQEENCDIFQNLTKKQRQSLRKMVIDIVLATDMSKHMNLLADLKTMVETKKVTSSGVLLLDNYSDRIQVLQNMVHCADLSNPTKPLQLYRQWTDRIMEEFFRQGDRERERGMEISPMCDKHNASVEKSQVGFIDYIVHPLWETWADLVHPDAQDILDTLEDNREWYQSTIPQSPSPAPDDPEEGRQGQTEKFQFELTLEEDGESDTEKDSGSQVEEDTSCSDSKTLCTQDSESTEIPLDEQVEEEAVGEEEESQPEACVIDDRSPDT

SEQ ID NO: 33162 - protein, 679 aa, Homo sapiens
  REGION 1..679: note = ENSP00000425605
MSIIMKPRSRSTSSLRTAEAVCFDVDNGTSAGRSPLDPMTSPGSGLILQANFVHSQRRESFLYRSDSDYDLSPKSMSRNSSIASDIHGDDLIVTPFAQVLASLRTVRNNFAALTNLQDRAPSKRSPMCNQPSINKATITEEAYQKLASETLEELDWCLDQLETLQTRHSVSEMASNKFKRMLNRELTHLSEMSRSGNQVSEFISNTFLDKQHEVEIPSPTQKEKEKKKRPMSQISGVKKLMHSSSLTNSSIPRFGVKTEQEDVLAKELEDVNKWGLHVFRIAELSGNRPLTVIMHTIFQERDLLKTFKIPVDTLITYLMTLEDHYHADVAYHNNIHAADVVQSTHVLLSTPALEAVFTDLEILAAIFASAIHDVDHPGVSNQFLINTNSELALMYNDSSVLENHHLAVGFKLLQEENCDIFQNLTKKQRQSLRKMVIDIVLATDMSKHMNLLADLKTMVETKKVTSSGVLLLDNYSDRIQVLQNMVHCADLSNPTKPLQLYRQWTDRIMEEFFRQGDRERERGMEISPMCDKHNASVEKSQVGFIDYIVHPLWETWADLVHPDAQDILDTLEDNREWYQSTIPQSPSPAPDDPEEGRQGQTEKFQFELTLEEDGESDTEKDSGSQVEEDTSCSDSKTLCTQDSESTEIPLDEQVEEEAVGEEEESQPEACVIDDRSPDT

SEQ ID NO: 33163 - protein, 687 aa, Homo sapiens
  REGION 1..687: note = ENSP00000384806
MAFVWDPLGATVPGPSTRAKSRLRFSKSYSFDVDNGTSAGRSPLDPMTSPGSGLILQANFVHSQRRESFLYRSDSDYDLSPKSMSRNSSIASDIHGDDLIVTPFAQVLASLRTVRNNFAALTNLQDRAPSKRSPMCNQPSINKATITEEAYQKLASETLEELDWCLDQLETLQTRHSVSEMASNKFKRMLNRELTHLSEMSRSGNQVSEFISNTFLDKQHEVEIPSPTQKEKEKKKRPMSQISGVKKLMHSSSLTNSSIPRFGVKTEQEDVLAKELEDVNKWGLHVFRIAELSGNRPLTVIMHTIFQERDLLKTFKIPVDTLITYLMTLEDHYHADVAYHNNIHAADVVQSTHVLLSTPALEAVFTDLEILAAIFASAIHDVDHPGVSNQFLINTNSELALMYNDSSVLENHHLAVGFKLLQEENCDIFQNLTKKQRQSLRKMVIDIVLATDMSKHMNLLADLKTMVETKKVTSSGVLLLDNYSDRIQVLQNMVHCADLSNPTKPLQLYRQWTDRIMEEFFRQGDRERERGMEISPMCDKHNASVEKSQVGFIDYIVHPLWETWADLVHPDAQDILDTLEDNREWYQSTIPQSPSPAPDDPEEGRQGQTEKFQFELTLEEDGESDTEKDSGSQVEEDTSCSDSKTLCTQDSESTEIPLDEQVEEEAVGEEEESQPEACVIDDRSPDT

SEQ ID NO: 33164 - protein, 748 aa, Homo sapiens
  REGION 1..748: note = ENSP00000423094
MKRNTCDLLSRSKSASEETLHSSNEEEDPFRGMEPYLVRRLSCRNIQLPPLAFRQLEQADLKSESENIQRPTSLPLKILPLIAITSAESSGFDVDNGTSAGRSPLDPMTSPGSGLILQANFVHSQRRESFLYRSDSDYDLSPKSMSRNSSIASDIHGDDLIVTPFAQVLASLRTVRNNFAALTNLQDRAPSKRSPMCNQPSINKATITEEAYQKLASETLEELDWCLDQLETLQTRHSVSEMASNKFKRMLNRELTHLSEMSRSGNQVSEFISNTFLDKQHEVEIPSPTQKEKEKKKRPMSQISGVKKLMHSSSLTNSSIPRFGVKTEQEDVLAKELEDVNKWGLHVFRIAELSGNRPLTVIMHTIFQERDLLKTFKIPVDTLITYLMTLEDHYHADVAYHNNIHAADVVQSTHVLLSTPALEAVFTDLEILAAIFASAIHDVDHPGVSNQFLINTNSELALMYNDSSVLENHHLAVGFKLLQEENCDIFQNLTKKQRQSLRKMVIDIVLATDMSKHMNLLADLKTMVETKKVTSSGVLLLDNYSDRIQVLQNMVHCADLSNPTKPLQLYRQWTDRIMEEFFRQGDRERERGMEISPMCDKHNASVEKSQVGFIDYIVHPLWETWADLVHPDAQDILDTLEDNREWYQSTIPQSPSPAPDDPEEGRQGQTEKFQFELTLEEDGESDTEKDSGSQVEEDTSCSDSKTLCTQDSESTEIPLDEQVEEEAVGEEEESQPEACVIDDRSPDT

SEQ ID NO: 33165 - protein, 422 aa, Homo sapiens
  REGION 1..422: note = ENSP00000421013
MASNKFKRMLNRELTHLSEMSRSGNQVSEFISNTFLDKQHEVEIPSPTQKEKEKKKRPMSQISGVKKLMHSSSLTNSSIPRFGVKTEQEDVLAKELEDVNKWGLHVFRIAELSGNRPLTVIMHTIFQERDLLKTFKIPVDTLITYLMTLEDHYHADVAYHNNIHAADVVQSTHVLLSTPALEAVFTDLEILAAIFASAIHDVDHPGVSNQFLINTNSELALMYNDSSVLENHHLAVGFKLLQEENCDIFQNLTKKQRQSLRKMVIDIVLATDMSKHMNLLADLKTMVETKKVTSSGVLLLDNYSDRIQVLQNMVHCADLSNPTKPLQLYRQWTDRIMEEFFRQGDRERERGMEISPMCDKHNASVEKSQVGFIDYIVHPLWETWADLVHPDAQDILDTLEDNREWYQSTIPQSPSPAPDDPE

SEQ ID NO: 33166 - protein, 215 aa, Homo sapiens
  REGION 1..215: note = ENSP00000308485
MAQQTSPDTLTVPEVDNPHCPNPWLNEDLVKSLRENLLQHEKSKTARKSVSPKLSPVISPRNSPRLLRRMLLSSNIPKQRRFTVAHTCFDVDNGTSAGRSPLDPMTSPGSGLILQANFVHSQRRESFLYRSDSDYDLSPKSMSRNSSIASDIHGDDLIVTPFAQVLASLRTVRNNFAALTNLQDRAPSKRSPMCNQPSINKATITGLYNGIIAFL

SEQ ID NO: 33167 - protein, 219 aa, Homo sapiens
  REGION 1..219: note = ENSP00000425917
MAQQTSPDTLTVPEVDNPHCPNPWLNEDLVKSLRENLLQHEKSKTARKSVSPKLSPVISPRNSPRLLRRMLLSSNIPKQRRFTVAHTCFDVDNGTSAGRSPLDPMTSPGSGLILQANFVHSQRRESFLYRSDSDYDLSPKSMSRNSSIASDIHGDDLIVTPFAQVLASLRTVRNNFAALTNLQDRAPSKRSPMCNQPSINKATITGSWMELNPYTLLDM

SEQ ID NO: 33168 - protein, 17 aa, Homo sapiens
  REGION 1..17: note = ENSP00000423555
MKRNTCDLLSRSKSDKK

SEQ ID NO: 33169 - protein, 81 aa, Homo sapiens
  REGION 1..81: note = ENSP00000425910
MKRNTCDLLSRSKSASEETLHSSNEEEDPFRGMEPYLVRRLSCRNIQLPPLAFRQLEQADLKSESENIQRPTSLPLKILPL

SEQ ID NO: 33170 - protein, 74 aa, Homo sapiens
  REGION 1..74: note = ENSP00000421829
MKRNTCDLLSRSKSASEETLHSSNEEEDPFRGMEPYLVRRLSCRNIQLPPLAFRQLEQADLKSESENIQRPTSL

SEQ ID NO: 33171 - protein, 29 aa, Homo sapiens
  REGION 1..29: note = ENSP00000424281
MKRNTCDLLSRSKSPAYCDLIFLLWPLKL

SEQ ID NO: 33172 - protein, 678 aa, Homo sapiens [sequence omitted]

SEQ ID NO: 33173 - protein, 125 aa, Homo sapiens [sequence omitted]

SEQ ID NO: 33174 - protein, 875 aa, Homo sapiens
  REGION 1..875: note = ENSP00000347046
MERAGPSFGQQRQQQQPQQQKQQQRDQDSVEAWLDDHWDFTFSYFVRKATREMVNAWFAERVHTIPVCKEGIRGHTESCSCPLQQSPRADNSAPGTPTRKISASEFDRPLRPIVVKDSEGTVSFLSDSEKKEQMPLTPPRFDHDEGDQCSRLLELVKDISSHLDVTALCHKIFLHIHGLISADRYSLFLVCEDSSNDKFLISRLFDVAEGSTLEEVSNNCIRLEWNKGIVGHVAALGEPLNIKDAYEDPRFNAEVDQITGYKTQSILCMPIKNHREEVVGVAQAINKKSGNGGTFTEKDEKDFAAYLAFCGIVLHNAQLYETSLLENKRNQVLLDLASLIFEEQQSLEVILKKIAATIISFMQVQKCTIFIVDEDCSDSFSSVFHMECEELEKSSDTLTREHDANKINYMYAQYVKNTMEPLNIPDVSKDKRFPWTTENTGNVNQQCIRSLLCTPIKNGKKNKVIGVCQLVNKMEENTGKVKPFNRNDEQFLEAFVIFCGLGIQNTQMYEAVERAMAKQMVTLEVLSYHASAAEEETRELQSLAAAVVPSAQTLKITDFSFSDFELSDLETALCTIRMFTDLNLVQNFQMKHEVLCRWILSVKKNYRKNVAYHNWRHAFNTAQCMFAALKAGKIQNKLTDLEILALLIAALSHDLDHRGVNNSYIQRSEHPLAQLYCHSIMEHHHFDQCLMILNSPGNQILSGLSIEEYKTTLKIIKQAILATDLALYIKRRGEFFELIRKNQFNLEDPHQKELFLAMLMTACDLSAITKPWPIQQRIAELVATEFFDQGDRERKELNIEPTDLMNREKKNKIPSMQVGFIDAICLQLYEALTHVSEDCFPLLDGCRKNRQKWQALAEQQEKMLINGESGQAKRN

SEQ ID NO: 33175 - protein, 833 aa, Homo sapiens
  REGION 1..833: note = ENSP00000264805
MLPFGDKTREMVNAWFAERVHTIPVCKEGIRGHTESCSCPLQQSPRADNSAPGTPTRKISASEFDRPLRPIVVKDSEGTVSFLSDSEKKEQMPLTPPRFDHDEGDQCSRLLELVKDISSHLDVTALCHKIFLHIHGLISADRYSLFLVCEDSSNDKFLISRLFDVAEGSTLEEVSNNCIRLEWNKGIVGHVAALGEPLNIKDAYEDPRFNAEVDQITGYKTQSILCMPIKNHREEVVGVAQAINKKSGNGGTFTEKDEKDFAAYLAFCGIVLHNAQLYETSLLENKRNQVLLDLASLIFEEQQSLEVILKKIAATIISFMQVQKCTIFIVDEDCSDSFSSVFHMECEELEKSSDTLTREHDANKINYMYAQYVKNTMEPLNIPDVSKDKRFPWTTENTGNVNQQCIRSLLCTPIKNGKKNKVIGVCQLVNKMEENTGKVKPFNRNDEQFLEAFVIFCGLGIQNTQMYEAVERAMAKQMVTLEVLSYHASAAEEETRELQSLAAAVVPSAQTLKITDFSFSDFELSDLETALCTIRMFTDLNLVQNFQMKHEVLCRWILSVKKNYRKNVAYHNWRHAFNTAQCMFAALKAGKIQNKLTDLEILALLIAALSHDLDHRGVNNSYIQRSEHPLAQLYCHSIMEHHHFDQCLMILNSPGNQILSGLSIEEYKTTLKIIKQAILATDLALYIKRRGEFFELIRKNQFNLEDPHQKELFLAMLMTACDLSAITKPWPIQQRIAELVATEFFDQGDRERKELNIEPTDLMNREKKNKIPSMQVGFIDAICLQLYEALTHVSEDCFPLLDGCRKNRQKWQALAEQQEKMLINGESGQAKRN

SEQ ID NO: 33176 - protein, 185 aa, Homo sapiens
  REGION 1..185: note = ENSP00000425810
  VARIANT 1: note = Any amino acid
XALSHDLDHRGVNNSYIQRSEHPLAQLYCHSIMEHHHFDQCLMILNSPGNQILSGLSIEEYKTTLKIIKQAILATDLALYIKRRGEFFELIRKNQFNLEDPHQKELFLAMLMTACDLSAITKPWPIQQRIAELVATEFFDQGDRERKELNIEPTDLMNREKKNKIPSMQVGFIDAICLQLYEVFI

SEQ ID NO: 33177 - protein, 224 aa, Homo sapiens
  REGION 1..224: note = ENSP00000416309
MVNAWFAERVHTIPVCKEGIRGHTESCSCPLQQSPRADNSAPGTPTRKISASEFDRPLRPIVVKDSEGTVSFLSDSEKKEQMPLTPPRFDHDEGDQCSRLLELVKDISSHLDVTALCHKIFLHIHGLISADRYSLFLVCEDSSNDKFLISRLFDVAEGSTLEEVSNNCIRLEWNKGIVGHVAALGEPLNIKDAYEDPRFNAEVDQITGYKTQSILCMPIKNHRE

SEQ ID NO: 33178 - protein, 823 aa, Homo sapiens
  REGION 1..823: note = ENSP00000377957
MVNAWFAERVHTIPVCKEGIRGHTESCSCPLQQSPRADNSAPGTPTRKISASEFDRPLRPIVVKDSEGTVSFLSDSEKKEQMPLTPPRFDHDEGDQCSRLLELVKDISSHLDVTALCHKIFLHIHGLISADRYSLFLVCEDSSNDKFLISRLFDVAEGSTLEEVSNNCIRLEWNKGIVGHVAALGEPLNIKDAYEDPRFNAEVDQITGYKTQSILCMPIKNHREEVVGVAQAINKKSGNGGTFTEKDEKDFAAYLAFCGIVLHNAQLYETSLLENKRNQVLLDLASLIFEEQQSLEVILKKIAATIISFMQVQKCTIFIVDEDCSDSFSSVFHMECEELEKSSDTLTREHDANKINYMYAQYVKNTMEPLNIPDVSKDKRFPWTTENTGNVNQQCIRSLLCTPIKNGKKNKVIGVCQLVNKMEENTGKVKPFNRNDEQFLEAFVIFCGLGIQNTQMYEAVERAMAKQMVTLEVLSYHASAAEEETRELQSLAAAVVPSAQTLKITDFSFSDFELSDLETALCTIRMFTDLNLVQNFQMKHEVLCRWILSVKKNYRKNVAYHNWRHAFNTAQCMFAALKAGKIQNKLTDLEILALLIAALSHDLDHRGVNNSYIQRSEHPLAQLYCHSIMEHHHFDQCLMILNSPGNQILSGLSIEEYKTTLKIIKQAILATDLALYIKRRGEFFELIRKNQFNLEDPHQKELFLAMLMTACDLSAITKPWPIQQRIAELVATEFFDQGDRERKELNIEPTDLMNREKKNKIPSMQVGFIDAICLQLYEALTHVSEDCFPLLDGCRKNRQKWQALAEQQEKMLINGESGQAKRN

SEQ ID NO: 33179 - protein, 482 aa, Homo sapiens
  REGION 1..482: note = ENSP00000385632
MEVCYQLPVLPLDRPVPQHVLSRRGAISFSSSSALFGCPNPRQLSQRRGAISYDSSDQTALYIRMLGDVRVRSRAGFESERRGSHPYIDFRIFHSQSEIEVSVSARNIRRLLSFQRYLRSSRFFRGTAVSNSLNILDDDYNGQAKCMLEKVGNWNFDIFLFDRLTNGNSLVSLTFHLFSLHGLIEYFHLDMMKLRRFLVMIQEDYHSQNPYHNAVHAADVTQAMHCYLKEPKLANSVTPWDILLSLIAAATHDLDHPGVNQPFLIKTNHYLATLYKNTSVLENHHWRSAVGLLRESGLFSHLPLESRQQMETQIGALILATDISRQNEYLSLFRSHLDRGDLCLEDTRHRHLVLQMALKCADICNPCRTWELSKQWSEKVTEEFFHQGDIEKKYHLGVSPLCDRHTESIANIQIGFMTYLVEPLFTEWARFSNTRLSQTMLGHVGLNKASWKGLQREQSSSEDTDAAFELNSQLLPQENRLS

SEQ ID NO: 33180 - protein, 456 aa, Homo sapiens
  REGION 1..456: note = ENSP00000368730
MGITLIWCLALVLIKWITSKRRGAISYDSSDQTALYIRMLGDVRVRSRAGFESERRGSHPYIDFRIFHSQSEIEVSVSARNIRRLLSFQRYLRSSRFFRGTAVSNSLNILDDDYNGQAKCMLEKVGNWNFDIFLFDRLTNGNSLVSLTFHLFSLHGLIEYFHLDMMKLRRFLVMIQEDYHSQNPYHNAVHAADVTQAMHCYLKEPKLANSVTPWDILLSLIAAATHDLDHPGVNQPFLIKTNHYLATLYKNTSVLENHHWRSAVGLLRESGLFSHLPLESRQQMETQIGALILATDISRQNEYLSLFRSHLDRGDLCLEDTRHRHLVLQMALKCADICNPCRTWELSKQWSEKVTEEFFHQGDIEKKYHLGVSPLCDRHTESIANIQIGFMTYLVEPLFTEWARFSNTRLSQTMLGHVGLNKASWKGLQREQSSSEDTDAAFELNSQLLPQENRLS

SEQ ID NO: 33181 - protein, 424 aa, Homo sapiens
  REGION 1..424: note = ENSP00000379881
MEVCYQLPVLPLDRPVPQHVLSRRGAISFSSSSALFGCPNPRQLSQRRGAISYDSSDQTALYIRMLGDVRVRSRAGFESERRGSHPYIDFRIFHSQSEIEVSVSARNIRRLLSFQRYLRSSRFFRGTAVSNSLNILDDDYNGQAKCMLEKVGNWNFDIFLFDRLTNGNSLVSLTFHLFSLHGLIEYFHLDMMKLRRFLVMIQEDYHSQNPYHNAVHAADVTQAMHCYLKEPKLANSVTPWDILLSLIAAATHDLDHPGVNQPFLIKTNHYLATLYKNTSVLENHHWRSAVGLLRESGLFSHLPLESRQQMETQIGALILATDISRQNEYLSLFRSHLDRGDLCLEDTRHRHLVLQMALKCADICNPCRTWELSKQWSEKVTEEFFHQGDIEKKYHLGVSPLCDRHTESIANIQIGNYTYLDIAG

SEQ ID NO: 33182 - protein, 85 aa, Homo sapiens
  REGION 1..85: note = ENSP00000430262
MGITLIWCLALVLIKWITSKRRGAISYDSSDQTALYIRMLGDVRVRSRAGFESERRGSHPYIDFRIFHSQSEIEVSVSARNIRRL

SEQ ID NO: 33183 - protein, 450 aa, Homo sapiens
  REGION 1..450: note = ENSP00000310661
MSCLMVERCGEILFENPDQNAKCVCMLGDIRLRGQTGVRAERRGSYPFIDFRLLNSTTYSGEIGTKKKVKRLLSFQRYFHASRLLRGIIPQAPLHLLDEDYLGQARHMLSKVGMWDFDIFLFDRLTNGNSLVTLLCHLFNTHGLIHHFKLDMVTLHRFLVMVQEDYHSQNPYHNAVHAADVTQAMHCYLKEPKLASFLTPLDIMLGLLAAAAHDVDHPGVNQPFLIKTNHHLANLYQNMSVLENHHWRSTIGMLRESRLLAHLPKEMTQDIEQQLGSLILATDINRQNEFLTRLKAHLHNKDLRLEDAQDRHFMLQIALKCADICNPCRIWEMSKQWSERVCEEFYRQGELEQKFELEISPLCNQQKDSIPSIQIGFMSYIVEPLFREWAHFTGNSTLSENMLGHLAHNKAQWKSLLPRQHRSRGSSGSGPDHDHAGQGTESEEQEGDSP

SEQ ID NO: 33184 - protein, 200 aa, Homo sapiens
  REGION 1..200: note = ENSP00000403732
  VARIANT 1: note = Any amino acid
XHMLSKVGMWDFDIFLFDRLTNGNSLVTLLCHLFNTHGLIHHFKLDMVTLHRFLVMVQEDYHSQNPYHNAVHAADVTQAMHCYLKEPKLASFLTPLDIMLGLLAAAAHDVDHPGVNQPFLIKTNHHLANLYQVREPNLEPATVWSIALGPVLKPESCPWRKPCFRVLEVQRRMKHNLCPQKFVQTQMLKMSKIQANLIPV

SEQ ID NO: 33185 - protein, 502 aa, Homo sapiens
  REGION 1..502: note = ENSP00000482117
MPVLERYFHPAELGRRWTGPEGVLPSSPGSRPGCQQGPLPWDLPEMIRMVKLVWKSKSELQATKQRGILDNEDALRSFPGDIRLRGQTGVRAERRGSYPFIDFRLLNSTTYSGEIGTKKKVKRLLSFQRYFHASRLLRGIIPQAPLHLLDEDYLGQARHMLSKVGMWDFDIFLFDRLTNGNSLVTLLCHLFNTHGLIHHFKLDMVTLHRFLVMVQEDYHSQNPYHNAVHAADVTQAMHCYLKEPKLASFLTPLDIMLGLLAAAAHDVDHPGVNQPFLIKTNHHLANLYQNMSVLENHHWRSTIGMLRESRLLAHLPKEMTQDIEQQLGSLILATDINRQNEFLTRLKAHLHNKDLRLEDAQDRHFMLQIALKCADICNPCRIWEMSKQWSERVCEEFYRQGELEQKFELEISPLCNQQKDSIPSIQIGFMSYIVEPLFREWAHFTGNSTLSENMLGHLAHNKAQWKSLLPRQHRSRGSSGSGPDHDHAGQGTESEEQEGDSP

SEQ ID NO: 33186 - protein, 829 aa, Homo sapiens
  REGION 1..829: note = ENSP00000311453
MGCAPSIHISERLVAEDAPSPAAPPLSSGGPRLPQGQKTAALPRTRGAGLLESELRDGSGKKVAVADVQFGPMRFHQDQLQVLLVFTKEDNQCNGFCRACEKAGFKCTVTKEAQAVLACFLDKHHDIIIIDHRNPRQLDAEALCRSIRSSKLSENTVIVGVVRRVDREELSVMPFISAGFTRRYVENPNIMACYNELLQLEFGEVRSQLKLRACNSVFTALENSEDAIEITSEDRFIQYANPAFETTMGYQSGELIGKELGEVPINEKKADLLDTINSCIRIGKEWQGIYYAKKKNGDNIQQNVKIIPVIGQGGKIRHYVSIIRVCNGNNKAEKISECVQSDTHTDNQTGKHKDRRKGSLDVKAVASRATEVSSQRRHSSMARIHSMTIEAPITKVINIINAAQESSPMPVTEALDRVLEILRTTELYSPQFGAKDDDPHANDLVGGLMSDGLRRLSGNEYVLSTKNTQMVSSNIITPISLDDVPPRIARAMENEEYWDFDIFELEAATHNRPLIYLGLKMFARFGICEFLHCSESTLRSWLQIIEANYHSSNPYHNSTHSADVLHATAYFLSKERIKETLDPIDEVAALIAATIHDVDHPGRTNSFLCNAGSELAILYNDTAVLESHHAALAFQLTTGDDKCNIFKNMERNDYRTLRQGIIDMVLATEMTKHFEHVNKFVNSINKPLATLEENGETDKNQEVINTMLRTPENRTLIKRMLIKCADVSNPCRPLQYCIEWAARISEEYFSQTDEEKQQGLPVVMPVFDRNTCSIPKSQISFIDYFITDMFDAWDAFVDLPDLMQHLDNNFKYWKGLDEMKLRNLRPPPE

SEQ ID NO: 33187 - protein, 757 aa, Homo sapiens
  REGION 1..757: note = ENSP00000453808
MRFHQDQLQVLLVFTKEDNQCNGFCRACEKAGFKCTVTKEAQAVLACFLDKHHDIIIIDHRNPRQLDAEALCRSIRSSKLSENTVIVGVVRRVDREELSVMPFISAGFTRRYVENPNIMACYNELLQLEFGEVRSQLKLRACNSVFTALENSEDAIEITSEDRFIQYANPAFETTMGYQSGELIGKELGEVPINEKKADLLDTINSCIRIGKEWQGIYYAKKKNGDNIQQNVKIIPVIGQGGKIRHYVSIIRVCNGNNKAEKISECVQSDTHTDNQTGKHKDRRKGSLDVKAVASRATEVSSQRRHSSMARIHSMTIEAPITKVINIINAAQESSPMPVTEALDRVLEILRTTELYSPQFGAKDDDPHANDLVGGLMSDGLRRLSGNEYVLSTKNTQMVSSNIITPISLDDVPPRIARAMENEEYWDFDIFELEAATHNRPLIYLGLKMFARFGICEFLHCSESTLRSWLQIIEANYHSSNPYHNSTHSADVLHATAYFLSKERIKETLDPIDEVAALIAATIHDVDHPGRTNSFLCNAGSELAILYNDTAVLESHHAALAFQLTTGDDKCNIFKNMERNDYRTLRQGIIDMVLATEMTKHFEHVNKFVNSINKPLATLEENGETDKNQEVINTMLRTPENRTLIKRMLIKCADVSNPCRPLQYCIEWAARISEEYFSQTDEEKQQGLPVVMPVFDRNTCSIPKSQISFIDYFITDMFDAWDAFVDLPDLMQHLDNNFKYWKGLDEMKLRNLRPPPE

SEQ ID NO: 33188 - protein, 783 aa, Homo sapiens
  REGION 1..783: note = ENSP00000340679
MGCAPSIHISERLVAEDAPSPAAPPLSSGGPRLPQGQKTAALPRTRGAGLLESELRDGSGKKVAVADVQFGPMRFHQDQLQVLLVFTKEDNQCNGFCRACEKAGFKCTVTKEAQAVLACFLDKHHDIIIIDHRNPRQLDAEALCRSIRSSKLSENTVIVGVVRRVDREELSVMPFISAGFTRRYVENPNIMACYNELLQLEFGEVRSQLKLRACNSVFTALENSEDAIEITSEDRFIQEWQGIYYAKKKNGDNIQQNVKIIPVIGQGGKIRHYVSIIRVCNGNNKAEKISECVQSDTHTDNQTGKHKDRRKGSLDVKAVASRATEVSSQRRHSSMARIHSMTIEAPITKVINIINAAQESSPMPVTEALDRVLEILRTTELYSPQFGAKDDDPHANDLVGGLMSDGLRRLSGNEYVLSTKNTQMVSSNIITPISLDDVPPRIARAMENEEYWDFDIFELEAATHNRPLIYLGLKMFARFGICEFLHCSESTLRSWLQIIEANYHSSNPYHNSTHSADVLHATAYFLSKERIKETLDPIDEVAALIAATIHDVDHPGRTNSFLCNAGSELAILYNDTAVLESHHAALAFQLTTGDDKCNIFKNMERNDYRTLRQGIIDMVLATEMTKHFEHVNKFVNSINKPLATLEENGETDKNQEVINTMLRTPENRTLIKRMLIKCADVSNPCRPLQYCIEWAARISEEYFSQTDEEKQQGLPVVMPVFDRNTCSIPKSQISFIDYFITDMFDAWDAFVDLPDLMQHLDNNFKYWKGLDEMKLRNLRPPPE

SEQ ID NO: 33189 - protein, 228 aa, Homo sapiens
  REGION 1..228: note = ENSP00000432309
MGCAPSIHISERLVAEDAPSPAAPPLSSGGPRLPQGQKTAALPRTRGAGLLESELRDGSGKKVAVADVQFGPMRFHQDQLQVLLVFTKEDNQCNGFCRACEKAGFKCTVTKEAQAVLACFLDKHHDIIIIDHRNPRQLDAEALCRSIRSSKLSENTVIVGVVRRVDREELSVMPFISAGFTRRYVENPNIMACYNELLQLEFGEVRSQLKLSMQILHLKQQWAISQVN

SEQ ID NO: 33190 - protein, 272 aa, Homo sapiens
  REGION 1..272: note = ENSP00000431976
MGCAPSIHISERLVAEDAPSPAAPPLSSGGPRLPQGQKTAALPRTRGAGLLESELRDGSGKKVAVADVQFGPMRFHQDQLQVLLVFTKEDNQCNGFCRACEKAGFKCTVTKEAQAVLACFLDKHHDIIIIDHRNPRQLDAEALCRSIRSSKLSENTVIVGVVRRVDREELSVMPFISAGFTRRYVENPNIMACYNELLQLEFGEVRSQLKLRACNSVFTALENSEDAIEITSEDRFIQPCCSSSWFGAVHIPSSAPVEVGVGLLPSWSLRRT

SEQ ID NO: 33191 - protein, 231 aa, Homo sapiens
  REGION 1..231: note = ENSP00000452907
MGCAPSIHISERLVAEDAPSPAAPPLSSGGPRLPQGQKTAALPRTRGAGLLESELRDGSGKKVAVADVQFGPMRFHQDQLQVLLVFTKEDNQCNGFCRACEKAGFKCTVTKEAQAVLACFLDKHHDIIIIDHRNPRQLDAEALCRSIRSSKLSENTVIVGVVRRVDREELSVMPFISAGFTRRYVENPNIMACYNELLQLEFGEVRSQLKLRSGKEFTMPKRKTEIIYNKM

SEQ ID NO: 33192 - protein, 126 aa, Homo sapiens
  REGION 1..126: note = ENSP00000454094
AAPPLSSGGPRLPQGQKTAALPRTRGAGLLESELRDGSGKKVAVADVQFGPMRFHQDQLQVLLVFTKEDNQCNGFCRACEKAGFKCTVTKEAQAVLACFLDKHHDIIIIDHRNPRQLDAEALCRGM

SEQ ID NO: 33193 - protein, 829 aa, Homo sapiens; identical to SEQ ID NO: 33186
  REGION 1..829: note = ENSP00000378056

SEQ ID NO: 33194 - protein, 116 aa, Homo sapiens
  REGION 1..116: note = ENSP00000425720
MRLTQDPIQVLLIFAKEDSQSDGFWWACDRAGYRCNIARTPESALECFLDKHHEIIVIDHRQTQNFDAEAVCRSIRATNPSEHTVILAVVSRVSDDHEEASVLPLLHAGFNRVCTR

SEQ ID NO: 33195 - protein, 838 aa, Homo sapiens
  REGION 1..838: note = ENSP00000345446
MGCAPSIHVSQSGVIYCRDSDESSSPRQTTSVSQGPAAPLPGLFVQTDAADAIPPSRASGPPSVARVRRARTELGSGSSAGSAAPAATTSRGRRRHCCSSAEAETQTCYTSVKQVSSAEVRIGPMRLTQDPIQVLLIFAKEDSQSDGFWWACDRAGYRCNIARTPESALECFLDKHHEIIVIDHRQTQNFDAEAVCRSIRATNPSEHTVILAVVSRVSDDHEEASVLPLLHAGFNRRFMENSSIIACYNELIQIEHGEVRSQFKLRACNSVFTALDHCHEAIEITSDDHVIQEWQGVYYARRKSGDSIQQHVKITPVIGQGGKIRHFVSLKKLCCTTDNNKQIHKIHRDSGDNSQTEPHSFRYKNRRKESIDVKSISSRGSDAPSLQNRRYPSMARIHSMTIEAPITKVINIINAAQENSPVTVAEALDRVLEILRTTELYSPQLGTKDEDPHTSDLVGGLMTDGLRRLSGNEYVFTKNVHQSHSHLAMPITINDVPPCISQLLDNEESWDFNIFELEAITHKRPLVYLGLKVFSRFGVCEFLNCSETTLRAWFQVIEANYHSSNAYHNSTHAADVLHATAFFLGKERVKGSLDQLDEVAALIAATVHDVDHPGRTNSFLCNAGSELAVLYNDTAVLESHHTALAFQLTVKDTKCNIFKNIDRNHYRTLRQAIIDMVLATEMTKHFEHVNKFVNSINKPMAAEIEGSDCECNPAGKNFPENQILIKRMMIKCADVANPCRPLDLCIEWAGRISEEYFAQTDEEKRQGLPVVMPVFDRNTCSIPKSQISFIDYFITDMFDAWDAFAHLPALMQHLADNYKHWKTLDDLKCKSLRLPSDS

SEQ ID NO: 33196 - protein, 788 aa, Homo sapiens
  REGION 1..788: note = ENSP00000330428
MGCAPSIHVSQSGVIYCRDSDESSSPRQTTSVSQGPAAPLPGLFVQTDAADAIPPSRASGPPSVARVRRARTELGSGSSAGSAAPAATTSRGRRRHCCSSAEAETQTCYTSVKQVSSAEVRIGPMRLTQDPIQVLLIFAKEDSQSDGFWWACDRAGYRCNIARTPESALECFLDKHHEIIVIDHRQTQNFDAEAVCRSIRATNPSEHTVILAVVSRVSDDHEEASVLPLLHAGFNRRFMENSSIIACYNELIQIEHGEVRSQFKLRACNSVFTALDHCHEAIEITSDDHVIQIHKIHRDSGDNSQTEPHSFRYKNRRKESIDVKSISSRGSDAPSLQNRRYPSMARIHSMTIEAPITKVINIINAAQENSPVTVAEALDRVLEILRTTELYSPQLGTKDEDPHTSDLVGGLMTDGLRRLSGNEYVFTKNVHQSHSHLAMPITINDVPPCISQLLDNEESWDFNIFELEAITHKRPLVYLGLKVFSRFGVCEFLNCSETTLRAWFQVIEANYHSSNAYHNSTHAADVLHATAFFLGKERVKGSLDQLDEVAALIAATVHDVDHPGRTNSFLCNAGSELAVLYNDTAVLESHHTALAFQLTVKDTKCNIFKNIDRNHYRTLRQAIIDMVLATEMTKHFEHVNKFVNSINKPMAAEIEGSDCECNPAGKNFPENQILIKRMMIKCADVANPCRPLDLCIEWAGRISEEYFAQTDEEKRQGLPVVMPVFDRNTCSIPKSQISFIDYFITDMFDAWDAFAHLPALMQHLADNYKHWKTLDDLKCKSLRLPSDS

SEQ ID NO: 33197 - protein, 885 aa, Homo sapiens
  REGION 1..885: note = ENSP00000264917
MGCAPSIHVSQSGVIYCRDSDESSSPRQTTSVSQGPAAPLPGLFVQTDAADAIPPSRASGPPSVARVRRARTELGSGSSAGSAAPAATTSRGRRRHCCSSAEAETQTCYTSVKQVSSAEVRIGPMRLTQDPIQVLLIFAKEDSQSDGFWWACDRAGYRCNIARTPESALECFLDKHHEIIVIDHRQTQNFDAEAVCRSIRATNPSEHTVILAVVSRVSDDHEEASVLPLLHAGFNRRFMENSSIIACYNELIQIEHGEVRSQFKLRACNSVFTALDHCHEAIEITSDDHVIQYVNPAFERMMGYHKGELLGKELADLPKSDKNRADLLDTINTCIKKGKEWQGVYYARRKSGDSIQQHVKITPVIGQGGKIRHFVSLKKLCCTTDNNKQIHKIHRDSGDNSQTEPHSFRYKNRRKESIDVKSISSRGSDAPSLQNRRYPSMARIHSMTIEAPITKVINIINAAQENSPVTVAEALDRVLEILRTTELYSPQLGTKDEDPHTSDLVGGLMTDGLRRLSGNEYVFTKNVHQSHSHLAMPITINDVPPCISQLLDNEESWDFNIFELEAITHKRPLVYLGLKVFSRFGVCEFLNCSETTLRAWFQVIEANYHSSNAYHNSTHAADVLHATAFFLGKERVKGSLDQLDEVAALIAATVHDVDHPGRTNSFLCNAGSELAVLYNDTAVLESHHTALAFQLTVKDTKCNIFKNIDRNHYRTLRQAIIDMVLATEMTKHFEHVNKFVNSINKPMAAEIEGSDCECNPAGKNFPENQILIKRMMIKCADVANPCRPLDLCIEWAGRISEEYFAQTDEEKRQGLPVVMPVFDRNTCSIPKSQISFIDYFITDMFDAWDAFAHLPALMQHLADNYKHWKTLDDLKCKSLRLPSDS

SEQ ID NO: 33198 - protein, 865 aa, Homo sapiens
  REGION 1..865: note = ENSP00000345646
MGCAPSIHVSQSGVIYCRDSDESSSPRQTTSVSQGPAAPLPGLFVQTDAADAIPPSRASGPPSVARVRRARTELGSGSSAGSAAPAATTSRGRRRHCCSSAEAETQTCYTSVKVLLIFAKEDSQSDGFWWACDRAGYRCNIARTPESALECFLDKHHEIIVIDHRQTQNFDAEAVCRSIRATNPSEHTVILAVVSRVSDDHEEASVLPLLHAGFNRRFMENSSIIACYNELIQIEHGEVRSQFKLRACNSVFTALDHCHEAIEITSDDHVIQYVNPAFERMMGYHKGELLGKELADLPKSDKNRADLLDTINTCIKKGKEWQGVYYARRKSGDSIQQHVKITPVIGQGGKIRHFVSLKKLCCTTDNNKQIHKIHRDSGDNSQTEPHSFRYKNRRKESIDVKSISSRGSDAPSLQNRRYPSMARIHSMTIEAPITKVINIINAAQENSPVTVAEALDRVLEILRTTELYSPQLGTKDEDPHTSDLVGGLMTDGLRRLSGNEYVFTKNVHQSHSHLAMPITINDVPPCISQLLDNEESWDFNIFELEAITHKRPLVYLGLKVFSRFGVCEFLNCSETTLRAWFQVIEANYHSSNAYHNSTHAADVLHATAFFLGKERVKGSLDQLDEVAALIAATVHDVDHPGRTNSFLCNAGSELAVLYNDTAVLESHHTALAFQLTVKDTKCNIFKNIDRNHYRTLRQAIIDMVLATEMTKHFEHVNKFVNSINKPMAAEIEGSDCECNPAGKNFPENQILIKRMMIKCADVANPCRPLDLCIEWAGRISEEYFAQTDEEKRQGLPVVMPVFDRNTCSIPKSQISFIDYFITDMFDAWDAFAHLPALMQHLADNYKHWKTLDDLKCKSLRLPSDS

SEQ ID NO: 33199 - protein, 830 aa, Homo sapiens
  REGION 1..830: note = ENSP00000331336
MGCAPSIHVSQSGVIYCRDSDESSSPRQTTSVSQGPAAPLPGLFVQTDAADAIPPSRASGPPSVARVRRARTELGSGSSAGSAAPAATTSRGRRRHCCSSAEAETQTCYTSVKQVSSAEVRIGPMRLTQDPIQVLLIFAKEDSQSDGFWWACDRAGYRCNIARTPESALECFLDKHHEIIVIDHRQTQNFDAEAVCRSIRATNPSEHTVILAVVSRVSDDHEEASVLPLLHAGFNRRFMENSSIIACYNELIQIEHGEVRSQFKLRACNSVFTALDHCHEAIEITSDDHVIQYVNPAFERMMGYHKGELLGKELADLPKSDKNRADLLDTINTCIKKGKEWQGVYYARRKSGDSIQQHVKITPVIGQGGKIRHFVSLKKLCCTTDNNKQIHKIHRDSGDNSQTEPHSFRYKNRRKESIDVKSISSRGSDAPSLQNRRYPSMARIHSMTIEAPITKDGLRRLSGNEYVFTKNVHQSHSHLAMPITINDVPPCISQLLDNEESWDFNIFELEAITHKRPLVYLGLKVFSRFGVCEFLNCSETTLRAWFQVIEANYHSSNAYHNSTHAADVLHATAFFLGKERVKGSLDQLDEVAALIAATVHDVDHPGRTNSFLCNAGSELAVLYNDTAVLESHHTALAFQLTVKDTKCNIFKNIDRNHYRTLRQAIIDMVLATEMTKHFEHVNKFVNSINKPMAAEIEGSDCECNPAGKNFPENQILIKRMMIKCADVANPCRPLDLCIEWAGRISEEYFAQTDEEKRQGLPVVMPVFDRNTCSIPKSQISFIDYFITDMFDAWDAFAHLPALMQHLADNYKHWKTLDDLKCKSLRLPSDS

SEQ ID NO: 33200 - protein, 112 aa, Homo sapiens
  REGION 1..112: note = ENSP00000426200
MRLTQDPIQVLLIFAKEDSQSDGFWWACDRAGYRCNIARTPESALECFLDKHHEIIVIDHRQTQNFDAEAVCRSIRATNPSEHTVILAVVSRVSDDHEEASVLPLLHAGFNR

SEQ ID NO: 33201 - protein, 119 aa, Homo sapiens
  REGION 1..119: note = ENSP00000422861
MENSSIIACYNELIQIEHGEVRSQFKLRACNSVFTALDHCHEAIEITSDDHVIQYVNPAFERMMGYHKGELLGKELADLPKSDKNRADLLDTINTCIKKGKEWQGVYYARRKSGDSIQQ

SEQ ID NO: 33202 - protein, 350 aa, Homo sapiens
  REGION 1..350: note = ENSP00000423461
MPITINDVPPCISQLLDNEESWDFNIFELEAITHKRPLVYLGLKVFSRFGVCEFLNCSETTLRAWFQVIEANYHSSNAYHNSTHAADVLHATAFFLGKERVKGSLDQLDEVAALIAATVHDVDHPGRTNSFLCNAGSELAVLYNDTAVLESHHTALAFQLTVKDTKCNIFKNIDRNHYRTLRQAIIDMVLATEMTKHFEHVNKFVNSINKPMAAEIEGSDCECNPAGKNFPENQILIKRMMIKCADVANPCRPLDLCIEWAGRISEEYFAQTDEEKRQGLPVVMPVFDRNTCSIPKSQISFIDYFITDMFDAWDAFAHLPALMQHLADNYKHWKTLDDLKCKSLRLPSDS

SEQ ID NO: 33203 - protein, 533 aa, Homo sapiens
  REGION 1..533: note = ENSP00000335242
MGSGSSSYRPKAIYLDIDGRIQKVIFSKYCNSSDIMDLFCIATGLPRNTTISLLTTDDAMVSIDPTMPANSERTPYKVRPVAIKQLSEREELIQSVLAQVAEQFSRAFKINELKAEVANHLAVLEKRVELEGLKVVEIEKCKSDIKKMREELAARSSRTNCPCKYSFLDNHKKLTPRRDVPTYPKYLLSPETIEALRKPTFDVWLWEPNEMLSCLEHMYHDLGLVRDFSINPVTLRRWLFCVHDNYRNNPFHNFRHCFCVAQMMYSMVWLCSLQEKFSQTDILILMTAAICHDLDHPGYNNTYQINARTELAVRYNDISPLENHHCAVAFQILAEPECNIFSNIPPDGFKQIRQGMITLILATDMARHAEIMDSFKEKMENFDYSNEEHMTLLKMILIKCCDISNEVRPMEVAEPWVDCLLEEYFMQSDREKSEGLPVAPFMDRDKVTKATAQIGFIKFVLIPMFETVTKLFPMVEEIMLQPLWESRDRYEELKRIDDAMKELQKKTDSLTSGATEKSRERSRDVKNSEGDCA

SEQ ID NO: 33204 - protein, 593 aa, Homo sapiens
  REGION 1..593: note = ENSP00000291539
MGSGSSSYRPKAIYLDIDGRIQKVIFSKYCNSSDIMDLFCIATGLPRNTTISLLTTDDAMVSIDPTMPANSERTPYKVRPVAIKQLSAGVEDKRTTSRGQSAERPLRDRRVVGLEQPRREGAFESGQVEPRPREPQGCYQEGQRIPPEREELIQSVLAQVAEQFSRAFKINELKAEVANHLAVLEKRVELEGLKVVEIEKCKSDIKKMREELAARSSRTNCPCKYSFLDNHKKLTPRRDVPTYPKYLLSPETIEALRKPTFDVWLWEPNEMLSCLEHMYHDLGLVRDFSINPVTLRRWLFCVHDNYRNNPFHNFRHCFCVAQMMYSMVWLCSLQEKFSQTDILILMTAAICHDLDHPGYNNTYQINARTELAVRYNDISPLENHHCAVAFQILAEPECNIFSNIPPDGFKQIRQGMITLILATDMARHAEIMDSFKEKMENFDYSNEEHMTLLKMILIKCCDISNEVRPMEVAEPWVDCLLEEYFMQSDREKSEGLPVAPFMDRDKVTKATAQIGFIKFVLIPMFETVTKLFPMVEEIMLQPLWESRDRYEELKRIDDAMKELQKKTDSLTSGATEKSRERSRDVKNSEGDCA

SEQ ID NO: 33205 - protein, 540 aa, Homo sapiens
  REGION 1..540: note = ENSP00000369685
MGSGSSSYRPKAIYLDIDGRIQKVIFSKYCNSSDIMDLFCIATGLPRNTTISLLTTDDAMVSIDPTMPANSERNELILYTSLRNLLFLPSKESWASHQHSVQSETCGHQATLRAFKINELKAEVANHLAVLEKRVELEGLKVVEIEKCKSDIKKMREELAARSSRTNCPCKYSFLDNHKKLTPRRDVPTYPKYLLSPETIEALRKPTFDVWLWEPNEMLSCLEHMYHDLGLVRDFSINPVTLRRWLFCVHDNYRNNPFHNFRHCFCVAQMMYSMVWLCSLQEKFSQTDILILMTAAICHDLDHPGYNNTYQINARTELAVRYNDISPLENHHCAVAFQILAEPECNIFSNIPPDGFKQIRQGMITLILATDMARHAEIMDSFKEKMENFDYSNEEHMTLLKMILIKCCDISNEVRPMEVAEPWVDCLLEEYFMQSDREKSEGLPVAPFMDRDKVTKATAQIGFIKFVLIPMFETVTKLFPMVEEIMLQPLWESRDRYEELKRIDDAMKELQKKTDSLTSGATEKSRERSRDVKNSEGDCA

SEQ ID NO: 33206 - protein, 526 aa, Homo sapiens
  REGION 1..526: note = ENSP00000381287
MDAFRSTPYKVRPVAIKQLSAGVEDKRTTSRGQSAERPLRDRRVVGLEQPRREGAFESGQVEPRPREPQGCYQEGQRIPPEREELIQSVLAQVAEQFSRAFKINELKAEVANHLAVLEKRVELEGLKVVEIEKCKSDIKKMREELAARSSRTNCPCKYSFLDNHKKLTPRRDVPTYPKYLLSPETIEALRKPTFDVWLWEPNEMLSCLEHMYHDLGLVRDFSINPVTLRRWLFCVHDNYRNNPFHNFRHCFCVAQMMYSMVWLCSLQEKFSQTDILILMTAAICHDLDHPGYNNTYQINARTELAVRYNDISPLENHHCAVAFQILAEPECNIFSNIPPDGFKQIRQGMITLILATDMARHAEIMDSFKEKMENFDYSNEEHMTLLKMILIKCCDISNEVRPMEVAEPWVDCLLEEYFMQSDREKSEGLPVAPFMDRDKVTKATAQIGFIKFVLIPMFETVTKLFPMVEEIMLQPLWESRDRYEELKRIDDAMKELQKKTDSLTSGATEKSRERSRDVKNSEGDCA

SEQ ID NO: 33207 - protein, 492 aa, Homo sapiens
  REGION 1..492: note = ENSP00000381289
MDAFRRNTTISLLTTDDAMVSIDPTMPANSERTPYKVRPVAIKQLSEREELIQSVLAQVAEQFSRAFKINELKAEVANHLAVLEKRVELEGLKVVEIEKCKSDIKKMREELAARSSRTNCPCKYSFLDNHKKLTPRRDVPTYPKYLLSPETIEALRKPTFDVWLWEPNEMLSCLEHMYHDLGLVRDFSINPVTLRRWLFCVHDNYRNNPFHNFRHCFCVAQMMYSMVWLCSLQEKFSQTDILILMTAAICHDLDHPGYNNTYQINARTELAVRYNDISPLENHHCAVAFQILAEPECNIFSNIPPDGFKQIRQGMITLILATDMARHAEIMDSFKEKMENFDYSNEEHMTLLKMILIKCCDISNEVRPMEVAEPWVDCLLEEYFMQSDREKSEGLPVAPFMDRDKVTKATAQIGFIKFVLIPMFETVTKLFPMVEEIMLQPLWESRDRYEELKRIDDAMKELQKKTDSLTSGATEKSRERSRDVKNSEGDCA

SEQ ID NO: 33208 - protein, 507 aa, Homo sapiens
  REGION 1..507: note = ENSP00000381291
MGSGSSSYRPKAIYLDIDGRIQKVIFSKYCNSSDIMDLFCIATGLPRTPYKVRPVAIKQLSEREELIQSVLAQVAEQFSRAFKINELKAEVANHLAVLEKRVELEGLKVVEIEKCKSDIKKMREELAARSSRTNCPCKYSFLDNHKKLTPRRDVPTYPKYLLSPETIEALRKPTFDVWLWEPNEMLSCLEHMYHDLGLVRDFSINPVTLRRWLFCVHDNYRNNPFHNFRHCFCVAQMMYSMVWLCSLQEKFSQTDILILMTAAICHDLDHPGYNNTYQINARTELAVRYNDISPLENHHCAVAFQILAEPECNIFSNIPPDGFKQIRQGMITLILATDMARHAEIMDSFKEKMENFDYSNEEHMTLLKMILIKCCDISNEVRPMEVAEPWVDCLLEEYFMQSDREKSEGLPVAPFMDRDKVTKATAQIGFIKFVLIPMFETVTKLFPMVEEIMLQPLWESRDRYEELKRIDDAMKELQKKTDSLTSGATEKSRERSRDVKNSEGDCA

SEQ ID NO: 33209 - protein, 567 aa, Homo sapiens
  REGION 1..567: note = ENSP00000328699
MGSGSSSYRPKAIYLDIDGRIQKVIFSKYCNSSDIMDLFCIATGLPRTPYKVRPVAIKQLSAGVEDKRTTSRGQSAERPLRDRRVVGLEQPRREGAFESGQVEPRPREPQGCYQEGQRIPPEREELIQSVLAQVAEQFSRAFKINELKAEVANHLAVLEKRVELEGLKVVEIEKCKSDIKKMREELAARSSRTNCPCKYSFLDNHKKLTPRRDVPTYPKYLLSPETIEALRKPTFDVWLWEPNEMLSCLEHMYHDLGLVRDFSINPVTLRRWLFCVHDNYRNNPFHNFRHCFCVAQMMYSMVWLCSLQEKFSQTDILILMTAAICHDLDHPGYNNTYQINARTELAVRYNDISPLENHHCAVAFQILAEPECNIFSNIPPDGFKQIRQGMITLILATDMARHAEIMDSFKEKMENFDYSNEEHMTLLKMILIKCCDISNEVRPMEVAEPWVDCLLEEYFMQSDREKSEGLPVAPFMDRDKVTKATAQIGFIKFVLIPMFETVTKLFPMVEEIMLQPLWESRDRYEELKRIDDAMKELQKKTDSLTSGATEKSRERSRDVKNSEGDCA

SEQ ID NO: 33210 - protein, 491 aa, Homo sapiens
  REGION 1..491: note = ENSP00000335365
MGSGSSSYRPKAIYLDIDGRIQKEHDHLPADHRRRHGLHRPHHAREFRTHSVQSETCGHQATLRAFKINELKAEVANHLAVLEKRVELEGLKVVEIEKCKSDIKKMREELAARSSRTNCPCKYSFLDNHKKLTPRRDVPTYPKYLLSPETIEALRKPTFDVWLWEPNEMLSCLEHMYHDLGLVRDFSINPVTLRRWLFCVHDNYRNNPFHNFRHCFCVAQMMYSMVWLCSLQEKFSQTDILILMTAAICHDLDHPGYNNTYQINARTELAVRYNDISPLENHHCAVAFQILAEPECNIFSNIPPDGFKQIRQGMITLILATDMARHAEIMDSFKEKMENFDYSNEEHMTLLKMILIKCCDISNEVRPMEVAEPWVDCLLEEYFMQSDREKSEGLPVAPFMDRDKVTKATAQIGFIKFVLIPMFETVTKLFPMVEEIMLQPLWESRDRYEELKRIDDAMKELQKKTDSLTSGATEKSRERSRDVKNSEGDCA

SEQ ID NO: 33211 - protein, 552 aa, Homo sapiens
  REGION 1..552: note = ENSP00000381281
MDAFRRNTTISLLTTDDAMVSIDPTMPANSERTPYKVRPVAIKQLSAGVEDKRTTSRGQSAERPLRDRRVVGLEQPRREGAFESGQVEPRPREPQGCYQEGQRIPPEREELIQSVLAQVAEQFSRAFKINELKAEVANHLAVLEKRVELEGLKVVEIEKCKSDIKKMREELAARSSRTNCPCKYSFLDNHKKLTPRRDVPTYPKYLLSPETIEALRKPTFDVWLWEPNEMLSCLEHMYHDLGLVRDFSINPVTLRRWLFCVHDNYRNNPFHNFRHCFCVAQMMYSMVWLCSLQEKFSQTDILILMTAAICHDLDHPGYNNTYQINARTELAVRYNDISPLENHHCAVAFQILAEPECNIFSNIPPDGFKQIRQGMITLILATDMARHAEIMDSFKEKMENFDYSNEEHMTLLKMILIKCCDISNEVRPMEVAEPWVDCLLEEYFMQSDREKSEGLPVAPFMDRDKVTKATAQIGFIKFVLIPMFETVTKLFPMVEEIMLQPLWESRDRYEELKRIDDAMKELQKKTDSLTSGATEKSRERSRDVKNSEGDCA

SEQ ID NO: 33212 - protein, 459 aa, Homo sapiens
  REGION 1..459: note = ENSP00000381285
MDAFRRNTTISLLTTDDAMVSIDPTMPANSERAFKINELKAEVANHLAVLEKRVELEGLKVVEIEKCKSDIKKMREELAARSSRTNCPCKYSFLDNHKKLTPRRDVPTYPKYLLSPETIEALRKPTFDVWLWEPNEMLSCLEHMYHDLGLVRDFSINPVTLRRWLFCVHDNYRNNPFHNFRHCFCVAQMMYSMVWLCSLQEKFSQTDILILMTAAICHDLDHPGYNNTYQINARTELAVRYNDISPLENHHCAVAFQILAEPECNIFSNIPPDGFKQIRQGMITLILATDMARHAEIMDSFKEKMENFDYSNEEHMTLLKMILIKCCDISNEVRPMEVAEPWVDCLLEEYFMQSDREKSEGLPVAPFMDRDKVTKATAQIGFIKFVLIPMFETVTKLFPMVEEIMLQPLWESRDRYEELKRIDDAMKELQKKTDSLTSGATEKSRERSRDVKNSEGDCA

SEQ ID NO: 33213 - protein, 433 aa, Homo sapiens
  REGION 1..433: note = ENSP00000381283
MDAFRRAFKINELKAEVANHLAVLEKRVELEGLKVVEIEKCKSDIKKMREELAARSSRTNCPCKYSFLDNHKKLTPRRDVPTYPKYLLSPETIEALRKPTFDVWLWEPNEMLSCLEHMYHDLGLVRDFSINPVTLRRWLFCVHDNYRNNPFHNFRHCFCVAQMMYSMVWLCSLQEKFSQTDILILMTAAICHDLDHPGYNNTYQINARTELAVRYNDISPLENHHCAVAFQILAEPECNIFSNIPPDGFKQIRQGMITLILATDMARHAEIMDSFKEKMENFDYSNEEHMTLLKMILIKCCDISNEVRPMEVAEPWVDCLLEEYFMQSDREKSEGLPVAPFMDRDKVTKATAQIGFIKFVLIPMFETVTKLFPMVEEIMLQPLWESRDRYEELKRIDDAMKELQKKTDSLTSGATEKSRERSRDVKNSEGDCA

SEQ ID NO: 33214 - protein, 465 aa, Homo sapiens
  REGION 1..465: note = ENSP00000344730
MGSGSSSYRPKAIYLDIDGRIQKHSVQSETCGHQATLRAFKINELKAEVANHLAVLEKRVELEGLKVVEIEKCKSDIKKMREELAARSSRTNCPCKYSFLDNHKKLTPRRDVPTYPKYLLSPETIEALRKPTFDVWLWEPNEMLSCLEHMYHDLGLVRDFSINPVTLRRWLFCVHDNYRNNPFHNFRHCFCVAQMMYSMVWLCSLQEKFSQTDILILMTAAICHDLDHPGYNNTYQINARTELAVRYNDISPLENHHCAVAFQILAEPECNIFSNIPPDGFKQIRQGMITLILATDMARHAEIMDSFKEKMENFDYSNEEHMTLLKMILIKCCDISNEVRPMEVAEPWVDCLLEEYFMQSDREKSEGLPVAPFMDRDKVTKATAQIGFIKFVLIPMFETVTKLFPMVEEIMLQPLWESRDRYEELKRIDDAMKELQKKTDSLTSGATEKSRERSRDVKNSEGDCA

SEQ ID NO: 33215 - protein, 466 aa, Homo sapiens
  REGION 1..466: note = ENSP00000381280
MDAFRSTPYKVRPVAIKQLSEREELIQSVLAQVAEQFSRAFKINELKAEVANHLAVLEKRVELEGLKVVEIEKCKSDIKKMREELAARSSRTNCPCKYSFLDNHKKLTPRRDVPTYPKYLLSPETIEALRKPTFDVWLWEPNEMLSCLEHMYHDLGLVRDFSINPVTLRRWLFCVHDNYRNNPFHNFRHCFCVAQMMYSMVWLCSLQEKFSQTDILILMTAAICHDLDHPGYNNTYQINARTELAVRYNDISPLENHHCAVAFQILAEPECNIFSNIPPDGFKQIRQGMITLILATDMARHAEIMDSFKEKMENFDYSNEEHMTLLKMILIKCCDISNEVRPMEVAEPWVDCLLEEYFMQSDREKSEGLPVAPFMDRDKVTKATAQIGFIKFVLIPMFETVTKLFPMVEEIMLQPLWESRDRYEELKRIDDAMKELQKKTDSLTSGATEKSRERSRDVKNSEGDCA

SEQ ID NO: 33216 - protein, 345 aa, Homo sapiens
  REGION 1..345: note = ENSP00000422464
MSLFGLLLLTSALAGQRQGTQAESNLSSKFQFSSNKEQNGVQDPQHERIITVSTNGSIHSPRFPHTYPRNTVLVWRLVAVEENVWIQLTFDERFGLEDPEDDICKYDFVEVEEPSDGTILGRWCGSGTVPGKQISKGNQIRIRFVSDEYFPSEPGFCIHYNIVMPQFTEAVSPSVLPPSALPLDLLNNAITAFSTLEDLIRYLEPERWQLDLEDLYRPTWQLLGKAFVFGRKSRVVDLNLLTEEVRLYSCTPRNFSVSIREELKRTDTIFWPGCLLVKRCGGNCACCLHNCNECQCVPSKVTKKYHEVLQLRPKTGVRGLHKSLTDVALEHHEECDCVCRGSTGG

SEQ ID NO: 33217 - protein, 50 aa, Homo sapiens
  REGION 1..50: note = ENSP00000274071
MSLFGLLLLTSALAGQRQGTQAESNLSSKFQFSSNKEQNGRNYIQASGLA

SEQ ID NO: 33218 - protein, 53 aa, Homo sapiens
  REGION 1..53: note = ENSP00000424600
  VARIANT 1: note = Any amino acid
XTFDERFGLEDPEDDICKYDFVEVEEPSDGTILGRWCGSGFCIHYNIVMPNLP

SEQ ID NO: 33219 - protein, 282 aa, Homo sapiens
  REGION 1..282: note = ENSP00000410048
MSLFGLLLLTSALAGQRQGTQAESNLSSKFQFSSNKEQNGVQDPQHERIITVSTNGSIHSPRFPHTYPRNTVLVWRLVAVEENVWIQLTFDERFGLEDPEDDICKYDFVEVEEPSDGTILGRWCGSGTVPGKQISKGNQIRIRFVSDEYFPSEPGFCIHYNIVMPQFTEAVSPSVLPPSALPLDLLNNAITAFSTLEDLIRYLEPERWQLDLEDLYRPTWQLLGKAFVFGRKSRVVDLNLLTEEVLQLRPKTGVRGLHKSLTDVALEHHEECDCVCRGSTGG

SEQ ID NO: 33220 - protein, 206 aa, Homo sapiens
  REGION 1..206: note = ENSP00000432909
IFEAVGAQGTVVLDEESLHVDDLDLFDGDSGLRFAEDLEVSELKVGADLEREGDLGEVPPHAVHESNHLTDLYRRDETIQVKGNGYVQSPRFPNSYPRNLLLTWRLHSQENTRIQLVFDNQFGLEEAENDICRYDFVEVEDISETSTIIRGRWCGHKEVPPRIKSRTNQIKITFKSDDYFVAKPGFKIYYSLLEDFQPAAASETNW

SEQ ID NO: 33221 - protein, 364 aa, Homo sapiens
  REGION 1..364: note = ENSP00000302193
MHRLIFVYTLICANFCSCRDTSATPQSASIKALRNANLRRDDLYRRDETIQVKGNGYVQSPRFPNSYPRNLLLTWRLHSQENTRIQLVFDNQFGLEEAENDICRYDFVEVEDISETSTIIRGRWCGHKEVPPRIKSRTNQIKITFKSDDYFVAKPGFKIYYSLLEDFQPAAASETNWESVTSSISGVSYNSPSVTDPTLIADALDKKIAEFDTVEDLLKYFNPESWQEDLENMYLDTPRYRGRSYHDRKSKVDLDRLNDDAKRYSCTPRNYSVNIREELKLANVVFFPRCLLVQRCGGNCGCGTVNWRSCTCNSGKTVKKYHEVLQFEPGHIKRRGRAKTMALVDIQLDHHERCDCICSSRPPR

SEQ ID NO: 33222 - protein, 370 aa, Homo sapiens
  REGION 1..370: note = ENSP00000376865
MHRLIFVYTLICANFCSCRDTSATPQSASIKALRNANLRRDESNHLTDLYRRDETIQVKGNGYVQSPRFPNSYPRNLLLTWRLHSQENTRIQLVFDNQFGLEEAENDICRYDFVEVEDISETSTIIRGRWCGHKEVPPRIKSRTNQIKITFKSDDYFVAKPGFKIYYSLLEDFQPAAASETNWESVTSSISGVSYNSPSVTDPTLIADALDKKIAEFDTVEDLLKYFNPESWQEDLENMYLDTPRYRGRSYHDRKSKVDLDRLNDDAKRYSCTPRNYSVNIREELKLANVVFFPRCLLVQRCGGNCGCGTVNWRSCTCNSGKTVKKYHEVLQFEPGHIKRRGRAKTMALVDIQLDHHERCDCICSSRPPR

SEQ ID NO: 33223 - protein, 1089 aa, Homo sapiens
  REGION 1..1089: note = ENSP00000257290
MGTSHPAFLVLGCLLTGLSLILCQLSLPSILPNENEKVVQLNSSFSLRCFGESEVSWQYPMSEEESSDVEIRNEENNSGLFVTVLEVSSASAAHTGLYTCYYNHTQTEENELEGRHIYIYVPDPDVAFVPLGMTDYLVIVEDDDSAIIPCRTTDPETPVTLHNSEGVVPASYDSRQGFNGTFTVGPYICEATVKGKKFQTIPFNVYALKATSELDLEMEALKTVYKSGETIVVTCAVFNNEVVDLQWTYPGEVKGKGITMLEEIKVPSIKLVYTLTVPEATVKDSGDYECAARQATREVKEMKKVTISVHEKGFIEIKPTFSQLEAVNLHEVKHFVVEVRAYPPPRISWLKNNLTLIENLTEITTDVEKIQEIRYRSKLKLIRAKEEDSGHYTIVAQNEDAVKSYTFELLTQVPSSILDLVDDHHGSTGGQTVRCTAEGTPLPDIEWMICKDIKKCNNETSWTILANNVSNIITEIHSRDRSTVEGRVTFAKVEETIAVRCLAKNLLGAENRELKLVAPTLRSELTVAAAVLVLLVIVIISLIVLVVIWKQKPRYEIRWRVIESISPDGHEYIYVDPMQLPYDSRWEFPRDGLVLGRVLGSGAFGKVVEGTAYGLSRSQPVMKVAVKMLKPTARSSEKQALMSELKIMTHLGPHLNIVNLLGACTKSGPIYIITEYCFYGDLVNYLHKNRDSFLSHHPEKPKKELDIFGLNPADESTRSYVILSFENNGDYMDMKQADTTQYVPMLERKEVSKYSDIQRSLYDRPASYKKKSMLDSEVKNLLSDDNSEGLTLLDLLSFTYQVARGMEFLASKNCVHRDLAARNVLLAQGKIVKICDFGLARDIMHDSNYVSKGSTFLPVKWMAPESIFDNLYTTLSDVWSYGILLWEIFSLGGTPYPGMMVDSTFYNKIKSGYRMAKPDHATSEVYEIMVKCWNSEPEKRPSFYHLSEIVENLLPGQYKKSYEKIHLDFLKSDHPAVARMRVDSDNAYIGVTYKNEEDKLKDWEGGLDEQRLSADSGYIIPLPDIDPVPEEEDLGKRNRHSSQTSEESAIETGSSSSTFIKREDETIEDIDMMDDIGIDSSDLVEDSFL

SEQ ID NO: 33224 - protein, 218 aa, Homo sapiens
  REGION 1..218: note = ENSP00000425648
MGTSHPAFLVLGCLLTGLSLILCQLSLPSILPNENEKVVQLNSSFSLRCFGESEVSWQYPMSEEESSDVEIRNEENNSGLFVTVLEVSSASAAHTGLYTCYYNHTQTEENELEGRHIYIYVPDPDVAFVPLGMTDYLVIVEDDDSAIIPCRTTDPETPVTLHNSEGVVPASYDSRQGFNGTFTVGPYICEATVKGKKFQTIPFNVYALKGTCIISFLL

SEQ ID NO: 33225 - protein, 147 aa, Homo sapiens
  REGION 1..147: note = ENSP00000425626
MLPRLVLNSWAQMICLPQLPKFPRAMGTSHPAFLVLGCLLTGLSLILCQLSLPSILPNENEKVVQLNSSFSLRCFGESEVSWQYPMSEEESSDVEIRNEENNSGLFVTVLEVSSASAAHTGLYTCYYNHTQTEENELEGRHIYIYVP

SEQ ID NO: 33226 - protein, 743 aa, Homo sapiens
  REGION 1..743: note = ENSP00000424218
MGTSHPAFLVLGCLLTGLSLILCQLSLPSILPNENEKVVQLNSSFSLRCFGESEVSWQYPMSEEESSDVEIRNEENNSGLFVTVLEVSSASAAHTGLYTCYYNHTQTEENELEGRHIYIYVPDPDVAFVPLGMTDYLVIVEDDDSAIIPCRTTDPETPVTLHNSEGVVPASYDSRQGFNGTFTVGPYICEATVKGKKFQTIPFNVYALKATSELDLEMEALKTVYKSGETIVVTCAVFNNEVVDLQWTYPGEVKGKGITMLEEIKVPSIKLVYTLTVPEATVKDSGDYECAARQATREVKEMKKVTISVHEKGFIEIKPTFSQLEAVNLHEVKHFVVEVRAYPPPRISWLKNNLTLIENLTEITTDVEKIQEIRYRSKLKLIRAKEEDSGHYTIVAQNEDAVKSYTFELLTQVPSSILDLVDDHHGSTGGQTVRCTAEGTPLPDIEWMICKDIKKCNNETSWTILANNVSNIITEIHSRDRSTVEGRVTFAKVEETIAVRCLAKNLLGAENRELKLVAPTLRSELTVAAAVLVLLVIVIISLIVLVVIWKQKPRYEIRWRVIESISPDGHEYIYVDPMQLPYDSRWEFPRDGLVLGRVLGSGAFGKVVEGTAYGLSRSQPVMKVAVKMLKPTARSSEKQALMSELKIMTHLGPHLNIVNLLGACTKSGPIYIITEYCFYGDLVNYLHKNRDSFLSHHPEKPKKELDIFGLNPADESTRSSGQGCLSSGTLQELSVDLQARGPC

SEQ ID NO: 33227 - protein, 159 aa, Homo sapiens
  REGION 1..159: note = ENSP00000425902
MGTSHPAFLVLGCLLTGLSLILCQLSLPSILPNENEKVVQLNSSFSLRCFGESEVSWQYPMSEEESSDVEIRNEENNSGLFVTVLEVSSASAAHTGLYTCYYNHTQTEENELEGRHIYIYVPDPDVAFVPLGMTDYLVIVEDDDSAIIPCRTTDPETPV

SEQ ID NO: 33228 - protein, 158 aa, Homo sapiens
  REGION 1..158: note = ENSP00000426472
MGTSHPAFLVLGCLLTGLSLILCQLSLPSILPNENEKVVQLNSSFSLRCFGESEVSWQYPMSEEESSDVEIRNEENNSGLFVTVLEVSSASAAHTGLYTCYYNHTQTEENELEGRHIYIYVPDPDVAFVPLGMTDYLVIVEDDDSAIIPCRTTDPETP

SEQ ID NO: 33229 - protein, 154 aa, Homo sapiens
  REGION 1..154: note = ENSP00000425232
MGTSHPAFLVLGCLLTGLSLILCQLSLPSILPNENEKVVQLNSSFSLRCFGESEVSWQYPMSEEESSDVEIRNEENNSGLFVTVLEVSSASAAHTGLYTCYYNHTQTEENELEGRHIYIYVPDPDVAFVPLGMTDYLVIVEDDDSAIIPCRTTD

SEQ ID NO: 33230 - protein, 1089 aa, Homo sapiens; identical to SEQ ID NO: 33223
  REGION 1..1089: note = ENSP00000257290

SEQ ID NO: 33231 - protein, 218 aa, Homo sapiens; identical to SEQ ID NO: 33224
  REGION 1..218: note = ENSP00000425648

SEQ ID NO: 33232 - protein, 147 aa, Homo sapiens; identical to SEQ ID NO: 33225
  REGION 1..147: note = ENSP00000425626

SEQ ID NO: 33233 - protein, 743 aa, Homo sapiens; identical to SEQ ID NO: 33226
  REGION 1..743: note = ENSP00000424218

SEQ ID NO: 33234 - protein, 159 aa, Homo sapiens; identical to SEQ ID NO: 33227
  REGION 1..159: note = ENSP00000425902

SEQ ID NO: 33235 - protein, 158 aa, Homo sapiens; identical to SEQ ID NO: 33228
  REGION 1..158: note = ENSP00000426472

SEQ ID NO: 33236 - protein, 154 aa, Homo sapiens; identical to SEQ ID NO: 33229
  REGION 1..154: note = ENSP00000425232

SEQ ID NO: 33237 - protein, 1106 aa, Homo sapiens
  REGION 1..1106: note = ENSP00000261799
MRLPGAMPALALKGELLLLSLLLLLEPQISQGLVVTPPGPELVLNVSSTFVLTCSGSAPVVWERMSQEPPQEMAKAQDGTFSSVLTLTNLTGLDTGEYFCTHNDSRGLETDERKRLYIFVPDPTVGFLPNDAEELFIFLTEITEITIPCRVTDPQLVVTLHEKKGDVALPVPYDHQRGFSGIFEDRSYICKTTIGDREVDSDAYYVYRLQVSSINVSVNAVQTVVRQGENITLMCIVIGNEVVNFEWTYPRKESGRLVEPVTDFLLDMPYHIRSILHIPSAELEDSGTYTCNVTESVNDHQDEKAINITVVESGYVRLLGEVGTLQFAELHRSRTLQVVFEAYPPPTVLWFKDNRTLGDSSAGEIALSTRNVSETRYVSELTLVRVKVAEAGHYTMRAFHEDAEVQLSFQLQINVPVRVLELSESHPDSGEQTVRCRGRGMPQPNIIWSACRDLKRCPRELPPTLLGNSSEEESQLETNVTYWEEEQEFEVVSTLRLQHVDRPLSVRCTLRNAVGQDTQEVIVVPHSLPFKVVVISAILALVVLTIISLIILIMLWQKKPRYEIRWKVIESVSSDGHEYIYVDPMQLPYDSTWELPRDQLVLGRTLGSGAFGQVVEATAHGLSHSQATMKVAVKMLKSTARSSEKQALMSELKIMSHLGPHLNVVNLLGACTKGGPIYIITEYCRYGDLVDYLHRNKHTFLQHHSDKRRPPSAELYSNALPVGLPLPSHVSLTGESDGGYMDMSKDESVDYVPMLDMKGDVKYADIESSNYMAPYDNYVPSAPERTCRATLINESPVLSYMDLVGFSYQVANGMEFLASKNCVHRDLAARNVLICEGKLVKICDFGLARDIMRDSNYISKGSTFLPLKWMAPESIFNSLYTTLSDVWSFGILLWEIFTLGGTPYPELPMNEQFYNAIKRGYRMAQPAHASDEIYEIMQKCWEEKFEIRPPFSQLVLLLERLLGEGYKKKYQQVDEEFLRSDHPAILRSQARLPGFHGLRSPLDTSSVLYTAVQPNEGDNDYIIPLPDPKPEVADEGPLEGSPSLASSTLNEVNTSSTISCDSPLEPQDEPEPEPQLELQVEPEPELEQLPDSGCPAPRAEAEDSFL

SEQ ID NO: 33238 - protein, 239 aa, Homo sapiens
  REGION 1..239: note = ENSP00000430026
MRLPGAMPALALKGELLLLSLLLLLEPQISQGLVVTPPGPELVLNVSSTFVLTCSGSAPVVWERMSQEPPQEMAKAQDGTFSSVLTLTNLTGLDTGEYFCTHNDSRGLETDERKRLYIFVPDPTVGFLPNDAEELFIFLTEITEITIPCRVTDPQLVVTLHEKKGDVALPVPYDHQRGFSGIFEDRSYICKTTIGDREVDSDAYYVYRLQGEPPFWPDAQQSVIHQRLCERSADCGPPG

SEQ ID NO: 33239 - protein, 146 aa, Homo sapiens
  REGION 1..146: note = ENSP00000429218
MSQEPPQEMAKAQDGTFSSVLTLTNLTGLDTGEYFCTHNDSRGLETDERKRLYIFVPDPTVGFLPNDAEELFIFLTEITEITIPCRVTDPQLVVTLHEKKGDVALPVPYDHQRGFSGIFEDRSYICKTTIGDREVDSDAYYVYRLQ

SEQ ID NO: 33240 - protein, 174 aa, Homo sapiens
  REGION 1..174: note = ENSP00000430715
MRLPGAMPALALKGELLLLSLLLLLEPQISQGLVVTPPGPELVLNVSSTFVLTCSGSAPVVWERMSQEPPQEMAKAQDGTFSSVLTLTNLTGLDTGEYFCTHNDSRGLETDERKRLYIFVPDPTVGFLPNDAEELFIFLTEITEITIPCRVTDPQLVVTLHEKKGDVALPVPYD

SEQ ID NO: 33241 - protein, 406 aa, Homo sapiens
  REGION 1..406: note = ENSP00000368460
MRLFRWLLKQPVPKQIERYSRFSPSPLSIKQFLDFGRDNACEKTSYMFLRKELPVRLANTMREVNLLPDNLLNRPSVGLVQSWYMQSFLELLEYENKSPEDPQVLDNFLQVLIKVRNRHNDVVPTMAQGVIEYKEKFGFDPFISTNIQYFLDRFYTNRISFRMLINQHTLLFGGDTNPVHPKHIGSIDPTCNVADVVKDAYETAKMLCEQYYLVAPELEVEEFNAKAPDKPIQVVYVPSHLFHMLFELFKNSMRATVELYEDRKEGYPAVKTLVTLGKEDLSIKISDLGGGVPLRKIDRLFNYMYSTAPRPSLEPTRAAPLAGFGYGLPISRLYARYFQGDLKLYSMEGVGTDAVIYLKALSSESFERLPVFNKSAWRHYKTTPEADDWSNPSSEPRDASKYKAKQ

SEQ ID NO: 33242 - protein, 415 aa, Homo sapiens
  REGION 1..415: note = ENSP00000387536
MRLFRWLLKQPVPKQIERYSRFSPSPLSIKQFLDFGRDNACEKTSYMFLRKELPVRLANTMREVNLLPDNLLNRPSVGLVQSWYMQSFLELLEYENKSPEDPQVLDNFLQVLIKVRNRHNDVVPTMAQGVIEYKEKFGFDPFISTNIQYFLDRFYTNRISFRMLINQHTLLFGGDTNPVHPKHIGSIDPTCNVADVVKDAYETAKMLCEQYYLVAPELEVEEFNAKAPDKPIQVVYVPSHLFHMLFELFKNSMRATVELYEDRKEGYPAVKTLVTLGKEDLSIKISDLGGGVPLRKIDRLFNYMYSTAPRPSLEPTRAAPLAGFGYGLPISRLYARYFQGDLKLYSMEGVGTDAVIYLKALSSESFERLPVFNKSAWRHYKTTPEADDWSNPSSEPRDASKYKAKQDKIKTNRTF

SEQ ID NO: 33243 - protein, 364 aa, Homo sapiens
  REGION 1..364: note = ENSP00000284770
MPQTVILPGPAPWGFRLSGGIDFNQPLVITRITPGSKAAAANLCPGDVILAIDGFGTESMTHADAQDRIKAAAHQLCLKIDRGETHLWSPQVSEDGKAHPFKINLESEPQDGNYFEHKHNIRPKPFVIPGRSSGCSTPSGIDCGSGRSTPSSVSTVSTICPGDLKVAAKLAPNIPLEMELPGVKIVHAQFNTPMQLYSDDNIMETLQGQVSTALGETPLMSEPTASVPPESDVYRMLHDNRNEPTQPRQSGSFRVLQGMVDDGSDDRPAGTRSVRAPVTKVHGGSGGAQRMPLCDKCGSGIVGAVVKARDKYRHPECFVCADCNLNLKQKGYFFIEGELYCETHARARTKPPEGYDTVTLYPKA

SEQ ID NO: 33244 - protein, 316 aa, Homo sapiens
  REGION 1..316: note = ENSP00000284771
MPQTVILPGPAPWGFRLSGGIDFNQPLVITRITPGSKAAAANLCPGDVILAIDGFGTESMTHADAQDRIKAAAHQLCLKIDRGETHLWSPQVSEDGKAHPFKINLESEPQEFKPIGTAHNRRAQPFVAAANIDDKRQVVSASYNSPIGLYSTSNIQDALHGQLRGLIPSSPQNEPTASVPPESDVYRMLHDNRNEPTQPRQSGSFRVLQGMVDDGSDDRPAGTRSVRAPVTKVHGGSGGAQRMPLCDKCGSGIVGAVVKARDKYRHPECFVCADCNLNLKQKGYFFIEGELYCETHARARTKPPEGYDTVTLYPKA

SEQ ID NO: 33245 - protein, 42 aa, Homo sapiens
  REGION 1..42: note = ENSP00000425138
MPQTVILPGPAPWGFRLSGGIDFNQPLVITRGRNSLMVSTSI

SEQ ID NO: 33246 - protein, 42 aa, Homo sapiens; identical to SEQ ID NO: 33245
  REGION 1..42: note = ENSP00000421972

SEQ ID NO: 33247 - protein, 197 aa, Homo sapiens
  REGION 1..197: note = ENSP00000481771
MPQTVILPGPAPWGFRLSGGIDFNQPLVITRDGNYFEHKHNIRPKPFVIPGRSSEPTASVPPESDVYRMLHDNRNEPTQPRQSGSFRVLQGMVDDGSDDRPAGTRSVRAPVTKVHGGSGGAQRMPLCDKCGSGIVGAVVKARDKYRHPECFVCADCNLNLKQKGYFFIEGELYCETHARARTKPPEGYDTVTLYPKA

SEQ ID NO: 33248 - protein, 276 aa, Homo sapiens
  REGION 1..276: note = ENSP00000284767
MPQTVILPGPAPWGFRLSGGIDFNQPLVITRITPGSKAAAANLCPGDVILAIDGFGTESMTHADAQDRIKAAAHQLCLKIDRGETHLWSPQVSEDGKAHPFKINLESEPQDGNYFEHKHNIRPKPFVIPGRSSEPTASVPPESDVYRMLHDNRNEPTQPRQSGSFRVLQGMVDDGSDDRPAGTRSVRAPVTKVHGGSGGAQRMPLCDKCGSGIVGAVVKARDKYRHPECFVCADCNLNLKQKGYFFIEGELYCETHARARTKPPEGYDTVTLYPKA

SEQ ID NO: 33249 - protein, 42 aa, Homo sapiens; identical to SEQ ID NO: 33245
  REGION 1..42: note = ENSP00000486107

SEQ ID NO: 33250 - protein, 330 aa, Homo sapiens
  REGION 1..330: note = ENSP00000253754
MPHSVTLRGPSPWGFRLVGGRDFSAPLTISRVHAGSKAALAALCPGDLIQAINGESTELMTHLEAQNRIKGCHDHLTLSVSRPEGRSWPSAPDDSKAQAHRIHIDPEIQDGSPTTSRRPSGTGTGPEDGRPSLGSPYGQPPRFPVPHNGSSEATLPAQMSTLHVSPPPSADPARGLPRSRDCRVDLGSEVYRMLREPAEPVAAEPKQSGSFRYLQGMLEAGEGGDWPGPGGPRNLKPTASKLGAPLSGLQGLPECTRCGHGIVGTIVKARDKLYHPECFMCSDCGLNLKQRGYFFLDERLYCESHAKARVKPPEGYDVVAVYPNAKVELV

SEQ ID NO: 33251 - protein, 246 aa, Homo sapiens
  REGION 1..246: note = ENSP00000368303
MPHSVTLRGPSPWGFRLVGGRDFSAPLTISRVHAGSKAALAALCPGDLIQAINGESTELMTHLEAQNRIKGCHDHLTLSVSRPEGRSWPSAPDDSKAQAHRIHIDPEIQDGSPTTSRRPSGTGTGPEDGRPSLGSPYGQPPRFPVPHNGSSEATLPAQMSTLHVSPPPSADPARGLPRSRDCRVDLGSEVYRMLREPAEPVAAEPKQSGSFRYLQGMLEAGEGGAPSSRHGTSSTIPSASCAVTAA

SEQ ID NO: 33252 - protein, 121 aa, Homo sapiens
  REGION 1..121: note = ENSP00000411753
MTHLEAQNRIKGCHDHLTLSVSRPEGRSWPSAPDDSKAQAHRIHIDPEIQDGSPTTSRRPSGTGTGPEDGRPSLGSPYGQPPRFPVPHNGSSEATLPAQMSTLHVSPPPSADPARGLPRSR

SEQ ID NO: 33253 - protein, 492 aa, Homo sapiens
  REGION 1..492: note = ENSP00000434559
MVTPSPPGNHSLSLEAPRLHTASDLLDPWSLERPRFCLLSKEEGKSFGFHLQQELGRAGHVVCRVDPGTSAQRQGLQEGDRILAVNNDVVEHEDYAVVVRRIRASSPRVLLTVLARHAHDVARAQLGEDAHLCPTLGPGVRPRLCHIVKDEGGFGFSVTHGNQGPFWLVLSTGGAAERAGVPPGARLLEVNGVSVEKFTHNQLTRKLWQSGQQVTLLVAGPEVEEQCRQLGLPLAAPLAEGWALPTKPRCLHLEKGPQGFGFLLREEKGLDGRPGQFLWEVDPGLPAKKAGMQAGDRLVAVAGESVEGLGHEETVSRIQGQGSCVSLTVVDPEADRFFSMVRLSPLLFLENTEAPASPRGSSSASLVETEDPSLEDTSVPSVPLGSRQCFLYPGPGGSYGFRLSCVASGPRLFISQVTPGGSAARAGLQVGDVILEVNGYPVGGQNDLERLQQLPEAEPPLCLKLAARSLRGLEAWIPPGAAEDWALASDLL

SEQ ID NO: 33254 - protein, 571 aa, Homo sapiens
  REGION 1..571: note = ENSP00000431164
MVTPSPPGNHSLSLEAPRLHTASDLLGNHSLGLPLITALVGSRDRRGRVFSPVPVPLPTNPTTQHPTRQKLPSTLSGHRVCQAHGEPVLGLCPLLPLFCCPPHPPDPWSLERPRFCLLSKEEGKSFGFHLQQELGRAGHVVCRVDPGTSAQRQGLQEGDRILAVNNDVVEHEDYAVVVRRIRASSPRVLLTVLARHAHDVARAQLGEDAHLCPTLGPGVRPRLCHIVKDEGGFGFSVTHGNQGPFWLVLSTGGAAERAGVPPGARLLEVNGVSVEKFTHNQLTRKLWQSGQQVTLLVAGPEVEEQCRQLGLPLAAPLAEGWALPTKPRCLHLEKGPQGFGFLLREEKGLDGRPGQFLWEVDPGLPAKKAGMQAGDRLVAVAGESVEGLGHEETVSRIQGQGSCVSLTVVDPEADRFFSMVRLSPLLFLENTEAPASPRGSSSASLVETEDPSLEDTSVPSVPLGSRQCFLYPGPGGSYGFRLSCVASGPRLFISQVTPGGSAARAGLQVGDVILEVNGYPVGGQNDLERLQQLPEAEPPLCLKLAARSLRGLEAWIPPGAAEDWALASDLL

SEQ ID NO: 33255 - protein, 119 aa, Homo sapiens
  REGION 1..119: note = ENSP00000434264
MEKAADLQDTASLTLKFKFNPKLGIDNPVLSLAEDHDPYDPWSLERPRFCLLSKEEGKSFGFHLQQELGRAGHVVCRVDPGTSAQRQGLQEGDRILAVNNDVVEHEDYAVAIRVLSGWC

SEQ ID NO: 33256 - protein, 505 aa, Homo sapiens
  REGION 1..505: note = ENSP00000347742
MEKAADLQDTASLTLKFKFNPKLGIDNPVLSLAEDHDPYDPWSLERPRFCLLSKEEGKSFGFHLQQELGRAGHVVCRVDPGTSAQRQGLQEGDRILAVNNDVVEHEDYAVVVRRIRASSPRVLLTVLARHAHDVARAQLGEDAHLCPTLGPGVRPRLCHIVKDEGGFGFSVTHGNQGPFWLVLSTGGAAERAGVPPGARLLEVNGVSVEKFTHNQLTRKLWQSGQQVTLLVAGPEVEEQCRQLGLPLAAPLAEGWALPTKPRCLHLEKGPQGFGFLLREEKGLDGRPGQFLWEVDPGLPAKKAGMQAGDRLVAVAGESVEGLGHEETVSRIQGQGSCVSLTVVDPEADRFFSMVRLSPLLFLENTEAPASPRGSSSASLVETEDPSLEDTSVPSVPLGSRQCFLYPGPGGSYGFRLSCVASGPRLFISQVTPGGSAARAGLQVGDVILEVNGYPVGGQNDLERLQQLPEAEPPLCLKLAARSLRGLEAWIPPGAAEDWALASDLL

SEQ ID NO: 33257 - protein, 491 aa, Homo sapiens
  REGION 1..491: note = ENSP00000327107
MEKAADLQDTASLTLKFKFNPKLGIDNPVLSLAEDHDPYDPWSLERPRFCLLSKEEGKSFGFHLQQELGRAGHVVCRVDPGTSAQRQGLQEGDRILAVNNDVVEHEDYAVVVRRIRASSPRVLLTVLARHAHDVARAQLGEDAHLCPTLGPGVRPRLCHIVKDEGGFGFSVTHGNQGPFWLVLSTGGAAERAGVPPGARLLEVNGLWQSGQQVTLLVAGPEVEEQCRQLGLPLAAPLAEGWALPTKPRCLHLEKGPQGFGFLLREEKGLDGRPGQFLWEVDPGLPAKKAGMQAGDRLVAVAGESVEGLGHEETVSRIQGQGSCVSLTVVDPEADRFFSMVRLSPLLFLENTEAPASPRGSSSASLVETEDPSLEDTSVPSVPLGSRQCFLYPGPGGSYGFRLSCVASGPRLFISQVTPGGSAARAGLQVGDVILEVNGYPVGGQNDLERLQQLPEAEPPLCLKLAARSLRGLEAWIPPGAAEDWALASDLL

SEQ ID NO: 33258 - protein, 133 aa, Homo sapiens
  REGION 1..133: note = ENSP00000474447
MAQGFAVGFDPLGLGDLSSGSLSSLSSRGHLGSDSGSTATRYLLRKQQRLLNGPPRGIRASSPMGRVILINSPIEANSDESDIIHSVRVEKSPAGRLGFSVRGGSEHGLGIFVSKVEEGSSAGKQNPQAEVHA

SEQ ID NO: 33259 - protein, 208 aa, Homo sapiens
  REGION 1..208: note = ENSP00000412533
  VARIANT 1: note = Any amino acid
XPRPPITRSQSYLTLWEEKQQRKKEKSGSPGEKGALQRSKTLMNLFFKGGRQGRLARDGRREAWTLDSGSLAKTYPRLDIEKAGGVGPVQKFVTWRLRRDQERGRALLSARSGSPSSQLPNVDEQVQAWESRRPLIQDLAQRLLTDDEVLAVTRHCSRYVHEGGIEDLVRPLLAILDRPEKLLLLQDIRSVVAPTDLGRFDSMVMLVE

SEQ ID NO: 33260 - protein, 517 aa, Homo sapiens
  REGION 1..517: note = ENSP00000359234
MAQGFAVGFDPLGLGDLSSGSLSSLSSRGHLGSDSGSTATRYLLRKQQRLLNGPPRGIRASSPMGRVILINSPIEANSDESDIIHSVRVEKSPAGRLGFSVRGGSEHGLGIFVSKVEEGSSAERAGLCVGDKITEVNGLSLESTTMGSAVKVLTSSSRLHMMVRRMGRVPGIKFSKEKTTWVDVVNRRLVVEKCGSTPSDTSSEDGVRRIVHLYTTSDDFCLGFNIRGGKEFGLGIYVSKVDHGGLAEENGIKVGDQVLAANGVRFDDISHSQAVEVLKGQTHIMLTIKETGRYPAYKEMVSEYCWLDRLSNGVLQQLSPASESSSSVSSCASSAPYSSGSLPSDRMDICLGQEEPGSRGPGWGRADTAMQTEPDAGGRVETWCSVRPTVILRDTAIRSDGPHPGRRLDSALSESPKTALLLALSRPRPPITRSQSYLTLWEEKQQRKKEKSGSPGEKGALQRSKTLMNLFFKGGRQGRLARDGRREAWTLDSGSLAKTYPRLDIEKEMGVSPCCPG

SEQ ID NO: 33261 - protein, 181 aa, Homo sapiens
  REGION 1..181: note = ENSP00000474831
MAQGFAVGFDPLGLGDLSSGSLSSLSSRGHLGSDSGSTATRYLLRKQQRLLNGPPRGIRASSPMGRVILINSPIEANSDESDIIHSVRVEKSPAGRLGFSVRGGSEHGLGIFVSKVEEGSSAERAGLCVGDKITEVNGLSLESTTMGSAVKVLTSSSRLHMMVRRMGRVPGIKFSKEKTTW

SEQ ID NO: 33262 - protein, 1033 aa, Homo sapiens
  REGION 1..1033: note = ENSP00000480489
MAQGFAVGFDPLGLGDLSSGSLSSLSSRGHLGSDSGSTATRYLLRKQQRLLNGPPRGIRASSPMGRVILINSPIEANSDESDIIHSVRVEKSPAGRLGFSVRGGSEHGLGIFVSKVEEGSSAERAGLCVGDKITEVNGLSLESTTMGSAVKVLTSSSRLHMMVRRMGRVPGIKFSKEKTTWVDVVNRRLVVEKCGSTPSDTSSEDGVRRIVHLYTTSDDFCLGFNIRGGKEFGLGIYVSKVDHGGLAEENGIKVGDQVLAANGVRFDDISHSQAVEVLKGQTHIMLTIKETGRYPAYKEMVSEYCWLDRLSNGVLQQLSPASESSSSVSSCASSAPYSSGSLPSDRMDICLGQEEPGSRGPGWGRADTAMQTEPDAGGRVETWCSVRPTVILRDTAIRSDGPHPGRRLDSALSESPKTALLLALSRPRPPITRSQSYLTLWEEKQQRKKEKSGSPGEKGALQRSKTLMNLFFKGGRQGRLARDGRREAWTLDSGSLAKTYPRLDIEKAGGVGPVQKFVTWRLRRDQERGRALLSARSGSPSSQLPNVDEQVQAWESRRPLIQDLAQRLLTDDEVLAVTRHCSRYVHEGGIEDLVRPLLAILDRPEKLLLLQDIRSVVAPTDLGRFDSMVMLVELEAFEALKSRAVRPPALRPARQDTPPKRHLITPVPDSRGGFYLLPVNGFPEEEDNGELRERLGALKVSPSASAPRHPHKGIPPLQDVPVDAFTPLRIACTPPPQLPPVAPRPLRPNWLLTEPLSREHPPQSQIRGRAQSRSRSRSRSRSRSSRGQGKSPGRRSPSPVPTPAPSMTNGRYHKPRKARPPLPRPLDGEAAKVGAKQGPSESGTEGTAKEAAMKNPSGELKTVTLSKMKQSLGISISGGIESKVQPMVKIEKIFPGGAAFLSGALQAGFELVAVDGENLEQVTHQRAVDTIRRAYRNKAREPMELVVRVPGPSPRPSPSDSSALTDGGLPADHLPAHQPLDAAPVPAHWLPEPPTNPQTPPTDARLLQPTPSPAPSPALQTPDSKPAPSPRIP

SEQ ID NO: 33263 - protein, 1036 aa, Homo sapiens
  REGION 1..1036: note = ENSP00000384197
MGFALERFAEAVDPALECKLCGQVLEEPLCTPCGHVFCASCLLPWAVRRRRCPLQCQPLAPGELYRVLPLRSLIQKLRVQCDYRARGCGHSVRLHELEAHVEHCDFGPARRLRSRGGCASGLGGGEVPARGGCGPTPRAGRGGGARGGPPGGRWGRGRGPGPRVLAWRRREKALLAQLWALQGEVQLTARRYQEKFTQYMAHVRNFVGDLGGGHRRDGEHKPFTIVLERENDTLGFNIIGGRPNQNNQEGTSTEGIYVSKILENGPADRADGLEIHDKIMEVNGKDLSKATHEEAVEAFRNAKEPIVVQVLRRTPLSRPAYGMASEVQLMNASTQTDITFEHIMALAKLRPPTPPVPDICPFLLSDSCHSLHPMEHEFYEDNEYISSLPADADRTEDFEYEEVELCRVSSQEKLGLTVCYRTDDEEDTGIYVSEVDPNSIAAKDGRIREGDRILQINGEDVQNREEAVALLSNDECKRIVLLVARPEIQLDEGWLEDERNEFLEELNLEMLEEEHNEAMQPTANEVEQPKKQEEEEGTTDTATSSSNNHEKDSGVGRTDESLRNDESSEQENAAEDPNSTSLKSKRDLGQSQDTLGSVELQYNESLVSGEYIDSDCIGNPDEDCERFRQLLELKCKIRNHGEYDLYYSSSTIECNQGEQEGVEHELQLLNEELRNIELECQNIMQAHRLQKVTDQYGDIWTLHDGGFRNYNTSIDMQRGKLDDIMEHPEKSDKDSSSAYNTAESCRSTPLTVDRSPDSSLPRVINLTNKKNLRSTMAATQSSSGQSSKESTSTKAKTTEQGCSAESKEKVLEGSKLPDQEKAVSEHIPYLSPYHSSSYRYANIPAHARHYQSYMQLIQQKSAVEYAQSQLSLVSMCKESQKCSEPKMEWKVKIRSDGTRYITKRPVRDRILKERALKIKEERSGMTTDDDTMSEMKMGRYWSKEERKQHLVRAKEQRRRREFMMRSRLECLKESPQSGSEGKKEINIIELSHKKMMKKRNKKILDNWMTIQELMTHGAKSPDGTRVHNAFLSVTTV

SEQ ID NO: 33264 - protein, 778 aa, Homo sapiens
  REGION 1..778: note = ENSP00000439990
MGCNLCTFQKREEHYKLLYEVSQVNGKDLSKATHEEAVEAFRNAKEPIVVQVLRRTPLSRPAYGMASEVQLMNASTQTDITFEHIMALAKLRPPTPPVPDICPFLLSDSCHSLHPMEHEFYEDNEYISSLPADADRTEDFEYEEVELCRVSSQEKLGLTVCYRTDDEEDTGIYVSEVDPNSIAAKDGRIREGDRILQINGEDVQNREEAVALLSNDECKRIVLLVARPEIQLDEGWLEDERNEFLEELNLEMLEEEHNEAMQPTANEVEQPKKQEEEEGTTDTATSSSNNHEKDSGVGRTDESLRNDESSEQENAAEDPNSTSLKSKRDLGQSQDTLGSVELQYNESLVSGEYIDSDCIGNPDEDCERFRQLLELKCKIRNHGEYDLYYSSSTIECNQGEQEGVEHELQLLNEELRNIELECQNIMQAHRLQKVTDQYGDIWTLHDGGFRNYNTSIDMQRGKLDDIMEHPEKSDKDSSSAYNTAESCRSTPLTVDRSPDSSLPRVINLTNKKNLRSTMAATQSSSGQSSKESTSTKAKTTEQGCSAESKEKVLEGSKLPDQEKAVSEHIPYLSPYHSSSYRYANIPAHARHYQSYMQLIQQKSAVEYAQSQLSLVSMCKESQKCSEPKMEWKVKIRSDGTRYITKRPVRDRILKERALKIKEERSGMTTDDDTMSEMKMGRYWSKEERKQHLVRAKEQRRRREFMMRSRLECLKESPQSGSEGKKEINIIELSHKKMMKKRNKKILDNWMTIQELMTHGAKSPDGTRVHNAFLSVTTV

SEQ ID NO: 33265 - protein, 776 aa, Homo sapiens
  REGION 1..776: note = ENSP00000298919
MSGKRQFFLKPLALLTCWPSTVNGKDLSKATHEEAVEAFRNAKEPIVVQVLRRTPLSRPAYGMASEVQLMNASTQTDITFEHIMALAKLRPPTPPVPDICPFLLSDSCHSLHPMEHEFYEDNEYISSLPADADRTEDFEYEEVELCRVSSQEKLGLTVCYRTDDEEDTGIYVSEVDPNSIAAKDGRIREGDRILQINGEDVQNREEAVALLSNDECKRIVLLVARPEIQLDEGWLEDERNEFLEELNLEMLEEEHNEAMQPTANEVEQPKKQEEEEGTTDTATSSSNNHEKDSGVGRTDESLRNDESSEQENAAEDPNSTSLKSKRDLGQSQDTLGSVELQYNESLVSGEYIDSDCIGNPDEDCERFRQLLELKCKIRNHGEYDLYYSSSTIECNQGEQEGVEHELQLLNEELRNIELECQNIMQAHRLQKVTDQYGDIWTLHDGGFRNYNTSIDMQRGKLDDIMEHPEKSDKDSSSAYNTAESCRSTPLTVDRSPDSSLPRVINLTNKKNLRSTMAATQSSSGQSSKESTSTKAKTTEQGCSAESKEKVLEGSKLPDQEKAVSEHIPYLSPYHSSSYRYANIPAHARHYQSYMQLIQQKSAVEYAQSQLSLVSMCKESQKCSEPKMEWKVKIRSDGTRYITKRPVRDRILKERALKIKEERSGMTTDDDTMSEMKMGRYWSKEERKQHLVRAKEQRRRREFMMRSRLECLKESPQSGSEGKKEINIIELSHKKMMKKRNKKILDNWMTIQELMTHGAKSPDGTRVHNAFLSVTTV

SEQ ID NO: 33266 - protein, 130 aa, Homo sapiens
  REGION 1..130: note = ENSP00000353660
MAEYGTLLQDLTNNITLEDLEQLKSACKEDIPSEKSEEITTGSAWFSFLESHNKLDKDNLSYIEHIFEISRRPDLLTMVVDYRTRVLKISEEDELDTKLTRIPSAKKYKDIIRQPSEEEIIKLAPPPKKA

SEQ ID NO: 33267 - protein, 108 aa, Homo sapiens
  REGION 1..108: note = ENSP00000357056
MAEYGTLLQDLTNNITLEDLEQLKSACKEDIPSEKNNLSYIEHIFEISRRPDLLTMVVDYRTRVLKISEEDELDTKLTRIPSAKKYKDIIRQPSEEEIIKLAPPPKKA

SEQ ID NO: 33268 - protein, 151 aa, Homo sapiens
  REGION 1..151: note = ENSP00000357055
MEDEGNKLCQAPPWPGQTSPVMAEYGTLLQDLTNNITLEDLEQLKSACKEDIPSEKSEEITTGSAWFSFLESHNKLDKDNLSYIEHIFEISRRPDLLTMVVDYRTRVLKISEEDELDTKLTRIPSAKKYKDIIRQPSEEEIIKLAPPPKKA

SEQ ID NO: 33269 - protein, 227 aa, Homo sapiens
  REGION 1..227: note = ENSP00000256404
MGWTMRLVTAALLLGLMMVVTGDEDENSPCAHEALLDEDTLFCQGLEVFYPELGNIGCKVVPDCNNYRQKITSWMEPIVKFPGAVDGATYILVMVDPDAPSRAEPRQRFWRHWLVTDIKGADLKKGKIQGQELSAYQAPSPPAHSGFHRYQFFVYLQEGKVISLLPKENKTRGSWKMDRFLNRFHLGEPEASTQFMTQNYQDSPTLQAPRERASEPKHKNQAEIAAC

SEQ ID NO: 33270 - protein, 93 aa, Homo sapiens
  REGION 1..93: note = ENSP00000429414
MSRRRAEPGCGGSGRRAGAPGEGRGRRRYAPGPAAKALPRRRLALQSQVPMGWTMRLVTAALLLGLMMVVTGDEDENSPCAHEALLDEDTLFC

SEQ ID NO: 33271 - protein, 1588 aa, Homo sapiens
  REGION 1..1588: note = ENSP00000326581
MLPPKHLSATKPKKSWAPNLYELDSDLTKEPDVIIGEGPTDSEFFHQRFRNLIYVEFVGPRKTLIKLRNLCLDWLQPETRTKEEIIELLVLEQYLTIIPEKLKPWVRAKKPENCEKLVTLLENYKEMYQPEDDNNSDVTSDDDMTRNRRESSPPHSVHSFSDRDWDRRGRSRDMEPRDRWSHTRNPRSRMPPRDLSLPVVAKTSFEMDREDDRDSRAYESRSQDAESYQNVVDLAEDRKPHNTIQDNMENYRKLLSLVQLAEDDGHSHMTQGHSSRSKRSAYPSTSRGLKTMPEAKKSTHRRGICEDESSHGVIMEKFIKDVSRSSKSGRARESSDRSQRFPRMSDDNWKDISLNKRESVIQQRVYEGNAFRGGFRFNSTLVSRKRVLERKRRYHFDTDGKGSIHDQKGCPRKKPFECGSEMRKAMSVSSLSSLSSPSFTESQPIDFGAMPYVCDECGRSFSVISEFVEHQIMHTRENLYEYGESFIHSVAVSEVQKSQVGGKRFECKDCGETFNKSAALAEHRKIHARGYLVECKNQECEEAFMPSPTFSELQKIYGKDKFYECRVCKETFLHSSALIEHQKIHFGDDKDNEREHERERERERGETFRPSPALNEFQKMYGKEKMYECKVCGETFLHSSSLKEHQKIHTRGNPFENKGKVCEETFIPGQSLKRRQKTYNKEKLCDFTDGRDAFMQSSELSEHQKIHSRKNLFEGRGYEKSVIHSGPFTESQKSHTITRPLESDEDEKAFTISSNPYENQKIPTKENVYEAKSYERSVIHSLASVEAQKSHSVAGPSKPKVMAESTIQSFDAINHQRVRAGGNTSEGREYSRSVIHSLVASKPPRSHNGNELVESNEKGESSIYISDLNDKRQKIPARENPCEGGSKNRNYEDSVIQSVFRAKPQKSVPGEGSGEFKKDGEFSVPSSNVREYQKARAKKKYIEHRSNETSVIHSLPFGEQTFRPRGMLYECQECGECFAHSSDLTEHQKIHDREKPSGSRNYEWSVIRSLAPTDPQTSYAQEQYAKEQARNKCKDFRQFFATSEDLNTNQKIYDQEKSHGEESQGENTDGEETHSEETHGQETIEDPVIQGSDMEDPQKDDPDDKIYECEDCGLGFVDLTDLTDHQKVHSRKCLVDSREYTHSVIHTHSISEYQRDYTGEQLYECPKCGESFIHSSFLFEHQRIHEQDQLYSMKGCDDGFIALLPMKPRRNRAAERNPALAGSAIRCLLCGQGFIHSSALNEHMRLHREDDLLEQSQMAEEAIIPGLALTEFQRSQTEERLFECAVCGESFVNPAELADHVTVHKNEPYEYGSSYTHTSFLTEPLKGAIPFYECKDCGKSFIHSTVLTKHKELHLEEEEEDEAAAAAAAAAQEVEANVHVPQVVLRIQGLNVEAAEPEVEAAEPEVEAAEPEVEAAEPNGEAEGPDGEAAEPIGEAGQPNGEAEQPNGDADEPDGAGIEDPEERAEEPEGKAEEPEGDADEPDGVGIEDPEEGEDQEIQVEEPYYDCHECTETFTSSTAFSEHLKTHASMIIFEPANAFGECSGYIERASTSTGGANQADEKYFKCDVCGQLFNDRLSLARHQNTHTG

SEQ ID NO: 33272 - protein, 1464 aa, Homo sapiens
  REGION 1..1464: note = ENSP00000473190
MYQPEDDNNSDVTSDDDMTRNRRESSPPHSVHSFSGDRDWDRRGRSRDMEPRDRWSHTRNPRSRMPPRDLSLPVVAKTSFEMDREDDRDSRAYESRSQDAESYQNVVDLAEDRKPHNTIQDNMENYRKLLSLGVQLAEDDGHSHMTQGHSSRSKRSAYPSTSRGLKTMPEAKKSTHRRGICEDESSHGVIMEKFIKDVSRSSKSGRARESSDRSQRFPRMSDDNWKDISLNKRESVIQQRVYEGNAFRGGFRFNSTLVSRKRVLERKRRYHFDTDGKGSIHDQKGCPRKKPFECGSEMRKAMSVSSLSSLSSPSFTESQPIDFGAMPYVCDECGRSFSVISEFVEHQIMHTRENLYEYGESFIHSVAVSEVQKSQVGGKRFECKDCGETFNKSAALAEHRKIHARGYLVECKNQECEEAFMPSPTFSELQKIYGKDKFYECRVCKETFLHSSALIEHQKIHFGDDKDNEREHERERERERGETFRPSPALNEFQKMYGKEKMYECKVCGETFLHSSSLKEHQKIHTRGNPFENKGKVCEETFIPGQSLKRRQKTYNKEKLCDFTDGRDAFMQSSELSEHQKIHSRKNLFEGRGYEKSVIHSGPFTESQKSHTITRPLESDEDEKAFTISSNPYENQKIPTKENVYEAKSYERSVIHSLASVEAQKSHSVAGPSKPKVMAESTIQSFDAINHQRVRAGGNTSEGREYSRSVIHSLVASKPPRSHNGNELVESNEKGESSIYISDLNDKRQKIPARENPCEGGSKNRNYEDSVIQSVFRAKPQKSVPGEGSGEFKKDGEFSVPSSNVREYQKARAKKKYIEHRSNETSVIHSLPFGEQTFRPRGMLYECQECGECFAHSSDLTEHQKIHDREKPSGSRNYEWSVIRSLAPTDPQTSYAQEQYAKEQARNKCKDFRQFFATSEDLNTNQKIYDQEKSHGEESQGENTDGEETHSEETHGQETIEDPVIQGSDMEDPQKDDPDDKIYECEDCGLGFVDLTDLTDHQKVHSRKCLVDSREYTHSVIHTHSISEYQRDYTGEQLYECPKCGESFIHSSFLFEHQRIHEQDQLYSMKGCDDGFIALLPMKPRRNRAAERNPALAGSAIRCLLCGQGFIHSSALNEHMRLHREDDLLEQSQMAEEAIIPGLALTEFQRSQTEERLFECAVCGESFVNPAELADHVTVHKNEPYEYGSSYTHTSFLTEPLKGAIPFYECKDCGKSFIHSTVLTKHKELHLEEEEEDEAAAAAAAAAQEVEANVHVPQVVLRIQGLNVEAAEPEVEAAEPEVEAAEPEVEAAEPNGEAEGPDGEAAEPIGEAGQPNGEAEQPNGDADEPDGAGIEDPEERAEEPEGKAEEPEGDADEPDGVGIEDPEEGEDQEIQVEEPYYDCHECTETFTSSTAFSEHLKTHASMIIFEPANAFGECSGYIERASTSTGGANQADEKYFKCDVCGQLFNDRLSLARHQNTHTG

SEQ ID NO: 33273 - protein, 1462 aa, Homo sapiens
  REGION 1..1462: note = ENSP00000472402
MYQPEDDNNSDVTSDDDMTRNRRESSPPHSVHSFSDRDWDRRGRSRDMEPRDRWSHTRNPRSRMPPRDLSLPVVAKTSFEMDREDDRDSRAYESRSQDAESYQNVVDLAEDRKPHNTIQDNMENYRKLLSLVQLAEDDGHSHMTQGHSSRSKRSAYPSTSRGLKTMPEAKKSTHRRGICEDESSHGVIMEKFIKDVSRSSKSGRARESSDRSQRFPRMSDDNWKDISLNKRESVIQQRVYEGNAFRGGFRFNSTLVSRKRVLERKRRYHFDTDGKGSIHDQKGCPRKKPFECGSEMRKAMSVSSLSSLSSPSFTESQPIDFGAMPYVCDECGRSFSVISEFVEHQIMHTRENLYEYGESFIHSVAVSEVQKSQVGGKRFECKDCGETFNKSAALAEHRKIHARGYLVECKNQECEEAFMPSPTFSELQKIYGKDKFYECRVCKETFLHSSALIEHQKIHFGDDKDNEREHERERERERGETFRPSPALNEFQKMYGKEKMYECKVCGETFLHSSSLKEHQKIHTRGNPFENKGKVCEETFIPGQSLKRRQKTYNKEKLCDFTDGRDAFMQSSELSEHQKIHSRKNLFEGRGYEKSVIHSGPFTESQKSHTITRPLESDEDEKAFTISSNPYENQKIPTKENVYEAKSYERSVIHSLASVEAQKSHSVAGPSKPKVMAESTIQSFDAINHQRVRAGGNTSEGREYSRSVIHSLVASKPPRSHNGNELVESNEKGESSIYISDLNDKRQKIPARENPCEGGSKNRNYEDSVIQSVFRAKPQKSVPGEGSGEFKKDGEFSVPSSNVREYQKARAKKKYIEHRSNETSVIHSLPFGEQTFRPRGMLYECQECGECFAHSSDLTEHQKIHDREKPSGSRNYEWSVIRSLAPTDPQTSYAQEQYAKEQARNKCKDFRQFFATSEDLNTNQKIYDQEKSHGEESQGENTDGEETHSEETHGQETIEDPVIQGSDMEDPQKDDPDDKIYECEDCGLGFVDLTDLTDHQKVHSRKCLVDSREYTHSVIHTHSISEYQRDYTGEQLYECPKCGESFIHSSFLFEHQRIHEQDQLYSMKGCDDGFIALLPMKPRRNRAAERNPALAGSAIRCLLCGQGFIHSSALNEHMRLHREDDLLEQSQMAEEAIIPGLALTEFQRSQTEERLFECAVCGESFVNPAELADHVTVHKNEPYEYGSSYTHTSFLTEPLKGAIPFYECKDCGKSFIHSTVLTKHKELHLEEEEEDEAAAAAAAAAQEVEANVHVPQVVLRIQGLNVEAAEPEVEAAEPEVEAAEPEVEAAEPNGEAEGPDGEAAEPIGEAGQPNGEAEQPNGDADEPDGAGIEDPEERAEEPEGKAEEPEGDADEPDGVGIEDPEEGEDQEIQVEEPYYDCHECTETFTSSTAFSEHLKTHASMIIFEPANAFGECSGYIERASTSTGGANQADEKYFKCDVCGQLFNDRLSLARHQNTHTG

SEQ ID NO: 33274 - protein, 1588 aa, Homo sapiens; identical to SEQ ID NO: 33271
  REGION 1..1588: note = ENSP00000472395

SEQ ID NO: 33275 - protein, 1588 aa, Homo sapiens; identical to SEQ ID NO: 33271
  REGION 1..1588: note = ENSP00000469486

SEQ ID NO: 33276 - protein, 395 aa, Homo sapiens
  REGION 1..395: note = ENSP00000470467
MYQPEDDNNSDVTSDDDMTRNRRESSPPHSVHSFSGDRDWDRRGRSRDMEPRDRWSHTRNPRSRMPPRDLSLPVVAKTSFEMDREDDRDSRAYESRSQDAESYQNVVDLAEDRKPHNTIQDNMENYRKLLSLGLKTMPEAKKSTHRRGICEDESSHGVIMEKFIKDVSRSSKSGRARESSDRSQRFPRMSDDNWKDISLNKRESVIQQRVYEGNAFRGGFRFNSTLVSRKRVLERKRRYHFDTDGKGSIHDQKGCPRKKPFECGSEMRKAMSVSSLSSLSSPSFTESQPIDFGAMPYVCDECGRSFSVISEFVEHQIMHTRENLYEYGESFIHSVAVSEVQKSQVGGKRFECKDCGETFNKSAALAEHRKIHARGYLVECKNQECEEAFMPSPTF

SEQ ID NO: 33277 - protein, 36 aa, Homo sapiens
  REGION 1..36: note = ENSP00000469144
MLPPKHLSATKPKKSWAPNLYELDSDLTKEPDVIIG

SEQ ID NO: 33278 - protein, 88 aa, Homo sapiens
  REGION 1..88: note = ENSP00000430268
FLTLCTWLLLLGPGLLATVRAECSQDCATCSYRLVRPADINFLKHPRIDQFIHSTNEYLMEEAPDGGKSQCNASKWRHGVLMEKQQDL

SEQ ID NO: 33279 - protein, 267 aa, Homo sapiens
  REGION 1..267: note = ENSP00000324248
MARFLTLCTWLLLLGPGLLATVRAECSQDCATCSYRLVRPADINFLACVMECEGKLPSLKIWETCKELLQLSKPELPQDGTSTLRENSKPEESHLLAKRYGGFMKRYGGFMKKMDELYPMEPEEEANGSEILAKRYGGFMKKDAEEDDSLANSSDLLKELLETGDNRERSHHQDGSDNEEEVSKRYGGFMRGLKRSPQLEDEAKELQKRYGGFMRRVGRPEWWMDYQKRYGGFLKRFAEALPSDEEGESYSKEVPEMEKRYGGFMRF

SEQ ID NO: 33280 - protein, 267 aa, Homo sapiens; identical to SEQ ID NO: 33279
  REGION 1..267: note = ENSP00000400894

SEQ ID NO: 33281 - protein, 105 aa, Homo sapiens
  REGION 1..105: note = ENSP00000428012
MARFLTLCTWLLLLGPGLLATVRAECSQDCATCSYRLVRPADINFLACVMECEGKLPSLKIWETCKELLQLSKPELPQDGTSTLRENSKPEESHLLAKRYGGFMK

SEQ ID NO: 33282 - protein, 79 aa, Homo sapiens
  REGION 1..79: note = ENSP00000429326
MARFLTLCTWLLLLGPGLLATVRAECSQDCATCSYRLVRPADINFLDCGGGEEEGCSFQNFPYCFLCSCCYHLLLLSLL

SEQ ID NO: 33283 - protein, 92 aa, Homo sapiens
  REGION 1..92: note = ENSP00000430592
MARFLTLCTWLLLLGPGLLATVRAECSQDCATCSYRLVRPADINFLVSVARGECCAPCETEFPQQYADCLRPTARRVWRFAPGRSRSGASPW

SEQ ID NO: 33284 - protein, 1290 aa, Homo sapiens
  REGION 1..1290: note = ENSP00000314420
MSGPLEGADGGGDPRPGESFCPGGVPSPGPPQHRPCPGPSLADDTDANSNGSSGNESNGHESRGASQRSSHSSSSGNGKDSALLETTESSKSTNSQSPSPPSSSIAYSLLSASSEQDNPSTSGCSSEQSARARTQKELMTALRELKLRLPPERRGKGRSGTLATLQYALACVKQVQANQEYYQQWSLEEGEPCSMDMSTYTLEELEHITSEYTLQNQDTFSVAVSFLTGRIVYISEQAAVLLRCKRDVFRGTRFSELLAPQDVGVFYGSTAPSRLPTWGTGASAGSGLRDFTQEKSVFCRIRGGPDRDPGPRYQPFRLTPYVTKIRVSDGAPAQPCCLLIAERIHSGYEAPRIPPDKRIFTTRHTPSCLFQDVDERAAPLLGYLPQDLLGAPVLLFLHPEDRPLMLAIHKKILQLAGQPFDHSPIRFCARNGEYVTMDTSWAGFVHPWSRKVAFVLGRHKVRTAPLNEDVFTPPAPSPAPSLDTDIQELSEQIHRLLLQPVHSPSPTGLCGVGAVTSPGPLHSPGSSSDSNGGDAEGPGPPAPVTFQQICKDVHLVKHQGQQLFIESRARPQSRPRLPATGTFKAKALPCQSPDPELEAGSAPVQAPLALVPEEAERKEASSCSYQQINCLDSILRYLESCNLPSTTKRKCASSSSYTTSSASDDDRQRTGPVSVGTKKDPPSAALSGEGATPRKEPVVGGTLSPLALANKAESVVSVTSQCSFSSTIVHVGDKKPPESDIIMMEDLPGLAPGPAPSPAPSPTVAPDPAPDAYRPVGLTKAVLSLHTQKEEQAFLSRFRDLGRLRGLDSSSTAPSALGERGCHHGPAPPSRRHHCRSKAKRSRHHQNPRAEAPCYVSHPSPVPPSTPWPTPPATTPFPAVVQPYPLPVFSPRGGPQPLPPAPTSVPPAAFPAPLVTPMVALVLPNYLFPTPSSYPYGALQTPAEGPPTPASHSPSPSLPALAPSPPHRPDSPLFNSRCSSPLQLNLLQLEELPRAEGAAVAGGPGSSAGPPPPSAEAAEPEARLAEVTESSNQDALSGSSDLLELLLQEDSRSGTGSAASGSLGSGLGSGSGSGSHEGGSTSASITRSSQSSHTSKYFGSIDSSEAEAGAARGGAEPGDQVIKYVLQDPIWLLMANADQRVMMTYQVPSRDMTSVLKQDRERLRAMQKQQPRFSEDQRRELGAVHSWVRKGQLPRALDVMACVDCGSSTQDPGHPDDPLFSELDGLGLEPMEEGGGEQGSSGGGSGEGEGCEEAQGGAKASSSQDLAMEEEEEGRSSSSPALPTAGNCTS

SEQ ID NO: 33285 - protein, 1267 aa, Homo sapiens
  REGION 1..1267: note = ENSP00000462064
MSGPLEGADGGGDPRPGESFCPGGVPSPGPPQHRPCPGPSLADDTDANSNGSSGNESNGHESRGASQRSSHSSSSGNGKDSALLETTESSKSTNSQSPSPPSSSIAYSLLSASSEQDNPSTSGCSSEQSARARTQKELMTALRELKLRLPPERRGKGRSGTLATLQYALACVKQVQANQEYYQQWSLEEGEPCSMDMSTYTLEELEHITSEYTLQNQAAVLLRCKRDVFRGTRFSELLAPQDVGVFYGSTAPSRLPTWGTGASAGSGLRDFTQEKSVFCRIRGGPDRDPGPRYQPFRLTPYVTKIRVSDGAPAQPCCLLIAERIHSGYEAPRIPPDKRIFTTRHTPSCLFQDVDERAAPLLGYLPQDLLGAPVLLFLHPEDRPLMLAIHKKILQLAGQPFDHSPIRFCARNGEYVTMDTSWAGFVHPWSRKVAFVLGRHKVRTAPLNEDVFTPPAPSPAPSLDTDIQELSEQIHRLLLQPVHSPSPTGLCGVGAVTSPGPLHSPGSSSDSNGGDAEGPGPPAPVTFQQICKDVHLVKHQGQQLFIESRARPQSRPRLPATGTFKAKALPCQSPDPELEAGSAPVQAPLALVPEEAERKEASSCSYQQINCLDSILRYLESCNLPSTTKRKCASSSSYTTSSASDDDRQRTGPVSVGTKKDPPSAALSGEGATPRKEPVVGGTLSPLALANKAESVVSVTSQCSFSSTIVHVGDKKPPESDIIMMEDLPGLAPGPAPSPAPSPTVAPDPAPDAYRPVGLTKAVLSLHTQKEEQAFLSRFRDLGRLRGLDSSSTAPSALGCHHGPAPPSRRHHCRSKAKRSRHHQNPRAEAPCYVSHPSPVPPSTPWPTPPATTPFPAVVQPYPLPVFSPRGGPQPLPPAPTSVPPAAFPAPLVTPMVALVLPNYLFPTPSSYPYGALQTPAEGPPTPASHSPSPSLPALAPSPPHRPDSPLFNSRCSSPLQLNLLQLEELPRAEGAAVAGGPGSSAGPPPPSAEAAEPEARLAEVTESSNQDALSGSSDLLELLLQEDSRSGTGSAASGSLGSGLGSGSGSGSHEGGSTSASITRSSQSSHTSKYFGSIDSSEAEAGAARGGAEPGDQVIKYVLQDPIWLLMANADQRVMMTYQVPSRDMTSVLKQDRERLRAMQKQQPRFSEDQRRELGAVHSWVRKGQLPRALDVMACVDCGSSTQDPGHPDDPLFSELDGLGLEPMEEGGGEQGSSGGGSGEGEGCEEAQGGAKASSSQDLAMEEEEEGRSSSSPALPTAGNCTS

SEQ ID NO: 33286 - protein, 824 aa, Homo sapiens
  REGION 1..824: note = ENSP00000463054
MSGPLEGADGGGDPRPGESFCPGGVPSPGPPQHRPCPGPSLADDTDANSNGSSGNESNGHESRGASQRSSHSSSSGNGKDSALLETTESSKSTNSQSPSPPSSSIAYSLLSASSEQDNPSTSGCSSEQSARARTQKELMTALRELKLRLPPERRGKGRSGTLATLQYALACVKQVQANQEYYQQWSLEEGEPCSMDMSTYTLEELEHITSEYTLQNQDTFSVAVSFLTGRIVYISEQAAVLLRCKRDVFRGTRFSELLAPQDVGVFYGSTAPSRLPTWGTGASAGSGLRDFTQEKSVFCRIRGGPDRDPGPRYQPFRLTPYVTKIRVSDGAPAQPCCLLIAERIHSGYEAPRIPPDKRIFTTRHTPSCLFQDVDERAAPLLGYLPQDLLGAPVLLFLHPEDRPLMLAIHKKILQLAGQPFDHSPIRFCARNGEYVTMDTSWAGFVHPWSRKVAFVLGRHKVRTAPLNEDVFTPPAPSPAPSLDTDIQELSEQIHRLLLQPVHSPSPTGLCGVGAVTSPGPLHSPGSSSDSNGGDAEGPGPPAPVTFQQICKDVHLVKHQGQQLFIESRARPQSRPRLPATGTFKAKALPCQSPDPELEAGSAPVQAPLALVPEEAERKEASSCSYQQINCLDSILRYLESCNLPSTTKRKCASSSSYTTSSASDDDRQRTGPVSVGTKKDPPSAALSGEGATPRKEPVVGGTLSPLALANKAESVVSVTSQCSFSSTIVHVGDKKPPESDIIMMEDLPGLAPGPAPSPAPSPTVAPDPAPDAYRPVGLTKAVLSLHTQKEEQAFLSRFRDLGRLRGLDSSSTAPSALGERGGGH

SEQ ID NO: 33287 - protein, 859 aa, Homo sapiens
  REGION 1..859: note = ENSP00000346979
MLEVLEEIWSVRARRAHRPCPGPSLADDTDANSNGSSGNESNGHESRGASQRSSHSSSSGNGKDSALLETTESSKSTNSQSPSPPSSSIAYSLLSASSEQDNPSTSGCSSEQSARARTQKELMTALRELKLRLPPERRGKGRSGTLATLQYALACVKQVQANQEYYQQWSLEEGEPCSMDMSTYTLEELEHITSEYTLQNQDTFSVAVSFLTGRIVYISEQAAVLLRCKRDVFRGTRFSELLAPQDVGVFYGSTAPSRLPTWGTGASAGSGLRDFTQEKSVFCRIRGGPDRDPGPRYQPFRLTPYVTKIRVSDGAPAQPCCLLIAERIHSGYEAPRIPPDKRIFTTRHTPSCLFQDVDERAAPLLGYLPQDLLGAPVLLFLHPEDRPLMLAIHKKILQLAGQPFDHSPIRFCARNGEYVTMDTSWAGFVHPWSRKVAFVLGRHKVRTAPLNEDVFTPPAPSPAPSLDTDIQELSEQIHRLLLQPVHSPSPTGLCGVGAVTSPGPLHSPGSSSDSNGGDAEGPGPPAPVTFQQICKDVHLVKHQGQQLFIESRARPQSRPRLPATGTFKAKALPCQSPDPELEAGSAPVQAPLALVPEEAERKEASSCSYQQINCLDSILRYLESCNLPSTTKRKCASSSSYTTSSASDDDRQRTGPVSVGTKKDPPSAALSGEGATPRKEPVVGGTLSPLALANKAESVVSVTSQCSFSSTIVHVGDKKPPESDIIMMEDLPGLAPGPAPSPAPSPTVAPDPAPDAYRPVGLTKAVLSLHTQKEEQAFLSRFRDLGRLRGLDSSSTAPSALGERGSHLGPPGACPLPSLGLDCWGVGLKGGVSAPGTQAGVASTTRPCLGTGPSLASPH

SEQ ID NO: 33288 - protein, 168 aa, Homo sapiens
  REGION 1..168: note = ENSP00000463369
VTSQCSFSSTIVHVGDKKPPESDIIMMEDLPGLAPGPAPSPAPSPTVAPDPAPDAYRPVGLTKAVLSLHTQKEEQAFLSRFRDLGRLRGLDSSSTAPSALGERGRIRPRWAGGMPRLAVPTGVWRTRAICPCVHGLTLLPPSASMPPSSAHPQLDPSCNLSLALFLSQ

SEQ ID NO: 33289 - protein, 572 aa, Homo sapiens
  REGION 1..572: note = ENSP00000464696
MSGPLEGADGGGDPRPGESFCPGGVPSPGPPQHRPCPGPSLADDTDANSNGSSGNESNGHESRGASQRSSHSSSSGNGKDSALLETTESSKSTNSQSPSPPSSSIAYSLLSASSEQDNPSTSGCSSEQSARARTQKELMTALRELKLRLPPERRGKGRSGTLATLQYALACVKQVQANQEYYQQWSLEEGEPCSMDMSTYTLEELEHITSEYTLQNQDTFSVAVSFLTGRIVYISEQAAVLLRCKRDVFRGTRFSELLAPQDVGVFYGSTAPSRLPTWGTGASAGSGLRDFTQEKSVFCRIRGGPDRDPGPRYQPFRLTPYVTKIRVSDGAPAQPCCLLIAERIHSGYEAPRIPPDKRIFTTRHTPSCLFQDVDERAAPLLGYLPQDLLGAPVLLFLHPEDRPLMLAIHKKILQLAGQPFDHSPIRFCARNGEYVTMDTSWAGFVHPWSRKVAFVLGRHKVRTAPLNEDVFTPPAPSPAPSLDTDIQELSEQIHRLLLQPVHSPSPTGLCGVGAVTSPGPLHSPGSSSDSNGGDAEGPGPPAPLQARSRPRPFPANPQTQSWRRVLLPSRPH

SEQ ID NO: 33290 - protein, 175 aa, Homo sapiens
  REGION 1..175: note = ENSP00000463385
MQPASPPARWSFHSAAGWSGGGQACGGHSCDQHRPCPGPSLADDTDANSNGSSGNESNGHESRGASQRSSHSSSSGNGKDSALLETTESSKSTNSQSPSPPSSSIAYSLLSASSEQDNPSTSGCSSEQSARARTQKELMTALRELKLRLPPERRGKGRSGTLATLQYALACVKQV

SEQ ID NO: 33291 - protein, 117 aa, Homo sapiens
  REGION 1..117: note = ENSP00000462546
MSGPLEGADGGGDPRPGESFCPGGVPSPGPPQHRPCPGPSLADDTDANSNGSSGNESNGHESRGASQRSSHSSSSGNGKDSALLETTESSKSSEQSARARTQKELMTALRELKLRLP

SEQ ID NO: 33292 - protein, 112 aa, Homo sapiens
  REGION 1..112: note = ENSP00000463661
MSGPLEGADGGGDPRPGESFCPGGVPSPGPPQHRPCPGPSLADDTDANSNGSSGNESNGHESRGASQRSSHSSSSGNGKDSALLETTESSKSTNSQSPSPPSSSIAYSLLSA

SEQ ID NO: 33293 - protein, 73 aa, Homo sapiens
  REGION 1..73: note = ENSP00000470539
MGVKLEIFRMIIYLTFPVAMFWVSNQAEWFEDDVIQRKRELWPPEKLQEIEEFKERLRKRREEKLLRDAQQNS

SEQ ID NO: 33294 - protein, 44 aa, Homo sapiens
  REGION 1..44: note = ENSP00000392303
MGVKLEIFRRELWPPEKLQEIEEFKERLRKRREEKLLRDAQQNS

SEQ ID NO: 33295 - protein, 68 aa, Homo sapiens
  REGION 1..68: note = ENSP00000470935
MGVKLEIFRMIIYLTFPVAMFWVSNQAEWFEDDVIQRKRELWPPEKVSDLFFLPEGWRRLDSCIRDGF

SEQ ID NO: 33296 - protein, 46 aa, Homo sapiens
  REGION 1..46: note = ENSP00000470314
  VARIANT 1: note = Any amino acid
XVKLEIFRMIIYLTFPVAMFWVSNQAEWFEDDVIQRKRELWPPEKP

SEQ ID NO: 33297 - protein, 626 aa, Homo sapiens
  REGION 1..626: note = ENSP00000419975
MYQGHMQKSKEQGYGKLSSDEDLEIIVDQKQGKGSRAADKAVAMVMKEIPREESAEEKPLLTMTSQLVNEQQESRPLLSPSIDDFLCETKSEAIARPVTSNTAVLTTGLDLLDLSEPVSQTQTKAKKSEPSSKTSSLKKKADGSDLISTDAEQRGQPLRVPETSSLDLDIQTQLEKWDDVKFHGDRNTKGHPMAERKSSSSRTGSKELLWSSEHRSQPELSGGKSALNSESASELELVAPTQARLTKEHRWGSALLSRNHSLEEEFERAKAAVESDTEFWDKMQAEWEEMARRNWISENQEAQNQVTISASEKGYYFHTENPFKDWPGAFEEGLKRLKEGDLPVTILFMEAAILQDPGDAEAWQFLGITQAENENEQAAIVALQRCLELQPNNLKALMALAVSYTNTGHQQDACDALKNWIKQNPKYKYLVKSKKGSPGLTRRMSKSPVDSSVLEGVKELYLEAAHQNGDMIDPDLQTGLGVLFHLSGEFNRAIDAFNAALTVRPEDYSLWNRLGATLANGDRSEEAVEAYTRALEIQPGFIRSRYNLGISCINLGAYREAVSNFLTALSLQRKSRNQQQVPHPAISGNIWAALRIALSLMDQPELFQAANLGDLDVLLRAFNLDP

SEQ ID NO: 33298 - protein, 624 aa, Homo sapiens
  REGION 1..624: note = ENSP00000263962
MYQGHMQVVGVTLKKKWHCLQKSDLTLALGKGSRAADKAVAMVMKEIPREESAEEKPLLTMTSQLVNEQQESRPLLSPSIDDFLCETKSEAIARPVTSNTAVLTTGLDLLDLSEPVSQTQTKAKKSEPSSKTSSLKKKADGSDLISTDAEQRGQPLRVPETSSLDLDIQTQLEKWDDVKFHGDRNTKGHPMAERKSSSSRTGSKELLWSSEHRSQPELSGGKSALNSESASELELVAPTQARLTKEHRWGSALLSRNHSLEEEFERAKAAVESDTEFWDKMQAEWEEMARRNWISENQEAQNQVTISASEKGYYFHTENPFKDWPGAFEEGLKRLKEGDLPVTILFMEAAILQDPGDAEAWQFLGITQAENENEQAAIVALQRCLELQPNNLKALMALAVSYTNTGHQQDACDALKNWIKQNPKYKYLVKSKKGSPGLTRRMSKSPVDSSVLEGVKELYLEAAHQNGDMIDPDLQTGLGVLFHLSGEFNRAIDAFNAALTVRPEDYSLWNRLGATLANGDRSEEAVEAYTRALEIQPGFIRSRYNLGISCINLGAYREAVSNFLTALSLQRKSRNQQQVPHPAISGNIWAALRIALSLMDQPELFQAANLGDLDVLLRAFNLDP

SEQ ID NO: 33299 - protein, 591 aa, Homo sapiens
  REGION 1..591: note = ENSP00000418440
MYQGHMQKSKEQGYGKLSSDEDLEIIVDQKQLVNEQQESRPLLSPSIDDFLCETKSEAIARPVTSNTAVLTTGLDLLDLSEPVSQTQTKAKKSEPSSKTSSLKKKADGSDLISTDAEQRGQPLRVPETSSLDLDIQTQLEKWDDVKFHGDRNTKGHPMAERKSSSSRTGSKELLWSSEHRSQPELSGGKSALNSESASELELVAPTQARLTKEHRWGSALLSRNHSLEEEFERAKAAVESDTEFWDKMQAEWEEMARRNWISENQEAQNQVTISASEKGYYFHTENPFKDWPGAFEEGLKRLKEGDLPVTILFMEAAILQDPGDAEAWQFLGITQAENENEQAAIVALQRCLELQPNNLKALMALAVSYTNTGHQQDACDALKNWIKQNPKYKYLVKSKKGSPGLTRRMSKSPVDSSVLEGVKELYLEAAHQNGDMIDPDLQTGLGVLFHLSGEFNRAIDAFNAALTVRPEDYSLWNRLGATLANGDRSEEAVEAYTRALEIQPGFIRSRYNLGISCINLGAYREAVSNFLTALSLQRKSRNQQQVPHPAISGNIWAALRIALSLMDQPELFQAANLGDLDVLLRAFNLDP

SEQ ID NO: 33300 - protein, 434 aa, Homo sapiens
  REGION 1..434: note = ENSP00000418665
MAERKSSSSRTGSKELLWSSEHRSQPELSGGKSALNSESASELELVAPTQARLTKEHRWGSALLSRNHSLEEEFERAKAAVESDTEFWDKMQAEWEEMARRNWISENQEAQNQVTISASEKGYYFHTENPFKDWPGAFEEGLKRLKEGDLPVTILFMEAAILQDPGDAEAWQFLGITQAENENEQAAIVALQRCLELQPNNLKALMALAVSYTNTGHQQDACDALKNWIKQNPKYKYLVKSKKGSPGLTRRMSKSPVDSSVLEGVKELYLEAAHQNGDMIDPDLQTGLGVLFHLSGEFNRAIDAFNAALTVRPEDYSLWNRLGATLANGDRSEEAVEAYTRALEIQPGFIRSRYNLGISCINLGAYREAVSNFLTALSLQRKSRNQQQVPHPAISGNIWAALRIALSLMDQPELFQAANLGDLDVLLRAFNLDP

SEQ ID NO: 33301 - protein, 583 aa, Homo sapiens
  REGION 1..583: note = ENSP00000420555
MVMKEIPREESAEEKPLLTMTSQLVNEQQESRPLLSPSIDDFLCETKSEAIARPVTSNTAVLTTGLDLLDLSEPVSQTQTKAKKSEPSSKTSSLKKKADGSDLISTDAEQRGQPLRVPETSSLDLDIQTQLEKWDDVKFHGDRNTKGHPMAERKSSSSRTGSKELLWSSEHRSQPELSGGKSALNSESASELELVAPTQARLTKEHRWGSALLSRNHSLEEEFERAKAAVESDTEFWDKMQAEWEEMARRNWISENQEAQNQVTISASEKGYYFHTENPFKDWPGAFEEGLKRLKEGDLPVTILFMEAAILQDPGDAEAWQFLGITQAENENEQAAIVALQRCLELQPNNLKALMALAVSYTNTGHQQDACDALKNWIKQNPKYKYLVKSKKGSPGLTRRMSKSPVDSSVLEGVKELYLEAAHQNGDMIDPDLQTGLGVLFHLSGEFNRAIDAFNAALTVRPEDYSLWNRLGATLANGDRSEEAVEAYTRALEIQPGFIRSRYNLGISCINLGAYREAVSNFLTALSLQRKSRNQQQVPHPAISGNIWAALRIALSLMDQPELFQAANLGDLDVLLRAFNLDP

SEQ ID NO: 33302 - protein, 567 aa, Homo sapiens
  REGION 1..567: note = ENSP00000418054
MYQGHMQLVNEQQESRPLLSPSIDDFLCETKSEAIARPVTSNTAVLTTGLDLLDLSEPVSQTQTKAKKSEPSSKTSSLKKKADGSDLISTDAEQRGQPLRVPETSSLDLDIQTQLEKWDDVKFHGDRNTKGHPMAERKSSSSRTGSKELLWSSEHRSQPELSGGKSALNSESASELELVAPTQARLTKEHRWGSALLSRNHSLEEEFERAKAAVESDTEFWDKMQAEWEEMARRNWISENQEAQNQVTISASEKGYYFHTENPFKDWPGAFEEGLKRLKEGDLPVTILFMEAAILQDPGDAEAWQFLGITQAENENEQAAIVALQRCLELQPNNLKALMALAVSYTNTGHQQDACDALKNWIKQNPKYKYLVKSKKGSPGLTRRMSKSPVDSSVLEGVKELYLEAAHQNGDMIDPDLQTGLGVLFHLSGEFNRAIDAFNAALTVRPEDYSLWNRLGATLANGDRSEEAVEAYTRALEIQPGFIRSRYNLGISCINLGAYREAVSNFLTALSLQRKSRNQQQVPHPAISGNIWAALRIALSLMDQPELFQAANLGDLDVLLRAFNLDP

SEQ ID NO: 33303 - protein, 518 aa, Homo sapiens
  REGION 1..518: note = ENSP00000417270
MVMKEIPREESAEEKPLLTMTSQLVNEQQESRPLLSPSIDDFLCETKSEAIARPVTSNTADIQTQLEKWDDVKFHGDRNTKGHPMAERKSSSSRTGSKELLWSSEHRSQPELSGGKSALNSESASELELVAPTQARLTKEHRWGSALLSRNHSLEEEFERAKAAVESDTEFWDKMQAEWEEMARRNWISENQEAQNQVTISASEKGYYFHTENPFKDWPGAFEEGLKRLKEGDLPVTILFMEAAILQDPGDAEAWQFLGITQAENENEQAAIVALQRCLELQPNNLKALMALAVSYTNTGHQQDACDALKNWIKQNPKYKYLVKSKKGSPGLTRRMSKSPVDSSVLEGVKELYLEAAHQNGDMIDPDLQTGLGVLFHLSGEFNRAIDAFNAALTVRPEDYSLWNRLGATLANGDRSEEAVEAYTRALEIQPGFIRSRYNLGISCINLGAYREAVSNFLTALSLQRKSRNQQQVPHPAISGNIWAALRIALSLMDQPELFQAANLGDLDVLLRAFNLDP

SEQ ID NO: 33304 - protein, 602 aa, Homo sapiens
  REGION 1..602: note = ENSP00000419348
MYQGHMQGKGSRAADKAVAMVMKEIPREESAEEKPLLTMTSQLVNEQQESRPLLSPSIDDFLCETKSEAIARPVTSNTAVLTTGLDLLDLSEPVSQTQTKAKKSEPSSKTSSLKKKADGSDLISTDAEQRGQPLRVPETSSLDLDIQTQLEKWDDVKFHGDRNTKGHPMAERKSSSSRTGSKELLWSSEHRSQPELSGGKSALNSESASELELVAPTQARLTKEHRWGSALLSRNHSLEEEFERAKAAVESDTEFWDKMQAEWEEMARRNWISENQEAQNQVTISASEKGYYFHTENPFKDWPGAFEEGLKRLKEGDLPVTILFMEAAILQDPGDAEAWQFLGITQAENENEQAAIVALQRCLELQPNNLKALMALAVSYTNTGHQQDACDALKNWIKQNPKYKYLVKSKKGSPGLTRRMSKSPVDSSVLEGVKELYLEAAHQNGDMIDPDLQTGLGVLFHLSGEFNRAIDAFNAALTVRPEDYSLWNRLGATLANGDRSEEAVEAYTRALEIQPGFIRSRYNLGISCINLGAYREAVSNFLTALSLQRKSRNQQQVPHPAISGNIWAALRIALSLMDQPELFQAANLGDLDVLLRAFNLDP

SEQ ID NO: 33305 - protein, 70 aa, Homo sapiens
  REGION 1..70: note = ENSP00000418746
MAERKSSSSRTGSKELLWSSEHRSQPELSGGKSALNSESASELELVAPTQARLTKEHRWGSALLSRNHSL

SEQ ID NO: 33306 - protein, 34 aa, Homo sapiens
  REGION 1..34: note = ENSP00000419790
MAERKSSSSRTGSKELLWSSEHRSQPELSGGKSA

SEQ ID NO: 33307 - protein, 194 aa, Homo sapiens
  REGION 1..194: note = ENSP00000417438
MSDSEMDGRTHIPSLLNALLSRNRVMQMSYLKSKEQGYGKLSSDEDLEIIVDQKQLVNEQQESRPLLSPSIDDFLCETKSEAIARPVTSNTAVLTTGLDLLDLSEPVSQTQTKAKKSEPSSKTSSLKKKADGSDLISTDAEQRGQPLRVPETSSLDLDIQTQLEKWDDVKFHGDRNTKGHPMAERKSSSSRTGS

SEQ ID NO: 33308 - protein, 203 aa, Homo sapiens
  REGION 1..203: note = ENSP00000419406
MSDSEMDGRTHIPSLLNALLSRNRVMQMSYLKSKEQGYGKLSSDEDLEIIVDQKQGKGSRAADKAVAMVMKEIPREESAEEKPLLTMTSQLVNEQQESRPLLSPSIDDFLCETKSEAIARPVTSNTAVLTTGLDLLDLSEPVSQTQTKAKKSEPSSKTSSLKKKADGSDLISTDAEQRGQPLRVPETSSLDLDIQTQLEKWDD

SEQ ID NO: 33309 - protein, 518 aa, Homo sapiens; identical to SEQ ID NO: 33303
  REGION 1..518: note = ENSP00000376420

SEQ ID NO: 33310 - protein, 469 aa, Homo sapiens
  REGION 1..469: note = ENSP00000232375
MASPRELTQNPLKKIWMPYSNGRPALHACQRGVCMTNCPTLIVMVGLPARGKTYISKKLTRYLNWIGVPTREFNVGQYRRDVVKTYKSFEFFLPDNEEGLKIRKQCALAALRDVRRFLSEEGGHVAVFDATNTTRERRATIFNFGEQNGYKTFFVESICVDPEVIAANIVQVKLGSPDYVNRDSDEATEDFMRRIECYENSYESLDEDLDRDLSYIKIMDVGQSYVVNRVADHIQSRIVYYLMNIHVTPRSIYLCRHGESELNLKGRIGGDPGLSPRGREFAKSLAQFISDQNIKDLKVWTSQMKRTIQTAEALGVPYEQWKVLNEIDAGVCEEMTYEEIQDNYPLEFALRDQDKYRYRYPKGESYEDLVQRLEPVIMELERQENVLVICHQAVMRCLLAYFLDKAAEQLPYLKCPLHTVLKLTPVAYGCKVESIFLNVAAVNTHRDRPQNVDISRPPEEALVTVPAHQ

SEQ ID NO: 33311 - protein, 462 aa, Homo sapiens
  REGION 1..462: note = ENSP00000388394
MASPRELTQNPLKKIWMPYSNGRPALHACQRGVCMTNCPTLIVMVGLPARGKTYISKKLTRYLNWIGVPTREFNVGQYRRDVVKTYKSFEFFLPDNEEGLKIRKQCALAALRDVRRFLSEEGGHVAVFDATNTTRERRATIFNFGEQNGYKTFFVESICVDPEVIAANIVQVKLGSPDYVNRDSDEATEDFMRRIECYENSYESLDEDLDRDLSYIKIMDVGQSYVVNRVADHIQSRIVYYLMNIHVTPRSIYLCRHGESELNLKGRIGGDPGLSPRGREFAKSLAQFISDQNIKDLKVWTSQMKRTIQTAEALGVPYEQWKGVCEEMTYEEIQDNYPLEFALRDQDKYRYRYPKGESYEDLVQRLEPVIMELERQENVLVICHQAVMRCLLAYFLDKAAEQLPYLKCPLHTVLKLTPVAYGCKVESIFLNVAAVNTHRDRPQNVDISRPPEEALVTVPAHQ

SEQ ID NO: 33312 - protein, 38 aa, Homo sapiens
  REGION 1..38: note = ENSP00000389169
MASPRELTQNPLKKIWMPYSNGRPALHACQRGELSKVG

SEQ ID NO: 33313 - protein, 80 aa, Homo sapiens
  REGION 1..80: note = ENSP00000400772
MASPRELTQNPLKKIWMPYSNGRPALHACQRGGGLVFQQEEGCLLALKLSLGRNFSRDVLRIETEKYAVWACVCVPGHCA

SEQ ID NO: 33314 - protein, 434 aa, Homo sapiens
  REGION 1..434: note = ENSP00000373240
MASPRELTQNPLKKIWMPYSNGRPALHACQRGVCMTNCPTLIVMVGLPARGKTYISKKLTRYLNWIGVPTREFNVGQYRRDVVKTYKSFEFFLPDNEEGLKIRKQCALAALRDVRRFLSEEGGHVAVFDATNTTRERRATIFNFGEQNGYKTFFVESICVDPEVIAANIVQVKLGSPDYVNRDSDEATEDFMRRIECYENSYESLDEDLDRDLSYIKIMDVGQSYVVNRVADHIQSRIVYYLMNIHVTPRSIYLCRHGESELNLKGRIGGDPGLSPRGREFAKSLAQFISDQNIKDLKVWTSQMKRTIQTAEALGVPYEQWKVLNEIDASYEDLVQRLEPVIMELERQENVLVICHQAVMRCLLAYFLDKAAEQLPYLKCPLHTVLKLTPVAYGCKVESIFLNVAAVNTHRDRPQNVDISRPPEEALVTVPAHQ

SEQ ID NO: 33315 - protein, 318 aa, Homo sapiens
  REGION 1..318: note = ENSP00000407657
MDRGSLGGSSLTDLGPGSSRRVCMTNCPTLIVMVGLPARGKTYISKKLTRYLNWIGVPTREFNVGQYRRDVVKTYKSFEFFLPDNEEGLKIRKQCALAALRDVRRFLSEEGGHVAVFDATNTTRERRATIFNFGEQNGYKTFFVESICVDPEVIAANIVQVKLGSPDYVNRDSDEATEDFMRRIECYENSYESLDEDLDRDLSYIKIMDVGQSYVVNRVADHIQSRIVYYLMNIHVTPRSIYLCRHGESELNLKGRIGGDPGLSPRGREFAKSLAQFISDQNIKDLKVWTSQMKRTIQTAEALGVPYEQWKVLNEIDA

SEQ ID NO: 33316 - protein, 175 aa, Homo sapiens
  REGION 1..175: note = ENSP00000393047
MTNCPTLIVMVGLPARGKTYISKKLTRYLNWIGVPTREFNVGQYRRDVVKTYKSFEFFLPDNEEGLKIRKQCALAALRDVRRFLSEEGGHVAVFDATNTTRERRATIFNFGEQNGYKTFFVESICVDPEVIAANIVQVKLGSPDYVNRDSDEATEDFMRRIECYENSYESLDEDL

SEQ ID NO: 33317 - protein, 129 aa, Homo sapiens
  REGION 1..129: note = ENSP00000415764
MRARDSTGHPLMLREQTLGQHLHGEDTGEWEHTCEVCMTNCPTLIVMVGLPARGKTYISKKLTRYLNWIGVPTREFNVGQYRRDVVKTYKSFEFFLPDNEEGLKIRKQCALAALRDVRRFLSEEGGHVA

SEQ ID NO: 33318 - protein, 157 aa, Homo sapiens
  REGION 1..157: note = ENSP00000450369
MTHEEHHAAKTLGIGKAIAVLTSGGDAQGMNAAVRAVVRVGIFTGARVFFVHEGYQGLVDGGDHIKEATWESVSMMLQLGGTVIGSARCKDFREREGRLRAAYNLVKRGITNLCVIGGDGSLTGADTFRSEWSDLLSDLQKAGKITDEEATKSSYLN

SEQ ID NO: 33319 - protein, 116 aa, Homo sapiens
  REGION 1..116: note = ENSP00000449835
MTHEEHHAAKTLGIGKAIAVLTSGGDAQGMNAAVRAVVRVGIFTGARVFFVHEGYQGLVDGGDHIKEATWESVSMMLQLGGTVIGSARCKDFREREGRLRAAYNLVKRGITNLCVI

SEQ ID NO: 33320 - protein, 84 aa, Homo sapiens
  REGION 1..84: note = ENSP00000446945
MTHEEHHAAKTLGIGKAIAVLTSGGDAQGMNAAVRAVVRVGIFTGARVFFVHEGYQGLVDGGDHIKEATWESVSMMLQLGGTVI

SEQ ID NO: 33321 - protein, 152 aa, Homo sapiens
  REGION 1..152: note = ENSP00000446829
MRRGFRPGAERKTREPPRTGTAFTAPEESLEWIMTHEEHHAAKTLGIGKAIAVLTSGGDAQGMNAAVRAVVRVGIFTGARVFFVHEGYQGLVDGGDHIKEATWESVSMMLQLGGTVIGSARCKDFREREGRLRAAYNLVKRGITNLCVIGGD

SEQ ID NO: 33322 - protein, 149 aa, Homo sapiens
  REGION 1..149: note = ENSP00000447997
MRRGFRPGAERKTREPPRTGTAFTAPEESLAGEASTSSMLIPKPPPKTDILKSLDTMDDPDTVGSIPVFKTEWIMTHEEHHAAKTLGIGKAIAVLTSGGDAQGMNAAVRAVVRVGIFTGARVFFVHEGYQGLVDGGDHIKEATWESVSM

SEQ ID NO: 33323 - protein, 851 aa, Homo sapiens
  REGION 1..851: note = ENSP00000345771
MHKDEFHLKFFMCVIQSRQLVRTPQRTAGEASTSSMLIPKPPPKTDILKSLDTMDDPDTVGSIPVFKTEWIMTHEEHHAAKTLGIGKAIAVLTSGGDAQGMNAAVRAVVRVGIFTGARVFFVHEGYQGLVDGGDHIKEATWESVSMMLQLGGTVIGSARCKDFREREGRLRAAYNLVKRGITNLCVIGGDGSLTGADTFRSEWSDLLSDLQKAGKITDEEATKSSYLNIVGLVGSIDNDFCGTDMTIGTDSALHRIMEIVDAITTTAQSHQRTFVLEVMGRHCGYLALVTSLSCGADWVFIPECPPDDDWEEHLCRRLSETRTRGSRLNIIIVAEGAIDKNGKPITSEDIKNLVVKRLGYDTRVTVLGHVQRGGTPSAFDRILGSRMGVEAVMALLEGTPDTPACVVSLSGNQAVRLPLMECVQVTKDVTKAMDEKKFDEALKLRGRSFMNNWEVYKLLAHVRPPVSKSGSHTVAVMNVGAPAAGMNAAVRSTVRIGLIQGNRVLVVHDGFEGLAKGQIEEAGWSYVGGWTGQGGSKLGTKRTLPKKSFEQISANITKFNIQGLVIIGGFEAYTGGLELMEGRKQFDELCIPFVVIPATVSNNVPGSDFSVGADTALNTICTTCDRIKQSAAGTKRRVFIIETMGGYCGYLATMAGLAAGADAAYIFEEPFTIRDLQANVEHLVQKMKTTVKRGLVLRNEKCNENYTTDFIFNLYSEEGKGIFDSRKNVLGHMQQGGSPTPFDRNFATKMGAKAMNWMSGKIKESYRNGRIFANTPDSGCVLGMRKRALVFQPVAELKDQTDFEHRIPKEQWWLKLRPILKILAKYEIDLDTSDHAHLEHITRKRSGEAAV

SEQ ID NO: 33324 - protein, 176 aa, Homo sapiens
  REGION 1..176: note = ENSP00000447992
MHKDEFHLKFFMCVIQSRQLVRTPQRTAGEASTSSMLIPKPPPKTDILKSLDTMDDPDTVGSIPVFKTECAEVEIQVSKRKRAVVKARGDPTVETMKQREEWIMTHEEHHAAKTLGIGKAIAVLTSGGDAQEMGRDRPGAVAHTCNPRTLGGRGGQITRGWEFETSLTNMEKPRLY

SEQ ID NO: 33325 - protein, 125 aa, Homo sapiens
  REGION 1..125: note = ENSP00000450173
MHKDEFHLKFFMCVIQSRQLVRTPQRTAGEASTSSMLIPKPPPKTDILKSLDTMDDPDTVGSIPVFKTECAEVEIQVSKRKRAVVKARGDPTVETMKQREEWIMTHEEHHAAKTLGIGKAIAVLT

SEQ ID NO: 33326 - protein, 165 aa, Homo sapiens
  REGION 1..165: note = ENSP00000449622
MHKDEFHLKFFMCVIQSRQLVRTPQRTAGEASTSSMLIPKPPPKTDILKSLDTMDDPDTVGSIPVFKTECAEVEIQVSKRKRAVVKARGDPTVETMKQREEWIMTHEEHHAAKTLGIGKAIAVLTSGGDAQGMNAAVRAVVRVGIFTGARVFFVHEGYQGLVDGG

SEQ ID NO: 33327 - protein, 149 aa, Homo sapiens
  REGION 1..149: note = ENSP00000448940
MHKDEFHLKFFMCVIQSRQLVRTPQRTAGEASTSSMLIPKPPPKTDILKSLDTMDDPDTVGSIPVFKTEWIMTHEEHHAAKTLGIGKAIAVLTSGGDAQGMNAAVRAVVRVGIFTGARVFFVHEGYQGLVDGGDHIKEATWESVSMMLQ

SEQ ID NO: 33328 - protein, 141 aa, Homo sapiens
  REGION 1..141: note = ENSP00000448018
MHKDEFHLKFFMCVIQSRQLVRTPQRTAGEASTSSMLIPKPPPKTDILKSLDTMDDPDTVGSIPVFKTEWIMTHEEHHAAKTLGIGKAIAVLTSGGDAQGMNAAVRAVVRVGIFTGARVFFVHEGYQGLVDGGDHIKEATW

SEQ ID NO: 33329 - protein, 780 aa, Homo sapiens
  REGION 1..780: note = ENSP00000352842
MTHEEHHAAKTLGIGKAIAVLTSGGDAQGMNAAVRAVVRVGIFTGARVFFVHEGYQGLVDGGDHIKEATWESVSMMLQLGGTVIGSARCKDFREREGRLRAAYNLVKRGITNLCVIGGDGSLTGADTFRSEWSDLLSDLQKAGKITDEEATKSSYLNIVGLVGSIDNDFCGTDMTIGTDSALHRIMEIVDAITTTAQSHQRTFVLEVMGRHCGYLALVTSLSCGADWVFIPECPPDDDWEEHLCRRLSETRTRGSRLNIIIVAEGAIDKNGKPITSEDIKNLVVKRLGYDTRVTVLGHVQRGGTPSAFDRILGSRMGVEAVMALLEGTPDTPACVVSLSGNQAVRLPLMECVQVTKDVTKAMDEKKFDEALKLRGRSFMNNWEVYKLLAHVRPPVSKSGSHTVAVMNVGAPAAGMNAAVRSTVRIGLIQGNRVLVVHDGFEGLAKGQIEEAGWSYVGGWTGQGGSKLGTKRTLPKKSFEQISANITKFNIQGLVIIGGFEAYTGGLELMEGRKQFDELCIPFVVIPATVSNNVPGSDFSVGADTALNTICTTCDRIKQSAAGTKRRVFIIETMGGYCGYLATMAGLAAGADAAYIFEEPFTIRDLQANVEHLVQKMKTTVKRGLVLRNEKCNENYTTDFIFNLYSEEGKGIFDSRKNVLGHMQQGGSPTPFDRNFATKMGAKAMNWMSGKIKESYRNGRIFANTPDSGCVLGMRKRALVFQPVAELKDQTDFEHRIPKEQWWLKLRPILKILAKYEIDLDTSDHAHLEHITRKRSGEAAV

SEQ ID NO: 33330 - protein, 73 aa, Homo sapiens
  REGION 1..73: note = ENSP00000448318
MTHEEHHAAKTLGIGKAIAVLTSGGDAQEMGRDRPGAVAHTCNPRTLGGRGGQITRGWEFETSLTNMEKPRLY

SEQ ID NO: 33331 - protein, 59 aa, Homo sapiens
  REGION 1..59: note = ENSP00000447774
MTHEEHHAAKTLGIGKAIAVLTSGGDAQEDICVRSNGPPLWIPGPCHLSVLWGRLGFYS

SEQ ID NO: 33332 - protein, 102 aa, Homo sapiens
  REGION 1..102: note = ENSP00000448315
MTHEEHHAAKTLGIGKAIAVLTSGGDAQGMNAAVRAVVRVGIFTGARVFFVHEGYQGLVDGGDHIKEATWESVSMMLQLLSSLKIHGQKFNMQCLVKALPRC

SEQ ID NO: 33333 - protein, 139 aa, Homo sapiens
  REGION 1..139: note = ENSP00000448253
MTHEEHHAAKTLGIGKAIAVLTSGGDAQGMNAAVRAVVRVGIFTGARVFFVHEGYQGLVDGGDHIKEATWESVSMMLQLGGTVIGSARCKDFREREGRLRAAYNLVKRGITNLCVIGGDGSLTGADTFRSEWSDLLSDL

SEQ ID NO: 33334 - protein, 156 aa, Homo sapiens
  REGION 1..156: note = ENSP00000449269
MTHEEHHAAKTLGIGKAIAVLTSGGDAQGMNAAVRAVVRVGIFTGARVFFVHEGYQGLVDGGDHIKEATWESVSMMLQLGGTVIGSARCKDFREREGRLRAAYNLVKRGITNLCVIGGDGSLTGADTFRSEWSDLLSDLQKADDDWEEHLCRRLSE

SEQ ID NO: 33335 - protein, 749 aa, Homo sapiens
  REGION 1..749: note = ENSP00000448177
MTHEEHHAAKTLGIGKAIAVLTSGGDAQGMNAAVRAVVRVGIFTGARVFFVHEGYQGLVDGGDHIKEATWESVSMMLQLGGTVIGSARCKDFREREGRLRAAYNLVKRGITNLCVIGGDGSLTGADTFRSEWSDLLSDLQKAGKITDEEATKSSYLNIVGLVGSIDNDFCGTDMTIGTDSALHRIMEIVDAITTTAQSHQRTFVLEVMGRHCGYLALVTSLSCGADWVFIPECPPDDDWEEHLCRRLSETRTRGSRLNIIIVAEGAIDKNGKPITSEDIKNGSRMGVEAVMALLEGTPDTPACVVSLSGNQAVRLPLMECVQVTKDVTKAMDEKKFDEALKLRGRSFMNNWEVYKLLAHVRPPVSKSGSHTVAVMNVGAPAAGMNAAVRSTVRIGLIQGNRVLVVHDGFEGLAKGQIEEAGWSYVGGWTGQGGSKLGTKRTLPKKSFEQISANITKFNIQGLVIIGGFEAYTGGLELMEGRKQFDELCIPFVVIPATVSNNVPGSDFSVGADTALNTICTTCDRIKQSAAGTKRRVFIIETMGGYCGYLATMAGLAAGADAAYIFEEPFTIRDLQANVEHLVQKMKTTVKRGLVLRNEKCNENYTTDFIFNLYSEEGKGIFDSRKNVLGHMQQGGSPTPFDRNFATKMGAKAMNWMSGKIKESYRNGRIFANTPDSGCVLGMRKRALVFQPVAELKDQTDFEHRIPKEQWWLKLRPILKILAKYEIDLDTSDHAHLEHITRKRSGEAAV

SEQ ID NO: 33336 - protein, 161 aa, Homo sapiens
  REGION 1..161: note = ENSP00000446805
MTHEEHHAAKTLGIGKAIAVLTSGGDAQGMNAAVRAVVRVGIFTGARVFFVHEGYQGLVDGGDHIKEATWESVSMMLQLGGTVIGSARCKDFREREGRLRAAYNLVKRGITNLCVIGGDGSLTGADTFRSEWSDLLSDLQKAGKITDEEATKSSYLNIVGL

SEQ ID NO: 33337 - protein, 780 aa, Homo sapiens; identical to SEQ ID NO: 33329
  REGION 1..780: note = ENSP00000449426

SEQ ID NO: 33338 - protein, 176 aa, Homo sapiens
  REGION 1..176: note = ENSP00000446519
MTHEEHHAAKTLGIGKAIAVLTSGGDAQGMNAAVRSTVRIGLIQGNRVLVVHDGFEGLAKGQIEEAGWSYVGGWTGQGGSKLGTKRTLPKKSFEQISANITKFNIQGLVIIGGFEAYTGGLELMEGRKQFDELCIPFVVIPATVSNNVPGSDFSVGADTALNTICTTCDRIKQSAA

SEQ ID NO: 33339 - protein, 41 aa, Homo sapiens
  REGION 1..41: note = ENSP00000446740
  VARIANT 1: note = Any amino acid
XSLSGNQAVRLPLMECVQVTKDVTKAMDEKKFDEALKLRGR

SEQ ID NO: 33340 - protein, 97 aa, Homo sapiens
  REGION 1..97: note = ENSP00000450091
  VARIANT 1: note = Any amino acid
XPFVVIPATVSNNVPGSDFSVGADTALNTICTANVEHLVQKMKTTVKRGLVLRNEKCNENYTTDFIFNLYSEEGKGIFDSRKNVLGHMQQGGSPTPF

SEQ ID NO: 33341 - protein, 780 aa, Homo sapiens; identical to SEQ ID NO: 33329
  REGION 1..780: note = ENSP00000309438

SEQ ID NO: 33342 - protein, 102 aa, Homo sapiens; identical to SEQ ID NO: 33332
  REGION 1..102: note = ENSP00000486196

SEQ ID NO: 33343 - protein, 113 aa, Homo sapiens
  REGION 1..113: note = ENSP00000477128
MNAAVRAVVRMGIYVGAKVYFIYEGYQGMVDGGSNIAEADWESVSSILQVGGTIIGSARCQAFRTREGRLKAACNLLQRGITNLCVIGGDGSLTGANLFRKEWSGLLEELARN

SEQ ID NO: 33344 - protein, 784 aa, Homo sapiens
  REGION 1..784: note = ENSP00000370517
MDADDSRAPKGSLRKFLEHLSGAGKAIGVLTSGGDAQGMNAAVRAVVRMGIYVGAKVYFIYEGYQGMVDGGSNIAEADWESVSSILQVGGTIIGSARCQAFRTREGRLKAACNLLQRGITNLCVIGGDGSLTGANLFRKEWSGLLEELARNGQIDKEAVQKYAYLNVVGMVGSIDNDFCGTDMTIGTDSALHRIIEVVDAIMTTAQSHQRTFVLEVMGRHCGYLALVSALACGADWVFLPESPPEEGWEEQMCVKLSENRARKKRLNIIIVAEGAIDTQNKPITSEKIKELVVTQLGYDTRVTILGHVQRGGTPSAFDRILASRMGVEAVIALLEATPDTPACVVSLNGNHAVRLPLMECVQMTQDVQKAMDERRFQDAVRLRGRSFAGNLNTYKRLAIKLPDDQIPKTNCNVAVINVGAPAAGMNAAVRSAVRVGIADGHRMLAIYDGFDGFAKGQIKEIGWTDVGGWTGQGGSILGTKRVLPGKYLEEIATQMRTHSINALLIIGGFEAYLGLLELSAAREKHEEFCVPMVMVPATVSNNVPGSDFSIGADTALNTITDTCDRIKQSASGTKRRVFIIETMGGYCGYLANMGGLAAGADAAYIFEEPFDIRDLQSNVEHLTEKMKTTIQRGLVLRNESCSENYTTDFIYQLYSEEGKGVFDCRKNVLGHMQQGGAPSPFDRNFGTKISARAMEWITAKLKEARGRGKKFTTDDSICVLGISKRNVIFQPVAELKKQTDFEHRIPKEQWWLKLRPLMKILAKYKASYDVSDSGQLEHVQPWSV

SEQ ID NO: 33345 - protein, 776 aa, Homo sapiens
  REGION 1..776: note = ENSP00000370465
MCGYERCRPCRGAHGYLRGGQGVLHLRGLPGHGGRRLKHRRGRLGECLQHPASGAVRGDWREKPGCWSHRFPCPGRHALVGGTIIGSARCQAFRTREGRLKAACNLLQRGITNLCVIGGDGSLTGANLFRKEWSGLLEELARNGQIDKEAVQKYAYLNVVGMVGSIDNDFCGTDMTIGTDSALHRIIEVVDAIMTTAQSHQRTFVLEVMGRHCGYLALVSALACGADWVFLPESPPEEGWEEQMCVKLSENRARKKRLNIIIVAEGAIDTQNKPITSEKIKELVVTQLGYDTRVTILGHVQRGGTPSAFDRILASRMGVEAVIALLEATPDTPACVVSLNGNHAVRLPLMECVQMTQDVQKAMDERRFQDAVRLRGRSFAGNLNTYKRLAIKLPDDQIPKTNCNVAVINVGAPAAGMNAAVRSAVRVGIADGHRMLAIYDGFDGFAKGQIKEIGWTDVGGWTGQGGSILGTKRVLPGKYLEEIATQMRTHSINALLIIGGFEAYLGLLELSAAREKHEEFCVPMVMVPATVSNNVPGSDFSIGADTALNTITDTCDRIKQSASGTKRRVFIIETMGGYCGYLANMGGLAAGADAAYIFEEPFDIRDLQSNVEHLTEKMKTTIQRGLVLRNESCSENYTTDFIYQLYSEEGKGVFDCRKNVLGHMQQGGAPSPFDRNFGTKISARAMEWITAKLKEARGRGKKFTTDDSICVLGISKRNVIFQPVAELKKQTDFEHRIPKEQWWLKLRPLMKILAKYKASYDVSDSGQLEHVQPWSV

SEQ ID NO: 33346 - protein, 210 aa, Homo sapiens
  REGION 1..210: note = ENSP00000385880
MNAAVRAVVRMGIYVGAKVYFIYEGYQGMVDGGSNIAEADWESVSSILQVGGTIIGSARCQAFRTREGRLKAACNLLQRGITNLCVIGGDGSLTGANLFRKEWSGLLEELARNGQIDKEAVQKYAYLNVVGMVGSIDNDFCGTDMTIGTDSALHRIIEVVDAIMTTAQSHQRTFVLEVMGRHCGYLALVSALACGADWVFLPESPPEEGW

SEQ ID NO: 33347 - protein, 240 aa, Homo sapiens
  REGION 1..240: note = ENSP00000408858
MGRHCGYLALVSALACGADWVFLPESPPEEGWEEQMCVKLSENRARKKRLNIIIVAEGAIDTQNKPITSEKIKELVVTQLGYDTRVTILGHVQRGGTPSAFDRILASRMGVEAVIALLEATPDTPACVVSLNGNHAVRLPLMECVQMTQDVQKAMDERRFQDAVRLRGRSFAGNLNTYKRLAIKLPDDQIPKTNCNVAVINVGAPAAGMNAAVRSAVRVGIADGHRMLAIYDGFDGFAKG

SEQ ID NO: 33348 - protein, 118 aa, Homo sapiens
  REGION 1..118: note = ENSP00000476311
MGRHCGYLALVSALACGADWVFLPESPPEEGWEEQMCVKLSENRARKKRLNIIIVAEGAIDTQNKPITSEKIKELVVTQLGYDTRVTILGHVQRGGTPSAFDRILASRMGVEAVIALL

SEQ ID NO: 33349 - protein, 166 aa, Homo sapiens
  REGION 1..166: note = ENSP00000387871
  VARIANT 1: note = Any amino acid
XADGHRMLAIYDGFDGFAKGQIKEIGWTDVGGWTGQGGSILGTKRVLPGKYLEEIATQMRTHSINALLIIGGFEAYKSACDMAEARGRHQELCIPLCVVPATISNNVPGTEISLGSDTGLNAVVETCDRIKQSASGTKRRVFIIETMGGYCGYLANMGGLAAGADA

SEQ ID NO: 33350 - protein, 202 aa, Homo sapiens
  REGION 1..202: note = ENSP00000370462
MGGYCGYLANMGGLAAGADAAYIFEEPFDIRDLQSNVEHLTEKMKTTIQRGLVLRNESCSENYTTDFIYQLYSEEGKGVFDCRKNVLGHMQQGGAPSPFDRNFGTKISARAMEWITAKLKEARGRGKKFTTDDSICVLGISKRNVIFQPVAELKKQTDFEHRIPKEQWWLKLRPLMKILAKYKASYDVSDSGQLEHVQPWSV

SEQ ID NO: 33351 - protein, 103 aa, Homo sapiens
  REGION 1..103: note = ENSP00000410275
  VARIANT 1: note = Any amino acid
XFIYQLYSEEGKGVFDCRKNVLGHMQQGGAPSPFDRNFGTKISARAMEWITAKLKEARGRGKKFTTDDSICVLGISKRNVIFQPVAELKKQTDFETVSMQPPR

SEQ ID NO: 33352 - protein, 737 aa, Homo sapiens
  REGION 1..737: note = ENSP00000387185
MEDAGEDPTTFAAHSLPSDPRLLATVTNAYLGTRVFHDTLHVSGVYNGAGGDTHRAMLPSPLNVRLEAPAGMGEQLTETFALDTNTGSFLHTLEGPRFRASQCIYAHRTLPHVLAFRVSIARLAPGSGPITLLLRSAFSPESPDLDLHQGPDFQGARYLYGHTLTPEQPGGPQQEVHMLWTPAPPDLTLGEGEEARTWDFLTAVGGSQAEAQACLTEALQLQARGALYTAHAQAWAQLWVECGLDVVGPLQLRQALRGSLYYLLSALPQPKAPGYICHGLSPGGLSNGSREECYWGHVFWDQDLWMFPSILMFHPEAARAILEYRIRTLDGALENAQNLGYQGAKFAWESADSGLEVCPEDIYGVQEVHVNGAVVLAFELYYHTTQDLQLFREAGGWDVVRAVAEFWCSRVEWSPREEKYHLRGVMSPDEYHSGVNNSVYTNVLVQNSLRFAAALAQDLGLPIPSQWLAVADKIKVPFDVEQNFHPEFDGYEPGEVVKQADVVLLGYPVPFSLSPDVRRKNLEIYEAVTSPQGPAMTWSMFAVGWMELKDAVRARGLLDRSFANMAEPFKVWTENADGSGAVNFLTGMGGFLQAVVFGCTGFRVTRAGVTFDPVCLSGISRVSVSGIFYQGNKLNFSFSEDSVTVEVTARAGPWAPHLEAELWPSQSRLSLLPGHKVSFPRSAGRIQMSPPKLPGSSSSEFPGRTFSDVRDPLQSPLWVTLGSSSPTESLTVDPASE

SEQ ID NO: 33353 - protein, 489 aa, Homo sapiens
  REGION 1..489: note = ENSP00000386297
MLWTPAPPDLTLGEGEEARTWDFLTAVGGSQAEAQACLTEALQLQARGALYTAHAQAWAQLWVECGLDVVGPLQLRQALRGSLYYLLSALPQPKAPGYICHGLSPGGLSNGSREECYWGHVFWDQDLWMFPSILMFHPEAARAILEYRIRTLDGALENAQNLGYQGAKFAWESADSGLEVCPEDIYGVQEVHVNGAVVLAFELYYHTTQDLQLFREAGGWDVVRAVAEFWCSRVEWSPREEKYHLRGVMSPDEYHSGVNNSVYTNVLVQNRKNLEIYEAVTSPQGPAMTWSMFAVGWMELKDAVRARGLLDRSFANMAEPFKVWTENADGSGAVNFLTGMGGFLQAVVFGCTGFRVTRAGVTFDPVCLSGISRVSVSGIFYQGNKLNFSFSEDSVTVEVTARAGPWAPHLEAELWPSQSRLSLLPGHKVSFPRSAGRIQMSPPKLPGSSSSEFPGRTFSDVRDPLQSPLWVTLGSSSPTESLTVDPASE

SEQ ID NO: 33354 - protein, 764 aa, Homo sapiens
  REGION 1..764: note = ENSP00000387099
MEDAGEDPTTFAAHSLPSDPRLLATVTNAYLGTRVFHDTLHVSGVYNGAGGDTHRAMLPSPLNVRLEAPAGMGEQLTETFALDTNTGSFLHTLEGPRFRASQCIYAHRTLPHVLAFRVSIARLAPGSGPITLLLRSAFSPESPDLDLHQGPDFQGARYLYGHTLTPEQPGGPQQEVHMLWTPAPPDLTLGEGEEARTWDFLTAVGGSQAEAQACLTEALQLQARGALYTAHAQAWAQLWVECGLDVVGPLQLRQALRGSLYYLLSALPQPKAPGYICHGLSPGGLSNGSREECYWGHVFWDQDLWMFPSILMFHPEAARAILEYRIRTLDGALENAQNLGYQGAKFAWESADSGLEVCPEDIYGVQEVHVNGAVVLAFELYYHTTQDLQLFREAGGWDVVRAVAEFWCSRVEWSPREEKHLTCASPTLTTGVEGRPLRLCTEHHLGLVCPGVMSPDEYHSGVNNSVYTNVLVQNSLRFAAALAQDLGLPIPSQWLAVADKIKVPFDVEQNFHPEFDGYEPGEVVKQADVVLLGYPVPFSLSPDVRRKNLEIYEAVTSPQGPAMTWSMFAVGWMELKDAVRARGLLDRSFANMAEPFKVWTENADGSGAVNFLTGMGGFLQAVVFGCTGFRVTRAGVTFDPVCLSGISRVSVSGIFYQGNKLNFSFSEDSVTVEVTARAGPWAPHLEAELWPSQSRLSLLPGHKVSFPRSAGRIQMSPPKLPGSSSSEFPGRTFSDVRDPLQSPLWVTLGSSSPTESLTVDPASE

SEQ ID NO: 33355 - protein, 203 aa, Homo sapiens
  REGION 1..203: note = ENSP00000431881
  VARIANT 1: note = Any amino acid
XFHDTLHVSGVYNGAGGDTHRAMLPSPLNVRLEAPAGMGEQLTETFALDTNTGSFLHTLEGPRFRASQCIYAHRTLPHVLAFRVSIARLAPGSGPITLLLRSAFSPESPDLDLHQGPDFQGARYLYGHTLTPEQPGGPQQEVHMLWTPAPPDLTLGEVPCPSPRPQDTSAMASVLGASPMGAVRNATGATSSGTRTSGCSRVS

SEQ ID NO: 33356 - protein, 193 aa, Homo sapiens
  REGION 1..193: note = ENSP00000380780
  VARIANT 1: note = Any amino acid
XEIYEAVTSPQGPAMTWSMFAVGWMELKDAVRARGLLDRSFANMAEPFKVWTENADGSGAVNFLTGMGGFLQAVVFGCTGFRVSVSGIFYQGNKLNFSFSEDSVTVEVTARAGPWAPHLEAELWPSQSRLSLLPGHKVSFPRSAGRIQMSPPKLPGSSSSEFPGRTFSDVRDPLQSPLWVTLGSSSPTESLTV

SEQ ID NO: 33357 - protein, 622 aa, Homo sapiens
  REGION 1..622: note = ENSP00000298198
MAENTEGDLNSNLLHAPYHTGDPQLDTAIGQWLRWDKNPKTKEQIENLLRNGMNKELRDRLCCRMTFGTAGLRSAMGAGFCYINDLTVIQSTQGMYKYLERCFSDFKQRGFVVGYDTRGQVTSSCSSQRLAKLTAAVLLAKDVPVYLFSRYVPTPFVPYAVQKLKAVAGVMITASHNRKEDNGYKVYWETGAQITSPHDKEILKCIEECVEPWNGSWNDNLVDTSPLKRDPLQDICRRYMEDLKKICFYRELNSKTTLKFVHTSFHGVGHDYVQLAFKVFGFKPPIPVPEQKDPDPDFSTVKCPNPEEGESVLELSLRLAEKENARVVLATDPDADRLAAAELQENGCWKVFTGNELAALFGWWMFDCWKKNKSRNADVKNVYMLATTVSSKILKAIALKEGFHFEETLPGFKWIGSRIIDLLENGKEVLFAFEESIGFLCGTSVLDKDGVSAAVVVAEMASYLETMNITLKQQLVKVYEKYGYHISKTSYFLCYEPPTIKSIFERLRNFDSPKEYPKFCGTFAILHVRDVTTGYDSSQPNKKSVLPVSKNSQMITFTFQNGCVATLRTSGTEPKIKYYAEMCASPDQSDTALLEEELKKLIDALIENFLQPSKNGLIWRSV

SEQ ID NO: 33358 - protein, 387 aa, Homo sapiens
  REGION 1..387: note = ENSP00000379674
MEGSPIPVLTVPTAPYEDQRPAGGGGLRRPTGLFEGQRNYLPNFIQSVLSSIDLRDRQGCTMVVGSDGRYFSRTAIEIVVQMAAANGIGRLIIGQNGILSTPAVSCIIRKIKAAGGIILTASHCPGGPGGEFGVKFNVANGGPAPDVVSDKIYQISKTIEEYAICPDLRIDLSRLGRQEFDLENKFKPFRVEIVDPVDIYLNLLRTIFDFHAIKGLLTGPSQLKIRIDAMHGVMGPYVRKVLCDELGAPANSAINCVPLEDFGGQHPDPNLTYATTLLEAMKGGEYGFGAAFDADGDRYMILGQNGFFVSPSDSLAIIAANLSCIPYFRQMGVRGFGRSMPTSMALDRVAKSMKVPVYETPAGWRFFSNLMDSGRCNLCGEESFGTV

SEQ ID NO: 33359 - protein, 567 aa, Homo sapiens
  REGION 1..567: note = ENSP00000379678
MEGSPIPVLTVPTAPYEDQRPAGGGGLRRPTGLFEGQRNYLPNFIQSVLSSIDLRDRQGCTMVVGSDGRYFSRTAIEIVVQMAAANGIGRLIIGQNGILSTPAVSCIIRKIKAAGGIILTASHCPGGPGGEFGVKFNVANGGPAPDVVSDKIYQISKTIEEYAICPDLRIDLSRLGRQEFDLENKFKPFRVEIVDPVDIYLNLLRTIFDFHAIKGLLTGPSQLKIRIDAMHGVMGPYVRKVLCDELGAPANSAINCVPLEDFGGQHPDPNLTYATTLLEAMKGGEYGFGAAFDADGDRYMILGQNGFFVSPSDSLAIIAANLSCIPYFRQMGVRGFGRSMPTSMALDRVAKSMKVPVYETPAGWRFFSNLMDSGRCNLCGEESFGTGSDHLREKDGLWAVLVWLSIIAARKQSVEEIVRDHWAKFGRHYYCRFDYEGLDPKTTYYIMRDLEALVTDKSFIGQQFAVGSHVYSVAKTDSFEYVDPVDGTVTKKQGLRIIFSDASRLIFRLSSSSGVRATLRLYAESYERDPSGHDQEPQAVLSPLIAIALKISQIHERTGRRGPTVIT

SEQ ID NO: 33360 - protein, 205 aa, Homo sapiens
  REGION 1..205: note = ENSP00000394864
EGQRNYLPNFIQSVLSSIDLRDRQGCTMVVGSDGRYFSRTAIEIVVQMAAANGIGRLIIGQNGILSTPAVSCIIRKIKAAGGIILTASHCPGGPGGEFGVKFNVANGVEIVDPVDIYLNLLRTIFDFHAIKGLLTGPSQLKIRIDAMHGVMGPYVRKVLCDELGAPANSAINCVPLEDFGGQHPDPNLTYATTLLEAMKGGEYGF

SEQ ID NO: 33361 - protein, 933 aa, Homo sapiens
  REGION 1..933: note = ENSP00000325120
MTELKAKGPRAPHVAGGPPSPEVGSPLLCRPAAGPFPGSQTSDTLPEVSAIPISLDGLLFPRPCQGQDPSDEKTQDQQSLSDVEGAYSRAEATRGAGGSSSSPPEKDSGLLDSVLDTLLAPSGPGQSQPSPPACEVTSSWCLFGPELPEDPPAAPATQRVLSPLMSRSGCKVGDSSGTAAAHKVLPRGLSPARQLLLPASESPHWSGAPVKPSPQAAAVEVEEEDGSESEESAGPLLKGKPRALGGAAAGGGAAAVPPGAAAGGVALVPKEDSRFSAPRVALVEQDAPMAPGRSPLATTVMDFIHVPILPLNHALLAARTRQLLEDESYDGGAGAASAFAPPRSSPCASSTPVAVGDFPDCAYPPDAEPKDDAYPLYSDFQPPALKIKEEEEGAEASARSPRSYLVAGANPAAFPDFPLGPPPPLPPRATPSRPGEAAVTAAPASASVSSASSSGSTLECILYKAEGAPPQQGPFAPPPCKAPGASGCLLPRDGLPSTSASAAAAGAAPALYPALGLNGLPQLGYQAAVLKEGLPQVYPPYLNYLRPDSEASQSPQYSFESLPQKICLICGDEASGCHYGVLTCGSCKVFFKRAMEGQHNYLCAGRNDCIVDKIRRKNCPACRLRKCCQAGMVLGGRKFKKFNKVRVVRALDAVALPQPVGVPNESQALSQRFTFSPGQDIQLIPPLINLLMSIEPDVIYAGHDNTKPDTSSSLLTSLNQLGERQLLSVVKWSKSLPGFRNLHIDDQITLIQYSWMSLMVFGLGWRSYKHVSGQMLYFAPDLILNEQRMKESSFYSLCLTMWQIPQEFVKLQVSQEEFLCMKVLLLLNTIPLEGLRSQTQFEEMRSSYIRELIKAIGLRQKGVVSSSQRFYQLTKLLDNLHDLVKQLHLYCLNTFIQSRALSVEFPEMMSEVIAAQLPKILAGMVKPLLFHKK

SEQ ID NO: 33362 - protein, 339 aa, Homo sapiens
  REGION 1..339: note = ENSP00000436561
MEGQHNYLCAGRNDCIVDKIRRKNCPACRLRKCCQAGMVLGGRKFKKFNKVRVVRALDAVALPQPVGVPNESQALSQRFTFSPGQDIQLIPPLINLLMSIEPDVIYAGHDNTKPDTSSSLLTSLNQLGERQLLSVVKWSKSLPGFRNLHIDDQITLIQYSWMSLMVFGLGWRSYKHVSGQMLYFAPDLILNEQRMKESSFYSLCLTMWQIPQEFVKLQVSQEEFLCMKVLLLLNTIPLEGLRSQTQFEEMRSSYIRELIKAIGLRQKGVVSSSQRFYQLTKLLDNLHDLVKQLHLYCLNTFIQSRALSVEFPEMMSEVIAAQLPKILAGMVKPLLFHKK

SEQ ID NO: 33363 - protein, 764 aa, Homo sapiens
  REGION 1..764: note = ENSP00000432914
MTELKAKGPRAPHVAGGPPSPEVGSPLLCRPAAGPFPGSQTSDTLPEVSAIPISLDGLLFPRPCQGQDPSDEKTQDQQSLSDVEGAYSRAEATRGAGGSSSSPPEKDSGLLDSVLDTLLAPSGPGQSQPSPPACEVTSSWCLFGPELPEDPPAAPATQRVLSPLMSRSGCKVGDSSGTAAAHKVLPRGLSPARQLLLPASESPHWSGAPVKPSPQAAAVEVEEEDGSESEESAGPLLKGKPRALGGAAAGGGAAAVPPGAAAGGVALVPKEDSRFSAPRVALVEQDAPMAPGRSPLATTVMDFIHVPILPLNHALLAARTRQLLEDESYDGGAGAASAFAPPRSSPCASSTPVAVGDFPDCAYPPDAEPKDDAYPLYSDFQPPALKIKEEEEGAEASARSPRSYLVAGANPAAFPDFPLGPPPPLPPRATPSRPGEAAVTAAPASASVSSASSSGSTLECILYKAEGAPPQQGPFAPPPCKAPGASGCLLPRDGLPSTSASAAAAGAAPALYPALGLNGLPQLGYQAAVLKEGLPQVYPPYLNYLRPDSEASQSPQYSFESLPQKICLICGDEASGCHYGVLTCGSCKVFFKRAMEGRKFKKFNKVRVVRALDAVALPQPVGVPNESQALSQRFTFSPGQDIQLIPPLINLLMSIEPDVIYAGHDNTKPDTSSSLLTSLNQLGERQLLSVVKWSKSLPGFRNLHIDDQITLIQYSWMSLMVFGLGWRSYKHVSGQMLYFAPDLILNESHRSLSSFKLAKKSSSV

SEQ ID NO: 33364 - protein, 803 aa, Homo sapiens
  REGION 1..803: note = ENSP00000432352
MTELKAKGPRAPHVAGGPPSPEVGSPLLCRPAAGPFPGSQTSDTLPEVSAIPISLDGLLFPRPCQGQDPSDEKTQDQQSLSDVEGAYSRAEATRGAGGSSSSPPEKDSGLLDSVLDTLLAPSGPGQSQPSPPACEVTSSWCLFGPELPEDPPAAPATQRVLSPLMSRSGCKVGDSSGTAAAHKVLPRGLSPARQLLLPASESPHWSGAPVKPSPQAAAVEVEEEDGSESEESAGPLLKGKPRALGGAAAGGGAAAVPPGAAAGGVALVPKEDSRFSAPRVALVEQDAPMAPGRSPLATTVMDFIHVPILPLNHALLAARTRQLLEDESYDGGAGAASAFAPPRSSPCASSTPVAVGDFPDCAYPPDAEPKDDAYPLYSDFQPPALKIKEEEEGAEASARSPRSYLVAGANPAAFPDFPLGPPPPLPPRATPSRPGEAAVTAAPASASVSSASSSGSTLECILYKAEGAPPQQGPFAPPPCKAPGASGCLLPRDGLPSTSASAAAAGAAPALYPALGLNGLPQLGYQAAVLKEGLPQVYPPYLNYLRPDSEASQSPQYSFESLPQKICLICGDEASGCHYGVLTCGSCKVFFKRAMEGQHNYLCAGRNDCIVDKIRRKNCPACRLRKCCQAGMVLGGRKFKKFNKVRVVRALDAVALPQPVGVPNESQALSQRFTFSPGQDIQLIPPLINLLMSIEPDVIYAGHDNTKPDTSSSLLTSLNQLGERQLLSVVKWSKSLPGFRNLHIDDQITLIQYSWMSLMVFGLGWRSYKHVSGQMLYFAPDLILNESHRSLSSFKLAKKSSSV

SEQ ID NO: 33365 - protein, 695 aa, Homo sapiens
  REGION 1..695: note = ENSP00000436803
MTELKAKGPRAPHVAGGPPSPEVGSPLLCRPAAGPFPGSQTSDTLPEVSAIPISLDGLLFPRPCQGQDPSDEKTQDQQSLSDVEGAYSRAEATRGAGGSSSSPPEKDSGLLDSVLDTLLAPSGPGQSQPSPPACEVTSSWCLFGPELPEDPPAAPATQRVLSPLMSRSGCKVGDSSGTAAAHKVLPRGLSPARQLLLPASESPHWSGAPVKPSPQAAAVEVEEEDGSESEESAGPLLKGKPRALGGAAAGGGAAAVPPGAAAGGVALVPKEDSRFSAPRVALVEQDAPMAPGRSPLATTVMDFIHVPILPLNHALLAARTRQLLEDESYDGGAGAASAFAPPRSSPCASSTPVAVGDFPDCAYPPDAEPKDDAYPLYSDFQPPALKIKEEEEGAEASARSPRSYLVAGANPAAFPDFPLGPPPPLPPRATPSRPGEAAVTAAPASASVSSASSSGSTLECILYKAEGAPPQQGPFAPPPCKAPGASGCLLPRDGLPSTSASAAAAGAAPALYPALGLNGLPQLGYQAAVLKEGLPQVYPPYLNYLRPDSEASQSPQYSFESLPQKICLICGDEASGCHYGVLTCGSCKVFFKRAMEGQHNYLCAGRNDCIVDKIRRKNCPACRLRKCCQAGMVLGGFRNLHIDDQITLIQYSWMSLMVFGLGWRSYKHVSGQMLYFAPDLILNDSFGRATKSNPV

SEQ ID NO: 33366 - protein, 831 aa, Homo sapiens
  REGION 1..831: note = ENSP00000263463
MTELKAKGPRAPHVAGGPPSPEVGSPLLCRPAAGPFPGSQTSDTLPEVSAIPISLDGLLFPRPCQGQDPSDEKTQDQQSLSDVEGAYSRAEATRGAGGSSSSPPEKDSGLLDSVLDTLLAPSGPGQSQPSPPACEVTSSWCLFGPELPEDPPAAPATQRVLSPLMSRSGCKVGDSSGTAAAHKVLPRGLSPARQLLLPASESPHWSGAPVKPSPQAAAVEVEEEDGSESEESAGPLLKGKPRALGGAAAGGGAAAVPPGAAAGGVALVPKEDSRFSAPRVALVEQDAPMAPGRSPLATTVMDFIHVPILPLNHALLAARTRQLLEDESYDGGAGAASAFAPPRSSPCASSTPVAVGDFPDCAYPPDAEPKDDAYPLYSDFQPPALKIKEEEEGAEASARSPRSYLVAGANPAAFPDFPLGPPPPLPPRATPSRPGEAAVTAAPASASVSSASSSGSTLECILYKAEGAPPQQGPFAPPPCKAPGASGCLLPRDGLPSTSASAAAAGAAPALYPALGLNGLPQLGYQAAVLKEGLPQVYPPYLNYLRPDSEASQSPQYSFESLPQKICLICGDEASGCHYGVLTCGSCKVFFKRAMEGQHNYLCAGRNDCIVDKIRRKNCPACRLRKCCQAGMVLGGFRNLHIDDQITLIQYSWMSLMVFGLGWRSYKHVSGQMLYFAPDLILNEQRMKESSFYSLCLTMWQIPQEFVKLQVSQEEFLCMKVLLLLNTIPLEGLRSQTQFEEMRSSYIRELIKAIGLRQKGVVSSSQRFYQLTKLLDNLHDLVKQLHLYCLNTFIQSRALSVEFPEMMSEVIAAQLPKILAGMVKPLLFHKK

SEQ ID NO: 33367 - protein, 170 aa, Homo sapiens
  REGION 1..170: note = ENSP00000487607
MKCFFLRRRTFTRSACLGEEPDSEASQSPQYSFESLPQKICLICGDEASGCHYGVLTCGSCKVFFKRAMEGQHNYLCAGRNDCIVDKIRRKNCPACRLRKCCQAGMVLGGRKFKKFNKVRVVRALDAVALPQPVGVPNESQALSQRFTFSPGQDIQLIPPLINLLMSIEP

SEQ ID NO: 33368 - protein, 764 aa, Homo sapiens; identical to SEQ ID NO: 33363
  REGION 1..764: note = ENSP00000482698

SEQ ID NO: 33369 - protein, 690 aa, Homo sapiens [sequence omitted]

SEQ ID NO: 33370 - protein, 496 aa, Homo sapiens
  REGION 1..496: note = ENSP00000355743
MAAAAGPGAALSPRPCDSDPATPGAQSPKDDNEDNSNDGTQPSKRRRMGSGDSSRSCETSSQDLGFSYYPAENLIEYKWPPDETGEYYMLQEQVSEYLGVTSFKRKYPERRDLSHKEKLYLRELNVITETQCTLGLTALRSDEVIDLMIKEYPAKHAEYSVILQEKERQRITDHYKEYSQMQQQNTQKVEASKVPEYIKKAAKKAAEFNSNLNRERMEERRAYFDLQTHVIQVPQGKYKVLPTERTKVSSYPVALIPGQFQEYYKRYSPDELRYLPLNTALYEPPLDPELPALDSDGDSDDGEDGRGDEKRKNKGTSDSSSGNVSEGESPPDSQEDSFQGRQKSKDKAATPRKDGPKRSVLSKSVPGYKPKVIPNAICGICLKGKESNKKGKAESLIHCSQCENSGHPSCLDMTMELVSMIKTYPWQCMECKTCIICGQPHHEEEMMFCDMCDRGYHTFCVGLGAIPSGRWICDCCQRAPPTPRKVGRRGKNSKEG

SEQ ID NO: 33371 - protein, 498 aa, Homo sapiens
  REGION 1..498: note = ENSP00000341805
MAAAAGPGAALSPRPCDSDPATPGAQSPKDDNEDNSNDGTQPSKRRRMGSGDSSRSCETSSQDLGFSYYPAENLIEYKWPPDETGEYYMLQEQVSEYLGVTSFKRKYPDLERRDLSHKEKLYLRELNVITETQCTLGLTALRSDEVIDLMIKEYPAKHAEYSVILQEKERQRITDHYKEYSQMQQQNTQKVEASKVPEYIKKAAKKAAEFNSNLNRERMEERRAYFDLQTHVIQVPQGKYKVLPTERTKVSSYPVALIPGQFQEYYKRYSPDELRYLPLNTALYEPPLDPELPALDSDGDSDDGEDGRGDEKRKNKGTSDSSSGNVSEGESPPDSQEDSFQGRQKSKDKAATPRKDGPKRSVLSKSVPGYKPKVIPNAICGICLKGKESNKKGKAESLIHCSQCENSGHPSCLDMTMELVSMIKTYPWQCMECKTCIICGQPHHEEEMMFCDMCDRGYHTFCVGLGAIPSGRWICDCCQRAPPTPRKVGRRGKNSKEG

SEQ ID NO: 33372 - protein, 377 aa, Homo sapiens
  REGION 1..377: note = ENSP00000479515
MAAAAGPGAALSPRPCDSDPATPGAQSPKDDNEDNSNDGTQPSKRRRMGSGDSSRSCETSSQDLGFSYYPAENLIEYKWPPDETGEYYMLQEQVSEYLGVTSFKRKYPDLERRDLSHKEKLYLRELNVITETQCTLGLTALRSDEVIDLMIKEYPAKHAEYSVILQEKERQRITDHYKEYSQMQQQNTQKVEASKVPEYIKKAAKKAAEFNSNLNRERMEERRAYFDLQTHVIQVPQGKYKVLPTERTKVSSYPVALIPGQFQEYYKRYSPDELRYLPLNTALYEPPLDPELPALDSDGDSDDGEDGRGDEKRKNKGTSDSSSGNVSEGESPPDSQEDSFQGRQKSKDKAATPRKDGPKRSVLSKSVPGYKVEEKSP

SEQ ID NO: 33373 - protein, 451 aa, Homo sapiens
  REGION 1..451: note = ENSP00000484117
MGSGDSSRSCETSSQDLGFSYYPAENLIEYKWPPDETGEYYMLQEQVSEYLGVTSFKRKYPDLERRDLSHKEKLYLRELNVITETQCTLGLTALRSDEVIDLMIKEYPAKHAEYSVILQEKERQRITDHYKEYSQMQQQNTQKVEASKVPEYIKKAAKKAAEFNSNLNRERMEERRAYFDLQTHVIQVPQGKYKVLPTERTKVSSYPVALIPGQFQEYYKRYSPDELRYLPLNTALYEPPLDPELPALDSDGDSDDGEDGRGDEKRKNKGTSDSSSGNVSEGESPPDSQEDSFQGRQKSKDKAATPRKDGPKRSVLSKSVPGYKPKVIPNAICGICLKGKESNKKGKAESLIHCSQCENSGHPSCLDMTMELVSMIKTYPWQCMECKTCIICGQPHHEEEMMFCDMCDRGYHTFCVGLGAIPSGRWICDCCQRAPPTPRKVGRRGKNSKEG

SEQ ID NO: 33374 - protein, 327 aa, Homo sapiens
  REGION 1..327: note = ENSP00000385053
MAPSTAVSVVSDSIKVQPLLISADNKVIIIQPQVQTQPESTAESRPPTEEPSQGAQATKKKKEDRPPTQENPEKIAFMVALGLVTTEHLEEIQSKRQERKRRSTANPAYSGLLETERKRLASNYLNNPLFLTARANEDPCWKNEITHDEHCAACKRGANLQPCGTCPGAYHLSCLEPPLKTAPKGVWVCPRCQQKALKKDEGVPWTGMLAIVHSYVTHKTVKEEEKQKLLQRGSELQNEHQQLEERDRRLASAVQKCLELKTSLLARQRGTQSSLDRLRALLRLIQGEQLLQVTMTTTSPAPLLAGPWTKPSVAATHPTVQHPQGHN

SEQ ID NO: 33375 - protein, 531 aa, Homo sapiens
  REGION 1..531: note = ENSP00000324403
MELQSRPEALAVELARHQNGDLKKQLHERQPRIAALSDKQALGTITAVPVTGPQVSSLQRLAGQGAAVLPQVRPKTLIPDSLPVAPGRDRPPKQPPTFQKATVVSVKNPSPALPTANNTVSHVPAPGSQPQALAEPAALASPLSSAGVAYAIISTSPSNAAAMAPSTAVSVVSDSIKVQPLLISADNKPPPRLLSSPHPATHHCPLHPSSLPLTPPSPSLSPSPLHGIFQVIIIQPQVQTQPESTAESRPPTEEPSQGAQATKKKKEDRPPTQENPEKIAFMVALGLVTTEHLEEIQSKRQERKRRSTANPAYSGLLETERKRLASNYLNNPLFLTARANEDPCWKNEITHDEHCAACKRGANLQPCGTCPGAYHLSCLEPPLKTAPKGVWVCPRCQQKALKKDEGVPWTGMLAIVHSYVTHKTVKEEEKQKLLQRGSELQNEHQQLEERDRRLASAVQKCLELKTSLLARQRGTQSSLDRLRALLRLIQGEQLLQVTMTTTSPAPLLAGPWTKPSVAATHPTVQHPQGHN

SEQ ID NO: 33376 - protein, 489 aa, Homo sapiens
  REGION 1..489: note = ENSP00000487086
MELQSRPEALAVELARHQNGDLKKQLHERQPRIAALSDKQALGTITAVPVTGPQVSSLQRLAGQGAAVLPQVRPKTLIPDSLPVAPGRDRPPKQPPTFQKATVVSVKNPSPALPTANNTVSHVPAPGSQPQALAEPAALASPLSSAGVAYAIISTSPSNAAAMAPSTAVSVVSDSIKVQPLLISADNKVIIIQPQVQTQPESTAESRPPTEEPSQGAQATKKKKEDRPPTQENPEKIAFMVALGLVTTEHLEEIQSKRQERKRRSTANPAYSGLLETERKRLASNYLNNPLFLTARANEDPCWKNEITHDEHCAACKRGANLQPCGTCPGAYHLSCLEPPLKTAPKGVWVCPRCQQKALKKDEGVPWTGMLAIVHSYVTHKTVKEEEKQKLLQRGSELQNEHQQLEERDRRLASAVQKCLELKTSLLARQRGTQSSLDRLRALLRLIQGEQLLQVTMTTTSPAPLLAGPWTKPSVAATHPTVQHPQGHN

SEQ ID NO: 33377 - protein, 137 aa, Homo sapiens
  REGION 1..137: note = ENSP00000401091
MAPSTAVSVVSDSIKVQPLLISADNKVIIIQPQVQTQPESTAESRPPTEEPSQGAQATKKKKEDRPPTQENPEKIAFMVALGLVTTEHLEEIQSKRQERKRRSTANPAYSGLLETERKRLASNYLNNPLFLTARANE

SEQ ID NO: 33378 - protein, 191 aa, Homo sapiens
  REGION 1..191: note = ENSP00000401294
MRRQPQNGDLKKQLHERQPRIAALSDKQALGTITAVPVTGPQVSSLQRLAGQGAAVLPQVRPKTLIPDSLPVAPGRDRPPKQPPTFQKATVVSVKNPSPALPTANNTVSHVPAPGSQPQALAEPAALASPLSSAGVAYAIISTSPSNAAAMAPSTAVSVVSDSIKVQPLLISADNKVIIIQPQVQTQPEST

SEQ ID NO: 33379 - protein, 477 aa, Homo sapiens
  REGION 1..477: note = ENSP00000379410
MRRQPQNGDLKKQLHERQPRIAALSDKQALGTITAVPVTGPQVSSLQRLAGQGAAVLPQVRPKTLIPDSLPVAPGRDRPPKQPPTFQKATVVSVKNPSPALPTANNTVSHVPAPGSQPQALAEPAALASPLSSAGVAYAIISTSPSNAAAMAPSTAVSVVSDSIKVQPLLISADNKVIIIQPQVQTQPESTAESRPPTEEPSQGAQATKKKKEDRPPTQENPEKIAFMVALGLVTTEHLEEIQSKRQERKRRSTANPAYSGLLETERKRLASNYLNNPLFLTARANEDPCWKNEITHDEHCAACKRGANLQPCGTCPGAYHLSCLEPPLKTAPKGVWVCPRCQQKALKKDEGVPWTGMLAIVHSYVTHKTVKEEEKQKLLQRGSELQNEHQQLEERDRRLASAVQKCLELKTSLLARQRGTQSSLDRLRALLRLIQGEQLLQVTMTTTSPAPLLAGPWTKPSVAATHPTVQHPQGHN

SEQ ID NO: 33380 - protein, 400 aa, Homo sapiens
  REGION 1..400: note = ENSP00000242315
MGVLMSKRQTVEQVQKVSLAVSAFKDGLRDRPSIRRTGELPGSRRGTVEGSVQEVQEEKEAEAGTSVVQEESSAGRAAWERLRDGRGVEPEEFDRTSRFTPPAFIRPTRKLDDDKPPEICLEPREPVVNDEMCDVCEVWTAESLFPCRVCTRVFHDGCLRRMGYIQGDSAAEVTEMAHTETGWSCHYCDNINLLLTEEEMYSLTETFQRCKVIPDCSLTLEDFLRYRHQAAKRGDRDRALSEEQEEQAARQFAALDPEHRGHIEWPDFLSHESLLLLQQLRPQNSLLRLLTVKERERARAAFLARGSGSTVSEAECRRAQHSWFCKRFPEAPSCSVSISHVGPIADSSPASSSSKSQDKTLLPTEQESRFVDWPTFLQENVLYILAARPNSAAIHLKPPG

SEQ ID NO: 33381 - protein, 1223 aa, Homo sapiens
  REGION 1..1223: note = ENSP00000362643
MRSRSNSGVRLDGYARLVQQTILCHQNPVTGLLPASYDQKDAWVRDNVYSILAVWGLGLAYRKNADRDEDKAKAYELEQSVVKLMRGLLHCMIRQVDKVESFKYSQSTKDSLHAKYNTKTCATVVGDDQWGHLQLDATSVYLLFLAQMTASGLHIIHSLDEVNFIQNLVFYIEAAYKTADFGIWERGDKTNQGISELNASSVGMAKAALEALDELDLFGVKGGPQSVIHVLADEVQHCQSILNSLLPRASTSKEVDASLLSVVSFPAFAVEDSQLVELTKQEIITKLQGRYGCCRFLRDGYKTPKEDPNRLYYEPAELKLFENIECEWPLFWTYFILDGVFSGNAEQVQEYKEALEAVLIKGKNGVPLLPELYSVPPDRVDEEYQNPHTVDRVPMGKLPHMWGQSLYILGSLMAEGFLAPGEIDPLNRRFSTVPKPDVVVQVSILAETEEIKTILKDKGIYVETIAEVYPIRVQPARILSHIYSSLGCNNRMKLSGRPYRHMGVLGTSKLYDIRKTIFTFTPQFIDQQQFYLALDNKMIVEMLRTDLSYLCSRWRMTGQPTITFPISHSMLDEDGTSLNSSILAALRKMQDGYFGGARVQTGKLSEFLTTSCCTHLSFMDPGPEGKLYSEDYDDNYDYLESGNWMNDYDSTSHARCGDEVARYLDHLLAHTAPHPKLAPTSQKGGLDRFQAAVQTTCDLMSLVTKAKELHVQNVHMYLPTKLFQASRPSFNLLDSPHPRQENQVPSVRVEIHLPRDQSGEVDFKALVLQLKETSSLQEQADILYMLYTMKGPDWNTELYNERSATVRELLTELYGKVGEIRHWGLIRYISGILRKKVEALDEACTDLLSHQKHLTVGLPPEPREKTISAPLPYEALTQLIDEASEGDMSISILTQEIMVYLAMYMRTQPGLFAEMFRLRIGLIIQVMATELAHSLRCSAEEATEGLMNLSPSAMKNLLHHILSGKEFGVERSVRPTDSNVSPAISIHEIGAVGATKTERTGIMQLKSEIKQVEFRRLSISAESQSPGTSMTPSSGSFPSAYDQQSSKDSRQGQWQRRRRLDGALNRVPVGFYQKVWKVLQKCHGLSVEGFVLPSSTTREMTPGEIKFSVHVESVLNRVPQPEYRQLLVEAILVLTMLADIEIHSIGSIIAVEKIVHIANDLFLQEQKTLGADDTMLAKDPASGICTLLYDSAPSGRFGTMTYLSKAAATYVQEFLPHSICAMQ

SEQ ID NO: 33382 - protein, 1181 aa, Homo sapiens
  REGION 1..1181: note = ENSP00000362646
MRSRSNSGVRLDGYARLVQQTILCHQNPVTGLLPASYDQKDAWVRDNVYSILAVWGLGLAYRKNADRDEDKAKAYELEQSVVKLMRGLLHCMIRQVDKVESFKYSQSTKDSLHAKYNTKTCATVVGDDQWGHLQLDATSVYLLFLAQMTASGLHIIHSLDEVNFIQNLVFYIEAAYKTADFGIWERGDKTNQGISELNASSVGMAKAALEALDELDLFGVKGGPQSVIHVLADEVQHCQSILNSLLPRASTSKEVDASLLSVVSFPAFAVEDSQLVELTKQEIITKLQGRYGCCRFLRDGYKTPKEDPNRLYYEPAELKLFENIECEWPLFWTYFILDGVFSGNAEQVQEYKEALEAVLIKGKNGVPLLPELYSVPPDRVDEEYQNPHTVDRVPMGKLPHMWGQSLYILGSLMAEGFLAPGEIDPLNRRFSTVPKPDVVVQVSILAETEEIKTILKDKGIYVETIAEVYPIRVQPARILSHIYSSLGCNNRMKLSGRPYRHMGVLGTSKLYDIRKTIFTFTPQFIDQQQFYLALDNKMIVEMLRTDLSYLCSRWRMTGQPTITFPISHSMLDEDGTSLNSSILAALRKMQDGYFGGARVQTGKLSEFLTTSCCTHLSFMDPGPEGKLYSEDYDDNYDYLESGNWMNDYDSTSHDVHMYLPTKLFQASRPSFNLLDSPHPRQENQVPSVRVEIHLPRDQSGEVDFKALVLQLKETSSLQEQADILYMLYTMKGPDWNTELYNERSATVRELLTELYGKVGEIRHWGLIRYISGILRKKVEALDEACTDLLSHQKHLTVGLPPEPREKTISAPLPYEALTQLIDEASEGDMSISILTQEIMVYLAMYMRTQPGLFAEMFRLRIGLIIQVMATELAHSLRCSAEEATEGLMNLSPSAMKNLLHHILSGKEFGVERSVRPTDSNVSPAISIHEIGAVGATKTERTGIMQLKSEIKQVEFRRLSISAESQSNGGHPLGIDLMSPSFMSPGTSMTPSSGSFPSAYDQQSSKDSRQGQWQRRRRLDGALNRVPVGFYQKVWKVLQKCHGLSVEGFVLPSSTTREMTPGEIKFSVHVESVLNRVPQPEYRQLLVEAILVLTMLADIEIHSIGSIIAVEKIVHIANDLFLQEQKTLGADDTMLAKDPASGICTLLYDSAPSGRFGTMTYLSKAAATYVQEFLPHSICAMQ

SEQ ID NO: 33383 - protein, 1240 aa, Homo sapiens
  REGION 1..1240: note = ENSP00000362640
MRSRSNSGVRLDGYARLVQQTILCHQNPVTGLLPASYDQKDAWVRDNVYSILAVWGLGLAYRKNADRDEDKAKAYELEQSVVKLMRGLLHCMIRQVDKVESFKYSQSTKDSLHAKYNTKTCATVVGDDQWGHLQLDATSVYLLFLAQMTASGLHIIHSLDEVNFIQNLVFYIEAAYKTADFGIWERGDKTNQGISELNASSVGMAKAALEALDELDLFGVKGGPQSVIHVLADEVQHCQSILNSLLPRASTSKEVDASLLSVVSFPAFAVEDSQLVELTKQEIITKLQGRYGCCRFLRDGYKTPKEDPNRLYYEPAELKLFENIECEWPLFWTYFILDGVFSGNAEQVQEYKEALEAVLIKGKNGVPLLPELYSVPPDRVDEEYQNPHTVDRVPMGKLPHMWGQSLYILGSLMAEGFLAPGEIDPLNRRFSTVPKPDVVVQVSILAETEEIKTILKDKGIYVETIAEVYPIRVQPARILSHIYSSLGCNNRMKLSGRPYRHMGVLGTSKLYDIRKTIFTFTPQFIDQQQFYLALDNKMIVEMLRTDLSYLCSRWRMTGQPTITFPISHSMLDEDGTSLNSSILAALRKMQDGYFGGARVQTGKLSEFLTTSCCTHLSFMDPGPEGKLYSEDYDDNYDYLESGNWMNDYDSTSHARCGDEVARYLDHLLAHTAPHPKLAPTSQKGGLDRFQAAVQTTCDLMSLVTKAKELHVQNVHMYLPTKLFQASRPSFNLLDSPHPRQENQVPSVRVEIHLPRDQSGEVDFKALVLQLKETSSLQEQADILYMLYTMKGPDWNTELYNERSATVRELLTELYGKVGEIRHWGLIRYISGILRKKVEALDEACTDLLSHQKHLTVGLPPEPREKTISAPLPYEALTQLIDEASEGDMSISILTQEIMVYLAMYMRTQPGLFAEMFRLRIGLIIQVMATELAHSLRCSAEEATEGLMNLSPSAMKNLLHHILSGKEFGVERSVRPTDSNVSPAISIHEIGAVGATKTERTGIMQLKSEIKQVEFRRLSISAESQSNGGHPLGIDLMSPSFMSPGTSMTPSSGSFPSAYDQQSSKDSRQGQWQRRRRLDGALNRVPVGFYQKVWKVLQKCHGLSVEGFVLPSSTTREMTPGEIKFSVHVESVLNRVPQPEYRQLLVEAILVLTMLADIEIHSIGSIIAVEKIVHIANDLFLQEQKTLGADDTMLAKDPASGICTLLYDSAPSGRFGTMTYLSKAAATYVQEFLPHSICAMQ

SEQ ID NO: 33384 - protein, 1210 aa, Homo sapiens
  REGION 1..1210: note = ENSP00000342469
MRSRSNSGVRLDGYARLVQQTILCHQNPVTGLLPASYDQKDAWVRDNVYSILAVWGLGLAYRKNADRDEDKAKAYELEQSVVKLMRGLLHCMIRQVDKVESFKYSQSTKDSLHAKYNTKTCATVVGDDQWGHLQLDATSVYLLFLAQMTASGLHIIHSLDEVNFIQNLVFYIEAAYKTADFGIWERGDKTNQGISELNASSVGMAKAALEALDELDLFGVKGGPQSVIHVLADEVQHCQSILNSLLPRASTSKEVDASLLSVVSFPAFAVEDSQLVELTKQEIITKLQGRYGCCRFLRDGYKTPKEDPNRLYYEPAELKLFENIECEWPLFWTYFILDGVFSGNAEQVQEYKEALEAVLIKGKNGVPLLPELYSVPPDRVDEEYQNPHTVDRVPMGKLPHMWGQSLYILGSLMAEGFLAPGEIDPLNRRFSTVPKPDVVVQVSILAETEEIKTILKDKGIYVETIAEVYPIRVQPARILSHIYSSLGCNNRMKLSGRPYRHMGVLGTSKLYDIRKTIFTFTPQFIDQQQFYLALDNKMIVEMLRTDLSYLCSRWRMTGQPTITFPISHSMLDEDGTSLNSSILAALRKMQDGYFGGARVQTGKLSEFLTTSCCTHLSFMDPGPEGKLYSEDYDDNYDYLESGNWMNDYDSTSHARCGDEVARYLDHLLAHTAPHPKLAPTSQKGGLDRFQAAVQTTCDLMSLVTKAKELHVQNVHMYLPTKLFQASRPSFNLLDSPHPRQENQVPSVRVEIHLPRDQSGEVDFKALVLQLKETSSLQEQADILYMLYTMKGPDWNTELYNERSATVRELLTELYGKVGEIRHWGLIRYISGILRKKVEALDEACTDLLSHQKHLTVGLPPEPREKTISAPLPYEALTQLIDEASEGDMSISILTQEIMVYLAMYMRTQPGLFAEMFRLRIGLIIQVMATELAHSLRCSAEEATEGLMNLSPSAMKNLLHHILSGKEFGVERSVRPTDSNVSPAISIHEIGAVGATKTERTGIMQLKSEIKQSPGTSMTPSSGSFPSAYDQQSSKDSRQGQWQRRRRLDGALNRVPVGFYQKVWKVLQKCHGLSVEGFVLPSSTTREMTPGEIKFSVHVESVLNRVPQPEYRQLLVEAILVLTMLADIEIHSIGSIIAVEKIVHIANDLFLQEQKTLGADDTMLAKDPASGICTLLYDSAPSGRFGTMTYLSKAAATYVQEFLPHSICAMQ

SEQ ID NO: 33385 - protein, 1151 aa, Homo sapiens
  REGION 1..1151: note = ENSP00000441251
MRSRSNSGVRLDGYARLVQQTILCHQNPVTGLLPASYDQKDAWVRDNVYSILAVWGLGLAYRKNADRDEDKAKAYELEQSVVKLMRGLLHCMIRQVDKVESFKYSQSTKDSLHAKYNTKTCATVVGDDQWGHLQLDATSVYLLFLAQMTASGLHIIHSLDEVNFIQNLVFYIEAAYKTADFGIWERGDKTNQGISELNASSVGMAKAALEALDELDLFGVKGGPQSVIHVLADEVQHCQSILNSLLPRASTSKEVDASLLSVVSFPAFAVEDSQLVELTKQEIITKLQGRYGCCRFLRDGYKTPKEDPNRLYYEPAELKLFENIECEWPLFWTYFILDGVFSGNAEQVQEYKEALEAVLIKGKNGVPLLPELYSVPPDRVDEEYQNPHTVDRVPMGKLPHMWGQSLYILGSLMAEGFLAPGEIDPLNRRFSTVPKPDVVVQVSILAETEEIKTILKDKGIYVETIAEVYPIRVQPARILSHIYSSLGCNNRMKLSGRPYRHMGVLGTSKLYDIRKTIFTFTPQFIDQQQFYLALDNKMIVEMLRTDLSYLCSRWRMTGQPTITFPISHSMLDEDGTSLNSSILAALRKMQDGYFGGARVQTGKLSEFLTTSCCTHLSFMDPGPEGKLYSEDYDDNYDYLESGNWMNDYDSTSHDVHMYLPTKLFQASRPSFNLLDSPHPRQENQVPSVRVEIHLPRDQSGEVDFKALVLQLKETSSLQEQADILYMLYTMKGPDWNTELYNERSATVRELLTELYGKVGEIRHWGLIRYISGILRKKVEALDEACTDLLSHQKHLTVGLPPEPREKTISAPLPYEALTQLIDEASEGDMSISILTQEIMVYLAMYMRTQPGLFAEMFRLRIGLIIQVMATELAHSLRCSAEEATEGLMNLSPSAMKNLLHHILSGKEFGVERSVRPTDSNVSPAISIHEIGAVGATKTERTGIMQLKSEIKQSPGTSMTPSSGSFPSAYDQQSSKDSRQGQWQRRRRLDGALNRVPVGFYQKVWKVLQKCHGLSVEGFVLPSSTTREMTPGEIKFSVHVESVLNRVPQPEYRQLLVEAILVLTMLADIEIHSIGSIIAVEKIVHIANDLFLQEQKTLGADDTMLAKDPASGICTLLYDSAPSGRFGTMTYLSKAAATYVQEFLPHSICAMQ

SEQ ID NO: 33386 - protein, 1235 aa, Homo sapiens
  REGION 1..1235: note = ENSP00000369274
MRSRSNSGVRLDGYARLVQQTILCYQNPVTGLLSASHEQKDAWVRDNIYSILAVWGLGMAYRKNADRDEDKAKAYELEQNVVKLMRGLLQCMMRQVAKVEKFKHTQSTKDSLHAKYNTATCGTVVGDDQWGHLQVDATSLFLLFLAQMTASGLRIIFTLDEVAFIQNLVFYIEAAYKVADYGMWERGDKTNQGIPELNASSVGMAKAALEAIDELDLFGAHGGRKSVIHVLPDEVEHCQSILFSMLPRASTSKEIDAGLLSIISFPAFAVEDVNLVNVTKNEIISKLQGRYGCCRFLRDGYKTPREDPNRLHYDPAELKLFENIECEWPVFWTYFIIDGVFSGDAVQVQEYREALEGILIRGKNGIRLVPELYAVPPNKVDEEYKNPHTVDRVPMGKVPHLWGQSLYILSSLLAEGFLAAGEIDPLNRRFSTSVKPDVVVQVTVLAENNHIKDLLRKHGVNVQSIADIHPIQVQPGRILSHIYAKLGRNKNMNLSGRPYRHIGVLGTSKLYVIRNQIFTFTPQFTDQHHFYLALDNEMIVEMLRIELAYLCTCWRMTGRPTLTFPISRTMLTNDGSDIHSAVLSTIRKLEDGYFGGARVKLGNLSEFLTTSFYTYLTFLDPDCDEKLFDNASEGTFSPDSDSDLVGYLEDTCNQESQDELDHYINHLLQSTSLRSYLPPLCKNTEDRHVFSAIHSTRDILSVMAKAKGLEVPFVPMTLPTKVLSAHRKSLNLVDSPQPLLEKVPESDFQWPRDDHGDVDCEKLVEQLKDCSNLQDQADILYILYVIKGPSWDTNLSGQHGVTVQNLLGELYGKAGLNQEWGLIRYISGLLRKKVEVLAEACTDLLSHQKQLTVGLPPEPREKIISAPLPPEELTKLIYEASGQDISIAVLTQEIVVYLAMYVRAQPSLFVEMLRLRIGLIIQVMATELARSLNCSGEEASESLMNLSPFDMKNLLHHILSGKEFGVERSVRPIHSSTSSPTISIHEVGHTGVTKTERSGINRLRSEMKQMTRRFSADEQFFSVGQAASSSAHSSKSARSSTPSSPTGTSSSDSGGHHIGWGERQGQWLRRRRLDGAINRVPVGFYQRVWKILQKCHGLSIDGYVLPSSTTREMTPHEIKFAVHVESVLNRVPQPEYRQLLVEAIMVLTLLSDTEMTSIGGIIHVDQIVQMASQLFLQDQVSIGAMDTLEKDQATGICHFFYDSAPSGAYGTMTYLTRAVASYLQELLPNSGCQMQ

SEQ ID NO: 33387 - protein, 387 aa, Homo sapiens
  REGION 1..387: note = ENSP00000297373
MTRDEALPDSHSAQDFYENYEPKEILGRGVSSVVRRCIHKPTSQEYAVKVIDVTGGGSFSPEEVRELREATLKEVDILRKVSGHPNIIQLKDTYETNTFFFLVFDLMKRGELFDYLTEKVTLSEKETRKIMRALLEVICTLHKLNIVHRDLKPENILLDDNMNIKLTDFGFSCQLEPGERLREVCGTPSYLAPEIIECSMNEDHPGYGKEVDMWSTGVIMYTLLAGSPPFWHRKQMLMLRMIMSGNYQFGSPEWDDYSDTVKDLVSRFLVVQPQNRYTAEEALAHPFFQQYLVEEVRHFSPRGKFKVIALTVLASVRIYYQYRRVKPVTREIVIRDPYALRPLRRLIDAYAFRIYGHWVKKGQQQNRAALFENTPKAVLLSLAEEDY

SEQ ID NO: 33388 - protein, 117 aa, Homo sapiens
  REGION 1..117: note = ENSP00000389721
MTRDEALPDSHSAQDFYENYEPKEILGRMKRGELFDYLTEKVTLSEKETRKIMRALLEVICTLHKLNIVHRDLKPENILLDDNMNIKLTDFGFSCQLEPGERLRGLPIPGGATPEPL

SEQ ID NO: 33389 - protein, 145 aa, Homo sapiens
  REGION 1..145: note = ENSP00000397193
MTRDEALPDSHSAQDFYENYEPKEILGRMKRGELFDYLTEKVTLSEKETRKIMRALLEVICTLHKLNIVHRDLKPENILLDDNMNIKLTDFGFSCQLEPGERLREVCGTPSYLAPEIIECSMNEDHPGYGKEVDMWSTGVIMYTL

SEQ ID NO: 33390 - protein, 88 aa, Homo sapiens
  REGION 1..88: note = ENSP00000378817
MTRDEALPDSHSAQDFYENYEPKEILGRGVSSVVRRCIHKPTSQEYAVKVIDVTGGGSFSPEEVRELREATLKEVDILRKVSGHPNIR

SEQ ID NO: 33391 - protein, 419 aa, Homo sapiens
  REGION 1..419: note = ENSP00000445440
MTRDEALPDSHSAQDFYENYEPKEILGRGVSSVVRRCIHKPTSQEYAVKVIDVTGGGSFSPEEVRELREATLKEVDILRKVSGHPNIIQLKDTYETNTFFFLVFDLWEDTDTMEMEQKWCLGWDSPKSTNFRAQGRARMKRGELFDYLTEKVTLSEKETRKIMRALLEVICTLHKLNIVHRDLKPENILLDDNMNIKLTDFGFSCQLEPGERLREVCGTPSYLAPEIIECSMNEDHPGYGKEVDMWSTGVIMYTLLAGSPPFWHRKQMLMLRMIMSGNYQFGSPEWDDYSDTVKDLVSRFLVVQPQNRYTAEEALAHPFFQQYLVEEVRHFSPRGKFKVIALTVLASVRIYYQYRRVKPVTREIVIRDPYALRPLRRLIDAYAFRIYGHWVKKGQQQNRAALFENTPKAVLLSLAEEDY

SEQ ID NO: 33392 - protein, 390 aa, Homo sapiens [sequence omitted]

SEQ ID NO: 33393 - protein, 85 aa, Homo sapiens
  REGION 1..85: note = ENSP00000444845
  VARIANT 1: note = Any amino acid
XERVFAETHYPDIYTREELALKIDLTEARGALWAGVAGGGGGGPGAGAAELLKAWQPAESGPGPFSGVLSSFHRKPGPALKTNLF

SEQ ID NO: 33394 - protein, 284 aa, Homo sapiens
  REGION 1..284: note = ENSP00000298231
MDYSYLNSYDSCVAAMEASAYGDFGACSQPGGFQYSPLRPAFPAAGPPCPALGSSNCALGALRDHQPAPYSAVPYKFFPEPSGLHEKRKQRRIRTTFTSAQLKELERVFAETHYPDIYTREELALKIDLTEARVQVWFQNRRAKFRKQERAASAKGAAGAAGAKKGEARCSSEDDDSKESTCSPTPDSTASLPPPPAPGLASPRLSPSPLPVALGSGPGPGPGPQPLKGALWAGVAGGGGGGPGAGAAELLKAWQPAESGPGPFSGVLSSFHRKPGPALKTNLF

SEQ ID NO: 33395 - protein, 330 aa, Homo sapiens
  REGION 1..330: note = ENSP00000320017
MELLSTPHSIEINNITCDSFRISWAMEDSDLERVTHYFIDLNKKENKNSNKFKHRDVPTKLVAKAVPLPMTVRGHWFLSPRTEYSVAVQTAVKQSDGEYLVSGWSETVEFCTGDYAKEHLAQLQEKAEQIAGRMLRFSVFYRNHHKEYFQHARTHCGNMLQPYLKDNSGSHGSPTSGMLHGVFFSCNTEFNTGQPPQDSPYGRWRFQIPAQRLFNPSTNLYFADFYCMYTAYHYAILVLAPKGSLGDRFCRDRLPLLDIACNKFLTCSVEDGELVFRHAQDLILEIIYTEPVDLSLGTLGEISGHQLMSLSTADAKKDPSCKTCNISVGR

SEQ ID NO: 33396 - protein, 330 aa, Homo sapiens; identical to SEQ ID NO: 33395
  REGION 1..330: note = ENSP00000415491

SEQ ID NO: 33397 - protein, 248 aa, Homo sapiens
  REGION 1..248: note = ENSP00000430870
MGESPPWDVPTKLVAKAVPLPMTVRGHWFLSPRTEYSVAVQTAVKQSDGEYLVSGWSETVEFCTGDYAKEHLAQLQEKAEQIAGRMLRFSVFYRNHHKEYFQHARTHCGNMLQPYLKDNSGSHGSPTSGMLHGVFFSCNTEFNTGQPPQDSPYGRWRFQIPAQRLFNPSTNLYFADFYCMYTAYHYAILVLAPKGSLGDRFCRDRLPLLDIACNKFLTCSVEDGELVFRHAQDLILEIIYTEPVDLSL

SEQ ID NO: 33398 - protein, 463 aa, Homo sapiens
  REGION 1..463: note = ENSP00000362778
MHGSCSFLMLLLPLLLLLVATTGPVGALTDEEKRLMVELHNLYRAQVSPTASDMLHMRWDEELAAFAKAYARQCVWGHNKERGRRGENLFAITDEGMDVPLAMEEWHHEREHYNLSAATCSPGQMCGHYTQVVWAKTERIGCGSHFCEKLQGVEETNIELLVCNYEPPGNVKGKRPYQEGTPCSQCPSGYHCKNSLCEPIGSPEDAQDLPYLVTEAPSFRATEASDSRKMGTPSSLATGIPAFLVTEVSGSLATKALPAVETQAPTSLATKDPPSMATEAPPCVTTEVPSILAAHSLPSLDEEPVTFPKSTHVPIPKSADKVTDKTKVPSRSPENSLDPKMSLTGARELLPHAQEEAEAEAELPPSSEVLASVFPAQDKPGELQATLDHTGHTSSKSLPNFPNTSATANATGGRALALQSSLPGAEGPDKPSVVSGLNSGPGHVWGPLLGLLLLPPLVLAGIF

SEQ ID NO: 33399 - protein, 463 aa, Homo sapiens; identical to SEQ ID NO: 33398
  REGION 1..463: note = ENSP00000478888

SEQ ID NO: 33400 - protein, 248 aa, Homo sapiens
  REGION 1..248: note = ENSP00000375907
MPRIAGNHLMLEESRTCSSPELLDGVWPCQPLHFGLPASEMHFQTMLKSKLNVLTLKKEPLPAVIFHEPEAIELCTTTPLMKTRTHSGCKVTYLGKVSTTGMQFLSGCTEKPVIELWKKHTLAREDVFPANALLEIRPFQVWLHHLDHKGEATVHMDTFQVARIAYCTADHNVSPNIFAWVYREINDDLSYQMDCHAVECESKLEAKKLAHAMMEAFRKTFHSMKSDGRIHSNSSSEEVSQELESDDG

SEQ ID NO: 33401 - protein, 168 aa, Homo sapiens
  REGION 1..168: note = ENSP00000386826
MWQPATERLQVTYLGKVSTTGMQFLSGCTEKPVIELWKKHTLAREDVFPANALLEIRPFQVWLHHLDHKGEATVHMDTFQVARIAYCTADHNVSPNIFAWVYREINDDLSYQMDCHAVECESKLEAKKLAHAMMEAFRKTFHSMKSDGRIHSNSSSEEVSQELESDDG

SEQ ID NO: 33402 - protein, 217 aa, Homo sapiens
  REGION 1..217: note = ENSP00000375908
MWQPATERLQHFQTMLKSKLNVLTLKKEPLPAVIFHEPEAIELCTTTPLMKTRTHSGCKVTYLGKVSTTGMQFLSGCTEKPVIELWKKHTLAREDVFPANALLEIRPFQVWLHHLDHKGEATVHMDTFQVARIAYCTADHNVSPNIFAWVYREINDDLSYQMDCHAVECESKLEAKKLAHAMMEAFRKTFHSMKSDGRIHSNSSSEEVSQELESDDG

SEQ ID NO: 33403 - protein, 250 aa, Homo sapiens
  REGION 1..250: note = ENSP00000283937
MFSLPLSLPLCEDTAFLPSKCCSSHKTIKQARTLIMIFLASGTHFQTMLKSKLNVLTLKKEPLPAVIFHEPEAIELCTTTPLMKTRTHSGCKVTYLGKVSTTGMQFLSGCTEKPVIELWKKHTLAREDVFPANALLEIRPFQVWLHHLDHKGEATVHMDTFQVARIAYCTADHNVSPNIFAWVYREINDDLSYQMDCHAVECESKLEAKKLAHAMMEAFRKTFHSMKSDGRIHSNSSSEEVSQELESDDG

SEQ ID NO: 33404 - protein, 41 aa, Homo sapiens
  REGION 1..41: note = ENSP00000438228
MWQPATERLQDGCCNSSHNTLVPQYPWGIDSGPLVNTKIYR

SEQ ID NO: 33405 - protein, 92 aa, Homo sapiens
  REGION 1..92: note = ENSP00000462187
WWSSMTKSVPQVWGSWLAMAFRLHVRPCPDVHPDPQHGRGLVVHWQSPSDLPSQDVLWRIFKGNLPVAASPCLQFENGLEPLAQDSGYLACP

SEQ ID NO: 33406 - protein, 2689 aa, Homo sapiens
  REGION 1..2689: note = ENSP00000303316
MASEVVCGLIFRLLLPICLAVACAFRYNGLSFVYLIYLLLIPLFSEPTKTTMQGHTGRLLKSLCFISLSFLLLHIIFHITLVSLEAQHRIAPGYNCSTWEKTFRQIGFESLKGADAGNGIRVFVPDIGMFIASLTIWLLCRNIVQKPVTDEAAQSNPEFENEELAEGEKIDSEEALIYEEDFNGGDGVEGELEESTKLKMFRRLASVASKLKEFIGNMITTAGKVVVTILLGSSGMMLPSLTSSVYFFVFLGLCTWWSWCRTFDPLLFSCLCVLLAIFTAGHLIGLYLYQFQFFQEAVPPNDYYARLFGIKSVIQTDCSSTWKIIVNPDLSWYHHANPILLLVMYYTLATLIRIWLQEPLVQDEGTKEEDKALACSPIQITAGRRRSLWYATHYPTDERKLLSMTQDDYKPSDGLLVTVNGNPVDYHTIHPSLPMENGPGKADLYSTPQYRWEPSDESSEKREEEEEEKEEFEEERSREEKRSIKVHAMVSVFQFIMKQSYICALIAMMAWSITYHSWLTFVLLIWSCTLWMIRNRRKYAMISSPFMVVYGNLLLILQYIWSFELPEIKKVPGFLEKKEPGELASKILFTITFWLLLRQHLTEQKALQEKEALLSEVKIGSQENEEKDEELQDIQVEGEPKEEEEEEAKEEKQERKKVEQEEAEEEDEQDIMKVLGNLVVAMFIKYWIYVCGGMFFFVSFEGKIVMYKIIYMVLFLFCVALYQVHYEWWRKILKYFWMSVVIYTMLVLIFIYTYQFENFPGLWQNMTGLKKEKLEDLGLKQFTVAELFTRIFIPTSFLLVCILHLHYFHDRFLELTDLKSIPSKEDNTIYRLAHPEGSLPDLTMMHLTASLEKPEVRKLAEPGEEKLEGYSEKAQKGDLGKDSEESEEDGEEEEESEEEEETSDLRNKWHLVIDRLTVLFLKFLEYFHKLQVFMWWILELHIIKIVSSYIIWVSVKEVSLFNYVFLISWAFALPYAKLRRLASSVCTVWTCVIIVCKMLYQLQTIKPENFSVNCSLPNENQTNIPFNELNKSLLYSAPIDPTEWVGLRKSSPLLVYLRNNLLMLAILAFEVTIYRHQEYYRGRNNLTAPVSRTIFHDITRLHLDDGLINCAKYFINYFFYKFGLETCFLMSVNVIGQRMDFYAMIHACWLIAVLYRRRRKAIAEIWPKYCCFLACIITFQYFICIGIPPAPCRDYPWRFKGASFNDNIIKWLYFPDFIVRPNPVFLVYDFMLLLCASLQRQIFEDENKAAVRIMAGDNVEICMNLDAASFSQHNPVPDFIHCRSYLDMSKVIIFSYLFWFVLTIIFITGTTRISIFCMGYLVACFYFLLFGGDLLLKPIKSILRYWDWLIAYNVFVITMKNILSIGACGYIGTLVHNSCWLIQAFSLACTVKGYQMPAANSPCTLPSGEAGIIWDSICFAFLLLQRRVFMSYYFLHVVADIKASQILASRGAELFQATIVKAVKARIEEEKKSMDQLKRQMDRIKARQQKYKKGKERMLSLTQEPGEGQDMQKLSEEDDEREADKQKAKGKKKQWWRPWVDHASMVRSGDYYLFETDSEEEEEEELKKEDEEPPRRSAFQFVYQAWITDPKTALRQRHKEKKRSAREERKRRRKGSKEGPVEWEDREDEPIKKKSDGPDNIIKRIFNILKFTWVLFLATVDSFTTWLNSISREHIDISTVLRIERCMLTREIKKGNVPTRESIHMYYQNHIMNLSRESGLDTIDEHPGAASGAQTAHRMDSLDSHDSISSEPTQCTMLYSRQGTTETIEEVEAEQEEEAGSTAPEPREAKEYEATGYDVGAMGAEEASLTPEEELTQFSTLDGDVEAPPSYSKAVSFEHLSFGSQDDSAGKNRMAVSPDDSRTDKLGSSILPPLTHELTASELLLKKMFHDDELEESEKFYVGQPRFLLLFYAMYNTLVARSEMVCYFVIILNHMVSASMITLLLPILIFLWAMLSVPRPSRRFWMMAIVYTEVAIVVKYFFQFGFFPWNKNVEVNKDKPYHPPNIIGVEKKEGYVLYDLIQLLALFFHRSILKCHGLWDEDDMTESGMAREESDDELSLGHGRRDSSDSLKSINLAASVESVHVTFPEQQTAVRRKRSGSSSEPSQRSSFSSNRSQRGSTSTRNSSQKGSSVLSIKQKGKRELYMEKLQEHLIKAKAFTIKKTLEIYVPIKQFFYNLIHPEYSAVTDVYVLMFLADTVDFIIIVFGFWAFGKHSAAADITSSLSEDQVPGPFLVMVLIQFGTMVVDRALYLRKTVLGKVIFQVILVFGIHFWMFFILPGVTERKFSQNLVAQLWYFVKCVYFGLSAYQIRCGYPTRVLGNFLTKSYNYVNLFLFQGFRLVPFLTELRAVMDWVWTDTTLSLSSWICVEDIYAHIFILKCWRESEKPIFTMSAQQSQLKVMDQQSFNKFIQAFSRDTGAMQFLENYEKEDITVAELEGNSNSLWTISPPSKQKMIHELLDPNSSFSVVFSWSIQRNLSLGAKSEIATDKLSFPLKNITRKNIAKMIAGNSTESSKTPVTIEKIYPYYVKAPSDSNSKPIKQLLSENNFMDITIILSRDNTTKYNSEWWVLNLTGNRIYNPNSQALELVVFNDKVSPPSLGFLAGYGIMGLYASVVLVIGKFVREFFSGISHSIMFEELPNVDRILKLCTDIFLVRETGELELEEDLYAKLIFLYRSPETMIKWTREKTN

SEQ ID NO: 33407 - protein, 709 aa, Homo sapiens
  REGION 1..709: note = ENSP00000443129
MTESGMAREESDDELSLGHGRRDSSDSLKSINLAASVESVHVTFPEQQTAVRRKRSGSSSEPSQRSSFSSNRSQRGSTSTRNSSQKGSSVLSIKQKGKRELYMEKLQEHLIKAKAFTIKKTLEIYVPIKQFFYNLIHPEYSAVTDVYVLMFLADTVDFIIIVFGFWAFGKHSAAADITSSLSEDQVPGPFLVMVLIQFGTMVVDRALYLRKTVLGKVIFQVILVFGIHFWMFFILPGVTERKFSQNLVAQLWYFVKCVYFGLSAYQIRCGYPTRVLGNFLTKSYNYVNLFLFQGFRLVPFLTELRAVMDWVWTDTTLSLSSWICVEDIYAHIFILKCWRESEKRYPQPRGQKKKKVVKYGMGGMIIVLLICIVWFPLLFMSLIKSVAGVINQPLDVSVTITLGGYQPIFTMSAQQSQLKVMDQQSFNKFIQAFSRDTGAMQFLENYEKEDITVAELEGNSNSLWTISPPSKQKMIHELLDPNSSFSVVFSWSIQRNLSLGAKSEIATDKLSFPLKNITRKNIAKMIAGNSTESSKTPVTIEKIYPYYVKAPSDSNSKPIKQLLSENNFMDITIILSRDNTTKYNSEWWVLNLTGNRIYNPNSQALELVVFNDKVSPPSLGFLAGYGIMGLYASVVLVIGKFVREFFSGISHSIMFEELPNVDRILKLCTDIFLVRETGELELEEDLYAKLIFLYRSPETMIKWTREKTN

SEQ ID NO: 33408 - protein, 2777 aa, Homo sapiens
  REGION 1..2777: note = ENSP00000463094
MASEVVCGLIFRLLLPICLAVACAFRYNGLSFVYLIYLLLIPLFSEPTKTTMQGHTGRLLKSLCFISLSFLLLHIIFHITLVSLEAQHRIAPGYNCSTWEKTFRQIGFESLKGADAGNGIRVFVPDIGMFIASLTIWLLCRNIVQKPVTDEAAQSNPEFENEELAEGEKIDSEEALIYEEDFNGGDGVEGELEESTKLKMFRRLASVASKLKEFIGNMITTAGKVVVTILLGSSGMMLPSLTSSVYFFVFLGLCTWWSWCRTFDPLLFSCLCVLLAIFTAGHLIGLYLYQFQFFQEAVPPNDYYARLFGIKSVIQTDCSSTWKIIVNPDLSWYHHANPILLLVMYYTLATLIRIWLQEPLVQDEGTKEEDKALACSPIQITAGRRRSLWYATHYPTDERKLLSMTQDDYKPSDGLLVTVNGNPVDYHTIHPSLPMENGPGKADLYSTPQYRWEPSDESSEKREEEEEEKEEFEEERSREEKRSIKVHAMVSVFQFIMKQSYICALIAMMAWSITYHSWLTFVLLIWSCTLWMIRNRRKYAMISSPFMVVYGNLLLILQYIWSFELPEIKKVPGFLEKKEPGELASKILFTITFWLLLRQHLTEQKALQEKEALLSEVKIGSQENEEKDEELQDIQVEGEPKEEEEEEAKEEKQERKKVEQEEAEEEDEQDIMKVLGNLVVAMFIKYWIYVCGGMFFFVSFEGKIVMYKIIYMVLFLFCVALYQVHYEWWRKILKYFWMSVVIYTMLVLIFIYTYQFENFPGLWQNMTGLKKEKLEDLGLKQFTVAELFTRIFIPTSFLLVCILHLHYFHDRFLELTDLKSIPSKEDNTIYSHAKVNGRVYLIINSIKKKLPIHQNELAHPEGSLPDLTMMHLTASLEKPEVRKLAEPGEEKLEGYSEKAQKGDLGKDSEESEEDGEEEEESEEEEETSDLRNKWHLVIDRLTVLFLKFLEYFHKLQVFMWWILELHIIKIVSSYIIWVSVKEVSLFNYVFLISWAFALPYAKLRRLASSVCTVWTCVIIVCKMLYQLQTIKPENFSVNCSLPNENQTNIPFNELNKSLLYSAPIDPTEWVGLRKSSPLLVYLRNNLLMLAILAFEVTIYRHQEYYRGRNNLTAPVSRTIFHDITRLHLDDGLINCAKYFINYFFYKFGLETCFLMSVNVIGQRMDFYAMIHACWLIAVLYRRRRKAIAEIWPKYCCFLACIITFQYFICIGIPPAPCRDYPWRFKGASFNDNIIKWLYFPDFIVRPNPVFLVYDFMLLLCASLQRQIFEDENKAAVRIMAGDNVEICMNLDAASFSQHNPVPDFIHCRSYLDMSKVIIFSYLFWFVLTIIFITGTTRISIFCMGYLVACFYFLLFGGDLLLKPIKSILRYWDWLIAYNVFVITMKNILSIGACGYIGTLVHNSCWLIQAFSLACTVKGYQMPAANSPCTLPSGEAGIIWDSICFAFLLLQRRVFMSYYFLHVVADIKASQILASRGAELFQATIVKAVKARIEEEKKSMDQLKRQMDRIKARQQKYKKGKERMLSLTQEPGEGQDMQKLSEEDDEREADKQKAKGKKKQWWRPWVDHASMVRSGDYYLFETDSEEEEEEELKKEDEEPPRRSAFQFVYQAWITDPKTALRQRHKEKKRSAREERKRRRKGSKEGPVEWEDREDEPIKKKSDGPDNIIKRIFNILKFTWVLFLATVDSFTTWLNSISREHIDISTVLRIERCMLTREIKKGNVPTRESIHMYYQNHIMNLSRESGLDTIDEHPGAASGAQTAHRMDSLDSHDSISSEPTQCTMLYSRQGTTETIEEVEAEQEEEAGSTAPEPREAKEYEATGYDVGAMGAEEASLTPEEELTQFSTLDGDVEAPPSYSKAVSFEHLSFGSQDDSAGKNRMAVSPDDSRTDKLGSSILPPLTHELTASELLLKKMFHDDELEESEKFYVGQPRFLLLFYAMYNTLVARSEMVCYFVIILNHMVSASMITLLLPILIFLWAMLSVPRPSRRFWMMAIVYTEVAIVVKYFFQFGFFPWNKNVEVNKDKPYHPPNIIGVEKKEGYVLYDLIQLLALFFHRSILKCHGLWDEDDMTESGMAREESDDELSLGHGRRDSSDSLKSINLAASVESVHVTFPEQQTAVRRKRSGSSSEPSQRSSFSSNRSQRGSTSTRNSSQKGSSVLSIKQKGKRELYMEKLQEHLIKAKAFTIKKTLEIYVPIKQFFYNLIHPEYSAVTDVYVLMFLADTVDFIIIVFGFWAFGKHSAAADITSSLSEDQVPGPFLVMVLIQFGTMVVDRALYLRKTVLGKVIFQVILVFGIHFWMFFILPGVTERKFSQNLVAQLWYFVKCVYFGLSAYQIRCGYPTRVLGNFLTKSYNYVNLFLFQGFRLVPFLTELRAVMDWVWTDTTLSLSSWICVEDIYAHIFILKCWRESEKRYPQPRGQKKKKVVKYGMGGMIIVLLICIVWFPLLFMSLIKSVAGVINQPLDVSVTITLGGYQPIFTMSAQQSQLKVMDQQSFNKFIQAFSRDTGAMQFLENYEKEDITVAELEGNSNSLWTISPPSKQKMIHELLDPNSSFSVVFSWSIQRNLSLGAKSEIATDKLSFPLKNITRKNIAKMIAGNSTESSKTPVTIEKIYPYYVKAPSDSNSKPIKQLLSENNFMDITIILSRDNTTKYNSEWWVLNLTGNRIYNPNSQALELVVFNDKVSPPSLGFLAGYGIMGLYASVVLVIGKFVREFFSGISHSIMFEELPNVDRILKLCTDIFLVRETGELELEEDLYAKLIFLYRSPETMIKWTREKTN

SEQ ID NO: 33409 - protein, 2752 aa, Homo sapiens
  REGION 1..2752: note = ENSP00000421377
MASEVVCGLIFRLLLPICLAVACAFRYNGLSFVYLIYLLLIPLFSEPTKTTMQGHTGRLLKSLCFISLSFLLLHIIFHITLVSLEAQHRIAPGYNCSTWEKTFRQIGFESLKGADAGNGIRVFVPDIGMFIASLTIWLLCRNIVQKPVTDEAAQSNPEFENEELAEGEKIDSEEALIYEEDFNGGDGVEGELEESTKLKMFRRLASVASKLKEFIGNMITTAGKVVVTILLGSSGMMLPSLTSSVYFFVFLGLCTWWSWCRTFDPLLFSCLCVLLAIFTAGHLIGLYLYQFQFFQEAVPPNDYYARLFGIKSVIQTDCSSTWKIIVNPDLSWYHHANPILLLVMYYTLATLIRIWLQEPLVQDEGTKEEDKALACSPIQITAGRRRSLWYATHYPTDERKLLSMTQDDYKPSDGLLVTVNGNPVDYHTIHPSLPMENGPGKADLYSTPQYRWEPSDESSEKREEEEEEKEEFEEERSREEKRSIKVHAMVSVFQFIMKQSYICALIAMMAWSITYHSWLTFVLLIWSCTLWMIRNRRKYAMISSPFMVVYGNLLLILQYIWSFELPEIKKVPGFLEKKEPGELASKILFTITFWLLLRQHLTEQKALQEKEALLSEVKIGSQENEEKDEELQDIQVEGEPKEEEEEEAKEEKQERKKVEQEEAEEEDEQDIMKVLGNLVVAMFIKYWIYVCGGMFFFVSFEGKIVMYKIIYMVLFLFCVALYQVHYEWWRKILKYFWMSVVIYTMLVLIFIYTYQFENFPGLWQNMTGLKKEKLEDLGLKQFTVAELFTRIFIPTSFLLVCILHLHYFHDRFLELTDLKSIPSKEDNTIYRLAHPEGSLPDLTMMHLTASLEKPEVRKLAEPGEEKLEGYSEKAQKGDLGKDSEESEEDGEEEEESEEEEETSDLRNKWHLVIDRLTVLFLKFLEYFHKLQVFMWWILELHIIKIVSSYIIWVSVKEVSLFNYVFLISWAFALPYAKLRRLASSVCTVWTCVIIVCKMLYQLQTIKPENFSVNCSLPNENQTNIPFNELNKSLLYSAPIDPTEWVGLRKSSPLLVYLRNNLLMLAILAFEVTIYRHQEYYRGRNNLTAPVSRTIFHDITRLHLDDGLINCAKYFINYFFYKFGLETCFLMSVNVIGQRMDFYAMIHACWLIAVLYRRRRKAIAEIWPKYCCFLACIITFQYFICIGIPPAPCRDYPWRFKGASFNDNIIKWLYFPDFIVRPNPVFLVYDFMLLLCASLQRQIFEDENKAAVRIMAGDNVEICMNLDAASFSQHNPVPDFIHCRSYLDMSKVIIFSYLFWFVLTIIFITGTTRISIFCMGYLVACFYFLLFGGDLLLKPIKSILRYWDWLIAYNVFVITMKNILSIGACGYIGTLVHNSCWLIQAFSLACTVKGYQMPAANSPCTLPSGEAGIIWDSICFAFLLLQRRVFMSYYFLHVVADIKASQILASRGAELFQATIVKAVKARIEEEKKSMDQLKRQMDRIKARQQKYKKGKERMLSLTQEPGEGQDMQKLSEEDDEREADKQKAKGKKKQWWRPWVDHASMVRSGDYYLFETDSEEEEEEELKKEDEEPPRRSAFQFVYQAWITDPKTALRQRHKEKKRSAREERKRRRKGSKEGPVEWEDREDEPIKKKSDGPDNIIKRIFNILKFTWVLFLATVDSFTTWLNSISREHIDISTVLRIERCMLTREIKKGNVPTRESIHMYYQNHIMNLSRESGLDTIDEHPGAASGAQTAHRMDSLDSHDSISSEPTQCTMLYSRQGTTETIEEVEAEQEEEAGSTAPEPREAKEYEATGYDVGAMGAEEASLTPEEELTQFSTLDGDVEAPPSYSKAVSFEHLSFGSQDDSAGKNRMAVSPDDSRTDKLGSSILPPLTHELTASELLLKKMFHDDELEESEKFYVGQPRFLLLFYAMYNTLVARSEMVCYFVIILNHMVSASMITLLLPILIFLWAMLSVPRPSRRFWMMAIVYTEVAIVVKYFFQFGFFPWNKNVEVNKDKPYHPPNIIGVEKKEGYVLYDLIQLLALFFHRSILKCHGLWDEDDMTESGMAREESDDELSLGHGRRDSSDSLKSINLAASVESVHVTFPEQQTAVRRKRSGSSSEPSQRSSFSSNRSQRGSTSTRNSSQKGSSVLSIKQKGKRELYMEKLQEHLIKAKAFTIKKTLEIYVPIKQFFYNLIHPEYSAVTDVYVLMFLADTVDFIIIVFGFWAFGKHSAAADITSSLSEDQVPGPFLVMVLIQFGTMVVDRALYLRKTVLGKVIFQVILVFGIHFWMFFILPGVTERKFSQNLVAQLWYFVKCVYFGLSAYQIRCGYPTRVLGNFLTKSYNYVNLFLFQGFRLVPFLTELRAVMDWVWTDTTLSLSSWICVEDIYAHIFILKCWRESEKRYPQPRGQKKKKVVKYGMGGMIIVLLICIVWFPLLFMSLIKSVAGVINQPLDVSVTITLGGYQPIFTMSAQQSQLKVMDQQSFNKFIQAFSRDTGAMQFLENYEKEDITVAELEGNSNSLWTISPPSKQKMIHELLDPNSSFSVVFSWSIQRNLSLGAKSEIATDKLSFPLKNITRKNIAKMIAGNSTESSKTPVTIEKIYPYYVKAPSDSNSKPIKQLLSENNFMDITIILSRDNTTKYNSEWWVLNLTGNRIYNPNSQALELVVFNDKVSPPSLGFLAGYGIMGLYASVVLVIGKFVREFFSGISHSIMFEELPNVDRILKLCTDIFLVRETGELELEEDLYAKLIFLYRSPETMIKWTREKTN

SEQ ID NO: 33410 - protein, 1473 aa, Homo sapiens
  REGION 1..1473: note = ENSP00000462115
MASEVVCGLIFRLLLPICLAVACAFRYNGLSFVYLIYLLLIPLFSEPTKTTMQGHTGRLLKSLCFISLSFLLLHIIFHITLVSLEAQHRIAPGYNCSTWEKTFRQIGFESLKGADAGNGIRVFVPDIGMFIASLTIWLLCRNIVQKPVTDEAAQSNPEFENEELAEGEKIDSEEALIYEEDFNGGDGVEGELEESTKLKMFRRLASVASKLKEFIGNMITTAGKVVVTILLGSSGMMLPSLTSSVYFFVFLGLCTWWSWCRTFDPLLFSCLCVLLAIFTAGHLIGLYLYQFQFFQEAVPPNDYYARLFGIKSVIQTDCSSTWKIIVNPDLSWYHHANPILLLVMYYTLATLIRIWLQEPLVQDEGTKEEDKALACSPIQITAGRRRSLWYATHYPTDERKLLSMTQDDYKPSDGLLVTVNGNPVDYHTIHPSLPMENGPGKADLYSTPQYRWEPSDESSEKREEEEEEKEEFEEERSREEKRSIKVHAMVSVFQFIMKQSYICALIAMMAWSITYHSWLTFVLLIWSCTLWMIRNRRKYAMISSPFMVVYGNLLLILQYIWSFELPEIKKVPGFLEKKEPGELASKILFTITFWLLLRQHLTEQKALQEKEALLSEVKIGSQENEEKDEELQDIQVEGEPKEEEEEEAKEEKQERKKVEQEEAEEEDEQDIMKVLGNLVVAMFIKYWIYVCGGMFFFVSFEGKIVMYKIIYMVLFLFCVALYQVHYEWWRKILKYFWMSVVIYTMLVLIFIYTYQFENFPGLWQNMTGLKKEKLEDLGLKQFTVAELFTRIFIPTSFLLVCILHLHYFHDRFLELTDLKSIPSKEDNTIYSHAKVNGRVYLIINRLAHPEGSLPDLTMMHLTASLEKPEVRKLAEPGEEKLEGYSEKAQKGDLGKDSEESEEDGEEEEESEEEEETSDLRNKWHLVIDRLTVLFLKFLEYFHKLQVFMWWILELHIIKIVSSYIIWVSVKEVSLFNYVFLISWAFALPYAKLRRLASSVCTVWTCVIIVCKMLYQLQTIKPENFSVNCSLPNENQTNIPFNELNKSLLYSAPIDPTEWVGLRKSSPLLVYLRNNLLMLAILAFEVTIYRHQEYYRGRNNLTAPVSRTIFHDITRLHLDDGLINCAKYFINYFFYKFGLETCFLMSVNVIGQRMDFYAMIHACWLIAVLYRRRRKAIAEIWPKYCCFLACIITFQYFICIGIPPAPCRDYPWRFKGASFNDNIIKWLYFPDFIVRPNPVFLVYDFMLLLCASLQRQIFEDENKAAVRIMAGDNVEICMNLDAASFSQHNPVPDFIHCRSYLDMSKVIIFSYLFWFVLTIIFITGTTRISIFCMGYLVACFYFLLFGGDLLLKPIKSILRYWDWLIAYNVFVITMKNILSIGACGYIGTLVHNSCWLIQAFSLACTVKGYQMPAANSPCTLPSGEAGIIWDSICFAFLLLQRRVFMSYYFLHVVADIKASQILASRWLNFSRPQL

SEQ ID NO: 33411 - protein, 153 aa, Homo sapiens
  REGION 1..153: note = ENSP00000477311
  VARIANT 1: note = Any amino acid
XIKASQILASRGAELFQATIVKAVKARIEEEKKSMDQLKRQMDRIKARQQKYKKGKERMLSLTQEPGEGQDMQKLSEEDDEREADKQKAKGKKKQWWRPWVDHASSRFSRSPYNLIDSNPYILDQNSGVPVTHVFHAWFDPCDLIGGRSVGKF

SEQ ID NO: 33412 - protein, 192 aa, Homo sapiens
  REGION 1..192: note = ENSP00000462560
MKVLGNLVVAMFIKYWIYVCGGMFFFVSFEGKIVMYKIIYMVLFLFCVALYQVHYEWWRKILKYFWMSVVIYTMLVLIFIYTYQFENFPGLWQNMTGLKKEKLEDLGLKQFTVAELFTRIFIPTSFLLVCILHLHYFHDRFLELTDLKSIPSKEDNTIYRLAHPEGSLPDLTMMHLTASLEKPEVRKLAEPG

SEQ ID NO: 33413 - protein, 178 aa, Homo sapiens
  REGION 1..178: note = ENSP00000463589
  VARIANT 1: note = Any amino acid
XTAGHLIGLYLYQFQFFQEAVPPNDYYARLFGIKSVIQTDCSSTWKIIVNPDLSWYHHANPILLLVMYYTLATLIRIWLQEPLVQDEGTKEEDKALACSPIQITAGRRRSLWYATHYPTDERKGLLVTVNGNPVDYHTIHPSLPMENGPGKADLYSTPQYRWEPSDESSEKREEEEEE

SEQ ID NO: 33414 - protein, 2703 aa, Homo sapiens
  REGION 1..2703: note = ENSP00000372900
MQGHTGRLLKSLCFISLSFLLLHIIFHITLVSLEAQHRIAPGYNCSTWEKTFRQIGFESLKGADAGNGIRVFVPDIGMFIASLTIWLLCRNIVQKPVTDEAAQSNPEFENEELAEGEKIDSEEALIYEEDFNGGDGVEGELEESTKLKMFRRLASVASKLKEFIGNMITTAGKVVVTILLGSSGMMLPSLTSSVYFFVFLGLCTWWSWCRTFDPLLFSCLCVLLAIFTAGHLIGLYLYQFQFFQEAVPPNDYYARLFGIKSVIQTDCSSTWKIIVNPDLSWYHHANPILLLVMYYTLATLIRIWLQEPLVQDEGTKEEDKALACSPIQITAGRRRSLWYATHYPTDERKLLSMTQDDYKPSDGLLVTVNGNPVDYHTIHPSLPMENGPGKADLYSTPQYRWEPSDESSEKREEEEEEKEEFEEERSREEKRSIKVHAMVSVFQFIMKQSYICALIAMMAWSITYHSWLTFVLLIWSCTLWMIRNRRKYAMISSPFMVVYGNLLLILQYIWSFELPEIKKVPGFLEKKEPGELASKILFTITFWLLLRQHLTEQKALQEKEALLSEVKIGSQENEEKDEELQDIQVEGEPKEEEEEEAKEEKQERKKVEQEEAEEEDEQDIMKVLGNLVVAMFIKYWIYVCGGMFFFVSFEGKIVMYKIIYMVLFLFCVALYQVHYEWWRKILKYFWMSVVIYTMLVLIFIYTYQFENFPGLWQNMTGLKKEKLEDLGLKQFTVAELFTRIFIPTSFLLVCILHLHYFHDRFLELTDLKSIPSKEDNTIYRLAHPEGSLPDLTMMHLTASLEKPEVRKLAEPGEEKLEGYSEKAQKGDLGKDSEESEEDGEEEEESEEEEETSDLRNKWHLVIDRLTVLFLKFLEYFHKLQVFMWWILELHIIKIVSSYIIWVSVKEARVSLFNYVFLISWAFALPYAKLRRLASSVCTVWTCVIIVCKMLYQLQTIKPENFSVNCSLPNENQTNIPFNELNKSLLYSAPIDPTEWVGLRKSSPLLVYLRNNLLMLAILAFEVTIYRHQEYYRGRNNLTAPVSRTIFHDITRLHLDDGLINCAKYFINYFFYKFGLETCFLMSVNVIGQRMDFYAMIHACWLIAVLYRRRRKAIAEIWPKYCCFLACIITFQYFICIGIPPAPCRDYPWRFKGASFNDNIIKWLYFPDFIVRPNPVFLVYDFMLLLCASLQRQIFEDENKAAVRIMAGDNVEICMNLDAASFSQHNPVPDFIHCRSYLDMSKVIIFSYLFWFVLTIIFITGTTRISIFCMGYLVACFYFLLFGGDLLLKPIKSILRYWDWLIAYNVFVITMKNILSIGACGYIGTLVHNSCWLIQAFSLACTVKGYQMPAANSPCTLPSGEAGIIWDSICFAFLLLQRRVFMSYYFLHVVADIKASQILASRGAELFQATIVKAVKARIEEEKKSMDQLKRQMDRIKARQQKYKKGKERMLSLTQEPGEGQDMQKLSEEDDEREADKQKAKGKKKQWWRPWVDHASMVRSGDYYLFETDSEEEEEEELKKEDEEPPRRSAFQFVYQAWITDPKTALRQRHKEKKRSAREERKRRRKGSKEGPVEWEDREDEPIKKKSDGPDNIIKRIFNILKFTWVLFLATVDSFTTWLNSISREHIDISTVLRIERCMLTREIKKGNVPTRESIHMYYQNHIMNLSRESGLDTIDEHPGAASGAQTAHRMDSLDSHDSISSEPTQCTMLYSRQGTTETIEEVEAEQEEEAGSTAPEPREAKEYEATGYDVGAMGAEEASLTPEEELTQFSTLDGDVEAPPSYSKAVSFEHLSFGSQDDSAGKNRMAVSPDDSRTDKLGSSILPPLTHELTASELLLKKMFHDDELEESEKFYVGQPRFLLLFYAMYNTLVARSEMVCYFVIILNHMVSASMITLLLPILIFLWAMLSVPRPSRRFWMMAIVYTEVAIVVKYFFQFGFFPWNKNVEVNKDKPYHPPNIIGVEKKEGYVLYDLIQLLALFFHRSILKCHGLWDEDDMTESGMAREESDDELSLGHGRRDSSDSLKSINLAASVESVHVTFPEQQTAVRRKRSGSSSEPSQRSSFSSNRSQRGSTSTRNSSQKGSSVLSIKQKGKRELYMEKLQEHLIKAKAFTIKKTLEIYVPIKQFFYNLIHPEYSAVTDVYVLMFLADTVDFIIIVFGFWAFGKHSAAADITSSLSEDQVPGPFLVMVLIQFGTMVVDRALYLRKTVLGKVIFQVILVFGIHFWMFFILPGVTERKFSQNLVAQLWYFVKCVYFGLSAYQIRCGYPTRVLGNFLTKSYNYVNLFLFQGFRLVPFLTELRAVMDWVWTDTTLSLSSWICVEDIYAHIFILKCWRESEKRYPQPRGQKKKKVVKYGMGGMIIVLLICIVWFPLLFMSLIKSVAGVINQPLDVSVTITLGGYQPIFTMSAQQSQLKVMDQQSFNKFIQAFSRDTGAMQFLENYEKEDITVAELEGNSNSLWTISPPSKQKMIHELLDPNSSFSVVFSWSIQRNLSLGAKSEIATDKLSFPLKNITRKNIAKMIAGNSTESSKTPVTIEKIYPYYVKAPSDSNSKPIKQLLSENNFMDITIILSRDNTTKYNSEWWVLNLTGNRIYNPNSQALELVVFNDKVSPPSLGFLAGYGIMGLYASVVLVIGKFVREFFSGISHSIMFEELPNVDRILKLCTDIFLVRETGELELEEDLYAKLIFLYRSPETMIKWTREKTN

SEQ ID NO: 33415 - protein, 484 aa, Homo sapiens
  REGION 1..484: note = ENSP00000369820
MACRGGAGNGHRASATLSRVSPGSLYTCRTRTHNICMVSDFFYPNMGGVESHIYQLSQCLIERGHKVIIVTHAYGNRKGIRYLTSGLKVYYLPLKVMYNQSTATTLFHSLPLLRYIFVRERVTIIHSHSSFSAMAHDALFHAKTMGLQTVFTDHSLFGFADVSSVLTNKLLTVSLCDTNHIICVSYTSKENTVLRAALNPEIVSVIPNAVDPTDFTPDPFRRHDSITIVVVSRLVYRKGIDLLSGIIPELCQKYPDLNFIIGGEGPKRIILEEVRERYQLHDRVRLLGALEHKDVRNVLVQGHIFLNTSLTEAFCMAIVEAASCGLQVVSTRVGGIPEVLPENLIILCEPSVKSLCEGLEKAIFQLKSGTLPAPENIHNIVKTFYTWRNVAERTEKVYDRVSVEAVLPMDKRLDRLISHCGPVTGYIFALLAVFNFLFLIFLRWMTPDSIIDVAIDATGPRGAWTNNYSHSKRGGENNEISETR

SEQ ID NO: 33416 - protein, 484 aa, Homo sapiens; identical to SEQ ID NO: 33415
  REGION 1..484: note = ENSP00000442653

SEQ ID NO: 33417 - protein, 118 aa, Homo sapiens
  REGION 1..118: note = ENSP00000489207
MACRGGAGNGHRASATLSRVSPGSLYTCRTRTHNICMVSDFFYPNMGGVESHIYQLSQCLIERGHKVIIVTHAYGNRKGIRYLTSGLKVYYLPLKVMYNQSTATTLFHSLPLLRDRFA

SEQ ID NO: 33418 - protein, 274 aa, Homo sapiens
  REGION 1..274: note = ENSP00000489928
MACRGGAGNGHRASATLSRVSPGSLYTCRTRTHNICMVSDFFYPNMGGVESHIYQLSQCLIERGHKVIIVTHAYGNRKGIRYLTSGLKVYYLPLKVMYNQSTATTLFHSLPLLRYIFVRERVTIIHSHSSFSAMAHDALFHAKTMGLQTVFTDHSLFGFADVSSVLTNKLLTVSLCDTNHIICVSYTSKENTVLRAALNPEIVSVIPNAVDPTDFTPDPFRRHDSITIVVVSRLVYRKDGVSLCLPGWSAVAQSRLTANSASRVHAILLPQPPE

SEQ ID NO: 33419 - protein, 44 aa, Homo sapiens
  REGION 1..44: note = ENSP00000490483
MACRGGAGNGHRASATLSRVSPGSLYTCRTRTHNICMGSICLVV

SEQ ID NO: 33420 - protein, 169 aa, Homo sapiens
  REGION 1..169: note = ENSP00000490545
MAIVEAASCGLQVVSTRVGGIPEVLPENLIILCEPSVKSLCEGLEKAIFQLKSGTLPAPENIHNIVKTFYTWRNVAERTEKVYDRVSVEAVLPMDKRLDRLISHCGPVTGYIFALLAVFNFLFLIFLRWMTPDSIIDVAIDATGPRGAWTNNYSHSKRGGENNEISETR

SEQ ID NO: 33421 - protein, 250 aa, Homo sapiens
  REGION 1..250: note = ENSP00000489540
MELTGIDLLSGIIPELCQKYPDLNFIIGGEGPKRIILEEVRERYQLHDRVRLLGALEHKDVRNVLVQGHIFLNTSLTEAFCMAIVEAASCGLQVVSTRVGGIPEVLPENLIILCEPSVKSLCEGLEKAIFQLKSGTLPAPENIHNIVKTFYTWRNVAERTEKVYDRVSVEAVLPMDKRLDRLISHCGPVTGYIFALLAVFNFLFLIFLRWMTPDSIIDVAIDATGPRGAWTNNYSHSKRGGENNEISETR

SEQ ID NO: 33422 - protein, 315 aa, Homo sapiens
  REGION 1..315: note = ENSP00000489528
MACRGGAGNGHRASATLSRVSPGSLYTCRTRTHNICMVSDFFYPNMGGVESHIYQLSQCLIERGHKVIIVTHAYGNRKGIRYLTSGLKVYYLPLKVMYNQSTATTLFHSLPLLRVRLLGALEHKDVRNVLVQGHIFLNTSLTEAFCMAIVEAASCGLQVVSTRVGGIPEVLPENLIILCEPSVKSLCEGLEKAIFQLKSGTLPAPENIHNIVKTFYTWRNVAERTEKVYDRVSVEAVLPMDKRLDRLISHCGPVTGYIFALLAVFNFLFLIFLRWMTPDSIIDVAIDATGPRGAWTNNYSHSKRGGENNEISETR

SEQ ID NO: 33423 - protein, 150 aa, Homo sapiens
  REGION 1..150: note = ENSP00000489083
MAIVEAASCGLQVVSTRVGGIPEVLPENLIILCEPSVKSLCEGLEKAIFQLKSGTLPAPENIHNIVKTFYTWRNVAERTEKVYDRVSVEAVLPMDKRLDRLISHCGPVTGYIFALLAVFNFLFLIFLRWMTPDSIIDVAIDATGPRGAWT

SEQ ID NO: 33424 - protein, 51 aa, Homo sapiens
  REGION 1..51: note = ENSP00000488970
QGHIFLNTSLTEAFCMAIVEAASCGLQVYDRVSVEAVLPMDKRLDRLISHC

SEQ ID NO: 33425 - protein, 99 aa, Homo sapiens
  REGION 1..99: note = ENSP00000489491
VTHAYGNRKGIRYLTSGLKVYYLPLKVMYNQSTATTLFHSLPLLRSLLDQISKSHWNVLSEREDKSKFSLSRLFGCLFPEPPLPSLFCSQSGFTSTLHV

SEQ ID NO: 33426 - protein, 152 aa, Homo sapiens
  REGION 1..152: note = ENSP00000489205
MACRGGAGNGHRASATLSRVSPGSLYTCRTRTHNICMVSDFFYPNMGGVESHIYQLSQCLIERGHKVIIVTHAYGNRKGIRYLTSGLKVYYLPLKVMYNQSTATTLFHSLPLLRYIFVRERVTIIHSHSSFSAMAHDALFHAKTMGLQTVFT

SEQ ID NO: 33427 - protein, 182 aa, Homo sapiens
  REGION 1..182: note = ENSP00000453759
  VARIANT 1: note = Any amino acid
XGRLALQRRYYSPSCREFCLSCPRLSLRSLTAVTCTVWLAAYGLFTLCENSMILSAAIFITLLGLLGYLHFVKIDQETLLIIDSLGIQMTSSYASGKESTTFIEMGKVKDIVINEAIYMQKVIYYLCILLKDPVEPHGISQVVPVFQAAWCIHSKLATRPSCFLNRTLPGPSGQPSQEPIPC

SEQ ID NO: 33428 - protein, 188 aa, Homo sapiens
  REGION 1..188: note = ENSP00000216452
MEDERSFSDICGGRLALQRRYYSPSCREFCLSCPRLSLRSLTAVTCTVWLAAYGLFTLCENSMILSAAIFITLLGLLGYLHFVKIDQETLLIIDSLGIQMTSSYASGKESTTFIEMGKVKDIVINEAIYMQKVIYYLCILLKDPVEPHGISQVVPVFQSAKPRLDCLIEVYRSCQEILAHQKATSTSP

SEQ ID NO: 33429 - protein, 136 aa, Homo sapiens
  REGION 1..136: note = ENSP00000452816
  VARIANT 1: note = Any amino acid
XLLGLLGYLHFVKIDQETLLIIDSLGIQMTSSYASGKESTTFIEMGKVKDIVINEAIYMQKVIYYLCILLKDPVEPHGISQVVPVFQRQSLTLSPRLECSDNHHSLQPPPPRLKKSSCLSLLRTWDYRVPSPGWTA

SEQ ID NO: 33430 - protein, 187 aa, Homo sapiens
  REGION 1..187: note = ENSP00000453394
MEDERSFSDICGGRLALQRRYYSPSCREFCLSCPRLSLRSLTAVTCTVWLAAYGLFTLCENSMILSAAIFITLLGLLGYLHFVKIDQETLLIIDSLGIQMTSSYASGKESTTFIEMGKVKDIVINEAIYMKVIYYLCILLKDPVEPHGISQVVPVFQSAKPRLDCLIEVYRSCQEILAHQKATSTSP

SEQ ID NO: 33431 - protein, 137 aa, Homo sapiens
  REGION 1..137: note = ENSP00000453158
  VARIANT 1: note = Any amino acid
XSCREFCLSCPRLSLRSLTAVTCTVWLAAYGLFTLCENSMILSAAIFITLLGLLGYLHFVKIDQETLLIIDSLGIQMTSSYASGKESTTFIEMGKVKDIVINEAIYMSAKPRLDCLIEVYRSCQEILAHQKATSTSP

SEQ ID NO: 33432 - protein, 83 aa, Homo sapiens
  REGION 1..83: note = ENSP00000452924
MEDERSFSDICGGRLALQRRYYSPSCREFCLSCPRLSLRSLTAVTCTVWLAAYGLFTLCEHDPLCCHLHHPLRSAWLSPFCED

SEQ ID NO: 33433 - protein, 133 aa, Homo sapiens
  REGION 1..133: note = ENSP00000452974
MEDERSFSDICGGRLALQRRYYSPSCREFCLSCPRLSLRSLTAVTCTVWLAAYGLFTLCENSMILSAAIFITLLGLLGYLHFVKIDQETLLIIDSLGIQMTSSYASGKESTTFIEMGKVKDIVINEAIYMVSI

SEQ ID NO: 33434 - protein, 83 aa, Homo sapiens; identical to SEQ ID NO: 33432
  REGION 1..83: note = ENSP00000454061

SEQ ID NO: 33435 - protein, 183 aa, Homo sapiens
  REGION 1..183: note = ENSP00000453733
MEDERSFSDICGGRLALQRRYYSPSCREFCLSCPRLSLRSLTAVTCTVWLAAYGLFTLCEMTSSYASGKESTTFIEMGKVKDIVINEAIYMQKVIYYLCILLKDPVEPHGISQVVPVFQRQSLTLSPRLECSDNHHSLQPPPPRLKKSSCLSLLRTWDYRCAPSRLANFFFLFLVEMRSCHVA

SEQ ID NO: 33436 - protein, 137 aa, Homo sapiens
  REGION 1..137: note = ENSP00000452996
MEDERSFSDICGGRLALQRRYYSPSCREFCLSCPRLSLRSLTAVTCTVWLAAYGLFTLCENSMILSAAIFITLLGKESTTFIEMGKVKDIVINEAIYMQKVIYYLCILLKDPVEPHGISQVVPVFQRQSLTLSPRLE

SEQ ID NO: 33437 - protein, 41 aa, Homo sapiens
  REGION 1..41: note = ENSP00000268758
MAAAGAAATHLAPPHGACHCRVYAGVSAPGRPGEAALHRCA

SEQ ID NO: 33438 - protein, 547 aa, Homo sapiens
  REGION 1..547: note = ENSP00000378755
MPSEVARGKRAALFFAAVAIVLGLPLWWKTTETYRASLPYSQISGLNALQLRLMVPVTVVFTRESVPLDDQEKLPFTVVHEREIPLKYKMKIKCRFQKAYRRALDHEEEALSSGSVQEAEAMLDEPQEQAEGSLTVYVISEHSSLLPQDMMSYIGPKRTAVVRGIMHREAFNIIGRRIVQVAQAMSLTEDVLAAALADHLPEDKWSAEKRRPLKSSLGYEITFSLLNPDPKSHDVYWDIEGAVRRYVQPFLNALGAAGNFSVDSQILYYAMLGVNPRFDSASSSYYLDMHSLPHVINPVESRLGSSAASLYPVLNFLLYVPELAHSPLYIQDKDGAPVATNAFHSPRWGGIMVYNVDSKTYNASVLPVRVEVDMVRVMEVFLAQLRLLFGIAQPQLPPKCLLSGPTSEGLMTWELDRLLWARSVENLATATTTLTSLAQLLGKISNIVIKDDVASEVYKAVAAVQKSAEELASGHLASAFVASQEAVTSSELAFFDPSLLHLLYFPDDQKFAIYIPLFLPMAVPILLSLVKIFLETRKSWRKPEKTD

SEQ ID NO: 33439 - protein, 555 aa, Homo sapiens
  REGION 1..555: note = ENSP00000309430
MAAAGAAATHLEVARGKRAALFFAAVAIVLGLPLWWKTTETYRASLPYSQISGLNALQLRLMVPVTVVFTRESVPLDDQEKLPFTVVHEREIPLKYKMKIKCRFQKAYRRALDHEEEALSSGSVQEAEAMLDEPQEQAEGSLTVYVISEHSSLLPQDMMSYIGPKRTAVVRGIMHREAFNIIGRRIVQVAQAMSLTEDVLAAALADHLPEDKWSAEKRRPLKSSLGYEITFSLLNPDPKSHDVYWDIEGAVRRYVQPFLNALGAAGNFSVDSQILYYAMLGVNPRFDSASSSYYLDMHSLPHVINPVESRLGSSAASLYPVLNFLLYVPELAHSPLYIQDKDGAPVATNAFHSPRWGGIMVYNVDSKTYNASVLPVRVEVDMVRVMEVFLAQLRLLFGIAQPQLPPKCLLSGPTSEGLMTWELDRLLWARSVENLATATTTLTSLAQLLGKISNIVIKDDVASEVYKAVAAVQKSAEELASGHLASAFVASQEAVTSSELAFFDPSLLHLLYFPDDQKFAIYIPLFLPMAVPILLSLVKIFLETRKSWRKPEKTD

SEQ ID NO: 33440 - protein, 41 aa, Homo sapiens; identical to SEQ ID NO: 33437
  REGION 1..41: note = ENSP00000463406

SEQ ID NO: 33441 - protein, 116 aa, Homo sapiens
  REGION 1..116: note = ENSP00000466846
MAAAGAAATHLEVARGKRAALFFAAVAIVLGLPLWWKTTETYRASLPYSQISGLNALQVRLLCGRVGGQPPRQGGDSVTALMLLPVAPPHGACHCRVYAGVSAPGRPGEAALHRCA

SEQ ID NO: 33442 - protein, 579 aa, Homo sapiens
  REGION 1..579: note = ENSP00000413405
MQICGSSVASVAAGTSFQVLGPVCWQQLDLKMAVRVLWGGLSLLRVLWCLLPQTGYVHPDEFFQSPEVMAEDILGVQAARPWEFYPSSSCRSVLFPLLISGSTFWLLRLWEELGPWPGLVSGYALLVGPRLLLTALSFALDGAVYHLAPPMGADRWNALALLSGSYVTLVFYTRTFSNTIEGLLFTWLLVLVSSHVTWGPTRKEPAPGPRWRSWLLGGIVAAGFFNRPTFLAFAVVPLYLWGTRGATNPGLKSLTREALVLLPGAALTAAVFVATDSWYFSSPATSRNLVLTPVNFLHYNLNPQNLARHGTHARLTHLAVNGFLLFGVLHAQALQAAWQRLQVGLQASAQMGLLRALGARSLLSSPRSYLLLLYFMPLALLSAFSHQEARFLIPLLVPLVLLCSPQTQPVPWKGTVVLFNALGALLFGCLHQGGLVPGLEYLEQVVHAPVLPSTPTHYTLLFTHTYMPPRHLLHLPGLGAPVEVVDMGGTEDWALCQTLKSFTRQPACQVAGGPWLCRLFVVTPGTTRRAVEKCSFPFKNETLLFPHLTLEDPPALSSLLSGAWRDHLSLHIVELGEET

SEQ ID NO: 33443 - protein, 49 aa, Homo sapiens
  REGION 1..49: note = ENSP00000405341
  VARIANT 1: note = Any amino acid
XRVLWGGLSLLRVLWCLLPQTGYVHPDEFFQSPEVMAGSGRSWGRGLAW

SEQ ID NO: 33444 - protein, 92 aa, Homo sapiens
  REGION 1..92: note = ENSP00000389327
MQICGSSVASVAAGTSFQVLGPVCWQQLDLKMAVRVLWGGLSLLRVLWCLLPQTGYVHPDEFFQSPEVMAGPSPTPLRDSSSRGCWCWYPPM

SEQ ID NO: 33445 - protein, 214 aa, Homo sapiens
  REGION 1..214: note = ENSP00000361531
MESENMDSENMKTENMESQNVDFESVSSVTALEALSKLLNPEEEDDSDYGQTNGLSTIGAMGPGNIGPPQIEELKVIPETSEENNEDIWNSEEIPEGAEYDDMWDVREIPEYEIIFRQQVGTEDIFLGLSKKDSSTGCCSELVAKIKLPNTNPSDIQIDIQETILDLRTPQKKLLITLPELVECTSAKAFYIPETETLEITMTMKRELDIANFF

SEQ ID NO: 33446 - protein, 214 aa, Homo sapiens; identical to SEQ ID NO: 33445
  REGION 1..214: note = ENSP00000337757

SEQ ID NO: 33447 - protein, 214 aa, Homo sapiens; identical to SEQ ID NO: 33445
  REGION 1..214: note = ENSP00000441930

SEQ ID NO: 33448 - protein, 1634 aa, Homo sapiens
  REGION 1..1634: note = ENSP00000356155
MSSTQGNGEHWKSLESVGISRKELAMAEALQMEYDALSRLRHDKEENRAKQNADPSLISWDEPGVDFYSKPAGRRTDLKLLRGLSGSDPTLNYNSLSPQEGPPNHSTSQGPQPGSDPWPKGSLSGDYLYIFDGSDGGVSSSPGPGDIEGSCKKLSPPPLPPRASIWDTPPLPPRKGSPSSSKISQPSDINTFSLVEQLPGKLLEHRILEEEEVLGGGGQGRLLGSVDYDGINDAITRLNLKSTYDAEMLRDATRGWKEGRGPLDFSKDTSGKPVARSKTMPPQVPPRTYASRYGNRKNATPGKNRRISAAPVGSRPHTVANGHELFEVSEERDEEVAAFCHMLDILRSGSDIQDYFLTGYVWSAVTPSPEHLGDEVNLKVTVLCDRLQEALTFTCNCSSTVDLLIYQTLCYTHDDLRNVDVGDFVLKPCGLEEFLQNKHALGSHEYIQYCRKFDIDIRLQLMEQKVVRSDLARTVNDDQSPSTLNYLVHLQERPVKQTISRQALSLLFDTYHNEVDAFLLADGDFPLKADRVVQSVKAICNALAAVETPEITSALNQLPPCPSRMQPKIQKDPSVLAVRENREKVVEALTAAILDLVELYCNTFNADFQTAVPGSRKHDLVQEACHFARSLAFTVYATHRIPIIWATSYEDFYLSCSLSHGGKELCSPLQTRRAHFSKYLFHLIVWDQQICFPVQVNRLPRETLLCATLYALPIPPPGSSSEANKQRRVPEALGWVTTPLFNFRQVLTCGRKLLGLWPATQENPSARWSAPNFHQPDSVILQIDFPTSAFDIKFTSPPGDKFSPRYEFGSLREEDQRKLKDIMQKESLYWLTDADKKRLWEKRYYCHSEVSSLPLVLASAPSWEWACLPDIYVLLKQWTHMNHQDALGLLHATFPDQEVRRMAVQWIGSLSDAELLDYLPQLVQALKYECYLDSPLVRFLLKRAVSDLRVTHYFFWLLKDGLKDSQFSIRYQYLLAALLCCCGKGLREEFNRQCWLVNALAKLAQQVREAAPSARQGILRTGLEEVKQFFALNGSCRLPLSPSLLVKGIVPRDCSYFNSNAVPLKLSFQNVDPLGENIRVIFKCGDDLRQDMLTLQMIRIMSKIWVQEGLDMRMVIFRCFSTGRGRGMVEMIPNAETLRKIQVEHGVTGSFKDRPLADWLQKHNPGEDEYEKAVENFIYSCAGCCVATYVLGICDRHNDNIMLKTTGHMFHIDFGRFLGHAQMFGNIKRDRAPFVFTSDMAYVINGGDKPSSRFHDFVDLCCQAYNLIRKHTHLFLNLLGLMLSCGIPELSDLEDLKYVYDALRPQDTEANATTYFTRLIESSLGSVATKLNFFIHNLAQMKFTGSDDRLTLSFASRTHTLKSSGRISDVFLCRHEKIFHPNKGYIYVVKVMRENTHEATYIQRTFEEFQELHNKLRLLFPSSHLPSFPSRFVIGRSRGEAVAERRREELNGYIWHLIHAPPEVAECDLVYTFFHPLPRDEKAMGTSPAPKSSDGTWARPVGKVGGEVKLSISYKNNKLFIMVMHIRGLQLLQDGNDPDPYVKIYLLPDPQKTTKRKTKVARKTCNPTYNEMLVYDGIPKGDLQQRELQLSVLSEQGFWENVLLGEVNIRLRELDLAQEKTGWFALGSRSHGTL

SEQ ID NO: 33449 - protein, 173 aa, Homo sapiens
  REGION 1..173: note = ENSP00000356152
MRPWSSPAQLVAGAQPAGRGDPLGPRPIPPPRFRRASSQREPPYPRPAEPALELAGSKCQPDTPAASLCPADSPSQHRVMPPGPASWANVGSRPHTVANGHELFEVSEERDEEVAAFCHMLDILRSGSDIQDYFLTGYVWSAVTPSPEHLGDEVNLKVTVLCDRLQEALTFTC

SEQ ID NO: 33450 - protein, 131 aa, Homo sapiens
  REGION 1..131: note = ENSP00000401795
MSSTQGNGEHWKSLESVGISRKELAMAEALQMEYDALSRLRHDKEENRAKQNADPSLISWDEPGVDFYSKPAGRRTDLKLLRGLSGSDPTLNYNSLSPQEGPPNHSTSQGPQPGSDPWPKGSLSGDYLYIF

SEQ ID NO: 33451 - protein, 60 aa, Homo sapiens
  REGION 1..60: note = ENSP00000409554
MSSTQGNGEHWKSLESVGISRKELAMAEALQMEYDALSRLRHDKEENRAKQNADPSLISW

SEQ ID NO: 33452 - protein, 1606 aa, Homo sapiens
  REGION 1..1606: note = ENSP00000400561
MSSTQGNGEHWKSLESVGISRKELAMAEALQMEYDALSRLRHDKEENRAKQNADPSLISWDEPGVDFYSKPAGRRTDLKLLRGLSGSDPTLNYNSLSPQEGPPNHSTSQGPQPGSDPWPKGSLSGDYLYIFDGSDGGVSSSPGPGDIEGSCKKLSPPPLPPRASIWDTPPLPPRKGSPSSSKISQPSDINTFSLVEQLPGKLLEHRILEEEEVLGGGGQGRLLGSVDYDGINDAITRLNLKSTYDAEMLRDATRGWKEGRGPLDFSKDTSGKPVARSKTMPPQVPPRTYASRYGNRKNATPGKNRRISAAPVGSRPHTVANGHELFEVSEERDEEVAAFCHMLDILRSGSDIQDYFLTGYVWSAVTPSPEHLGDEVNLKVTVLCDRLQEALTFTCNCSSTVDLLIYQTLCYTHDDLRNVDVGDFVLKPCGLEEFLQNKHALGSHEYIQYCRKFDIDIRLQLMEQKVVRSDLARTVNDDQSPSTLNYLVHLQERPVKQTISRQALSLLFDTYHNEVDAFLLADGDFPLKADRVVQSVKAICNALAAVETPEITSALNQLPPCPSRMQPKIQKDPSVLAVRENREKVVEALTAAILDLVELYCNTFNADFQTAVPGSRKHDLVQEACHFARSLAFTVYATHRIPIIWATSYEDFYLSCSLSHGGKELCSPLQTRRAHFSKYLFHLIVWDQQICFPVQVNRLPRETLLCATLYALPIPPPGSSSEANKQRRVPEALGWVTTPLFNFRQVLTCGRKLLGLWPATQENPSARWSAPNFHQPDSVILQIDFPTSAFDIKFTSPPGDKFSPRYEFGSLREEDQRKLKDIMQKESLYWLTDADKKRLWEKRYYCHSEWTHMNHQDALGLLHATFPDQEVRRMAVQWIGSLSDAELLDYLPQLVQALKYECYLDSPLVRFLLKRAVSDLRVTHYFFWLLKDGLKDSQFSIRYQYLLAALLCCCGKGLREEFNRQCWLVNALAKLAQQVREAAPSARQGILRTGLEEVKQFFALNGSCRLPLSPSLLVKGIVPRDCSYFNSNAVPLKLSFQNVDPLGENIRVIFKCGDDLRQDMLTLQMIRIMSKIWVQEGLDMRMVIFRCFSTGRGRGMVEMIPNAETLRKIQVEHGVTGSFKDRPLADWLQKHNPGEDEYEKAVENFIYSCAGCCVATYVLGICDRHNDNIMLKTTGHMFHIDFGRFLGHAQMFGNIKRDRAPFVFTSDMAYVINGGDKPSSRFHDFVDLCCQAYNLIRKHTHLFLNLLGLMLSCGIPELSDLEDLKYVYDALRPQDTEANATTYFTRLIESSLGSVATKLNFFIHNLAQMKFTGSDDRLTLSFASRTHTLKSSGRISDVFLCRHEKIFHPNKGYIYVVKVMRENTHEATYIQRTFEEFQELHNKLRLLFPSSHLPSFPSRFVIGRSRGEAVAERRREELNGYIWHLIHAPPEVAECDLVYTFFHPLPRDEKAMGTSPAPKSSDGTWARPVGKVGGEVKLSISYKNNKLFIMVMHIRGLQLLQDGNDPDPYVKIYLLPDPQKTTKRKTKVARKTCNPTYNEMLVYDGIPKGDLQQRELQLSVLSEQGFWENVLLGEVNIRLRELDLAQEKTGWFALGSRSHGTL

SEQ ID NO: 33453 - protein, 724 aa, Homo sapiens
  REGION 1..724: note = ENSP00000428056
MSAEGYQYRALYDYKKEREEDIDLHLGDILTVNKGSLVALGFSDGQEARPEEIGWLNGYNETTGERGDFPGTYVEYIGRKKISPPTPKPRPPRPLPVAPGSSKTEADVEQQALTLPDLAEQFAPPDIAPPLLIKLVEAIEKKGLECSTLYRTQSSSNLAELRQLLDCDTPSVDLEMIDVHVLADAFKRYLLDLPNPVIPAAVYSEMISLAPEVQSSEEYIQLLKKLIRSPSIPHQYWLTLQYLLKHFFKLSQTSSKNLLNARVLSEIFSPMLFRFSAASSDNTENLIKVIEILISTEWNERQPAPALPPKPPKPTTVANNGMNNNMSLQDAEWYWGDISREEVNEKLRDTADGTFLVRDASTKMHGDYTLTLRKGGNNKLIKIFHRDGKYGFSDPLTFSSVVELINHYRNESLAQYNPKLDVKLLYPVSKYQQDQVVKEDNIEAVGKKLHEYNTQFQEKSREYDRLYEEYTRTSQEIQMKRTAIEAFNETIKIFEEQCQTQERYSKEYIEKFKREGNEKEIQRIMHNYDKLKSRISEIIDSRRRLEEDLKKQAAEYREIDKRMNSIKPDLIQLRKTRDQYLMWLTQKGVRQKKLNEWLGNENTEDQYSLVEDDEDLPHHDEKTWNVGSSNRNKAENLLRGKRDGTFLVRESSKQGCYACSVVVDGEVKHCVINKTATGYGFAEPYNLYSSLKELVLHYQHTSLVQHNDSLNVTLAYPVYAQQRR

SEQ ID NO: 33454 - protein, 724 aa, Homo sapiens; identical to SEQ ID NO: 33453
  REGION 1..724: note = ENSP00000429277

SEQ ID NO: 33455 - protein, 131 aa, Homo sapiens
  REGION 1..131: note = ENSP00000428566
TAKEPHQNRRLERALTLPDLAEQFAPPDIAPPLLIKLVEAIEKKGLECSTLYRTQSSSNLAELRQLLDCDTPSVDLEMIDVHVLADAFKRYLLDLPNPVIPAAVYSEMISLAPEVQSSEEYIQLLKKLIRS

SEQ ID NO: 33456 - protein, 117 aa, Homo sapiens
  REGION 1..117: note = ENSP00000430126
MLFRFSAASSDNTENLIKVIEILISTEWNERQPAPALPPKPPKPTTVANNGMNNNMSLQDAEWYWGDISREEVNEKLRDTADGTFLVRDASTKMHGDYTLTLRKGGNNKLIKIFHRD

SEQ ID NO: 33457 - protein, 102 aa, Homo sapiens
  REGION 1..102: note = ENSP00000429766
MLFRFSAASSDNTENLIKVIEILISTEWNERQPAPALPPKPPKPTTVANNGMNNNMSLQDAEWYWGDISREEVNEKLRDTADGTFLVRDASTKMHGDYTLTL

SEQ ID NO: 33458 - protein, 424 aa, Homo sapiens
  REGION 1..424: note = ENSP00000323512
MHNLQTLPPKPPKPTTVANNGMNNNMSLQDAEWYWGDISREEVNEKLRDTADGTFLVRDASTKMHGDYTLTLRKGGNNKLIKIFHRDGKYGFSDPLTFSSVVELINHYRNESLAQYNPKLDVKLLYPVSKYQQDQVVKEDNIEAVGKKLHEYNTQFQEKSREYDRLYEEYTRTSQEIQMKRTAIEAFNETIKIFEEQCQTQERYSKEYIEKFKREGNEKEIQRIMHNYDKLKSRISEIIDSRRRLEEDLKKQAAEYREIDKRMNSIKPDLIQLRKTRDQYLMWLTQKGVRQKKLNEWLGNENTEDQYSLVEDDEDLPHHDEKTWNVGSSNRNKAENLLRGKRDGTFLVRESSKQGCYACSVVVDGEVKHCVINKTATGYGFAEPYNLYSSLKELVLHYQHTSLVQHNDSLNVTLAYPVYAQQRR

SEQ ID NO: 33459 - protein, 137 aa, Homo sapiens
  REGION 1..137: note = ENSP00000431058
MHGDYTLTLRKGGNNKLIKIFHRDGKYGFSDPLTFSSVVELINHYRNESLAQYNPKLDVKLLYPVSKYQQDQVVKEDNIEAVGKKLHEYNTQFQEKSREYDRLYEEYTRTSQEIQMKRTAIEAFNETIKIFEEQCQT

SEQ ID NO: 33460 - protein, 454 aa, Homo sapiens
  REGION 1..454: note = ENSP00000338554
MYNTVWNMEDLDLEYAKTDINCGTDLMFYIEMDPPALPPKPPKPTTVANNGMNNNMSLQDAEWYWGDISREEVNEKLRDTADGTFLVRDASTKMHGDYTLTLRKGGNNKLIKIFHRDGKYGFSDPLTFSSVVELINHYRNESLAQYNPKLDVKLLYPVSKYQQDQVVKEDNIEAVGKKLHEYNTQFQEKSREYDRLYEEYTRTSQEIQMKRTAIEAFNETIKIFEEQCQTQERYSKEYIEKFKREGNEKEIQRIMHNYDKLKSRISEIIDSRRRLEEDLKKQAAEYREIDKRMNSIKPDLIQLRKTRDQYLMWLTQKGVRQKKLNEWLGNENTEDQYSLVEDDEDLPHHDEKTWNVGSSNRNKAENLLRGKRDGTFLVRESSKQGCYACSVVVDGEVKHCVINKTATGYGFAEPYNLYSSLKELVLHYQHTSLVQHNDSLNVTLAYPVYAQQRR

SEQ ID NO: 33461 - protein, 38 aa, Homo sapiens
  REGION 1..38: note = ENSP00000430424
MYNTVWNMEDLDLEYAKTDINCGTDLMFYIEMDPPGKK

SEQ ID NO: 33462 - protein, 189 aa, Homo sapiens
  REGION 1..189: note = ENSP00000429156
KDDQKKSLSTGELEEVNEKLRDTADGTFLVRDASTKMHGDYTLTLRKGGNNKLIKIFHRDGKYGFSDPLTFSSVVELINHYRNESLAQYNPKLDVKLLYPVSKYQQDQVVKEDNIEAVGKKLHEYNTQFQEKSREYDRLYEEYTRTSQEIQMKRTAIEAFNETIKIFEEQCQTQERYSKEYIEKFKREG

SEQ ID NO: 33463 - protein, 361 aa, Homo sapiens
  REGION 1..361: note = ENSP00000430098
MHGDYTLTLRKGGNNKLIKIFHRDGKYGFSDPLTFSSVVELINHYRNESLAQYNPKLDVKLLYPVSKYQQDQVVKEDNIEAVGKKLHEYNTQFQEKSREYDRLYEEYTRTSQEIQMKRTAIEAFNETIKIFEEQCQTQERYSKEYIEKFKREGNEKEIQRIMHNYDKLKSRISEIIDSRRRLEEDLKKQAAEYREIDKRMNSIKPDLIQLRKTRDQYLMWLTQKGVRQKKLNEWLGNENTEDQYSLVEDDEDLPHHDEKTWNVGSSNRNKAENLLRGKRDGTFLVRESSKQGCYACSVVVDGEVKHCVINKTATGYGFAEPYNLYSSLKELVLHYQHTSLVQHNDSLNVTLAYPVYAQQRR

SEQ ID NO: 33464 - protein, 166 aa, Homo sapiens
  REGION 1..166: note = ENSP00000415111
MGRPLLLPLLPLLLPPAFLQPSGSTGSGPSYLYGVTQPKHLSASMGGSVEIPFSFYYPWELATAPDVRISWRRGHFHRQSFYSTRPPSIHKDYVNRLFLNWTEGQKSGFLRISNLQKQDQSVYFCRVELDTRSSGRQQWQSIEGTKLSITQGQQRTKATTPAREPF

SEQ ID NO: 33465 - protein, 303 aa, Homo sapiens
  REGION 1..303: note = ENSP00000198536
MGRPLLLPLLPLLLPPAFLQPSGSTGSGPSYLYGVTQPKHLSASMGGSVEIPFSFYYPWELATAPDVRISWRRGHFHRQSFYSTRPPSIHKDYVNRLFLNWTEGQKSGFLRISNLQKQDQSVYFCRVELDTRSSGRQQWQSIEGTKLSITQAVTTTTQRPSSMTTTWRLSSTTTTTGLRVTQGKRRSDSWHISLETAVGVAVAVTVLGIMILGLICLLRWRRRKGQQRTKATTPAREPFQNTEEPYENIRNEGQNTDPKLNPKDDGIVYASLALSSSTSPRAPPSHRPLKSPQNETLYSVLKA

SEQ ID NO: 33466 - protein, 226 aa, Homo sapiens
  REGION 1..226: note = ENSP00000390026
MGRPLLLPLLPLLLPPAFLQPSGSTGSGPSYLYGVTQPKHLSASMGGSVEIPFSFYYPWELATAPDVRISWRRGHFHRQSFYSTRPPSIHKDYVNRLFLNWTEGQKSGFLRISNLQKQDQSVYFCRVELDTRSSGRQQWQSIEGTKLSITQGQQRTKATTPAREPFQNTEEPYENIRNEGQNTDPKLNPKLHLTQSTSQPPSPQEPPERDPVLCLKGLTNGQPSQD

SEQ ID NO: 33467 - protein, 175 aa, Homo sapiens
  REGION 1..175: note = ENSP00000377569
MGRPLLLPLLPLLLPPAFLQPSGSTGSGPSYLYGVTQPKHLSASMGGSVEIPFSFYYPWELATAPDVRISWRRGHFHRQSFYSTRPPSIHKDYVNRLFLNWTEGQKSGFLRISNLQKQDQSVYFCRVELDTRSSGRQQWQSIEGTKLSITQGNPSKTQRSHMRISGMKDKIQIPS

SEQ ID NO: 33468 - protein, 230 aa, Homo sapiens
  REGION 1..230: note = ENSP00000340109
MGRPLLLPLLPLLLPPAFLQPSGSTGSGPSYLYGVTQPKHLSASMGGSVEIPFSFYYPWELATAPDVRISWRRGHFHRQSFYSTRPPSIHKDYVNRLFLNWTEGQKSGFLRISNLQKQDQSVYFCRVELDTRSSGRQQWQSIEGTKLSITQGQQRTKATTPAREPFQNTEEPYENIRNEGQNTDPKLNPKDDGIVYASLALSSSTSPRAPPSHRPLKSPQNETLYSVLKA

SEQ ID NO: 33469 - protein, 326 aa, Homo sapiens
  REGION 1..326: note = ENSP00000353824
MLLSKFGSLAHLCGPGGVDHLPVKILQPAKADKESFEKAYQVGAVLGSGGFGTVYAGSRIADGLPVAVKHVVKERVTEWGSLGGATVPLEVVLLRKVGAAGGARGVIRLLDWFERPDGFLLVLERPEPAQDLFDFITERGALDEPLARRFFAQVLAAVRHCHSCGVVHRDIKDENLLVDLRSGELKLIDFGSGALLKDTVYTDFDGTRVYSPPEWIRYHRYHGRSATVWSLGVLLYDMVCGDIPFEQDEEILRGRLLFRRRVSPECQQLIRWCLSLRPSERPSLDQIAAHPWMLGADGGVPESCDLRLCTLDPDDVASTTSSSESL

SEQ ID NO: 33470 - protein, 106 aa, Homo sapiens
  REGION 1..106: note = ENSP00000421392
MPMAGLLKGLVRQLERFSVQQQASKMPPKGKSGSGKAGKACQLSLVLAYFVWPKIILPLWPREAERLDTLVVKCLAEFPFEVWRYDGNIHSGCVLDLSVNMEVQFK

SEQ ID NO: 33471 - protein, 111 aa, Homo sapiens
  REGION 1..111: note = ENSP00000218432
MPMAGLLKGLVRQLERFSVQQQASKMPPKGKSGSGKAGKGGAASGSDSADKKAQGPKGGGNAVKVRHILCEKHGKIMEAMEKLKSGMRFNEVAAQYSEDKARQGVCCSYYL

SEQ ID NO: 33472 - protein, 156 aa, Homo sapiens
  REGION 1..156: note = ENSP00000362773
MPMAGLLKGLVRQLERFSVQQQASKMPPKGKSGSGKAGKGGAASGSDSADKKAQGPKGGGNAVKVRHILCEKHGKIMEAMEKLKSGMRFNEVAAQYSEDKARQGGDLGWMTRGSMVGPFQEAAFALPVSGMDKPVFTDPPVKTKFGYHIIMVEGRK

SEQ ID NO: 33473 - protein, 115 aa, Homo sapiens
  REGION 1..115: note = ENSP00000421676
VQQQASKMPPKGKSGSGKAGKGGAASGSDSADKKAQGPKGGGNAVKVRHILCEKHGKIMEAMEKLKSGMRFNEVAAQYSEDKARQGIPSLQQHAGHHRDLRSTLISLVSYLQTTP

SEQ ID NO: 33474 - protein, 91 aa, Homo sapiens
  REGION 1..91: note = ENSP00000394066
VQQQASKMPPKGKSGSGKAGKGGAASGSDSADKKAQGPKGGGNAVKVRHILCEKHGKIMEAMEKLKSGMRFNEVAAQYSEDKARQGAFRLR

SEQ ID NO: 33475 - protein, 116 aa, Homo sapiens
  REGION 1..116: note = ENSP00000402330
  VARIANT 1: note = Any amino acid
XKEKVVLEKRGKVERPERSRRMGAGEERREGTDSPSPESGTDAAGGAASGSDSADKKAQGPKGGGNAVKVRHILCEKHGKIMEAMEKLKSGMRFNEVAAQYSEDKARQGVCCSYYL

SEQ ID NO: 33476 - protein, 133 aa, Homo sapiens
  REGION 1..133: note = ENSP00000409154
MPMAGLLKGLVRQLERFSVQQQASKMPPKGKSGSGKAGKGGAASGSDSADKKAQGPKGGGNAVKVRHILCEKHGKIMEAMEKLKSGMRFNEVAAQYSEDKARQGIPSLQQHAGHHRDLRSTLISLVSYLQTTP

SEQ ID NO: 33477 - protein, 406 aa, Homo sapiens
  REGION 1..406: note = ENSP00000365757
MATPGNLGSSVLASKTKTKKKHFVAQKVKLFRASDPLLSVLMWGVNHSINELSHVQIPVMLMPDDFKAYSKIKVDNHLFNKENMPSHFKFKEYCPMVFRNLRERFGIDDQDFQNSLTRSAPLPNDSQARSGARFHTSYDKRYIIKTITSEDVAEMHNILKKYHQYIVECHGITLLPQFLGMYRLNVDGVEIYVIVTRNVFSHRLSVYRKYDLKGSTVAREASDKEKAKELPTLKDNDFINEGQKIYIDDNNKKVFLEKLKKDVEFLAQLKLMDYSLLVGIHDVERAEQEEVECEENDGEEEGESDGTHPVGTPPDSPGNTLNSSPPLAPGEFDPNIDVYGIKCHENSPRKEVYFMAIIDILTHYDAKKKAAHAAKTVKHGAGAEISTVNPEQYSKRFLDFIGHILT

SEQ ID NO: 33478 - protein, 266 aa, Homo sapiens
  REGION 1..266: note = ENSP00000326294
MHNILKKYHQYIVECHGITLLPQFLGMYRLNVDGVEIYVIVTRNVFSHRLSVYRKYDLKMANLKATFTFPKPTGSTVAREASDKEKAKELPTLKDNDFINEGQKIYIDDNNKKVFLEKLKKDVEFLAQLKLMDYSLLVGIHDVERAEQEEVECEENDGEEEGESDGTHPVGTPPDSPGNTLNSSPPLAPGEFDPNIDVYGIKCHENSPRKEVYFMAIIDILTHYDAKKKAAHAAKTVKHGAGAEISTVNPEQYSKRFLDFIGHILT

SEQ ID NO: 33479 - protein, 347 aa, Homo sapiens
  REGION 1..347: note = ENSP00000442098
MLMPDDFKAYSKIKVDNHLFNKENMPSHFKFKEYCPMVFRNLRERFGIDDQDFQNSLTRSAPLPNDSQARSGARFHTSYDKRYIIKTITSEDVAEMHNILKKYHQYIVECHGITLLPQFLGMYRLNVDGVEIYVIVTRNVFSHRLSVYRKYDLKGSTVAREASDKEKAKELPTLKDNDFINEGQKIYIDDNNKKVFLEKLKKDVEFLAQLKLMDYSLLVGIHDVERAEQEEVECEENDGEEEGESDGTHPVGTPPDSPGNTLNSSPPLAPGEFDPNIDVYGIKCHENSPRKEVYFMAIIDILTHYDAKKKAAHAAKTVKHGAGAEISTVNPEQYSKRFLDFIGHILT

SEQ ID NO: 33480 - protein, 142 aa, Homo sapiens
  REGION 1..142: note = ENSP00000473858
MHNILKKYHQYIVECHGITLLPQFLGMYRLNVDGVEIYVIVTRNVFSHRLSVYRKYDLKGSTVAREASDKEKAKELPTLKDNDFINEGQKIYIDDNNKKVFLEKLKKDVEFLAQLKLMDYSLLVGIHDVERAEQEEVECEEN

SEQ ID NO: 33481 - protein, 668 aa, Homo sapiens
  REGION 1..668: note = ENSP00000335333
MELEVPDEAESAEAGAVPSEAAWAAESGAAAGLAQKKAAPTEVLSMTAQPGPGHGKKLGHRGVDASGETTYKKTTSSTLKGAIQLGIGYTVGHLSSKPERDVLMQDFYVVESIFFPSEGSNLTPAHHFQDFRFKTYAPVAFRYFRELFGIRPDDYLYSLCNEPLIELSNPGASGSLFYVTSDDEFIIKTVMHKEAEFLQKLLPGYYMNLNQNPRTLLPKFYGLYCVQSGGKNIRVVVMNNILPRVVKMHLKFDLKGSTYKRRASKKEKEKSFPTYKDLDFMQDMPEGLLLDADTFSALVKTLQRDCLVLESFKIMDYSLLLGVHNIDQHERERQAQGAQSTSDEKRPVGQKALYSTAMESIQGGAARGEAIESDDTMGGIPAVNGRGERLLLHIGIIDILQSYRFIKKLEHTWKALVHDGDTVSVHRPSFYAERFFKFMSNTVFRKNSSLKSSPSKKGRGGALLAVKPLGPTAAFSASQIPSEREEAQYDLRGARSYPTLEDEGRPDLLPCTPPSFEEATTASIATTLSSTSLSIPERSPSETSEQPRYRRRTQSSGQDGRPQEEPPAEEDLQQITVQVEPACSVEIVVPKEEDAGVEASPAGASAAVEVETASQASDEEGAPASQASDEEDAPATDIYFPTDERSWVYSPLHYSAQAPPASDGESDT

SEQ ID NO: 33482 - protein, 640 aa, Homo sapiens
  REGION 1..640: note = ENSP00000445992
MELEVPDEAESAEAGAVPSEAAWAAESGAAAGLAQKKAAPTEVLSMTAQPGPGHGKKLGHRGVDASGETTYKKTTSSTLKGAIQLGIGYTVGHLSSKPERDVLMQDFYVVESIFFPSEGSNLTPAHHFQDFRFKTYAPVAFRYFRELFGIRPDDYLYSLCNEPLIELSNPGASGSLFYVTSDDEFIIKTVMHKEAEFLQKLLPGYYMNLNQNPRTLLPKFYGLYCVQSGGKNIRVVVMNNILPRVVKMHLKFDLKGSTYKRRASKKEKEKSFPTYKDLDFMQDMPEGLLLDADTFSALVKTLQRDCLVLESFKIMDYSLLLGVHNIDQHERERQAQGAQSTSDEKRPVGQKALYSTAMESIQGGAARGEAIESDDTMGGIPAVNGRGERLLLHIGIIDILQSYRFIKKLEHTWKALVHDGDTVSVHRPSFYAERFFKFMSNTVFRKNSSLKSSPSKKGRGGALLAVKPLGPTAAFSASQIPSEREEAQYDLRGARSYPTLEDEGRPDLLPCTPPSFEEATTASIATTLSSTSLSIPERSPSETSEQPRYRRRTQSSGQDGRPQEEPPAEEDLQQITVQVEPACSVEIVVPKEEDAGVEASPAGASAAVEVETASQASDEEGAPASQASDEEDAPATDIYF

SEQ ID NO: 33483 - protein, 707 aa, Homo sapiens
  REGION 1..707: note = ENSP00000466363
MELEVPDEAESAEAGAVPSEAAWAAESGAAAGLAQKKAAPTEVLSMTAQPGPGHGKKLGHRGVDASGETTYKKTTSSTLKGAIQLGIGYTVGHLSSKPERDVLMQDFYVVESIFFPSEGSNLTPAHHFQDFRFKTYAPVAFRYFRELFGIRPDDYLYSLCNEPLIELSNPGASGSLFYVTSDDEFIIKTVMHKEAEFLQKLLPGYYMNLNQNPRTLLPKFYGLYCVQSGGKNIRVVVMNNILPRVVKMHLKFDLKGSTYKRRASKKEKEKSFPTYKDLDFMQDMPEGLLLDADTFSALVKTLQRDCLVLESFKIMDYSLLLGVHNIDQHERERQAQGAQSTSDEKRPVGQKALYSTAMESIQGGAARGEAIESDDTMGGIPAVNGRGERLLLHIGIIDILQSYRFIKKLEHTWKALVHDGDTVSVHRPSFYAERFFKFMSNTVFRKNSSLKSSPSKKGRGGALLAVKPLGPTAAFSASQIPSEREEAQYDLRGARSYPTLEDEGRPDLLPCTPPSFEEATTASIATTLSSTSLSIPERSPSETSEQPRYRRRTQSSGQDGRPQEEPPAEEDLQQITVQVEPACSVEIVVPKEEDAGVEASPAGASAAVEVETASQASDEEGAPASQASDEEDAPATDIYFFTDGRYWIYSPRHRRLRAVTLSASGTVSDRSRPPWGEGAVPLGQQGAAGPRPEAQCLTSVVFQKGFG

SEQ ID NO: 33484 - protein, 700 aa, Homo sapiens
  REGION 1..700: note = ENSP00000444779
MELEVPDEAESAEAGAVPSEAAWAAESGAAAGLAQKKAAPTEVLSMTAQPGPGHGKKLGHRGVDASGETTYKKTTSSTLKGAIQLGIGYTVGHLSSKPERDVLMQDFYVVESIFFPSEGSNLTPAHHFQDFRFKTYAPVAFRYFRELFGIRPDDYLYSLCNEPLIELSNPGASGSLFYVTSDDEFIIKTVMHKEAEFLQKLLPGYYMNLNQNPRTLLPKFYGLYCVQSGGKNIRVVVMNNILPRVVKMHLKFDLKGSTYKRRASKKEKEKSFPTYKDLDFMQDMPEGLLLDADTFSALVKTLQRDCLVLESFKIMDYSLLLGVHNIDQHERERQAQGAQSTSDEKRPVGQKALYSTAMESIQGGAARGEAIESDDTMGGIPAVNGRGERLLLHIGIIDILQSYRFIKKLEHTWKALVHDGDTVSVHRPSFYAERFFKFMSNTVFRKNSSLKSSPSKKGRGGALLAVKPLGPTAAFSASQIPSEREEAQYDLRGARSYPTLEDEGRPDLLPCTPPSFEEATTASIATTLSSTSLSIPERSPSETSEQPRYRRRTQSSGQDGRPQEEPPAEEDLQQITVQVEPACSVEIVVPKEEDAGVEASPAGASAAVEVETASQASDEEGAPASQASDEEDAPATDIYFWRLWGPHAPTWPWRREGRAACLCPYPPHVVTPFPGTGLCASWSPDGTGGLGAMSCCVSVS

SEQ ID NO: 33485 - protein, 390 aa, Homo sapiens
  REGION 1..390: note = ENSP00000317721
MAAQKDLWDAIVIGAGIQGCFTAYHLAKHRKRILLLEQFFLPHSRGSSHGQSRIIRKAYLEDFYTRMMHECYQIWAQLEHEAGTQLHRQTGLLLLGMKENQELKTIQANLSRQRVEHQCLSSEELKQRFPNIRLPRGEVGLLDNSGGVIYAYKALRALQDAIRQLGGIVRDGEKVVEINPGLLVTVKTTSRSYQAKSLVITAGPWTNQLLRPLGIEMPLQTLRINVCYWREMVPGSYGVSQAFPCFLWLGLCPHHIYGLPTGEYPGLMKVSYHHGNHADPEERDCPTARTDIGDVQILSSFVRDHLPDLKPEPAVIESCMYTNTPDEQFILDRHPKYDNIVIGAGFSGHGFKLAPVVGKILYELSMKLTPSYDLAPFRISRFPSLGKAHL

SEQ ID NO: 33486 - protein, 153 aa, Homo sapiens
  REGION 1..153: note = ENSP00000465428
MMHECYQIWAQLEHEAGTQLHRQTGLLLLGMKENQELKTIQANLSRQRVEHQCLSSEELKQRFPNIRLPRGEVGLLDNSGGVIYAYKALRALQDAIRQLGGIVRDGEKVVEINPGLLVTVKTTSRSYQAKSLVITAGPWTNQLLRPLGIEMPL

SEQ ID NO: 33487 - protein, 204 aa, Homo sapiens
  REGION 1..204: note = ENSP00000465329
MMHECYQIWAQLEHEAGTQLHRQTGLLLLGMKENQELKTIQANLSRQRVEHQCLSSEELKQRFPNIRLPRGEVGLLDNSGGVIYAYKALRALQDAIRQLGGIVRDGEKVVEINPGLLVTVKTTSRSYQAKSLVITAGPWTNQLLRPLGIEMPLQTLRINVCYWREMVPGSYGVSQAFPCFLWLGLCPHHIYGLPTGEYPGLMKV

SEQ ID NO: 33488 - protein, 938 aa, Homo sapiens
  REGION 1..938: note = ENSP00000407882
MAKAGRAGGPPPGGGAPWHLRNVLSDSVESSDDEFFDARGEGTAPCTSSILQEKQRELYRVSLRRQRFPAQGSIEIHEDSEEGCPQRSCKTHVLLLVLHGGNILDTGAGDPSCKAADIHTFSSVLEKVTRAHFPAALGHILIKFVPCPAICSEAFSLVSHLNPYSHDEGCLSSSQDHVPLAALPLLAISSPQYQDAVATVIERANQVYREFLKSSDGIGFSGQVCLIGDCVGGLLAFDAICYSAGPSGDSPASSSRKGSISSTQDTPVAVEEDCSLASSKRLSKSNIDISSGLEDEEPKRPLPRKQSDSSTYDCEAITQHHAFLSSIHSSVLKDESETPAAGGPQLPEVSLGRFDFDVSDFFLFGSPLGLVLAMRRTVLPGLDGFQVRPACSQVYSFFHCADPSASRLEPLLEPKFHLVPPVSVPRYQRFPLGDGQSLLLADALHTHSPLFLEGSSRDSPPLLDAPASPPQASRFQRPGRRMSEGSSHSESSESSDSMAPVGASRITAKWWGSKRIDYALYCPDVLTAFPTVALPHLFHASYWESTDVVAFILRQVMRYESVNIKESARLDPAALSPANPREKWLRKRTQVKLRNVTANHRANDVIAAEDGPQVLVGRFMYGPLDMVALTGEKVDILVMAEPSSGRWVHLDTEITNSSGRITYNVPRPRRLGVGVYPVKMVVRGDQTCAMSYLTVLPRGMECVVFSIDGSFAASVSIMGSDPKVRPGAVDVVRHWQDLGYMILYITGRPDMQKQRVVSWLSQHNFPQGMIFFSDGLVHDPLRQKAIFLRNLMQECFIKISAAYGSTKDISVYSVLGLPASQIFIVGRPTKKYQTQCQFLSEGYAAHLAALEASHRSRPKKNNSRMILRKGSFGLHAQPEFLRKRNHLRRTMSVQQPDPPAANPKPERAQSQPESDKDHERPLPALSWARGPPKFESVP

SEQ ID NO: 33489 - protein, 974 aa, Homo sapiens
  REGION 1..974: note = ENSP00000262483
MAKAGRAGGPPPGGGAPWHLRNVLSDSVESSDDEFFDAREEMAEGKNAILIGMSQWNSNDLVEQIETMGKLDEHQGEGTAPCTSSILQEKQRELYRVSLRRQRFPAQGSIEIHEDSEEGCPQRSCKTHVLLLVLHGGNILDTGAGDPSCKAADIHTFSSVLEKVTRAHFPAALGHILIKFVPCPAICSEAFSLVSHLNPYSHDEGCLSSSQDHVPLAALPLLAISSPQYQDAVATVIERANQVYREFLKSSDGIGFSGQVCLIGDCVGGLLAFDAICYSAGPSGDSPASSSRKGSISSTQDTPVAVEEDCSLASSKRLSKSNIDISSGLEDEEPKRPLPRKQSDSSTYDCEAITQHHAFLSSIHSSVLKDESETPAAGGPQLPEVSLGRFDFDVSDFFLFGSPLGLVLAMRRTVLPGLDGFQVRPACSQVYSFFHCADPSASRLEPLLEPKFHLVPPVSVPRYQRFPLGDGQSLLLADALHTHSPLFLEGSSRDSPPLLDAPASPPQASRFQRPGRRMSEGSSHSESSESSDSMAPVGASRITAKWWGSKRIDYALYCPDVLTAFPTVALPHLFHASYWESTDVVAFILRQVMRYESVNIKESARLDPAALSPANPREKWLRKRTQVKLRNVTANHRANDVIAAEDGPQVLVGRFMYGPLDMVALTGEKVDILVMAEPSSGRWVHLDTEITNSSGRITYNVPRPRRLGVGVYPVKMVVRGDQTCAMSYLTVLPRGMECVVFSIDGSFAASVSIMGSDPKVRPGAVDVVRHWQDLGYMILYITGRPDMQKQRVVSWLSQHNFPQGMIFFSDGLVHDPLRQKAIFLRNLMQECFIKISAAYGSTKDISVYSVLGLPASQIFIVGRPTKKYQTQCQFLSEGYAAHLAALEASHRSRPKKNNSRMILRKGSFGLHAQPEFLRKRNHLRRTMSVQQPDPPAANPKPERAQSQPESDKDHERPLPALSWARGPPKFESVP

SEQ ID NO: 33490 - protein, 116 aa, Homo sapiens
  REGION 1..116: note = ENSP00000458901
  VARIANT 1: note = Any amino acid
XGDQTCAMSYLTVLPRGMECVVFSIDGSFAASVSIMGSDPKVRPGAVDVVRHWQDLGYMILYITGRPDMQKQRVVSWLSQHNFPQGMIFFSDGLVHDPLRQKAIFLRNLMQEMCFP

SEQ ID NO: 33491 - protein, 861 aa, Homo sapiens
  REGION 1..861: note = ENSP00000245255
MTGRARARARGRARGQETAQLVGSTASQQPGYIQPRPQPPPAEGELFGRGRQRGTAGGTAKSQGLQISAGFQELSLAERGGRRRDFHDLGVNTRQNLDHVKESKTGSSGIIVRLSTNHFRLTSRPQWALYQYHIDYNPLMEARRLRSALLFQHEDLIGKCHAFDGTILFLPKRLQQKVTEVFSKTRNGEDVRITITLTNELPPTSPTCLQFYNIIFRRLLKIMNLQQIGRNYYNPNDPIDIPSHRLVIWPGFTTSILQYENSIMLCTDVSHKVLRSETVLDFMFNFYHQTEEHKFQEQVSKELIGLVVLTKYNNKTYRVDDIDWDQNPKSTFKKADGSEVSFLEYYRKQYNQEITDLKQPVLVSQPKRRRGPGGTLPGPAMLIPELCYLTGLTDKMRNDFNVMKDLAVHTRLTPEQRQREVGRLIDYIHKNDNVQRELRDWGLSFDSNLLSFSGRILQTEKIHQGGKTFDYNPQFADWSKETRGAPLISVKPLDNWLLIYTRRNYEAANSLIQNLFKVTPAMGMQMRKAIMIEVDDRTEAYLRVLQQKVTADTQIVVCLLSSNRKDKYDAIKKYLCTDCPTPSQCVVARTLGKQQTVMAIATKIALQMNCKMGGELWRVDIPLKLVMIVGIDCYHDMTAGRRSIAGFVASINEGMTRWFSRCIFQDRGQELVDGLKVCLQAALRAWNSCNEYMPSRIIVYRDGVGDGQLKTLVNYEVPQFLDCLKSIGRGYNPRLTVIVVKKRVNTRFFAQSGGRLQNPLPGTVIDVEVTRPEWYDFFIVSQAVRSGSVSPTHYNVIYDNSGLKPDHIQRLTYKLCHIYYNWPGVIRVPAPCQYAHKLAFLVGQSIHREPNLSLSNRLYYL

SEQ ID NO: 33492 - protein, 165 aa, Homo sapiens
  REGION 1..165: note = ENSP00000442086
MTGRARARARGRARGQETAQLVGSTASQQPGYIQPRPQPPPAEGELFGRGRQRGTAGGTAKSQGLQISAGFQELSLAERGGRRRDFHDLGVNTRQNLDHVKESKTGSSGIIVRLSTNHFRLTSRPQWALYQYHIDYNPLMEARRLRSALLFQHEDLIGKCHAFDG

SEQ ID NO: 33493 - protein, 122 aa, Homo sapiens
  REGION 1..122: note = ENSP00000440677
MTGRARARARGRARGQETAQLVGSTASQQPGYIQPRPQPPPAEGELFGRGRQRGTAGGTAKSQGLQISAGFQELSLAERGGRRRDFHDLGVNTRQNLDHVKESKTGSSGIIVRLSTNHFRLT

SEQ ID NO: 33494 - protein, 150 aa, Homo sapiens
  REGION 1..150: note = ENSP00000439096
MTGRARARARGRARGQETAQLVGSTASQQPGYIQPRPQPPPAEGELFGRGRQRGTAGGTAKSQGLQISAGFQELSLAERGGRRRDFHDLGVNTRQNLDHVKESKTGSSGIIVRLSTNHFRLTSRPQWALYQYHIDYNPLMEARRLRSALL

SEQ ID NO: 33495 - protein, 117 aa, Homo sapiens
  REGION 1..117: note = ENSP00000444353
MTGRARARARGRARGQETAQLVGSTASQQPGYIQPRPQPPPAEGELFGRGRQRGTAGGTAKSQGLQISAGFQELSLAERGGRRRDFHDLGVNTRQNLDHVKESKTGSSGIIVRLSTN

SEQ ID NO: 33496 - protein, 172 aa, Homo sapiens
  REGION 1..172: note = ENSP00000438582
MTGRARARARGRARGQETAQLVGSTASQQPGYIQPRPQPPPAEGELFGRGRQRGTAGGTAKSQGLQISAGFQELSLAERGGRRRDFHDLGVNTRQNLDHVKESKTGSSGIIVRLSTNHFRLTSRPQWALYQYHIDYNPLMEARRLRSALLFQHEDLIGKCHAFDGTILFLPK

SEQ ID NO: 33497 - protein, 861 aa, Homo sapiens; identical to SEQ ID NO: 33491
  REGION 1..861: note = ENSP00000481042

SEQ ID NO: 33498 - protein, 829 aa, Homo sapiens
  REGION 1..829: note = ENSP00000487688
MTGRARARARGRARGQETAQLVGSTASQQPGYIQPRPQPPPAEGELFGRGRQRGTAGGTAKSQGLQISAGFQELSLAERGGRRRDFHDLGVNTRQNLDHVKESKTGSSGIIVRLSTNHFRLTSRPQWALYQYHIDYNPLMEARRLRSALLFQHEDLIGKCHAFDGTILFLPKRLQQKVTEVFSKTRNGEDVRITITLTNELPPTSPTCLQFYNIIFRRLLKIMNLQQIGRNYYNPNDPIDIPSHRLVIWPGFTTSILQYENSIMLCTDVSHKVLRSETVLDFMFNFYHQTEEHKFQEQVSKELIGLVVLTKYNNKTYRVDDIDWDQNPKSTFKKADGSEVSFLEYYRKQYNQEITDLKQPVLVSQPKRRRGPGGTLPGPAMLIPELCYLTGLTDKMRNDFNVMKDLAVHTRLTPEQRQREVGRLIDYIHKNDNVQRELRDWGLSFDSNLLSFSGRILQTEKIHQGGKTFDYNPQFADWSKETRGAPLISVKPLDNWLLIYTRRNYEAANSLIQNLFKVTPAMGMQMRKAIMIEVDDRTEAYLRVLQQKVTADTQIVVCLLSSNRKDKYDAIKKYLCTDCPTPSQCVVARTLGKQQTVMAIATKIALQMNCKMGGELWRVDIPLKLVMIVGIDCYHDMTAGRRSIAGFVASINEGMTRWFSRCIFQDRGQELVDGLKVCLQAALRAWNSCNEYMPSRIIVYRDGVGDGQLKTLVNYEVPQFLDCLKSIGRGYNPRLTVIVVKKRVNTRFFAQSGGRLQNPLPGTVIDVEVTRPEWYDFFIVSQAVRSGSVSPTHYNVIYDNSGLKPDHIQRLTYKLCHIYYNWPVSASTC

SEQ ID NO: 33499 - protein, 165 aa, Homo sapiens; identical to SEQ ID NO: 33492
  REGION 1..165: note = ENSP00000487799

SEQ ID NO: 33500 - protein, 122 aa, Homo sapiens; identical to SEQ ID NO: 33493
  REGION 1..122: note = ENSP00000487920

SEQ ID NO: 33501 - protein, 150 aa, Homo sapiens; identical to SEQ ID NO: 33494
  REGION 1..150: note = ENSP00000488716

SEQ ID NO: 33502 - protein, 117 aa, Homo sapiens; identical to SEQ ID NO: 33495
  REGION 1..117: note = ENSP00000488677

SEQ ID NO: 33503 - protein, 172 aa, Homo sapiens; identical to SEQ ID NO: 33496
  REGION 1..172: note = ENSP00000488197

SEQ ID NO: 33504 - protein, 805 aa, Homo sapiens
  REGION 1..805: note = ENSP00000325296
MNAVGSPEGQELQKLGSGAWDNPAYSGPPSPHGTLRVCTISSTGPLQPQPKKPEDEPQETAYRTQVSSCCLHICQGIRGLWGTTLTENTAENRELYIKTTLRELLVYIVFLVDICLLTYGMTSSSAYYYTKVMSELFLHTPSDTGVSFQAISSMADFWDFAQGPLLDSLYWTKWYNNQSLGHGSHSFIYYENMLLGVPRLRQLKVRNDSCVVHEDFREDILSCYDVYSPDKEEQLPFGPFNGTAWTYHSQDELGGFSHWGRLTSYSGGGYYLDLPGSRQGSAEALRALQEGLWLDRGTRVVFIDFSVYNANINLFCVLRLVVEFPATGGAIPSWQIRTVKLIRYVSNWDFFIVGCEVIFCVFIFYYVVEEILELHIHRLRYLSSIWNILDLVVILLSIVAVGFHIFRTLEVNRLMGKLLQQPNTYADFEFLAFWQTQYNNMNAVNLFFAWIKIFKYISFNKTMTQLSSTLARCAKDILGFAVMFFIVFFAYAQLGYLLFGTQVENFSTFIKCIFTQFRIILGDFDYNAIDNANRILGPAYFVTYVFFVFFVLLNMFLAIINDTYSEVKEELAGQKDELQLSDLLKQGYNKTLLRLRLRKERVSDVQKVLQGGEQEIQFEDFTNTLRELGHAEHEITELTATFTKFDRDGNRILDEKEQEKMRQDLEEERVALNTEIEKLGRSIVSSPQGKSGPEAARAGGWVSGEEFYMLTRRVLQLETVLEGVVSQIDAVGSKLKMLERKGWLAPSPGVKEQAIWKHPQPAPAVTPDPWGVQGGQESEVPYKREEEALEERRLSRGEIPTLQRS

SEQ ID NO: 33505 - protein, 62 aa, Homo sapiens
  REGION 1..62: note = ENSP00000434019
  VARIANT 1: note = Any amino acid
XPLQPQPKKPEDEPQETAYRTQVSSCCLHICQGIREVPYKREEEALEERRLSRGEIPTLQRS

SEQ ID NO: 33506 - protein, 39 aa, Homo sapiens
  REGION 1..39: note = ENSP00000436514
  VARIANT 1: note = Any amino acid
XEPQETAYRTQVSSCCLHICQGIRGISPMPLRTLGNNPD

SEQ ID NO: 33507 - protein, 71 aa, Homo sapiens
  REGION 1..71: note = ENSP00000434224
MNAVGSPEGQELQKLGSGAWDNPAYSGPPSPHGTLRVCTISSTGPLQPQPKKPEDEPQETAYRTQDFGEQP

SEQ ID NO: 33508 - protein, 493 aa, Homo sapiens
  REGION 1..493: note = ENSP00000294964
MRRRRAAVAAGFCASFLLGSVLNVLFAPGSEPPRPGQSPEPSPAPGPGRRGGRGELARQIRARYEEVQRYSRGGPGPGAGRPERRRLMDLAPGGPGLPRPRPPWARPLSDGAPGWPPAPGPGSPGPGPRLGCAALRNVSGAQYMGSGYTKAVYRVRLPGGAAVALKAVDFSGHDLGSCVREFGVRRGCYRLAAHKLLKEMVLLERLRHPNVLQLYGYCYQDSEDIPDTLTTITELGAPVEMIQLLQTSWEDRFRICLSLGRLLHHLAHSPLGSVTLLDFRPRQFVLVDGELKVTDLDDARVEETPCAGSTDCILEFPARNFTLPCSAQGWCEGMNEKRNLYNAYRFFFTYLLPHSAPPSLRPLLDSIVNATGELAWGVDETLAQLEKVLHLYRSGQYLQNSTASSSTEYQCIPDSTIPQEDYRCWPSYHHGSCLLSVFNLAEAVDVCESHAQCRAFVVTNQTTWTGRQLVFFKTGWSQVVPDPNKTTYVKASG

SEQ ID NO: 33509 - protein, 181 aa, Homo sapiens
  REGION 1..181: note = ENSP00000385220
MRRRRAAVAAGFCASFLLGSVLNVLFAPGSEPPRPGQSPEPSPAPGPGRRGGRGELARQIRARYEEAGPRLPAQAPPARARAWAAPRFATCPARSTWAQATPRPCTGSACPAVPRWRSRRWTLAATIWAAACASSGYGGAAIGWRPTSCLRRWCCWSGCGTPTCCSSMATATRTARTSQTP

SEQ ID NO: 33510 - protein, 76 aa, Homo sapiens
  REGION 1..76: note = ENSP00000379696
MTDVETTYADFIASGRTGRRNAIHDILVSSASGNSNELALKLAGLDINKTEGEEDAQRSSTEQSGEAQGEAAKSES

SEQ ID NO: 33511 - protein, 76 aa, Homo sapiens; identical to SEQ ID NO: 33510
  REGION 1..76: note = ENSP00000336552

SEQ ID NO: 33512 - protein, 76 aa, Homo sapiens; identical to SEQ ID NO: 33510
  REGION 1..76: note = ENSP00000430887

SEQ ID NO: 33513 - protein, 568 aa, Homo sapiens
  REGION 1..568: note = ENSP00000392855
MLERPPALAMPMPTEGTPPPLSGTPIPVPAYFRHAEPGFSLKRPRGLSRSLPPPPPAKGSIPISRLFPPRTPGWHQLQPRRVSFRGEASETLQSPGYDPSRPESFFQQSFQRLSRLGHGSYGEVFKVRSKEDGRLYAVKRSMSPFRGPKDRARKLAEVGSHEKVGQHPCCVRLEQAWEEGGILYLQTELCGPSLQQHCEAWGASLPEAQVWGYLRDTLLALAHLHSQGLVHLDVKPANIFLGPRGRCKLGDFGLLVELGTAGAGEVQEGDPRYMAPELLQGSYGTAADVFSLGLTILEVACNMELPHGGEGWQQLRQGYLPPEFTAGLSSELRSVLVMMLEPDPKLRATAEALLALPVLRQPRAWGVLWCMAAEALSRGWALWQALLALLCWLWHGLAHPASWLQPLGPPATPPGSPPCSLLLDSSLSSNWDDDSLGPSLSPEAVLARTVGSTSTPRSRCTPRVLTPLRLSPAAEPSAPGLGPAAEAPCCVEQRGFLSRHIPRSFSAFQAAPPKSACNALHLHGHTQPSAFVWSLTCSSHHGRTFEARTKVDPLFKICGGFLTVFADL

SEQ ID NO: 33514 - protein, 480 aa, Homo sapiens
  REGION 1..480: note = ENSP00000397739
MLERPPALAMPMPTEGTPPPLSGTPIPVPAYFRHAEPGFSLKRPRGLSRSLPPPPPAKGSIPISRLFPPRTPGWHQLQPRRVSFRGEASETLQSPGYDPSRPESFFQQSFQRLSRLGHGSYGEVFKVRSKEDGRLYAVKRSMSPFRGPKDRARKLAEVGSHEKVGQHPCCVRLEQAWEEGGILYLQTELCGPSLQQHCEAWGASLPEAQVWGYLRDTLLALAHLHSQGLVHLDVKPANIFLGPRGRCKLGDFGLLVELGTAGAGEVQEGDPRYMAPELLQGSYGTAADVFSLGLTILEVACNMELPHGGEGWQQLRQGYLPPEFTAGLSSELRSVLVMMLEPDPKLRATAEALLALPVLRQPRAWGVLWCMAAEALSRGWALWQALLALLCWLWHGLAHPASWLQPLGPPATPPGSPPCSLLLDSSLSSNWDDDSLGPGHPPCLACPPAGLHSPLRLSWPGLWGAPPPPGAGAHPGMPWT

SEQ ID NO: 33515 - protein, 499 aa, Homo sapiens
  REGION 1..499: note = ENSP00000262300
MLERPPALAMPMPTEGTPPPLSGTPIPVPAYFRHAEPGFSLKRPRGLSRSLPPPPPAKGSIPISRLFPPRTPGWHQLQPRRVSFRGEASETLQSPGYDPSRPESFFQQSFQRLSRLGHGSYGEVFKVRSKEDGRLYAVKRSMSPFRGPKDRARKLAEVGSHEKVGQHPCCVRLEQAWEEGGILYLQTELCGPSLQQHCEAWGASLPEAQVWGYLRDTLLALAHLHSQGLVHLDVKPANIFLGPRGRCKLGDFGLLVELGTAGAGEVQEGDPRYMAPELLQGSYGTAADVFSLGLTILEVACNMELPHGGEGWQQLRQGYLPPEFTAGLSSELRSVLVMMLEPDPKLRATAEALLALPVLRQPRAWGVLWCMAAEALSRGWALWQALLALLCWLWHGLAHPASWLQPLGPPATPPGSPPCSLLLDSSLSSNWDDDSLGPSLSPEAVLARTVGSTSTPRSRCTPRDALDLSDINSEPPRGSFPSFEPRNLLSLFEDTLDPT

SEQ ID NO: 33516 - protein, 60 aa, Homo sapiens
  REGION 1..60: note = ENSP00000459880
  VARIANT 1: note = Any amino acid
XAEGGPCGRPCLPCSAGSGMGWLTLPAGYSPWARQPPRLAHHPAVCSWTAASPATGMTTA

SEQ ID NO: 33517 - protein, 490 aa, Homo sapiens
  REGION 1..490: note = ENSP00000458943
MPMPTEGTPPPLSGTPIPVPAYFRHAEPGFSLKRPRGLSRSLPPPPPAKGSIPISRLFPPRTPGWHQLQPRRVSFRGEASETLQSPGYDPSRPESFFQQSFQRLSRLGHGSYGEVFKVRSKEDGRLYAVKRSMSPFRGPKDRARKLAEVGSHEKVGQHPCCVRLEQAWEEGGILYLQTELCGPSLQQHCEAWGASLPEAQVWGYLRDTLLALAHLHSQGLVHLDVKPANIFLGPRGRCKLGDFGLLVELGTAGAGEVQEGDPRYMAPELLQGSYGTAADVFSLGLTILEVACNMELPHGGEGWQQLRQGYLPPEFTAGLSSELRSVLVMMLEPDPKLRATAEALLALPVLRQPRAWGVLWCMAAEALSRGWALWQALLALLCWLWHGLAHPASWLQPLGPPATPPGSPPCSLLLDSSLSSNWDDDSLGPSLSPEAVLARTVGSTSTPRSRCTPRDALDLSDINSEPPRGSFPSFEPRNLLSLFEDTLDPT

SEQ ID NO: 33518 - protein, 430 aa, Homo sapiens
  REGION 1..430: note = ENSP00000460868
MLERWHQLQPRRVSFRGEASETLQSPGYDPSRPESFFQQSFQRLSRLGHGSYGEVFKVRSKEDGRLYAVKRSMSPFRGPKDRARKLAEVGSHEKVGQHPCCVRLEQAWEEGGILYLQTELCGPSLQQHCEAWGASLPEAQVWGYLRDTLLALAHLHSQGLVHLDVKPANIFLGPRGRCKLGDFGLLVELGTAGAGEVQEGDPRYMAPELLQGSYGTAADVFSLGLTILEVACNMELPHGGEGWQQLRQGYLPPEFTAGLSSELRSVLVMMLEPDPKLRATAEALLALPVLRQPRAWGVLWCMAAEALSRGWALWQALLALLCWLWHGLAHPASWLQPLGPPATPPGSPPCSLLLDSSLSSNWDDDSLGPSLSPEAVLARTVGSTSTPRSRCTPRDALDLSDINSEPPRGSFPSFEPRNLLSLFEDTLDPT

SEQ ID NO: 33519 - protein, 490 aa, Homo sapiens; identical to SEQ ID NO: 33517
  REGION 1..490: note = ENSP00000459123

SEQ ID NO: 33520 - protein, 447 aa, Homo sapiens
  REGION 1..447: note = ENSP00000371675
MPMPTEGTPPPLSGTPIPVPAYFRHAEPGFSLKRPRGLSRSLPPPPPAKGSIPISRLFPPRTPGWHQLQPRRVSFRGEASETLQSPGYDPSRPESFFQQSFQRLSRLGHGSYGEVFKVRSKEDGRLYAVKRSMSPFRGPKDRARKLAEVGSHEKVGQHPCCVRLEQAWEEGGILYLQTELCGPSLQQHCEAWGASLPEAQVWGYLRDTLLALAHLHSQGLVHLDVKPANIFLGPRGRCKLGDFGLLVELGTAGAGEVQEGDPRYMAPELLQGSYGTAADVFSLGLTILEVACNMELPHGGEGWQQLRQGYLPPEFTAGLSSELRSVLVMMLEPDPKLRATAEALLALPVLRQPRAWGVLWCMAAEALSRGWALWQALLALLCWLWHGLAHPASWLQPLGPPATPPGSPPCSLLLDSSLSSNWDDDSLGPCVLKRTEGALECSQMEGL

SEQ ID NO: 33521 - protein, 274 aa, Homo sapiens
  REGION 1..274: note = ENSP00000458545
MPMPTEGTPPPLSGTPIPVPAYFRHAEPGFSLKRPRGLSRSLPPPPPAKGSIPISRLFPPRTPGWHQLQPRRVSFRGEASETLQSPGYDPSRPESFFQQSFQRLSRLGHGSYGEVFKVRSKEDGRLYAVKRSMSPFRGPKDRARKLAEVGSHEKVGQHPCCVRLEQAWEEGGILYLQTELCGPSLQQHCEAWGASLPEAQVWGYLRDTLLALAHLHSQGLVHLDVKPANIFLGPRGRCKLGDFGLLVELGTAGAGEVQEGDPRYMAPELLQGSY

SEQ ID NO: 33522 - protein, 215 aa, Homo sapiens
  REGION 1..215: note = ENSP00000460598
MLERPPALAMPMPTEGTPPPLSGTPIPVPAYFRHAEPGFSLKRPRGLSRSLPPPPPAKGSIPISRLFPPRTPGWHQLQPRRVSFRGEASETLQSPGYDPSRPESFFQQSFQRLSRLGHGSYGEVFKLLFPPRDTSKRSPGVSAGRPWLLRRWVSTDPARGMEVRSKEDGRLYAVKRSMSPFRGPKDRARKLAEVGSHEKVGQHPCCVRLEQAWEE

SEQ ID NO: 33523 - protein, 169 aa, Homo sapiens
  REGION 1..169: note = ENSP00000461330
MLERPPALAMPMPTEGTPPPLSGTPIPVPAYFRHAEPGFSLKRPRGLSRSLPPPPPAKGSIPISRLFPPRTPGWHQLQPRRVSFRGEASETLQSPGYDPSRPESFFQQSFQRLSRLGHGSYGEVFKVRSKEDGRLYAVKRSMSPFRGPKDRARKLAEVGSHEKVGQHPC

SEQ ID NO: 33524 - protein, 147 aa, Homo sapiens
  REGION 1..147: note = ENSP00000458842
MLERPPALAMPMPTEGTPPPLSGTPIPVPAYFRHAEPGFSLKRPRGLSRSLPPPPPAKGSIPISRLFPPRTPGWHQLQPRRVSFRGEASETLQSPGYDPSRPESFFQQSFQRLSRLGHGSYGEVFKVRSKEDGRLYAVKRSMSPFRG

SEQ ID NO: 33525 - protein, 50 aa, Homo sapiens
  REGION 1..50: note = ENSP00000461628
MLERPPALAMPMPTEGTPPPLSGTPIPVPAYFRHAEPGFSLKRPRGLSRS

SEQ ID NO: 33526 - protein, 472 aa, Homo sapiens
  REGION 1..472: note = ENSP00000298282
MMQHASPAPALTMMATQNVPPPPYQDSPQMTATAQPPSKAQAVHISAPSAAASTPVPSAPIDPQAQLEADKRAVYRHPLFPLLTLLFEKCEQATQGSECITSASFDVDIENFVHQQEQEHKPFFSDDPELDNLMVKAIQVLRIHLLELEKVNELCKDFCNRYITCLKTKMHSDNLLRNDLGGPYSPNQPSINLHSQDLLQNSPNSMSGVSNNPQGIVVPASALQQGNIAMTTVNSQVVSGGALYQPVTMVTSQGQVVTQAIPQGAIQIQNTQVNLDLTSLLDNEDKKSKNKRGVLPKHATNIMRSWLFQHLMHPYPTEDEKRQIAAQTNLTLLQVNNWFINARRRILQPMLDASNPDPAPKAKKIKSQHRPTQRFWPNSIAAGVLQQQGGAPGTNPDGSINLDNLQSLSSDSATMAMQQAMMAAHDDSLDGTEEEDEDEMEEEEEEELEEEVDELQTTNVSDLGLEHSDSLE

SEQ ID NO: 33527 - protein, 39 aa, Homo sapiens
  REGION 1..39: note = ENSP00000431599
MMQHASPAPALTMMATQNVPPPPYQDSPQMTATAQPPSK

SEQ ID NO: 33528 - protein, 40 aa, Homo sapiens
  REGION 1..40: note = ENSP00000434377
MMQHASPAPALTMMATQNVPPPPYQDSPQAPSFPAPDAAV

SEQ ID NO: 33529 - protein, 40 aa, Homo sapiens
  REGION 1..40: note = ENSP00000434255
MMQHASPAPALTMMATQNVPPPPYQDSPQMTATAQPPSKA

SEQ ID NO: 33530 - protein, 98 aa, Homo sapiens
  REGION 1..98: note = ENSP00000453374
MMQHASPAPALTMMATQNVPPPPYQDSPQMTATAQPPSKAQAVHISAPSAAASTPVPSAPIDPQAQLEADKRAVYRHPLFPLLTLLFEKCEQATQGSE

SEQ ID NO: 33531 - protein, 247 aa, Homo sapiens
  REGION 1..247: note = ENSP00000434517
MESWTPRPSAVASGMSWEAGGIRTTSRPEAGVCSLALPSDLQLDRRGAEGPEAERLRAARVQEQVRARLLQLGQQPRHNGAAEPEPEAETARGTSRGQYHTLQAGFSSRSQGLSGDKTSGFRPIAKPAYSPASWSSRSAVDLSCSRRLSSAHNGGSAFGAAGYGGAQPTPPMPTRPVSFHERGGVGSRADYDTLSLRSLRLGPGGLDDRYSLVSEQLEPAATSTYRAFAYERQASSSSSRAGGLDWP

SEQ ID NO: 33532 - protein, 197 aa, Homo sapiens
  REGION 1..197: note = ENSP00000435383
MPTRPVSFHERGGVGSRADYDTLSLRSLRLGPGGLDDRYSLVSEQLEPAATSTYRAFAYERQASSSSSRAGGLDWPEATEVSPSRTIRAPAVRTLQRFQSSHRSRGVGGAVPGAVLEPVARAPSVRSLSLSLADSGHLPDVHGFNSYGSHRTLQRLSSGFDDIDLPSAVKYLMASDPNLQVLGAAYIQHKCYSDAAA

SEQ ID NO: 33533 - protein, 120 aa, Homo sapiens
  REGION 1..120: note = ENSP00000435522
MPTRPVSFHERGGVGSRADYDTLSLRSLRLGPGGLDDRYSLVSEQLEPAATSTYRAFAYERQASSSSSRAGGLDWPEATEVSPSRTIRAPAVRTLQRFQSSHRSRGVGGAVPGAVLEPVA

SEQ ID NO: 33534 - protein, 156 aa, Homo sapiens
  REGION 1..156: note = ENSP00000434110
MPTRPVSFHERGGVGSRADYDTLSLRSLRLGPGGLDDRYSLVSEQLEPAATSTYRAFAYERQASSSSSRAGGLDWPEATEVSPSRTIRAPAVRTLQRFQSSHRSRGVGGAVPGAVLEPVARAPSVRSLSLSLADSGHLPDVHGFNSYGSHRTLQRL

SEQ ID NO: 33535 - protein, 797 aa, Homo sapiens
  REGION 1..797: note = ENSP00000331678
MQDGNFLLSALQPEAGVCSLALPSDLQLDRRGAEGPEAERLRAARVQEQVRARLLQLGQQPRHNGAAEPEPEAETARGTSRGQYHTLQAGFSSRSQGLSGDKTSGFRPIAKPAYSPASWSSRSAVDLSCSRRLSSAHNGGSAFGAAGYGGAQPTPPMPTRPVSFHERGGVGSRADYDTLSLRSLRLGPGGLDDRYSLVSEQLEPAATSTYRAFAYERQASSSSSRAGGLDWPEATEVSPSRTIRAPAVRTLQRFQSSHRSRGVGGAVPGAVLEPVARAPSVRSLSLSLADSGHLPDVHGFNSYGSHRTLQRLSSGFDDIDLPSAVKYLMASDPNLQVLGAAYIQHKCYSDAAAKKQARSLQAVPRLVKLFNHANQEVQRHATGAMRNLIYDNADNKLALVEENGIFELLRTLREQDDELRKNVTGILWNLSSSDHLKDRLARDTLEQLTDLVLSPLSGAGGPPLIQQNASEAEIFYNATGFLRNLSSASQATRQKMRECHGLVDALVTSINHALDAGKCEDKSVENAVCVLRNLSYRLYDEMPPSALQRLEGRGRRDLAGAPPGEVVGCFTPQSRRLRELPLAADALTFAEVSKDPKGLEWLWSPQIVGLYNRLLQRCELNRHTTEAAAGALQNITAGDRRWAGVLSRLALEQERILNPLLDRVRTADHHQLRSLTGLIRNLSRNARNKDEMSTKVVSHLIEKLPGSVGEKSPPAEVLVNIIAVLNNLVVASPIAARDLLYFDGLRKLIFIKKKRDSPDSEKSSRAASSLLANLWQYNKLHRDFRAKGYRKEDFLGP

SEQ ID NO: 33536 - protein, 212 aa, Homo sapiens
  REGION 1..212: note = ENSP00000435478
MQDGNFLLSALQPEAETARGTSRGQYHTLQAGFSSRSQGLSGDKTSGFRPIAKPAYSPASWSSRSAVDLSCSRRLSSAHNGGSAFGAAGYGGAQPTPPMPTRPVSFHERGGVGSRADYDTLSLRSLRLGPGGLDDRYSLVSEQLEPAATSTYRAFAYERQASSSSSRAGGLDWPEATEVSPSRTIRAPAVRTLQRFQSSHRSRGVGGAVPGA

SEQ ID NO: 33537 - protein, 115 aa, Homo sapiens
  REGION 1..115: note = ENSP00000436847
  VARIANT 1: note = Any amino acid
XFDGLRKLIFIKKKRDSPDSEKSSRAASSLLANLWQYNKLHRDFRAVRFPSPGQAGTRVQGMGRRGRVSEEAHGRMETRDPERKGPGHTQHTAGGTAGRGPHGQTCTLTLGLSPL

SEQ ID NO: 33538 - protein, 162 aa, Homo sapiens
  REGION 1..162: note = ENSP00000320337
MRAPIPEPKPGDLIEIFRPFYRHWAIYVGDGYVVHLAPPSEVAGAGAASVMSALTDKAIVKKELLYDVAGSDKYQVNNKHDDKYSPLPCSKIIQRAEELVGQEVLYKLTSENCEHFVNELRYGVARSDQVRDVIIAASVAGMGLAAMSLIGVMFSRNKRQKQ

SEQ ID NO: 33539 - protein, 27 aa, Homo sapiens
  REGION 1..27: note = ENSP00000442576
MSALTDKAIVKKELLYDVAGSDKYQVN

SEQ ID NO: 33540 - protein, 162 aa, Homo sapiens; identical to SEQ ID NO: 33538
  REGION 1..162: note = ENSP00000389124

SEQ ID NO: 33541 - protein, 161 aa, Homo sapiens [sequence omitted]

SEQ ID NO: 33542 - protein, 509 aa, Homo sapiens
  REGION 1..509: note = ENSP00000215885
MGVQAGLFGMLGFLGVALGGSPALRWYRTSCHLTKAVPGNPLGYLSFLAKDAQGLALIHARWDAHRRLQSCSWEDEPELTAAYGALCAHETAWGSFIHTPGPELQRALATLQSQWEACRALEESPAGARKKRAAGQSGVPGGGHQREKRGWTMPGTLWCGVGDSAGNSSELGVFQGPDLCCREHDRCPQNISPLQYNYGIRNYRFHTISHCDCDTRFQQCLQNQHDSISDIVGVAFFNVLEIPCFVLEEQEACVAWYWWGGCRMYGTVPLARLQPRTFYNASWSSRATSPTPSSRSPAPPKPRQKQHLRKGPPHQKGSKRPSKANTTALQDPMVSPRLDVAPTGLQGPQGGLKPQGARWVCRSFRRHLDQCEHQIGPREIEFQLLNSAQEPLFHCNCTRRLARFLRLHSPPEVTNMLWELLGTTCFKLAPPLDCVEGKNCSRDPRAIRVSARHLRRLQQRRHQLQDKGTDERQPWPSEPLRGPMSFYNQCLQLTQAARRPDRQQKSWSQ

SEQ ID NO: 33543 - protein, 749 aa, Homo sapiens
  REGION 1..749: note = ENSP00000356436
MSFIDPYQHIIVEHQYSHKFTVVVLRATKVTKGAFGDMLDTPDPYVELFISTTPDSRKRTRHFNNDINPVWNETFEFILDPNQENVLEITLMDANYVMDETLGTATFTVSSMKVGEKKEVPFIFNQVTEMVLEMSLEVCSCPDLRFSMALCDQEKTFRQQRKEHIRESMKKLLGPKNSEGLHSARDVPVVAILGSGGGFRAMVGFSGVMKALYESGILDCATYVAGLSGSTWYMSTLYSHPDFPEKGPEEINEELMKNVSHNPLLLLTPQKVKRYVESLWKKKSSGQPVTFTDIFGMLIGETLIHNRMNTTLSSLKEKVNTAQCPLPLFTCLHVKPDVSELMFADWVEFSPYEIGMAKYGTFMAPDLFGSKFFMGTVVKKYEENPLHFLMGVWGSAFSILFNRVLGVSGSQSRGSTMEEELENITTKHIVSNDSSDSDDESHEPKGTENEDAGSDYQSDNQASWIHRMIMALVSDSALFNTREGRAGKVHNFMLGLNLNTSYPLSPLSDFATQDSFDDDELDAAVADPDEFERIYEPLDVKSKKIHVVDSGLTFNLPYPLILRPQRGVDLIISFDFSARPSDSSPPFKELLLAEKWAKMNKLPFPKIDPYVFDREGLKECYVFKPKNPDMEKDCPTIIHFVLANINFRKYRAPGVPRETEEEKEIADFDIFDDPESPFSTFNFQYPNQAFKRLHDLMHFNTLNNIDVIKEAMVESIEYRRQNPSRCSVSLSNVEARRFFNKEFLSKPKA

SEQ ID NO: 33544 - protein, 868 aa, Homo sapiens
  REGION 1..868: note = ENSP00000382434
MSLQASEGCPGLGTNVFVPQSPQTDEEGSRSGRSFSEFEDTQDLDTPGLPPFCPMAPWGSEEGLSPCHLLTVRVIRMKNVRQADMLSQTDCFVSLWLPTASQKKLRTRTISNCPNPEWNESFNFQIQSRVKNVLELSVCDEDTVTPDDHLLTVLYDLTKLCFRKKTHVKFPLNPQGMEELEVEFLLEESPSPPETLVTNGVLVSRQVSCLEVHAQSRRRRKREKMKDLLVMVNESFENTQRVRPCLEPCCPTSACFQTAACFHYPKYFQSQVHVEVPKSHWSCGLCCRSRKKGPISQPLDCLSDGQVMTLPVGESYELHMKSTPCPETLDVRLGFSLCPAELEFLQKRKVVVAKALKQVLQLEEDLQEDEVPLIAIMATGGGTRSMTSMYGHLLGLQKLNLLDCASYITGLSGATWTMATLYRDPDWSSKNLEPAIFEARRHVVKDKLPSLFPDQLRKFQEELRQRSQEGYRVTFTDFWGLLIETCLGDERNECKLSDQRAALSCGQNPLPIYLTINVKDDVSNQDFREWFEFSPYEVGLQKYGAFIPSELFGSEFFMGRLVKRIPESRICYMLGLWSSIFSLNLLDAWNLSHTSEEFFHRWTREKVQDIEDEPILPEIPKCDANILETTVVIPGSWLSNSFREILTHRSFVSEFHNFLSGLQLHTNYLQNGQFSRWKDTVLDGFPNQLTESANHLCLLDTAFFVNSSYPPLLRPERKADLIIHLNYCAGSQTKPLKQTCEYCTVQNIPFPKYELPDENENLKECYLMENPQEPDAPIVTFFPLINDTFRKYKAPGVERSPEELEQGQVDIYGPKTPYATKELTYTEATFDKLVKLSEYNILNNKDTLLQALRLAVEKKKRLKGQCPS

SEQ ID NO: 33545 - protein, 138 aa, Homo sapiens
  REGION 1..138: note = ENSP00000364249
MKGLLPLAWFLACSVPAVQGGLLDLKSMIEKVTGKNALTNYGFYGCYCGWGGRGTPKDGTDWCCWAHDHCYGRLEEKGCNIRTQSYKYRFAWGVVTCEPGPFCHVNLCACDRKLVYCLKRNLRSYNPQYQYFPNILCS

SEQ ID NO: 33546 - protein, 441 aa, Homo sapiens
  REGION 1..441: note = ENSP00000274793
MVPPKLHVLFCLCGCLAVVYPFDWQYINPVAHMKSSAWVNKIQVLMAAASFGQTKIPRGNGPYSVGCTDLMFDHTNKGTFLRLYYPSQDNDRLDTLWIPNKEYFWGLSKFLGTHWLMGNILRLLFGSMTTPANWNSPLRPGEKYPLVVFSHGLGAFRTLYSAIGIDLASHGFIVAAVEHRDRSASATYYFKDQSAAEIGDKSWLYLRTLKQEEETHIRNEQVRQRAKECSQALSLILDIDHGKPVKNALDLKFDMEQLKDSIDREKIAVIGHSFGGATVIQTLSEDQRFRCGIALDAWMFPLGDEVYSRIPQPLFFINSEYFQYPANIIKMKKCYSPDKERKMITIRGSVHQNFADFTFATGKIIGHMLKLKGDIDSNVAIDLSNKASLAFLQKHLGLHKDFDQWDCLIEGDDENLIPGTNINTTNQHIMLQNSSGIEKYN

SEQ ID NO: 33547 - protein, 441 aa, Homo sapiens; identical to SEQ ID NO: 33546
  REGION 1..441: note = ENSP00000445666

SEQ ID NO: 33548 - protein, 500 aa, Homo sapiens
  REGION 1..500: note = ENSP00000325546
MATVIPGDLSEVRDTQKVPSGKRKRGETKPRKNFPCQLCDKAFNSVEKLKVHSYSHTGERPYKCIQQDCTKAFVSKYKLQRHMATHSPEKTHKCNYCEKMFHRKDHLKNHLHTHDPNKETFKCEECGKNYNTKLGFKRHLALHAATSGDLTCKVCLQTFESTGVLLEHLKSHAGKSSGGVKEKKHQCEHCDRRFYTRKDVRRHMVVHTGRKDFLCQYCAQRFGRKDHLTRHMKKSHNQELLKVKTEPVDFLDPFTCNVSVPIKDELLPVMSLPSSELLSKPFTNTLQLNLYNTPFQSMQSSGSAHQMITTLPLGMTCPIDMDTVHPSHHLSFKYPFSSTSYAISIPEKEQPLKGEIESYLMELQGGVPSSSQDSQASSSSKLGLDPQIGSLDDGAGDLSLSKSSISISDPLNTPALDFSQLFNFIPLNGPPYNPLSVGSLGMSYSQEEAHSSVSQLPPQTQDLQDPANTIGLGSLHSLSAAFTSSLSTSTTLPRFHQAFQ

SEQ ID NO: 33549 - protein, 418 aa, Homo sapiens
  REGION 1..418: note = ENSP00000404067
MATHSPEKTHKCNYCEKMFHRKDHLKNHLHTHDPNKETFKCEECGKNYNTKLGFKRHLALHAATSGDLTCKVCLQTFESTGVLLEHLKSHAGKSSGGVKEKKHQCEHCDRRFYTRKDVRRHMVVHTGRKDFLCQYCAQRFGRKDHLTRHMKKSHNQELLKVKTEPVDFLDPFTCNVSVPIKDELLPVMSLPSSELLSKPFTNTLQLNLYNTPFQSMQSSGSAHQMITTLPLGMTCPIDMDTVHPSHHLSFKYPFSSTSYAISIPEKEQPLKGEIESYLMELQGGVPSSSQDSQASSSSKLGLDPQIGSLDDGAGDLSLSKSSISISDPLNTPALDFSQLFNFIPLNGPPYNPLSVGSLGMSYSQEEAHSSVSQLPPQTQDLQDPANTIGLGSLHSLSAAFTSSLSTSTTLPRFHQAFQ

SEQ ID NO: 33550 - protein, 500 aa, Homo sapiens; identical to SEQ ID NO: 33548
  REGION 1..500: note = ENSP00000416537

SEQ ID NO: 33551 - protein, 562 aa, Homo sapiens
  REGION 1..562: note = ENSP00000392045
MDAMKRGLCCVLLLCGAVFVSPSQEIHARFRRGARSYQVICRDEKTQMIYQQHQSWLRPVLRSNRVEYCWCNSGRAQCHSVPVKSCSEPRCFNGGTCQQALYFSDFVCQCPEGFAGKCCEIDTRATCYEDQGISYRGTWSTAESGAECTNWNSSALAQKPYSGRRPDAIRLGLGNHNYCRNPDRDSKPWCYVFKAGKYSSEFCSTPACSEGNSDCYFGNGSAYRGTHSLTESGASCLPWNSMILIGKVYTAQNPSAQALGLGKHNYCRNPDGDAKPWCHVLKNRRLTWEYCDVPSCSTCGLRQYSQPQFRIKGGLFADIASHPWQAAIFAKHRRSPGERFLCGGILISSCWILSAAHCFQERFPPHHLTVILGRTYRVVPGEEEQKFEVEKYIVHKEFDDDTYDNDIALLQLKSDSSRCAQESSVVRTVCLPPADLQLPDWTECELSGYGKHEALSPFYSERLKEAHVRLYPSSRCTSQHLLNRTVTDNMLCAGDTRSGGPQANLHDACQGDSGGPLVCLNDGRMTLVGIISWGLGCGQKDVPGVYTKVTNYLDWIRDNMRP

SEQ ID NO: 33552 - protein, 562 aa, Homo sapiens; identical to SEQ ID NO: 33551
  REGION 1..562: note = ENSP00000220809

SEQ ID NO: 33553 - protein, 516 aa, Homo sapiens
  REGION 1..516: note = ENSP00000270188
MDAMKRGLCCVLLLCGAVFVSPSQEIHARFRRGARSYQGCSEPRCFNGGTCQQALYFSDFVCQCPEGFAGKCCEIDTRATCYEDQGISYRGTWSTAESGAECTNWNSSALAQKPYSGRRPDAIRLGLGNHNYCRNPDRDSKPWCYVFKAGKYSSEFCSTPACSEGNSDCYFGNGSAYRGTHSLTESGASCLPWNSMILIGKVYTAQNPSAQALGLGKHNYCRNPDGDAKPWCHVLKNRRLTWEYCDVPSCSTCGLRQYSQPQFRIKGGLFADIASHPWQAAIFAKHRRSPGERFLCGGILISSCWILSAAHCFQERFPPHHLTVILGRTYRVVPGEEEQKFEVEKYIVHKEFDDDTYDNDIALLQLKSDSSRCAQESSVVRTVCLPPADLQLPDWTECELSGYGKHEALSPFYSERLKEAHVRLYPSSRCTSQHLLNRTVTDNMLCAGDTRSGGPQANLHDACQGDSGGPLVCLNDGRMTLVGIISWGLGCGQKDVPGVYTKVTNYLDWIRDNMRP

SEQ ID NO: 33554 - protein, 499 aa, Homo sapiens
  REGION 1..499: note = ENSP00000428886
MDAMKRGLCCVLLLCGAVFVSPSQEIHARFRRGARSYQVICRDEKTQMIYQQHQSWLRPVLRSNRVEYCWCNSGRAQCHSVPVKSCSEPRCFNGGTCQQALYFSDFVCQCPEGFAGKCCEIDSKPWCYVFKAGKYSSEFCSTPACSEGNSDCYFGNGSAYRGTHSLTESGASCLPWNSMILIGKVYTAQNPSAQALGLGKHNYCRNPDGDAKPWCHVLKNRRLTWEYCDVPSCSTCGLRQYSQPQFRIKGGLFADIASHPWQAAIFAKHRRSPGERFLCGGILISSCWILSAAHCFQERFPPHHLTVILGRTYRVVPGEEEQKFEVEKYIVHKEFDDDTYDNDIALLQLKSDSSRCAQESSVVRTVCLPPADLQLPDWTECELSGYGKHEALSPFYSERLKEAHVRLYPSSRCTSQHLLNRTVTDNMLCAGDTRSGGPQANLHDACQGDSGGPLVCLNDGRMTLVGIISWGLGCGQKDVPGVYTKVTNYLDWIRDNMRP

SEQ ID NO: 33555 - protein, 436 aa, Homo sapiens
  REGION 1..436: note = ENSP00000407861
MDAMKRGLCCVLLLCGAVFVSPSQEIHARFRRGARSYQVICRDEKTQMIYQQHQSWLRPVLRSNRVEYCWCNSGRAQCHSVPVKRNSDCYFGNGSAYRGTHSLTESGASCLPWNSMILIGKVYTAQNPSAQALGLGKHNYCRNPDGDAKPWCHVLKNRRLTWEYCDVPSCSTCGLRQYSQPQFRIKGGLFADIASHPWQAAIFAKHRRSPGERFLCGGILISSCWILSAAHCFQERFPPHHLTVILGRTYRVVPGEEEQKFEVEKYIVHKEFDDDTYDNDIALLQLKSDSSRCAQESSVVRTVCLPPADLQLPDWTECELSGYGKHEALSPFYSERLKEAHVRLYPSSRCTSQHLLNRTVTDNMLCAGDTRSGGPQANLHDACQGDSGGPLVCLNDGRMTLVGIISWGLGCGQKDVPGVYTKVTNYLDWIRDNMRP

SEQ ID NO: 33556 - protein, 473 aa, Homo sapiens
  REGION 1..473: note = ENSP00000429401
MDAMKRGLCCVLLLCGAVFVSPSQEIHARFRRGARSYQVICRDEKTQMIYQQHQSWLRPVLRSNRVEYCWCNSGRAQCHSVPVKSCSEPRCFNGGTCQQALYFSDFVCQCPEGFAGKCCEIGNSDCYFGNGSAYRGTHSLTESGASCLPWNSMILIGKVYTAQNPSAQALGLGKHNYCRNPDGDAKPWCHVLKNRRLTWEYCDVPSCSTCGLRQYSQPQFRIKGGLFADIASHPWQAAIFAKHRRSPGERFLCGGILISSCWILSAAHCFQERFPPHHLTVILGRTYRVVPGEEEQKFEVEKYIVHKEFDDDTYDNDIALLQLKSDSSRCAQESSVVRTVCLPPADLQLPDWTECELSGYGKHEALSPFYSERLKEAHVRLYPSSRCTSQHLLNRTVTDNMLCAGDTRSGGPQANLHDACQGDSGGPLVCLNDGRMTLVGIISWGLGCGQKDVPGVYTKVTNYLDWIRDNMRP

SEQ ID NO: 33557 - protein, 96 aa, Homo sapiens
  REGION 1..96: note = ENSP00000429542
  VARIANT 1: note = Any amino acid
XFAGKCCEIDTRATCYEDQGISYRGTWSTAESGAECTNWNSSALAQKPYSGRRPDAIRLGLGNHNYCRTPVPRHWAWANIITAGILMGMPSPGATC

SEQ ID NO: 33558 - protein, 178 aa, Homo sapiens
  REGION 1..178: note = ENSP00000428797
MDAMKRGLCCVLLLCGAVFVSPSQEIHARFRRGARSYQVICRDEKTQMIYQQHQSWLRPVLRSNRVEYCWCNSGRAQCHSVPVKSCSEPRCFNGGTCQQALYFSDFVCQCPEGFAGKCCEIDTRATCYEDQGISYRGTWSTAESGAECTNWNSSALAQKPYSGRRPDAIRLGLGNHNY

SEQ ID NO: 33559 - protein, 157 aa, Homo sapiens
  REGION 1..157: note = ENSP00000429801
MDAMKRGLCCVLLLCGAVFVSPSQEIHARFRRGARSYQVICRDEKTQMIYQQHQSWLRPVLRSNRVEYCWCNSGRAQCHSVPVKSCSEPRCFNGGTCQQALYFSDFVCQCPEGFAGKCCEIDTRATCYEDQGISYRGTWSTAESGAECTNWNSSALA

SEQ ID NO: 33560 - protein, 1072 aa, Homo sapiens
  REGION 1..1072: note = ENSP00000490862
MITVVYGPDLVNISHLNLVAFQEEVAKEWTNEVFSLATNLLAQNMSRDAFLEKAYTKLKLQVTPEGRIPLKNIYRLFSADRKRVETALEACSLPSSRNDSIPQEDFTPEVYRVFLNNLCPRPEIDNIFSEFGAKSKPYLTVDQMMDFINLKQRDPRLNEILYPPLKQEQVQVLIEKYEPNNSLARKGQISVDGFMRYLSGEENGVVSPEKLDLNEDMSQPLSHYFINSSHNTYLTAGQLAGNSSVEMYRQVLLSGCRCVELDCWKGRTAEEEPVITHGFTMTTEISFKEVIEAIAECAFKTSPFPILLSFENHVDSPKQQAKMAEYCRLIFGDALLMEPLEKYPLESGVPLPSPMDLMYKILVKNKKKSHKSSEGSGKKKLSEQASNTYSDSSSMFEPSSPGAGEADTESDDDDDDDDCKKSSMDEGTAGSEAMATEEMSNLVNYIQPVKFESFEISKKRNKSFEMSSFVETKGLEQLTKSPVEFVEYNKMQLSRIYPKGTRVDSSNYMPQLFWNAGCQMVALNFQTMDLAMQINMGMYEYNGKSGYRLKPEFMRRPDKHFDPFTEGIVDGIVANTLSVKIISGQFLSDKKVGTYVEVDMFGLPVDTRRKAFKTKTSQGNAVNPVWEEEPIVFKKVVLPTLACLRIAVYEEGGKFIGHRILPVQAIRPGYHYICLRNERNQPLTLPAVFVYIEVKDYVPDTYADVIEALSNPIRYVNLMEQRAKQLAALTLEDEEEVKKEADPGETPSEAPSEARTTPAENGVNHTTTLTPKPPSQALHSQPAPGSVKAPAKTEDLIQSVLTEVEAQTIEELKQQKSFVKLQKKHYKEMKDLVKRHHKKTTDLIKEHTTKYNEIQNDYLRRRAALEKSAKKDSKKKSEPSSPDHGSSTIEQDLAALDAEMTQKLIDLKDKQQQQLLNLRQEQYYSEKYQKREHIKLLIQKLTDVAEECQNNQLKKLKEICEKEKKELKKKMDKKRQEKITEAKSKDKSQMEEEKTEMIRSYIQEVVQYIKRLEEAQSKRQEKLVEKHKEIRQQILDEKPKGEGSSSFLSETCHEDPSVSPNFTPPNPQALKW

SEQ ID NO: 33561 - protein, 960 aa, Homo sapiens
  REGION 1..960: note = ENSP00000486301
MITVVYGPDLVNISHLNLVAFQEEVAKEWTNEVFSLATNLLAQNMSRDAFLEKAYTKLKLQVTPEGRIPLKNIYRLFSADRKRVETALEACSLPSSRNDSIPQEDFTPEVYRVFLNNLCPRPEIDNIFSEFGAKSKPYLTVDQMMDFINLKQRDPRLNEILYPPLKQEQVQVLIEKYEPNNSLARKGQISVDGFMRYLSGEENGVVSPEKLDLNEDMSQPLSHYFINSSHNTYLTAGQLAGNSSVEMYRQVLLSGCRCVELDCWKGRTAEEEPVITHGFTMTTEISFKEVIEAIAECAFKTSPFPILLSFENHVDSPKQQAKMAEYCRLIFGDALLMEPLEKYPLESGVPLPSPMDLMYKILVKNKKKSHKSSEGSGKKKLSEQASNTYSDSSSMFEPSSPGAGEADTESDDDDDDDDCKKSSMDEGTAGSEAMATEEMSNLVNYIQPVKFESFEISKKRNKSFEMSSFVETKGLEQLTKSPVEFVEYNKMQLSRIYPKGTRVDSSNYMPQLFWNAGCQMVALNFQTMDLAMQINMGMYEYNGKSGYRLKPEFMRRPDKHFDPFTEGIVDGIVANTLSVKIISGQFLSDKKVGTYVEVDMFGLPVDTRRKAFKTKTSQGNAVNPVWEEEPIVFKKVVLPTLACLRIAVYEEGGKFIGHRILPVQAIRPGYHYICLRNERNQPLTLPAVFVYIEVKDYVPDTYADVIEALSNPIRYVNLMEQRAKQLAALTLEDEEEVKKEADPGETPSEAPSEARTTPAENGVNHTTTLTPKPPSQALHSQPAPGSVKAPAKTEDLIQSVLTEVEAQTIEELKQQKSFVKLQKKHYKEMKDLVKRHHKKTTDLIKEHTTKYNEIQNDYLRRRAALEKSAKKDSKKKSEPSSPDHGSSTIEQDLAALDAEMTQKLIDLKDKQQQQLLNLRQEQYYSEKYQKREHIKLLIQKLTDVAEECQNNQLKKLKEIC

SEQ ID NO: 33562 - protein, 136 aa, Homo sapiens
  REGION 1..136: note = ENSP00000486655
MITVVYGPDLVNISHLNLVAFQEEVAKEWTNEVFSLATNLLAQNMSRDAFLEKAYTKLKLQVTPEGRIPLKNIYRLFSADRKRVETALEACSLPSSRNDSIPQEDFTPEVYRVFLNNLCPRPEIDNIFSEFGAKSK

SEQ ID NO: 33563 - protein, 1173 aa, Homo sapiens
  REGION 1..1173: note = ENSP00000367908
MAGAQPGVHALQLKPVCVSDSLKKGTKFVKWDDDSTIVTPIILRTDPQGFFFYWTDQNKETELLDLSLVKDARCGRHAKAPKDPKLRELLDVGNIGRLEQRMITVVYGPDLVNISHLNLVAFQEEVAKEWTNEVFSLATNLLAQNMSRDAFLEKAYTKLKLQVTPEGRIPLKNIYRLFSADRKRVETALEACSLPSSRNDSIPQEDFTPEVYRVFLNNLCPRPEIDNIFSEFGAKSKPYLTVDQMMDFINLKQRDPRLNEILYPPLKQEQVQVLIEKYEPNNSLARKGQISVDGFMRYLSGEENGVVSPEKLDLNEDMSQPLSHYFINSSHNTYLTAGQLAGNSSVEMYRQVLLSGCRCVELDCWKGRTAEEEPVITHGFTMTTEISFKEVIEAIAECAFKTSPFPILLSFENHVDSPKQQAKMAEYCRLIFGDALLMEPLEKYPLESGVPLPSPMDLMYKILVKNKKKSHKSSEGSGKKKLSEQASNTYSDSSSMFEPSSPGAGEADTESDDDDDDDDCKKSSMDEGTAGSEAMATEEMSNLVNYIQPVKFESFEISKKRNKSFEMSSFVETKGLEQLTKSPVEFVEYNKMQLSRIYPKGTRVDSSNYMPQLFWNAGCQMVALNFQTMDLAMQINMGMYEYNGKSGYRLKPEFMRRPDKHFDPFTEGIVDGIVANTLSVKIISGQFLSDKKVGTYVEVDMFGLPVDTRRKAFKTKTSQGNAVNPVWEEEPIVFKKVVLPTLACLRIAVYEEGGKFIGHRILPVQAIRPGYHYICLRNERNQPLTLPAVFVYIEVKDYVPDTYADVIEALSNPIRYVNLMEQRAKQLAALTLEDEEEVKKEADPGETPSEAPSEARTTPAENGVNHTTTLTPKPPSQALHSQPAPGSVKAPAKTEDLIQSVLTEVEAQTIEELKQQKSFVKLQKKHYKEMKDLVKRHHKKTTDLIKEHTTKYNEIQNDYLRRRAALEKSAKKDSKKKSEPSSPDHGSSTIEQDLAALDAEMTQKLIDLKDKQQQQLLNLRQEQYYSEKYQKREHIKLLIQKLTDVAEECQNNQLKKLKEICEKEKKELKKKMDKKRQEKITEAKSKDKSQMEEEKTEMIRSYIQEVVQYIKRLEEAQSKRQEKLVEKHKEIRQQILDEKPKGEGSSSFLSETCHEDPSVSPNFTPPNPQALKW

SEQ ID NO: 33564 - protein, 1216 aa, Homo sapiens
  REGION 1..1216: note = ENSP00000338185
MAGAQPGVHALQLKPVCVSDSLKKGTKFVKWDDDSTIVTPIILRTDPQGFFFYWTDQNKETELLDLSLVKDARCGRHAKAPKDPKLRELLDVGNIGRLEQRMITVVYGPDLVNISHLNLVAFQEEVAKEWTNEVFSLATNLLAQNMSRDAFLEKAYTKLKLQVTPEGRIPLKNIYRLFSADRKRVETALEACSLPSSRNDSIPQEDFTPEVYRVFLNNLCPRPEIDNIFSEFGAKSKPYLTVDQMMDFINLKQRDPRLNEILYPPLKQEQVQVLIEKYEPNNSLARKGQISVDGFMRYLSGEENGVVSPEKLDLNEDMSQPLSHYFINSSHNTYLTAGQLAGNSSVEMYRQVLLSGCRCVELDCWKGRTAEEEPVITHGFTMTTEISFKEVIEAIAECAFKTSPFPILLSFENHVDSPKQQAKMAEYCRLIFGDALLMEPLEKYPLESGVPLPSPMDLMYKILVKNKKKSHKSSEGSGKKKLSEQASNTYSDSSSMFEPSSPGAGEADTESDDDDDDDDCKKSSMDEGTAGSEAMATEEMSNLVNYIQPVKFESFEISKKRNKSFEMSSFVETKGLEQLTKSPVEFVEYNKMQLSRIYPKGTRVDSSNYMPQLFWNAGCQMVALNFQTMDLAMQINMGMYEYNGKSGYRLKPEFMRRPDKHFDPFTEGIVDGIVANTLSVKIISGQFLSDKKVGTYVEVDMFGLPVDTRRKAFKTKTSQGNAVNPVWEEEPIVFKKVVLPTLACLRIAVYEEGGKFIGHRILPVQAIRPGYHYICLRNERNQPLTLPAVFVYIEVKDYVPDTYADVIEALSNPIRYVNLMEQRAKQLAALTLEDEEEVKKEADPGETPSEAPSEARTTPAENGVNHTTTLTPKPPSQALHSQPAPGSVKAPAKTEDLIQSVLTEVEAQTIEELKQQKSFVKLQKKHYKEMKDLVKRHHKKTTDLIKEHTTKYNEIQNDYLRRRAALEKSAKKDSKKKSEPSSPDHGSSTIEQDLAALDAEMTQKLIDLKDKQQQQLLNLRQEQYYSEKYQKREHIKLLIQKLTDVAEECQNNQLKKLKEICEKEKKELKKKMDKKRQEKITEAKSKDKSQMEEEKTEMIRSYIQEVVQYIKRLEEAQSKRQEKLVEKHKEIRQQILDEKPKLQVELEQEYQDKFKRLPLEILEFVQEAMKGKISEDSNHGSAPLSLSSDPGKVNHKTPSSEELGGDIPGKEFDTPL

SEQ ID NO: 33565 - protein, 248 aa, Homo sapiens
  REGION 1..248: note = ENSP00000486531
MAGAQPGVHALQLKPVCVSDSLKKGTKFVKWDDDSTIVTPIILRTDPQGFFFYWTDQNKETELLDLSLVKDARCGRHAKAPKDPKLRELLDVGNIGRLEQRMITVVYGPDLVNISHLNLVAFQEEVAKEWTNEVFSLATNLLAQNMSRDAFLEKAYTKLKLQVTPEGRIPLKNIYRLFSADRKRVETALEACSLPSSRVEKANEAAKSEQSCGKAPPKHFHLHFIKQNKMLEPACYCFFVRCFGIGKI

SEQ ID NO: 33566 - protein, 178 aa, Homo sapiens
  REGION 1..178: note = ENSP00000490455
MAGAQPGVHALQLKPVCVSDSLKKGTKFVKWDDDSTIVTPIILRTDPQGFFFYWTDQNKETELLDLSLVKDARCGRHAKAPKDPKLRELLDVGNIGRLEQRMITVVYGPDLVNISHLNLVAFQEEVAKEWTNEVFSLATNLLAQNMSRDAFLEKAYTKLKLQVTPEGRIPLKNRSEAS

SEQ ID NO: 33567 - protein, 205 aa, Homo sapiens
  REGION 1..205: note = ENSP00000384001
MAGAQPGVHALQLKPVCVSDSLKKGTKFVKWDDDSTIVTPIILRTDPQGFFFYWTDQNKETELLDLSLVKDARCGRHAKAPKDPKLRELLDVGNIGRLEQRMITVVYGPDLVNISHLNLVAFQEEVAKEWTNEVFSLATNLLAQNMSRDAFLEKAYTKLKLQVTPEGRIPLKNIYRLFSADRKRVETALEACSLPSSRVSMCVML

SEQ ID NO: 33568 - protein, 1173 aa, Homo sapiens; identical to SEQ ID NO: 33563
  REGION 1..1173: note = ENSP00000367904

SEQ ID NO: 33569 - protein, 33 aa, Homo sapiens
  REGION 1..33: note = ENSP00000490771
  VARIANT 1: note = Any amino acid
XTDPQGFFFYWTDQNKVRNEETELLDLSLVKDA

SEQ ID NO: 33570 - protein, 961 aa, Homo sapiens
  REGION 1..961: note = ENSP00000487075
MITVVYGPDLVNISHLNLVAFQEEVAKEWTNEVFSLATNLLAQNMSRDAFLEKAYTKLKLQVTPEGRIPLKNIYRLFSADRKRVETALEACSLPSSRNDSIPQEDFTPEVYRVFLNNLCPRPEIDNIFSEFGAKSKPYLTVDQMMDFINLKQRDPRLNEILYPPLKQEQVQVLIEKYEPNNSLARKGQISVDGFMRYLSGEENGVVSPEKLDLNEDMSQPLSHYFINSSHNTYLTAGQLAGNSSVEMYRQVLLSGCRCVELDCWKGRTAEEEPVITHGFTMTTEISFKEVIEAIAECAFKTSPFPILLSFENHVDSPKQQAKMAEYCRLIFGDALLMEPLEKYPLESGVPLPSPMDLMYKILVKNKKKSHKSSEGSGKKKLSEQASNTYSDSSSMFEPSSPGAGEADTESDDDDDDDDCKKSSMDEGTAGSEAMATEEMSNLVNYIQPVKFESFEISKKRNKSFEMSSFVETKGLEQLTKSPVEFVEYNKMQLSRIYPKGTRVDSSNYMPQLFWNAGCQMVALNFQTMDLAMQINMGMYEYNGKSGYRLKPEFMRRPDKHFDPFTEGIVDGIVANTLSVKIISGQFLSDKKVGTYVEVDMFGLPVDTRRKAFKTKTSQGNAVNPVWEEEPIVFKKVVLPTLACLRIAVYEEGGKFIGHRILPVQAIRPGYHYICLRNERNQPLTLPAVFVYIEVKDYVPDTYADVIEALSNPIRYVNLMEQRAKQLAALTLEDEEEVKKEADPGETPSEAPSEARTTPAENGVNHTTTLTPKPPSQALHSQPAPGSVKAPAKTEDLIQSVLTEVEAQTIEELKQQKSFVKLQKKHYKEMKDLVKRHHKKTTDLIKEHTTKYNEIQNDYLRRRAALEKSAKKDSKKKSEPSSPDHGSSTIEQDLAALDAEMTQKLIDLKDKQQQQLLNLRQEQYYSEKYQKREHIKLLIQKLTDVAEECQNNQLKKLKEICE

SEQ ID NO: 33571 - protein, 26 aa, Homo sapiens
  REGION 1..26: note = ENSP00000486428
  VARIANT 1: note = Any amino acid
XADRKRVETALEACSLPSSRALRIWW

SEQ ID NO: 33572 - protein, 914 aa, Homo sapiens
  REGION 1..914: note = ENSP00000431704
  VARIANT 1: note = Any amino acid
XILYPPLKQEQVQVLIEKYEPNNSLARKGQISVDGFMRYLSGEENGVVSPEKLDLNEDMSQPLSHYFINSSHNTYLTAGQLAGNSSVEMYRQVLLSGCRCVELDCWKGRTAEEEPVITHGFTMTTEISFKEVIEAIAECAFKTSPFPILLSFENHVDSPKQQAKMAEYCRLIFGDALLMEPLEKYPLESGVPLPSPMDLMYKILVKNKKKSHKSSEGSGKKKLSEQASNTYSDSSSMFEPSSPGAGEADTESDDDDDDDDCKKSSMDEGTAGSEAMATEEMSNLVNYIQPVKFESFEISKKRNKSFEMSSFVETKGLEQLTKSPVEFVEYNKMQLSRIYPKGTRVDSSNYMPQLFWNAGCQMVALNFQTMDLAMQINMGMYEYNGKSGYRLKPEFMRRPDKHFDPFTEGIVDGIVANTLSVKIISGQFLSDKKVGTYVEVDMFGLPVDTRRKAFKTKTSQGNAVNPVWEEEPIVFKKVVLPTLACLRIAVYEEGGKFIGHRILPVQAIRPGYHYICLRNERNQPLTLPAVFVYIEVKDYVPDTYADVIEALSNPIRYVNLMEQRAKQLAALTLEDEEEVKKEADPGETPSEAPSEARTTPAENGVNHTTTLTPKPPSQALHSQPAPGSVKAPAKTEDLIQSVLTEVEAQTIEELKQQKSFVKLQKKHYKEMKDLVKRHHKKTTDLIKEHTTKYNEIQNDYLRRRAALEKSAKKDSKKKSEPSSPDHGSSTIEQDLAALDAEMTQKLIDLKDKQQQQLLNLRQEQYYSEKYQKREHIKLLIQKLTDVAEECQNNQLKKLKEICEKEKKELKKKMDKKRQEKITEAKSKDKSQMEEEKTEMIRSYIQEVVQYIKRLEEAQSKRQEKLVEKHKEIRQQILDEKPKGEGSSSFLSETCHEDPSVSPNFTPPNPQALKW

SEQ ID NO: 33573 - protein, 196 aa, Homo sapiens
  REGION 1..196: note = ENSP00000391162
IISGQFLSDKKVGTYVEVDMFGLPVDTRRKAFKTKTSQGNAVNPVWEEEPIVFKKVVLPTLACLRIAVYEEGGKFIGHRILPVQAIRPGYHYICLRNERNQPLTLPAVFVYIEVKDYVPDTYADVIEALSNPIRYVNLMEQRAKQLAALTLEDEEEVKKEGGFLHDEIMRLTRNTLEKLMALPLTHVVPIQSKMLS

SEQ ID NO: 33574 - protein, 231 aa, Homo sapiens
  REGION 1..231: note = ENSP00000487544
  VARIANT 1: note = Any amino acid
XQQKSFVKLQKKHYKEMKDLVKRHHKKTTDLIKEHTTKYNEIQNDYLRRRAALEKSAKKDSKKKSEPSSPDHGSSTIEQDLAALDAEMTQKLIDLKDKQQQQLLNLRQEQYYSEKYQKREHIKLLIQKLTDVAEECQNNQLKKLKEICEKEKKELKKKMDKKRQEKITEAKSKDKSQMEEEKTEMIRSYIQEVVQYIKRLEEAQSKRQEKLVEKHKEIRQQILDEKPKVAP

SEQ ID NO: 33575 - protein, 199 aa, Homo sapiens
  REGION 1..199: note = ENSP00000490792
  VARIANT 1: note = Any amino acid
XIKEHTTKYNEIQNDYLRRRAALEKSAKKDSKKKSEPSSPDHGSSTIEQDLAALDAEMTQKLIDLKDKQQQQLLNLRQEQYYSEKYQKREHIKLLIQKLTDVAEECQNNQLKKLKEICEKEKKELKKKMDKKRQEKITEAKSKDKSQMEEEKTEMIRSYIQEVVQYIKRLEEAQSKRQEKLVEKHKEIRQQILDEKPKS

SEQ ID NO: 33576 - protein, 41 aa, Homo sapiens
  REGION 1..41: note = ENSP00000389911
IQEVVQYIKRLEEAQSKRQEKLVEKHKEIRQQILDEKPKVP

SEQ ID NO: 33577 - protein, 34 aa, Homo sapiens
  REGION 1..34: note = ENSP00000489643
RQEKLVEKHKEIRQQILDEKPKIQTVNSVMRWLP

SEQ ID NO: 33578 - protein, 87 aa, Homo sapiens
  REGION 1..87: note = ENSP00000490641
  VARIANT 1: note = Any amino acid
XKEIRQQILDEKPKVELEQEYQDKFKRLPLEILEFVQEAMKGKISEDSNHGSAPLSLSSDPGKVNHKTPSSEELGGDIPGKEFDTPL

SEQ ID NO: 33579 - protein, 1136 aa, Homo sapiens [sequence omitted]

SEQ ID NO: 33580 - protein, 1093 aa, Homo sapiens [sequence omitted]

SEQ ID NO: 33581 - protein, 2302 aa, Homo sapiens
  REGION 1..2302: note = ENSP00000360431
MTSEEMTASVLIPVTQRKVVSAQSAADESSEKVSDINISKAHTVRRSGETSHTISQLNKLKEEPSGSNLPKILSIAREKIVSDENSNEKCWEKIMPDSAKNLNINCNNILRNHQHGLPQRQFYEMYNSVAEEDLCLETGIPSPLERKVFPGIQLELDRPSMGISPLGNQSVIIETGRAHPDSRRAVFHFHYEVDRRMSDTFCTLSENLILDDCGNCVPLPGGEEKQKKNYVAYTCKLMELAKNCDNKNEQLQCDHCDTLNDKYFCFEGSCEKVDMVYSGDSFCRKDFTDSQAAKTFLSHFEDFPDNCDDVEEDAFKSKKERSTLLVRRFCKNDREVKKSVYTGTRAIVRTLPSGHIGLTAWSYIDQKRNGPLLPCGRVMEPPSTVEIRQDGSQRLSEAQWYPIYNAVRREETENTVGSLLHFLTKLPASETAHGRISVGPCLKQCVRDTVCEYRATLQRTSISQYITGSLLEATTSLGARSGLLSTFGGSTGRMMLKERQPGPSVANSNALPSSSAGISKELIDLQPLIQFPEEVASILMEQEQTIYRRVLPVDYLCFLTRDLGTPECQSSLPCLKASISASILTTQNGEHNALEDLVMRFNEVSSWVTWLILTAGSMEEKREVFSYLVHVAKCCWNMGNYNAVMEFLAGLRSRKVLKMWQFMDQSDIETMRSLKDAMAQHESSCEYRKVVTRALHIPGCKVVPFCGVFLKELCEVLDGASGLMKLCPRYNSQEETLEFVADYSGQDNFLQRVGQNGLKNSEKESTVNSIFQVIRSCNRSLETDEEDSPSEGNSSRKSSLKDKSRWQFIIGDLLDSDNDIFEQSKEYDSHGSEDSQKAFDHGTELIPWYVLSIQADVHQFLLQGATVIHYDQDTHLSARCFLQLQPDNSTLTWVKPTTASPASSKAKLGVLNNTAEPGKFPLLGNAGLSSLTEGVLDLFAVKAVYMGHPGIDIHTVCVQNKLGSMFLSETGVTLLYGLQTTDNRLLHFVAPKHTAKMLFSGLLELTRAVRKMRKFPDQRQQWLRKQYVSLYQEDGRYEGPTLAHAVELFGGRRWSARNPSPGTSAKNAEKPNMQRNNTLGISTTKKKKKILMRGESGEVTDDEMATRKAKMHKECRSRSGSDPQDINEQEESEVNAIANPPNPLPSRRAHSLTTAGSPNLAAGTSSPIRPVSSPVLSSSNKSPSSAWSSSSWHGRIKGGMKGFQSFMVSDSNMSFVEFVELFKSFSVRSRKDLKDLFDVYAVPCNRSGSESAPLYTNLTIDENTSDLQPDLDLLTRNVSDLGLFIKSKQQLSDNQRQISDAIAAASIVTNGTGIESTSLGIFGVGILQLNDFLVNCQGEHCTYDEILSIIQKFEPSISMCHQGLMSFEGFARFLMDKENFASKNDESQENIKELQLPLSYYYIESSHNTYLTGHQLKGESSVELYSQVLLQGCRSVELDCWDGDDGMPIIYHGHTLTTKIPFKEVVEAIDRSAFINSDLPIIISIENHCSLPQQRKMAEIFKTVFGEKLVTKFLFETDFSDDPMLPSPDQLRKKVLLKNKKLKAHQTPVDILKQKAHQLASMQVQAYNGGNANPRPANNEEEEDEEDEYDYDYESLSDDNILEDRPENKSCNDKLQFEYNEEIPKRIKKADNSACNKGKVYDMELGEEFYLDQNKKESRQIAPELSDLVIYCQAVKFPGLSTLNASGSSRGKERKSRKSIFGNNPGRMSPGETASFNKTSGKSSCEGIRQTWEESSSPLNPTTSLSAIIRTPKCYHISSLNENAAKRLCRRYSQKLTQHTACQLLRTYPAATRIDSSNPNPLMFWLHGIQLVALNYQTDDLPLHLNAAMFEANGGCGYVLKPPVLWDKNCPMYQKFSPLERDLDSMDPAVYSLTIVSGQNVCPSNSMGSPCIEVDVLGMPLDSCHFRTKPIHRNTLNPMWNEQFLFHVHFEDLVFLRFAVVENNSSAVTAQRIIPLKALKRGYRHLQLRNLHNEVLEISSLFINSRRMEENSSGNTMSASSMFNTEERKCLQTHRVTVHGVPGPEPFTVFTINGGTKAKQLLQQILTNEQDIKPVTTDYFLMEEKYFISKEKNECRKQPFQRAIGPEEEIMQILSSWFPEEGYMGRIVLKTQQENLEEKNIVQDDKEVILSSEEESFFVQVHDVSPEQPRTVIKAPRVSTAQDVIQQTLCKAKYSYSILSNPNPSDYVLLEEVVKDTTNKKTTTPKSSQRVLLDQECVFQAQSKWKGAGKFILKLKEQVQASREDKKKGISFASELKKLTKSTKQPRGLTSPSQLLTSESIQTKEEKPVGGLSSSDTMDYRQ

SEQ ID NO: 33582 - protein, 1994 aa, Homo sapiens
  REGION 1..1994: note = ENSP00000360426
MVSEGSAAGRDFAGMEEVRQLHVRFCKGIKIWHQAWFLCSLLGREPQEREAGCQLWLCTLSAVLKVGWLFPLSEVPNFTLLKDGCGCWRLKEDQIYNAVRREETENTVGSLLHFLTKLPASETAHGRISVGPCLKQCVRDTVCEYRATLQRTSISQYITGSLLEATTSLGARSGLLSTFGGSTGRMMLKERQPGPSVANSNALPSSSAGISKELIDLQPLIQFPEEVASILMEQEQTIYRRVLPVDYLCFLTRDLGTPECQSSLPCLKASISASILTTQNGEHNALEDLVMRFNEVSSWVTWLILTAGSMEEKREVFSYLVHVAKCCWNMGNYNAVMEFLAGLRSRKVLKMWQFMDQSDIETMRSLKDAMAQHESSCEYRKVVTRALHIPGCKVVPFCGVFLKELCEVLDGASGLMKLCPRYNSQEETLEFVADYSGQDNFLQRVGQNGLKNSEKESTVNSIFQVIRSCNRSLETDEEDSPSEGNSSRKSSLKDKSRWQFIIGDLLDSDNDIFEQSKEYDSHGSEDSQKAFDHGTELIPWYVLSIQADVHQFLLQGATVIHYDQDTHLSARCFLQLQPDNSTLTWVKPTTASPASSKAKLGVLNNTAEPGKFPLLGNAGLSSLTEGVLDLFAVKAVYMGHPGIDIHTVCVQNKLGSMFLSETGVTLLYGLQTTDNRLLHFVAPKHTAKMLFSGLLELTRAVRKMRKFPDQRQQWLRKQYVSLYQEDGRYEGPTLAHAVELFGGRRWSARNPSPGTSAKNAEKPNMQRNNTLGISTTKKKKKILMRGESGEVTDDEMATRKAKMHKECRSRSGSDPQDINEQEESEVNAIANPPNPLPSRRAHSLTTAGSPNLAAGTSSPIRPVSSPVLSSSNKSPSSAWSSSSWHGRIKGGMKGFQSFMVSDSNMSFVEFVELFKSFSVRSRKDLKDLFDVYAVPCNRSGSESAPLYTNLTIDENTSDLQPDLDLLTRNVSDLGLFIKSKQQLSDNQRQISDAIAAASIVTNGTGIESTSLGIFGVGILQLNDFLVNCQGEHCTYDEILSIIQKFEPSISMCHQGLMSFEGFARFLMDKENFASKNDESQENIKELQLPLSYYYIESSHNTYLTGHQLKGESSVELYSQVLLQGCRSVELDCWDGDDGMPIIYHGHTLTTKIPFKEVVEAIDRSAFINSDLPIIISIENHCSLPQQRKMAEIFKTVFGEKLVTKFLFETDFSDDPMLPSPDQLRKKVLLKNKKLKAHQTPVDILKQKAHQLASMQVQAYNGGNANPRPANNEEEEDEEDEYDYDYESLSDDNILEDRPENKSCNDKLQFEYNEEIPKRIKKADNSACNKGKVYDMELGEEFYLDQNKKESRQIAPELSDLVIYCQAVKFPGLSTLNASGSSRGKERKSRKSIFGNNPGRMSPGETASFNKTSGKSSCEGIRQTWEESSSPLNPTTSLSAIIRTPKCYHISSLNENAAKRLCRRYSQKLTQHTACQLLRTYPAATRIDSSNPNPLMFWLHGIQLVALNYQTDDLPLHLNAAMFEANGGCGYVLKPPVLWDKNCPMYQKFSPLERDLDSMDPAVYSLTIVSGQNVCPSNSMGSPCIEVDVLGMPLDSCHFRTKPIHRNTLNPMWNEQFLFHVHFEDLVFLRFAVVENNSSAVTAQRIIPLKALKRGYRHLQLRNLHNEVLEISSLFINSRRMEENSSGNTMSASSMFNTEERKCLQTHRVTVHGVPGPEPFTVFTINGGTKAKQLLQQILTNEQDIKPVTTDYFLMEEKYFISKEKNECRKQPFQRAIGPEEEIMQILSSWFPEEGYMGRIVLKTQQENLEEKNIVQDDKEVILSSEEESFFVQVHDVSPEQPRTVIKAPRVSTAQDVIQQTLCKAKYSYSILSNPNPSDYVLLEEVVKDTTNKKTTTPKSSQRVLLDQECVFQAQSKWKGAGKFILKLKEQVQASREDKKKGISFASELKKLTKSTKQPRGLTSPSQLLTSESIQTKEEKPVGGLSSSDTMDYRQ

SEQ ID NO: 33583 - protein, 1994 aa, Homo sapiens; identical to SEQ ID NO: 33582
  REGION 1..1994: note = ENSP00000360438

SEQ ID NO: 33584 - protein, 1014 aa, Homo sapiens
  REGION 1..1014: note = ENSP00000419100
MADLEVYKNLSPEKVERCMSVMQSGTQMIKLKRGTKGLVRLFYLDEHRTRLRWRPSRKSEKAKILIDSIYKVTEGRQSEIFHRQAEGNFDPSCCFTIYHGNHMESLDLITSNPEEARTWITGLKYLMAGISDEDSLAKRQRTHDQWVKQTFEEADKNGDGLLNIEEIHQLMHKLNVNLPRRKVRQMFQEADTDENQGTLTFEEFCVFYKMMSLRRDLYLLLLSYSDKKDHLTVEELAQFLKVEQKMNNVTTDYCLDIIKKFEVSEENKVKNVLGIEGFTNFMRSPACDIFNPLHHEVYQDMDQPLCNYYIASSHNTYLTGDQLLSQSKVDMYARVLQEGCRCVEVDCWDGPDGEPVVHHGYTLTSKILFRDVVETINKHAFVKNEFPVILSIENHCSIQQQRKIAQYLKGIFGDKLDLSSVDTGECKQLPSPQSLKGKILVKGKKLPYHLGDDAEEGEVSDEDSADEIEDECKFKLHYSNGTTEHQVESFIRKKLESLLKESQIRDKEDPDSFTVRALLKATHEGLNAHLKQSPDVKESGKKSHGRSLMTNFGKHKKTTKSRSKSYSTDDEEDTQQSTGKEGGQLYRLGRRRKTMKLCRELSDLVVYTNSVAAQDIVDDGTTGNVLSFSETRAHQVVQQKSEQFMIYNQKQLTRIYPSAYRIDSSNFNPLPYWNAGCQLVALNYQSEGRMMQLNRAKFKANGNCGYVLKPQQMCKGTFNPFSGDPLPANPKKQLILKVISGQQLPKPPDSMFGDRGEIIDPFVEVEIIGLPVDCCKDQTRVVDDNGFNPVWEETLTFTVHMPEIALVRFLVWDHDPIGRDFVGQRTVTFSSLVPGYRHVYLEGLTEASIFVHITINEIYGKNRQLQGLKGLFNKNPRHSSSENNSHYVRKRSIGDRILRRTASAPAKGRKKSKMGFQEMVEIKDSVSEATRDQDGVLRRTTRSLQARPVSMPVDRNLLGALSLPVSETAKDIEGKENSLDSSFCRPTEQAKAEMCKVPFPRQLECVMKMEISET

SEQ ID NO: 33585 - protein, 1655 aa, Homo sapiens
  REGION 1..1655: note = ENSP00000417502
MSVMQSGTQMIKLKRGTKGLVRLFYLDEHRTRLRWRPSRKSEKAKILIDSIYKVTEGRQSEIFHRQAEGNFDPSCCFTIYHGNHMESLDLITSNPEEARTWITGLKYLMAGISDEDSLAKRQRTHDQWVKQTFEEADKNGDGLLNIEEIHQLMHKLNVNLPRRKVRQMFQEADTDENQGTLTFEEFCVFYKMMSLRRDLYLLLLSYSDKKDHLTVEELAQFLKVEQKMNNVTTDYCLDIIKKFEVSEENKVKNVLGIEGFTNFMRSPACDIFNPLHHEVYQDMDQPLCNYYIASSHNTYLTGDQLLSQSKVDMYARVLQEGCRCVEVDCWDGPDGEPVVHHGYTLTSKILFRDVVETINKHAFVKNEFPVILSIENHCSIQQQRKIAQYLKGIFGDKLDLSSVDTGECKQLPSPQSLKGKILVKGKKLPYHLGDDAEEGEVSDEDSADEIEDECKFKLHYSNGTTEHQVESFIRKKLESLLKESQIRDKEDPDSFTVRALLKATHEGLNAHLKQSPDVKESGKKSHGRSLMTNFGKHKKTTKSRSKSYSTDDEEDTQQSTGKEGGQLYRLGRRRKTMKLCRELSDLVVYTNSVAAQDIVDDGTTGNVLSFSETRAHQVVQQKSEQFMIYNQKQLTRIYPSAYRIDSSNFNPLPYWNAGCQLVALNYQSEGRMMQLNRAKFKANGNCGYVLKPQQMCKGTFNPFSGDPLPANPKKQLILKVISGQQLPKPPDSMFGDRGEIIDPFVEVEIIGLPVDCCKDQTRVVDDNGFNPVWEETLTFTVHMPEIALVRFLVWDHDPIGRDFVGQRTVTFSSLVPGYRHVYLEGLTEASIFVHITINEIYGKNRQLQGLKGLFNKNPRHSSSENNSHYVRKRSIGDRILRRTASAPAKGRKKSKMGFQEMVEIKDSVSEATRDQDGVLRRTTRSLQARPVSMPVDRNLLGALSLPVSETAKDIEGKENSLAEDKDGRRKGKASIKDPHFLNFNKKLSSSSSALLHKDTSQGDTIVSTAHMSVTGEQLGMSSPRGGRTTSNATSNCQENPCPSKSLSPKQHLAPDPVVNPTQDLHGVKIKEKGNPEDFVEGKSILSGSVLSHSNLEIKNLEGNRGKGRAATSFSLSDVSMLCSDIPDLHSTAILQESVISHLIDNVTLTNENEPGSSISALIGQFDETNNQALTVVSHLHNTSVMSGHCPLPSLGLKMPIKHGFCKGKSKSSFLCSSPELIALSSSETTKHATNTVYETTCTPISKTKPDDDLSSKAKTAALESNLPGSPNTSRGWLPKSPTKGEDWETLKSCSPASSPDLTLEDVIADPTLCFNSGESSLVEIDGESENLSLTTCEYRREGTSQLASPLKLKYNQGVVEHFQRGLRNGYCKETLRPSVPEIFNNIQDVKTQSISYLAYQGAGFVHNHFSDSDAKMFQTCVPQQSSAQDMHVPVPKQLAHLPLPALKLPSPCKSKSLGDLTSEDIACNFESKYQCISKSFVTTGIRDKKGVTVKTKSLEPIDALTEQLRKLVSFDQEDNCQVLYSKQDANQLPRALVRKLSSRSQSRVRNIASRAKEKQEANKQKVPNPSNGAGVVLRNKPSAPTPAVNRHSTGSYIAGYLKNTKGGGLEGRGIPEGACTALHYGHVDQFCSDNSVLQTEPSSDDKPEIYFLLRL

SEQ ID NO: 33586 - protein, 1002 aa, Homo sapiens
  REGION 1..1002: note = ENSP00000402759
MADLEVYKNLSPEKVERCMSVMQSGTQMIKLKRGTKGLVRLFYLDEHRTRLRWRPSRKSEKAKILIDSIYKVTEGRQSEIFHRQAEGNFDPSCCFTIYHGNHMESLDLITSNPEEARTWITGLKYLMAGISDEDSLAKRQRTHDQWVKQTFEEADKNGDGLLNIEEIHQLMHKLNVNLPRRKVRQMFQEADTDENQGTLTFEEFCVFYKMMSLRRDLYLLLLSYSDKKDHLTVEELAQFLKVEQKMNNVTTDYCLDIIKKFEVSEENKVKNVLGIEGFTNFMRSPACDIFNPLHHEVYQDMDQPLCNYYIASSHNTYLTGDQLLSQSKVDMYARVLQEGCRCVEVDCWDGPDGEPVVHHGYTLTSKILFRDVVETINKHAFVKNEFPVILSIENHCSIQQQRKIAQYLKGIFGDKLDLSSVDTGECKQLPSPQSLKGKILVKGKKLPYHLGDDAEEGEVSDEDSADEIEDECKFKLHYSNGTTEHQVESFIRKKLESLLKESQIRDKEDPDSFTVRALLKATHEGLNAHLKQSPDVKESGKKSHGRSLMTNFGKHKKTTKSRSKSYSTDDEEDTQQSTGKEGGQLYRLGRRRKTMKLCRELSDLVVYTNSVAAQDIVDDGTTGNVLSFSETRAHQVVQQKSEQFMIYNQKQLTRIYPSAYRIDSSNFNPLPYWNAGCQLVALNYQSEGRMMQLNRAKFKANGNCGYVLKPQQMCKGTFNPFSGDPLPANPKKQLILKVISGQQLPKPPDSMFGDRGEIIDPFVEVEIIGLPVDCCKDQTRVVDDNGFNPVWEETLTFTVHMPEIALVRFLVWDHDPIGRDFVGQRTVTFSSLVPGYRHVYLEGLTEASIFVHITINEIYGKWSPLILNPSYTILHFLGATKNRQLQGLKGLFNKNPRHSSSENNSHYVRKRSIGDRILRRTASAPAKGRKKSKMGFQEMVEIKDSVSEATRDQDGVLRRTTRSLQARPVSMPVDRNLLGALSLPVSETAKDIEGKENSLVQI

SEQ ID NO: 33587 - protein, 1693 aa, Homo sapiens
  REGION 1..1693: note = ENSP00000345988
MADLEVYKNLSPEKVERCMSVMQSGTQMIKLKRGTKGLVRLFYLDEHRTRLRWRPSRKSEKAKILIDSIYKVTEGRQSEIFHRQAEGNFDPSCCFTIYHGNHMESLDLITSNPEEARTWITGLKYLMAGISDEDSLAKRQRTHDQWVKQTFEEADKNGDGLLNIEEIHQLMHKLNVNLPRRKVRQMFQEADTDENQGTLTFEEFCVFYKMMSLRRDLYLLLLSYSDKKDHLTVEELAQFLKVEQKMNNVTTDYCLDIIKKFEVSEENKVKNVLGIEGFTNFMRSPACDIFNPLHHEVYQDMDQPLCNYYIASSHNTYLTGDQLLSQSKVDMYARVLQEGCRCVEVDCWDGPDGEPVVHHGYTLTSKILFRDVVETINKHAFVKNEFPVILSIENHCSIQQQRKIAQYLKGIFGDKLDLSSVDTGECKQLPSPQSLKGKILVKGKKLPYHLGDDAEEGEVSDEDSADEIEDECKFKLHYSNGTTEHQVESFIRKKLESLLKESQIRDKEDPDSFTVRALLKATHEGLNAHLKQSPDVKESGKKSHGRSLMTNFGKHKKTTKSRSKSYSTDDEEDTQQSTGKEGGQLYRLGRRRKTMKLCRELSDLVVYTNSVAAQDIVDDGTTGNVLSFSETRAHQVVQQKSEQFMIYNQKQLTRIYPSAYRIDSSNFNPLPYWNAGCQLVALNYQSEGRMMQLNRAKFKANGNCGYVLKPQQMCKGTFNPFSGDPLPANPKKQLILKVISGQQLPKPPDSMFGDRGEIIDPFVEVEIIGLPVDCCKDQTRVVDDNGFNPVWEETLTFTVHMPEIALVRFLVWDHDPIGRDFVGQRTVTFSSLVPGYRHVYLEGLTEASIFVHITINEIYGKWSPLILNPSYTILHFLGATKNRQLQGLKGLFNKNPRHSSSENNSHYVRKRSIGDRILRRTASAPAKGRKKSKMGFQEMVEIKDSVSEATRDQDGVLRRTTRSLQARPVSMPVDRNLLGALSLPVSETAKDIEGKENSLAEDKDGRRKGKASIKDPHFLNFNKKLSSSSSALLHKDTSQGDTIVSTAHMSVTGEQLGMSSPRGGRTTSNATSNCQENPCPSKSLSPKQHLAPDPVVNPTQDLHGVKIKEKGNPEDFVEGKSILSGSVLSHSNLEIKNLEGNRGKGRAATSFSLSDVSMLCSDIPDLHSTAILQESVISHLIDNVTLTNENEPGSSISALIGQFDETNNQALTVVSHLHNTSVMSGHCPLPSLGLKMPIKHGFCKGKSKSSFLCSSPELIALSSSETTKHATNTVYETTCTPISKTKPDDDLSSKAKTAALESNLPGSPNTSRGWLPKSPTKGEDWETLKSCSPASSPDLTLEDVIADPTLCFNSGESSLVEIDGESENLSLTTCEYRREGTSQLASPLKLKYNQGVVEHFQRGLRNGYCKETLRPSVPEIFNNIQDVKTQSISYLAYQGAGFVHNHFSDSDAKMFQTCVPQQSSAQDMHVPVPKQLAHLPLPALKLPSPCKSKSLGDLTSEDIACNFESKYQCISKSFVTTGIRDKKGVTVKTKSLEPIDALTEQLRKLVSFDQEDNCQVLYSKQDANQLPRALVRKLSSRSQSRVRNIASRAKEKQEANKQKVPNPSNGAGVVLRNKPSAPTPAVNRHSTGSYIAGYLKNTKGGGLEGRGIPEGACTALHYGHVDQFCSDNSVLQTEPSSDDKPEIYFLLRL

SEQ ID NO: 33588 - protein, 1655 aa, Homo sapiens; identical to SEQ ID NO: 33585
  REGION 1..1655: note = ENSP00000335469

SEQ ID NO: 33589 - protein, 1129 aa, Homo sapiens
  REGION 1..1129: note = ENSP00000487140
MEEPGPPGGLSQDQVERCMGAMQEGMQMVKLRGGSKGLVRFYYLDEHRSCIRWRPSRKNEKAKISIDSIQEVSEGRQSEVFQRYPDGSFDPNCCFSIYHGSHRESLDLVSTSSEVARTWVTGLRYLMAGISDEDSLARRQRTRDQWLKQTFDEADKNGDGSLSIGEVLQLLHKLNVNLPRQRVKQMFREADTDDHQGTLGFEEFCAFYKMMSTRRDLYLLMLTYSNHKDHLDAASLQRFLQVEQKMAGVTLESCQDIIEQFEPCPENKSKGLLGIDGFTNYTRSPAGDIFNPEHHHVHQDMTQPLSHYFITSSHNTYLVGDQLMSQSRVDMYAWVLQAGCRCVEVDCWDGPDGEPIVHHGYTLTSKILFKDVIETINKYAFIKNEYPVILSIENHCSVIQQKKMAQYLTDILGDKLDLSSVSSEDATTLPSPQMLKGKILVKGKKLPANISEDAEEGEVSDEDSADEIDDDCKLLNGDASTNRKRVENTAKRKLDSLIKESKIRDCEDPNNFSVSTLSPSGKLGRKSKAEEDVESGEDAGASRRNGRLVVGSFSRRKKKGSKLKKAASVEEGDEGQDSPGGQSRGATRQKKTMKLSRALSDLVKYTKSVATHDIEMEAASSWQVSSFSETKAHQILQQKPAQYLRFNQQQLSRIYPSSYRVDSSNYNPQPFWNAGCQMVALNYQSEGRMLQLNRAKFSANGGCGYVLKPGCMCQGVFNPNSEDPLPGQLKKQLVLRIISGQQLPKPRDSMLGDRGEIIDPFVEVEIIGLPVDCSREQTRVVDDNGFNPTWEETLVFMVHMPEIALVRFLVWDHDPIGRDFIGQRTLAFSSMMPGYRHVYLEGMEEASIFVHVAVSDISGKVKQALGLKGLFLRGPKPGSLDSHAAGRPPARPSVSQRILRRTASAPTKSQKPGRRGFPELVLGTRDTGSKGVADDVVPPGPGPAPEAPAQEGPGSGSPRGKAPAAVAEKSPVRVRPPRVLDGPGPAGMAATCMKCVVGSCAGVNTGGLQRERPPSPGPASRQAAIRQQPRARADSLGAPCCGLDPHAIPGRSREAPKGPGAWRQGPGGSGSMSSDSSSPDSPGIPERSPRWPEGACRQPGALQGEMSALFAQKLEEIRSKSPMFSAVRN

SEQ ID NO: 33590 - protein, 1416 aa, Homo sapiens
  REGION 1..1416: note = ENSP00000486186
MSGPWPSPDSRTKGTVAWLAEVLLWVGGSVVLSSEWQLGPLVERCMGAMQEGMQMVKLRGGSKGLVRFYYLDEHRSCIRWRPSRKNEKAKISIDSIQEVSEGRQSEVFQRYPDGSFDPNCCFSIYHGSHRESLDLVSTSSEVARTWVTGLRYLMAGISDEDSLARRQRTRDQWLKQTFDEADKNGDGSLSIGEVLQLLHKLNVNLPRQRVKQMFREADTDDHQGTLGFEEFCAFYKMMSTRRDLYLLMLTYSNHKDHLDAASLQRFLQVEQKMAGVTLESCQDIIEQFEPCPENKSKGLLGIDGFTNYTRSPAGDIFNPEHHHVHQDMTQPLSHYFITSSHNTYLVGDQLMSQSRVDMYAWVLQAGCRCVEVDCWDGPDGEPIVHHGYTLTSKILFKDVIETINKYAFIKNEYPVILSIENHCSVIQQKKMAQYLTDILGDKLDLSSVSSEDATTLPSPQMLKGKILVKGKKLPANISEDAEEGEVSDEDSADEIDDDCKLLNGDASTNRKRVENTAKRKLDSLIKESKIRDCEDPNNFSVSTLSPSGKLGRKSKAEEDVESGEDAGASRRNGRLVVGSFSRRKKKGSKLKKAASVEEGDEGQDSPGGQSRGATRQKKTMKLSRALSDLVKYTKSVATHDIEMEAASSWQVSSFSETKAHQILQQKPAQYLRFNQQQLSRIYPSSYRVDSSNYNPQPFWNAGCQMVALNYQSEGRMLQLNRAKFSANGGCGYVLKPGCMCQGVFNPNSEDPLPGQLKKQLVLRIISGQQLPKPRDSMLGDRGEIIDPFVEVEIIGLPVDCSREQTRVVDDNGFNPTWEETLVFMVHMPEIALVRFLVWDHDPIGRDFIGQRTLAFSSMMPGYRHVYLEGMEEASIFVHVAVSDISGKVKQALGLKGLFLRGPKPGSLDSHAAGRPPARPSVSQRILRRTASAPTKSQKPGRRGFPELVLGTRDTGSKGVADDVVPPGPGPAPEAPAQEGPGSGSPRDTRPLSTQRPLPPLCSLETIAEEPAPGPGPPPPAAVPTSSSQGRPPYPTGPGANVASPLEDTEEPRDSRPRPCNGEGAGGAYERAPGSQTDGRSQPRTLGHLPVIRRVKSEGQVPTEPLGGWRPLAAPFPAPAVYSDATGSDPLWQRLEPCGHRDSVSSSSSMSSSDTVIDLSLPSLGLGRSRENLAGAHMGRLPPRPHSASAARPDLPPVTKSKSNPNLRATGQRPPIPDELQPRSLAPRMAGLPFRPPWGCLSLVGVQDCPVAAKSKSLGDLTADDFAPSFEGGSRRLSHSLGLPGGTRRVSGPGVRRDTLTEQLRWLTVFQQAGDITSPTSLGPAGEGVAGGPGFVRRSSSRSHSRVRAIASRARQAQERQQRLQGLGRQGPPEEERGTPEGACSVGHEGSVDAPAPSKGALGPASAAAENLVLLRL

SEQ ID NO: 33591 - protein, 1416 aa, Homo sapiens; identical to SEQ ID NO: 33590
  REGION 1..1416: note = ENSP00000481938

SEQ ID NO: 33592 - protein, 111 aa, Homo sapiens
  REGION 1..111: note = ENSP00000476436
MMAPPTAGPLPGPALPPEDPGPDPESRWLFLSANILPVVERCMGAMQEGMQMVKLRGGSKGLVRFYYLDEHRSCIRWRPSRKNEKAKISIDSIQEVSEGRQSEVFQRYPDG

SEQ ID NO: 33593 - protein, 1129 aa, Homo sapiens; identical to SEQ ID NO: 33589
  REGION 1..1129: note = ENSP00000397289

SEQ ID NO: 33594 - protein, 1416 aa, Homo sapiens; identical to SEQ ID NO: 33590
  REGION 1..1416: note = ENSP00000389803

SEQ ID NO: 33595 - protein, 1239 aa, Homo sapiens
  REGION 1..1239: note = ENSP00000278878
  VARIANT 1: note = Any amino acid
XARTWVTGLRYLMAGISDEDSLARRQRTRDQWLKQTFDEADKNGDGSLSIGEVLQLLHKLNVNLPRQRVKQMFREADTDDHQGTLGFEEFCAFYKMMSTRRDLYLLMLTYSNHKDHLDAASLQRFLQVEQKMAGVTLESCQDIIEQFEPCPENKSKGLLGIDGFTNYTRSPAGDIFNPEHHHVHQDMTQPLSHYFITSSHNTYLVGDQLMSQSRVDMYAWVLQAGCRCVEVDCWDGPDGEPIVHHGYTLTSKILFKDVIETINKYAFIKNEYPVILSIENHCSVIQQKKMAQYLTDILGDKLDLSSVSSEDATTLPSPQMLKGKILVKGKKLPANISEDAEEGEVSDEDSADEIDDDCKLLNGDASTNRKRVENTAKRKLDSLIKESKIRDCEDPNNFSVSTLSPSGKLGRKSKAEEDVESGEDAGASRRNGRLVVGSFSRRKKKGSKLKKAASVEEGDEGQDSPGGQSRGATRQKKTMKLSRALSDLVKYTKSVATHDIEMEAASSWQVSSFSETKAHQILQQKPAQYLRFNQQQLSRIYPSSYRVDSSNYNPQPFWNAGCQMGVFNPNSEDPLPGQLKKQLVLRIISGQQLPKPRDSMLGDRGEIIDPFVEVEIIGLPVDCSREQTRVVDDNGFNPTWEETLVFMVHMPEIALVRFLVWDHDPIGRDFIGQRTLAFSSMMPGYRHVYLEGMEEASIFVHVAVSDISGKVKQALGLKGLFLRGPKPGSLDSHAAGRPPARPSVSQRILRRTASAPTKSQKPGRRGFPELVLGTRDTGSKGVADDVVPPGPGPAPEAPAQEGPGSGSPRDTRPLSTQRPLPPLCSLETIAEEPAPGPGPPPPAAVPTSSSQGRPPYPTGPGANVASPLEDTEEPRDSRPRPCNGEGAGGAYERAPGSQTDGRSQPRTLGHLPVIRRVKSEGQVPTEPLGGWRPLAAPFPAPAVYSDATGSDPLWQRLEPCGHRDSVSSSSSMSSSDTVIDLSLPSLGLGRSRENLAGAHMGRLPPRPHSASAARPDLPPVTKSKSNPNLRATGQRPPIPDELQPRSLAPRMAGLPFRPPWGCLSLVGVQDCPVAAKSKSLGDLTADDFAPSFEGGSRRLSHSLGLPGGTRRVSGPGVRRDTLTEQLRWLTVFQQAGDITSPTSLGPAGEGVAGGPGFVRRSSSRSHSRVRAIASRARQAQERQQRLQGLGRQGPPEEERGTPEGACSVGHEGSVDAPAPSKGALGPASAAAENLVLLRL

SEQ ID NO: 33596 - protein, 1416 aa, Homo sapiens; identical to SEQ ID NO: 33590
  REGION 1..1416: note = ENSP00000367747

SEQ ID NO: 33597 - protein, 1095 aa, Homo sapiens
  REGION 1..1095: note = ENSP00000402861
MAEGAAGREDPAPPDAAGGEDDPRVGPDAAGDCVTAASGGRMRDRRSGVALPGAAGTPADSEAGLLEAARATPRRSSIIKDPSNQKCGGRKKTVSFSSMPSEKKISSANDCISFMQAGCELKKVRPNSRIYNRFFTLDTDLQALRWEPSKKDLEKAKLDISAIKEIRLGKNTETFRNNGLADQICEDCAFSILHGENYESLDLVANSADVANIWVSGLRYLVSRSKQPLDFMEGNQNTPRFMWLKTVFEAADVDGNGIMLEDTSVELIKQLNPTLKEAKIRLKFKEIQKSKEKLTTRVTEEEFCEAFCELCTRPEVYFLLVQISKNKEYLDANDLMLFLEAEQGVTHITEDICLDIIRRYELSEEGRQKGFLAIDGFTQYLLSSECDIFDPEQKKVAQDMTQPLSHYYINASHNTYLIEDQFRGPADINGYIRALKMGCRSVELDVSDGSDNEPILCNRNNMTTHVSFRSVIEVINKFAFVASEYPLILCLGNHCSLPQQKVMAQQMKKVFGNKLYTEAPLPSESYLPSPEKLKRMIIVKGKKLPSDPDVLEGEVTDEDEEAEMSRRMSVDYNGEQKQIRLCRELSDLVSICKSVQYRDFELSMKSQNYWEMCSFSETEASRIANEYPEDFVNYNKKFLSRIYPSAMRIDSSNLNPQDFWNCGCQIVAMNFQTPGPMMDLHTGWFLQNGGCGYVLRPSIMRDEVSYFSANTKGILPGVSPLALHIKIISGQNFPKPKGACAKGDVIDPYVCIEIHGIPADCSEQRTKTVQQNSDNPIFDETFEFQVNLPELAMIRFVVLDDDYIGDEFIGQYTIPFECLQPGYRHVPLRSFVGDIMEHVTLFVHIAITNRSGGGKAQKRSLSVRMGKKVREYTMLRNIGLKTIDDIFKIAVHPLREAIDMRENMQNAIVSIKELCGLPPIASLKQCLLTLSSRLITSDNTPSVSLVMKDSFPYLEPLGAIPDVQKKMLTAYDLMIQESRFLIEMADTVQEKIVQCQKAGMEFHEELHNLGAKEGLKGRKLNKATESFAWNITVLKGQGDLLKNAKNEAIENMKQIQLACLSCGLSKAPSSSAEAKSKRSLEAIEEKESSEENGKL

SEQ ID NO: 33598 - protein, 94 aa, Homo sapiens
  REGION 1..94: note = ENSP00000410488
MAEGAAGREDPAPPDAAGGEDDPRVGPDAAGDCVTAASGGRMRDRRSGVALPGAAGTPADSEAGLLEAARATPRRSSIIKMGLCSCRKTAQSFH

SEQ ID NO: 33599 - protein, 1012 aa, Homo sapiens
  REGION 1..1012: note = ENSP00000457588
MKNKLQDPSNQKCGGRKKTVSFSSMPSEKKISSANDCISFMQAGCELKKVRPNSRIYNRFFTLDTDLQALRWEPSKKDLEKAKLDISAIKEIRLGKNTETFRNNGLADQICEDCAFSILHGENYESLDLVANSADVANIWVSGLRYLVSRSKQPLDFMEGNQNTPRFMWLKTVFEAADVDGNGIMLEDTSVELIKQLNPTLKEAKIRLKFKEIQKSKEKLTTRVTEEEFCEAFCELCTRPEVYFLLVQISKNKEYLDANDLMLFLEAEQGVTHITEDICLDIIRRYELSEEGRQKGFLAIDGFTQYLLSSECDIFDPEQKKVAQDMTQPLSHYYINASHNTYLIEDQFRGPADINGYIRALKMGCRSVELDVSDGSDNEPILCNRNNMTTHVSFRSVIEVINKFAFVASEYPLILCLGNHCSLPQQKVMAQQMKKVFGNKLYTEAPLPSESYLPSPEKLKRMIIVKGKKLPSDPDVLEGEVTDEDEEAEMSRRMSVDYNGEQKQIRLCRELSDLVSICKSVQYRDFELSMKSQNYWEMCSFSETEASRIANEYPEDFVNYNKKFLSRIYPSAMRIDSSNLNPQDFWNCGCQIVAMNFQTPGPMMDLHTGWFLQNGGCGYVLRPSIMRDEVSYFSANTKGILPGVSPLALHIKIISGQNFPKPKGACAKGDVIDPYVCIEIHGIPADCSEQRTKTVQQNSDNPIFDETFEFQVNLPELAMIRFVVLDDDYIGDEFIGQYTIPFECLQPGYRHVPLRSFVGDIMEHVTLFVHIAITNRSGGGKAQKRSLSVRMGKKVREYTMLRNIGLKTIDDIFKIAVHPLREAIDMRENMQNAIVSIKELCGLPPIASLKQCLLTLSSRLITSDNTPSVSLVMKDSFPYLEPLGAIPDVQKKMLTAYDLMIQESRFLIEMADTVQEKIVQCQKAGMEFHEELHNLGAKEGLKGRKLNKATESFAWNITVLKGQGDLLKNAKNEAIENMKQIQLACLSCGLSKAPSSSAEAKSKRSLEAIEEK

SEQ ID NO: 33600 - protein, 1018 aa, Homo sapiens [sequence omitted]

SEQ ID NO: 33601 - protein, 321 aa, Homo sapiens
  REGION 1..321: note = ENSP00000367032
MASSQGKNELKLADWMATLPESMHSIPLTNLAIPGSHDSFSFYIDEASPVGPEQPETVQNFVSVFGTVAKKLMRKWLATQTMNFTGQLGAGIRYFDLRISTKPRDPDNELYFAHGLFSAKVNEGLEEINAFLTDHHKEVVFLDFNHFYGMQKYHHEKLVQMLKDIYGNKMCPAIFAQEVSLKYLWEKDYQVLVFYHSPVALEVPFLWPGQMMPAPWANTTDPEKLIQFLQASITERRKKGSFFISQVVLTPKASTVVKGVASGLRETITERALPAMMQWVRTQKPGESGINIVTADFVELGDFISTVIKLNYVFDEGEANT

SEQ ID NO: 33602 - protein, 321 aa, Homo sapiens; identical to SEQ ID NO: 33601
  REGION 1..321: note = ENSP00000333751

SEQ ID NO: 33603 - protein, 1036 aa, Homo sapiens
  REGION 1..1036: note = ENSP00000348681
MSLKNEPRVNTSALQKIAADMSNIIENLDTRELHFEGEEVDYDVSPSDPKIQEVYIPFSAIYNTQGFKEPNIQTYLSGCPIKAQVLEVERFTSTTRVPSINLYTIELTHGEFKWQVKRKFKHFQEFHRELLKYKAFIRIPIPTRRHTFRRQNVREEPREMPSLPRSSENMIREEQFLGRRKQLEDYLTKILKMPMYRNYHATTEFLDISQLSFIHDLGPKGIEGMIMKRSGGHRIPGLNCCGQGRACYRWSKRWLIVKDSFLLYMKPDSGAIAFVLLVDKEFKIKVGKKETETKYGIRIDNLSRTLILKCNSYRHARWWGGAIEEFIQKHGTNFLKDHRFGSYAAIQENALAKWYVNAKGYFEDVANAMEEANEEIFITDWWLSPEIFLKRPVVEGNRWRLDCILKRKAQQGVRIFIMLYKEVELALGINSEYTKRTLMRLHPNIKVMRHPDHVSSTVYLWAHHEKLVIIDQSVAFVGGIDLAYGRWDDNEHRLTDVGSVKRVTSGPSLGSLPPAAMESMESLRLKDKNEPVQNLPIQKSIDDVDSKLKGIGKPRKFSKFSLYKQLHRHHLHDADSISSIDSTSNTGSIRSLQTGVGELHGETRFWHGKDYCNFVFKDWVQLDKPFADFIDRYSTPRMPWHDIASAVHGKAARDVARHFIQRWNFTKIMKSKYRSLSYPFLLPKSQTTAHELRYQVPGSVHANVQLLRSAADWSAGIKYHEESIHAAYVHVIENSRHYIYIENQFFISCADDKVVFNKIGDAIAQRILKAHRENQKYRVYVVIPLLPGFEGDISTGGGNALQAIMHFNYRTMCRGENSILGQLKAELGNQWINYISFCGLRTHAELEGNLVTELIYVHSKLLIADDNTVIIGSANINDRSMLGKRDSEMAVIVQDTETVPSVMDGKEYQAGRFARGLRLQCFRVVLGYLDDPSEDIQDPVSDKFFKEVWVSTAARNATIYDKVFRCLPNDEVHNLIQLRDFINKPVLAKEDPIRAEEELKKIRGFLVQFPFYFLSEESLLPSVGTKEAIVPMEVWT

SEQ ID NO: 33604 - protein, 1074 aa, Homo sapiens
  REGION 1..1074: note = ENSP00000342793
MSLKNEPRVNTSALQKIAADMSNIIENLDTRELHFEGEEVDYDVSPSDPKIQEVYIPFSAIYNTQGFKEPNIQTYLSGCPIKAQVLEVERFTSTTRVPSINLYTIELTHGEFKWQVKRKFKHFQEFHRELLKYKAFIRIPIPTRRHTFRRQNVREEPREMPSLPRSSENMIREEQFLGRRKQLEDYLTKILKMPMYRNYHATTEFLDISQLSFIHDLGPKGIEGMIMKRSGGHRIPGLNCCGQGRACYRWSKRWLIVKDSFLLYMKPDSGAIAFVLLVDKEFKIKVGKKETETKYGIRIDNLSRTLILKCNSYRHARWWGGAIEEFIQKHGTNFLKDHRFGSYAAIQENALAKWYVNAKGYFEDVANAMEEANEEIFITDWWLSPEIFLKRPVVEGNRWRLDCILKRKAQQGVRIFIMLYKEVELALGINSEYTKRTLMRLHPNIKVMRHPDHVSSTVYLWAHHEKLVIIDQSVAFVGGIDLAYGRWDDNEHRLTDVGSVKRVTSGPSLGSLPPAAMESMESLRLKDKNEPVQNLPIQKSIDDVDSKLKGIGKPRKFSKFSLYKQLHRHHLHDADSISSIDSTSSYFNHYRSHHNLIHGLKPHFKLFHPSSESEQGLTRPHADTGSIRSLQTGVGELHGETRFWHGKDYCNFVFKDWVQLDKPFADFIDRYSTPRMPWHDIASAVHGKAARDVARHFIQRWNFTKIMKSKYRSLSYPFLLPKSQTTAHELRYQVPGSVHANVQLLRSAADWSAGIKYHEESIHAAYVHVIENSRHYIYIENQFFISCADDKVVFNKIGDAIAQRILKAHRENQKYRVYVVIPLLPGFEGDISTGGGNALQAIMHFNYRTMCRGENSILGQLKAELGNQWINYISFCGLRTHAELEGNLVTELIYVHSKLLIADDNTVIIGSANINDRSMLGKRDSEMAVIVQDTETVPSVMDGKEYQAGRFARGLRLQCFRVVLGYLDDPSEDIQDPVSDKFFKEVWVSTAARNATIYDKVFRCLPNDEVHNLIQLRDFINKPVLAKEDPIRAEEELKKIRGFLVQFPFYFLSEESLLPSVGTKEAIVPMEVWT

SEQ ID NO: 33605 - protein, 234 aa, Homo sapiens
  REGION 1..234: note = ENSP00000395556
  VARIANT 1: note = Any amino acid
XHANVQLLRSAADWSAGIKYHEESIHAAYVHVIENSRHYIYIENQFFISCADDKVVFNKIGDAIAQRILKAHRENQKYRVYVVIPLLPGFEGDISTGGGNALQAIMHFNYRTMCRGENSILGQLKAELGNQWINYISFCGLRTHAELEGNLVTELIYVHSKLLIADDNTVIIGSANINDRSMLGKRDSEMAVIVQDTETVPSVMDGKEYQAGRFARGLRLQCFRSKMTPGVEDP

SEQ ID NO: 33606 - protein, 57 aa, Homo sapiens
  REGION 1..57: note = ENSP00000391164
MSLKNEPRVNTSALQKIAADMSNIIENLDTRELHFEGEEVDYDVSPSDPKIQEGTKY

SEQ ID NO: 33607 - protein, 141 aa, Homo sapiens
  REGION 1..141: note = ENSP00000400639
MSLKNEPRVNTSALQKIAADMSNIIENLDTRELHFEGEEVDYDVSPSDPKIQEVYIPFSAIYNTQGFKEPNIQTYLSGCPIKAQVLEVERFTSTTRVPSINLYTIELTHGEFKWQVKRKFKHFQEFHRELLKYKAFIRIPI

SEQ ID NO: 33608 - protein, 57 aa, Homo sapiens; identical to SEQ ID NO: 33606
  REGION 1..57: note = ENSP00000486967

SEQ ID NO: 33609 - protein, 152 aa, Homo sapiens
  REGION 1..152: note = ENSP00000328422
MPGLVFFKFANLGGGWGSRKMLEPGMCPAEMSLTPFVTRSLNLLCFSVTHRGRGKDNPLHFFLQLLAPSASASLGLGRETGPLPSPGLSPGLLSETFVSEGPLLTLQISWCGTECLMDGQGPLIHLHSQNIRISFGATQPPLLLVYEIRWNR

SEQ ID NO: 33610 - protein, 513 aa, Homo sapiens
  REGION 1..513: note = ENSP00000438677
MPGCPVQMLKPLWKAAVAPTWPCSMPPRRPWDREAGTLQVLGALAVLWLGSVALICLLWQVPRPPTWGQVQPKDVPRSWEHGSSPAWEPLEAEARQQRDSCQLVLVESIPQDLPSAAGSPSAQPLGQAWLQLLDTAQESVHVASYYWSLTGPDIGVNDSSSQLGEALLQKLQQLLGRNISLAVATSSPTLARTSTDLQVLAARGAHVRQVPMGRLTRGVLHSKFWVVDGRHIYMGSANMDWRSLTQVKELGAVIYNCSHLAQDLEKTFQTYWVLGVPKAVLPKTWPQNFSSHFNRFQPFHGLFDGVPTTAYFSASPPALCPQGRTRDLEALLAVMGSAQEFIYASVMEYFPTTRFSHPPRYWPVLDNALRAAAFGKGVRVRLLVGCGLNTDPTMFPYLRSLQALSNPAANVSVDVKVFIVPVGNHSNIPFSRVNHSKFMVTEKAAYIGTSNWSEDYFSSTAGVGLVVTQSPGAQPAGATVQEQLRQLFERDWSSRYAVGLDGQAPGQDCVWQG

SEQ ID NO: 33611 - protein, 506 aa, Homo sapiens
  REGION 1..506: note = ENSP00000376372
MLKPLWKAAVAPTWPCSMPPRRPWDREAGTLQVLGALAVLWLGSVALICLLWQVPRPPTWGQVQPKDVPRSWEHGSSPAWEPLEAEARQQRDSCQLVLVESIPQDLPSAAGSPSAQPLGQAWLQLLDTAQESVHVASYYWSLTGPDIGVNDSSSQLGEALLQKLQQLLGRNISLAVATSSPTLARTSTDLQVLAARGAHVRQVPMGRLTRGVLHSKFWVVDGRHIYMGSANMDWRSLTQVKELGAVIYNCSHLAQDLEKTFQTYWVLGVPKAVLPKTWPQNFSSHFNRFQPFHGLFDGVPTTAYFSASPPALCPQGRTRDLEALLAVMGSAQEFIYASVMEYFPTTRFSHPPRYWPVLDNALRAAAFGKGVRVRLLVGCGLNTDPTMFPYLRSLQALSNPAANVSVDVKVFIVPVGNHSNIPFSRVNHSKFMVTEKAAYIGTSNWSEDYFSSTAGVGLVVTQSPGAQPAGATVQEQLRQLFERDWSSRYAVGLDGQAPGQDCVWQG

SEQ ID NO: 33612 - protein, 257 aa, Homo sapiens
  REGION 1..257: note = ENSP00000451278
MLKPLWKAAVAPTWPCSMPPRRPWDREAGTVLGALAVLWLGSVALICLLWQVPRPPTWGQVQPKDVPRSWEHGSSPAWEPLEAEARQQRDSCQLVLVESIPQDLPSAAGSPSAQPLGQAWLQLLDTAQESVHVASYYWSLTGPDIGVNDSSSQLGEALLQKLQQLLGRNISLAVATSSPTLARTSTDLQVLAARGAHVRQVPMGRLTRGVLHSKFWVVDGRHIYMGSANMDWRSLTQVKELGAVIYNCSHLAQDLEK

SEQ ID NO: 33613 - protein, 75 aa, Homo sapiens
  REGION 1..75: note = ENSP00000451636
MVTEKAAYIGTSNWSEDYFSSTAGVGLVVTQSPGAQPAGATVQEQLRQLFERDWSSRYAVGLDGQAPGQDCVWQG

SEQ ID NO: 33614 - protein, 536 aa, Homo sapiens
  REGION 1..536: note = ENSP00000440896
MEIRQHEWLSASPHEGFEQMRLKSRPKEPSPSLTRVGANFYSSVKQQDYSASVWLRRKDKLEHSQQKCIVIFALVCCFAILVALIFSAVDIMGEDEDGLSEKNCQNKCRIALVENIPEGLNYSENAPFHLSLFQGWMNLLNMAKKSVDIVSSHWDLNHTHPSACQGQRLFEKLLQLTSQNIEIKLVSDVTADSKVLEALKLKGAEVTYMNMTAYNKGRLQSSFWIVDKQHVYIGSAGLDWQSLGQMKELGVIFYNCSCLVLDLQRIFALYSSLKFKSRVPQTWSKRLYGVYDNEKKLQLQLNETKSQAFVSNSPKLFCPKNRSFDIDAIYSVIDDAKQYVYIAVMDYLPISSTSTKRTYWPDLDAKIREALVLRSVRVRLLLSFWKETDPLTFNFISSLKAICTEIANCSLKVKFFDLERENACATKEQKNHTFPRLNRNKYMVTDGAAYIGNFDWVGNDFTQNAGTGLVINQADVRNNRSIIKQLKDVFERDWYSPYAKTLQPTKQPNCSSLFKLKPLSNKTATDDTGGKDPRNV

SEQ ID NO: 33615 - protein, 47 aa, Homo sapiens
  REGION 1..47: note = ENSP00000314748
MSQQKCIVIFALVCCFAILVALIFSAVDIMGEDEDGLSEKNCQNKCR

SEQ ID NO: 33616 - protein, 109 aa, Homo sapiens
  REGION 1..109: note = ENSP00000355503
MEIRQHEWLSASPHEGFEQMRLKSRPKEPSPSLTRVGANFYSSVKQQDYSASVWLRRKDKLEHSQQKCIVIFALVCCFAILVALIFSAVDIMGEDEDGLSEKNCQNKCR

SEQ ID NO: 33617 - protein, 197 aa, Homo sapiens
  REGION 1..197: note = ENSP00000440132
MEIRQHEWLSASPHEGFEQMRLKSRPKEPSPSLTRVGANFYSSVKQQDYSASVWLRRKDKLEHSQQKCIVIFALVCCFAILVALIFSAVDIMGEDEDGLSEKNCQNKCRIALVENIPEGLNYSENAPFHLSLFQGWMNLLNMAKKSVDIVSSHWDLNHTHPSACQGQRLFEKLLQLTSQNIEIKLVSDVTADSKEPR

SEQ ID NO: 33618 - protein, 140 aa, Homo sapiens
  REGION 1..140: note = ENSP00000438191
MSQQKCIVIFALVCCFAILVALIFSAVDIMGEDEDGLSEKNCQNKCRIALVENIPEGLNYSENAPFHLSLFQGWMNLLNMAKKSVDIVSSHWDLNHTHPSACQGQRLFEKLLQLTSQNIEIKLVSDVTADSKVLEALKLK

SEQ ID NO: 33619 - protein, 536 aa, Homo sapiens; identical to SEQ ID NO: 33614
  REGION 1..536: note = ENSP00000414188

SEQ ID NO: 33620 - protein, 474 aa, Homo sapiens
  REGION 1..474: note = ENSP00000401285
MSQQKCIVIFALVCCFAILVALIFSAVDIMGEDEDGLSEKNCQNKCRIALVENIPEGLNYSENAPFHLSLFQGWMNLLNMAKKSVDIVSSHWDLNHTHPSACQGQRLFEKLLQLTSQNIEIKLVSDVTADSKVLEALKLKGAEVTYMNMTAYNKGRLQSSFWIVDKQHVYIGSAGLDWQSLGQMKELGVIFYNCSCLVLDLQRIFALYSSLKFKSRVPQTWSKRLYGVYDNEKKLQLQLNETKSQAFVSNSPKLFCPKNRSFDIDAIYSVIDDAKQYVYIAVMDYLPISSTSTKRTYWPDLDAKIREALVLRSVRVRLLLSFWKETDPLTFNFISSLKAICTEIANCSLKVKFFDLERENACATKEQKNHTFPRLNRNKYMVTDGAAYIGNFDWVGNDFTQNAGTGLVINQADVRNNRSIIKQLKDVFERDWYSPYAKTLQPTKQPNCSSLFKLKPLSNKTATDDTGGKDPRNV

SEQ ID NO: 33621 - protein, 506 aa, Homo sapiens
  REGION 1..506: note = ENSP00000317175
MFTSKSNSVSPSPSLEQADSDALDISTKVQLYGVLWKRPFGRPSAKWSRRFFIIKESFLLYYSESEKKSFETNKYFNIHPKGVIPLGGCLVEPKEEPSMPYAMKISHQDFHGNILLAAESEFEQTQWLEMLQESGKVTWKNAQLGEAMIKSLEAQGLQLAKEKQEYLDKLMEETEELCLQREQREELERLNQVLEAEKQQFEEVVQELRMEQEQIKRELELTARCLKGVEQEKKELRHLTESLQQTLEELSIEKKKTLEMLEENENHLQTLANQSEQPPPSGGLHSNLRQIEEKMQQLLEEKLLAEKRMKENEERSRALEEEREFYSSQSQALQNSLQELTAEKQQAERELKAEVKVRMDLERRLREAEGALRSLEQGLNSKVRNKEKEERMRADVSHLKRFFEECIRNAELEAKMPVIMKNSVYIHKAATRRIKSCRFHRRRSSTSWNDMKPSQSFMTSQLDANNMEELKEVAKRLSRDQRFRESIYHIMATQPGAPSALSRGGK

SEQ ID NO: 33622 - protein, 188 aa, Homo sapiens
  REGION 1..188: note = ENSP00000450501
MPVSTSLHQDGSQERPVSLTSTTSSSGSSCDSRSAMEEPSSSEAPAKNGAGSLRSRHLPNSNNNSSSWLNVKGPLSPFNSRAAAGPAHHKLSYLGRVVREIVETERMYVQDLRSIVEDYLLKIIDTPGLLKPEQVSALFGNIENIYALNSQLLRDLDSCNSDPVAVASCFVERSQEFDIYTQYCNNYP

SEQ ID NO: 33623 - protein, 603 aa, Homo sapiens
  REGION 1..603: note = ENSP00000489373
MPVSTSLHQDGSQERPVSLTSTTSSSGSSCDSRSAMEEPSSSEAPAKNGAGSLRSRHLPNSNNNSSSWLNVKGPLSPFNSRAAAGPAHHKLSYLGRVVREIVETERMYVQDLRSIVESQEFDIYTQYCNNYPNSVAALTECMRDKQQAKFFRDRQELLQHSLPLGSYLLKPVQRILKYHLLLQEIAKHFDEEEDGFEVVEDAIDTMTCVAWYINDMKRRHEHAVRLQEIQSLLINWKGPDLTTYGELVLEGTFRVHRVRNERTFFLFDKTLLITKKRGDHFVYKGNIPCSSLMLIESTRDSLCFTVTHYKHSKQQYSIQAKTVEEKRNWTHHIKRLILENHHATIPQKAKEAILEMDSYYPNRYRCSPERLKKAWSSQDEVSTNVRQGRRQSEPTKHLLRQLNEKARAAGMKGKGRRESESSRSSRRPSGRSPTSTEKRMSFESISSLPEVEPDPEAGSEQEVFSAVEGPSAEETPSDTESPEVLETQLDAHQGLLGMDPPGDMVDFVAAESTEDLKALSSEEEEEMGGAAQEPESLLPPSVLDQASVIAERFVSSFSRRSSVAQEDSKSSGFGSPRLVSRSSSVLSLEGSEKGLARHGSATD

SEQ ID NO: 33624 - protein, 1219 aa, Homo sapiens
  REGION 1..1219: note = ENSP00000247226
MPVSTSLHQDGSQERPVSLTSTTSSSGSSCDSRSAMEEPSSSEAPAKNGAGSLRSRHLPNSNNNSSSWLNVKGPLSPFNSRAAAGPAHHKLSYLGRVVREIVETERMYVQDLRSIVEDYLLKIIDTPGLLKPEQVSALFGNIENIYALNSQLLRDLDSCNSDPVAVASCFVERSQEFDIYTQYCNNYPNSVAALTECMRDKQQAKFFRDRQELLQHSLPLGSYLLKPVQRILKYHLLLQEIAKHFDEEEDGFEVVEDAIDTMTCVAWYINDMKRRHEHAVRLQEIQSLLINWKGPDLTTYGELVLEGTFRVHRVRNERTFFLFDKTLLITKKRGDHFVYKGNIPCSSLMLIESTRDSLCFTVTHYKHSKQQYSIQAKTVEEKRNWTHHIKRLILENHHATIPQKAKEAILEMDSYYPNRYRCSPERLKKAWSSQDEVSTNVRQGRRQSEPTKHLLRQLNEKARAAGMKGKGRRESESSRSSRRPSGRSPTSTEKRMSFESISSLPEVEPDPEAGSEQEVFSAVEGPSAEETPSDTESPEVLETQLDAHQGLLGMDPPGDMVDFVAAESTEDLKALSSEEEEEMGGAAQEPESLLPPSVLDQASVIAERFVSSFSRRSSVAQEDSKSSGFGSPRLVSRSSSVLSLEGSEKGLARHGSATDSLSCQLSPEVDISVGVATEDSPSVNGMEPPSPGCPVEPDRSSCKKKESALSTRDRLLLDKIKSYYENAEHHDAGFSVRRRESLSYIPKGLVRNSISRFNSLPRPDPEPVPPVGSKRQVGSRPTSWALFELPGPSQAVKGDPPPISDAEFRPSSEIVKIWEGMESSGGSPGKGPGQGQANGFDLHEPLFILEEHELGAITEESATASPESSSPTEGRSPAHLARELKELVKELSSSTQGELVAPLHPRIVQLSHVMDSHVSERVKNKVYQLARQYSLRIKSNKPVMARPPLQWEKVAPERDGKSPTVPCLQEEAGEPLGGKGKRKPVLSLFDYEQLMAQEHSPPKPSSAGEMSPQRFFFNPSAVSQRTTSPGGRPSARSPLSPTETFSWPDVRELCSKYASRDEARRAGGGRPRGPPVNRSHSVPENMVEPPLSGRVGRCRSLSTKRGRGGGEAAQSPGPLPQSKPDGGETLYVTADLTLEDNRRVIVMEKGPLPSPTAGLEESSGQGPSSPVALLGQVQDFQQSAECQPKEEGSRDPADPSQQGRVRNLREKFQALNSVG

SEQ ID NO: 33625 - protein, 62 aa, Homo sapiens
  REGION 1..62: note = ENSP00000450880
MGALLRKANLPGVPSPGSNARMPVSTSLHQDGSQERPVSLTSTTSSSGSSCDSRSAMEEPSS

SEQ ID NO: 33626 - protein, 161 aa, Homo sapiens
  REGION 1..161: note = ENSP00000451256
MPVSTSLHQDGSQERPVSLTSTTSSSGSSCDSRSAMEEPSSSEAPAKNGAGSLRSRHLPNSNNNSSSWLNVKGPLSPFNSRAAAGPAHHKLSYLGRVVREIVETERMYVQDLRSIVEDYLLKIIDTPGLLKPEQVSALFGNIENIYALNSQLLRDLDSCNS

SEQ ID NO: 33627 - protein, 752 aa, Homo sapiens
  REGION 1..752: note = ENSP00000450945
MGKGRRESESSRSSRRPSGRSPTSTEKRMSFESISSLPEVEPDPEAGSEQEVFSAVEGPSAEETPSDTESPEVLETQLDAHQGLLGMDPPGDMVDFVAAESTEDLKALSSEEEEEMGGAAQEPESLLPPSVLDQASVIAERFVSSFSRRSSVAQEDSKSSGFGSPRLVSRSSSVLSLEGSEKGLARHGSATDSLSCQLSPEVDISVGVATEDSPSVNGMEPPSPGCPVEPDRSSCKKKESALSTRDRLLLDKIKSYYENAEHHDAGFSVRRRESLSYIPKGLVRNSISRFNSLPRPDPEPVPPVGSKRQVGSRPTSWALFELPGPSQAVKGDPPPISDAEFRPSSEIVKIWEGMESSGGSPGKGPGQGQANGFDLHEPLFILEEHELGAITEESATASPESSSPTEGRSPAHLARELKELVKELSSSTQGELVAPLHPRIVQLSHVMDSHVSERVKNKVYQLARQYSLRIKSNKPVMARPPLQWEKVAPERDGKSPTVPCLQEEAGEPLGGKGKRKPVLSLFDYEQLMAQEHSPPKPSSAGEMSPQRFFFNPSAVSQRTTSPGGRPSARSPLSPTETFSWPDVRELCSKYASRDEARRAGGGRPRGPPVNRSHSVPENMVEPPLSGRVGRCRSLSTKRGRGGGEAAQSPGPLPQSKPDGGETLYVTADLTLEDNRRVIVMEKGPLPSPTAGLEESSGQGPSSPVALLGQVQDFQQSAECQPKEEGSRDPADPSQQGRVRNLREKFQALNSVG

SEQ ID NO: 33628 - protein, 724 aa, Homo sapiens
  REGION 1..724: note = ENSP00000450973
MSFESISSLPEVEPDPEAGSEQEVFSAVEGPSAEETPSDTESPEVLETQLDAHQGLLGMDPPGDMVDFVAAESTEDLKALSSEEEEEMGGAAQEPESLLPPSVLDQASVIAERFVSSFSRRSSVAQEDSKSSGFGSPRLVSRSSSVLSLEGSEKGLARHGSATDSLSCQLSPEVDISVGVATEDSPSVNGMEPPSPGCPVEPDRSSCKKKESALSTRDRLLLDKIKSYYENAEHHDAGFSVRRRESLSYIPKGLVRNSISRFNSLPRPDPEPVPPVGSKRQVGSRPTSWALFELPGPSQAVKGDPPPISDAEFRPSSEIVKIWEGMESSGGSPGKGPGQGQANGFDLHEPLFILEEHELGAITEESATASPESSSPTEGRSPAHLARELKELVKELSSSTQGELVAPLHPRIVQLSHVMDSHVSERVKNKVYQLARQYSLRIKSNKPVMARPPLQWEKVAPERDGKSPTVPCLQEEAGEPLGGKGKRKPVLSLFDYEQLMAQEHSPPKPSSAGEMSPQRFFFNPSAVSQRTTSPGGRPSARSPLSPTETFSWPDVRELCSKYASRDEARRAGGGRPRGPPVNRSHSVPENMVEPPLSGRVGRCRSLSTKRGRGGGEAAQSPGPLPQSKPDGGETLYVTADLTLEDNRRVIVMEKGPLPSPTAGLEESSGQGPSSPVALLGQVQDFQQSAECQPKEEGSRDPADPSQQGRVRNLREKFQALNSVG

SEQ ID NO: 33629 - protein, 1163 aa, Homo sapiens
  REGION 1..1163: note = ENSP00000378183
MPVSTSLHQDGSQERPVSLTSTTSSSGSSCDSRSAMEEPSSSEAPAKNGAGSLRSRHLPNSNNNSSSWLNVKGPLSPFNSRAAAGPAHHKLSYLGRVVREIVETERMYVQDLRSIVESQEFDIYTQYCNNYPNSVAALTECMRDKQQAKFFRDRQELLQHSLPLGSYLLKPVQRILKYHLLLQEIAKHFDEEEDGFEVVEDAIDTMTCVAWYINDMKRRHEHAVRLQEIQSLLINWKGPDLTTYGELVLEGTFRVHRVRNERTFFLFDKTLLITKKRGDHFVYKGNIPCSSLMLIESTRDSLCFTVTHYKHSKQQYSIQAKTVEEKRNWTHHIKRLILENHHATIPQKAKEAILEMDSYYPNRYRCSPERLKKAWSSQDEVSTNVRQGRRQSEPTKHLLRQLNEKARAAGMKGKGRRESESSRSSRRPSGRSPTSTEKRMSFESISSLPEVEPDPEAGSEQEVFSAVEGPSAEETPSDTESPEVLETQLDAHQGLLGMDPPGDMVDFVAAESTEDLKALSSEEEEEMGGAAQEPESLLPPSVLDQASVIAERFVSSFSRRSSVAQEDSKSSGFGSPRLVSRSSSVLSLEGSEKGLARHGSATDSLSCQLSPEVDISVGVATEDSPSVNGMEPPSPGCPVEPDRSSCKKKESALSTRDRLLLDKIKSYYENAEHHDAGFSVRRRESLSYIPKGLVRNSISRFNSLPRPDPEPVPPVGSKRQVGSRPTSWALFELPGPSQAVKGDPPPISDAEFRPSSEIVKIWEGMESSGGSPGKGPGQGQANGFDLHEPLFILEEHELGAITEESATASPESSSPTEGRSPAHLARELKELVKELSSSTQGELVAPLHPRIVQLSHVMDSHVSERVKNKVYQLARQYSLRIKSNKPVMARPPLQWEKVAPERDGKSPTVPCLQEEAGEPLGGKGKRKPVLSLFDYEQLMAQEHSPPKPSSAGEMSPQRFFFNPSAVSQRTTSPGGRPSARSPLSPTETFSWPDVRELCSKYASRDEARRAGGGRPRGPPVNRSHSVPENMVEPPLSGRVGRCRSLSTKRGRGGGEAAQSPGPLPQSKPDGGETLYVTADLTLEDNRRVIVMEKGPLPSPTAGLEESSGQGPSSPVALLGQVQDFQQSAECQPKEEGSRDPADPSQQGRVRNLREKFQALNSVG

SEQ ID NO: 33630 - protein, 1083 aa, Homo sapiens
  REGION 1..1083: note = ENSP00000366977
MNSVLTKHGSPPRSWLSLCSGTDDQSPAEKKGLRCQNPACMDKGRAAKVCHHADCQQLHRRGPLNLCEACDSKFHSTMHYDGHVRFDLPPQGSVLARNVSTRSCPPRTSPAVDLEEEEEESSVDGKGDRKSTGLKLSKKKARRRHTDDPSKECFTLKFDLNVDIETEIVPAMKKKSLGEVLLPVFERKGIALGKVDIYLDQSNTPLSLTFEAYRFGGHYLRVKAPAKPGDEGKVEQGMKDSKSLSLPILRPAGTGPPALERVDAQSRRESLDILAPGRRRKNMSEFLGEASIPGQEPPTPSSCSLPSGSSGSTNTGDSWKNRAASRFSGFFSSGPSTSAFGREVDKMEQLEGKLHTYSLFGLPRLPRGLRFDHDSWEEEYDEDEDEDNACLRLEDSWRELIDGHEKLTRRQCHQQEAVWELLHTEASYIRKLRVIINLFLCCLLNLQESGLLCEVEAERLFSNIPEIAQLHRRLWASVMAPVLEKARRTRALLQPGDFLKGFKMFGSLFKPYIRYCMEEEGCMEYMRGLLRDNDLFRAYITWAEKHPQCQRLKLSDMLAKPHQRLTKYPLLLKSVLRKTEEPRAKEAVVAMIGSVERFIHHVNACMRQRQERQRLAAVVSRIDAYEVVESSSDEVDKLLKEFLHLDLTAPIPGASPEETRQLLLEGSLRMKEGKDSKMDVYCFLFTDLLLVTKAVKKAERTRVIRPPLLVDKIVCRELRDPGSFLLIYLNEFHSAVGAYTFQASGQALCRGWVDTIYNAQNQLQQLRAQEPPGSQQPLQSLEEEEDEQEEEEEEEEEEEEGEDSGTSAASSPTIMRKSSGSPDSQHCASDGSTETLAMVVVEPGDTLSSPEFDSGPFSSQSDETSLSTTASSATPTSELLPLGPVDGRSCSMDSAYGTLSPTSLQDFVAPGPMAELVPRAPESPRVPSPPPSPRLRRRTPVQLLSCPPHLLKSKSEASLLQLLAGAGTHGTPSAPSRSLSELCLAVPAPGIRTQGSPQEAGPSWDCRGAPSPGSGPGLVGCLAGEPAGSHRKRCGDLPSGASPRVQPEPPPGVSAQHRKLTLAQLYRIRTTLLLNSTLTASEV

SEQ ID NO: 33631 - protein, 930 aa, Homo sapiens
  REGION 1..930: note = ENSP00000366954
MHYDGHVRFDLPPQGSVLARNVSTRSCPPRTSPAVDLEEEEEESSVDGKGDRKSTGLKLSKKKARRRHTDDPSKECFTLKFDLNVDIETEIVPAMKKKSLGEVLLPVFERKGIALGKVDIYLDQSNTPLSLTFEAYRFGGHYLRVKAPAKPGDEGKVEQGMKDSKSLSLPILRPAGTGPPALERVDAQSRRESLDILAPGRRRKNMSEFLGEASIPGQEPPTPSSCSLPSGSSGSTNTGDSWKNRAASRFSGFFSSGPSTSAFGREVDKMEQLEGKLHTYSLFGLPRLPRGLRFDHDSWEEEYDEDEDEDNACLRLEDSWRELIDGHEKLTRRQCHQQEAVWELLHTEASYIRKLRVIINLFLCCLLNLQESGLLCEVEAERLFSNIPEIAQLHRRLWASVMAPVLEKARRTRALLQPGDFLKGFKMFGSLFKPYIRYCMEEEGCMEYMRGLLRDNDLFRAYITWAEKHPQCQRLKLSDMLAKPHQRLTKYPLLLKSVLRKTEEPRAKEAVVAMIGSVERFIHHVNACMRQRQERQRLAAVVSRIDAYEVVESSSDEVDKLLKEFLHLDLTAPIPGASPEETRQLLLEGSLRMKEGKDSKMDVYCFLFTDLLLVTKAVKKAERTRVIRPPLLVDKIVCRELRDPGSFLLIYLNEFHSAVGAYTFQASGQALCRGWVDTIYNAQNQLQQLRAQEPPGSQQPLQSLEEEEDEQEEEEEEEEEEEEGEDSGTSAASSPTIMRKSSGSPDSQHCASDGSTETLAMVVVEPGDTLSSPEFDSGPFSSQSDETSLSTTASSATPTSELLPLGPVDGRSCSMDSAYGTLSPTSLQDFVAPGPMAELVPRAPESPRVPSPPPSPRLRRRTPVQLLSCPPHLLKSKSEASLLQLLAGAGTHGTPSAPSRSLSELCLAVPAPAQEADPGPALPNQDHPAA

SEQ ID NO: 33632 - protein, 1006 aa, Homo sapiens
  REGION 1..1006: note = ENSP00000366957
MHYDGHVRFDLPPQGSVLARNVSTRSCPPRTSPAVDLEEEEEESSVDGKGDRKSTGLKLSKKKARRRHTDDPSKECFTLKFDLNVDIETEIVPAMKKKSLGEVLLPVFERKGIALGKVDIYLDQSNTPLSLTFEAYRFGGHYLRVKAPAKPGDEGKVEQGMKDSKSLSLPILRPAGTGPPALERVDAQSRRESLDILAPGRRRKNMSEFLGEASIPGQEPPTPSSCSLPSGSSGSTNTGDSWKNRAASRFSGFFSSGPSTSAFGREVDKMEQLEGKLHTYSLFGLPRLPRGLRFDHDSWEEEYDEDEDEDNACLRLEDSWRELIDGHEKLTRRQCHQQEAVWELLHTEASYIRKLRVIINLFLCCLLNLQESGLLCEVEAERLFSNIPEIAQLHRRLWASVMAPVLEKARRTRALLQPGDFLKGFKMFGSLFKPYIRYCMEEEGCMEYMRGLLRDNDLFRAYITWAEKHPQCQRLKLSDMLAKPHQRLTKYPLLLKSVLRKTEEPRAKEAVVAMIGSVERFIHHVNACMRQRQERQRLAAVVSRIDAYEVVESSSDEVDKLLKEFLHLDLTAPIPGASPEETRQLLLEGSLRMKEGKDSKMDVYCFLFTDLLLVTKAVKKAERTRVIRPPLLVDKIVCRELRDPGSFLLIYLNEFHSAVGAYTFQASGQALCRGWVDTIYNAQNQLQQLRAQEPPGSQQPLQSLEEEEDEQEEEEEEEEEEEEGEDSGTSAASSPTIMRKSSGSPDSQHCASDGSTETLAMVVVEPGDTLSSPEFDSGPFSSQSDETSLSTTASSATPTSELLPLGPVDGRSCSMDSAYGTLSPTSLQDFVAPGPMAELVPRAPESPRVPSPPPSPRLRRRTPVQLLSCPPHLLKSKSEASLLQLLAGAGTHGTPSAPSRSLSELCLAVPAPGIRTQGSPQEAGPSWDCRGAPSPGSGPGLVGCLAGEPAGSHRKRCGDLPSGASPRVQPEPPPGVSAQHRKLTLAQLYRIRTTLLLNSTLTASEV

SEQ ID NO: 33633 - protein, 1043 aa, Homo sapiens
  REGION 1..1043: note = ENSP00000366961
MDKGRAAKVCHHADCQQLHRRGPLNLCEACDSKFHSTMHYDGHVRFDLPPQGSVLARNVSTRSCPPRTSPAVDLEEEEEESSVDGKGDRKSTGLKLSKKKARRRHTDDPSKECFTLKFDLNVDIETEIVPAMKKKSLGEVLLPVFERKGIALGKVDIYLDQSNTPLSLTFEAYRFGGHYLRVKAPAKPGDEGKVEQGMKDSKSLSLPILRPAGTGPPALERVDAQSRRESLDILAPGRRRKNMSEFLGEASIPGQEPPTPSSCSLPSGSSGSTNTGDSWKNRAASRFSGFFSSGPSTSAFGREVDKMEQLEGKLHTYSLFGLPRLPRGLRFDHDSWEEEYDEDEDEDNACLRLEDSWRELIDGHEKLTRRQCHQQEAVWELLHTEASYIRKLRVIINLFLCCLLNLQESGLLCEVEAERLFSNIPEIAQLHRRLWASVMAPVLEKARRTRALLQPGDFLKGFKMFGSLFKPYIRYCMEEEGCMEYMRGLLRDNDLFRAYITWAEKHPQCQRLKLSDMLAKPHQRLTKYPLLLKSVLRKTEEPRAKEAVVAMIGSVERFIHHVNACMRQRQERQRLAAVVSRIDAYEVVESSSDEVDKLLKEFLHLDLTAPIPGASPEETRQLLLEGSLRMKEGKDSKMDVYCFLFTDLLLVTKAVKKAERTRVIRPPLLVDKIVCRELRDPGSFLLIYLNEFHSAVGAYTFQASGQALCRGWVDTIYNAQNQLQQLRAQEPPGSQQPLQSLEEEEDEQEEEEEEEEEEEEGEDSGTSAASSPTIMRKSSGSPDSQHCASDGSTETLAMVVVEPGDTLSSPEFDSGPFSSQSDETSLSTTASSATPTSELLPLGPVDGRSCSMDSAYGTLSPTSLQDFVAPGPMAELVPRAPESPRVPSPPPSPRLRRRTPVQLLSCPPHLLKSKSEASLLQLLAGAGTHGTPSAPSRSLSELCLAVPAPGIRTQGSPQEAGPSWDCRGAPSPGSGPGLVGCLAGEPAGSHRKRCGDLPSGASPRVQPEPPPGVSAQHRKLTLAQLYRIRTTLLLNSTLTASEV

SEQ ID NO: 33634 - protein, 1062 aa, Homo sapiens
  REGION 1..1062: note = ENSP00000383706
MDDQSPAEKKGLRCQNPACMDKGRAAKVCHHADCQQLHRRGPLNLCEACDSKFHSTMHYDGHVRFDLPPQGSVLARNVSTRSCPPRTSPAVDLEEEEEESSVDGKGDRKSTGLKLSKKKARRRHTDDPSKECFTLKFDLNVDIETEIVPAMKKKSLGEVLLPVFERKGIALGKVDIYLDQSNTPLSLTFEAYRFGGHYLRVKAPAKPGDEGKVEQGMKDSKSLSLPILRPAGTGPPALERVDAQSRRESLDILAPGRRRKNMSEFLGEASIPGQEPPTPSSCSLPSGSSGSTNTGDSWKNRAASRFSGFFSSGPSTSAFGREVDKMEQLEGKLHTYSLFGLPRLPRGLRFDHDSWEEEYDEDEDEDNACLRLEDSWRELIDGHEKLTRRQCHQQEAVWELLHTEASYIRKLRVIINLFLCCLLNLQESGLLCEVEAERLFSNIPEIAQLHRRLWASVMAPVLEKARRTRALLQPGDFLKGFKMFGSLFKPYIRYCMEEEGCMEYMRGLLRDNDLFRAYITWAEKHPQCQRLKLSDMLAKPHQRLTKYPLLLKSVLRKTEEPRAKEAVVAMIGSVERFIHHVNACMRQRQERQRLAAVVSRIDAYEVVESSSDEVDKLLKEFLHLDLTAPIPGASPEETRQLLLEGSLRMKEGKDSKMDVYCFLFTDLLLVTKAVKKAERTRVIRPPLLVDKIVCRELRDPGSFLLIYLNEFHSAVGAYTFQASGQALCRGWVDTIYNAQNQLQQLRAQEPPGSQQPLQSLEEEEDEQEEEEEEEEEEEEGEDSGTSAASSPTIMRKSSGSPDSQHCASDGSTETLAMVVVEPGDTLSSPEFDSGPFSSQSDETSLSTTASSATPTSELLPLGPVDGRSCSMDSAYGTLSPTSLQDFVAPGPMAELVPRAPESPRVPSPPPSPRLRRRTPVQLLSCPPHLLKSKSEASLLQLLAGAGTHGTPSAPSRSLSELCLAVPAPGIRTQGSPQEAGPSWDCRGAPSPGSGPGLVGCLAGEPAGSHRKRCGDLPSGASPRVQPEPPPGVSAQHRKLTLAQLYRIRTTLLLNSTLTASEV

SEQ ID NO: 33635 - protein, 852 aa, Homo sapiens
  REGION 1..852: note = ENSP00000366969
MNSVLTKHGSPPRSWLSLCSGTDDQSPAEKKGLRCQNPACMDKGRAAKVCHHADCQQLHRRGPLNLCEACDSKFHSTMHYDGHVRFDLPPQGSVLARNVSTRSCPPRTSPAVDLEEEEEESSVDGKGDRKSTGLKLSKKKARRRHTDDPSKECFTLKFDLNVDIETEIVPAMKKKSLGEVLLPVFERKGIALGKVDIYLDQSNTPLSLTFEAYRFGGHYLRVKAPAKPGDEGKVEQGMKDSKSLSLPILRPAGTGPPALERVDAQSRRESLDILAPGRRRKNMSEFLGEASIPGQEPPTPSSCSLPSGSSGSTNTGDSWKNRAASRFSGFFSSGPSTSAFGREVDKMEQLEGKLHTYSLFGLPRLPRGLRFDHDSWEEEYDEDEDEDNACLRLEDSWRELIDGHEKLTRRQCHQQEAVWELLHTEASYIRKLRVIINLFLCCLLNLQESGLLCEVEAERLFSNIPEIAQLHRRLWASVMAPVLEKARRTRALLQPGDFLKGFKMFGSLFKPYIRYCMEEEGCMEYMRGLLRDNDLFRAYITWAEKHPQCQRLKLSDMLAKPHQRLTKYPLLLKSVLRKTEEPRAKEAVVAMIGSVERFIHHVNACMRQRQERQRLAAVVSRIDAYEVVESSSDEVDKLLKEFLHLDLTAPIPGASPEETRQLLLEGSLRMKEGKDSKMDVYCFLFTDLLLVTKAVKKAERTRVIRPPLLVDKIVCRELRDPGSFLLIYLNEFHSAVGAYTFQASGQALCRGWVDTIYNAQNQLQQLRAQEPPGSQQPLQSLEEEEDEQEEEEEEEEEEEEGEDSGTSAASSPTIMRKSSGSPDSQHWKLTLAQLYRIRTTLLLNSTLTASEV

SEQ ID NO: 33636 - protein, 70 aa, Homo sapiens
  REGION 1..70: note = ENSP00000491569
MFLYWRKRGTYELEALPGDLAELELGTVERFSWSSTLDIIEDLGDDQSPAEKKGLRCQNPACMDKGRAAK

SEQ ID NO: 33637 - protein, 1006 aa, Homo sapiens; identical to SEQ ID NO: 33632
  REGION 1..1006: note = ENSP00000383704

SEQ ID NO: 33638 - protein, 1075 aa, Homo sapiens
  REGION 1..1075: note = ENSP00000441445
MGTGPGVSGRLAASRPGPGLPLRDSEPSWAGGRARDGDSQVCHHADCQQLHRRGPLNLCEACDSKFHSTMHYDGHVRFDLPPQGSVLARNVSTRSCPPRTSPAVDLEEEEEESSVDGKGDRKSTGLKLSKKKARRRHTDDPSKECFTLKFDLNVDIETEIVPAMKKKSLGEVLLPVFERKGIALGKVDIYLDQSNTPLSLTFEAYRFGGHYLRVKAPAKPGDEGKVEQGMKDSKSLSLPILRPAGTGPPALERVDAQSRRESLDILAPGRRRKNMSEFLGEASIPGQEPPTPSSCSLPSGSSGSTNTGDSWKNRAASRFSGFFSSGPSTSAFGREVDKMEQLEGKLHTYSLFGLPRLPRGLRFDHDSWEEEYDEDEDEDNACLRLEDSWRELIDGHEKLTRRQCHQQEAVWELLHTEASYIRKLRVIINLFLCCLLNLQESGLLCEVEAERLFSNIPEIAQLHRRLWASVMAPVLEKARRTRALLQPGDFLKGFKMFGSLFKPYIRYCMEEEGCMEYMRGLLRDNDLFRAYITWAEKHPQCQRLKLSDMLAKPHQRLTKYPLLLKSVLRKTEEPRAKEAVVAMIGSVERFIHHVNACMRQRQERQRLAAVVSRIDAYEVVESSSDEVDKLLKEFLHLDLTAPIPGASPEETRQLLLEGSLRMKEGKDSKMDVYCFLFTDLLLVTKAVKKAERTRVIRPPLLVDKIVCRELRDPGSFLLIYLNEFHSAVGAYTFQASGQALCRGWVDTIYNAQNQLQQLRAQEPPGSQQPLQSLEEEEDEQEEEEEEEEEEEEGEDSGTSAASSPTIMRKSSGSPDSQHCASDGSTETLAMVVVEPGDTLSSPEFDSGPFSSQSDETSLSTTASSATPTSELLPLGPVDGRSCSMDSAYGTLSPTSLQDFVAPGPMAELVPRAPESPRVPSPPPSPRLRRRTPVQLLSCPPHLLKSKSEASLLQLLAGAGTHGTPSAPSRSLSELCLAVPAPGIRTQGSPQEAGPSWDCRGAPSPGSGPGLVGCLAGEPAGSHRKRCGDLPSGASPRVQPEPPPGVSAQHRKLTLAQLYRIRTTLLLNSTLTASEV

SEQ ID NO: 33639 - protein, 1006 aa, Homo sapiens; identical to SEQ ID NO: 33632
  REGION 1..1006: note = ENSP00000344570

SEQ ID NO: 33640 - protein, 1085 aa, Homo sapiens
  REGION 1..1085: note = ENSP00000439625
MSLGERGSPQTFGGSSVSKGSDAGHDQSPAEKKGLRCQNPACMDKGRAAKVCHHADCQQLHRRGPLNLCEACDSKFHSTMHYDGHVRFDLPPQGSVLARNVSTRSCPPRTSPAVDLEEEEEESSVDGKGDRKSTGLKLSKKKARRRHTDDPSKECFTLKFDLNVDIETEIVPAMKKKSLGEVLLPVFERKGIALGKVDIYLDQSNTPLSLTFEAYRFGGHYLRVKAPAKPGDEGKVEQGMKDSKSLSLPILRPAGTGPPALERVDAQSRRESLDILAPGRRRKNMSEFLGEASIPGQEPPTPSSCSLPSGSSGSTNTGDSWKNRAASRFSGFFSSGPSTSAFGREVDKMEQLEGKLHTYSLFGLPRLPRGLRFDHDSWEEEYDEDEDEDNACLRLEDSWRELIDGHEKLTRRQCHQQEAVWELLHTEASYIRKLRVIINLFLCCLLNLQESGLLCEVEAERLFSNIPEIAQLHRRLWASVMAPVLEKARRTRALLQPGDFLKGFKMFGSLFKPYIRYCMEEEGCMEYMRGLLRDNDLFRAYITWAEKHPQCQRLKLSDMLAKPHQRLTKYPLLLKSVLRKTEEPRAKEAVVAMIGSVERFIHHVNACMRQRQERQRLAAVVSRIDAYEVVESSSDEVDKLLKEFLHLDLTAPIPGASPEETRQLLLEGSLRMKEGKDSKMDVYCFLFTDLLLVTKAVKKAERTRVIRPPLLVDKIVCRELRDPGSFLLIYLNEFHSAVGAYTFQASGQALCRGWVDTIYNAQNQLQQLRAQEPPGSQQPLQSLEEEEDEQEEEEEEEEEEEEGEDSGTSAASSPTIMRKSSGSPDSQHCASDGSTETLAMVVVEPGDTLSSPEFDSGPFSSQSDETSLSTTASSATPTSELLPLGPVDGRSCSMDSAYGTLSPTSLQDFVAPGPMAELVPRAPESPRVPSPPPSPRLRRRTPVQLLSCPPHLLKSKSEASLLQLLAGAGTHGTPSAPSRSLSELCLAVPAPGIRTQGSPQEAGPSWDCRGAPSPGSGPGLVGCLAGEPAGSHRKRCGDLPSGASPRVQPEPPPGVSAQHRKLTLAQLYRIRTTLLLNSTLTASEV

SEQ ID NO: 33641 - protein, 1364 aa, Homo sapiens
  REGION 1..1364: note = ENSP00000330278
MAELKVEAPASVDWQKRCLTLETQLFRFRLQASKIRELLADKMQELEQRLLEAEQRAENAETQVGVMEEKVKLSNLKNVDSEGSLHRKYQELLKAIKGKDELISQLEAQLEKQKQMRAEEAKTVQEKAAKIKEWVTLKLAKLEMENQHLKSHNQRLVEQVGSLQDALEAIQIAPSRKLLVPPYGAAEQDSVPSEPGIQPMGQDSGSQAQGLKAAVLAPSPGALQSKDSVSEAASPLEDSSSSTVHSGETVEAKPLQPHLGRESPPHQPCMKLLTFRCSSASWGEGLVTAQRGMLPGTKTSAREGGPGSSLTLPKVRAPGTPRDSIQLAKRHHSQPQVGHGHFGRVVNIETEAFSALHPSGLPELESRARSREEPEKMEMEEPPPAGKNEERESPKALGAELEEVELGNKPPTPPLHQFSSWESRIYAVATSGMRLSDMSPRSNTACCASSPPALVSPGSFSGLVYKNVTVPVYTALKGRATQISNMPFMDESSGSDDDCSSQASFRISVPSSESRKTSGLGSPRAIKRGVSMSSLSSEGDYAIPPDACSLDSDYSEPEHKLQRTSSYSTDGLGLGGESLEKSGYLLKMGSQVKTWKRRWFVLRQGQIMYYKSPSDVIRKPQGQVDLNSRCQIVRGEGSQTFQLISEKKTYYLTADSPSLLEEWIRVLQSLLKVQATGPPALLRGGTKPTVKGWLTKVKHGHSKVVWCALVGKIFYYYRSHEDKRPLGCLPVRDAHIEEVDRSCDSDEDYEAGGTRRLLSSHCTLVIHPTEHSPTYLLIGTKHEKDTWLYHLTVAAGGSSAKVGTAYEQLIGKLMDGEGDPDSPLWRHPMLCYSKDGLYASLTTLPSEALQTEALKLFKSCQLFINVPVEAASVDYHVSLAQTALQVCLVHPELQSEIYCQLMKQTSCRPPQKYSLMQCWQLLALCAPLFLPQHHFLWYVKQQLQRHADPRSETGQYATYCQRAVERTLRTGEREARPSRMEVVSILLRNPFHHSLPFSIPVHFTNGTYHVVGFDGSSTVDEFLQRLNQEIGMRKPSHSGFALFTDDPSGRDLEHCLQGSVKICDAISKWEQAMKELHPGKSEGGTRVVKLMYKNRLYFRSQVKGETDRERLLLASQTSREIVAGRFPINKELALEMAALMAQVEYGDLEKPALPGPGGTSPAKAQHLLQQVLDRFHPRRYRHGAPAEQLRHLADMLTTKWATLQGCSPPECIRIYLTVARKWPFFGAKLFAAQPAQLSSKENALVWIAVNEDGVSILDHNTMQVHITYPYSSVTTFGGCRDDFMLVIRSIPDKSSGKSHIEKLIFRMAAPKIAEATFIMASYMNHCTTTVNPPTNPPGACQLWELDGRQFFSSVSCATKGPTLL

SEQ ID NO: 33642 - protein, 182 aa, Homo sapiens
  REGION 1..182: note = ENSP00000452988
  VARIANT 1: note = Any amino acid
XLFLPQHHFLWYVKQQLQRHADPRSETGQYATYCQRAVERTLRTGEREARPSRMEVVSILLRNPFHHSLPFSIPVHFTNGTYHVVGFDGSSTVDEFLQRLNQEIGMRKPSHSGFALFTDDPSGRDLEHCLQGSVKICDAISKWEQAMKELHPGKSEGCTFAVKSKGRRTENGCSLPLKPVER

SEQ ID NO: 33643 - protein, 34 aa, Homo sapiens
  REGION 1..34: note = ENSP00000453343
  VARIANT 1: note = Any amino acid
XFAAQPAQLSSKENALVWIAVNEDGVSILDHNTM

SEQ ID NO: 33644 - protein, 81 aa, Homo sapiens
  REGION 1..81: note = ENSP00000453699
  VARIANT 1: note = Any amino acid
XLVIRSIPDKSSGKSHIEKLIFRMAAPKIAEATFIMASYMNHCTTTVNPPTNPPGACQLWELDGRQFFSSVSCATKGPTLL

SEQ ID NO: 33645 - protein, 1493 aa, Homo sapiens
  REGION 1..1493: note = ENSP00000282406
MAELSEPEGPVDWKERCVALESQLMKFRVQASKIRELLAEKMQQLERQVIDAERQAEKAFQQVQVMEDKLKAANIQTSESETRLYNKCQDLESLIQEKDDVIQNLELQLEEQKQIRIQEAKIIEEKAAKIKEWVTVKLNELELENQNLRLINQNQTEEIRTMQSKLQEVQGKKSSTVSTLKLSEGQRLSSLTFGCFLSRARSPPQVVKSEEMSKISSKEPEFTEGKDMEEMEIPEKSVDNQVLENNRGQRTLHQTPCGSEQNRKTRTSFATDGGISQNSGAPVSDWSSDEEDGSKGRSKSRCTSTLSSHTSEEGVQCSRMGSEMYLTASDDSSSIFEEETFGIKRPEHKKLYSWQQEAQWKALNSPLGKGNSELSKKEQDSSSDELNKKFQSQRLDYSSSSSEANTPSPILTPALMPKHPNSLSGKGTQLVPSSHLPPPKLRIPNVFSISVALAKRHLSQPQLSSDRMFGTNRNAISMIRPLRPQETDLDLVDGDSTEVLENMDTSCDDGLFSYDSLDSPNSDDQEHCDSAKKVAYSKPPTPPLHRFPSWESRIYAVAKSGIRMSEAFNMESVNKNSAATLSYTTSGLYTSLIYKNMTTPVYTTLKGKATQISSSPFLDDSSGSEEEDSSRSSSRTSESDSRSRSGPGSPRAMKRGVSLSSVASESDYAIPPDAYSTDTEYSQPEQKLPKTCSSSSDNGKNEPLEKSGYLLKMSGKVKSWKRRWFVLKGGELLYYKSPSDVIRKPQGHIELSASCSILRGDNKQTVQLTTEKHTYYLTADSPNILEEWIKVLQNVLRVQAANPLSLQPEGKPTMKGLLTKVKHGYSKRVWCTLIGKTLYYFRSQEDKFPLGQIKLWEAKVEEVDRSCDSDEDYEASGRSLLSTHYTIVIHPKDQGPTYLLIGSKHEKDTWLYHLTVAAGSNNVNVGSEFEQLVCKLLNIDGEPSSQIWRHPTLCHSKEGIISPLTTLPSEALQTEAIKLFKTCQLFINAAVDSPAIDYHISLAQSALQICLTHPELQNEICCQLIKQTRRRQPQNQPGPLQGWQLLALCVGLFLPHHPFLWLLRLHLKRNADSRTEFGKYAIYCQRCVERTQQNGDREARPSRMEILSTLLRNPYHHSLPFSIPVHFMNGIYQVVGFDASTTVEEFLNTLNQDTGMRKPAQSGFALFTDDPSGRDLEHCLQGNIKICDIISKWEQASKEQQPGKCEGTRTVRLTYKNRLYFSVQARGETDREKLLLMYQTNDQIINGLFPLNKDLALEMAALLSQVEIGDFERPFSTPAGHVTNQCKVNQTLKQVIEKFYPKRYRDGCSEEQLRQLCQRLSTRWMALRGHSAADCVRIYLTVARKWPFFGAKLFLAKPITPSSLGSTFLWLAVHEDGLSLLEYNSMRLIVSYVYKSLMTFGGYQDDFMVVINNTHSKDKPTEKLLFAMAKPKILEITLLIASYINNFHQQKAAFHHLSAPALLSAQTRGPQARMMGSQPLLSSSRPTKGPTLL

SEQ ID NO: 33646 - protein, 89 aa, Homo sapiens
  REGION 1..89: note = ENSP00000427746
MAELSEPEGPVDWKERCVALESQLMKFRVQASKIRELLAEKMQQLERQVIDAERQAEKAFQQTESCSVAQAGVQWRDLGLLQPPPPGFK

SEQ ID NO: 33647 - protein, 88 aa, Homo sapiens
  REGION 1..88: note = ENSP00000430377
SKEQQPGKCEGTRTVRLTYKNRLYFSVQARGETDREKLLLMYQTNDQIINGLFPLNKDLALEMAALLSQAALPATFNQMDGPPGTQCC

SEQ ID NO: 33648 - protein, 490 aa, Homo sapiens
  REGION 1..490: note = ENSP00000326706
MEEEGVKEAGEKPRGAQMVDKAGWIKKSSGGLLGFWKDRYLLLCQAQLLVYENEDDQKCVETVELGSYEKCQDLRALLKRKHRFILLRSPGNKVSDIKFQAPTGEEKESWIKALNEGINRGKNKAFDEVKVDKSCALEHVTRDRVRGGQRRRPPTRVHLKEVASAASDGLLRLDLDVPDSGPPVFAPSNHVSEAQPRETPRPLMPPTKPFLAPETTSPGDRVETPVGERAPTPVSASSEVSPESQEDSETPAEEDSGSEQPPNSVLPDKLKVSWENPSPQEAPAAESAEPSQAPCSETSEAAPREGGKPPTPPPKILSEKLKASMGEMQASGPPAPGTVQVSVNGMDDSPEPAKPSQAEGTPGTPPKDATTSTALPPWDLPPQFHPRCSSLGDLLGEGPRHPLQPRERLYRAQLEVKVASEQTEKLLNKVLGSEPAPVSAETLLSQAVEQLRQATQVLQEMRDLGELSQEAPGLREKRKELVTLYRRSAP

SEQ ID NO: 33649 - protein, 440 aa, Homo sapiens
  REGION 1..440: note = ENSP00000483505
MEEEDDQKCVETVELGSYEKCQDLRALLKRKHRFILLRSPGNKVSDIKFQAPTGEEKESWIKALNEGINRGKNKAFDEVKVDKSCALEHVTRDRVRGGQRRRPPTRVHLKEVASAASDGLLRLDLDVPDSGPPVFAPSNHVSEAQPRETPRPLMPPTKPFLAPETTSPGDRVETPVGERAPTPVSASSEVSPESQEDSETPAEEDSGSEQPPNSVLPDKLKVSWENPSPQEAPAAESAEPSQAPCSETSEAAPREGGKPPTPPPKILSEKLKASMGEMQASGPPAPGTVQVSVNGMDDSPEPAKPSQAEGTPGTPPKDATTSTALPPWDLPPQFHPRCSSLGDLLGEGPRHPLQPRERLYRAQLEVKVASEQTEKLLNKVLGSEPAPVSAETLLSQAVEQLRQATQVLQEMRDLGELSQEAPGLREKRKELVTLYRRSAP

SEQ ID NO: 33650 - protein, 685 aa, Homo sapiens
  REGION 1..685: note = ENSP00000274289
MELLRTITYQPAASTKMCEQALGKGCGADSKKKRPPQPPEESQPPQSQAQVPPAAPHHHHHHSHSGPEISRIIVDPTTGKRYCRGKVLGKGGFAKCYEMTDLTNNKVYAAKIIPHSRVAKPHQREKIDKEIELHRILHHKHVVQFYHYFEDKENIYILLEYCSRRSMAHILKARKVLTEPEVRYYLRQIVSGLKYLHEQEILHRDLKLGNFFINEAMELKVGDFGLAARLEPLEHRRRTICGTPNYLSPEVLNKQGHGCESDIWALGCVMYTMLLGRPPFETTNLKETYRCIREARYTMPSSLLAPAKHLIASMLSKNPEDRPSLDDIIRHDFFLQGFTPDRLSSSCCHTVPDFHLSSPAKNFFKKAAAALFGGKKDKARYIDTHNRVSKEDEDIYKLRHDLKKTSITQQPSKHRTDEELQPPTTTVARSGTPAVENKQQIGDAIRMIVRGTLGSCSSSSECLEDSTMGSVADTVARVLRGCLENMPEADCIPKEQLSTSFQWVTKWVDYSNKYGFGYQLSDHTVGVLFNNGAHMSLLPDKKTVHYYAELGQCSVFPATDAPEQFISQVTVLKYFSHYMEENLMDGGDLPSVTDIRRPRLYLLQWLKSDKALMMLFNDGTFQVNFYHDHTKIIICSQNEEYLLTYINEDRISTTFRLTTLLMSGCSSELKNRMEYALNMLLQRCN

SEQ ID NO: 33651 - protein, 671 aa, Homo sapiens
  REGION 1..671: note = ENSP00000478685
MELLRTITYQPAASTKMCEQALGKGCGADSKKKRPPQPPEESQPPQSQAQVPPAISRIIVDPTTGKRYCRGKVLGKGGFAKCYEMTDLTNNKVYAAKIIPHSRVAKPHQREKIDKEIELHRILHHKHVVQFYHYFEDKENIYILLEYCSRRSMAHILKARKVLTEPEVRYYLRQIVSGLKYLHEQEILHRDLKLGNFFINEAMELKVGDFGLAARLEPLEHRRRTICGTPNYLSPEVLNKQGHGCESDIWALGCVMYTMLLGRPPFETTNLKETYRCIREARYTMPSSLLAPAKHLIASMLSKNPEDRPSLDDIIRHDFFLQGFTPDRLSSSCCHTVPDFHLSSPAKNFFKKAAAALFGGKKDKARYIDTHNRVSKEDEDIYKLRHDLKKTSITQQPSKHRTDEELQPPTTTVARSGTPAVENKQQIGDAIRMIVRGTLGSCSSSSECLEDSTMGSVADTVARVLRGCLENMPEADCIPKEQLSTSFQWVTKWVDYSNKYGFGYQLSDHTVGVLFNNGAHMSLLPDKKTVHYYAELGQCSVFPATDAPEQFISQVTVLKYFSHYMEENLMDGGDLPSVTDIRRPRLYLLQWLKSDKALMMLFNDGTFQVNFYHDHTKIIICSQNEEYLLTYINEDRISTTFRLTTLLMSGCSSELKNRMEYALNMLLQRCN

SEQ ID NO: 33652 - protein, 336 aa, Homo sapiens
  REGION 1..336: note = ENSP00000468376
MYTVLTGTPPFMASPLSEMYQNIREGHYPEPAHLSANARRLIVHLLAPNPAERPSLDHLLQDDFFTQGFTPDRLPAHSCHSPPIFAIPPPLGRIFRKVGQRLLTQCRPPCPFTPKEASGPGEGGPDPDSMEWDGESSLSAKEVPCLEGPIHLVAQGTLQSDLAGPEGSRRPEVEAALRHLQLCLDVGPPATQDPLGEQQPILWAPKWVDYSSKYGFGYQLLDGGRTGRHPHGPATPRREGTLPTPVPPAGPGLCLLRFLASEHALLLLFSNGMVQVSFSGVPAQLVLSGEGEGLQLTLWEQGSPGTSYSLDVPRSHGCAPTTGQHLHHALRMLQSI

SEQ ID NO: 33653 - protein, 304 aa, Homo sapiens
  REGION 1..304: note = ENSP00000493341
MYTVLTGTPPFMASPLSEMYQNIREGHYPEPAHLSANARRLIVHLLAPNPAERPSLDHLLQDDFFTQGFTPDRLPAHSCHSPPIFAIPPPLGRIFRKVGQRLLTQCRPPCPFTPKEASGPGEGGPDPDSMEWDGESSLSAKEVPCLEGPIHLVAQGTLQSDLAGPEGSRRPEVEAALRHLQLCLDVGPPATQDPLGEQQPILWAPKWVDYSSKYGFGYQLLDGGRTGRHPHGPATPRRPSVLHAQLREAGSLRPEGCARPAGRQAGRAAALCRLPAAAAAGGGDPPHTCATCWTRPLPPALPGL

SEQ ID NO: 33654 - protein, 336 aa, Homo sapiens; identical to SEQ ID NO: 33652
  REGION 1..336: note = ENSP00000466248

SEQ ID NO: 33655 - protein, 299 aa, Homo sapiens
  REGION 1..299: note = ENSP00000465896
MYTVLTGTPPFMASPLSEMYQNIREGHYPEPAHLSANARRLIVHLLAPNPAERPSLDHLLQDDFFTQGFTPDRLPAHSCHSPPIFAIPPPLGRIFRKVGQRLLTQCRPPCPFTPKEASGPGEGGPDPDSMEWDGESSLSAKEVPCLEGPIHLVAQGTLQSDLAGPEGSRRPEVEAALRHLQLCLDVGPPATQDPLGEQQPILWAPKWVDYSSKYGFGYQLLDGGRTGRHPHGPATPRRVSFSGVPAQLVLSGEGEGLQLTLWEQGSPGTSYSLDVPRSHGCAPTTGQHLHHALRMLQSI

SEQ ID NO: 33656 - protein, 161 aa, Homo sapiens
  REGION 1..161: note = ENSP00000481720
MAEFPSKVSTRTSSPAQGAEASVSALRPDLGFVRSRLGALMLLQLVLGLLVWALIADTPYHLYPAYGWVMFVAVFLWLVTIVLFNLYLFQLHMKLYMVPWPLVLMIFNISATVLYITAFIACSAAVDLTSLRGTRPYNQRAAASVLVTSRRPQLDCRRCLL

SEQ ID NO: 33657 - protein, 182 aa, Homo sapiens
  REGION 1..182: note = ENSP00000219207
MAEFPSKVSTRTSSPAQGAEASVSALRPDLGFVRSRLGALMLLQLVLGLLVWALIADTPYHLYPAYGWVMFVAVFLWLVTIVLFNLYLFQLHMKLYMVPWPLVLMIFNISATVLYITAFIACSAAVDLTSLRGTRPYNQRAAASFFACLVMIAYGVSAFFSYQAWRGVGSNAATSQMAGGYA

SEQ ID NO: 33658 - protein, 124 aa, Homo sapiens
  REGION 1..124: note = ENSP00000454656
MAEFPSKVSTRTSSPAQGAEASVSALRPDLGFVRSRLGALMLLQLLMIFNISATVLYITAFIACSAAVDLTSLRGTRPYNQRAAASFFACLVMIAYGVSAFFSYQAWRGVGSNAATSQMAGGYA

SEQ ID NO: 33659 - protein, 91 aa, Homo sapiens
  REGION 1..91: note = ENSP00000463575
MFVAVFLWLVTIVLFNLYLFQLHMKLYMVPWPLVLMIFNISATVLYITAFIACSAAVDLTSLRGTRPYNQRAAASFFACLVMIAYGVSAFF

SEQ ID NO: 33660 - protein, 418 aa, Homo sapiens
  REGION 1..418: note = ENSP00000419354
MLENHILHKRIYILTFFSQQIFILCHAHFIFFFTVRDFCRQDEKCDYYFSVDADVVLTNPRTLKILIEQNRKIIAPLVTRHGKLWSNFWGALSPDGYYARSEDYVDIVQGNRVGVWNVPYMANVYLIKGKTLRSEMNERNYFVRDKLDPDMALCRNAREMTLQREKDSPTPETFQMLSPPKGVFMYISNRHEFGRLLSTANYNTSHYNNDLWQIFENPVDWKEKYINRDYSKIFTENIVEQPCPDVFWFPIFSEKACDELVEEMEHYGKWSGGKHHDSRISGGYENVPTDDIHMKQVDLENVWLHFIREFIAPVTLKVFAGYYTKGFALLNFVVKYSPERQRSLRPHHDASTFTINIALNNVGEDFQGGGCKFLRYNCSIESPRKGWSFMHPGRLTHLHEGLPVKNGTRYIAVSFIDP

SEQ ID NO: 33661 - protein, 758 aa, Homo sapiens
  REGION 1..758: note = ENSP00000282903
MGGCTVKPQLLLLALVLHPWNPCLGADSEKPSSIPTDKLLVITVATKESDGFHRFMQSAKYFNYTVKVLGQGEEWRGGDGINSIGGGQKVRLMKEVMEHYADQDDLVVMFTECFDVIFAGGPEEVLKKFQKANHKVVFAADGILWPDKRLADKYPVVHIGKRYLNSGGFIGYAPYVNRIVQQWNLQDNDDDQLFYTKVYIDPLKREAINITLDHKCKIFQTLNGAVDEVVLKFENGKARAKNTFYETLPVAINGNGPTKILLNYFGNYVPNSWTQDNGCTLCEFDTVDLSAVDVHPNVSIGVFIEQPTPFLPRFLDILLTLDYPKEALKLFIHNKEVYHEKDIKVFFDKAKHEIKTIKIVGPEENLSQAEARNMGMDFCRQDEKCDYYFSVDADVVLTNPRTLKILIEQNRKIIAPLVTRHGKLWSNFWGALSPDGYYARSEDYVDIVQGNRVGVWNVPYMANVYLIKGKTLRSEMNERNYFVRDKLDPDMALCRNAREMTLQREKDSPTPETFQMLSPPKGVFMYISNRHEFGRLLSTANYNTSHYNNDLWQIFENPVDWKEKYINRDYSKIFTENIVEQPCPDVFWFPIFSEKACDELVEEMEHYGKWSGGKHHDSRISGGYENVPTDDIHMKQVDLENVWLHFIREFIAPVTLKVFAGYYTKGFALLNFVVKYSPERQRSLRPHHDASTFTINIALNNVGEDFQGGGCKFLRYNCSIESPRKGWSFMHPGRLTHLHEGLPVKNGTRYIAVSFIDP

SEQ ID NO: 33662 - protein, 737 aa, Homo sapiens
  REGION 1..737: note = ENSP00000353170
MGGCTVKPQLLLLALVLHPWNPCLGADSEKPSSIPTDKLLVITVATKESDGFHRFMQSAKYFNYTVKVLGQGEEWRGGDGINSIGGGQKVRLMKEVMEHYADQDDLVVMFTECFDVIFAGGPEEVLKKFQKANHKVVFAADGILWPDKRLADKYPVVHIGKRYLNSGGFIGYAPYVNRIVQQWNLQDNDDDQLFYTKVYIDPLKREAINITLDHKCKIFQTLNGAVDEVVLKFENGKARAKNTFYETLPVAINGNGPTKILLNYFGNYVPNSWTQDNGCTLCEFDTVDLSAVDVHPNVSIGVFIEQPTPFLPRFLDILLTLDYPKEALKLFIHNKEVYHEKDIKVFFDKAKHEIKTIKIVGPEENLSQAEARNMGMDFCRQDEKCDYYFSVDADVVLTNPRTLKILIEQNRKIIAPLVTRHGKLWSNFWGALSPDGYYARSEDYVDIVQGNRVGVWNVPYMANVYLIKGKTLRSEMNERNYFVRDKLDPDMALCRNAREMGVFMYISNRHEFGRLLSTANYNTSHYNNDLWQIFENPVDWKEKYINRDYSKIFTENIVEQPCPDVFWFPIFSEKACDELVEEMEHYGKWSGGKHHDSRISGGYENVPTDDIHMKQVDLENVWLHFIREFIAPVTLKVFAGYYTKGFALLNFVVKYSPERQRSLRPHHDASTFTINIALNNVGEDFQGGGCKFLRYNCSIESPRKGWSFMHPGRLTHLHEGLPVKNGTRYIAVSFIDP

SEQ ID NO: 33663 - protein, 703 aa, Homo sapiens
  REGION 1..703: note = ENSP00000420094
MQSAKYFNYTVKVLGQGEEWRGGDGINSIGGGQKVRLMKEVMEHYADQDDLVVMFTECFDVIFAGGPEEVLKKFQKANHKVVFAADGILWPDKRLADKYPVVHIGKRYLNSGGFIGYAPYVNRIVQQWNLQDNDDDQLFYTKVYIDPLKREAINITLDHKCKIFQTLNGAVDEVVLKFENGKARAKNTFYETLPVAINGNGPTKILLNYFGNYVPNSWTQDNGCTLCEFDTVDLSAVDVHPNVSIGVFIEQPTPFLPRFLDILLTLDYPKEALKLFIHNKEVYHEKDIKVFFDKAKHEIKTIKIVGPEENLSQAEARNMGMDFCRQDEKCDYYFSVDADVVLTNPRTLKILIEQNRKIIAPLVTRHGKLWSNFWGALSPDGYYARSEDYVDIVQGNRVGVWNVPYMANVYLIKGKTLRSEMNERNYFVRDKLDPDMALCRNAREMTLQREKDSPTPETFQMLSPPKGVFMYISNRHEFGRLLSTANYNTSHYNNDLWQIFENPVDWKEKYINRDYSKIFTENIVEQPCPDVFWFPIFSEKACDELVEEMEHYGKWSGGKHHDSRISGGYENVPTDDIHMKQVDLENVWLHFIREFIAPVTLKVFAGYYTKGFALLNFVVKYSPERQRSLRPHHDASTFTINIALNNVGEDFQGGGCKFLRYNCSIESPRKGWSFMHPGRLTHLHEGLPVKNGTRYIAVSFIDP

SEQ ID NO: 33664 - protein, 229 aa, Homo sapiens
  REGION 1..229: note = ENSP00000419963
MTRFGVRLYKLLVITVATKESDGFHRFMQSAKYFNYTVKVLGQGEEWRGGDGINSIGGGQKVRLMKEVMEHYADQDDLVVMFTECFDVIFAGGPEEVLKKFQKANHKVVFAADGILWPDKRLADKYPVVHIGKRYLNSGGFIGYAPYVNRIVQQWNLQDNDDDQLFYTKVYIDPLKREAINITLDHKCKIFQTLNGAVDEVVLKFENGKARAKNTFYETLPVAINGNGP

SEQ ID NO: 33665 - protein, 98 aa, Homo sapiens
  REGION 1..98: note = ENSP00000419880
MGGCTVKPQLLLLALVLHPWNPCLGADSEKPSSIPTDKLLVITVATKESDGFHRFMQSAKYFNYTVKKEGSVSQVFSTNKRRTRRYLGPWSRRRMERW

SEQ ID NO: 33666 - protein, 122 aa, Homo sapiens
  REGION 1..122: note = ENSP00000403335
MGLLECCARCLVGAPFASLVATGLCFFGVALFCGCGHEALTGTEKLIETYFSKNYQDYEYLINVIHAFQYVIYGTASFFFLYGALLLAEGFYTTGAVRQIFGDYKTTICGKGLSATVTGGQK

SEQ ID NO: 33667 - protein, 136 aa, Homo sapiens
  REGION 1..136: note = ENSP00000480409
MGLLECCARCLVGAPFASLVATGLCFFGVALFCGCGHEALTGTEKLIETYFSKNYQDYEYLINVIHAFQYVIYGTASFFFLYGALLLAEGFYTTGAVRQIFGDYKTTICGKGLSATVTGGQKGRGSRGQHQAHSLE

SEQ ID NO: 33668 - protein, 136 aa, Homo sapiens; identical to SEQ ID NO: 33667
  REGION 1..136: note = ENSP00000409802

SEQ ID NO: 33669 - protein, 127 aa, Homo sapiens
  REGION 1..127: note = ENSP00000413931
MGLLECCARCLVGAPFASLVATGLCFFGVALFCGCGHEALTGTEKLIETYFSKNYQDYEYLINVIHAFQYVIYGTASFFFLYGALLLAEGFYTTGAVRQIFGDYKTTICGKGLSATVTGGQKGRGSR

SEQ ID NO: 33670 - protein, 100 aa, Homo sapiens
  REGION 1..100: note = ENSP00000393391
MGLLECCARCLVGAPFASLVATGLCFFGVALFCGCGHEALTGTEKLIETYFSKNYQDYEYLINVIHAFQYVIYGTASFFFLYGALLLAEGFYTTGAVRQI

SEQ ID NO: 33671 - protein, 111 aa, Homo sapiens
  REGION 1..111: note = ENSP00000391853
MGLLECCARCLVGAPFASLVATGLCFFGVALFCGCGHEALTGTEKLIETYFSKNYQDYEYLINVIHAFQYVIYGTASFFFLYGALLLAEGFYTTGAVRQIFGDYKTTICGK

SEQ ID NO: 33672 - protein, 277 aa, Homo sapiens
  REGION 1..277: note = ENSP00000484450
MGLLECCARCLVGAPFASLVATGLCFFGVALFCGCGHEALTGTEKLIETYFSKNYQDYEYLINVIHAFQYVIYGTASFFFLYGALLLAEGFYTTGAVRQIFGDYKTTICGKGLSATVTGGQKGRGSRGQHQAHSLERVCHCLGKWLGHPDKFVGITYALTVVWLLVFACSAVPVYIYFNTWTTCQSIAFPSKTSASIGSLCADARMYGVLPWNAFPGKVCGSNLLSICKTAEFQMTFHLFIAAFVGAAATLVSLLTFMIAATYNFAVLKLMGRGTKF

SEQ ID NO: 33673 - protein, 242 aa, Homo sapiens
  REGION 1..242: note = ENSP00000477619
MGLLECCARCLVGAPFASLVATGLCFFGVALFCGCGHEALTGTEKLIETYFSKNYQDYEYLINVIHAFQYVIYGTASFFFLYGALLLAEGFYTTGAVRQIFGDYKTTICGKGLSATFVGITYALTVVWLLVFACSAVPVYIYFNTWTTCQSIAFPSKTSASIGSLCADARMYGVLPWNAFPGKVCGSNLLSICKTAEFQMTFHLFIAAFVGAAATLVSLLTFMIAATYNFAVLKLMGRGTKF

SEQ ID NO: 33674 - protein, 277 aa, Homo sapiens; identical to SEQ ID NO: 33672
  REGION 1..277: note = ENSP00000481006

SEQ ID NO: 33675 - protein, 309 aa, Homo sapiens
  REGION 1..309: note = ENSP00000329697
MGVARGPGSRGQHPPPRQQEVCAEGPRARLHPAPPGLGASLPFAILTLVNAPYKRGFYCGDDSIRYPYRPDTITHGLMAGVTITATVILVSAGEAYLVYTDRLYSRSDFNNYVAAVYKVLGTFLFGAAVSQSLTDLAKYMIGRLRPNFLAVCDPDWSRVNCSVYVQLEKVCRGNPADVTEARLSFYSGHSSFGMYCMVFLALYVQARLCWKWARLLRPTVQFFLVAFALYVGYTRVSDYKHHWSDVLVGLLQGALVAALTVCYISDFFKARPPQHCLKEEELERKPSLSLTLTLGEADHNHYGYPHSSS

SEQ ID NO: 33676 - protein, 288 aa, Homo sapiens
  REGION 1..288: note = ENSP00000388565
MQRRWVFVLLDVLCLLVASLPFAILTLVNAPYKRGFYCGDDSIRYPYRPDTITHGLMAGVTITATVILVSAGEAYLVYTDRLYSRSDFNNYVAAVYKVLGTFLFGAAVSQSLTDLAKYMIGRLRPNFLAVCDPDWSRVNCSVYVQLEKVCRGNPADVTEARLSFYSGHSSFGMYCMVFLALYVQARLCWKWARLLRPTVQFFLVAFALYVGYTRVSDYKHHWSDVLVGLLQGALVAALTVCYISDFFKARPPQHCLKEEELERKPSLSLTLTLGEADHNHYGYPHSSS

SEQ ID NO: 33677 - protein, 232 aa, Homo sapiens
  REGION 1..232: note = ENSP00000269812
MAGVTITATVILVSAGEAYLVYTDRLYSRSDFNNYVAAVYKVLGTFLFGAAVSQSLTDLAKYMIGRLRPNFLAVCDPDWSRVNCSVYVQLEKVCRGNPADVTEARLSFYSGHSSFGMYCMVFLALYVQARLCWKWARLLRPTVQFFLVAFALYVGYTRVSDYKHHWSDVLVGLLQGALVAALTVCYISDFFKARPPQHCLKEEELERKPSLSLTLTLGEADHNHYGYPHSSS

SEQ ID NO: 33678 - protein, 208 aa, Homo sapiens
  REGION 1..208: note = ENSP00000488312
MAGVTITATVILVSAGEAYLVYTDRLYSRSDFNNYVAAVYKVLGTFLFGAAVSQSLTDLAKYMIGRLRPNFLAVCDPDWSRVNCSVYVQLEKVCRGNPADVTEARLSFYSGHSSFGMYCMVFLALYVQARLCWKWARLLRPTVQFFLVAFALYVGYTRVSDYKHHWSDVLVGLLQGALVAALTVCYISDFFKARPPQHCLKEEELERK

SEQ ID NO: 33679 - protein, 136 aa, Homo sapiens
  REGION 1..136: note = ENSP00000466947
  VARIANT 1: note = Any amino acid
XVSQSLTDLAKYMIGRLRPNFLAVCDPDWSRVNCSVYVQLEKVCRGNPADVTEARLSFYSGHSSFGMYCMVFLALYVQARLCWKWARLLRPTVQFFLVAFALYVGYTRVSDYKHHWSDVLVGLLQGALVAALTVSF

SEQ ID NO: 33680 - protein, 178 aa, Homo sapiens
  REGION 1..178: note = ENSP00000466545
MQRRWVFVLLDVLCLLVGFSSPPASLPFAILTLVNAPYKRGFYCGDDSIRYPYRPDTITHGLMAGVTITATVILVSAGEAYLVYTDRLYSRSDFNNYVAAVYKVLGTFLFGAAVSQSLTDLAKYMIGRLRPNFLAVCDPDWSRVNCSVYVQLEKVCRGNPADVTEARLSFYSGHSSFG

SEQ ID NO: 33681 - protein, 311 aa, Homo sapiens
  REGION 1..311: note = ENSP00000360296
MQNYKYDKAIVPESKNGGSPALNNNPRRSGSKRVLLICLDLFCLFMAGLPFLIIETSTIKPYHRGFYCNDESIKYPLKTGETINDAVLCAVGIVIAILAIITGEFYRIYYLKKSRSTIQNPYVAALYKQVGCFLFGCAISQSFTDIAKVSIGRLRPHFLSVCNPDFSQINCSEGYIQNYRCRGDDSKVQEARKSFFSGHASFSMYTMLYLVLYLQARFTWRGARLLRPLLQFTLIMMAFYTGLSRVSDHKHHPSDVLAGFAQGALVACCIVFFVSDLFKTKTTLSLPAPAIRKEILSPVDIIDRNNHHNMM

SEQ ID NO: 33682 - protein, 267 aa, Homo sapiens
  REGION 1..267: note = ENSP00000407979
MRELAIEIGVRALLFGVFVFTEFLDPFQRVIQPEEIWLYKNPLVQSDNIPTRLMFAISFLTPLAVICVVKIIRRTDKTEIKEAFLAVSLALALNGVCTNTIKLIVGRPRPDFFYRCFPDGVMNSEMHCTGDPDLVSEGRKSFPSIHSSFAFSGLGFTTFYLAGKLHCFTESGRGKSWRLCAAILPLYCAMMIALSRMCDYKHHWQDSFVGGVIGLIFAYICYRQHYPPLANTACHKPYVSLRVPASLKKEERPTADSAPSLPLEGIT

SEQ ID NO: 33683 - protein, 261 aa, Homo sapiens
  REGION 1..261: note = ENSP00000358069
MHGIGPSGSFTEFLDPFQRVIQPEEIWLYKNPLVQSDNIPTRLMFAISFLTPLAVICVVKIIRRTDKTEIKEAFLAVSLALALNGVCTNTIKLIVGRPRPDFFYRCFPDGVMNSEMHCTGDPDLVSEGRKSFPSIHSSFAFSGLGFTTFYLAGKLHCFTESGRGKSWRLCAAILPLYCAMMIALSRMCDYKHHWQDSFVGGVIGLIFAYICYRQHYPPLANTACHKPYVSLRVPASLKKEERPTADSAPSLPLEGITEGPV

SEQ ID NO: 33684 - protein, 271 aa, Homo sapiens
  REGION 1..271: note = ENSP00000381302
MRELAIEIGVRALLFGVFVFTEFLDPFQRVIQPEEIWLYKNPLVQSDNIPTRLMFAISFLTPLAVICVVKIIRRTDKTEIKEAFLAVSLALALNGVCTNTIKLIVGRPRPDFFYRCFPDGVMNSEMHCTGDPDLVSEGRKSFPSIHSSFAFSGLGFTTFYLAGKLHCFTESGRGKSWRLCAAILPLYCAMMIALSRMCDYKHHWQDSFVGGVIGLIFAYICYRQHYPPLANTACHKPYVSLRVPASLKKEERPTADSAPSLPLEGITEGPV

SEQ ID NO: 33685 - protein, 325 aa, Homo sapiens
  REGION 1..325: note = ENSP00000364008
MAVGNNTQRSYSIIPCFIFVELVIMAGTVLLAYYFECTDTFQVHIQGFFCQDGDLMKPYPGTEEESFITPLVLYCVLAATPTAIIFIGEISMYFIKSTRESLIAQEKTILTGECCYLNPLLRRIIRFTGVFAFGLFATDIFVNAGQVVTGHLTPYFLTVCKPNYTSADCQAHHQFINNGNICTGDLEVIEKARRSFPSKHAALSIYSALYATMYITSTIKTKSSRLAKPVLCLGTLCTAFLTGLNRVSEYRNHCSDVIAGFILGTAVALFLGMCVVHNFKGTQGSPSKPKPEDPRGVPLMAFPRIESPLETLSAQNHSASMTEVT

SEQ ID NO: 33686 - protein, 103 aa, Homo sapiens
  REGION 1..103: note = ENSP00000410223
MAVGNNTQRSYSIIPCFIFVELVIMAGTVLLAYYFECTDTFQVHIQGFFCQDGDLMKPYPGTEEESFITPLVLYCVLAATPTAIIFIGEISMYFIKSTRESLI

SEQ ID NO: 33687 - protein, 325 aa, Homo sapiens; identical to SEQ ID NO: 33685
  REGION 1..325: note = ENSP00000378496

SEQ ID NO: 33688 - protein, 325 aa, Homo sapiens; identical to SEQ ID NO: 33685
  REGION 1..325: note = ENSP00000478338

SEQ ID NO: 33689 - protein, 103 aa, Homo sapiens; identical to SEQ ID NO: 33686
  REGION 1..103: note = ENSP00000488301

SEQ ID NO: 33690 - protein, 325 aa, Homo sapiens; identical to SEQ ID NO: 33685
  REGION 1..325: note = ENSP00000477959

SEQ ID NO: 33691 - protein, 228 aa, Homo sapiens
  REGION 1..228: note = ENSP00000488839
MLYFQLVIMAGTVLLAYYFECTDTFQVHIQGFFCQDGDLMKPYPGTEEESFITPLVLYCVLAATPTAIIFIGEISMYFIKSTRESLIAQEKTILTGECCYLNPLLRRIIRFTGVFAFGLFATDIFVNAGQVVTGHLTPYFLTVCKPNYTSADCQAHHQFINNGNICTGDLEVIEKARRSFPSKHAALSIYSALYATMYITSTIKTKSSRLAKPVLCLGTLCTAFLTGL

SEQ ID NO: 33692 - protein, 763 aa, Homo sapiens
  REGION 1..763: note = ENSP00000359204
MQRAGSSGGRGECDISGAGRLGLEEAARLSCAVHTSPGGGRRPGQAAGMSAKERPKGKVIKDSVTLLPCFYFVELPILASSVVSLYFLELTDVFKPVHSGFSCYDRSLSMPYIEPTQEAIPFLMLLSLAFAGPAITIMVGEGILYCCLSKRRNGVGLEPNINAGGCNFNSFLRRAVRFVGVHVFGLCSTALITDIIQLSTGYQAPYFLTVCKPNYTSLNVSCKENSYIVEDICSGSDLTVINSGRKSFPSQHATLAAFAAVYVSMYFNSTLTDSSKLLKPLLVFTFIICGIICGLTRITQYKNHPVDVYCGFLIGGGIALYLGLYAVGNFLPSDESMFQHRDALRSLTDLNQDPNRLLSAKNGSSSDGIAHTEGILNRNHRDASSLTNLKRANADVEIITPRSPMGKENMVTFSNTLPRANTPSVEDPVRRNASIHASMDSARSKQLLTQWKNKNESRKLSLQVIEPEPGQSPPRSIEMRSSSEPSRVGVNGDHHGPGNQYLKIQPGAVPGCNNSMPGGPRVSIQSRPGSSQLVHIPEETQENISTSPKSSSARAKWLKAAEKTVACNRSNSQPRIMQVIAMSKQQGVLQSSPKNTEGSTVSCTGSIRYKTLTDHEPSGIVRVEAHPENNRPIIQIPSTEGEGSGSWKWKAPEKGSLRQTYELNDLNRDSESCESLKDSFGSGDRKRSNIDSNEHHHHGITTIRVTPVEGSEIGSETLSISSSRDSTLRRKGNIILIPERSNSPENTRNIFYKGTSPTRAYKD

SEQ ID NO: 33693 - protein, 605 aa, Homo sapiens
  REGION 1..605: note = ENSP00000359203
MNMFDADTTTNLVTISFILPIGVHVFGLCSTALITDIIQLSTGYQAPYFLTVCKPNYTSLNVSCKENSYIVEDICSGSDLTVINSGRKSFPSQHATLAAFAAVYVSMYFNSTLTDSSKLLKPLLVFTFIICGIICGLTRITQYKNHPVDVYCGFLIGGGIALYLGLYAVGNFLPSDESMFQHRDALRSLTDLNQDPNRLLSAKNGSSSDGIAHTEGILNRNHRDASSLTNLKRANADVEIITPRSPMGKENMVTFSNTLPRANTPSVEDPVRRNASIHASMDSARSKQLLTQWKNKNESRKLSLQVIEPEPGQSPPRSIEMRSSSEPSRVGVNGDHHGPGNQYLKIQPGAVPGCNNSMPGGPRVSIQSRPGSSQLVHIPEETQENISTSPKSSSARAKWLKAAEKTVACNRSNSQPRIMQVIAMSKQQGVLQSSPKNTEGSTVSCTGSIRYKTLTDHEPSGIVRVEAHPENNRPIIQIPSTEGEGSGSWKWKAPEKGSLRQTYELNDLNRDSESCESLKDSFGSGDRKRSNIDSNEHHHHGITTIRVTPVEGSEIGSETLSISSSRDSTLRRKGNIILIPERSNSPENTRNIFYKGTSPTRAYKD

SEQ ID NO: 33694 - protein, 705 aa, Homo sapiens
  REGION 1..705: note = ENSP00000394913
MQRAGSSGGRGECDISGAGRLGLEEAARLSCAVHTSPGGGRRPGQAAGMSAKERPKGKVIKDSVTLLPCFYFVELPILASSVVSLYFLELTDVFKPVHSGFSCYDRSLSMPYIEPTQEAIPFLMLLSLAFAGPAITIMVGEGILYCCLSKRRNGVGLEPNINAGGCNFNSFLRRAVRFVGVHVFGLCSTALITDIIQLSTGYQAPYFLTVCKPNYTSLNVSCKENSYIVEDICSGSDLTVINSGRKSFPSQHATLAAFAAVYVSGLYAVGNFLPSDESMFQHRDALRSLTDLNQDPNRLLSAKNGSSSDGIAHTEGILNRNHRDASSLTNLKRANADVEIITPRSPMGKENMVTFSNTLPRANTPSVEDPVRRNASIHASMDSARSKQLLTQWKNKNESRKLSLQVIEPEPGQSPPRSIEMRSSSEPSRVGVNGDHHGPGNQYLKIQPGAVPGCNNSMPGGPRVSIQSRPGSSQLVHIPEETQENISTSPKSSSARAKWLKAAEKTVACNRSNSQPRIMQVIAMSKQQGVLQSSPKNTEGSTVSCTGSIRYKTLTDHEPSGIVRVEAHPENNRPIIQIPSTEGEGSGSWKWKAPEKGSLRQTYELNDLNRDSESCESLKDSFGSGDRKRSNIDSNEHHHHGITTIRVTPVEGSEIGSETLSISSSRDSTLRRKGNIILIPERSNSPENTRNIFYKGTSPTRAYKD

SEQ ID NO: 33695 - protein, 629 aa, Homo sapiens
  REGION 1..629: note = ENSP00000387890
MENSTTTISREELEELQEAFNKIDIDNSGYVSDYELQDLFKEASLPLPGYKVREIVEKILSVADSNKDGKISFEEFVSLMQELKSKDISKTFRKIINKREGITAIGGTSTISSEGTQHSYSEEEKVAFVNWINKALENDPDCKHLIPMNPNDDSLFKSLADGILLCKMINLSEPDTIDERAINKKKLTPFTISENLNLALNSASAIGCTVVNIGASDLKEGKPHLVLGLLWQIIKVGLFADIEISRNEALIALLNEGEELEELMKLSPEELLLRWVNYHLTNAGWHTISNFSQDIKDSRAYFHLLNQIAPKGGEDGPAIAIDLSGINETNDLKRAGLMLQEADKLGCKQFVTPADVVSGNPKLNLAFVANLFNTYPCLHKPNNNDIDMNLLEGESKEERTFRNWMNSLGVNPYINHLYSDLADALVIFQLYEMIRVPVNWSHVNKPPYPALGGNMKKIENCNYAVELGKNKAKFSLVGIAGQDLNEGNSTLTLALVWQLMRRYTLNVLSDLGEGEKVNDEIIIKWVNQTLKSANKKTSISSFKDKSISTSLPVLDLIDAIAPNAVRQEMIRRENLSDEDKLNNAKYAISVARKIGARIYALPDDLVEVKPKMVMTVFACLMGKGLNRIK

SEQ ID NO: 33696 - protein, 33 aa, Homo sapiens
  REGION 1..33: note = ENSP00000419893
MENSTTTISREELEELQEAFNKIDIDNSGYVSD

SEQ ID NO: 33697 - protein, 119 aa, Homo sapiens
  REGION 1..119: note = ENSP00000417311
MENSTTTISREELEELQEAFNKIDIDNSGYVSDYELQDLFKEASLPLPGYKVREIVEKILSVADSNKDGKISFEEFVSLMQELKSKDISKTFRKIINKREGITAIGGTSTISSEGTQHS

SEQ ID NO: 33698 - protein, 58 aa, Homo sapiens
  REGION 1..58: note = ENSP00000419531
MENSTTTISREELEELQEAFNKIDIDNSGYVSDYELQDLFKEASLPLPGYKVREIVEK

SEQ ID NO: 33699 - protein, 266 aa, Homo sapiens
  REGION 1..266: note = ENSP00000417481
MQELKSKDISKTFRKIINKREGITAIGGTSTISSEGTQHSYSEEEKVAFVNWINKALENDPDCKHLIPMNPNDDSLFKSLADGILLCKMINLSEPDTIDERAINKKKLTPFTISENLNLALNSASAIGCTVVNIGASDLKEGKPHLVLGLLWQIIKVGLFADIEISRNEALIALLNEGEELEELMKLSPEELLLRWVNYHLTNAGWHTISNFSQDIKDSRAYFHLLNQIAPKGGEDGPAIAIDLSGINETNDLKRAGLMLQEADKL

SEQ ID NO: 33700 - protein, 54 aa, Homo sapiens
  REGION 1..54: note = ENSP00000419271
MENSTTTISREELEELQEAFNKIDIDNSGYVSDYELQDLFKEASLPLPGYKVRE

SEQ ID NO: 33701 - protein, 120 aa, Homo sapiens
  REGION 1..120: note = ENSP00000418880
MENSTTTISREELEELQEAFNKIDIDNSGYVSDYELQDLFKEASLPLPGYKVREIVEKILSVADSNKDGKISFEEFVSLMQELKSKDISKTFRKIINKREGITAIGGTSTISSEGTQHSY

SEQ ID NO: 33702 - protein, 629 aa, Homo sapiens; identical to SEQ ID NO: 33695
  REGION 1..629: note = ENSP00000336831

SEQ ID NO: 33703 - protein, 52 aa, Homo sapiens
  REGION 1..52: note = ENSP00000417491
MENSTTTISREELEELQEAFNKIDIDNSGYVSDYELQDLFKEASLPLPGYKV

SEQ ID NO: 33704 - protein, 629 aa, Homo sapiens; identical to SEQ ID NO: 33695
  REGION 1..629: note = ENSP00000418700

SEQ ID NO: 33705 - protein, 318 aa, Homo sapiens
  REGION 1..318: note = ENSP00000345494
MDKQNSQMNASHPETNLPVGYPPQYPPTAFQGPPGYSGYPGPQVSYPPPPAGHSGPGPAGFPVPNQPVYNQPVYNQPVGAAGVPWMPAPQPPLNCPPGLEYLSQIDQILIHQQIELLEVLTGFETNNKYEIKNSFGQRVYFAAEDTDCCTRNCCGPSRPFTLRIIDNMGQEVITLERPLRCSSCCCPCCLQEIEIQAPPGVPIGYVIQTWHPCLPKFTIQNEKREDVLKISGPCVVCSCCGDVDFEIKSLDEQCVVGKISKHWTGILREAFTDADNFGIQFPLDLDVKMKAVMIGACFLIDFMFFESTGSQEQKSGVW

SEQ ID NO: 33706 - protein, 41 aa, Homo sapiens
  REGION 1..41: note = ENSP00000419680
MDKQNSQMNASHPETNLPVGYPPQYPPTAFQDRSDTDSSAN

SEQ ID NO: 33707 - protein, 41 aa, Homo sapiens; identical to SEQ ID NO: 33706
  REGION 1..41: note = ENSP00000419228

SEQ ID NO: 33708 - protein, 311 aa, Homo sapiens
  REGION 1..311: note = ENSP00000417792
MNASHPETNLPVGYPPQYPPTAFQGPPGYSGYPGPQVSYPPPPAGHSGPGPAGFPVPNQPVYNQPVYNQPVGAAGVPWMPAPQPPLNCPPGLEYLSQIDQILIHQQIELLEVLTGFETNNKYEIKNSFGQRVYFAAEDTDCCTRNCCGPSRPFTLRIIDNMGQEVITLERPLRCSSCCCPCCLQEIEIQAPPGVPIGYVIQTWHPCLPKFTIQNEKREDVLKISGPCVVCSCCGDVDFEIKSLDEQCVVGKISKHWTGILREAFTDADNFGIQFPLDLDVKMKAVMIGACFLIDFMFFESTGSQEQKSGVW

SEQ ID NO: 33709 - protein, 41 aa, Homo sapiens; identical to SEQ ID NO: 33706
  REGION 1..41: note = ENSP00000417469

SEQ ID NO: 33710 - protein, 237 aa, Homo sapiens
  REGION 1..237: note = ENSP00000411675
MLLTRKQTCQLGILLSIHRQHSKIDQILIHQQIELLEVLTGFETNNKYEIKNSFGQRVYFAAEDTDCCTRNCCGPSRPFTLRIIDNMGQEVITLERPLRCSSCCCPCCLQEIEIQAPPGVPIGYVIQTWHPCLPKFTIQNEKREDVLKISGPCVVCSCCGDVDFEIKSLDEQCVVGKISKHWTGILREAFTDADNFGIQFPLDLDVKMKAVMIGACFLIDFMFFESTGSQEQKSGVW

SEQ ID NO: 33711 - protein, 41 aa, Homo sapiens; identical to SEQ ID NO: 33706
  REGION 1..41: note = ENSP00000418654

SEQ ID NO: 33712 - protein, 41 aa, Homo sapiens; identical to SEQ ID NO: 33706
  REGION 1..41: note = ENSP00000417733

SEQ ID NO: 33713 - protein, 171 aa, Homo sapiens
  REGION 1..171: note = ENSP00000420006
  VARIANT 1: note = Any amino acid
XGFPVPNQPVYNQPVYNQPVGAAGVPWMPAPQPPLNCPPGLEYLSQIDQILIHQQIELLEEIQAPPGVPIGYVIQTWHPCLPKFTIQNEKREDVLKISGPCVVCSCCGDVDFEIKSLDEQCVVGKISKHWTGILREAFTDADNFGIQFPLDLDVKMKAVMIGACFLIDFMF

SEQ ID NO: 33714 - protein, 41 aa, Homo sapiens; identical to SEQ ID NO: 33706
  REGION 1..41: note = ENSP00000417588

SEQ ID NO: 33715 - protein, 248 aa, Homo sapiens
  REGION 1..248: note = ENSP00000418103
MDKQNSQMNASHPETNLPVGYPPQYPPTAFQGPPGYSGYPGPQVSYPPPPAGHSGPGPAGFPVPNQPVYNQPVYNQPVGAAGVPWMPAPQPPLNCPPGLEYLSQIDQILIHQQIELLEAEDTDCCTRNCCGPSRPFTLRIIDNMGQEVITLERPLRCSSCCCPCCLQEIEIQAPPGVPIGYVIQTWHPCLPKFTIQNEKREDVLKISGPCVVCSCCGDVDFEIKSLDEQCVVGKISKHWTGILREAFT

SEQ ID NO: 33716 - protein, 171 aa, Homo sapiens
  REGION 1..171: note = ENSP00000418550
MLLTRKQTCQLGILLSIHRQHSKIDQILIHQQIELLEVLTGFETNNKYEIKNSFGQRVYFAAEDTDCCTRNCCGPSRPFTLRIIDNMGQEVITLERPLRCSSCCCPCCLQEIEIQAPPGVPIGYVIQTWHPCLPKFTIQNEKREDVLKISGPCVVCSCCGDVDFEIKSLDE

SEQ ID NO: 33717 - protein, 249 aa, Homo sapiens
  REGION 1..249: note = ENSP00000420523
MDKQNSQMNASHPETNLPVGYPPQYPPTAFQGPPGYSGYPGPQVSYPPPPAGHSGPGPAGFPVPNQPVYNQPVYNQPVGAAGVPWMPAPQPPLNCPPGLEYLSQIDQILIHQQIELLEVLTGFETNNKYEIKNSFGQRVYFAAEDTDCCTRNCCGPSRPFTLRIIDNMGQEVITLERPLRCSSCCCPCCLQEIEIQAPPGVPIGYVIQTWHPCLPKFTIQNEKREDVLKISGPCVVCSCCGDVDFEIKS

SEQ ID NO: 33718 - protein, 329 aa, Homo sapiens
  REGION 1..329: note = ENSP00000347038
MSGVVPTAPEQPAGEMENQTKPPDPRPDAPPEYNSHFLPGPPGTAVPPPTGYPGGLPMGYYSPQQPSTFPLYQPVGGIHPVRYQPGKYPMPNQSVPITWMPGPTPMANCPPGLEYLVQLDNIHVLQHFEPLEMMTCFETNNRYDIKNNSDQMVYIVTEDTDDFTRNAYRTLRPFVLRVTDCMGREIMTMQRPFRCTCCCFCCPSARQELEVQCPPGVTIGFVAEHWNLCRAVYSIQNEKKENVMRVRGPCSTYGCGSDSVFEVKSLDGISNIGSIIRKWNGLLSAMADADHFDIHFPLDLDVKMKAMIFGACFLIDFMYFERSPPQRSR

SEQ ID NO: 33719 - protein, 224 aa, Homo sapiens
  REGION 1..224: note = ENSP00000415605
MENQTKPPDPRPDAPPEYNSHFLPGPPGTAVPPPTGYPGGLPMGYYSPQQPSTFPLYQPVGGIHPVRYQPGKYPMPNQSVPITWMPGPTPMANCPPGLEYLVQLEVQCPPGVTIGFVAEHWNLCRAVYSIQNEKKENVMRVRGPCSTYGCGSDSVFEVKSLDGISNIGSIIRKWNGLLSAMADADHFDIHFPLDLDVKMKAMIFGACFLIDFMYFERSPPQRSR

SEQ ID NO: 33720 - protein, 329 aa, Homo sapiens; identical to SEQ ID NO: 33718
  REGION 1..329: note = ENSP00000399315

SEQ ID NO: 33721 - protein, 329 aa, Homo sapiens; identical to SEQ ID NO: 33718
  REGION 1..329: note = ENSP00000419040

SEQ ID NO: 33722 - protein, 262 aa, Homo sapiens
  REGION 1..262: note = ENSP00000417896
MSGVVPTAPEQPAGEMENQTKPPDPRPDAPPEYNSHFLPGPPGTAVPPPTGYPGGLPMGYYSPQQPSTFPLYQPVGGIHPVRYQPGKYPMPNQSVPITWMPGPTPMANCPPGLEYLVQLDNIHVLQHFEPLEMMTCFETNNRYDIKNNSDQMVYIVTEDTDDFTRNAYRTLRPFVLRVTDCMGREIMTMQRPFRCTCCCFCCPSARQELEVQCPPGVTIGFVAEHWNLCRAVYSIQNEKKENVMRVRGPCSTYGCGSDSVFE

SEQ ID NO: 33723 - protein, 147 aa, Homo sapiens
  REGION 1..147: note = ENSP00000420385
MSGVVPTAPEQPAGEMENQTKPPDPRPDAPPEYNSHFLPGPPGTAVPPPTGYPGGLPMGYYSPQQPSTFPLYQPVGGIHPVRYQPGKYPMPNQSVPITWMPGPTPMANCPPGLEYLVQLEVQCPPGVTIGFVAEHWNLCRAVYSIQN

SEQ ID NO: 33724 - protein, 208 aa, Homo sapiens
  REGION 1..208: note = ENSP00000418173
MSGVVPTAPEQPAGEMENQTKPPDPRPDAPPEYNSHFLPGPPGTAVPPPTGYPGGLPMGYYSPQQPSTFPLYQPVGGIHPVRYQPGKYPMPNQSVPITWMPGPTPMANCPPGLEYLVQLDNIHVLQHFEPLEMMTCFETNNRYDIKNNSDQMVYIVTEDTDDFTRNAYRTLRPFVLRVTDCMGREIMTMQRPFRCTCCCFCCPSARQE

SEQ ID NO: 33725 - protein, 142 aa, Homo sapiens
  REGION 1..142: note = ENSP00000418419
MSGVVPTAPEQPAGEMENQTKPPDPRPDAPPEYNSHFLPGPPGTAVPPPTGYPGGLPMGYYSPQQPSTFPLYQPVGGIHPVRYQPGKYPMPNQSVPITWMPGPTPMANCPPGLEYLVQLDNIHVLQHFEPLEMMTCFETNNR

SEQ ID NO: 33726 - protein, 97 aa, Homo sapiens
  REGION 1..97: note = ENSP00000417248
MSGVVPTAPEQPAGEMENQTKPPDPRPDAPPEYNSHFLPGPPGTAVPPPTGYPGGLPMGYYSPQQPSTFPLYQPVGGIHPVRYQPGKYPMPNQSVPI

SEQ ID NO: 33727 - protein, 239 aa, Homo sapiens
  REGION 1..239: note = ENSP00000372561
MSGVVPTAPEQPAGEMENQTKPPDPRPDAPPEYNSHFLPGPPGTAVPPPTGYPGGLPMGYYSPQQPSTFPLYQPVGGIHPVRYQPGKYPMPNQSVPITWMPGPTPMANCPPGLEYLVQLEVQCPPGVTIGFVAEHWNLCRAVYSIQNEKKENVMRVRGPCSTYGCGSDSVFEVKSLDGISNIGSIIRKWNGLLSAMADADHFDIHFPLDLDVKMKAMIFGACFLIDFMYFERSPPQRSR

SEQ ID NO: 33728 - protein, 441 aa, Homo sapiens
  REGION 1..441: note = ENSP00000335290
MALFGALFLALLAGAHAEFPGCKIRVTSKALELVKQEGLRFLEQELETITIPDLRGKEGHFYYNISEVKVTELQLTSSELDFQPQQELMLQITNASLGLRFRRQLLYWFLKVYDFLSTFITSGMRFLLNQQICPVLYHAGTVLLNSLLDTVPVRSSVDELVGIDYSLMKDPVASTSNLDMDFRGAFFPLTERNWSLPNRAVEPQLQEEERMVYVAFSEFFFDSAMESYFRAGALQLLLVGDKVPHDLDMLLRATYFGSIVLLSPAVIDSPLKLELRVLAPPRCTIKPSGTTISVTASVTIALVPPDQPEVQLSSMTMDARLSAKMALRGKALRTQLDLRRFRIYSNHSALESLALIPLQAPLKTMLQIGVMPMLNERTWRGVQIPLPEGINFVHEVVTNHAGFLTIGADLHFAKGLREVIEKNRPADVRASTAPTPSTAAV

SEQ ID NO: 33729 - protein, 405 aa, Homo sapiens
  REGION 1..405: note = ENSP00000361497
MLQITNASLGLRFRRQLLYWFFYDGGYINASAEGVSIRTGLELSRDPAGRMKVSNVSCQASVSRMHAAFGGTFKKVYDFLSTFITSGMRFLLNQQICPVLYHAGTVLLNSLLDTVPVRSSVDELVGIDYSLMKDPVASTSNLDMDFRGAFFPLTERNWSLPNRAVEPQLQEEERMVYVAFSEFFFDSAMESYFRAGALQLLLVGDKVPHDLDMLLRATYFGSIVLLSPAVIDSPLKLELRVLAPPRCTIKPSGTTISVTASVTIALVPPDQPEVQLSSMTMDARLSAKMALRGKALRTQLDLRRFRIYSNHSALESLALIPLQAPLKTMLQIGVMPMLNERTWRGVQIPLPEGINFVHEVVTNHAGFLTIGADLHFAKGLREVIEKNRPADVRASTAPTPSTAAV

SEQ ID NO: 33730 - protein, 493 aa, Homo sapiens
  REGION 1..493: note = ENSP00000361508
MALFGALFLALLAGAHAEFPGCKIRVTSKALELVKQEGLRFLEQELETITIPDLRGKEGHFYYNISEVKVTELQLTSSELDFQPQQELMLQITNASLGLRFRRQLLYWFFYDGGYINASAEGVSIRTGLELSRDPAGRMKVSNVSCQASVSRMHAAFGGTFKKVYDFLSTFITSGMRFLLNQQICPVLYHAGTVLLNSLLDTVPVRSSVDELVGIDYSLMKDPVASTSNLDMDFRGAFFPLTERNWSLPNRAVEPQLQEEERMVYVAFSEFFFDSAMESYFRAGALQLLLVGDKVPHDLDMLLRATYFGSIVLLSPAVIDSPLKLELRVLAPPRCTIKPSGTTISVTASVTIALVPPDQPEVQLSSMTMDARLSAKMALRGKALRTQLDLRRFRIYSNHSALESLALIPLQAPLKTMLQIGVMPMLNERTWRGVQIPLPEGINFVHEVVTNHAGFLTIGADLHFAKGLREVIEKNRPADVRASTAPTPSTAAV

SEQ ID NO: 33731 - protein, 493 aa, Homo sapiens; identical to SEQ ID NO: 33730
  REGION 1..493: note = ENSP00000417138

SEQ ID NO: 33732 - protein, 398 aa, Homo sapiens
  REGION 1..398: note = ENSP00000411671
MALFGALFLALLAGAHAEFPGCKIRVTSKALELVKQEGLRFLEQELETITIPDLRGKEGHFYYNISEKVYDFLSTFITSGMRFLLNQQICPVLYHAGTVLLNSLLDTVPVRSSVDELVGIDYSLMKDPVASTSNLDMDFRGAFFPLTERNWSLPNRAVEPQLQEEERMVYVAFSEFFFDSAMESYFRAGALQLLLVGDKVPHDLDMLLRATYFGSIVLLSPAVIDSPLKLELRVLAPPRCTIKPSGTTISVTASVTIALVPPDQPEVQLSSMTMDARLSAKMALRGKALRTQLDLRRFRIYSNHSALESLALIPLQAPLKTMLQIGVMPMLNERTWRGVQIPLPEGINFVHEVVTNHAGFLTIGADLHFAKGLREVIEKNRPADVRASTAPTPSTAAV

SEQ ID NO: 33733 - protein, 500 aa, Homo sapiens
  REGION 1..500: note = ENSP00000323927
MRGELWLLVLVLREAARALSPQPGAGHDEGPGSGWAAKGTVRGWNRRARESPGHVSEPDRTQLSQDLGGGTLAMDTLPDNRTRVVEDNHSYYVSRLYGPSEPHSRELWVDVAEANRSQVKIHTILSNTHRQASRVVLSFDFPFYGHPLRQITIATGGFIFMGDVIHRMLTATQYVAPLMANFNPGYSDNSTVVYFDNGTVFVVQWDHVYLQGWEDKGSFTFQAALHHDGRIVFAYKEIPMSVPEISSSQHPVKTGLSDAFMILNPSPDVPESRRRSIFEYHRIELDPSKVTSMSAVEFTPLPTCLQHRSCDACMSSDLTFNCSWCHVLQRCSSGFDRYRQEWMDYGCAQEAEGRMCEDFQDEDHDSASPDTSFSPYDGDLTTTSSSLFIDSLTTEDDTKLNPYAGGDGLQNNLSPKTKGTPVHLGTIVGIVLAVLLVAAIILAGIYINGHPTSNAALFFIERRPHHWPAMKFRSHPDHSTYAEVEPSGHEKEGFMEAEQC

SEQ ID NO: 33734 - protein, 337 aa, Homo sapiens
  REGION 1..337: note = ENSP00000462089
MRGELWLLVLVLREAARALSPQPGAGHDEGPGSGWAAKGTVRGWNRRARESPGHVSEPDRTQLSQDLGGGTLAMDTLPDNRTRVVEDNHSYYVSRLYGPSEPHSRELWVDVAEANRSQVKIHTILSNTHRQASRVVLSFDFPFYGHPLRQITIATGGFIFMGDVIHRMLTATQYVAPLMANFNPGYSDNSTVVYFDNGTVFVVQWDHVYLQGWEDKGSFTFQAALHHDGRIVFAYKEIPMSVPEISSSQHPVKTGLSDAFMILNPSPDVPESRRRSIFEYHRIELDPSKVTSMSAVEFTPLPTCLQHRSCDACMSSDLTFNCSWCHVLQSRDEVSPC

SEQ ID NO: 33735 - protein, 460 aa, Homo sapiens
  REGION 1..460: note = ENSP00000409687
MALSVRTLPLRGFLVPRPQPTRSQDAPSPRLPLSSAPAPCRHKNEEDNHSYYVSRLYGPSEPHSRELWVDVAEANRSQVKIHTILSNTHRQASRVVLSFDFPFYGHPLRQITIATGGFIFMGDVIHRMLTATQYVAPLMANFNPGYSDNSTVVYFDNGTVFVVQWDHVYLQGWEDKGSFTFQAALHHDGRIVFAYKEIPMSVPEISSSQHPVKTGLSDAFMILNPSPDVPESRRRSIFEYHRIELDPSKVTSMSAVEFTPLPTCLQHRSCDACMSSDLTFNCSWCHVLQRCSSGFDRYRQEWMDYGCAQEAEGRMCEDFQDEDHDSASPDTSFSPYDGDLTTTSSSLFIDSLTTEDDTKLNPYAGGDGLQNNLSPKTKGTPVHLGTIVGIVLAVLLVAAIILAGIYINGHPTSNAALFFIERRPHHWPAMKFRSHPDHSTYAEVEPSGHEKEGFMEAEQC

SEQ ID NO: 33736 - protein, 182 aa, Homo sapiens
  REGION 1..182: note = ENSP00000464353
QGWEDKGSFTFQAALHHDGRIVFAYKEIPMSVPEISSSQHPVKTGLSDAFMILNPSPDVPESRRRSIFEYHRIELDPSKVTSMSAVEFTPLPTCLQHRSCDACMSSDLTFNCSWCHVLQRSLNNQDENTCSSGFDRYRQEWMDYGCAQEAEGRMCEDFQDEDHDSASPDTSFSPYDGDLTTT

SEQ ID NO: 33737 - protein, 99 aa, Homo sapiens
  REGION 1..99: note = ENSP00000462241
MDTLPDNRTRVVVWEGTGSTGSAWELVGNVECRSPQTCRIRIRFPGGQPQLLCVPSLWPQRAPQPGTVGRCGRGQPEPSEDPHNTLQHPPAGFESGLVL

SEQ ID NO: 33738 - protein, 222 aa, Homo sapiens
  REGION 1..222: note = ENSP00000393227
MDTLPDNRTRVVEDNHSYYVSRLYGPSEPHSRELWVDVAEANRSQVKIHTILSNTHRQASRVVLSFDFPFYGHPLRQITIATGGFIFMGDVIHRMLTATQYVAPLMANFNPGYSDNSTVVYFDNGTVFVVQWDHVYLQGWEDKGSFTFQAALHHDGRIVFAYKEIPMSVPEISSSQHPVKTGLSDAFMILNPSPDVPESRRRSIFEYHRIELDPSKVTSMSA

SEQ ID NO: 33739 - protein, 124 aa, Homo sapiens
  REGION 1..124: note = ENSP00000416819
MDTLPDNRTRVVEDNHSYYVSRLYGPSEPHSRELWVDVAEANRSQVKIHTILSNTHRQASRVVLSFDFPFYGHPLRQITIATGGFIFMGDVIHRMLTATQYVAPLMANFNPGYSDNSTVVYFDN

SEQ ID NO: 33740 - protein, 98 aa, Homo sapiens
  REGION 1..98: note = ENSP00000464029
MDTLPDNRTRVVEDNHSYYVSRLYGPSEPHSRELWVDVAEANRSQVKIHTILSNTHRQASRVVLSFDFPFYGHPLRQITIATGGFIFMGDVIHRMLTA

SEQ ID NO: 33741 - protein, 480 aa, Homo sapiens
  REGION 1..480: note = ENSP00000366450
MARFPKADLAAAGVMLLCHFFTDQFQFADGKPGDQILDWQYGVTQAFPHTEEEVEVDSHAYSHRWKRNLDFLKAVDTNRASVGQDSPEPRSFTDLLLDDGQDNNTQIERVNLSFDFPFYGHFLREITVATGGFIYTGEVVHRMLTATQYIAPLMANFDPSVSRNSTVRYFDNGTALVVQWDHVHLQDNYNLGSFTFQATLLMDGRIIFGYKEIPVLVTQISSTNHPVKVGLSDAFVVVHRIQQIPNVRRRTIYEYHRVELQMSKITNISAVEMTPLPTCLQFNRCGPCVSSQIGFNCSWCSKLQRCSSGFDRHRQDWVDSGCPEESKEKMCENTEPVETSSRTTTTVGATTTQFRVLTTTRRAVTSQFPTSLPTEDDTKIALHLKDNGASTDDSAAEKKGGTLHAGLIIGILILVLIVATAILVTVYMYHHPTSAASIFFIERRPSRWPAMKFRRGSGHPAYAEVEPVGEKEGFIVSEQC

SEQ ID NO: 33742 - protein, 529 aa, Homo sapiens
  REGION 1..529: note = ENSP00000366460
MARFPKADLAAAGVMLLCHFFTDQFQFADGKPGDQILDWQYGVTQAFPHTEEEVEVDSHAYSHRWKRNLDFLKAVDTNRASVGQDSPEPRSFTDLLLDDGQDNNTQIEEDTDHNYYISRIYGPSDSASRDLWVNIDQMEKDKVKIHGILSNTHRQAARVNLSFDFPFYGHFLREITVATGGFIYTGEVVHRMLTATQYIAPLMANFDPSVSRNSTVRYFDNGTALVVQWDHVHLQDNYNLGSFTFQATLLMDGRIIFGYKEIPVLVTQISSTNHPVKVGLSDAFVVVHRIQQIPNVRRRTIYEYHRVELQMSKITNISAVEMTPLPTCLQFNRCGPCVSSQIGFNCSWCSKLQRCSSGFDRHRQDWVDSGCPEESKEKMCENTEPVETSSRTTTTVGATTTQFRVLTTTRRAVTSQFPTSLPTEDDTKIALHLKDNGASTDDSAAEKKGGTLHAGLIIGILILVLIVATAILVTVYMYHHPTSAASIFFIERRPSRWPAMKFRRGSGHPAYAEVEPVGEKEGFIVSEQC

SEQ ID NO: 33743 - protein, 1896 aa, Homo sapiens
  REGION 1..1896: note = ENSP00000377061
MPLPPRSLQVLLLLLLLLLLLPGMWAEAGLPRAGGGSQPPFRTFSASDWGLTHLVVHEQTGEVYVGAVNRIYKLSGNLTLLRAHVTGPVEDNEKCYPPPSVQSCPHGLGSTDNVNKLLLLDYAANRLLACGSASQGICQFLRLDDLFKLGEPHHRKEHYLSSVQEAGSMAGVLIAGPPGQGQAKLFVGTPIDGKSEYFPTLSSRRLMANEEDADMFGFVYQDEFVSSQLKIPSDTLSKFPAFDIYYVYSFRSEQFVYYLTLQLDTQLTSPDAAGEHFFTSKIVRLCVDDPKFYSYVEFPIGCEQAGVEYRLVQDAYLSRPGRALAHQLGLAEDEDVLFTVFAQGQKNRVKPPKESALCLFTLRAIKEKIKERIQSCYRGEGKLSLPWLLNKELGCINSPLQIDDDFCGQDFNQPLGGTVTIEGTPLFVDKDDGLTAVAAYDYRGRTVVFAGTRSGRIRKILVDLSNPGGRPALAYESVVAQEGSPILRDLVLSPNHQYLYAMTEKQVTRVPVESCVQYTSCELCLGSRDPHCGWCVLHSICSRRDACERADEPQRFAADLLQCVQLTVQPRNVSVTMSQVPLVLQAWNVPDLSAGVNCSFEDFTESESVLEDGRIHCRSPSAREVAPITRGQGDQRVVKLYLKSKETGKKFASVDFVFYNCSVHQSCLSCVNGSFPCHWCKYRHVCTHNVADCAFLEGRVNVSEDCPQILPSTQIYVPVGVVKPITLAARNLPQPQSGQRGYECLFHIPGSPARVTALRFNSSSLQCQNSSYSYEGNDVSDLPVNLSVVWNGNFVIDNPQNIQAHLYKCPALRESCGLCLKADPRFECGWCVAERRCSLRHHCAADTPASWMHARHGSSRCTDPKILKLSPETGPRQGGTRLTITGENLGLRFEDVRLGVRVGKVLCSPVESEYISAEQIVCEIGDASSVRAHDALVEVCVRDCSPHYRALSPKRFTFVTPTFYRVSPSRGPLSGGTWIGIEGSHLNAGSDVAVSVGGRPCSFSWRNSREIRCLTPPGQSPGSAPIIININRAQLTNPEVKYNYTEDPTILRIDPEWSINSGGTLLTVTGTNLATVREPRIRAKYGGIERENGCLVYNDTTMVCRAPSVANPVRSPPELGERPDELGFVMDNVRSLLVLNSTSFLYYPDPVLEPLSPTGLLELKPSSPLILKGRNLLPPAPGNSRLNYTVLIGSTPCTLTVSETQLLCEAPNLTGQHKVTVRAGGFEFSPGTLQVYSDSLLTLPAIVGIGGGGGLLLLVIVAVLIAYKRKSRDADRTLKRLQLQMDNLESRVALECKEAFAELQTDIHELTNDLDGAGIPFLDYRTYAMRVLFPGIEDHPVLKEMEVQANVEKSLTLFGQLLTKKHFLLTFIRTLEAQRSFSMRDRGNVASLIMTALQGEMEYATGVLKQLLSDLIEKNLESKNHPKLLLRRTESVAEKMLTNWFTFLLYKFLKECAGEPLFMLYCAIKQQMEKGPIDAITGEARYSLSEDKLIRQQIDYKTLTLNCVNPENENAPEVPVKGLDCDTVTQAKEKLLDAAYKGVPYSQRPKAADMDLEWRQGRMARIILQDEDVTTKIDNDWKRLNTLAHYQVTDGSSVALVPKQTSAYNISNSSTFTKSLSRYESMLRTASSPDSLRSRTPMITPDLESGTKLWHLVKNHDHLDQREGDRGSKMVSEIYLTRLLATKGTLQKFVDDLFETIFSTAHRGSALPLAIKYMFDFLDEQADKHQIHDADVRHTWKSNCLPLRFWVNVIKNPQFVFDIHKNSITDACLSVVAQTFMDSCSTSEHKLGKDSPSNKLLYAKDIPNYKSWVERYYADIAKMPAISDQDMSAYLAEQSRLHLSQFNSMSALHEIYSYITKYKDEILAALEKDEQARRQRLRSKLEQVVDTMALSS

SEQ ID NO: 33744 - protein, 1894 aa, Homo sapiens
  REGION 1..1894: note = ENSP00000352882
MKAMPWNWTCLLSHLLMVGMGSSTLLTRQPAPLSQKQRSFVTFRGEPAEGFNHLVVDERTGHIYLGAVNRIYKLSSDLKVLVTHETGPDEDNPKCYPPRIVQTCNEPLTTTNNVNKMLLIDYKENRLIACGSLYQGICKLLRLEDLFKLGEPYHKKEHYLSGVNESGSVFGVIVSYSNLDDKLFIATAVDGKPEYFPTISSRKLTKNSEADGMFAYVFHDEFVASMIKIPSDTFTIIPDFDIYYVYGFSSGNFVYFLTLQPEMVSPPGSTTKEQVYTSKLVRLCKEDTAFNSYVEVPIGCERSGVEYRLLQAAYLSKAGAVLGRTLGVHPDDDLLFTVFSKGQKRKMKSLDESALCIFILKQINDRIKERLQSCYRGEGTLDLAWLKVKDIPCSSALLTIDDNFCGLDMNAPLGVSDMVRGIPVFTEDRDRMTSVIAYVYKNHSLAFVGTKSGKLKKIRVDGPRGNALQYETVQVVDPGPVLRDMAFSKDHEQLYIMSERQLTRVPVESCGQYQSCGECLGSGDPHCGWCVLHNTCTRKERCERSKEPRRFASEMKQCVRLTVHPNNISVSQYNVLLVLETYNVPELSAGVNCTFEDLSEMDGLVVGNQIQCYSPAAKEVPRIITENGDHHVVQLQLKSKETGMTFASTSFVFYNCSVHNSCLSCVESPYRCHWCKYRHVCTHDPKTCSFQEGRVKLPEDCPQLLRVDKILVPVEVIKPITLKAKNLPQPQSGQRGYECILNIQGSEQRVPALRFNSSSVQCQNTSYSYEGMEINNLPVELTVVWNGHFNIDNPAQNKVHLYKCGAMRESCGLCLKADPDFACGWCQGPGQCTLRQHCPAQESQWLELSGAKSKCTNPRITEIIPVTGPREGGTKVTIRGENLGLEFRDIASHVKVAGVECSPLVDGYIPAEQIVCEMGEAKPSQHAGFVEICVAVCRPEFMARSSQLYYFMTLTLSDLKPSRGPMSGGTQVTITGTNLNAGSNVVVMFGKQPCLFHRRSPSYIVCNTTSSDEVLEMKVSVQVDRAKIHQDLVFQYVEDPTIVRIEPEWSIVSGNTPIAVWGTHLDLIQNPQIRAKHGGKEHINICEVLNATEMTCQAPALALGPDHQSDLTERPEEFGFILDNVQSLLILNKTNFTYYPNPVFEAFGPSGILELKPGTPIILKGKNLIPPVAGGNVKLNYTVLVGEKPCTVTVSDVQLLCESPNLIGRHKVMARVGGMEYSPGMVYIAPDSPLSLPAIVSIAVAGGLLIIFIVAVLIAYKRKSRESDLTLKRLQMQMDNLESRVALECKEAFAELQTDIHELTSDLDGAGIPFLDYRTYTMRVLFPGIEDHPVLRDLEVPGYRQERVEKGLKLFAQLINNKVFLLSFIRTLESQRSFSMRDRGNVASLIMTVLQSKLEYATDVLKQLLADLIDKNLESKNHPKLLLRRTESVAEKMLTNWFTFLLYKFLKECAGEPLFSLFCAIKQQMEKGPIDAITGEARYSLSEDKLIRQQIDYKTLVLSCVSPDNANSPEVPVKILNCDTITQVKEKILDAIFKNVPCSHRPKAADMDLEWRQGSGARMILQDEDITTKIENDWKRLNTLAHYQVPDGSVVALVSKQVTAYNAVNNSTVSRTSASKYENMIRYTGSPDSLRSRTPMITPDLESGVKMWHLVKNHEHGDQKEGDRGSKMVSEIYLTRLLATKGTLQKFVDDLFETIFSTAHRGSALPLAIKYMFDFLDEQADKHGIHDPHVRHTWKSNCLPLRFWVNMIKNPQFVFDIHKNSITDACLSVVAQTFMDSCSTSEHRLGKDSPSNKLLYAKDIPSYKNWVERYYSDIGKMPAISDQDMNAYLAEQSRMHMNEFNTMSALSEIFSYVGKYSEEILGPLDHDDQCGKQKLAYKLEQVITLMSLDS

SEQ ID NO: 33745 - protein, 492 aa, Homo sapiens
  REGION 1..492: note = ENSP00000392772
MKAMPWNWTCLLSHLLMVGMGSSTLLTRQPAPLSQKQRSFVTFRGEPAEGFNHLVVDERTGHIYLGAVNRIYKLSSDLKVLVTHETGPDEDNPKCYPPRIVQTCNEPLTTTNNVNKMLLIDYKENRLIACGSLYQGICKLLRLEDLFKLGEPYHKKEHYLSGVNESGSVFGVIVSYSNLDDKLFIATAVDGKPEYFPTISSRKLTKNSEADGMFAYVFHDEFVASMIKIPSDTFTIIPDFDIYYVYGFSSGNFVYFLTLQPEMVSPPGSTTKEQVYTSKLVRLCKEDTAFNSYVEVPIGCERSGVEYRLLQAAYLSKAGAVLGRTLGVHPDDDLLFTVFSKGQKRKMKSLDESALCIFILKQINDRIKERLQSCYRGEGTLDLAWLKVKDIPCSSALLTIDDNFCGLDMNAPLGVSDMVRGIPVFTEDRDRMTSVIAYVYKNHSLAFVGTKSGKLKKMPGTSLCPTLELQTGPRSHRATVTLELLFSSCSSN

SEQ ID NO: 33746 - protein, 522 aa, Homo sapiens
  REGION 1..522: note = ENSP00000367800
MKAMPWNWTCLLSHLLMVGMGSSTLLTRQPAPLSQKQRSFVTFRGEPAEGFNHLVVDERTGHIYLGAVNRIYKLSSDLKVLVTHETGPDEDNPKCYPPRIVQTCNEPLTTTNNVNKMLLIDYKENRLIACGSLYQGICKLLRLEDLFKLGEPYHKKEHYLSGVNESGSVFGVIVSYSNLDDKLFIATAVDGKPEYFPTISSRKLTKNSEADGMFAYVFHDEFVASMIKIPSDTFTIIPDFDIYYVYGFSSGNFVYFLTLQPEMVSPPGSTTKEQVYTSKLVRLCKEDTAFNSYVEVPIGCERSGVEYRLLQAAYLSKAGAVLGRTLGVHPDDDLLFTVFSKGQKRKMKSLDESALCIFILKQINDRIKERLQSCYRGEGTLDLAWLKVKDIPCSSALLTIDDNFCGLDMNAPLGVSDMVRGIPVFTEDRDRMTSVIAYVYKNHSLAFVGTKSGKLKKSFGTGPQGGITQEWIGVEGDPPGANIASQEQMLCVYLQCSSHKAISDQRVQPLLCCFLNVPGNSS

SEQ ID NO: 33747 - protein, 1894 aa, Homo sapiens; identical to SEQ ID NO: 33744
  REGION 1..1894: note = ENSP00000323194

SEQ ID NO: 33748 - protein, 2135 aa, Homo sapiens
  REGION 1..2135: note = ENSP00000296440
MPALGPALLQALWAGWVLTLQPLPPTAFTPNGTYLQHLARDPTSGTLYLGATNFLFQLSPGLQLEATVSTGPVLDSRDCLPPVMPDECPQAQPTNNPNQLLLVSPGALVVCGSVHQGVCEQRRLGQLEQLLLRPERPGDTQYVAANDPAVSTVGLVAQGLAGEPLLFVGRGYTSRGVGGGIPPITTRALWPPDPQAAFSYEETAKLAVGRLSEYSHHFVSAFARGASAYFLFLRRDLQAQSRAFRAYVSRVCLRDQHYYSYVELPLACEGGRYGLIQAAAVATSREVAHGEVLFAAFSSAAPPTVGRPPSAAAGASGASALCAFPLDEVDRLANRTRDACYTREGRAEDGTEVAYIEYDVNSDCAQLPVDTLDAYPCGSDHTPSPMASRVPLEATPILEWPGIQLTAVAVTMEDGHTIAFLGDSQGQLHRVYLGPGSDGHPYSTQSIQQGSAVSRDLTFDGTFEHLYVMTQSTLLKVPVASCAQHLDCASCLAHRDPYCGWCVLLGRCSRRSECSRGQGPEQWLWSFQPELGCLQVAAMSPANISREETREVFLSVPDLPPLWPGESYSCHFGEHQSPALLTGSGVMCPSPDPSEAPVLPRGADYVSVSVELRFGAVVIAKTSLSFYDCVAVTELRPSAQCQACVSSRWGCNWCVWQHLCTHKASCDAGPMVASHQSPLVSPDPPARGGPSPSPPTAPKALATPAPDTLPVEPGAPSTATASDISPGASPSLLSPWGPWAGSGSISSPGSTGSPLHEEPSPPSPQNGPGTAVPAPTDFRPSATPEDLLASPLSPSEVAAVPPADPGPEALHPTVPLDLPPATVPATTFPGAMGSVKPALDWLTREGGELPEADEWTGGDAPAFSTSTLLSGDGDSAELEGPPAPLILPSSLDYQYDTPGLWELEEATLGASSCPCVESVQGSTLMPVHVEREIRLLGRNLHLFQDGPGDNECVMELEGLEVVVEARVECEPPPDTQCHVTCQQHQLSYEALQPELRVGLFLRRAGRLRVDSAEGLHVVLYDCSVGHGDCSRCQTAMPQYGCVWCEGERPRCVTREACGEAEAVATQCPAPLIHSVEPLTGPVDGGTRVTIRGSNLGQHVQDVLGMVTVAGVPCAVDAQEYEVSSSLVCITGASGEEVAGATAVEVPGRGRGVSEHDFAYQDPKVHSIFPARGPRAGGTRLTLNGSKLLTGRLEDIRVVVGDQPCHLLPEQQSEQLRCETSPRPTPATLPVAVWFGATERRLQRGQFKYTLDPNITSAGPTKSFLSGGREICVRGQNLDVVQTPRIRVTVVSRMLQPSQGLGRRRRVVPETACSLGPSCSSQQFEEPCHVNSSQLITCRTPALPGLPEDPWVRVEFILDNLVFDFATLNPTPFSYEADPTLQPLNPEDPTMPFRHKPGSVFSVEGENLDLAMSKEEVVAMIGDGPCVVKTLTRHHLYCEPPVEQPLPRHHALREAPDSLPEFTVQMGNLRFSLGHVQYDGESPGAFPVAAQVGLGVGTSLLALGVIIIVLMYRRKSKQALRDYKKVQIQLENLESSVRDRCKKEFTDLMTEMTDLTSDLLGSGIPFLDYKVYAERIFFPGHRESPLHRDLGVPESRRPTVEQGLGQLSNLLNSKLFLTKFIHTLESQRTFSARDRAYVASLLTVALHGKLEYFTDILRTLLSDLVAQYVAKNPKLMLRRTETVVEKLLTNWMSICLYTFVRDSVGEPLYMLFRGIKHQVDKGPVDSVTGKAKYTLNDNRLLREDVEYRPLTLNALLAVGPGAGEAQGVPVKVLDCDTISQAKEKMLDQLYKGVPLTQRPDPRTLDVEWRSGVAGHLILSDEDVTSEVQGLWRRLNTLQHYKVPDGATVALVPCLTKHVLRENQDYVPGERTPMLEDVDEGGIRPWHLVKPSDEPEPPRPRRGSLRGGERERAKAIPEIYLTRLLSMKGTLQKFVDDLFQVILSTSRPVPLAVKYFFDLLDEQAQQHGISDQDTIHIWKTNSLPLRFWINIIKNPQFVFDVQTSDNMDAVLLVIAQTFMDACTLADHKLGRDSPINKLLYARDIPRYKRMVERYYADIRQTVPASDQEMNSVLAELSWNYSGDLGARVALHELYKYINKYYDQIITALEEDGTAQKMQLGYRLQQIAAAVENKVTDL

SEQ ID NO: 33749 - protein, 2135 aa, Homo sapiens; identical to SEQ ID NO: 33748
  REGION 1..2135: note = ENSP00000351338

SEQ ID NO: 33750 - protein, 1952 aa, Homo sapiens
  REGION 1..1952: note = ENSP00000414199
MPALGPALLQALWAGWVLTLQPLPPTAFTPNGTYLQHLARDPTSGTLYLGATNFLFQLSPGLQLEATVSTGPVLDSRDCLPPVMPDECPQAQPTNNPNQLLLVSPGALVVCGSVHQGVCEQRRLGQLEQLLLRPERPGDTQYVAANDPAVSTVGLVAQGLAGEPLLFVGRGYTSRGVGGGIPPITTRALWPPDPQAAFSYEETAKLAVGRLSEYSHHFVSAFARGASAYFLFLRRDLQAQSRAFRAYVSRVCLRDQHYYSYVELPLACEGGRYGLIQAAAVATSREVAHGEVLFAAFSSAAPPTVGRPPSAAAGASGASALCAFPLDEVDRLANRTRDACYTREGRAEDGTEVAYIEYDVNSDCAQLPVDTLDAYPCGSDHTPSPMASRVPLEATPILEWPGIQLTAVAVTMEDGHTIAFLGDSQGQLHRVYLGPGSDGHPYSTQSIQQGSAVSRDLTFDGTFEHLYVMTQSTLLKVPVASCAQHLDCASCLAHRDPYCGWCVLLGRCSRRSECSRGQGPEQWLWSFQPELGCLQVAAMSPANISREETREVFLSVPDLPPLWPGESYSCHFGEHQSPALLTGSGVMCPSPDPSEAPVLPRGADYVSVSVELRFGAVVIAKTSLSFYDCVAVTELRPSAQCQACVSSRWGCNWCVWQHLCTHKASCDAGPMVASHQSPLVSPDPPARGDGDSAELEGPPAPLILPSSLDYQYDTPGLWELEEATLGASSCPCVESVQGSTLMPVHVEREIRLLGRNLHLFQDGPGDNECVMELEGLEVVVEARVECEPPPDTQCHVTCQQHQLSYEALQPELRVGLFLRRAGRLRVDSAEGLHVVLYDCSVGHGDCSRCQTAMPQYGCVWCEGERPRCVTREACGEAEAVATQCPAPLIHSVEPLTGPVDGGTRVTIRGSNLGQHVQDVLGMVTVAGVPCAVDAQEYEVSSSLVCITGASGEEVAGATAVEVPGRGRGVSEHDFAYQDPKVHSIFPARGPRAGGTRLTLNGSKLLTGRLEDIRVVVGDQPCHLLPEQQSEQLRCETSPRPTPATLPVAVWFGATERRLQRGQFKYTLDPNITSAGPTKSFLSGGREICVRGQNLDVVQTPRIRVTVVSRMLQPSQGLGRRRRVVPETACSLGPSCSSQQFEEPCHVNSSQLITCRTPALPGLPEDPWVRVEFILDNLVFDFATLNPTPFSYEADPTLQPLNPEDPTMPFRHKPGSVFSVEGENLDLAMSKEEVVAMIGDGPCVVKTLTRHHLYCEPPVEQPLPRHHALREAPDSLPEFTVQMGNLRFSLGHVQYDGESPGAFPVAAQVGLGVGTSLLALGVIIIVLMYRRKSKQALRDYKKVQIQLENLESSVRDRCKKEFTDLMTEMTDLTSDLLGSGIPFLDYKVYAERIFFPGHRESPLHRDLGVPESRRPTVEQGLGQLSNLLNSKLFLTKFIHTLESQRTFSARDRAYVASLLTVALHGKLEYFTDILRTLLSDLVAQYVAKNPKLMLRRTETVVEKLLTNWMSICLYTFVRDSVGEPLYMLFRGIKHQVDKGPVDSVTGKAKYTLNDNRLLREDVEYRPLTLNALLAVGPGAGEAQGVPVKVLDCDTISQAKEKMLDQLYKGVPLTQRPDPRTLDVEWRSGVAGHLILSDEDVTSEVQGLWRRLNTLQHYKVPDGATVALVPCLTKHVLRENQDYVPGERTPMLEDVDEGGIRPWHLVKPSDEPEPPRPRRGSLRGGERERAKAIPEIYLTRLLSMKGTLQKFVDDLFQVILSTSRPVPLAVKYFFDLLDEQAQQHGISDQDTIHIWKTNSLPLRFWINIIKNPQFVFDVQTSDNMDAVLLVIAQTFMDACTLADHKLGRDSPINKLLYARDIPRYKRMVERYYADIRQTVPASDQEMNSVLAELSWNYSGDLGARVALHELYKYINKYYDQIITALEEDGTAQKMQLGYRLQQIAAAVENKVTDL

SEQ ID NO: 33751 - protein, 729 aa, Homo sapiens
  REGION 1..729: note = ENSP00000395987
MPALGPALLQALWAGWVLTLQPLPPTAFTPNGTYLQHLARDPTSGTLYLGATNFLFQLSPGLQLEATVSTGPVLDSRDCLPPVMPDECPQAQPTNNPNQLLLVSPGALVVCGSVHQGVCEQRRLGQLEQLLLRPERPGDTQYVAANDPAVSTVGLVAQGLAGEPLLFVGRGYTSRGVGGGIPPITTRALWPPDPQAAFSYEETAKLAVGRLSEYSHHFVSAFARGASAYFLFLRRDLQAQSRAFRAYVSRVCLRDQHYYSYVELPLACEGGRYGLIQAAAVATSREVAHGEVLFAAFSSAAPPTVGRPPSAAAGASGASALCAFPLDEVDRLANRTRDACYTREGRAEDGTEVAYIEYDVNSDCAQLPVDTLDAYPCGSDHTPSPMASRVPLEATPILEWPGIQLTAVAVTMEDGHTIAFLGDSQGQLHRVYLGPGSDGHPYSTQSIQQGSAVSRDLTFDGTFEHLYVMTQSTLLKVPVASCAQHLDCASCLAHRDPYCGWCVLLGRCSRRSECSRGQGPEQWLWSFQPELGCLQVAAMSPANISREETREVFLSVPDLPPLWPGESYSCHFGEHQSPALLTGSGVMCPSPDPSEAPVLPRGADYVSVSVELRFGAVVIAKTSLSFYDCVAVTELRPSAQCQACVSSRWGCNWCVWQHLCTHKASCDAGPMVASHQVMETQQSLRALPPPSSSRPASTTSMTPPGSGSWKRRPWGQAPAPVWRAFRAPR

SEQ ID NO: 33752 - protein, 1909 aa, Homo sapiens
  REGION 1..1909: note = ENSP00000355378
MCHAAQETPLLHHFMAPVMARWPPFGLCLLLLLLSPPPLPLTGAHRFSAPNTTLNHLALAPGRGTLYVGAVNRLFQLSPELQLEAVAVTGPVIDSPDCVPFRDPAECPQAQLTDNANQLLLVSSRAQELVACGQVRQGVCETRRLGDVAEVLYQAEDPGDGQFVAANTPGVATVGLVVPLPGRDLLLVARGLAGKLSAGVPPLAIRQLAGSQPFSSEGLGRLVVGDFSDYNNSYVGAFADARSAYFVFRRRGARAQAEYRSYVARVCLGDTNLYSYVEVPLACQGQGLIQAAFLAPGTLLGVFAAGPRGTQAALCAFPMVELGASMEQARRLCYTAGGRGPSGAEEATVEYGVTSRCVTLPLDSPESYPCGDEHTPSPIAGRQPLEVQPLLKLGQPVSAVAALQADGHMIAFLGDTQGQLYKVFLHGSQGQVYHSQQVGPPGSAISPDLLLDSSGSHLYVLTAHQVDRIPVAACPQFPDCASCLQAQDPLCGWCVLQGRCTRKGQCGRAGQLNQWLWSYEEDSHCLHIQSLLPGHHPRQEQGQVTLSVPRLPILDADEYFHCAFGDYDSLAHVEGPHVACVTPPQDQVPLNPPGTDHVTVPLALMFEDVTVAATNFSFYDCSAVQALEAAAPCRACVGSIWRCHWCPQSSHCVYGEHCPEGERTIYSAQEVDIQVRGPGACPQVEGLAGPHLVPVGWESHLALRVRNLQHFRGLPASFHCWLELPGELRGLPATLEETAGDSGLIHCQAHQFYPSMSQRELPVPIYVTQGEAQRLDNTHALYVILYDCAMGHPDCSHCQAANRSLGCLWCADGQPACRYGPLCPPGAVELLCPAPSIDAVEPLTGPPEGGLALTILGSNLGRAFADVQYAVSVASRPCNPEPSLYRTSARIVCVTSPAPNGTTGPVRVAIKSQPPGISSQHFTYQDPVLLSLSPRWGPQAGGTQLTIRGQHLQTGGNTSAFVGGQPCPILEPVCPEAIVCRTRPQAAPGEAAVLVVFGHAQRTLLASPFRYTANPQLVAAEPSASFRGGGRLIRVRGTGLDVVQRPLLSVWLEADAEVQASRAQPQDPQPRRSCGAPAADPQACIQLGGGLLQCSTVCSVNSSSLLLCRSPAVPDRAHPQRVFFTLDNVQVDFASASGGQGFLYQPNPRLAPLSREGPARPYRLKPGHVLDVEGEGLNLGISKEEVRVHIGRGECLVKTLTRTHLYCEPPAHAPQPANGSGLPQFVVQMGNVQLALGPVQYEAEPPLSAFPVEAQAGVGMGAAVLIAAVLLLTLMYRHKSKQALRDYQKVLVQLESLETGVGDQCRKEFTDLMTEMTDLSSDLEGSGIPFLDYRTYAERAFFPGHGGCPLQPKPEGPGEDGHCATVRQGLTQLSNLLNSKLFLLTLIHTLEEQPSFSQRDRCHVASLLSLALHGKLEYLTDIMRTLLGDLAAHYVHRNPKLMLRRTETMVEKLLTNWLSICLYAFLREVAGEPLYMLFRAIQYQVDKGPVDAVTGKAKRTLNDSRLLREDVEFQPLTLMVLVGPGAGGAAGSSEMQRVPARVLDTDTITQVKEKVLDQVYKGTPFSQRPSVHALDLEWRSGLAGHLTLSDEDLTSVTQNHWKRLNTLQHYKVPDGATVGLVPQLHRGSTISQSLAQRCPLGENIPTLEDGEEGGVCLWHLVKATEEPEGAKVRCSSLREREPARAKAIPEIYLTRLLSMKGTLQKFVDDTFQAILSVNRPIPIAVKYLFDLLDELAEKHGIEDPGTLHIWKTNSLLLRFWVNALKNPQLIFDVRVSDNVDAILAVIAQTFIDSCTTSEHKVGRDSPVNKLLYAREIPRYKQMVERYYADIRQSSPASYQEMNSALAELSGNYTSAPHCLEALQELYNHIHRYYDQIISALEEDPVGQKLQLACRLQQVAALVENKVTDL

SEQ ID NO: 33753 - protein, 258 aa, Homo sapiens
  REGION 1..258: note = ENSP00000391650
  VARIANT 1: note = Any amino acid
XSLETGVGDQCRKEFTDLMTEMTDLSSDLEGSGIPFLDYRTYAERAFFPGHGGCPLQPKPEGPGEDGHCATVRQGLTQLSNLLNSKLFLLTLIHTLEEQPSFSQRDRCHVASLLSLALHGKLEYLTDIMRTLLGDLAAHYVHRNPKLMLRRTETMVEKLLTNWLSICLYAFLREVAGEPLYMLFRAIQYQVDKGPVDAVTEWRSGLAGHLTLSDEDLTSVTQNHWKRLNTLQHYKVPDGATVGLVPQLHRGSTISQSL

SEQ ID NO: 33754 - protein, 163 aa, Homo sapiens
  REGION 1..163: note = ENSP00000396048
  VARIANT 1: note = Any amino acid
XKRTLNDSRLLREDVEFQPLTLMVLVGPGAGGAAGSSEMQRVPARVLDTDTITQVKEKVLDQVYKGTPFSQRPSVHALDLEWRSGLAGHLTLSDEDLTSVTQNHWKRLNTLQHYKVPDGATVGLVPQLHRGSTISQSLAQRCPLGESESLGPDLGPLESRLGR

SEQ ID NO: 33755 - protein, 175 aa, Homo sapiens
  REGION 1..175: note = ENSP00000412454
  VARIANT 1: note = Any amino acid
XASQGTLQKFVDDTFQAILSVNRPIPIAVKYLFDLLDELAEKHGIEDPGTLHIWKTNSLLLRFWVNALKNPQLIFDVRVSDNVDAILAVIAQTFIDSCTTSEHKVGRVRAVPAAAAGRGLRRKGLWGKPRGLCTELWVGSGSIMGAPSPPSSCLAPPLPPEQDSPVNKLLYAREI

SEQ ID NO: 33756 - protein, 1932 aa, Homo sapiens
  REGION 1..1932: note = ENSP00000442736
MELTPASSLTCSLLSPRLPGSFPQLRRVPPCSRPWLPKAPVMARWPPFGLCLLLLLLSPPPLPLTGAHRFSAPNTTLNHLALAPGRGTLYVGAVNRLFQLSPELQLEAVAVTGPVIDSPDCVPFRDPAECPQAQLTDNANQLLLVSSRAQELVACGQVRQGVCETRRLGDVAEVLYQAEDPGDGQFVAANTPGVATVGLVVPLPGRDLLLVARGLAGKLSAGVPPLAIRQLAGSQPFSSEGLGRLVVGDFSDYNNSYVGAFADARSAYFVFRRRGARAQAEYRSYVARVCLGDTNLYSYVEVPLACQGQGLIQAAFLAPGTLLGVFAAGPRGTQAALCAFPMVELGASMEQARRLCYTAGGRGPSGAEEATVEYGVTSRCVTLPLDSPESYPCGDEHTPSPIAGRQPLEVQPLLKLGQPVSAVAALQADGHMIAFLGDTQGQLYKVFLHGSQGQVYHSQQVGPPGSAISPDLLLDSSGSHLYVLTAHQVDRIPVAACPQFPDCASCLQAQDPLCGWCVLQGRCTRKGQCGRAGQLNQWLWSYEEDSHCLHIQSLLPGHHPRQEQGQVTLSVPRLPILDADEYFHCAFGDYDSLAHVEGPHVACVTPPQDQVPLNPPGTDHVTVPLALMFEDVTVAATNFSFYDCSAVQALEAAAPCRACVGSIWRCHWCPQSSHCVYGEHCPEGERTIYSAQEVDIQVRGPGACPQVEGLAGPHLVPVGWESHLALRVRNLQHFRGLPASFHCWLELPGELRGLPATLEETAGDSGLIHCQAHQFYPSMSQRELPVPIYVTQGEAQRLDNTHALYVILYDCAMGHPDCSHCQAANRSLGCLWCADGQPACRYGPLCPPGAVELLCPAPSIDAVEPLTGPPEGGLALTILGSNLGRAFADVQYAVSVASRPCNPEPSLYRTSARIVCVTSPAPNGTTGPVRVAIKSQPPGISSQHFTYQDPVLLSLSPRWGPQAGGTQLTIRGQHLQTGGNTSAFVGGQPCPILEPVCPEAIVCRTRPQAAPGEAAVLVVFGHAQRTLLASPFRYTANPQLVAAEPSASFRGGGRLIRVRGTGLDVVQRPLLSVWLEADAEVQASRAQPQDPQPRRSCGAPAADPQACIQLGGGLLQCSTVCSVNSSSLLLCRSPAVPDRAHPQRVFFTLDNVQVDFASASGGQGFLYQPNPRLAPLSREGPARPYRLKPGHVLDVEGEGLNLGISKEEVRVHIGRGECLVKTLTRTHLYCEPPAHAPQPANGSGLPQFVVQMGNVQLALGPVQYEAEPPLSAFPVEAQAGVGMGAAVLIAAVLLLTLMYRHKSKQALRDYQKVLVQLESLETGVGDQCRKEFTDLMTEMTDLSSDLEGSGIPFLDYRTYAERAFFPGHGGCPLQPKPEGPGEDGHCATVRQGLTQLSNLLNSKLFLLTLIHTLEEQPSFSQRDRCHVASLLSLALHGKLEYLTDIMRTLLGDLAAHYVHRNPKLMLRRTETMVEKLLTNWLSICLYAFLREVAGEPLYMLFRAIQYQVDKGPVDAVTGKAKRTLNDSRLLREDVEFQPLTLMVLVGPGAGGAAGSSEMQRVPARVLDTDTITQVKEKVLDQVYKGTPFSQRPSVHALDLEWRSGLAGHLTLSDEDLTSVTQNHWKRLNTLQHYKVPDGATVGLVPQLHRGSTISQSLAQRCPLGENIPTLEDGEEGGVCLWHLVKATEEPEGAKVRCSSLREREPARAKAIPEIYLTRLLSMKGTLQKFVDDTFQAILSVNRPIPIAVKYLFDLLDELAEKHGIEDPGTLHIWKTNSLLLRFWVNALKNPQLIFDVRVSDNVDAILAVIAQTFIDSCTTSEHKVGRDSPVNKLLYAREIPRYKQMVERYYADIRQSSPASYQEMNSALAELSGNYTSAPHCLEALQELYNHIHRYYDQIISALEEDPVGQKLQLACRLQQVAALVENKVTDL

SEQ ID NO: 33757 - protein, 1568 aa, Homo sapiens
  REGION 1..1568: note = ENSP00000258526
MEVSRRKAPPRPPRPAAPLPLLAYLLALAAPGRGADEPVWRSEQAIGAIAASQEDGVFVASGSCLDQLDYSLEHSLSRLYRDQAGNCTEPVSLAPPARPRPGSSFSKLLLPYREGAAGLGGLLLTGWTFDRGACEVRPLGNLSRNSLRNGTEVVSCHPQGSTAGVVYRAGRNNRWYLAVAATYVLPEPETASRCNPAASDHDTAIALKDTEGRSLATQELGRLKLCEGAGSLHFVDAFLWNGSIYFPYYPYNYTSGAATGWPSMARIAQSTEVLFQGQASLDCGHGHPDGRRLLLSSSLVEALDVWAGVFSAAAGEGQERRSPTTTALCLFRMSEIQARAKRVSWDFKTAESHCKEGDQPERVQPIASSTLIHSDLTSVYGTVVMNRTVLFLGTGDGQLLKVILGENLTSNCPEVIYEIKEETPVFYKLVPDPVKNIYIYLTAGKEVRRIRVANCNKHKSCSECLTATDPHCGWCHSLQRCTFQGDCVHSENLENWLDISSGAKKCPKIQIIRSSKEKTTVTMVGSFSPRHSKCMVKNVDSSRELCQNKSQPNRTCTCSIPTRATYKDVSVVNVMFSFGSWNLSDRFNFTNCSSLKECPACVETGCAWCKSARRCIHPFTACDPSDYERNQEQCPVAVEKTSGGGRPKENKGNRTNQALQVFYIKSIEPQKVSTLGKSNVIVTGANFTRASNITMILKGTSTCDKDVIQVSHVLNDTHMKFSLPSSRKEMKDVCIQFDGGNCSSVGSLSYIALPHCSLIFPATTWISGGQNITMMGRNFDVIDNLIISHELKGNINVSEYCVATYCGFLAPSLKSSKVRTNVTVKLRVQDTYLDCGTLQYREDPRFTGYRVESEVDTELEVKIQKENDNFNISKKDIEITLFHGENGQLNCSFENITRNQDLTTILCKIKGIKTASTIANSSKKVRVKLGNLELYVEQESVPSTWYFLIVLPVLLVIVIFAAVGVTRHKSKELSRKQSQQLELLESELRKEIRDGFAELQMDKLDVVDSFGTVPFLDYKHFALRTFFPESGGFTHIFTEDMHNRDANDKNESLTALDALICNKSFLVTVIHTLEKQKNFSVKDRCLFASFLTIALQTKLVYLTSILEVLTRDLMEQCSNMQPKLMLRRTESVVEKLLTNWMSVCLSGFLRETVGEPFYLLVTTLNQKINKGPVDVITCKALYTLNEDWLLWQVPEFSTVALNVVFEKIPENESADVCRNISVNVLDCDTIGQAKEKIFQAFLSKNGSPYGLQLNEIGLELQMGTRQKELLDIDSSSVILEDGITKLNTIGHYEISNGSTIKVFKKIANFTSDVEYSDDHCHLILPDSEAFQDVQGKRHRGKHKFKVKEMYLTKLLSTKVAIHSVLEKLFRSIWSLPNSRAPFAIKYFFDFLDAQAENKKITDPDVVHIWKTNSLPLRFWVNILKNPQFVFDIKKTPHIDGCLSVIAQAFMDAFSLTEQQLGKEAPTNKLLYAKDIPTYKEEVKSYYKAIRDLPPLSSSEMEEFLTQESKKHENEFNEEVALTEIYKYIVKYFDEILNKLERERGLEEAQKQLLHVKVLFDEKKKCKWM

SEQ ID NO: 33758 - protein, 109 aa, Homo sapiens
  REGION 1..109: note = ENSP00000447843
MNRTVLFLGTGDGQLLKVILGENLTSNCPEVIYEIKEETPVFYKLVPDPVKNIYIYLTAGKEVRRIRVANCNKHKSCSECLTATDPHCGWCHSLQRCTFQGDCVHSENL

SEQ ID NO: 33759 - protein, 416 aa, Homo sapiens
  REGION 1..416: note = ENSP00000446781
MTAVGVTRHKSKELSRKQSQQLELLESELRKEIRDGFAELQMDKLDVVDSFGTVPFLDYKHFALRTFFPESGGFTHIFTEDMHNRDANDKNESLTALDALICNKSFLVTVIHTLEKQKNFSVKDRCLFASFLTIALQTKLVYLTSILEVLTRDLMEQCSNMQPKLMLRRTESVVEKLLTNWMSVCLSGFLRETVGEPFYLLVTTLNQKINKGPVDVITCKALYTLNEDWLLWQVPEFSTVALNVVFEKIPENESADVCRNISVNVLDCDTIGQAKEKIFQAFLSKNGSPYGLQLNEIGLELQMGTRQKELLDIDSSSVILEDGITKLNTIGHYEISNGSTIKVFKKIANFTSDVEYSDDHCHLILPDSEAFQDVQGKRHRGKHKFKVKEMYLTKLLSTKPSSSLLGKHPEEPSVCL

SEQ ID NO: 33760 - protein, 103 aa, Homo sapiens
  REGION 1..103: note = ENSP00000447625
MQHLCLLAAVGVTRHKSKELSRKQSQQLELLESELRKEIRDGFAELQMDKLDVVDSFGTVPFLDYKHFALRTFFPENRDANDKNESLTALDALICNKSFLVTV

SEQ ID NO: 33761 - protein, 615 aa, Homo sapiens
  REGION 1..615: note = ENSP00000446720
MQHLCLLAAVGVTRHKSKELSRKQSQQLELLESELRKEIRDGFAELQMDKLDVVDSFGTVPFLDYKHFALRTFFPESGGFTHIFTEDMHNRDANDKNESLTALDALICNKSFLVTVIHTLEKQKNFSVKDRCLFASFLTIALQTKLVYLTSILEVLTRDLMEQCSNMQPKLMLRRTESVVEKLLTNWMSVCLSGFLRETVGEPFYLLVTTLNQKINKGPVDVITCKALYTLNEDWLLWQVPEFSTVALNVVFEKIPENESADVCRNISVNVLDCDTIGQAKEKIFQAFLSKNGSPYGLQLNEIGLELQMGTRQKELLDIDSSSVILEDGITKLNTIGHYEISNGSTIKVFKKIANFTSDVEYSDDHCHLILPDSEAFQDVQGKRHRGKHKFKVKEMYLTKLLSTKVAIHSVLEKLFRSIWSLPNSRAPFAIKYFFDFLDAQAENKKITDPDVVHIWKTNSLPLRFWVNILKNPQFVFDIKKTPHIDGCLSVIAQAFMDAFSLTEQQLGKEAPTNKLLYAKDIPTYKEEVKSYYKAIRDLPPLSSSEMEEFLTQESKKHENEFNEEVALTEIYKYIVKYFDEILNKLERERGLEEAQKQLLHVKVLFDEKKKCKWM

SEQ ID NO: 33762 - protein, 307 aa, Homo sapiens
  REGION 1..307: note = ENSP00000439225
MGTRQKELLDIDSSSVILEDGITKLNTIGHYEISNGSTIKVFKKIANFTSDVEYSDDHCHLILPDSEAFQDVQGKRHRGKHKFKVKEMYLTKLLSTKVAIHSVLEKLFRSIWSLPNSRAPFAIKYFFDFLDAQAENKKITDPDVVHIWKTNSLPLRFWVNILKNPQFVFDIKKTPHIDGCLSVIAQAFMDAFSLTEQQLGKEAPTNKLLYAKDIPTYKEEVKSYYKAIRDLPPLSSSEMEEFLTQESKKHENEFNEEVALTEIYKYIVKYFDEILNKLERERGLEEAQKQLLHVKVLFDEKKKCKWM

SEQ ID NO: 33763 - protein, 668 aa, Homo sapiens
  REGION 1..668: note = ENSP00000402758
MDLVLKRCLLHLAVIGALLAVGATKVPRNQDWLGVSRQLRTKAWNRQLYPEWTEAQRLDCWRGGQVSLKVSNDGPTLIGANASFSIALNFPGSQKVLPDGQVIWVNNTIINGSQVWGGQPVYPQETDDACIFPDGGPCPSGSWSQKRSFVYVWKTWGQYWQVLGGPVSGLSIGTGRAMLGTHTMEVTVYHRRGSRSYVPLAHSSSAFTITDQVPFSVSVSQLRALDGGNKHFLRNQPLTFALQLHDPSGYLAEADLSYTWDFGDSSGTLISRALVVTHTYLEPGPVTAQVVLQAAIPLTSCGSSPVPGTTDGHRPTAEAPNTTAGQVPTTEVVGTTPGQAPTAEPSGTTSVQVPTTEVISTAPVQMPTAESTGMTPEKVPVSEVMGTTLAEMSTPEATGMTPAEVSIVVLSGTTAAQVTTTEWVETTARELPIPEPEGPDASSIMSTESITGSLGPLLDGTATLRLVKRQVPLDCVLYRYGSFSVTLDIVQGIESAEILQAVPSGEGDAFELTVSCQGGLPKEACMEISSPGCQPPAQRLCQPVLPSPACQLVLHQILKGGSGTYCLNVSLADTNSLAVVSTQLIMPVPGILLTGQEAGLGQVPLIVGILLVLMAVVLASLIYRRRLMKQDFSVPQLPHSSSHWLRLPRIFCSCPIGENSPLLSGQQV

SEQ ID NO: 33764 - protein, 661 aa, Homo sapiens
  REGION 1..661: note = ENSP00000449690
MDLVLKRCLLHLAVIGALLAVGATKVPRNQDWLGVSRQLRTKAWNRQLYPEWTEAQRLDCWRGGQVSLKVSNDGPTLIGANASFSIALNFPGSQKVLPDGQVIWVNNTIINGSQVWGGQPVYPQETDDACIFPDGGPCPSGSWSQKRSFVYVWKTWGQYWQVLGGPVSGLSIGTGRAMLGTHTMEVTVYHRRGSRSYVPLAHSSSAFTITDQVPFSVSVSQLRALDGGNKHFLRNQPLTFALQLHDPSGYLAEADLSYTWDFGDSSGTLISRALVVTHTYLEPGPVTAQVVLQAAIPLTSCGSSPVPGTTDGHRPTAEAPNTTAGQVPTTEVVGTTPGQAPTAEPSGTTSVQVPTTEVISTAPVQMPTAESTGMTPEKVPVSEVMGTTLAEMSTPEATGMTPAEVSIVVLSGTTAAQVTTTEWVETTARELPIPEPEGPDASSIMSTESITGSLGPLLDGTATLRLVKRQVPLDCVLYRYGSFSVTLDIVQGIESAEILQAVPSGEGDAFELTVSCQGGLPKEACMEISSPGCQPPAQRLCQPVLPSPACQLVLHQILKGGSGTYCLNVSLADTNSLAVVSTQLIMPGQEAGLGQVPLIVGILLVLMAVVLASLIYRRRLMKQDFSVPQLPHSSSHWLRLPRIFCSCPIGENSPLLSGQQV

SEQ ID NO: 33765 - protein, 575 aa, Homo sapiens
  REGION 1..575: note = ENSP00000450036
MDLVLKRCLLHLAVIGALLAVGATKGSQVWGGQPVYPQETDDACIFPDGGPCPSGSWSQKRSFVYVWKTWGQYWQVLGGPVSGLSIGTGRAMLGTHTMEVTVYHRRGSRSYVPLAHSSSAFTITDQVPFSVSVSQLRALDGGNKHFLRNQPLTFALQLHDPSGYLAEADLSYTWDFGDSSGTLISRALVVTHTYLEPGPVTAQVVLQAAIPLTSCGSSPVPGTTDGHRPTAEAPNTTAGQVPTTEVVGTTPGQAPTAEPSGTTSVQVPTTEVISTAPVQMPTAESTGMTPEKVPVSEVMGTTLAEMSTPEATGMTPAEVSIVVLSGTTAAQVTTTEWVETTARELPIPEPEGPDASSIMSTESITGSLGPLLDGTATLRLVKRQVPLDCVLYRYGSFSVTLDIVQGIESAEILQAVPSGEGDAFELTVSCQGGLPKEACMEISSPGCQPPAQRLCQPVLPSPACQLVLHQILKGGSGTYCLNVSLADTNSLAVVSTQLIMPGQEAGLGQVPLIVGILLVLMAVVLASLIYRRRLMKQDFSVPQLPHSSSHWLRLPRIFCSCPIGENSPLLSGQQV

SEQ ID NO: 33766 - protein, 661 aa, Homo sapiens; identical to SEQ ID NO: 33764
  REGION 1..661: note = ENSP00000448828

SEQ ID NO: 33767 - protein, 661 aa, Homo sapiens; identical to SEQ ID NO: 33764
  REGION 1..661: note = ENSP00000447374

SEQ ID NO: 33768 - protein, 290 aa, Homo sapiens
  REGION 1..290: note = ENSP00000448029
MDLVLKRCLLHLAVIGALLAVGATKGGQVSLKVSNDGPTLIGANASFSIALNFPGSQKVLPDGQVIWVNNTIINGSQVWGGQPVYPQETDDACIFPDGGPCPSGSWSQKRSFVYVWKTWEGIESAEILQAVPSGEGDAFELTVSCQGGLPKEACMEISSPGCQPPAQRLCQPVLPSPACQLVLHQILKGGSGTYCLNVSLADTNSLAVVSTQLIMPGQEAGLGQVPLIVGILLVLMAVVLASLIYRRRLMKQDFSVPQLPHSSSHWLRLPRIFCSCPIGENSPLLSGQQV

SEQ ID NO: 33769 - protein, 452 aa, Homo sapiens
  REGION 1..452: note = ENSP00000449520
  VARIANT 1: note = Any amino acid
XQVWGGQPVYPQETDDACIFPDGGPCPSGSWSQKRSFVYVWKTWGQYWQVLGGPVSGLSIGTGRAMLGTHTMEVTVYHRRGSRSYVPLAHSSSAFTITDQVPFSVSVSQLRALDGGNKHFLRNQPLTFALQLHDPSGYLAEADLSYTWDFGDSSGTLISRALVVTHTYLEPGPVTAQVVLQAAIPLTSCGSSPVPGTTDGHRPTAEAPNTTAGQVPTTEVVGTTPGQAPTAEPSGTTSVQVPTTEVISTAPVQMPTAESTAAQVTTTEWVETTARELPIPEPEGPDASSIMSTESITGSLGPLLDGTATLRLVKRQVPLDCVLYRYGSFSVTLDIVQGIESAEILQAVPSGEGDAFELTVSCQGGLPKEACMEISSPGCQPPAQRLCQPVLPSPACQLVLHQILKGGSGTYCLNVSLADTNSLAVVSTQLIMPVPGILLTGQEAGLGQVPLI

SEQ ID NO: 33770 - protein, 296 aa, Homo sapiens
  REGION 1..296: note = ENSP00000447732
MDLVLKRCLLHLAVIGALLAVGATKVPRNQDWLGVSRQLRTKAWNRQLYPEWTEAQRLDCWRGGQVSLKVSNDGPTLIGANASFSIALNFPGSQKVLPDGQVIWVNNTIINGSQVWGGQPVYPQETDDACIFPDGGPCPSGSWSQKRSFVYVWKTWVPGTTDGHRPTAEAPNTTAGQVPTTEVVGTTPGQAPTAEPSGTTSVQVPTTEVISTAPVQMPTAESTAAQVTTTEWVETTARELPIPEPEGPDASSIMSTESITGSLGPLLDGTATLRLVKRQVPLDCVLYRYGSFSVTL

SEQ ID NO: 33771 - protein, 344 aa, Homo sapiens
  REGION 1..344: note = ENSP00000448849
MDLVLKRCLLHLAVIGALLAVGATKVPRNQDWLGVSRQLRTKAWNRQLYPEWTEAQRLDCWRGGQVSLKVSNDGPTLIGANASFSIALNFPGSQKVLPDGQVIWVNNTIINGSQVWGGQPVYPQETDDACIFPDGGPCPSGSWSQKRSFVYVWKTWDQVPFSVSVSQLRALDGGNKHFLRNQPLTFALQLHDPSGYLAEADLSYTWDFGDSSGTLISRALVVTHTYLEPGPVTAQVVLQAAIPLTSCGSSPVPGTTDGHRPTAEAPNTTAGQVPTTEVVGTTPGQAPTAEPSGTTSVQVPTTEVISTAPVQMPTAESTGMTPEKVPVSEVMGTTLAEMSTPEAT

SEQ ID NO: 33772 - protein, 299 aa, Homo sapiens
  REGION 1..299: note = ENSP00000446662
MDLVLKRCLLHLAVIGALLAVGATKVPRNQDWLGVSRQLRTKAWNRQLYPEWTEAQRLDCWRGSQVWGGQPVYPQETDDACIFPDGGPCPSGSWSQKRSFVYVWKTWGQYWQVLGGPVSGLSIGTGRAMLGTHTMEVTVYHRRGSRSYVPLAHSSSAFTITDQVPFSVSVSQLRALDGGNKHFLRNQPLTFALQLHDPSGYLAEADLSYTWDFGDSSGTLISRALVVTHTYLEPGPVTAQVVLQAAIPLTSCGSSPVPGTTDGHRPTAEAPNTTAGQVPTTEVVGTTPGQAPTAEPSGT

SEQ ID NO: 33773 - protein, 151 aa, Homo sapiens
  REGION 1..151: note = ENSP00000446633
MDLVLKRCLLHLAVIGALLAVGATKVPRNQDWLGVSRQLRTKAWNRQLYPEWTEAQRLDCWRGGQVSLKVSNDGPTLIGANASFSIALNFPGSQKVLPDGQVIWVNNTIINGSQVWGGQPVYPQETDDACIFPDGGPCPSGSWSQKRSFVY

SEQ ID NO: 33774 - protein, 134 aa, Homo sapiens
  REGION 1..134: note = ENSP00000448871
MGKEEIPRPTLTSVKTLLYTKEFPQTVKVPRNQDWLGVSRQLRTKAWNRQLYPEWTEAQRLDCWRGGQVSLKVSNDGPTLIGANASFSIALNFPGSQKVLPDGQVIWVNNTIINGSQVWGGQPVYPQETDDACI

SEQ ID NO: 33775 - protein, 287 aa, Homo sapiens
  REGION 1..287: note = ENSP00000345826
MHRLMGVNSTAAAAAGQPNVSCTCNCKRSLFQSMEITELEFVQIIIIVVVMMVMVVVITCLLSHYKLSARSFISRHSQGRRREDALSSEGCLWPSESTVSGNGIPEPQVYAPPRPTDRLAVPPFAQRERFHRFQPTYPYLQHEIDLPPTISLSDGEEPPPYQGPCTLQLRDPEQQLELNRESVRAPPNRTIFDSDLMDSARLGGPCPPSSNSGISATCYGSGGRMEGPPPTYSEVIGHYPGSSFQHQQSSGPPSLLEGTRLHHTHIAPLESAAIWSKEKDKQKGHPL

SEQ ID NO: 33776 - protein, 237 aa, Homo sapiens
  REGION 1..237: note = ENSP00000379161
MMVMVVVITCLLSHYKLSARSFISRHSQGRRREDALSSEGCLWPSESTVSGNGIPEPQVYAPPRPTDRLAVPPFAQRERFHRFQPTYPYLQHEIDLPPTISLSDGEEPPPYQGPCTLQLRDPEQQLELNRESVRAPPNRTIFDSDLMDSARLGGPCPPSSNSGISATCYGSGGRMEGPPPTYSEVIGHYPGSSFQHQQSSGPPSLLEGTRLHHTHIAPLESAAIWSKEKDKQKGHPL

SEQ ID NO: 33777 - protein, 252 aa, Homo sapiens
  REGION 1..252: note = ENSP00000344014
MAELEFVQIIIIVVVMMVMVVVITCLLSHYKLSARSFISRHSQGRRREDALSSEGCLWPSESTVSGNGIPEPQVYAPPRPTDRLAVPPFAQRERFHRFQPTYPYLQHEIDLPPTISLSDGEEPPPYQGPCTLQLRDPEQQLELNRESVRAPPNRTIFDSDLMDSARLGGPCPPSSNSGISATCYGSGGRMEGPPPTYSEVIGHYPGSSFQHQQSSGPPSLLEGTRLHHTHIAPLESAAIWSKEKDKQKGHPL

SEQ ID NO: 33778 - protein, 237 aa, Homo sapiens; identical to SEQ ID NO: 33776
  REGION 1..237: note = ENSP00000379159

SEQ ID NO: 33779 - protein, 208 aa, Homo sapiens
  REGION 1..208: note = ENSP00000401506
MPAIPAHGAELEFVQIIIIVVVMMVMVVVITCLLSHYKLSARSFISRHSQGRRREDALSSEGCLWPSESTVSGNGIPEPQVYAPPRPTDRLAVPPFAQRERFHRFQPTYPYLQHEIDLPPTISLSDGEEPPPYQGPCTLQLRDPEQQLELNRESVRAPPNRTIFDSDLMDSARLGGPCPPSSNSGISATCYGSGGRMEGPPPTYSEVI

SEQ ID NO: 33780 - protein, 227 aa, Homo sapiens
  REGION 1..227: note = ENSP00000379164
MHRLMGVNSTAAAAAGQPNVSCTCNCKRSLFQSMEISCHGFPVCKSHQHQEWKSLCWSLRSPGGASSITGFGSMKVTNPAMNLPECQWLRIQKAELEFVQIIIIVVVMMVMVVVITCLLSHYKLSARSFISRHSQGRRREDALSSEGCLWPSESTVSGNGIPEPQVYAPPRPTDRLAVPPFAQRERFHRFQPTYPYLQHEIDLPPTISLSDGEEPPPYQGPCTLQLR

SEQ ID NO: 33781 - protein, 237 aa, Homo sapiens; identical to SEQ ID NO: 33776
  REGION 1..237: note = ENSP00000265626

SEQ ID NO: 33782 - protein, 132 aa, Homo sapiens
  REGION 1..132: note = ENSP00000256103
MSNKFLGTWKLVSSENFDDYMKALGVGLATRKLGNLAKPTVIISKKGDIITIRTESTFKNTEISFKLGQEFEETTADNRKTKSIVTLQRGSLNQVQRWDGKETTIKRKLVNGKMVAECKMKGVVCTRIYEKV

SEQ ID NO: 33783 - protein, 60 aa, Homo sapiens
  REGION 1..60: note = ENSP00000429917
MSNKFLGTWKLVSSENFDDYMKALEHRNPAERITESSAEMGWQRDNHKEKASEWENGSGM

SEQ ID NO: 33784 - protein, 160 aa, Homo sapiens
  REGION 1..160: note = ENSP00000379269
MLLLLLSIIVLHVAVLVLLFVSTIVSQWIVGNGHATDLWQNCSTSSSGNVHHCFSSSPNEWLQSVQATMILSIIFSILSLFLFFCQLFTLTKGGRFYITGIFQILAGLCVMSAAAIYTVRHPEWHLNSDYSYGFAYILAWVAFPLALLSGVIYVILRKRE

SEQ ID NO: 33785 - protein, 160 aa, Homo sapiens; identical to SEQ ID NO: 33784
  REGION 1..160: note = ENSP00000308937

SEQ ID NO: 33786 - protein, 161 aa, Homo sapiens [sequence omitted]

SEQ ID NO: 33787 - protein, 118 aa, Homo sapiens
  REGION 1..118: note = ENSP00000379268
MLLLLLSIIVLHVAVLVLLFVSTIVSQWIVGNGHATDLWQNCSTSSSGNVHHCFSSSPNEWLQSVQATMILSIIFSILSLFLFFCQLFTLTKGGRFYITGIFQILAESNSSQMCGYRD

SEQ ID NO: 33788 - protein, 51 aa, Homo sapiens
  REGION 1..51: note = ENSP00000464468
MAAVCPGHHDPVDHLQHSVSVPVLLPTLHPHQGGQVLHHWNLPNSCWSVRD

SEQ ID NO: 33789 - protein, 125 aa, Homo sapiens
  REGION 1..125: note = ENSP00000409824
MLLLLLSIIVLHVAVLVLLFVSTIVSQWIVGNGHATDLWQNCSTSSSGNVHHCFSSSPNEWLQSVQATMILSIIFSILSLFLFFCQLFTLTKGGRFYITGIFQILAGKLWMVKSMWKRGASKSAE

SEQ ID NO: 33790 - protein, 160 aa, Homo sapiens; identical to SEQ ID NO: 33784
  REGION 1..160: note = ENSP00000484631

SEQ ID NO: 33791 - protein, 192 aa, Homo sapiens
  REGION 1..192: note = ENSP00000357452
MAPLGGAPRLVLLFSGKRKSGKDFVTEALQSRLGADVCAVLRLSGPLKEQYAQEHGLNFQRLLDTSTYKEAFRKDMIRWGEEKRQADPGFFCRKIVEGISQPIWLVSDTRRVSDIQWFREAYGAVTQTVRVVALEQSRQQRGWVFTPGVDDAESECGLDNFGDFDWVIENHGVEQRLEEQLENLIEFIRSRL

SEQ ID NO: 33792 - protein, 465 aa, Homo sapiens
  REGION 1..465: note = ENSP00000358223
MLPLWTLSLLLGAVAGKEVCYERLGCFSDDSPWSGITERPLHILPWSPKDVNTRFLLYTNENPNNFQEVAADSSSISGSNFKTNRKTRFIIHGFIDKGEENWLANVCKNLFKVESVNCICVDWKGGSRTGYTQASQNIRIVGAEVAYFVEFLQSAFGYSPSNVHVIGHSLGAHAAGEAGRRTNGTIGRITGLDPAEPCFQGTPELVRLDPSDAKFVDVIHTDGAPIVPNLGFGMSQVVGHLDFFPNGGVEMPGCKKNILSQIVDIDGIWEGTRDFAACNHLRSYKYYTDSIVNPDGFAGFPCASYNVFTANKCFPCPSGGCPQMGHYADRYPGKTNDVGQKFYLDTGDASNFARWRYKVSVTLSGKKVTGHILVSLFGNKGNSKQYEIFKGTLKPDSTHSNEFDSDVDVGDLQMVKFIWYNNVINPTLPRVGASKIIVETNVGKQFNFCSPETVREEVLLTLTPC

SEQ ID NO: 33793 - protein, 364 aa, Homo sapiens
  REGION 1..364: note = ENSP00000429344
MALALLEDWCRIMSVDEQKSLMVTGIPADFEEAEIQEVLQETLKSLGRYRLLGKIFRKQENANAVLLELLEDTDVSAIPSEVQGKGGVWKVIFKTPNQDTEFLERLNLFLEKEGQTVSGMFRALGQEGVSPATVPCISPELLAHLLGQAMAHAPQPLLPMRYRKLRVFSGSAVPAPEEESFEVWLEQATEIVKEWPVTEAEKKRWLAESLRGPALDLMHIVQADNPSISVEECLEAFKQVFGSLESRRTAQVRYLKTYQEEGEKVSAYVLRLETLLRRAVEKRAIPRRIADQVRLEQVMAGATLNQMLWCRLRELKDQGPPPSFLELMKVIREEEEEEASFENESIEEPEERDGYGRWNHEGDD

SEQ ID NO: 33794 - protein, 93 aa, Homo sapiens
  REGION 1..93: note = ENSP00000450663
MENGYTYEDYKNTAEWLLSHTKHRPQVAIICGSGLGGLTDKLTQAQIFDYGEIPNFPRSTVPGHAGRLVFGFLNGRACVMMQGRFHMYEGYPL

SEQ ID NO: 33795 - protein, 289 aa, Homo sapiens
  REGION 1..289: note = ENSP00000354532
MENGYTYEDYKNTAEWLLSHTKHRPQVAIICGSGLGGLTDKLTQAQIFDYGEIPNFPRSTVPGHAGRLVFGFLNGRACVMMQGRFHMYEGYPLWKVTFPVRVFHLLGVDTLVVTNAAGGLNPKFEVGDIMLIRDHINLPGFSGQNPLRGPNDERFGDRFPAMSDAYDRTMRQRALSTWKQMGEQRELQEGTYVMVAGPSFETVAECRVLQKLGADAVGMSTVPEVIVARHCGLRVFGFSLITNKVIMDYESLEKANHEEVLAAGKQAAQKLEQFVSILMASIPLPDKAS

SEQ ID NO: 33796 - protein, 221 aa, Homo sapiens
  REGION 1..221: note = ENSP00000452421
MQRGLALSLVSGARRQSHAAASAGRDARGNRAGVAPPEQEGDRYTYEDYKNTAEWLLSHTKHRPQVAIICGSGLGGLTDKLTQAQIFDYGEIPNFPRSTVPGHAGRLVFGFLNGRACVMMQGRFHMYEGYPLWKVTFPVRVFHLLGVDTLVVTNAAGGLNPKFEVGDIMLIRDHINLPGFSGQNPLRGPNDERFGDRFPAMSDAYDRTMRQRALSTWKQMG

SEQ ID NO: 33797 - protein, 61 aa, Homo sapiens
  REGION 1..61: note = ENSP00000451108
MMQGRFHMYEGYPLWKVTFPVRVFHLLGVDTLVVTNAAGGLNPKFEVGDIMLIRDHINLPG

SEQ ID NO: 33798 - protein, 481 aa, Homo sapiens
  REGION 1..481: note = ENSP00000216180
MYDAERGWSLSFAGCGFLGFYHVGATRCLSEHAPHLLRDARMLFGASAGALHCVGVLSGIPLEQTLQVLSDLVRKARSRNIGIFHPSFNLSKFLRQGLCKCLPANVHQLISGKIGISLTRVSDGENVLVSDFRSKDEVVDALVCSCFIPFYSGLIPPSFRGVRYVDGGVSDNVPFIDAKTTITVSPFYGEYDICPKVKSTNFLHVDITKLSLRLCTGNLYLLSRAFVPPDLKVLGEICLRGYLDAFRFLEEKGICNRPQPGLKSSSEGMDPEVAMPSWANMSLDSSPESAALAVRLEGDELLDHLRLSILPWDESILDTLSPRLATALSEEMKDKGGYMSKICNLLPIRIMSYVMLPCTLPVESAIAIVQRLVTWLPDMPDDVLWLQWVTSQVFTRVLMCLLPASRSQMPVSSQQASPCTPEQDWPCWTPCSPKGCPAETKAEATPRSILRSSLNFFLGNKVPAGAEGLSTFPSFSLEKSL

SEQ ID NO: 33799 - protein, 120 aa, Homo sapiens
  REGION 1..120: note = ENSP00000384668
MYDAERGWSLSFAGCGFLGFYHVGATRCLSEHAPHLLRDARMLFGASAGALHCVGVLSGIPLDSAGPLRSCAEGQESEHWHLPSILQLKQVPPTGSLQMPPGQCPPAHLRQNRHLSYQSV

SEQ ID NO: 33800 - protein, 477 aa, Homo sapiens
  REGION 1..477: note = ENSP00000397987
MYDAERGWSLSFAGCGFLGFYHVGATRCLSEHAPHLLRDARMLFGASAGALHCVGVLSEQTLQVLSDLVRKARSRNIGIFHPSFNLSKFLRQGLCKCLPANVHQLISGKIGISLTRVSDGENVLVSDFRSKDEVVDALVCSCFIPFYSGLIPPSFRGVRYVDGGVSDNVPFIDAKTTITVSPFYGEYDICPKVKSTNFLHVDITKLSLRLCTGNLYLLSRAFVPPDLKVLGEICLRGYLDAFRFLEEKGICNRPQPGLKSSSEGMDPEVAMPSWANMSLDSSPESAALAVRLEGDELLDHLRLSILPWDESILDTLSPRLATALSEEMKDKGGYMSKICNLLPIRIMSYVMLPCTLPVESAIAIVQRLVTWLPDMPDDVLWLQWVTSQVFTRVLMCLLPASRSQMPVSSQQASPCTPEQDWPCWTPCSPKGCPAETKAEATPRSILRSSLNFFLGNKVPAGAEGLSTFPSFSLEKSL

SEQ ID NO: 33801 - protein, 720 aa, Homo sapiens
  REGION 1..720: note = ENSP00000394988
MSINLTVDIYIYLLSNARSVCGKQRSKQLYFLFSPKHYWRISHISLQRGFHTNIIRCKWTKSEAHSCSKHCYSPSNHGLHIGILKLSTSAPKGLTKVNICMSRIKSTLNSVSKAVFGNQNEMISRLAQFKPSSQILRKVSDSGWLKQKNIKQAIKSLKKYSDKSAEKSPFPEEKSHIIDKEEDIGKRSLFHYTSSITTKFGDSFYFLSNHINSYFKRKEKMSQQKENEHFRDKSELEDKKVEEGKLRSPDPGILAYKPGSESVHTVDKPTSPSAIPDVLQVSTKQSIANFLSRPTEGVQALVGGYIGGLVPKLKYDSKSQSEEQEEPAKTDQAVSKDRNAEEKKRLSLQREKIIARVSIDNRTRALVQALRRTTDPKLCITRVEELTFHLLEFPEGKGVAVKERIIPYLLRLRQIKDETLQAAVREILALIGYVDPVKGRGIRILSIDGGGTRGVVALQTLRKLVELTQKPVHQLFDYICGVSTGAILAFMLGLFHMPLDECEELYRKLGSDVFSQNVIVGTVKMSWSHAFYDSQTWENILKDRMGSALMIETARNPTCPKVAADGGLLLNNPSALAMHECKCLWPDVPLECIVSLGTGRYESDVRNTVTYTSLKTKLSNVINSATDTEEVHIMLDGLLPPDTYFRFNPVMCENIPLDESRNEKLDQLQLEGLKYIERNEQKMKKVAKILSQEKTTLQKINDWIKLKTDMYEGLPFFSKL

SEQ ID NO: 33802 - protein, 782 aa, Homo sapiens
  REGION 1..782: note = ENSP00000257694
MSINLTVDIYIYLLSNARSVCGKQRSKQLYFLFSPKHYWRISHISLQRGFHTNIIRCKWTKSEAHSCSKHCYSPSNHGLHIGILKLSTSAPKGLTKVNICMSRIKSTLNSVSKAVFGNQNEMISRLAQFKPSSQILRKVSDSGWLKQKNIKQAIKSLKKYSDKSAEKSPFPEEKSHIIDKEEDIGKRSLFHYTSSITTKFGDSFYFLSNHINSYFKRKEKMSQQKENEHFRDKSELEDKKVEEGKLRSPDPGILAYKPGSESVHTVDKPTSPSAIPDVLQVSTKQSIANFLSRPTEGVQALVGGYIGGLVPKLKYDSKSQSEEQEEPAKTDQAVSKDRNAEEKKRLSLQREKIIARVSIDNRTRALVQALRRTTDPKLCITRVEELTFHLLEFPEGKGVAVKERIIPYLLRLRQIKDETLQAAVREILALIGYVDPVKGRGIRILSIDGGGTRGVVALQTLRKLVELTQKPVHQLFDYICGVSTGAILAFMLGLFHMPLDECEELYRKLGSDVFSQNVIVGTVKMSWSHAFYDSQTWENILKDRMGSALMIETARNPTCPKVAAVSTIVNRGITPKAFVFRNYGHFPGINSHYLGGCQYKMWQAIRASSAAPGYFAEYALGNDLHQDGGLLLNNPSALAMHECKCLWPDVPLECIVSLGTGRYESDVRNTVTYTSLKTKLSNVINSATDTEEVHIMLDGLLPPDTYFRFNPVMCENIPLDESRNEKLDQLQLEGLKYIERNEQKMKKVAKILSQEKTTLQKINDWIKLKTDMYEGLPFFSKL

SEQ ID NO: 33803 - protein, 782 aa, Homo sapiens; identical to SEQ ID NO: 33802
  REGION 1..782: note = ENSP00000410804

SEQ ID NO: 33804 - protein, 682 aa, Homo sapiens
  REGION 1..682: note = ENSP00000387789
MSRIKSTLNSVSKAVFGNQNEMISRLAQFKPSSQILRKVSDSGWLKQKNIKQAIKSLKKYSDKSAEKSPFPEEKSHIIDKEEDIGKRSLFHYTSSITTKFGDSFYFLSNHINSYFKRKEKMSQQKENEHFRDKSELEDKKVEEGKLRSPDPGILAYKPGSESVHTVDKPTSPSAIPDVLQVSTKQSIANFLSRPTEGVQALVGGYIGGLVPKLKYDSKSQSEEQEEPAKTDQAVSKDRNAEEKKRLSLQREKIIARVSIDNRTRALVQALRRTTDPKLCITRVEELTFHLLEFPEGKGVAVKERIIPYLLRLRQIKDETLQAAVREILALIGYVDPVKGRGIRILSIDGGGTRGVVALQTLRKLVELTQKPVHQLFDYICGVSTGAILAFMLGLFHMPLDECEELYRKLGSDVFSQNVIVGTVKMSWSHAFYDSQTWENILKDRMGSALMIETARNPTCPKVAAVSTIVNRGITPKAFVFRNYGHFPGINSHYLGGCQYKMWQAIRASSAAPGYFAEYALGNDLHQDGGLLLNNPSALAMHECKCLWPDVPLECIVSLGTGRYESDVRNTVTYTSLKTKLSNVINSATDTEEVHIMLDGLLPPDTYFRFNPVMCENIPLDESRNEKLDQLQLEGLKYIERNEQKMKKVAKILSQEKTTLQKINDWIKLKTDMYEGLPFFSKL

SEQ ID NO: 33805 - protein, 782 aa, Homo sapiens; identical to SEQ ID NO: 33802
  REGION 1..782: note = ENSP00000406779

SEQ ID NO: 33806 - protein, 639 aa, Homo sapiens
  REGION 1..639: note = ENSP00000402274
MSRIKSTLNSVSKAVFGNQNEMISRLAQFKPSSQILRKVSDSGWLKQKNIKQAIKSLKKYSDKSAEKSPFPEEKSHIIDKEEDIGKRSLFHYTSSITTKFGDSFYFLSNHINSYFKRKEKMSQQKENEHFRDKSELEDKKVEEGKLRSPDPGILAYKPGSESVHTVDKPTSPSAIPDVLQVSTKQSIANFLSRPTEGVQALVGGYIGGLVPKLKYDSKSQSEEQEEPAKTDQAVSKDRNAEEKKRLSLQREKIIARVSIDNRTRALVQALRRTTDPKLCITRVEELTFHLLEFPEGKGVAVKERIIPYLLRLRQIKDETLQAAVREILALIGYVDPVKGRGIRILSIDGGGTRGVVALQTLRKLVELTQKPVHQLFDYICGVSTGAILAFMLGLFHMPLDECEELYRKLGSDVFSQNVIVGTVKMSWSHAFYDSQTWENILKDRMGSALMIETARNPTCPKVAAVSTIVNRGITPKAFVFRNYGHFPGINSHYLGGCQYKMWQAIRASSAAPGYFAEYALGNDLHQDGGLLLNNPSALAMHECKCLWPDVPLECIVSLGTGRYESDVRNTVTYTSLKTKLSNVINSATDTEEVHIMLDGLLPPDTYFRFNPVMCENIPLDESRNEKLDQLQLEGLKYIE

SEQ ID NO: 33807 - protein, 192 aa, Homo sapiens
  REGION 1..192: note = ENSP00000406033
MSINLTVDIYIYLLSNARSVCGKQRSKQLYFLFSPKHYWRISHISLQRGFHTNIIRCKWTKSEAHSCSKHCYSPSNHGLHIGILKLSTSAPKGLTKVNICMSRIKSTLNSVSKAVFGNQNEMISRLAQFKPSSQILRKVSDSGWLKQKNIKQAIKSLKKYSDKSAEKSPFPEEKSHIIDKEEDIGKRSLFHY

SEQ ID NO: 33808 - protein, 55 aa, Homo sapiens
  REGION 1..55: note = ENSP00000391872
MSINLTVDIYIYLLSNARSVCGKQRSKQLYFLFSPKHYWRISHISLQRGFHTNII

SEQ ID NO: 33809 - protein, 566 aa, Homo sapiens
  REGION 1..566: note = ENSP00000461879
MHGGGPPSGDSACPLRTIKRVQFGVLSPDELKRMSVTEGGIKYPETTEGGRPKLGGLMDPRQGVIERTGRCQTCAGNMTECPGHFGHIELAKPVFHVGFLVKTMKVLRCVCFFCSKLLVDSNNPKIKDILAKSKGQPKKRLTHVYDLCKGKNICEGGEEMDNKFGVEQPEGDEDLTKEKGHGGCGRYQPRIRRSGLELYAEWKHVNEDSQEKKILLSPERVHEIFKRISDEECFVLGMEPRYARPEWMIVTVLPVPPLSVRPAVVMQGSARNQDDLTHKLADIVKINNQLRRNEQNGAAAHVIAEDVKLLQFHVATMVDNELPGLPRAMQKSGRPLKSLKQRLKGKEGRVRGNLMGKRVDFSARTVITPDPNLSIDQVGVPRSIAANMTFAEIVTPFNIDRLQELVRRGNSQYPGAKYIIRDNGDRIDLRFHPKPSDLHLQTGYKVERHMCDGDIVIFNRQPTLHKMSMMGHRVRILPWSTFRLNLSVTTPYNADFDGDEMNLHLPQSLETRAEIQELAMVPRMIVTPQSNRPVMGIVQDTLTAVRKFTKRDVFLERVCGPNGNLA

SEQ ID NO: 33810 - protein, 128 aa, Homo sapiens
  REGION 1..128: note = ENSP00000419082
MNAPPAFESFLLFEGEKQLLKDPQVLFAGYKVPHPLEHKIIIRVQTTPDYSPQEAFTNAITDLISELSLLEERFRVRAGPGGADGVGWTLARVPRPGTALACFFGGPQGEAAVMEEQGLPPQAPGHVD

SEQ ID NO: 33811 - protein, 158 aa, Homo sapiens
  REGION 1..158: note = ENSP00000419145
MNAPPAFESFLLFEGEKITINKDTKVPNACLFTINKEDHTLGNIIKSQLLKDPQVLFAGYKVPHPLEHKIIIRVQTTPDYSPQEAFTNAITDLISELSLLEERFRVRAGPGGADGVGWTLARVPRPGTALACFFGGPQGEAAVMEEQGLPPQAPGHVD

SEQ ID NO: 33812 - protein, 115 aa, Homo sapiens
  REGION 1..115: note = ENSP00000368645
MNAPPAFESFLLFEGEKITINKDTKVPNACLFTINKEDHTLGNIIKSQLLKDPQVLFAGYKVPHPLEHKIIIRVQTTPDYSPQEAFTNAITDLISELSLLEERFRTCLLPLRLLP

SEQ ID NO: 33813 - protein, 116 aa, Homo sapiens
  REGION 1..116: note = ENSP00000419146
MNAPPAFESFLLFEGEKITINKDTKVPNACLFTINKEDHTLGNIIKSRACFPFAFCRDCQFPEASPATLPVQPAELCPRAHQLCAPALKRHLGGEAHPVHLHAGAASRPVQQPQHL

SEQ ID NO: 33814 - protein, 115 aa, Homo sapiens; identical to SEQ ID NO: 33812
  REGION 1..115: note = ENSP00000425877

SEQ ID NO: 33815 - protein, 274 aa, Homo sapiens
  REGION 1..274: note = ENSP00000421085
MNAPPAFESFLLFEGEKITINKDTKVPNACLFTINKEDHTLGNIIKSRACFPFAFCRDCQFPEASPATLPVQPAELLAWKSPCATGKDINKHQEVSKSTRSHRHHVDIHLPVFPGKILLNCAALAKRAAPEHISYVPQLSNDTLAGRLTLSTFTLEQPLGQFSSHNISDLDTIWLVVALSNATQSFTAPRTNQDIPAPANFSQRGYYLTLRANRVLYQTRGQLHVLRVGNDTHCQPTKIGCNHPLPGPGPYRVKFLVMNDEGPVAETKWSSDTR

SEQ ID NO: 33816 - protein, 76 aa, Homo sapiens
  REGION 1..76: note = ENSP00000426619
MNAPPAFESFLLFEGEKITINKDTKVPNACLFTINKEDHTLGNIIKSRACFPFAFCRDCQFPEASPATLPVQPAEL

SEQ ID NO: 33817 - protein, 115 aa, Homo sapiens; identical to SEQ ID NO: 33812
  REGION 1..115: note = ENSP00000477228

SEQ ID NO: 33818 - protein, 76 aa, Homo sapiens; identical to SEQ ID NO: 33816
  REGION 1..76: note = ENSP00000422109

SEQ ID NO: 33819 - protein, 115 aa, Homo sapiens; identical to SEQ ID NO: 33812
  REGION 1..115: note = ENSP00000483328

SEQ ID NO: 33820 - protein, 73 aa, Homo sapiens
  REGION 1..73: note = ENSP00000421950
MNAPPAFESFLLFEGEKITINKDTKVPNACLFTINKEDHTLGNIIKSLECNGTILLTATSASRVQVILLLQPS

SEQ ID NO: 33821 - protein, 158 aa, Homo sapiens; identical to SEQ ID NO: 33811
  REGION 1..158: note = ENSP00000482932

SEQ ID NO: 33822 - protein, 219 aa, Homo sapiens
  REGION 1..219: note = ENSP00000414515
MGRLVAVGLLGIALALLGERLLALRNRLKASREVESVDLPHCHLIKGIEAGSEDIDILPNGLAFFSVGLKFPGLHSFAPDKPGGILMMDLKEEKPRARELRISRGFDLASFNPHGISTFIDNDDTVYLFVVNHPEFKNTVEIFKFEEAENSLLHLKTVKHELLPSVNDITAVGPAHFYATNDHYFSDPFLKYLETYLNLHWANVVYYSPNEVKVVYLCC

SEQ ID NO: 33823 - protein, 342 aa, Homo sapiens
  REGION 1..342: note = ENSP00000404622
MGRLVAVGLLGIALALLGERLLALRNRLKASREVESVDLPHCHLIKGIEAGSEDIDILPNGLAFFSVGLKFPGLHSFAPDKPGGILMMDLKEEKPRARELRISRGFDLASFNPHGISTFIDNEFKNTVEIFKFEEAENSLLHLKTVKHELLPSVNDITAVGPAHFYATNDHYFSDPFLKYLETYLNLHWANVVYYSPNEVKVVAEGFDSANGINISPDDKYIYVADILAHEIHVLEKHTNMNLTQLKVLELDTLVDNLSIDPSSGDIWVGCHPNGQKLFVYDPNNPPSSEVLRIQNILSEKPTVTTVYANNGSVLQGSSVASVYDGKLLIGTLYHRALYCEL

SEQ ID NO: 33824 - protein, 354 aa, Homo sapiens
  REGION 1..354: note = ENSP00000222572
MGRLVAVGLLGIALALLGERLLALRNRLKASREVESVDLPHCHLIKGIEAGSEDIDILPNGLAFFSVGLKFPGLHSFAPDKPGGILMMDLKEEKPRARELRISRGFDLASFNPHGISTFIDNDDTVYLFVVNHPEFKNTVEIFKFEEAENSLLHLKTVKHELLPSVNDITAVGPAHFYATNDHYFSDPFLKYLETYLNLHWANVVYYSPNEVKVVAEGFDSANGINISPDDKYIYVADILAHEIHVLEKHTNMNLTQLKVLELDTLVDNLSIDPSSGDIWVGCHPNGQKLFVYDPNNPPSSEVLRIQNILSEKPTVTTVYANNGSVLQGSSVASVYDGKLLIGTLYHRALYCEL

SEQ ID NO: 33825 - protein, 375 aa, Homo sapiens
  REGION 1..375: note = ENSP00000488378
MAPPTELLARPERGSAPGSRAMGRLVAVGLLGIALALLGERLLALRNRLKASREVESVDLPHCHLIKGIEAGSEDIDILPNGLAFFSVGLKFPGLHSFAPDKPGGILMMDLKEEKPRARELRISRGFDLASFNPHGISTFIDNDDTVYLFVVNHPEFKNTVEIFKFEEAENSLLHLKTVKHELLPSVNDITAVGPAHFYATNDHYFSDPFLKYLETYLNLHWANVVYYSPNEVKVVAEGFDSANGINISPDDKYIYVADILAHEIHVLEKHTNMNLTQLKVLELDTLVDNLSIDPSSGDIWVGCHPNGQKLFVYDPNNPPSSEVLRIQNILSEKPTVTTVYANNGSVLQGSSVASVYDGKLLIGTLYHRALYCEL

SEQ ID NO: 33826 - protein, 122 aa, Homo sapiens
  REGION 1..122: note = ENSP00000488874
  VARIANT 1: note = Any amino acid
XENSLLHLKTVKHELLPSVNDITAVGPAHFYATNDHYFSDPFLKYLETYLNLHWANVVYYSPNEVKVVAEGFDSANGINISPDDKYIYVADILAHEIHVLEKHTNMNLTQLKILTISHLEGT

SEQ ID NO: 33827 - protein, 50 aa, Homo sapiens
  REGION 1..50: note = ENSP00000405211
MGRLVAVGLLGIALALLGERLLALRNRLKASREVESVDLPHCHLIKGIVW

SEQ ID NO: 33828 - protein, 113 aa, Homo sapiens
  REGION 1..113: note = ENSP00000488550
MMDLKEEKPRARELRISRGFDLASFNPHGISTFIDNDDTVYLFVVNHPEFKNTVEIFKFEEAENSLLHLKTVKHELLPSVNDITAVGPAHFYATNDHYFSDPFLKYLETYLNL

SEQ ID NO: 33829 - protein, 84 aa, Homo sapiens
  REGION 1..84: note = ENSP00000488462
MGRLVAVGLLGIALALLGERLLALRNRLKASREVESVDLPHCHLIKGIEAGSEDIDILPNGLAFFSVVSVFFLPQIQQRRYKGI

SEQ ID NO: 33830 - protein, 69 aa, Homo sapiens
  REGION 1..69: note = ENSP00000488826
MMDLKEEKPRARELRISRGFDLASFNPHGISTFIDNDDTVYLFVVNHPEFKNTVEIFKFEEAENSLLHL

SEQ ID NO: 33831 - protein, 84 aa, Homo sapiens; identical to SEQ ID NO: 33829
  REGION 1..84: note = ENSP00000487898

SEQ ID NO: 33832 - protein, 53 aa, Homo sapiens
  REGION 1..53: note = ENSP00000488822
MMDLKEEKPRARELRISRGFDLASFNPHGISTFIDNDDTVYLFVVNHPEFKNT

SEQ ID NO: 33833 - protein, 32 aa, Homo sapiens
  REGION 1..32: note = ENSP00000487703
MMDLKEEKPRARELRISRGFDLASFNPHGIST

SEQ ID NO: 33834 - protein, 354 aa, Homo sapiens; identical to SEQ ID NO: 33824
  REGION 1..354: note = ENSP00000488838

SEQ ID NO: 33835 - protein, 140 aa, Homo sapiens
  REGION 1..140: note = ENSP00000395813
MINMGDSHVDTSSTVSEAVAEEVSLFSMTDMILFSLIVGLLTYWFLFRKKKEEVPEFTKIQTLTSSVRESSFVEKMKKTGRNIIVFYGSQTGTAEEFANRLSKDAHRYGMRGMSADPEEYDLADLSSLPEIDNALVVFCM

SEQ ID NO: 33836 - protein, 188 aa, Homo sapiens
  REGION 1..188: note = ENSP00000390540
MINMGDSHVDTSSTVSEAVAEEVSLFSMTDMILFSLIVGLLTYWFLFRKKKEEVPEFTKIQTLTSSVRESSFVEKMKKTGRNIIVFYGSQTGTAEEFANRLSKDAHRYGMRGMSADPEEYDLADLSSLPEIDNALVVFCMATYGEGDPTDNAQDFYDWLQETDVDLSGVKFAVFGLGNKTYEHFNAMG

SEQ ID NO: 33837 - protein, 680 aa, Homo sapiens
  REGION 1..680: note = ENSP00000419970
MINMGDSHVDTSSTVSEAVAEEVSLFSMTDMILFSLIVGLLTYWFLFRKKKEEVPEFTKIQTLTSSVRESSFVEKMKKTGRNIIVFYGSQTGTAEEFANRLSKDAHRYGMRGMSADPEEYDLADLSSLPEIDNALVVFCMATYGEGDPTDNAQDFYDWLQETDVDLSGVKFAVFGLGNKTYEHFNAMGKYVDKRLEQLGAQRIFELGLGDDDGNLEEDFITWREQFWPAVCEHFGVEATGEESSIRQYELVVHTDIDAAKVYMGEMGRLKSYENQKPPFDAKNPFLAAVTTNRKLNQGTERHLMHLELDISDSKIRYESGDHVAVYPANDSALVNQLGKILGADLDVVMSLNNLDEESNKKHPFPCPTSYRTALTYYLDITNPPRTNVLYELAQYASEPSEQELLRKMASSSGEGKELYLSWVVEARRHILAILQDCPSLRPPIDHLCELLPRLQARYYSIASSSKVHPNSVHICAVVVEYETKAGRINKGVATNWLRAKEPAGENGGRALVPMFVRKSQFRLPFKATTPVIMVGPGTGVAPFIGFIQERAWLRQQGKEVGETLLYYGCRRSDEDYLYREELAQFHRDGALTQLNVAFSREQSHKVYVQHLLKQDREHLWKLIEGGAHIYVCGDARNMARDVQNTFYDIVAELGAMEHAQAVDYIKKLMTKGRYSLDVWS

SEQ ID NO: 33838 - protein, 101 aa, Homo sapiens
  REGION 1..101: note = ENSP00000399409
MINMGDSHVDTSSTVSEAVAEEVSLFSMTDMILFSLIVGLLTYWFLFRKKKEEVPEFTKIQTLTSSVRESSFVEKMKKTVSFLHVFTLLRKPRPRWACNQV

SEQ ID NO: 33839 - protein, 39 aa, Homo sapiens
  REGION 1..39: note = ENSP00000409881
MINMGDSHVDTSSTVSEAVAEEVSLFSMTDMILFSLIVG

SEQ ID NO: 33840 - protein, 633 aa, Homo sapiens
  REGION 1..633: note = ENSP00000378355
MINMGDSHVDTSSTVSEAVAEEVSLFSMTDMILFSLIVGLLTYWFLFRKKKEEVPEFTKIQTLTSSVRESSFVEKMKKTGRNIIVFYGSQTGTAEEFANRLSKDAHRYGMRGMSADPEEYDLADLSSLPEIDNALVVFCMATYGEGDPTDNAQDFYDWLQETDVDLSGVKFAVFGLGNKTYEHFNAMGKYVDKRLEQLGAQRIFELGLGDDDGNLEEDFITWREQFWPAVCEHFGVEATGEESSIRQYELVVHTDIDAAKVYMGEMGRLKSYENQKPPFDAKNPFLAAVTTNRKLNQGTERHLMHLELDISDSKIRYESGDHVAVYPANDSALVNQLGKILGADLDVVMSLNNLDEESNKKHPFPCPTSYRTALTYYLDITNPPRTNVLYELAQYASEPSEQELLRKMASSSGEGKELYLSWVVEARRHILAILQDCPSLRPPIDHLCELLPRLQARYYSIASSSKVHPNSVHICAVVVEYETKAGRINKGVATNWLRAKEPAGENGGRALVPMFVRKSQFRLPFKATTPVIMVGPGTGVAPFIGFIQERAWLRQQGKEVGETLLYYGCRRSDEDYLYREELAQFHRDGALTQLNVAFSREQSHKVYVQHLLKQDREHLWKLIEGGAHIYVCG

SEQ ID NO: 33841 - protein, 146 aa, Homo sapiens
  REGION 1..146: note = ENSP00000409238
MINMGDSHVDTSSTVSEAVAEEVSLFSMTDMILFSLIVGLLTYWFLFRKKKEEVPEFTKIQTLTSSVRESSFVEKMKKTGRNIIVFYGSQTGTAEEFANRLSKDAHRYGMRGMSADPEEYDLADLSSLPEIDNALVVFCMATYGEG

SEQ ID NO: 33842 - protein, 172 aa, Homo sapiens
  REGION 1..172: note = ENSP00000399327
MINMGDSHVDTSSTVSEAVAEEVSLFSMTDMILFSLIVGLLTYWFLFRKKKEEVPEFTKIQTLTSSVRESSFVEKMKKTGRNIIVFYGSQTGTAEEFANRLSKDAHRYGMRGMSADPEEYDLADLSSLPEIDNALVVFCMATYGEGDPTDNAQDFYDWLQETDVDLSGVKFA

SEQ ID NO: 33843 - protein, 166 aa, Homo sapiens
  REGION 1..166: note = ENSP00000389409
MINMGDSHVDTSSTVSEAVAEEVSLFSMTDMILFSLIVGLLTYWFLFRKKKEEVPEFTKIQTLTSSVRESSFVEKMKKTGRNIIVFYGSQTGTAEEFANRLSKDAHRYGMRGMSADPEEYDLADLSSLPEIDNALVVFCMATYGEGDPTDNAQDFYDWLQETDVDL

SEQ ID NO: 33844 - protein, 62 aa, Homo sapiens
  REGION 1..62: note = ENSP00000399556
MINMGDSHVDTSSTVSEAVAEEVSLFSMTDMILFSLIVGLLTYWFLFRKKKEEVPEFTKIQT

SEQ ID NO: 33845 - protein, 62 aa, Homo sapiens; identical to SEQ ID NO: 33844
  REGION 1..62: note = ENSP00000389719

SEQ ID NO: 33846 - protein, 211 aa, Homo sapiens
  REGION 1..211: note = ENSP00000404731
MINMGDSHVDTSSTVSEAVAEEVSLFSMTDMILFSLIVGLLTYWFLFRKKKEEVPEFTKIQTLTSSVRESSFVEKMKKTGRNIIVFYGSQTGTAEEFANRLSKDAHRYGMRGMSADPEEYDLADLSSLPEIDNALVVFCMATYGEGDPTDNAQDFYDWLQETDVDLSGVKFAVFGLGNKTYEHFNAMGKCGQGVHGGDGPAEELREPEAPL

SEQ ID NO: 33847 - protein, 189 aa, Homo sapiens
  REGION 1..189: note = ENSP00000414263
MINMGDSHVDTSSTVSEAVAEEVSLFSMTDMILFSLIVGLLTYWFLFRKKKEEVPEFTKIQTLTSSVRESSFVEKMKKTGRNIIVFYGSQTGTAEEFANRLSKDAHRYGMRGMSADPEEYDLADLSSLPEIDNALVVFCMATYGEGDPTDNAQDFYDWLQETDVDLSGVKFALGGGLHHLARAVLAGRV

SEQ ID NO: 33848 - protein, 725 aa, Homo sapiens
  REGION 1..725: note = ENSP00000393527
  VARIANT 1: note = Any amino acid
XTDMILFSLIVGLLTYWFLFRKKKEEVPEFTKIQTLTSSVRESSFVEKMKKTGRNIIVFYGSQTGTAEEFANRLSKDAHRYGMRGMSADPEEYDLADLSSLPEIDNALVVFCMATYGEGDPTDNAQDFYDWLQETDVDLSGVKFAVSHPETAMGSRWPAVPPWGLQIHVSERQPSRPPPCPQQPGQATCETLSSAPDPSTTRMSPPCPQPQSAPGGIGCWRLKVFGLGNKTYEHFNAMGKYVDKRLEQLGAQRIFELGLGDDDGNLEEDFITWREQFWPAVCEHFGVEATGEESSIRQYELVVHTDIDAAKVYMGEMGRLKSYENQKPPFDAKNPFLAAVTTNRKLNQGTERHLMHLELDISDSKIRYESGDHVAVYPANDSALVNQLGKILGADLDVVMSLNNLDEESNKKHPFPCPTSYRTALTYYLDITNPPRTNVLYELAQYASEPSEQELLRKMASSSGEGKELYLSWVVEARRHILAILQDCPSLRPPIDHLCELLPRLQARYYSIASSSKVHPNSVHICAVVVEYETKAGRINKGVATNWLRAKEPAGENGGRALVPMFVRKSQFRLPFKATTPVIMVGPGTGVAPFIGFIQERAWLRQQGKEVGETLLYYGCRRSDEDYLYREELAQFHRDGALTQLNVAFSREQSHKVYVQHLLKQDREHLWKLIEGGAHIYVCGTPSSCPGMHGTWPGMCRTPSTTSWLSSGPWSTRRRWTTSRN

SEQ ID NO: 33849 - protein, 108 aa, Homo sapiens
  REGION 1..108: note = ENSP00000400964
MGCTYSSPPEEPALRRTSSVRESSFVEKMKKTGRNIIVFYGSQTGTAEEFANRLSKDAHRYGMRGMSADPEEYDLADLSSLPEIDNALVVFCMATYGEGDPTDNAQDF

SEQ ID NO: 33850 - protein, 54 aa, Homo sapiens
  REGION 1..54: note = ENSP00000403494
MRLPGVNSKDLLCQREQLCGKDEENGEEHHRVLRLPDGDCRGVCQPPVQGRPPL

SEQ ID NO: 33851 - protein, 418 aa, Homo sapiens
  REGION 1..418: note = ENSP00000412490
MGEMGRLKSYENQKPPFDAKNPFLAAVTTNRKLNQGTERHLMHLELDISDSKIRYESGDHVAVYPANDSALVNQLGKILGADLDVVMSLNNLDEESNKKHPFPCPTSYRTALTYYLDITNPPRTNVLYELAQYASEPSEQELLRKMASSSGEGKELYLSWVVEARRHILAILQDCPSLRPPIDHLCELLPRLQARYYSIASSSKVHPNSVHICAVVVEYETKAGRINKGVATNWLRAKEPAGENGGRALVPMFVRKSQFRLPFKATTPVIMVGPGTGVAPFIGFIQERAWLRQQGKEVGETLLYYGCRRSDEDYLYREELAQFHRDGALTQLNVAFSREQSHKVYVQHLLKQDREHLWKLIEGGAHIYVCGDARNMARDVQNTFYDIVAELGAMEHAQAVDYIKKLMTKGRYSLDVWS

SEQ ID NO: 33852 - protein, 443 aa, Homo sapiens
  REGION 1..443: note = ENSP00000329170
MATAASNHYSLLTSSASIVHAEPPGGMQQGAGGYREAQSLVQGDYGALQSNGHPLSHAHQWITALSHGGGGGGGGGGGGGGGGGGGGGDGSPWSTSPLGQPDIKPSVVVQQGGRGDELHGPGALQQQHQQQQQQQQQQQQQQQQQQQQQRPPHLVHHAANHHPGPGAWRSAAAAAHLPPSMGASNGGLLYSQPSFTVNGMLGAGGQPAGLHHHGLRDAHDEPHHADHHPHPHSHPHQQPPPPPPPQGPPGHPGAHHDPHSDEDTPTSDDLEQFAKQFKQRRIKLGFTQADVGLALGTLYGNVFSQTTICRFEALQLSFKNMCKLKPLLNKWLEEADSSSGSPTSIDKIAAQGRKRKKRTSIEVSVKGALESHFLKCPKPSAQEITSLADSLQLEKEVVRVWFCNRRQKEKRMTPPGGTLPGAEDVYGGSRDTPPHHGVQTPVQ

SEQ ID NO: 33853 - protein, 477 aa, Homo sapiens
  REGION 1..477: note = ENSP00000380205
MTMVDTEMPFWPTNFGISSVDLSVMEDHSHSFDIKPFTTVDFSSISTPHYEDIPFTRTDPVVADYKYDLKLQEYQSAIKVEPASPPYYSEKTQLYNKPHEEPSNSLMAIECRVCGDKASGFHYGVHACEGCKGFFRRTIRLKLIYDRCDLNCRIHKKSRNKCQYCRFQKCLAVGMSHNAIRFGRMPQAEKEKLLAEISSDIDQLNPESADLRALAKHLYDSYIKSFPLTKAKARAILTGKTTDKSPFVIYDMNSLMMGEDKIKFKHITPLQEQSKEVAIRIFQGCQFRSVEAVQEITEYAKSIPGFVNLDLNDQVTLLKYGVHEIIYTMLASLMNKDGVLISEGQGFMTREFLKSLRKPFGDFMEPKFEFAVKFNALELDDSDLAIFIAVIILSGDRPGLLNVKPIEDIQDNLLQALELQLKLNHPESSQLFAKLLQKMTDLRQIVTEHVQLLQVIKKTETDMSLHPLLQEIYKDLY

SEQ ID NO: 33854 - protein, 132 aa, Homo sapiens
  REGION 1..132: note = ENSP00000380224
MTMVDTEMPFWPTNFGISSVDLSVMEDHSHSFDIKPFTTVDFSSISTPHYEDIPFTRTDPVVADYKYDLKLQEYQSAIKVEPASPPYYSEKTQLYNKPHEEPSNSLMAIECRVCGDKASGFHYGVHACEGCK

SEQ ID NO: 33855 - protein, 477 aa, Homo sapiens; identical to SEQ ID NO: 33853
  REGION 1..477: note = ENSP00000312472

SEQ ID NO: 33856 - protein, 477 aa, Homo sapiens; identical to SEQ ID NO: 33853
  REGION 1..477: note = ENSP00000380210

SEQ ID NO: 33857 - protein, 43 aa, Homo sapiens
  REGION 1..43: note = ENSP00000411931
MTMVDTEMPFWPTNFGISSVDLSVMEDHSHSFDIKPFTTVDFS

SEQ ID NO: 33858 - protein, 477 aa, Homo sapiens; identical to SEQ ID NO: 33853
  REGION 1..477: note = ENSP00000380207

SEQ ID NO: 33859 - protein, 483 aa, Homo sapiens
  REGION 1..483: note = ENSP00000380221
MKGFSEMTMVDTEMPFWPTNFGISSVDLSVMEDHSHSFDIKPFTTVDFSSISTPHYEDIPFTRTDPVVADYKYDLKLQEYQSAIKVEPASPPYYSEKTQLYNKPHEEPSNSLMAIECRVCGDKASGFHYGVHACEGCKGFFRRTIRLKLIYDRCDLNCRIHKKSRNKCQYCRFQKCLAVGMSHNAIRFGRMPQAEKEKLLAEISSDIDQLNPESADLRALAKHLYDSYIKSFPLTKAKARAILTGKTTDKSPFVIYDMNSLMMGEDKIKFKHITPLQEQSKEVAIRIFQGCQFRSVEAVQEITEYAKSIPGFVNLDLNDQVTLLKYGVHEIIYTMLASLMNKDGVLISEGQGFMTREFLKSLRKPFGDFMEPKFEFAVKFNALELDDSDLAIFIAVIILSGDRPGLLNVKPIEDIQDNLLQALELQLKLNHPESSQLFAKLLQKMTDLRQIVTEHVQLLQVIKKTETDMSLHPLLQEIYKDLY

SEQ ID NO: 33860 - protein, 99 aa, Homo sapiens
  REGION 1..99: note = ENSP00000392285
MTMVDTEMPFWPTNFGISSVDLSVMEDHSHSFDIKPFTTVDFSSISTPHYEDIPFTRTDPVVADYKYDLKLQEYQSAIKVEPASPPYYSEKTQLYNKPH

SEQ ID NO: 33861 - protein, 250 aa, Homo sapiens
  REGION 1..250: note = ENSP00000380196
MTMVDTEMPFWPTNFGISSVDLSVMEDHSHSFDIKPFTTVDFSSISTPHYEDIPFTRTDPVVADYKYDLKLQEYQSAIKVEPASPPYYSEKTQLYNKPHEEPSNSLMAIECRVCGDKASGFHYGVHACEGCKGFFRRTIRLKLIYDRCDLNCRIHKKSRNKCQYCRFQKCLAVGMSHNAIRFGRMPQAEKEKLLAEISSDIDQLNPESADLRALAKHLYDSYIKSFPLTKAKARAILTGKTTDKSTAQVC

SEQ ID NO: 33862 - protein, 505 aa, Homo sapiens
  REGION 1..505: note = ENSP00000287820
MGETLGDSPIDPESDSFTDTLSANISQEMTMVDTEMPFWPTNFGISSVDLSVMEDHSHSFDIKPFTTVDFSSISTPHYEDIPFTRTDPVVADYKYDLKLQEYQSAIKVEPASPPYYSEKTQLYNKPHEEPSNSLMAIECRVCGDKASGFHYGVHACEGCKGFFRRTIRLKLIYDRCDLNCRIHKKSRNKCQYCRFQKCLAVGMSHNAIRFGRMPQAEKEKLLAEISSDIDQLNPESADLRALAKHLYDSYIKSFPLTKAKARAILTGKTTDKSPFVIYDMNSLMMGEDKIKFKHITPLQEQSKEVAIRIFQGCQFRSVEAVQEITEYAKSIPGFVNLDLNDQVTLLKYGVHEIIYTMLASLMNKDGVLISEGQGFMTREFLKSLRKPFGDFMEPKFEFAVKFNALELDDSDLAIFIAVIILSGDRPGLLNVKPIEDIQDNLLQALELQLKLNHPESSQLFAKLLQKMTDLRQIVTEHVQLLQVIKKTETDMSLHPLLQEIYKDLY

SEQ ID NO: 33863 - protein, 40 aa, Homo sapiens
  REGION 1..40: note = ENSP00000380218
MGETLGDSPIDPESDSFTDTLSANISQVFQDDSCLWMSLS

SEQ ID NO: 33864 - protein, 186 aa, Homo sapiens
  REGION 1..186: note = ENSP00000380195
MTMVDTEMPFWPTNFGISSVDLSVMEDHSHSFDIKPFTTVDFSSISTPHYEDIPFTRTDPVVADYKYDLKLQEYQSAIKVEPASPPYYSEKTQLYNKPHEEPSNSLMAIECRVCGDKASGFHYGVHACEGCKGFFRRTIRLKLIYDRCDLNCRIHKKSRNKCQYCRFQKCLAVGMSHNEELQKDSY

SEQ ID NO: 33865 - protein, 1186 aa, Homo sapiens
  REGION 1..1186: note = ENSP00000356209
MCEVMPTINEGDRLGPPHGADADANFEQLMVNMLDEREKLLESLRESQETLAATQSRLQDAIHERDQLQRHLNSALPQEFATLTRELSMCREQLLEREEEISELKAERNNTRLLLEHLECLVSRHERSLRMTVVKRQAQSPSGVSSEVEVLKALKSLFEHHKALDEKVRERLRAALERVTTLEEQLAGAHQQVSALQQGAGVRDGAAEEEGTVELGPKRLWKEDTGRVEELQELLEKQNFELSQARERLVTLTTTVTELEEDLGTARRDLIKSEELSSKHQRDLREALAQKEDMEERITTLEKRYLAAQREATSIHDLNDKLENELANKESLHRQCEEKARHLQELLEVAEQKLQQTMRKAETLPEVEAELAQRIAALTKAEERHGNIEEHLRQLEGQLEEKNQELARVRQREKMNEDHNKRLSDTVDRLLSESNERLQLHLKERMAALEEKGRLSEEIEKLRQEVDQLKGRGGPFVDGVHSRSHMGSAADVRFSLGTTTHAPPGVHRRYSALREESAKDWETSPLPGMLAPAAGPAFDSDPEISDVDEDEPGGLVGSADVVSPSGHSDAQTLAMMLQEQLDAINEEIRMIQEEKESTELRAEEIETRVTSGSMEALNLKQLRKRGSIPTSLTALSLASASPPLSGRSTPKLTSRSAAQDLDRMGVMTLPSDLRKHRRKLLSPVSREENREDKATIKCETSPPSSPRTLRLEKLGHPALSQEEGKSALEDQGSNPSSSNSSQDSLHKGAKRKGIKSSIGRLFGKKEKGRLIQLSRDGATGHVLLTDSEFSMQEPMVPAKLGTQAEKDRRLKKKHQLLEDARRKGMPFAQWDGPTVVSWLELWVGMPAWYVAACRANVKSGAIMSALSDTEIQREIGISNALHRLKLRLAIQEMVSLTSPSAPPTSRTSSGNVWVTHEEMETLETSTKTDSEEGSWAQTLAYGDMNHEWIGNEWLPSLGLPQYRSYFMECLVDARMLDHLTKKDLRVHLKMVDSFHRTSLQYGIMCLKRLNYDRKELEKRREESQHEIKDVLVWTNDQVVHWVQSIGLRDYAGNLHESGVHGALLALDENFDHNTLALILQIPTQNTQARQVMEREFNNLLALGTDRKLDDGDDKVFRRAPSWRKRFRPREHHGRGGMLSASAETLPAGFRVSTLGTLQPPPAPPKKIMPEAHSHYLYGHMLSAFRD

SEQ ID NO: 33866 - protein, 1185 aa, Homo sapiens
  REGION 1..1185: note = ENSP00000402576
MCEVMPTINEGDRLGPPHGADADANFEQLMVNMLDEREKLLESLRESQETLAATQSRLQDAIHERDQLQRHLNSALPQEFATLTRELSMCREQLLEREEEISELKAERNNTRLLLEHLECLVSRHERSLRMTVVKRQAQSPSGVSSEVEVLKALKSLFEHHKALDEKVRERLRAALERVTTLEEQLAGAHQQVSALQQGAGVRDGAAEEEGTVELGPKRLWKEDTGRVEELQELLEKQNFELSQARERLVTLTTTVTELEEDLGTARRDLIKSEELSSKHQRDLREALAQKEDMEERITTLEKRYLAAQREATSIHDLNDKLENELANKESLHRQCEEKARHLQELLEVAEQKLQQTMRKAETLPEVEAELAQRIAALTKAEERHGNIEEHLRQLEGQLEEKNQELARTAVQVRQREKMNEDHNKRLSDTVDRLLSESNERLQLHLKERMAALEEKNTLIQELESSQRQIEEQHHHKGRLSEEIEKLRQEVDQLKGRGGPFVDGVHSRSHMGSAADVRFSLGTTTHAPPGVHRRYSALREESAKLALPLTVTLRSPTWMRMSQGVCCNLEYHSSGTLCGSSGPLPVPEMIQEEKESTELRAEEIETRVTSGSMEALNLKQLRKRGSIPTSLTALSLASASPPLSGRSTPKLTSRSAAQDLDRMGVMTLPSDLRKHRRKLLSPVSREENREDKATIKCETSPPSSPRTLRLEKLGHPALSQEEGKSALEDQGSNPSSSNSSQDSLHKGAKRKGIKSSIGRLFGKKEKGRLIQLSRDGATGHVLLTDSEFSMQEPMVPAKLGTQAEKDRRLKKKHQLLEDARRKGMPFAQWDGPTVVSWLELWVGMPAWYVAACRANVKSGAIMSALSDTEIQREIGISNALHRLKLRLAIQEMVSLTSPSAPPTSRTSSGNVWVTHEEMETLETSTKTDSEEGSWAQTLAYGDMNHEWIGNEWLPSLGLPQYRSYFMECLVDARMLDHLTKKDLRVHLKMVDSFHRTSLQYGIMCLKRLNYDRKELEKRREESQHEIKDVLVWTNDQVVHWVQSIGLRDYAGNLHESGVHGALLALDENFDHNTLALILQIPTQNTQARQVMEREFNNLLALGTDRKLDDGDDKVFRRAPSWRKRFRPREHHGRGGMLSASAETLPAGFRVSTLGTLQPPPAPPKKIMPEAHSHYLYGHMLSAFRD

SEQ ID NO: 33867 - protein, 953 aa, Homo sapiens
  REGION 1..953: note = ENSP00000470427
  VARIANT 1: note = Any amino acid
XVTELEEDLGTARRDLIKSEELSSKHQRDLREALAQKEDMEERITTLEKRYLAAQREATSIHDLNDKLENELANKESLHRQCEEKARHLQELLEVAEQKLQQTMRKAETLPEVEAELAQRIAALTKAEERHGNIEEHLRQLEGQLEEKNQELARVRQREKMNEDHNKRLSDTVDRLLSESNERLQLHLKERMAALEEKNTLIQELESSQRQIEEQHHHKGRLSEEIEKLRQEVDQLKGRGGPFVDGVHSRSHMGSAADVRFSLGTTTHAPPGVHRRYSALREESAKDWETSPLPGMLAPAAGPAFDSDPEISDVDEDEPGGLVGSADVVSPSGHSDAQTLAMMLQEQLDAINEEIRMIQEEKESTELRAEEIETRVTSGSMEALNLKQLRKRGSIPTSLTALSLASASPPLSGRSTPKLTSRSAAQDLDRMGVMTLPSDLRKHRRKLLSPVSREENREDKATIKCETSPPSSPRTLRLEKLGHPALSQEEGKSALEDQGSNPSSSNSSQDSLHKGAKRKGIKSSIGRLFGKKEKGRLIQLSRDGATGHVLLTDSEFSMQEPMVPAKLGTQAEKDRRLKKKHQLLEDARRKGMPFAQWDGPTVVSWLELWVGMPAWYVAACRANVKSGAIMSALSDTEIQREIGISNALHRLKLRLAIQEMVSLTSPSAPPTSRTSSGNVWVTHEEMETLETSTKTDSEEGSWAQTLAYGDMNHEWIGNEWLPSLGLPQYRSYFMECLVDARMLDHLTKKDLRVHLKMVDSFHRTSLQYGIMCLKRLNYDRKELEKRREESQHEIKDVLVWTNDQVVHWVQSIGLRDYAGNLHESGVHGALLALDENFDHNTLALILQIPTQNTQARQVMEREFNNLLALGTDRKLDDGDDKVFRRAPSWRKRFRPREHHGRGGMLSASAETLPAGFRVSTLGTLQPPPAPPKKIMPEAHSHYLYGHMLSAFRD

SEQ ID NO: 33868 - protein, 701 aa, Homo sapiens
  REGION 1..701: note = ENSP00000272198
MGSAADVRFSLGTTTHAPPGVHRRYSALREESAKDWETSPLPGMLAPAAGPAFDSDPEISDVDEDEPGGLVGSADVVSPSGHSDAQTLAMMLQEQLDAINEEIRMIQEEKESTELRAEEIETRVTSGSMEALNLKQLRKRGSIPTSLTALSLASASPPLSGRSTPKLTSRSAAQDLDRMGVMTLPSDLRKHRRKLLSPVSREENREDKATIKCETSPPSSPRTLRLEKLGHPALSQEEGKSALEDQGSNPSSSNSSQDSLHKGAKRKGIKSSIGRLFGKKEKGRLIQLSRDGATGHVLLTDSEFSMQEPMVPAKLGTQAEKDRRLKKKHQLLEDARRKGMPFAQWDGPTVVSWLELWVGMPAWYVAACRANVKSGAIMSALSDTEIQREIGISNALHRLKLRLAIQEMVSLTSPSAPPTSRTSSGNVWVTHEEMETLETSTKTDSEEGSWAQTLAYGDMNHEWIGNEWLPSLGLPQYRSYFMECLVDARMLDHLTKKDLRVHLKMVDSFHRTSLQYGIMCLKRLNYDRKELEKRREESQHEIKDVLVWTNDQVVHWVQSIGLRDYAGNLHESGVHGALLALDENFDHNTLALILQIPTQNTQARQVMEREFNNLLALGTDRKLDDGDDKVFRRAPSWRKRFRPREHHGRGGMLSASAETLPAGFRVSTLGTLQPPPAPPKKIMPEAHSHYLYGHMLSAFRD

SEQ ID NO: 33869 - protein, 692 aa, Homo sapiens
  REGION 1..692: note = ENSP00000471264
MGSAADVRFSLGTTTHAPPGVHRRYSALREESAKDWETSPLPGMLAPAAGPAFDSDPEISDVDEDEPGGLVGSADVVSPSGHSDAQTLAMMLQEQLDAINEEIRMIQEEKESTELRAEEIETRVTSGSMEALNLKQLRKRGSIPTSLTALSLASASPPLSGRSTPKLTSRSAAQDLDRMGVMTLPSDLRKHRRKLLSPVSREENREDKATIKCETSPPSSPRTLRLEKLGHPALSQEEGKSALEDQGSNPSSSNSSQDSLHKGAKRKGIKSSIGRLFGKKEKGRLIQLSRDGATGHVLLTDSEFSMQEPMVPAKLGTQAEKDRRLKKKHQLLEDARRKGMPFAQWDGPTVVSWLELWVGMPAWYVAACRANVKSGAIMSALSDTEIQREIGISNALHRLKLRLAIQEMVSLTSPSAPPTSRTSSGNVWVTHEEMETLETSTKTTLAYGDMNHEWIGNEWLPSLGLPQYRSYFMECLVDARMLDHLTKKDLRVHLKMVDSFHRTSLQYGIMCLKRLNYDRKELEKRREESQHEIKDVLVWTNDQVVHWVQSIGLRDYAGNLHESGVHGALLALDENFDHNTLALILQIPTQNTQARQVMEREFNNLLALGTDRKLDDGDDKVFRRAPSWRKRFRPREHHGRGGMLSASAETLPAGFRVSTLGTLQPPPAPPKKIMPEAHSHYLYGHMLSAFRD

SEQ ID NO: 33870 - protein, 191 aa, Homo sapiens
  REGION 1..191: note = ENSP00000472251
  VARIANT 1: note = Any amino acid
XAKDWETSPLPGMLAPAAGPAFDSDPEISDVDEDEPGGLVGSADVVSPSGHSDAQTLAMMLQEQLDAINEEIRMIQEEKESTELRAEEIETRVTSGSMEALNLKQLRKRGSIPTSLTALSLASASPPLSGRSTPKLTSRSAAQDLDRMGVMTLPSDLRKHRRKLLDAAAREAWPPSPEPGRRQECLGGSGQ

SEQ ID NO: 33871 - protein, 692 aa, Homo sapiens; identical to SEQ ID NO: 33869
  REGION 1..692: note = ENSP00000295706

SEQ ID NO: 33872 - protein, 18 aa, Homo sapiens
  REGION 1..18: note = ENSP00000442462
MLQQELLSRTSLETQKLD

SEQ ID NO: 33873 - protein, 281 aa, Homo sapiens
  REGION 1..281: note = ENSP00000445822
MMSDASDMLAAALEQMDGIIAGSKALEYSNGIFDCQSPTSPFMGSLRALHLVEDLRGLLEMMETDEKEGLRCQIPDSTAETLVEWLQSQMTNGHLPGNGDVYQERLARLENDKESLVLQVSVLTDQVEAQGEKIRDLEFCLEEHREKVNATEEMLQQELLSRTSLETQKLDLMAEISNLKLKLTAVEKDRLDYEDKFRDTEGLIQEINDLRLKVSEMDSERLQYEKKLKSTKDELASLKEQLEEKESEVKRLQEKLVCKMKGEGVEIVDRDENFKKKLKEK

SEQ ID NO: 33874 - protein, 109 aa, Homo sapiens
  REGION 1..109: note = ENSP00000438036
MMSDASDMLAAALEQMDGIIAGSKALEYSNGIFDCQSPTSPFMGSLRALHLVEDLRGLLEMMETDEKEGLRCQIPDSTAETLVEWLQSQMVGSACSKFCYKSFVAYSKI

SEQ ID NO: 33875 - protein, 744 aa, Homo sapiens
  REGION 1..744: note = ENSP00000444304
MAEISNLKLKLTAVEKDRLDYEDKFRDTEGLIQEINDLRLKVSEMDSERLQYEKKLKSTKSLMAKLSSMKIKVGQMQYEKQRMEQKWESLKDELASLKEQLEEKESEVKRLQEKLVCKMKGEGVEIVDRDIEVQKMKKAVESLMAANEEKDRKIEDLRQCLNRYKKMQDTVVLAQGKKGKDGEYEELLNSSSISSLLDAQGFSDLEKSPSPTPVMGSPSCDPFNTSVPEEFHTTILQVSIPSLLPATVSMETSEKSKLTPKPETSFEENDGNIILGATVDTQLCDKLLTSSLQKSSSLGNLKKETSDGEKETIQKTSEDRAPAESRPFGTLPPRPPGQDTSMDDNPFGTRKVRSSFGRGFFKIKSNKRTASAPNLAETEKETAEHLDLAGASSRPKDSQRNSPFQIPPPSPDSKKKSRGIMKLFGKLRRSQSTTFNPDDMSEPEFKRGGTRATAGPRLGWSRDLGQSNSDLDMPFAKWTKEQVCNWLMEQGLGSYLNSGKHWIASGQTLLQASQQDLEKELGIKHSLHRKKLQLALQALGSEEETNHGKLDFNWVTRWLDDIGLPQYKTQFDEGRVDGRMLHYMTVDDLLSLKVVSVLHHLSIKRAIQVLRINNFEPNCLRRRPSDENTIAPSEVQKWTNHRVMEWLRSVDLAEYAPNLRGSGVHGGLMVLEPRFNVETMAQLLNIPPNKTLLRRHLATHFNLLIGAEAQHQKRDAMELPDYVLLTATAKVKPKKLAFSNFGNL

SEQ ID NO: 33876 - protein, 858 aa, Homo sapiens
  REGION 1..858: note = ENSP00000445425
MLQQELLSRTSLETQKLDLMAEISNLKLKLTAVEKDRLDYEDKFRDTEGLIQEINDLRLKVSEMDSERLQYEKKLKSTKSLMAKLSSMKIKVGQMQYEKQRMEQKWESLKDELASLKEQLEEKESEVKRLQEKLVCKMKGEGVEIVDRDIEVQKMKKAVESLMAANEEKDRKIEDLRQCLNRYKKMQDTVVLAQGKDGEYEELLNSSSISSLLDAQGFSDLEKSPSPTPVMGSPSCDPFNTSVPEEFHTTILQVSIPSLLPATVSMETSEKSKLTPKPETSFEENDGNIILGATVDTQLCDKLLTSSLQKSSSLGNLKKETSDGEKETIQKTSEDRAPAESRPFGTLPPRPPGQDTSMDDNPFGTRKVRSSFGRGFFKIKSNKRTASAPNLAETEKETAEHLDLAGASSRPKDSQRNSPFQIPPPSPDSKKKSRGIMKLFGKLRRSQSTTFNPDDMSEPEFKRGGTRATAGPRLGWSRDLGQSNSDLDMPFAKWTKEQVCNWLMEQGLGSYLNSGKHWIASGQTLLQASQQDLEKELGIKHSLHRKKLQLALQALGSEEETNHGKLDFNWVTRWLDDIGLPQYKTQFDEGRVDGRMLHYMTVDDLLSLKVVSVLHHLSIKRAIQVLRINNFEPNCLRRRPSDENTIAPSEVQKWTNHRVMEWLRSVDLAEYAPNLRGSGVHGGLMVLEPRFNVETMAQLLNIPPNKTLLRRHLATHFNLLIGAEAQHQKRDAMELPDYVLLTATAKVKPKKLAFSNFGNLRKKKQEDGEEYVCPMELGQASGSASKKGFKPGLDMRLYEEDDLDRLEQMEDSEGTVRQIGAFSEGINNLTHMLKEDDMFKDFAARSPSASITDEDSNV

SEQ ID NO: 33877 - protein, 1011 aa, Homo sapiens
  REGION 1..1011: note = ENSP00000314724
MMSDASDMLAAALEQMDGIIAGSKALEYSNGIFDCQSPTSPFMGSLRALHLVEDLRGLLEMMETDEKEGLRCQIPDSTAETLVEWLQSQMTNGHLPGNGDVYQERLARLENDKESLVLQVSVLTDQVEAQGEKIRDLEFCLEEHREKVNATEEMLQQELLSRTSLETQKLDLMAEISNLKLKLTAVEKDRLDYEDKFRDTEGLIQEINDLRLKVSEMDSERLQYEKKLKSTKSLMAKLSSMKIKVGQMQYEKQRMEQKWESLKDELASLKEQLEEKESEVKRLQEKLVCKMKGEGVEIVDRDIEVQKMKKAVESLMAANEEKDRKIEDLRQCLNRYKKMQDTVVLAQGKDGEYEELLNSSSISSLLDAQGFSDLEKSPSPTPVMGSPSCDPFNTSVPEEFHTTILQVSIPSLLPATVSMETSEKSKLTPKPETSFEENDGNIILGATVDTQLCDKLLTSSLQKSSSLGNLKKETSDGEKETIQKTSEDRAPAESRPFGTLPPRPPGQDTSMDDNPFGTRKVRSSFGRGFFKIKSNKRTASAPNLAETEKETAEHLDLAGASSRPKDSQRNSPFQIPPPSPDSKKKSRGIMKLFGKLRRSQSTTFNPDDMSEPEFKRGGTRATAGPRLGWSRDLGQSNSDLDMPFAKWTKEQVCNWLMEQGLGSYLNSGKHWIASGQTLLQASQQDLEKELGIKHSLHRKKLQLALQALGSEEETNHGKLDFNWVTRWLDDIGLPQYKTQFDEGRVDGRMLHYMTVDDLLSLKVVSVLHHLSIKRAIQVLRINNFEPNCLRRRPSDENTIAPSEVQKWTNHRVMEWLRSVDLAEYAPNLRGSGVHGGLMVLEPRFNVETMAQLLNIPPNKTLLRRHLATHFNLLIGAEAQHQKRDAMELPDYVLLTATAKVKPKKLAFSNFGNLRKKKQEDGEEYVCPMELGQASGSASKKGFKPGLDMRLYEEDDLDRLEQMEDSEGTVRQIGAFSEGINNLTHMLKEDDMFKDFAARSPSASITDEDSNV

SEQ ID NO: 33878 - protein, 170 aa, Homo sapiens
  REGION 1..170: note = ENSP00000444046
MMSDASDMLAAALEQMDGIIAGSKALEYSNGIFDCQSPTSPFMGSLRALHLVEDLRGLLEMMETDEKEGLRCQIPDSTAETLVEWLQSQMTNGHLPGNGDVYQERLARLENDKESLVLQVSVLTDQVEAQGEKIRDLEFCLEEHREKVNATEEMLQQVCAEARTKMGFPC

SEQ ID NO: 33879 - protein, 980 aa, Homo sapiens
  REGION 1..980: note = ENSP00000443442
MMSDASDMLAAALEQMDGIIAGSKALEYSNGIFDCQSPTSPFMGSLRALHLVEDLRGLLEMMETDEKEGLRCQIPDSTAETLVEWLQSQMTNGHLPGNGDVYQERLARLENDKESLVLQVSVLTDQVEAQGEKIRDLEFCLEEHREKVNATEEMLQQELLSRTSLETQKLDLMAEISNLKLKLTAVEKDRLDYEDKFRDTEGLIQEINDLRLKVSEMDSERLQYEKKLKSTKDELASLKEQLEEKESEVKRLQEKLVCKMKGEGVEIVDRDIEVQKMKKAVESLMAANEEKDRKIEDLRQCLNRYKKMQDTVVLAQGKDGEYEELLNSSSISSLLDAQGFSDLEKSPSPTPVMGSPSCDPFNTSVPEEFHTTILQVSIPSLLPATVSMETSEKSKLTPKPETSFEENDGNIILGATVDTQLCDKLLTSSLQKSSSLGNLKKETSDGEKETIQKTSEDRAPAESRPFGTLPPRPPGQDTSMDDNPFGTRKVRSSFGRGFFKIKSNKRTASAPNLAETEKETAEHLDLAGASSRPKDSQRNSPFQIPPPSPDSKKKSRGIMKLFGKLRRSQSTTFNPDDMSEPEFKRGGTRATAGPRLGWSRDLGQSNSDLDMPFAKWTKEQVCNWLMEQGLGSYLNSGKHWIASGQTLLQASQQDLEKELGIKHSLHRKKLQLALQALGSEEETNHGKLDFNWVTRWLDDIGLPQYKTQFDEGRVDGRMLHYMTVDDLLSLKVVSVLHHLSIKRAIQVLRINNFEPNCLRRRPSDENTIAPSEVQKWTNHRVMEWLRSVDLAEYAPNLRGSGVHGGLMVLEPRFNVETMAQLLNIPPNKTLLRRHLATHFNLLIGAEAQHQKRDAMELPDYVLLTATAKVKPKKLAFSNFGNLRKKKQEDGEEYVCPMELGQASGSASKKGFKPGLDMRLYEEDDLDRLEQMEDSEGTVRQIGAFSEGINNLTHMLKEDDMFKDFAARSPSASITDEDSNV

SEQ ID NO: 33880 - protein, 1005 aa, Homo sapiens
  REGION 1..1005: note = ENSP00000228425
MMSDASDMLAAALEQMDGIIAGSKALEYSNGIFDCQSPTSPFMGSLRALHLVEDLRGLLEMMETDEKEGLRCQIPDSTAETLVEWLQSQMTNGHLPGNGDVYQERLARLENDKESLVLQVSVLTDQVEAQGEKIRDLEFCLEEHREKVNATEEMLQQELLSRTSLETQKLDLMAEISNLKLKLTAVEKDRLDYEDKFRDTEGLIQEINDLRLKVSEMDSERLQYEKKLKSTKDELASLKEQLEEKESEVKRLQEKLVCKMKGEGVEIVDRDENFKKKLKEKNIEVQKMKKAVESLMAANEEKDRKIEDLRQCLNRYKKMQDTVVLAQGKKGKDGEYEELLNSSSISSLLDAQGFSDLEKSPSPTPVMGSPSCDPFNTSVPEEFHTTILQVSIPSLLPATVSMETSEKSKLTPKPETSFEENDGNIILGATVDTQLCDKLLTSSLQKSSSLGNLKKETSDGEKETIQKTSEDRAPAESRPFGTLPPRPPGQDTSMDDNPFGTRKVRSSFGRGFFKIKSNKRTASAPNLDRKRSASAPTLAETEKETAEHLDLAGASSRPKDSQRNSPFQIPPPSPDSKKKSRGIMKLFGKLRRSQSTTFNPDDMSEPEFKRGGTRATAGPRLGWSRDLGQSNSDLDMPFAKWTKEQVCNWLMEQGLGSYLNSGKHWIASGQTLLQASQQDLEKELGIKHSLHRKKLQLALQALGSEEETNHGKLDFNWVTRWLDDIGLPQYKTQFDEGRVDGRMLHYMTVDDLLSLKVVSVLHHLSIKRAIQVLRINNFEPNCLRRRPSDENTIAPSEVQKWTNHRVMEWLRSVDLAEYAPNLRGSGVHGGLMVLEPRFNVETMAQLLNIPPNKTLLRRHLATHFNLLIGAEAQHQKRDAMELPDYVLLTATAKVKPKKLAFSNFGNLRKKKQEDGEEYVCPMELGQASGSASKKGFKPGLDMRLYEEDDLDRLEQMEDSEGTVRQIGAFSEGINNLTHMLKEDDMFKDFAARSPSASITDEDSNV

SEQ ID NO: 33881 - protein, 86 aa, Homo sapiens
  REGION 1..86: note = ENSP00000437438
MMSDASDMLAAALEQMDGIIAGSKALEYSNGIFDCQSPTSPFMGSLRALHLVEDLRGLLEMMETDEKEGLRCQIPDSTAETLVEWL

SEQ ID NO: 33882 - protein, 152 aa, Homo sapiens
  REGION 1..152: note = ENSP00000445132
MHLGWNLPLTNNKMMSDASDMLAAALEQMDGIIAGSKALEYSNGIFDCQSPTSPFMGSLRALHLVEDLRGLLEMMETDEKEGLRCQIPDSTAETLVEWLQSQMTNGHLPGNGDVYQERLARLENDKESLVLQVSVLTDQVEAQGEKIRDLEF

SEQ ID NO: 33883 - protein, 205 aa, Homo sapiens
  REGION 1..205: note = ENSP00000443324
NEEKDRKIEDLRQCLNRYKKMQDTVVLAQGKKGKDGEYEELLNSSSISSLLDAQGFSDLEKSPSPTPVMGSPSCDPFNTSVPEEFHTTILQVSIPSLLPATVSMETSEKSKLTPKPETSFEENDGNIILGATVDTQLCDKLLTSSLQKSSSLGNLKKETSDGDRAPAESRPFGTLPPRPPGQDTSMDDNPFGTRKVRSSFGRGFF

SEQ ID NO: 33884 - protein, 86 aa, Homo sapiens
  REGION 1..86: note = ENSP00000479763
DRAPAESRPFGTLPPRPPGQDTSMDDNPFGTRKVRSSFGRGFFKIKSNKRTASAPNLGTYDQNAFALILPQGGKEQCLPFPYSFIH

SEQ ID NO: 33885 - protein, 242 aa, Homo sapiens
  REGION 1..242: note = ENSP00000438174
  VARIANT 1: note = Any amino acid
XDIGLPQYKTQFDEGRVDGRMLHYMTVNTIAPSEVQKWTNHRVMEWLRSVDLAEYAPNLRGSGVHGGLMVLEPRFNVETMAQLLNIPPNKTLLRRHLATHFNLLIGAEAQHQKRDAMELPDYVLLTATAKVKPKKLAFSNFGNLRKKKQEDGEEYVCPMELGQASGSASKKGFKPGLDMRLYEEDDLDRLEQMEDSEGTVRQIGAFSEGINNLTHMLKEDDMFKDFAARSPSASITDEDSNV

SEQ ID NO: 33886 - protein, 89 aa, Homo sapiens
  REGION 1..89: note = ENSP00000434641
MASDASHALEAALEQMDGIIAGTKTGADLSDGTCEPGLASPASYMNPFPVLHLIEDLRLALEMLELPQERAALLSQIPGPTAAYIKEWF

SEQ ID NO: 33887 - protein, 89 aa, Homo sapiens; identical to SEQ ID NO: 33886
  REGION 1..89: note = ENSP00000431724

SEQ ID NO: 33888 - protein, 876 aa, Homo sapiens
  REGION 1..876: note = ENSP00000299492
MASDASHALEAALEQMDGIIAGTKTGADLSDGTCEPGLASPASYMNPFPVLHLIEDLRLALEMLELPQERAALLSQIPGPTAAYIKEWFEESLSQVNHHSAASNETYQERLARLEGDKESLILQVSVLTDQVEAQGEKIRDLEVCLEGHQVKLNAAEEMLQQELLSRTSLETQKLDLMTEVSELKLKLVGMEKEQREQEEKQRKAEELLQELRHLKIKVEELENERNQYEWKLKATKAEVAQLQEQVALKDAEIERLHSQLSRTAALHSESHTERDQEIQRLKMGMETLLLANEDKDRRIEELTGLLNQYRKVKEIVMVTQGPSERTLSINEEEPEGGFSKWNATNKDPEELFKQEMPPRCSSPTVGPPPLPQKSLETRAQKKLSCSLEDLRSESVDKCMDGNQPFPVLEPKDSPFLAEHKYPTLPGKLSGATPNGEAAKSPPTICQPDATGSSLLRLRDTESGWDDTAVVNDLSSTSSGTESGPQSPLTPDGKRNPKGIKKFWGKIRRTQSGNFYTDTLGMAEFRRGGLRATAGPRLSRTRDSKGQKSDANAPFAQWSTERVCAWLEDFGLAQYVIFARQWVSSGHTLLTATPQDMEKELGIKHPLHRKKLVLAVKAINTKQEEKSALLDHIWVTRWLDDIGLPQYKDQFHESRVDRRMLQYLTVNDLLFLKVTSQLHHLSIKCAIHVLHVNKFNPHCLHRRPADESNLSPSEVVQWSNHRVMEWLRSVDLAEYAPNLRGSGVHGGLIILEPRFTGDTLAMLLNIPPQKTLLRRHLTTKFNALIGPEAEQEKREKMASPAYTPLTTTAKVRPRKLGFSHFGNIRKKKFDESTDYICPMEPSDGVSDSHRVYSGYRGLSPLDAPELDGLDQVGQIS

SEQ ID NO: 33889 - protein, 170 aa, Homo sapiens
  REGION 1..170: note = ENSP00000434981
MASDASHALEAALEQMDGIIAGTKTGADLSDGTCEPGLASPASYMNPFPVLHLIEDLRLALEMLELPQERAALLSQIPGPTAAYIKEWFEESLSQVNHHSAASNETYQERLARLEGDKESLILQVSVLTDQVEAQGEKIRDLEVCLEGHQVKLNAAEEMLQQELLSRTSL

SEQ ID NO: 33890 - protein, 70 aa, Homo sapiens
  REGION 1..70: note = ENSP00000433026
MASDASHALEAALEQMDGIIAGTKTGADLSDGTCEPGLASPASYMNPFPVLHLIEDLRLALEMLELPQER

SEQ ID NO: 33891 - protein, 136 aa, Homo sapiens
  REGION 1..136: note = ENSP00000433917
  VARIANT 1: note = Any amino acid
XPFPVLHLIEDLRLALEMLELPQERAALLSQIPGPTAAYIKEWFEESLSQVNHHSAASNETYQERLARLEGDKESLILQVSVLTDQVEAQGEKIRDLEVCLEGHQVKLNAAEEMLQQICNLVLRFCMLNIIFFPFK

SEQ ID NO: 33892 - protein, 155 aa, Homo sapiens
  REGION 1..155: note = ENSP00000435794
MLQQELLSRTSLETQKLDLMTEVSELKLKLVGMEKEQREQEEKQRKAEELLQELRHLKIKVEELENERNQYEWKLKATKAEVAQLQEQVALKDAEIERLHSQLSRTAALHSESHTERDQEIQRLKMGMETLLLANEDKDRRIEELTGLLNQYRKV

SEQ ID NO: 33893 - protein, 718 aa, Homo sapiens
  REGION 1..718: note = ENSP00000436498
MLQQELLSRTSLETQKLDLMTEVSELKLKLVGMEKEQREQEEKQRKAEELLQELRHLKIKVEELENERNQYEWKLKATKAEVAQLQEQVALKDAEIERLHSQLSRTAALHSESHTERDQEIQRLKMGMETLLLANEDKDRRIEELTGLLNQYRKVKEIVMVTQGPSERTLSINEEEPEGGFSKWNATNKDPEELFKQEMPPRCSSPTVGPPPLPQKSLETRAQKKLSCSLEDLRSESVDKCMDGNQPFPVLEPKDSPFLAEHKYPTLPGKLSGATPNGEAAKSPPTICQPDATGSSLLRLRDTESGWDDTAVVNDLSSTSSGTESGPQSPLTPDGKRNPKGIKKFWGKIRRTQSGNFYTDTLGMAEFRRGGLRATAGPRLSRTRDSKGQKSDANAPFAQWSTERVCAWLEDFGLAQYVIFARQWVSSGHTLLTATPQDMEKELGIKHPLHRKKLVLAVKAINTKQEEKSALLDHIWVTRWLDDIGLPQYKDQFHESRVDRRMLQYLTVNDLLFLKVTSQLHHLSIKCAIHVLHVNKFNPHCLHRRPADESNLSPSEVVQWSNHRVMEWLRSVDLAEYAPNLRGSGVHGGLIILEPRFTGDTLAMLLNIPPQKTLLRRHLTTKFNALIGPEAEQEKREKMASPAYTPLTTTAKVRPRKLGFSHFGNIRKKKFDESTDYICPMEPSDGVSDSHRVYSGYRGLSPLDAPELDGLDQVGQIS

SEQ ID NO: 33894 - protein, 86 aa, Homo sapiens
  REGION 1..86: note = ENSP00000433839
MLQQELLSRTSLETQKLDLMTEVSELKLKLVGMEKEQREQEEKQRKAEELLQELRHLKIKVEELENERNQYEWKLKATKAEVAQLQ

SEQ ID NO: 33895 - protein, 764 aa, Homo sapiens
  REGION 1..764: note = ENSP00000435469
MSSEQWPRLPGKVSVLTDQVEAQGEKIRDLEVCLEGHQVKLNAAEEMLQQELLSRTSLETQKLDLMTEVSELKLKLVGMEKEQREQEEKQRKAEELLQELRHLKIKVEELENERNQYEWKLKATKAEVAQLQEQVALKDAEIERLHSQLSRTAALHSESHTERDQEIQRLKMGMETLLLANEDKDRRIEELTGLLNQYRKVKEIVMVTQGPSERTLSINEEEPEGGFSKWNATNKDPEELFKQEMPPRCSSPTVGPPPLPQKSLETRAQKKLSCSLEDLRSESVDKCMDGNQPFPVLEPKDSPFLAEHKYPTLPGKLSGATPNGEAAKSPPTICQPDATGSSLLRLRDTESGWDDTAVVNDLSSTSSGTESGPQSPLTPDGKRNPKGIKKFWGKIRRTQSGNFYTDTLGMAEFRRGGLRATAGPRLSRTRDSKGQKSDANAPFAQWSTERVCAWLEDFGLAQYVIFARQWVSSGHTLLTATPQDMEKELGIKHPLHRKKLVLAVKAINTKQEEKSALLDHIWVTRWLDDIGLPQYKDQFHESRVDRRMLQYLTVNDLLFLKVTSQLHHLSIKCAIHVLHVNKFNPHCLHRRPADESNLSPSEVVQWSNHRVMEWLRSVDLAEYAPNLRGSGVHGGLIILEPRFTGDTLAMLLNIPPQKTLLRRHLTTKFNALIGPEAEQEKREKMASPAYTPLTTTAKVRPRKLGFSHFGNIRKKKFDESTDYICPMEPSDGVSDSHRVYSGYRGLSPLDAPELDGLDQVGQIS

SEQ ID NO: 33896 - protein, 733 aa, Homo sapiens
  REGION 1..733: note = ENSP00000437321
MGKLITRMWKLLRRRSAPKELLSRTSLETQKLDLMTEVSELKLKLVGMEKEQREQEEKQRKAEELLQELRHLKIKVEELENERNQYEWKLKATKAEVAQLQEQVALKDAEIERLHSQLSRTAALHSESHTERDQEIQRLKMGMETLLLANEDKDRRIEELTGLLNQYRKVKEIVMVTQGPSERTLSINEEEPEGGFSKWNATNKDPEELFKQEMPPRCSSPTVGPPPLPQKSLETRAQKKLSCSLEDLRSESVDKCMDGNQPFPVLEPKDSPFLAEHKYPTLPGKLSGATPNGEAAKSPPTICQPDATGSSLLRLRDTESGWDDTAVVNDLSSTSSGTESGPQSPLTPDGKRNPKGIKKFWGKIRRTQSGNFYTDTLGMAEFRRGGLRATAGPRLSRTRDSKGQKSDANAPFAQWSTERVCAWLEDFGLAQYVIFARQWVSSGHTLLTATPQDMEKELGIKHPLHRKKLVLAVKAINTKQEEKSALLDHIWVTRWLDDIGLPQYKDQFHESRVDRRMLQYLTVNDLLFLKVTSQLHHLSIKCAIHVLHVNKFNPHCLHRRPADESNLSPSEVVQWSNHRVMEWLRSVDLAEYAPNLRGSGVHGGLIILEPRFTGDTLAMLLNIPPQKTLLRRHLTTKFNALIGPEAEQEKREKMASPAYTPLTTTAKVRPRKLGFSHFGNIRKKKFDESTDYICPMEPSDGVSDSHRVYSGYRGLSPLDAPELDGLDQVGQIS

SEQ ID NO: 33897 - protein, 225 aa, Homo sapiens
  REGION 1..225: note = ENSP00000433713
  VARIANT 1: note = Any amino acid
XGPSERTLSINEEEPEGGFSKWNATNKDPEELFKQEMPPRCSSPTVGPPPLPQKSLETRAQKKLSCSLEDLRSESVDKCMDGNQPFPVLEPKDSPFLAEHKYPTLPGKLSGATPNGEAAKSPPTICQPDATGSSLLRLNRGRSVSAPVLGDTESGWDDTAVVNDLSSTSSGTESGPQSPLTPDGKRNPKGIKKFWGKIRRTQSGNFYTDTLGMAEFRRGGLRATA

SEQ ID NO: 33898 - protein, 181 aa, Homo sapiens
  REGION 1..181: note = ENSP00000436739
MPPRCSSPTVGPPPLPQKSLETRAQKKLSCSLEDLRSESVDKCMDGNQPFPVLEPKDSPFLAEHKYPTLPGKLSGATPNGEAAKSPPTICQPDATGSSLLRLNRGRSVSAPVLGTVPIPGDTESGWDDTAVVNDLSSTSSGTESGPQSPLTPDGKRNPKGIKKFWGKIRRTQSGNFYTDTL

SEQ ID NO: 33899 - protein, 149 aa, Homo sapiens
  REGION 1..149: note = ENSP00000436489
  VARIANT 1: note = Any amino acid
XKTLLRRHLTTKFNALIGPEAEQEKREKMASPAYTPLTTTAKVRPRKLGFSHFGNIRKKKFDESTDYICPMEPSDGVSDSHRVYSGYRGLSPLDAPELDGLDQHQWKHMNFDAGPETMDTPTRLSSQAPPTLQLREKLKCLRPVDHSLG

SEQ ID NO: 33900 - protein, 755 aa, Homo sapiens
  REGION 1..755: note = ENSP00000312411
MAGCIPEEKTYRRFLELFLGEFRGPCGGGEPEPEPEPEPEPEPESEPEPEPELVEAEAAEASVEEPGEEAATVAATEEGDQEQDPEPEEEAAVEGEEEEEGAATAAAAPGHSAVPPPPPQLPPLPPLPRPLSERITREEVEGESLDLCLQQLYKYNCPSFLAAALARATSDEVLQSDLSAHYIPKETDGTEGTVEIETVKLARSVFSKLHEICCSWVKDFPLRRRPQLYYETSIHAIKNMRRKMEDKHVCIPDFNMLFNLEDQEEQAYFAVFDGHGGVDAAIYASIHLHVNLVRQEMFPHDPAEALCRAFRVTDERFVQKAARESLRCGTTGVVTFIRGNMLHVAWVGDSQVMLVRKGQAVELMKPHKPDREDEKQRIEALGGCVVWFGAWRVNGSLSVSRAIGDAEHKPYICGDADSASTVLDGTEDYLILACDGFYDTVNPDEAVKVVSDHLKENNGDSSMVAHKLVASARDAGSSDNITVIVVFLRDMNKAVNVSEESDWTENSFQGGQEDGGDDKENHGECKRPWPQHQCSAPADLGYDGRVDSFTDRTSLSPGSQINVLEDPGYLDLTQIEASKPHSAQFLLPVEMFGPGAPKKANLINELMMEKKSVQSSLPEWSGAGEFPTAFNLGSTGEQIYRMQSLSPVCSGLENEQFKSPGNRVSRLSHLRHHYSKKWHRFRFNPKFYSFLSAQEPSHKIGTSLSSLTGSGKRNRIRSSLPWRQNSWKGYSENMRKLRKTHDIPCPDLPWSYKIE

SEQ ID NO: 33901 - protein, 514 aa, Homo sapiens
  REGION 1..514: note = ENSP00000228705
MLTRVKSAVANFMGGIMAGSSGSEHGGGSCGGSDLPLRFPYGRPEFLGLSQDEVECSADHIARPILILKETRRLPWATGYAEVINAGKSTHNEDQASCEVLTVKKKAGAVTSTPNRNSSKRRSSLPNGEGLQLKENSESEGVSCHYWSLFDGHAGSGAAVVASRLLQHHITEQLQDIVDILKNSAVLPPTCLGEEPENTPANSRTLTRAASLRGGVGAPGSPSTPPTRFFTEKKIPHECLVIGALESAFKEMDLQIERERSSYNISGGCTALIVICLLGKLYVANAGDSRAIIIRNGEIIPMSSEFTPETERQRLQYLAFMQPHLLGNEFTHLEFPRRVQRKELGKKMLYRDFNMTGWAYKTIEDEDLKFPLIYGEGKKARVMATIGVTRGLGDHDLKVHDSNIYIKPFLSSAPEVRIYDLSKYDHGSDDVLILATDGLWDVLSNEEVAEAITQFLPNCDPDDPHRYTLAAQDLVMRARGVLKDRGWRISNDRLGSGDDISVYVIPLIHGNKLS

SEQ ID NO: 33902 - protein, 298 aa, Homo sapiens
  REGION 1..298: note = ENSP00000474405
  VARIANT 1: note = Any amino acid
XGAPPPRPKSPDLPNAASAPPAAAPEAPRSPPAKAGSGSATPAKAVEARASFSRPTFLQLSPGGLRRADDHAGRAVQSPPDTGRRLPWSTGYAEVINAGKSRHNEDQACCEVVYVEGRRSVTGVPREPSRGQGLCFYYWGLFDGHAGGGAAEMASRLLHRHIREQLKDLVEILQDPSPPPLCLPTTPGTPDSSDPSHLLGPQSCWSSQKEVSHESLVVGAVENAFQLMQDEQMARERRGHQVEGGCCALVVIYLLGKVYVANAGDSRAIIVRNGEIIPMSREFTPETERQRLQLLGLL

SEQ ID NO: 33903 - protein, 505 aa, Homo sapiens
  REGION 1..505: note = ENSP00000308926
MLNRVRSAVAHLVSSGGAPPPRPKSPDLPNAASAPPAAAPEAPRSPPAKAGSGSATPAKAVEARASFSRPTFLQLSPGGLRRADDHAGRAVQSPPDTGRRLPWSTGYAEVINAGKSRHNEDQACCEVVYVEGRRSVTGVPREPSRGQGLCFYYWGLFDGHAGGGAAEMASRLLHRHIREQLKDLVEILQDPSPPPLCLPTTPGTPDSSDPSHLLGPQSCWSSQKEVSHESLVVGAVENAFQLMDEQMARERRGHQVEGGCCALVVIYLLGKVYVANAGDSRAIIVRNGEIIPMSREFTPETERQRLQLLGFLKPELLGSEFTHLEFPRRVLPKELGQRMLYRDQNMTGWAYKKIELEDLRFPLVCGEGKKARVMATIGVTRGLGDHSLKVCSSTLPIKPFLSCFPEVRVYDLTQYEHCPDDVLVLGTDGLWDVTTDCEVAATVDRVLSAYEPNDHSRYTALAQALVLGARGTPRDRGWRLPNNKLGSGDDISVFVIPLGGPGSYS

SEQ ID NO: 33904 - protein, 299 aa, Homo sapiens
  REGION 1..299: note = ENSP00000475711
MASRLLHRHIREQLKDLKEVSHESLVVGAVENAFQLMDEQMARERRGHQVEGGCCALVVIYLLGKVYVANAGDSRAIIVRNGEIIPMSREFTPETERQRLQLLGFLKPELLGSEFTHLEFPRRVLPKELGQRMLYRDQNMTGWAYKKIELEDLRFPLVCGEGKKARVMATIGVTRGLGDHSLKVCSSTLPIKPFLSCFPEVRVYDLTQYEHCPDDVLVLGTDGLWDVTTDCEVAATVDRVLSAYEPNDHSRYTALAQALVLGARGTPRDRGWRLPNNKLGSGDDISVFVIPLGGPGSYS

SEQ ID NO: 33905 - protein, 150 aa, Homo sapiens
  REGION 1..150: note = ENSP00000474145
MLNRVRSAVAHLVSSGGAPPPRPKSPDLPNAASAPPAAAPEAPRSPPAKAGSGSATPAKAVEARASFSRPTFLQLSPGGLRRADDHAGRAVQSPPDTGRRLPWSTGYAETLFCPRARRAESPAKDELASSPSRPGSLKAKGHQCWQESAQ

SEQ ID NO: 33906 - protein, 74 aa, Homo sapiens
  REGION 1..74: note = ENSP00000397132
MGRRSSKCCCIYEKPRAFGESSTESDEEEEEGCGHTHCVRGHRKGRRRATLGPTPTTPPQPPDPSQPPPGPMQH

SEQ ID NO: 33907 - protein, 126 aa, Homo sapiens
  REGION 1..126: note = ENSP00000403557
MAEAGAGLSETVTETTVTVTTEPENRSLTIKLRKRKPEKKVEWTSDTVDNEHMGRRSSKCCCIYEKPRAFGESSTESDEEEEEGCGHTHCVRGHRKGRRRATLGPTPTTPPQPPDPSQPPPGPMQH

SEQ ID NO: 33908 - protein, 74 aa, Homo sapiens; identical to SEQ ID NO: 33906
  REGION 1..74: note = ENSP00000390917

SEQ ID NO: 33909 - protein, 74 aa, Homo sapiens; identical to SEQ ID NO: 33906
  REGION 1..74: note = ENSP00000411976

SEQ ID NO: 33910 - protein, 74 aa, Homo sapiens; identical to SEQ ID NO: 33906
  REGION 1..74: note = ENSP00000396522

SEQ ID NO: 33911 - protein, 74 aa, Homo sapiens; identical to SEQ ID NO: 33906
  REGION 1..74: note = ENSP00000399723

SEQ ID NO: 33912 - protein, 74 aa, Homo sapiens; identical to SEQ ID NO: 33906
  REGION 1..74: note = ENSP00000392044

SEQ ID NO: 33913 - protein, 126 aa, Homo sapiens; identical to SEQ ID NO: 33907
  REGION 1..126: note = ENSP00000394056

SEQ ID NO: 33914 - protein, 74 aa, Homo sapiens; identical to SEQ ID NO: 33906
  REGION 1..74: note = ENSP00000400763

SEQ ID NO: 33915 - protein, 74 aa, Homo sapiens; identical to SEQ ID NO: 33906
  REGION 1..74: note = ENSP00000404824

SEQ ID NO: 33916 - protein, 74 aa, Homo sapiens; identical to SEQ ID NO: 33906
  REGION 1..74: note = ENSP00000399965

SEQ ID NO: 33917 - protein, 74 aa, Homo sapiens; identical to SEQ ID NO: 33906
  REGION 1..74: note = ENSP00000392260

SEQ ID NO: 33918 - protein, 74 aa, Homo sapiens; identical to SEQ ID NO: 33906
  REGION 1..74: note = ENSP00000411693

SEQ ID NO: 33919 - protein, 126 aa, Homo sapiens; identical to SEQ ID NO: 33907
  REGION 1..126: note = ENSP00000411038

SEQ ID NO: 33920 - protein, 74 aa, Homo sapiens; identical to SEQ ID NO: 33906
  REGION 1..74: note = ENSP00000408173

SEQ ID NO: 33921 - protein, 74 aa, Homo sapiens; identical to SEQ ID NO: 33906
  REGION 1..74: note = ENSP00000416038

SEQ ID NO: 33922 - protein, 74 aa, Homo sapiens; identical to SEQ ID NO: 33906
  REGION 1..74: note = ENSP00000415651

SEQ ID NO: 33923 - protein, 74 aa, Homo sapiens; identical to SEQ ID NO: 33906
  REGION 1..74: note = ENSP00000399167

SEQ ID NO: 33924 - protein, 126 aa, Homo sapiens; identical to SEQ ID NO: 33907
  REGION 1..126: note = ENSP00000414808

SEQ ID NO: 33925 - protein, 74 aa, Homo sapiens; identical to SEQ ID NO: 33906
  REGION 1..74: note = ENSP00000414471

SEQ ID NO: 33926 - protein, 74 aa, Homo sapiens; identical to SEQ ID NO: 33906
  REGION 1..74: note = ENSP00000406410

SEQ ID NO: 33927 - protein, 74 aa, Homo sapiens; identical to SEQ ID NO: 33906
  REGION 1..74: note = ENSP00000391581

SEQ ID NO: 33928 - protein, 74 aa, Homo sapiens; identical to SEQ ID NO: 33906
  REGION 1..74: note = ENSP00000401267

SEQ ID NO: 33929 - protein, 74 aa, Homo sapiens; identical to SEQ ID NO: 33906
  REGION 1..74: note = ENSP00000390548

SEQ ID NO: 33930 - protein, 74 aa, Homo sapiens; identical to SEQ ID NO: 33906
  REGION 1..74: note = ENSP00000365964

SEQ ID NO: 33931 - protein, 126 aa, Homo sapiens; identical to SEQ ID NO: 33907
  REGION 1..126: note = ENSP00000365963

SEQ ID NO: 33932 - protein, 74 aa, Homo sapiens; identical to SEQ ID NO: 33906
  REGION 1..74: note = ENSP00000365960

SEQ ID NO: 33933 - protein, 74 aa, Homo sapiens; identical to SEQ ID NO: 33906
  REGION 1..74: note = ENSP00000365956

SEQ ID NO: 33934 - protein, 74 aa, Homo sapiens; identical to SEQ ID NO: 33906
  REGION 1..74: note = ENSP00000365954

SEQ ID NO: 33935 - protein, 74 aa, Homo sapiens; identical to SEQ ID NO: 33906
  REGION 1..74: note = ENSP00000365949

SEQ ID NO: 33936 - protein, 74 aa, Homo sapiens; identical to SEQ ID NO: 33906
  REGION 1..74: note = ENSP00000399222

SEQ ID NO: 33937 - protein, 126 aa, Homo sapiens; identical to SEQ ID NO: 33907
  REGION 1..126: note = ENSP00000412297

SEQ ID NO: 33938 - protein, 74 aa, Homo sapiens; identical to SEQ ID NO: 33906
  REGION 1..74: note = ENSP00000412526

SEQ ID NO: 33939 - protein, 74 aa, Homo sapiens; identical to SEQ ID NO: 33906
  REGION 1..74: note = ENSP00000400589

SEQ ID NO: 33940 - protein, 74 aa, Homo sapiens; identical to SEQ ID NO: 33906
  REGION 1..74: note = ENSP00000406648

SEQ ID NO: 33941 - protein, 74 aa, Homo sapiens; identical to SEQ ID NO: 33906
  REGION 1..74: note = ENSP00000409066

SEQ ID NO: 33942 - protein, 74 aa, Homo sapiens; identical to SEQ ID NO: 33906
  REGION 1..74: note = ENSP00000383499

SEQ ID NO: 33943 - protein, 126 aa, Homo sapiens; identical to SEQ ID NO: 33907
  REGION 1..126: note = ENSP00000373107

SEQ ID NO: 33944 - protein, 74 aa, Homo sapiens; identical to SEQ ID NO: 33906
  REGION 1..74: note = ENSP00000383498

SEQ ID NO: 33945 - protein, 74 aa, Homo sapiens; identical to SEQ ID NO: 33906
  REGION 1..74: note = ENSP00000383497

SEQ ID NO: 33946 - protein, 74 aa, Homo sapiens; identical to SEQ ID NO: 33906
  REGION 1..74: note = ENSP00000383496

SEQ ID NO: 33947 - protein, 74 aa, Homo sapiens; identical to SEQ ID NO: 33906
  REGION 1..74: note = ENSP00000383495

SEQ ID NO: 33948 - protein, 74 aa, Homo sapiens; identical to SEQ ID NO: 33906
  REGION 1..74: note = ENSP00000404779

SEQ ID NO: 33949 - protein, 74 aa, Homo sapiens; identical to SEQ ID NO: 33906
  REGION 1..74: note = ENSP00000398205

SEQ ID NO: 33950 - protein, 126 aa, Homo sapiens; identical to SEQ ID NO: 33907
  REGION 1..126: note = ENSP00000407981

SEQ ID NO: 33951 - protein, 74 aa, Homo sapiens; identical to SEQ ID NO: 33906
  REGION 1..74: note = ENSP00000410429

SEQ ID NO: 33952 - protein, 74 aa, Homo sapiens; identical to SEQ ID NO: 33906
  REGION 1..74: note = ENSP00000403611

SEQ ID NO: 33953 - protein, 74 aa, Homo sapiens; identical to SEQ ID NO: 33906
  REGION 1..74: note = ENSP00000388044

SEQ ID NO: 33954 - protein, 77 aa, Homo sapiens
  REGION 1..77: note = ENSP00000465811
MPDEINIDELLELESEEERSRKIQGLLKSCGKPVEDFIQELLAKLQGLHRQPGLRQPSPSHDGSLSPLQDRARTAHP

SEQ ID NO: 33955 - protein, 123 aa, Homo sapiens
  REGION 1..123: note = ENSP00000466572
MAAQRLGKRVLSKLQSPSRARGPGGSPGGLQKRHARVTVKYDRRELQRRLDVEKWIDGRLEELYRGMEADMPDEINIDELLELESEEERSRKIQPPPGPGPDCSPLTLLHSPCPPDAAQLACV

SEQ ID NO: 33956 - protein, 120 aa, Homo sapiens
  REGION 1..120: note = ENSP00000301243
MAAQRLGKRVLSKLQSPSRARGPGGSPGGLQKRHARVTVKYDRRELQRRLDVEKWIDGRLEELYRGMGLLKSCGKPVEDFIQELLAKLQGLHRQPGLRQPSPSHDGSLSPLQDRARTAHP

SEQ ID NO: 33957 - protein, 147 aa, Homo sapiens
  REGION 1..147: note = ENSP00000301242
MAAQRLGKRVLSKLQSPSRARGPGGSPGGLQKRHARVTVKYDRRELQRRLDVEKWIDGRLEELYRGMEADMPDEINIDELLELESEEERSRKIQGLLKSCGKPVEDFIQELLAKLQGLHRQPGLRQPSPSHDGSLSPLQDRARTAHP

SEQ ID NO: 33958 - protein, 121 aa, Homo sapiens
  REGION 1..121: note = ENSP00000465104
MAAQRLGKRVLSKLQSPSRARGPGGSPGGLQKRHARVTVKYDRRELQRRLDVEKWIDGRLEELYRGMEADMPDEINIDELLELESEEERSRKIQGLLKSCGKPVEVSFLSLILSLFWPQVL

SEQ ID NO: 33959 - protein, 674 aa, Homo sapiens
  REGION 1..674: note = ENSP00000200453
MAPGQAPHQATPWRDAHPFFLLSPVMGLLSRAWSRLRGLGPLEPWLVEAVKGAALVEAGLEGEARTPLAIPHTPWGRRPEEEAEDSGGPGEDRETLGLKTSSSLPEAWGLLDDDDGMYGEREATSVPRGQGSQFADGQRAPLSPSLLIRTLQGSDKNPGEEKAEEEGVAEEEGVNKFSYPPSHRECCPAVEEEDDEEAVKKEAHRTSTSALSPGSKPSTWVSCPGEEENQATEDKRTERSKGARKTSVSPRSSGSDPRSWEYRSGEASEEKEEKAHKETGKGEAAPGPQSSAPAQRPQLKSWWCQPSDEEEGEVKALGAAEKDGEAECPPCIPPPSAFLKAWVYWPGEDTEEEEDEEEDEDSDSGSDEEEGEAEASSSTPATGVFLKSWVYQPGEDTEEEEDEDSDTGSAEDEREAETSASTPPASAFLKAWVYRPGEDTEEEEDEDVDSEDKEDDSEAALGEAESDPHPSHPDQRAHFRGWGYRPGKETEEEEAAEDWGEAEPCPFRVAIYVPGEKPPPPWAPPRLPLRLQRRLKRPETPTHDPDPETPLKARKVRFSEKVTVHFLAVWAGPAQAARQGPWEQLARDRSRFARRITQAQEELSPCLTPAARARAWARLRNPPLAPIPALTQTLPSSSVPSSPVQTTPLSQAVATPSRSSAAAAAALDLSGRRG

SEQ ID NO: 33960 - protein, 258 aa, Homo sapiens
  REGION 1..258: note = ENSP00000469239
  VARIANT 1: note = Any amino acid
XDSGSDEEEGEAEASSSTPATGVFLKSWVYQPGEDTEEEEDEDSDTGSAEDEREAETSASTPPASAFLKAWVYRPGEDTEEEEDEDVDSEDKEDDSEAALGEAESDPHPSHPDQRAHFRGWGYRPGKETEEEEAAEDWGEAEPCPFRVAIYVPGEKPPPPWAPPRLPLRLQRRLKRPETPTHDPDPETPLKARKVGAESPDSIFFFFLIELESWAVTQAGVQRHDLGSLPTSAAQVQAILVPQPPEYLGLQAHDTTPS

SEQ ID NO: 33961 - protein, 567 aa, Homo sapiens
  REGION 1..567: note = ENSP00000299824
MASHVDLLTELQLLEKVPTLERLRAAQKRRAQQLKKWAQYEQDLQHRKRKHERKRSTGGRRKKVSFEASVALLEASLRNDAEEVRYFLKNKVSPDLCNEDGLTALHQCCIDNFEEIVKLLLSHGANVNAKDNELWTPLHAAATCGHINLVKILVQYGADLLAVNSDGNMPYDLCEDEPTLDVIETCMAYQGITQEKINEMRVAPEQQMIADIHCMIAAGQDLDWIDAQGATLLHIAGANGYLRAAELLLDHGVRVDVKDWDGWEPLHAAAFWGQMQMAELLVSHGASLSARTSMDEMPIDLCEEEEFKVLLLELKHKHDVIMKSQLRHKSSLSRRTSSAGSRGKVVRRASLSDRTNLYRKEYEGEAILWQRSAAEDQRTSTYNGDIRETRTDQENKDPNPRLEKPVLLSEFPTKIPRGELDMPVENGLRAPVSAYQYALANGDVWKVHEVPDYSMAYGNPGVADATPPWSSYKEQSPQTLLELKRQRAAAKLLSHPFLSTHLGSSMARTGESSSEGKAPLIGGRTSPYSSNGTSVYYTVTSGDPPLLKFKAPIEEMEEKVHGCCRIS

SEQ ID NO: 33962 - protein, 525 aa, Homo sapiens
  REGION 1..525: note = ENSP00000362428
MASHVDLLTELQLLEKVPTLERLRAAQKRRAQQLKKWAQYEQDLQHRKRKHERKRSTGGRRKKVSFEASVALLEASLRNDAEEVRYFLKNKVSPDLCNEDGLTALHQCCIDNFEEIVKLLLSHGANVNAKDNELWTPLHAAATCGHINLVKILVQYGADLLAVNSDGNMPYDLCEDEPTLDVIETCMAYQGITQEKINEMRVAPEQQMIADIHCMIAAGQDLDWIDAQGATLMQMAELLVSHGASLSARTSMDEMPIDLCEEEEFKVLLLELKHKHDVIMKSQLRHKSSLSRRTSSAGSRGKVVRRASLSDRTNLYRKEYEGEAILWQRSAAEDQRTSTYNGDIRETRTDQENKDPNPRLEKPVLLSEFPTKIPRGELDMPVENGLRAPVSAYQYALANGDVWKVHEVPDYSMAYGNPGVADATPPWSSYKEQSPQTLLELKRQRAAAKLLSHPFLSTHLGSSMARTGESSSEGKAPLIGGRTSPYSSNGTSVYYTVTSGDPPLLKFKAPIEEMEEKVHGCCRIS

SEQ ID NO: 33963 - protein, 155 aa, Homo sapiens
  REGION 1..155: note = ENSP00000340125
MMSTEQMQPLELSEDRLDKLDPRCSHLDDLSDQFIKDCDLKKKPRKGKNVQATLNVESDQKKPRRKDTPALHIPPFIPGVFSEHLIKRYDVQERHPKGKMIPVLHNTDLEQKKPRRKDTPALHMSPFAAGVTLLRDERPKAIVEDDEKDGDKIAI

SEQ ID NO: 33964 - protein, 104 aa, Homo sapiens
  REGION 1..104: note = ENSP00000386459
MMSTEQMQPLELSEDRLDKLDPRCSHLGVFSEHLIKRYDVQERHPKGKMIPVLHNTDLEQKKPRRKDTPALHMSPFAAGVTLLRDERPKAIVEDDEKDGDKIAI

SEQ ID NO: 33965 - protein, 109 aa, Homo sapiens
  REGION 1..109: note = ENSP00000386359
MEPNSPKKIQFAVPVFQSQIAPEAAEQIRKRRPTPASLVILNEHNPPEIDDKRGPNTQGELQNASPKQRKQSVYTPPTIKGVKHLKGQNESAFPEEEEGTNEREEQRDH

SEQ ID NO: 33966 - protein, 116 aa, Homo sapiens
  REGION 1..116: note = ENSP00000280295
MEPNSPKKIQFAVPVFQSQIAPEAAEQLGFCRSQIRKRRPTPASLVILNEHNPPEIDDKRGPNTQGELQNASPKQRKQSVYTPPTIKGVKHLKGQNESAFPEEEEGTNEREEQRDH

SEQ ID NO: 33967 - protein, 109 aa, Homo sapiens; identical to SEQ ID NO: 33965
  REGION 1..109: note = ENSP00000386778

SEQ ID NO: 33968 - protein, 422 aa, Homo sapiens
  REGION 1..422: note = ENSP00000298705
MYRVPEFYARRKRLGGQTPYLMDQLGLRLGMWYWKDETRTLEFRRFAAEDSVQWLLKHHPHFTPAAEVKEKGKKGKAVHFAETDGPASDRLTDKRLAAKDDKSAKAVEKRGQQGTITLDDVKFVTLLLLQDTEMQRICSFTTFMRNKNLDNFLMALLYYLSHYLEKNSLEKKPKSYMVGLVEKKEMELVLSELEAAQRYLAQKYCILVLGLAVPDKHHMCCGKEKISDTQKDWKFFESFYTFCTYVAWIVFRRQHLTEIEEEVGRLFRTNMFNIPRRRREDEESGGEKKRMTFVQFRRMMAKRPAIKKAINMRSPVMSTLLPSLREKAQNVFEKKYHQVDVRFPAEMQKHVGTLDSVPMPVVGILGEPRCLFNPHTLHPLDPEENTKSFGRYPSLMENNNMRIQDTLDLVMKTLSSHTSCPK

SEQ ID NO: 33969 - protein, 74 aa, Homo sapiens
  REGION 1..74: note = ENSP00000451900
MYRVPEFYARRKRLGGQTPYLMDQLGLRLGMWYWKDETRTLEFRRFAAEDSVQWLLKHHPHAPIPKLAENQQSA

SEQ ID NO: 33970 - protein, 45 aa, Homo sapiens
  REGION 1..45: note = ENSP00000435229
MYRVPEFYARRKRLGGQTPYLMDQLGLRLGMWYWKDETRTLEFRR

SEQ ID NO: 33971 - protein, 44 aa, Homo sapiens
  REGION 1..44: note = ENSP00000452491
MQRICSFTTFMRNKNLDNFLMALLYYLSHYLEKNSLEKKPKSYM

SEQ ID NO: 33972 - protein, 309 aa, Homo sapiens
  REGION 1..309: note = ENSP00000418447
MDEKVFTKELDQWIEQLNECKQLSESQVKSLCEKAKEILTKESNVQEVRCPVTVCGDVHGQFHDLMELFRIGGKSPDTNYLFMGDYVDRGYYSVETVTLLVALKVRYRERITILRGNHESRQITQVYGFYDECLRKYGNANVWKYFTDLFDYLPLTALVDGQIFCLHGGLSPSIDTLDHIRALDRLQEVPHEGPMCDLLWSDPDDRGGWGISPRGAGYTFGQDISETFNHANGLTLVSRAHQLVMEGYNWCHDRNVVTIFSAPNYCYRCGNQAAIMELDDTLKYSFLQFDPAPRRGEPHVTRRTPDYFL

SEQ ID NO: 33973 - protein, 126 aa, Homo sapiens
  REGION 1..126: note = ENSP00000430869
MELFRIGGKSPDTNYLFMGDYVDRGYYSVETVTLLVALKVRYRERITILRGNHESRQITQVYGFYDECLRKYGNANVWKYFTDLFDYLPLTALVDGQIFCLHGGLSPSIDTLDHIRALDRLQEVPH

SEQ ID NO: 33974 - protein, 145 aa, Homo sapiens
  REGION 1..145: note = ENSP00000428816
MPFNGSDVLNLLFLYPLTSNEAKEILTKESNVQEVRCPVTVCGDVHGQFHDLMELFRIGGKSPDTNYLFMGDYVDRGYYSVETVTLLVALKVRYRERITILRGNHESRQITQVYGFYDECLRKYGNANVWKYFTDLFDYLPLTAL

SEQ ID NO: 33975 - protein, 447 aa, Homo sapiens
  REGION 1..447: note = ENSP00000335083
MGLSFFSKHLPIQEGQPWALKTPADIISTVEFNHTGELLATGDKGGRVVIFQREPESKNAPHSQGEYDVYSTFQSHEPEFDYLKSLEIEEKINKIKWLPQQNAAHSLLSTNDKTIKLWKITERDKRPEGYNLKDEEGKLKDLSTVTSLQVPVLKPMDLMVEVSPRRIFANGHTYHINSISVNSDCETYMSADDLRINLWHLAITDRSFNIVDIKPANMEDLTEVITASEFHPHHCNLFVYSSSKGSLRLCDMRAAALCDKHSKLFEEPEDPSNRSFFSEIISSVSDVKFSHSGRYMLTRDYLTVKVWDLNMEARPIETYQVHDYLRSKLCSLYENDCIFDKFECAWNGSDSVIMTGAYNNFFRMFDRNTKRDVTLEASRESSKPRAVLKPRRVCVGGKRRRDDISVDSLDFTKKILHTAWHPAENIIAIAATNNLYIFQDKVNSDMH

SEQ ID NO: 33976 - protein, 440 aa, Homo sapiens
  REGION 1..440: note = ENSP00000423649
MREADTLRPPQLMEVSADIISTVEFNHTGELLATGDKGGRVVIFQREPESKNAPHSQGEYDVYSTFQSHEPEFDYLKSLEIEEKINKIKWLPQQNAAHSLLSTNDKTIKLWKITERDKRPEGYNLKDEEGKLKDLSTVTSLQVPVLKPMDLMVEVSPRRIFANGHTYHINSISVNSDCETYMSADDLRINLWHLAITDRSFNIVDIKPANMEDLTEVITASEFHPHHCNLFVYSSSKGSLRLCDMRAAALCDKHSKLFEEPEDPSNRSFFSEIISSVSDVKFSHSGRYMLTRDYLTVKVWDLNMEARPIETYQVHDYLRSKLCSLYENDCIFDKFECAWNGSDSVIMTGAYNNFFRMFDRNTKRDVTLEASRESSKPRAVLKPRRVCVGGKRRRDDISVDSLDFTKKILHTAWHPAENIIAIAATNNLYIFQDKVNSDMH

SEQ ID NO: 33977 - protein, 430 aa, Homo sapiens
  REGION 1..430: note = ENSP00000422374
MGKRDTADIISTVEFNHTGELLATGDKGGRVVIFQREPESKNAPHSQGEYDVYSTFQSHEPEFDYLKSLEIEEKINKIKWLPQQNAAHSLLSTNDKTIKLWKITERDKRPEGYNLKDEEGKLKDLSTVTSLQVPVLKPMDLMVEVSPRRIFANGHTYHINSISVNSDCETYMSADDLRINLWHLAITDRSFNIVDIKPANMEDLTEVITASEFHPHHCNLFVYSSSKGSLRLCDMRAAALCDKHSKLFEEPEDPSNRSFFSEIISSVSDVKFSHSGRYMLTRDYLTVKVWDLNMEARPIETYQVHDYLRSKLCSLYENDCIFDKFECAWNGSDSVIMTGAYNNFFRMFDRNTKRDVTLEASRESSKPRAVLKPRRVCVGGKRRRDDISVDSLDFTKKILHTAWHPAENIIAIAATNNLYIFQDKVNSDMH

SEQ ID NO: 33978 - protein, 447 aa, Homo sapiens
  REGION 1..447: note = ENSP00000372042
MGEDTDTRKINHSFLRDHSYVTEADIISTVEFNHTGELLATGDKGGRVVIFQREPESKNAPHSQGEYDVYSTFQSHEPEFDYLKSLEIEEKINKIKWLPQQNAAHSLLSTNDKTIKLWKITERDKRPEGYNLKDEEGKLKDLSTVTSLQVPVLKPMDLMVEVSPRRIFANGHTYHINSISVNSDCETYMSADDLRINLWHLAITDRSFNIVDIKPANMEDLTEVITASEFHPHHCNLFVYSSSKGSLRLCDMRAAALCDKHSKLFEEPEDPSNRSFFSEIISSVSDVKFSHSGRYMLTRDYLTVKVWDLNMEARPIETYQVHDYLRSKLCSLYENDCIFDKFECAWNGSDSVIMTGAYNNFFRMFDRNTKRDVTLEASRESSKPRAVLKPRRVCVGGKRRRDDISVDSLDFTKKILHTAWHPAENIIAIAATNNLYIFQDKVNSDMH

SEQ ID NO: 33979 - protein, 440 aa, Homo sapiens; identical to SEQ ID NO: 33976
  REGION 1..440: note = ENSP00000425247

SEQ ID NO: 33980 - protein, 42 aa, Homo sapiens
  REGION 1..42: note = ENSP00000423650
MGLSFFSKHLPIQEGQPWALKTPADIISTVEFNHTGELLATE

SEQ ID NO: 33981 - protein, 873 aa, Homo sapiens
  REGION 1..873: note = ENSP00000305924
MHPPPPAAAMDFSQNSLFGYMEDLQELTIIERPVRRSLKTPEEIERLTVDEDLSDIERAVYLLSAGQDVQGTSVIANLPFLMRQNPTETLRRVLPKVREALHVAGVEMQLTAAMSFLTILQDESVSIHAYTHSFLQVILLHLEHRDTGVSNAWLETLLSVIEVLPKETLRHEILNPLVSKAQLSQTVQSRLVSCKILGKLTNKFDAHTIKREILPLVKSLCQDVEYEVRSCMCRQLENIAQGIGTELTKSVVLPELIELSRDEGSSVRLAAFETLVNLLDIFDTDDRSQTILPLVKSFCEKSFKADESILISLSFHLGKLCHGLYGIFTPDQHLRFLEFYKKLCTLGLQQENGHNENQIPPQILEQEKKYISVRKNCAYNFPAMIVFVDPKNFHMELYSTFFCLCHDPEVPVRYTIAICFYEVSKLLNSGVYLIHKELITLLQDESLEVLDALIDHLPEILELMSTGGESSVQENKLSSLPDLIPALTAAEQRAAASLKWRTHEKLLQKYACLPHVISSDQIYYRFLQRMFTIMMTNNVLPVQKAASRTLCIFLRYNRKQEQRHEVIQKLIEQLGQGKSYWNRLRFLDTCEFIIEIFSKSFFCKYFFLPAIELTHDPVANVRMKLCYLLPKVKSTLKIPADKHLLQQLEMCVRKLLCQEKDKDVLAIVKRTVLELDRMEMSMDAFQKKFYEKDLLDQEKEREELLLLEMEQLEKEKQQNDGRPMSDKMFEKKRRDTKTPTQSLPKNIPISVPGPSSVTPSTSKEIKKSKLIRSQSFNNQAFHAKYGNLEKCASKSSTTGYTTSVSGLGKTSVLSLADDSFRTRNASSVPSSFSPNTPLPSTSRGTGNSVDPKSSGSKDTQPRKATLKSRKSNP

SEQ ID NO: 33982 - protein, 120 aa, Homo sapiens
  REGION 1..120: note = ENSP00000330831
MHPPPPAAAMDFSQNSLFGYMEDLQELTIIERPVRRSLKTPEEIERLTVDEDLSDIERAVYLLSAGQDVQGTSVIANLPFLMRQNPTETLRRVLPKVRVHEDAHLFIQRVWISHMFVQRV

SEQ ID NO: 33983 - protein, 57 aa, Homo sapiens
  REGION 1..57: note = ENSP00000451543
MRQNPTETLRRVLPKVREALHVAGVEMQLTAAMSFLTILQDESVSIHAYTHSFLQVI

SEQ ID NO: 33984 - protein, 62 aa, Homo sapiens
  REGION 1..62: note = ENSP00000452121
MRQNPTETLRRVLPKVRCLPRSMRMHTYLSREYGSHICLSRGCDSVEENTYWKPCMLQEWKC

SEQ ID NO: 33985 - protein, 113 aa, Homo sapiens
  REGION 1..113: note = ENSP00000451556
MRQNPTETLRRVLPKVREALHVAGVEMQLTAAMSFLTILQDESVSIHAYTHSFLQVILLHLEHRDTGVSNAWLETLLSVIEVLPKETLRHEILNPLVSKAQLSQTVQSRLVSC

SEQ ID NO: 33986 - protein, 62 aa, Homo sapiens; identical to SEQ ID NO: 33984
  REGION 1..62: note = ENSP00000487248

SEQ ID NO: 33987 - protein, 873 aa, Homo sapiens; identical to SEQ ID NO: 33981
  REGION 1..873: note = ENSP00000480902

SEQ ID NO: 33988 - protein, 120 aa, Homo sapiens; identical to SEQ ID NO: 33982
  REGION 1..120: note = ENSP00000482849

SEQ ID NO: 33989 - protein, 57 aa, Homo sapiens; identical to SEQ ID NO: 33983
  REGION 1..57: note = ENSP00000487271

SEQ ID NO: 33990 - protein, 113 aa, Homo sapiens; identical to SEQ ID NO: 33985
  REGION 1..113: note = ENSP00000486247

SEQ ID NO: 33991 - protein, 927 aa, Homo sapiens
  REGION 1..927: note = ENSP00000352051
MFWKFDLNTTSHVDKLLDKEHVTLQELMDEDDILQECKAQNQKLLDFLCRQQCMEELVSLITQDPPLDMEEKVRFKYPNTACELLTCDVPQISDRLGGDESLLSLLYDFLDHEPPLNPLLASFFSKTIGNLIARKTEQVITFLKKKDKFISLVLKHIGTSALMDLLLRLVSCVEPAGLRQDVLHWLNEEKVIQRLVELIHPSQDEDRQSNASQTLCDIVRLGRDQGSQLQEALEPDPLLTALESQDCVEQLLKNMFDGDRTESCLVSGTQVLLTLLETRRVGTEGLVDSFSQGLERSYAVSSSVLHGIEPRLKDFHQLLLNPPKKKAILTTIGVLEEPLGNARLHGARLMAALLHTNTPSINQELCRLNTMDLLLDLFFKYTWNNFLHFQVELCIAAILSHAAREERTEASGSESRVEPPHENGNRSLETPQPAASLPDNTMVTHLFQKCCLVQRILEAWEANDHTQAAGGMRRGNMGHLTRIANAVVQNLERGPVQTHISEVIRGLPADCRGRWESFVEETLTETNRRNTVDLAFSDYQIQQMTANFVDQFGFNDEEFADQDDNINAPFDRIAEINFNIDADEDSPSAALFEACCSDRIQPFDDDEDEDIWEDSDTRCAARVMARPRFGAPHASESCSKNGPERGGQDGKASLEAHRDAPGAGAPPAPGKKEAPPVEGDSEAGAMWTAVFDEPANSTPTAPGVVRDVGSSVWAAGTSAPEEKGWAKFTDFQPFCCSESGPRCSSPVDTECSHAEGSRSQGPEKAFSPASPCAWNVCVTRKAPLLASDSSSSGGSHSEDGDQKAASAMDAVSRGPGREAPPLPTVARTEEAVGRVGCADSRLLSPACPAPKEVTAAPAVAVPPEATVAITTALSKAGPAIPTPAVSSALAVAVPLGPIMAVTAAPAMVATLGTVTKDGQMPRQKELP

SEQ ID NO: 33992 - protein, 933 aa, Homo sapiens
  REGION 1..933: note = ENSP00000379090
MFWKFDLNTTSHVDKLLDKEHVTLQELMDEDDILQECKAQNQKLLDFLCRQQCMEELVSLITQDPPLDMEEKVRFKYPNTACELLTCDVPQISDRLGGDESLLSLLYDFLDHEPPLNPLLASFFSKTIGNLIARKTEQVITFLKKKDKFISLVLKHIGTSALMDLLLRLVSCVEPAGLRQDVLHWLNEEKVIQRLVELIHPSQDEDRQSNASQTLCDIVRLGRDQGSQLQEALEPDPLLTALESRQDCVEQLLKNMFDGDRTESCLVSGTQVLLTLLETRRVGTEGLVDSFSQGLERSYAVSSSVLHGIEPRLKDFHQLLLNPPKKKAILTTIGVLEEPLGNARLHGARLMAALLHTNTPSINQELCRLNTMDLLLDLFFKYTWNNFLHFQVELCIAAILSHAAREERTEASGSESRVEPPHENGNRSLETPQPAASLPDNTMVTHLFQKCCLVQRILEAWEANDHTQAAGGMRRGNMGHLTRIANAVVQNLERGPVQTHISEVIRGLPADCRGRWESFVEETLTETNRRNTVDLAFSDYQIQQMTANFVDQFGFNDEEFADQDDNINAPFDRIAEINFNIDADEDSPSAALFEACCSDRIQPFDDDEDEDIWEDSDTRCAARVMARPRFGAPHASESCSKNGPERGGQDGKASLEAHRDAPGAGAPPAPGKKEAPPVEGDSEGAMWTAVFDEPANSTPTAPGVVRDVGSSVWAAGTSAPEEKGWAKFTDFQPFCCSESGPRCSSPVDTECSHAEGSRSQGPEKAFSPASPCAWNVCVTRKAPLLASDSSSSGGSHSEDGDQKAASAMDAVSRGPGREAPPLPTVARTEEAVGRVGCADSRLLSPACPAPKEVTAAPAVAVPPEATVAITTALSKAGPAIPTPAVSSALAVAVPLGPIMAVTAAPAMVATLGTVTKDGKTDAPPEGAALNGPV

SEQ ID NO: 33993 - protein, 932 aa, Homo sapiens
  REGION 1..932: note = ENSP00000379093
MFWKFDLNTTSHVDKLLDKEHVTLQELMDEDDILQECKAQNQKLLDFLCRQQCMEELVSLITQDPPLDMEEKVRFKYPNTACELLTCDVPQISDRLGGDESLLSLLYDFLDHEPPLNPLLASFFSKTIGNLIARKTEQVITFLKKKDKFISLVLKHIGTSALMDLLLRLVSCVEPAGLRQDVLHWLNEEKVIQRLVELIHPSQDEDRQSNASQTLCDIVRLGRDQGSQLQEALEPDPLLTALESQDCVEQLLKNMFDGDRTESCLVSGTQVLLTLLETRRVGTEGLVDSFSQGLERSYAVSSSVLHGIEPRLKDFHQLLLNPPKKKAILTTIGVLEEPLGNARLHGARLMAALLHTNTPSINQELCRLNTMDLLLDLFFKYTWNNFLHFQVELCIAAILSHAAREERTEASGSESRVEPPHENGNRSLETPQPAASLPDNTMVTHLFQKCCLVQRILEAWEANDHTQAAGGMRRGNMGHLTRIANAVVQNLERGPVQTHISEVIRGLPADCRGRWESFVEETLTETNRRNTVDLAFSDYQIQQMTANFVDQFGFNDEEFADQDDNINAPFDRIAEINFNIDADEDSPSAALFEACCSDRIQPFDDDEDEDIWEDSDTRCAARVMARPRFGAPHASESCSKNGPERGGQDGKASLEAHRDAPGAGAPPAPGKKEAPPVEGDSEGAMWTAVFDEPANSTPTAPGVVRDVGSSVWAAGTSAPEEKGWAKFTDFQPFCCSESGPRCSSPVDTECSHAEGSRSQGPEKAFSPASPCAWNVCVTRKAPLLASDSSSSGGSHSEDGDQKAASAMDAVSRGPGREAPPLPTVARTEEAVGRVGCADSRLLSPACPAPKEVTAAPAVAVPPEATVAITTALSKAGPAIPTPAVSSALAVAVPLGPIMAVTAAPAMVATLGTVTKDGKTDAPPEGAALNGPV

SEQ ID NO: 33994 - protein, 966 aa, Homo sapiens
  REGION 1..966: note = ENSP00000216061
MFWKFDLNTTSHVDKLLDKEHVTLQELMDEDDILQECKAQNQKLLDFLCRQQCMEELVSLITQDPPLDMEEKVRFKYPNTACELLTCDVPQISDRLGGDESLLSLLYDFLDHEPPLNPLLASFFSKTIGNLIARKTEQVITFLKKKDKFISLVLKHIGTSALMDLLLRLVSCVEPAGLRQDVLHWLNEEKVIQRLVELIHPSQDEDRQSNASQTLCDIVRLGRDQGSQLQEALEPDPLLTALESQDCVEQLLKNMFDGDRTESCLVSGTQVLLTLLETRRVGTEGLVDSFSQGLERSYAVSSSVLHGIEPRLKDFHQLLLNPPKKKAILTTIGVLEEPLGNARLHGARLMAALLHTNTPSINQELCRLNTMDLLLDLFFKYTWNNFLHFQVELCIAAILSHAAREERTEASGSESRVEPPHENGNRSLETPQPAASLPDNTMVTHLFQKCCLVQRILEAWEANDHTQAAGGMRRGNMGHLTRIANAVVQNLERGPVQTHISEVIRGLPADCRGRWESFVEETLTETNRRNTVDLVSTHHLHSSSEDEDIEGAFPNELSLQQAFSDYQIQQMTANFVDQFGFNDEEFADQDDNINAPFDRIAEINFNIDADEDSPSAALFEACCSDRIQPFDDDEDEDIWEDSDTRCAARVMARPRFGAPHASESCSKNGPERGGQDGKASLEAHRDAPGAGAPPAPGKKEAPPVEGDSEGAMWTAVFDEPANSTPTAPGVVRDVGSSVWAAGTSAPEEKGWAKFTDFQPFCCSESGPRCSSPVDTECSHAEGSRSQGPEKASQASYFAVSPASPCAWNVCVTRKAPLLASDSSSSGGSHSEDGDQKAASAMDAVSRGPGREAPPLPTVARTEEAVGRVGCADSRLLSPACPAPKEVTAAPAVAVPPEATVAITTALSKAGPAIPTPAVSSALAVAVPLGPIMAVTAAPAMVATLGTVTKDGKTDAPPEGAALNGPV

SEQ ID NO: 33995 - protein, 685 aa, Homo sapiens
  REGION 1..685: note = ENSP00000384532
  VARIANT 1: note = Any amino acid
XLETRRVGTEGLVDSFSQGLERSYAVSSSVLHGIEPRLKDFHQLLLNPPKKKAILTTIGVLEEPLGNARLHGARLMAALLHTNTPSINQELCRLNTMDLLLDLFFKYTWNNFLHFQVELCIAAILSHAAREERTEASGSESRVEPPHENGNRSLETPQPAASLPDNTMVTHLFQKCCLVQRILEAWEANDHTQAAGGMRRGNMGHLTRIANAVVQNLERGPVQTHISEVIRGLPADCRGRWESFVEETLTETNRRNTVDLVSTHHLHSSSEDEDIEGAFPNELSLQQAFSDYQIQQMTANFVDQFGFNDEEFADQDDNINAPFDRIAEINFNIDADEDSPSAALFEACCSDRIQPFDDDEDEDIWEDSDTRCAARVMARPRFGAPHASESCSKNGPERGGQDGKASLEAHRDAPGAGAPPAPGKKEAPPVEGDSEGAMWTAVFDEPANSTPTAPGVVRDVGSSVWAAGTSAPEEKGWAKFTDFQPFCCSESGPRCSSPVDTECSHAEGSRSQGPEKAFSPASPCAWNVCVTRKAPLLASDSSSSGGSHSEDGDQKAASAMDAVSRGPGREAPPLPTVARTEEAVGRVGCADSRLLSPACPAPKEVTAAPAVAVPPEATVAITTALSKAGPAIPTPAVSSALAVAVPLGPIMAVTAAPAMVATLGTVTKDGKTDAPPEGAALNGPV

SEQ ID NO: 33996 - protein, 562 aa, Homo sapiens
  REGION 1..562: note = ENSP00000391595
  VARIANT 1: note = Any amino acid
XLLLDLFFKYTWNNFLHFQVELCIAAILSHAAREERTEASGSESRVEPPHENGNRSLETPQPAASLPDNTMVTHLFQKCCLVQRILEAWEANDHTQAAGGMRRGNMGHLTRIANAVVQNLERGPVQTHISEVIRGLPADCRGRWESFVEETLTETNRRNTVDLAFSDYQIQQMTANFVDQFGFNDEEFADQDDNINAPFDRIAEINFNIDADEDSPSAALFEACCSDRIQPFDDDEDEDIWEDSDTRCAARVMARPRFGAPHASESCSKNGPERGGQDGKASLEAHRDAPGAGAPPAPGKKEAPPVEGDSEAGAMWTAVFDEPANSTPTAPGVVRDVGSSVWAAGTSAPEEKGWAKFTDFQPFCCSESGPRCSSPVDTECSHAEGSRSQGPEKAFSPASPCAWNVCVTRKAPLLASDSSSSGGSHSEDGDQKAASAMDAVSRGPGREAPPLPTVARTEEAVGRVGCADSRLLSPACPAPKEVTAAPAVAVPPEATVAITTALSKAGPAIPTPAVSSALAVAVPLGPIMAVTAAPAMVATLGTVTKDGKTDAPPEGAALNGPV

SEQ ID NO: 33997 - protein, 959 aa, Homo sapiens
  REGION 1..959: note = ENSP00000478417
MFWKFDLNTTSHVDKLLDKEHVTLQELMDEDDILQECKAQNQKLLDFLCRQQCMEELVSLITQDPPLDMEEKVRFKYPNTACELLTCDVPQISDRLGGDESLLSLLYDFLDHEPPLNPLLASFFSKTIGNLIARKTEQVITFLKKKDKFISLVLKHIGTSALMDLLLRLVSCVEPAGLRQDVLHWLNEEKVIQRLVELIHPSQDEDRQSNASQTLCDIVRLGRDQGSQLQEALEPDPLLTALESQDCVEQLLKNMFDGDRTESCLVSGTQVLLTLLETRRVGTEGLVDSFSQGLERSYAVSSSVLHGIEPRLKDFHQLLLNPPKKKAILTTIGVLEEPLGNARLHGARLMAALLHTNTPSINQELCRLNTMDLLLDLFFKYTWNNFLHFQVELCIAAILSHAAREERTEASGSESRVEPPHENGNRSLETPQPAASLPDNTMVTHLFQKCCLVQRILEAWEANDHTQAAGGMRRGNMGHLTRIANAVVQNLERGPVQTHISEVIRGLPADCRGRWESFVEETLTETNRRNTVDLVSTHHLHSSSEDEDIEGAFPNELSLQQAFSDYQIQQMTANFVDQFGFNDEEFADQDDNINAPFDRIAEINFNIDADEDSPSAALFEACCSDRIQPFDDDEDEDIWEDSDTRCAARVMARPRFGAPHASESCSKNGPERGGQDGKASLEAHRDAPGAGAPPAPGKKEAPPVEGDSEGAMWTAVFDEPANSTPTAPGVVRDVGSSVWAAGTSAPEEKGWAKFTDFQPFCCSESGPRCSSPVDTECSHAEGSRSQGPEKAFSPASPCAWNVCVTRKAPLLASDSSSSGGSHSEDGDQKAASAMDAVSRGPGREAPPLPTVARTEEAVGRVGCADSRLLSPACPAPKEVTAAPAVAVPPEATVAITTALSKAGPAIPTPAVSSALAVAVPLGPIMAVTAAPAMVATLGTVTKDGKTDAPPEGAALNGPV

SEQ ID NO: 33998 - protein, 1406 aa, Homo sapiens
  REGION 1..1406: note = ENSP00000481109
MHQTLCLNPESLKMSACSDFVEHIWKPGSCKNCFCLRSDHQLVAGPPQPRAGSLPPPPRLPPRPENCRLEDEGVNSSPYSKPTIAVKPTMMSSEASDVWTEANLSAEVSQVIWRRAPGKLPLPKQEDAPVVYLGSFRGVQKPAGPSTSPDGNSRCPPAYTMVGLHNLEPRGERNIAFHPVSFPEEKAVHKEKPSFPYQDRPSTQESFRQKLAAFAGTTSGCHQGPGPLRESLPSEDDSDQRCSPSGDSEGGEYCSILDCCPGSPVAKAASQTAGSRGRHGGRDCSPTCWEQGKCSGPAEQEKRGPSFPKECCSQGPTAHPSCLGPKKLSLTSEAAISSDGLSCGSGSGSGSGASSPFVPHLESDYCSLMKEPAPEKQQDPGCPGVTPSRCLGLTGEPQPPAHPREATQPEPIYAESTKRKKAAPVPSKSQAKIEHAAAAQGQGQVCTGNAWAQKAASGWGRDSPDPTPQVSATITVMAAHPEEDHRTIYLSSPDSAVGVQWPRGPVSQNSEVGEEETSAGQGLSSRESHAHSASESKPKERPAIPPKLSKSSPVGSPVSPSAGGPPVSPLADLSDGSSGGSSIGPQPPSQGPADPAPSCRTNGVAISDPSRCPQPAASSASEQRRPRFQAGTWSRQCRIEEEEEVEQELLSHSWGRETKNGPTDHSNSTTWHRLHPTDGSSGQNSKVGTGMSKSASFAFEFPKDRSGIETFSPPPPPPKSRHLLKMNKSSSDLEKVSQGSAESLSPSFRGVHVSFTTGSTDSLASDSRTCSDGGPSSELAHSPTNSGKKLFAPVPFPSGSTEDVSPSGPQQPPPLPQKKIVSRAASSPDGFFWTQGSPKPGTASPKLNLSHSETNVHDESHFSYSLSPGNRHHPVFSSSDPLEKAFKGSGHWLPAAGLAGNRGGCGSPGLQCKGAPSASSSQLSVSSQASTGSTQLQLHGLLSNISSKEGTYAKLGGLYTQSLARLVAKCEDLFMGGQKKELHFNENNWSLFKLTCNKPCCDSGDAIYYCATCSEDPGSTYAVKICKAPEPKTVSYCSPSVPVHFNIQQDCGHFVASVPSSMLSSPDAPKDPVPALPTHPPAQEQDCVVVITREVPHQTASDFVRDSAASHQAEPEAYERRVCFLLLQLCNGLEHLKEHGIIHRDLCLENLLLVHCTLQAGPGPAPAPAPAPAPAAAAPPCSSAAPPAGGTLSPAAGPASPEGPREKQLPRLIISNFLKAKQKPGGTPNLQQKKSQARLAPEIVSASQYRKFDEFQTGILIYELLHQPNPFEVRAQLRERDYRQEDLPPLPALSLYSPGLQQLAHLLLEADPIKRIRIGEAKRVLQCLLWGPRRELVQQPGTSEEALCGTLHNWIDMKRALMMMKFAEKAVDRRRGVELEDWLCCQYLASAEPGALLQSLKLLQLL

SEQ ID NO: 33999 - protein, 1406 aa, Homo sapiens; identical to SEQ ID NO: 33998
  REGION 1..1406: note = ENSP00000479068

SEQ ID NO: 34000 - protein, 789 aa, Homo sapiens
  REGION 1..789: note = ENSP00000358087
MKMDMEDADMTLWTEAEFEEKCTYIVNDHPWDSGADGGTSVQAEASLPRNLLFKYATNSEEVIGVMSKEYIPKGTRFGPLIGEIYTNDTVPKNANRKYFWRIYSRGELHHFIDGFNEEKSNWMRYVNPAHSPREQNLAACQNGMNIYFYTIKPIPANQELLVWYCRDFAERLHYPYPGELTMMNLTQTQSSLKQPSTEKNELCPKNVPKREYSVKEILKLDSNPSKGKDLYRSNISPLTSEKDLDDFRRRGSPEMPFYPRVVYPIRAPLPEDFLKASLAYGIERPTYITRSPIPSSTTPSPSARSSPDQSLKSSSPHSSPGNTVSPVGPGSQEHRDSYAYLNASYGTEGLGSYPGYAPLPHLPPAFIPSYNAHYPKFLLPPYGMNCNGLSAVSSMNGINNFGLFPRLCPVYSNLLGGGSLPHPMLNPTSLPSSLPSDGARRLLQPEHPREVLVPAPHSAFSFTGAAASMKDKACSPTSGSPTAGTAATAEHVVQPKATSAAMAAPSSDEAMNLIKNKRNMTGYKTLPYPLKKQNGKIKYECNVCAKTFGQLSNLKVHLRVHSGERPFKCQTCNKGFTQLAHLQKHYLVHTGEKPHECQVCHKRFSSTSNLKTHLRLHSGEKPYQCKVCPAKFTQFVHLKLHKRLHTRERPHKCSQCHKNYIHLCSLKVHLKGNCAAAPAPGLPLEDLTRINEEIEKFDISDNADRLEDVEDDISVISVVEKEILAVVRKEKEETGLKVSLQRNMGNGLLSSGCSLYESSDLPLMKLPPSNPLPLVPVKVKQETVEPMDP

SEQ ID NO: 34001 - protein, 825 aa, Homo sapiens
  REGION 1..825: note = ENSP00000358092
MLDICLEKRVGTTLAAPKCNSSTVRFQGLAEGTKGTMKMDMEDADMTLWTEAEFEEKCTYIVNDHPWDSGADGGTSVQAEASLPRNLLFKYATNSEEVIGVMSKEYIPKGTRFGPLIGEIYTNDTVPKNANRKYFWRIYSRGELHHFIDGFNEEKSNWMRYVNPAHSPREQNLAACQNGMNIYFYTIKPIPANQELLVWYCRDFAERLHYPYPGELTMMNLTQTQSSLKQPSTEKNELCPKNVPKREYSVKEILKLDSNPSKGKDLYRSNISPLTSEKDLDDFRRRGSPEMPFYPRVVYPIRAPLPEDFLKASLAYGIERPTYITRSPIPSSTTPSPSARSSPDQSLKSSSPHSSPGNTVSPVGPGSQEHRDSYAYLNASYGTEGLGSYPGYAPLPHLPPAFIPSYNAHYPKFLLPPYGMNCNGLSAVSSMNGINNFGLFPRLCPVYSNLLGGGSLPHPMLNPTSLPSSLPSDGARRLLQPEHPREVLVPAPHSAFSFTGAAASMKDKACSPTSGSPTAGTAATAEHVVQPKATSAAMAAPSSDEAMNLIKNKRNMTGYKTLPYPLKKQNGKIKYECNVCAKTFGQLSNLKVHLRVHSGERPFKCQTCNKGFTQLAHLQKHYLVHTGEKPHECQVCHKRFSSTSNLKTHLRLHSGEKPYQCKVCPAKFTQFVHLKLHKRLHTRERPHKCSQCHKNYIHLCSLKVHLKGNCAAAPAPGLPLEDLTRINEEIEKFDISDNADRLEDVEDDISVISVVEKEILAVVRKEKEETGLKVSLQRNMGNGLLSSGCSLYESSDLPLMKLPPSNPLPLVPVKVKQETVEPMDP

SEQ ID NO: 34002 - protein, 63 aa, Homo sapiens
  REGION 1..63: note = ENSP00000395566
MKMDMEDADMTLWTEAEFEEKCTYIVNDHPWDSGADGGTSVQAEASLPRNLLFKYATNSEEVI

SEQ ID NO: 34003 - protein, 171 aa, Homo sapiens
  REGION 1..171: note = ENSP00000399772
MAGEVHLCPTQCFHKKIYSRGELHHFIDGFNEEKSNWMRYVNPAHSPREQNLAACQNGMNIYFYTIKPIPANQELLVWYCRDFAERLHYPYPGELTMMNLTQTQSSLKQPSTEKNELCPKNVPKREYSVKEILKLDSNPSKGKDLYRSNISPLTSEKDLDDFRRRGSPEMP

SEQ ID NO: 34004 - protein, 691 aa, Homo sapiens
  REGION 1..691: note = ENSP00000358085
MEKIYSRGELHHFIDGFNEEKSNWMRYVNPAHSPREQNLAACQNGMNIYFYTIKPIPANQELLVWYCRDFAERLHYPYPGELTMMNLTQTQSSLKQPSTEKNELCPKNVPKREYSVKEILKLDSNPSKGKDLYRSNISPLTSEKDLDDFRRRGSPEMPFYPRVVYPIRAPLPEDFLKASLAYGIERPTYITRSPIPSSTTPSPSARSSPDQSLKSSSPHSSPGNTVSPVGPGSQEHRDSYAYLNASYGTEGLGSYPGYAPLPHLPPAFIPSYNAHYPKFLLPPYGMNCNGLSAVSSMNGINNFGLFPRLCPVYSNLLGGGSLPHPMLNPTSLPSSLPSDGARRLLQPEHPREVLVPAPHSAFSFTGAAASMKDKACSPTSGSPTAGTAATAEHVVQPKATSAAMAAPSSDEAMNLIKNKRNMTGYKTLPYPLKKQNGKIKYECNVCAKTFGQLSNLKVHLRVHSGERPFKCQTCNKGFTQLAHLQKHYLVHTGEKPHECQVCHKRFSSTSNLKTHLRLHSGEKPYQCKVCPAKFTQFVHLKLHKRLHTRERPHKCSQCHKNYIHLCSLKVHLKGNCAAAPAPGLPLEDLTRINEEIEKFDISDNADRLEDVEDDISVISVVEKEILAVVRKEKEETGLKVSLQRNMGNGLLSSGCSLYESSDLPLMKLPPSNPLPLVPVKVKQETVEPMDP

SEQ ID NO: 34005 - protein, 689 aa, Homo sapiens
  REGION 1..689: note = ENSP00000423985
MEDTGIQRGIWDGDAKAVQQCLTDIFTSVYTTCDIPENAIFGPCVLSHTSLYDSIAFIALKSTDKRTVPYIFRVDTSAANGSSEGLMWLRLVQSARDKEEQNLEAYIKNGQLFYRSLRRIAKDEELLVWYGKELTELLLLCPSRSHNKMNGSSPYTCLECSQRFQFEFPYVAHLRFRCPKRLHSADISPQDEQGGGVGTKDHGGGGGGGKDQQQQQQEAPLGPGPKFCKAGPLHHYPSPSPESSNPSAAAGGSSAKPSTDFHNLARELENSRGGSSCSPAQSLSSGSGSGGGGGHQEAELSPDGIATGGGKGKRKFPEEAAEGGGGAGLVGGRGRFVERPLPASKEDLVCTPQQYRASGSYFGLEENGRLFAPPSPETGEAKRSAFVEVKKAARAASLQEEGTADGAGVASEDQDAGGGGGSSTPAAASPVGAEKLLAPRPGGPLPSRLEGGSPARGSAFTSVPQLGSAGSTSGGGGTGAGAAGGAGGGQGAASDERKSAFSQPARSFSQLSPLVLGQKLGALEPCHPADGVGPTRLYPAAADPLAVKLQGAADLNGGCGSLPSGGGGLPKQSPFLYATAFWPKSSAAAAAAAAAAAAGPLQLQLPSALTLLPPSFTSLCLPAQNWCAKCNASFRMTSDLVYHMRSHHKKEYAMEPLVKRRREEKLKCPICNESFRERHHLSRHMTSHN

SEQ ID NO: 34006 - protein, 427 aa, Homo sapiens
  REGION 1..427: note = ENSP00000425149
MEDTGIQRGIWDGDAKAVQQCLTDIFTSVYTTCDIPENAIFGPCVLSHTSLYDSIAFIALKSTDKRTVPYIFRVDTSAANGSSEGLMWLRLVQSARDKEEQNLEAYIKNGQLFYRSLRRIAKDEELLVWYGKELTELLLLCPSRSHNKMNGSSPYTCLECSQRFQFEFPYVAHLRFRCPKRLHSADISPQDEQGGGVGTKDHGGGGGGGKDQQQQQQEAPLGPGPKFCKAGPLHHYPSPSPESSNPSAAAGGSSAKPSTDFHNLARELENSRGGSSCSPAQSLSSGSGSGGGGGHQEAELSPDGIATGGGKGKRKFPEEAAEGGGGAGLVGGRGRFVERPLPASKEDLVCTPQQYRASGSYFGLEENGRLFAPPSPETGEAKRSAFVEVKKAARAASLQEEGTADGAGVASEDQDAGGGGGSSTPAA

SEQ ID NO: 34007 - protein, 689 aa, Homo sapiens; identical to SEQ ID NO: 34005
  REGION 1..689: note = ENSP00000406998

SEQ ID NO: 34008 - protein, 689 aa, Homo sapiens; identical to SEQ ID NO: 34005
  REGION 1..689: note = ENSP00000339764

SEQ ID NO: 34009 - protein, 382 aa, Homo sapiens
  REGION 1..382: note = ENSP00000343924
MRSPLCWLLPLLILASVAQGQPTRRPRPGTGPGRRPRPRPRPTPSFPQPDEPAEPTDLPPPLPPGPPSIFPDCPRECYCPPDFPSALYCDSRNLRKVPVIPPRIHYLYLQNNFITELPVESFQNATGLRWINLDNNRIRKIDQRVLEKLPGLVFLYMEKNQLEEVPSALPRNLEQLRLSQNHISRIPPGVFSKLENLLLLDLQHNRLSDGVFKPDTFHGLKNLMQLNLAHNILRKMPPRVPTAIHQLYLDSNKIETIPNGYFKSFPNLAFIRLNYNKLTDRGLPKNSFNISNLLVLHLSHNRISSVPAINNRLEHLYLNNNSIEKINGTQICPNDLVAFHDFSSDLENVPHLRYLRLDGNYLKPPIPLDLMMCFRLLQSVVI

SEQ ID NO: 34010 - protein, 883 aa, Homo sapiens
  REGION 1..883: note = ENSP00000434632
  VARIANT 1: note = Any amino acid
XPFSEVESILNQSFCSRRPLRLLVATKAKEIIKIPDQPDTLCFQIRGAAPPYVYAVGRGSEAMAAGLCAGQCILKVNGSNVMNDGAPEVLEHFQAFRSRREEALGLYQWIYHTHEDAQEARASQEASTEDPSGEQAQEEDQADSAFPLLSLGPRLSLCEDSPMVTLTVDNVHLEHGVVYEYVSTAGVRCHVLEKIVEPRGCFGLTAKILEAFAANDSVFVENCRRLMALSSAIVTMPHFEFRNICDTKLESIGQRIACYQEFAAQLKSRVSPPFKQAPLEPHPLCGLDFCPTNCHINLMEVSYPKTTPSVGRSFSIRFGRKPSLIGLDPEQGHLNPMSYTQHCITTMAAPSWKCLPAAEGDPQGQGLHDGSFGPASGTLGQEDRGLSFLLKQEDREIQDAYLQLFTKLDVALKEMKQYVTQINRLLSTITEPTSGGSCDASLAEEASSLPLVSEESEMDRSDHGGIKKVCFKVAEEDQEDSGHDTMSYRDSYSECNSNRDSVLSYTSVRSNSSYLGSDEMGSGDELPCDMRIPSDKQDKLHGCLEHLFNQVDSINALLKGPVMSRAFEETKHFPMNHSLQEFKQKEECTIRGRSLIQISIQEDPWNLPNSIKTLVDNIQRYVEDGKNQLLLALLKCTDTELQLRRDAIFCQALVAAVCTFSKQLLAALGYRYNNNGEYEESSRDASRKWLEQVAATGVLLHCQSLLSPATVKEERTMLEDIWVTLSELDNVTFSFKQLDENYVANTNVFYHIEGSRQALKVIFYLDSYHFSKLPSRLEGGASLRLHTALFTKGELQAWGREDHGGRAKATKHTGSQPPARPRHLPSQCWRTWRGCLLQAARPRRICSRTSTRSPWRKFSSITANSGHFTWSGLTCPRMPAPRR

SEQ ID NO: 34011 - protein, 1659 aa, Homo sapiens
  REGION 1..1659: note = ENSP00000361009
MEAPSGSEPGGDGAGDCAHPDPRAPGAAAPSSGPGPCAAARESERQLRLRLCVLNEILGTERDYVGTLRFLQSAFLHRIRQNVADSVEKGLTEENVKVLFSNIEDILEVHKDFLAALEYCLHPEPQSQHELGNVFLKFKDKFCVYEEYCSNHEKALRLLVELNKIPTVRAFLLSCMLLGGRKTTDIPLEGYLLSPIQRICKYPLLLKELAKRTPGKHPDHPAVQSALQAMKTVCSNINETKRQMEKLEALEQLQSHIEGWEGSNLTDICTQLLLQGTLLKISAGNIQERAFFLFDNLLVYCKRKSRVTGSKKSTKRTKSINGSLYIFRGRINTEVMEVENVEDGTADYHSNGYTVTNGWKIHNTAKNKWFVCMAKTAEEKQKWLDAIIREREQRESLKLGMERDAYVMIAEKGEKLYHMMMNKKVNLIKDRRRKLSTVPKCFLGNEFVAWLLEIGEISKTEEGVNLGQALLENGIIHHVSDKHQFKNEQVMYRFRYDDGTYKARSELEDIMSKGVRLYCRLHSLYTPVIKDRDYHLKTYKSVLPGSKLVDWLLAQGDCQTREEAVALGVGLCNNGFMHHVLEKSEFRDESQYFRFHADEEMEGTSSKNKQLRNDFKLVENILAKRLLILPQEEDYGFDIEEKNKAVVVKSVQRGSLAEVAGLQVGRKIYSINEDLVFLRPFSEVESILNQSFCSRRPLRLLVATKAKEIIKIPDQPDTLCFQIRGAAPPYVYAVGRGSEAMAAGLCAGQCILKVNGSNVMNDGAPEVLEHFQAFRSRREEALGLYQWIYHTHEDAQEARASQEASTEDPSGEQAQEEDQADSAFPLLSLGPRLSLCEDSPMVTLTVDNVHLEHGVVYEYVSTAGVRCHVLEKIVEPRGCFGLTAKILEAFAANDSVFVENCRRLMALSSAIVTMPHFEFRNICDTKLESIGQRIACYQEFAAQLKSRVSPPFKQAPLEPHPLCGLDFCPTNCHINLMEVSYPKTTPSVGRSFSIRFGRKPSLIGLDPEQGHLNPMSYTQHCITTMAAPSWKCLPAAEGDPQGQGLHDGSFGPASGTLGQEDRGLSFLLKQEDREIQDAYLQLFTKLDVALKEMKQYVTQINRLLSTITEPTSGGSCDASLAEEASSLPLVSEESEMDRSDHGGIKKVCFKVAEEDQEDSGHDTMSYRDSYSECNSNRDSVLSYTSVRSNSSYLGSDEMGSGDELPCDMRIPSDKQDKLHGCLEHLFNQVDSINALLKGPVMSRAFEETKHFPMNHSLQEFKQKEECTIRGRSLIQISIQEDPWNLPNSIKTLVDNIQRYVEDGKNQLLLALLKCTDTELQLRRDAIFCQALVAAVCTFSKQLLAALGYRYNNNGEYEESSRDASRKWLEQVAATGVLLHCQSLLSPATVKEERTMLEDIWVTLSELDNVTFSFKQLDENYVANTNVFYHIEGSRQALKVIFYLDSYHFSKLPSRLEGGASLRLHTALFTKVLENVEGLPSPGSQAAEDLQQDINAQSLEKVQQYYRKLRAFYLERSNLPTDASTTAVKIDQLIRPINALDELCRLMKSFVHPKPGAAGSVGAGLIPISSELCYRLGACQMVMCGTGMQRSTLSVSLEQAAILARSHGLLPKCIMQATDIMRKQGPRVEILAKNLRVKDQMPQGAPRLYRLCQPPVDGDL

SEQ ID NO: 34012 - protein, 12 aa, Homo sapiens
  REGION 1..12: note = ENSP00000481444
EDGTGSPSPSLA

SEQ ID NO: 34013 - protein, 1606 aa, Homo sapiens
  REGION 1..1606: note = ENSP00000288368
MSEDSRGDSRAESAKDLEKQLRLRVCVLSELQKTERDYVGTLEFLVSAFLHRMNQCAASKVDKNVTEETVKMLFSNIEDILAVHKEFLKVVEECLHPEPNAQQEVGTCFLHFKDKFRIYDEYCSNHEKAQKLLLELNKIRTIRTFLLNCMLLGGRKNTDVPLEGYLVTPIQRICKYPLILKELLKRTPRKHSDYAAVMEALQAMKAVCSNINEAKRQMEKLEVLEEWQSHIEGWEGSNITDTCTEMLMCGVLLKISSGNIQERVFFLFDNLLVYCKRKHRRLKNSKASTDGHRYLFRGRINTEVMEVENVDDGTADFHSSGHIVVNGWKIHNTAKNKWFVCMAKTPEEKHEWFEAILKERERRKGLKLGMEQDTWVMISEQGEKLYKMMCRQGNLIKDRKRKLTTFPKCFLGSEFVSWLLEIGEIHRPEEGVHLGQALLENGIIHHVTDKHQFKPEQMLYRFRYDDGTFYPRNEMQDVISKGVRLYCRLHSLFTPVIRDKDYHLRTYKSVVMANKLIDWLIAQGDCRTREEAMIFGVGLCDNGFMHHVLEKSEFKDEPLLFRFFSDEEMEGSNMKHRLMKHDLKVVENVIAKSLLIKSNEGSYGFGLEDKNKVPIIKLVEKGSNAEMAGMEVGKKIFAINGDLVFMRPFNEVDCFLKSCLNSRKPLRVLVSTKPRETVKIPDSADGLGFQIRGFGPSVVHAVGRGTVAAAAGLHPGQCIIKVNGINVSKETHASVIAHVTACRKYRRPTKQDSIQWVYNSIESAQEDLQKSHSKPPGDEAGDAFDCKVEEVIDKFNTMAIIDGKKEHVSLTVDNVHLEYGVVYEYDSTAGIKCNVVEKMIEPKGFFSLTAKILEALAKSDEHFVQNCTSLNSLNEVIPTDLQSKFSALCSERIEHLCQRISSYKKFSRVLKNRAWPTFKQAKSKISPLHSSDFCPTNCHVNVMEVSYPKTSTSLGSAFGVQLDSRKHNSHDKENKSSEQGKLSPMVYIQHTITTMAAPSGLSLGQQDGHGLRYLLKEEDLETQDIYQKLLGKLQTALKEVEMCVCQIDDLLSSITYSPKLERKTSEGIIPTDSDNEKGERNSKRVCFNVAGDEQEDSGHDTISNRDSYSDCNSNRNSIASFTSICSSQCSSYFHSDEMDSGDELPLSVRISHDKQDKIHSCLEHLFSQVDSITNLLKGQAVVRAFDQTKYLTPGRGLQEFQQEMEPKLSCPKRLRLHIKQDPWNLPSSVRTLAQNIRKFVEEVKCRLLLALLEYSDSETQLRRDMVFCQTLVATVCAFSEQLMAALNQMFDNSKENEMETWEASRRWLDQIANAGVLFHFQSLLSPNLTDEQAMLEDTLVALFDLEKVSFYFKPSEEEPLVANVPLTYQAEGSRQALKVYFYIDSYHFEQLPQRLKNGGGFKIHPVLFAQALESMEGYYYRDNVSVEEFQAQINAASLEKVKQYNQKLRAFYLDKSNSPPNSTSKAAYVDKLMRPLNALDELYRLVASFIRSKRTAACANTACSASGVGLLSVSSELCNRLGACHIIMCSSGVHRCTLSVTLEQAIILARSHGLPPRYIMQATDVMRKQGARVQNTAKNLGVRDRTPQSAPRLYKLCEPPPPAGEE

SEQ ID NO: 34014 - protein, 831 aa, Homo sapiens
  REGION 1..831: note = ENSP00000345064
MPLEMEPKMSKLAFGCQRSSTSDDDSGCALEEYAWVPPGLRPEQIQLYFACLPEEKVPYVNSPGEKHRIKQLLYQLPPHDNEVRYCQSLSEEEKKELQVFSAQRKKEALGRGTIKLLSRAVMHAVCEQCGLKINGGEVAVFASRAGPGVCWHPSCFVCFTCNELLVDLIYFYQDGKIHCGRHHAELLKPRCSACDEIIFADECTEAEGRHWHMKHFCCLECETVLGGQRYIMKDGRPFCCGCFESLYAEYCETCGEHIGVDHAQMTYDGQHWHATEACFSCAQCKASLLGCPFLPKQGQIYCSKTCSLGEDVHASDSSDSAFQSARSRDSRRSVRMGKSSRSADQCRQSLLLSPALNYKFPGLSGNADDTLSRKLDDLSLSRQGTSFASEEFWKGRVEQETPEDPEEWADHEDYMTQLLLKFGDKSLFQPQPNEMDIRASEHWISDNMVKSKTELKQNNQSLASKKYQSDMYWAQSQDGLGDSAYGSHPGPASSRRLQELELDHGASGYNHDETQWYEDSLECLSDLKPEQSVRDSMDSLALSNITGASVDGENKPRPSLYSLQNFEEMETEDCEKMSNMGTLNSSMLHRSAESLKSLSSELCPEKILPEEKPVHLPVLRRSKSQSRPQQVKFSDDVIDNGNYDIEIRQPPMSERTRRRVYNFEERGSRSHHHRRRRSRKSRSDNALNLVTERKYSPKDRLRLYTPDNYEKFIQNKSAREIQAYIQNADLYGQYAHATSDYGLQNPGMNRFLGLYGEDDDSWCSSSSSSSDSEEEGYFLGQPIPQPRPQRFAYYTDDLSSPPSALPTPQFGQRTTKSKKKKGHKGKNCIIS

SEQ ID NO: 34015 - protein, 831 aa, Homo sapiens; identical to SEQ ID NO: 34014
  REGION 1..831: note = ENSP00000491051

SEQ ID NO: 34016 - protein, 831 aa, Homo sapiens; identical to SEQ ID NO: 34014
  REGION 1..831: note = ENSP00000398947

SEQ ID NO: 34017 - protein, 831 aa, Homo sapiens; identical to SEQ ID NO: 34014
  REGION 1..831: note = ENSP00000491228

SEQ ID NO: 34018 - protein, 831 aa, Homo sapiens; identical to SEQ ID NO: 34014
  REGION 1..831: note = ENSP00000401060

SEQ ID NO: 34019 - protein, 831 aa, Homo sapiens; identical to SEQ ID NO: 34014
  REGION 1..831: note = ENSP00000492763

SEQ ID NO: 34020 - protein, 831 aa, Homo sapiens; identical to SEQ ID NO: 34014
  REGION 1..831: note = ENSP00000492644

SEQ ID NO: 34021 - protein, 831 aa, Homo sapiens; identical to SEQ ID NO: 34014
  REGION 1..831: note = ENSP00000448359

SEQ ID NO: 34022 - protein, 831 aa, Homo sapiens; identical to SEQ ID NO: 34014
  REGION 1..831: note = ENSP00000492332

SEQ ID NO: 34023 - protein, 831 aa, Homo sapiens; identical to SEQ ID NO: 34014
  REGION 1..831: note = ENSP00000449819

SEQ ID NO: 34024 - protein, 163 aa, Homo sapiens
  REGION 1..163: note = ENSP00000447870
MPLEMEPKMSKLAFGCQRSSTSDDDSGCALEEYAWVPPGLRPEQIQLYFACLPEEKVPYVNSPGEKHRIKQLLYQLPPHDNEVRYCQSLSEEEKKELQVFSAQRKKEALGRGTIKLLSRAVMHAVCEQCGLKINGGEVAVFASRAGPGVCWHPSCFVCFTCNE

SEQ ID NO: 34025 - protein, 128 aa, Homo sapiens
  REGION 1..128: note = ENSP00000491473
MPLEMEPKMSKLAFGCQRSSTSDDDSGCALEEYAWVPPGLRPEQIQLYFACLPEEKVPYVNSPGEKHRIKQLLYQLPPHDNEVRYCQSLSEEEKKELQVFSAQRKKEALGRGTIKLLSRAVMHAVCEQ

SEQ ID NO: 34026 - protein, 119 aa, Homo sapiens
  REGION 1..119: note = ENSP00000446970
MPLEMEPKMSKLAFGCQRSSTSDDDSGCALEEYAWVPPGLRPEQIQLYFACLPEEKVPYVNSPGEKHRIKQLLYQLPPHDNEVRYCQSLSEEEKKELQVFSAQRKKEALGRGTIKLLSR

SEQ ID NO: 34027 - protein, 109 aa, Homo sapiens
  REGION 1..109: note = ENSP00000446699
MPLEMEPKMSKLAFGCQRSSTSDDDSGCALEEYAWVPPGLRPEQIQLYFACLPEEKVPYVNSPGEKHRIKQLLYQLPPHDNEVRYCQSLSEEEKKELQVFSAQRKKEAL

SEQ ID NO: 34028 - protein, 109 aa, Homo sapiens; identical to SEQ ID NO: 34027
  REGION 1..109: note = ENSP00000492483

SEQ ID NO: 34029 - protein, 153 aa, Homo sapiens
  REGION 1..153: note = ENSP00000376848
MLLRDLVLRRGCCWSSLLLHCALHPLWGFVQVTHGEPQKSCSKVTDSCRHVCQCRPPPPLPPPPPPPPPPRLLSAPAPNSTSCPTEESWWSGLVIIIAVCCASLVFLTVLVIICYKAIKRKPLRKDENGTSVAEYPMSASQSNKGVDVNNAVV

SEQ ID NO: 34030 - protein, 124 aa, Homo sapiens
  REGION 1..124: note = ENSP00000434370
MLLRDLVLRRGCCWSSLLLHCALHPLWGFVQVTHGEPQKSCSKVTDSCRHVCQCRPPPPLPPPPPPPPPPRLLSAPAPNSTSCPTEESWWSGLVIIIAVCCASLVFLTVLVIICYKAIKRNHAI

SEQ ID NO: 34031 - protein, 153 aa, Homo sapiens; identical to SEQ ID NO: 34029
  REGION 1..153: note = ENSP00000376851

SEQ ID NO: 34032 - protein, 124 aa, Homo sapiens; identical to SEQ ID NO: 34030
  REGION 1..124: note = ENSP00000320948

SEQ ID NO: 34033 - protein, 153 aa, Homo sapiens; identical to SEQ ID NO: 34029
  REGION 1..153: note = ENSP00000486953

SEQ ID NO: 34034 - protein, 124 aa, Homo sapiens; identical to SEQ ID NO: 34030
  REGION 1..124: note = ENSP00000486875

SEQ ID NO: 34035 - protein, 124 aa, Homo sapiens; identical to SEQ ID NO: 34030
  REGION 1..124: note = ENSP00000479855

SEQ ID NO: 34036 - protein, 153 aa, Homo sapiens; identical to SEQ ID NO: 34029
  REGION 1..153: note = ENSP00000479082

SEQ ID NO: 34037 - protein, 569 aa, Homo sapiens
  REGION 1..569: note = ENSP00000287878
MGSAVMDTKKKKDVSSPGGSGGKKNASQKRRSLRVHIPDLSSFAMPLLDGDLEGSGKHSSRKVDSPFGPGSPSKGFFSRGPQPRPSSPMSAPVRPKTSPGSPKTVFPFSYQESPPRSPRRMSFSGIFRSSSKESSPNSNPATSPGGIRFFSRSRKTSGLSSSPSTPTQVTKQHTFPLESYKHEPERLENRIYASSSPPDTGQRFCPSSFQSPTRPPLASPTHYAPSKAAALAAALGPAEAGMLEKLEFEDEAVEDSESGVYMRFMRSHKCYDIVPTSSKLVVFDTTLQVKKAFFALVANGVRAAPLWESKKQSFVGMLTITDFINILHRYYKSPMVQIYELEEHKIETWRELYLQETFKPLVNISPDASLFDAVYSLIKNKIHRLPVIDPISGNALYILTHKRILKFLQLFMSDMPKPAFMKQNLDELGIGTYHNIAFIHPDTPIIKALNIFVERRISALPVVDESGKVVDIYSKFDVINLAAEKTYNNLDITVTQALQHRSQYFEGVVKCNKLEILETIVDRIVRAEVHRLVVVNEADSIVGIISLSDILQALILTPAGAKQKETETE

SEQ ID NO: 34038 - protein, 328 aa, Homo sapiens
  REGION 1..328: note = ENSP00000387386
MLEKLEFEDEAVEDSESGVYMRFMRSHKCYDIVPTSSKLVVFDTTLQVKKAFFALVANGVRAAPLWESKKQSFVGMLTITDFINILHRYYKSPMVQIYELEEHKIETWRELYLQETFKPLVNISPDASLFDAVYSLIKNKIHRLPVIDPISGNALYILTHKRILKFLQLFMSDMPKPAFMKQNLDELGIGTYHNIAFIHPDTPIIKALNIFVERRISALPVVDESGKVVDIYSKFDVINLAAEKTYNNLDITVTQALQHRSQYFEGVVKCNKLEILETIVDRIVRAEVHRLVVVNEADSIVGIISLSDILQALILTPAGAKQKETETE

SEQ ID NO: 34039 - protein, 445 aa, Homo sapiens
  REGION 1..445: note = ENSP00000419577
MKRFGSLRSNKKHKDQNRSTERRQSEPHGLFASGLSSSPSTPTQVTKQHTFPLESYKHEPERLENRIYASSSPPDTGQRFCPSSFQSPTRPPLASPTHYAPSKAAALAAALGPAEAGMLEKLEFEDEAVEDSESGVYMRFMRSHKCYDIVPTSSKLVVFDTTLQVKKAFFALVANGVRAAPLWESKKQSFVGMLTITDFINILHRYYKSPMVQIYELEEHKIETWRELYLQETFKPLVNISPDASLFDAVYSLIKNKIHRLPVIDPISGNALYILTHKRILKFLQLFMSDMPKPAFMKQNLDELGIGTYHNIAFIHPDTPIIKALNIFVERRISALPVVDESGKVVDIYSKFDVINLAAEKTYNNLDITVTQALQHRSQYFEGVVKCNKLEILETIVDRIVRAEVHRLVVVNEADSIVGIISLSDILQALILTPAGAKQKETETE

SEQ ID NO: 34040 - protein, 525 aa, Homo sapiens
  REGION 1..525: note = ENSP00000376549
MPLLDGDLEGSGKHSSRKVDSPFGPGSPSKGFFSRGPQPRPSSPMSAPVRPKTSPGSPKTVFPFSYQESPPRSPRRMSFSGIFRSSSKESSPNSNPATSPGGIRFFSRSRKTSGLSSSPSTPTQVTKQHTFPLESYKHEPERLENRIYASSSPPDTGQRFCPSSFQSPTRPPLASPTHYAPSKAAALAAALGPAEAGMLEKLEFEDEAVEDSESGVYMRFMRSHKCYDIVPTSSKLVVFDTTLQVKKAFFALVANGVRAAPLWESKKQSFVGMLTITDFINILHRYYKSPMVQIYELEEHKIETWRELYLQETFKPLVNISPDASLFDAVYSLIKNKIHRLPVIDPISGNALYILTHKRILKFLQLFMSDMPKPAFMKQNLDELGIGTYHNIAFIHPDTPIIKALNIFVERRISALPVVDESGKVVDIYSKFDVINLAAEKTYNNLDITVTQALQHRSQYFEGVVKCNKLEILETIVDRIVRAEVHRLVVVNEADSIVGIISLSDILQALILTPAGAKQKETETE

SEQ ID NO: 34041 - protein, 118 aa, Homo sapiens
  REGION 1..118: note = ENSP00000420645
MLTITDFINILHRYYKSPMVQIYELEEHKIETWRELYLQETFKPLVNISPDASLFDAVYSLIKNKIHRLPVIDPISGNALYILTHKRILKFLQLFVHQEDGINYTLYKRCLICQSLPS

SEQ ID NO: 34042 - protein, 229 aa, Homo sapiens
  REGION 1..229: note = ENSP00000420783
MGSAVMDTKKKKDVSSPGGSGGKKNASQKRRSLRVHIPDLSSFAMPLLDGDLEGSGKHSSRKVDSPFGPGSPSKGFFSRGPQPRPSSPMSAPVRPKTSPGSPKTVFPFSYQESPPRSPRRMSFSGIFRSSSKESSPNSNPATSPGGIRFFSRSRKTSGLSSSPSTPTQVTKQHTFPLESYKHEPERLENRIYASSSPPDTGQRFCPSSFQSPTRPPLASPTHYAPSKAQ

SEQ ID NO: 34043 - protein, 163 aa, Homo sapiens
  REGION 1..163: note = ENSP00000419493
MLEKLEFEDEAVEDSESGVYMRFMRSHKCYDIVPTSSKLVVFDTTLQVKKAFFALVANGVRAAPLWESKKQSFVGMLTITDFINILHRYYKSPMVQIYELEEHKIETWRELYLQETFKPLVNISPDASLFDAVYSLIKNKIHRLPVIDPISGNALYILTHKRI

SEQ ID NO: 34044 - protein, 52 aa, Homo sapiens
  REGION 1..52: note = ENSP00000417252
MLEKLEFEDEARCQGALIVCACHHALGGNPESYPQSRPFNHRLVPLSAPVKI

SEQ ID NO: 34045 - protein, 489 aa, Homo sapiens
  REGION 1..489: note = ENSP00000233944
MEPGLEHALRRTPSWSSLGGSEHQEMSFLEQENSSSWPSPAVTSSSERIRGKRRAKALRWTRQKSVEEGEPPGQGEGPRSRPAAESTGLEATFPKTTPLAQADPAGVGTPPTGWDCLPSDCTASAAGSSTDDVELATEFPATEAWECELEGLLEERPALCLSPQAPFPKLGWDDELRKPGAQIYMRFMQEHTCYDAMATSSKLVIFDTMLEIKKAFFALVANGVRAAPLWDSKKQSFVGMLTITDFILVLHRYYRSPLVQIYEIEQHKIETWREIYLQGCFKPLVSISPNDSLFEAVYTLIKNRIHRLPVLDPVSGNVLHILTHKRLLKFLHIFGSLLPRPSFLYRTIQDLGIGTFRDLAVVLETAPILTALDIFVDRRVSALPVVNECGQVVGLYSRFDVIHLAAQQTYNHLDMSVGEALRQRTLCLEGVLSCQPHESLGEVIDRIAREQVHRLVLVDETQHLLGVVSLSDILQALVLSPAGIDALGA

SEQ ID NO: 34046 - protein, 489 aa, Homo sapiens; identical to SEQ ID NO: 34045
  REGION 1..489: note = ENSP00000436068

SEQ ID NO: 34047 - protein, 353 aa, Homo sapiens
  REGION 1..353: note = ENSP00000419272
MEPGLEHALRRTPSWSSLGGSEHQEMSFLEQENSSSWPSPAVTSSSERIRGKRRAKALRWTRQKSVEEGEPPGQGEGPRSRPAAESTGLEATFPKTTPLAQADPAGVGTPPTGWDCLPSDCTASAAGSSTDDVELATEFPATEAWECELEGLLEERPALCLSPQAPFPKLGWDDELRKPGAQIYMRFMQEHTCYDAMATSSKLVIFDTMLEIKKAFFALVANGVRAAPLWDSKKQSFVGMLTITDFILVLHRYYRSPLRSTCKAASSLWSPSLLMIACLKLSTPSSRTGSIACLFLTRCQATYSTSSHTNACSSSCTSLVPCCPGPPSSTALSKIWASAHSETWLWCWRQHPS

SEQ ID NO: 34048 - protein, 100 aa, Homo sapiens
  REGION 1..100: note = ENSP00000416100
MEPGLEHALRRTPSWSSLGGSEHQEMSFLEQENSSSWPSPAVTSSSERIRGKRRAKALRWTRQKSVEEGEPPGPRSRPAAESTGLEATFPKTTPLAQADP

SEQ ID NO: 34049 - protein, 489 aa, Homo sapiens; identical to SEQ ID NO: 34045
  REGION 1..489: note = ENSP00000397133

SEQ ID NO: 34050 - protein, 671 aa, Homo sapiens
  REGION 1..671: note = ENSP00000318315
MADPAAGPPPSEGEESTVRFARKGALRQKNVHEVKNHKFTARFFKQPTFCSHCTDFIWGFGKQGFQCQVCCFVVHKRCHEFVTFSCPGADKGPASDDPRSKHKFKIHTYSSPTFCDHCGSLLYGLIHQGMKCDTCMMNVHKRCVMNVPSLCGTDHTERRGRIYIQAHIDRDVLIVLVRDAKNLVPMDPNGLSDPYVKLKLIPDPKSESKQKTKTIKCSLNPEWNETFRFQLKESDKDRRLSVEIWDWDLTSRNDFMGSLSFGISELQKASVDGWFKLLSQEEGEYFNVPVPPEGSEANEELRQKFERAKISQGTKVPEEKTTNTVSKFDNNGNRDRMKLTDFNFLMVLGKGSFGKVMLSERKGTDELYAVKILKKDVVIQDDDVECTMVEKRVLALPGKPPFLTQLHSCFQTMDRLYFVMEYVNGGDLMYHIQQVGRFKEPHAVFYAAEIAIGLFFLQSKGIIYRDLKLDNVMLDSEGHIKIADFGMCKENIWDGVTTKTFCGTPDYIAPEIIAYQPYGKSVDWWAFGVLLYEMLAGQAPFEGEDEDELFQSIMEHNVAYPKSMSKEAVAICKGLMTKHPGKRLGCGPEGERDIKEHAFFRYIDWEKLERKEIQPPYKPKARDKRDTSNFDKEFTRQPVELTPTDKLFIMNLDQNEFAGFSYTNPEFVINV

SEQ ID NO: 34051 - protein, 673 aa, Homo sapiens
  REGION 1..673: note = ENSP00000305355
MADPAAGPPPSEGEESTVRFARKGALRQKNVHEVKNHKFTARFFKQPTFCSHCTDFIWGFGKQGFQCQVCCFVVHKRCHEFVTFSCPGADKGPASDDPRSKHKFKIHTYSSPTFCDHCGSLLYGLIHQGMKCDTCMMNVHKRCVMNVPSLCGTDHTERRGRIYIQAHIDRDVLIVLVRDAKNLVPMDPNGLSDPYVKLKLIPDPKSESKQKTKTIKCSLNPEWNETFRFQLKESDKDRRLSVEIWDWDLTSRNDFMGSLSFGISELQKASVDGWFKLLSQEEGEYFNVPVPPEGSEANEELRQKFERAKISQGTKVPEEKTTNTVSKFDNNGNRDRMKLTDFNFLMVLGKGSFGKVMLSERKGTDELYAVKILKKDVVIQDDDVECTMVEKRVLALPGKPPFLTQLHSCFQTMDRLYFVMEYVNGGDLMYHIQQVGRFKEPHAVFYAAEIAIGLFFLQSKGIIYRDLKLDNVMLDSEGHIKIADFGMCKENIWDGVTTKTFCGTPDYIAPEIIAYQPYGKSVDWWAFGVLLYEMLAGQAPFEGEDEDELFQSIMEHNVAYPKSMSKEAVAICKGLMTKHPGKRLGCGPEGERDIKEHAFFRYIDWEKLERKEIQPPYKPKACGRNAENFDRFFTRHPPVLTPPDQEVIRNIDQSEFEGFSFVNSEFLKPEVKS

SEQ ID NO: 34052 - protein, 57 aa, Homo sapiens
  REGION 1..57: note = ENSP00000454428
MADPAAGPPPSEGEESTVRFARKGALRQKNVHEVKNHKFTARFFKQPTFCSHCTDFI

SEQ ID NO: 34053 - protein, 119 aa, Homo sapiens
  REGION 1..119: note = ENSP00000459227
MDPNGLSDPYVKLKLIPDPKSESKQKTKTIKCSLNPEWNETFRFQLKESDKDRRLSVEIWDWDLTSRNDFMGSLSFGISELQKASVDGWFKLLSQEEGEYFNVPVPPEGSEANEELRQK

SEQ ID NO: 34054 - protein, 130 aa, Homo sapiens
  REGION 1..130: note = ENSP00000457980
MGVMLSERKGTDELYAVKILKKDVVIQDDDVECTMVEKRVLALPGKPPFLTQLHSCFQTMDRLYFVMEYVNGGDLMYHIQQVGRFKEPHAVFYAAEIAIGLFFLQSKGIIYRDLKLDNVMLDSEGHIKIA

SEQ ID NO: 34055 - protein, 122 aa, Homo sapiens
  REGION 1..122: note = ENSP00000458564
  VARIANT 1: note = Any amino acid
XSMSKEAVAICKGLMTKHPGKRLGCGPEGERDIKEHAFFRYIDWEKLERKEIQPPYKPKAVSSPFSLTAGYSHTRYSCLCLMFSKCSLRGRRQCVYWNMGVCIHTYAQNHWLLRWTFSIGPA

SEQ ID NO: 34056 - protein, 77 aa, Homo sapiens
  REGION 1..77: note = ENSP00000419726
MAPFLRIAFNSYELGSLQAEDEANQPFCAVKMKEALSTERGKTLVQKKPTMYPEWKSTFDAHIYEGRVIQIVLMRAA

SEQ ID NO: 34057 - protein, 676 aa, Homo sapiens
  REGION 1..676: note = ENSP00000378217
MAPFLRIAFNSYELGSLQAEDEANQPFCAVKMKEALSTERGKTLVQKKPTMYPEWKSTFDAHIYEGRVIQIVLMRAAEEPVSEVTVGVSVLAERCKKNNGKAEFWLDLQPQAKVLMSVQYFLEDVDCKQSMRSEDEAKFPTMNRRGAIKQAKIHYIKNHEFIATFFGQPTFCSVCKDFVWGLNKQGYKCRQCNAAIHKKCIDKIIGRCTGTAANSRDTIFQKERFNIDMPHRFKVHNYMSPTFCDHCGSLLWGLVKQGLKCEDCGMNVHHKCREKVANLCGINQKLLAEALNQVTQRASRRSDSASSEPVGIYQGFEKKTGVAGEDMQDNSGTYGKIWEGSSKCNINNFIFHKVLGKGSFGKVLLGELKGRGEYFAIKALKKDVVLIDDDVECTMVEKRVLTLAAENPFLTHLICTFQTKDHLFFVMEFLNGGDLMYHIQDKGRFELYRATFYAAEIMCGLQFLHSKGIIYRDLKLDNVLLDRDGHIKIADFGMCKENIFGESRASTFCGTPDYIAPEILQGLKYTFSVDWWSFGVLLYEMLIGQSPFHGDDEDELFESIRVDTPHYPRWITKESKDILEKLFEREPTKRLGVTGNIKIHPFFKTINWTLLEKRRLEPPFRPKVKSPRDYSNFDQEFLNEKARLSYSDKNLIDSMDQSAFAGFSFVNPKFEHLLED

SEQ ID NO: 34058 - protein, 676 aa, Homo sapiens; identical to SEQ ID NO: 34057
  REGION 1..676: note = ENSP00000331602

SEQ ID NO: 34059 - protein, 125 aa, Homo sapiens
  REGION 1..125: note = ENSP00000418106
MAPFLRIAFNSYELGSLQAEDEANQPFCAVKMKEALSTERGKTLVQKKPTMYPEWKSTFDAHIYEGRVIQIVLMRAAEEPVSEVTVGVSVLAERCKKNNGKAEFWLDLQPQAKVLMSVQYFLEDV

SEQ ID NO: 34060 - protein, 223 aa, Homo sapiens
  REGION 1..223: note = ENSP00000419629
MAPFLRIAFNSYELGSLQAEDEANQPFCAVKMKEALSTERGKTLVQKKPTMYPEWKSTFDAHIYEGRVIQIVLMRAAEEPVSEVTVGVSVLAERCKKNNGKAEFWLDLQPQAKVLMSVQYFLEDVDCKQSMRSEDEAKFPTMNRRGAIKQAKIHYIKNHEFIATFFGQPTFCSVCKDFVWGLNKQGYKCRHCGMNVHHKCREKVANLCGINQKLLAEALNQVT

SEQ ID NO: 34061 - protein, 19 aa, Homo sapiens
  REGION 1..19: note = ENSP00000471544
MKCSCCEMNVHRRCVRSVP

SEQ ID NO: 34062 - protein, 99 aa, Homo sapiens
  REGION 1..99: note = ENSP00000471271
MKCSCCEMNVHRRCVRSVPSLCGVDHTERRGRLQLEIRAPTADEIHVTVGEARNLIPMDPNGLSDPYVKLKLIPDPRNLTKQKTRTVKATLNPVWNETF

SEQ ID NO: 34063 - protein, 697 aa, Homo sapiens
  REGION 1..697: note = ENSP00000263431
MAGLGPGVGDSEGGPRPLFCRKGALRQKVVHEVKSHKFTARFFKQPTFCSHCTDFIWGIGKQGLQCQVCSFVVHRRCHEFVTFECPGAGKGPQTDDPRNKHKFRLHSYSSPTFCDHCGSLLYGLVHQGMKCSCCEMNVHRRCVRSVPSLCGVDHTERRGRLQLEIRAPTADEIHVTVGEARNLIPMDPNGLSDPYVKLKLIPDPRNLTKQKTRTVKATLNPVWNETFVFNLKPGDVERRLSVEVWDWDRTSRNDFMGAMSFGVSELLKAPVDGWYKLLNQEEGEYYNVPVADADNCSLLQKFEACNYPLELYERVRMGPSSSPIPSPSPSPTDPKRCFFGASPGRLHISDFSFLMVLGKGSFGKVMLAERRGSDELYAIKILKKDVIVQDDDVDCTLVEKRVLALGGRGPGGRPHFLTQLHSTFQTPDRLYFVMEYVTGGDLMYHIQQLGKFKEPHAAFYAAEIAIGLFFLHNQGIIYRDLKLDNVMLDAEGHIKITDFGMCKENVFPGTTTRTFCGTPDYIAPEIIAYQPYGKSVDWWSFGVLLYEMLAGQPPFDGEDEEELFQAIMEQTVTYPKSLSREAVAICKGFLTKHPGKRLGSGPDGEPTIRAHGFFRWIDWERLERLEIPPPFRPRPCGRSGENFDKFFTRAAPALTPPDRLVLASIDQADFQGFTYVNPDFVHPDARSPTSPVPVPVM

SEQ ID NO: 34064 - protein, 35 aa, Homo sapiens
  REGION 1..35: note = ENSP00000387919
MKCSCCEMNVHRRCVRSVPSLCGVDHTERRGRLQL

SEQ ID NO: 34065 - protein, 581 aa, Homo sapiens
  REGION 1..581: note = ENSP00000441752
MDTKDMNEFETEGFFALHQRRGAIKQAKVHHVKCHEFTATFFPQPTFCSVCHEFVWGLNKQGYQCRQCNAAIHKKCIDKVIAKCTGSAINSRETMFHKERFKIDMPHRFKVYNYKSPTFCEHCGTLLWGLARQGLKCDACGMNVHHRCQTKVANLCGINQKLMAEALAMIESTQQARCLRDTEQIFREGPVEIGLPCSIKNEARPPCLPTPGKREPQGISWESPLDEVDKMCHLPEPELNKERPSLQIKLKIEDFILHKMLGKGSFGKVFLAEFKKTNQFFAIKALKKDVVLMDDDVECTMVEKRVLSLAWEHPFLTHMFCTFQTKENLFFVMEYLNGGDLMYHIQSCHKFDLSRATFYAAEIILGLQFLHSKGIVYRDLKLDNILLDKDGHIKIADFGMCKENMLGDAKTNTFCGTPDYIAPEILLGQKYNHSVDWWSFGVLLYEMLIGQSPFHGQDEEELFHSIRMDNPFYPRWLEKEAKDLLVKLFVREPEKRLGVRGDIRQHPLFREINWEELERKEIDPPFRPKVKSPFDCSNFDKEFLNEKPRLSFADRALINSMDQNMFRNFSFMNPGMERLIS

SEQ ID NO: 34066 - protein, 706 aa, Homo sapiens
  REGION 1..706: note = ENSP00000263125
MSPFLRIGLSNFDCGSCQSCQGEAVNPYCAVLVKEYVESENGQMYIQKKPTMYPPWDSTFDAHINKGRVMQIIVKGKNVDLISETTVELYSLAERCRKNNGKTEIWLELKPQGRMLMNARYFLEMSDTKDMNEFETEGFFALHQRRGAIKQAKVHHVKCHEFTATFFPQPTFCSVCHEFVWGLNKQGYQCRQCNAAIHKKCIDKVIAKCTGSAINSRETMFHKERFKIDMPHRFKVYNYKSPTFCEHCGTLLWGLARQGLKCDACGMNVHHRCQTKVANLCGINQKLMAEALAMIESTQQARCLRDTEQIFREGPVEIGLPCSIKNEARPPCLPTPGKREPQGISWESPLDEVDKMCHLPEPELNKERPSLQIKLKIEDFILHKMLGKGSFGKVFLAEFKKTNQFFAIKALKKDVVLMDDDVECTMVEKRVLSLAWEHPFLTHMFCTFQTKENLFFVMEYLNGGDLMYHIQSCHKFDLSRATFYAAEIILGLQFLHSKGIVYRDLKLDNILLDKDGHIKIADFGMCKENMLGDAKTNTFCGTPDYIAPEILLGQKYNHSVDWWSFGVLLYEMLIGQSPFHGQDEEELFHSIRMDNPFYPRWLEKEAKDLLVKLFVREPEKRLGVRGDIRQHPLFREINWEELERKEIDPPFRPKVKSPFDCSNFDKEFLNEKPRLSFADRALINSMDQNMFRNFSFMNPGMERLIS

SEQ ID NO: 34067 - protein, 670 aa, Homo sapiens [sequence omitted]

SEQ ID NO: 34068 - protein, 643 aa, Homo sapiens
  REGION 1..643: note = ENSP00000380361
MSPFLRIGLSNFDCGSCQSCQGEAVNPYCAVLVKEYVESENGQMYIQKKPTMYPPWDSTFDAHINKGRVMQIIVKGKNVDLISETTVELYSLAERCRKNNGKTEIWLELKPQGRMLMNARYFLEMSDTKDMNEFETEGFFALHQRRGAIKQAKVHHVKCHEFTATFFPQPTFCSVCHEFVWGLNKQGYQCRQCNAAIHKKCIDKVIAKCTGSAINSRETMFHKERFKIDMPHRFKVYNYKSPTFCEHCGTLLWGLARQGLKCDACGMNVHHRCQTKVANLCGINQKLMAEALAMIESTQQARCLRDTEQIFREGPVEIGLPCSIKNEARPPCLPTPGKREPQGISWESPLDEVDKMCHLPEPELNKERPSLQIKLKIEDFILHKMLGKGSFGKVFLAEFKKTNQFFAIKALKKDVVLMDDDVECTMVEKRVLSLAWEHPFLTHMFCTFQTKENLFFVMEYLNGGDLMYHIQSCHKFDLSRATFYAAEIILGLQFLHSKGIVYRDLKLDNILLDKDGHIKIADFGMCKENMLGDAKTNTFCGTPDYIAPELFVREPEKRLGVRGDIRQHPLFREINWEELERKEIDPPFRPKVKSPFDCSNFDKEFLNEKPRLSFADRALINSMDQNMFRNFSFMNPGMERLIS

SEQ ID NO: 34069 - protein, 890 aa, Homo sapiens
  REGION 1..890: note = ENSP00000368356
MSANNSPPSAQKSVLPTAIPAVLPAASPCSSPKTGLSARLSNGSFSAPSLTNSRGSVHTVSFLLQIGLTRESVTIEAQELSLSAVKDLVCSIVYQKFPECGFFGMYDKILLFRHDMNSENILQLITSADEIHEGDLVEVVLSALATVEDFQIRPHTLYVHSYKAPTFCDYCGEMLWGLVRQGLKCEGCGLNYHKRCAFKIPNNCSGVRKRRLSNVSLPGPGLSVPRPLQPEYVALPSEESHVHQEPSKRIPSWSGRPIWMEKMVMCRVKVPHTFAVHSYTRPTICQYCKRLLKGLFRQGMQCKDCKFNCHKRCASKVPRDCLGEVTFNGEPSSLGTDTDIPMDIDNNDINSDSSRGLDDTEEPSPPEDKMFFLDPSDLDVERDEEAVKTISPSTSNNIPLMRVVQSIKHTKRKSSTMVKEGWMVHYTSRDNLRKRHYWRLDSKCLTLFQNESGSKYYKEIPLSEILRISSPRDFTNISQGSNPHCFEIITDTMVYFVGENNGDSSHNPVLAATGVGLDVAQSWEKAIRQALMPVTPQASVCTSPGQGKDHKDLSTSISVSNCQIQENVDISTVYQIFADEVLGSGQFGIVYGGKHRKTGRDVAIKVIDKMRFPTKQESQLRNEVAILQNLHHPGIVNLECMFETPERVFVVMEKLHGDMLEMILSSEKSRLPERITKFMVTQILVALRNLHFKNIVHCDLKPENVLLASAEPFPQVKLCDFGFARIIGEKSFRRSVVGTPAYLAPEVLRSKGYNRSLDMWSVGVIIYVSLSGTFPFNEDEDINDQIQNAAFMYPPNPWREISGEAIDLINNLLQVKMRKRYSVDKSLSHPWLQDYQTWLDLREFETRIGERYITHESDDARWEIHAYTHNLVYPKHFIMAPNPDDMEEDP

SEQ ID NO: 34070 - protein, 185 aa, Homo sapiens
  REGION 1..185: note = ENSP00000399540
  VARIANT 1: note = Any amino acid
XTSISVSNCQIQENVDISTVYQIFADEVLGSGQFGIVYGGKHRKTGRDVAIKVIDKMRFPTKQESQLRNEVAILQILVALRNLHFKNIVHCDLKPENVLLASAEPFPQVKLCDFGFARIIGEKSFRRSVVGTPAYLAPEVLRSKGYNRSLDMWSVGVIIYVSLSGTFPFNEDEDINDQIQNAAFM

SEQ ID NO: 34071 - protein, 172 aa, Homo sapiens
  REGION 1..172: note = ENSP00000398743
TDTMVYFVGENNGDSSHNPVLAATGVGLDVAQSWEKAIRQALMPVTPQASVCTSPGQGKDHKDLSTSISVSNCQIQENVDISTVYQIFADEVLGSGQFGIVYGDLSVLRVVTSLEDFLSSEEQRTVRGKHRKTGRDVAIKVIDKMRFPTKQESQLRNEVAILQNLHHPGIVN

SEQ ID NO: 34072 - protein, 181 aa, Homo sapiens
  REGION 1..181: note = ENSP00000401839
MYDKILLFRHDMNSENILQLITSADEIHEGDLVEVVLSALATVEDFQIRPHTLYVHSYKAPTFCDYCGEMLWGLVRQGLKCEGCGLNYHKRCAFKIPNNCSGVRKRRLSNVSLPGPGLSVPRPLQPEYVALPSEESHVHQEPSKRIPSWSGRPIWMEKMVMCRVKVPHTFAVHSYTRPTIC

SEQ ID NO: 34073 - protein, 890 aa, Homo sapiens; identical to SEQ ID NO: 34069
  REGION 1..890: note = ENSP00000234179

SEQ ID NO: 34074 - protein, 671 aa, Homo sapiens
  REGION 1..671: note = ENSP00000363097
MSELEEDFAKILMLKEERIKELEKRLSEKEEEIQELKRKLHKCQSVLPVPSTHIGPRTTRAQGISAEPQTYRSFHDLRQAFRKFTKSERSKDLIKEAILDNDFMKNLELSQIQEIVDCMYPVEYGKDSCIIKEGDVGSLVYVMEDGKVEVTKEGVKLCTMGPGKVFGELAILYNCTRTATVKTLVNVKLWAIDRQCFQTIMMRTGLIKHTEYMEFLKSVPTFQSLPEEILSKLADVLEETHYENGEYIIRQGARGDTFFIISKGTVNVTREDSPSEDPVFLRTLGKGDWFGEKALQGEDVRTANVIAAEAVTCLVIDRDSFKHLIGGLDDVSNKAYEDAEAKAKYEAEAAFFANLKLSDFNIIDTLGVGGFGRVELVQLKSEESKTFAMKILKKRHIVDTRQQEHIRSEKQIMQGAHSDFIVRLYRTFKDSKYLYMLMEACLGGELWTILRDRGSFEDSTTRFYTACVVEAFAYLHSKGIIYRDLKPENLILDHRGYAKLVDFGFAKKIGFGKKTWTFCGTPEYVAPEIILNKGHDISADYWSLGILMYELLTGSPPFSGPDPMKTYNIILRGIDMIEFPKKIAKNAANLIKKLCRDNPSERLGNLKNGVKDIQKHKWFEGFNWEGLRKGTLTPPIIPSVASPTDTSNFDSFPEDNDEPPPDDNSGWDIDF

SEQ ID NO: 34075 - protein, 686 aa, Homo sapiens
  REGION 1..686: note = ENSP00000363092
MGTLRDLQYALQEKIEELRQRDALIDELELELDQKDELIQKLQNELDKYRSVIRPATQQAQKQSASTLQGEPRTKRQAISAEPTAFDIQDLSHVTLPFYPKSPQSKDLIKEAILDNDFMKNLELSQIQEIVDCMYPVEYGKDSCIIKEGDVGSLVYVMEDGKVEVTKEGVKLCTMGPGKVFGELAILYNCTRTATVKTLVNVKLWAIDRQCFQTIMMRTGLIKHTEYMEFLKSVPTFQSLPEEILSKLADVLEETHYENGEYIIRQGARGDTFFIISKGTVNVTREDSPSEDPVFLRTLGKGDWFGEKALQGEDVRTANVIAAEAVTCLVIDRDSFKHLIGGLDDVSNKAYEDAEAKAKYEAEAAFFANLKLSDFNIIDTLGVGGFGRVELVQLKSEESKTFAMKILKKRHIVDTRQQEHIRSEKQIMQGAHSDFIVRLYRTFKDSKYLYMLMEACLGGELWTILRDRGSFEDSTTRFYTACVVEAFAYLHSKGIIYRDLKPENLILDHRGYAKLVDFGFAKKIGFGKKTWTFCGTPEYVAPEIILNKGHDISADYWSLGILMYELLTGSPPFSGPDPMKTYNIILRGIDMIEFPKKIAKNAANLIKKLCRDNPSERLGNLKNGVKDIQKHKWFEGFNWEGLRKGTLTPPIIPSVASPTDTSNFDSFPEDNDEPPPDDNSGWDIDF

SEQ ID NO: 34076 - protein, 181 aa, Homo sapiens
  REGION 1..181: note = ENSP00000363087
SCIIKEGDVGSLVYVMEDGKVEVTKEGVKLCTMGPGKVFGELAILYNCTRTATVKTLVNVKLWAIDRQCFQTIMMRTGLIKHTEYMEFLKSVPTFQSLPEEILSKLADVLEETHYENGEYIIRQGARGDTFFIISKGTVNVTREDSPSEDPVFLRTLGKGDWFGEKALQGWTWNLFEYVVE

SEQ ID NO: 34077 - protein, 459 aa, Homo sapiens
  REGION 1..459: note = ENSP00000384200
MEFLKSVPTFQSLPEEILSKLADVLEETHYENGEYIIRQGARGDTFFIISKGTVNVTREDSPSEDPVFLRTLGKGDWFGEKALQGEDVRTANVIAAEAVTCLVIDRDSFKHLIGGLDDVSNKAYEDAEAKAKYEAEAAFFANLKLSDFNIIDTLGVGGFGRVELVQLKSEESKTFAMKILKKRHIVDTRQQEHIRSEKQIMQGAHSDFIVRLYRTFKDSKYLYMLMEACLGGELWTILRDRGSFEDSTTRFYTACVVEAFAYLHSKGIIYRDLKPENLILDHRGYAKLVDFGFAKKIGFGKKTWTFCGTPEYVAPEIILNKGHDISADYWSLGILMYELLTGSPPFSGPDPMKTYNIILRGIDMIEFPKKIAKNAANLIKKLCRDNPSERLGNLKNGVKDIQKHKWFEGFNWEGLRKGTLTPPIIPSVASPTDTSNFDSFPEDNDEPPPDDNSGWDIDF

SEQ ID NO: 34078 - protein, 762 aa, Homo sapiens
  REGION 1..762: note = ENSP00000378945
MGNGSVKPKHSKHPDGHSGNLTTDALRNKVTELERELRRKDAEIQEREYHLKELREQLSKQTVAIAELTEELQNKCIQLNKLQDVVHMQGGSPLQASPDKVPLEVHRKTSGLVSLHSRRGAKAGVSAEPTTRTYDLNKPPEFSFEKARVRKDSSEKKLITDALNKNQFLKRLDPQQIKDMVECMYGRNYQQGSYIIKQGEPGNHIFVLAEGRLEVFQGEKLLSSIPMWTTFGELAILYNCTRTASVKAITNVKTWALDREVFQNIMRRTAQARDEQYRNFLRSVSLLKNLPEDKLTKIIDCLEVEYYDKGDYIIREGEEGSTFFILAKGKVKVTQSTEGHDQPQLIKTLQKGEYFGEKALISDDVRSANIIAEENDVACLVIDRETFNQTVGTFEELQKYLEGYVANLNRDDEKRHAKRSMSNWKLSKALSLEMIQLKEKVARFSSSSPFQNLEIIATLGVGGFGRVELVKVKNENVAFAMKCIRKKHIVDTKQQEHVYSEKRILEELCSPFIVKLYRTFKDNKYVYMLLEACLGGELWSILRDRGSFDEPTSKFCVACVTEAFDYLHRLGIIYRDLKPENLILDAEGYLKLVDFGFAKKIGSGQKTWTFCGTPEYVAPEVILNKGHDFSVDFWSLGILVYELLTGNPPFSGVDQMMTYNLILKGIEKMDFPRKITRRPEDLIRRLCRQNPTERLGNLKNGINDIKKHRWLNGFNWEGLKARSLPSPLQRELKGPIDHSYFDKYPPEKGMPPDELSGWDKDF

SEQ ID NO: 34079 - protein, 733 aa, Homo sapiens
  REGION 1..733: note = ENSP00000486129
MGNGSVKPKHSKHPDGHSGNLTTDALRNKVTELERELRRKDAEIQEREYHLKELREQLSKQTVAIAELTEELQNKCIQLNKLQDVVHMQGGSPLQASPDKVPLEVHRKTSGLVSLHSRRGAKAGVSAEPTTRTYDLNKPPEFSFEKARVRKDSSEKKLITDALNKNQFLKRLDPQQIKDMVECMYGRNYQQGSYIIKQGEPGNHIFVLAEGRLEVFQGEKLLSSIPMWTTFGELAILYNCTRTASVKAITNVKTWALDREVFQNIMRRTAQARDEQYRNFLRSVSLLKNLPEDKLTKIIDCLEVEYYDKGDYIIREGEEGSTFFILAKGKVKVTQSTEGHDQPQLIKTLQKGEYFGEKALISDDVRSANIIAEENDVACLVIDRETFNQTVGTFEELQKYLEGYVANLNRDDEKRHAKRSMSNWKLSKALSLEMIQLKEKVKVKNENVAFAMKCIRKKHIVDTKQQEHVYSEKRILEELCSPFIVKLYRTFKDNKYVYMLLEACLGGELWSILRDRGSFDEPTSKFCVACVTEAFDYLHRLGIIYRDLKPENLILDAEGYLKLVDFGFAKKIGSGQKTWTFCGTPEYVAPEVILNKGHDFSVDFWSLGILVYELLTGNPPFSGVDQMMTYNLILKGIEKMDFPRKITRRPEDLIRRLCRQNPTERLGNLKNGINDIKKHRWLNGFNWEGLKARSLPSPLQRELKGPIDHSYFDKYPPEKGMPPDELSGWDKDF

SEQ ID NO: 34080 - protein, 342 aa, Homo sapiens
  REGION 1..342: note = ENSP00000439967
MSNWKLSKALSLEMIQLKEKVARFSSSSPFQNLEIIATLGVGGFGRVELVKVKNENVAFAMKCIRKKHIVDTKQQEHVYSEKRILEELCSPFIVKLYRTFKDNKYVYMLLEACLGGELWSILRDRGSFDEPTSKFCVACVTEAFDYLHRLGIIYRDLKPENLILDAEGYLKLVDFGFAKKIGSGQKTWTFCGTPEYVAPEVILNKGHDFSVDFWSLGILVYELLTGNPPFSGVDQMMTYNLILKGIEKMDFPRKITRRPEDLIRRLCRQNPTERLGNLKNGINDIKKHRWLNGFNWEGLKARSLPSPLQRELKGPIDHSYFDKYPPEKGMPPDELSGWDKDF

SEQ ID NO: 34081 - protein, 762 aa, Homo sapiens; identical to SEQ ID NO: 34078
  REGION 1..762: note = ENSP00000264399

SEQ ID NO: 34082 - protein, 385 aa, Homo sapiens
  REGION 1..385: note = ENSP00000414507
MESLASDGFKLKEVSSVNSPPSQPPQPVVPAKPVQCVHHVSTQPSCPGRGKMSKLLNPEEMTSRDYYFDSYAHFGIHEEMLKDEVRTLTYRNSMYHNKHVFKDKVVLDVGSGTGILSMFAAKAGAKKVFGIECSSISDYSEKIIKANHLDNIITIFKGKVEEVELPVEKVDIIISEWMGYCLFYESMLNTVIFARDKWLKPGGLMFPDRAALYVVAIEDRQYKDFKIHWWENVYGFDMTCIRDVAMKEPLVDIVDPKQVVTNACLIKEVDIYTVKTEELSFTSAFCLQIQRNDYVHALVTYFNIEFTKCHKKMGFSTAPDAPYTHWKQTVFYLEDYLTVRRGEEIYGTISMKPNAKNVRDLDFTVDLDFKGQLCETSVSNDYKMR

SEQ ID NO: 34083 - protein, 394 aa, Homo sapiens
  REGION 1..394: note = ENSP00000372067
MGMKHSSRCLLLRRKMAENAAESTEVNSPPSQPPQPVVPAKPVQCVHHVSTQPSCPGRGKMSKLLNPEEMTSRDYYFDSYAHFGIHEEMLKDEVRTLTYRNSMYHNKHVFKDKVVLDVGSGTGILSMFAAKAGAKKVFGIECSSISDYSEKIIKANHLDNIITIFKGKVEEVELPVEKVDIIISEWMGYCLFYESMLNTVIFARDKWLKPGGLMFPDRAALYVVAIEDRQYKDFKIHWWENVYGFDMTCIRDVAMKEPLVDIVDPKQVVTNACLIKEVDIYTVKTEELSFTSAFCLQIQRNDYVHALVTYFNIEFTKCHKKMGFSTAPDAPYTHWKQTVFYLEDYLTVRRGEEIYGTISMKPNAKNVRDLDFTVDLDFKGQLCETSVSNDYKMR

SEQ ID NO: 34084 - protein, 845 aa, Homo sapiens
  REGION 1..845: note = ENSP00000314396
MSNSRPRSRRDAGGGAGAAGRDELVSRSLQSAEHCLGVQDFGTAYAHYLLVLSLAPELKHDVKETFQYTLFRWAEELDALSRIQDLLGCYEQALELFPDDEVICNSMGEHLFRMGFRDEAAGYFHKAVKLNPDFSDAKENFYRVANWLVERWHFIMLNDTKRNTIYNAAIQKAVCLGSKSVLDIGAGTGILSMFAKKAGAHSVYACELSKTMYELACDVVAANKMEAGIKLLHTKSLDIEIPKHIPERVSLVVTETVDAGLFGEGIVESLIHAWEHLLLQPKTKGESANCEKYGKVIPASAVIFGMAVECAEIRRHHRVGIKDIAGIHLPTNVKFQSPAYSSVDTEETIEPYTTEKMSRVPGGYLALTECFEIMTVDFNNLQELKSLATKKPDKIGIPVIKEGILDAIMVWFVLQLDDEHSLSTSPSEETCWEQAVYPVQDLADYWIKPGDHVMMEVSCQDCYLRIQSISVLGLECEMDVAKSFTQNKDLLSLGNEAELCSALANLQTSKPDAVEQTCILESTEIALLNNIPYHEGFKMAMSKVLSSLTPEKLYQTMDTHCQNEMSSGTGQSNTVQNILEPFYVLDVSEGFSVLPVIAGTLGQVKPYSSVEKDQHRIALDLISEANHFPKETLEFWLRHVEDESAMLQRPKSDKLWSIIILDVIEPSGLIQQEIMEKAAISRCLLQSGGKIFPQYVLMFGLLVESQTLLEENAVQGTERTLGLNIAPFINQFQVPIRVFLDLSSLPCIPLSKPVELLRLDLMTPYLNTSNREVKVYVCKSGRLTAIPFWYHMYLDEEIRLDTSSEASHWKQAAVVLDNPIQVEMGEELVLSIQHHKSNVSITVKQ

SEQ ID NO: 34085 - protein, 66 aa, Homo sapiens
  REGION 1..66: note = ENSP00000426732
MSNSRPRSRRDAGGGAGAAGRDELVSRSLQSAEHCLGVQDFGTAYAHYLLVLSLAPELKHDVKNGL

SEQ ID NO: 34086 - protein, 253 aa, Homo sapiens
  REGION 1..253: note = ENSP00000368752
MANLGCWMLVLFVATWSDLGLCKKRPKPGGWNTGGSRYPGQGSPGGNRYPPQGGGGWGQPHGGGWGQPHGGGWGQPHGGGWGQPHGGGWGQGGGTHSQWNKPSKPKTNMKHMAGAAAAGAVVGGLGGYMLGSAMSRPIIHFGSDYEDRYYRENMHRYPNQVYYRPMDEYSNQNNFVHDCVNITIKQHTVTTTTKGENFTETDVKMMERVVEQMCITQYERESQAYYQRGSSMVLFSSPPVILLISFLIFLIVG

SEQ ID NO: 34087 - protein, 253 aa, Homo sapiens; identical to SEQ ID NO: 34086
  REGION 1..253: note = ENSP00000399376

SEQ ID NO: 34088 - protein, 249 aa, Homo sapiens
  REGION 1..249: note = ENSP00000411599
MANLGCWMLVLFVATWSDLGLCKKRPKPGGWNTGGSRYPGQGSPGGNRYPPQGGGGWGQPHGGGWGQPHGGGWGQPHGGGWGQPHGGGWGQGGGTHSQWNKPSKPKTNMKHMAGAAAAGAVVGGLGGYMLGSAMSRPIIHFGSDYEDRYYRENMHRYPNQVYYRPMDEYSNQNNFVHDCVNITIKQHTVTTTTKGENFTETDVKMMERVVEQMCITQYERESQAYYQRGSSMVLFSSPPVILLISFLIF

SEQ ID NO: 34089 - protein, 217 aa, Homo sapiens
  REGION 1..217: note = ENSP00000415284
MANLGCWMLVLFVATWSDLGLCKKRPKPGGWNTGGSRYPGQGSPGGNRYPPQGGGGWGQPHGGGWGQPHGGGWGQPHGGGWGQPHGGGWGQGGGTHSQWNKPSKPKTNMKHMAGAAAAGAVVGGLGGYMLGSAMSRPIIHFGSDYEDRYYRENMHRYPNQVYYRPMDEYSNQNNFVHDCVNITIKQHTVTTTTKGENFTETDVKMMERVVEQMCITQ

SEQ ID NO: 34090 - protein, 238 aa, Homo sapiens
  REGION 1..238: note = ENSP00000216968
MLTTLLPILLLSGWAFCSQDASDGLQRLHMLQISYFRDPYHVWYQGNASLGGHLTHVLEGPDTNTTIIQLQPLQEPESWARTQSGLQSYLLQFHGLVRLVHQERTLAFPLTIRCFLGCELPPEGSRAHVFFEVAVNGSSFVSFRPERALWQADTQVTSGVVTFTLQQLNAYNRTRYELREFLEDTCVQYVQKHISAENTKGSQTSRSYTSLVLGVLVGSFIIAGVAVGIFLCTGGRRC

SEQ ID NO: 34091 - protein, 213 aa, Homo sapiens
  REGION 1..213: note = ENSP00000489117
  VARIANT 1: note = Any amino acid
XYFRDPYHVWYQGNASLGGHLTHVLEGPDTNTTIIQLQPLQEPESWARTQSGLQSYLLQFHGLVRLVHQERTLAFPLTIRCFLGCELPPEGSRAHVFFEVAVNGSSFVSFRPERALWQADTQVTSGVVTFTLQQLNAYNRTRYELREFLEDTCVQYVQKHISAENTKDNGVGAGSLWPILQRQTESPEAFKRYNQINKSSTIKIQHSILPDLY

SEQ ID NO: 34092 - protein, 34 aa, Homo sapiens
  REGION 1..34: note = ENSP00000489456
AYNRTRYELREFLEDTCVQYVQKHISAENTKDLY

SEQ ID NO: 34093 - protein, 492 aa, Homo sapiens
  REGION 1..492: note = ENSP00000410805
MKMTFYGHFVAGEDQESIQPLLRHYRAFGVSAILDYGVEEDLSPEEAEHKEMESCTSAAERDGSGTNKRDKQYQAHWAFGDRRNGVISARTYFYANEAKCDSHMETFLRCIEASGRVSDDGFIAIKLTALGRPQFLLQFSEVLAKWRCFFHQMAVEQGQAGLAAMDTKLEVAVLQESVAKLGIASRAEIEDWFTAETLGVSGTMDLLDWSSLIDSRTKLSKHLVVPNAQTGQLEPLLSRFTEEEELQMTRMLQRMDVLAKKATEMGVRLMVDAEQTYFQPAISRLTLEMQRKFNVEKPLIFNTYQCYLKDAYDNVTLDVELARREGWCFGAKLVRGAYLAQERARAAEIGYEDPINPTYEATNAMYHRCLDYVLEELKHNAKAKVMVASHNEDTVRFALRRMEELGLHPADHRVYFGQLLGMCDQISFPLGQAGYPVYKYVPYGPVMEVLPYLSRRALENSSLMKGTHRERQLLWLELLRRLRTGNLFHRPA

SEQ ID NO: 34094 - protein, 492 aa, Homo sapiens; identical to SEQ ID NO: 34093
  REGION 1..492: note = ENSP00000334726

SEQ ID NO: 34095 - protein, 600 aa, Homo sapiens
  REGION 1..600: note = ENSP00000349577
MALRRALPALRPCIPRFVPLSTAPASREQPAAGPAAVPGGGSATAVRPPVPAVDFGNAQEAYRSRRTWELARSLLVLRLCAWPALLARHEQLLYVSRKLLGQRLFNKLMKMTFYGHFVAGEDQESIQPLLRHYRAFGVSAILDYGVEEDLSPEEAEHKEMESCTSAAERDGSGTNKRDKQYQAHWAFGDRRNGVISARTYFYANEAKCDSHMETFLRCIEASGRVSDDGFIAIKLTALGRPQFLLQFSEVLAKWRCFFHQMAVEQGQAGLAAMDTKLEVAVLQESVAKLGIASRAEIEDWFTAETLGVSGTMDLLDWSSLIDSRTKLSKHLVVPNAQTGQLEPLLSRFTEEEELQMTRMLQRMDVLAKKATEMGVRLMVDAEQTYFQPAISRLTLEMQRKFNVEKPLIFNTYQCYLKDAYDNVTLDVELARREGWCFGAKLVRGAYLAQERARAAEIGYEDPINPTYEATNAMYHRCLDYVLEELKHNAKAKVMVASHNEDTVRFALRRMEELGLHPADHRVYFGQLLGMCDQISFPLGQAGYPVYKYVPYGPVMEVLPYLSRRALENSSLMKGTHRERQLLWLELLRRLRTGNLFHRPA

SEQ ID NO: 34096 - protein, 185 aa, Homo sapiens
  REGION 1..185: note = ENSP00000409742
  VARIANT 1: note = Any amino acid
XGARRGLRQRAGGVPQPANLGAGAEPAGAALVRLARAAGAPRAGPAPQLRRGMAVARISGTSNTRPTGPSGTAGMVSSVPAPTSTPMRPSATATWRHSCAASKPQLQFSEVLAKWRCFFHQMAVEQGQAGLAAMDTKLEVAVLQESVAKLGIASRAEIEDWFTAETLGVSGTMDLLDWSSLIDSR

SEQ ID NO: 34097 - protein, 135 aa, Homo sapiens
  REGION 1..135: note = ENSP00000396806
MESCTSAAERDGSGTNKRDKQYQAHWAFGDRRNGVISARTYFYANEAKCDSHMETFLRCIEASGRVSDDGFIAIKLTALGRPQFLLQFSEVLAKWRCFFHQMAVEQGQAGLAAMDTKLEVAVLQESVAKLGIASR

SEQ ID NO: 34098 - protein, 164 aa, Homo sapiens
  REGION 1..164: note = ENSP00000413941
  VARIANT 1: note = Any amino acid
XRAAPLHSPLRPAVHGAGLPRAARSGPSGRARRWVGHGSAAAGARRGLRQRAGGVPQPANLGAGAEPAGAALVRLARAAGAPRAGPAPQLRRGMAVARISGTSNTRPTGPSGTAGMVSSVPAPTSTPMRPSATATWRHSCAASKPQLQFSEVLAKWRCFFHQMA

SEQ ID NO: 34099 - protein, 600 aa, Homo sapiens; identical to SEQ ID NO: 34095
  REGION 1..600: note = ENSP00000480347

SEQ ID NO: 34100 - protein, 230 aa, Homo sapiens
  REGION 1..230: note = ENSP00000419517
MPDHDSTALLSRQTKRRRVDIGVKRTVGTASAFFAKARATFFSAMNPQGSEQDVEYSVVQHADGEKSNVLRKLLKRANSYEDAMMPFPGATIISQLLKNNMNKNGGTEPSFQASGLSSTGSEVHQEDICSNSSRDSPPECLSPFGRPTMSQFDMDRLCDEHLRAKRARVENIIRGMSHSPSVALRGNENEREMAPQSVSPRESYRENKRKQKLPQQQQQSFQQLVSARKE

SEQ ID NO: 34101 - protein, 737 aa, Homo sapiens
  REGION 1..737: note = ENSP00000355925
MPDHDSTALLSRQTKRRRVDIGVKRTVGTASAFFAKARATFFSAMNPQGSEQDVEYSVVQHADGEKSNVLRKLLKRANSYEDAMMPFPGATIISQLLKNNMNKNGGTEPSFQASGLSSTGSEVHQEDICSNSSRDSPPECLSPFGRPTMSQFDMDRLCDEHLRAKRARVENIIRGMSHSPSVALRGNENEREMAPQSVSPRESYRENKRKQKLPQQQQQSFQQLVSARKEQKREERRQLKQQLEDMQKQLRQLQEKFYQIYDSTDSENDEDGNLSEDSMRSEILDARAQDSVGRSDNEMCELDPGQFIDRARALIREQEMAENKPKREGNNKERDHGPNSLQPEGKHLAETLKQELNTAMSQVVDTVVKVFSAKPSRQVPQVFPPLQIPQARFAVNGENHNFHTANQRLQCFGDVIIPNPLDTFGNVQMASSTDQTEALPLVVRKNSSDQSASGPAAGGHHQPLHQSPLSATTGFTTSTFRHPFPLPLMAYPFQSPLGAPSGSFSGKDRASPESLDLTRDTTSLRTKMSSHHLSHHPCSPAHPPSTAEGLSLSLIKSECGDLQDMSEISPYSGSAMQEGLSPNHLKKAKLMFFYTRYPSSNMLKTYFSDVKFNRCITSQLIKWFSNFREFYYIQMEKYARQAINDGVTSTEELSITRDCELYRALNMHYNKANDFEVPERFLEVAQITLREFFNAIIAGKDVDPSWKKAIYKVICKLDSEVPEIFKSPNCLQELLHE

SEQ ID NO: 34102 - protein, 737 aa, Homo sapiens; identical to SEQ ID NO: 34101
  REGION 1..737: note = ENSP00000400694

SEQ ID NO: 34103 - protein, 143 aa, Homo sapiens
  REGION 1..143: note = ENSP00000475357
MPDHDSTALLSRQTKRRRVDIGVKRTVGTASAFFAKARATFFSAMNPQGSEQDVEYSVVQHADGEKSNVLRKLLKRANSYEDAMMPFPGATIISQLLKNNMNKNGGTEPSFQASGLSSTGSEVHQEDICSNSSRDSPPECLSP

SEQ ID NO: 34104 - protein, 737 aa, Homo sapiens; identical to SEQ ID NO: 34101
  REGION 1..737: note = ENSP00000420283

SEQ ID NO: 34105 - protein, 737 aa, Homo sapiens; identical to SEQ ID NO: 34101
  REGION 1..737: note = ENSP00000261454

SEQ ID NO: 34106 - protein, 267 aa, Homo sapiens
  REGION 1..267: note = ENSP00000400925
MSSPSLSDLGKREPAAAADERGTQQRRACANATWNSIHNGVIAVFQRKGLPDQELFSLNEGVRQLLKTELGSFFTEYLQNQLLTKGMVILRDKIRFYEGQKLLDSLAETWDFFFSDVLPMLQAIFYPVQGKEPSVRQLALLHFRNAITLSVKLEDALARAHARVPPAIVQMLLVLQGVHESRGVTEDYLRLETLVQKVVSPYLGTYGLHSSEGPFTHSCILEKRLLRRSRSGDVLAKNPVVRSKSYNTPLLNPVQEHEAEGAAAGGT

SEQ ID NO: 34107 - protein, 379 aa, Homo sapiens
  REGION 1..379: note = ENSP00000006251
MSSPSLSDLGKREPAAAADERGTQQRRACANATWNSIHNGVIAVFQRKGLPDQELFSLNEGVRQLLKTELGSFFTEYLQNQLLTKGMVILRDKIRFYEGQKLLDSLAETWDFFFSDVLPMLQAIFYPVQGKEPSVRQLALLHFRNAITLSVKLEDALARAHARVPPAIVQMLLVLQGVHESRGVTEDYLRLETLVQKVVSPYLGTYGLHSSEGPFTHSCILEKRLLRRSRSGDVLAKNPVVRSKSYNTPLLNPVQEHEAEGAAAGGTSIRRHSVSEMTSCPEPQGFSDPPGQGPTGTFRSSPAPHSGPCPSRLYPTTQPPEQGLDPTRSSLPRSSPENLVDQILESVDSDSEGIFIDFGRGRGSGMSDLEGSGGRQSVV

SEQ ID NO: 34108 - protein, 411 aa, Homo sapiens
  REGION 1..411: note = ENSP00000384848
MVCLELSQREAWGSGSPEKMPAQPEGLYRLKFMSSPSLSDLGKREPAAAADERGTQQRRACANATWNSIHNGVIAVFQRKGLPDQELFSLNEGVRQLLKTELGSFFTEYLQNQLLTKGMVILRDKIRFYEGQKLLDSLAETWDFFFSDVLPMLQAIFYPVQGKEPSVRQLALLHFRNAITLSVKLEDALARAHARVPPAIVQMLLVLQGVHESRGVTEDYLRLETLVQKVVSPYLGTYGLHSSEGPFTHSCILEKRLLRRSRSGDVLAKNPVVRSKSYNTPLLNPVQEHEAEGAAAGGTSIRRHSVSEMTSCPEPQGFSDPPGQGPTGTFRSSPAPHSGPCPSRLYPTTQPPEQGLDPTRSSLPRSSPENLVDQILESVDSDSEGIFIDFGRGRGSGMSDLEGSGGRQSVV

SEQ ID NO: 34109 - protein, 388 aa, Homo sapiens
  REGION 1..388: note = ENSP00000337464
MRTLRRLKFMSSPSLSDLGKREPAAAADERGTQQRRACANATWNSIHNGVIAVFQRKGLPDQELFSLNEGVRQLLKTELGSFFTEYLQNQLLTKGMVILRDKIRFYEGQKLLDSLAETWDFFFSDVLPMLQAIFYPVQGKEPSVRQLALLHFRNAITLSVKLEDALARAHARVPPAIVQMLLVLQGVHESRGVTEDYLRLETLVQKVVSPYLGTYGLHSSEGPFTHSCILEKRLLRRSRSGDVLAKNPVVRSKSYNTPLLNPVQEHEAEGAAAGGTSIRRHSVSEMTSCPEPQGFSDPPGQGPTGTFRSSPAPHSGPCPSRLYPTTQPPEQGLDPTRSSLPRSSPENLVDQILESVDSDSEGIFIDFGRGRGSGMSDLEGSGGRQSVV

SEQ ID NO: 34110 - protein, 177 aa, Homo sapiens
  REGION 1..177: note = ENSP00000384746
MRTLRRLKFMSSPSLSDLGKREPAAAADERGTQQRRACANATWNSIHNGVIAVFQRKGLPDQELFSLNEGVRQLLKTELGSFFTEYLQNQLLTKGMVILRDKIRFYEGICPRQSGPVVMAPMPTGQKLLDSLAETWDFFFSDVLPMLQAIFYPVQGKEPSVRQLALLHFRNAITLSV

SEQ ID NO: 34111 - protein, 226 aa, Homo sapiens
  REGION 1..226: note = ENSP00000410215
MSSPSLSDLGKREPAAAADERGTQQRRACANATWNSIHNGVIAVFQRKGLPDQELFSLNEGVRQLLKTELGSFFTEYLQNQLLTKGMVILRDKIRFYEGQKLLDSLAETWDFFFSDVLPMLQAIFYPVQGKEPSVRQLALLHFRNAITLSVKLEDALARAHARVPPAIVQMLLVLQGVHESRGVTEDYLRLETLVQKVVSPYLGTYGLHSSEGPFTHSCILEKRLL

SEQ ID NO: 34112 - protein, 122 aa, Homo sapiens
  REGION 1..122: note = ENSP00000407637
MRTLRRLKFMSSPSLSDLGKREPAAAADERGTQQRRACANATWNSIHNGVIAVFQRKGLPDQELFSLNEGVRQLLKTELGSFFTEYLQNQLLTKGMVILRDKIRFYEEAAGLTGRDLGLLLQ

SEQ ID NO: 34113 - protein, 113 aa, Homo sapiens
  REGION 1..113: note = ENSP00000392026
MSSPSLSDLGKREPAAAADERGTQQRRACANATWNSIHNGVIAVFQRKGLPDQELFSLNEGVRQLLKTELGSFFTEYLQNQLLTKGMVILRDKIRFYEEAAGLTGRDLGLLLQ

SEQ ID NO: 34114 - protein, 379 aa, Homo sapiens; identical to SEQ ID NO: 34107
  REGION 1..379: note = ENSP00000480357

SEQ ID NO: 34115 - protein, 293 aa, Homo sapiens
  REGION 1..293: note = ENSP00000485597
MVILRDKIRFYEGQKLLDSLAETWDFFFSDVLPMLQAIFYPVQGKEPSVRQLALLHFRNAITLSVKLEDALARAHARVPPAIVQMLLVLQGVHESRGVTEDYLRLETLVQKVVSPYLGTYGLHSSEGPFTHSCILEKRLLRRSRSGDVLAKNPVVRSKSYNTPLLNPVQEHEAEGAAAGGTSIRRHSVSEMTSCPEPQGFSDPPGQGPTGTFRSSPAPHSGPCPSRLYPTTQPPEQGLDPTRSSLPRSSPENLVDQILESVDSDSEGIFIDFGRGRGSGMSDLEGSGGRQSVV

SEQ ID NO: 34116 - protein, 293 aa, Homo sapiens; identical to SEQ ID NO: 34115
  REGION 1..293: note = ENSP00000479623

SEQ ID NO: 34117 - protein, 368 aa, Homo sapiens
  REGION 1..368: note = ENSP00000435050
MTRGFAPILPVEFHKMGSFRRPRPRFMSSPVLSDLPRFQAARQALQLSSSSAWNSVQTAVINVFKGGGLQSNELYALNENIRRLLKSELGSFITDYFQNQLLAKGLFFVEEKIKLCEGENRIEVLAEVWDHFFTETLPTLQAIFYPVQGQELTIRQISLLGFRDLVLLKVKLGDLLLLAQSKLPSSIVQMLLILQSVHEPTGPSESYLQLEELVKQVVSPFLGISGDRSFSGPTYTLARRHSRVRPKVTVLNYASPITAVSRPLNEMVLTPLTEQEGEAYLEKCGSVRRHTVANAHSDIQLLAMATMMHSGLGEEASSENKCLLLPPSFPPPHRQCSSEPNITDNPDGLEEGARGSQEGSELNCASLS

SEQ ID NO: 34118 - protein, 47 aa, Homo sapiens
  REGION 1..47: note = ENSP00000433708
MTRGFAPILPVEFHKMGSFRRPRPRFMSSPVLSDLPRFQAARQALQL

SEQ ID NO: 34119 - protein, 83 aa, Homo sapiens
  REGION 1..83: note = ENSP00000433893
MTRGFAPILPVEFHKMGSFRRPRPRFMSSPVLSDLPRFQAARQALQLSSSSAWNSVQTAVINVFKGGGLQSNELYALNENIRR

SEQ ID NO: 34120 - protein, 75 aa, Homo sapiens
  REGION 1..75: note = ENSP00000431610
MTRGFAPILPVEFHKMGSFRRPRPRFMSSPVLSDLPRFQAARQALQLSSSSAWNSVQTAVINVFKGGGLQSNELY

SEQ ID NO: 34121 - protein, 368 aa, Homo sapiens; identical to SEQ ID NO: 34117
  REGION 1..368: note = ENSP00000368144

SEQ ID NO: 34122 - protein, 48 aa, Homo sapiens
  REGION 1..48: note = ENSP00000433305
MTRGFAPILPVEFHKMGSFRRPRPRFMSSPVLSDLPRFQAARQALQLS

SEQ ID NO: 34123 - protein, 63 aa, Homo sapiens
  REGION 1..63: note = ENSP00000436485
MTRGFAPILPVEFHKMGSFRRPRPRFMSSPVLSDLPRFQAARQALQLSSSSAWNSVQTAVINV

SEQ ID NO: 34124 - protein, 49 aa, Homo sapiens
  REGION 1..49: note = ENSP00000431475
MTRGFAPILPVEFHKMGSFRRPRPRFMSSPVLSDLPRFQAARQALQLSS

SEQ ID NO: 34125 - protein, 75 aa, Homo sapiens; identical to SEQ ID NO: 34120
  REGION 1..75: note = ENSP00000432203

SEQ ID NO: 34126 - protein, 80 aa, Homo sapiens
  REGION 1..80: note = ENSP00000436402
MTRGFAPILPVEFHKMGSFRRPRPRFMSSPVLSDLPRFQAARQALQLSSSSAWNSVQTAVINVFKGGGLQSNELYALNEN

SEQ ID NO: 34127 - protein, 205 aa, Homo sapiens
  REGION 1..205: note = ENSP00000435241
MTRGFAPILPVEFHKMGSFRRPRPRFMSSPVLSDLPRFQAARQALQLSSSSAWNSVQTAVINVFKGGGLQSNELYALNENIRRLLKSELGSFITDYFQNQLLAKGLFFVEEKIKLCEGENRIEVLAEVWDHFFTETLPTLQAIFYPVQGQELTIRQISLLGFRDLVLLKVKLGDLLLLAQSKLPSSIVQMLLILQPGGTPGSGPR

SEQ ID NO: 34128 - protein, 445 aa, Homo sapiens
  REGION 1..445: note = ENSP00000296666
MMEESGIETTPPGTPPPNPAGLAATAMSSTPVPLAATSSFSSPNVSSMESFPPLAYSTPQPPLPPVRPSAPLPFVPPPAVPSVPPLVTSMPPPVSPSTAAAFGNPPVSHFPPSTSAPNTLLPAPPSGPPISGFSVGSTYDITRGHAGRAPQTPLMPSFSAPSGTGLLPTPITQQASLTSLAQGTGTTSAITFPEEQEDPRITRGQDEASAGGIWGFIKGVAGNPMVKSVLDKTKHSVESMITTLDPGMAPYIKSGGELDIVVTSNKEVKVAAVRDAFQEVFGLAVVVGEAGQSNIAPQPVGYAAGLKGAQERIDSLRRTGVIHEKQTAVSVENFIAELLPDKWFDIGCLVVEDPVHGIHLETFTQATPVPLEFVQQAQSLTPQDYNLRWSGLLVTVGEVLEKSLLNVSRTDWHMAFTGMSRRQMIYSAARAIAGMYKQRLPPRTV

SEQ ID NO: 34129 - protein, 418 aa, Homo sapiens
  REGION 1..418: note = ENSP00000392873
MMEESGIETTPPGTPPPNPAGLAATAMSSTPVPLAATSSFSSPNVSSMESFPPLAYSTPQPPLPPVRPSAPLPFVPPPAVPSVPPLVTSMPPPVSPSTAAAFGNPPVSHFPPSTSAPNTLLPAPPSGPPISGFSVGSTYDITRGHAGRAPQTPLMPSFSAPSGTGLLPTPITQQASLTSLAQGTGTTSAITFPEEQEDPRITRGQDEASAGGIWGFIKGVAGNPMVKSVLDKTKHSVESMITTLDPGMAPYIKSGGELDIVVTSNKEVKVAAVRDAFQEVFGLAVVVGEAGQSNIAPQPVGYAAGLKGAQERIDSLRRTGVIHEKQTAVSVENFIAELLPDKWFDIGCLVVEDPVHGIHLETFTQATPVPLEFVQQVGFLLCFFIMLQRNLHYCFQNKNLFGFFVRNMFLILFQSFFF

SEQ ID NO: 34130 - protein, 462 aa, Homo sapiens
  REGION 1..462: note = ENSP00000421965
MMEESGIETTPPGTPPPNPAGLAATAMSSTPVPLAATSSFSSPNVSSMESFPPLAYSTPQPPLPPVRPSAPLPFVPPPAVPSVPPLVTSMPPPVSPSTAAAFGNPPVSHFPPSTSAPNTLLPAPPSGPPISGFSVGSTYDITRGHAGRAPQTPLMPSFSAPSGTGLLPTPITQQASLTSLAQGTGTTSAITFPEEQEDPRITRGQDEASAGGIWGFIKGVAGNPMVKSVLDKTKHSVESMITTLDPGMAPYIKSGGELDIVVTSNKEVKVAAVRDAFQEVFGLAVVVGEAGQSNIAPQPVGYAAGLKGAQERIDSLRRTGVIHEKQTAVSVENFIAELLPDKWFDIGCLVVEDPVHGIHLETFTQATPVPLEFVQQAQSLTPQDYNLRWSGLLVTVGEVLEKSLLNVSRTDWHMAFTGMSRRQMIYSAARAIADDYFPRIPKEQWQSMAWLKLEIFLPLVTW

SEQ ID NO: 34131 - protein, 52 aa, Homo sapiens
  REGION 1..52: note = ENSP00000411509
MAVFLEAKDAHSVLKRFPRANEFLEELRQGTIERECMEEICSYEEVKEVFEN

SEQ ID NO: 34132 - protein, 102 aa, Homo sapiens
  REGION 1..102: note = ENSP00000359379
MAGLSRALSSVFLEAKDAHSVLKRFPRANEFLEELRQGTIERECMEEICSYEEVKEVFENKEKTACTTLGLVLGVGVASGIARTGPGNADQSEARKDTQPKA

SEQ ID NO: 34133 - protein, 231 aa, Homo sapiens
  REGION 1..231: note = ENSP00000359378
MAVFLEAKDAHSVLKRFPRANEFLEELRQGTIERECMEEICSYEEVKEVFENKEKTMEFWKGYPNAVYSVRDPSQSSDAMYVVVPLLGVALLIVIALFIIWRCQLQKATRHHPSYAQNRYLASRAGHTLPRVMVYRGTVHSQGEPSGHREAANSPQVVLGPSRGGRTTVRLESTLYLPELSLSRLSSTTPPPSYEEVTAPQESSSEEASVSYSDPPPKYEEIVAANPGADK

SEQ ID NO: 34134 - protein, 91 aa, Homo sapiens
  REGION 1..91: note = ENSP00000394121
DPSQSSDAMYVVVPLLGVALLIVIALFIIWRCQLQKATRHHPSYAQNRRCFAVRLAAPSFASKYSNVGAFPFRLWAASLSLARIYLTNIPK

SEQ ID NO: 34135 - protein, 231 aa, Homo sapiens; identical to SEQ ID NO: 34133
  REGION 1..231: note = ENSP00000440217

SEQ ID NO: 34136 - protein, 128 aa, Homo sapiens
  REGION 1..128: note = ENSP00000489805
MAASSSEISEMKGVEESPKVPGEGPGHSEAETGPPQVLAGVPDQPEAPQPGPNTTAAPVDSGPKAGLAPETTETPAGASETAQATDLSLSPGGESKANCSPEDPCQETVSKPEVSKEATADQGSRLES

SEQ ID NO: 34137 - protein, 106 aa, Homo sapiens
  REGION 1..106: note = ENSP00000454634
MAASSSEISEMKGVEESPKVPGEGPGHSEAETGPPQVLAGVPDQPEAPQPGPNTTAAPVDSGPKAGLAPETTETPAGASETAQATDLSLSPGGESKANCSPEDPCQ

SEQ ID NO: 34138 - protein, 340 aa, Homo sapiens
  REGION 1..340: note = ENSP00000351608
MAASSSEISEMKGVEESPKVPGEGPGHSEAETGPPQVLAGVPDQPEAPQPGPNTTAAPVDSGPKAGLAPETTETPAGASETAQATDLSLSPGGESKANCSPEDPCQETVSKPEVSKEATADQGSRLESAAPPEPAPEPAPQPDPRPDSQPTPKPALQPELPTQEDPTPEILSESVGEKQENGAVVPLQAGDGEEGPAPEPHSPPSKKSPPANGAPPRVLQQLVEEDRMRRAHSGHPGSPRGSLSRHPSSQLAGPGVEGGEGTQKPRDYIILAILSCFCPMWPVNIVAFAYAVMSRNSLQQGDVDGAQRLGRVAKLLSIVALVGGVLIIIASCVINLGVYK

SEQ ID NO: 34139 - protein, 299 aa, Homo sapiens
  REGION 1..299: note = ENSP00000490390
MAASSSEISEMKGVEESPKVPGEGPGHSEAETGPPQVLAGVPDQPEAPQPGPNTTAAPVDSGPKAGLAPETTETPAGASETAQATDLSLSPGGESKANCSPEDPCQETVSKPEVSKEATADQGSRLESAAPPEPAPEPAPQPDPRPDSQPTPKPALQPELPTQEDPTPEILSESVGEKQENGAVVPLQAGDGEEGPAPEPHSPPSKKSPPANGAPPRVLQQLVEEDRMRRAHSGHPGSPRGSLSRHPSSQLAGPGVEGGEGTQKPRDYIILAILSCFCPMWPVNIVAFAYAVMVSPMGP

SEQ ID NO: 34140 - protein, 145 aa, Homo sapiens
  REGION 1..145: note = ENSP00000489813
MAASSSEISEMKGVEESPKVPGEGPGHSEAETGPPQVLAGVPDQPEAPQPGPNTTAAPVDSGPKAGLAPETTETPAGASETAQATDLSLSPGGESKANCSPEDPCQETVSKPESRNSLQQGDVDGAQRLGRVAKLLSIVALVGGV

SEQ ID NO: 34141 - protein, 130 aa, Homo sapiens
  REGION 1..130: note = ENSP00000490278
MAASSSEISEMKGVEESPKVPGEGPGHSEAETGPPQVLAGVPDQPEAPQPGPNTTAAPVDSGPKAGLAPETTETPAGASETAQATDLSLSPGGESKANCSPEDPCQETVSKPEPMGPPPECCSSWLRRIE

SEQ ID NO: 34142 - protein, 394 aa, Homo sapiens
  REGION 1..394: note = ENSP00000456226
MAASSSEISEMKGVEESPKVPGEGPGHSEAETGPPQVLAGVPDQPEAPQPGPNTTAAPVDSGPKAGLAPETTETPAGASETAQATDLSLSPGGESKANCSPEDPCQETVSKPEVSKEATADQGSRLESAAPPEPAPEPAPQPDPRPDSQPTPKPALQPELPTQEDPTPEILSESVGEKQENGAVVPLQAGDGEEGPAPEPHSPPSKKSPPANGAPPRVLQQLVEEDRMRRAHSGHPGSPRGSLSRHPSSQLAGPGVEGGEGTQKPRDYIILAILSCFCPMWPVNIVAFAYAVMSRNSLQQGDVDGAQRLGRVAKLLSIVALVGGVLIIIASCVINLGGEWGLGTGRGGMEGLARAALLTPAPALSCLSSLPLLCLSLSPPPPVCPSLSSPTVYK

SEQ ID NO: 34143 - protein, 155 aa, Homo sapiens
  REGION 1..155: note = ENSP00000490207
MAASSSEISEMKGVEESPKVPGEGPGHSEAETGPPQVLAGVPDQPEAPQPGPNTTAAPVDSGPKAGLAPETTETPAGASETAQATDLSLSPGGESKANCSPEDPCQETVSKPEPAAGGRGRGPASGPGSQALKHRGAGGGSPHHHRLLRHQLRRV

SEQ ID NO: 34144 - protein, 287 aa, Homo sapiens
  REGION 1..287: note = ENSP00000489669
MAASSSEISEMKGVEESPKVPGEGPGHSEAETGPPQVLAGVPDQPEAPQPGPNTTAAPVDSGPKAGLAPETTETPAGASETAQATDLSLSPGGESKANCSPEDPCQETVSKPEVSKEATADQGSRLESAAPPEPAPEPAPQPDPRPDSQPTPKPALQPELPTQEDPTPEILSESVGEKQENGAVVPLQAGDGEEGPAPEPHSPPSKKSPPANGAPPRVLQQLVEEDRMRRAHSGHPGSPRGIPEQPAAGGRGRGPASGPGSQALKHRGAGGGSPHHHRLLRHQLRRV

SEQ ID NO: 34145 - protein, 299 aa, Homo sapiens; identical to SEQ ID NO: 34139
  REGION 1..299: note = ENSP00000300797

SEQ ID NO: 34146 - protein, 286 aa, Homo sapiens
  REGION 1..286: note = ENSP00000489782
MAASSSEISEMKGVEESPKVPGEGPGHSEAETGPPQVLAGVPDQPEAPQPGPNTTAAPVDSGPKAGLAPETTETPAGASETAQATDLSLSPGGESKANCSPEDPCQETVSKPEVSKEATADQGSRLESAAPPEPAPEPAPQPDPRPDSQPTPKPALQPELPTQEDPTPEILSESVGEKQENGAVVPLQAGDGEEGPAPEPHSPPSKKSPPANGAPPRVLQQLVEEDRMRRAHSGHPGSPRVPEQPAAGGRGRGPASGPGSQALKHRGAGGGSPHHHRLLRHQLRRV

SEQ ID NO: 34147 - protein, 340 aa, Homo sapiens; identical to SEQ ID NO: 34138
  REGION 1..340: note = ENSP00000458291

SEQ ID NO: 34148 - protein, 340 aa, Homo sapiens; identical to SEQ ID NO: 34138
  REGION 1..340: note = ENSP00000490826

SEQ ID NO: 34149 - protein, 118 aa, Homo sapiens
  REGION 1..118: note = ENSP00000489948
MAASSSEISEMKGVEESPKVPGEGPGHSEAETGPPQVLAGVPDQPEAPQPGPNTTAAPVDSGPKAGLAPETTETPAGASETAQATDLSLSPGGESKANCSPEDPCQETVSKPEVSKEA

SEQ ID NO: 34150 - protein, 33 aa, Homo sapiens
  REGION 1..33: note = ENSP00000489935
IIASCVINLGDFSSCWELPWAHPSPGGSPTDGP

SEQ ID NO: 34151 - protein, 429 aa, Homo sapiens
  REGION 1..429: note = ENSP00000419296
MARHGCLGLGLFCCVLFAATVGPQPTPSIPGAPATTLTPVPQSEASMLSLNLGLNFKFHLRGPAAVWGSPVTETQPLSLGPGQEPGEEVASGLRTDPLWELLVGSSGNSLTEWGSTEGGSKPRASSLLPESTSRRSGPSDGPTAPYQPRRSTVTWDTALMVTALPSSAPRPHQSELELKFDMALRAGAAPTLGHRTLPLLPSLRASLAEIAGRLGPFGFFGTTLSPLRNFSGLSPPGETTSTSSASGVSGSLGFLGTTLSLPPYSLERKLSSPSPLDPAASLSFASIATTSLDPTVPISGPDDLSPPASLGNPSGQPECGPGSCSVGELPEREGQPPEAPRPLFFLTLEADWAEARARWGLAWEAHVYGRLHRGLPPALPNQPATQHRGGPLQRGPACAWPLPGPCLRGRSAWARTLPHRLAGDRGQGQ

SEQ ID NO: 34152 - protein, 419 aa, Homo sapiens
  REGION 1..419: note = ENSP00000417878
  VARIANT 1: note = Any amino acid
XSKPRASSLLPESTSRRSGPSDGPTAPYQPRRSTVTWDTALMVTALPSSAPRPHQSELELKFDMALRAGAAPTLGHRTLPLLPSLRASLAEIAGRLGPFGFFGTTLSPLRNFSGLSPPGETTSTSSASGVSGSLGFLGTTLSLPPYSLERKLSSPILACRRAAGPSSSACPRATRLRCCREAGSLGPQTRSPWGAPSLAGTRSCCSCARWQGQAQTSYSRAEVAGASKARRPTRPRPRLPLPAAITPWTSARPPQSTCDAASRRPSAARPCLRLASSRALPSRTLCLGSDSTAPPRWGPGAGPVRDQGRPLAPLRPRSSPPLGLGPQAAASHLARSADSRGTARPCCCVPAPTGPRAALWSASSVPRGPQEAAPASRPQDPTRPCPHPLATPQSLLLSCRPRRPCCRSSSWTPADRSTS

SEQ ID NO: 34153 - protein, 479 aa, Homo sapiens
  REGION 1..479: note = ENSP00000419282
MARHGCLGLGLFCCVLFAATVGPQPTPSIPGAPATTLTPVPQSEASMLSLNLGLNFKFHLRGPAAVWGSPVTETQPLSLGPGQEPGEEVASGLRTDPLWELLVGSSGNSLTEWGSTEGGSKPRASSLLPESTSRRSGPSDGPTAPYQPRRSTVTWDTALMVTALPSSAPRPHQSELELKFDMALRAGAAPTLGHRTLPLLPSLRASLAEIAGRLGPFGFFGTTLSPLRNFSGLSPPGETTSTSSASGVSGSLGFLGTTLSLPPYSLERKLSSPSPLDPAASLSFASIATTSLDPTVPISGPDDLSPPASLGNPSGQPECGPGSCSVGELPEREGQPPEAPRPLFFLTLEADWAEARARWGLAWEAHVYGVGALFGLVALLALLALALLPWRCPPGAPCLALLDLLLLSAGTTRAFPLFYDAYGHRDRLPALAWLLLQDLPLPCLAAGLGLACLLLARPRPPRCPTGLAALLLLGLGLAA

SEQ ID NO: 34154 - protein, 208 aa, Homo sapiens
  REGION 1..208: note = ENSP00000420155
MARHGCLGLGLFCCVLFAATVGPQPTPSIPGAPATTLTPVPQSEASMLSLNLGLNFKFHLRGPAAVWGSPVTETQPLSLGPGQEPGEEVASGLRTDPLWELLVGSSGNSLTEWGSTEGGSKPRASSLLPESTSRRSGPSDGPTAPYQPRRSTVTWDTALMVTALPSSAPRPHQSELELKFDMALRAGAAPTLGHRTLPLLPSLRASLA

SEQ ID NO: 34155 - protein, 205 aa, Homo sapiens
  REGION 1..205: note = ENSP00000419221
MARHGCLGLGLFCCVLFAATVGPQPTPSIPGAPATTLTPVPQSEASMLSLNLGLNFKFHLRGPAAVWGSPVTETQPLSLGPGQEPGEEVASGLRTDPLWELLVGSSGNSLTEWGSTEGGSKPRASSLLPESTSRRSGPSDGPTAPYQPRRSTVTWDTALMVTALPSSAPRPHQSELELKFDMALRAGAAPTLGHRTLPLLPSLRA

SEQ ID NO: 34156 - protein, 899 aa, Homo sapiens
  REGION 1..899: note = ENSP00000445239
MARHGCLGLGLFCCVLFAATVGPQPTPSIPGAPATTLTPVPQSEASMLSLNLGLNFKFHLRGPAAVWGSPVTETQPLSLGPGQEPGEEVASGLRTDPLWELLVGSSGNSLTEWGSTEGGSKPRASSLLPESTSRRSGPSDGPTAPYQPRRSTVTWDTALMVTALPSSAPRPHQSELELKFDMALRAGAAPTLGHRTLPLLPSLRASLAEIAGRLGPFGFFGTTLSPLRNFSGLSPPGETTSTSSASGVSGSLGFLGTTLSLPPYSLERKLSSPSPLDPAASLSFASIATTSLDPTVPISGPDDLSPPASLGNPSGQPECGPGSCSVGELPEREGQPPEAPRPLFFLTLEADWAEARARWGLAWEAHVYGVGALFGLVALLALLALALLPWRCPPGAPCLALLDLLLLSAGTTRAFPLFYDAYGHRDRLPALAWLLLQDLPLPCLAAGLGLACLLLARPRPPRCPTGLAALLLLGLGLAAAAALGSAAHRPLRPLRLASRGLHAFLAAFLSGLLLALSCWGGRRRRAGAPLGGSGFKGATPLPQGRSPFAPRESWRRAARTAPVAGTFGLLSGALQGYEVLHALGYGGQSGLEGPWPWWAFQLGLRLGEVGVALPLALLGLYPALCSPRVPPRCWAKLFRLSPGHAAPLLPGGWVTGPPDKEPLGSAIARGDAELLQLCALAGPGPDLLLQGGGCRGFEGAAANPAPSPASSPCSDYTVDFRPPSPINLRRSIEEALCSEALLAPGLFQGPAFEDALPGLGLYRTASLGTGGRASERSGEASGPAAPPELPSPGAWPAGSSVSSGSFCGLSRDSSSMLLCSSPDRPPRCPLVCVLSPPRPSGSSPSLPASGSYQALSPPSRDSPEPASELQAEEALLQEQFLDACRQIDELSVGSDTIDL

SEQ ID NO: 34157 - protein, 899 aa, Homo sapiens; identical to SEQ ID NO: 34156
  REGION 1..899: note = ENSP00000415026

SEQ ID NO: 34158 - protein, 217 aa, Homo sapiens
  REGION 1..217: note = ENSP00000356734
MTSSYGHVLERQPALGGRLDSPGNLDTLQAKKNFSVSHLLDLEEAGDMVAAQADENVGEAGRSLLESPGLTSGSDTPQQDNDQLNSEEKKKRKQRRNRTTFNSSQLQALERVFERTHYPDAFVREDLARRVNLTEARVQVWFQNRRAKFRRNERAMLANKNASLLKSYSGDVTAVEQPIVPRPAPRPTDYLSWGTASPYRSSSLPRCCLHEGLHNGF

SEQ ID NO: 34159 - protein, 245 aa, Homo sapiens
  REGION 1..245: note = ENSP00000239461
MTSSYGHVLERQPALGGRLDSPGNLDTLQAKKNFSVSHLLDLEEAGDMVAAQADENVGEAGRSLLESPGLTSGSDTPQQDNDQLNSEEKKKRKQRRNRTTFNSSQLQALERVFERTHYPDAFVREDLARRVNLTEARVQVWFQNRRAKFRRNERAMLANKNASLLKSYSGDVTAVEQPIVPRPAPRPTDYLSWGTASPYSAMATYSATCANNSPAQGINMANSIANLRLKAKEYSLQRNQVPTVN

SEQ ID NO: 34160 - protein, 200 aa, Homo sapiens
  REGION 1..200: note = ENSP00000450762
MTSSYGHVLERQPALGGRLDSPGNLDTLQAKKNFSVSHLLDLEEAGDMVAAQADENVGEAGRSLLESPGLTSGSDTPQQDNDQLNSEEKKKRKQRRNRTTFNSSQLQALERVFERTHYPDAFVREDLARRVNLTEARVQVWFQNRRAKFRRNERAMLANKNASLLKSYSGDVTAVEQPIVPRPAPRPTDYLSWGTASPYR

SEQ ID NO: 34161 - protein, 352 aa, Homo sapiens
  REGION 1..352: note = ENSP00000333003
MLLFSVLLLLSLVTGTQLGPRTPLPEAGVAILGRARGAHRPQPPHPPSPVSECGDRSIFEGRTRYSRITGGMEAEVGEFPWQVSIQARSEPFCGGSILNKWWILTAAHCLYSEELFPEELSVVLGTNDLTSPSMEIKEVASIILHKDFKRANMDNDIALLLLASPIKLDDLKVPICLPTQPGPATWRECWVAGWGQTNAADKNSVKTDLMKAPMVIMDWEECSKMFPKLTKNMLCAGYKNESYDACKGDSGGPLVCTPEPGEKWYQVGIISWGKSCGEKNTPGIYTSLVNYNLWIEKVTQLEGRPFNAEKRRTSVKQKPMGSPVSGVPEPGSPRSWLLLCPLSHVLFRAILY

SEQ ID NO: 34162 - protein, 276 aa, Homo sapiens
  REGION 1..276: note = ENSP00000430459
MLLFSVLLLLSLVTGTQLGPRTPLPEAGVAILGRARGAHRPQPPHPPSPVSECGDRSIFEGRTRYSRITGGMEAEVGEFPWQVSIQARSEPFCGGSILNKWWILTAAHCLYSEELFPEELSVVLGTNDLTSPSMEIKEVASIILHKDFKRANMDNDIALLLLASPIKLDDLKVPICLPTQPGPATWRECWVAGWGQTNAADKNSVKTDLMKAPMVIMDWEECSKMFPKLTKNMLCAGYKNESYDACKQSYFPTLQRMNTGSSQTKPPGSHTFHLQN

SEQ ID NO: 34163 - protein, 182 aa, Homo sapiens
  REGION 1..182: note = ENSP00000429376
  VARIANT 1: note = Any amino acid
XWKPAPPSPVPSSHWMLTKCFPFSFPLSFFPPECGDRSIFEGRTRYSRITGGMEAEVGEFPWQVSIQARSEPFCGGSILNKWWILTAAHCLYSEELFPEELSVVLGTNDLTSPSMEIKEVASIILHKDFKRANMDNDIALLLLASPIKLDDLKVPICLPTQPGPATWRECWVAGWGQTNAGM

SEQ ID NO: 34164 - protein, 771 aa, Homo sapiens
  REGION 1..771: note = ENSP00000274710
MEEDKLLSAVPEEGDATRDPGPEPEEEPGVRNGMASEGLNSSLCSPGHERRGTPADTEEPTKDPDVAFHGLSLGLSLTNGLALGPDLNILEDSAESRPWRAGVLAEGDNASRSLYPDAEDPQLGLDGPGEPDVRDGFSATFEKILESELLRGTQYSSLDSLDGLSLTDESDSCVSFEAPLTPLIQQRARDSPEPGAGLGIGDMAFEGDMGAAGGDGELGSPLRRSISSSRSENVLSRLSLMAMPNGFHEDGPQGPGGDEDDDEEDTDKLLNSASDPSLKDGLSDSDSELSSSEGLEPGSADPLANGCQGVSEAAHRLARRLYHLEGFQRCDVARQLGKNNEFSRLVAGEYLSFFDFSGLTLDGALRTFLKAFPLMGETQERERVLTHFSRRYCQCNPDDSTSEDGIHTLTCALMLLNTDLHGHNIGKKMSCQQFIANLDQLNDGQDFAKDLLKTLYNSIKNEKLEWAIDEDELRKSLSELVDDKFGTGTKKVTRILDGGNPFLDVPQALSATTYKHGVLTRKTHADMDGKRTPRGRRGWKKFYAVLKGTILYLQKDEYRPDKALSEGDLKNAIRVHHALATRASDYSKKSNVLKLKTADWRVFLFQAPSKEEMLSWILRINLVAAIFSAPAFPAAVSSMKKFCRPLLPSCTTRLCQEEQLRSHENKLRQLTAELAEHRCHPVERGIKSKEAEEYRLKEHYLTFEKSRYETYIHLLAMKIKVGSDDLERIEARLATLEGDDPSLRKTHSSPALSQGHVTGSKTTKDATGPDT

SEQ ID NO: 34165 - protein, 310 aa, Homo sapiens
  REGION 1..310: note = ENSP00000358920
MEDLEEDVRFIVDETLDFGGLSPSDSREEEDITVLVTPEKPLRRGLSHRSDPNAVAPAPQGVRLSLGPLSPEKLEEILDEANRLAAQLEQCALQDRESAGEGLGPRRVKPSPRRETFVLKDSPVRDLLPTVNSLTRSTPSPSSLTPRLRSNDRKGSVRALRATSGKRPSNMKRESPTCNLFPASKSPASSPLTRSTPPVRGRAGPSGRAAASEETRAAKLRACQPNATHQPECATWQRCPTSGFSVNSKRASKTKHCRTQSAGKWTQGSCFPATKSSCHGCHSQQSAAPQESGSPRTYQVKRSGQQARLQ

SEQ ID NO: 34166 - protein, 333 aa, Homo sapiens
  REGION 1..333: note = ENSP00000386323
MEDLEEDVRFIVDETLDFGGLSPSDSREEEDITVLVTPEKPLRRGLSHRSDPNAVAPAPQGVRLSLGPLSPEKLEEILDEANRLAAQLEQCALQDRESAGEGLGPRRVKPSPRRETFVLKDSPVRDLLPTVNSLTRSTPSPSSLTPRLRSNDRKGSVRALRATSGKRPSNMKRESPTCNLFPASKSPASSPLTRSTPPVRGRAGPSGRAAASPPTPIRSVLAPQPSTSNSQRLPRPQGAAAKSSSQLPIPSAIPRPASRMPLTSRSVPPGRGALPPDSLSTRKGLPRPSTAGHRVRESGHKVPVSQRLNLPVMGATRSNLQPPRKVAVPGPTR

SEQ ID NO: 34167 - protein, 333 aa, Homo sapiens; identical to SEQ ID NO: 34166
  REGION 1..333: note = ENSP00000358923

SEQ ID NO: 34168 - protein, 363 aa, Homo sapiens
  REGION 1..363: note = ENSP00000474667
MEDLEEDVRFIVDETLDFGGLSPSDSREEEDITVLVTPEKPLRRGLSHRSDPNAVAPAPQGVRLSLGPLSPEKLEEILDEANRLAAQLEQCALQDRESAGEGLGPRRVKPSPRRETFVLKDSPVRDLLPTVNSLTRSTPSPSSLTPRLRSNDRKGSVRALRATSGKRPSNMKRESPTCNLFPASKSPASSPLTRSTPPVRGRAGPSGRAAASEETRAAKLRVSGSGEFVGLTLKFLHPSPPGPPTPIRSVLAPQPSTSNSQRLPRPQGAAAKSSSQLPIPSAIPRPASRMPLTSRSVPPGRGALPPDSLSTRKGLPRPSTAGHRVRESGHKVPVSQRLNLPVMGATRSNLQPPRKVAVPGPTR

SEQ ID NO: 34169 - protein, 333 aa, Homo sapiens; identical to SEQ ID NO: 34166
  REGION 1..333: note = ENSP00000358919

SEQ ID NO: 34170 - protein, 122 aa, Homo sapiens
  REGION 1..122: note = ENSP00000474682
  VARIANT 1: note = Any amino acid
XKGSVRALRATSGKRPSNMKRESPTCNLFPASKSPASSPLTRSTPPVRGRAGPSGRAAASEETRAAKLRGAAAKSSSQLPIPSAIPRPASRMPLTSRSVPPGRGALPPDSLSTRKGLPRPST

SEQ ID NO: 34171 - protein, 231 aa, Homo sapiens
  REGION 1..231: note = ENSP00000387791
MEDLEEDVRFIVDETLDFGGLSPSDSREEEDITVLVTPEKPLRRGLSHRSDPNAVAPAPQGVRLSLGPLSPEKLEEILDEANRLAAQLEQCALQDRESAGEGLGPRRVKPSPRRETFVLKDSPVRDLLPTVNSLTRSTPSPSSLTPRLRSNDRKGSVRALRATSGKRPSNMKRESPTCNLFPASKSPASSPLTRSTPPVRGRAGPSGRAAASPPTPIRSVLAPQPSTSNSQ

SEQ ID NO: 34172 - protein, 205 aa, Homo sapiens
  REGION 1..205: note = ENSP00000413186
MEDLEEDVRFIVDETLDFGGLSPSDSREEEDITVLVTPEKPLRRGLSHRSDPNAVAPAPQGVRLSLGPLSPEKLEEILDEANRLAAQLEQCALQDRESAGEGLGPRRVKPSPRRETFVLKDSPVRDLLPTVNSLTRSTPSPSSLTPRLRSNDRKGSVRALRATSGKRPSNMKRESPTCNLFPASKSPASSPLTRSTPPVRGRAGP

SEQ ID NO: 34173 - protein, 333 aa, Homo sapiens; identical to SEQ ID NO: 34166
  REGION 1..333: note = ENSP00000358925

SEQ ID NO: 34174 - protein, 312 aa, Homo sapiens
  REGION 1..312: note = ENSP00000468622
MTRSLFKGNFWSADILSTIGYDNIIQHLNNGRKNCKEFEDFLKERAAIEERYGKDLLNLSRKKPCGQSEINTLKRALEVFKQQVDNVAQCHIQLAQSLREEARKMEEFREKQKLQRKKTELIMDAIHKQKSLQFKKTMDAKKNYEQKCRDKDEAEQAVSRSANLVNPKQQEKLFVKLATSKTAVEDSDKAYMLHIGTLDKVREEWQSEHIKACEAFEAQECERINFFRNALWLHVNQLSQQCVTSDEHPSCMRISTPPRRMQSQQERLQGLTWQGEDPSQFLKAHQMIPITLWLMTTVCSISKINETRAFSG

SEQ ID NO: 34175 - protein, 334 aa, Homo sapiens
  REGION 1..334: note = ENSP00000387261
MTRSLFKGNFWSADILSTIGYDNIIQHLNNGRKNCKEFEDFLKERAAIEERYGKDLLNLSRKKPCGQSEINTLKRALEVFKQQVDNVAQCHIQLAQSLREEARKMEEFREKQKLQRKKTELIMDAIHKQKSLQFKKTMDAKKNYEQKCRDKDEAEQAVSRSANLVNPKQQEKLFVKLATSKTAVEDSDKAYMLHIGTLDKVREEWQSEHIKACEAFEAQECERINFFRNALWLHVNQLSQQCVTSDEMYEQVRKSLEMCSIQRDIEYFVNQRKTGQIPPAPIMYENFYSSQKNAVPAGKATGPNLARRGPLPIPKSSPDDPNYSLVDDYSLLYQ

SEQ ID NO: 34176 - protein, 88 aa, Homo sapiens
  REGION 1..88: note = ENSP00000413169
  VARIANT 1: note = Any amino acid
XFDFIVRYFFAALTVLTLLGLLHGLVLLPVLLSILGPPPEVIQMYKESPEILSPPAPQGGGLRVGSLQVNISYWKELLWCQDLRPEEI

SEQ ID NO: 34177 - protein, 1203 aa, Homo sapiens
  REGION 1..1203: note = ENSP00000361266
MTRSPPLRELPPSYTPPARTAAPQILAGSLKAPLWLRAYFQGLLFSLGCGIQRHCGKVLFLGLLAFGALALGLRMAIIETNLEQLWVEVGSRVSQELHYTKEKLGEEAAYTSQMLIQTARQEGENILTPEALGLHLQAALTASKVQVSLYGKSWDLNKICYKSGVPLIENGMIERMIEKLFPCVILTPLDCFWEGAKLQGGSAYLPGRPDIQWTNLDPEQLLEELGPFASLEGFRELLDKAQVGQAYVGRPCLHPDDLHCPPSAPNHHSRQAPNVAHELSGGCHGFSHKFMHWQEELLLGGMARDPQGELLRAEALQSTFLLMSPRQLYEHFRGDYQTHDIGWSEEQASTVLQAWQRRFVQLAQEALPENASQQIHAFSSTTLDDILHAFSEVSAARVVGGYLLMLAYACVTMLRWDCAQSQGSVGLAGVLLVALAVASGLGLCALLGITFNAATTQVLPFLALGIGVDDVFLLAHAFTEALPGTPLQERMGECLQRTGTSVVLTSINNMAAFLMAALVPIPALRAFSLQAAIVVGCTFVAVMLVFPAILSLDLRRRHCQRLDVLCCFSSPCSAQVIQILPQELGDGTVPVGIAHLTATVQAFTHCEASSQHVVTILPPQAHLVPPPSDPLGSELFSPGGSTRDLLGQEEETRQKAACKSLPCARWNLAHFARYQFAPLLLQSHAKAIVLVLFGALLGLSLYGATLVQDGLALTDVVPRGTKEHAFLSAQLRYFSLYEVALVTQGGFDYAHSQRALFDLHQRFSSLKAVLPPPATQAPRTWLHYYRNWLQGIQAAFDQDWASGRITRHSYRNGSEDGALAYKLLIQTGDAQEPLDFSQLTTRKLVDREGLIPPELFYMGLTVWVSSDPLGLAASQANFYPPPPEWLHDKYDTTGENLRIPPAQPLEFAQFPFLLRGLQKTADFVEAIEGARAACAEAGQAGVHAYPSGSPFLFWEQYLGLRRCFLLAVCILLVCTFLVCALLLLNPWTAGLIVLVLAMMTVELFGIMGFLGIKLSAIPVVILVASVGIGVEFTVHVALGFLTTQGSRNLRAAHALEHTFAPVTDGAISTLLGLLMLAGSHFDFIVRYFFAALTVLTLLGLLHGLVLLPVLLSILGPPPEVIQMYKESPEILSPPAPQGGGLRWGASSSLPQSFARVTTSMTVAIHPPPLPGAYIHPAPDEPPWSPAATSSGNLSSRGPGPATG

SEQ ID NO: 34178 - protein, 1146 aa, Homo sapiens
  REGION 1..1146: note = ENSP00000389703
MTRSPPLRELPPSYTPPARTAAPQILAGSLKAPLWLRAYFQGLLFSLGCGIQRHCGKVLFLGLLAFGALALGLRMAIIETNLEQLWVEVGSRVSQELHYTKEKLGEEAAYTSQMLIQTARQEGENILTPEALGLHLQAALTASKVQVSLYGKSWDLNKICYKSGVPLIENGMIERMIEKLFPCVILTPLDCFWEGAKLQGGSAYLPGRPDIQWTNLDPEQLLEELGPFASLEGFRELLDKAQVGQAYVGRPCLHPDDLHCPPSAPNHHSRQAPNVAHELSGGCHGFSHKFMHWQEELLLGGMARDPQGELLRAEALQSTFLLMSPRQLYEHFRGDYQTHDIGWSEEQASTVLQAWQRRFVQLAQEALPENASQQIHAFSSTTLDDILHAFSEVSAARVVGGYLLMLAYACVTMLRWDCAQSQGSVGLAGVLLVALAVASGLGLCALLGITFNAATTQVLPFLALGIGVDDVFLLAHAFTEALPGTPLQERMGECLQRTGTSVVLTSINNMAAFLMAALVPIPALRAFSLQAAIVVGCTFVAVMLVFPAILSLDLRRRHCQRLDVLCCFSSPCSAQVIQILPQELGDGTVPVGIAHLTATVQAFTHCEASSQHVVTILPPQAHLVPPPSDPLGSELFSPGGSTRDLLGQEEETRQKAACKSLPCARWNLAHFARYQFAPLLLQSHAKAIVLVLFGALLGLSLYGATLVQDGLALTDVVPRGTKEHAFLSAQLRYFSLYEVALVTQGGFDYAHSQRALFDLHQRFSSLKAVLPPPATQAPRTWLHYYRNWLQGIQAAFDQDWASGRITRHSYRNGSEDGALAYKLLIQTGDAQEPLDFSQLTTRKLVDREGLIPPELFYMGLTVWVSSDPLGLAASQANFYPPPPEWLHDKYDTTGENLRIPPAQPLEFAQFPFLLRGLQKTADFVEAIEGARAACAEAGQAGVHAYPSGSPFLFWEQYLGLRRCFLLAVCILLVCTFLVCALLLLNPWTAGLIVLVLAMMTVELFGIMGFLGIKLSAIPVVILVASVGIGVEFTVHVALGFLTTQGSRNLRAAHALEHTFAPVTDGAISTLLGLLMLAGSHFDFIVRYFFAALTVLTLLGLLHGLVLLPVLLSILGPPPEVIQMYKESPEILSPPAPQGGGLRPEEI

SEQ ID NO: 34179 - protein, 888 aa, Homo sapiens
  REGION 1..888: note = ENSP00000368666
MLRQVLHRGLRTCFSRLGHFIASHPVFFASAPVLISILLGASFSRYQVEESVEHLLAPQHSLAKIERNLVNSLFPVNRSKHRLYSDLQTPGRYGRVIVTSFQKANMLDQHHTDLILKLHAAVTKIQVPRPGFNYTFAHICILNNDKTCIVDDIVHVLEELKNARATNRTNFAITYPITHLKDGRAVYNGHQLGGVTVHSKDRVKSAEAIQLTYYLQSINSLNDMVAERWESSFCDTVRLFQKSNSKVKMYPYTSSSLREDFQKTSRVSERYLVTSLILVVTMAILCCSMQDCVRSKPWLGLLGLVTISLATLTAAGIINLTGGKYNSTFLGVPFVMLGHGLYGTFEMLSSWRKTREDQHVKERTAAVYADSMLSFSLTTAMYLVTFGIGASPFTNIEAARIFCCNSCIAIFFNYLYVLSFYGSSLVFTGYIENNYQHSIFCRKVPKPEALQEKPAWYRFLLTARFSEDTAEGEEANTYESHLLVCFLKRYYCDWITNTYVKPFVVLFYLIYISFALMGYLQVSEGSDLSNIVATATQTIEYTTAQQKYFSNYSPVIGFYIYESIEYWNTSVQEDVLEYTKGFVRISWFESYLNYLRKLNVSTGLPKKNFTDMLRNSFLKAPQFSHFQEDIIFSKKYNDEVDVVASRMFLVAKTMETNREELYDLLETLRRLSVTSKVKFIVFNPSFVYMDRYASSLGAPLHNSCISALFLLFFSAFLVADSLINVWITLTVVSVEFGVIGFMTLWKVELDCISVLCLIYGINYTIDNCAPMLSTFVLGKDFTRTKWVKNALEVHGVAILQSYLCYIVGLIPLAAVPSNLTCTLFRCLFLIAFVTFFHCFAILPVILTFLPPSKKKRKEKKNPENREEIECVEMVDIDSTRVVDQITTV

SEQ ID NO: 34180 - protein, 103 aa, Homo sapiens
  REGION 1..103: note = ENSP00000406663
  VARIANT 1: note = Any amino acid
XERNLVNSLFPVNRSKHRLYSDLQTPGRYGRVIVTSFQKANMLDQHHTDLILKVMDYMGLLKCYPPGGKLEKTNMLKRELQQSMQTPCSPFLSPLPCTWSPLA

SEQ ID NO: 34181 - protein, 846 aa, Homo sapiens
  REGION 1..846: note = ENSP00000341914
MCFLRRPGAPASWIWWRMLRQVLRRGLQSFCHRLGLCVSRHPVFFLTVPAVLTITFGLSALNRFQPEGDLERLVAPSHSLAKIERSLASSLFPLDQSKSQLYSDLHTPGRYGRVILLSPTGDNILLQAEGILQTHRAVLEMKDGRNSFIGHQLGGVVEVPNSKDQRVKSARAIQITYYLQTYGSATQDLIGEKWENEFCKLIRKLQEEHQELQLYSLASFSLWRDFHKTSILARSKVLVSLVLILTTATLSSSMKDCLRSKPFLGLLGVLTVCISIITAAGIFFITDGKYNSTLLGIPFFAMGHGTKGVFELLSGWRRTKENLPFKDRIADAYSDVMVTYTMTSSLYFITFGMGASPFTNIEAVKVFCQNMCVSILLNYFYIFSFFGSCLVFAGQLEQNRYHSIFCCKIPSAEYLDRKPVWFQTVMSDGHQQTSHHETNPYQHHFIQHFLREHYNEWITNIYVKPFVVILYLIYASFSFMGCLQISDGANIINLLASDSPSVSYAMVQQKYFSNYSPVIGFYVYEPLEYWNSSVQDDLRRLCSGFTAVSWVEQYYQFLKVSNVSANNKSDFISVLQSSFLKKPEFQHFRNDIIFSKAGDESNIIASRLYLVARTSRDKQKEITEVLEKLRPLSLSKSIRFIVFNPSFVFMDHYSLSVTVPVLIAGFGVLLVLILTFFLVIHPLGNFWLILSVTSIELGVLGLMTLWNVDMDCISILCLIYTLNFAIDHCAPLLFTFVLATEHTRTQCIKSSLQDHGTAILQNVTSFLIGLVPLLFVPSNLTFTLFKCLLLTGGCTLLHCFVILPVFLTFFPPSKKHHKKKKRAKRKEREEIECIEIQENPDHVTTV

SEQ ID NO: 34182 - protein, 311 aa, Homo sapiens
  REGION 1..311: note = ENSP00000381722
  VARIANT 1: note = Any amino acid
XCFLRRPGAPASWIWWRMLRQVLRRGLQSFCHRLGLCVSRHPVFFLTVPAVLTITFGLSALNRFQPEGDLERLVAPSHSLAKIERSLASSLFPLDQSKSQLYSDLHTPGRYGRVILLSPTGDNILLQAEGILQTHRAVLEMKDGRNSFIGHQLGGVVEVPNSKDQRVKSARAIQITYYLQTYGSATQDLIGEKWENEFCKLIRKLQEEHQELQLYSLASFSLWRDFHKTSILARSKVLVSLVLILTTATLSSSMKDCLRSKPFLGLLGVLTVCISIITAAGIFFITDGKYNSTLLGIPFFAMGISTEFTSS

SEQ ID NO: 34183 - protein, 349 aa, Homo sapiens
  REGION 1..349: note = ENSP00000439485
MSSLSGKVQTVLGLVEPSKLGRTLTHEHLAMTFDCCYCPPPPCQEAISKEPIVMKNLYWIQKNAYSHKENLQLNQETEAIKEELLYFKANGGGALVENTTTGISRDTQTLKRLAEETGVHIISGAGFYVDATHSSETRAMSVEQLTDVLMNEILHGADGTSIKCGIIGEIGCSWPLTESERKVLQATAHAQAQLGCPVIIHPGRSSRAPFQIIRILQEAGADISKTVMSHLDRTILDKKELLEFAQLGCYLEYDLFGTELLHYQLGPDIDMPDDNKRIRRVRLLVEEGCEDRILVAHDIHTKTRLMKYGGHGYSHILTNVVPKMLLRGITENVLDKILIENPKQWLTFK

SEQ ID NO: 34184 - protein, 349 aa, Homo sapiens; identical to SEQ ID NO: 34183
  REGION 1..349: note = ENSP00000367239

SEQ ID NO: 34185 - protein, 200 aa, Homo sapiens
  REGION 1..200: note = ENSP00000389535
MNEILHGADGTSIKCGIIGEIGCSWPLTESERKVLQATAHAQAQLGCPVIIHPGRSSRAPFQIIRILQEAGADISKTVMSHLDRTILDKKELLEFAQLGCYLEYDLFGTELLHYQLGPDIDMPDDNKRIRRVRLLVEEGCEDRILVAHDIHTKTRLMKYGGHGYSHILTNVVPKMLLRGITENVLDKILIENPKQWLTFK

SEQ ID NO: 34186 - protein, 302 aa, Homo sapiens
  REGION 1..302: note = ENSP00000298942
MSSLSGKVQTVLGLVEPSKLGRTLTHEHLAMTFDCCYCPPPPCQEAISKEPIVMKNLYWIQKNAYSHKENLQLNQETEAIKEELLYFKANGGGALVENTTTGISRDTQTLKRLAEETGVHIISGAGFYVDATHSSETRAMSVEQLTDVLMNEILHGADGTSIKCGIIGEIGCSWPLTESERKVLQATAHAQAQLGCPVIIHPGRSSRAPFQIIRILQEAGADISKTVMSHLDRVRLLVEEGCEDRILVAHDIHTKTRLMKYGGHGYSHILTNVVPKMLLRGITENVLDKILIENPKQWLTFK

SEQ ID NO: 34187 - protein, 160 aa, Homo sapiens
  REGION 1..160: note = ENSP00000262033
MQPASAKWYDRRDYVFIEFCVEDSKDVNVNFEKSKLTFSCLGGSDNFKHLNEIDLFHCIDPNDSKHKRTDRSILCCLRKGESGQSWPRLTKERAKLNWLSVDFNNWKDWEDDSDEDMSNFDRFSEMMNNMGGDEDVDLPEVDGADDDSQDSDDEKMPDLE

SEQ ID NO: 34188 - protein, 130 aa, Homo sapiens
  REGION 1..130: note = ENSP00000405299
MQPASAKWYDRRDYVFIEFCVEDSKDVNVNFEKSKLTFSCLGGSDNFKHLNEIDLFHCIDPNDSKHKRTDRSILCCLRKGESGQSWPRLTKERAKMMNNMGGDEDVDLPEVDGADDDSQDSDDEKMPDLE

SEQ ID NO: 34189 - protein, 127 aa, Homo sapiens
  REGION 1..127: note = ENSP00000402385
MQPASAKWYDRRDYVFIEFCVEDSKDVNVNFEKSKLTFSCLGGSDNFKHLNEIDLFHCIDPNLNWLSVDFNNWKDWEDDSDEDMSNFDRFSEMMNNMGGDEDVDLPEVDGADDDSQDSDDEKMPDLE

SEQ ID NO: 34190 - protein, 139 aa, Homo sapiens
  REGION 1..139: note = ENSP00000414892
MQPASAKWYDRRDYVFIEFCVEDSKDVNVNFEKSKLTFSCLGGSDNFKHLNEIDLFHCIDPNDSKHKRTDRSILCCLRKGESGQSWPRLTKERAKLNWLSVDFNNWKDWEDDSDEDMSNFDRFSEDSQDSDDEKMPDLE

SEQ ID NO: 34191 - protein, 124 aa, Homo sapiens
  REGION 1..124: note = ENSP00000389090
MQPASAKWYDRRDYVFIEFCVEDSKDVNVNFEKSKLTFSCLRKGESGQSWPRLTKERAKLNWLSVDFNNWKDWEDDSDEDMSNFDRFSEMMNNMGGDEDVDLPEVDGADDDSQDSDDEKMPDLE

SEQ ID NO: 34192 - protein, 164 aa, Homo sapiens
  REGION 1..164: note = ENSP00000482075
MSLEKQPASAKWYDRRDYVFIEFCVEDSKDVNVNFEKSKLTFSCLGGSDNFKHLNEIDLFHCIDPNDSKHKRTDRSILCCLRKGESGQSWPRLTKERAKLNWLSVDFNNWKDWEDDSDEDMSNFDRFSEMMNNMGGDEDVDLPEVDGADDDSQDSDDEKMPDLE

SEQ ID NO: 34193 - protein, 879 aa, Homo sapiens
  REGION 1..879: note = ENSP00000376899
MGRLASRPLLLALLSLALCRGRVVRVPTATLVRVVGTELVIPCNVSDYDGPSEQNFDWSFSSLGSSFVELASTWEVGFPAQLYQERLQRGEILLRRTANDAVELHIKNVQPSDQGHYKCSTPSTDATVQGNYEDTVQVKVLADSLHVGPSARPPPSLSLREGEPFELRCTAASASPLHTHLALLWEVHRGPARRSVLALTHEGRFHPGLGYEQRYHSGDVRLDTVGSDAYRLSVSRALSADQGSYRCIVSEWIAEQGNWQEIQEKAVEVATVVIQPSVLRAAVPKNVSVAEGKELDLTCNITTDRADDVRPEVTWSFSRMPDSTLPGSRVLARLDRDSLVHSSPHVALSHVDARSYHLLVRDVSKENSGYYYCHVSLWAPGHNRSWHKVAEAVSSPAGVGVTWLEPDYQVYLNASKVPGFADDPTELACRVVDTKSGEANVRFTVSWYYRMNRRSDNVVTSELLAVMDGDWTLKYGERSKQRAQDGDFIFSKEHTDTFNFRIQRTTEEDRGNYYCVVSAWTKQRNNSWVKSKDVFSKPVNIFWALEDSVLVVKARQPKPFFAAGNTFEMTCKVSSKNIKSPRYSVLIMAEKPVGDLSSPNETKYIISLDQDSVVKLENWTDASRVDGVVLEKVQEDEFRYRMYQTQVSDAGLYRCMVTAWSPVRGSLWREAATSLSNPIEIDFQTSGPIFNASVHSDTPSVIRGDLIKLFCIITVEGAALDPDDMAFDVSWFAVHSFGLDKAPVLLSSLDRKGIVTTSRRDWKSDLSLERVSVLEFLLQVHGSEDQDFGNYYCSVTPWVKSPTGSWQKEAEIHSKPVFITVKMDVLNAFKYPLLIGVGLSTVIGLLSCLIGYCSSHWCCKKEVQETRRERRRLMSMEMD

SEQ ID NO: 34194 - protein, 1009 aa, Homo sapiens
  REGION 1..1009: note = ENSP00000380638
MSGVSEPLSRVKLGTLRRPEGPAEPMVVVPVDVEKEDVRILKVCFYSNSFNPGKNFKLVKCTVQTEIREIITSILLSGRIGPNIRLAECYGLRLKHMKSDEIHWLHPQMTVGEVQDKYECLHVEAEWRYDLQIRYLPEDFMESLKEDRTTLLYFYQQLRNDYMQRYASKVSEGMALQLGCLELRRFFKDMPHNALDKKSNFELLEKEVGLDLFFPKQMQENLKPKQFRKMIQQTFQQYASLREEECVMKFFNTLAGFANIDQETYRCELIQGWNITVDLVIGPKGIRQLTSQDAKPTCLAEFKQIRSIRCLPLEEGQAVLQLGIEGAPQALSIKTSSLAEAENMADLIDGYCRLQGEHQGSLIIHPRKDGEKRNSLPQIPMLNLEARRSHLSESCSIESDIYAEIPDETLRRPGGPQYGIAREDVVLNRILGEGFFGEVYEGVYTNHKGEKINVAVKTCKKDCTLDNKEKFMSEAVIMKNLDHPHIVKLIGIIEEEPTWIIMELYPYGELGHYLERNKNSLKVLTLVLYSLQICKAMAYLESINCVHRDIAVRNILVASPECVKLGDFGLSRYIEDEDYYKASVTRLPIKWMSPESINFRRFTTASDVWMFAVCMWEILSFGKQPFFWLENKDVIGVLEKGDRLPKPDLCPPVLYTLMTRCWDYDPSDRPRFTELVCSLSDVYQMEKDIAMEQERNARYRTPKILEPTAFQEPPPKPSRPKYRPPPQTNLLAPKLQFQVPEGLCASSPTLTSPMEYPSPVNSLHTPPLHRHNVFKRHSMREEDFIQPSSREEAQQLWEAEKVKMRQILDKQQKQMVEDYQWLRQEEKSLDPMVYMNDKSPLTPEKEVGYLEFTGPPQKPPRLGAQSIQPTANLDRTDDLVYLNVMELVRAVLELKNELCQLPPEGYVVVVKNVGLTLRKLIGSVDDLLPSLPSSSRTEIEGTQKLLNKDLAELINKMRLAQQNAVTSLSEECKRQMLTASHTLAVDAKNLLDAVDQAKVLANLAHPPAE

SEQ ID NO: 34195 - protein, 68 aa, Homo sapiens
  REGION 1..68: note = ENSP00000429694
MSGVSEPLSRVKLGTLRRPEGPAEPMVVVPVDVEKEDVRILKVCFYSNSFNPGKNFKLVKCTVQTEIR

SEQ ID NO: 34196 - protein, 103 aa, Homo sapiens
  REGION 1..103: note = ENSP00000430404
MSGVSEPLSRVKLGTLRRPEGPAEPMVVVPVDVEKEDVRILKVCFYSNSFNPGKNFKLVKCTVQTEIREIITSILLSGRIGPNIRLAECYGLRLKHMKSDEIH

SEQ ID NO: 34197 - protein, 1009 aa, Homo sapiens; identical to SEQ ID NO: 34194
  REGION 1..1009: note = ENSP00000332816

SEQ ID NO: 34198 - protein, 184 aa, Homo sapiens
  REGION 1..184: note = ENSP00000428271
MSGVSEPLSRVKLGTLRRPEGPAEPMVVVPVDVEKEDVRILKVCFYSNSFNPGKNFKLVKCTVQTEIREIITSILLSGRIGPNIRLAECYGLRLKHMKSDEIHWLHPQMTVGEVQDKYECLHVEAEWRYDLQIRYLPEDFMESLKEDRTTLLYFYQQLRNDYMQRYASKVSEGMALQLGCLELR

SEQ ID NO: 34199 - protein, 213 aa, Homo sapiens
  REGION 1..213: note = ENSP00000416174
MSGVSEPLSRVKLGTLRRPEGPAEPMVVVPVDVEKEDVRILKVCFYSNSFNPGKNFKLVKCTVQTEIREIITSILLSGRIGPNIRLAECYGLRLKHMKSDEIHWLHPQMTVGEVQDKYECLHVEAEWRYDLQIRYLPEDFMESLKEDRTTLLYFYQQLRNDYMQRYASKVSEGMALQLGCLELRRFFKDMPHNALDKKSNFELLEKEVGLDLF

SEQ ID NO: 34200 - protein, 967 aa, Homo sapiens
  REGION 1..967: note = ENSP00000427931
MSGVSEPLSRVKLGTLRRPEGPAEPMVVVPVDVEKEDVRILKVCFYSNSFNPGKNFKLVKCTVQTEIREIITSILLSGRIGPNIRLAECYGLRLKHMKSDEIHWLHPQMTVGEVQDKYECLHVEAEWRYDLQIRYLPEDFMESLKEDRTTLLYFYQQLRNDYMQRYASKVSEGMALQLGCLELRRFFKDMPHNALDKKSNFELLEKEVGLDLFFPKQMQENLKPKQFRKMIQQTFQQYASLREEECVMKFFNTLAGFANIDQETYRCELIQGWNITVDLVIGPKGIRQLTSQDAKPTCLAEFKQIRSIRCLPLEEGQAVLQLGIEGAPQALSIKTSSLAEAENMADLIDGYCRLQGEHQGSLIIHPRKDGEKRNSLPQIPMLNLEARRSHLSESCSIESDIYAEIPDETLRRPGGPQYGIAREDVVLNRILGEGFFGEVYEGVYTNHKGEKINVAVKTCKKDCTLDNKEKFMSEAVIMKNLDHPHIVKLIGIIEEEPTWIIMELYPYGELGHYLERNKNSLKVLTLVLYSLQICKAMAYLESINCVHRDIAVRNILVASPECVKLGDFGLSRYIEDEDYYKASVTRLPIKWMSPESINFRRFTTASDVWMFAVCMWEILSFGKQPFFWLENKDVIGVLEKGDRLPKPDLCPPVLYTLMTRCWDYDPSDRPRFTELVCSLSDVYQMEKDIAMEQERNARYRTPKILEPTAFQEPPPKPSRPKYRPPPQTNLLAPKLQFQEEDFIQPSSREEAQQLWEAEKVKMRQILDKQQKQMVEDYQWLRQEEKSLDPMVYMNDKSPLTPEKEVGYLEFTGPPQKPPRLGAQSIQPTANLDRTDDLVYLNVMELVRAVLELKNELCQLPPEGYVVVVKNVGLTLRKLIGSVDDLLPSLPSSSRTEIEGTQKLLNKDLAELINKMRLAQQNAVTSLSEECKRQMLTASHTLAVDAKNLLDAVDQAKVLANLAHPPAE

SEQ ID NO: 34201 - protein, 194 aa, Homo sapiens
  REGION 1..194: note = ENSP00000428837
  VARIANT 1: note = Any amino acid
XRKMIQQTFQQYASLREEECVMKFFNTLAGFANIDQETYRCELIQGWNITVDLVIGPKGIRQLTSQDAKPTCLAEFKQIRSIRCLPLEEGQAVLQLGIEGAPQALSIKTSSLAEAENMADLIDGYCRLQDGEKRNSLPQIPMLNLEARRSHLSESCSIESDIYAEIPDETLRRPGGPQYGIAREDVVLNRILGE

SEQ ID NO: 34202 - protein, 967 aa, Homo sapiens; identical to SEQ ID NO: 34200
  REGION 1..967: note = ENSP00000391995

SEQ ID NO: 34203 - protein, 1070 aa, Homo sapiens
  REGION 1..1070: note = ENSP00000230419
MGAARGSPARPRRLPLLSVLLLPLLGGTQTAIVFIKQPSSQDALQGRRALLRCEVEAPGPVHVYWLLDGAPVQDTERRFAQGSSLSFAAVDRLQDSGTFQCVARDDVTGEEARSANASFNIKWIEAGPVVLKHPASEAEIQPQTQVTLRCHIDGHPRPTYQWFRDGTPLSDGQSNHTVSSKERNLTLRPAGPEHSGLYSCCAHSAFGQACSSQNFTLSIADESFARVVLAPQDVVVARYEEAMFHCQFSAQPPPSLQWLFEDETPITNRSRPPHLRRATVFANGSLLLTQVRPRNAGIYRCIGQGQRGPPIILEATLHLAEIEDMPLFEPRVFTAGSEERVTCLPPKGLPEPSVWWEHAGVRLPTHGRVYQKGHELVLANIAESDAGVYTCHAANLAGQRRQDVNITVATVPSWLKKPQDSQLEEGKPGYLDCLTQATPKPTVVWYRNQMLISEDSRFEVFKNGTLRINSVEVYDGTWYRCMSSTPAGSIEAQARVQVLEKLKFTPPPQPQQCMEFDKEATVPCSATGREKPTIKWERADGSSLPEWVTDNAGTLHFARVTRDDAGNYTCIASNGPQGQIRAHVQLTVAVFITFKVEPERTTVYQGHTALLQCEAQGDPKPLIQWKGKDRILDPTKLGPRMHIFQNGSLVIHDVAPEDSGRYTCIAGNSCNIKHTEAPLYVVDKPVPEESEGPGSPPPYKMIQTIGLSVGAAVAYIIAVLGLMFYCKKRCKAKRLQKQPEGEEPEMECLNGGPLQNGQPSAEIQEEVALTSLGSGPAATNKRHSTSDKMHFPRSSLQPITTLGKSEFGEVFLAKAQGLEEGVAETLVLVKSLQSKDEQQQLDFRRELEMFGKLNHANVVRLLGLCREAEPHYMVLEYVDLGDLKQFLRISKSKDEKLKSQPLSTKQKVALCTQVALGMEHLSNNRFVHKDLAARNCLVSAQRQVKVSALGLSKDVYNSEYYHFRQAWVPLRWMSPEAILEGDFSTKSDVWAFGVLMWEVFTHGEMPHGGQADDEVLADLQAGKARLPQPEGCPSKLYRLMQRCWALSPKDRPSFSEIASALGDSTVDSKP

SEQ ID NO: 34204 - protein, 139 aa, Homo sapiens
  REGION 1..139: note = ENSP00000417607
MGAARGSPARPRRLPLLSVLLLPLLGGTQTAIVFIKQPSSQDALQGRRALLRCEVEAPGPVHVYWLLDGAPVQDTERRFAQGSSLSFAAVDRLQDSGTFQCVARDDVTGEEARSANASFNIKCESQGGCAQSPCQTLND

SEQ ID NO: 34205 - protein, 157 aa, Homo sapiens
  REGION 1..157: note = ENSP00000420322
MGAARGSPARPRRLPLLSVLLLPLLGGTQTAIVFIKQPSSQDALQGRRALLRCEVEAPGPVHVYWLLDGAPVQDTERRFAQGSSLSFAAVDRLQDSGTFQCVARDDVTGEEARSANASFNIKWIEAGPVVLKHPASEAEIQPQTQVTLRCHIDGHPR

SEQ ID NO: 34206 - protein, 459 aa, Homo sapiens
  REGION 1..459: note = ENSP00000419037
MGAARGSPARPRRLPLLSVLLLPLLGGTQTAIVFIKQPSSQDALQGRRALLRCEVEAPGPVHVYWLLDGAPVQDTERRFAQGSSLSFAAVDRLQDSGTFQCVARDDVTGEEARSANASFNIKWIEAGPVVLKHPASEAEIQPQTQVTLRCHIDGHPRPTYQWFRDGTPLSDGQSNHTVSSKERNLTLRPAGPEHSGLYSCCAHSAFGQACSSQNFTLSIADESFARVVLAPQDVVVARYEEAMFHCQFSAQPPPSLQWLFEDETPITNRSRPPHLRRATVFANGSLLLTQVRPRNAGIYRCIGQGQRGPPIILEATLHLAEIEDMPLFEPRVFTAGSEERVTCLPPKGLPEPSVWWEHAGVRLPTHGRVYQKGHELVLANIAESDAGVYTCHAANLAGQRRQDVNITVASEHLCPEGQGEVEGNTGLGVMDRGFPGTHLRSSQFWALQAWESVHYWESV

SEQ ID NO: 34207 - protein, 940 aa, Homo sapiens
  REGION 1..940: note = ENSP00000325462
MGAARGSPARPRRLPLLSVLLLPLLGGTQTAIVFIKQPSSQDALQGRRALLRCEVEAPGPVHVYWLLDGAPVQDTERRFAQGSSLSFAAVDRLQDSGTFQCVARDDVTGEEARSANASFNIKWIEAGPVVLKHPASEAEIQPQTQVTLRCHIDGHPRPTYQWFRDGTPLSDGQSNHTVSSKERNLTLRPAGPEHSGLYSCCAHSAFGQACSSQNFTLSIADESFARVVLAPQDVVVARYEEAMFHCQFSAQPPPSLQWLFEDETPITNRSRPPHLRRATVFANGSLLLTQVRPRNAGIYRCIGQGQRGPPIILEATLHLAEIEDMPLFEPRVFTAGSEERVTCLPPKGLPEPSVWWEHAGVRLPTHGRVYQKGHELVLANIAESDAGVYTCHAANLAGQRRQDVNITVANGSSLPEWVTDNAGTLHFARVTRDDAGNYTCIASNGPQGQIRAHVQLTVAVFITFKVEPERTTVYQGHTALLQCEAQGDPKPLIQWKGKDRILDPTKLGPRMHIFQNGSLVIHDVAPEDSGRYTCIAGNSCNIKHTEAPLYVVDKPVPEESEGPGSPPPYKMIQTIGLSVGAAVAYIIAVLGLMFYCKKRCKAKRLQKQPEGEEPEMECLNGGPLQNGQPSAEIQEEVALTSLGSGPAATNKRHSTSDKMHFPRSSLQPITTLGKSEFGEVFLAKAQGLEEGVAETLVLVKSLQSKDEQQQLDFRRELEMFGKLNHANVVRLLGLCREAEPHYMVLEYVDLGDLKQFLRISKSKDEKLKSQPLSTKQKVALCTQVALGMEHLSNNRFVHKDLAARNCLVSAQRQVKVSALGLSKDVYNSEYYHFRQAWVPLRWMSPEAILEGDFSTKSDVWAFGVLMWEVFTHGEMPHGGQADDEVLADLQAGKARLPQPEGCPSKLYRLMQRCWALSPKDRPSFSEIASALGDSTVDSKP

SEQ ID NO: 34208 - protein, 1014 aa, Homo sapiens
  REGION 1..1014: note = ENSP00000326029
MGAARGSPARPRRLPLLSVLLLPLLGGTQTAIVFIKQPSSQDALQGRRALLRCEVEAPGPVHVYWLLDGAPVQDTERRFAQGSSLSFAAVDRLQDSGTFQCVARDDVTGEEARSANASFNIKWIEAGPVVLKHPASEAEIQPQTQVTLRCHIDGHPRPTYQWFRDGTPLSDGQSNHTVSSKERNLTLRPAGPEHSGLYSCCAHSAFGQACSSQNFTLSIADESFARVVLAPQDVVVARYEEAMFHCQFSAQPPPSLQWLFEDETPITNRSRPPHLRRATVFANGSLLLTQVRPRNAGIYRCIGQGQRGPPIILEATLHLAEIEDMPLFEPRVFTAGSEERVTCLPPKGLPEPSVWWEHAGVRLPTHGRVYQKGHELVLANIAESDAGVYTCHAANLAGQRRQDVNITVATVPSWLKKPQDSQLEEGKPGYLDCLTQATPKPTVVWYRNQMLISEDSRFEVFKNGTLRINSVEVYDGTWYRCMSSTPAGSIEAQARVQVLEKLKFTPPPQPQQCMEFDKEATVPCSATGREKPTIKWERADGSSLPEWVTDNAGTLHFARVTRDDAGNYTCIASNGPQGQIRAHVQLTVAVFITFKVEPERTTVYQGHTALLQCEAQGDPKPLIQWKDKPVPEESEGPGSPPPYKMIQTIGLSVGAAVAYIIAVLGLMFYCKKRCKAKRLQKQPEGEEPEMECLNGGPLQNGQPSAEIQEEVALTSLGSGPAATNKRHSTSDKMHFPRSSLQPITTLGKSEFGEVFLAKAQGLEEGVAETLVLVKSLQSKDEQQQLDFRRELEMFGKLNHANVVRLLGLCREAEPHYMVLEYVDLGDLKQFLRISKSKDEKLKSQPLSTKQKVALCTQVALGMEHLSNNRFVHKDLAARNCLVSAQRQVKVSALGLSKDVYNSEYYHFRQAWVPLRWMSPEAILEGDFSTKSDVWAFGVLMWEVFTHGEMPHGGQADDEVLADLQAGKARLPQPEGCPSKLYRLMQRCWALSPKDRPSFSEIASALGDSTVDSKP

SEQ ID NO: 34209 - protein, 1030 aa, Homo sapiens
  REGION 1..1030: note = ENSP00000325992
MGAARGSPARPRRLPLLSVLLLPLLGGTQTAIVFIKQPSSQDALQGRRALLRCEVEAPGPVHVYWLLDGAPVQDTERRFAQGSSLSFAAVDRLQDSGTFQCVARDDVTGEEARSANASFNIKWIEAGPVVLKHPASEAEIQPQTQVTLRCHIDGHPRPTYQWFRDGTPLSDGQSNHTVSSKERNLTLRPAGPEHSGLYSCCAHSAFGQACSSQNFTLSIADESFARVVLAPQDVVVARYEEAMFHCQFSAQPPPSLQWLFEDETPITNRSRPPHLRRATVFANGSLLLTQVRPRNAGIYRCIGQGQRGPPIILEATLHLAEIEDMPLFEPRVFTAGSEERVTCLPPKGLPEPSVWWEHAGVRLPTHGRVYQKGHELVLANIAESDAGVYTCHAANLAGQRRQDVNITVATVPSWLKKPQDSQLEEGKPGYLDCLTQATPKPTVVWYRNQMLISEDSRFEVFKNGTLRINSVEVYDGTWYRCMSSTPAGSIEAQARVQVLDGSSLPEWVTDNAGTLHFARVTRDDAGNYTCIASNGPQGQIRAHVQLTVAVFITFKVEPERTTVYQGHTALLQCEAQGDPKPLIQWKGKDRILDPTKLGPRMHIFQNGSLVIHDVAPEDSGRYTCIAGNSCNIKHTEAPLYVVDKPVPEESEGPGSPPPYKMIQTIGLSVGAAVAYIIAVLGLMFYCKKRCKAKRLQKQPEGEEPEMECLNGGPLQNGQPSAEIQEEVALTSLGSGPAATNKRHSTSDKMHFPRSSLQPITTLGKSEFGEVFLAKAQGLEEGVAETLVLVKSLQSKDEQQQLDFRRELEMFGKLNHANVVRLLGLCREAEPHYMVLEYVDLGDLKQFLRISKSKDEKLKSQPLSTKQKVALCTQVALGMEHLSNNRFVHKDLAARNCLVSAQRQVKVSALGLSKDVYNSEYYHFRQAWVPLRWMSPEAILEGDFSTKSDVWAFGVLMWEVFTHGEMPHGGQADDEVLADLQAGKARLPQPEGCPSKLYRLMQRCWALSPKDRPSFSEIASALGDSTVDSKP

SEQ ID NO: 34210 - protein, 816 aa, Homo sapiens
  REGION 1..816: note = ENSP00000230418
MGAARGSPARPRRLPLLSVLLLPLLGGTQTAIVFIKQPSSQDALQGRRALLRCEVEAPGPVHVYWLLDGAPVQDTERRFAQGSSLSFAAVDRLQDSGTFQCVARDDVTGEEARSANASFNIKWIEAGPVVLKHPASEAEIQPQTQVTLRCHIDGHPRPTYQWFRDGTPLSDGQSNHTVSSKERNLTLRPAGPEHSGLYSCCAHSAFGQACSSQNFTLSIADESFARVVLAPQDVVVARYEEAMFHCQFSAQPPPSLQWLFEDETPITNRSRPPHLRRATVFANGSLLLTQVRPRNAGIYRCIGQGQRGPPIILEATLHLAEIEDMPLFEPRVFTAGSEERVTCLPPKGLPEPSVWWEHAGVRLPTHGRVYQKGHELVLANIAESDAGVYTCHAANLAGQRRQDVNITVATVPSWLKKPQDSQLEEGKPGYLDCLTQATPKPTVVWYRNQMLISEDSRFEVFKNGTLRINSVEVYDGTWYRCMSSTPAGSIEAQARVQVLEKLKFTPPPQPQQCMEFDKEATVPCSATGREKPTIKWERADGSSLPEWVTDNAGTLHFARVTRDDAGNYTCIASNGPQGQIRAHVQLTVAVFITFKVEPERTTVYQGHTALLQCEAQGDPKPLIQWKGKDRILDPTKLGPRMHIFQNGSLVIHDVAPEDSGRYTCIAGNSCNIKHTEAPLYVVDKPVPEESEGPGSPPPYKMIQTIGLSVGAAVAYIIAVLGLMFYCKKRCKAKRLQKQPEGEEPEMECLNGGPLQNGQPSAEIQEEVALTSLGSGPAATNKRHSTSDKMHFPRSSLQPITTLGRPQAVPEDFQEQG

SEQ ID NO: 34211 - protein, 1078 aa, Homo sapiens
  REGION 1..1078: note = ENSP00000418754
MGSFLSGEKRPSAPTVGSAMEKKEFPTPPGRVGPGTQTAIVFIKQPSSQDALQGRRALLRCEVEAPGPVHVYWLLDGAPVQDTERRFAQGSSLSFAAVDRLQDSGTFQCVARDDVTGEEARSANASFNIKWIEAGPVVLKHPASEAEIQPQTQVTLRCHIDGHPRPTYQWFRDGTPLSDGQSNHTVSSKERNLTLRPAGPEHSGLYSCCAHSAFGQACSSQNFTLSIADESFARVVLAPQDVVVARYEEAMFHCQFSAQPPPSLQWLFEDETPITNRSRPPHLRRATVFANGSLLLTQVRPRNAGIYRCIGQGQRGPPIILEATLHLAEIEDMPLFEPRVFTAGSEERVTCLPPKGLPEPSVWWEHAGVRLPTHGRVYQKGHELVLANIAESDAGVYTCHAANLAGQRRQDVNITVATVPSWLKKPQDSQLEEGKPGYLDCLTQATPKPTVVWYRNQMLISEDSRFEVFKNGTLRINSVEVYDGTWYRCMSSTPAGSIEAQARVQVLEKLKFTPPPQPQQCMEFDKEATVPCSATGREKPTIKWERADGSSLPEWVTDNAGTLHFARVTRDDAGNYTCIASNGPQGQIRAHVQLTVAVFITFKVEPERTTVYQGHTALLQCEAQGDPKPLIQWKGKDRILDPTKLGPRMHIFQNGSLVIHDVAPEDSGRYTCIAGNSCNIKHTEAPLYVVDKPVPEESEGPGSPPPYKMIQTIGLSVGAAVAYIIAVLGLMFYCKKRCKAKRLQKQPEGEEPEMECLNGGPLQNGQPSAEIQEEVALTSLGSGPAATNKRHSTSDKMHFPRSSLQPITTLGKSEFGEVFLAKAQGLEEGVAETLVLVKSLQSKDEQQQLDFRRELEMFGKLNHANVVRLLGLCREAEPHYMVLEYVDLGDLKQFLRISKSKDEKLKSQPLSTKQKVALCTQVALGMEHLSNNRFVHKDLAARNCLVSAQRQVKVSALGLSKDVYNSEYYHFRQAWVPLRWMSPEAILEGDFSTKSDVWAFGVLMWEVFTHGEMPHGGQADDEVLADLQAGKARLPQPEGCPSKLYRLMQRCWALSPKDRPSFSEIASALGDSTVDSKP

SEQ ID NO: 34212 - protein, 269 aa, Homo sapiens
  REGION 1..269: note = ENSP00000420165
FSAQPPPSLQWLFEDETPITNRSRPPHLRRATVFANGSLLLTQVRPRNAGIYRCIGQGQRGPPIILEATLHLAEIEDMPLFEPRVFTAGSEERVTCLPPKGLPEPSVWWEHAGVRLPTHGRVYQKGHELVLANIAESDAGVYTCHAANLAGQRRQDVNITVASEHLCPEGQGEVEGNTGLGVMDRGFPAVPSWLKKPQDSQLEEGKPGYLDCLTQATPKPTVVWYRNQMLISEDSRFEVFKNGTLRINSVEVYDGTWYRCMSSTPAGSI

SEQ ID NO: 34213 - protein, 365 aa, Homo sapiens
  REGION 1..365: note = ENSP00000420765
  VARIANT 1: note = Any amino acid
XEHAGVRLPTHGRVYQKGHELVLANIAESDAGVYTCHAANLAGQRRQDVNITVATVPSWLKKPQDSQLEEGKPGYLDCLTQATPKPTVVWYRNQMLISEDSRFEVFLAKAQGLEEGVAETLVLVKSLQSKDEQQQLDFRRELEMFGKLNHANVVRLLGLCREAEPHYMVLEYVDLGDLKQFLRISKSKDEKLKSQPLSTKQKVALCTQVALGMEHLSNNRFVHKDLAARNCLVSAQRQVKVSALGLSKDVYNSEYYHFRQAWVPLRWMSPEAILEGDFSTKSDVWAFGVLMWEVFTHGEMPHGGQADDEVLADLQAGKARLPQPEGCPSKLYRLMQRCWALSPKDRPSFSEIASALGDSTVDSKP

SEQ ID NO: 34214 - protein, 25 aa, Homo sapiens
  REGION 1..25: note = ENSP00000418545
TEHGTEAIFVAAVGIRPSHHAAAQS

SEQ ID NO: 34215 - protein, 25 aa, Homo sapiens
  REGION 1..25: note = ENSP00000419096
TEHGTEAIFVAAVGIRPSHHAAAQS

SEQ ID NO: 34216 - protein, 25 aa, Homo sapiens
  REGION 1..25: note = ENSP00000418462
  VARIANT 1: note = Any amino acid
XEHGTEAIFVAAVGIRPSHHAAAQS

SEQ ID NO: 34217 - protein, 257 aa, Homo sapiens
  REGION 1..257: note = ENSP00000420186
MVARVSGLIVTLLSSSFPGGPLQNGQPSAEIQEEVALTSLGSGPAATNKRHSTSDKMHFPRSSLQPITTLGKSEFGEVFLAKAQGLEEGVAETLVLVKSLQSKDEQQQLDFRRELEMFGKLNHANVVRLLGLCREAEPHYMVLEYVDLGDLKQFLRISKSKDEKLKSQPLSTKQKVALCTQVALGMEHLSNNRFVHKDLAARNCLVSAQRQVKVSALGLSKDVYNSEYYHFRQAWVPLRWMSPEAILEGDFSTKSDV

SEQ ID NO: 34218 - protein, 84 aa, Homo sapiens
  REGION 1..84: note = ENSP00000418386
MVARVSGLIVTLLSSSFPGGPLQNGQPSAEIQEEVALTSLGSGPAATNKRHSTSDKMHFPRSSLQPITTLGRPQAVPEDFQEQG

SEQ ID NO: 34219 - protein, 104 aa, Homo sapiens
  REGION 1..104: note = ENSP00000374113
MSEKSVEAAAELSAKDLKEKKEKVEEKASRKERKKEVVEAPVPLVVMVGKACSQPEATPSPGPHRRRRTGLRRKKKKLPRMERRKMKGKKKMRKKKKRMMKGPR

SEQ ID NO: 34220 - protein, 57 aa, Homo sapiens
  REGION 1..57: note = ENSP00000442325
MSEKSVEAAAELSAKDLKEKKEKVEEKASRKERKKEVVEAPVPLVVMVGKACSQPEA

SEQ ID NO: 34221 - protein, 102 aa, Homo sapiens
  REGION 1..102: note = ENSP00000310088
MSEKSVEAAAELSAKDLKEKKEKVEEKASRKERKKEVVEEEENGAEEEEEETAEDGEEEDEGEEEDEEEEEEDDEGPALKRAAEEEDEADPKRQKTENGASA

SEQ ID NO: 34222 - protein, 102 aa, Homo sapiens; identical to SEQ ID NO: 34221
  REGION 1..102: note = ENSP00000478828

SEQ ID NO: 34223 - protein, 168 aa, Homo sapiens
  REGION 1..168: note = ENSP00000341170
MQAQQYQQQRRKFAAAFLAFIFILAAVDTAEAGKKEKPEKKVKKSDCGEWQWSVCVPTSGDCGLGTREGTRTGAECKQTMKTQRCKIPCNWKKQFGAECKYQFQAWGECDLNTALKTRTGSLKRALHNAECQKTVTISKPCGKLTKPKPQAESKKKKKEGKKQEKMLD

SEQ ID NO: 34224 - protein, 166 aa, Homo sapiens
  REGION 1..166: note = ENSP00000376798
MQAQQYQQQRRKFAAAFLAFIFILAAVDTAEAGKKEKPEKKVKKSDCGEWQWSVCVPTSGDCGLGTREGTRTGAECKQTMKTQRCKIPCNWKKQFGAECKYQFQAWGECDLNTALKTRTGSLKRALHNAECQKTVTISKPCGKLTKPKPQEKGKWRHRSGESLRRW

SEQ ID NO: 34225 - protein, 173 aa, Homo sapiens
  REGION 1..173: note = ENSP00000359685
MARMNRPAPVEVTYKNMRFLITHNPTNATLNKFIEELKKYGVTTIVRVCEATYDTTLVEKEGIHVLDWPFDDGAPPSNQIVDDWLSLVKIKFREEPGCCIAVHCVAGLGRAPVLVALALIEGGMKYEDAVQFIRQKRRGAFNSKQLLYLEKYRPKMRLRFKDSNGHRNNCCIQ

SEQ ID NO: 34226 - protein, 44 aa, Homo sapiens
  REGION 1..44: note = ENSP00000462406
MIRPQSSMSKHIPQFCGVLGHTFMEFLKGSGDYCQAQHDLYADK

SEQ ID NO: 34227 - protein, 173 aa, Homo sapiens; identical to SEQ ID NO: 34225
  REGION 1..173: note = ENSP00000485687

SEQ ID NO: 34228 - protein, 148 aa, Homo sapiens
  REGION 1..148: note = ENSP00000487586
MARMNRPAPVEVTYKNMRFLITHNPTNATLNKFIEELKKYGVTTIVRVCEATYDTTLVEKEGIHVLDWPFDDGAPPSNQIVDDWLSLVKIKFREEPGCCIAVHCVAGLGRKRRGAFNSKQLLYLEKYRPKMRLRFKDSNGHRNNCCIQ

SEQ ID NO: 34229 - protein, 173 aa, Homo sapiens
  REGION 1..173: note = ENSP00000487595
MARMNRPAPVEVSYKHMRFLITHNPTNATLSTFIEDLKKYGATTVVRVCEVTYDKTPLEKDGITVVDWPFDDGAPPPGKVVEDWLSLVKAKFCEAPGSCVAVHCVAGLGRAPVLVALALIESGMKYEDAIQFIRQKRRGAINSKQLTYLEKYRPKQRLRFKDPHTHKTRCCVM

SEQ ID NO: 34230 - protein, 148 aa, Homo sapiens
  REGION 1..148: note = ENSP00000487610
MARMNRPAPVEVSYKHMRFLITHNPTNATLSTFIEDLKKYGATTVVRVCEVTYDKTPLEKDGITVVDWPFDDGAPPPGKVVEDWLSLVKAKFCEAPGSCVAVHCVAGLGRKRRGAINSKQLTYLEKYRPKQRLRFKDPHTHKTRCCVM

SEQ ID NO: 34231 - protein, 70 aa, Homo sapiens
  REGION 1..70: note = ENSP00000487861
MARMNRPAPVEVSYKHMRFLITHNPTNATLSTFIEDLKKYGATTVVRVCEVTYDKTPLEKDGITVVDWPF

SEQ ID NO: 34232 - protein, 148 aa, Homo sapiens; identical to SEQ ID NO: 34230
  REGION 1..148: note = ENSP00000481205

SEQ ID NO: 34233 - protein, 173 aa, Homo sapiens; identical to SEQ ID NO: 34229
  REGION 1..173: note = ENSP00000484500

SEQ ID NO: 34234 - protein, 173 aa, Homo sapiens; identical to SEQ ID NO: 34229
  REGION 1..173: note = ENSP00000428976

SEQ ID NO: 34235 - protein, 148 aa, Homo sapiens; identical to SEQ ID NO: 34230
  REGION 1..148: note = ENSP00000428758

SEQ ID NO: 34236 - protein, 70 aa, Homo sapiens; identical to SEQ ID NO: 34231
  REGION 1..70: note = ENSP00000428725

SEQ ID NO: 34237 - protein, 87 aa, Homo sapiens
  REGION 1..87: note = ENSP00000430332
MARMNRPAPVEVSYKHMRFLITHNPTNATLSTFIESGMKYEDAIQFIRQKRRGAINSKQLTYLEKYRPKQRLRFKDPHTHKTRCCVM

SEQ ID NO: 34238 - protein, 173 aa, Homo sapiens; identical to SEQ ID NO: 34229
  REGION 1..173: note = ENSP00000332274

SEQ ID NO: 34239 - protein, 148 aa, Homo sapiens; identical to SEQ ID NO: 34230
  REGION 1..148: note = ENSP00000331730

SEQ ID NO: 34240 - protein, 1187 aa, Homo sapiens
  REGION 1..1187: note = ENSP00000355923
MPFGLKLRRTRRYNVLSKNCFVTRIRLLDSNVIECTLSVESTGQECLEAVAQRLELRETHYFGLWFLSKSQQARWVELEKPLKKHLDKFANEPLLFFGVMFYVPNVSWLQQEATRYQYYLQVKKDVLEGRLRCTLDQVIRLAGLAVQADFGDYNQFDSQDFLREYVLFPMDLALEEAVLEELTQKVAQEHKAHSGILPAEAELMYINEVERLDGFGQEIFPVKDNHGNCVHLGIFFMGIFVRNRIGRQAVIYRWNDMGNITHNKSTILVELINKEETALFHTDDIENAKYISRLFATRHKFYKQNKICTEQSNSPPPIRRQPTWSRSSLPRQQPYILPPVHVQCGEHYSETHTSQDSIFHGNEEALYCNSHNSLDLNYLNGTVTNGSVCSVHSVNSLNCSQSFIQASPVSSNLSIPGSDIMRADYIPSHRHSAIIVPSYRPTPDYETVMRQMKRGILHTDSQSQSLRNLNIINTHAYNQPEDLVYSQPEMRERHPYTVPYGPQGVYSNKLVSPSDQRNPKNNVVPSKPGASAISHTVSTPELANMQLQGSHNYSTAHMLKNYLFRPPPPYPRPRPATSTPDLASHRHKYVSGSSPDLVTRKVQLSVKTFQEDSSPVVHQSLQEVSEPLTATKHHGTVNKRHSLEVMNSMVRGMEAMTLKSLHLPMARRNTLREQGPPEEGSGSHEVPQLPQYHHKKTFSDATMLIHSSESEEEEEEAPESVPQIPMLREKMEYSAQLQAALARIPNKPPPEYPGPRKSVSNGALRQDQASLPPAMARARVLRHGPAKAISMSRTDPPAVNGASLGPSISEPDLTSVKERVKKEPVKERPVSEMFSLEDSIIEREMMIRNLEKQKMAGLEAQKRPLMLAALNGLSVARVSGREENRVDATRVPMDERFRTLKKKLEEGMVFTEYEQIPKKKANGIFSTAALPENAERSRIREVVPYEENRVELIPTKENNTGYINASHIKVVVGGAEWHYIATQGPLPHTCHDFWQMVWEQGVNVIAMVTAEEEGGRTKSHRYWPKLGSKHSSATYGKFKVTTKFRTDSVCYATTGLKVKHLLSGQERTVWHLQYTDWPDHGCPEDVQGFLSYLEEIQSVRRHTNSMLEGTKNRHPPIVVHCSAGVGRTGVLILSELMIYCLEHNEKVEVPMMLRLLREQRMFMIQTIAQYKFVYQVLIQFLQNSRLI

SEQ ID NO: 34241 - protein, 211 aa, Homo sapiens
  REGION 1..211: note = ENSP00000443330
MPFGLKLRRTRRYNVLSKNCFVTRIRLLDSNVIECTLSVESTGQECLEAVAQRLELRETHYFGLWFLSKSQQARWVELEKPLKKHLDKFANEPLLFFGVMFYVPNVSWLQQEATRYQYYLQVKKDVLEGRLRCTLDQVIRLAGLAVQADFGDYNQFDSQDFLREYVLFPMDLALEEAVLEELTQKVAQEHKAHRTIMETVYTLAFSLWGFS

SEQ ID NO: 34242 - protein, 179 aa, Homo sapiens
  REGION 1..179: note = ENSP00000433141
MDQREILQKFLDEAQSKKITKEEFANEFLKLKRQSTKYKADKTYPTTVAEKPKNIKKNRYKDILPYDYSRVELSLITSDEDSSYINANFIKGVYGPKAYIATQGPLSTTLLDFWRMIWEYSVLIIVMACMEYEMGKEAEKRKSDYIIRTLKVKFNSVSVILAHQTSLQNLFSQITPAHF

SEQ ID NO: 34243 - protein, 807 aa, Homo sapiens
  REGION 1..807: note = ENSP00000352833
MDQREILQKFLDEAQSKKITKEEFANEFLKLKRQSTKYKADKTYPTTVAEKPKNIKKNRYKDILPYDYSRVELSLITSDEDSSYINANFIKGVYGPKAYIATQGPLSTTLLDFWRMIWEYSVLIIVMACMEYEMGKKKCERYWAEPGEMQLEFGPFSVSCEAEKRKSDYIIRTLKVKFNSETRTIYQFHYKNWPDHDVPSSIDPILELIWDVRCYQEDDSVPICIHCSAGCGRTGVICAIDYTWMLLKDGIIPENFSVFSLIREMRTQRPSLVQTQEQYELVYNAVLELFKRQMDVIRDKHSGTESQAKHCIPEKNHTLQADSYSPNLPKSTTKAAKMMNQQRTKMEIKESSSFDFRTSEISAKEELVLHPAKSSTSFDFLELNYSFDKNADTTMKWQTKAFPIVGEPLQKHQSLDLGSLLFEGCSNSKPVNAAGRYFNSKVPITRTKSTPFELIQQRETKEVDSKENFSYLESQPHDSCFVEMQAQKVMHVSSAELNYSLPYDSKHQIRNASNVKHHDSSALGVYSYIPLVENPYFSSWPPSGTSSKMSLDLPEKQDGTVFPSSLLPTSSTSLFSYYNSHDSLSLNSPTNISSLLNQESAVLATAPRIDDEIPPPLPVWTPESFIVVEEAGEFSPNVPKSLSSAVKVKIGTSLEWGGTSEPKKFDDSVILRPSKSVKLRSPKSELHQDRSSPPPPLPERTLESFFLADEDCMQAQSIETYSTSYPDTMENSTSSKQTLKTPGKSFTRSKSLKILRNMKKSICNSCPPNKPAESVQSNNSSSFLNFGFANRFSKPKGPRNPPPTWNI

SEQ ID NO: 34244 - protein, 752 aa, Homo sapiens
  REGION 1..752: note = ENSP00000435176
MDQREILQKFLDEAQSKKITKEEFANEFLKLKRQSTKYKADKTYPTTVAEKPKNIKKNRYKDILPYDYSRVELSLITSDEDSSYINANFIKGVYGPKAYIATQGPLSTTLLDFWRMIWEYSVLIIVMACMEYEMGKKKCERYWAEPGEMQLEFGPFSVSCEAEKRKSDYIIRTLKVKFNSETRTIYQFHYKNWPDHDVPSSIDPILELIWDVRCYQEDDSVPICIHCSAGCGRTGVICAIDYTWMLLKDGSQAKHCIPEKNHTLQADSYSPNLPKSTTKAAKMMNQQRTKMEIKESSSFDFRTSEISAKEELVLHPAKSSTSFDFLELNYSFDKNADTTMKWQTKAFPIVGEPLQKHQSLDLGSLLFEGCSNSKPVNAAGRYFNSKVPITRTKSTPFELIQQRETKEVDSKENFSYLESQPHDSCFVEMQAQKVMHVSSAELNYSLPYDSKHQIRNASNVKHHDSSALGVYSYIPLVENPYFSSWPPSGTSSKMSLDLPEKQDGTVFPSSLLPTSSTSLFSYYNSHDSLSLNSPTNISSLLNQESAVLATAPRIDDEIPPPLPVWTPESFIVVEEAGEFSPNVPKSLSSAVKVKIGTSLEWGGTSEPKKFDDSVILRPSKSVKLRSPKSELHQDRSSPPPPLPERTLESFFLADEDCMQAQSIETYSTSYPDTMENSTSSKQTLKTPGKSFTRSKSLKILRNMKKSICNSCPPNKPAESVQSNNSSSFLNFGFANRFSKPKGPRNPPPTWNI

SEQ ID NO: 34245 - protein, 135 aa, Homo sapiens
  REGION 1..135: note = ENSP00000431249
MDQREILQKFLDEAQSKKITKEEFANEFLKLKRQSTKYKADKTYPTTVAEKPKNIKKNRYKDILPYDYSRVELSLITSDEDSSYINANFIKGVYGPKAYIATQGPLSTTLLDFWRMIWEYSVLCWLWKDWCYLCY

SEQ ID NO: 34246 - protein, 795 aa, Homo sapiens
  REGION 1..795: note = ENSP00000388229
MDQREILQKFLDEAQSKKITKEEFANEFLKLKRQSTKYKADKTYPTTVAEKPKNIKKNRYKDILPYDYSRVELSLITSDEDSSYINANFIKGVYGPKAYIATQGPLSTTLLDFWRMIWEYSVLIIVMACMEYEMGKKKCERYWAEPGEMQLEFGPFSVSCEAEKRKSDYIIRTLKVKFNSETRTIYQFHYKNWPDHDVPSSIDPILELIWDVRCYQEDDSVPICIHCSAGCGRTGVICAIDYTWMLLKDGIIPENFSVFSLIREMRTQRPSLVQTQEQYELVYNAVLELFKRQMDVIRDKHSGTESQAKHCIPEKNHTLQADSYSPNLPKSTTKAAKMMNQQRTKMEIKESSSFDFRTSEISAKEELVLHPAKSSTSFDFLELNYSFDKNADTTMKWQTKAFPIVGEPLQKHQSLDLGSLLFEGCSNSKPVNAAGRYFNSKVPITRTKSTPFELIQQRETKEVDSKENFSYLESQPHDSCFVEMQAQKVMHVSSAELNYSLPYDSKHQIRNASNVKHHDSSALGVYSYIPLVENPYFSSWPPSGTSSKMSLDLPEKQDGTVFPSSLLPTSSTSLFSYYNSHDSLSLNSPTNISSLLNQESAVLATAPRIDDEIPPPLPVWTPESFIVVEEAGEFSPNVPKSLSSAVKVKIGTSLEWGGTSEPKKFDDSVILRPSKSVKLRSPKSELHQDRSSPPPPLPERTLESFFLADEDCMQAQSIETYSTSYPDTMENSTSSKQTLKTPGKSFTRSKSLKILRNMKKSICNSCPPNKPAESVQSNNSSSFLNFGMCVILLKS

SEQ ID NO: 34247 - protein, 668 aa, Homo sapiens
  REGION 1..668: note = ENSP00000432674
MDQREILQKFLDEAQSKKITKEEFANEFLKLKRQSTKYKADKTYPTTVAEKPKNIKKNRYKDILPYDYSRVELSLITSDEDSSYINANFIKGVYGPKAYIATQGPLSTTLLDFWRMIWEYSVLIIPENFSVFSLIREMRTQRPSLVQTQEQYELVYNAVLELFKRQMDVIRDKHSGTESQAKHCIPEKNHTLQADSYSPNLPKSTTKAAKMMNQQRTKMEIKESSSFDFRTSEISAKEELVLHPAKSSTSFDFLELNYSFDKNADTTMKWQTKAFPIVGEPLQKHQSLDLGSLLFEGCSNSKPVNAAGRYFNSKVPITRTKSTPFELIQQRETKEVDSKENFSYLESQPHDSCFVEMQAQKVMHVSSAELNYSLPYDSKHQIRNASNVKHHDSSALGVYSYIPLVENPYFSSWPPSGTSSKMSLDLPEKQDGTVFPSSLLPTSSTSLFSYYNSHDSLSLNSPTNISSLLNQESAVLATAPRIDDEIPPPLPVWTPESFIVVEEAGEFSPNVPKSLSSAVKVKIGTSLEWGGTSEPKKFDDSVILRPSKSVKLRSPKSELHQDRSSPPPPLPERTLESFFLADEDCMQAQSIETYSTSYPDTMENSTSSKQTLKTPGKSFTRSKSLKILRNMKKSICNSCPPNKPAESVQSNNSSSFLNFGMCVILLKS

SEQ ID NO: 34248 - protein, 92 aa, Homo sapiens
  REGION 1..92: note = ENSP00000434932
MDQREILQKFLDEAQSKKITKEEFANEFLGLALSPRLECRGLIIAHCRLDFLDSSDPPASASQSAEITTMSHHTWPEKAFWTSLNRSNLLLS

SEQ ID NO: 34249 - protein, 783 aa, Homo sapiens
  REGION 1..783: note = ENSP00000439372
MDQREILQKFLDEAQSKKITKEEFANEFLKLKRQSTKYKADKTYPTTVAEKPKNIKKNRYKDILPYDYSRVELSLITSDEDSSYINANFIKGVYGPKAYIATQGPLSTTLLDFWRMIWEYSVLIIVMACMEYEMGKEAEKRKSDYIIRTLKVKFNSETRTIYQFHYKNWPDHDVPSSIDPILELIWDVRCYQEDDSVPICIHCSAGCGRTGVICAIDYTWMLLKDGIIPENFSVFSLIREMRTQRPSLVQTQEQYELVYNAVLELFKRQMDVIRDKHSGTESQAKHCIPEKNHTLQADSYSPNLPKSTTKAAKMMNQQRTKMEIKESSSFDFRTSEISAKEELVLHPAKSSTSFDFLELNYSFDKNADTTMKWQTKAFPIVGEPLQKHQSLDLGSLLFEGCSNSKPVNAAGRYFNSKVPITRTKSTPFELIQQRETKEVDSKENFSYLESQPHDSCFVEMQAQKVMHVSSAELNYSLPYDSKHQIRNASNVKHHDSSALGVYSYIPLVENPYFSSWPPSGTSSKMSLDLPEKQDGTVFPSSLLPTSSTSLFSYYNSHDSLSLNSPTNISSLLNQESAVLATAPRIDDEIPPPLPVWTPESFIVVEEAGEFSPNVPKSLSSAVKVKIGTSLEWGGTSEPKKFDDSVILRPSKSVKLRSPKSELHQDRSSPPPPLPERTLESFFLADEDCMQAQSIETYSTSYPDTMENSTSSKQTLKTPGKSFTRSKSLKILRNMKKSICNSCPPNKPAESVQSNNSSSFLNFGFANRFSKPKGPRNPPPTWNI

SEQ ID NO: 34250 - protein, 913 aa, Homo sapiens
  REGION 1..913: note = ENSP00000363667
MTSRLRALGGRINNIRTSELPKEKTRSEVICSIHFLDGVVQTFKVTKQDTGQVLLDMVHNHLGVTEKEYFGLQHDDDSVDSPRWLEASKAIRKQLKGGFPCTLHFRVRFFIPDPNTLQQEQTRHLYFLQLKMDICEGRLTCPLNSAVVLASYAVQSHFGDYNSSIHHPGYLSDSHFIPDQNEDFLTKVESLHEQHSGLKQSEAESCYINIARTLDFYGVELHSGRDLHNLDLMIGIASAGVAVYRKYICTSFYPWVNILKISFKRKKFFIHQRQKQAESREHIVAFNMLNYRSCKNLWKSCVEHHTFFQAKKLLPQEKNVLSQYWTMGSRNTKKSVNNQYCKKVIGGMVWNPAMRRSLSVEHLETKSLPSRSPPITPNWRSPRLRHEIRKPRHSSADNLANEMTYITETEDVFYTYKGSLAPQDSDSEVSQNRSPHQESLSENNPAQSYLTQKSSSSVSPSSNAPGSCSPDGVDQQLLDDFHRVTKGGSTEDASQYYCDKNDNGDSYLVLIRITPDEDGKFGFNLKGGVDQKMPLVVSRINPESPADTCIPKLNEGDQIVLINGRDISEHTHDQVVMFIKASRESHSRELALVIRRRAVRSFADFKSEDELNQLFPEAIFPMCPEGGDTLEGSMAQLKKGLESGTVLIQFEQLYRKKPGLAITFAKLPQNLDKNRYKDVLPYDTTRVLLQGNEDYINASYVNMEIPAANLVNKYIATQGPLPHTCAQFWQVVWDQKLSLIVMLTTLTERGRTKCHQYWPDPPDVMNHGGFHIQCQSEDCTIAYVSREMLVTNTQTGEEHTVTHLQYVAWPDHGVPDDSSDFLEFVNYVRSLRVDSEPVLVHCSAGIGRTGVLVTMETAMCLTERNLPIYPLDIVRKMRDQRAMMVQTSSQYKFVCEAILRVYEEGLVQMLDPS

SEQ ID NO: 34251 - protein, 782 aa, Homo sapiens
  REGION 1..782: note = ENSP00000416654
MDICEGRLTCPLNSAVVLASYAVQSHFGDYNSSIHHPGYLSDSHFIPDQNEDFLTKVESLHEQHSGLKQSEAESCYINIARTLDFYGVELHSGRDLHNLDLMIGIASAGVAVYRKYICTSFYPWVNILKISFKRKKFFIHQRQKQAESREHIVAFNMLNYRSCKNLWKSCVEHHTFFQAKKLLPQEKNVLSQYWTMGSRNTKKSVNNQYCKKVIGGMVWNPAMRRSLSVEHLETKSLPSRSPPITPNWRSPRLRHEIRKPRHSSADNLANEMTYITETEDVFYTYKGSLAPQDSDSEVSQNRSPHQESLSENNPAQSYLTQKSSSSVSPSSNAPGSCSPDGVDQQLLDDFHRVTKGGSTEDASQYYCDKNDNGDSYLVLIRITPDEDGKFGFNLKGGVDQKMPLVVSRINPESPADTCIPKLNEGDQIVLINGRDISEHTHDQVVMFIKASRESHSRELALVIRRRAVRSFADFKSEDELNQLFPEAIFPMCPEGGDTLEGSMAQLKKGLESGTVLIQFEQLYRKKPGLAITFAKLPQNLDKNRYKDVLPYDTTRVLLQGNEDYINASYVNMEIPAANLVNKYIATQGPLPHTCAQFWQVVWDQKLSLIVMLTTLTERGRTKCHQYWPDPPDVMNHGGFHIQCQSEDCTIAYVSREMLVTNTQTGEEHTVTHLQYVAWPDHGVPDDSSDFLEFVNYVRSLRVDSEPVLVHCSAGIGRTGVLVTMETAMCLTERNLPIYPLDIVRKMRDQRAMMVQTSSQYKFVCEAILRVYEEGLVQMLDPS

SEQ ID NO: 34252 - protein, 737 aa, Homo sapiens
  REGION 1..737: note = ENSP00000395384
MDICEGRLTCPLNSAVVLASYAVQSHFGDYNSSIHHPGYLSDSHFIPDQNEDFLTKVESLHEQHSGLKQSEAESCYINIARTLDFYGVELHSGRDLHNLDLMIGIASAGVAVYRKYICTSFYPWVNILKISFKRKKFFIHQRQKQAESREHIVAFNMLNYRSCKNLWKSCVEHHTFFQAKKLLPQEKNVLSQYWTMGSRNTKKRSPRLRHEIRKPRHSSADNLANEMTYITETEDVFYTYKGSLAPQDSDSEVSQNRSPHQESLSENNPAQSYLTQKSSSSVSPSSNAPGSCSPDGVDQQLLDDFHRVTKGGSTEDASQYYCDKNDNGDSYLVLIRITPDEDGKFGFNLKGGVDQKMPLVVSRINPESPADTCIPKLNEGDQIVLINGRDISEHTHDQVVMFIKASRESHSRELALVIRRRAVRSFADFKSEDELNQLFPEAIFPMCPEGGDTLEGSMAQLKKGLESGTVLIQFEQLYRKKPGLAITFAKLPQNLDKNRYKDVLPYDTTRVLLQGNEDYINASYVNMEIPAANLVNKYIATQGPLPHTCAQFWQVVWDQKLSLIVMLTTLTERGRTKCHQYWPDPPDVMNHGGFHIQCQSEDCTIAYVSREMLVTNTQTGEEHTVTHLQYVAWPDHGVPDDSSDFLEFVNYVRSLRVDSEPVLVHCSAGIGRTGVLVTMETAMCLTERNLPIYPLDIVRKMRDQRAMMVQTSSQYKFVCEAILRVYEEGLVQMLDPS

SEQ ID NO: 34253 - protein, 839 aa, Homo sapiens
  REGION 1..839: note = ENSP00000262539
MTSRLRALGGRINNIRTSELPKEKTRSEVICSIHFLDGVVQTFKVTKQDTGQVLLDMVHNHLGVTEKEYFGLQHDDDSVDSPRWLEASKAIRKQLKGGFPCTLHFRVRFFIPDPNTLQQEQTRHLYFLQLKMDICEGRLTCPLNSAVVLASYAVQSHFGDYNSSIHHPGYLSDSHFIPDQNEDFLTKVESLHEQHSGLKQSEAESCYINIARTLDFYGVELHSGRDLHNLDLMIGIASAGVAVYRKYICTSFYPWVNILKISFKRKKFFIHQRQKQAESREHIVAFNMLNYRSCKNLWKSCVEHHTFFQAKKLLPQEKNVLSQYWTMGSRNTKKSVNNQYCKKVIGGMVWNPAMRRSLSVEHLETKSLPSRSPPITPNWRSPRLRHEIRKPRHSSADNLANEMTYITETEDVFYTYKGSLAPQDSDSEVSQNRSPHQESLSENNPAQSYLTQKSSSSVSPSSNAPGSCSPDGVDQQLLDDFHRVTKGGSTEDASQYYCDKNDNGDSYLVLIRITPDEDGKFGFNLKGGVDQKMPLVVSRINPESPADTCIPKLNEGDQIVLINGRDISEHTHDQVVMFIKASRESHSRELALVIRRRAVRSFADFKSEDELNQLFPEAIFPMCPEGGDTLEGSMAQLKKGLESGTVLIQFEQLYRKKPGLAITFAKLPQNLDKNRYKDVLPYDTTRVLLQGNEDYINASYVNMEIPAANLVNKYIATQGPLPHTCAQFWQVVWDQKLSLIVMLTTLTERGRTKCHQYWPDPPDVMNHGGFHIQCQSEDCTIAYVSREMLVTNTQVSRSLRGTVEGQVLNQRPLSSQVVTLLGVHSVCTWQACQPGKNTQ

SEQ ID NO: 34254 - protein, 369 aa, Homo sapiens
  REGION 1..369: note = ENSP00000435056
MEEKIEDDFLDLDPVPETPVFDCVMDIKPEADPTSLTVKSMGLQERRGSNVSLTLDMCTPGCNEEGFGYLMSPREESAREYLLSASRVLQAEELHEKALDPFLLQAEFFEIPMNFVDPKEYDIPGLVRKNRYKTILPNPHSRVCLTSPDPDDPLSSYINANYIRGYGGEEKVYIATQGPIVSTVADFWRMVWQEHTPIIVMITNIEEMNEKCTEYWPEEQVAYDGVEITVQKVIHTEDYRLRLISLKSGTEERGLKHYWFTSWPDQKTPDRAPPLLHLVREVEEAAQQEGPHCAPIIVHCSAGIGRTGCFIATSICCQQLRQEGVVDILKTTCQLRQDRGGMIQTCEQYQFVHHVMSLYEKQLSHQSPE

SEQ ID NO: 34255 - protein, 565 aa, Homo sapiens
  REGION 1..565: note = ENSP00000351342
MNYEGARSERENHAADDSEGGALDMCCSERLPGLPQPIVMEALDEAEGLQDSQREMPPPPPPSPPSDPAQKPPPRGAGSHSLTVRSSLCLFAASQFLLACGVLWFSGYGHIWSQNATNLVSSLLTLLKQLEPTAWLDSGTWGVPSLLLVFLSVGLVLVTTLVWHLLRTPPEPPTPLPPEDRRQSVSRQPSFTYSEWMEEKIEDDFLDLDPVPETPVFDCVMDIKPEADPTSLTVKSMGLQERRGSNVSLTLDMCTPGCNEEGFGYLMSPREESAREYLLSASRVLQAEELHEKALDPFLLQAEFFEIPMNFVDPKEYDIPGLVRKNRYKTILPNPHSRVCLTSPDPDDPLSSYINANYIRGYGGEEKVYIATQGPIVSTVADFWRMVWQEHTPIIVMITNIEEMNEKCTEYWPEEQVAYDGVEITVQKVIHTEDYRLRLISLKSGTEERGLKHYWFTSWPDQKTPDRAPPLLHLVREVEEAAQQEGPHCAPIIVHCSAGIGRTGCFIATSICCQQLRQEGVVDILKTTCQLRQDRGGMIQTCEQYQFVHHVMSLYEKQLSHQSPE

SEQ ID NO: 34256 - protein, 171 aa, Homo sapiens
  REGION 1..171: note = ENSP00000379469
MWPRWKGEGVPLSVFFLCSSSFHLISISGLVCELKEFTHTWGGPLSPRQSGTEERGLKHYWFTSWPDQKTPDRAPPLLHLVREVEEAAQQEGPHCAPIIVHCSAGIGRTGCFIATSICCQQLRQEGVVDILKTTCQLRQDRGGMIQTCEQYQFVHHVMSLYEKQLSHQSPE

SEQ ID NO: 34257 - protein, 533 aa, Homo sapiens
  REGION 1..533: note = ENSP00000379473
MNYEGARSERENHAADDSEGGALDMCCSERLPGLPQPIVMEALDEAEGLQDSQREMPPPPPPSPPSDPAQKPPPRGAGSHSLTVRSSLCLFAASQFLLEPTAWLDSGTWGVPSLLLVFLSVGLVLVTTLVWHLLRTPPEPPTPLPPEDRRQSVSRQPSFTYSEWMEEKIEDDFLDLDPVPETPVFDCVMDIKPEADPTSLTVKSMGLQERRGSNVSLTLDMCTPGCNEEGFGYLMSPREESAREYLLSASRVLQAEELHEKALDPFLLQAEFFEIPMNFVDPKEYDIPGLVRKNRYKTILPNPHSRVCLTSPDPDDPLSSYINANYIRGYGGEEKVYIATQGPIVSTVADFWRMVWQEHTPIIVMITNIEEMNEKCTEYWPEEQVAYDGVEITVQKVIHTEDYRLRLISLKSGTEERGLKHYWFTSWPDQKTPDRAPPLLHLVREVEEAAQQEGPHCAPIIVHCSAGIGRTGCFIATSICCQQLRQEGVVDILKTTCQLRQDRGGMIQTCEQYQFVHHVMSLYEKQLSHQSPE

SEQ ID NO: 34258 - protein, 541 aa, Homo sapiens
  REGION 1..541: note = ENSP00000379471
MCCSERLPGLPQPIVMEALDEAEGLQDSQREMPPPPPPSPPSDPAQKPPPRGAGSHSLTVRSSLCLFAASQFLLACGVLWFSGYGHIWSQNATNLVSSLLTLLKQLEPTAWLDSGTWGVPSLLLVFLSVGLVLVTTLVWHLLRTPPEPPTPLPPEDRRQSVSRQPSFTYSEWMEEKIEDDFLDLDPVPETPVFDCVMDIKPEADPTSLTVKSMGLQERRGSNVSLTLDMCTPGCNEEGFGYLMSPREESAREYLLSASRVLQAEELHEKALDPFLLQAEFFEIPMNFVDPKEYDIPGLVRKNRYKTILPNPHSRVCLTSPDPDDPLSSYINANYIRGYGGEEKVYIATQGPIVSTVADFWRMVWQEHTPIIVMITNIEEMNEKCTEYWPEEQVAYDGVEITVQKVIHTEDYRLRLISLKSGTEERGLKHYWFTSWPDQKTPDRAPPLLHLVREVEEAAQQEGPHCAPIIVHCSAGIGRTGCFIATSICCQQLRQEGVVDILKTTCQLRQDRGGMIQTCEQYQFVHHVMSLYEKQLSHQSPE

SEQ ID NO: 34259 - protein, 2215 aa, Homo sapiens
  REGION 1..2215: note = ENSP00000334928
MEAEFYMVILTCLIFRNSEGFQIVHVQKQQCLFKNEKVVVGSCNRTIQNQQWMWTEDEKLLHVKSALCLAISNSSRGPSRSAILDRCSQAPRWTCYDQEGFLEVENASLFLQKQGSRVVVKKARKYLHSWMKIDVNKEGKLVNESLCLQKAGLGAEVSVRSTRNTAPPQILTTFNAVPDGLVFLIRNTTEAFIRNAAENYSQNSSERQHPNLHMTGITDTSWVLSTTQPFSSTTEETGLAEPERCNFTLAESKASSHSVSIQWRILGSPCNFSLIYSSDTLGAALCPTFRIDNTTYGCNLQDLQAGTIYNFRIISLDEERTVVLQTDPLPPARFGVSKEKTTSTSLHVWWTPSSGKVTSYEVQLFDENNQKIQGVQIQESTSWNEYTFFNLTAGSKYNIAITAVSGGKRSFSVYTNGSTVPSPVKDIGISTKANSLLISWSHGSGNVERYRLMLMDKGILVHGGVVDKHATSYAFHGLTPGYLYNLTVMTEAAGLQNYRWKLVRTAPMEVSNLKVTNDGSLTSLKVKWQRPPGNVDSYNITLSHKGTIKESRVLAPWITETHFKELVPGRLYQVTVSCVSGELSAQKMAVGRTFPDKVANLEANNNGRMRSLVVSWSPPAGDWEQYRILLFNDSVVLLNITVGKEETQYVMDDTGLVPGRQYEVEVIVESGNLKNSERCQGRTVPLAVLQLRVKHANETSLSIMWQTPVAEWEKYIISLADRDLLLIHKSLSKDAKEFTFTDLVPGRKYMATVTSISGDLKNSSSVKGRTVPAQVTDLHVANQGMTSSLFTNWTQAQGDVEFYQVLLIHENVVIKNESISSETSRYSFHSLKSGSLYSVVVTTVSGGISSRQVVVEGRTVPSSVSGVTVNNSGRNDYLSVSWLLAPGDVDNYEVTLSHDGKVVQSLVIAKSVRECSFSSLTPGRLYTVTITTRSGKYENHSFSQERTVPDKVQGVSVSNSARSDYLRVSWVHATGDFDHYEVTIKNKNNFIQTKSIPKSENECVFVQLVPGRLYSVTVTTKSGQYEANEQGNGRTIPEPVKDLTLRNRSTEDLHVTWSGANGDVDQYEIQLLFNDMKVFPPFHLVNTATEYRFTSLTPGRQYKILVLTISGDVQQSAFIEGFTVPSAVKNIHISPNGATDSLTVNWTPGGGDVDSYTVSAFRHSQKVDSQTIPKHVFEHTFHRLEAGEQYQIMIASVSGSLKNQINVVGRTVPASVQGVIADNAYSSYSLIVSWQKAAGVAERYDILLLTENGILLRNTSEPATTKQHKFEDLTPGKKYKIQILTVSGGLFSKEAQTEGRTVPAAVTDLRITENSTRHLSFRWTASEGELSWYNIFLYNPDGNLQERAQVDPLVQSFSFQNLLQGRMYKMVIVTHSGELSNESFIFGRTVPASVSHLRGSNRNTTDSLWFNWSPASGDFDFYELILYNPNGTKKENWKDKDLTEWRFQGLVPGRKYVLWVVTHSGDLSNKVTAESRTAPSPPSLMSFADIANTSLAITWKGPPDWTDYNDFELQWLPRDALTVFNPYNNRKSEGRIVYGLRPGRSYQFNVKTVSGDSWKTYSKPIFGSVRTKPDKIQNLHCRPQNSTAIACSWIPPDSDFDGYSIECRKMDTQEVEFSRKLEKEKSLLNIMMLVPHKRYLVSIKVQSAGMTSEVVEDSTITMIDRPPPPPPHIRVNEKDVLISKSSINFTVNCSWFSDTNGAVKYFTVVVREADGSDELKPEQQHPLPSYLEYRHNASIRVYQTNYFASKCAENPNSNSKSFNIKLGAEMESLGGKCDPTQQKFCDGPLKPHTAYRISIRAFTQLFDEDLKEFTKPLYSDTFFSLPITTESEPLFGAIEGVSAGLFLIGMLVAVVALLICRQKVSHGRERPSARLSIRRDRPLSVHLNLGQKGNRKTSCPIKINQFEGHFMKLQADSNYLLSKEYEELKDVGRNQSCDIALLPENRGKNRYNNILPYDATRVKLSNVDDDPCSDYINASYIPGNNFRREYIVTQGPLPGTKDDFWKMVWEQNVHNIVMVTQCVEKGRVKCDHYWPADQDSLYYGDLILQMLSESVLPEWTIREFKICGEEQLDAHRLIRHFHYTVWPDHGVPETTQSLIQFVRTVRDYINRSPGAGPTVVHCSAGVGRTGTFIALDRILQQLDSKDSVDIYGAVHDLRLHRVHMVQTECQYVYLHQCVRDVLRARKLRSEQENPLFPIYENVNPEYHRDPVYSRH

SEQ ID NO: 34260 - protein, 2127 aa, Homo sapiens
  REGION 1..2127: note = ENSP00000448058
MEAEFYMVILTCLIFRNSEGFQIVHVQKQQCLFKNEKVVVGSCNRTIQNQQWMWTEDEKLLHVKSALCLAISNSSRGPSRSAILDRCSQAPRWTCYDQEGFLEVENASLFLQKQGSRVVVKKARKYLHSWMKIDVNKEGKLVNESLCLQKAGLGAEVSVRSTRNTAPPQILTTFNAVPDGLVFLIRNTTEAFIRNAAENYSQNSSERQHPNLHMTGITDTSWVLSTTQPFSSTTEETGLAEPERCNFTLAESKASSHSVSIQWRILGSPCNFSLIYSSDTLGAALCPTFRIDNTTYGCNLQDLQAGTIYNFRIISLDEERTVVLQTDPLPPARFGVSKEKTTSTSLHVWWTPSSGKVTSYEVQLFDENNQKIQGVQIQESTSWNEYTFFNLTAGSKYNIAITAVSGGKRSFSVYTNGSTVPSPVKDIGISTKANSLLISWSHGSGNVERYRLMLMDKGILVHGGVVDKHATSYAFHGLTPGYLYNLTVMTEAAGLQNYRWKLVRTAPMEVSNLKVTNDGSLTSLKVKWQRPPGNVDSYNITLSHKGTIKESRVLAPWITETHFKELVPGRLYQVTVSCVSGELSAQKMAVGRTFPDKVANLEANNNGRMRSLVVSWSPPAGDWEQYRILLFNDSVVLLNITVGKEETQYVMDDTGLVPGRQYEVEVIVESGNLKNSERCQGRTVPLAVLQLRVKHANETSLSIMWQTPVAEWEKYIISLADRDLLLIHKSLSKDAKEFTFTDLVPGRKYMATVTSISGDLKNSSSVKGRTVPAQVTDLHVANQGMTSSLFTNWTQAQGDVEFYQVLLIHENVVIKNESISSETSRYSFHSLKSGSLYSVVVTTVSGGISSRQVVVEGRTVPDKVQGVSVSNSARSDYLRVSWVHATGDFDHYEVTIKNKNNFIQTKSIPKSENECVFVQLVPGRLYSVTVTTKSGQYEANEQGNGRTIPEPVKDLTLRNRSTEDLHVTWSGANGDVDQYEIQLLFNDMKVFPPFHLVNTATEYRFTSLTPGRQYKILVLTISGDVQQSAFIEGFTVPSAVKNIHISPNGATDSLTVNWTPGGGDVDSYTVSAFRHSQKVDSQTIPKHVFEHTFHRLEAGEQYQIMIASVSGSLKNQINVVGRTVPASVQGVIADNAYSSYSLIVSWQKAAGVAERYDILLLTENGILLRNTSEPATTKQHKFEDLTPGKKYKIQILTVSGGLFSKEAQTEGRTVPAAVTDLRITENSTRHLSFRWTASEGELSWYNIFLYNPDGNLQERAQVDPLVQSFSFQNLLQGRMYKMVIVTHSGELSNESFIFGRTVPASVSHLRGSNRNTTDSLWFNWSPASGDFDFYELILYNPNGTKKENWKDKDLTEWRFQGLVPGRKYVLWVVTHSGDLSNKVTAESRTAPSPPSLMSFADIANTSLAITWKGPPDWTDYNDFELQWLPRDALTVFNPYNNRKSEGRIVYGLRPGRSYQFNVKTVSGDSWKTYSKPIFGSVRTKPDKIQNLHCRPQNSTAIACSWIPPDSDFDGYSIECRKMDTQEVEFSRKLEKEKSLLNIMMLVPHKRYLVSIKVQSAGMTSEVVEDSTITMIDRPPPPPPHIRVNEKDVLISKSSINFTVNCSWFSDTNGAVKYFTVVVREADGSDELKPEQQHPLPSYLEYRHNASIRVYQTNYFASKCAENPNSNSKSFNIKLGAEMESLGGKCDPTQQKFCDGPLKPHTAYRISIRAFTQLFDEDLKEFTKPLYSDTFFSLPITTESEPLFGAIEGVSAGLFLIGMLVAVVALLICRQKVSHGRERPSARLSIRRDRPLSVHLNLGQKGNRKTSCPIKINQFEGHFMKLQADSNYLLSKEYEELKDVGRNQSCDIALLPENRGKNRYNNILPYDATRVKLSNVDDDPCSDYINASYIPGNNFRREYIVTQGPLPGTKDDFWKMVWEQNVHNIVMVTQCVEKGRVKCDHYWPADQDSLYYGDLILQMLSESVLPEWTIREFKICGEEQLDAHRLIRHFHYTVWPDHGVPETTQSLIQFVRTVRDYINRSPGAGPTVVHCSAGVGRTGTFIALDRILQQLDSKDSVDIYGAVHDLRLHRVHMVQTECQYVYLHQCVRDVLRARKLRSEQENPLFPIYENVNPEYHRDPVYSRH

SEQ ID NO: 34261 - protein, 1907 aa, Homo sapiens
  REGION 1..1907: note = ENSP00000438927
MLSHGAGLALWITLSLLQTGLAEPERCNFTLAESKASSHSVSIQWRILGSPCNFSLIYSSDTLGAALCPTFRIDNTTYGCNLQDLQAGTIYNFRIISLDEERTVVLQTDPLPPARFGVSKEKTTSTSLHVWWTPSSGKVTSYEVQLFDENNQKIQGVQIQESTSWNEYTFFNLTAGSKYNIAITAVSGGKRSFSVYTNGSTVPSPVKDIGISTKANSLLISWSHGSGNVERYRLMLMDKGILVHGGVVDKHATSYAFHGLTPGYLYNLTVMTEAAGLQNYRWKLVRTAPMEVSNLKVTNDGSLTSLKVKWQRPPGNVDSYNITLSHKGTIKESRVLAPWITETHFKELVPGRLYQVTVSCVSGELSAQKMAVGRTFPDKVANLEANNNGRMRSLVVSWSPPAGDWEQYRILLFNDSVVLLNITVGKEETQYVMDDTGLVPGRQYEVEVIVESGNLKNSERCQGRTVPLAVLQLRVKHANETSLSIMWQTPVAEWEKYIISLADRDLLLIHKSLSKDAKEFTFTDLVPGRKYMATVTSISGDLKNSSSVKGRTVPAQVTDLHVANQGMTSSLFTNWTQAQGDVEFYQVLLIHENVVIKNESISSETSRYSFHSLKSGSLYSVVVTTVSGGISSRQVVVEGRTVPSSVSGVTVNNSGRNDYLSVSWLLAPGDVDNYEVTLSHDGKVVQSLVIAKSVRECSFSSLTPGRLYTVTITTRSGKYENHSFSQERTVPDKVQGVSVSNSARSDYLRVSWVHATGDFDHYEVTIKNKNNFIQTKSIPKSENECVFVQLVPGRLYSVTVTTKSGQYEANEQGNGRTIPEPVKDLTLRNRSTEDLHVTWSGANGDVDQYEIQLLFNDMKVFPPFHLVNTATEYRFTSLTPGRQYKILVLTISGDVQQSAFIEGFTVPSAVKNIHISPNGATDSLTVNWTPGGGDVDSYTVSAFRHSQKVDSQTIPKHVFEHTFHRLEAGEQYQIMIASVSGSLKNQINVVGRTVPAAVTDLRITENSTRHLSFRWTASEGELSWYNIFLYNPDGNLQERAQVDPLVQSFSFQNLLQGRMYKMVIVTHSGELSNESFIFGRTVPASVSHLRGSNRNTTDSLWFNWSPASGDFDFYELILYNPNGTKKENWKDKDLTEWRFQGLVPGRKYVLWVVTHSGDLSNKVTAESRTAPSPPSLMSFADIANTSLAITWKGPPDWTDYNDFELQWLPRDALTVFNPYNNRKSEGRIVYGLRPGRSYQFNVKTVSGDSWKTYSKPIFGSVRTKPDKIQNLHCRPQNSTAIACSWIPPDSDFDGYSIECRKMDTQEVEFSRKLEKEKSLLNIMMLVPHKRYLVSIKVQSAGMTSEVVEDSTITMIDRPPPPPPHIRVNEKDVLISKSSINFTVNCSWFSDTNGAVKYFTVVVREADGSDELKPEQQHPLPSYLEYRHNASIRVYQTNYFASKCAENPNSNSKSFNIKLGAEMESLGGKCDPTQQKFCDGPLKPHTAYRISIRAFTQLFDEDLKEFTKPLYSDTFFSLPITTESEPLFGAIEGVSAGLFLIGMLVAVVALLICRQKVSHGRERPSARLSIRRDRPLSVHLNLGQKGNRKTSCPIKINQFEGHFMKLQADSNYLLSKEYEELKDVGRNQSCDIALLPENRGKNRYNNILPYDATRVKLSNVDDDPCSDYINASYIPGNNFRREYIVTQGPLPGTKDDFWKMVWEQNVHNIVMVTQCVEKGRVKCDHYWPADQDSLYYGDLILQMLSESVLPEWTIREFKICGEEQLDAHRLIRHFHYTVWPDHGVPETTQSLIQFVRTVRDYINRSPGAGPTVVHCSAGVGRTGTFIALDRILQQLDSKDSVDIYGAVHDLRLHRVHMVQTECQYVYLHQCVRDVLRARKLRSEQENPLFPIYENVNPEYHRDPVYSRH

SEQ ID NO: 34262 - protein, 1907 aa, Homo sapiens
  REGION 1..1907: note = ENSP00000447302
MLSHGAGLALWITLSLLQTGLAEPERCNFTLAESKASSHSVSIQWRILGSPCNFSLIYSSDTLGAALCPTFRIDNTTYGCNLQDLQAGTIYNFRIISLDEERTVVLQTDPLPPARFGVSKEKTTSTSLHVWWTPSSGKVTSYEVQLFDENNQKIQGVQIQESTSWNEYTFFNLTAGSKYNIAITAVSGGKRSFSVYTNGSTVPSPVKDIGISTKANSLLISWSHGSGNVERYRLMLMDKGILVHGGVVDKHATSYAFHGLTPGYLYNLTVMTEAAGLQNYRWKLVRTAPMEVSNLKVTNDGSLTSLKVKWQRPPGNVDSYNITLSHKGTIKESRVLAPWITETHFKELVPGRLYQVTVSCVSGELSAQKMAVGRTFPLAVLQLRVKHANETSLSIMWQTPVAEWEKYIISLADRDLLLIHKSLSKDAKEFTFTDLVPGRKYMATVTSISGDLKNSSSVKGRTVPAQVTDLHVANQGMTSSLFTNWTQAQGDVEFYQVLLIHENVVIKNESISSETSRYSFHSLKSGSLYSVVVTTVSGGISSRQVVVEGRTVPSSVSGVTVNNSGRNDYLSVSWLLAPGDVDNYEVTLSHDGKVVQSLVIAKSVRECSFSSLTPGRLYTVTITTRSGKYENHSFSQERTVPDKVQGVSVSNSARSDYLRVSWVHATGDFDHYEVTIKNKNNFIQTKSIPKSENECVFVQLVPGRLYSVTVTTKSGQYEANEQGNGRTIPEPVKDLTLRNRSTEDLHVTWSGANGDVDQYEIQLLFNDMKVFPPFHLVNTATEYRFTSLTPGRQYKILVLTISGDVQQSAFIEGFTVPSAVKNIHISPNGATDSLTVNWTPGGGDVDSYTVSAFRHSQKVDSQTIPKHVFEHTFHRLEAGEQYQIMIASVSGSLKNQINVVGRTVPASVQGVIADNAYSSYSLIVSWQKAAGVAERYDILLLTENGILLRNTSEPATTKQHKFEDLTPGKKYKIQILTVSGGLFSKEAQTEGRTVPAAVTDLRITENSTRHLSFRWTASEGELSWYNIFLYNPDGNLQERAQVDPLVQSFSFQNLLQGRMYKMVIVTHSGELSNESFIFGRTVPASVSHLRGSNRNTTDSLWFNWSPASGDFDFYELILYNPNGTKKENWKDKDLTEWRFQGLVPGRKYVLWVVTHSGDLSNKVTAESRTAPSPPSLMSFADIANTSLAITWKGPPDWTDYNDFELQWLPRDALTVFNPYNNRKSEGRIVYGLRPGRSYQFNVKTVSGDSWKTYSKPIFGSVRTKPDKIQNLHCRPQNSTAIACSWIPPDSDFDGYSIECRKMDTQEVEFSRKLEKEKSLLNIMMLVPHKRYLVSIKVQSAGMTSEVVEDSTITMIDRPPPPPPHIRVNEKDVLISKSSINFTVNCSWFSDTNGAVKYFTVVVREADGSDELKPEQQHPLPSYLEYRHNASIRVYQTNYFASKCAENPNSNSKSFNIKLGAEMESLGGKCDPTQQKFCDGPLKPHTAYRISIRAFTQLFDEDLKEFTKPLYSDTFFSLPITTESEPLFGAIEGVSAGLFLIGMLVAVVALLICRQKVSHGRERPSARLSIRRDRPLSVHLNLGQKGNRKTSCPIKINQFEGHFMKLQADSNYLLSKEYEELKDVGRNQSCDIALLPENRGKNRYNNILPYDATRVKLSNVDDDPCSDYINASYIPGNNFRREYIVTQGPLPGTKDDFWKMVWEQNVHNIVMVTQCVEKGRVKCDHYWPADQDSLYYGDLILQMLSESVLPEWTIREFKICGEEQLDAHRLIRHFHYTVWPDHGVPETTQSLIQFVRTVRDYINRSPGAGPTVVHCSAGVGRTGTFIALDRILQQLDSKDSVDIYGAVHDLRLHRVHMVQTECQYVYLHQCVRDVLRARKLRSEQENPLFPIYENVNPEYHRDPVYSRH

SEQ ID NO: 34263 - protein, 1997 aa, Homo sapiens
  REGION 1..1997: note = ENSP00000261266
MLSHGAGLALWITLSLLQTGLAEPERCNFTLAESKASSHSVSIQWRILGSPCNFSLIYSSDTLGAALCPTFRIDNTTYGCNLQDLQAGTIYNFRIISLDEERTVVLQTDPLPPARFGVSKEKTTSTSLHVWWTPSSGKVTSYEVQLFDENNQKIQGVQIQESTSWNEYTFFNLTAGSKYNIAITAVSGGKRSFSVYTNGSTVPSPVKDIGISTKANSLLISWSHGSGNVERYRLMLMDKGILVHGGVVDKHATSYAFHGLTPGYLYNLTVMTEAAGLQNYRWKLVRTAPMEVSNLKVTNDGSLTSLKVKWQRPPGNVDSYNITLSHKGTIKESRVLAPWITETHFKELVPGRLYQVTVSCVSGELSAQKMAVGRTFPDKVANLEANNNGRMRSLVVSWSPPAGDWEQYRILLFNDSVVLLNITVGKEETQYVMDDTGLVPGRQYEVEVIVESGNLKNSERCQGRTVPLAVLQLRVKHANETSLSIMWQTPVAEWEKYIISLADRDLLLIHKSLSKDAKEFTFTDLVPGRKYMATVTSISGDLKNSSSVKGRTVPAQVTDLHVANQGMTSSLFTNWTQAQGDVEFYQVLLIHENVVIKNESISSETSRYSFHSLKSGSLYSVVVTTVSGGISSRQVVVEGRTVPSSVSGVTVNNSGRNDYLSVSWLLAPGDVDNYEVTLSHDGKVVQSLVIAKSVRECSFSSLTPGRLYTVTITTRSGKYENHSFSQERTVPDKVQGVSVSNSARSDYLRVSWVHATGDFDHYEVTIKNKNNFIQTKSIPKSENECVFVQLVPGRLYSVTVTTKSGQYEANEQGNGRTIPEPVKDLTLRNRSTEDLHVTWSGANGDVDQYEIQLLFNDMKVFPPFHLVNTATEYRFTSLTPGRQYKILVLTISGDVQQSAFIEGFTVPSAVKNIHISPNGATDSLTVNWTPGGGDVDSYTVSAFRHSQKVDSQTIPKHVFEHTFHRLEAGEQYQIMIASVSGSLKNQINVVGRTVPASVQGVIADNAYSSYSLIVSWQKAAGVAERYDILLLTENGILLRNTSEPATTKQHKFEDLTPGKKYKIQILTVSGGLFSKEAQTEGRTVPAAVTDLRITENSTRHLSFRWTASEGELSWYNIFLYNPDGNLQERAQVDPLVQSFSFQNLLQGRMYKMVIVTHSGELSNESFIFGRTVPASVSHLRGSNRNTTDSLWFNWSPASGDFDFYELILYNPNGTKKENWKDKDLTEWRFQGLVPGRKYVLWVVTHSGDLSNKVTAESRTAPSPPSLMSFADIANTSLAITWKGPPDWTDYNDFELQWLPRDALTVFNPYNNRKSEGRIVYGLRPGRSYQFNVKTVSGDSWKTYSKPIFGSVRTKPDKIQNLHCRPQNSTAIACSWIPPDSDFDGYSIECRKMDTQEVEFSRKLEKEKSLLNIMMLVPHKRYLVSIKVQSAGMTSEVVEDSTITMIDRPPPPPPHIRVNEKDVLISKSSINFTVNCSWFSDTNGAVKYFTVVVREADGSDELKPEQQHPLPSYLEYRHNASIRVYQTNYFASKCAENPNSNSKSFNIKLGAEMESLGGKCDPTQQKFCDGPLKPHTAYRISIRAFTQLFDEDLKEFTKPLYSDTFFSLPITTESEPLFGAIEGVSAGLFLIGMLVAVVALLICRQKVSHGRERPSARLSIRRDRPLSVHLNLGQKGNRKTSCPIKINQFEGHFMKLQADSNYLLSKEYEELKDVGRNQSCDIALLPENRGKNRYNNILPYDATRVKLSNVDDDPCSDYINASYIPGNNFRREYIVTQGPLPGTKDDFWKMVWEQNVHNIVMVTQCVEKGRVKCDHYWPADQDSLYYGDLILQMLSESVLPEWTIREFKICGEEQLDAHRLIRHFHYTVWPDHGVPETTQSLIQFVRTVRDYINRSPGAGPTVVHCSAGVGRTGTFIALDRILQQLDSKDSVDIYGAVHDLRLHRVHMVQTECQYVYLHQCVRDVLRARKLRSEQENPLFPIYENVNPEYHRDPVYSRH

SEQ ID NO: 34264 - protein, 1583 aa, Homo sapiens
  REGION 1..1583: note = ENSP00000448349
MEAEFYMVILTCLIFRNSGFQIVHVQKQQCLFKNEKVVVGSCNRTIQNQQWMWTEDEKLLHVKSALCLAISNSSRGPSRSAILDRCSQAPRWTCYDQEGFLEVENASLFLQKQGSRVVVKKARKYLHSWMKIDVNKEGKLVNESLCLQKAGLGAEVSVRSTRNTAPPQILTTFNAVPDGLVFLIRNTTEAFIRNAAENYSQNSSERQHPNLHMTGITDTSWVLSTTQPFSSTTEETGLAEPERCNFTLAESKASSHSVSIQWRILGSPCNFSLIYSSDTLGAALCPTFRIDNTTYGCNLQDLQAGTIYNFRIISLDEERTVVLQTDPLPPARFGVSKEKTTSTSLHVWWTPSSGKVTSYEVQLFDENNQKIQGVQIQESTSWNEYTFFNLTAGSKYNIAITAVSGGKRSFSVYTNGSTVPSPVKDIGISTKANSLLISWSHGSGNVERYRLMLMDKGILVHGGVVDKHATSYAFHGLTPGYLYNLTVMTEAAGLQNYRWKLVRTAPMEVSNLKVTNDGSLTSLKVKWQRPPGNVDSYNITLSHKGTIKESRVLAPWITETHFKELVPGRLYQVTVSCVSGELSAQKMAVGRTFPDKVANLEANNNGRMRSLVVSWSPPAGDWEQYRILLFNDSVVLLNITVGKEETQYVMDDTGLVPGRQYEVEVIVESGNLKNSERCQGRTVPLAVLQLRVKHANETSLSIMWQTPVAEWEKYIISLADRDLLLIHKSLSKDAKEFTFTDLVPGRKYMATVTSISGDLKNSSSVKGRTVPAQVTDLHVANQGMTSSLFTNWTQAQGDVEFYQVLLIHENVVIKNESISSETSRYSFHSLKSGSLYSVVVTTVSGGISSRQVVVEGRTVPSSVSGVTVNNSGRNDYLSVSWLLAPGDVDNYEVTLSHDGKVVQSLVIAKSVRECSFSSLTPGRLYTVTITTRSGKYENHSFSQERTVPDKVQGVSVSNSARSDYLRVSWVHATGDFDHYEVTIKNKNNFIQTKSIPKSENECVFVQLVPGRLYSVTVTTKSGQYEANEQGNGRTIPEPVKDLTLRNRSTEDLHVTWSGANGDVDQYEIQLLFNDMKVFPPFHLVNTATEYRFTSLTPGRQYKILVLTISGDVQQSAFIEGFTVPSAVKNIHISPNGATDSLTVNWTPGGGDVDSYTVSAFRHSQKVDSQTIPKHVFEHTFHRLEAGEQYQIMIASVSGSLKNQINVVGRTVPASVQGVIADNAYSSYSLIVSWQKAAGVAERYDILLLTENGILLRNTSEPATTKQHKFEDLTPGKKYKIQILTVSGGLFSKEAQTEGRTVPAAVTDLRITENSTRHLSFRWTASEGELSWYNIFLYNPDGNLQERAQVDPLVQSFSFQNLLQGRMYKMVIVTHSGELSNESFIFGRTVPASVSHLRGSNRNTTDSLWFNWSPASGDFDFYELILYNPNGTKKENWKDKDLTEWRFQGLVPGRKYVLWVVTHSGDLSNKVTAESRTAPSPPSLMSFADIANTSLAITWKGPPDWTDYNDFELQWLPRDALTVFNPYNNRKSEGRIVYGLRPGRSYQFNVKTVSGDSWKTYSKPIFGSVRTSMTCFATLISQME

SEQ ID NO: 34265 - protein, 1407 aa, Homo sapiens
  REGION 1..1407: note = ENSP00000446982
MEAEFYMVILTCLIFRNSEGFQIVHVQKQQCLFKNEKVVVGSCNRTIQNQQWMWTEDEKLLHVKSALCLAFIRNAAENYSQNSSERQHPNLHMTGITDTSWVLSTTQPFSSTTEETGLAEPERCNFTLAESKASSHSVSIQWRILGSPCNFSLIYSSDTLGAALCPTFRIDNTTYGCNLQDLQAGTIYNFRIISLDEERTVVLQTDPLPPARFGVSKEKTTSTSLHVWWTPSSGKVTSYEVQLFDENNQKIQGVQIQESTSWNEYTFFNLTAGSKYNIAITAVSGGKRSFSVYTNGSTVPSPVKDIGISTKANSLLISWSHGSGNVERYRLMLMDKGILVHGGVVDKHATSYAFHGLTPGYLYNLTVMTEAAGLQNYRWKLVRTAPMEVSNLKVTNDGSLTSLKVKWQRPPGNVDSYNITLSHKGTIKESRVLAPWITETHFKELVPGRLYQVTVSCVSGELSAQKMAVGRTFPDKVANLEANNNGRMRSLVVSWSPPAGDWEQYRILLFNDSVVLLNITVGKEETQYVMDDTGLVPGRQYEVEVIVESGNLKNSERCQGRTVPLAVLQLRVKHANETSLSIMWQTPVAEWEKYIISLADRDLLLIHKSLSKDAKEFTFTDLVPGRKYMATVTSISGDLKNSSSVKGRTVPAQVTDLHVANQGMTSSLFTNWTQAQGDVEFYQVLLIHENVVIKNESISSETSRYSFHSLKSGSLYSVVVTTVSGGISSRQVVVEGRTVPSSVSGVTVNNSGRNDYLSVSWLLAPGDVDNYEVTLSHDGKVVQSLVIAKSVRECSFSSLTPGRLYTVTITTRSGKYENHSFSQERTVPDKVQGVSVSNSARSDYLRVSWVHATGDFDHYEVTIKNKNNFIQTKSIPKSENECVFVQLVPGRLYSVTVTTKSGQYEANEQGNGRTIPEPVKDLTLRNRSTEDLHVTWSGANGDVDQYEIQLLFNDMKVFPPFHLVNTATEYRFTSLTPGRQYKILVLTISGDVQQSAFIEGFTVPSAVKNIHISPNGATDSLTVNWTPGGGDVDSYTVSAFRHSQKVDSQTIPKHVFEHTFHRLEAGEQYQIMIASVSGSLKNQINVVGRTVPASVQGVIADNAYSSYSLIVSWQKAAGVAERYDILLLTENGILLRNTSEPATTKQHKFEDLTPGKKYKIQILTVSGGLFSKEAQTEGRTVPAAVTDLRITENSTRHLSFRWTASEGELSWYNIFLYNPDGNLQERAQVDPLVQSFSFQNLLQGRMYKMVIVTHSGELSNESFIFGRTVPASVSHLRGSNRNTTDSLWFNWSPASGDFDFYELILYNPNGTKKENWKDKDLTEWRFQGLVPGRKYVLWVVTHSGDLSNKVTAESRTAPSPPSLMSFADIANTSLAITWKGPPDWTDYNDFELQWLPRDALTVFNPYN

SEQ ID NO: 34266 - protein, 103 aa, Homo sapiens
  REGION 1..103: note = ENSP00000446934
  VARIANT 1: note = Any amino acid
XLWITLSLLQTGLAEPERCNFTLAESKASSHSVSIQWRILGSPCNFSLIYSSDTLGAALCPTFRIDNTTYGCNLQDLQAGTIYNFRIISLDEERTVVLQTGKG

SEQ ID NO: 34267 - protein, 700 aa, Homo sapiens
  REGION 1..700: note = ENSP00000254667
MEPLCPLLLVGFSLPLARALRGNETTADSNETTTTSGPPDPGASQPLLAWLLLPLLLLLLVLLLAAYFFRFRKQRKAVVSTSDKKMPNGILEEQEQQRVMLLSRSPSGPKKYFPIPVEHLEEEIRIRSADDCKQFREEFNSLPSGHIQGTFELANKEENREKNRYPNILPNDHSRVILSQLDGIPCSDYINASYIDGYKEKNKFIAAQGPKQETVNDFWRMVWEQKSATIVMLTNLKERKEEKCHQYWPDQGCWTYGNIRVCVEDCVVLVDYTIRKFCIQPQLPDGCKAPRLVSQLHFTSWPDFGVPFTPIGMLKFLKKVKTLNPVHAGPIVVHCSAGVGRTGTFIVIDAMMAMMHAEQKVDVFEFVSRIRNQRPQMVQTDMQYTFIYQALLEYYLYGDTELDVSSLEKHLQTMHGTTTHFDKIGLEEEFRKLTNVRIMKENMRTGNLPANMKKARVIQIIPYDFNRVILSMKRGQEYTDYINASFIDGYRQKDYFIATQGPLAHTVEDFWRMIWEWKSHTIVMLTEVQEREQDKCYQYWPTEGSVTHGEITIEIKNDTLSEAISIRDFLVTLNQPQARQEEQVRVVRQFHFHGWPEIGIPAEGKGMIDLIAAVQKQQQQTGNHPITVHCSAGAGRTGTFIALSNILERVKAEGLLDVFQAVKSLRLQRPHMVQTLEQYEFCYKVVQDFIDIFSDYANFK

SEQ ID NO: 34268 - protein, 140 aa, Homo sapiens
  REGION 1..140: note = ENSP00000410540
MEPLCPLLLVGFSLPLARALRGNETTADSNETTTTSGPPDPGASQPLLAWLLLPLLLLLLVLLLAAYFFRFRKQRKAVVSTSDKKMPNGILEEQEQQRVMLLSRSPSGPKKYFPIPVEHLEEEIRIRSADDCKQFREEFN

SEQ ID NO: 34269 - protein, 149 aa, Homo sapiens
  REGION 1..149: note = ENSP00000474102
MEPLCPLLLVGFSLPLARALRGNETTADSNETTTTSGPPDPGASQPLLAWLLLPLLLLLLVLLLAAYFFRFRKQRKAVVSTSDKKMPNGILEEQAKGDAAQQVTLRAQEVFSHPRGAPGGGDPYQIRRRLQAVSGGVQLIAIWTHTRNF

SEQ ID NO: 34270 - protein, 153 aa, Homo sapiens
  REGION 1..153: note = ENSP00000416939
MEPLCPLLLVGFSLPLARALRGNETTADSNETTTTSGPPDPGASQPLLAWLLLPLLLLLLVLLLAAYFFRFRKQRKAVVSTSDKKMPNGILEEQEQQRVMLLSRSPSGPKKYFPIPVEHLEEEIRIRSADDCKQFREEFNSLPSGHIQGTFEL

SEQ ID NO: 34271 - protein, 107 aa, Homo sapiens
  REGION 1..107: note = ENSP00000474830
RLPAAAGLAATAAAAPPPRAPSRRLLLQEAEESCGQHQRQEDAQRNLGGARAAKGDAAQQVTLRAQEVFSHPRGAPGGGDPYQIRRRLQAVSGGVQLIAIWTHTRNF

SEQ ID NO: 34272 - protein, 642 aa, Homo sapiens
  REGION 1..642: note = ENSP00000303350
MSNRSSFSRLTWFRKQRKAVVSTSDKKMPNGILEEQEQQRVMLLSRSPSGPKKYFPIPVEHLEEEIRIRSADDCKQFREEFNSLPSGHIQGTFELANKEENREKNRYPNILPNDHSRVILSQLDGIPCSDYINASYIDGYKEKNKFIAAQGPKQETVNDFWRMVWEQKSATIVMLTNLKERKEEKCHQYWPDQGCWTYGNIRVCVEDCVVLVDYTIRKFCIQPQLPDGCKAPRLVSQLHFTSWPDFGVPFTPIGMLKFLKKVKTLNPVHAGPIVVHCSAGVGRTGTFIVIDAMMAMMHAEQKVDVFEFVSRIRNQRPQMVQTDMQYTFIYQALLEYYLYGDTELDVSSLEKHLQTMHGTTTHFDKIGLEEEFRKLTNVRIMKENMRTGNLPANMKKARVIQIIPYDFNRVILSMKRGQEYTDYINASFIDGYRQKDYFIATQGPLAHTVEDFWRMIWEWKSHTIVMLTEVQEREQDKCYQYWPTEGSVTHGEITIEIKNDTLSEAISIRDFLVTLNQPQARQEEQVRVVRQFHFHGWPEIGIPAEGKGMIDLIAAVQKQQQQTGNHPITVHCSAGAGRTGTFIALSNILERVKAEGLLDVFQAVKSLRLQRPHMVQTLEQYEFCYKVVQDFIDIFSDYANFK

SEQ ID NO: 34273 - protein, 118 aa, Homo sapiens
  REGION 1..118: note = ENSP00000475063
MSNRSSFSRLTWFRKQRKAVVSTSDKKMPNGILEEQEQQRVMLLSRSPSGPKKYFPIPVEHLEEEIRIRSADDCKQFREEFNSLPSGHIQGTFELANKEENREKNRYPNILPRLQREE

SEQ ID NO: 34274 - protein, 536 aa, Homo sapiens
  REGION 1..536: note = ENSP00000473761
MSNRSSFSRLTWFRKQRKAVVSTSDKKMPNGILEEQEQQRVMLLSRSPSGPKKYFPIPVEHLEEEIRIRSADDCKQFREEFNSLPSGHIQGTFELANKEENREKNRYPNILPNDHSRVILSQLDGIPCSDYINASYIDGYKEKNKFIAAQGPKQETVNDFWRMVWEQKSATIVMLTNLKERKEEKCHQYWPDQGCWTYGNIRVCVEDCVVLVDYTIRKFCIQPQLPDGCKAPRLVSQLHFTSWPDFGVPFTPIGMLKFLKKVKTLNPVHAGPIVVHCSAGVGRTGTFIVIDAMMAMMHAEQKVDVFEFVSRIRNQRPQMVQTDMQYTFIYQALLEYYLYGDTELDVSSLEKHLQTMHGTTTHFDKIGLEEEFRKLTNVRIMKENMRTGNLPANMKKARVIQIIPCKAPVAWLGQGWGGAGAGGFHPGEAIDRLPLCTRVKSRVSSGLRLRAPVCCTKCQVEKTPVKHQLTQTVLHGSQASCFGYELADAGGQPRLISGEGFTEAGDLRQARLGIPCLIPCLPKPGQRPASPLHRGA

SEQ ID NO: 34275 - protein, 1337 aa, Homo sapiens
  REGION 1..1337: note = ENSP00000400010
MKPAAREARLPPRSPGLRWALPLLLLLLRLGQILCAGGTPSPIPDPSVATVATGENGITQISSTAESFHKQNGTGTPQVETNTSEDGESSGANDSLRTPEQGSNGTDGASQKTPSSTGPSPVFDIKAVSISPTNVILTWKSNDTAASEYKYVVKHKMENEKTITVVHQPWCNITGLRPATSYVFSITPGIGNETWGDPRVIKVITEPIPVSDLRVALTGVRKAALSWSNGNGTASCRVLLESIGSHEELTQDSRLQVNISGLKPGVQYNINPYLLQSNKTKGDPLGTEGGLDASNTERSRAGSPTAPVHDESLVGPVDPSSGQQSRDTEVLLVGLEPGTRYNATVYSQAANGTEGQPQAIEFRTNAIQVFDVTAVNISATSLTLIWKVSDNESSSNYTYKIHVAGETDSSNLNVSEPRAVIPGLRSSTFYNITVCPVLGDIEGTPGFLQVHTPPVPVSDFRVTVVSTTEIGLAWSSHDAESFQMHITQEGAGNSRVEITTNQSIIIGGLFPGTKYCFEIVPKGPNGTEGASRTVCNRTVPSAVFDIHVVYVTTTEMWLDWKSPDGASEYVYHLVIESKHGSNHTSTYDKAITLQGLIPGTLYNITISPEVDHVWGDPNSTAQYTRPSNVSNIDVSTNTTAATLSWQNFDDASPTYSYCLLIEKAGNSSNATQVVTDIGITDATVTELIPGSSYTVEIFAQVGDGIKSLEPGRKSFCTDPASMASFDCEVVPKEPALVLKWTCPPGANAGFELEVSSGAWNNATHLESCSSENGTEYRTEVTYLNFSTSYNISITTVSCGKMAAPTRNTCTTGITDPPPPDGSPNITSVSHNSVKVKFSGFEASHGPIKAYAVILTTGEAGHPSADVLKYTYEDFKKGASDTYVTYLIRTEEKGRSQSLSEVLKYEIDVGNESTTLGYYNGKLEPLGSYRACVAGFTNITFHPQNKGLIDGAESYVSFSRYSDAVSLPQDPGVICGAVFGCIFGALVIVTVGGFIFWRKKRKDAKNNEVSFSQIKPKKSKLIRVENFEAYFKKQQADSNCGFAEEYEDLKLVGISQPKYAAELAENRGKNRYNNVLPYDISRVKLSVQTHSTDDYINANYMPGYHSKKDFIATQGPLPNTLKDFWRMVWEKNVYAIIMLTKCVEQGRTKCEEYWPSKQAQDYGDITVAMTSEIVLPEWTIRDFTVKNIQTSESHPLRQFHFTSWPDHGVPDTTDLLINFRYLVRDYMKQSPPESPILVHCSAGVGRTGTFIAIDRLIYQIENENTVDVYGIVYDLRMHRPLMVQTEDQYVFLNQCVLDIVRSQKDSKVDLIYQNTTAMTIYENLAPVTTFGKTNGYIA

SEQ ID NO: 34276 - protein, 539 aa, Homo sapiens
  REGION 1..539: note = ENSP00000409733
MKPAAREARLPPRSPGLRWALPLLLLLLRLGQILCAGGTPSPIPDPSVATVATGENGITQISSTAESFHKQNGTGTPQVETNTSEDGESSGANDSLRTPEQGSNGTDGASQKTPSSTGPSPVFDIKAVSISPTNVILTWKSNDTAASEYKYVVKHKMENEKTITVVHQPWCNITGLRPATSYVFSITPGIGNETWGDPRVIKVITEPIPVSDLRVALTGVRKAALSWSNGNGTASCRVLLESIGSHEELTQDSRLQVNISGLKPGVQYNINPYLLQSNKTKGDPLGTEGGLDASNTERSRAGSPTAPVHDESLVGPVDPSSGQQSRDTEVLLVGLEPGTRYNATVYSQAANGTEGQPQAIEFRTNAIQVFDVTAVNISATSLTLIWKVSDNESSSNYTYKIHVAGETDSSNLNVSEPRAVIPGLRSSTFYNITVCPVLGDIEGTPGFLQVHTPPVPVSDFRVTVVSTTEIGLAWSSHDAESFQMHITQEGAGNSRVEITTNQSIIIGGLFPGTKYCFEIVPKGPNGTEGASRTVCNRTG

SEQ ID NO: 34277 - protein, 120 aa, Homo sapiens
  REGION 1..120: note = ENSP00000432686
MKPAAREARLPPRSPGLRWALPLLLLLLRLGQILCAGGRPSPVFDIKAVSISPTNVILTWKSNDTAASEYKYVVKHKMENEKTITVVHQPWCNITGLRPATSYVFSITPGIGNETWGDPR

SEQ ID NO: 34278 - protein, 146 aa, Homo sapiens
  REGION 1..146: note = ENSP00000435618
MKPAAREARLPPRSPGLRWALPLLLLLLRLGQILCAGGTPSPIPDPSVATVATGENGITQISSTAESFHKQNGTGTPQVETNTSEDGESSGANDSLRTPEQGSNGTDGASQKTPSSTEPIPVSDLRVALTGVRKAALSWSNGNGTA

SEQ ID NO: 34279 - protein, 1338 aa, Homo sapiens [sequence omitted]

SEQ ID NO: 34280 - protein, 1342 aa, Homo sapiens
  REGION 1..1342: note = ENSP00000479342
MKPAAREARLPPRSPGLRWALPLLLLLLRLGQILCAGGTPSPIPDPSVATVATGENGITQISSTAESFHKQNGTGTPQVETNTSEDGESSGANDSLRTPEQGSNGTDGASQKTPSSTGPSPVFDIKAVSISPTNVILTWKSNDTAASEYKYVVKHKMENEKTITVVHQPWCNITGLRPATSYVFSITPGIGNETWGDPRVIKVITEPIPVSDLRVALTGVRKAALSWSNGNGTASCRVLLESIGSHEELTQDSRLQVNISGLKPGVQYNINPYLLQSNKTKGDPLGTEGGLDASNTERSRAGSPTAPVHDESLVGPVDPSSGQQSRDTEVLLVGLEPGTRYNATVYSQAANGTEGQPQAIEFRTNAIQVFDVTAVNISATSLTLIWKVSDNESSSNYTYKIHVAGETDSSNLNVSEPRAVIPGLRSSTFYNITVCPVLGDIEGTPGFLQVHTPPVPVSDFRVTVVSTTEIGLAWSSHDAESFQMHITQEGAGNSRVEITTNQSIIIGGLFPGTKYCFEIVPKGPNGTEGASRTVCNRTVPSAVFDIHVVYVTTTEMWLDWKSPDGASEYVYHLVIESKHGSNHTSTYDKAITLQGLIPGTLYNITISPEVDHVWGDPNSTAQYTRPSNVSNIDVSTNTTAATLSWQNFDDASPTYSYCLLIEKAGNSSNATQVVTDIGITDATVTELIPGSSYTVEIFAQVGDGIKSLEPGRKSFCTDPASMASFDCEVVPKEPALVLKWTCPPGANAGFELEVSSGAWNNATHLESCSSENGTEYRTEVTYLNFSTSYNISITTVSCGKMAAPTRNTCTTGITDPPPPDGSPNITSVSHNSVKVKFSGFEASHGPIKAYAVILTTGEAGHPSADVLKYTYEDFKKGASDTYVTYLIRTEEKGRSQSLSEVLKYEIDVGNESTTLGYYNGKLEPLGSYRCLLRACVAGFTNITFHPQNKGLIDGAESYVSFSRYSDAVSLPQDPGVICGAVFGCIFGALVIVTVGGFIFWRKKRKDAKNNEVSFSQIKSLKRSKLIRVENFEAYFKKQQADSNCGFAEEYEDLKLVGISQPKYAAELAENRGKNRYNNVLPYDISRVKLSVQTHSTDDYINANYMPGYHSKKDFIATQGPLPNTLKDFWRMVWEKNVYAIIMLTKCVEQGRTKCEEYWPSKQAQDYGDITVAMTSEIVLPEWTIRDFTVKNIQTSESHPLRQFHFTSWPDHGVPDTTDLLINFRYLVRDYMKQSPPESPILVHCSAGVGRTGTFIAIDRLIYQIENENTVDVYGIVYDLRMHRPLMVQTEDQYVFLNQCVLDIVRSQKDSKVDLIYQNTTAMTIYENLAPVTTFGKTNGYIA

SEQ ID NO: 34281 - protein, 1440 aa, Homo sapiens
  REGION 1..1440: note = ENSP00000357209
MDTTAAAALPAFVALLLLSPWPLLGSAQGQFSAGGCTFDDGPGACDYHQDLYDDFEWVHVSAQEPHYLPPEMPQGSYMIVDSSDHDPGEKARLQLPTMKENDTHCIDFSYLLYSQKGLNPGTLNILVRVNKGPLANPIWNVTGFTGRDWLRAELAVSTFWPNEYQVIFEAEVSGGRSGYIAIDDIQVLSYPCDKSPHFLRLGDVEVNAGQNATFQCIATGRDAVHNKLWLQRRNGEDIPVAQTKNINHRRFAASFRLQEVTKTDQDLYRCVTQSERGSGVSNFAQLIVREPPRPIAPPQLLGVGPTYLLIQLNANSIIGDGPIILKEVEYRMTSGSWTETHAVNAPTYKLWHLDPDTEYEIRVLLTRPGEGGTGLPGPPLITRTKCAEPMRTPKTLKIAEIQARRIAVDWESLGYNITRCHTFNVTICYHYFRGHNESKADCLDMDPKAPQHVVNHLPPYTNVSLKMILTNPEGRKESEETIIQTDEDVPGPVPVKSLQGTSFENKIFLNWKEPLDPNGIITQYEISYSSIRSFDPAVPVAGPPQTVSNLWNSTHHVFMHLHPGTTYQFFIRASTVKGFGPATAINVTTNISAPTLPDYEGVDASLNETATTITVLLRPAQAKGAPISAYQIVVEELHPHRTKREAGAMECYQVPVTYQNAMSGGAPYYFAAELPPGNLPEPAPFTVGDNRTYQGFWNPPLAPRKGYNIYFQAMSSVEKETKTQCVRIATKAAATEEPEVIPDPAKQTDRVVKIAGISAGILVFILLLLVVILIVKKSKLAKKRKDAMGNTRQEMTHMVNAMDRSYADQSTLHAEDPLSITFMDQHNFSPRYENHSATAESSRLLDVPRYLCEGTESPYQTGQLHPAIRVADLLQHINLMKTSDSYGFKEEYESFFEGQSASWDVAKKDQNRAKNRYGNIIAYDHSRVILQPVEDDPSSDYINANYIDGYQRPSHYIATQGPVHETVYDFWRMIWQEQSACIVMVTNLVEVGRVKCYKYWPDDTEVYGDFKVTCVEMEPLAEYVVRTFTLERRGYNEIREVKQFHFTGWPDHGVPYHATGLLSFIRRVKLSNPPSAGPIVVHCSAGAGRTGCYIVIDIMLDMAEREGVVDIYNCVKALRSRRINMVQTEEQYIFIHDAILEACLCGETAIPVCEFKAAYFDMIRIDSQTNSSHLKDEFQTLNSVTPRLQAEDCSIACLPRNHDKNRFMDMLPPDRCLPFLITIDGESSNYINAALMDSYRQPAAFIVTQYPLPNTVKDFWRLVYDYGCTSIVMLNEVDLSQGCPQYWPEEGMLRYGPIQVECMSCSMDCDVINRIFRICNLTRPQEGYLMVQQFQYLGWASHREVPGSKRSFLKLILQVEKWQEECEEGEGRTIIHCLNGGGRSGMFCAIGIVVEMVKRQNVVDVFHAVKTLRNSKPNMVEAPEQYRFCYDVALEYLESS

SEQ ID NO: 34282 - protein, 1462 aa, Homo sapiens
  REGION 1..1462: note = ENSP00000432973
MDTTAAAALPAFVALLLLSPWPLLGSAQGQFSAGGCTFDDGPGACDYHQDLYDDFEWVHVSAQEPHYLPPEMPQGSYMIVDSSDHDPGEKARLQLPTMKENDTHCIDFSYLLYSQKGLNPGTLNILVRVNKGPLANPIWNVTGFTGRDWLRAELAVSTFWPNEYQVIFEAEVSGGRSGYIAIDDIQVLSYPCDKSPHFLRLGDVEVNAGQNATFQCIATGRDAVHNKLWLQRRNGEDIPVAQTKNINHRRFAASFRLQEVTKTDQDLYRCVTQSERGSGVSNFAQLIVREPPRPIAPPQLLGVGPTYLLIQLNANSIIGDGPIILKEVEYRMTSGSWTETHAVNAPTYKLWHLDPDTEYEIRVLLTRPGEGGTGLPGPPLITRTKCAEPMRTPKTLKIAEIQARRIAVDWESLGYNITRCHTFNVTICYHYFRGHNESKADCLDMDPKAPQHVVNHLPPYTNVSLKMILTNPEGRKESEETIIQTDEDVPGPVPVKSLQGTSFENKIFLNWKEPLDPNGIITQYEISYSSIRSFDPAVPVAGPPQTVSNLWNSTHHVFMHLHPGTTYQFFIRASTVKGFGPATAINVTTNISAPTLPDYEGVDASLNETATTITVLLRPAQAKGAPISAYQIVVEELHPHRTKREAGAMECYQVPVTYQNAMSGGAPYYFAAELPPGNLPEPAPFTVGDNRTYQGFWNPPLAPRKGYNIYFQAMSSVEKETKTQCVRIATKAAATEEPEVIPDPAKQTDRVVKIAGISAGILVFILLLLVVILIVKKSKLAKKRKDAMGNTRQEMTHMVNAMDRSYADQSTLHAEDPLSITFMDQHNFSPRLPNDPLVPTAVLVPITDENHSATAESSRLLDVPRYLCEGTESPYQTGQLHPAIRVADLLQHINLMKTSDSYGFKEEYESFFEGQSASWDVAKKDQNRAKNRYGNIIAYDHSRVILQPVEDDPSSDYINANYIDIWLYRDGYQRPSHYIATQGPVHETVYDFWRMIWQEQSACIVMVTNLVEVGRVKCYKYWPDDTEVYGDFKVTCVEMEPLAEYVVRTFTLERRGYNEIREVKQFHFTGWPDHGVPYHATGLLSFIRRVKLSNPPSAGPIVVHCSAGAGRTGCYIVIDIMLDMAEREGVVDIYNCVKALRSRRINMVQTEEQYIFIHDAILEACLCGETAIPVCEFKAAYFDMIRIDSQTNSSHLKDEFQTLNSVTPRLQAEDCSIACLPRNHDKNRFMDMLPPDRCLPFLITIDGESSNYINAALMDSYRQPAAFIVTQYPLPNTVKDFWRLVYDYGCTSIVMLNEVDLSQGCPQYWPEEGMLRYGPIQVECMSCSMDCDVINRIFRICNLTRPQEGYLMVQQFQYLGWASHREVPGSKRSFLKLILQVEKWQEECEEGEGRTIIHCLNGGGRSGMFCAIGIVVEMVKRQNVVDVFHAVKTLRNSKPNMVEAPEQYRFCYDVALEYLESS

SEQ ID NO: 34283 - protein, 1446 aa, Homo sapiens
  REGION 1..1446: note = ENSP00000357196
MDTTAAAALPAFVALLLLSPWPLLGSAQGQFSAGGCTFDDGPGACDYHQDLYDDFEWVHVSAQEPHYLPPEMPQGSYMIVDSSDHDPGEKARLQLPTMKENDTHCIDFSYLLYSQKGLNPGTLNILVRVNKGPLANPIWNVTGFTGRDWLRAELAVSTFWPNEYQVIFEAEVSGGRSGYIAIDDIQVLSYPCDKSPHFLRLGDVEVNAGQNATFQCIATGRDAVHNKLWLQRRNGEDIPVAQTKNINHRRFAASFRLQEVTKTDQDLYRCVTQSERGSGVSNFAQLIVREPPRPIAPPQLLGVGPTYLLIQLNANSIIGDGPIILKEVEYRMTSGSWTETHAVNAPTYKLWHLDPDTEYEIRVLLTRPGEGGTGLPGPPLITRTKCAEPMRTPKTLKIAEIQARRIAVDWESLGYNITRCHTFNVTICYHYFRGHNESKADCLDMDPKAPQHVVNHLPPYTNVSLKMILTNPEGRKESEETIIQTDEDVPGPVPVKSLQGTSFENKIFLNWKEPLDPNGIITQYEISYSSIRSFDPAVPVAGPPQTVSNLWNSTHHVFMHLHPGTTYQFFIRASTVKGFGPATAINVTTNISAPTLPDYEGVDASLNETATTITVLLRPAQAKGAPISAYQIVVEELHPHRTKREAGAMECYQVPVTYQNAMSGGAPYYFAAELPPGNLPEPAPFTVGDNRTYQGFWNPPLAPRKGYNIYFQAMSSVEKETKTQCVRIATKAAATEEPEVIPDPAKQTDRVVKIAGISAGILVFILLLLVVILIVKKSKLAKKRKDAMGNTRQEMTHMVNAMDRSYADQSTLHAEDPLSITFMDQHNFSPRYENHSATAESSRLLDVPRYLCEGTESPYQTGQLHPAIRVADLLQHINLMKTSDSYGFKEEYESFFEGQSASWDVAKKDQNRAKNRYGNIIAYDHSRVILQPVEDDPSSDYINANYIDIWLYRDGYQRPSHYIATQGPVHETVYDFWRMIWQEQSACIVMVTNLVEVGRVKCYKYWPDDTEVYGDFKVTCVEMEPLAEYVVRTFTLERRGYNEIREVKQFHFTGWPDHGVPYHATGLLSFIRRVKLSNPPSAGPIVVHCSAGAGRTGCYIVIDIMLDMAEREGVVDIYNCVKALRSRRINMVQTEEQYIFIHDAILEACLCGETAIPVCEFKAAYFDMIRIDSQTNSSHLKDEFQTLNSVTPRLQAEDCSIACLPRNHDKNRFMDMLPPDRCLPFLITIDGESSNYINAALMDSYRQPAAFIVTQYPLPNTVKDFWRLVYDYGCTSIVMLNEVDLSQGCPQYWPEEGMLRYGPIQVECMSCSMDCDVINRIFRICNLTRPQEGYLMVQQFQYLGWASHREVPGSKRSFLKLILQVEKWQEECEEGEGRTIIHCLNGGGRSGMFCAIGIVVEMVKRQNVVDVFHAVKTLRNSKPNMVEAPEQYRFCYDVALEYLESS

SEQ ID NO: 34284 - protein, 1458 aa, Homo sapiens
  REGION 1..1458: note = ENSP00000357193
MDTTAAAALPAFVALLLLSPWPLLGSAQGQFSAGGCTFDDGPGACDYHQDLYDDFEWVHVSAQEPHYLPPEMPQGSYMIVDSSDHDPGEKARLQLPTMKENDTHCIDFSYLLYSQKGLNPGTLNILVRVNKGPLANPIWNVTGFTGRDWLRAELAVSTFWPNEYQVIFEAEVSGGRSGYIAIDDIQVLSYPCDKSPHFLRLGDVEVNAGQNATFQCIATGRDAVHNKLWLQRRNGEDIPVAQTKNINHRRFAASFRLQEVTKTDQDLYRCVTQSERGSGVSNFAQLIVREPPRPIAPPQLLGVGPTYLLIQLNANSIIGDGPIILKEVEYRMTSGSWTETHAVNAPTYKLWHLDPDTEYEIRVLLTRPGEGGTGLPGPPLITRTKCAEPMRTPKTLKIAEIQARRIAVDWESLGYNITRCHTFNVTICYHYFRGHNESKADCLDMDPKAPQHVVNHLPPYTNVSLKMILTNPEGRKESEETIIQTDEDVPGPVPVKSLQGTSFENKIFLNWKEPLDPNGIITQYEISYSSIRSFDPAVPVAGPPQTVSNLWNSTHHVFMHLHPGTTYQFFIRASTVKGFGPATAINVTTNISAPTLPDYEGVDASLNETATTITVLLRPAQAKGAPISAYQIVVEELHPHRTKREAGAMECYQVPVTYQNAMSGGAPYYFAAELPPGNLPEPAPFTVGDNRTYQGFWNPPLAPRKGYNIYFQAMSSVEKETKTQCVRIATKAAATEEPEVIPDPAKQTDRVVKIAGISAGILVFILLLLVVILIVKKSKLAKKRKDAMGNTRQEMTHMVNAMDRSYADQSTLHAEDPLSITFMDQHNFSPRLPNDPLVPTAVLDENHSATAESSRLLDVPRYLCEGTESPYQTGQLHPAIRVADLLQHINLMKTSDSYGFKEEYESFFEGQSASWDVAKKDQNRAKNRYGNIIAYDHSRVILQPVEDDPSSDYINANYIDIWLYRDGYQRPSHYIATQGPVHETVYDFWRMIWQEQSACIVMVTNLVEVGRVKCYKYWPDDTEVYGDFKVTCVEMEPLAEYVVRTFTLERRGYNEIREVKQFHFTGWPDHGVPYHATGLLSFIRRVKLSNPPSAGPIVVHCSAGAGRTGCYIVIDIMLDMAEREGVVDIYNCVKALRSRRINMVQTEEQYIFIHDAILEACLCGETAIPVCEFKAAYFDMIRIDSQTNSSHLKDEFQTLNSVTPRLQAEDCSIACLPRNHDKNRFMDMLPPDRCLPFLITIDGESSNYINAALMDSYRQPAAFIVTQYPLPNTVKDFWRLVYDYGCTSIVMLNEVDLSQGCPQYWPEEGMLRYGPIQVECMSCSMDCDVINRIFRICNLTRPQEGYLMVQQFQYLGWASHREVPGSKRSFLKLILQVEKWQEECEEGEGRTIIHCLNGGGRSGMFCAIGIVVEMVKRQNVVDVFHAVKTLRNSKPNMVEAPEQYRFCYDVALEYLESS

SEQ ID NO: 34285 - protein, 1439 aa, Homo sapiens
  REGION 1..1439: note = ENSP00000357198
MDTTAAAALPAFVALLLLSPWPLLGSAQGQFSAGGCTFDDGPGACDYHQDLYDDFEWVHVSAQEPHYLPPEMPQGSYMIVDSSDHDPGEKARLQLPTMKENDTHCIDFSYLLYSQKGLNPGTLNILVRVNKGPLANPIWNVTGFTGRDWLRAELAVSTFWPNEYQVIFEAEVSGGRSGYIAIDDIQVLSYPCDKSPHFLRLGDVEVNAGQNATFQCIATGRDAVHNKLWLQRRNGEDIPVAQTKNINHRRFAASFRLQEVTKTDQDLYRCVTQSERGSGVSNFAQLIVREPPRPIAPPQLLGVGPTYLLIQLNANSIIGDGPIILKEVEYRMTSGSWTETHAVNAPTYKLWHLDPDTEYEIRVLLTRPGEGGTGLPGPPLITRTKCAEPMRTPKTLKIAEIQARRIAVDWESLGYNITRCHTFNVTICYHYFRGHNESKADCLDMDPKAPQHVVNHLPPYTNVSLKMILTNPEGRKESEETIIQTDEDVPGPVPVKSLQGTSFENKIFLNWKEPLDPNGIITQYEISYSSIRSFDPAVPVAGPPQTVSNLWNSTHHVFMHLHPGTTYQFFIRASTVKGFGPATAINVTTNISAPTLPDYEGVDASLNETATTITVLLRPAQAKGAPISAYQIVVEELHPHRTKREAGAMECYQVPVTYQNAMSGGAPYYFAAELPPGNLPEPAPFTVGDNRTYQGFWNPPLAPRKGYNIYFQAMSSVEKETKTQCVRIATKAATEEPEVIPDPAKQTDRVVKIAGISAGILVFILLLLVVILIVKKSKLAKKRKDAMGNTRQEMTHMVNAMDRSYADQSTLHAEDPLSITFMDQHNFSPRYENHSATAESSRLLDVPRYLCEGTESPYQTGQLHPAIRVADLLQHINLMKTSDSYGFKEEYESFFEGQSASWDVAKKDQNRAKNRYGNIIAYDHSRVILQPVEDDPSSDYINANYIDGYQRPSHYIATQGPVHETVYDFWRMIWQEQSACIVMVTNLVEVGRVKCYKYWPDDTEVYGDFKVTCVEMEPLAEYVVRTFTLERRGYNEIREVKQFHFTGWPDHGVPYHATGLLSFIRRVKLSNPPSAGPIVVHCSAGAGRTGCYIVIDIMLDMAEREGVVDIYNCVKALRSRRINMVQTEEQYIFIHDAILEACLCGETAIPVCEFKAAYFDMIRIDSQTNSSHLKDEFQTLNSVTPRLQAEDCSIACLPRNHDKNRFMDMLPPDRCLPFLITIDGESSNYINAALMDSYRQPAAFIVTQYPLPNTVKDFWRLVYDYGCTSIVMLNEVDLSQGCPQYWPEEGMLRYGPIQVECMSCSMDCDVINRIFRICNLTRPQEGYLMVQQFQYLGWASHREVPGSKRSFLKLILQVEKWQEECEEGEGRTIIHCLNGGGRSGMFCAIGIVVEMVKRQNVVDVFHAVKTLRNSKPNMVEAPEQYRFCYDVALEYLESS

SEQ ID NO: 34286 - protein, 1472 aa, Homo sapiens
  REGION 1..1472: note = ENSP00000357190
MDTTAAAALPAFVALLLLSPWPLLGSAQGQFSAGGCTFDDGPGACDYHQDLYDDFEWVHVSAQEPHYLPPEMPQGSYMIVDSSDHDPGEKARLQLPTMKENDTHCIDFSYLLYSQKGLNPGTLNILVRVNKGPLANPIWNVTGFTGRDWLRAELAVSTFWPNEYQVIFEAEVSGGRSGYIAIDDIQVLSYPCDKSPHFLRLGDVEVNAGQNATFQCIATGRDAVHNKLWLQRRNGEDIPVAQTKNINHRRFAASFRLQEVTKTDQDLYRCVTQSERGSGVSNFAQLIVREPPRPIAPPQLLGVGPTYLLIQLNANSIIGDGPIILKEVEYRMTSGSWTETHAVNAPTYKLWHLDPDTEYEIRVLLTRPGEGGTGLPGPPLITRTKCAEPMRTPKTLKIAEIQARRIAVDWESLGYNITRCHTFNVTICYHYFRGHNESKADCLDMDPKAPQHVVNHLPPYTNVSLKMILTNPEGRKESEETIIQTDEDVPGPVPVKSLQGTSFENKIFLNWKEPLDPNGIITQYEISYSSIRSFDPAVPVAGPPQTVSNLWNSTHHVFMHLHPGTTYQFFIRASTVKGFGPATAINVTTNISAPTLPDYEGVDASLNETATTITVLLRPAQAKGAPISAYQIVVEELHPHRTKREAGAMECYQVPVTYQNAMSGGAPYYFAAELPPGNLPEPAPFTVGDNRTYQGFWNPPLAPRKGYNIYFQAMSSVEKETKTQCVRIATKAAATEEPEVIPDPAKQTDRVVKIAGISAGILVFILLLLVVILIVKKRRSYYSYSYYLKLAKKRKDAMGNTRQEMTHMVNAMDRSYADQSTLHAEDPLSITFMDQHNFSPRLPNDPLVPTAVLVPITDENHSATAESSRLLDVPRYLCEGTESPYQTGQLHPAIRVADLLQHINLMKTSDSYGFKEEYESFFEGQSASWDVAKKDQNRAKNRYGNIIAYDHSRVILQPVEDDPSSDYINANYIDIWLYRDGYQRPSHYIATQGPVHETVYDFWRMIWQEQSACIVMVTNLVEVGRVKCYKYWPDDTEVYGDFKVTCVEMEPLAEYVVRTFTLERRGYNEIREVKQFHFTGWPDHGVPYHATGLLSFIRRVKLSNPPSAGPIVVHCSAGAGRTGCYIVIDIMLDMAEREGVVDIYNCVKALRSRRINMVQTEEQYIFIHDAILEACLCGETAIPVCEFKAAYFDMIRIDSQTNSSHLKDEFQTLNSVTPRLQAEDCSIACLPRNHDKNRFMDMLPPDRCLPFLITIDGESSNYINAALMDSYRQPAAFIVTQYPLPNTVKDFWRLVYDYGCTSIVMLNEVDLSQGCPQYWPEEGMLRYGPIQVECMSCSMDCDVINRIFRICNLTRPQEGYLMVQQFQYLGWASHREVPGSKRSFLKLILQVEKWQEECEEGEGRTIIHCLNGGGRSGMFCAIGIVVEMVKRQNVVDVFHAVKTLRNSKPNMVEAPEQYRFCYDVALEYLESS

SEQ ID NO: 34287 - protein, 343 aa, Homo sapiens
  REGION 1..343: note = ENSP00000406825
  VARIANT 1: note = Any amino acid
XKAAATEEPEVIPDPAKQTDRVVKIAGISAGILVFILLLLVVILIVKKRRSYYSYSYYLKLAKKRKDAMGNTRQEMTHMVNAMDRSYADQSTLHAEDPLSITFMDQHNFSPRLPNDPLVPTAVLDENHSATAESSRLLDVPRYLCEGTESPYQTGQLHPAIRVADLLQHINLMKTSDSYGFKEEYESFFEGQSASWDVAKKDQNRAKNRYGNIIAYDHSRVILQPVEDDPSSDYINANYIDGYQRPSHYIATQGPVHETVYDFWRMIWQEQSACIVMVTNLVEVGRVKCYKYWPDDTEVYGDFKVTCVEMEPLAEYVVRTFTLERRGYNEIREVKQFHFTGWP

SEQ ID NO: 34288 - protein, 260 aa, Homo sapiens
  REGION 1..260: note = ENSP00000408180
WRRHICIRNIRRSYYSYSYYLKLAKKRKDAMGNTRQEMTHMVNAMDRSYADQSTLHAEDPLSITFMDQHNFSPRLPNDPLVPTAVLVPITDENHSATAESSRLLDVPRYLCEGTESPYQTGQLHPAIRVADLLQHINLMKTSDSYGFKEEYESFFEGQSASWDVAKKDQNRAKNRYGNIIAYDHSRVILQPVEDDPSSDYINANYIDGYQRPSHYIATQGPVHETVYDFWRMIWQEQSACIVMVTNLVEVGRVKCYKYWP

SEQ ID NO: 34289 - protein, 20 aa, Homo sapiens
  REGION 1..20: note = ENSP00000432960
VHVSAQEPHYLPPEMPQGNI

SEQ ID NO: 34290 - protein, 204 aa, Homo sapiens
  REGION 1..204: note = ENSP00000434058
  VARIANT 1: note = Any amino acid
XNPGTLNILVRVNKGPLANPIWNVTGFTGRDWLRAELAVSTFWPNEYQRRNGEDIPVAQTKNINHRRFAASFRLQEVTKTDQDLYRCVTQSERGSGVSNFAQLIVREPPRPIAPPQLLGVGPTYLLIQLNANSIIGDGPIILKEVEYRMTSGSWTETHAVNAPTYKLWHLDPDTEYEIRVLLTRPGEGGTGLPGPPLITRTKCA

SEQ ID NO: 34291 - protein, 248 aa, Homo sapiens
  REGION 1..248: note = ENSP00000434116
MDTTAAAALPAFVALLLLSPWPLLGSAQGQFSAGGCTFDDGPGACDYHQDLYDDFEWVHVSAQEPHYLPPEMPQGSYMIVDSSDHDPGEKARLQLPTMKENDTHCIDFSYLLYSQKGLNPGTLNILVRVNKGPLANPIWNVTGFTGRDWLRAELAVSTFWPNEYQVIICTFLVYVLMSSVLTICVIHRCKYASHGNERLPSCLPHPHYWGSVIHRYTYASHGNERLPLFLPHPVDEEVFGDIGTKPSN

SEQ ID NO: 34292 - protein, 77 aa, Homo sapiens
  REGION 1..77: note = ENSP00000376243
MDTTAAAALPAFVALLLLSPWPLLGSAQGQFSAVSVLVVGNFCCCCSAAVCHSIRHLSRTQNPGQDHEGRLKRWLYF

SEQ ID NO: 34293 - protein, 39 aa, Homo sapiens
  REGION 1..39: note = ENSP00000437299
MDTTAAAALPAFVALLLLSPWPLLGSAQGQFSAEKACSY

SEQ ID NO: 34294 - protein, 1440 aa, Homo sapiens; identical to SEQ ID NO: 34281
  REGION 1..1440: note = ENSP00000483766

SEQ ID NO: 34295 - protein, 1462 aa, Homo sapiens; identical to SEQ ID NO: 34282
  REGION 1..1462: note = ENSP00000477791

SEQ ID NO: 34296 - protein, 1446 aa, Homo sapiens; identical to SEQ ID NO: 34283
  REGION 1..1446: note = ENSP00000484742

SEQ ID NO: 34297 - protein, 1458 aa, Homo sapiens; identical to SEQ ID NO: 34284
  REGION 1..1458: note = ENSP00000487066

SEQ ID NO: 34298 - protein, 1439 aa, Homo sapiens; identical to SEQ ID NO: 34285
  REGION 1..1439: note = ENSP00000486442

SEQ ID NO: 34299 - protein, 1472 aa, Homo sapiens; identical to SEQ ID NO: 34286
  REGION 1..1472: note = ENSP00000487005

SEQ ID NO: 34300 - protein, 314 aa, Homo sapiens
  REGION 1..314: note = ENSP00000485812
  VARIANT 1: note = Any amino acid
XAATEEPEVIPDPAKQTDRVVKIAGISAGILVFILLLLVVILIVKKRRSYYSYSYYLKLAKKRKDAMGNTRQEMTHMVNAMDRSYADQSTLHAEDPLSITFMDQHNFSPRLPNDPLVPTAVLDENHSATAESSRLLDVPRYLCEGTESPYQTGQLHPAIRVADLLQHINLMKTSDSYGFKEEYESFFEGQSASWDVAKKDQNRAKNRYGNIIAYDHSRVILQPVEDDPSSDYINANYIDGYQRPSHYIATQGPVHETVYDFWRMIWQEQSACIVMVTNLVEVGRVKCYKYWPDDTEVYGDFKVTCVEMEPLAEY

SEQ ID NO: 34301 - protein, 260 aa, Homo sapiens; identical to SEQ ID NO: 34288
  REGION 1..260: note = ENSP00000487578

SEQ ID NO: 34302 - protein, 20 aa, Homo sapiens
  REGION 1..20: note = ENSP00000486036
VHVSAQEPHYLPPEMPQGNI

SEQ ID NO: 34303 - protein, 204 aa, Homo sapiens; identical to SEQ ID NO: 34290
  REGION 1..204: note = ENSP00000487445
  VARIANT 1: note = Any amino acid

SEQ ID NO: 34304 - protein, 248 aa, Homo sapiens; identical to SEQ ID NO: 34291
  REGION 1..248: note = ENSP00000486448

SEQ ID NO: 34305 - protein, 77 aa, Homo sapiens; identical to SEQ ID NO: 34292
  REGION 1..77: note = ENSP00000482183

SEQ ID NO: 34306 - protein, 39 aa, Homo sapiens; identical to SEQ ID NO: 34293
  REGION 1..39: note = ENSP00000485893

SEQ ID NO: 34307 - protein, 1465 aa, Homo sapiens
  REGION 1..1465: note = ENSP00000463325
MRGLGTCLATLAGLLLTAAGETFSGGCLFDEPYSTCGYSQSEGDDFNWEQVNTLTKPTSDPWMPSGSFMLVNASGRPEGQRAHLLLPQLKENDTHCIDFHYFVSSKSNSPPGLLNVYVKVNNGPLGNPIWNISGDPTRTWNRAELAISTFWPNFYQVIFEVITSGHQGYLAIDEVKVLGHPCTRTPHFLRIQNVEVNAGQFATFQCSAIGRTVAGDRLWLQGIDVRDAPLKEIKVTSSRRFIASFNVVNTTKRDAGKYRCMIRTEGGVGISNYAELVVKEPPVPIAPPQLASVGATYLWIQLNANSINGDGPIVAREVEYCTASGSWNDRQPVDSTSYKIGHLDPDTEYEISVLLTRPGEGGTGSPGPALRTRTKCADPMRGPRKLEVVEVKSRQITIRWEPFGYNVTRCHSYNLTVHYCYQVGGQEQVREEVSWDTENSHPQHTITNLSPYTNVSVKLILMNPEGRKESQELIVQTDEDLPGAVPTESIQGSTFEEKIFLQWREPTQTYGVITLYEITYKAVSSFDPEIDLSNQSGRVSKLGNETHFLFFGLYPGTTYSFTIRASTAKGFGPPATNQFTTKISAPSMPAYELETPLNQTDNTVTVMLKPAHSRGAPVSVYQIVVEEERPRRTKKTTEILKCYPVPIHFQNASLLNSQYYFAAEFPADSLQAAQPFTIGDNKTYNGYWNTPLLPYKSYRIYFQAASRANGETKIDCVQVATKGAATPKPVPEPEKQTDHTVKIAGVIAGILLFVIIFLGVVLVMKKRKLAKKRKETMSSTRQEMTVMVNSMDKSYAEQGTNCDEAFSFMDTHNLNGRSVSSPSSFTMKTNTLSTSVPNSYYPDPFVPTAILVPINDETHTMASDTSSLVQSHTYKKREPADVPYQTGQLHPAIRVADLLQHITQMKCAEGYGFKEEYESFFEGQSAPWDSAKKDENRMKNRYGNIIAYDHSRVRLQTIEGDTNSDYINGNYIDGYHRPNHYIATQGPMQETIYDFWRMVWHENTASIIMVTNLVEVGRVKCCKYWPDDTEIYKDIKVTLIETELLAEYVIRTFAVEKRGVHEIREIRQFHFTGWPDHGVPYHATGLLGFVRQVKSKSPPSAGPLVVHCSAGAGRTGCFIVIDIMLDMAEREGVVDIYNCVRELRSRRVNMVQTEEQYVFIHDAILEACLCGDTSVPASQVRSLYYDMNKLDPQTNSSQIKEEFRTLNMVTPTLRVEDCSIALLPRNHEKNRCMDILPPDRCLPFLITIDGESSNYINAALMDSYKQPSAFIVTQHPLPNTVKDFWRLVLDYHCTSVVMLNDVDPAQLCPQYWPENGVHRHGPIQVEFVSADLEEDIISRIFRIYNAARPQDGYRMVQQFQFLGWPMYRDTPVSKRSFLKLIRQVDKWQEEYNGGEGRTVVHCLNGGGRSGTFCAISIVCEMLRHQRTVDVFHAVKTLRNNKPNMVDLLDQYKFCYEVALEYLNSG

SEQ ID NO: 34308 - protein, 1452 aa, Homo sapiens
  REGION 1..1452: note = ENSP00000331418
MRGLGTCLATLAGLLLTAAGETFSGGCLFDEPYSTCGYSQSEGDDFNWEQVNTLTKPTSDPWMPSGSFMLVNASGRPEGQRAHLLLPQLKENDTHCIDFHYFVSSKSNSPPGLLNVYVKVNNGPLGNPIWNISGDPTRTWNRAELAISTFWPNFYQVIFEVITSGHQGYLAIDEVKVLGHPCTRTPHFLRIQNVEVNAGQFATFQCSAIGRTVAGDRLWLQGIDVRDAPLKEIKVTSSRRFIASFNVVNTTKRDAGKYRCMIRTEGGVGISNYAELVVKEPPVPIAPPQLASVGATYLWIQLNANSINGDGPIVAREVEYCTASGSWNDRQPVDSTSYKIGHLDPDTEYEISVLLTRPGEGGTGSPGPALRTRTKCADPMRGPRKLEVVEVKSRQITIRWEPFGYNVTRCHSYNLTVHYCYQVGGQEQVREEVSWDTENSHPQHTITNLSPYTNVSVKLILMNPEGRKESQELIVQTDEDLPGAVPTESIQGSTFEEKIFLQWREPTQTYGVITLYEITYKAVSSFDPEIDLSNQSGRVSKLGNETHFLFFGLYPGTTYSFTIRASTAKGFGPPATNQFTTKISAPSMPAYELETPLNQTDNTVTVMLKPAHSRGAPVSVYQIVVEEERPRRTKKTTEILKCYPVPIHFQNASLLNSQYYFAAEFPADSLQAAQPFTIGDNKTYNGYWNTPLLPYKSYRIYFQAASRANGETKIDCVQVATKGAATPKPVPEPEKQTDHTVKIAGVIAGILLFVIIFLGVVLVMKKRKLAKKRKETMSSTRQEMTVMVNSMDKSYAEQGTNCDEAFSFMDTHNLNGRSVSSPSSFTMKTNTLSTSVPNSYYPDETHTMASDTSSLVQSHTYKKREPADVPYQTGQLHPAIRVADLLQHITQMKCAEGYGFKEEYESFFEGQSAPWDSAKKDENRMKNRYGNIIAYDHSRVRLQTIEGDTNSDYINGNYIDGYHRPNHYIATQGPMQETIYDFWRMVWHENTASIIMVTNLVEVGRVKCCKYWPDDTEIYKDIKVTLIETELLAEYVIRTFAVEKRGVHEIREIRQFHFTGWPDHGVPYHATGLLGFVRQVKSKSPPSAGPLVVHCSAGAGRTGCFIVIDIMLDMAEREGVVDIYNCVRELRSRRVNMVQTEEQYVFIHDAILEACLCGDTSVPASQVRSLYYDMNKLDPQTNSSQIKEEFRTLNMVTPTLRVEDCSIALLPRNHEKNRCMDILPPDRCLPFLITIDGESSNYINAALMDSYKQPSAFIVTQHPLPNTVKDFWRLVLDYHCTSVVMLNDVDPAQLCPQYWPENGVHRHGPIQVEFVSADLEEDIISRIFRIYNAARPQDGYRMVQQFQFLGWPMYRDTPVSKRSFLKLIRQVDKWQEEYNGGEGRTVVHCLNGGGRSGTFCAISIVCEMLRHQRTVDVFHAVKTLRNNKPNMVDLLDQYKFCYEVALEYLNSG

SEQ ID NO: 34309 - protein, 1390 aa, Homo sapiens
  REGION 1..1390: note = ENSP00000382927
MPSGSFMLVNASGRPEGQRAHLLLPQLKENDTHCIDFHYFVSSKSNSPPGLLNVYVKVNNGPLGNPIWNISGDPTRTWNRAELAISTFWPNFYQVIFEVITSGHQGYLAIDEVKVLGHPCTRTPHFLRIQNVEVNAGQFATFQCSAIGRTVAGDRLWLQGIDVRDAPLKEIKVTSSRRFIASFNVVNTTKRDAGKYRCMIRTEGGVGISNYAELVVKEPPVPIAPPQLASVGATYLWIQLNANSINGDGPIVAREVEYCTASGSWNDRQPVDSTSYKIGHLDPDTEYEISVLLTRPGEGGTGSPGPALRTRTKCADPMRGPRKLEVVEVKSRQITIRWEPFGYNVTRCHSYNLTVHYCYQVGGQEQVREEVSWDTENSHPQHTITNLSPYTNVSVKLILMNPEGRKESQELIVQTDEDLPGAVPTESIQGSTFEEKIFLQWREPTQTYGVITLYEITYKAVSSFDPEIDLSNQSGRVSKLGNETHFLFFGLYPGTTYSFTIRASTAKGFGPPATNQFTTKISAPSMPAYELETPLNQTDNTVTVMLKPAHSRGAPVSVYQIVVEEERPRRTKKTTEILKCYPVPIHFQNASLLNSQYYFAAEFPADSLQAAQPFTIGDNKTYNGYWNTPLLPYKSYRIYFQAASRANGETKIDCVQVATKGAATPKPVPEPEKQTDHTVKIAGVIAGILLFVIIFLGVVLVMKKRKLAKKRKETMSSTRQEMTVMVNSMDKSYAEQGTNCDEAFSFMDTHNLNGRSVSSPSSFTMKTNTLSTSVPNSYYPDETHTMASDTSSLVQSHTYKKREPADVPYQTGQLHPAIRVADLLQHITQMKCAEGYGFKEEYESFFEGQSAPWDSAKKDENRMKNRYGNIIAYDHSRVRLQTIEGDTNSDYINGNYIDGYHRPNHYIATQGPMQETIYDFWRMVWHENTASIIMVTNLVEVGRVKCCKYWPDDTEIYKDIKVTLIETELLAEYVIRTFAVEKRGVHEIREIRQFHFTGWPDHGVPYHATGLLGFVRQVKSKSPPSAGPLVVHCSAGAGRTGCFIVIDIMLDMAEREGVVDIYNCVRELRSRRVNMVQTEEQYVFIHDAILEACLCGDTSVPASQVRSLYYDMNKLDPQTNSSQIKEEFRTLNMVTPTLRVEDCSIALLPRNHEKNRCMDILPPDRCLPFLITIDGESSNYINAALMDSYKQPSAFIVTQHPLPNTVKDFWRLVLDYHCTSVVMLNDVDPAQLCPQYWPENGVHRHGPIQVEFVSADLEEDIISRIFRIYNAARPQDGYRMVQQFQFLGWPMYRDTPVSKRSFLKLIRQVDKWQEEYNGGEGRTVVHCLNGGGRSGTFCAISIVCEMLRHQRTVDVFHAVKTLRNNKPNMVDLLDQYKFCYEVALEYLNSG

SEQ ID NO: 34310 - protein, 173 aa, Homo sapiens
  REGION 1..173: note = ENSP00000463558
MGTLSLHPGIDVRDAPLKEIKVTSSRRFIASFNVVNTTKRDAGKYRCMIRTEGGVGISNYAELVVKEPPVPIAPPQLASVGATYLWIQLNANSINGDGPIVAREVEYCTASGSWNDRQPVDSTSYKIGHLDPDTEYEISVLLTRPGEGGTGSPGPALRTRTKCADPMRGPRKL

SEQ ID NO: 34311 - protein, 264 aa, Homo sapiens
  REGION 1..264: note = ENSP00000462176
  VARIANT 1: note = Any amino acid
XEIDLSNQSGRVSKLGNETHFLFFGLYPGTTYSFTIRASTAKGFGPPATNQFTTKISAPSMPAYELETPLNQTDNTVTVMLKPAHSRGAPVSVYQIVVEEERPRRTKKTTEILKCYPVPIHFQNASLLNSQYYFAAEFPADSLQAAQPFTIGDNKTYNGYWNTPLLPYKSYRIYFQAASRANGETKIDCVQVATKAAIIVTQLTTPYIRIAPAAGDGQLTGAATPKPVPEPEKQTDHTVKIAGVIAGILLFVIIFLGVVLVMKK

SEQ ID NO: 34312 - protein, 207 aa, Homo sapiens
  REGION 1..207: note = ENSP00000464128
HFQNASLLNSQYYFAAEFPADSLQAAQPFTIGDNKTYNGYWNTPLLPYKSYRIYFQAASRANGETKIDCVQVATKGAATPKPVPEPEKQTDHTVKIAGVIAGILLFVIIFLGVVLVMKKRKLAKKRKETMSSTRQEMTVMVNSMDKSYAEQGTNCDEAFSFMDTHNLNGRSVSSPSSFTMKTNTLSTSVPNSYYPDPFVPTAILELL

SEQ ID NO: 34313 - protein, 238 aa, Homo sapiens
  REGION 1..238: note = ENSP00000462809
  VARIANT 1: note = Any amino acid
XDIKVTLIETELLAEYVIRTFAVEKGGAGGEANCSPSREVSQRGVHEIREIRQFHFTGWPDHGVPYHATGLLGFVRQVKSKSPPSAGPLVVHCSAGAGRTGCFIVIDIMLDMAEREGVVDIYNCVRELRSRRVNMVQTEEQYVFIHDAILEACLCGDTSVPASQVRSLYYDMNKLDPQTNSSQIKEEFRTLNMVTPTLRVEDCSIALLPRNHEKNRCMDILPPDRCLPFLITIDGESS

SEQ ID NO: 34314 - protein, 279 aa, Homo sapiens
  REGION 1..279: note = ENSP00000382933
MNKLDPQTNSSQIKEEFRTLNMVTPTLRVEDCSIALLPRNHEKNRCMDILPPDRCLPFLITIDGESSNYINAALMDSYKQPSAFIVTQHPLPNTVKDFWRLVLDYHCTSVVMLNDVDPAQLCPQYWPENGVHRHGPIQVEFVSADLEEDIISRIFRIYNAARPQDGYRMVQQFQFLGWPMYRDTPVSKRSFLKLIRQVDKWQEEYNGGEGRTVVHCLNGGGRSGTFCAISIVCEMLRHQRTVDVFHAVKTLRNNKPNMVDLLDQYKFCYEVALEYLNSG

SEQ ID NO: 34315 - protein, 950 aa, Homo sapiens
  REGION 1..950: note = ENSP00000386638
MRRPRRPGGLGGSGGLRLLLCLLLLSSRPGGCSAVSAHGCLFDRRLCSHLEVCIQDGLFGQCQVGVGQARPLLQVTSPVLQRLQGVLRQLMSQGLSWHDDLTQYVISQEMERIPRLRPPEPRPRDRSGLAPKRPGPAGELLLQDIPTGSAPAAQHRLPQPPVGKGGAGASSSLSPLQAELLPPLLEHLLLPPQPPHPSLSYEPALLQPYLFHQFGSRDGSRVSEGSPGMVSVGPLPKAEAPALFSRTASKGIFGDHPGHSYGDLPGPSPAQLFQDSGLLYLAQELPAPSRARVPRLPEQGSSSRAEDSPEGYEKEGLGDRGEKPASPAVQPDAALQRLAAVLAGYGVELRQLTPEQLSTLLTLLQLLPKGAGRNPGGVVNVGADIKKTMEGPVEGRDTAELPARTSPMPGHPTASPTSSEVQQVPSPVSSEPPKAARPPVTPVLLEKKSPLGQSQPTVAGQPSARPAAEEYGYIVTDQNVVGPALTFRIRHNEQNLSLADVTQQAGLVKSELEAQTGLQILQTGVGQREEAAAVLPQTAHSTSPMRSVLLTLVALAGVAGLLVALAVALCVRQHARQQDKERLAALGPEGAHGDTTFEYQDLCRQHMATKSLFNRAEGPPEPSRVSSVSSQFSDAAQASPSSHSSTPSWCEEPAQANMDISTGHMILAYMEDHLRNRDRLAKEWQALCAYQAEPNTCATAQGEGNIKKNRHPDFLPYDHARIKLKVESSPSRSDYINASPIIEHDPRMPAYIATQGPLSHTIADFWQMVWESGCTVIVMLTPLVEDGVKQCDRYWPDEGASLYHVYEVNLVSEHIWCEDFLVRSFYLKNVQTQETRTLTQFHFLSWPAEGTPASTRPLLDFRRKVNKCYRGRSCPIIVHCSDGAGRTGTYILIDMVLNRMAKGVKEIDIAATLEHVRDQRPGLVRSKDQFEFALTAVAEEVNAILKALPQ

SEQ ID NO: 34316 - protein, 979 aa, Homo sapiens
  REGION 1..979: note = ENSP00000295718
MRRPRRPGGLGGSGGLRLLLCLLLLSSRPGGCSAVSAHGCLFDRRLCSHLEVCIQDGLFGQCQVGVGQARPLLQVTSPVLQRLQGVLRQLMSQGLSWHDDLTQYVISQEMERIPRLRPPEPRPRDRSGLAPKRPGPAGELLLQDIPTGSAPAAQHRLPQPPVGKGGAGASSSLSPLQAELLPPLLEHLLLPPQPPHPSLSYEPALLQPYLFHQFGSRDGSRVSEGSPGMVSVGPLPKAEAPALFSRTASKGIFGDHPGHSYGDLPGPSPAQLFQDSGLLYLAQELPAPSRARVPRLPEQGSSSRAEDSPEGYEKEGLGDRGEKPASPAVQPDAALQRLAAVLAGYGVELRQLTPEQLSTLLTLLQLLPKGAGRNPGGVVNVGADIKKTMEGPVEGRDTAELPARTSPMPGHPTASPTSSEVQQVPSPVSSEPPKAARPPVTPVLLEKKSPLGQSQPTVAGQPSARPAAEEYGYIVTDQKPLSLAAGVKLLEILAEHVHMSSGSFINISVVGPALTFRIRHNEQNLSLADVTQQAGLVKSELEAQTGLQILQTGVGQREEAAAVLPQTAHSTSPMRSVLLTLVALAGVAGLLVALAVALCVRQHARQQDKERLAALGPEGAHGDTTFEYQDLCRQHMATKSLFNRAEGPPEPSRVSSVSSQFSDAAQASPSSHSSTPSWCEEPAQANMDISTGHMILAYMEDHLRNRDRLAKEWQALCAYQAEPNTCATAQGEGNIKKNRHPDFLPYDHARIKLKVESSPSRSDYINASPIIEHDPRMPAYIATQGPLSHTIADFWQMVWESGCTVIVMLTPLVEDGVKQCDRYWPDEGASLYHVYEVNLVSEHIWCEDFLVRSFYLKNVQTQETRTLTQFHFLSWPAEGTPASTRPLLDFRRKVNKCYRGRSCPIIVHCSDGAGRTGTYILIDMVLNRMAKGVKEIDIAATLEHVRDQRPGLVRSKDQFEFALTAVAEEVNAILKALPQ

SEQ ID NO: 34317 - protein, 137 aa, Homo sapiens
  REGION 1..137: note = ENSP00000396842
  VARIANT 1: note = Any amino acid
XWESGCTVIVMLTPLVEDGVKQCDRYWPDEGASLYHVYEVNLVSEHIWCEDFLVRSFYLKNVQTQETRTLTQFHFLSWPAEGTPASTRPLLDFRRKVNKCYRGRSCPIIVHCSDGAGRTGTYILIDMVLNRMAKGPV

SEQ ID NO: 34318 - protein, 889 aa, Homo sapiens
  REGION 1..889: note = ENSP00000392598
MSQGLSWHDDLTQYVISQEMERIPRLRPPEPRPRDRSGLAPKRPGPAGELLLQDIPTGSAPAAQHRLPQPPVGKGGAGASSSLSPLQAELLPPLLEHLLLPPQPPHPSLSYEPALLQPYLFHQFGSRDGSRVSEGSPGMVSVGPLPKAEAPALFSRTASKGIFGDHPGHSYGDLPGPSPAQLFQDSGLLYLAQELPAPSRARVPRLPEQGSSSRAEDSPEGYEKEGLGDRGEKPASPAVQPDAALQRLAAVLAGYGVELRQLTPEQLSTLLTLLQLLPKGAGRNPGGVVNVGADIKKTMEGPVEGRDTAELPARTSPMPGHPTASPTSSEVQQVPSPVSSEPPKAARPPVTPVLLEKKSPLGQSQPTVAGQPSARPAAEEYGYIVTDQKPLSLAAGVKLLEILAEHVHMSSGSFINISVVGPALTFRIRHNEQNLSLADVTQQAGLVKSELEAQTGLQILQTGVGQREEAAAVLPQTAHSTSPMRSVLLTLVALAGVAGLLVALAVALCVRQHARQQDKERLAALGPEGAHGDTTFEYQDLCRQHMATKSLFNRAEGPPEPSRVSSVSSQFSDAAQASPSSHSSTPSWCEEPAQANMDISTGHMILAYMEDHLRNRDRLAKEWQALCAYQAEPNTCATAQGEGNIKKNRHPDFLPYDHARIKLKVESSPSRSDYINASPIIEHDPRMPAYIATQGPLSHTIADFWQMVWESGCTVIVMLTPLVEDGVKQCDRYWPDEGASLYHVYEVNLVSEHIWCEDFLVRSFYLKNVQTQETRTLTQFHFLSWPAEGTPASTRPLLDFRRKVNKCYRGRSCPIIVHCSDGAGRTGTYILIDMVLNRMAKGVKEIDIAATLEHVRDQRPGLVRSKDQFEFALTAVAEEVNAILKALPQ

SEQ ID NO: 34319 - protein, 125 aa, Homo sapiens
  REGION 1..125: note = ENSP00000388429
MSQGLSWHDDLTQYVISQEMERIPRLRPPEPRPRDRSGLAPKRPGPAGELLLQDIPTGSAPAAQHRLPQPPVGKGGAGASSSLSPLQAELLPPLLEHLLLPPQPPHPSLSYEPALLQPYLFHQFG

SEQ ID NO: 34320 - protein, 124 aa, Homo sapiens
  REGION 1..124: note = ENSP00000395379
MSQGLSWHDDLTQYVISQEMERIPRLRPPEPRPRDRSGLAPKRPGPAGELLLQDIPTGSAPAAQHRLPQPPVGKGGAGASSSLSPLQAELLPPLLEHLLLPPQPPHPSLSYEPALLQPYLFHQF

SEQ ID NO: 34321 - protein, 166 aa, Homo sapiens
  REGION 1..166: note = ENSP00000408036
MRDEEGCLFDRRLCSHLEVCIQDGLFGQCQVGVGQARPLLQVTSPVLQRLQGVLRQLMSQGLSWHDDLTQYVISQEMERIPRLRPPEPRPRDRSGLAPKRPGPAGELLLQDIPTGSAPAAQHRLPQPPVGKGGAGASSSLSPLQAELLPPLLEHLLLPPQPPHPSL

SEQ ID NO: 34322 - protein, 86 aa, Homo sapiens
  REGION 1..86: note = ENSP00000396464
MSQGLSWHDDLTQYVISQEMERIPRLRPPEPRPRDRSGLAPKRPGPAGELLLQDIPTGSAPAAQHRLPQPPVGKGGAGASSSLSPL

SEQ ID NO: 34323 - protein, 67 aa, Homo sapiens
  REGION 1..67: note = ENSP00000397105
MSQGLSWHDDLTQYVISQEMERIPRLRPPEPRPRDRSGLAPKRPGPAGELLLQDIPTGSAPAAQHRL

SEQ ID NO: 34324 - protein, 52 aa, Homo sapiens
  REGION 1..52: note = ENSP00000475591
MRRPRRPGGLGGSGGLRLLLCLLLLSSRPGGCSAVSAHGSGEGHGVHVGRGT

SEQ ID NO: 34325 - protein, 1216 aa, Homo sapiens
  REGION 1..1216: note = ENSP00000281171
MGHLPTGIHGARRLLPLLWLFVLFKNATAFHVTVQDDNNIVVSLEASDVISPASVYVVKITGESKNYFFEFEEFNSTLPPPVIFKASYHGLYYIITLVVVNGNVVTKPSRSITVLTKPLPVTSVSIYDYKPSPETGVLFEIHYPEKYNVFTRVNISYWEGKDFRTMLYKDFFKGKTVFNHWLPGMCYSNITFQLVSEATFNKSTLVEYSGVSHEPKQHRTAPYPPQNISVRIVNLNKNNWEEQSGNFPEESFMRSQDTIGKEKLFHFTEETPEIPSGNISSGWPDFNSSDYETTSQPYWWDSASAAPESEDEFVSVLPMEYENNSTLSETEKSTSGSFSFFPVQMILTWLPPKPPTAFDGFHIHIEREENFTEYLMVDEEAHEFVAELKEPGKYKLSVTTFSSSGSCETRKSQSAKSLSFYISPSGEWIEELTEKPQHVSVHVLSSTTALMSWTSSQENYNSTIVSVVSLTCQKQKESQRLEKQYCTQVNSSKPIIENLVPGAQYQVVIYLRKGPLIGPPSDPVTFAIVPTGIKDLMLYPLGPTAVVLSWTRPYLGVFRKYVVEMFYFNPATMTSEWTTYYEIAATVSLTASVRIANLLPAWYYNFRVTMVTWGDPELSCCDSSTISFITAPVAPEITSVEYFNSLLYISWTYGDDTTDLSHSRMLHWMVVAEGKKKIKKSVTRNVMTAILSLPPGDIYNLSVTACTERGSNTSMLRLVKLEPAPPKSLFAVNKTQTSVTLLWVEEGVADFFEVFCQQVGSSQKTKLQEPVAVSSHVVTISSLLPATAYNCSVTSFSHDSPSVPTFIAVSTMVTEMNPNVVVISVLAILSTLLIGLLLVTLIILRKKHLQMARECGAGTFVNFASLERDGKLPYNWRRSIFAFLTLLPSCLWTDYLLAFYINPWSKNGLKKRKLTNPVQLDDFDAYIKDMAKDSDYKFSLQFEELKLIGLDIPHFAADLPLNRCKNRYTNILPYDFSRVRLVSMNEEEGADYINANYIPGYNSPQEYIATQGPLPETRNDFWKMVLQQKSQIIVMLTQCNEKRRVKCDHYWPFTEEPIAYGDITVEMISEEEQDDWACRHFRINYADEMQDVMHFNYTAWPDHGVPTANAAESILQFVHMVRQQATKSKGPMIIHCSAGVGRTGTFIALDRLLQHIRDHEFVDILGLVSEMRSYRMSMVQTEEQYIFIHQCVQLMWMKKKQQFCISDVIYENVSKS

SEQ ID NO: 34326 - protein, 597 aa, Homo sapiens
  REGION 1..597: note = ENSP00000444173
MGHLPTGIHGARRLLPLLWLFVLFKNATAFHVTVQDDNNIVVSLEASDVISPASVYVVKITGESKNYFFEFEEFNSTLPPPVIFKASYHGLYYIITLVVVNGNVVTKPSRSITVLTKPLPVTSVSIYDYKPSPETGVLFEIHYPEKYNVFTRVNISYWEGKDFRTMLYKDFFKGKTVFNHWLPGMCYSNITFQLVSEATFNKSTLVEYSGVSHEPKQHRTAPYPPQNISVRIVNLNKNNWEEQSGNFPEESFMRSQDTIGKEKLFHFTEETPEIPSGNISSGWPDFNSSDYETTSQPYWWDSASAAPESEDEFVSVLPMEYENNSTLSETEKSTSGSFSFFPVQMILTWLPPKPPTAFDGFHIHIEREENFTEYLMVDEEAHEFVAELKEPGKYKLSVTTFSSSGSCETRKSQSAKSLSFYISPSGEWIEELTEKPQHVSVHVLSSTTALMSWTSSQENYNSTIVSVVSLTCQKQKESQRLEKQYCTQVNSSKPIIENLVPGAQYQVVIYLRKGPLIGPPSDPVTFAIVPTGIKDLMLYPLGPTAVVLSWTRPYLGVFRKYVVEMFYFNPATMTSEWTTYYEIAATVSLTASVVIFP

SEQ ID NO: 34327 - protein, 1188 aa, Homo sapiens
  REGION 1..1188: note = ENSP00000343434
MGHLPTGIHGARRLLPLLWLFVLFKNATAFHVTVQDDNNIVVSLEASDVISPASVYVVKITGESKNYFFEFEEFNSTLPPPVIFKASYHGLYYIITLVVVNGNVVTKPSRSITVLTKPLPVTSVSIYDYKPSPETGVLFEIHYPEKYNVFTRVNISYWEGKDFRTMLYKDFFKGKTVFNHWLPGMCYSNITFQLVSEATFNKSTLVEYSGVSHEPKQHRTAPYPPQNISVRIVNLNKNNWEEQSGNFPEESFMRSQDTIGKEKLFHFTEETPEIPSGNISSGWPDFNSSDYETTSQPYWWDSASAAPESEDEFVSVLPMEYENNSTLSETEKSTSGSFSFFPVQMILTWLPPKPPTAFDGFHIHIEREENFTEYLMVDEEAHEFVAELKEPGKYKLSVTTFSSSGSCETRKSQSAKSLSFYISPSGEWIEELTEKPQHVSVHVLSSTTALMSWTSSQENYNSTIVSVVSLTCQKQKESQRLEKQYCTQVNSSKPIIENLVPGAQYQVVIYLRKGPLIGPPSDPVTFAIVPTGIKDLMLYPLGPTAVVLSWTRPYLGVFRKYVVEMFYFNPATMTSEWTTYYEIAATVSLTASVRIANLLPAWYYNFRVTMVTWGDPELSCCDSSTISFITAPVAPEITSVEYFNSLLYISWTYGDDTTDLSHSRMLHWMVVAEGKKKIKKSVTRNVMTAILSLPPGDIYNLSVTACTERGSNTSMLRLVKLEPAPPKSLFAVNKTQTSVTLLWVEEGVADFFEVFCQQVGSSQKTKLQEPVAVSSHVVTISSLLPATAYNCSVTSFSHDSPSVPTFIAVSTMVTEMNPNVVVISVLAILSTLLIGLLLVTLIILRKKHLQMARECGAGTFVNFASLERDGKLPYNWSKNGLKKRKLTNPVQLDDFDAYIKDMAKDSDYKFSLQFEELKLIGLDIPHFAADLPLNRCKNRYTNILPYDFSRVRLVSMNEEEGADYINANYIPGYNSPQEYIATQGPLPETRNDFWKMVLQQKSQIIVMLTQCNEKRRVKCDHYWPFTEEPIAYGDITVEMISEEEQDDWACRHFRINYADEMQDVMHFNYTAWPDHGVPTANAAESILQFVHMVRQQATKSKGPMIIHCSAGVGRTGTFIALDRLLQHIRDHEFVDILGLVSEMRSYRMSMVQTEEQYIFIHQCVQLMWMKKKQQFCISDVIYENVSKS

SEQ ID NO: 34328 - protein, 405 aa, Homo sapiens
  REGION 1..405: note = ENSP00000404188
MVTEMNPNVVVISVLAILSTLLIGLLLVTLIILRKKHLQMARECGAGTFVNFASLERDGKLPYNWRRSIFAFLTLLPSCLWTDYLLAFYINPWSKNGLKKRKLTNPVQLDDFDAYIKDMAKDSDYKFSLQFEELKLIGLDIPHFAADLPLNRCKNRYTNILPYDFSRVRLVSMNEEEGADYINANYIPGYNSPQEYIATQGPLPETRNDFWKMVLQQKSQIIVMLTQCNEKRRVKCDHYWPFTEEPIAYGDITVEMISEEEQDDWACRHFRINYADEMQDVMHFNYTAWPDHGVPTANAAESILQFVHMVRQQATKSKGPMIIHCSAGVGRTGTFIALDRLLQHIRDHEFVDILGLVSEMRSYRMSMVQTEEQYIFIHQCVQLMWMKKKQQFCISDVIYENVSKS

SEQ ID NO: 34329 - protein, 377 aa, Homo sapiens
  REGION 1..377: note = ENSP00000437571
MVTEMNPNVVVISVLAILSTLLIGLLLVTLIILRKKHLQMARECGAGTFVNFASLERDGKLPYNWSKNGLKKRKLTNPVQLDDFDAYIKDMAKDSDYKFSLQFEELKLIGLDIPHFAADLPLNRCKNRYTNILPYDFSRVRLVSMNEEEGADYINANYIPGYNSPQEYIATQGPLPETRNDFWKMVLQQKSQIIVMLTQCNEKRRVKCDHYWPFTEEPIAYGDITVEMISEEEQDDWACRHFRINYADEMQDVMHFNYTAWPDHGVPTANAAESILQFVHMVRQQATKSKGPMIIHCSAGVGRTGTFIALDRLLQHIRDHEFVDILGLVSEMRSYRMSMVQTEEQYIFIHQCVQLMWMKKKQQFCISDVIYENVSKS

SEQ ID NO: 34330 - protein, 405 aa, Homo sapiens; identical to SEQ ID NO: 34328
  REGION 1..405: note = ENSP00000393449

SEQ ID NO: 34331 - protein, 377 aa, Homo sapiens; identical to SEQ ID NO: 34329
  REGION 1..377: note = ENSP00000439234

SEQ ID NO: 34332 - protein, 88 aa, Homo sapiens
  REGION 1..88: note = ENSP00000445621
  VARIANT 1: note = Any amino acid
XVTLLWVEEGVADFFEVFCQQVGSSQKTKLQEPVAVSSHVVTISSLLPATAYNCSVTSFSHDSPSVPTFIAVSTMGSVELVHLSILHP

SEQ ID NO: 34333 - protein, 116 aa, Homo sapiens
  REGION 1..116: note = ENSP00000446201
WKMVLQQKSQIIVMLTQCNEKRRVKCDHYWPFTEEPIAYGDITVEMISEEEQDDWACRHFRINYADEMQDVMHFNYTAWPDHGVPTANAAESILQFVHMVRQQATKSKGPMIIHCR

SEQ ID NO: 34334 - protein, 412 aa, Homo sapiens
  REGION 1..412: note = ENSP00000391750
MILYRLKERFQLSLRQDKEKNQEIHLSPITLQPALSEAKTVHSMVQPEQAPKVLNVVVDPQGRGAPEIKATTATSVCPSPFKMKPIGLQERRGSNVSLTLDMSSLGNIEPFVSIPTPREKVAMEYLQSASRILTRSQLRDVVASSHLLQSEFMEIPMNFVDPKEIDIPRHGTKNRYKTILPNPLSRVCLRPKNVTDSLSTYINANYIRGYSGKEKAFIATQGPMINTVDDFWQMVWQEDSPVIVMITKLKEKNEKCVLYWPEKRGIYGKVEVLVISVNECDNYTIRNLVLKQGSHTQHVKHYWYTSWPDHKTPDSAQPLLQLMLDVEEDRLASQGRGPVVVHCSAGIGRTGCFIATSIGCQQLKEEGVVDALSIVCQLRMDRGGMVQTSEQYEFVHHALCLYESRLSAETVQ

SEQ ID NO: 34335 - protein, 141 aa, Homo sapiens
  REGION 1..141: note = ENSP00000448049
MNFVDPKEIDIPRHGTKNRYKTILPNPLSRVCLRPKNVTDSLSTYINANYIRGYSGKEKAFIATQGPMINTVDDFWQMVWQEDSPVIVMITKLKEKNEKRRLTGLAPAHTWHSTFPWAKLSGSRCPHPMTRACAGAITPPC

SEQ ID NO: 34336 - protein, 657 aa, Homo sapiens
  REGION 1..657: note = ENSP00000283228
MRRAVCFPALCLLLNLHAAGCFSGNNDHFLAINQKKSGKPVFIYKHSQDIEKSLDIAPQKIYRHSYHSSSEAQVSKRHQIVNSAFPRPAYDPSLNLLAMDGQDLEVENLPIPAANVIVVTLQMDVNKLNITLLRIFRQGVAAALGLLPQQVHINRLIGKKNSIELFVSPINRKTGISDALPSEEVLRSLNINVLHQSLSQFGITEVSPEKNVLQGQHEADKIWSKEGFYAVVIFLSIFVIIVTCLMILYRLKERFQLSLRQDKEKNQEIHLSPITLQPALSEAKTVHSMVQPEQAPKVLNVVVDPQGRGAPEIKATTATSVCPSPFKMKPIGLQERRGSNVSLTLDMSSLGNIEPFVSIPTPREKVAMEYLQSASRILTRSQLRDVVASSHLLQSEFMEIPMNFVDPKEIDIPRHGTKNRYKTILPNPLSRVCLRPKNVTDSLSTYINANYIRGYSGKEKAFIATQGPMINTVDDFWQMVWQEDSPVIVMITKLKEKNEKCVLYWPEKRGIYGKVEVLVISVNECDNYTIRNLVLKQGSHTQHVKHYWYTSWPDHKTPDSAQPLLQLMLDVEEDRLASQGRGPVVVHCSAGIGRTGCFIATSIGCQQLKEEGVVDALSIVCQLRMDRGGMVQTSEQYEFVHHALCLYESRLSAETVQ

SEQ ID NO: 34337 - protein, 545 aa, Homo sapiens
  REGION 1..545: note = ENSP00000339605
MQSISKQTLQMDVNKLNITLLRIFRQGVAAALGLLPQQVHINRLIGKKNSIELFVSPINRKTGISDALPSEEVLRSLNINVLHQSLSQFGITEVSPEKNVLQGQHEADKIWSKEGFYAVVIFLSIFVIIVTCLMILYRLKERFQLSLRQDKEKNQEIHLSPITLQPALSEAKTVHSMVQPEQAPKVLNVVVDPQGRGAPEIKATTATSVCPSPFKMKPIGLQERRGSNVSLTLDMSSLGNIEPFVSIPTPREKVAMEYLQSASRILTRSQLRDVVASSHLLQSEFMEIPMNFVDPKEIDIPRHGTKNRYKTILPNPLSRVCLRPKNVTDSLSTYINANYIRGYSGKEKAFIATQGPMINTVDDFWQMVWQEDSPVIVMITKLKEKNEKCVLYWPEKRGIYGKVEVLVISVNECDNYTIRNLVLKQGSHTQHVKHYWYTSWPDHKTPDSAQPLLQLMLDVEEDRLASQGRGPVVVHCSAGIGRTGCFIATSIGCQQLKEEGVVDALSIVCQLRMDRGGMVQTSEQYEFVHHALCLYESRLSAETVQ

SEQ ID NO: 34338 - protein, 412 aa, Homo sapiens; identical to SEQ ID NO: 34334
  REGION 1..412: note = ENSP00000446943

SEQ ID NO: 34339 - protein, 198 aa, Homo sapiens
  REGION 1..198: note = ENSP00000449616
MILYRLKERFQLSLRQDKEKNQEIHLSPITLQPALSEAKTVHSMVQPEQAPKVLNVVVDPQGRGAPEIKATTATSVCPSPFKMKPIGLQERRGSNVSLTLDMSSLGNIEPFVSIPTPREKVAMEYLQSASRILTRSQLRDVVASSHLLQSEFMEIPMNFVDPKEIDIPRHGTKNRYKTILPNPLSRVCLRPKNVTDSL

SEQ ID NO: 34340 - protein, 451 aa, Homo sapiens
  REGION 1..451: note = ENSP00000368054
MNQKNVLQGQHEADKIWSKEGFYAVVIFLSIFVIIVTCLMILYRLKERFQLSLRQDKEKNQEIHLSPITLQPALSEAKTVHSMVQPEQAPKVLNVVVDPQGRGAPEIKATTATSVCPSPFKMKPIGLQERRGSNVSLTLDMSSLGNIEPFVSIPTPREKVAMEYLQSASRILTRSQLRDVVASSHLLQSEFMEIPMNFVDPKEIDIPRHGTKNRYKTILPNPLSRVCLRPKNVTDSLSTYINANYIRGYSGKEKAFIATQGPMINTVDDFWQMVWQEDSPVIVMITKLKEKNEKCVLYWPEKRGIYGKVEVLVISVNECDNYTIRNLVLKQGSHTQHVKHYWYTSWPDHKTPDSAQPLLQLMLDVEEDRLASQGRGPVVVHCSAGIGRTGCFIATSIGCQQLKEEGVVDALSIVCQLRMDRGGMVQTSEQYEFVHHALCLYESRLSAETVQ

SEQ ID NO: 34341 - protein, 1441 aa, Homo sapiens
  REGION 1..1441: note = ENSP00000362283
MASLAALALSLLLRLQLPPLPGARAQSAAGGCSFDEHYSNCGYSVALGTNGFTWEQINTWEKPMLDQAVPTGSFMMVNSSGRASGQKAHLLLPTLKENDTHCIDFHYYFSSRDRSSPGALNVYVKVNGGPQGNPVWNVSGVVTEGWVKAELAISTFWPHFYQVIFESVSLKGHPGYIAVDEVRVLAHPCRKAPHFLRLQNVEVNVGQNATFQCIAGGKWSQHDKLWLQQWNGRDTALMVTRVVNHRRFSATVSVADTAQRSVSKYRCVIRSDGGSGVSNYAELIVKEPPTPIAPPELLAVGATYLWIKPNANSIIGDGPIILKEVEYRTTTGTWAETHIVDSPNYKLWHLDPDVEYEIRVLLTRPGEGGTGPPGPPLTTRTKCADPVHGPQNVEIVDIRARQLTLQWEPFGYAVTRCHSYNLTVQYQYVFNQQQYEAEEVIQTSSHYTLRGLRPFMTIRLRLLLSNPEGRMESEELVVQTEEDVPGAVPLESIQGGPFEEKIYIQWKPPNETNGVITLYEINYKAVGSLDPSADLSSQRGKVFKLRNETHHLFVGLYPGTTYSFTIKASTAKGFGPPVTTRIATKISAPSMPEYDTDTPLNETDTTITVMLKPAQSRGAPVSVYQLVVKEERLQKSRRAADIIECFSVPVSYRNASSLDSLHYFAAELKPANLPVTQPFTVGDNKTYNGYWNPPLSPLKSYSIYFQALSKANGETKINCVRLATKGASTQNSNTVEPEKQVDNTVKMAGVIAGLLMFIIILLGVMLTIKRRRNAYSYSYYLKLAKKQKETQSGAQREMGPVASADKPTTKLSASRNDEGFSSSSQDVNGFTDGSRGELSQPTLTIQTHPYRTCDPVEMSYPRDQFQPAIRVADLLQHITQMKRGQGYGFKEEYEALPEGQTASWDTAKEDENRNKNRYGNIISYDHSRVRLLVLDGDPHSDYINANYIDGYHRPRHYIATQGPMQETVKDFWRMIWQENSASIVMVTNLVEVGRVKCVRYWPDDTEVYGDIKVTLIETEPLAEYVIRTFTVQKKGYHEIRELRLFHFTSWPDHGVPCYATGLLGFVRQVKFLNPPEAGPIVVHCSAGAGRTGCFIAIDTMLDMAENEGVVDIFNCVRELRAQRVNLVQTEEQYVFVHDAILEACLCGNTAIPVCEFRSLYYNISRLDPQTNSSQIKDEFQTLNIVTPRVRPEDCSIGLLPRNHDKNRSMDVLPLDRCLPFLISVDGESSNYINAALMDSHKQPAAFVVTQHPLPNTVADFWRLVFDYNCSSVVMLNEMDTAQFCMQYWPEKTSGCYGPIQVEFVSADIDEDIIHRIFRICNMARPQDGYRIVQHLQYIGWPAYRDTPPSKRSLLKVVRRLEKWQEQYDGREGRTVVHCLNGGGRSGTFCAICSVCEMIQQQNIIDVFHIVKTLRNNKSNMVETLEQYKFVYEVALEYLSSF

SEQ ID NO: 34342 - protein, 1450 aa, Homo sapiens
  REGION 1..1450: note = ENSP00000348408
MASLAALALSLLLRLQLPPLPGARAQSAAGGCSFDEHYSNCGYSVALGTNGFTWEQINTWEKPMLDQAVPTGSFMMVNSSGRASGQKAHLLLPTLKENDTHCIDFHYYFSSRDRSSPGALNVYVKVNGGPQGNPVWNVSGVVTEGWVKAELAISTFWPHFYQVIFESVSLKGHPGYIAVDEVRVLAHPCRKAPHFLRLQNVEVNVGQNATFQCIAGGKWSQHDKLWLQQWNGRDTALMVTRVVNHRRFSATVSVADTAQRSVSKYRCVIRSDGGSGVSNYAELIVKEPPTPIAPPELLAVGATYLWIKPNANSIIGDGPIILKEVEYRTTTGTWAETHIVDSPNYKLWHLDPDVEYEIRVLLTRPGEGGTGPPGPPLTTRTKCADPVHGPQNVEIVDIRARQLTLQWEPFGYAVTRCHSYNLTVQYQYVFNQQQYEAEEVIQTSSHYTLRGLRPFMTIRLRLLLSNPEGRMESEELVVQTEEDVPGAVPLESIQGGPFEEKIYIQWKPPNETNGVITLYEINYKAVGSLDPSADLSSQRGKVFKLRNETHHLFVGLYPGTTYSFTIKASTAKGFGPPVTTRIATKISAPSMPEYDTDTPLNETDTTITVMLKPAQSRGAPVSVYQLVVKEERLQKSRRAADIIECFSVPVSYRNASSLDSLHYFAAELKPANLPVTQPFTVGDNKTYNGYWNPPLSPLKSYSIYFQALSKANGETKINCVRLATKAPMGSAQVTPGTPLCLLTTGASTQNSNTVEPEKQVDNTVKMAGVIAGLLMFIIILLGVMLTIKRRKLAKKQKETQSGAQREMGPVASADKPTTKLSASRNDEGFSSSSQDVNGFTDGSRGELSQPTLTIQTHPYRTCDPVEMSYPRDQFQPAIRVADLLQHITQMKRGQGYGFKEEYEALPEGQTASWDTAKEDENRNKNRYGNIISYDHSRVRLLVLDGDPHSDYINANYIDGYHRPRHYIATQGPMQETVKDFWRMIWQENSASIVMVTNLVEVGRVKCVRYWPDDTEVYGDIKVTLIETEPLAEYVIRTFTVQKKGYHEIRELRLFHFTSWPDHGVPCYATGLLGFVRQVKFLNPPEAGPIVVHCSAGAGRTGCFIAIDTMLDMAENEGVVDIFNCVRELRAQRVNLVQTEEQYVFVHDAILEACLCGNTAIPVCEFRSLYYNISRLDPQTNSSQIKDEFQTLNIVTPRVRPEDCSIGLLPRNHDKNRSMDVLPLDRCLPFLISVDGESSNYINAALMDSHKQPAAFVVTQHPLPNTVADFWRLVFDYNCSSVVMLNEMDTAQFCMQYWPEKTSGCYGPIQVEFVSADIDEDIIHRIFRICNMARPQDGYRIVQHLQYIGWPAYRDTPPSKRSLLKVVRRLEKWQEQYDGREGRTVVHCLNGGGRSGTFCAICSVCEMIQQQNIIDVFHIVKTLRNNKSNMVETLEQYKFVYEVALEYLSSF

SEQ ID NO: 34343 - protein, 1451 aa, Homo sapiens
  REGION 1..1451: note = ENSP00000362280
MASLAALALSLLLRLQLPPLPGARAQSAAGGCSFDEHYSNCGYSVALGTNGFTWEQINTWEKPMLDQAVPTGSFMMVNSSGRASGQKAHLLLPTLKENDTHCIDFHYYFSSRDRSSPGALNVYVKVNGGPQGNPVWNVSGVVTEGWVKAELAISTFWPHFYQVIFESVSLKGHPGYIAVDEVRVLAHPCRKAPHFLRLQNVEVNVGQNATFQCIAGGKWSQHDKLWLQQWNGRDTALMVTRVVNHRRFSATVSVADTAQRSVSKYRCVIRSDGGSGVSNYAELIVKEPPTPIAPPELLAVGATYLWIKPNANSIIGDGPIILKEVEYRTTTGTWAETHIVDSPNYKLWHLDPDVEYEIRVLLTRPGEGGTGPPGPPLTTRTKCADPVHGPQNVEIVDIRARQLTLQWEPFGYAVTRCHSYNLTVQYQYVFNQQQYEAEEVIQTSSHYTLRGLRPFMTIRLRLLLSNPEGRMESEELVVQTEEDVPGAVPLESIQGGPFEEKIYIQWKPPNETNGVITLYEINYKAVGSLDPSADLSSQRGKVFKLRNETHHLFVGLYPGTTYSFTIKASTAKGFGPPVTTRIATKISAPSMPEYDTDTPLNETDTTITVMLKPAQSRGAPVSVYQLVVKEERLQKSRRAADIIECFSVPVSYRNASSLDSLHYFAAELKPANLPVTQPFTVGDNKTYNGYWNPPLSPLKSYSIYFQALSKANGETKINCVRLATKGASTQNSNTVEPEKQVDNTVKMAGVIAGLLMFIIILLGVMLTIKRRKLAKKQKETQSGAQREMGPVASADKPTTKLSASRNDEGFSSSSQDVNGFTDGSRGELSQPTLTIQTHPYRTCDPVEMSYPRDQFQPAIRVADLLQHITQMKRGQGYGFKEEYEALPEGQTASWDTAKEDENRNKNRYGNIISYDHSRVRLLVLDGDPHSDYINANYIDGYHRPRHYIATQGPMQETVKDFWRMIWQENSASIVMVTNLVEVGRHPAEHTVGNATLGRAASPGMVKCVRYWPDDTEVYGDIKVTLIETEPLAEYVIRTFTVQKKGYHEIRELRLFHFTSWPDHGVPCYATGLLGFVRQVKFLNPPEAGPIVVHCSAGAGRTGCFIAIDTMLDMAENEGVVDIFNCVRELRAQRVNLVQTEEQYVFVHDAILEACLCGNTAIPVCEFRSLYYNISRLDPQTNSSQIKDEFQTLNIVTPRVRPEDCSIGLLPRNHDKNRSMDVLPLDRCLPFLISVDGESSNYINAALMDSHKQPAAFVVTQHPLPNTVADFWRLVFDYNCSSVVMLNEMDTAQFCMQYWPEKTSGCYGPIQVEFVSADIDEDIIHRIFRICNMARPQDGYRIVQHLQYIGWPAYRDTPPSKRSLLKVVRRLEKWQEQYDGREGRTVVHCLNGGGRSGTFCAICSVCEMIQQQNIIDVFHIVKTLRNNKSNMVETLEQYKFVYEVALEYLSSF

SEQ ID NO: 34344 - protein, 1440 aa, Homo sapiens
  REGION 1..1440: note = ENSP00000362286
MASLAALALSLLLRLQLPPLPGARAQSAAGGCSFDEHYSNCGYSVALGTNGFTWEQINTWEKPMLDQAVPTGSFMMVNSSGRASGQKAHLLLPTLKENDTHCIDFHYYFSSRDRSSPGALNVYVKVNGGPQGNPVWNVSGVVTEGWVKAELAISTFWPHFYQVIFESVSLKGHPGYIAVDEVRVLAHPCRKAPHFLRLQNVEVNVGQNATFQCIAGGKWSQHDKLWLQQWNGRDTALMVTRVVNHRRFSATVSVADTAQRSVSKYRCVIRSDGGSGVSNYAELIVKEPPTPIAPPELLAVGATYLWIKPNANSIIGDGPIILKEVEYRTTTGTWAETHIVDSPNYKLWHLDPDVEYEIRVLLTRPGEGGTGPPGPPLTTRTKCADPVHGPQNVEIVDIRARQLTLQWEPFGYAVTRCHSYNLTVQYQYVFNQQQYEAEEVIQTSSHYTLRGLRPFMTIRLRLLLSNPEGRMESEELVVQTEEDVPGAVPLESIQGGPFEEKIYIQWKPPNETNGVITLYEINYKAVGSLDPSADLSSQRGKVFKLRNETHHLFVGLYPGTTYSFTIKASTAKGFGPPVTTRIATKISAPSMPEYDTDTPLNETDTTITVMLKPAQSRGAPVSVYQLVVKEERLQKSRRAADIIECFSVPVSYRNASSLDSLHYFAAELKPANLPVTQPFTVGDNKTYNGYWNPPLSPLKSYSIYFQALSKANGETKINCVRLATKGASTQNSNTVEPEKQVDNTVKMAGVIAGLLMFIIILLGVMLTIKRRRNAYSYSYYLKLAKKQKETQSGAQREMGPVASADKPTTKLSASRNDEGFSSSSQDVNGFNGSRGELSQPTLTIQTHPYRTCDPVEMSYPRDQFQPAIRVADLLQHITQMKRGQGYGFKEEYEALPEGQTASWDTAKEDENRNKNRYGNIISYDHSRVRLLVLDGDPHSDYINANYIDGYHRPRHYIATQGPMQETVKDFWRMIWQENSASIVMVTNLVEVGRVKCVRYWPDDTEVYGDIKVTLIETEPLAEYVIRTFTVQKKGYHEIRELRLFHFTSWPDHGVPCYATGLLGFVRQVKFLNPPEAGPIVVHCSAGAGRTGCFIAIDTMLDMAENEGVVDIFNCVRELRAQRVNLVQTEEQYVFVHDAILEACLCGNTAIPVCEFRSLYYNISRLDPQTNSSQIKDEFQTLNIVTPRVRPEDCSIGLLPRNHDKNRSMDVLPLDRCLPFLISVDGESSNYINAALMDSHKQPAAFVVTQHPLPNTVADFWRLVFDYNCSSVVMLNEMDTAQFCMQYWPEKTSGCYGPIQVEFVSADIDEDIIHRIFRICNMARPQDGYRIVQHLQYIGWPAYRDTPPSKRSLLKVVRRLEKWQEQYDGREGRTVVHCLNGGGRSGTFCAICSVCEMIQQQNIIDVFHIVKTLRNNKSNMVETLEQYKFVYEVALEYLSSF

SEQ ID NO: 34345 - protein, 1460 aa, Homo sapiens
  REGION 1..1460: note = ENSP00000362294
MASLAALALSLLLRLQLPPLPGARAQSAAGGCSFDEHYSNCGYSVALGTNGFTWEQINTWEKPMLDQAVPTGSFMMVNSSGRASGQKAHLLLPTLKENDTHCIDFHYYFSSRDRSSPGALNVYVKVNGGPQGNPVWNVSGVVTEGWVKAELAISTFWPHFYQVIFESVSLKGHPGYIAVDEVRVLAHPCRKAPHFLRLQNVEVNVGQNATFQCIAGGKWSQHDKLWLQQWNGRDTALMVTRVVNHRRFSATVSVADTAQRSVSKYRCVIRSDGGSGVSNYAELIVKEPPTPIAPPELLAVGATYLWIKPNANSIIGDGPIILKEVEYRTTTGTWAETHIVDSPNYKLWHLDPDVEYEIRVLLTRPGEGGTGPPGPPLTTRTKCADPVHGPQNVEIVDIRARQLTLQWEPFGYAVTRCHSYNLTVQYQYVFNQQQYEAEEVIQTSSHYTLRGLRPFMTIRLRLLLSNPEGRMESEELVVQTEEDVPGAVPLESIQGGPFEEKIYIQWKPPNETNGVITLYEINYKAVGSLDPSADLSSQRGKVFKLRNETHHLFVGLYPGTTYSFTIKASTAKGFGPPVTTRIATKISAPSMPEYDTDTPLNETDTTITVMLKPAQSRGAPVSVYQLVVKEERLQKSRRAADIIECFSVPVSYRNASSLDSLHYFAAELKPANLPVTQPFTVGDNKTYNGYWNPPLSPLKSYSIYFQALSKANGETKINCVRLATKAPMGSAQVTPGTPLCLLTTGASTQNSNTVEPEKQVDNTVKMAGVIAGLLMFIIILLGVMLTIKRRRNAYSYSYYLKLAKKQKETQSGAQREMGPVASADKPTTKLSASRNDEGFSSSSQDVNGFTDGSRGELSQPTLTIQTHPYRTCDPVEMSYPRDQFQPAIRVADLLQHITQMKRGQGYGFKEEYEALPEGQTASWDTAKEDENRNKNRYGNIISYDHSRVRLLVLDGDPHSDYINANYIDGYHRPRHYIATQGPMQETVKDFWRMIWQENSASIVMVTNLVEVGRVKCVRYWPDDTEVYGDIKVTLIETEPLAEYVIRTFTVQKKGYHEIRELRLFHFTSWPDHGVPCYATGLLGFVRQVKFLNPPEAGPIVVHCSAGAGRTGCFIAIDTMLDMAENEGVVDIFNCVRELRAQRVNLVQTEEQYVFVHDAILEACLCGNTAIPVCEFRSLYYNISRLDPQTNSSQIKDEFQTLNIVTPRVRPEDCSIGLLPRNHDKNRSMDVLPLDRCLPFLISVDGESSNYINAALMDSHKQPAAFVVTQHPLPNTVADFWRLVFDYNCSSVVMLNEMDTAQFCMQYWPEKTSGCYGPIQVEFVSADIDEDIIHRIFRICNMARPQDGYRIVQHLQYIGWPAYRDTPPSKRSLLKVVRRLEKWQEQYDGREGRTVVHCLNGGGRSGTFCAICSVCEMIQQQNIIDVFHIVKTLRNNKSNMVETLEQYKFVYEVALEYLSSF

SEQ ID NO: 34346 - protein, 1431 aa, Homo sapiens
  REGION 1..1431: note = ENSP00000362297
MASLAALALSLLLRLQLPPLPGARAQSAAGGCSFDEHYSNCGYSVALGTNGFTWEQINTWEKPMLDQAVPTGSFMMVNSSGRASGQKAHLLLPTLKENDTHCIDFHYYFSSRDRSSPGALNVYVKVNGGPQGNPVWNVSGVVTEGWVKAELAISTFWPHFYQVIFESVSLKGHPGYIAVDEVRVLAHPCRKAPHFLRLQNVEVNVGQNATFQCIAGGKWSQHDKLWLQQWNGRDTALMVTRVVNHRRFSATVSVADTAQRSVSKYRCVIRSDGGSGVSNYAELIVKEPPTPIAPPELLAVGATYLWIKPNANSIIGDGPIILKEVEYRTTTGTWAETHIVDSPNYKLWHLDPDVEYEIRVLLTRPGEGGTGPPGPPLTTRTKCADPVHGPQNVEIVDIRARQLTLQWEPFGYAVTRCHSYNLTVQYQYVFNQQQYEAEEVIQTSSHYTLRGLRPFMTIRLRLLLSNPEGRMESEELVVQTEEDVPGAVPLESIQGGPFEEKIYIQWKPPNETNGVITLYEINYKAVGSLDPSADLSSQRGKVFKLRNETHHLFVGLYPGTTYSFTIKASTAKGFGPPVTTRIATKISAPSMPEYDTDTPLNETDTTITVMLKPAQSRGAPVSVYQLVVKEERLQKSRRAADIIECFSVPVSYRNASSLDSLHYFAAELKPANLPVTQPFTVGDNKTYNGYWNPPLSPLKSYSIYFQALSKANGETKINCVRLATKGASTQNSNTVEPEKQVDNTVKMAGVIAGLLMFIIILLGVMLTIKRRKLAKKQKETQSGAQREMGPVASADKPTTKLSASRNDEGFSSSSQDVNGFTDGSRGELSQPTLTIQTHPYRTCDPVEMSYPRDQFQPAIRVADLLQHITQMKRGQGYGFKEEYEALPEGQTASWDTAKEDENRNKNRYGNIISYDHSRVRLLVLDGDPHSDYINANYIDGYHRPRHYIATQGPMQETVKDFWRMIWQENSASIVMVTNLVEVGRVKCVRYWPDDTEVYGDIKVTLIETEPLAEYVIRTFTVQKKGYHEIRELRLFHFTSWPDHGVPCYATGLLGFVRQVKFLNPPEAGPIVVHCSAGAGRTGCFIAIDTMLDMAENEGVVDIFNCVRELRAQRVNLVQTEEQYVFVHDAILEACLCGNTAIPVCEFRSLYYNISRLDPQTNSSQIKDEFQTLNIVTPRVRPEDCSIGLLPRNHDKNRSMDVLPLDRCLPFLISVDGESSNYINAALMDSHKQPAAFVVTQHPLPNTVADFWRLVFDYNCSSVVMLNEMDTAQFCMQYWPEKTSGCYGPIQVEFVSADIDEDIIHRIFRICNMARPQDGYRIVQHLQYIGWPAYRDTPPSKRSLLKVVRRLEKWQEQYDGREGRTVVHCLNGGGRSGTFCAICSVCEMIQQQNIIDVFHIVKTLRNNKSNMVETLEQYKFVYEVALEYLSSF

SEQ ID NO: 34347 - protein, 1463 aa, Homo sapiens
  REGION 1..1463: note = ENSP00000362289
MASLAALALSLLLRLQLPPLPGARAQSAAGGCSFDEHYSNCGYSVALGTNGFTWEQINTWEKPMLDQAVPTGSFMMVNSSGRASGQKAHLLLPTLKENDTHCIDFHYYFSSRDRSSPGALNVYVKVNGGPQGNPVWNVSGVVTEGWVKAELAISTFWPHFYQVIFESVSLKGHPGYIAVDEVRVLAHPCRKAPHFLRLQNVEVNVGQNATFQCIAGGKWSQHDKLWLQQWNGRDTALMVTRVVNHRRFSATVSVADTAQRSVSKYRCVIRSDGGSGVSNYAELIVKEPPTPIAPPELLAVGATYLWIKPNANSIIGDGPIILKEVEYRTTTGTWAETHIVDSPNYKLWHLDPDVEYEIRVLLTRPGEGGTGPPGPPLTTRTKCADPVHGPQNVEIVDIRARQLTLQWEPFGYAVTRCHSYNLTVQYQYVFNQQQYEAEEVIQTSSHYTLRGLRPFMTIRLRLLLSNPEGRMESEELVVQTEEDVPGAVPLESIQGGPFEEKIYIQWKPPNETNGVITLYEINYKAVGSLDPSADLSSQRGKVFKLRNETHHLFVGLYPGTTYSFTIKASTAKGFGPPVTTRIATKISAPSMPEYDTDTPLNETDTTITVMLKPAQSRGAPVSVYQLVVKEERLQKSRRAADIIECFSVPVSYRNASSLDSLHYFAAELKPANLPVTQPFTVGDNKTYNGYWNPPLSPLKSYSIYFQALSKANGETKINCVRLATKAPMGSAQVTPGTPLCLLTTGASTQNSNTVEPEKQVDNTVKMAGVIAGLLMFIIILLGVMLTIKRRRNAYSYSYYLSQRKLAKKQKETQSGAQREMGPVASADKPTTKLSASRNDEGFSSSSQDVNGFTDGSRGELSQPTLTIQTHPYRTCDPVEMSYPRDQFQPAIRVADLLQHITQMKRGQGYGFKEEYEALPEGQTASWDTAKEDENRNKNRYGNIISYDHSRVRLLVLDGDPHSDYINANYIDGYHRPRHYIATQGPMQETVKDFWRMIWQENSASIVMVTNLVEVGRVKCVRYWPDDTEVYGDIKVTLIETEPLAEYVIRTFTVQKKGYHEIRELRLFHFTSWPDHGVPCYATGLLGFVRQVKFLNPPEAGPIVVHCSAGAGRTGCFIAIDTMLDMAENEGVVDIFNCVRELRAQRVNLVQTEEQYVFVHDAILEACLCGNTAIPVCEFRSLYYNISRLDPQTNSSQIKDEFQTLNIVTPRVRPEDCSIGLLPRNHDKNRSMDVLPLDRCLPFLISVDGESSNYINAALMDSHKQPAAFVVTQHPLPNTVADFWRLVFDYNCSSVVMLNEMDTAQFCMQYWPEKTSGCYGPIQVEFVSADIDEDIIHRIFRICNMARPQDGYRIVQHLQYIGWPAYRDTPPSKRSLLKVVRRLEKWQEQYDGREGRTVVHCLNGGGRSGTFCAICSVCEMIQQQNIIDVFHIVKTLRNNKSNMVETLEQYKFVYEVALEYLSSF

SEQ ID NO: 34348 - protein, 47 aa, Homo sapiens
  REGION 1..47: note = ENSP00000484248
MASLAALALSLLLRLQLPPLPGARAQSAAGVAVPLMSTTATVVIVWL

SEQ ID NO: 34349 - protein, 313 aa, Homo sapiens
  REGION 1..313: note = ENSP00000480136
GSFMMVNSSGRASGQKAHLLLPTLKENDTHCIDFHYYFSSRDRSSPGALNVYVKVNGGPQGNPVWNVSGVVTEGWVKAELAISTFWPHFYQVIFESVSLKGHPGYIAVDEVRVLAHPCRKAPHFLRLQNVEVNVGQNATFQCIAGGKWSQHDKLWLQQWNGRDTALMVTRVVNHRRFSATVSVADTAQRSVSKYRCVIRSDGGSGVSNYAELIVKEPPTPIAPPELLAVGATYLWIKPNANSIIGDGPIILKEVEYRTTTGTWAETHIVDSPNYKLWHLDPDVEYEIRVLLTRPGEGGTGPPGPPLTTRTKCA

SEQ ID NO: 34350 - protein, 1076 aa, Homo sapiens
  REGION 1..1076: note = ENSP00000484524
  VARIANT 1: note = Any amino acid
XPVHGPQNVEIVDIRARQLTLQWEPFGYAVTRCHSYNLTVQYQYVFNQQQYEAEEVIQTSSHYTLRGLRPFMTIRLRLLLSNPEGRMESEELVVQTEEDVPGAVPLESIQGGPFEEKIYIQWKPPNETNGVITLYEINYKAVGSLDPSADLSSQRGKVFKLRNETHHLFVGLYPGTTYSFTIKASTAKGFGPPVTTRIATKISAPSMPEYDTDTPLNETDTTITVMLKPAQSRGAPVSVYQLVVKEERLQKSRRAADIIECFSVPVSYRNASSLDSLHYFAAELKPANLPVTQPFTVGDNKTYNGYWNPPLSPLKSYSIYFQALSKANGETKINCVRLATKAPMGSAQVTPGTPLCLLTTGASTQNSNTVEPEKQVDNTVKMAGVIAGLLMFIIILLGVMLTIKRRRNAYSYSYYLKLAKKQKETQSGAQREMGPVASADKPTTKLSASRNDEGFSSSSQDVNGFTDGSRGELSQPTLTIQTHPYRTCDPVEMSYPRDQFQPAIRVADLLQHITQMKRGQGYGFKEEYEALPEGQTASWDTAKEDENRNKNRYGNIISYDHSRVRLLVLDGDPHSDYINANYIDGYHRPRHYIATQGPMQETVKDFWRMIWQENSASIVMVTNLVEVGRVKCVRYWPDDTEVYGDIKVTLIETEPLAEYVIRTFTVQKKGYHEIRELRLFHFTSWPDHGVPCYATGLLGFVRQVKFLNPPEAGPIVVHCSAGAGRTGCFIAIDTMLDMAENEGVVDIFNCVRELRAQRVNLVQTEEQYVFVHDAILEACLCGNTAIPVCEFRSLYYNISRLDPQTNSSQIKDEFQTLNIVTPRVRPEDCSIGLLPRNHDKNRSMDVLPLDRCLPFLISVDGESSNYINAALMDSHKQPAAFVVTQHPLPNTVADFWRLVFDYNCSSVVMLNEMDTAQFCMQYWPEKTSGCYGPIQVEFVSADIDEDIIHRIFRICNMARPQDGYRIVQHLQYIGWPAYRDTPPSKRSLLKVVRRLEKWQEQYDGREGRTVVHCLNGGGRSGTFCAICSVCEMIQQQNIIDVFHIVKTLRNNKSNMVETLEQYKFVYEVALEYLSSF

SEQ ID NO: 34351 - protein, 1059 aa, Homo sapiens [sequence omitted]

SEQ ID NO: 34352 - protein, 2315 aa, Homo sapiens
  REGION 1..2315: note = ENSP00000377047
MRILKRFLACIQLLCVCRLDWANGYYRQQRKLVEEIGWSYTGALNQKNWGKKYPTCNSPKQSPINIDEDLTQVNVNLKKLKFQGWDKTSLENTFIHNTGKTVEINLTNDYRVSGGVSEMVFKASKITFHWGKCNMSSDGSEHSLEGQKFPLEMQIYCFDADRFSSFEEAVKGKGKLRALSILFEVGTEENLDFKAIIDGVESVSRFGKQAALDPFILLNLLPNSTDKYYIYNGSLTSPPCTDTVDWIVFKDTVSISESQLAVFCEVLTMQQSGYVMLMDYLQNNFREQQYKFSRQVFSSYTGKEEIHEAVCSSEPENVQADPENYTSLLVTWERPRVVYDTMIEKFAVLYQQLDGEDQTKHEFLTDGYQDLGAILNNLLPNMSYVLQIVAICTNGLYGKYSDQLIVDMPTDNPELDLFPELIGTEEIIKEEEEGKDIEEGAIVNPGRDSATNQIRKKEPQISTTTHYNRIGTKYNEAKTNRSPTRGSEFSGKGDVPNTSLNSTSQPVTKLATEKDISLTSQTVTELPPHTVEGTSASLNDGSKTVLRSPHMNLSGTAESLNTVSITEYEEESLLTSFKLDTGAEDSSGSSPATSAIPFISENISQGYIFSSENPETITYDVLIPESARNASEDSTSSGSEESLKDPSMEGNVWFPSSTDITAQPDVGSGRESFLQTNYTEIRVDESEKTTKSFSAGPVMSQGPSVTDLEMPHYSTFAYFPTEVTPHAFTPSSRQQDLVSTVNVVYSQTTQPVYNGETPLQPSYSSEVFPLVTPLLLDNQILNTTPAASSSDSALHATPVFPSVDVSFESILSSYDGAPLLPFSSASFSSELFRHLHTVSQILPQVTSATESDKVPLHASLPVAGGDLLLEPSLAQYSDVLSTTHAASETLEFGSESGVLYKTLMFSQVEPPSSDAMMHARSSGPEPSYALSDNEGSQHIFTVSYSSAIPVHDSVGVTYQGSLFSGPSHIPIPKSSLITPTASLLQPTHALSGDGEWSGASSDSEFLLPDTDGLTALNISSPVSVAEFTYTTSVFGDDNKALSKSEIIYGNETELQIPSFNEMVYPSESTVMPNMYDNVNKLNASLQETSVSISSTKGMFPGSLAHTTTKVFDHEISQVPENNFSVQPTHTVSQASGDTSLKPVLSANSEPASSDPASSEMLSPSTQLLFYETSASFSTEVLLQPSFQASDVDTLLKTVLPAVPSDPILVETPKVDKISSTMLHLIVSNSASSENMLHSTSVPVFDVSPTSHMHSASLQGLTISYASEKYEPVLLKSESSHQVVPSLYSNDELFQTANLEINQAHPPKGRHVFATPVLSIDEPLNTLINKLIHSDEILTSTKSSVTGKVFAGIPTVASDTFVSTDHSVPIGNGHVAITAVSPHRDGSVTSTKLLFPSKATSELSHSAKSDAGLVGGGEDGDTDDDGDDDDDDRGSDGLSIHKCMSCSSYRESQEKVMNDSDTHENSLMDQNNPISYSLSENSEEDNRVTSVSSDSQTGMDRSPGKSPSANGLSQKHNDGKEENDIQTGSALLPLSPESKAWAVLTSDEESGSGQGTSDSLNENETSTDFSFADTNEKDADGILAAGDSEITPGFPQSPTSSVTSENSEVFHVSEAEASNSSHESRIGLAEGLESEKKAVIPLVIVSALTFICLVVLVGILIYWRKCFQTAHFYLEDSTSPRVISTPPTPIFPISDDVGAIPIKHFPKHVADLHASSGFTEEFETLKEFYQEVQSCTVDLGITADSSNHPDNKHKNRYINIVAYDHSRVKLAQLAEKDGKLTDYINANYVDGYNRPKAYIAAQGPLKSTAEDFWRMIWEHNVEVIVMITNLVEKGRRKCDQYWPADGSEEYGNFLVTQKSVQVLAYYTVRNFTLRNTKIKKGSQKGRPSGRVVTQYHYTQWPDMGVPEYSLPVLTFVRKAAYAKRHAVGPVVVHCSAGVGRTGTYIVLDSMLQQIQHEGTVNIFGFLKHIRSQRNYLVQTEEQYVFIHDTLVEAILSKETEVLDSHIHAYVNALLIPGPAGKTKLEKQFQLLSQSNIQQSDYSAALKQCNREKNRTSSIIPVERSRVGISSLSGEGTDYINASYIMGYYQSNEFIITQHPLLHTIKDFWRMIWDHNAQLVVMIPDGQNMAEDEFVYWPNKDEPINCESFKVTLMAEEHKCLSNEEKLIIQDFILEATQDDYVLEVRHFQCPKWPNPDSPISKTFELISVIKEEAANRDGPMIVHDEHGGVTAGTFCALTTLMHQLEKENSVDVYQVAKMINLMRPGVFADIEQYQFLYKVILSLVSTRQEENPSTSLDSNGAALPDGNIAESLESLV

SEQ ID NO: 34353 - protein, 1448 aa, Homo sapiens
  REGION 1..1448: note = ENSP00000410000
MRILKRFLACIQLLCVCRLDWANGYYRQQRKLVEEIGWSYTGALNQKNWGKKYPTCNSPKQSPINIDEDLTQVNVNLKKLKFQGWDKTSLENTFIHNTGKTVEINLTNDYRVSGGVSEMVFKASKITFHWGKCNMSSDGSEHSLEGQKFPLEMQIYCFDADRFSSFEEAVKGKGKLRALSILFEVGTEENLDFKAIIDGVESVSRFGKQAALDPFILLNLLPNSTDKYYIYNGSLTSPPCTDTVDWIVFKDTVSISESQLAVFCEVLTMQQSGYVMLMDYLQNNFREQQYKFSRQVFSSYTGKEEIHEAVCSSEPENVQADPENYTSLLVTWERPRVVYDTMIEKFAVLYQQLDGEDQTKHEFLTDGYQDLGAILNNLLPNMSYVLQIVAICTNGLYGKYSDQLIVDMPTDNPELDLFPELIGTEEIIKEEEEGKDIEEGAIVNPGRDSATNQIRKKEPQISTTTHYNRIGTKYNEAKTNRSPTRGSEFSGKGDVPNTSLNSTSQPVTKLATEKDISLTSQTVTELPPHTVEGTSASLNDGSKTVLRSPHMNLSGTAESLNTVSITEYEEESLLTSFKLDTGAEDSSGSSPATSAIPFISENISQGYIFSSENPETITYDVLIPESARNASEDSTSSGSEESLKDPSMEGNVWFPSSTDITAQPDVGSGRESFLQTNYTEIRVDESEKTTKSFSAGPVMSQGPSVTDLEMPHYSTFAYFPTEVTPHAFTPSSRQQDLVSTVNVVYSQTTQPVYNEASNSSHESRIGLAEGLESEKKAVIPLVIVSALTFICLVVLVGILIYWRKCFQTAHFYLEDSTSPRVISTPPTPIFPISDDVGAIPIKHFPKHVADLHASSGFTEEFEEVQSCTVDLGITADSSNHPDNKHKNRYINIVAYDHSRVKLAQLAEKDGKLTDYINANYVDGYNRPKAYIAAQGPLKSTAEDFWRMIWEHNVEVIVMITNLVEKGRRKCDQYWPADGSEEYGNFLVTQKSVQVLAYYTVRNFTLRNTKIKKGSQKGRPSGRVVTQYHYTQWPDMGVPEYSLPVLTFVRKAAYAKRHAVGPVVVHCSAGVGRTGTYIVLDSMLQQIQHEGTVNIFGFLKHIRSQRNYLVQTEEQYVFIHDTLVEAILSKETEVLDSHIHAYVNALLIPGPAGKTKLEKQFQLLSQSNIQQSDYSAALKQCNREKNRTSSIIPVERSRVGISSLSGEGTDYINASYIMGYYQSNEFIITQHPLLHTIKDFWRMIWDHNAQLVVMIPDGQNMAEDEFVYWPNKDEPINCESFKVTLMAEEHKCLSNEEKLIIQDFILEATQDDYVLEVRHFQCPKWPNPDSPISKTFELISVIKEEAANRDGPMIVHDEHGGVTAGTFCALTTLMHQLEKENSVDVYQVAKMINLMRPGVFADIEQYQFLYKVILSLVSTRQEENPSTSLDSNGAALPDGNIAESLESLV

SEQ ID NO: 34354 - protein, 202 aa, Homo sapiens
  REGION 1..202: note = ENSP00000377536
MATLIYVDKENGEPGTRVVAKDGLKLGSGPSIKALDGRSQVSTPRFGKTFDAPPALPKATRKALGTVNRATEKSVKTKGPLKQKQPSFSAKKMTEKTVKAKSSVPASDDAYPEIEKFFPFNPLDFESFDLPEEHQIAHLPLSGVPLMILDEERELEKLFQLGPPSPVKMPSPPWESNLLQSPSSILSTLDVELPPVCCDIDI

SEQ ID NO: 34355 - protein, 202 aa, Homo sapiens; identical to SEQ ID NO: 34354
  REGION 1..202: note = ENSP00000430642

SEQ ID NO: 34356 - protein, 121 aa, Homo sapiens
  REGION 1..121: note = ENSP00000431068
MPLPKVGGGFGGERSSLYTQYLSCTGILLLEYSYGKTFSSAIKALDGRSQVSTPRFGKTFDAPPALPKATRKALGTVNRATEKSVKTKGPLKQKQPSFSAKKMTEKTVKAKSSVPASDDAY

SEQ ID NO: 34357 - protein, 202 aa, Homo sapiens; identical to SEQ ID NO: 34354
  REGION 1..202: note = ENSP00000344936

SEQ ID NO: 34358 - protein, 228 aa, Homo sapiens
  REGION 1..228: note = ENSP00000370467
MAAPPQPVTHLIFDMDGLLLDTERLYSVVFQEICNRYDKKYSWDVKSLVMGKKALEAAQIIIDVLQLPMSKEELVEESQTKLKEVFPTAALMPGAEKLIIHLRKHGIPFALATSSGSASFDMKTSRHKEFFSLFSHIVLGDDPEVQHGKPDPDIFLACAKRFSPPPAMEKCLVFEDAPNGVEAALAAGMQVVMVPDGNLSRDLTTKATLVLNSLQDFQPELFGLPSYE

SEQ ID NO: 34359 - protein, 185 aa, Homo sapiens
  REGION 1..185: note = ENSP00000406260
MAAPPQPVTHLIFDMDGLLLDTERLYSVVFQEICNRYDKKYSWDVKSLVMGAEKLIIHLRKHGIPFALATSSGSASFDMKTSRHKEFFSLFSHIVLGDDPEVQHGKPDPDIFLACAKRFSPPPAMEKCLVFEDAPNGVEAALAAGMQVVMVPDGNLSRDLTTKATLVLNSLQDFQPELFGLPSYE

SEQ ID NO: 34360 - protein, 251 aa, Homo sapiens
  REGION 1..251: note = ENSP00000396452
MAAPPQPVTHLIFDMDGLLLGYTGSIVAAASGESSRGLQSRWTDTERLYSVVFQEICNRYDKKYSWDVKSLVMGKKALEAAQIIIDVLQLPMSKEELVEESQTKLKEVFPTAALMPGAEKLIIHLRKHGIPFALATSSGSASFDMKTSRHKEFFSLFSHIVLGDDPEVQHGKPDPDIFLACAKRFSPPPAMEKCLVFEDAPNGVEAALAAGMQVVMVPDGNLSRDLTTKATLVLNSLQDFQPELFGLPSYE

SEQ ID NO: 34361 - protein, 191 aa, Homo sapiens
  REGION 1..191: note = ENSP00000430995
MAAPPQPVTHLIFDMDGLLLDTERLYSVVFQEICNRYDKKYSWDVKSLVMGKKALEAAQIIIDVLQLPMSKEELVEESQTKLKEVFPTAALMPGAEKLIIHLRKHGIPFALATSSGSASFDMKTSRHKEFFSLFSHIVLGDDPEVQHGKPDPDIFLACAKRFSPPPAMEKSSIHRPRLLTAQKCQGCRDPF

SEQ ID NO: 34362 - protein, 208 aa, Homo sapiens
  REGION 1..208: note = ENSP00000441208
MAAPPQPVTHLIFDMDGLLLDTERLYSVVFQEICNRYDKKYSWDVKSLVMGKKALEAAQIIIDVLQLPMSKEELVEESQTKLKEVFPTAALMPGAEKLIIHLRKHGIPFALATSSGSASFDMKTSRHKEFFSLFSHIVLGDDPEVQHGKPDPDIFLACAKRFSPPPAMEKSSIHRPRLLTAQKCQGCRDPFSALLLLCNQLLLCSDDT

SEQ ID NO: 34363 - protein, 312 aa, Homo sapiens
  REGION 1..312: note = ENSP00000379051
MADGDSGSERGGGGGPCGFQPASRGGGEQETQELASKRLDIQNKRFYLDVKQNAKGRFLKIAEVGAGGSKSRLTLSMAVAAEFRDSLGDFIEHYAQLGPSSPEQLAAGAEEGGGPRRALKSEFLVRENRKYYLDLKENQRGRFLRIRQTVNRGGGGFGAGPGPGGLQSGQTIALPAQGLIEFRDALAKLIDDYGGEDDELAGGPGGGAGGPGGGLYGELPEGTSITVDSKRFFFDVGCNKYGVFLRVSEVKPSYRNAITVPFKAWGKFGGAFCRYADEMKEIQERQRDKLYERRGGGSGGGEESEGEEVDED

SEQ ID NO: 34364 - protein, 78 aa, Homo sapiens
  REGION 1..78: note = ENSP00000485850
MVGLKKKSADDVKKVFHMLDKDKSGFIEEDELGFILKGFSPDARDLSAKETKMLMAAGDKDGDGKIGVDEFSTLVAES

SEQ ID NO: 34365 - protein, 101 aa, Homo sapiens
  REGION 1..101: note = ENSP00000487336
MSMTDLLNAEDIKKAVGAFSATDSFDHKKFFQMVGLKKKSADDVKKVFHMLDKDKSGFIEEDELGFILKGFSPDARDLSAKETKMLMAAGDKDGDGKIGVD

SEQ ID NO: 34366 - protein, 110 aa, Homo sapiens
  REGION 1..110: note = ENSP00000486144
MSMTDLLNAEDIKKAVGAFSATDSFDHKKFFQMVGLKKKSADDVKKVFHMLDKDKSGFIEEDELGFILKGFSPDARDLSAKETKMLMAAGDKDGDGKIGVDEFSTLVAES

SEQ ID NO: 34367 - protein, 110 aa, Homo sapiens; identical to SEQ ID NO: 34366
  REGION 1..110: note = ENSP00000480913

SEQ ID NO: 34368 - protein, 106 aa, Homo sapiens
  REGION 1..106: note = ENSP00000487426
  VARIANT 1: note = Any amino acid
XMTDLLNAEDIKKAVGAFSATDSFDHKKFFQMVGLKKKSADDVKKVFHMLDKDKSGFIEEDELGFILKGFSPDARDLSAKETKMLMAAGDKDGDGKIGVDDPADVD

SEQ ID NO: 34369 - protein, 110 aa, Homo sapiens; identical to SEQ ID NO: 34366
  REGION 1..110: note = ENSP00000400247

SEQ ID NO: 34370 - protein, 110 aa, Homo sapiens; identical to SEQ ID NO: 34366
  REGION 1..110: note = ENSP00000216200

SEQ ID NO: 34371 - protein, 106 aa, Homo sapiens; identical to SEQ ID NO: 34368
  REGION 1..106: note = ENSP00000384735
  VARIANT 1: note = Any amino acid

SEQ ID NO: 34372 - protein, 78 aa, Homo sapiens; identical to SEQ ID NO: 34364
  REGION 1..78: note = ENSP00000386089

SEQ ID NO: 34373 - protein, 101 aa, Homo sapiens; identical to SEQ ID NO: 34365
  REGION 1..101: note = ENSP00000406977

SEQ ID NO: 34374 - protein, 179 aa, Homo sapiens
  REGION 1..179: note = ENSP00000369630
  VARIANT 1: note = Any amino acid
XQSRRIEPVMGRLLLCASHGEIEKHPSLHASSYGLVAIKEAHDIETRLNEVEKLLKTIISMPCKYSRSEVVLTFFERSPLDQVLKNDNVHKIQPSFQSPVKISEIMRSNGFCLANTETIVIDHSIPNGRDQQLGVDPTEHLFENGSEFPSELEDGDDPAAYVTNLSYYHLVPFETDIWD

SEQ ID NO: 34375 - protein, 231 aa, Homo sapiens
  REGION 1..231: note = ENSP00000369636
MASAVFEGTSLVNMFVRGCWVNGIRRLIVSRRGDEEEFFEIRTEWSDRSVLYLHRSLADLGRLWQRLRDAFPEDRSELAQGPLRQGLVAIKEAHDIETRLNEVEKLLKTIISMPCKYSRSEVVLTFFERSPLDQVLKNDNVHKIQPSFQSPVKISEIMRSNGFCLANTETIVIDHSIPNGRDQQLGVDPTEHLFENGSEFPSELEDGDDPAAYVTNLSYYHLVPFETDIWD

SEQ ID NO: 34376 - protein, 1479 aa, Homo sapiens
  REGION 1..1479: note = ENSP00000252804
MAKRSRGPGRRCLLALVLFCAWGTLAVVAQKPGAGCPSRCLCFRTTVRCMHLLLEAVPAVAPQTSILDLRFNRIREIQPGAFRRLRNLNTLLLNNNQIKRIPSGAFEDLENLKYLYLYKNEIQSIDRQAFKGLASLEQLYLHFNQIETLDPDSFQHLPKLERLFLHNNRITHLVPGTFNHLESMKRLRLDSNTLHCDCEILWLADLLKTYAESGNAQAAAICEYPRRIQGRSVATITPEELNCERPRITSEPQDADVTSGNTVYFTCRAEGNPKPEIIWLRNNNELSMKTDSRLNLLDDGTLMIQNTQETDQGIYQCMAKNVAGEVKTQEVTLRYFGSPARPTFVIQPQNTEVLVGESVTLECSATGHPPPRISWTRGDRTPLPVDPRVNITPSGGLYIQNVVQGDSGEYACSATNNIDSVHATAFIIVQALPQFTVTPQDRVVIEGQTVDFQCEAKGNPPPVIAWTKGGSQLSVDRRHLVLSSGTLRISGVALHDQGQYECQAVNIIGSQKVVAHLTVQPRVTPVFASIPSDTTVEVGANVQLPCSSQGEPEPAITWNKDGVQVTESGKFHISPEGFLTINDVGPADAGRYECVARNTIGSASVSMVLSVNVPDVSRNGDPFVATSIVEAIATVDRAINSTRTHLFDSRPRSPNDLLALFRYPRDPYTVEQARAGEIFERTLQLIQEHVQHGLMVDLNGTSYHYNDLVSPQYLNLIANLSGCTAHRRVNNCSDMCFHQKYRTHDGTCNNLQHPMWGASLTAFERLLKSVYENGFNTPRGINPHRLYNGHALPMPRLVSTTLIGTETVTPDEQFTHMLMQWGQFLDHDLDSTVVALSQARFSDGQHCSNVCSNDPPCFSVMIPPNDSRARSGARCMFFVRSSPVCGSGMTSLLMNSVYPREQINQLTSYIDASNVYGSTEHEARSIRDLASHRGLLRQGIVQRSGKPLLPFATGPPTECMRDENESPIPCFLAGDHRANEQLGLTSMHTLWFREHNRIATELLKLNPHWDGDTIYYETRKIVGAEIQHITYQHWLPKILGEVGMRTLGEYHGYDPGINAGIFNAFATAAFRFGHTLVNPLLYRLDENFQPIAQDHLPLHKAFFSPFRIVNEGGIDPLLRGLFGVAGKMRVPSQLLNTELTERLFSMAHTVALDLAAINIQRGRDHGIPPYHDYRVYCNLSAAHTFEDLKNEIKNPEIREKLKRLYGSTLNIDLFPALVVEDLVPGSRLGPTLMCLLSTQFKRLRDGDRLWYENPGVFSPAQLTQIKQTSLARILCDNADNITRVQSDVFRVAEFPHGYGSCDEIPRVDLRVWQDCCEDCRTRGQFNAFSYHFRGRRSLEFSYQEDKPTKKTRPRKIPSVGRQGEHLSNSTSAFSTRSDASGTNDFREFVLEMQKTITDLRTQIKKLESRLSTTECVDAGGESHANNTKWKKDACTICECKDGQVTCFVEACPPATCAVPVNIPGACCPVCLQKRAEEKP

SEQ ID NO: 34377 - protein, 76 aa, Homo sapiens
  REGION 1..76: note = ENSP00000414098
  VARIANT 1: note = Any amino acid
XVQSDVFRVAEFPHGYGSCDEIPRVDLRVWQDCCEDCRTRGQFNAFSYHFRGRRSLEFSYQEDKPTKKTRPRKIPR

SEQ ID NO: 34378 - protein, 723 aa, Homo sapiens
  REGION 1..723: note = ENSP00000402738
  VARIANT 1: note = Any amino acid
XRGPGRRCLLALVLFCAWGTLAVVAQKPGAGCPSRCLCFRTTVRCMHLLLEAVPAVAPQTSILDLRFNRIREIQPGAFRRLRNLNTLLLNNNQIKRIPSGAFEDLENLKYLYLYKNEIQSIDRQAFKGLASLEQLYLHFNQIETLDPDSFQHLPKLERLFLHNNRITHLVPGTFNHLESMKRLRLDSNTLHCDCEILWLADLLKTYAESGNAQAAAICEYPRRIQGRSVATITPEELNCERPRITSEPQDADVTSGNTVYFTCRAEGNPKPEIIWLRNNNELSMKTDSRLNLLDDGTLMIQNTQETDQGIYQCMAKNVAGEVKTQEVTLRYFGSPARPTFVIQPQNTEVLVGESVTLECSATGHPPPRISWTRGDRTPLPVDPRVNITPSGGLYIQNVVQGDSGEYACSATNNIDSVHATAFIIVQALPQFTVTPQDRVVIEGQTVDFQCEAKGNPPPVIAWTKGGSQLSVDRRHLVLSSGTLRISGVALHDQGQYECQAVNIIGSQKVVAHLTVQPRVTPVFASIPSDTTVEVGANVQLPCSSQGEPEPAITWNKDGVQVTESGKFHISPEGFLTINDVGPADAGRYECVARNTIGSASVSMVLSVNVPDVSRNGDPFVATSIVEAIATVDRAINSTRTHLFDSRPRSPNDLLALFRYPRDPYTVEQARAGEIFERTLQLIQEHVQHGLMVDLNGTSQCQSLFFLLHGLSNGVEHASVKSHS

SEQ ID NO: 34379 - protein, 196 aa, Homo sapiens
  REGION 1..196: note = ENSP00000408701
  VARIANT 1: note = Any amino acid
XGSWFPSAPGLSTTVLLNNNQIKRIPSGAFEDLENLKYLYLYKNEIQSIDRQAFKGLASLEQLYLHFNQIETLDPDSFQHLPKLERLFLHNNRITHLVPGTFNHLESMKRLRLDSNTLHCDCEILWLADLLKTYAESGNAQAAAICEYPRRIQGRSVATITPEELNCERPRITSEPQDADVTSGNTVYFTCRAEGN

SEQ ID NO: 34380 - protein, 224 aa, Homo sapiens
  REGION 1..224: note = ENSP00000398363
MAKRSRGPGRRCLLALVLFCAWGTLAVVAQKPGAGCPSRCLCFRTTVRCMHLLLEAVPAVAPQTSILDLRFNRIREIQPGAFRRLRNLNTLLLNNNQIKRIPSGAFEDLENLKYLYLHFNQIETLDPDSFQHLPKLERLFLHNNRITHLVPGTFNHLESMKRLRLDSNTLHCDCEILWLADLLKTYAESGNAQAAAICEYPRRIQGRSVATITPEELNCERPRI

SEQ ID NO: 34381 - protein, 582 aa, Homo sapiens
  REGION 1..582: note = ENSP00000429855
NNLQQPTWGAALTAFARLLQPAYRDGIRAPRGLGLPVGSRQPLPPPRLVATVWARAAAVTPDHSYTRMLMHWGWFLEHDLDHTVPALSTARFSDGRPCSSVCTNDPPCFPMNTRHADPRGTHAPCMLFARSSPACASGRPSATVDSVYAREQINQQTAYIDGSNVYGSSERESQALRDPSVPRGLLKTGFPWPPSGKPLLPFSTGPPTECARQEQESPCFLAGDHRANEHLALAAMHTLWFREHNRMATELSALNPHWEGNTVYQEARKIVGAELQHITYSHWLPKVLGDPGTRMLRGYRGYNPNVNAGIINSFATAAFRFGHTLINPILYRLNATLGEISEGHLPFHKALFSPSRIIKEGGIDPVLRGLFGVAAKWRAPSYLLSPELTQRLFSAAYSAAVDSAATIIQRGRDHGIPPYVDFRVFCNLTSVKNFEDLQNEIKDSEIRQKLRKLYGSPGDIDLWPALMVEDLIPGTRVGPTLMCLFVTQFQRLRDGDRFWYENPGVFTPAQLTQLKQASLSRVLCDNGDSIQQVQADVFVKAEYPQDYLNCSEIPKVDLRVWQDCCADKQAGGTPEAGRVYRC

SEQ ID NO: 34382 - protein, 537 aa, Homo sapiens
  REGION 1..537: note = ENSP00000428114
  VARIANT 1: note = Any amino acid
XAREQINQQTAYIDGSNVYGSSERESQALRDPSVPRGLLKTGFPWPPSGKPLLPFSTGPPTECARQEQESPCFLAGDHRANEHLALAAMHTLWFREHNRMATELSALNPHWEGNTVYQEARKIVGAELQHITYSHWLPKVLGDPGTRMLRGYRGYNPNVNAGIINSFATAAFRFGHTLINPILYRLNATLGEISEGHLPFHKALFSPSRIIKEGGIDPVLRGLFGVAAKWRAPSYLLSPELTQRLFSAAYSAAVDSAATIIQRGRDHGIPPYVDFRVFCNLTSVKNFEDLQNEIKDSEIRQKLRKFWYENPGVFTPAQLTQLKQASLSRVLCDNGDSIQQVQADVFVKAEYPQDYLNCSEIPKVDLRVWQDCCADCRSRGQFRAVTQESQKKRSAQYSYPVDKDMELSHLRSRQQDKIYVGEDARNVTVLAKTKFSQDFSTFAAEIQETITALREQINKLEARLRQAGCTDVRGVPRKAEERWMKEDCTHCICESGQVTCVVEICPPAPCPSPELVKGTCCPVCRDRGMPSDSPEKR

SEQ ID NO: 34383 - protein, 1463 aa, Homo sapiens
  REGION 1..1463: note = ENSP00000348645
MEPRLFCWTTLFLLAGWCLPGLPCPSRCLCFKSTVRCMHLMLDHIPQVPQQTTVLDLRFNRIREIPGSAFKKLKNLNTLLLNNNHIRKISRNAFEGLENLLYLYLYKNEIHALDKQTFKGLISLEHLYIHFNQLEMLQPETFGDLLRLERLFLHNNKLSKIPAGSFSNLDSLKRLRLDSNALVCDCDLMWLGELLQGFAQHGHTQAAATCEYPRRLHGRAVASVTVEEFNCQSPRITFEPQDVEVPSGNTVYFTCRAEGNPKPEIIWIHNNHSLDLEDDTRLNVFDDGTLMIRNTRESDQGVYQCMARNSAGEAKTQSAMLRYSSLPAKPSFVIQPQDTEVLIGTSTTLECMATGHPHPLITWTRDNGLELDGSRHVATSSGLYLQNITQRDHGRFTCHANNSHGTVQAAANIIVQAPPQFTVTPKDQVVLEEHAVEWLCEADGNPPPVIVWTKTGGQLPVEGQHTVLSSGTLRIDRAAQHDQGQYECQAVSSLGVKKVSVQLTVKPKALAVFTQLPQDTSVEVGKNINISCHAQGEPQPIITWNKEGVQITESGKFHVDDEGTLTIYDAGFPDQGRYECVARNSFGLAVTNMFLTVTAIQGRQAGDDFVESSILDAVQRVDSAINSTRRHLFSQKPHTSSDLLAQFHYPRDPLIVEMARAGEIFEHTLQLIRERVKQGLTVDLEGKEFRYNDLVSPRSLSLIANLSGCTARRPLPNCSNRCFHAKYRAHDGTCNNLQQPTWGAALTAFARLLQPAYRDGIRAPRGLGLPVGSRQPLPPPRLVATVWARAAAVTPDHSYTRMLMHWGWFLEHDLDHTVPALSTARFSDGRPCSSVCTNDPPCFPMNTRHADPRGTHAPCMLFARSSPACASGRPSATVDSVYAREQINQQTAYIDGSNVYGSSERESQALRDPSVPRGLLKTGFPWPPSGKPLLPFSTGPPTECARQEQESPCFLAGDHRANEHLALAAMHTLWFREHNRMATELSALNPHWEGNTVYQEARKIVGAELQHITYSHWLPKVLGDPGTRMLRGYRGYNPNVNAGIINSFATAAFRFGHTLINPILYRLNATLGEISEGHLPFHKALFSPSRIIKEGGIDPVLRGLFGVAAKWRAPSYLLSPELTQRLFSAAYSAAVDSAATIIQRGRDHGIPPYVDFRVFCNLTSVKNFEDLQNEIKDSEIRQKLRKLYGSPGDIDLWPALMVEDLIPGTRVGPTLMCLFVTQFQRLRDGDRFWYENPGVFTPAQLTQLKQASLSRVLCDNGDSIQQVQADVFVKAEYPQDYLNCSEIPKVDLRVWQDCCADCRSRGQFRAVTQESQKKRSAQYSYPVDKDMELSHLRSRQQDKIYVGEDARNVTVLAKTKFSQDFSTFAAEIQETITALREQINKLEARLRQAGCTDVRGVPRKAEERWMKEDCTHCICESGQVTCVVEICPPAPCPSPELVKGTCCPVCRDRGMPSDSPEKR

SEQ ID NO: 34384 - protein, 578 aa, Homo sapiens
  REGION 1..578: note = ENSP00000348472
MAFMEKPPAGKVLLDDTVPLTAAIEASQSLQSHTEYIIRVQRGISVENSWQIVRRYSDFDLLNNSLQIAGLSLPLPPKKLIGNMDREFIAERQKGLQNYLNVITTNHILSNCELVKKFLDPNNYSANYTEIALQQVSMFFRSEPKWEVVEPLKDIGWRIRKKYFLMKIKNQPKERLVLSWADLGPDKYLSDKDFQCLIKLLPSCLHPYIYRVTFATANESSALLIRMFNEKGTLKDLIYKAKPKDPFLKKYCNPKKIQGLELQQIKTYGRQILEVLKFLHDKGFPYGHLHASNVMLDGDTCRLLDLENSLLGLPSFYRSYFSQFRKINTLESVDVHCFGHLLYEMTYGRPPDSVPVDSFPPAPSMAVVAVLESTLSCEACKNGMPTISRLLQMPLFSDVLLTTSEKPQFKIPTKLKEALRIAKECIEKRLIEEQKQIHQHRRLTRAQSHHGSEEERKKRKILARKKSKRSALENSEEHSAKYSNSNNSAGSGASSPLTSPSSPTPPSTSGISALPPPPPPPPPPAAPLPPASTEAPAQLSSQAVNGMSRGALLSSIQNFQKGTLRKAKTCDHSAPKIG

SEQ ID NO: 34385 - protein, 56 aa, Homo sapiens
  REGION 1..56: note = ENSP00000417167
MAFMEKPPAGKVLLDDTVPLTAAIEASQSLQSHTRLPCNRFPCSSDQNQSGRWWNL

SEQ ID NO: 34386 - protein, 482 aa, Homo sapiens
  REGION 1..482: note = ENSP00000417903
MAFMEKPPAGKVLLDDTVPLTAAIEASQSLQSHTIAGLSLPLPPKKLIGNMDREFIAERQKGLQNYLNVITTNHILSNCELVKKFLDPNNYSANYTEIALQQVSMFFRSEPKWEVVEPLKDIGWRIRKKYFLMKIKNQPKERLVLSWADLGPDKYLSDKDFQCLIKLLPSCLHPYIYRVTFATANESSALLIRMFNEKGTLKDLIYKAKPKDPFLKKYCNPKKIQGLELQQIKTYGRQILEVLKFLHDKGFPYGHLHASNVMLDGDTCRLLDLENSLLGLPSFYRSYFSQFRKINTLESVDVHCFGHLLYEMTYGRPPDSVPVDSFPPAPSMAVVAVLESTLSCEACKNGMPTISRLLQMPLFSDVLLTTSEKPQFKIPTKLKEALRIAKECIEKRLIEEQKQIHQHRRLTRAQSHHGSEEERKKRKILARKKSKRSALENSEEHSAKYSNSNNSAGSGASSPLTSPSSPTPPSTSVEHAPF

SEQ ID NO: 34387 - protein, 498 aa, Homo sapiens
  REGION 1..498: note = ENSP00000373221
MAFMEKPPAGKVLLDDTVPLTAAIEASQSLQSHTIVRRYSDFDLLNNSLQIAGLSLPLPPKKLIGNMDREFIAERQKGLQNYLNVITTNHILSNCELVKKFLDPNNYSANYTEIALQQVSMFFRSEPKWEVVEPLKDIGWRIRKKYFLMKIKNQPKERLVLSWADLGPDKYLSDKDFQCLIKLLPSCLHPYIYRVTFATANESSALLIRMFNEKGTLKDLIYKAKPKDPFLKKYCNPKKIQGLELQQIKTYGRQILEVLKFLHDKGFPYGHLHASNVMLDGDTCRLLDLENSLLGLPSFYRSYFSQFRKINTLESVDVHCFGHLLYEMTYGRPPDSVPVDSFPPAPSMAVVAVLESTLSCEACKNGMPTISRLLQMPLFSDVLLTTSEKPQFKIPTKLKEALRIAKECIEKRLIEEQKQIHQHRRLTRAQSHHGSEEERKKRKILARKKSKRSALENSEEHSAKYSNSNNSAGSGASSPLTSPSSPTPPSTSVEHAPF

SEQ ID NO: 34388 - protein, 515 aa, Homo sapiens
  REGION 1..515: note = ENSP00000417915
MAFMEKPPAGKVLLDDTVPLTAAIEASQSLQSHTEYIIRVQRGISVENSWQIVRRYSDFDLLNNSLQIAGLSLPLPPKKLIGNMDREFIAERQKGLQNYLNVITTNHILSNCELVKKFLDPNNYSANYTEIALQQVSMFFRSEPKWEVVEPLKDIGWRIRKKYFLMKIKNQPKERLVLSWADLGPDKYLSDKDFQCLIKLLPSCLHPYIYRVTFATANESSALLIRMFNEKGTLKDLIYKAKPKDPFLKKYCNPKKIQGLELQQIKTYGRQILEVLKFLHDKGFPYGHLHASNVMLDGDTCRLLDLENSLLGLPSFYRSYFSQFRKINTLESVDVHCFGHLLYEMTYGRPPDSVPVDSFPPAPSMAVVAVLESTLSCEACKNGMPTISRLLQMPLFSDVLLTTSEKPQFKIPTKLKEALRIAKECIEKRLIEEQKQIHQHRRLTRAQSHHGSEEERKKRKILARKKSKRSALENSEEHSAKYSNSNNSAGSGASSPLTSPSSPTPPSTSVEHAPF

SEQ ID NO: 34389 - protein, 563 aa, Homo sapiens
  REGION 1..563: note = ENSP00000419049
MAFMEKPPAGKVLLDDTVPLTAAIEASQSLQSHTIVRRYSDFDLLNNSLQIAGLSLPLPPKKLIGNMDREFIAERQKGLQNYLNVITTNHILSNCELVKKFLDPNNYSANYTEIALQQVSMFFRSEPKWEVVEPLKDIGWRIRKKYFLMKIKNQPKERLVLSWADLGPDKYLSDKDFQCLIKLLPSCLHPYIYRVTFATANESSALLIRMFNEKGTLKDLIYKAKPKDPFLKKYCNPKKIQGLELQQIKTYGRQILEVLKFLHDKGFPYGHLHASNVMLDGDTCRLLDLENSLLGLPSFYRSYFSQFRKINTLESVDVHCFGHLLYEMTYGRPPDSVPVDSFPPAPSMAVVAVLESTLSCEACKNGMPTISRLLQMPLFSDVLLTTSEKPQFKIPTKLKEALRIAKECIEKRLIEEQKQIHQHRRLTRAQSHHGSEEERKKRKILARKKSKRSALENSEEHSAKYSNSNNSGSGASSPLTSPSSPTPPSTSAALGLSKRCKERDICITSTSSTSTTTSSSLASCEHRGTCPALVSGCEWHEPRGLAQLHPEFPKRNFEESQNL

SEQ ID NO: 34390 - protein, 141 aa, Homo sapiens
  REGION 1..141: note = ENSP00000420403
MAFMEKPPAGKVLLDDTVPLTAAIEASQSLQSHTEYIIRVQRGISVENSWQIVRRYSDFDLLNNSLQIAGLSLPLPPKKLIGNMDREFIAERQKGLQNYLNVITTNHILSNCELVKKFLDPNNYSANYTAPLHLSGYLCHS

SEQ ID NO: 34391 - protein, 113 aa, Homo sapiens
  REGION 1..113: note = ENSP00000418831
MKCDSRAYLLGQQSVSGWGLQPRFQEYIIRVQRGISVENSWQIVRRYSDFDLLNNSLQIAGLSLPLPPKKLIGNMDREFIAERQKGLQNYLNVITTNHILSNCELVKKFLDPN

SEQ ID NO: 34392 - protein, 312 aa, Homo sapiens
  REGION 1..312: note = ENSP00000418202
  VARIANT 1: note = Any amino acid
XFLKKYCNPKKIQGLELQQIKTYGRQILEVLKFLHDKGFPYGHLHASNVMLDGDTCRLLDLENSLLGLPSFYRSYFSQFRKINTLESVDVHCFGHLLYEMTYGRPPDSVPVDSFPPAPSMAVVAVLESTLSCEACKNGMPTISRLLQMPLFSDVLLTTSEKPQFKIPTKLKEALRIAKECIEKRLIEEQKQIHQHRRLTRAQSHHGSEEERKKRKILARKKSKRSALENSEEHSAKYSNSNNSGISALPPPPPPPPPPAAPLPPASTEAPAQLSSQAVNGMSRGALLSSIQNFQKGTLRKAKTCDHSAPKIG

SEQ ID NO: 34393 - protein, 203 aa, Homo sapiens
  REGION 1..203: note = ENSP00000476179
NSLLGLPSFYRSYFSQFRKINTLESVDVHCFGHLLYEMTYGRPPDSVPVDSFPPAPSMAVVAVLESTLSCEACKNGMPTISRLLQMPLFSDVLLTTSEKPQFKIPTKLKEALRIAKECIEKRLIEEQKQIHQHRRLTRAQSHHGSEEERKKRKILARKKSKRSALENSEEHSAKYSNSNNSAGSGASSPLTSPSSPTPPSTSG

SEQ ID NO: 34394 - protein, 85 aa, Homo sapiens
  REGION 1..85: note = ENSP00000418376
  VARIANT 1: note = Any amino acid
XLIEEQKQIHQHRRLTRAQSHHGSEEERKKRKILARKKSKRSALENSEEHSAKYSNSNNSGSGASSPLTSPSSPTPPSTSEHAPF

SEQ ID NO: 34395 - protein, 50 aa, Homo sapiens
  REGION 1..50: note = ENSP00000418836
KKSKRSALENSEEHSAKYSNSNNSGSGASSPLTSPSSPTPPSTSVEHAPF

SEQ ID NO: 34396 - protein, 515 aa, Homo sapiens; identical to SEQ ID NO: 34388
  REGION 1..515: note = ENSP00000373222

SEQ ID NO: 34397 - protein, 557 aa, Homo sapiens
  REGION 1..557: note = ENSP00000305045
MAFMEKPPAGKVLLDDTVPLTAAIEASQSLQSHTEYIIRVQRGISVENSWQIVRRYSDFDLLNNSLQIAGLSLPLPPKKLIGNMDREFIAERQKGLQNYLNVITTNHILSNCELVKKFLDPNNYSANYTEIALQQVSMFFRSEPKWEVVEPLKDIGWRIRKKYFLMKIKNQPKERLVLSWADLGPDKYLSDKDFQCLIKLLPSCLHPYIYRVTFATANESSALLIRMFNEKGTLKDLIYKAKPKDPFLKKYCNPKKIQGLELQQIKTYGRQILEVLKFLHDKGFPYGHLHASNVMLDGDTCRLLDLENSLLGLPSFYRSYFSQFRKINTLESVDVHCFGHLLYEMTYGRPPDSVPVDSFPPAPSMAVVAVLESTLSCEACKNGMPTISRLLQMPLFSDVLLTTSEKPQFKIPTKLKEALRIAKECIEKRLIEEQKQIHQHRRLTRAQSHHGSEEERKKRKILARKKSKRSALENSEEHSAKYSNSNNSGISALPPPPPPPPPPAAPLPPASTEAPAQLSSQAVNGMSRGALLSSIQNFQKGTLRKAKTCDHSAPKIG

SEQ ID NO: 34398 - protein, 424 aa, Homo sapiens
  REGION 1..424: note = ENSP00000395536
MSTSLGSNLSELDRLLLELNAVQHNPPGFPADEANSSPPLPGALSPLYGVPETNSPLGGKAGPLTKEKPKRNGGRGLEDVRPSVESLLDELESSVPSPVPAITVNQGEMSSPQRVTSTQQQTRISASSATRELDELMASLSDFKFMAQGKTGSSSPPGGPPKPGSQLDSMLGSLQSDLNKLGVATVAKGVCGACKKPIAGQVVTAMGKTWHPEHFVCTHCQEEIGSRNFFERDGQPYCEKDYHNLFSPRCYYCNGPILDKVVTALDRTWHPEHFFCAQCGAFFGPEGFHEKDGKAYCRKDYFDMFAPKCGGCARAILENYISALNTLWHPECFVCRECFTPFVNGSFFEHDGQPYCEVHYHERRGSLCSGCQKPITGRCITAMAKKFHPEHFVCAFCLKQLNKGTFKEQNDKPYCQNCFLKLFC

SEQ ID NO: 34399 - protein, 591 aa, Homo sapiens
  REGION 1..591: note = ENSP00000228307
MDDLDALLADLESTTSHISKRPVFLSEETPYSYPTGNHTYQEIAVPPPVPPPPSSEALNGTILDPLDQWQPSSSRFIHQQPQSSSPVYGSSAKTSSVSNPQDSVGSPCSRVGEEEHVYSFPNKQKSAEPSPTVMSTSLGSNLSELDRLLLELNAVQHNPPGFPADEANSSPPLPGALSPLYGVPETNSPLGGKAGPLTKEKPKRNGGRGLEDVRPSVESLLDELESSVPSPVPAITVNQGEMSSPQRVTSTQQQTRISASSATRELDELMASLSDFKIQGLEQRADGERCWAAGWPRDGGRSSPGGQDEGGFMAQGKTGSSSPPGGPPKPGSQLDSMLGSLQSDLNKLGVATVAKGVCGACKKPIAGQVVTAMGKTWHPEHFVCTHCQEEIGSRNFFERDGQPYCEKDYHNLFSPRCYYCNGPILDKVVTALDRTWHPEHFFCAQCGAFFGPEGFHEKDGKAYCRKDYFDMFAPKCGGCARAILENYISALNTLWHPECFVCRECFTPFVNGSFFEHDGQPYCEVHYHERRGSLCSGCQKPITGRCITAMAKKFHPEHFVCAFCLKQLNKGTFKEQNDKPYCQNCFLKLFC

SEQ ID NO: 34400 - protein, 557 aa, Homo sapiens
  REGION 1..557: note = ENSP00000391283
MDDLDALLADLESTTSHISKRPVFLSEETPYSYPTGNHTYQEIAVPPPVPPPPSSEALNGTILDPLDQWQPSSSRFIHQQPQSSSPVYGSSAKTSSVSNPQDSVGSPCSRVGEEEHVYSFPNKQKSAEPSPTVMSTSLGSNLSELDRLLLELNAVQHNPPGFPADEANSSPPLPGALSPLYGVPETNSPLGGKAGPLTKEKPKRNGGRGLEDVRPSVESLLDELESSVPSPVPAITVNQGEMSSPQRVTSTQQQTRISASSATRELDELMASLSDFKFMAQGKTGSSSPPGGPPKPGSQLDSMLGSLQSDLNKLGVATVAKGVCGACKKPIAGQVVTAMGKTWHPEHFVCTHCQEEIGSRNFFERDGQPYCEKDYHNLFSPRCYYCNGPILDKVVTALDRTWHPEHFFCAQCGAFFGPEGFHEKDGKAYCRKDYFDMFAPKCGGCARAILENYISALNTLWHPECFVCRECFTPFVNGSFFEHDGQPYCEVHYHERRGSLCSGCQKPITGRCITAMAKKFHPEHFVCAFCLKQLNKGTFKEQNDKPYCQNCFLKLFC

SEQ ID NO: 34401 - protein, 192 aa, Homo sapiens
  REGION 1..192: note = ENSP00000490896
  VARIANT 1: note = Any amino acid
XMTERGSVARPTQGPETPRSPEGTTEAATQDGKEQPELPCAMAMGTPSTTERISTSGQIRSVIRRSWESGHAHPMSREPSPRRRLDPATLSRTPSQEQLIAELQGRLGIQPEAEEPAEAAGPSAQDWLTEGVIITVQPRGKRAGGQLVEKVARRCPWLGLGQSQAPGVRVLPWPQCWPEGRSGERVGVSCLL

SEQ ID NO: 34402 - protein, 589 aa, Homo sapiens
  REGION 1..589: note = ENSP00000443887
MADALLADLESTTSHISKRPVFLSEETPYSYPTGNHTYQEIAVPPPVPPPPSSEALNGTILDPLDQWQPSSSRFIHQQPQSSSPVYGSSAKTSSVSNPQDSVGSPCSRVGEEEHVYSFPNKQKSAEPSPTVMSTSLGSNLSELDRLLLELNAVQHNPPGFPADEANSSPPLPGALSPLYGVPETNSPLGGKAGPLTKEKPKRNGGRGLEDVRPSVESLLDELESSVPSPVPAITVNQGEMSSPQRVTSTQQQTRISASSATRELDELMASLSDFKIQGLEQRADGERCWAAGWPRDGGRSSPGGQDEGGFMAQGKTGSSSPPGGPPKPGSQLDSMLGSLQSDLNKLGVATVAKGVCGACKKPIAGQVVTAMGKTWHPEHFVCTHCQEEIGSRNFFERDGQPYCEKDYHNLFSPRCYYCNGPILDKVVTALDRTWHPEHFFCAQCGAFFGPEGFHEKDGKAYCRKDYFDMFAPKCGGCARAILENYISALNTLWHPECFVCRECFTPFVNGSFFEHDGQPYCEVHYHERRGSLCSGCQKPITGRCITAMAKKFHPEHFVCAFCLKQLNKGTFKEQNDKPYCQNCFLKLFC

SEQ ID NO: 34403 - protein, 706 aa, Homo sapiens
  REGION 1..706: note = ENSP00000489977
MDDLDALLADLESTTSHISKRPVFLSEETPYSYPTGNHTYQEIAVPPPVPPPPSSEALNGTILDPLDQWQPSSSRFIHQQPQSSSPVYGSSAKTSSVSNPQDSVGSPCSRVGEEEHVYSFPNKQKSAEPSPTVMSTSLGSNLSELDRLLLELNAVQHNPPGFPADEANSSPPLPGALSPLYGVPETNSPLGGKAGPLTKEKPKRNGGRGLEDVRPSVESLLDELESSVPSPVPAITVNQGEMSSPQRVTSTQQQTRISASSATRELDELMASLSDFKTSSSTVALSAPGLSSSAPSSYCSLPPSPPPMPSVFLPPTTIPSPRGQGHTPEFPCTEQSGRGLLPPVAPSWLDLAGLGVMPDTFNSRSPSVEGSLWAVGTESQGRDWRHLPTITSELSGAPRCHTVPCAGSTALQEPGEPQGPPASPSCPEEALAATWEQPWASEVFGPERMPPSGAARSFQEVTEPAVVAVDRQAIFPDTWTLTEEHGLQQERPRPEPGRLGSSSPASVTTEQLGAKMTERGSVARPTQGPETPRSPEGTTEAATQDGKEQPELPCAMAMGTPSTTERISTSGQIRSVIRRSWESGHAHPMSREPSPRRRLDPATLSRTPSQEQLIAELQGRLGIQPEAEEPAEAAGPSAQDWLTEGVIITVQPRGKRAGGQLVEKVARRCPWLGLGQSQAPGVRVLPWPQCWPEGRSGERVGVSCLL

SEQ ID NO: 34404 - protein, 1081 aa, Homo sapiens
  REGION 1..1081: note = ENSP00000489840
MDDLDALLADLESTTSHISKRPVFLSEETPYSYPTGNHTYQEIAVPPPVPPPPSSEALNGTILDPLDQWQPSSSRFIHQQPQSSSPVYGSSAKTSSVSNPQDSVGSPCSRVGEEEHVYSFPNKQKSAEPSPTVMSTSLGSNLSELDRLLLELNAVQHNPPGFPADEANSSPPLPGALSPLYGVPETNSPLGGKAGPLTKEKPKRNGGRGLEDVRPSVESLLDELESSVPSPVPAITVNQGEMSSPQRVTSTQQQTRISASSATRELDELMASLSDFKTSSSTVALSAPGLSSSAPSSYCSLPPSPPPMPSVFLPPTTIPSPRGQGHTPEFPCTEQSGRGLLPPVAPSWLDLAGLGVMPDTFNSRSPSVEGSLWAVGTESQGRDWRHLPTITSELSGAPRCHTVPCAGSTALQEPGEPQGPPASPSCPEEALAATWEQPWASEVFGPERMPPSGAARSFQEVTEPAVVAVDRQAIFPDTWTLTEEHGLQQERPRPEPGRLGSSSPASVTTEQLGAKMTERGSVARPTQGPETPRSPEGTTEAATQDGKEQPELPCAMAMGTPSTTERISTSGQIRSVIRRSWESGHAHPMSREPSPRRRLDPATLSRTPSQEQLIAELQGRLGIQPEAEEPAEAAGPSAQDWLTEGVIITVQPRGKRAGGQLVEKVVFPPGSPIPLRRTISVLASPSVPLLQHRTDAAASSSSPLPSLLASSPLGPSAYTCGSSGVQSAGEEPHDEGVQGPALPIPAPHTMRSVGCQTDEDPLFPPMQIQGLEQRADGERCWAAGWPRDGGRSSPGGQDEGGFMAQGKTGSSSPPGGPPKPGSQLDSMLGSLQSDLNKLGVATVAKGVCGACKKPIAGQVVTAMGKTWHPEHFVCTHCQEEIGSRNFFERDGQPYCEKDYHNLFSPRCYYCNGPILDKVVTALDRTWHPEHFFCAQCGAFFGPEGFHEKDGKAYCRKDYFDMFAPKCGGCARAILENYISALNTLWHPECFVCRECFTPFVNGSFFEHDGQPYCEVHYHERRGSLCSGCQKPITGRCITAMAKKFHPEHFVCAFCLKQLNKGTFKEQNDKPYCQNCFLKLFC

SEQ ID NO: 34405 - protein, 207 aa, Homo sapiens
  REGION 1..207: note = ENSP00000490352
SLLDELESSVPSPVPAITVNQGEMSSPQRVTSTQQQTRISASSATRELDELMASLSDFKVVFPPGSPIPLRRTISVLASPSVPLLQHRTDAAASSSSPLPSLLASSPLGPSAYTCGSSGVQSAGEEPHDEGVQGPALPIPAPHTMRSVGCQTDEDPLFPPMQIQGLEQRADGERCWAAGWPRDGGRSSPGGQDEGGFMAQGKTGSSS

SEQ ID NO: 34406 - protein, 91 aa, Homo sapiens
  REGION 1..91: note = ENSP00000446893
MDDLDSEFQTGTSLAAARPCQEGTQCQVPDSQRRPAGGLGVYHLPHLQTACVLVGGDPLLIPNWKPHIPGDCRATPRPPTPVQRGPQWHNP

SEQ ID NO: 34407 - protein, 176 aa, Homo sapiens
  REGION 1..176: note = ENSP00000443745
MAGNKDALLADLESTTSHISKRPVFLSEETPYSYPTGNHTYQEIAVPPPVPPPPSSEALNGTILDPLDQWQPSSSRFIHQQPQSSSPVYGSSAKTSSVSNPQDSVGSPCSRVGEEEHVYSFPNKQKSAEPSPTVMSTSLGSNLSELDRLLLELNAVQHNPPGFPADEANSSPPLPG

SEQ ID NO: 34408 - protein, 37 aa, Homo sapiens
  REGION 1..37: note = ENSP00000447180
MSTSLGSNLSELDRLLLELNAVQHNPPGFPADEANSS

SEQ ID NO: 34409 - protein, 36 aa, Homo sapiens
  REGION 1..36: note = ENSP00000446607
MSTSLGSNLSELDRLLLELNAVQHNPPGFPADEANS

SEQ ID NO: 34410 - protein, 31 aa, Homo sapiens
  REGION 1..31: note = ENSP00000446650
MSTSLGSNLSELDRLLLELNAVQHNPPGFPA

SEQ ID NO: 34411 - protein, 605 aa, Homo sapiens
  REGION 1..605: note = ENSP00000267257
MDDLDALLADLESTTSHISKRPVFLSEETPYSYPTGNHTYQEIAVPPPVPPPPSSEALNGTILDPLDQWQPSSSRFIHQQPQSSSPVYGSSAKTSSVSNPQDSVGSPCSRVGEEEHVYSFPNKQKSAEPSPTVMSTSLGSNLSELDRLLLELNAVQHNPPGFPADEANSSPPLPGALSPLYGVPETNSPLGGKAGPLTKEKPKRNGGRGLEDVRPSVESLLDELESSVPSPVPAITVNQGEMSSPQRVTSTQQQTRISASSATRELDELMASLSDFKGSWPLEEVVLLVSISSSVQEGEKYPHPCAARHRTPSLRSPDQPPPCPQFMAQGKTGSSSPPGGPPKPGSQLDSMLGSLQSDLNKLGVATVAKGVCGACKKPIAGQVVTAMGKTWHPEHFVCTHCQEEIGSRNFFERDGQPYCEKDYHNLFSPRCYYCNGPILDKVVTALDRTWHPEHFFCAQCGAFFGPEGFHEKDGKAYCRKDYFDMFAPKCGGCARAILENYISALNTLWHPECFVCRECFTPFVNGSFFEHDGQPYCEVHYHERRGSLCSGCQKPITGRCITAMAKKFHPEHFVCAFCLKQLNKGTFKEQNDKPYCQNCFLKLFC

SEQ ID NO: 34412 - protein, 145 aa, Homo sapiens
  REGION 1..145: note = ENSP00000421271
MLFRNRFLLLLALAALLAFVSLSLQFFHLIPVSTPKNGMSSKSRKRIMPDPVTEPPVTDPVYEALLYCNIPSVAERSMEGHAPHHFKLVSVHVFIRHGDRYPLYVIPKTKRPEIDCTLVANRKPYHPKLEAFISHMSKGSGASFE

SEQ ID NO: 34413 - protein, 182 aa, Homo sapiens
  REGION 1..182: note = ENSP00000490861
MLFRNRFLLLLALAALLAFVSLSLQFFHLIPVSTPKNGMSSKSRKRIMPDPVTEPPVTDPVYEALLYCNIPSVAERSMEGHAPHHFKLVSVHVFIRHGDRYPLYVIPKTKRPEIDCTLVANRKPYHPKLEAFISHMSKGSGASFESPLNSLPLYPNHPLCEMGELTQTVRRWLSASQEERPH

SEQ ID NO: 34414 - protein, 26 aa, Homo sapiens
  REGION 1..26: note = ENSP00000425264
MLFRNRFLLLLALAALLAFVSLSLQF

SEQ ID NO: 34415 - protein, 480 aa, Homo sapiens
  REGION 1..480: note = ENSP00000286353
MLFRNRFLLLLALAALLAFVSLSLQFFHLIPVSTPKNGMSSKSRKRIMPDPVTEPPVTDPVYEALLYCNIPSVAERSMEGHAPHHFKLVSVHVFIRHGDRYPLYVIPKTKRPEIDCTLVANRKPYHPKLEAFISHMSKGSGASFESPLNSLPLYPNHPLCEMGELTQTGVVQHLQNGQLLRDIYLKKHKLLPNDWSADQLYLETTGKSRTLQSGLALLYGFLPDFDWKKIYFRHQPSALFCSGSCYCPVRNQYLEKEQRRQYLLRLKNSQLEKTYGEMAKIVDVPTKQLRAANPIDSMLCHFCHNVSFPCTRNGCVDMEHFKVIKTHQIEDERERREKKLYFGYSLLGAHPILNQTIGRMQRATEGRKEELFALYSAHDVTLSPVLSALGLSEARFPRFAARLIFELWQDREKPSEHSVRILYNGVDVTFHTSFCQDHHKRSPKPMCPLENLVRFVKRDMFVALGGSGTNYYDACHREGF

SEQ ID NO: 34416 - protein, 182 aa, Homo sapiens; identical to SEQ ID NO: 34413
  REGION 1..182: note = ENSP00000490743

SEQ ID NO: 34417 - protein, 442 aa, Homo sapiens
  REGION 1..442: note = ENSP00000422558
MSSKSRKRIMPDPVTEPPVTDPVYEALLYCNIPSVAERSMEGHAPHHFKLVSVHVFIRHGDRYPLYVIPKTKRPEIDCTLVANRKPYHPKLEAFISHMSKGSGASFESPLNSLPLYPNHPLCEMGELTQTGVVQHLQNGQLLRDIYLKKHKLLPNDWSADQLYLETTGKSRTLQSGLALLYGFLPDFDWKKIYFRHQPSALFCSGSCYCPVRNQYLEKEQRRQYLLRLKNSQLEKTYGEMAKIVDVPTKQLRAANPIDSMLCHFCHNVSFPCTRNGCVDMEHFKVIKTHQIEDERERREKKLYFGYSLLGAHPILNQTIGRMQRATEGRKEELFALYSAHDVTLSPVLSALGLSEARFPRFAARLIFELWQDREKPSEHSVRILYNGVDVTFHTSFCQDHHKRSPKPMCPLENLVRFVKRDMFVALGGSGTNYYDACHREGF

SEQ ID NO: 34418 - protein, 480 aa, Homo sapiens; identical to SEQ ID NO: 34415
  REGION 1..480: note = ENSP00000376733

SEQ ID NO: 34419 - protein, 95 aa, Homo sapiens
  REGION 1..95: note = ENSP00000426956
MLFRNRFLLLLALAALLAFVSLSLQFFHLIPVSTPKNGMSSKSRKRIMPDPVTEPPVTDPVYEALLYCNIPSVAERSMEGHAPHHFKLVSVHVFI

SEQ ID NO: 34420 - protein, 26 aa, Homo sapiens
  REGION 1..26: note = ENSP00000426348
MLFRNRFLLLLALAALLAFVSLSLQF

SEQ ID NO: 34421 - protein, 179 aa, Homo sapiens
  REGION 1..179: note = ENSP00000490114
MLFRNRFLLLLALAALLAFVSLSLQFFHLIPVSTPKNGMSSKSRKRIMPDPVTEPPVTDPVYEALLYCNIPSVAERSMEGHAPHHFKLVSVHVFIRHGDRYPLYVIPKTKRPEIDCTLVANRKPYHPKLEAFISHMSKGSGASFESPLNSLPLYPNHPLCEMGELTQTVGLAVHLRGSC

SEQ ID NO: 34422 - protein, 130 aa, Homo sapiens
  REGION 1..130: note = ENSP00000423702
MSSKSRKRIMPDPVTEPPVTDPVYEALLYCNIPSVAERSMEGHAPHHFKLVSVHVFIRHGDRYPLYVIPKTKRPEIDCTLVANRKPYHPKLEAFISHMSKGSGASFESPLNSLPLYPNHPLCEMGELTQT

SEQ ID NO: 34423 - protein, 463 aa, Homo sapiens
  REGION 1..463: note = ENSP00000426877
MDVLTALLLVHLIPVSTPKNGMSSKSRKRIMPDPVTEPPVTDPVYEALLYCNIPSVAERSMEGHAPHHFKLVSVHVFIRHGDRYPLYVIPKTKRPEIDCTLVANRKPYHPKLEAFISHMSKGSGASFESPLNSLPLYPNHPLCEMGELTQTGVVQHLQNGQLLRDIYLKKHKLLPNDWSADQLYLETTGKSRTLQSGLALLYGFLPDFDWKKIYFRHQPSALFCSGSCYCPVRNQYLEKEQRRQYLLRLKNSQLEKTYGEMAKIVDVPTKQLRAANPIDSMLCHFCHNVSFPCTRNGCVDMEHFKVIKTHQIEDERERREKKLYFGYSLLGAHPILNQTIGRMQRATEGRKEELFALYSAHDVTLSPVLSALGLSEARFPRFAARLIFELWQDREKPSEHSVRILYNGVDVTFHTSFCQDHHKRSPKPMCPLENLVRFVKRDMFVALGGSGTNYYDACHREGF

SEQ ID NO: 34424 - protein, 471 aa, Homo sapiens
  REGION 1..471: note = ENSP00000422901
MRYFIKSMEHSVCPSSAVHLIPVSTPKNGMSSKSRKRIMPDPVTEPPVTDPVYEALLYCNIPSVAERSMEGHAPHHFKLVSVHVFIRHGDRYPLYVIPKTKRPEIDCTLVANRKPYHPKLEAFISHMSKGSGASFESPLNSLPLYPNHPLCEMGELTQTGVVQHLQNGQLLRDIYLKKHKLLPNDWSADQLYLETTGKSRTLQSGLALLYGFLPDFDWKKIYFRHQPSALFCSGSCYCPVRNQYLEKEQRRQYLLRLKNSQLEKTYGEMAKIVDVPTKQLRAANPIDSMLCHFCHNVSFPCTRNGCVDMEHFKVIKTHQIEDERERREKKLYFGYSLLGAHPILNQTIGRMQRATEGRKEELFALYSAHDVTLSPVLSALGLSEARFPRFAARLIFELWQDREKPSEHSVRILYNGVDVTFHTSFCQDHHKRSPKPMCPLENLVRFVKRDMFVALGGSGTNYYDACHREGF

SEQ ID NO: 34425 - protein, 754 aa, Homo sapiens
  REGION 1..754: note = ENSP00000366650
MSRPLSDQEKRKQISVRGLAGVENVTELKKNFNRHLHFTLVKDRNVATPRDYYFALAHTVRDHLVGRWIRTQQHYYEKDPKKISGGWQMEEADDWLRYGNPWEKARPEFTLPVHFYGHVEHTSQGAKWVDTQVVLAMPYDTPVPGYRNNVVNTMRLWSAKAPNDFNLKDFNVGGYIQAVLDRNLAENISRVLYPNDNFFEGKELRLKQEYFVVAATLQDIIRRFKSSKFGCRDPVRTNFDAFPDKVAIQLNDTHPSLAIPELMRILVDLERMDWDKAWDVTVRTCAYTNHTVLPEALERWPVHLLETLLPRHLQIIYEINQRFLNRVAAAFPGDVDRLRRMSLVEEGAVKRINMAHLCIAGSHAVNGVARIHSEILKKTIFKDFYELEPHKFQNKTNGITPRRWLVLCNPGLAEVIAERIGEDFISDLDQLRKLLSFVDDEAFIRDVAKVKQENKLKFAAYLEREYKVHINPNSLFDIQVKRIHEYKRQLLNCLHVITLYNRIKREPNKFFVPRTVMIGGKAAPGYHMAKMIIRLVTAIGDVVNHDPAVGDRLRVIFLENYRVSLAEKVIPAADLSEQISTAGTEASGTGNMKFMLNGALTIGTMDGANVEMAEEAGEENFFIFGMRVEDVDKLDQRGYNAQEYYDRIPELRQVIEQLSSGFFSPKQPDLFKDIVNMLMHHDRFKVFADYEDYIKCQEKVSALYKNPREWTRMVIRNIATSGKFSSDRTIAQYAREIWGVEPSRQRLPAPDEAI

SEQ ID NO: 34426 - protein, 842 aa, Homo sapiens
  REGION 1..842: note = ENSP00000164139
MSRPLSDQEKRKQISVRGLAGVENVTELKKNFNRHLHFTLVKDRNVATPRDYYFALAHTVRDHLVGRWIRTQQHYYEKDPKRIYYLSLEFYMGRTLQNTMVNLALENACDEATYQLGLDMEELEEIEEDAGLGNGGLGRLAACFLDSMATLGLAAYGYGIRYEFGIFNQKISGGWQMEEADDWLRYGNPWEKARPEFTLPVHFYGHVEHTSQGAKWVDTQVVLAMPYDTPVPGYRNNVVNTMRLWSAKAPNDFNLKDFNVGGYIQAVLDRNLAENISRVLYPNDNFFEGKELRLKQEYFVVAATLQDIIRRFKSSKFGCRDPVRTNFDAFPDKVAIQLNDTHPSLAIPELMRILVDLERMDWDKAWDVTVRTCAYTNHTVLPEALERWPVHLLETLLPRHLQIIYEINQRFLNRVAAAFPGDVDRLRRMSLVEEGAVKRINMAHLCIAGSHAVNGVARIHSEILKKTIFKDFYELEPHKFQNKTNGITPRRWLVLCNPGLAEVIAERIGEDFISDLDQLRKLLSFVDDEAFIRDVAKVKQENKLKFAAYLEREYKVHINPNSLFDIQVKRIHEYKRQLLNCLHVITLYNRIKREPNKFFVPRTVMIGGKAAPGYHMAKMIIRLVTAIGDVVNHDPAVGDRLRVIFLENYRVSLAEKVIPAADLSEQISTAGTEASGTGNMKFMLNGALTIGTMDGANVEMAEEAGEENFFIFGMRVEDVDKLDQRGYNAQEYYDRIPELRQVIEQLSSGFFSPKQPDLFKDIVNMLMHHDRFKVFADYEDYIKCQEKVSALYKNPREWTRMVIRNIATSGKFSSDRTIAQYAREIWGVEPSRQRLPAPDEAI

SEQ ID NO: 34427 - protein, 581 aa, Homo sapiens
  REGION 1..581: note = ENSP00000359607
MAASGRGLCKAVAASPFPAWRRDNTEARGGLKPEYDAVVIGAGHNGLVAAAYLQRLGVNTAVFERRHVIGGAAVTEEIIPGFKFSRASYLLSLLRPQIYTDLELKKHGLRLHLRNPYSFTPMLEEGAGSKVPRCLLLGTDMAENQKQIAQFSQKDAQVFPKYEEFMHRLALAIDPLLDAAPVDMAAFQHGSLLQRMRSLSTLKPLLKAGRILGAQLPRYYEVLTAPITKVLDQWFESEPLKATLATDAVIGAMTSPHTPGSGYVLLHHVMGGLEGMQGAWGYVQGGMGALSDAIASSATTHGASIFTEKTVAKVQVNSEGCVQGVVLEDGTEVRSKMVLSNTSPQITFLKLTPQEWLPEEFLERISQLDTRSPVTKINVAVDRLPSFLAAPNAPRGQPLPHHQCSIHLNCEDTLLLHQAFEDAMDGLPSHRPVIELCIPSSLDPTLAPPGCHVVSLFTQYMPYTLAGGKAWDEQERDAYADRVFDCIEVYAPGFKDSVVGRDILTPPDLERIFGLPGGNIFHCAMSLDQLYFARPVPLHSGYRCPLQGLYLCGSGAHPGGGVMGAAGRNAAHVAFRDLKSM

SEQ ID NO: 34428 - protein, 36 aa, Homo sapiens
  REGION 1..36: note = ENSP00000426039
MAAAAAAGEARRVLVYGGRGALGSRCVQAFRARNWI

SEQ ID NO: 34429 - protein, 128 aa, Homo sapiens
  REGION 1..128: note = ENSP00000420873
  VARIANT 1: note = Any amino acid
XCVQAFRARNWWVASVDVVENEEASASIIVKMTDSFTEQADQVTAEVGKLLGEEKVDAILCVAGGWAGGNAKSKSLFKNCDLMWKQSIWTSTISSHLATKHLKEGGLLTLAGAKAALDGTPGLPWIPR

SEQ ID NO: 34430 - protein, 162 aa, Homo sapiens
  REGION 1..162: note = ENSP00000426377
MAAAAAAGEARRVLVYGGRGALGSRCVQAFRARNWWVASVDVVENEEASASIIVKMTDSFTEQADQVTAEVGKLLGEEKVDAILCVAGGWAGGNAKSKSLFKNCDLMWKQSIWTSTISSHLATKHLKEGGLLTLAGAKAALDGTPELSMTGSQGKTDRAQEA

SEQ ID NO: 34431 - protein, 244 aa, Homo sapiens
  REGION 1..244: note = ENSP00000281243
MAAAAAAGEARRVLVYGGRGALGSRCVQAFRARNWWVASVDVVENEEASASIIVKMTDSFTEQADQVTAEVGKLLGEEKVDAILCVAGGWAGGNAKSKSLFKNCDLMWKQSIWTSTISSHLATKHLKEGGLLTLAGAKAALDGTPGMIGYGMAKGAVHQLCQSLAGKNSGMPPGAAAIAVLPVTLDTPMNRKSMPEADFSSWTPLEFLVETFHDWITGKNRPSSGSLIQVVTTEGRTELTPAYF

SEQ ID NO: 34432 - protein, 213 aa, Homo sapiens
  REGION 1..213: note = ENSP00000390944
MAAAAAAGEARRVLVYGGRGALGSRCVQAFRARNWVTAEVGKLLGEEKVDAILCVAGGWAGGNAKSKSLFKNCDLMWKQSIWTSTISSHLATKHLKEGGLLTLAGAKAALDGTPGMIGYGMAKGAVHQLCQSLAGKNSGMPPGAAAIAVLPVTLDTPMNRKSMPEADFSSWTPLEFLVETFHDWITGKNRPSSGSLIQVVTTEGRTELTPAYF

SEQ ID NO: 34433 - protein, 152 aa, Homo sapiens
  REGION 1..152: note = ENSP00000423227
MAAAAAAGEARRVLVYGGRGALGSRCVQAFRARNWWVASVDVVENEEASASIIVKMTDSFTEQADQVTAEVGKLLGEEKVDAILCVAGGWAGGNAKSKSLFKNCDLMWKQSIWTSTISSHLATKHLKEGGLLTLAGAKAALDGTPGLPWIPR

SEQ ID NO: 34434 - protein, 152 aa, Homo sapiens; identical to SEQ ID NO: 34433
  REGION 1..152: note = ENSP00000422759

SEQ ID NO: 34435 - protein, 319 aa, Homo sapiens
  REGION 1..319: note = ENSP00000354951
MVGEMETKEKPKPTPDYLMQLMNDKKLMSSLPNFCGIFNHLERLLDEEISRVRKDMYNDTLNGSTEKRSAELPDAVGPIVQLQEKLYVPVKEYPDFNFVGRILGPRGLTAKQLEAETGCKIMVRGKGSMRDKKKEEQNRGKPNWEHLNEDLHVLITVEDAQNRAEIKLKRAVEEVKKLLVPAAEGEDSLKKMQLMELAILNGTYRDANIKSPALAFSLAATAQAAPRIITGPAPVLPPAALRTPTPAGPTIMPLIRQIQTAVMPNGTPHPTAAIVPPGPEAGLIYTPYEYPYTLAPATSILEYPIEPSGVLGMAFPTKG

SEQ ID NO: 34436 - protein, 319 aa, Homo sapiens; identical to SEQ ID NO: 34435
  REGION 1..319: note = ENSP00000408775

SEQ ID NO: 34437 - protein, 325 aa, Homo sapiens
  REGION 1..325: note = ENSP00000275262
MVGEMETKEKPKPTPDYLMQLMNDKKLMSSLPNFCGIFNHLERLLDEEISRVRKDMYNDTLNGSTEKRSAELPDAVGPIVQLQEKLYVPVKEYPDFNFVGRILGPRGLTAKQLEAETGCKIMVRGKGSMRDKKKEEQNRGKPNWEHLNEDLHVLITVEDAQNRAEIKLKRAVEEVKKLLVPAAEGEDSLKKMQLMELAILNGTYRDANIKSPALAFSLAATAQAAPRIITGPAPVLPPAALRTPTPAGPTIMPLIRQIQTAVMPNGTPHPTAAIVPPGPEAGLIYTPYEYPYTLAPATSILEYPIEPSGVLEWIEMPVMPDISAH

SEQ ID NO: 34438 - protein, 319 aa, Homo sapiens
  REGION 1..319: note = ENSP00000375973
MVGEMETKEKPKPTPDYLMQLMNDKKLMSSLPNFCGIFNHLERLLDEEISRVRKDMYNDTLNGSTEKRSAELPDAVGPIVQLQEKLYVPVKEYPDFNFVGRILGPRGLTAKQLEAETGCKIMVRGKGSMRDKKKEEQNRGKPNWEHLNEDLHVLITVEDAQNRAEIKLKRAVEEVKKLLVPAAEGEDSLKKMQLMELAILNGTYRDANIKSPALAFSLAATAQAAPRIITGPAPVLPPAALRTPTPAGPTIMPLIRQIQTAVMPNGTPHPTAAIVPPGPEAGLIYTPYEYPYTLAPATSILEYPIEPSGVLGKFFSPWG

SEQ ID NO: 34439 - protein, 341 aa, Homo sapiens
  REGION 1..341: note = ENSP00000355094
MVGEMETKEKPKPTPDYLMQLMNDKKLMSSLPNFCGIFNHLERLLDEEISRVRKDMYNDTLNGSTEKRSAELPDAVGPIVQLQEKLYVPVKEYPDFNFVGRILGPRGLTAKQLEAETGCKIMVRGKGSMRDKKKEEQNRGKPNWEHLNEDLHVLITVEDAQNRAEIKLKRAVEEVKKLLVPAAEGEDSLKKMQLMELAILNGTYRDANIKSPALAFSLAATAQAAPRIITGPAPVLPPAALRTPTPAGPTIMPLIRQIQTAVMPNGTPHPTAAIVPPGPEAGLIYTPYEYPYTLAPATSILEYPIEPSGVLGAVATKVRRHDMRVHPYQRIVTADRAATGN

SEQ ID NO: 34440 - protein, 333 aa, Homo sapiens
  REGION 1..333: note = ENSP00000354867
MVGEMETKEKPKPTPDYLMQLMNDKKLMSSLPNFCGIFNHLERLLDEEISRVRKDMYNDTLNGSTEKRSAELPDAVGPIVQLQEKLYVPVKEYPDFNFVGRILGPRGLTAKQLEAETGCKIMVRGKGSMRDKKKEEQNRGKPNWEHLNEDLHVLITVEDAQNRAEIKLKRAVEEVKKLLVPAAEGEDSLKKMQLMELAILNGTYRDANIKSPTAQAAPRIITGPAPVLPPAALRTPTPAGPTIMPLIRQIQTAVMPNGTPHPTAAIVPPGPEAGLIYTPYEYPYTLAPATSILEYPIEPSGVLGAVATKVRRHDMRVHPYQRIVTADRAATGN

SEQ ID NO: 34441 - protein, 317 aa, Homo sapiens
  REGION 1..317: note = ENSP00000408382
MVGEMETKEKPKPTPDYLMQLMNDKKLMSSLPNFCGIFNHLERLLDEEISRVRKDMYNDTLNGSTEKRSAELPDAVGPIVQLQEKLYVPVKEYPDFNFVGRILGPRGLTAKQLEAETGCKIMVRGKGSMRDKKKEEQNRGKPNWEHLNEDLHVLITVEDAQNRAEIKLKRAVEEVKKLLVPAAEGEDSLKKMQLMELAILNGTYRDANIKSPTAQAAPRIITGPAPVLPPAALRTPTPAGPTIMPLIRQIQTAVMPNGTPHPTAAIVPPGPEAGLIYTPYEYPYTLAPATSILEYPIEPSGVLEWIEMPVMPDISAH

SEQ ID NO: 34442 - protein, 34 aa, Homo sapiens
  REGION 1..34: note = ENSP00000437867
  VARIANT 1: note = Any amino acid
XDYLMQLMNDKKLMSSLPNFCGIFNHLERLLDEV

SEQ ID NO: 34443 - protein, 100 aa, Homo sapiens
  REGION 1..100: note = ENSP00000443690
MYNDTLNGSTEKRSAELPDAVGPIVQLQEKLYVPVKEYPDFNFVGRILGPRGLTAKQLEAETGCKIMVRGKGSMRDKKKEEQNRGKPNWEHLNEDLHVLI

SEQ ID NO: 34444 - protein, 160 aa, Homo sapiens
  REGION 1..160: note = ENSP00000440991
MYNDTLNGSTEKRSAELPDAVGPIVQLQEKLYVPVKEYPDFNFVGRILGPRGLTAKQLEAETGCKIMVRGKGSMRDKKKEEQNRGKPNWEHLNEDLHVLITVEDAQNRAEIKLKRAVEEVKKLLVPAAEGEDSLKKMQLMELAILNGTYRDANIKSPTAQ

SEQ ID NO: 34445 - protein, 47 aa, Homo sapiens
  REGION 1..47: note = ENSP00000443106
MYNDTLNGSTEKRSAELPDAVGPIVQLQEKLYVPVKEYPDFNFVGRI

SEQ ID NO: 34446 - protein, 41 aa, Homo sapiens
  REGION 1..41: note = ENSP00000441252
MYNDTLNGSTEKRSAELPDAVGPIVQLQEKLYVPVKEYPDL

SEQ ID NO: 34447 - protein, 170 aa, Homo sapiens
  REGION 1..170: note = ENSP00000440599
MYNDTLNGSTEKRSAELPDAVGPIVQLQEKLYVPVKEYPDFNFVGRILGPRGLTAKQLEAETGCKIMVRGKGSMRDKKKEEQNRGKPNWEHLNEDLHVLITVEDAQNRAEIKLKRAVEEVKKLLVPAAEGEDSLKKMQLMELAILNGTYRDANIKSPALAFSLAATAQAA

SEQ ID NO: 34448 - protein, 238 aa, Homo sapiens
  REGION 1..238: note = ENSP00000441773
  VARIANT 1: note = Any amino acid
XEKRSAELPDAVGPIVQLQEKLYVPVKEYPDEEQNRGKPNWEHLNEDLHVLITVEDAQNRAEIKLKRAVEEVKKLLVPAAEGEDSLKKMQLMELAILNGTYRDANIKSPALAFSLAATAQAAPRIITGPAPVLPPAALRTPTPAGPTIMPLIRQIQTAVMPNGTPHPTAAIVPPGPEAGLIYTPYEYPYTLAPATSILEYPIEPSGVLGAVATKVRRHDMRVHPYQRIVTADRAATGN

SEQ ID NO: 34449 - protein, 185 aa, Homo sapiens
  REGION 1..185: note = ENSP00000442848
  VARIANT 1: note = Any amino acid
XLKRAVEEVKKLLVPAAEGEDSLKKMQLMELAILNGTYRDANIKSPALAFSLAATAQAAPRIITGPAPVLPPAALRTPTPAGPTIMPLIRQIQTAVMPNGTPHPTAAIVPPGPEAGLIYTPYEYPYTLAPATSILEYPIEPSGVLGAVATKVRRHDMRVHPYQRIVTADRVTMATVQKILSNLRI

SEQ ID NO: 34450 - protein, 319 aa, Homo sapiens; identical to SEQ ID NO: 34435
  REGION 1..319: note = ENSP00000354951

SEQ ID NO: 34451 - protein, 319 aa, Homo sapiens; identical to SEQ ID NO: 34435
  REGION 1..319: note = ENSP00000408775

SEQ ID NO: 34452 - protein, 325 aa, Homo sapiens; identical to SEQ ID NO: 34437
  REGION 1..325: note = ENSP00000275262

SEQ ID NO: 34453 - protein, 319 aa, Homo sapiens; identical to SEQ ID NO: 34438
  REGION 1..319: note = ENSP00000375973

SEQ ID NO: 34454 - protein, 341 aa, Homo sapiens; identical to SEQ ID NO: 34439
  REGION 1..341: note = ENSP00000355094

SEQ ID NO: 34455 - protein, 333 aa, Homo sapiens; identical to SEQ ID NO: 34440
  REGION 1..333: note = ENSP00000354867

SEQ ID NO: 34456 - protein, 317 aa, Homo sapiens; identical to SEQ ID NO: 34441
  REGION 1..317: note = ENSP00000408382

SEQ ID NO: 34457 - protein, 34 aa, Homo sapiens; identical to SEQ ID NO: 34442
  REGION 1..34: note = ENSP00000437867
  VARIANT 1: note = Any amino acid

SEQ ID NO: 34458 - protein, 100 aa, Homo sapiens; identical to SEQ ID NO: 34443
  REGION 1..100: note = ENSP00000443690

SEQ ID NO: 34459 - protein, 160 aa, Homo sapiens; identical to SEQ ID NO: 34444
  REGION 1..160: note = ENSP00000440991

SEQ ID NO: 34460 - protein, 47 aa, Homo sapiens; identical to SEQ ID NO: 34445
  REGION 1..47: note = ENSP00000443106

SEQ ID NO: 34461 - protein, 41 aa, Homo sapiens; identical to SEQ ID NO: 34446
  REGION 1..41: note = ENSP00000441252

SEQ ID NO: 34462 - protein, 170 aa, Homo sapiens; identical to SEQ ID NO: 34447
  REGION 1..170: note = ENSP00000440599

SEQ ID NO: 34463 - protein, 238 aa, Homo sapiens; identical to SEQ ID NO: 34448
  REGION 1..238: note = ENSP00000441773
  VARIANT 1: note = Any amino acid

SEQ ID NO: 34464 - protein, 185 aa, Homo sapiens; identical to SEQ ID NO: 34449
  REGION 1..185: note = ENSP00000442848
  VARIANT 1: note = Any amino acid

SEQ ID NO: 34465 - protein, 297 aa, Homo sapiens
  REGION 1..297: note = ENSP00000378782
MDAEGLALLLPPVTLAALVDSWLREDCPGLNYAALVSGAGPSQAALWAKSPGVLAGQPFFDAIFTQLNCQVSWFLPEGSKLVPVARVAEVRGPAHCLLLGERVALNTLARCSGIASAAAAAVEAARGAGWTGHVAGTRKTTPGFRLVEKYGLLVGGAASHRYDLGGLVMVKDNHVVAAGGVEKAVRAARQAADFTLKVEVECSSLQEAVQAAEAGADLVLLDNFKPEELHPTATVLKAQFPSVAVEASGGITLDNLPQFCGPHIDVISMGMLTQAAPALDFSLKLFAKEVAPVPKIH

SEQ ID NO: 34466 - protein, 149 aa, Homo sapiens
  REGION 1..149: note = ENSP00000455183
MDAEGLALLLPPVTLAALVDSWLREDCPGLNYAALAVRAARQAADFTLKVEVECSSLQEAVQAAEAGADLVLLDNFKPEELHPTATVLKAQFPSVAVEASGGITLDNLPQFCGPHIDVISMGMLTQAAPALDFSLKLFAKEVAPVPKIH

SEQ ID NO: 34467 - protein, 649 aa, Homo sapiens
  REGION 1..649: note = ENSP00000287263
MSLMVSAGRGLGAVWSPTHVQVTVLQARGLRAKGPGGTSDAYAVIQVGKEKYATSVSERSLGAPVWREEATFELPSLLSSGPAAAATLQLTVLHRALLGLDKFLGRAEVDLRDLHRDQGRRKTQWYKLKSKPGKKDKERGEIEVDIQFMRNNMTASMFDLSMKDKSRNPFGKLKDKIKGKNKDSGSDTASAIIPSTTPSVDSDDESVVKDKKKKSKIKTLLSKSNLQKTPLSQSMSVLPTSKPEKVLLRPGDFQSQWDEDDNEDESSSASDVMSHKRTASTDLKQLNQVNFTLPKKEGLSFLGGLRSKNDVLSRSNVCINGNHVYLEQPEAKGEIKDSSPSSSPSPKGFRKKHLFSSTENLAAGSWKEPAEGGGLSSDRQLSESSTKDSLKSMTLPSYRPAPLVSGDLRENMAPANSEATKEAKESKKPESRRSSLLSLMTGKKDVAKGSEGENPLTVPGREKEGMLMGVKPGEDASGPAEDLVRRSEKDTAAVVSRQGSSLNLFEDVQITEPEAEPESKSEPRPPISSPRAPQTRAVKPRLHPVKPMNAMATKVANCSLGTATIISENLNNEVMMKKYSPSDPAFAYAQLTHDELIQLVLKQKETISKKEFQVRELEDYIDNLLVRVMEETPNILRIPTQVGKKAGKM

SEQ ID NO: 34468 - protein, 1283 aa, Homo sapiens [sequence omitted]

SEQ ID NO: 34469 - protein, 501 aa, Homo sapiens
  REGION 1..501: note = ENSP00000430009
MRNNMTASMFDLSMKDKSRNPFGKLKDKIKGKNKDSGSDTASAIIPSTTPSVDSDDESVVKDKKKKSKIKTLLSKSNLQKTPLSQSMSVLPTSKPEKVLLRPGDFQSQWDEDDNEDESSSASDVMSHKRTASTDLKQLNQVNFTLPKKEGLSFLGGLRSKNDVLSRSNVCINGNHVYLEQPEAKGEIKDSSPSSSPSPKGFRKKHLFSSTENLAAGSWKEPAEGGGLSSDRQLSESSTKDSLKSMTLPSYRPAPLVSGDLRENMAPANSEATKEAKESKKPESRRSSLLSLMTGKKDVAKGSEGENPLTVPGREKEGMLMGVKPGEDASGPAEDLVRRSEKDTAAVVSRQGSSLNLFEDVQITEPEAEPESKSEPRPPISSPRAPQTRAVKPRLHPVKPMNAMATKVANCSLGTATIISENLNNEVMMKKYSPSDPAFAYAQLTHDELIQLVLKQKETISKKEFQVRELEDYIDNLLVRVMEETPNILRIPTQVGKKAGKM

SEQ ID NO: 34470 - protein, 439 aa, Homo sapiens
  REGION 1..439: note = ENSP00000430680
MRNNMTASMFDLSMKDKSRNPFGKLKDKIKGKNKDSGSDTASAIIPSTTPSVDSDDESVVKDKKKKSKIKTLLSKSNLQKTPLSQSMSVLPTSKPEKVLLRPGDFQSQWDEDDNEDESSSASDVMSHKRTASTDLKQLNQVNFTLPKKEGLSFLGGLRSKNDVLSRSNVCINGNHVYLEQPEAKGEIKDSSPSSSPSPKGFRKKHLFSSTENLAAGSWKEPAEGGGLSSDRQLSESSTKDSLKSMTLPSYRPAPLVSGDLRENMAPANSEATKEAKESKKPESRRSSLLSLMTGKKDVAKGSEGENPLTVPGREKEGMLMGVKPGEDASGPAEDLVRRSEKDTAAVVSRQGSSLNLFEDVQITEPEAEPESKSEPRPPISSPRAPQTRAVKPRLHPVKPMNAMATKVANCSLGTATIISENLNNEVMMKVCPLRSWCVR

SEQ ID NO: 34471 - protein, 208 aa, Homo sapiens
  REGION 1..208: note = ENSP00000267512
MAKQYDVLFRLLLIGDSGVGKTCLLCRFTDNEFHSSHISTIGVDFKMKTIEVDGIKVRIQIWDTAGQERYQTITKQYYRRAQGIFLVYDISSERSYQHIMKWVSDVDEVGDATSLPGCGEGASPGKARRGPDGKANASRKLCLPQPWMKTSGTHQKASRRSLLGIRLMRSRNGRWEESKGSSWRRSMAWTSMKQVPAPTSTLKSHSRV

SEQ ID NO: 34472 - protein, 212 aa, Homo sapiens
  REGION 1..212: note = ENSP00000434103
MAKQYDVLFRLLLIGDSGVGKTCLLCRFTDNEFHSSHISTIGVDFKMKTIEVDGIKVRIQIWDTAGQERYQTITKQYYRRAQGIFLVYDISSERSYQHIMKWVSDVDEYAPEGVQKILIGNKADEEQKRQVGREQGQQLAKEYGMDFYETSACTNLNIKESFTRLTELVLQAHRKELEGLRMRASNELALAELEEEEGKPEGPANSSKTCWC

SEQ ID NO: 34473 - protein, 140 aa, Homo sapiens
  REGION 1..140: note = ENSP00000464662
  VARIANT 1: note = Any amino acid
XPRPQLGRNCQPLRLEAVAPEAGVRDKSRGVDFKMKTIEVDGIKVRIQIWDTAGQERYQTITKQYYRRAQGIFLVYDISSERSYQHIMKWVSDVDEVGDATSLPGCGEGASPGKARRGPDGKANASRKLCLPQPWMKTSG

SEQ ID NO: 34474 - protein, 166 aa, Homo sapiens
  REGION 1..166: note = ENSP00000433485
MKTIEVDGIKVRIQIWDTAGQERYQTITKQYYRRAQGIFLVYDISSERSYQHIMKWVSDVDEYAPEGVQKILIGNKADEEQKRQVGREQGQQLAKEYGMDFYETSACTNLNIKESFTRLTELVLQAHRKELEGLRMRASNELALAELEEEEGKPEGPANSSKTCWC

SEQ ID NO: 34475 - protein, 150 aa, Homo sapiens
  REGION 1..150: note = ENSP00000452195
MKTIEVDGIKVRIQIWDTAGQERYQTITKQYYRRAQGIFLVYDISSERSYQHIMKWVSDVDEYAPEGVQKILIGNKADEEQKRQVGREQGQQLAKEYGMDFYETSACTNLNIKESFTRLTELVLQAHRKELEGLRMRASNELALAELEEE

SEQ ID NO: 34476 - protein, 221 aa, Homo sapiens
  REGION 1..221: note = ENSP00000379601
MSDGDYDYLIKFLALGDSGVGKTSVLYQYTDGKFNSKFITTVGIDFREKRVVYRASGPDGATGRGQRIHLQLWDTAGQERFRSLTTAFFRDAMGFLLLFDLTNEQSFLNVRNWISQLQMHAYCENPDIVLCGNKSDLEDQRVVKEEEAIALAEKYGIPYFETSAANGTNISQAIEMLLDLIMKRMERCVDKSWIPEGVVRSNGHASTDQLSEEKEKGACGC

SEQ ID NO: 34477 - protein, 221 aa, Homo sapiens; identical to SEQ ID NO: 34476
  REGION 1..221: note = ENSP00000455012

SEQ ID NO: 34478 - protein, 221 aa, Homo sapiens; identical to SEQ ID NO: 34476
  REGION 1..221: note = ENSP00000456059

SEQ ID NO: 34479 - protein, 185 aa, Homo sapiens
  REGION 1..185: note = ENSP00000454695
MSDGDYDYLIKFLALGDSGVGKTSVLYQYTDGKFNSKFITTVGIDFREKRVVYRASGPDGATGRGQRIHLQLWDTAGQERFRSLTTAFFRDAMGFLLLFDLTNEQSFLNVRNWISQLQMHAYCENPDIVLCGNKSDLEDQRVVKEEEAIALAEKYGIPYFETSAANGTNISQAIEMLLDLIMKRM

SEQ ID NO: 34480 - protein, 146 aa, Homo sapiens
  REGION 1..146: note = ENSP00000458127
MSDGDYDYLIKFLALGDSGVGKTSVLYQYTDGKFNSKFITTVGIDFREKRVVYRASGPDGATGRGQRIHLQLWDTAGQERFRSLTTAFFRDAMGFLLLFDLTNEQSFLNVRNWISQLQMHAYCENPDIVLCGNKSDLEDQRVVKEE

SEQ ID NO: 34481 - protein, 136 aa, Homo sapiens
  REGION 1..136: note = ENSP00000456536
MSDGDYDYLIKFLALGDSGVGKTSVLYQYTDGKFNSKFITTVGIDFREKRVVYRASGPDGATGRGQRIHLQLWDTAGQERFRSLTTAFFRDAMGFLLLFDLTNEQSFLNVRNWISQLQMHAYCENPDIVLCGNKSD

SEQ ID NO: 34482 - protein, 95 aa, Homo sapiens
  REGION 1..95: note = ENSP00000457595
MSDGDYDYLIKFLALGDSGVGKTSVLYQYTDGKFNSKFITTVGIDFREKRVVYRASGPDGATGRGQRIHLQLWDTAGQERFRSLTTAFFRDAMGF

SEQ ID NO: 34483 - protein, 71 aa, Homo sapiens
  REGION 1..71: note = ENSP00000457517
MSDGDYDYLIKFLALGDSGVGKTSVLYQYTDGKFNSKFITTVGIDFREKRVVYRASGPDGATGRGQRIHLQ

SEQ ID NO: 34484 - protein, 221 aa, Homo sapiens; identical to SEQ ID NO: 34476
  REGION 1..221: note = ENSP00000337761

SEQ ID NO: 34485 - protein, 87 aa, Homo sapiens
  REGION 1..87: note = ENSP00000468542
MTDGDYDYLIKLLALGDSGVGKTTFLYRYTDNKFNPKFITTVGIDFREKRVVYNAQGPNGSSGKAFKVHLQLWDTAGQERFRSLTTA

SEQ ID NO: 34486 - protein, 218 aa, Homo sapiens
  REGION 1..218: note = ENSP00000262094
MTDGDYDYLIKLLALGDSGVGKTTFLYRYTDNKFNPKFITTVGIDFREKRVVYNAQGPNGSSGKAFKVHLQLWDTAGQERFRSLTTAFFRDAMGFLLMFDLTSQQSFLNVRNWMSQLQANAYCENPDIVLIGNKADLPDQREVNERQARELADKYGIPYFETSAATGQNVEKAVETLLDLIMKRMEQCVEKTQIPDTVNGGNSGNLDGEKPPEKKCIC

SEQ ID NO: 34487 - protein, 131 aa, Homo sapiens
  REGION 1..131: note = ENSP00000465009
  VARIANT 1: note = Any amino acid
XFRDAMGFLLMFDLTSQQSFLNVRNWMSQLQANAYCENPDIVLIGNKADLPDQREVNERQARELADKYGCKLSTLGINKFDEACLSLHQWSCSLFCISLHLKRIHNSFLIAYYTKRLREKSSFVKDFGCII

SEQ ID NO: 34488 - protein, 195 aa, Homo sapiens
  REGION 1..195: note = ENSP00000461945
MMAIRELKVCLLGDTGVGKSSIVCRFVQDHFDHNISPTIGASFMTKTVPCGNELHKFLIWDTAGQERFHSLAPMYYRGSAAAVIVYDITKQDSFYTLKKWVKELKEHGPENIVMAIAGNKCDLSDIREVPLKDAKEYAESIGAIVVETSAKNAINIEELFQGISRQIPPLDPHENGNNGTIKVEKPTMQASRRCC

SEQ ID NO: 34489 - protein, 25 aa, Homo sapiens
  REGION 1..25: note = ENSP00000462164
MMAIRELKVCLLGGIFYDQNCALWK

SEQ ID NO: 34490 - protein, 74 aa, Homo sapiens
  REGION 1..74: note = ENSP00000464046
MMAIRELKVCLLGDTGVGKSSIVCRFVQDHFDHNISPTIGASFMTKTVPCGNELHKFLIWDTAGQERGGSPEGC

SEQ ID NO: 34491 - protein, 59 aa, Homo sapiens
  REGION 1..59: note = ENSP00000462561
MMAIRELKVCLLGGLMEPICSLTKCHSIGRTLDKDKEGCIPVAPPGGRWRYVLRTPATG

SEQ ID NO: 34492 - protein, 237 aa, Homo sapiens
  REGION 1..237: note = ENSP00000257017
MAQPILGHGSLQPASAAGLASLELDSSLDQYVQIRIFKIIVIGDSNVGKTCLTFRFCGGTFPDKTEATIGVDFREKTVEIEGEKIKVQVWDTAGQERFRKSMVEHYYRNVHAVVFVYDVTKMTSFTNLKMWIQECNGHAVPPLVPKVLVGNKCDLREQIQVPSNLALKFADAHNMLLFETSAKDPKESQNVESIFMCLACRLKAQKSLLYRDAERQQGKVQKLEFPQEANSKTSCPC

SEQ ID NO: 34493 - protein, 197 aa, Homo sapiens
  REGION 1..197: note = ENSP00000378664
MVGQPQPRDDVGSPRPRVIVGTIRPRVIVGTIRPRVIVGSARARPPPDGTPRPQLAAEESPRPRVIFGTPRARVILGSPRPRVIVSSPWPAVVVASPRPRTPVGSPWPRVVVGTPRPRVIVGSPRARVADADPASAPSQGALQGRRQDEHSGTRAEGSRPGGAAPVPEEGGRFARAQRLPPPRHLRLPGAPDRHRGI

SEQ ID NO: 34494 - protein, 211 aa, Homo sapiens
  REGION 1..211: note = ENSP00000487160
MNILAPVRRDRVLAELPQCLRKEAALHGHKDFHPRVTCACQEHRTGTVGRFKISKVIVVGDLSVGKTCLINRFCKDTFDKNYKATIGVDFEMERFEVLGIPFSLQLWDTAGQERFKCIASTYYRGAQAIIIVFNLNDVASLEHTKQWLADALKENDPSSVLLFLVGSKKDLSTPAQYALMEKDALQVAQEMKTVQRLPSPRALCHPHSSRA

SEQ ID NO: 34495 - protein, 259 aa, Homo sapiens
  REGION 1..259: note = ENSP00000301043
MNILAPVRRDRVLAELPQCLRKEAALHGHKDFHPRVTCACQEHRTGTVGFKISKVIVVGDLSVGKTCLINRFCKDTFDKNYKATIGVDFEMERFEVLGIPFSLQLWDTAGQERFKCIASTYYRGAQAIIIVFNLNDVASLEHTKQWLADALKENDPSSVLLFLVGSKKDLSTPAQYALMEKDALQVAQEMKAEYWAVSSLTGENVREFFFRVAALTFEANVLAELEKSGARRIGDVVRINSDDSNLYLTASKKKPTCCP

SEQ ID NO: 34496 - protein, 251 aa, Homo sapiens
  REGION 1..251: note = ENSP00000391048
MNILAPVRRDRVLAELPQCLRKEAALHGHKDFHPRVTCACQEHRTGTVGFKISKVIVVGDLSVGKTCLINRFCKDTFDKNYKATIGVDFEMERFEVLGIPFSLQLWDTAGQERFKCIASTYYRGAQAIIIVFNLNDVASLEHTKQWLADALKENDPSSVLLFLTPAQYALMEKDALQVAQEMKAEYWAVSSLTGENVREFFFRVAALTFEANVLAELEKSGARRIGDVVRINSDDSNLYLTASKKKPTCCP

SEQ ID NO: 34497 - protein, 237 aa, Homo sapiens
  REGION 1..237: note = ENSP00000410279
MNILAPVRRDRVLAELPQCLRKEAALHGHKDFHPRVTCACQEHRTGTVGFCKDTFDKNYKATIGVDFEMERFEVLGIPFSLQLWDTAGQERFKCIASTYYRGAQAIIIVFNLNDVASLEHTKQWLADALKENDPSSVLLFLVGSKKDLSTPAQYALMEKDALQVAQEMKAEYWAVSSLTGENVREFFFRVAALTFEANVLAELEKSGARRIGDVVRINSDDSNLYLTASKKKPTCCP

SEQ ID NO: 34498 - protein, 171 aa, Homo sapiens
  REGION 1..171: note = ENSP00000397499
MNILAPVRRDRVLAELPQCLRKEAALHGHKDFHPRVTCACQEHRTGTVGFKISKVIVVGDLSVGKTCLINRFCKDTFDKNYKATIGVDFEMERFEVLGIPFSLQLWDTAGQERFKCIASTYYRGAQAIIIVFNLNDVASLEHTKFQEGSEYPCSVCADGERRPPGGPGDEG

SEQ ID NO: 34499 - protein, 259 aa, Homo sapiens; identical to SEQ ID NO: 34495
  REGION 1..259: note = ENSP00000404180

SEQ ID NO: 34500 - protein, 258 aa, Homo sapiens
  REGION 1..258: note = ENSP00000407953
MSHLPGLELRREAPPLLGPLLSPFPLPAGSWHRQMLRSSLRFPITNSAGFKISKVIVVGDLSVGKTCLINRFCKDTFDKNYKATIGVDFEMERFEVLGIPFSLQLWDTAGQERFKCIASTYYRGAQAIIIVFNLNDVASLEHTKQWLADALKENDPSSVLLFLVGSKKDLSTPAQYALMEKDALQVAQEMKAEYWAVSSLTGENVREFFFRVAALTFEANVLAELEKSGARRIGDVVRINSDDSNLYLTASKKKPTCC

SEQ ID NO: 34501 - protein, 156 aa, Homo sapiens
  REGION 1..156: note = ENSP00000463488
  VARIANT 1: note = Any amino acid
XMLRSSLRFPITNSAGLQLWDTAGQERFKCIASTYYRGAQAIIIVFNLNDVASLEHTKQWLADALKENDPSSVLLFLTPAQYALMEKDALQVAQEMKAEYWAVSSLTGENVREFFFRVAALTFEANVLAELEKSGARRIGDVVRINSDDSNLYLTA

SEQ ID NO: 34502 - protein, 250 aa, Homo sapiens
  REGION 1..250: note = ENSP00000489794
MVGQPQPRDDVGSPRPRVIVGTIRPRVIVGTIRPRVIVGSARARPPPDGTPRPQLAAEESPRPRVIFGTPRARVILGSPRPRVIVSSPWPAVVVASPRPRTPVGSPWPRVVVGTPRPRVIVGSPRARVADADPASAPSQGALQGRRQDEHSGTRAEGSRPGGAAPDLRSPRSLWWGTCRWGRLASLIGSAKTPLIRITRPPLEWTSRWNDLRCWAFPSVCSFGIPLGRRGSNALHQPTIEELKPSSLSST

SEQ ID NO: 34503 - protein, 210 aa, Homo sapiens
  REGION 1..210: note = ENSP00000226259
MNILAPVRRDRVLAELPQCLRKEAALHGHKDFHPRVTCACQEHRTGTVGFKISKVIVVGDLSVGKTCLINRFCKDTFDKNYKATIGVDFEMERFEVLGIPFSLQLWDTAGQERFKCIASTYYRGAQAIIIVFNLNDVASLEHTKQWLADALKENDPSSVLLFLVGSKKDLSTPAQYALMEKDALQVAQEMKAEYWAVSSLTGENVREFFF

SEQ ID NO: 34504 - protein, 210 aa, Homo sapiens; identical to SEQ ID NO: 34503
  REGION 1..210: note = ENSP00000398706

SEQ ID NO: 34505 - protein, 228 aa, Homo sapiens
  REGION 1..228: note = ENSP00000490855
MVGQPQPRDDVGSPRPRVIVGTIRPRVIVGTIRPRVIVGSARARPPPDGTPRPQLAAEESPRPRVIFGTPRARVILGSPRPRVIVSSPWPAVVVASPRPRTPVGSPWPRVVVGTPRPRVIVGSPRARVADADPASAPSQGALQGRRQDEHSGTRAEGSRPGGAAPGSAKTPLIRITRPPLEWTSRWNDLRCWAFPSVCSFGIPLGRRGSNALHQPTIEELKPSSLSST

SEQ ID NO: 34506 - protein, 149 aa, Homo sapiens
  REGION 1..149: note = ENSP00000464723
MNILAPVRRDRVLAELPQCLRKEAALHGHKDFHPRVTCACQEHRTGTVGFKISKVIVVGDLSVGKTCLINRFCKDTFDKNYKATIGVDFEMERFEVLGIPFSLQLWDTAGQERFKCIASTYYRGAQAIIIVFNLNDVASLEHTKQWLAD

SEQ ID NO: 34507 - protein, 198 aa, Homo sapiens
  REGION 1..198: note = ENSP00000490450
MVGQPQPRDDVGSPRPRVIVGTIRPRVIVGTIRPRVIVGSARARPPPDGTPRPQLAAEESPRPRVIFGTPRARVILGSPRPRVIVSSPWPAVVVASPRPRTPVGSPWPRVVVGTPRPRVIVGSPRARVADADPASAPSQGALQGRRQDEHSGTRAEGSRPGGAAPVPEEGGRFARAQRLPPPRHLRLPGAPDRHRGQI

SEQ ID NO: 34508 - protein, 83 aa, Homo sapiens
  REGION 1..83: note = ENSP00000490529
MSHLPGLELRREAPPLLGPLLSPFPLPAGSWHRQMLRSSLRFPITNSAGVSETADSRRVPVAPSCSRDTPAAGDRRVSTRPGR

SEQ ID NO: 34509 - protein, 51 aa, Homo sapiens
  REGION 1..51: note = ENSP00000465352
MNILAPVRRDRVLAELPQCLRKEAALHGHKDFHPRVTCACQEHRTGTVGRF

SEQ ID NO: 34510 - protein, 48 aa, Homo sapiens
  REGION 1..48: note = ENSP00000476427
MNILAPVRRDRVLAELPQCLRKEAALHGHKDFHPRVTCACQEHRTGTV

SEQ ID NO: 34511 - protein, 268 aa, Homo sapiens
  REGION 1..268: note = ENSP00000413156
MSHLPGLELRREAPPLLGPLLSPFPLPAGSWHRQMLRSSLRFPITNSAGAPCKAAGRMNILAPVRRDRVLAELPQCLRKEAALHGHKDFHPRVTCACQEHRTGTVGRFKISKVIVVGDLSVGKTCLINRFCKDTFDKNYKATIGVDFEMERFEVLGIPFSLQLWDTAGQERFKCIASTYYRGAQAIIIVFNLNDVASLEHTKQWLADALKENDPSSVLLFLVGSKKDLSTPAQYALMEKDALQVAQEMKTVQRLPSPRALCHPHSSRA

SEQ ID NO: 34512 - protein, 259 aa, Homo sapiens; identical to SEQ ID NO: 34495
  REGION 1..259: note = ENSP00000378666

SEQ ID NO: 34513 - protein, 182 aa, Homo sapiens
  REGION 1..182: note = ENSP00000341354
MDLQRPDSYQGGAGPDFNDHVLHKTILVGDSGVGKTSLLVQFDQGKFIPGSFSATVGIGFTNKVVTVDGVRVKLQIWDTAGQERFRSVTHAYYRDAQALLLLYDITNKSSFDNIRAWLTEIHEYAQRDVVIMLLGNKADMSSERVIRSEDGETLAREYGVPFLETSAKTGMNVELAFLAIAK

SEQ ID NO: 34514 - protein, 216 aa, Homo sapiens
  REGION 1..216: note = ENSP00000383934
MDLQRPDSYQGGAGPDFNDHVLHKTILVGDSGVGKTSLLVQFDQGKFIPGSFSATVGIGFTNKVVTVDGVRVKLQIWDTAGQERFRSVTHAYYRDAQALLLLYDITNKSSFDNIRAWLTEIHEYAQRDVVIMLLGNKADMSSERVIRSEDGETLAREYGVPFLETSAKTGMNVELAFLAIAKELKYRAGHQADEPSFQIRDYVESQKKRSSCCSFM

SEQ ID NO: 34515 - protein, 196 aa, Homo sapiens
  REGION 1..196: note = ENSP00000432086
MCCKVMLLGDTGVGKTCFLIQFKDGAFLSGTFIATVGIDFRNKVVTVDGVRVKLQIWDTAGQERFRSVTHAYYRDAQALLLLYDITNKSSFDNIRAWLTEIHEYAQRDVVIMLLGNKADMSSERVIRSEDGETLAREYGVPFLETSAKTGMNVELAFLAIAKELKYRAGHQADEPSFQIRDYVESQKKRSSCCSFM

SEQ ID NO: 34516 - protein, 191 aa, Homo sapiens
  REGION 1..191: note = ENSP00000376391
MWLMSEAHGAEPVLLREAARPFTQTLRLCVPSGNSKNKVVTVDGVRVKLQIWDTAGQERFRSVTHAYYRDAQALLLLYDITNKSSFDNIRAWLTEIHEYAQRDVVIMLLGNKADMSSERVIRSEDGETLAREYGVPFLETSAKTGMNVELAFLAIAKELKYRAGHQADEPSFQIRDYVESQKKRSSCCSFM

SEQ ID NO: 34517 - protein, 228 aa, Homo sapiens
  REGION 1..228: note = ENSP00000376390
MWLMSEAHGAEPVLLREAARPFTQTLRLCVPSGNSKVMLLGDTGVGKTCFLIQFKDGAFLSGTFIATVGIDFRNKVVTVDGVRVKLQIWDTAGQERFRSVTHAYYRDAQALLLLYDITNKSSFDNIRAWLTEIHEYAQRDVVIMLLGNKADMSSERVIRSEDGETLAREYGVPFLETSAKTGMNVELAFLAIAKELKYRAGHQADEPSFQIRDYVESQKKRSSCCSFM

SEQ ID NO: 34518 - protein, 223 aa, Homo sapiens
  REGION 1..223: note = ENSP00000376389
MTGTPGAVATRDGEAPERSPPCSPSYDLTGKVMLLGDTGVGKTCFLIQFKDGAFLSGTFIATVGIDFRNKVVTVDGVRVKLQIWDTAGQERFRSVTHAYYRDAQALLLLYDITNKSSFDNIRAWLTEIHEYAQRDVVIMLLGNKADMSSERVIRSEDGETLAREYGVPFLETSAKTGMNVELAFLAIAKELKYRAGHQADEPSFQIRDYVESQKKRSSCCSFM

SEQ ID NO: 34519 - protein, 186 aa, Homo sapiens
  REGION 1..186: note = ENSP00000376388
MTGTPGAVATRDGEAPERSPPCSPSYDLTGKNKVVTVDGVRVKLQIWDTAGQERFRSVTHAYYRDAQALLLLYDITNKSSFDNIRAWLTEIHEYAQRDVVIMLLGNKADMSSERVIRSEDGETLAREYGVPFLETSAKTGMNVELAFLAIAKELKYRAGHQADEPSFQIRDYVESQKKRSSCCSFM

SEQ ID NO: 34520 - protein, 189 aa, Homo sapiens
  REGION 1..189: note = ENSP00000376387
MTGTPGAVATRDGEAPERSPPCSPSYDLTGKVMLLGDTGVGKTCFLIQFKDGAFLSGTFIATVGIDFRNKVVTVDGVRVKLQIWDTAGQERFRSVTHAYYRDAQALLLLYDITNKSSFDNIRAWLTEIHEYAQRDVVIMLLGNKADMSSERVIRSEDGETLAREYGVPFLETSAKTGMNVELAFLAIAK

SEQ ID NO: 34521 - protein, 223 aa, Homo sapiens; identical to SEQ ID NO: 34518
  REGION 1..223: note = ENSP00000436563

SEQ ID NO: 34522 - protein, 223 aa, Homo sapiens; identical to SEQ ID NO: 34518
  REGION 1..223: note = ENSP00000483155

SEQ ID NO: 34523 - protein, 220 aa, Homo sapiens
  REGION 1..220: note = ENSP00000222256
MASATDSRYGQKESSDQNFDYMFKILIIGNSSVGKTSFLFRYADDSFTPAFVSTVGIDFKVKTIYRNDKRIKLQIWDTAGQERYRTITTAYYRGAMGFILMYDITNEESFNAVQDWSTQIKTYSWDNAQVLLVGNKCDMEDERVVSSERGRQLADHLGFEFFEASAKDNINVKQTFERLVDVICEKMSESLDTADPAVTGAKQGPQLSDQQVPPHQDCAC

SEQ ID NO: 34524 - protein, 125 aa, Homo sapiens
  REGION 1..125: note = ENSP00000474603
MGFILMYDITNEESFNAVQDWSTQIKTYSWDNAQVLLVGNKCDMEDERVVSSERGRQLADHLGFEFFEASAKDNINVKQTFERLVDVICEKMSESLDTADPAVTGAKQGPQLSDQQVPPHQDCAC

SEQ ID NO: 34525 - protein, 115 aa, Homo sapiens
  REGION 1..115: note = ENSP00000472335
MASATDSRYGQKESSDQNFDYMFKILIIGNSSVGKTSFLFRYADDSFTPAFVSTVGIDFKVKTIYRNDKRIKLQIWDTAGQERYRTITTAYYRGAMGFILMYDITNEESFNAVQD

SEQ ID NO: 34526 - protein, 219 aa, Homo sapiens
  REGION 1..219: note = ENSP00000360718
MASVTDGKTGVKDASDQNFDYMFKLLIIGNSSVGKTSFLFRYADDTFTPAFVSTVGIDFKVKTVYRHEKRVKLQIWDTAGQERYRTITTAYYRGAMGFILMYDITNEESFNAVQDWATQIKTYSWDNAQVILVGNKCDMEEERVVPTEKGQLLAEQLGFDFFEASAKENISVRQAFERLVDAICDKMSDSLDTDPSMLGSSKNTRLSDTPPLLQQNCSC

SEQ ID NO: 34527 - protein, 227 aa, Homo sapiens
  REGION 1..227: note = ENSP00000282878
MRHEAPMQMASAQDARYGQKDSSDQNFDYMFKLLIIGNSSVGKTSFLFRYADDSFTSAFVSTVGIDFKVKTVFKNEKRIKLQIWDTAGQERYRTITTAYYRGAMGFILMYDITNEESFNAVQDWSTQIKTYSWDNAQVILVGNKCDMEDERVISTERGQHLGEQLGFEFFETSAKDNINVKQTFERLVDIICDKMSESLETDPAITAAKQNTRLKETPPPPQPNCAC

SEQ ID NO: 34528 - protein, 208 aa, Homo sapiens
  REGION 1..208: note = ENSP00000285208
MSAGGDFGNPLRKFKLVFLGEQSVGKTSLITRFMYDSFDNTYQATIGIDFLSKTMYLEDRTVRLQLWDTAGQERFRSLIPSYIRDSTVAVVVYDITNLNSFQQTSKWIDDVRTERGSDVIIMLVGNKTDLADKRQITIEEGEQRAKELSVMFIETSAKTGYNVKQLFRRVASALPGMENVQEKSKEGMIDIKLDKPQEPPASEGGCSC

SEQ ID NO: 34529 - protein, 71 aa, Homo sapiens
  REGION 1..71: note = ENSP00000418540
MSAGGDFGNPLRKFKLVFLGEQSVGKTSLITRCCWQLQLRGAWFIDWGAMCTSENILTSPPSSQYTCLGQV

SEQ ID NO: 34530 - protein, 195 aa, Homo sapiens
  REGION 1..195: note = ENSP00000419381
MWHMTRNWPLVGKTSLITRFMYDSFDNTYQATIGIDFLSKTMYLEDRTVRLQLWDTAGQERFRSLIPSYIRDSTVAVVVYDITNLNSFQQTSKWIDDVRTERGSDVIIMLVGNKTDLADKRQITIEEGEQRAKELSVMFIETSAKTGYNVKQLFRRVASALPGMENVQEKSKEGMIDIKLDKPQEPPASEGGCSC

SEQ ID NO: 34531 - protein, 124 aa, Homo sapiens
  REGION 1..124: note = ENSP00000419941
MYDSFDNTYQATIGIDFLSKTMYLEDRTVRLQLWDTAGQERFRSLIPSYIRDSTVAVVVYDITNLNSFQQTSKWIDDVRTERGSDVIIMLVGNKTDLADKRQITIEEGEQRAKELSVMFIETSA

SEQ ID NO: 34532 - protein, 83 aa, Homo sapiens
  REGION 1..83: note = ENSP00000419526
MYLEDRTVRLQLWDTAGQERFRSLIPSYIRDSTVAVVVYDITNLNSFQQTSKWIDDVRTERGSDVIIMLVGNKTDLADKRQIT

SEQ ID NO: 34533 - protein, 49 aa, Homo sapiens
  REGION 1..49: note = ENSP00000417433
MYDSFDNTYQATIGIDFLSKTMYLEDRTVRLQLWDTAGQERFRSLIPSY

SEQ ID NO: 34534 - protein, 208 aa, Homo sapiens; identical to SEQ ID NO: 34528
  REGION 1..208: note = ENSP00000437797

SEQ ID NO: 34535 - protein, 480 aa, Homo sapiens
  REGION 1..480: note = ENSP00000392578
MDDLQSQNLSMDMTDSPPALANNRLENGMAQLITTEAWNINSTDLVEGSSAPELNPNGNATYVMTTQGPVQLPVVLEQHVFQHLNSPLVLPQEAPCSSSTIHNNLFQGAEDPEAQPQLLDLRIPSQPQEPTLPFEAVLQNLFPSQGTLGPPPCQPPPGYAPVPPQPFSSPLSPLVPPATLLVPYPVIVPLPVPVPIPIPIPMPQSSESKFSSSFPKPPSSFGLHPFKGTQTPLEKDELKPFDILQPKEYFQLSRHTVIKMGSENEALDLSMKSVPWLKAGEVSPPIFQEDAALDLSVAAHRKSEPPPETLYDSGASVDSSGHTVMEKLPSGMEISFAPATSHEAPAMMDSHISSSDAATEMLSQPNHPSGEVKAENNIEMVGESQAAKVIVSVEDAVPTIFCGKIKGLSGVSTKNFSFKREDSVLQGYDINSQGEESMGNAEPLRKPIKNRSIKLKKVNSQEIHMLPIKKQRLATFFPRK

SEQ ID NO: 34536 - protein, 530 aa, Homo sapiens
  REGION 1..530: note = ENSP00000353106
MDDLQSQNLSMDMTDSPPALANNRLENGMAQLITTEAWNINSTDLVKKALVTVPAPSILNPPAESQSGMALKVAATVLQPLCLGESPVVMPIHMQVEGSSAPELNPNGNATYVMTTQGPVQLPVVLEQHVFQHLNSPLVLPQEAPCSSSTIHNNLFQGAEDPEAQPQLLDLRIPSQPQEPTLPFEAVLQNLFPSQGTLGPPPCQPPPGYAPVPPQPFSSPLSPLVPPATLLVPYPVIVPLPVPVPIPIPIPMPQSSESKFSSSFPKPPSSFGLHPFKGTQTPLEKDELKPFDILQPKEYFQLSRHTVIKMGSENEALDLSMKSVPWLKAGEVSPPIFQEDAALDLSVAAHRKSEPPPETLYDSGASVDSSGHTVMEKLPSGMEISFAPATSHEAPAMMDSHISSSDAATEMLSQPNHPSGEVKAENNIEMVGESQAAKVIVSVEDAVPTIFCGKIKGLSGVSTKNFSFKREDSVLQGYDINSQGEESMGNAEPLRKPIKNRSIKLKKVNSQEIHMLPIKKQRLATFFPRK

SEQ ID NO: 34537 - protein, 530 aa, Homo sapiens; identical to SEQ ID NO: 34536
  REGION 1..530: note = ENSP00000333456

SEQ ID NO: 34538 - protein, 81 aa, Homo sapiens
  REGION 1..81: note = ENSP00000473562
MDDLQSQNLSMDMTDSPPALANNRLENGMAQLITTEAWNINSTDLPLCLGESPVVMPIHMQVEGSSAPELNPNGNATYVMT

SEQ ID NO: 34539 - protein, 530 aa, Homo sapiens; identical to SEQ ID NO: 34536
  REGION 1..530: note = ENSP00000401323

SEQ ID NO: 34540 - protein, 530 aa, Homo sapiens; identical to SEQ ID NO: 34536
  REGION 1..530: note = ENSP00000444210

SEQ ID NO: 34541 - protein, 583 aa, Homo sapiens
  REGION 1..583: note = ENSP00000356607
MDLMNGQASSVNIAATASEKSSSSESLSDKGSELKKSFDAVVFDVLKVTPEEYAGQITLMDVPVFKAIQPDELSSCGWNKKEKYSSAPNAVAFTRRFNHVSFWVVREILHAQTLKIRAEVLSHYIKTAKKLYELNNLHALMAVVSGLQSAPIFRLTKTWALLSRKDKTTFEKLEYVMSKEDNYKRLRDYISSLKMTPCIPYLGIYLSDLTYIDSAYPSTGSILENEQRSNLMNNILRIISDLQQSCEYDIPMLPHVQKYLNSVQYIEELQKFVEDDNYKLSLKIEPGTSTPRSAASREDLVGPEVGASPQSGRKSVAAEGALLPQTPPSPRNLIPHGHRKCHSLGYNFIHKMNTAEFKSATFPNAGPRHLLDDSVMEPHAPSRGQAESSTLSSGISIGSSDGSELSEETSWPAFERNRLYHSLGPVTRVARNGYRSHMKASSSAESEDLAVHLYPGAVTIQGVLRRKTLLKEGKKPTVASWTKYWAALCGTQLFYYAAKSLKATERKHFKSTSNKNVSVIGWMVMMADDPEHPDLFLLTDSEKGNSYKFQAGNRMNAMLWFKHLSAACQSNKQQVPTNLMTFE

SEQ ID NO: 34542 - protein, 266 aa, Homo sapiens
  REGION 1..266: note = ENSP00000313613
MDLMNGQASSVNIAATASEGQITLMDVPVFKAIQPDELSSCGWNKKEKYSSAPNAVAFTRRFNHVSFWVVREILHAQTLKIRAEVLSHYIKTAKKLYELNNLHALMAVVSGLQSAPIFRLTKTWALLSRKDKTTFEKLEYVMSKEDNYKRLRDYISSLKMTPCIPYLGIYLSDLTYIDSAYPSTGSILENEQRSNLMNNILRIISDLQQSCEYDIPMLPHVQKYLNSVQYIEELQKFVEDDNYKLSLKIEPGTSTPRSAASREDLV

SEQ ID NO: 34543 - protein, 99 aa, Homo sapiens
  REGION 1..99: note = ENSP00000405903
  VARIANT 1: note = Any amino acid
XQYIEELQKFVEDDNYKLSLKIEPGTSTPRSAASREDLVGPEVGASPQSGRKSVAAEGALLPQTPPSPRNLIPHGHRKCHSLGYKSAFLILSFKFLSLL

SEQ ID NO: 34544 - protein, 146 aa, Homo sapiens
  REGION 1..146: note = ENSP00000356604
  VARIANT 1: note = Any amino acid
XQAESSTLSSGISIGSSDGSELSEETSWPAFESSAESEDLAVHLYPGAVTIQGVLRRKTLLKEGKKPTVASWTKYWAALCGTQLFYYAAKSLKATERKHFKSTSNKNVSVIGWMVMMADDPEHPDLFLLTDSEKGNSYKFQAGNRM

SEQ ID NO: 34545 - protein, 557 aa, Homo sapiens
  REGION 1..557: note = ENSP00000356606
MDLMNGQASSVNIAATASEKSSSSESLSDKGSELKKSFDAVVFDVLKVTPEEYAGQITLMDVPVFKAIQPDELSSCGWNKKEKYSSAPNAVAFTRRFNHVSFWVVREILHAQTLKIRAEVLSHYIKTAKKLYELNNLHALMAVVSGLQSAPIFRLTKTWALLSRKDKTTFEKLEYVMSKEDNYKRLRDYISSLKMTPCIPYLGIYLSDLTYIDSAYPSTGSILENEQRSNLMNNILRIISDLQQSCEYDIPMLPHVQKYLNSVQYIEELQKFVEDDNYKLSLKIEPGTSTPRSAASREDLVGPEVGASPQSGRKSVAAEGALLPQTPPSPRNLIPHGHRKCHSLGYNFIHKMNTAEFKSATFPNAGPRHLLDDSVMEPHAPSRGQAESSTLSSGISIGSSDGSELSEETSWPAFESSAESEDLAVHLYPGAVTIQGVLRRKTLLKEGKKPTVASWTKYWAALCGTQLFYYAAKSLKATERKHFKSTSNKNVSVIGWMVMMADDPEHPDLFLLTDSEKGNSYKFQAGNRMNAMLWFKHLSAACQSNKQQVPTNLMTFE

SEQ ID NO: 34546 - protein, 85 aa, Homo sapiens
  REGION 1..85: note = ENSP00000427787
MTGKTQTSNVTNKNDPKSINSRVFIGNLNTAIVKKVDIEAIFSKYGKIVGCSVHKGYAFVQYMSERHARAAVAGENARVIAGQPL

SEQ ID NO: 34547 - protein, 291 aa, Homo sapiens
  REGION 1..291: note = ENSP00000430394
MTGKTQTSNVTNKNDPKSINSRVFIGNLNTAIVKKVDIEAIFSKYGKIVGCSVHKGYAFVQYMSERHARAAVAGENARVIAGQPLDINMAGEPKPYRPKPGNKRPLSALYRLESKEPFLSVGGYVFDYDYYRDDFYNRLFDYHGRVPPPPRAVIPLKRPRVAVTTTRRGKGVFSMKGGSRSTASGSTGSKLKSDELQTIKKELTQIKTKIDSLLGRLEKIEKQQKAEAEAQKKQLEESLVLIQEECVSEIADHSTEEPAEGGPDADGEEMTDGIEEDFDEDGGHELFLQIK

SEQ ID NO: 34548 - protein, 291 aa, Homo sapiens; identical to SEQ ID NO: 34547
  REGION 1..291: note = ENSP00000428667

SEQ ID NO: 34549 - protein, 291 aa, Homo sapiens; identical to SEQ ID NO: 34547
  REGION 1..291: note = ENSP00000430367

SEQ ID NO: 34550 - protein, 280 aa, Homo sapiens
  REGION 1..280: note = ENSP00000430065
MTGKTQTSNVTNKNDPKSINSRVFIGNLNTAIVKKVDIEAIFSKYGKIVGCSVHKGYAFVQYMSERHARAAVAGENARVIAGQPLDINMAGEPKPYRPKPGNKRPLSALYSGYVFDYDYYRDDFYNRLFDYHGRVPPPPRAVIPLKRPRVAVTTTRRGKGVFSMKGGSRSTASGSTGSKLKSDELQTIKKELTQIKTKIDSLLGRLEKIEKQQKAEAEAQKKQLEESLVLIQEECVSEIADHSTEEPAEGGPDADGEEMTDGIEEDFDEDGGHELFLQIK

SEQ ID NO: 34551 - protein, 85 aa, Homo sapiens; identical to SEQ ID NO: 34546
  REGION 1..85: note = ENSP00000428711

SEQ ID NO: 34552 - protein, 304 aa, Homo sapiens
  REGION 1..304: note = ENSP00000430128
MSKRRRLKQGEPIMTGKTQTSNVTNKNDPKSINSRVFIGNLNTAIVKKVDIEAIFSKYGKIVGCSVHKGYAFVQYMSERHARAAVAGENARVIAGQPLDINMAGEPKPYRPKPGNKRPLSALYRLESKEPFLSVGGYVFDYDYYRDDFYNRLFDYHGRVPPPPRAVIPLKRPRVAVTTTRRGKGVFSMKGGSRSTASGSTGSKLKSDELQTIKKELTQIKTKIDSLLGRLEKIEKQQKAEAEAQKKQLEESLVLIQEECVSEIADHSTEEPAEGGPDADGEEMTDGIEEDFDEDGGHELFLQIK

SEQ ID NO: 34553 - protein, 47 aa, Homo sapiens
  REGION 1..47: note = ENSP00000429284
MTGKTQTSNVTNKNDPKSINSRVFIGNLNTAIVKKVDIEAIFSKYGK

SEQ ID NO: 34554 - protein, 218 aa, Homo sapiens
  REGION 1..218: note = ENSP00000428807
MTMYKSKRRHQRYINMAGEPKPYRPKPGNKRPLSALYRLESKEPFLSVGGYVFDYDYYRDDFYNRLFDYHGRVPPPPRAVIPLKRPRVAVTTTRRGKGVFSMKGGSRSTASGSTGSKLKSDELQTIKKELTQIKTKIDSLLGRLEKIEKQQKAEAEAQKKQLEESLVLIQEECVSEIADHSTEEPAEGGPDADGEEMTDGIEEDFDEDGGHELFLQIK

SEQ ID NO: 34555 - protein, 146 aa, Homo sapiens
  REGION 1..146: note = ENSP00000428310
MTMYKSKRRHQRYINMAGEPKPYRPKPGNKRPLSALYRLESKEPFLSVGLFDYHGRVPPPPRAVIPLKRPRVAVTTTRRGKGVFSMKGGSRSTASGSTGSKLKSDELQTIKKELTQIKTKIDSLLGRLEKIEKQQKAEAVSTDKVI

SEQ ID NO: 34556 - protein, 126 aa, Homo sapiens
  REGION 1..126: note = ENSP00000384688
MTTACQEANYGALLRELCLTQFQVDMEAVGETLWCDWGRTIRSYRELADCTWHMAEKLGCFWPNAEVDRFFLAVHGRYFRSCPISGRAVRDPPGSILYPFIVVPITVTLLVTALVVWQSKRTEGIV

SEQ ID NO: 34557 - protein, 148 aa, Homo sapiens
  REGION 1..148: note = ENSP00000254661
MARALCRLPRRGLWLLLAHHLFMTTACQEANYGALLRELCLTQFQVDMEAVGETLWCDWGRTIRSYRELADCTWHMAEKLGCFWPNAEVDRFFLAVHGRYFRSCPISGRAVRDPPGSILYPFIVVPITVTLLVTALVVWQSKRTEGIV

SEQ ID NO: 34558 - protein, 126 aa, Homo sapiens; identical to SEQ ID NO: 34556
  REGION 1..126: note = ENSP00000386720

SEQ ID NO: 34559 - protein, 126 aa, Homo sapiens; identical to SEQ ID NO: 34556
  REGION 1..126: note = ENSP00000386046

SEQ ID NO: 34560 - protein, 100 aa, Homo sapiens
  REGION 1..100: note = ENSP00000467463
MDPIEKDWCDWAMISRPYSTLRDCLEHFAELFDLGFPNPLAERIIFETHQIHFANCSLVQPTFSDPPEDVLLAMIIAPICLIPFLITLVVWRSKDSEAQA

SEQ ID NO: 34561 - protein, 49 aa, Homo sapiens
  REGION 1..49: note = ENSP00000466980
MDPIEKDWCDWAMISRPYSTLRDCLEHFAELFDLGFPNPLAERIIFETH

SEQ ID NO: 34562 - protein, 175 aa, Homo sapiens
  REGION 1..175: note = ENSP00000253796
MASLRVERAGGPRLPRTRVGRPAALRLLLLLGAVLNPHEALAQPLPTTGTPGSEGGTVKNYETAVQFCWNHYKDQMDPIEKDWCDWAMISRPYSTLRDCLEHFAELFDLGFPNPLAERIIFETHQIHFANCSLVQPTFSDPPEDVLLAMIIAPICLIPFLITLVVWRSKDSEAQA

SEQ ID NO: 34563 - protein, 180 aa, Homo sapiens
  REGION 1..180: note = ENSP00000466455
MASLRVERAGGPRLPRTRVGRPAALRLLLLLGAVLNPHEALAQPLPTTGTPGSEASVPTGGTVKNYETAVQFCWNHYKDQMDPIEKDWCDWAMISRPYSTLRDCLEHFAELFDLGFPNPLAERIIFETHQIHFANCSLVQPTFSDPPEDVLLAMIIAPICLIPFLITLVVWRSKDSEAQA

SEQ ID NO: 34564 - protein, 112 aa, Homo sapiens
  REGION 1..112: note = ENSP00000465725
MASLRVERAGGPRLPRTRVGRPAALRLLLLLGAVLNPHEALAQPLPTTGTPGSEGLIAPCEIAWSTLQSCLTWASPIPWQRGSSLRLTRSTLPTAPWCSPPSLTPQRMYSWP

SEQ ID NO: 34565 - protein, 3224 aa, Homo sapiens
  REGION 1..3224: note = ENSP00000283195
MRRSKADVERYIASVQGSTPSPRQKSMKGFYFAKLYYEAKEYDLAKKYICTYINVQERDPKAHRFLGLLYELEENTDKAVECYRRSVELNPTQKDLVLKIAELLCKNDVTDGRAKYWLERAAKLFPGSPAIYKLKEQLLDCEGEDGWNKLFDLIQSELYVRPDDVHVNIRLVEVYRSTKRLKDAVAHCHEAERNIALRSSLEWNSCVVQTLKEYLESLQCLESDKSDWRATNTDLLLAYANLMLLTLSTRDVQESRELLQSFDSALQSVKSLGGNDELSATFLEMKGHFYMHAGSLLLKMGQHSSNVQWRALSELAALCYLIAFQVPRPKIKLIKGEAGQNLLEMMACDRLSQSGHMLLNLSRGKQDFLKEIVETFANKSGQSALYDALFSSQSPKDTSFLGSDDIGNIDVREPELEDLTRYDVGAIRAHNGSLQHLTWLGLQWNSLPALPGIRKWLKQLFHHLPHETSRLETNAPESICILDLEVFLLGVVYTSHLQLKEKCNSHHSSYQPLCLPLPVCKQLCTERQKSWWDAVCTLIHRKAVPGNVAKLRLLVQHEINTLRAQEKHGLQPALLVHWAECLQKTGSGLNSFYDQREYIGRSVHYWKKVLPLLKIIKKKNSIPEPIDPLFKHFHSVDIQASEIVEYEEDAHITFAILDAVNGNIEDAVTAFESIKSVVSYWNLALIFHRKAEDIENDALSPEEQEECKNYLRKTRDYLIKIIDDSDSNLSVVKKLPVPLESVKEMLNSVMQELEDYSEGGPLYKNGSLRNADSEIKHSTPSPTRYSLSPSKSYKYSPKTPPRWAEDQNSLLKMICQQVEAIKKEMQELKLNSSNSASPHRWPTENYGPDSVPDGYQGSQTFHGAPLTVATTGPSVYYSQSPAYNSQYLLRPAANVTPTKGPVYGMNRLPPQQHIYAYPQQMHTPPVQSSSACMFSQEMYGPPALRFESPATGILSPRGDDYFNYNVQQTSTNPPLPEPGYFTKPPIAAHASRSAESKTIEFGKTNFVQPMPGEGLRPSLPTQAHTTQPTPFKFNSNFKSNDGDFTFSSPQVVTQPPPAAYSNSESLLGLLTSDKPLQGDGYSGAKPIPGGQTIGPRNTFNFGSKNVSGISFTENMGSSQQKNSGFRRSDDMFTFHGPGKSVFGTPTLETANKNHETDGGSAHGDDDDDGPHFEPVVPLPDKIEVKTGEEDEEEFFCNRAKLFRFDVESKEWKERGIGNVKILRHKTSGKIRLLMRREQVLKICANHYISPDMKLTPNAGSDRSFVWHALDYADELPKPEQLAIRFKTPEEAALFKCKFEEAQSILKAPGTNVAMASNQAVRIVKEPTSHDNKDICKSDAGNLNFEFQVAKKEGSWWHCNSCSLKNASTAKKCVSCQNLNPSNKELVGPPLAETVFTPKTSPENVQDRFALVTPKKEGHWDCSICLVRNEPTVSRCIACQNTKSANKSGSSFVHQASFKFGQGDLPKPINSDFRSVFSTKEGQWDCSACLVQNEGSSTKCAACQNPRKQSLPATSIPTPASFKFGTSETSKTLKSGFEDMFAKKEGQWDCSSCLVRNEANATRCVACQNPDKPSPSTSVPAPASFKFGTSETSKAPKSGFEGMFTKKEGQWDCSVCLVRNEASATKCIACQNPGKQNQTTSAVSTPASSETSKAPKSGFEGMFTKKEGQWDCSVCLVRNEASATKCIACQNPGKQNQTTSAVSTPASSETSKAPKSGFEGMFTKKEGQWDCSVCLVRNEASATKCIACQCPSKQNQTTAISTPASSEISKAPKSGFEGMFIRKGQWDCSVCCVQNESSSLKCVACDASKPTHKPIAEAPSAFTLGSEMKLHDSSGSQVGTGFKSNFSEKASKFGNTEQGFKFGHVDQENSPSFMFQGSSNTEFKSTKEGFSIPVSADGFKFGISEPGNQEKKSEKPLENGTGFQAQDISGQKNGRGVIFGQTSSTFTFADLAKSTSGEGFQFGKKDPNFKGFSGAGEKLFSSQYGKMANKANTSGDFEKDDDAYKTEDSDDIHFEPVVQMPEKVELVTGEEDEKVLYSQRVKLFRFDAEVSQWKERGLGNLKILKNEVNGKLRMLMRREQVLKVCANHWITTTMNLKPLSGSDRAWMWLASDFSDGDAKLEQLAAKFKTPELAEEFKQKFEECQRLLLDIPLQTPHKLVDTGRAAKLIQRAEEMKSGLKDFKTFLTNDQTKVTEEENKGSGTGAAGASDTTIKPNPENTGPTLEWDNYDLREDALDDSVSSSSVHASPLASSPVRKNLFRFGESTTGFNFSFKSALSPSKSPAKLNQSGTSVGTDEESDVTQEEERDGQYFEPVVPLPDLVEVSSGEENEQVVFSHRAKLYRYDKDVGQWKERGIGDIKILQNYDNKQVRIVMRRDQVLKLCANHRITPDMTLQNMKGTERVWLWTACDFADGERKVEHLAVRFKLQDVADSFKKIFDEAKTAQEKDSLITPHVSRSSTPRESPCGKIAVAVLEETTRERTDVIQGDDVADATSEVEVSSTSETTPKAVVSPPKFVFGSESVKSIFSSEKSKPFAFGNSSATGSLFGFSFNAPLKSNNSETSSVAQSGSESKVEPKKCELSKNSDIEQSSDSKVKNLFASFPTEESSINYTFKTPEKAKEKKKPEDSPSDDDVLIVYELTPTAEQKALATKLKLPPTFFCYKNRPDYVSEEEEDDEDFETAVKKLNGKLYLDGSEKCRPLEENTADNEKECIIVWEKKPTVEEKAKADTLKLPPTFFCGVCSDTDEDNGNGEDFQSELQKVQEAQKSQTEEITSTTDSVYTGGTEVMVPSFCKSEEPDSITKSISSPSVSSETMDKPVDLSTRKEIDTDSTSQGESKIVSFGFGSSTGLSFADLASSNSGDFAFGSKDKNFQWANTGAAVFGTQSVGTQSAGKVGEDEDGSDEEVVHNEDIHFEPIVSLPEVEVKSGEEDEEILFKERAKLYRWDRDVSQWKERGVGDIKILWHTMKNYYRILMRRDQVFKVCANHVITKTMELKPLNVSNNALVWTASDYADGEAKVEQLAVRFKTKEVADCFKKTFEECQQNLMKLQKGHVSLAAELSKETNPVVFFDVCADGEPLGRITMELFSNIVPRTAENFRALCTGEKGFGFKNSIFHRVIPDFVCQGGDITKHDGTGGQSIYGDKFEDENFDVKHTGPGLLSMANQGQNTNNSQFVITLKKAEHLDFKHVVFGFVKDGMDTVKKIESFGSPKGSVCRRITITECGQI

SEQ ID NO: 34566 - protein, 51 aa, Homo sapiens
  REGION 1..51: note = ENSP00000398970
MRRSKADVERYIASVQGSTPSPRQKSMKGFYFAKLYYEAKEYDLAKNVQWN

SEQ ID NO: 34567 - protein, 51 aa, Homo sapiens; identical to SEQ ID NO: 34566
  REGION 1..51: note = ENSP00000485979

SEQ ID NO: 34568 - protein, 465 aa, Homo sapiens
  REGION 1..465: note = ENSP00000296604
MTTIPRKGSSHLPGSLHTCKLKLQEDRRQQEKSVIAQPIFVFEKGEQTFKRPAEDTLYEAAEPECNGFPTKRVRSSSFTFHITDSQSQGVRKNNVFMTSALVQSSVDIKSAEQGPVKHSKHVIRPAILQLPQARSCAKVRKTFGHKALESCKTKEKTNNKISEGNSYLLSENLSRARISVQLSTNQDFLGATSVGCQPNEDKCSFKSCSSNFVFGENMVERVLGTQKLTQPQLENDSYAKEKPFKSIPKFPVNFLSSRTDSIKNTSLIESAAAFSSQPSRKCLLEKIDVITGEETEHNVLKINCKLFIFNKTTQSWIERGRGTLRLNDTASTDCGTLQSRLIMRNQGSLRLILNSKLWAQMKIQRANHKNVRITATDLEDYSIKIFLIQASAQDTAYLYAAIHHRLVALQSFNKQRDVNQAESLSETAQQLNCESCDENEDDFIQVTKNGSDPSSWTHRQSVACS

SEQ ID NO: 34569 - protein, 490 aa, Homo sapiens
  REGION 1..490: note = ENSP00000421853
MTTIPRKGSSHLPGSLHTCKLKLQEDRRQQEKSVIAQPIFVFEKGEQTFKRPAEDTLYEAAEPECNGFPTKRVRSSSFTFHITDSQSQGVSTLSQKQMRCSSVTNLPTFPHSGPVRKNNVFMTSALVQSSVDIKSAEQGPVKHSKHVIRPAILQLPQARSCAKVRKTFGHKALESCKTKEKTNNKISEGNSYLLSENLSRARISVQLSTNQDFLGATSVGCQPNEDKCSFKSCSSNFVFGENMVERVLGTQKLTQPQLENDSYAKEKPFKSIPKFPVNFLSSRTDSIKNTSLIESAAAFSSQPSRKCLLEKIDVITGEETEHNVLKINCKLFIFNKTTQSWIERGRGTLRLNDTASTDCGTLQSRLIMRNQGSLRLILNSKLWAQMKIQRANHKNVRITATDLEDYSIKIFLIQASAQDTAYLYAAIHHRLVALQSFNKQRDVNQAESLSETAQQLNCESCDENEDDFIQVTKNGSDPSSWTHRQSVACS

SEQ ID NO: 34570 - protein, 321 aa, Homo sapiens
  REGION 1..321: note = ENSP00000421149
MTTIPRKGSSHLPGSLHTCKLKLQEDRRQQEKSVIAQPIFVFEKGEQTFKRPAEDTLYEAAEPECNGFPTKRVRSSSFTFHITDSQSQGVRKNNVFMTSALVQSSVDIKSAEQGPVKHSKHVIRPAILQLPQARSCAKVRKTFGHKALESCKTKEKTNNKISEGNSYLLSENLSRARISVQLSTNQDFLGATSVGCQPNEDKCSFKSCSSNFVFGENMVERVLGTQKLTQPQLENDSYAKEKPFKSIPKFPVNFLSSRTDSIKNTSLIESAAAFSSQPSRKCLLEKIDVITGEETEHNVLKVCISCFTLSGSIYILGIKLT

SEQ ID NO: 34571 - protein, 108 aa, Homo sapiens
  REGION 1..108: note = ENSP00000427147
MTTIPRKGSSHLPGSLHTCKLKLQEDRRQQEKSVIAQPIFVFEKGEQTFKRPAEDTLYEAAEPECNGFPTKRVRSSSFTFHITDSQSQGVRKNNVFMTSALVQSSVDI

SEQ ID NO: 34572 - protein, 923 aa, Homo sapiens
  REGION 1..923: note = ENSP00000395708
MKVGWPGESCWQVGLAVEDSPALGAPRVGALPDVVPEGTLLNMVLRRMHRPRSCSYQLLLEHQRPSCIQGLRWTPLTNSEESLDFSESLEQASTERVLRAGRQLHRHLLATCPNLIRDRKYHLRLYRQCCSGRELVDGILALGLGVHSRSQVVGICQVLLDEGALCHVKHDWAFQDRDAQFYRFPGPEPEPVRTHEMEEELAEAVALLSQRGPDALLTVALRKPPGQRTDEELDLIFEELLHIKAVAHLSNSVKRELAAVLLFEPHSKAGTVLFSQGDKGTSWYIIWKGSVNVVTHGKGLVTTLHEGDDFGQLALVNDAPRAATIILREDNCHFLRVDKQDFNRIIKDVEAKTMRLEEHGKVVLVLERASQGAGPSRPPTPGRNRYTVMSGTPEKILELLLEAMGPDSSAHDPTETFLSDFLLTHRVFMPSAQLCAALLHHFHVEPAGGSEQERSTYVCNKRQQILRLVSQWVALYGSMLHTDPVATSFLQKLSDLVGRDTRLSNLLREQWPERRRCHRLENGCGNASPQMKARNLPVWLPNQDEPLPGSSCAIQVGDKVPYDICRPDHSVLTLQLPVTASVREVMAALAQEDGWTKGQVLVKVNSAGDAIGLQPDARGVATSLGLNERLFVVNPQEVHELIPHPDQLGPTVGSAEGLDLVSAKDLAGQLTDHDWSLFNSIHQVELIHYVLGPQHLRDVTTANLERFMRRFNELQYWVATELCLCPVPGPRAQLLRKFIKLAAHLKEQKNLNSFFAVMFGLSNSAISRLAHTWERLPHKVRKLYSALERLLDPSWNHRVYRLALAKLSPPVIPFMPLLLKDMTFIHEGNHTLVENLINFEKMRMMARAARMLHHCRSHNPVPLSPLRSRVSHLHEDSQVARISTCSEQSLSTRSPASTWAYVQQLKVIDNQRELSRLSRELEP

SEQ ID NO: 34573 - protein, 79 aa, Homo sapiens
  REGION 1..79: note = ENSP00000449905
MKVGWPGESCWQVGLAVEDSPALGAPRVGALPDVVPEGTLLNMVLRRMHRPRSCSYQLLLEHQRPSCIQGLRWPRSAHG

SEQ ID NO: 34574 - protein, 881 aa, Homo sapiens
  REGION 1..881: note = ENSP00000448619
MVLRRMHRPRSCSYQLLLEHQRPSCIQGLRWTPLTNSEESLDFSESLEQASTERVLRAGRQLHRHLLATCPNLIRDRKYHLRLYRQCCSGRELVDGILALGLGVHSRSQVVGICQVLLDEGALCHVKHDWAFQDRDAQFYRFPGPEPEPVRTHEMEEELAEAVALLSQRGPDALLTVALRKPPGQRTDEELDLIFEELLHIKAVAHLSNSVKRELAAVLLFEPHSKAGTVLFSQGDKGTSWYIIWKGSVNVVTHGKGLVTTLHEGDDFGQLALVNDAPRAATIILREDNCHFLRVDKQDFNRIIKDVEAKTMRLEEHGKVVLVLERASQGAGPSRPPTPGRNRYTVMSGTPEKILELLLEAMGPDSSAHDPTETFLSDFLLTHRVFMPSAQLCAALLHHFHVEPAGGSEQERSTYVCNKRQQILRLVSQWVALYGSMLHTDPVATSFLQKLSDLVGRDTRLSNLLREQWPERRRCHRLENGCGNASPQMKARNLPVWLPNQDEPLPGSSCAIQVGDKVPYDICRPDHSVLTLQLPVTASVREVMAALAQEDGWTKGQVLVKVNSAGDAIGLQPDARGVATSLGLNERLFVVNPQEVHELIPHPDQLGPTVGSAEGLDLVSAKDLAGQLTDHDWSLFNSIHQVELIHYVLGPQHLRDVTTANLERFMRRFNELQYWVATELCLCPVPGPRAQLLRKFIKLAAHLKEQKNLNSFFAVMFGLSNSAISRLAHTWERLPHKVRKLYSALERLLDPSWNHRVYRLALAKLSPPVIPFMPLLLKDMTFIHEGNHTLVENLINFEKMRMMARAARMLHHCRSHNPVPLSPLRSRVSHLHEDSQVARISTCSEQSLSTRSPASTWAYVQQLKVIDNQRELSRLSRELEP

SEQ ID NO: 34575 - protein, 923 aa, Homo sapiens; identical to SEQ ID NO: 34572
  REGION 1..923: note = ENSP00000373864

SEQ ID NO: 34576 - protein, 814 aa, Homo sapiens
  REGION 1..814: note = ENSP00000448480
MVLRRMHRPRSCSYQLLLEHQRPSCIQGLRWTPLTNSEESLDFSESLEQASTERVLRAGRQLHRHLLATCPNLIRDRKYHLRLYRQCCSGRELVDGILALGLGVHSRSQVVGICQVLLDEGALCHVKHDWAFQDRDAQFYRFPGPEPEPVRTHEMEEELAEAVALLSQRGPDALLTVALRKPPGQRTDEELDLIFEELLHIKAVAHLSNSVKRELAAVLLFEPHSKAGTVLFSQGDKGTSWYIIWKGSVNVVTHGKGLVTTLHEGDDFGQLALVNDAPRAATIILREDNCHFLRVDKQDFNRIIKDVEAKTMRLEEHGKVVLVLERASQGAGPSRPPTPGRNRYTVMSGTPEKILELLLEAMGPDSSAHDPTETFLSDFLLTHRVFMPSAQLCAALLHHFHVEPAGGSEQERSTYVCNKRQQILRLVSQWVALYGSMLHTDPVATSFLQKLSDLVGRDTRLSNLLREQWPERRRCHRLENGCGNASPQMKARNLPVWLPNQDEPLPGSSCAIQVGDKDAIGLQPDARGVATSLGLNERLFVVNPQEVHELIPHPDQLGPTVGSAEGLDLVSAKDLAGQLTDHDWSLFNSIHQVELIHYVLGPQHLRDVTTANLERFMRRFNELQYWVATELCLCPVPGPRAQLLRKFIKLAAHNSAISRLAHTWERLPHKVRKLYSALERLLDPSWNHRVYRLALAKLSPPVIPFMPLLLKDMTFIHEGNHTLVENLINFEKMRMMARAARMLHHCRSHNPVPLSPLRSRVSHLHEDSQVARISTCSEQSLSTRSPASTWAYVQQLKVIDNQRELSRLSRELEP

SEQ ID NO: 34577 - protein, 184 aa, Homo sapiens
  REGION 1..184: note = ENSP00000447691
  VARIANT 1: note = Any amino acid
XAIGLQPDARGVATSLGLNERLFVVNPQEVHELIPHPDQLGPTVGSAEGLDLVSAKDLAGQLTDHDWSLFNSIHQVELIHYVLGPQHLRDVTTANLERFMRRFNELQYWVATELCLCPVPGPRAQLLRKFIKLAAHLKEQKNLNSFFAVMFGLSNSAISRLAHTWERLPHKVRKLYSALERLLC

SEQ ID NO: 34578 - protein, 598 aa, Homo sapiens
  REGION 1..598: note = ENSP00000378764
MKVGWPGESCWQVGLAVEDSPALGAPRVGALPDVVPEGTLLNMVLRRMHRPRSCSYQLLLEHQRPSCIQGLRWTPLTNSEESLDFSESLEQASTERVLRAGRQLHRHLLATCPNLIRDRKYHLRLYRQCCSGRELVDGILALGLGVHSRSQVVGICQVLLDEGALCHVKHDWAFQDRDAQFYRFPGPEPEPVRTHEMEEELAEAVALLSQRGPDALLTVALRKPPGQRTDEELDLIFEELLHIKAVAHLSNSVKRELAAVLLFEPHSKAGTVLFSQGDKGTSWYIIWKGSVNVVTHGKGLVTTLHEGDDFGQLALVNDAPRAATIILREDNCHFLRVDKQDFNRIIKDVEAKTMRLEEHGKVVLVLERASQGAGPSRPPTPGRNRYTVMSGTPEKILELLLEAMGPDSSAHDPTETFLSDFLLTHRVFMPSAQLCAALLHHFHVEPAGGSEQERSTYVCNKRQQILRLVSQWVALYGSMLHTDPVATSFLQKLSDLVGRDTRLSNLLREQWPERRRCHRLENGCGNASPQMKVSAWPQFLSSAPPGLQAPPSPPDPEGLCGRGKLSSHRHTLGSLIGVHGALAACGALGQAVPGGAEA

SEQ ID NO: 34579 - protein, 108 aa, Homo sapiens
  REGION 1..108: note = ENSP00000449818
FPGPEPEPVRTHEMEEELAEAVALLSQRGPDALLTVALRKPPGQRTDEELDLIFEELLHIKAVAHLSNSVKRELAAVLLFEPHSKAGTVSRGTRALRGTLSGRDLSTW

SEQ ID NO: 34580 - protein, 222 aa, Homo sapiens
  REGION 1..222: note = ENSP00000446731
MVLRRMHRPRSCSYQLLLEHQRPSCIQGLRWTPLTNSEESLDFSESLEQASTERVLRAGRQLHRHLLATCPNLIRDRKYHLRLYRQCCSGRELVDGILALGLGVHSRSQVVGICQVLLDEGALCHVKHDWAFQDRDAQFYRFPGPEPEPVRTHEMEEELAEAVALLSQRGPDALLTVALRKPPGQRTDEELDLIFEELLHIKAVAHLSNSVKRELAAVLLFE

SEQ ID NO: 34581 - protein, 141 aa, Homo sapiens
  REGION 1..141: note = ENSP00000448804
MVLRRMHRPRSCSYQLLLEHQRPSCIQGLRWTPLTNSEESLDFSESLEQASTERVLRAGRQLHRHLLATCPNLIRDRKYHLRLYRQCCSGRELVDGILALGLGVHSRSQVVGICQVLLDEGALCHVKHDWAFQDRDAQFYR

SEQ ID NO: 34582 - protein, 881 aa, Homo sapiens; identical to SEQ ID NO: 34574
  REGION 1..881: note = ENSP00000384521

SEQ ID NO: 34583 - protein, 1011 aa, Homo sapiens
  REGION 1..1011: note = ENSP00000380271
MVAAHAAHSSSSAEWIACLDKRPLERSSEDVDIIFTRLKEVKAFEKFHPNLLHQICLCGYYENLEKGITLFRQGDIGTNWYAVLAGSLDVKVSETSSHQDAVTICTLGIGTAFGESILDNTPRHATIVTRESSELLRIEQKDFKALWEKYRQYMAGLLAPPYGVMETGSNNDRIPDKENTPLIEPHVPLRPANTITKVPSEKILRAGKILRNAILSRAPHMIRDRKYHLKTYRQCCVGTELVDWMMQQTPCVHSRTQAVGMWQVLLEDGVLNHVDQEHHFQDKYLFYRFLDDEHEDAPLPTEEEKKECDEELQDTMLLLSQMGPDAHMRMILRKPPGQRTVDDLEIIYEELLHIKALSHLSTTVKRELAGVLIFESHAKGGTVLFNQGEEGTSWYIILKGSVNVVIYGKGVVCTLHEGDDFGKLALVNDAPRAASIVLREDNCHFLRVDKEDFNRILRDVEANTVRLKEHDQDVLVLEKVPAGNRASNQGNSQPQQKYTVMSGTPEKILEHFLETIRLEATLNEATDSVLNDFIMMHCVFMPNTQLCPALVAHYHAQPSQGTEQEKMDYALNNKRRVIRLVLQWAAMYGDLLQEDDVSMAFLEEFYVSVSDDARMIAALKEQLPELEKIVKQISEDAKAPQKKHKVLLQQFNTGDERAQKRQPIRGSDEVLFKVYCMDHTYTTIRVPVATSVKEVISAVADKLGSGEGLIIVKMSSGGEKVVLKPNDVSVFTTLTINGRLFACPREQFDSLTPLPEQEGPTVGTVGTFELMSSKDLAYQMTIYDWELFNCVHELELIYHTFGRHNFKKTTANLDLFLRRFNEIQFWVVTEICLCSQLSKRVQLLKKFIKIAAHCKEYKNLNSFFAIVMGLSNVAVSRLALTWEKLPSKFKKFYAEFESLMDPSRNHRAYRLTVAKLEPPLIPFMPLLIKDMTFTHEGNKTFIDNLVNFEKMRMIANTARTVRYYRSQPFNPDAAQANKNHQDVRSYVRQLNVIDNQRTLSQMSHRLEPRRP

SEQ ID NO: 34584 - protein, 943 aa, Homo sapiens
  REGION 1..943: note = ENSP00000387104
MVAAHAAHSSSSAEWIACLDKRPLERSSEDVDIIFTRLKEVKAFEKFHPNLLHQICLCGYYENLEKGITLFRQGDIGTNWYAVLAGSLDVKVSETSSHQDAVTICTLGIGTAFGESILDNTPRHATIVTRESSELLRIEQKDFKALWEKYRQYMAGLLAPPYGVMETGSNNDRIPDKENTPLIEPHVPLRPANTITKVPSEKILRAGKILRNAILSRAPHMIRDRKYHLKTYRQCCVGTELVDWMMQQTPCVHSRTQAVGMWQVLLEDGVLNHVDQEHHFQDKYLFYRFLDDEHEDAPLPTEEEKKECDEELQDTMLLLSQMGPDAHMRMILRKPPGQRTVDDLEIIYEELLHIKALSHLSTTVKRELAGVLIFESHAKGGTVLFNQGEEGTSWYIILKGSVNVVIYGKGVVCTLHEGDDFGKLALVNDAPRAASIVLREDNCHFLRVDKEDFNRILRDVEANTVRLKEHDQDVLVLEKVPAGNRASNQGNSQPQQKYTVMSGTPEKILEHFLETIRLEATLNEATDSVLNDFIMMHCVFMPNTQLCPALVAHYHAQPSQGTEQEKMDYALNNKRRVIRLVLQWAAMYGDLLQEDDVSMAFLEEFYVSVSDDARMIAALKEQLPELEKIVKQISEDAKAPQKKHKVLLQQFNTGDERAQKRQPIRGSDEVLFKVYCMDHTYTTIRVPVATSVKEVISAVADKLGSGEGLIIVKMSSGGEKVVLKPNDVSVFTTLTINGRLFACPREQFDSLTPLPEQEGPTVGTVGTFELMSSKDLAYQMTIYDWELFNCVHELELIYHTFGRHNFKKTTANLDLFLRRFNEIQFWVVTEICLCSQLSKRVQLLKKFIKIAAHCKEYKNLNSFFAIVMGLSNVAVSRLALTWERMIANTARTVRYYRSQPFNPDAAQANKNHQDVRSYVRQLNVIDNQRTLSQMSHRLEPRRP

SEQ ID NO: 34585 - protein, 867 aa, Homo sapiens
  REGION 1..867: note = ENSP00000380276
MLYKKYRQYMAGLLAPPYGVMETGSNNDRIPDKENTPLIEPHVPLRPANTITKVPSEKILRAGKILRNAILSRAPHMIRDRKYHLKTYRQCCVGTELVDWMMQQTPCVHSRTQAVGMWQVLLEDGVLNHVDQEHHFQDKYLFYRFLDDEHEDAPLPTEEEKKECDEELQDTMLLLSQMGPDAHMRMILRKPPGQRTVDDLEIIYEELLHIKALSHLSTTVKRELAGVLIFESHAKGGTVLFNQGEEGTSWYIILKGSVNVVIYGKGVVCTLHEGDDFGKLALVNDAPRAASIVLREDNCHFLRVDKEDFNRILRDVEANTVRLKEHDQDVLVLEKVPAGNRASNQGNSQPQQKYTVMSGTPEKILEHFLETIRLEATLNEATDSVLNDFIMMHCVFMPNTQLCPALVAHYHAQPSQGTEQEKMDYALNNKRRVIRLVLQWAAMYGDLLQEDDVSMAFLEEFYVSVSDDARMIAALKEQLPELEKIVKQISEDAKAPQKKHKVLLQQFNTGDERAQKRQPIRGSDEVLFKVYCMDHTYTTIRVPVATSVKEVISAVADKLGSGEGLIIVKMSSGGEKVVLKPNDVSVFTTLTINGRLFACPREQFDSLTPLPEQEGPTVGTVGTFELMSSKDLAYQMTIYDWELFNCVHELELIYHTFGRHNFKKTTANLDLFLRRFNEIQFWVVTEICLCSQLSKRVQLLKKFIKIAAHCKEYKNLNSFFAIVMGLSNVAVSRLALTWEKLPSKFKKFYAEFESLMDPSRNHRAYRLTVAKLEPPLIPFMPLLIKDMTFTHEGNKTFIDNLVNFEKMRMIANTARTVRYYRSQPFNPDAAQANKNHQDVRSYVRQLNVIDNQRTLSQMSHRLEPRRP

SEQ ID NO: 34586 - protein, 187 aa, Homo sapiens
  REGION 1..187: note = ENSP00000380274
LMSSKDLAYQMTIYDWELFNCVHELELIYHTFGRHNFKKTTANLDLFLRRFNEIQFWVVTEICLCSQLSKRVQLLKKFIKIAAHCKEYKNLNSFFAIVMGLSNVAVSRLALTWEKLPSKFKKFYAEFESLMDPSRNHRAYRLTVAKLEPPLIPFMPLLIKDMTFTHEGNKTFIDNLVNFEKMVCAVL

SEQ ID NO: 34587 - protein, 791 aa, Homo sapiens
  REGION 1..791: note = ENSP00000438011
MIRDRKYHLKTYRQCCVGTELVDWMMQQTPCVHSRTQAVGMWQVLLEDGVLNHVDQEHHFQDKYLFYRFLDDEHEDAPLPTEEEKKECDEELQDTMLLLSQMGPDAHMRMILRKPPGQRTVDDLEIIYEELLHIKALSHLSTTVKRELAGVLIFESHAKGGTVLFNQGEEGTSWYIILKGSVNVVIYGKGVVCTLHEGDDFGKLALVNDAPRAASIVLREDNCHFLRVDKEDFNRILRDVEANTVRLKEHDQDVLVLEKVPAGNRASNQGNSQPQQKYTVMSGTPEKILEHFLETIRLEATLNEATDSVLNDFIMMHCVFMPNTQLCPALVAHYHAQPSQGTEQEKMDYALNNKRRVIRLVLQWAAMYGDLLQEDDVSMAFLEEFYVSVSDDARMIAALKEQLPELEKIVKQISEDAKAPQKKHKVLLQQFNTGDERAQKRQPIRGSDEVLFKVYCMDHTYTTIRVPVATSVKEVISAVADKLGSGEGLIIVKMSSGGEKVVLKPNDVSVFTTLTINGRLFACPREQFDSLTPLPEQEGPTVGTVGTFELMSSKDLAYQMTIYDWELFNCVHELELIYHTFGRHNFKKTTANLDLFLRRFNEIQFWVVTEICLCSQLSKRVQLLKKFIKIAAHCKEYKNLNSFFAIVMGLSNVAVSRLALTWEKLPSKFKKFYAEFESLMDPSRNHRAYRLTVAKLEPPLIPFMPLLIKDMTFTHEGNKTFIDNLVNFEKMRMIANTARTVRYYRSQPFNPDAAQANKNHQDVRSYVRQLNVIDNQRTLSQMSHRLEPRRP

SEQ ID NO: 34588 - protein, 858 aa, Homo sapiens
  REGION 1..858: note = ENSP00000440250
MAGLLAPPYGVMETGSNNDRIPDKENTPLIEPHVPLRPANTITKVPSEKILRAGKILRNAILSRAPHMIRDRKYHLKTYRQCCVGTELVDWMMQQTPCVHSRTQAVGMWQVLLEDGVLNHVDQEHHFQDKYLFYRFLDDEHEDAPLPTEEEKKECDEELQDTMLLLSQMGPDAHMRMILRKPPGQRTVDDLEIIYEELLHIKALSHLSTTVKRELAGVLIFESHAKGGTVLFNQGEEGTSWYIILKGSVNVVIYGKGVVCTLHEGDDFGKLALVNDAPRAASIVLREDNCHFLRVDKEDFNRILRDVEANTVRLKEHDQDVLVLEKVPAGNRASNQGNSQPQQKYTVMSGTPEKILEHFLETIRLEATLNEATDSVLNDFIMMHCVFMPNTQLCPALVAHYHAQPSQGTEQEKMDYALNNKRRVIRLVLQWAAMYGDLLQEDDVSMAFLEEFYVSVSDDARMIAALKEQLPELEKIVKQISEDAKAPQKKHKVLLQQFNTGDERAQKRQPIRGSDEVLFKVYCMDHTYTTIRVPVATSVKEVISAVADKLGSGEGLIIVKMSSGGEKVVLKPNDVSVFTTLTINGRLFACPREQFDSLTPLPEQEGPTVGTVGTFELMSSKDLAYQMTIYDWELFNCVHELELIYHTFGRHNFKKTTANLDLFLRRFNEIQFWVVTEICLCSQLSKRVQLLKKFIKIAAHCKEYKNLNSFFAIVMGLSNVAVSRLALTWEKLPSKFKKFYAEFESLMDPSRNHRAYRLTVAKLEPPLIPFMPLLIKDMTFTHEGNKTFIDNLVNFEKMRMIANTARTVRYYRSQPFNPDAAQANKNHQDVRSYVRQLNVIDNQRTLSQMSHRLEPRRP

SEQ ID NO: 34589 - protein, 840 aa, Homo sapiens
  REGION 1..840: note = ENSP00000440135
MAGLLAPPYGVMETGSNNDRIPDKENVPSEKILRAGKILRNAILSRAPHMIRDRKYHLKTYRQCCVGTELVDWMMQQTPCVHSRTQAVGMWQVLLEDGVLNHVDQEHHFQDKYLFYRFLDDEHEDAPLPTEEEKKECDEELQDTMLLLSQMGPDAHMRMILRKPPGQRTVDDLEIIYEELLHIKALSHLSTTVKRELAGVLIFESHAKGGTVLFNQGEEGTSWYIILKGSVNVVIYGKGVVCTLHEGDDFGKLALVNDAPRAASIVLREDNCHFLRVDKEDFNRILRDVEANTVRLKEHDQDVLVLEKVPAGNRASNQGNSQPQQKYTVMSGTPEKILEHFLETIRLEATLNEATDSVLNDFIMMHCVFMPNTQLCPALVAHYHAQPSQGTEQEKMDYALNNKRRVIRLVLQWAAMYGDLLQEDDVSMAFLEEFYVSVSDDARMIAALKEQLPELEKIVKQISEDAKAPQKKHKVLLQQFNTGDERAQKRQPIRGSDEVLFKVYCMDHTYTTIRVPVATSVKEVISAVADKLGSGEGLIIVKMSSGGEKVVLKPNDVSVFTTLTINGRLFACPREQFDSLTPLPEQEGPTVGTVGTFELMSSKDLAYQMTIYDWELFNCVHELELIYHTFGRHNFKKTTANLDLFLRRFNEIQFWVVTEICLCSQLSKRVQLLKKFIKIAAHCKEYKNLNSFFAIVMGLSNVAVSRLALTWEKLPSKFKKFYAEFESLMDPSRNHRAYRLTVAKLEPPLIPFMPLLIKDMTFTHEGNKTFIDNLVNFEKMRMIANTARTVRYYRSQPFNPDAAQANKNHQDVRSYVRQLNVIDNQRTLSQMSHRLEPRRP

SEQ ID NO: 34590 - protein, 402 aa, Homo sapiens
  REGION 1..402: note = ENSP00000373282
MTTSGHACPVPAVNGHMTHYPATPYPLLFPPVIGGLSLPPLHGLHGHPPPSGCSTPSPATIETQSTSSEELVPSPPSPLPPPRVYKPCFVCQDKSSGYHYGVSACEGCKGFFRRSIQKNMIYTCHRDKNCVINKVTRNRCQYCRLQKCFEVGMSKESVRNDRNKKKKETSKQECTESYEMTAELDDLTEKIRKAHQETFPSLCQLGKYTTNSSADHRVRLDLGLWDKFSELATKCIIKIVEFAKRLPGFTGLTIADQITLLKAACLDILILRICTRYTPEQDTMTFSDGLTLNRTQMHNAGFGPLTDLVFTFANQLLPLEMDDTETGLLSAICLICGDRQDLEEPTKVDKLQEPLLEALKIYIRKRRPSKPHMFPKILMKITDLRSISAKGAERVITLKMEI

SEQ ID NO: 34591 - protein, 336 aa, Homo sapiens
  REGION 1..336: note = ENSP00000398840
MIYTCHRDKNCVINKVTRNRCQYCRLQKCFEVGMSKESVRNDRNKKKKETSKQECTESYEMTAELDDLTEKIRKAHQETFPSLCQLGKYTTNSSADHRVRLDLGLWDKFSELATKCIIKIVEFAKRLPGFTGLTIADQITLLKAACLDILILRICTRYTPEQDTMTFSDGLTLNRTQMHNAGFGPLTDLVFTFANQLLPLEMDDTETGLLSAICLICGDRQDLEEPTKVDKLQEPLLEALKIYIRKRRPSKPHMFPKILMKITDLRSISAKGAERVITLKMEIPGSMPPLIQEMLENSEGHEPLTPSSSGNTAEHSPSISPSSVENSGVSQSPLVQ

SEQ ID NO: 34592 - protein, 448 aa, Homo sapiens
  REGION 1..448: note = ENSP00000332296
MFDCMDVLSVSPGQILDFYTASPSSCMLQEKALKACFSGLTQTEWQHRHTAQSIETQSTSSEELVPSPPSPLPPPRVYKPCFVCQDKSSGYHYGVSACEGCKGFFRRSIQKNMIYTCHRDKNCVINKVTRNRCQYCRLQKCFEVGMSKESVRNDRNKKKKETSKQECTESYEMTAELDDLTEKIRKAHQETFPSLCQLGKYTTNSSADHRVRLDLGLWDKFSELATKCIIKIVEFAKRLPGFTGLTIADQITLLKAACLDILILRICTRYTPEQDTMTFSDGLTLNRTQMHNAGFGPLTDLVFTFANQLLPLEMDDTETGLLSAICLICGDRQDLEEPTKVDKLQEPLLEALKIYIRKRRPSKPHMFPKILMKITDLRSISAKGAERVITLKMEIPGSMPPLIQEMLENSEGHEPLTPSSSGNTAEHSPSISPSSVENSGVSQSPLVQ

SEQ ID NO: 34593 - protein, 336 aa, Homo sapiens; identical to SEQ ID NO: 34591
  REGION 1..336: note = ENSP00000391391

SEQ ID NO: 34594 - protein, 806 aa, Homo sapiens
  REGION 1..806: note = ENSP00000450244
MAKSSSLNVRVVEGRALPAKDVSGSSDPYCLVKVDDEVVARTATVWRSLGPFWGEEYTVHLPLDFHQLAFYVLDEDTVGHDDIIGKISLSREAITADPRGIDSWINLSRVDPDAEVQGEICLSVQMLEDGQGRCLRCHVLQARDLAPRDISGTSDPFARVFWGSQSLETSTIKKTRFPHWDEVLELREMPGAPSPLRVELWDWDMVGKNDFLGMVEFSPKTLQQKPPKGWFRLLPFPRAEEDSGGNLGALRVKVRLIEDRVLPSQCYQPLMELLMESVQGPAEEDTASPLALLEELTLGDCRQDLATKLVKLFLGRGLAGRFLDYLTRREVARTMDPNTLFRSNSLASKSMEQFMKLVGMPYLHEVLKPVISRVFEEKKYMELDPCKMDLGRTRRISFKGALSEEQMRETSLGLLTGYLGPIVDAIVGSVGRCPPAMRLAFKQLHRRVEERFPQAEHQQDVKYLAISGFLFLRFFAPAILTPKLFDLRDQHADPQTSRSLLLLAKAVQSIGNLGQQLGQGKELWMAPLHPFLLQCVSRVRDFLDRLVDVDGDEEAGVPARALFPPSAIVREGYLLKRKEEPAGLATRFAFKKRYVWLSGETLSFSKSPEWQMCHSIPVSHIRAVERVDEGAFQLPHVMQVVTQDGTGALHTTYLQCKNVNELNQWLSALRKASAPNPNKLAACHPGAFRSARWTCCLQAERSAAGCSRTHSAVTLGDWSDPLDPDAEAQTVYRQLLLGRDQLRLKLLEDSNMDTTLEADTGACPEVLARQRAATARLLEVLADLDRAHEEFQQQERGKAALGPLGP

SEQ ID NO: 34595 - protein, 804 aa, Homo sapiens
  REGION 1..804: note = ENSP00000261729
MAKSSSLNVRVVEGRALPAKDVSGSSDPYCLVKVDDEVVARTATVWRSLGPFWGEEYTVHLPLDFHQLAFYVLDEDTVGHDDIIGKISLSREAITADPRGIDSWINLSRVDPDAEVQGEICLSVQMLEDGQGRCLRCHVLQARDLAPRDISGTSDPFARVFWGSQSLETSTIKKTRFPHWDEVLELREMPGAPSPLRVELWDWDMVGKNDFLGMVEFSPKTLQQKPPKGWFRLLPFPRAEEDSGGNLGALRVKVRLIEDRVLPSQCYQPLMELLMESVQGPAEEDTASPLALLEELTLGDCRQDLATKLVKLFLGRGLAGRFLDYLTRREVARTMDPNTLFRSNSLASKSMEQFMKLVGMPYLHEVLKPVISRVFEEKKYMELDPCKMDLGRTRRISFKGALSEEQMRETSLGLLTGYLGPIVDAIVGSVGRCPPAMRLAFKQLHRRVEERFPQAEHQDVKYLAISGFLFLRFFAPAILTPKLFDLRDQHADPQTSRSLLLLAKAVQSIGNLGQQLGQGKELWMAPLHPFLLQCVSRVRDFLDRLVDVDGDEAGVPARALFPPSAIVREGYLLKRKEEPAGLATRFAFKKRYVWLSGETLSFSKSPEWQMCHSIPVSHIRAVERVDEGAFQLPHVMQVVTQDGTGALHTTYLQCKNVNELNQWLSALRKASAPNPNKLAACHPGAFRSARWTCCLQAERSAAGCSRTHSAVTLGDWSDPLDPDAEAQTVYRQLLLGRDQLRLKLLEDSNMDTTLEADTGACPEVLARQRAATARLLEVLADLDRAHEEFQQQERGKAALGPLGP

SEQ ID NO: 34596 - protein, 776 aa, Homo sapiens
  REGION 1..776: note = ENSP00000395920
MAKSSSLNVRVVEGRALPAKDVSGSSDPYCLVKVDDEVVARTATVWRSLGPFWGEEYTVHLPLDFHQLAFYVLDEDTVGHDDIIGKISLSREAITADPRGIDSWINLSRVDPDAEVQGEICLSVQMLEDGQGRCLRCHVLQARDLAPRDISGTSDPFARVFWGSQSLETSTIKKTRFPHWDEVLELREMPGAPSPLRVELWDWDMVGKNDFLGMVEFSPKTLQQKPPKGWFRLLPFPRAEEDSGGNLGALRVKVRLIEDRVLPSQCYQPLMELLMESVQGPAEEDTASPLALLEELTLGDCRQDLATKLVKLFLGRGLAGRFLDYLTRREVARTMDPNTLFRSNSLASKSMEQFMKLVGMPYLHEVLKPVISRVFEEKKYMELDPCKMDLGRTRRISFKGALSEEQMRETSLGLLTGYLGPIVDAIVGSVGRCPPAMRLAFKQLHRRVEERFPQAEHQDVKYLAISGFLFLRFFAPAILTPKLFDLRDQHADPQTSRSLLLLAKAVQSIGNLGQQLGQGKELWMAPLHPFLLQCVSRVRDFLDRLVDVDGDEAGVPARALFPPSAIVREGYLLKRKEEPAGLATRFAFKKRYVWLSGETLSFSKSPEWQVVTQDGTGALHTTYLQCKNVNELNQWLSALRKASAPNPNKLAACHPGAFRSARWTCCLQAERSAAGCSRTHSAVTLGDWSDPLDPDAEAQTVYRQLLLGRDQLRLKLLEDSNMDTTLEADTGACPEVLARQRAATARLLEVLADLDRAHEEFQQQERGKAALGPLGP

SEQ ID NO: 34597 - protein, 805 aa, Homo sapiens
  REGION 1..805: note = ENSP00000448510
MAKSSSLNVRVVEGRALPAKDVSGSSDPYCLVKVDDEVVARTATVWRSLGPFWGEEYTVHLPLDFHQLAFYVLDEDTVGHDDIIGKISLSREAITADPRGIDSWINLSRVDPDAEVQGEICLSVQMLEDGQGRCLRCHVLQARDLAPRDISGTSDPFARVFWGSQSLETSTIKKTRFPHWDEVLELREMPGAPSPLRVELWDWDMVGKNDFLGMVEFSPKTLQQKPPKGWFRLLPFPRAEEDSGGNLGALRVKVRLIEDRVLPSQCYQPLMELLMESVQGPAEEDTASPLALLEELTLGDCRQDLATKLVKLFLGRGLAGRFLDYLTRREVARTMDPNTLFRSNSLASKSMEQFMKLVGMPYLHEVLKPVISRVFEEKKYMELDPCKMDLGRTRRISFKGALSEEQMRETSLGLLTGYLGPIVDAIVGSVGRCPPAMRLAFKQLHRRVEERFPQAEHQDVKYLAISGFLFLRFFAPAILTPKLFDLRDQHADPQTSRSLLLLAKAVQSIGNLGQQLGQGKELWMAPLHPFLLQCVSRVRDFLDRLVDVDGDEEAGVPARALFPPSAIVREGYLLKRKEEPAGLATRFAFKKRYVWLSGETLSFSKSPEWQMCHSIPVSHIRAVERVDEGAFQLPHVMQVVTQDGTGALHTTYLQCKNVNELNQWLSALRKASAPNPNKLAACHPGAFRSARWTCCLQAERSAAGCSRTHSAVTLGDWSDPLDPDAEAQTVYRQLLLGRDQLRLKLLEDSNMDTTLEADTGACPEVLARQRAATARLLEVLADLDRAHEEFQQQERGKAALGPLGP

SEQ ID NO: 34598 - protein, 1280 aa, Homo sapiens
  REGION 1..1280: note = ENSP00000356621
MELSPSSGGAAEALSWPEMFPALESDSPLPPEDLDAVVPVSGAVAGGMLDRILLESVCQQQSWVRVYDVKGPPTHRLSCGQSPYTETTTWERKYCILTDSQLVLLNKEKEIPVEGGQEQQTDSTKGRCLRRTVSVPSEGQFPEYPPEGATKLEVPAERSPRRRSISGTSTSEKPNSMDTANTSPFKVPGFFSKRLKGSIKRTKSQSKLDRNTSFRLPSLRSTDDRSRGLPKLKESRSHESLLSPCSTVECLDLGRGEPVSVKPLHSSILGQDFCFEVTYLSGSKCFSCNSASERDKWMENLRRTVQPNKDNCRRAENVLRLWIIEAKDLAPKKKYFCELCLDDTLFARTTSKTKADNIFWGEHFEFFSLPPLHSITVHIYKDVEKKKKKDKNNYVGLVNIPTASVTGRQFVEKWYPVSTPTPNKGKTGGPSIRIKSRFQTITILPMEQYKEFAEFVTSNYTMLCSVLEPVISVRNKEELACALVHILQSTGRAKDFLTDLVMSEVDRCGEHDVLIFRENTIATKSIEEYLKLVGQQYLHDALGEFIKALYESDENCEVDPSKCSSSELIDHQSNLKMCCELAFCKIINSYCVFPRELKEVFASWKQQCLNRGKQDISERLISASLFLRFLCPAIMSPSLFNLMQEYPDDRTSRTLTLIAKVIQNLANFAKFGNKEEYMAFMNDFLEHEWGGMKRFLLEISNPDTISNTPGFDGYIDLGRELSVLHSLLWEVVSQLDKATVAKLGPLPRVLADITKSLTNPTPIQQQLRRFTEHNSSPNVSGSLSSGLQKIFEDPTDSDLHKLKSPSQDNTDSYFRGKTLLLVQQASSQSMTYSEKDERESSLPNGRSVSLMDLQDTHAAQVEHASVMLDVPIRLTGSQLSITQVASIKQLRETQSTPQSAPQVRRPLHPALNQPGGLQPLSFQNPVYHLNNPIPAMPKASIDSSLENLSTASSRSQSNSEDFKLSGPSNSSMEDFTKRSTQSEDFSRRHTVPDRHIPLALPRQNSTGQAQIRKVDQGGLGARAKAPPSLPHSASLRSTGSMSVVSAALVAEPVQNGSRSRQQSSSSRESPVPKVRAIQRQQTQQVQSPVDSATMSPVERTAAWVLNNGQYEEDVEETEQNLDEAKHAEKYEQEITKLKERLRVSSRRLEEYERRLLVQEQQMQKLLLEYKARLEDSEERLRRQQEEKDSQMKSIISRLMAVEEELKKDHAEMQAVIDAKQKIIDAQEKRIVSLDSANTRLMSALTQVKERYSMQVRNGISPTNPTKLSITENGEFKNSSC

SEQ ID NO: 34599 - protein, 1139 aa, Homo sapiens
  REGION 1..1139: note = ENSP00000420558
MQTPEVPAERSPRRRSISGTSTSEKPNSMDTANTSPFKVPGFFSKRLKGSIKRTKSQSKLDRNTSFRLPSLRSTDDRSRGLPKLKESRSHESLLSPCSTVECLDLGRGEPVSVKPLHSSILGQDFCFEVTYLSGSKCFSCNSASERDKWMENLRRTVQPNKDNCRRAENVLRLWIIEAKDLAPKKKYFCELCLDDTLFARTTSKTKADNIFWGEHFEFFSLPPLHSITVHIYKDVEKKKKKDKNNYVGLVNIPTASVTGRQFVEKWYPVSTPTPNKGKTGGPSIRIKSRFQTITILPMEQYKEFAEFVTSNYTMLCSVLEPVISVRNKEELACALVHILQSTGRAKDFLTDLVMSEVDRCGEHDVLIFRENTIATKSIEEYLKLVGQQYLHDALGEFIKALYESDENCEVDPSKCSSSELIDHQSNLKMCCELAFCKIINSYCVFPRELKEVFASWKQQCLNRGKQDISERLISASLFLRFLCPAIMSPSLFNLMQEYPDDRTSRTLTLIAKVIQNLANFAKFGNKEEYMAFMNDFLEHEWGGMKRFLLEISNPDTISNTPGFDGYIDLGRELSVLHSLLWEVVSQLDKGENSFLQATVAKLGPLPRVLADITKSLTNPTPIQQQLRRFTEHNSSPNVSGSLSSGLQKIFEDPTDSDLHKLKSPSQDNTDSYFRGKTLLLVQQASSQSMTYSEKDERESSLPNGRSVSLMDLQDTHAAQVEHASVMLDVPIRLTGSQLSITQVASIKQLRETQSTPQSAPQVRRPLHPALNQPGGLQPLSFQNPVYHLNNPIPAMPKASIDSSLENLSTASSRSQSNSEDFKLSGPSNSSMEDFTKRSTQSEDFSRRHTVPDRHIPLALPRQNSTGQAQIRKVDQGGLGARAKAPPSLPHSASLRSTGSMSVVSAALVAEPVQNGSRSRQQSSSSRESPVPKVRAIQRQQTQQVQSPVDSATMSPVERTAAWVLNNGQYEEDVEETEQNLDEAKHAEKYEQEITKLKERLRVSSRRLEEYERRLLVQEQQMQKLLLEYKARLEDSEERLRRQQEEKDSQMKSIISRLMAVEEELKKDHAEMQAVIDAKQKIIDAQEKRIVSLDSANTRLMSALTQVKERYSMQVRNGISPTNPTKLSITENGEFKNSSC

SEQ ID NO: 34600 - protein, 693 aa, Homo sapiens
  REGION 1..693: note = ENSP00000402897
  VARIANT 1: note = Any amino acid
XEVFASWKQQCLNRGKQDISERLISASLFLRFLCPAIMSPSLFNLMQEYPDDRTSRTLTLIAKVIQNLANFAKFGNKEEYMAFMNDFLEHEWGGMKRFLLEISNPDTISNTPGFDGYIDLGRELSVLHSLLWEVVSQLDKGENSFLQATVAKLGPLPRVLADITKSLTNPTPIQQQLRRFTEHNSSPNVSGSLSSGLQKIFEDPTDSDLHKLKSPSQDNTDSYFRGKTLLLVQQASSQSMTYSEKDERESSLPNGRSVSLMDLQDTHAAQVEHASVMLDVPIRLTGSQLSITQVASIKQLRETQSTPQSAPQVRRPLHPALNQPGGLQPLSFQNPVYHLNNPIPAMPKASIDSSLENLSTASSRSQSNSEDFKLSGPSNSSMEDFTKRSTQSEDFSRRHTVPDRHIPLALPRQNSTGQAQIRKVDQGGLGARAKAPPSLPHSASLRSTGSMSVVSAALVAEPVQNGSRSRQQSSSSRESPVPKVRAIQRQQTQQVQSPVDSATMSPVERTAAWVLNNGQYEEDVEETEQNLDEAKHAEKYEQEITKLKERLRVSSRRLEEYERRLLVQEQQMQKLLLEYKARLEDSEERLRRQQEEKDSQMKSIISRLMAVEEELKKDHAEMQAVIDAKQKIIDAQVINGDEIIQTGKTDRVPGFSQHQTDERADPSEGAVQHAGPQWHLPHQPHQAFHHGEW

SEQ ID NO: 34601 - protein, 472 aa, Homo sapiens
  REGION 1..472: note = ENSP00000425393
MPQTPPFSAMFDSSGYNRNLYQSAEDSCGGLYYHDNNLLSGSLEALIQHLVPNVDYYPDRTYIFTFLLSSRLFMHPYELMAKVCHLCVEHQRLSDPDSDKNQMRKIAPKILQLLTEWTETFPYDFRDERMMRNLKDLAHRIASGEETYRKNVQQMMQCLIRKLAALSQYEEVLAKISSTSTDRLTVLKTKPQSIQRDIITVCNDPYTLAQQLTHIELERLNYIGPEEFVQAFVQKDPLDNDKSCYSERKKTRNLEAYVEWFNRLSYLVATEICMPVKKKHRARMIEYFIDVARECFNIGNFNSLMAIISGMNMSPVSRLKKTWAKVKTAKFDILEHQMDPSSNFYNYRTALRGAAQRSLTAHSSREKIVIPFFSLLIKDIYFLNEGCANRLPNGHVNFEKFWELAKQVSEFMTWKQVECPFERDRKILQYLLTVPVFSEDALYLASYESEGPENHIEKDRWKSLRSSLLGRV

SEQ ID NO: 34602 - protein, 473 aa, Homo sapiens
  REGION 1..473: note = ENSP00000264400
MPQTPPFSAMFDSSGYNRNLYQSAEDSCGGLYYHDNNLLSGSLEALIQHLVPNVDYYPDRTYIFTFLLSSRLFMHPYELMAKVCHLCVEHQRLSDPDSDKNQMRKIAPKILQLLTEWTETFPYDFRDERMMRNLKDLAHRIASGEEQTYRKNVQQMMQCLIRKLAALSQYEEVLAKISSTSTDRLTVLKTKPQSIQRDIITVCNDPYTLAQQLTHIELERLNYIGPEEFVQAFVQKDPLDNDKSCYSERKKTRNLEAYVEWFNRLSYLVATEICMPVKKKHRARMIEYFIDVARECFNIGNFNSLMAIISGMNMSPVSRLKKTWAKVKTAKFDILEHQMDPSSNFYNYRTALRGAAQRSLTAHSSREKIVIPFFSLLIKDIYFLNEGCANRLPNGHVNFEKFWELAKQVSEFMTWKQVECPFERDRKILQYLLTVPVFSEDALYLASYESEGPENHIEKDRWKSLRSSLLGRV

SEQ ID NO: 34603 - protein, 560 aa, Homo sapiens
  REGION 1..560: note = ENSP00000490436
MAKFLAELLGCTLPSKGASPMFESKSHSRVGLKSSTKQKTTIFSTLASEKSLSDCKKEQQWKPSMYSSITPVCFPSPLIEKPIGKESMPQTPPFSAMFDSSGYNRNLYQSAEDSCGGLYYHDNNLLSGSLEALIQHLVPNVDYYPDRTYIFTFLLSSRLFMHPYELMAKVCHLCVEHQRLSDPDSDKNQMRKIAPKILQLLTEWTETFPYDFRDERMMRNLKDLAHRIASGEEQTYRKNVQQMMQCLIRKLAALSQYEEVLAKISSTSTDRLTVLKTKPQSIQRDIITVCNDPYTLAQQLTHIELERLNYIGPEEFVQAFVQKDPLDNDKSCYSERKKTRNLEAYVEWFNRLSYLVATEICMPVKKKHRARMIEYFIDVARECFNIGNFNSLMAIISGMNMSPVSRLKKTWAKVKTAKFDILEHQMDPSSNFYNYRTALRGAAQRSLTAHSSREKIVIPFFSLLIKDIYFLNEGCANRLPNGHVNFEKFWELAKQVSEFMTWKQVECPFERDRKILQYLLTVPVFSEDALYLASYESEGPENHIEKDRWKSLRSSLLGRV

SEQ ID NO: 34604 - protein, 431 aa, Homo sapiens
  REGION 1..431: note = ENSP00000338437
MPQTPPFSAMFDSSGYNRNLYQSAEDSCGGLYYHDNNLLSGSLEALIQHLVPNVDYYPDNQMRKIAPKILQLLTEWTETFPYDFRDERMMRNLKDLAHRIASGEETYRKNVQQMMQCLIRKLAALSQYEEVLAKISSTSTDRLTVLKTKPQSIQRDIITVCNDPYTLAQQLTHIELERLNYIGPEEFVQAFVQKDPLDNDKSCYSERKKTRNLEAYVEWFNRLSYLVATEICMPVKKKHRARMIEYFIDVARECFNIGNFNSLMAIISGMNMSPVSRLKKTWAKVKTAKFDILEHQMDPSSNFYNYRTALRGAAQRSLTAHSSREKIVIPFFSLLIKDIYFLNEGCANRLPNGHVNFEKFWELAKQVSEFMTWKQVECPFERDRKILQYLLTVPVFSEDALYLASYESEGPENHIEKDRWKSLRSSLLGRV

SEQ ID NO: 34605 - protein, 232 aa, Homo sapiens
  REGION 1..232: note = ENSP00000426929
MMQCLIRKLAALSQYEEVLAKISSTSTDRLTVLKTKPQSIQRDIITVCNDPYTLAQQLTHIELERLNYIGPEEFVQAFVQKDPLDNDKSCYSERKKTRNLEAYVEWFNRLSYLVATEICMPVKKKHRARMIEYFIDVARECFNIGNFNSLMAIISGMNMSPVSRLKKTWAKVKTAKFDILEHQMDPSSNFYNYRTALRGAAQRSLTAHSSREKIVIPFFSLLIKDIYFLNEG

SEQ ID NO: 34606 - protein, 210 aa, Homo sapiens
  REGION 1..210: note = ENSP00000398763
MPQTPPFSAMFDSSGYNRNLYQSAEDSCGGLYYHDNNLLSGSLEALIQHLVPNVDYYPDRTYIFTFLLSSRLFMHPYELMAKVCHLCVEHQRLSDPDSDKNQMRKIAPKILQLLTEWTETFPYDFRDERMMRNLKDLAHRIASGEEVGNLNLARLLEFPGRAWVGNGAELCILISTASSLFCLWASPPHHILVYLVCQVRMIIPSHFKGI

SEQ ID NO: 34607 - protein, 74 aa, Homo sapiens
  REGION 1..74: note = ENSP00000476065
MAKFLAELLGCTLPSKGASPMFESKSHSRVGLKSSTKQKTTIFSTLASEKSLSDCKKIIEPGHKETFVLVQVTQ

SEQ ID NO: 34608 - protein, 119 aa, Homo sapiens
  REGION 1..119: note = ENSP00000490814
MAKFLAELLGCTLPSKGASPMFESKSHSRVGLKSSTKQKTTIFSTLASEKSLSDCKKEQQWKPSMYSSITPVCFPSPLIEKPIGKVRMNLLLSDTMIRASWLLFLFALSYFGEIIKLIL

SEQ ID NO: 34609 - protein, 73 aa, Homo sapiens
  REGION 1..73: note = ENSP00000489822
MAKFLAELLGCTLPSKGASPMFESKSHSRVGLKSSTKQKTTIFSTLASEKSLSDCKKRLCSLPRGVSQWAEEA

SEQ ID NO: 34610 - protein, 80 aa, Homo sapiens
  REGION 1..80: note = ENSP00000490663
MAKFLAELLGCTLPSKGASPMFESKSHSRVGLKSSTKQKFMYSSSCSFLRSHGRPPFSAHWPVRSPYLTAKRGCVPCHVG

SEQ ID NO: 34611 - protein, 210 aa, Homo sapiens; identical to SEQ ID NO: 34606
  REGION 1..210: note = ENSP00000484927

SEQ ID NO: 34612 - protein, 1257 aa, Homo sapiens
  REGION 1..1257: note = ENSP00000452781
MQKGIRLNDGHVASLGLLARKDGTRKGYLSKRSSDNTKWQTKWFALLQNLLFYFESDSSSRPSGLYLLEGCVCDRAPSPKPALSAKEPLEKQHYFTVNFSHENQKALELRTEDAKDCDEWVAAIAHASYRTLATEHEALMQKYLHLLQIVETEKTVAKQLRQQIEDGEIEIERLKAEITSLLKDNERIQSTQTVAPNDEDSDIKKIKKVQSFLRGWLCRRKWKTIIQDYIRSPHADSMRKRNQVVFSMLEAEAEYVQQLHILVNNFLRPLRMAASSKKPPITHDDVSSIFLNSETIMFLHQIFYQGLKARISSWPTLVLADLFDILLPMLNIYQEFVRNHQYSLQILAHCKQNRDFDKLLKHYEAKPDCEERTLETFLTYPMFQIPRYILTLHELLAHTPHEHVERNSLDYAKSKLEELSRIMHDEVSETENIRKNLAIERMIIEGCEILLDTSQTFVRQGSLIQVPMSEKGKITRGRLGSLSLKKEGERQCFLFSKHLIICTRGSGGKLHLTKNGVISLIDCTLLEEPESTEEEAKGSGQDIDHLDFKIGVEPKDSPPFTVILVASSRQEKAAWTSDISQCVDNIRCNGLMMNAFEENSKVTVPQMIKSDASLYCDDVDIRFSKTMNSCKVLQIRYASVERLLERLTDLRFLSIDFLNTFLHSYRVFTTAIVVLDKLITIYKKPISAIPARSLELLFASGQNNKLLYGEPPKSPRATRKFSSPPPLSITKTSSPSRRRKLSLNIPIITGGKALDLAALSCNSNGYTSMYSAMSPFSKATLDTSKLYVSSSFTNKIPDEGDTTPEKPEDPSALSKQSSEVSMREESDIDQNQSDDGDTETSPTKSPTTPKSVKNKNSSEFPLFSYNNGVVMTSCRELDNNRSALSAASAFAIATAGANEGTPNKEKYRRMSLASAGFPPDQRNGDKEFVIRRAATNRVLNVLRHWVSKHSQDFETNDELKCKVIGFLEEVMHDPELLTQERKAAANIIRTLTQEDPGDNQITLEEITQMAEGVKAEPFENHSALEIAEQLTLLDHLVFKKIPYEEFFGQGWMKLEKNERTPYIMKTTKHFNDISNLIASEIIRNEDINARVSAIEKWVAVADICRCLHNYNAVLEITSSMNRSAIFRLKKTWLKVSKQTKALIDKLQKLVSSEGRFKNLREALKNCDPPCVPYLGMYLTDLAFIEEGTPNYTEDGLVNFSKMRMISHIIREIRQFQQTAYKIEHQAKVTQYLLDQSFVMDEESLYESSLRIEPKLPT

SEQ ID NO: 34613 - protein, 1273 aa, Homo sapiens
  REGION 1..1273: note = ENSP00000405963
MQKGIRLNDGHVASLGLLARKDGTRKGYLSKRSSDNTKWQTKWFALLQNLLFYFESDSSSRPSGLYLLEGCVCDRAPSPKPALSAKEPLEKQHYFTVNFSHENQKALELRTEDAKDCDEWVAAIAHASYRTLATEHEALMQKYLHLLQIVETEKTVAKQLRQQIEDGEIEIERLKAEITSLLKDNERIQSTQTVAPNDEDSDIKKIKKVQSFLRGWLCRRKWKTIIQDYIRSPHADSMRKRNQVVFSMLEAEAEYVQQLHILVNNFLRPLRMAASSKKPPITHDDVSSIFLNSETIMFLHQIFYQGLKARISSWPTLVLADLFDILLPMLNIYQEFVRNHQYSLQILAHCKQNRDFDKLLKHYEAKPDCEERTLETFLTYPMFQIPRYILTLHELLAHTPHEHVERNSLDYAKSKLEELSRIMHDEVSETENIRKNLAIERMIIEGCEILLDTSQTFVRQGSLIQVPMSEKGKITRGRLGSLSLKKEGERQCFLFSKHLIICTRGSGGKLHLTKNGVISLIDCTLLEEPESTEEEAKGSGQDIDHLDFKIGVEPKDSPPFTVILVASSRQEKAAWTSDISQCVDNIRCNGLMMNAFEENSKVTVPQMIKRTREGTREAEMSRSDASLYCDDVDIRFSKTMNSCKVLQIRYASVERLLERLTDLRFLSIDFLNTFLHSYRVFTTAIVVLDKLITIYKKPISAIPARWLRSLELLFASGQNNKLLYGEPPKSPRATRKFSSPPPLSITKTSSPSRRRKLSLNIPIITGGKALDLAALSCNSNGYTSMYSAMSPFSKATLDTSKLYVSSSFTNKIPDEGDTTPEKPEDPSALSKQSSEVSMREESDIDQNQSDDGDTETSPTKSPTTPKSVKNKNSSEFPLFSYNNGVVMTSCRELDNNRSALSAASAFAIATAGANEGTPNKEKYRRMSLASAGFPPDQRNGDKEFVIRRAATNRVLNVLRHWVSKHSQDFETNDELKCKVIGFLEEVMHDPELLTQERKAAANIIRTLTQEDPGDNQITLEEITQMAEGVKAEPFENHSALEIAEQLTLLDHLVFKKIPYEEFFGQGWMKLEKNERTPYIMKTTKHFNDISNLIASEIIRNEDINARVSAIEKWVAVADICRCLHNYNAVLEITSSMNRSAIFRLKKTWLKVSKQTKALIDKLQKLVSSEGRFKNLREALKNCDPPCVPYLGMYLTDLAFIEEGTPNYTEDGLVNFSKMRMISHIIREIRQFQQTAYKIEHQAKVTQYLLDQSFVMDEESLYESSLRIEPKLPT

SEQ ID NO: 34614 - protein, 489 aa, Homo sapiens
  REGION 1..489: note = ENSP00000378228
MYSAMSPFSKATLDTSKLYVSSSFTNKIPDEGDTTPEKPEDPSALSKQSSEVSMREESDIDQNQSDDGDTETSPTKSPTTPKSVKNKNSSEFPLFSYNNGVVMTSCRELDNNRSALSAASAFAIATAGANEGTPNKEKYRRMSLASAGFPPDQRNGDKEFVIRRAATNRVLNVLRHWVSKHSQDFETNDELKCKVIGFLEEVMHDPELLTQERKAAANIIRTLTQEDPGDNQITLEEITQMAEGVKAEPFENHSALEIAEQLTLLDHLVFKKIPYEEFFGQGWMKLEKNERTPYIMKTTKHFNDISNLIASEIIRNEDINARVSAIEKWVAVADICRCLHNYNAVLEITSSMNRSAIFRLKKTWLKVSKQTKALIDKLQKLVSSEGRFKNLREALKNCDPPCVPYLGMYLTDLAFIEEGTPNYTEDGLVNFSKMRMISHIIREIRQFQQTAYKIEHQAKVTQYLLDQSFVMDEESLYESSLRIEPKLPT

SEQ ID NO: 34615 - protein, 797 aa, Homo sapiens
  REGION 1..797: note = ENSP00000310244
MGTLGKAREAPRKPSHGCRAASKARLEAKPANSPFPSHPSLAHITQFRMMVSLGHLAKGASLDDLIDSCIQSFDADGNLCRSNQLLQVMLTMHRIVISSAELLQKVITLYKDALAKNSPGLCLKICYFVRYWITEFWVMFKMDASLTDTMEEFQELVKAKGEELHCRLIDTTQINARDWSRKLTQRIKSNTSKKRKVSLLFDHLEPEELSEHLTYLEFKSFRRISFSDYQNYLVNSCVKENPTMERSIALCNGISQWVQLMVLSRPTPQLRAEVFIKFIQVAQKLHQLQNFNTLMAVIGGLCHSSISRLKETSSHVPHEINKVLGEMTELLSSSRNYDNYRRAYGECTDFKIPILGVHLKDLISLYEAMPDYLEDGKVNVHKLLALYNHISELVQLQEVAPPLEANKDLVHLLTLSLDLYYTEDEIYELSYAREPRNHRAPPLTPSKPPVVVDWASGVSPKPDPKTISKHVQRMVDSVFKNYDHDQDGYISQEEFEKIAASFPFSFCVMDKDREGLISRDEITAYFMRASSIYSKLGLGFPHNFQETTYLKPTFCDNCAGFLWGVIKQGYRCKDCGMNCHKQCKDLVVFECKKRAKNPVAPTENNTSVGPVSNLCSLGAKDLLHAPEEGPFTFPNGEAVEHGEESKDRTIMLMGVSSQKISLRLKRAVAHKATQTESQPWIGSEGPSGPFVLSSPRKTAQDTLYVLPSPTSPCPSPVLVRKRAFVKWENKDSLIKSKEELRHLRLPTYQELEQEINTLKADNDALKIQLKYAQKKIESLQLEKSNHVLAQMEQGDCS

SEQ ID NO: 34616 - protein, 811 aa, Homo sapiens
  REGION 1..811: note = ENSP00000453583
IPFLSNLPSERGAARLSPHCLLSFPRKPSHGCRAASKARLEAKPANSPFPSHPSLAHITQFRMMVSLGHLAKGASLDDLIDSCIQSFDADGNLCRSNQLLQVMLTMHRIVISSAELLQKVITLYKDALAKNSPGLCLKICYFVRYWITEFWVMFKMDASLTDTMEEFQELVKAKGEELHCRLIDTTQINARDWSRKLTQRIKSNTSKKRKVSLLFDHLEPEELSEHLTYLEFKSFRRISFSDYQNYLVNSCVKENPTMERSIALCNGISQWVQLMVLSRPTPQLRAEVFIKFIQVAQKLHQLQNFNTLMAVIGGLCHSSISRLKETSSHVPHEINKVLGEMTELLSSSRNYDNYRRAYGECTDFKIPILGVHLKDLISLYEAMPDYLEDGKVNVHKLLALYNHISELVQLQEVAPPLEANKDLVHLLTLSLDLYYTEDEIYELSYAREPRNHRAPPLTPSKPPVVVDWASGVSPKPDPKTISKHVQRMVDSVFKNYDHDQDGYISQEEFEKIAASFPFSFCVMDKDREGLISRDEITAYFMRASSIYSKLGLGFPHNFQETTYLKPTFCDNCAGFLWGVIKQGYRCKDCGMNCHKQCKDLVVFECKKRAKNPVAPTENNTSVGPVSNLCSLGAKDLLHAPEEGPFTFPNGEAVEHGEESKDRTIMLMGVSSQKISLRLKRAVAHKATQTESQPWIGSEGPSGPFVLSSPRKTAQDTLYVLPSPTSPCPSPVLVRKRAFVKWENKDSLIKSKEELRHLRLPTYQELEQEINTLKADNDALKIQLKYAQKKIESLQLEKSNHVLAQMEQGDCS

SEQ ID NO: 34617 - protein, 848 aa, Homo sapiens
  REGION 1..848: note = ENSP00000452859
MKVVPTSPTPTDARRPRLGQIWITPVERTSTQAALVQGAGRRAQGTCLRPSPADGYLETPGHRKPSHGCRAASKARLEAKPANSPFPSHPSLAHITQFRMMVSLGHLAKGASLDDLIDSCIQSFDADGNLCRSNQLLQVMLTMHRIVISSAELLQKVITLYKDALAKNSPGLCLKICYFVRYWITEFWVMFKMDASLTDTMEEFQELVKAKGEELHCRLIDTTQINARDWSRKLTQRIKSNTSKKRKVSLLFDHLEPEELSEHLTYLEFKSFRRISFSDYQNYLVNSCVKENPTMERSIALCNGISQWVQLMVLSRPTPQLRAEVFIKFIQVAQKLHQLQNFNTLMAVIGGLCHSSISRLKETSSHVPHEINKVLGEMTELLSSSRNYDNYRRAYGECTDFKIPILGVHLKDLISLYEAMPDYLEDGKVNVHKLLALYNHISELVQLQEVAPPLEANKDLVHLLTLSLDLYYTEDEIYELSYAREPRNHRAPPLTPSKPPVVVDWASGVSPKPDPKTISKHVQRMVDSVFKNYDHDQDGYISQEEFEKIAASFPFSFCVMDKDREGLISRDEITAYFMRASSIYSKLGLGFPHNFQETTYLKPTFCDNCAGFLWGVIKQGYRCKDCGMNCHKQCKDLVVFECKKRAKNPVAPTENNTSVGPVSNLCSLGAKDLLHAPEEGPFTFPNGEAVEHGEESKDRTIMLMGVSSQKISLRLKRAVAHKATQTESQPWIGSEGPSGPFVLSSPRKTAQDTLYVLPSPTSPCPSPVLVRKRAFVKWENKDSLIKSKEELRHLRLPTYQELEQEINTLKADNDALKIQLKYAQKKIESLQLEKSNHVLAQMEQGDCS

SEQ ID NO: 34618 - protein, 762 aa, Homo sapiens
  REGION 1..762: note = ENSP00000388540
MGTLGKAREAPRKPSHGCRAASKARLEAKPANSPFPSHPSLAHITQFRMMVSLGHLAKGASLDDLIDSCIQSFDADGNLCRSNQLLQVMLTMHRIVISSAELLQKVITLYKDALAKNSPGLCLKICYFVRYWITEFWVMFKMDASLTDTMEEFQELVKAKGEELHCRLIDTTQINARDWSRKLTQRIKSNTSKKRKVSLLFDHLEPEELSEHLTYLEFKSFRRISFSDYQNYLVNSCVKENPTMERSIALCNGISQWVQLMVLSRPTPQLRAEVFIKFIQVAQKLHQLQNFNTLMAVIGGLCHSSISRLKETSSHVPHEINKVLGEMTELLSSSRNYDNYRRAYGECTDFKIPILGVHLKDLISLYEAMPDYLEDGKVNVHKLLALYNHISELVQLQEVAPPLEANKDLVHLLTLSLDLYYTEDEIYELSYAREPRNHRAPSVFKNYDHDQDGYISQEEFEKIAASFPFSFCVMDKDREGLISRDEITAYFMRASSIYSKLGLGFPHNFQETTYLKPTFCDNCAGFLWGVIKQGYRCKDCGMNCHKQCKDLVVFECKKRAKNPVAPTENNTSVGPVSNLCSLGAKDLLHAPEEGPFTFPNGEAVEHGEESKDRTIMLMGVSSQKISLRLKRAVAHKATQTESQPWIGSEGPSGPFVLSSPRKTAQDTLYVLPSPTSPCPSPVLVRKRAFVKWENKDSLIKSKEELRHLRLPTYQELEQEINTLKADNDALKIQLKYAQKKIESLQLEKSNHVLAQMEQGDCS

SEQ ID NO: 34619 - protein, 597 aa, Homo sapiens
  REGION 1..597: note = ENSP00000452721
MGTLGKAREAPRKPSHGCRAASKARLEAKPANSPFPSHPSLAHITQFRMMVSLGHLAKGASLDDLIDSCIQSFDADGNLCRSNQLLQVMLTMHRIVISSAELLQKVITLYKDALAKNSPGLCLKICYFVRYWITEFWVMFKMDASLTDTMEEFQELVKAKGEELHCRLIDTTQINARDWSRKLTQRIKSNTSKKRKVSLLFDHLEPEELSEHLTYLEFKSFRRISFSDYQNYLVNSCVKENPTMERSIALCNGISQWVQLMVLSRPTPQLRAEVFIKFIQVAQKLHQLQNFNTLMAVIGGLCHSSISRLKETSSHVPHEINKVLGEMTELLSSSRNYDNYRRAYGECTDFKIPILGVHLKDLISLYEAMPDYLEDGKVNVHKLLALYNHISELVQLQEVAPPLEANKDLVHLLTLSLDLYYTEDEIYELSYAREPRNHRAPSVFKNYDHDQDGYISQEEFEKIAASFPFSFCVMDKDREGLISRDEITAYFMRASSIYSKLGLGFPHNFQETTYLKPTFCDNCAGFLWGVIKQGYRCKDCGMNCHKQCKDLVVFECKKRAKNPVAPTENNTSVGPVSNLCSLGAKDLLHGNKYSESR

SEQ ID NO: 34620 - protein, 481 aa, Homo sapiens
  REGION 1..481: note = ENSP00000413105
MGTLGKAREAPRKPSHGCRAASKARLEAKPANSPFPSHPSLAHITQFRMMVSLGHLAKGASLDDLIDSCIQSFDADGNLCRSNQLLQVMLTMHRIVISSAELLQKVITLYKDALAKNSPGLCLKICYFVRYWITEFWVMFKMDASLTDTMEEFQELVKAKGEELHCRLIDTTQINARDWSRKLTQRIKSNTSKKRKVSLLFDHLEPEELSEHLTYLEFKSFRRISFSDYQNYLVNSCVKENPTMERSIALCNGISQWVQLMVLSRPTPQLRAEVFIKFIQVAQKLHQLQNFNTLMAVIGGLCHSSISRLKETSSHVPHEINKVLGEMTELLSSSRNYDNYRRAYGECTDFKIPILGVHLKDLISLYEAMPDYLEDGKVNVHKLLALYNHISELVQLQEVAPPLEANKDLVHLLTLSLDLYYTEDEIYELSYAREPRNHRAPSVFKNYDHDQDGYISQEEFEKIAASFPFSFCVMDKDSSGE

SEQ ID NO: 34621 - protein, 546 aa, Homo sapiens
  REGION 1..546: note = ENSP00000454164
MGTLGKAREAPRKPSHGCRAASKARLEAKPANSPFPSHPSLAHITQFRMMVSLGHLAKGASLDDLIDSCIQSFDADGNLCRSNQLLQVMLTMHRIVISSAELLQKVITLYKDALAKNSPGLCLKICYFVRYWITEFWVMFKMDASLTDTMEEFQELVKAKGEELHCRLIDTTQINARDWSRKLTQRIKSNTSKKRKVSLLFDHLEPEELSEHLTYLEFKSFRRISFSDYQNYLVNSCVKENPTMERSIALCNGISQWVQLMVLSRPTPQLRAEVFIKFIQVAQKLHQLQNFNTLMAVIGGLCHSSISRLKETSSHVPHEINKVLGEMTELLSSSRNYDNYRRAYGECTDFKIPILGVHLKDLISLYEAMPDYLEDGKVNVHKLLALYNHISELVQLQEVAPPLEANKDLVHLLTLSLDLYYTEDEIYELSYAREPRNHRAPSVFKNYDHDQDGYISQEEFEKIAASFPFSFCVMDKDREGLISRDEITAYFMRASSIYSKLGLGFPHNFQETTYLKPTFCDNCAGFLWGVIKQGYRCKGNKYSESR

SEQ ID NO: 34622 - protein, 123 aa, Homo sapiens
  REGION 1..123: note = ENSP00000453729
ETTYLKPTFCDNCAGFLWGVIKQGYRCKDIRILLLMLRFTDKGYIKSVSSGLHQVRRMLASLGMLSVLAPEDRTDMCDKKALHEFGCETHWGREKSERLLDPGCLVHRLRDELSQTMQRSGCV

SEQ ID NO: 34623 - protein, 217 aa, Homo sapiens
  REGION 1..217: note = ENSP00000454053
QNFNTLMAVIGGLCHSSISRLKETSSHVPHEINKVLGEMTELLSSSRNYDNYRRAYGECTDFKIPILGVHLKDLISLYEAMPDYLEDGKVNVHKLLALYNHISELVQLQEVAPPLEANKDLVHLLTLSLDLYYTEDEIYELSYAREPRNHRAPSVFKNYDHDQDGYISQEEFEKIAASFPFSFCVMDKDRAHGSNHEVAHTILPLRIKRKGRPHQQG

SEQ ID NO: 34624 - protein, 96 aa, Homo sapiens
  REGION 1..96: note = ENSP00000453905
MMVSLGHLAKGASLDDLIDSCIQSFDADGNLCRSNQLLQVMLTMHRIVISSAELLQKVITLYKDALAKNSPGLCLKICYFVRYWITEFWVMFKMDA

SEQ ID NO: 34625 - protein, 57 aa, Homo sapiens
  REGION 1..57: note = ENSP00000454005
MMVSLGHLAKGASLDDLIDSCIQSFDADGNLCRSNQLLQVMLTMHRIVISSAELLQK

SEQ ID NO: 34626 - protein, 32 aa, Homo sapiens
  REGION 1..32: note = ENSP00000452892
MMVSLGHLAKGASLDDLIDSCIQSFDADGNLC

SEQ ID NO: 34627 - protein, 797 aa, Homo sapiens [sequence omitted]

SEQ ID NO: 34628 - protein, 690 aa, Homo sapiens
  REGION 1..690: note = ENSP00000385886
MGSSGLGKAATLDELLCTCIEMFDDNGELDNSYLPRIVLLMHRWYLSSTELAEKLLCMYRNATGESCNEFRLKICYFMRYWILKFPAEFNLDLGLIRMTEEFREVASQLGYEKHVSLIDISSIPSYDWMRRVTQRKKVSKKGKACLLFDHLEPIELAEHLTFLEHKSFRRISFTDYQSYVIHGCLENNPTLERSIALFNGISKWVQLMVLSKPTPQQRAEVITKFINVAKKLLQLKNFNTLMAVVGGLSHSSISRLKETHSHLSSEVTKNWNEMTELVSSNGNYCNYRKAFADCDGFKIPILGVHLKDLIAVHVIFPDWTEENKVNIVKMHQLSVTLSELVSLQNASHHLEPNMDLINLLTLSLDLYHTEDDIYKLSLVLEPRNSKSQPTSPTTPNKPVVPLEWALGVMPKPDPTVINKHIRKLVESVFRNYDHDHDGYISQEDFESIAANFPFLDSFCVLDKDQDGLISKDEMMAYFLRAKSQLHCKMGPGFIHNFQEMTYLKPTFCEHCAGFLWGIIKQGYKCKDCGANCHKQCKDLLVLACRRFARAPSLSSGHGSLPGSPSLPPAQDEVFEFPGVTAGHRDLDSRAITLVTGSSRKISVRLQRATTSQATQTEPVWSEAGWGDSGSHTFPKMKSKFHDKAAKDKGFAKWENEKPRVHAGVDVVDRGTEFELDQDEGEETRQDGEDG

SEQ ID NO: 34629 - protein, 172 aa, Homo sapiens
  REGION 1..172: note = ENSP00000393866
MGSSGLGKAATLDELLCTCIEMFDDNGELDNSYLPRIVLLMHRWYLSSTELAEKLLCMYRNATGESCNEFRLKICYFMRYWILKFPAEFNLDLGLIRMTEEFREVASQLGYEKHVSLIDISSIPSYDWMRRVTQRKKVSKKGKACLLFDHLEPIELAEHLTFLEHKSFRRIS

SEQ ID NO: 34630 - protein, 690 aa, Homo sapiens; identical to SEQ ID NO: 34628
  REGION 1..690: note = ENSP00000384192

SEQ ID NO: 34631 - protein, 77 aa, Homo sapiens
  REGION 1..77: note = ENSP00000405648
MGSSGLGKAATLDELLCTCIEMFDDNGELDNSYLPRIVLLMHRWYLSSTELAEKLLCMYRNATGESCNEFRLKICYF

SEQ ID NO: 34632 - protein, 34 aa, Homo sapiens
  REGION 1..34: note = ENSP00000401974
MGSSGLGKAATLDELLCTCIEMFDDNGELDNSYL

SEQ ID NO: 34633 - protein, 112 aa, Homo sapiens
  REGION 1..112: note = ENSP00000400602
MGSSGLGKAATLDELLCTCIEMFDDNGELDNSYLPRIVLLMHRWYLSSTELAEKLLCMYRNATGESCNEFRLKICYFMRYWILKFPAEFNLDLGLIRMTEEFREVASQLGYE

SEQ ID NO: 34634 - protein, 113 aa, Homo sapiens
  REGION 1..113: note = ENSP00000388139
MGSSGLGKAATLDELLCTCIEMFDDNGELDNSYLPRIVLLMHRWYLSSTELAEKLLCMYRNATGESCNEFRLKICYFMRYWILKFPAEFNLDLGLIRMTEEFREVASQLGYEK

SEQ ID NO: 34635 - protein, 689 aa, Homo sapiens
  REGION 1..689: note = ENSP00000383917
MGSSGLGKAATLDELLCTCIEMFDDNGELDNSYLPRIVLLMHRWYLSSTELAEKLLCMYRNATGESCNEFRLKICYFMRYWILKFPAEFNLDLGLIRMTEEFREVASQLGYEKHVSLIDISSIPSYDWMRRVTQRKKVSKKGKACLLFDHLEPIELAEHLTFLEHKSFRRISFTDYQSYVIHGCLENNPTLERSIALFNGISKWVQLMVLSKPTPQQRAEVITKFINVAKKLLQLKNFNTLMAVVGGLSHSSISRLKETHSHLSSEVTKNWNEMTELVSSNGNYCNYRKAFADCDGFKIPILGVHLKDLIAVHVIFPDWTEENKVNIVKMHQLSVTLSELVSLQNASHHLEPNMDLINLLTLSLDLYHTEDDIYKLSLVLEPRNSKSPTSPTTPNKPVVPLEWALGVMPKPDPTVINKHIRKLVESVFRNYDHDHDGYISQEDFESIAANFPFLDSFCVLDKDQDGLISKDEMMAYFLRAKSQLHCKMGPGFIHNFQEMTYLKPTFCEHCAGFLWGIIKQGYKCKDCGANCHKQCKDLLVLACRRFARAPSLSSGHGSLPGSPSLPPAQDEVFEFPGVTAGHRDLDSRAITLVTGSSRKISVRLQRATTSQATQTEPVWSEAGWGDSGSHTFPKMKSKFHDKAAKDKGFAKWENEKPRVHAGVDVVDRGTEFELDQDEGEETRQDGEDG

SEQ ID NO: 34636 - protein, 138 aa, Homo sapiens
  REGION 1..138: note = ENSP00000409593
ADCDGFKIPILGVHLKDLIAVHVIFPDWTEENKVNIVKMHQLSVTLSELVSLQNASHHLEPNMDLINLLTLSLDLYHTEDDIYKLSLVLEPRNSKSQPTSPTTPNKPVVPLEWALGVMPKPDPTVINKHIRKLVEVSG

SEQ ID NO: 34637 - protein, 963 aa, Homo sapiens
  REGION 1..963: note = ENSP00000222145
MLSGERKEGGSPRFGKLHLPVGLWINSPRKQLAKLGRRWPSAASVKSSSSDTGSRSSEPLPPPPPHVELRRVGAVKAAGGASGSRAKRISQLFRGSGTGTTGSSGAGGPGTPGGAQRWASEKKLPELAAGVAPEPPLATRATAPPGVLKIFGAGLASGANYKSVLATARSTARELVAEALERYGLAGSPGGGPGESSCVDAFALCDALGRPAAAGVGSGEWRAEHLRVLGDSERPLLVQELWRARPGWARRFELRGREEARRLEQEAFGAADSEGTGAPSWRPQKNRSRAASGGAALASPGPGTGSGAPAGSGGKERSENLSLRRSVSELSLQGRRRRQQERRQQALSMAPGAADAQIGTADPGDFDQLTQCLIQAPSNRPYFLLLQGYQDAQDFVVYVMTREQHVFGRGGNSSGRGGSPAPYVDTFLNAPDILPRHCTVRAGPEHPAMVRPSRGAPVTHNGCLLLREAELHPGDLLGLGEHFLFMYKDPRTGGSGPARPPWLPARPGATPPGPGWAFSCRLCGRGLQERGEALAAYLDGREPVLRFRPREEEALLGEIVRAAAAGSGDLPPLGPATLLALCVQHSARELELGHLPRLLGRLARLIKEAVWEKIKEIGDRQPENHPEGVPEVPLTPEAVSVELRPLMLWMANTTELLSFVQEKVLEMEKEADQEDPQLCNDLELCDEAMALLDEVIMCTFQQSVYYLTKTLYSTLPALLDSNPFTAGAELPGPGAELGAMPPGLRPTLGVFQAALELTSQCELHPDLVSQTFGYLFFFSNASLLNSLMERGQGRPFYQWSRAVQIRTNLDLVLDWLQGAGLGDIATEFFRKLSMAVNLLCVPRTSLLKASWSSLRTDHPTLTPAQLHHLLSHYQLGPGRGPPAAWDPPPAEREAVDTGDIFESFSSHPPLILPLGSSRLRLTGPVTDDALHRELRRLRRLLWDLEQQELPANYRHGPPVATSP

SEQ ID NO: 34638 - protein, 182 aa, Homo sapiens
  REGION 1..182: note = ENSP00000471633
  VARIANT 1: note = Any amino acid
XGREEARRLEQEAFGAADSEGTGAPSWRPQKNRSRAASGGAALASPGPGTGSGAPAGSGGKERSENLSLRRSVSELSLQGRRRRQQERRQQALSMAPGAADAQIGTADPGDFDQLTQCLIQAPSNRPYFLLLQGYQDAQTLYSTLPALLDSNPFTAGAELPGPGAELGAMPPGLRPTLGVFQ

SEQ ID NO: 34639 - protein, 248 aa, Homo sapiens
  REGION 1..248: note = ENSP00000248706
MRLIQNMCTIAEYPAPGNAAASDCCVGAAGRRLVKIAVVGASGVGKTALVVRFLTKRFIGDYERNAGNLYTRQVQIEGETLALQVQDTPGIQVHENSLSCSEQLNRCIRWADAVVIVFSITDYKSYELISQLHQHVQQLHLGTRLPVVVVANKADLLHIKQVDPQLGLQLASMLGCSFYEVSVSENYNDVYSAFHVLCKEVSHKQQPSSTPEKRRTSLIPRPKSPNMQDLKRRFKQALSAKVRTVTSV

SEQ ID NO: 34640 - protein, 266 aa, Homo sapiens
  REGION 1..266: note = ENSP00000220062
MSSVFGKPRAGSGPQSAPLEVNLAILGRRGAGKSALTVKFLTKRFISEYDPNLEDTYSSEETVDHQPVHLRVMDTADLDTPRNCERYLNWAHAFLVVYSVDSRQSFDSSSSYLELLALHAKETQRSIPALLLGNKLDMAQYRQVTKAEGVALAGRFGCLFFEVSACLDFEHVQHVFHEAVREARRELEKSPLTRPLFISEERALPHQAPLTARHGLASCTFNTLSTINLKEMPTVAQAKLVTVKSSRAQSKRKAPTLTLLKGFKIF

SEQ ID NO: 34641 - protein, 247 aa, Homo sapiens
  REGION 1..247: note = ENSP00000390028
MSSVFGKPRAGSGPQSAPLEVNLAILGRRGAGKSEDTYSSEETVDHQPVHLRVMDTADLDTPRNCERYLNWAHAFLVVYSVDSRQSFDSSSSYLELLALHAKETQRSIPALLLGNKLDMAQYRQVTKAEGVALAGRFGCLFFEVSACLDFEHVQHVFHEAVREARRELEKSPLTRPLFISEERALPHQAPLTARHGLASCTFNTLSTINLKEMPTVAQAKLVTVKSSRAQSKRKAPTLTLLKGFKIF

SEQ ID NO: 34642 - protein, 255 aa, Homo sapiens
  REGION 1..255: note = ENSP00000412787
MVIMGPELVGSWSDFKNEAADPRALTVKFLTKRFISEYDPNLEDTYSSEETVDHQPVHLRVMDTADLDTPRNCERYLNWAHAFLVVYSVDSRQSFDSSSSYLELLALHAKETQRSIPALLLGNKLDMAQYRQVTKAEGVALAGRFGCLFFEVSACLDFEHVQHVFHEAVREARRELEKSPLTRPLFISEERALPHQAPLTARHGLASCTFNTLSTINLKEMPTVAQAKLVTVKSSRAQSKRKAPTLTLLKGFKIF

SEQ ID NO: 34643 - protein, 326 aa, Homo sapiens
  REGION 1..326: note = ENSP00000368710
MDYSHQTSLVPCGQDKYISKNELLLHLKTYNLYYEGQNLQLRHREEEDEFIVEGLLNISWGLRRPIRLQMQDDNERIRPPPSSSSWHSGCNLGAQGTTLKPLTVPKVQISEVDAPPEGDQMPSSTDSRGLKPLQEDTPQLMRTRSDVGVRRRGNVRTPSDQRRIRRHRFSINGHFYNHKTSVFTPAYGSVTNVRINSTMTTPQVLKLLLNKFKIENSAEEFALYVVHTSGEKQKLKATDYPLIARILQGPCEQISKVFLMEKDQVEEVTYDVAQYIKFEMPVLKSFIQKLQEEEDREVKKLMRKYTVLRLMIRQRLEEIAETPATI

SEQ ID NO: 34644 - protein, 326 aa, Homo sapiens; identical to SEQ ID NO: 34643
  REGION 1..326: note = ENSP00000368684

SEQ ID NO: 34645 - protein, 322 aa, Homo sapiens [sequence omitted]

SEQ ID NO: 34646 - protein, 63 aa, Homo sapiens
  REGION 1..63: note = ENSP00000413789
MAASGEPQRQWQEEVAAVVVVGSCMTDLVRRMCMRICYVHFCCQPTPQLQNCSSLCVITCQEN

SEQ ID NO: 34647 - protein, 147 aa, Homo sapiens
  REGION 1..147: note = ENSP00000393558
  VARIANT 1: note = Any amino acid
XNVISRAKVMVCQLEITPATSLEALTMARRSGVKTLFNPAPAIADLDPQFYTLSDVFCCNESEAEILTGLTVGSAADAGEAALVLLKRGCQVVIITLGAEGCVVLSQTEPEPKHIPTEKVKAVDTTCRPGSRPKSEAASVKKQKHYK

SEQ ID NO: 34648 - protein, 36 aa, Homo sapiens
  REGION 1..36: note = ENSP00000415975
MAASGEPQRQWQEEVAAVVVVGSCMTDLVRRYIRTQ

SEQ ID NO: 34649 - protein, 18 aa, Homo sapiens
  REGION 1..18: note = ENSP00000483033
VLSLYLFCKSKTKKNVLV

SEQ ID NO: 34650 - protein, 420 aa, Homo sapiens
  REGION 1..420: note = ENSP00000199814
MATSLGSNTYNRQNWEDADFPILCQTCLGENPYIRMTKEKYGKECKICARPFTVFRWCPGVRMRFKKTEVCQTCSKLKNVCQTCLLDLEYGLPIQVRDAGLSFKDDMPKSDVNKEYYTQNMEREISNSDGTRPVGMLGKATSTSDMLLKLARTTPYYKRNRPHICSFWVKGECKRGEECPYRHEKPTDPDDPLADQNIKDRYYGINDPVADKLLKRASTMPRLDPPEDKTITTLYVGGLGDTITETDLRNHFYQFGEIRTITVVQRQQCAFIQFATRQAAEVAAEKSFNKLIVNGRRLNVKWGRSQAARGKEKEKDGTTDSGIKLEPVPGLPGALPPPPAAEEEASANYFNLPPSGPPAVVNIALPPPPGIAPPPPPGFGPHMFHPMGPPPPFMRAPGPIHYPSQDPQRMGAHAGKHSSP

SEQ ID NO: 34651 - protein, 371 aa, Homo sapiens
  REGION 1..371: note = ENSP00000412118
MATSLGSNTYNRQNWEDADFPILCQTCLGENPYIRMTKEKYGLPIQVRDAGLSFKDDMPKSDVNKEYYTQNMEREISNSDGTRPVGMLGKATSTSDMLLKLARTTPYYKRNRPHICSFWVKGECKRGEECPYRHEKPTDPDDPLADQNIKDRYYGINDPVADKLLKRASTMPRLDPPEDKTITTLYVGGLGDTITETDLRNHFYQFGEIRTITVVQRQQCAFIQFATRQAAEVAAEKSFNKLIVNGRRLNVKWGRSQAARGKEKEKDGTTDSGIKLEPVPGLPGALPPPPAAEEEASANYFNLPPSGPPAVVNIALPPPPGIAPPPPPGFGPHMFHPMGPPPPFMRAPGPIHYPSQDPQRMGAHAGKHSSP

SEQ ID NO: 34652 - protein, 179 aa, Homo sapiens
  REGION 1..179: note = ENSP00000428154
MATSLGSNTYNRQNWEDATCLGENPYIRMTKEKYGKECKICARPFTVFRWCPGVRMRFKKTEVCQTCSKLKNVCQTCLLDLEYGLPIQVRDAGLSFKDDMPKSDVNKEYYTQNMEREISNSDGTRPVGMLGKATSTSDMLLKLARTTPYYKRNRPHICSFWVKGECKRGEECPYRHEKP

SEQ ID NO: 34653 - protein, 243 aa, Homo sapiens
  REGION 1..243: note = ENSP00000430946
MEGGGEAAHLASWQDRACGAAEGIPGRSQRGGLAWPEQEGGGRSSCGLEGRGLSQGPGTSTLSIPAPSSLLELVFFSPAACRKCRQRPLPRSGRDGLRVPAVPSSPPSLPAPSPPQVSLRCQGLRRVVLNQISHFHQDFPILCQTCLGENPYIRMTKEKYGKECKICARPFTVFRWCPGVRMRFKKTEVCQTCSKLKNVCQTCLLDLEYGLPIQVRDAGLSFKDDMPKSDVNKEYYTQNMERE

SEQ ID NO: 34654 - protein, 236 aa, Homo sapiens
  REGION 1..236: note = ENSP00000368341
MHTTQKDTTYTKIFVGGLPYHTTDASLRKYFEVFGEIEEAVVITDRQTGKSRGYGFVTMADRAAAERACKDPNPIIDGRKANVNLAYLGAKPRIMQPGFAFGVQQLHPALIQRPFGIPAHYVYPQAFVQPGVVIPHVQPTAAAASTTPYIDYTGAAYAQYSAAAAAAAAAAAYDQYPYAASPAAAGYVTAGGYGYAVQQPITAAAPGTAAAAAAAAAAAAAFGQYQPQQLQTDRMQ

SEQ ID NO: 34655 - protein, 80 aa, Homo sapiens
  REGION 1..80: note = ENSP00000426222
VITDRQTGKSRGYGFVTMADRAAAERACKDPNPIIDGRKANVNLAYLGAKPRIMQPGFAFGVQQLHPALIQRPFGDKQAG

SEQ ID NO: 34656 - protein, 178 aa, Homo sapiens
  REGION 1..178: note = ENSP00000396898
MADRAAAERACKDPNPIIDGRKANVNLAYLGAKPRIMQPGFAFGVQQLHPALIQRPFGIPAHYVYPQAFVQPGVVIPHVQPTAAAASTTPYIDYTGAAYAQYSAAAAAAAAAAAYDQYPYAASPAAAGYVTAGGYGYAVQQPITAAAPGTAAAAAAAAAAAAAFGQYQPQQLQTDRMQ

SEQ ID NO: 34657 - protein, 201 aa, Homo sapiens
  REGION 1..201: note = ENSP00000421971
  VARIANT 1: note = Any amino acid
XSRTIAIVVGECFRGWERWADVTMADRAAAERACKDPNPIIDGRKANVNLAYLGAKPRIMQPGFAFGVQQLHPALIQRPFGIPAHYVYPQAFVQPGVVIPHVQPTAAAASTTPYIDYTGAAYAQYSAAAAAAAAAAAYDQYPYAASPAAAGYVTAGGYGYAVQQPITAAAPGTAAAAAAAAAAAAAFGQYQPQQLQTDRMQ

SEQ ID NO: 34658 - protein, 191 aa, Homo sapiens
  REGION 1..191: note = ENSP00000319551
MYVCLCVSVAKVTMADRAAAERACKDPNPIIDGRKANVNLAYLGAKPRIMQPGFAFGVQQLHPALIQRPFGIPAHYVYPQAFVQPGVVIPHVQPTAAAASTTPYIDYTGAAYAQYSAAAAAAAAAAAYDQYPYAASPAAAGYVTAGGYGYAVQQPITAAAPGTAAAAAAAAAAAAAFGQYQPQQLQTDRMQ

SEQ ID NO: 34659 - protein, 843 aa, Homo sapiens
  REGION 1..843: note = ENSP00000261973
MSFPPHLNRPPMGIPALPPGIPPPQFPGFPPPVPPGTPMIPVPMSIMAPAPTVLVPTVSMVGKHLGARKDHPGLKAKENDENCGPTTTVFVGNISEKASDMLIRQLLAKCGLVLSWKRVQGASGKLQAFGFCEYKEPESTLRALRLLHDLQIGEKKLLVKVDAKTKAQLDEWKAKKKASNGNARPETVTNDDEEALDEETKRRDQMIKGAIEVLIREYSSELNAPSQESDSHPRKKKKEKKEDIFRRFPVAPLIPYPLITKEDINAIEMEEDKRDLISREISKFRDTHKKLEEEKGKKEKERQEIEKERRERERERERERERREREREREREREREKEKERERERERDRDRDRTKERDRDRDRERDRDRDRERSSDRNKDRSRSREKSRDREREREREREREREREREREREREREREREREREREKDKKRDREEDEEDAYERRKLERKLREKEAAYQERLKNWEIRERKKTREYEKEAEREEERRREMAKEAKRLKEFLEDYDDDRDDPKYYRGSALQKRLRDREKEMEADERDRKREKEELEEIRQRLLAEGHPDPDAELQRMEQEAERRRQPQIKQEPESEEEEEEKQEKEEKREEPMEEEEEPEQKPCLKPTLRPISSAPSVSSASGNATPNTPGDESPCGIIIPHENSPDQQQPEEHRPKIGLSLKLGASNSPGQPNSVKRKKLPVDSVFNKFEDEDSDDVPRKRKLVPLDYGEDDKNATKGTVNTEEKRKHIKSLIEKIPTAKPELFAYPLDWSIVDSILMERRIRPWINKKIIEYIGEEEATLVDFVCSKVMAHSSPQSILDDVAMVLDEEAEVFIVKMWRLLIYETEAKKIGLVK

SEQ ID NO: 34660 - protein, 843 aa, Homo sapiens; identical to SEQ ID NO: 34659
  REGION 1..843: note = ENSP00000431150

SEQ ID NO: 34661 - protein, 243 aa, Homo sapiens
  REGION 1..243: note = ENSP00000434333
MSFPPHLNRPPMGIPALPPGIPPPQFPGFPPPVPPGTPMIPVPMSIMAPAPTVLVPTVSMVGKHLGARKDHPGLKAKENDENCGPTTTVFVGNISEKASDMLIRQLLAKCGLVLSWKRVQGASGKLQAFGFCEYKEPESTLRALRLLHDLQIGEKKLLVKVDAKTKAQLDEWKAKKKASNGNARPETVTNDDEEALDEETKRRDQMIKGAIEVLIREYSSELNAPSQESDSHPRKKKKEKKED

SEQ ID NO: 34662 - protein, 300 aa, Homo sapiens
  REGION 1..300: note = ENSP00000436868
MSFPPHLNRPPMGIPALPPGIPPPQFPGFPPPVPPGTPMIPVPMSIMAPAPTVLVPTVSMVGKHLGARKDHPGLKAKENDENCGPTTTVFVGNISEKASDMLIRQLLAKCGLVLSWKRVQGASGKLQAFGFCEYKEPESTLRALRLLHDLQIGEKKLLVKVDAKTKAQLDEWKAKKKASNGNARPETVTNDDEEALDEETKRRDQMIKGAIEVLIREYSSELNAPSQESDSHPRKKKKEKKEDIFRRFPVAPLIPYPLITKEDINAIEMEEDKRDLISREISKFRDTHKVVFLSFHLIPI

SEQ ID NO: 34663 - protein, 294 aa, Homo sapiens
  REGION 1..294: note = ENSP00000436225
MSFPPHLNRPPMGIPALPPGIPPPQFPGFPPPVPPGTPMIPVPMSIMAPAPTVLVPTVSMVGKHLGARKDHPGLKAKENDENCGPTTTVFVGNISEKASDMLIRQLLAKCGLVLSWKRVQGASGKLQAFGFCEYKEPESTLRALRLLHDLQIGEKKLLVKVDAKTKAQLDEWKAKKKASNGNARPETVTNDDEEALDEETKRRDQMIKGAIEVLIREYSSELNAPSQESDSHPRKKKKEKKEDIFRRFPVAPLIPYPLITKEDINAIEMEEDKRDLISREISKFRDTHKRSYGD

SEQ ID NO: 34664 - protein, 127 aa, Homo sapiens
  REGION 1..127: note = ENSP00000434004
MSFPPHLNRPPMGIPALPPGIPPPQFPGFPPPVPPGTPMIPVPMSIMAPAPTVLVPTVSMVGKHLGARKDHPGLKAKENDENCGPTTTVFVGNISEKASDMLIRQLLAKCGLVLSWKRVQGASGKLQ

SEQ ID NO: 34665 - protein, 164 aa, Homo sapiens
  REGION 1..164: note = ENSP00000434444
MSFPPHLNRPPMGIPALPPGIPPPQFPGFPPPVPPGTPMIPVPMSIMAPAPTVLVPTVSMVGKHLGARKDHPGLKAKENDENCGPTTTVFVGNISEKASDMLIRQLLAPSDSVSTRSQNLPSVHSDYYMTCKLERKSYSLKLMQRQRHSWMNGKQRRKLLMGLG

SEQ ID NO: 34666 - protein, 73 aa, Homo sapiens
  REGION 1..73: note = ENSP00000434950
  VARIANT 1: note = Any amino acid
XNAPSQESDSHPRKKKKEKKEDIFRRFPVAPLIPYPLITKEDINAIEMEEDKRDLISREISKFRDTHKRSYGD

SEQ ID NO: 34667 - protein, 266 aa, Homo sapiens
  REGION 1..266: note = ENSP00000439918
MGAAAAEADRTLFVGNLETKVTEELLFELFHQAGPVIKVKIPKDKDGKPKQFAFVNFKHEVSVPYAMNLLNGIKLYGRPIKIQFRSGSSHAPQDVSLSYPQHHVGNSSPTSTSPSRYERTMDNMTSSAQIIQRSFSSPENFQRQAVMNSALRQMSYGGKFGSSPLDQSGFSPSVQSHSHSFNQSSSSQWRQGTPSSQRKVRMNSYPYLADRHYSREQRYTDHGSDHHYRGKRDDFFYEDRNHDDWSHDYDNRRDSSRDGKWRSSRH

SEQ ID NO: 34668 - protein, 267 aa, Homo sapiens
  REGION 1..267: note = ENSP00000364639
MGAAAAEADRTLFVGNLETKVTEELLFELFHQAGPVIKVKIPKDKDGKPKQFAFVNFKHEVSVPYAMNLLNGIKLYGRPIKIQFRSGSSHAPQDVSLSYPQHHVGNSSPTSTSPSSRYERTMDNMTSSAQIIQRSFSSPENFQRQAVMNSALRQMSYGGKFGSSPLDQSGFSPSVQSHSHSFNQSSSSQWRQGTPSSQRKVRMNSYPYLADRHYSREQRYTDHGSDHHYRGKRDDFFYEDRNHDDWSHDYDNRRDSSRDGKWRSSRH

SEQ ID NO: 34669 - protein, 149 aa, Homo sapiens
  REGION 1..149: note = ENSP00000440949
MGAAAAEADRTLFVGNLETKVTEELLFELFHQAGPVIKVKIPKDKDGKPKQFAFVNFKHEVSVPYAMNLLNGIKLYGRPIKIQFRSGSSHAPQDVSLSYPQHHVGNSSPTSTSPSSRYERTMDNMTSSAQIIQRSFSSPENFQRQAVVG

SEQ ID NO: 34670 - protein, 70 aa, Homo sapiens
  REGION 1..70: note = ENSP00000437847
MGAAAAEADRTLFVGNLETKVTEELLFELFHQEVVMPHKMSVCHIPNIMLEIQALPPHLLAAGTKGLWIT

SEQ ID NO: 34671 - protein, 123 aa, Homo sapiens
  REGION 1..123: note = ENSP00000437998
MGAAAAEADRTLFVGNLETKVTEELLFELFHQAGPVIKVKIPKDKDGKPKQFAFVNFKHEVSVPYAMNLLNGIKLYGRPIKIQFRSVVMPHKMSVCHIPNIMLEIQALPPHLLAAGTKGLWIT

SEQ ID NO: 34672 - protein, 220 aa, Homo sapiens
  REGION 1..220: note = ENSP00000440923
MGAAAAEADRTLFVGNLETKVTEELLFELFHQAGPVIKVKIPKDKDGKPKQFAFVNFKHEVSVPYAMNLLNGIKLYGRPIKIQFRSGSSHAPQDVSLSYPQHHVGNSSPTSTSPSRYERTMDNMTSSAQIIQRSFSSPENFQRQAVVVSSNLYTDQLSHEYGRKPAGLREFSPCATYRFSVLCTGHSSCLCFAGLSAVSSELSEFARLCLPCPPTPHNAA

SEQ ID NO: 34673 - protein, 146 aa, Homo sapiens
  REGION 1..146: note = ENSP00000445848
MDNMTSSAQIIQRSFSSPENFQRQAVMNSALRQMSYGGKFGSSPLDQSGFSPSVQSHSHSFNQSSSSQWRQGTPSSQRKVRMNSYPYLADRHYSREQRYTDHGSDHHYRGKRDDFFYEDRNHDDWSHDYDNRRDSSRDGKWRSSRH

SEQ ID NO: 34674 - protein, 146 aa, Homo sapiens; identical to SEQ ID NO: 34673
  REGION 1..146: note = ENSP00000485655

SEQ ID NO: 34675 - protein, 503 aa, Homo sapiens
  REGION 1..503: note = ENSP00000490271
  VARIANT 1: note = Any amino acid
XRPNGEKGESKRTSANKSSGAPSYSRWSSSQPHQSSSTVRAYQTSKSRVTMSPGFSSQWNSSQPAWNTYSFPRASLHYQSHASYTYCTGHPASYAPAPHPMAPPSPSTNSSSNNSSNNSSGEQLSKTNLYIRGLPPGTTDQDLIKLCQPYGKIVSTKAILDKNTNQCKGYGFVDFDSPAAAQKAVASLKANGVQAQMAKQQEQDPTNLYISNLPISMDEQELENMLKPFGHVISTRILRDANGVSRGVGFARMESTEKCEVVIQHFNGKYLKTPPGIPAPSEPLLCKFADGGQKKRQNQSKYTQNGRPWPREGEAGMALTYDPTAAIQNGFYSSPYSIATNRMIPQTSITPFIAASPVSTYQVQSTSWMPHPPYVMQPTGAVITPTMDHPMSMQPANMMGPLTQQMNHLSLGTTGTIQSQDRIMILHQLLCQYMTAAAPMQGTYIPQYTPVPPTAVSIEGVVADTSPQTVAPSSQDTSGQQQQIAVDTSNEHAPAYSYQQSKP

SEQ ID NO: 34676 - protein, 50 aa, Homo sapiens
  REGION 1..50: note = ENSP00000489718
RTSANKSSGAPSYSRWSSSQPHQDQTVNFFCKEASWHLDRNCVDSVDHFV

SEQ ID NO: 34677 - protein, 436 aa, Homo sapiens
  REGION 1..436: note = ENSP00000395592
MGKRLDQPQMYPQYTYYYPHYLQTKSYAPAPHPMAPPSPSTNSSSNNSSNNSSGEQLSKTNLYIRGLPPGTTDQDLIKLCQPYGKIVSTKAILDKNTNQCKGYGFVDFDSPAAAQKAVASLKANGVQAQMAKQQEQDPTNLYISNLPISMDEQELENMLKPFGHVISTRILRDANGVSRGVGFARMESTEKCEVVIQHFNGKYLKTPPGIPAPSEPLLCKFADGGQKKRQNQSKYTQNGRPWPREGEAGMALTYDPTAAIQNGFYSSPYSIATNRMIPQTSITPFIAASPVSTYQVQSTSWMPHPPYVMQPTGAVITPTMDHPMSMQPANMMGPLTQQMNHLSLGTTGTIQSQDRIMILHQLLCQYMTAAAPMQGTYIPQYTPVPPTAVSIEGVVADTSPQTVAPSSQDTSGQQQQIAVDTSNEHAPAYSYQQSKP

SEQ ID NO: 34678 - protein, 437 aa, Homo sapiens
  REGION 1..437: note = ENSP00000373277
MGKRLDQPQMYPQYTYYYPHYLQTKQSYAPAPHPMAPPSPSTNSSSNNSSNNSSGEQLSKTNLYIRGLPPGTTDQDLIKLCQPYGKIVSTKAILDKNTNQCKGYGFVDFDSPAAAQKAVASLKANGVQAQMAKQQEQDPTNLYISNLPISMDEQELENMLKPFGHVISTRILRDANGVSRGVGFARMESTEKCEVVIQHFNGKYLKTPPGIPAPSEPLLCKFADGGQKKRQNQSKYTQNGRPWPREGEAGMALTYDPTAAIQNGFYSSPYSIATNRMIPQTSITPFIAASPVSTYQVQSTSWMPHPPYVMQPTGAVITPTMDHPMSMQPANMMGPLTQQMNHLSLGTTGTIQSQDRIMILHQLLCQYMTAAAPMQGTYIPQYTPVPPTAVSIEGVVADTSPQTVAPSSQDTSGQQQQIAVDTSNEHAPAYSYQQSKP

SEQ ID NO: 34679 - protein, 264 aa, Homo sapiens
  REGION 1..264: note = ENSP00000391934
MGKRLDQPQMYPQYTYYYPHYLQTKQSYAPAPHPMAPPSPSTNSSSNNSSNNSSGEQLSKTNLYIRGLPPGTTDQDLIKLCQPYGKIVSTKAILDKNTNQCKGYGFVDFDSPAAAQKAVASLKANGVQAQMAKQQEQDPTNLYISNLPISMDEQELENMLKPFGHVISTRILRDANGVSRGVGFARMESTEKCEVVIQHFNGKYLKTPPGIPAPSEPLLCKFADGGQKKRQNQSKYTQNGRPWPREGEAGMALTYDPTAAIQNG

SEQ ID NO: 34680 - protein, 420 aa, Homo sapiens
  REGION 1..420: note = ENSP00000273139
MGKRLDQPQMYPQYTYYYPHYLQTKQSYAPAPHPMAPPSPSTNSSSNNSSNNSSGEQLSKTNLYIRGLPPGTTDQDLIKLCQPYGKIVSTKAILDKNTNQCKGYGFVDFDSPAAAQKAVASLKANGVQAQMAKQQEQDPTNLYISNLPISMDEQELENMLKPFGHVISTRILRDANGVSRGVGFARMESTEKCEVVIQHFNGKYLKTPPGIPAPSEPLLCKFADGGQKKRQNQSKYTQNGRPWPREGEAGMALTYDPTAAIQNGFYSSPYSIATNRMIPQTSITPFIAASPVSTYQVQSTSWMPHPPYVMQPTGAVITPTMDHPMSMQPANMMGPLTQQMNHLSLGTTGTYMTAAAPMQGTYIPQYTPVPPTAVSIEGVVADTSPQTVAPSSQDTSGQQQQIAVDTSNEHAPAYSYQQSK

SEQ ID NO: 34681 - protein, 419 aa, Homo sapiens
  REGION 1..419: note = ENSP00000373276
MGKRLDQPQMYPQYTYYYPHYLQTKSYAPAPHPMAPPSPSTNSSSNNSSNNSSGEQLSKTNLYIRGLPPGTTDQDLIKLCQPYGKIVSTKAILDKNTNQCKGYGFVDFDSPAAAQKAVASLKANGVQAQMAKQQEQDPTNLYISNLPISMDEQELENMLKPFGHVISTRILRDANGVSRGVGFARMESTEKCEVVIQHFNGKYLKTPPGIPAPSEPLLCKFADGGQKKRQNQSKYTQNGRPWPREGEAGMALTYDPTAAIQNGFYSSPYSIATNRMIPQTSITPFIAASPVSTYQGAVITPTMDHPMSMQPANMMGPLTQQMNHLSLGTTGTIQSQDRIMILHQLLCQYMTAAAPMQGTYIPQYTPVPPTAVSIEGVVADTSPQTVAPSSQDTSGQQQQIAVDTSNEHAPAYSYQQSKP

SEQ ID NO: 34682 - protein, 421 aa, Homo sapiens
  REGION 1..421: note = ENSP00000397926
MGKRLDQPQMYPQYTYYYPHYLQTKQSYAPAPHPMAPPSPSTNSSSNNSSNNSSGEQLSKTNLYIRGLPPGTTDQDLIKLCQPYGKIVSTKAILDKNTNQCKGYGFVDFDSPAAAQKAVASLKANGVQAQMAKQQEQDPTNLYISNLPISMDEQELENMLKPFGHVISTRILRDANGVSRGVGFARMESTEKCEVVIQHFNGKYLKTPPGIPAPSEPLLCKFADGGQKKRQNQSKYTQNGRPWPREGEAGMALTYDPTAAIQNGFYSSPYSIATNRMIPQTSITPFIAASPVSTYQVQSTSWMPHPPYVMQPTGAVITPTMDHPMSMQPANMMGPLTQQMNHLSLGTTGTYMTAAAPMQGTYIPQYTPVPPTAVSIEGVVADTSPQTVAPSSQDTSGQQQQIAVDTSNEHAPAYSYQQSKP

SEQ ID NO: 34683 - protein, 433 aa, Homo sapiens
  REGION 1..433: note = ENSP00000400519
MGKRLDQPQMYPQYTYYYPHYLQTKQSYAPAPHPMAPPSPSTNSSSNNSSNNSSGEQLSKTNLYIRGLPPGTTDQDLIKLCQPYGKIVSTKAILDKNTNQCKGYGFVDFDSPAAAQKAVASLKANGVQAQMAKQQEQDPTNLYISNLPISMDEQELENMLKPFGHVISTRILRDANGVSRGVGFARMESTEKCEVVIQHFNGKYLKTPPGIPAPSEPLLCKFADGGQKKRQNQSKYTQNGRPWPREGEVLRGRTVPRQNREAGMALTYDPTAAIQNGFYSSPYSIATNRMIPQTSITPFIAASPVSTYQVQSTSWMPHPPYVMQPTGAVITPTMDHPMSMQPANMMGPLTQQMNHLSLGTTGTYMTAAAPMQGTYIPQYTPVPPTAVSIEGVVADTSPQTVAPSSQDTSGQQQQIAVDTSNEHAPAYSYQQSK

SEQ ID NO: 34684 - protein, 134 aa, Homo sapiens
  REGION 1..134: note = ENSP00000232217
MTRDQNGTWEMESNENFEGYMKALDIDFATRKIAVRLTQTKVIDQDGDNFKTKTTSTFRNYDVDFTVGVEFDEYTKSLDNRHVKALVTWEGDVLVCVQKGEKENRGWKQWIEGDKLYLELTCGDQVCRQVFKKK

SEQ ID NO: 34685 - protein, 103 aa, Homo sapiens
  REGION 1..103: note = ENSP00000424333
MTRDQNGTWEMESNENFEGYMKALDIDFATRKIAVRLTQTKVIDQDGDNFKTKTTSTFRNYDVDFTVGVEFDEYTKSLDNRHVKALVTWEGDVLVCVQKGEKE

SEQ ID NO: 34686 - protein, 24 aa, Homo sapiens
  REGION 1..24: note = ENSP00000421266
MTRDQNGTWEMESNENFEGYMKAL

SEQ ID NO: 34687 - protein, 516 aa, Homo sapiens
  REGION 1..516: note = ENSP00000361828
MDPAGAADPSVPPNPLTHLSLQDRSEMQLQSEADRRSLPGTWTRSSPEHTTILRGGVRRCLQQQCEQTVRILHAKVAQKSYGNEKRFFCPPPCVYLSGPGWRVKPGQDQAHQAGETGPTVCGYMGLDSASGSATETQKLNFEQQPDSREFGCAKTLYISDADKRKHFRLVLRLVLRGGRELGTFHSRLIKVISKPSQKKQSLKNTDLCISSGSKVSLFNRLRSQTVSTRYLSVEDGAFVASARQWAAFTLHLADGHSAQGDFPPREGYVRYGSLVQLVCTVTGITLPPMIIRKVAKQCALLDVDEPISQLHKCAFQFPGSPPGGGGTYLCLATEKVVQFQASPCPKEANRALLNDSSCWTIIGTESVEFSFSTSLACTLEPVTPVPLISTLELSGGGDVATLELHGENFHAGLKVWFGDVEAETMYSPRSLVCVVPDVAAFCSDWRWLRAPITIPMSLVRADGLFYPSAFSFTYTPEYSVRPGHPGVPEPATDADALLESIHQEFTRTNFHLFIQT

SEQ ID NO: 34688 - protein, 471 aa, Homo sapiens
  REGION 1..471: note = ENSP00000361826
MDPAGAADPSVPPNPLTHLSLQDRSEMQLQSEADRRSLPGTWTRSSPEHTTILRGGVRRCLQQQCEQTVRILHAKVAQKSYGNEKRFFCPPPCVYLSGPGWRVKPGQDQAHQAGETGPTVCGYMGLDSASGSATETQKLNFEQQPDSREFGCAKTLYISDADKRKHFRLVLRLVLRGGRELGTFHSRLIKVISKPSQKKQSLKNTDLCISSGSKVSLFNRLRSQTVSTRYLSVEDGAFVASARQWAAFTLHLADGHSAQGDFPPREGYVRYGSLVQLVCTVTGITLPPMIIRKVAKQCALLDVDEPISQLHKCAFQFPGSPPGGGGTYLCLATEKVVQFQASPCPKEANRALLNDSSCWTIIGTESVEFSFSTSLACTLEPVTPVPLISTLELSGGGDVATLELHGENFHAGLKVWFGDVEAETMYRYGVEPAVPGVRGAGRGGLLQRLALAARSHHNPHEPGARRRALLP

SEQ ID NO: 34689 - protein, 517 aa, Homo sapiens
  REGION 1..517: note = ENSP00000341243
MDPAGAADPSVPPNPLTHLSLQDRSEMQLQSEADRRSLPGTWTRSSPEHTTILRGGVRRCLQQQCEQTVRILHAKVAQKSYGNEKRFFCPPPCVYLSGPGWRVKPGQDQAHQAGETGPTVCGYMGLDSASGSATETQKLNFEQQPDSREFGCAKTLYISDADKRKHFRLVLRLVLRGGRELGTFHSRLIKVISKPSQKKQSLKNTDLCISSGSKVSLFNRLRSQTVSTRYLSVEDGAFVASARQWAAFTLHLADGHSAQGDFPPREGYVRYGSLVQLVCTVTGITLPPMIIRKVAKQCALLDVDEPISQLHKCAFQFPGSPPGGGGTYLCLATEKVVQFQASPCPKEANRALLNDSSCWTIIGTESVEFSFSTSLACTLEPVTPVPLISTLELSGGGDVATLELHGENFHAGLKVWFGDVEAETMYRSPRSLVCVVPDVAAFCSDWRWLRAPITIPMSLVRADGLFYPSAFSFTYTPEYSVRPGHPGVPEPATDADALLESIHQEFTRTNFHLFIQT

SEQ ID NO: 34690 - protein, 184 aa, Homo sapiens
  REGION 1..184: note = ENSP00000483978
  VARIANT 1: note = Any amino acid
XDGHSAQGDFPPREGYVRYGSLVQLVCTVTGITLPPMIIRKVAKQCALLDVDEPISQLHKCAFQFPGSPPGGGGTYLCLATEKVVQFQHQPGVYPGAGHSGASHQHPRAERRGRRGHAGAPRRELPRGAQGVVWGRGGRNHVQEPAVPGVRGAGRGGLLQRLALAARSHHNPHEPGARRRALLP

SEQ ID NO: 34691 - protein, 98 aa, Homo sapiens
  REGION 1..98: note = ENSP00000456720
MAKSKLMATPNPSNVHPALGAHFIARDPYDLMGAALIPASPEAWAPYPLYTTELTPAISHAAFTYPTATAAAAALHAQVRWYPSSDTTQQGWKYRQFC

SEQ ID NO: 34692 - protein, 209 aa, Homo sapiens
  REGION 1..209: note = ENSP00000300069
MSNLKPDGEHGGSTGTGSGAGSGGALEEEVRTLFVSGLPVDIKPRELYLLFRPFKGYEGSLIKLTARQPVGFVIFDSRAGAEAAKNALNGIRFDPENPQTLRLEFAKANTKMAKSKLMATPNPSNVHPALGAHFIARDPYDLMGAALIPASPEAWAPYPLYTTELTPAISHAAFTYPTATAAAAALHAQVRWYPSSDTTQQGWKYRQFC

SEQ ID NO: 34693 - protein, 197 aa, Homo sapiens [sequence omitted]

SEQ ID NO: 34694 - protein, 243 aa, Homo sapiens
  REGION 1..243: note = ENSP00000360425
MRGESYFIGMRSPGQQGHVPEDGGLFLLCCIDRDWAVTRCFAEEAFQAITDFNDLPNSLFACNVHQSVFEGEESKEKFEGLFRTYDDCVTFQLFKSFRRVRINFSNPKSAARARIELHETQFRGKKLKLYFAQVQTPETDGDKLHLAPPQPAKQFLISPPSSPPVGWQPINDATPVLNYDLLYAVAKLGPGEKYELHAGTESTPSVVVHVCDSDIEEEEDPKTSPKPKIIQTRRPGLPPSVSN

SEQ ID NO: 34695 - protein, 243 aa, Homo sapiens; identical to SEQ ID NO: 34694
  REGION 1..243: note = ENSP00000305223

SEQ ID NO: 34696 - protein, 224 aa, Homo sapiens
  REGION 1..224: note = ENSP00000384317
MPAPSMDCDVSTLVACVVDVEVFTNQEVKEKFEGLFRTYDDCVTFQLFKSFRRVRINFSNPKSAARARIELHETQFRGKKLKLYFAQVQTPETDGDKLHLAPPQPAKQFLISPPSSPPVGWQPINDATPVLNYDLLYAVAKLGPGEKYELHAGTESTPSVVVHVCDSDIEEEEDPKTSPKPKIIQTRRPGLPPSVSNAACSFSIIAVSSLSCFFPLLFVKKNCL

SEQ ID NO: 34697 - protein, 58 aa, Homo sapiens
  REGION 1..58: note = ENSP00000436482
MLPRDERRFKAADLNGDLTATREEFTAFLHPEEFEHMKEIVVLETLEDIDKNGDGFVD

SEQ ID NO: 34698 - protein, 280 aa, Homo sapiens
  REGION 1..280: note = ENSP00000436422
MTGGEGPLPTAKQATCSPPSSRERNPRRRGSRPRKIVDRIDNDGDGFVTTEELKTWIKRVQKRYIFDNVAKVWKDYDRDKDDKISWEEYKQATYGYYLGNPAEFHDSSDHHTFKKMLPRDERRFKAADLNGDLTATREEFTAFLHPEEFEHMKEIVVLETLEDIDKNGDGFVDQDEYIADMFSHEENGPEPDWVLSEREQFNEFRDLNKDGKLDKDEIRHWILPQDYDHAQAEARHLVYESDKNKDEKLTKEEILENWNMFVGSQATNYGEDLTKNHDEL

SEQ ID NO: 34699 - protein, 331 aa, Homo sapiens
  REGION 1..331: note = ENSP00000054950
MARGGRGRRLGLALGLLLALVLAPRVLRAKPTVRKERVVRPDSELGERPPEDNQSFQYDHEAFLGKEDSKTFDQLTPDESKERLGKIVDRIDNDGDGFVTTEELKTWIKRVQKRYIFDNVAKVWKDYDRDKDDKISWEEYKQATYGYYLGNPAEFHDSSDHHTFKKMLPRDERRFKAADLNGDLTATREEFTAFLHPEEFEHMKEIVVLETLEDIDKNGDGFVDQDEYIADMFSHEENGPEPDWVLSEREQFNEFRDLNKDGKLDKDEIRHWILPQDYDHAQAEARHLVYESDKNKDEKLTKEEILENWNMFVGSQATNYGEDLTKNHDEL

SEQ ID NO: 34700 - protein, 19 aa, Homo sapiens
  REGION 1..19: note = ENSP00000433249
MLPRDERRFKAADLNGDLT

SEQ ID NO: 34701 - protein, 57 aa, Homo sapiens
  REGION 1..57: note = ENSP00000436427
  VARIANT 1: note = Any amino acid
XETLEDIDKNGDGFVDQDEYIDKETSGSVTELSQKPGFIFWLLNSVLSTPPHGLHHE

SEQ ID NO: 34702 - protein, 28 aa, Homo sapiens
  REGION 1..28: note = ENSP00000433237
EILENWNMFVGSQATNYGEDLTKNHDEL

SEQ ID NO: 34703 - protein, 317 aa, Homo sapiens
  REGION 1..317: note = ENSP00000378349
MRLGPRTAALGLLLLCAAAAGAGKAEELHYPLGERRSDYDREALLGVQEDVDEYVKLGHEEQQKRLQAIIKKIDLDSDGFLTESELSSWIQMSFKHYAMQEAKQQFVEYDKNSDDTVTWDEYNIQMYDRVIDFDENTALDDAEEESFRKLHLKDKKRFEKANQDSGPGLSLEEFIAFEHPEEVDYMTEFVIQEALEEHDKNGDGFVSLEEFLGDYRWDPTANEDPEWILVEKDRFVNDYDKDNDGRLDPQELLPWVVPNNQGIAQEEALHLIDEMDLNGDKKLSEEEILENPDLFLTSEATDYGRQLHDDYFYHDEL

SEQ ID NO: 34704 - protein, 335 aa, Homo sapiens
  REGION 1..335: note = ENSP00000319739
MRLGPRTAALGLLLLCAAAAGAGKAEELHYPLGERRSDYDREALLGVQEDVDEYVKLGHEEQQKRLQAIIKKIDLDSDGFLTESELSSWIQMSFKHYAMQEAKQQFVEYDKNSDDTVTWDEYNIQMYDRVIDFDENTALDDAEEESFRKEFAICKKQSFCFWLLRFNLHLKDKKRFEKANQDSGPGLSLEEFIAFEHPEEVDYMTEFVIQEALEEHDKNGDGFVSLEEFLGDYRWDPTANEDPEWILVEKDRFVNDYDKDNDGRLDPQELLPWVVPNNQGIAQEEALHLIDEMDLNGDKKLSEEEILENPDLFLTSEATDYGRQLHDDYFYHDEL

SEQ ID NO: 34705 - protein, 216 aa, Homo sapiens
  REGION 1..216: note = ENSP00000378347
MRLGPRTAALGLLLLCAAAAGAGKAEELHYPLGERRSDYDREALLGVQLHLKDKKRFEKANQDSGPGLSLEEFIAFEHPEEVDYMTEFVIQEALEEHDKNGDGFVSLEEFLGDYRWDPTANEDPEWILVEKDRFVNDYDKDNDGRLDPQELLPWVVPNNQGIAQEEALHLIDEMDLNGDKKLSEEEILENPDLFLTSEATDYGRQLHDDYFYHDEL

SEQ ID NO: 34706 - protein, 155 aa, Homo sapiens
  REGION 1..155: note = ENSP00000453052
  VARIANT 1: note = Any amino acid
XGLLLLCAAAAGAGKAEELHYPLGERRSDYDREALLGVQEDVDEYVKLGHEEQQKRLQAIIKKIDLDSDGFLTESELSSWIQMSFKHYAMQEAKQQFVEYDKNSDDTVTWDEYNIQMYDRVIDFDENTALDDAEEESFRKHQCGGLGLHPQSQSA

SEQ ID NO: 34707 - protein, 971 aa, Homo sapiens
  REGION 1..971: note = ENSP00000367202
MATVRASLRGALLLLLAVAGVAEVAGGLAPGSAGALCCNHSKDNQMCRDVCEQIFSSKSESRLKHLLQRAPDYCPETMVEIWNCMNSSLPGVFKKSDGWVGLGCCELAIALECRQACKQASSKNDISKVCRKEYENALFSCISRNEMGSVCCSYAGHHTNCREYCQAIFRTDSSPGPSQIKAVENYCASISPQLIHCVNNYTQSYPMRNPTDSLYCCDRAEDHACQNACKRILMSKKTEMEIVDGLIEGCKTQPLPQDPLWQCFLESSQSVHPGVTVHPPPSTGLDGAKLHCCSKANTSTCRELCTKLYSMSWGNTQSWQEFDRFCEYNPVEVSMLTCLADVREPCQLGCRNLTYCTNFNNRPTELFRSCNAQSDQGAMNDMKLWEKGSIKMPFINIPVLDIKKCQPEMWKAIACSLQIKPCHSKSRGSIICKSDCVEILKKCGDQNKFPEDHTAESICELLSPTDDLKNCIPLDTYLRPSTLGNIVEEVTHPCNPNPCPANELCEVNRKGCPSGDPCLPYFCVQGCKLGEASDFIVRQGTLIQVPSSAGEVGCYKICSCGQSGLLENCMEMHCIDLQKSCIVGGKRKSHGTSFSIDCNVCSCFAGNLVCSTRLCLSEHSSEDDRRTFTGLPCNCADQFVPVCGQNGRTYPSACIARCVGLQDHQFEFGSCMSKDPCNPNPCQKNQRCIPKPQVCLTTFDKFGCSQYECVPRQLACDQVQDPVCDTDHMEHNNLCTLYQRGKSLSYKGPCQPFCRATEPVCGHNGETYSSVCAAYSDRVAVDYYGDCQAVGVLSEHSSVAECASVKCPSLLAAGCKPIIPPGACCPLCAGMLRVLFDKEKLDTIAKVTNKKPITVLEILQKIRMHVSVPQCDVFGYFSIESEIVILIIPVDHYPKALQIEACNKEAEKIESLINSDSPTLASHVPLSALIISQVQVSSSVPSAGVRARPSCHSLLLPLSLGLALHLLWTYN

SEQ ID NO: 34708 - protein, 201 aa, Homo sapiens
  REGION 1..201: note = ENSP00000165698
MVSWIISRLVVLIFGTLYPAYYSYKAVKSKDIKEYVKWMMYWIIFALFTTAETFTDIFLCWFPFYYELKIAFVAWLLSPYTKGSSLLYRKFVHPTLSSKEKEIDDCLVQAKDRSYDALVHFGKRGLNVAATAAVMAASKGQGALSERLRSFSMQDLTTIRGDGAPAPSGPPPPGSGRASGKHGQPKMSRSASESASSSGTA

SEQ ID NO: 34709 - protein, 284 aa, Homo sapiens
  REGION 1..284: note = ENSP00000438346
MVSWIISRLVVLIFGTLYPAYYSYKAVKSKDIKEYVKWMMYWIIFALFTTAETFTDIFLCWFPFYYELKIAFVAWLLSPYTKGSSLLYRKFVHPTLSSKEKEIDDCLVQAKDRSYDALVHFGKRGLNVAATAAVMAASKGQGALSERLRSFSMQDLTTIRGDGAPAPSGPPPPGSGRASGKHGQPKMSRSASESASSSVCTCCSTCRTWKVVEGDVNEGGMKAWEPHQVQNPLAFSDDEEEDLLDFMYKYKAPRRMELPLEAPPRILRSRFRKKSTSSSATETT

SEQ ID NO: 34710 - protein, 174 aa, Homo sapiens
  REGION 1..174: note = ENSP00000437567
MDHLQAGGVKWMMYWIIFALFTTAETFTDIFLCWFPFYYELKIAFVAWLLSPYTKGSSLLYRKFVHPTLSSKEKEIDDCLVQAKDRSYDALVHFGKRGLNVAATAAVMAASKGQGALSERLRSFSMQDLTTIRGDGAPAPSGPPPPGSGRASGKHGQPKMSRSASESASSSGTA

SEQ ID NO: 34711 - protein, 143 aa, Homo sapiens
  REGION 1..143: note = ENSP00000442681
MVSWIISRLVVLIFGTLYPAYYSYKAVKSKDIKEYVKWMMYWIIFALFTTAETFTDIFLCWDRVPYRRDCGASACRTSPPSGETAPLLPRAPHHRGLGGPAANTASLRCPGVLLRALAAQAPPRILRSRFRKKSTSSSATETT

SEQ ID NO: 34712 - protein, 208 aa, Homo sapiens
  REGION 1..208: note = ENSP00000392197
MQKVLSNGQTEEVRSGSRLIFGTLYPAYYSYKAVKSKDIKEYVKWMMYWIIFALFTTAETFTDIFLCWFPFYYELKIAFVAWLLSPYTKGSSLLYRKFVHPTLSSKEKEIDDCLVQAKDRSYDALVHFGKRGLNVAATAAVMAASKGQGALSERLRSFSMQDLTTIRGDGAPAPSGPPPPGSGRASGKHGQPKMSRSASESASSSGTA

SEQ ID NO: 34713 - protein, 147 aa, Homo sapiens
  REGION 1..147: note = ENSP00000475269
  VARIANT 1: note = Any amino acid
XSYKAVKSKDIKEYVKWMMYWIIFALFTTAETFTDIFLCWFPFYYELKIAFVAWLLSPYTKGSSLLYRKFVHPTLSSKEKEIDDCLVQAKDRSYDALVHFGKRGLNVAATAAVMAASKVLCWKYHNYMSLSPSSVPCSSPVRPHRTG

SEQ ID NO: 34714 - protein, 3460 aa, Homo sapiens [sequence omitted]
